United States Patent Application Publication US 2005/0118625 A1 - sequence listing, part 10

SEQ ID NO: 190249 - DNA, 25 bp, Probe Sequence
cggcagatccctcaggaaacctgct

SEQ ID NO: 190250 - DNA, 25 bp, Probe Sequence
cggctacactgcccggagaattctc

SEQ ID NO: 190251 - DNA, 25 bp, Probe Sequence
ctggttacatggaggggattgatca

SEQ ID NO: 190252 - DNA, 25 bp, Probe Sequence
cggcttaatcagagtgtggcataga

SEQ ID NO: 190253 - DNA, 25 bp, Probe Sequence
ctggattatacgtgctcttgatgag

SEQ ID NO: 190254 - DNA, 25 bp, Probe Sequence
ctggatatatcaagactgagttgat

SEQ ID NO: 190255 - DNA, 25 bp, Probe Sequence
ctggaattcagtataatggcatcac

SEQ ID NO: 190256 - DNA, 25 bp, Probe Sequence
ctggaattcattttccacgttctag

SEQ ID NO: 190257 - DNA, 25 bp, Probe Sequence
ctggacaaatagtggcagcgctttc

SEQ ID NO: 190258 - DNA, 25 bp, Probe Sequence
ctggagaggaaggggcaccacccac

SEQ ID NO: 190259 - DNA, 25 bp, Probe Sequence
ctggaagtgaatgtgcgatcccgca

SEQ ID NO: 190260 - DNA, 25 bp, Probe Sequence
ctggaagggatcctgcttccgtcag

SEQ ID NO: 190261 - DNA, 25 bp, Probe Sequence
ctggaagggatcctgcttccgtcag

SEQ ID NO: 190262 - DNA, 25 bp, Probe Sequence
ctggaagggatcctgcttccgtcag

SEQ ID NO: 190263 - DNA, 25 bp, Probe Sequence
cggactgtgaatccgctctttgtcg

SEQ ID NO: 190264 - DNA, 25 bp, Probe Sequence
ctggaagtgagatctgcctgtccgg

SEQ ID NO: 190265 - DNA, 25 bp, Probe Sequence
ctggaggagatctatctcttctccc

SEQ ID NO: 190266 - DNA, 25 bp, Probe Sequence
ctggaggagtcggggtctcagcaga

SEQ ID NO: 190267 - DNA, 25 bp, Probe Sequence
ctggaggggctgccgtgactccaga

SEQ ID NO: 190268 - DNA, 25 bp, Probe Sequence
ctggttgtgagttgcagctgtcccg

SEQ ID NO: 190269 - DNA, 25 bp, Probe Sequence
ctggttttgtgctggcactgcactg

SEQ ID NO: 190270 - DNA, 25 bp, Probe Sequence
ctggattatgttccttcacagccat

SEQ ID NO: 190271 - DNA, 25 bp, Probe Sequence
ctggatgacgtgtccttgacacatc

SEQ ID NO: 190272 - DNA, 25 bp, Probe Sequence
ctggacagctgaacactctgaacaa

SEQ ID NO: 190273 - DNA, 25 bp, Probe Sequence
ctggacatgcagaatcgactcaata

SEQ ID NO: 190274 - DNA, 25 bp, Probe Sequence
ctggacatgctgatctgttaatgat

SEQ ID NO: 190275 - DNA, 25 bp, Probe Sequence
ctggcacatcacacatgttaaaatt

SEQ ID NO: 190276 - DNA, 25 bp, Probe Sequence
cggcatctagccatgcttaaacatt

SEQ ID NO: 190277 - DNA, 25 bp, Probe Sequence
ctggctgaagctttgcccaaacaat

SEQ ID NO: 190278 - DNA, 25 bp, Probe Sequence
ctggctacgctcttccaaaagcgca

SEQ ID NO: 190279 - DNA, 25 bp, Probe Sequence
ctggctacgctcttccaaaagcgca

SEQ ID NO: 190280 - DNA, 25 bp, Probe Sequence
ctggccaactcacacaggtagcgcc

SEQ ID NO: 190281 - DNA, 25 bp, Probe Sequence
ctggaacacagggacgcctggctgc

SEQ ID NO: 190282 - DNA, 25 bp, Probe Sequence
ctggaccacgtggacaggatccggt

SEQ ID NO: 190283 - DNA, 25 bp, Probe Sequence
ctggacactagggtcaggcggggtg

SEQ ID NO: 190284 - DNA, 25 bp, Probe Sequence
cggctcacacagcgaaggaggggct

SEQ ID NO: 190285 - DNA, 25 bp, Probe Sequence
cggccgaccagcaagagcgagaggg

SEQ ID NO: 190286 - DNA, 25 bp, Probe Sequence
cggcctgcatgcctacgaaaaggag

SEQ ID NO: 190287 - DNA, 25 bp, Probe Sequence
agagttgatacctgcagtcagcctg

SEQ ID NO: 190288 - DNA, 25 bp, Probe Sequence
cggcctgcatgaggatgacgagacc

SEQ ID NO: 190289 - DNA, 25 bp, Probe Sequence
cggcctgcatgaggatgacgagacc

SEQ ID NO: 190290 - DNA, 25 bp, Probe Sequence
ctggctcatatacatgttgagatgg

SEQ ID NO: 190291 - DNA, 25 bp, Probe Sequence
ctggccatgaagtgaggagatggtt

SEQ ID NO: 190292 - DNA, 25 bp, Probe Sequence
ctggcctacgtgaagcggtggcttt

SEQ ID NO: 190293 - DNA, 25 bp, Probe Sequence
cggcgcttcgtggagcaggtggcgc

SEQ ID NO: 190294 - DNA, 25 bp, Probe Sequence
cggcgcttcgtggagcaggtggcgc

SEQ ID NO: 190295 - DNA, 25 bp, Probe Sequence
cggcgctaaggatgactctggtcag

SEQ ID NO: 190296 - DNA, 25 bp, Probe Sequence
ctggagctaaggagtctcttgtggg

SEQ ID NO: 190297 - DNA, 25 bp, Probe Sequence
ctggaggtgcaggtatttctttgag

SEQ ID NO: 190298 - DNA, 25 bp, Probe Sequence
ctggcagggatgggtttgctttgga

SEQ ID NO: 190299 - DNA, 25 bp, Probe Sequence
cggcagggacgatttattccttcac

SEQ ID NO: 190300 - DNA, 25 bp, Probe Sequence
ctggaagcaacgttctttccattca

SEQ ID NO: 190301 - DNA, 25 bp, Probe Sequence
ctggatcacagacagctcattttct

SEQ ID NO: 190302 - DNA, 25 bp, Probe Sequence
ctggatcacagaaatcctttcctag

SEQ ID NO: 190303 - DNA, 25 bp, Probe Sequence
cgaatcctgaagacatctaccccag

SEQ ID NO: 190304 - DNA, 25 bp, Probe Sequence
cgatgacctggtgatcgacatcccg

SEQ ID NO: 190305 - DNA, 25 bp, Probe Sequence
cgtacttggtaagcagcctcatcag

SEQ ID NO: 190306 - DNA, 25 bp, Probe Sequence
ctggacttgtgtaactcgacccagt

SEQ ID NO: 190307 - DNA, 25 bp, Probe Sequence
ctggactggatggacgccgagacca

SEQ ID NO: 190308 - DNA, 25 bp, Probe Sequence
cggacgaatgtgtcacctacatcca

SEQ ID NO: 190309 - DNA, 25 bp, Probe Sequence
cgggagactttatctgacagcagac

SEQ ID NO: 190310 - DNA, 25 bp, Probe Sequence
cgggagatttcttgttgctcaaaaa

SEQ ID NO: 190311 - DNA, 25 bp, Probe Sequence
cggcggatgctgctgctcttcgcaa

SEQ ID NO: 190312 - DNA, 25 bp, Probe Sequence
cggcctggctaactcctgccaggca

SEQ ID NO: 190313 - DNA, 25 bp, Probe Sequence
ctggcctacgaaggcgtgcgggcag

SEQ ID NO: 190314 - DNA, 25 bp, Probe Sequence
ctggcccctatggcggtggaggcca

SEQ ID NO: 190315 - DNA, 25 bp, Probe Sequence
ctggcccctatggcggtggaggcca

SEQ ID NO: 190316 - DNA, 25 bp, Probe Sequence
ctggacccgtgaagtcttcagctcc

SEQ ID NO: 190317 - DNA, 25 bp, Probe Sequence
ctggacccgtgaagtcttcagctcc

SEQ ID NO: 190318 - DNA, 25 bp, Probe Sequence
cggatccctggctatgtgtttggcc

SEQ ID NO: 190319 - DNA, 25 bp, Probe Sequence
ctggattcctgcgagttgctttcag

SEQ ID NO: 190320 - DNA, 25 bp, Probe Sequence
ctggatttgctgcagagtcctatgg

SEQ ID NO: 190321 - DNA, 25 bp, Probe Sequence
ctggcattttcagcagatcctcatg

SEQ ID NO: 190322 - DNA, 25 bp, Probe Sequence
ctggctatttgcaaaacctctccca

SEQ ID NO: 190323 - DNA, 25 bp, Probe Sequence
ctggcatagttaaaaccttgctagc

SEQ ID NO: 190324 - DNA, 25 bp, Probe Sequence
ctggaaatatgaacaggcctttgag

SEQ ID NO: 190325 - DNA, 25 bp, Probe Sequence
cggctgcaaagtgaggcttctgggt

SEQ ID NO: 190326 - DNA, 25 bp, Probe Sequence
ctggctgggttccaggttatgggga

SEQ ID NO: 190327 - DNA, 25 bp, Probe Sequence
ctcagtatcctgggaaccctgggcc

SEQ ID NO: 190328 - DNA, 25 bp, Probe Sequence
ctggagtacttccaacagttgctga

SEQ ID NO: 190329 - DNA, 25 bp, Probe Sequence
cgtagtacatcttacaactccgcat

SEQ ID NO: 190330 - DNA, 25 bp, Probe Sequence
cgtgctgctacacaagaaccctgag

SEQ ID NO: 190331 - DNA, 25 bp, Probe Sequence
gttggccaaacatggtgcaccgagt

SEQ ID NO: 190332 - DNA, 25 bp, Probe Sequence
gcctgcgggaactggtacccggagt

SEQ ID NO: 190333 - DNA, 25 bp, Probe Sequence
cctccggaactacaaacccaacatg

SEQ ID NO: 190334 - DNA, 25 bp, Probe Sequence
gctctcgggtagagggaacccacaa

SEQ ID NO: 190335 - DNA, 25 bp, Probe Sequence
cccaaggaagaatgagtcaccccag

SEQ ID NO: 190336 - DNA, 25 bp, Probe Sequence
ccaaagaaggcctggaacttccaga

SEQ ID NO: 190337 - DNA, 25 bp, Probe Sequence
gacgaaataccaccggaactggtcg

SEQ ID NO: 190338 - DNA, 25 bp, Probe Sequence
gccgaaggggagtccgaactagtct

SEQ ID NO: 190339 - DNA, 25 bp, Probe Sequence
gcgcgaacggaacgttggactttcg

SEQ ID NO: 190340 - DNA, 25 bp, Probe Sequence
ctggaactggaaatttggagcgctt

SEQ ID NO: 190341 - DNA, 25 bp, Probe Sequence
ctggaactggtgttaagccaggctt

SEQ ID NO: 190342 - DNA, 25 bp, Probe Sequence
cggacctcagctttagtccgtcttc

SEQ ID NO: 190343 - DNA, 25 bp, Probe Sequence
cggactctagtctaggtccgcggtt

SEQ ID NO: 190344 - DNA, 25 bp, Probe Sequence
ctggactctgcagtccaggtctccc

SEQ ID NO: 190345 - DNA, 25 bp, Probe Sequence
ctggaccgtcatccagagacgcctg

SEQ ID NO: 190346 - DNA, 25 bp, Probe Sequence
ctggctccgtagcagaacactgtaa

SEQ ID NO: 190347 - DNA, 25 bp, Probe Sequence
ctggctctatgttgaggactcaggt

SEQ ID NO: 190348 - DNA, 25 bp, Probe Sequence
ctggctatatcttcgggctccagag

SEQ ID NO: 190349 - DNA, 25 bp, Probe Sequence
ctggccgactatcggtctcttgaga

SEQ ID NO: 190350 - DNA, 25 bp, Probe Sequence
cggcctagcattcttctttggaaat

SEQ ID NO: 190351 - DNA, 25 bp, Probe Sequence
cggctctagtaccttttcagtaaag

SEQ ID NO: 190352 - DNA, 25 bp, Probe Sequence
cgatcactaaacctggttcctgagg

SEQ ID NO: 190353 - DNA, 25 bp, Probe Sequence
cgtctctatataaggaattttccgg

SEQ ID NO: 190354 - DNA, 25 bp, Probe Sequence
cgtcttacaactcagttgttttgag

SEQ ID NO: 190355 - DNA, 25 bp, Probe Sequence
cgtttcagtcttcaatctgttttga

SEQ ID NO: 190356 - DNA, 25 bp, Probe Sequence
cgcttttgtctccggtgagttttgt

SEQ ID NO: 190357 - DNA, 25 bp, Probe Sequence
cggtttgattgtgcctggttttatc

SEQ ID NO: 190358 - DNA, 25 bp, Probe Sequence
cggtgggaagatgccttacgtctga

SEQ ID NO: 190359 - DNA, 25 bp, Probe Sequence
cggagggaggatcacttgaggccag

SEQ ID NO: 190360 - DNA, 25 bp, Probe Sequence
cggagggaaggatttgagggctcaa

SEQ ID NO: 190361 - DNA, 25 bp, Probe Sequence
ctggaacgaacttttatgtggtcac

SEQ ID NO: 190362 - DNA, 25 bp, Probe Sequence
ctggaaagacacctctgtctgggaa

SEQ ID NO: 190363 - DNA, 25 bp, Probe Sequence
ctggagaacaaactctgtcactggg

SEQ ID NO: 190364 - DNA, 25 bp, Probe Sequence
ctggagtggctatttcatctcactg

SEQ ID NO: 190365 - DNA, 25 bp, Probe Sequence
cggagatcacaccattgcactccag

SEQ ID NO: 190366 - DNA, 25 bp, Probe Sequence
ctggcatatacagaacattccatcc

SEQ ID NO: 190367 - DNA, 25 bp, Probe Sequence
ctggcttgacatgctgtattccacg

SEQ ID NO: 190368 - DNA, 25 bp, Probe Sequence
ctggaagagcccgatttcctcagga

SEQ ID NO: 190369 - DNA, 25 bp, Probe Sequence
ctggctggtcgggaatacctgggaa

SEQ ID NO: 190370 - DNA, 25 bp, Probe Sequence
cggctgtgtagtaaatctccccggc

SEQ ID NO: 190371 - DNA, 25 bp, Probe Sequence
cggctcagtgagagaatcgcccccg

SEQ ID NO: 190372 - DNA, 25 bp, Probe Sequence
ctggctaagatgacgaagccccgtc

SEQ ID NO: 190373 - DNA, 25 bp, Probe Sequence
ctggcaacaatgagaacgtgggaca

SEQ ID NO: 190374 - DNA, 25 bp, Probe Sequence
cggatcacgatttcacactgggtac

SEQ ID NO: 190375 - DNA, 25 bp, Probe Sequence
ctggacaagttcgtcctgcctatga

SEQ ID NO: 190376 - DNA, 25 bp, Probe Sequence
ctggagaactctgcatcctggtaca

SEQ ID NO: 190377 - DNA, 25 bp, Probe Sequence
ctggagaattcagtgcagccaggga

SEQ ID NO: 190378 - DNA, 25 bp, Probe Sequence
ctggacacttgagccgcatggccag

SEQ ID NO: 190379 - DNA, 25 bp, Probe Sequence
cggagccttacggcgatgggtggcc

SEQ ID NO: 190380 - DNA, 25 bp, Probe Sequence
ctggagcctcgagtggaattggtga

SEQ ID NO: 190381 - DNA, 25 bp, Probe Sequence
cgggactctccaaaatgtcgtgaac

SEQ ID NO: 190382 - DNA, 25 bp, Probe Sequence
cggcaagtatttcaagttgctgaag

SEQ ID NO: 190383 - DNA, 25 bp, Probe Sequence
ctggcataatttttacagttgcaga

SEQ ID NO: 190384 - DNA, 25 bp, Probe Sequence
ctggcattgttgctgattctgttcc

SEQ ID NO: 190385 - DNA, 25 bp, Probe Sequence
ctggctgtatgtggtctactgtgtc

SEQ ID NO: 190386 - DNA, 25 bp, Probe Sequence
ctggctatcatgccaactactgcga

SEQ ID NO: 190387 - DNA, 25 bp, Probe Sequence
cggctgtctgccaactggtagaggc

SEQ ID NO: 190388 - DNA, 25 bp, Probe Sequence
ctggctccactcagtgtctaaggca

SEQ ID NO: 190389 - DNA, 25 bp, Probe Sequence
ctggcttagctgaagttctaacctt

SEQ ID NO: 190390 - DNA, 25 bp, Probe Sequence
cggagtactgagtcttctgtaactt

SEQ ID NO: 190391 - DNA, 25 bp, Probe Sequence
ctggagaaatgaccgtatgtcacca

SEQ ID NO: 190392 - DNA, 25 bp, Probe Sequence
ctggaaggctgagctgtaatgctgc

SEQ ID NO: 190393 - DNA, 25 bp, Probe Sequence
ctggaaggtgtgcccgatgtgcagc

SEQ ID NO: 190394 - DNA, 25 bp, Probe Sequence
ctggaaggtgtgcccgatgtgcagc

SEQ ID NO: 190395 - DNA, 25 bp, Probe Sequence
ctggagggcagtggcacgatctcag

SEQ ID NO: 190396 - DNA, 25 bp, Probe Sequence
ctggagtggcaggccatatttaaca

SEQ ID NO: 190397 - DNA, 25 bp, Probe Sequence
ctggaaggcactcagcatcttcaag

SEQ ID NO: 190398 - DNA, 25 bp, Probe Sequence
ctggagatgtccagacatgcccaat

SEQ ID NO: 190399 - DNA, 25 bp, Probe Sequence
ctggagatgtccaagttccagccca

SEQ ID NO: 190400 - DNA, 25 bp, Probe Sequence
ctggagagtcaggactttcaccacc

SEQ ID NO: 190401 - DNA, 25 bp, Probe Sequence
ctggacagcacagacttcaccagca

SEQ ID NO: 190402 - DNA, 25 bp, Probe Sequence
ctggacagcacggacttctagagag

SEQ ID NO: 190403 - DNA, 25 bp, Probe Sequence
ctggaacatgacagcttcatcaggt

SEQ ID NO: 190404 - DNA, 25 bp, Probe Sequence
ctggaattcaatggcgcatctcggc

SEQ ID NO: 190405 - DNA, 25 bp, Probe Sequence
ctggcaactctgaagtcatcctgcc

SEQ ID NO: 190406 - DNA, 25 bp, Probe Sequence
ctggcaccaaaactagccatgctcc

SEQ ID NO: 190407 - DNA, 25 bp, Probe Sequence
ctggacgcagaacttcagccatgaa

SEQ ID NO: 190408 - DNA, 25 bp, Probe Sequence
cggacgctccatcacaactggaggt

SEQ ID NO: 190409 - DNA, 25 bp, Probe Sequence
cggcacgtgccatgagcacaggggc

SEQ ID NO: 190410 - DNA, 25 bp, Probe Sequence
cggccactgccatcatgagcagggc

SEQ ID NO: 190411 - DNA, 25 bp, Probe Sequence
cggcaagcccatgccatgcaagtgc

SEQ ID NO: 190412 - DNA, 25 bp, Probe Sequence
ctggagaggcgtgccagcaaggcca

SEQ ID NO: 190413 - DNA, 25 bp, Probe Sequence
cgtggagctgtcgccatgaaggtcg

SEQ ID NO: 190414 - DNA, 25 bp, Probe Sequence
ctggaagcttgtgcctgacaattac

SEQ ID NO: 190415 - DNA, 25 bp, Probe Sequence
cggaggttgtgtttacaatgtagaa

SEQ ID NO: 190416 - DNA, 25 bp, Probe Sequence
ctggcttgtggtaggtacttgttga

SEQ ID NO: 190417 - DNA, 25 bp, Probe Sequence
ctggcacgatggtgggcacttgtag

SEQ ID NO: 190418 - DNA, 25 bp, Probe Sequence
ctggcacagtgccttgggactggac

SEQ ID NO: 190419 - DNA, 25 bp, Probe Sequence
ctggacaggataatgagtaaggata

SEQ ID NO: 190420 - DNA, 25 bp, Probe Sequence
ctggaagctgatcacctggagtgaa

SEQ ID NO: 190421 - DNA, 25 bp, Probe Sequence
ctggacgtctgctcactggagatga

SEQ ID NO: 190422 - DNA, 25 bp, Probe Sequence
ctggagcttcatgcatcctgggaga

SEQ ID NO: 190423 - DNA, 25 bp, Probe Sequence
ctggagcaatcagatcacacggcgg

SEQ ID NO: 190424 - DNA, 25 bp, Probe Sequence
ctggaaagcagcacccagagcgcca

SEQ ID NO: 190425 - DNA, 25 bp, Probe Sequence
ctggaaggagaggcctgcagggctc

SEQ ID NO: 190426 - DNA, 25 bp, Probe Sequence
ctggcacaaggaggcctggacttcc

SEQ ID NO: 190427 - DNA, 25 bp, Probe Sequence
ctggcaccagtgggtcaatgcctgt

SEQ ID NO: 190428 - DNA, 25 bp, Probe Sequence
ctggcccagctctttatctgggtcc

SEQ ID NO: 190429 - DNA, 25 bp, Probe Sequence
ctggcgaggtcatttactgagtgcc

SEQ ID NO: 190430 - DNA, 25 bp, Probe Sequence
ctggcagaggtcgccgtgagtgcca

SEQ ID NO: 190431 - DNA, 25 bp, Probe Sequence
cggtcagatgtacccaggagctccg

SEQ ID NO: 190432 - DNA, 25 bp, Probe Sequence
ctggccagagtgaccaggctgacca

SEQ ID NO: 190433 - DNA, 25 bp, Probe Sequence
ctggctgaagcctcagtcatgacgc

SEQ ID NO: 190434 - DNA, 25 bp, Probe Sequence
ctggctgcagatccaggctgtgcgt

SEQ ID NO: 190435 - DNA, 25 bp, Probe Sequence
cggatcatgatgccaacctcttacg

SEQ ID NO: 190436 - DNA, 25 bp, Probe Sequence
cggcagcatatgcagcccgtgctaa

SEQ ID NO: 190437 - DNA, 25 bp, Probe Sequence
ctggcaaatactcctgcaggccagg

SEQ ID NO: 190438 - DNA, 25 bp, Probe Sequence
ctggcaggatgaggcgtgcaggcct

SEQ ID NO: 190439 - DNA, 25 bp, Probe Sequence
ctggctggaccaggatgcagtcaca

SEQ ID NO: 190440 - DNA, 25 bp, Probe Sequence
ctggctgcagcacactctgagaaag

SEQ ID NO: 190441 - DNA, 25 bp, Probe Sequence
ctggaagcagcttctagagaacagc

SEQ ID NO: 190442 - DNA, 25 bp, Probe Sequence
cggaaagcgtgccaatcaacatgct

SEQ ID NO: 190443 - DNA, 25 bp, Probe Sequence
cggaaagcgtgccaatcaacatgct

SEQ ID NO: 190444 - DNA, 25 bp, Probe Sequence
ctggccagcatggtgaaaccctgtc

SEQ ID NO: 190445 - DNA, 25 bp, Probe Sequence
ctggctgtgggattaaccctgctcg

SEQ ID NO: 190446 - DNA, 25 bp, Probe Sequence
ctggctgtgggcatgaagtcagaga

SEQ ID NO: 190447 - DNA, 25 bp, Probe Sequence
ctggctctcagccctgagacacagg

SEQ ID NO: 190448 - DNA, 25 bp, Probe Sequence
ctggctcaagcagtcttcatctcag

SEQ ID NO: 190449 - DNA, 25 bp, Probe Sequence
ctggccaatgatgcaatctgcacag

SEQ ID NO: 190450 - DNA, 25 bp, Probe Sequence
ctggaaagagtgccagtcagcagtc

SEQ ID NO: 190451 - DNA, 25 bp, Probe Sequence
cggctacagaggccacacatggtcc

SEQ ID NO: 190452 - DNA, 25 bp, Probe Sequence
cggcttcagcgactcggagagtgca

SEQ ID NO: 190453 - DNA, 25 bp, Probe Sequence
ctggcttcaggtcccagatgatgaa

SEQ ID NO: 190454 - DNA, 25 bp, Probe Sequence
ctggctgtgagtcccttgtggaata

SEQ ID NO: 190455 - DNA, 25 bp, Probe Sequence
cggtgctggtcccttataaactaat

SEQ ID NO: 190456 - DNA, 25 bp, Probe Sequence
cggtggctgtctttccattaaagaa

SEQ ID NO: 190457 - DNA, 25 bp, Probe Sequence
cggcctgcatgttaattgttaagga

SEQ ID NO: 190458 - DNA, 25 bp, Probe Sequence
ctggcacggactatgtgttgaagga

SEQ ID NO: 190459 - DNA, 25 bp, Probe Sequence
cggccggacatcgtggttaaggact

SEQ ID NO: 190460 - DNA, 25 bp, Probe Sequence
ctggacttaccttgagttaaaggca

SEQ ID NO: 190461 - DNA, 25 bp, Probe Sequence
ctggctccaactcagtgtttaaggc

SEQ ID NO: 190462 - DNA, 25 bp, Probe Sequence
ctggccagaagacatgattttaatg

SEQ ID NO: 190463 - DNA, 25 bp, Probe Sequence
ctggccaagaagtatgatgcgtttt

SEQ ID NO: 190464 - DNA, 25 bp, Probe Sequence
ctggcgctaaaaagagctgtatttt

SEQ ID NO: 190465 - DNA, 25 bp, Probe Sequence
ctggcctaaaggtgatgtatttggt

SEQ ID NO: 190466 - DNA, 25 bp, Probe Sequence
ctggcgtaagcatggggtctttgtg

SEQ ID NO: 190467 - DNA, 25 bp, Probe Sequence
ctggctgaaagttgggttcaccttg

SEQ ID NO: 190468 - DNA, 25 bp, Probe Sequence
ctggctataagcggggtctccggaa

SEQ ID NO: 190469 - DNA, 25 bp, Probe Sequence
ctggcctcaagactggtgactaggg

SEQ ID NO: 190470 - DNA, 25 bp, Probe Sequence
cggcctccaagctgtagctatgacg

SEQ ID NO: 190471 - DNA, 25 bp, Probe Sequence
ctggccatccaagtagtgaatgaac

SEQ ID NO: 190472 - DNA, 25 bp, Probe Sequence
ctggccttcagctggcagagcatga

SEQ ID NO: 190473 - DNA, 25 bp, Probe Sequence
ctggacattcaggaggcaagtcaat

SEQ ID NO: 190474 - DNA, 25 bp, Probe Sequence
ctggaatttgggcagatatagcatt

SEQ ID NO: 190475 - DNA, 25 bp, Probe Sequence
ctggaatttgtggctgatgaaggca

SEQ ID NO: 190476 - DNA, 25 bp, Probe Sequence
ctggaattctgtttcagacacagca

SEQ ID NO: 190477 - DNA, 25 bp, Probe Sequence
ctggcaccctgcaagtaatcaacac

SEQ ID NO: 190478 - DNA, 25 bp, Probe Sequence
ctggccgagtgaggtgtagcagaaa

SEQ ID NO: 190479 - DNA, 25 bp, Probe Sequence
ctggcctcagttgtctacaggacag

SEQ ID NO: 190480 - DNA, 25 bp, Probe Sequence
ctggcactcagtacttgcttagaac

SEQ ID NO: 190481 - DNA, 25 bp, Probe Sequence
ctggaatagctggctttattggcac

SEQ ID NO: 190482 - DNA, 25 bp, Probe Sequence
cggaatagctgttcagtactcaagc

SEQ ID NO: 190483 - DNA, 25 bp, Probe Sequence
ctggcccacttggcagtacatcaag

SEQ ID NO: 190484 - DNA, 25 bp, Probe Sequence
ctggctactcctgcagaaatgaagg

SEQ ID NO: 190485 - DNA, 25 bp, Probe Sequence
ctggccactggtggaaccatgaacg

SEQ ID NO: 190486 - DNA, 25 bp, Probe Sequence
ctggcccgggcatcagggaactatg

SEQ ID NO: 190487 - DNA, 25 bp, Probe Sequence
cgactccggagacagcccaaatatc

SEQ ID NO: 190488 - DNA, 25 bp, Probe Sequence
cgtccccagcagagaacccaaagac

SEQ ID NO: 190489 - DNA, 25 bp, Probe Sequence
cgatgaaccaagagaaccctccacc

SEQ ID NO: 190490 - DNA, 25 bp, Probe Sequence
ctggctaacactgtgaaaccccacc

SEQ ID NO: 190491 - DNA, 25 bp, Probe Sequence
ctggctaactgcaagctgaagacca

SEQ ID NO: 190492 - DNA, 25 bp, Probe Sequence
ctggcttgactggatggaaggagac

SEQ ID NO: 190493 - DNA, 25 bp, Probe Sequence
ctggcttagctgcaggagaagatgg

SEQ ID NO: 190494 - DNA, 25 bp, Probe Sequence
ctggctggaccttgtcagaatgttt

SEQ ID NO: 190495 - DNA, 25 bp, Probe Sequence
ctggctgtacctagaagagatggtc

SEQ ID NO: 190496 - DNA, 25 bp, Probe Sequence
ctggcttccctagtacagagaacag

SEQ ID NO: 190497 - DNA, 25 bp, Probe Sequence
gctgagttagtcccttagaaacgtc

SEQ ID NO: 190498 - DNA, 25 bp, Probe Sequence
gcgaaaattccctttgaagaagcta

SEQ ID NO: 190499 - DNA, 25 bp, Probe Sequence
gcgtaatgaagtcttatgggaactg

SEQ ID NO: 190500 - DNA, 25 bp, Probe Sequence
cgtcaatggattttgttgggcaccg

SEQ ID NO: 190501 - DNA, 25 bp, Probe Sequence
cgctaagtatggcgggcggcacacg

SEQ ID NO: 190502 - DNA, 25 bp, Probe Sequence
cggatggtgagggggagccaggcca

SEQ ID NO: 190503 - DNA, 25 bp, Probe Sequence
cggatggtgagggggagccaggcca

SEQ ID NO: 190504 - DNA, 25 bp, Probe Sequence
ctggaagatgacgtggtgggggaca

SEQ ID NO: 190505 - DNA, 25 bp, Probe Sequence
ctggcacaaccgggtggggcagatc

SEQ ID NO: 190506 - DNA, 25 bp, Probe Sequence
cggcacaccctgggggagaacatcg

SEQ ID NO: 190507 - DNA, 25 bp, Probe Sequence
cggtccccgggagcatgaatgactt

SEQ ID NO: 190508 - DNA, 25 bp, Probe Sequence
gctttccctaggagttgaatccttc

SEQ ID NO: 190509 - DNA, 25 bp, Probe Sequence
gcttttaaagggcccatggtacatt

SEQ ID NO: 190510 - DNA, 25 bp, Probe Sequence
cgtttaaagacccttgccaatcagt

SEQ ID NO: 190511 - DNA, 25 bp, Probe Sequence
ccttctgaaagagcttggccttaat

SEQ ID NO: 190512 - DNA, 25 bp, Probe Sequence
cgtgtgtgaaattctctttcctgta

SEQ ID NO: 190513 - DNA, 25 bp, Probe Sequence
ctggctgtggcatttttcttgacct

SEQ ID NO: 190514 - DNA, 25 bp, Probe Sequence
ctggctgttgattttgtctggttcc

SEQ ID NO: 190515 - DNA, 25 bp, Probe Sequence
ctggctcagtttaagtcatggttct

SEQ ID NO: 190516 - DNA, 25 bp, Probe Sequence
ctggcctgttatgattctgaacatt

SEQ ID NO: 190517 - DNA, 25 bp, Probe Sequence
ctggccttggtcattggccacttca

SEQ ID NO: 190518 - DNA, 25 bp, Probe Sequence
ctggcctgaggtattgtgaagatta

SEQ ID NO: 190519 - DNA, 25 bp, Probe Sequence
cggctgtcaggtttgatctcagtgt

SEQ ID NO: 190520 - DNA, 25 bp, Probe Sequence
cggtgtgtcagatttcctcagatta

SEQ ID NO: 190521 - DNA, 25 bp, Probe Sequence
cgggtccaaaatctcatgaatggtg

SEQ ID NO: 190522 - DNA, 25 bp, Probe Sequence
cggaccctaatcaaacgaatgctga

SEQ ID NO: 190523 - DNA, 25 bp, Probe Sequence
cggctccaggaaataaccattcatg

SEQ ID NO: 190524 - DNA, 25 bp, Probe Sequence
cggcctattgtgacttacttatctg

SEQ ID NO: 190525 - DNA, 25 bp, Probe Sequence
cggtttttgtcagtacatctatggg

SEQ ID NO: 190526 - DNA, 25 bp, Probe Sequence
ctggcttcattaaactgacacttct

SEQ ID NO: 190527 - DNA, 25 bp, Probe Sequence
ctggcaaccaaatcgaatctctcat

SEQ ID NO: 190528 - DNA, 25 bp, Probe Sequence
ctggctgagctcaaatcctatcatc

SEQ ID NO: 190529 - DNA, 25 bp, Probe Sequence
ctggaatgctgcaagcctcttccag

SEQ ID NO: 190530 - DNA, 25 bp, Probe Sequence
ctggccagtgtggattttcagcatg

SEQ ID NO: 190531 - DNA, 25 bp, Probe Sequence
ctggcacagagtgaggtctcagtgg

SEQ ID NO: 190532 - DNA, 25 bp, Probe Sequence
ctggcagggtgccaaccatgcagag

SEQ ID NO: 190533 - DNA, 25 bp, Probe Sequence
ctggcagggtgccaaccatgcagac

SEQ ID NO: 190534 - DNA, 25 bp, Probe Sequence
cggcttttcggagcatgcatgttta

SEQ ID NO: 190535 - DNA, 25 bp, Probe Sequence
ctggcttgttaacagattgtttcat

SEQ ID NO: 190536 - DNA, 25 bp, Probe Sequence
ctggaaggtcaacatctcattttat

SEQ ID NO: 190537 - DNA, 25 bp, Probe Sequence
cggagcaagtcccgttctgttagta

SEQ ID NO: 190538 - DNA, 25 bp, Probe Sequence
cggcaggatcgacgcgcttctgtat

SEQ ID NO: 190539 - DNA, 25 bp, Probe Sequence
cggcaggatcgacgcgcttctgtat

SEQ ID NO: 190540 - DNA, 25 bp, Probe Sequence
ctggcaggacacagcgttcatcaca

SEQ ID NO: 190541 - DNA, 25 bp, Probe Sequence
ctggcagtacatcaagtgtatcata

SEQ ID NO: 190542 - DNA, 25 bp, Probe Sequence
ctggcagtacctatgtggaataagc

SEQ ID NO: 190543 - DNA, 25 bp, Probe Sequence
ctggcgtgatcaacattttgttaag

SEQ ID NO: 190544 - DNA, 25 bp, Probe Sequence
ctggcggtcaagtgtggaggagagg

SEQ ID NO: 190545 - DNA, 25 bp, Probe Sequence
cggcctgtcacacttgtggaggggg

SEQ ID NO: 190546 - DNA, 25 bp, Probe Sequence
cggcctgtacgcctgtggggaggcc

SEQ ID NO: 190547 - DNA, 25 bp, Probe Sequence
cggcctggcaccagtgggtcaatgc

SEQ ID NO: 190548 - DNA, 25 bp, Probe Sequence
cggcaccagacgggcggggaatggt

SEQ ID NO: 190549 - DNA, 25 bp, Probe Sequence
cggcagcgaggctgggggaggggcg

SEQ ID NO: 190550 - DNA, 25 bp, Probe Sequence
cggcggaagaggccccaatggggcg

SEQ ID NO: 190551 - DNA, 25 bp, Probe Sequence
ctggcagaaggggagcccgagggac

SEQ ID NO: 190552 - DNA, 25 bp, Probe Sequence
ctggccatgggtgcagaccgaggta

SEQ ID NO: 190553 - DNA, 25 bp, Probe Sequence
ctggcagatcagggccagagctgga

SEQ ID NO: 190554 - DNA, 25 bp, Probe Sequence
ctggcagatgcctggcatatacaga

SEQ ID NO: 190555 - DNA, 25 bp, Probe Sequence
ctggcagtgctctgagaaccaagaa

SEQ ID NO: 190556 - DNA, 25 bp, Probe Sequence
cgggtgcttctggttccagacaata

SEQ ID NO: 190557 - DNA, 25 bp, Probe Sequence
cgggttacttatcccaggcagaaga

SEQ ID NO: 190558 - DNA, 25 bp, Probe Sequence
ctggctgttattcttccacgagaga

SEQ ID NO: 190559 - DNA, 25 bp, Probe Sequence
cgggttttcgttcactgagacacac

SEQ ID NO: 190560 - DNA, 25 bp, Probe Sequence
cgggctcctatcttctggaagaact

SEQ ID NO: 190561 - DNA, 25 bp, Probe Sequence
cgggctcctacatctacgagaagcc

SEQ ID NO: 190562 - DNA, 25 bp, Probe Sequence
cggccttctacagaacacagctggt

SEQ ID NO: 190563 - DNA, 25 bp, Probe Sequence
ctggcgcttaaaccaaatcgcatgg

SEQ ID NO: 190564 - DNA, 25 bp, Probe Sequence
ctggcacatgtttaggcaaataaga

SEQ ID NO: 190565 - DNA, 25 bp, Probe Sequence
ctggcattggtctagagctttataa

SEQ ID NO: 190566 - DNA, 25 bp, Probe Sequence
ctggcctcggcatgtttcaataaag

SEQ ID NO: 190567 - DNA, 25 bp, Probe Sequence
ctggcaatagtgtgttctgattaga

SEQ ID NO: 190568 - DNA, 25 bp, Probe Sequence
cggaatcctgtcgattagactggac

SEQ ID NO: 190569 - DNA, 25 bp, Probe Sequence
cggagtccagtgcacacgtgcagga

SEQ ID NO: 190570 - DNA, 25 bp, Probe Sequence
cggaaccgacgagtcctgaggagag

SEQ ID NO: 190571 - DNA, 25 bp, Probe Sequence
cggcaagcctagggaccagggtgag

SEQ ID NO: 190572 - DNA, 25 bp, Probe Sequence
cggcaagcctagggaccagggtgag

SEQ ID NO: 190573 - DNA, 25 bp, Probe Sequence
cggcaagcctagggaccagggtgag

SEQ ID NO: 190574 - DNA, 25 bp, Probe Sequence
cggcaagcctagggaccagggtgag

SEQ ID NO: 190575 - DNA, 25 bp, Probe Sequence
ctggctcccataggtatccgggtga

SEQ ID NO: 190576 - DNA, 25 bp, Probe Sequence
cggctacagcagacctagcactggg

SEQ ID NO: 190577 - DNA, 25 bp, Probe Sequence
cggtaccagtgcacagaggggtttg

SEQ ID NO: 190578 - DNA, 25 bp, Probe Sequence
cggcccccatgcacgggggagggag

SEQ ID NO: 190579 - DNA, 25 bp, Probe Sequence
cggtccctcattgcaggggggagca

SEQ ID NO: 190580 - DNA, 25 bp, Probe Sequence
cgggccgttctctcgtgggagacgc

SEQ ID NO: 190581 - DNA, 25 bp, Probe Sequence
cggcgcggttttttatggtgacaca

SEQ ID NO: 190582 - DNA, 25 bp, Probe Sequence
cggggggtctcttctgaataaagca

SEQ ID NO: 190583 - DNA, 25 bp, Probe Sequence
cggggtgtggctcaggaatgtaagg

SEQ ID NO: 190584 - DNA, 25 bp, Probe Sequence
cggcagcgtctggagcgggaaaagc

SEQ ID NO: 190585 - DNA, 25 bp, Probe Sequence
cggcagcgtctggagcgggaaaagc

SEQ ID NO: 190586 - DNA, 25 bp, Probe Sequence
ctggcgcctctgcaagggcagaaca

SEQ ID NO: 190587 - DNA, 25 bp, Probe Sequence
cggcttgtgcagcaatggccaagat

SEQ ID NO: 190588 - DNA, 25 bp, Probe Sequence
ctggcttgtgaggacgcgtccacag

SEQ ID NO: 190589 - DNA, 25 bp, Probe Sequence
cggcgggagaaggctgtgcacaggc

SEQ ID NO: 190590 - DNA, 25 bp, Probe Sequence
cggcgggagaaggctgtgcacaggc

SEQ ID NO: 190591 - DNA, 25 bp, Probe Sequence
cggcatggagagagagcggaaagtg

SEQ ID NO: 190592 - DNA, 25 bp, Probe Sequence
ctggctgtgaggagactgtggaagg

SEQ ID NO: 190593 - DNA, 25 bp, Probe Sequence
cgaaggcaggttattagaagagtcc

SEQ ID NO: 190594 - DNA, 25 bp, Probe Sequence
cggatggcgtttctgtgttcagagt

SEQ ID NO: 190595 - DNA, 25 bp, Probe Sequence
ctggcgggtattctggtcattgagg

SEQ ID NO: 190596 - DNA, 25 bp, Probe Sequence
tcgggggtattttggtcacagggtg

SEQ ID NO: 190597 - DNA, 25 bp, Probe Sequence
cggggaaagtaaagcctcaggaatg

SEQ ID NO: 190598 - DNA, 25 bp, Probe Sequence
cggtgctgaagactaacgccggacc

SEQ ID NO: 190599 - DNA, 25 bp, Probe Sequence
ctggccgatgaagtaaccctggacg

SEQ ID NO: 190600 - DNA, 25 bp, Probe Sequence
ctggctccaaatggggcccatggcc

SEQ ID NO: 190601 - DNA, 25 bp, Probe Sequence
ctggcttcaacaaggacctcagcgc

SEQ ID NO: 190602 - DNA, 25 bp, Probe Sequence
ctggcgattccaggagacccagctg

SEQ ID NO: 190603 - DNA, 25 bp, Probe Sequence
cgatggacatggacatgagccccct

SEQ ID NO: 190604 - DNA, 25 bp, Probe Sequence
cggccacatgagctacttcctgtgg

SEQ ID NO: 190605 - DNA, 25 bp, Probe Sequence
ctggccacaagattgaattccgtct

SEQ ID NO: 190606 - DNA, 25 bp, Probe Sequence
ctggccaacgtcaacattgggagcc

SEQ ID NO: 190607 - DNA, 25 bp, Probe Sequence
ctggctccagtgaaacttgggcaca

SEQ ID NO: 190608 - DNA, 25 bp, Probe Sequence
ctggccacagtggaaattctgccga

SEQ ID NO: 190609 - DNA, 25 bp, Probe Sequence
ctggccatgactggcgaagtctccc

SEQ ID NO: 190610 - DNA, 25 bp, Probe Sequence
ctggccatgacgtggaggcctactg

SEQ ID NO: 190611 - DNA, 25 bp, Probe Sequence
ctggccttctcaaggaagcccagct

SEQ ID NO: 190612 - DNA, 25 bp, Probe Sequence
ctggctgctattgcaggaggccaca

SEQ ID NO: 190613 - DNA, 25 bp, Probe Sequence
ctggcagttcggccagctggaccag

SEQ ID NO: 190614 - DNA, 25 bp, Probe Sequence
ctggcgagtgccaggtgaggctgcg

SEQ ID NO: 190615 - DNA, 25 bp, Probe Sequence
ctggcagaggcgaactgtagagtgc

SEQ ID NO: 190616 - DNA, 25 bp, Probe Sequence
ctggcagggctgaagtgtgcgggac

SEQ ID NO: 190617 - DNA, 25 bp, Probe Sequence
cggcctgtgcaggtgattggggctc

SEQ ID NO: 190618 - DNA, 25 bp, Probe Sequence
cggctcttgacacttagccgctgtc

SEQ ID NO: 190619 - DNA, 25 bp, Probe Sequence
ccgacgtgcacgtgagccgcgtcgg

SEQ ID NO: 190620 - DNA, 25 bp, Probe Sequence
cgtgagttcctagagcttggctggg

SEQ ID NO: 190621 - DNA, 25 bp, Probe Sequence
cgcttcttcctaggtgcataaccgg

SEQ ID NO: 190622 - DNA, 25 bp, Probe Sequence
cggcaccacctagatgcatacatcc

SEQ ID NO: 190623 - DNA, 25 bp, Probe Sequence
cggaccagagcgaaagcatttgcca

SEQ ID NO: 190624 - DNA, 25 bp, Probe Sequence
ctggccttgaccgcagatttcggaa

SEQ ID NO: 190625 - DNA, 25 bp, Probe Sequence
ctggcgcttagaaccagacccgaaa

SEQ ID NO: 190626 - DNA, 25 bp, Probe Sequence
ctggcgtctataccaacatctgccg

SEQ ID NO: 190627 - DNA, 25 bp, Probe Sequence
cgggatctttccattatgtcgttac

SEQ ID NO: 190628 - DNA, 25 bp, Probe Sequence
cgggatctgtctcaaatatttctta

SEQ ID NO: 190629 - DNA, 25 bp, Probe Sequence
ctggccttggtagattgacttgctc

SEQ ID NO: 190630 - DNA, 25 bp, Probe Sequence
ctggccttggcggctatttttgcca

SEQ ID NO: 190631 - DNA, 25 bp, Probe Sequence
ctggcctaggctcaatgtctttgga

SEQ ID NO: 190632 - DNA, 25 bp, Probe Sequence
ctggctctaattcacagtgctcttt

SEQ ID NO: 190633 - DNA, 25 bp, Probe Sequence
cggcgccagaagacacgtgtgtttg

SEQ ID NO: 190634 - DNA, 25 bp, Probe Sequence
cggcgccagaagacacgtgtgtttg

SEQ ID NO: 190635 - DNA, 25 bp, Probe Sequence
cggcgtgcggaagtcctgagttgag

SEQ ID NO: 190636 - DNA, 25 bp, Probe Sequence
cgtgctggcttgcattccaaggtga

SEQ ID NO: 190637 - DNA, 25 bp, Probe Sequence
cggcggcttcgaagccaagtgatgt

SEQ ID NO: 190638 - DNA, 25 bp, Probe Sequence
cggaaggttcattcgcataggtgtg

SEQ ID NO: 190639 - DNA, 25 bp, Probe Sequence
cggtatgagatcaattccctggtgc

SEQ ID NO: 190640 - DNA, 25 bp, Probe Sequence
cggatagcaatcttggacctgatgt

SEQ ID NO: 190641 - DNA, 25 bp, Probe Sequence
cggaagcaacattgacctctgcgtc

SEQ ID NO: 190642 - DNA, 25 bp, Probe Sequence
cgtgtaacacttgttgcttggcaac

SEQ ID NO: 190643 - DNA, 25 bp, Probe Sequence
cgtgtaagcagtttggtggaagaac

SEQ ID NO: 190644 - DNA, 25 bp, Probe Sequence
cgggatagagaagtctttaaatgac

SEQ ID NO: 190645 - DNA, 25 bp, Probe Sequence
cggagtgaacaacctttcatcacta

SEQ ID NO: 190646 - DNA, 25 bp, Probe Sequence
cggatatgtatcgatgccttttagt

SEQ ID NO: 190647 - DNA, 25 bp, Probe Sequence
cggatatgtatcgatgccttttagt

SEQ ID NO: 190648 - DNA, 25 bp, Probe Sequence
cggttcataaatggctgatttataa

SEQ ID NO: 190649 - DNA, 25 bp, Probe Sequence
cggagctcagcttcaggttttagaa

SEQ ID NO: 190650 - DNA, 25 bp, Probe Sequence
cggagatcatgcaagctggtggctg

SEQ ID NO: 190651 - DNA, 25 bp, Probe Sequence
cgtgcaacatccaatgtgtttgcca

SEQ ID NO: 190652 - DNA, 25 bp, Probe Sequence
cgtgacaatccaatgccgagtggct

SEQ ID NO: 190653 - DNA, 25 bp, Probe Sequence
cggaacattttcaagcagatagcag

SEQ ID NO: 190654 - DNA, 25 bp, Probe Sequence
ctggctctcattataagcaatacaa

SEQ ID NO: 190655 - DNA, 25 bp, Probe Sequence
ctggcctctctgctaagaacatact

SEQ ID NO: 190656 - DNA, 25 bp, Probe Sequence
ctggctctctcctgaggatttatcg

SEQ ID NO: 190657 - DNA, 25 bp, Probe Sequence
ctggccttgctatgggatgcttacc

SEQ ID NO: 190658 - DNA, 25 bp, Probe Sequence
ctggccttggatggaggcgtctcag

SEQ ID NO: 190659 - DNA, 25 bp, Probe Sequence
ctggcctctgaaaaactggcatctg

SEQ ID NO: 190660 - DNA, 25 bp, Probe Sequence
ctggccactgacaaaaatgaccccc

SEQ ID NO: 190661 - DNA, 25 bp, Probe Sequence
ctggctcagtcaataaaggatccgg

SEQ ID NO: 190662 - DNA, 25 bp, Probe Sequence
ctggccagccatcgatggggatcga

SEQ ID NO: 190663 - DNA, 25 bp, Probe Sequence
ctggccagcacggacgagaagcgag

SEQ ID NO: 190664 - DNA, 25 bp, Probe Sequence
ctggctttctgagcaggaagcgagc

SEQ ID NO: 190665 - DNA, 25 bp, Probe Sequence
ctggcttcacgtggcaggaaggccc

SEQ ID NO: 190666 - DNA, 25 bp, Probe Sequence
cggcctcgcgctgccatggaggccg

SEQ ID NO: 190667 - DNA, 25 bp, Probe Sequence
cgcggcaccccgatcggtgccgcga

SEQ ID NO: 190668 - DNA, 25 bp, Probe Sequence
cggggcccaatgaataatccgccag

SEQ ID NO: 190669 - DNA, 25 bp, Probe Sequence
cggggtctccatataactacacggt

SEQ ID NO: 190670 - DNA, 25 bp, Probe Sequence
cggctgtttacaactaactgatcac

SEQ ID NO: 190671 - DNA, 25 bp, Probe Sequence
cggctttggcagacagtaacgtcag

SEQ ID NO: 190672 - DNA, 25 bp, Probe Sequence
cggcactgatgggctcacatatacg

SEQ ID NO: 190673 - DNA, 25 bp, Probe Sequence
ctggcctgctgtgtacatctgagca

SEQ ID NO: 190674 - DNA, 25 bp, Probe Sequence
ctggctcatgttgctcacaggcaga

SEQ ID NO: 190675 - DNA, 25 bp, Probe Sequence
ctggccagctctgcatttgacaaat

SEQ ID NO: 190676 - DNA, 25 bp, Probe Sequence
cggccaccatgaagtctggcaactc

SEQ ID NO: 190677 - DNA, 25 bp, Probe Sequence
cggctgcaccgagggagcaatacct

SEQ ID NO: 190678 - DNA, 25 bp, Probe Sequence
cggcttgggaggaaaagacgctgtc

SEQ ID NO: 190679 - DNA, 25 bp, Probe Sequence
cgtcggacgagcgcaaaagcgcctt

SEQ ID NO: 190680 - DNA, 25 bp, Probe Sequence
cgctggcgacacaacctaaggagga

SEQ ID NO: 190681 - DNA, 25 bp, Probe Sequence
cggggacagcaatagaaggggacct

SEQ ID NO: 190682 - DNA, 25 bp, Probe Sequence
ctggcggccaaacagagcagtgggt

SEQ ID NO: 190683 - DNA, 25 bp, Probe Sequence
gctggcttgccaaagggtttgggtt

SEQ ID NO: 190684 - DNA, 25 bp, Probe Sequence
ctggctcctgattacgatgctttgg

SEQ ID NO: 190685 - DNA, 25 bp, Probe Sequence
cggctttgatgacctagtacgagat

SEQ ID NO: 190686 - DNA, 25 bp, Probe Sequence
cggcttttgcagatgaatacgaggt

SEQ ID NO: 190687 - DNA, 25 bp, Probe Sequence
cgtgcttcctcagttacacaaagga

SEQ ID NO: 190688 - DNA, 25 bp, Probe Sequence
cggcctcctgaaatgacagcaggga

SEQ ID NO: 190689 - DNA, 25 bp, Probe Sequence
cggcgtcctcaaggcatctggaggg

SEQ ID NO: 190690 - DNA, 25 bp, Probe Sequence
cggtgccacgcatcttcatgaaggg

SEQ ID NO: 190691 - DNA, 25 bp, Probe Sequence
cggatgcgcctcaaattcagtgcaa

SEQ ID NO: 190692 - DNA, 25 bp, Probe Sequence
cggctgagcatctatagcaccagtg

SEQ ID NO: 190693 - DNA, 25 bp, Probe Sequence
ctggctgagcacgcagacactgtgc

SEQ ID NO: 190694 - DNA, 25 bp, Probe Sequence
cggctggcagaggcgaactgtagag

SEQ ID NO: 190695 - DNA, 25 bp, Probe Sequence
ctggccaaggtgctagtgtatgagt

SEQ ID NO: 190696 - DNA, 25 bp, Probe Sequence
cggtgcaggagaattttgacgtgaa

SEQ ID NO: 190697 - DNA, 25 bp, Probe Sequence
cggcgttgcgacagtggtggtataa

SEQ ID NO: 190698 - DNA, 25 bp, Probe Sequence
cggcgttgtacggtggatgtctata

SEQ ID NO: 190699 - DNA, 25 bp, Probe Sequence
ctggctgttttctctgaatgtcttg

SEQ ID NO: 190700 - DNA, 25 bp, Probe Sequence
cgtgatttgtccagcgacactcatt

SEQ ID NO: 190701 - DNA, 25 bp, Probe Sequence
cgctgttttcgacctaccatagaag

SEQ ID NO: 190702 - DNA, 25 bp, Probe Sequence
cgaatttgtcgtgcctacaatcaag

SEQ ID NO: 190703 - DNA, 25 bp, Probe Sequence
cgtgttcgtggtgagctacgccaag

SEQ ID NO: 190704 - DNA, 25 bp, Probe Sequence
cgcttccccgatgagaacttcaaac

SEQ ID NO: 190705 - DNA, 25 bp, Probe Sequence
cgtcgcaaccctcatgaagtacaac

SEQ ID NO: 190706 - DNA, 25 bp, Probe Sequence
cgagaagatccgaaagaaatacccg

SEQ ID NO: 190707 - DNA, 25 bp, Probe Sequence
cggacagaccctaaaactcacgtgg

SEQ ID NO: 190708 - DNA, 25 bp, Probe Sequence
cgtgactaccctatctcatataagt

SEQ ID NO: 190709 - DNA, 25 bp, Probe Sequence
cgtgacgaccctggacatcgtcaga

SEQ ID NO: 190710 - DNA, 25 bp, Probe Sequence
cggaggaactgggccttgacaaagt

SEQ ID NO: 190711 - DNA, 25 bp, Probe Sequence
cggaaacacagagccaggaatatag

SEQ ID NO: 190712 - DNA, 25 bp, Probe Sequence
cggaaggctcgagccgtgtatccgt

SEQ ID NO: 190713 - DNA, 25 bp, Probe Sequence
cggagatggtgggtccagtttccag

SEQ ID NO: 190714 - DNA, 25 bp, Probe Sequence
cgggtgctggagctgctcaatttcc

SEQ ID NO: 190715 - DNA, 25 bp, Probe Sequence
cggtgacttcagcgccagtcaccgc

SEQ ID NO: 190716 - DNA, 25 bp, Probe Sequence
cgggaccaaggagggacccagacat

SEQ ID NO: 190717 - DNA, 25 bp, Probe Sequence
cggcgaacgcggagagcacgccatg

SEQ ID NO: 190718 - DNA, 25 bp, Probe Sequence
cggcgatgaacgtcttacaactcag

SEQ ID NO: 190719 - DNA, 25 bp, Probe Sequence
cggcgtgagaagccatgagcagcaa

SEQ ID NO: 190720 - DNA, 25 bp, Probe Sequence
ctggctggaatgtcctggcagacgt

SEQ ID NO: 190721 - DNA, 25 bp, Probe Sequence
ctggctgggagtcctgtgggcagca

SEQ ID NO: 190722 - DNA, 25 bp, Probe Sequence
ctggctgggacttctggttcagaca

SEQ ID NO: 190723 - DNA, 25 bp, Probe Sequence
ctggctgggacttctggttcagaca

SEQ ID NO: 190724 - DNA, 25 bp, Probe Sequence
ctggcggggatgtgagcttcatcaa

SEQ ID NO: 190725 - DNA, 25 bp, Probe Sequence
ctggcgagtggggtgagtgctctgc

SEQ ID NO: 190726 - DNA, 25 bp, Probe Sequence
ctggcggagacggagggcatgctca

SEQ ID NO: 190727 - DNA, 25 bp, Probe Sequence
cggcaggcaccaaagcaggtcatca

SEQ ID NO: 190728 - DNA, 25 bp, Probe Sequence
cggcccactgcatggatgagtccaa

SEQ ID NO: 190729 - DNA, 25 bp, Probe Sequence
cggcataacatcatctaggtccacc

SEQ ID NO: 190730 - DNA, 25 bp, Probe Sequence
cggtacaccagttggtgtcagaccc

SEQ ID NO: 190731 - DNA, 25 bp, Probe Sequence
cgtgtaaccagttcgggaagcagga

SEQ ID NO: 190732 - DNA, 25 bp, Probe Sequence
cgggaaggagttcacagaagcggtg

SEQ ID NO: 190733 - DNA, 25 bp, Probe Sequence
cggaacgtgactgccgagcaagcgc

SEQ ID NO: 190734 - DNA, 25 bp, Probe Sequence
cggatcacgcccggagtagaagcgc

SEQ ID NO: 190735 - DNA, 25 bp, Probe Sequence
cgggcacggccagagggcaagtgag

SEQ ID NO: 190736 - DNA, 25 bp, Probe Sequence
cgggccggacagaagttcagggagg

SEQ ID NO: 190737 - DNA, 25 bp, Probe Sequence
cgtgtcccttaaagcgtcagggaag

SEQ ID NO: 190738 - DNA, 25 bp, Probe Sequence
cgtgtctccctttcttaaggaggcg

SEQ ID NO: 190739 - DNA, 25 bp, Probe Sequence
cggtcccctctggtgtttggggatg

SEQ ID NO: 190740 - DNA, 25 bp, Probe Sequence
cggtccacacctgggcatttggtga

SEQ ID NO: 190741 - DNA, 25 bp, Probe Sequence
cggcctcacttcttggatgtttgtg

SEQ ID NO: 190742 - DNA, 25 bp, Probe Sequence
ctggcccacttggtgggtgatcagg

SEQ ID NO: 190743 - DNA, 25 bp, Probe Sequence
ctggccgacctgtgtgagaacatgg

SEQ ID NO: 190744 - DNA, 25 bp, Probe Sequence
ctggcccctctactgtaaatgtgcc

SEQ ID NO: 190745 - DNA, 25 bp, Probe Sequence
cgtcgccttcaactgtaatcacaac

SEQ ID NO: 190746 - DNA, 25 bp, Probe Sequence
cgtcgacctcgatgatgatgatgat

SEQ ID NO: 190747 - DNA, 25 bp, Probe Sequence
cgtctacctctgtggcaagggtgac

SEQ ID NO: 190748 - DNA, 25 bp, Probe Sequence
cgtcggccatgcaggggagtgggcc

SEQ ID NO: 190749 - DNA, 25 bp, Probe Sequence
cggtgcccatctacgagggctacgc

SEQ ID NO: 190750 - DNA, 25 bp, Probe Sequence
cgtggcaaattcaaggtggcgtcct

SEQ ID NO: 190751 - DNA, 25 bp, Probe Sequence
ctggcgctgagtacgtcgtggagtc

SEQ ID NO: 190752 - DNA, 25 bp, Probe Sequence
cggccggtgggaggtgcatggcatc

SEQ ID NO: 190753 - DNA, 25 bp, Probe Sequence
cggagaggggagaagtcatgttgcc

SEQ ID NO: 190754 - DNA, 25 bp, Probe Sequence
cgggttgagaggagctctggtcgtt

SEQ ID NO: 190755 - DNA, 25 bp, Probe Sequence
cggtgattgagatgatccttgctgc

SEQ ID NO: 190756 - DNA, 25 bp, Probe Sequence
gcgaggaattacttccacttctggc

SEQ ID NO: 190757 - DNA, 25 bp, Probe Sequence
cgggcaaagctcttccattttgaga

SEQ ID NO: 190758 - DNA, 25 bp, Probe Sequence
cgggccacagctttcaaatcgtccg

SEQ ID NO: 190759 - DNA, 25 bp, Probe Sequence
cgtaccaagaagtcggatcgttcgg

SEQ ID NO: 190760 - DNA, 25 bp, Probe Sequence
gggctcgaagggccggtagttcgag

SEQ ID NO: 190761 - DNA, 25 bp, Probe Sequence
cggccggagtgggggtgtttgtgag

SEQ ID NO: 190762 - DNA, 25 bp, Probe Sequence
ctggccgggaggctttggtgggaga

SEQ ID NO: 190763 - DNA, 25 bp, Probe Sequence
cgtccggcttggatatcttcgggga

SEQ ID NO: 190764 - DNA, 25 bp, Probe Sequence
cgtctgccctatcaactttcgatgg

SEQ ID NO: 190765 - DNA, 25 bp, Probe Sequence
cggctgcagtctacaaactttgccc

SEQ ID NO: 190766 - DNA, 25 bp, Probe Sequence
cggcatgcattgtgaaagctttcca

SEQ ID NO: 190767 - DNA, 25 bp, Probe Sequence
cggctctcaggaaatatgttctcca

SEQ ID NO: 190768 - DNA, 25 bp, Probe Sequence
cggtacaggatacttcctcttcagc

SEQ ID NO: 190769 - DNA, 25 bp, Probe Sequence
cggtcaagttagtctgccaactcgc

SEQ ID NO: 190770 - DNA, 25 bp, Probe Sequence
cggttatttaggtccagcagctaca

SEQ ID NO: 190771 - DNA, 25 bp, Probe Sequence
cggattatgaaatgcacgacaccct

SEQ ID NO: 190772 - DNA, 25 bp, Probe Sequence
cggagaagagaagctcgcccattcc

SEQ ID NO: 190773 - DNA, 25 bp, Probe Sequence
cggagagagaactgtctcgccttcg

SEQ ID NO: 190774 - DNA, 25 bp, Probe Sequence
cggaaaagggtgtctgtggatctgc

SEQ ID NO: 190775 - DNA, 25 bp, Probe Sequence
cgggagaaggccccgtggagagcac

SEQ ID NO: 190776 - DNA, 25 bp, Probe Sequence
cgggaggcaaactcctggatgcgac

SEQ ID NO: 190777 - DNA, 25 bp, Probe Sequence
cgggagagaatttccgtctgatcta

SEQ ID NO: 190778 - DNA, 25 bp, Probe Sequence
cgggagagaatttccgtctgatcta

SEQ ID NO: 190779 - DNA, 25 bp, Probe Sequence
cggaggacatatttcggcttcagca

SEQ ID NO: 190780 - DNA, 25 bp, Probe Sequence
cggaagcctgatcatagacattaag

SEQ ID NO: 190781 - DNA, 25 bp, Probe Sequence
cggggcctcaagtaccaggaaggtg

SEQ ID NO: 190782 - DNA, 25 bp, Probe Sequence
cggtcagcttgttggtgccaagaag

SEQ ID NO: 190783 - DNA, 25 bp, Probe Sequence
cggccatgtctgtcatgcggccgga

SEQ ID NO: 190784 - DNA, 25 bp, Probe Sequence
cggcctgcgtgatcggcctgaagaa

SEQ ID NO: 190785 - DNA, 25 bp, Probe Sequence
cggctctcctggtccccaggagaga

SEQ ID NO: 190786 - DNA, 25 bp, Probe Sequence
cggccgtgtggaatgcccaggaggc

SEQ ID NO: 190787 - DNA, 25 bp, Probe Sequence
cggcgcgtgtggttgagctgaatga

SEQ ID NO: 190788 - DNA, 25 bp, Probe Sequence
cggccgtgtggatgcagggcagggt

SEQ ID NO: 190789 - DNA, 25 bp, Probe Sequence
cggccgagcggggcaggtgaggagg

SEQ ID NO: 190790 - DNA, 25 bp, Probe Sequence
cggccaagaagctcagaagcagtaa

SEQ ID NO: 190791 - DNA, 25 bp, Probe Sequence
cggccaaggtgctcagaggcgtcga

SEQ ID NO: 190792 - DNA, 25 bp, Probe Sequence
cggccaaggagatcgcgctcggccg

SEQ ID NO: 190793 - DNA, 25 bp, Probe Sequence
cggaaagtgagtatgcggctgcacc

SEQ ID NO: 190794 - DNA, 25 bp, Probe Sequence
cggacatcgtgaaagccatcgcccg

SEQ ID NO: 190795 - DNA, 25 bp, Probe Sequence
cggacatgcacgtggcagatcatga

SEQ ID NO: 190796 - DNA, 25 bp, Probe Sequence
cggccatgcaggatgcttgatgctg

SEQ ID NO: 190797 - DNA, 25 bp, Probe Sequence
cggcctgcaggcatggtgtggtata

SEQ ID NO: 190798 - DNA, 25 bp, Probe Sequence
cggcctgcacaggtcgtgaggaaaa

SEQ ID NO: 190799 - DNA, 25 bp, Probe Sequence
cgtcctgctgatgtggtaggctagc

SEQ ID NO: 190800 - DNA, 25 bp, Probe Sequence
cgtgcctgctgtctgctgtaaaggc

SEQ ID NO: 190801 - DNA, 25 bp, Probe Sequence
cggccgctgtttgtacagacagcct

SEQ ID NO: 190802 - DNA, 25 bp, Probe Sequence
cggctggttttggacagcgacaccg

SEQ ID NO: 190803 - DNA, 25 bp, Probe Sequence
cggaggtttcggcagtggcatccgg

SEQ ID NO: 190804 - DNA, 25 bp, Probe Sequence
cgcgggtttaagcgattcttctgcc

SEQ ID NO: 190805 - DNA, 25 bp, Probe Sequence
cgaggccttaaaaagctggcttggc

SEQ ID NO: 190806 - DNA, 25 bp, Probe Sequence
cggcacttggcgtaaagccgcttcc

SEQ ID NO: 190807 - DNA, 25 bp, Probe Sequence
cggccctggctaagaagttgcttcc

SEQ ID NO: 190808 - DNA, 25 bp, Probe Sequence
cgtcccttgtcaggagacggctctt

SEQ ID NO: 190809 - DNA, 25 bp, Probe Sequence
cggcctcttgtgggcaagcagacaa

SEQ ID NO: 190810 - DNA, 25 bp, Probe Sequence
cggctcctgtaccatgaacagcaaa

SEQ ID NO: 190811 - DNA, 25 bp, Probe Sequence
ctggccattctagatagtgctgcat

SEQ ID NO: 190812 - DNA, 25 bp, Probe Sequence
cggccatgttgagctacttcaagcc

SEQ ID NO: 190813 - DNA, 25 bp, Probe Sequence
cgggctgtggtgaccgcaacaagcc

SEQ ID NO: 190814 - DNA, 25 bp, Probe Sequence
cgggaggttgccaaaactcagccgc

SEQ ID NO: 190815 - DNA, 25 bp, Probe Sequence
cgaggttgtctgctaaacctgctcc

SEQ ID NO: 190816 - DNA, 25 bp, Probe Sequence
cgggacgacgttgaagccatggccc

SEQ ID NO: 190817 - DNA, 25 bp, Probe Sequence
cgggaggggttgaagaccaggcctg

SEQ ID NO: 190818 - DNA, 25 bp, Probe Sequence
cggccaggaggcttcaagaggaggg

SEQ ID NO: 190819 - DNA, 25 bp, Probe Sequence
ctggccacaaactgaatgacaaggg

SEQ ID NO: 190820 - DNA, 25 bp, Probe Sequence
cggccaaggagctgttcaacgagga

SEQ ID NO: 190821 - DNA, 25 bp, Probe Sequence
cggcccgagtgctggtagacggaga

SEQ ID NO: 190822 - DNA, 25 bp, Probe Sequence
cggaccaatgtctgtgtgtgggagg

SEQ ID NO: 190823 - DNA, 25 bp, Probe Sequence
cggacctgtctgtcagagttcggag

SEQ ID NO: 190824 - DNA, 25 bp, Probe Sequence
cggccctggagggagcatctcgggc

SEQ ID NO: 190825 - DNA, 25 bp, Probe Sequence
cggccccagcagtttgatgtcatgg

SEQ ID NO: 190826 - DNA, 25 bp, Probe Sequence
cggtctccgcgatttttcagagtgg

SEQ ID NO: 190827 - DNA, 25 bp, Probe Sequence
cgggctcctggaagttatctattga

SEQ ID NO: 190828 - DNA, 25 bp, Probe Sequence
cgaccccgtgaactacgtgaggcaa

SEQ ID NO: 190829 - DNA, 25 bp, Probe Sequence
cggcccccaggacaagtggtatgac

SEQ ID NO: 190830 - DNA, 25 bp, Probe Sequence
cgtctctctcctggggtaggtttag

SEQ ID NO: 190831 - DNA, 25 bp, Probe Sequence
cgtttccttcgggataggtacaatg

SEQ ID NO: 190832 - DNA, 25 bp, Probe Sequence
cgggctccattcccaaggaaaagag

SEQ ID NO: 190833 - DNA, 25 bp, Probe Sequence
cgtggatcactacaaggaggagaag

SEQ ID NO: 190834 - DNA, 25 bp, Probe Sequence
cggtcacccaggaggatggcaaaga

SEQ ID NO: 190835 - DNA, 25 bp, Probe Sequence
cggcccctcaggagcaggtgaagag

SEQ ID NO: 190836 - DNA, 25 bp, Probe Sequence
cgtcccgctcatccaagggacaagg

SEQ ID NO: 190837 - DNA, 25 bp, Probe Sequence
cggtcactcctctcagtggaaagag

SEQ ID NO: 190838 - DNA, 25 bp, Probe Sequence
ctggccactgtcaaggcagggaagg

SEQ ID NO: 190839 - DNA, 25 bp, Probe Sequence
cggcgcactccatgcgcaagcagaa

SEQ ID NO: 190840 - DNA, 25 bp, Probe Sequence
cggcgcactccatgcgcaagcagaa

SEQ ID NO: 190841 - DNA, 25 bp, Probe Sequence
cggcagagacacaggaagcggaact

SEQ ID NO: 190842 - DNA, 25 bp, Probe Sequence
cggaggaacccagagcggaggctgg

SEQ ID NO: 190843 - DNA, 25 bp, Probe Sequence
cggctgagaacggcagcggcgaggg

SEQ ID NO: 190844 - DNA, 25 bp, Probe Sequence
cgggcagtagcgcccgacacatggt

SEQ ID NO: 190845 - DNA, 25 bp, Probe Sequence
cggagattcacgcccagaaaggagc

SEQ ID NO: 190846 - DNA, 25 bp, Probe Sequence
cgtaccgcacgggaaggaggagcag

SEQ ID NO: 190847 - DNA, 25 bp, Probe Sequence
cggatgctcccgatgaagttgcgtg

SEQ ID NO: 190848 - DNA, 25 bp, Probe Sequence
cggatgtcttggagacctctgggtg

SEQ ID NO: 190849 - DNA, 25 bp, Probe Sequence
cggcatgtgcaaggccggcttcgcg

SEQ ID NO: 190850 - DNA, 25 bp, Probe Sequence
cggctggaaggcgttgtcccaggac

SEQ ID NO: 190851 - DNA, 25 bp, Probe Sequence
cggctgaagattatgtgccccggaa

SEQ ID NO: 190852 - DNA, 25 bp, Probe Sequence
cggataagcactgatgtcccactgg

SEQ ID NO: 190853 - DNA, 25 bp, Probe Sequence
cggataagcactgatgtcccactgg

SEQ ID NO: 190854 - DNA, 25 bp, Probe Sequence
cggctgaggcgtaagttggacttat

SEQ ID NO: 190855 - DNA, 25 bp, Probe Sequence
cgacgatgtgcctttgatttaattt

SEQ ID NO: 190856 - DNA, 25 bp, Probe Sequence
cgaagtgtggtgtcttttatatttg

SEQ ID NO: 190857 - DNA, 25 bp, Probe Sequence
cggtgagcggtggtggtttattctt

SEQ ID NO: 190858 - DNA, 25 bp, Probe Sequence
cggggctgttcgtgatggtgttgat

SEQ ID NO: 190859 - DNA, 25 bp, Probe Sequence
cgtggtttccgattgtttgatagta

SEQ ID NO: 190860 - DNA, 25 bp, Probe Sequence
cgtgggttcctgatgtcggtgcagg

SEQ ID NO: 190861 - DNA, 25 bp, Probe Sequence
cgtgggttctgctgagtaggtggag

SEQ ID NO: 190862 - DNA, 25 bp, Probe Sequence
cggggagcaatgtggatggcctggg

SEQ ID NO: 190863 - DNA, 25 bp, Probe Sequence
cggtgaagaatgctcagatggctca

SEQ ID NO: 190864 - DNA, 25 bp, Probe Sequence
cggatacaattcctacagcgtctcc

SEQ ID NO: 190865 - DNA, 25 bp, Probe Sequence
cgtgtccattatcctgaagttgcta

SEQ ID NO: 190866 - DNA, 25 bp, Probe Sequence
cggctctctcttttataggtgtaaa

SEQ ID NO: 190867 - DNA, 25 bp, Probe Sequence
cgtttgccatatcccattggttaaa

SEQ ID NO: 190868 - DNA, 25 bp, Probe Sequence
cgtctgtccacttggctaactttta

SEQ ID NO: 190869 - DNA, 25 bp, Probe Sequence
cgctatgacccttaggcctatttta

SEQ ID NO: 190870 - DNA, 25 bp, Probe Sequence
cgtaacctgcaatgtcgcttaccta

SEQ ID NO: 190871 - DNA, 25 bp, Probe Sequence
cgtggagtccactggcgtcttcacc

SEQ ID NO: 190872 - DNA, 25 bp, Probe Sequence
cgtggagtccactggcgtcttcacc

SEQ ID NO: 190873 - DNA, 25 bp, Probe Sequence
cgggattgcatctgggcttaaaccc

SEQ ID NO: 190874 - DNA, 25 bp, Probe Sequence
cggagttgcattctagtttctgacc

SEQ ID NO: 190875 - DNA, 25 bp, Probe Sequence
cgtgcagactccacgttttgctacc

SEQ ID NO: 190876 - DNA, 25 bp, Probe Sequence
cggcaagcgagcacagtattatttc

SEQ ID NO: 190877 - DNA, 25 bp, Probe Sequence
cggcagcaggggtgctattaatatt

SEQ ID NO: 190878 - DNA, 25 bp, Probe Sequence
cggctagtgggtcctcagtggatgt

SEQ ID NO: 190879 - DNA, 25 bp, Probe Sequence
cggtgattggccatataattgattt

SEQ ID NO: 190880 - DNA, 25 bp, Probe Sequence
cggcattaatccgtttatgtgatgt

SEQ ID NO: 190881 - DNA, 25 bp, Probe Sequence
cggtgtagatccatatttcggaggt

SEQ ID NO: 190882 - DNA, 25 bp, Probe Sequence
cgggatcaaagtctgttctggcggc

SEQ ID NO: 190883 - DNA, 25 bp, Probe Sequence
cgggatcaaagtctgttctggcggc

SEQ ID NO: 190884 - DNA, 25 bp, Probe Sequence
cggaagatcaagtcgtgctcctggc

SEQ ID NO: 190885 - DNA, 25 bp, Probe Sequence
cggcaccatcaggtgagtgctcctg

SEQ ID NO: 190886 - DNA, 25 bp, Probe Sequence
cggctctcagcggagcaggcccaac

SEQ ID NO: 190887 - DNA, 25 bp, Probe Sequence
cggcttcagcctggaggagctcagg

SEQ ID NO: 190888 - DNA, 25 bp, Probe Sequence
cggcttgcatccggaaacacagcta

SEQ ID NO: 190889 - DNA, 25 bp, Probe Sequence
cggcctgacctgggagaactgtcaa

SEQ ID NO: 190890 - DNA, 25 bp, Probe Sequence
cggacatagtcgtggatcactacaa

SEQ ID NO: 190891 - DNA, 25 bp, Probe Sequence
ccgcactcagttatggcttctacgg

SEQ ID NO: 190892 - DNA, 25 bp, Probe Sequence
cggcactcagttatgcagatgatca

SEQ ID NO: 190893 - DNA, 25 bp, Probe Sequence
cggcctcaatgttggcaatgccacc

SEQ ID NO: 190894 - DNA, 25 bp, Probe Sequence
cggcaatatcatcaccacacgcact

SEQ ID NO: 190895 - DNA, 25 bp, Probe Sequence
cggaaatgaggaccatcactgtatg

SEQ ID NO: 190896 - DNA, 25 bp, Probe Sequence
cggtatagtggactcgactgctttc

SEQ ID NO: 190897 - DNA, 25 bp, Probe Sequence
cgggtagctggagcgaagcgttccg

SEQ ID NO: 190898 - DNA, 25 bp, Probe Sequence
cgaagtgaaggagacaccgttccgc

SEQ ID NO: 190899 - DNA, 25 bp, Probe Sequence
cgagaggagggaggtcccggtccag

SEQ ID NO: 190900 - DNA, 25 bp, Probe Sequence
cgagaatgagggtcctttgggaaag

SEQ ID NO: 190901 - DNA, 25 bp, Probe Sequence
cggactgatgttagactttggataa

SEQ ID NO: 190902 - DNA, 25 bp, Probe Sequence
gcgaacggattttttatccagaaat

SEQ ID NO: 190903 - DNA, 25 bp, Probe Sequence
ccgagggtcatttattgcccaagtt

SEQ ID NO: 190904 - DNA, 25 bp, Probe Sequence
cgggggtatactacggtcaatgctc

SEQ ID NO: 190905 - DNA, 25 bp, Probe Sequence
cggggggcatagctctaatctaata

SEQ ID NO: 190906 - DNA, 25 bp, Probe Sequence
cggtggggaagacttgcctcattaa

SEQ ID NO: 190907 - DNA, 25 bp, Probe Sequence
cggtgtgggtggtggttctatagag

SEQ ID NO: 190908 - DNA, 25 bp, Probe Sequence
cggtctgggtgttaagtgctccaag

SEQ ID NO: 190909 - DNA, 25 bp, Probe Sequence
cggcactggcagcttaatgcctctc

SEQ ID NO: 190910 - DNA, 25 bp, Probe Sequence
cggcagccaagacatacagcagccc

SEQ ID NO: 190911 - DNA, 25 bp, Probe Sequence
cggacgaggcatcatgtgcatggac

SEQ ID NO: 190912 - DNA, 25 bp, Probe Sequence
cggaggttgcattgtgtgaagattg

SEQ ID NO: 190913 - DNA, 25 bp, Probe Sequence
cgggagtctgagtatagagagaatg

SEQ ID NO: 190914 - DNA, 25 bp, Probe Sequence
cgggattgctggcctcataaaatga

SEQ ID NO: 190915 - DNA, 25 bp, Probe Sequence
cggagcacctggtctataaccacac

SEQ ID NO: 190916 - DNA, 25 bp, Probe Sequence
cgggtccagtgtcaacagtatcatg

SEQ ID NO: 190917 - DNA, 25 bp, Probe Sequence
cgggtgcctggtcagaaggccagcc

SEQ ID NO: 190918 - DNA, 25 bp, Probe Sequence
cggcccctggagatgattgagccgc

SEQ ID NO: 190919 - DNA, 25 bp, Probe Sequence
cggcagcccgggagggatgctgctg

SEQ ID NO: 190920 - DNA, 25 bp, Probe Sequence
cggcgcgggaggaggatggcgctgt

SEQ ID NO: 190921 - DNA, 25 bp, Probe Sequence
cggaggcggaggtcaagggcgcact

SEQ ID NO: 190922 - DNA, 25 bp, Probe Sequence
cggatgggtgtgggagtgaggggtt

SEQ ID NO: 190923 - DNA, 25 bp, Probe Sequence
cggcgggcgctggaagtagagaggc

SEQ ID NO: 190924 - DNA, 25 bp, Probe Sequence
cggcggccctgaaggtgagtgaggc

SEQ ID NO: 190925 - DNA, 25 bp, Probe Sequence
cggcgtgtccgaggatggagccgcg

SEQ ID NO: 190926 - DNA, 25 bp, Probe Sequence
cggctactcatggaagcaggaccag

SEQ ID NO: 190927 - DNA, 25 bp, Probe Sequence
cggctgaggcggcagcagagcatcc

SEQ ID NO: 190928 - DNA, 25 bp, Probe Sequence
cggtatgttgggccagagcatccgg

SEQ ID NO: 190929 - DNA, 25 bp, Probe Sequence
cgggagttgagggagcagacggtgc

SEQ ID NO: 190930 - DNA, 25 bp, Probe Sequence
cggctggttttgtaagatgctgggt

SEQ ID NO: 190931 - DNA, 25 bp, Probe Sequence
cggtggtccttgtgacatgtcaggc

SEQ ID NO: 190932 - DNA, 25 bp, Probe Sequence
cgggttcctctctgagcgagcggac

SEQ ID NO: 190933 - DNA, 25 bp, Probe Sequence
cgggtctccaattacatcgactgga

SEQ ID NO: 190934 - DNA, 25 bp, Probe Sequence
cgggtggaagctttcatcgagttga

SEQ ID NO: 190935 - DNA, 25 bp, Probe Sequence
cggcgtggaagtttcaatgcgagga

SEQ ID NO: 190936 - DNA, 25 bp, Probe Sequence
cgtgcgggacatgattcgggaggtg

SEQ ID NO: 190937 - DNA, 25 bp, Probe Sequence
cgtgaggcaactgtggcagggaaaa

SEQ ID NO: 190938 - DNA, 25 bp, Probe Sequence
cggagacatcctctccatgggatga

SEQ ID NO: 190939 - DNA, 25 bp, Probe Sequence
cggcagaatctggccatgactggcg

SEQ ID NO: 190940 - DNA, 25 bp, Probe Sequence
cggcacagagctgcgagtcatggga

SEQ ID NO: 190941 - DNA, 25 bp, Probe Sequence
cggacaagctgcatttagcgagtct

SEQ ID NO: 190942 - DNA, 25 bp, Probe Sequence
cggaccactgcagactgagcggtgg

SEQ ID NO: 190943 - DNA, 25 bp, Probe Sequence
cggaatccgccagttggagcgtgcg

SEQ ID NO: 190944 - DNA, 25 bp, Probe Sequence
cggagactatggctgtcgaccatgt

SEQ ID NO: 190945 - DNA, 25 bp, Probe Sequence
cggaagtgatcgctgtgtgaatcgt

SEQ ID NO: 190946 - DNA, 25 bp, Probe Sequence
cggcaccaatcgcattcagagatca

SEQ ID NO: 190947 - DNA, 25 bp, Probe Sequence
cgaggcaacttgaactcagaacact

SEQ ID NO: 190948 - DNA, 25 bp, Probe Sequence
cgtggcagacttgaccgagcaatat

SEQ ID NO: 190949 - DNA, 25 bp, Probe Sequence
cgttgacacagtggtcccagatact

SEQ ID NO: 190950 - DNA, 25 bp, Probe Sequence
cgggtgcactatggcttgtacaacc

SEQ ID NO: 190951 - DNA, 25 bp, Probe Sequence
cggatgtcacgagctcgttagctgc

SEQ ID NO: 190952 - DNA, 25 bp, Probe Sequence
cggaggcgcgtgactggttgagcgg

SEQ ID NO: 190953 - DNA, 25 bp, Probe Sequence
cggtcagccggctggtggagaggga

SEQ ID NO: 190954 - DNA, 25 bp, Probe Sequence
cggacgaggcgctggtggatgaatg

SEQ ID NO: 190955 - DNA, 25 bp, Probe Sequence
cggagcagagcggtcagggatcatg

SEQ ID NO: 190956 - DNA, 25 bp, Probe Sequence
cggagcaggcccaacgattctcgtc

SEQ ID NO: 190957 - DNA, 25 bp, Probe Sequence
cgtggcggcgacgacccattcgaac

SEQ ID NO: 190958 - DNA, 25 bp, Probe Sequence
cgaggtggagaagccctttgccatc

SEQ ID NO: 190959 - DNA, 25 bp, Probe Sequence
cgaagcggacacagttctcattccc

SEQ ID NO: 190960 - DNA, 25 bp, Probe Sequence
cgacctggacttgtgtaactcgacc

SEQ ID NO: 190961 - DNA, 25 bp, Probe Sequence
cgtctctggatcggaatttacctga

SEQ ID NO: 190962 - DNA, 25 bp, Probe Sequence
cgtacagttcaccaatcttaccatg

SEQ ID NO: 190963 - DNA, 25 bp, Probe Sequence
cgtcatcgactacattctcgacctg

SEQ ID NO: 190964 - DNA, 25 bp, Probe Sequence
cgtcatgcgagttggttttggcacc

SEQ ID NO: 190965 - DNA, 25 bp, Probe Sequence
cggcagagaagtagtgtccaggcac

SEQ ID NO: 190966 - DNA, 25 bp, Probe Sequence
cggctgctacagcgtgacgctggca

SEQ ID NO: 190967 - DNA, 25 bp, Probe Sequence
cggctgaggcagctgtagcggccgt

SEQ ID NO: 190968 - DNA, 25 bp, Probe Sequence
cggcggcagcagcagtgagagttcc

SEQ ID NO: 190969 - DNA, 25 bp, Probe Sequence
cggctgtgcgctaagtggcagacgc

SEQ ID NO: 190970 - DNA, 25 bp, Probe Sequence
cgtcttcactaaaggaatccccaat

SEQ ID NO: 190971 - DNA, 25 bp, Probe Sequence
cgtgggcagcgtgaggaaccccaac

SEQ ID NO: 190972 - DNA, 25 bp, Probe Sequence
cgtggagaggaatgggacccccaga

SEQ ID NO: 190973 - DNA, 25 bp, Probe Sequence
cgggtgctggatttaggcagccccc

SEQ ID NO: 190974 - DNA, 25 bp, Probe Sequence
cggggagtatgtggtggtgccctcc

SEQ ID NO: 190975 - DNA, 25 bp, Probe Sequence
cggattgaaagtgtggagacaggcc

SEQ ID NO: 190976 - DNA, 25 bp, Probe Sequence
cgtgatatgcacctgcaacggagac

SEQ ID NO: 190977 - DNA, 25 bp, Probe Sequence
cgatgacagtgcaatcatactagaa

SEQ ID NO: 190978 - DNA, 25 bp, Probe Sequence
cgatgacgctgaactagtaaggctc

SEQ ID NO: 190979 - DNA, 25 bp, Probe Sequence
cgaggcctgtggagtaggtccctct

SEQ ID NO: 190980 - DNA, 25 bp, Probe Sequence
cggagccgcgcgagatatggcccgc

SEQ ID NO: 190981 - DNA, 25 bp, Probe Sequence
cggatcctggccatgaaggcctcgc

SEQ ID NO: 190982 - DNA, 25 bp, Probe Sequence
cggatcctggccatgaaggcctcgc

SEQ ID NO: 190983 - DNA, 25 bp, Probe Sequence
cggctccggcatgtgcaaggccggc

SEQ ID NO: 190984 - DNA, 25 bp, Probe Sequence
cggctccggcatgtgcaaggccggc

SEQ ID NO: 190985 - DNA, 25 bp, Probe Sequence
cggctcttggctgagaagcggcgcc

SEQ ID NO: 190986 - DNA, 25 bp, Probe Sequence
ccttcttgtgcttaggactacccgg

SEQ ID NO: 190987 - DNA, 25 bp, Probe Sequence
cgtgctcttgtttgggattaacatg

SEQ ID NO: 190988 - DNA, 25 bp, Probe Sequence
cgatgccttttagtttttccaatga

SEQ ID NO: 190989 - DNA, 25 bp, Probe Sequence
cggcttttgtcagtatggcttttag

SEQ ID NO: 190990 - DNA, 25 bp, Probe Sequence
cggcattatttcctagttcttcttg

SEQ ID NO: 190991 - DNA, 25 bp, Probe Sequence
cggcaaagtgtttgagcctttccag

SEQ ID NO: 190992 - DNA, 25 bp, Probe Sequence
cgtgcaccgatgagaactctcctta

SEQ ID NO: 190993 - DNA, 25 bp, Probe Sequence
cgtgcatccttagtgaacttctgtt

SEQ ID NO: 190994 - DNA, 25 bp, Probe Sequence
cgtgagccttatgggagcgtttcct

SEQ ID NO: 190995 - DNA, 25 bp, Probe Sequence
cggagttatatatgcaggtggattt

SEQ ID NO: 190996 - DNA, 25 bp, Probe Sequence
cggagacaaaagcagatgaaggttc

SEQ ID NO: 190997 - DNA, 25 bp, Probe Sequence
cgggagaactcactgaggatgaggt

SEQ ID NO: 190998 - DNA, 25 bp, Probe Sequence
cggaagccctgaccaggcatggagt

SEQ ID NO: 190999 - DNA, 25 bp, Probe Sequence
cggatgaccctggtcttcaatggtt

SEQ ID NO: 191000 - DNA, 25 bp, Probe Sequence
cggatgaccctggtcttcaatggtt

SEQ ID NO: 191001 - DNA, 25 bp, Probe Sequence
cggatgagcagttgcttcttacgga

SEQ ID NO: 191002 - DNA, 25 bp, Probe Sequence
cggcatcaagtacttcctgacgatg

SEQ ID NO: 191003 - DNA, 25 bp, Probe Sequence
cggaagatcatcttctcctacgtgg

SEQ ID NO: 191004 - DNA, 25 bp, Probe Sequence
cgtattgtatatacgcctcacactc

SEQ ID NO: 191005 - DNA, 25 bp, Probe Sequence
cgtgtgtgtactcgcatgttcaatc

SEQ ID NO: 191006 - DNA, 25 bp, Probe Sequence
cgggagtcctgcaattgtactgcgg

SEQ ID NO: 191007 - DNA, 25 bp, Probe Sequence
cggaggttgagcaactacactgcgc

SEQ ID NO: 191008 - DNA, 25 bp, Probe Sequence
cgtgggctatgagaccatcctgaaa

SEQ ID NO: 191009 - DNA, 25 bp, Probe Sequence
cgggtctgggccacatcaagaagtg

SEQ ID NO: 191010 - DNA, 25 bp, Probe Sequence
cgtggaaagcccagcagccaaaggc

SEQ ID NO: 191011 - DNA, 25 bp, Probe Sequence
cggtgaagaagcgaggcccaacagc

SEQ ID NO: 191012 - DNA, 25 bp, Probe Sequence
cgggaagaaccaagcggtgccagcc

SEQ ID NO: 191013 - DNA, 25 bp, Probe Sequence
cgggaggaagcctggactgtgcagc

SEQ ID NO: 191014 - DNA, 25 bp, Probe Sequence
cggagaaactcctaaattgcatcag

SEQ ID NO: 191015 - DNA, 25 bp, Probe Sequence
cggagcttgtccggaagattgcaaa

SEQ ID NO: 191016 - DNA, 25 bp, Probe Sequence
cggaaatgctccgctagcaatcgca

SEQ ID NO: 191017 - DNA, 25 bp, Probe Sequence
cggagaactacatctatgactagac

SEQ ID NO: 191018 - DNA, 25 bp, Probe Sequence
cggagaacgagctgcatggggagaa

SEQ ID NO: 191019 - DNA, 25 bp, Probe Sequence
cggagaccacactggtcctggaatc

SEQ ID NO: 191020 - DNA, 25 bp, Probe Sequence
cgtaatcccatgctaacctgtaatc

SEQ ID NO: 191021 - DNA, 25 bp, Probe Sequence
cgtgttcttttctaagccatggagt

SEQ ID NO: 191022 - DNA, 25 bp, Probe Sequence
cgtgttggtgctgctaagtttagcc

SEQ ID NO: 191023 - DNA, 25 bp, Probe Sequence
cggtctaggatcgaaatgttaacac

SEQ ID NO: 191024 - DNA, 25 bp, Probe Sequence
cggattattgctgcaactggcaaac

SEQ ID NO: 191025 - DNA, 25 bp, Probe Sequence
cggtactggtcccactgtgcagtac

SEQ ID NO: 191026 - DNA, 25 bp, Probe Sequence
cgttacctgtcactattgtgccttc

SEQ ID NO: 191027 - DNA, 25 bp, Probe Sequence
cgttgaacagtcgtgctctgatcct

SEQ ID NO: 191028 - DNA, 25 bp, Probe Sequence
cgtggacattattctcctgatcctc

SEQ ID NO: 191029 - DNA, 25 bp, Probe Sequence
cgtggcactaatctggtgtcactct

SEQ ID NO: 191030 - DNA, 25 bp, Probe Sequence
cgtatggcgagaactgggctgcctc

SEQ ID NO: 191031 - DNA, 25 bp, Probe Sequence
cgtcatgacggtaattggcccgcct

SEQ ID NO: 191032 - DNA, 25 bp, Probe Sequence
cggaggtgtttattgatgcccagct

SEQ ID NO: 191033 - DNA, 25 bp, Probe Sequence
cggagcagttcactgccatgttccg

SEQ ID NO: 191034 - DNA, 25 bp, Probe Sequence
cggagaggccagcaagtctcaggaa

SEQ ID NO: 191035 - DNA, 25 bp, Probe Sequence
cggatcaatgcccgagagggaggaa

SEQ ID NO: 191036 - DNA, 25 bp, Probe Sequence
cggtcaatgctctgaaatctgtgga

SEQ ID NO: 191037 - DNA, 25 bp, Probe Sequence
cggtcaatgctctgaaatctgtgga

SEQ ID NO: 191038 - DNA, 25 bp, Probe Sequence
cgggcaggcatcgagatcttcgtgg

SEQ ID NO: 191039 - DNA, 25 bp, Probe Sequence
cgggcaggcatcgagatcttcgtgg

SEQ ID NO: 191040 - DNA, 25 bp, Probe Sequence
cggagcaggatgaactgtctcagag

SEQ ID NO: 191041 - DNA, 25 bp, Probe Sequence
cggaccgcagtcgagtctgcagagt

SEQ ID NO: 191042 - DNA, 25 bp, Probe Sequence
cggactccagtgccactgtgaggaa

SEQ ID NO: 191043 - DNA, 25 bp, Probe Sequence
cggactgcctggagatctgcatgga

SEQ ID NO: 191044 - DNA, 25 bp, Probe Sequence
cggtctcggtgactgagctgcagac

SEQ ID NO: 191045 - DNA, 25 bp, Probe Sequence
cggaaatggatgtctggcgcaaccc

SEQ ID NO: 191046 - DNA, 25 bp, Probe Sequence
cggagccagcgtggtggccatagac

SEQ ID NO: 191047 - DNA, 25 bp, Probe Sequence
cggacaatgctggcgcttctctcgt

SEQ ID NO: 191048 - DNA, 25 bp, Probe Sequence
cggacaagtgcagctgctgcgcctg

SEQ ID NO: 191049 - DNA, 25 bp, Probe Sequence
cggaaagtgcagaatgctcctccac

SEQ ID NO: 191050 - DNA, 25 bp, Probe Sequence
cggaggagtgcgggatcctggacgg

SEQ ID NO: 191051 - DNA, 25 bp, Probe Sequence
cggaggagtgcgggatcctggacgg

SEQ ID NO: 191052 - DNA, 25 bp, Probe Sequence
cggaagattgctggactcgctgaag

SEQ ID NO: 191053 - DNA, 25 bp, Probe Sequence
cggaatgttgtgtttgcggtggttg

SEQ ID NO: 191054 - DNA, 25 bp, Probe Sequence
cggaatgtggcgtttggtgggcatc

SEQ ID NO: 191055 - DNA, 25 bp, Probe Sequence
cggacagtgtggccttgcaagtggc

SEQ ID NO: 191056 - DNA, 25 bp, Probe Sequence
cgtactggtgggtatcacggtgccc

SEQ ID NO: 191057 - DNA, 25 bp, Probe Sequence
cgtcaatggtgaagattacggtaac

SEQ ID NO: 191058 - DNA, 25 bp, Probe Sequence
cgtcaatggagcagaggcggggaag

SEQ ID NO: 191059 - DNA, 25 bp, Probe Sequence
cgtgaagggcaccgagaactcgaag

SEQ ID NO: 191060 - DNA, 25 bp, Probe Sequence
cgctgaaggccccgagggcgaaggt

SEQ ID NO: 191061 - DNA, 25 bp, Probe Sequence
cgggtgatcccgctagtgcgagaag

SEQ ID NO: 191062 - DNA, 25 bp, Probe Sequence
cggagactagcccctatgtcaaaga

SEQ ID NO: 191063 - DNA, 25 bp, Probe Sequence
cggcaactggaccctgatgagaaga

SEQ ID NO: 191064 - DNA, 25 bp, Probe Sequence
cggcacctgagacccaatgagaatc

SEQ ID NO: 191065 - DNA, 25 bp, Probe Sequence
cggcaccgatgcgtgccagggtgat

SEQ ID NO: 191066 - DNA, 25 bp, Probe Sequence
cgtcacgcgcaggtgacggccttag

SEQ ID NO: 191067 - DNA, 25 bp, Probe Sequence
cggacgagcgcaaaagcgccttctc

SEQ ID NO: 191068 - DNA, 25 bp, Probe Sequence
cggacagactgctgggtgactggct

SEQ ID NO: 191069 - DNA, 25 bp, Probe Sequence
cggtcagtgctgggcggagactgtc

SEQ ID NO: 191070 - DNA, 25 bp, Probe Sequence
cggagcagattgcagcggacatccc

SEQ ID NO: 191071 - DNA, 25 bp, Probe Sequence
cggagcagactcttgggagatgcca

SEQ ID NO: 191072 - DNA, 25 bp, Probe Sequence
cggatgagtctcatgtggctgctgc

SEQ ID NO: 191073 - DNA, 25 bp, Probe Sequence
cggatcacggcaatgcggctgcact

SEQ ID NO: 191074 - DNA, 25 bp, Probe Sequence
cggatgcactgggccaggtcttgaa

SEQ ID NO: 191075 - DNA, 25 bp, Probe Sequence
cggaggatgtggccatgcaggtgga

SEQ ID NO: 191076 - DNA, 25 bp, Probe Sequence
cggaggccagagctgagcactcagc

SEQ ID NO: 191077 - DNA, 25 bp, Probe Sequence
cggatggtacattcaggcaccagca

SEQ ID NO: 191078 - DNA, 25 bp, Probe Sequence
cggaggtggcaatgcccgagaggcc

SEQ ID NO: 191079 - DNA, 25 bp, Probe Sequence
cggagtgggccttgaggagctcagg

SEQ ID NO: 191080 - DNA, 25 bp, Probe Sequence
cgggatggccgctaaatagctcacg

SEQ ID NO: 191081 - DNA, 25 bp, Probe Sequence
cggagacagcccaaatatcctcgga

SEQ ID NO: 191082 - DNA, 25 bp, Probe Sequence
cggagagcacgccatgaaggcctcg

SEQ ID NO: 191083 - DNA, 25 bp, Probe Sequence
cggaggcaggttggagccgctgccg

SEQ ID NO: 191084 - DNA, 25 bp, Probe Sequence
cgtcggcaggttcgaggcgattcga

SEQ ID NO: 191085 - DNA, 25 bp, Probe Sequence
cgtgcagcgcatcttcgaaaacggc

SEQ ID NO: 191086 - DNA, 25 bp, Probe Sequence
cgtagcctcatttcttacagacggg

SEQ ID NO: 191087 - DNA, 25 bp, Probe Sequence
cgtccctcataattccacgagaaag

SEQ ID NO: 191088 - DNA, 25 bp, Probe Sequence
cgcccccgtattgacgtcatgacgg

SEQ ID NO: 191089 - DNA, 25 bp, Probe Sequence
cgcctactaaggacgccgtcgaggt

SEQ ID NO: 191090 - DNA, 25 bp, Probe Sequence
cgctttggaaggcgcacggggcgaa

SEQ ID NO: 191091 - DNA, 25 bp, Probe Sequence
cggttcgagagccgagtctgtgggc

SEQ ID NO: 191092 - DNA, 25 bp, Probe Sequence
cgactgtcaggaagggtcggagtct

SEQ ID NO: 191093 - DNA, 25 bp, Probe Sequence
cgggtggatcacgaggtaggagtta

SEQ ID NO: 191094 - DNA, 25 bp, Probe Sequence
cggtggtgatctctggtgcaggaaa

SEQ ID NO: 191095 - DNA, 25 bp, Probe Sequence
cggggctgatctgtttgtggagaac

SEQ ID NO: 191096 - DNA, 25 bp, Probe Sequence
cggtggtccctttgtgtgtgaggac

SEQ ID NO: 191097 - DNA, 25 bp, Probe Sequence
cggtgtgtaatcacgttccagggcc

SEQ ID NO: 191098 - DNA, 25 bp, Probe Sequence
cggtgtgtaatcacgttccagggcc

SEQ ID NO: 191099 - DNA, 25 bp, Probe Sequence
cgttctgtttcaccagtttccaagt

SEQ ID NO: 191100 - DNA, 25 bp, Probe Sequence
cgtcaatgtgttgtagtatttccgt

SEQ ID NO: 191101 - DNA, 25 bp, Probe Sequence
cgtcacatgggagatttgttttggc

SEQ ID NO: 191102 - DNA, 25 bp, Probe Sequence
cgaactggagattaacgtactgtgg

SEQ ID NO: 191103 - DNA, 25 bp, Probe Sequence
cgaacaggttagacggtccctgaga

SEQ ID NO: 191104 - DNA, 25 bp, Probe Sequence
cggaaggatcataacggagcccgga

SEQ ID NO: 191105 - DNA, 25 bp, Probe Sequence
cgggagtcatgctgacgtggcccga

SEQ ID NO: 191106 - DNA, 25 bp, Probe Sequence
cgtgcaaaagtctagccttgcccga

SEQ ID NO: 191107 - DNA, 25 bp, Probe Sequence
cgtgcgcctttctgccggacgcgag

SEQ ID NO: 191108 - DNA, 25 bp, Probe Sequence
cgtgtcacctactacttggactgga

SEQ ID NO: 191109 - DNA, 25 bp, Probe Sequence
cgtgtcacctactacttggactgga

SEQ ID NO: 191110 - DNA, 25 bp, Probe Sequence
cgtgtcacctactacttggactgga

SEQ ID NO: 191111 - DNA, 25 bp, Probe Sequence
cgttccgcgcacaacgtggatagga

SEQ ID NO: 191112 - DNA, 25 bp, Probe Sequence
cgggccgacaccagtacataaatga

SEQ ID NO: 191113 - DNA, 25 bp, Probe Sequence
cggacctgacagcattccaataaag

SEQ ID NO: 191114 - DNA, 25 bp, Probe Sequence
cggattcagtggcatcggccaacca

SEQ ID NO: 191115 - DNA, 25 bp, Probe Sequence
cggtcctctgggtgatcagtaccag

SEQ ID NO: 191116 - DNA, 25 bp, Probe Sequence
cggtccagctggcctggacagtatc

SEQ ID NO: 191117 - DNA, 25 bp, Probe Sequence
cgactccaaggcagctgagctgatt

SEQ ID NO: 191118 - DNA, 25 bp, Probe Sequence
cgtgcttcatatggcgtgcttggag

SEQ ID NO: 191119 - DNA, 25 bp, Probe Sequence
cgtgttcaatgcttcttcatggacc

SEQ ID NO: 191120 - DNA, 25 bp, Probe Sequence
cggacactgatgtcatcctcatgtg

SEQ ID NO: 191121 - DNA, 25 bp, Probe Sequence
cgtggcaatgaattcttctgtgaag

SEQ ID NO: 191122 - DNA, 25 bp, Probe Sequence
cggtgtctgcaggcatttctgtgaa

SEQ ID NO: 191123 - DNA, 25 bp, Probe Sequence
cggtacgcagacaaacacatgaaca

SEQ ID NO: 191124 - DNA, 25 bp, Probe Sequence
cggaactgcgactcagcatgcagaa

SEQ ID NO: 191125 - DNA, 25 bp, Probe Sequence
cggagacggagggcatgctcagaga

SEQ ID NO: 191126 - DNA, 25 bp, Probe Sequence
cgtgcgctcggaggaaccagagaaa

SEQ ID NO: 191127 - DNA, 25 bp, Probe Sequence
cgtccatcacaactgagatcctcaa

SEQ ID NO: 191128 - DNA, 25 bp, Probe Sequence
cgctgatgaccccggacaccgacga

SEQ ID NO: 191129 - DNA, 25 bp, Probe Sequence
cgcttgaacccaggaggtggaggat

SEQ ID NO: 191130 - DNA, 25 bp, Probe Sequence
cgaccaaggccaggacgtggaggtg

SEQ ID NO: 191131 - DNA, 25 bp, Probe Sequence
cgagccaacggagaggtgaatcccc

SEQ ID NO: 191132 - DNA, 25 bp, Probe Sequence
cgaccaacacttgcaggggtccctg

SEQ ID NO: 191133 - DNA, 25 bp, Probe Sequence
tcgtttcacgtttaagggtcctctg

SEQ ID NO: 191134 - DNA, 25 bp, Probe Sequence
cgtttccagctttacatgtggtttg

SEQ ID NO: 191135 - DNA, 25 bp, Probe Sequence
cgtttgtcatcagaatcagaggtat

SEQ ID NO: 191136 - DNA, 25 bp, Probe Sequence
cgttggttcaccaggacgtgatggc

SEQ ID NO: 191137 - DNA, 25 bp, Probe Sequence
cggttttcaccatggagcagctgag

SEQ ID NO: 191138 - DNA, 25 bp, Probe Sequence
cgttgttcacaatagggcctcatgg

SEQ ID NO: 191139 - DNA, 25 bp, Probe Sequence
cgttgttaggggcgcagcgtcaggt

SEQ ID NO: 191140 - DNA, 25 bp, Probe Sequence
cggttattggggctgtgccatcggc

SEQ ID NO: 191141 - DNA, 25 bp, Probe Sequence
cgttgtgttggtcgggaacaaggca

SEQ ID NO: 191142 - DNA, 25 bp, Probe Sequence
cggggttagctgcaggtggaactca

SEQ ID NO: 191143 - DNA, 25 bp, Probe Sequence
cgtggtttgcctgaggctgtaactg

SEQ ID NO: 191144 - DNA, 25 bp, Probe Sequence
cgggattcgagtgtggtggccactg

SEQ ID NO: 191145 - DNA, 25 bp, Probe Sequence
cgggtctctgggctgcagtaagccg

SEQ ID NO: 191146 - DNA, 25 bp, Probe Sequence
cgtttatctgggtgaccaacctgtt

SEQ ID NO: 191147 - DNA, 25 bp, Probe Sequence
cctttgggcaggtgtagaaattatt

SEQ ID NO: 191148 - DNA, 25 bp, Probe Sequence
cgttatgggagggagtagaactttg

SEQ ID NO: 191149 - DNA, 25 bp, Probe Sequence
cgtacggcaagtatttcaagttgct

SEQ ID NO: 191150 - DNA, 25 bp, Probe Sequence
cgtcctggaacacctgtactagttg

SEQ ID NO: 191151 - DNA, 25 bp, Probe Sequence
cgattctgagaatcctgtccggaat

SEQ ID NO: 191152 - DNA, 25 bp, Probe Sequence
cgtctcttattttgcgctcgaggtt

SEQ ID NO: 191153 - DNA, 25 bp, Probe Sequence
cgtccatgtttttgccacaaaggaa

SEQ ID NO: 191154 - DNA, 25 bp, Probe Sequence
cgttagtttctcctctaatcagtaa

SEQ ID NO: 191155 - DNA, 25 bp, Probe Sequence
cgcttaggtcttgctctcaattttt

SEQ ID NO: 191156 - DNA, 25 bp, Probe Sequence
cgtcctgaggttactctatattttt

SEQ ID NO: 191157 - DNA, 25 bp, Probe Sequence
cgtgcctggctatttgccacatttc

SEQ ID NO: 191158 - DNA, 25 bp, Probe Sequence
cgtctagtcatacctgccaaatatg

SEQ ID NO: 191159 - DNA, 25 bp, Probe Sequence
cgtgctgtgtaggggctaacaatgg

SEQ ID NO: 191160 - DNA, 25 bp, Probe Sequence
cgtggtcttggacacaaccatgcgg

SEQ ID NO: 191161 - DNA, 25 bp, Probe Sequence
cgaaggcttgaaccaacctacggat

SEQ ID NO: 191162 - DNA, 25 bp, Probe Sequence
cgaacacttgcatacattcctactc

SEQ ID NO: 191163 - DNA, 25 bp, Probe Sequence
cgtgtcactgtttacatgacctatt

SEQ ID NO: 191164 - DNA, 25 bp, Probe Sequence
cgtgctccatctgaatcgattttct

SEQ ID NO: 191165 - DNA, 25 bp, Probe Sequence
cgggtcactccatcgatgttcttct

SEQ ID NO: 191166 - DNA, 25 bp, Probe Sequence
cggagttcttatactattagttcgt

SEQ ID NO: 191167 - DNA, 25 bp, Probe Sequence
cgtgaactttatactgtccagctct

SEQ ID NO: 191168 - DNA, 25 bp, Probe Sequence
cgtggattctggtccgagccagtga

SEQ ID NO: 191169 - DNA, 25 bp, Probe Sequence
cggagatagtgctaccctcacaatg

SEQ ID NO: 191170 - DNA, 25 bp, Probe Sequence
cggaggaatgcaaggcctgcaccag

SEQ ID NO: 191171 - DNA, 25 bp, Probe Sequence
cggaggaatgcaaggcctgcaccag

SEQ ID NO: 191172 - DNA, 25 bp, Probe Sequence
cggaggaatgcaaggcctgcaccag

SEQ ID NO: 191173 - DNA, 25 bp, Probe Sequence
cggggtcacagaggaggcacccctg

SEQ ID NO: 191174 - DNA, 25 bp, Probe Sequence
cggggtgatagtgaagcaattgcct

SEQ ID NO: 191175 - DNA, 25 bp, Probe Sequence
cgggaagatcccgtcagttgtgcct

SEQ ID NO: 191176 - DNA, 25 bp, Probe Sequence
cggagaagagcacgtcggtttcctt

SEQ ID NO: 191177 - DNA, 25 bp, Probe Sequence
cgggagaggcatcccgggtatcggt

SEQ ID NO: 191178 - DNA, 25 bp, Probe Sequence
cggagcaaggtggctgggagcccga

SEQ ID NO: 191179 - DNA, 25 bp, Probe Sequence
cggagcaccagggatgcaggaccac

SEQ ID NO: 191180 - DNA, 25 bp, Probe Sequence
cggagccgcatcctgagcaggaacg

SEQ ID NO: 191181 - DNA, 25 bp, Probe Sequence
cgggtggcatcgagatctgcatcac

SEQ ID NO: 191182 - DNA, 25 bp, Probe Sequence
cgccgggacagcagactgccggtaa

SEQ ID NO: 191183 - DNA, 25 bp, Probe Sequence
cgtcggcgacgaggacttcgtacac

SEQ ID NO: 191184 - DNA, 25 bp, Probe Sequence
cgtcgatctacgggatctttccatt

SEQ ID NO: 191185 - DNA, 25 bp, Probe Sequence
cgtcaattagcctgctgctttttgc

SEQ ID NO: 191186 - DNA, 25 bp, Probe Sequence
cgtacagcaagccaacttctttagc

SEQ ID NO: 191187 - DNA, 25 bp, Probe Sequence
cgtaacagcctacattgccttggcc

SEQ ID NO: 191188 - DNA, 25 bp, Probe Sequence
cgtggacagtcagggttcacttggg

SEQ ID NO: 191189 - DNA, 25 bp, Probe Sequence
cgaggaagacggatcacttgggccc

SEQ ID NO: 191190 - DNA, 25 bp, Probe Sequence
cgaggcgggtggatcacgaggtcag

SEQ ID NO: 191191 - DNA, 25 bp, Probe Sequence
cgggtgtgccatccagtgccgggtc

SEQ ID NO: 191192 - DNA, 25 bp, Probe Sequence
cggtggatgctcagagatggcaggg

SEQ ID NO: 191193 - DNA, 25 bp, Probe Sequence
cggtgttgcatcgatacaggcaggt

SEQ ID NO: 191194 - DNA, 25 bp, Probe Sequence
cgtgtggtctccagcaagggattcg

SEQ ID NO: 191195 - DNA, 25 bp, Probe Sequence
cgtggatttctcaagtcgggactgc

SEQ ID NO: 191196 - DNA, 25 bp, Probe Sequence
cgtggcttgttgatgactgggactt

SEQ ID NO: 191197 - DNA, 25 bp, Probe Sequence
cgggcttttggctactatggaccac

SEQ ID NO: 191198 - DNA, 25 bp, Probe Sequence
cgggcttttagcagcatgtacccaa

SEQ ID NO: 191199 - DNA, 25 bp, Probe Sequence
cctggctttaaggtttagctccaca

SEQ ID NO: 191200 - DNA, 25 bp, Probe Sequence
cgtgacttctaaactttatcccatc

SEQ ID NO: 191201 - DNA, 25 bp, Probe Sequence
cgtcctataataggctttagagcct

SEQ ID NO: 191202 - DNA, 25 bp, Probe Sequence
cgtccttcagacacagttatgcaga

SEQ ID NO: 191203 - DNA, 25 bp, Probe Sequence
cgtccatggagactgcctttcatga

SEQ ID NO: 191204 - DNA, 25 bp, Probe Sequence
cgtactcggatcgcttcttaggagt

SEQ ID NO: 191205 - DNA, 25 bp, Probe Sequence
cgtattagtatcgcctattaccatt

SEQ ID NO: 191206 - DNA, 25 bp, Probe Sequence
cgtattagtcatctgctagttacca

SEQ ID NO: 191207 - DNA, 25 bp, Probe Sequence
cggtgtgaacaggtcaagaataaca

SEQ ID NO: 191208 - DNA, 25 bp, Probe Sequence
cggtttatgagcacacaattatagc

SEQ ID NO: 191209 - DNA, 25 bp, Probe Sequence
cggttttggcagtacatcaatgggc

SEQ ID NO: 191210 - DNA, 25 bp, Probe Sequence
cggtcctggaaatctcacatggtgg

SEQ ID NO: 191211 - DNA, 25 bp, Probe Sequence
cggtccggaattcccgggatagcag

SEQ ID NO: 191212 - DNA, 25 bp, Probe Sequence
cggtccggaattcccgggatgagat

SEQ ID NO: 191213 - DNA, 25 bp, Probe Sequence
cggtccggaattcccgggatgagat

SEQ ID NO: 191214 - DNA, 25 bp, Probe Sequence
cggtccggaattcccgggatgagct

SEQ ID NO: 191215 - DNA, 25 bp, Probe Sequence
cggtccggaattcccgggattgctg

SEQ ID NO: 191216 - DNA, 25 bp, Probe Sequence
cggtccggaattcccgggatgtctg

SEQ ID NO: 191217 - DNA, 25 bp, Probe Sequence
cggtccggaattcccgggatgtcag

SEQ ID NO: 191218 - DNA, 25 bp, Probe Sequence
cggtcgcgggacaccgggtgtagag

SEQ ID NO: 191219 - DNA, 25 bp, Probe Sequence
cgttccgggcacacttgtgtgacaa

SEQ ID NO: 191220 - DNA, 25 bp, Probe Sequence
cgtcccagggacacgaactggagat

SEQ ID NO: 191221 - DNA, 25 bp, Probe Sequence
cgtggttgaggcgcggaagctggag

SEQ ID NO: 191222 - DNA, 25 bp, Probe Sequence
cgactgggagccggaggaacgggag

SEQ ID NO: 191223 - DNA, 25 bp, Probe Sequence
cgatccctaggtgaggagaagcggc

SEQ ID NO: 191224 - DNA, 25 bp, Probe Sequence
cgtctcctatggaaagtcgtcaggg

SEQ ID NO: 191225 - DNA, 25 bp, Probe Sequence
cgtatcctatggacggtcggatgca

SEQ ID NO: 191226 - DNA, 25 bp, Probe Sequence
cgttcactactgacggtctcaagag

SEQ ID NO: 191227 - DNA, 25 bp, Probe Sequence
cgtcgaccaatgccaggattcagag

SEQ ID NO: 191228 - DNA, 25 bp, Probe Sequence
cgtcttctagagcctttgatccagc

SEQ ID NO: 191229 - DNA, 25 bp, Probe Sequence
cgtcttcagagtcctccagtgagga

SEQ ID NO: 191230 - DNA, 25 bp, Probe Sequence
cgtgccatgggtaatcaatggaatg

SEQ ID NO: 191231 - DNA, 25 bp, Probe Sequence
cgtggtgggttttcaggcaatagag

SEQ ID NO: 191232 - DNA, 25 bp, Probe Sequence
cgtgggccgtatctgtcacaataaa

SEQ ID NO: 191233 - DNA, 25 bp, Probe Sequence
cgtgggggtggccgtgcaataaata

SEQ ID NO: 191234 - DNA, 25 bp, Probe Sequence
cgagggggtgcttggtgccaaactg

SEQ ID NO: 191235 - DNA, 25 bp, Probe Sequence
cgggtggagtgtggggcccagaagg

SEQ ID NO: 191236 - DNA, 25 bp, Probe Sequence
cgggtggaggcgatgcgcctagggc

SEQ ID NO: 191237 - DNA, 25 bp, Probe Sequence
cgggactgagcaggcaatggcctaa

SEQ ID NO: 191238 - DNA, 25 bp, Probe Sequence
cgtggatctgcatggtttgcctgag

SEQ ID NO: 191239 - DNA, 25 bp, Probe Sequence
cgtgagctctaattggattcccagt

SEQ ID NO: 191240 - DNA, 25 bp, Probe Sequence
cgtgagatgctcacgagtacccttc

SEQ ID NO: 191241 - DNA, 25 bp, Probe Sequence
cgatggacttccagaaccacctggg

SEQ ID NO: 191242 - DNA, 25 bp, Probe Sequence
cgtggagctgggccgaaccacgtgt

SEQ ID NO: 191243 - DNA, 25 bp, Probe Sequence
cgaggaggggtggactccaccttgg

SEQ ID NO: 191244 - DNA, 25 bp, Probe Sequence
cgaggagaagagtggccgcaccttt

SEQ ID NO: 191245 - DNA, 25 bp, Probe Sequence
cggggacatgaagagcagcgcccgg

SEQ ID NO: 191246 - DNA, 25 bp, Probe Sequence
cggggactgaagatggcgccgcgag

SEQ ID NO: 191247 - DNA, 25 bp, Probe Sequence
cgtgcggatccgagaggccaaggag

SEQ ID NO: 191248 - DNA, 25 bp, Probe Sequence
cgggtgcatctgcgtgaacgtagga

SEQ ID NO: 191249 - DNA, 25 bp, Probe Sequence
cggtgctcattgctgctaacagcat

SEQ ID NO: 191250 - DNA, 25 bp, Probe Sequence
cgtgctgtattgcccagaagccatc

SEQ ID NO: 191251 - DNA, 25 bp, Probe Sequence
cgtgcaatatctgccagcagaacca

SEQ ID NO: 191252 - DNA, 25 bp, Probe Sequence
cgtggagatgcggcagccactgagc

SEQ ID NO: 191253 - DNA, 25 bp, Probe Sequence
cggatgcggcatgtgatcagctaca

SEQ ID NO: 191254 - DNA, 25 bp, Probe Sequence
cgtgatgggctatatctgccgcatc

SEQ ID NO: 191255 - DNA, 25 bp, Probe Sequence
cggatgggcctctagtgacagatcc

SEQ ID NO: 191256 - DNA, 25 bp, Probe Sequence
cggtggcgcgattgggacagtcgcc

SEQ ID NO: 191257 - DNA, 25 bp, Probe Sequence
cggtgtggacatagggccggtctgc

SEQ ID NO: 191258 - DNA, 25 bp, Probe Sequence
cgtggatgaacatgggactcggctc

SEQ ID NO: 191259 - DNA, 25 bp, Probe Sequence
cgtcgtcgacaacggctccggcatg

SEQ ID NO: 191260 - DNA, 25 bp, Probe Sequence
cgtacaagcacagcgacatcacggc

SEQ ID NO: 191261 - DNA, 25 bp, Probe Sequence
cgtagctgagaggggaacagtgcca

SEQ ID NO: 191262 - DNA, 25 bp, Probe Sequence
cgtcgcgtggtctcagacgtggagc

SEQ ID NO: 191263 - DNA, 25 bp, Probe Sequence
cgttgctgtcgattaagaccggagc

SEQ ID NO: 191264 - DNA, 25 bp, Probe Sequence
cgtcctggatgatgacgacgccggc

SEQ ID NO: 191265 - DNA, 25 bp, Probe Sequence
cgtggtgggaagagcaagagggttt

SEQ ID NO: 191266 - DNA, 25 bp, Probe Sequence
cgtggtccctagaacaagaggctta

SEQ ID NO: 191267 - DNA, 25 bp, Probe Sequence
cgctggtcaccatgaaccacattgt

SEQ ID NO: 191268 - DNA, 25 bp, Probe Sequence
cctgttccccgatacgttgatggga

SEQ ID NO: 191269 - DNA, 25 bp, Probe Sequence
cgcgttcgcaccaaaaccgtgaaga

SEQ ID NO: 191270 - DNA, 25 bp, Probe Sequence
cggttccatccaaatacactttctg

SEQ ID NO: 191271 - DNA, 25 bp, Probe Sequence
cggttctgccacagagaggcctttg

SEQ ID NO: 191272 - DNA, 25 bp, Probe Sequence
cggggcatggaccgaggtggctttg

SEQ ID NO: 191273 - DNA, 25 bp, Probe Sequence
cggggcatggaccgaggtggctttg

SEQ ID NO: 191274 - DNA, 25 bp, Probe Sequence
cggggcatggaccgaggtggctttg

SEQ ID NO: 191275 - DNA, 25 bp, Probe Sequence
cggggatgtgtgcagacagggctgt

SEQ ID NO: 191276 - DNA, 25 bp, Probe Sequence
cgggatgtgatctatcagacaaagg

SEQ ID NO: 191277 - DNA, 25 bp, Probe Sequence
cgggatctgagatgccagccaagtg

SEQ ID NO: 191278 - DNA, 25 bp, Probe Sequence
cgcaataccaaagtcgcaagaatgg

SEQ ID NO: 191279 - DNA, 25 bp, Probe Sequence
cgcaaagcgaaagcggcaggatcga

SEQ ID NO: 191280 - DNA, 25 bp, Probe Sequence
ccaacaaaatcttcggcgtgacgac

SEQ ID NO: 191281 - DNA, 25 bp, Probe Sequence
cgaacacaagtcccggaggcacaga

SEQ ID NO: 191282 - DNA, 25 bp, Probe Sequence
cgaagaagaagcgctggaacagcat

SEQ ID NO: 191283 - DNA, 25 bp, Probe Sequence
cgtggtcgtcgcgtctgagaaagtt

SEQ ID NO: 191284 - DNA, 25 bp, Probe Sequence
cgtggtcagccacctcagtaaaatt

SEQ ID NO: 191285 - DNA, 25 bp, Probe Sequence
cgttgctgctgtgatccgtagtaat

SEQ ID NO: 191286 - DNA, 25 bp, Probe Sequence
cgtttgctgtttccaggctgtgata

SEQ ID NO: 191287 - DNA, 25 bp, Probe Sequence
cgtacttcttctgtgtggctgacag

SEQ ID NO: 191288 - DNA, 25 bp, Probe Sequence
cgtacttcatatgtggtgtgtccaa

SEQ ID NO: 191289 - DNA, 25 bp, Probe Sequence
cgttgctatccaggctgtgctatcc

SEQ ID NO: 191290 - DNA, 25 bp, Probe Sequence
cgttgctatccaggctgtgctatcc

SEQ ID NO: 191291 - DNA, 25 bp, Probe Sequence
cgttgcatatactggcactatctgt

SEQ ID NO: 191292 - DNA, 25 bp, Probe Sequence
cgttgcagtcattggagaaatcgat

SEQ ID NO: 191293 - DNA, 25 bp, Probe Sequence
cgttcactcatggaaaatagcgatc

SEQ ID NO: 191294 - DNA, 25 bp, Probe Sequence
cgtctctacagccaacttgagcgaa

SEQ ID NO: 191295 - DNA, 25 bp, Probe Sequence
cgattctgagccctgagtatgcctg

SEQ ID NO: 191296 - DNA, 25 bp, Probe Sequence
cgtgtctgactttgaggagctgccg

SEQ ID NO: 191297 - DNA, 25 bp, Probe Sequence
cgagtatgccttcaagctggcgcag

SEQ ID NO: 191298 - DNA, 25 bp, Probe Sequence
cggtggctcacgccaagatggcgcc

SEQ ID NO: 191299 - DNA, 25 bp, Probe Sequence
cggtggtgcaacaaagatgcctcgc

SEQ ID NO: 191300 - DNA, 25 bp, Probe Sequence
cgggtggctactttgtgccagcagt

SEQ ID NO: 191301 - DNA, 25 bp, Probe Sequence
cgggcgagtcagggtattagcagct

SEQ ID NO: 191302 - DNA, 25 bp, Probe Sequence
cggggagtgcatcggtacttgagca

SEQ ID NO: 191303 - DNA, 25 bp, Probe Sequence
cggtgatcgtgctgcagtaccacca

SEQ ID NO: 191304 - DNA, 25 bp, Probe Sequence
cggttccgctgccctgaggcactct

SEQ ID NO: 191305 - DNA, 25 bp, Probe Sequence
cggtaccatcagcttgcaggggctg

SEQ ID NO: 191306 - DNA, 25 bp, Probe Sequence
cgttagcccaggctctgagagccag

SEQ ID NO: 191307 - DNA, 25 bp, Probe Sequence
cgttagtccaactactcaggaaggc

SEQ ID NO: 191308 - DNA, 25 bp, Probe Sequence
cgcttagggcaatcaccacgagaag

SEQ ID NO: 191309 - DNA, 25 bp, Probe Sequence
cgatgtgggagttccaccaccacag

SEQ ID NO: 191310 - DNA, 25 bp, Probe Sequence
cgagggaatgtgtacatccacccga

SEQ ID NO: 191311 - DNA, 25 bp, Probe Sequence
cgtggagacgtctacacctgccacg

SEQ ID NO: 191312 - DNA, 25 bp, Probe Sequence
cggtgagtcatttgcatcactcgac

SEQ ID NO: 191313 - DNA, 25 bp, Probe Sequence
cgtgagagacatgctgtcagccaga

SEQ ID NO: 191314 - DNA, 25 bp, Probe Sequence
cggtgatgcctgtgtgccgagagat

SEQ ID NO: 191315 - DNA, 25 bp, Probe Sequence
cgtgctgtgttatggtcgatggctc

SEQ ID NO: 191316 - DNA, 25 bp, Probe Sequence
cgtggtgcggagggtcaaggcccac

SEQ ID NO: 191317 - DNA, 25 bp, Probe Sequence
cgtgggaggagcggaccgaccgctc

SEQ ID NO: 191318 - DNA, 25 bp, Probe Sequence
cgggcgaagacaaacggatgcaccc

SEQ ID NO: 191319 - DNA, 25 bp, Probe Sequence
cggggcaaaatggagctcgaggcca

SEQ ID NO: 191320 - DNA, 25 bp, Probe Sequence
cgtggggacaattaccgagcctatg

SEQ ID NO: 191321 - DNA, 25 bp, Probe Sequence
cgtctcggaaaccggtagcgcttgc

SEQ ID NO: 191322 - DNA, 25 bp, Probe Sequence
cgattccctaagggttacgccatgc

SEQ ID NO: 191323 - DNA, 25 bp, Probe Sequence
cgtctgcacctgaagggttgtcgcc

SEQ ID NO: 191324 - DNA, 25 bp, Probe Sequence
cgtctgatcttgatgggggcactgg

SEQ ID NO: 191325 - DNA, 25 bp, Probe Sequence
cgtcttcctgagtggtgccaaacaa

SEQ ID NO: 191326 - DNA, 25 bp, Probe Sequence
cgtgtatccgaaaattgctaagaca

SEQ ID NO: 191327 - DNA, 25 bp, Probe Sequence
cgtctactctaaactgctctaatga

SEQ ID NO: 191328 - DNA, 25 bp, Probe Sequence
cgtccaccgcaaatgcttctaggcg

SEQ ID NO: 191329 - DNA, 25 bp, Probe Sequence
cgaacaacagcaacgtcttgaacag

SEQ ID NO: 191330 - DNA, 25 bp, Probe Sequence
cgaacgagactctggcatgctaact

SEQ ID NO: 191331 - DNA, 25 bp, Probe Sequence
cgaaagcaacctggtgcttcggcct

SEQ ID NO: 191332 - DNA, 25 bp, Probe Sequence
cggtcagaaccgtgattcgagcctt

SEQ ID NO: 191333 - DNA, 25 bp, Probe Sequence
cggtcaagaccgtcacgtcgagatt

SEQ ID NO: 191334 - DNA, 25 bp, Probe Sequence
cgttatgagaaacatttggtgccca

SEQ ID NO: 191335 - DNA, 25 bp, Probe Sequence
cgtttgtaaacgacgtgtttgagca

SEQ ID NO: 191336 - DNA, 25 bp, Probe Sequence
cgcttttgctgaactgtccattttg

SEQ ID NO: 191337 - DNA, 25 bp, Probe Sequence
cgtttttggcctcagagtctctgat

SEQ ID NO: 191338 - DNA, 25 bp, Probe Sequence
cgtatctttaaaaagcagtcctctt

SEQ ID NO: 191339 - DNA, 25 bp, Probe Sequence
cgttctttagaccaatgcattgcgt

SEQ ID NO: 191340 - DNA, 25 bp, Probe Sequence
cgtttttgatgctcgatgaatgctg

SEQ ID NO: 191341 - DNA, 25 bp, Probe Sequence
cgaagttatggaccgctagcatctg

SEQ ID NO: 191342 - DNA, 25 bp, Probe Sequence
cgtatttctgccaacgtagctctgc

SEQ ID NO: 191343 - DNA, 25 bp, Probe Sequence
cgtattactcgcatcaggagtatca

SEQ ID NO: 191344 - DNA, 25 bp, Probe Sequence
cgtattgcgccgctagaggtgaaat

SEQ ID NO: 191345 - DNA, 25 bp, Probe Sequence
cgtaactgccacttaagcggcggtt

SEQ ID NO: 191346 - DNA, 25 bp, Probe Sequence
cgtacatactacgtaatggccggct

SEQ ID NO: 191347 - DNA, 25 bp, Probe Sequence
cgtccaagccctgaaagactgagct

SEQ ID NO: 191348 - DNA, 25 bp, Probe Sequence
cgggcaggtcctgaatgtgactgtc

SEQ ID NO: 191349 - DNA, 25 bp, Probe Sequence
cgggaagctcactggcatggccttc

SEQ ID NO: 191350 - DNA, 25 bp, Probe Sequence
cgggataggatccaggcatttcttt

SEQ ID NO: 191351 - DNA, 25 bp, Probe Sequence
cgggaagagattcagctcccatccc

SEQ ID NO: 191352 - DNA, 25 bp, Probe Sequence
cgggaggtgaggctcttcacatccc

SEQ ID NO: 191353 - DNA, 25 bp, Probe Sequence
cggtgcacagtgtggtttccaggct

SEQ ID NO: 191354 - DNA, 25 bp, Probe Sequence
cgaggcctgacatcacttaccagga

SEQ ID NO: 191355 - DNA, 25 bp, Probe Sequence
cgggactgagatggacagacccagg

SEQ ID NO: 191356 - DNA, 25 bp, Probe Sequence
cgggagcaactgaacaggccgcgcg

SEQ ID NO: 191357 - DNA, 25 bp, Probe Sequence
cgggatgcacaacttcaaccaccga

SEQ ID NO: 191358 - DNA, 25 bp, Probe Sequence
cgggaagcacaggtcaccatcttaa

SEQ ID NO: 191359 - DNA, 25 bp, Probe Sequence
cgggagtgaagcacagttcttcaga

SEQ ID NO: 191360 - DNA, 25 bp, Probe Sequence
cgtgcgagtgcacgtccgttatttc

SEQ ID NO: 191361 - DNA, 25 bp, Probe Sequence
cgcaggagccatcatggccttcttc

SEQ ID NO: 191362 - DNA, 25 bp, Probe Sequence
cgggggatgccatcagtgtcatgtc

SEQ ID NO: 191363 - DNA, 25 bp, Probe Sequence
cggtggcgatgtcagcggatgtcac

SEQ ID NO: 191364 - DNA, 25 bp, Probe Sequence
gcggcggaatcacaggctgattacc

SEQ ID NO: 191365 - DNA, 25 bp, Probe Sequence
cggtgtgactcacggggatttccaa

SEQ ID NO: 191366 - DNA, 25 bp, Probe Sequence
cggtgtgactcacgggatgtccaag

SEQ ID NO: 191367 - DNA, 25 bp, Probe Sequence
cggtgtgagctggcgttggatacca

SEQ ID NO: 191368 - DNA, 25 bp, Probe Sequence
cggtggatgcctgactggaagcccg

SEQ ID NO: 191369 - DNA, 25 bp, Probe Sequence
cggtggaccgaattgggaccgctgg

SEQ ID NO: 191370 - DNA, 25 bp, Probe Sequence
cgggcagcaccagaatgacaaaggc

SEQ ID NO: 191371 - DNA, 25 bp, Probe Sequence
cgggcacgctacgagagtacaaggt

SEQ ID NO: 191372 - DNA, 25 bp, Probe Sequence
cggtcccgatcaaggtccagatcag

SEQ ID NO: 191373 - DNA, 25 bp, Probe Sequence
cggtcccgatcaaggtccagatcag

SEQ ID NO: 191374 - DNA, 25 bp, Probe Sequence
cggtcccgatcaaggtccagatcag

SEQ ID NO: 191375 - DNA, 25 bp, Probe Sequence
cgttcctcatgaaagggacgacggg

SEQ ID NO: 191376 - DNA, 25 bp, Probe Sequence
cgtccttacaactggacaggcggcc

SEQ ID NO: 191377 - DNA, 25 bp, Probe Sequence
ccgtttcaattgtggaccggcgccg

SEQ ID NO: 191378 - DNA, 25 bp, Probe Sequence
gctttttaattctgtaccttcctag

SEQ ID NO: 191379 - DNA, 25 bp, Probe Sequence
gcctttggttcctggacatttggta

SEQ ID NO: 191380 - DNA, 25 bp, Probe Sequence
ccttgggctctctgggaaatgggaa

SEQ ID NO: 191381 - DNA, 25 bp, Probe Sequence
cgtctgggctctgggaacaaatggg

SEQ ID NO: 191382 - DNA, 25 bp, Probe Sequence
cgatttgcctctgagaacgatctcc

SEQ ID NO: 191383 - DNA, 25 bp, Probe Sequence
cgtttgcccatttggatgctaccac

SEQ ID NO: 191384 - DNA, 25 bp, Probe Sequence
cgagaggcccgcaaggagtacctcg

SEQ ID NO: 191385 - DNA, 25 bp, Probe Sequence
cgtggcgcctcggaggcgttcagct

SEQ ID NO: 191386 - DNA, 25 bp, Probe Sequence
cgtggtgccatccgagaatttgcag

SEQ ID NO: 191387 - DNA, 25 bp, Probe Sequence
cgtggtcctttgcaagagcgcagac

SEQ ID NO: 191388 - DNA, 25 bp, Probe Sequence
cgtgggctctttgggtgactgagcc

SEQ ID NO: 191389 - DNA, 25 bp, Probe Sequence
cgctggaactttgcgtactgggctg

SEQ ID NO: 191390 - DNA, 25 bp, Probe Sequence
cgggacagctgcaagggtgactccg

SEQ ID NO: 191391 - DNA, 25 bp, Probe Sequence
cgggaaggcaggtgtgactccaggc

SEQ ID NO: 191392 - DNA, 25 bp, Probe Sequence
cgtggagggggaatgtgtgctggcc

SEQ ID NO: 191393 - DNA, 25 bp, Probe Sequence
cgagctgttgtccagattttctgac

SEQ ID NO: 191394 - DNA, 25 bp, Probe Sequence
cgtgttttacagatcattccatatg

SEQ ID NO: 191395 - DNA, 25 bp, Probe Sequence
cgagttgctttcagtcattcaggga

SEQ ID NO: 191396 - DNA, 25 bp, Probe Sequence
cgagttactgtcagcatttctgcca

SEQ ID NO: 191397 - DNA, 25 bp, Probe Sequence
cgtttcactcacagtgtcactgtca

SEQ ID NO: 191398 - DNA, 25 bp, Probe Sequence
cgtattcctgctcacttgcaagtac

SEQ ID NO: 191399 - DNA, 25 bp, Probe Sequence
cgtattctcgtatctgccatgagtt

SEQ ID NO: 191400 - DNA, 25 bp, Probe Sequence
gcagtaactggtattcttgggtttt

SEQ ID NO: 191401 - DNA, 25 bp, Probe Sequence
gaataaatggctcttttttggcctt

SEQ ID NO: 191402 - DNA, 25 bp, Probe Sequence
cgattaatattttttctttggcgat

SEQ ID NO: 191403 - DNA, 25 bp, Probe Sequence
ccgtaattgctttgtgcctttgggc

SEQ ID NO: 191404 - DNA, 25 bp, Probe Sequence
cgcagttttctttggctttacgagc

SEQ ID NO: 191405 - DNA, 25 bp, Probe Sequence
cgttctttgtcttggctcttcaaag

SEQ ID NO: 191406 - DNA, 25 bp, Probe Sequence
cgtttcttttagtgcacttacatgc

SEQ ID NO: 191407 - DNA, 25 bp, Probe Sequence
cgtactcgttaccaacacgtcactg

SEQ ID NO: 191408 - DNA, 25 bp, Probe Sequence
cgatgttcttcttcggatcacgccc

SEQ ID NO: 191409 - DNA, 25 bp, Probe Sequence
cgggtcattcaccaggtgacaccac

SEQ ID NO: 191410 - DNA, 25 bp, Probe Sequence
cgggccatgattatcgcagaacgac

SEQ ID NO: 191411 - DNA, 25 bp, Probe Sequence
cggggcagctacagcatcaagtccc

SEQ ID NO: 191412 - DNA, 25 bp, Probe Sequence
cgggaggctgaggctgacaagcccc

SEQ ID NO: 191413 - DNA, 25 bp, Probe Sequence
cgggatggctgagtgcacaggtgcc

SEQ ID NO: 191414 - DNA, 25 bp, Probe Sequence
cgtgggagctaatcattgcatgtgc

SEQ ID NO: 191415 - DNA, 25 bp, Probe Sequence
cgggggcagcaagcatctatgctgc

SEQ ID NO: 191416 - DNA, 25 bp, Probe Sequence
cgtggagatggcacatccttgctgc

SEQ ID NO: 191417 - DNA, 25 bp, Probe Sequence
cgtgggaatgatcctcagtgtgctc

SEQ ID NO: 191418 - DNA, 25 bp, Probe Sequence
cggggcgctgcatagagtgctgtct

SEQ ID NO: 191419 - DNA, 25 bp, Probe Sequence
cggggcgctgaaagacatcgtgatc

SEQ ID NO: 191420 - DNA, 25 bp, Probe Sequence
cgggaggcggagcttgcagtgagcc

SEQ ID NO: 191421 - DNA, 25 bp, Probe Sequence
cgggaggcggagcttgcagtgagcc

SEQ ID NO: 191422 - DNA, 25 bp, Probe Sequence
cgggaggcggagcttgcagtgagcc

SEQ ID NO: 191423 - DNA, 25 bp, Probe Sequence
cgggaggcggagcttgcagtgagcc

SEQ ID NO: 191424 - DNA, 25 bp, Probe Sequence
cgggaggcggagcttgcagtgagcc

SEQ ID NO: 191425 - DNA, 25 bp, Probe Sequence
cgggaggcggagcttgcagtgagcc

SEQ ID NO: 191426 - DNA, 25 bp, Probe Sequence
cggtggtggtgacggtgatcgtgct

SEQ ID NO: 191427 - DNA, 25 bp, Probe Sequence
cggtggcagtgggtgcctgtagtgt

SEQ ID NO: 191428 - DNA, 25 bp, Probe Sequence
cgtgtggcagggatcgttgcactgg

SEQ ID NO: 191429 - DNA, 25 bp, Probe Sequence
cgtccgcggctgatcgcggagctgg

SEQ ID NO: 191430 - DNA, 25 bp, Probe Sequence
cgtgccagggcgattctggaggccc

SEQ ID NO: 191431 - DNA, 25 bp, Probe Sequence
cgtcaatgggagtttgtttggcacc

SEQ ID NO: 191432 - DNA, 25 bp, Probe Sequence
cgtactcgtgaatttctttggcagg

SEQ ID NO: 191433 - DNA, 25 bp, Probe Sequence
cgttcaccgaatacactttgtgatg

SEQ ID NO: 191434 - DNA, 25 bp, Probe Sequence
cgttcgtcgagaactcagtctgcgc

SEQ ID NO: 191435 - DNA, 25 bp, Probe Sequence
cgttctttctcaactcagagtccaa

SEQ ID NO: 191436 - DNA, 25 bp, Probe Sequence
cgagttacaccaaccaggacagaaa

SEQ ID NO: 191437 - DNA, 25 bp, Probe Sequence
cgagtaccagcagtaccaggacgcc

SEQ ID NO: 191438 - DNA, 25 bp, Probe Sequence
cggggtcagcatgagccgagcaagc

SEQ ID NO: 191439 - DNA, 25 bp, Probe Sequence
cgaggtgcccaggactcggaagggg

SEQ ID NO: 191440 - DNA, 25 bp, Probe Sequence
cggggccctgaggacgagatagggg

SEQ ID NO: 191441 - DNA, 25 bp, Probe Sequence
cgggagtttgaggaggttgtggtgg

SEQ ID NO: 191442 - DNA, 25 bp, Probe Sequence
cgatgcggtcttcaagggcttttcg

SEQ ID NO: 191443 - DNA, 25 bp, Probe Sequence
cgatcacgactcaaaagagctgttt

SEQ ID NO: 191444 - DNA, 25 bp, Probe Sequence
cgaccaagtgacagcaatgctgttt

SEQ ID NO: 191445 - DNA, 25 bp, Probe Sequence
cgatgccgggatcaaagtctgttct

SEQ ID NO: 191446 - DNA, 25 bp, Probe Sequence
cgtccttgggaaaggcctgcattct

SEQ ID NO: 191447 - DNA, 25 bp, Probe Sequence
cgtactctttggagatgcccattct

SEQ ID NO: 191448 - DNA, 25 bp, Probe Sequence
cgtttctgtgtggctgcagaggcca

SEQ ID NO: 191449 - DNA, 25 bp, Probe Sequence
cgtattcattgtctacctgctaagt

SEQ ID NO: 191450 - DNA, 25 bp, Probe Sequence
cgtattcattgtctacctgctaagt

SEQ ID NO: 191451 - DNA, 25 bp, Probe Sequence
cgggatctagtcacagccctatact

SEQ ID NO: 191452 - DNA, 25 bp, Probe Sequence
cgggcaaagacagtcagcccctgac

SEQ ID NO: 191453 - DNA, 25 bp, Probe Sequence
cgaggataaggagtggatgcccgtc

SEQ ID NO: 191454 - DNA, 25 bp, Probe Sequence
cgggcatggtggtgggagcctgtcg

SEQ ID NO: 191455 - DNA, 25 bp, Probe Sequence
cgggagccagggctgtgcacctggc

SEQ ID NO: 191456 - DNA, 25 bp, Probe Sequence
cgtggatgacggatgaggactctgg

SEQ ID NO: 191457 - DNA, 25 bp, Probe Sequence
cgtggacatccgcaaagacctgtac

SEQ ID NO: 191458 - DNA, 25 bp, Probe Sequence
cgtgaccttcatcggcaacagcacg

SEQ ID NO: 191459 - DNA, 25 bp, Probe Sequence
cgtccactaatcggcaaaaggagaa

SEQ ID NO: 191460 - DNA, 25 bp, Probe Sequence
cgtccagaagtcggcagaagagttg

SEQ ID NO: 191461 - DNA, 25 bp, Probe Sequence
cgtccgctactggaactacagtcat

SEQ ID NO: 191462 - DNA, 25 bp, Probe Sequence
cgtcctctaggtaactcaagtgtca

SEQ ID NO: 191463 - DNA, 25 bp, Probe Sequence
cgatacctgggatttgactttgtca

SEQ ID NO: 191464 - DNA, 25 bp, Probe Sequence
cgaacatctgggtggttagcattca

SEQ ID NO: 191465 - DNA, 25 bp, Probe Sequence
cgctgaacggcgtgcattatcaaca

SEQ ID NO: 191466 - DNA, 25 bp, Probe Sequence
cgtacctgggtgcctatatcgacaa

SEQ ID NO: 191467 - DNA, 25 bp, Probe Sequence
cgtgcacctcgggcactcaaagaga

SEQ ID NO: 191468 - DNA, 25 bp, Probe Sequence
cgaggccttcggtccataatggaaa

SEQ ID NO: 191469 - DNA, 25 bp, Probe Sequence
cgtgggtcccgagcagaaggtcaag

SEQ ID NO: 191470 - DNA, 25 bp, Probe Sequence
cgggcgccccgaagagggagacaga

SEQ ID NO: 191471 - DNA, 25 bp, Probe Sequence
cgggcggccaagaggtgcgagaagg

SEQ ID NO: 191472 - DNA, 25 bp, Probe Sequence
cgggcgccgtggatagagcaggagg

SEQ ID NO: 191473 - DNA, 25 bp, Probe Sequence
cgggactacatggaaagagataaag

SEQ ID NO: 191474 - DNA, 25 bp, Probe Sequence
cgtggaccacgccagaagtgaccag

SEQ ID NO: 191475 - DNA, 25 bp, Probe Sequence
cgagtacctcagcacacattacaag

SEQ ID NO: 191476 - DNA, 25 bp, Probe Sequence
cgttcacctccaagcatttcatgaa

SEQ ID NO: 191477 - DNA, 25 bp, Probe Sequence
cgttcaagcctagcaatccatcaga

SEQ ID NO: 191478 - DNA, 25 bp, Probe Sequence
cgtgtgaaccaaacaatctcttttc

SEQ ID NO: 191479 - DNA, 25 bp, Probe Sequence
cgtggacaccaaggcaagctgctat

SEQ ID NO: 191480 - DNA, 25 bp, Probe Sequence
cgggacctcatcagccacgatgaga

SEQ ID NO: 191481 - DNA, 25 bp, Probe Sequence
cgggatccatcaaccaagtgggagg

SEQ ID NO: 191482 - DNA, 25 bp, Probe Sequence
cgttgtcccaggacgagctgtgggg

SEQ ID NO: 191483 - DNA, 25 bp, Probe Sequence
cgtgtgtctggagtgcgggaagggc

SEQ ID NO: 191484 - DNA, 25 bp, Probe Sequence
cgtggaggaggtggatgaggagggc

SEQ ID NO: 191485 - DNA, 25 bp, Probe Sequence
cgtgggccgagacgagcgggaggat

SEQ ID NO: 191486 - DNA, 25 bp, Probe Sequence
cgtcagtcttggtgtgatgcggggt

SEQ ID NO: 191487 - DNA, 25 bp, Probe Sequence
cgatgaccggactgtgtgccgggag

SEQ ID NO: 191488 - DNA, 25 bp, Probe Sequence
cgtacgcacacactaagtccgtgga

SEQ ID NO: 191489 - DNA, 25 bp, Probe Sequence
cgaaggcaacagagggcggtggaga

SEQ ID NO: 191490 - DNA, 25 bp, Probe Sequence
cgaaaataccaagcccagctggaga

SEQ ID NO: 191491 - DNA, 25 bp, Probe Sequence
cgaagaagtctctgctccaaatgga

SEQ ID NO: 191492 - DNA, 25 bp, Probe Sequence
cgctataaggccagtcggactgcga

SEQ ID NO: 191493 - DNA, 25 bp, Probe Sequence
cgtttagcgactattgcgcctgcgc

SEQ ID NO: 191494 - DNA, 25 bp, Probe Sequence
cgacattgacgtgttcatgcctacc

SEQ ID NO: 191495 - DNA, 25 bp, Probe Sequence
cgatttgaggtgctgggcattccct

SEQ ID NO: 191496 - DNA, 25 bp, Probe Sequence
cgtggtgctggggatggggtcatcc

SEQ ID NO: 191497 - DNA, 25 bp, Probe Sequence
cgtggtgctggggatggggtcatcc

SEQ ID NO: 191498 - DNA, 25 bp, Probe Sequence
cgtggtgctggggatggggtcatcc

SEQ ID NO: 191499 - DNA, 25 bp, Probe Sequence
cgtgggtggagcaagaggggccgca

SEQ ID NO: 191500 - DNA, 25 bp, Probe Sequence
cgtcggtggcgagggtggtgcagag

SEQ ID NO: 191501 - DNA, 25 bp, Probe Sequence
cgttaatggagcggggcgccagtga

SEQ ID NO: 191502 - DNA, 25 bp, Probe Sequence
cgattacaagcggaggcgctgccgc

SEQ ID NO: 191503 - DNA, 25 bp, Probe Sequence
cgttagtgatgagcagctgcagctg

SEQ ID NO: 191504 - DNA, 25 bp, Probe Sequence
cgtgatcagcgcagacctgcagtct

SEQ ID NO: 191505 - DNA, 25 bp, Probe Sequence
cgttcagccattagcactcatttaa

SEQ ID NO: 191506 - DNA, 25 bp, Probe Sequence
cgtatccttctacttatttagatct

SEQ ID NO: 191507 - DNA, 25 bp, Probe Sequence
cgtgggctgttacttgctttgagtt

SEQ ID NO: 191508 - DNA, 25 bp, Probe Sequence
cgatacttgttattgtctgcttttt

SEQ ID NO: 191509 - DNA, 25 bp, Probe Sequence
cgaagccgtcggaggattcttctct

SEQ ID NO: 191510 - DNA, 25 bp, Probe Sequence
cgaaactactgggagcgactgctac

SEQ ID NO: 191511 - DNA, 25 bp, Probe Sequence
cgaatattacaacgcggcagcatta

SEQ ID NO: 191512 - DNA, 25 bp, Probe Sequence
cgtagttatcggtcggcaggctgaa

SEQ ID NO: 191513 - DNA, 25 bp, Probe Sequence
cgtcgtacacgcgagctgtggactg

SEQ ID NO: 191514 - DNA, 25 bp, Probe Sequence
cgtgcagatcccaggctgtggatta

SEQ ID NO: 191515 - DNA, 25 bp, Probe Sequence
cgtgcgcagatcagggatcgcgatt

SEQ ID NO: 191516 - DNA, 25 bp, Probe Sequence
cgggcagatcacgaggtcaggagat

SEQ ID NO: 191517 - DNA, 25 bp, Probe Sequence
cgggcgagggcatggacgagatgga

SEQ ID NO: 191518 - DNA, 25 bp, Probe Sequence
cgggcggatcacctgagatcaggag

SEQ ID NO: 191519 - DNA, 25 bp, Probe Sequence
cgggcggatcacctgagatcaggag

SEQ ID NO: 191520 - DNA, 25 bp, Probe Sequence
cgggctgagaacctgaaacgccgcc

SEQ ID NO: 191521 - DNA, 25 bp, Probe Sequence
cgggctaatccacggaattgcctcc

SEQ ID NO: 191522 - DNA, 25 bp, Probe Sequence
cgctgtgccttggcagggcacaatg

SEQ ID NO: 191523 - DNA, 25 bp, Probe Sequence
cgtgggcagtgcgtgggagcacagc

SEQ ID NO: 191524 - DNA, 25 bp, Probe Sequence
cgtggcctgcacaggtgagctgcac

SEQ ID NO: 191525 - DNA, 25 bp, Probe Sequence
cgggcttcagccgcatgagtgagcg

SEQ ID NO: 191526 - DNA, 25 bp, Probe Sequence
cgagtcgtcaccatcatgtattgga

SEQ ID NO: 191527 - DNA, 25 bp, Probe Sequence
cgcaccgtagccatctactctgagc

SEQ ID NO: 191528 - DNA, 25 bp, Probe Sequence
cgaaattgcaccattgcactccagc

SEQ ID NO: 191529 - DNA, 25 bp, Probe Sequence
cgaaattgcaccattgcactccagc

SEQ ID NO: 191530 - DNA, 25 bp, Probe Sequence
cgcaagtggcactttaagccctgca

SEQ ID NO: 191531 - DNA, 25 bp, Probe Sequence
cgagactacatctggaacacactca

SEQ ID NO: 191532 - DNA, 25 bp, Probe Sequence
cgcagacagatcccgaaaccaatga

SEQ ID NO: 191533 - DNA, 25 bp, Probe Sequence
cgaatcagtggtgggaacgacaaac

SEQ ID NO: 191534 - DNA, 25 bp, Probe Sequence
cgaggggggtgtagacgccaagact

SEQ ID NO: 191535 - DNA, 25 bp, Probe Sequence
cgacagggggcagcatgacccaagc

SEQ ID NO: 191536 - DNA, 25 bp, Probe Sequence
cgacagggggcagcatgacccaagc

SEQ ID NO: 191537 - DNA, 25 bp, Probe Sequence
cgaacgcggagagcacgccatgaag

SEQ ID NO: 191538 - DNA, 25 bp, Probe Sequence
cgcaatcgggggtccccgatacgag

SEQ ID NO: 191539 - DNA, 25 bp, Probe Sequence
cgagacgggcggatctcgagatcac

SEQ ID NO: 191540 - DNA, 25 bp, Probe Sequence
cgaacagatgagctattttggataa

SEQ ID NO: 191541 - DNA, 25 bp, Probe Sequence
cgaaaagctgctttttcgcctcaga

SEQ ID NO: 191542 - DNA, 25 bp, Probe Sequence
cgggcatgagtctgtttcccaagct

SEQ ID NO: 191543 - DNA, 25 bp, Probe Sequence
cgggcatgagagtgagttgtcccaa

SEQ ID NO: 191544 - DNA, 25 bp, Probe Sequence
cgctggtgcagggatcgttacccga

SEQ ID NO: 191545 - DNA, 25 bp, Probe Sequence
cgtggagagggacgtcttcctgtat

SEQ ID NO: 191546 - DNA, 25 bp, Probe Sequence
cgatctacgggatctttccattatg

SEQ ID NO: 191547 - DNA, 25 bp, Probe Sequence
cgatgcggcggcgttattcccatga

SEQ ID NO: 191548 - DNA, 25 bp, Probe Sequence
cgtgtggcgacggataaggcctgaa

SEQ ID NO: 191549 - DNA, 25 bp, Probe Sequence
cgtctcggacagcgaatgcgccgac

SEQ ID NO: 191550 - DNA, 25 bp, Probe Sequence
cgtgtctggccacgtgaagacccag

SEQ ID NO: 191551 - DNA, 25 bp, Probe Sequence
cgtgctctgagcactggagagaaag

SEQ ID NO: 191552 - DNA, 25 bp, Probe Sequence
cgtcatcagatgcttgcggcaaaag

SEQ ID NO: 191553 - DNA, 25 bp, Probe Sequence
cgaccggcatgtacgagcaactcaa

SEQ ID NO: 191554 - DNA, 25 bp, Probe Sequence
cgggcgcgattgcagagcgagtccg

SEQ ID NO: 191555 - DNA, 25 bp, Probe Sequence
cgaggcccatatgagaggagcttag

SEQ ID NO: 191556 - DNA, 25 bp, Probe Sequence
cgtgcccgtggttagagatgttgag

SEQ ID NO: 191557 - DNA, 25 bp, Probe Sequence
cgtgccctggacttgggcatgtcct

SEQ ID NO: 191558 - DNA, 25 bp, Probe Sequence
cgggcctggctgggtgagcatggcc

SEQ ID NO: 191559 - DNA, 25 bp, Probe Sequence
cgggccatggaggagcgataccgcc

SEQ ID NO: 191560 - DNA, 25 bp, Probe Sequence
cgaggactggtggcagcctacagcg

SEQ ID NO: 191561 - DNA, 25 bp, Probe Sequence
cgaggaatttcaacatcatacatgc

SEQ ID NO: 191562 - DNA, 25 bp, Probe Sequence
cgatgcgtgtttaatgatgatgact

SEQ ID NO: 191563 - DNA, 25 bp, Probe Sequence
cgtgcctgctggtactgtgatgcat

SEQ ID NO: 191564 - DNA, 25 bp, Probe Sequence
cgtgcttgcttgaaaagtctcactt

SEQ ID NO: 191565 - DNA, 25 bp, Probe Sequence
cgagctgtgcttgcaaagacttcat

SEQ ID NO: 191566 - DNA, 25 bp, Probe Sequence
cgacgtgttctgagggtctgcatct

SEQ ID NO: 191567 - DNA, 25 bp, Probe Sequence
cgtgggtatcgaggcggacgacgac

SEQ ID NO: 191568 - DNA, 25 bp, Probe Sequence
cgtgggtatcgaggcggacgacgac

SEQ ID NO: 191569 - DNA, 25 bp, Probe Sequence
cgggcggattgaggatgtcaccccc

SEQ ID NO: 191570 - DNA, 25 bp, Probe Sequence
cgcgtcaaactagatggcagccggc

SEQ ID NO: 191571 - DNA, 25 bp, Probe Sequence
cgagtacaagaagagccgcagtggg

SEQ ID NO: 191572 - DNA, 25 bp, Probe Sequence
cgcaatgtaaaaggccccgtgcgcg

SEQ ID NO: 191573 - DNA, 25 bp, Probe Sequence
cgtcgggagaaggccccgtggagag

SEQ ID NO: 191574 - DNA, 25 bp, Probe Sequence
cgtggaggacaagctcacctgtttg

SEQ ID NO: 191575 - DNA, 25 bp, Probe Sequence
cgcggagaacaaactgaacgacatt

SEQ ID NO: 191576 - DNA, 25 bp, Probe Sequence
cgtggaacactaccgggagatcttc

SEQ ID NO: 191577 - DNA, 25 bp, Probe Sequence
cgtgtgtattttccgctagaatttc

SEQ ID NO: 191578 - DNA, 25 bp, Probe Sequence
cgtggtggtcccggtggaatgttca

SEQ ID NO: 191579 - DNA, 25 bp, Probe Sequence
cgagtgtgcgtgtatcagggggtct

SEQ ID NO: 191580 - DNA, 25 bp, Probe Sequence
cgtatgtcctaagctggagttctga

SEQ ID NO: 191581 - DNA, 25 bp, Probe Sequence
cgtattccactagctgggttctgta

SEQ ID NO: 191582 - DNA, 25 bp, Probe Sequence
cgtgacatctatgcctatggttttg

SEQ ID NO: 191583 - DNA, 25 bp, Probe Sequence
cgcagaattcccgtactgattagtc

SEQ ID NO: 191584 - DNA, 25 bp, Probe Sequence
cgacaatgcccggactagatcttgc

SEQ ID NO: 191585 - DNA, 25 bp, Probe Sequence
cgacaagatcatctactcacacttc

SEQ ID NO: 191586 - DNA, 25 bp, Probe Sequence
cgaatagacatcaaactcaatgctt

SEQ ID NO: 191587 - DNA, 25 bp, Probe Sequence
cgatatacacagcagacctagccat

SEQ ID NO: 191588 - DNA, 25 bp, Probe Sequence
cgtaatgcctcttgacttgggcatc

SEQ ID NO: 191589 - DNA, 25 bp, Probe Sequence
cgtcatggaccatgactgggcggcc

SEQ ID NO: 191590 - DNA, 25 bp, Probe Sequence
cgtaggggcacgtgttgcaggcgaa

SEQ ID NO: 191591 - DNA, 25 bp, Probe Sequence
cgtgggaggcgggagtggagtggaa

SEQ ID NO: 191592 - DNA, 25 bp, Probe Sequence
cgtgggaggcgggagtggagtggaa

SEQ ID NO: 191593 - DNA, 25 bp, Probe Sequence
cgtggcaggtgccgggttacttatc

SEQ ID NO: 191594 - DNA, 25 bp, Probe Sequence
cgagaaggggcgcgatttcttccgg

SEQ ID NO: 191595 - DNA, 25 bp, Probe Sequence
cgagatggcggcccaggatttcttc

SEQ ID NO: 191596 - DNA, 25 bp, Probe Sequence
cgagagatcgtacgggactttccca

SEQ ID NO: 191597 - DNA, 25 bp, Probe Sequence
cgaggcacgtaccacaacaagtcct

SEQ ID NO: 191598 - DNA, 25 bp, Probe Sequence
cgaagtcctgtcactgagcacagtc

SEQ ID NO: 191599 - DNA, 25 bp, Probe Sequence
cgacccacgtctacatgtacgtgtt

SEQ ID NO: 191600 - DNA, 25 bp, Probe Sequence
cgaggcacctgcatttgttgagttt

SEQ ID NO: 191601 - DNA, 25 bp, Probe Sequence
cgaaccttcagctttttgggctttg

SEQ ID NO: 191602 - DNA, 25 bp, Probe Sequence
cgggccttcaagttattgggctcag

SEQ ID NO: 191603 - DNA, 25 bp, Probe Sequence
cgtggcggcgcatgagttcggccac

SEQ ID NO: 191604 - DNA, 25 bp, Probe Sequence
cgtggcatcgcccagatgttggaaa

SEQ ID NO: 191605 - DNA, 25 bp, Probe Sequence
cgtgccatgtgcagcatgaggggct

SEQ ID NO: 191606 - DNA, 25 bp, Probe Sequence
cgtgccatgtgcagcatgaggggct

SEQ ID NO: 191607 - DNA, 25 bp, Probe Sequence
cgtgccattgctgagctgggcatct

SEQ ID NO: 191608 - DNA, 25 bp, Probe Sequence
cgtgcagcggcacattggacatgct

SEQ ID NO: 191609 - DNA, 25 bp, Probe Sequence
cgtgcacctgaccagagctgaagct

SEQ ID NO: 191610 - DNA, 25 bp, Probe Sequence
cgatagcgctcacgcaagcatggtt

SEQ ID NO: 191611 - DNA, 25 bp, Probe Sequence
cgaactgtagagtgcagggacccct

SEQ ID NO: 191612 - DNA, 25 bp, Probe Sequence
cgtaagggactttgtggcacctcac

SEQ ID NO: 191613 - DNA, 25 bp, Probe Sequence
cgatgtctgggaacttgggacgcca

SEQ ID NO: 191614 - DNA, 25 bp, Probe Sequence
cgtgtgggggcactgtgggaagcct

SEQ ID NO: 191615 - DNA, 25 bp, Probe Sequence
cgtacgtggagaagtgggaatgcaa

SEQ ID NO: 191616 - DNA, 25 bp, Probe Sequence
cgtgacagggaccgatgtggacatc

SEQ ID NO: 191617 - DNA, 25 bp, Probe Sequence
cgtggcagcaggaccgacaagtcaa

SEQ ID NO: 191618 - DNA, 25 bp, Probe Sequence
cgtggccaagtacttccagtcgaat

SEQ ID NO: 191619 - DNA, 25 bp, Probe Sequence
cgggccctagacaatacgatggaac

SEQ ID NO: 191620 - DNA, 25 bp, Probe Sequence
cgggccctgctagatagagatgcgc

SEQ ID NO: 191621 - DNA, 25 bp, Probe Sequence
cgtggactttagcatgcagagcagc

SEQ ID NO: 191622 - DNA, 25 bp, Probe Sequence
cgtggcctggtaccaggtgagcccg

SEQ ID NO: 191623 - DNA, 25 bp, Probe Sequence
cgtggcctggtaccaggtgagcccg

SEQ ID NO: 191624 - DNA, 25 bp, Probe Sequence
cgtggcctggtaccaggtgagcccg

SEQ ID NO: 191625 - DNA, 25 bp, Probe Sequence
cgtctcgctgagggacggtgaggcc

SEQ ID NO: 191626 - DNA, 25 bp, Probe Sequence
cgtccacagggccatctgttagccc

SEQ ID NO: 191627 - DNA, 25 bp, Probe Sequence
cgtaccgggcgatgcttgtgcctga

SEQ ID NO: 191628 - DNA, 25 bp, Probe Sequence
cgtgattatggggctagttgtcctc

SEQ ID NO: 191629 - DNA, 25 bp, Probe Sequence
cgtggtaggttctagcacattcctc

SEQ ID NO: 191630 - DNA, 25 bp, Probe Sequence
cgtgatgaaggtctccataacccct

SEQ ID NO: 191631 - DNA, 25 bp, Probe Sequence
cgtagtagtgcctacctatagtccc

SEQ ID NO: 191632 - DNA, 25 bp, Probe Sequence
cgtggtggtgggcagctgtagtccc

SEQ ID NO: 191633 - DNA, 25 bp, Probe Sequence
cgtagttggcgcagaggtcagtcct

SEQ ID NO: 191634 - DNA, 25 bp, Probe Sequence
cgaagttagtctgggcatgatggta

SEQ ID NO: 191635 - DNA, 25 bp, Probe Sequence
cgaacaaaacgcagcgcatggtacc

SEQ ID NO: 191636 - DNA, 25 bp, Probe Sequence
cgatcacaccaagcctggtggatga

SEQ ID NO: 191637 - DNA, 25 bp, Probe Sequence
cgaagacactcagccggagttgtac

SEQ ID NO: 191638 - DNA, 25 bp, Probe Sequence
cgatgagaactctccttattgctgt

SEQ ID NO: 191639 - DNA, 25 bp, Probe Sequence
cgtgcaacagactgccttatattat

SEQ ID NO: 191640 - DNA, 25 bp, Probe Sequence
cgtgtgacagtcttgcattctgttt

SEQ ID NO: 191641 - DNA, 25 bp, Probe Sequence
cgtgggcatgatcctgattctcatc

SEQ ID NO: 191642 - DNA, 25 bp, Probe Sequence
cgtgatggctatgccttgcacacag

SEQ ID NO: 191643 - DNA, 25 bp, Probe Sequence
cgtgatggctcatgcctgtaatccc

SEQ ID NO: 191644 - DNA, 25 bp, Probe Sequence
cgtgagactcagccgctgtctcgcc

SEQ ID NO: 191645 - DNA, 25 bp, Probe Sequence
cgtgcatgtctatggcatggtcccc

SEQ ID NO: 191646 - DNA, 25 bp, Probe Sequence
cgtgcttttgagcaggacccactgc

SEQ ID NO: 191647 - DNA, 25 bp, Probe Sequence
cgcttttgtcagctacatcctactg

SEQ ID NO: 191648 - DNA, 25 bp, Probe Sequence
cgattttagcagctctctccaaagc

SEQ ID NO: 191649 - DNA, 25 bp, Probe Sequence
cgctttaacacgtctcctgctaaag

SEQ ID NO: 191650 - DNA, 25 bp, Probe Sequence
cccactaacaaagccctgacaggtt

SEQ ID NO: 191651 - DNA, 25 bp, Probe Sequence
cccaatgaaaaaaggatctggagtg

SEQ ID NO: 191652 - DNA, 25 bp, Probe Sequence
cgtagtgaacagtcatctaattgga

SEQ ID NO: 191653 - DNA, 25 bp, Probe Sequence
cgatgatgtaaccctgcatgacttg

SEQ ID NO: 191654 - DNA, 25 bp, Probe Sequence
cgaatgttaccaggcatggcagtgg

SEQ ID NO: 191655 - DNA, 25 bp, Probe Sequence
cgaagattaccagatcatcagttta

SEQ ID NO: 191656 - DNA, 25 bp, Probe Sequence
cgacaaaggacagactagtacaata

SEQ ID NO: 191657 - DNA, 25 bp, Probe Sequence
cgagctacctaagaacagctaaaag

SEQ ID NO: 191658 - DNA, 25 bp, Probe Sequence
cgagcgtccgcatgctaatcgcttt

SEQ ID NO: 191659 - DNA, 25 bp, Probe Sequence
cgatgggctgcaacatcatcaacct

SEQ ID NO: 191660 - DNA, 25 bp, Probe Sequence
cgatgtcagtgaatccggcaccttc

SEQ ID NO: 191661 - DNA, 25 bp, Probe Sequence
cgatgtcgtgttcgcaagcatccta

SEQ ID NO: 191662 - DNA, 25 bp, Probe Sequence
cgtctcttgctgtgaactggctgag

SEQ ID NO: 191663 - DNA, 25 bp, Probe Sequence
cgttcatttaaggaggcgctggcaa

SEQ ID NO: 191664 - DNA, 25 bp, Probe Sequence
cgttctctcgtgggagacgcaggca

SEQ ID NO: 191665 - DNA, 25 bp, Probe Sequence
cgtgcttcccatcagacacatgggc

SEQ ID NO: 191666 - DNA, 25 bp, Probe Sequence
cgtgcaggcccactgtaagctgggt

SEQ ID NO: 191667 - DNA, 25 bp, Probe Sequence
cgtcggccatgactgtgtatgctct

SEQ ID NO: 191668 - DNA, 25 bp, Probe Sequence
cgtcctctgaacttggatccatcaa

SEQ ID NO: 191669 - DNA, 25 bp, Probe Sequence
cgtcacgctgaatatatgaccacgc

SEQ ID NO: 191670 - DNA, 25 bp, Probe Sequence
cgtgctggagaatgcatatgagccc

SEQ ID NO: 191671 - DNA, 25 bp, Probe Sequence
cgtcataagtgatctcaggctctca

SEQ ID NO: 191672 - DNA, 25 bp, Probe Sequence
cgacttagtagaacgctgcatgcga

SEQ ID NO: 191673 - DNA, 25 bp, Probe Sequence
cgatctggagaccaccgtggcaaat

SEQ ID NO: 191674 - DNA, 25 bp, Probe Sequence
cgatctgggatctagcaattgggag

SEQ ID NO: 191675 - DNA, 25 bp, Probe Sequence
cgagctggctttagacattggtggg

SEQ ID NO: 191676 - DNA, 25 bp, Probe Sequence
cgagtgtgggcatagcattagctgc

SEQ ID NO: 191677 - DNA, 25 bp, Probe Sequence
cgactgccgtgacatcattcagcgc

SEQ ID NO: 191678 - DNA, 25 bp, Probe Sequence
cgactgccgtgacatcattcagcgc

SEQ ID NO: 191679 - DNA, 25 bp, Probe Sequence
cgtctctttgacctcattcagaaaa

SEQ ID NO: 191680 - DNA, 25 bp, Probe Sequence
cgtctctttgacctcattcagaaaa

SEQ ID NO: 191681 - DNA, 25 bp, Probe Sequence
cgtctctttgacctcattcagaaaa

SEQ ID NO: 191682 - DNA, 25 bp, Probe Sequence
cgttcttggcaccatcttatgaaaa

SEQ ID NO: 191683 - DNA, 25 bp, Probe Sequence
cgagtgcgtggagctcttcagaacc

SEQ ID NO: 191684 - DNA, 25 bp, Probe Sequence
cgcaggcgtggtgcacgccatcaat

SEQ ID NO: 191685 - DNA, 25 bp, Probe Sequence
cgcaggcgtggtgcacgccatcaat

SEQ ID NO: 191686 - DNA, 25 bp, Probe Sequence
cgaagttgagatggcctgccctact

SEQ ID NO: 191687 - DNA, 25 bp, Probe Sequence
cgaggatatatatgctccgtgctcc

SEQ ID NO: 191688 - DNA, 25 bp, Probe Sequence
cgaggatcagtatcactacctcctg

SEQ ID NO: 191689 - DNA, 25 bp, Probe Sequence
cgaggtgcggatgcgcaccttcctg

SEQ ID NO: 191690 - DNA, 25 bp, Probe Sequence
cgagagagtgagagcgctcctgggg

SEQ ID NO: 191691 - DNA, 25 bp, Probe Sequence
cgagctgagtggttgtgtggtcgcg

SEQ ID NO: 191692 - DNA, 25 bp, Probe Sequence
cgactgcttgaaagaggcggcggcc

SEQ ID NO: 191693 - DNA, 25 bp, Probe Sequence
cgatctgcttgggatgatggaggta

SEQ ID NO: 191694 - DNA, 25 bp, Probe Sequence
cgatggcttggtggcaatggctggc

SEQ ID NO: 191695 - DNA, 25 bp, Probe Sequence
cgtagtaagatggaagctgctggct

SEQ ID NO: 191696 - DNA, 25 bp, Probe Sequence
cgtcagatcgcactggagacgccca

SEQ ID NO: 191697 - DNA, 25 bp, Probe Sequence
cgtcagatcgcctggagacgccaat

SEQ ID NO: 191698 - DNA, 25 bp, Probe Sequence
cgtcagatcgccttggagacgccat

SEQ ID NO: 191699 - DNA, 25 bp, Probe Sequence
cgtcagatcgcctggatgacgccat

SEQ ID NO: 191700 - DNA, 25 bp, Probe Sequence
cgaagataccaacctgtgtgccatc

SEQ ID NO: 191701 - DNA, 25 bp, Probe Sequence
cgtagatgcagtgcaccctggctac

SEQ ID NO: 191702 - DNA, 25 bp, Probe Sequence
cgaaatcagtgagacctggattcaa

SEQ ID NO: 191703 - DNA, 25 bp, Probe Sequence
cgataacgtggctgccggctatgac

SEQ ID NO: 191704 - DNA, 25 bp, Probe Sequence
cgtcggcgttgctgggagaatgtgc

SEQ ID NO: 191705 - DNA, 25 bp, Probe Sequence
cgtcgtgacctctgacggtttctga

SEQ ID NO: 191706 - DNA, 25 bp, Probe Sequence
cgaggagacccagacgctggttcga

SEQ ID NO: 191707 - DNA, 25 bp, Probe Sequence
cgaggagacccagacgctggttcga

SEQ ID NO: 191708 - DNA, 25 bp, Probe Sequence
cgagggactcaacacgctgattctc

SEQ ID NO: 191709 - DNA, 25 bp, Probe Sequence
cgtttacctaggacagctggatctg

SEQ ID NO: 191710 - DNA, 25 bp, Probe Sequence
cgtgttggccattggtactgggcag

SEQ ID NO: 191711 - DNA, 25 bp, Probe Sequence
cgtgtatgacgctgggcacgttgag

SEQ ID NO: 191712 - DNA, 25 bp, Probe Sequence
cgtgtgcatgatggcggaggtcagg

SEQ ID NO: 191713 - DNA, 25 bp, Probe Sequence
cgtgttgatggcgatggaggatgga

SEQ ID NO: 191714 - DNA, 25 bp, Probe Sequence
cgtgtttgagcagctggcgtgtgag

SEQ ID NO: 191715 - DNA, 25 bp, Probe Sequence
ccgatttactttgcactaaggacaa

SEQ ID NO: 191716 - DNA, 25 bp, Probe Sequence
cgcagtttggccagccactaagtcc

SEQ ID NO: 191717 - DNA, 25 bp, Probe Sequence
cgtgtttcagcttggcacactgata

SEQ ID NO: 191718 - DNA, 25 bp, Probe Sequence
cgtgctgtatgcttactaacagata

SEQ ID NO: 191719 - DNA, 25 bp, Probe Sequence
cgtgcattatcaacatcatattcag

SEQ ID NO: 191720 - DNA, 25 bp, Probe Sequence
cgtgctgagatcacatgcatgagcc

SEQ ID NO: 191721 - DNA, 25 bp, Probe Sequence
cgtcatgaatgacgtatgtgcccat

SEQ ID NO: 191722 - DNA, 25 bp, Probe Sequence
cgtgtgaagtgtagtggcatccatt

SEQ ID NO: 191723 - DNA, 25 bp, Probe Sequence
cgtagacatgtaacccagcagcagt

SEQ ID NO: 191724 - DNA, 25 bp, Probe Sequence
cgtagactatactttccagcagctg

SEQ ID NO: 191725 - DNA, 25 bp, Probe Sequence
cgtgacacttaatataacagttttc

SEQ ID NO: 191726 - DNA, 25 bp, Probe Sequence
cccccctaattatccattttctgat

SEQ ID NO: 191727 - DNA, 25 bp, Probe Sequence
ccccattaaatttcatcttttatct

SEQ ID NO: 191728 - DNA, 25 bp, Probe Sequence
cccctaaattggtctccggaatcag

SEQ ID NO: 191729 - DNA, 25 bp, Probe Sequence
cccgtaaacttgctcaacgacatcg

SEQ ID NO: 191730 - DNA, 25 bp, Probe Sequence
tcttttaaaacgatcaacaccatgg

SEQ ID NO: 191731 - DNA, 25 bp, Probe Sequence
cgtgttagaacacaatcaacctgta

SEQ ID NO: 191732 - DNA, 25 bp, Probe Sequence
cgttgaacaacccatacatcatccg

SEQ ID NO: 191733 - DNA, 25 bp, Probe Sequence
cgttggaacggccatcagcaagaag

SEQ ID NO: 191734 - DNA, 25 bp, Probe Sequence
cgtctgggacagtatactatagaaa

SEQ ID NO: 191735 - DNA, 25 bp, Probe Sequence
cgagtgtggaaggaccgctccaaga

SEQ ID NO: 191736 - DNA, 25 bp, Probe Sequence
cgagtggtgacaggacgctgaccgt

SEQ ID NO: 191737 - DNA, 25 bp, Probe Sequence
cgtgtcagtggtggacctgacctgc

SEQ ID NO: 191738 - DNA, 25 bp, Probe Sequence
cgaaattggtgggcttgacctcctg

SEQ ID NO: 191739 - DNA, 25 bp, Probe Sequence
cgaaatgcgagtcggctttcctttc

SEQ ID NO: 191740 - DNA, 25 bp, Probe Sequence
cgaaggagagggcgcttccttgagt

SEQ ID NO: 191741 - DNA, 25 bp, Probe Sequence
cgaagcgggtggaaaatcccgcagt

SEQ ID NO: 191742 - DNA, 25 bp, Probe Sequence
cgaagagggtgttcgcaaggcccag

SEQ ID NO: 191743 - DNA, 25 bp, Probe Sequence
cgaggagttgggggaccatcccagc

SEQ ID NO: 191744 - DNA, 25 bp, Probe Sequence
cgagagggtgatctgggccacccac

SEQ ID NO: 191745 - DNA, 25 bp, Probe Sequence
cgaaggtttccattggacctgccaa

SEQ ID NO: 191746 - DNA, 25 bp, Probe Sequence
cgaacagttaaccggaagagtacag

SEQ ID NO: 191747 - DNA, 25 bp, Probe Sequence
gctgagaagttctggtgggaaggaa

SEQ ID NO: 191748 - DNA, 25 bp, Probe Sequence
gcgaaatcctggcggggaaggaacg

SEQ ID NO: 191749 - DNA, 25 bp, Probe Sequence
cgcaaacgtagcggttggataggaa

SEQ ID NO: 191750 - DNA, 25 bp, Probe Sequence
cgcaaactggggctaaatccgcagc

SEQ ID NO: 191751 - DNA, 25 bp, Probe Sequence
ccgaatctacgtgtccaatgacgac

SEQ ID NO: 191752 - DNA, 25 bp, Probe Sequence
cgagaacgggatgtccgcatccgac

SEQ ID NO: 191753 - DNA, 25 bp, Probe Sequence
cgagtcacggagctgtcgactccgc

SEQ ID NO: 191754 - DNA, 25 bp, Probe Sequence
cgagtacctgagtgtgcgccagatc

SEQ ID NO: 191755 - DNA, 25 bp, Probe Sequence
cgtctaccagagcgtgcacttgtga

SEQ ID NO: 191756 - DNA, 25 bp, Probe Sequence
cgtcagcaacggctgtcagctgctg

SEQ ID NO: 191757 - DNA, 25 bp, Probe Sequence
cgattcgcacgagctgtcagagctg

SEQ ID NO: 191758 - DNA, 25 bp, Probe Sequence
cgtcccacgagctcacagagctatg

SEQ ID NO: 191759 - DNA, 25 bp, Probe Sequence
cgtcgccctggacttcgagcaagag

SEQ ID NO: 191760 - DNA, 25 bp, Probe Sequence
cgttgtgcccacctttggcaagaag

SEQ ID NO: 191761 - DNA, 25 bp, Probe Sequence
cgagttcccccttcatgatgaaaag

SEQ ID NO: 191762 - DNA, 25 bp, Probe Sequence
cgagtacgaccgtgctgtgaaggag

SEQ ID NO: 191763 - DNA, 25 bp, Probe Sequence
cgattccgactgggagccggaggaa

SEQ ID NO: 191764 - DNA, 25 bp, Probe Sequence
cgttccgactggctgccaggatgta

SEQ ID NO: 191765 - DNA, 25 bp, Probe Sequence
cgtctccagctgctgagatcctgga

SEQ ID NO: 191766 - DNA, 25 bp, Probe Sequence
cgtgcccaattgtgaccatcgaggc

SEQ ID NO: 191767 - DNA, 25 bp, Probe Sequence
cgtcctcattcagactctagctggg

SEQ ID NO: 191768 - DNA, 25 bp, Probe Sequence
cgtcgctattaccagtggttgatgc

SEQ ID NO: 191769 - DNA, 25 bp, Probe Sequence
cgtctctacactgcctgtgtgtatc

SEQ ID NO: 191770 - DNA, 25 bp, Probe Sequence
cgtctcttcactgcacattgcaatg

SEQ ID NO: 191771 - DNA, 25 bp, Probe Sequence
cgtctgctacggacaatccaagcca

SEQ ID NO: 191772 - DNA, 25 bp, Probe Sequence
cgtcttcacagcgaatacacagccc

SEQ ID NO: 191773 - DNA, 25 bp, Probe Sequence
cgtgctgacgctgctcatcaagcag

SEQ ID NO: 191774 - DNA, 25 bp, Probe Sequence
cgtgctgaacttcctcaaggaccac

SEQ ID NO: 191775 - DNA, 25 bp, Probe Sequence
cccgtttacctcagagacgtctatt

SEQ ID NO: 191776 - DNA, 25 bp, Probe Sequence
ccctggttacaactctgaacctatc

SEQ ID NO: 191777 - DNA, 25 bp, Probe Sequence
cctggttacaactctgaacctatcc

SEQ ID NO: 191778 - DNA, 25 bp, Probe Sequence
tcggttttcaagtggtacactcgcc

SEQ ID NO: 191779 - DNA, 25 bp, Probe Sequence
gctcgtttttagtggaaacgcgtca

SEQ ID NO: 191780 - DNA, 25 bp, Probe Sequence
gctttttttaggtgcagggcgcctc

SEQ ID NO: 191781 - DNA, 25 bp, Probe Sequence
cgctttttttaggtgcagggcgcct

SEQ ID NO: 191782 - DNA, 25 bp, Probe Sequence
cgttttcttccgttgtgaatgccgc

SEQ ID NO: 191783 - DNA, 25 bp, Probe Sequence
cgttttcttccgttgtgaatgccgc

SEQ ID NO: 191784 - DNA, 25 bp, Probe Sequence
cgttttctcctgagcgtgaagccgg

SEQ ID NO: 191785 - DNA, 25 bp, Probe Sequence
cgtatgagttccccgaggagagccc

SEQ ID NO: 191786 - DNA, 25 bp, Probe Sequence
cgtgaagggccccagaggaaccctg

SEQ ID NO: 191787 - DNA, 25 bp, Probe Sequence
cgctggggaaagcgggaagcgctcg

SEQ ID NO: 191788 - DNA, 25 bp, Probe Sequence
cgcgggagagacgcggccgagaaca

SEQ ID NO: 191789 - DNA, 25 bp, Probe Sequence
cgaggacgagaacctggccttgaac

SEQ ID NO: 191790 - DNA, 25 bp, Probe Sequence
cgtgcaaataaacgctcactccgaa

SEQ ID NO: 191791 - DNA, 25 bp, Probe Sequence
cgtacaatattgatctcctaagaca

SEQ ID NO: 191792 - DNA, 25 bp, Probe Sequence
cgtactgctaggaagctccgtagtc

SEQ ID NO: 191793 - DNA, 25 bp, Probe Sequence
cgtgcaccctgggacccagaagtgc

SEQ ID NO: 191794 - DNA, 25 bp, Probe Sequence
cgatcaccaatgtacctccagaggt

SEQ ID NO: 191795 - DNA, 25 bp, Probe Sequence
cgtcactcagatccacattcaagtg

SEQ ID NO: 191796 - DNA, 25 bp, Probe Sequence
cgtccacaacccatgcaagatgagt

SEQ ID NO: 191797 - DNA, 25 bp, Probe Sequence
cgtccacaacggttactgcgatggc

SEQ ID NO: 191798 - DNA, 25 bp, Probe Sequence
cgacgaatattacaacgcggcagca

SEQ ID NO: 191799 - DNA, 25 bp, Probe Sequence
cgagcggaagacagaaccagccaca

SEQ ID NO: 191800 - DNA, 25 bp, Probe Sequence
cgagctcaacagttcgataccagcc

SEQ ID NO: 191801 - DNA, 25 bp, Probe Sequence
cgaataccaattcaaccaccaagga

SEQ ID NO: 191802 - DNA, 25 bp, Probe Sequence
cgatcacccaagtctaggtcaccaa

SEQ ID NO: 191803 - DNA, 25 bp, Probe Sequence
cgtacatcacaatgaagtgttctat

SEQ ID NO: 191804 - DNA, 25 bp, Probe Sequence
cgtagtcacatcttgattgttgttt

SEQ ID NO: 191805 - DNA, 25 bp, Probe Sequence
cgtgcagcccaatttgtgatctttt

SEQ ID NO: 191806 - DNA, 25 bp, Probe Sequence
cgatggcactcatctggggcattta

SEQ ID NO: 191807 - DNA, 25 bp, Probe Sequence
cgaggacccagcagagctcatgctg

SEQ ID NO: 191808 - DNA, 25 bp, Probe Sequence
cgatgggacaacagacctgctcagc

SEQ ID NO: 191809 - DNA, 25 bp, Probe Sequence
cgatgaagacaaatggccccatgac

SEQ ID NO: 191810 - DNA, 25 bp, Probe Sequence
cgaaggcaacattggcctgcactgc

SEQ ID NO: 191811 - DNA, 25 bp, Probe Sequence
cgagatggaaatggcgcagataacg

SEQ ID NO: 191812 - DNA, 25 bp, Probe Sequence
cgaggaccaaggcaatatagcgttg

SEQ ID NO: 191813 - DNA, 25 bp, Probe Sequence
cgagaaaccacacataatcttttgt

SEQ ID NO: 191814 - DNA, 25 bp, Probe Sequence
cgaaaacaccctgcaatctttcaga

SEQ ID NO: 191815 - DNA, 25 bp, Probe Sequence
cgacgagaacccagagctgttccag

SEQ ID NO: 191816 - DNA, 25 bp, Probe Sequence
cgagttaagtccagcaggttctgcg

SEQ ID NO: 191817 - DNA, 25 bp, Probe Sequence
cgacttcatcgagcatgccgagttc

SEQ ID NO: 191818 - DNA, 25 bp, Probe Sequence
cgacagtaggctgcatctggagagc

SEQ ID NO: 191819 - DNA, 25 bp, Probe Sequence
cgaagtgaggtcatgcttacagggg

SEQ ID NO: 191820 - DNA, 25 bp, Probe Sequence
cgcgggggccatattagcagcggtt

SEQ ID NO: 191821 - DNA, 25 bp, Probe Sequence
gctacggggccaagtgccagtttgc

SEQ ID NO: 191822 - DNA, 25 bp, Probe Sequence
gcgacggtgggaagatgccttacgt

SEQ ID NO: 191823 - DNA, 25 bp, Probe Sequence
cgaagagggcaagttcagattacgt

SEQ ID NO: 191824 - DNA, 25 bp, Probe Sequence
cgaaagggaatcctcctgtttgctg

SEQ ID NO: 191825 - DNA, 25 bp, Probe Sequence
cgtcaacggaatcgctatctccttc

SEQ ID NO: 191826 - DNA, 25 bp, Probe Sequence
cgtctacatgtacgtgttcatcctg

SEQ ID NO: 191827 - DNA, 25 bp, Probe Sequence
cgtctacagttgcctatgctattgg

SEQ ID NO: 191828 - DNA, 25 bp, Probe Sequence
cgttgtcatagtgctcaccttggga

SEQ ID NO: 191829 - DNA, 25 bp, Probe Sequence
cgatcggcacaagatgctcagctag

SEQ ID NO: 191830 - DNA, 25 bp, Probe Sequence
cgaggccagcgaggactgcatctcg

SEQ ID NO: 191831 - DNA, 25 bp, Probe Sequence
cgcggctagccagtacgactaggga

SEQ ID NO: 191832 - DNA, 25 bp, Probe Sequence
cgcttcttgcccaggatcctggggg

SEQ ID NO: 191833 - DNA, 25 bp, Probe Sequence
cgttcttctctccgtattggggagt

SEQ ID NO: 191834 - DNA, 25 bp, Probe Sequence
cgttcttgttccgatactctgagaa

SEQ ID NO: 191835 - DNA, 25 bp, Probe Sequence
cgttcattggttcctttgatagcca

SEQ ID NO: 191836 - DNA, 25 bp, Probe Sequence
cgtttctggtggtctgttggcaggc

SEQ ID NO: 191837 - DNA, 25 bp, Probe Sequence
cgtctcctttgagctgtttgcagac

SEQ ID NO: 191838 - DNA, 25 bp, Probe Sequence
cgtcaaattcgatatgttcagcaag

SEQ ID NO: 191839 - DNA, 25 bp, Probe Sequence
cgatgacaatctgggagtgtgctgg

SEQ ID NO: 191840 - DNA, 25 bp, Probe Sequence
cgtgccaatcaacatgctggtgaag

SEQ ID NO: 191841 - DNA, 25 bp, Probe Sequence
cgagccattctaccttgtatcaagg

SEQ ID NO: 191842 - DNA, 25 bp, Probe Sequence
cgtattctctatctcttctatgagg

SEQ ID NO: 191843 - DNA, 25 bp, Probe Sequence
cgtatgccactaccttgactggatc

SEQ ID NO: 191844 - DNA, 25 bp, Probe Sequence
cgtcagtcattgcccttgaattact

SEQ ID NO: 191845 - DNA, 25 bp, Probe Sequence
cgtcatccaactcctgaaatccaat

SEQ ID NO: 191846 - DNA, 25 bp, Probe Sequence
gcgtcaactacgatgactactaacc

SEQ ID NO: 191847 - DNA, 25 bp, Probe Sequence
cgtacgctacgctgacggtgaagcc

SEQ ID NO: 191848 - DNA, 25 bp, Probe Sequence
cgtcaccaactgggacgacatggag

SEQ ID NO: 191849 - DNA, 25 bp, Probe Sequence
cgtcaccaactgggacgacatggag

SEQ ID NO: 191850 - DNA, 25 bp, Probe Sequence
cgtcccaagctggctactggggcac

SEQ ID NO: 191851 - DNA, 25 bp, Probe Sequence
cgtcctcaagggccaggtgtacatc

SEQ ID NO: 191852 - DNA, 25 bp, Probe Sequence
cgcgcttcaagcaggagggtgtcct

SEQ ID NO: 191853 - DNA, 25 bp, Probe Sequence
cgcggacaagggcaagtgcggcctc

SEQ ID NO: 191854 - DNA, 25 bp, Probe Sequence
cgagtagctgggactacaggcgcgc

SEQ ID NO: 191855 - DNA, 25 bp, Probe Sequence
cgatgctggcgctgagtacgtcgtg

SEQ ID NO: 191856 - DNA, 25 bp, Probe Sequence
cgctgctgggagagatcccctggct

SEQ ID NO: 191857 - DNA, 25 bp, Probe Sequence
cgctgttgaggggtcccctctggaa

SEQ ID NO: 191858 - DNA, 25 bp, Probe Sequence
ccttcgacgtccttacaactggaca

SEQ ID NO: 191859 - DNA, 25 bp, Probe Sequence
gcttattaaccccttaactgtatcg

SEQ ID NO: 191860 - DNA, 25 bp, Probe Sequence
cctccttaccccagcaaaggtcagg

SEQ ID NO: 191861 - DNA, 25 bp, Probe Sequence
cgtccttcactcccaaaatgaggct

SEQ ID NO: 191862 - DNA, 25 bp, Probe Sequence
cgtctcgtccagccacaaatgaagg

SEQ ID NO: 191863 - DNA, 25 bp, Probe Sequence
cgtccggcgctgccaagaagaggct

SEQ ID NO: 191864 - DNA, 25 bp, Probe Sequence
cgtccggcgctgccaagaagaggct

SEQ ID NO: 191865 - DNA, 25 bp, Probe Sequence
cgtctccggcatggagagagagcgg

SEQ ID NO: 191866 - DNA, 25 bp, Probe Sequence
cgtctttgtgcaggaggtgacgcag

SEQ ID NO: 191867 - DNA, 25 bp, Probe Sequence
cgtctttgatgcggtgggctcagag

SEQ ID NO: 191868 - DNA, 25 bp, Probe Sequence
cgtctgatgtgtcattaagtgcaga

SEQ ID NO: 191869 - DNA, 25 bp, Probe Sequence
cgtctgatgtgtcattaagtgcaga

SEQ ID NO: 191870 - DNA, 25 bp, Probe Sequence
cgtaggattgatttcagattgacag

SEQ ID NO: 191871 - DNA, 25 bp, Probe Sequence
cgagcggttgatggaagttgaacag

SEQ ID NO: 191872 - DNA, 25 bp, Probe Sequence
cgatctgccttatgaaattccacaa

SEQ ID NO: 191873 - DNA, 25 bp, Probe Sequence
cgcagcagcccttcaggaaatggct

SEQ ID NO: 191874 - DNA, 25 bp, Probe Sequence
cgagagtcggagggacagcatcgtg

SEQ ID NO: 191875 - DNA, 25 bp, Probe Sequence
cgaggacagagggctaaatccatga

SEQ ID NO: 191876 - DNA, 25 bp, Probe Sequence
cgatagaacagtggctcagatctta

SEQ ID NO: 191877 - DNA, 25 bp, Probe Sequence
cgatatcctctgacgtatcatcttt

SEQ ID NO: 191878 - DNA, 25 bp, Probe Sequence
cgatcatttctgacttaaccgtgag

SEQ ID NO: 191879 - DNA, 25 bp, Probe Sequence
cgatcagctgttcatccatttcgtg

SEQ ID NO: 191880 - DNA, 25 bp, Probe Sequence
cgacacgtcatggaccatgactggg

SEQ ID NO: 191881 - DNA, 25 bp, Probe Sequence
cgccctgttaactacactagcttaa

SEQ ID NO: 191882 - DNA, 25 bp, Probe Sequence
ccccagaagtaaccctaggctcaat

SEQ ID NO: 191883 - DNA, 25 bp, Probe Sequence
cccagacaattataccctagccaac

SEQ ID NO: 191884 - DNA, 25 bp, Probe Sequence
cgccgaacatgttgcttaccgcacc

SEQ ID NO: 191885 - DNA, 25 bp, Probe Sequence
cccgaatgggtggataccgtcaagc

SEQ ID NO: 191886 - DNA, 25 bp, Probe Sequence
cgccgccagagggtttccttcggcg

SEQ ID NO: 191887 - DNA, 25 bp, Probe Sequence
cgcccacaaactgatttctcacggc

SEQ ID NO: 191888 - DNA, 25 bp, Probe Sequence
cgcccaccaaccaagtgttacaagc

SEQ ID NO: 191889 - DNA, 25 bp, Probe Sequence
cgctctatctcacaaagagactaaa

SEQ ID NO: 191890 - DNA, 25 bp, Probe Sequence
cgccattatgcccagtacatgacct

SEQ ID NO: 191891 - DNA, 25 bp, Probe Sequence
cgtattagtcatcgctattaccatg

SEQ ID NO: 191892 - DNA, 25 bp, Probe Sequence
cgtattagtcatcgctattaccatg

SEQ ID NO: 191893 - DNA, 25 bp, Probe Sequence
cgtcttcaggcacgcatgtgtacca

SEQ ID NO: 191894 - DNA, 25 bp, Probe Sequence
cgtctatcgcaggagtgctgaaaca

SEQ ID NO: 191895 - DNA, 25 bp, Probe Sequence
cgatttctgcaggctgtgtaagcat

SEQ ID NO: 191896 - DNA, 25 bp, Probe Sequence
cgagcacttagcttgttcagatctc

SEQ ID NO: 191897 - DNA, 25 bp, Probe Sequence
cgagccatatagcaggcacgtccgg

SEQ ID NO: 191898 - DNA, 25 bp, Probe Sequence
cgatgccatggacaagcacctcagc

SEQ ID NO: 191899 - DNA, 25 bp, Probe Sequence
cgtcacaggatttggatccattgta

SEQ ID NO: 191900 - DNA, 25 bp, Probe Sequence
cgatgccagcgtgtggatctcctgg

SEQ ID NO: 191901 - DNA, 25 bp, Probe Sequence
cgtctctggtgtagctgatgatccg

SEQ ID NO: 191902 - DNA, 25 bp, Probe Sequence
cgtctcgtgtgtgctagacgcaccc

SEQ ID NO: 191903 - DNA, 25 bp, Probe Sequence
cgttccgcagtgcctagacacactg

SEQ ID NO: 191904 - DNA, 25 bp, Probe Sequence
cgcagttccagattacaaaccgggt

SEQ ID NO: 191905 - DNA, 25 bp, Probe Sequence
cgagttctgcgactacaacaaggag

SEQ ID NO: 191906 - DNA, 25 bp, Probe Sequence
cgatccatgcccatccgaaaggatg

SEQ ID NO: 191907 - DNA, 25 bp, Probe Sequence
cgttcatcatccatcttaattggca

SEQ ID NO: 191908 - DNA, 25 bp, Probe Sequence
cgttcccactctctgcaatatggat

SEQ ID NO: 191909 - DNA, 25 bp, Probe Sequence
cgttcccacagctgtgcagaactta

SEQ ID NO: 191910 - DNA, 25 bp, Probe Sequence
cgtagccatctactctgagcaggac

SEQ ID NO: 191911 - DNA, 25 bp, Probe Sequence
cgatcagcagcactagttggacagg

SEQ ID NO: 191912 - DNA, 25 bp, Probe Sequence
cgaagcagctgttggcaagttggcc

SEQ ID NO: 191913 - DNA, 25 bp, Probe Sequence
cgaagcagctgttggcaagttggcc

SEQ ID NO: 191914 - DNA, 25 bp, Probe Sequence
cgaggcgtctggacaagctgggcct

SEQ ID NO: 191915 - DNA, 25 bp, Probe Sequence
cgaggctataggacgcagctgttgc

SEQ ID NO: 191916 - DNA, 25 bp, Probe Sequence
cgagagccgagccagacagctggag

SEQ ID NO: 191917 - DNA, 25 bp, Probe Sequence
cgacaccacaggcaagctgggcttt

SEQ ID NO: 191918 - DNA, 25 bp, Probe Sequence
cgaactagggtaaggtgagtgtctt

SEQ ID NO: 191919 - DNA, 25 bp, Probe Sequence
cgatacctagggcggaagtgctctc

SEQ ID NO: 191920 - DNA, 25 bp, Probe Sequence
cgatatgcaccaccgggtaaagttc

SEQ ID NO: 191921 - DNA, 25 bp, Probe Sequence
cgtttctgcatttggactgaaagtg

SEQ ID NO: 191922 - DNA, 25 bp, Probe Sequence
cgagcaatcaccagccttgaaaggc

SEQ ID NO: 191923 - DNA, 25 bp, Probe Sequence
cgagaacaactacgtgatgaatgca

SEQ ID NO: 191924 - DNA, 25 bp, Probe Sequence
cgataacagtcatgtggagatgaaa

SEQ ID NO: 191925 - DNA, 25 bp, Probe Sequence
cgtagccctcacgtgggtgtgaagg

SEQ ID NO: 191926 - DNA, 25 bp, Probe Sequence
cgtagccctcacgtgggtgtgaagg

SEQ ID NO: 191927 - DNA, 25 bp, Probe Sequence
cgtagccctcacgtgggtgtgaagg

SEQ ID NO: 191928 - DNA, 25 bp, Probe Sequence
cgttccctgatcgttgggctgaaga

SEQ ID NO: 191929 - DNA, 25 bp, Probe Sequence
cgatgtctatctacctaggggaaca

SEQ ID NO: 191930 - DNA, 25 bp, Probe Sequence
cgatgttgatgctcttgcagaagga

SEQ ID NO: 191931 - DNA, 25 bp, Probe Sequence
cgtctttgcatttctgcgaaagatc

SEQ ID NO: 191932 - DNA, 25 bp, Probe Sequence
cgacttgataatgactaaagatgac

SEQ ID NO: 191933 - DNA, 25 bp, Probe Sequence
cgaactggcagtggagataatgaag

SEQ ID NO: 191934 - DNA, 25 bp, Probe Sequence
cgcaatgctgacttggagctagatg

SEQ ID NO: 191935 - DNA, 25 bp, Probe Sequence
cgttgtgacaggtgcatggtgggat

SEQ ID NO: 191936 - DNA, 25 bp, Probe Sequence
cgcttgagaaagaaattgctggcca

SEQ ID NO: 191937 - DNA, 25 bp, Probe Sequence
cgttcagccaaccaatgtgtgcgcg

SEQ ID NO: 191938 - DNA, 25 bp, Probe Sequence
cgttgagtgaatctcaggcgcagcg

SEQ ID NO: 191939 - DNA, 25 bp, Probe Sequence
cgttgaggatgaggccgctagaggc

SEQ ID NO: 191940 - DNA, 25 bp, Probe Sequence
cgagggggacggcaagatgcacatc

SEQ ID NO: 191941 - DNA, 25 bp, Probe Sequence
cgaggggtgggatcacagcatctca

SEQ ID NO: 191942 - DNA, 25 bp, Probe Sequence
cgaggggtggtgtctgaccactgct

SEQ ID NO: 191943 - DNA, 25 bp, Probe Sequence
cgatgaaagtagtttggccacatgt

SEQ ID NO: 191944 - DNA, 25 bp, Probe Sequence
cgagaacttcagcttggagcaggaa

SEQ ID NO: 191945 - DNA, 25 bp, Probe Sequence
cgagaacctggccttgaacgagtgc

SEQ ID NO: 191946 - DNA, 25 bp, Probe Sequence
cgaaatcgtgcaggggctactggag

SEQ ID NO: 191947 - DNA, 25 bp, Probe Sequence
cgagaatggatcaatggtgccacgg

SEQ ID NO: 191948 - DNA, 25 bp, Probe Sequence
cgcatgcgatgtatgtttccacggg

SEQ ID NO: 191949 - DNA, 25 bp, Probe Sequence
cgctggagtttcaataccggagatc

SEQ ID NO: 191950 - DNA, 25 bp, Probe Sequence
cgcgtagttgctaacagcaaagaga

SEQ ID NO: 191951 - DNA, 25 bp, Probe Sequence
cgaggatgactcttaagcacatagt

SEQ ID NO: 191952 - DNA, 25 bp, Probe Sequence
cgaggagtctgtaaggtcatgtgct

SEQ ID NO: 191953 - DNA, 25 bp, Probe Sequence
cgattatgtgttaatggctcagatg

SEQ ID NO: 191954 - DNA, 25 bp, Probe Sequence
cgaaatgcttgctcaggctcagagg

SEQ ID NO: 191955 - DNA, 25 bp, Probe Sequence
cgaagcagttcatcgacagcaaccc

SEQ ID NO: 191956 - DNA, 25 bp, Probe Sequence
cgccaaggaaaaacgcactccagca

SEQ ID NO: 191957 - DNA, 25 bp, Probe Sequence
cgctggaggtaattggctaaccagc

SEQ ID NO: 191958 - DNA, 25 bp, Probe Sequence
cgctggagtgatttcttccgaaccc

SEQ ID NO: 191959 - DNA, 25 bp, Probe Sequence
cgttgctggatctgctgtttgaagc

SEQ ID NO: 191960 - DNA, 25 bp, Probe Sequence
cgatctcgcagcactgtgtttacag

SEQ ID NO: 191961 - DNA, 25 bp, Probe Sequence
cgatctcgcagcactgtgtttacag

SEQ ID NO: 191962 - DNA, 25 bp, Probe Sequence
cgatctgcacgtgctgggtgtagtg

SEQ ID NO: 191963 - DNA, 25 bp, Probe Sequence
cgatcctcgtcaggtgcaggtcagc

SEQ ID NO: 191964 - DNA, 25 bp, Probe Sequence
cgatgctatactccactaggtcagt

SEQ ID NO: 191965 - DNA, 25 bp, Probe Sequence
cgagctgtcagcaagacggtgtatg

SEQ ID NO: 191966 - DNA, 25 bp, Probe Sequence
cgacttcaggagtcactgattcagc

SEQ ID NO: 191967 - DNA, 25 bp, Probe Sequence
cgttacagcgcaacagcagcctgca

SEQ ID NO: 191968 - DNA, 25 bp, Probe Sequence
cgttcgcagttgcagcgattgcaac

SEQ ID NO: 191969 - DNA, 25 bp, Probe Sequence
cgttgcctgctcagaccttgcaggc

SEQ ID NO: 191970 - DNA, 25 bp, Probe Sequence
cgttacaatgcctatccttcagagc

SEQ ID NO: 191971 - DNA, 25 bp, Probe Sequence
cgttacaatgcctatccttcagagc

SEQ ID NO: 191972 - DNA, 25 bp, Probe Sequence
cgagacacagagagcttcttatgtg

SEQ ID NO: 191973 - DNA, 25 bp, Probe Sequence
cgatttcatgaacgttattatattg

SEQ ID NO: 191974 - DNA, 25 bp, Probe Sequence
cgatatgttcggcttttcatgtatg

SEQ ID NO: 191975 - DNA, 25 bp, Probe Sequence
cgaagtatgggccttattttatgtt

SEQ ID NO: 191976 - DNA, 25 bp, Probe Sequence
cgaacttcgggctgagcgtcgagcc

SEQ ID NO: 191977 - DNA, 25 bp, Probe Sequence
cgagatcttcgtggtggtcgtgggc

SEQ ID NO: 191978 - DNA, 25 bp, Probe Sequence
cgagatcttcgtggtggtcgtgggc

SEQ ID NO: 191979 - DNA, 25 bp, Probe Sequence
cgatgtccttgcggtcgtaggtgat

SEQ ID NO: 191980 - DNA, 25 bp, Probe Sequence
cgagttctcgctggttttggcaatt

SEQ ID NO: 191981 - DNA, 25 bp, Probe Sequence
cgaagttgcctcttttaggaatctc

SEQ ID NO: 191982 - DNA, 25 bp, Probe Sequence
cgaacttgactatctagaggaagta

SEQ ID NO: 191983 - DNA, 25 bp, Probe Sequence
cgtacatggcctcactgcagagaaa

SEQ ID NO: 191984 - DNA, 25 bp, Probe Sequence
cgtacattgctgccataccaggcaa

SEQ ID NO: 191985 - DNA, 25 bp, Probe Sequence
cgtcaactgcagccactgcaagcgg

SEQ ID NO: 191986 - DNA, 25 bp, Probe Sequence
cgtatacgagccttcacgcataaga

SEQ ID NO: 191987 - DNA, 25 bp, Probe Sequence
cgctatgacgcagctgtgatatgca

SEQ ID NO: 191988 - DNA, 25 bp, Probe Sequence
cgctcaaaactcggtgatcatagtt

SEQ ID NO: 191989 - DNA, 25 bp, Probe Sequence
cgagaaatgcaatgctggattcttt

SEQ ID NO: 191990 - DNA, 25 bp, Probe Sequence
cgagtacctatggtatgttctcttt

SEQ ID NO: 191991 - DNA, 25 bp, Probe Sequence
cgagtgcacgtccgttatttcagtg

SEQ ID NO: 191992 - DNA, 25 bp, Probe Sequence
cgcaggccagtcacgtttaggtggg

SEQ ID NO: 191993 - DNA, 25 bp, Probe Sequence
cgcaggcggtgcaagcaggttacga

SEQ ID NO: 191994 - DNA, 25 bp, Probe Sequence
cgaatgcacgtgcagttgtccacca

SEQ ID NO: 191995 - DNA, 25 bp, Probe Sequence
cgcaggcatgcacgggtttcctgcc

SEQ ID NO: 191996 - DNA, 25 bp, Probe Sequence
cgaggatgtcgaggttccctatgtc

SEQ ID NO: 191997 - DNA, 25 bp, Probe Sequence
cgaggatgtagttgttgctgccgtc

SEQ ID NO: 191998 - DNA, 25 bp, Probe Sequence
cgaggcttgaggtgggctcaggctg

SEQ ID NO: 191999 - DNA, 25 bp, Probe Sequence
cgaggttctgaaggggctcatgcag

SEQ ID NO: 192000 - DNA, 25 bp, Probe Sequence
cgcagttttacacccgcatatggcg

SEQ ID NO: 192001 - DNA, 25 bp, Probe Sequence
cgagtgttgtctcgacccaatgctc

SEQ ID NO: 192002 - DNA, 25 bp, Probe Sequence
cgcatgtgtaacaacagccgcttct

SEQ ID NO: 192003 - DNA, 25 bp, Probe Sequence
cgcatggacacaggcacgactgctt

SEQ ID NO: 192004 - DNA, 25 bp, Probe Sequence
cgagtgtgatgaggccgaggctgcc

SEQ ID NO: 192005 - DNA, 25 bp, Probe Sequence
cgcatatgtatgacatcctgggtcc

SEQ ID NO: 192006 - DNA, 25 bp, Probe Sequence
cgaatcgtaatgaggcgtgcgccgc

SEQ ID NO: 192007 - DNA, 25 bp, Probe Sequence
cgagatctacaaaaacggccccgtg

SEQ ID NO: 192008 - DNA, 25 bp, Probe Sequence
cgagcagtacaaggaccaggccgac

SEQ ID NO: 192009 - DNA, 25 bp, Probe Sequence
cgagcagacagctggaggagcccgg

SEQ ID NO: 192010 - DNA, 25 bp, Probe Sequence
cgagcagacagctggaggagcccgg

SEQ ID NO: 192011 - DNA, 25 bp, Probe Sequence
cgagcagacagctggaggatcccgg

SEQ ID NO: 192012 - DNA, 25 bp, Probe Sequence
cgcagagaaaagtatggcatccccg

SEQ ID NO: 192013 - DNA, 25 bp, Probe Sequence
cgcagacaaacacatgaacatcgac

SEQ ID NO: 192014 - DNA, 25 bp, Probe Sequence
cgagccttcacgcataagaggcagt

SEQ ID NO: 192015 - DNA, 25 bp, Probe Sequence
cgactcttcacagtgcaaattcccc

SEQ ID NO: 192016 - DNA, 25 bp, Probe Sequence
cgtttgcaaatgtcagtttcctctc

SEQ ID NO: 192017 - DNA, 25 bp, Probe Sequence
cgtttgaggtgcttccattggtctg

SEQ ID NO: 192018 - DNA, 25 bp, Probe Sequence
cgattctagttctgcctggagtgct

SEQ ID NO: 192019 - DNA, 25 bp, Probe Sequence
cgtttcatcattcggcgtgcgaatt

SEQ ID NO: 192020 - DNA, 25 bp, Probe Sequence
cgtttcatcattcggcgtgcgaatt

SEQ ID NO: 192021 - DNA, 25 bp, Probe Sequence
cgttgtcacatcagtgactggtata

SEQ ID NO: 192022 - DNA, 25 bp, Probe Sequence
cgtatgtcaccaagagatgatggtt

SEQ ID NO: 192023 - DNA, 25 bp, Probe Sequence
cgtactccctgacgtgaggcaatat

SEQ ID NO: 192024 - DNA, 25 bp, Probe Sequence
cgatactccccacgaatgtgaagag

SEQ ID NO: 192025 - DNA, 25 bp, Probe Sequence
cgttatccagacccacagtaagagc

SEQ ID NO: 192026 - DNA, 25 bp, Probe Sequence
cgctggaagctggcccaggtacaag

SEQ ID NO: 192027 - DNA, 25 bp, Probe Sequence
ccgagatagatttccaggtaaagtg

SEQ ID NO: 192028 - DNA, 25 bp, Probe Sequence
cgcagtgaaggttttgggaacagta

SEQ ID NO: 192029 - DNA, 25 bp, Probe Sequence
cgatggaaggctctgttgggccggc

SEQ ID NO: 192030 - DNA, 25 bp, Probe Sequence
cgcggaaggcgtgtttgtgcccaga

SEQ ID NO: 192031 - DNA, 25 bp, Probe Sequence
cgcaaagtgggtctcattgctgccc

SEQ ID NO: 192032 - DNA, 25 bp, Probe Sequence
cgagaagggacggtcatctgctccg

SEQ ID NO: 192033 - DNA, 25 bp, Probe Sequence
cgcaggggtgacgtgcatcatcctg

SEQ ID NO: 192034 - DNA, 25 bp, Probe Sequence
cgagcgatcaggacctgcttcgctg

SEQ ID NO: 192035 - DNA, 25 bp, Probe Sequence
cgagatgtagtactcctgtctgtgc

SEQ ID NO: 192036 - DNA, 25 bp, Probe Sequence
cgcgagtttgtcactgctttcaaaa

SEQ ID NO: 192037 - DNA, 25 bp, Probe Sequence
cgcgagtttgtcactgctttcaaaa

SEQ ID NO: 192038 - DNA, 25 bp, Probe Sequence
gtggaaattgtagcgtttcctttct

SEQ ID NO: 192039 - DNA, 25 bp, Probe Sequence
ccaaaaggctagtgtttccatttat

SEQ ID NO: 192040 - DNA, 25 bp, Probe Sequence
ccgtaaaccgtgctctctaatttat

SEQ ID NO: 192041 - DNA, 25 bp, Probe Sequence
tccgtctcacggcgttttaatttat

SEQ ID NO: 192042 - DNA, 25 bp, Probe Sequence
tcctgttaggtctggtttttttcat

SEQ ID NO: 192043 - DNA, 25 bp, Probe Sequence
cgcttgcttttctgtattttattta

SEQ ID NO: 192044 - DNA, 25 bp, Probe Sequence
ccctcttttagtcaaattagtctct

SEQ ID NO: 192045 - DNA, 25 bp, Probe Sequence
cgctctgtttaagaaaggtacccat

SEQ ID NO: 192046 - DNA, 25 bp, Probe Sequence
cctttcttcaaatgtgggtactctt

SEQ ID NO: 192047 - DNA, 25 bp, Probe Sequence
cctgtactcgcacctggtggactac

SEQ ID NO: 192048 - DNA, 25 bp, Probe Sequence
cgctggcctatatatcagggaccac

SEQ ID NO: 192049 - DNA, 25 bp, Probe Sequence
cgctgagcgatactttcggcagcac

SEQ ID NO: 192050 - DNA, 25 bp, Probe Sequence
cctgcaggggccctgcaaagcctac

SEQ ID NO: 192051 - DNA, 25 bp, Probe Sequence
ccaacaggtccgccaaatccggaag

SEQ ID NO: 192052 - DNA, 25 bp, Probe Sequence
cgcatcacaagggccctagttcaga

SEQ ID NO: 192053 - DNA, 25 bp, Probe Sequence
cgacagaccgagactccgtctcaaa

SEQ ID NO: 192054 - DNA, 25 bp, Probe Sequence
cgatgagatcagcattctccttctc

SEQ ID NO: 192055 - DNA, 25 bp, Probe Sequence
cgctgcagaaattctcatcctggcc

SEQ ID NO: 192056 - DNA, 25 bp, Probe Sequence
cgagagctaatgctgcatgcccgtt

SEQ ID NO: 192057 - DNA, 25 bp, Probe Sequence
cgagcagtactattccactcagatt

SEQ ID NO: 192058 - DNA, 25 bp, Probe Sequence
cgagcaatgaagtcatccactcctg

SEQ ID NO: 192059 - DNA, 25 bp, Probe Sequence
cgagcgatggatttccgtctctggt

SEQ ID NO: 192060 - DNA, 25 bp, Probe Sequence
cgatagggcaccgcgtgctgatggg

SEQ ID NO: 192061 - DNA, 25 bp, Probe Sequence
cgatcagggatcttgttgcattggg

SEQ ID NO: 192062 - DNA, 25 bp, Probe Sequence
cgttgggcatctgctgtgcatacag

SEQ ID NO: 192063 - DNA, 25 bp, Probe Sequence
cgtatgaggccgtggtcacagctgt

SEQ ID NO: 192064 - DNA, 25 bp, Probe Sequence
cgtatgaggccgtggtcacagctgt

SEQ ID NO: 192065 - DNA, 25 bp, Probe Sequence
cgtatgaggccgtggtcacagctgt

SEQ ID NO: 192066 - DNA, 25 bp, Probe Sequence
cgctatggacggggcattccagctg

SEQ ID NO: 192067 - DNA, 25 bp, Probe Sequence
cgctacaagcgctggcgtaagcatg

SEQ ID NO: 192068 - DNA, 25 bp, Probe Sequence
cgtatcgagagctgggctgggctgg

SEQ ID NO: 192069 - DNA, 25 bp, Probe Sequence
cgagatccagtcagggtgggggcgc

SEQ ID NO: 192070 - DNA, 25 bp, Probe Sequence
cgagatccagtcagggtgggggcgc

SEQ ID NO: 192071 - DNA, 25 bp, Probe Sequence
cgaacgcagcctttgagagtgggcg

SEQ ID NO: 192072 - DNA, 25 bp, Probe Sequence
cgaactctcgcgagagcgtatctgc

SEQ ID NO: 192073 - DNA, 25 bp, Probe Sequence
cgaagcctatatgtgcctggatcct

SEQ ID NO: 192074 - DNA, 25 bp, Probe Sequence
cgaggccactgtagtgccagtgccc

SEQ ID NO: 192075 - DNA, 25 bp, Probe Sequence
cgagaccctgtcggatagtgatgac

SEQ ID NO: 192076 - DNA, 25 bp, Probe Sequence
cgagaacccatagccaatagagttt

SEQ ID NO: 192077 - DNA, 25 bp, Probe Sequence
cgaagtgccctatcctggaagtatg

SEQ ID NO: 192078 - DNA, 25 bp, Probe Sequence
cgacgtccttacaactggacaggcg

SEQ ID NO: 192079 - DNA, 25 bp, Probe Sequence
cgaggcttttgagcagctggtgcgg

SEQ ID NO: 192080 - DNA, 25 bp, Probe Sequence
cgacgtgtttgagcagctggcgtgt

SEQ ID NO: 192081 - DNA, 25 bp, Probe Sequence
cgaggttttcagtcacttcttgttg

SEQ ID NO: 192082 - DNA, 25 bp, Probe Sequence
cgaggagtgttcccaatgctttgtc

SEQ ID NO: 192083 - DNA, 25 bp, Probe Sequence
cgaggagtgttcccaatgctttgtc

SEQ ID NO: 192084 - DNA, 25 bp, Probe Sequence
cgaccactttgtcaagctcatttcc

SEQ ID NO: 192085 - DNA, 25 bp, Probe Sequence
cgtttttgtggttagctccttcttg

SEQ ID NO: 192086 - DNA, 25 bp, Probe Sequence
cgttctgtgggcagtagccctgtgt

SEQ ID NO: 192087 - DNA, 25 bp, Probe Sequence
cgctgtttgtggagacatccctgag

SEQ ID NO: 192088 - DNA, 25 bp, Probe Sequence
cgcagatttcggaaacttctggcag

SEQ ID NO: 192089 - DNA, 25 bp, Probe Sequence
cgcacttatcaggaacgcctcgata

SEQ ID NO: 192090 - DNA, 25 bp, Probe Sequence
cgatgctttcatgaacatccgcctg

SEQ ID NO: 192091 - DNA, 25 bp, Probe Sequence
cgatgctcttagctgagtgtcccgc

SEQ ID NO: 192092 - DNA, 25 bp, Probe Sequence
cgatgcctgtaaaggggactctgga

SEQ ID NO: 192093 - DNA, 25 bp, Probe Sequence
cgacggataaggcctgaactgggaa

SEQ ID NO: 192094 - DNA, 25 bp, Probe Sequence
cgagaggaaggggagaacttggaga

SEQ ID NO: 192095 - DNA, 25 bp, Probe Sequence
cgactacacggcgcagaacttggac

SEQ ID NO: 192096 - DNA, 25 bp, Probe Sequence
cgagttcacgctgggcaacattaag

SEQ ID NO: 192097 - DNA, 25 bp, Probe Sequence
cgagggcctgatgggcaaacccagc

SEQ ID NO: 192098 - DNA, 25 bp, Probe Sequence
cgaccgcggatcgtgcagaaactcg

SEQ ID NO: 192099 - DNA, 25 bp, Probe Sequence
cgacctggtcacggagaagatgttc

SEQ ID NO: 192100 - DNA, 25 bp, Probe Sequence
cgaccgcgacaacaacaagtgtgcc

SEQ ID NO: 192101 - DNA, 25 bp, Probe Sequence
cgagccctgagaaacaaagacttcc

SEQ ID NO: 192102 - DNA, 25 bp, Probe Sequence
cgacctctgaggccatcgtgaagtt

SEQ ID NO: 192103 - DNA, 25 bp, Probe Sequence
cgacccgagctgactcgacggtgat

SEQ ID NO: 192104 - DNA, 25 bp, Probe Sequence
cgatgaacgtcttacaactcagttg

SEQ ID NO: 192105 - DNA, 25 bp, Probe Sequence
cgagaccagcctgaccaacatggtg

SEQ ID NO: 192106 - DNA, 25 bp, Probe Sequence
cgagaccagcctgaccaacatggtg

SEQ ID NO: 192107 - DNA, 25 bp, Probe Sequence
cgagcacggcatcgtcaccaactgg

SEQ ID NO: 192108 - DNA, 25 bp, Probe Sequence
cgagagggccgggccatggcagtga

SEQ ID NO: 192109 - DNA, 25 bp, Probe Sequence
cgaagggccggtagttcgagaagct

SEQ ID NO: 192110 - DNA, 25 bp, Probe Sequence
cgaggcccgcgacttagtagaacgc

SEQ ID NO: 192111 - DNA, 25 bp, Probe Sequence
cgaggactcctacaaagacagcacc

SEQ ID NO: 192112 - DNA, 25 bp, Probe Sequence
cgaggacccgggcaagaatgagacc

SEQ ID NO: 192113 - DNA, 25 bp, Probe Sequence
cgaagacccagcagcgaacacaagt

SEQ ID NO: 192114 - DNA, 25 bp, Probe Sequence
cgaagaccagaccgcagagttcaag

SEQ ID NO: 192115 - DNA, 25 bp, Probe Sequence
cgactacaacaaggaggccatcaag

SEQ ID NO: 192116 - DNA, 25 bp, Probe Sequence
cgaggacccataagcaggcctccaa

SEQ ID NO: 192117 - DNA, 25 bp, Probe Sequence
cgaggacccataagcaggcctccaa

SEQ ID NO: 192118 - DNA, 25 bp, Probe Sequence
cgagaaacctatgggctgcccaaca

SEQ ID NO: 192119 - DNA, 25 bp, Probe Sequence
cgcggattccttggggactgagaca

SEQ ID NO: 192120 - DNA, 25 bp, Probe Sequence
cgcatgtgtaccagtggactttgaa

SEQ ID NO: 192121 - DNA, 25 bp, Probe Sequence
cgagtgtgacacagtggagcagaac

SEQ ID NO: 192122 - DNA, 25 bp, Probe Sequence
cgatggagcgcagcctggaggaggc

SEQ ID NO: 192123 - DNA, 25 bp, Probe Sequence
cgaggggcagccaggaaaggcgatc

SEQ ID NO: 192124 - DNA, 25 bp, Probe Sequence
cgatggggacgatggacagagacag

SEQ ID NO: 192125 - DNA, 25 bp, Probe Sequence
cgaggtgtgaactcctctgaaaggc

SEQ ID NO: 192126 - DNA, 25 bp, Probe Sequence
cgaagtagcaaatctgcaccagaag

SEQ ID NO: 192127 - DNA, 25 bp, Probe Sequence
cgcaagtacaaccgcttcgagaagc

SEQ ID NO: 192128 - DNA, 25 bp, Probe Sequence
cgaaaacacatactgcccgaaacca

SEQ ID NO: 192129 - DNA, 25 bp, Probe Sequence
cgcaaaactcatgatgctccggctg

SEQ ID NO: 192130 - DNA, 25 bp, Probe Sequence
cgaaagcagctctcctcggagctgg

SEQ ID NO: 192131 - DNA, 25 bp, Probe Sequence
cgagtgagcagcgatacctagggcg

SEQ ID NO: 192132 - DNA, 25 bp, Probe Sequence
cgaatgaagcctccttcagtggctc

SEQ ID NO: 192133 - DNA, 25 bp, Probe Sequence
cgaaagagactgtctggcagttgcc

SEQ ID NO: 192134 - DNA, 25 bp, Probe Sequence
cgcaaagccctgtgagcgtctacag

SEQ ID NO: 192135 - DNA, 25 bp, Probe Sequence
cgaaggccctatcaggacatggagt

SEQ ID NO: 192136 - DNA, 25 bp, Probe Sequence
cgaaggcgccgccaaggaagagccc

SEQ ID NO: 192137 - DNA, 25 bp, Probe Sequence
cgcaagacggaccagagcgaaagca

SEQ ID NO: 192138 - DNA, 25 bp, Probe Sequence
cgcaaggtggactggctgactgaga

SEQ ID NO: 192139 - DNA, 25 bp, Probe Sequence
cgcaagagtgcgtctcggacagcga

SEQ ID NO: 192140 - DNA, 25 bp, Probe Sequence
cgaggacatcgcgtcgctgacgcgc

SEQ ID NO: 192141 - DNA, 25 bp, Probe Sequence
cgagagctccatgtcaggactggcc

SEQ ID NO: 192142 - DNA, 25 bp, Probe Sequence
cgagagtcacaggtagtgggtctgc

SEQ ID NO: 192143 - DNA, 25 bp, Probe Sequence
cgagtgatgctagctgagtgtttac

SEQ ID NO: 192144 - DNA, 25 bp, Probe Sequence
cgcgtggctcatcaaatgtttaccc

SEQ ID NO: 192145 - DNA, 25 bp, Probe Sequence
cgctgggtgcatcgagaaggcctac

SEQ ID NO: 192146 - DNA, 25 bp, Probe Sequence
cgcagactgtgctataaactgcaat

SEQ ID NO: 192147 - DNA, 25 bp, Probe Sequence
cgacacggctcaagtcacgaatcag

SEQ ID NO: 192148 - DNA, 25 bp, Probe Sequence
cgacgaggccatggctgatctgcac

SEQ ID NO: 192149 - DNA, 25 bp, Probe Sequence
cgagtaggcacaggcgtgcacctgc

SEQ ID NO: 192150 - DNA, 25 bp, Probe Sequence
cgaaagcggcaggatcgacgcgctt

SEQ ID NO: 192151 - DNA, 25 bp, Probe Sequence
cgataaggccgggcgaggtgcctgg

SEQ ID NO: 192152 - DNA, 25 bp, Probe Sequence
cgagatatggcccgcgctggagttt

SEQ ID NO: 192153 - DNA, 25 bp, Probe Sequence
cgagcgagcagctcggtccagtgac

SEQ ID NO: 192154 - DNA, 25 bp, Probe Sequence
cgagcgagcagctcggtccagtgac

SEQ ID NO: 192155 - DNA, 25 bp, Probe Sequence
cgagctggagcggctaggccaggac

SEQ ID NO: 192156 - DNA, 25 bp, Probe Sequence
cgatctgcagggcgagctggacaga

SEQ ID NO: 192157 - DNA, 25 bp, Probe Sequence
cgatctgcagggcgagctggacaga

SEQ ID NO: 192158 - DNA, 25 bp, Probe Sequence
cgttgctcagagccggtggtagacc

SEQ ID NO: 192159 - DNA, 25 bp, Probe Sequence
cgaggctaaggccgtggatatcccc

SEQ ID NO: 192160 - DNA, 25 bp, Probe Sequence
cgaggccaaagctgtgcgagcacac

SEQ ID NO: 192161 - DNA, 25 bp, Probe Sequence
cgatggccagggtgatgcctgcgac

SEQ ID NO: 192162 - DNA, 25 bp, Probe Sequence
cgaggctggggatgagcgcatgctg

SEQ ID NO: 192163 - DNA, 25 bp, Probe Sequence
cgatggcggcggggatagtggcttc

SEQ ID NO: 192164 - DNA, 25 bp, Probe Sequence
cgaggcaggcggatcatgaggtcag

SEQ ID NO: 192165 - DNA, 25 bp, Probe Sequence
cgaccagtggcgagcctggatgcag

SEQ ID NO: 192166 - DNA, 25 bp, Probe Sequence
cgaaaggcacgcagcgggagcagca

SEQ ID NO: 192167 - DNA, 25 bp, Probe Sequence
cgagagagacgggcggtgtgacagc

SEQ ID NO: 192168 - DNA, 25 bp, Probe Sequence
cccaaggagggcttggtcagcagca

SEQ ID NO: 192169 - DNA, 25 bp, Probe Sequence
cctaaggcaggggcgagcacggaac

SEQ ID NO: 192170 - DNA, 25 bp, Probe Sequence
cgcaaaggcagcaggctaccggacg

SEQ ID NO: 192171 - DNA, 25 bp, Probe Sequence
cgaaaccagatcgagctacctaaga

SEQ ID NO: 192172 - DNA, 25 bp, Probe Sequence
cgaaatcacaacgtaactcaatcag

SEQ ID NO: 192173 - DNA, 25 bp, Probe Sequence
gcgaaatcactgtactgtagtcaat

SEQ ID NO: 192174 - DNA, 25 bp, Probe Sequence
cgagcggcctgatatcatggtcatt

SEQ ID NO: 192175 - DNA, 25 bp, Probe Sequence
cgaggagcgccaagaagatgtcact

SEQ ID NO: 192176 - DNA, 25 bp, Probe Sequence
cgactcagcccaaaagcttcttaag

SEQ ID NO: 192177 - DNA, 25 bp, Probe Sequence
cgcatccaggcgggttgcttgtaat

SEQ ID NO: 192178 - DNA, 25 bp, Probe Sequence
cgatacaggcaggtgctggcattgt

SEQ ID NO: 192179 - DNA, 25 bp, Probe Sequence
cgcaacagcagcctgcagctggatt

SEQ ID NO: 192180 - DNA, 25 bp, Probe Sequence
cgaacatgaggctgctgcgatctgc

SEQ ID NO: 192181 - DNA, 25 bp, Probe Sequence
cgacacatagtggctgcaggcttcc

SEQ ID NO: 192182 - DNA, 25 bp, Probe Sequence
cgatccatcaggcccagtattcctg

SEQ ID NO: 192183 - DNA, 25 bp, Probe Sequence
cgatccatcaggcccagtattcctg

SEQ ID NO: 192184 - DNA, 25 bp, Probe Sequence
cgatccatcaggcccagtattcctg

SEQ ID NO: 192185 - DNA, 25 bp, Probe Sequence
cgatcaccaggtgccatatggccat

SEQ ID NO: 192186 - DNA, 25 bp, Probe Sequence
cgacatgccagactttgaggacgat

SEQ ID NO: 192187 - DNA, 25 bp, Probe Sequence
cgactacagcatgtggaggaagaac

SEQ ID NO: 192188 - DNA, 25 bp, Probe Sequence
cgaccgagacagctatagaagaatc

SEQ ID NO: 192189 - DNA, 25 bp, Probe Sequence
cgagcccaacgatgccaagaaacca

SEQ ID NO: 192190 - DNA, 25 bp, Probe Sequence
cgatgcccttcctgacaatgaaaac

SEQ ID NO: 192191 - DNA, 25 bp, Probe Sequence
cgacctcttcaacagcaatcacaag

SEQ ID NO: 192192 - DNA, 25 bp, Probe Sequence
cgcaccatctcaagggaatacacat

SEQ ID NO: 192193 - DNA, 25 bp, Probe Sequence
cgagttcatcacctggagccagaat

SEQ ID NO: 192194 - DNA, 25 bp, Probe Sequence
cgagcttcccgtggaggatgacatt

SEQ ID NO: 192195 - DNA, 25 bp, Probe Sequence
cgacttcctccaggagtatggcact

SEQ ID NO: 192196 - DNA, 25 bp, Probe Sequence
cgacagtgcccaggggtctgagtct

SEQ ID NO: 192197 - DNA, 25 bp, Probe Sequence
cgatcacggtaggcagtgcttgaat

SEQ ID NO: 192198 - DNA, 25 bp, Probe Sequence
cgctcacgcatttcgagctctacaa

SEQ ID NO: 192199 - DNA, 25 bp, Probe Sequence
cgcatgaagtttcgcaacatggaga

SEQ ID NO: 192200 - DNA, 25 bp, Probe Sequence
cgatgcagcgtatttcacactgcat

SEQ ID NO: 192201 - DNA, 25 bp, Probe Sequence
cgagctctgcataaaccagcatcag

SEQ ID NO: 192202 - DNA, 25 bp, Probe Sequence
cgagatgccttaagccagctcatga

SEQ ID NO: 192203 - DNA, 25 bp, Probe Sequence
cgatgattcttaacacagccttcct

SEQ ID NO: 192204 - DNA, 25 bp, Probe Sequence
cgatatatgttctctaggcctttta

SEQ ID NO: 192205 - DNA, 25 bp, Probe Sequence
cgatatatgttctctaggcctttta

SEQ ID NO: 192206 - DNA, 25 bp, Probe Sequence
tcgtatagtatcgctattaccatgt

SEQ ID NO: 192207 - DNA, 25 bp, Probe Sequence
cgaacagattgcgagcacattactt

SEQ ID NO: 192208 - DNA, 25 bp, Probe Sequence
cgagcttcaacggccattgagcttt

SEQ ID NO: 192209 - DNA, 25 bp, Probe Sequence
cgaggacacacggcttagtgcgtct

SEQ ID NO: 192210 - DNA, 25 bp, Probe Sequence
cgcagtggcacatgcctgtaatccc

SEQ ID NO: 192211 - DNA, 25 bp, Probe Sequence
cgactggctcagcactctggagccc

SEQ ID NO: 192212 - DNA, 25 bp, Probe Sequence
cgcttgagccagaatctcaggaccc

SEQ ID NO: 192213 - DNA, 25 bp, Probe Sequence
cgcgtatgtaataaaggacgccctc

SEQ ID NO: 192214 - DNA, 25 bp, Probe Sequence
tcggttgagagtaaaaggcttttct

SEQ ID NO: 192215 - DNA, 25 bp, Probe Sequence
tcggtttgactcacgggattttcca

SEQ ID NO: 192216 - DNA, 25 bp, Probe Sequence
tcggtttgactcacggggatttcca

SEQ ID NO: 192217 - DNA, 25 bp, Probe Sequence
cgcgtgtctggcatcgcggaggttg

SEQ ID NO: 192218 - DNA, 25 bp, Probe Sequence
cgcggctctgactaccgaagtatct

SEQ ID NO: 192219 - DNA, 25 bp, Probe Sequence
cgcggctctgactaccgaagtatct

SEQ ID NO: 192220 - DNA, 25 bp, Probe Sequence
cgcgattgcgcaatgccataaattt

SEQ ID NO: 192221 - DNA, 25 bp, Probe Sequence
cgcgactccatctctacaaataaat

SEQ ID NO: 192222 - DNA, 25 bp, Probe Sequence
cgagacccatactgctgacagaaaa

SEQ ID NO: 192223 - DNA, 25 bp, Probe Sequence
cgaaacacacattggtactaaaact

SEQ ID NO: 192224 - DNA, 25 bp, Probe Sequence
cgaaaacctcgacaatccaatccag

SEQ ID NO: 192225 - DNA, 25 bp, Probe Sequence
cgatcatatacccagaaaaccccca

SEQ ID NO: 192226 - DNA, 25 bp, Probe Sequence
cgaaatgcactccagaagaaaatct

SEQ ID NO: 192227 - DNA, 25 bp, Probe Sequence
cgaagctgcaccacactggagaact

SEQ ID NO: 192228 - DNA, 25 bp, Probe Sequence
cgaagctgcaccacactggagaact

SEQ ID NO: 192229 - DNA, 25 bp, Probe Sequence
cgaagtcctgggactgcgggatgct

SEQ ID NO: 192230 - DNA, 25 bp, Probe Sequence
cgagatgagccgcggcggggatgcg

SEQ ID NO: 192231 - DNA, 25 bp, Probe Sequence
cgagcagatgctgagcgtgcagagc

SEQ ID NO: 192232 - DNA, 25 bp, Probe Sequence
cgagcagcgcatcagggagctgtgt

SEQ ID NO: 192233 - DNA, 25 bp, Probe Sequence
cgaggcgctggtggatgaatgctgc

SEQ ID NO: 192234 - DNA, 25 bp, Probe Sequence
cgaggcgcagcgggtgaagctatca

SEQ ID NO: 192235 - DNA, 25 bp, Probe Sequence
cgcaggcgcggaccaaagcgatctc

SEQ ID NO: 192236 - DNA, 25 bp, Probe Sequence
cgcaagcgccgtgaagagcgcctcc

SEQ ID NO: 192237 - DNA, 25 bp, Probe Sequence
cgaatcgccctcaagtgaggccctt

SEQ ID NO: 192238 - DNA, 25 bp, Probe Sequence
cgagatctgtctgccacgaagggtt

SEQ ID NO: 192239 - DNA, 25 bp, Probe Sequence
cgagtctcttctccactggatggag

SEQ ID NO: 192240 - DNA, 25 bp, Probe Sequence
cgcgtctttcatcacttgtgggttt

SEQ ID NO: 192241 - DNA, 25 bp, Probe Sequence
cgctggcgtgtccaacatagtggcg

SEQ ID NO: 192242 - DNA, 25 bp, Probe Sequence
cgctggctctcccagtatattgact

SEQ ID NO: 192243 - DNA, 25 bp, Probe Sequence
cgcgagtgtcaccgtggggacagga

SEQ ID NO: 192244 - DNA, 25 bp, Probe Sequence
cgagcacttcatcgagggtggacgg

SEQ ID NO: 192245 - DNA, 25 bp, Probe Sequence
cgagccttgagccagggagacaagg

SEQ ID NO: 192246 - DNA, 25 bp, Probe Sequence
cgagcagcttcgtagcttgatggaa

SEQ ID NO: 192247 - DNA, 25 bp, Probe Sequence
cgagcacattacttgctgcatggga

SEQ ID NO: 192248 - DNA, 25 bp, Probe Sequence
cgcacacagtgagcagctgcaggcc

SEQ ID NO: 192249 - DNA, 25 bp, Probe Sequence
cgcacacagtgagcagctgcaggcc

SEQ ID NO: 192250 - DNA, 25 bp, Probe Sequence
cgaccagtgcatgcatatactgtct

SEQ ID NO: 192251 - DNA, 25 bp, Probe Sequence
cgacactgtgcattgcattatggac

SEQ ID NO: 192252 - DNA, 25 bp, Probe Sequence
cgacgttcgatcttgcatggagcaa

SEQ ID NO: 192253 - DNA, 25 bp, Probe Sequence
cgctcggtgcgatactgatgatgaa

SEQ ID NO: 192254 - DNA, 25 bp, Probe Sequence
cgctcggtgcgatactgatgatgaa

SEQ ID NO: 192255 - DNA, 25 bp, Probe Sequence
cgcccgagatgatcctcagcatgat

SEQ ID NO: 192256 - DNA, 25 bp, Probe Sequence
gcgtccagaaagcttccgttttcta

SEQ ID NO: 192257 - DNA, 25 bp, Probe Sequence
cgcccagcaaacctttagattttca

SEQ ID NO: 192258 - DNA, 25 bp, Probe Sequence
cgctgccagctttactggagaactt

SEQ ID NO: 192259 - DNA, 25 bp, Probe Sequence
cgagcaggcctgcaaggagaagctg

SEQ ID NO: 192260 - DNA, 25 bp, Probe Sequence
cgcacgtgctgtctatatggaagcc

SEQ ID NO: 192261 - DNA, 25 bp, Probe Sequence
cgagtgatgaggttcgcaagaacct

SEQ ID NO: 192262 - DNA, 25 bp, Probe Sequence
cgagtatggattaccagggcaccag

SEQ ID NO: 192263 - DNA, 25 bp, Probe Sequence
cctattgaattttcagggaccagaa

SEQ ID NO: 192264 - DNA, 25 bp, Probe Sequence
cctacaacgtcatagtggaggcact

SEQ ID NO: 192265 - DNA, 25 bp, Probe Sequence
cgctacatagttcacctggggcagc

SEQ ID NO: 192266 - DNA, 25 bp, Probe Sequence
cgctcaatttctcacagggctgcgc

SEQ ID NO: 192267 - DNA, 25 bp, Probe Sequence
cgctcaaagtttcaggtctcgcggt

SEQ ID NO: 192268 - DNA, 25 bp, Probe Sequence
cgctaaagtgtgacgagcccatcct

SEQ ID NO: 192269 - DNA, 25 bp, Probe Sequence
cgcaaggagtggaaaccaccaccgt

SEQ ID NO: 192270 - DNA, 25 bp, Probe Sequence
cgagcgggaggatatcacccacacc

SEQ ID NO: 192271 - DNA, 25 bp, Probe Sequence
cgagcagggggatgaaggcgtcgcg

SEQ ID NO: 192272 - DNA, 25 bp, Probe Sequence
cgaagggtgtggcacaggctacgtg

SEQ ID NO: 192273 - DNA, 25 bp, Probe Sequence
cgaaggagtggactggagcgtaact

SEQ ID NO: 192274 - DNA, 25 bp, Probe Sequence
cgaacaagctgggtatgtgcttgaa

SEQ ID NO: 192275 - DNA, 25 bp, Probe Sequence
cgaatcaagcagcctatcagcttta

SEQ ID NO: 192276 - DNA, 25 bp, Probe Sequence
gcgaataaagccaaggcttcttccc

SEQ ID NO: 192277 - DNA, 25 bp, Probe Sequence
cgacatcattaccgggttttcctct

SEQ ID NO: 192278 - DNA, 25 bp, Probe Sequence
cgacaactataggaggcttttcatt

SEQ ID NO: 192279 - DNA, 25 bp, Probe Sequence
cgacaaaaggagcttcatctttcaa

SEQ ID NO: 192280 - DNA, 25 bp, Probe Sequence
cgaaaaggcctgcatgaaacttaac

SEQ ID NO: 192281 - DNA, 25 bp, Probe Sequence
cgcataaaggcagtcgtacatacta

SEQ ID NO: 192282 - DNA, 25 bp, Probe Sequence
cgcataatgacgtatggtccatagt

SEQ ID NO: 192283 - DNA, 25 bp, Probe Sequence
cgcatagatccacgaggcaccaagg

SEQ ID NO: 192284 - DNA, 25 bp, Probe Sequence
cgctttccagaaggcaccagagccc

SEQ ID NO: 192285 - DNA, 25 bp, Probe Sequence
cgcttccgaaatgcactccagaaga

SEQ ID NO: 192286 - DNA, 25 bp, Probe Sequence
cgcttcttcaactccttcaatgagg

SEQ ID NO: 192287 - DNA, 25 bp, Probe Sequence
gcatttccaaactgccttaaacgtt

SEQ ID NO: 192288 - DNA, 25 bp, Probe Sequence
gaattcctagacacctggaacagag

SEQ ID NO: 192289 - DNA, 25 bp, Probe Sequence
gaaatttgagaattccggttagtgg

SEQ ID NO: 192290 - DNA, 25 bp, Probe Sequence
gaggtttgaaccactgtttcactgc

SEQ ID NO: 192291 - DNA, 25 bp, Probe Sequence
cgagtttgatcccaccaattacacg

SEQ ID NO: 192292 - DNA, 25 bp, Probe Sequence
cgaggacttcaccatccacgaaaat

SEQ ID NO: 192293 - DNA, 25 bp, Probe Sequence
cgaggacttcaccatccacgaaaat

SEQ ID NO: 192294 - DNA, 25 bp, Probe Sequence
cgaggacttcaccatccacgaaaat

SEQ ID NO: 192295 - DNA, 25 bp, Probe Sequence
cgaggagcctcatcttacgagaaaa

SEQ ID NO: 192296 - DNA, 25 bp, Probe Sequence
cgagaggcccaagtaccgtggaagg

SEQ ID NO: 192297 - DNA, 25 bp, Probe Sequence
cgaggagcctcctgaaggtggaagc

SEQ ID NO: 192298 - DNA, 25 bp, Probe Sequence
cgaggagctctcctgcgaagagcga

SEQ ID NO: 192299 - DNA, 25 bp, Probe Sequence
cgatgtcacgtattgccaagagctt

SEQ ID NO: 192300 - DNA, 25 bp, Probe Sequence
cgatgtcagcggatgtcacgagctc

SEQ ID NO: 192301 - DNA, 25 bp, Probe Sequence
cgagaagctggaagccaccatgctc

SEQ ID NO: 192302 - DNA, 25 bp, Probe Sequence
cgcatcacctagttaacctgctgca

SEQ ID NO: 192303 - DNA, 25 bp, Probe Sequence
cgacaccagtgagtacaccatgctg

SEQ ID NO: 192304 - DNA, 25 bp, Probe Sequence
cgcagcccagtggaggcagcagctg

SEQ ID NO: 192305 - DNA, 25 bp, Probe Sequence
cgacgtgcagatggctgtgtctgtg

SEQ ID NO: 192306 - DNA, 25 bp, Probe Sequence
cgctcagtgccatgcgttcgctgaa

SEQ ID NO: 192307 - DNA, 25 bp, Probe Sequence
cgctcaatccaactttcatcgtgaa

SEQ ID NO: 192308 - DNA, 25 bp, Probe Sequence
cgctcagactcaaacatctacctga

SEQ ID NO: 192309 - DNA, 25 bp, Probe Sequence
cgacgacttcaactgcaacatctgg

SEQ ID NO: 192310 - DNA, 25 bp, Probe Sequence
cgacgtcctaatccaactgggagaa

SEQ ID NO: 192311 - DNA, 25 bp, Probe Sequence
cgacgacatcaactccagggtggag

SEQ ID NO: 192312 - DNA, 25 bp, Probe Sequence
cgacgtcgacattgacaaggtcatg

SEQ ID NO: 192313 - DNA, 25 bp, Probe Sequence
cgacgtcgacattgacaaggtcatg

SEQ ID NO: 192314 - DNA, 25 bp, Probe Sequence
cgacgtcgacattgacaaggtcatg

SEQ ID NO: 192315 - DNA, 25 bp, Probe Sequence
cgacctcgatgttggatcaggacat

SEQ ID NO: 192316 - DNA, 25 bp, Probe Sequence
cgaccatccattgcagatgcgcaga

SEQ ID NO: 192317 - DNA, 25 bp, Probe Sequence
cgagctccagctaggatgatcgagg

SEQ ID NO: 192318 - DNA, 25 bp, Probe Sequence
cgagcatgctgccttcaagcatctg

SEQ ID NO: 192319 - DNA, 25 bp, Probe Sequence
cgagcatgatgcccgtgagaaggtg

SEQ ID NO: 192320 - DNA, 25 bp, Probe Sequence
cgacattgctgcacgagcctatggt

SEQ ID NO: 192321 - DNA, 25 bp, Probe Sequence
cgagactcatgcacaagcttcaata

SEQ ID NO: 192322 - DNA, 25 bp, Probe Sequence
cgagccatctcaattaccatatata

SEQ ID NO: 192323 - DNA, 25 bp, Probe Sequence
cgagatcatgccattgcactgcacc

SEQ ID NO: 192324 - DNA, 25 bp, Probe Sequence
cgagatgcagtgactcgggcagcgc

SEQ ID NO: 192325 - DNA, 25 bp, Probe Sequence
cgcagtaggtcaggtagcggctcag

SEQ ID NO: 192326 - DNA, 25 bp, Probe Sequence
cgagtggatgtcacataccctgctg

SEQ ID NO: 192327 - DNA, 25 bp, Probe Sequence
cgagattgtgccattgcactccagc

SEQ ID NO: 192328 - DNA, 25 bp, Probe Sequence
cgagatggtgacagtgcacttcagc

SEQ ID NO: 192329 - DNA, 25 bp, Probe Sequence
cgagatgggacattgtgcggctcat

SEQ ID NO: 192330 - DNA, 25 bp, Probe Sequence
cgaggtggacatggtgcgagtgatg

SEQ ID NO: 192331 - DNA, 25 bp, Probe Sequence
cgagcttagcgctgtgatgagtgtg

SEQ ID NO: 192332 - DNA, 25 bp, Probe Sequence
cgctggatatcctggatgtggtgac

SEQ ID NO: 192333 - DNA, 25 bp, Probe Sequence
cgctattaccatgctgattgcggtt

SEQ ID NO: 192334 - DNA, 25 bp, Probe Sequence
cgccttaaatctaagtgggtcaact

SEQ ID NO: 192335 - DNA, 25 bp, Probe Sequence
cgagcagtcaaattccagagggcca

SEQ ID NO: 192336 - DNA, 25 bp, Probe Sequence
cgagcgccaagatcgtgaagcccaa

SEQ ID NO: 192337 - DNA, 25 bp, Probe Sequence
cgagcagccacgtaggctgcaccca

SEQ ID NO: 192338 - DNA, 25 bp, Probe Sequence
cgagcaccacgcaagaagatccatc

SEQ ID NO: 192339 - DNA, 25 bp, Probe Sequence
cgagaccagcctggacagcatggtg

SEQ ID NO: 192340 - DNA, 25 bp, Probe Sequence
cgagaacgccatgattgctgctgga

SEQ ID NO: 192341 - DNA, 25 bp, Probe Sequence
cgcgagagctgcgaggatgcctgcc

SEQ ID NO: 192342 - DNA, 25 bp, Probe Sequence
ccgaggcctagagtggcagccaaga

SEQ ID NO: 192343 - DNA, 25 bp, Probe Sequence
ccgggattgcatctgggcttaaacc

SEQ ID NO: 192344 - DNA, 25 bp, Probe Sequence
ccggcgatgcggcggcgttattccc

SEQ ID NO: 192345 - DNA, 25 bp, Probe Sequence
cgcgggacggatgaacaatgttcac

SEQ ID NO: 192346 - DNA, 25 bp, Probe Sequence
cgcgggacggataacaatttcacac

SEQ ID NO: 192347 - DNA, 25 bp, Probe Sequence
cgcgtggacggatcacgatttcaca

SEQ ID NO: 192348 - DNA, 25 bp, Probe Sequence
cgctacgaggtggccaggattctca

SEQ ID NO: 192349 - DNA, 25 bp, Probe Sequence
cgctacacctgagccaggctcttgc

SEQ ID NO: 192350 - DNA, 25 bp, Probe Sequence
cgctgacctcaaccagcaggatgtt

SEQ ID NO: 192351 - DNA, 25 bp, Probe Sequence
cgctggttagcaccgcaggtgtaga

SEQ ID NO: 192352 - DNA, 25 bp, Probe Sequence
cgctggttagcaccgcaggtgtaga

SEQ ID NO: 192353 - DNA, 25 bp, Probe Sequence
cgcgggatagccccaaatgttacca

SEQ ID NO: 192354 - DNA, 25 bp, Probe Sequence
cgcggaagagccacctgattttccc

SEQ ID NO: 192355 - DNA, 25 bp, Probe Sequence
cgcgtcatcggcgaacactgttcgc

SEQ ID NO: 192356 - DNA, 25 bp, Probe Sequence
cgctgtgatcgtggagaccatgatt

SEQ ID NO: 192357 - DNA, 25 bp, Probe Sequence
cgctgcttggcagctactagcatta

SEQ ID NO: 192358 - DNA, 25 bp, Probe Sequence
cgcgtgtgacagtcttgcattctgt

SEQ ID NO: 192359 - DNA, 25 bp, Probe Sequence
cgcacgtaattggcatgtgtctgca

SEQ ID NO: 192360 - DNA, 25 bp, Probe Sequence
cgcggtaatgctggtggtctgcatc

SEQ ID NO: 192361 - DNA, 25 bp, Probe Sequence
cgctggaagttgggttctcatcccc

SEQ ID NO: 192362 - DNA, 25 bp, Probe Sequence
cgctagatgcatgtcgttacatcac

SEQ ID NO: 192363 - DNA, 25 bp, Probe Sequence
cgcataatcattaccttaaagcatc

SEQ ID NO: 192364 - DNA, 25 bp, Probe Sequence
cgctttcattttttgacctcatcac

SEQ ID NO: 192365 - DNA, 25 bp, Probe Sequence
cgctttctgttttggcagttctgcc

SEQ ID NO: 192366 - DNA, 25 bp, Probe Sequence
cgcctgggctccaggcgttgctggc

SEQ ID NO: 192367 - DNA, 25 bp, Probe Sequence
cgctggggtatcagtgagggcggcc

SEQ ID NO: 192368 - DNA, 25 bp, Probe Sequence
cgcaggggccacagtccaagaggcc

SEQ ID NO: 192369 - DNA, 25 bp, Probe Sequence
cctgtaatcccagctactcgggagg

SEQ ID NO: 192370 - DNA, 25 bp, Probe Sequence
cgcgggcagagagtggtactacggg

SEQ ID NO: 192371 - DNA, 25 bp, Probe Sequence
cgctggggatgctggtacaagttgt

SEQ ID NO: 192372 - DNA, 25 bp, Probe Sequence
cgctgcgggccacgaacaatagttt

SEQ ID NO: 192373 - DNA, 25 bp, Probe Sequence
cgctgctgtgcctcgatggcaaacg

SEQ ID NO: 192374 - DNA, 25 bp, Probe Sequence
cgcgtctctccaggatcgcatgaaa

SEQ ID NO: 192375 - DNA, 25 bp, Probe Sequence
cgcgtcggacgagcgcaaaagcgcc

SEQ ID NO: 192376 - DNA, 25 bp, Probe Sequence
cgagtcggacgtgtaccggatgctc

SEQ ID NO: 192377 - DNA, 25 bp, Probe Sequence
cgaacggactgtgaatccgctcttt

SEQ ID NO: 192378 - DNA, 25 bp, Probe Sequence
cgacgaggacgtgtatcgcctctgg

SEQ ID NO: 192379 - DNA, 25 bp, Probe Sequence
cgacagaggacagccagaagcccag

SEQ ID NO: 192380 - DNA, 25 bp, Probe Sequence
cgacaggttgctgccagagagcctg

SEQ ID NO: 192381 - DNA, 25 bp, Probe Sequence
cgcaagagtagcggtccaagcctgc

SEQ ID NO: 192382 - DNA, 25 bp, Probe Sequence
cgaaggtgatcatcatccaggcctg

SEQ ID NO: 192383 - DNA, 25 bp, Probe Sequence
cgctaggtggtgtcaagcaggcgct

SEQ ID NO: 192384 - DNA, 25 bp, Probe Sequence
cgcgctggcgttacagcgcaacagc

SEQ ID NO: 192385 - DNA, 25 bp, Probe Sequence
cgcctggacatctgcggcgagggaa

SEQ ID NO: 192386 - DNA, 25 bp, Probe Sequence
cgaccacctgtcctgggagtggaat

SEQ ID NO: 192387 - DNA, 25 bp, Probe Sequence
cgaacaccattgagggagctgggag

SEQ ID NO: 192388 - DNA, 25 bp, Probe Sequence
cgacaaccattggggtggggctgca

SEQ ID NO: 192389 - DNA, 25 bp, Probe Sequence
ccaaattaattgcgaaggggactca

SEQ ID NO: 192390 - DNA, 25 bp, Probe Sequence
ccaaacagtttgctctaggggaaga

SEQ ID NO: 192391 - DNA, 25 bp, Probe Sequence
cgcacatacagccatgctgtttcag

SEQ ID NO: 192392 - DNA, 25 bp, Probe Sequence
cgcagccaagtacgtgtgtcggacc

SEQ ID NO: 192393 - DNA, 25 bp, Probe Sequence
cgctttcagtgggttgacggcagcc

SEQ ID NO: 192394 - DNA, 25 bp, Probe Sequence
cgctggctcagtcaataaaggatcc

SEQ ID NO: 192395 - DNA, 25 bp, Probe Sequence
cgctggccacgtgcaggaagagtct

SEQ ID NO: 192396 - DNA, 25 bp, Probe Sequence
cgcatgccacacaagaaggacctgt

SEQ ID NO: 192397 - DNA, 25 bp, Probe Sequence
cgagcaacagtggacaggcaccagg

SEQ ID NO: 192398 - DNA, 25 bp, Probe Sequence
cgacaacggctccggcatgtgcaag

SEQ ID NO: 192399 - DNA, 25 bp, Probe Sequence
cgcgaccgagtctggcagatccagt

SEQ ID NO: 192400 - DNA, 25 bp, Probe Sequence
cgcccctgactctatggcgttagcg

SEQ ID NO: 192401 - DNA, 25 bp, Probe Sequence
ccattcctgatcttagggtgaaaac

SEQ ID NO: 192402 - DNA, 25 bp, Probe Sequence
cgcttccgcattgaggacggcttca

SEQ ID NO: 192403 - DNA, 25 bp, Probe Sequence
cgcctccacttggagggctaccacg

SEQ ID NO: 192404 - DNA, 25 bp, Probe Sequence
cgagcccacttgtcagaaaacgagc

SEQ ID NO: 192405 - DNA, 25 bp, Probe Sequence
cgagccctctcacagtggaatggag

SEQ ID NO: 192406 - DNA, 25 bp, Probe Sequence
cgacctgctctaggtgggcattgcg

SEQ ID NO: 192407 - DNA, 25 bp, Probe Sequence
cgaccgccatgaagctgggcttcag

SEQ ID NO: 192408 - DNA, 25 bp, Probe Sequence
cgcacccacacagcacgtgctgtga

SEQ ID NO: 192409 - DNA, 25 bp, Probe Sequence
cgcacgctacagtacaagctgctgg

SEQ ID NO: 192410 - DNA, 25 bp, Probe Sequence
cgcctgctacaaaaacaaggtcgtc

SEQ ID NO: 192411 - DNA, 25 bp, Probe Sequence
cgcacgaactaccattcaggcagtc

SEQ ID NO: 192412 - DNA, 25 bp, Probe Sequence
cgctgctgtaacgacttcaggagtc

SEQ ID NO: 192413 - DNA, 25 bp, Probe Sequence
cgcatggtaccaggtccggaattcc

SEQ ID NO: 192414 - DNA, 25 bp, Probe Sequence
ccatagtaccccataggactttcca

SEQ ID NO: 192415 - DNA, 25 bp, Probe Sequence
cctgggccacccagagtgaaactcc

SEQ ID NO: 192416 - DNA, 25 bp, Probe Sequence
ccgataccccacaggtaaatcctgt

SEQ ID NO: 192417 - DNA, 25 bp, Probe Sequence
ccgattccctaagggttacgccatg

SEQ ID NO: 192418 - DNA, 25 bp, Probe Sequence
cgagataaccccaagtttacgcctg

SEQ ID NO: 192419 - DNA, 25 bp, Probe Sequence
gaggtacctttgagttttcagcctt

SEQ ID NO: 192420 - DNA, 25 bp, Probe Sequence
gtgggaccttttgtgttaatctgtt

SEQ ID NO: 192421 - DNA, 25 bp, Probe Sequence
gtcggaccctttgtggtagcaggtg

SEQ ID NO: 192422 - DNA, 25 bp, Probe Sequence
gctaggactccgcgggaaacggcgg

SEQ ID NO: 192423 - DNA, 25 bp, Probe Sequence
cccgatctcgggcgggaaccgagcg

SEQ ID NO: 192424 - DNA, 25 bp, Probe Sequence
ccctgtgtgggacagggtacgccca

SEQ ID NO: 192425 - DNA, 25 bp, Probe Sequence
cgccttggggagtggaggaggtctg

SEQ ID NO: 192426 - DNA, 25 bp, Probe Sequence
cgcccgtgaaactggtgccagggag

SEQ ID NO: 192427 - DNA, 25 bp, Probe Sequence
cgcggggcaaaatggagctcgaggc

SEQ ID NO: 192428 - DNA, 25 bp, Probe Sequence
cgcggcgtcaatgagtgcgacatcg

SEQ ID NO: 192429 - DNA, 25 bp, Probe Sequence
cgccggaaagcgtgccaatcaacat

SEQ ID NO: 192430 - DNA, 25 bp, Probe Sequence
gaccggaaaggagcgcctactaagg

SEQ ID NO: 192431 - DNA, 25 bp, Probe Sequence
gcccagaaaagtgcccctaggttgg

SEQ ID NO: 192432 - DNA, 25 bp, Probe Sequence
cccaatcaaagtgccaagtgagctt

SEQ ID NO: 192433 - DNA, 25 bp, Probe Sequence
cccgtcgaactctcgcgagagcgta

SEQ ID NO: 192434 - DNA, 25 bp, Probe Sequence
cccaacagaaccacggcggtgaagc

SEQ ID NO: 192435 - DNA, 25 bp, Probe Sequence
ccatccacagacctttaacggggag

SEQ ID NO: 192436 - DNA, 25 bp, Probe Sequence
cgaacagaatccatcattcaccggg

SEQ ID NO: 192437 - DNA, 25 bp, Probe Sequence
cgaaaggactctcttcattgccgag

SEQ ID NO: 192438 - DNA, 25 bp, Probe Sequence
cgcaaagttattcttccaccatggc

SEQ ID NO: 192439 - DNA, 25 bp, Probe Sequence
cgcaaaggctaccgttcacaacgag

SEQ ID NO: 192440 - DNA, 25 bp, Probe Sequence
cgccaagagaacctttgtcaccgag

SEQ ID NO: 192441 - DNA, 25 bp, Probe Sequence
cgcccaacaccttctatgtaggcat

SEQ ID NO: 192442 - DNA, 25 bp, Probe Sequence
cgcatccataatccttctaatagcc

SEQ ID NO: 192443 - DNA, 25 bp, Probe Sequence
cgcatgccaccacgcatggataatt

SEQ ID NO: 192444 - DNA, 25 bp, Probe Sequence
cgcaagctgacaggctgtgaaatat

SEQ ID NO: 192445 - DNA, 25 bp, Probe Sequence
cgaagcgcaccattgctcaggatta

SEQ ID NO: 192446 - DNA, 25 bp, Probe Sequence
cgagagccacactttcaagtaaacc

SEQ ID NO: 192447 - DNA, 25 bp, Probe Sequence
cgcaagtcacagaattatttgaaaa

SEQ ID NO: 192448 - DNA, 25 bp, Probe Sequence
cgcatcgtcaagcatgccttcgaga

SEQ ID NO: 192449 - DNA, 25 bp, Probe Sequence
cgcagctccaagcagctggtcgaca

SEQ ID NO: 192450 - DNA, 25 bp, Probe Sequence
cgcgctccacgacggattgaacgtc

SEQ ID NO: 192451 - DNA, 25 bp, Probe Sequence
cgctcacgcaagcatggttaacgtc

SEQ ID NO: 192452 - DNA, 25 bp, Probe Sequence
cgccacgcccggctaatttttatat

SEQ ID NO: 192453 - DNA, 25 bp, Probe Sequence
ccccttacacagcgactttttatca

SEQ ID NO: 192454 - DNA, 25 bp, Probe Sequence
ccctgtataccgcacttttttgaag

SEQ ID NO: 192455 - DNA, 25 bp, Probe Sequence
ccctttcccgctatatcttcaggaa

SEQ ID NO: 192456 - DNA, 25 bp, Probe Sequence
cccttctgaccgtcatcgacgttaa

SEQ ID NO: 192457 - DNA, 25 bp, Probe Sequence
ccctttgcacctttttactgtaatg

SEQ ID NO: 192458 - DNA, 25 bp, Probe Sequence
cgcccttcccttttgtacagaagat

SEQ ID NO: 192459 - DNA, 25 bp, Probe Sequence
cgcacacgtcccagttattcaaaag

SEQ ID NO: 192460 - DNA, 25 bp, Probe Sequence
cgaagcgaacgcagcctttgagagt

SEQ ID NO: 192461 - DNA, 25 bp, Probe Sequence
cgaagagaccacctgtccttcgagc

SEQ ID NO: 192462 - DNA, 25 bp, Probe Sequence
cgaagagaccacctgtccttcgagc

SEQ ID NO: 192463 - DNA, 25 bp, Probe Sequence
gcgacaagaccgtgtacttcgccga

SEQ ID NO: 192464 - DNA, 25 bp, Probe Sequence
cgctattaccagtggttgatgcggg

SEQ ID NO: 192465 - DNA, 25 bp, Probe Sequence
cgcttgaatgtcccagtctattcgg

SEQ ID NO: 192466 - DNA, 25 bp, Probe Sequence
cgcctgtaatcccagcactttggga

SEQ ID NO: 192467 - DNA, 25 bp, Probe Sequence
cgcctgtaatcccagctactcggga

SEQ ID NO: 192468 - DNA, 25 bp, Probe Sequence
cgcctgtaatcccagtgacttggga

SEQ ID NO: 192469 - DNA, 25 bp, Probe Sequence
cgcctgtaatcccagtgacttggga

SEQ ID NO: 192470 - DNA, 25 bp, Probe Sequence
cgcctgtagtcccagctacttggga

SEQ ID NO: 192471 - DNA, 25 bp, Probe Sequence
cgcctgtagtcccagctacttggga

SEQ ID NO: 192472 - DNA, 25 bp, Probe Sequence
cgaccaggttcgttcactcatggaa

SEQ ID NO: 192473 - DNA, 25 bp, Probe Sequence
cgaccctgattccgttcatgtggaa

SEQ ID NO: 192474 - DNA, 25 bp, Probe Sequence
cgcttcccttgtggtgtattgtgag

SEQ ID NO: 192475 - DNA, 25 bp, Probe Sequence
ccttgcctgttggagccgttaggaa

SEQ ID NO: 192476 - DNA, 25 bp, Probe Sequence
cccaccttcgaagattaccagatca

SEQ ID NO: 192477 - DNA, 25 bp, Probe Sequence
cccacgttggtcagtctggccaaca

SEQ ID NO: 192478 - DNA, 25 bp, Probe Sequence
cctccagtctggatcgtttgacggg

SEQ ID NO: 192479 - DNA, 25 bp, Probe Sequence
cgcccttctgcgttccataaaggtg

SEQ ID NO: 192480 - DNA, 25 bp, Probe Sequence
cgcaagtttcagtgtcaaatggcgg

SEQ ID NO: 192481 - DNA, 25 bp, Probe Sequence
cgcgtgctcgtagctgtcaagaggg

SEQ ID NO: 192482 - DNA, 25 bp, Probe Sequence
cgcaatgtttggacttcgatgaagg

SEQ ID NO: 192483 - DNA, 25 bp, Probe Sequence
cgcttctttctgactctaaaatatg

SEQ ID NO: 192484 - DNA, 25 bp, Probe Sequence
cgctgctgcttcatcctgaaaaaaa

SEQ ID NO: 192485 - DNA, 25 bp, Probe Sequence
cgctttgctttcctcaggagtcaaa

SEQ ID NO: 192486 - DNA, 25 bp, Probe Sequence
cgccttacgactacagccagtcaga

SEQ ID NO: 192487 - DNA, 25 bp, Probe Sequence
cgcatcatggacccttacaaggcaa

SEQ ID NO: 192488 - DNA, 25 bp, Probe Sequence
cgactggagagggtgagtagccact

SEQ ID NO: 192489 - DNA, 25 bp, Probe Sequence
cgagctggagactggcagtgtccca

SEQ ID NO: 192490 - DNA, 25 bp, Probe Sequence
cgagctgcctgacggccaggtcatc

SEQ ID NO: 192491 - DNA, 25 bp, Probe Sequence
cgagcagctcaagggccaaggcaag

SEQ ID NO: 192492 - DNA, 25 bp, Probe Sequence
cgagctatagtggcgcacaagcgct

SEQ ID NO: 192493 - DNA, 25 bp, Probe Sequence
cgcagctctggctgcggaatcgcgt

SEQ ID NO: 192494 - DNA, 25 bp, Probe Sequence
cgcactcgaaagggaatcctcctgt

SEQ ID NO: 192495 - DNA, 25 bp, Probe Sequence
cgcactttatgagggagaccccgac

SEQ ID NO: 192496 - DNA, 25 bp, Probe Sequence
gctctttgggggaggccacggagcc

SEQ ID NO: 192497 - DNA, 25 bp, Probe Sequence
gcattttcccggcgggacgtagcca

SEQ ID NO: 192498 - DNA, 25 bp, Probe Sequence
cctcttccggggtgagacgggcaag

SEQ ID NO: 192499 - DNA, 25 bp, Probe Sequence
ccctttgggggtggcacaggtggct

SEQ ID NO: 192500 - DNA, 25 bp, Probe Sequence
cgcatcttcgggctcatggaaaagg

SEQ ID NO: 192501 - DNA, 25 bp, Probe Sequence
gcggcgttagggtttgagagaaggg

SEQ ID NO: 192502 - DNA, 25 bp, Probe Sequence
cgagcgattgaggtgtatggagaga

SEQ ID NO: 192503 - DNA, 25 bp, Probe Sequence
cgagcagccaaggtgttggagcagc

SEQ ID NO: 192504 - DNA, 25 bp, Probe Sequence
cgaagccatcggcatcatgagaagg

SEQ ID NO: 192505 - DNA, 25 bp, Probe Sequence
cgaactgcatcaggcgtggcaggcg

SEQ ID NO: 192506 - DNA, 25 bp, Probe Sequence
cgactgtgcagcagcgtggcgctgc

SEQ ID NO: 192507 - DNA, 25 bp, Probe Sequence
cgacgatggcatggctgtggccacg

SEQ ID NO: 192508 - DNA, 25 bp, Probe Sequence
cgacgtggtagactggatccagcag

SEQ ID NO: 192509 - DNA, 25 bp, Probe Sequence
cgcaggcggtagcgaaggcagcagc

SEQ ID NO: 192510 - DNA, 25 bp, Probe Sequence
cgcctgcagcgttgagaaacccagc

SEQ ID NO: 192511 - DNA, 25 bp, Probe Sequence
cgccgatgccttctacaaggccaag

SEQ ID NO: 192512 - DNA, 25 bp, Probe Sequence
cgctcgatgcctactacaagcgctg

SEQ ID NO: 192513 - DNA, 25 bp, Probe Sequence
cgcggatcgtgcagaaactcgctgt

SEQ ID NO: 192514 - DNA, 25 bp, Probe Sequence
cgcatggaaccttgagaacccaggg

SEQ ID NO: 192515 - DNA, 25 bp, Probe Sequence
cgcagaatacctcgaaccaggcggg

SEQ ID NO: 192516 - DNA, 25 bp, Probe Sequence
cgcacagggttgcaaccaggctggg

SEQ ID NO: 192517 - DNA, 25 bp, Probe Sequence
cgcacagcgtggagacggggcaggg

SEQ ID NO: 192518 - DNA, 25 bp, Probe Sequence
cgcacggtggtagcagagtcgaggc

SEQ ID NO: 192519 - DNA, 25 bp, Probe Sequence
cgccggacctacagagctcatggtc

SEQ ID NO: 192520 - DNA, 25 bp, Probe Sequence
cccaacggtacacgactcagtatcc

SEQ ID NO: 192521 - DNA, 25 bp, Probe Sequence
cccagccaggtagattctttactac

SEQ ID NO: 192522 - DNA, 25 bp, Probe Sequence
taccgaaaccgtttctccatactca

SEQ ID NO: 192523 - DNA, 25 bp, Probe Sequence
cccgaatctacgtgtccaatgacga

SEQ ID NO: 192524 - DNA, 25 bp, Probe Sequence
cgcccgactactcgggcgcagaact

SEQ ID NO: 192525 - DNA, 25 bp, Probe Sequence
ccccaatctcaacaaggcaaaccgt

SEQ ID NO: 192526 - DNA, 25 bp, Probe Sequence
tcccgataccccacaggtaaatcct

SEQ ID NO: 192527 - DNA, 25 bp, Probe Sequence
cccgataccccacaggtaaatcctg

SEQ ID NO: 192528 - DNA, 25 bp, Probe Sequence
cccaaacctggtctcgtatatcatc

SEQ ID NO: 192529 - DNA, 25 bp, Probe Sequence
cgcccaacacggactggcgtttctc

SEQ ID NO: 192530 - DNA, 25 bp, Probe Sequence
cgcccataagggactgtccattgac

SEQ ID NO: 192531 - DNA, 25 bp, Probe Sequence
cgcaatgctcagatggacttccagg

SEQ ID NO: 192532 - DNA, 25 bp, Probe Sequence
cgcatatcatctcatggggtccaga

SEQ ID NO: 192533 - DNA, 25 bp, Probe Sequence
gcgaacatctgggtggttagcattc

SEQ ID NO: 192534 - DNA, 25 bp, Probe Sequence
cgacctgtgatcgtggtacagcatt

SEQ ID NO: 192535 - DNA, 25 bp, Probe Sequence
cgactctgtacaagtgtcacagaaa

SEQ ID NO: 192536 - DNA, 25 bp, Probe Sequence
cgactcgaaaattgtccaagaagcc

SEQ ID NO: 192537 - DNA, 25 bp, Probe Sequence
cgacccactgaaggcccaaatgagc

SEQ ID NO: 192538 - DNA, 25 bp, Probe Sequence
cgactccctgtcgagcttcaaggag

SEQ ID NO: 192539 - DNA, 25 bp, Probe Sequence
cgacccctgtagtgatcaactgatg

SEQ ID NO: 192540 - DNA, 25 bp, Probe Sequence
cgcatccacctttattatcagtctc

SEQ ID NO: 192541 - DNA, 25 bp, Probe Sequence
cgacctggcctggattgacaacatc

SEQ ID NO: 192542 - DNA, 25 bp, Probe Sequence
cgacctgccaatcacagacaactca

SEQ ID NO: 192543 - DNA, 25 bp, Probe Sequence
cgacctgcaagactcacaagacggg

SEQ ID NO: 192544 - DNA, 25 bp, Probe Sequence
cgacttccacacgaacaagcgcgtg

SEQ ID NO: 192545 - DNA, 25 bp, Probe Sequence
cgactcaaccaggccacagaggacg

SEQ ID NO: 192546 - DNA, 25 bp, Probe Sequence
cgacgaggcccagagcaagagaggc

SEQ ID NO: 192547 - DNA, 25 bp, Probe Sequence
cgacgacccgcaggtgcagaaggcg

SEQ ID NO: 192548 - DNA, 25 bp, Probe Sequence
cgacggcgtctttgtgcaggaggtg

SEQ ID NO: 192549 - DNA, 25 bp, Probe Sequence
cgacgagccatggttgctgggagcg

SEQ ID NO: 192550 - DNA, 25 bp, Probe Sequence
cgacgagccatggttgctgggagcg

SEQ ID NO: 192551 - DNA, 25 bp, Probe Sequence
cgcacgaccatccattgcagatgcg

SEQ ID NO: 192552 - DNA, 25 bp, Probe Sequence
cgcagcagactgcgatcaattctgc

SEQ ID NO: 192553 - DNA, 25 bp, Probe Sequence
cgcagcttcgagatcagtgcattgt

SEQ ID NO: 192554 - DNA, 25 bp, Probe Sequence
cgcagcgaggagtttctcattgctg

SEQ ID NO: 192555 - DNA, 25 bp, Probe Sequence
cgcacgggggatgccatcagtgtca

SEQ ID NO: 192556 - DNA, 25 bp, Probe Sequence
cgcagccaggggtaccaagtgtttg

SEQ ID NO: 192557 - DNA, 25 bp, Probe Sequence
cgcacaaaggggtccaacagctctt

SEQ ID NO: 192558 - DNA, 25 bp, Probe Sequence
cgcatcaacgcgcagacctaaactg

SEQ ID NO: 192559 - DNA, 25 bp, Probe Sequence
cgcttccgctgccaggacgaaagcg

SEQ ID NO: 192560 - DNA, 25 bp, Probe Sequence
cgaccgcggggacatgaagagcagc

SEQ ID NO: 192561 - DNA, 25 bp, Probe Sequence
cgcagcgcagagcgggctcgaagaa

SEQ ID NO: 192562 - DNA, 25 bp, Probe Sequence
cgcggcgggcagaagagcacaagaa

SEQ ID NO: 192563 - DNA, 25 bp, Probe Sequence
cgcgacgccacggagattcagaaca

SEQ ID NO: 192564 - DNA, 25 bp, Probe Sequence
cgctgacctcgctggtgatcgagaa

SEQ ID NO: 192565 - DNA, 25 bp, Probe Sequence
cgctacctgcggctggatggaaact

SEQ ID NO: 192566 - DNA, 25 bp, Probe Sequence
cgctacctgcggctggatggaaact

SEQ ID NO: 192567 - DNA, 25 bp, Probe Sequence
cgctacctgcggctggatggaaact

SEQ ID NO: 192568 - DNA, 25 bp, Probe Sequence
ccccctggtttgcaatggaaccttg

SEQ ID NO: 192569 - DNA, 25 bp, Probe Sequence
cccccttgtacagaatcgaactctg

SEQ ID NO: 192570 - DNA, 25 bp, Probe Sequence
cccgatcacagaaaccataccaact

SEQ ID NO: 192571 - DNA, 25 bp, Probe Sequence
cccaatgccgtagctaattccaata

SEQ ID NO: 192572 - DNA, 25 bp, Probe Sequence
cgcgtccgaggtgtgaagaccaaca

SEQ ID NO: 192573 - DNA, 25 bp, Probe Sequence
cgcggcgcgaggaggcagtgagcgc

SEQ ID NO: 192574 - DNA, 25 bp, Probe Sequence
cgctgggagggtacatggatgaggc

SEQ ID NO: 192575 - DNA, 25 bp, Probe Sequence
cgctgaacggggatggctgtggcat

SEQ ID NO: 192576 - DNA, 25 bp, Probe Sequence
cgctgatgagcgaggcgggtgctgg

SEQ ID NO: 192577 - DNA, 25 bp, Probe Sequence
cgcttatgcgtatgtgcacggggcc

SEQ ID NO: 192578 - DNA, 25 bp, Probe Sequence
cgctttgctgttcgtgatatgagac

SEQ ID NO: 192579 - DNA, 25 bp, Probe Sequence
cgctctgtgtattgctctttgaatc

SEQ ID NO: 192580 - DNA, 25 bp, Probe Sequence
cgccgtgtgtaggcttagcctcagg

SEQ ID NO: 192581 - DNA, 25 bp, Probe Sequence
cgcacgtgatttgtccagcgacact

SEQ ID NO: 192582 - DNA, 25 bp, Probe Sequence
cgacgcgctggcgttacagcgcaac

SEQ ID NO: 192583 - DNA, 25 bp, Probe Sequence
cgaccctcggtgcagagtgcagagg

SEQ ID NO: 192584 - DNA, 25 bp, Probe Sequence
cgctaccccaggcagggcaatgtga

SEQ ID NO: 192585 - DNA, 25 bp, Probe Sequence
cgccaccttcaaggagcgtcggaac

SEQ ID NO: 192586 - DNA, 25 bp, Probe Sequence
cgcagcaggttcagcgctgtgtgga

SEQ ID NO: 192587 - DNA, 25 bp, Probe Sequence
cgctgtgattttagcctcctgagat

SEQ ID NO: 192588 - DNA, 25 bp, Probe Sequence
cgctgtttttgacctccatagaaga

SEQ ID NO: 192589 - DNA, 25 bp, Probe Sequence
cgcttacttcccctatcatagaaga

SEQ ID NO: 192590 - DNA, 25 bp, Probe Sequence
cgactactgcttccactgcaaaaaa

SEQ ID NO: 192591 - DNA, 25 bp, Probe Sequence
cgaagaatgccaacacctcaaaaca

SEQ ID NO: 192592 - DNA, 25 bp, Probe Sequence
cgaagcttgtcaattggcaaaagac

SEQ ID NO: 192593 - DNA, 25 bp, Probe Sequence
cgcaaggttcatgtgaccaaggaca

SEQ ID NO: 192594 - DNA, 25 bp, Probe Sequence
cgcagcaacttcaattaccaacgca

SEQ ID NO: 192595 - DNA, 25 bp, Probe Sequence
cctaacttaaagcccagatcctaca

SEQ ID NO: 192596 - DNA, 25 bp, Probe Sequence
ccgaatgtataatgctgacgttctt

SEQ ID NO: 192597 - DNA, 25 bp, Probe Sequence
cccacagggaacctgggttcttctg

SEQ ID NO: 192598 - DNA, 25 bp, Probe Sequence
cccacgataccagctgtcggttttg

SEQ ID NO: 192599 - DNA, 25 bp, Probe Sequence
cgccaccacacctggctaatttttg

SEQ ID NO: 192600 - DNA, 25 bp, Probe Sequence
cgccaccacacctggctaatttttt

SEQ ID NO: 192601 - DNA, 25 bp, Probe Sequence
cgcacccggcctgaaaatattttct

SEQ ID NO: 192602 - DNA, 25 bp, Probe Sequence
cgcataccgcgtcgccaaaaattta

SEQ ID NO: 192603 - DNA, 25 bp, Probe Sequence
cgcgctccggagacacaagaagatc

SEQ ID NO: 192604 - DNA, 25 bp, Probe Sequence
cgccttcaggcaccacagataagcc

SEQ ID NO: 192605 - DNA, 25 bp, Probe Sequence
cgcttcaaggcagagcaaatgtgac

SEQ ID NO: 192606 - DNA, 25 bp, Probe Sequence
cgctgtcaatgccatcttcgagtgg

SEQ ID NO: 192607 - DNA, 25 bp, Probe Sequence
cgctgtcaatgccatcttcgagtgg

SEQ ID NO: 192608 - DNA, 25 bp, Probe Sequence
cgctgtcaatgccatcttcgagtgg

SEQ ID NO: 192609 - DNA, 25 bp, Probe Sequence
cgctgatgaaggagatcgaggcggc

SEQ ID NO: 192610 - DNA, 25 bp, Probe Sequence
cgctgaaaggcatcggtgccacgca

SEQ ID NO: 192611 - DNA, 25 bp, Probe Sequence
cgctaacattcactcttgtttgtcc

SEQ ID NO: 192612 - DNA, 25 bp, Probe Sequence
cgaatcattctaatcactgtatttt

SEQ ID NO: 192613 - DNA, 25 bp, Probe Sequence
cgacattaccttgtgcatttttata

SEQ ID NO: 192614 - DNA, 25 bp, Probe Sequence
cgacttttattgcagatgtctttag

SEQ ID NO: 192615 - DNA, 25 bp, Probe Sequence
cgcctaggtgtgcaggatctcttta

SEQ ID NO: 192616 - DNA, 25 bp, Probe Sequence
cgcagctgcagtctgggagtctttg

SEQ ID NO: 192617 - DNA, 25 bp, Probe Sequence
cgcaccaatggtcaagctagcttct

SEQ ID NO: 192618 - DNA, 25 bp, Probe Sequence
cgcccatgatggtgaagctgacgga

SEQ ID NO: 192619 - DNA, 25 bp, Probe Sequence
cgccctgggcaggtaggcgggagct

SEQ ID NO: 192620 - DNA, 25 bp, Probe Sequence
cgcctcttgagaccttagggctgga

SEQ ID NO: 192621 - DNA, 25 bp, Probe Sequence
ccctttggaggtcaggcgcgtgggc

SEQ ID NO: 192622 - DNA, 25 bp, Probe Sequence
cccacgtggggacatgtccttggcg

SEQ ID NO: 192623 - DNA, 25 bp, Probe Sequence
cccaagtaagagcgagtctgctttg

SEQ ID NO: 192624 - DNA, 25 bp, Probe Sequence
cgcgtagtagccatggtgatcggtt

SEQ ID NO: 192625 - DNA, 25 bp, Probe Sequence
cgctgctattcccatgggtcacagg

SEQ ID NO: 192626 - DNA, 25 bp, Probe Sequence
cgctgctattcccatgggtcacagg

SEQ ID NO: 192627 - DNA, 25 bp, Probe Sequence
cgcagtatgtgcagtgcgtggccgg

SEQ ID NO: 192628 - DNA, 25 bp, Probe Sequence
cgaaaggctgagtgcatcgtccgtc

SEQ ID NO: 192629 - DNA, 25 bp, Probe Sequence
cgaaggacctgctgatattccgtgc

SEQ ID NO: 192630 - DNA, 25 bp, Probe Sequence
cgaaggccttcattacttacgtgct

SEQ ID NO: 192631 - DNA, 25 bp, Probe Sequence
cgcaatggccgtagcgtttacgtgg

SEQ ID NO: 192632 - DNA, 25 bp, Probe Sequence
cgcagaacctgaatgacgcctacgg

SEQ ID NO: 192633 - DNA, 25 bp, Probe Sequence
cgcaggactcagatgacttcgaggc

SEQ ID NO: 192634 - DNA, 25 bp, Probe Sequence
cgcgagacacagagagcttcttatg

SEQ ID NO: 192635 - DNA, 25 bp, Probe Sequence
ccggaccagaagttcctctaggtct

SEQ ID NO: 192636 - DNA, 25 bp, Probe Sequence
cgcggaccaaagcgatctcttctga

SEQ ID NO: 192637 - DNA, 25 bp, Probe Sequence
cgcggacctgaacggaggttgcggg

SEQ ID NO: 192638 - DNA, 25 bp, Probe Sequence
cgcggatgcctttgagcgcggtgac

SEQ ID NO: 192639 - DNA, 25 bp, Probe Sequence
cgctgtgcgagtttgacgcggtgct

SEQ ID NO: 192640 - DNA, 25 bp, Probe Sequence
cgctgctgcggcagcatatgcagcc

SEQ ID NO: 192641 - DNA, 25 bp, Probe Sequence
cgctgtgcactgactgcatggacgg

SEQ ID NO: 192642 - DNA, 25 bp, Probe Sequence
cgcggctgcatgacactggaggtca

SEQ ID NO: 192643 - DNA, 25 bp, Probe Sequence
cgcagagctgaggcacactggtgtt

SEQ ID NO: 192644 - DNA, 25 bp, Probe Sequence
cgcagagatgagcaccggctgcggc

SEQ ID NO: 192645 - DNA, 25 bp, Probe Sequence
cgcagagatgagcaccggctgcggc

SEQ ID NO: 192646 - DNA, 25 bp, Probe Sequence
cgcacggagaacgagctgcatgggg

SEQ ID NO: 192647 - DNA, 25 bp, Probe Sequence
cgcagagaagactatgttggtgggc

SEQ ID NO: 192648 - DNA, 25 bp, Probe Sequence
cgcaggccaagcaatggggctggac

SEQ ID NO: 192649 - DNA, 25 bp, Probe Sequence
cgcaggccgagcaggaggagcagga

SEQ ID NO: 192650 - DNA, 25 bp, Probe Sequence
cgcagcagcaggcatcgtgggaagg

SEQ ID NO: 192651 - DNA, 25 bp, Probe Sequence
cgcagcacagcgacggtgggaagat

SEQ ID NO: 192652 - DNA, 25 bp, Probe Sequence
cgcagccatggacgccatcaagaag

SEQ ID NO: 192653 - DNA, 25 bp, Probe Sequence
cgcccattgacgtcataattgacgt

SEQ ID NO: 192654 - DNA, 25 bp, Probe Sequence
cgcttgggacagtagctttccagct

SEQ ID NO: 192655 - DNA, 25 bp, Probe Sequence
cgcgtggtgccgcagtttgtagtgt

SEQ ID NO: 192656 - DNA, 25 bp, Probe Sequence
cgctggccagggcgttggccatgtt

SEQ ID NO: 192657 - DNA, 25 bp, Probe Sequence
cgcggacaggacggtgaagcacttc

SEQ ID NO: 192658 - DNA, 25 bp, Probe Sequence
cgctgcgggggctggacagcaaggc

SEQ ID NO: 192659 - DNA, 25 bp, Probe Sequence
cgctgcagaccgtcaatggagcaga

SEQ ID NO: 192660 - DNA, 25 bp, Probe Sequence
cgcagcagcctggacgagaagcaga

SEQ ID NO: 192661 - DNA, 25 bp, Probe Sequence
cgcgcagttctctgcaggtgcagat

SEQ ID NO: 192662 - DNA, 25 bp, Probe Sequence
cgctgcagtcctactgaggctgcag

SEQ ID NO: 192663 - DNA, 25 bp, Probe Sequence
cgcatagctccgactacagcatgtg

SEQ ID NO: 192664 - DNA, 25 bp, Probe Sequence
cgcgagtccgcttcaacttgatgga

SEQ ID NO: 192665 - DNA, 25 bp, Probe Sequence
cgcaagttcctggagacggtggagt

SEQ ID NO: 192666 - DNA, 25 bp, Probe Sequence
cgcgtggccgtggaggaggtggatg

SEQ ID NO: 192667 - DNA, 25 bp, Probe Sequence
cgcgtggagacgtgcgggtgtgcag

SEQ ID NO: 192668 - DNA, 25 bp, Probe Sequence
cgctggggatggtggtagttgctgt

SEQ ID NO: 192669 - DNA, 25 bp, Probe Sequence
cgcttagagatttggggggctctgg

SEQ ID NO: 192670 - DNA, 25 bp, Probe Sequence
cccaaggacaaggggcgtgcctggc

SEQ ID NO: 192671 - DNA, 25 bp, Probe Sequence
cgcccagagaccagctggcagggtg

SEQ ID NO: 192672 - DNA, 25 bp, Probe Sequence
gcgcggaagccgcggtagggtggga

SEQ ID NO: 192673 - DNA, 25 bp, Probe Sequence
gctagtaaccggctgtgagggagag

SEQ ID NO: 192674 - DNA, 25 bp, Probe Sequence
cctgtaatccgccttggggagtgga

SEQ ID NO: 192675 - DNA, 25 bp, Probe Sequence
ccgtcatacctccttctattaggaa

SEQ ID NO: 192676 - DNA, 25 bp, Probe Sequence
cgcctgataactggcattttgtaga

SEQ ID NO: 192677 - DNA, 25 bp, Probe Sequence
cgcaccatccactgtgtttattgat

SEQ ID NO: 192678 - DNA, 25 bp, Probe Sequence
cgctcactgcgaaggcaggttatta

SEQ ID NO: 192679 - DNA, 25 bp, Probe Sequence
gccccggtggcacagtttgtaaact

SEQ ID NO: 192680 - DNA, 25 bp, Probe Sequence
gccacgttgggtcagttttagaaat

SEQ ID NO: 192681 - DNA, 25 bp, Probe Sequence
cgcagtgttgggtaagactttgaac

SEQ ID NO: 192682 - DNA, 25 bp, Probe Sequence
cgcgttcgggtgtagaatttggaat

SEQ ID NO: 192683 - DNA, 25 bp, Probe Sequence
cgcgatgccgggatcaaagtctgtt

SEQ ID NO: 192684 - DNA, 25 bp, Probe Sequence
cgctcctccctgataagagttgtcc

SEQ ID NO: 192685 - DNA, 25 bp, Probe Sequence
cgctacctcctggtgagaagtcttc

SEQ ID NO: 192686 - DNA, 25 bp, Probe Sequence
cgcagcaccacctttgagaagtctc

SEQ ID NO: 192687 - DNA, 25 bp, Probe Sequence
cgcagcacgccagtggtcagaagct

SEQ ID NO: 192688 - DNA, 25 bp, Probe Sequence
cgcgcacgctacagtacaagctgct

SEQ ID NO: 192689 - DNA, 25 bp, Probe Sequence
tcaccacctgtcagtaaacggggga

SEQ ID NO: 192690 - DNA, 25 bp, Probe Sequence
cccacattgtttcttacggtcggag

SEQ ID NO: 192691 - DNA, 25 bp, Probe Sequence
cgctccactttttcactatagagcc

SEQ ID NO: 192692 - DNA, 25 bp, Probe Sequence
cgctgacaaccattcatatttacag

SEQ ID NO: 192693 - DNA, 25 bp, Probe Sequence
cgcatcatcaaaagttatcttccgt

SEQ ID NO: 192694 - DNA, 25 bp, Probe Sequence
cgcaacatgaaggtgctccttgccg

SEQ ID NO: 192695 - DNA, 25 bp, Probe Sequence
cgcacagtgaaactgcacctctacc

SEQ ID NO: 192696 - DNA, 25 bp, Probe Sequence
cgcacgtgaaggaccactacatctt

SEQ ID NO: 192697 - DNA, 25 bp, Probe Sequence
cgcatgcctgtaattccagctactc

SEQ ID NO: 192698 - DNA, 25 bp, Probe Sequence
cgcagcaggtgcatcgccagcattt

SEQ ID NO: 192699 - DNA, 25 bp, Probe Sequence
cgcatcaggtgcataaggtcattag

SEQ ID NO: 192700 - DNA, 25 bp, Probe Sequence
cgctctggtcgtaggggatgaggcc

SEQ ID NO: 192701 - DNA, 25 bp, Probe Sequence
cgctctgcgtttacaggcttgtgac

SEQ ID NO: 192702 - DNA, 25 bp, Probe Sequence
cgctttgttttccaccaggagcaag

SEQ ID NO: 192703 - DNA, 25 bp, Probe Sequence
gcgctacgggttcaccaggagatac

SEQ ID NO: 192704 - DNA, 25 bp, Probe Sequence
cgcgcaagagggcagaccgatagaa

SEQ ID NO: 192705 - DNA, 25 bp, Probe Sequence
ccgtcaatggagcagaggcggggaa

SEQ ID NO: 192706 - DNA, 25 bp, Probe Sequence
tttcgcgatcccgagtacggggaat

SEQ ID NO: 192707 - DNA, 25 bp, Probe Sequence
gaccgcctttccttgaagggagtat

SEQ ID NO: 192708 - DNA, 25 bp, Probe Sequence
gccaccccaccctgtcagggggtgg

SEQ ID NO: 192709 - DNA, 25 bp, Probe Sequence
cccccacctttatcgaggggtgctg

SEQ ID NO: 192710 - DNA, 25 bp, Probe Sequence
gaacctcaccttggacggaatggga

SEQ ID NO: 192711 - DNA, 25 bp, Probe Sequence
gaaaccctttcggcgtgcataagga

SEQ ID NO: 192712 - DNA, 25 bp, Probe Sequence
gaaaccctttcggcgtgcataagga

SEQ ID NO: 192713 - DNA, 25 bp, Probe Sequence
gttacccttccagaggtacagaaga

SEQ ID NO: 192714 - DNA, 25 bp, Probe Sequence
gagttcccattacaacattaagaaa

SEQ ID NO: 192715 - DNA, 25 bp, Probe Sequence
ggcacccacctacaactagaaagga

SEQ ID NO: 192716 - DNA, 25 bp, Probe Sequence
tcgacgtccttacaactggacaggc

SEQ ID NO: 192717 - DNA, 25 bp, Probe Sequence
cgccgtcctataataggctttagag

SEQ ID NO: 192718 - DNA, 25 bp, Probe Sequence
cgcctggccattatggcccagtaca

SEQ ID NO: 192719 - DNA, 25 bp, Probe Sequence
cgcactcttattcatgagtccgtat

SEQ ID NO: 192720 - DNA, 25 bp, Probe Sequence
cgcaccttataccagaattcagtat

SEQ ID NO: 192721 - DNA, 25 bp, Probe Sequence
cgcaccttgtcatgtaccatcaata

SEQ ID NO: 192722 - DNA, 25 bp, Probe Sequence
cgcaccttgtcatgtaccatcaata

SEQ ID NO: 192723 - DNA, 25 bp, Probe Sequence
cgcaccttgtcatgtaccatcaata

SEQ ID NO: 192724 - DNA, 25 bp, Probe Sequence
cgaactgttagattctccaccatca

SEQ ID NO: 192725 - DNA, 25 bp, Probe Sequence
cgaacatgttgcttaccgcaccatt

SEQ ID NO: 192726 - DNA, 25 bp, Probe Sequence
cgaacagtcgctgaacggcgtgcat

SEQ ID NO: 192727 - DNA, 25 bp, Probe Sequence
cgcagccgtccagagactggcaggc

SEQ ID NO: 192728 - DNA, 25 bp, Probe Sequence
cgcagccttcgagaatgtgagctct

SEQ ID NO: 192729 - DNA, 25 bp, Probe Sequence
cgcccagttgagtgttcctctaaac

SEQ ID NO: 192730 - DNA, 25 bp, Probe Sequence
ccctcttggatgtgttccgggaagc

SEQ ID NO: 192731 - DNA, 25 bp, Probe Sequence
cccgtgtgggggcactgtgggaagc

SEQ ID NO: 192732 - DNA, 25 bp, Probe Sequence
cccagtttaggagcaccttggaaga

SEQ ID NO: 192733 - DNA, 25 bp, Probe Sequence
cgccctcataagcagcgaccttgtg

SEQ ID NO: 192734 - DNA, 25 bp, Probe Sequence
cgcttctctcgtcggcggacttgtg

SEQ ID NO: 192735 - DNA, 25 bp, Probe Sequence
cgctctcctttgagcaagccgagct

SEQ ID NO: 192736 - DNA, 25 bp, Probe Sequence
cgctctcctgcttacctaggaggtg

SEQ ID NO: 192737 - DNA, 25 bp, Probe Sequence
cgctacttgtcttgcttatggcatg

SEQ ID NO: 192738 - DNA, 25 bp, Probe Sequence
cgcacacctgtctttgtgcatgcca

SEQ ID NO: 192739 - DNA, 25 bp, Probe Sequence
cgcgcccatgttgtatgacacatat

SEQ ID NO: 192740 - DNA, 25 bp, Probe Sequence
cgcagctttggtttctcagacatgt

SEQ ID NO: 192741 - DNA, 25 bp, Probe Sequence
cgcacttcgacttctctaggaatga

SEQ ID NO: 192742 - DNA, 25 bp, Probe Sequence
cgcctccgtctctatataaggaatt

SEQ ID NO: 192743 - DNA, 25 bp, Probe Sequence
cgcatccgcgtcctgagagagatgg

SEQ ID NO: 192744 - DNA, 25 bp, Probe Sequence
cgcacctcacagggggagatgtggg

SEQ ID NO: 192745 - DNA, 25 bp, Probe Sequence
cgcgcctgccggtgaagagctgcag

SEQ ID NO: 192746 - DNA, 25 bp, Probe Sequence
cgcgtggtcctttgcaagagcgcag

SEQ ID NO: 192747 - DNA, 25 bp, Probe Sequence
cgcagatggcccggtgtaggcgaac

SEQ ID NO: 192748 - DNA, 25 bp, Probe Sequence
cgcagatggcccggtgtaggcgaac

SEQ ID NO: 192749 - DNA, 25 bp, Probe Sequence
cgctaggccgcgggacggataacaa

SEQ ID NO: 192750 - DNA, 25 bp, Probe Sequence
cgccgccccatgggccgaagaaaat

SEQ ID NO: 192751 - DNA, 25 bp, Probe Sequence
cgcttgccccacggaggaatgcaag

SEQ ID NO: 192752 - DNA, 25 bp, Probe Sequence
cgcttgccccacggaggaatgcaag

SEQ ID NO: 192753 - DNA, 25 bp, Probe Sequence
cgcttgccccacggaggaatgcaag

SEQ ID NO: 192754 - DNA, 25 bp, Probe Sequence
cgctctgtcctcagggtgggcagag

SEQ ID NO: 192755 - DNA, 25 bp, Probe Sequence
cgccatgaccctgtggatgggagaa

SEQ ID NO: 192756 - DNA, 25 bp, Probe Sequence
cgcgctaccctgagtgagtcggaaa

SEQ ID NO: 192757 - DNA, 25 bp, Probe Sequence
cgcgctaccctgagtgagtcggaaa

SEQ ID NO: 192758 - DNA, 25 bp, Probe Sequence
cgcctgcccgaatgaaatccgaaca

SEQ ID NO: 192759 - DNA, 25 bp, Probe Sequence
cgcacgcccagatgccgagaaaaaa

SEQ ID NO: 192760 - DNA, 25 bp, Probe Sequence
cgcccgggccgcgtgaagaggaaga

SEQ ID NO: 192761 - DNA, 25 bp, Probe Sequence
cgcccgggccgcgtgaagaggaaga

SEQ ID NO: 192762 - DNA, 25 bp, Probe Sequence
cgccggcgcagcagggaaaggcaaa

SEQ ID NO: 192763 - DNA, 25 bp, Probe Sequence
cccgggaacaggcaaaggaggcgtg

SEQ ID NO: 192764 - DNA, 25 bp, Probe Sequence
cccgggaacaggcaaaggaggcgtg

SEQ ID NO: 192765 - DNA, 25 bp, Probe Sequence
cccagggaaggctccgtgggaggct

SEQ ID NO: 192766 - DNA, 25 bp, Probe Sequence
cccggagcaaggtggctgggagccc

SEQ ID NO: 192767 - DNA, 25 bp, Probe Sequence
cccggggagtatgtggtggtgccct

SEQ ID NO: 192768 - DNA, 25 bp, Probe Sequence
cgctctagacttttgttggtcgccc

SEQ ID NO: 192769 - DNA, 25 bp, Probe Sequence
cgctctgagagcattttacgacccg

SEQ ID NO: 192770 - DNA, 25 bp, Probe Sequence
cgcgtgctggccgtttacaagcagc

SEQ ID NO: 192771 - DNA, 25 bp, Probe Sequence
cccagcattggcgtctacacacgcc

SEQ ID NO: 192772 - DNA, 25 bp, Probe Sequence
cgcagagatcggccctactagatgc

SEQ ID NO: 192773 - DNA, 25 bp, Probe Sequence
cgcaagctggtgcgctcagtgactg

SEQ ID NO: 192774 - DNA, 25 bp, Probe Sequence
cgcacagtgagccctggctgtgaca

SEQ ID NO: 192775 - DNA, 25 bp, Probe Sequence
cgcaatgattcagctcgctgaggaa

SEQ ID NO: 192776 - DNA, 25 bp, Probe Sequence
cgcaatgacattgccctgctgagac

SEQ ID NO: 192777 - DNA, 25 bp, Probe Sequence
cgcttgcacgcggccttggcagcag

SEQ ID NO: 192778 - DNA, 25 bp, Probe Sequence
cgcttgagcaccgcatcggctgcat

SEQ ID NO: 192779 - DNA, 25 bp, Probe Sequence
cgcttgagcaccgcatcggctgcat

SEQ ID NO: 192780 - DNA, 25 bp, Probe Sequence
cgctagcaatcgcatcatcggtgcc

SEQ ID NO: 192781 - DNA, 25 bp, Probe Sequence
cgctaagcatggcaatcgctctgtc

SEQ ID NO: 192782 - DNA, 25 bp, Probe Sequence
cgctaagcatggcaatcgctctgtc

SEQ ID NO: 192783 - DNA, 25 bp, Probe Sequence
cgcaaggcgcaggagagccacttcc

SEQ ID NO: 192784 - DNA, 25 bp, Probe Sequence
cgcacgtgctggaaggcccagacac

SEQ ID NO: 192785 - DNA, 25 bp, Probe Sequence
cgccctggcaatatgcccagtacat

SEQ ID NO: 192786 - DNA, 25 bp, Probe Sequence
cgcctctggaacgtgtccaacgagg

SEQ ID NO: 192787 - DNA, 25 bp, Probe Sequence
gcgactttgaactgtcccattacgt

SEQ ID NO: 192788 - DNA, 25 bp, Probe Sequence
cgccaataggactttccgttgacgt

SEQ ID NO: 192789 - DNA, 25 bp, Probe Sequence
cgcacaatgggcggtaggcgtgtac

SEQ ID NO: 192790 - DNA, 25 bp, Probe Sequence
cgcaatagcgacgcgctggcgttac

SEQ ID NO: 192791 - DNA, 25 bp, Probe Sequence
cgcaatagtgactctgtgcttgtct

SEQ ID NO: 192792 - DNA, 25 bp, Probe Sequence
cgctatgaggacatggcagccttca

SEQ ID NO: 192793 - DNA, 25 bp, Probe Sequence
cgctgaggagcagctgcgagccgac

SEQ ID NO: 192794 - DNA, 25 bp, Probe Sequence
cgctgatggtggccaggatgctcag

SEQ ID NO: 192795 - DNA, 25 bp, Probe Sequence
cgctgagcagggcgacgtgcagatg

SEQ ID NO: 192796 - DNA, 25 bp, Probe Sequence
cgcttcgggctgcagcaggtgcaag

SEQ ID NO: 192797 - DNA, 25 bp, Probe Sequence
cgcttctcggtgctgatgcagatgc

SEQ ID NO: 192798 - DNA, 25 bp, Probe Sequence
cgctcttgcaataattggcagatgc

SEQ ID NO: 192799 - DNA, 25 bp, Probe Sequence
cgctgtccactgcatctgacagagc

SEQ ID NO: 192800 - DNA, 25 bp, Probe Sequence
cgcctctgcaggcatatgccgaatc

SEQ ID NO: 192801 - DNA, 25 bp, Probe Sequence
cgcccagccggaatggcatggtctt

SEQ ID NO: 192802 - DNA, 25 bp, Probe Sequence
cgcttaggccagagtgatggcacca

SEQ ID NO: 192803 - DNA, 25 bp, Probe Sequence
cgctcatttcggacggatggatccc

SEQ ID NO: 192804 - DNA, 25 bp, Probe Sequence
cgcatctgtgtgctggacgtggacc

SEQ ID NO: 192805 - DNA, 25 bp, Probe Sequence
cgcaatggcagcgggacgctggatc

SEQ ID NO: 192806 - DNA, 25 bp, Probe Sequence
cgccatggagagggaccgctacatg

SEQ ID NO: 192807 - DNA, 25 bp, Probe Sequence
cgccgagagggtgacctctctgggc

SEQ ID NO: 192808 - DNA, 25 bp, Probe Sequence
ccccatggggctgtccatccatggc

SEQ ID NO: 192809 - DNA, 25 bp, Probe Sequence
cccaatggggctggtggctttgaga

SEQ ID NO: 192810 - DNA, 25 bp, Probe Sequence
cccaatggggctggtggctttgaga

SEQ ID NO: 192811 - DNA, 25 bp, Probe Sequence
cccaacatgcagttcgtggcacaag

SEQ ID NO: 192812 - DNA, 25 bp, Probe Sequence
cgctctccatgctttacattgacaa

SEQ ID NO: 192813 - DNA, 25 bp, Probe Sequence
cgcctctgcctttcaaggtcatgat

SEQ ID NO: 192814 - DNA, 25 bp, Probe Sequence
cgcctctgcctttcaaggtcatgat

SEQ ID NO: 192815 - DNA, 25 bp, Probe Sequence
cgccgacgcttgtcaggctattgat

SEQ ID NO: 192816 - DNA, 25 bp, Probe Sequence
cgcctgaggctttagacttcctgat

SEQ ID NO: 192817 - DNA, 25 bp, Probe Sequence
cgctcgggcatggagaattccgctt

SEQ ID NO: 192818 - DNA, 25 bp, Probe Sequence
cgccgctgctgggagagatcccctg

SEQ ID NO: 192819 - DNA, 25 bp, Probe Sequence
cgccgatctgcagcgtaacgactcc

SEQ ID NO: 192820 - DNA, 25 bp, Probe Sequence
cgccgtcaatgagggcacctacacc

SEQ ID NO: 192821 - DNA, 25 bp, Probe Sequence
cccagatcatgtttgagaccttcaa

SEQ ID NO: 192822 - DNA, 25 bp, Probe Sequence
cgccaatgcttgttcaggcacgcca

SEQ ID NO: 192823 - DNA, 25 bp, Probe Sequence
cgcccatgctggttccagctggatc

SEQ ID NO: 192824 - DNA, 25 bp, Probe Sequence
cgccatcatgggtcgcatgcatgct

SEQ ID NO: 192825 - DNA, 25 bp, Probe Sequence
cgcacatcatcaaggcgcagagcca

SEQ ID NO: 192826 - DNA, 25 bp, Probe Sequence
cgcacatcatcagcgcgcaagaggg

SEQ ID NO: 192827 - DNA, 25 bp, Probe Sequence
cgcacatccgcgccaagaggaagcg

SEQ ID NO: 192828 - DNA, 25 bp, Probe Sequence
cgcagcccctgtcaggtcaaggaat

SEQ ID NO: 192829 - DNA, 25 bp, Probe Sequence
cgcacccttgggctctatgggaagg

SEQ ID NO: 192830 - DNA, 25 bp, Probe Sequence
cgccccttgacgctatggcggtagg

SEQ ID NO: 192831 - DNA, 25 bp, Probe Sequence
cccaccctgaatgcattggccggtg

SEQ ID NO: 192832 - DNA, 25 bp, Probe Sequence
cccagccccaaactgggggctctgt

SEQ ID NO: 192833 - DNA, 25 bp, Probe Sequence
cccacacctctgagggggtctcagg

SEQ ID NO: 192834 - DNA, 25 bp, Probe Sequence
cccacctccgctgggaggaacctga

SEQ ID NO: 192835 - DNA, 25 bp, Probe Sequence
cccacctccgctgggaggaacctga

SEQ ID NO: 192836 - DNA, 25 bp, Probe Sequence
cccaccactctgcttaaaagttgag

SEQ ID NO: 192837 - DNA, 25 bp, Probe Sequence
cgccggccctggttagtgaagtacg

SEQ ID NO: 192838 - DNA, 25 bp, Probe Sequence
cgccggcaacttcaagttcggacag

SEQ ID NO: 192839 - DNA, 25 bp, Probe Sequence
cccaactatctataaacctagccat

SEQ ID NO: 192840 - DNA, 25 bp, Probe Sequence
cgcgaccttatctccaacaatgagc

SEQ ID NO: 192841 - DNA, 25 bp, Probe Sequence
cgcgagactcttcagcaacataaac

SEQ ID NO: 192842 - DNA, 25 bp, Probe Sequence
cgcagatattctagcttcattgtaa

SEQ ID NO: 192843 - DNA, 25 bp, Probe Sequence
cgcttcatttccctcattgtgaagt

SEQ ID NO: 192844 - DNA, 25 bp, Probe Sequence
cgcttttcatcacaagcttgaatat

SEQ ID NO: 192845 - DNA, 25 bp, Probe Sequence
ccctagatgatacacactcatattt

SEQ ID NO: 192846 - DNA, 25 bp, Probe Sequence
cccacagtatcactaagctcgcttt

SEQ ID NO: 192847 - DNA, 25 bp, Probe Sequence
cccaagttcagcattctgaccgtga

SEQ ID NO: 192848 - DNA, 25 bp, Probe Sequence
cccaactgtacctcaaactctggaa

SEQ ID NO: 192849 - DNA, 25 bp, Probe Sequence
cccaaagtccagaccagaactcggt

SEQ ID NO: 192850 - DNA, 25 bp, Probe Sequence
cccaaccccactgagaactaaatgc

SEQ ID NO: 192851 - DNA, 25 bp, Probe Sequence
ccctagcccattagggacactatag

SEQ ID NO: 192852 - DNA, 25 bp, Probe Sequence
ccacttccggttctaccagattgag

SEQ ID NO: 192853 - DNA, 25 bp, Probe Sequence
cccttcacggttctccaatgagtag

SEQ ID NO: 192854 - DNA, 25 bp, Probe Sequence
ccctaacactttcttgaaggtcagg

SEQ ID NO: 192855 - DNA, 25 bp, Probe Sequence
cgcagcaaacacatccgtagaaggc

SEQ ID NO: 192856 - DNA, 25 bp, Probe Sequence
cgcacagtgcccaccagaagtatgt

SEQ ID NO: 192857 - DNA, 25 bp, Probe Sequence
cgcacagtgcccaccagaagtatgt

SEQ ID NO: 192858 - DNA, 25 bp, Probe Sequence
cgccagtcgcccatagacactggct

SEQ ID NO: 192859 - DNA, 25 bp, Probe Sequence
ccgatgcatacaccacatgaaacat

SEQ ID NO: 192860 - DNA, 25 bp, Probe Sequence
cgcagatgcccaccactgaaagagt

SEQ ID NO: 192861 - DNA, 25 bp, Probe Sequence
cgcaccgccagctacatgaagaagc

SEQ ID NO: 192862 - DNA, 25 bp, Probe Sequence
cgcacacaggcctagaggtaaccaa

SEQ ID NO: 192863 - DNA, 25 bp, Probe Sequence
cgccaagcagacgaggactacagcc

SEQ ID NO: 192864 - DNA, 25 bp, Probe Sequence
cgctcaagctgtcatgtacggagcc

SEQ ID NO: 192865 - DNA, 25 bp, Probe Sequence
cgctgcgactgctctggaaggagag

SEQ ID NO: 192866 - DNA, 25 bp, Probe Sequence
cgcatccgccattcagaacaggaag

SEQ ID NO: 192867 - DNA, 25 bp, Probe Sequence
cgcgtgcagccaaaatctcaggaag

SEQ ID NO: 192868 - DNA, 25 bp, Probe Sequence
cgcagctggcctgagctggggagag

SEQ ID NO: 192869 - DNA, 25 bp, Probe Sequence
cgcacgagcatggagctctgggggg

SEQ ID NO: 192870 - DNA, 25 bp, Probe Sequence
cgcacagtgtgggttgcgggtgctg

SEQ ID NO: 192871 - DNA, 25 bp, Probe Sequence
cgctgagtgtggtttgcggatcctg

SEQ ID NO: 192872 - DNA, 25 bp, Probe Sequence
cgctgactgtcagagcgaggtgctc

SEQ ID NO: 192873 - DNA, 25 bp, Probe Sequence
cgcacctgtgcctaagaagctgctc

SEQ ID NO: 192874 - DNA, 25 bp, Probe Sequence
cgcacctggcctatgagtggtcttt

SEQ ID NO: 192875 - DNA, 25 bp, Probe Sequence
cccacggttatatgtgtgtccctca

SEQ ID NO: 192876 - DNA, 25 bp, Probe Sequence
cgcccggctgaagattatgtgcccc

SEQ ID NO: 192877 - DNA, 25 bp, Probe Sequence
cgctctgtggatgagactttgagac

SEQ ID NO: 192878 - DNA, 25 bp, Probe Sequence
cgcttcgacatgccagactttgagg

SEQ ID NO: 192879 - DNA, 25 bp, Probe Sequence
cgcctctgcatatatgtctctttgg

SEQ ID NO: 192880 - DNA, 25 bp, Probe Sequence
cgccctctacgatgtgtttctggag

SEQ ID NO: 192881 - DNA, 25 bp, Probe Sequence
cgcctgttacgatggtgtccatgag

SEQ ID NO: 192882 - DNA, 25 bp, Probe Sequence
cgcaccgggcgattggaacacagag

SEQ ID NO: 192883 - DNA, 25 bp, Probe Sequence
cgcctcgatacgctggaaaaagtgc

SEQ ID NO: 192884 - DNA, 25 bp, Probe Sequence
cgcgcacgtgaagcaccgtaaaggc

SEQ ID NO: 192885 - DNA, 25 bp, Probe Sequence
gcgaacgtgaaatgtgcgctaaacg

SEQ ID NO: 192886 - DNA, 25 bp, Probe Sequence
cgctacagggaatctcgctacggcg

SEQ ID NO: 192887 - DNA, 25 bp, Probe Sequence
cgctacgagaccttcatcagtgacg

SEQ ID NO: 192888 - DNA, 25 bp, Probe Sequence
cgcttcaacaccttcatccatgaag

SEQ ID NO: 192889 - DNA, 25 bp, Probe Sequence
cgctccaacctgcatgacagatcaa

SEQ ID NO: 192890 - DNA, 25 bp, Probe Sequence
cgctccttctggtatatgcatgtca

SEQ ID NO: 192891 - DNA, 25 bp, Probe Sequence
cgctctctcctgcaatgattgatga

SEQ ID NO: 192892 - DNA, 25 bp, Probe Sequence
cgctcatccgccagatttgagcagc

SEQ ID NO: 192893 - DNA, 25 bp, Probe Sequence
cgcccacagtgatgatgtcgagatc

SEQ ID NO: 192894 - DNA, 25 bp, Probe Sequence
cgccgccaatgcttgttcaggcacg

SEQ ID NO: 192895 - DNA, 25 bp, Probe Sequence
cccagccaactcattgggttgtagc

SEQ ID NO: 192896 - DNA, 25 bp, Probe Sequence
cgccgcctgaatgtgtgggatttaa

SEQ ID NO: 192897 - DNA, 25 bp, Probe Sequence
cgccaggcgttatggggatttcttc

SEQ ID NO: 192898 - DNA, 25 bp, Probe Sequence
cgccgggtttttggaatctacatgt

SEQ ID NO: 192899 - DNA, 25 bp, Probe Sequence
cgcgggttttggaggacattagcat

SEQ ID NO: 192900 - DNA, 25 bp, Probe Sequence
cgctcgtgttttccgggaagggcag

SEQ ID NO: 192901 - DNA, 25 bp, Probe Sequence
cccggttttacagatgatggaggcc

SEQ ID NO: 192902 - DNA, 25 bp, Probe Sequence
cccaaatgtgtacacctgcggggcc

SEQ ID NO: 192903 - DNA, 25 bp, Probe Sequence
cccaaagatcccagtcttggggcaa

SEQ ID NO: 192904 - DNA, 25 bp, Probe Sequence
cccagttacgccagtatcatcggtt

SEQ ID NO: 192905 - DNA, 25 bp, Probe Sequence
cccacagttccctgaatacgtttgc

SEQ ID NO: 192906 - DNA, 25 bp, Probe Sequence
cccagaagtcccaaattatcagttt

SEQ ID NO: 192907 - DNA, 25 bp, Probe Sequence
cccaaacttgaatccccatgttctt

SEQ ID NO: 192908 - DNA, 25 bp, Probe Sequence
cccgaagctggaaaccgacgtagca

SEQ ID NO: 192909 - DNA, 25 bp, Probe Sequence
ccctgagaaggagacggccgtggag

SEQ ID NO: 192910 - DNA, 25 bp, Probe Sequence
cccagaaggggctcaggtcttaggg

SEQ ID NO: 192911 - DNA, 25 bp, Probe Sequence
cccagaatggggagcaggaaaccaa

SEQ ID NO: 192912 - DNA, 25 bp, Probe Sequence
cccagaaagtggagccctgcaacga

SEQ ID NO: 192913 - DNA, 25 bp, Probe Sequence
cccagaacccaaagccgtggataag

SEQ ID NO: 192914 - DNA, 25 bp, Probe Sequence
cccaaatcccaaatctctttcattg

SEQ ID NO: 192915 - DNA, 25 bp, Probe Sequence
cccaacatccaatagtcttcttcat

SEQ ID NO: 192916 - DNA, 25 bp, Probe Sequence
cccaacttcctgggttttctcattg

SEQ ID NO: 192917 - DNA, 25 bp, Probe Sequence
cccaagttctaaggtcttttcagag

SEQ ID NO: 192918 - DNA, 25 bp, Probe Sequence
ccgaattcttctaaatggatttaag

SEQ ID NO: 192919 - DNA, 25 bp, Probe Sequence
cctaatttgatttggagtgagttga

SEQ ID NO: 192920 - DNA, 25 bp, Probe Sequence
ccctggatcttttgacgtggttcac

SEQ ID NO: 192921 - DNA, 25 bp, Probe Sequence
cccaagcctttatgcttgagtccct

SEQ ID NO: 192922 - DNA, 25 bp, Probe Sequence
ccctaccaggtgtccttgaattctg

SEQ ID NO: 192923 - DNA, 25 bp, Probe Sequence
ccctaccaggtgtccttgaattctg

SEQ ID NO: 192924 - DNA, 25 bp, Probe Sequence
ccctaccaggtgtccctgaattctg

SEQ ID NO: 192925 - DNA, 25 bp, Probe Sequence
cccaccccaggatcctaaatcatga

SEQ ID NO: 192926 - DNA, 25 bp, Probe Sequence
gcccagccgaagttccactaaaaat

SEQ ID NO: 192927 - DNA, 25 bp, Probe Sequence
cccaccgaagttccaggtaacactg

SEQ ID NO: 192928 - DNA, 25 bp, Probe Sequence
cccaccgaagttccaggtaacactg

SEQ ID NO: 192929 - DNA, 25 bp, Probe Sequence
cccacattgactaatccaactaacc

SEQ ID NO: 192930 - DNA, 25 bp, Probe Sequence
cccacaggcagctttaaccattaaa

SEQ ID NO: 192931 - DNA, 25 bp, Probe Sequence
cccacaggcagctttaaccattaaa

SEQ ID NO: 192932 - DNA, 25 bp, Probe Sequence
cgcctgcaggattttaagcttgact

SEQ ID NO: 192933 - DNA, 25 bp, Probe Sequence
cgcctgcaggattttaagcttgact

SEQ ID NO: 192934 - DNA, 25 bp, Probe Sequence
cgcctcaggcaattagacactttgg

SEQ ID NO: 192935 - DNA, 25 bp, Probe Sequence
cgcgctcaaccagggtcaagtctgg

SEQ ID NO: 192936 - DNA, 25 bp, Probe Sequence
cgctctatccagctggacgggctgg

SEQ ID NO: 192937 - DNA, 25 bp, Probe Sequence
cgctctatccagctggacgggctgg

SEQ ID NO: 192938 - DNA, 25 bp, Probe Sequence
cgctccacccggaaaaagcgctgtc

SEQ ID NO: 192939 - DNA, 25 bp, Probe Sequence
cgccccatggaggccaaatggccgt

SEQ ID NO: 192940 - DNA, 25 bp, Probe Sequence
cgccccattgacgcaaatgggcggt

SEQ ID NO: 192941 - DNA, 25 bp, Probe Sequence
cgccccattgacgcaaatgggcggt

SEQ ID NO: 192942 - DNA, 25 bp, Probe Sequence
cgccccattgacgcaaatgggcggt

SEQ ID NO: 192943 - DNA, 25 bp, Probe Sequence
cgcccctatgacgtcatgacggtaa

SEQ ID NO: 192944 - DNA, 25 bp, Probe Sequence
cgccacctgagaacgcatacgggag

SEQ ID NO: 192945 - DNA, 25 bp, Probe Sequence
cgcccccagaacatacactgtgaac

SEQ ID NO: 192946 - DNA, 25 bp, Probe Sequence
cgcccccgaaattcaagattgagtg

SEQ ID NO: 192947 - DNA, 25 bp, Probe Sequence
cgcccccaggtggagcaacatgcga

SEQ ID NO: 192948 - DNA, 25 bp, Probe Sequence
cgcccccagtgtgcacgagtgggaa

SEQ ID NO: 192949 - DNA, 25 bp, Probe Sequence
gctccccaagttccaggacggagac

SEQ ID NO: 192950 - DNA, 25 bp, Probe Sequence
cgcgctacaaaaccgggctggaagc

SEQ ID NO: 192951 - DNA, 25 bp, Probe Sequence
cccaacaaaatcttcggcgtgacga

SEQ ID NO: 192952 - DNA, 25 bp, Probe Sequence
cccaatgaataatccgccagaacga

SEQ ID NO: 192953 - DNA, 25 bp, Probe Sequence
cccattggaaatgaaccatgatccc

SEQ ID NO: 192954 - DNA, 25 bp, Probe Sequence
cgcctcatccaaatgagacccttcc

SEQ ID NO: 192955 - DNA, 25 bp, Probe Sequence
cgctgtctcagccagtagatgcaca

SEQ ID NO: 192956 - DNA, 25 bp, Probe Sequence
cgctgcatgcgagtgctgtactacc

SEQ ID NO: 192957 - DNA, 25 bp, Probe Sequence
cgctctcatgagggtgaaacttcct

SEQ ID NO: 192958 - DNA, 25 bp, Probe Sequence
cgcctctggccgtaccactggcatc

SEQ ID NO: 192959 - DNA, 25 bp, Probe Sequence
cgcctcggcagccataggagcgaac

SEQ ID NO: 192960 - DNA, 25 bp, Probe Sequence
cgctccctgcgagtggcgcaggtaa

SEQ ID NO: 192961 - DNA, 25 bp, Probe Sequence
cgcgctacactgactggctcagcgt

SEQ ID NO: 192962 - DNA, 25 bp, Probe Sequence
cgcgatcacgtgacatgcaccgcgc

SEQ ID NO: 192963 - DNA, 25 bp, Probe Sequence
cgcgtccagctggatgagcgcggcc

SEQ ID NO: 192964 - DNA, 25 bp, Probe Sequence
cgcgccaagctggacaggcagcgcc

SEQ ID NO: 192965 - DNA, 25 bp, Probe Sequence
cgcgcgagatatggcccgcgctgga

SEQ ID NO: 192966 - DNA, 25 bp, Probe Sequence
cgcatgagagtgacgacgcgcgctg

SEQ ID NO: 192967 - DNA, 25 bp, Probe Sequence
cgctagagtggcccatgcattgctg

SEQ ID NO: 192968 - DNA, 25 bp, Probe Sequence
cgctggtgtggctggtcgtaaacag

SEQ ID NO: 192969 - DNA, 25 bp, Probe Sequence
cgctttgtgagccgtgtcgtatgac

SEQ ID NO: 192970 - DNA, 25 bp, Probe Sequence
cgctttgtgagccgtgtcgtatgac

SEQ ID NO: 192971 - DNA, 25 bp, Probe Sequence
cgctgattgtgattccttctttgtc

SEQ ID NO: 192972 - DNA, 25 bp, Probe Sequence
cgctattatagtttccgttgtcctc

SEQ ID NO: 192973 - DNA, 25 bp, Probe Sequence
cccattgaagtctccttgggccacc

SEQ ID NO: 192974 - DNA, 25 bp, Probe Sequence
cccttgcaatatttccattgccccc

SEQ ID NO: 192975 - DNA, 25 bp, Probe Sequence
cccctacatatttctattccccagg

SEQ ID NO: 192976 - DNA, 25 bp, Probe Sequence
cccacatttgtttcaatgccccaaa

SEQ ID NO: 192977 - DNA, 25 bp, Probe Sequence
cccaatctatctaaatttcatccat

SEQ ID NO: 192978 - DNA, 25 bp, Probe Sequence
cgctcaacctcttttgttcagtatg

SEQ ID NO: 192979 - DNA, 25 bp, Probe Sequence
cgcctcagcgtttctggttcaatag

SEQ ID NO: 192980 - DNA, 25 bp, Probe Sequence
cgcccacgctggacattgtcgcaag

SEQ ID NO: 192981 - DNA, 25 bp, Probe Sequence
cgcgcgctgggagcagtttgcagca

SEQ ID NO: 192982 - DNA, 25 bp, Probe Sequence
cgcgccgggcatggagtgcgtgaag

SEQ ID NO: 192983 - DNA, 25 bp, Probe Sequence
cgcgcggcgccatgaagggcaagga

SEQ ID NO: 192984 - DNA, 25 bp, Probe Sequence
cgcggtggcatctgcaatggggacg

SEQ ID NO: 192985 - DNA, 25 bp, Probe Sequence
cgcggggccaaggttgcagtgagcc

SEQ ID NO: 192986 - DNA, 25 bp, Probe Sequence
cgcatggggtgaagcgttcagcctc

SEQ ID NO: 192987 - DNA, 25 bp, Probe Sequence
cgctggtggatgaatgctgcctgct

SEQ ID NO: 192988 - DNA, 25 bp, Probe Sequence
cgctggtggatgaatgctgcctgct

SEQ ID NO: 192989 - DNA, 25 bp, Probe Sequence
cgctggtggatgaatgctgcctgct

SEQ ID NO: 192990 - DNA, 25 bp, Probe Sequence
cgctggtggatgaatgctgcctgct

SEQ ID NO: 192991 - DNA, 25 bp, Probe Sequence
cgctgtcaggatcatgccctgtggc

SEQ ID NO: 192992 - DNA, 25 bp, Probe Sequence
cgctggcaggcatctggcctgacac

SEQ ID NO: 192993 - DNA, 25 bp, Probe Sequence
cgctggggcatcttagagcatccac

SEQ ID NO: 192994 - DNA, 25 bp, Probe Sequence
cgctgtgtgactttgggcaagccaa

SEQ ID NO: 192995 - DNA, 25 bp, Probe Sequence
cgcgtggtctacgccgagtgacaga

SEQ ID NO: 192996 - DNA, 25 bp, Probe Sequence
cgcgtgtttgactacagtgagtact

SEQ ID NO: 192997 - DNA, 25 bp, Probe Sequence
cgccttattagccagattgtgtcct

SEQ ID NO: 192998 - DNA, 25 bp, Probe Sequence
cgctgccaatgcactcgatcttgtc

SEQ ID NO: 192999 - DNA, 25 bp, Probe Sequence
cgctgccaatgatgtttcatttgcc

SEQ ID NO: 193000 - DNA, 25 bp, Probe Sequence
cgccagcggaaggttcattcgcata

SEQ ID NO: 193001 - DNA, 25 bp, Probe Sequence
cgcattggggatgttgtccgcatca

SEQ ID NO: 193002 - DNA, 25 bp, Probe Sequence
cgcattcgggagtctttctttcgcg

SEQ ID NO: 193003 - DNA, 25 bp, Probe Sequence
cgctctcggggaaggtcgtactgcg

SEQ ID NO: 193004 - DNA, 25 bp, Probe Sequence
cgccggggtacaggtgtggatctgg

SEQ ID NO: 193005 - DNA, 25 bp, Probe Sequence
cgcccggcttaggactgggagtgtg

SEQ ID NO: 193006 - DNA, 25 bp, Probe Sequence
cgccccgcagggggcttggagggct

SEQ ID NO: 193007 - DNA, 25 bp, Probe Sequence
cccaatccaagggtctggaggggct

SEQ ID NO: 193008 - DNA, 25 bp, Probe Sequence
cccaaggaacgccataggacttcct

SEQ ID NO: 193009 - DNA, 25 bp, Probe Sequence
cccatagtgacgccaataggacttt

SEQ ID NO: 193010 - DNA, 25 bp, Probe Sequence
cgccaagctgacccacaataaagat

SEQ ID NO: 193011 - DNA, 25 bp, Probe Sequence
cgctcgcaataccaaagtcgcaaga

SEQ ID NO: 193012 - DNA, 25 bp, Probe Sequence
cgctgccctaagcatattgccaagt

SEQ ID NO: 193013 - DNA, 25 bp, Probe Sequence
cgcgctcgttatcatgtggcagaag

SEQ ID NO: 193014 - DNA, 25 bp, Probe Sequence
cgcgccgttctgtcagtgacaatga

SEQ ID NO: 193015 - DNA, 25 bp, Probe Sequence
cgcgccggattattgctgcaactgg

SEQ ID NO: 193016 - DNA, 25 bp, Probe Sequence
cgctcgaggacgtgctcaaggatga

SEQ ID NO: 193017 - DNA, 25 bp, Probe Sequence
cgccgaggatggtgctcatggcgcc

SEQ ID NO: 193018 - DNA, 25 bp, Probe Sequence
cgccgtggaggtcacgggtctgcct

SEQ ID NO: 193019 - DNA, 25 bp, Probe Sequence
cgcctgtttggtgccgtggagcacc

SEQ ID NO: 193020 - DNA, 25 bp, Probe Sequence
cgccatggtcatcgattctcggaat

SEQ ID NO: 193021 - DNA, 25 bp, Probe Sequence
cgctcaggctgagtgaccctggatg

SEQ ID NO: 193022 - DNA, 25 bp, Probe Sequence
cgcctggcatgggacaccaagtgga

SEQ ID NO: 193023 - DNA, 25 bp, Probe Sequence
cgcctgtggtgagccgagagctgcg

SEQ ID NO: 193024 - DNA, 25 bp, Probe Sequence
cgcctatcttaggtagtcatgctgt

SEQ ID NO: 193025 - DNA, 25 bp, Probe Sequence
cgcctacttctgcagagacttggtc

SEQ ID NO: 193026 - DNA, 25 bp, Probe Sequence
cgctcgcaccttggaggtcgaggct

SEQ ID NO: 193027 - DNA, 25 bp, Probe Sequence
cgcgccaaattttgcgctcggtgcg

SEQ ID NO: 193028 - DNA, 25 bp, Probe Sequence
cgccaaattttgcgctcggtgcgat

SEQ ID NO: 193029 - DNA, 25 bp, Probe Sequence
cgccaaattgggcctgtaaggccgt

SEQ ID NO: 193030 - DNA, 25 bp, Probe Sequence
cgccctgcagggctgttgaaggccg

SEQ ID NO: 193031 - DNA, 25 bp, Probe Sequence
cgccctgcagggctgttgaaggccg

SEQ ID NO: 193032 - DNA, 25 bp, Probe Sequence
cgccctgcagggctgttgaaggccg

SEQ ID NO: 193033 - DNA, 25 bp, Probe Sequence
cgctgccaaggctgtgggcaaggtc

SEQ ID NO: 193034 - DNA, 25 bp, Probe Sequence
cgctgccacaacttggtggacgttt

SEQ ID NO: 193035 - DNA, 25 bp, Probe Sequence
cgcccatcaagctcgatgacctgaa

SEQ ID NO: 193036 - DNA, 25 bp, Probe Sequence
cgctgccatcgagaaggccgtgcag

SEQ ID NO: 193037 - DNA, 25 bp, Probe Sequence
cgctgccatcgagaaggccgtgcag

SEQ ID NO: 193038 - DNA, 25 bp, Probe Sequence
cgcccattgctttaggcctggagac

SEQ ID NO: 193039 - DNA, 25 bp, Probe Sequence
cccatcactgtacaggtctggaacc

SEQ ID NO: 193040 - DNA, 25 bp, Probe Sequence
cccaactgctcacagaacggatcat

SEQ ID NO: 193041 - DNA, 25 bp, Probe Sequence
cgccttgtggctgagaactggacag

SEQ ID NO: 193042 - DNA, 25 bp, Probe Sequence
cgcgctcggcctgagaaggccatcg

SEQ ID NO: 193043 - DNA, 25 bp, Probe Sequence
cgctgccacgttggagaagcccgtg

SEQ ID NO: 193044 - DNA, 25 bp, Probe Sequence
cgccgcaagttcctggagacggtgg

SEQ ID NO: 193045 - DNA, 25 bp, Probe Sequence
ccccgaatccgtgtgcacacgtgtg

SEQ ID NO: 193046 - DNA, 25 bp, Probe Sequence
cccacagaacctatctactcgttgt

SEQ ID NO: 193047 - DNA, 25 bp, Probe Sequence
cccagaaacaacacaatccgttgca

SEQ ID NO: 193048 - DNA, 25 bp, Probe Sequence
cccaacaacataaaaacagccgtct

SEQ ID NO: 193049 - DNA, 25 bp, Probe Sequence
cccaaaactcaatagattccttctt

SEQ ID NO: 193050 - DNA, 25 bp, Probe Sequence
cccaagtacaaatagagtgacccgt

SEQ ID NO: 193051 - DNA, 25 bp, Probe Sequence
cccgaaaccagatcgagctacctaa

SEQ ID NO: 193052 - DNA, 25 bp, Probe Sequence
cccgtcaacaaatctaggaaaatat

SEQ ID NO: 193053 - DNA, 25 bp, Probe Sequence
cccaggacaaaattcttagtaatga

SEQ ID NO: 193054 - DNA, 25 bp, Probe Sequence
cccagaatcattaatatttgagaaa

SEQ ID NO: 193055 - DNA, 25 bp, Probe Sequence
cccaaccttattctgtgtgtagaca

SEQ ID NO: 193056 - DNA, 25 bp, Probe Sequence
ccgcaacaccatgtccttgttggca

SEQ ID NO: 193057 - DNA, 25 bp, Probe Sequence
cccaaatcgccatcctgttgtgaag

SEQ ID NO: 193058 - DNA, 25 bp, Probe Sequence
cgccacccccataactttgggagcg

SEQ ID NO: 193059 - DNA, 25 bp, Probe Sequence
cccaccccatctgtactggaaggga

SEQ ID NO: 193060 - DNA, 25 bp, Probe Sequence
cccttccctgctatgggaaaggcca

SEQ ID NO: 193061 - DNA, 25 bp, Probe Sequence
cccggacggctgctgcggaaaggaa

SEQ ID NO: 193062 - DNA, 25 bp, Probe Sequence
cccggccggatgctggagaagggcg

SEQ ID NO: 193063 - DNA, 25 bp, Probe Sequence
cccttctcgggccgtgaacgagacg

SEQ ID NO: 193064 - DNA, 25 bp, Probe Sequence
cccgtctgggagttgtacccaacag

SEQ ID NO: 193065 - DNA, 25 bp, Probe Sequence
cccctgctattgtggtactccagca

SEQ ID NO: 193066 - DNA, 25 bp, Probe Sequence
cgcgcctgtaatcccagctactcgg

SEQ ID NO: 193067 - DNA, 25 bp, Probe Sequence
cgccggcataatgccagtacagact

SEQ ID NO: 193068 - DNA, 25 bp, Probe Sequence
cgccggcataatgcccagacaggac

SEQ ID NO: 193069 - DNA, 25 bp, Probe Sequence
cgccggattattgctgcaactggca

SEQ ID NO: 193070 - DNA, 25 bp, Probe Sequence
cccaggaaatcttcagcaacgtcag

SEQ ID NO: 193071 - DNA, 25 bp, Probe Sequence
ccgacgaatattacaacgcggcagc

SEQ ID NO: 193072 - DNA, 25 bp, Probe Sequence
cccacagataagctacaccgggccc

SEQ ID NO: 193073 - DNA, 25 bp, Probe Sequence
cccaacaacgtgtgcaccggtgtgc

SEQ ID NO: 193074 - DNA, 25 bp, Probe Sequence
cccaaactggatgggacacgtgggg

SEQ ID NO: 193075 - DNA, 25 bp, Probe Sequence
cccaagccccatgttcatggtgggg

SEQ ID NO: 193076 - DNA, 25 bp, Probe Sequence
cccaagccccgaatggcaaggggca

SEQ ID NO: 193077 - DNA, 25 bp, Probe Sequence
cccaaggcaacggaggctcacgagg

SEQ ID NO: 193078 - DNA, 25 bp, Probe Sequence
cccacaggccaggtaagtacacgag

SEQ ID NO: 193079 - DNA, 25 bp, Probe Sequence
cccaagggtgtctcatgctacaaga

SEQ ID NO: 193080 - DNA, 25 bp, Probe Sequence
cccacgaaggccttcattacttacg

SEQ ID NO: 193081 - DNA, 25 bp, Probe Sequence
ccctcagatgggtcgtttcacctta

SEQ ID NO: 193082 - DNA, 25 bp, Probe Sequence
cccagggggttgtgatagctttaag

SEQ ID NO: 193083 - DNA, 25 bp, Probe Sequence
cccaatgacggttgcttgaacttta

SEQ ID NO: 193084 - DNA, 25 bp, Probe Sequence
cccagaacatgccttagggactttc

SEQ ID NO: 193085 - DNA, 25 bp, Probe Sequence
cgccagtgaattaataaggcctttt

SEQ ID NO: 193086 - DNA, 25 bp, Probe Sequence
cccgatatatgttctctaggccttt

SEQ ID NO: 193087 - DNA, 25 bp, Probe Sequence
cccaaagtgttctgattccttcaac

SEQ ID NO: 193088 - DNA, 25 bp, Probe Sequence
cccgagaggttcaggatcctgcccc

SEQ ID NO: 193089 - DNA, 25 bp, Probe Sequence
cccagaggggtagtacaacagctcc

SEQ ID NO: 193090 - DNA, 25 bp, Probe Sequence
cgccggcgagcggagtgaacaacct

SEQ ID NO: 193091 - DNA, 25 bp, Probe Sequence
cgcccgggcgtgtcaataatatcac

SEQ ID NO: 193092 - DNA, 25 bp, Probe Sequence
cgctccttccgccaagataattatc

SEQ ID NO: 193093 - DNA, 25 bp, Probe Sequence
cccacttcccatctgtaatttgcag

SEQ ID NO: 193094 - DNA, 25 bp, Probe Sequence
cccagtaaagtgcatttgacattga

SEQ ID NO: 193095 - DNA, 25 bp, Probe Sequence
cccactgaaggcccaaatgagcaat

SEQ ID NO: 193096 - DNA, 25 bp, Probe Sequence
cccactatatgagaaccgagacctt

SEQ ID NO: 193097 - DNA, 25 bp, Probe Sequence
cccactgtagcctggttacaacttt

SEQ ID NO: 193098 - DNA, 25 bp, Probe Sequence
cccacaaacacttagttaacagcta

SEQ ID NO: 193099 - DNA, 25 bp, Probe Sequence
cccaaagaaccatgtattaaccaca

SEQ ID NO: 193100 - DNA, 25 bp, Probe Sequence
cccatctaaacagtcgtcatccaac

SEQ ID NO: 193101 - DNA, 25 bp, Probe Sequence
cccacagaaagcggtgacttcacct

SEQ ID NO: 193102 - DNA, 25 bp, Probe Sequence
cccaaaaagccatgattgtcctggt

SEQ ID NO: 193103 - DNA, 25 bp, Probe Sequence
cccaaatgtactgggcattgtcctg

SEQ ID NO: 193104 - DNA, 25 bp, Probe Sequence
cccaaatgctgctgtggttcaacca

SEQ ID NO: 193105 - DNA, 25 bp, Probe Sequence
cccagccaggctttcgagtatatcc

SEQ ID NO: 193106 - DNA, 25 bp, Probe Sequence
cgcccttgtgctcatcaggtaatct

SEQ ID NO: 193107 - DNA, 25 bp, Probe Sequence
cgcccttctacttctggatgaatgg

SEQ ID NO: 193108 - DNA, 25 bp, Probe Sequence
cgcggctacttcgacgaggagatga

SEQ ID NO: 193109 - DNA, 25 bp, Probe Sequence
cgccgctatattccagcttgggtga

SEQ ID NO: 193110 - DNA, 25 bp, Probe Sequence
cgccgcctgatactggcattttgta

SEQ ID NO: 193111 - DNA, 25 bp, Probe Sequence
cgccgcctgatactggcattttgta

SEQ ID NO: 193112 - DNA, 25 bp, Probe Sequence
cgctcagcctcttgtggatttggga

SEQ ID NO: 193113 - DNA, 25 bp, Probe Sequence
cccagccctagtagcaattaaggaa

SEQ ID NO: 193114 - DNA, 25 bp, Probe Sequence
cccaccacatagaatcaacatatgg

SEQ ID NO: 193115 - DNA, 25 bp, Probe Sequence
cccaagcagatagctcatggctagc

SEQ ID NO: 193116 - DNA, 25 bp, Probe Sequence
cccaactagtgcttctggcgatgac

SEQ ID NO: 193117 - DNA, 25 bp, Probe Sequence
cccaacttgagatgtatgaaggctt

SEQ ID NO: 193118 - DNA, 25 bp, Probe Sequence
cccaatcttctgggtccagacctgc

SEQ ID NO: 193119 - DNA, 25 bp, Probe Sequence
cccttcctgcgggtggcagaggagc

SEQ ID NO: 193120 - DNA, 25 bp, Probe Sequence
cgcctgttctcctttagcagacagg

SEQ ID NO: 193121 - DNA, 25 bp, Probe Sequence
cgctgcgtttcctactcagagaaac

SEQ ID NO: 193122 - DNA, 25 bp, Probe Sequence
cgctgttttgacctccatagaagac

SEQ ID NO: 193123 - DNA, 25 bp, Probe Sequence
cgctgttttgacctccatagaagac

SEQ ID NO: 193124 - DNA, 25 bp, Probe Sequence
cgctctcttccaggacatcaagaag

SEQ ID NO: 193125 - DNA, 25 bp, Probe Sequence
cgctctcttctggtgatcaaacaaa

SEQ ID NO: 193126 - DNA, 25 bp, Probe Sequence
cgctctccgatcttgtaataccaaa

SEQ ID NO: 193127 - DNA, 25 bp, Probe Sequence
cgccttggactttctgcataacaaa

SEQ ID NO: 193128 - DNA, 25 bp, Probe Sequence
cgcctgggactggctctgtgataaa

SEQ ID NO: 193129 - DNA, 25 bp, Probe Sequence
cgcgatgttgactgcacaggtaata

SEQ ID NO: 193130 - DNA, 25 bp, Probe Sequence
cgcgagatattctccggcggatata

SEQ ID NO: 193131 - DNA, 25 bp, Probe Sequence
cgcgagatatggcccgcgctggagt

SEQ ID NO: 193132 - DNA, 25 bp, Probe Sequence
cgcggctcaaagccggctgcagagc

SEQ ID NO: 193133 - DNA, 25 bp, Probe Sequence
cgccctaataaggagcgaatcctac

SEQ ID NO: 193134 - DNA, 25 bp, Probe Sequence
gccctaataaggagcgaatcctaca

SEQ ID NO: 193135 - DNA, 25 bp, Probe Sequence
ccgtttccagtgagcagatgtcttg

SEQ ID NO: 193136 - DNA, 25 bp, Probe Sequence
ccctacctcatgggggtgtcttggg

SEQ ID NO: 193137 - DNA, 25 bp, Probe Sequence
cccgacaaatgggctgggccttggt

SEQ ID NO: 193138 - DNA, 25 bp, Probe Sequence
cccgacaaatgggctgggccttggt

SEQ ID NO: 193139 - DNA, 25 bp, Probe Sequence
cccaacaaggagggcgacttcgtgc

SEQ ID NO: 193140 - DNA, 25 bp, Probe Sequence
cgcccaaagggttctgcctggcgtc

SEQ ID NO: 193141 - DNA, 25 bp, Probe Sequence
cgcctcaacatggacttctggcgcc

SEQ ID NO: 193142 - DNA, 25 bp, Probe Sequence
cgcctgcaatcaggtgaatatacag

SEQ ID NO: 193143 - DNA, 25 bp, Probe Sequence
cgccatcgctcaggctgagtgaccc

SEQ ID NO: 193144 - DNA, 25 bp, Probe Sequence
cgccaagcagaggctgagtgccgcc

SEQ ID NO: 193145 - DNA, 25 bp, Probe Sequence
cgccgagcgatgggcatctctcggg

SEQ ID NO: 193146 - DNA, 25 bp, Probe Sequence
cgcgcggagagaggtgcgccgtggg

SEQ ID NO: 193147 - DNA, 25 bp, Probe Sequence
cgccctgaaggggcaccgtgggctg

SEQ ID NO: 193148 - DNA, 25 bp, Probe Sequence
cgccctgcgggagcaactgaacagg

SEQ ID NO: 193149 - DNA, 25 bp, Probe Sequence
cgccctgcaggtaacaaatgagatc

SEQ ID NO: 193150 - DNA, 25 bp, Probe Sequence
cgccagggctgtcatcaacatggat

SEQ ID NO: 193151 - DNA, 25 bp, Probe Sequence
cccaggagttgcccatctatggttt

SEQ ID NO: 193152 - DNA, 25 bp, Probe Sequence
cgcctgggttcgtagtattggatta

SEQ ID NO: 193153 - DNA, 25 bp, Probe Sequence
cccgttttggtactaaggtgctcag

SEQ ID NO: 193154 - DNA, 25 bp, Probe Sequence
cccagtctgtggttaaacggtgcca

SEQ ID NO: 193155 - DNA, 25 bp, Probe Sequence
ccatagcccggtaatgactgggtcc

SEQ ID NO: 193156 - DNA, 25 bp, Probe Sequence
cccagcccaggaaagttccatgacc

SEQ ID NO: 193157 - DNA, 25 bp, Probe Sequence
cccgaccacgacaagttcagtgcca

SEQ ID NO: 193158 - DNA, 25 bp, Probe Sequence
cccaaccctagcatgtatactctgc

SEQ ID NO: 193159 - DNA, 25 bp, Probe Sequence
cccagagccggactattcagatatt

SEQ ID NO: 193160 - DNA, 25 bp, Probe Sequence
cccacagcactagttattcatgcca

SEQ ID NO: 193161 - DNA, 25 bp, Probe Sequence
cccaacttggcagtacattccaagg

SEQ ID NO: 193162 - DNA, 25 bp, Probe Sequence
cccaaattggcgtttgtcatcagaa

SEQ ID NO: 193163 - DNA, 25 bp, Probe Sequence
cccaactatgcggacacgctcatca

SEQ ID NO: 193164 - DNA, 25 bp, Probe Sequence
cccaacgagcagtacaaggcacact

SEQ ID NO: 193165 - DNA, 25 bp, Probe Sequence
cccaagggcaccacatgtgccaata

SEQ ID NO: 193166 - DNA, 25 bp, Probe Sequence
cgccagaaggatgccgcagaccatt

SEQ ID NO: 193167 - DNA, 25 bp, Probe Sequence
cccaaaggcatgctccagacataaa

SEQ ID NO: 193168 - DNA, 25 bp, Probe Sequence
cccaaagtcattactgataataaca

SEQ ID NO: 193169 - DNA, 25 bp, Probe Sequence
cgcctcaactttatccacatgaaat

SEQ ID NO: 193170 - DNA, 25 bp, Probe Sequence
cgccccctattgacgtcaatgacgg

SEQ ID NO: 193171 - DNA, 25 bp, Probe Sequence
cgccccctattgacgtcaatgacgg

SEQ ID NO: 193172 - DNA, 25 bp, Probe Sequence
cgccccctattgacgtcaatgacgg

SEQ ID NO: 193173 - DNA, 25 bp, Probe Sequence
cgccccctattgacgtcaatgacgg

SEQ ID NO: 193174 - DNA, 25 bp, Probe Sequence
cgccccctattgacgtcaatgacgg

SEQ ID NO: 193175 - DNA, 25 bp, Probe Sequence
cgccccctattgacgtcaatgacgg

SEQ ID NO: 193176 - DNA, 25 bp, Probe Sequence
cgccccctattgacgtcaatgacgg

SEQ ID NO: 193177 - DNA, 25 bp, Probe Sequence
cgccccctattgacgtcaatgacgg

SEQ ID NO: 193178 - DNA, 25 bp, Probe Sequence
cgccccctattgacgtcaatgacgg

SEQ ID NO: 193179 - DNA, 25 bp, Probe Sequence
cgccccaattgaacgccaaattggg

SEQ ID NO: 193180 - DNA, 25 bp, Probe Sequence
cgccccacattctccaaattcaggg

SEQ ID NO: 193181 - DNA, 25 bp, Probe Sequence
cccactcaagactaccaaagccagg

SEQ ID NO: 193182 - DNA, 25 bp, Probe Sequence
cgcccgacaacatccaagtgcagga

SEQ ID NO: 193183 - DNA, 25 bp, Probe Sequence
cgcctcactaactccatgatgatgc

SEQ ID NO: 193184 - DNA, 25 bp, Probe Sequence
cgcccacatgcatgcaggccaagac

SEQ ID NO: 193185 - DNA, 25 bp, Probe Sequence
cgccccctatgacgtcaatgacggg

SEQ ID NO: 193186 - DNA, 25 bp, Probe Sequence
cgccccctatgacgtcaatgacggg

SEQ ID NO: 193187 - DNA, 25 bp, Probe Sequence
cgcccctattgacgtcaatgacggt

SEQ ID NO: 193188 - DNA, 25 bp, Probe Sequence
cgcccccattgacgcgaatgggctg

SEQ ID NO: 193189 - DNA, 25 bp, Probe Sequence
cgcccacagatggcccagaggtggt

SEQ ID NO: 193190 - DNA, 25 bp, Probe Sequence
cgccgcgcatgtgtcgagatggcta

SEQ ID NO: 193191 - DNA, 25 bp, Probe Sequence
cgccctcatgtgtctacagatggta

SEQ ID NO: 193192 - DNA, 25 bp, Probe Sequence
cgccctctacggacagagactgacc

SEQ ID NO: 193193 - DNA, 25 bp, Probe Sequence
cgccctctttgtacatgagcacttc

SEQ ID NO: 193194 - DNA, 25 bp, Probe Sequence
cgccgctccattaccaagagctcat

SEQ ID NO: 193195 - DNA, 25 bp, Probe Sequence
cgccagccaagtgcaacttgaattg

SEQ ID NO: 193196 - DNA, 25 bp, Probe Sequence
cgccccacagtagacgtgcagacgt

SEQ ID NO: 193197 - DNA, 25 bp, Probe Sequence
cgccccacagtagacgtgcagacgt

SEQ ID NO: 193198 - DNA, 25 bp, Probe Sequence
cgccgccgcaaggaacgtgcgaagt

SEQ ID NO: 193199 - DNA, 25 bp, Probe Sequence
cgccgccgagagcgcaggattgaga

SEQ ID NO: 193200 - DNA, 25 bp, Probe Sequence
cgcccgcaagcagatcgtagctggg

SEQ ID NO: 193201 - DNA, 25 bp, Probe Sequence
cgcccagcacggcatggatgacgat

SEQ ID NO: 193202 - DNA, 25 bp, Probe Sequence
cgcgcaaagcgaaagcggcaggatc

SEQ ID NO: 193203 - DNA, 25 bp, Probe Sequence
cccaaagcagccagacgcagtacgt

SEQ ID NO: 193204 - DNA, 25 bp, Probe Sequence
cccacaacgtgcggacgcaggagcc

SEQ ID NO: 193205 - DNA, 25 bp, Probe Sequence
cccacagagcgcgagcggctaaaga

SEQ ID NO: 193206 - DNA, 25 bp, Probe Sequence
cccactcagctgtggccatgggaaa

SEQ ID NO: 193207 - DNA, 25 bp, Probe Sequence
cccactcacttctctgagatcgaac

SEQ ID NO: 193208 - DNA, 25 bp, Probe Sequence
cccactcacttctctgagatcgaac

SEQ ID NO: 193209 - DNA, 25 bp, Probe Sequence
cccaagccgattcctaagcagcaag

SEQ ID NO: 193210 - DNA, 25 bp, Probe Sequence
ccctaagagtctcctgacaaaagtt

SEQ ID NO: 193211 - DNA, 25 bp, Probe Sequence
ccctaacagtgtctaatgaagtgca

SEQ ID NO: 193212 - DNA, 25 bp, Probe Sequence
cgcccagacggtctgtctgaggctc

SEQ ID NO: 193213 - DNA, 25 bp, Probe Sequence
cccaagccggtgactgtgcgtggct

SEQ ID NO: 193214 - DNA, 25 bp, Probe Sequence
cgccatggcctggaggggagtgtgt

SEQ ID NO: 193215 - DNA, 25 bp, Probe Sequence
cgccacaggcaggacgggcgtggtc

SEQ ID NO: 193216 - DNA, 25 bp, Probe Sequence
cgcccaggcctgccaggatgcaggg

SEQ ID NO: 193217 - DNA, 25 bp, Probe Sequence
cgccggctcctgcaaatgcaaagag

SEQ ID NO: 193218 - DNA, 25 bp, Probe Sequence
cgccggctcctgcaaatgcaaagag

SEQ ID NO: 193219 - DNA, 25 bp, Probe Sequence
ccggcaccttccacgaaagatggta

SEQ ID NO: 193220 - DNA, 25 bp, Probe Sequence
cccagcaccccatacggaagggtct

SEQ ID NO: 193221 - DNA, 25 bp, Probe Sequence
cccacctgccctttgggcaaggttg

SEQ ID NO: 193222 - DNA, 25 bp, Probe Sequence
cccacctgccctttgggcaaggttg

SEQ ID NO: 193223 - DNA, 25 bp, Probe Sequence
cccaccatacaatagagatagagga

SEQ ID NO: 193224 - DNA, 25 bp, Probe Sequence
cgcgcacctcacagggggagatgtg

SEQ ID NO: 193225 - DNA, 25 bp, Probe Sequence
cccactgctcagagacggcgagaac

SEQ ID NO: 193226 - DNA, 25 bp, Probe Sequence
cccagactctgtcgactatcgaaag

SEQ ID NO: 193227 - DNA, 25 bp, Probe Sequence
cccaagtctggggcttctgaaatga

SEQ ID NO: 193228 - DNA, 25 bp, Probe Sequence
cccacacttctggcttgttaacaga

SEQ ID NO: 193229 - DNA, 25 bp, Probe Sequence
cccagcctcctcggagtaaatacat

SEQ ID NO: 193230 - DNA, 25 bp, Probe Sequence
cccagttactcggaggctaaggcag

SEQ ID NO: 193231 - DNA, 25 bp, Probe Sequence
cccattaaattctaacccagggcat

SEQ ID NO: 193232 - DNA, 25 bp, Probe Sequence
cccatatagatcgttacaaccgaac

SEQ ID NO: 193233 - DNA, 25 bp, Probe Sequence
cccatacctcctagaccagtaaagc

SEQ ID NO: 193234 - DNA, 25 bp, Probe Sequence
cccacggtggtacccagtcataaat

SEQ ID NO: 193235 - DNA, 25 bp, Probe Sequence
cccacgggtgctactgcacgtaaca

SEQ ID NO: 193236 - DNA, 25 bp, Probe Sequence
ccctggtggctcaaagctagtatcc

SEQ ID NO: 193237 - DNA, 25 bp, Probe Sequence
cccatatgggcctgagttgtaccca

SEQ ID NO: 193238 - DNA, 25 bp, Probe Sequence
cccaggacgccctgttaactacact

SEQ ID NO: 193239 - DNA, 25 bp, Probe Sequence
cccaggaacttctagaataacccag

SEQ ID NO: 193240 - DNA, 25 bp, Probe Sequence
cccattgacgttcaataatacgtag

SEQ ID NO: 193241 - DNA, 25 bp, Probe Sequence
ccctagatactactcaagttacagt

SEQ ID NO: 193242 - DNA, 25 bp, Probe Sequence
cgccttaggcatgtgcaagtcccag

SEQ ID NO: 193243 - DNA, 25 bp, Probe Sequence
cgcctctttgagaccaagatcaccc

SEQ ID NO: 193244 - DNA, 25 bp, Probe Sequence
cgcgctgctgtacagccagggcagc

SEQ ID NO: 193245 - DNA, 25 bp, Probe Sequence
cgcgtcatttggacagcaggcgatg

SEQ ID NO: 193246 - DNA, 25 bp, Probe Sequence
cgcgtgccattgctgagctgggcat

SEQ ID NO: 193247 - DNA, 25 bp, Probe Sequence
cgcgtgactggttgagcgggcaggc

SEQ ID NO: 193248 - DNA, 25 bp, Probe Sequence
cccaagccgtacgtgtgtctggagt

SEQ ID NO: 193249 - DNA, 25 bp, Probe Sequence
cccagccagtactctttttggccac

SEQ ID NO: 193250 - DNA, 25 bp, Probe Sequence
cccacacagctacagctttcttgct

SEQ ID NO: 193251 - DNA, 25 bp, Probe Sequence
cgccccgtatgcttacattattgct

SEQ ID NO: 193252 - DNA, 25 bp, Probe Sequence
cgccgcctgataactggcattttgt

SEQ ID NO: 193253 - DNA, 25 bp, Probe Sequence
cgccctctcaaggctggttatttca

SEQ ID NO: 193254 - DNA, 25 bp, Probe Sequence
cgccttctgcactgctgagttgaag

SEQ ID NO: 193255 - DNA, 25 bp, Probe Sequence
cgcccattgagcaggagccatcaaa

SEQ ID NO: 193256 - DNA, 25 bp, Probe Sequence
cgcccatgctggatgaatcagtcat

SEQ ID NO: 193257 - DNA, 25 bp, Probe Sequence
cgcccatgcctgggaaggtgataga

SEQ ID NO: 193258 - DNA, 25 bp, Probe Sequence
cgccactcacggacaagagctggag

SEQ ID NO: 193259 - DNA, 25 bp, Probe Sequence
cccacatcctgtgcatcaaggacat

SEQ ID NO: 193260 - DNA, 25 bp, Probe Sequence
cccacttgctcagcagcttgggctt

SEQ ID NO: 193261 - DNA, 25 bp, Probe Sequence
cccacgtctacatgtacgtgttcat

SEQ ID NO: 193262 - DNA, 25 bp, Probe Sequence
cgccgcgtggaatgtgagtgtgttt

SEQ ID NO: 193263 - DNA, 25 bp, Probe Sequence
cgcctggtggcattggtgtggggta

SEQ ID NO: 193264 - DNA, 25 bp, Probe Sequence
cgccgtgtggactgtctgaagctgt

SEQ ID NO: 193265 - DNA, 25 bp, Probe Sequence
cgcggttgttctctggagcagcgtt

SEQ ID NO: 193266 - DNA, 25 bp, Probe Sequence
cgcgtgatggctatgccttgcacac

SEQ ID NO: 193267 - DNA, 25 bp, Probe Sequence
ccgaggactttgattgcacattgtt

SEQ ID NO: 193268 - DNA, 25 bp, Probe Sequence
ccgaggactttgattgcacattgtt

SEQ ID NO: 193269 - DNA, 25 bp, Probe Sequence
cccgccagtttggtttcattgtact

SEQ ID NO: 193270 - DNA, 25 bp, Probe Sequence
cccacacgctttttttaggtgcagg

SEQ ID NO: 193271 - DNA, 25 bp, Probe Sequence
cccaccatggttttcttcaagatat

SEQ ID NO: 193272 - DNA, 25 bp, Probe Sequence
cccacctatgtctttccaagggact

SEQ ID NO: 193273 - DNA, 25 bp, Probe Sequence
cccacttacaaacccgagggagctg

SEQ ID NO: 193274 - DNA, 25 bp, Probe Sequence
cccaccccaaggtgcgcagtgggga

SEQ ID NO: 193275 - DNA, 25 bp, Probe Sequence
cgcctctccccagggggatggggag

SEQ ID NO: 193276 - DNA, 25 bp, Probe Sequence
cgccctcaacgagcggggcgtggag

SEQ ID NO: 193277 - DNA, 25 bp, Probe Sequence
cgccccaataagcctggtgtctatg

SEQ ID NO: 193278 - DNA, 25 bp, Probe Sequence
cgccctgagcaactggtggtttgtg

SEQ ID NO: 193279 - DNA, 25 bp, Probe Sequence
cgccgcattcagctggttgaggagg

SEQ ID NO: 193280 - DNA, 25 bp, Probe Sequence
cgccgcattcagctggttgaggagg

SEQ ID NO: 193281 - DNA, 25 bp, Probe Sequence
cgcccaaactgccgttgatgtgtgg

SEQ ID NO: 193282 - DNA, 25 bp, Probe Sequence
cgccaagcccatctttgtgtgcttg

SEQ ID NO: 193283 - DNA, 25 bp, Probe Sequence
cgccatcaccgagcgcttgatgtgc

SEQ ID NO: 193284 - DNA, 25 bp, Probe Sequence
cccacagcatgaaccgcttatggcg

SEQ ID NO: 193285 - DNA, 25 bp, Probe Sequence
cccacacatgcaaaataaatggcac

SEQ ID NO: 193286 - DNA, 25 bp, Probe Sequence
cccagcactcaatgacaatctggag

SEQ ID NO: 193287 - DNA, 25 bp, Probe Sequence
cgccatgcctcggaaaattgaggaa

SEQ ID NO: 193288 - DNA, 25 bp, Probe Sequence
cgccgcccatggagaagccggaagt

SEQ ID NO: 193289 - DNA, 25 bp, Probe Sequence
ccccctttgggatgctgggaatgtc

SEQ ID NO: 193290 - DNA, 25 bp, Probe Sequence
cccaactgttggcaggggagtccct

SEQ ID NO: 193291 - DNA, 25 bp, Probe Sequence
cccacaccctgccataggggcagtc

SEQ ID NO: 193292 - DNA, 25 bp, Probe Sequence
cccaacgccatgaatgcggccgaga

SEQ ID NO: 193293 - DNA, 25 bp, Probe Sequence
cgccaaggccatgatgctgcgggca

SEQ ID NO: 193294 - DNA, 25 bp, Probe Sequence
cgcccatgtggtggctgatcggcgc

SEQ ID NO: 193295 - DNA, 25 bp, Probe Sequence
cccagatgcaggaggataggcgttg

SEQ ID NO: 193296 - DNA, 25 bp, Probe Sequence
cccagacagcggggatccggatggc

SEQ ID NO: 193297 - DNA, 25 bp, Probe Sequence
cccacaccagggcaccctaagaggg

SEQ ID NO: 193298 - DNA, 25 bp, Probe Sequence
cccacacccagtaacatccggatgg

SEQ ID NO: 193299 - DNA, 25 bp, Probe Sequence
cccactgccgagcaattccaggaag

SEQ ID NO: 193300 - DNA, 25 bp, Probe Sequence
cccagtggagtctcttcctatgtgg

SEQ ID NO: 193301 - DNA, 25 bp, Probe Sequence
cccagtcggctctggttgttggcag

SEQ ID NO: 193302 - DNA, 25 bp, Probe Sequence
cccagtcggctctggttgttggcag

SEQ ID NO: 193303 - DNA, 25 bp, Probe Sequence
cccagtcggctctggttgttggcag

SEQ ID NO: 193304 - DNA, 25 bp, Probe Sequence
cccagagggtcgggcaggttgacat

SEQ ID NO: 193305 - DNA, 25 bp, Probe Sequence
cccaagtgcaacaaggaggtgtact

SEQ ID NO: 193306 - DNA, 25 bp, Probe Sequence
cccaaggctggcaaggatagatcta

SEQ ID NO: 193307 - DNA, 25 bp, Probe Sequence
cgcccagagtggtggatggactacc

SEQ ID NO: 193308 - DNA, 25 bp, Probe Sequence
cccactgagtgaggctggggacctc

SEQ ID NO: 193309 - DNA, 25 bp, Probe Sequence
cccgcaagcaggcagtgggacctgg

SEQ ID NO: 193310 - DNA, 25 bp, Probe Sequence
cgccgcgagccagaggatggagccg

SEQ ID NO: 193311 - DNA, 25 bp, Probe Sequence
cccagccaccactgtgatgcgaaat

SEQ ID NO: 193312 - DNA, 25 bp, Probe Sequence
cccacagctccatggtaggagtcaa

SEQ ID NO: 193313 - DNA, 25 bp, Probe Sequence
cccacagtccattgtgaagtgtgct

SEQ ID NO: 193314 - DNA, 25 bp, Probe Sequence
cccacttccattgtattgtctgaca

SEQ ID NO: 193315 - DNA, 25 bp, Probe Sequence
cgcccctacatggcgtatcttcaga

SEQ ID NO: 193316 - DNA, 25 bp, Probe Sequence
cgcccctacatggcttatcttatga

SEQ ID NO: 193317 - DNA, 25 bp, Probe Sequence
cgcccactaagccaatcactttatt

SEQ ID NO: 193318 - DNA, 25 bp, Probe Sequence
cccacctatgtgccaactgttgtaa

SEQ ID NO: 193319 - DNA, 25 bp, Probe Sequence
cccagctgagatggacagatcgttg

SEQ ID NO: 193320 - DNA, 25 bp, Probe Sequence
cccagtggtctgtgaggttgcaggc

SEQ ID NO: 193321 - DNA, 25 bp, Probe Sequence
cccaggcagaaatagttgtctgtgc

SEQ ID NO: 193322 - DNA, 25 bp, Probe Sequence
cgccaaggacagtgggttctgtgtc

SEQ ID NO: 193323 - DNA, 25 bp, Probe Sequence
cgccaagggacgtgtttctgcgctc

SEQ ID NO: 193324 - DNA, 25 bp, Probe Sequence
cccacggaacggaattcttcagctc

SEQ ID NO: 193325 - DNA, 25 bp, Probe Sequence
cccatgctaacctgtaatcccagct

SEQ ID NO: 193326 - DNA, 25 bp, Probe Sequence
cccactaaatattgtaatcctaatt

SEQ ID NO: 193327 - DNA, 25 bp, Probe Sequence
cccagagtaattttaaagcttctat

SEQ ID NO: 193328 - DNA, 25 bp, Probe Sequence
ccctcatttttctgtaggtttactg

SEQ ID NO: 193329 - DNA, 25 bp, Probe Sequence
cccttgttttttgaaggctctgact

SEQ ID NO: 193330 - DNA, 25 bp, Probe Sequence
cccaccttttcttctaatgagtcga

SEQ ID NO: 193331 - DNA, 25 bp, Probe Sequence
cccaccgactgtgtgctgatcagag

SEQ ID NO: 193332 - DNA, 25 bp, Probe Sequence
cccacaggacggtttatgagcacac

SEQ ID NO: 193333 - DNA, 25 bp, Probe Sequence
cccaaggacaggcttcagcatcagc

SEQ ID NO: 193334 - DNA, 25 bp, Probe Sequence
cccagaggttagctatgcagcccac

SEQ ID NO: 193335 - DNA, 25 bp, Probe Sequence
cccaagtgataacttcgaagccata

SEQ ID NO: 193336 - DNA, 25 bp, Probe Sequence
ccgaagttatggaccgctagcatct

SEQ ID NO: 193337 - DNA, 25 bp, Probe Sequence
cccaagttatggtgtgctctgagcg

SEQ ID NO: 193338 - DNA, 25 bp, Probe Sequence
cccaagttgggggtcagtgctgcct

SEQ ID NO: 193339 - DNA, 25 bp, Probe Sequence
cccagggtgggtgtctggcacccag

SEQ ID NO: 193340 - DNA, 25 bp, Probe Sequence
cccagggtgggtacttggatgaaca

SEQ ID NO: 193341 - DNA, 25 bp, Probe Sequence
cccattgggcggtttcaggaacata

SEQ ID NO: 193342 - DNA, 25 bp, Probe Sequence
cccagtgctggagacgtcgtaaata

SEQ ID NO: 193343 - DNA, 25 bp, Probe Sequence
cccaggtgctgagtgaaagcgaaga

SEQ ID NO: 193344 - DNA, 25 bp, Probe Sequence
cccagcgctcttcgaatcgcgaaga

SEQ ID NO: 193345 - DNA, 25 bp, Probe Sequence
cccagtcacttgcaaccgtggagga

SEQ ID NO: 193346 - DNA, 25 bp, Probe Sequence
cccactcactgtgaagcccaaggag

SEQ ID NO: 193347 - DNA, 25 bp, Probe Sequence
cccagccaggttcagtggcagtggg

SEQ ID NO: 193348 - DNA, 25 bp, Probe Sequence
cccaccaggtcttcatgtcaagaga

SEQ ID NO: 193349 - DNA, 25 bp, Probe Sequence
cccatattggtcccttgacattgac

SEQ ID NO: 193350 - DNA, 25 bp, Probe Sequence
cccaatccagatgtctatgatcatt

SEQ ID NO: 193351 - DNA, 25 bp, Probe Sequence
cccaccgctatggtctatctatgat

SEQ ID NO: 193352 - DNA, 25 bp, Probe Sequence
cccaccctatacacatcataatctc

SEQ ID NO: 193353 - DNA, 25 bp, Probe Sequence
cgccccatctcatgagactcaatat

SEQ ID NO: 193354 - DNA, 25 bp, Probe Sequence
cgcccgcctcattgagttctataag

SEQ ID NO: 193355 - DNA, 25 bp, Probe Sequence
cccaccactcaaagtgcctctaaag

SEQ ID NO: 193356 - DNA, 25 bp, Probe Sequence
cccacctcttaatttcttgtcaagt

SEQ ID NO: 193357 - DNA, 25 bp, Probe Sequence
cccacctcatcccattttttaagtg

SEQ ID NO: 193358 - DNA, 25 bp, Probe Sequence
cccacctcatcccattttttaagtg

SEQ ID NO: 193359 - DNA, 25 bp, Probe Sequence
cccacttagcttcctaatttggagg

SEQ ID NO: 193360 - DNA, 25 bp, Probe Sequence
cccacatttgggaaagttcttgatg

SEQ ID NO: 193361 - DNA, 25 bp, Probe Sequence
cccacagttgggcagaatcatctaa

SEQ ID NO: 193362 - DNA, 25 bp, Probe Sequence
cccacaggttgtcattacttaatta

SEQ ID NO: 193363 - DNA, 25 bp, Probe Sequence
cccaaggctcttctgtaacatcttt

SEQ ID NO: 193364 - DNA, 25 bp, Probe Sequence
cccacagtgctcagttgtacttttt

SEQ ID NO: 193365 - DNA, 25 bp, Probe Sequence
cgccacgtgctccaggattgactgg

SEQ ID NO: 193366 - DNA, 25 bp, Probe Sequence
cgccatgcctggccataatctacat

SEQ ID NO: 193367 - DNA, 25 bp, Probe Sequence
cgccatctctgtgtatgatctcgtg

SEQ ID NO: 193368 - DNA, 25 bp, Probe Sequence
cgccatctctgtgtatgatctcgtg

SEQ ID NO: 193369 - DNA, 25 bp, Probe Sequence
cccatctatgggaagagccgttcag

SEQ ID NO: 193370 - DNA, 25 bp, Probe Sequence
cccagtttggattccccaatgcagc

SEQ ID NO: 193371 - DNA, 25 bp, Probe Sequence
cccatgaagtgggtgccccactcac

SEQ ID NO: 193372 - DNA, 25 bp, Probe Sequence
cccatatttgtggtccccattttgg

SEQ ID NO: 193373 - DNA, 25 bp, Probe Sequence
cccacgatggtgaacctcctgttag

SEQ ID NO: 193374 - DNA, 25 bp, Probe Sequence
cccacaaggagtcccttgcgggaag

SEQ ID NO: 193375 - DNA, 25 bp, Probe Sequence
cccagaagtggtccgcaagatggga

SEQ ID NO: 193376 - DNA, 25 bp, Probe Sequence
cccagcaggtgtttggcatcgatgc

SEQ ID NO: 193377 - DNA, 25 bp, Probe Sequence
cgcccatgttgtatgacacatatag

SEQ ID NO: 193378 - DNA, 25 bp, Probe Sequence
cccacagatcccatctcaaatcatt

SEQ ID NO: 193379 - DNA, 25 bp, Probe Sequence
cccactgcccaatctagaatatgtc

SEQ ID NO: 193380 - DNA, 25 bp, Probe Sequence
ccctctactcagaattcaagaactc

SEQ ID NO: 193381 - DNA, 25 bp, Probe Sequence
cccactcagtaggtctgaaggcctc

SEQ ID NO: 193382 - DNA, 25 bp, Probe Sequence
cccactgcattttctggaaggacac

SEQ ID NO: 193383 - DNA, 25 bp, Probe Sequence
cccaagtcggacagaaggcccatga

SEQ ID NO: 193384 - DNA, 25 bp, Probe Sequence
cccaggtcgggagacagcagctttg

SEQ ID NO: 193385 - DNA, 25 bp, Probe Sequence
cccgcagtcttacacaacagtttca

SEQ ID NO: 193386 - DNA, 25 bp, Probe Sequence
cgccggcctcaagatcagacatggc

SEQ ID NO: 193387 - DNA, 25 bp, Probe Sequence
cgccggcttccatggcaacagatgc

SEQ ID NO: 193388 - DNA, 25 bp, Probe Sequence
cgcccggaacattgtggcagccatg

SEQ ID NO: 193389 - DNA, 25 bp, Probe Sequence
cccagggacagcaattcacagcctg

SEQ ID NO: 193390 - DNA, 25 bp, Probe Sequence
cccacggcatcagctatgagaccat

SEQ ID NO: 193391 - DNA, 25 bp, Probe Sequence
cccacagcccaagcagatagctcat

SEQ ID NO: 193392 - DNA, 25 bp, Probe Sequence
cccacatcctcaggctcagaaggga

SEQ ID NO: 193393 - DNA, 25 bp, Probe Sequence
cccaaggctgcatctgcaaaggggc

SEQ ID NO: 193394 - DNA, 25 bp, Probe Sequence
cgccgagtgcctatcagagaaggag

SEQ ID NO: 193395 - DNA, 25 bp, Probe Sequence
cgccgagtggctcagtgacacggag

SEQ ID NO: 193396 - DNA, 25 bp, Probe Sequence
cgccccacagataagctacaccggg

SEQ ID NO: 193397 - DNA, 25 bp, Probe Sequence
cgcctgctccaaaagctcagaaggg

SEQ ID NO: 193398 - DNA, 25 bp, Probe Sequence
cgcctgctccaaaagctcagaaggg

SEQ ID NO: 193399 - DNA, 25 bp, Probe Sequence
cgccagctcctgcaagtgcaaagag

SEQ ID NO: 193400 - DNA, 25 bp, Probe Sequence
cgcctgctgccacagggtcaaagga

SEQ ID NO: 193401 - DNA, 25 bp, Probe Sequence
cgcctggccaccacagagaagaaga

SEQ ID NO: 193402 - DNA, 25 bp, Probe Sequence
cgcctggccaccacagagaagaaga

SEQ ID NO: 193403 - DNA, 25 bp, Probe Sequence
cgcctgggaagcacaacgacattga

SEQ ID NO: 193404 - DNA, 25 bp, Probe Sequence
cgcccgggagaagagcgccggcaag

SEQ ID NO: 193405 - DNA, 25 bp, Probe Sequence
cccgtgggaaacaggtcttgaagct

SEQ ID NO: 193406 - DNA, 25 bp, Probe Sequence
cccagggcttgaactaggatttgag

SEQ ID NO: 193407 - DNA, 25 bp, Probe Sequence
cccagggcttctggctagaacccga

SEQ ID NO: 193408 - DNA, 25 bp, Probe Sequence
cccacagagcctcagtaaacccatg

SEQ ID NO: 193409 - DNA, 25 bp, Probe Sequence
cccagaaatgcccagtaatcacctc

SEQ ID NO: 193410 - DNA, 25 bp, Probe Sequence
cccagcacagtgcaagcaaacacct

SEQ ID NO: 193411 - DNA, 25 bp, Probe Sequence
cccagatgcatccgagacagaacat

SEQ ID NO: 193412 - DNA, 25 bp, Probe Sequence
cgccatggatgcagcagcctgaaac

SEQ ID NO: 193413 - DNA, 25 bp, Probe Sequence
cgccgcacatcatcagcgcgcaaga

SEQ ID NO: 193414 - DNA, 25 bp, Probe Sequence
cgcctgccataagccgcaagacatg

SEQ ID NO: 193415 - DNA, 25 bp, Probe Sequence
ccgagctataaacctccagaatatt

SEQ ID NO: 193416 - DNA, 25 bp, Probe Sequence
cccagaaataaccccgtgcatatat

SEQ ID NO: 193417 - DNA, 25 bp, Probe Sequence
cccttcctagacacctggttgattg

SEQ ID NO: 193418 - DNA, 25 bp, Probe Sequence
ccctctttgtaaggccttgtatgtg

SEQ ID NO: 193419 - DNA, 25 bp, Probe Sequence
cccactgttgtatacgcttattgag

SEQ ID NO: 193420 - DNA, 25 bp, Probe Sequence
cccacatgtggaagaacctttaatc

SEQ ID NO: 193421 - DNA, 25 bp, Probe Sequence
ccgcactgtgagatgctcatcctgt

SEQ ID NO: 193422 - DNA, 25 bp, Probe Sequence
cccaatgctcaggagcttcctagca

SEQ ID NO: 193423 - DNA, 25 bp, Probe Sequence
cccaatgtcagtaggaatcttggaa

SEQ ID NO: 193424 - DNA, 25 bp, Probe Sequence
cccaagtcacttgtccatggcgaag

SEQ ID NO: 193425 - DNA, 25 bp, Probe Sequence
cccataaacgaggtactgcaggaag

SEQ ID NO: 193426 - DNA, 25 bp, Probe Sequence
cccaaaccgcagactacatctttag

SEQ ID NO: 193427 - DNA, 25 bp, Probe Sequence
cccaaccttcaggcaacactttaag

SEQ ID NO: 193428 - DNA, 25 bp, Probe Sequence
cccacttcgtcaatagacactttgc

SEQ ID NO: 193429 - DNA, 25 bp, Probe Sequence
cccacattggccagtggactcatcc

SEQ ID NO: 193430 - DNA, 25 bp, Probe Sequence
cccagacagacctagggacttccta

SEQ ID NO: 193431 - DNA, 25 bp, Probe Sequence
cccagaaggccgaaggtttccattg

SEQ ID NO: 193432 - DNA, 25 bp, Probe Sequence
cccagaaggacgaaccaattttgat

SEQ ID NO: 193433 - DNA, 25 bp, Probe Sequence
cccagagggacgacggcgtctttgt

SEQ ID NO: 193434 - DNA, 25 bp, Probe Sequence
cccagcagggggaggcaatcccttc

SEQ ID NO: 193435 - DNA, 25 bp, Probe Sequence
cgccagagtgatggggcgagactcc

SEQ ID NO: 193436 - DNA, 25 bp, Probe Sequence
cgccaagatgatgtgcggggcgccc

SEQ ID NO: 193437 - DNA, 25 bp, Probe Sequence
cgcctagagctggtgctggaagccc

SEQ ID NO: 193438 - DNA, 25 bp, Probe Sequence
cgcctcatgcaggtgtggtgcgacc

SEQ ID NO: 193439 - DNA, 25 bp, Probe Sequence
cgcctgcagcaggcgagtgtgcagg

SEQ ID NO: 193440 - DNA, 25 bp, Probe Sequence
cgcctgctgagccagcttgagaggg

SEQ ID NO: 193441 - DNA, 25 bp, Probe Sequence
cgccatgtgatcctctctgagatca

SEQ ID NO: 193442 - DNA, 25 bp, Probe Sequence
cgccatgctgtctctagactttttg

SEQ ID NO: 193443 - DNA, 25 bp, Probe Sequence
cgccatgattgctgctggacttgtt

SEQ ID NO: 193444 - DNA, 25 bp, Probe Sequence
cgcctggtgcagcgaacttctgttc

SEQ ID NO: 193445 - DNA, 25 bp, Probe Sequence
cgcctggccagaagacatgatttta

SEQ ID NO: 193446 - DNA, 25 bp, Probe Sequence
cgcctggccgatggtactatttaga

SEQ ID NO: 193447 - DNA, 25 bp, Probe Sequence
cgcctttcagaacgcctatttggag

SEQ ID NO: 193448 - DNA, 25 bp, Probe Sequence
cccaaatgcaggccctccatttggg

SEQ ID NO: 193449 - DNA, 25 bp, Probe Sequence
cccacactcaggtgatcgagttgga

SEQ ID NO: 193450 - DNA, 25 bp, Probe Sequence
cgccatcctcatgacatcatcgatg

SEQ ID NO: 193451 - DNA, 25 bp, Probe Sequence
cccaactgcagccaatcgcatggag

SEQ ID NO: 193452 - DNA, 25 bp, Probe Sequence
cccaccacatgaacccaggagagac

SEQ ID NO: 193453 - DNA, 25 bp, Probe Sequence
cccaacaagcacaaccggctgtaca

SEQ ID NO: 193454 - DNA, 25 bp, Probe Sequence
cgccaagattcaacaccttgagttc

SEQ ID NO: 193455 - DNA, 25 bp, Probe Sequence
cccagagactcttgacaccggtctc

SEQ ID NO: 193456 - DNA, 25 bp, Probe Sequence
ccctggtgtgcaggaaccgggctca

SEQ ID NO: 193457 - DNA, 25 bp, Probe Sequence
ccctggcttggccaaatcgtcttca

SEQ ID NO: 193458 - DNA, 25 bp, Probe Sequence
cccatgccttgactaggacgattct

SEQ ID NO: 193459 - DNA, 25 bp, Probe Sequence
cccactttgaatggaacgtgtccca

SEQ ID NO: 193460 - DNA, 25 bp, Probe Sequence
cccccttgtcagagcaagtgtcccc

SEQ ID NO: 193461 - DNA, 25 bp, Probe Sequence
cccccaactatgaccatgtggtcct

SEQ ID NO: 193462 - DNA, 25 bp, Probe Sequence
cccacactacacagacagtggccct

SEQ ID NO: 193463 - DNA, 25 bp, Probe Sequence
cccacacatagccaacatcgggcgc

SEQ ID NO: 193464 - DNA, 25 bp, Probe Sequence
cgccacagacaccacaacaggagac

SEQ ID NO: 193465 - DNA, 25 bp, Probe Sequence
cccacatgcctgcagtacacagaac

SEQ ID NO: 193466 - DNA, 25 bp, Probe Sequence
cccacagccttggaaacagacctcc

SEQ ID NO: 193467 - DNA, 25 bp, Probe Sequence
ccctggcactggcaaacagggcctc

SEQ ID NO: 193468 - DNA, 25 bp, Probe Sequence
ccctggcactggcaaacagggcctc

SEQ ID NO: 193469 - DNA, 25 bp, Probe Sequence
cccaggcctgcccaaagagaagcca

SEQ ID NO: 193470 - DNA, 25 bp, Probe Sequence
cccagggcttcacagaggataccat

SEQ ID NO: 193471 - DNA, 25 bp, Probe Sequence
cccagtggcttccggaagttcctgg

SEQ ID NO: 193472 - DNA, 25 bp, Probe Sequence
cccaatatgctacgggaagttgagg

SEQ ID NO: 193473 - DNA, 25 bp, Probe Sequence
cccatgtagccaccggaggtggcaa

SEQ ID NO: 193474 - DNA, 25 bp, Probe Sequence
cccagtacctccaagcaagtagctt

SEQ ID NO: 193475 - DNA, 25 bp, Probe Sequence
cccaggcatacttgaaggagccctt

SEQ ID NO: 193476 - DNA, 25 bp, Probe Sequence
cccaggaactcagagaggcgcggcc

SEQ ID NO: 193477 - DNA, 25 bp, Probe Sequence
cccaggttccaggaggggcgtgaat

SEQ ID NO: 193478 - DNA, 25 bp, Probe Sequence
cccaggtctccagacatctagggac

SEQ ID NO: 193479 - DNA, 25 bp, Probe Sequence
cccagactctcctaacactaaactg

SEQ ID NO: 193480 - DNA, 25 bp, Probe Sequence
cccagatttcagtgaactaatacac

SEQ ID NO: 193481 - DNA, 25 bp, Probe Sequence
cccatgaattcctgttctagatctc

SEQ ID NO: 193482 - DNA, 25 bp, Probe Sequence
cgcctcttattctgcgttagcatct

SEQ ID NO: 193483 - DNA, 25 bp, Probe Sequence
cccagcattatacttggttcatgat

SEQ ID NO: 193484 - DNA, 25 bp, Probe Sequence
cccagaatctgggctggtgtctttg

SEQ ID NO: 193485 - DNA, 25 bp, Probe Sequence
cccaagattgtggttgccattctgg

SEQ ID NO: 193486 - DNA, 25 bp, Probe Sequence
cccacgatattggattcttattgga

SEQ ID NO: 193487 - DNA, 25 bp, Probe Sequence
cgccagtttggtttcattgtactga

SEQ ID NO: 193488 - DNA, 25 bp, Probe Sequence
cccaatttggcttcaaaaatctgaa

SEQ ID NO: 193489 - DNA, 25 bp, Probe Sequence
cccaatccaacttcagagaacctga

SEQ ID NO: 193490 - DNA, 25 bp, Probe Sequence
gccactattaaatgcagggcctaca

SEQ ID NO: 193491 - DNA, 25 bp, Probe Sequence
ccctaatcaaatatgggcaccaagg

SEQ ID NO: 193492 - DNA, 25 bp, Probe Sequence
ccctgaaccaagatcctgaacaaga

SEQ ID NO: 193493 - DNA, 25 bp, Probe Sequence
cgcctgcagacccaggtcttcaagc

SEQ ID NO: 193494 - DNA, 25 bp, Probe Sequence
cccagaccccaggatttcagagttg

SEQ ID NO: 193495 - DNA, 25 bp, Probe Sequence
cccaacatccccttgtacagatgat

SEQ ID NO: 193496 - DNA, 25 bp, Probe Sequence
cccaactgccagctctgaactgagt

SEQ ID NO: 193497 - DNA, 25 bp, Probe Sequence
cccaatctccatctgtcaacagggg

SEQ ID NO: 193498 - DNA, 25 bp, Probe Sequence
cccaattcctacttcatggatgtga

SEQ ID NO: 193499 - DNA, 25 bp, Probe Sequence
cccacaccactaacacagagagtaa

SEQ ID NO: 193500 - DNA, 25 bp, Probe Sequence
cccacccgccttgtgagatggaatc

SEQ ID NO: 193501 - DNA, 25 bp, Probe Sequence
cccacagagcccctgtttgggaatt

SEQ ID NO: 193502 - DNA, 25 bp, Probe Sequence
cccactctggcctttcttgggaatt

SEQ ID NO: 193503 - DNA, 25 bp, Probe Sequence
cccagactggtcttccacatgggag

SEQ ID NO: 193504 - DNA, 25 bp, Probe Sequence
cgccacgtgttgctcagacagggtg

SEQ ID NO: 193505 - DNA, 25 bp, Probe Sequence
cgcctagctcttgtcacaggtggtg

SEQ ID NO: 193506 - DNA, 25 bp, Probe Sequence
cgcctttctcacgatcaagggcgcc

SEQ ID NO: 193507 - DNA, 25 bp, Probe Sequence
cgcctttctattccacaaagctgcc

SEQ ID NO: 193508 - DNA, 25 bp, Probe Sequence
cccatagttacgtccaatagtgact

SEQ ID NO: 193509 - DNA, 25 bp, Probe Sequence
cccacagtgatgatgtcgagatcgg

SEQ ID NO: 193510 - DNA, 25 bp, Probe Sequence
cccacatctgcaactgggtgtcggc

SEQ ID NO: 193511 - DNA, 25 bp, Probe Sequence
cccacttgcacatcggaatcggtcg

SEQ ID NO: 193512 - DNA, 25 bp, Probe Sequence
cccacatctgcccactgaagatttg

SEQ ID NO: 193513 - DNA, 25 bp, Probe Sequence
cccacatcacctgctacatgatggc

SEQ ID NO: 193514 - DNA, 25 bp, Probe Sequence
cccacacagccagcttatagtccta

SEQ ID NO: 193515 - DNA, 25 bp, Probe Sequence
cccaaagctcagacttgccaggctc

SEQ ID NO: 193516 - DNA, 25 bp, Probe Sequence
cccaccagctcaaattccgagtgca

SEQ ID NO: 193517 - DNA, 25 bp, Probe Sequence
ccctctgcagcagaacttccaggac

SEQ ID NO: 193518 - DNA, 25 bp, Probe Sequence
cccaatagcactttcattgccagtg

SEQ ID NO: 193519 - DNA, 25 bp, Probe Sequence
cccacattcatccttgaagtccggg

SEQ ID NO: 193520 - DNA, 25 bp, Probe Sequence
cccacatgtatccgggataaccggg

SEQ ID NO: 193521 - DNA, 25 bp, Probe Sequence
cccaatgtacctataagaaatgtgc

SEQ ID NO: 193522 - DNA, 25 bp, Probe Sequence
cccaatggacacactccaaaatggc

SEQ ID NO: 193523 - DNA, 25 bp, Probe Sequence
cccacagggcacagcctaactatgg

SEQ ID NO: 193524 - DNA, 25 bp, Probe Sequence
cccacgtgaagccagcctaactgag

SEQ ID NO: 193525 - DNA, 25 bp, Probe Sequence
cccacggacacaccatgataaggac

SEQ ID NO: 193526 - DNA, 25 bp, Probe Sequence
cgccaggaacaaattgcgaagagac

SEQ ID NO: 193527 - DNA, 25 bp, Probe Sequence
cctcaggaaatggttgtgaagtttc

SEQ ID NO: 193528 - DNA, 25 bp, Probe Sequence
cccagtgcaagtatttgaagggtgc

SEQ ID NO: 193529 - DNA, 25 bp, Probe Sequence
cccagtgcaggtatttcagaaggag

SEQ ID NO: 193530 - DNA, 25 bp, Probe Sequence
cccagacaggtggttgtagcaggtg

SEQ ID NO: 193531 - DNA, 25 bp, Probe Sequence
cccaaagttgtcttctcaagtgatg

SEQ ID NO: 193532 - DNA, 25 bp, Probe Sequence
cccaaagatcttggtgctccatctg

SEQ ID NO: 193533 - DNA, 25 bp, Probe Sequence
cccaaactgtctggcagtcactgct

SEQ ID NO: 193534 - DNA, 25 bp, Probe Sequence
cccaaacttcgtcggcagatctaca

SEQ ID NO: 193535 - DNA, 25 bp, Probe Sequence
cccaagtcccacaagggattacagg

SEQ ID NO: 193536 - DNA, 25 bp, Probe Sequence
cgccaagaccccaaggagatctaca

SEQ ID NO: 193537 - DNA, 25 bp, Probe Sequence
cccagagcttcccgatggagagtac

SEQ ID NO: 193538 - DNA, 25 bp, Probe Sequence
cccaagtgtcccctggagagcaaga

SEQ ID NO: 193539 - DNA, 25 bp, Probe Sequence
cccaagtgtcccctggagagcaaga

SEQ ID NO: 193540 - DNA, 25 bp, Probe Sequence
cccaaaatgtcccttgctcagaaga

SEQ ID NO: 193541 - DNA, 25 bp, Probe Sequence
cccaaaatgtcccttgctcagaaga

SEQ ID NO: 193542 - DNA, 25 bp, Probe Sequence
cccaaggaaccacatctcagcaggt

SEQ ID NO: 193543 - DNA, 25 bp, Probe Sequence
cccacaggacttcgcagatgtcaca

SEQ ID NO: 193544 - DNA, 25 bp, Probe Sequence
cccagcaaagccacaatgtacttcc

SEQ ID NO: 193545 - DNA, 25 bp, Probe Sequence
cccacaaacattactactttatctc

SEQ ID NO: 193546 - DNA, 25 bp, Probe Sequence
cccaccaattattcattttggacct

SEQ ID NO: 193547 - DNA, 25 bp, Probe Sequence
cccatcacaattcaactttgtccca

SEQ ID NO: 193548 - DNA, 25 bp, Probe Sequence
cccagagaagtagatcatgtttcca

SEQ ID NO: 193549 - DNA, 25 bp, Probe Sequence
cccaggagcagctgggggttccacc

SEQ ID NO: 193550 - DNA, 25 bp, Probe Sequence
cccatgtgacagtgacggggtcccc

SEQ ID NO: 193551 - DNA, 25 bp, Probe Sequence
cccagagatcaggtgtccagggctc

SEQ ID NO: 193552 - DNA, 25 bp, Probe Sequence
cccagagacgctggtcaacctcatc

SEQ ID NO: 193553 - DNA, 25 bp, Probe Sequence
ccacagggccttgaatccttttttg

SEQ ID NO: 193554 - DNA, 25 bp, Probe Sequence
cccaggttcagtgaatcctcctaat

SEQ ID NO: 193555 - DNA, 25 bp, Probe Sequence
cccaggaatctgtccttcttcctga

SEQ ID NO: 193556 - DNA, 25 bp, Probe Sequence
cccaggatttccacatcttggtgaa

SEQ ID NO: 193557 - DNA, 25 bp, Probe Sequence
cccacttcttccagcagctgggcta

SEQ ID NO: 193558 - DNA, 25 bp, Probe Sequence
cccacttcttccagcagctgggcta

SEQ ID NO: 193559 - DNA, 25 bp, Probe Sequence
cccacttctgccgaatgactctggc

SEQ ID NO: 193560 - DNA, 25 bp, Probe Sequence
cgccactgtgtgaaactgtatctgc

SEQ ID NO: 193561 - DNA, 25 bp, Probe Sequence
cgcctctactgatacatgtctgtgt

SEQ ID NO: 193562 - DNA, 25 bp, Probe Sequence
cgccttcataattgcactgctcttt

SEQ ID NO: 193563 - DNA, 25 bp, Probe Sequence
ccgtttaaagacccttgccaatcag

SEQ ID NO: 193564 - DNA, 25 bp, Probe Sequence
ccttcctttaatcttatgcaaaaga

SEQ ID NO: 193565 - DNA, 25 bp, Probe Sequence
cccaccttttctcttcaggaaatat

SEQ ID NO: 193566 - DNA, 25 bp, Probe Sequence
cccagtcattttgcggtgaaaacat

SEQ ID NO: 193567 - DNA, 25 bp, Probe Sequence
cccaccttgtctgctaaataaacat

SEQ ID NO: 193568 - DNA, 25 bp, Probe Sequence
cctgtcccgtttgactttacacata

SEQ ID NO: 193569 - DNA, 25 bp, Probe Sequence
ccctcccaatttgaactgttcaaat

SEQ ID NO: 193570 - DNA, 25 bp, Probe Sequence
tccccccttggagaagctttacgat

SEQ ID NO: 193571 - DNA, 25 bp, Probe Sequence
cccagcccaagtccaaatgtttacg

SEQ ID NO: 193572 - DNA, 25 bp, Probe Sequence
cccagcccagagagacgctgctttt

SEQ ID NO: 193573 - DNA, 25 bp, Probe Sequence
cccaccacaactaacaatgccttgt

SEQ ID NO: 193574 - DNA, 25 bp, Probe Sequence
cccactgccaggctacacagttggt

SEQ ID NO: 193575 - DNA, 25 bp, Probe Sequence
cccaaccagggttccctgctgaggc

SEQ ID NO: 193576 - DNA, 25 bp, Probe Sequence
cccacaccacggtatctactggatt

SEQ ID NO: 193577 - DNA, 25 bp, Probe Sequence
cccacccagctctgagttcatggat

SEQ ID NO: 193578 - DNA, 25 bp, Probe Sequence
cccaccggcactcagttatgcagat

SEQ ID NO: 193579 - DNA, 25 bp, Probe Sequence
cccacacgagaacatgcctcttgca

SEQ ID NO: 193580 - DNA, 25 bp, Probe Sequence
cccacaggatgacctcatgctcatc

SEQ ID NO: 193581 - DNA, 25 bp, Probe Sequence
cccagccatgtacgttgctatccag

SEQ ID NO: 193582 - DNA, 25 bp, Probe Sequence
cccagccagagatgctcaattcctg

SEQ ID NO: 193583 - DNA, 25 bp, Probe Sequence
cccatctcgatatttccaatcctgg

SEQ ID NO: 193584 - DNA, 25 bp, Probe Sequence
cccaccttagttccacatttggctg

SEQ ID NO: 193585 - DNA, 25 bp, Probe Sequence
cccacacttgtgattacgcgggctg

SEQ ID NO: 193586 - DNA, 25 bp, Probe Sequence
cgccatcctgggagccaggggtctg

SEQ ID NO: 193587 - DNA, 25 bp, Probe Sequence
cccagcctgggtgcacagtagctgc

SEQ ID NO: 193588 - DNA, 25 bp, Probe Sequence
cccagcccaggtgcaagcacagtga

SEQ ID NO: 193589 - DNA, 25 bp, Probe Sequence
cccacctcaacctaagaagtccaag

SEQ ID NO: 193590 - DNA, 25 bp, Probe Sequence
cccaccataacccaaggcaaacaat

SEQ ID NO: 193591 - DNA, 25 bp, Probe Sequence
cccaggaaaactcagtgcagtccag

SEQ ID NO: 193592 - DNA, 25 bp, Probe Sequence
cccaatacaaaacccatacatccag

SEQ ID NO: 193593 - DNA, 25 bp, Probe Sequence
tcctttaccgaatccaacttatgtt

SEQ ID NO: 193594 - DNA, 25 bp, Probe Sequence
cctagttcttgatctgccaactttc

SEQ ID NO: 193595 - DNA, 25 bp, Probe Sequence
cccttccttgatattgcacctttgg

SEQ ID NO: 193596 - DNA, 25 bp, Probe Sequence
cccttgcaatcgatttctctttagt

SEQ ID NO: 193597 - DNA, 25 bp, Probe Sequence
cccttggacgcaatgggccgttagc

SEQ ID NO: 193598 - DNA, 25 bp, Probe Sequence
cccatttgaaattgctggcgctgct

SEQ ID NO: 193599 - DNA, 25 bp, Probe Sequence
cccaattctgataggctgacctctc

SEQ ID NO: 193600 - DNA, 25 bp, Probe Sequence
cccaatgtcttcatcagcacattca

SEQ ID NO: 193601 - DNA, 25 bp, Probe Sequence
cccacactgcttaatggccacatgc

SEQ ID NO: 193602 - DNA, 25 bp, Probe Sequence
cccacatgtgctttgcagaggccag

SEQ ID NO: 193603 - DNA, 25 bp, Probe Sequence
cccacagtgctgtctgatctgtgct

SEQ ID NO: 193604 - DNA, 25 bp, Probe Sequence
cccatgcagatggcagctcaagtgt

SEQ ID NO: 193605 - DNA, 25 bp, Probe Sequence
cccagagggcagccatagtgtgccg

SEQ ID NO: 193606 - DNA, 25 bp, Probe Sequence
cgccaggcttgagtccagtggcgca

SEQ ID NO: 193607 - DNA, 25 bp, Probe Sequence
cgccacgttggcggctgtgtggcat

SEQ ID NO: 193608 - DNA, 25 bp, Probe Sequence
cccacgtgctggtgcaggtcagtat

SEQ ID NO: 193609 - DNA, 25 bp, Probe Sequence
cccactgcgggaggacttcagtctg

SEQ ID NO: 193610 - DNA, 25 bp, Probe Sequence
cccactgatgcccaaactgtcagac

SEQ ID NO: 193611 - DNA, 25 bp, Probe Sequence
cccattgaccgccaattgggccggt

SEQ ID NO: 193612 - DNA, 25 bp, Probe Sequence
cctcttacttcaatttgaacccatt

SEQ ID NO: 193613 - DNA, 25 bp, Probe Sequence
cccttttctggtgggtgacccagtg

SEQ ID NO: 193614 - DNA, 25 bp, Probe Sequence
ccctaccttttgtggaaccagtgat

SEQ ID NO: 193615 - DNA, 25 bp, Probe Sequence
cccaatccgctttgttttacacagt

SEQ ID NO: 193616 - DNA, 25 bp, Probe Sequence
cccacatttctcatttggtaatggt

SEQ ID NO: 193617 - DNA, 25 bp, Probe Sequence
cccacatgacttagttagtgcataa

SEQ ID NO: 193618 - DNA, 25 bp, Probe Sequence
ccctcagccttctgtttgcagaacg

SEQ ID NO: 193619 - DNA, 25 bp, Probe Sequence
cccaatgccttcccagcttggaagc

SEQ ID NO: 193620 - DNA, 25 bp, Probe Sequence
cccaagcctatcacgcgtgaatcgg

SEQ ID NO: 193621 - DNA, 25 bp, Probe Sequence
cccaagctggctgaccggaagctgt

SEQ ID NO: 193622 - DNA, 25 bp, Probe Sequence
cccacgtgtctgtggctggaactgc

SEQ ID NO: 193623 - DNA, 25 bp, Probe Sequence
cccacagttctagggacaggactct

SEQ ID NO: 193624 - DNA, 25 bp, Probe Sequence
cccacgtttgtggtgacagtcatat

SEQ ID NO: 193625 - DNA, 25 bp, Probe Sequence
cccagggggctctgaatgtattttg

SEQ ID NO: 193626 - DNA, 25 bp, Probe Sequence
cccctggggctctagtatttggtgt

SEQ ID NO: 193627 - DNA, 25 bp, Probe Sequence
cccctggtggtcagttctacaactc

SEQ ID NO: 193628 - DNA, 25 bp, Probe Sequence
ccctagggttatctttaatcactct

SEQ ID NO: 193629 - DNA, 25 bp, Probe Sequence
cccttggtctgcaacgggctaatcc

SEQ ID NO: 193630 - DNA, 25 bp, Probe Sequence
cccgggattgcatctgggcttaaac

SEQ ID NO: 193631 - DNA, 25 bp, Probe Sequence
cccgggatgttgactattctctaca

SEQ ID NO: 193632 - DNA, 25 bp, Probe Sequence
ccctggatgtttatcacccaagcct

SEQ ID NO: 193633 - DNA, 25 bp, Probe Sequence
cccggtttgttgaatcgccaagcac

SEQ ID NO: 193634 - DNA, 25 bp, Probe Sequence
cccaggctgtggattacgtcactgc

SEQ ID NO: 193635 - DNA, 25 bp, Probe Sequence
cccaagcattggtatctacggcctg

SEQ ID NO: 193636 - DNA, 25 bp, Probe Sequence
cccaagcagcggtcattcaagacac

SEQ ID NO: 193637 - DNA, 25 bp, Probe Sequence
cccaagcaggagtttctcgacatcg

SEQ ID NO: 193638 - DNA, 25 bp, Probe Sequence
cccaatggcgtgtaactcgccgcag

SEQ ID NO: 193639 - DNA, 25 bp, Probe Sequence
cccaagggtagggctgccgatcaga

SEQ ID NO: 193640 - DNA, 25 bp, Probe Sequence
cccaggggatggcatcgggccagag

SEQ ID NO: 193641 - DNA, 25 bp, Probe Sequence
cccagaggcgagggaccagtggagg

SEQ ID NO: 193642 - DNA, 25 bp, Probe Sequence
cccagaggccactgaagatggtagg

SEQ ID NO: 193643 - DNA, 25 bp, Probe Sequence
cccagataccaccggagaaattgta

SEQ ID NO: 193644 - DNA, 25 bp, Probe Sequence
cccaatcctccggtgcaggagaatt

SEQ ID NO: 193645 - DNA, 25 bp, Probe Sequence
cccaaccctggcctcaggatgagag

SEQ ID NO: 193646 - DNA, 25 bp, Probe Sequence
cccacacccgctctacaatatgagc

SEQ ID NO: 193647 - DNA, 25 bp, Probe Sequence
cccacctgccctatagttatggcct

SEQ ID NO: 193648 - DNA, 25 bp, Probe Sequence
cccaaggaggctattgagggcacct

SEQ ID NO: 193649 - DNA, 25 bp, Probe Sequence
cccgctggaggtaattggctaacca

SEQ ID NO: 193650 - DNA, 25 bp, Probe Sequence
ccccctgaggaatttggcttcggct

SEQ ID NO: 193651 - DNA, 25 bp, Probe Sequence
cccacccattgaagtctccttgggc

SEQ ID NO: 193652 - DNA, 25 bp, Probe Sequence
cccagctcctggacagtgtcctatg

SEQ ID NO: 193653 - DNA, 25 bp, Probe Sequence
cccagccctgtgccaggaggctggc

SEQ ID NO: 193654 - DNA, 25 bp, Probe Sequence
cccacacctgccgggcagcaggtgc

SEQ ID NO: 193655 - DNA, 25 bp, Probe Sequence
cccaaccatgcagcctgagctggga

SEQ ID NO: 193656 - DNA, 25 bp, Probe Sequence
cccattcgagcagccacgtaggctg

SEQ ID NO: 193657 - DNA, 25 bp, Probe Sequence
cccagtttgcagtccacgtagagat

SEQ ID NO: 193658 - DNA, 25 bp, Probe Sequence
cccatgatgtcggaccctaaggctg

SEQ ID NO: 193659 - DNA, 25 bp, Probe Sequence
cccatagcggaaggcctggcaggta

SEQ ID NO: 193660 - DNA, 25 bp, Probe Sequence
cccagcactgtccaggcctgctggg

SEQ ID NO: 193661 - DNA, 25 bp, Probe Sequence
cccaatctgtaccggatgctggcag

SEQ ID NO: 193662 - DNA, 25 bp, Probe Sequence
cccaatctgtaccggatgctggcag

SEQ ID NO: 193663 - DNA, 25 bp, Probe Sequence
cccaattgaacgccaaattgggcct

SEQ ID NO: 193664 - DNA, 25 bp, Probe Sequence
ccctttggtcggaacgatgagcacc

SEQ ID NO: 193665 - DNA, 25 bp, Probe Sequence
cccttagatgtccggggctgcacgc

SEQ ID NO: 193666 - DNA, 25 bp, Probe Sequence
cccagtaacatccggatggcaaccc

SEQ ID NO: 193667 - DNA, 25 bp, Probe Sequence
cccagaagactgtggatggcccctc

SEQ ID NO: 193668 - DNA, 25 bp, Probe Sequence
cccagtgaggcctgccaggcctccc

SEQ ID NO: 193669 - DNA, 25 bp, Probe Sequence
cccttgatggtctgggagcctggcc

SEQ ID NO: 193670 - DNA, 25 bp, Probe Sequence
cccctggtgtgcaggaaccgggctc

SEQ ID NO: 193671 - DNA, 25 bp, Probe Sequence
cccacaacgtgcaggagatcctggg

SEQ ID NO: 193672 - DNA, 25 bp, Probe Sequence
cccactaccagaagggaggctggtg

SEQ ID NO: 193673 - DNA, 25 bp, Probe Sequence
cccaccaccagagagatcggtgaag

SEQ ID NO: 193674 - DNA, 25 bp, Probe Sequence
cccacccaggagccagcactgggga

SEQ ID NO: 193675 - DNA, 25 bp, Probe Sequence
ccccccggaggagctggagcggaag

SEQ ID NO: 193676 - DNA, 25 bp, Probe Sequence
cccaccgtggaggaggaaggcaaga

SEQ ID NO: 193677 - DNA, 25 bp, Probe Sequence
cccacactgtgtctgagggtgaaag

SEQ ID NO: 193678 - DNA, 25 bp, Probe Sequence
cccaccatcttccataagctgtgaa

SEQ ID NO: 193679 - DNA, 25 bp, Probe Sequence
cccactgatgccacaggagcttgaa

SEQ ID NO: 193680 - DNA, 25 bp, Probe Sequence
cccatctgtcctaatgggcttccct

SEQ ID NO: 193681 - DNA, 25 bp, Probe Sequence
cccacatgccttaaggggaccgtgg

SEQ ID NO: 193682 - DNA, 25 bp, Probe Sequence
cccaacactttgggaggcccaggcg

SEQ ID NO: 193683 - DNA, 25 bp, Probe Sequence
cccaacactttgggaggcccaggcg

SEQ ID NO: 193684 - DNA, 25 bp, Probe Sequence
cccaacactttgggaggccagagtg

SEQ ID NO: 193685 - DNA, 25 bp, Probe Sequence
cccaaaggcggctgtgcgctaagtg

SEQ ID NO: 193686 - DNA, 25 bp, Probe Sequence
cccaagaacgtctgagccttcaatg

SEQ ID NO: 193687 - DNA, 25 bp, Probe Sequence
cccaaaacgttgcgattataagtgt

SEQ ID NO: 193688 - DNA, 25 bp, Probe Sequence
cccaggaccgtcaggtttaccagtg

SEQ ID NO: 193689 - DNA, 25 bp, Probe Sequence
cccacgtacctcaggtaataccagc

SEQ ID NO: 193690 - DNA, 25 bp, Probe Sequence
cccgactacaccagctttaacacgg

SEQ ID NO: 193691 - DNA, 25 bp, Probe Sequence
cccagacataccagccttataacaa

SEQ ID NO: 193692 - DNA, 25 bp, Probe Sequence
cccatagcatccttacctttaagaa

SEQ ID NO: 193693 - DNA, 25 bp, Probe Sequence
cccaccagcctaaggtgttcaggaa

SEQ ID NO: 193694 - DNA, 25 bp, Probe Sequence
cccaccaactctcgcgtgttggaga

SEQ ID NO: 193695 - DNA, 25 bp, Probe Sequence
cccatcacatacctaccagtttgtg

SEQ ID NO: 193696 - DNA, 25 bp, Probe Sequence
cccacctgcccttagtgatgtttgg

SEQ ID NO: 193697 - DNA, 25 bp, Probe Sequence
cccacctgcccttagtgatgtttgg

SEQ ID NO: 193698 - DNA, 25 bp, Probe Sequence
cccacctgcccttagtgatgtttgg

SEQ ID NO: 193699 - DNA, 25 bp, Probe Sequence
cccacgtctggttcgtgatgggctt

SEQ ID NO: 193700 - DNA, 25 bp, Probe Sequence
cccagtttgcgtttgctgttgtgtt

SEQ ID NO: 193701 - DNA, 25 bp, Probe Sequence
cccattttctgttagatgtcatgcc

SEQ ID NO: 193702 - DNA, 25 bp, Probe Sequence
cccttgctggggacagttgctccag

SEQ ID NO: 193703 - DNA, 25 bp, Probe Sequence
cccttgtgtaattcttttccagaag

SEQ ID NO: 193704 - DNA, 25 bp, Probe Sequence
cccactgtgaaatcgctggtgctca

SEQ ID NO: 193705 - DNA, 25 bp, Probe Sequence
cccactccaaagtccatggattcaa

SEQ ID NO: 193706 - DNA, 25 bp, Probe Sequence
cccacctcaaaccaaggatcaatga

SEQ ID NO: 193707 - DNA, 25 bp, Probe Sequence
cccagcattaaagtgaaaccaatat

SEQ ID NO: 193708 - DNA, 25 bp, Probe Sequence
cccactgtcagatcaaacacacact

SEQ ID NO: 193709 - DNA, 25 bp, Probe Sequence
cccactgatatatgcaaacccgccg

SEQ ID NO: 193710 - DNA, 25 bp, Probe Sequence
cccactgaagagcctgagtcccagg

SEQ ID NO: 193711 - DNA, 25 bp, Probe Sequence
cccacagaaatactccatccaagga

SEQ ID NO: 193712 - DNA, 25 bp, Probe Sequence
cccaagaaaatgtcccacatggcag

SEQ ID NO: 193713 - DNA, 25 bp, Probe Sequence
cccacttaactgacctcactggagg

SEQ ID NO: 193714 - DNA, 25 bp, Probe Sequence
cccactttcttgacaacaggggtgc

SEQ ID NO: 193715 - DNA, 25 bp, Probe Sequence
cccactgtctctctacaatgaggag

SEQ ID NO: 193716 - DNA, 25 bp, Probe Sequence
cccacagtccagcctaactatggga

SEQ ID NO: 193717 - DNA, 25 bp, Probe Sequence
cccacagctgacatcatacctaatg

SEQ ID NO: 193718 - DNA, 25 bp, Probe Sequence
cccacactaacttgtgcattgacta

SEQ ID NO: 193719 - DNA, 25 bp, Probe Sequence
cccaacatcacgcatgtcattcact

SEQ ID NO: 193720 - DNA, 25 bp, Probe Sequence
cccaacacaggcatgctcataagga

SEQ ID NO: 193721 - DNA, 25 bp, Probe Sequence
cccactgccagggagtatggaggaa

SEQ ID NO: 193722 - DNA, 25 bp, Probe Sequence
cccactcacagggctgttggggtga

SEQ ID NO: 193723 - DNA, 25 bp, Probe Sequence
cccaaaaatgccctatggcacgtaa

SEQ ID NO: 193724 - DNA, 25 bp, Probe Sequence
cccagtagatgaccttatggactgt

SEQ ID NO: 193725 - DNA, 25 bp, Probe Sequence
cccagtactggccatctgatggact

SEQ ID NO: 193726 - DNA, 25 bp, Probe Sequence
cccaggagtgtgcaatgagaccatg

SEQ ID NO: 193727 - DNA, 25 bp, Probe Sequence
cccagcagcactaggaagagacccc

SEQ ID NO: 193728 - DNA, 25 bp, Probe Sequence
cccagcctctctaaagaactgacca

SEQ ID NO: 193729 - DNA, 25 bp, Probe Sequence
cccaggtcacgtcggagactgacac

SEQ ID NO: 193730 - DNA, 25 bp, Probe Sequence
cccacctccacacgaggactaagct

SEQ ID NO: 193731 - DNA, 25 bp, Probe Sequence
cccagcctcacaatgtgggaatttg

SEQ ID NO: 193732 - DNA, 25 bp, Probe Sequence
cccagcccacgcttaggaatgcttg

SEQ ID NO: 193733 - DNA, 25 bp, Probe Sequence
cccatctcgggcctcagtaaattga

SEQ ID NO: 193734 - DNA, 25 bp, Probe Sequence
cccactctggacaataaaaacgaat

SEQ ID NO: 193735 - DNA, 25 bp, Probe Sequence
cccacctggacacaacaccaaaaag

SEQ ID NO: 193736 - DNA, 25 bp, Probe Sequence
cccacctggacacaacaccaaaaag

SEQ ID NO: 193737 - DNA, 25 bp, Probe Sequence
cccacctggacacaacaccaaaaag

SEQ ID NO: 193738 - DNA, 25 bp, Probe Sequence
cccacctggacacaacaccaaaaag

SEQ ID NO: 193739 - DNA, 25 bp, Probe Sequence
cctacctggaaacatcccagccaag

SEQ ID NO: 193740 - DNA, 25 bp, Probe Sequence
cccaggcggacaagtattccaccaa

SEQ ID NO: 193741 - DNA, 25 bp, Probe Sequence
cccggggaatctgtcgacactgggc

SEQ ID NO: 193742 - DNA, 25 bp, Probe Sequence
cccaactgagaaccttcccactggg

SEQ ID NO: 193743 - DNA, 25 bp, Probe Sequence
cccaactgtcaaccttgacaaattg

SEQ ID NO: 193744 - DNA, 25 bp, Probe Sequence
cccatcactctccactaggaaattt

SEQ ID NO: 193745 - DNA, 25 bp, Probe Sequence
cccatctgcctaccttcaaagaatt

SEQ ID NO: 193746 - DNA, 25 bp, Probe Sequence
cccaggtctcatccttcaggaattt

SEQ ID NO: 193747 - DNA, 25 bp, Probe Sequence
cccaggtttgtcaacgtgactgtga

SEQ ID NO: 193748 - DNA, 25 bp, Probe Sequence
cccagcaggtgtgagccgtgagctg

SEQ ID NO: 193749 - DNA, 25 bp, Probe Sequence
cccagcggttcctgtgcagatgctg

SEQ ID NO: 193750 - DNA, 25 bp, Probe Sequence
cccaggatttagggtcacatgctgc

SEQ ID NO: 193751 - DNA, 25 bp, Probe Sequence
cccacgtgctatggggatgagtgtg

SEQ ID NO: 193752 - DNA, 25 bp, Probe Sequence
cccacctgatgcggtggtgcgtgtg

SEQ ID NO: 193753 - DNA, 25 bp, Probe Sequence
cccacactgatcacttgcgagatgt

SEQ ID NO: 193754 - DNA, 25 bp, Probe Sequence
cccacatctgtggactggagagaga

SEQ ID NO: 193755 - DNA, 25 bp, Probe Sequence
cccacatctgtggactggagagaga

SEQ ID NO: 193756 - DNA, 25 bp, Probe Sequence
cccacactactgaatggaagcaggc

SEQ ID NO: 193757 - DNA, 25 bp, Probe Sequence
cccagactccagacggacatgcgga

SEQ ID NO: 193758 - DNA, 25 bp, Probe Sequence
cccaggctctgaactggctctgggc

SEQ ID NO: 193759 - DNA, 25 bp, Probe Sequence
cccagtatgctgaaatcctcttggc

SEQ ID NO: 193760 - DNA, 25 bp, Probe Sequence
cccagctaggaaaccctgtgtgtca

SEQ ID NO: 193761 - DNA, 25 bp, Probe Sequence
ccctttggatatccccgggatcatt

SEQ ID NO: 193762 - DNA, 25 bp, Probe Sequence
cctttaggtttagagctggtcagtg

SEQ ID NO: 193763 - DNA, 25 bp, Probe Sequence
ccttttgcctttattgtcgacgtga

SEQ ID NO: 193764 - DNA, 25 bp, Probe Sequence
ccgtttgtgtttgtactaatcagta

SEQ ID NO: 193765 - DNA, 25 bp, Probe Sequence
ccctctggctatcatgccaactact

SEQ ID NO: 193766 - DNA, 25 bp, Probe Sequence
cccacagggcactattaatatactt

SEQ ID NO: 193767 - DNA, 25 bp, Probe Sequence
cccatggtgccaggttagttccttc

SEQ ID NO: 193768 - DNA, 25 bp, Probe Sequence
cccattgatctgcgttttgtcactt

SEQ ID NO: 193769 - DNA, 25 bp, Probe Sequence
gccgtttgctgggttgtttaccgag

SEQ ID NO: 193770 - DNA, 25 bp, Probe Sequence
ccttttcagggatgtcgtgggcggg

SEQ ID NO: 193771 - DNA, 25 bp, Probe Sequence
cctgtttagggctaggcttggcctc

SEQ ID NO: 193772 - DNA, 25 bp, Probe Sequence
cctttgaaaggctcagcctcccatt

SEQ ID NO: 193773 - DNA, 25 bp, Probe Sequence
cccttggaaggatgagctgttcttt

SEQ ID NO: 193774 - DNA, 25 bp, Probe Sequence
ccctccatagggccaggcatttttt

SEQ ID NO: 193775 - DNA, 25 bp, Probe Sequence
ccctccatagggccaggcatttttt

SEQ ID NO: 193776 - DNA, 25 bp, Probe Sequence
ccctccatagggccaggcatttttt

SEQ ID NO: 193777 - DNA, 25 bp, Probe Sequence
cccacaaagccgctgccattttatt

SEQ ID NO: 193778 - DNA, 25 bp, Probe Sequence
cccacaaagccagatgccacgatgg

SEQ ID NO: 193779 - DNA, 25 bp, Probe Sequence
cccacaacaccagttccatcgggaa

SEQ ID NO: 193780 - DNA, 25 bp, Probe Sequence
cccacaaactgatttctcacggcgt

SEQ ID NO: 193781 - DNA, 25 bp, Probe Sequence
cccagcattgactaatgttcagtga

SEQ ID NO: 193782 - DNA, 25 bp, Probe Sequence
cccagcagataccatggtccagtac

SEQ ID NO: 193783 - DNA, 25 bp, Probe Sequence
cccagcatgaagatggccctgagga

SEQ ID NO: 193784 - DNA, 25 bp, Probe Sequence
cccagtggaggaggcacggggcaga

SEQ ID NO: 193785 - DNA, 25 bp, Probe Sequence
cccaggagaggaaccggtgtgcgat

SEQ ID NO: 193786 - DNA, 25 bp, Probe Sequence
cccaggtggtgagcggtttgcagtg

SEQ ID NO: 193787 - DNA, 25 bp, Probe Sequence
cccagggaggagcaaccttcaggtg

SEQ ID NO: 193788 - DNA, 25 bp, Probe Sequence
cccgggatccatcaaccaagtggga

SEQ ID NO: 193789 - DNA, 25 bp, Probe Sequence
cccagcggtcgtcacagaaaggtct

SEQ ID NO: 193790 - DNA, 25 bp, Probe Sequence
cccacaggatttcaacgtggctgtc

SEQ ID NO: 193791 - DNA, 25 bp, Probe Sequence
cctcaaggagtacaacctggtctga

SEQ ID NO: 193792 - DNA, 25 bp, Probe Sequence
cccagagggtcaggaactcgtggtg

SEQ ID NO: 193793 - DNA, 25 bp, Probe Sequence
ccacagaacctatctactcgttgtt

SEQ ID NO: 193794 - DNA, 25 bp, Probe Sequence
cccagaccctcatgcagttggttgt

SEQ ID NO: 193795 - DNA, 25 bp, Probe Sequence
cccagaccctcatgcagttggttgt

SEQ ID NO: 193796 - DNA, 25 bp, Probe Sequence
cccagaccctcatgcagttggttgt

SEQ ID NO: 193797 - DNA, 25 bp, Probe Sequence
cccagagccccaaagggctgactga

SEQ ID NO: 193798 - DNA, 25 bp, Probe Sequence
cccaggcaacactgagctgagctga

SEQ ID NO: 193799 - DNA, 25 bp, Probe Sequence
cccaggcagtccctgaatgaccagg

SEQ ID NO: 193800 - DNA, 25 bp, Probe Sequence
cccaggaacccaacagagctcagga

SEQ ID NO: 193801 - DNA, 25 bp, Probe Sequence
cccagctgccaacaccaagattggc

SEQ ID NO: 193802 - DNA, 25 bp, Probe Sequence
cccagcgccaaggacatcaagaaga

SEQ ID NO: 193803 - DNA, 25 bp, Probe Sequence
cccagctgcctagattcagggaaag

SEQ ID NO: 193804 - DNA, 25 bp, Probe Sequence
cccagctcctaacatgcaggtgtca

SEQ ID NO: 193805 - DNA, 25 bp, Probe Sequence
cccatctcggcttttgcagtggaca

SEQ ID NO: 193806 - DNA, 25 bp, Probe Sequence
cccatcttggactttgtggaacaga

SEQ ID NO: 193807 - DNA, 25 bp, Probe Sequence
cccatgcttttcttttctaaccaag

SEQ ID NO: 193808 - DNA, 25 bp, Probe Sequence
cccagcttcggcatttgatcagacc

SEQ ID NO: 193809 - DNA, 25 bp, Probe Sequence
cccactggctctatgttgaggactc

SEQ ID NO: 193810 - DNA, 25 bp, Probe Sequence
cccactgggctaagtttcatatcta

SEQ ID NO: 193811 - DNA, 25 bp, Probe Sequence
cccatagacacagcacgttcattcc

SEQ ID NO: 193812 - DNA, 25 bp, Probe Sequence
cccggatctcagtcaaaggcattcg

SEQ ID NO: 193813 - DNA, 25 bp, Probe Sequence
cccaggagctcgccaatggaattcc

SEQ ID NO: 193814 - DNA, 25 bp, Probe Sequence
cccacgcttggccaaggagatcgcc

SEQ ID NO: 193815 - DNA, 25 bp, Probe Sequence
cccatccggcgacagaggacagcca

SEQ ID NO: 193816 - DNA, 25 bp, Probe Sequence
cccacacgtagaaagaggctcacta

SEQ ID NO: 193817 - DNA, 25 bp, Probe Sequence
cccaccaaaaataagcactcctagc

SEQ ID NO: 193818 - DNA, 25 bp, Probe Sequence
cccccaaagcatggaaggtcctgac

SEQ ID NO: 193819 - DNA, 25 bp, Probe Sequence
cccatcttaatcccgagagtccgga

SEQ ID NO: 193820 - DNA, 25 bp, Probe Sequence
cccagctggaacccgagtttgagga

SEQ ID NO: 193821 - DNA, 25 bp, Probe Sequence
cccactgccaatatcggtttaccaa

SEQ ID NO: 193822 - DNA, 25 bp, Probe Sequence
cccttgccaatcagcctgtgattca

SEQ ID NO: 193823 - DNA, 25 bp, Probe Sequence
cccttccaaggtatgtatgctctgt

SEQ ID NO: 193824 - DNA, 25 bp, Probe Sequence
ccctctgcagactgggcttagcgtg

SEQ ID NO: 193825 - DNA, 25 bp, Probe Sequence
cccactgagagctgctcctttgggg

SEQ ID NO: 193826 - DNA, 25 bp, Probe Sequence
cccactcgtgtaagcagtttggtgg

SEQ ID NO: 193827 - DNA, 25 bp, Probe Sequence
cccacctcatgagcctgtttggtgg

SEQ ID NO: 193828 - DNA, 25 bp, Probe Sequence
cccagcctctgacttgctgtgttgt

SEQ ID NO: 193829 - DNA, 25 bp, Probe Sequence
cccagcctctgacttgctgtgttgt

SEQ ID NO: 193830 - DNA, 25 bp, Probe Sequence
cccatgccttcaacctatgatcata

SEQ ID NO: 193831 - DNA, 25 bp, Probe Sequence
cccatgccgtagacatctggactca

SEQ ID NO: 193832 - DNA, 25 bp, Probe Sequence
cccatccctcataccatggagtcat

SEQ ID NO: 193833 - DNA, 25 bp, Probe Sequence
cccacatggcctccaaggagtaaga

SEQ ID NO: 193834 - DNA, 25 bp, Probe Sequence
cccatgtacgtgccaagggtaagct

SEQ ID NO: 193835 - DNA, 25 bp, Probe Sequence
cccagttcggctccgaggtggagct

SEQ ID NO: 193836 - DNA, 25 bp, Probe Sequence
cccaccctggcgtggtggcagacat

SEQ ID NO: 193837 - DNA, 25 bp, Probe Sequence
cccagcccgtggtcaggtagagagt

SEQ ID NO: 193838 - DNA, 25 bp, Probe Sequence
cccagccagagcctgtcgggagaag

SEQ ID NO: 193839 - DNA, 25 bp, Probe Sequence
cccagcgacgctcgtgggggaaaca

SEQ ID NO: 193840 - DNA, 25 bp, Probe Sequence
cccaggagccagcactggggaccac

SEQ ID NO: 193841 - DNA, 25 bp, Probe Sequence
cccaggacgagctgtgggggctgca

SEQ ID NO: 193842 - DNA, 25 bp, Probe Sequence
cccagagaccagctggcagggtgcc

SEQ ID NO: 193843 - DNA, 25 bp, Probe Sequence
cccaggagcctgccaggctgacgtg

SEQ ID NO: 193844 - DNA, 25 bp, Probe Sequence
cccagtggctctcagacgaagaggc

SEQ ID NO: 193845 - DNA, 25 bp, Probe Sequence
cccagctttatctgtcacacaaggc

SEQ ID NO: 193846 - DNA, 25 bp, Probe Sequence
cccactatttctagctccacaagtg

SEQ ID NO: 193847 - DNA, 25 bp, Probe Sequence
ccctcttagtgggctccaggatgga

SEQ ID NO: 193848 - DNA, 25 bp, Probe Sequence
ccccatcggtgtgtaaggtggccta

SEQ ID NO: 193849 - DNA, 25 bp, Probe Sequence
ccctagggagcagttacaagggcct

SEQ ID NO: 193850 - DNA, 25 bp, Probe Sequence
ccctggggagctaagaatgggccct

SEQ ID NO: 193851 - DNA, 25 bp, Probe Sequence
cccaggggcaggtgatagtggccgt

SEQ ID NO: 193852 - DNA, 25 bp, Probe Sequence
cccagggctgcatctgcaaaggggc

SEQ ID NO: 193853 - DNA, 25 bp, Probe Sequence
cccatgcgtggctgtgggggtggct

SEQ ID NO: 193854 - DNA, 25 bp, Probe Sequence
cccatgcgtggctgtgggggtggct

SEQ ID NO: 193855 - DNA, 25 bp, Probe Sequence
cccatggctggcatgcatgttggca

SEQ ID NO: 193856 - DNA, 25 bp, Probe Sequence
cccagcctgcctacatttgcagaca

SEQ ID NO: 193857 - DNA, 25 bp, Probe Sequence
cccagcctgcctacatttgcagaca

SEQ ID NO: 193858 - DNA, 25 bp, Probe Sequence
cccagcctgcctacatttgcagaca

SEQ ID NO: 193859 - DNA, 25 bp, Probe Sequence
cccacctgaaattcttggccagtcc

SEQ ID NO: 193860 - DNA, 25 bp, Probe Sequence
cccacgctggacattgtcgcaagtc

SEQ ID NO: 193861 - DNA, 25 bp, Probe Sequence
cccacctgaactcatgaccatagtg

SEQ ID NO: 193862 - DNA, 25 bp, Probe Sequence
cccactctggttcagatcatcaagt

SEQ ID NO: 193863 - DNA, 25 bp, Probe Sequence
cccactggagggcgctcatcaagta

SEQ ID NO: 193864 - DNA, 25 bp, Probe Sequence
cccatagtagggccatttaagaatt

SEQ ID NO: 193865 - DNA, 25 bp, Probe Sequence
cccaggctcagtgtgtttaaaatac

SEQ ID NO: 193866 - DNA, 25 bp, Probe Sequence
cccagagtcctcaatgtttcaaaac

SEQ ID NO: 193867 - DNA, 25 bp, Probe Sequence
ccctcagtgcctctgtggtaaaagt

SEQ ID NO: 193868 - DNA, 25 bp, Probe Sequence
ccctgattgcccgtaggttaagagg

SEQ ID NO: 193869 - DNA, 25 bp, Probe Sequence
cccttcagacccaaagctttaggca

SEQ ID NO: 193870 - DNA, 25 bp, Probe Sequence
cccttcagaccaagaatttgacaac

SEQ ID NO: 193871 - DNA, 25 bp, Probe Sequence
cccttacattcatgaccttgacacc

SEQ ID NO: 193872 - DNA, 25 bp, Probe Sequence
cccttaggtataccctggaagagct

SEQ ID NO: 193873 - DNA, 25 bp, Probe Sequence
ccctctagtgtatttcacagaaaac

SEQ ID NO: 193874 - DNA, 25 bp, Probe Sequence
cccttctgcttactagctcagtgat

SEQ ID NO: 193875 - DNA, 25 bp, Probe Sequence
cccatttgcactactggccatggaa

SEQ ID NO: 193876 - DNA, 25 bp, Probe Sequence
cccagttgcctagttcatcataaat

SEQ ID NO: 193877 - DNA, 25 bp, Probe Sequence
cccagttcctagattaatgcctaac

SEQ ID NO: 193878 - DNA, 25 bp, Probe Sequence
cccaggtcttagttttcacctctag

SEQ ID NO: 193879 - DNA, 25 bp, Probe Sequence
cccagaacttagcctttacctgtga

SEQ ID NO: 193880 - DNA, 25 bp, Probe Sequence
cccattacttcagccattgacctgg

SEQ ID NO: 193881 - DNA, 25 bp, Probe Sequence
cccttttgctaacattgctcacggc

SEQ ID NO: 193882 - DNA, 25 bp, Probe Sequence
cccttctatctccaggagggcaagg

SEQ ID NO: 193883 - DNA, 25 bp, Probe Sequence
cccttgcataaggacgacgtgaatg

SEQ ID NO: 193884 - DNA, 25 bp, Probe Sequence
cctcatgaaagggacgacgggagct

SEQ ID NO: 193885 - DNA, 25 bp, Probe Sequence
ccctacaaggaccgtgcacggctgc

SEQ ID NO: 193886 - DNA, 25 bp, Probe Sequence
cccatcagcccaactggatatcgga

SEQ ID NO: 193887 - DNA, 25 bp, Probe Sequence
cccaccctctagtgtatttcacaga

SEQ ID NO: 193888 - DNA, 25 bp, Probe Sequence
cccaccagctaaggacatttcccag

SEQ ID NO: 193889 - DNA, 25 bp, Probe Sequence
cccatccggaagatctcgtcaaagg

SEQ ID NO: 193890 - DNA, 25 bp, Probe Sequence
cccttgctggcaagttctccttaag

SEQ ID NO: 193891 - DNA, 25 bp, Probe Sequence
cccttgctagctagttcttacttca

SEQ ID NO: 193892 - DNA, 25 bp, Probe Sequence
ccgtttgagctacttcttacaaaat

SEQ ID NO: 193893 - DNA, 25 bp, Probe Sequence
ccgtttggctcgatattataagacc

SEQ ID NO: 193894 - DNA, 25 bp, Probe Sequence
ccgtttggctcgatattataagacc

SEQ ID NO: 193895 - DNA, 25 bp, Probe Sequence
cccagtcaggccgttttagaagagc

SEQ ID NO: 193896 - DNA, 25 bp, Probe Sequence
cccagtccccactgttggagagggc

SEQ ID NO: 193897 - DNA, 25 bp, Probe Sequence
cccagtgcccccaggaagaagggcg

SEQ ID NO: 193898 - DNA, 25 bp, Probe Sequence
cccagcagcctccacttggaggcga

SEQ ID NO: 193899 - DNA, 25 bp, Probe Sequence
cccatcagctgaagcactcttcaga

SEQ ID NO: 193900 - DNA, 25 bp, Probe Sequence
cccattgtacagcatgctatctata

SEQ ID NO: 193901 - DNA, 25 bp, Probe Sequence
cccatttcagacagcaacatgtaga

SEQ ID NO: 193902 - DNA, 25 bp, Probe Sequence
cccgttcaaattatcttgctgaatc

SEQ ID NO: 193903 - DNA, 25 bp, Probe Sequence
cccagttcaagtgattctcctgcct

SEQ ID NO: 193904 - DNA, 25 bp, Probe Sequence
ccctgatttcagagtcctctttctc

SEQ ID NO: 193905 - DNA, 25 bp, Probe Sequence
cccattatgacttagtcccttttct

SEQ ID NO: 193906 - DNA, 25 bp, Probe Sequence
cccttgcagttctgtacctgttgtt

SEQ ID NO: 193907 - DNA, 25 bp, Probe Sequence
cccatgtcgcttgaatattattttt

SEQ ID NO: 193908 - DNA, 25 bp, Probe Sequence
cccagaggcagtgactttatttcca

SEQ ID NO: 193909 - DNA, 25 bp, Probe Sequence
cccacgcaagtggcactttaagccc

SEQ ID NO: 193910 - DNA, 25 bp, Probe Sequence
cccaccaggatgtccatttaggcga

SEQ ID NO: 193911 - DNA, 25 bp, Probe Sequence
cccaccgaagacgaccatgacgagc

SEQ ID NO: 193912 - DNA, 25 bp, Probe Sequence
cccaccgtatcaggatcgtgcagga

SEQ ID NO: 193913 - DNA, 25 bp, Probe Sequence
cccccgagatcaggacgaaggacca

SEQ ID NO: 193914 - DNA, 25 bp, Probe Sequence
cccccaaatccgactaaggagagca

SEQ ID NO: 193915 - DNA, 25 bp, Probe Sequence
ccctccaaacagctcagtagtcaga

SEQ ID NO: 193916 - DNA, 25 bp, Probe Sequence
ccctcgaaaatgggaatctctgcag

SEQ ID NO: 193917 - DNA, 25 bp, Probe Sequence
cccatcagcctccatggagtacttc

SEQ ID NO: 193918 - DNA, 25 bp, Probe Sequence
cccagcattctgccagtggtttgtc

SEQ ID NO: 193919 - DNA, 25 bp, Probe Sequence
cccagcatgtgccaggcttttgctg

SEQ ID NO: 193920 - DNA, 25 bp, Probe Sequence
cccagcatgctgttggcattgttgt

SEQ ID NO: 193921 - DNA, 25 bp, Probe Sequence
cccactgctcaggccactgaatggg

SEQ ID NO: 193922 - DNA, 25 bp, Probe Sequence
cccactgctcaggccactgaatggg

SEQ ID NO: 193923 - DNA, 25 bp, Probe Sequence
cccactgctcaggccactgaatggg

SEQ ID NO: 193924 - DNA, 25 bp, Probe Sequence
cccagcatcccggaaaatggggagc

SEQ ID NO: 193925 - DNA, 25 bp, Probe Sequence
cccagctaccgttaaatgaggacaa

SEQ ID NO: 193926 - DNA, 25 bp, Probe Sequence
cccagctactccagaggctgaggcc

SEQ ID NO: 193927 - DNA, 25 bp, Probe Sequence
cccagctactcgggaggctgaggca

SEQ ID NO: 193928 - DNA, 25 bp, Probe Sequence
cccagctagttgggaggctgagatg

SEQ ID NO: 193929 - DNA, 25 bp, Probe Sequence
cccagcactttgggaggccgaggtg

SEQ ID NO: 193930 - DNA, 25 bp, Probe Sequence
cccaccttgatcatcggggaggagt

SEQ ID NO: 193931 - DNA, 25 bp, Probe Sequence
cccaggctgttcgctgaaggaggag

SEQ ID NO: 193932 - DNA, 25 bp, Probe Sequence
cccagctgctgaacaccatggggca

SEQ ID NO: 193933 - DNA, 25 bp, Probe Sequence
cccacgtgtgaagtgtagtggcatc

SEQ ID NO: 193934 - DNA, 25 bp, Probe Sequence
cccacccagcaggtgtttggcatcg

SEQ ID NO: 193935 - DNA, 25 bp, Probe Sequence
cccatcccagaggagtttctcagga

SEQ ID NO: 193936 - DNA, 25 bp, Probe Sequence
cccagttacagggtgtttgcagaaa

SEQ ID NO: 193937 - DNA, 25 bp, Probe Sequence
cccaggcccaggtttctctggaaag

SEQ ID NO: 193938 - DNA, 25 bp, Probe Sequence
cccaggcgacatacctttcttttag

SEQ ID NO: 193939 - DNA, 25 bp, Probe Sequence
cccacgctgacaaccattcatattt

SEQ ID NO: 193940 - DNA, 25 bp, Probe Sequence
cccaggtctcatactcacttatgtt

SEQ ID NO: 193941 - DNA, 25 bp, Probe Sequence
cccgtgttctcacagttattaacca

SEQ ID NO: 193942 - DNA, 25 bp, Probe Sequence
cccagggactcacagttcagtgcag

SEQ ID NO: 193943 - DNA, 25 bp, Probe Sequence
cccagaggactatgagacccatcag

SEQ ID NO: 193944 - DNA, 25 bp, Probe Sequence
cccagagagacaccagagaacccac

SEQ ID NO: 193945 - DNA, 25 bp, Probe Sequence
cccagagatgtgttgcagggaacca

SEQ ID NO: 193946 - DNA, 25 bp, Probe Sequence
cccagaatggaaggagcgaggcact

SEQ ID NO: 193947 - DNA, 25 bp, Probe Sequence
cccaggtggaaggcgcggacctgac

SEQ ID NO: 193948 - DNA, 25 bp, Probe Sequence
cccagggtgatgacctgtggacctg

SEQ ID NO: 193949 - DNA, 25 bp, Probe Sequence
cccagggtgatatgctgattttcat

SEQ ID NO: 193950 - DNA, 25 bp, Probe Sequence
cccagcacgtcattttgagttatat

SEQ ID NO: 193951 - DNA, 25 bp, Probe Sequence
cccatcatggtattctaaggtgttg

SEQ ID NO: 193952 - DNA, 25 bp, Probe Sequence
cccagccatgctttgcaagatgggc

SEQ ID NO: 193953 - DNA, 25 bp, Probe Sequence
cccagctctgactgaaggggcttgg

SEQ ID NO: 193954 - DNA, 25 bp, Probe Sequence
cccagcttacagcaacttgtccatc

SEQ ID NO: 193955 - DNA, 25 bp, Probe Sequence
ccctactatcagagacttgtcctta

SEQ ID NO: 193956 - DNA, 25 bp, Probe Sequence
ccctgagtaggaaactgtcccctag

SEQ ID NO: 193957 - DNA, 25 bp, Probe Sequence
cccattgacaggagcacttggccct

SEQ ID NO: 193958 - DNA, 25 bp, Probe Sequence
cccagtgccttgagagtttcacctg

SEQ ID NO: 193959 - DNA, 25 bp, Probe Sequence
cctaggagttgaatccttctccctg

SEQ ID NO: 193960 - DNA, 25 bp, Probe Sequence
ccggggtattatgtgcttagcttgc

SEQ ID NO: 193961 - DNA, 25 bp, Probe Sequence
ccgtggcgaaagtcttgttaatgtc

SEQ ID NO: 193962 - DNA, 25 bp, Probe Sequence
ccctgtggcacttgacattttaatt

SEQ ID NO: 193963 - DNA, 25 bp, Probe Sequence
cccttgtacattttgcccataactt

SEQ ID NO: 193964 - DNA, 25 bp, Probe Sequence
cccatttccttcatgcaactaactg

SEQ ID NO: 193965 - DNA, 25 bp, Probe Sequence
cccagttcctctaccaaatgtgaat

SEQ ID NO: 193966 - DNA, 25 bp, Probe Sequence
cccagttgcccatcaacagtggaat

SEQ ID NO: 193967 - DNA, 25 bp, Probe Sequence
cccatggtgtcccacacaagtgtga

SEQ ID NO: 193968 - DNA, 25 bp, Probe Sequence
cccattgcgtgcctgtatcaagtgt

SEQ ID NO: 193969 - DNA, 25 bp, Probe Sequence
cccttctgcatcttattcacagctt

SEQ ID NO: 193970 - DNA, 25 bp, Probe Sequence
cccacctgattttgtgacactataa

SEQ ID NO: 193971 - DNA, 25 bp, Probe Sequence
cccagccatgcttttgtaacttgcc

SEQ ID NO: 193972 - DNA, 25 bp, Probe Sequence
cccaccagctttagtggcagctttc

SEQ ID NO: 193973 - DNA, 25 bp, Probe Sequence
cccattagatttagtggccttcatg

SEQ ID NO: 193974 - DNA, 25 bp, Probe Sequence
cccattggattgtacttctcttctg

SEQ ID NO: 193975 - DNA, 25 bp, Probe Sequence
ccctctggaagagctgttctgggca

SEQ ID NO: 193976 - DNA, 25 bp, Probe Sequence
ccctcttcaagggcttctttgagct

SEQ ID NO: 193977 - DNA, 25 bp, Probe Sequence
cccttgctcaatcagttgttggagc

SEQ ID NO: 193978 - DNA, 25 bp, Probe Sequence
cccatggtgattcgggttttggcca

SEQ ID NO: 193979 - DNA, 25 bp, Probe Sequence
cccatggtgattccggtttttgtca

SEQ ID NO: 193980 - DNA, 25 bp, Probe Sequence
cccatgtggcttcaggttctcacag

SEQ ID NO: 193981 - DNA, 25 bp, Probe Sequence
cccagcagaccatagggtccatcag

SEQ ID NO: 193982 - DNA, 25 bp, Probe Sequence
cccagacatcatcaaggtggccaag

SEQ ID NO: 193983 - DNA, 25 bp, Probe Sequence
cccgacatgttcaaagtcccgatga

SEQ ID NO: 193984 - DNA, 25 bp, Probe Sequence
cccagattttcctgcaacacagaga

SEQ ID NO: 193985 - DNA, 25 bp, Probe Sequence
cccagtccttacgaatcaccgagga

SEQ ID NO: 193986 - DNA, 25 bp, Probe Sequence
cccagtgcctgatccagtcaaggag

SEQ ID NO: 193987 - DNA, 25 bp, Probe Sequence
cccaggctctgatgccttgaattgg

SEQ ID NO: 193988 - DNA, 25 bp, Probe Sequence
cccatttctgtgtcctttattgtag

SEQ ID NO: 193989 - DNA, 25 bp, Probe Sequence
cccagctctttgttcagttgactta

SEQ ID NO: 193990 - DNA, 25 bp, Probe Sequence
cccattcatttgctgattatacttc

SEQ ID NO: 193991 - DNA, 25 bp, Probe Sequence
cccagttcttgccagatagtgcaat

SEQ ID NO: 193992 - DNA, 25 bp, Probe Sequence
cccatttcttgctagctattgcaaa

SEQ ID NO: 193993 - DNA, 25 bp, Probe Sequence
cccatttgctcgcagtatcctagaa

SEQ ID NO: 193994 - DNA, 25 bp, Probe Sequence
cccatctggctgtgaaattcaggaa

SEQ ID NO: 193995 - DNA, 25 bp, Probe Sequence
ccctctgccttccaatattactaat

SEQ ID NO: 193996 - DNA, 25 bp, Probe Sequence
ccctctcctgcacaattcatttaga

SEQ ID NO: 193997 - DNA, 25 bp, Probe Sequence
cccagtactgccttcttatttgaga

SEQ ID NO: 193998 - DNA, 25 bp, Probe Sequence
cccagcttctgtttcatagtcttaa

SEQ ID NO: 193999 - DNA, 25 bp, Probe Sequence
cccatcttcttctttcagatcatta

SEQ ID NO: 194000 - DNA, 25 bp, Probe Sequence
cccatcttcttctttcagatcatta

SEQ ID NO: 194001 - DNA, 25 bp, Probe Sequence
cccagatctctgtaattttatgtag

SEQ ID NO: 194002 - DNA, 25 bp, Probe Sequence
cccaggcatgcagtcacatttaatc

SEQ ID NO: 194003 - DNA, 25 bp, Probe Sequence
cccaggatgccagcatgtgccaatg

SEQ ID NO: 194004 - DNA, 25 bp, Probe Sequence
cccaggtgcatcgtttctagtgata

SEQ ID NO: 194005 - DNA, 25 bp, Probe Sequence
cccatggagcgcgtgtttgactaca

SEQ ID NO: 194006 - DNA, 25 bp, Probe Sequence
cccaggcaagcggattgctttgcac

SEQ ID NO: 194007 - DNA, 25 bp, Probe Sequence
ccctgccaggggtgctgtttcaggc

SEQ ID NO: 194008 - DNA, 25 bp, Probe Sequence
ccctgaatacgtttgctttctcacc

SEQ ID NO: 194009 - DNA, 25 bp, Probe Sequence
cccatgacaaatcttgttcttcctt

SEQ ID NO: 194010 - DNA, 25 bp, Probe Sequence
ccctggataatgctttactttctgt

SEQ ID NO: 194011 - DNA, 25 bp, Probe Sequence
cccatgaattacttcctcacttttg

SEQ ID NO: 194012 - DNA, 25 bp, Probe Sequence
cccatgagttatttcctattctgtg

SEQ ID NO: 194013 - DNA, 25 bp, Probe Sequence
cccagagcatgtttaccagtttgat

SEQ ID NO: 194014 - DNA, 25 bp, Probe Sequence
cccagcagatgttcgatgccaagaa

SEQ ID NO: 194015 - DNA, 25 bp, Probe Sequence
cccatcatgctgtaactgacacaaa

SEQ ID NO: 194016 - DNA, 25 bp, Probe Sequence
cccagagtgacaacgcatacacaac

SEQ ID NO: 194017 - DNA, 25 bp, Probe Sequence
cccagagtcctaagcaacaacagtg

SEQ ID NO: 194018 - DNA, 25 bp, Probe Sequence
cccagcctcctaactgacagaatct

SEQ ID NO: 194019 - DNA, 25 bp, Probe Sequence
cccatgctgaacattatgaagagat

SEQ ID NO: 194020 - DNA, 25 bp, Probe Sequence
cccagctgcacacagttgaaaatcc

SEQ ID NO: 194021 - DNA, 25 bp, Probe Sequence
ccacacgtagtggcttaaagcaacg

SEQ ID NO: 194022 - DNA, 25 bp, Probe Sequence
cccagcttttgagccaacaactctg

SEQ ID NO: 194023 - DNA, 25 bp, Probe Sequence
cccagtatttcagaacaaattgatt

SEQ ID NO: 194024 - DNA, 25 bp, Probe Sequence
cccagtagtctaaaacacgttcatg

SEQ ID NO: 194025 - DNA, 25 bp, Probe Sequence
cccaggagtccaacgatcacgtgtg

SEQ ID NO: 194026 - DNA, 25 bp, Probe Sequence
ccgcgggctacaacgtcaaattcga

SEQ ID NO: 194027 - DNA, 25 bp, Probe Sequence
cccaggtggactacttaatcaacgg

SEQ ID NO: 194028 - DNA, 25 bp, Probe Sequence
cccaggggcagcccatttctcaaag

SEQ ID NO: 194029 - DNA, 25 bp, Probe Sequence
cccagggaagggatagctcagacaa

SEQ ID NO: 194030 - DNA, 25 bp, Probe Sequence
cccatgggaaccctccaaagaatga

SEQ ID NO: 194031 - DNA, 25 bp, Probe Sequence
cccagaggaaccctgcggagggact

SEQ ID NO: 194032 - DNA, 25 bp, Probe Sequence
cccagagggaccacagtcagcgtga

SEQ ID NO: 194033 - DNA, 25 bp, Probe Sequence
cccagcagggcagcagtgaaccagt

SEQ ID NO: 194034 - DNA, 25 bp, Probe Sequence
cccagcaactcagcagcagaaccaa

SEQ ID NO: 194035 - DNA, 25 bp, Probe Sequence
cccagtgactcagccactatggcta

SEQ ID NO: 194036 - DNA, 25 bp, Probe Sequence
cccagctactcaggagactgaggca

SEQ ID NO: 194037 - DNA, 25 bp, Probe Sequence
cccagctactcaggaggctgacgca

SEQ ID NO: 194038 - DNA, 25 bp, Probe Sequence
cccattggcaatgaggctgcccagg

SEQ ID NO: 194039 - DNA, 25 bp, Probe Sequence
cccattgtcactgagaaccaccaaa

SEQ ID NO: 194040 - DNA, 25 bp, Probe Sequence
cccagttcatcgacgagaacccaga

SEQ ID NO: 194041 - DNA, 25 bp, Probe Sequence
ccctttcaagtcccaaacactgagt

SEQ ID NO: 194042 - DNA, 25 bp, Probe Sequence
cccttccatagtcaataccaacaat

SEQ ID NO: 194043 - DNA, 25 bp, Probe Sequence
ccctcccaaggctttggcctataag

SEQ ID NO: 194044 - DNA, 25 bp, Probe Sequence
ccccccaggtgactaggttcaagag

SEQ ID NO: 194045 - DNA, 25 bp, Probe Sequence
cccggacacggacaggattgacaga

SEQ ID NO: 194046 - DNA, 25 bp, Probe Sequence
cccggacacggacaggattgacaga

SEQ ID NO: 194047 - DNA, 25 bp, Probe Sequence
cccgtacagggggagcaactgcacc

SEQ ID NO: 194048 - DNA, 25 bp, Probe Sequence
cccaggaagtggccaaaagctagac

SEQ ID NO: 194049 - DNA, 25 bp, Probe Sequence
cccagtccagatcgtcaacaacaag

SEQ ID NO: 194050 - DNA, 25 bp, Probe Sequence
cccagaccaaggcagcacatacagc

SEQ ID NO: 194051 - DNA, 25 bp, Probe Sequence
cccagagaaactgccacatacacca

SEQ ID NO: 194052 - DNA, 25 bp, Probe Sequence
cccaggcacaacacagctaacacaa

SEQ ID NO: 194053 - DNA, 25 bp, Probe Sequence
cccagtacagacatatccacaaggt

SEQ ID NO: 194054 - DNA, 25 bp, Probe Sequence
cccagctacaggactacacgtgagt

SEQ ID NO: 194055 - DNA, 25 bp, Probe Sequence
cccaggcacacgagacacttggttt

SEQ ID NO: 194056 - DNA, 25 bp, Probe Sequence
cccagtccctcttatcacttggact

SEQ ID NO: 194057 - DNA, 25 bp, Probe Sequence
cccatacctttaatgcctttggcct

SEQ ID NO: 194058 - DNA, 25 bp, Probe Sequence
cccccatttgagatgccttattcct

SEQ ID NO: 194059 - DNA, 25 bp, Probe Sequence
cccctgttctacaccaatttcagtt

SEQ ID NO: 194060 - DNA, 25 bp, Probe Sequence
cccttgcttgcatcttccaaagcta

SEQ ID NO: 194061 - DNA, 25 bp, Probe Sequence
cccatagcttggtgtcattaacata

SEQ ID NO: 194062 - DNA, 25 bp, Probe Sequence
cccatacacagtgcccaacaagaag

SEQ ID NO: 194063 - DNA, 25 bp, Probe Sequence
cccatctgcaaaatcccggaaggag

SEQ ID NO: 194064 - DNA, 25 bp, Probe Sequence
ccctcgtcaatttccaggaggaagc

SEQ ID NO: 194065 - DNA, 25 bp, Probe Sequence
cccatcctcaataacaaccatcgta

SEQ ID NO: 194066 - DNA, 25 bp, Probe Sequence
cccttccaactatgtccagatgtgc

SEQ ID NO: 194067 - DNA, 25 bp, Probe Sequence
ccccacgtagcagtgggcccatgtc

SEQ ID NO: 194068 - DNA, 25 bp, Probe Sequence
cccagcacaagggctgctggcccag

SEQ ID NO: 194069 - DNA, 25 bp, Probe Sequence
cccagagacatgggccagggccagg

SEQ ID NO: 194070 - DNA, 25 bp, Probe Sequence
cccagcaagagcacaagaggaagag

SEQ ID NO: 194071 - DNA, 25 bp, Probe Sequence
cccatcaatgacagattggacaaag

SEQ ID NO: 194072 - DNA, 25 bp, Probe Sequence
ccctcaaacttctgtgcacaaagtg

SEQ ID NO: 194073 - DNA, 25 bp, Probe Sequence
ccctatcaactttcgatggtagtcg

SEQ ID NO: 194074 - DNA, 25 bp, Probe Sequence
ccctatcacatctcatttggttctc

SEQ ID NO: 194075 - DNA, 25 bp, Probe Sequence
ccgccattgactgctatatggttcg

SEQ ID NO: 194076 - DNA, 25 bp, Probe Sequence
ccctcattttgactataactgtgct

SEQ ID NO: 194077 - DNA, 25 bp, Probe Sequence
ccctactttgcaccataacatgtta

SEQ ID NO: 194078 - DNA, 25 bp, Probe Sequence
ccctatcctatccgcaaacagatgt

SEQ ID NO: 194079 - DNA, 25 bp, Probe Sequence
cccattctttgcttgaacacagtat

SEQ ID NO: 194080 - DNA, 25 bp, Probe Sequence
cccatcatcctgcttggagcaagta

SEQ ID NO: 194081 - DNA, 25 bp, Probe Sequence
cccattcctgagcctgatggttgta

SEQ ID NO: 194082 - DNA, 25 bp, Probe Sequence
cccttttggaggtgcttctcatgca

SEQ ID NO: 194083 - DNA, 25 bp, Probe Sequence
cccgatttgtagcactttgttgact

SEQ ID NO: 194084 - DNA, 25 bp, Probe Sequence
ccctattcggcgtagcttttgtggc

SEQ ID NO: 194085 - DNA, 25 bp, Probe Sequence
ccctttcgtcagttgctgaggtgtt

SEQ ID NO: 194086 - DNA, 25 bp, Probe Sequence
ccctatccctaattctactatgtgg

SEQ ID NO: 194087 - DNA, 25 bp, Probe Sequence
cccatactcctatgatctgagtcag

SEQ ID NO: 194088 - DNA, 25 bp, Probe Sequence
cccatggctcagcgagcactgagct

SEQ ID NO: 194089 - DNA, 25 bp, Probe Sequence
cccatgactgcaagaatactggcag

SEQ ID NO: 194090 - DNA, 25 bp, Probe Sequence
cccatgcctcttcaggctggaaaca

SEQ ID NO: 194091 - DNA, 25 bp, Probe Sequence
cccagatcacctcacagggcagaaa

SEQ ID NO: 194092 - DNA, 25 bp, Probe Sequence
cccagcaagcctcacttgtggaatg

SEQ ID NO: 194093 - DNA, 25 bp, Probe Sequence
cccagacaccggcgtgggaatgtgg

SEQ ID NO: 194094 - DNA, 25 bp, Probe Sequence
ccctttccgtgccactggtgaatag

SEQ ID NO: 194095 - DNA, 25 bp, Probe Sequence
cccttctttgtgtatcaggtagtct

SEQ ID NO: 194096 - DNA, 25 bp, Probe Sequence
cccttcttagctggctcaggggctt

SEQ ID NO: 194097 - DNA, 25 bp, Probe Sequence
cccttcctgagctttatggtcctaa

SEQ ID NO: 194098 - DNA, 25 bp, Probe Sequence
ccccctctgaatctatgggatctac

SEQ ID NO: 194099 - DNA, 25 bp, Probe Sequence
cccccacatgtatccgggataaccg

SEQ ID NO: 194100 - DNA, 25 bp, Probe Sequence
cccatcccttcatcaaggagtacca

SEQ ID NO: 194101 - DNA, 25 bp, Probe Sequence
cccatcaccctcagctgagggtcac

SEQ ID NO: 194102 - DNA, 25 bp, Probe Sequence
ccctacaaccactgaggtgatcact

SEQ ID NO: 194103 - DNA, 25 bp, Probe Sequence
ccctaccacacattcgaagaacccg

SEQ ID NO: 194104 - DNA, 25 bp, Probe Sequence
ccctaccacacattcgaagaacccg

SEQ ID NO: 194105 - DNA, 25 bp, Probe Sequence
ccctcatccacagtaggacaccatc

SEQ ID NO: 194106 - DNA, 25 bp, Probe Sequence
ccctaccagcagtctggactcactt

SEQ ID NO: 194107 - DNA, 25 bp, Probe Sequence
ccctccccagttggactaggggcag

SEQ ID NO: 194108 - DNA, 25 bp, Probe Sequence
cccattttactctggataagggcag

SEQ ID NO: 194109 - DNA, 25 bp, Probe Sequence
cccatgttgttcccggacaagggca

SEQ ID NO: 194110 - DNA, 25 bp, Probe Sequence
cccataagtctaccaagagctgagg

SEQ ID NO: 194111 - DNA, 25 bp, Probe Sequence
cccataatcctacatgttgtgagag

SEQ ID NO: 194112 - DNA, 25 bp, Probe Sequence
cccagtttgttcatgtcagtgagag

SEQ ID NO: 194113 - DNA, 25 bp, Probe Sequence
cccagtcttttcattctctggcagt

SEQ ID NO: 194114 - DNA, 25 bp, Probe Sequence
cccgtccggatattgtcccgagatg

SEQ ID NO: 194115 - DNA, 25 bp, Probe Sequence
cccgttgaggatgaggccgctagag

SEQ ID NO: 194116 - DNA, 25 bp, Probe Sequence
cccagttcagtttatctccagttga

SEQ ID NO: 194117 - DNA, 25 bp, Probe Sequence
cccaggactatttattccagctttc

SEQ ID NO: 194118 - DNA, 25 bp, Probe Sequence
cccatttctacctaagtcagctttc

SEQ ID NO: 194119 - DNA, 25 bp, Probe Sequence
cccaggtttctctgagtcatcatta

SEQ ID NO: 194120 - DNA, 25 bp, Probe Sequence
cccagtctattcgggagtctgagta

SEQ ID NO: 194121 - DNA, 25 bp, Probe Sequence
cccagtctcattgcttagtagaata

SEQ ID NO: 194122 - DNA, 25 bp, Probe Sequence
cccagtctgctttttagtctttatc

SEQ ID NO: 194123 - DNA, 25 bp, Probe Sequence
cccagtcatcttatttggctatgtt

SEQ ID NO: 194124 - DNA, 25 bp, Probe Sequence
cccatcgctttgattattgttgcta

SEQ ID NO: 194125 - DNA, 25 bp, Probe Sequence
ccttcgattactattcgtgcctagc

SEQ ID NO: 194126 - DNA, 25 bp, Probe Sequence
gcccaaggtactttacggcctgatc

SEQ ID NO: 194127 - DNA, 25 bp, Probe Sequence
cccattcgaacttaacagatgcctc

SEQ ID NO: 194128 - DNA, 25 bp, Probe Sequence
ccctttcacaagcaacagactctca

SEQ ID NO: 194129 - DNA, 25 bp, Probe Sequence
ccctttgacagagcctacccaaata

SEQ ID NO: 194130 - DNA, 25 bp, Probe Sequence
ccctcttccaatgagcttaaaacat

SEQ ID NO: 194131 - DNA, 25 bp, Probe Sequence
ccctctacaaggtgcatttaactat

SEQ ID NO: 194132 - DNA, 25 bp, Probe Sequence
ccctgcccccagagcaataaagtca

SEQ ID NO: 194133 - DNA, 25 bp, Probe Sequence
ccctggtcgccgaccacaagtgcag

SEQ ID NO: 194134 - DNA, 25 bp, Probe Sequence
ccctgttccctacacaaatgcagta

SEQ ID NO: 194135 - DNA, 25 bp, Probe Sequence
cccggtccgtattccagatggagtc

SEQ ID NO: 194136 - DNA, 25 bp, Probe Sequence
cccagacccttattccagatgctga

SEQ ID NO: 194137 - DNA, 25 bp, Probe Sequence
cccagacccttcagcagagtcgggg

SEQ ID NO: 194138 - DNA, 25 bp, Probe Sequence
cccagacccagtggggaggcggacg

SEQ ID NO: 194139 - DNA, 25 bp, Probe Sequence
ccctcagctccaaacgtaggggagg

SEQ ID NO: 194140 - DNA, 25 bp, Probe Sequence
cccatcagctgcggcaagcctaggg

SEQ ID NO: 194141 - DNA, 25 bp, Probe Sequence
cccatcagctgcggcaagcctaggg

SEQ ID NO: 194142 - DNA, 25 bp, Probe Sequence
cccatcagctgcggcaagcctaggg

SEQ ID NO: 194143 - DNA, 25 bp, Probe Sequence
cccatcagctgcggcaagcctaggg

SEQ ID NO: 194144 - DNA, 25 bp, Probe Sequence
cccatactgctgacagaaaagaagg

SEQ ID NO: 194145 - DNA, 25 bp, Probe Sequence
cccattcatcacagaacacgacaga

SEQ ID NO: 194146 - DNA, 25 bp, Probe Sequence
cccattatcctccaccacaaagggc

SEQ ID NO: 194147 - DNA, 25 bp, Probe Sequence
cccatcttcttttcttaaagcaggc

SEQ ID NO: 194148 - DNA, 25 bp, Probe Sequence
cccatttattttggtccaatgcagt

SEQ ID NO: 194149 - DNA, 25 bp, Probe Sequence
ccctatttcaacggtccattcatgc

SEQ ID NO: 194150 - DNA, 25 bp, Probe Sequence
cccttgtgctcatcaggtaatctgc

SEQ ID NO: 194151 - DNA, 25 bp, Probe Sequence
cccttgatcatctggggtttgtcat

SEQ ID NO: 194152 - DNA, 25 bp, Probe Sequence
cccatgcaatcctaggtctgtattg

SEQ ID NO: 194153 - DNA, 25 bp, Probe Sequence
cccatctagccaggaatctattgtg

SEQ ID NO: 194154 - DNA, 25 bp, Probe Sequence
ccctctagtcatcacttgtgcagct

SEQ ID NO: 194155 - DNA, 25 bp, Probe Sequence
cccatctggtgcttacattctgaat

SEQ ID NO: 194156 - DNA, 25 bp, Probe Sequence
ccctgatggcgcttacattccagtg

SEQ ID NO: 194157 - DNA, 25 bp, Probe Sequence
cccagttggcagtgcagatccggcg

SEQ ID NO: 194158 - DNA, 25 bp, Probe Sequence
cccagttggcagtgcagatccggcg

SEQ ID NO: 194159 - DNA, 25 bp, Probe Sequence
cccagttggcagtgcagatccggcg

SEQ ID NO: 194160 - DNA, 25 bp, Probe Sequence
cccttctggagctgggctcggaggg

SEQ ID NO: 194161 - DNA, 25 bp, Probe Sequence
cctcttctttgtggttgcccaaggt

SEQ ID NO: 194162 - DNA, 25 bp, Probe Sequence
cccttgtatagtgtccccatgggct

SEQ ID NO: 194163 - DNA, 25 bp, Probe Sequence
ccccattatactgtgctccaaggac

SEQ ID NO: 194164 - DNA, 25 bp, Probe Sequence
cctccataaaaacctgaaaggacag

SEQ ID NO: 194165 - DNA, 25 bp, Probe Sequence
ccccgcagaaaacgcctaaagtcag

SEQ ID NO: 194166 - DNA, 25 bp, Probe Sequence
ccccgcagaaaacgcctaaagtcag

SEQ ID NO: 194167 - DNA, 25 bp, Probe Sequence
ccacctggggatcccccaaagtcag

SEQ ID NO: 194168 - DNA, 25 bp, Probe Sequence
ccccgacgtgtacacgcaggtgtcc

SEQ ID NO: 194169 - DNA, 25 bp, Probe Sequence
ccccgaagtgttcacaacgtcaccg

SEQ ID NO: 194170 - DNA, 25 bp, Probe Sequence
ccgccaccatgtttcgaaatcagta

SEQ ID NO: 194171 - DNA, 25 bp, Probe Sequence
ccctcatcctgtctcggattgtggg

SEQ ID NO: 194172 - DNA, 25 bp, Probe Sequence
cccttcagcttgcttagatgttcca

SEQ ID NO: 194173 - DNA, 25 bp, Probe Sequence
ccctgctcaggtctagaatcccaag

SEQ ID NO: 194174 - DNA, 25 bp, Probe Sequence
ccctacaggctccaaagacctacag

SEQ ID NO: 194175 - DNA, 25 bp, Probe Sequence
ccctacactacctgagtccaacagg

SEQ ID NO: 194176 - DNA, 25 bp, Probe Sequence
ccctaccgacctggtgtggaaggca

SEQ ID NO: 194177 - DNA, 25 bp, Probe Sequence
ccctaccgacctggtgtggaaggca

SEQ ID NO: 194178 - DNA, 25 bp, Probe Sequence
ccctcaacgaccactttgtcaagct

SEQ ID NO: 194179 - DNA, 25 bp, Probe Sequence
cccctataatcctgcttttcaagtc

SEQ ID NO: 194180 - DNA, 25 bp, Probe Sequence
cccctataaccatcattctgattaa

SEQ ID NO: 194181 - DNA, 25 bp, Probe Sequence
ccctcataaattggactctctgctt

SEQ ID NO: 194182 - DNA, 25 bp, Probe Sequence
ccctaaatgtatgtccaacttccac

SEQ ID NO: 194183 - DNA, 25 bp, Probe Sequence
ccctcaagagtaactacaatcttcc

SEQ ID NO: 194184 - DNA, 25 bp, Probe Sequence
ccctaaggctgttttacgctatggc

SEQ ID NO: 194185 - DNA, 25 bp, Probe Sequence
ccctaaagatgctaatctcctttgg

SEQ ID NO: 194186 - DNA, 25 bp, Probe Sequence
ccctatgagatttaatgctgctctg

SEQ ID NO: 194187 - DNA, 25 bp, Probe Sequence
ccctagcatgtatactctgccacgg

SEQ ID NO: 194188 - DNA, 25 bp, Probe Sequence
cccatggcaaattccatggcaccgt

SEQ ID NO: 194189 - DNA, 25 bp, Probe Sequence
cccaggcagtgcttcctgagcagac

SEQ ID NO: 194190 - DNA, 25 bp, Probe Sequence
cccatgcagactttctgctgacccc

SEQ ID NO: 194191 - DNA, 25 bp, Probe Sequence
cccaggcactgttttagctcttgcc

SEQ ID NO: 194192 - DNA, 25 bp, Probe Sequence
cccaggctctgactgagtttctttc

SEQ ID NO: 194193 - DNA, 25 bp, Probe Sequence
cccagtccagaggcctgattctgtt

SEQ ID NO: 194194 - DNA, 25 bp, Probe Sequence
cccagtgccagagttagcagtcttt

SEQ ID NO: 194195 - DNA, 25 bp, Probe Sequence
cccattgacgtctatgggtgtttgt

SEQ ID NO: 194196 - DNA, 25 bp, Probe Sequence
cccagtgacgtcatgcgagttggtt

SEQ ID NO: 194197 - DNA, 25 bp, Probe Sequence
cccagatacgacagatgatgctttt

SEQ ID NO: 194198 - DNA, 25 bp, Probe Sequence
cccagtgacagctaggatgtgcatt

SEQ ID NO: 194199 - DNA, 25 bp, Probe Sequence
cccatgcaatcacaccatgccatgt

SEQ ID NO: 194200 - DNA, 25 bp, Probe Sequence
cccatcaatgcagagcactccaggc

SEQ ID NO: 194201 - DNA, 25 bp, Probe Sequence
cccatgatggacacacccaagtcaa

SEQ ID NO: 194202 - DNA, 25 bp, Probe Sequence
ccctgtaactccacctgagttacaa

SEQ ID NO: 194203 - DNA, 25 bp, Probe Sequence
ccctcccttcacaccatgggataaa

SEQ ID NO: 194204 - DNA, 25 bp, Probe Sequence
ccccattttctcagaaaaatacaag

SEQ ID NO: 194205 - DNA, 25 bp, Probe Sequence
ccctcaatttccagcaccagaaaga

SEQ ID NO: 194206 - DNA, 25 bp, Probe Sequence
ccctacttctccacacagattgaga

SEQ ID NO: 194207 - DNA, 25 bp, Probe Sequence
ccctcgcgtttaacacaatatagtg

SEQ ID NO: 194208 - DNA, 25 bp, Probe Sequence
ccctcagtttgtaccgacagttctg

SEQ ID NO: 194209 - DNA, 25 bp, Probe Sequence
ccctcaagtttacatacagtgaaaa

SEQ ID NO: 194210 - DNA, 25 bp, Probe Sequence
cccccgctgttacacaggtgtttag

SEQ ID NO: 194211 - DNA, 25 bp, Probe Sequence
ccctccggctccaagaaggttatct

SEQ ID NO: 194212 - DNA, 25 bp, Probe Sequence
ccctcctctatggggacaggttcta

SEQ ID NO: 194213 - DNA, 25 bp, Probe Sequence
ccccttcttggggaaatgctgggca

SEQ ID NO: 194214 - DNA, 25 bp, Probe Sequence
ccctcaccatgccggtcaaaggagg

SEQ ID NO: 194215 - DNA, 25 bp, Probe Sequence
ccctacccagggactgtcgaatggc

SEQ ID NO: 194216 - DNA, 25 bp, Probe Sequence
ccctacggagagcacttggagatgg

SEQ ID NO: 194217 - DNA, 25 bp, Probe Sequence
cccatccggaagctctatgctgtgg

SEQ ID NO: 194218 - DNA, 25 bp, Probe Sequence
cccatgcgggaacttcgcatccgca

SEQ ID NO: 194219 - DNA, 25 bp, Probe Sequence
cccatcagaggaggtggcctctccc

SEQ ID NO: 194220 - DNA, 25 bp, Probe Sequence
cccaggaggagcgcgcacagctcct

SEQ ID NO: 194221 - DNA, 25 bp, Probe Sequence
ccctgagctgaacgggaagctcact

SEQ ID NO: 194222 - DNA, 25 bp, Probe Sequence
ccctgccatgtgctggtaacgcatg

SEQ ID NO: 194223 - DNA, 25 bp, Probe Sequence
ccctgccatgtgctggtaacgcatg

SEQ ID NO: 194224 - DNA, 25 bp, Probe Sequence
ccctccagtggggaaggctgcgata

SEQ ID NO: 194225 - DNA, 25 bp, Probe Sequence
ccctctagcggtgaagctccagggg

SEQ ID NO: 194226 - DNA, 25 bp, Probe Sequence
cccttctgggtgccaactactgagg

SEQ ID NO: 194227 - DNA, 25 bp, Probe Sequence
cccttctggaggcacacagtgcgga

SEQ ID NO: 194228 - DNA, 25 bp, Probe Sequence
cccttcttggggaaatgctgggcaa

SEQ ID NO: 194229 - DNA, 25 bp, Probe Sequence
cccttttgatgggaagtgcagtcag

SEQ ID NO: 194230 - DNA, 25 bp, Probe Sequence
cccatcttgtttcacactagtcaca

SEQ ID NO: 194231 - DNA, 25 bp, Probe Sequence
cccattggttaaaagcaagtcatag

SEQ ID NO: 194232 - DNA, 25 bp, Probe Sequence
cccatgttcttagaaatagctatag

SEQ ID NO: 194233 - DNA, 25 bp, Probe Sequence
cctctgtgtatgcacgtaaagtttg

SEQ ID NO: 194234 - DNA, 25 bp, Probe Sequence
ccctgttgcctatgtaggttctctg

SEQ ID NO: 194235 - DNA, 25 bp, Probe Sequence
ccctttgtcttcttagtttatagat

SEQ ID NO: 194236 - DNA, 25 bp, Probe Sequence
ccctttgtagccataccgtttgatt

SEQ ID NO: 194237 - DNA, 25 bp, Probe Sequence
gccctactgtaggttaccttctggt

SEQ ID NO: 194238 - DNA, 25 bp, Probe Sequence
ccctacttcctaaacatctgtctgg

SEQ ID NO: 194239 - DNA, 25 bp, Probe Sequence
ccctactgtctttgagaactatatt

SEQ ID NO: 194240 - DNA, 25 bp, Probe Sequence
ccctgcacttttctgatctaatttc

SEQ ID NO: 194241 - DNA, 25 bp, Probe Sequence
ccctagcgtattctgtcgagcagtc

SEQ ID NO: 194242 - DNA, 25 bp, Probe Sequence
ccctagacaatacgatggaacgttc

SEQ ID NO: 194243 - DNA, 25 bp, Probe Sequence
ccctggacaaagttgctgacaagct

SEQ ID NO: 194244 - DNA, 25 bp, Probe Sequence
cccatggcatcatagttgtgtatga

SEQ ID NO: 194245 - DNA, 25 bp, Probe Sequence
cccatggcataggcacctgtggtta

SEQ ID NO: 194246 - DNA, 25 bp, Probe Sequence
cccatgtcactggtcagcgtggttt

SEQ ID NO: 194247 - DNA, 25 bp, Probe Sequence
cccattcctgtttgctgtgtatgat

SEQ ID NO: 194248 - DNA, 25 bp, Probe Sequence
cccattcacctggatctcagtatca

SEQ ID NO: 194249 - DNA, 25 bp, Probe Sequence
cccattatcctgccagcatgggacc

SEQ ID NO: 194250 - DNA, 25 bp, Probe Sequence
cccatctaccttgtggagatccagt

SEQ ID NO: 194251 - DNA, 25 bp, Probe Sequence
ccgtctttattttgggcgccagcgg

SEQ ID NO: 194252 - DNA, 25 bp, Probe Sequence
ccgtctttattttgggcgccagcgg

SEQ ID NO: 194253 - DNA, 25 bp, Probe Sequence
ccagctttctttaaggtcttccagt

SEQ ID NO: 194254 - DNA, 25 bp, Probe Sequence
ccctatttgtctgaggttctcaagc

SEQ ID NO: 194255 - DNA, 25 bp, Probe Sequence
ccctattctcttttggtgtacattc

SEQ ID NO: 194256 - DNA, 25 bp, Probe Sequence
ccctgattttgctgctgggcaactt

SEQ ID NO: 194257 - DNA, 25 bp, Probe Sequence
cccattgctttaggcctggagactt

SEQ ID NO: 194258 - DNA, 25 bp, Probe Sequence
cccaggcttcctgctgtgaagacag

SEQ ID NO: 194259 - DNA, 25 bp, Probe Sequence
cccaggtacctcatgggaagcatgt

SEQ ID NO: 194260 - DNA, 25 bp, Probe Sequence
cccaggtatcgtagcggcgacacga

SEQ ID NO: 194261 - DNA, 25 bp, Probe Sequence
cccggtcaaggtgcagcgaaccatc

SEQ ID NO: 194262 - DNA, 25 bp, Probe Sequence
ccctgcagttagtttgcgggaactc

SEQ ID NO: 194263 - DNA, 25 bp, Probe Sequence
ccctgctggtaagagagttgtcact

SEQ ID NO: 194264 - DNA, 25 bp, Probe Sequence
ccctgctggtgtctagtgttttttt

SEQ ID NO: 194265 - DNA, 25 bp, Probe Sequence
ccctaggtgttttgttcaccattat

SEQ ID NO: 194266 - DNA, 25 bp, Probe Sequence
ccctagggatgattctttacccagt

SEQ ID NO: 194267 - DNA, 25 bp, Probe Sequence
ccctcaggaagtactctgtgaacta

SEQ ID NO: 194268 - DNA, 25 bp, Probe Sequence
ccctagtgagggactgtgttgactg

SEQ ID NO: 194269 - DNA, 25 bp, Probe Sequence
ccctactgatgatgtgttgttgcca

SEQ ID NO: 194270 - DNA, 25 bp, Probe Sequence
cccatctctgttgctgttggtgcaa

SEQ ID NO: 194271 - DNA, 25 bp, Probe Sequence
cccatctctgttgctgttggtgcaa

SEQ ID NO: 194272 - DNA, 25 bp, Probe Sequence
cccttctgccatcttctgggagaag

SEQ ID NO: 194273 - DNA, 25 bp, Probe Sequence
cccttctgtgagatcgcggtggagg

SEQ ID NO: 194274 - DNA, 25 bp, Probe Sequence
cccttcgagcaccacgcaagaagat

SEQ ID NO: 194275 - DNA, 25 bp, Probe Sequence
cccatttgaggttcttcagatagat

SEQ ID NO: 194276 - DNA, 25 bp, Probe Sequence
cccatgtggagtatcagtcgctcac

SEQ ID NO: 194277 - DNA, 25 bp, Probe Sequence
cccagggagtgcacagtgctccaga

SEQ ID NO: 194278 - DNA, 25 bp, Probe Sequence
cccaggggtcagcagagcttcagag

SEQ ID NO: 194279 - DNA, 25 bp, Probe Sequence
cccaggagttggaggcttcagtgag

SEQ ID NO: 194280 - DNA, 25 bp, Probe Sequence
cccagggggcagaggttgcagtgag

SEQ ID NO: 194281 - DNA, 25 bp, Probe Sequence
cccaggaggcggaggttgcagtgag

SEQ ID NO: 194282 - DNA, 25 bp, Probe Sequence
cccaggaggcggaggttgcagtgag

SEQ ID NO: 194283 - DNA, 25 bp, Probe Sequence
cccttcaggcggaggttgcagtgag

SEQ ID NO: 194284 - DNA, 25 bp, Probe Sequence
cccttcggccttgggattcagagcg

SEQ ID NO: 194285 - DNA, 25 bp, Probe Sequence
cccatcctgccctttagatctgggc

SEQ ID NO: 194286 - DNA, 25 bp, Probe Sequence
ccctcggtgatctttgagacgggca

SEQ ID NO: 194287 - DNA, 25 bp, Probe Sequence
ccctgcacagtgacttctgagatct

SEQ ID NO: 194288 - DNA, 25 bp, Probe Sequence
ccctcatctggtgactcatgatgcc

SEQ ID NO: 194289 - DNA, 25 bp, Probe Sequence
cccatatgcaaagaccatgcgccgg

SEQ ID NO: 194290 - DNA, 25 bp, Probe Sequence
cccaggctctgagagccagcccagg

SEQ ID NO: 194291 - DNA, 25 bp, Probe Sequence
cccaggctctacgagaagcggggtc

SEQ ID NO: 194292 - DNA, 25 bp, Probe Sequence
cccaggcctgccaggatgcaggggt

SEQ ID NO: 194293 - DNA, 25 bp, Probe Sequence
cccatggcctccatcgagtggagga

SEQ ID NO: 194294 - DNA, 25 bp, Probe Sequence
cccttcctcagcatcacagatggca

SEQ ID NO: 194295 - DNA, 25 bp, Probe Sequence
cccttctcctgaatcagcagggatg

SEQ ID NO: 194296 - DNA, 25 bp, Probe Sequence
ccctgctgtgttcccgataagatga

SEQ ID NO: 194297 - DNA, 25 bp, Probe Sequence
ccctggtgggacctgatgacgtgga

SEQ ID NO: 194298 - DNA, 25 bp, Probe Sequence
gcccaggctcggaggaccctggaaa

SEQ ID NO: 194299 - DNA, 25 bp, Probe Sequence
cccaggctgcggtgagaatgccaag

SEQ ID NO: 194300 - DNA, 25 bp, Probe Sequence
cccaggctggagtgcagtggtgcag

SEQ ID NO: 194301 - DNA, 25 bp, Probe Sequence
cccaggctaggcccaggttgggccg

SEQ ID NO: 194302 - DNA, 25 bp, Probe Sequence
cccgtctagagcattagttctggtc

SEQ ID NO: 194303 - DNA, 25 bp, Probe Sequence
cccttctgaggatgctgagaacggt

SEQ ID NO: 194304 - DNA, 25 bp, Probe Sequence
cccgtctgcgaatggaccactggag

SEQ ID NO: 194305 - DNA, 25 bp, Probe Sequence
ccctgtctgtagagggccctggtgt

SEQ ID NO: 194306 - DNA, 25 bp, Probe Sequence
cccatgggaagacgaggccctcggg

SEQ ID NO: 194307 - DNA, 25 bp, Probe Sequence
cccatggagaaagagcacgcccggc

SEQ ID NO: 194308 - DNA, 25 bp, Probe Sequence
ccctgctggaactcaacaacctgtg

SEQ ID NO: 194309 - DNA, 25 bp, Probe Sequence
ccctgcggtgtgtacacgaactcgg

SEQ ID NO: 194310 - DNA, 25 bp, Probe Sequence
cccatcggtgtgtaaggtggcctat

SEQ ID NO: 194311 - DNA, 25 bp, Probe Sequence
ccctccgggaaactgtggcgtgatg

SEQ ID NO: 194312 - DNA, 25 bp, Probe Sequence
ccctccgggaaactgtggcgtgatg

SEQ ID NO: 194313 - DNA, 25 bp, Probe Sequence
ccctccgggaaactgtggcgtgatg

SEQ ID NO: 194314 - DNA, 25 bp, Probe Sequence
ccctacgaggagctggaggcggagg

SEQ ID NO: 194315 - DNA, 25 bp, Probe Sequence
ccctagcgatggcttgggagatggg

SEQ ID NO: 194316 - DNA, 25 bp, Probe Sequence
cccggctgaacgtgctggagaagag

SEQ ID NO: 194317 - DNA, 25 bp, Probe Sequence
cccaggctgagcggaaggaggagaa

SEQ ID NO: 194318 - DNA, 25 bp, Probe Sequence
cccatggataccaagttgaagaaat

SEQ ID NO: 194319 - DNA, 25 bp, Probe Sequence
ccctcctacaaaagtgggaattatg

SEQ ID NO: 194320 - DNA, 25 bp, Probe Sequence
ccctaccacaacagatgccgtttat

SEQ ID NO: 194321 - DNA, 25 bp, Probe Sequence
ccctgacccaagggcagctggttct

SEQ ID NO: 194322 - DNA, 25 bp, Probe Sequence
ccctaccgatagaacagtggctcag

SEQ ID NO: 194323 - DNA, 25 bp, Probe Sequence
ccctacctgctgttgcaattggcat

SEQ ID NO: 194324 - DNA, 25 bp, Probe Sequence
ccctaccactttcatctgctgaaag

SEQ ID NO: 194325 - DNA, 25 bp, Probe Sequence
ccctaccactttcatctgctgaaag

SEQ ID NO: 194326 - DNA, 25 bp, Probe Sequence
ccctacaccttctgggctgaagatc

SEQ ID NO: 194327 - DNA, 25 bp, Probe Sequence
cccttgcccgctcgggtatgaagat

SEQ ID NO: 194328 - DNA, 25 bp, Probe Sequence
cccattatccgccagtttgtgaact

SEQ ID NO: 194329 - DNA, 25 bp, Probe Sequence
cccattctctccagtgtgtgtaaca

SEQ ID NO: 194330 - DNA, 25 bp, Probe Sequence
ccctactctccatcttcgttagagt

SEQ ID NO: 194331 - DNA, 25 bp, Probe Sequence
cccatgacccctatttgtctgaggt

SEQ ID NO: 194332 - DNA, 25 bp, Probe Sequence
cccatggtacctagtgtgtgtctga

SEQ ID NO: 194333 - DNA, 25 bp, Probe Sequence
ccctggcaaccaaccagtgactgca

SEQ ID NO: 194334 - DNA, 25 bp, Probe Sequence
cccttatgagcgggcgcagtgatta

SEQ ID NO: 194335 - DNA, 25 bp, Probe Sequence
cccatttagccctgatatgattact

SEQ ID NO: 194336 - DNA, 25 bp, Probe Sequence
ccctttatcacagagtatgctattt

SEQ ID NO: 194337 - DNA, 25 bp, Probe Sequence
ccctttctgccagcagttctggttc

SEQ ID NO: 194338 - DNA, 25 bp, Probe Sequence
ccctcttggcaacttgtgtcagagt

SEQ ID NO: 194339 - DNA, 25 bp, Probe Sequence
ccctattgacttctatgtcggtata

SEQ ID NO: 194340 - DNA, 25 bp, Probe Sequence
cccttgctgactacttttctggaat

SEQ ID NO: 194341 - DNA, 25 bp, Probe Sequence
cccttgcatggatgtttttaacaat

SEQ ID NO: 194342 - DNA, 25 bp, Probe Sequence
ccctgcctcgagttagttttacaat

SEQ ID NO: 194343 - DNA, 25 bp, Probe Sequence
ccctctctacaagtgcagcttttta

SEQ ID NO: 194344 - DNA, 25 bp, Probe Sequence
ccctggcatccaaatggctgctttt

SEQ ID NO: 194345 - DNA, 25 bp, Probe Sequence
cccatatgtgccagtccactttgat

SEQ ID NO: 194346 - DNA, 25 bp, Probe Sequence
cccttaggctttagcagctttgcat

SEQ ID NO: 194347 - DNA, 25 bp, Probe Sequence
cccttcattgctaagacaccttgtc

SEQ ID NO: 194348 - DNA, 25 bp, Probe Sequence
cccttgcatgggacgaaagcttggc

SEQ ID NO: 194349 - DNA, 25 bp, Probe Sequence
ccctatgtggagagcgacagtaggc

SEQ ID NO: 194350 - DNA, 25 bp, Probe Sequence
ccctgaagtcagtgccaaatggtgc

SEQ ID NO: 194351 - DNA, 25 bp, Probe Sequence
ccctgaaggcacctgtcaactggag

SEQ ID NO: 194352 - DNA, 25 bp, Probe Sequence
cccgaagtcctgttcagaaggactc

SEQ ID NO: 194353 - DNA, 25 bp, Probe Sequence
cccgatggtctcattccgtggacga

SEQ ID NO: 194354 - DNA, 25 bp, Probe Sequence
ccctgaggtctgatatccctgggac

SEQ ID NO: 194355 - DNA, 25 bp, Probe Sequence
ccctgcaggactggcattgcactag

SEQ ID NO: 194356 - DNA, 25 bp, Probe Sequence
ccctgcaggactggcattgcactag

SEQ ID NO: 194357 - DNA, 25 bp, Probe Sequence
ccctcaggacgctggatgccagctc

SEQ ID NO: 194358 - DNA, 25 bp, Probe Sequence
cccataagactgtgagcatctgacc

SEQ ID NO: 194359 - DNA, 25 bp, Probe Sequence
ccctcatcatgatcagcgtcatcgt

SEQ ID NO: 194360 - DNA, 25 bp, Probe Sequence
ccctgccacatggcgcgaatgctgg

SEQ ID NO: 194361 - DNA, 25 bp, Probe Sequence
cccatcccagatacgacagatgatg

SEQ ID NO: 194362 - DNA, 25 bp, Probe Sequence
cccatgtccatgttgtactatgatg

SEQ ID NO: 194363 - DNA, 25 bp, Probe Sequence
cccatgtccatgttgtactatgatg

SEQ ID NO: 194364 - DNA, 25 bp, Probe Sequence
cccatctgactgcgtagctgagagg

SEQ ID NO: 194365 - DNA, 25 bp, Probe Sequence
cccatgcgattcaagtcgcggctgc

SEQ ID NO: 194366 - DNA, 25 bp, Probe Sequence
cccatgctatctcagggggctgagg

SEQ ID NO: 194367 - DNA, 25 bp, Probe Sequence
cccgaatcatgccgtggtgtctcgg

SEQ ID NO: 194368 - DNA, 25 bp, Probe Sequence
ccctgacatcccgagaagtccagac

SEQ ID NO: 194369 - DNA, 25 bp, Probe Sequence
cccatacccctggtgagcaccagat

SEQ ID NO: 194370 - DNA, 25 bp, Probe Sequence
cccataccaaccttgagacatagat

SEQ ID NO: 194371 - DNA, 25 bp, Probe Sequence
cccatagccaaggagggaacatgta

SEQ ID NO: 194372 - DNA, 25 bp, Probe Sequence
cccatgagggaggtggatgaacaga

SEQ ID NO: 194373 - DNA, 25 bp, Probe Sequence
cccatcactggactgtaggcacaag

SEQ ID NO: 194374 - DNA, 25 bp, Probe Sequence
cccatcactgtggccgagtacatga

SEQ ID NO: 194375 - DNA, 25 bp, Probe Sequence
cccatcttggcttgaagaacagtaa

SEQ ID NO: 194376 - DNA, 25 bp, Probe Sequence
ccctcttggctgccaagcacgcaga

SEQ ID NO: 194377 - DNA, 25 bp, Probe Sequence
ccctcttggctgccaagcacgcaga

SEQ ID NO: 194378 - DNA, 25 bp, Probe Sequence
ccctcgtgaggctggatctcaaaaa

SEQ ID NO: 194379 - DNA, 25 bp, Probe Sequence
cccttggaacctggccatgcaaagc

SEQ ID NO: 194380 - DNA, 25 bp, Probe Sequence
cccttcacaagaggccgcagagaag

SEQ ID NO: 194381 - DNA, 25 bp, Probe Sequence
ccctacatctaagccagagagagac

SEQ ID NO: 194382 - DNA, 25 bp, Probe Sequence
cccataataccaccctgacagagat

SEQ ID NO: 194383 - DNA, 25 bp, Probe Sequence
cccatcgattccctactaatgagag

SEQ ID NO: 194384 - DNA, 25 bp, Probe Sequence
cccatcgacctccgctggaggaatg

SEQ ID NO: 194385 - DNA, 25 bp, Probe Sequence
cccatgagaccttctgccagaaagt

SEQ ID NO: 194386 - DNA, 25 bp, Probe Sequence
ccctcatgaacggctccgagagcag

SEQ ID NO: 194387 - DNA, 25 bp, Probe Sequence
ccctatgattcaagctcccaggcag

SEQ ID NO: 194388 - DNA, 25 bp, Probe Sequence
ccctgtatttagtcaccagtgccta

SEQ ID NO: 194389 - DNA, 25 bp, Probe Sequence
ccctggctctgtatcaggcacttta

SEQ ID NO: 194390 - DNA, 25 bp, Probe Sequence
cccttctgtgtcacagttcttggtg

SEQ ID NO: 194391 - DNA, 25 bp, Probe Sequence
cccttttctccggagacttggtgat

SEQ ID NO: 194392 - DNA, 25 bp, Probe Sequence
ccctgtttccctggaactgctaaga

SEQ ID NO: 194393 - DNA, 25 bp, Probe Sequence
ccctgtttccctggaactgctaaga

SEQ ID NO: 194394 - DNA, 25 bp, Probe Sequence
cccttcttccttgatgatcgcagaa

SEQ ID NO: 194395 - DNA, 25 bp, Probe Sequence
ccctttctcacatgttatctgctaa

SEQ ID NO: 194396 - DNA, 25 bp, Probe Sequence
ccctgttaccttgctagctgcaaaa

SEQ ID NO: 194397 - DNA, 25 bp, Probe Sequence
tcccgttaattttcttgcagaaaag

SEQ ID NO: 194398 - DNA, 25 bp, Probe Sequence
cccgttccattgaccggataacaag

SEQ ID NO: 194399 - DNA, 25 bp, Probe Sequence
ccctgtctggtacccgagaagaaag

SEQ ID NO: 194400 - DNA, 25 bp, Probe Sequence
ccctctctagtactccgtggaagga

SEQ ID NO: 194401 - DNA, 25 bp, Probe Sequence
ccctgtctgcttatccttggaaggt

SEQ ID NO: 194402 - DNA, 25 bp, Probe Sequence
cccttttgtcttcttgataatagtc

SEQ ID NO: 194403 - DNA, 25 bp, Probe Sequence
cccttgtgtgatctgtttggactat

SEQ ID NO: 194404 - DNA, 25 bp, Probe Sequence
cccttgtgagtcctgcatcatttga

SEQ ID NO: 194405 - DNA, 25 bp, Probe Sequence
cccttgtgtatcctgcagacatgta

SEQ ID NO: 194406 - DNA, 25 bp, Probe Sequence
ccctgtgttcatctgtgacattaaa

SEQ ID NO: 194407 - DNA, 25 bp, Probe Sequence
ccctgtattcaggctctgctttaaa

SEQ ID NO: 194408 - DNA, 25 bp, Probe Sequence
ccctgtattcaggctctgctttaaa

SEQ ID NO: 194409 - DNA, 25 bp, Probe Sequence
cccgtttctgccagggctagtattg

SEQ ID NO: 194410 - DNA, 25 bp, Probe Sequence
ccctgttactccactggtagtcatc

SEQ ID NO: 194411 - DNA, 25 bp, Probe Sequence
ccctcctagcccagggctgagtttt

SEQ ID NO: 194412 - DNA, 25 bp, Probe Sequence
ccctcttggctcatgggcctaaatt

SEQ ID NO: 194413 - DNA, 25 bp, Probe Sequence
ccctctagcctggggggcttgttag

SEQ ID NO: 194414 - DNA, 25 bp, Probe Sequence
ccctcaagccgatgactccatggct

SEQ ID NO: 194415 - DNA, 25 bp, Probe Sequence
ccctcaagatccagacactcaagtc

SEQ ID NO: 194416 - DNA, 25 bp, Probe Sequence
ccctcaggtctcagactccatgaga

SEQ ID NO: 194417 - DNA, 25 bp, Probe Sequence
ccctcaagctttgtcctcatgaaga

SEQ ID NO: 194418 - DNA, 25 bp, Probe Sequence
ccctcaacatatatcccttgtgcga

SEQ ID NO: 194419 - DNA, 25 bp, Probe Sequence
ccctcaacatatatcccttgtgcga

SEQ ID NO: 194420 - DNA, 25 bp, Probe Sequence
ccctcacaatacttgccacattact

SEQ ID NO: 194421 - DNA, 25 bp, Probe Sequence
ccctcacaaacttgccaataatgac

SEQ ID NO: 194422 - DNA, 25 bp, Probe Sequence
ccccacaattctacctctaggaatt

SEQ ID NO: 194423 - DNA, 25 bp, Probe Sequence
cccccaattcgtacgtggagaagtg

SEQ ID NO: 194424 - DNA, 25 bp, Probe Sequence
gccacgtcggtctgggtgttaagtg

SEQ ID NO: 194425 - DNA, 25 bp, Probe Sequence
gccacgtcggtctgggtgttaagtg

SEQ ID NO: 194426 - DNA, 25 bp, Probe Sequence
cccgggtcctggtgtttgaggatga

SEQ ID NO: 194427 - DNA, 25 bp, Probe Sequence
ccctgggccctttaaatataggctg

SEQ ID NO: 194428 - DNA, 25 bp, Probe Sequence
cccgtgtctactaaaaatacagaat

SEQ ID NO: 194429 - DNA, 25 bp, Probe Sequence
ccctgtgttatggaaagcttgaaaa

SEQ ID NO: 194430 - DNA, 25 bp, Probe Sequence
ccctctgacttcaaaagcttagaag

SEQ ID NO: 194431 - DNA, 25 bp, Probe Sequence
ccctctgtttgaaatacctagtgtg

SEQ ID NO: 194432 - DNA, 25 bp, Probe Sequence
ccctcatgtttgtgataaccgtggc

SEQ ID NO: 194433 - DNA, 25 bp, Probe Sequence
ccctggtttgcaatggaaccttggc

SEQ ID NO: 194434 - DNA, 25 bp, Probe Sequence
cccgagctgttgaggtacttgctgg

SEQ ID NO: 194435 - DNA, 25 bp, Probe Sequence
cccgtccttgtacgtacttcatatg

SEQ ID NO: 194436 - DNA, 25 bp, Probe Sequence
cccgcacatcgtcaggtactacgat

SEQ ID NO: 194437 - DNA, 25 bp, Probe Sequence
cccgttagtccaactactcaggaag

SEQ ID NO: 194438 - DNA, 25 bp, Probe Sequence
ccctgtagtcccatgctatctcagg

SEQ ID NO: 194439 - DNA, 25 bp, Probe Sequence
cccgtaatcccagctactaaggctg

SEQ ID NO: 194440 - DNA, 25 bp, Probe Sequence
ccctgctaattccaccttatggggg

SEQ ID NO: 194441 - DNA, 25 bp, Probe Sequence
ccctgtaatccgccttggggagtgg

SEQ ID NO: 194442 - DNA, 25 bp, Probe Sequence
cccgtaaagtggttggttgcagttg

SEQ ID NO: 194443 - DNA, 25 bp, Probe Sequence
cccggaagtcggaggttgcagtgag

SEQ ID NO: 194444 - DNA, 25 bp, Probe Sequence
cccgggagggtgcatggactcatta

SEQ ID NO: 194445 - DNA, 25 bp, Probe Sequence
cccgtggtgggttttcaggcaatag

SEQ ID NO: 194446 - DNA, 25 bp, Probe Sequence
cccgggtggttgctgccgaaatggg

SEQ ID NO: 194447 - DNA, 25 bp, Probe Sequence
ccccaggtttcggatggagaaactg

SEQ ID NO: 194448 - DNA, 25 bp, Probe Sequence
ccgccgggtttttggaatctacatg

SEQ ID NO: 194449 - DNA, 25 bp, Probe Sequence
ccgcgagggcctgcgttcaataaaa

SEQ ID NO: 194450 - DNA, 25 bp, Probe Sequence
cccgtgaccctgaggtcgtcaatga

SEQ ID NO: 194451 - DNA, 25 bp, Probe Sequence
cccttcaccgtggatgttttcagaa

SEQ ID NO: 194452 - DNA, 25 bp, Probe Sequence
cccttcactggtaatgtgtccattc

SEQ ID NO: 194453 - DNA, 25 bp, Probe Sequence
cccttccaaggttggtccatgccaa

SEQ ID NO: 194454 - DNA, 25 bp, Probe Sequence
cccttcaaaggtggagcccattcct

SEQ ID NO: 194455 - DNA, 25 bp, Probe Sequence
ccctgtaagaggtggctccttcctc

SEQ ID NO: 194456 - DNA, 25 bp, Probe Sequence
ccctcatgaaaacaagcccttgacc

SEQ ID NO: 194457 - DNA, 25 bp, Probe Sequence
ccccaagttgagaaagctcctcagc

SEQ ID NO: 194458 - DNA, 25 bp, Probe Sequence
cccgaagactaggcaactttaccag

SEQ ID NO: 194459 - DNA, 25 bp, Probe Sequence
ccctgaggatcctccaatcttgacc

SEQ ID NO: 194460 - DNA, 25 bp, Probe Sequence
ccctaggactcatctacatttccca

SEQ ID NO: 194461 - DNA, 25 bp, Probe Sequence
ccctagcagacttttacttctctta

SEQ ID NO: 194462 - DNA, 25 bp, Probe Sequence
ccctgagagaccagttcttttagaa

SEQ ID NO: 194463 - DNA, 25 bp, Probe Sequence
ccctggagacaccattcacttttac

SEQ ID NO: 194464 - DNA, 25 bp, Probe Sequence
cccttggcaactactgattttgttc

SEQ ID NO: 194465 - DNA, 25 bp, Probe Sequence
ccactcgggacacctggatggtttc

SEQ ID NO: 194466 - DNA, 25 bp, Probe Sequence
ccctagaggactccatggctgagag

SEQ ID NO: 194467 - DNA, 25 bp, Probe Sequence
ccctgcgcaggactcagatgacttc

SEQ ID NO: 194468 - DNA, 25 bp, Probe Sequence
ccctgacaccatccagtgtgcatac

SEQ ID NO: 194469 - DNA, 25 bp, Probe Sequence
ccctacccatgtgtggctgagctga

SEQ ID NO: 194470 - DNA, 25 bp, Probe Sequence
ccctacagccatgctctggtggctg

SEQ ID NO: 194471 - DNA, 25 bp, Probe Sequence
ccctagcagtctgccatggactctg

SEQ ID NO: 194472 - DNA, 25 bp, Probe Sequence
cccttgggtcctgggaatgctgctg

SEQ ID NO: 194473 - DNA, 25 bp, Probe Sequence
cctttaggactgggtggatggagaa

SEQ ID NO: 194474 - DNA, 25 bp, Probe Sequence
cccttgtggactggggacaggacaa

SEQ ID NO: 194475 - DNA, 25 bp, Probe Sequence
ccctggtggcatgcggggaggaaga

SEQ ID NO: 194476 - DNA, 25 bp, Probe Sequence
cccggggctgcgtgaaggaacagtt

SEQ ID NO: 194477 - DNA, 25 bp, Probe Sequence
ccacaaggaattttacagggaagat

SEQ ID NO: 194478 - DNA, 25 bp, Probe Sequence
cccataggtagtttaacaggcatta

SEQ ID NO: 194479 - DNA, 25 bp, Probe Sequence
ccctcagcaccactttgaacagaat

SEQ ID NO: 194480 - DNA, 25 bp, Probe Sequence
ccctacaccaaataccagacgcttg

SEQ ID NO: 194481 - DNA, 25 bp, Probe Sequence
ccctgagcatcctggttcaaacggg

SEQ ID NO: 194482 - DNA, 25 bp, Probe Sequence
ccctggaccatctgcatccaaagga

SEQ ID NO: 194483 - DNA, 25 bp, Probe Sequence
ccctggaccatctgcatccaaagga

SEQ ID NO: 194484 - DNA, 25 bp, Probe Sequence
ccctggaccatctgcatccaaagga

SEQ ID NO: 194485 - DNA, 25 bp, Probe Sequence
ccctgccacactggcagcatcaaca

SEQ ID NO: 194486 - DNA, 25 bp, Probe Sequence
ccctgcagcatgtcatgctcccaga

SEQ ID NO: 194487 - DNA, 25 bp, Probe Sequence
ccctcagtacagcccacagtgggtg

SEQ ID NO: 194488 - DNA, 25 bp, Probe Sequence
cctaggtagacagacttgggtggca

SEQ ID NO: 194489 - DNA, 25 bp, Probe Sequence
ccaagggcgcaagagtagcggtcca

SEQ ID NO: 194490 - DNA, 25 bp, Probe Sequence
ccctgtcgccaagaggactggggaa

SEQ ID NO: 194491 - DNA, 25 bp, Probe Sequence
ccctgtcccagagcagcgagtctgg

SEQ ID NO: 194492 - DNA, 25 bp, Probe Sequence
cccttggcacgagggcagggctggc

SEQ ID NO: 194493 - DNA, 25 bp, Probe Sequence
cccttggcccacagggcactgaggg

SEQ ID NO: 194494 - DNA, 25 bp, Probe Sequence
ccctctgtccccagggatcaaacag

SEQ ID NO: 194495 - DNA, 25 bp, Probe Sequence
ccctctcccaccaagactatgagaa

SEQ ID NO: 194496 - DNA, 25 bp, Probe Sequence
ccctgcatcacctcaagtgtgtaga

SEQ ID NO: 194497 - DNA, 25 bp, Probe Sequence
cccgctgcccaatcatttgcaatgc

SEQ ID NO: 194498 - DNA, 25 bp, Probe Sequence
cccgttccagattgccttgaatttt

SEQ ID NO: 194499 - DNA, 25 bp, Probe Sequence
cctctttcaaactgttaattctgtc

SEQ ID NO: 194500 - DNA, 25 bp, Probe Sequence
ccttttaccagcttttaaccatctg

SEQ ID NO: 194501 - DNA, 25 bp, Probe Sequence
ccctctaaggaggctcttgaaccct

SEQ ID NO: 194502 - DNA, 25 bp, Probe Sequence
ccctcataagtcgtcactaatacac

SEQ ID NO: 194503 - DNA, 25 bp, Probe Sequence
ccctcagcgaggactcctacaaaga

SEQ ID NO: 194504 - DNA, 25 bp, Probe Sequence
ccgtcaggacgttgatctgaaaaac

SEQ ID NO: 194505 - DNA, 25 bp, Probe Sequence
ccctcaggtccttgactgattcaca

SEQ ID NO: 194506 - DNA, 25 bp, Probe Sequence
ccctgcaggctgtttatatgttcac

SEQ ID NO: 194507 - DNA, 25 bp, Probe Sequence
ccctgctgagactttaatctccacc

SEQ ID NO: 194508 - DNA, 25 bp, Probe Sequence
ccctcagcatacaattacgctccac

SEQ ID NO: 194509 - DNA, 25 bp, Probe Sequence
ccctattcgtataagcaatctgcac

SEQ ID NO: 194510 - DNA, 25 bp, Probe Sequence
cccttccctataggaacagcccagc

SEQ ID NO: 194511 - DNA, 25 bp, Probe Sequence
ccctctccccaagaaacaacatgaa

SEQ ID NO: 194512 - DNA, 25 bp, Probe Sequence
ccctacctcaaagcacaaaagtggt

SEQ ID NO: 194513 - DNA, 25 bp, Probe Sequence
cccttccttatcgccgacaagtggc

SEQ ID NO: 194514 - DNA, 25 bp, Probe Sequence
ccccttattcgctccgacaagatga

SEQ ID NO: 194515 - DNA, 25 bp, Probe Sequence
ccccttaatactgtgcagcccaaac

SEQ ID NO: 194516 - DNA, 25 bp, Probe Sequence
ccctgcgtaaactggatgacaccaa

SEQ ID NO: 194517 - DNA, 25 bp, Probe Sequence
ccctgtgttagaccggatccgatat

SEQ ID NO: 194518 - DNA, 25 bp, Probe Sequence
cccttgttagatcccattttcatgt

SEQ ID NO: 194519 - DNA, 25 bp, Probe Sequence
ccctttcctatgtatgcatttcctt

SEQ ID NO: 194520 - DNA, 25 bp, Probe Sequence
ccctcctacttgctgcaagtcactt

SEQ ID NO: 194521 - DNA, 25 bp, Probe Sequence
ccttcagatatttcagtcaagtccg

SEQ ID NO: 194522 - DNA, 25 bp, Probe Sequence
ccgagccatatagcaggcacgtccg

SEQ ID NO: 194523 - DNA, 25 bp, Probe Sequence
ccgcatcaaagtgacgaccagccag

SEQ ID NO: 194524 - DNA, 25 bp, Probe Sequence
ccctgatcatcaaagccctcaagga

SEQ ID NO: 194525 - DNA, 25 bp, Probe Sequence
cccttcacaaagagtatatgctagt

SEQ ID NO: 194526 - DNA, 25 bp, Probe Sequence
ccctacaaacccatgattgtcaggg

SEQ ID NO: 194527 - DNA, 25 bp, Probe Sequence
ccccctaaccgctgcttgaaagata

SEQ ID NO: 194528 - DNA, 25 bp, Probe Sequence
cccctcttccaatgagcttaaaaca

SEQ ID NO: 194529 - DNA, 25 bp, Probe Sequence
ccctctctttattaagcttcctaag

SEQ ID NO: 194530 - DNA, 25 bp, Probe Sequence
cccttttcatatcccgattcttaag

SEQ ID NO: 194531 - DNA, 25 bp, Probe Sequence
ccctttcaacatccacgacttaaag

SEQ ID NO: 194532 - DNA, 25 bp, Probe Sequence
ccctttactcatgccaaattcacag

SEQ ID NO: 194533 - DNA, 25 bp, Probe Sequence
cccgtttcaatgtccaataaatgca

SEQ ID NO: 194534 - DNA, 25 bp, Probe Sequence
ccctgataccaagccacacaaagac

SEQ ID NO: 194535 - DNA, 25 bp, Probe Sequence
cccgaaccacactccaagggagagc

SEQ ID NO: 194536 - DNA, 25 bp, Probe Sequence
cctcggcccccaagaagggagacag

SEQ ID NO: 194537 - DNA, 25 bp, Probe Sequence
ccctagccctccttatcaaaggaca

SEQ ID NO: 194538 - DNA, 25 bp, Probe Sequence
ccctagctcaccacatagcacatag

SEQ ID NO: 194539 - DNA, 25 bp, Probe Sequence
cccttgtcattctcaacatctcaga

SEQ ID NO: 194540 - DNA, 25 bp, Probe Sequence
cccttgtcagtgtctattgcaccag

SEQ ID NO: 194541 - DNA, 25 bp, Probe Sequence
ccctttgctatgtgatgctacacac

SEQ ID NO: 194542 - DNA, 25 bp, Probe Sequence
cccgtttgctgatggtcaacactct

SEQ ID NO: 194543 - DNA, 25 bp, Probe Sequence
cccttgtttaaggatcacacgccca

SEQ ID NO: 194544 - DNA, 25 bp, Probe Sequence
ccccctcttcaagaggcaggctcca

SEQ ID NO: 194545 - DNA, 25 bp, Probe Sequence
ccctttcttaaggaggcggatgcca

SEQ ID NO: 194546 - DNA, 25 bp, Probe Sequence
cccgtttcatcatggtttggtccag

SEQ ID NO: 194547 - DNA, 25 bp, Probe Sequence
cccgatgtttaattttagagctcca

SEQ ID NO: 194548 - DNA, 25 bp, Probe Sequence
ccctctgtttgaaattctagagcca

SEQ ID NO: 194549 - DNA, 25 bp, Probe Sequence
cccttgataaaccatctctagagag

SEQ ID NO: 194550 - DNA, 25 bp, Probe Sequence
ccctgtgcatagtacgacctttact

SEQ ID NO: 194551 - DNA, 25 bp, Probe Sequence
ccctgtgatcagaacctccaaatac

SEQ ID NO: 194552 - DNA, 25 bp, Probe Sequence
ccctgctgaagggccctaactagag

SEQ ID NO: 194553 - DNA, 25 bp, Probe Sequence
cccttcaaggatctcaccttcacag

SEQ ID NO: 194554 - DNA, 25 bp, Probe Sequence
cccttcaaggatctcaccttcacag

SEQ ID NO: 194555 - DNA, 25 bp, Probe Sequence
ccctaaatgtatgtcaacttcactt

SEQ ID NO: 194556 - DNA, 25 bp, Probe Sequence
ccctaatatgtatactatcttttta

SEQ ID NO: 194557 - DNA, 25 bp, Probe Sequence
ccctttagaatgtcacatttttctt

SEQ ID NO: 194558 - DNA, 25 bp, Probe Sequence
ccctctggaatttatgcttttcctt

SEQ ID NO: 194559 - DNA, 25 bp, Probe Sequence
ccctcttaactactgctttagtagt

SEQ ID NO: 194560 - DNA, 25 bp, Probe Sequence
ccctgttaactactacgttgacact

SEQ ID NO: 194561 - DNA, 25 bp, Probe Sequence
ccctcttgactcagtacgtggacac

SEQ ID NO: 194562 - DNA, 25 bp, Probe Sequence
ccctcttgtctgccagaagggaaac

SEQ ID NO: 194563 - DNA, 25 bp, Probe Sequence
ccctcattgtagcgaagagcaggaa

SEQ ID NO: 194564 - DNA, 25 bp, Probe Sequence
ccctgatttgcccatgctaagcagg

SEQ ID NO: 194565 - DNA, 25 bp, Probe Sequence
ccctagattgctcaatcaatcacga

SEQ ID NO: 194566 - DNA, 25 bp, Probe Sequence
cccttattgctgccaaaaccacatg

SEQ ID NO: 194567 - DNA, 25 bp, Probe Sequence
cccttttctggacaccaactgtgtc

SEQ ID NO: 194568 - DNA, 25 bp, Probe Sequence
ccctctttcttacatccaaggactg

SEQ ID NO: 194569 - DNA, 25 bp, Probe Sequence
ccctctttcttacatccaaggactg

SEQ ID NO: 194570 - DNA, 25 bp, Probe Sequence
cccgctttctaccgttaagagacat

SEQ ID NO: 194571 - DNA, 25 bp, Probe Sequence
ccctgacgtgaacattgtaaggact

SEQ ID NO: 194572 - DNA, 25 bp, Probe Sequence
cccgaggagaagctggttgaggccc

SEQ ID NO: 194573 - DNA, 25 bp, Probe Sequence
ccctcggagaagagctgttcacagc

SEQ ID NO: 194574 - DNA, 25 bp, Probe Sequence
cccccaagcaggagtttctcgacat

SEQ ID NO: 194575 - DNA, 25 bp, Probe Sequence
cccccaagcaggagtttctcgacat

SEQ ID NO: 194576 - DNA, 25 bp, Probe Sequence
cctccccagggtgggtacttggatg

SEQ ID NO: 194577 - DNA, 25 bp, Probe Sequence
ccgccttagcggtagtaactttgtg

SEQ ID NO: 194578 - DNA, 25 bp, Probe Sequence
cccgttgacgtcaatgggagttgtt

SEQ ID NO: 194579 - DNA, 25 bp, Probe Sequence
ccctttatctggaatgtggcattag

SEQ ID NO: 194580 - DNA, 25 bp, Probe Sequence
cccttttcagagaatgtaaatgatt

SEQ ID NO: 194581 - DNA, 25 bp, Probe Sequence
ccctttcgatgaggctgttaaatta

SEQ ID NO: 194582 - DNA, 25 bp, Probe Sequence
ccgtgcccgaacagttacatcatta

SEQ ID NO: 194583 - DNA, 25 bp, Probe Sequence
ccctccagaaacagtggactctcta

SEQ ID NO: 194584 - DNA, 25 bp, Probe Sequence
gcctcccgttggagtgagagcctct

SEQ ID NO: 194585 - DNA, 25 bp, Probe Sequence
cctcctccctggataggacctaatg

SEQ ID NO: 194586 - DNA, 25 bp, Probe Sequence
cccgatctccgttaaggaccttatg

SEQ ID NO: 194587 - DNA, 25 bp, Probe Sequence
ccgcgattctaccacaagtgaccat

SEQ ID NO: 194588 - DNA, 25 bp, Probe Sequence
ccctattcatacctctgagttcctg

SEQ ID NO: 194589 - DNA, 25 bp, Probe Sequence
ccctatggcgaatctgaggctcctg

SEQ ID NO: 194590 - DNA, 25 bp, Probe Sequence
ccctgatagccaacagctgggtcct

SEQ ID NO: 194591 - DNA, 25 bp, Probe Sequence
ccctgataccaggagcctgggcctc

SEQ ID NO: 194592 - DNA, 25 bp, Probe Sequence
ccctggctatcagcaggtgggctcc

SEQ ID NO: 194593 - DNA, 25 bp, Probe Sequence
ccctgagtacagtgttgcaatatgc

SEQ ID NO: 194594 - DNA, 25 bp, Probe Sequence
ccctggtagaggtcatcatcaatac

SEQ ID NO: 194595 - DNA, 25 bp, Probe Sequence
ccctcagtcaggcctatgcatgaaa

SEQ ID NO: 194596 - DNA, 25 bp, Probe Sequence
ccctcaacagtgccaagctgcactc

SEQ ID NO: 194597 - DNA, 25 bp, Probe Sequence
cccgaaattggccagtgacgaccgc

SEQ ID NO: 194598 - DNA, 25 bp, Probe Sequence
cccgtagtctgtggcagtgaacctg

SEQ ID NO: 194599 - DNA, 25 bp, Probe Sequence
ccctgtccctcagggtagcaccatg

SEQ ID NO: 194600 - DNA, 25 bp, Probe Sequence
cccttccctcacagtatatgaatga

SEQ ID NO: 194601 - DNA, 25 bp, Probe Sequence
cccttaacgccactgaactgtatgc

SEQ ID NO: 194602 - DNA, 25 bp, Probe Sequence
ccctctaccgcatgcgaatctttgc

SEQ ID NO: 194603 - DNA, 25 bp, Probe Sequence
ccctttgccacaagagatcctttca

SEQ ID NO: 194604 - DNA, 25 bp, Probe Sequence
cccttctgcaagaaagcctctttgc

SEQ ID NO: 194605 - DNA, 25 bp, Probe Sequence
ccctttctcaagaatgcccatctgt

SEQ ID NO: 194606 - DNA, 25 bp, Probe Sequence
ccctttgatctgtaatgcaccactg

SEQ ID NO: 194607 - DNA, 25 bp, Probe Sequence
ccctcatttcatgtgacagccattg

SEQ ID NO: 194608 - DNA, 25 bp, Probe Sequence
ccctatattatggtgacacctatat

SEQ ID NO: 194609 - DNA, 25 bp, Probe Sequence
ccctctcatggggtacccttgataa

SEQ ID NO: 194610 - DNA, 25 bp, Probe Sequence
ccgcacactttgatttccttaatag

SEQ ID NO: 194611 - DNA, 25 bp, Probe Sequence
ccctcagtatggttcttcgctgtaa

SEQ ID NO: 194612 - DNA, 25 bp, Probe Sequence
ccctcatccgtattctttgtgttga

SEQ ID NO: 194613 - DNA, 25 bp, Probe Sequence
ccctcagacagtttgcttattttat

SEQ ID NO: 194614 - DNA, 25 bp, Probe Sequence
ccctcacacacttggttttgttcta

SEQ ID NO: 194615 - DNA, 25 bp, Probe Sequence
ccctcgcaactccaggatggtgtgt

SEQ ID NO: 194616 - DNA, 25 bp, Probe Sequence
ccctcgcaactccaggatggtgtgt

SEQ ID NO: 194617 - DNA, 25 bp, Probe Sequence
ccctcgcaactccaggatggtgtgt

SEQ ID NO: 194618 - DNA, 25 bp, Probe Sequence
ccctcctatggccaggatggcatgt

SEQ ID NO: 194619 - DNA, 25 bp, Probe Sequence
ccccacattggccagtggactcatc

SEQ ID NO: 194620 - DNA, 25 bp, Probe Sequence
ccctatcttgtgagtggggcatctg

SEQ ID NO: 194621 - DNA, 25 bp, Probe Sequence
ccgcattcttttcaggaccctgaac

SEQ ID NO: 194622 - DNA, 25 bp, Probe Sequence
cccttcatttcctggatccaagata

SEQ ID NO: 194623 - DNA, 25 bp, Probe Sequence
cccgtctctacgttagatccagaat

SEQ ID NO: 194624 - DNA, 25 bp, Probe Sequence
ccctggcttgcagaaaatccagaaa

SEQ ID NO: 194625 - DNA, 25 bp, Probe Sequence
ccctgactcgggccaaatttgaaga

SEQ ID NO: 194626 - DNA, 25 bp, Probe Sequence
ccctgccctggactcaataattgat

SEQ ID NO: 194627 - DNA, 25 bp, Probe Sequence
ccctgccacttgctaatacagctct

SEQ ID NO: 194628 - DNA, 25 bp, Probe Sequence
ccgctccttaggaatgttagcttac

SEQ ID NO: 194629 - DNA, 25 bp, Probe Sequence
cccggcttaggactgggagtgtgac

SEQ ID NO: 194630 - DNA, 25 bp, Probe Sequence
cccgactctggggtagtgtgtggcc

SEQ ID NO: 194631 - DNA, 25 bp, Probe Sequence
ccctgtctagggcaaactgtggccc

SEQ ID NO: 194632 - DNA, 25 bp, Probe Sequence
ccctgcccagaggactaacagggca

SEQ ID NO: 194633 - DNA, 25 bp, Probe Sequence
ccctggaataggataataggcaatt

SEQ ID NO: 194634 - DNA, 25 bp, Probe Sequence
ccctgggtcagtgtggtcgacagag

SEQ ID NO: 194635 - DNA, 25 bp, Probe Sequence
ccctggaatctttttgatcgactgc

SEQ ID NO: 194636 - DNA, 25 bp, Probe Sequence
ccctgtacattattttgatggacga

SEQ ID NO: 194637 - DNA, 25 bp, Probe Sequence
cccttatcttactgtcattgtccta

SEQ ID NO: 194638 - DNA, 25 bp, Probe Sequence
cccttttataatgcacatattccca

SEQ ID NO: 194639 - DNA, 25 bp, Probe Sequence
ccccatttgagatgccttattccta

SEQ ID NO: 194640 - DNA, 25 bp, Probe Sequence
cccctttagatctctgaagccacaa

SEQ ID NO: 194641 - DNA, 25 bp, Probe Sequence
cccttattcctcttgctaagtacaa

SEQ ID NO: 194642 - DNA, 25 bp, Probe Sequence
cccttttctctctgctagatggatg

SEQ ID NO: 194643 - DNA, 25 bp, Probe Sequence
ccctataccttctgcataatgaatt

SEQ ID NO: 194644 - DNA, 25 bp, Probe Sequence
cccgtaagccacttctttgacatta

SEQ ID NO: 194645 - DNA, 25 bp, Probe Sequence
ccctggaattactctgcttaatgta

SEQ ID NO: 194646 - DNA, 25 bp, Probe Sequence
cccgggatatctttctgtttatgac

SEQ ID NO: 194647 - DNA, 25 bp, Probe Sequence
cccgcctgaatcattctcgatttaa

SEQ ID NO: 194648 - DNA, 25 bp, Probe Sequence
ccctggctgattgtgtcttgttgaa

SEQ ID NO: 194649 - DNA, 25 bp, Probe Sequence
cccgggattacaccttgctgggagt

SEQ ID NO: 194650 - DNA, 25 bp, Probe Sequence
ccctgacttaaacctcactgagagc

SEQ ID NO: 194651 - DNA, 25 bp, Probe Sequence
cccgactgctgaaatccaacttgag

SEQ ID NO: 194652 - DNA, 25 bp, Probe Sequence
ccctgcgtcagaaatgccaagttgt

SEQ ID NO: 194653 - DNA, 25 bp, Probe Sequence
ccctctatcacatatgacatcagtc

SEQ ID NO: 194654 - DNA, 25 bp, Probe Sequence
ccctatacacatcataatctctgtc

SEQ ID NO: 194655 - DNA, 25 bp, Probe Sequence
ccctcaacacaattgctaatgcaga

SEQ ID NO: 194656 - DNA, 25 bp, Probe Sequence
ccctccctaatacacatgcagattt

SEQ ID NO: 194657 - DNA, 25 bp, Probe Sequence
ccctccaccagaacaactggatccc

SEQ ID NO: 194658 - DNA, 25 bp, Probe Sequence
cccccaaggatgcaacggatcgctg

SEQ ID NO: 194659 - DNA, 25 bp, Probe Sequence
ccccgaaggccctatcaggacatgg

SEQ ID NO: 194660 - DNA, 25 bp, Probe Sequence
cccgtgttggccattggtactgggc

SEQ ID NO: 194661 - DNA, 25 bp, Probe Sequence
ccccgtgtggtcatcaagtcctggg

SEQ ID NO: 194662 - DNA, 25 bp, Probe Sequence
ccccggggacaagagcgccgagaag

SEQ ID NO: 194663 - DNA, 25 bp, Probe Sequence
ccccgaggtgcccaggactcggaag

SEQ ID NO: 194664 - DNA, 25 bp, Probe Sequence
cccgggatggctgagtgcacaggtg

SEQ ID NO: 194665 - DNA, 25 bp, Probe Sequence
ccctgggtggctctgtcagggtgca

SEQ ID NO: 194666 - DNA, 25 bp, Probe Sequence
ccctggggactggttcagcacataa

SEQ ID NO: 194667 - DNA, 25 bp, Probe Sequence
ccctggggactggttcagcacataa

SEQ ID NO: 194668 - DNA, 25 bp, Probe Sequence
ccgtgggctacggtatccggaagct

SEQ ID NO: 194669 - DNA, 25 bp, Probe Sequence
ccgtgggctacggtatccggaagct

SEQ ID NO: 194670 - DNA, 25 bp, Probe Sequence
ccctggcctacgtgaagcggtggct

SEQ ID NO: 194671 - DNA, 25 bp, Probe Sequence
ccctggccaaccggaagcgggagtg

SEQ ID NO: 194672 - DNA, 25 bp, Probe Sequence
ccccgtcaaccacaatcaagaactg

SEQ ID NO: 194673 - DNA, 25 bp, Probe Sequence
cccgtgtcaaccacaacaagtacat

SEQ ID NO: 194674 - DNA, 25 bp, Probe Sequence
ttccgtcttacctcaatggggtcat

SEQ ID NO: 194675 - DNA, 25 bp, Probe Sequence
gccctgtagtccgccacagggcttt

SEQ ID NO: 194676 - DNA, 25 bp, Probe Sequence
ccctatagccaccccaagtgtggtt

SEQ ID NO: 194677 - DNA, 25 bp, Probe Sequence
ccctttgccatcgccaaggagtagg

SEQ ID NO: 194678 - DNA, 25 bp, Probe Sequence
cccgttccagcccagtaatagtagc

SEQ ID NO: 194679 - DNA, 25 bp, Probe Sequence
ccctgtgtctgcttccgaataaaag

SEQ ID NO: 194680 - DNA, 25 bp, Probe Sequence
ccctgtgtctgcttccgaataaaag

SEQ ID NO: 194681 - DNA, 25 bp, Probe Sequence
ccctgggctggtgaagtacatgaac

SEQ ID NO: 194682 - DNA, 25 bp, Probe Sequence
ccctggtgcggtaccagtgcacaga

SEQ ID NO: 194683 - DNA, 25 bp, Probe Sequence
ccctgccagcgactacaaggacaag

SEQ ID NO: 194684 - DNA, 25 bp, Probe Sequence
cccgagatgccgagcaagaagaaga

SEQ ID NO: 194685 - DNA, 25 bp, Probe Sequence
ccctcgaccgacaaagaaaagagct

SEQ ID NO: 194686 - DNA, 25 bp, Probe Sequence
ccctcgaccgacaaagaaaagagct

SEQ ID NO: 194687 - DNA, 25 bp, Probe Sequence
ccctagtagcaattaaggaaatagc

SEQ ID NO: 194688 - DNA, 25 bp, Probe Sequence
ccctagccaagcttcaaggcaaaaa

SEQ ID NO: 194689 - DNA, 25 bp, Probe Sequence
ccctaagaccattcgcatggccaaa

SEQ ID NO: 194690 - DNA, 25 bp, Probe Sequence
ccctgacaaccatccatactgtgta

SEQ ID NO: 194691 - DNA, 25 bp, Probe Sequence
ccctattaaattacatccggtgcaa

SEQ ID NO: 194692 - DNA, 25 bp, Probe Sequence
ccctagacctcatttatgccttgga

SEQ ID NO: 194693 - DNA, 25 bp, Probe Sequence
ccctggccagctgataatcctaggt

SEQ ID NO: 194694 - DNA, 25 bp, Probe Sequence
ccctgcgacacccagaacaaagacg

SEQ ID NO: 194695 - DNA, 25 bp, Probe Sequence
ccctcccactcagattctaaacaga

SEQ ID NO: 194696 - DNA, 25 bp, Probe Sequence
ccctcccattagtagctttatccag

SEQ ID NO: 194697 - DNA, 25 bp, Probe Sequence
ccctcacctttatgccttatataga

SEQ ID NO: 194698 - DNA, 25 bp, Probe Sequence
ccttcacggttctccaatgagtaga

SEQ ID NO: 194699 - DNA, 25 bp, Probe Sequence
ccttacttgaactcacttgaatata

SEQ ID NO: 194700 - DNA, 25 bp, Probe Sequence
ccctctcttggttccactagaaata

SEQ ID NO: 194701 - DNA, 25 bp, Probe Sequence
cccctttagttctcatgcacagaat

SEQ ID NO: 194702 - DNA, 25 bp, Probe Sequence
cccccttgacttcatatgacgtatg

SEQ ID NO: 194703 - DNA, 25 bp, Probe Sequence
ccctctctctacgtgaaacactgta

SEQ ID NO: 194704 - DNA, 25 bp, Probe Sequence
ccctctctctagcaatggccaatgt

SEQ ID NO: 194705 - DNA, 25 bp, Probe Sequence
ccctgctatgggaaaggccaagctg

SEQ ID NO: 194706 - DNA, 25 bp, Probe Sequence
ccctcaagagagaatgcatggaaag

SEQ ID NO: 194707 - DNA, 25 bp, Probe Sequence
cccgacaccagcctcatggaatatg

SEQ ID NO: 194708 - DNA, 25 bp, Probe Sequence
cccgacaccagcctcatggaatatg

SEQ ID NO: 194709 - DNA, 25 bp, Probe Sequence
cccgacaccagcctcatggaatatg

SEQ ID NO: 194710 - DNA, 25 bp, Probe Sequence
ccctgcagcccaagatgggactcag

SEQ ID NO: 194711 - DNA, 25 bp, Probe Sequence
ccctgagcactcggcatggggtgga

SEQ ID NO: 194712 - DNA, 25 bp, Probe Sequence
ccctgatcatccgcgcggggatgac

SEQ ID NO: 194713 - DNA, 25 bp, Probe Sequence
ccctgatcggctgccagatggaaag

SEQ ID NO: 194714 - DNA, 25 bp, Probe Sequence
ccctctctgagcactgcacagaatg

SEQ ID NO: 194715 - DNA, 25 bp, Probe Sequence
ccctctctactcttgacagcaggat

SEQ ID NO: 194716 - DNA, 25 bp, Probe Sequence
ccctctctactcttgacagcaggat

SEQ ID NO: 194717 - DNA, 25 bp, Probe Sequence
ccctcctagtcttgatagcgagcgt

SEQ ID NO: 194718 - DNA, 25 bp, Probe Sequence
ccctctccaggggatgagtgactgt

SEQ ID NO: 194719 - DNA, 25 bp, Probe Sequence
ccctcatctcagaggagtgggtgct

SEQ ID NO: 194720 - DNA, 25 bp, Probe Sequence
ccctgtgccaggagcaatgggactg

SEQ ID NO: 194721 - DNA, 25 bp, Probe Sequence
cccgtgtatgaacgaagccgacatg

SEQ ID NO: 194722 - DNA, 25 bp, Probe Sequence
ccctgttattcacaatccctgatgt

SEQ ID NO: 194723 - DNA, 25 bp, Probe Sequence
ccctgttcctgcaaatcatcaacgt

SEQ ID NO: 194724 - DNA, 25 bp, Probe Sequence
ccctgtccttgcaaaagcagatgga

SEQ ID NO: 194725 - DNA, 25 bp, Probe Sequence
ccctgacgctatgacacacagcgcg

SEQ ID NO: 194726 - DNA, 25 bp, Probe Sequence
ccctgcacagcctgacacaggcagg

SEQ ID NO: 194727 - DNA, 25 bp, Probe Sequence
ccctgcacagcctgacacaggcagg

SEQ ID NO: 194728 - DNA, 25 bp, Probe Sequence
ccctccagctgctggcactgagtgc

SEQ ID NO: 194729 - DNA, 25 bp, Probe Sequence
ccctccagctgctggcactgagtgc

SEQ ID NO: 194730 - DNA, 25 bp, Probe Sequence
ccctgccactgtgggcatcagaggc

SEQ ID NO: 194731 - DNA, 25 bp, Probe Sequence
ccctgccaggtgctgcggatggcaa

SEQ ID NO: 194732 - DNA, 25 bp, Probe Sequence
ccctcttcgtgggcagcgtgaggaa

SEQ ID NO: 194733 - DNA, 25 bp, Probe Sequence
ccctcttccaggccatgcagaagga

SEQ ID NO: 194734 - DNA, 25 bp, Probe Sequence
ccctctactcgtgctgggtggtggt

SEQ ID NO: 194735 - DNA, 25 bp, Probe Sequence
ccctctactcgtgctgggtggtggt

SEQ ID NO: 194736 - DNA, 25 bp, Probe Sequence
ccacactccccagcgaggggggtgt

SEQ ID NO: 194737 - DNA, 25 bp, Probe Sequence
cccgtgcccgaagagggctcggagg

SEQ ID NO: 194738 - DNA, 25 bp, Probe Sequence
ccctgagccctagaatgggtgagga

SEQ ID NO: 194739 - DNA, 25 bp, Probe Sequence
ccctggcccaatgataatggcttgg

SEQ ID NO: 194740 - DNA, 25 bp, Probe Sequence
cccgagccgcctggataccgcagct

SEQ ID NO: 194741 - DNA, 25 bp, Probe Sequence
cccggcaagcacgcaactaaatccc

SEQ ID NO: 194742 - DNA, 25 bp, Probe Sequence
ccctggcacccagcacaatgaagat

SEQ ID NO: 194743 - DNA, 25 bp, Probe Sequence
ccctggacccagtagagaaagccct

SEQ ID NO: 194744 - DNA, 25 bp, Probe Sequence
cccggtcagcaggaagccatcgacc

SEQ ID NO: 194745 - DNA, 25 bp, Probe Sequence
ccctcgccgagaaaggcatcggagc

SEQ ID NO: 194746 - DNA, 25 bp, Probe Sequence
ccctggcaccggaaggccagcagag

SEQ ID NO: 194747 - DNA, 25 bp, Probe Sequence
ccctgtgccctggaagttcaggggc

SEQ ID NO: 194748 - DNA, 25 bp, Probe Sequence
ccctggcacggtgtattctggggcc

SEQ ID NO: 194749 - DNA, 25 bp, Probe Sequence
ccctggttccatgtttctgatgggg

SEQ ID NO: 194750 - DNA, 25 bp, Probe Sequence
cccgtgtggcatgttttctgagcgt

SEQ ID NO: 194751 - DNA, 25 bp, Probe Sequence
cccgtgtggcatgttttctgagcgt

SEQ ID NO: 194752 - DNA, 25 bp, Probe Sequence
cccgatggcgagtgtttgccggtgc

SEQ ID NO: 194753 - DNA, 25 bp, Probe Sequence
ccctctgggcagcaggattcctaag

SEQ ID NO: 194754 - DNA, 25 bp, Probe Sequence
ccctctcggacatttatacctatgg

SEQ ID NO: 194755 - DNA, 25 bp, Probe Sequence
cctctccaaactctataccttgatt

SEQ ID NO: 194756 - DNA, 25 bp, Probe Sequence
cctcatctgttagctttacctttgt

SEQ ID NO: 194757 - DNA, 25 bp, Probe Sequence
cccctttatttttgaccagcttcat

SEQ ID NO: 194758 - DNA, 25 bp, Probe Sequence
ccctctttgccttccgagggcagta

SEQ ID NO: 194759 - DNA, 25 bp, Probe Sequence
cccgctttgcctgcttgaaggaaca

SEQ ID NO: 194760 - DNA, 25 bp, Probe Sequence
ccctcccttctcgttgaaggcaact

SEQ ID NO: 194761 - DNA, 25 bp, Probe Sequence
ccctgccagttctctgtggaagcaa

SEQ ID NO: 194762 - DNA, 25 bp, Probe Sequence
ccctgccagttctctgtggaagcaa

SEQ ID NO: 194763 - DNA, 25 bp, Probe Sequence
ccctgccagttctctgtggaagcaa

SEQ ID NO: 194764 - DNA, 25 bp, Probe Sequence
cccgcagacttctctgtagatcgct

SEQ ID NO: 194765 - DNA, 25 bp, Probe Sequence
ccctcatgactgacaaaaactccat

SEQ ID NO: 194766 - DNA, 25 bp, Probe Sequence
ccctctgactggaaaacagactcta

SEQ ID NO: 194767 - DNA, 25 bp, Probe Sequence
ccctcttctgcgaaataagcctcat

SEQ ID NO: 194768 - DNA, 25 bp, Probe Sequence
ccctcttccaagaacattcactctg

SEQ ID NO: 194769 - DNA, 25 bp, Probe Sequence
ccctcttcaggccataatttccctg

SEQ ID NO: 194770 - DNA, 25 bp, Probe Sequence
ccctcctcattcctaaataacttgc

SEQ ID NO: 194771 - DNA, 25 bp, Probe Sequence
ccctcctcatctttgctaataagca

SEQ ID NO: 194772 - DNA, 25 bp, Probe Sequence
ccctctcctccatgtaaaggcaaca

SEQ ID NO: 194773 - DNA, 25 bp, Probe Sequence
ccctgccctgccttattacaggata

SEQ ID NO: 194774 - DNA, 25 bp, Probe Sequence
cccccacaggtttctaagcatgaat

SEQ ID NO: 194775 - DNA, 25 bp, Probe Sequence
ccccccaagtctcctgaagaggaag

SEQ ID NO: 194776 - DNA, 25 bp, Probe Sequence
ccccacggagtctggaccatggagg

SEQ ID NO: 194777 - DNA, 25 bp, Probe Sequence
ccccggcctggcaggatccagggat

SEQ ID NO: 194778 - DNA, 25 bp, Probe Sequence
ccctctccctggagtacacttgtgg

SEQ ID NO: 194779 - DNA, 25 bp, Probe Sequence
ccctccctatatatgttcatttgta

SEQ ID NO: 194780 - DNA, 25 bp, Probe Sequence
ccctccaaaataattctattcttag

SEQ ID NO: 194781 - DNA, 25 bp, Probe Sequence
ccctcccgcaaagctttgacaaaga

SEQ ID NO: 194782 - DNA, 25 bp, Probe Sequence
ccctcctctgaccaactaaaagaag

SEQ ID NO: 194783 - DNA, 25 bp, Probe Sequence
ccctccactggacagctcagtaagc

SEQ ID NO: 194784 - DNA, 25 bp, Probe Sequence
ccctccacagaactggccaaacagg

SEQ ID NO: 194785 - DNA, 25 bp, Probe Sequence
ccctccaattgatgcccatacaagg

SEQ ID NO: 194786 - DNA, 25 bp, Probe Sequence
cccccattcgaacttaacagatgcc

SEQ ID NO: 194787 - DNA, 25 bp, Probe Sequence
ccccgttcaaagcctgagcatttga

SEQ ID NO: 194788 - DNA, 25 bp, Probe Sequence
ccctcgcgctacaagactgagctat

SEQ ID NO: 194789 - DNA, 25 bp, Probe Sequence
ccctctgagtcagcagtcagctgtt

SEQ ID NO: 194790 - DNA, 25 bp, Probe Sequence
ccctcgatgctcttagctgagtgtc

SEQ ID NO: 194791 - DNA, 25 bp, Probe Sequence
ccctctcagccactactggagctga

SEQ ID NO: 194792 - DNA, 25 bp, Probe Sequence
ccctctggtagccacagacatgctg

SEQ ID NO: 194793 - DNA, 25 bp, Probe Sequence
ccctcattgatctccagacatgcgg

SEQ ID NO: 194794 - DNA, 25 bp, Probe Sequence
ccctctatgagcagaagacacgtga

SEQ ID NO: 194795 - DNA, 25 bp, Probe Sequence
ccctcttgctgcgtgttgatttgga

SEQ ID NO: 194796 - DNA, 25 bp, Probe Sequence
ccctctcttccatcatatttggatg

SEQ ID NO: 194797 - DNA, 25 bp, Probe Sequence
ccctgacttgcggcagaacctggag

SEQ ID NO: 194798 - DNA, 25 bp, Probe Sequence
ccctgacttgacggagcccaaggag

SEQ ID NO: 194799 - DNA, 25 bp, Probe Sequence
ccctgcctctgtgaaggccatcagg

SEQ ID NO: 194800 - DNA, 25 bp, Probe Sequence
ccctgctagcttgacagtgctcaca

SEQ ID NO: 194801 - DNA, 25 bp, Probe Sequence
ccctcagatgttcctgcagtgctga

SEQ ID NO: 194802 - DNA, 25 bp, Probe Sequence
ccctcagatgttcctgcagtgctga

SEQ ID NO: 194803 - DNA, 25 bp, Probe Sequence
ccctcatgtgtctacagatggtaaa

SEQ ID NO: 194804 - DNA, 25 bp, Probe Sequence
ccctcaggtcctgatcagtcagaat

SEQ ID NO: 194805 - DNA, 25 bp, Probe Sequence
cccctggtctgtgaattaaatggca

SEQ ID NO: 194806 - DNA, 25 bp, Probe Sequence
ccccgcgttgttgaatgtccagaaa

SEQ ID NO: 194807 - DNA, 25 bp, Probe Sequence
ttcctcggggaagaaaagcattgaa

SEQ ID NO: 194808 - DNA, 25 bp, Probe Sequence
tacgcccgggaagaattcgcttcca

SEQ ID NO: 194809 - DNA, 25 bp, Probe Sequence
ccccggtgagaagaattgtggtcca

SEQ ID NO: 194810 - DNA, 25 bp, Probe Sequence
cccgggatggtttaatgtgtatgcc

SEQ ID NO: 194811 - DNA, 25 bp, Probe Sequence
cccgaagctgctggataattttatc

SEQ ID NO: 194812 - DNA, 25 bp, Probe Sequence
ccctgaagcctgcaaacgttgtcat

SEQ ID NO: 194813 - DNA, 25 bp, Probe Sequence
ccctgacagcctggaaaacattcct

SEQ ID NO: 194814 - DNA, 25 bp, Probe Sequence
ccctgcccacttcaatgaataccta

SEQ ID NO: 194815 - DNA, 25 bp, Probe Sequence
cccgccccatcttaatgtataacca

SEQ ID NO: 194816 - DNA, 25 bp, Probe Sequence
ccctgacaccctcagcagtaaacaa

SEQ ID NO: 194817 - DNA, 25 bp, Probe Sequence
ccctgactccttcacagtattatca

SEQ ID NO: 194818 - DNA, 25 bp, Probe Sequence
ccctgtccactacatggttctatca

SEQ ID NO: 194819 - DNA, 25 bp, Probe Sequence
ccctctcaaatacacgtgatctggc

SEQ ID NO: 194820 - DNA, 25 bp, Probe Sequence
ccctcctagatacatacaatcttgg

SEQ ID NO: 194821 - DNA, 25 bp, Probe Sequence
ccctcctggatcactactatgtatg

SEQ ID NO: 194822 - DNA, 25 bp, Probe Sequence
cccgaatggctcactttcactgagg

SEQ ID NO: 194823 - DNA, 25 bp, Probe Sequence
cccgcaacggcaagttcactgcaga

SEQ ID NO: 194824 - DNA, 25 bp, Probe Sequence
ccctcatttggcagtcacctgccac

SEQ ID NO: 194825 - DNA, 25 bp, Probe Sequence
ccccatgattcgacgtccaatcgtc

SEQ ID NO: 194826 - DNA, 25 bp, Probe Sequence
cccgctgatatcaacagtgaccagg

SEQ ID NO: 194827 - DNA, 25 bp, Probe Sequence
ccctgagattcagcagcgactgcag

SEQ ID NO: 194828 - DNA, 25 bp, Probe Sequence
ccctgatgaatatgccagcagcggc

SEQ ID NO: 194829 - DNA, 25 bp, Probe Sequence
ccctgatatgattactatgagctgt

SEQ ID NO: 194830 - DNA, 25 bp, Probe Sequence
cccgaatgctgacattgacgtagtc

SEQ ID NO: 194831 - DNA, 25 bp, Probe Sequence
ccctggaagagcactactggatgtc

SEQ ID NO: 194832 - DNA, 25 bp, Probe Sequence
ccctcgaggagctttcattctgatg

SEQ ID NO: 194833 - DNA, 25 bp, Probe Sequence
cccggacggagcagcttgcagatgg

SEQ ID NO: 194834 - DNA, 25 bp, Probe Sequence
cccggactttgcctctgaggtgatg

SEQ ID NO: 194835 - DNA, 25 bp, Probe Sequence
cccgcgactagaagtgtgaggtccc

SEQ ID NO: 194836 - DNA, 25 bp, Probe Sequence
cccgcaagaagccggtagtctacac

SEQ ID NO: 194837 - DNA, 25 bp, Probe Sequence
cccgaaacacatattatttgactct

SEQ ID NO: 194838 - DNA, 25 bp, Probe Sequence
ccccagaacagaccttatgggactt

SEQ ID NO: 194839 - DNA, 25 bp, Probe Sequence
cccgacagaggacgcttgagccaga

SEQ ID NO: 194840 - DNA, 25 bp, Probe Sequence
ccctctcagagctacttgggccata

SEQ ID NO: 194841 - DNA, 25 bp, Probe Sequence
ccctcctggaacttggatcttaaga

SEQ ID NO: 194842 - DNA, 25 bp, Probe Sequence
cccccaggtgactaggttcaagaga

SEQ ID NO: 194843 - DNA, 25 bp, Probe Sequence
ccctgaaggtggccactttaagaga

SEQ ID NO: 194844 - DNA, 25 bp, Probe Sequence
ccctgagggtcactggtcctcaaag

SEQ ID NO: 194845 - DNA, 25 bp, Probe Sequence
ccctgcagcgggaatggccactgca

SEQ ID NO: 194846 - DNA, 25 bp, Probe Sequence
ccctgactggggagcaatatgttct

SEQ ID NO: 194847 - DNA, 25 bp, Probe Sequence
ccctgaagaactaatcaacatgttt

SEQ ID NO: 194848 - DNA, 25 bp, Probe Sequence
acccagcattgtttgaagtgccctc

SEQ ID NO: 194849 - DNA, 25 bp, Probe Sequence
ccctcctgtgacctcagggtttggc

SEQ ID NO: 194850 - DNA, 25 bp, Probe Sequence
ccctctgtgtactcagaaatttgaa

SEQ ID NO: 194851 - DNA, 25 bp, Probe Sequence
ccctgctgcttttgagaaatttgtg

SEQ ID NO: 194852 - DNA, 25 bp, Probe Sequence
ccctgcatctatttgaaagcatact

SEQ ID NO: 194853 - DNA, 25 bp, Probe Sequence
ccctgttaactacactagcttaatc

SEQ ID NO: 194854 - DNA, 25 bp, Probe Sequence
ccctgggaagctgccgtagcttcag

SEQ ID NO: 194855 - DNA, 25 bp, Probe Sequence
ccctgaggagagggtagtcagcatc

SEQ ID NO: 194856 - DNA, 25 bp, Probe Sequence
ccctgatccagaagattttgctgat

SEQ ID NO: 194857 - DNA, 25 bp, Probe Sequence
ccctctgccgatggcatttgtgttt

SEQ ID NO: 194858 - DNA, 25 bp, Probe Sequence
ccctctcagcagacgcttcatgata

SEQ ID NO: 194859 - DNA, 25 bp, Probe Sequence
ccctgagatgagacgcctcatagca

SEQ ID NO: 194860 - DNA, 25 bp, Probe Sequence
ccctgcgagctaagcccaaggtgta

SEQ ID NO: 194861 - DNA, 25 bp, Probe Sequence
ccctgcggtacaatgtcacctggta

SEQ ID NO: 194862 - DNA, 25 bp, Probe Sequence
ccctgcgcgtggtcattgaccggat

SEQ ID NO: 194863 - DNA, 25 bp, Probe Sequence
cccgtggtggactataagcactgct

SEQ ID NO: 194864 - DNA, 25 bp, Probe Sequence
ccctgctgcggcgtgttaggaatga

SEQ ID NO: 194865 - DNA, 25 bp, Probe Sequence
ccctctctgtcaagtttggaaacga

SEQ ID NO: 194866 - DNA, 25 bp, Probe Sequence
ccctgccttcagctttggtgaaagg

SEQ ID NO: 194867 - DNA, 25 bp, Probe Sequence
ccctgctttgggaatatggatgtaa

SEQ ID NO: 194868 - DNA, 25 bp, Probe Sequence
ccctctttgggttgcagactgccaa

SEQ ID NO: 194869 - DNA, 25 bp, Probe Sequence
ccctctgtagagatcatgcgaacta

SEQ ID NO: 194870 - DNA, 25 bp, Probe Sequence
ccctccacaagcacagcaatgcact

SEQ ID NO: 194871 - DNA, 25 bp, Probe Sequence
ccctgccaaggcacagcgtagatct

SEQ ID NO: 194872 - DNA, 25 bp, Probe Sequence
ccctgctaaggctaaagttgatctg

SEQ ID NO: 194873 - DNA, 25 bp, Probe Sequence
ccctgcatgaggcccacgagttctc

SEQ ID NO: 194874 - DNA, 25 bp, Probe Sequence
cccgcatggtccgggatgtgttccg

SEQ ID NO: 194875 - DNA, 25 bp, Probe Sequence
ccctgtgtctcaacagagttttccg

SEQ ID NO: 194876 - DNA, 25 bp, Probe Sequence
ccctgtgttcctggagcatttgttg

SEQ ID NO: 194877 - DNA, 25 bp, Probe Sequence
ccctgcctatcctgaatggtttgtc

SEQ ID NO: 194878 - DNA, 25 bp, Probe Sequence
ccctcctctcttggatatggttggt

SEQ ID NO: 194879 - DNA, 25 bp, Probe Sequence
ccctcctctttgtgtcagtgatgga

SEQ ID NO: 194880 - DNA, 25 bp, Probe Sequence
ccctcctttctgcattagtggagac

SEQ ID NO: 194881 - DNA, 25 bp, Probe Sequence
ccctgcctccctaattagctagggc

SEQ ID NO: 194882 - DNA, 25 bp, Probe Sequence
ccctcctcaccatgttctggagagt

SEQ ID NO: 194883 - DNA, 25 bp, Probe Sequence
ccctgcctgtactactctagggagt

SEQ ID NO: 194884 - DNA, 25 bp, Probe Sequence
ccctgcactgatgtcactttatgta

SEQ ID NO: 194885 - DNA, 25 bp, Probe Sequence
ccctgcactgatgtcactttatgta

SEQ ID NO: 194886 - DNA, 25 bp, Probe Sequence
ccctgcccacatatcttatttattc

SEQ ID NO: 194887 - DNA, 25 bp, Probe Sequence
ccctgtcacattgctctttttgtat

SEQ ID NO: 194888 - DNA, 25 bp, Probe Sequence
ccctgccactttgcatggtttgatt

SEQ ID NO: 194889 - DNA, 25 bp, Probe Sequence
ccctgccactttgcatggtttgatt

SEQ ID NO: 194890 - DNA, 25 bp, Probe Sequence
cccccttattccactgtggcattgc

SEQ ID NO: 194891 - DNA, 25 bp, Probe Sequence
ccccatcattaaacgggctgcgttt

SEQ ID NO: 194892 - DNA, 25 bp, Probe Sequence
ccccatcatcttcaaggcggcctat

SEQ ID NO: 194893 - DNA, 25 bp, Probe Sequence
ccccatcaactctggggacctcttt

SEQ ID NO: 194894 - DNA, 25 bp, Probe Sequence
cccctagcccattagggacactata

SEQ ID NO: 194895 - DNA, 25 bp, Probe Sequence
ccccttcccaacctgggactatatg

SEQ ID NO: 194896 - DNA, 25 bp, Probe Sequence
cccgttccacagatggggccagact

SEQ ID NO: 194897 - DNA, 25 bp, Probe Sequence
ccctgtggcaccaagtggggtcggc

SEQ ID NO: 194898 - DNA, 25 bp, Probe Sequence
cccggcgcacagtgtgggttgcggg

SEQ ID NO: 194899 - DNA, 25 bp, Probe Sequence
cccggctcatggtctgggggatgca

SEQ ID NO: 194900 - DNA, 25 bp, Probe Sequence
ccctgagccattgtgggggtcgatc

SEQ ID NO: 194901 - DNA, 25 bp, Probe Sequence
ccctgcccttattgggggacagatg

SEQ ID NO: 194902 - DNA, 25 bp, Probe Sequence
ccctctgccttttagtggtatctga

SEQ ID NO: 194903 - DNA, 25 bp, Probe Sequence
ccctcgcctggaatcagtgttactg

SEQ ID NO: 194904 - DNA, 25 bp, Probe Sequence
ccctggttgctgtatttgttcagtg

SEQ ID NO: 194905 - DNA, 25 bp, Probe Sequence
ccctgctacctagtttgttagtgca

SEQ ID NO: 194906 - DNA, 25 bp, Probe Sequence
ccctgcctgccttgtttgatttggc

SEQ ID NO: 194907 - DNA, 25 bp, Probe Sequence
ccctcgctgcgatctattgaaagtc

SEQ ID NO: 194908 - DNA, 25 bp, Probe Sequence
ccctctgtggtagtagtgagtagat

SEQ ID NO: 194909 - DNA, 25 bp, Probe Sequence
ccctgctttgctttggatggacaat

SEQ ID NO: 194910 - DNA, 25 bp, Probe Sequence
ccctgccgtcagcatggtggaaatg

SEQ ID NO: 194911 - DNA, 25 bp, Probe Sequence
ccctcctgtgagttggggaaatgat

SEQ ID NO: 194912 - DNA, 25 bp, Probe Sequence
ccctgcctgaagtgcgagaaatgtg

SEQ ID NO: 194913 - DNA, 25 bp, Probe Sequence
ccctgctaggagtgcgacaagcagt

SEQ ID NO: 194914 - DNA, 25 bp, Probe Sequence
cccgcaggcggtagcgaaggcagca

SEQ ID NO: 194915 - DNA, 25 bp, Probe Sequence
cccgagaccgtagagatggccagtc

SEQ ID NO: 194916 - DNA, 25 bp, Probe Sequence
cccgggttgagcgggaggcgcgatc

SEQ ID NO: 194917 - DNA, 25 bp, Probe Sequence
ccctctggagggccggaggcaggag

SEQ ID NO: 194918 - DNA, 25 bp, Probe Sequence
cccgtgggaaggcgcacgcagagga

SEQ ID NO: 194919 - DNA, 25 bp, Probe Sequence
cccggggaggtcatccgtagcgaat

SEQ ID NO: 194920 - DNA, 25 bp, Probe Sequence
cccggtgtgcatggagttccagtac

SEQ ID NO: 194921 - DNA, 25 bp, Probe Sequence
ccctgggtcactggtctccagtggc

SEQ ID NO: 194922 - DNA, 25 bp, Probe Sequence
ccctgtggtcagtgcgacctgtgag

SEQ ID NO: 194923 - DNA, 25 bp, Probe Sequence
ccctctggccggacagaactggtgc

SEQ ID NO: 194924 - DNA, 25 bp, Probe Sequence
ccctgaggcctgcgagaagctggaa

SEQ ID NO: 194925 - DNA, 25 bp, Probe Sequence
ccctgggccctgaatggagctaaaa

SEQ ID NO: 194926 - DNA, 25 bp, Probe Sequence
ccctgcatcctcggttgagagtaaa

SEQ ID NO: 194927 - DNA, 25 bp, Probe Sequence
ccctgccgtcatgtctaagtcagag

SEQ ID NO: 194928 - DNA, 25 bp, Probe Sequence
ccctccttcatcttcggaacaagga

SEQ ID NO: 194929 - DNA, 25 bp, Probe Sequence
ccctcctctcccaagagacaaaggc

SEQ ID NO: 194930 - DNA, 25 bp, Probe Sequence
ccctcctcctcctgaagatgatgag

SEQ ID NO: 194931 - DNA, 25 bp, Probe Sequence
ccctcctccagaaccgatgagtgag

SEQ ID NO: 194932 - DNA, 25 bp, Probe Sequence
ccctcctccagaagtctgtgactac

SEQ ID NO: 194933 - DNA, 25 bp, Probe Sequence
ccctcctactgttggcagtgatcat

SEQ ID NO: 194934 - DNA, 25 bp, Probe Sequence
ccctgccttctttgctgagaggctc

SEQ ID NO: 194935 - DNA, 25 bp, Probe Sequence
ccctccatgcacatttggacgctgt

SEQ ID NO: 194936 - DNA, 25 bp, Probe Sequence
ccctccatgcaaaagtggggctaaa

SEQ ID NO: 194937 - DNA, 25 bp, Probe Sequence
ccctgcctgaaacagacctgcatga

SEQ ID NO: 194938 - DNA, 25 bp, Probe Sequence
ccctgccgtacacagagagctcaaa

SEQ ID NO: 194939 - DNA, 25 bp, Probe Sequence
ccctcctgtccagcatggattctgg

SEQ ID NO: 194940 - DNA, 25 bp, Probe Sequence
ccctccaccgcttagagatttgggg

SEQ ID NO: 194941 - DNA, 25 bp, Probe Sequence
cccctccaccgcttagagatttggg

SEQ ID NO: 194942 - DNA, 25 bp, Probe Sequence
ccctcccacgccgtggaagctttgt

SEQ ID NO: 194943 - DNA, 25 bp, Probe Sequence
ccctccaagctcagtggacactggg

SEQ ID NO: 194944 - DNA, 25 bp, Probe Sequence
ccctgccaaacagagctgtccgtgg

SEQ ID NO: 194945 - DNA, 25 bp, Probe Sequence
ccctgccaaacagagctgtccgtgg

SEQ ID NO: 194946 - DNA, 25 bp, Probe Sequence
ccctgccttatagaatgtacttagt

SEQ ID NO: 194947 - DNA, 25 bp, Probe Sequence
ccctcctcttcaggaatcttcctga

SEQ ID NO: 194948 - DNA, 25 bp, Probe Sequence
ccctccttgtcattgaccttagcta

SEQ ID NO: 194949 - DNA, 25 bp, Probe Sequence
ccctgccggtgaagtccttcagtga

SEQ ID NO: 194950 - DNA, 25 bp, Probe Sequence
ccctgtcgggtagtcatattttgca

SEQ ID NO: 194951 - DNA, 25 bp, Probe Sequence
cccgcctgggtaacatattgagatc

SEQ ID NO: 194952 - DNA, 25 bp, Probe Sequence
ccctgtcaggtagtctcatttggca

SEQ ID NO: 194953 - DNA, 25 bp, Probe Sequence
ccctgctagggagctattgatgtgc

SEQ ID NO: 194954 - DNA, 25 bp, Probe Sequence
cccgccaggcattgcaggcttagtc

SEQ ID NO: 194955 - DNA, 25 bp, Probe Sequence
ccctgccatggctgaggtcagagtg

SEQ ID NO: 194956 - DNA, 25 bp, Probe Sequence
cccgtgagcacgctgtgtgcagagg

SEQ ID NO: 194957 - DNA, 25 bp, Probe Sequence
ccctgaggacctttctgaggagtaa

SEQ ID NO: 194958 - DNA, 25 bp, Probe Sequence
cccgggatcttaacatcaggaattc

SEQ ID NO: 194959 - DNA, 25 bp, Probe Sequence
cccgggtcattcaccaggtgacacc

SEQ ID NO: 194960 - DNA, 25 bp, Probe Sequence
cccgacgtgtacacgcaggtgtccg

SEQ ID NO: 194961 - DNA, 25 bp, Probe Sequence
cccccagtgcagacttcggggtctc

SEQ ID NO: 194962 - DNA, 25 bp, Probe Sequence
cccgccaccgttatcggtgtcattc

SEQ ID NO: 194963 - DNA, 25 bp, Probe Sequence
cccgccaccgttatcggtgtcattc

SEQ ID NO: 194964 - DNA, 25 bp, Probe Sequence
cccgcccctttcatagttaagatgc

SEQ ID NO: 194965 - DNA, 25 bp, Probe Sequence
ccccctccctggatgacattaaaga

SEQ ID NO: 194966 - DNA, 25 bp, Probe Sequence
cccccacacctagactcagtaagga

SEQ ID NO: 194967 - DNA, 25 bp, Probe Sequence
cccccaccccagagggatgacagtc

SEQ ID NO: 194968 - DNA, 25 bp, Probe Sequence
ccacgtcccgggcggtatacagttg

SEQ ID NO: 194969 - DNA, 25 bp, Probe Sequence
ccctgactcctgcgggggtatgggg

SEQ ID NO: 194970 - DNA, 25 bp, Probe Sequence
ccctggtactggggtgaccgagtgg

SEQ ID NO: 194971 - DNA, 25 bp, Probe Sequence
ccctggttcggggcagtggcgaggg

SEQ ID NO: 194972 - DNA, 25 bp, Probe Sequence
ccctgggtgcggtgggcatgatggg

SEQ ID NO: 194973 - DNA, 25 bp, Probe Sequence
cccgggagcctcagggctctgagag

SEQ ID NO: 194974 - DNA, 25 bp, Probe Sequence
cccgggagcctcagggctctgagag

SEQ ID NO: 194975 - DNA, 25 bp, Probe Sequence
cccggaagccccaggctggagataa

SEQ ID NO: 194976 - DNA, 25 bp, Probe Sequence
cccggatagcaacctcgggacagat

SEQ ID NO: 194977 - DNA, 25 bp, Probe Sequence
ccctggagcggggtctgcaggacga

SEQ ID NO: 194978 - DNA, 25 bp, Probe Sequence
ccctggcgagtgtccttcaggaggt

SEQ ID NO: 194979 - DNA, 25 bp, Probe Sequence
ccctggccgtgtgtttgatatgctt

SEQ ID NO: 194980 - DNA, 25 bp, Probe Sequence
ccctggccgagtgaggtgtagcaga

SEQ ID NO: 194981 - DNA, 25 bp, Probe Sequence
ccctgaccatgacctgaggttggtg

SEQ ID NO: 194982 - DNA, 25 bp, Probe Sequence
ccctgcccagatagctggtggtggg

SEQ ID NO: 194983 - DNA, 25 bp, Probe Sequence
ccctgtgctacaagcccttgtgggg

SEQ ID NO: 194984 - DNA, 25 bp, Probe Sequence
ccctgtgttcaccacgagtgtggct

SEQ ID NO: 194985 - DNA, 25 bp, Probe Sequence
ccctgtgtgtgctgcagcaggcacg

SEQ ID NO: 194986 - DNA, 25 bp, Probe Sequence
ccctgtgtgtgctcagtgccatgaa

SEQ ID NO: 194987 - DNA, 25 bp, Probe Sequence
ccctgtgtgtggcagtgacatgtcc

SEQ ID NO: 194988 - DNA, 25 bp, Probe Sequence
ccctggctgtgacaggaaggaaggg

SEQ ID NO: 194989 - DNA, 25 bp, Probe Sequence
ccctggttgccctggggcagatggt

SEQ ID NO: 194990 - DNA, 25 bp, Probe Sequence
cccgtgttcctgtgcggaggggatg

SEQ ID NO: 194991 - DNA, 25 bp, Probe Sequence
ccctgtgttccttggccagggtggc

SEQ ID NO: 194992 - DNA, 25 bp, Probe Sequence
cccgcttatgcgtatgtgcacgggg

SEQ ID NO: 194993 - DNA, 25 bp, Probe Sequence
cccctcagtcggagccggaggtggc

SEQ ID NO: 194994 - DNA, 25 bp, Probe Sequence
cccgaggcctggcttcaggagggag

SEQ ID NO: 194995 - DNA, 25 bp, Probe Sequence
cccggagtctggtttagggctgcgt

SEQ ID NO: 194996 - DNA, 25 bp, Probe Sequence
cccgggatctgggatcattggcagc

SEQ ID NO: 194997 - DNA, 25 bp, Probe Sequence
ccctgctggtcaaagtcattgccca

SEQ ID NO: 194998 - DNA, 25 bp, Probe Sequence
ccctgccagataaatgtgtgtgccc

SEQ ID NO: 194999 - DNA, 25 bp, Probe Sequence
ccctggatgctaacaggggcgccgt

SEQ ID NO: 195000 - DNA, 25 bp, Probe Sequence
cccggagcagattgcagcggacatc

SEQ ID NO: 195001 - DNA, 25 bp, Probe Sequence
ccctggagatgattgagccgcgcac

SEQ ID NO: 195002 - DNA, 25 bp, Probe Sequence
ccctggcagtgaggagcccatcgtg

SEQ ID NO: 195003 - DNA, 25 bp, Probe Sequence
ccctggaggatgaggccactctggg

SEQ ID NO: 195004 - DNA, 25 bp, Probe Sequence
ccctgcaactgcagggccgcttctg

SEQ ID NO: 195005 - DNA, 25 bp, Probe Sequence
cccgaatccgggacacacttcggcg

SEQ ID NO: 195006 - DNA, 25 bp, Probe Sequence
cccgaatacctgcttagttcctgaa

SEQ ID NO: 195007 - DNA, 25 bp, Probe Sequence
cccgagaacctgcaggacttcgtgg

SEQ ID NO: 195008 - DNA, 25 bp, Probe Sequence
ccctgttacctgctggatattggct

SEQ ID NO: 195009 - DNA, 25 bp, Probe Sequence
ccctgcttgccactggaggaacaga

SEQ ID NO: 195010 - DNA, 25 bp, Probe Sequence
ccctgcttgccactggaggaacaga

SEQ ID NO: 195011 - DNA, 25 bp, Probe Sequence
ccctgttgcacacatgagcgacaaa

SEQ ID NO: 195012 - DNA, 25 bp, Probe Sequence
ccctgtcagagcctcggagcaatac

SEQ ID NO: 195013 - DNA, 25 bp, Probe Sequence
ccctgtcagctgctctgtggaaaag

SEQ ID NO: 195014 - DNA, 25 bp, Probe Sequence
ccctgtcagtgtcggagtgtataag

SEQ ID NO: 195015 - DNA, 25 bp, Probe Sequence
ccctgtcttgtgggagatgcgtagg

SEQ ID NO: 195016 - DNA, 25 bp, Probe Sequence
ccctgactgatggcaggaatccaag

SEQ ID NO: 195017 - DNA, 25 bp, Probe Sequence
ccctgtggcccagtgaactgcaatg

SEQ ID NO: 195018 - DNA, 25 bp, Probe Sequence
cccgctccacgcagtacatgaagga

SEQ ID NO: 195019 - DNA, 25 bp, Probe Sequence
ccccgtcactgagctcaagaaagac

SEQ ID NO: 195020 - DNA, 25 bp, Probe Sequence
ccccgttcggcagccaagacataca

SEQ ID NO: 195021 - DNA, 25 bp, Probe Sequence
ccccgttcggcagccaagacataca

SEQ ID NO: 195022 - DNA, 25 bp, Probe Sequence
ccccagtccggagtcagtggttaca

SEQ ID NO: 195023 - DNA, 25 bp, Probe Sequence
gccttggtccatgacctttttacac

SEQ ID NO: 195024 - DNA, 25 bp, Probe Sequence
ccgttctttggagcattgttctaaa

SEQ ID NO: 195025 - DNA, 25 bp, Probe Sequence
ccgtatatttgtctcgtacctacag

SEQ ID NO: 195026 - DNA, 25 bp, Probe Sequence
cccgtatatttgtctcgtacctaca

SEQ ID NO: 195027 - DNA, 25 bp, Probe Sequence
cccggtatcattcctcgaatttcag

SEQ ID NO: 195028 - DNA, 25 bp, Probe Sequence
ccctggacatttgcactgactttat

SEQ ID NO: 195029 - DNA, 25 bp, Probe Sequence
ccctgaacatacctcacagatcctc

SEQ ID NO: 195030 - DNA, 25 bp, Probe Sequence
ccctgaagatctgtgccaaccacta

SEQ ID NO: 195031 - DNA, 25 bp, Probe Sequence
cccgcagagactggtgacacgcttc

SEQ ID NO: 195032 - DNA, 25 bp, Probe Sequence
ccctgtctctctgggacagagcctc

SEQ ID NO: 195033 - DNA, 25 bp, Probe Sequence
cccgctcctattagatctaatgcca

SEQ ID NO: 195034 - DNA, 25 bp, Probe Sequence
ccccttttcttgaccatatcacaag

SEQ ID NO: 195035 - DNA, 25 bp, Probe Sequence
cccgtctattcctatgctcaataaa

SEQ ID NO: 195036 - DNA, 25 bp, Probe Sequence
ccctgttttgcctcaatgctaacta

SEQ ID NO: 195037 - DNA, 25 bp, Probe Sequence
ccctgttttgactcagctctaggac

SEQ ID NO: 195038 - DNA, 25 bp, Probe Sequence
ccctgattttgaatccctcttggat

SEQ ID NO: 195039 - DNA, 25 bp, Probe Sequence
ccctgcttctgtttggtcttagagt

SEQ ID NO: 195040 - DNA, 25 bp, Probe Sequence
ccctggtcttcaatggttagcagaa

SEQ ID NO: 195041 - DNA, 25 bp, Probe Sequence
ccctggtcttcaatggttagcagaa

SEQ ID NO: 195042 - DNA, 25 bp, Probe Sequence
ccgcatggtgcttgcagttttaaat

SEQ ID NO: 195043 - DNA, 25 bp, Probe Sequence
ccctggctctaggacactctaacaa

SEQ ID NO: 195044 - DNA, 25 bp, Probe Sequence
ccctggccaaggtcatccatgacaa

SEQ ID NO: 195045 - DNA, 25 bp, Probe Sequence
ccctggccaaggtcatccatgacaa

SEQ ID NO: 195046 - DNA, 25 bp, Probe Sequence
ccctggcagaaccactgcctgaaga

SEQ ID NO: 195047 - DNA, 25 bp, Probe Sequence
ccctgcaagacaccctgaagcaaaa

SEQ ID NO: 195048 - DNA, 25 bp, Probe Sequence
ccctgctcagcaagccttctaaaaa

SEQ ID NO: 195049 - DNA, 25 bp, Probe Sequence
cccccatgacccgtctggaaattat

SEQ ID NO: 195050 - DNA, 25 bp, Probe Sequence
cccctcaacctggagcggataaatt

SEQ ID NO: 195051 - DNA, 25 bp, Probe Sequence
cccctcatgcctcggaaggctacta

SEQ ID NO: 195052 - DNA, 25 bp, Probe Sequence
cctcctgccctggaaagattaccaa

SEQ ID NO: 195053 - DNA, 25 bp, Probe Sequence
ccccggattaaaagcctcatccacg

SEQ ID NO: 195054 - DNA, 25 bp, Probe Sequence
ccccaggttgcataacctaagtcac

SEQ ID NO: 195055 - DNA, 25 bp, Probe Sequence
ccaccgtgtggagaaactaaattag

SEQ ID NO: 195056 - DNA, 25 bp, Probe Sequence
ccccagtgctggagacgtcgtaaat

SEQ ID NO: 195057 - DNA, 25 bp, Probe Sequence
ccccccagttaatgctgctgtgaaa

SEQ ID NO: 195058 - DNA, 25 bp, Probe Sequence
cccgccatcaacaacaggctggaac

SEQ ID NO: 195059 - DNA, 25 bp, Probe Sequence
cccgccatcaacaacaggctggaac

SEQ ID NO: 195060 - DNA, 25 bp, Probe Sequence
ccccgtagtctgtggcagtgaacct

SEQ ID NO: 195061 - DNA, 25 bp, Probe Sequence
ccccccttggcatgggtgagacctg

SEQ ID NO: 195062 - DNA, 25 bp, Probe Sequence
ccccaccggccatcaggtggtacta

SEQ ID NO: 195063 - DNA, 25 bp, Probe Sequence
ccgccacgtgacagaaggggtaagc

SEQ ID NO: 195064 - DNA, 25 bp, Probe Sequence
ccccacaccgctcaagcttgggaag

SEQ ID NO: 195065 - DNA, 25 bp, Probe Sequence
cccccacccgagaaatctggggatg

SEQ ID NO: 195066 - DNA, 25 bp, Probe Sequence
ccccctcccctgatttagggatgcg

SEQ ID NO: 195067 - DNA, 25 bp, Probe Sequence
ccccctccacctattgacaatgggg

SEQ ID NO: 195068 - DNA, 25 bp, Probe Sequence
ccccctccacctattgacaatgggg

SEQ ID NO: 195069 - DNA, 25 bp, Probe Sequence
ccccctccacctattgacaatggag

SEQ ID NO: 195070 - DNA, 25 bp, Probe Sequence
cccccttctcctgaatcagcaggga

SEQ ID NO: 195071 - DNA, 25 bp, Probe Sequence
ccccccctacatgcaggaaggttca

SEQ ID NO: 195072 - DNA, 25 bp, Probe Sequence
cccgtctcgtactggatatacgtta

SEQ ID NO: 195073 - DNA, 25 bp, Probe Sequence
ccccgtctcgtactggatatacgtt

SEQ ID NO: 195074 - DNA, 25 bp, Probe Sequence
ccccgtggtgaatggatctactgtg

SEQ ID NO: 195075 - DNA, 25 bp, Probe Sequence
cccgggcgtgaaccgagctgaggga

SEQ ID NO: 195076 - DNA, 25 bp, Probe Sequence
cccgggcttgcaagctcagagtgat

SEQ ID NO: 195077 - DNA, 25 bp, Probe Sequence
cccgtgacagagcgccagattgagc

SEQ ID NO: 195078 - DNA, 25 bp, Probe Sequence
ccctgtgggctgtgccaagtgtgcc

SEQ ID NO: 195079 - DNA, 25 bp, Probe Sequence
ccctgtgggctgtgccaagtgtgcc

SEQ ID NO: 195080 - DNA, 25 bp, Probe Sequence
cccgtgtggccaagttggcgtgcca

SEQ ID NO: 195081 - DNA, 25 bp, Probe Sequence
ccctggggtcatagcttgggctgtt

SEQ ID NO: 195082 - DNA, 25 bp, Probe Sequence
ccctggagggctagcaaggccttct

SEQ ID NO: 195083 - DNA, 25 bp, Probe Sequence
ccctgtaggggtgcagcccatactg

SEQ ID NO: 195084 - DNA, 25 bp, Probe Sequence
ccctgtaggggtgcagcccatactg

SEQ ID NO: 195085 - DNA, 25 bp, Probe Sequence
ccctgtgggaggtccgacaaacctg

SEQ ID NO: 195086 - DNA, 25 bp, Probe Sequence
cccggggagtgcttcgaaactactg

SEQ ID NO: 195087 - DNA, 25 bp, Probe Sequence
cccggggcctgctcaaaattacagg

SEQ ID NO: 195088 - DNA, 25 bp, Probe Sequence
ccggagaacctgagacaccttaaga

SEQ ID NO: 195089 - DNA, 25 bp, Probe Sequence
ccctggaccctgagaactctcatga

SEQ ID NO: 195090 - DNA, 25 bp, Probe Sequence
cccggagtcagtacaacttcatcgc

SEQ ID NO: 195091 - DNA, 25 bp, Probe Sequence
ccctggaaagtaagtctcgctcttg

SEQ ID NO: 195092 - DNA, 25 bp, Probe Sequence
ccctggcaaaattttccactctgag

SEQ ID NO: 195093 - DNA, 25 bp, Probe Sequence
cctctggaaggtctgaccacgggct

SEQ ID NO: 195094 - DNA, 25 bp, Probe Sequence
gcattcggaaaggcgaccccgaact

SEQ ID NO: 195095 - DNA, 25 bp, Probe Sequence
cccggaaatgaggaccatcactgta

SEQ ID NO: 195096 - DNA, 25 bp, Probe Sequence
cccggaaatacgttcgcaactcacg

SEQ ID NO: 195097 - DNA, 25 bp, Probe Sequence
cctggggaagacaccagacccctgg

SEQ ID NO: 195098 - DNA, 25 bp, Probe Sequence
cctggggaagacaccagacccctgg

SEQ ID NO: 195099 - DNA, 25 bp, Probe Sequence
cccgggaagaattcgcttccacctg

SEQ ID NO: 195100 - DNA, 25 bp, Probe Sequence
cccgggatagagaagtctttaaatg

SEQ ID NO: 195101 - DNA, 25 bp, Probe Sequence
cccgggcaactgaagccttttgaga

SEQ ID NO: 195102 - DNA, 25 bp, Probe Sequence
ccctgggacagtaatgccttatagt

SEQ ID NO: 195103 - DNA, 25 bp, Probe Sequence
ccgtggtaactttcctgctgtagtt

SEQ ID NO: 195104 - DNA, 25 bp, Probe Sequence
ccgttgaagactttgccgcagtagg

SEQ ID NO: 195105 - DNA, 25 bp, Probe Sequence
ccctgtgaaagcttgattcctgcca

SEQ ID NO: 195106 - DNA, 25 bp, Probe Sequence
ccctgagcaacacctgactgagctg

SEQ ID NO: 195107 - DNA, 25 bp, Probe Sequence
cccggattgcatccaatgctggcag

SEQ ID NO: 195108 - DNA, 25 bp, Probe Sequence
ccctggatgctttcaactggtgcgt

SEQ ID NO: 195109 - DNA, 25 bp, Probe Sequence
ccctggcacattcccatttgtgctg

SEQ ID NO: 195110 - DNA, 25 bp, Probe Sequence
cccgttcatcatccatcttaattgg

SEQ ID NO: 195111 - DNA, 25 bp, Probe Sequence
cccgaagcattccattctcgtggag

SEQ ID NO: 195112 - DNA, 25 bp, Probe Sequence
cccgaagttccagacagtcagcaag

SEQ ID NO: 195113 - DNA, 25 bp, Probe Sequence
cccgaagtccaagtggcgaagcaaa

SEQ ID NO: 195114 - DNA, 25 bp, Probe Sequence
cccggaagcgccaggctggagataa

SEQ ID NO: 195115 - DNA, 25 bp, Probe Sequence
gcccctatgacgtcaaggccggtaa

SEQ ID NO: 195116 - DNA, 25 bp, Probe Sequence
cccctagtggccatagcctggttaa

SEQ ID NO: 195117 - DNA, 25 bp, Probe Sequence
cccccaggcagctataagaatattt

SEQ ID NO: 195118 - DNA, 25 bp, Probe Sequence
ccctgacccaaaaagccatgattgt

SEQ ID NO: 195119 - DNA, 25 bp, Probe Sequence
cccggcgcgaaacacgatattgtac

SEQ ID NO: 195120 - DNA, 25 bp, Probe Sequence
ccccctcagaaaccactgtcattag

SEQ ID NO: 195121 - DNA, 25 bp, Probe Sequence
cccccaaatcaagacagtaatctgt

SEQ ID NO: 195122 - DNA, 25 bp, Probe Sequence
cccggaaatccgaacacttgagtgt

SEQ ID NO: 195123 - DNA, 25 bp, Probe Sequence
ccacaagccaaagaacacggaggat

SEQ ID NO: 195124 - DNA, 25 bp, Probe Sequence
ccacatactaatttgaaagggaaag

SEQ ID NO: 195125 - DNA, 25 bp, Probe Sequence
ccccgataaactcacaggtgctaaa

SEQ ID NO: 195126 - DNA, 25 bp, Probe Sequence
cctccgtgaacctgactaagctaga

SEQ ID NO: 195127 - DNA, 25 bp, Probe Sequence
ccatcggggaccttaagaagctgat

SEQ ID NO: 195128 - DNA, 25 bp, Probe Sequence
cccggctggcaatgtggtgaagctg

SEQ ID NO: 195129 - DNA, 25 bp, Probe Sequence
cccgattgtcaatggcaggaagcca

SEQ ID NO: 195130 - DNA, 25 bp, Probe Sequence
ccaggttgcccacggaaaatccaat

SEQ ID NO: 195131 - DNA, 25 bp, Probe Sequence
cccctgtggccaactgcaaaaaaag

SEQ ID NO: 195132 - DNA, 25 bp, Probe Sequence
cccctgtggccaactgcaaaaaaag

SEQ ID NO: 195133 - DNA, 25 bp, Probe Sequence
ccccaggcaccgtgccaaagactgg

SEQ ID NO: 195134 - DNA, 25 bp, Probe Sequence
ccccttgccccatgggaagacgagg

SEQ ID NO: 195135 - DNA, 25 bp, Probe Sequence
cctccttgccaacaaaaagccgcgg

SEQ ID NO: 195136 - DNA, 25 bp, Probe Sequence
ccccagacacaagacagaaactcgg

SEQ ID NO: 195137 - DNA, 25 bp, Probe Sequence
cccccaataaagtctcaaatctttg

SEQ ID NO: 195138 - DNA, 25 bp, Probe Sequence
cccccaaacaagtgagaacatacat

SEQ ID NO: 195139 - DNA, 25 bp, Probe Sequence
cccccaaagggcagcagataaatct

SEQ ID NO: 195140 - DNA, 25 bp, Probe Sequence
ccccaaacaagtgagaacatacatt

SEQ ID NO: 195141 - DNA, 25 bp, Probe Sequence
cccggtatctactcaaaatacagaa

SEQ ID NO: 195142 - DNA, 25 bp, Probe Sequence
ccccgtcactacttacaaatcaaat

SEQ ID NO: 195143 - DNA, 25 bp, Probe Sequence
cccctcttaatactcaccaataaat

SEQ ID NO: 195144 - DNA, 25 bp, Probe Sequence
cccctctctgcgaaatcgctcaata

SEQ ID NO: 195145 - DNA, 25 bp, Probe Sequence
cccctctgcaagaaagcctctttgc

SEQ ID NO: 195146 - DNA, 25 bp, Probe Sequence
cccctgctaattccaccttatgggg

SEQ ID NO: 195147 - DNA, 25 bp, Probe Sequence
cccctgactctttcaccggcagggg

SEQ ID NO: 195148 - DNA, 25 bp, Probe Sequence
cccctacactttggccaagcaagag

SEQ ID NO: 195149 - DNA, 25 bp, Probe Sequence
cccctactcgttcctatagaacaca

SEQ ID NO: 195150 - DNA, 25 bp, Probe Sequence
ccccaccttgtctgctaaataaaca

SEQ ID NO: 195151 - DNA, 25 bp, Probe Sequence
cccctgtcttctcactaaatactac

SEQ ID NO: 195152 - DNA, 25 bp, Probe Sequence
cccctgtgttttccaaagctagata

SEQ ID NO: 195153 - DNA, 25 bp, Probe Sequence
ccccattacttcaatcaagcccaaa

SEQ ID NO: 195154 - DNA, 25 bp, Probe Sequence
ccccctagcagaaaatagcccacta

SEQ ID NO: 195155 - DNA, 25 bp, Probe Sequence
ccccctaaagtagatcctcactcag

SEQ ID NO: 195156 - DNA, 25 bp, Probe Sequence
tccccgtatcaagaaatttgccatc

SEQ ID NO: 195157 - DNA, 25 bp, Probe Sequence
cccggtgcctgtgaaattcgtcatg

SEQ ID NO: 195158 - DNA, 25 bp, Probe Sequence
cccgggcgtgtcaataatatcactc

SEQ ID NO: 195159 - DNA, 25 bp, Probe Sequence
cccgtatgcttacattattgctctt

SEQ ID NO: 195160 - DNA, 25 bp, Probe Sequence
ccgagatcgctcacaatgtttcctc

SEQ ID NO: 195161 - DNA, 25 bp, Probe Sequence
ccgagacggctacatgatccgccgc

SEQ ID NO: 195162 - DNA, 25 bp, Probe Sequence
cccgacctcagagagtactcgcagg

SEQ ID NO: 195163 - DNA, 25 bp, Probe Sequence
cccgacctcagagagtactcgcagg

SEQ ID NO: 195164 - DNA, 25 bp, Probe Sequence
cccgagcaaacacagtcctggagcg

SEQ ID NO: 195165 - DNA, 25 bp, Probe Sequence
ccccagcaaaaagctccgcaacaag

SEQ ID NO: 195166 - DNA, 25 bp, Probe Sequence
ccccagaaaagctcactctaaatca

SEQ ID NO: 195167 - DNA, 25 bp, Probe Sequence
ccccaccaaactgacctatgatgaa

SEQ ID NO: 195168 - DNA, 25 bp, Probe Sequence
ccccactaacctgccaatattgagt

SEQ ID NO: 195169 - DNA, 25 bp, Probe Sequence
cccccaaatcttacagccatttatt

SEQ ID NO: 195170 - DNA, 25 bp, Probe Sequence
cccctgaactctacacaacatattt

SEQ ID NO: 195171 - DNA, 25 bp, Probe Sequence
cccctgaactctacacaacatattt

SEQ ID NO: 195172 - DNA, 25 bp, Probe Sequence
ccccttccctcacagtatatgaatg

SEQ ID NO: 195173 - DNA, 25 bp, Probe Sequence
cccgatcccctcatcaaggtgaatg

SEQ ID NO: 195174 - DNA, 25 bp, Probe Sequence
cccgatcccctcatcaaggtgaatg

SEQ ID NO: 195175 - DNA, 25 bp, Probe Sequence
ccctggccacctctaaaatgactgg

SEQ ID NO: 195176 - DNA, 25 bp, Probe Sequence
ccctgtgcccttttaaacgatgtgg

SEQ ID NO: 195177 - DNA, 25 bp, Probe Sequence
ccctgtcaccatcagcaataacctt

SEQ ID NO: 195178 - DNA, 25 bp, Probe Sequence
ccctggccgatgtgcatatcaacat

SEQ ID NO: 195179 - DNA, 25 bp, Probe Sequence
ccctggctggtagcatcacaacacc

SEQ ID NO: 195180 - DNA, 25 bp, Probe Sequence
ccctggctggtagcatcacaacacc

SEQ ID NO: 195181 - DNA, 25 bp, Probe Sequence
cccggctgagcatctatagcaccag

SEQ ID NO: 195182 - DNA, 25 bp, Probe Sequence
ccctggctgctcttatggagccgag

SEQ ID NO: 195183 - DNA, 25 bp, Probe Sequence
ccctggctgctcttatggagccgag

SEQ ID NO: 195184 - DNA, 25 bp, Probe Sequence
cccggtctatcttgtgacatttggt

SEQ ID NO: 195185 - DNA, 25 bp, Probe Sequence
cccgagctttccttacaatcagagc

SEQ ID NO: 195186 - DNA, 25 bp, Probe Sequence
ccctggtctgttctgacgagacatc

SEQ ID NO: 195187 - DNA, 25 bp, Probe Sequence
cccccgtgatgtctgatcgagaatg

SEQ ID NO: 195188 - DNA, 25 bp, Probe Sequence
cccgccgaggtcgaggctgagaagc

SEQ ID NO: 195189 - DNA, 25 bp, Probe Sequence
cccgcgtcggacgagcgcaaaagcg

SEQ ID NO: 195190 - DNA, 25 bp, Probe Sequence
ccctggaagagctggcgaccaagag

SEQ ID NO: 195191 - DNA, 25 bp, Probe Sequence
ccctggcagaaggggagcccgaggg

SEQ ID NO: 195192 - DNA, 25 bp, Probe Sequence
ccctggacacagaggtgcccatgga

SEQ ID NO: 195193 - DNA, 25 bp, Probe Sequence
cccgatggcacgatgaacctcatga

SEQ ID NO: 195194 - DNA, 25 bp, Probe Sequence
cccgagccatctcaattaccatata

SEQ ID NO: 195195 - DNA, 25 bp, Probe Sequence
cccgactcacactacatgctgggtt

SEQ ID NO: 195196 - DNA, 25 bp, Probe Sequence
ccctgtgccttgtatgcatctgagg

SEQ ID NO: 195197 - DNA, 25 bp, Probe Sequence
ccgctttttgcctatcgatgggtag

SEQ ID NO: 195198 - DNA, 25 bp, Probe Sequence
ccgttaatagcttttgtgggatact

SEQ ID NO: 195199 - DNA, 25 bp, Probe Sequence
ccgatttgtgtctattattggtgac

SEQ ID NO: 195200 - DNA, 25 bp, Probe Sequence
ccctggactggccatgaagtgagga

SEQ ID NO: 195201 - DNA, 25 bp, Probe Sequence
ccctggtggcgaggaagctgagcag

SEQ ID NO: 195202 - DNA, 25 bp, Probe Sequence
cccggtgtgcgaggatcacagcgag

SEQ ID NO: 195203 - DNA, 25 bp, Probe Sequence
cccggctatgagggcagcaactgcg

SEQ ID NO: 195204 - DNA, 25 bp, Probe Sequence
cccggcattcaaggaaatctctgtc

SEQ ID NO: 195205 - DNA, 25 bp, Probe Sequence
ccctgtgttccagaggacctgatgc

SEQ ID NO: 195206 - DNA, 25 bp, Probe Sequence
cccgatgcgtgcccaaggacaaggc

SEQ ID NO: 195207 - DNA, 25 bp, Probe Sequence
cccgagtgtgcccaggaactcagag

SEQ ID NO: 195208 - DNA, 25 bp, Probe Sequence
ccgaagttgcctcttttaggaatct

SEQ ID NO: 195209 - DNA, 25 bp, Probe Sequence
gccgaagttgcctcttttaggaatc

SEQ ID NO: 195210 - DNA, 25 bp, Probe Sequence
gctcgaagggccggtagttcgagaa

SEQ ID NO: 195211 - DNA, 25 bp, Probe Sequence
ccgcaagggacgggtgttcgccaat

SEQ ID NO: 195212 - DNA, 25 bp, Probe Sequence
ccaaccagaacgtggtttgcctgag

SEQ ID NO: 195213 - DNA, 25 bp, Probe Sequence
ccaccccaagtgtggttatgcctcc

SEQ ID NO: 195214 - DNA, 25 bp, Probe Sequence
cccccaagattgtggttgccattct

SEQ ID NO: 195215 - DNA, 25 bp, Probe Sequence
cccccaactggaaggtccttctctg

SEQ ID NO: 195216 - DNA, 25 bp, Probe Sequence
ccccaacacggatgagtttttagat

SEQ ID NO: 195217 - DNA, 25 bp, Probe Sequence
cccccctcgtgtcaatatttgttat

SEQ ID NO: 195218 - DNA, 25 bp, Probe Sequence
ccaccgtctaggctaaacattgttt

SEQ ID NO: 195219 - DNA, 25 bp, Probe Sequence
cccctttaaggatatagtctggttg

SEQ ID NO: 195220 - DNA, 25 bp, Probe Sequence
ccccagctctcacgattaataggct

SEQ ID NO: 195221 - DNA, 25 bp, Probe Sequence
ccccacttcacctacaatattgtta

SEQ ID NO: 195222 - DNA, 25 bp, Probe Sequence
cccgcctgacatggaacagaacgga

SEQ ID NO: 195223 - DNA, 25 bp, Probe Sequence
ccctggctgagctgaatgatgtcac

SEQ ID NO: 195224 - DNA, 25 bp, Probe Sequence
cccgctgctggacatatgagacatc

SEQ ID NO: 195225 - DNA, 25 bp, Probe Sequence
cccgctgctggacatatgagacatc

SEQ ID NO: 195226 - DNA, 25 bp, Probe Sequence
cccgctgcgtgtggactgaaatgcc

SEQ ID NO: 195227 - DNA, 25 bp, Probe Sequence
cccgcaccgtcagctacaatgggat

SEQ ID NO: 195228 - DNA, 25 bp, Probe Sequence
ccccacctgtaccaccatgtgggac

SEQ ID NO: 195229 - DNA, 25 bp, Probe Sequence
ccccaactatgtcactgcggggctg

SEQ ID NO: 195230 - DNA, 25 bp, Probe Sequence
cccccacatctgcaactgggtgtcg

SEQ ID NO: 195231 - DNA, 25 bp, Probe Sequence
cccccccatgaaatgcaggttcact

SEQ ID NO: 195232 - DNA, 25 bp, Probe Sequence
cccccccatgaaatgcaggttcact

SEQ ID NO: 195233 - DNA, 25 bp, Probe Sequence
ccccctcatcagaaagaagtccttg

SEQ ID NO: 195234 - DNA, 25 bp, Probe Sequence
cccgagccatatagcaggcacgtcc

SEQ ID NO: 195235 - DNA, 25 bp, Probe Sequence
cccgcaccagttggagcagatgcct

SEQ ID NO: 195236 - DNA, 25 bp, Probe Sequence
cccgcaccttgtcagcaagatccag

SEQ ID NO: 195237 - DNA, 25 bp, Probe Sequence
ccccccgtgaggactaatccagata

SEQ ID NO: 195238 - DNA, 25 bp, Probe Sequence
cccctccaaagtcttgatagcaagc

SEQ ID NO: 195239 - DNA, 25 bp, Probe Sequence
ccccaacaaaatcttcggcgtgacg

SEQ ID NO: 195240 - DNA, 25 bp, Probe Sequence
cccctacaaaagcactccacagctt

SEQ ID NO: 195241 - DNA, 25 bp, Probe Sequence
ccccaataaaggcagctgcctctgc

SEQ ID NO: 195242 - DNA, 25 bp, Probe Sequence
cccccgagacgaaggtgttctgcgg

SEQ ID NO: 195243 - DNA, 25 bp, Probe Sequence
cccccgccatggagagtgtctgcgg

SEQ ID NO: 195244 - DNA, 25 bp, Probe Sequence
cccccgccatggagagtgtctgcgg

SEQ ID NO: 195245 - DNA, 25 bp, Probe Sequence
cccccaccatggggtgcgaatggga

SEQ ID NO: 195246 - DNA, 25 bp, Probe Sequence
cccctgcactatgcctgtttttggg

SEQ ID NO: 195247 - DNA, 25 bp, Probe Sequence
ccccgcagtgaagttcccttgtggg

SEQ ID NO: 195248 - DNA, 25 bp, Probe Sequence
cccccagtcagtattaccctgtgaa

SEQ ID NO: 195249 - DNA, 25 bp, Probe Sequence
ccccaatgacagatttccctttaga

SEQ ID NO: 195250 - DNA, 25 bp, Probe Sequence
ccccattgacgtctatgggtgtttg

SEQ ID NO: 195251 - DNA, 25 bp, Probe Sequence
ccccatattgttcttgtggtagtga

SEQ ID NO: 195252 - DNA, 25 bp, Probe Sequence
cccctccctaacatgggtattacat

SEQ ID NO: 195253 - DNA, 25 bp, Probe Sequence
ccccaccccaactcagagttaagca

SEQ ID NO: 195254 - DNA, 25 bp, Probe Sequence
ccccaccttcaacaatatttcaacg

SEQ ID NO: 195255 - DNA, 25 bp, Probe Sequence
ccccaactcccagtattactacaat

SEQ ID NO: 195256 - DNA, 25 bp, Probe Sequence
ccccatcagcctccatggagtactt

SEQ ID NO: 195257 - DNA, 25 bp, Probe Sequence
ccccacatgtatccgggataaccgg

SEQ ID NO: 195258 - DNA, 25 bp, Probe Sequence
ccccaactatgaccgggacatcttg

SEQ ID NO: 195259 - DNA, 25 bp, Probe Sequence
cccccacattggccagtggactcat

SEQ ID NO: 195260 - DNA, 25 bp, Probe Sequence
ccccccatttccatgaactttgagg

SEQ ID NO: 195261 - DNA, 25 bp, Probe Sequence
ccccgcctaccgagaagcatttgga

SEQ ID NO: 195262 - DNA, 25 bp, Probe Sequence
ccgccaccccaaatacaacagttgg

SEQ ID NO: 195263 - DNA, 25 bp, Probe Sequence
cccccacacgagactagcttagttg

SEQ ID NO: 195264 - DNA, 25 bp, Probe Sequence
ccccatccaggaccttctatttata

SEQ ID NO: 195265 - DNA, 25 bp, Probe Sequence
ccccccaggagacctatgcagatat

SEQ ID NO: 195266 - DNA, 25 bp, Probe Sequence
ccccccaggagacctatgcagatat

SEQ ID NO: 195267 - DNA, 25 bp, Probe Sequence
cccccaaggacatctggaatgtcac

SEQ ID NO: 195268 - DNA, 25 bp, Probe Sequence
ccccctgagggcgtgctgggggcgc

SEQ ID NO: 195269 - DNA, 25 bp, Probe Sequence
cccgttaatggagcggggcgccagt

SEQ ID NO: 195270 - DNA, 25 bp, Probe Sequence
ccccttcaatggctccgggagccat

SEQ ID NO: 195271 - DNA, 25 bp, Probe Sequence
cccctaatgagcgctcacggggtct

SEQ ID NO: 195272 - DNA, 25 bp, Probe Sequence
cccctattggacgtcactgacgggt

SEQ ID NO: 195273 - DNA, 25 bp, Probe Sequence
cccccagtggaggtcctgcatggga

SEQ ID NO: 195274 - DNA, 25 bp, Probe Sequence
cccggagttcaggtgactgagggaa

SEQ ID NO: 195275 - DNA, 25 bp, Probe Sequence
cccggatctgtctttccgagtgtga

SEQ ID NO: 195276 - DNA, 25 bp, Probe Sequence
cccgtactgattagtcaacagtgga

SEQ ID NO: 195277 - DNA, 25 bp, Probe Sequence
ccccttctgcaatgttattgttcat

SEQ ID NO: 195278 - DNA, 25 bp, Probe Sequence
ccccctcccattttgatggtgtctg

SEQ ID NO: 195279 - DNA, 25 bp, Probe Sequence
ccccctccctgtgtgaaatgtatta

SEQ ID NO: 195280 - DNA, 25 bp, Probe Sequence
ccccgcccattgacgtcaataatga

SEQ ID NO: 195281 - DNA, 25 bp, Probe Sequence
cccccagcctagagacaatctgtga

SEQ ID NO: 195282 - DNA, 25 bp, Probe Sequence
cccccacctcaaggtcaggatgcga

SEQ ID NO: 195283 - DNA, 25 bp, Probe Sequence
cccccacgtgacagtgcctgggaat

SEQ ID NO: 195284 - DNA, 25 bp, Probe Sequence
cccccaagatctacctgcggggcaa

SEQ ID NO: 195285 - DNA, 25 bp, Probe Sequence
ccccccagttgtcctggggctgaat

SEQ ID NO: 195286 - DNA, 25 bp, Probe Sequence
cccccgagattgcacatggctatgt

SEQ ID NO: 195287 - DNA, 25 bp, Probe Sequence
cccgtggaattgaagcagttggtgg

SEQ ID NO: 195288 - DNA, 25 bp, Probe Sequence
cccgggttgagaggagctctggtcg

SEQ ID NO: 195289 - DNA, 25 bp, Probe Sequence
cccgggcttagaaggccggctactg

SEQ ID NO: 195290 - DNA, 25 bp, Probe Sequence
cccgcgacttagtagaacgctgcat

SEQ ID NO: 195291 - DNA, 25 bp, Probe Sequence
cccgagaacagacagcaagcctcag

SEQ ID NO: 195292 - DNA, 25 bp, Probe Sequence
cccgggacagacaaactgctgtcgg

SEQ ID NO: 195293 - DNA, 25 bp, Probe Sequence
cccctggagaactacctggatatgg

SEQ ID NO: 195294 - DNA, 25 bp, Probe Sequence
ccccgccaagactatcagctgggat

SEQ ID NO: 195295 - DNA, 25 bp, Probe Sequence
ccccctacaaccactgaggtgatca

SEQ ID NO: 195296 - DNA, 25 bp, Probe Sequence
ccccatctagccatttcggaagaca

SEQ ID NO: 195297 - DNA, 25 bp, Probe Sequence
ccccctggacctttgatggaacaga

SEQ ID NO: 195298 - DNA, 25 bp, Probe Sequence
ccccctggacctttgatggaacaga

SEQ ID NO: 195299 - DNA, 25 bp, Probe Sequence
cccggatggtacattcaggcaccag

SEQ ID NO: 195300 - DNA, 25 bp, Probe Sequence
cccgggtgaacgcccaggacaatga

SEQ ID NO: 195301 - DNA, 25 bp, Probe Sequence
ccccgggaaggcgacagtgcctaag

SEQ ID NO: 195302 - DNA, 25 bp, Probe Sequence
cccctggctacgccaaagtcatcaa

SEQ ID NO: 195303 - DNA, 25 bp, Probe Sequence
cccgcgtctttgcagtagttgcaga

SEQ ID NO: 195304 - DNA, 25 bp, Probe Sequence
cccccttttgtagtatctggaactg

SEQ ID NO: 195305 - DNA, 25 bp, Probe Sequence
cccctcttcattcacttcagaaata

SEQ ID NO: 195306 - DNA, 25 bp, Probe Sequence
cccccttctagagtgcttcaaaatg

SEQ ID NO: 195307 - DNA, 25 bp, Probe Sequence
cccgggatctggtatcttcaaaatc

SEQ ID NO: 195308 - DNA, 25 bp, Probe Sequence
cccggagtgcttatcttaaaattgc

SEQ ID NO: 195309 - DNA, 25 bp, Probe Sequence
cccgtgaacttcctttgacttattg

SEQ ID NO: 195310 - DNA, 25 bp, Probe Sequence
gccgaggaaaaccgtgtactattag

SEQ ID NO: 195311 - DNA, 25 bp, Probe Sequence
gcggggaaacctgtcatatttccaa

SEQ ID NO: 195312 - DNA, 25 bp, Probe Sequence
tcctcggtaacctgtattttgtcca

SEQ ID NO: 195313 - DNA, 25 bp, Probe Sequence
ccccaggatcttgagttttttacag

SEQ ID NO: 195314 - DNA, 25 bp, Probe Sequence
ccccaggactgcacgaaggtttaca

SEQ ID NO: 195315 - DNA, 25 bp, Probe Sequence
cccgcaggcttctcaataggtttgg

SEQ ID NO: 195316 - DNA, 25 bp, Probe Sequence
cccgactcctgctgcattaatgtta

SEQ ID NO: 195317 - DNA, 25 bp, Probe Sequence
cccctctctccctataaatgatgta

SEQ ID NO: 195318 - DNA, 25 bp, Probe Sequence
cccgctccccacaatgaaataaagt

SEQ ID NO: 195319 - DNA, 25 bp, Probe Sequence
cccgctccccacaatgaaataaagt

SEQ ID NO: 195320 - DNA, 25 bp, Probe Sequence
ccccgccgccgggataatcaagagt

SEQ ID NO: 195321 - DNA, 25 bp, Probe Sequence
cccctactggggccatttcaatggg

SEQ ID NO: 195322 - DNA, 25 bp, Probe Sequence
cccctttggactcgatcttggaggg

SEQ ID NO: 195323 - DNA, 25 bp, Probe Sequence
cccctattcggcgtagcttttgtgg

SEQ ID NO: 195324 - DNA, 25 bp, Probe Sequence
ccccgaccggtgggcatttgtgagg

SEQ ID NO: 195325 - DNA, 25 bp, Probe Sequence
ccccaccaagggcgcaagagtagcg

SEQ ID NO: 195326 - DNA, 25 bp, Probe Sequence
ccccgccaaaccgcatagagaacgt

SEQ ID NO: 195327 - DNA, 25 bp, Probe Sequence
ccccgaccaagttgtctcagcagaa

SEQ ID NO: 195328 - DNA, 25 bp, Probe Sequence
cccgccaacagaattcatacgagaa

SEQ ID NO: 195329 - DNA, 25 bp, Probe Sequence
cccgttgaagactttgccgcagtag

SEQ ID NO: 195330 - DNA, 25 bp, Probe Sequence
ccgcgtacagaagtgcttgcccggg

SEQ ID NO: 195331 - DNA, 25 bp, Probe Sequence
ccgctacaagtgttgttcccatggt

SEQ ID NO: 195332 - DNA, 25 bp, Probe Sequence
cccctcatcactctgattcaaatgc

SEQ ID NO: 195333 - DNA, 25 bp, Probe Sequence
ccccatccatccatgaccagaggat

SEQ ID NO: 195334 - DNA, 25 bp, Probe Sequence
cccctcctgctgatcttcaggattt

SEQ ID NO: 195335 - DNA, 25 bp, Probe Sequence
cccctcactgtttcgtcacagttga

SEQ ID NO: 195336 - DNA, 25 bp, Probe Sequence
cccgatttgttgtgctcagcattgt

SEQ ID NO: 195337 - DNA, 25 bp, Probe Sequence
ccgaatttgtcgtgcctacaatcaa

SEQ ID NO: 195338 - DNA, 25 bp, Probe Sequence
ccccatttgtcaaagttgacctcaa

SEQ ID NO: 195339 - DNA, 25 bp, Probe Sequence
ccccaattatgggagttgaggctaa

SEQ ID NO: 195340 - DNA, 25 bp, Probe Sequence
ccccagatgtatttggatttccaaa

SEQ ID NO: 195341 - DNA, 25 bp, Probe Sequence
cccctatgctgtttggtactatcca

SEQ ID NO: 195342 - DNA, 25 bp, Probe Sequence
cccctatttgtctgaggttctcaag

SEQ ID NO: 195343 - DNA, 25 bp, Probe Sequence
cccctggacgattggaccattccat

SEQ ID NO: 195344 - DNA, 25 bp, Probe Sequence
ccccaggacaagtggtatgaccagt

SEQ ID NO: 195345 - DNA, 25 bp, Probe Sequence
ccccccactcagtaggtctgaaggc

SEQ ID NO: 195346 - DNA, 25 bp, Probe Sequence
ccccaccagcctaaggtgttcagga

SEQ ID NO: 195347 - DNA, 25 bp, Probe Sequence
cccgtcctcctggaggcagtatagg

SEQ ID NO: 195348 - DNA, 25 bp, Probe Sequence
cccgatccctcaaatgggctcttgg

SEQ ID NO: 195349 - DNA, 25 bp, Probe Sequence
cccgaacaccattgagggagctggg

SEQ ID NO: 195350 - DNA, 25 bp, Probe Sequence
cccgaagacctctgcggggagacgc

SEQ ID NO: 195351 - DNA, 25 bp, Probe Sequence
cccgactacctgtgtggcaagatca

SEQ ID NO: 195352 - DNA, 25 bp, Probe Sequence
ccccatcttccgtgttagagcaaag

SEQ ID NO: 195353 - DNA, 25 bp, Probe Sequence
ccccgctcccagatgtaaagaacgc

SEQ ID NO: 195354 - DNA, 25 bp, Probe Sequence
cccgcccccagattgataagtaatg

SEQ ID NO: 195355 - DNA, 25 bp, Probe Sequence
cccccagcctctctaaagaactgac

SEQ ID NO: 195356 - DNA, 25 bp, Probe Sequence
ccccagagctgttttatgacgagac

SEQ ID NO: 195357 - DNA, 25 bp, Probe Sequence
ccccagtttaaagtggctgaacaga

SEQ ID NO: 195358 - DNA, 25 bp, Probe Sequence
ccccttttaccagtggctgaatcta

SEQ ID NO: 195359 - DNA, 25 bp, Probe Sequence
cccgctttcaaggcaagatcgacct

SEQ ID NO: 195360 - DNA, 25 bp, Probe Sequence
cccgctttcctggaatttggcctgg

SEQ ID NO: 195361 - DNA, 25 bp, Probe Sequence
ccccattgaccgccaattgggccgg

SEQ ID NO: 195362 - DNA, 25 bp, Probe Sequence
ccccctgctctcagcatatgtgggg

SEQ ID NO: 195363 - DNA, 25 bp, Probe Sequence
cccgtgcagctcgcacatatgtggg

SEQ ID NO: 195364 - DNA, 25 bp, Probe Sequence
cccgtgctgatcgagatcctggtgg

SEQ ID NO: 195365 - DNA, 25 bp, Probe Sequence
cccgggatcgagtcctcagtgcggg

SEQ ID NO: 195366 - DNA, 25 bp, Probe Sequence
cccgggatacaggccggatgcagtg

SEQ ID NO: 195367 - DNA, 25 bp, Probe Sequence
cccgggatgagatgcactgaggaag

SEQ ID NO: 195368 - DNA, 25 bp, Probe Sequence
cccccagagagagctctgcacgtca

SEQ ID NO: 195369 - DNA, 25 bp, Probe Sequence
cccgcagagcaggaccggactacac

SEQ ID NO: 195370 - DNA, 25 bp, Probe Sequence
cccgcattcagatccatggttggcc

SEQ ID NO: 195371 - DNA, 25 bp, Probe Sequence
ccccatctctaggccaagaaggcgc

SEQ ID NO: 195372 - DNA, 25 bp, Probe Sequence
cccctcctagtcttgatagcgagcg

SEQ ID NO: 195373 - DNA, 25 bp, Probe Sequence
cccctcgcaagtttgtggagcacgt

SEQ ID NO: 195374 - DNA, 25 bp, Probe Sequence
cccctccgtgctcttcgagagggtg

SEQ ID NO: 195375 - DNA, 25 bp, Probe Sequence
cccctcggtgatctttgagacgggc

SEQ ID NO: 195376 - DNA, 25 bp, Probe Sequence
gcaagtcccgttctgttagtaggtc

SEQ ID NO: 195377 - DNA, 25 bp, Probe Sequence
gcaagtcccgttctgttagtaggtc

SEQ ID NO: 195378 - DNA, 25 bp, Probe Sequence
gaagtacgggatctacaccaaggtc

SEQ ID NO: 195379 - DNA, 25 bp, Probe Sequence
gcgaggacgaggcttaaaaacttct

SEQ ID NO: 195380 - DNA, 25 bp, Probe Sequence
ccagaaccaacccaaagtaagcttg

SEQ ID NO: 195381 - DNA, 25 bp, Probe Sequence
ccgcaagccccaaatggaaaactgt

SEQ ID NO: 195382 - DNA, 25 bp, Probe Sequence
gccctatgtacctgtccaaaactac

SEQ ID NO: 195383 - DNA, 25 bp, Probe Sequence
ccccactttgcatctccaaaattac

SEQ ID NO: 195384 - DNA, 25 bp, Probe Sequence
ccccacatttgttccgtgaaacagg

SEQ ID NO: 195385 - DNA, 25 bp, Probe Sequence
ccccaattcgtacgtggagaagtgg

SEQ ID NO: 195386 - DNA, 25 bp, Probe Sequence
cccgacagggttccggtgattgtgg

SEQ ID NO: 195387 - DNA, 25 bp, Probe Sequence
ccattgaagttaaccggtgtaggag

SEQ ID NO: 195388 - DNA, 25 bp, Probe Sequence
cccgaagtcctgaccgagttgggca

SEQ ID NO: 195389 - DNA, 25 bp, Probe Sequence
cccgaggacagccccaggggctggc

SEQ ID NO: 195390 - DNA, 25 bp, Probe Sequence
cccgggccaagaaattccagcggca

SEQ ID NO: 195391 - DNA, 25 bp, Probe Sequence
ccccggccagaaagattccagaact

SEQ ID NO: 195392 - DNA, 25 bp, Probe Sequence
ccccaggccagcaaatgttcctttt

SEQ ID NO: 195393 - DNA, 25 bp, Probe Sequence
cccgcaggtcacagaagtcctttaa

SEQ ID NO: 195394 - DNA, 25 bp, Probe Sequence
cccgcaggtcacagaagtcctttaa

SEQ ID NO: 195395 - DNA, 25 bp, Probe Sequence
ccccgctgtaatgaaacaccttctc

SEQ ID NO: 195396 - DNA, 25 bp, Probe Sequence
ccgccagctgctgctgacagctgac

SEQ ID NO: 195397 - DNA, 25 bp, Probe Sequence
cccctgtcattccaactgagcagaa

SEQ ID NO: 195398 - DNA, 25 bp, Probe Sequence
ccccagcaaccctactgatgatgac

SEQ ID NO: 195399 - DNA, 25 bp, Probe Sequence
ccccagttggcctactgttacacat

SEQ ID NO: 195400 - DNA, 25 bp, Probe Sequence
ccccagaagagcgtcacctgaacaa

SEQ ID NO: 195401 - DNA, 25 bp, Probe Sequence
cccgctgaccgcgcagccgcatgaa

SEQ ID NO: 195402 - DNA, 25 bp, Probe Sequence
cccgcaaccgaggcatgttcatgaa

SEQ ID NO: 195403 - DNA, 25 bp, Probe Sequence
cccccatctcgaagtgttctggaat

SEQ ID NO: 195404 - DNA, 25 bp, Probe Sequence
cccgtgtccgatgatgacctgtgca

SEQ ID NO: 195405 - DNA, 25 bp, Probe Sequence
cccgattctctagatggccgatcta

SEQ ID NO: 195406 - DNA, 25 bp, Probe Sequence
cccgctctacaatatgagccttctg

SEQ ID NO: 195407 - DNA, 25 bp, Probe Sequence
cccctgctagcgtattactgttctg

SEQ ID NO: 195408 - DNA, 25 bp, Probe Sequence
cccgtgtcactgtttacatgaccta

SEQ ID NO: 195409 - DNA, 25 bp, Probe Sequence
cccgtgtcactgtttacatgaccta

SEQ ID NO: 195410 - DNA, 25 bp, Probe Sequence
ccagttccctgatttaaggttgaag

SEQ ID NO: 195411 - DNA, 25 bp, Probe Sequence
ccgattgctcctgttaaaggaactg

SEQ ID NO: 195412 - DNA, 25 bp, Probe Sequence
ccgctaccaccgaaaagagaacctg

SEQ ID NO: 195413 - DNA, 25 bp, Probe Sequence
ccccccagcactgaggaagaacggg

SEQ ID NO: 195414 - DNA, 25 bp, Probe Sequence
ccccccagcctgcgagggaagcagg

SEQ ID NO: 195415 - DNA, 25 bp, Probe Sequence
ccccccagtgtgctggatcgaaggg

SEQ ID NO: 195416 - DNA, 25 bp, Probe Sequence
cccctgaacgtgttttgcgacatgg

SEQ ID NO: 195417 - DNA, 25 bp, Probe Sequence
cccccagactggtctctttttgaga

SEQ ID NO: 195418 - DNA, 25 bp, Probe Sequence
cccctcagacagtttgcttatttta

SEQ ID NO: 195419 - DNA, 25 bp, Probe Sequence
cccccaggtgccagttatggctata

SEQ ID NO: 195420 - DNA, 25 bp, Probe Sequence
ccccacaggacggtttatgagcaca

SEQ ID NO: 195421 - DNA, 25 bp, Probe Sequence
cccgccagggaggtttcatgagctc

SEQ ID NO: 195422 - DNA, 25 bp, Probe Sequence
cccgccagcggaaggttcattcgca

SEQ ID NO: 195423 - DNA, 25 bp, Probe Sequence
cccccactcagtaggtctgaaggcc

SEQ ID NO: 195424 - DNA, 25 bp, Probe Sequence
tccccactcttgaggcttaaggcgc

SEQ ID NO: 195425 - DNA, 25 bp, Probe Sequence
ccccctctgtgaaggctcagcagag

SEQ ID NO: 195426 - DNA, 25 bp, Probe Sequence
ccccctctgtgaaggctcagcagag

SEQ ID NO: 195427 - DNA, 25 bp, Probe Sequence
cccctgtctgtaaggagcagcggga

SEQ ID NO: 195428 - DNA, 25 bp, Probe Sequence
cccgctgtgcccaggagagcagcgt

SEQ ID NO: 195429 - DNA, 25 bp, Probe Sequence
cccgtagccgtccagagactggcag

SEQ ID NO: 195430 - DNA, 25 bp, Probe Sequence
cccccagccagtggagcacagctgg

SEQ ID NO: 195431 - DNA, 25 bp, Probe Sequence
cccccagccatcgcaaactgatggt

SEQ ID NO: 195432 - DNA, 25 bp, Probe Sequence
cccctcaggactgcaacaggcttgt

SEQ ID NO: 195433 - DNA, 25 bp, Probe Sequence
ccccttccaccctcagtggatgata

SEQ ID NO: 195434 - DNA, 25 bp, Probe Sequence
ccccttccaccctcagtggatgata

SEQ ID NO: 195435 - DNA, 25 bp, Probe Sequence
cccgagggaccctggatggatgtag

SEQ ID NO: 195436 - DNA, 25 bp, Probe Sequence
cccgaggtgatcccggtggtgggat

SEQ ID NO: 195437 - DNA, 25 bp, Probe Sequence
ccgaatcctgatcacgttgggggct

SEQ ID NO: 195438 - DNA, 25 bp, Probe Sequence
ccgcaggccagtcacgtttaggtgg

SEQ ID NO: 195439 - DNA, 25 bp, Probe Sequence
ccgcttctcttattcgtgttaggtg

SEQ ID NO: 195440 - DNA, 25 bp, Probe Sequence
ccgctacttcgagtcagtgctggat

SEQ ID NO: 195441 - DNA, 25 bp, Probe Sequence
ccccatttgcaagcagcctgttcat

SEQ ID NO: 195442 - DNA, 25 bp, Probe Sequence
ccccttgtgccacacattgcattat

SEQ ID NO: 195443 - DNA, 25 bp, Probe Sequence
cccctagtccccaattctgataggc

SEQ ID NO: 195444 - DNA, 25 bp, Probe Sequence
cccccagtgagctctgatttctaga

SEQ ID NO: 195445 - DNA, 25 bp, Probe Sequence
ccccacagaacacctgaactcaaat

SEQ ID NO: 195446 - DNA, 25 bp, Probe Sequence
cccctgcagtacaactacacttttt

SEQ ID NO: 195447 - DNA, 25 bp, Probe Sequence
cccctcctagatacatacaatcttg

SEQ ID NO: 195448 - DNA, 25 bp, Probe Sequence
ccccccatgcagtctaaaatgcttc

SEQ ID NO: 195449 - DNA, 25 bp, Probe Sequence
cccctgcccaacaaaacagctatga

SEQ ID NO: 195450 - DNA, 25 bp, Probe Sequence
cccgcatcgcctacaagaactggga

SEQ ID NO: 195451 - DNA, 25 bp, Probe Sequence
ccccaagcctactagagcaagaaac

SEQ ID NO: 195452 - DNA, 25 bp, Probe Sequence
ccccacaccctgcaggcaaaagaaa

SEQ ID NO: 195453 - DNA, 25 bp, Probe Sequence
ccccagcggaggcggcagagtaaaa

SEQ ID NO: 195454 - DNA, 25 bp, Probe Sequence
ccccggggccaaggcagaggaggag

SEQ ID NO: 195455 - DNA, 25 bp, Probe Sequence
cccgcgcaggcgcagacggggaagc

SEQ ID NO: 195456 - DNA, 25 bp, Probe Sequence
cccgcagcacagcgacggtgggaag

SEQ ID NO: 195457 - DNA, 25 bp, Probe Sequence
cccgacaaggagacggctgctctcc

SEQ ID NO: 195458 - DNA, 25 bp, Probe Sequence
cccccatggaggactgtgtgatctc

SEQ ID NO: 195459 - DNA, 25 bp, Probe Sequence
ccgcttctggtactttgtatctcag

SEQ ID NO: 195460 - DNA, 25 bp, Probe Sequence
ccccctggaagctgattcactatgg

SEQ ID NO: 195461 - DNA, 25 bp, Probe Sequence
ccccacgacaacttcaacatcgagg

SEQ ID NO: 195462 - DNA, 25 bp, Probe Sequence
ccccaagcaagtctcaaagccagtg

SEQ ID NO: 195463 - DNA, 25 bp, Probe Sequence
cctccaactggtctggcaactactt

SEQ ID NO: 195464 - DNA, 25 bp, Probe Sequence
ccccaactgattctgcccagataat

SEQ ID NO: 195465 - DNA, 25 bp, Probe Sequence
ccccgactattcgtgggcatgatcc

SEQ ID NO: 195466 - DNA, 25 bp, Probe Sequence
cccgccatctatgcctatgggatca

SEQ ID NO: 195467 - DNA, 25 bp, Probe Sequence
cccgcagcttatgtctagcgtgtta

SEQ ID NO: 195468 - DNA, 25 bp, Probe Sequence
ccccagcatcaagatctgggattta

SEQ ID NO: 195469 - DNA, 25 bp, Probe Sequence
cccccaagtgcatatgggtctgtca

SEQ ID NO: 195470 - DNA, 25 bp, Probe Sequence
cccccacagtgctgtctgatctgtg

SEQ ID NO: 195471 - DNA, 25 bp, Probe Sequence
cccgcaaaggcactgtcgtagctga

SEQ ID NO: 195472 - DNA, 25 bp, Probe Sequence
cccgcaagcagatcgtagctggggt

SEQ ID NO: 195473 - DNA, 25 bp, Probe Sequence
cccgcaagcacaacctgtgtgggga

SEQ ID NO: 195474 - DNA, 25 bp, Probe Sequence
cccgaggcagacgtctgtcaggggc

SEQ ID NO: 195475 - DNA, 25 bp, Probe Sequence
cccgagagatcctgcatgccatggg

SEQ ID NO: 195476 - DNA, 25 bp, Probe Sequence
cccgaggactggacatcattggatg

SEQ ID NO: 195477 - DNA, 25 bp, Probe Sequence
cccgagcgcgcaggagctcaaggag

SEQ ID NO: 195478 - DNA, 25 bp, Probe Sequence
cccgcctggcataatgcccagtaca

SEQ ID NO: 195479 - DNA, 25 bp, Probe Sequence
cccgcctggcataatgcccagtaca

SEQ ID NO: 195480 - DNA, 25 bp, Probe Sequence
cccgcctggcataatgcccagtaca

SEQ ID NO: 195481 - DNA, 25 bp, Probe Sequence
cccgactgcgatgaactccgcaagg

SEQ ID NO: 195482 - DNA, 25 bp, Probe Sequence
cccgagtggagccaacccatgaaga

SEQ ID NO: 195483 - DNA, 25 bp, Probe Sequence
cccgcagtggggacagccacagacg

SEQ ID NO: 195484 - DNA, 25 bp, Probe Sequence
cccgcgggcgtgagactcagccgct

SEQ ID NO: 195485 - DNA, 25 bp, Probe Sequence
ccccagggcactgtgaccagggttc

SEQ ID NO: 195486 - DNA, 25 bp, Probe Sequence
ccccacgtgccggaagccaagtggt

SEQ ID NO: 195487 - DNA, 25 bp, Probe Sequence
ccccgcggcctgaagatggccgtga

SEQ ID NO: 195488 - DNA, 25 bp, Probe Sequence
cccctgtggcacataaggcacctgg

SEQ ID NO: 195489 - DNA, 25 bp, Probe Sequence
cccctctggaaggtctgaccacggg

SEQ ID NO: 195490 - DNA, 25 bp, Probe Sequence
ccgtagtaagaggacttccacgtgg

SEQ ID NO: 195491 - DNA, 25 bp, Probe Sequence
ccgttggaacaagattgtcctgaag

SEQ ID NO: 195492 - DNA, 25 bp, Probe Sequence
ccagttggagaccgtcaaccttcaa

SEQ ID NO: 195493 - DNA, 25 bp, Probe Sequence
ccgatcatgcggaggtcagtcacct

SEQ ID NO: 195494 - DNA, 25 bp, Probe Sequence
ccccatcgagcacggcatcgtcacc

SEQ ID NO: 195495 - DNA, 25 bp, Probe Sequence
ccccatgctgcatcgtgttgtattg

SEQ ID NO: 195496 - DNA, 25 bp, Probe Sequence
cccgagagcatgtccgcatggtcat

SEQ ID NO: 195497 - DNA, 25 bp, Probe Sequence
cccgcagatggtggccatgtggcac

SEQ ID NO: 195498 - DNA, 25 bp, Probe Sequence
cccgcagagatgagcaccggctgcg

SEQ ID NO: 195499 - DNA, 25 bp, Probe Sequence
ccgccgagtaaggcgcgagcggaac

SEQ ID NO: 195500 - DNA, 25 bp, Probe Sequence
ccgttgagttacctctgtgctggat

SEQ ID NO: 195501 - DNA, 25 bp, Probe Sequence
ccgcgtgttgtacatctagagtgtg

SEQ ID NO: 195502 - DNA, 25 bp, Probe Sequence
cccgctgcgtggatatcgacgagtg

SEQ ID NO: 195503 - DNA, 25 bp, Probe Sequence
ccccgagggaggagcacgttgctga

SEQ ID NO: 195504 - DNA, 25 bp, Probe Sequence
ccccgtgtggagtacggcttccagg

SEQ ID NO: 195505 - DNA, 25 bp, Probe Sequence
ccgccttcgggatcaagtgtgacgg

SEQ ID NO: 195506 - DNA, 25 bp, Probe Sequence
tcccctttgggattccaagcccagg

SEQ ID NO: 195507 - DNA, 25 bp, Probe Sequence
cccctgtctggttactcaatcacca

SEQ ID NO: 195508 - DNA, 25 bp, Probe Sequence
ccccttctggagaccatgagaccgc

SEQ ID NO: 195509 - DNA, 25 bp, Probe Sequence
cccgcccggatgaagagggctggcc

SEQ ID NO: 195510 - DNA, 25 bp, Probe Sequence
cccccacgtgtgaagtgtagtggca

SEQ ID NO: 195511 - DNA, 25 bp, Probe Sequence
ccccgacgttctagttagcttgttg

SEQ ID NO: 195512 - DNA, 25 bp, Probe Sequence
ccccgagctgttgaggtacttgctg

SEQ ID NO: 195513 - DNA, 25 bp, Probe Sequence
cccctgatctgcaacgggtacttgc

SEQ ID NO: 195514 - DNA, 25 bp, Probe Sequence
ccccatgtcatgaggaggtactagt

SEQ ID NO: 195515 - DNA, 25 bp, Probe Sequence
ccccatctgcagagaggcttgactg

SEQ ID NO: 195516 - DNA, 25 bp, Probe Sequence
ccgcgagctatttctgtgcttgaca

SEQ ID NO: 195517 - DNA, 25 bp, Probe Sequence
ccgcggcttatggtgcagacatggc

SEQ ID NO: 195518 - DNA, 25 bp, Probe Sequence
ccgactccatctctgagtctgtgcc

SEQ ID NO: 195519 - DNA, 25 bp, Probe Sequence
ccgagcccagcgctacaagtactgg

SEQ ID NO: 195520 - DNA, 25 bp, Probe Sequence
ccgtcacacagcttagccgaggaag

SEQ ID NO: 195521 - DNA, 25 bp, Probe Sequence
ccccatctggccaagcttgaggaag

SEQ ID NO: 195522 - DNA, 25 bp, Probe Sequence
ccccatctgtcctcttgatgtgaga

SEQ ID NO: 195523 - DNA, 25 bp, Probe Sequence
ccccatctgtcctcttgatgtgaga

SEQ ID NO: 195524 - DNA, 25 bp, Probe Sequence
cccctgcattctttctgtattgagt

SEQ ID NO: 195525 - DNA, 25 bp, Probe Sequence
cccctgtgtgctattctttgatgag

SEQ ID NO: 195526 - DNA, 25 bp, Probe Sequence
cccctcattgttactgccttgtgag

SEQ ID NO: 195527 - DNA, 25 bp, Probe Sequence
cccctcattgttactgccttgtgag

SEQ ID NO: 195528 - DNA, 25 bp, Probe Sequence
cccctcctttttctgattgatggtt

SEQ ID NO: 195529 - DNA, 25 bp, Probe Sequence
cccctccactctatttttgtgttgt

SEQ ID NO: 195530 - DNA, 25 bp, Probe Sequence
ccccttcctttgatcatttcatgtg

SEQ ID NO: 195531 - DNA, 25 bp, Probe Sequence
ccccttcaccttgtgtggacagtgt

SEQ ID NO: 195532 - DNA, 25 bp, Probe Sequence
cccctcaccctgagatgggagctgt

SEQ ID NO: 195533 - DNA, 25 bp, Probe Sequence
ccccgacctctggaaggagactgta

SEQ ID NO: 195534 - DNA, 25 bp, Probe Sequence
ccccgtctgcacctgaagggttgtc

SEQ ID NO: 195535 - DNA, 25 bp, Probe Sequence
cccctggccatccagatatgcgagt

SEQ ID NO: 195536 - DNA, 25 bp, Probe Sequence
ccccgtgctcaaggagcgcatggtg

SEQ ID NO: 195537 - DNA, 25 bp, Probe Sequence
cccctgcctcaaggggcttgcatgg

SEQ ID NO: 195538 - DNA, 25 bp, Probe Sequence
cccgccctcacagaggagatgctgc

SEQ ID NO: 195539 - DNA, 25 bp, Probe Sequence
cccgccccagagggatgacagtcag

SEQ ID NO: 195540 - DNA, 25 bp, Probe Sequence
ccccgcccagagaagggagccaggg

SEQ ID NO: 195541 - DNA, 25 bp, Probe Sequence
cccccctggcagcagtattggaggg

SEQ ID NO: 195542 - DNA, 25 bp, Probe Sequence
cctctttctggctggttcagggggt

SEQ ID NO: 195543 - DNA, 25 bp, Probe Sequence
ccccgtgtagcatgtgttcaggtgg

SEQ ID NO: 195544 - DNA, 25 bp, Probe Sequence
ccccgtgttagagcattagcagatg

SEQ ID NO: 195545 - DNA, 25 bp, Probe Sequence
ccccctgtatcatacctagcagagg

SEQ ID NO: 195546 - DNA, 25 bp, Probe Sequence
cccctctgtctattaccaatgaaga

SEQ ID NO: 195547 - DNA, 25 bp, Probe Sequence
cccgcctggcatttatgcccagtac

SEQ ID NO: 195548 - DNA, 25 bp, Probe Sequence
cccgcctggcatatatgcccagtac

SEQ ID NO: 195549 - DNA, 25 bp, Probe Sequence
cccgcctggcataaggcccaggaca

SEQ ID NO: 195550 - DNA, 25 bp, Probe Sequence
cccgccagtgcacagggaagggctt

SEQ ID NO: 195551 - DNA, 25 bp, Probe Sequence
cccgctaggtggtgtcaagcaggcg

SEQ ID NO: 195552 - DNA, 25 bp, Probe Sequence
ccggtaggcttccgagaggagccct

SEQ ID NO: 195553 - DNA, 25 bp, Probe Sequence
ccgggaggctaaggaaggagaatcg

SEQ ID NO: 195554 - DNA, 25 bp, Probe Sequence
ccgtagggaacgcggaaggatcata

SEQ ID NO: 195555 - DNA, 25 bp, Probe Sequence
ccttgacgggactgggagacgacag

SEQ ID NO: 195556 - DNA, 25 bp, Probe Sequence
gcggctccggggaggtagacgagct

SEQ ID NO: 195557 - DNA, 25 bp, Probe Sequence
gcgtcccgcaaggaaggtaccggct

SEQ ID NO: 195558 - DNA, 25 bp, Probe Sequence
gcggacctgaacggaggttgcgggt

SEQ ID NO: 195559 - DNA, 25 bp, Probe Sequence
ccgaagcgaacgcagcctttgagag

SEQ ID NO: 195560 - DNA, 25 bp, Probe Sequence
ccggggaggcggaggttgcagtgag

SEQ ID NO: 195561 - DNA, 25 bp, Probe Sequence
cccgcggaggcgcgtgactggttga

SEQ ID NO: 195562 - DNA, 25 bp, Probe Sequence
ccccagtacctgctggactcgaata

SEQ ID NO: 195563 - DNA, 25 bp, Probe Sequence
ccccagtacctgctggactcgaata

SEQ ID NO: 195564 - DNA, 25 bp, Probe Sequence
cctccagtacctcaagaacgacacg

SEQ ID NO: 195565 - DNA, 25 bp, Probe Sequence
ccccagctaccgttaaatgaggaca

SEQ ID NO: 195566 - DNA, 25 bp, Probe Sequence
ccccagctgtccactgaaacgtgaa

SEQ ID NO: 195567 - DNA, 25 bp, Probe Sequence
ccgccagtctccattgaatcaatgg

SEQ ID NO: 195568 - DNA, 25 bp, Probe Sequence
ccgcttccacccggcaataatgagg

SEQ ID NO: 195569 - DNA, 25 bp, Probe Sequence
ccgcttcaccacttacgaaatcagg

SEQ ID NO: 195570 - DNA, 25 bp, Probe Sequence
ccgcttcaccacttacgaaatcagg

SEQ ID NO: 195571 - DNA, 25 bp, Probe Sequence
ccccatcaccacttagcggaaagct

SEQ ID NO: 195572 - DNA, 25 bp, Probe Sequence
cccctctgcgcttctgatgggaaat

SEQ ID NO: 195573 - DNA, 25 bp, Probe Sequence
cccccatgcacattctgactggata

SEQ ID NO: 195574 - DNA, 25 bp, Probe Sequence
ccgctcttgcaataattggcagatg

SEQ ID NO: 195575 - DNA, 25 bp, Probe Sequence
ccgtctggcaagaaatgcattgcag

SEQ ID NO: 195576 - DNA, 25 bp, Probe Sequence
ccgctcgcaataccaaagtcgcaag

SEQ ID NO: 195577 - DNA, 25 bp, Probe Sequence
ccccgccatggagagtgtctgcgga

SEQ ID NO: 195578 - DNA, 25 bp, Probe Sequence
cccctgccttgggaggtgtgtggaa

SEQ ID NO: 195579 - DNA, 25 bp, Probe Sequence
cccctcctcggcagtgtgtggggtc

SEQ ID NO: 195580 - DNA, 25 bp, Probe Sequence
cccccacacgcactttatgagggag

SEQ ID NO: 195581 - DNA, 25 bp, Probe Sequence
cccccagcacttcttgatgactgtg

SEQ ID NO: 195582 - DNA, 25 bp, Probe Sequence
cccccagccactcaggaggctgatg

SEQ ID NO: 195583 - DNA, 25 bp, Probe Sequence
cccccagtcatcaagcctgaggtgg

SEQ ID NO: 195584 - DNA, 25 bp, Probe Sequence
ccccactgtcatgtgtctcagcagt

SEQ ID NO: 195585 - DNA, 25 bp, Probe Sequence
cccgcctgaagcagctcaagcggca

SEQ ID NO: 195586 - DNA, 25 bp, Probe Sequence
cccgccggcgcggatcaagaagatc

SEQ ID NO: 195587 - DNA, 25 bp, Probe Sequence
cccccgctgctgaaatcaaacatac

SEQ ID NO: 195588 - DNA, 25 bp, Probe Sequence
ccccgcccatgacgtcaataatgac

SEQ ID NO: 195589 - DNA, 25 bp, Probe Sequence
ccccacctagttgcaaaggacactg

SEQ ID NO: 195590 - DNA, 25 bp, Probe Sequence
ccccatagtgacgccaataggactt

SEQ ID NO: 195591 - DNA, 25 bp, Probe Sequence
ccccatgagctggacccaagagtcc

SEQ ID NO: 195592 - DNA, 25 bp, Probe Sequence
ccccaactggtgctgcaaggatctt

SEQ ID NO: 195593 - DNA, 25 bp, Probe Sequence
ccccaagtctggcgtcaagatccat

SEQ ID NO: 195594 - DNA, 25 bp, Probe Sequence
ccccaatgttgcgtgggctagactt

SEQ ID NO: 195595 - DNA, 25 bp, Probe Sequence
ccccatctgaatcagctgcgctgga

SEQ ID NO: 195596 - DNA, 25 bp, Probe Sequence
cccgctgtaagctgctcagctggct

SEQ ID NO: 195597 - DNA, 25 bp, Probe Sequence
cccgctgcagagtaagccgggctgc

SEQ ID NO: 195598 - DNA, 25 bp, Probe Sequence
cccgctgatgagcgaggcgggtgct

SEQ ID NO: 195599 - DNA, 25 bp, Probe Sequence
cccctggatgctaacaggggcgccg

SEQ ID NO: 195600 - DNA, 25 bp, Probe Sequence
cccctggagatgattgagccgcgca

SEQ ID NO: 195601 - DNA, 25 bp, Probe Sequence
ccccgctcagtctttgagcgagccc

SEQ ID NO: 195602 - DNA, 25 bp, Probe Sequence
cccgcccacatcttggagggcatct

SEQ ID NO: 195603 - DNA, 25 bp, Probe Sequence
cccgcccacatcttggagggcatct

SEQ ID NO: 195604 - DNA, 25 bp, Probe Sequence
cccgccaacactatatgtgcctcaa

SEQ ID NO: 195605 - DNA, 25 bp, Probe Sequence
cccctcaaacttctgtgcacaaagt

SEQ ID NO: 195606 - DNA, 25 bp, Probe Sequence
cccctcaccgctggttggaaagagt

SEQ ID NO: 195607 - DNA, 25 bp, Probe Sequence
ccccaaccaggagttcggcttgagt

SEQ ID NO: 195608 - DNA, 25 bp, Probe Sequence
cccctgtacgtggattgggctggag

SEQ ID NO: 195609 - DNA, 25 bp, Probe Sequence
ccccttccctggacagggctgtgga

SEQ ID NO: 195610 - DNA, 25 bp, Probe Sequence
cccccatctcctggagggaggtgcg

SEQ ID NO: 195611 - DNA, 25 bp, Probe Sequence
ccccctttctgtggctggatgggga

SEQ ID NO: 195612 - DNA, 25 bp, Probe Sequence
cccccccattaccgctatgggatga

SEQ ID NO: 195613 - DNA, 25 bp, Probe Sequence
ccccagcacaactccgtagggagcc

SEQ ID NO: 195614 - DNA, 25 bp, Probe Sequence
ccccagcacaactccgtagggagcc

SEQ ID NO: 195615 - DNA, 25 bp, Probe Sequence
ccccagcacaactccgtagggagcc

SEQ ID NO: 195616 - DNA, 25 bp, Probe Sequence
ccccaccaggtgccctggatggaga

SEQ ID NO: 195617 - DNA, 25 bp, Probe Sequence
ccccaccaggtgccctggatggaga

SEQ ID NO: 195618 - DNA, 25 bp, Probe Sequence
cccctatcgttccactggacagaga

SEQ ID NO: 195619 - DNA, 25 bp, Probe Sequence
ccccttcactcctactgggaggtgg

SEQ ID NO: 195620 - DNA, 25 bp, Probe Sequence
cccctgtcacatctgactgtgggtt

SEQ ID NO: 195621 - DNA, 25 bp, Probe Sequence
ccccttactctgccacgatgtggga

SEQ ID NO: 195622 - DNA, 25 bp, Probe Sequence
ccccattagtctagccttgtagctg

SEQ ID NO: 195623 - DNA, 25 bp, Probe Sequence
ccccctagagtgctctgtgtatgcg

SEQ ID NO: 195624 - DNA, 25 bp, Probe Sequence
ccccgtgaagaccgcagttgtgagt

SEQ ID NO: 195625 - DNA, 25 bp, Probe Sequence
ccccgaggaagcctgcaagtccagg

SEQ ID NO: 195626 - DNA, 25 bp, Probe Sequence
ccgacgaggatgactagacagcaaa

SEQ ID NO: 195627 - DNA, 25 bp, Probe Sequence
ccccagtctgcaaaagaagcacaat

SEQ ID NO: 195628 - DNA, 25 bp, Probe Sequence
ccccagtgctgcagaacggacttgg

SEQ ID NO: 195629 - DNA, 25 bp, Probe Sequence
ccccagtgctgcagaacggacttgg

SEQ ID NO: 195630 - DNA, 25 bp, Probe Sequence
ccccagttcggctccgaggtggagc

SEQ ID NO: 195631 - DNA, 25 bp, Probe Sequence
cccccttcaggatccgtgaggaaga

SEQ ID NO: 195632 - DNA, 25 bp, Probe Sequence
ccccctctagtgaagggtaggagag

SEQ ID NO: 195633 - DNA, 25 bp, Probe Sequence
cccccactcaggaagtgaccgtgag

SEQ ID NO: 195634 - DNA, 25 bp, Probe Sequence
cccccagcaaggcagaagcttggag

SEQ ID NO: 195635 - DNA, 25 bp, Probe Sequence
cccccacactgggatagatgcttgt

SEQ ID NO: 195636 - DNA, 25 bp, Probe Sequence
cccccatatcgacgcataatgcggc

SEQ ID NO: 195637 - DNA, 25 bp, Probe Sequence
ccccgcagcatcacactgaaggagg

SEQ ID NO: 195638 - DNA, 25 bp, Probe Sequence
cccctgcatacatcacaaagaagag

SEQ ID NO: 195639 - DNA, 25 bp, Probe Sequence
cccctaacaagcccaatgcactggt

SEQ ID NO: 195640 - DNA, 25 bp, Probe Sequence
cccccaaagggcccagcattggtgg

SEQ ID NO: 195641 - DNA, 25 bp, Probe Sequence
ccccacgaaggagcccattgtggcc

SEQ ID NO: 195642 - DNA, 25 bp, Probe Sequence
ccccaggactgggccacttctgggt

SEQ ID NO: 195643 - DNA, 25 bp, Probe Sequence
ccccagccagggctcaatctctggg

SEQ ID NO: 195644 - DNA, 25 bp, Probe Sequence
ccgctgccagctctggtaacttggt

SEQ ID NO: 195645 - DNA, 25 bp, Probe Sequence
cccccacttttggagatgcgtcagt

SEQ ID NO: 195646 - DNA, 25 bp, Probe Sequence
cccccacatctctgtgcagtttagg

SEQ ID NO: 195647 - DNA, 25 bp, Probe Sequence
cccccagcaccatttatgagtctca

SEQ ID NO: 195648 - DNA, 25 bp, Probe Sequence
cccctaactcttaatgagccataca

SEQ ID NO: 195649 - DNA, 25 bp, Probe Sequence
cccctaagcatgttacaagcaaaca

SEQ ID NO: 195650 - DNA, 25 bp, Probe Sequence
ccccttgactgcttccagtgaacaa

SEQ ID NO: 195651 - DNA, 25 bp, Probe Sequence
cccctggacatgcctgtcctgaaag

SEQ ID NO: 195652 - DNA, 25 bp, Probe Sequence
cccctggccaaggtcatccatgaca

SEQ ID NO: 195653 - DNA, 25 bp, Probe Sequence
cccctctgtagagatcatgcgaact

SEQ ID NO: 195654 - DNA, 25 bp, Probe Sequence
ccccctgtatgatgcacagccgagc

SEQ ID NO: 195655 - DNA, 25 bp, Probe Sequence
ccccctgcacatttgcaagccaaga

SEQ ID NO: 195656 - DNA, 25 bp, Probe Sequence
cccctcatacattaagccgcaagca

SEQ ID NO: 195657 - DNA, 25 bp, Probe Sequence
cccctagacatctacccaaatgcag

SEQ ID NO: 195658 - DNA, 25 bp, Probe Sequence
tccccgaaccacactccaagggaga

SEQ ID NO: 195659 - DNA, 25 bp, Probe Sequence
ccccaggaccaaaaccaggctggtg

SEQ ID NO: 195660 - DNA, 25 bp, Probe Sequence
ccgccttaccaaatcctagtgttat

SEQ ID NO: 195661 - DNA, 25 bp, Probe Sequence
ccggctaccttagcttagcgtgtca

SEQ ID NO: 195662 - DNA, 25 bp, Probe Sequence
ccggtttcttcatattgaggggcaa

SEQ ID NO: 195663 - DNA, 25 bp, Probe Sequence
ccgagttactttaattaccgcgcat

SEQ ID NO: 195664 - DNA, 25 bp, Probe Sequence
ccgacatcttttaatcattcacccc

SEQ ID NO: 195665 - DNA, 25 bp, Probe Sequence
ccgcacaattttccacttaaccagg

SEQ ID NO: 195666 - DNA, 25 bp, Probe Sequence
ggccgaattttcgctaaacttctga

SEQ ID NO: 195667 - DNA, 25 bp, Probe Sequence
ccccaacttctacctatcaagttct

SEQ ID NO: 195668 - DNA, 25 bp, Probe Sequence
ccccagcatttcattcataccagat

SEQ ID NO: 195669 - DNA, 25 bp, Probe Sequence
ccgccactgattcttcaggttgatg

SEQ ID NO: 195670 - DNA, 25 bp, Probe Sequence
ccgcagacttctctgtagatcgctg

SEQ ID NO: 195671 - DNA, 25 bp, Probe Sequence
ccgctgagcttgctggacgacatga

SEQ ID NO: 195672 - DNA, 25 bp, Probe Sequence
ccgcgcagcttgaacgactaaagca

SEQ ID NO: 195673 - DNA, 25 bp, Probe Sequence
ccgcgcagcttgaacgactaaagca

SEQ ID NO: 195674 - DNA, 25 bp, Probe Sequence
ccccactattgaggactcctacacg

SEQ ID NO: 195675 - DNA, 25 bp, Probe Sequence
ccccaagattgtggttgccattctg

SEQ ID NO: 195676 - DNA, 25 bp, Probe Sequence
ccccaaatcttacagccatttatta

SEQ ID NO: 195677 - DNA, 25 bp, Probe Sequence
ccccaagcgtattatagacttttct

SEQ ID NO: 195678 - DNA, 25 bp, Probe Sequence
ccccacaggttgtcattacttaatt

SEQ ID NO: 195679 - DNA, 25 bp, Probe Sequence
ccccagcgcttttgtgtatataaat

SEQ ID NO: 195680 - DNA, 25 bp, Probe Sequence
ccgccagcgtggattttccaaattt

SEQ ID NO: 195681 - DNA, 25 bp, Probe Sequence
ccgcacgtgtcgactttggaaagat

SEQ ID NO: 195682 - DNA, 25 bp, Probe Sequence
ccccctgcatgctgtttatgaaagg

SEQ ID NO: 195683 - DNA, 25 bp, Probe Sequence
ccccctgcaaagccagcttgaaacc

SEQ ID NO: 195684 - DNA, 25 bp, Probe Sequence
cccccagaactgcagcatcatgtaa

SEQ ID NO: 195685 - DNA, 25 bp, Probe Sequence
ccccaagcaaggacagcagctatat

SEQ ID NO: 195686 - DNA, 25 bp, Probe Sequence
ccccacacaaggcctgcatttagaa

SEQ ID NO: 195687 - DNA, 25 bp, Probe Sequence
ccccagtcaggccgttttagaagag

SEQ ID NO: 195688 - DNA, 25 bp, Probe Sequence
gcctgactaagcccggtagttaaag

SEQ ID NO: 195689 - DNA, 25 bp, Probe Sequence
ccgactaccgccagaatgtctacat

SEQ ID NO: 195690 - DNA, 25 bp, Probe Sequence
ccccttcagaccaagaatttgacaa

SEQ ID NO: 195691 - DNA, 25 bp, Probe Sequence
ccccttacattcatgaccttgacac

SEQ ID NO: 195692 - DNA, 25 bp, Probe Sequence
cccctgcagaagagctagccttcac

SEQ ID NO: 195693 - DNA, 25 bp, Probe Sequence
cccctggaggaccataactggccac

SEQ ID NO: 195694 - DNA, 25 bp, Probe Sequence
cccctgtggaaccaccattggacct

SEQ ID NO: 195695 - DNA, 25 bp, Probe Sequence
ccccttcgatacacatcagctggat

SEQ ID NO: 195696 - DNA, 25 bp, Probe Sequence
ccccttacacacggcatacgtgcat

SEQ ID NO: 195697 - DNA, 25 bp, Probe Sequence
ccccgagaactcggcatgctcgatg

SEQ ID NO: 195698 - DNA, 25 bp, Probe Sequence
cccctgctaacgggatatgctgaga

SEQ ID NO: 195699 - DNA, 25 bp, Probe Sequence
ccccatgcgggcaacgtatctggat

SEQ ID NO: 195700 - DNA, 25 bp, Probe Sequence
ccccatgctgggctcactacatggg

SEQ ID NO: 195701 - DNA, 25 bp, Probe Sequence
ccccacttgacgtcacatgggagat

SEQ ID NO: 195702 - DNA, 25 bp, Probe Sequence
cccctattgacttctatgtcggtat

SEQ ID NO: 195703 - DNA, 25 bp, Probe Sequence
cccctattgacgtcaatgacggtaa

SEQ ID NO: 195704 - DNA, 25 bp, Probe Sequence
ccccgattacatttctaagcgtgaa

SEQ ID NO: 195705 - DNA, 25 bp, Probe Sequence
ccccaatttcactttctcagaggaa

SEQ ID NO: 195706 - DNA, 25 bp, Probe Sequence
cccccgattacatttctaagcgtga

SEQ ID NO: 195707 - DNA, 25 bp, Probe Sequence
cccccgattacatttctaagcgtga

SEQ ID NO: 195708 - DNA, 25 bp, Probe Sequence
ccccctattgacttctatgtcggta

SEQ ID NO: 195709 - DNA, 25 bp, Probe Sequence
ccccctattgacgtcaatgacggta

SEQ ID NO: 195710 - DNA, 25 bp, Probe Sequence
ccccctattgacgtcaatcgacggt

SEQ ID NO: 195711 - DNA, 25 bp, Probe Sequence
ccccctatgtgacgtgcaatggacg

SEQ ID NO: 195712 - DNA, 25 bp, Probe Sequence
ccccttcattgacctcaactacatg

SEQ ID NO: 195713 - DNA, 25 bp, Probe Sequence
ccccttcattgacctcaactacatg

SEQ ID NO: 195714 - DNA, 25 bp, Probe Sequence
cccctgacatgtacctgcagaataa

SEQ ID NO: 195715 - DNA, 25 bp, Probe Sequence
ccgcctgcaatcaggtgaatataca

SEQ ID NO: 195716 - DNA, 25 bp, Probe Sequence
cccctgcacaagtgtgacatctacc

SEQ ID NO: 195717 - DNA, 25 bp, Probe Sequence
ccgcttgggcagtggcacttgagca

SEQ ID NO: 195718 - DNA, 25 bp, Probe Sequence
cctcctgggcagtcgtaagggttgc

SEQ ID NO: 195719 - DNA, 25 bp, Probe Sequence
cccctcggcaccatcaggtgagtgc

SEQ ID NO: 195720 - DNA, 25 bp, Probe Sequence
cccctgcttgacaaccaggttggtt

SEQ ID NO: 195721 - DNA, 25 bp, Probe Sequence
ccgccggggtacaggtgtggatctg

SEQ ID NO: 195722 - DNA, 25 bp, Probe Sequence
ccacgggagggacaaggcttctctg

SEQ ID NO: 195723 - DNA, 25 bp, Probe Sequence
ccgcgggacggatgaacaatgttca

SEQ ID NO: 195724 - DNA, 25 bp, Probe Sequence
ccgcgggacggataacaatttcaca

SEQ ID NO: 195725 - DNA, 25 bp, Probe Sequence
ccgcgggacggataacatttcacac

SEQ ID NO: 195726 - DNA, 25 bp, Probe Sequence
gggaggtactttcataattcagaag

SEQ ID NO: 195727 - DNA, 25 bp, Probe Sequence
gccaaggaacttgccaacatcctga

SEQ ID NO: 195728 - DNA, 25 bp, Probe Sequence
gccaaggaagaatccacttcggcca

SEQ ID NO: 195729 - DNA, 25 bp, Probe Sequence
ccgcagagaataaacgccttcccaa

SEQ ID NO: 195730 - DNA, 25 bp, Probe Sequence
ccgcaggagaaggattcgccctcga

SEQ ID NO: 195731 - DNA, 25 bp, Probe Sequence
cctgacggccaggtcatcaccattg

SEQ ID NO: 195732 - DNA, 25 bp, Probe Sequence
ccccgcaacagcttataccatggaa

SEQ ID NO: 195733 - DNA, 25 bp, Probe Sequence
ccccggacagcagaacgctggcatc

SEQ ID NO: 195734 - DNA, 25 bp, Probe Sequence
ccccggacagcagaacgctggcatc

SEQ ID NO: 195735 - DNA, 25 bp, Probe Sequence
cccctgggcaggagacgtggctgct

SEQ ID NO: 195736 - DNA, 25 bp, Probe Sequence
ccgcttagagatttggggggctctg

SEQ ID NO: 195737 - DNA, 25 bp, Probe Sequence
ccgttaatggagcggggcgccagtg

SEQ ID NO: 195738 - DNA, 25 bp, Probe Sequence
ccccggatggtgtgggacagccagg

SEQ ID NO: 195739 - DNA, 25 bp, Probe Sequence
ccccaggacctggggcgactggagg

SEQ ID NO: 195740 - DNA, 25 bp, Probe Sequence
ccccttgacgctatggcggtaggcg

SEQ ID NO: 195741 - DNA, 25 bp, Probe Sequence
cccccgacactgatgccagggaggt

SEQ ID NO: 195742 - DNA, 25 bp, Probe Sequence
cccctaggccgaatgccaggtcaga

SEQ ID NO: 195743 - DNA, 25 bp, Probe Sequence
cccctggcagaccgactgcaggtag

SEQ ID NO: 195744 - DNA, 25 bp, Probe Sequence
ccccgagaggcagtgcactgggcat

SEQ ID NO: 195745 - DNA, 25 bp, Probe Sequence
ccccggagcagattgcagcggacat

SEQ ID NO: 195746 - DNA, 25 bp, Probe Sequence
ccccgcctgagaagcatctgggcat

SEQ ID NO: 195747 - DNA, 25 bp, Probe Sequence
ccccagccatgagtcagtttgtgcc

SEQ ID NO: 195748 - DNA, 25 bp, Probe Sequence
cccctcacacatgcacttttgggcc

SEQ ID NO: 195749 - DNA, 25 bp, Probe Sequence
ccccacacgctttttttaggtgcag

SEQ ID NO: 195750 - DNA, 25 bp, Probe Sequence
ccccaaccttattctgtgtgtagac

SEQ ID NO: 195751 - DNA, 25 bp, Probe Sequence
ccccaacctcagaggcagcttcaag

SEQ ID NO: 195752 - DNA, 25 bp, Probe Sequence
ccccccagcaggagagcagcaaaat

SEQ ID NO: 195753 - DNA, 25 bp, Probe Sequence
cccctcgaagagcctggccagagag

SEQ ID NO: 195754 - DNA, 25 bp, Probe Sequence
cccctgagagagcttctccgagagc

SEQ ID NO: 195755 - DNA, 25 bp, Probe Sequence
ccccatcagtggttgtctccataag

SEQ ID NO: 195756 - DNA, 25 bp, Probe Sequence
ccccatccgccaggttcgaactggc

SEQ ID NO: 195757 - DNA, 25 bp, Probe Sequence
ccgccctcctgaagcttgaaaatgg

SEQ ID NO: 195758 - DNA, 25 bp, Probe Sequence
ccgccacccgatggaagattcgatg

SEQ ID NO: 195759 - DNA, 25 bp, Probe Sequence
ccgccccaggatccaaatgtggtgt

SEQ ID NO: 195760 - DNA, 25 bp, Probe Sequence
ccccatctagccaggaatctattgt

SEQ ID NO: 195761 - DNA, 25 bp, Probe Sequence
ccccttcagccactgatgaatcgca

SEQ ID NO: 195762 - DNA, 25 bp, Probe Sequence
cccctattcacagtgatgaaggaaa

SEQ ID NO: 195763 - DNA, 25 bp, Probe Sequence
cccctctgagaagagacaggacaca

SEQ ID NO: 195764 - DNA, 25 bp, Probe Sequence
ccccttgagtactgccagaggcaaa

SEQ ID NO: 195765 - DNA, 25 bp, Probe Sequence
ccccgggtgcacatcattgaggagc

SEQ ID NO: 195766 - DNA, 25 bp, Probe Sequence
ccccgcccacactgattgaggagcg

SEQ ID NO: 195767 - DNA, 25 bp, Probe Sequence
cctccaggcccggggctgaaacagc

SEQ ID NO: 195768 - DNA, 25 bp, Probe Sequence
ccttaggccgcgggacggatacaat

SEQ ID NO: 195769 - DNA, 25 bp, Probe Sequence
cctattgttcgggcgccggaagacg

SEQ ID NO: 195770 - DNA, 25 bp, Probe Sequence
cctttgtgacttccgaccgaagcaa

SEQ ID NO: 195771 - DNA, 25 bp, Probe Sequence
ccgattcgactctcagaccaagagc

SEQ ID NO: 195772 - DNA, 25 bp, Probe Sequence
ccccagtggctctcagacgaagagg

SEQ ID NO: 195773 - DNA, 25 bp, Probe Sequence
cccctgtggctaccaaaatccatgc

SEQ ID NO: 195774 - DNA, 25 bp, Probe Sequence
ccccagctgcgatcactaaacctgg

SEQ ID NO: 195775 - DNA, 25 bp, Probe Sequence
ccccatgccgtggacggcaacactg

SEQ ID NO: 195776 - DNA, 25 bp, Probe Sequence
ccccatctgaaggtcaccaacactg

SEQ ID NO: 195777 - DNA, 25 bp, Probe Sequence
ccccactcaagttaccattcaagtt

SEQ ID NO: 195778 - DNA, 25 bp, Probe Sequence
ccccacgaaaagactgcacctaatt

SEQ ID NO: 195779 - DNA, 25 bp, Probe Sequence
ccccaagttaaatgccctatgagat

SEQ ID NO: 195780 - DNA, 25 bp, Probe Sequence
ccccagacttaatacccattgaaat

SEQ ID NO: 195781 - DNA, 25 bp, Probe Sequence
ccccagacttaatacccattgaaat

SEQ ID NO: 195782 - DNA, 25 bp, Probe Sequence
ccccgcctaaaatccatattcaaag

SEQ ID NO: 195783 - DNA, 25 bp, Probe Sequence
ccccgccaggattaacacagattcc

SEQ ID NO: 195784 - DNA, 25 bp, Probe Sequence
ccccgcaagacatacacaggagcct

SEQ ID NO: 195785 - DNA, 25 bp, Probe Sequence
ccccgaagccatggcaagcaagggc

SEQ ID NO: 195786 - DNA, 25 bp, Probe Sequence
ccccgagatgccgagcaagaagaag

SEQ ID NO: 195787 - DNA, 25 bp, Probe Sequence
cccctggatcctggcggatgagcag

SEQ ID NO: 195788 - DNA, 25 bp, Probe Sequence
ccgccatgaccctgggcacagggga

SEQ ID NO: 195789 - DNA, 25 bp, Probe Sequence
ccccggcttctgcaggagcagggaa

SEQ ID NO: 195790 - DNA, 25 bp, Probe Sequence
ccgcctggctttgagacaacgtgat

SEQ ID NO: 195791 - DNA, 25 bp, Probe Sequence
cccctggcctgcgagaagaacggcg

SEQ ID NO: 195792 - DNA, 25 bp, Probe Sequence
ccccaagtcggacagaaggcccatg

SEQ ID NO: 195793 - DNA, 25 bp, Probe Sequence
ccccaatgctcctaaaaggccacca

SEQ ID NO: 195794 - DNA, 25 bp, Probe Sequence
ccccagggactggaagaggctccca

SEQ ID NO: 195795 - DNA, 25 bp, Probe Sequence
ccccagaagtcttaaggctccctga

SEQ ID NO: 195796 - DNA, 25 bp, Probe Sequence
cccctgacgacctagagagatcccg

SEQ ID NO: 195797 - DNA, 25 bp, Probe Sequence
cccctactgaaccatcagcatgtca

SEQ ID NO: 195798 - DNA, 25 bp, Probe Sequence
ccgaccagtgcatgcatatactgtc

SEQ ID NO: 195799 - DNA, 25 bp, Probe Sequence
ccgaccggtgagtcatttgcatcac

SEQ ID NO: 195800 - DNA, 25 bp, Probe Sequence
ccgagcggcagtggctcgtgtctgt

SEQ ID NO: 195801 - DNA, 25 bp, Probe Sequence
ccgctggtcatcatgggtgaggtgc

SEQ ID NO: 195802 - DNA, 25 bp, Probe Sequence
ccccagtcagggcagtggaggcggc

SEQ ID NO: 195803 - DNA, 25 bp, Probe Sequence
ccgccagatcatcggtcaggccaag

SEQ ID NO: 195804 - DNA, 25 bp, Probe Sequence
ccccgcaaagtgacagctgccatgg

SEQ ID NO: 195805 - DNA, 25 bp, Probe Sequence
ccgccccaattgaacgccaaattgg

SEQ ID NO: 195806 - DNA, 25 bp, Probe Sequence
ccgccaccaactaaccaagcttggc

SEQ ID NO: 195807 - DNA, 25 bp, Probe Sequence
ccgtcaccaagttgggccgcttggt

SEQ ID NO: 195808 - DNA, 25 bp, Probe Sequence
cctgtcaaaaattgagtcacgtccg

SEQ ID NO: 195809 - DNA, 25 bp, Probe Sequence
tccagtaaactaccaacaatttcgt

SEQ ID NO: 195810 - DNA, 25 bp, Probe Sequence
ccgtgtcaaccacaacaagtacatg

SEQ ID NO: 195811 - DNA, 25 bp, Probe Sequence
ccgcgttaaatgcaacacggatgat

SEQ ID NO: 195812 - DNA, 25 bp, Probe Sequence
ccgcttctaagtcaccacgcggttc

SEQ ID NO: 195813 - DNA, 25 bp, Probe Sequence
ccacgtctacgtgaaccagggggag

SEQ ID NO: 195814 - DNA, 25 bp, Probe Sequence
ccaccccaggtacaactggcgggag

SEQ ID NO: 195815 - DNA, 25 bp, Probe Sequence
ccagttccggaagaacctgcgggag

SEQ ID NO: 195816 - DNA, 25 bp, Probe Sequence
ccagtgccgggaaggaactgccggg

SEQ ID NO: 195817 - DNA, 25 bp, Probe Sequence
ccgcccacaggatgtgaaccgcaga

SEQ ID NO: 195818 - DNA, 25 bp, Probe Sequence
ccccgacaggtcacataacagctgc

SEQ ID NO: 195819 - DNA, 25 bp, Probe Sequence
ccccgagaggataaagcggctgctc

SEQ ID NO: 195820 - DNA, 25 bp, Probe Sequence
cccctagggtaccagcaggcagagc

SEQ ID NO: 195821 - DNA, 25 bp, Probe Sequence
ccccatcaggcagtcaggagggctg

SEQ ID NO: 195822 - DNA, 25 bp, Probe Sequence
ccccaatgtcagtaggaatcttgga

SEQ ID NO: 195823 - DNA, 25 bp, Probe Sequence
ccccatatttagatacatgattggc

SEQ ID NO: 195824 - DNA, 25 bp, Probe Sequence
ccccatttagccctgatatgattac

SEQ ID NO: 195825 - DNA, 25 bp, Probe Sequence
ccccattatgcccctatatatatca

SEQ ID NO: 195826 - DNA, 25 bp, Probe Sequence
ccccattatgacccatctagcaaag

SEQ ID NO: 195827 - DNA, 25 bp, Probe Sequence
ccccattatgacccatctagcaaag

SEQ ID NO: 195828 - DNA, 25 bp, Probe Sequence
ccgcctggataccgcagctaggaat

SEQ ID NO: 195829 - DNA, 25 bp, Probe Sequence
ccgcctggacctggagaagggacct

SEQ ID NO: 195830 - DNA, 25 bp, Probe Sequence
ccgcagtacaactggacgccgaact

SEQ ID NO: 195831 - DNA, 25 bp, Probe Sequence
ccgaataccaattcaaccaccaagg

SEQ ID NO: 195832 - DNA, 25 bp, Probe Sequence
ccgaaaccagatcgagctacctaag

SEQ ID NO: 195833 - DNA, 25 bp, Probe Sequence
ccgccaactgacaacatgctaggta

SEQ ID NO: 195834 - DNA, 25 bp, Probe Sequence
ccgcaaactgacacctcagggacaa

SEQ ID NO: 195835 - DNA, 25 bp, Probe Sequence
ccgctatattccagcttgggtgaca

SEQ ID NO: 195836 - DNA, 25 bp, Probe Sequence
ccgattttgcctactctgtggtgaa

SEQ ID NO: 195837 - DNA, 25 bp, Probe Sequence
ccgatttgtagcactttgttgactt

SEQ ID NO: 195838 - DNA, 25 bp, Probe Sequence
cccctagtgagggactgtgttgact

SEQ ID NO: 195839 - DNA, 25 bp, Probe Sequence
cccctggtagggcatgtgcctgttt

SEQ ID NO: 195840 - DNA, 25 bp, Probe Sequence
cccctgtgtggtagctagtgactgc

SEQ ID NO: 195841 - DNA, 25 bp, Probe Sequence
ccccagctgtggtctctgagagact

SEQ ID NO: 195842 - DNA, 25 bp, Probe Sequence
ccccacttcgtcaatagacactttg

SEQ ID NO: 195843 - DNA, 25 bp, Probe Sequence
ccccatttcaaccatagaccaatta

SEQ ID NO: 195844 - DNA, 25 bp, Probe Sequence
ccccaagtgcgacaagaccgtgtac

SEQ ID NO: 195845 - DNA, 25 bp, Probe Sequence
ccccaggtgggcaggcacttgatgg

SEQ ID NO: 195846 - DNA, 25 bp, Probe Sequence
ccccagagggtcgggcaggttgaca

SEQ ID NO: 195847 - DNA, 25 bp, Probe Sequence
ccgcaaggggtgtctggcgccttgc

SEQ ID NO: 195848 - DNA, 25 bp, Probe Sequence
ccgccagtgggtaatcgccctggcc

SEQ ID NO: 195849 - DNA, 25 bp, Probe Sequence
ccgctgctgggagagatcccctggc

SEQ ID NO: 195850 - DNA, 25 bp, Probe Sequence
ccgcatgtgtaacaacagccgcttc

SEQ ID NO: 195851 - DNA, 25 bp, Probe Sequence
cctatagtcctataagcttttccac

SEQ ID NO: 195852 - DNA, 25 bp, Probe Sequence
ccccagtgccttgagagtttcacct

SEQ ID NO: 195853 - DNA, 25 bp, Probe Sequence
ccccaatcatttccaggtttatccg

SEQ ID NO: 195854 - DNA, 25 bp, Probe Sequence
ccccatcaagctaccaatgactttc

SEQ ID NO: 195855 - DNA, 25 bp, Probe Sequence
ccccatcacagcagtcaaacagcct

SEQ ID NO: 195856 - DNA, 25 bp, Probe Sequence
cccctgccatgcagagcaggaagcc

SEQ ID NO: 195857 - DNA, 25 bp, Probe Sequence
cccctcacaaatgcagccaagtcat

SEQ ID NO: 195858 - DNA, 25 bp, Probe Sequence
ccccaagccagatcagctcaagtga

SEQ ID NO: 195859 - DNA, 25 bp, Probe Sequence
ccccagcccagtcagtgaatgtggt

SEQ ID NO: 195860 - DNA, 25 bp, Probe Sequence
ccccagcctttgtactaagctcttg

SEQ ID NO: 195861 - DNA, 25 bp, Probe Sequence
ccccatgcactgtgaaggacccttg

SEQ ID NO: 195862 - DNA, 25 bp, Probe Sequence
ccgcctgcagcgttgagaaacccag

SEQ ID NO: 195863 - DNA, 25 bp, Probe Sequence
ccgcggatcctgcagaaactcgctg

SEQ ID NO: 195864 - DNA, 25 bp, Probe Sequence
ccgctcgggcatggagaattccgct

SEQ ID NO: 195865 - DNA, 25 bp, Probe Sequence
ccgccagcggaaggttcattcgcat

SEQ ID NO: 195866 - DNA, 25 bp, Probe Sequence
ccccacgtgtgaagtgtagtggcat

SEQ ID NO: 195867 - DNA, 25 bp, Probe Sequence
ccccatcgtggtggtgctgagtggc

SEQ ID NO: 195868 - DNA, 25 bp, Probe Sequence
ccccttctctgtagctgctagtgag

SEQ ID NO: 195869 - DNA, 25 bp, Probe Sequence
ccccttcttcctggatgaatgagca

SEQ ID NO: 195870 - DNA, 25 bp, Probe Sequence
cccctcctcatgctggtggaggcat

SEQ ID NO: 195871 - DNA, 25 bp, Probe Sequence
cccctctcctgatgagatggacatc

SEQ ID NO: 195872 - DNA, 25 bp, Probe Sequence
ccccatatgtgttggagaatgacat

SEQ ID NO: 195873 - DNA, 25 bp, Probe Sequence
ccgcgcactgcgtggcgaatgtaaa

SEQ ID NO: 195874 - DNA, 25 bp, Probe Sequence
ccgcgccgctgctgggagagatccc

SEQ ID NO: 195875 - DNA, 25 bp, Probe Sequence
cccctcagctggggttagagcccat

SEQ ID NO: 195876 - DNA, 25 bp, Probe Sequence
cccctcacaggagcttactggcaaa

SEQ ID NO: 195877 - DNA, 25 bp, Probe Sequence
cccctatatgggattctctggaaac

SEQ ID NO: 195878 - DNA, 25 bp, Probe Sequence
cccctcaaaggtgacttggccaaca

SEQ ID NO: 195879 - DNA, 25 bp, Probe Sequence
cccctaactactgactatgactgca

SEQ ID NO: 195880 - DNA, 25 bp, Probe Sequence
cccctagacttctgctgttgtctga

SEQ ID NO: 195881 - DNA, 25 bp, Probe Sequence
ccccaagtcttagctgttgctgctc

SEQ ID NO: 195882 - DNA, 25 bp, Probe Sequence
ccccacactgcaatttggtcttgtt

SEQ ID NO: 195883 - DNA, 25 bp, Probe Sequence
ccccacctgcaggggcttagtgtct

SEQ ID NO: 195884 - DNA, 25 bp, Probe Sequence
ccccaccagtcaggactctatgttc

SEQ ID NO: 195885 - DNA, 25 bp, Probe Sequence
ccccacaggtaaatcctgtgttagg

SEQ ID NO: 195886 - DNA, 25 bp, Probe Sequence
ccccacagaactttgcctggttgtg

SEQ ID NO: 195887 - DNA, 25 bp, Probe Sequence
ccccaacatacatttcgcgtcattt

SEQ ID NO: 195888 - DNA, 25 bp, Probe Sequence
ccccttctactacttgagactttat

SEQ ID NO: 195889 - DNA, 25 bp, Probe Sequence
ccccattctttgcttgaacacagta

SEQ ID NO: 195890 - DNA, 25 bp, Probe Sequence
cccctgtcttgctgtcatgaaatca

SEQ ID NO: 195891 - DNA, 25 bp, Probe Sequence
ccccagccccaggttgataaatcta

SEQ ID NO: 195892 - DNA, 25 bp, Probe Sequence
ccccagccccaggttgataaatcta

SEQ ID NO: 195893 - DNA, 25 bp, Probe Sequence
ccccatccccacagtataaaaagat

SEQ ID NO: 195894 - DNA, 25 bp, Probe Sequence
ccccatccccacagtataaaaagat

SEQ ID NO: 195895 - DNA, 25 bp, Probe Sequence
ccccatctttaccaaaaataagctg

SEQ ID NO: 195896 - DNA, 25 bp, Probe Sequence
ccccttattaccaccttaagcaatg

SEQ ID NO: 195897 - DNA, 25 bp, Probe Sequence
ccccttatttccattgctctgaaag

SEQ ID NO: 195898 - DNA, 25 bp, Probe Sequence
cccctacatgatagcctttgctcag

SEQ ID NO: 195899 - DNA, 25 bp, Probe Sequence
cccctgactgaaccttgggcagaag

SEQ ID NO: 195900 - DNA, 25 bp, Probe Sequence
gcccttccttatcctaggaaaagag

SEQ ID NO: 195901 - DNA, 25 bp, Probe Sequence
cccctcctaacccagcagtaactgg

SEQ ID NO: 195902 - DNA, 25 bp, Probe Sequence
ccccatccttaactttgtatcctgg

SEQ ID NO: 195903 - DNA, 25 bp, Probe Sequence
ccccacactgtatctaatgtatcac

SEQ ID NO: 195904 - DNA, 25 bp, Probe Sequence
ccccactccaaagtccatggattca

SEQ ID NO: 195905 - DNA, 25 bp, Probe Sequence
ccccaccagggaaccggatgatgaa

SEQ ID NO: 195906 - DNA, 25 bp, Probe Sequence
ccgaatccggagatcctgaggagga

SEQ ID NO: 195907 - DNA, 25 bp, Probe Sequence
ccggtccggaattcccgggatgcat

SEQ ID NO: 195908 - DNA, 25 bp, Probe Sequence
ccggcacacgagtgtccggggttcg

SEQ ID NO: 195909 - DNA, 25 bp, Probe Sequence
ccgtccaggaactcaagcgggtctc

SEQ ID NO: 195910 - DNA, 25 bp, Probe Sequence
ccggctgacccctcaggagggattg

SEQ ID NO: 195911 - DNA, 25 bp, Probe Sequence
cctacggtcccagacaggtggttgt

SEQ ID NO: 195912 - DNA, 25 bp, Probe Sequence
cccctcgttccagagctgagatggc

SEQ ID NO: 195913 - DNA, 25 bp, Probe Sequence
cccctcgttccagagctgagatggc

SEQ ID NO: 195914 - DNA, 25 bp, Probe Sequence
cccctcctttatgagcacagcatgg

SEQ ID NO: 195915 - DNA, 25 bp, Probe Sequence
cccctcccattaggacaatcagtcc

SEQ ID NO: 195916 - DNA, 25 bp, Probe Sequence
cccctccctcttgggaacagttgat

SEQ ID NO: 195917 - DNA, 25 bp, Probe Sequence
ccccagctaactagggaaggcttga

SEQ ID NO: 195918 - DNA, 25 bp, Probe Sequence
ccgtggtaccccagatagacatgga

SEQ ID NO: 195919 - DNA, 25 bp, Probe Sequence
ccgtgtccccactgtgaaggatgaa

SEQ ID NO: 195920 - DNA, 25 bp, Probe Sequence
ccgtgtccccactgtgaaggatgaa

SEQ ID NO: 195921 - DNA, 25 bp, Probe Sequence
ccgtgttggccattggtactgggca

SEQ ID NO: 195922 - DNA, 25 bp, Probe Sequence
ccgctgcttacctgggtgcaggaga

SEQ ID NO: 195923 - DNA, 25 bp, Probe Sequence
ccgctgcctcaggaggcgggaggca

SEQ ID NO: 195924 - DNA, 25 bp, Probe Sequence
ccgtacatagaaggtcatgcagatg

SEQ ID NO: 195925 - DNA, 25 bp, Probe Sequence
ccgaagccgacagcagcatcatgat

SEQ ID NO: 195926 - DNA, 25 bp, Probe Sequence
ccgcatcatccgtgacgacatgctg

SEQ ID NO: 195927 - DNA, 25 bp, Probe Sequence
ccgcaatggcagcgggacgctggat

SEQ ID NO: 195928 - DNA, 25 bp, Probe Sequence
ccgccatgactggaggctgaaaggt

SEQ ID NO: 195929 - DNA, 25 bp, Probe Sequence
ccgccatacccgctgaaggaggtgg

SEQ ID NO: 195930 - DNA, 25 bp, Probe Sequence
ccccaagcaactccatgacgctggg

SEQ ID NO: 195931 - DNA, 25 bp, Probe Sequence
ccccaggccagatcattcgtgagtg

SEQ ID NO: 195932 - DNA, 25 bp, Probe Sequence
ccccagcgccagtagtgacaggggc

SEQ ID NO: 195933 - DNA, 25 bp, Probe Sequence
ccccaggagagatgctttgaggagc

SEQ ID NO: 195934 - DNA, 25 bp, Probe Sequence
cccctctgagattggcttcggtgag

SEQ ID NO: 195935 - DNA, 25 bp, Probe Sequence
ccgccgcggttgatgtggttgggcc

SEQ ID NO: 195936 - DNA, 25 bp, Probe Sequence
ccccacggttatatgtgtgtccctc

SEQ ID NO: 195937 - DNA, 25 bp, Probe Sequence
ccgaaggtttccattggacctgcca

SEQ ID NO: 195938 - DNA, 25 bp, Probe Sequence
ccgcaagagtctgtcttcgatgacc

SEQ ID NO: 195939 - DNA, 25 bp, Probe Sequence
ccgacacggctcaagtcacgaatca

SEQ ID NO: 195940 - DNA, 25 bp, Probe Sequence
ccgcctgcggccgagaaatgcaatg

SEQ ID NO: 195941 - DNA, 25 bp, Probe Sequence
gccgacgccgccggaaagcgtgcca

SEQ ID NO: 195942 - DNA, 25 bp, Probe Sequence
ccaaccctgtctgtagagggccctg

SEQ ID NO: 195943 - DNA, 25 bp, Probe Sequence
ttcgaccttgccgaaggggagtccg

SEQ ID NO: 195944 - DNA, 25 bp, Probe Sequence
ccgcaccattccggagtgtatagat

SEQ ID NO: 195945 - DNA, 25 bp, Probe Sequence
cccctttgtctggagcagttatgat

SEQ ID NO: 195946 - DNA, 25 bp, Probe Sequence
cctcgttcttctgtcacttagacga

SEQ ID NO: 195947 - DNA, 25 bp, Probe Sequence
cctcggaagcactgtccttcaacga

SEQ ID NO: 195948 - DNA, 25 bp, Probe Sequence
ccgggatagagaagtctttaaatga

SEQ ID NO: 195949 - DNA, 25 bp, Probe Sequence
ccgtggataggcgcttttattaatt

SEQ ID NO: 195950 - DNA, 25 bp, Probe Sequence
ccagggtaagcatctgttttattca

SEQ ID NO: 195951 - DNA, 25 bp, Probe Sequence
ccgcctctagactacgtgtttattt

SEQ ID NO: 195952 - DNA, 25 bp, Probe Sequence
ccgtttcagtcttcaatctgttttg

SEQ ID NO: 195953 - DNA, 25 bp, Probe Sequence
ccgggatctgtctcaaatatttctt

SEQ ID NO: 195954 - DNA, 25 bp, Probe Sequence
ccgcaggagcctgggcaagaattac

SEQ ID NO: 195955 - DNA, 25 bp, Probe Sequence
ccgaaatgcactccagaagaaaatc

SEQ ID NO: 195956 - DNA, 25 bp, Probe Sequence
ccgcacatgatgtctggcaccagac

SEQ ID NO: 195957 - DNA, 25 bp, Probe Sequence
ccgcacatcatcagcgcgcaagagg

SEQ ID NO: 195958 - DNA, 25 bp, Probe Sequence
ccgcatattaggcgcagataaaaga

SEQ ID NO: 195959 - DNA, 25 bp, Probe Sequence
cctgctttaagggactacgataatg

SEQ ID NO: 195960 - DNA, 25 bp, Probe Sequence
cctagtttaggttgacacgtataga

SEQ ID NO: 195961 - DNA, 25 bp, Probe Sequence
cccctatggggctgaccagtagaga

SEQ ID NO: 195962 - DNA, 25 bp, Probe Sequence
ccccagaggcgagggaccagtggag

SEQ ID NO: 195963 - DNA, 25 bp, Probe Sequence
ccgcaagttcctggagacggtggag

SEQ ID NO: 195964 - DNA, 25 bp, Probe Sequence
ccgcggcttccagagccaagtgaag

SEQ ID NO: 195965 - DNA, 25 bp, Probe Sequence
tccggcgttcaagatgtcgaagcga

SEQ ID NO: 195966 - DNA, 25 bp, Probe Sequence
gcgggccttcaagttattgggctca

SEQ ID NO: 195967 - DNA, 25 bp, Probe Sequence
ccccttgatcaagtttgtggcactg

SEQ ID NO: 195968 - DNA, 25 bp, Probe Sequence
ccgcatgctaatcgctttttaccgc

SEQ ID NO: 195969 - DNA, 25 bp, Probe Sequence
ccgctacaacggactgattcaccgc

SEQ ID NO: 195970 - DNA, 25 bp, Probe Sequence
ccgcaacaacggcaagaagctcatg

SEQ ID NO: 195971 - DNA, 25 bp, Probe Sequence
ccccacaacgtgcaggagatcctgg

SEQ ID NO: 195972 - DNA, 25 bp, Probe Sequence
ccccacagaggtccagtggcactgc

SEQ ID NO: 195973 - DNA, 25 bp, Probe Sequence
ccccacagctggtaatctggactta

SEQ ID NO: 195974 - DNA, 25 bp, Probe Sequence
ccccaagtgaaactgctcgcagctg

SEQ ID NO: 195975 - DNA, 25 bp, Probe Sequence
ccccaggagatgcagtgctcccaaa

SEQ ID NO: 195976 - DNA, 25 bp, Probe Sequence
ccccatgaagtgggtgccccactca

SEQ ID NO: 195977 - DNA, 25 bp, Probe Sequence
ccccagagagatcgggctcaggacc

SEQ ID NO: 195978 - DNA, 25 bp, Probe Sequence
ccccaaggcatgtgagcatctgccc

SEQ ID NO: 195979 - DNA, 25 bp, Probe Sequence
ccccaatggcctggccattctcagc

SEQ ID NO: 195980 - DNA, 25 bp, Probe Sequence
cccctatggcgaatctgaggctcct

SEQ ID NO: 195981 - DNA, 25 bp, Probe Sequence
ccccttaccataatggatgctctgt

SEQ ID NO: 195982 - DNA, 25 bp, Probe Sequence
ccccagatactatttgggctctctc

SEQ ID NO: 195983 - DNA, 25 bp, Probe Sequence
ccccagctacttgggaggctgaagc

SEQ ID NO: 195984 - DNA, 25 bp, Probe Sequence
ccccacttcctgtgaggctgtggct

SEQ ID NO: 195985 - DNA, 25 bp, Probe Sequence
ccccaatttctgtgagatggatggc

SEQ ID NO: 195986 - DNA, 25 bp, Probe Sequence
ccccaattcctgcttcatggatgtg

SEQ ID NO: 195987 - DNA, 25 bp, Probe Sequence
ccccaagcctctagtctgggtgtgt

SEQ ID NO: 195988 - DNA, 25 bp, Probe Sequence
ccccagagccctagagggtcagatg

SEQ ID NO: 195989 - DNA, 25 bp, Probe Sequence
ccccaggcaccagggcgtgatggtg

SEQ ID NO: 195990 - DNA, 25 bp, Probe Sequence
ccccatggacgccagcgtggaggag

SEQ ID NO: 195991 - DNA, 25 bp, Probe Sequence
ccccaggcatccaacgtggaggcct

SEQ ID NO: 195992 - DNA, 25 bp, Probe Sequence
ccccagccatctgcaatgggaggtt

SEQ ID NO: 195993 - DNA, 25 bp, Probe Sequence
ccccaccttctcctggaggaatgta

SEQ ID NO: 195994 - DNA, 25 bp, Probe Sequence
ccccacagcggactcggaagacatg

SEQ ID NO: 195995 - DNA, 25 bp, Probe Sequence
ccccaacgtgaccgtgagcgagatg

SEQ ID NO: 195996 - DNA, 25 bp, Probe Sequence
ccccatgccgtgagggtgtggactg

SEQ ID NO: 195997 - DNA, 25 bp, Probe Sequence
ccgccatcctggacgagagtgggaa

SEQ ID NO: 195998 - DNA, 25 bp, Probe Sequence
ccgccatcctggacgagagtgggaa

SEQ ID NO: 195999 - DNA, 25 bp, Probe Sequence
ccccatctctgctggagactggagt

SEQ ID NO: 196000 - DNA, 25 bp, Probe Sequence
ccgcgcagccgcatgaaccggatgt

SEQ ID NO: 196001 - DNA, 25 bp, Probe Sequence
ccgaaggatgcccacgacaggattt

SEQ ID NO: 196002 - DNA, 25 bp, Probe Sequence
gccacaagtatgttacccagatgta

SEQ ID NO: 196003 - DNA, 25 bp, Probe Sequence
ccccagctagtttctccaatgctga

SEQ ID NO: 196004 - DNA, 25 bp, Probe Sequence
ccccagtagcattgtccgagaggac

SEQ ID NO: 196005 - DNA, 25 bp, Probe Sequence
ccgcatcgtggagaccgaggcatac

SEQ ID NO: 196006 - DNA, 25 bp, Probe Sequence
ccgaagctggaaaccgacgtagcaa

SEQ ID NO: 196007 - DNA, 25 bp, Probe Sequence
ccgacgtcagcaacttcgacgagga

SEQ ID NO: 196008 - DNA, 25 bp, Probe Sequence
ccgacgtgatgatctgtgccggggc

SEQ ID NO: 196009 - DNA, 25 bp, Probe Sequence
ccgcaggatgatcagtccggggcgc

SEQ ID NO: 196010 - DNA, 25 bp, Probe Sequence
cctgaaaataaatgtggtgccatgc

SEQ ID NO: 196011 - DNA, 25 bp, Probe Sequence
ccgaggataaggagtggatgcccgt

SEQ ID NO: 196012 - DNA, 25 bp, Probe Sequence
ccgactctcaaggcactgtgtatgc

SEQ ID NO: 196013 - DNA, 25 bp, Probe Sequence
ccgactctcaaggcactgtgtatgc

SEQ ID NO: 196014 - DNA, 25 bp, Probe Sequence
ccgactttcgaggcactgtcatggc

SEQ ID NO: 196015 - DNA, 25 bp, Probe Sequence
ccgactattcgtgggcatgatcctg

SEQ ID NO: 196016 - DNA, 25 bp, Probe Sequence
ccgcatcaacgggtgtgccatccag

SEQ ID NO: 196017 - DNA, 25 bp, Probe Sequence
ccagtacagcgaggttaatgccatc

SEQ ID NO: 196018 - DNA, 25 bp, Probe Sequence
ccgaacatcaagggatcatatgcca

SEQ ID NO: 196019 - DNA, 25 bp, Probe Sequence
ccgatactcccagatctgtgcaaaa

SEQ ID NO: 196020 - DNA, 25 bp, Probe Sequence
ccgtaccaccatgcactgtaaatat

SEQ ID NO: 196021 - DNA, 25 bp, Probe Sequence
ccgtcactacttacaaatcaaatta

SEQ ID NO: 196022 - DNA, 25 bp, Probe Sequence
ccgtctctacgttagatccagaatt

SEQ ID NO: 196023 - DNA, 25 bp, Probe Sequence
ccgtcccctgtaagatgcgggaagt

SEQ ID NO: 196024 - DNA, 25 bp, Probe Sequence
ccgtacagctgtctaagggttaggg

SEQ ID NO: 196025 - DNA, 25 bp, Probe Sequence
ccgtaagctctttattggtggctta

SEQ ID NO: 196026 - DNA, 25 bp, Probe Sequence
ccgagtagtcttccactggagtgtt

SEQ ID NO: 196027 - DNA, 25 bp, Probe Sequence
tcgggacagtaagccaggggttaag

SEQ ID NO: 196028 - DNA, 25 bp, Probe Sequence
gccaggacgaaagcgaggcggtctg

SEQ ID NO: 196029 - DNA, 25 bp, Probe Sequence
ccggaggcaaagagaccgggccgcg

SEQ ID NO: 196030 - DNA, 25 bp, Probe Sequence
ccgcgggagaggaggccatgggcgc

SEQ ID NO: 196031 - DNA, 25 bp, Probe Sequence
ccgcggcccgagcagaggagcggaa

SEQ ID NO: 196032 - DNA, 25 bp, Probe Sequence
ccgcagaggtgaccgaaaagccgta

SEQ ID NO: 196033 - DNA, 25 bp, Probe Sequence
ccgcattgctgataccaatatcacc

SEQ ID NO: 196034 - DNA, 25 bp, Probe Sequence
ccgctgacgtggaaccatcatcacc

SEQ ID NO: 196035 - DNA, 25 bp, Probe Sequence
ccgcgacgatgttgtcctgcagaaa

SEQ ID NO: 196036 - DNA, 25 bp, Probe Sequence
ccccatggtgtggtcactgcaaaca

SEQ ID NO: 196037 - DNA, 25 bp, Probe Sequence
ccccatggtgtggtcactgcaaaca

SEQ ID NO: 196038 - DNA, 25 bp, Probe Sequence
ccccatttgtggtcacagccatgaa

SEQ ID NO: 196039 - DNA, 25 bp, Probe Sequence
ccccatggaaggccaaccatgagac

SEQ ID NO: 196040 - DNA, 25 bp, Probe Sequence
ccccatcagcactgccaaggctgtg

SEQ ID NO: 196041 - DNA, 25 bp, Probe Sequence
ccccacctcaaggctgatggctgtg

SEQ ID NO: 196042 - DNA, 25 bp, Probe Sequence
ccccacaatggacctcagagcagtg

SEQ ID NO: 196043 - DNA, 25 bp, Probe Sequence
ccccacattgtaccggacactggat

SEQ ID NO: 196044 - DNA, 25 bp, Probe Sequence
ccgccacatttaccaggactgggaa

SEQ ID NO: 196045 - DNA, 25 bp, Probe Sequence
ccgcccatttaagtacagtggatgt

SEQ ID NO: 196046 - DNA, 25 bp, Probe Sequence
ccgacctctctatgtaagcacacat

SEQ ID NO: 196047 - DNA, 25 bp, Probe Sequence
ccgatttcgctacctcaatgaacag

SEQ ID NO: 196048 - DNA, 25 bp, Probe Sequence
ccgttattctaactcagggatggaa

SEQ ID NO: 196049 - DNA, 25 bp, Probe Sequence
ccgcttatgcgtatgtgcacggggc

SEQ ID NO: 196050 - DNA, 25 bp, Probe Sequence
ccgcttgctgtaggttcacggcgtg

SEQ ID NO: 196051 - DNA, 25 bp, Probe Sequence
ccgcattctgtacccagacgaggtg

SEQ ID NO: 196052 - DNA, 25 bp, Probe Sequence
ccgttctctttggccacaatggcag

SEQ ID NO: 196053 - DNA, 25 bp, Probe Sequence
ccgattccgactgggagccggagga

SEQ ID NO: 196054 - DNA, 25 bp, Probe Sequence
ccggtaatgactgggtccagagcct

SEQ ID NO: 196055 - DNA, 25 bp, Probe Sequence
ccgagcgggacgacgttgaagccat

SEQ ID NO: 196056 - DNA, 25 bp, Probe Sequence
ccgacgctggaagttgggttctcat

SEQ ID NO: 196057 - DNA, 25 bp, Probe Sequence
ccgcccaaggacctgggctacatct

SEQ ID NO: 196058 - DNA, 25 bp, Probe Sequence
ccgcacgacggacgtgacgcagacc

SEQ ID NO: 196059 - DNA, 25 bp, Probe Sequence
ccgagcgagcggagactagcgcacc

SEQ ID NO: 196060 - DNA, 25 bp, Probe Sequence
ccccagaggtgaagcacttctgccc

SEQ ID NO: 196061 - DNA, 25 bp, Probe Sequence
ccccacgtgtgaacatctgtcttgg

SEQ ID NO: 196062 - DNA, 25 bp, Probe Sequence
ccccactcgtgtaagcagtttggtg

SEQ ID NO: 196063 - DNA, 25 bp, Probe Sequence
ccgtcctcagttacctttcatgagg

SEQ ID NO: 196064 - DNA, 25 bp, Probe Sequence
ccgtcctataataggctttagagcc

SEQ ID NO: 196065 - DNA, 25 bp, Probe Sequence
ccgtcttcccagagttgtgacagcc

SEQ ID NO: 196066 - DNA, 25 bp, Probe Sequence
ccgccttgcccacgagattgaagca

SEQ ID NO: 196067 - DNA, 25 bp, Probe Sequence
ccccaggccaggtagcaagagagca

SEQ ID NO: 196068 - DNA, 25 bp, Probe Sequence
ccccaggcagggcaatgtgagcagc

SEQ ID NO: 196069 - DNA, 25 bp, Probe Sequence
ccccaggagtcttcagtgtgtgagc

SEQ ID NO: 196070 - DNA, 25 bp, Probe Sequence
ccccagggcacttcacagagtgtgc

SEQ ID NO: 196071 - DNA, 25 bp, Probe Sequence
ccccagaggcaccagacctgggctt

SEQ ID NO: 196072 - DNA, 25 bp, Probe Sequence
ccccaggcacacgagacacttggtt

SEQ ID NO: 196073 - DNA, 25 bp, Probe Sequence
ccccaagcccctgagcttgtgttta

SEQ ID NO: 196074 - DNA, 25 bp, Probe Sequence
ccccaccccaacagtgattgttgga

SEQ ID NO: 196075 - DNA, 25 bp, Probe Sequence
ccccaccccaagtttgtctgtggtg

SEQ ID NO: 196076 - DNA, 25 bp, Probe Sequence
ccggaacacacctttatggctgggg

SEQ ID NO: 196077 - DNA, 25 bp, Probe Sequence
ccggtagtcccagctacttgggaag

SEQ ID NO: 196078 - DNA, 25 bp, Probe Sequence
ccgttatgcatcgccgcatacttgg

SEQ ID NO: 196079 - DNA, 25 bp, Probe Sequence
ccgttctgcactattgatcctaatg

SEQ ID NO: 196080 - DNA, 25 bp, Probe Sequence
ccgctggtcaccatgaaccacattg

SEQ ID NO: 196081 - DNA, 25 bp, Probe Sequence
ccgttgtccctgcagtgcccatagg

SEQ ID NO: 196082 - DNA, 25 bp, Probe Sequence
ccgaagttgccccagttccatgggg

SEQ ID NO: 196083 - DNA, 25 bp, Probe Sequence
ccgatacttgctggagcagactcca

SEQ ID NO: 196084 - DNA, 25 bp, Probe Sequence
ccagtttttcgagacagcctacggc

SEQ ID NO: 196085 - DNA, 25 bp, Probe Sequence
ccgtatttaaacaacagctcccctg

SEQ ID NO: 196086 - DNA, 25 bp, Probe Sequence
ccgcttcctgaacaagcagccatac

SEQ ID NO: 196087 - DNA, 25 bp, Probe Sequence
ccccatcccaaggcaagcatgaata

SEQ ID NO: 196088 - DNA, 25 bp, Probe Sequence
ccccactcacaacaacattgctgag

SEQ ID NO: 196089 - DNA, 25 bp, Probe Sequence
ccccagcgccaaggacatcaagaag

SEQ ID NO: 196090 - DNA, 25 bp, Probe Sequence
ccccagcgccaaggacatcaagaag

SEQ ID NO: 196091 - DNA, 25 bp, Probe Sequence
ccccagcgccaaggacatcaagaag

SEQ ID NO: 196092 - DNA, 25 bp, Probe Sequence
ccccacccctgtaatcaggcaagga

SEQ ID NO: 196093 - DNA, 25 bp, Probe Sequence
ccccacacgcactttatgagggaga

SEQ ID NO: 196094 - DNA, 25 bp, Probe Sequence
ccccatcctgcagattatgtggaaa

SEQ ID NO: 196095 - DNA, 25 bp, Probe Sequence
ccccacactgcaactctgagggacc

SEQ ID NO: 196096 - DNA, 25 bp, Probe Sequence
ccccacagtgcacctgcatgatgtg

SEQ ID NO: 196097 - DNA, 25 bp, Probe Sequence
ccagccaagatgttcatgtagtatt

SEQ ID NO: 196098 - DNA, 25 bp, Probe Sequence
ccgccaggtgccaggtgtatttttg

SEQ ID NO: 196099 - DNA, 25 bp, Probe Sequence
ccccagcatggcaccttattgtttt

SEQ ID NO: 196100 - DNA, 25 bp, Probe Sequence
ccccaatgccaactcttaagtcttt

SEQ ID NO: 196101 - DNA, 25 bp, Probe Sequence
ccccacaccattcattcaattcatg

SEQ ID NO: 196102 - DNA, 25 bp, Probe Sequence
ccccagaccatactgactcaacatg

SEQ ID NO: 196103 - DNA, 25 bp, Probe Sequence
ccccagattctttggctgcagagtg

SEQ ID NO: 196104 - DNA, 25 bp, Probe Sequence
ccccaatcctccggtgcaggagaat

SEQ ID NO: 196105 - DNA, 25 bp, Probe Sequence
ccccaattcaaccaggcggaacaat

SEQ ID NO: 196106 - DNA, 25 bp, Probe Sequence
cctcgaatttcagtgcgggaaccaa

SEQ ID NO: 196107 - DNA, 25 bp, Probe Sequence
gcccggaatatctggggtccaaggg

SEQ ID NO: 196108 - DNA, 25 bp, Probe Sequence
ccgcggtaatgctggtggtctgcat

SEQ ID NO: 196109 - DNA, 25 bp, Probe Sequence
ccccagtatgactgccgagcactga

SEQ ID NO: 196110 - DNA, 25 bp, Probe Sequence
ccgccaggtgcctggcggagctcct

SEQ ID NO: 196111 - DNA, 25 bp, Probe Sequence
ccgcacgactgttacagaggtctcc

SEQ ID NO: 196112 - DNA, 25 bp, Probe Sequence
ccggagcagctgttccgggttacgg

SEQ ID NO: 196113 - DNA, 25 bp, Probe Sequence
ccgcagaactgccacgtggggatga

SEQ ID NO: 196114 - DNA, 25 bp, Probe Sequence
ccgcgagacctgggtggatgctgag

SEQ ID NO: 196115 - DNA, 25 bp, Probe Sequence
ccgcggagctcgcggaggcaaggcc

SEQ ID NO: 196116 - DNA, 25 bp, Probe Sequence
ccgggtgccggtgatagtagaaaag

SEQ ID NO: 196117 - DNA, 25 bp, Probe Sequence
ccgaggtctatggccccatgaagaa

SEQ ID NO: 196118 - DNA, 25 bp, Probe Sequence
ccgcagcctggtgaccgtgaaaatc

SEQ ID NO: 196119 - DNA, 25 bp, Probe Sequence
ccgcacactggtggtccatgaaaaa

SEQ ID NO: 196120 - DNA, 25 bp, Probe Sequence
ccgacactgagggtcttgtaaagag

SEQ ID NO: 196121 - DNA, 25 bp, Probe Sequence
ccgacatatccacacttttacagtg

SEQ ID NO: 196122 - DNA, 25 bp, Probe Sequence
ccccaatgccaggatggtgacacac

SEQ ID NO: 196123 - DNA, 25 bp, Probe Sequence
ccgccaagcagacgaggactacagc

SEQ ID NO: 196124 - DNA, 25 bp, Probe Sequence
ccgcttcggtggagcagctccagga

SEQ ID NO: 196125 - DNA, 25 bp, Probe Sequence
ccgttagagatcactgagctccacg

SEQ ID NO: 196126 - DNA, 25 bp, Probe Sequence
ccgtttgcagtctgagcaggccagg

SEQ ID NO: 196127 - DNA, 25 bp, Probe Sequence
ccgtgtggagtacggcttccaggtt

SEQ ID NO: 196128 - DNA, 25 bp, Probe Sequence
ccgtgtggagtacggcttccaggtt

SEQ ID NO: 196129 - DNA, 25 bp, Probe Sequence
ccgtgtggagtacggcttccaggtt

SEQ ID NO: 196130 - DNA, 25 bp, Probe Sequence
ccgggaagaattcgcttccacctgt

SEQ ID NO: 196131 - DNA, 25 bp, Probe Sequence
ccgaggatgagattgccctctacac

SEQ ID NO: 196132 - DNA, 25 bp, Probe Sequence
ccgcctggcatgatgcccagtacag

SEQ ID NO: 196133 - DNA, 25 bp, Probe Sequence
ccgcctggcatatgcccagtacatg

SEQ ID NO: 196134 - DNA, 25 bp, Probe Sequence
ccgcctggcatatgcccagtacagg

SEQ ID NO: 196135 - DNA, 25 bp, Probe Sequence
ccccaggaaatcttcagcaacgtca

SEQ ID NO: 196136 - DNA, 25 bp, Probe Sequence
ccccaggaaaactcagtgcagtcca

SEQ ID NO: 196137 - DNA, 25 bp, Probe Sequence
ccgccagaggaactcttcctgaggc

SEQ ID NO: 196138 - DNA, 25 bp, Probe Sequence
ccgctaggagagtcctcttctaagc

SEQ ID NO: 196139 - DNA, 25 bp, Probe Sequence
ccgctaggtggtgtcaagcaggcgc

SEQ ID NO: 196140 - DNA, 25 bp, Probe Sequence
ccgggcgtggtggtggaagcctgta

SEQ ID NO: 196141 - DNA, 25 bp, Probe Sequence
ccgggcgtggtggtggaagcctgta

SEQ ID NO: 196142 - DNA, 25 bp, Probe Sequence
ccggtggtggactatgaacactgct

SEQ ID NO: 196143 - DNA, 25 bp, Probe Sequence
ccggaataggtatgaaatgtctacg

SEQ ID NO: 196144 - DNA, 25 bp, Probe Sequence
gccggaagggtgtggccattaactt

SEQ ID NO: 196145 - DNA, 25 bp, Probe Sequence
ccggttgtggcttctggcttaaatt

SEQ ID NO: 196146 - DNA, 25 bp, Probe Sequence
ccgattttagcagctctctccaaag

SEQ ID NO: 196147 - DNA, 25 bp, Probe Sequence
ccgttgccttgcttaactctaaagc

SEQ ID NO: 196148 - DNA, 25 bp, Probe Sequence
ccgatcgccgtgtttggtcgataga

SEQ ID NO: 196149 - DNA, 25 bp, Probe Sequence
ccgttcctgatgccgtgggcaaatg

SEQ ID NO: 196150 - DNA, 25 bp, Probe Sequence
ccgcttcctggtcagccagaacgtg

SEQ ID NO: 196151 - DNA, 25 bp, Probe Sequence
ccgcctacgtgtcaggggagctgga

SEQ ID NO: 196152 - DNA, 25 bp, Probe Sequence
ccgcctggactgcaggggggcggca

SEQ ID NO: 196153 - DNA, 25 bp, Probe Sequence
ccgcctggcagtcagcaggggggga

SEQ ID NO: 196154 - DNA, 25 bp, Probe Sequence
ccgccgagcagtcaaattccagagg

SEQ ID NO: 196155 - DNA, 25 bp, Probe Sequence
ccgccgcaggtgcaagatctggtgt

SEQ ID NO: 196156 - DNA, 25 bp, Probe Sequence
ccgcctgccttttaattcagtgttc

SEQ ID NO: 196157 - DNA, 25 bp, Probe Sequence
ccgtcctctaggtaactcaagtgtc

SEQ ID NO: 196158 - DNA, 25 bp, Probe Sequence
ccgatccataaagccctacagttgg

SEQ ID NO: 196159 - DNA, 25 bp, Probe Sequence
ccgcatccataatccttctaatagc

SEQ ID NO: 196160 - DNA, 25 bp, Probe Sequence
ccgctcactgacactctgtaaaggc

SEQ ID NO: 196161 - DNA, 25 bp, Probe Sequence
ccgtgacgacatgctgtgtgccggg

SEQ ID NO: 196162 - DNA, 25 bp, Probe Sequence
ccgtgacgacatgctgtgtgccggg

SEQ ID NO: 196163 - DNA, 25 bp, Probe Sequence
ccgtgacgacatgctgtgtgccggg

SEQ ID NO: 196164 - DNA, 25 bp, Probe Sequence
ccgcgccatcaccgtgttgcgcggg

SEQ ID NO: 196165 - DNA, 25 bp, Probe Sequence
ccgtctcagtccatttgcggaggaa

SEQ ID NO: 196166 - DNA, 25 bp, Probe Sequence
gctcgtaagtccaccggtgggaaag

SEQ ID NO: 196167 - DNA, 25 bp, Probe Sequence
cctgaaaaccttctagtgggacaag

SEQ ID NO: 196168 - DNA, 25 bp, Probe Sequence
ccggaaccttttgatggggccaatg

SEQ ID NO: 196169 - DNA, 25 bp, Probe Sequence
ccggtagactttttgtggggagcat

SEQ ID NO: 196170 - DNA, 25 bp, Probe Sequence
cctggcttacctatctgtggaaagc

SEQ ID NO: 196171 - DNA, 25 bp, Probe Sequence
ccgttaacacctaatagtgattatg

SEQ ID NO: 196172 - DNA, 25 bp, Probe Sequence
ccgcttcatgccactgaatacgttg

SEQ ID NO: 196173 - DNA, 25 bp, Probe Sequence
ccgtttccatcattgaataagtctt

SEQ ID NO: 196174 - DNA, 25 bp, Probe Sequence
ccgcctcaccattgctgaagagaga

SEQ ID NO: 196175 - DNA, 25 bp, Probe Sequence
ccgcctcaccattgctgaagagaga

SEQ ID NO: 196176 - DNA, 25 bp, Probe Sequence
ccgcactcctatggctgaagaatac

SEQ ID NO: 196177 - DNA, 25 bp, Probe Sequence
ccgcattggcattgtccaagaagtc

SEQ ID NO: 196178 - DNA, 25 bp, Probe Sequence
ccgagtggctcagtgacacggagac

SEQ ID NO: 196179 - DNA, 25 bp, Probe Sequence
ccgagtccagccagcagcaaaggcc

SEQ ID NO: 196180 - DNA, 25 bp, Probe Sequence
ccgatgcgtgcccaaggacaaggcc

SEQ ID NO: 196181 - DNA, 25 bp, Probe Sequence
ccgtcaggagcgcagagatcggccc

SEQ ID NO: 196182 - DNA, 25 bp, Probe Sequence
ccgtcaggagcgcagagatcggccc

SEQ ID NO: 196183 - DNA, 25 bp, Probe Sequence
ccgtcaggagctcaagcagcgggcg

SEQ ID NO: 196184 - DNA, 25 bp, Probe Sequence
ccgccacgatgcccaagaggaaggt

SEQ ID NO: 196185 - DNA, 25 bp, Probe Sequence
ccgccaccatgcccaagagaaaggc

SEQ ID NO: 196186 - DNA, 25 bp, Probe Sequence
ccgccccgagtcgaagcacaagggg

SEQ ID NO: 196187 - DNA, 25 bp, Probe Sequence
ccgcccagagaagggagccaggggg

SEQ ID NO: 196188 - DNA, 25 bp, Probe Sequence
ccgcgccaggaagagagcaacgagg

SEQ ID NO: 196189 - DNA, 25 bp, Probe Sequence
ccgcgtcggacgagcgcaaaagcgc

SEQ ID NO: 196190 - DNA, 25 bp, Probe Sequence
ccgcggagacccttcgagaaatctc

SEQ ID NO: 196191 - DNA, 25 bp, Probe Sequence
ccgggaacacccggagggactcatg

SEQ ID NO: 196192 - DNA, 25 bp, Probe Sequence
ccgggaacacccggagggactcatg

SEQ ID NO: 196193 - DNA, 25 bp, Probe Sequence
ccggctggaaccatggagggtgtag

SEQ ID NO: 196194 - DNA, 25 bp, Probe Sequence
ccaacggtaccttcttcatggtttg

SEQ ID NO: 196195 - DNA, 25 bp, Probe Sequence
ccaacggtaccttcttcatggtttg

SEQ ID NO: 196196 - DNA, 25 bp, Probe Sequence
ccgatgccttaccttcttaggaagg

SEQ ID NO: 196197 - DNA, 25 bp, Probe Sequence
tccggatttatcctagcccgggacg

SEQ ID NO: 196198 - DNA, 25 bp, Probe Sequence
ccggtcgtctcgtaccgcgagacgg

SEQ ID NO: 196199 - DNA, 25 bp, Probe Sequence
ccggcgccttgagacccgaggcgcc

SEQ ID NO: 196200 - DNA, 25 bp, Probe Sequence
ccgcgcacctaaggaagcctttggc

SEQ ID NO: 196201 - DNA, 25 bp, Probe Sequence
ccagaacctacagataccctgctac

SEQ ID NO: 196202 - DNA, 25 bp, Probe Sequence
gccatcgaaaaagacaacctctact

SEQ ID NO: 196203 - DNA, 25 bp, Probe Sequence
gcagtaaaagtaaatctcctttaat

SEQ ID NO: 196204 - DNA, 25 bp, Probe Sequence
gaataaaggtgtgtactctctaaat

SEQ ID NO: 196205 - DNA, 25 bp, Probe Sequence
gcctaggaggttttagtctctacaa

SEQ ID NO: 196206 - DNA, 25 bp, Probe Sequence
ccgaggagcgtatacagttgaaaac

SEQ ID NO: 196207 - DNA, 25 bp, Probe Sequence
ccagtaatggtatcactgttgaccc

SEQ ID NO: 196208 - DNA, 25 bp, Probe Sequence
ccggaatgctggtgccggaactcgc

SEQ ID NO: 196209 - DNA, 25 bp, Probe Sequence
ccgagaccagaaggacggctaccgc

SEQ ID NO: 196210 - DNA, 25 bp, Probe Sequence
ccgagacggcgactatcgggaccag

SEQ ID NO: 196211 - DNA, 25 bp, Probe Sequence
ccgcaagcaggagtctacagtgatg

SEQ ID NO: 196212 - DNA, 25 bp, Probe Sequence
ccgactgcaatgaccaccagatgag

SEQ ID NO: 196213 - DNA, 25 bp, Probe Sequence
ccgtctgctgatgtgaccagtggca

SEQ ID NO: 196214 - DNA, 25 bp, Probe Sequence
ccgcctctgcaactacaaggccaag

SEQ ID NO: 196215 - DNA, 25 bp, Probe Sequence
ccgccactcacggacaagagctgga

SEQ ID NO: 196216 - DNA, 25 bp, Probe Sequence
ccgccacatcacagcatcagggggc

SEQ ID NO: 196217 - DNA, 25 bp, Probe Sequence
ccgcatccacacagtccgtgtgcgg

SEQ ID NO: 196218 - DNA, 25 bp, Probe Sequence
ccgcatccacacagtccgtgtgcgg

SEQ ID NO: 196219 - DNA, 25 bp, Probe Sequence
ccgcatccacacagtccgtgtgcgg

SEQ ID NO: 196220 - DNA, 25 bp, Probe Sequence
ccgcaccagcacaggacgagaggat

SEQ ID NO: 196221 - DNA, 25 bp, Probe Sequence
ccgcaactgcctcagtctgaaggac

SEQ ID NO: 196222 - DNA, 25 bp, Probe Sequence
ccgcagacatgtccgagtccaagag

SEQ ID NO: 196223 - DNA, 25 bp, Probe Sequence
ccgcagatctgtagccagtcagagg

SEQ ID NO: 196224 - DNA, 25 bp, Probe Sequence
ccgcaatgccctgggtcaagtggag

SEQ ID NO: 196225 - DNA, 25 bp, Probe Sequence
ccgcatccccagtagtcagattata

SEQ ID NO: 196226 - DNA, 25 bp, Probe Sequence
ccgagggccagtactcagaggatga

SEQ ID NO: 196227 - DNA, 25 bp, Probe Sequence
ccgagcaggccgaagccgacaagaa

SEQ ID NO: 196228 - DNA, 25 bp, Probe Sequence
ccgagcaggccgaagccgacaagaa

SEQ ID NO: 196229 - DNA, 25 bp, Probe Sequence
ccgccaagagcgaagcccagaaaca

SEQ ID NO: 196230 - DNA, 25 bp, Probe Sequence
ccgccattcaggagctcctgaactc

SEQ ID NO: 196231 - DNA, 25 bp, Probe Sequence
ccgtattcatcgacacctaaaatct

SEQ ID NO: 196232 - DNA, 25 bp, Probe Sequence
ccgttttctgcctgtcaaaaccaca

SEQ ID NO: 196233 - DNA, 25 bp, Probe Sequence
ccgtcttcgacagggcaaacaacca

SEQ ID NO: 196234 - DNA, 25 bp, Probe Sequence
ccgttgtcagcacttggaatacaag

SEQ ID NO: 196235 - DNA, 25 bp, Probe Sequence
ccgcgggcagcagctggagctaaag

SEQ ID NO: 196236 - DNA, 25 bp, Probe Sequence
ccgccgtgatgcccagggaagacag

SEQ ID NO: 196237 - DNA, 25 bp, Probe Sequence
ccgcgctggatccagggaagcgccg

SEQ ID NO: 196238 - DNA, 25 bp, Probe Sequence
ccgcctggactgatggaggccaagg

SEQ ID NO: 196239 - DNA, 25 bp, Probe Sequence
cctgaaggagccattggtcccggtt

SEQ ID NO: 196240 - DNA, 25 bp, Probe Sequence
cctagagtagccatgccgaggccgg

SEQ ID NO: 196241 - DNA, 25 bp, Probe Sequence
ccgagcacgaacttccaggagccgg

SEQ ID NO: 196242 - DNA, 25 bp, Probe Sequence
cctgaaccacgagccagggctgggg

SEQ ID NO: 196243 - DNA, 25 bp, Probe Sequence
cctaaccaatgtggccgtggtacgg

SEQ ID NO: 196244 - DNA, 25 bp, Probe Sequence
ccgcctacctgtgggtgggtacagg

SEQ ID NO: 196245 - DNA, 25 bp, Probe Sequence
ccgcggacctgaacggaggttgcgg

SEQ ID NO: 196246 - DNA, 25 bp, Probe Sequence
gccgggaacttgcgggtttgaggat

SEQ ID NO: 196247 - DNA, 25 bp, Probe Sequence
ccgggtcctctgtgcaggttggagg

SEQ ID NO: 196248 - DNA, 25 bp, Probe Sequence
ccgggtttcttcaggtttgtgactg

SEQ ID NO: 196249 - DNA, 25 bp, Probe Sequence
cctgaatatattatccggttttata

SEQ ID NO: 196250 - DNA, 25 bp, Probe Sequence
ccgatactcttaatccctatttgat

SEQ ID NO: 196251 - DNA, 25 bp, Probe Sequence
ccgagtctctgtataatctatttac

SEQ ID NO: 196252 - DNA, 25 bp, Probe Sequence
ccggcctattgtgacttacttatct

SEQ ID NO: 196253 - DNA, 25 bp, Probe Sequence
tccggacattaaaaagtagcctatc

SEQ ID NO: 196254 - DNA, 25 bp, Probe Sequence
ccagggaatgaagaagctctcctac

SEQ ID NO: 196255 - DNA, 25 bp, Probe Sequence
ccagacagacctagggacttcctac

SEQ ID NO: 196256 - DNA, 25 bp, Probe Sequence
ccgcacgatgcctggagttactgta

SEQ ID NO: 196257 - DNA, 25 bp, Probe Sequence
ccgcacgatgcctggagttactgta

SEQ ID NO: 196258 - DNA, 25 bp, Probe Sequence
ccgcacgatgcctggagttactgta

SEQ ID NO: 196259 - DNA, 25 bp, Probe Sequence
ccgcctgataactggcattttgtag

SEQ ID NO: 196260 - DNA, 25 bp, Probe Sequence
ccgctggaaatcctgttctttctga

SEQ ID NO: 196261 - DNA, 25 bp, Probe Sequence
ccgtgaatacactgatgtttatcca

SEQ ID NO: 196262 - DNA, 25 bp, Probe Sequence
ccgtcagtaaccgtgcgattataca

SEQ ID NO: 196263 - DNA, 25 bp, Probe Sequence
ccgccggaaagcgtgccaatcaaca

SEQ ID NO: 196264 - DNA, 25 bp, Probe Sequence
ccgccagcgagaagcgcgtcaagaa

SEQ ID NO: 196265 - DNA, 25 bp, Probe Sequence
ccggcctaaggttgacaagatgcaa

SEQ ID NO: 196266 - DNA, 25 bp, Probe Sequence
ccgggaaccgtttgcagacatcaat

SEQ ID NO: 196267 - DNA, 25 bp, Probe Sequence
ccgggaacatagtaagggctcagta

SEQ ID NO: 196268 - DNA, 25 bp, Probe Sequence
ccgtgggcctcaacaagggccacaa

SEQ ID NO: 196269 - DNA, 25 bp, Probe Sequence
ccggactgtccatcgacgggagaat

SEQ ID NO: 196270 - DNA, 25 bp, Probe Sequence
ccggagttcaggtgactgagggaag

SEQ ID NO: 196271 - DNA, 25 bp, Probe Sequence
ccggaatatctggggtccaagggat

SEQ ID NO: 196272 - DNA, 25 bp, Probe Sequence
ccggaacattaagaccattgctgag

SEQ ID NO: 196273 - DNA, 25 bp, Probe Sequence
ccaggaagtccagaacgtagtgagc

SEQ ID NO: 196274 - DNA, 25 bp, Probe Sequence
ccggaagatctcgtcaaagggccac

SEQ ID NO: 196275 - DNA, 25 bp, Probe Sequence
cctatgacagtttgtcaaaaagtct

SEQ ID NO: 196276 - DNA, 25 bp, Probe Sequence
ccggaagcagtactcagaacaagtc

SEQ ID NO: 196277 - DNA, 25 bp, Probe Sequence
ccgtggaacgagactcatacacagt

SEQ ID NO: 196278 - DNA, 25 bp, Probe Sequence
ccgtgtcaccaagctcataccttgg

SEQ ID NO: 196279 - DNA, 25 bp, Probe Sequence
ccgctttcctgcactaacattttgc

SEQ ID NO: 196280 - DNA, 25 bp, Probe Sequence
ccgtttggctgcactaactttggta

SEQ ID NO: 196281 - DNA, 25 bp, Probe Sequence
tccaaagggtgcagccccttttgaa

SEQ ID NO: 196282 - DNA, 25 bp, Probe Sequence
ccgagggcattgagcccctggtgta

SEQ ID NO: 196283 - DNA, 25 bp, Probe Sequence
ccgccggcattatgcccagtacatg

SEQ ID NO: 196284 - DNA, 25 bp, Probe Sequence
ccgcctggcattatgcccagtacag

SEQ ID NO: 196285 - DNA, 25 bp, Probe Sequence
ccgcctggcattatgcccagtacat

SEQ ID NO: 196286 - DNA, 25 bp, Probe Sequence
ccgcctggcattatgcccagtacat

SEQ ID NO: 196287 - DNA, 25 bp, Probe Sequence
ccgcctggcattatgcccagtacat

SEQ ID NO: 196288 - DNA, 25 bp, Probe Sequence
ccgcctggcattatgcccagtacat

SEQ ID NO: 196289 - DNA, 25 bp, Probe Sequence
ccgcctggcattatgcccagtacat

SEQ ID NO: 196290 - DNA, 25 bp, Probe Sequence
ccgcctggcattatgcccagtacat

SEQ ID NO: 196291 - DNA, 25 bp, Probe Sequence
ccgcctggcattatgcccagtacat

SEQ ID NO: 196292 - DNA, 25 bp, Probe Sequence
ccgcctggcattatgcccagtacat

SEQ ID NO: 196293 - DNA, 25 bp, Probe Sequence
ccgcctggcattatgccgcagtaca

SEQ ID NO: 196294 - DNA, 25 bp, Probe Sequence
cctggctacttaacatcgacttcgt

SEQ ID NO: 196295 - DNA, 25 bp, Probe Sequence
gccggtatttatagcacgttacagt

SEQ ID NO: 196296 - DNA, 25 bp, Probe Sequence
cctgttaactactacgttgacactg

SEQ ID NO: 196297 - DNA, 25 bp, Probe Sequence
ccgttaactcaatcctctgatcagg

SEQ ID NO: 196298 - DNA, 25 bp, Probe Sequence
ccgccgaatgccaaacctgactggc

SEQ ID NO: 196299 - DNA, 25 bp, Probe Sequence
ccgctataaggccagtcggactgcg

SEQ ID NO: 196300 - DNA, 25 bp, Probe Sequence
ccgctgtacacccagaaggaccgag

SEQ ID NO: 196301 - DNA, 25 bp, Probe Sequence
ccgttgattccaagaatcgtccgca

SEQ ID NO: 196302 - DNA, 25 bp, Probe Sequence
ccgagttttctgcaacttcacagca

SEQ ID NO: 196303 - DNA, 25 bp, Probe Sequence
ccgcctttgtttcatagtgaggatt

SEQ ID NO: 196304 - DNA, 25 bp, Probe Sequence
ccgaatttctgtcttaggcactgtc

SEQ ID NO: 196305 - DNA, 25 bp, Probe Sequence
tccgtacttttagctagtccgtcgg

SEQ ID NO: 196306 - DNA, 25 bp, Probe Sequence
ccgtactctagggccaaatccattc

SEQ ID NO: 196307 - DNA, 25 bp, Probe Sequence
ccgtgacatctatgcctatggtttt

SEQ ID NO: 196308 - DNA, 25 bp, Probe Sequence
ccgagagcctatatctaggcatttt

SEQ ID NO: 196309 - DNA, 25 bp, Probe Sequence
ccgcatgtatctcttctatggcaac

SEQ ID NO: 196310 - DNA, 25 bp, Probe Sequence
ccgcgtcatcatctaccaagagaaa

SEQ ID NO: 196311 - DNA, 25 bp, Probe Sequence
ccgcgtgcagccaaaatctcaggaa

SEQ ID NO: 196312 - DNA, 25 bp, Probe Sequence
cctcccccaaagactgggatcacca

SEQ ID NO: 196313 - DNA, 25 bp, Probe Sequence
cctccccatttcattggcgtaacgt

SEQ ID NO: 196314 - DNA, 25 bp, Probe Sequence
ccgctcgccatttattttgctttag

SEQ ID NO: 196315 - DNA, 25 bp, Probe Sequence
ccggccacttaaatcattcttaaca

SEQ ID NO: 196316 - DNA, 25 bp, Probe Sequence
ccggtcacgggaatccccatgaact

SEQ ID NO: 196317 - DNA, 25 bp, Probe Sequence
ccgggatctggtatcttcaaaatcc

SEQ ID NO: 196318 - DNA, 25 bp, Probe Sequence
ccggagctgggtttgtcgcaaaact

SEQ ID NO: 196319 - DNA, 25 bp, Probe Sequence
ccggagctgggtttgtcgcaaaact

SEQ ID NO: 196320 - DNA, 25 bp, Probe Sequence
ccgtggtgggttttcaggcaataga

SEQ ID NO: 196321 - DNA, 25 bp, Probe Sequence
ccgctggaggtaattggctaaccag

SEQ ID NO: 196322 - DNA, 25 bp, Probe Sequence
ccgctgcagaggattgaggcttaat

SEQ ID NO: 196323 - DNA, 25 bp, Probe Sequence
ccgccatcatgggtcgcatgcatgc

SEQ ID NO: 196324 - DNA, 25 bp, Probe Sequence
ccgccacacatgggctgatgcttgg

SEQ ID NO: 196325 - DNA, 25 bp, Probe Sequence
ccgctgaccatgcctggttatggag

SEQ ID NO: 196326 - DNA, 25 bp, Probe Sequence
ccgcttcctggtcttatcatggaca

SEQ ID NO: 196327 - DNA, 25 bp, Probe Sequence
ccgttcatcatccatcttaattggc

SEQ ID NO: 196328 - DNA, 25 bp, Probe Sequence
ccggtctatcttgtgacatttggtt

SEQ ID NO: 196329 - DNA, 25 bp, Probe Sequence
ccgggatatctttctgtttatgacc

SEQ ID NO: 196330 - DNA, 25 bp, Probe Sequence
ccgcctgaatcattctcgatttaac

SEQ ID NO: 196331 - DNA, 25 bp, Probe Sequence
ccgccttattagccagattgtgtcc

SEQ ID NO: 196332 - DNA, 25 bp, Probe Sequence
ccgccttgtgattgcgcaacattta

SEQ ID NO: 196333 - DNA, 25 bp, Probe Sequence
ccgcactcttattcatgagtccgta

SEQ ID NO: 196334 - DNA, 25 bp, Probe Sequence
ccgcctggccattatggcccagtac

SEQ ID NO: 196335 - DNA, 25 bp, Probe Sequence
ccgccatgaggaaagctgctgccaa

SEQ ID NO: 196336 - DNA, 25 bp, Probe Sequence
ccgccatcaagaagaccatcctgga

SEQ ID NO: 196337 - DNA, 25 bp, Probe Sequence
ccgcgcattggacgtccattgggag

SEQ ID NO: 196338 - DNA, 25 bp, Probe Sequence
ccgagctgttgaggtacttgctggg

SEQ ID NO: 196339 - DNA, 25 bp, Probe Sequence
ccgactgtgtgctgatcagagactg

SEQ ID NO: 196340 - DNA, 25 bp, Probe Sequence
ccgccgagtgcctatcagagaagga

SEQ ID NO: 196341 - DNA, 25 bp, Probe Sequence
ccgcccagtgacgtcaagaaatgac

SEQ ID NO: 196342 - DNA, 25 bp, Probe Sequence
ccgcccctgactgatggcaggaatc

SEQ ID NO: 196343 - DNA, 25 bp, Probe Sequence
ccgccgccctctggatggaggaggg

SEQ ID NO: 196344 - DNA, 25 bp, Probe Sequence
ccgacaaccattggggtggggctgc

SEQ ID NO: 196345 - DNA, 25 bp, Probe Sequence
ccgaacaccattgagggagctggga

SEQ ID NO: 196346 - DNA, 25 bp, Probe Sequence
ccgagaccatttgcaggaggtggct

SEQ ID NO: 196347 - DNA, 25 bp, Probe Sequence
ccggacttttggctgtttcctaatg

SEQ ID NO: 196348 - DNA, 25 bp, Probe Sequence
ccggacttttggctgtttcctaatg

SEQ ID NO: 196349 - DNA, 25 bp, Probe Sequence
ccgcccttttgtgtgtgaacatgct

SEQ ID NO: 196350 - DNA, 25 bp, Probe Sequence
ccgcccttttgtgtgtgaacatgct

SEQ ID NO: 196351 - DNA, 25 bp, Probe Sequence
ccgtgcttctgtttactgtgtaatt

SEQ ID NO: 196352 - DNA, 25 bp, Probe Sequence
ccgtgcttctgtttactgtgtaatt

SEQ ID NO: 196353 - DNA, 25 bp, Probe Sequence
ccgtgcccctgagtaggaaactgtc

SEQ ID NO: 196354 - DNA, 25 bp, Probe Sequence
ccgctcgccacaaatatgggtactg

SEQ ID NO: 196355 - DNA, 25 bp, Probe Sequence
ccgctgtgcccaggagagcagcgtg

SEQ ID NO: 196356 - DNA, 25 bp, Probe Sequence
ccgcgtgggcatggaggacatgggt

SEQ ID NO: 196357 - DNA, 25 bp, Probe Sequence
ccgcctgggctccaggcgttgctgg

SEQ ID NO: 196358 - DNA, 25 bp, Probe Sequence
ccgctctgtgtgacctgagggtgat

SEQ ID NO: 196359 - DNA, 25 bp, Probe Sequence
ccgcctggctgagatggggtgggca

SEQ ID NO: 196360 - DNA, 25 bp, Probe Sequence
ccgcgccctgtttgagaaggtccaa

SEQ ID NO: 196361 - DNA, 25 bp, Probe Sequence
ccgggactacatggaaagagataaa

SEQ ID NO: 196362 - DNA, 25 bp, Probe Sequence
ccgtctcgtactggatatacgttaa

SEQ ID NO: 196363 - DNA, 25 bp, Probe Sequence
ccgcgggttcggatacaatgtcaca

SEQ ID NO: 196364 - DNA, 25 bp, Probe Sequence
ccgagggcggggactaatgtgtaag

SEQ ID NO: 196365 - DNA, 25 bp, Probe Sequence
cctgaaggaagtgccaaacatggaa

SEQ ID NO: 196366 - DNA, 25 bp, Probe Sequence
ccgaaagccggatgcatatactgag

SEQ ID NO: 196367 - DNA, 25 bp, Probe Sequence
ccgcaaaggcagcaggctaccggac

SEQ ID NO: 196368 - DNA, 25 bp, Probe Sequence
cctaaaggagagctgtccctagaca

SEQ ID NO: 196369 - DNA, 25 bp, Probe Sequence
ccgtagggagcatcttctctcggac

SEQ ID NO: 196370 - DNA, 25 bp, Probe Sequence
ccgggccaagtacttcattcgagat

SEQ ID NO: 196371 - DNA, 25 bp, Probe Sequence
ccgggccaagtacttcattcgagat

SEQ ID NO: 196372 - DNA, 25 bp, Probe Sequence
ccgggccaagtacttcattcgagat

SEQ ID NO: 196373 - DNA, 25 bp, Probe Sequence
ccgtctgtacgtgtgtcattgcgtg

SEQ ID NO: 196374 - DNA, 25 bp, Probe Sequence
ccgtccgacagcaggtcgtgctaga

SEQ ID NO: 196375 - DNA, 25 bp, Probe Sequence
ccgtccgacagcaggtcgtgctaga

SEQ ID NO: 196376 - DNA, 25 bp, Probe Sequence
ccgcccgcaagcagagggactcgga

SEQ ID NO: 196377 - DNA, 25 bp, Probe Sequence
ccgccggaagggcaggcacatgggc

SEQ ID NO: 196378 - DNA, 25 bp, Probe Sequence
ccgatcggaggcacgaggcctgtgg

SEQ ID NO: 196379 - DNA, 25 bp, Probe Sequence
ccgacggagcggccaggagagtggg

SEQ ID NO: 196380 - DNA, 25 bp, Probe Sequence
ccgacccgggttgagaggagctctg

SEQ ID NO: 196381 - DNA, 25 bp, Probe Sequence
ccgcacccgaggatctgacggtggt

SEQ ID NO: 196382 - DNA, 25 bp, Probe Sequence
ccgctcatccgccagatttgagcag

SEQ ID NO: 196383 - DNA, 25 bp, Probe Sequence
ccgctcctcagcggatgtggcagcc

SEQ ID NO: 196384 - DNA, 25 bp, Probe Sequence
ccgcctgcagcaggcgagtgtgcag

SEQ ID NO: 196385 - DNA, 25 bp, Probe Sequence
ccgcgccaaggccatgatgctgcgg

SEQ ID NO: 196386 - DNA, 25 bp, Probe Sequence
ccgcgccaaataatgtctctgtgag

SEQ ID NO: 196387 - DNA, 25 bp, Probe Sequence
ccgtcaagcctaagtccttgagttc

SEQ ID NO: 196388 - DNA, 25 bp, Probe Sequence
ccgacatacctgtgtcttcgtgtgc

SEQ ID NO: 196389 - DNA, 25 bp, Probe Sequence
ccgactacccagatgagctgcagtg

SEQ ID NO: 196390 - DNA, 25 bp, Probe Sequence
ccgactacagcatgtggaggaagaa

SEQ ID NO: 196391 - DNA, 25 bp, Probe Sequence
ccgcagcacagcgacggtgggaaga

SEQ ID NO: 196392 - DNA, 25 bp, Probe Sequence
ccgacagaggacgcttgagccagaa

SEQ ID NO: 196393 - DNA, 25 bp, Probe Sequence
ccgaatgagggagcctcccgaagga

SEQ ID NO: 196394 - DNA, 25 bp, Probe Sequence
ccgacaagggcagcctcgaggtggc

SEQ ID NO: 196395 - DNA, 25 bp, Probe Sequence
ccgagccctggagctcattaggtcg

SEQ ID NO: 196396 - DNA, 25 bp, Probe Sequence
ccgccccttgacgcaatggcgtagg

SEQ ID NO: 196397 - DNA, 25 bp, Probe Sequence
ccgccccattgacgcaaatggccgg

SEQ ID NO: 196398 - DNA, 25 bp, Probe Sequence
ccgccccattgacgcacaatggtcg

SEQ ID NO: 196399 - DNA, 25 bp, Probe Sequence
ccgccgccattgactgctatatggt

SEQ ID NO: 196400 - DNA, 25 bp, Probe Sequence
ccgagctccgtgaccatgaaggtca

SEQ ID NO: 196401 - DNA, 25 bp, Probe Sequence
ccgtggcgccgacaggatgggcaag

SEQ ID NO: 196402 - DNA, 25 bp, Probe Sequence
ccgcgtccactactaggacagccaa

SEQ ID NO: 196403 - DNA, 25 bp, Probe Sequence
ccgcgtcctgtcctggtgacaggag

SEQ ID NO: 196404 - DNA, 25 bp, Probe Sequence
ccgcagtctccagcggtgtgggagc

SEQ ID NO: 196405 - DNA, 25 bp, Probe Sequence
cctggtccggcctaagggtgacaag

SEQ ID NO: 196406 - DNA, 25 bp, Probe Sequence
ccgtcccgctcatccaagggacaag

SEQ ID NO: 196407 - DNA, 25 bp, Probe Sequence
cctgtctttgtctccaggggaaaga

SEQ ID NO: 196408 - DNA, 25 bp, Probe Sequence
cctgactgttcttcccaggggagtg

SEQ ID NO: 196409 - DNA, 25 bp, Probe Sequence
ccgttgtttttcgattgcaagaggg

SEQ ID NO: 196410 - DNA, 25 bp, Probe Sequence
ccgagtttttcgcactgcaggacag

SEQ ID NO: 196411 - DNA, 25 bp, Probe Sequence
ccggcattgtattccaaagacgaca

SEQ ID NO: 196412 - DNA, 25 bp, Probe Sequence
ccgtgccatgtttcatcaaggcacc

SEQ ID NO: 196413 - DNA, 25 bp, Probe Sequence
ccgagtctgcgtccattagagcaca

SEQ ID NO: 196414 - DNA, 25 bp, Probe Sequence
ccgaatctggcgtggcagaatacct

SEQ ID NO: 196415 - DNA, 25 bp, Probe Sequence
ccgttccatctgtgagaaatcaccg

SEQ ID NO: 196416 - DNA, 25 bp, Probe Sequence
ccgtgtctgacttagtgtaacctag

SEQ ID NO: 196417 - DNA, 25 bp, Probe Sequence
ccgttgctggatgactgttactctt

SEQ ID NO: 196418 - DNA, 25 bp, Probe Sequence
ccgtcatcgggatggtgtccactgg

SEQ ID NO: 196419 - DNA, 25 bp, Probe Sequence
ccgtcctggtgaataaacgcactcc

SEQ ID NO: 196420 - DNA, 25 bp, Probe Sequence
ccgccccaggcaataagaccagtca

SEQ ID NO: 196421 - DNA, 25 bp, Probe Sequence
ccgccccaggcaataagaccagtca

SEQ ID NO: 196422 - DNA, 25 bp, Probe Sequence
ccgcccttggcattatgcccaagta

SEQ ID NO: 196423 - DNA, 25 bp, Probe Sequence
ccgctgcctccgttatgagatcaag

SEQ ID NO: 196424 - DNA, 25 bp, Probe Sequence
ccgcgcgtccagcatcatagacgag

SEQ ID NO: 196425 - DNA, 25 bp, Probe Sequence
ccgcggactcagcacggagagcatc

SEQ ID NO: 196426 - DNA, 25 bp, Probe Sequence
ccgctccaccatcacggagatggcg

SEQ ID NO: 196427 - DNA, 25 bp, Probe Sequence
ccgcatcgtcggcgggaaggctgca

SEQ ID NO: 196428 - DNA, 25 bp, Probe Sequence
ccgctctgagggcgagaagatccga

SEQ ID NO: 196429 - DNA, 25 bp, Probe Sequence
ccgtcatgggtgctgaaatccggca

SEQ ID NO: 196430 - DNA, 25 bp, Probe Sequence
ccgtcatgggtgctgaaatccggca

SEQ ID NO: 196431 - DNA, 25 bp, Probe Sequence
ccgggagcggcagtggaaccgactc

SEQ ID NO: 196432 - DNA, 25 bp, Probe Sequence
ccgaggaggggtggactccaccttg

SEQ ID NO: 196433 - DNA, 25 bp, Probe Sequence
ccgtgggttgttggtgagaccccag

SEQ ID NO: 196434 - DNA, 25 bp, Probe Sequence
cctgtgtgggacagggtacgcccag

SEQ ID NO: 196435 - DNA, 25 bp, Probe Sequence
ccttccggaaggagtagctgacctg

SEQ ID NO: 196436 - DNA, 25 bp, Probe Sequence
ccttcgggaaggagttcacagaagc

SEQ ID NO: 196437 - DNA, 25 bp, Probe Sequence
cctgtcgggtagtctcatttagcaa

SEQ ID NO: 196438 - DNA, 25 bp, Probe Sequence
ccgctgaagcgcactgctgttcaga

SEQ ID NO: 196439 - DNA, 25 bp, Probe Sequence
ccgctggacactggggtcagagcag

SEQ ID NO: 196440 - DNA, 25 bp, Probe Sequence
ccgctggacactggggtcagagcag

SEQ ID NO: 196441 - DNA, 25 bp, Probe Sequence
ccgctgtgatgcgggctggttggcg

SEQ ID NO: 196442 - DNA, 25 bp, Probe Sequence
ccgctgatgagcgaggcgggtgctg

SEQ ID NO: 196443 - DNA, 25 bp, Probe Sequence
ccgcggacgaggcatcatgtgcatg

SEQ ID NO: 196444 - DNA, 25 bp, Probe Sequence
ccgcagagcccagtggtctgtgagg

SEQ ID NO: 196445 - DNA, 25 bp, Probe Sequence
ccgcagcaagatccggtctgtgggc

SEQ ID NO: 196446 - DNA, 25 bp, Probe Sequence
ccgcgcacgagcatggagctctggg

SEQ ID NO: 196447 - DNA, 25 bp, Probe Sequence
ccggacagggtctacatcaactatt

SEQ ID NO: 196448 - DNA, 25 bp, Probe Sequence
ccggtcactgttgccaaactatacc

SEQ ID NO: 196449 - DNA, 25 bp, Probe Sequence
tccggccaagtcgacagccaacgga

SEQ ID NO: 196450 - DNA, 25 bp, Probe Sequence
tccggccaagtcgacagccaacgga

SEQ ID NO: 196451 - DNA, 25 bp, Probe Sequence
cctggcaaacatcaaccaatgggtg

SEQ ID NO: 196452 - DNA, 25 bp, Probe Sequence
ccgtcagctgaactagacccaggtg

SEQ ID NO: 196453 - DNA, 25 bp, Probe Sequence
ccgtcaggagagacgcagccctggg

SEQ ID NO: 196454 - DNA, 25 bp, Probe Sequence
ccgtgctcgaggacaactacatgta

SEQ ID NO: 196455 - DNA, 25 bp, Probe Sequence
ccgagcccattgacgagtactgtgt

SEQ ID NO: 196456 - DNA, 25 bp, Probe Sequence
ccggccctctggtacagaagatgtc

SEQ ID NO: 196457 - DNA, 25 bp, Probe Sequence
ccgagcggtcgctgaaggacatgga

SEQ ID NO: 196458 - DNA, 25 bp, Probe Sequence
ccgaggaggcactggaggctgctgg

SEQ ID NO: 196459 - DNA, 25 bp, Probe Sequence
ccgaggaggcactggaggctgctgg

SEQ ID NO: 196460 - DNA, 25 bp, Probe Sequence
ccgacaaggccacggacatctgcat

SEQ ID NO: 196461 - DNA, 25 bp, Probe Sequence
ccggttggccagggactatgcagcc

SEQ ID NO: 196462 - DNA, 25 bp, Probe Sequence
ccgctggtggccgtgtattacacca

SEQ ID NO: 196463 - DNA, 25 bp, Probe Sequence
ccgagtgtgaccgtttgctaaataa

SEQ ID NO: 196464 - DNA, 25 bp, Probe Sequence
ccgtgttgtccagtataccttataa

SEQ ID NO: 196465 - DNA, 25 bp, Probe Sequence
ccgtgactgtctatacaactaaaat

SEQ ID NO: 196466 - DNA, 25 bp, Probe Sequence
ccgcagggtctagccatggctaagg

SEQ ID NO: 196467 - DNA, 25 bp, Probe Sequence
ccgagggaccctggatggatgtagg

SEQ ID NO: 196468 - DNA, 25 bp, Probe Sequence
ccgtctgaaagcctcgatgctgttg

SEQ ID NO: 196469 - DNA, 25 bp, Probe Sequence
ccgttaccatcaacgcactgttgca

SEQ ID NO: 196470 - DNA, 25 bp, Probe Sequence
ccgaagaccagaccgcagagttcaa

SEQ ID NO: 196471 - DNA, 25 bp, Probe Sequence
cctgcaaaccctttcagggtccact

SEQ ID NO: 196472 - DNA, 25 bp, Probe Sequence
ccggaatccgctaccggagtacctg

SEQ ID NO: 196473 - DNA, 25 bp, Probe Sequence
ccggaagcccttgcctgaaagcaag

SEQ ID NO: 196474 - DNA, 25 bp, Probe Sequence
ccgtttgtcacttttctgataaaag

SEQ ID NO: 196475 - DNA, 25 bp, Probe Sequence
ccgtttttctttttatgccacacag

SEQ ID NO: 196476 - DNA, 25 bp, Probe Sequence
ccgtcttatttcatttctgtaacag

SEQ ID NO: 196477 - DNA, 25 bp, Probe Sequence
ccgtgttatactgtttcccaatgga

SEQ ID NO: 196478 - DNA, 25 bp, Probe Sequence
ccgatgtggacatcgtcttctccaa

SEQ ID NO: 196479 - DNA, 25 bp, Probe Sequence
ccgagtgtgagcacagctccctcgg

SEQ ID NO: 196480 - DNA, 25 bp, Probe Sequence
ccggtatgagatcaattccctggtg

SEQ ID NO: 196481 - DNA, 25 bp, Probe Sequence
ccgggatgatagaagttctcacttt

SEQ ID NO: 196482 - DNA, 25 bp, Probe Sequence
ccgtggagggagctttctctgtgta

SEQ ID NO: 196483 - DNA, 25 bp, Probe Sequence
ccgtggaggtacctggtttgctggc

SEQ ID NO: 196484 - DNA, 25 bp, Probe Sequence
ccgtgtgacgtttctgagtgtagtg

SEQ ID NO: 196485 - DNA, 25 bp, Probe Sequence
ccgtggacgtgatgccaggcgagtt

SEQ ID NO: 196486 - DNA, 25 bp, Probe Sequence
ccgggcagctaaggcagccggagct

SEQ ID NO: 196487 - DNA, 25 bp, Probe Sequence
ccgaggcgcacagagaccgaggcgc

SEQ ID NO: 196488 - DNA, 25 bp, Probe Sequence
ccggctgtacatgaaggcgcggccc

SEQ ID NO: 196489 - DNA, 25 bp, Probe Sequence
ccggcgaccaagaagatgcccgccc

SEQ ID NO: 196490 - DNA, 25 bp, Probe Sequence
ccggaggactggagcagtccctcct

SEQ ID NO: 196491 - DNA, 25 bp, Probe Sequence
ccgtcataacccaaggtaccatcct

SEQ ID NO: 196492 - DNA, 25 bp, Probe Sequence
cctgtaaaccacaggactcctcctt

SEQ ID NO: 196493 - DNA, 25 bp, Probe Sequence
ccgcacagacaccaaatggattgct

SEQ ID NO: 196494 - DNA, 25 bp, Probe Sequence
ccgagcggccgaagcaggagatgct

SEQ ID NO: 196495 - DNA, 25 bp, Probe Sequence
ccgagctgtcagcaagacggtgtat

SEQ ID NO: 196496 - DNA, 25 bp, Probe Sequence
ccggcagatcaacgacatccagtta

SEQ ID NO: 196497 - DNA, 25 bp, Probe Sequence
ccgagacaccatagtcattgctgtt

SEQ ID NO: 196498 - DNA, 25 bp, Probe Sequence
ccgagatgcccattctcttagtgat

SEQ ID NO: 196499 - DNA, 25 bp, Probe Sequence
ccgagagcctcattcaggtatgctg

SEQ ID NO: 196500 - DNA, 25 bp, Probe Sequence
ccgatgtgtctattgaagattctgt

SEQ ID NO: 196501 - DNA, 25 bp, Probe Sequence
ccggagacttggtgatctgctgatc

SEQ ID NO: 196502 - DNA, 25 bp, Probe Sequence
ccggaggctcatgggaattgtagtt

SEQ ID NO: 196503 - DNA, 25 bp, Probe Sequence
ccgggcagccatgggcaactttgtg

SEQ ID NO: 196504 - DNA, 25 bp, Probe Sequence
ccgtgtagaacgccacagggtgtga

SEQ ID NO: 196505 - DNA, 25 bp, Probe Sequence
ccgttcaggattcgcctttgggaga

SEQ ID NO: 196506 - DNA, 25 bp, Probe Sequence
ccgttgctggatctgctgtttgaag

SEQ ID NO: 196507 - DNA, 25 bp, Probe Sequence
ccgagtcgtcaccatcatgtattgg

SEQ ID NO: 196508 - DNA, 25 bp, Probe Sequence
ccgggccatcgccattgctgcgggt

SEQ ID NO: 196509 - DNA, 25 bp, Probe Sequence
ccggcctcccaaagtgctgggatta

SEQ ID NO: 196510 - DNA, 25 bp, Probe Sequence
ccggaatcccaaaggtagtgcttgt

SEQ ID NO: 196511 - DNA, 25 bp, Probe Sequence
ccgagcggctacaaagcgtttcttt

SEQ ID NO: 196512 - DNA, 25 bp, Probe Sequence
ccgagggatgatctagcctgattcc

SEQ ID NO: 196513 - DNA, 25 bp, Probe Sequence
ccgctttgatgtctatgcttggctc

SEQ ID NO: 196514 - DNA, 25 bp, Probe Sequence
ccgctacatactcatcatggggctc

SEQ ID NO: 196515 - DNA, 25 bp, Probe Sequence
ccgctagcaatcgcatcatcggtgc

SEQ ID NO: 196516 - DNA, 25 bp, Probe Sequence
ccgtagacatctggactcagtgctg

SEQ ID NO: 196517 - DNA, 25 bp, Probe Sequence
ccggcagaatctggccatgactggc

SEQ ID NO: 196518 - DNA, 25 bp, Probe Sequence
ccgcagcaaactgccgtgctggcag

SEQ ID NO: 196519 - DNA, 25 bp, Probe Sequence
ccgaggagttctacgtgctgagcga

SEQ ID NO: 196520 - DNA, 25 bp, Probe Sequence
ccgcagcgaggagtttctcattgct

SEQ ID NO: 196521 - DNA, 25 bp, Probe Sequence
ccgaggcgcgtttgtgtatatctgc

SEQ ID NO: 196522 - DNA, 25 bp, Probe Sequence
ccgcaacagcaggggcgatatcctc

SEQ ID NO: 196523 - DNA, 25 bp, Probe Sequence
ccgcaacatggggggcactcatcgg

SEQ ID NO: 196524 - DNA, 25 bp, Probe Sequence
ccgcagagcaggaccggactacacc

SEQ ID NO: 196525 - DNA, 25 bp, Probe Sequence
cctggagaaaactgacgagccggga

SEQ ID NO: 196526 - DNA, 25 bp, Probe Sequence
cctggatgctaacaggggcgccgta

SEQ ID NO: 196527 - DNA, 25 bp, Probe Sequence
cctggctctcacaggtagaccctgt

SEQ ID NO: 196528 - DNA, 25 bp, Probe Sequence
ccgtctgtcttcagtaactgctgct

SEQ ID NO: 196529 - DNA, 25 bp, Probe Sequence
cctgttgccttcagtgactacattc

SEQ ID NO: 196530 - DNA, 25 bp, Probe Sequence
cctgggcctggaaatgtctaaatct

SEQ ID NO: 196531 - DNA, 25 bp, Probe Sequence
ccagggcctggacagtcaaaaaagg

SEQ ID NO: 196532 - DNA, 25 bp, Probe Sequence
ccggcccccattgtacgcaaatggg

SEQ ID NO: 196533 - DNA, 25 bp, Probe Sequence
ccgtgcttcctcagttacacaaagg

SEQ ID NO: 196534 - DNA, 25 bp, Probe Sequence
tccagcgttcccactgtaaaaaact

SEQ ID NO: 196535 - DNA, 25 bp, Probe Sequence
cctggctaccttgtgggaataaaca

SEQ ID NO: 196536 - DNA, 25 bp, Probe Sequence
ccggttcagcctggctcggcaagta

SEQ ID NO: 196537 - DNA, 25 bp, Probe Sequence
ccggctgcttggaagcctggacgtg

SEQ ID NO: 196538 - DNA, 25 bp, Probe Sequence
ccggacctggttcattgacctgtgg

SEQ ID NO: 196539 - DNA, 25 bp, Probe Sequence
ccggactctagtctaggtccgcggt

SEQ ID NO: 196540 - DNA, 25 bp, Probe Sequence
cctggaccacggctagagttcccag

SEQ ID NO: 196541 - DNA, 25 bp, Probe Sequence
cctggtcacggagaagatgttcgcc

SEQ ID NO: 196542 - DNA, 25 bp, Probe Sequence
ccaggttctcaagacacgagtcccc

SEQ ID NO: 196543 - DNA, 25 bp, Probe Sequence
ccggagtctggtggtccggatgccc

SEQ ID NO: 196544 - DNA, 25 bp, Probe Sequence
ccggcagtctgggtactcagagatg

SEQ ID NO: 196545 - DNA, 25 bp, Probe Sequence
cctgggcattgacgtgcacgacgtg

SEQ ID NO: 196546 - DNA, 25 bp, Probe Sequence
cctgtggactacgaggccaccaggt

SEQ ID NO: 196547 - DNA, 25 bp, Probe Sequence
cctgggaagaaactccagccggagc

SEQ ID NO: 196548 - DNA, 25 bp, Probe Sequence
cctgcggggaactcagcaacggttt

SEQ ID NO: 196549 - DNA, 25 bp, Probe Sequence
ccttgggtcttctcaggaccgtagt

SEQ ID NO: 196550 - DNA, 25 bp, Probe Sequence
cctgtggtctctaaggaaaccctag

SEQ ID NO: 196551 - DNA, 25 bp, Probe Sequence
cctgttgttctcattacaacccttc

SEQ ID NO: 196552 - DNA, 25 bp, Probe Sequence
cctggttcctttgtgaacccttctg

SEQ ID NO: 196553 - DNA, 25 bp, Probe Sequence
ccggcttccttaggggacagactgt

SEQ ID NO: 196554 - DNA, 25 bp, Probe Sequence
ccggcttccttaggggacagactgt

SEQ ID NO: 196555 - DNA, 25 bp, Probe Sequence
ccggcgtcaaggtggagaccactga

SEQ ID NO: 196556 - DNA, 25 bp, Probe Sequence
ccggccttgaggtggaggactcaga

SEQ ID NO: 196557 - DNA, 25 bp, Probe Sequence
ccggactcgcagcaactgggatacg

SEQ ID NO: 196558 - DNA, 25 bp, Probe Sequence
ccggatgctccacgacaatcggaat

SEQ ID NO: 196559 - DNA, 25 bp, Probe Sequence
ccggagtggcatctcaactcggatt

SEQ ID NO: 196560 - DNA, 25 bp, Probe Sequence
ccgtgttggttttgactggatattc

SEQ ID NO: 196561 - DNA, 25 bp, Probe Sequence
cctgtgttccttgggactggttttg

SEQ ID NO: 196562 - DNA, 25 bp, Probe Sequence
cctggacttcattaaactggacttt

SEQ ID NO: 196563 - DNA, 25 bp, Probe Sequence
cctacctctccacaaggggattttg

SEQ ID NO: 196564 - DNA, 25 bp, Probe Sequence
ccgacgttacaatggtggagttggc

SEQ ID NO: 196565 - DNA, 25 bp, Probe Sequence
ccgaggtagacagatggcttgagct

SEQ ID NO: 196566 - DNA, 25 bp, Probe Sequence
ccgaggtgggcggaacacgatgtca

SEQ ID NO: 196567 - DNA, 25 bp, Probe Sequence
ccgggatgttgggataaagatttag

SEQ ID NO: 196568 - DNA, 25 bp, Probe Sequence
ccggcagagtttcaacgaggtgggc

SEQ ID NO: 196569 - DNA, 25 bp, Probe Sequence
ccgcacagggttgcaaccaggctgg

SEQ ID NO: 196570 - DNA, 25 bp, Probe Sequence
ccgaatgggcttaagaagaggtggt

SEQ ID NO: 196571 - DNA, 25 bp, Probe Sequence
ccgcactgggtggtcaaggagggga

SEQ ID NO: 196572 - DNA, 25 bp, Probe Sequence
gcccgctcggacatcaatggggccg

SEQ ID NO: 196573 - DNA, 25 bp, Probe Sequence
cctggctcggcaagtagatggcgat

SEQ ID NO: 196574 - DNA, 25 bp, Probe Sequence
cctccagcgagcacaagtgcaggtg

SEQ ID NO: 196575 - DNA, 25 bp, Probe Sequence
ccgatagcgctcacgcaagcatggt

SEQ ID NO: 196576 - DNA, 25 bp, Probe Sequence
cctgtagagatcaccaatctggact

SEQ ID NO: 196577 - DNA, 25 bp, Probe Sequence
cctgggcatgatgccccacgtacat

SEQ ID NO: 196578 - DNA, 25 bp, Probe Sequence
ccgggctgccacgaccaagtgacag

SEQ ID NO: 196579 - DNA, 25 bp, Probe Sequence
ccgtgcgcgcttgggagaaggccgg

SEQ ID NO: 196580 - DNA, 25 bp, Probe Sequence
ccgtccatttggcaggggtggctgc

SEQ ID NO: 196581 - DNA, 25 bp, Probe Sequence
ccgcagcagttcctgaatggggtgg

SEQ ID NO: 196582 - DNA, 25 bp, Probe Sequence
ccgacagcttctcgggcaggtttga

SEQ ID NO: 196583 - DNA, 25 bp, Probe Sequence
ccgacactgatgccagggaggtggg

SEQ ID NO: 196584 - DNA, 25 bp, Probe Sequence
ccgatcctgttctgagcaagctcga

SEQ ID NO: 196585 - DNA, 25 bp, Probe Sequence
ccgacatgctgttctctgtcactgt

SEQ ID NO: 196586 - DNA, 25 bp, Probe Sequence
ccgcaatagtgactctgtgcttgtc

SEQ ID NO: 196587 - DNA, 25 bp, Probe Sequence
ccgtcaattagcctgctgctttttg

SEQ ID NO: 196588 - DNA, 25 bp, Probe Sequence
ccgttttcattagtgcattctttgc

SEQ ID NO: 196589 - DNA, 25 bp, Probe Sequence
ccgtctctatataaggaattttccg

SEQ ID NO: 196590 - DNA, 25 bp, Probe Sequence
ccgtccgtgatgacagccagtttgt

SEQ ID NO: 196591 - DNA, 25 bp, Probe Sequence
ccggcctgttgtggggttttgtgat

SEQ ID NO: 196592 - DNA, 25 bp, Probe Sequence
ccgggtgatctttggtctcttcgga

SEQ ID NO: 196593 - DNA, 25 bp, Probe Sequence
ccgagaggtctgtggcaaagttgga

SEQ ID NO: 196594 - DNA, 25 bp, Probe Sequence
ccgagaggtctgtggcaaagttgga

SEQ ID NO: 196595 - DNA, 25 bp, Probe Sequence
cctgggtcttgctggacgagtgtgg

SEQ ID NO: 196596 - DNA, 25 bp, Probe Sequence
ccggagcttgtccggaagattgcaa

SEQ ID NO: 196597 - DNA, 25 bp, Probe Sequence
cctgggattaccctgcaaaacagga

SEQ ID NO: 196598 - DNA, 25 bp, Probe Sequence
gccgaggcagttgttgaaaccaaaa

SEQ ID NO: 196599 - DNA, 25 bp, Probe Sequence
ccgaacatgttgcttaccgcaccat

SEQ ID NO: 196600 - DNA, 25 bp, Probe Sequence
gccgaacatgttgcttaccgcacca

SEQ ID NO: 196601 - DNA, 25 bp, Probe Sequence
ccgtaggttgccaaccccatgaatt

SEQ ID NO: 196602 - DNA, 25 bp, Probe Sequence
ccggaggttcacaacctctgtggtc

SEQ ID NO: 196603 - DNA, 25 bp, Probe Sequence
ccggagccttacggcgatgggtggc

SEQ ID NO: 196604 - DNA, 25 bp, Probe Sequence
ccgggcgtcaagagcaggggtgggc

SEQ ID NO: 196605 - DNA, 25 bp, Probe Sequence
ccgggtgtaagcggcgtgtgcgtgt

SEQ ID NO: 196606 - DNA, 25 bp, Probe Sequence
ccgacgtgtacacgcaggtgtccgc

SEQ ID NO: 196607 - DNA, 25 bp, Probe Sequence
ccgacaagtcaagtgcttctgctcc

SEQ ID NO: 196608 - DNA, 25 bp, Probe Sequence
ccgaagcagtggatgcagcactccc

SEQ ID NO: 196609 - DNA, 25 bp, Probe Sequence
ccggatcacggcaatgcggctgcac

SEQ ID NO: 196610 - DNA, 25 bp, Probe Sequence
ccgtgatgacagccagtttgtgccg

SEQ ID NO: 196611 - DNA, 25 bp, Probe Sequence
ccgggacagtaggtctgggcggcac

SEQ ID NO: 196612 - DNA, 25 bp, Probe Sequence
ccggcaaattatgtggaggcgatcc

SEQ ID NO: 196613 - DNA, 25 bp, Probe Sequence
ccggatgactttgtggccgatgtcc

SEQ ID NO: 196614 - DNA, 25 bp, Probe Sequence
ccggatgactttgtggccgatgtcc

SEQ ID NO: 196615 - DNA, 25 bp, Probe Sequence
ccggatgaagagggctggccgtgtg

SEQ ID NO: 196616 - DNA, 25 bp, Probe Sequence
ccgagagagtgagagcgctcctggg

SEQ ID NO: 196617 - DNA, 25 bp, Probe Sequence
ccgaggtgcgtgtgctgcacctggc

SEQ ID NO: 196618 - DNA, 25 bp, Probe Sequence
ccgggatggtcttgatctcctgacc

SEQ ID NO: 196619 - DNA, 25 bp, Probe Sequence
ccgtgggacatcatgacatcatcac

SEQ ID NO: 196620 - DNA, 25 bp, Probe Sequence
ccgtgggacagcgaagtcagctccg

SEQ ID NO: 196621 - DNA, 25 bp, Probe Sequence
ccgttcagtcgccaatatgcagctc

SEQ ID NO: 196622 - DNA, 25 bp, Probe Sequence
ccgggctctcagccagtgagatggc

SEQ ID NO: 196623 - DNA, 25 bp, Probe Sequence
ccggaattcccgggatggcggacat

SEQ ID NO: 196624 - DNA, 25 bp, Probe Sequence
ccggaattcccgggatcatttctat

SEQ ID NO: 196625 - DNA, 25 bp, Probe Sequence
ccgacaatccccgaaagctgtttga

SEQ ID NO: 196626 - DNA, 25 bp, Probe Sequence
ccgacaatccccgaaagctgtttga

SEQ ID NO: 196627 - DNA, 25 bp, Probe Sequence
ccgtcatccccgggatcagttttgg

SEQ ID NO: 196628 - DNA, 25 bp, Probe Sequence
ccgtcatccccgggatcagttttgg

SEQ ID NO: 196629 - DNA, 25 bp, Probe Sequence
cctggactagccgggttgtatttgg

SEQ ID NO: 196630 - DNA, 25 bp, Probe Sequence
cctgtactgtcccggaggaggttgg

SEQ ID NO: 196631 - DNA, 25 bp, Probe Sequence
ccgaatttccgcctggggagtgttg

SEQ ID NO: 196632 - DNA, 25 bp, Probe Sequence
ccgagattcccgacgagagagactg

SEQ ID NO: 196633 - DNA, 25 bp, Probe Sequence
ccgacttcccctgggcaagagatgg

SEQ ID NO: 196634 - DNA, 25 bp, Probe Sequence
ccgtttctccttggtctaagtgtgc

SEQ ID NO: 196635 - DNA, 25 bp, Probe Sequence
ccgatttctctgttggtcggagtcg

SEQ ID NO: 196636 - DNA, 25 bp, Probe Sequence
ccgtctgtctcttggtattgggtaa

SEQ ID NO: 196637 - DNA, 25 bp, Probe Sequence
ccgtgctatccgagacactgggtgc

SEQ ID NO: 196638 - DNA, 25 bp, Probe Sequence
ccgtccccagagaaccatggagtct

SEQ ID NO: 196639 - DNA, 25 bp, Probe Sequence
ccgtcccctgagagggatgagtttg

SEQ ID NO: 196640 - DNA, 25 bp, Probe Sequence
cctggccacagttgaggggaacttt

SEQ ID NO: 196641 - DNA, 25 bp, Probe Sequence
cctgggacagtttatcatgaagcct

SEQ ID NO: 196642 - DNA, 25 bp, Probe Sequence
gccggcagatatgtttcaagacgct

SEQ ID NO: 196643 - DNA, 25 bp, Probe Sequence
gccggcagatatgtttcaagacgct

SEQ ID NO: 196644 - DNA, 25 bp, Probe Sequence
cctggagcagatgtcctagaaggtt

SEQ ID NO: 196645 - DNA, 25 bp, Probe Sequence
cctgggagagcctcttccaggtttt

SEQ ID NO: 196646 - DNA, 25 bp, Probe Sequence
cctgggtcagttctttgctggtggt

SEQ ID NO: 196647 - DNA, 25 bp, Probe Sequence
ccgggatcaaagtctgttctggcgg

SEQ ID NO: 196648 - DNA, 25 bp, Probe Sequence
ccgagacgaaggtgttctgcggcca

SEQ ID NO: 196649 - DNA, 25 bp, Probe Sequence
ccgagtagaagggtttgtgcaggac

SEQ ID NO: 196650 - DNA, 25 bp, Probe Sequence
ccgtataacggcattgtggaagcaa

SEQ ID NO: 196651 - DNA, 25 bp, Probe Sequence
ccgtaccactggcatcgtgatggac

SEQ ID NO: 196652 - DNA, 25 bp, Probe Sequence
ccgtaccactggcatcgtgatggac

SEQ ID NO: 196653 - DNA, 25 bp, Probe Sequence
ccgacctctctggagtcagtcagga

SEQ ID NO: 196654 - DNA, 25 bp, Probe Sequence
ccgaggtgctctgtttgtcgaaaca

SEQ ID NO: 196655 - DNA, 25 bp, Probe Sequence
ccgggctcacatggtttgtacaata

SEQ ID NO: 196656 - DNA, 25 bp, Probe Sequence
cctgggtcgatgctctttacaggcc

SEQ ID NO: 196657 - DNA, 25 bp, Probe Sequence
ccgggtggatggtccagtttggcca

SEQ ID NO: 196658 - DNA, 25 bp, Probe Sequence
ccgtgggcgaggtacagtgggaggc

SEQ ID NO: 196659 - DNA, 25 bp, Probe Sequence
ccgaggcggtgtttagaggaaggca

SEQ ID NO: 196660 - DNA, 25 bp, Probe Sequence
ccgggcacacttgtgtgacaaagga

SEQ ID NO: 196661 - DNA, 25 bp, Probe Sequence
ccgggccgcatgacggtcaataagg

SEQ ID NO: 196662 - DNA, 25 bp, Probe Sequence
cctggggctctgagggaaattgagg

SEQ ID NO: 196663 - DNA, 25 bp, Probe Sequence
cctggaacctgagagcgagtattat

SEQ ID NO: 196664 - DNA, 25 bp, Probe Sequence
cctggagggctagcaaggccttctc

SEQ ID NO: 196665 - DNA, 25 bp, Probe Sequence
ccggagggcagggcaagggcacctc

SEQ ID NO: 196666 - DNA, 25 bp, Probe Sequence
ccggagcggcagctcagcaagtggt

SEQ ID NO: 196667 - DNA, 25 bp, Probe Sequence
ccggtgtgcgggtgcactatggctt

SEQ ID NO: 196668 - DNA, 25 bp, Probe Sequence
ccgggagtggtgttcccagtgtggc

SEQ ID NO: 196669 - DNA, 25 bp, Probe Sequence
ccgaggcgggtggatcacgaggtag

SEQ ID NO: 196670 - DNA, 25 bp, Probe Sequence
ccgaggcgggcggatcacttgaggt

SEQ ID NO: 196671 - DNA, 25 bp, Probe Sequence
ccgaggcgggcggatcatgaggtca

SEQ ID NO: 196672 - DNA, 25 bp, Probe Sequence
cctggagcgggtgtttgtgcgcatg

SEQ ID NO: 196673 - DNA, 25 bp, Probe Sequence
ccggtgcaggagaattttgacgtga

SEQ ID NO: 196674 - DNA, 25 bp, Probe Sequence
ccggaatgggacctttgacagcaga

SEQ ID NO: 196675 - DNA, 25 bp, Probe Sequence
ccgagagatgtaaggctttgagaca

SEQ ID NO: 196676 - DNA, 25 bp, Probe Sequence
ccggggtgctgtgctgttagtaatg

SEQ ID NO: 196677 - DNA, 25 bp, Probe Sequence
ccggggtgagacgggcaaggacagg

SEQ ID NO: 196678 - DNA, 25 bp, Probe Sequence
ccggggacaagagcgccgagaaggg

SEQ ID NO: 196679 - DNA, 25 bp, Probe Sequence
ccggggccaagcagcagacaaggag

SEQ ID NO: 196680 - DNA, 25 bp, Probe Sequence
ccggggagaacatgcaccaggtggc

SEQ ID NO: 196681 - DNA, 25 bp, Probe Sequence
ccagggagacaagggagtcggtgtc

SEQ ID NO: 196682 - DNA, 25 bp, Probe Sequence
ccaggagtccggggtggctgggtgt

SEQ ID NO: 196683 - DNA, 25 bp, Probe Sequence
gccggaggttggacggatggggtat

SEQ ID NO: 196684 - DNA, 25 bp, Probe Sequence
ccgaggccgtggacgagggagaggt

SEQ ID NO: 196685 - DNA, 25 bp, Probe Sequence
ccggtttgtggacaggcaacaggtg

SEQ ID NO: 196686 - DNA, 25 bp, Probe Sequence
ccggttctgcagcactaggggaggg

SEQ ID NO: 196687 - DNA, 25 bp, Probe Sequence
ccggctcctccatcattggtggagg

SEQ ID NO: 196688 - DNA, 25 bp, Probe Sequence
ccgtccgctaagtatggcgggcggc

SEQ ID NO: 196689 - DNA, 25 bp, Probe Sequence
ccgatccgtgttgatggcgatggag

SEQ ID NO: 196690 - DNA, 25 bp, Probe Sequence
ccgacccgttgccatgattaagaga

SEQ ID NO: 196691 - DNA, 25 bp, Probe Sequence
ccgatgtccgtttgatcttcaagaa

SEQ ID NO: 196692 - DNA, 25 bp, Probe Sequence
ccgatgtccgtttgatcttcaagaa

SEQ ID NO: 196693 - DNA, 25 bp, Probe Sequence
ccgtgtaggctttttctgcaatgag

SEQ ID NO: 196694 - DNA, 25 bp, Probe Sequence
ccgggagagtgtttgatatgttaaa

SEQ ID NO: 196695 - DNA, 25 bp, Probe Sequence
ccgggccatggcagtgacatgtttg

SEQ ID NO: 196696 - DNA, 25 bp, Probe Sequence
cctggtgacaggagaacaatgttgg

SEQ ID NO: 196697 - DNA, 25 bp, Probe Sequence
cctggtgacaggagaacaatgttgg

SEQ ID NO: 196698 - DNA, 25 bp, Probe Sequence
cctgttgagaggggggactaagaga

SEQ ID NO: 196699 - DNA, 25 bp, Probe Sequence
ccgtggcatgcggggatggccatca

SEQ ID NO: 196700 - DNA, 25 bp, Probe Sequence
ccgtggactgcgtctaggtcatgtg

SEQ ID NO: 196701 - DNA, 25 bp, Probe Sequence
cctggccaccgactatgagaactat

SEQ ID NO: 196702 - DNA, 25 bp, Probe Sequence
ccggccccaagtgggctacatcagg

SEQ ID NO: 196703 - DNA, 25 bp, Probe Sequence
ccggccccaagtgggctacatcagg

SEQ ID NO: 196704 - DNA, 25 bp, Probe Sequence
cctggccccaaggctaggatcaaag

SEQ ID NO: 196705 - DNA, 25 bp, Probe Sequence
cctgggcccaagactcagggaaaca

SEQ ID NO: 196706 - DNA, 25 bp, Probe Sequence
cctgggctgggagccgtctgaaagc

SEQ ID NO: 196707 - DNA, 25 bp, Probe Sequence
ccgggcggtatacagttgctgcaag

SEQ ID NO: 196708 - DNA, 25 bp, Probe Sequence
ccgaggatgctgctaaacttgctgc

SEQ ID NO: 196709 - DNA, 25 bp, Probe Sequence
ccgagggctgctgcataagccctgc

SEQ ID NO: 196710 - DNA, 25 bp, Probe Sequence
ccgagtctggcagatccagtcttgc

SEQ ID NO: 196711 - DNA, 25 bp, Probe Sequence
ccgggtgagatccacaagtctctgg

SEQ ID NO: 196712 - DNA, 25 bp, Probe Sequence
cctggcttaacctgcatgttctggt

SEQ ID NO: 196713 - DNA, 25 bp, Probe Sequence
cctggctaacacagaccattctcta

SEQ ID NO: 196714 - DNA, 25 bp, Probe Sequence
ccggataacaagcagccatggcttt

SEQ ID NO: 196715 - DNA, 25 bp, Probe Sequence
ccggaaacacagctatcttctcctg

SEQ ID NO: 196716 - DNA, 25 bp, Probe Sequence
ccggaagacaccgtgttgcttctcc

SEQ ID NO: 196717 - DNA, 25 bp, Probe Sequence
ccgagtcagactttgtgttcatttc

SEQ ID NO: 196718 - DNA, 25 bp, Probe Sequence
ccagcactaagtactatgacccttt

SEQ ID NO: 196719 - DNA, 25 bp, Probe Sequence
ccgatctccgttaaggaccttatgt

SEQ ID NO: 196720 - DNA, 25 bp, Probe Sequence
ccgatacttgttattgtctgctttt

SEQ ID NO: 196721 - DNA, 25 bp, Probe Sequence
ccgagaccttggaatgttccatttg

SEQ ID NO: 196722 - DNA, 25 bp, Probe Sequence
ccgtcccttctgaatttaatttgca

SEQ ID NO: 196723 - DNA, 25 bp, Probe Sequence
ccgtttcttaagttgtcatttgtag

SEQ ID NO: 196724 - DNA, 25 bp, Probe Sequence
ccgtttcactcacagtgtcactgtc

SEQ ID NO: 196725 - DNA, 25 bp, Probe Sequence
ccgtagtgcctaccagacgattgac

SEQ ID NO: 196726 - DNA, 25 bp, Probe Sequence
ccgtactgattagtcaacagtggaa

SEQ ID NO: 196727 - DNA, 25 bp, Probe Sequence
ccggatctgtctttccgagtgtgag

SEQ ID NO: 196728 - DNA, 25 bp, Probe Sequence
ccgtgacgtatggacctagcctgga

SEQ ID NO: 196729 - DNA, 25 bp, Probe Sequence
cctgtcagcctaagacctgcaacat

SEQ ID NO: 196730 - DNA, 25 bp, Probe Sequence
cctgaacactgactgcacttaccag

SEQ ID NO: 196731 - DNA, 25 bp, Probe Sequence
cctatacacaaccaagtgaaaggat

SEQ ID NO: 196732 - DNA, 25 bp, Probe Sequence
ccgatccatcatccgcaatgtaaaa

SEQ ID NO: 196733 - DNA, 25 bp, Probe Sequence
ccgtcaagctggccaagcacaaaga

SEQ ID NO: 196734 - DNA, 25 bp, Probe Sequence
ccgtcaagctgccagatggatacga

SEQ ID NO: 196735 - DNA, 25 bp, Probe Sequence
ccgtgaagtgcctatgatgaagctt

SEQ ID NO: 196736 - DNA, 25 bp, Probe Sequence
ccgtagtgtctcattgcagataatt

SEQ ID NO: 196737 - DNA, 25 bp, Probe Sequence
ccgtgaggactaatccagatacatc

SEQ ID NO: 196738 - DNA, 25 bp, Probe Sequence
cctggaggcatctgttattcagctt

SEQ ID NO: 196739 - DNA, 25 bp, Probe Sequence
cctcaactacatggtttacatgttc

SEQ ID NO: 196740 - DNA, 25 bp, Probe Sequence
cctcaaccattgggaccatatcacc

SEQ ID NO: 196741 - DNA, 25 bp, Probe Sequence
cctaaacttgtatccaatggcccta

SEQ ID NO: 196742 - DNA, 25 bp, Probe Sequence
cctagaatcctgtcacactacagtc

SEQ ID NO: 196743 - DNA, 25 bp, Probe Sequence
cctgcaaacctaccagtgaggctcc

SEQ ID NO: 196744 - DNA, 25 bp, Probe Sequence
cctggaattctacctggagaccaga

SEQ ID NO: 196745 - DNA, 25 bp, Probe Sequence
cctggactctactttgggtcccaga

SEQ ID NO: 196746 - DNA, 25 bp, Probe Sequence
cctggttcaggcccagaggtccaag

SEQ ID NO: 196747 - DNA, 25 bp, Probe Sequence
cctgggtatccagggaggctctgca

SEQ ID NO: 196748 - DNA, 25 bp, Probe Sequence
ccgaggtatccacgtggaggtgccc

SEQ ID NO: 196749 - DNA, 25 bp, Probe Sequence
ccggggcattcaaagctgagctgtc

SEQ ID NO: 196750 - DNA, 25 bp, Probe Sequence
ccgggcgcaggaactgtgtgtgtcc

SEQ ID NO: 196751 - DNA, 25 bp, Probe Sequence
ccggtgtccgagttgctggatgacc

SEQ ID NO: 196752 - DNA, 25 bp, Probe Sequence
ccggtgtgagctggcgttggatacc

SEQ ID NO: 196753 - DNA, 25 bp, Probe Sequence
ccgggtgacgcccaagtgaagcgca

SEQ ID NO: 196754 - DNA, 25 bp, Probe Sequence
ccgggatggccgctaaatagctcac

SEQ ID NO: 196755 - DNA, 25 bp, Probe Sequence
ccgggtcactgctgtatataactcc

SEQ ID NO: 196756 - DNA, 25 bp, Probe Sequence
ccggggcccaatgaataatccgcca

SEQ ID NO: 196757 - DNA, 25 bp, Probe Sequence
cctgggtcccctgaatggatccagc

SEQ ID NO: 196758 - DNA, 25 bp, Probe Sequence
cctgaggctcccctgttataatggg

SEQ ID NO: 196759 - DNA, 25 bp, Probe Sequence
cctgagagaccagttcttttagaag

SEQ ID NO: 196760 - DNA, 25 bp, Probe Sequence
ccgggagcacacagcttactacatc

SEQ ID NO: 196761 - DNA, 25 bp, Probe Sequence
ccggagagcagagggggattccagc

SEQ ID NO: 196762 - DNA, 25 bp, Probe Sequence
cctggaaggtgcggggttctgacaa

SEQ ID NO: 196763 - DNA, 25 bp, Probe Sequence
ccggatcatggacaatggcttcgcc

SEQ ID NO: 196764 - DNA, 25 bp, Probe Sequence
ccggaatgtgtcaaaggcgtggtca

SEQ ID NO: 196765 - DNA, 25 bp, Probe Sequence
ccggaagcttctatgtggcatggcc

SEQ ID NO: 196766 - DNA, 25 bp, Probe Sequence
ccgtggacttgcgactgggagacca

SEQ ID NO: 196767 - DNA, 25 bp, Probe Sequence
ccgggtcattcaccaggtgacacca

SEQ ID NO: 196768 - DNA, 25 bp, Probe Sequence
ccgaggaagatcccgggagacctgg

SEQ ID NO: 196769 - DNA, 25 bp, Probe Sequence
ccgaggaagatgctctgcaggaaaa

SEQ ID NO: 196770 - DNA, 25 bp, Probe Sequence
ccggtgtggcagctctcagaaaaga

SEQ ID NO: 196771 - DNA, 25 bp, Probe Sequence
ccgtgttggtggcctctgaagggaa

SEQ ID NO: 196772 - DNA, 25 bp, Probe Sequence
gccggttcttacctcttaggtgaag

SEQ ID NO: 196773 - DNA, 25 bp, Probe Sequence
cctgagttttacccacacatattag

SEQ ID NO: 196774 - DNA, 25 bp, Probe Sequence
cctcgtctgaagtcaaccactactt

SEQ ID NO: 196775 - DNA, 25 bp, Probe Sequence
ccggacgaatgtgtcacctacatcc

SEQ ID NO: 196776 - DNA, 25 bp, Probe Sequence
ccggaaggatagcctcagcgtcaac

SEQ ID NO: 196777 - DNA, 25 bp, Probe Sequence
ccgtgaagaggacttccgcaaagct

SEQ ID NO: 196778 - DNA, 25 bp, Probe Sequence
ccggaaacggctccagcggaatcga

SEQ ID NO: 196779 - DNA, 25 bp, Probe Sequence
ccggcgacagggtctacaagaacga

SEQ ID NO: 196780 - DNA, 25 bp, Probe Sequence
ccggctgacggacaccagcagatac

SEQ ID NO: 196781 - DNA, 25 bp, Probe Sequence
cctggcgtaggacgaccatcttgaa

SEQ ID NO: 196782 - DNA, 25 bp, Probe Sequence
cctggggggggtgcacatcaaaatg

SEQ ID NO: 196783 - DNA, 25 bp, Probe Sequence
cctggtcttgggagtccatagaata

SEQ ID NO: 196784 - DNA, 25 bp, Probe Sequence
cctggtcccgagagctttcaaaagg

SEQ ID NO: 196785 - DNA, 25 bp, Probe Sequence
cctgtgtttctagcctttgcaaaac

SEQ ID NO: 196786 - DNA, 25 bp, Probe Sequence
ccgtggatttcatttggggcaaaga

SEQ ID NO: 196787 - DNA, 25 bp, Probe Sequence
ccgtggatttcgctgagcggcacgg

SEQ ID NO: 196788 - DNA, 25 bp, Probe Sequence
ccgtgtgcgtgctgaagggcgacgg

SEQ ID NO: 196789 - DNA, 25 bp, Probe Sequence
cctggggtgtaaatggtgagacggg

SEQ ID NO: 196790 - DNA, 25 bp, Probe Sequence
ccgtgggcagtgcgtgggagcacag

SEQ ID NO: 196791 - DNA, 25 bp, Probe Sequence
ccggctggcagcgtagtggggctgc

SEQ ID NO: 196792 - DNA, 25 bp, Probe Sequence
ccggcgcacagtgtgggttgcgggt

SEQ ID NO: 196793 - DNA, 25 bp, Probe Sequence
ccgtcccctccaggagtgtgagggt

SEQ ID NO: 196794 - DNA, 25 bp, Probe Sequence
ccggcccaacctgagggatgtggat

SEQ ID NO: 196795 - DNA, 25 bp, Probe Sequence
ccgtgccctgaggttggacgtgggg

SEQ ID NO: 196796 - DNA, 25 bp, Probe Sequence
cctggccctaggggtatcaggcggg

SEQ ID NO: 196797 - DNA, 25 bp, Probe Sequence
ccggccaggaggcttcaagaggagg

SEQ ID NO: 196798 - DNA, 25 bp, Probe Sequence
ccgtgccgtcatgggtgccatgaag

SEQ ID NO: 196799 - DNA, 25 bp, Probe Sequence
ccgtgtcggagccgcgcgagatatg

SEQ ID NO: 196800 - DNA, 25 bp, Probe Sequence
ccggtgggaggtgcatggcatcggc

SEQ ID NO: 196801 - DNA, 25 bp, Probe Sequence
ccggagggagcgtgtcagcacgtgc

SEQ ID NO: 196802 - DNA, 25 bp, Probe Sequence
cctcgtcaggtgcaggtcagcacgt

SEQ ID NO: 196803 - DNA, 25 bp, Probe Sequence
cctcgaagggtgtggcacaggctac

SEQ ID NO: 196804 - DNA, 25 bp, Probe Sequence
cctgagaagtggaccccagaggtga

SEQ ID NO: 196805 - DNA, 25 bp, Probe Sequence
cctgaagcactaccttcagagggga

SEQ ID NO: 196806 - DNA, 25 bp, Probe Sequence
cctggagcacttgttccgggatggt

SEQ ID NO: 196807 - DNA, 25 bp, Probe Sequence
cctggctgcacctgggtagggatgg

SEQ ID NO: 196808 - DNA, 25 bp, Probe Sequence
cctggcttcctggagttgatggaat

SEQ ID NO: 196809 - DNA, 25 bp, Probe Sequence
cctggttccctgctttggtgtaggg

SEQ ID NO: 196810 - DNA, 25 bp, Probe Sequence
cctgtttccaatcttcttgttaatg

SEQ ID NO: 196811 - DNA, 25 bp, Probe Sequence
cctgtttcccatctgtagttattcg

SEQ ID NO: 196812 - DNA, 25 bp, Probe Sequence
cctgctttccctggtaggtatttgc

SEQ ID NO: 196813 - DNA, 25 bp, Probe Sequence
cctgtttcgtccccagaaacttgag

SEQ ID NO: 196814 - DNA, 25 bp, Probe Sequence
ccgtctctctgcacagcacagaaat

SEQ ID NO: 196815 - DNA, 25 bp, Probe Sequence
ccgtctctctgcacagcacagaaat

SEQ ID NO: 196816 - DNA, 25 bp, Probe Sequence
ccggctgcttcggcatcaagcagaa

SEQ ID NO: 196817 - DNA, 25 bp, Probe Sequence
ccggtgcctgtggcgcaagagaacc

SEQ ID NO: 196818 - DNA, 25 bp, Probe Sequence
cctgtgggctgtgccaagtgtgccc

SEQ ID NO: 196819 - DNA, 25 bp, Probe Sequence
ccgtggtcaggtagagagtgagccc

SEQ ID NO: 196820 - DNA, 25 bp, Probe Sequence
cctgtggtgaggtgaagggcactct

SEQ ID NO: 196821 - DNA, 25 bp, Probe Sequence
cctgggcaaggaagcgaggccctct

SEQ ID NO: 196822 - DNA, 25 bp, Probe Sequence
cctgggcaaaagagcgagactccgt

SEQ ID NO: 196823 - DNA, 25 bp, Probe Sequence
cctgggccaaataggaagaccccat

SEQ ID NO: 196824 - DNA, 25 bp, Probe Sequence
cctccctccatgtggtaaaccactc

SEQ ID NO: 196825 - DNA, 25 bp, Probe Sequence
cctgcccacgtttctgtaaaatcag

SEQ ID NO: 196826 - DNA, 25 bp, Probe Sequence
cctggctcagttcttgaaaaacggt

SEQ ID NO: 196827 - DNA, 25 bp, Probe Sequence
ccggtccttcagaatccaaacacgc

SEQ ID NO: 196828 - DNA, 25 bp, Probe Sequence
cctggacgtacaataccacttccgc

SEQ ID NO: 196829 - DNA, 25 bp, Probe Sequence
cctgtacttacctactcacattgga

SEQ ID NO: 196830 - DNA, 25 bp, Probe Sequence
ccgtgactaccctatctcatataag

SEQ ID NO: 196831 - DNA, 25 bp, Probe Sequence
ccggaccaactgtctgctaagattg

SEQ ID NO: 196832 - DNA, 25 bp, Probe Sequence
ccggacaacacttcctcaagattgc

SEQ ID NO: 196833 - DNA, 25 bp, Probe Sequence
gctctggaaaccataattcaacttt

SEQ ID NO: 196834 - DNA, 25 bp, Probe Sequence
cctgtgtaaccagtccttcgtattc

SEQ ID NO: 196835 - DNA, 25 bp, Probe Sequence
ccaaagaaagcgtcccatcgtatcc

SEQ ID NO: 196836 - DNA, 25 bp, Probe Sequence
ccggaaatgaggaccatcactgtat

SEQ ID NO: 196837 - DNA, 25 bp, Probe Sequence
ccggacactgatgtcatcctcatgt

SEQ ID NO: 196838 - DNA, 25 bp, Probe Sequence
ccggaccatgtcatgtcctgcttgt

SEQ ID NO: 196839 - DNA, 25 bp, Probe Sequence
ccggcaccagtcagaccgatatgtc

SEQ ID NO: 196840 - DNA, 25 bp, Probe Sequence
ccggatcaacttcgacaaataccac

SEQ ID NO: 196841 - DNA, 25 bp, Probe Sequence
ccgtattagtatcgcctattaccat

SEQ ID NO: 196842 - DNA, 25 bp, Probe Sequence
ccgtttatgtgatgtgtattccatt

SEQ ID NO: 196843 - DNA, 25 bp, Probe Sequence
ccgtgattatggggctagttgtcct

SEQ ID NO: 196844 - DNA, 25 bp, Probe Sequence
cctgtgtgtcaagactcagttctaa

SEQ ID NO: 196845 - DNA, 25 bp, Probe Sequence
ccgtcattatcagcacatcgcgtgt

SEQ ID NO: 196846 - DNA, 25 bp, Probe Sequence
cctccatagaagacaccgggaccga

SEQ ID NO: 196847 - DNA, 25 bp, Probe Sequence
cctccatagaagacaccgggaccga

SEQ ID NO: 196848 - DNA, 25 bp, Probe Sequence
cctccacgggaagctgggagacgac

SEQ ID NO: 196849 - DNA, 25 bp, Probe Sequence
cctggcacggtgtattctggggcct

SEQ ID NO: 196850 - DNA, 25 bp, Probe Sequence
cctgagcaggggcatctgggaggct

SEQ ID NO: 196851 - DNA, 25 bp, Probe Sequence
cctggaggcacggatccggcagaag

SEQ ID NO: 196852 - DNA, 25 bp, Probe Sequence
ccggcatggagagagagcggaaagt

SEQ ID NO: 196853 - DNA, 25 bp, Probe Sequence
ccggaggcacagaaagggcaaccat

SEQ ID NO: 196854 - DNA, 25 bp, Probe Sequence
ccggacagaagttcagggaggcctg

SEQ ID NO: 196855 - DNA, 25 bp, Probe Sequence
cctataagaacgtggtgggcggcca

SEQ ID NO: 196856 - DNA, 25 bp, Probe Sequence
cctgtaaggtcgagtgtgggcatag

SEQ ID NO: 196857 - DNA, 25 bp, Probe Sequence
ccgtgtgggggcactgtgggaagcc

SEQ ID NO: 196858 - DNA, 25 bp, Probe Sequence
ccgggagggcgagcgagggagagga

SEQ ID NO: 196859 - DNA, 25 bp, Probe Sequence
ccgggagggcgagcgagggagagga

SEQ ID NO: 196860 - DNA, 25 bp, Probe Sequence
ccgggagggcgagcgagggagagga

SEQ ID NO: 196861 - DNA, 25 bp, Probe Sequence
ccggtgagtctggagtccggtcggg

SEQ ID NO: 196862 - DNA, 25 bp, Probe Sequence
ccggagagcctgtgtcattggtggg

SEQ ID NO: 196863 - DNA, 25 bp, Probe Sequence
ccgtggactgtgtgatatacctgag

SEQ ID NO: 196864 - DNA, 25 bp, Probe Sequence
cctggggctgtttttaccatgtttg

SEQ ID NO: 196865 - DNA, 25 bp, Probe Sequence
ccggggctgtaatgtctccaggaag

SEQ ID NO: 196866 - DNA, 25 bp, Probe Sequence
cctggggttctcagactgccaaaga

SEQ ID NO: 196867 - DNA, 25 bp, Probe Sequence
cctggtggtatctgaggtgaccaca

SEQ ID NO: 196868 - DNA, 25 bp, Probe Sequence
cctgcagttagtttgcgggaactca

SEQ ID NO: 196869 - DNA, 25 bp, Probe Sequence
cctgattttgctgctgggcaacttc

SEQ ID NO: 196870 - DNA, 25 bp, Probe Sequence
ccatgtttttggctgacacccattt

SEQ ID NO: 196871 - DNA, 25 bp, Probe Sequence
cctgtattttctctgaaactgatta

SEQ ID NO: 196872 - DNA, 25 bp, Probe Sequence
cctgtagatgtttgatggacaccgt

SEQ ID NO: 196873 - DNA, 25 bp, Probe Sequence
ccgtcaggatctcctggaacgccat

SEQ ID NO: 196874 - DNA, 25 bp, Probe Sequence
ccgtctggagctccggagatgacaa

SEQ ID NO: 196875 - DNA, 25 bp, Probe Sequence
ccgtctgtggctataatgaccaagg

SEQ ID NO: 196876 - DNA, 25 bp, Probe Sequence
ccgtctgattctaatagagagccgg

SEQ ID NO: 196877 - DNA, 25 bp, Probe Sequence
ccgtatgtcaccaagagatgatggt

SEQ ID NO: 196878 - DNA, 25 bp, Probe Sequence
ccgtgcatgtgccactcggaggaag

SEQ ID NO: 196879 - DNA, 25 bp, Probe Sequence
ccggcctgatgactctgtcagtgaa

SEQ ID NO: 196880 - DNA, 25 bp, Probe Sequence
cctggccagatgaaatgctgccgca

SEQ ID NO: 196881 - DNA, 25 bp, Probe Sequence
cctggccaataatgccccagaacca

SEQ ID NO: 196882 - DNA, 25 bp, Probe Sequence
cctgactactggtaccctcaggacc

SEQ ID NO: 196883 - DNA, 25 bp, Probe Sequence
cctgaccctttctgcgaatgtaacg

SEQ ID NO: 196884 - DNA, 25 bp, Probe Sequence
cctaacctttcgccgaatggggcag

SEQ ID NO: 196885 - DNA, 25 bp, Probe Sequence
cctgaacctttaggcttgtctcggc

SEQ ID NO: 196886 - DNA, 25 bp, Probe Sequence
cctggccttgttgtggggctcagga

SEQ ID NO: 196887 - DNA, 25 bp, Probe Sequence
cctggacttgttgctggggaactgc

SEQ ID NO: 196888 - DNA, 25 bp, Probe Sequence
cctggactagttcggcgaggagact

SEQ ID NO: 196889 - DNA, 25 bp, Probe Sequence
cctggaaagtatcagctctttgcct

SEQ ID NO: 196890 - DNA, 25 bp, Probe Sequence
ccggcaggtttgaagctgcttcttc

SEQ ID NO: 196891 - DNA, 25 bp, Probe Sequence
cctggacccgtgaagtcttcagctc

SEQ ID NO: 196892 - DNA, 25 bp, Probe Sequence
cctgaggcactcttccagccttcct

SEQ ID NO: 196893 - DNA, 25 bp, Probe Sequence
cctggataatgcttccgccttccaa

SEQ ID NO: 196894 - DNA, 25 bp, Probe Sequence
cctggataatgctttactttctgtg

SEQ ID NO: 196895 - DNA, 25 bp, Probe Sequence
ccggtgatactggtagttggtgtga

SEQ ID NO: 196896 - DNA, 25 bp, Probe Sequence
ccgggagacggaggttgcagtaagc

SEQ ID NO: 196897 - DNA, 25 bp, Probe Sequence
ccgggaggcggaggttgaggtgagc

SEQ ID NO: 196898 - DNA, 25 bp, Probe Sequence
cctggggtctggagttgatctggaa

SEQ ID NO: 196899 - DNA, 25 bp, Probe Sequence
cctgggcgtcatcttgtatatccta

SEQ ID NO: 196900 - DNA, 25 bp, Probe Sequence
ccgggagagcatccaggaagacctg

SEQ ID NO: 196901 - DNA, 25 bp, Probe Sequence
ccggattgcagaaggtacagagcct

SEQ ID NO: 196902 - DNA, 25 bp, Probe Sequence
ccggcagggagggtgacaagcacac

SEQ ID NO: 196903 - DNA, 25 bp, Probe Sequence
ccggcattatgccccagaacagacc

SEQ ID NO: 196904 - DNA, 25 bp, Probe Sequence
ccggtgcgtcctgaggagagaaccg

SEQ ID NO: 196905 - DNA, 25 bp, Probe Sequence
ccggaggtgctacaggggcaacctg

SEQ ID NO: 196906 - DNA, 25 bp, Probe Sequence
ccgggaggctatgagcgagtgcacc

SEQ ID NO: 196907 - DNA, 25 bp, Probe Sequence
ccgggatggctgagtgcacaggtgc

SEQ ID NO: 196908 - DNA, 25 bp, Probe Sequence
ccgggttgagaggagctctggtcgt

SEQ ID NO: 196909 - DNA, 25 bp, Probe Sequence
ccggcaatgtgagctggctctggaa

SEQ ID NO: 196910 - DNA, 25 bp, Probe Sequence
ccgtgaagatatggctgcccttgag

SEQ ID NO: 196911 - DNA, 25 bp, Probe Sequence
ccggaaacggctgtatctgcagtag

SEQ ID NO: 196912 - DNA, 25 bp, Probe Sequence
cctgcaaaatctcctattcccagta

SEQ ID NO: 196913 - DNA, 25 bp, Probe Sequence
cctggaagatgagctctatgcccag

SEQ ID NO: 196914 - DNA, 25 bp, Probe Sequence
cctgtgaatcatttctcatgccctg

SEQ ID NO: 196915 - DNA, 25 bp, Probe Sequence
cctggcgagatctgtctgccacgaa

SEQ ID NO: 196916 - DNA, 25 bp, Probe Sequence
ccgggagaatgattcccctcataga

SEQ ID NO: 196917 - DNA, 25 bp, Probe Sequence
cctggggacttcaactgcccagcaa

SEQ ID NO: 196918 - DNA, 25 bp, Probe Sequence
cctgggggctctagtcattccagtg

SEQ ID NO: 196919 - DNA, 25 bp, Probe Sequence
ccaggcgtggttactcacacctgta

SEQ ID NO: 196920 - DNA, 25 bp, Probe Sequence
ccgggtgtggtggctcacacctgta

SEQ ID NO: 196921 - DNA, 25 bp, Probe Sequence
ccggtgctgtgaggcttcacaacct

SEQ ID NO: 196922 - DNA, 25 bp, Probe Sequence
cctggtgatgtgttctacctacact

SEQ ID NO: 196923 - DNA, 25 bp, Probe Sequence
ccggtgagtcatttgcatcactcga

SEQ ID NO: 196924 - DNA, 25 bp, Probe Sequence
ccggtggtcatgccatgagcagcct

SEQ ID NO: 196925 - DNA, 25 bp, Probe Sequence
cctgaagggctcctgatcagtcttc

SEQ ID NO: 196926 - DNA, 25 bp, Probe Sequence
cctgcataaccggtggactcttatg

SEQ ID NO: 196927 - DNA, 25 bp, Probe Sequence
cctgagcaatggtgtagttcttaga

SEQ ID NO: 196928 - DNA, 25 bp, Probe Sequence
cctcaaacgtttctcctacaacaga

SEQ ID NO: 196929 - DNA, 25 bp, Probe Sequence
cctcaaatagtgatggtttacacct

SEQ ID NO: 196930 - DNA, 25 bp, Probe Sequence
cctctagacttgaggggctaccctg

SEQ ID NO: 196931 - DNA, 25 bp, Probe Sequence
cctgttcacttgtgcatgggctaaa

SEQ ID NO: 196932 - DNA, 25 bp, Probe Sequence
ccgtgctccctatcatggatcaaga

SEQ ID NO: 196933 - DNA, 25 bp, Probe Sequence
ccggtcgcctctggcagcgaaaaga

SEQ ID NO: 196934 - DNA, 25 bp, Probe Sequence
ccgtgaagacctggagcgactgaag

SEQ ID NO: 196935 - DNA, 25 bp, Probe Sequence
ccgggaactgctgacgcttgatcag

SEQ ID NO: 196936 - DNA, 25 bp, Probe Sequence
ccgggaactgctgacgcttgatgag

SEQ ID NO: 196937 - DNA, 25 bp, Probe Sequence
ccgggaagatctgaactggctgcat

SEQ ID NO: 196938 - DNA, 25 bp, Probe Sequence
cctggtccagttggagaccgtcaac

SEQ ID NO: 196939 - DNA, 25 bp, Probe Sequence
ccggattattgctgcaactggcaaa

SEQ ID NO: 196940 - DNA, 25 bp, Probe Sequence
ccggattattgctgcaactggcaaa

SEQ ID NO: 196941 - DNA, 25 bp, Probe Sequence
ccggtcttgattggcagtaggaaaa

SEQ ID NO: 196942 - DNA, 25 bp, Probe Sequence
cctggtcttgttcttatggactacc

SEQ ID NO: 196943 - DNA, 25 bp, Probe Sequence
cctgtagcttttctttttctccagg

SEQ ID NO: 196944 - DNA, 25 bp, Probe Sequence
cctgtagcttttctttttctccagg

SEQ ID NO: 196945 - DNA, 25 bp, Probe Sequence
cctgtgggttgtgctaatttctgtc

SEQ ID NO: 196946 - DNA, 25 bp, Probe Sequence
ccgggtttttggaatctacatgtct

SEQ ID NO: 196947 - DNA, 25 bp, Probe Sequence
ccgtgagctctaattggattcccag

SEQ ID NO: 196948 - DNA, 25 bp, Probe Sequence
ccgtgctctctaatttatcggcagc

SEQ ID NO: 196949 - DNA, 25 bp, Probe Sequence
ccggtgcctgtgaaattcgtcatgc

SEQ ID NO: 196950 - DNA, 25 bp, Probe Sequence
cctggacctgtgacattctggacta

SEQ ID NO: 196951 - DNA, 25 bp, Probe Sequence
cctggacctgtgacattctggacta

SEQ ID NO: 196952 - DNA, 25 bp, Probe Sequence
cctgtgaactgtcatgcctggattt

SEQ ID NO: 196953 - DNA, 25 bp, Probe Sequence
cctggacatttgcactgactttatc

SEQ ID NO: 196954 - DNA, 25 bp, Probe Sequence
cctggaatttggttactccactgcc

SEQ ID NO: 196955 - DNA, 25 bp, Probe Sequence
cctggacatttggtattctgccctc

SEQ ID NO: 196956 - DNA, 25 bp, Probe Sequence
cctggcacaataattttatggttat

SEQ ID NO: 196957 - DNA, 25 bp, Probe Sequence
cctggacgatttgattatggctaaa

SEQ ID NO: 196958 - DNA, 25 bp, Probe Sequence
cctggacgatttgattatggctaaa

SEQ ID NO: 196959 - DNA, 25 bp, Probe Sequence
cctggtctggacaaatattaataaa

SEQ ID NO: 196960 - DNA, 25 bp, Probe Sequence
cctggccaggactgtgatgttaaaa

SEQ ID NO: 196961 - DNA, 25 bp, Probe Sequence
cctggccagtccagtggttttcaaa

SEQ ID NO: 196962 - DNA, 25 bp, Probe Sequence
cctgtccatgctctttgtttttaaa

SEQ ID NO: 196963 - DNA, 25 bp, Probe Sequence
cctgtatatcatgacttatttttaa

SEQ ID NO: 196964 - DNA, 25 bp, Probe Sequence
cctgagtatcaggccttgttataaa

SEQ ID NO: 196965 - DNA, 25 bp, Probe Sequence
cctggctacagcgttttctatgaaa

SEQ ID NO: 196966 - DNA, 25 bp, Probe Sequence
ccggctcaccctggtttgtgagagt

SEQ ID NO: 196967 - DNA, 25 bp, Probe Sequence
cctggcctcatccttgtatttaatt

SEQ ID NO: 196968 - DNA, 25 bp, Probe Sequence
cctggcctcatccttgtatttaatt

SEQ ID NO: 196969 - DNA, 25 bp, Probe Sequence
cctggcattaagggcattttaccct

SEQ ID NO: 196970 - DNA, 25 bp, Probe Sequence
cctggctctgattcttcattatgta

SEQ ID NO: 196971 - DNA, 25 bp, Probe Sequence
cctgactaaagcttgaaatgctaca

SEQ ID NO: 196972 - DNA, 25 bp, Probe Sequence
cctggcaaccaaatcgaatctctca

SEQ ID NO: 196973 - DNA, 25 bp, Probe Sequence
cctggcaaccatgagcagtcctacg

SEQ ID NO: 196974 - DNA, 25 bp, Probe Sequence
cctggcacacagtgatcgccaatag

SEQ ID NO: 196975 - DNA, 25 bp, Probe Sequence
cctgtccctgatttctcgattaggc

SEQ ID NO: 196976 - DNA, 25 bp, Probe Sequence
cctgagtttaagaggttgaggcagc

SEQ ID NO: 196977 - DNA, 25 bp, Probe Sequence
cctgggtctaaggggcacgtggagc

SEQ ID NO: 196978 - DNA, 25 bp, Probe Sequence
cctgggttccagggtgacgtgaagg

SEQ ID NO: 196979 - DNA, 25 bp, Probe Sequence
ccgggatgtcctgtgtgacagcaga

SEQ ID NO: 196980 - DNA, 25 bp, Probe Sequence
ccgtgtggctacttctgtggaagca

SEQ ID NO: 196981 - DNA, 25 bp, Probe Sequence
ccgtgtcctgacttctggaatcttt

SEQ ID NO: 196982 - DNA, 25 bp, Probe Sequence
ccgtgtcctgacttctggaatcttt

SEQ ID NO: 196983 - DNA, 25 bp, Probe Sequence
ccgggccatgattatcgcagaacga

SEQ ID NO: 196984 - DNA, 25 bp, Probe Sequence
ccgtgggcatcttccagaaacgcaa

SEQ ID NO: 196985 - DNA, 25 bp, Probe Sequence
ccgtggtgccatccgagaatttgca

SEQ ID NO: 196986 - DNA, 25 bp, Probe Sequence
ccggatgtcccggagcaaggtggct

SEQ ID NO: 196987 - DNA, 25 bp, Probe Sequence
cctgtggatcccgtcaggagggact

SEQ ID NO: 196988 - DNA, 25 bp, Probe Sequence
ccggcctgcacaggtcgtgaggaaa

SEQ ID NO: 196989 - DNA, 25 bp, Probe Sequence
ccgtgatctgcaatggtcagctgtg

SEQ ID NO: 196990 - DNA, 25 bp, Probe Sequence
cctgtctgtagaggccactgtgttt

SEQ ID NO: 196991 - DNA, 25 bp, Probe Sequence
cctgggagtcatggctctggtgttt

SEQ ID NO: 196992 - DNA, 25 bp, Probe Sequence
cctggccatccatgtgatggttttg

SEQ ID NO: 196993 - DNA, 25 bp, Probe Sequence
cctggccatctcgggaagcttgatg

SEQ ID NO: 196994 - DNA, 25 bp, Probe Sequence
cctgggcatcctcaggctttgagga

SEQ ID NO: 196995 - DNA, 25 bp, Probe Sequence
cctgggcttgctcaactggagtggt

SEQ ID NO: 196996 - DNA, 25 bp, Probe Sequence
cctggccttctcaatggatgtgggg

SEQ ID NO: 196997 - DNA, 25 bp, Probe Sequence
cctgcactggtccaaggtcggagga

SEQ ID NO: 196998 - DNA, 25 bp, Probe Sequence
cctgtgccctggaagttcaggggcc

SEQ ID NO: 196999 - DNA, 25 bp, Probe Sequence
cctggacactgcctaaaagggtctc

SEQ ID NO: 197000 - DNA, 25 bp, Probe Sequence
cctgttcttgcctaataagtttctt

SEQ ID NO: 197001 - DNA, 25 bp, Probe Sequence
cctgtgctatgtgcagaaccacttt

SEQ ID NO: 197002 - DNA, 25 bp, Probe Sequence
ccggatgattgcgggtgccaatttc

SEQ ID NO: 197003 - DNA, 25 bp, Probe Sequence
cctggatggtcagcctccagatctt

SEQ ID NO: 197004 - DNA, 25 bp, Probe Sequence
cctggatgcagaagtcgcacaagac

SEQ ID NO: 197005 - DNA, 25 bp, Probe Sequence
gcccatatagatcgttacaaccgaa

SEQ ID NO: 197006 - DNA, 25 bp, Probe Sequence
gccctaaggtggaagccgcctaatg

SEQ ID NO: 197007 - DNA, 25 bp, Probe Sequence
gccttagaggtgctaattcccgaaa

SEQ ID NO: 197008 - DNA, 25 bp, Probe Sequence
ccttcggtcgcaatacttccaagaa

SEQ ID NO: 197009 - DNA, 25 bp, Probe Sequence
ccttcggtcgcaatacttccaagaa

SEQ ID NO: 197010 - DNA, 25 bp, Probe Sequence
cctgggatacagatacttacgaaat

SEQ ID NO: 197011 - DNA, 25 bp, Probe Sequence
cctcggatacgacactgtccaggtt

SEQ ID NO: 197012 - DNA, 25 bp, Probe Sequence
cctgggcaaagatttcctcactggt

SEQ ID NO: 197013 - DNA, 25 bp, Probe Sequence
cctgggctaagtttggcttgtgcgc

SEQ ID NO: 197014 - DNA, 25 bp, Probe Sequence
cctccagctgaactttggtttttct

SEQ ID NO: 197015 - DNA, 25 bp, Probe Sequence
cctcagcgtgaatttgggggatttt

SEQ ID NO: 197016 - DNA, 25 bp, Probe Sequence
cctagcgggcagggttgggctgaat

SEQ ID NO: 197017 - DNA, 25 bp, Probe Sequence
cctagcgggcagggttgggctgaat

SEQ ID NO: 197018 - DNA, 25 bp, Probe Sequence
cctacacggaccgttgggggcatca

SEQ ID NO: 197019 - DNA, 25 bp, Probe Sequence
cctgcaacggagactccggtgggcc

SEQ ID NO: 197020 - DNA, 25 bp, Probe Sequence
ccttcctaggacacaggggactcct

SEQ ID NO: 197021 - DNA, 25 bp, Probe Sequence
cctgtcccaggaccaaatggaacca

SEQ ID NO: 197022 - DNA, 25 bp, Probe Sequence
cctggccaaggtcatccatgacaac

SEQ ID NO: 197023 - DNA, 25 bp, Probe Sequence
cctggccaagagaccagcctggcca

SEQ ID NO: 197024 - DNA, 25 bp, Probe Sequence
cctggccaagagaccagcctggcca

SEQ ID NO: 197025 - DNA, 25 bp, Probe Sequence
cctgtgcaacaaatctgcccttgta

SEQ ID NO: 197026 - DNA, 25 bp, Probe Sequence
cctgtcaaagcaaccctctgagttg

SEQ ID NO: 197027 - DNA, 25 bp, Probe Sequence
cctgaaacacatctccattgactgt

SEQ ID NO: 197028 - DNA, 25 bp, Probe Sequence
cctgaagcacgacttccaggcactg

SEQ ID NO: 197029 - DNA, 25 bp, Probe Sequence
cctaaacgtggaatgcatgtgactg

SEQ ID NO: 197030 - DNA, 25 bp, Probe Sequence
cctaatgacgtggactttagcatgc

SEQ ID NO: 197031 - DNA, 25 bp, Probe Sequence
cctggatgacgtgtccttgacacat

SEQ ID NO: 197032 - DNA, 25 bp, Probe Sequence
ccggcagaaggactcctatatcgcc

SEQ ID NO: 197033 - DNA, 25 bp, Probe Sequence
ccatgacaaaggattttacgtttat

SEQ ID NO: 197034 - DNA, 25 bp, Probe Sequence
cctgatagaacagactttacttttc

SEQ ID NO: 197035 - DNA, 25 bp, Probe Sequence
cctgactagaaaagctattacctta

SEQ ID NO: 197036 - DNA, 25 bp, Probe Sequence
cctcctttaactgagtcatcatctt

SEQ ID NO: 197037 - DNA, 25 bp, Probe Sequence
ccatccctaaacttatacttgcttg

SEQ ID NO: 197038 - DNA, 25 bp, Probe Sequence
cctggcactatatcctaactgtagg

SEQ ID NO: 197039 - DNA, 25 bp, Probe Sequence
cctggcagctaaggcctccagggcg

SEQ ID NO: 197040 - DNA, 25 bp, Probe Sequence
cctggctggatgagccgccactggc

SEQ ID NO: 197041 - DNA, 25 bp, Probe Sequence
ccgggcgatgcttgtgcctgagctg

SEQ ID NO: 197042 - DNA, 25 bp, Probe Sequence
cctgagtatgatcagtggcttctgt

SEQ ID NO: 197043 - DNA, 25 bp, Probe Sequence
cctgattatgggccaggcttctgct

SEQ ID NO: 197044 - DNA, 25 bp, Probe Sequence
cctgataagcggctggtgacgctgc

SEQ ID NO: 197045 - DNA, 25 bp, Probe Sequence
cctgatagtcagttcgaatgcccgg

SEQ ID NO: 197046 - DNA, 25 bp, Probe Sequence
cctgtagtcgcagctactcgcgagg

SEQ ID NO: 197047 - DNA, 25 bp, Probe Sequence
cctgtagtcgcagctactcgcgagg

SEQ ID NO: 197048 - DNA, 25 bp, Probe Sequence
cctggatgtttatcacccaagccta

SEQ ID NO: 197049 - DNA, 25 bp, Probe Sequence
cctaggtatatatgcctcaaaaatt

SEQ ID NO: 197050 - DNA, 25 bp, Probe Sequence
cctgaaattcagtatccacccaaat

SEQ ID NO: 197051 - DNA, 25 bp, Probe Sequence
cctgggtgtctgtatacacgccaaa

SEQ ID NO: 197052 - DNA, 25 bp, Probe Sequence
cctgggagggtttgcaggaagcaca

SEQ ID NO: 197053 - DNA, 25 bp, Probe Sequence
cctgtgtagaggacccagtgagacg

SEQ ID NO: 197054 - DNA, 25 bp, Probe Sequence
cctggtcatggagaccttgaacgaa

SEQ ID NO: 197055 - DNA, 25 bp, Probe Sequence
cctccttggcacccgtgaaattgaa

SEQ ID NO: 197056 - DNA, 25 bp, Probe Sequence
cctcctttggcaacggtgacttgag

SEQ ID NO: 197057 - DNA, 25 bp, Probe Sequence
ccttcctgggcatggagtcctgtgg

SEQ ID NO: 197058 - DNA, 25 bp, Probe Sequence
cctctactggagggtgaaaggccaa

SEQ ID NO: 197059 - DNA, 25 bp, Probe Sequence
cctgctacggggcagacacccgaag

SEQ ID NO: 197060 - DNA, 25 bp, Probe Sequence
ccggacaggggaccccaatagcaag

SEQ ID NO: 197061 - DNA, 25 bp, Probe Sequence
ccggacaggtggcagctgccaacaa

SEQ ID NO: 197062 - DNA, 25 bp, Probe Sequence
ccggaccctgagccagatgacaaga

SEQ ID NO: 197063 - DNA, 25 bp, Probe Sequence
cctggatcccggcagaagctatgaa

SEQ ID NO: 197064 - DNA, 25 bp, Probe Sequence
cctggaccctggtgggcattgtgtc

SEQ ID NO: 197065 - DNA, 25 bp, Probe Sequence
ccggaaggtgggtgacatgtggatc

SEQ ID NO: 197066 - DNA, 25 bp, Probe Sequence
ccgggtgtatggcaagacttgtgag

SEQ ID NO: 197067 - DNA, 25 bp, Probe Sequence
cctgcggctggatggaaactacttg

SEQ ID NO: 197068 - DNA, 25 bp, Probe Sequence
cctgcgcctgtgtggaaatttggag

SEQ ID NO: 197069 - DNA, 25 bp, Probe Sequence
ccttcgggaggcaaactcctggatg

SEQ ID NO: 197070 - DNA, 25 bp, Probe Sequence
cctgaagggggacactccatgagtg

SEQ ID NO: 197071 - DNA, 25 bp, Probe Sequence
cctgtcggttttcaccatggagcag

SEQ ID NO: 197072 - DNA, 25 bp, Probe Sequence
cctgtctgggaatacctctgggagc

SEQ ID NO: 197073 - DNA, 25 bp, Probe Sequence
cctccaggagtatggcactcagggg

SEQ ID NO: 197074 - DNA, 25 bp, Probe Sequence
cctccaggagtcgctgtgttgggag

SEQ ID NO: 197075 - DNA, 25 bp, Probe Sequence
cctgtgcagggtatcctgtagggtg

SEQ ID NO: 197076 - DNA, 25 bp, Probe Sequence
cctggtgcggtaccagtgcacagag

SEQ ID NO: 197077 - DNA, 25 bp, Probe Sequence
ccggtgcgaggaagaagatgtggag

SEQ ID NO: 197078 - DNA, 25 bp, Probe Sequence
ccggctggcagaggcgaactgtaga

SEQ ID NO: 197079 - DNA, 25 bp, Probe Sequence
ccggtggcgatgtcagcggatgtca

SEQ ID NO: 197080 - DNA, 25 bp, Probe Sequence
ccgggtggataaggcagctgctgca

SEQ ID NO: 197081 - DNA, 25 bp, Probe Sequence
ccgggggcagcaagcatctatgctg

SEQ ID NO: 197082 - DNA, 25 bp, Probe Sequence
ccggcggacagctgcttacatgttc

SEQ ID NO: 197083 - DNA, 25 bp, Probe Sequence
cctgtgggactctgttgatggtgtc

SEQ ID NO: 197084 - DNA, 25 bp, Probe Sequence
cctggccagaattggactgctgtgg

SEQ ID NO: 197085 - DNA, 25 bp, Probe Sequence
cctggcacagaatatgcactgtcca

SEQ ID NO: 197086 - DNA, 25 bp, Probe Sequence
cctggccagaacttccaacactatg

SEQ ID NO: 197087 - DNA, 25 bp, Probe Sequence
cctggcctacactgattatcacaag

SEQ ID NO: 197088 - DNA, 25 bp, Probe Sequence
cctggcctacacagctgaaggagag

SEQ ID NO: 197089 - DNA, 25 bp, Probe Sequence
cctggcctagacctctggaattgag

SEQ ID NO: 197090 - DNA, 25 bp, Probe Sequence
cctggcctagacctctggaattgag

SEQ ID NO: 197091 - DNA, 25 bp, Probe Sequence
cctgtaccaggccttggccagtggt

SEQ ID NO: 197092 - DNA, 25 bp, Probe Sequence
cctgtacactgacttgagaccagtt

SEQ ID NO: 197093 - DNA, 25 bp, Probe Sequence
cctgaagcaatcctaagatcctgct

SEQ ID NO: 197094 - DNA, 25 bp, Probe Sequence
cctggcacaactctagcatatctgt

SEQ ID NO: 197095 - DNA, 25 bp, Probe Sequence
ccggcataatgccagtacagactta

SEQ ID NO: 197096 - DNA, 25 bp, Probe Sequence
cctggcatggtggtgtacgcctgta

SEQ ID NO: 197097 - DNA, 25 bp, Probe Sequence
cctggcatggtggtgtacgcctgta

SEQ ID NO: 197098 - DNA, 25 bp, Probe Sequence
cctggcacgatggtgggcacttgta

SEQ ID NO: 197099 - DNA, 25 bp, Probe Sequence
cctggaggtcctctgattctgatgt

SEQ ID NO: 197100 - DNA, 25 bp, Probe Sequence
cctggagggctccctgatctatgaa

SEQ ID NO: 197101 - DNA, 25 bp, Probe Sequence
cctggagggctccctgatctatgaa

SEQ ID NO: 197102 - DNA, 25 bp, Probe Sequence
cctggagcggctgcaatgccttaac

SEQ ID NO: 197103 - DNA, 25 bp, Probe Sequence
cctggacgacctgatcatggctaaa

SEQ ID NO: 197104 - DNA, 25 bp, Probe Sequence
cctggacgacctgatcatggctaaa

SEQ ID NO: 197105 - DNA, 25 bp, Probe Sequence
cctgcaacgaccacgtgagagccaa

SEQ ID NO: 197106 - DNA, 25 bp, Probe Sequence
cctccagaacgcaggtgctggcgcc

SEQ ID NO: 197107 - DNA, 25 bp, Probe Sequence
cctccagaaccccatcatcgtggag

SEQ ID NO: 197108 - DNA, 25 bp, Probe Sequence
cctgaaacaacccgacgctggaagt

SEQ ID NO: 197109 - DNA, 25 bp, Probe Sequence
ggtcaaacatttgtgtgagggtaca

SEQ ID NO: 197110 - DNA, 25 bp, Probe Sequence
cctgtaatcccagcactttgggagg

SEQ ID NO: 197111 - DNA, 25 bp, Probe Sequence
cctgctaattccaccttatggggga

SEQ ID NO: 197112 - DNA, 25 bp, Probe Sequence
ttccggtttcttcatattgaggggc

SEQ ID NO: 197113 - DNA, 25 bp, Probe Sequence
cctcggttcctttgtactggaggag

SEQ ID NO: 197114 - DNA, 25 bp, Probe Sequence
cctgtttcttcctgtgactgtagaa

SEQ ID NO: 197115 - DNA, 25 bp, Probe Sequence
cctgtttcttcctgtgactgtagag

SEQ ID NO: 197116 - DNA, 25 bp, Probe Sequence
cctgtctttccttttttctgagaga

SEQ ID NO: 197117 - DNA, 25 bp, Probe Sequence
cctggtgttcacatctgtcccaggc

SEQ ID NO: 197118 - DNA, 25 bp, Probe Sequence
cctggtgctcaaatagctgctccac

SEQ ID NO: 197119 - DNA, 25 bp, Probe Sequence
cctgtgcctaagaagctgctcatga

SEQ ID NO: 197120 - DNA, 25 bp, Probe Sequence
ccggcactcagttatgcagatgatc

SEQ ID NO: 197121 - DNA, 25 bp, Probe Sequence
cctggcaccagtgcccatgatcatc

SEQ ID NO: 197122 - DNA, 25 bp, Probe Sequence
cctggccgcagtgagtcaggctggg

SEQ ID NO: 197123 - DNA, 25 bp, Probe Sequence
cctgggcgcgtgagtgcagggtctg

SEQ ID NO: 197124 - DNA, 25 bp, Probe Sequence
cctggagaattcagtgcagccaggg

SEQ ID NO: 197125 - DNA, 25 bp, Probe Sequence
cctggctgagcaactgggctgtagg

SEQ ID NO: 197126 - DNA, 25 bp, Probe Sequence
cctgtcttgtgggagatgcgtaggg

SEQ ID NO: 197127 - DNA, 25 bp, Probe Sequence
cctgctgctttgcggggggcagggc

SEQ ID NO: 197128 - DNA, 25 bp, Probe Sequence
cctggttgggggagctggtgtggtc

SEQ ID NO: 197129 - DNA, 25 bp, Probe Sequence
ccttgttggggagagaacttggttg

SEQ ID NO: 197130 - DNA, 25 bp, Probe Sequence
gccttttgagggtggaatttccctg

SEQ ID NO: 197131 - DNA, 25 bp, Probe Sequence
gccttcccaaaatggcaacttccca

SEQ ID NO: 197132 - DNA, 25 bp, Probe Sequence
cctgacccaaaaagccatgattgtc

SEQ ID NO: 197133 - DNA, 25 bp, Probe Sequence
cctgacccagaaaagtggcttgctt

SEQ ID NO: 197134 - DNA, 25 bp, Probe Sequence
cctgtctcatagagaagccgcttcc

SEQ ID NO: 197135 - DNA, 25 bp, Probe Sequence
cctgtccagatggttaccatttgcc

SEQ ID NO: 197136 - DNA, 25 bp, Probe Sequence
cctggccgtgttgtcacatttcggc

SEQ ID NO: 197137 - DNA, 25 bp, Probe Sequence
ccggccatgtttgctggatatgagg

SEQ ID NO: 197138 - DNA, 25 bp, Probe Sequence
cctaagatgtttgatggattgattg

SEQ ID NO: 197139 - DNA, 25 bp, Probe Sequence
cctgaagtctagcttggatatatgc

SEQ ID NO: 197140 - DNA, 25 bp, Probe Sequence
cctgacagtcatacctgaaacaatc

SEQ ID NO: 197141 - DNA, 25 bp, Probe Sequence
cctgcgggcttcggaaagttccagg

SEQ ID NO: 197142 - DNA, 25 bp, Probe Sequence
cctgcagattgcatgggcataaatt

SEQ ID NO: 197143 - DNA, 25 bp, Probe Sequence
cctgcagatggagggtgcctactgg

SEQ ID NO: 197144 - DNA, 25 bp, Probe Sequence
cctgttgtgaggttccttccagggg

SEQ ID NO: 197145 - DNA, 25 bp, Probe Sequence
cctgttgtggagtacgctttggact

SEQ ID NO: 197146 - DNA, 25 bp, Probe Sequence
cctggagtcagggattgtttggcac

SEQ ID NO: 197147 - DNA, 25 bp, Probe Sequence
cctggatgtcatcgggtttggggtc

SEQ ID NO: 197148 - DNA, 25 bp, Probe Sequence
ccggagatcatgcaagctggtggct

SEQ ID NO: 197149 - DNA, 25 bp, Probe Sequence
cctggatgtggccatagtgtttgtc

SEQ ID NO: 197150 - DNA, 25 bp, Probe Sequence
cctggagtactgtatcatggtcatt

SEQ ID NO: 197151 - DNA, 25 bp, Probe Sequence
cctgggccagtttctggtcatgccc

SEQ ID NO: 197152 - DNA, 25 bp, Probe Sequence
cctggggcaatgtgtgtgcttcctc

SEQ ID NO: 197153 - DNA, 25 bp, Probe Sequence
cctgatagccaacagctgggtcctg

SEQ ID NO: 197154 - DNA, 25 bp, Probe Sequence
cctgtgcgccaggtacaagcagtca

SEQ ID NO: 197155 - DNA, 25 bp, Probe Sequence
cctgtggcctggtcctatagccaaa

SEQ ID NO: 197156 - DNA, 25 bp, Probe Sequence
cctgatgagtgttacctggggaaag

SEQ ID NO: 197157 - DNA, 25 bp, Probe Sequence
cctgatggttctacctgctgtgagc

SEQ ID NO: 197158 - DNA, 25 bp, Probe Sequence
cctggcagtgttacctcatgatgtc

SEQ ID NO: 197159 - DNA, 25 bp, Probe Sequence
cctgggcagcttctgcatgctgatt

SEQ ID NO: 197160 - DNA, 25 bp, Probe Sequence
ccggagcagattgcagcggacatcc

SEQ ID NO: 197161 - DNA, 25 bp, Probe Sequence
cctggacatggagagggacaccctc

SEQ ID NO: 197162 - DNA, 25 bp, Probe Sequence
cctggacatcgtcagagccaacacc

SEQ ID NO: 197163 - DNA, 25 bp, Probe Sequence
cctggagaccgaagtgccatcacac

SEQ ID NO: 197164 - DNA, 25 bp, Probe Sequence
cctggagtccatgagggctcctttc

SEQ ID NO: 197165 - DNA, 25 bp, Probe Sequence
cctgcagattccagcagggtccctc

SEQ ID NO: 197166 - DNA, 25 bp, Probe Sequence
cctgtgtcgctaagaagctacccat

SEQ ID NO: 197167 - DNA, 25 bp, Probe Sequence
cctgggcgctgatgaaggagatcga

SEQ ID NO: 197168 - DNA, 25 bp, Probe Sequence
cctggctgcgcatcgatgaccagac

SEQ ID NO: 197169 - DNA, 25 bp, Probe Sequence
cctggctgctattgcaggaggccac

SEQ ID NO: 197170 - DNA, 25 bp, Probe Sequence
cctcagcctatgtctgagcaggaca

SEQ ID NO: 197171 - DNA, 25 bp, Probe Sequence
cctggctcagctgctggtggatcag

SEQ ID NO: 197172 - DNA, 25 bp, Probe Sequence
cctgtgtagtccagctgtgctcaaa

SEQ ID NO: 197173 - DNA, 25 bp, Probe Sequence
cctgttaccttgctagctgcaaaat

SEQ ID NO: 197174 - DNA, 25 bp, Probe Sequence
cctggataccgcagctaggaataat

SEQ ID NO: 197175 - DNA, 25 bp, Probe Sequence
cctgtgtaccagtgccacggagagt

SEQ ID NO: 197176 - DNA, 25 bp, Probe Sequence
cctgtgttccacttcctgtggaggt

SEQ ID NO: 197177 - DNA, 25 bp, Probe Sequence
cctggttccatgtttctgatgggga

SEQ ID NO: 197178 - DNA, 25 bp, Probe Sequence
cctgggattcagctgttgttgaagg

SEQ ID NO: 197179 - DNA, 25 bp, Probe Sequence
cctgtggtctggcctaggttaagtg

SEQ ID NO: 197180 - DNA, 25 bp, Probe Sequence
cctgtggcctggcctacactgatta

SEQ ID NO: 197181 - DNA, 25 bp, Probe Sequence
cctgtgcccaggctggagctgatgt

SEQ ID NO: 197182 - DNA, 25 bp, Probe Sequence
cctgtgttaggaaactgctagtaag

SEQ ID NO: 197183 - DNA, 25 bp, Probe Sequence
cctggccttgtaagactcacgtaag

SEQ ID NO: 197184 - DNA, 25 bp, Probe Sequence
cctggacattaaacaccactgcgca

SEQ ID NO: 197185 - DNA, 25 bp, Probe Sequence
cctggacttacaaatgccaaggggg

SEQ ID NO: 197186 - DNA, 25 bp, Probe Sequence
cctggacccgaagtccaagtggcga

SEQ ID NO: 197187 - DNA, 25 bp, Probe Sequence
cctggacacccctcgaaggagaggg

SEQ ID NO: 197188 - DNA, 25 bp, Probe Sequence
cctggacaccgcgggccaggaagag

SEQ ID NO: 197189 - DNA, 25 bp, Probe Sequence
cctggaggcggggtctgcaggacga

SEQ ID NO: 197190 - DNA, 25 bp, Probe Sequence
ccggcatggctgggaactgcagacc

SEQ ID NO: 197191 - DNA, 25 bp, Probe Sequence
ccggcggctgatcaccaagccgcag

SEQ ID NO: 197192 - DNA, 25 bp, Probe Sequence
ccggcggctgatcaccaagccgcag

SEQ ID NO: 197193 - DNA, 25 bp, Probe Sequence
ccggcctctgagcaagacagtgcgc

SEQ ID NO: 197194 - DNA, 25 bp, Probe Sequence
ccggcctctgagcaagacagtgcgc

SEQ ID NO: 197195 - DNA, 25 bp, Probe Sequence
cctggccttgaacgagtgcgggctg

SEQ ID NO: 197196 - DNA, 25 bp, Probe Sequence
cctggcgcttaccgaggaggagctg

SEQ ID NO: 197197 - DNA, 25 bp, Probe Sequence
cctgggtttcaccagtgacgcgttc

SEQ ID NO: 197198 - DNA, 25 bp, Probe Sequence
ccggactgttattaggactctgtat

SEQ ID NO: 197199 - DNA, 25 bp, Probe Sequence
cctgggggtcattagaagctcttct

SEQ ID NO: 197200 - DNA, 25 bp, Probe Sequence
cctcggttctcattaaagtatttat

SEQ ID NO: 197201 - DNA, 25 bp, Probe Sequence
cctccgtctctatataaggaatttt

SEQ ID NO: 197202 - DNA, 25 bp, Probe Sequence
cctgccgacttgtgaagaaggttcc

SEQ ID NO: 197203 - DNA, 25 bp, Probe Sequence
cctgaggtattgtgaagattagttc

SEQ ID NO: 197204 - DNA, 25 bp, Probe Sequence
cctgaagttctgtgatagaccttaa

SEQ ID NO: 197205 - DNA, 25 bp, Probe Sequence
cctgggttctgggtataatttgcac

SEQ ID NO: 197206 - DNA, 25 bp, Probe Sequence
cctgtatttattgtcccatttgcaa

SEQ ID NO: 197207 - DNA, 25 bp, Probe Sequence
cctgtctttattaacgaatactaca

SEQ ID NO: 197208 - DNA, 25 bp, Probe Sequence
cctgtcttctgttttatagaaattg

SEQ ID NO: 197209 - DNA, 25 bp, Probe Sequence
ccaccatctggagttttaaaaggct

SEQ ID NO: 197210 - DNA, 25 bp, Probe Sequence
ccaccatctggagttttaaaaggct

SEQ ID NO: 197211 - DNA, 25 bp, Probe Sequence
ccaccatctggagttttaaaaggct

SEQ ID NO: 197212 - DNA, 25 bp, Probe Sequence
cctccttggaacatgtaggaaggcc

SEQ ID NO: 197213 - DNA, 25 bp, Probe Sequence
cctccttggattccttcacgaaagc

SEQ ID NO: 197214 - DNA, 25 bp, Probe Sequence
cctctttgggttgcagactgccaac

SEQ ID NO: 197215 - DNA, 25 bp, Probe Sequence
cctgttgtcggggccaggtacatcc

SEQ ID NO: 197216 - DNA, 25 bp, Probe Sequence
cctgtactcttccactcaggtatcc

SEQ ID NO: 197217 - DNA, 25 bp, Probe Sequence
cctgtacctatgggaagcctgtcac

SEQ ID NO: 197218 - DNA, 25 bp, Probe Sequence
cctgtcccgatggcgagtgtttgcc

SEQ ID NO: 197219 - DNA, 25 bp, Probe Sequence
cctgtccctgggcaggagtgctggt

SEQ ID NO: 197220 - DNA, 25 bp, Probe Sequence
cctggcactgtggccaagaggtgct

SEQ ID NO: 197221 - DNA, 25 bp, Probe Sequence
cctggacttcgagcaagagatggcc

SEQ ID NO: 197222 - DNA, 25 bp, Probe Sequence
cctggccttctaggaatggaggagc

SEQ ID NO: 197223 - DNA, 25 bp, Probe Sequence
cctagccgtcgcgtacctaggatgc

SEQ ID NO: 197224 - DNA, 25 bp, Probe Sequence
cctgagcacgtcgtcatgaccaagg

SEQ ID NO: 197225 - DNA, 25 bp, Probe Sequence
cctggcatcttgtccatggcaaatg

SEQ ID NO: 197226 - DNA, 25 bp, Probe Sequence
cctggcgctgtctcagccagtagat

SEQ ID NO: 197227 - DNA, 25 bp, Probe Sequence
cctgtcctggcatcagtagcatctg

SEQ ID NO: 197228 - DNA, 25 bp, Probe Sequence
cctgtcctggcatcagtagcatctg

SEQ ID NO: 197229 - DNA, 25 bp, Probe Sequence
cctgggcttgaatgtgactctgttg

SEQ ID NO: 197230 - DNA, 25 bp, Probe Sequence
cctgggtatggatgaactttctgag

SEQ ID NO: 197231 - DNA, 25 bp, Probe Sequence
cctgggattgggacacactttctgg

SEQ ID NO: 197232 - DNA, 25 bp, Probe Sequence
cctgggatatgtcgtccacaatgtc

SEQ ID NO: 197233 - DNA, 25 bp, Probe Sequence
cctgtgttcagtggttcctgagctc

SEQ ID NO: 197234 - DNA, 25 bp, Probe Sequence
cctggtgctggtggatgttagcagt

SEQ ID NO: 197235 - DNA, 25 bp, Probe Sequence
cctgtggcttgaggcatttacaaag

SEQ ID NO: 197236 - DNA, 25 bp, Probe Sequence
cctggacatgtcccattaaaaagtg

SEQ ID NO: 197237 - DNA, 25 bp, Probe Sequence
cctggcaagtcttctttgacaaccc

SEQ ID NO: 197238 - DNA, 25 bp, Probe Sequence
cctaatagctgttccttaggcccca

SEQ ID NO: 197239 - DNA, 25 bp, Probe Sequence
cctgaaggtgattctcctaggtcac

SEQ ID NO: 197240 - DNA, 25 bp, Probe Sequence
cctccagggtgcatctcctggtcag

SEQ ID NO: 197241 - DNA, 25 bp, Probe Sequence
cctccggcggacagctgcttacatg

SEQ ID NO: 197242 - DNA, 25 bp, Probe Sequence
cctgggtgtggagtcctgttccaga

SEQ ID NO: 197243 - DNA, 25 bp, Probe Sequence
cctccttattggtgtgtcctcagat

SEQ ID NO: 197244 - DNA, 25 bp, Probe Sequence
cctgagcgagttctgggtcctcagc

SEQ ID NO: 197245 - DNA, 25 bp, Probe Sequence
cctgatctgagtactagtgtgttcc

SEQ ID NO: 197246 - DNA, 25 bp, Probe Sequence
cctgttagtcaacgccatgttcttc

SEQ ID NO: 197247 - DNA, 25 bp, Probe Sequence
cctgttactccactggtagtcatct

SEQ ID NO: 197248 - DNA, 25 bp, Probe Sequence
cctgtaatcccactgagtcggttga

SEQ ID NO: 197249 - DNA, 25 bp, Probe Sequence
cctgaggctcctgggaatccgccga

SEQ ID NO: 197250 - DNA, 25 bp, Probe Sequence
cctggcaggcactgtggacacccag

SEQ ID NO: 197251 - DNA, 25 bp, Probe Sequence
cctgggccactttgagaacctgcag

SEQ ID NO: 197252 - DNA, 25 bp, Probe Sequence
cctggagtacttccaacagttgctg

SEQ ID NO: 197253 - DNA, 25 bp, Probe Sequence
cctggaatgtcttcacggcagcgtt

SEQ ID NO: 197254 - DNA, 25 bp, Probe Sequence
cctggaatgccaccaggtatgcccc

SEQ ID NO: 197255 - DNA, 25 bp, Probe Sequence
cctggaggctatccagcgtactcca

SEQ ID NO: 197256 - DNA, 25 bp, Probe Sequence
cctcgaagtgctccagcagtactac

SEQ ID NO: 197257 - DNA, 25 bp, Probe Sequence
cctctgtagagatcatgcgaactac

SEQ ID NO: 197258 - DNA, 25 bp, Probe Sequence
cctctgtcacaggcttcttgactac

SEQ ID NO: 197259 - DNA, 25 bp, Probe Sequence
cctgcttcagcaggcaaccagaccc

SEQ ID NO: 197260 - DNA, 25 bp, Probe Sequence
cctgcgacatcaggttctcagtccc

SEQ ID NO: 197261 - DNA, 25 bp, Probe Sequence
cctggtactgcttgatgtatgtccc

SEQ ID NO: 197262 - DNA, 25 bp, Probe Sequence
cctggactctgcggatgggatgcca

SEQ ID NO: 197263 - DNA, 25 bp, Probe Sequence
cctgtgatcccagatgagggccaga

SEQ ID NO: 197264 - DNA, 25 bp, Probe Sequence
cctgatccaacaccgcaggacacag

SEQ ID NO: 197265 - DNA, 25 bp, Probe Sequence
cctgtcagagcctgccaagatcaca

SEQ ID NO: 197266 - DNA, 25 bp, Probe Sequence
cctggcaagccattgggcagagaca

SEQ ID NO: 197267 - DNA, 25 bp, Probe Sequence
cctggtgctgtgctctgtgaagaac

SEQ ID NO: 197268 - DNA, 25 bp, Probe Sequence
cctggcattatgcccgtaccatgac

SEQ ID NO: 197269 - DNA, 25 bp, Probe Sequence
cctggcataatgcccagtacatgac

SEQ ID NO: 197270 - DNA, 25 bp, Probe Sequence
cctggcagaatgctagctctgagcc

SEQ ID NO: 197271 - DNA, 25 bp, Probe Sequence
cctggaagagcactactggatgtca

SEQ ID NO: 197272 - DNA, 25 bp, Probe Sequence
cctgctattggcatattccattgca

SEQ ID NO: 197273 - DNA, 25 bp, Probe Sequence
cctgttctggtggtttcaggcagcc

SEQ ID NO: 197274 - DNA, 25 bp, Probe Sequence
cctgtctttgtggtgctgttgggtg

SEQ ID NO: 197275 - DNA, 25 bp, Probe Sequence
cctgtctttgtggtgctgttgggtg

SEQ ID NO: 197276 - DNA, 25 bp, Probe Sequence
cctgtctttgtggtgctgttgggtg

SEQ ID NO: 197277 - DNA, 25 bp, Probe Sequence
cctgttaagctgggcgttgtggttc

SEQ ID NO: 197278 - DNA, 25 bp, Probe Sequence
cctggctaagggtgttgttgtgtga

SEQ ID NO: 197279 - DNA, 25 bp, Probe Sequence
cctgggaaggtggtgcttgtcctgg

SEQ ID NO: 197280 - DNA, 25 bp, Probe Sequence
cctgggacagggatgatggtgattg

SEQ ID NO: 197281 - DNA, 25 bp, Probe Sequence
cctggccaaggtgctagtgtatgag

SEQ ID NO: 197282 - DNA, 25 bp, Probe Sequence
cctgtgccacagttactattctcta

SEQ ID NO: 197283 - DNA, 25 bp, Probe Sequence
cctgtccaagaacctttctactgct

SEQ ID NO: 197284 - DNA, 25 bp, Probe Sequence
cctggaaagacacctctgtctggga

SEQ ID NO: 197285 - DNA, 25 bp, Probe Sequence
cctggatgagagaaactgcgtttgc

SEQ ID NO: 197286 - DNA, 25 bp, Probe Sequence
cctggtgcgagaagactttgtgctg

SEQ ID NO: 197287 - DNA, 25 bp, Probe Sequence
cctgagtgtgagtccctgtttggtt

SEQ ID NO: 197288 - DNA, 25 bp, Probe Sequence
cctagtgaaacttttctagaattat

SEQ ID NO: 197289 - DNA, 25 bp, Probe Sequence
cctggtgcgtacattctgtagagtt

SEQ ID NO: 197290 - DNA, 25 bp, Probe Sequence
cctggcaccttctgtttgatgggtg

SEQ ID NO: 197291 - DNA, 25 bp, Probe Sequence
cctggcaccttctgtttgatgggtg

SEQ ID NO: 197292 - DNA, 25 bp, Probe Sequence
cctggccctctgccagattttggtt

SEQ ID NO: 197293 - DNA, 25 bp, Probe Sequence
cctgtctcacctggacttaagcgtc

SEQ ID NO: 197294 - DNA, 25 bp, Probe Sequence
cctgtgcagaaggagccctaaggca

SEQ ID NO: 197295 - DNA, 25 bp, Probe Sequence
cctgctgcgacgacatgaccttaag

SEQ ID NO: 197296 - DNA, 25 bp, Probe Sequence
cctgctgcgtggacgcaggctctgt

SEQ ID NO: 197297 - DNA, 25 bp, Probe Sequence
cctgatggtggagcaggtgatgccg

SEQ ID NO: 197298 - DNA, 25 bp, Probe Sequence
cctgggaagcagaggttgcagtgag

SEQ ID NO: 197299 - DNA, 25 bp, Probe Sequence
cctgggaagttctgttgctgcagag

SEQ ID NO: 197300 - DNA, 25 bp, Probe Sequence
cctgggtcagtctggtgggaggacg

SEQ ID NO: 197301 - DNA, 25 bp, Probe Sequence
cctgctggatctcccggggagttac

SEQ ID NO: 197302 - DNA, 25 bp, Probe Sequence
tcctgccgattccctaagggttacg

SEQ ID NO: 197303 - DNA, 25 bp, Probe Sequence
cctgggatccaggctaagggccggc

SEQ ID NO: 197304 - DNA, 25 bp, Probe Sequence
cctgcggcccagctaaggggcctgg

SEQ ID NO: 197305 - DNA, 25 bp, Probe Sequence
cctggtagctggcacaaggaggcct

SEQ ID NO: 197306 - DNA, 25 bp, Probe Sequence
cctggtcatctgcggcaacaagggt

SEQ ID NO: 197307 - DNA, 25 bp, Probe Sequence
cctggcctccgaagcagaaaaggct

SEQ ID NO: 197308 - DNA, 25 bp, Probe Sequence
cctggtgcccgcacaatgacaacgt

SEQ ID NO: 197309 - DNA, 25 bp, Probe Sequence
cctggcacccagcacaatgaagatc

SEQ ID NO: 197310 - DNA, 25 bp, Probe Sequence
cctggtctgccaaaaggatggagcc

SEQ ID NO: 197311 - DNA, 25 bp, Probe Sequence
cctggtcttcaatggttagcagaag

SEQ ID NO: 197312 - DNA, 25 bp, Probe Sequence
cctggtcttcaatggttagcagaag

SEQ ID NO: 197313 - DNA, 25 bp, Probe Sequence
cctggctcttattggttcatatgaa

SEQ ID NO: 197314 - DNA, 25 bp, Probe Sequence
cctggtatgatgagtttctagatga

SEQ ID NO: 197315 - DNA, 25 bp, Probe Sequence
cctggcttgcagaaaatccagaaaa

SEQ ID NO: 197316 - DNA, 25 bp, Probe Sequence
cctggctacatcaaacttcgcaaga

SEQ ID NO: 197317 - DNA, 25 bp, Probe Sequence
cctggcgactctggatggtcagaac

SEQ ID NO: 197318 - DNA, 25 bp, Probe Sequence
cctgatcgagctgcgcaagctggaa

SEQ ID NO: 197319 - DNA, 25 bp, Probe Sequence
cctgggcacagcgcagagcgcacag

SEQ ID NO: 197320 - DNA, 25 bp, Probe Sequence
cctggcagaaggggagcccgaggga

SEQ ID NO: 197321 - DNA, 25 bp, Probe Sequence
cctgagcaaggggctgcaggtcggg

SEQ ID NO: 197322 - DNA, 25 bp, Probe Sequence
cctggacagtgtcctatggctgggg

SEQ ID NO: 197323 - DNA, 25 bp, Probe Sequence
cctggtccttgctaattgctgcagg

SEQ ID NO: 197324 - DNA, 25 bp, Probe Sequence
cctgggccattctctgatgcagggc

SEQ ID NO: 197325 - DNA, 25 bp, Probe Sequence
cctgaggccttcaactggcgacagg

SEQ ID NO: 197326 - DNA, 25 bp, Probe Sequence
cctgggcattcttagctgcgggagg

SEQ ID NO: 197327 - DNA, 25 bp, Probe Sequence
cctgtaagtctgtgtgcgagcgggc

SEQ ID NO: 197328 - DNA, 25 bp, Probe Sequence
cctgaaagtcagggtcggcttgtga

SEQ ID NO: 197329 - DNA, 25 bp, Probe Sequence
cctgaccagtcagatggtagttgag

SEQ ID NO: 197330 - DNA, 25 bp, Probe Sequence
cctgtccagagcccagagttattga

SEQ ID NO: 197331 - DNA, 25 bp, Probe Sequence
cctgtgcctggcatcagagggaagg

SEQ ID NO: 197332 - DNA, 25 bp, Probe Sequence
cctggctgcagagtgtcacggagat

SEQ ID NO: 197333 - DNA, 25 bp, Probe Sequence
cctggtgcagtggctacaggaactg

SEQ ID NO: 197334 - DNA, 25 bp, Probe Sequence
cctgagctggtggccgacagcaacg

SEQ ID NO: 197335 - DNA, 25 bp, Probe Sequence
cctgagctggtggccgacagcaacg

SEQ ID NO: 197336 - DNA, 25 bp, Probe Sequence
cctgaggatgggccgggcaaggagg

SEQ ID NO: 197337 - DNA, 25 bp, Probe Sequence
cctgggatgcgggccaggctgcagg

SEQ ID NO: 197338 - DNA, 25 bp, Probe Sequence
cctgggatgcgggccaggctgcagg

SEQ ID NO: 197339 - DNA, 25 bp, Probe Sequence
cctggatcagccacatcaactcagt

SEQ ID NO: 197340 - DNA, 25 bp, Probe Sequence
cctgcagaatccaccaaccagaacg

SEQ ID NO: 197341 - DNA, 25 bp, Probe Sequence
cctgagaacgaagacactcagccgg

SEQ ID NO: 197342 - DNA, 25 bp, Probe Sequence
tcttcgtaccaagagcaccggtggg

SEQ ID NO: 197343 - DNA, 25 bp, Probe Sequence
cctggtcacccagacacaaagatgg

SEQ ID NO: 197344 - DNA, 25 bp, Probe Sequence
cctggacgggcagatcaccatggag

SEQ ID NO: 197345 - DNA, 25 bp, Probe Sequence
cctggactggccatgaagtgaggag

SEQ ID NO: 197346 - DNA, 25 bp, Probe Sequence
cctggcaagcccagagcagctggag

SEQ ID NO: 197347 - DNA, 25 bp, Probe Sequence
cctggttctccttggagctgtgatc

SEQ ID NO: 197348 - DNA, 25 bp, Probe Sequence
cctggttctccttggagctgtgatc

SEQ ID NO: 197349 - DNA, 25 bp, Probe Sequence
cctggcttcaacaaggacctcagcg

SEQ ID NO: 197350 - DNA, 25 bp, Probe Sequence
cctggctagatcacaggaccctgca

SEQ ID NO: 197351 - DNA, 25 bp, Probe Sequence
cctggtagatgaacagcccctggag

SEQ ID NO: 197352 - DNA, 25 bp, Probe Sequence
cctagtaattaacctccggtgctct

SEQ ID NO: 197353 - DNA, 25 bp, Probe Sequence
cctgcagaacggagtgtccgggtgc

SEQ ID NO: 197354 - DNA, 25 bp, Probe Sequence
cctgcccacaagtgttccgtgtggt

SEQ ID NO: 197355 - DNA, 25 bp, Probe Sequence
cctgaccacacatatgttatcagtg

SEQ ID NO: 197356 - DNA, 25 bp, Probe Sequence
cctgaacgacatacttctccagctg

SEQ ID NO: 197357 - DNA, 25 bp, Probe Sequence
cctgaatcctgaatcttagactctt

SEQ ID NO: 197358 - DNA, 25 bp, Probe Sequence
cctgaatcttagactcttatacttc

SEQ ID NO: 197359 - DNA, 25 bp, Probe Sequence
cctgcaattctacagtttcttactg

SEQ ID NO: 197360 - DNA, 25 bp, Probe Sequence
cctgagcagccttcgagttttttaa

SEQ ID NO: 197361 - DNA, 25 bp, Probe Sequence
cctctctgtaaccgtattctttgaa

SEQ ID NO: 197362 - DNA, 25 bp, Probe Sequence
cctggtccaacacagattctgcctg

SEQ ID NO: 197363 - DNA, 25 bp, Probe Sequence
cctgcttcccaaaaattgcactgtg

SEQ ID NO: 197364 - DNA, 25 bp, Probe Sequence
cctgtacgccaacacagtgctgtct

SEQ ID NO: 197365 - DNA, 25 bp, Probe Sequence
cctgggcgacagagccagactgtct

SEQ ID NO: 197366 - DNA, 25 bp, Probe Sequence
cctggtggtagatccacctgtttgt

SEQ ID NO: 197367 - DNA, 25 bp, Probe Sequence
cctgggcccatgaaccaagtgtttt

SEQ ID NO: 197368 - DNA, 25 bp, Probe Sequence
cctgatggaccagtacagcgaggtt

SEQ ID NO: 197369 - DNA, 25 bp, Probe Sequence
cctgtgtgacgcctagggatgacgt

SEQ ID NO: 197370 - DNA, 25 bp, Probe Sequence
cctgatgtcagcctaggggatggcg

SEQ ID NO: 197371 - DNA, 25 bp, Probe Sequence
cctctgacagcactcgcaggaaggg

SEQ ID NO: 197372 - DNA, 25 bp, Probe Sequence
cctgtacgcatccatcagggcaggc

SEQ ID NO: 197373 - DNA, 25 bp, Probe Sequence
cctgagacagatgctcaagtgaggc

SEQ ID NO: 197374 - DNA, 25 bp, Probe Sequence
cctggagcagcagactatgggcagc

SEQ ID NO: 197375 - DNA, 25 bp, Probe Sequence
cctgtgatgtcacactcaagaggcc

SEQ ID NO: 197376 - DNA, 25 bp, Probe Sequence
cctggagtgcacagccatgacagtg

SEQ ID NO: 197377 - DNA, 25 bp, Probe Sequence
cctgtgcttgcaacgcttacgtgtt

SEQ ID NO: 197378 - DNA, 25 bp, Probe Sequence
cctgactctatggcgttagcgtttc

SEQ ID NO: 197379 - DNA, 25 bp, Probe Sequence
cctgaatttcaggctacctttgaca

SEQ ID NO: 197380 - DNA, 25 bp, Probe Sequence
cctgaacttccaggtcctgagtcag

SEQ ID NO: 197381 - DNA, 25 bp, Probe Sequence
cctgaccctccaggtgtcaatggac

SEQ ID NO: 197382 - DNA, 25 bp, Probe Sequence
cctgacgattccactgtaactacca

SEQ ID NO: 197383 - DNA, 25 bp, Probe Sequence
cctgacttcaccacttattactaca

SEQ ID NO: 197384 - DNA, 25 bp, Probe Sequence
cctgtctgtcccaactgtttgaaca

SEQ ID NO: 197385 - DNA, 25 bp, Probe Sequence
cctgggatcccttttatgtatactt

SEQ ID NO: 197386 - DNA, 25 bp, Probe Sequence
cctgggacgccagtgttttatgctc

SEQ ID NO: 197387 - DNA, 25 bp, Probe Sequence
cctgggaccatcttgttctgcaagg

SEQ ID NO: 197388 - DNA, 25 bp, Probe Sequence
cctgggaaatcttgctgtctactga

SEQ ID NO: 197389 - DNA, 25 bp, Probe Sequence
cctgggacaatatctatgcctatgg

SEQ ID NO: 197390 - DNA, 25 bp, Probe Sequence
cctggttagacatgccagcctttgc

SEQ ID NO: 197391 - DNA, 25 bp, Probe Sequence
cctgagttacaaagacagaccctgt

SEQ ID NO: 197392 - DNA, 25 bp, Probe Sequence
cctgggtaacatagctagaccacat

SEQ ID NO: 197393 - DNA, 25 bp, Probe Sequence
cctggagctcagccaagaacactaa

SEQ ID NO: 197394 - DNA, 25 bp, Probe Sequence
cctgggccccaaaagagctagcaga

SEQ ID NO: 197395 - DNA, 25 bp, Probe Sequence
cctggtatccgctaacaggtcaaaa

SEQ ID NO: 197396 - DNA, 25 bp, Probe Sequence
cctgcagaaccgtgagtgaattaaa

SEQ ID NO: 197397 - DNA, 25 bp, Probe Sequence
cctgagccacccagatctgaataaa

SEQ ID NO: 197398 - DNA, 25 bp, Probe Sequence
cctgtgcccactttgtaaataaact

SEQ ID NO: 197399 - DNA, 25 bp, Probe Sequence
cctgagagccactaatgtaagatac

SEQ ID NO: 197400 - DNA, 25 bp, Probe Sequence
cctgtgaaaagacgtcaatatctgc

SEQ ID NO: 197401 - DNA, 25 bp, Probe Sequence
cctgtgaaatacgtgacttgctccc

SEQ ID NO: 197402 - DNA, 25 bp, Probe Sequence
cctggacactacgatatcctctaca

SEQ ID NO: 197403 - DNA, 25 bp, Probe Sequence
cctggaacttggatcttaagagatc

SEQ ID NO: 197404 - DNA, 25 bp, Probe Sequence
cctgataactggcattttgtagatg

SEQ ID NO: 197405 - DNA, 25 bp, Probe Sequence
cctgaagtcatgcacctgtttacat

SEQ ID NO: 197406 - DNA, 25 bp, Probe Sequence
cctgcgtgtcatgaccttcgatgac

SEQ ID NO: 197407 - DNA, 25 bp, Probe Sequence
cctggtctttcagccatgctgatga

SEQ ID NO: 197408 - DNA, 25 bp, Probe Sequence
cctgggtttgaggcagatgcagtgc

SEQ ID NO: 197409 - DNA, 25 bp, Probe Sequence
cctgggctttgagagctgcgagagg

SEQ ID NO: 197410 - DNA, 25 bp, Probe Sequence
cctgggctttcagctttgggaccag

SEQ ID NO: 197411 - DNA, 25 bp, Probe Sequence
cctgaggctttagacttcctgatcc

SEQ ID NO: 197412 - DNA, 25 bp, Probe Sequence
cctagactgggaggactccctgccc

SEQ ID NO: 197413 - DNA, 25 bp, Probe Sequence
cctagactgggaggactccctgccc

SEQ ID NO: 197414 - DNA, 25 bp, Probe Sequence
cctgatagagggacctccctgtccc

SEQ ID NO: 197415 - DNA, 25 bp, Probe Sequence
cctggaggaggacacctggtacgcg

SEQ ID NO: 197416 - DNA, 25 bp, Probe Sequence
cctggaggaggacacctggtacgcg

SEQ ID NO: 197417 - DNA, 25 bp, Probe Sequence
cctggggagtggaacctgaaaatgc

SEQ ID NO: 197418 - DNA, 25 bp, Probe Sequence
tttgactcgcagcgtaccctaaacc

SEQ ID NO: 197419 - DNA, 25 bp, Probe Sequence
cctccccagaagaagccactaaagc

SEQ ID NO: 197420 - DNA, 25 bp, Probe Sequence
cctccaacaaaaccccttgatcaag

SEQ ID NO: 197421 - DNA, 25 bp, Probe Sequence
cctcccagggactcccattaaagtg

SEQ ID NO: 197422 - DNA, 25 bp, Probe Sequence
cctccaaagggctctttaaaatcat

SEQ ID NO: 197423 - DNA, 25 bp, Probe Sequence
cctaagactgttgcctttaaatagc

SEQ ID NO: 197424 - DNA, 25 bp, Probe Sequence
cctgaagatctttcccatcttgcaa

SEQ ID NO: 197425 - DNA, 25 bp, Probe Sequence
cctatttttgccagatcttcaagtc

SEQ ID NO: 197426 - DNA, 25 bp, Probe Sequence
cctgattgtttgcactggattaagt

SEQ ID NO: 197427 - DNA, 25 bp, Probe Sequence
cctggtggttctgcggtgtaagtcg

SEQ ID NO: 197428 - DNA, 25 bp, Probe Sequence
ccatggggacctgagagggaagggg

SEQ ID NO: 197429 - DNA, 25 bp, Probe Sequence
cctgggggtgctaagaggggtagag

SEQ ID NO: 197430 - DNA, 25 bp, Probe Sequence
cctggggggcagtggtgtggagaag

SEQ ID NO: 197431 - DNA, 25 bp, Probe Sequence
cctgggcggagctaaagttgcagac

SEQ ID NO: 197432 - DNA, 25 bp, Probe Sequence
cctgggggagcccgatgtggaggtg

SEQ ID NO: 197433 - DNA, 25 bp, Probe Sequence
cctgcacacctgaccgtatttgggt

SEQ ID NO: 197434 - DNA, 25 bp, Probe Sequence
cctgactccgtccagtattgatcgg

SEQ ID NO: 197435 - DNA, 25 bp, Probe Sequence
cctggtccatctggagttttgaggg

SEQ ID NO: 197436 - DNA, 25 bp, Probe Sequence
cctggatccagccggtgtgaagagg

SEQ ID NO: 197437 - DNA, 25 bp, Probe Sequence
cctggaggctgccgagcgtgaggag

SEQ ID NO: 197438 - DNA, 25 bp, Probe Sequence
cctggaggctgccgagcgtgaggag

SEQ ID NO: 197439 - DNA, 25 bp, Probe Sequence
cctggagctgccctatgtggaagag

SEQ ID NO: 197440 - DNA, 25 bp, Probe Sequence
cctggtggggcttgtggaggcagca

SEQ ID NO: 197441 - DNA, 25 bp, Probe Sequence
cctggtggggcttgtggaggcagca

SEQ ID NO: 197442 - DNA, 25 bp, Probe Sequence
cctgttgtgggttttgaatgacata

SEQ ID NO: 197443 - DNA, 25 bp, Probe Sequence
cctgtttgtggtcatgctggtataa

SEQ ID NO: 197444 - DNA, 25 bp, Probe Sequence
cctgctgctattttctttgtgtcaa

SEQ ID NO: 197445 - DNA, 25 bp, Probe Sequence
cctctgcaactaacattgtgaagtg

SEQ ID NO: 197446 - DNA, 25 bp, Probe Sequence
cctgtcacattgccgactgatgaag

SEQ ID NO: 197447 - DNA, 25 bp, Probe Sequence
cctgtcacattgccgactgatgaag

SEQ ID NO: 197448 - DNA, 25 bp, Probe Sequence
cctgtcctgtgcccttgaattggga

SEQ ID NO: 197449 - DNA, 25 bp, Probe Sequence
cctgtactcatccctgggcatatgt

SEQ ID NO: 197450 - DNA, 25 bp, Probe Sequence
cctgtgattctcccattagacatga

SEQ ID NO: 197451 - DNA, 25 bp, Probe Sequence
cctgactctcagccctacagagtag

SEQ ID NO: 197452 - DNA, 25 bp, Probe Sequence
cctgtctgctctgctgctacagagg

SEQ ID NO: 197453 - DNA, 25 bp, Probe Sequence
cctgtgctgcttgtgtcaaatggaa

SEQ ID NO: 197454 - DNA, 25 bp, Probe Sequence
cctgtctcatccctgtgcaaatgga

SEQ ID NO: 197455 - DNA, 25 bp, Probe Sequence
cctgtctcatccctgtgcaaatgga

SEQ ID NO: 197456 - DNA, 25 bp, Probe Sequence
cctgtctgtcctggcctaatgccag

SEQ ID NO: 197457 - DNA, 25 bp, Probe Sequence
cctgtgctgtcacgagaggaacagc

SEQ ID NO: 197458 - DNA, 25 bp, Probe Sequence
cctgtcatagcaaatatgggaccat

SEQ ID NO: 197459 - DNA, 25 bp, Probe Sequence
cctgctctcagcatatgtggggcgc

SEQ ID NO: 197460 - DNA, 25 bp, Probe Sequence
cctgtagccatctattggcagagcc

SEQ ID NO: 197461 - DNA, 25 bp, Probe Sequence
cctgtaactcaaatgtcaaccccac

SEQ ID NO: 197462 - DNA, 25 bp, Probe Sequence
ccttcaactaggatttagaccacta

SEQ ID NO: 197463 - DNA, 25 bp, Probe Sequence
cctccggctggtgtcttgagaccag

SEQ ID NO: 197464 - DNA, 25 bp, Probe Sequence
cctctgcggcttttgtattacaacg

SEQ ID NO: 197465 - DNA, 25 bp, Probe Sequence
cctgcaactcatctttcattaaagg

SEQ ID NO: 197466 - DNA, 25 bp, Probe Sequence
cctgcagaactgctttcctatgttt

SEQ ID NO: 197467 - DNA, 25 bp, Probe Sequence
cctgtcacattgctctttttgtatt

SEQ ID NO: 197468 - DNA, 25 bp, Probe Sequence
cctgaccttcgtacctatgattata

SEQ ID NO: 197469 - DNA, 25 bp, Probe Sequence
cctgccctgcattgtatactagatt

SEQ ID NO: 197470 - DNA, 25 bp, Probe Sequence
cctgcaccaaactacaaagattagc

SEQ ID NO: 197471 - DNA, 25 bp, Probe Sequence
gccatgcagcaatccttgcaaaatt

SEQ ID NO: 197472 - DNA, 25 bp, Probe Sequence
gcctgccaacccatggaagttgttt

SEQ ID NO: 197473 - DNA, 25 bp, Probe Sequence
cctccaagctccagagccattggta

SEQ ID NO: 197474 - DNA, 25 bp, Probe Sequence
cctcgatattgagcgtccaacctat

SEQ ID NO: 197475 - DNA, 25 bp, Probe Sequence
cctgatgatcattgtccctacagac

SEQ ID NO: 197476 - DNA, 25 bp, Probe Sequence
cctgtatcaggggcaccaatgtgcg

SEQ ID NO: 197477 - DNA, 25 bp, Probe Sequence
cctgtgatgctgggtgatgcccggc

SEQ ID NO: 197478 - DNA, 25 bp, Probe Sequence
cctggtgctcactgtgcacctgtgt

SEQ ID NO: 197479 - DNA, 25 bp, Probe Sequence
cctgtgttcatctgtgacattaaaa

SEQ ID NO: 197480 - DNA, 25 bp, Probe Sequence
cctggttctatacgtgaatacacag

SEQ ID NO: 197481 - DNA, 25 bp, Probe Sequence
cctgcaattttacctagctaccact

SEQ ID NO: 197482 - DNA, 25 bp, Probe Sequence
cctgcattgttagcactaggcaccc

SEQ ID NO: 197483 - DNA, 25 bp, Probe Sequence
cctgaagtaccccatcgagcacggc

SEQ ID NO: 197484 - DNA, 25 bp, Probe Sequence
cctgaaggacacctgcctgagagca

SEQ ID NO: 197485 - DNA, 25 bp, Probe Sequence
cctgtgagggtcctgactggagcac

SEQ ID NO: 197486 - DNA, 25 bp, Probe Sequence
cctgatgaggggaaactacagcacc

SEQ ID NO: 197487 - DNA, 25 bp, Probe Sequence
cctgcaatcaggtgaatatacagcc

SEQ ID NO: 197488 - DNA, 25 bp, Probe Sequence
cctgcacaagtgtgacatctaccag

SEQ ID NO: 197489 - DNA, 25 bp, Probe Sequence
cctgcacatctgggcagttgtacca

SEQ ID NO: 197490 - DNA, 25 bp, Probe Sequence
cctgctgcatgggggtggtacccag

SEQ ID NO: 197491 - DNA, 25 bp, Probe Sequence
cctgcaaggccgcaggagcagccgg

SEQ ID NO: 197492 - DNA, 25 bp, Probe Sequence
cctgaacgtcagcagctagagaccc

SEQ ID NO: 197493 - DNA, 25 bp, Probe Sequence
cctgaaccacagcggaggagctccg

SEQ ID NO: 197494 - DNA, 25 bp, Probe Sequence
cctgaattcaggcttgtggagccac

SEQ ID NO: 197495 - DNA, 25 bp, Probe Sequence
cctgttccgggcaattgtgtgacaa

SEQ ID NO: 197496 - DNA, 25 bp, Probe Sequence
cctgaccaccccattgtggagactg

SEQ ID NO: 197497 - DNA, 25 bp, Probe Sequence
cctgagaacccctctgggaaaatct

SEQ ID NO: 197498 - DNA, 25 bp, Probe Sequence
tgccggaatccctccgtaaaaggtg

SEQ ID NO: 197499 - DNA, 25 bp, Probe Sequence
cctgggtgcctatatcgacaaagag

SEQ ID NO: 197500 - DNA, 25 bp, Probe Sequence
cctgctgggccttaagctttccagg

SEQ ID NO: 197501 - DNA, 25 bp, Probe Sequence
cctctggcagcgaaaagaccccgga

SEQ ID NO: 197502 - DNA, 25 bp, Probe Sequence
cctgggcagctgaacaagactccgt

SEQ ID NO: 197503 - DNA, 25 bp, Probe Sequence
cctggtgcaggaaatatcatctcca

SEQ ID NO: 197504 - DNA, 25 bp, Probe Sequence
cctgggcagccagcattcattgtaa

SEQ ID NO: 197505 - DNA, 25 bp, Probe Sequence
cctggtggccaggtatgcagatgat

SEQ ID NO: 197506 - DNA, 25 bp, Probe Sequence
cctgagctgcatgctgaattgggca

SEQ ID NO: 197507 - DNA, 25 bp, Probe Sequence
cctgcagtcggcagatcatgggact

SEQ ID NO: 197508 - DNA, 25 bp, Probe Sequence
cctgcagggtggtgctgggactgag

SEQ ID NO: 197509 - DNA, 25 bp, Probe Sequence
cctgtgctggagtccctgaggaata

SEQ ID NO: 197510 - DNA, 25 bp, Probe Sequence
cctgagctagtgtcacctgcacagg

SEQ ID NO: 197511 - DNA, 25 bp, Probe Sequence
cctgagcgagtggagtctgccaccc

SEQ ID NO: 197512 - DNA, 25 bp, Probe Sequence
cctgcagtgtgctgttgtgcacgtc

SEQ ID NO: 197513 - DNA, 25 bp, Probe Sequence
cctgcgttactttgctgaggataac

SEQ ID NO: 197514 - DNA, 25 bp, Probe Sequence
cctgtgtttctttacatgagatttg

SEQ ID NO: 197515 - DNA, 25 bp, Probe Sequence
cctgtgtgtctccataaaagtcctg

SEQ ID NO: 197516 - DNA, 25 bp, Probe Sequence
cctgtcttctcactaaatactacaa

SEQ ID NO: 197517 - DNA, 25 bp, Probe Sequence
cctgttctccaccgaagtctaaagg

SEQ ID NO: 197518 - DNA, 25 bp, Probe Sequence
cctgtaactccacctgagttacaaa

SEQ ID NO: 197519 - DNA, 25 bp, Probe Sequence
cctgtaatctaaatgctggctcaaa

SEQ ID NO: 197520 - DNA, 25 bp, Probe Sequence
cctgttacatagctgtgcctcagag

SEQ ID NO: 197521 - DNA, 25 bp, Probe Sequence
cctttcctcagggctgccctgggag

SEQ ID NO: 197522 - DNA, 25 bp, Probe Sequence
cctttcctcagggctgccctgggag

SEQ ID NO: 197523 - DNA, 25 bp, Probe Sequence
gcctaaccaatgtggccgtggtacg

SEQ ID NO: 197524 - DNA, 25 bp, Probe Sequence
cctataccaggctgggcacggtggc

SEQ ID NO: 197525 - DNA, 25 bp, Probe Sequence
cctgtatcttgggggacagggctgg

SEQ ID NO: 197526 - DNA, 25 bp, Probe Sequence
cctgttcttggatctgccatggagg

SEQ ID NO: 197527 - DNA, 25 bp, Probe Sequence
cctgtcatcatcagtactcactgtg

SEQ ID NO: 197528 - DNA, 25 bp, Probe Sequence
cctgtccatgtcttactactttgac

SEQ ID NO: 197529 - DNA, 25 bp, Probe Sequence
cctgtctactttctgatcattctga

SEQ ID NO: 197530 - DNA, 25 bp, Probe Sequence
cctgttcactctacttagcatgtcc

SEQ ID NO: 197531 - DNA, 25 bp, Probe Sequence
cctattcgctgcactaactgtgccc

SEQ ID NO: 197532 - DNA, 25 bp, Probe Sequence
cctgttggcagctctagctttgcag

SEQ ID NO: 197533 - DNA, 25 bp, Probe Sequence
cctgggagactcacacatttgcatg

SEQ ID NO: 197534 - DNA, 25 bp, Probe Sequence
cctgccgaaatttcactttgcggag

SEQ ID NO: 197535 - DNA, 25 bp, Probe Sequence
cctgacgaaaaaggtgttgccaagg

SEQ ID NO: 197536 - DNA, 25 bp, Probe Sequence
cctgggaaaggggttgtcaagagag

SEQ ID NO: 197537 - DNA, 25 bp, Probe Sequence
cctgggcaacaggctttttctgtga

SEQ ID NO: 197538 - DNA, 25 bp, Probe Sequence
cctgaagcaaaggcgtttattcgac

SEQ ID NO: 197539 - DNA, 25 bp, Probe Sequence
cctaacaagcatgggtcaccaacga

SEQ ID NO: 197540 - DNA, 25 bp, Probe Sequence
cctgcaacagaagtgcgtaccagaa

SEQ ID NO: 197541 - DNA, 25 bp, Probe Sequence
cctgagcaaagggcctgcccagaca

SEQ ID NO: 197542 - DNA, 25 bp, Probe Sequence
cctgatgacctgggcttcccagaag

SEQ ID NO: 197543 - DNA, 25 bp, Probe Sequence
cctgtgaggcccaattccaagacag

SEQ ID NO: 197544 - DNA, 25 bp, Probe Sequence
cctgtgaggcacattacagcaccaa

SEQ ID NO: 197545 - DNA, 25 bp, Probe Sequence
cctgtcggcacttctgaaaggcaca

SEQ ID NO: 197546 - DNA, 25 bp, Probe Sequence
cctgcgggagcaactgaacaggccg

SEQ ID NO: 197547 - DNA, 25 bp, Probe Sequence
cctgtgggagcacctgcttcaggaa

SEQ ID NO: 197548 - DNA, 25 bp, Probe Sequence
cctgtgaggagctttctggcatgtg

SEQ ID NO: 197549 - DNA, 25 bp, Probe Sequence
cctgtgagcatacaaccctgcttta

SEQ ID NO: 197550 - DNA, 25 bp, Probe Sequence
cctgctggatcacatatcctgccta

SEQ ID NO: 197551 - DNA, 25 bp, Probe Sequence
cctgtctgtgcagatgctttgccca

SEQ ID NO: 197552 - DNA, 25 bp, Probe Sequence
cctgtgctctacatgctattcaaag

SEQ ID NO: 197553 - DNA, 25 bp, Probe Sequence
cctgtgcctgccactcaataaacag

SEQ ID NO: 197554 - DNA, 25 bp, Probe Sequence
cctgctgtacaagctcaaagaatag

SEQ ID NO: 197555 - DNA, 25 bp, Probe Sequence
cctgaggacacagctccgagaacgg

SEQ ID NO: 197556 - DNA, 25 bp, Probe Sequence
cctcaggcttcagaccttacctggg

SEQ ID NO: 197557 - DNA, 25 bp, Probe Sequence
cctcatgtgccaaaatacctactag

SEQ ID NO: 197558 - DNA, 25 bp, Probe Sequence
cctctggctatcatgccaactactg

SEQ ID NO: 197559 - DNA, 25 bp, Probe Sequence
cctgcttcgataccaaactactata

SEQ ID NO: 197560 - DNA, 25 bp, Probe Sequence
cctgcttcgataccaaactactata

SEQ ID NO: 197561 - DNA, 25 bp, Probe Sequence
cctgttgtgagatgaacctcctgta

SEQ ID NO: 197562 - DNA, 25 bp, Probe Sequence
cctgttgcgcaatgatattgccctc

SEQ ID NO: 197563 - DNA, 25 bp, Probe Sequence
cctgcttggcagttattcttccaca

SEQ ID NO: 197564 - DNA, 25 bp, Probe Sequence
cctgaatgacgacatcagcctctac

SEQ ID NO: 197565 - DNA, 25 bp, Probe Sequence
cctgaccaggagcatatgatttatc

SEQ ID NO: 197566 - DNA, 25 bp, Probe Sequence
cctacaaggagatatggctggacca

SEQ ID NO: 197567 - DNA, 25 bp, Probe Sequence
cctgtacaggagctgtggggactgc

SEQ ID NO: 197568 - DNA, 25 bp, Probe Sequence
cctgtacgtggattgggctggagcc

SEQ ID NO: 197569 - DNA, 25 bp, Probe Sequence
cctgtgacctagttggtgcagtggc

SEQ ID NO: 197570 - DNA, 25 bp, Probe Sequence
cctctgacctcatcatggttctagt

SEQ ID NO: 197571 - DNA, 25 bp, Probe Sequence
gcctcagacccgaggtttagatttc

SEQ ID NO: 197572 - DNA, 25 bp, Probe Sequence
cctcagaccaggtggaattacttaa

SEQ ID NO: 197573 - DNA, 25 bp, Probe Sequence
cctaggcgcgggacgaaacatttca

SEQ ID NO: 197574 - DNA, 25 bp, Probe Sequence
cctttggcctgagaactaatatgtt

SEQ ID NO: 197575 - DNA, 25 bp, Probe Sequence
cctttggcagtacaatctaccgtaa

SEQ ID NO: 197576 - DNA, 25 bp, Probe Sequence
ccataaccaggacacaccctagtaa

SEQ ID NO: 197577 - DNA, 25 bp, Probe Sequence
cctaatggagaagacccacgtgcta

SEQ ID NO: 197578 - DNA, 25 bp, Probe Sequence
cctgatatcaagtaggcactcaaca

SEQ ID NO: 197579 - DNA, 25 bp, Probe Sequence
cctgctggcacgaggcactaagtct

SEQ ID NO: 197580 - DNA, 25 bp, Probe Sequence
cctgaggcacaagcccatatagatc

SEQ ID NO: 197581 - DNA, 25 bp, Probe Sequence
cctgaggcacataggccttctgaat

SEQ ID NO: 197582 - DNA, 25 bp, Probe Sequence
cctgctgtcctttgagctgttggat

SEQ ID NO: 197583 - DNA, 25 bp, Probe Sequence
cctgggctgtctttgctatatgtat

SEQ ID NO: 197584 - DNA, 25 bp, Probe Sequence
cctgcgagttgctttcagtcattca

SEQ ID NO: 197585 - DNA, 25 bp, Probe Sequence
cctgctactctgttccttcacatcc

SEQ ID NO: 197586 - DNA, 25 bp, Probe Sequence
cctgtgactctgtgatgtatcatga

SEQ ID NO: 197587 - DNA, 25 bp, Probe Sequence
cctgaggcttgtggatttctatgtt

SEQ ID NO: 197588 - DNA, 25 bp, Probe Sequence
cctgctagatttcgtattctagtag

SEQ ID NO: 197589 - DNA, 25 bp, Probe Sequence
cctgcatctggttggtctttattga

SEQ ID NO: 197590 - DNA, 25 bp, Probe Sequence
cctgttgagtcagatgctttcattt

SEQ ID NO: 197591 - DNA, 25 bp, Probe Sequence
cctgtagtgaccattttgctatctg

SEQ ID NO: 197592 - DNA, 25 bp, Probe Sequence
ccttcactactaactgttgagacgt

SEQ ID NO: 197593 - DNA, 25 bp, Probe Sequence
ccttacattcatgaccttgacacct

SEQ ID NO: 197594 - DNA, 25 bp, Probe Sequence
cctccatattatacacctaaccagt

SEQ ID NO: 197595 - DNA, 25 bp, Probe Sequence
cctttacttccagaagcaccagccc

SEQ ID NO: 197596 - DNA, 25 bp, Probe Sequence
cctttcattttcttaagaccaatca

SEQ ID NO: 197597 - DNA, 25 bp, Probe Sequence
ccttcttactgtgtcaattcctatt

SEQ ID NO: 197598 - DNA, 25 bp, Probe Sequence
cctcctatgtttgttttccttatgg

SEQ ID NO: 197599 - DNA, 25 bp, Probe Sequence
cctccttgttatttctgtttgtaag

SEQ ID NO: 197600 - DNA, 25 bp, Probe Sequence
cctccattgtttgtcatgaaattac

SEQ ID NO: 197601 - DNA, 25 bp, Probe Sequence
cctccatcttacgttcaaactaaat

SEQ ID NO: 197602 - DNA, 25 bp, Probe Sequence
cctgcccagtgacacaccaaaaaaa

SEQ ID NO: 197603 - DNA, 25 bp, Probe Sequence
cctgtcccggcatcacagataaaat

SEQ ID NO: 197604 - DNA, 25 bp, Probe Sequence
cctctgccccctgaaggattcagat

SEQ ID NO: 197605 - DNA, 25 bp, Probe Sequence
cctcctcattccagaacgaacagcc

SEQ ID NO: 197606 - DNA, 25 bp, Probe Sequence
cctcccttccttcaagataactggc

SEQ ID NO: 197607 - DNA, 25 bp, Probe Sequence
ccaccccaacccaataaaactgatg

SEQ ID NO: 197608 - DNA, 25 bp, Probe Sequence
cctccccagatcttaattaaaccag

SEQ ID NO: 197609 - DNA, 25 bp, Probe Sequence
cctccaccgatatcaaatgctgcca

SEQ ID NO: 197610 - DNA, 25 bp, Probe Sequence
cctgctcaaccacaaggtgcatgcc

SEQ ID NO: 197611 - DNA, 25 bp, Probe Sequence
cctgctcaaccacaaggtgcatgcc

SEQ ID NO: 197612 - DNA, 25 bp, Probe Sequence
cctgtcatccagcattaggtatatc

SEQ ID NO: 197613 - DNA, 25 bp, Probe Sequence
cctgtgaacgtcttctagataatgc

SEQ ID NO: 197614 - DNA, 25 bp, Probe Sequence
cctgtgattattctcgcatgataag

SEQ ID NO: 197615 - DNA, 25 bp, Probe Sequence
cctgaattcattcctcgaaggggaa

SEQ ID NO: 197616 - DNA, 25 bp, Probe Sequence
cctgagttctctcctaggcaagtgg

SEQ ID NO: 197617 - DNA, 25 bp, Probe Sequence
cctgttgagtctcctgtgcagaagt

SEQ ID NO: 197618 - DNA, 25 bp, Probe Sequence
cctgtttgcattgctatagaaggaa

SEQ ID NO: 197619 - DNA, 25 bp, Probe Sequence
cctgtacttgtactatggaaggaag

SEQ ID NO: 197620 - DNA, 25 bp, Probe Sequence
cctgtatgcttttctctggtcagtc

SEQ ID NO: 197621 - DNA, 25 bp, Probe Sequence
cctgtcagcgtttttgagtctgtca

SEQ ID NO: 197622 - DNA, 25 bp, Probe Sequence
cctgctgggactctgatggtcttca

SEQ ID NO: 197623 - DNA, 25 bp, Probe Sequence
cctgctgggactctgatggtcttca

SEQ ID NO: 197624 - DNA, 25 bp, Probe Sequence
cctgtggatcctcataggcagtgtc

SEQ ID NO: 197625 - DNA, 25 bp, Probe Sequence
cctgtgggcacccaagtcagcatgg

SEQ ID NO: 197626 - DNA, 25 bp, Probe Sequence
cctgtggtgagccgagagctgcggg

SEQ ID NO: 197627 - DNA, 25 bp, Probe Sequence
cctgcttggatctagacagcatctg

SEQ ID NO: 197628 - DNA, 25 bp, Probe Sequence
cctgttcgagaaccagctgctgcag

SEQ ID NO: 197629 - DNA, 25 bp, Probe Sequence
cctgcctgaaaagcctgctgtgtac

SEQ ID NO: 197630 - DNA, 25 bp, Probe Sequence
cctccagtagtagcgtggtatcaca

SEQ ID NO: 197631 - DNA, 25 bp, Probe Sequence
cctcccatatgggcctgagttgtac

SEQ ID NO: 197632 - DNA, 25 bp, Probe Sequence
cctccagctgcaatggcactgcagt

SEQ ID NO: 197633 - DNA, 25 bp, Probe Sequence
cctgcgcatgctgctggcagatcag

SEQ ID NO: 197634 - DNA, 25 bp, Probe Sequence
cctgcatcatctttggcagacagag

SEQ ID NO: 197635 - DNA, 25 bp, Probe Sequence
cctgcacatgctttggaggccagcg

SEQ ID NO: 197636 - DNA, 25 bp, Probe Sequence
cctgcacatgctttggaggccagcg

SEQ ID NO: 197637 - DNA, 25 bp, Probe Sequence
cctgcacatgctttggaggccagcg

SEQ ID NO: 197638 - DNA, 25 bp, Probe Sequence
cctgcacagcatcggcaagatcggc

SEQ ID NO: 197639 - DNA, 25 bp, Probe Sequence
cctgcattgaggccaagcacgacaa

SEQ ID NO: 197640 - DNA, 25 bp, Probe Sequence
cctgctcagtggcaatcagctccac

SEQ ID NO: 197641 - DNA, 25 bp, Probe Sequence
cctgctcgctgggcagacataccat

SEQ ID NO: 197642 - DNA, 25 bp, Probe Sequence
cctgtctctgtggccattgatgcaa

SEQ ID NO: 197643 - DNA, 25 bp, Probe Sequence
cctgctctcatactgctcagtgaca

SEQ ID NO: 197644 - DNA, 25 bp, Probe Sequence
gcttcttcaaacagaactttgttgg

SEQ ID NO: 197645 - DNA, 25 bp, Probe Sequence
gcttggtaaatgggggcttccttgg

SEQ ID NO: 197646 - DNA, 25 bp, Probe Sequence
cctcgaaggagagggcgcttccttg

SEQ ID NO: 197647 - DNA, 25 bp, Probe Sequence
cctctgcctaaagtacgtgcccagg

SEQ ID NO: 197648 - DNA, 25 bp, Probe Sequence
cctgctgcaccaaagtagttcacgg

SEQ ID NO: 197649 - DNA, 25 bp, Probe Sequence
cctcgactccggaagtctcaaggtg

SEQ ID NO: 197650 - DNA, 25 bp, Probe Sequence
cctccacatccgggagaaccgcagt

SEQ ID NO: 197651 - DNA, 25 bp, Probe Sequence
cctcgagtctcgggacagaggccgc

SEQ ID NO: 197652 - DNA, 25 bp, Probe Sequence
cctgcgagggggcaggtgtgctccg

SEQ ID NO: 197653 - DNA, 25 bp, Probe Sequence
cctcggtgtgggtggtggttctata

SEQ ID NO: 197654 - DNA, 25 bp, Probe Sequence
cctgctgcgcttggtaggtgtggtg

SEQ ID NO: 197655 - DNA, 25 bp, Probe Sequence
cctgctgggaaggcaggctgatggg

SEQ ID NO: 197656 - DNA, 25 bp, Probe Sequence
cctgctgcggaacgcgcaggagctg

SEQ ID NO: 197657 - DNA, 25 bp, Probe Sequence
cctgaggagcgatgcgacaggcatg

SEQ ID NO: 197658 - DNA, 25 bp, Probe Sequence
cctgcaggtggtggtccaggagcca

SEQ ID NO: 197659 - DNA, 25 bp, Probe Sequence
cctgacctcagagtgtccaggggct

SEQ ID NO: 197660 - DNA, 25 bp, Probe Sequence
cctgacctgagactgtcgcagaggc

SEQ ID NO: 197661 - DNA, 25 bp, Probe Sequence
cctgtgacatggtgcctgagaggca

SEQ ID NO: 197662 - DNA, 25 bp, Probe Sequence
cctgctccaggattccggtggcaga

SEQ ID NO: 197663 - DNA, 25 bp, Probe Sequence
ccttcaaccattccccatgggaaat

SEQ ID NO: 197664 - DNA, 25 bp, Probe Sequence
cctccaaccttgacacctgtaagga

SEQ ID NO: 197665 - DNA, 25 bp, Probe Sequence
cctcgcgagacaagctcaccgaaat

SEQ ID NO: 197666 - DNA, 25 bp, Probe Sequence
cctccagcatggagtgcaacccttc

SEQ ID NO: 197667 - DNA, 25 bp, Probe Sequence
cctccaatcgggtaactcccaggag

SEQ ID NO: 197668 - DNA, 25 bp, Probe Sequence
cctccaacccatttaatcaccatgg

SEQ ID NO: 197669 - DNA, 25 bp, Probe Sequence
cctccagacctccttgaaatacaat

SEQ ID NO: 197670 - DNA, 25 bp, Probe Sequence
cctgcacagactgccggttattcac

SEQ ID NO: 197671 - DNA, 25 bp, Probe Sequence
cctgcacaagcagctggactttcca

SEQ ID NO: 197672 - DNA, 25 bp, Probe Sequence
cctgaaacagactactctttgcctt

SEQ ID NO: 197673 - DNA, 25 bp, Probe Sequence
cctgaaactagtctctgtagccttt

SEQ ID NO: 197674 - DNA, 25 bp, Probe Sequence
cctccaactgtttctcagacttctt

SEQ ID NO: 197675 - DNA, 25 bp, Probe Sequence
cctccaactttatagacttgtgaga

SEQ ID NO: 197676 - DNA, 25 bp, Probe Sequence
cctgtgcccttttaaacgatgtggt

SEQ ID NO: 197677 - DNA, 25 bp, Probe Sequence
cctgcctcctttttcaagcagcgga

SEQ ID NO: 197678 - DNA, 25 bp, Probe Sequence
cctgctcatggagttagccaagagc

SEQ ID NO: 197679 - DNA, 25 bp, Probe Sequence
cctgtgctcgagttggccacagctg

SEQ ID NO: 197680 - DNA, 25 bp, Probe Sequence
cctgtcattcagaggctgctctctg

SEQ ID NO: 197681 - DNA, 25 bp, Probe Sequence
cctgctcagaagaggtggctttggc

SEQ ID NO: 197682 - DNA, 25 bp, Probe Sequence
cctgacacagagaaggggccttggt

SEQ ID NO: 197683 - DNA, 25 bp, Probe Sequence
cctgaccgcaggtggtgcttcaggg

SEQ ID NO: 197684 - DNA, 25 bp, Probe Sequence
cctgaggtcaggtacgatgtgagag

SEQ ID NO: 197685 - DNA, 25 bp, Probe Sequence
cctgtagtcccagctatgcgagagg

SEQ ID NO: 197686 - DNA, 25 bp, Probe Sequence
cctgtagttccagctactcagtgag

SEQ ID NO: 197687 - DNA, 25 bp, Probe Sequence
cctgttttccgggcatcatagtagt

SEQ ID NO: 197688 - DNA, 25 bp, Probe Sequence
cctgttcattcaagtccacagtgga

SEQ ID NO: 197689 - DNA, 25 bp, Probe Sequence
cctgtccgtggagaacgctgcagaa

SEQ ID NO: 197690 - DNA, 25 bp, Probe Sequence
cctgcaccgggagttgagggagcag

SEQ ID NO: 197691 - DNA, 25 bp, Probe Sequence
cctgccccggacagcaagagacaga

SEQ ID NO: 197692 - DNA, 25 bp, Probe Sequence
cctgccccggacagcaagagacaga

SEQ ID NO: 197693 - DNA, 25 bp, Probe Sequence
cctgccccgagctcgaagaagaggc

SEQ ID NO: 197694 - DNA, 25 bp, Probe Sequence
cctgtccctgagcacagaggcaagg

SEQ ID NO: 197695 - DNA, 25 bp, Probe Sequence
cctgtcttgctagacaaggttgctg

SEQ ID NO: 197696 - DNA, 25 bp, Probe Sequence
cctgctctttactcaatggtaccca

SEQ ID NO: 197697 - DNA, 25 bp, Probe Sequence
cctcccattaggacaatcagtcccc

SEQ ID NO: 197698 - DNA, 25 bp, Probe Sequence
cctccctgggaatacagtcccttgt

SEQ ID NO: 197699 - DNA, 25 bp, Probe Sequence
cctccctggggatcaactccagata

SEQ ID NO: 197700 - DNA, 25 bp, Probe Sequence
cctccgtggggagataacacagggg

SEQ ID NO: 197701 - DNA, 25 bp, Probe Sequence
cctccttgggagggtccagtatgag

SEQ ID NO: 197702 - DNA, 25 bp, Probe Sequence
cctgccacggggtgttggatatgga

SEQ ID NO: 197703 - DNA, 25 bp, Probe Sequence
cctgcaatagggtgtgtttgttgta

SEQ ID NO: 197704 - DNA, 25 bp, Probe Sequence
cctcgacaggtgtaggtttgtggga

SEQ ID NO: 197705 - DNA, 25 bp, Probe Sequence
cctcgcccagctaattttttcgtat

SEQ ID NO: 197706 - DNA, 25 bp, Probe Sequence
cctcccggttgaagcaattatcctg

SEQ ID NO: 197707 - DNA, 25 bp, Probe Sequence
ccttcaggtggtttacttattctgt

SEQ ID NO: 197708 - DNA, 25 bp, Probe Sequence
cctgccagagggagttcttcttttg

SEQ ID NO: 197709 - DNA, 25 bp, Probe Sequence
cctgcacgagtgtattggtctgtct

SEQ ID NO: 197710 - DNA, 25 bp, Probe Sequence
cctgcacgggagacaggtctgtctt

SEQ ID NO: 197711 - DNA, 25 bp, Probe Sequence
cctgagcatggacaagggcttctga

SEQ ID NO: 197712 - DNA, 25 bp, Probe Sequence
cctgcgcaggactcagatgacttcg

SEQ ID NO: 197713 - DNA, 25 bp, Probe Sequence
cctgcgaggagctgccagtgtacga

SEQ ID NO: 197714 - DNA, 25 bp, Probe Sequence
cctgaaatggtcctcttaagaacta

SEQ ID NO: 197715 - DNA, 25 bp, Probe Sequence
cctgaggctgagtaagttataagag

SEQ ID NO: 197716 - DNA, 25 bp, Probe Sequence
cctgcagcagaacacgtctctagaa

SEQ ID NO: 197717 - DNA, 25 bp, Probe Sequence
cctgcgggagcgtgatgtgctggaa

SEQ ID NO: 197718 - DNA, 25 bp, Probe Sequence
cctgcggaggtgggcggcatgcagc

SEQ ID NO: 197719 - DNA, 25 bp, Probe Sequence
cctgaggagagggtagtcagcatct

SEQ ID NO: 197720 - DNA, 25 bp, Probe Sequence
cctgccgaagctgtctgagcagctc

SEQ ID NO: 197721 - DNA, 25 bp, Probe Sequence
cctccgaagctctggaagcgcaagc

SEQ ID NO: 197722 - DNA, 25 bp, Probe Sequence
cctcaccaacacggtgactgcggtg

SEQ ID NO: 197723 - DNA, 25 bp, Probe Sequence
cctcctcaaacaagagactccactg

SEQ ID NO: 197724 - DNA, 25 bp, Probe Sequence
cctcctaaggccaaaacgcctgcca

SEQ ID NO: 197725 - DNA, 25 bp, Probe Sequence
cctcctataggatcacaactcctca

SEQ ID NO: 197726 - DNA, 25 bp, Probe Sequence
cctccgtagagctcacagtctagat

SEQ ID NO: 197727 - DNA, 25 bp, Probe Sequence
cctgccttagtgtgcaatctcattt

SEQ ID NO: 197728 - DNA, 25 bp, Probe Sequence
cctgcttcatagattgcatcattca

SEQ ID NO: 197729 - DNA, 25 bp, Probe Sequence
cctgcctcgaggactgatactgcag

SEQ ID NO: 197730 - DNA, 25 bp, Probe Sequence
cctgacatcccgagaagtccagacg

SEQ ID NO: 197731 - DNA, 25 bp, Probe Sequence
cctgaacgagtgtgaagtgcccaag

SEQ ID NO: 197732 - DNA, 25 bp, Probe Sequence
cctgagtcgaggtgactggtacaag

SEQ ID NO: 197733 - DNA, 25 bp, Probe Sequence
cctgagctcgggaagtcgaggctac

SEQ ID NO: 197734 - DNA, 25 bp, Probe Sequence
cctgactccaggaagagccagagct

SEQ ID NO: 197735 - DNA, 25 bp, Probe Sequence
cctaccaaggatacccacagtacgg

SEQ ID NO: 197736 - DNA, 25 bp, Probe Sequence
cctgaccaaggtgccagctattcaa

SEQ ID NO: 197737 - DNA, 25 bp, Probe Sequence
cctgatggaatgcgcacacagctcc

SEQ ID NO: 197738 - DNA, 25 bp, Probe Sequence
cctgatggcagctatgtacacatgt

SEQ ID NO: 197739 - DNA, 25 bp, Probe Sequence
cctctggcagctagctacgcaatgt

SEQ ID NO: 197740 - DNA, 25 bp, Probe Sequence
cctgctacctgtcatgcagcattta

SEQ ID NO: 197741 - DNA, 25 bp, Probe Sequence
cctgcattccatagccatgtgcttg

SEQ ID NO: 197742 - DNA, 25 bp, Probe Sequence
cctgcagatcctactgctatcctta

SEQ ID NO: 197743 - DNA, 25 bp, Probe Sequence
cctgaacgacctgatgctgcttcag

SEQ ID NO: 197744 - DNA, 25 bp, Probe Sequence
cctgctacaactatagtgcttgagt

SEQ ID NO: 197745 - DNA, 25 bp, Probe Sequence
cctgctttacaacagttctggcctc

SEQ ID NO: 197746 - DNA, 25 bp, Probe Sequence
cctgccattaagcccagtacatgac

SEQ ID NO: 197747 - DNA, 25 bp, Probe Sequence
cctgccttaaatcatctaatcatcc

SEQ ID NO: 197748 - DNA, 25 bp, Probe Sequence
cctgctctctaacggttgattctca

SEQ ID NO: 197749 - DNA, 25 bp, Probe Sequence
cctgtttgtagctgattgttgtgtt

SEQ ID NO: 197750 - DNA, 25 bp, Probe Sequence
cctgcagtttagttaatatgtgttg

SEQ ID NO: 197751 - DNA, 25 bp, Probe Sequence
cctagctcttctctaacttggttaa

SEQ ID NO: 197752 - DNA, 25 bp, Probe Sequence
cctgagttcctgctagatttcgtat

SEQ ID NO: 197753 - DNA, 25 bp, Probe Sequence
cctgagtttctgctatggtgctgga

SEQ ID NO: 197754 - DNA, 25 bp, Probe Sequence
cctgttttcgctgtgtgtggcgggg

SEQ ID NO: 197755 - DNA, 25 bp, Probe Sequence
cctgtatattctcttgtctggctgc

SEQ ID NO: 197756 - DNA, 25 bp, Probe Sequence
cctgcattttgcattcttcgtatgt

SEQ ID NO: 197757 - DNA, 25 bp, Probe Sequence
cctgcatctttcatagttctgttaa

SEQ ID NO: 197758 - DNA, 25 bp, Probe Sequence
cctgctcattctcgtagctttttaa

SEQ ID NO: 197759 - DNA, 25 bp, Probe Sequence
cctgtattcaaggcgcttctttcca

SEQ ID NO: 197760 - DNA, 25 bp, Probe Sequence
cctctgcatacaaggccctgtttgc

SEQ ID NO: 197761 - DNA, 25 bp, Probe Sequence
cctgatgctccaatgtcccaggttt

SEQ ID NO: 197762 - DNA, 25 bp, Probe Sequence
cctgcagcatgtcatgctcccagaa

SEQ ID NO: 197763 - DNA, 25 bp, Probe Sequence
cctgcgctgtgcactcaacaagagt

SEQ ID NO: 197764 - DNA, 25 bp, Probe Sequence
cctgcgcatggcagccatccgcagg

SEQ ID NO: 197765 - DNA, 25 bp, Probe Sequence
cctgctgcatgtcacagacaccggt

SEQ ID NO: 197766 - DNA, 25 bp, Probe Sequence
cctgactgtccagagcatccaggtc

SEQ ID NO: 197767 - DNA, 25 bp, Probe Sequence
cctgacaattcagaaccagctctct

SEQ ID NO: 197768 - DNA, 25 bp, Probe Sequence
cctgacagtactgaagaacttcttc

SEQ ID NO: 197769 - DNA, 25 bp, Probe Sequence
cctgatctaactgatgaaaatttct

SEQ ID NO: 197770 - DNA, 25 bp, Probe Sequence
cctgagctaaggttaaggctggtct

SEQ ID NO: 197771 - DNA, 25 bp, Probe Sequence
cctcccacatgccttaaggggaccg

SEQ ID NO: 197772 - DNA, 25 bp, Probe Sequence
cctcccatcagctctacatctgagg

SEQ ID NO: 197773 - DNA, 25 bp, Probe Sequence
cctcccatcagctctacatctgagg

SEQ ID NO: 197774 - DNA, 25 bp, Probe Sequence
cctgcccaagttcacagctgtagca

SEQ ID NO: 197775 - DNA, 25 bp, Probe Sequence
cctgcacctactttaatgatatagc

SEQ ID NO: 197776 - DNA, 25 bp, Probe Sequence
cctcaaaactgctgcatggataaca

SEQ ID NO: 197777 - DNA, 25 bp, Probe Sequence
cctgaattccgcctgcacagataaa

SEQ ID NO: 197778 - DNA, 25 bp, Probe Sequence
cctgcaagacaccctgaagcaaaaa

SEQ ID NO: 197779 - DNA, 25 bp, Probe Sequence
cctgcagtggcaccctgtacaaaaa

SEQ ID NO: 197780 - DNA, 25 bp, Probe Sequence
cctgcagtggcaccctgtacaaaaa

SEQ ID NO: 197781 - DNA, 25 bp, Probe Sequence
cctgcagtggcaccctgtacaaaaa

SEQ ID NO: 197782 - DNA, 25 bp, Probe Sequence
cctgatcttctgattgccataaaaa

SEQ ID NO: 197783 - DNA, 25 bp, Probe Sequence
cctgatcgtcaggaccctaaagaat

SEQ ID NO: 197784 - DNA, 25 bp, Probe Sequence
cctgatttatgaactctataataga

SEQ ID NO: 197785 - DNA, 25 bp, Probe Sequence
cctgcttctagggctctgaatacgg

SEQ ID NO: 197786 - DNA, 25 bp, Probe Sequence
cctctggtcagaatccggatactgg

SEQ ID NO: 197787 - DNA, 25 bp, Probe Sequence
cctcgttgcaggacagggtcatcat

SEQ ID NO: 197788 - DNA, 25 bp, Probe Sequence
cctcgttgcaggacagggtcatcat

SEQ ID NO: 197789 - DNA, 25 bp, Probe Sequence
cctcggtcgtgttggtgtgatcacc

SEQ ID NO: 197790 - DNA, 25 bp, Probe Sequence
cctgctggtaagagagttgtcacta

SEQ ID NO: 197791 - DNA, 25 bp, Probe Sequence
cctctggtacagaagatgtcgtccg

SEQ ID NO: 197792 - DNA, 25 bp, Probe Sequence
cctgaggtgacattaatggactgca

SEQ ID NO: 197793 - DNA, 25 bp, Probe Sequence
cctgctggtgccgtggatgtcacca

SEQ ID NO: 197794 - DNA, 25 bp, Probe Sequence
cctgctgctgctaggaggaggccta

SEQ ID NO: 197795 - DNA, 25 bp, Probe Sequence
cctgatgtgctcagtgagagagata

SEQ ID NO: 197796 - DNA, 25 bp, Probe Sequence
cctgagctgcttcctgagacagatg

SEQ ID NO: 197797 - DNA, 25 bp, Probe Sequence
cctgcactgactcctgagactattt

SEQ ID NO: 197798 - DNA, 25 bp, Probe Sequence
cctgcctcagcttcgagagtattgg

SEQ ID NO: 197799 - DNA, 25 bp, Probe Sequence
cctgcccagctgtaaggaccggggg

SEQ ID NO: 197800 - DNA, 25 bp, Probe Sequence
cctcgtcacggttatcccaggaggg

SEQ ID NO: 197801 - DNA, 25 bp, Probe Sequence
cctgcagatcacggaagaccctggc

SEQ ID NO: 197802 - DNA, 25 bp, Probe Sequence
cagcagaggcataaggttcgggaag

SEQ ID NO: 197803 - DNA, 25 bp, Probe Sequence
cctgcagcttctgcagagggccacc

SEQ ID NO: 197804 - DNA, 25 bp, Probe Sequence
cctgcagcgttgagaaacccagccc

SEQ ID NO: 197805 - DNA, 25 bp, Probe Sequence
cctgcactttgcagaggacacgctg

SEQ ID NO: 197806 - DNA, 25 bp, Probe Sequence
cctacttagaagctgaaacgtgggt

SEQ ID NO: 197807 - DNA, 25 bp, Probe Sequence
cctacctcaaagcacaaaagtggtg

SEQ ID NO: 197808 - DNA, 25 bp, Probe Sequence
cctcacctcaaagaaacactccagg

SEQ ID NO: 197809 - DNA, 25 bp, Probe Sequence
cctacgagtacggcccagacttagg

SEQ ID NO: 197810 - DNA, 25 bp, Probe Sequence
cctcgggtgactctgtcagagcttt

SEQ ID NO: 197811 - DNA, 25 bp, Probe Sequence
cctgagggtctggggtcaggctttg

SEQ ID NO: 197812 - DNA, 25 bp, Probe Sequence
cctcagggcctgacagtgtgggaca

SEQ ID NO: 197813 - DNA, 25 bp, Probe Sequence
cctgattcccagactccttggaata

SEQ ID NO: 197814 - DNA, 25 bp, Probe Sequence
cctgcaatcccagctacttggaagg

SEQ ID NO: 197815 - DNA, 25 bp, Probe Sequence
cctgcaatcccagctactcaggagg

SEQ ID NO: 197816 - DNA, 25 bp, Probe Sequence
cctgcatacctcttcttacagtgag

SEQ ID NO: 197817 - DNA, 25 bp, Probe Sequence
cctgatggctctgtgcagtacctgg

SEQ ID NO: 197818 - DNA, 25 bp, Probe Sequence
cctgcaagcctcggcagaagctcgt

SEQ ID NO: 197819 - DNA, 25 bp, Probe Sequence
cctgccagccatcggcagcaagcga

SEQ ID NO: 197820 - DNA, 25 bp, Probe Sequence
cctgacgctatgacacacagcgcga

SEQ ID NO: 197821 - DNA, 25 bp, Probe Sequence
cctgacctttgaacctctaacattg

SEQ ID NO: 197822 - DNA, 25 bp, Probe Sequence
cctgacctattgagcagcctctgaa

SEQ ID NO: 197823 - DNA, 25 bp, Probe Sequence
cctgacctattgagcagcctctgaa

SEQ ID NO: 197824 - DNA, 25 bp, Probe Sequence
cctacctctataagcacccagaagg

SEQ ID NO: 197825 - DNA, 25 bp, Probe Sequence
cctgagcaacttatcacaggcaaag

SEQ ID NO: 197826 - DNA, 25 bp, Probe Sequence
cctcgaatctcatgttcaggaaata

SEQ ID NO: 197827 - DNA, 25 bp, Probe Sequence
cctgcaggatctcatggtccggaat

SEQ ID NO: 197828 - DNA, 25 bp, Probe Sequence
cctgcaagatccctgatgacctggg

SEQ ID NO: 197829 - DNA, 25 bp, Probe Sequence
cctgagagtctctaaacactgggaa

SEQ ID NO: 197830 - DNA, 25 bp, Probe Sequence
cctcgaggttgaaccctcggatacg

SEQ ID NO: 197831 - DNA, 25 bp, Probe Sequence
cctccaggcttgtaatacccttcac

SEQ ID NO: 197832 - DNA, 25 bp, Probe Sequence
cctgctagcctacaaatcctactaa

SEQ ID NO: 197833 - DNA, 25 bp, Probe Sequence
ccatgtccctacaaacccatgattg

SEQ ID NO: 197834 - DNA, 25 bp, Probe Sequence
ccatctacttgacaaccgcagtcgg

SEQ ID NO: 197835 - DNA, 25 bp, Probe Sequence
tccctagctttagaccctgggtggg

SEQ ID NO: 197836 - DNA, 25 bp, Probe Sequence
cctcagacttttctctcagttggga

SEQ ID NO: 197837 - DNA, 25 bp, Probe Sequence
ccttgagtgtttcaccttcttggat

SEQ ID NO: 197838 - DNA, 25 bp, Probe Sequence
cctttggctttcacctttggagaag

SEQ ID NO: 197839 - DNA, 25 bp, Probe Sequence
cctacgttttcacacttctagtaag

SEQ ID NO: 197840 - DNA, 25 bp, Probe Sequence
cctccgttttaagcctatgttacag

SEQ ID NO: 197841 - DNA, 25 bp, Probe Sequence
cctgcttgttgtaagactccgttta

SEQ ID NO: 197842 - DNA, 25 bp, Probe Sequence
cctctggttgtgaagacgtcgttga

SEQ ID NO: 197843 - DNA, 25 bp, Probe Sequence
cctgaggtcttggaggtgaccctga

SEQ ID NO: 197844 - DNA, 25 bp, Probe Sequence
cctgatgctgttatgggcaacccta

SEQ ID NO: 197845 - DNA, 25 bp, Probe Sequence
cctgctgctttcattgacagtattc

SEQ ID NO: 197846 - DNA, 25 bp, Probe Sequence
cctgctctgtttttggctgtgagac

SEQ ID NO: 197847 - DNA, 25 bp, Probe Sequence
cctgctttttactggggactccaga

SEQ ID NO: 197848 - DNA, 25 bp, Probe Sequence
cctctttttatcctggtgtgaaaca

SEQ ID NO: 197849 - DNA, 25 bp, Probe Sequence
cctcttacatttatggggcacaaca

SEQ ID NO: 197850 - DNA, 25 bp, Probe Sequence
cctgccagctctactacatggggga

SEQ ID NO: 197851 - DNA, 25 bp, Probe Sequence
cctcctctgttcaatcatgggtgta

SEQ ID NO: 197852 - DNA, 25 bp, Probe Sequence
cctcctcttgtcaggcagggacaac

SEQ ID NO: 197853 - DNA, 25 bp, Probe Sequence
cctccttgttgtggacagggaagtg

SEQ ID NO: 197854 - DNA, 25 bp, Probe Sequence
cctgactctttcctcacagggaagg

SEQ ID NO: 197855 - DNA, 25 bp, Probe Sequence
cctgacctcctggtgactggagaca

SEQ ID NO: 197856 - DNA, 25 bp, Probe Sequence
cctgacctcctttgactggaatgag

SEQ ID NO: 197857 - DNA, 25 bp, Probe Sequence
cctgaccgccgccagaagagattga

SEQ ID NO: 197858 - DNA, 25 bp, Probe Sequence
cctgcatccccatcaagaaatctga

SEQ ID NO: 197859 - DNA, 25 bp, Probe Sequence
cctgctacccagtaaaaatccacta

SEQ ID NO: 197860 - DNA, 25 bp, Probe Sequence
cctgagacccaatgagaatcaacac

SEQ ID NO: 197861 - DNA, 25 bp, Probe Sequence
cctgagcacttctagtcagatacag

SEQ ID NO: 197862 - DNA, 25 bp, Probe Sequence
cctgcagcattatcctctgtatcgg

SEQ ID NO: 197863 - DNA, 25 bp, Probe Sequence
cctgcagcattatcctctgtatcgg

SEQ ID NO: 197864 - DNA, 25 bp, Probe Sequence
cctgcactgctttccttggatgaga

SEQ ID NO: 197865 - DNA, 25 bp, Probe Sequence
cctgcgtggtgggctatgggatata

SEQ ID NO: 197866 - DNA, 25 bp, Probe Sequence
cctgctcggtgctacggatggatta

SEQ ID NO: 197867 - DNA, 25 bp, Probe Sequence
cctccaggatgctcgctgggattcc

SEQ ID NO: 197868 - DNA, 25 bp, Probe Sequence
cctgccaggaggtgtgagagtgatc

SEQ ID NO: 197869 - DNA, 25 bp, Probe Sequence
cctgcgtggagggggaatgtgtgct

SEQ ID NO: 197870 - DNA, 25 bp, Probe Sequence
cctgctgtgtgtcgggcttattatt

SEQ ID NO: 197871 - DNA, 25 bp, Probe Sequence
cctgcgttgcacttgtcattgtgtt

SEQ ID NO: 197872 - DNA, 25 bp, Probe Sequence
cctgctgttagctttcattattttt

SEQ ID NO: 197873 - DNA, 25 bp, Probe Sequence
cctgctgcctggcctttataatttt

SEQ ID NO: 197874 - DNA, 25 bp, Probe Sequence
cctgcagccttctactttaaagtgt

SEQ ID NO: 197875 - DNA, 25 bp, Probe Sequence
cctgagctggtctgcttgtcaaagt

SEQ ID NO: 197876 - DNA, 25 bp, Probe Sequence
cctgcacaggtatttttgaaagcca

SEQ ID NO: 197877 - DNA, 25 bp, Probe Sequence
cctgacggtgatcttgggcagaaca

SEQ ID NO: 197878 - DNA, 25 bp, Probe Sequence
cctcctggtgatatttgctgctgaa

SEQ ID NO: 197879 - DNA, 25 bp, Probe Sequence
cctcctggtgggtttgtgcttcagg

SEQ ID NO: 197880 - DNA, 25 bp, Probe Sequence
cctcggtgcgtggattctggtccga

SEQ ID NO: 197881 - DNA, 25 bp, Probe Sequence
cctcactggagggcattgccccgga

SEQ ID NO: 197882 - DNA, 25 bp, Probe Sequence
cctgcagctgagctgccagttcctc

SEQ ID NO: 197883 - DNA, 25 bp, Probe Sequence
cctgcagctgagctgccagttcctc

SEQ ID NO: 197884 - DNA, 25 bp, Probe Sequence
cctcatggagctccacagatccatt

SEQ ID NO: 197885 - DNA, 25 bp, Probe Sequence
cctcgggctctgagcaccaattttg

SEQ ID NO: 197886 - DNA, 25 bp, Probe Sequence
tcgccaaggcctaggacctatgttg

SEQ ID NO: 197887 - DNA, 25 bp, Probe Sequence
ccaaacccttggtcaccagcttata

SEQ ID NO: 197888 - DNA, 25 bp, Probe Sequence
cctgcagcccctataacacagattt

SEQ ID NO: 197889 - DNA, 25 bp, Probe Sequence
cctgcctgtacctcaaacagttttt

SEQ ID NO: 197890 - DNA, 25 bp, Probe Sequence
cctgctttagccccaacagagtggt

SEQ ID NO: 197891 - DNA, 25 bp, Probe Sequence
ccatcttaaacaacaccaggtgtaa

SEQ ID NO: 197892 - DNA, 25 bp, Probe Sequence
cctcatgtgacaccttaccggagta

SEQ ID NO: 197893 - DNA, 25 bp, Probe Sequence
ccttgcggaccattccgaggggagt

SEQ ID NO: 197894 - DNA, 25 bp, Probe Sequence
cctgctgccgagacaaccgacaggg

SEQ ID NO: 197895 - DNA, 25 bp, Probe Sequence
cctgcccaactccaaggactgggta

SEQ ID NO: 197896 - DNA, 25 bp, Probe Sequence
cctgcccaactccaaggactgggta

SEQ ID NO: 197897 - DNA, 25 bp, Probe Sequence
cctgccatcagagtcctcagagact

SEQ ID NO: 197898 - DNA, 25 bp, Probe Sequence
cctgccatcaacgtttggagccttg

SEQ ID NO: 197899 - DNA, 25 bp, Probe Sequence
cctgcccaatgcctttgatggacca

SEQ ID NO: 197900 - DNA, 25 bp, Probe Sequence
cctgactcctctttgtgcagagacc

SEQ ID NO: 197901 - DNA, 25 bp, Probe Sequence
cctgactcctctttgtgcagagacc

SEQ ID NO: 197902 - DNA, 25 bp, Probe Sequence
cctgactcctctttgtgcagagacc

SEQ ID NO: 197903 - DNA, 25 bp, Probe Sequence
cctgactaccgagggcagagctgca

SEQ ID NO: 197904 - DNA, 25 bp, Probe Sequence
cctgactaccgagggcagagctgca

SEQ ID NO: 197905 - DNA, 25 bp, Probe Sequence
cctcctccctgagggagcatggcac

SEQ ID NO: 197906 - DNA, 25 bp, Probe Sequence
cctgcctccagggctggactgaggc

SEQ ID NO: 197907 - DNA, 25 bp, Probe Sequence
cctgctccatagacgtgaggctgag

SEQ ID NO: 197908 - DNA, 25 bp, Probe Sequence
cctgccagcggtctgagtgtgagtc

SEQ ID NO: 197909 - DNA, 25 bp, Probe Sequence
cctgctgacaggtttggtggcactg

SEQ ID NO: 197910 - DNA, 25 bp, Probe Sequence
cctgctaaggctaaagttgatctga

SEQ ID NO: 197911 - DNA, 25 bp, Probe Sequence
cctgctacagacgttctttttcaca

SEQ ID NO: 197912 - DNA, 25 bp, Probe Sequence
cctgctccagacattttgttcttga

SEQ ID NO: 197913 - DNA, 25 bp, Probe Sequence
cctgctccgaccaagtgaattttaa

SEQ ID NO: 197914 - DNA, 25 bp, Probe Sequence
cctccccaacaaataatttgccaag

SEQ ID NO: 197915 - DNA, 25 bp, Probe Sequence
cctccagaaagtttaatgatttcca

SEQ ID NO: 197916 - DNA, 25 bp, Probe Sequence
cctgcctaaaattaactgctttaca

SEQ ID NO: 197917 - DNA, 25 bp, Probe Sequence
cctgcccaaggagacacgtttagat

SEQ ID NO: 197918 - DNA, 25 bp, Probe Sequence
cctccccggacgtggtgttatgtgg

SEQ ID NO: 197919 - DNA, 25 bp, Probe Sequence
cctgctcctgcgtggagggggaatg

SEQ ID NO: 197920 - DNA, 25 bp, Probe Sequence
cctgaccatgcctgcaggttggcaa

SEQ ID NO: 197921 - DNA, 25 bp, Probe Sequence
cctgacgcataatgacgtatggtcc

SEQ ID NO: 197922 - DNA, 25 bp, Probe Sequence
cctgcatcagaaacgagctttggtt

SEQ ID NO: 197923 - DNA, 25 bp, Probe Sequence
cctgacagacaaccatctcttttta

SEQ ID NO: 197924 - DNA, 25 bp, Probe Sequence
cctaatggagatccatctgtcctgt

SEQ ID NO: 197925 - DNA, 25 bp, Probe Sequence
cctaatggagatccatctgtcctgt

SEQ ID NO: 197926 - DNA, 25 bp, Probe Sequence
cctacacaggcactgattctccatg

SEQ ID NO: 197927 - DNA, 25 bp, Probe Sequence
cctcaacaggactttgtccagactc

SEQ ID NO: 197928 - DNA, 25 bp, Probe Sequence
cctcaacgaccactttgtcaagctc

SEQ ID NO: 197929 - DNA, 25 bp, Probe Sequence
cctcaacgaccactttgtcaagctc

SEQ ID NO: 197930 - DNA, 25 bp, Probe Sequence
cctccacgctcaaagtttcaggtct

SEQ ID NO: 197931 - DNA, 25 bp, Probe Sequence
gccatttgccccaacttaagtttag

SEQ ID NO: 197932 - DNA, 25 bp, Probe Sequence
cctctgggcccatcaaaagccttta

SEQ ID NO: 197933 - DNA, 25 bp, Probe Sequence
cctcgaggccttaaaaagctggctt

SEQ ID NO: 197934 - DNA, 25 bp, Probe Sequence
cctcgtggttataagcaaggctggg

SEQ ID NO: 197935 - DNA, 25 bp, Probe Sequence
cctgcgggtggcagaggagccggtg

SEQ ID NO: 197936 - DNA, 25 bp, Probe Sequence
cctgccgagaggactagtatggggt

SEQ ID NO: 197937 - DNA, 25 bp, Probe Sequence
cctcctgagagccactaatgtaaga

SEQ ID NO: 197938 - DNA, 25 bp, Probe Sequence
cctgcacttcaccaaggatgtcaag

SEQ ID NO: 197939 - DNA, 25 bp, Probe Sequence
cctcgttgcccatggctgagaagtt

SEQ ID NO: 197940 - DNA, 25 bp, Probe Sequence
cctcggagtcgcaggagaactgtgt

SEQ ID NO: 197941 - DNA, 25 bp, Probe Sequence
cctcctagtcttgatagcgagcgtt

SEQ ID NO: 197942 - DNA, 25 bp, Probe Sequence
cctgccccacttgaaggcaggcctc

SEQ ID NO: 197943 - DNA, 25 bp, Probe Sequence
cctactccattgataacgaggccct

SEQ ID NO: 197944 - DNA, 25 bp, Probe Sequence
cctcgattattgaactaccagtgct

SEQ ID NO: 197945 - DNA, 25 bp, Probe Sequence
cctcagtaactgatgcaatcaactg

SEQ ID NO: 197946 - DNA, 25 bp, Probe Sequence
cctgccccctgcagcaataagatgc

SEQ ID NO: 197947 - DNA, 25 bp, Probe Sequence
cctgcccccagaagcgcagaagatt

SEQ ID NO: 197948 - DNA, 25 bp, Probe Sequence
cctcctccaacaacacgtggatctg

SEQ ID NO: 197949 - DNA, 25 bp, Probe Sequence
cctccgtgaagaagaccatggtgtg

SEQ ID NO: 197950 - DNA, 25 bp, Probe Sequence
cctgcctgtttacgtccaaggatgc

SEQ ID NO: 197951 - DNA, 25 bp, Probe Sequence
cctcctcggtggctctgaagaggcc

SEQ ID NO: 197952 - DNA, 25 bp, Probe Sequence
cctcctagagtgggtgtgacatgaa

SEQ ID NO: 197953 - DNA, 25 bp, Probe Sequence
cctctgtacagggccctagagcaga

SEQ ID NO: 197954 - DNA, 25 bp, Probe Sequence
cctgcagtacagctccaatggcaag

SEQ ID NO: 197955 - DNA, 25 bp, Probe Sequence
cctgctgctactctcacagaagtat

SEQ ID NO: 197956 - DNA, 25 bp, Probe Sequence
cctcatgcgattctccatcaggaat

SEQ ID NO: 197957 - DNA, 25 bp, Probe Sequence
cctgcaggaatgccccatcctgaaa

SEQ ID NO: 197958 - DNA, 25 bp, Probe Sequence
cctgcagccaagcaaatgcctgcca

SEQ ID NO: 197959 - DNA, 25 bp, Probe Sequence
cctgccaccaggcactgcctggagg

SEQ ID NO: 197960 - DNA, 25 bp, Probe Sequence
cctccgacgaggctgcctgtgaaaa

SEQ ID NO: 197961 - DNA, 25 bp, Probe Sequence
cctgctaacgggatatgctgagaat

SEQ ID NO: 197962 - DNA, 25 bp, Probe Sequence
cctgctcaacttaggctcagtgaaa

SEQ ID NO: 197963 - DNA, 25 bp, Probe Sequence
cctgccacctctaacaagtacatga

SEQ ID NO: 197964 - DNA, 25 bp, Probe Sequence
cctgcgcaccatctcaagggaatac

SEQ ID NO: 197965 - DNA, 25 bp, Probe Sequence
cctgctgcacggatacatgggaata

SEQ ID NO: 197966 - DNA, 25 bp, Probe Sequence
cctgccacggctgaccagagaaggt

SEQ ID NO: 197967 - DNA, 25 bp, Probe Sequence
cctgccacctctgacggagtgggag

SEQ ID NO: 197968 - DNA, 25 bp, Probe Sequence
cctgccccctgaatggtatgtggtg

SEQ ID NO: 197969 - DNA, 25 bp, Probe Sequence
cctgcccaggcagctggtggtgggc

SEQ ID NO: 197970 - DNA, 25 bp, Probe Sequence
cctgcccaggcagctggtggtgggc

SEQ ID NO: 197971 - DNA, 25 bp, Probe Sequence
cctgccgaggcaatggtgctgggat

SEQ ID NO: 197972 - DNA, 25 bp, Probe Sequence
cctgctcagaccttgcaggctgtgg

SEQ ID NO: 197973 - DNA, 25 bp, Probe Sequence
cctgcacttcaggtgcaagctgggc

SEQ ID NO: 197974 - DNA, 25 bp, Probe Sequence
cctcggtgcagagtgcagaggcggc

SEQ ID NO: 197975 - DNA, 25 bp, Probe Sequence
cctcctggcagaatgctagctctga

SEQ ID NO: 197976 - DNA, 25 bp, Probe Sequence
cctcctggcagaatgctagctctga

SEQ ID NO: 197977 - DNA, 25 bp, Probe Sequence
cctgcactggatacccatgactgca

SEQ ID NO: 197978 - DNA, 25 bp, Probe Sequence
cctgcagctggattacgcaacagta

SEQ ID NO: 197979 - DNA, 25 bp, Probe Sequence
cctgcagctggattacgcaacagta

SEQ ID NO: 197980 - DNA, 25 bp, Probe Sequence
cctcctggaaagccaacgggatcag

SEQ ID NO: 197981 - DNA, 25 bp, Probe Sequence
cctccttgaacacccagcgggagag

SEQ ID NO: 197982 - DNA, 25 bp, Probe Sequence
cctccctgcaaacctaccagtgagg

SEQ ID NO: 197983 - DNA, 25 bp, Probe Sequence
cctccctgcaaaccaagggctgggg

SEQ ID NO: 197984 - DNA, 25 bp, Probe Sequence
cctgccctgctgtcattacagggat

SEQ ID NO: 197985 - DNA, 25 bp, Probe Sequence
cctgctcttctgcatgaaaggtgta

SEQ ID NO: 197986 - DNA, 25 bp, Probe Sequence
cctgctttgcctcgaaagtgtcatc

SEQ ID NO: 197987 - DNA, 25 bp, Probe Sequence
cctgctgtctgctgtaaaggctgca

SEQ ID NO: 197988 - DNA, 25 bp, Probe Sequence
cctgctcttgttggaagatcctgcc

SEQ ID NO: 197989 - DNA, 25 bp, Probe Sequence
cctgcctggcttagaagaccttggt

SEQ ID NO: 197990 - DNA, 25 bp, Probe Sequence
cctagctacatctggtaccttggct

SEQ ID NO: 197991 - DNA, 25 bp, Probe Sequence
cctcactacagctggtatcgcaatg

SEQ ID NO: 197992 - DNA, 25 bp, Probe Sequence
cctgcctgacatggaggctgtggca

SEQ ID NO: 197993 - DNA, 25 bp, Probe Sequence
cctcgtgccacactggctttgaggt

SEQ ID NO: 197994 - DNA, 25 bp, Probe Sequence
cctcaaccacttgtcttggctgtag

SEQ ID NO: 197995 - DNA, 25 bp, Probe Sequence
cctgcaactcaaaggcttttttaag

SEQ ID NO: 197996 - DNA, 25 bp, Probe Sequence
cctaagctggagttctgatttttaa

SEQ ID NO: 197997 - DNA, 25 bp, Probe Sequence
cctacagcttagtattgtggttgac

SEQ ID NO: 197998 - DNA, 25 bp, Probe Sequence
cctccagtctcggacttggttgttg

SEQ ID NO: 197999 - DNA, 25 bp, Probe Sequence
cctccgcttccgggattttgtggat

SEQ ID NO: 198000 - DNA, 25 bp, Probe Sequence
cctccgcttccgggattttgtggat

SEQ ID NO: 198001 - DNA, 25 bp, Probe Sequence
cctccatttccacttggtgtttggt

SEQ ID NO: 198002 - DNA, 25 bp, Probe Sequence
cctccttctcaaatttttcaatggt

SEQ ID NO: 198003 - DNA, 25 bp, Probe Sequence
cctgcttgttcagttaattacatat

SEQ ID NO: 198004 - DNA, 25 bp, Probe Sequence
cctgcttttatgacatagatcttga

SEQ ID NO: 198005 - DNA, 25 bp, Probe Sequence
cctgcttctactccatagcacagtt

SEQ ID NO: 198006 - DNA, 25 bp, Probe Sequence
cctgcatgtctcctgcaatgagcaa

SEQ ID NO: 198007 - DNA, 25 bp, Probe Sequence
cctgcagtgtcgccatgactgatca

SEQ ID NO: 198008 - DNA, 25 bp, Probe Sequence
cctgcagtgtcgccatgactgatca

SEQ ID NO: 198009 - DNA, 25 bp, Probe Sequence
cctgcagagatggcacagactgcaa

SEQ ID NO: 198010 - DNA, 25 bp, Probe Sequence
cctgcagaggctcagatctgcatgt

SEQ ID NO: 198011 - DNA, 25 bp, Probe Sequence
cctgcgtggcatcaatagcttccgc

SEQ ID NO: 198012 - DNA, 25 bp, Probe Sequence
cctcgatgctcttagctgagtgtcc

SEQ ID NO: 198013 - DNA, 25 bp, Probe Sequence
cctctggccgtaccactggcatcgt

SEQ ID NO: 198014 - DNA, 25 bp, Probe Sequence
cctcgtgctcgtagatcaaacatgc

SEQ ID NO: 198015 - DNA, 25 bp, Probe Sequence
cctctgattctgatgtctaatgctt

SEQ ID NO: 198016 - DNA, 25 bp, Probe Sequence
cctgcgtctatccatgtggaatgct

SEQ ID NO: 198017 - DNA, 25 bp, Probe Sequence
cctgctgacttaggtggcgtgtttc

SEQ ID NO: 198018 - DNA, 25 bp, Probe Sequence
cctgcatcacgttgggtggtttcca

SEQ ID NO: 198019 - DNA, 25 bp, Probe Sequence
cctcaacagttctgggtttgccctg

SEQ ID NO: 198020 - DNA, 25 bp, Probe Sequence
cctaaagtgcttgctttttgcccgt

SEQ ID NO: 198021 - DNA, 25 bp, Probe Sequence
ccatagactcagtgtttttcccctg

SEQ ID NO: 198022 - DNA, 25 bp, Probe Sequence
cctacctagttgatctttcagatct

SEQ ID NO: 198023 - DNA, 25 bp, Probe Sequence
cctaccttgttgttttctcatatta

SEQ ID NO: 198024 - DNA, 25 bp, Probe Sequence
cctcccaagtggtttagtcagctta

SEQ ID NO: 198025 - DNA, 25 bp, Probe Sequence
cctcctcactttttgggtagtctat

SEQ ID NO: 198026 - DNA, 25 bp, Probe Sequence
cctcaaaagactgctgggaagatta

SEQ ID NO: 198027 - DNA, 25 bp, Probe Sequence
cctgcagaaagatgacctggcaaac

SEQ ID NO: 198028 - DNA, 25 bp, Probe Sequence
cctaaacatgtaaccatgccctacc

SEQ ID NO: 198029 - DNA, 25 bp, Probe Sequence
ccttaaagacaaacatctcgccccg

SEQ ID NO: 198030 - DNA, 25 bp, Probe Sequence
ccaaaagaaactgacatgccctccc

SEQ ID NO: 198031 - DNA, 25 bp, Probe Sequence
ccagaaatgcccagtaatcacctca

SEQ ID NO: 198032 - DNA, 25 bp, Probe Sequence
cctgcatttcccattaatctacata

SEQ ID NO: 198033 - DNA, 25 bp, Probe Sequence
cctgccttcaccatgaagtccagcg

SEQ ID NO: 198034 - DNA, 25 bp, Probe Sequence
cctgcttcctccagaagacacgaat

SEQ ID NO: 198035 - DNA, 25 bp, Probe Sequence
cctgctgtcagtgctggacgaagtg

SEQ ID NO: 198036 - DNA, 25 bp, Probe Sequence
cctgctgtcgtcttagcaagaagta

SEQ ID NO: 198037 - DNA, 25 bp, Probe Sequence
cctcgctgcgatctattgaaagtca

SEQ ID NO: 198038 - DNA, 25 bp, Probe Sequence
cctccatggagtacttcaaatctgc

SEQ ID NO: 198039 - DNA, 25 bp, Probe Sequence
cctgcggagggacttcaatcacatc

SEQ ID NO: 198040 - DNA, 25 bp, Probe Sequence
cctcaagagtaactacaatcttccc

SEQ ID NO: 198041 - DNA, 25 bp, Probe Sequence
cctcatgaaatatattcaatccact

SEQ ID NO: 198042 - DNA, 25 bp, Probe Sequence
ccttatcagatatataattggcagg

SEQ ID NO: 198043 - DNA, 25 bp, Probe Sequence
cctttcaaacagctattggcaagtt

SEQ ID NO: 198044 - DNA, 25 bp, Probe Sequence
cctcttcctaagtttacaccagtgt

SEQ ID NO: 198045 - DNA, 25 bp, Probe Sequence
cctctgtccaaacatttcatccgtg

SEQ ID NO: 198046 - DNA, 25 bp, Probe Sequence
cctgctggcactgaggattatatcc

SEQ ID NO: 198047 - DNA, 25 bp, Probe Sequence
cctgctggctctgacgagtatgaag

SEQ ID NO: 198048 - DNA, 25 bp, Probe Sequence
ccttggtcctacagcaagaagccag

SEQ ID NO: 198049 - DNA, 25 bp, Probe Sequence
cctctggtcctataaggacacccca

SEQ ID NO: 198050 - DNA, 25 bp, Probe Sequence
cctctcttcctaagaagccaattac

SEQ ID NO: 198051 - DNA, 25 bp, Probe Sequence
cctctctttctacagagccttacac

SEQ ID NO: 198052 - DNA, 25 bp, Probe Sequence
ccttctgggcaacatggccctacca

SEQ ID NO: 198053 - DNA, 25 bp, Probe Sequence
cctcctggacacataggccattatc

SEQ ID NO: 198054 - DNA, 25 bp, Probe Sequence
cctccggtgaggctgagccagtcaa

SEQ ID NO: 198055 - DNA, 25 bp, Probe Sequence
cctcctgagtgctggacctcattaa

SEQ ID NO: 198056 - DNA, 25 bp, Probe Sequence
cctcctgagtgctggacctcattaa

SEQ ID NO: 198057 - DNA, 25 bp, Probe Sequence
cctcctgagtgctggacctcattaa

SEQ ID NO: 198058 - DNA, 25 bp, Probe Sequence
cctcctagacctaacctgactagaa

SEQ ID NO: 198059 - DNA, 25 bp, Probe Sequence
cctcctagatacatacaatcttgga

SEQ ID NO: 198060 - DNA, 25 bp, Probe Sequence
cctccaaaatccacagtatgggacc

SEQ ID NO: 198061 - DNA, 25 bp, Probe Sequence
cctccaaagcccacagaaagagaga

SEQ ID NO: 198062 - DNA, 25 bp, Probe Sequence
cctccaaagaatgaaccaggaatgg

SEQ ID NO: 198063 - DNA, 25 bp, Probe Sequence
cctcaataaaatactagctcactga

SEQ ID NO: 198064 - DNA, 25 bp, Probe Sequence
cctccagaggtaactgtgctcacga

SEQ ID NO: 198065 - DNA, 25 bp, Probe Sequence
cctgccagcggttcctggactaagt

SEQ ID NO: 198066 - DNA, 25 bp, Probe Sequence
cctgccgggcttacgggctgaagag

SEQ ID NO: 198067 - DNA, 25 bp, Probe Sequence
cctccgggccttgtggcataaggtg

SEQ ID NO: 198068 - DNA, 25 bp, Probe Sequence
cctcctgggccgcttggtgagaggt

SEQ ID NO: 198069 - DNA, 25 bp, Probe Sequence
cctcctgcggcagagttgttcaggt

SEQ ID NO: 198070 - DNA, 25 bp, Probe Sequence
cctcgggcgcacagggttacgtgcg

SEQ ID NO: 198071 - DNA, 25 bp, Probe Sequence
cctccgggaccgaaatagccggcag

SEQ ID NO: 198072 - DNA, 25 bp, Probe Sequence
cctacctgtacccaaagtgcacgga

SEQ ID NO: 198073 - DNA, 25 bp, Probe Sequence
cctccctgtacgaaaggacaagaga

SEQ ID NO: 198074 - DNA, 25 bp, Probe Sequence
cctccaggtccgcaagaacaagcgt

SEQ ID NO: 198075 - DNA, 25 bp, Probe Sequence
cctccgagcttgggataaagcaagg

SEQ ID NO: 198076 - DNA, 25 bp, Probe Sequence
cctcggcgctggggtatcagtgagg

SEQ ID NO: 198077 - DNA, 25 bp, Probe Sequence
cctagccgccagggtgacagaaggc

SEQ ID NO: 198078 - DNA, 25 bp, Probe Sequence
cctcggcagccataggagcgaacac

SEQ ID NO: 198079 - DNA, 25 bp, Probe Sequence
cctgctggcctacagtggctacaaa

SEQ ID NO: 198080 - DNA, 25 bp, Probe Sequence
cctcggtctgcagcagctgcggaca

SEQ ID NO: 198081 - DNA, 25 bp, Probe Sequence
cctcggtgctgggcaccatggagat

SEQ ID NO: 198082 - DNA, 25 bp, Probe Sequence
cctgctttgctaccatcgtggaaga

SEQ ID NO: 198083 - DNA, 25 bp, Probe Sequence
cctgctttccaaatctggcagatgt

SEQ ID NO: 198084 - DNA, 25 bp, Probe Sequence
cctgcttttcacttccgaaggggag

SEQ ID NO: 198085 - DNA, 25 bp, Probe Sequence
ccttccattcctcactgaaggtggg

SEQ ID NO: 198086 - DNA, 25 bp, Probe Sequence
cctgctcctttttttactggtgtgg

SEQ ID NO: 198087 - DNA, 25 bp, Probe Sequence
cctgccactattaaaaactgagacc

SEQ ID NO: 198088 - DNA, 25 bp, Probe Sequence
cctgctgatcttaagaagagaatag

SEQ ID NO: 198089 - DNA, 25 bp, Probe Sequence
cctgctgtccctgtcaggacacatg

SEQ ID NO: 198090 - DNA, 25 bp, Probe Sequence
cctgcgttgccgtctatgcaaatgc

SEQ ID NO: 198091 - DNA, 25 bp, Probe Sequence
cctgcgttgccgtctatgcaaatgc

SEQ ID NO: 198092 - DNA, 25 bp, Probe Sequence
cctgctcctcagggctgtcaagagc

SEQ ID NO: 198093 - DNA, 25 bp, Probe Sequence
cctgctcctcagtcttgtaaatgta

SEQ ID NO: 198094 - DNA, 25 bp, Probe Sequence
cctgctctatcgtgatgctaacaga

SEQ ID NO: 198095 - DNA, 25 bp, Probe Sequence
cctgcttgtctgggactcacataca

SEQ ID NO: 198096 - DNA, 25 bp, Probe Sequence
cctgctctagtgggacagcccagag

SEQ ID NO: 198097 - DNA, 25 bp, Probe Sequence
cctgctgtgagtgggtctcccaaga

SEQ ID NO: 198098 - DNA, 25 bp, Probe Sequence
cctgctgatggagagtgtttcacag

SEQ ID NO: 198099 - DNA, 25 bp, Probe Sequence
cctgctacaatccaggttctcctca

SEQ ID NO: 198100 - DNA, 25 bp, Probe Sequence
cctgctaagtcaagggttcactgca

SEQ ID NO: 198101 - DNA, 25 bp, Probe Sequence
cctgctacctagtttgttagtgcat

SEQ ID NO: 198102 - DNA, 25 bp, Probe Sequence
cctgctcacctttttgtctaagatc

SEQ ID NO: 198103 - DNA, 25 bp, Probe Sequence
cctccaacttcatttgatgctaaat

SEQ ID NO: 198104 - DNA, 25 bp, Probe Sequence
cctccaacttgacatcatgctttct

SEQ ID NO: 198105 - DNA, 25 bp, Probe Sequence
cctcccacttgagactggtctttgg

SEQ ID NO: 198106 - DNA, 25 bp, Probe Sequence
cctcccaattattcttcgtctaatg

SEQ ID NO: 198107 - DNA, 25 bp, Probe Sequence
cctctcctaagatttcccttaagct

SEQ ID NO: 198108 - DNA, 25 bp, Probe Sequence
cctctccatcagaagatgccccatt

SEQ ID NO: 198109 - DNA, 25 bp, Probe Sequence
cctgccaatcagagatctctatatt

SEQ ID NO: 198110 - DNA, 25 bp, Probe Sequence
cctccaatcctctggctatttaagg

SEQ ID NO: 198111 - DNA, 25 bp, Probe Sequence
cctccaatcctctggctatttaagg

SEQ ID NO: 198112 - DNA, 25 bp, Probe Sequence
cctccatacaacttgttctttattt

SEQ ID NO: 198113 - DNA, 25 bp, Probe Sequence
cctcaaccaaccgtcactagtatta

SEQ ID NO: 198114 - DNA, 25 bp, Probe Sequence
cctcatacctacacccaaggttgtc

SEQ ID NO: 198115 - DNA, 25 bp, Probe Sequence
cctcaacgccacagccaaagctgtt

SEQ ID NO: 198116 - DNA, 25 bp, Probe Sequence
cctccattggcagcccattgtgttt

SEQ ID NO: 198117 - DNA, 25 bp, Probe Sequence
ccttttgagggcccatagtgaatat

SEQ ID NO: 198118 - DNA, 25 bp, Probe Sequence
cctctgggggcagggcacagacaaa

SEQ ID NO: 198119 - DNA, 25 bp, Probe Sequence
cctgctgatgagtgcaacaagctga

SEQ ID NO: 198120 - DNA, 25 bp, Probe Sequence
cctctgtgtgcccagcacaatgcta

SEQ ID NO: 198121 - DNA, 25 bp, Probe Sequence
cctgcggtgctccccagaaaagggg

SEQ ID NO: 198122 - DNA, 25 bp, Probe Sequence
cctgctcaggcctcttgagaaatgg

SEQ ID NO: 198123 - DNA, 25 bp, Probe Sequence
cctgctgacgacccttgagaagctg

SEQ ID NO: 198124 - DNA, 25 bp, Probe Sequence
cctgcgacgacgacgacgacaatga

SEQ ID NO: 198125 - DNA, 25 bp, Probe Sequence
cctctacgaccagtggcgagcctgg

SEQ ID NO: 198126 - DNA, 25 bp, Probe Sequence
cctcccttgacagtgtggactctga

SEQ ID NO: 198127 - DNA, 25 bp, Probe Sequence
cctgctcacttgcaagtacaatcaa

SEQ ID NO: 198128 - DNA, 25 bp, Probe Sequence
cctgctcgtccatggcaacaacaag

SEQ ID NO: 198129 - DNA, 25 bp, Probe Sequence
cctgccaccactgggcaaacagaag

SEQ ID NO: 198130 - DNA, 25 bp, Probe Sequence
gcggaaccacttgtacaatgccaga

SEQ ID NO: 198131 - DNA, 25 bp, Probe Sequence
gcggaaccacttgtacaatgccaga

SEQ ID NO: 198132 - DNA, 25 bp, Probe Sequence
gcgagaatccgtatactaaccaaca

SEQ ID NO: 198133 - DNA, 25 bp, Probe Sequence
ccagctaccgttaaatgaggacaaa

SEQ ID NO: 198134 - DNA, 25 bp, Probe Sequence
cctccatccgctctttgtggaaaaa

SEQ ID NO: 198135 - DNA, 25 bp, Probe Sequence
cctcctacccaattctatggaatat

SEQ ID NO: 198136 - DNA, 25 bp, Probe Sequence
tccctgaacccctcttggattaagg

SEQ ID NO: 198137 - DNA, 25 bp, Probe Sequence
gccacggagcccatactgggcttga

SEQ ID NO: 198138 - DNA, 25 bp, Probe Sequence
cctgctggactcgaatagctggatc

SEQ ID NO: 198139 - DNA, 25 bp, Probe Sequence
cctgcgtgaccagcagagcttctga

SEQ ID NO: 198140 - DNA, 25 bp, Probe Sequence
cctgcgtgaccagcagagcttctga

SEQ ID NO: 198141 - DNA, 25 bp, Probe Sequence
cctgcgtgaccagcagagcttctga

SEQ ID NO: 198142 - DNA, 25 bp, Probe Sequence
cctgcgtgaccagcagagcttctga

SEQ ID NO: 198143 - DNA, 25 bp, Probe Sequence
cctcctgaccagtccagctggtcta

SEQ ID NO: 198144 - DNA, 25 bp, Probe Sequence
cctcctaccaacactggatctggga

SEQ ID NO: 198145 - DNA, 25 bp, Probe Sequence
cctgcctcaggcactttggactgag

SEQ ID NO: 198146 - DNA, 25 bp, Probe Sequence
cctcctgactgcacactgaggactg

SEQ ID NO: 198147 - DNA, 25 bp, Probe Sequence
ccttctcagtcaagtctgccggatg

SEQ ID NO: 198148 - DNA, 25 bp, Probe Sequence
cctcctgcagctgattgtgctcagg

SEQ ID NO: 198149 - DNA, 25 bp, Probe Sequence
cctctccatgatgaggtgcctccac

SEQ ID NO: 198150 - DNA, 25 bp, Probe Sequence
cctgctccgaagcagtcatctctgc

SEQ ID NO: 198151 - DNA, 25 bp, Probe Sequence
cctgcccgaggctagtaggctgcaa

SEQ ID NO: 198152 - DNA, 25 bp, Probe Sequence
cctgcgcctacagaacgagcatcga

SEQ ID NO: 198153 - DNA, 25 bp, Probe Sequence
cctccctcagcgagatctgagcatc

SEQ ID NO: 198154 - DNA, 25 bp, Probe Sequence
cctcctctactgaagtcaactgggg

SEQ ID NO: 198155 - DNA, 25 bp, Probe Sequence
cctccctaccaaaaattgccaagtg

SEQ ID NO: 198156 - DNA, 25 bp, Probe Sequence
gccccctccacataaattaagaaat

SEQ ID NO: 198157 - DNA, 25 bp, Probe Sequence
cctcctctccaaagagaattaaaat

SEQ ID NO: 198158 - DNA, 25 bp, Probe Sequence
cctcccttcacaggggtacagaaat

SEQ ID NO: 198159 - DNA, 25 bp, Probe Sequence
cctcccttcacaggggtacagaaat

SEQ ID NO: 198160 - DNA, 25 bp, Probe Sequence
cctctttctaagtcggcttcgagca

SEQ ID NO: 198161 - DNA, 25 bp, Probe Sequence
tccgtttaaagacccttgccaatca

SEQ ID NO: 198162 - DNA, 25 bp, Probe Sequence
tcctttaaaaacactcaccatataa

SEQ ID NO: 198163 - DNA, 25 bp, Probe Sequence
cctttataaagacaccactcctgag

SEQ ID NO: 198164 - DNA, 25 bp, Probe Sequence
cctccttgaaaacgtcaggtgcctg

SEQ ID NO: 198165 - DNA, 25 bp, Probe Sequence
cctctttaattacttctggtctctt

SEQ ID NO: 198166 - DNA, 25 bp, Probe Sequence
cctctacgaacattctttgggcctc

SEQ ID NO: 198167 - DNA, 25 bp, Probe Sequence
cctccaggaacatgtacatgtggtt

SEQ ID NO: 198168 - DNA, 25 bp, Probe Sequence
cctccatgatgttccagtactttgt

SEQ ID NO: 198169 - DNA, 25 bp, Probe Sequence
cctccagcgttggccaaattgtgct

SEQ ID NO: 198170 - DNA, 25 bp, Probe Sequence
cctccatctacaccaaagtttgcat

SEQ ID NO: 198171 - DNA, 25 bp, Probe Sequence
cctgccgcaacagaaattgttttta

SEQ ID NO: 198172 - DNA, 25 bp, Probe Sequence
cctcccaaattctctagtttataga

SEQ ID NO: 198173 - DNA, 25 bp, Probe Sequence
cctcccaaaacgttgcgattataag

SEQ ID NO: 198174 - DNA, 25 bp, Probe Sequence
cctcccaaaacctctgtacacaagg

SEQ ID NO: 198175 - DNA, 25 bp, Probe Sequence
cctcccaaaacctctgtacacaagg

SEQ ID NO: 198176 - DNA, 25 bp, Probe Sequence
cctccctaagagtctcctgacaaaa

SEQ ID NO: 198177 - DNA, 25 bp, Probe Sequence
cctgcctcttaggagtcctcagaga

SEQ ID NO: 198178 - DNA, 25 bp, Probe Sequence
cctgcctcttatctttgtcaacaag

SEQ ID NO: 198179 - DNA, 25 bp, Probe Sequence
cctgcctttggcatctgttgcaaca

SEQ ID NO: 198180 - DNA, 25 bp, Probe Sequence
cctgcgtgttgagtgtgtgggcggc

SEQ ID NO: 198181 - DNA, 25 bp, Probe Sequence
cctcggattgaaagtgtggagacag

SEQ ID NO: 198182 - DNA, 25 bp, Probe Sequence
cctctggtctccatggacacagaag

SEQ ID NO: 198183 - DNA, 25 bp, Probe Sequence
cctcggtgatctttgagacgggcat

SEQ ID NO: 198184 - DNA, 25 bp, Probe Sequence
cctccggtttgtggacaggcaacag

SEQ ID NO: 198185 - DNA, 25 bp, Probe Sequence
cctcatgcctgtattctccaggaaa

SEQ ID NO: 198186 - DNA, 25 bp, Probe Sequence
cctaggggactttgccagtgacaaa

SEQ ID NO: 198187 - DNA, 25 bp, Probe Sequence
ccttggcagaacatgtacgtattag

SEQ ID NO: 198188 - DNA, 25 bp, Probe Sequence
cctcctggaacttggatcttaagag

SEQ ID NO: 198189 - DNA, 25 bp, Probe Sequence
cctccctaacatgggtattacatga

SEQ ID NO: 198190 - DNA, 25 bp, Probe Sequence
cctcccatcaaactcgttcaaatgc

SEQ ID NO: 198191 - DNA, 25 bp, Probe Sequence
cctcacattcaatgccagttaaaat

SEQ ID NO: 198192 - DNA, 25 bp, Probe Sequence
gcttactatccatccctaaagttct

SEQ ID NO: 198193 - DNA, 25 bp, Probe Sequence
gcctacctccaaccctgaaagttgg

SEQ ID NO: 198194 - DNA, 25 bp, Probe Sequence
cctcccttctagtctttatttatgg

SEQ ID NO: 198195 - DNA, 25 bp, Probe Sequence
cctccacctctagttgttactaagt

SEQ ID NO: 198196 - DNA, 25 bp, Probe Sequence
cctccctgcacttgtagtctaaaaa

SEQ ID NO: 198197 - DNA, 25 bp, Probe Sequence
ccatccctcagttaactgccaataa

SEQ ID NO: 198198 - DNA, 25 bp, Probe Sequence
cctccttcatctgatatcagcgact

SEQ ID NO: 198199 - DNA, 25 bp, Probe Sequence
cctgccgctgcagaaatccagaagc

SEQ ID NO: 198200 - DNA, 25 bp, Probe Sequence
cctcctgcacaagagcatccagaac

SEQ ID NO: 198201 - DNA, 25 bp, Probe Sequence
cctcctgaaactagtctctgtagcc

SEQ ID NO: 198202 - DNA, 25 bp, Probe Sequence
cctagtaagtgccttccatgtcggc

SEQ ID NO: 198203 - DNA, 25 bp, Probe Sequence
ccatttcgagggcttcttcgacctc

SEQ ID NO: 198204 - DNA, 25 bp, Probe Sequence
cctaacgagtcacggagctgtcgac

SEQ ID NO: 198205 - DNA, 25 bp, Probe Sequence
cctcagactggctcggagaacgacg

SEQ ID NO: 198206 - DNA, 25 bp, Probe Sequence
cctagagctggtgctggaagcccac

SEQ ID NO: 198207 - DNA, 25 bp, Probe Sequence
cctacagggggtggagagaccagcc

SEQ ID NO: 198208 - DNA, 25 bp, Probe Sequence
cctacacgggagacgacgtccgcat

SEQ ID NO: 198209 - DNA, 25 bp, Probe Sequence
cctacacgggagacgacgtccgcat

SEQ ID NO: 198210 - DNA, 25 bp, Probe Sequence
cctacacgggagacgacgtccgcat

SEQ ID NO: 198211 - DNA, 25 bp, Probe Sequence
cctcagactgggatctgaaattaga

SEQ ID NO: 198212 - DNA, 25 bp, Probe Sequence
cctaaccctgcgtggcatcaatagc

SEQ ID NO: 198213 - DNA, 25 bp, Probe Sequence
cctatttcgccgtcctataataggc

SEQ ID NO: 198214 - DNA, 25 bp, Probe Sequence
cctatggccgtgggcctcaacaagg

SEQ ID NO: 198215 - DNA, 25 bp, Probe Sequence
cctagtgcgggacacccaaagcggc

SEQ ID NO: 198216 - DNA, 25 bp, Probe Sequence
ccaaatccttagcagcccaaacttc

SEQ ID NO: 198217 - DNA, 25 bp, Probe Sequence
ccaccacgttcgcgatcaaattctt

SEQ ID NO: 198218 - DNA, 25 bp, Probe Sequence
gctgacccctttcttcaaatgtggg

SEQ ID NO: 198219 - DNA, 25 bp, Probe Sequence
cctccgcctttgtttcatagtgagg

SEQ ID NO: 198220 - DNA, 25 bp, Probe Sequence
cctcccacatttcactctgagatga

SEQ ID NO: 198221 - DNA, 25 bp, Probe Sequence
cctgcgcaccttataccagaattca

SEQ ID NO: 198222 - DNA, 25 bp, Probe Sequence
cctgcgactcttcacagtgcaaatt

SEQ ID NO: 198223 - DNA, 25 bp, Probe Sequence
cctgcgagtctgctactgctaaagc

SEQ ID NO: 198224 - DNA, 25 bp, Probe Sequence
cctgccattctgcatgagctgatca

SEQ ID NO: 198225 - DNA, 25 bp, Probe Sequence
cctgcgatatgtgtgagctggcccg

SEQ ID NO: 198226 - DNA, 25 bp, Probe Sequence
cctgccactgtgggcatcagaggcc

SEQ ID NO: 198227 - DNA, 25 bp, Probe Sequence
cctccatgctgtcgtcatcgacata

SEQ ID NO: 198228 - DNA, 25 bp, Probe Sequence
cctctaagcatgctcagctaatagc

SEQ ID NO: 198229 - DNA, 25 bp, Probe Sequence
cctctcgagcgccttgaaaagctgc

SEQ ID NO: 198230 - DNA, 25 bp, Probe Sequence
cctctcaggcctctgacgagtgagc

SEQ ID NO: 198231 - DNA, 25 bp, Probe Sequence
cctccacaccattaacaagatgagc

SEQ ID NO: 198232 - DNA, 25 bp, Probe Sequence
cctccagcaccaatgccacagagga

SEQ ID NO: 198233 - DNA, 25 bp, Probe Sequence
cctcctcagaattgcagaagatgca

SEQ ID NO: 198234 - DNA, 25 bp, Probe Sequence
cctcctcacagttgccatgtagacc

SEQ ID NO: 198235 - DNA, 25 bp, Probe Sequence
cctcctcacagttgccatgtagacc

SEQ ID NO: 198236 - DNA, 25 bp, Probe Sequence
cctcccatgacttgccattataatt

SEQ ID NO: 198237 - DNA, 25 bp, Probe Sequence
cctcctttctatgtgtcatactcgt

SEQ ID NO: 198238 - DNA, 25 bp, Probe Sequence
cctctcctttgtgttcaacttttgt

SEQ ID NO: 198239 - DNA, 25 bp, Probe Sequence
cctcctcttttctagaagtctattt

SEQ ID NO: 198240 - DNA, 25 bp, Probe Sequence
cctcccttaccatcaaatcaattgg

SEQ ID NO: 198241 - DNA, 25 bp, Probe Sequence
cctccacctccctgcaataaaatgg

SEQ ID NO: 198242 - DNA, 25 bp, Probe Sequence
cctcccctcctttgcaaaggtatgg

SEQ ID NO: 198243 - DNA, 25 bp, Probe Sequence
cctcccctcctttgcaaaggtatgg

SEQ ID NO: 198244 - DNA, 25 bp, Probe Sequence
cctcccctcctttgcaaaggtatgg

SEQ ID NO: 198245 - DNA, 25 bp, Probe Sequence
cctcccctcctttgcaaaggtatgg

SEQ ID NO: 198246 - DNA, 25 bp, Probe Sequence
cctccaccctcttacatttatgggg

SEQ ID NO: 198247 - DNA, 25 bp, Probe Sequence
cctccaccgcttagagatttggggg

SEQ ID NO: 198248 - DNA, 25 bp, Probe Sequence
cctccatcatccagctaatgtcatg

SEQ ID NO: 198249 - DNA, 25 bp, Probe Sequence
cctccatcccggaaggatcagcaca

SEQ ID NO: 198250 - DNA, 25 bp, Probe Sequence
cctgccatcttgccttaggaacagc

SEQ ID NO: 198251 - DNA, 25 bp, Probe Sequence
cctgccacttccacagcagtaagcc

SEQ ID NO: 198252 - DNA, 25 bp, Probe Sequence
cctgccacttccacagcagtaagcc

SEQ ID NO: 198253 - DNA, 25 bp, Probe Sequence
cctcataattccacgagaaagggca

SEQ ID NO: 198254 - DNA, 25 bp, Probe Sequence
cctcttgatcctctctggatttggg

SEQ ID NO: 198255 - DNA, 25 bp, Probe Sequence
cctccaggccatgttagttcttaga

SEQ ID NO: 198256 - DNA, 25 bp, Probe Sequence
cctgccagtgactcttagtgtctgt

SEQ ID NO: 198257 - DNA, 25 bp, Probe Sequence
cctgccagctgtttgtgtatggggg

SEQ ID NO: 198258 - DNA, 25 bp, Probe Sequence
cctccatgctgcagtgttcgagtgg

SEQ ID NO: 198259 - DNA, 25 bp, Probe Sequence
cctgcctctgggtgtgtgagtggga

SEQ ID NO: 198260 - DNA, 25 bp, Probe Sequence
cctccctggacatgttcgctgagga

SEQ ID NO: 198261 - DNA, 25 bp, Probe Sequence
cctcctctggaatgtagactgtata

SEQ ID NO: 198262 - DNA, 25 bp, Probe Sequence
cctgccctatagttatggcctgtgt

SEQ ID NO: 198263 - DNA, 25 bp, Probe Sequence
cctcccttccagaaggcactgactg

SEQ ID NO: 198264 - DNA, 25 bp, Probe Sequence
cctcccattccggaagccgatgagt

SEQ ID NO: 198265 - DNA, 25 bp, Probe Sequence
cctgcccttaaggaggtcgtggtct

SEQ ID NO: 198266 - DNA, 25 bp, Probe Sequence
cctgcctcccaagcagctgaagggt

SEQ ID NO: 198267 - DNA, 25 bp, Probe Sequence
cctcctgtccaatgccgaatgcaag

SEQ ID NO: 198268 - DNA, 25 bp, Probe Sequence
cctccttggtgattccgcagtgaga

SEQ ID NO: 198269 - DNA, 25 bp, Probe Sequence
cctcactctgttttccaggggagaa

SEQ ID NO: 198270 - DNA, 25 bp, Probe Sequence
cctgcctgtactactctagggagta

SEQ ID NO: 198271 - DNA, 25 bp, Probe Sequence
cctcctggaggcactgagtgaagtg

SEQ ID NO: 198272 - DNA, 25 bp, Probe Sequence
cctgcctggagcgtttctagcaagt

SEQ ID NO: 198273 - DNA, 25 bp, Probe Sequence
cctgcctgtgagggtgagcccaatg

SEQ ID NO: 198274 - DNA, 25 bp, Probe Sequence
cctctctggcgtggtgaccaagatg

SEQ ID NO: 198275 - DNA, 25 bp, Probe Sequence
cctctctggcgtggtgaccaagatg

SEQ ID NO: 198276 - DNA, 25 bp, Probe Sequence
cctctctggcgtggtgaccaagatg

SEQ ID NO: 198277 - DNA, 25 bp, Probe Sequence
cctccttggctgatgacccagagcc

SEQ ID NO: 198278 - DNA, 25 bp, Probe Sequence
cctctatgtggccaatggctccggc

SEQ ID NO: 198279 - DNA, 25 bp, Probe Sequence
cctcctgagcgcaagtactccgtgt

SEQ ID NO: 198280 - DNA, 25 bp, Probe Sequence
cctgcctgggcaggctcttcaagtg

SEQ ID NO: 198281 - DNA, 25 bp, Probe Sequence
cctgcctctactggcgctgccaagg

SEQ ID NO: 198282 - DNA, 25 bp, Probe Sequence
cctccacaacttcctgacagatggg

SEQ ID NO: 198283 - DNA, 25 bp, Probe Sequence
cctcaccaacttctgactggacttc

SEQ ID NO: 198284 - DNA, 25 bp, Probe Sequence
cctccacacagaatcgggggactgg

SEQ ID NO: 198285 - DNA, 25 bp, Probe Sequence
ccatctcagacgatgggcggccggg

SEQ ID NO: 198286 - DNA, 25 bp, Probe Sequence
cctctcatgacccaggaaggccggg

SEQ ID NO: 198287 - DNA, 25 bp, Probe Sequence
cctctagagctcgggagcccggagg

SEQ ID NO: 198288 - DNA, 25 bp, Probe Sequence
cctctagagctcgggagcccggagg

SEQ ID NO: 198289 - DNA, 25 bp, Probe Sequence
cctccagctgctcaggactttggag

SEQ ID NO: 198290 - DNA, 25 bp, Probe Sequence
cctcctggtccatgagtgttatggg

SEQ ID NO: 198291 - DNA, 25 bp, Probe Sequence
cctcaggtgtcctatctggttttga

SEQ ID NO: 198292 - DNA, 25 bp, Probe Sequence
cctcgcagttcgaactgcctgggga

SEQ ID NO: 198293 - DNA, 25 bp, Probe Sequence
cctcgcatatgtatgacatcctggg

SEQ ID NO: 198294 - DNA, 25 bp, Probe Sequence
cctgcctagggtggatggctgctgg

SEQ ID NO: 198295 - DNA, 25 bp, Probe Sequence
cctctctgagcgagcggacttcgcc

SEQ ID NO: 198296 - DNA, 25 bp, Probe Sequence
cctcattgcaggggggagcagactc

SEQ ID NO: 198297 - DNA, 25 bp, Probe Sequence
cctcctgtgggaggctgaggactgc

SEQ ID NO: 198298 - DNA, 25 bp, Probe Sequence
cctcctgtgggaggctgaggactgc

SEQ ID NO: 198299 - DNA, 25 bp, Probe Sequence
cctccagggctggactgaggcctga

SEQ ID NO: 198300 - DNA, 25 bp, Probe Sequence
cctcaagtggatcgacaggtccatg

SEQ ID NO: 198301 - DNA, 25 bp, Probe Sequence
cctaagctggcaagccgcatcttga

SEQ ID NO: 198302 - DNA, 25 bp, Probe Sequence
cctacagaggcaatgccaccatgat

SEQ ID NO: 198303 - DNA, 25 bp, Probe Sequence
cctccaaggcattcgatgcgtgttt

SEQ ID NO: 198304 - DNA, 25 bp, Probe Sequence
cctccgagcagctggatgacatttt

SEQ ID NO: 198305 - DNA, 25 bp, Probe Sequence
cctccaagcagtcctgttcattcat

SEQ ID NO: 198306 - DNA, 25 bp, Probe Sequence
cctccaagttcgttcatattcacgt

SEQ ID NO: 198307 - DNA, 25 bp, Probe Sequence
ccttcaagctgtgtaatattccaat

SEQ ID NO: 198308 - DNA, 25 bp, Probe Sequence
cctagaacagtgcccaacattggca

SEQ ID NO: 198309 - DNA, 25 bp, Probe Sequence
cctacaacaagctccacacatggca

SEQ ID NO: 198310 - DNA, 25 bp, Probe Sequence
cctaattcaagcaccacaaccttat

SEQ ID NO: 198311 - DNA, 25 bp, Probe Sequence
cctaaatctaatgactgatacctta

SEQ ID NO: 198312 - DNA, 25 bp, Probe Sequence
cctcccttactgaactatacatgcc

SEQ ID NO: 198313 - DNA, 25 bp, Probe Sequence
cctcctcttgaccaacttacttgga

SEQ ID NO: 198314 - DNA, 25 bp, Probe Sequence
cctcctcactggagactacaagtgg

SEQ ID NO: 198315 - DNA, 25 bp, Probe Sequence
cctcccactgagccaaaaccaggag

SEQ ID NO: 198316 - DNA, 25 bp, Probe Sequence
cctcccgctgcagagtaagccgggc

SEQ ID NO: 198317 - DNA, 25 bp, Probe Sequence
cctacctggaggctaagtctgggca

SEQ ID NO: 198318 - DNA, 25 bp, Probe Sequence
cctaccataagggctgaatgccagg

SEQ ID NO: 198319 - DNA, 25 bp, Probe Sequence
cctcccaaagctggctgagactctg

SEQ ID NO: 198320 - DNA, 25 bp, Probe Sequence
gccttccaagtggggatcctcatga

SEQ ID NO: 198321 - DNA, 25 bp, Probe Sequence
cctaccaaggagtgtcttcagagcg

SEQ ID NO: 198322 - DNA, 25 bp, Probe Sequence
cctccccaggacggtgaggatgagc

SEQ ID NO: 198323 - DNA, 25 bp, Probe Sequence
cctcctcattgcccagcagtaggga

SEQ ID NO: 198324 - DNA, 25 bp, Probe Sequence
cctccttcttgcgaccatatgggga

SEQ ID NO: 198325 - DNA, 25 bp, Probe Sequence
cctccttctgcacgatccaatagga

SEQ ID NO: 198326 - DNA, 25 bp, Probe Sequence
cctccttctgcacgatccaatagga

SEQ ID NO: 198327 - DNA, 25 bp, Probe Sequence
cctcctttccaagcatctatgcaga

SEQ ID NO: 198328 - DNA, 25 bp, Probe Sequence
cctccactctacaaggagctcttca

SEQ ID NO: 198329 - DNA, 25 bp, Probe Sequence
cctccccatccaggggctgtgtatt

SEQ ID NO: 198330 - DNA, 25 bp, Probe Sequence
cctccacctcctggattcaagtgat

SEQ ID NO: 198331 - DNA, 25 bp, Probe Sequence
cctccactcgcctgaaacaaatgca

SEQ ID NO: 198332 - DNA, 25 bp, Probe Sequence
cctccacccgcccatggagaaagag

SEQ ID NO: 198333 - DNA, 25 bp, Probe Sequence
cctccacccctcaatgtagggaggt

SEQ ID NO: 198334 - DNA, 25 bp, Probe Sequence
cctccatcccgtccatgtgggaggg

SEQ ID NO: 198335 - DNA, 25 bp, Probe Sequence
cctcctccgcttcagggtatgggag

SEQ ID NO: 198336 - DNA, 25 bp, Probe Sequence
cctccccaccaaggggtactgcagg

SEQ ID NO: 198337 - DNA, 25 bp, Probe Sequence
cctccctaacgtgctgagatcacat

SEQ ID NO: 198338 - DNA, 25 bp, Probe Sequence
cctccctgagggagcatggcacagc

SEQ ID NO: 198339 - DNA, 25 bp, Probe Sequence
cctcccgagtggactgtccaagcag

SEQ ID NO: 198340 - DNA, 25 bp, Probe Sequence
cctccacgtctgagtcttacagcag

SEQ ID NO: 198341 - DNA, 25 bp, Probe Sequence
cctccactggctgtttgtttgctgg

SEQ ID NO: 198342 - DNA, 25 bp, Probe Sequence
cctcctgcggctgttggatttggga

SEQ ID NO: 198343 - DNA, 25 bp, Probe Sequence
cctcctgagcagctcttggttttgg

SEQ ID NO: 198344 - DNA, 25 bp, Probe Sequence
cctcctcgtgatttaggcaatttgg

SEQ ID NO: 198345 - DNA, 25 bp, Probe Sequence
cctcccggagtcagcacaaactcag

SEQ ID NO: 198346 - DNA, 25 bp, Probe Sequence
cctccacgcaattaccagcaaaatt

SEQ ID NO: 198347 - DNA, 25 bp, Probe Sequence
cctcatcctatttactgcagcaaat

SEQ ID NO: 198348 - DNA, 25 bp, Probe Sequence
cctccactctggtactatcagagta

SEQ ID NO: 198349 - DNA, 25 bp, Probe Sequence
cctcctgccatgatactgtcagtta

SEQ ID NO: 198350 - DNA, 25 bp, Probe Sequence
cctcgctgccagatgattgttcaaa

SEQ ID NO: 198351 - DNA, 25 bp, Probe Sequence
cctccaggcagccagttttgcagga

SEQ ID NO: 198352 - DNA, 25 bp, Probe Sequence
cctcccggatcgtctttgagaagaa

SEQ ID NO: 198353 - DNA, 25 bp, Probe Sequence
ccttccttcagggtttaatagactg

SEQ ID NO: 198354 - DNA, 25 bp, Probe Sequence
cctaactccagtctcttgaaaacac

SEQ ID NO: 198355 - DNA, 25 bp, Probe Sequence
cctccactccgtttgctgtgaaaaa

SEQ ID NO: 198356 - DNA, 25 bp, Probe Sequence
cctccttacgctttgtcacacaaaa

SEQ ID NO: 198357 - DNA, 25 bp, Probe Sequence
cctctgtaacgttaccctcaacagg

SEQ ID NO: 198358 - DNA, 25 bp, Probe Sequence
cctcctatactatccgacacaaatg

SEQ ID NO: 198359 - DNA, 25 bp, Probe Sequence
cctcttaagtattcctgtctccaaa

SEQ ID NO: 198360 - DNA, 25 bp, Probe Sequence
cctctttagtcctcactgttaaata

SEQ ID NO: 198361 - DNA, 25 bp, Probe Sequence
cctctgaaaacctctccttcataaa

SEQ ID NO: 198362 - DNA, 25 bp, Probe Sequence
cctaaaatatccgctgtgcttcact

SEQ ID NO: 198363 - DNA, 25 bp, Probe Sequence
cctaagactgattcagaccctgaac

SEQ ID NO: 198364 - DNA, 25 bp, Probe Sequence
cctcccttgatgtcaagatccatga

SEQ ID NO: 198365 - DNA, 25 bp, Probe Sequence
cctcccagtgaggcaagaccgaagt

SEQ ID NO: 198366 - DNA, 25 bp, Probe Sequence
cctcccagaggatactccagacagt

SEQ ID NO: 198367 - DNA, 25 bp, Probe Sequence
cctcctcaaggttgtcttcagacgt

SEQ ID NO: 198368 - DNA, 25 bp, Probe Sequence
cctccttcaggttacttcatggcag

SEQ ID NO: 198369 - DNA, 25 bp, Probe Sequence
cctccttcaggttacttcatggcag

SEQ ID NO: 198370 - DNA, 25 bp, Probe Sequence
cctactccaagttgaccatcttcag

SEQ ID NO: 198371 - DNA, 25 bp, Probe Sequence
cctatattatggtgacacctatatg

SEQ ID NO: 198372 - DNA, 25 bp, Probe Sequence
cctcaattgggctggccacatttca

SEQ ID NO: 198373 - DNA, 25 bp, Probe Sequence
cctacctggacatgtcccattaaaa

SEQ ID NO: 198374 - DNA, 25 bp, Probe Sequence
cctacacaaagagttcccatctcaa

SEQ ID NO: 198375 - DNA, 25 bp, Probe Sequence
cctacagcaagctgctgtgcggcct

SEQ ID NO: 198376 - DNA, 25 bp, Probe Sequence
cctacacagagtgctgctgcctgta

SEQ ID NO: 198377 - DNA, 25 bp, Probe Sequence
cctccctgctgagatgcgcaaattc

SEQ ID NO: 198378 - DNA, 25 bp, Probe Sequence
cctccatctgcgttgatgctcagaa

SEQ ID NO: 198379 - DNA, 25 bp, Probe Sequence
cctcattgctgcgatcatgtccaag

SEQ ID NO: 198380 - DNA, 25 bp, Probe Sequence
cctcagtgctcggcagtcatactgg

SEQ ID NO: 198381 - DNA, 25 bp, Probe Sequence
cctcagagctcagcccaaggcagaa

SEQ ID NO: 198382 - DNA, 25 bp, Probe Sequence
cctagaaacctttatgcagcagaaa

SEQ ID NO: 198383 - DNA, 25 bp, Probe Sequence
cctcaacaacagaaattgccggtat

SEQ ID NO: 198384 - DNA, 25 bp, Probe Sequence
cctctccaacagaatatgctccatt

SEQ ID NO: 198385 - DNA, 25 bp, Probe Sequence
cctcctgcaagaaaagctgctgctc

SEQ ID NO: 198386 - DNA, 25 bp, Probe Sequence
cctcattccagagagggtgctgccc

SEQ ID NO: 198387 - DNA, 25 bp, Probe Sequence
cctctgcggcaagcctgatgtggcc

SEQ ID NO: 198388 - DNA, 25 bp, Probe Sequence
cctcagcgtgcaacatccaatgtgt

SEQ ID NO: 198389 - DNA, 25 bp, Probe Sequence
cctctgcctgctgatggagagtgtt

SEQ ID NO: 198390 - DNA, 25 bp, Probe Sequence
cctctcccgctaggagagtcctctt

SEQ ID NO: 198391 - DNA, 25 bp, Probe Sequence
gcacttaaattagatggtccctttc

SEQ ID NO: 198392 - DNA, 25 bp, Probe Sequence
cctacaactagtatggtcccatttt

SEQ ID NO: 198393 - DNA, 25 bp, Probe Sequence
cctaaacttgtctggctcccaggaa

SEQ ID NO: 198394 - DNA, 25 bp, Probe Sequence
cctaatttttcattggcttggccaa

SEQ ID NO: 198395 - DNA, 25 bp, Probe Sequence
cctaacctaggagggctctgagcca

SEQ ID NO: 198396 - DNA, 25 bp, Probe Sequence
cctctgccctaggaagatctttgcc

SEQ ID NO: 198397 - DNA, 25 bp, Probe Sequence
ccttccaatagttagatctaccctg

SEQ ID NO: 198398 - DNA, 25 bp, Probe Sequence
cctcctcaaagtctggatacctctc

SEQ ID NO: 198399 - DNA, 25 bp, Probe Sequence
cctcctacaagcctcagagtacttc

SEQ ID NO: 198400 - DNA, 25 bp, Probe Sequence
cctccttcaatgaccagagcacctc

SEQ ID NO: 198401 - DNA, 25 bp, Probe Sequence
cctcgcttagggcaatcaccacgag

SEQ ID NO: 198402 - DNA, 25 bp, Probe Sequence
cctcgctggaggatgtacaggccaa

SEQ ID NO: 198403 - DNA, 25 bp, Probe Sequence
cctcgggagggcagaagctgtccga

SEQ ID NO: 198404 - DNA, 25 bp, Probe Sequence
cctctgagaaggacgggcaggtcac

SEQ ID NO: 198405 - DNA, 25 bp, Probe Sequence
cctctaagatggacaggcacactgt

SEQ ID NO: 198406 - DNA, 25 bp, Probe Sequence
cctcaagcaagaccagggcctggtc

SEQ ID NO: 198407 - DNA, 25 bp, Probe Sequence
cctagacaatacgatggaacgttct

SEQ ID NO: 198408 - DNA, 25 bp, Probe Sequence
gcctaatgaaatcttaagtgtctta

SEQ ID NO: 198409 - DNA, 25 bp, Probe Sequence
gactaagtagcccataaggggtcaa

SEQ ID NO: 198410 - DNA, 25 bp, Probe Sequence
ggcttaaacccataggtagtcagga

SEQ ID NO: 198411 - DNA, 25 bp, Probe Sequence
gcaccaaaaccgtgaagaaggcggc

SEQ ID NO: 198412 - DNA, 25 bp, Probe Sequence
gccccaaaccgataagtgcatgacg

SEQ ID NO: 198413 - DNA, 25 bp, Probe Sequence
cctagcctaccgtaaatgtgctgaa

SEQ ID NO: 198414 - DNA, 25 bp, Probe Sequence
cctcccctccagtcagaagagtaaa

SEQ ID NO: 198415 - DNA, 25 bp, Probe Sequence
cctcccctttcccaatgaaagccat

SEQ ID NO: 198416 - DNA, 25 bp, Probe Sequence
cctcctcctcctgcaggataaagtc

SEQ ID NO: 198417 - DNA, 25 bp, Probe Sequence
ccataccctcctcggtcaataaagg

SEQ ID NO: 198418 - DNA, 25 bp, Probe Sequence
ccataccgcccgtggaaaaatcatg

SEQ ID NO: 198419 - DNA, 25 bp, Probe Sequence
tcctccccaccctgaaaaaaatgag

SEQ ID NO: 198420 - DNA, 25 bp, Probe Sequence
cctcccgatccctgtaaagatacag

SEQ ID NO: 198421 - DNA, 25 bp, Probe Sequence
cctcagcccagaacaatgctaaagt

SEQ ID NO: 198422 - DNA, 25 bp, Probe Sequence
cctcaggagagacacagcataagag

SEQ ID NO: 198423 - DNA, 25 bp, Probe Sequence
cctcaccgcaggcagcagtttgcgt

SEQ ID NO: 198424 - DNA, 25 bp, Probe Sequence
cctccctgcagctcaggaaggctgt

SEQ ID NO: 198425 - DNA, 25 bp, Probe Sequence
cctcctcagctctgcaagtagttta

SEQ ID NO: 198426 - DNA, 25 bp, Probe Sequence
ccatccgacattgaagttgacttac

SEQ ID NO: 198427 - DNA, 25 bp, Probe Sequence
cctcccatcactggaagtctgcagt

SEQ ID NO: 198428 - DNA, 25 bp, Probe Sequence
cctccctcacttggagcttcgtgag

SEQ ID NO: 198429 - DNA, 25 bp, Probe Sequence
cctccgccactgcagtgattgttag

SEQ ID NO: 198430 - DNA, 25 bp, Probe Sequence
cctcgggcactcaaagagattcgga

SEQ ID NO: 198431 - DNA, 25 bp, Probe Sequence
cctctgtggctctggaagagcccga

SEQ ID NO: 198432 - DNA, 25 bp, Probe Sequence
cctctgtggtccgtaggagccacta

SEQ ID NO: 198433 - DNA, 25 bp, Probe Sequence
cctctgtttcgggactggatcaaag

SEQ ID NO: 198434 - DNA, 25 bp, Probe Sequence
cctcagtttggggttgcttattggg

SEQ ID NO: 198435 - DNA, 25 bp, Probe Sequence
cctcattagtgaaggtggcttttgc

SEQ ID NO: 198436 - DNA, 25 bp, Probe Sequence
cctcctcagcgaacagtgggtggtg

SEQ ID NO: 198437 - DNA, 25 bp, Probe Sequence
cctctccagccaacatgcaaggctg

SEQ ID NO: 198438 - DNA, 25 bp, Probe Sequence
cctctacagccgacgaggcgcagga

SEQ ID NO: 198439 - DNA, 25 bp, Probe Sequence
cctctggaccgtccaggccatggat

SEQ ID NO: 198440 - DNA, 25 bp, Probe Sequence
cctctgagactcataaggccatcca

SEQ ID NO: 198441 - DNA, 25 bp, Probe Sequence
cctctgacttcaacagcgacaccca

SEQ ID NO: 198442 - DNA, 25 bp, Probe Sequence
cctcatcctatctcaaaacccatgg

SEQ ID NO: 198443 - DNA, 25 bp, Probe Sequence
cctagcactgtcctcaaagaccatc

SEQ ID NO: 198444 - DNA, 25 bp, Probe Sequence
cctagcactgtcctcaaagaccatc

SEQ ID NO: 198445 - DNA, 25 bp, Probe Sequence
cctaacttgcgcagaaaacaagatg

SEQ ID NO: 198446 - DNA, 25 bp, Probe Sequence
cctcaactcttcccaaaacctgaag

SEQ ID NO: 198447 - DNA, 25 bp, Probe Sequence
gcctaagtccctcaaaacattaaga

SEQ ID NO: 198448 - DNA, 25 bp, Probe Sequence
cctacagctaaccgtgaacacttaa

SEQ ID NO: 198449 - DNA, 25 bp, Probe Sequence
gcactaaggattctggtacctttac

SEQ ID NO: 198450 - DNA, 25 bp, Probe Sequence
cctcagggtctgcggtacgaagtca

SEQ ID NO: 198451 - DNA, 25 bp, Probe Sequence
cctcagggatggccgttggccacgt

SEQ ID NO: 198452 - DNA, 25 bp, Probe Sequence
cctcagggctgccctgggagctcat

SEQ ID NO: 198453 - DNA, 25 bp, Probe Sequence
cctcgtagccatcacggagctgatg

SEQ ID NO: 198454 - DNA, 25 bp, Probe Sequence
cctcctggctattgactacactggc

SEQ ID NO: 198455 - DNA, 25 bp, Probe Sequence
cctcctgctgtcaggctacatcagc

SEQ ID NO: 198456 - DNA, 25 bp, Probe Sequence
cctcctgctgtcaggctacatcagc

SEQ ID NO: 198457 - DNA, 25 bp, Probe Sequence
cctccgctgcttggcagctactagc

SEQ ID NO: 198458 - DNA, 25 bp, Probe Sequence
cctctcatgctggatgccagctggc

SEQ ID NO: 198459 - DNA, 25 bp, Probe Sequence
cctctctgtcaagtttggaaacgat

SEQ ID NO: 198460 - DNA, 25 bp, Probe Sequence
cctcctgtcacagctggatgatcaa

SEQ ID NO: 198461 - DNA, 25 bp, Probe Sequence
cctctgcatctactgacttgatttt

SEQ ID NO: 198462 - DNA, 25 bp, Probe Sequence
cctctgcatcttcactacacagtga

SEQ ID NO: 198463 - DNA, 25 bp, Probe Sequence
cctctcaatgctcatcacacacagg

SEQ ID NO: 198464 - DNA, 25 bp, Probe Sequence
cctctgcagtctctataccaataaa

SEQ ID NO: 198465 - DNA, 25 bp, Probe Sequence
cctctgcagtctctataccaataaa

SEQ ID NO: 198466 - DNA, 25 bp, Probe Sequence
cctctgcagtctctataccaataaa

SEQ ID NO: 198467 - DNA, 25 bp, Probe Sequence
cctctgcagtctctataccaataaa

SEQ ID NO: 198468 - DNA, 25 bp, Probe Sequence
cctctgcaggtggaccccaaataat

SEQ ID NO: 198469 - DNA, 25 bp, Probe Sequence
cctcaagggtcatctccaaacatga

SEQ ID NO: 198470 - DNA, 25 bp, Probe Sequence
cctctggggtcctataccatacaaa

SEQ ID NO: 198471 - DNA, 25 bp, Probe Sequence
ccatcggaatgggacagacctactt

SEQ ID NO: 198472 - DNA, 25 bp, Probe Sequence
ccactgcctttgatcaacctttgtg

SEQ ID NO: 198473 - DNA, 25 bp, Probe Sequence
ccactgcctttgatcaacctttgtg

SEQ ID NO: 198474 - DNA, 25 bp, Probe Sequence
cctctggtttttcagcacttgggat

SEQ ID NO: 198475 - DNA, 25 bp, Probe Sequence
cctctgtagtttttagcactggatg

SEQ ID NO: 198476 - DNA, 25 bp, Probe Sequence
cctttggtttttgacatggcttacg

SEQ ID NO: 198477 - DNA, 25 bp, Probe Sequence
ccattttattttcccctgtggtcag

SEQ ID NO: 198478 - DNA, 25 bp, Probe Sequence
cctctctttttaaaggctgggtcag

SEQ ID NO: 198479 - DNA, 25 bp, Probe Sequence
cctcttctttttgcatggttttgcc

SEQ ID NO: 198480 - DNA, 25 bp, Probe Sequence
cctctttgtattcccattttctaca

SEQ ID NO: 198481 - DNA, 25 bp, Probe Sequence
cctctcatttttcagtacttctaca

SEQ ID NO: 198482 - DNA, 25 bp, Probe Sequence
ccttcatttgtatagtacgtctcac

SEQ ID NO: 198483 - DNA, 25 bp, Probe Sequence
cctctctttaaatgtgatagtctca

SEQ ID NO: 198484 - DNA, 25 bp, Probe Sequence
cctcttctccaatttgtaggtgtat

SEQ ID NO: 198485 - DNA, 25 bp, Probe Sequence
cctcttgtaccaattataggggagg

SEQ ID NO: 198486 - DNA, 25 bp, Probe Sequence
cctcttttcctcacaagggatggtg

SEQ ID NO: 198487 - DNA, 25 bp, Probe Sequence
cctttactactctcagggacacagt

SEQ ID NO: 198488 - DNA, 25 bp, Probe Sequence
cctccccttgcttccagggaagatg

SEQ ID NO: 198489 - DNA, 25 bp, Probe Sequence
cctccccttgcttccagggaagatg

SEQ ID NO: 198490 - DNA, 25 bp, Probe Sequence
cctcccctgtctcagggagcaggtc

SEQ ID NO: 198491 - DNA, 25 bp, Probe Sequence
cctcccctgtctcagggagcaggtc

SEQ ID NO: 198492 - DNA, 25 bp, Probe Sequence
cctccccttcttggggaaatgctgg

SEQ ID NO: 198493 - DNA, 25 bp, Probe Sequence
cctccccctatatgggattctctgg

SEQ ID NO: 198494 - DNA, 25 bp, Probe Sequence
cctctctccctgaaggggctttgtg

SEQ ID NO: 198495 - DNA, 25 bp, Probe Sequence
cctcccacctgatgcggtggtgcgt

SEQ ID NO: 198496 - DNA, 25 bp, Probe Sequence
cctccccctgtggagaagacgctta

SEQ ID NO: 198497 - DNA, 25 bp, Probe Sequence
cctaccccaggagagagacgttata

SEQ ID NO: 198498 - DNA, 25 bp, Probe Sequence
gaataacccaaagtaaccctacatg

SEQ ID NO: 198499 - DNA, 25 bp, Probe Sequence
gctaaacccaagataattttccata

SEQ ID NO: 198500 - DNA, 25 bp, Probe Sequence
tccaagcacctacattaattatttt

SEQ ID NO: 198501 - DNA, 25 bp, Probe Sequence
ccagaattggaccttggatttttat

SEQ ID NO: 198502 - DNA, 25 bp, Probe Sequence
ccatacatcttaaattggattttta

SEQ ID NO: 198503 - DNA, 25 bp, Probe Sequence
cctctctctttacttggactttgaa

SEQ ID NO: 198504 - DNA, 25 bp, Probe Sequence
cctcttagcacatcttcgactttag

SEQ ID NO: 198505 - DNA, 25 bp, Probe Sequence
cctctatagcagctccctgggagga

SEQ ID NO: 198506 - DNA, 25 bp, Probe Sequence
cctctgatgctgggacccggaaggc

SEQ ID NO: 198507 - DNA, 25 bp, Probe Sequence
cctctggcttggccacagccagggg

SEQ ID NO: 198508 - DNA, 25 bp, Probe Sequence
cctctagcggtgaagctccaggggg

SEQ ID NO: 198509 - DNA, 25 bp, Probe Sequence
cctctcccgtagcctcagaagagtg

SEQ ID NO: 198510 - DNA, 25 bp, Probe Sequence
cctctcccgtagcctcagaagagtg

SEQ ID NO: 198511 - DNA, 25 bp, Probe Sequence
cctctgccctggtcgcataaatttg

SEQ ID NO: 198512 - DNA, 25 bp, Probe Sequence
cctctgccctggtcgcataaatttg

SEQ ID NO: 198513 - DNA, 25 bp, Probe Sequence
cctaccgagctgttgtccagatttt

SEQ ID NO: 198514 - DNA, 25 bp, Probe Sequence
cctaccagacgattgactcagcaga

SEQ ID NO: 198515 - DNA, 25 bp, Probe Sequence
cctaaagtctaattcttcgcttcac

SEQ ID NO: 198516 - DNA, 25 bp, Probe Sequence
cctaatggtgcttattttcctaact

SEQ ID NO: 198517 - DNA, 25 bp, Probe Sequence
cctctcatgtgtcatcttttcgtag

SEQ ID NO: 198518 - DNA, 25 bp, Probe Sequence
cctcgatgtggttcagttactggtg

SEQ ID NO: 198519 - DNA, 25 bp, Probe Sequence
cctatgtgacgtgcaatggacgggt

SEQ ID NO: 198520 - DNA, 25 bp, Probe Sequence
cctctgtgactgctcaattttctgc

SEQ ID NO: 198521 - DNA, 25 bp, Probe Sequence
cctcttgagggtcattttcctttct

SEQ ID NO: 198522 - DNA, 25 bp, Probe Sequence
cctctgcgagtggtttcttgtgcac

SEQ ID NO: 198523 - DNA, 25 bp, Probe Sequence
ccttggaggaggctctgtatgtcct

SEQ ID NO: 198524 - DNA, 25 bp, Probe Sequence
cctagggagccgcaccttgtcatgt

SEQ ID NO: 198525 - DNA, 25 bp, Probe Sequence
cctaaccatgccggagacctgtaga

SEQ ID NO: 198526 - DNA, 25 bp, Probe Sequence
cctagacacactggggacatcggaa

SEQ ID NO: 198527 - DNA, 25 bp, Probe Sequence
cctcagatcaccttcgagaacatga

SEQ ID NO: 198528 - DNA, 25 bp, Probe Sequence
cctctacaactactatgacaatgag

SEQ ID NO: 198529 - DNA, 25 bp, Probe Sequence
cctcttaattactagacctcagtac

SEQ ID NO: 198530 - DNA, 25 bp, Probe Sequence
cctactaagtaatgactgtcatgaa

SEQ ID NO: 198531 - DNA, 25 bp, Probe Sequence
cctaccaactcaaagtgcagctggc

SEQ ID NO: 198532 - DNA, 25 bp, Probe Sequence
cctcccagagtcaacctcatgtgac

SEQ ID NO: 198533 - DNA, 25 bp, Probe Sequence
cctcccagaggcaacctcagttgat

SEQ ID NO: 198534 - DNA, 25 bp, Probe Sequence
cctcccgaaccaagcagcaggattg

SEQ ID NO: 198535 - DNA, 25 bp, Probe Sequence
cctcccgaaccaagcagcaggattg

SEQ ID NO: 198536 - DNA, 25 bp, Probe Sequence
cctcccgaaccaagcagcaggattg

SEQ ID NO: 198537 - DNA, 25 bp, Probe Sequence
cctcccagtggccagaagctgaaat

SEQ ID NO: 198538 - DNA, 25 bp, Probe Sequence
cctcccactatcaagaaataactat

SEQ ID NO: 198539 - DNA, 25 bp, Probe Sequence
cctcccaccacatagaatcaacata

SEQ ID NO: 198540 - DNA, 25 bp, Probe Sequence
cctcccaatccatggcaaacacaca

SEQ ID NO: 198541 - DNA, 25 bp, Probe Sequence
cctcccatacaggctggataaaact

SEQ ID NO: 198542 - DNA, 25 bp, Probe Sequence
cctcccccagcagttgaatgacaac

SEQ ID NO: 198543 - DNA, 25 bp, Probe Sequence
cctacttccaggatggatgcatcac

SEQ ID NO: 198544 - DNA, 25 bp, Probe Sequence
cctaccacacatctgtggagatgcc

SEQ ID NO: 198545 - DNA, 25 bp, Probe Sequence
cctcagatcatccacctgtgtgagt

SEQ ID NO: 198546 - DNA, 25 bp, Probe Sequence
cctcgatgacaatctgggagtgtgc

SEQ ID NO: 198547 - DNA, 25 bp, Probe Sequence
cctcgagcagctccaagggaatgtc

SEQ ID NO: 198548 - DNA, 25 bp, Probe Sequence
cctcagagcaggtcgaaaatattaa

SEQ ID NO: 198549 - DNA, 25 bp, Probe Sequence
cctagaacatgcttagaacatatta

SEQ ID NO: 198550 - DNA, 25 bp, Probe Sequence
cctcccaatccaagtagcatctgta

SEQ ID NO: 198551 - DNA, 25 bp, Probe Sequence
cctcccatcccttgtagattataaa

SEQ ID NO: 198552 - DNA, 25 bp, Probe Sequence
cctcccatcccttgtagattataaa

SEQ ID NO: 198553 - DNA, 25 bp, Probe Sequence
cctccctctcctaaagtaatttgat

SEQ ID NO: 198554 - DNA, 25 bp, Probe Sequence
cctctcctctctggtaggtttaatt

SEQ ID NO: 198555 - DNA, 25 bp, Probe Sequence
cctcccccagcacaggatggtaagc

SEQ ID NO: 198556 - DNA, 25 bp, Probe Sequence
cctccctccagacagggatgtacta

SEQ ID NO: 198557 - DNA, 25 bp, Probe Sequence
cctcgcttaagggcagggagaagct

SEQ ID NO: 198558 - DNA, 25 bp, Probe Sequence
cctcccgcgagggcgggcagacagc

SEQ ID NO: 198559 - DNA, 25 bp, Probe Sequence
cctcccaggagggcaggggcattgg

SEQ ID NO: 198560 - DNA, 25 bp, Probe Sequence
cctcccaggagggcaggggcattgg

SEQ ID NO: 198561 - DNA, 25 bp, Probe Sequence
cctcccacgaggacatttgacaatg

SEQ ID NO: 198562 - DNA, 25 bp, Probe Sequence
cctcagcctggaggcacttttccag

SEQ ID NO: 198563 - DNA, 25 bp, Probe Sequence
cctcactgctggggagtccctgcca

SEQ ID NO: 198564 - DNA, 25 bp, Probe Sequence
cctcattctgagggagctttcactt

SEQ ID NO: 198565 - DNA, 25 bp, Probe Sequence
cctctagctgtctggctgtataact

SEQ ID NO: 198566 - DNA, 25 bp, Probe Sequence
ccataaggtcatgcctttaagtaac

SEQ ID NO: 198567 - DNA, 25 bp, Probe Sequence
cctacaaactggcttacagcaatga

SEQ ID NO: 198568 - DNA, 25 bp, Probe Sequence
cctacactgttgtgtttcagtggaa

SEQ ID NO: 198569 - DNA, 25 bp, Probe Sequence
ccattgaccttctcttaagggactt

SEQ ID NO: 198570 - DNA, 25 bp, Probe Sequence
ccattggccgtctgtctttgatggt

SEQ ID NO: 198571 - DNA, 25 bp, Probe Sequence
cctagtgggattgggcctggtggtc

SEQ ID NO: 198572 - DNA, 25 bp, Probe Sequence
cctagtgggattgggcctggtggtc

SEQ ID NO: 198573 - DNA, 25 bp, Probe Sequence
cctaggcagggagcgtatgttggtg

SEQ ID NO: 198574 - DNA, 25 bp, Probe Sequence
cctagtgagggactgtgttgactga

SEQ ID NO: 198575 - DNA, 25 bp, Probe Sequence
cctactgaacagtctgagcttagcc

SEQ ID NO: 198576 - DNA, 25 bp, Probe Sequence
cctactgacaagcagcctgggcgta

SEQ ID NO: 198577 - DNA, 25 bp, Probe Sequence
cctagcatgtaccagcgcctagggc

SEQ ID NO: 198578 - DNA, 25 bp, Probe Sequence
cctactgagatccaggtgctaaagg

SEQ ID NO: 198579 - DNA, 25 bp, Probe Sequence
cctactcagaacttggcctacgttt

SEQ ID NO: 198580 - DNA, 25 bp, Probe Sequence
cctaccatgaaacagtctactcctt

SEQ ID NO: 198581 - DNA, 25 bp, Probe Sequence
cctacagcgaatttattctagccac

SEQ ID NO: 198582 - DNA, 25 bp, Probe Sequence
cctcaaggagacagtatctcagcgc

SEQ ID NO: 198583 - DNA, 25 bp, Probe Sequence
cctcagggtagcaccatggcaggac

SEQ ID NO: 198584 - DNA, 25 bp, Probe Sequence
cctcgtgcgtgtgatccagcgagcg

SEQ ID NO: 198585 - DNA, 25 bp, Probe Sequence
cctcgctgctggtgacgcagaatgg

SEQ ID NO: 198586 - DNA, 25 bp, Probe Sequence
cctcagcgccgatgaccagagtggc

SEQ ID NO: 198587 - DNA, 25 bp, Probe Sequence
cctcgctctgggggccaatggagct

SEQ ID NO: 198588 - DNA, 25 bp, Probe Sequence
cctcccttggggcctatgcagaggt

SEQ ID NO: 198589 - DNA, 25 bp, Probe Sequence
cctctcttgaggcggtgagcagaag

SEQ ID NO: 198590 - DNA, 25 bp, Probe Sequence
cctcatttgtgtccggagctcagga

SEQ ID NO: 198591 - DNA, 25 bp, Probe Sequence
cctattattcggcgcatgagctgga

SEQ ID NO: 198592 - DNA, 25 bp, Probe Sequence
cctcaagagtgcagccttggctaga

SEQ ID NO: 198593 - DNA, 25 bp, Probe Sequence
cctctggggctcagctctgagctag

SEQ ID NO: 198594 - DNA, 25 bp, Probe Sequence
cctctgttgtgtgcctgctgaataa

SEQ ID NO: 198595 - DNA, 25 bp, Probe Sequence
cctctccgcattgcctattgataca

SEQ ID NO: 198596 - DNA, 25 bp, Probe Sequence
cctcatccaacaggctttatgtatc

SEQ ID NO: 198597 - DNA, 25 bp, Probe Sequence
cctctcgcaaaggatctccttcatc

SEQ ID NO: 198598 - DNA, 25 bp, Probe Sequence
cctctcgcaaaggatctccttcatc

SEQ ID NO: 198599 - DNA, 25 bp, Probe Sequence
cctcatcatgatcagcgtcatcgtg

SEQ ID NO: 198600 - DNA, 25 bp, Probe Sequence
cctctcttcagcaggcatcattgaa

SEQ ID NO: 198601 - DNA, 25 bp, Probe Sequence
cctctctactgctgtcacggagaat

SEQ ID NO: 198602 - DNA, 25 bp, Probe Sequence
cctctgtactctttcacgttgatac

SEQ ID NO: 198603 - DNA, 25 bp, Probe Sequence
cctctgaacctttgcgctggataag

SEQ ID NO: 198604 - DNA, 25 bp, Probe Sequence
cctcggagcaccaaccgtgataacc

SEQ ID NO: 198605 - DNA, 25 bp, Probe Sequence
cctctgtgacaccaacacctgtaaa

SEQ ID NO: 198606 - DNA, 25 bp, Probe Sequence
cctctccaactatgcagcctgggaa

SEQ ID NO: 198607 - DNA, 25 bp, Probe Sequence
cctctccaactatgctagctgggaa

SEQ ID NO: 198608 - DNA, 25 bp, Probe Sequence
ccttccatgaccgctagtgggagcc

SEQ ID NO: 198609 - DNA, 25 bp, Probe Sequence
cctatctcgaacggctcaggattcg

SEQ ID NO: 198610 - DNA, 25 bp, Probe Sequence
cctcaccagcaaggctgctcggggg

SEQ ID NO: 198611 - DNA, 25 bp, Probe Sequence
cctcagctgaaagtggtggggcagg

SEQ ID NO: 198612 - DNA, 25 bp, Probe Sequence
cctcgcctacttagggaggcatggc

SEQ ID NO: 198613 - DNA, 25 bp, Probe Sequence
cctagcttcacttgggaaaatctgt

SEQ ID NO: 198614 - DNA, 25 bp, Probe Sequence
cctagcttccttgcttcagaattga

SEQ ID NO: 198615 - DNA, 25 bp, Probe Sequence
cctacttccttgtctttgaaataag

SEQ ID NO: 198616 - DNA, 25 bp, Probe Sequence
cctagtccttctctgcttaaataaa

SEQ ID NO: 198617 - DNA, 25 bp, Probe Sequence
cctcgtctcttccagatatttgtta

SEQ ID NO: 198618 - DNA, 25 bp, Probe Sequence
cctcagtcactaaaggtctgtttaa

SEQ ID NO: 198619 - DNA, 25 bp, Probe Sequence
cctcagacactactgaggtggttct

SEQ ID NO: 198620 - DNA, 25 bp, Probe Sequence
cctcagctaagactgggtcctttgg

SEQ ID NO: 198621 - DNA, 25 bp, Probe Sequence
cctaggacacaggggactccttgac

SEQ ID NO: 198622 - DNA, 25 bp, Probe Sequence
cctagttcgaattaacagccttgcc

SEQ ID NO: 198623 - DNA, 25 bp, Probe Sequence
cctacttttattatgagtctctgcc

SEQ ID NO: 198624 - DNA, 25 bp, Probe Sequence
ccttcatggttctgcaagacatccc

SEQ ID NO: 198625 - DNA, 25 bp, Probe Sequence
cctagtgtggtgtacaagacccttt

SEQ ID NO: 198626 - DNA, 25 bp, Probe Sequence
cctcgctgggcttacaacagccaga

SEQ ID NO: 198627 - DNA, 25 bp, Probe Sequence
cctcagcccagattagcaacactca

SEQ ID NO: 198628 - DNA, 25 bp, Probe Sequence
cctagccaatggtctggacaacaag

SEQ ID NO: 198629 - DNA, 25 bp, Probe Sequence
cctagcccattagggacactataga

SEQ ID NO: 198630 - DNA, 25 bp, Probe Sequence
cctacccatgtgtggctgagctgaa

SEQ ID NO: 198631 - DNA, 25 bp, Probe Sequence
cctaggccaaggtttgagctgcaat

SEQ ID NO: 198632 - DNA, 25 bp, Probe Sequence
cctaggccaattcttggtagttctc

SEQ ID NO: 198633 - DNA, 25 bp, Probe Sequence
ccaaggccttagcttccttggcctg

SEQ ID NO: 198634 - DNA, 25 bp, Probe Sequence
ccaaggccttagcttccttggcctg

SEQ ID NO: 198635 - DNA, 25 bp, Probe Sequence
gccaaaccttggcatttttggtatt

SEQ ID NO: 198636 - DNA, 25 bp, Probe Sequence
cctctcaccttgcgtggtttggtga

SEQ ID NO: 198637 - DNA, 25 bp, Probe Sequence
cctctccagtgtctgggtttcttga

SEQ ID NO: 198638 - DNA, 25 bp, Probe Sequence
cctaccagttggccatgatgtcttt

SEQ ID NO: 198639 - DNA, 25 bp, Probe Sequence
cctcagacagtttgcttattttatt

SEQ ID NO: 198640 - DNA, 25 bp, Probe Sequence
cctcgtgccatgatctgtatttaat

SEQ ID NO: 198641 - DNA, 25 bp, Probe Sequence
cctcgtgctccatctgaatcgattt

SEQ ID NO: 198642 - DNA, 25 bp, Probe Sequence
cctcattgtccagctgaactacctg

SEQ ID NO: 198643 - DNA, 25 bp, Probe Sequence
cctttgatccggacacaaaccttct

SEQ ID NO: 198644 - DNA, 25 bp, Probe Sequence
ccttctatttgcacaagtcaccttg

SEQ ID NO: 198645 - DNA, 25 bp, Probe Sequence
cctagtatcttcagcacatgctcac

SEQ ID NO: 198646 - DNA, 25 bp, Probe Sequence
cctcagccagccatgctgagcatct

SEQ ID NO: 198647 - DNA, 25 bp, Probe Sequence
cctcagcgcctgatggcagctatgt

SEQ ID NO: 198648 - DNA, 25 bp, Probe Sequence
cctcagccctagctgatgctgatgc

SEQ ID NO: 198649 - DNA, 25 bp, Probe Sequence
cctcaggacacggtgcagcgatgcc

SEQ ID NO: 198650 - DNA, 25 bp, Probe Sequence
cctcgtgactggactgcacagttca

SEQ ID NO: 198651 - DNA, 25 bp, Probe Sequence
cctcgatgttggatcaggacatccc

SEQ ID NO: 198652 - DNA, 25 bp, Probe Sequence
cctcaggttgtgaccgagattcccg

SEQ ID NO: 198653 - DNA, 25 bp, Probe Sequence
cctcatggcttggatctctgtattc

SEQ ID NO: 198654 - DNA, 25 bp, Probe Sequence
cctcactgcttggacactacattcc

SEQ ID NO: 198655 - DNA, 25 bp, Probe Sequence
cctcagctcttctatagcatcttct

SEQ ID NO: 198656 - DNA, 25 bp, Probe Sequence
cctcagatcttctgtctcattcgat

SEQ ID NO: 198657 - DNA, 25 bp, Probe Sequence
cctcgatattgccagtttcttgtgc

SEQ ID NO: 198658 - DNA, 25 bp, Probe Sequence
cctcaatatgtgccgccagtgtttc

SEQ ID NO: 198659 - DNA, 25 bp, Probe Sequence
cctctgaatgataccactggctttc

SEQ ID NO: 198660 - DNA, 25 bp, Probe Sequence
cctctactgatacatgtctgtgttt

SEQ ID NO: 198661 - DNA, 25 bp, Probe Sequence
cctcacttgattcatctctggtttt

SEQ ID NO: 198662 - DNA, 25 bp, Probe Sequence
cctcgtcacttgcaacttgctattc

SEQ ID NO: 198663 - DNA, 25 bp, Probe Sequence
cctagtcatcttcactcgtgtatta

SEQ ID NO: 198664 - DNA, 25 bp, Probe Sequence
cctaacatggcccacacgttgtatt

SEQ ID NO: 198665 - DNA, 25 bp, Probe Sequence
cctatacaggaaggcacggtgttct

SEQ ID NO: 198666 - DNA, 25 bp, Probe Sequence
cctatcacgcgtgaatcggtgtccc

SEQ ID NO: 198667 - DNA, 25 bp, Probe Sequence
gcctgaactgggaaacccaggcctt

SEQ ID NO: 198668 - DNA, 25 bp, Probe Sequence
gccaaatcgaggaaaagccaaacct

SEQ ID NO: 198669 - DNA, 25 bp, Probe Sequence
cctaaggaggaaaagaccttgacat

SEQ ID NO: 198670 - DNA, 25 bp, Probe Sequence
cctataataggctttagagcctttc

SEQ ID NO: 198671 - DNA, 25 bp, Probe Sequence
cctcatgtaactttacaacccttgc

SEQ ID NO: 198672 - DNA, 25 bp, Probe Sequence
cctcattcacacgagaaaacaccct

SEQ ID NO: 198673 - DNA, 25 bp, Probe Sequence
cctcatccacagtaggacaccatcc

SEQ ID NO: 198674 - DNA, 25 bp, Probe Sequence
cctctggccaagtcgacagccaacg

SEQ ID NO: 198675 - DNA, 25 bp, Probe Sequence
cctctaccgagctgtcagcaagacg

SEQ ID NO: 198676 - DNA, 25 bp, Probe Sequence
cctctgaacggagttcaaaggctgc

SEQ ID NO: 198677 - DNA, 25 bp, Probe Sequence
ccattgaatcggtagtcccagttct

SEQ ID NO: 198678 - DNA, 25 bp, Probe Sequence
cctcagagaaagggtcctgcatttt

SEQ ID NO: 198679 - DNA, 25 bp, Probe Sequence
cctataatacaggcttccgatttta

SEQ ID NO: 198680 - DNA, 25 bp, Probe Sequence
cctaaaagcacccacatttgtttca

SEQ ID NO: 198681 - DNA, 25 bp, Probe Sequence
ccttcccccaagattgtggttgcca

SEQ ID NO: 198682 - DNA, 25 bp, Probe Sequence
cctacccctatgctgtttggtacta

SEQ ID NO: 198683 - DNA, 25 bp, Probe Sequence
ccttaccaaatcctagtgttatact

SEQ ID NO: 198684 - DNA, 25 bp, Probe Sequence
cctataccaaatctaatgtcataaa

SEQ ID NO: 198685 - DNA, 25 bp, Probe Sequence
cctctgacgaatgggtatattgaaa

SEQ ID NO: 198686 - DNA, 25 bp, Probe Sequence
cctctggagagaacgtcatccaaaa

SEQ ID NO: 198687 - DNA, 25 bp, Probe Sequence
cctctggtgagaagaggtcccccct

SEQ ID NO: 198688 - DNA, 25 bp, Probe Sequence
cctctggatggaggagggccttccc

SEQ ID NO: 198689 - DNA, 25 bp, Probe Sequence
cctctggggcaggaggggcttgggc

SEQ ID NO: 198690 - DNA, 25 bp, Probe Sequence
cctctcgggatgtgggctctagagc

SEQ ID NO: 198691 - DNA, 25 bp, Probe Sequence
cctctcggacatttatacctatggc

SEQ ID NO: 198692 - DNA, 25 bp, Probe Sequence
cctctgttagaaattcacactgttg

SEQ ID NO: 198693 - DNA, 25 bp, Probe Sequence
cctctgtttgaaatacctagtgtgg

SEQ ID NO: 198694 - DNA, 25 bp, Probe Sequence
cctctctgtttgtaaccttgtcgac

SEQ ID NO: 198695 - DNA, 25 bp, Probe Sequence
cctctcaagtggttacctgttcaag

SEQ ID NO: 198696 - DNA, 25 bp, Probe Sequence
ccatcttagtgtatagcctggaaag

SEQ ID NO: 198697 - DNA, 25 bp, Probe Sequence
cctctttgtgttcagcccagacaca

SEQ ID NO: 198698 - DNA, 25 bp, Probe Sequence
cctttattaccaagcccagagatac

SEQ ID NO: 198699 - DNA, 25 bp, Probe Sequence
ccttctatacccacccagaatgaga

SEQ ID NO: 198700 - DNA, 25 bp, Probe Sequence
cctttgtacaccgcgccgcggaagg

SEQ ID NO: 198701 - DNA, 25 bp, Probe Sequence
cctttgtaaaggagccgcagatgca

SEQ ID NO: 198702 - DNA, 25 bp, Probe Sequence
cctcttgtaaggcattccacagttc

SEQ ID NO: 198703 - DNA, 25 bp, Probe Sequence
cctcttgcagaagcgcattcccaag

SEQ ID NO: 198704 - DNA, 25 bp, Probe Sequence
cctcttaagcagcactatccaacag

SEQ ID NO: 198705 - DNA, 25 bp, Probe Sequence
gcctttaagcaatcttcaaaactga

SEQ ID NO: 198706 - DNA, 25 bp, Probe Sequence
cctcttccaatgagcttaaaacatt

SEQ ID NO: 198707 - DNA, 25 bp, Probe Sequence
cctcattccagcctttctatataaa

SEQ ID NO: 198708 - DNA, 25 bp, Probe Sequence
cctcattccagcctttctatataaa

SEQ ID NO: 198709 - DNA, 25 bp, Probe Sequence
cctcatctgcacactgattgccata

SEQ ID NO: 198710 - DNA, 25 bp, Probe Sequence
cctcatcctgccttagtgtgcaatc

SEQ ID NO: 198711 - DNA, 25 bp, Probe Sequence
cctctccgcacagcgtggagacggg

SEQ ID NO: 198712 - DNA, 25 bp, Probe Sequence
ccattcccgcagacggggacctggt

SEQ ID NO: 198713 - DNA, 25 bp, Probe Sequence
ccttccccagggggaaccagcgctg

SEQ ID NO: 198714 - DNA, 25 bp, Probe Sequence
tccttcaccccgggaaggcgacagt

SEQ ID NO: 198715 - DNA, 25 bp, Probe Sequence
tccttcaccccgggaaggcgacagt

SEQ ID NO: 198716 - DNA, 25 bp, Probe Sequence
cctctgtccccagggatcaacagaa

SEQ ID NO: 198717 - DNA, 25 bp, Probe Sequence
cctctgtccttaggttgtagcagaa

SEQ ID NO: 198718 - DNA, 25 bp, Probe Sequence
cctctcccgctgggtgttcaaggag

SEQ ID NO: 198719 - DNA, 25 bp, Probe Sequence
cctcagttccggaccattcaggaga

SEQ ID NO: 198720 - DNA, 25 bp, Probe Sequence
cctctttccaggacctcagtaggca

SEQ ID NO: 198721 - DNA, 25 bp, Probe Sequence
ccttttcagcaggttccagtgcctg

SEQ ID NO: 198722 - DNA, 25 bp, Probe Sequence
ccattatgtcctgattagggacttt

SEQ ID NO: 198723 - DNA, 25 bp, Probe Sequence
ccttactccttcacagatcggtgta

SEQ ID NO: 198724 - DNA, 25 bp, Probe Sequence
cctctcacctttaactgacgttttg

SEQ ID NO: 198725 - DNA, 25 bp, Probe Sequence
cctctgcaccttcaaaaagattcat

SEQ ID NO: 198726 - DNA, 25 bp, Probe Sequence
cctctgactcctagcaaggaaggga

SEQ ID NO: 198727 - DNA, 25 bp, Probe Sequence
cctctccatcctcacaggagacgtt

SEQ ID NO: 198728 - DNA, 25 bp, Probe Sequence
cctctgttctgtgaatggactctgt

SEQ ID NO: 198729 - DNA, 25 bp, Probe Sequence
cctctgtttcatgatgcatgggtca

SEQ ID NO: 198730 - DNA, 25 bp, Probe Sequence
cctctgtgtcttgactgtgggcaag

SEQ ID NO: 198731 - DNA, 25 bp, Probe Sequence
cctctgctttactctcatgtggcaa

SEQ ID NO: 198732 - DNA, 25 bp, Probe Sequence
cctcttctggcagcgctagtgagat

SEQ ID NO: 198733 - DNA, 25 bp, Probe Sequence
cctctgtcatcacctcactagatga

SEQ ID NO: 198734 - DNA, 25 bp, Probe Sequence
cctcaagatcacctactttgcactg

SEQ ID NO: 198735 - DNA, 25 bp, Probe Sequence
cctaatgatgacttgagccctgcca

SEQ ID NO: 198736 - DNA, 25 bp, Probe Sequence
cctatgaggacagtgtccgccctgc

SEQ ID NO: 198737 - DNA, 25 bp, Probe Sequence
cctatgaggacagtgtccgccctgc

SEQ ID NO: 198738 - DNA, 25 bp, Probe Sequence
cctatggcgaatctgaggctcctgc

SEQ ID NO: 198739 - DNA, 25 bp, Probe Sequence
cctcttgctactctggagccattag

SEQ ID NO: 198740 - DNA, 25 bp, Probe Sequence
cctaagctgactcagggcccaatgt

SEQ ID NO: 198741 - DNA, 25 bp, Probe Sequence
cctacagtgctcaaagggaagagat

SEQ ID NO: 198742 - DNA, 25 bp, Probe Sequence
cctcacgagctatagtggcgcacaa

SEQ ID NO: 198743 - DNA, 25 bp, Probe Sequence
cctcacagcaccaaatgattccctg

SEQ ID NO: 198744 - DNA, 25 bp, Probe Sequence
cctaccacactattttcttctaaga

SEQ ID NO: 198745 - DNA, 25 bp, Probe Sequence
cctctcctccttttttttagatgag

SEQ ID NO: 198746 - DNA, 25 bp, Probe Sequence
cctctcagtccttgttcttttgaag

SEQ ID NO: 198747 - DNA, 25 bp, Probe Sequence
cctaagtcagctttcatctttgtgg

SEQ ID NO: 198748 - DNA, 25 bp, Probe Sequence
cctacattcatcttcgactttctaa

SEQ ID NO: 198749 - DNA, 25 bp, Probe Sequence
cctctcaatcccagattttcaaaaa

SEQ ID NO: 198750 - DNA, 25 bp, Probe Sequence
cctctcaatcactactcttcttgaa

SEQ ID NO: 198751 - DNA, 25 bp, Probe Sequence
cctaactccatgtctctgagcatta

SEQ ID NO: 198752 - DNA, 25 bp, Probe Sequence
cctaagcctcatttctcatgttcag

SEQ ID NO: 198753 - DNA, 25 bp, Probe Sequence
cctcattggccatttccattatggt

SEQ ID NO: 198754 - DNA, 25 bp, Probe Sequence
cctctctggaacttgccatcatcat

SEQ ID NO: 198755 - DNA, 25 bp, Probe Sequence
cctcttgcaaagggtctccttcatc

SEQ ID NO: 198756 - DNA, 25 bp, Probe Sequence
cctcttggtggcagtattcccacag

SEQ ID NO: 198757 - DNA, 25 bp, Probe Sequence
cctctttgcaggagaactccccgca

SEQ ID NO: 198758 - DNA, 25 bp, Probe Sequence
ccttttgatggtgacctacctggcc

SEQ ID NO: 198759 - DNA, 25 bp, Probe Sequence
cctctttggtgtacagacttcttgg

SEQ ID NO: 198760 - DNA, 25 bp, Probe Sequence
cctcatgtttgtgataaccgtggcg

SEQ ID NO: 198761 - DNA, 25 bp, Probe Sequence
cctcttttgtagtgacacagtggtg

SEQ ID NO: 198762 - DNA, 25 bp, Probe Sequence
cctctttcttctcaaacaatggatg

SEQ ID NO: 198763 - DNA, 25 bp, Probe Sequence
cctcttgctcttacagaaacctggc

SEQ ID NO: 198764 - DNA, 25 bp, Probe Sequence
cctcttctgcttactgtaactgcgg

SEQ ID NO: 198765 - DNA, 25 bp, Probe Sequence
cctcagactctcaacttaactgctg

SEQ ID NO: 198766 - DNA, 25 bp, Probe Sequence
cctcatcacctcacttaaacaatta

SEQ ID NO: 198767 - DNA, 25 bp, Probe Sequence
cctacccccctaataaggagtgcat

SEQ ID NO: 198768 - DNA, 25 bp, Probe Sequence
ccttcaccacctgaccaaaggtcta

SEQ ID NO: 198769 - DNA, 25 bp, Probe Sequence
ccttcccacttgctgaaaaggtcaa

SEQ ID NO: 198770 - DNA, 25 bp, Probe Sequence
cctttcccttctgtaatcaggccaa

SEQ ID NO: 198771 - DNA, 25 bp, Probe Sequence
ccttgtccctttgaagtcacaaaca

SEQ ID NO: 198772 - DNA, 25 bp, Probe Sequence
cctattccctccacaataacagaaa

SEQ ID NO: 198773 - DNA, 25 bp, Probe Sequence
cctattccctccacaataacagaaa

SEQ ID NO: 198774 - DNA, 25 bp, Probe Sequence
cctcttcccctaaaatttctgcagg

SEQ ID NO: 198775 - DNA, 25 bp, Probe Sequence
cctctactcccttaacagtgttgaa

SEQ ID NO: 198776 - DNA, 25 bp, Probe Sequence
cctctattcgccacacagtattttt

SEQ ID NO: 198777 - DNA, 25 bp, Probe Sequence
cctctaccaccaatcagcaggagat

SEQ ID NO: 198778 - DNA, 25 bp, Probe Sequence
cctctttccctaagcagcctgaggg

SEQ ID NO: 198779 - DNA, 25 bp, Probe Sequence
cctctttcccgcagctgcagagagg

SEQ ID NO: 198780 - DNA, 25 bp, Probe Sequence
cctctttccacagtgactacagagt

SEQ ID NO: 198781 - DNA, 25 bp, Probe Sequence
cctcttcatccaggtcagttcagga

SEQ ID NO: 198782 - DNA, 25 bp, Probe Sequence
cctctatgtctcagatgcattccat

SEQ ID NO: 198783 - DNA, 25 bp, Probe Sequence
cctctcatttcttgccattggattg

SEQ ID NO: 198784 - DNA, 25 bp, Probe Sequence
cctcaagttctcgctagatgtctgc

SEQ ID NO: 198785 - DNA, 25 bp, Probe Sequence
cctctgcctttggtctgaatgactg

SEQ ID NO: 198786 - DNA, 25 bp, Probe Sequence
cctctcctgtccttgtgttgaaggc

SEQ ID NO: 198787 - DNA, 25 bp, Probe Sequence
cctctcctgtccttgtgttgaaggc

SEQ ID NO: 198788 - DNA, 25 bp, Probe Sequence
cctctactgtaaatgtgccttagcc

SEQ ID NO: 198789 - DNA, 25 bp, Probe Sequence
cctctacatgggctgtggctgtcag

SEQ ID NO: 198790 - DNA, 25 bp, Probe Sequence
cctctacatgggctgtggctgtcag

SEQ ID NO: 198791 - DNA, 25 bp, Probe Sequence
cctctttgtctgcgtgggtcagaag

SEQ ID NO: 198792 - DNA, 25 bp, Probe Sequence
cctctttgactggctgtcggtcaga

SEQ ID NO: 198793 - DNA, 25 bp, Probe Sequence
cctcatttatctcttctatgtctag

SEQ ID NO: 198794 - DNA, 25 bp, Probe Sequence
cctatgttactattgcccttctgga

SEQ ID NO: 198795 - DNA, 25 bp, Probe Sequence
cctacgagcccatggcctacatgga

SEQ ID NO: 198796 - DNA, 25 bp, Probe Sequence
cctagttccacatggcctgaaggta

SEQ ID NO: 198797 - DNA, 25 bp, Probe Sequence
cctagctaccactaggtggatagta

SEQ ID NO: 198798 - DNA, 25 bp, Probe Sequence
cctctctgcaccgtactgtggaaaa

SEQ ID NO: 198799 - DNA, 25 bp, Probe Sequence
cctctctctgtcaacactggaataa

SEQ ID NO: 198800 - DNA, 25 bp, Probe Sequence
cctttttcataactggaattgccaa

SEQ ID NO: 198801 - DNA, 25 bp, Probe Sequence
ccttttttcccactacacatcaaag

SEQ ID NO: 198802 - DNA, 25 bp, Probe Sequence
ccttttttcccataagacaatgaca

SEQ ID NO: 198803 - DNA, 25 bp, Probe Sequence
cctctttttccggctggaaccatgg

SEQ ID NO: 198804 - DNA, 25 bp, Probe Sequence
ccttaggtataccctggaagagctg

SEQ ID NO: 198805 - DNA, 25 bp, Probe Sequence
ccttagcatgtatcactctgtggag

SEQ ID NO: 198806 - DNA, 25 bp, Probe Sequence
cctcaactgtcaccactgctaaggg

SEQ ID NO: 198807 - DNA, 25 bp, Probe Sequence
cctcacacctcactctttatagtgc

SEQ ID NO: 198808 - DNA, 25 bp, Probe Sequence
cctctcacccatcctgaatattatg

SEQ ID NO: 198809 - DNA, 25 bp, Probe Sequence
cctctcacccatcctgaatattatg

SEQ ID NO: 198810 - DNA, 25 bp, Probe Sequence
cctctcacccaacatgaatattatg

SEQ ID NO: 198811 - DNA, 25 bp, Probe Sequence
cctctctgccagcaccaagagatta

SEQ ID NO: 198812 - DNA, 25 bp, Probe Sequence
cctctctgccagcaccaagagatta

SEQ ID NO: 198813 - DNA, 25 bp, Probe Sequence
cctctctccacaatgccaagacgga

SEQ ID NO: 198814 - DNA, 25 bp, Probe Sequence
cctcagccccaagatcatgcaggag

SEQ ID NO: 198815 - DNA, 25 bp, Probe Sequence
cctagccccctcaatagatgagcag

SEQ ID NO: 198816 - DNA, 25 bp, Probe Sequence
cctaccaggccaccattgatggagt

SEQ ID NO: 198817 - DNA, 25 bp, Probe Sequence
cctacctcagcctcttgagtagctg

SEQ ID NO: 198818 - DNA, 25 bp, Probe Sequence
ccatcacgtcagatttggagctggt

SEQ ID NO: 198819 - DNA, 25 bp, Probe Sequence
cctcatctgtaggatttgggctgcc

SEQ ID NO: 198820 - DNA, 25 bp, Probe Sequence
cctcacgttcacttaggcacatcac

SEQ ID NO: 198821 - DNA, 25 bp, Probe Sequence
cctcacagttgccatgtagacccct

SEQ ID NO: 198822 - DNA, 25 bp, Probe Sequence
ccttcagttctgttatactccagcc

SEQ ID NO: 198823 - DNA, 25 bp, Probe Sequence
cctatgcgtttgtatatgctctaaa

SEQ ID NO: 198824 - DNA, 25 bp, Probe Sequence
cctagtggtggctcctcaaagaagc

SEQ ID NO: 198825 - DNA, 25 bp, Probe Sequence
cctagatcagtccttctccaaaagg

SEQ ID NO: 198826 - DNA, 25 bp, Probe Sequence
cctcaatctgaactctcctgaaaat

SEQ ID NO: 198827 - DNA, 25 bp, Probe Sequence
cctactctgagaatcgtgtggaaaa

SEQ ID NO: 198828 - DNA, 25 bp, Probe Sequence
cctcagctcttagctggtctaagaa

SEQ ID NO: 198829 - DNA, 25 bp, Probe Sequence
cctctcatttccagcgtatatgagc

SEQ ID NO: 198830 - DNA, 25 bp, Probe Sequence
cctcttcactccagcgtcatagaga

SEQ ID NO: 198831 - DNA, 25 bp, Probe Sequence
cctatgtgccccacaggaaagcgcc

SEQ ID NO: 198832 - DNA, 25 bp, Probe Sequence
cctcttccctgcacagagatttctc

SEQ ID NO: 198833 - DNA, 25 bp, Probe Sequence
cctcttcacctacagcagtgtctat

SEQ ID NO: 198834 - DNA, 25 bp, Probe Sequence
cctcttccaccctcagtggatgata

SEQ ID NO: 198835 - DNA, 25 bp, Probe Sequence
cctcatcccccacactgggatagat

SEQ ID NO: 198836 - DNA, 25 bp, Probe Sequence
cctcactttccaccaagtgtctaga

SEQ ID NO: 198837 - DNA, 25 bp, Probe Sequence
cctatctcatctgcagccgaggaat

SEQ ID NO: 198838 - DNA, 25 bp, Probe Sequence
cctacttctcctactggaacatctc

SEQ ID NO: 198839 - DNA, 25 bp, Probe Sequence
ccttctgtaactttggtaactgcat

SEQ ID NO: 198840 - DNA, 25 bp, Probe Sequence
cctttaaagttcctatttcagcata

SEQ ID NO: 198841 - DNA, 25 bp, Probe Sequence
cctattcggcgtagcttttgtggct

SEQ ID NO: 198842 - DNA, 25 bp, Probe Sequence
cctcatatgcatactctggctttgt

SEQ ID NO: 198843 - DNA, 25 bp, Probe Sequence
cctcttggccttggctttgattctt

SEQ ID NO: 198844 - DNA, 25 bp, Probe Sequence
ccttaggactctgcattaactctat

SEQ ID NO: 198845 - DNA, 25 bp, Probe Sequence
ccttcaggtcctcataaagaaaagt

SEQ ID NO: 198846 - DNA, 25 bp, Probe Sequence
ccagctcaacccattaaagacccag

SEQ ID NO: 198847 - DNA, 25 bp, Probe Sequence
ccttcaagacaaaaacacaacccag

SEQ ID NO: 198848 - DNA, 25 bp, Probe Sequence
ccttcactgggaacaacacagccgt

SEQ ID NO: 198849 - DNA, 25 bp, Probe Sequence
ccattactgggtatacacctagaga

SEQ ID NO: 198850 - DNA, 25 bp, Probe Sequence
ccttccacgactagaaccttaggca

SEQ ID NO: 198851 - DNA, 25 bp, Probe Sequence
ccttcaaccacatcaaactctacag

SEQ ID NO: 198852 - DNA, 25 bp, Probe Sequence
ccttccggcgcataaagtcagcaag

SEQ ID NO: 198853 - DNA, 25 bp, Probe Sequence
cctctacgtggggacagcaggagaa

SEQ ID NO: 198854 - DNA, 25 bp, Probe Sequence
cctctaccttggaagcagttagaat

SEQ ID NO: 198855 - DNA, 25 bp, Probe Sequence
ccttcagcactatgggattctagat

SEQ ID NO: 198856 - DNA, 25 bp, Probe Sequence
cctcacagactctggggccatagtt

SEQ ID NO: 198857 - DNA, 25 bp, Probe Sequence
cctcaaacttctgtgcacaaagtgc

SEQ ID NO: 198858 - DNA, 25 bp, Probe Sequence
cctataccttctgcataatgaatta

SEQ ID NO: 198859 - DNA, 25 bp, Probe Sequence
cctctactttctgctaagccttgga

SEQ ID NO: 198860 - DNA, 25 bp, Probe Sequence
tccttcacttttagggtcctctgaa

SEQ ID NO: 198861 - DNA, 25 bp, Probe Sequence
tccttcacttttagggtcctctgaa

SEQ ID NO: 198862 - DNA, 25 bp, Probe Sequence
ccttcctttgtcctaatcctggaat

SEQ ID NO: 198863 - DNA, 25 bp, Probe Sequence
cctctttgtgttgtagtccatgcta

SEQ ID NO: 198864 - DNA, 25 bp, Probe Sequence
cctcattcttgccttgagttccagt

SEQ ID NO: 198865 - DNA, 25 bp, Probe Sequence
cctcagctcctccaatagagtcaga

SEQ ID NO: 198866 - DNA, 25 bp, Probe Sequence
cctcagcaacgccagcaggcgtcag

SEQ ID NO: 198867 - DNA, 25 bp, Probe Sequence
cctcaaagcggcatggcggcatggc

SEQ ID NO: 198868 - DNA, 25 bp, Probe Sequence
cctcaaacgcaattgcagcaaaagc

SEQ ID NO: 198869 - DNA, 25 bp, Probe Sequence
cctcatcaccgccaatgcaacagag

SEQ ID NO: 198870 - DNA, 25 bp, Probe Sequence
cctcatcagcccaacatcaaagaca

SEQ ID NO: 198871 - DNA, 25 bp, Probe Sequence
cctctatcagccatgcatcaaaagc

SEQ ID NO: 198872 - DNA, 25 bp, Probe Sequence
cctctatatcgctcatcacaacaag

SEQ ID NO: 198873 - DNA, 25 bp, Probe Sequence
cctcttactgcagcacaaccagatc

SEQ ID NO: 198874 - DNA, 25 bp, Probe Sequence
cctcttcaacaggctcaactcagtt

SEQ ID NO: 198875 - DNA, 25 bp, Probe Sequence
cctcttcctcatgctgaactgcatt

SEQ ID NO: 198876 - DNA, 25 bp, Probe Sequence
cctcttctataactgtaccactttt

SEQ ID NO: 198877 - DNA, 25 bp, Probe Sequence
ccttctgtatttccataccactttt

SEQ ID NO: 198878 - DNA, 25 bp, Probe Sequence
ccttctttatctactagcctcttaa

SEQ ID NO: 198879 - DNA, 25 bp, Probe Sequence
ccttacctatcaacaatgactttaa

SEQ ID NO: 198880 - DNA, 25 bp, Probe Sequence
cctttccatattcttactctttaca

SEQ ID NO: 198881 - DNA, 25 bp, Probe Sequence
cctatctccttttctctagtatttg

SEQ ID NO: 198882 - DNA, 25 bp, Probe Sequence
cctatccctttgacactacacaatt

SEQ ID NO: 198883 - DNA, 25 bp, Probe Sequence
cctttcttttgatagagcagttttg

SEQ ID NO: 198884 - DNA, 25 bp, Probe Sequence
ccttcaccttgtgtggacagtgtct

SEQ ID NO: 198885 - DNA, 25 bp, Probe Sequence
ccttccctgtttagtactggccaga

SEQ ID NO: 198886 - DNA, 25 bp, Probe Sequence
ccttgttatttctgtttgtaagact

SEQ ID NO: 198887 - DNA, 25 bp, Probe Sequence
ccttgcttggcttaaaatgggaaga

SEQ ID NO: 198888 - DNA, 25 bp, Probe Sequence
cctacttctctggtacaagggcaag

SEQ ID NO: 198889 - DNA, 25 bp, Probe Sequence
cctcacttcatccttgcaaagagaa

SEQ ID NO: 198890 - DNA, 25 bp, Probe Sequence
cctcttcattcacttcagaaataat

SEQ ID NO: 198891 - DNA, 25 bp, Probe Sequence
cctcttctcatccacctgagaaaaa

SEQ ID NO: 198892 - DNA, 25 bp, Probe Sequence
cctcttgctgactgtctggaacttc

SEQ ID NO: 198893 - DNA, 25 bp, Probe Sequence
cctcttgctgactgtctggaacttc

SEQ ID NO: 198894 - DNA, 25 bp, Probe Sequence
cctcttggacaagtttgagacaatt

SEQ ID NO: 198895 - DNA, 25 bp, Probe Sequence
cctcttgtggggtttggatcctgtg

SEQ ID NO: 198896 - DNA, 25 bp, Probe Sequence
cctattctgtggtttttccagcttg

SEQ ID NO: 198897 - DNA, 25 bp, Probe Sequence
cctattctgtgaaaccttccgtggt

SEQ ID NO: 198898 - DNA, 25 bp, Probe Sequence
cctacttggatatacttctggtcag

SEQ ID NO: 198899 - DNA, 25 bp, Probe Sequence
ccatacttgctaaaaattctggtaa

SEQ ID NO: 198900 - DNA, 25 bp, Probe Sequence
cctcatcttctaaaacctttgtaat

SEQ ID NO: 198901 - DNA, 25 bp, Probe Sequence
cctaatttattttcctcatagtatt

SEQ ID NO: 198902 - DNA, 25 bp, Probe Sequence
cctacatatttctattccccaggtt

SEQ ID NO: 198903 - DNA, 25 bp, Probe Sequence
ccttattctaccaactaccaggtct

SEQ ID NO: 198904 - DNA, 25 bp, Probe Sequence
cctactcctcaacagttctgggttt

SEQ ID NO: 198905 - DNA, 25 bp, Probe Sequence
ccttgccccaaaaggatctggaaca

SEQ ID NO: 198906 - DNA, 25 bp, Probe Sequence
ccttctccctgaagaacctggacaa

SEQ ID NO: 198907 - DNA, 25 bp, Probe Sequence
cctcattgccctcaacacagtggag

SEQ ID NO: 198908 - DNA, 25 bp, Probe Sequence
cctcaagacaccttccgagtgtgtg

SEQ ID NO: 198909 - DNA, 25 bp, Probe Sequence
cctcaagacacctcccgaatgtctt

SEQ ID NO: 198910 - DNA, 25 bp, Probe Sequence
cctcaagacacctcccgaatgtctt

SEQ ID NO: 198911 - DNA, 25 bp, Probe Sequence
cctcagaaaccttccctggatgaat

SEQ ID NO: 198912 - DNA, 25 bp, Probe Sequence
cctataagcttttccacttgatgga

SEQ ID NO: 198913 - DNA, 25 bp, Probe Sequence
ccttaggctttagcagctttgcatt

SEQ ID NO: 198914 - DNA, 25 bp, Probe Sequence
ccttgggcttaagcctcacttgctg

SEQ ID NO: 198915 - DNA, 25 bp, Probe Sequence
cctcttgctgtctaaggtctcgttc

SEQ ID NO: 198916 - DNA, 25 bp, Probe Sequence
cctcttcttcaaggagcatccgtga

SEQ ID NO: 198917 - DNA, 25 bp, Probe Sequence
cctcacttacagactagcccagtgt

SEQ ID NO: 198918 - DNA, 25 bp, Probe Sequence
cctcacttacagactgtctacagtg

SEQ ID NO: 198919 - DNA, 25 bp, Probe Sequence
cctcattttcacagcactacttgct

SEQ ID NO: 198920 - DNA, 25 bp, Probe Sequence
cctcatctttcttccaaacaggctc

SEQ ID NO: 198921 - DNA, 25 bp, Probe Sequence
cctactttcttcaagacctgagcct

SEQ ID NO: 198922 - DNA, 25 bp, Probe Sequence
cctcatgtcatccttctaggaaggc

SEQ ID NO: 198923 - DNA, 25 bp, Probe Sequence
cctcagtacagcccacagtgggtgc

SEQ ID NO: 198924 - DNA, 25 bp, Probe Sequence
cctatgtaccgcttcactgaggggc

SEQ ID NO: 198925 - DNA, 25 bp, Probe Sequence
cctcatatcaagccctcactatgtg

SEQ ID NO: 198926 - DNA, 25 bp, Probe Sequence
cctcataagcagcgaccttgtggca

SEQ ID NO: 198927 - DNA, 25 bp, Probe Sequence
cctcaggcaattagacactttggaa

SEQ ID NO: 198928 - DNA, 25 bp, Probe Sequence
cctcagtggatccagcaacatcttt

SEQ ID NO: 198929 - DNA, 25 bp, Probe Sequence
cctagttgatctttcagatctttcc

SEQ ID NO: 198930 - DNA, 25 bp, Probe Sequence
ccatagcgatactagccctttactc

SEQ ID NO: 198931 - DNA, 25 bp, Probe Sequence
cctacagatatgtgcacgttgctag

SEQ ID NO: 198932 - DNA, 25 bp, Probe Sequence
cctcaaaaggtcttgctgctgtcag

SEQ ID NO: 198933 - DNA, 25 bp, Probe Sequence
cctactaatgggaactgcttcagct

SEQ ID NO: 198934 - DNA, 25 bp, Probe Sequence
ccatagccatagggtgacttacctt

SEQ ID NO: 198935 - DNA, 25 bp, Probe Sequence
cctagcctattcttacttactctac

SEQ ID NO: 198936 - DNA, 25 bp, Probe Sequence
cctactccaagagtaagttctgcta

SEQ ID NO: 198937 - DNA, 25 bp, Probe Sequence
cctcactcccaggcagagttgtctg

SEQ ID NO: 198938 - DNA, 25 bp, Probe Sequence
cctcatcatcgttcgaaggcttctg

SEQ ID NO: 198939 - DNA, 25 bp, Probe Sequence
cctcatcctggagatcgagtgatct

SEQ ID NO: 198940 - DNA, 25 bp, Probe Sequence
cctacctggatgacatcgcgtgcca

SEQ ID NO: 198941 - DNA, 25 bp, Probe Sequence
cctacacgaagatctgcagtgtgga

SEQ ID NO: 198942 - DNA, 25 bp, Probe Sequence
cctacatcgacgggcgcattgtgga

SEQ ID NO: 198943 - DNA, 25 bp, Probe Sequence
cctaaatgtctggctgagttgctgg

SEQ ID NO: 198944 - DNA, 25 bp, Probe Sequence
cctcacaagcctgcaagtgcctgaa

SEQ ID NO: 198945 - DNA, 25 bp, Probe Sequence
cctacaagcctcctagttctgaaaa

SEQ ID NO: 198946 - DNA, 25 bp, Probe Sequence
cctataaccatcattctgattaata

SEQ ID NO: 198947 - DNA, 25 bp, Probe Sequence
cctaaaccacactgcggtcacattg

SEQ ID NO: 198948 - DNA, 25 bp, Probe Sequence
ccttaattccatttgcagcctcaat

SEQ ID NO: 198949 - DNA, 25 bp, Probe Sequence
ccttaacagcactcttgccctgtta

SEQ ID NO: 198950 - DNA, 25 bp, Probe Sequence
ccatgaaacagtctactccttgttg

SEQ ID NO: 198951 - DNA, 25 bp, Probe Sequence
ccatgaattcagtgaactcttttct

SEQ ID NO: 198952 - DNA, 25 bp, Probe Sequence
cctaattgcagaggcagcacgtatt

SEQ ID NO: 198953 - DNA, 25 bp, Probe Sequence
cctcagatctgctgtagccagtgca

SEQ ID NO: 198954 - DNA, 25 bp, Probe Sequence
cctcacctgctcatgaccagagagc

SEQ ID NO: 198955 - DNA, 25 bp, Probe Sequence
cctacctgccggacacagagggggc

SEQ ID NO: 198956 - DNA, 25 bp, Probe Sequence
cctatccacctgacaaagggctgat

SEQ ID NO: 198957 - DNA, 25 bp, Probe Sequence
cctaccacgtggtgaacctggctga

SEQ ID NO: 198958 - DNA, 25 bp, Probe Sequence
cctaccacgtggtgaacctggctga

SEQ ID NO: 198959 - DNA, 25 bp, Probe Sequence
cctcactccgggaggcaactcagtg

SEQ ID NO: 198960 - DNA, 25 bp, Probe Sequence
cctcactcagaaacgggaacatcaa

SEQ ID NO: 198961 - DNA, 25 bp, Probe Sequence
cctcactgcggactcgcggaagagc

SEQ ID NO: 198962 - DNA, 25 bp, Probe Sequence
cctcaccgctgactcaaggaagagt

SEQ ID NO: 198963 - DNA, 25 bp, Probe Sequence
cctcacagagttccaagacaagcag

SEQ ID NO: 198964 - DNA, 25 bp, Probe Sequence
cctatgcattttacaaacagagaga

SEQ ID NO: 198965 - DNA, 25 bp, Probe Sequence
cctagttcgctcaaacactacatga

SEQ ID NO: 198966 - DNA, 25 bp, Probe Sequence
cctcagcctcccaaagtgctggtat

SEQ ID NO: 198967 - DNA, 25 bp, Probe Sequence
cctcagcctcccaaagtgctggaat

SEQ ID NO: 198968 - DNA, 25 bp, Probe Sequence
cctcagtctcccgagtagctaggat

SEQ ID NO: 198969 - DNA, 25 bp, Probe Sequence
cctcagcctcccaagtagctgggat

SEQ ID NO: 198970 - DNA, 25 bp, Probe Sequence
cctcagcctcccaagtagctgggaa

SEQ ID NO: 198971 - DNA, 25 bp, Probe Sequence
cctcatgagcctgtttggtgggaag

SEQ ID NO: 198972 - DNA, 25 bp, Probe Sequence
cctcatgcctccgagggggtggaag

SEQ ID NO: 198973 - DNA, 25 bp, Probe Sequence
cctatccgcccgagtggtgggagga

SEQ ID NO: 198974 - DNA, 25 bp, Probe Sequence
ccttcatcccctacaggtggggcgg

SEQ ID NO: 198975 - DNA, 25 bp, Probe Sequence
ccttcactgccctatcagtactagg

SEQ ID NO: 198976 - DNA, 25 bp, Probe Sequence
cctcatcctgctgttcatgtacaag

SEQ ID NO: 198977 - DNA, 25 bp, Probe Sequence
cctcacctggagtctctcttgaaga

SEQ ID NO: 198978 - DNA, 25 bp, Probe Sequence
cctaactgtaggactctttgagcat

SEQ ID NO: 198979 - DNA, 25 bp, Probe Sequence
cctaaatgtggcctttctgaatgtt

SEQ ID NO: 198980 - DNA, 25 bp, Probe Sequence
cctcaagcaggccctgttggaattg

SEQ ID NO: 198981 - DNA, 25 bp, Probe Sequence
ccttaaggaggtcgtggtcttgtgg

SEQ ID NO: 198982 - DNA, 25 bp, Probe Sequence
ccttctacgacctgggcttgatggg

SEQ ID NO: 198983 - DNA, 25 bp, Probe Sequence
ccttccaggagtctggtttagggct

SEQ ID NO: 198984 - DNA, 25 bp, Probe Sequence
ccttctcggaggagcttctacgtgt

SEQ ID NO: 198985 - DNA, 25 bp, Probe Sequence
ccttccagcagtagtcgctttactg

SEQ ID NO: 198986 - DNA, 25 bp, Probe Sequence
ccttcgcatcttggaccactgaaat

SEQ ID NO: 198987 - DNA, 25 bp, Probe Sequence
cctaccacgtgctatccagtaatat

SEQ ID NO: 198988 - DNA, 25 bp, Probe Sequence
cctagccgcgtggacggatcacgat

SEQ ID NO: 198989 - DNA, 25 bp, Probe Sequence
cctacactgagcggcactttcagcg

SEQ ID NO: 198990 - DNA, 25 bp, Probe Sequence
ccttccagtgttccttagaacagac

SEQ ID NO: 198991 - DNA, 25 bp, Probe Sequence
ccttccagcaaccctgttagtaacg

SEQ ID NO: 198992 - DNA, 25 bp, Probe Sequence
cctttccaaccattggtcaccagaa

SEQ ID NO: 198993 - DNA, 25 bp, Probe Sequence
cctttccaagttagagccctcatta

SEQ ID NO: 198994 - DNA, 25 bp, Probe Sequence
ccttttcactgttatggccttttca

SEQ ID NO: 198995 - DNA, 25 bp, Probe Sequence
ccttttacagataaagctgctaact

SEQ ID NO: 198996 - DNA, 25 bp, Probe Sequence
cctttgtactctgactgcctaagtg

SEQ ID NO: 198997 - DNA, 25 bp, Probe Sequence
ccttggggttcgtgcacaacatagc

SEQ ID NO: 198998 - DNA, 25 bp, Probe Sequence
ccttgagggcattttacagaaaaca

SEQ ID NO: 198999 - DNA, 25 bp, Probe Sequence
ccttggaactgtattagataaaatc

SEQ ID NO: 199000 - DNA, 25 bp, Probe Sequence
ccttggaaatccgtctagttaacat

SEQ ID NO: 199001 - DNA, 25 bp, Probe Sequence
cctaggaccatctagttagttccac

SEQ ID NO: 199002 - DNA, 25 bp, Probe Sequence
cctattcatttctgtctaatttcac

SEQ ID NO: 199003 - DNA, 25 bp, Probe Sequence
ccttcctatggctgtacaattacat

SEQ ID NO: 199004 - DNA, 25 bp, Probe Sequence
cctttcttggttcataaatgaattt

SEQ ID NO: 199005 - DNA, 25 bp, Probe Sequence
cctatctactcgttgttgaaatttt

SEQ ID NO: 199006 - DNA, 25 bp, Probe Sequence
cctttgagatgccaggtttcttttt

SEQ ID NO: 199007 - DNA, 25 bp, Probe Sequence
cctatgtactgaaggaattttggta

SEQ ID NO: 199008 - DNA, 25 bp, Probe Sequence
cctttctctgatgtgaatcttctga

SEQ ID NO: 199009 - DNA, 25 bp, Probe Sequence
cctatcttcagtgcacactctggga

SEQ ID NO: 199010 - DNA, 25 bp, Probe Sequence
cctatttaggtgacactatagaaca

SEQ ID NO: 199011 - DNA, 25 bp, Probe Sequence
cctatttgtgacttccttcagcaaa

SEQ ID NO: 199012 - DNA, 25 bp, Probe Sequence
ccttctgcctggttcatttaaaact

SEQ ID NO: 199013 - DNA, 25 bp, Probe Sequence
ccattaggcaggtctttacaaaagg

SEQ ID NO: 199014 - DNA, 25 bp, Probe Sequence
cctagcgcagagtccttgtttaaag

SEQ ID NO: 199015 - DNA, 25 bp, Probe Sequence
cctacggatcatctattcctaaagt

SEQ ID NO: 199016 - DNA, 25 bp, Probe Sequence
cctacattgtcatttatatcaccaa

SEQ ID NO: 199017 - DNA, 25 bp, Probe Sequence
cctacatccgcattgctgataccaa

SEQ ID NO: 199018 - DNA, 25 bp, Probe Sequence
ccatatggactgtggatacctatct

SEQ ID NO: 199019 - DNA, 25 bp, Probe Sequence
ccagcatacatttctggagcagcct

SEQ ID NO: 199020 - DNA, 25 bp, Probe Sequence
ccagtcatgctacctgtagagcctg

SEQ ID NO: 199021 - DNA, 25 bp, Probe Sequence
ccaggctctacgagaagcggggtca

SEQ ID NO: 199022 - DNA, 25 bp, Probe Sequence
ccaggctgctaagagggcaaggaga

SEQ ID NO: 199023 - DNA, 25 bp, Probe Sequence
ccttctgtaatcaggccaagggcat

SEQ ID NO: 199024 - DNA, 25 bp, Probe Sequence
ccttatgtaaaacacaatgcctgct

SEQ ID NO: 199025 - DNA, 25 bp, Probe Sequence
ccttttattaactgcagtcctgcat

SEQ ID NO: 199026 - DNA, 25 bp, Probe Sequence
cctattttccagacttgagttctca

SEQ ID NO: 199027 - DNA, 25 bp, Probe Sequence
cctacatggtcctacttagtcttga

SEQ ID NO: 199028 - DNA, 25 bp, Probe Sequence
cctaatgcccacaaggtactctgtg

SEQ ID NO: 199029 - DNA, 25 bp, Probe Sequence
ccattgatggcctaagttcctcctg

SEQ ID NO: 199030 - DNA, 25 bp, Probe Sequence
cctatagtttgttttcctccatgtt

SEQ ID NO: 199031 - DNA, 25 bp, Probe Sequence
ccaaggttttgaaatcccatcaggt

SEQ ID NO: 199032 - DNA, 25 bp, Probe Sequence
ccaaagttatcgatattcttactaa

SEQ ID NO: 199033 - DNA, 25 bp, Probe Sequence
cctaattttcagcgttcatacccag

SEQ ID NO: 199034 - DNA, 25 bp, Probe Sequence
cctatttttggccattctcatacca

SEQ ID NO: 199035 - DNA, 25 bp, Probe Sequence
cctaattgtatagaatcttacagca

SEQ ID NO: 199036 - DNA, 25 bp, Probe Sequence
cctaaatgtatgtccaacttccact

SEQ ID NO: 199037 - DNA, 25 bp, Probe Sequence
cctaatagtattcaactcagcctct

SEQ ID NO: 199038 - DNA, 25 bp, Probe Sequence
ccatgtaactttcatactccatccc

SEQ ID NO: 199039 - DNA, 25 bp, Probe Sequence
ccttcaaattgtcttctccacgagg

SEQ ID NO: 199040 - DNA, 25 bp, Probe Sequence
cctttggcaattcttcttctcaagc

SEQ ID NO: 199041 - DNA, 25 bp, Probe Sequence
ccttcaaaatgtctactgttcacga

SEQ ID NO: 199042 - DNA, 25 bp, Probe Sequence
ccttctaacgtgtgagatgtcccga

SEQ ID NO: 199043 - DNA, 25 bp, Probe Sequence
ccttcgaatggttggaattccagga

SEQ ID NO: 199044 - DNA, 25 bp, Probe Sequence
ccttcacaagggcgaaccacctgaa

SEQ ID NO: 199045 - DNA, 25 bp, Probe Sequence
ccttcacaaatacagcaacagccac

SEQ ID NO: 199046 - DNA, 25 bp, Probe Sequence
tcttttaagaactgcaaatactcca

SEQ ID NO: 199047 - DNA, 25 bp, Probe Sequence
ccttgcaaaacctgcacaatcagtc

SEQ ID NO: 199048 - DNA, 25 bp, Probe Sequence
cctttgcaaaccttcaagctgtgta

SEQ ID NO: 199049 - DNA, 25 bp, Probe Sequence
cctaccaccccagtgaagcttgtag

SEQ ID NO: 199050 - DNA, 25 bp, Probe Sequence
cctacagacacccagaacatcttct

SEQ ID NO: 199051 - DNA, 25 bp, Probe Sequence
cctacgcacacgagaacatgcctct

SEQ ID NO: 199052 - DNA, 25 bp, Probe Sequence
cctacccagcgctaatgaacatctt

SEQ ID NO: 199053 - DNA, 25 bp, Probe Sequence
cctacgccagtccctgaggacaaag

SEQ ID NO: 199054 - DNA, 25 bp, Probe Sequence
cctaccctgcttcctggaacaatac

SEQ ID NO: 199055 - DNA, 25 bp, Probe Sequence
cctacactttgtcatggaacataaa

SEQ ID NO: 199056 - DNA, 25 bp, Probe Sequence
cctcaactttgtctcaaatcataat

SEQ ID NO: 199057 - DNA, 25 bp, Probe Sequence
cctcaccgaagcccctaataaatga

SEQ ID NO: 199058 - DNA, 25 bp, Probe Sequence
cctcaccgaagcccctaataaatga

SEQ ID NO: 199059 - DNA, 25 bp, Probe Sequence
cctactcaagaggccctaagactgg

SEQ ID NO: 199060 - DNA, 25 bp, Probe Sequence
cctactggatgggccaccgagagcc

SEQ ID NO: 199061 - DNA, 25 bp, Probe Sequence
cctactggatcgcacaccaagcagt

SEQ ID NO: 199062 - DNA, 25 bp, Probe Sequence
cctcacttgtgcccctgaaagtgta

SEQ ID NO: 199063 - DNA, 25 bp, Probe Sequence
cctttggatgcagtcctttaattca

SEQ ID NO: 199064 - DNA, 25 bp, Probe Sequence
cctagaggtcagtcctttgcacttc

SEQ ID NO: 199065 - DNA, 25 bp, Probe Sequence
cctacaggtcaaagatattcacatt

SEQ ID NO: 199066 - DNA, 25 bp, Probe Sequence
cctagctgttcttcagaattcaatt

SEQ ID NO: 199067 - DNA, 25 bp, Probe Sequence
cctactctgtctgctgtgattaaac

SEQ ID NO: 199068 - DNA, 25 bp, Probe Sequence
ccttttgtcttcttgataatagtca

SEQ ID NO: 199069 - DNA, 25 bp, Probe Sequence
ccttttgtgccctgattgtaatcca

SEQ ID NO: 199070 - DNA, 25 bp, Probe Sequence
tacttttgttcctgcgttactttgc

SEQ ID NO: 199071 - DNA, 25 bp, Probe Sequence
cctttagtctccccgtatgagttag

SEQ ID NO: 199072 - DNA, 25 bp, Probe Sequence
cctttggtgagcccactgttattta

SEQ ID NO: 199073 - DNA, 25 bp, Probe Sequence
cctattggagtgcaatccttacttg

SEQ ID NO: 199074 - DNA, 25 bp, Probe Sequence
ccttgcatgggacgaaagcttggct

SEQ ID NO: 199075 - DNA, 25 bp, Probe Sequence
ccttcagtgcgatcaaagttctacg

SEQ ID NO: 199076 - DNA, 25 bp, Probe Sequence
ccttcagggaacatatttcctccac

SEQ ID NO: 199077 - DNA, 25 bp, Probe Sequence
ccattaggacaatcagtcccctccc

SEQ ID NO: 199078 - DNA, 25 bp, Probe Sequence
ccttggtaattagccacacccttgc

SEQ ID NO: 199079 - DNA, 25 bp, Probe Sequence
ccttgttgagagaggaaaccactcc

SEQ ID NO: 199080 - DNA, 25 bp, Probe Sequence
ccttgtctaatttcaataactacca

SEQ ID NO: 199081 - DNA, 25 bp, Probe Sequence
cctatgtcccaattctcagaactca

SEQ ID NO: 199082 - DNA, 25 bp, Probe Sequence
cctacatcccattaacaagatatca

SEQ ID NO: 199083 - DNA, 25 bp, Probe Sequence
cctaatcgcccatattaatataatt

SEQ ID NO: 199084 - DNA, 25 bp, Probe Sequence
cctactcgccctgcaataataactg

SEQ ID NO: 199085 - DNA, 25 bp, Probe Sequence
cctaccgctcttgcaataattggca

SEQ ID NO: 199086 - DNA, 25 bp, Probe Sequence
cctactccatttgcaagtcatgctt

SEQ ID NO: 199087 - DNA, 25 bp, Probe Sequence
cctacggtgtgcgcgaatctgtgtt

SEQ ID NO: 199088 - DNA, 25 bp, Probe Sequence
cctacggaggtggcagccatctcct

SEQ ID NO: 199089 - DNA, 25 bp, Probe Sequence
ccttaggggatgccgctgacatccg

SEQ ID NO: 199090 - DNA, 25 bp, Probe Sequence
ccttacggcgatgggtggccacaga

SEQ ID NO: 199091 - DNA, 25 bp, Probe Sequence
cctttccagcagttcggggacagca

SEQ ID NO: 199092 - DNA, 25 bp, Probe Sequence
cctttggagcagggcacgggactgg

SEQ ID NO: 199093 - DNA, 25 bp, Probe Sequence
cctatgtggagagcgacagtaggct

SEQ ID NO: 199094 - DNA, 25 bp, Probe Sequence
cctagaatggtgtgccagagcaggc

SEQ ID NO: 199095 - DNA, 25 bp, Probe Sequence
cctagcagatgaagcttgccagcaa

SEQ ID NO: 199096 - DNA, 25 bp, Probe Sequence
cctcaagtgcgagcgctgcagcaag

SEQ ID NO: 199097 - DNA, 25 bp, Probe Sequence
cctacggcagcaacctgctgacaga

SEQ ID NO: 199098 - DNA, 25 bp, Probe Sequence
cctacggcagcaacctgctgacaga

SEQ ID NO: 199099 - DNA, 25 bp, Probe Sequence
ccttcgccagcaacaatgtgaccga

SEQ ID NO: 199100 - DNA, 25 bp, Probe Sequence
cctactgcaagtacaatctacgtat

SEQ ID NO: 199101 - DNA, 25 bp, Probe Sequence
cctacttgcagtacatcctacgtat

SEQ ID NO: 199102 - DNA, 25 bp, Probe Sequence
cctacttgcagtacatctacgtatt

SEQ ID NO: 199103 - DNA, 25 bp, Probe Sequence
cctactgccagtacatctacgtatt

SEQ ID NO: 199104 - DNA, 25 bp, Probe Sequence
cctactggcagtacatctacgtatt

SEQ ID NO: 199105 - DNA, 25 bp, Probe Sequence
cctttggcagcagtcacataattaa

SEQ ID NO: 199106 - DNA, 25 bp, Probe Sequence
ccttctgaaggtcctccctaagagt

SEQ ID NO: 199107 - DNA, 25 bp, Probe Sequence
ccttcagaagtagccccacaaaaat

SEQ ID NO: 199108 - DNA, 25 bp, Probe Sequence
ccataggggctgctccctcaaaaag

SEQ ID NO: 199109 - DNA, 25 bp, Probe Sequence
ccatcccagaggctcaaccaaataa

SEQ ID NO: 199110 - DNA, 25 bp, Probe Sequence
cctttgacagagcctacccaaataa

SEQ ID NO: 199111 - DNA, 25 bp, Probe Sequence
cctatgtacctgttaccactttcaa

SEQ ID NO: 199112 - DNA, 25 bp, Probe Sequence
ccttagatgtctcaagtagctttaa

SEQ ID NO: 199113 - DNA, 25 bp, Probe Sequence
ccttctatactgcaagtcttttgat

SEQ ID NO: 199114 - DNA, 25 bp, Probe Sequence
ccttcaagcctgtatggtttggatt

SEQ ID NO: 199115 - DNA, 25 bp, Probe Sequence
ccttctagtctttatttatggtcgt

SEQ ID NO: 199116 - DNA, 25 bp, Probe Sequence
ccttctggtcttcacttcaatggtg

SEQ ID NO: 199117 - DNA, 25 bp, Probe Sequence
cctttatgttctcccatatataggg

SEQ ID NO: 199118 - DNA, 25 bp, Probe Sequence
cctttcctggtgctcaaatagctgc

SEQ ID NO: 199119 - DNA, 25 bp, Probe Sequence
ccttatctctgtgcttcgtgaagct

SEQ ID NO: 199120 - DNA, 25 bp, Probe Sequence
cctttgttgtacttggatcaccagg

SEQ ID NO: 199121 - DNA, 25 bp, Probe Sequence
cctttgcttggagtcagctgcacac

SEQ ID NO: 199122 - DNA, 25 bp, Probe Sequence
cctttctgtggagtgatcggtctgt

SEQ ID NO: 199123 - DNA, 25 bp, Probe Sequence
cctagtgtgtgtctgatgccggttg

SEQ ID NO: 199124 - DNA, 25 bp, Probe Sequence
cctattgcttctctatgagtcttag

SEQ ID NO: 199125 - DNA, 25 bp, Probe Sequence
cctttgtcttggaactgtcttattt

SEQ ID NO: 199126 - DNA, 25 bp, Probe Sequence
ccatttattctgggaagatgttttt

SEQ ID NO: 199127 - DNA, 25 bp, Probe Sequence
cctttgcctctgtggagcagttctg

SEQ ID NO: 199128 - DNA, 25 bp, Probe Sequence
cctttgcacttcctcaaagcttgtg

SEQ ID NO: 199129 - DNA, 25 bp, Probe Sequence
cctttccatagcccaggacatagtg

SEQ ID NO: 199130 - DNA, 25 bp, Probe Sequence
cctatcccatatggagaagaaaggg

SEQ ID NO: 199131 - DNA, 25 bp, Probe Sequence
cctatcccacagtgaggaaaggatt

SEQ ID NO: 199132 - DNA, 25 bp, Probe Sequence
ccttccccgcagacgtgggagtgtt

SEQ ID NO: 199133 - DNA, 25 bp, Probe Sequence
cctacgccacgcagcgggagaagct

SEQ ID NO: 199134 - DNA, 25 bp, Probe Sequence
cctacaaccgcactcggtatgaact

SEQ ID NO: 199135 - DNA, 25 bp, Probe Sequence
cctaaccccagacagtcatgaagta

SEQ ID NO: 199136 - DNA, 25 bp, Probe Sequence
cctaacccacagcaaacatacctag

SEQ ID NO: 199137 - DNA, 25 bp, Probe Sequence
gccaaacccaggcaagggtcctcag

SEQ ID NO: 199138 - DNA, 25 bp, Probe Sequence
ccatatcaccaagctaaggttcctg

SEQ ID NO: 199139 - DNA, 25 bp, Probe Sequence
cctatccgcaaacagatgtgttctt

SEQ ID NO: 199140 - DNA, 25 bp, Probe Sequence
ccttccctgaggcttgtgtatgttg

SEQ ID NO: 199141 - DNA, 25 bp, Probe Sequence
ccttcctttaggtctggttgttgca

SEQ ID NO: 199142 - DNA, 25 bp, Probe Sequence
ccttttacaaatttgtgctttggca

SEQ ID NO: 199143 - DNA, 25 bp, Probe Sequence
ccttttccaaatgagtgctgtagct

SEQ ID NO: 199144 - DNA, 25 bp, Probe Sequence
cctttagactactctgtgactacag

SEQ ID NO: 199145 - DNA, 25 bp, Probe Sequence
ccttaacttcctcatgcagactggc

SEQ ID NO: 199146 - DNA, 25 bp, Probe Sequence
ccttagtgtttctgtgcatggtggc

SEQ ID NO: 199147 - DNA, 25 bp, Probe Sequence
ccttaggcatgtgcaagtcccaggc

SEQ ID NO: 199148 - DNA, 25 bp, Probe Sequence
ccttaggcttacaatgtgcactgaa

SEQ ID NO: 199149 - DNA, 25 bp, Probe Sequence
ccattgagccttatttgaagaagaa

SEQ ID NO: 199150 - DNA, 25 bp, Probe Sequence
ccttgcccttagctgtaataatgca

SEQ ID NO: 199151 - DNA, 25 bp, Probe Sequence
cctatgcccttctgagtcagacact

SEQ ID NO: 199152 - DNA, 25 bp, Probe Sequence
cctacaccagccatgagcacagaga

SEQ ID NO: 199153 - DNA, 25 bp, Probe Sequence
cctaggacacacagagccacagcag

SEQ ID NO: 199154 - DNA, 25 bp, Probe Sequence
cctagggctgccagacatacgctgg

SEQ ID NO: 199155 - DNA, 25 bp, Probe Sequence
cctactgtgcgtgtatatacgcgtg

SEQ ID NO: 199156 - DNA, 25 bp, Probe Sequence
cctactgtggtactgaagacttctg

SEQ ID NO: 199157 - DNA, 25 bp, Probe Sequence
cctacttcgtgacaggcatcgtcag

SEQ ID NO: 199158 - DNA, 25 bp, Probe Sequence
cctagtctcggtcagggagtctgct

SEQ ID NO: 199159 - DNA, 25 bp, Probe Sequence
ccttggctcggagatccgtgactct

SEQ ID NO: 199160 - DNA, 25 bp, Probe Sequence
ccttcccgcaatgtttggacttcga

SEQ ID NO: 199161 - DNA, 25 bp, Probe Sequence
ccattcccttaggctttagcagctt

SEQ ID NO: 199162 - DNA, 25 bp, Probe Sequence
ccttgtgggtcagatttcagagttc

SEQ ID NO: 199163 - DNA, 25 bp, Probe Sequence
cctttgagtgtatacccagtaatgg

SEQ ID NO: 199164 - DNA, 25 bp, Probe Sequence
cctttcaggtcattcccaagtaaat

SEQ ID NO: 199165 - DNA, 25 bp, Probe Sequence
cctttagcaacttcccatcaacaat

SEQ ID NO: 199166 - DNA, 25 bp, Probe Sequence
cctttgaacattttgcctatgagag

SEQ ID NO: 199167 - DNA, 25 bp, Probe Sequence
cctttagaatattgtgcctgtttta

SEQ ID NO: 199168 - DNA, 25 bp, Probe Sequence
ccttgtaggaattgcgacttgtcaa

SEQ ID NO: 199169 - DNA, 25 bp, Probe Sequence
ccattgtgggtagcaatctgcggca

SEQ ID NO: 199170 - DNA, 25 bp, Probe Sequence
ccttctgcacgatccaataggagac

SEQ ID NO: 199171 - DNA, 25 bp, Probe Sequence
ccttcatacaacgcctcagtggatc

SEQ ID NO: 199172 - DNA, 25 bp, Probe Sequence
cctttgagaacctccgggcatgtga

SEQ ID NO: 199173 - DNA, 25 bp, Probe Sequence
cctttagacgacgccgtgctaggaa

SEQ ID NO: 199174 - DNA, 25 bp, Probe Sequence
ccttttaccactgcctggttgcaga

SEQ ID NO: 199175 - DNA, 25 bp, Probe Sequence
ccttaaagcctggacttggatcgca

SEQ ID NO: 199176 - DNA, 25 bp, Probe Sequence
ccttttattctgtaccttgcagcca

SEQ ID NO: 199177 - DNA, 25 bp, Probe Sequence
cctttcttacaaaccatggagccca

SEQ ID NO: 199178 - DNA, 25 bp, Probe Sequence
ccttatccaacatcccagggcagaa

SEQ ID NO: 199179 - DNA, 25 bp, Probe Sequence
ccttattccacctcggagtgagcaa

SEQ ID NO: 199180 - DNA, 25 bp, Probe Sequence
ccttcaccgcccacaagatgatggc

SEQ ID NO: 199181 - DNA, 25 bp, Probe Sequence
ccttcaggccactgggcatgtatgg

SEQ ID NO: 199182 - DNA, 25 bp, Probe Sequence
ccttaggccacatgggagcagtcca

SEQ ID NO: 199183 - DNA, 25 bp, Probe Sequence
ccaaagcagccctggacagcattaa

SEQ ID NO: 199184 - DNA, 25 bp, Probe Sequence
ccagcagtactgcattggggattaa

SEQ ID NO: 199185 - DNA, 25 bp, Probe Sequence
ccatcaaggcggaagagcggcataa

SEQ ID NO: 199186 - DNA, 25 bp, Probe Sequence
cctaggccgcgggacggataacaat

SEQ ID NO: 199187 - DNA, 25 bp, Probe Sequence
cctaggcacgcgggacggataacaa

SEQ ID NO: 199188 - DNA, 25 bp, Probe Sequence
cctagacactggggatggacaaaac

SEQ ID NO: 199189 - DNA, 25 bp, Probe Sequence
cctagcaacgcttgtaggactcact

SEQ ID NO: 199190 - DNA, 25 bp, Probe Sequence
cctactatagccctcatggacatat

SEQ ID NO: 199191 - DNA, 25 bp, Probe Sequence
cctacctgcaggcccatgggaattt

SEQ ID NO: 199192 - DNA, 25 bp, Probe Sequence
cctacggagggttgggtagacatct

SEQ ID NO: 199193 - DNA, 25 bp, Probe Sequence
ccaacaaggtgagttaaaagaatct

SEQ ID NO: 199194 - DNA, 25 bp, Probe Sequence
gccatccaggggtgtagtgaggacc

SEQ ID NO: 199195 - DNA, 25 bp, Probe Sequence
gccacacaggtagttcggggatgtc

SEQ ID NO: 199196 - DNA, 25 bp, Probe Sequence
ccatcacagggtgtggggctggcct

SEQ ID NO: 199197 - DNA, 25 bp, Probe Sequence
cctaggagggcttgctgtgcggagg

SEQ ID NO: 199198 - DNA, 25 bp, Probe Sequence
cctaggaggtcacagctgcgatgag

SEQ ID NO: 199199 - DNA, 25 bp, Probe Sequence
cctagtaggaagcattggacccaag

SEQ ID NO: 199200 - DNA, 25 bp, Probe Sequence
cctacggtgtcagtgttggacctga

SEQ ID NO: 199201 - DNA, 25 bp, Probe Sequence
ccatcatgggtatcgttgctggcct

SEQ ID NO: 199202 - DNA, 25 bp, Probe Sequence
ccatcatgggtatcgttgctggcct

SEQ ID NO: 199203 - DNA, 25 bp, Probe Sequence
ccatcatgggtatcgttgctggcct

SEQ ID NO: 199204 - DNA, 25 bp, Probe Sequence
ccttgaggttcccttgtgagcttga

SEQ ID NO: 199205 - DNA, 25 bp, Probe Sequence
cctatgagcccgtgttggccattgg

SEQ ID NO: 199206 - DNA, 25 bp, Probe Sequence
cctacacccaaggttgtcagctttg

SEQ ID NO: 199207 - DNA, 25 bp, Probe Sequence
cctagcacccgagattctatgtgta

SEQ ID NO: 199208 - DNA, 25 bp, Probe Sequence
cctagaccctccagtttgtgtcatg

SEQ ID NO: 199209 - DNA, 25 bp, Probe Sequence
cctagcaagcacacccgtggttgtg

SEQ ID NO: 199210 - DNA, 25 bp, Probe Sequence
ccatagaagacacccgggaccgatc

SEQ ID NO: 199211 - DNA, 25 bp, Probe Sequence
ccttggacaaactgtggatctgagt

SEQ ID NO: 199212 - DNA, 25 bp, Probe Sequence
cctaggaagaattggtgtgatcacc

SEQ ID NO: 199213 - DNA, 25 bp, Probe Sequence
cctaggaagaattggtgtgatcacc

SEQ ID NO: 199214 - DNA, 25 bp, Probe Sequence
ccttttatgacagggtgttgcagta

SEQ ID NO: 199215 - DNA, 25 bp, Probe Sequence
cctttgtctgtcgaggctgggaggg

SEQ ID NO: 199216 - DNA, 25 bp, Probe Sequence
ccttctggtccagcgcaaggagggg

SEQ ID NO: 199217 - DNA, 25 bp, Probe Sequence
cctttggactcgatcttggagggtg

SEQ ID NO: 199218 - DNA, 25 bp, Probe Sequence
ccttgggactggttttgctgtggtt

SEQ ID NO: 199219 - DNA, 25 bp, Probe Sequence
ccttgggatcttgtgtttgggagcc

SEQ ID NO: 199220 - DNA, 25 bp, Probe Sequence
cctagggacttcctacttgggcaga

SEQ ID NO: 199221 - DNA, 25 bp, Probe Sequence
cctagggactgtcctagccaggtct

SEQ ID NO: 199222 - DNA, 25 bp, Probe Sequence
cctagggaggtggtaggcaggacct

SEQ ID NO: 199223 - DNA, 25 bp, Probe Sequence
cctagggagggctcgaagtcgcggt

SEQ ID NO: 199224 - DNA, 25 bp, Probe Sequence
cctagggagcagttacaagggcctg

SEQ ID NO: 199225 - DNA, 25 bp, Probe Sequence
cctagccgagtgtgacacagtggag

SEQ ID NO: 199226 - DNA, 25 bp, Probe Sequence
cctaccagtgtcttgtcagctctgg

SEQ ID NO: 199227 - DNA, 25 bp, Probe Sequence
cctatcttgtgagtggggcatctgt

SEQ ID NO: 199228 - DNA, 25 bp, Probe Sequence
cctatcttgtgagtggggcatctgt

SEQ ID NO: 199229 - DNA, 25 bp, Probe Sequence
ccttcgagcatggaggggcactggg

SEQ ID NO: 199230 - DNA, 25 bp, Probe Sequence
cctttgagggacccagccttgagac

SEQ ID NO: 199231 - DNA, 25 bp, Probe Sequence
ccttatgatgtcccctttttgagac

SEQ ID NO: 199232 - DNA, 25 bp, Probe Sequence
ccttattggcccctttatacagata

SEQ ID NO: 199233 - DNA, 25 bp, Probe Sequence
ccatccttacccctatttaatgtag

SEQ ID NO: 199234 - DNA, 25 bp, Probe Sequence
ccatcagttacagagaatttcctaa

SEQ ID NO: 199235 - DNA, 25 bp, Probe Sequence
ccatcctggaaggttattacctaat

SEQ ID NO: 199236 - DNA, 25 bp, Probe Sequence
ccttatggaggcttttcttcgggat

SEQ ID NO: 199237 - DNA, 25 bp, Probe Sequence
cctttgatgaggcctttgttcggga

SEQ ID NO: 199238 - DNA, 25 bp, Probe Sequence
ccttctgaggtccgtgtttcggaag

SEQ ID NO: 199239 - DNA, 25 bp, Probe Sequence
cctttatgcttgaggttccaacctg

SEQ ID NO: 199240 - DNA, 25 bp, Probe Sequence
cctatttgtctgaggttctcaagct

SEQ ID NO: 199241 - DNA, 25 bp, Probe Sequence
ccttggttcagcagcgggtcaatgc

SEQ ID NO: 199242 - DNA, 25 bp, Probe Sequence
cctattgttcacaagcccgctgtga

SEQ ID NO: 199243 - DNA, 25 bp, Probe Sequence
ccttatctatcacagaccagtagca

SEQ ID NO: 199244 - DNA, 25 bp, Probe Sequence
ccttcgagatcatacacctgctcac

SEQ ID NO: 199245 - DNA, 25 bp, Probe Sequence
cctactgaatcagagactctgtcag

SEQ ID NO: 199246 - DNA, 25 bp, Probe Sequence
cctagctgagacttacacgttcaac

SEQ ID NO: 199247 - DNA, 25 bp, Probe Sequence
cctatctgagaaatccaggagtgga

SEQ ID NO: 199248 - DNA, 25 bp, Probe Sequence
cctaccatggtgaccacgggtgacg

SEQ ID NO: 199249 - DNA, 25 bp, Probe Sequence
cctacctggtctggaaagagctggg

SEQ ID NO: 199250 - DNA, 25 bp, Probe Sequence
gcctccctaattagctagggctggg

SEQ ID NO: 199251 - DNA, 25 bp, Probe Sequence
ccatgcctttcctttagtggtggga

SEQ ID NO: 199252 - DNA, 25 bp, Probe Sequence
ccttccttcctgttagtggttgtat

SEQ ID NO: 199253 - DNA, 25 bp, Probe Sequence
ccttccttcctgttagtggttgtat

SEQ ID NO: 199254 - DNA, 25 bp, Probe Sequence
cctttccttcactgatttgctttaa

SEQ ID NO: 199255 - DNA, 25 bp, Probe Sequence
cctttcctgttcagcattcttagcc

SEQ ID NO: 199256 - DNA, 25 bp, Probe Sequence
cctttcctgttcagcattcttagcc

SEQ ID NO: 199257 - DNA, 25 bp, Probe Sequence
ccttactcttggatgcttcttaacc

SEQ ID NO: 199258 - DNA, 25 bp, Probe Sequence
ccttcccaagtgagtctctctgggc

SEQ ID NO: 199259 - DNA, 25 bp, Probe Sequence
ccttacaccctgtgttcatctgtga

SEQ ID NO: 199260 - DNA, 25 bp, Probe Sequence
ccttaccacgttactgcatactgat

SEQ ID NO: 199261 - DNA, 25 bp, Probe Sequence
ccttccgagttttctgcaacttcac

SEQ ID NO: 199262 - DNA, 25 bp, Probe Sequence
cctattcatgagtattattgaaacc

SEQ ID NO: 199263 - DNA, 25 bp, Probe Sequence
cctagctagaggatctgtgacccca

SEQ ID NO: 199264 - DNA, 25 bp, Probe Sequence
cctaccacagagaatctatcccata

SEQ ID NO: 199265 - DNA, 25 bp, Probe Sequence
cctagctgccagcaatgctgtcctc

SEQ ID NO: 199266 - DNA, 25 bp, Probe Sequence
cctagctgctgtcacatttttcttg

SEQ ID NO: 199267 - DNA, 25 bp, Probe Sequence
cctagcgtcagtattttccctgcta

SEQ ID NO: 199268 - DNA, 25 bp, Probe Sequence
cctagcattcttctttggaaatctt

SEQ ID NO: 199269 - DNA, 25 bp, Probe Sequence
ccttgcactcccagtgtgggcaaca

SEQ ID NO: 199270 - DNA, 25 bp, Probe Sequence
cctatactgccaattggctgggaga

SEQ ID NO: 199271 - DNA, 25 bp, Probe Sequence
cctagagtgctctgtgtatgcggat

SEQ ID NO: 199272 - DNA, 25 bp, Probe Sequence
ccatcaaagctttgtggtgggttct

SEQ ID NO: 199273 - DNA, 25 bp, Probe Sequence
ccatcacaattgttagttttttttg

SEQ ID NO: 199274 - DNA, 25 bp, Probe Sequence
ccatcataatgtttcgccttatttt

SEQ ID NO: 199275 - DNA, 25 bp, Probe Sequence
ccatctttgatttcggttattttgt

SEQ ID NO: 199276 - DNA, 25 bp, Probe Sequence
ccttcttgtccacggttttgttgag

SEQ ID NO: 199277 - DNA, 25 bp, Probe Sequence
cctatttgcctaccttttgatgttt

SEQ ID NO: 199278 - DNA, 25 bp, Probe Sequence
ccttttgcaataccgttgtaatcct

SEQ ID NO: 199279 - DNA, 25 bp, Probe Sequence
ccttttccagccggttatcaaccag

SEQ ID NO: 199280 - DNA, 25 bp, Probe Sequence
ccttttccagccggttatcaaccag

SEQ ID NO: 199281 - DNA, 25 bp, Probe Sequence
cctttctctcaggcagtgcaaatca

SEQ ID NO: 199282 - DNA, 25 bp, Probe Sequence
cctttctgcacactccagacaaact

SEQ ID NO: 199283 - DNA, 25 bp, Probe Sequence
cctatgatatggttccagagcccaa

SEQ ID NO: 199284 - DNA, 25 bp, Probe Sequence
cctatgatatggttccagagcccaa

SEQ ID NO: 199285 - DNA, 25 bp, Probe Sequence
cctatgatatggttccagagcccaa

SEQ ID NO: 199286 - DNA, 25 bp, Probe Sequence
cctatatctggagtgagaggccccc

SEQ ID NO: 199287 - DNA, 25 bp, Probe Sequence
cctagagccagagtgggctgccgca

SEQ ID NO: 199288 - DNA, 25 bp, Probe Sequence
cctatgacctgaggcggcgggagag

SEQ ID NO: 199289 - DNA, 25 bp, Probe Sequence
cctatggccatggccttgactgtgg

SEQ ID NO: 199290 - DNA, 25 bp, Probe Sequence
ccttggccatggttttcatgggggc

SEQ ID NO: 199291 - DNA, 25 bp, Probe Sequence
cctttccatgtacatccagtgaggg

SEQ ID NO: 199292 - DNA, 25 bp, Probe Sequence
ccttctacaacacctccattgagga

SEQ ID NO: 199293 - DNA, 25 bp, Probe Sequence
ccttgtcgaaatccacctgtcagga

SEQ ID NO: 199294 - DNA, 25 bp, Probe Sequence
ccttacggaattacatcttgatggc

SEQ ID NO: 199295 - DNA, 25 bp, Probe Sequence
ccttacggaattacatcttgatggc

SEQ ID NO: 199296 - DNA, 25 bp, Probe Sequence
ccttacctgtttttgctatggctgt

SEQ ID NO: 199297 - DNA, 25 bp, Probe Sequence
ccttaatctttcattgctggggtgt

SEQ ID NO: 199298 - DNA, 25 bp, Probe Sequence
ccttcatgtctttatttagttgttt

SEQ ID NO: 199299 - DNA, 25 bp, Probe Sequence
ccttgcattattgttgggctatttg

SEQ ID NO: 199300 - DNA, 25 bp, Probe Sequence
ccttatctttccagtggctaaacca

SEQ ID NO: 199301 - DNA, 25 bp, Probe Sequence
cctttctccttcatgggattaaggc

SEQ ID NO: 199302 - DNA, 25 bp, Probe Sequence
ccttccaccctcagcggatgataat

SEQ ID NO: 199303 - DNA, 25 bp, Probe Sequence
ccttccaccctcagcggatgataat

SEQ ID NO: 199304 - DNA, 25 bp, Probe Sequence
ccttccaccctcagcggatgataat

SEQ ID NO: 199305 - DNA, 25 bp, Probe Sequence
ccatttcccactgacaggtgaacat

SEQ ID NO: 199306 - DNA, 25 bp, Probe Sequence
gccaagtcgacagccaacggaaacc

SEQ ID NO: 199307 - DNA, 25 bp, Probe Sequence
gcaactttaccagaaggccacaacg

SEQ ID NO: 199308 - DNA, 25 bp, Probe Sequence
ccttattagccagattgtgtcctcc

SEQ ID NO: 199309 - DNA, 25 bp, Probe Sequence
cctagttagcacgcatgggcgccta

SEQ ID NO: 199310 - DNA, 25 bp, Probe Sequence
cctatttagcacacatggtaccatg

SEQ ID NO: 199311 - DNA, 25 bp, Probe Sequence
ccttcattagtcacatgggcacctc

SEQ ID NO: 199312 - DNA, 25 bp, Probe Sequence
cctttgctattcaccgtcagcatat

SEQ ID NO: 199313 - DNA, 25 bp, Probe Sequence
cctttgctctggatacaccgaatga

SEQ ID NO: 199314 - DNA, 25 bp, Probe Sequence
cctttatctgtgacttcatgctctg

SEQ ID NO: 199315 - DNA, 25 bp, Probe Sequence
ccttgtatctctaaatatggtgtga

SEQ ID NO: 199316 - DNA, 25 bp, Probe Sequence
ccttgctttcttgtttctgttttga

SEQ ID NO: 199317 - DNA, 25 bp, Probe Sequence
cctttatacactgttttttccatat

SEQ ID NO: 199318 - DNA, 25 bp, Probe Sequence
ccttcaagacctcgtcttatttcct

SEQ ID NO: 199319 - DNA, 25 bp, Probe Sequence
cctatcataactacgtattcattgt

SEQ ID NO: 199320 - DNA, 25 bp, Probe Sequence
ccttcacacctatgttctctttata

SEQ ID NO: 199321 - DNA, 25 bp, Probe Sequence
ccttcagacagttatatcctccttt

SEQ ID NO: 199322 - DNA, 25 bp, Probe Sequence
ccttcagacagaagtatcttccttt

SEQ ID NO: 199323 - DNA, 25 bp, Probe Sequence
ccttacaagtgggtctgcatctgct

SEQ ID NO: 199324 - DNA, 25 bp, Probe Sequence
ccttgtagagatgcagcctgcccag

SEQ ID NO: 199325 - DNA, 25 bp, Probe Sequence
ccttgaatggaggatgcagcttaag

SEQ ID NO: 199326 - DNA, 25 bp, Probe Sequence
ccttgaagcgagtgatgctagctga

SEQ ID NO: 199327 - DNA, 25 bp, Probe Sequence
ccttgggcagcgacgtggacatgga

SEQ ID NO: 199328 - DNA, 25 bp, Probe Sequence
ccttgggcagcgacgtggacatgga

SEQ ID NO: 199329 - DNA, 25 bp, Probe Sequence
ccttccggcatgattatgtgctgaa

SEQ ID NO: 199330 - DNA, 25 bp, Probe Sequence
ccttgcctgacagtatttttgaatt

SEQ ID NO: 199331 - DNA, 25 bp, Probe Sequence
ccttactctcaccttttatgagatt

SEQ ID NO: 199332 - DNA, 25 bp, Probe Sequence
cctttgcctcaggtgcagtctatga

SEQ ID NO: 199333 - DNA, 25 bp, Probe Sequence
cctatgccactcgagatgacctcat

SEQ ID NO: 199334 - DNA, 25 bp, Probe Sequence
cctatgcccacacagacttgcaata

SEQ ID NO: 199335 - DNA, 25 bp, Probe Sequence
cctatctcggcataattctcataaa

SEQ ID NO: 199336 - DNA, 25 bp, Probe Sequence
ccttgctcggaagaagcctccaatg

SEQ ID NO: 199337 - DNA, 25 bp, Probe Sequence
ccttcctgaagggggacactccatg

SEQ ID NO: 199338 - DNA, 25 bp, Probe Sequence
cctttcagaaggccgtgaagcattt

SEQ ID NO: 199339 - DNA, 25 bp, Probe Sequence
cctttagaaggacttagacctcaca

SEQ ID NO: 199340 - DNA, 25 bp, Probe Sequence
cctttgaggggaagggaccgctcag

SEQ ID NO: 199341 - DNA, 25 bp, Probe Sequence
ccacccaggaaaggaggaccagtca

SEQ ID NO: 199342 - DNA, 25 bp, Probe Sequence
gcctcccaagaagctagaaccacat

SEQ ID NO: 199343 - DNA, 25 bp, Probe Sequence
cctttatagcagcactaaactgact

SEQ ID NO: 199344 - DNA, 25 bp, Probe Sequence
ccttttctcatcactaaccagactc

SEQ ID NO: 199345 - DNA, 25 bp, Probe Sequence
cctttgttccttgaagaatgcagca

SEQ ID NO: 199346 - DNA, 25 bp, Probe Sequence
ccttttaccttttcagtctggcagc

SEQ ID NO: 199347 - DNA, 25 bp, Probe Sequence
cctttttcctttccatgttacatga

SEQ ID NO: 199348 - DNA, 25 bp, Probe Sequence
cctatttctccttctgcaaattaag

SEQ ID NO: 199349 - DNA, 25 bp, Probe Sequence
ccttctggccacagccatagttcaa

SEQ ID NO: 199350 - DNA, 25 bp, Probe Sequence
ccatattaccacagacatactaacc

SEQ ID NO: 199351 - DNA, 25 bp, Probe Sequence
cctattcctcagagaaacaccaact

SEQ ID NO: 199352 - DNA, 25 bp, Probe Sequence
ccttccctcagcagaaacgtgttta

SEQ ID NO: 199353 - DNA, 25 bp, Probe Sequence
ccttcactcccaaaatgaggctttt

SEQ ID NO: 199354 - DNA, 25 bp, Probe Sequence
ccttactcccaggaattcaatcctt

SEQ ID NO: 199355 - DNA, 25 bp, Probe Sequence
ccttcccctaggtcttcagaagcat

SEQ ID NO: 199356 - DNA, 25 bp, Probe Sequence
ccttcggccttgggattcagagcga

SEQ ID NO: 199357 - DNA, 25 bp, Probe Sequence
ccttgctcccttcaatgctagaaaa

SEQ ID NO: 199358 - DNA, 25 bp, Probe Sequence
ccttcagaccaagaatttgacaact

SEQ ID NO: 199359 - DNA, 25 bp, Probe Sequence
ccttagatccgcgctatcgtgaggt

SEQ ID NO: 199360 - DNA, 25 bp, Probe Sequence
ccttagatccgcgctatcgtgaggt

SEQ ID NO: 199361 - DNA, 25 bp, Probe Sequence
ccttataccagcgttatgagatcaa

SEQ ID NO: 199362 - DNA, 25 bp, Probe Sequence
ccttccctcacagtatatgaatgat

SEQ ID NO: 199363 - DNA, 25 bp, Probe Sequence
ccattccccgcctaatagtattcaa

SEQ ID NO: 199364 - DNA, 25 bp, Probe Sequence
ccttcccactgtcagatcaaacaca

SEQ ID NO: 199365 - DNA, 25 bp, Probe Sequence
ccttcctgccttcagtaacaacatt

SEQ ID NO: 199366 - DNA, 25 bp, Probe Sequence
ccttccttgcggtgaaagcgaattc

SEQ ID NO: 199367 - DNA, 25 bp, Probe Sequence
ccttcctgatagcttggcagaggga

SEQ ID NO: 199368 - DNA, 25 bp, Probe Sequence
ccttgcctttgaatgtggaatggtg

SEQ ID NO: 199369 - DNA, 25 bp, Probe Sequence
ccttgcctttgactcattggactag

SEQ ID NO: 199370 - DNA, 25 bp, Probe Sequence
ccttagtgtgcaatctcatttgact

SEQ ID NO: 199371 - DNA, 25 bp, Probe Sequence
cctatctgcatgtcctctcatatag

SEQ ID NO: 199372 - DNA, 25 bp, Probe Sequence
cctatgtatgcaccattaatatgta

SEQ ID NO: 199373 - DNA, 25 bp, Probe Sequence
ccttgctgataccatgctagtcttg

SEQ ID NO: 199374 - DNA, 25 bp, Probe Sequence
cctttcaacctcaagttctaccaga

SEQ ID NO: 199375 - DNA, 25 bp, Probe Sequence
cctttgcaacgcggaatatcacacc

SEQ ID NO: 199376 - DNA, 25 bp, Probe Sequence
cctttgcaagagcgcagaccaccgc

SEQ ID NO: 199377 - DNA, 25 bp, Probe Sequence
cctttcagaatccgcagactcatgt

SEQ ID NO: 199378 - DNA, 25 bp, Probe Sequence
cctttcagcattagatgcaggtcgt

SEQ ID NO: 199379 - DNA, 25 bp, Probe Sequence
ccttcacgcataagaggcagtgcga

SEQ ID NO: 199380 - DNA, 25 bp, Probe Sequence
ccttcacgcataaaggcagtcgtac

SEQ ID NO: 199381 - DNA, 25 bp, Probe Sequence
ccttcacgctagatgcatttcgcta

SEQ ID NO: 199382 - DNA, 25 bp, Probe Sequence
cctataactcgctgctgttgcacta

SEQ ID NO: 199383 - DNA, 25 bp, Probe Sequence
cctatactccagctgcttaacttca

SEQ ID NO: 199384 - DNA, 25 bp, Probe Sequence
cctatttccatgcctgttttcatag

SEQ ID NO: 199385 - DNA, 25 bp, Probe Sequence
cctatcctcagctctatgtttctgg

SEQ ID NO: 199386 - DNA, 25 bp, Probe Sequence
cctatcaatcaacctcagctttcta

SEQ ID NO: 199387 - DNA, 25 bp, Probe Sequence
ccatctcaataaacacattttggat

SEQ ID NO: 199388 - DNA, 25 bp, Probe Sequence
ccatctcaataaacacattttggat

SEQ ID NO: 199389 - DNA, 25 bp, Probe Sequence
ccatcatgagtaagggcttctttaa

SEQ ID NO: 199390 - DNA, 25 bp, Probe Sequence
ccttgagtagcagtggctcttccta

SEQ ID NO: 199391 - DNA, 25 bp, Probe Sequence
cctttgtggcagctgctcttgctgc

SEQ ID NO: 199392 - DNA, 25 bp, Probe Sequence
cctttggcactgcatccatgagcat

SEQ ID NO: 199393 - DNA, 25 bp, Probe Sequence
cctttgccaagccatcctggatgaa

SEQ ID NO: 199394 - DNA, 25 bp, Probe Sequence
ccttggagcatgggctcgtgggaaa

SEQ ID NO: 199395 - DNA, 25 bp, Probe Sequence
ccttggtgacttcctggggccaaga

SEQ ID NO: 199396 - DNA, 25 bp, Probe Sequence
cctttgtgacttcaagagcctctgg

SEQ ID NO: 199397 - DNA, 25 bp, Probe Sequence
cctttctggcttctaggacatccat

SEQ ID NO: 199398 - DNA, 25 bp, Probe Sequence
cctttcccttaaaagagatctgcct

SEQ ID NO: 199399 - DNA, 25 bp, Probe Sequence
cctttaccattaagccaggcttgtt

SEQ ID NO: 199400 - DNA, 25 bp, Probe Sequence
cctattaccattgtgatgcgttctt

SEQ ID NO: 199401 - DNA, 25 bp, Probe Sequence
ccatgctcaaccactgtggcgttct

SEQ ID NO: 199402 - DNA, 25 bp, Probe Sequence
ccattcagcgccaacttgcaagttt

SEQ ID NO: 199403 - DNA, 25 bp, Probe Sequence
ccttctgccgtgattgtcagtttcc

SEQ ID NO: 199404 - DNA, 25 bp, Probe Sequence
ccttctgccgtgattgtcagtttct

SEQ ID NO: 199405 - DNA, 25 bp, Probe Sequence
ccttggcttgtcatttcagtggtct

SEQ ID NO: 199406 - DNA, 25 bp, Probe Sequence
cctttgctttctattacttgtgcat

SEQ ID NO: 199407 - DNA, 25 bp, Probe Sequence
cctttgtcttggaaccaccagtcta

SEQ ID NO: 199408 - DNA, 25 bp, Probe Sequence
ccatttcccgtgaacacccatggga

SEQ ID NO: 199409 - DNA, 25 bp, Probe Sequence
ccatttcccgtgaacacccatggga

SEQ ID NO: 199410 - DNA, 25 bp, Probe Sequence
ccatttcccgtgaacacccatggga

SEQ ID NO: 199411 - DNA, 25 bp, Probe Sequence
ccattgttccccaatctcaacaagg

SEQ ID NO: 199412 - DNA, 25 bp, Probe Sequence
cctatgtctccccatacacaaaaat

SEQ ID NO: 199413 - DNA, 25 bp, Probe Sequence
cctttcctcctatcagcacaaagaa

SEQ ID NO: 199414 - DNA, 25 bp, Probe Sequence
ccatttcccttttcagagaatgtaa

SEQ ID NO: 199415 - DNA, 25 bp, Probe Sequence
cctttgcccttgaactgctgatatc

SEQ ID NO: 199416 - DNA, 25 bp, Probe Sequence
cctttgcccgatacttgctggagca

SEQ ID NO: 199417 - DNA, 25 bp, Probe Sequence
cctttgcccgatacttgctggagca

SEQ ID NO: 199418 - DNA, 25 bp, Probe Sequence
ccttggcctgctaaagtgctgggat

SEQ ID NO: 199419 - DNA, 25 bp, Probe Sequence
cctttctcctcgtatgtgtgtttac

SEQ ID NO: 199420 - DNA, 25 bp, Probe Sequence
ccatttcctgactttttgctttaat

SEQ ID NO: 199421 - DNA, 25 bp, Probe Sequence
cctttgtctattactttgtttcaca

SEQ ID NO: 199422 - DNA, 25 bp, Probe Sequence
cctttgagctttcttgatttcctca

SEQ ID NO: 199423 - DNA, 25 bp, Probe Sequence
ccttctacttatttagatctttcca

SEQ ID NO: 199424 - DNA, 25 bp, Probe Sequence
cctattactaaactcagtgctctcc

SEQ ID NO: 199425 - DNA, 25 bp, Probe Sequence
cctttagctaacttagtgcaaacat

SEQ ID NO: 199426 - DNA, 25 bp, Probe Sequence
cctttggctaccttgagtgctcagc

SEQ ID NO: 199427 - DNA, 25 bp, Probe Sequence
cctttggctaccttgagtgctcagc

SEQ ID NO: 199428 - DNA, 25 bp, Probe Sequence
ccttttgtgatggttgatgtctcag

SEQ ID NO: 199429 - DNA, 25 bp, Probe Sequence
ccttttgatgggaagtgcagtcagc

SEQ ID NO: 199430 - DNA, 25 bp, Probe Sequence
ccttttggtcgctctgagtcgaccg

SEQ ID NO: 199431 - DNA, 25 bp, Probe Sequence
ccttttaccagtggctgaatctact

SEQ ID NO: 199432 - DNA, 25 bp, Probe Sequence
ccttttatgctcacctgacattaat

SEQ ID NO: 199433 - DNA, 25 bp, Probe Sequence
ccttaaagcatcaccactcattttg

SEQ ID NO: 199434 - DNA, 25 bp, Probe Sequence
ccatcttaacctatcaactttctgc

SEQ ID NO: 199435 - DNA, 25 bp, Probe Sequence
ccatttcaaccatagaccaattatc

SEQ ID NO: 199436 - DNA, 25 bp, Probe Sequence
ccttgttccagctttgacgtattat

SEQ ID NO: 199437 - DNA, 25 bp, Probe Sequence
cctttgctgtcctgtgtagtgattt

SEQ ID NO: 199438 - DNA, 25 bp, Probe Sequence
cctttcgtcagttgctgaggtgttc

SEQ ID NO: 199439 - DNA, 25 bp, Probe Sequence
ccttgttgtccttggagctgtggtc

SEQ ID NO: 199440 - DNA, 25 bp, Probe Sequence
cctattatgaggtgcaacgggtttt

SEQ ID NO: 199441 - DNA, 25 bp, Probe Sequence
ccttcttggataacacacgggcctt

SEQ ID NO: 199442 - DNA, 25 bp, Probe Sequence
ccttctgttgaacgtacctgagcct

SEQ ID NO: 199443 - DNA, 25 bp, Probe Sequence
ccttccatggaacctgacgtagctg

SEQ ID NO: 199444 - DNA, 25 bp, Probe Sequence
ccttgcgggaagactgccaatatgt

SEQ ID NO: 199445 - DNA, 25 bp, Probe Sequence
cctttgtgtgatttcttaatgctgt

SEQ ID NO: 199446 - DNA, 25 bp, Probe Sequence
cctttggaatgaatgctattattgc

SEQ ID NO: 199447 - DNA, 25 bp, Probe Sequence
cctttgccaatgttctcattcaccg

SEQ ID NO: 199448 - DNA, 25 bp, Probe Sequence
cctttcccatgatccagaactgagg

SEQ ID NO: 199449 - DNA, 25 bp, Probe Sequence
cctattcacagcttcctcatgaact

SEQ ID NO: 199450 - DNA, 25 bp, Probe Sequence
ccttgtccaccttcttgatatttta

SEQ ID NO: 199451 - DNA, 25 bp, Probe Sequence
cctttccaccttcagtcatgatgta

SEQ ID NO: 199452 - DNA, 25 bp, Probe Sequence
ccttatccaccacgctattatagtt

SEQ ID NO: 199453 - DNA, 25 bp, Probe Sequence
ccatttctcacctctcaattaatta

SEQ ID NO: 199454 - DNA, 25 bp, Probe Sequence
cctttctcatccttgtgttgtgaaa

SEQ ID NO: 199455 - DNA, 25 bp, Probe Sequence
cctttctaccttagtgtcatacata

SEQ ID NO: 199456 - DNA, 25 bp, Probe Sequence
cctttgtgacttttggctcagtcat

SEQ ID NO: 199457 - DNA, 25 bp, Probe Sequence
cctattgtgacttacttatctgtat

SEQ ID NO: 199458 - DNA, 25 bp, Probe Sequence
ccatttgtacattgatggacactta

SEQ ID NO: 199459 - DNA, 25 bp, Probe Sequence
cctttgctacactgctgacagctat

SEQ ID NO: 199460 - DNA, 25 bp, Probe Sequence
cctttgtatatttctgactgctcac

SEQ ID NO: 199461 - DNA, 25 bp, Probe Sequence
ccttttcttagctatgagctgatca

SEQ ID NO: 199462 - DNA, 25 bp, Probe Sequence
ccttcttgcattcagctgagccaag

SEQ ID NO: 199463 - DNA, 25 bp, Probe Sequence
cctttcgcttgagtcatcagccaac

SEQ ID NO: 199464 - DNA, 25 bp, Probe Sequence
cctttctgaatgttatctccaacca

SEQ ID NO: 199465 - DNA, 25 bp, Probe Sequence
ccttctcaagtgctttggagaacag

SEQ ID NO: 199466 - DNA, 25 bp, Probe Sequence
ccttccagtgatctggaccaggaag

SEQ ID NO: 199467 - DNA, 25 bp, Probe Sequence
cctttctgtggctggatggggagac

SEQ ID NO: 199468 - DNA, 25 bp, Probe Sequence
cctttcatctggtcagggagtggag

SEQ ID NO: 199469 - DNA, 25 bp, Probe Sequence
cctttgcacctgagaggggaagttc

SEQ ID NO: 199470 - DNA, 25 bp, Probe Sequence
cctttcagcctcagaggtcacagtg

SEQ ID NO: 199471 - DNA, 25 bp, Probe Sequence
ccttttcctgagccagagtgccagg

SEQ ID NO: 199472 - DNA, 25 bp, Probe Sequence
ccttttacatactgctgtctatgtg

SEQ ID NO: 199473 - DNA, 25 bp, Probe Sequence
ccttcttaccacactggcatatcag

SEQ ID NO: 199474 - DNA, 25 bp, Probe Sequence
ccattctatcatcaacgggtacaaa

SEQ ID NO: 199475 - DNA, 25 bp, Probe Sequence
ccattctttccaaccaggtccaagg

SEQ ID NO: 199476 - DNA, 25 bp, Probe Sequence
ccttctatctccaggagggcaaggg

SEQ ID NO: 199477 - DNA, 25 bp, Probe Sequence
ccttcttgtccctggggcaatgtgt

SEQ ID NO: 199478 - DNA, 25 bp, Probe Sequence
ccttttgtactgtgttgtgcttgct

SEQ ID NO: 199479 - DNA, 25 bp, Probe Sequence
ccttttggtttcatctgtgttctga

SEQ ID NO: 199480 - DNA, 25 bp, Probe Sequence
cctttgatggtgttcatttgcattt

SEQ ID NO: 199481 - DNA, 25 bp, Probe Sequence
cctttgagagtgggcgagtgagttg

SEQ ID NO: 199482 - DNA, 25 bp, Probe Sequence
cctttgaggctctagtggaggtgga

SEQ ID NO: 199483 - DNA, 25 bp, Probe Sequence
cctattgacttctatgtcggtataa

SEQ ID NO: 199484 - DNA, 25 bp, Probe Sequence
ccatcttggctttagtaggtataga

SEQ ID NO: 199485 - DNA, 25 bp, Probe Sequence
ccattaggcctattaagggaacact

SEQ ID NO: 199486 - DNA, 25 bp, Probe Sequence
ccattaggcctatttaggtgacact

SEQ ID NO: 199487 - DNA, 25 bp, Probe Sequence
ccattaggcctatttaggtgacact

SEQ ID NO: 199488 - DNA, 25 bp, Probe Sequence
ccttcagcccatgtcaacgtgacag

SEQ ID NO: 199489 - DNA, 25 bp, Probe Sequence
ccttcagacccagtaactgtccgca

SEQ ID NO: 199490 - DNA, 25 bp, Probe Sequence
ccttggcctcccaaaatgctgggat

SEQ ID NO: 199491 - DNA, 25 bp, Probe Sequence
ccttggcctcccaaggtgctgggat

SEQ ID NO: 199492 - DNA, 25 bp, Probe Sequence
ccttggcctcccagagtgctgggat

SEQ ID NO: 199493 - DNA, 25 bp, Probe Sequence
ccttcgacctcctgaatcatgtggt

SEQ ID NO: 199494 - DNA, 25 bp, Probe Sequence
ccttcagactctgtggctgtcattg

SEQ ID NO: 199495 - DNA, 25 bp, Probe Sequence
ccatctggaatcagttgcccatttg

SEQ ID NO: 199496 - DNA, 25 bp, Probe Sequence
ccattgtgactattgttggtcaaag

SEQ ID NO: 199497 - DNA, 25 bp, Probe Sequence
ccttacctgattgctggcatccaac

SEQ ID NO: 199498 - DNA, 25 bp, Probe Sequence
ccttatcttaatctgtcccaacagc

SEQ ID NO: 199499 - DNA, 25 bp, Probe Sequence
cctttgcttggtccagttccagaaa

SEQ ID NO: 199500 - DNA, 25 bp, Probe Sequence
ccttcttttgagacattagccagta

SEQ ID NO: 199501 - DNA, 25 bp, Probe Sequence
cctttattgagtaccaagccatgta

SEQ ID NO: 199502 - DNA, 25 bp, Probe Sequence
ccatcttttggacccaatccattct

SEQ ID NO: 199503 - DNA, 25 bp, Probe Sequence
ccataaccataaccagattcccttg

SEQ ID NO: 199504 - DNA, 25 bp, Probe Sequence
ccaaaagctagacagatccccgttc

SEQ ID NO: 199505 - DNA, 25 bp, Probe Sequence
ccagaatactggtctggaccccgag

SEQ ID NO: 199506 - DNA, 25 bp, Probe Sequence
ccagatctacgagataaccccaagt

SEQ ID NO: 199507 - DNA, 25 bp, Probe Sequence
ccatatagatcgttacaaccgaaca

SEQ ID NO: 199508 - DNA, 25 bp, Probe Sequence
ccataatgtcgtaacaactccgccc

SEQ ID NO: 199509 - DNA, 25 bp, Probe Sequence
ccttctccgtaattagcatggcccc

SEQ ID NO: 199510 - DNA, 25 bp, Probe Sequence
ccttgaacttattaacatggccatt

SEQ ID NO: 199511 - DNA, 25 bp, Probe Sequence
ccttaactctaatgcctggactggc

SEQ ID NO: 199512 - DNA, 25 bp, Probe Sequence
ccttagaccaccaagccttgattgg

SEQ ID NO: 199513 - DNA, 25 bp, Probe Sequence
cctttctgccacttagcacttgtat

SEQ ID NO: 199514 - DNA, 25 bp, Probe Sequence
ccttatctcacttctaccttgtgaa

SEQ ID NO: 199515 - DNA, 25 bp, Probe Sequence
cctttctcagaactaccttgtgcag

SEQ ID NO: 199516 - DNA, 25 bp, Probe Sequence
cctttctagtcctattctattgcag

SEQ ID NO: 199517 - DNA, 25 bp, Probe Sequence
ccttctccagtcctgattactgtac

SEQ ID NO: 199518 - DNA, 25 bp, Probe Sequence
ccttgtccagacctatgttctgctt

SEQ ID NO: 199519 - DNA, 25 bp, Probe Sequence
ccatagctctgctgcgtaggtctac

SEQ ID NO: 199520 - DNA, 25 bp, Probe Sequence
ccatagaccatacatacgatcagca

SEQ ID NO: 199521 - DNA, 25 bp, Probe Sequence
ccatgaccctttaacagcatctgct

SEQ ID NO: 199522 - DNA, 25 bp, Probe Sequence
ccatcaatcctggttttgatctgct

SEQ ID NO: 199523 - DNA, 25 bp, Probe Sequence
ccattgatctgcgttttgtcacttt

SEQ ID NO: 199524 - DNA, 25 bp, Probe Sequence
ccttgctactttactgataccttta

SEQ ID NO: 199525 - DNA, 25 bp, Probe Sequence
ccttgtactgatataaacacttcca

SEQ ID NO: 199526 - DNA, 25 bp, Probe Sequence
ccttgtactttacaatcatgcctac

SEQ ID NO: 199527 - DNA, 25 bp, Probe Sequence
ccttaagctttactaaacatgatag

SEQ ID NO: 199528 - DNA, 25 bp, Probe Sequence
ccattccagcttgccgaaatcaaag

SEQ ID NO: 199529 - DNA, 25 bp, Probe Sequence
ccatatcccattggttaaaagcaag

SEQ ID NO: 199530 - DNA, 25 bp, Probe Sequence
ccttctctatgaacttaaaatcaaa

SEQ ID NO: 199531 - DNA, 25 bp, Probe Sequence
ccttcttctaccatagcaactgcaa

SEQ ID NO: 199532 - DNA, 25 bp, Probe Sequence
ccttcttctaccatagcaactgcaa

SEQ ID NO: 199533 - DNA, 25 bp, Probe Sequence
ccttttgccactgtagctgaccagg

SEQ ID NO: 199534 - DNA, 25 bp, Probe Sequence
ccttttggcctccactgtggacagc

SEQ ID NO: 199535 - DNA, 25 bp, Probe Sequence
ccttctcatgtggcttcgtgtgaac

SEQ ID NO: 199536 - DNA, 25 bp, Probe Sequence
ccttctagtgccgtcaatttgagat

SEQ ID NO: 199537 - DNA, 25 bp, Probe Sequence
ccttgtcatgtaccatcaataaagt

SEQ ID NO: 199538 - DNA, 25 bp, Probe Sequence
ccttgtctgctaaataaacatgtgc

SEQ ID NO: 199539 - DNA, 25 bp, Probe Sequence
cctttgctccagaaacacagatgtg

SEQ ID NO: 199540 - DNA, 25 bp, Probe Sequence
ccttggctagagaactcacagctct

SEQ ID NO: 199541 - DNA, 25 bp, Probe Sequence
ccttctctagaatttccagcctggt

SEQ ID NO: 199542 - DNA, 25 bp, Probe Sequence
ccttctccaaataagccacttgtgt

SEQ ID NO: 199543 - DNA, 25 bp, Probe Sequence
ccttcccatccaaagccattggtgg

SEQ ID NO: 199544 - DNA, 25 bp, Probe Sequence
ccttatcctcacagccactgtggtg

SEQ ID NO: 199545 - DNA, 25 bp, Probe Sequence
cctttccctcagcacacagaggatg

SEQ ID NO: 199546 - DNA, 25 bp, Probe Sequence
cctttgcgtctccgatcggaggcac

SEQ ID NO: 199547 - DNA, 25 bp, Probe Sequence
ccttagctttcccataagagctccc

SEQ ID NO: 199548 - DNA, 25 bp, Probe Sequence
ccttagctcttagccaaacaccttc

SEQ ID NO: 199549 - DNA, 25 bp, Probe Sequence
ccatgttgcaacagccccaacatca

SEQ ID NO: 199550 - DNA, 25 bp, Probe Sequence
ccttcaagcagctaccatcctaatc

SEQ ID NO: 199551 - DNA, 25 bp, Probe Sequence
ccttcaaagatgaccaccatatata

SEQ ID NO: 199552 - DNA, 25 bp, Probe Sequence
ccttcgaagattaccagatcatcag

SEQ ID NO: 199553 - DNA, 25 bp, Probe Sequence
ccttccgcacatggagccaatatgc

SEQ ID NO: 199554 - DNA, 25 bp, Probe Sequence
ccttctctactcatgccagattttg

SEQ ID NO: 199555 - DNA, 25 bp, Probe Sequence
ccttctctatccttgctcaaaatgt

SEQ ID NO: 199556 - DNA, 25 bp, Probe Sequence
ccttctctatccttgctcaaaatgt

SEQ ID NO: 199557 - DNA, 25 bp, Probe Sequence
cctttatatgactttctctgagttg

SEQ ID NO: 199558 - DNA, 25 bp, Probe Sequence
ccttttattttccactcagattaat

SEQ ID NO: 199559 - DNA, 25 bp, Probe Sequence
ccttctttctgttcagtcctaaaat

SEQ ID NO: 199560 - DNA, 25 bp, Probe Sequence
ccttgcttggctcaagcaccaccaa

SEQ ID NO: 199561 - DNA, 25 bp, Probe Sequence
ccttgctttgaccactgcatgaact

SEQ ID NO: 199562 - DNA, 25 bp, Probe Sequence
ccttgatgtcaagatccatgagacc

SEQ ID NO: 199563 - DNA, 25 bp, Probe Sequence
ccttgatgtactggagcaatcagat

SEQ ID NO: 199564 - DNA, 25 bp, Probe Sequence
ccttcatgctggccgagtttgatgg

SEQ ID NO: 199565 - DNA, 25 bp, Probe Sequence
ccatggtgattcgggttttggccaa

SEQ ID NO: 199566 - DNA, 25 bp, Probe Sequence
gccgtggtggcaggtgtttaatgac

SEQ ID NO: 199567 - DNA, 25 bp, Probe Sequence
gccagtgactgatgattaattttat

SEQ ID NO: 199568 - DNA, 25 bp, Probe Sequence
ccatatcattattaccacattttca

SEQ ID NO: 199569 - DNA, 25 bp, Probe Sequence
ccatatatgttataccttgtatgat

SEQ ID NO: 199570 - DNA, 25 bp, Probe Sequence
ccatatcatgtgtgtacgctgaaag

SEQ ID NO: 199571 - DNA, 25 bp, Probe Sequence
ccttctgctattgatcctgaagatg

SEQ ID NO: 199572 - DNA, 25 bp, Probe Sequence
cctttctgtgcctcatcatgcaagg

SEQ ID NO: 199573 - DNA, 25 bp, Probe Sequence
ccttcctcttcattccatatgaggt

SEQ ID NO: 199574 - DNA, 25 bp, Probe Sequence
ccttcctatatgtctgacaatagtg

SEQ ID NO: 199575 - DNA, 25 bp, Probe Sequence
cctttctcaagaatgcccatctgtg

SEQ ID NO: 199576 - DNA, 25 bp, Probe Sequence
ccattcctgagagatcccattcatg

SEQ ID NO: 199577 - DNA, 25 bp, Probe Sequence
ccatcgccatggtcttggtcaacat

SEQ ID NO: 199578 - DNA, 25 bp, Probe Sequence
ccatcactgcatggagttggcccta

SEQ ID NO: 199579 - DNA, 25 bp, Probe Sequence
ccttcagcggagtaggatctcaaca

SEQ ID NO: 199580 - DNA, 25 bp, Probe Sequence
ccttcatctgttcagtcatctccaa

SEQ ID NO: 199581 - DNA, 25 bp, Probe Sequence
ccttcatctgttcagtcatctccaa

SEQ ID NO: 199582 - DNA, 25 bp, Probe Sequence
cctttatcactgtcagtcattctca

SEQ ID NO: 199583 - DNA, 25 bp, Probe Sequence
ccatactaccatcaatactcatcat

SEQ ID NO: 199584 - DNA, 25 bp, Probe Sequence
ccataatccttctaatagccatcct

SEQ ID NO: 199585 - DNA, 25 bp, Probe Sequence
ccatgaacccttagaagccaccata

SEQ ID NO: 199586 - DNA, 25 bp, Probe Sequence
ccattacttcaatcaagcccaaatt

SEQ ID NO: 199587 - DNA, 25 bp, Probe Sequence
ccattacttgagaggagccctgatt

SEQ ID NO: 199588 - DNA, 25 bp, Probe Sequence
ccttagctagagtgtcgccttgtgg

SEQ ID NO: 199589 - DNA, 25 bp, Probe Sequence
ccttttcagatgtggctggtcatgg

SEQ ID NO: 199590 - DNA, 25 bp, Probe Sequence
ccttttacccaggctgtgtgctgtg

SEQ ID NO: 199591 - DNA, 25 bp, Probe Sequence
ccttttacccaggctgtgtgctgtg

SEQ ID NO: 199592 - DNA, 25 bp, Probe Sequence
ccttcgtgacggacacgtgcgtggc

SEQ ID NO: 199593 - DNA, 25 bp, Probe Sequence
cctttctgccggacgcgagcagatg

SEQ ID NO: 199594 - DNA, 25 bp, Probe Sequence
ccttctcatcctggtacagagagga

SEQ ID NO: 199595 - DNA, 25 bp, Probe Sequence
ccttgccatcttttaggatgggccc

SEQ ID NO: 199596 - DNA, 25 bp, Probe Sequence
ccttgccctggagtagggggccaga

SEQ ID NO: 199597 - DNA, 25 bp, Probe Sequence
ccttccctggagcggcagggcgtga

SEQ ID NO: 199598 - DNA, 25 bp, Probe Sequence
ccttccgggaaaggatggatcctcg

SEQ ID NO: 199599 - DNA, 25 bp, Probe Sequence
gccttccgggaaaggatggatcctc

SEQ ID NO: 199600 - DNA, 25 bp, Probe Sequence
ccttcgcggggcaaaatggagctcg

SEQ ID NO: 199601 - DNA, 25 bp, Probe Sequence
ccttcacagttgcaacaatgagact

SEQ ID NO: 199602 - DNA, 25 bp, Probe Sequence
ccatccagagggtccccagagacat

SEQ ID NO: 199603 - DNA, 25 bp, Probe Sequence
ccatctatggggtaccccaagtcgg

SEQ ID NO: 199604 - DNA, 25 bp, Probe Sequence
ccatttgtgtaatctccaaaagtgt

SEQ ID NO: 199605 - DNA, 25 bp, Probe Sequence
ccttctgtttcatcattgcaaacaa

SEQ ID NO: 199606 - DNA, 25 bp, Probe Sequence
ccttctttctaggctttaagcagag

SEQ ID NO: 199607 - DNA, 25 bp, Probe Sequence
ccttctgtcccagctttgcagaatg

SEQ ID NO: 199608 - DNA, 25 bp, Probe Sequence
ccttgtcctccttcgttcagaaggc

SEQ ID NO: 199609 - DNA, 25 bp, Probe Sequence
ccttgtcctccttcgttcagaaggc

SEQ ID NO: 199610 - DNA, 25 bp, Probe Sequence
ccttgcctcctcagtatgtgggggc

SEQ ID NO: 199611 - DNA, 25 bp, Probe Sequence
ccttacgtctgatcttgatgggggc

SEQ ID NO: 199612 - DNA, 25 bp, Probe Sequence
ccttacactctatctcgtggtggca

SEQ ID NO: 199613 - DNA, 25 bp, Probe Sequence
cctttactgcactttctgaccagga

SEQ ID NO: 199614 - DNA, 25 bp, Probe Sequence
cctttactgcactttctgaccagga

SEQ ID NO: 199615 - DNA, 25 bp, Probe Sequence
ccttctcacgagtcttttccagaaa

SEQ ID NO: 199616 - DNA, 25 bp, Probe Sequence
ccttgcaatcgatttctctttagtc

SEQ ID NO: 199617 - DNA, 25 bp, Probe Sequence
ccatcatgaatggcatcttgctctt

SEQ ID NO: 199618 - DNA, 25 bp, Probe Sequence
ccatcagctcagactcgctgttgtc

SEQ ID NO: 199619 - DNA, 25 bp, Probe Sequence
ccttctgcatatgaggcattgtgct

SEQ ID NO: 199620 - DNA, 25 bp, Probe Sequence
ccttctgcaaggcccagggcttcac

SEQ ID NO: 199621 - DNA, 25 bp, Probe Sequence
ccttctcaagctgtcaggtctttaa

SEQ ID NO: 199622 - DNA, 25 bp, Probe Sequence
ccttcatcaatgtgtctgtttttta

SEQ ID NO: 199623 - DNA, 25 bp, Probe Sequence
ccttcatcagaattttgtagtttta

SEQ ID NO: 199624 - DNA, 25 bp, Probe Sequence
ccttctcaaatttttcaatggttct

SEQ ID NO: 199625 - DNA, 25 bp, Probe Sequence
ccattctagatttattacgtgtttt

SEQ ID NO: 199626 - DNA, 25 bp, Probe Sequence
ccttctcagcttcattggctagttt

SEQ ID NO: 199627 - DNA, 25 bp, Probe Sequence
ccttcaagttattgggctcagtgct

SEQ ID NO: 199628 - DNA, 25 bp, Probe Sequence
ccttacagactgactttacttaaag

SEQ ID NO: 199629 - DNA, 25 bp, Probe Sequence
ccttacaaccaacttatttgaacat

SEQ ID NO: 199630 - DNA, 25 bp, Probe Sequence
ccttaccaccaaacataccaaaatg

SEQ ID NO: 199631 - DNA, 25 bp, Probe Sequence
ccttaccaccagaagctatccacaa

SEQ ID NO: 199632 - DNA, 25 bp, Probe Sequence
ccatctactctttgaagcttctgcc

SEQ ID NO: 199633 - DNA, 25 bp, Probe Sequence
ccatttccattatggtggcagccct

SEQ ID NO: 199634 - DNA, 25 bp, Probe Sequence
ccattcttacgttggtggccaagta

SEQ ID NO: 199635 - DNA, 25 bp, Probe Sequence
ccattaatcagctttggggcaatat

SEQ ID NO: 199636 - DNA, 25 bp, Probe Sequence
ccatcttagacagttggtgtaataa

SEQ ID NO: 199637 - DNA, 25 bp, Probe Sequence
ccatatttgccaggctggtttgaac

SEQ ID NO: 199638 - DNA, 25 bp, Probe Sequence
ccattttctacagttttttccgcag

SEQ ID NO: 199639 - DNA, 25 bp, Probe Sequence
ccttttccacagattgtctaaagcc

SEQ ID NO: 199640 - DNA, 25 bp, Probe Sequence
ccttttccatgagctgtgttaattc

SEQ ID NO: 199641 - DNA, 25 bp, Probe Sequence
cctttttctgtgtctggctaatatt

SEQ ID NO: 199642 - DNA, 25 bp, Probe Sequence
cctttttcgggagttagatgtatag

SEQ ID NO: 199643 - DNA, 25 bp, Probe Sequence
ccagatttgtcgtgttacagttata

SEQ ID NO: 199644 - DNA, 25 bp, Probe Sequence
ccattttgggcatatgtatctttat

SEQ ID NO: 199645 - DNA, 25 bp, Probe Sequence
ccatttgtattaccattacttgtat

SEQ ID NO: 199646 - DNA, 25 bp, Probe Sequence
ccttttctctagtatttgactgtta

SEQ ID NO: 199647 - DNA, 25 bp, Probe Sequence
ccattatttctaacacttacgattt

SEQ ID NO: 199648 - DNA, 25 bp, Probe Sequence
ccatgtattaaccacacttaaactt

SEQ ID NO: 199649 - DNA, 25 bp, Probe Sequence
ccattttggaccacctatacagctg

SEQ ID NO: 199650 - DNA, 25 bp, Probe Sequence
ccagtcgttggcacaccaagaagct

SEQ ID NO: 199651 - DNA, 25 bp, Probe Sequence
ccattttctgagacccccagaaagg

SEQ ID NO: 199652 - DNA, 25 bp, Probe Sequence
ccttttctgcactttgctgcgaaaa

SEQ ID NO: 199653 - DNA, 25 bp, Probe Sequence
ccttcttgatagtttgcaggcaaaa

SEQ ID NO: 199654 - DNA, 25 bp, Probe Sequence
ccatgatcttgaaagtgccaaaaaa

SEQ ID NO: 199655 - DNA, 25 bp, Probe Sequence
ccttcctgcagaatgtgctcaacaa

SEQ ID NO: 199656 - DNA, 25 bp, Probe Sequence
ccttcaccagcaaggctgacctgtc

SEQ ID NO: 199657 - DNA, 25 bp, Probe Sequence
ccttatgccagttgagctgaatctt

SEQ ID NO: 199658 - DNA, 25 bp, Probe Sequence
ccttgactcagatggtgcatatgct

SEQ ID NO: 199659 - DNA, 25 bp, Probe Sequence
ccttgatcatatctgctgtgatcag

SEQ ID NO: 199660 - DNA, 25 bp, Probe Sequence
ccttgcagctgtctctgttcaaagg

SEQ ID NO: 199661 - DNA, 25 bp, Probe Sequence
ccttgagcgagagcgttaaagcgct

SEQ ID NO: 199662 - DNA, 25 bp, Probe Sequence
ccatgcttctagtcggaaaagacgg

SEQ ID NO: 199663 - DNA, 25 bp, Probe Sequence
ccttggtattcaggcaacaccactg

SEQ ID NO: 199664 - DNA, 25 bp, Probe Sequence
ccttggttcaattcaaatgacctga

SEQ ID NO: 199665 - DNA, 25 bp, Probe Sequence
ccttcgcttgaatattatccctgta

SEQ ID NO: 199666 - DNA, 25 bp, Probe Sequence
ccttctggtatatgcatgtcactgc

SEQ ID NO: 199667 - DNA, 25 bp, Probe Sequence
ccttcggttaacttgcatctccaga

SEQ ID NO: 199668 - DNA, 25 bp, Probe Sequence
ccttccatttcaatcccagttagaa

SEQ ID NO: 199669 - DNA, 25 bp, Probe Sequence
ccacccttacagtgccgtacagaat

SEQ ID NO: 199670 - DNA, 25 bp, Probe Sequence
ccacctttgacgtttagcttagcca

SEQ ID NO: 199671 - DNA, 25 bp, Probe Sequence
ccactggtttctgtctatgtctacc

SEQ ID NO: 199672 - DNA, 25 bp, Probe Sequence
gacacttggtttgttgaccataacc

SEQ ID NO: 199673 - DNA, 25 bp, Probe Sequence
ccacatttgtttcaatgccccaaac

SEQ ID NO: 199674 - DNA, 25 bp, Probe Sequence
ccacaaatctttccaactctacgga

SEQ ID NO: 199675 - DNA, 25 bp, Probe Sequence
ccttaacttctcgacagttccgtga

SEQ ID NO: 199676 - DNA, 25 bp, Probe Sequence
ccttaactttcccatgttcaatgca

SEQ ID NO: 199677 - DNA, 25 bp, Probe Sequence
ccaataaatttggcttgtttcacaa

SEQ ID NO: 199678 - DNA, 25 bp, Probe Sequence
ccatattaaccactatttttcaagg

SEQ ID NO: 199679 - DNA, 25 bp, Probe Sequence
ccattattgcaccagccttttaaag

SEQ ID NO: 199680 - DNA, 25 bp, Probe Sequence
ccatctattgatgagggtcttaaaa

SEQ ID NO: 199681 - DNA, 25 bp, Probe Sequence
ccactaacatcccagactttaaaat

SEQ ID NO: 199682 - DNA, 25 bp, Probe Sequence
ccattaactggcctgatctaacaat

SEQ ID NO: 199683 - DNA, 25 bp, Probe Sequence
ccttgtgagcttgaatcaaccaatc

SEQ ID NO: 199684 - DNA, 25 bp, Probe Sequence
ccttgttctgatgcaagcaggccag

SEQ ID NO: 199685 - DNA, 25 bp, Probe Sequence
ccttgtttggaactgcaagcacagg

SEQ ID NO: 199686 - DNA, 25 bp, Probe Sequence
ccttattctgtgtgtagacattgta

SEQ ID NO: 199687 - DNA, 25 bp, Probe Sequence
ccattttcttgtttaactttagcat

SEQ ID NO: 199688 - DNA, 25 bp, Probe Sequence
ccattttgttgttgctatacagtat

SEQ ID NO: 199689 - DNA, 25 bp, Probe Sequence
ccattcgtccgttgatagacacttt

SEQ ID NO: 199690 - DNA, 25 bp, Probe Sequence
ccataccctcgttcatgatactttc

SEQ ID NO: 199691 - DNA, 25 bp, Probe Sequence
ccattccttaggtagagacttcaaa

SEQ ID NO: 199692 - DNA, 25 bp, Probe Sequence
tccttctttaagacacagacgtaag

SEQ ID NO: 199693 - DNA, 25 bp, Probe Sequence
ccatatttatactatcgcagaagta

SEQ ID NO: 199694 - DNA, 25 bp, Probe Sequence
ccattggttaaaagcaagtcatagt

SEQ ID NO: 199695 - DNA, 25 bp, Probe Sequence
ccatctagttagttccacaaagaca

SEQ ID NO: 199696 - DNA, 25 bp, Probe Sequence
ccacttttcaccacatacaaaaatt

SEQ ID NO: 199697 - DNA, 25 bp, Probe Sequence
ccatcttctatcccaccaaaaataa

SEQ ID NO: 199698 - DNA, 25 bp, Probe Sequence
ccatcttgtggccgaataaaaaata

SEQ ID NO: 199699 - DNA, 25 bp, Probe Sequence
ccatcctggtctggacaaatattaa

SEQ ID NO: 199700 - DNA, 25 bp, Probe Sequence
ccatcctgggcggagctaaagttgc

SEQ ID NO: 199701 - DNA, 25 bp, Probe Sequence
ccacccgaggaagcagtattatctg

SEQ ID NO: 199702 - DNA, 25 bp, Probe Sequence
ccatcagcctgtcaactcagttaac

SEQ ID NO: 199703 - DNA, 25 bp, Probe Sequence
ccatcaggctgacaccacacatatt

SEQ ID NO: 199704 - DNA, 25 bp, Probe Sequence
ccatctgcgtgacaataaacattat

SEQ ID NO: 199705 - DNA, 25 bp, Probe Sequence
ccttctgtgcctttgaatacaaatt

SEQ ID NO: 199706 - DNA, 25 bp, Probe Sequence
ccttgctgatggcttgacatgtgca

SEQ ID NO: 199707 - DNA, 25 bp, Probe Sequence
ccttgcggtcgtaggtgatgccact

SEQ ID NO: 199708 - DNA, 25 bp, Probe Sequence
ccttcgtgatctggggatgtgccac

SEQ ID NO: 199709 - DNA, 25 bp, Probe Sequence
ccattctggattcggcggttccggg

SEQ ID NO: 199710 - DNA, 25 bp, Probe Sequence
gctaagtggtatccgaggttcttaa

SEQ ID NO: 199711 - DNA, 25 bp, Probe Sequence
ttccatggggtcaaaggtacctaag

SEQ ID NO: 199712 - DNA, 25 bp, Probe Sequence
tccatggggtcaaaaggtacctaag

SEQ ID NO: 199713 - DNA, 25 bp, Probe Sequence
tcctgggggaccagacggtctcaga

SEQ ID NO: 199714 - DNA, 25 bp, Probe Sequence
gccttgcgggactggattacttcaa

SEQ ID NO: 199715 - DNA, 25 bp, Probe Sequence
ccattagggaaaagttcctctgcag

SEQ ID NO: 199716 - DNA, 25 bp, Probe Sequence
ccatatggggactatagtgcaacct

SEQ ID NO: 199717 - DNA, 25 bp, Probe Sequence
ccttgtggtgagtaactatcagctt

SEQ ID NO: 199718 - DNA, 25 bp, Probe Sequence
ccttgctggctggggagtacatcat

SEQ ID NO: 199719 - DNA, 25 bp, Probe Sequence
ccttgctgactttgggtgacacatg

SEQ ID NO: 199720 - DNA, 25 bp, Probe Sequence
ccttgtgaccttctctatatcatgc

SEQ ID NO: 199721 - DNA, 25 bp, Probe Sequence
ccttggagccttacctctatgtggc

SEQ ID NO: 199722 - DNA, 25 bp, Probe Sequence
ccacagggacttgcctcactgtgtc

SEQ ID NO: 199723 - DNA, 25 bp, Probe Sequence
ccatagggactttccattgacgtca

SEQ ID NO: 199724 - DNA, 25 bp, Probe Sequence
ccatttggattatcaacatgacgta

SEQ ID NO: 199725 - DNA, 25 bp, Probe Sequence
ccatagtggattgcctacaactgga

SEQ ID NO: 199726 - DNA, 25 bp, Probe Sequence
ccatgagttatttcctattctgtgg

SEQ ID NO: 199727 - DNA, 25 bp, Probe Sequence
ccttgtgatgatttctcttcatctt

SEQ ID NO: 199728 - DNA, 25 bp, Probe Sequence
ccttgatgctatgctcctaatccaa

SEQ ID NO: 199729 - DNA, 25 bp, Probe Sequence
ccttctggtcctggctagggcaaat

SEQ ID NO: 199730 - DNA, 25 bp, Probe Sequence
ccttcattgtggcgctgagcggcac

SEQ ID NO: 199731 - DNA, 25 bp, Probe Sequence
ccttctctggccccaagtagagcca

SEQ ID NO: 199732 - DNA, 25 bp, Probe Sequence
ccttctgtggcctggacacaaccag

SEQ ID NO: 199733 - DNA, 25 bp, Probe Sequence
ccttctgtggcctggacacaaccag

SEQ ID NO: 199734 - DNA, 25 bp, Probe Sequence
ccttgggccagaagtaccagactag

SEQ ID NO: 199735 - DNA, 25 bp, Probe Sequence
ccatcagcttgcggaagtcaccaga

SEQ ID NO: 199736 - DNA, 25 bp, Probe Sequence
ccatcaggcctctggctgaggcagt

SEQ ID NO: 199737 - DNA, 25 bp, Probe Sequence
ccatgcaaccctacagcagcagagc

SEQ ID NO: 199738 - DNA, 25 bp, Probe Sequence
ccatcaactgttaccatcacagaaa

SEQ ID NO: 199739 - DNA, 25 bp, Probe Sequence
ccatcacagtactattcatcacagg

SEQ ID NO: 199740 - DNA, 25 bp, Probe Sequence
ccatatcctctccttccatgaggaa

SEQ ID NO: 199741 - DNA, 25 bp, Probe Sequence
ccatatcctctccttccatgaggaa

SEQ ID NO: 199742 - DNA, 25 bp, Probe Sequence
ccttctgcatctgtgatcatcacgg

SEQ ID NO: 199743 - DNA, 25 bp, Probe Sequence
ccttctcactgcagcaacaatggca

SEQ ID NO: 199744 - DNA, 25 bp, Probe Sequence
ccttctactgggcacaatacacgca

SEQ ID NO: 199745 - DNA, 25 bp, Probe Sequence
ccttcaacagtggcaacgtagagcg

SEQ ID NO: 199746 - DNA, 25 bp, Probe Sequence
ccttcacagagtcccaactcagagg

SEQ ID NO: 199747 - DNA, 25 bp, Probe Sequence
ccttgtcagagatgcacacaccttg

SEQ ID NO: 199748 - DNA, 25 bp, Probe Sequence
ccattgtccaaacacccattgtaaa

SEQ ID NO: 199749 - DNA, 25 bp, Probe Sequence
ccttggacaaggtccccaggatcgg

SEQ ID NO: 199750 - DNA, 25 bp, Probe Sequence
ccttgaaccggaacctgagtgacag

SEQ ID NO: 199751 - DNA, 25 bp, Probe Sequence
ccttcgttcggaaggcgcgtcatcg

SEQ ID NO: 199752 - DNA, 25 bp, Probe Sequence
ccttctgaactggtgcgcgtggttc

SEQ ID NO: 199753 - DNA, 25 bp, Probe Sequence
ccttctgagaggtggctgttggtca

SEQ ID NO: 199754 - DNA, 25 bp, Probe Sequence
ccttgctgggagtgaatgatggctt

SEQ ID NO: 199755 - DNA, 25 bp, Probe Sequence
ccttgctaggtgttctcagatttat

SEQ ID NO: 199756 - DNA, 25 bp, Probe Sequence
ccttgtttgaatttcaggtcattaa

SEQ ID NO: 199757 - DNA, 25 bp, Probe Sequence
ccttgttagcaagttcagtggcatt

SEQ ID NO: 199758 - DNA, 25 bp, Probe Sequence
ccttgctgctcctgtcatagtgagc

SEQ ID NO: 199759 - DNA, 25 bp, Probe Sequence
ccttctgctgcagggcaatatgggc

SEQ ID NO: 199760 - DNA, 25 bp, Probe Sequence
ccatggttgagcggttttggcagta

SEQ ID NO: 199761 - DNA, 25 bp, Probe Sequence
ccatcgttactgcggacggagctga

SEQ ID NO: 199762 - DNA, 25 bp, Probe Sequence
ccatctttattgctgtaatgtgtta

SEQ ID NO: 199763 - DNA, 25 bp, Probe Sequence
ccattttcatggctgtgtgttgtgt

SEQ ID NO: 199764 - DNA, 25 bp, Probe Sequence
ccttctgataggtagttgtggatgc

SEQ ID NO: 199765 - DNA, 25 bp, Probe Sequence
ccttctatggctgaggggagtcagg

SEQ ID NO: 199766 - DNA, 25 bp, Probe Sequence
ccttgccagtcagccgaggatgtag

SEQ ID NO: 199767 - DNA, 25 bp, Probe Sequence
ccttgctccgcagaagagagtaagt

SEQ ID NO: 199768 - DNA, 25 bp, Probe Sequence
ccttgcccatgcacaggatgaattt

SEQ ID NO: 199769 - DNA, 25 bp, Probe Sequence
ccttgacgtcaatggtgaagattac

SEQ ID NO: 199770 - DNA, 25 bp, Probe Sequence
ccatatgcacttgggggtgtagagt

SEQ ID NO: 199771 - DNA, 25 bp, Probe Sequence
ccttcatcctcgggtgtgctatgga

SEQ ID NO: 199772 - DNA, 25 bp, Probe Sequence
ccttcctgccctgtgttaggagata

SEQ ID NO: 199773 - DNA, 25 bp, Probe Sequence
gccttccccacgggattgtgggact

SEQ ID NO: 199774 - DNA, 25 bp, Probe Sequence
gccttccccacgggatcgtgggact

SEQ ID NO: 199775 - DNA, 25 bp, Probe Sequence
ccttcccacaggtgagcagggctcc

SEQ ID NO: 199776 - DNA, 25 bp, Probe Sequence
ccttcccacaggtgagcagggctcc

SEQ ID NO: 199777 - DNA, 25 bp, Probe Sequence
ccttcccacaggtgagcagggctcc

SEQ ID NO: 199778 - DNA, 25 bp, Probe Sequence
ccttccctaggagcatggtggcacg

SEQ ID NO: 199779 - DNA, 25 bp, Probe Sequence
ccttctgcctctagaccatttggca

SEQ ID NO: 199780 - DNA, 25 bp, Probe Sequence
ccatttgacctggacgttttcacgc

SEQ ID NO: 199781 - DNA, 25 bp, Probe Sequence
ccaggtcccaaacgattcttcctgc

SEQ ID NO: 199782 - DNA, 25 bp, Probe Sequence
ccaggtaggccaaggtgtcctacag

SEQ ID NO: 199783 - DNA, 25 bp, Probe Sequence
ccaggaaagcactgtttccctcatg

SEQ ID NO: 199784 - DNA, 25 bp, Probe Sequence
ccattgaaatcctgggtgtccgcaa

SEQ ID NO: 199785 - DNA, 25 bp, Probe Sequence
ccattattacttttggtatcccaga

SEQ ID NO: 199786 - DNA, 25 bp, Probe Sequence
ccttctgttcttttgtgctttcaaa

SEQ ID NO: 199787 - DNA, 25 bp, Probe Sequence
ccttctgttcttttgtgctttcaaa

SEQ ID NO: 199788 - DNA, 25 bp, Probe Sequence
gccttggattttatgtattccaacc

SEQ ID NO: 199789 - DNA, 25 bp, Probe Sequence
ccttggtgcttctgggatgttccac

SEQ ID NO: 199790 - DNA, 25 bp, Probe Sequence
ccttgagctgtacgggaagtctcac

SEQ ID NO: 199791 - DNA, 25 bp, Probe Sequence
ccttcctctatgggagcaacgcggc

SEQ ID NO: 199792 - DNA, 25 bp, Probe Sequence
ccttgccccatgggaagacgaggcc

SEQ ID NO: 199793 - DNA, 25 bp, Probe Sequence
ccattgccccatgtgaagtcactgt

SEQ ID NO: 199794 - DNA, 25 bp, Probe Sequence
ccattgccccatgtgaagtcactgt

SEQ ID NO: 199795 - DNA, 25 bp, Probe Sequence
ccatttgccaatgtagtctcactta

SEQ ID NO: 199796 - DNA, 25 bp, Probe Sequence
ccatggtgccaggttagttccttct

SEQ ID NO: 199797 - DNA, 25 bp, Probe Sequence
ccatgggccagtgtgatgacttttt

SEQ ID NO: 199798 - DNA, 25 bp, Probe Sequence
ccaggacaagtacataagactttaa

SEQ ID NO: 199799 - DNA, 25 bp, Probe Sequence
ccaggcccaatgctttaaccttaag

SEQ ID NO: 199800 - DNA, 25 bp, Probe Sequence
ccattgtccaatctgttgaaggtta

SEQ ID NO: 199801 - DNA, 25 bp, Probe Sequence
ccatttcactatcatattcatcggc

SEQ ID NO: 199802 - DNA, 25 bp, Probe Sequence
ccttccagcgagcatcattcggctg

SEQ ID NO: 199803 - DNA, 25 bp, Probe Sequence
ccttctggctgacaatcctggaaat

SEQ ID NO: 199804 - DNA, 25 bp, Probe Sequence
ccttcgactgcacggccaccatgaa

SEQ ID NO: 199805 - DNA, 25 bp, Probe Sequence
ccttctcatctccggtgaagctgaa

SEQ ID NO: 199806 - DNA, 25 bp, Probe Sequence
ccaggtcacagactgactgaggtga

SEQ ID NO: 199807 - DNA, 25 bp, Probe Sequence
ccattgtactctagcctgggtgaca

SEQ ID NO: 199808 - DNA, 25 bp, Probe Sequence
ccattgtactctagcctgggtgaca

SEQ ID NO: 199809 - DNA, 25 bp, Probe Sequence
ccatcactactcaagaccggaggca

SEQ ID NO: 199810 - DNA, 25 bp, Probe Sequence
ccatgactactacaccacggagttc

SEQ ID NO: 199811 - DNA, 25 bp, Probe Sequence
ccagaccctcaagccatctggtttt

SEQ ID NO: 199812 - DNA, 25 bp, Probe Sequence
ccatacccaaaggccctgtgttgtg

SEQ ID NO: 199813 - DNA, 25 bp, Probe Sequence
ccagaacaagagcgccctggactgc

SEQ ID NO: 199814 - DNA, 25 bp, Probe Sequence
ccagtactatcagaaccagggccag

SEQ ID NO: 199815 - DNA, 25 bp, Probe Sequence
ccagtactatcagaaccagggccag

SEQ ID NO: 199816 - DNA, 25 bp, Probe Sequence
ccatgaacttcagcaaacattggaa

SEQ ID NO: 199817 - DNA, 25 bp, Probe Sequence
ccatatatttcccagtcattttaat

SEQ ID NO: 199818 - DNA, 25 bp, Probe Sequence
ccttgcattctgcccattattgaaa

SEQ ID NO: 199819 - DNA, 25 bp, Probe Sequence
ccttcattctcacctagtatcaatg

SEQ ID NO: 199820 - DNA, 25 bp, Probe Sequence
ccatctcattgtgcttcgtatcagt

SEQ ID NO: 199821 - DNA, 25 bp, Probe Sequence
ccatcatgcaggctttcggacagtc

SEQ ID NO: 199822 - DNA, 25 bp, Probe Sequence
ccatcatgcagcctggttaggagca

SEQ ID NO: 199823 - DNA, 25 bp, Probe Sequence
ccatgactgcaagaatactggcagt

SEQ ID NO: 199824 - DNA, 25 bp, Probe Sequence
ccataaatagcgtatacgagccttc

SEQ ID NO: 199825 - DNA, 25 bp, Probe Sequence
ccatataaacaggtatccagcacga

SEQ ID NO: 199826 - DNA, 25 bp, Probe Sequence
ccatagaagacaccgggaccgatcc

SEQ ID NO: 199827 - DNA, 25 bp, Probe Sequence
ccatagaagacaccgggaccgatcc

SEQ ID NO: 199828 - DNA, 25 bp, Probe Sequence
ccatagaagacaccgggaccgatcc

SEQ ID NO: 199829 - DNA, 25 bp, Probe Sequence
ccataagaaaaccaggccaagattg

SEQ ID NO: 199830 - DNA, 25 bp, Probe Sequence
ccatcgtggaaagagctgcccaact

SEQ ID NO: 199831 - DNA, 25 bp, Probe Sequence
ccaggagcgagatccctccaaaatc

SEQ ID NO: 199832 - DNA, 25 bp, Probe Sequence
gcaagtgaggggttccccaactcct

SEQ ID NO: 199833 - DNA, 25 bp, Probe Sequence
gaaggaaggggtctgccgaccccag

SEQ ID NO: 199834 - DNA, 25 bp, Probe Sequence
gtcagggagattctggggggcccct

SEQ ID NO: 199835 - DNA, 25 bp, Probe Sequence
gcctagggaccagggtgaggacccg

SEQ ID NO: 199836 - DNA, 25 bp, Probe Sequence
gcctagggaccagggtgaggacccg

SEQ ID NO: 199837 - DNA, 25 bp, Probe Sequence
gcctagggaccagggtgaggacccg

SEQ ID NO: 199838 - DNA, 25 bp, Probe Sequence
gcctagggaccagggtgaggacccg

SEQ ID NO: 199839 - DNA, 25 bp, Probe Sequence
gccagtagtgacaggggcgaacgcc

SEQ ID NO: 199840 - DNA, 25 bp, Probe Sequence
ccatgtatgaggagggggaaatttg

SEQ ID NO: 199841 - DNA, 25 bp, Probe Sequence
ccttgacaagcttgttggggagttc

SEQ ID NO: 199842 - DNA, 25 bp, Probe Sequence
ccttgatttcttctctggaggcttg

SEQ ID NO: 199843 - DNA, 25 bp, Probe Sequence
ccttgattctcagttttgctggagg

SEQ ID NO: 199844 - DNA, 25 bp, Probe Sequence
ccttggtgcgacactgtgcattgca

SEQ ID NO: 199845 - DNA, 25 bp, Probe Sequence
ccataaacgcacactgtttcatctt

SEQ ID NO: 199846 - DNA, 25 bp, Probe Sequence
ccatgtacctcactttatttcagtt

SEQ ID NO: 199847 - DNA, 25 bp, Probe Sequence
ccattaccatcaatcctggttttga

SEQ ID NO: 199848 - DNA, 25 bp, Probe Sequence
ccatcgaagaaacctggtgtctggc

SEQ ID NO: 199849 - DNA, 25 bp, Probe Sequence
ccatcgaagaaacctggtgtctggc

SEQ ID NO: 199850 - DNA, 25 bp, Probe Sequence
ccatagaatatagtttgtgtgtcac

SEQ ID NO: 199851 - DNA, 25 bp, Probe Sequence
ccatagagactgtggtgctgtacac

SEQ ID NO: 199852 - DNA, 25 bp, Probe Sequence
ccatgactgtcgtactggatgtaac

SEQ ID NO: 199853 - DNA, 25 bp, Probe Sequence
ccatgagcttcgttctacgtgaacc

SEQ ID NO: 199854 - DNA, 25 bp, Probe Sequence
ccagacttttcagacaaaccctttg

SEQ ID NO: 199855 - DNA, 25 bp, Probe Sequence
ccaaattgggcctgtaaggccgttg

SEQ ID NO: 199856 - DNA, 25 bp, Probe Sequence
ccaggggtggccatgtaagtcccat

SEQ ID NO: 199857 - DNA, 25 bp, Probe Sequence
ccatgaaaggatgctttgggcccct

SEQ ID NO: 199858 - DNA, 25 bp, Probe Sequence
ccagcaaagcgctgttcgagggcct

SEQ ID NO: 199859 - DNA, 25 bp, Probe Sequence
ccagggtctgcaagttcaacggtca

SEQ ID NO: 199860 - DNA, 25 bp, Probe Sequence
ccaggatggcacagtctaccggaaa

SEQ ID NO: 199861 - DNA, 25 bp, Probe Sequence
ccatggggcaggcttagccccggaa

SEQ ID NO: 199862 - DNA, 25 bp, Probe Sequence
ccaggaggattacttcaacctggga

SEQ ID NO: 199863 - DNA, 25 bp, Probe Sequence
ccttggcagccaaggtcagaccggg

SEQ ID NO: 199864 - DNA, 25 bp, Probe Sequence
ccattgagcaggtagttccgcacgt

SEQ ID NO: 199865 - DNA, 25 bp, Probe Sequence
ccattggacagtctccctgatggac

SEQ ID NO: 199866 - DNA, 25 bp, Probe Sequence
ccattgggatgtttccagccgtgac

SEQ ID NO: 199867 - DNA, 25 bp, Probe Sequence
ccattgagtatctgtcactcctggg

SEQ ID NO: 199868 - DNA, 25 bp, Probe Sequence
ccttgagatccaggtacactcctgg

SEQ ID NO: 199869 - DNA, 25 bp, Probe Sequence
ccttggatccgggcacagttgtgag

SEQ ID NO: 199870 - DNA, 25 bp, Probe Sequence
ccattggtactgggcaggattggca

SEQ ID NO: 199871 - DNA, 25 bp, Probe Sequence
gccactgggacccgaggatttctgg

SEQ ID NO: 199872 - DNA, 25 bp, Probe Sequence
ccagtggcttccggaagttcctggt

SEQ ID NO: 199873 - DNA, 25 bp, Probe Sequence
ccaggctggaccccaagttcctggt

SEQ ID NO: 199874 - DNA, 25 bp, Probe Sequence
ccagagctggcctgaaaattactgg

SEQ ID NO: 199875 - DNA, 25 bp, Probe Sequence
ccaggtggtcagcgtgtttacggag

SEQ ID NO: 199876 - DNA, 25 bp, Probe Sequence
ccatggggactccggctttgggaga

SEQ ID NO: 199877 - DNA, 25 bp, Probe Sequence
ccatcgggtgcgaaactttggtggc

SEQ ID NO: 199878 - DNA, 25 bp, Probe Sequence
ccatcatgggtcgcatgcatgctcc

SEQ ID NO: 199879 - DNA, 25 bp, Probe Sequence
ccttgcagcgctcgcaagtggcgct

SEQ ID NO: 199880 - DNA, 25 bp, Probe Sequence
ccttctgcttctgagttgcacatta

SEQ ID NO: 199881 - DNA, 25 bp, Probe Sequence
ccttgcttgcttgagcttcagcgga

SEQ ID NO: 199882 - DNA, 25 bp, Probe Sequence
ccatccttttcagccaactggactg

SEQ ID NO: 199883 - DNA, 25 bp, Probe Sequence
ccatcctgtttctagcacaaaaatt

SEQ ID NO: 199884 - DNA, 25 bp, Probe Sequence
ccatactgagtgtcatcaacaatcc

SEQ ID NO: 199885 - DNA, 25 bp, Probe Sequence
ccatcctggatgaatctagaaggta

SEQ ID NO: 199886 - DNA, 25 bp, Probe Sequence
ccatctctgtgacttcctggagact

SEQ ID NO: 199887 - DNA, 25 bp, Probe Sequence
ccatcttcggttgctgttattgagg

SEQ ID NO: 199888 - DNA, 25 bp, Probe Sequence
ccatcccgtgttgcatgtgttgtta

SEQ ID NO: 199889 - DNA, 25 bp, Probe Sequence
ccataactctgtatcatgtgtattt

SEQ ID NO: 199890 - DNA, 25 bp, Probe Sequence
ccatacaccgtgatccttattgaga

SEQ ID NO: 199891 - DNA, 25 bp, Probe Sequence
ccataccttgtctaccggtgtgtga

SEQ ID NO: 199892 - DNA, 25 bp, Probe Sequence
ccttccttagcatctgtggtgtctt

SEQ ID NO: 199893 - DNA, 25 bp, Probe Sequence
ccattctctgtaccttggtggtgtt

SEQ ID NO: 199894 - DNA, 25 bp, Probe Sequence
ccttccttcgcactgagttcagtga

SEQ ID NO: 199895 - DNA, 25 bp, Probe Sequence
ccttcctttgatcatttcatgtgaa

SEQ ID NO: 199896 - DNA, 25 bp, Probe Sequence
ccataacttatgtcttttcactgaa

SEQ ID NO: 199897 - DNA, 25 bp, Probe Sequence
ccatatagcttgctttttattagca

SEQ ID NO: 199898 - DNA, 25 bp, Probe Sequence
ccattcacttttactgctttgtagt

SEQ ID NO: 199899 - DNA, 25 bp, Probe Sequence
ccatctcctgtattactgccgagtg

SEQ ID NO: 199900 - DNA, 25 bp, Probe Sequence
ccatcatccagctaatgtcatgtct

SEQ ID NO: 199901 - DNA, 25 bp, Probe Sequence
ccatcatgctgggggtcttggtcac

SEQ ID NO: 199902 - DNA, 25 bp, Probe Sequence
ccatcatggcgcaggatcaaggtga

SEQ ID NO: 199903 - DNA, 25 bp, Probe Sequence
ccatctagccaggaatctattgtgt

SEQ ID NO: 199904 - DNA, 25 bp, Probe Sequence
ccatcatcgcgccaaattttgcgct

SEQ ID NO: 199905 - DNA, 25 bp, Probe Sequence
ccatctgaatcgattttctgcctcc

SEQ ID NO: 199906 - DNA, 25 bp, Probe Sequence
ccattgcttcgtatttctgccaacg

SEQ ID NO: 199907 - DNA, 25 bp, Probe Sequence
ccattcccctgttttcatctagagg

SEQ ID NO: 199908 - DNA, 25 bp, Probe Sequence
ccttcccagtgtccttagcaggagt

SEQ ID NO: 199909 - DNA, 25 bp, Probe Sequence
ccttgatgccatatgccttggggag

SEQ ID NO: 199910 - DNA, 25 bp, Probe Sequence
ccttgacgctatggcggtaggcgtg

SEQ ID NO: 199911 - DNA, 25 bp, Probe Sequence
ccttgacgtcatgcggaatgccgcc

SEQ ID NO: 199912 - DNA, 25 bp, Probe Sequence
gccttcatgtgcgagacggcactcc

SEQ ID NO: 199913 - DNA, 25 bp, Probe Sequence
ccatcatcttcaaggcggcctatgg

SEQ ID NO: 199914 - DNA, 25 bp, Probe Sequence
ccattctgttcagtgcgatcctgat

SEQ ID NO: 199915 - DNA, 25 bp, Probe Sequence
ccattcttcgaattgatgatcttat

SEQ ID NO: 199916 - DNA, 25 bp, Probe Sequence
ccatgagttcaattattgtttagct

SEQ ID NO: 199917 - DNA, 25 bp, Probe Sequence
ccaattctcagttttgaactaccta

SEQ ID NO: 199918 - DNA, 25 bp, Probe Sequence
ccattcttagtcctgggaacaccca

SEQ ID NO: 199919 - DNA, 25 bp, Probe Sequence
ccatagtctgatccctgcagaaacc

SEQ ID NO: 199920 - DNA, 25 bp, Probe Sequence
ccattgccatatcggctcgcaaatc

SEQ ID NO: 199921 - DNA, 25 bp, Probe Sequence
ccattgctttgggtcacccactggg

SEQ ID NO: 199922 - DNA, 25 bp, Probe Sequence
ccattgttcagaagacctccctgtg

SEQ ID NO: 199923 - DNA, 25 bp, Probe Sequence
gccttttaggagtccaggccgggtg

SEQ ID NO: 199924 - DNA, 25 bp, Probe Sequence
ccactttaaggaagagtccacggtg

SEQ ID NO: 199925 - DNA, 25 bp, Probe Sequence
ccacgtttgaggtgcttccattggt

SEQ ID NO: 199926 - DNA, 25 bp, Probe Sequence
ccaggttggaggagcgtagcacatg

SEQ ID NO: 199927 - DNA, 25 bp, Probe Sequence
ccaggtggaaggcgcggacctgaca

SEQ ID NO: 199928 - DNA, 25 bp, Probe Sequence
ccaggggtgtagtgaggacccacgg

SEQ ID NO: 199929 - DNA, 25 bp, Probe Sequence
gccacagggttagaaccaacgaaga

SEQ ID NO: 199930 - DNA, 25 bp, Probe Sequence
ccagggagttatcaagcaaaagcaa

SEQ ID NO: 199931 - DNA, 25 bp, Probe Sequence
ccacgccgtctatgaccaaaggccc

SEQ ID NO: 199932 - DNA, 25 bp, Probe Sequence
ccatgctgccagttgttatctaaag

SEQ ID NO: 199933 - DNA, 25 bp, Probe Sequence
ccatctgactgaggttactctggta

SEQ ID NO: 199934 - DNA, 25 bp, Probe Sequence
ccttgactattttcagctctggaaa

SEQ ID NO: 199935 - DNA, 25 bp, Probe Sequence
ccattgagatttcgcatcctgcatg

SEQ ID NO: 199936 - DNA, 25 bp, Probe Sequence
ccatgctgagcatctgagctcgctg

SEQ ID NO: 199937 - DNA, 25 bp, Probe Sequence
ccatctgctgtattactgccgagtg

SEQ ID NO: 199938 - DNA, 25 bp, Probe Sequence
ccatctgctgtattactgccgagtg

SEQ ID NO: 199939 - DNA, 25 bp, Probe Sequence
ccattgtggagactgctgcggcaga

SEQ ID NO: 199940 - DNA, 25 bp, Probe Sequence
ccattcaggagaagcgcgaggcatg

SEQ ID NO: 199941 - DNA, 25 bp, Probe Sequence
ccatatcagggtccgcaagcaggtg

SEQ ID NO: 199942 - DNA, 25 bp, Probe Sequence
ccattgagggctcctatcagctgga

SEQ ID NO: 199943 - DNA, 25 bp, Probe Sequence
ccattcaatgccccgaagctggaaa

SEQ ID NO: 199944 - DNA, 25 bp, Probe Sequence
ccatgaccatgggcctaacttaaag

SEQ ID NO: 199945 - DNA, 25 bp, Probe Sequence
ccagaaaaccctaaaccacaagatg

SEQ ID NO: 199946 - DNA, 25 bp, Probe Sequence
ccaaaataccgctcaatccaacttt

SEQ ID NO: 199947 - DNA, 25 bp, Probe Sequence
ccaaaagtccgtcagaccacagtta

SEQ ID NO: 199948 - DNA, 25 bp, Probe Sequence
ccattagcactcatttaaccctgtt

SEQ ID NO: 199949 - DNA, 25 bp, Probe Sequence
ccattgaccgccaattgggccggtt

SEQ ID NO: 199950 - DNA, 25 bp, Probe Sequence
ccttgtctccctggcgagtgccagg

SEQ ID NO: 199951 - DNA, 25 bp, Probe Sequence
ccttgtctccactccagagaggagg

SEQ ID NO: 199952 - DNA, 25 bp, Probe Sequence
ccttgactcatgtcttgccaggatg

SEQ ID NO: 199953 - DNA, 25 bp, Probe Sequence
ccattgccatatttattcggtggaa

SEQ ID NO: 199954 - DNA, 25 bp, Probe Sequence
ccattctctgcagttttctgttggg

SEQ ID NO: 199955 - DNA, 25 bp, Probe Sequence
ccatttctccatacgcactggtatg

SEQ ID NO: 199956 - DNA, 25 bp, Probe Sequence
ccatttatactctactctcagtatg

SEQ ID NO: 199957 - DNA, 25 bp, Probe Sequence
ccatttcatacttcaactaattaaa

SEQ ID NO: 199958 - DNA, 25 bp, Probe Sequence
ccatttgctaccaaagtaaatcagt

SEQ ID NO: 199959 - DNA, 25 bp, Probe Sequence
ccatattgtcaaaatagtccaccag

SEQ ID NO: 199960 - DNA, 25 bp, Probe Sequence
ccttggctcataacatagtatcctc

SEQ ID NO: 199961 - DNA, 25 bp, Probe Sequence
ccattgccatataggctgggatcct

SEQ ID NO: 199962 - DNA, 25 bp, Probe Sequence
ccattgtcatatacccggttcagcc

SEQ ID NO: 199963 - DNA, 25 bp, Probe Sequence
ccattgctcagttcccatatgtgga

SEQ ID NO: 199964 - DNA, 25 bp, Probe Sequence
ccatagccaggagcgcatctcaatg

SEQ ID NO: 199965 - DNA, 25 bp, Probe Sequence
ccatagccgtgggcgtgctgatcaa

SEQ ID NO: 199966 - DNA, 25 bp, Probe Sequence
ccatcagggagtgagctggtaccac

SEQ ID NO: 199967 - DNA, 25 bp, Probe Sequence
ccatatgggcctgagttgtacccac

SEQ ID NO: 199968 - DNA, 25 bp, Probe Sequence
ccatctggtcctggattttttttag

SEQ ID NO: 199969 - DNA, 25 bp, Probe Sequence
ccttgacgtcatggagtttttttgg

SEQ ID NO: 199970 - DNA, 25 bp, Probe Sequence
ccttgacgtcatgggtggagtattt

SEQ ID NO: 199971 - DNA, 25 bp, Probe Sequence
ccattgacgtctatgggtgtttgtt

SEQ ID NO: 199972 - DNA, 25 bp, Probe Sequence
ccagatacgacagatgatgcttttc

SEQ ID NO: 199973 - DNA, 25 bp, Probe Sequence
ccataaaacaagaacatgctgctat

SEQ ID NO: 199974 - DNA, 25 bp, Probe Sequence
ccatcaaacctaaacctctctgaac

SEQ ID NO: 199975 - DNA, 25 bp, Probe Sequence
ccaaatatgactttacccttgactt

SEQ ID NO: 199976 - DNA, 25 bp, Probe Sequence
ccatcattggacaagtagcatccgt

SEQ ID NO: 199977 - DNA, 25 bp, Probe Sequence
ccatcttggcacagcgagcaggatc

SEQ ID NO: 199978 - DNA, 25 bp, Probe Sequence
ccatgctcatggttaggaagaatca

SEQ ID NO: 199979 - DNA, 25 bp, Probe Sequence
ccacctgagttacaaagacagaccc

SEQ ID NO: 199980 - DNA, 25 bp, Probe Sequence
gccaccaacttacaaaaacacttcg

SEQ ID NO: 199981 - DNA, 25 bp, Probe Sequence
ccaccagttaaagaacctcctacag

SEQ ID NO: 199982 - DNA, 25 bp, Probe Sequence
ccaacttgtaaatacaccacctcac

SEQ ID NO: 199983 - DNA, 25 bp, Probe Sequence
ccaaggttgcaatcttccaagtcca

SEQ ID NO: 199984 - DNA, 25 bp, Probe Sequence
ccttggtatccaacttaaatcccag

SEQ ID NO: 199985 - DNA, 25 bp, Probe Sequence
ccttggtcaccagcttatattgtca

SEQ ID NO: 199986 - DNA, 25 bp, Probe Sequence
ccttgatcctccggcaaatatggta

SEQ ID NO: 199987 - DNA, 25 bp, Probe Sequence
ccttgactttgctgaaatttgctga

SEQ ID NO: 199988 - DNA, 25 bp, Probe Sequence
ccttgacctccttgaacagttgcag

SEQ ID NO: 199989 - DNA, 25 bp, Probe Sequence
ccagtgaactcctgaaacctcaaac

SEQ ID NO: 199990 - DNA, 25 bp, Probe Sequence
ccatctgcaatatagtacaacctca

SEQ ID NO: 199991 - DNA, 25 bp, Probe Sequence
ccatctcaattaccatatatacacc

SEQ ID NO: 199992 - DNA, 25 bp, Probe Sequence
ccatctaaacagtcgtcatccaact

SEQ ID NO: 199993 - DNA, 25 bp, Probe Sequence
ccatcgagcacggcatcgtcaccaa

SEQ ID NO: 199994 - DNA, 25 bp, Probe Sequence
ccattagcccagacaggactaaggg

SEQ ID NO: 199995 - DNA, 25 bp, Probe Sequence
ccttggctcctttagcactataagg

SEQ ID NO: 199996 - DNA, 25 bp, Probe Sequence
ccttggagcccataacataacagag

SEQ ID NO: 199997 - DNA, 25 bp, Probe Sequence
ccttgctgcatccaaacttctaaag

SEQ ID NO: 199998 - DNA, 25 bp, Probe Sequence
ccattatcatccccactttaaagat

SEQ ID NO: 199999 - DNA, 25 bp, Probe Sequence
ccattacacagcctactgtaaaaat

SEQ ID NO: 200000 - DNA, 25 bp, Probe Sequence
ccattccacagccagatttgaccaa

SEQ ID NO: 200001 - DNA, 25 bp, Probe Sequence
ccattccaataggcttcatagtata

SEQ ID NO: 200002 - DNA, 25 bp, Probe Sequence
ccatgtctaagcaccatagaatata

SEQ ID NO: 200003 - DNA, 25 bp, Probe Sequence
ccattccccattgctcaacatataa

SEQ ID NO: 200004 - DNA, 25 bp, Probe Sequence
ccattacttcttgtcaacaaaaaat

SEQ ID NO: 200005 - DNA, 25 bp, Probe Sequence
ccatctccttctgctgatagagctc

SEQ ID NO: 200006 - DNA, 25 bp, Probe Sequence
ccatctgcctacggtgtcagtgttg

SEQ ID NO: 200007 - DNA, 25 bp, Probe Sequence
ccattgctcttggcttcatggtgtt

SEQ ID NO: 200008 - DNA, 25 bp, Probe Sequence
ccatcccttggtacatatatgcatt

SEQ ID NO: 200009 - DNA, 25 bp, Probe Sequence
ccatcacgctgtggtttgatgatgc

SEQ ID NO: 200010 - DNA, 25 bp, Probe Sequence
ccatgactctgtggataagcttgtc

SEQ ID NO: 200011 - DNA, 25 bp, Probe Sequence
ccatgtctctgagcattagatttct

SEQ ID NO: 200012 - DNA, 25 bp, Probe Sequence
ccatccataaccttgaggcttctct

SEQ ID NO: 200013 - DNA, 25 bp, Probe Sequence
ccatcctaagcctgtgtgtgtgtcc

SEQ ID NO: 200014 - DNA, 25 bp, Probe Sequence
ccagcagaaacctgggcaggctccc

SEQ ID NO: 200015 - DNA, 25 bp, Probe Sequence
ccatcgcaaccaggattgacaggcc

SEQ ID NO: 200016 - DNA, 25 bp, Probe Sequence
ccatcagggccatgagtgtcaccca

SEQ ID NO: 200017 - DNA, 25 bp, Probe Sequence
ccatccggagcatcagcattgcttc

SEQ ID NO: 200018 - DNA, 25 bp, Probe Sequence
ccatccggatcacggcaatgcggct

SEQ ID NO: 200019 - DNA, 25 bp, Probe Sequence
ccatctaagcattccacactgcagg

SEQ ID NO: 200020 - DNA, 25 bp, Probe Sequence
ccataaagctacaagcacgcactga

SEQ ID NO: 200021 - DNA, 25 bp, Probe Sequence
ccatgctagaccatgactccactgt

SEQ ID NO: 200022 - DNA, 25 bp, Probe Sequence
ccattatgacacagcagctcctttg

SEQ ID NO: 200023 - DNA, 25 bp, Probe Sequence
ccatttgcaagcagcctgttcatcg

SEQ ID NO: 200024 - DNA, 25 bp, Probe Sequence
ccattgtacagcatgctatctatag

SEQ ID NO: 200025 - DNA, 25 bp, Probe Sequence
ccttgcacaagcatcttctcagagg

SEQ ID NO: 200026 - DNA, 25 bp, Probe Sequence
ccttgcaaatgcgcactctatggac

SEQ ID NO: 200027 - DNA, 25 bp, Probe Sequence
ccattgcaaatgaccactgtgagtg

SEQ ID NO: 200028 - DNA, 25 bp, Probe Sequence
ccattgattcagctccttgcagctg

SEQ ID NO: 200029 - DNA, 25 bp, Probe Sequence
ccattgattctgcacttctcattgc

SEQ ID NO: 200030 - DNA, 25 bp, Probe Sequence
ccattgtcagtatttgtgcatattg

SEQ ID NO: 200031 - DNA, 25 bp, Probe Sequence
ccttggcagctcctagccatagagc

SEQ ID NO: 200032 - DNA, 25 bp, Probe Sequence
ccttggtctgctccatggagggcac

SEQ ID NO: 200033 - DNA, 25 bp, Probe Sequence
ccttggcttcagccttgacaggcac

SEQ ID NO: 200034 - DNA, 25 bp, Probe Sequence
ccttggctgtctgttaagctcatct

SEQ ID NO: 200035 - DNA, 25 bp, Probe Sequence
ccattgtggcttgttttcatctcaa

SEQ ID NO: 200036 - DNA, 25 bp, Probe Sequence
ccttgtggtgatcttttccaccagc

SEQ ID NO: 200037 - DNA, 25 bp, Probe Sequence
ccttgtgattatcttctccacatct

SEQ ID NO: 200038 - DNA, 25 bp, Probe Sequence
ccatatgctgctatgttggctgccc

SEQ ID NO: 200039 - DNA, 25 bp, Probe Sequence
ccatgtgtgctgtgtgtgtccaggc

SEQ ID NO: 200040 - DNA, 25 bp, Probe Sequence
ccatgtgtgctgtgtgtgtccaggc

SEQ ID NO: 200041 - DNA, 25 bp, Probe Sequence
ccatctggctctggcaagcccaagg

SEQ ID NO: 200042 - DNA, 25 bp, Probe Sequence
ccattctgcacttaggctccaagaa

SEQ ID NO: 200043 - DNA, 25 bp, Probe Sequence
ccatttgatgtatgcggtcagagaa

SEQ ID NO: 200044 - DNA, 25 bp, Probe Sequence
ccatttgaggttcttcagatagatc

SEQ ID NO: 200045 - DNA, 25 bp, Probe Sequence
ccattgtgatgcgttcttgccagta

SEQ ID NO: 200046 - DNA, 25 bp, Probe Sequence
ccatgatgatgcggttttgacagta

SEQ ID NO: 200047 - DNA, 25 bp, Probe Sequence
ccatgccatatcatgtgtgtacgct

SEQ ID NO: 200048 - DNA, 25 bp, Probe Sequence
ccatgccatggcggattctgagcgc

SEQ ID NO: 200049 - DNA, 25 bp, Probe Sequence
ccatgttgagctacttcaagccgct

SEQ ID NO: 200050 - DNA, 25 bp, Probe Sequence
ccttgatggctcatgtcaaacgtaa

SEQ ID NO: 200051 - DNA, 25 bp, Probe Sequence
ccattatgggcacgtcagaactgac

SEQ ID NO: 200052 - DNA, 25 bp, Probe Sequence
ccattgaaggggtctgaaggcagtg

SEQ ID NO: 200053 - DNA, 25 bp, Probe Sequence
ccaggggaattgttgcaatggagtc

SEQ ID NO: 200054 - DNA, 25 bp, Probe Sequence
ccaggcaccttttggttatggttat

SEQ ID NO: 200055 - DNA, 25 bp, Probe Sequence
ccatgacccctatttgtctgaggtt

SEQ ID NO: 200056 - DNA, 25 bp, Probe Sequence
ccattcccagcacaggctctgtgga

SEQ ID NO: 200057 - DNA, 25 bp, Probe Sequence
ccacctcccatgtggctttagacac

SEQ ID NO: 200058 - DNA, 25 bp, Probe Sequence
ccatccctccagtggttgttaggat

SEQ ID NO: 200059 - DNA, 25 bp, Probe Sequence
ccatccttaatctcagttgtttgct

SEQ ID NO: 200060 - DNA, 25 bp, Probe Sequence
ccatcactaccaaccagggtttcaa

SEQ ID NO: 200061 - DNA, 25 bp, Probe Sequence
ccatagtacccattaggacttccat

SEQ ID NO: 200062 - DNA, 25 bp, Probe Sequence
ccttgtacagaatcgaactctgcac

SEQ ID NO: 200063 - DNA, 25 bp, Probe Sequence
ccatgtcaacatagtccagaacctg

SEQ ID NO: 200064 - DNA, 25 bp, Probe Sequence
ccattatccattcccaagatgcctg

SEQ ID NO: 200065 - DNA, 25 bp, Probe Sequence
ccatcttaattggcataaggacata

SEQ ID NO: 200066 - DNA, 25 bp, Probe Sequence
ccatcttgttctgcaaggtgacccc

SEQ ID NO: 200067 - DNA, 25 bp, Probe Sequence
ccatcttgtctttctgagggtagcc

SEQ ID NO: 200068 - DNA, 25 bp, Probe Sequence
ccattcttgtcctgaagttcagcac

SEQ ID NO: 200069 - DNA, 25 bp, Probe Sequence
ccatatgtctgtcattaagtctcca

SEQ ID NO: 200070 - DNA, 25 bp, Probe Sequence
ccatgcaaatgtcttccaggtccaa

SEQ ID NO: 200071 - DNA, 25 bp, Probe Sequence
ccatgctgcaatttcttcctgagat

SEQ ID NO: 200072 - DNA, 25 bp, Probe Sequence
ccatctgaaggtcaccaacactgaa

SEQ ID NO: 200073 - DNA, 25 bp, Probe Sequence
ccatctcaaaggcagaagcgaatgc

SEQ ID NO: 200074 - DNA, 25 bp, Probe Sequence
ccattgcagatgcgcagacatggcg

SEQ ID NO: 200075 - DNA, 25 bp, Probe Sequence
ccattctgtgaggaagtggggtatg

SEQ ID NO: 200076 - DNA, 25 bp, Probe Sequence
ccattattagcctggggtgtggtgg

SEQ ID NO: 200077 - DNA, 25 bp, Probe Sequence
ccattggtcggctggacgaggggag

SEQ ID NO: 200078 - DNA, 25 bp, Probe Sequence
ccattttggggtgacgggagacagt

SEQ ID NO: 200079 - DNA, 25 bp, Probe Sequence
ccaccaaggggtactgcaggggaag

SEQ ID NO: 200080 - DNA, 25 bp, Probe Sequence
ccaccgggtggtaagcacacaggcc

SEQ ID NO: 200081 - DNA, 25 bp, Probe Sequence
ccatcccggaaggatcagcacaggg

SEQ ID NO: 200082 - DNA, 25 bp, Probe Sequence
ccatcgcccagagggacgacggcgt

SEQ ID NO: 200083 - DNA, 25 bp, Probe Sequence
ccatcaggtgagtgctcctgaccgc

SEQ ID NO: 200084 - DNA, 25 bp, Probe Sequence
ccatcaggactttccctgacagctg

SEQ ID NO: 200085 - DNA, 25 bp, Probe Sequence
ccatgggactgttacctacacatgc

SEQ ID NO: 200086 - DNA, 25 bp, Probe Sequence
ccatcagccaagaaaccatccactg

SEQ ID NO: 200087 - DNA, 25 bp, Probe Sequence
ccatcatccaagaccatccattatt

SEQ ID NO: 200088 - DNA, 25 bp, Probe Sequence
ccatgcaatcacaccatgccatgtt

SEQ ID NO: 200089 - DNA, 25 bp, Probe Sequence
ccatcaatgcagagcactccaggct

SEQ ID NO: 200090 - DNA, 25 bp, Probe Sequence
ccatgtacatgcagtgcccagtcat

SEQ ID NO: 200091 - DNA, 25 bp, Probe Sequence
ccattgtatgcatgtgccacatttc

SEQ ID NO: 200092 - DNA, 25 bp, Probe Sequence
ccatgtaatcaccagaatgcatttc

SEQ ID NO: 200093 - DNA, 25 bp, Probe Sequence
ccatgtattcccttatcttttactt

SEQ ID NO: 200094 - DNA, 25 bp, Probe Sequence
ccatgaattacttcctcacttttgc

SEQ ID NO: 200095 - DNA, 25 bp, Probe Sequence
ccatagtttcattctctaccctatg

SEQ ID NO: 200096 - DNA, 25 bp, Probe Sequence
ccatttctggagttcttccgccagg

SEQ ID NO: 200097 - DNA, 25 bp, Probe Sequence
ccatttcggcaacttccagtgcaag

SEQ ID NO: 200098 - DNA, 25 bp, Probe Sequence
ccatttctgcagaacttactgtaca

SEQ ID NO: 200099 - DNA, 25 bp, Probe Sequence
ccattcttcagtgcctagctgtaca

SEQ ID NO: 200100 - DNA, 25 bp, Probe Sequence
ccactgcttcatttgtctagcctta

SEQ ID NO: 200101 - DNA, 25 bp, Probe Sequence
ccatctctacttagattaccaaatt

SEQ ID NO: 200102 - DNA, 25 bp, Probe Sequence
ccatcttccagtaattcgccaaaat

SEQ ID NO: 200103 - DNA, 25 bp, Probe Sequence
ccatcttccagtaattcgccaaaat

SEQ ID NO: 200104 - DNA, 25 bp, Probe Sequence
ccatctcctcgtacatagacacaga

SEQ ID NO: 200105 - DNA, 25 bp, Probe Sequence
ccattcttgcttagacagtcagcat

SEQ ID NO: 200106 - DNA, 25 bp, Probe Sequence
ccattccgcttcaaggcagagcaaa

SEQ ID NO: 200107 - DNA, 25 bp, Probe Sequence
ccattcaactctgtgacacagcaca

SEQ ID NO: 200108 - DNA, 25 bp, Probe Sequence
ccattcaacactgaactgcaactgt

SEQ ID NO: 200109 - DNA, 25 bp, Probe Sequence
ccaccattcctggaaaccacagtcc

SEQ ID NO: 200110 - DNA, 25 bp, Probe Sequence
ccatccagcttctagaagacccatt

SEQ ID NO: 200111 - DNA, 25 bp, Probe Sequence
ccatcctttctacagcaacatcagt

SEQ ID NO: 200112 - DNA, 25 bp, Probe Sequence
ccatttacctgactaaacagatcat

SEQ ID NO: 200113 - DNA, 25 bp, Probe Sequence
ccattatatcctcatccaacaggct

SEQ ID NO: 200114 - DNA, 25 bp, Probe Sequence
ccagtatctataccagctaaaggct

SEQ ID NO: 200115 - DNA, 25 bp, Probe Sequence
ccagtttgtaccttttagcctggct

SEQ ID NO: 200116 - DNA, 25 bp, Probe Sequence
ccattattctagggtcttactcttt

SEQ ID NO: 200117 - DNA, 25 bp, Probe Sequence
ccatctctttgtttttgtactttat

SEQ ID NO: 200118 - DNA, 25 bp, Probe Sequence
ccatgtaatggtaacttggacttta

SEQ ID NO: 200119 - DNA, 25 bp, Probe Sequence
ccatgtaatggtaacttggacttta

SEQ ID NO: 200120 - DNA, 25 bp, Probe Sequence
ccattacagcctaaataaagcttgg

SEQ ID NO: 200121 - DNA, 25 bp, Probe Sequence
ccatttgtcctttcagaaggccgtg

SEQ ID NO: 200122 - DNA, 25 bp, Probe Sequence
ccatcttgtccttgggtcagtggga

SEQ ID NO: 200123 - DNA, 25 bp, Probe Sequence
ccatgctggtcactagggtgctgtg

SEQ ID NO: 200124 - DNA, 25 bp, Probe Sequence
ccatctggtctaaggtggctgcttc

SEQ ID NO: 200125 - DNA, 25 bp, Probe Sequence
ccactgcagtgcagacgggcgatcc

SEQ ID NO: 200126 - DNA, 25 bp, Probe Sequence
ccattgcactcaagcctgggcaaca

SEQ ID NO: 200127 - DNA, 25 bp, Probe Sequence
ccatcggatgaccctggtcttcaat

SEQ ID NO: 200128 - DNA, 25 bp, Probe Sequence
ccatcttggggctggatctccagaa

SEQ ID NO: 200129 - DNA, 25 bp, Probe Sequence
ccatcctgcgggaggtcagcgagga

SEQ ID NO: 200130 - DNA, 25 bp, Probe Sequence
ccattcctgtggcgggagctgcagg

SEQ ID NO: 200131 - DNA, 25 bp, Probe Sequence
ccattccctgctcagaggaacagtg

SEQ ID NO: 200132 - DNA, 25 bp, Probe Sequence
ccattccacatccggaggagaagaa

SEQ ID NO: 200133 - DNA, 25 bp, Probe Sequence
ccattgccaacatccagagcgacat

SEQ ID NO: 200134 - DNA, 25 bp, Probe Sequence
ccataggaacacttctgtctacatg

SEQ ID NO: 200135 - DNA, 25 bp, Probe Sequence
ccattggaacccctgttccaggctt

SEQ ID NO: 200136 - DNA, 25 bp, Probe Sequence
ccattggcaatgagcggttccggtg

SEQ ID NO: 200137 - DNA, 25 bp, Probe Sequence
ccattggcaatgagcggttccgctg

SEQ ID NO: 200138 - DNA, 25 bp, Probe Sequence
ccatctgtcctgtgtggaatccagt

SEQ ID NO: 200139 - DNA, 25 bp, Probe Sequence
ccatctgtcctgtgtggaatccagt

SEQ ID NO: 200140 - DNA, 25 bp, Probe Sequence
ccatcttccaggagcgagatccctc

SEQ ID NO: 200141 - DNA, 25 bp, Probe Sequence
ccatttgtgaggaggacttctcgcc

SEQ ID NO: 200142 - DNA, 25 bp, Probe Sequence
gcacgttgggtggggatttcctgtc

SEQ ID NO: 200143 - DNA, 25 bp, Probe Sequence
gaagattggggggtatgtccccctg

SEQ ID NO: 200144 - DNA, 25 bp, Probe Sequence
gaagattggggaacacaccccctca

SEQ ID NO: 200145 - DNA, 25 bp, Probe Sequence
gaagattggggaacacaccccctca

SEQ ID NO: 200146 - DNA, 25 bp, Probe Sequence
gaagattggggaacacaccccctca

SEQ ID NO: 200147 - DNA, 25 bp, Probe Sequence
gcaaattcggtaaaacccatcagtc

SEQ ID NO: 200148 - DNA, 25 bp, Probe Sequence
gcaaggttgggacaaagccatctgg

SEQ ID NO: 200149 - DNA, 25 bp, Probe Sequence
ccagagggggaaaagagcccatgga

SEQ ID NO: 200150 - DNA, 25 bp, Probe Sequence
ccatgagggcctgaacccgacaggg

SEQ ID NO: 200151 - DNA, 25 bp, Probe Sequence
ccatggggcttggataccggttttg

SEQ ID NO: 200152 - DNA, 25 bp, Probe Sequence
ccatgcgggggtaagtccctttctg

SEQ ID NO: 200153 - DNA, 25 bp, Probe Sequence
ccatcatttgggggagtcttttgtt

SEQ ID NO: 200154 - DNA, 25 bp, Probe Sequence
ccatttatggagggctctctttctg

SEQ ID NO: 200155 - DNA, 25 bp, Probe Sequence
ccatattagcagcggttattcggtg

SEQ ID NO: 200156 - DNA, 25 bp, Probe Sequence
gccatattagcagcggttattcggt

SEQ ID NO: 200157 - DNA, 25 bp, Probe Sequence
gccaatgtacatggtggactatgcc

SEQ ID NO: 200158 - DNA, 25 bp, Probe Sequence
ccattgctgagctgggcatctatcc

SEQ ID NO: 200159 - DNA, 25 bp, Probe Sequence
ccattgaggaattggatatcatcta

SEQ ID NO: 200160 - DNA, 25 bp, Probe Sequence
ccatcataggaggcttcattcactg

SEQ ID NO: 200161 - DNA, 25 bp, Probe Sequence
ccatctggcgaggtcatttactgag

SEQ ID NO: 200162 - DNA, 25 bp, Probe Sequence
ccatctgggcacatgcttcttggag

SEQ ID NO: 200163 - DNA, 25 bp, Probe Sequence
ccattgctggctatgtgtttagaga

SEQ ID NO: 200164 - DNA, 25 bp, Probe Sequence
ccatatgtgaccatggatataaaat

SEQ ID NO: 200165 - DNA, 25 bp, Probe Sequence
ccagcagtaccatgcctcagaaaat

SEQ ID NO: 200166 - DNA, 25 bp, Probe Sequence
ccagcagtaccatgcctcagaaaat

SEQ ID NO: 200167 - DNA, 25 bp, Probe Sequence
ccatcagctgcggcaagcctaggga

SEQ ID NO: 200168 - DNA, 25 bp, Probe Sequence
ccatcctggctaacacggtgaaacc

SEQ ID NO: 200169 - DNA, 25 bp, Probe Sequence
ccatcctggctaacacggtgaaacc

SEQ ID NO: 200170 - DNA, 25 bp, Probe Sequence
ccatctcagttacgacgggacacac

SEQ ID NO: 200171 - DNA, 25 bp, Probe Sequence
ccatgccgtctacagggatgacctg

SEQ ID NO: 200172 - DNA, 25 bp, Probe Sequence
ccatgacgtgaccacggcgtggggc

SEQ ID NO: 200173 - DNA, 25 bp, Probe Sequence
ccatgccgcttcactggcagtgaga

SEQ ID NO: 200174 - DNA, 25 bp, Probe Sequence
ccatccaggtgcaatgctccgatta

SEQ ID NO: 200175 - DNA, 25 bp, Probe Sequence
ccattatgacactactccagatata

SEQ ID NO: 200176 - DNA, 25 bp, Probe Sequence
ccattctccagtgtccatgcaatga

SEQ ID NO: 200177 - DNA, 25 bp, Probe Sequence
ccatgtctgctcagcttctgataag

SEQ ID NO: 200178 - DNA, 25 bp, Probe Sequence
ccatcatctcttatctctatacagg

SEQ ID NO: 200179 - DNA, 25 bp, Probe Sequence
ccatagatcattcctttcaactgga

SEQ ID NO: 200180 - DNA, 25 bp, Probe Sequence
ccataactgatcctttcaagcattt

SEQ ID NO: 200181 - DNA, 25 bp, Probe Sequence
ccatcaacccctgtaagtctgtgtg

SEQ ID NO: 200182 - DNA, 25 bp, Probe Sequence
ccatcaaccgccagatcaacctgga

SEQ ID NO: 200183 - DNA, 25 bp, Probe Sequence
ccatcaggcccccaacagattggga

SEQ ID NO: 200184 - DNA, 25 bp, Probe Sequence
ccatagccccgctgacagagatgag

SEQ ID NO: 200185 - DNA, 25 bp, Probe Sequence
ccatagacactggctgtgaccgggc

SEQ ID NO: 200186 - DNA, 25 bp, Probe Sequence
ccataaccagtcacacgggagcgtt

SEQ ID NO: 200187 - DNA, 25 bp, Probe Sequence
ccagaacacagtgcccggagtcagg

SEQ ID NO: 200188 - DNA, 25 bp, Probe Sequence
ccagatcaaagcggccaaggacgga

SEQ ID NO: 200189 - DNA, 25 bp, Probe Sequence
ccagatgcctgggtgcaaagaacgg

SEQ ID NO: 200190 - DNA, 25 bp, Probe Sequence
ccatgaagatatctggaacattcgt

SEQ ID NO: 200191 - DNA, 25 bp, Probe Sequence
ccatcactggatctgctgccagcat

SEQ ID NO: 200192 - DNA, 25 bp, Probe Sequence
ccatcactggatctgctgccagcat

SEQ ID NO: 200193 - DNA, 25 bp, Probe Sequence
ccatcaatcgatttcccagttatga

SEQ ID NO: 200194 - DNA, 25 bp, Probe Sequence
ccataaagatacatgcacgtgaatg

SEQ ID NO: 200195 - DNA, 25 bp, Probe Sequence
gccattaaatggaaacctgaaggcc

SEQ ID NO: 200196 - DNA, 25 bp, Probe Sequence
ccattaaattctaacccagggcatg

SEQ ID NO: 200197 - DNA, 25 bp, Probe Sequence
ccatttgttttcaacctcatgtaat

SEQ ID NO: 200198 - DNA, 25 bp, Probe Sequence
ccattcttgtttaagccttccactg

SEQ ID NO: 200199 - DNA, 25 bp, Probe Sequence
ccatctctttttatattatgccgct

SEQ ID NO: 200200 - DNA, 25 bp, Probe Sequence
ccatttctacctgccatgtatcggc

SEQ ID NO: 200201 - DNA, 25 bp, Probe Sequence
ccattattgaccgccaggcttgtga

SEQ ID NO: 200202 - DNA, 25 bp, Probe Sequence
ccatttgggtcagcctggctggtcc

SEQ ID NO: 200203 - DNA, 25 bp, Probe Sequence
ccatggtgggccgcttgaatgagct

SEQ ID NO: 200204 - DNA, 25 bp, Probe Sequence
ccatggatgggctgcttttagctcc

SEQ ID NO: 200205 - DNA, 25 bp, Probe Sequence
ccatgtgacaatggagatatttcct

SEQ ID NO: 200206 - DNA, 25 bp, Probe Sequence
ccaggagcactggtacacttcctac

SEQ ID NO: 200207 - DNA, 25 bp, Probe Sequence
ccaggcacacgagacacttggtttc

SEQ ID NO: 200208 - DNA, 25 bp, Probe Sequence
ccaggagtcgctgatcactgggacc

SEQ ID NO: 200209 - DNA, 25 bp, Probe Sequence
ccaggagtcgctgatcactgggacc

SEQ ID NO: 200210 - DNA, 25 bp, Probe Sequence
ccaggaatggaaaccatagagccca

SEQ ID NO: 200211 - DNA, 25 bp, Probe Sequence
ccagagcattacaacagccatcgag

SEQ ID NO: 200212 - DNA, 25 bp, Probe Sequence
ccagagcattacaacagccatcgag

SEQ ID NO: 200213 - DNA, 25 bp, Probe Sequence
ccagagcattacaacagccatcgag

SEQ ID NO: 200214 - DNA, 25 bp, Probe Sequence
ccatgatcactaaagagttgctgct

SEQ ID NO: 200215 - DNA, 25 bp, Probe Sequence
ccatcagactaacagctgatctctc

SEQ ID NO: 200216 - DNA, 25 bp, Probe Sequence
ccatcagagcatcagcctagtcctt

SEQ ID NO: 200217 - DNA, 25 bp, Probe Sequence
ccacaaatttgaggagcttaatcga

SEQ ID NO: 200218 - DNA, 25 bp, Probe Sequence
ccaggagtttggcatcttagacaag

SEQ ID NO: 200219 - DNA, 25 bp, Probe Sequence
ccagatcatgtttgagaccttcaac

SEQ ID NO: 200220 - DNA, 25 bp, Probe Sequence
ccagatcatgtttgagaccttcaac

SEQ ID NO: 200221 - DNA, 25 bp, Probe Sequence
ccatgattgctgctggacttgttga

SEQ ID NO: 200222 - DNA, 25 bp, Probe Sequence
ccatgattgtcagggaggtgccagt

SEQ ID NO: 200223 - DNA, 25 bp, Probe Sequence
ccatgaagtcaccgggatgaaccta

SEQ ID NO: 200224 - DNA, 25 bp, Probe Sequence
ccataagcacaactgcaagcaaacc

SEQ ID NO: 200225 - DNA, 25 bp, Probe Sequence
ccatcaacaagaatgctcgcgccac

SEQ ID NO: 200226 - DNA, 25 bp, Probe Sequence
ccatgagcagcaaagtctctcgcga

SEQ ID NO: 200227 - DNA, 25 bp, Probe Sequence
ccatgagccatggagtccgggatcc

SEQ ID NO: 200228 - DNA, 25 bp, Probe Sequence
ccatgaccctgattacctggatctc

SEQ ID NO: 200229 - DNA, 25 bp, Probe Sequence
ccatctttctagggcctggatctgc

SEQ ID NO: 200230 - DNA, 25 bp, Probe Sequence
ccatctgggtggtgccagctgatct

SEQ ID NO: 200231 - DNA, 25 bp, Probe Sequence
ccatgaagtgggtgccccactcact

SEQ ID NO: 200232 - DNA, 25 bp, Probe Sequence
ccatgaaagccgtccgcaacaatcg

SEQ ID NO: 200233 - DNA, 25 bp, Probe Sequence
ccatcaacagacaagctagaaaagg

SEQ ID NO: 200234 - DNA, 25 bp, Probe Sequence
ccatcccaacacctcgaaagaggat

SEQ ID NO: 200235 - DNA, 25 bp, Probe Sequence
ccatccacctcactgtggacacaag

SEQ ID NO: 200236 - DNA, 25 bp, Probe Sequence
ccatgccatcctgcgtctggacctg

SEQ ID NO: 200237 - DNA, 25 bp, Probe Sequence
ccatggcacctgtgattgtactctt

SEQ ID NO: 200238 - DNA, 25 bp, Probe Sequence
ccattcacctgggagtacactggtg

SEQ ID NO: 200239 - DNA, 25 bp, Probe Sequence
ccattcaccggggccaagtggtgta

SEQ ID NO: 200240 - DNA, 25 bp, Probe Sequence
ccatttcagggtccgcaagcaggtg

SEQ ID NO: 200241 - DNA, 25 bp, Probe Sequence
ccattaacgaggtccctgcaggtgg

SEQ ID NO: 200242 - DNA, 25 bp, Probe Sequence
ccaggaataggacccccagtgagga

SEQ ID NO: 200243 - DNA, 25 bp, Probe Sequence
ccatgatcttggcgtccgccagtga

SEQ ID NO: 200244 - DNA, 25 bp, Probe Sequence
ccatgtctaccctacctgtaggaac

SEQ ID NO: 200245 - DNA, 25 bp, Probe Sequence
ccatcttagtcttaccttgagggaa

SEQ ID NO: 200246 - DNA, 25 bp, Probe Sequence
ccatcttcttcctacctgatgaggg

SEQ ID NO: 200247 - DNA, 25 bp, Probe Sequence
ccatttcccatctcagcttcaaggg

SEQ ID NO: 200248 - DNA, 25 bp, Probe Sequence
ccatttctccacactggtacagtag

SEQ ID NO: 200249 - DNA, 25 bp, Probe Sequence
ccatccttcctaacgagtcacggag

SEQ ID NO: 200250 - DNA, 25 bp, Probe Sequence
ccatccccctgaagtggaagcggca

SEQ ID NO: 200251 - DNA, 25 bp, Probe Sequence
ccatcccacgtctacgtgaaccagg

SEQ ID NO: 200252 - DNA, 25 bp, Probe Sequence
ccatctctacgtgaagataccgaag

SEQ ID NO: 200253 - DNA, 25 bp, Probe Sequence
ccatctctaccaaaaatacaaaaat

SEQ ID NO: 200254 - DNA, 25 bp, Probe Sequence
ccatcctgacctcctattaaagaaa

SEQ ID NO: 200255 - DNA, 25 bp, Probe Sequence
ccatagggctctgcttttaaagata

SEQ ID NO: 200256 - DNA, 25 bp, Probe Sequence
ccatgaatcgcttctcttttgaaac

SEQ ID NO: 200257 - DNA, 25 bp, Probe Sequence
ccagactgcagattcatgctttcaa

SEQ ID NO: 200258 - DNA, 25 bp, Probe Sequence
ccatcactcagcattgcacttagat

SEQ ID NO: 200259 - DNA, 25 bp, Probe Sequence
ccatctgccagcatgttcaaagatt

SEQ ID NO: 200260 - DNA, 25 bp, Probe Sequence
ccatctcacctgtttcagatcagtt

SEQ ID NO: 200261 - DNA, 25 bp, Probe Sequence
ccatctacagagtttagcacatttg

SEQ ID NO: 200262 - DNA, 25 bp, Probe Sequence
ccatctacaacatggcctcagtcga

SEQ ID NO: 200263 - DNA, 25 bp, Probe Sequence
ccatcccacaggagcctcagtggag

SEQ ID NO: 200264 - DNA, 25 bp, Probe Sequence
ccatttcagcatgtggctcgcgtgg

SEQ ID NO: 200265 - DNA, 25 bp, Probe Sequence
ccatgtgccaagttgcagggtgggg

SEQ ID NO: 200266 - DNA, 25 bp, Probe Sequence
ccatcacagatgctgtgaaggtcgt

SEQ ID NO: 200267 - DNA, 25 bp, Probe Sequence
ccatcttgcaaactaaggtctgcta

SEQ ID NO: 200268 - DNA, 25 bp, Probe Sequence
ccatctcccacactaacttgtgcat

SEQ ID NO: 200269 - DNA, 25 bp, Probe Sequence
ccatctcccacactaacttgtgcat

SEQ ID NO: 200270 - DNA, 25 bp, Probe Sequence
ccatctcccacactaacttgtgcat

SEQ ID NO: 200271 - DNA, 25 bp, Probe Sequence
ccatcattctcagcaaactatcgca

SEQ ID NO: 200272 - DNA, 25 bp, Probe Sequence
ccatcacttacctaactgacagccc

SEQ ID NO: 200273 - DNA, 25 bp, Probe Sequence
ccatcacttcagccatgcaaggaga

SEQ ID NO: 200274 - DNA, 25 bp, Probe Sequence
ccatcaccatcacatgagcaagatg

SEQ ID NO: 200275 - DNA, 25 bp, Probe Sequence
ccatcatcgtgcctggcatgaagga

SEQ ID NO: 200276 - DNA, 25 bp, Probe Sequence
ccatcattgtgcttggctttgcaac

SEQ ID NO: 200277 - DNA, 25 bp, Probe Sequence
ccatttgtgctctgcttggacagca

SEQ ID NO: 200278 - DNA, 25 bp, Probe Sequence
ccatttgtgctctgcttggacagca

SEQ ID NO: 200279 - DNA, 25 bp, Probe Sequence
ccatttcattgctcgctgcgaaaga

SEQ ID NO: 200280 - DNA, 25 bp, Probe Sequence
ccatcttattgctgacttcaaaggg

SEQ ID NO: 200281 - DNA, 25 bp, Probe Sequence
ccacttttgagtgttctcaagattg

SEQ ID NO: 200282 - DNA, 25 bp, Probe Sequence
ccattttatactttctctctgtgtt

SEQ ID NO: 200283 - DNA, 25 bp, Probe Sequence
ccatttgagatgccttattcctatt

SEQ ID NO: 200284 - DNA, 25 bp, Probe Sequence
ccatttctacctaagtcagctttca

SEQ ID NO: 200285 - DNA, 25 bp, Probe Sequence
ccatttcaacctagagtctgacttg

SEQ ID NO: 200286 - DNA, 25 bp, Probe Sequence
ccatgtataaacttgaagtggttgt

SEQ ID NO: 200287 - DNA, 25 bp, Probe Sequence
ccatttaaccctgagtggacacagc

SEQ ID NO: 200288 - DNA, 25 bp, Probe Sequence
ccagtgtaatcccccaggagaacat

SEQ ID NO: 200289 - DNA, 25 bp, Probe Sequence
ccatctctgttggtcccagggaaag

SEQ ID NO: 200290 - DNA, 25 bp, Probe Sequence
ccatcttggtgcatcctgacaaaaa

SEQ ID NO: 200291 - DNA, 25 bp, Probe Sequence
ccatcaggttttctgtgcacaagga

SEQ ID NO: 200292 - DNA, 25 bp, Probe Sequence
gcctccgtctggatttccaaggaag

SEQ ID NO: 200293 - DNA, 25 bp, Probe Sequence
gcctccgtctggatttccaaggaag

SEQ ID NO: 200294 - DNA, 25 bp, Probe Sequence
gccccattcctgatcttagggtgaa

SEQ ID NO: 200295 - DNA, 25 bp, Probe Sequence
gcctcctctaatgactttggggaaa

SEQ ID NO: 200296 - DNA, 25 bp, Probe Sequence
gcctcagcttcgagagtattgggga

SEQ ID NO: 200297 - DNA, 25 bp, Probe Sequence
gcttcagctttaagggtaggcccag

SEQ ID NO: 200298 - DNA, 25 bp, Probe Sequence
gcttggcccataaggtgaaaccgtg

SEQ ID NO: 200299 - DNA, 25 bp, Probe Sequence
gccttgacaaagtgtaaaccgcatg

SEQ ID NO: 200300 - DNA, 25 bp, Probe Sequence
gccatcaacgaagtggtaacccgag

SEQ ID NO: 200301 - DNA, 25 bp, Probe Sequence
ccatcccgtggcataaacccagatg

SEQ ID NO: 200302 - DNA, 25 bp, Probe Sequence
ccataccttgtgattttgacctgag

SEQ ID NO: 200303 - DNA, 25 bp, Probe Sequence
ccatcccttgtgcatatttccaggg

SEQ ID NO: 200304 - DNA, 25 bp, Probe Sequence
ccatcactggtgcagatttatcccc

SEQ ID NO: 200305 - DNA, 25 bp, Probe Sequence
ccatcatccggtttagtcatccaac

SEQ ID NO: 200306 - DNA, 25 bp, Probe Sequence
ccatatgttggtatggtcaccataa

SEQ ID NO: 200307 - DNA, 25 bp, Probe Sequence
ccatgagtttgaaagggcccatcac

SEQ ID NO: 200308 - DNA, 25 bp, Probe Sequence
ccatcggtgtgtaaggtggcctatt

SEQ ID NO: 200309 - DNA, 25 bp, Probe Sequence
ccatctgttactcagctttcctaga

SEQ ID NO: 200310 - DNA, 25 bp, Probe Sequence
ccatcttttctgaagattgtcctac

SEQ ID NO: 200311 - DNA, 25 bp, Probe Sequence
ccacctttcagggagtctcccagca

SEQ ID NO: 200312 - DNA, 25 bp, Probe Sequence
ccaggtttcactgcgtgcttatgac

SEQ ID NO: 200313 - DNA, 25 bp, Probe Sequence
ccaggcattctctagccttggtaca

SEQ ID NO: 200314 - DNA, 25 bp, Probe Sequence
ccaggaactcaagcgggtctcagag

SEQ ID NO: 200315 - DNA, 25 bp, Probe Sequence
ccaggaaaactcagtgcagtccagt

SEQ ID NO: 200316 - DNA, 25 bp, Probe Sequence
ccagaagtaaggaaggacccagtag

SEQ ID NO: 200317 - DNA, 25 bp, Probe Sequence
ccaacgtccaagaggcccagaagat

SEQ ID NO: 200318 - DNA, 25 bp, Probe Sequence
ccaacgacaaagcccgcgtcgaggt

SEQ ID NO: 200319 - DNA, 25 bp, Probe Sequence
ccatgaaaatacgcccagttgattt

SEQ ID NO: 200320 - DNA, 25 bp, Probe Sequence
ccagaaaatcctgaccagcacaatt

SEQ ID NO: 200321 - DNA, 25 bp, Probe Sequence
ccaggaaatactcaacagcagactc

SEQ ID NO: 200322 - DNA, 25 bp, Probe Sequence
ccaggaacagactcagaacaagaag

SEQ ID NO: 200323 - DNA, 25 bp, Probe Sequence
ccaggtggagcctgcaaacagcagg

SEQ ID NO: 200324 - DNA, 25 bp, Probe Sequence
ccatgtttaccatccacacaagaag

SEQ ID NO: 200325 - DNA, 25 bp, Probe Sequence
ccactttccgcttaactgaaaagct

SEQ ID NO: 200326 - DNA, 25 bp, Probe Sequence
ccatcatttccggaagccagcaaat

SEQ ID NO: 200327 - DNA, 25 bp, Probe Sequence
ccatctctgtctaggggtcacaaat

SEQ ID NO: 200328 - DNA, 25 bp, Probe Sequence
ccatcagcctccatggagtacttca

SEQ ID NO: 200329 - DNA, 25 bp, Probe Sequence
ccatgccctgccattgaaacagtga

SEQ ID NO: 200330 - DNA, 25 bp, Probe Sequence
ccatggcacgagaacaactacgtga

SEQ ID NO: 200331 - DNA, 25 bp, Probe Sequence
ccatggcctgtatcaacagcaagga

SEQ ID NO: 200332 - DNA, 25 bp, Probe Sequence
ccatgctgcctttcaaagcaagtcc

SEQ ID NO: 200333 - DNA, 25 bp, Probe Sequence
ccactgcattttctggaaggacacc

SEQ ID NO: 200334 - DNA, 25 bp, Probe Sequence
ccatcgatttctcagaaacgcccgc

SEQ ID NO: 200335 - DNA, 25 bp, Probe Sequence
ccatctttccctggcagagacgtaa

SEQ ID NO: 200336 - DNA, 25 bp, Probe Sequence
ccatccattgcagatgcgcagacat

SEQ ID NO: 200337 - DNA, 25 bp, Probe Sequence
ccatgctctctggcatgggcacctt

SEQ ID NO: 200338 - DNA, 25 bp, Probe Sequence
ccatcctaggctgacacctaactct

SEQ ID NO: 200339 - DNA, 25 bp, Probe Sequence
ccatctcaagggaatacacatacaa

SEQ ID NO: 200340 - DNA, 25 bp, Probe Sequence
ccatctctcagctgaggactttaat

SEQ ID NO: 200341 - DNA, 25 bp, Probe Sequence
ccatcctcagcaaccgatctggaga

SEQ ID NO: 200342 - DNA, 25 bp, Probe Sequence
ccatcctgcaggcactagctggaga

SEQ ID NO: 200343 - DNA, 25 bp, Probe Sequence
ccatctctgaggcagcgcctgaagc

SEQ ID NO: 200344 - DNA, 25 bp, Probe Sequence
ccatgctgtcgtcatcgacatatac

SEQ ID NO: 200345 - DNA, 25 bp, Probe Sequence
ccaggcctgatgcagctactataaa

SEQ ID NO: 200346 - DNA, 25 bp, Probe Sequence
ccagggctgatcagcacccatagca

SEQ ID NO: 200347 - DNA, 25 bp, Probe Sequence
ccatgttcagttcgagcgccaagat

SEQ ID NO: 200348 - DNA, 25 bp, Probe Sequence
ccagtggagttgcatgccctgtagt

SEQ ID NO: 200349 - DNA, 25 bp, Probe Sequence
ccagtggacagtgtgccctgatctg

SEQ ID NO: 200350 - DNA, 25 bp, Probe Sequence
ccagatggaacgactgggctcaccc

SEQ ID NO: 200351 - DNA, 25 bp, Probe Sequence
ccatgtggttaactggactgaccta

SEQ ID NO: 200352 - DNA, 25 bp, Probe Sequence
ccagggttacctgaagacctacaga

SEQ ID NO: 200353 - DNA, 25 bp, Probe Sequence
ccaggtttgtttgaatgcctctaaa

SEQ ID NO: 200354 - DNA, 25 bp, Probe Sequence
ccagattctttgcatctgggccctc

SEQ ID NO: 200355 - DNA, 25 bp, Probe Sequence
ccagattttttatatgtctgcatgt

SEQ ID NO: 200356 - DNA, 25 bp, Probe Sequence
ccatggtgttttagagtttctgtgt

SEQ ID NO: 200357 - DNA, 25 bp, Probe Sequence
ccaggctctgtttatgggtattgtg

SEQ ID NO: 200358 - DNA, 25 bp, Probe Sequence
ccagggtggttattgctatatgtgt

SEQ ID NO: 200359 - DNA, 25 bp, Probe Sequence
ccagtgggaaatacacatttgctgc

SEQ ID NO: 200360 - DNA, 25 bp, Probe Sequence
ccaggtggaatatgacccatctccc

SEQ ID NO: 200361 - DNA, 25 bp, Probe Sequence
ccatgttgtgcagatcagtttcact

SEQ ID NO: 200362 - DNA, 25 bp, Probe Sequence
ccatgcttagcatctactctgtata

SEQ ID NO: 200363 - DNA, 25 bp, Probe Sequence
ccagagtcagtagtcctttaaggat

SEQ ID NO: 200364 - DNA, 25 bp, Probe Sequence
ccagggagtcccttttgatgggaag

SEQ ID NO: 200365 - DNA, 25 bp, Probe Sequence
ccaggagattcctatggatctatgg

SEQ ID NO: 200366 - DNA, 25 bp, Probe Sequence
ccagtggtatcctgtgacatgtaac

SEQ ID NO: 200367 - DNA, 25 bp, Probe Sequence
ccaggagttgtctgcgagattgtag

SEQ ID NO: 200368 - DNA, 25 bp, Probe Sequence
ccagtaggggaaggagcaggtagac

SEQ ID NO: 200369 - DNA, 25 bp, Probe Sequence
ccaggccggagcactagacgtgaga

SEQ ID NO: 200370 - DNA, 25 bp, Probe Sequence
ccagggctaagcaattaaaccagtt

SEQ ID NO: 200371 - DNA, 25 bp, Probe Sequence
ccaggcgtctacaccaaagtcagtg

SEQ ID NO: 200372 - DNA, 25 bp, Probe Sequence
ccatccgtcattacccaaagacttg

SEQ ID NO: 200373 - DNA, 25 bp, Probe Sequence
ccatcggtgcggactccaaggaggt

SEQ ID NO: 200374 - DNA, 25 bp, Probe Sequence
ccatcggccagggctccaagagaaa

SEQ ID NO: 200375 - DNA, 25 bp, Probe Sequence
ccatggtgaccagcaccacagagcc

SEQ ID NO: 200376 - DNA, 25 bp, Probe Sequence
ccatcgatgatgactgtaaccagac

SEQ ID NO: 200377 - DNA, 25 bp, Probe Sequence
ccatccagtgccctgatagtcagtt

SEQ ID NO: 200378 - DNA, 25 bp, Probe Sequence
ccatctggtgcccgtcagtgagaag

SEQ ID NO: 200379 - DNA, 25 bp, Probe Sequence
ccatggggggttgggagtcagccgg

SEQ ID NO: 200380 - DNA, 25 bp, Probe Sequence
ccatgtggttttgcagacaaccctg

SEQ ID NO: 200381 - DNA, 25 bp, Probe Sequence
ccatctgggtatagccaaccggact

SEQ ID NO: 200382 - DNA, 25 bp, Probe Sequence
ccatcttggtcaaggacacccaggc

SEQ ID NO: 200383 - DNA, 25 bp, Probe Sequence
ccatgtctggcgttgagaagccaag

SEQ ID NO: 200384 - DNA, 25 bp, Probe Sequence
ccatgtcccagataaactcaggcca

SEQ ID NO: 200385 - DNA, 25 bp, Probe Sequence
ccaggcccaagaacacagccggaaa

SEQ ID NO: 200386 - DNA, 25 bp, Probe Sequence
ccagttccacaagatccaaccaaga

SEQ ID NO: 200387 - DNA, 25 bp, Probe Sequence
ccaggtccgcaagaacaagcgtcgg

SEQ ID NO: 200388 - DNA, 25 bp, Probe Sequence
gccaggaccccgaggagaggtccag

SEQ ID NO: 200389 - DNA, 25 bp, Probe Sequence
ccagacgcctagcgggcagggttgg

SEQ ID NO: 200390 - DNA, 25 bp, Probe Sequence
ccagacgcctagcgggcagggttgg

SEQ ID NO: 200391 - DNA, 25 bp, Probe Sequence
ccagcacttactccggggggtagag

SEQ ID NO: 200392 - DNA, 25 bp, Probe Sequence
ccaggctggtgcccgagggcaggaa

SEQ ID NO: 200393 - DNA, 25 bp, Probe Sequence
ccaggctgcaggcggcatagttggg

SEQ ID NO: 200394 - DNA, 25 bp, Probe Sequence
ccaggctgcaggcggcatagttggg

SEQ ID NO: 200395 - DNA, 25 bp, Probe Sequence
ccagatgtggagtgccagatgttgc

SEQ ID NO: 200396 - DNA, 25 bp, Probe Sequence
ccatgaggccacggcctggattttg

SEQ ID NO: 200397 - DNA, 25 bp, Probe Sequence
ccatgtctgcgcatctgcaatggat

SEQ ID NO: 200398 - DNA, 25 bp, Probe Sequence
ccatggctggcatgcatgttggcat

SEQ ID NO: 200399 - DNA, 25 bp, Probe Sequence
ccatggctggcatgggggacggcgg

SEQ ID NO: 200400 - DNA, 25 bp, Probe Sequence
ccatcttccaagggttgaattctgg

SEQ ID NO: 200401 - DNA, 25 bp, Probe Sequence
ccagttccctgtgggtgactttggt

SEQ ID NO: 200402 - DNA, 25 bp, Probe Sequence
ccagtttactggggtgtcttgcgga

SEQ ID NO: 200403 - DNA, 25 bp, Probe Sequence
ccaggattgactggtggggcttcag

SEQ ID NO: 200404 - DNA, 25 bp, Probe Sequence
ccaggctcaggcagaggcgcctgtc

SEQ ID NO: 200405 - DNA, 25 bp, Probe Sequence
gcgcatggtaccaggtccggaattc

SEQ ID NO: 200406 - DNA, 25 bp, Probe Sequence
ccagtgtcacctaggccaaggtttg

SEQ ID NO: 200407 - DNA, 25 bp, Probe Sequence
ccagtgtcactctcggcaaatatta

SEQ ID NO: 200408 - DNA, 25 bp, Probe Sequence
ccatgttcaacccgtaactactact

SEQ ID NO: 200409 - DNA, 25 bp, Probe Sequence
ccatgttccatctgagtacttaacg

SEQ ID NO: 200410 - DNA, 25 bp, Probe Sequence
ccatgtcttcttccagttctataaa

SEQ ID NO: 200411 - DNA, 25 bp, Probe Sequence
ccatgttgccttttctcttagtagg

SEQ ID NO: 200412 - DNA, 25 bp, Probe Sequence
ccaggcccttcgagcatggaggggc

SEQ ID NO: 200413 - DNA, 25 bp, Probe Sequence
ccaggcacccccagaatgacctggc

SEQ ID NO: 200414 - DNA, 25 bp, Probe Sequence
ccaggcacccccagaatgacctggc

SEQ ID NO: 200415 - DNA, 25 bp, Probe Sequence
ccaggagctcgccaatggaattcct

SEQ ID NO: 200416 - DNA, 25 bp, Probe Sequence
ccagaaggccgaaggtttccattgg

SEQ ID NO: 200417 - DNA, 25 bp, Probe Sequence
ccagacaggccctgcttttctagga

SEQ ID NO: 200418 - DNA, 25 bp, Probe Sequence
ccatggaggccaaatggccgttagg

SEQ ID NO: 200419 - DNA, 25 bp, Probe Sequence
ccaggggctgtaatggcctttctta

SEQ ID NO: 200420 - DNA, 25 bp, Probe Sequence
ccagggagttaactcttcttctggg

SEQ ID NO: 200421 - DNA, 25 bp, Probe Sequence
ccagggcagcaaacatccttgttct

SEQ ID NO: 200422 - DNA, 25 bp, Probe Sequence
ccagggcacactgtcggagttctat

SEQ ID NO: 200423 - DNA, 25 bp, Probe Sequence
ccaggtgccgggatgagatgtttat

SEQ ID NO: 200424 - DNA, 25 bp, Probe Sequence
ccaggaaggttgttgagcatttctt

SEQ ID NO: 200425 - DNA, 25 bp, Probe Sequence
ccagggggatggggagctttctgca

SEQ ID NO: 200426 - DNA, 25 bp, Probe Sequence
ccaggggttgtgggtttgtcacata

SEQ ID NO: 200427 - DNA, 25 bp, Probe Sequence
ccatggggctggggtactttacatt

SEQ ID NO: 200428 - DNA, 25 bp, Probe Sequence
ccaggaggtgggattcttcaactaa

SEQ ID NO: 200429 - DNA, 25 bp, Probe Sequence
ccaggactggagctttctctggcca

SEQ ID NO: 200430 - DNA, 25 bp, Probe Sequence
ccaggagaggcaggtcgacctggcc

SEQ ID NO: 200431 - DNA, 25 bp, Probe Sequence
ccatggacatggggtctgtgacagc

SEQ ID NO: 200432 - DNA, 25 bp, Probe Sequence
ccagaccaggaacagagcagcagca

SEQ ID NO: 200433 - DNA, 25 bp, Probe Sequence
ccaggccacagaggcggggcagaaa

SEQ ID NO: 200434 - DNA, 25 bp, Probe Sequence
ccatgcgcatcctaggcggagtcat

SEQ ID NO: 200435 - DNA, 25 bp, Probe Sequence
ccatcgccaatctgcagcgagctta

SEQ ID NO: 200436 - DNA, 25 bp, Probe Sequence
ccatggccttgcttgccagaatttg

SEQ ID NO: 200437 - DNA, 25 bp, Probe Sequence
ccatcgtattgattgtattaattgc

SEQ ID NO: 200438 - DNA, 25 bp, Probe Sequence
ccatggattcgaggtattatactgt

SEQ ID NO: 200439 - DNA, 25 bp, Probe Sequence
ccatcgtacgcaggctgtctagacg

SEQ ID NO: 200440 - DNA, 25 bp, Probe Sequence
ccatcctcacgagctatagtggcgc

SEQ ID NO: 200441 - DNA, 25 bp, Probe Sequence
ccatgactacggcctgatcctggcc

SEQ ID NO: 200442 - DNA, 25 bp, Probe Sequence
ccatcttctcagcgtgatcacggaa

SEQ ID NO: 200443 - DNA, 25 bp, Probe Sequence
ccaattctgcgggtgtccaagacac

SEQ ID NO: 200444 - DNA, 25 bp, Probe Sequence
ccaggctctgaagattcccagaagc

SEQ ID NO: 200445 - DNA, 25 bp, Probe Sequence
ccagagttggtcactcctcaggacc

SEQ ID NO: 200446 - DNA, 25 bp, Probe Sequence
ccagaggggtccctcttgcaggaag

SEQ ID NO: 200447 - DNA, 25 bp, Probe Sequence
ccagtggagggctctctgatgggca

SEQ ID NO: 200448 - DNA, 25 bp, Probe Sequence
ccagaggaagagtctgcctatgtgg

SEQ ID NO: 200449 - DNA, 25 bp, Probe Sequence
ccatgagcatcatgaactcgtttgt

SEQ ID NO: 200450 - DNA, 25 bp, Probe Sequence
ccatgcagctcggggtgtggttttc

SEQ ID NO: 200451 - DNA, 25 bp, Probe Sequence
ccaggctcgggagtgcctgttgttc

SEQ ID NO: 200452 - DNA, 25 bp, Probe Sequence
ccaggacgtgagggtctgggtgttt

SEQ ID NO: 200453 - DNA, 25 bp, Probe Sequence
ccagaacctagtggattgtgtgtct

SEQ ID NO: 200454 - DNA, 25 bp, Probe Sequence
ccagagactcttccaagtgggtgtc

SEQ ID NO: 200455 - DNA, 25 bp, Probe Sequence
ccagaggcattcccagctctggctt

SEQ ID NO: 200456 - DNA, 25 bp, Probe Sequence
ccagatgaactctacctttgctttc

SEQ ID NO: 200457 - DNA, 25 bp, Probe Sequence
ccagatgcaacctcactatggtatg

SEQ ID NO: 200458 - DNA, 25 bp, Probe Sequence
ccatgatcacctcacacttgattca

SEQ ID NO: 200459 - DNA, 25 bp, Probe Sequence
ccatgtgcacgtccatgacttgcag

SEQ ID NO: 200460 - DNA, 25 bp, Probe Sequence
ccatgctgactgagtgactggagac

SEQ ID NO: 200461 - DNA, 25 bp, Probe Sequence
ccatctgtctatctatctggctggc

SEQ ID NO: 200462 - DNA, 25 bp, Probe Sequence
ccatgtgtctaggccatctgagtgt

SEQ ID NO: 200463 - DNA, 25 bp, Probe Sequence
ccatgtttctggccttacagcatta

SEQ ID NO: 200464 - DNA, 25 bp, Probe Sequence
ccatgtttctggtgagccaatttgg

SEQ ID NO: 200465 - DNA, 25 bp, Probe Sequence
ccatgtttgtggtcaaggcctatct

SEQ ID NO: 200466 - DNA, 25 bp, Probe Sequence
ccagaacgtggacgggctccatgtg

SEQ ID NO: 200467 - DNA, 25 bp, Probe Sequence
ccatgaacggagaggccatcgcctg

SEQ ID NO: 200468 - DNA, 25 bp, Probe Sequence
ccaggtctggagagtacatcgcctc

SEQ ID NO: 200469 - DNA, 25 bp, Probe Sequence
ccatgagactcgatggtcacatccc

SEQ ID NO: 200470 - DNA, 25 bp, Probe Sequence
ccaggactgcaaggagtccccacac

SEQ ID NO: 200471 - DNA, 25 bp, Probe Sequence
ccaggagcgatatggttctcgcccc

SEQ ID NO: 200472 - DNA, 25 bp, Probe Sequence
ccaggaaattagctttccagcccct

SEQ ID NO: 200473 - DNA, 25 bp, Probe Sequence
ccagggaagaagattcatacgcctc

SEQ ID NO: 200474 - DNA, 25 bp, Probe Sequence
ccagggaaacagcttatgacccatt

SEQ ID NO: 200475 - DNA, 25 bp, Probe Sequence
ccatgggaaactgttgtgggcgctg

SEQ ID NO: 200476 - DNA, 25 bp, Probe Sequence
ccagggaaggctccgtgggaggctg

SEQ ID NO: 200477 - DNA, 25 bp, Probe Sequence
ccagggatgggtgcctgggatcctg

SEQ ID NO: 200478 - DNA, 25 bp, Probe Sequence
ccagtgaagggagccggtccttgct

SEQ ID NO: 200479 - DNA, 25 bp, Probe Sequence
ccagagaagggagccagggggagct

SEQ ID NO: 200480 - DNA, 25 bp, Probe Sequence
ccaagaagtcaagctccggagagga

SEQ ID NO: 200481 - DNA, 25 bp, Probe Sequence
ccaggaagccgtgtcagcggccgga

SEQ ID NO: 200482 - DNA, 25 bp, Probe Sequence
ccaggttgcgggaggcaggcctggc

SEQ ID NO: 200483 - DNA, 25 bp, Probe Sequence
ccagggaggaaatggcggcagctgg

SEQ ID NO: 200484 - DNA, 25 bp, Probe Sequence
ccaggaggaaagtttcaggcagatg

SEQ ID NO: 200485 - DNA, 25 bp, Probe Sequence
ccaggacaaaattcttagtaatgag

SEQ ID NO: 200486 - DNA, 25 bp, Probe Sequence
ccaggccaggaatcacaagctccgg

SEQ ID NO: 200487 - DNA, 25 bp, Probe Sequence
ccaggtctggaatgcaaagtcaagg

SEQ ID NO: 200488 - DNA, 25 bp, Probe Sequence
ccagtgtatattttagaactcaggg

SEQ ID NO: 200489 - DNA, 25 bp, Probe Sequence
ccaggtattgttgcagaaggccgag

SEQ ID NO: 200490 - DNA, 25 bp, Probe Sequence
ccaggtactgattccagctgggcca

SEQ ID NO: 200491 - DNA, 25 bp, Probe Sequence
ccaggctgtgctatccctgtacgcc

SEQ ID NO: 200492 - DNA, 25 bp, Probe Sequence
ccaggcagtgttctgccgagacccc

SEQ ID NO: 200493 - DNA, 25 bp, Probe Sequence
ccaggaggatggcaaagagagtcgc

SEQ ID NO: 200494 - DNA, 25 bp, Probe Sequence
ccaggagtatggcactcaggggtgc

SEQ ID NO: 200495 - DNA, 25 bp, Probe Sequence
ccaggaatcacaagctccgggtgga

SEQ ID NO: 200496 - DNA, 25 bp, Probe Sequence
ccaggaatcacaagctccgggtgga

SEQ ID NO: 200497 - DNA, 25 bp, Probe Sequence
ccaggacatcatcaccgtgggtgga

SEQ ID NO: 200498 - DNA, 25 bp, Probe Sequence
ccaggactatcggaccgagcaaggg

SEQ ID NO: 200499 - DNA, 25 bp, Probe Sequence
gccggaccaatgtgccagacatccg

SEQ ID NO: 200500 - DNA, 25 bp, Probe Sequence
ccatgagaccattgagtccatcaac

SEQ ID NO: 200501 - DNA, 25 bp, Probe Sequence
ccatgaggccttggttcagagcccc

SEQ ID NO: 200502 - DNA, 25 bp, Probe Sequence
ccatggactctgtcaggtctggacc

SEQ ID NO: 200503 - DNA, 25 bp, Probe Sequence
ccaggaccctgacgtgggaagccat

SEQ ID NO: 200504 - DNA, 25 bp, Probe Sequence
ccagtgacgcaaatggcggctaggc

SEQ ID NO: 200505 - DNA, 25 bp, Probe Sequence
ccaggatgctcagctggccaggagg

SEQ ID NO: 200506 - DNA, 25 bp, Probe Sequence
ccaggagcgatccatctacgtaggt

SEQ ID NO: 200507 - DNA, 25 bp, Probe Sequence
ccaggaggatgggcccgttgtgatt

SEQ ID NO: 200508 - DNA, 25 bp, Probe Sequence
ccagagggtcgggcaggttgacata

SEQ ID NO: 200509 - DNA, 25 bp, Probe Sequence
ccaggagtggagcctgcggcttaat

SEQ ID NO: 200510 - DNA, 25 bp, Probe Sequence
ccaggcgtggtggctcatgcctgta

SEQ ID NO: 200511 - DNA, 25 bp, Probe Sequence
ccaggcgtggtggctcatgcctgta

SEQ ID NO: 200512 - DNA, 25 bp, Probe Sequence
ccaggattgacaggccatccattca

SEQ ID NO: 200513 - DNA, 25 bp, Probe Sequence
ccaggttggaggcatctctgacacc

SEQ ID NO: 200514 - DNA, 25 bp, Probe Sequence
ccaggggagcagctcagcttagccc

SEQ ID NO: 200515 - DNA, 25 bp, Probe Sequence
ccagggaggagcaaccttcaggtgg

SEQ ID NO: 200516 - DNA, 25 bp, Probe Sequence
ccagggagtgcacagtgctccagaa

SEQ ID NO: 200517 - DNA, 25 bp, Probe Sequence
ccatggcggtgcccatgatgctact

SEQ ID NO: 200518 - DNA, 25 bp, Probe Sequence
ccagatgctgtggccacatggctaa

SEQ ID NO: 200519 - DNA, 25 bp, Probe Sequence
ccatgctgatctgtccggcatcagc

SEQ ID NO: 200520 - DNA, 25 bp, Probe Sequence
ccatcccatggtggcaggtgcagcg

SEQ ID NO: 200521 - DNA, 25 bp, Probe Sequence
ccatccagcatgccacacagagaga

SEQ ID NO: 200522 - DNA, 25 bp, Probe Sequence
ccatccaaggccaaagagcagccag

SEQ ID NO: 200523 - DNA, 25 bp, Probe Sequence
ccatcccagcaggtaatgactccac

SEQ ID NO: 200524 - DNA, 25 bp, Probe Sequence
ccatcccagaggactatgagaccca

SEQ ID NO: 200525 - DNA, 25 bp, Probe Sequence
ccacctacaaacgcagactacagaa

SEQ ID NO: 200526 - DNA, 25 bp, Probe Sequence
ccaccaaccagaccaggacttaata

SEQ ID NO: 200527 - DNA, 25 bp, Probe Sequence
ccagaacacccacaggtcttggtaa

SEQ ID NO: 200528 - DNA, 25 bp, Probe Sequence
ccaacccttgactggccagggataa

SEQ ID NO: 200529 - DNA, 25 bp, Probe Sequence
ccatcccttacctgggcatgtgtga

SEQ ID NO: 200530 - DNA, 25 bp, Probe Sequence
ccatctccttgcccaagggtgtggt

SEQ ID NO: 200531 - DNA, 25 bp, Probe Sequence
ccatccctgtgaggcaatgggtggg

SEQ ID NO: 200532 - DNA, 25 bp, Probe Sequence
ccagcacctgtcatttggggaggac

SEQ ID NO: 200533 - DNA, 25 bp, Probe Sequence
ccagaccattccgcttcaaggcaga

SEQ ID NO: 200534 - DNA, 25 bp, Probe Sequence
ccagcataattgacccactctaagg

SEQ ID NO: 200535 - DNA, 25 bp, Probe Sequence
ccagtaaagcctgctgatcttaaga

SEQ ID NO: 200536 - DNA, 25 bp, Probe Sequence
ccatgtaacacatcctgaactgaaa

SEQ ID NO: 200537 - DNA, 25 bp, Probe Sequence
ccatcgcaggcaacgacgacgtgaa

SEQ ID NO: 200538 - DNA, 25 bp, Probe Sequence
ccatctgctacaacaactgcctgga

SEQ ID NO: 200539 - DNA, 25 bp, Probe Sequence
ccatctctatctcaactttatgtgc

SEQ ID NO: 200540 - DNA, 25 bp, Probe Sequence
ccatctgctaccggccatttagatg

SEQ ID NO: 200541 - DNA, 25 bp, Probe Sequence
ccatcctactggccacattgacagt

SEQ ID NO: 200542 - DNA, 25 bp, Probe Sequence
ccatctccaggaagacttgacggct

SEQ ID NO: 200543 - DNA, 25 bp, Probe Sequence
ccatgtctgggatgacttcacagcc

SEQ ID NO: 200544 - DNA, 25 bp, Probe Sequence
ccatgtgtgggtcggcaccgagact

SEQ ID NO: 200545 - DNA, 25 bp, Probe Sequence
ccatgtctggagatagaccttgaat

SEQ ID NO: 200546 - DNA, 25 bp, Probe Sequence
ccatgtctctagtgatccctgaaaa

SEQ ID NO: 200547 - DNA, 25 bp, Probe Sequence
ccatgatgaaaaattgtcctgaaga

SEQ ID NO: 200548 - DNA, 25 bp, Probe Sequence
ccatgatggacgatcttgctcccag

SEQ ID NO: 200549 - DNA, 25 bp, Probe Sequence
ccatgtgaagtcactgtgccagccc

SEQ ID NO: 200550 - DNA, 25 bp, Probe Sequence
ccaggtgcagtcacagactcagccg

SEQ ID NO: 200551 - DNA, 25 bp, Probe Sequence
ccagagtggctctgatgtccacatt

SEQ ID NO: 200552 - DNA, 25 bp, Probe Sequence
ccagtgtatgtcttgtatccgatat

SEQ ID NO: 200553 - DNA, 25 bp, Probe Sequence
ccaggttctgctgagcatagagtat

SEQ ID NO: 200554 - DNA, 25 bp, Probe Sequence
ccaggctgtcgttaatgatgaccac

SEQ ID NO: 200555 - DNA, 25 bp, Probe Sequence
ccaggcaatctgtttagagaccccc

SEQ ID NO: 200556 - DNA, 25 bp, Probe Sequence
ccagtgctcactgttgggacaaccc

SEQ ID NO: 200557 - DNA, 25 bp, Probe Sequence
ccagtgttctgatttgggtcttcct

SEQ ID NO: 200558 - DNA, 25 bp, Probe Sequence
ccaggctttgatggcttgtgtgtcc

SEQ ID NO: 200559 - DNA, 25 bp, Probe Sequence
ccaggcgaagatgttctggcccagg

SEQ ID NO: 200560 - DNA, 25 bp, Probe Sequence
ccatggcaaaataactggctcccag

SEQ ID NO: 200561 - DNA, 25 bp, Probe Sequence
ccatggcatgatacaaacaggtcct

SEQ ID NO: 200562 - DNA, 25 bp, Probe Sequence
ccagtgaattaataaggccttttcg

SEQ ID NO: 200563 - DNA, 25 bp, Probe Sequence
ccagttgttatctaaaggcttttgc

SEQ ID NO: 200564 - DNA, 25 bp, Probe Sequence
ccagtggtacaatgggcgcgttcag

SEQ ID NO: 200565 - DNA, 25 bp, Probe Sequence
ccagggtgactctggtggccctgtg

SEQ ID NO: 200566 - DNA, 25 bp, Probe Sequence
ccatgggtcgcatgggaggccgtgg

SEQ ID NO: 200567 - DNA, 25 bp, Probe Sequence
ccagggtctcccatagacagcctgg

SEQ ID NO: 200568 - DNA, 25 bp, Probe Sequence
ccaggtgttcgagaacacgcctggc

SEQ ID NO: 200569 - DNA, 25 bp, Probe Sequence
ccaggtttcaactcagaagaggcat

SEQ ID NO: 200570 - DNA, 25 bp, Probe Sequence
ccagtggtcttctttccaacaggaa

SEQ ID NO: 200571 - DNA, 25 bp, Probe Sequence
ccaggttccactttcctaggagaga

SEQ ID NO: 200572 - DNA, 25 bp, Probe Sequence
ccatggttaactgagactgcagaaa

SEQ ID NO: 200573 - DNA, 25 bp, Probe Sequence
ccaggcattttccaacctcagaaga

SEQ ID NO: 200574 - DNA, 25 bp, Probe Sequence
ccaggctcaaatgaacttctaaaat

SEQ ID NO: 200575 - DNA, 25 bp, Probe Sequence
ccagagatatcacttaattgttaac

SEQ ID NO: 200576 - DNA, 25 bp, Probe Sequence
ccaggttcagtgaatcctcctaatc

SEQ ID NO: 200577 - DNA, 25 bp, Probe Sequence
ccaggttcaagcgattctcctgcct

SEQ ID NO: 200578 - DNA, 25 bp, Probe Sequence
ccaggaaacacgctggctcatgcct

SEQ ID NO: 200579 - DNA, 25 bp, Probe Sequence
ccaggaagatggggtggtcgctctg

SEQ ID NO: 200580 - DNA, 25 bp, Probe Sequence
ccaggaggtgcgagtgtggctgctc

SEQ ID NO: 200581 - DNA, 25 bp, Probe Sequence
ccagtagctgggaccacaggtgccc

SEQ ID NO: 200582 - DNA, 25 bp, Probe Sequence
ccagagtctgggacccatggtcgca

SEQ ID NO: 200583 - DNA, 25 bp, Probe Sequence
ccagagatcaggtgtccagggctca

SEQ ID NO: 200584 - DNA, 25 bp, Probe Sequence
ccaggacgagcttgaccagaccctg

SEQ ID NO: 200585 - DNA, 25 bp, Probe Sequence
ccaggcactaccgtaaacacacggg

SEQ ID NO: 200586 - DNA, 25 bp, Probe Sequence
gccagtcaaacgttcaaaggacggg

SEQ ID NO: 200587 - DNA, 25 bp, Probe Sequence
gccagtacagaccttaggggacttt

SEQ ID NO: 200588 - DNA, 25 bp, Probe Sequence
ccagttcaggccgtggagggacgtg

SEQ ID NO: 200589 - DNA, 25 bp, Probe Sequence
ccagttcaggccgtggagggacgtg

SEQ ID NO: 200590 - DNA, 25 bp, Probe Sequence
ccagaactccacggtgagggccgat

SEQ ID NO: 200591 - DNA, 25 bp, Probe Sequence
ccatggaccccagcatcaggtggga

SEQ ID NO: 200592 - DNA, 25 bp, Probe Sequence
ccatccccatcttggactttgtgga

SEQ ID NO: 200593 - DNA, 25 bp, Probe Sequence
ccagtccactttgatgcttctgtgg

SEQ ID NO: 200594 - DNA, 25 bp, Probe Sequence
ccagtcccaggggcatgtattggcc

SEQ ID NO: 200595 - DNA, 25 bp, Probe Sequence
ccagtcctacaaccagtattctcag

SEQ ID NO: 200596 - DNA, 25 bp, Probe Sequence
ccagtcctacaaccagtattctcag

SEQ ID NO: 200597 - DNA, 25 bp, Probe Sequence
ccagtcctacaaccagtattctcag

SEQ ID NO: 200598 - DNA, 25 bp, Probe Sequence
ccatgtcctcacttcaaggttatca

SEQ ID NO: 200599 - DNA, 25 bp, Probe Sequence
ccatgatcccaatccaagtgaataa

SEQ ID NO: 200600 - DNA, 25 bp, Probe Sequence
ccatgcatccaattcccaaggacag

SEQ ID NO: 200601 - DNA, 25 bp, Probe Sequence
ccatgcatccaattcccaaggacag

SEQ ID NO: 200602 - DNA, 25 bp, Probe Sequence
ccatggctgcaatccgaaagaagct

SEQ ID NO: 200603 - DNA, 25 bp, Probe Sequence
ccatggctctgggcggtccagaagg

SEQ ID NO: 200604 - DNA, 25 bp, Probe Sequence
ccatggccgacaaggtcctgaagga

SEQ ID NO: 200605 - DNA, 25 bp, Probe Sequence
ccagtgccagacaggtaggacccag

SEQ ID NO: 200606 - DNA, 25 bp, Probe Sequence
ccatcctcaatgcggccaggatacc

SEQ ID NO: 200607 - DNA, 25 bp, Probe Sequence
ccatggcaaatgctggacccaacac

SEQ ID NO: 200608 - DNA, 25 bp, Probe Sequence
ccatgtgcaagtctgtggtggcccc

SEQ ID NO: 200609 - DNA, 25 bp, Probe Sequence
ccagtcacagtttttggttcctctt

SEQ ID NO: 200610 - DNA, 25 bp, Probe Sequence
ccagtacataccattggttctcttc

SEQ ID NO: 200611 - DNA, 25 bp, Probe Sequence
ccaggaaacgatttgggcctctgtc

SEQ ID NO: 200612 - DNA, 25 bp, Probe Sequence
ccagccaaacaatacccacttgtca

SEQ ID NO: 200613 - DNA, 25 bp, Probe Sequence
ccaaccatgaatgaacccctggctc

SEQ ID NO: 200614 - DNA, 25 bp, Probe Sequence
ccatcccgagctgaatatcggggtc

SEQ ID NO: 200615 - DNA, 25 bp, Probe Sequence
ccatccccagtccagatacagggca

SEQ ID NO: 200616 - DNA, 25 bp, Probe Sequence
ccatgcccgcagacacaaacaaagc

SEQ ID NO: 200617 - DNA, 25 bp, Probe Sequence
ccatccaatagcaacagaataaaca

SEQ ID NO: 200618 - DNA, 25 bp, Probe Sequence
ccatccatacaatcacagataacta

SEQ ID NO: 200619 - DNA, 25 bp, Probe Sequence
ccatcctccatatatccaaacaaca

SEQ ID NO: 200620 - DNA, 25 bp, Probe Sequence
ccatcctttaaagcccagcttcaga

SEQ ID NO: 200621 - DNA, 25 bp, Probe Sequence
ccaacttaaaattcttacattcaag

SEQ ID NO: 200622 - DNA, 25 bp, Probe Sequence
ccaggctctacggtttcaagatcca

SEQ ID NO: 200623 - DNA, 25 bp, Probe Sequence
ccaggcttcacgtttggaaatctga

SEQ ID NO: 200624 - DNA, 25 bp, Probe Sequence
ccaggcccacagccttggaaacaga

SEQ ID NO: 200625 - DNA, 25 bp, Probe Sequence
ccaggtccccttgagaggtcagagg

SEQ ID NO: 200626 - DNA, 25 bp, Probe Sequence
ccaggcccctacaaaggcttcagag

SEQ ID NO: 200627 - DNA, 25 bp, Probe Sequence
ccaggcccttcatgaaggccaagaa

SEQ ID NO: 200628 - DNA, 25 bp, Probe Sequence
ccaggggcttgcccaaggccaagag

SEQ ID NO: 200629 - DNA, 25 bp, Probe Sequence
ccagctgggtctgacaaggacccgt

SEQ ID NO: 200630 - DNA, 25 bp, Probe Sequence
ccatgctgggctcactacatgggcc

SEQ ID NO: 200631 - DNA, 25 bp, Probe Sequence
ccatgcagaggcccagagacatggg

SEQ ID NO: 200632 - DNA, 25 bp, Probe Sequence
ccagcagaggcataaggttcgggaa

SEQ ID NO: 200633 - DNA, 25 bp, Probe Sequence
ccagctggagcacaacgtttggtga

SEQ ID NO: 200634 - DNA, 25 bp, Probe Sequence
ccagggacacacacagtcttcactg

SEQ ID NO: 200635 - DNA, 25 bp, Probe Sequence
ccagggacacacacagtcttcactg

SEQ ID NO: 200636 - DNA, 25 bp, Probe Sequence
ccatgtctacatgaaagtcctcagt

SEQ ID NO: 200637 - DNA, 25 bp, Probe Sequence
ccatgtctacaccaaggcattgctg

SEQ ID NO: 200638 - DNA, 25 bp, Probe Sequence
ccatgtctctagcaatctatgtctg

SEQ ID NO: 200639 - DNA, 25 bp, Probe Sequence
ccatgtccttggtatgcctgatgtt

SEQ ID NO: 200640 - DNA, 25 bp, Probe Sequence
ccatgactttggttttgtttacatt

SEQ ID NO: 200641 - DNA, 25 bp, Probe Sequence
ccaggccttgggtttgacaaacatg

SEQ ID NO: 200642 - DNA, 25 bp, Probe Sequence
ccagggcttcgtctaacacaaaaca

SEQ ID NO: 200643 - DNA, 25 bp, Probe Sequence
ccagggctctgggcctgaagcaaga

SEQ ID NO: 200644 - DNA, 25 bp, Probe Sequence
ccagaggtttgaggtgactggctgg

SEQ ID NO: 200645 - DNA, 25 bp, Probe Sequence
ccaactgttggaggcgcctttgggg

SEQ ID NO: 200646 - DNA, 25 bp, Probe Sequence
ccaccagttggaggcttctcttttg

SEQ ID NO: 200647 - DNA, 25 bp, Probe Sequence
ccagtcaggtgtgtgttctttgtct

SEQ ID NO: 200648 - DNA, 25 bp, Probe Sequence
ccagtctgctttttagtctttatca

SEQ ID NO: 200649 - DNA, 25 bp, Probe Sequence
ccaggtgtttcattaagtattctca

SEQ ID NO: 200650 - DNA, 25 bp, Probe Sequence
ccagtggatccccaaaggatgtcta

SEQ ID NO: 200651 - DNA, 25 bp, Probe Sequence
ccagggcaccctgaagtcagtgcca

SEQ ID NO: 200652 - DNA, 25 bp, Probe Sequence
ccatggaccccaagaatactggcca

SEQ ID NO: 200653 - DNA, 25 bp, Probe Sequence
ccatggcccccaataaaggcagctg

SEQ ID NO: 200654 - DNA, 25 bp, Probe Sequence
ccatgcggccccgaggaaggatgcg

SEQ ID NO: 200655 - DNA, 25 bp, Probe Sequence
ccatccagccacggagggaggcacc

SEQ ID NO: 200656 - DNA, 25 bp, Probe Sequence
ccatccaaaaggggcagggcacggt

SEQ ID NO: 200657 - DNA, 25 bp, Probe Sequence
ccatccacaaagtgcatcacctcaa

SEQ ID NO: 200658 - DNA, 25 bp, Probe Sequence
ccatgacactatgaagcaaccacat

SEQ ID NO: 200659 - DNA, 25 bp, Probe Sequence
ccacagcagcaagaatgacctcctg

SEQ ID NO: 200660 - DNA, 25 bp, Probe Sequence
ccagctgcaaatgatggacctccag

SEQ ID NO: 200661 - DNA, 25 bp, Probe Sequence
gcccgaaccaagcagactgctcgta

SEQ ID NO: 200662 - DNA, 25 bp, Probe Sequence
ccaggagtccaacgatcacgtgtgt

SEQ ID NO: 200663 - DNA, 25 bp, Probe Sequence
ccaggatgccctgagtacagtgttg

SEQ ID NO: 200664 - DNA, 25 bp, Probe Sequence
ccagtgatcacctgagtcagagttt

SEQ ID NO: 200665 - DNA, 25 bp, Probe Sequence
ccaggtcacagctctcatcaagctg

SEQ ID NO: 200666 - DNA, 25 bp, Probe Sequence
ccaggcatggagtatctcacaaagt

SEQ ID NO: 200667 - DNA, 25 bp, Probe Sequence
ccagtgatggcattactctgcacta

SEQ ID NO: 200668 - DNA, 25 bp, Probe Sequence
ccatgtgctggtaacgcatgcctgg

SEQ ID NO: 200669 - DNA, 25 bp, Probe Sequence
ccagtgctgtgcttgaagcctcgtg

SEQ ID NO: 200670 - DNA, 25 bp, Probe Sequence
ccaggaccttaactcacgtgtgaag

SEQ ID NO: 200671 - DNA, 25 bp, Probe Sequence
ccaggatgctttcttccaggtgaag

SEQ ID NO: 200672 - DNA, 25 bp, Probe Sequence
ccatggggctgtcttccagtgaagg

SEQ ID NO: 200673 - DNA, 25 bp, Probe Sequence
ccatggggcttcttgtgccctaaag

SEQ ID NO: 200674 - DNA, 25 bp, Probe Sequence
ccacgtgtgtattttccgctagaat

SEQ ID NO: 200675 - DNA, 25 bp, Probe Sequence
ccagggattttttgtcgcaatcata

SEQ ID NO: 200676 - DNA, 25 bp, Probe Sequence
ccagatgtgagttttttccaagcaa

SEQ ID NO: 200677 - DNA, 25 bp, Probe Sequence
ccagatgtgttgcagctttcctgac

SEQ ID NO: 200678 - DNA, 25 bp, Probe Sequence
ccaggaggtggagtttgcagtgagc

SEQ ID NO: 200679 - DNA, 25 bp, Probe Sequence
ccagggggcagaggttgcagtgagc

SEQ ID NO: 200680 - DNA, 25 bp, Probe Sequence
ccagggggcagaggttgcagtgagc

SEQ ID NO: 200681 - DNA, 25 bp, Probe Sequence
ccagggggcagaggttgcagtgagc

SEQ ID NO: 200682 - DNA, 25 bp, Probe Sequence
ccatggtgatcggttttgcagtaca

SEQ ID NO: 200683 - DNA, 25 bp, Probe Sequence
ccatggtgatcggttttgcagtaca

SEQ ID NO: 200684 - DNA, 25 bp, Probe Sequence
ccatggtgatgcggttttgcagtac

SEQ ID NO: 200685 - DNA, 25 bp, Probe Sequence
ccatggtgatgcggttttgcagtac

SEQ ID NO: 200686 - DNA, 25 bp, Probe Sequence
ccatggtgatgcgttttggcagtac

SEQ ID NO: 200687 - DNA, 25 bp, Probe Sequence
ccatgtgatgcggttttggcagtac

SEQ ID NO: 200688 - DNA, 25 bp, Probe Sequence
ccatggagcgcgtgtttgactacag

SEQ ID NO: 200689 - DNA, 25 bp, Probe Sequence
ccagggaggtggtgtcactgcacag

SEQ ID NO: 200690 - DNA, 25 bp, Probe Sequence
ccagctggactgggacgtagcgacg

SEQ ID NO: 200691 - DNA, 25 bp, Probe Sequence
ccaggagtgctgtgactgccaggac

SEQ ID NO: 200692 - DNA, 25 bp, Probe Sequence
ccatggaggcctacgtgactgagac

SEQ ID NO: 200693 - DNA, 25 bp, Probe Sequence
ccatgaaccgcatctgtgtgctgga

SEQ ID NO: 200694 - DNA, 25 bp, Probe Sequence
ccagaaacgaacctctttgaaactg

SEQ ID NO: 200695 - DNA, 25 bp, Probe Sequence
gccatcacaaactctttttaggact

SEQ ID NO: 200696 - DNA, 25 bp, Probe Sequence
ccaccaaggagaatagtttaggaga

SEQ ID NO: 200697 - DNA, 25 bp, Probe Sequence
gccactatacgacaggtaccggctg

SEQ ID NO: 200698 - DNA, 25 bp, Probe Sequence
gcccagtactacgggtacctgtgga

SEQ ID NO: 200699 - DNA, 25 bp, Probe Sequence
gccgagttctcggggaacctgtatg

SEQ ID NO: 200700 - DNA, 25 bp, Probe Sequence
ccaggttccagatgcgacatccaga

SEQ ID NO: 200701 - DNA, 25 bp, Probe Sequence
ccagggtacagatgcaagtcttgat

SEQ ID NO: 200702 - DNA, 25 bp, Probe Sequence
ccaggactgtcacacaaggcttgag

SEQ ID NO: 200703 - DNA, 25 bp, Probe Sequence
ccagtggattcgcctcaaggttgag

SEQ ID NO: 200704 - DNA, 25 bp, Probe Sequence
ccatgggttcatgtcaaggctctca

SEQ ID NO: 200705 - DNA, 25 bp, Probe Sequence
ccaggagtcacttctatacctccct

SEQ ID NO: 200706 - DNA, 25 bp, Probe Sequence
ccatggagtacttcaaatctgccca

SEQ ID NO: 200707 - DNA, 25 bp, Probe Sequence
ccagtggtttcatcaatcatgccta

SEQ ID NO: 200708 - DNA, 25 bp, Probe Sequence
ccagcattggcgtctacacacgccc

SEQ ID NO: 200709 - DNA, 25 bp, Probe Sequence
ccagctatgaacctcacctggatcc

SEQ ID NO: 200710 - DNA, 25 bp, Probe Sequence
ccagtgaaggccaacctggcaaggt

SEQ ID NO: 200711 - DNA, 25 bp, Probe Sequence
ccagtcagcagagcagaaatcgggg

SEQ ID NO: 200712 - DNA, 25 bp, Probe Sequence
ccaggacagggcaaaacgacaagag

SEQ ID NO: 200713 - DNA, 25 bp, Probe Sequence
ccaggcagagggcaagacggagagg

SEQ ID NO: 200714 - DNA, 25 bp, Probe Sequence
ccatgggggctgcattggcggaggt

SEQ ID NO: 200715 - DNA, 25 bp, Probe Sequence
ccatgggggggtggagaggggtgca

SEQ ID NO: 200716 - DNA, 25 bp, Probe Sequence
ccagggtggggctggggctggagac

SEQ ID NO: 200717 - DNA, 25 bp, Probe Sequence
ccagggtggggctggggctggagac

SEQ ID NO: 200718 - DNA, 25 bp, Probe Sequence
ccaggtgtcgggtctggagaaggag

SEQ ID NO: 200719 - DNA, 25 bp, Probe Sequence
ccaggtatcgtagcggcgacacgag

SEQ ID NO: 200720 - DNA, 25 bp, Probe Sequence
ccaggtctcccagaggctcgggagg

SEQ ID NO: 200721 - DNA, 25 bp, Probe Sequence
ccagagaaccaagaggcccgtggcc

SEQ ID NO: 200722 - DNA, 25 bp, Probe Sequence
ccaggaagttgatcaatcccgaggc

SEQ ID NO: 200723 - DNA, 25 bp, Probe Sequence
ccaggagagcttgacgtcccaagag

SEQ ID NO: 200724 - DNA, 25 bp, Probe Sequence
ccagggcatttgtcacttaccaaat

SEQ ID NO: 200725 - DNA, 25 bp, Probe Sequence
ccaggtgtcggagcctgacctgaat

SEQ ID NO: 200726 - DNA, 25 bp, Probe Sequence
ccaggtgtggtggcgcctggttgag

SEQ ID NO: 200727 - DNA, 25 bp, Probe Sequence
ccaggctggggcccttgagtgatag

SEQ ID NO: 200728 - DNA, 25 bp, Probe Sequence
ccaggagggagccatcctggctaac

SEQ ID NO: 200729 - DNA, 25 bp, Probe Sequence
ccaggatgaggtcgctgcatctgcc

SEQ ID NO: 200730 - DNA, 25 bp, Probe Sequence
ccatgtgctgagcggctggatctgc

SEQ ID NO: 200731 - DNA, 25 bp, Probe Sequence
ccatgtctatgccctgtacattgta

SEQ ID NO: 200732 - DNA, 25 bp, Probe Sequence
ccatgatgcaagccagcttcctgtg

SEQ ID NO: 200733 - DNA, 25 bp, Probe Sequence
ccagcagaacctggctctgcagctg

SEQ ID NO: 200734 - DNA, 25 bp, Probe Sequence
ccaggacgacatgctctgtgctggc

SEQ ID NO: 200735 - DNA, 25 bp, Probe Sequence
ccatggaccagaagtctctctgggc

SEQ ID NO: 200736 - DNA, 25 bp, Probe Sequence
ccagggccagcaactactctgtggc

SEQ ID NO: 200737 - DNA, 25 bp, Probe Sequence
ccagggctcgcactttactggacat

SEQ ID NO: 200738 - DNA, 25 bp, Probe Sequence
ccaggcccagccttatgaactgaat

SEQ ID NO: 200739 - DNA, 25 bp, Probe Sequence
ccaggctctgatgccttgaattggt

SEQ ID NO: 200740 - DNA, 25 bp, Probe Sequence
ccacttcgaggccattgcgttggtg

SEQ ID NO: 200741 - DNA, 25 bp, Probe Sequence
ccagcatttcgatcctcgtcaggtg

SEQ ID NO: 200742 - DNA, 25 bp, Probe Sequence
ccagattactggacctactcagggt

SEQ ID NO: 200743 - DNA, 25 bp, Probe Sequence
ccagatctcactcgtgcaatggcca

SEQ ID NO: 200744 - DNA, 25 bp, Probe Sequence
ccatgtccactcttaagcactgaag

SEQ ID NO: 200745 - DNA, 25 bp, Probe Sequence
ccatgtccacccaacagatcaagaa

SEQ ID NO: 200746 - DNA, 25 bp, Probe Sequence
ccatgttccccaacttgacagatgt

SEQ ID NO: 200747 - DNA, 25 bp, Probe Sequence
ccagcaacttcctcgagatcgatgt

SEQ ID NO: 200748 - DNA, 25 bp, Probe Sequence
ccagcaacttcctcgagatcgatgt

SEQ ID NO: 200749 - DNA, 25 bp, Probe Sequence
ccagttttccagtagaatgcttgag

SEQ ID NO: 200750 - DNA, 25 bp, Probe Sequence
ccagtgtttccgtcagtacgcgaag

SEQ ID NO: 200751 - DNA, 25 bp, Probe Sequence
ccagtctttctacagtgacaggcca

SEQ ID NO: 200752 - DNA, 25 bp, Probe Sequence
ccaggcttgatttggatccacaggc

SEQ ID NO: 200753 - DNA, 25 bp, Probe Sequence
ccaggttgatgacagaccagtcctt

SEQ ID NO: 200754 - DNA, 25 bp, Probe Sequence
ccagctctaatacattccaactcgt

SEQ ID NO: 200755 - DNA, 25 bp, Probe Sequence
ccagcctacattcacttctaaagtc

SEQ ID NO: 200756 - DNA, 25 bp, Probe Sequence
ccagcctactttatacacaatgtta

SEQ ID NO: 200757 - DNA, 25 bp, Probe Sequence
ccaggaagtgttatactcaatttga

SEQ ID NO: 200758 - DNA, 25 bp, Probe Sequence
ccaagattggttctaacgctttgcg

SEQ ID NO: 200759 - DNA, 25 bp, Probe Sequence
ccagtatctggacaagaacgctttg

SEQ ID NO: 200760 - DNA, 25 bp, Probe Sequence
ccagtttggcagccccaagtgaggg

SEQ ID NO: 200761 - DNA, 25 bp, Probe Sequence
ccagttcttcatcacgacagtcaag

SEQ ID NO: 200762 - DNA, 25 bp, Probe Sequence
ccagtggctctcagacgaagaggcg

SEQ ID NO: 200763 - DNA, 25 bp, Probe Sequence
ccatgtactgccaagtggtcaaggc

SEQ ID NO: 200764 - DNA, 25 bp, Probe Sequence
ccatggactcctggaaggcacagag

SEQ ID NO: 200765 - DNA, 25 bp, Probe Sequence
ccatgggctccggtgagtctggagt

SEQ ID NO: 200766 - DNA, 25 bp, Probe Sequence
ccaggcctatggatagatcaggagg

SEQ ID NO: 200767 - DNA, 25 bp, Probe Sequence
ccaggcccagcgatagatcaggagg

SEQ ID NO: 200768 - DNA, 25 bp, Probe Sequence
ccaggcatccgggctggacggaaga

SEQ ID NO: 200769 - DNA, 25 bp, Probe Sequence
ccaggcccgctgggagggtacatgg

SEQ ID NO: 200770 - DNA, 25 bp, Probe Sequence
ccaggccctccagcaggaggacaga

SEQ ID NO: 200771 - DNA, 25 bp, Probe Sequence
ccaggcgccatctagcacagcctgg

SEQ ID NO: 200772 - DNA, 25 bp, Probe Sequence
ccagggcaaccatcagcttgcggaa

SEQ ID NO: 200773 - DNA, 25 bp, Probe Sequence
ccaggaacacgggagcttctgaaga

SEQ ID NO: 200774 - DNA, 25 bp, Probe Sequence
ccaggatcatcaaggggttcgagtg

SEQ ID NO: 200775 - DNA, 25 bp, Probe Sequence
ccaggtcaagggacgttctgtgggc

SEQ ID NO: 200776 - DNA, 25 bp, Probe Sequence
ccaggtcaagggacgttctgtgggc

SEQ ID NO: 200777 - DNA, 25 bp, Probe Sequence
ccaggcccacagcatggggcttggc

SEQ ID NO: 200778 - DNA, 25 bp, Probe Sequence
ccaggtcctagccaatggtctggac

SEQ ID NO: 200779 - DNA, 25 bp, Probe Sequence
ccaggatcctaaatcatgacttacc

SEQ ID NO: 200780 - DNA, 25 bp, Probe Sequence
ccaggtggtctcctctgacttcaac

SEQ ID NO: 200781 - DNA, 25 bp, Probe Sequence
ccaggctggagtgtttgctaaacaa

SEQ ID NO: 200782 - DNA, 25 bp, Probe Sequence
ccactctggacctctaccaaataaa

SEQ ID NO: 200783 - DNA, 25 bp, Probe Sequence
ccaccggatcaacttcgacaaatac

SEQ ID NO: 200784 - DNA, 25 bp, Probe Sequence
ccacgaggtcccctcgaggaacatc

SEQ ID NO: 200785 - DNA, 25 bp, Probe Sequence
ccaactgggacttccgaggcaactt

SEQ ID NO: 200786 - DNA, 25 bp, Probe Sequence
ccaactgggttctcaggctttcagc

SEQ ID NO: 200787 - DNA, 25 bp, Probe Sequence
gcccctgtgggttacggttcaggca

SEQ ID NO: 200788 - DNA, 25 bp, Probe Sequence
ccaccgaggtgctgaagcctgtcag

SEQ ID NO: 200789 - DNA, 25 bp, Probe Sequence
ccagcacgaggacttaccctggggt

SEQ ID NO: 200790 - DNA, 25 bp, Probe Sequence
ccagcacgaggacttaccctggggt

SEQ ID NO: 200791 - DNA, 25 bp, Probe Sequence
ccagcagaaatgccttaccctcatg

SEQ ID NO: 200792 - DNA, 25 bp, Probe Sequence
ccagagatcatcgactacctttatg

SEQ ID NO: 200793 - DNA, 25 bp, Probe Sequence
ccaggtcagccacagcgtatgatgg

SEQ ID NO: 200794 - DNA, 25 bp, Probe Sequence
ccatggtcaccgtgctggagatggg

SEQ ID NO: 200795 - DNA, 25 bp, Probe Sequence
ccatggtaatcctgctcagtacgag

SEQ ID NO: 200796 - DNA, 25 bp, Probe Sequence
ccagggacagtgtgctcagtaaagt

SEQ ID NO: 200797 - DNA, 25 bp, Probe Sequence
ccaggggcagtgaagtgtttaggtg

SEQ ID NO: 200798 - DNA, 25 bp, Probe Sequence
tccggtgcaggagaattttgacgtg

SEQ ID NO: 200799 - DNA, 25 bp, Probe Sequence
ccagtggcacagtttattcctactt

SEQ ID NO: 200800 - DNA, 25 bp, Probe Sequence
ccagggctgagcatatttccatagc

SEQ ID NO: 200801 - DNA, 25 bp, Probe Sequence
ccagggctagtattgcttctcaata

SEQ ID NO: 200802 - DNA, 25 bp, Probe Sequence
ccaggtgctaaaggcattgctataa

SEQ ID NO: 200803 - DNA, 25 bp, Probe Sequence
ccagggccaataggcattcctggca

SEQ ID NO: 200804 - DNA, 25 bp, Probe Sequence
ccaggacccatggcctgtatcaaca

SEQ ID NO: 200805 - DNA, 25 bp, Probe Sequence
ccatggagccctagctttgcataaa

SEQ ID NO: 200806 - DNA, 25 bp, Probe Sequence
gccaggggccctgttaacaaactgc

SEQ ID NO: 200807 - DNA, 25 bp, Probe Sequence
ccagggactcttgttaacagtaact

SEQ ID NO: 200808 - DNA, 25 bp, Probe Sequence
ccaggagactttgaatgatcacact

SEQ ID NO: 200809 - DNA, 25 bp, Probe Sequence
ccaggcgttttctgagcatacctgg

SEQ ID NO: 200810 - DNA, 25 bp, Probe Sequence
ccaggctggtctaccaggtagttgg

SEQ ID NO: 200811 - DNA, 25 bp, Probe Sequence
ccagggctacttacaggggctgttg

SEQ ID NO: 200812 - DNA, 25 bp, Probe Sequence
ccaggagagctctgtcaggtggctg

SEQ ID NO: 200813 - DNA, 25 bp, Probe Sequence
ccaggcagtctctagctacctggca

SEQ ID NO: 200814 - DNA, 25 bp, Probe Sequence
ccaggacagctgacgtacctgagca

SEQ ID NO: 200815 - DNA, 25 bp, Probe Sequence
ccaggcacaatgaggagttgagctt

SEQ ID NO: 200816 - DNA, 25 bp, Probe Sequence
ccagaccgtgtctgacttagtgtaa

SEQ ID NO: 200817 - DNA, 25 bp, Probe Sequence
ccagacctgcccttacagtagtgta

SEQ ID NO: 200818 - DNA, 25 bp, Probe Sequence
ccagacctgcccttacagtagtgta

SEQ ID NO: 200819 - DNA, 25 bp, Probe Sequence
ccaggctgtaccttcacagtcctgg

SEQ ID NO: 200820 - DNA, 25 bp, Probe Sequence
ccagtattgccctcaattcctgaga

SEQ ID NO: 200821 - DNA, 25 bp, Probe Sequence
ccagttcagcccttcagatatttga

SEQ ID NO: 200822 - DNA, 25 bp, Probe Sequence
ccaggccaggcagccaaatcttgcc

SEQ ID NO: 200823 - DNA, 25 bp, Probe Sequence
ccaggccagtcctaaaagagctcct

SEQ ID NO: 200824 - DNA, 25 bp, Probe Sequence
ccagaccacgtgggacagaactcct

SEQ ID NO: 200825 - DNA, 25 bp, Probe Sequence
ccagaggccctgagattgagccccg

SEQ ID NO: 200826 - DNA, 25 bp, Probe Sequence
ccaggacctgcgggataggcctggc

SEQ ID NO: 200827 - DNA, 25 bp, Probe Sequence
ccaggcctgtgggagaatgagccag

SEQ ID NO: 200828 - DNA, 25 bp, Probe Sequence
ccagagtctgtgtggacaaccgtcc

SEQ ID NO: 200829 - DNA, 25 bp, Probe Sequence
ccagcagtggtctttgaagcacctg

SEQ ID NO: 200830 - DNA, 25 bp, Probe Sequence
ccacactggacttctggactacata

SEQ ID NO: 200831 - DNA, 25 bp, Probe Sequence
ccagcattgctggttctatttaatg

SEQ ID NO: 200832 - DNA, 25 bp, Probe Sequence
ccagatttgctattggattaaagga

SEQ ID NO: 200833 - DNA, 25 bp, Probe Sequence
ccagcattgatgaacggatgaagaa

SEQ ID NO: 200834 - DNA, 25 bp, Probe Sequence
ccagtatagttctgtatcaaatcca

SEQ ID NO: 200835 - DNA, 25 bp, Probe Sequence
ccagtactgctttcttcaaactctc

SEQ ID NO: 200836 - DNA, 25 bp, Probe Sequence
ccagtttgttctctcagaacccaga

SEQ ID NO: 200837 - DNA, 25 bp, Probe Sequence
ccagtctcttttataaagtctcaga

SEQ ID NO: 200838 - DNA, 25 bp, Probe Sequence
ccagtcctgggtcacaatatgttcg

SEQ ID NO: 200839 - DNA, 25 bp, Probe Sequence
ccagttgtggcgtccagaaagcttc

SEQ ID NO: 200840 - DNA, 25 bp, Probe Sequence
ccagttgggtgatctgcaccgtgcc

SEQ ID NO: 200841 - DNA, 25 bp, Probe Sequence
ccagcttgtggtaacttactgtcac

SEQ ID NO: 200842 - DNA, 25 bp, Probe Sequence
ccaggatgggtacctatcactgctc

SEQ ID NO: 200843 - DNA, 25 bp, Probe Sequence
ccagtgatgagggcacttaccgctg

SEQ ID NO: 200844 - DNA, 25 bp, Probe Sequence
ccagtgagctggacatcttcgtggg

SEQ ID NO: 200845 - DNA, 25 bp, Probe Sequence
ccagcagcaacgacatcaacggggg

SEQ ID NO: 200846 - DNA, 25 bp, Probe Sequence
ccagcagctagccattgcacactgg

SEQ ID NO: 200847 - DNA, 25 bp, Probe Sequence
ccagagctcaggcctgcagactggg

SEQ ID NO: 200848 - DNA, 25 bp, Probe Sequence
ccaggcacagtggctcagcctataa

SEQ ID NO: 200849 - DNA, 25 bp, Probe Sequence
ccaggcacgatggctcatgctgtaa

SEQ ID NO: 200850 - DNA, 25 bp, Probe Sequence
ccaggcatcgcaggactcatgaaga

SEQ ID NO: 200851 - DNA, 25 bp, Probe Sequence
ccagagcctgctggacatccaggag

SEQ ID NO: 200852 - DNA, 25 bp, Probe Sequence
ccatggctgctgactgactccagcc

SEQ ID NO: 200853 - DNA, 25 bp, Probe Sequence
ccaggctctgacaacatcagatcac

SEQ ID NO: 200854 - DNA, 25 bp, Probe Sequence
ccaggcagcattagccatcgtgccc

SEQ ID NO: 200855 - DNA, 25 bp, Probe Sequence
ccaggagttggactcagctctgcac

SEQ ID NO: 200856 - DNA, 25 bp, Probe Sequence
ccaggagttggaggctgcattgagc

SEQ ID NO: 200857 - DNA, 25 bp, Probe Sequence
ccagtatagtggctgctgcatagac

SEQ ID NO: 200858 - DNA, 25 bp, Probe Sequence
ccagaaatgtgaagtgctagctgaa

SEQ ID NO: 200859 - DNA, 25 bp, Probe Sequence
ccagtttgttcatgtcagtgagagc

SEQ ID NO: 200860 - DNA, 25 bp, Probe Sequence
ccagtgtctgtgacgagctcaggag

SEQ ID NO: 200861 - DNA, 25 bp, Probe Sequence
ccaggctttggtggcagcatggaca

SEQ ID NO: 200862 - DNA, 25 bp, Probe Sequence
ccaggcatcctcatggaagtgacat

SEQ ID NO: 200863 - DNA, 25 bp, Probe Sequence
ccaggcccatatgcagcaggtgact

SEQ ID NO: 200864 - DNA, 25 bp, Probe Sequence
ccaggtcatcattcctctggtgttg

SEQ ID NO: 200865 - DNA, 25 bp, Probe Sequence
ccaggagatcaaggctgcagtgagt

SEQ ID NO: 200866 - DNA, 25 bp, Probe Sequence
ccagaagccatcgtgtcgctggtcg

SEQ ID NO: 200867 - DNA, 25 bp, Probe Sequence
ccagaagagctccgtgctctgttcc

SEQ ID NO: 200868 - DNA, 25 bp, Probe Sequence
ccaggatggtctcgatctcctgacc

SEQ ID NO: 200869 - DNA, 25 bp, Probe Sequence
ccagaatgtggtaactctctaccag

SEQ ID NO: 200870 - DNA, 25 bp, Probe Sequence
ccagaaggagctcaccattggctcg

SEQ ID NO: 200871 - DNA, 25 bp, Probe Sequence
ccagtcggactgcgacatagcccat

SEQ ID NO: 200872 - DNA, 25 bp, Probe Sequence
ccaggcacaacacagctaacacaag

SEQ ID NO: 200873 - DNA, 25 bp, Probe Sequence
ccaggagcaagaggagcggagcaaa

SEQ ID NO: 200874 - DNA, 25 bp, Probe Sequence
ccaggagcactgactgcagttgaga

SEQ ID NO: 200875 - DNA, 25 bp, Probe Sequence
ccagggcctgagcctttgaagcagg

SEQ ID NO: 200876 - DNA, 25 bp, Probe Sequence
ccagggtgatgacctgtggacctgc

SEQ ID NO: 200877 - DNA, 25 bp, Probe Sequence
ccaggggctgacaatgcgaggtcgc

SEQ ID NO: 200878 - DNA, 25 bp, Probe Sequence
ccaggagagcatcttccaggctgag

SEQ ID NO: 200879 - DNA, 25 bp, Probe Sequence
ccaggagcctgagaccagcctgggc

SEQ ID NO: 200880 - DNA, 25 bp, Probe Sequence
ccaggcagaaggggacatcctgggc

SEQ ID NO: 200881 - DNA, 25 bp, Probe Sequence
ccagtctggaaggggccgtgaggaa

SEQ ID NO: 200882 - DNA, 25 bp, Probe Sequence
ccagttcgagggggcggaggaatat

SEQ ID NO: 200883 - DNA, 25 bp, Probe Sequence
ccagttttgtggccaccagggaaat

SEQ ID NO: 200884 - DNA, 25 bp, Probe Sequence
ccagatttgctgagagggcacggca

SEQ ID NO: 200885 - DNA, 25 bp, Probe Sequence
ccagtgacttgcatgagaagccaga

SEQ ID NO: 200886 - DNA, 25 bp, Probe Sequence
ccagtggctctgcctagagcccagg

SEQ ID NO: 200887 - DNA, 25 bp, Probe Sequence
ccagggcttcctcgaggaactggct

SEQ ID NO: 200888 - DNA, 25 bp, Probe Sequence
ccagaggcgcccagaggaagtcagc

SEQ ID NO: 200889 - DNA, 25 bp, Probe Sequence
ccaggaggcttcaagaggagggcac

SEQ ID NO: 200890 - DNA, 25 bp, Probe Sequence
ccaggcagccccagaggagagagac

SEQ ID NO: 200891 - DNA, 25 bp, Probe Sequence
ccaggcactgcctggagggcaggga

SEQ ID NO: 200892 - DNA, 25 bp, Probe Sequence
ccaggcacacctgcgagggggcagg

SEQ ID NO: 200893 - DNA, 25 bp, Probe Sequence
ccagagagccctgtgggggccagaa

SEQ ID NO: 200894 - DNA, 25 bp, Probe Sequence
ccagaaccccgtctgtggcaaagag

SEQ ID NO: 200895 - DNA, 25 bp, Probe Sequence
ccagacccccagggctgagttaaag

SEQ ID NO: 200896 - DNA, 25 bp, Probe Sequence
ccagttccccagctgtagttatgta

SEQ ID NO: 200897 - DNA, 25 bp, Probe Sequence
ccagttctactatggctgagttctg

SEQ ID NO: 200898 - DNA, 25 bp, Probe Sequence
ccagtgcctgacttgggataggact

SEQ ID NO: 200899 - DNA, 25 bp, Probe Sequence
ccagcaactgaattgtggtcacgat

SEQ ID NO: 200900 - DNA, 25 bp, Probe Sequence
ccagaagctccatgctggtcactag

SEQ ID NO: 200901 - DNA, 25 bp, Probe Sequence
ccagcaaacacagggcccactggaa

SEQ ID NO: 200902 - DNA, 25 bp, Probe Sequence
ccagctatcaactcgcgccctggaa

SEQ ID NO: 200903 - DNA, 25 bp, Probe Sequence
ccagatgccaagatcctgcctctgg

SEQ ID NO: 200904 - DNA, 25 bp, Probe Sequence
ccagatgagctgcagtgcctggacg

SEQ ID NO: 200905 - DNA, 25 bp, Probe Sequence
ccagagtcatcctcagttgacgcct

SEQ ID NO: 200906 - DNA, 25 bp, Probe Sequence
ccagatcaacctggagctctacgcc

SEQ ID NO: 200907 - DNA, 25 bp, Probe Sequence
ccagatccgcctaaccaatgtggcc

SEQ ID NO: 200908 - DNA, 25 bp, Probe Sequence
ccagcactgccactcaacaaatgct

SEQ ID NO: 200909 - DNA, 25 bp, Probe Sequence
ccagcatttcattcataccagataa

SEQ ID NO: 200910 - DNA, 25 bp, Probe Sequence
ccagcatgctttttaccagctcatc

SEQ ID NO: 200911 - DNA, 25 bp, Probe Sequence
ccagatgcttctgactaagctcccc

SEQ ID NO: 200912 - DNA, 25 bp, Probe Sequence
ccagatgcatccgagacagaacatg

SEQ ID NO: 200913 - DNA, 25 bp, Probe Sequence
ccagacattcgagctggcaatggct

SEQ ID NO: 200914 - DNA, 25 bp, Probe Sequence
ccagactgggaggcatgacaagtaa

SEQ ID NO: 200915 - DNA, 25 bp, Probe Sequence
ccagactggttggcatgtctacaat

SEQ ID NO: 200916 - DNA, 25 bp, Probe Sequence
ccagatgcagacttggatgtaacca

SEQ ID NO: 200917 - DNA, 25 bp, Probe Sequence
ccagggaagatgcatgtgtgacaca

SEQ ID NO: 200918 - DNA, 25 bp, Probe Sequence
ccagaggacacaggcagcttccaaa

SEQ ID NO: 200919 - DNA, 25 bp, Probe Sequence
ccagaggacacaggcagcttccaaa

SEQ ID NO: 200920 - DNA, 25 bp, Probe Sequence
ccaggtgagacagcaccctctatgc

SEQ ID NO: 200921 - DNA, 25 bp, Probe Sequence
ccagcagtgaagggacattctctac

SEQ ID NO: 200922 - DNA, 25 bp, Probe Sequence
ccagcggaaggttcattcgcatagg

SEQ ID NO: 200923 - DNA, 25 bp, Probe Sequence
ccagtgtgaacgtctcttccatggc

SEQ ID NO: 200924 - DNA, 25 bp, Probe Sequence
ccagtgtgagacccgaaccatgctg

SEQ ID NO: 200925 - DNA, 25 bp, Probe Sequence
ccagtgcataacaccacactcagct

SEQ ID NO: 200926 - DNA, 25 bp, Probe Sequence
ccagtgaaaatacccctcaaaatgg

SEQ ID NO: 200927 - DNA, 25 bp, Probe Sequence
ccaggcaagatcatccggtgaaaga

SEQ ID NO: 200928 - DNA, 25 bp, Probe Sequence
ccagtctggtgatccgatgtacaac

SEQ ID NO: 200929 - DNA, 25 bp, Probe Sequence
ccagtgcagggaaccgtgataagcc

SEQ ID NO: 200930 - DNA, 25 bp, Probe Sequence
ccagcttggtgtgccggaaacgcaa

SEQ ID NO: 200931 - DNA, 25 bp, Probe Sequence
ccagtcgtctggggtggacaaccat

SEQ ID NO: 200932 - DNA, 25 bp, Probe Sequence
ccagtcattttgcggtgaaaacata

SEQ ID NO: 200933 - DNA, 25 bp, Probe Sequence
ccaccactttttgtgatagatcaat

SEQ ID NO: 200934 - DNA, 25 bp, Probe Sequence
ccagtcctttgtgccttggcaaaaa

SEQ ID NO: 200935 - DNA, 25 bp, Probe Sequence
ccagtccagtttggcactagtgaca

SEQ ID NO: 200936 - DNA, 25 bp, Probe Sequence
ccaggaggctttggagcggctaaaa

SEQ ID NO: 200937 - DNA, 25 bp, Probe Sequence
ccaggtggtgttgggtgagtacaac

SEQ ID NO: 200938 - DNA, 25 bp, Probe Sequence
ccacgtcggtctgggtgttaagtgc

SEQ ID NO: 200939 - DNA, 25 bp, Probe Sequence
ccacctcagggctgggcaaagaatg

SEQ ID NO: 200940 - DNA, 25 bp, Probe Sequence
ccaccctcgaggcagggaaaagcca

SEQ ID NO: 200941 - DNA, 25 bp, Probe Sequence
ccagagcctcgtgagaggtcaccgg

SEQ ID NO: 200942 - DNA, 25 bp, Probe Sequence
ccagacgtgctggaaaggttgagcc

SEQ ID NO: 200943 - DNA, 25 bp, Probe Sequence
ccagagcctggtcaacgagctggcc

SEQ ID NO: 200944 - DNA, 25 bp, Probe Sequence
ccagagcgtgggcaacgaggccgag

SEQ ID NO: 200945 - DNA, 25 bp, Probe Sequence
ccagagctgtggagaggggacccta

SEQ ID NO: 200946 - DNA, 25 bp, Probe Sequence
ccagtggggttggggtgagcaggct

SEQ ID NO: 200947 - DNA, 25 bp, Probe Sequence
ccagttcgggatcgtgtagccggcg

SEQ ID NO: 200948 - DNA, 25 bp, Probe Sequence
ccacgctggggacgtgtatctctac

SEQ ID NO: 200949 - DNA, 25 bp, Probe Sequence
ccagcctggggacattatccggctc

SEQ ID NO: 200950 - DNA, 25 bp, Probe Sequence
ccagttgtggttcatgtctgcgggc

SEQ ID NO: 200951 - DNA, 25 bp, Probe Sequence
ccagttgtgcacttttacaagccgc

SEQ ID NO: 200952 - DNA, 25 bp, Probe Sequence
ccagtgtgtacttggcttaactcaa

SEQ ID NO: 200953 - DNA, 25 bp, Probe Sequence
ccagtggtgacttcactgatattta

SEQ ID NO: 200954 - DNA, 25 bp, Probe Sequence
ccagttggacaggcctggtttgaat

SEQ ID NO: 200955 - DNA, 25 bp, Probe Sequence
ccaggagggcaagggcgattctggg

SEQ ID NO: 200956 - DNA, 25 bp, Probe Sequence
ccagggtggccaggggtggtgaggg

SEQ ID NO: 200957 - DNA, 25 bp, Probe Sequence
ccagaaggacctgctggttggggcc

SEQ ID NO: 200958 - DNA, 25 bp, Probe Sequence
ccagggtgcatctcctggtcaggag

SEQ ID NO: 200959 - DNA, 25 bp, Probe Sequence
ccagagcctgtctgctatagctcag

SEQ ID NO: 200960 - DNA, 25 bp, Probe Sequence
ccagaggtctccctataccgagacc

SEQ ID NO: 200961 - DNA, 25 bp, Probe Sequence
ccagggtggcctttagcacagtatc

SEQ ID NO: 200962 - DNA, 25 bp, Probe Sequence
ccaggatgttccaaatctgacctat

SEQ ID NO: 200963 - DNA, 25 bp, Probe Sequence
ccaggatttccacatcttggtgaag

SEQ ID NO: 200964 - DNA, 25 bp, Probe Sequence
ccagagtcattcctccatttggtta

SEQ ID NO: 200965 - DNA, 25 bp, Probe Sequence
ccagtctattcgggagtctgagtat

SEQ ID NO: 200966 - DNA, 25 bp, Probe Sequence
ccagtctcttccagactcatagcat

SEQ ID NO: 200967 - DNA, 25 bp, Probe Sequence
ccagacctgtcctgcaagatcaata

SEQ ID NO: 200968 - DNA, 25 bp, Probe Sequence
ccagactccatggcaaaacaacata

SEQ ID NO: 200969 - DNA, 25 bp, Probe Sequence
ccagatgcaccggcagaaagcagat

SEQ ID NO: 200970 - DNA, 25 bp, Probe Sequence
ccagagccgcgtggaaacagtgccc

SEQ ID NO: 200971 - DNA, 25 bp, Probe Sequence
tctacgggcttcaccaagtgaccat

SEQ ID NO: 200972 - DNA, 25 bp, Probe Sequence
ccacgttctccaaaaagtgcaccag

SEQ ID NO: 200973 - DNA, 25 bp, Probe Sequence
ccaggtttctctggaaagctccaca

SEQ ID NO: 200974 - DNA, 25 bp, Probe Sequence
ccaggtctgtttggaggcatcaccc

SEQ ID NO: 200975 - DNA, 25 bp, Probe Sequence
ccagacttctatagtgaggcaatac

SEQ ID NO: 200976 - DNA, 25 bp, Probe Sequence
ccagcctagctacagaactagactc

SEQ ID NO: 200977 - DNA, 25 bp, Probe Sequence
ccagtcgactggcaacaatgagaac

SEQ ID NO: 200978 - DNA, 25 bp, Probe Sequence
ccagtctcacggctgaagtgcgcaa

SEQ ID NO: 200979 - DNA, 25 bp, Probe Sequence
ccagctaccactctatgagctcgat

SEQ ID NO: 200980 - DNA, 25 bp, Probe Sequence
ccagtacaactatattgcatagaat

SEQ ID NO: 200981 - DNA, 25 bp, Probe Sequence
ccagtcacagctcagacttcataga

SEQ ID NO: 200982 - DNA, 25 bp, Probe Sequence
ccagtcagcagtcatgcacgctgat

SEQ ID NO: 200983 - DNA, 25 bp, Probe Sequence
ccagactcatagcatcagtggatac

SEQ ID NO: 200984 - DNA, 25 bp, Probe Sequence
ccaggtctcagccagcattattagc

SEQ ID NO: 200985 - DNA, 25 bp, Probe Sequence
ccaggtcatcaccgtagtcacagac

SEQ ID NO: 200986 - DNA, 25 bp, Probe Sequence
ccaggataaccttatctcaagatcc

SEQ ID NO: 200987 - DNA, 25 bp, Probe Sequence
ccagttaatctttctccaatgatcc

SEQ ID NO: 200988 - DNA, 25 bp, Probe Sequence
ccagttagttttgcctagaatcctg

SEQ ID NO: 200989 - DNA, 25 bp, Probe Sequence
ccaatgatagttttcccgtttacat

SEQ ID NO: 200990 - DNA, 25 bp, Probe Sequence
ccactgtcgtttaccacagtttcca

SEQ ID NO: 200991 - DNA, 25 bp, Probe Sequence
gccagagttggtgttcaagtttaca

SEQ ID NO: 200992 - DNA, 25 bp, Probe Sequence
ccagtttttccattgcagagtctta

SEQ ID NO: 200993 - DNA, 25 bp, Probe Sequence
ccagttttgcatccagtgacgtctg

SEQ ID NO: 200994 - DNA, 25 bp, Probe Sequence
ccagttttgatccagtcctgttgat

SEQ ID NO: 200995 - DNA, 25 bp, Probe Sequence
ccagtgtcttgtcagctctgggtgt

SEQ ID NO: 200996 - DNA, 25 bp, Probe Sequence
ccagctggtgttcagcgtgtctgtg

SEQ ID NO: 200997 - DNA, 25 bp, Probe Sequence
ccagctgtgggacaattatctgtgt

SEQ ID NO: 200998 - DNA, 25 bp, Probe Sequence
ccaggtagctatcaatcttttcttc

SEQ ID NO: 200999 - DNA, 25 bp, Probe Sequence
ccagttggccatgatgtcttttctt

SEQ ID NO: 201000 - DNA, 25 bp, Probe Sequence
ccagtgtgactatgcacctaatttt

SEQ ID NO: 201001 - DNA, 25 bp, Probe Sequence
ccagtgtcctagccaggccaagtat

SEQ ID NO: 201002 - DNA, 25 bp, Probe Sequence
ccagtgtcctggccagatgaaatgc

SEQ ID NO: 201003 - DNA, 25 bp, Probe Sequence
ccagttgtgcagccagaatgaaatg

SEQ ID NO: 201004 - DNA, 25 bp, Probe Sequence
ccagttgctagccaggtgacctgga

SEQ ID NO: 201005 - DNA, 25 bp, Probe Sequence
ccagaaatcccagcgcacctggggg

SEQ ID NO: 201006 - DNA, 25 bp, Probe Sequence
ccagtagaccatgcctgaccattgg

SEQ ID NO: 201007 - DNA, 25 bp, Probe Sequence
ccagaggagtgaatcctaggcctgg

SEQ ID NO: 201008 - DNA, 25 bp, Probe Sequence
ccagcaagggagtttagggctctga

SEQ ID NO: 201009 - DNA, 25 bp, Probe Sequence
ccagaagtgctgcttttttgcctgt

SEQ ID NO: 201010 - DNA, 25 bp, Probe Sequence
ccagtagtcttcttttgagtgccat

SEQ ID NO: 201011 - DNA, 25 bp, Probe Sequence
ccaggtgtctgtttttttgagaaag

SEQ ID NO: 201012 - DNA, 25 bp, Probe Sequence
ccaggtgtatggcttcttggaagtc

SEQ ID NO: 201013 - DNA, 25 bp, Probe Sequence
ccaggatggctgggcgagcattgga

SEQ ID NO: 201014 - DNA, 25 bp, Probe Sequence
ccaggaggcctgtcagagcctgaag

SEQ ID NO: 201015 - DNA, 25 bp, Probe Sequence
ccaggaggcctgtcagagcctgaag

SEQ ID NO: 201016 - DNA, 25 bp, Probe Sequence
ccagggtcctgccagagtctgcagg

SEQ ID NO: 201017 - DNA, 25 bp, Probe Sequence
ccagagggcagggctaggcgagagc

SEQ ID NO: 201018 - DNA, 25 bp, Probe Sequence
ccagagagatcgggctcaggacctg

SEQ ID NO: 201019 - DNA, 25 bp, Probe Sequence
ccagaagactgattggagggcccta

SEQ ID NO: 201020 - DNA, 25 bp, Probe Sequence
ccagaaagctgatggtgtgcccgtc

SEQ ID NO: 201021 - DNA, 25 bp, Probe Sequence
ccagaaacagaacaggccaggccca

SEQ ID NO: 201022 - DNA, 25 bp, Probe Sequence
ccagagagccagacacacggctccc

SEQ ID NO: 201023 - DNA, 25 bp, Probe Sequence
ccagatgacacatgaaagcagctcc

SEQ ID NO: 201024 - DNA, 25 bp, Probe Sequence
ccagtgcccgcagagatgagcaccg

SEQ ID NO: 201025 - DNA, 25 bp, Probe Sequence
ccagtgcccgtgagaaccaagagta

SEQ ID NO: 201026 - DNA, 25 bp, Probe Sequence
gccgtaccccatgagacaagaagta

SEQ ID NO: 201027 - DNA, 25 bp, Probe Sequence
ccagaaccttgcaaacgaagaagta

SEQ ID NO: 201028 - DNA, 25 bp, Probe Sequence
ccagaagcacttcatgggccagaat

SEQ ID NO: 201029 - DNA, 25 bp, Probe Sequence
ccagaagtctctctgggcaggtgta

SEQ ID NO: 201030 - DNA, 25 bp, Probe Sequence
gccagagtttgtgtgggcgggcgca

SEQ ID NO: 201031 - DNA, 25 bp, Probe Sequence
ccagagtgttctgcgtgggtggtga

SEQ ID NO: 201032 - DNA, 25 bp, Probe Sequence
ccaggtacttgggaggctgaggcag

SEQ ID NO: 201033 - DNA, 25 bp, Probe Sequence
ccaggtgacagaggcgggagagcag

SEQ ID NO: 201034 - DNA, 25 bp, Probe Sequence
ccagaggctcaggccgggactgaga

SEQ ID NO: 201035 - DNA, 25 bp, Probe Sequence
ccagaggctcggggtggtctggggg

SEQ ID NO: 201036 - DNA, 25 bp, Probe Sequence
ccagggtcaagtctggattggaggc

SEQ ID NO: 201037 - DNA, 25 bp, Probe Sequence
ccagggctgaagctgggatcccggc

SEQ ID NO: 201038 - DNA, 25 bp, Probe Sequence
ccaggtctgagatgaggccatgccc

SEQ ID NO: 201039 - DNA, 25 bp, Probe Sequence
ccaggtctgagatgaggccatgccc

SEQ ID NO: 201040 - DNA, 25 bp, Probe Sequence
ccaggtcacagatagagccttctgt

SEQ ID NO: 201041 - DNA, 25 bp, Probe Sequence
ccagggcacatctggagttcttctc

SEQ ID NO: 201042 - DNA, 25 bp, Probe Sequence
ccagtgccagcaccagtggtggctt

SEQ ID NO: 201043 - DNA, 25 bp, Probe Sequence
ccagtgctgcagaacggacttggga

SEQ ID NO: 201044 - DNA, 25 bp, Probe Sequence
ccaggtcagcaagggcacctgcgag

SEQ ID NO: 201045 - DNA, 25 bp, Probe Sequence
ccaggtccacagggtatcccaggag

SEQ ID NO: 201046 - DNA, 25 bp, Probe Sequence
ccagttcagcacgtttacctaggac

SEQ ID NO: 201047 - DNA, 25 bp, Probe Sequence
ccagttcctctgagtcctcaaagac

SEQ ID NO: 201048 - DNA, 25 bp, Probe Sequence
ccagttcctctgagtcctcaaagac

SEQ ID NO: 201049 - DNA, 25 bp, Probe Sequence
ccagttgccttcacagttgcaacaa

SEQ ID NO: 201050 - DNA, 25 bp, Probe Sequence
ccagttcatcttaagaatgtcaacg

SEQ ID NO: 201051 - DNA, 25 bp, Probe Sequence
ccagttcttctgctacatctgcaag

SEQ ID NO: 201052 - DNA, 25 bp, Probe Sequence
ccagaatttgctcgctacactactc

SEQ ID NO: 201053 - DNA, 25 bp, Probe Sequence
ccagaatctcctctacagatttttg

SEQ ID NO: 201054 - DNA, 25 bp, Probe Sequence
gccaaatgaccttggaccattcttt

SEQ ID NO: 201055 - DNA, 25 bp, Probe Sequence
gccatactgcccaaggtaatttatg

SEQ ID NO: 201056 - DNA, 25 bp, Probe Sequence
ccaaactctaacactatgcttaggc

SEQ ID NO: 201057 - DNA, 25 bp, Probe Sequence
ccaagagttacacacatttctatag

SEQ ID NO: 201058 - DNA, 25 bp, Probe Sequence
ccaaggtattgagacatattactgg

SEQ ID NO: 201059 - DNA, 25 bp, Probe Sequence
ccaccttttgcctaccaatacttgg

SEQ ID NO: 201060 - DNA, 25 bp, Probe Sequence
ccaccttgtctgctaaataaacatg

SEQ ID NO: 201061 - DNA, 25 bp, Probe Sequence
ccacctggtcggggaggagaccatg

SEQ ID NO: 201062 - DNA, 25 bp, Probe Sequence
ccaccttgttggagcctgcagggtg

SEQ ID NO: 201063 - DNA, 25 bp, Probe Sequence
ccagctcaagtctgaagccgcaggc

SEQ ID NO: 201064 - DNA, 25 bp, Probe Sequence
ccagtcggctctggttgttggcagc

SEQ ID NO: 201065 - DNA, 25 bp, Probe Sequence
ccagtcaggccgttttagaagagct

SEQ ID NO: 201066 - DNA, 25 bp, Probe Sequence
ccagtcaggacgtgtgggcgcgact

SEQ ID NO: 201067 - DNA, 25 bp, Probe Sequence
ccagtcagggtgggggcgctggagc

SEQ ID NO: 201068 - DNA, 25 bp, Probe Sequence
ccagtcagggtgggggcgctggagc

SEQ ID NO: 201069 - DNA, 25 bp, Probe Sequence
ccagtgagagtcgaggtggacatgg

SEQ ID NO: 201070 - DNA, 25 bp, Probe Sequence
ccagaatcatgtggaggggccagag

SEQ ID NO: 201071 - DNA, 25 bp, Probe Sequence
ccagcaccatggcggttggcaagaa

SEQ ID NO: 201072 - DNA, 25 bp, Probe Sequence
ccagcaccaaggacgtttcttcaga

SEQ ID NO: 201073 - DNA, 25 bp, Probe Sequence
ccacccaaatggcaagtttatactc

SEQ ID NO: 201074 - DNA, 25 bp, Probe Sequence
ccagcccatgacaggtttttgtaca

SEQ ID NO: 201075 - DNA, 25 bp, Probe Sequence
ccactgtatagaaggtttttgtagc

SEQ ID NO: 201076 - DNA, 25 bp, Probe Sequence
ccagtatcatagtttgtcttcctgt

SEQ ID NO: 201077 - DNA, 25 bp, Probe Sequence
ccagtgcatgcatatactgtctctg

SEQ ID NO: 201078 - DNA, 25 bp, Probe Sequence
ccagtgtcaccttgcgtttgtgaaa

SEQ ID NO: 201079 - DNA, 25 bp, Probe Sequence
ccagagagacgctgcttttaccagg

SEQ ID NO: 201080 - DNA, 25 bp, Probe Sequence
ccagaagccagttttatctaacggc

SEQ ID NO: 201081 - DNA, 25 bp, Probe Sequence
ccagaacctctcttttctaagatgc

SEQ ID NO: 201082 - DNA, 25 bp, Probe Sequence
ccagagtccacttttgtcacaattc

SEQ ID NO: 201083 - DNA, 25 bp, Probe Sequence
ccagagctaaggcaaggacaggtca

SEQ ID NO: 201084 - DNA, 25 bp, Probe Sequence
ccagacttaggccagagcccagagg

SEQ ID NO: 201085 - DNA, 25 bp, Probe Sequence
ccagcactgtaagaagctgtccagc

SEQ ID NO: 201086 - DNA, 25 bp, Probe Sequence
ccagcatcttaaaccagcttggtgc

SEQ ID NO: 201087 - DNA, 25 bp, Probe Sequence
ccagcatcttaaaccagcttggtgc

SEQ ID NO: 201088 - DNA, 25 bp, Probe Sequence
ccagccttgtatcactgttgggctt

SEQ ID NO: 201089 - DNA, 25 bp, Probe Sequence
ccagccttgatgccatatgccttgg

SEQ ID NO: 201090 - DNA, 25 bp, Probe Sequence
ccagccctgcattgctgagtcaatc

SEQ ID NO: 201091 - DNA, 25 bp, Probe Sequence
ccagcggcgatattggtagattggc

SEQ ID NO: 201092 - DNA, 25 bp, Probe Sequence
ccagggctgcatctgcaaaggggcg

SEQ ID NO: 201093 - DNA, 25 bp, Probe Sequence
ccagggcctacgggcagaggtggag

SEQ ID NO: 201094 - DNA, 25 bp, Probe Sequence
ccacgccctaccagagggggcaaag

SEQ ID NO: 201095 - DNA, 25 bp, Probe Sequence
ccaccccgatccctaggtgaggaga

SEQ ID NO: 201096 - DNA, 25 bp, Probe Sequence
ccaccccatttgacggtctatggga

SEQ ID NO: 201097 - DNA, 25 bp, Probe Sequence
ccaccacctttgaggacctcgtgtc

SEQ ID NO: 201098 - DNA, 25 bp, Probe Sequence
ccaccatcttacagggcactttgtc

SEQ ID NO: 201099 - DNA, 25 bp, Probe Sequence
ccagtctctgctgcacgatggcagc

SEQ ID NO: 201100 - DNA, 25 bp, Probe Sequence
ccagctcctggccatctgtaggagt

SEQ ID NO: 201101 - DNA, 25 bp, Probe Sequence
ccagctcattggaattgtcggtatt

SEQ ID NO: 201102 - DNA, 25 bp, Probe Sequence
ccagcatttgccatcttcaagtttg

SEQ ID NO: 201103 - DNA, 25 bp, Probe Sequence
ccagcatttgccatcttcaagtttg

SEQ ID NO: 201104 - DNA, 25 bp, Probe Sequence
ccagtttcctaattccatctcactg

SEQ ID NO: 201105 - DNA, 25 bp, Probe Sequence
ccagtcttcagctaagtcctgtcag

SEQ ID NO: 201106 - DNA, 25 bp, Probe Sequence
ccagctttcagctggccgcattaca

SEQ ID NO: 201107 - DNA, 25 bp, Probe Sequence
ccagtagccatgtggccagtctacc

SEQ ID NO: 201108 - DNA, 25 bp, Probe Sequence
gctcagccaccaaaagtaactacct

SEQ ID NO: 201109 - DNA, 25 bp, Probe Sequence
ccagcctcgaaatgcagaacgacgc

SEQ ID NO: 201110 - DNA, 25 bp, Probe Sequence
gccactcttatgtaaaaacaaggca

SEQ ID NO: 201111 - DNA, 25 bp, Probe Sequence
ccagccctagtagcaattaaggaaa

SEQ ID NO: 201112 - DNA, 25 bp, Probe Sequence
ccacccctaagcatgttacaagcaa

SEQ ID NO: 201113 - DNA, 25 bp, Probe Sequence
ccacccattgaagtctccttgggcc

SEQ ID NO: 201114 - DNA, 25 bp, Probe Sequence
ccagaccaaagagctgcctcttggt

SEQ ID NO: 201115 - DNA, 25 bp, Probe Sequence
ccagaccagacaacctgcctagaaa

SEQ ID NO: 201116 - DNA, 25 bp, Probe Sequence
ccagactagatggacctgcctgcat

SEQ ID NO: 201117 - DNA, 25 bp, Probe Sequence
ccagttcagaggacaccctgctgaa

SEQ ID NO: 201118 - DNA, 25 bp, Probe Sequence
ccagttaagcaggctcctcggaagt

SEQ ID NO: 201119 - DNA, 25 bp, Probe Sequence
ccagctaaacatgcttcatcgtcgg

SEQ ID NO: 201120 - DNA, 25 bp, Probe Sequence
ccagctaagcctggcctttgatccg

SEQ ID NO: 201121 - DNA, 25 bp, Probe Sequence
ccagtacaccaggacatttgagaag

SEQ ID NO: 201122 - DNA, 25 bp, Probe Sequence
ccagtcccgatgcactttgaggggt

SEQ ID NO: 201123 - DNA, 25 bp, Probe Sequence
ccagttctcagacacttaggggaca

SEQ ID NO: 201124 - DNA, 25 bp, Probe Sequence
ccagttcactgacaaacatggggaa

SEQ ID NO: 201125 - DNA, 25 bp, Probe Sequence
ccagttcatcgacgagaacccagag

SEQ ID NO: 201126 - DNA, 25 bp, Probe Sequence
ccacatgtatccgggataaccggga

SEQ ID NO: 201127 - DNA, 25 bp, Probe Sequence
ccagctgctatcttgcggtagcaca

SEQ ID NO: 201128 - DNA, 25 bp, Probe Sequence
ccagctgctacttcgacattgagcg

SEQ ID NO: 201129 - DNA, 25 bp, Probe Sequence
ccagccaatgcttcccattggcctt

SEQ ID NO: 201130 - DNA, 25 bp, Probe Sequence
ccagtgagcttctaccatcatggac

SEQ ID NO: 201131 - DNA, 25 bp, Probe Sequence
ccagcgactgtctcagactgggcag

SEQ ID NO: 201132 - DNA, 25 bp, Probe Sequence
ccagtgacttgggaggctgaggcag

SEQ ID NO: 201133 - DNA, 25 bp, Probe Sequence
ccagtgacttgggaggctgaggcag

SEQ ID NO: 201134 - DNA, 25 bp, Probe Sequence
ccagtacttgactcgtggagaggag

SEQ ID NO: 201135 - DNA, 25 bp, Probe Sequence
ccagtcacttgcaaccgtggaggag

SEQ ID NO: 201136 - DNA, 25 bp, Probe Sequence
ccagtcctagctgcacagggcagct

SEQ ID NO: 201137 - DNA, 25 bp, Probe Sequence
ccagagaccagctggcagggtgcca

SEQ ID NO: 201138 - DNA, 25 bp, Probe Sequence
ccagagaccagctccggagagcaga

SEQ ID NO: 201139 - DNA, 25 bp, Probe Sequence
ccagacagcctgtatcttgggggac

SEQ ID NO: 201140 - DNA, 25 bp, Probe Sequence
ccagacagtctgaccgtggaacgag

SEQ ID NO: 201141 - DNA, 25 bp, Probe Sequence
ccagggccagtcgctggaacagctg

SEQ ID NO: 201142 - DNA, 25 bp, Probe Sequence
ccagggccagtcgctggaacagctg

SEQ ID NO: 201143 - DNA, 25 bp, Probe Sequence
ccagtggccaccatctatgcaaagt

SEQ ID NO: 201144 - DNA, 25 bp, Probe Sequence
ccagggctgcaatttctcagagaag

SEQ ID NO: 201145 - DNA, 25 bp, Probe Sequence
ccagacggcagagctccaagacagt

SEQ ID NO: 201146 - DNA, 25 bp, Probe Sequence
ccagatcgagctacctaagaacagc

SEQ ID NO: 201147 - DNA, 25 bp, Probe Sequence
ccagaggagctactgcggcagaacc

SEQ ID NO: 201148 - DNA, 25 bp, Probe Sequence
ccagatggactactatggcacccgc

SEQ ID NO: 201149 - DNA, 25 bp, Probe Sequence
ccagaggacttcctggagctgctca

SEQ ID NO: 201150 - DNA, 25 bp, Probe Sequence
ccagagccctctgatgatggcattc

SEQ ID NO: 201151 - DNA, 25 bp, Probe Sequence
ccagcgttctctgtgcatggatacc

SEQ ID NO: 201152 - DNA, 25 bp, Probe Sequence
ccagtattctcagagcatgtgtcag

SEQ ID NO: 201153 - DNA, 25 bp, Probe Sequence
ccagttctctcaggacggtaaggcg

SEQ ID NO: 201154 - DNA, 25 bp, Probe Sequence
ccagtagtgacaggggcgaacgccg

SEQ ID NO: 201155 - DNA, 25 bp, Probe Sequence
ccagttgtcctggggctgaatgggc

SEQ ID NO: 201156 - DNA, 25 bp, Probe Sequence
ccagtctgtcctatggggagcagtt

SEQ ID NO: 201157 - DNA, 25 bp, Probe Sequence
ccagtgtacctgctggtggggctgt

SEQ ID NO: 201158 - DNA, 25 bp, Probe Sequence
ccagtgtacctgctggtggggctgt

SEQ ID NO: 201159 - DNA, 25 bp, Probe Sequence
ccagcctatccccaggtaggggacg

SEQ ID NO: 201160 - DNA, 25 bp, Probe Sequence
ccagcagctgaaccgggttgtgggc

SEQ ID NO: 201161 - DNA, 25 bp, Probe Sequence
ccaccaatgcagccggggctggcga

SEQ ID NO: 201162 - DNA, 25 bp, Probe Sequence
ccagcacaagggctgctggcccagg

SEQ ID NO: 201163 - DNA, 25 bp, Probe Sequence
ccagcaaataggatccaacacaggc

SEQ ID NO: 201164 - DNA, 25 bp, Probe Sequence
ccagccaacgagcggaaaatggcag

SEQ ID NO: 201165 - DNA, 25 bp, Probe Sequence
ccagacaccggcgtgggaatgtggg

SEQ ID NO: 201166 - DNA, 25 bp, Probe Sequence
ccagatcccgtggtgctggggatgg

SEQ ID NO: 201167 - DNA, 25 bp, Probe Sequence
ccagatcccgtggtgctggggatgg

SEQ ID NO: 201168 - DNA, 25 bp, Probe Sequence
ccagatcccgtggtgctggggatgg

SEQ ID NO: 201169 - DNA, 25 bp, Probe Sequence
ccagacctgggcgcgtgagtgcagg

SEQ ID NO: 201170 - DNA, 25 bp, Probe Sequence
ccagtcctgtgtcctctgaaagagg

SEQ ID NO: 201171 - DNA, 25 bp, Probe Sequence
ccagtcctgtgtcctctgaaagagg

SEQ ID NO: 201172 - DNA, 25 bp, Probe Sequence
ccagcaacgttccctagaagaactg

SEQ ID NO: 201173 - DNA, 25 bp, Probe Sequence
ccagatgacgtgatccttaaagact

SEQ ID NO: 201174 - DNA, 25 bp, Probe Sequence
ccagatgaagctcccctttatgaaa

SEQ ID NO: 201175 - DNA, 25 bp, Probe Sequence
ccagagccagtgaccttaattgaaa

SEQ ID NO: 201176 - DNA, 25 bp, Probe Sequence
ccagcatcttttattgcattggaaa

SEQ ID NO: 201177 - DNA, 25 bp, Probe Sequence
ccagattctttggctgcagagtggc

SEQ ID NO: 201178 - DNA, 25 bp, Probe Sequence
ccagaattatgccaggcatgttggc

SEQ ID NO: 201179 - DNA, 25 bp, Probe Sequence
ccagcaaatcggtgcactgatcgct

SEQ ID NO: 201180 - DNA, 25 bp, Probe Sequence
ccaccttcgagagcttgacgttcaa

SEQ ID NO: 201181 - DNA, 25 bp, Probe Sequence
ccaccttcgaagattaccagatcat

SEQ ID NO: 201182 - DNA, 25 bp, Probe Sequence
ccactggccgaacatcaagggatca

SEQ ID NO: 201183 - DNA, 25 bp, Probe Sequence
ccagctcagggataaccagggacat

SEQ ID NO: 201184 - DNA, 25 bp, Probe Sequence
ccagctcttatatgtagcacaggga

SEQ ID NO: 201185 - DNA, 25 bp, Probe Sequence
ccagtttgaagctttgcatcaggtg

SEQ ID NO: 201186 - DNA, 25 bp, Probe Sequence
ccagcttcagatctttgctcaaatg

SEQ ID NO: 201187 - DNA, 25 bp, Probe Sequence
ccagctgtcggttttgtcaatgaag

SEQ ID NO: 201188 - DNA, 25 bp, Probe Sequence
ccagctgtcggcagtactcagtgga

SEQ ID NO: 201189 - DNA, 25 bp, Probe Sequence
ccagctgtcggcagtactcagtgga

SEQ ID NO: 201190 - DNA, 25 bp, Probe Sequence
ccagctgtcggcagtactcagtgga

SEQ ID NO: 201191 - DNA, 25 bp, Probe Sequence
ccagctctctggaaaaccagtgttc

SEQ ID NO: 201192 - DNA, 25 bp, Probe Sequence
ccagactgatggcagacccagggcc

SEQ ID NO: 201193 - DNA, 25 bp, Probe Sequence
ccagacgatgggcggccaggcagag

SEQ ID NO: 201194 - DNA, 25 bp, Probe Sequence
ccagacacagggtgggggcagcgtc

SEQ ID NO: 201195 - DNA, 25 bp, Probe Sequence
ccagtgcacagggaagggcttggcc

SEQ ID NO: 201196 - DNA, 25 bp, Probe Sequence
ccagtgccagtatagtggctgctgc

SEQ ID NO: 201197 - DNA, 25 bp, Probe Sequence
ccagctctgataataagatgttcac

SEQ ID NO: 201198 - DNA, 25 bp, Probe Sequence
ccagctctagatttgaagtgtcctt

SEQ ID NO: 201199 - DNA, 25 bp, Probe Sequence
ccagtcagacttcaaggcttttgct

SEQ ID NO: 201200 - DNA, 25 bp, Probe Sequence
ccagtcagacttcaaggcttttgct

SEQ ID NO: 201201 - DNA, 25 bp, Probe Sequence
ccagtcgtttgtaaggcgctcgtcg

SEQ ID NO: 201202 - DNA, 25 bp, Probe Sequence
ccagtcgtttgtaaggcgctcgtcg

SEQ ID NO: 201203 - DNA, 25 bp, Probe Sequence
ccagtcgtttgtaaggcgctcgtcg

SEQ ID NO: 201204 - DNA, 25 bp, Probe Sequence
ccagagcgttagaggggccagcggc

SEQ ID NO: 201205 - DNA, 25 bp, Probe Sequence
ccagagcgttagaggggccagcggc

SEQ ID NO: 201206 - DNA, 25 bp, Probe Sequence
ccacgtgttcgaggagtcccaggtg

SEQ ID NO: 201207 - DNA, 25 bp, Probe Sequence
ccacgtttcgccaacttgacaggtg

SEQ ID NO: 201208 - DNA, 25 bp, Probe Sequence
gccaagagtaagttatttgacgttg

SEQ ID NO: 201209 - DNA, 25 bp, Probe Sequence
ccaaggcattagtgtctgtagggtt

SEQ ID NO: 201210 - DNA, 25 bp, Probe Sequence
ccagcagtgcataaacgaggcgcag

SEQ ID NO: 201211 - DNA, 25 bp, Probe Sequence
ccagcgtatatgagcaagacacagt

SEQ ID NO: 201212 - DNA, 25 bp, Probe Sequence
ccagcctctttgtaagtacagtaaa

SEQ ID NO: 201213 - DNA, 25 bp, Probe Sequence
ccagccctagttcagtatcttttat

SEQ ID NO: 201214 - DNA, 25 bp, Probe Sequence
ccagaccttttgtttttgctttgca

SEQ ID NO: 201215 - DNA, 25 bp, Probe Sequence
ccagcacttgttatttcctgtttct

SEQ ID NO: 201216 - DNA, 25 bp, Probe Sequence
ccactaggttctaggtcctggcttc

SEQ ID NO: 201217 - DNA, 25 bp, Probe Sequence
ccagctcaggtgactggagcccgag

SEQ ID NO: 201218 - DNA, 25 bp, Probe Sequence
ccagagggcagccatagtgtgccga

SEQ ID NO: 201219 - DNA, 25 bp, Probe Sequence
ccagcagggcagcagtgaaccagtt

SEQ ID NO: 201220 - DNA, 25 bp, Probe Sequence
ccagcagggggaggcaatcccttca

SEQ ID NO: 201221 - DNA, 25 bp, Probe Sequence
ccagagtgatggggcgagactccat

SEQ ID NO: 201222 - DNA, 25 bp, Probe Sequence
ccagagtctgcaggggacagccctc

SEQ ID NO: 201223 - DNA, 25 bp, Probe Sequence
ccagcacatctgggagtctgactcc

SEQ ID NO: 201224 - DNA, 25 bp, Probe Sequence
ccagcagcgtgacgatactgccact

SEQ ID NO: 201225 - DNA, 25 bp, Probe Sequence
ccaccggcatctggactgccaataa

SEQ ID NO: 201226 - DNA, 25 bp, Probe Sequence
ccacttggctaccctgcaattaaga

SEQ ID NO: 201227 - DNA, 25 bp, Probe Sequence
ccacttcccactcacggataagaca

SEQ ID NO: 201228 - DNA, 25 bp, Probe Sequence
ccagtccgccactcacggacaagag

SEQ ID NO: 201229 - DNA, 25 bp, Probe Sequence
ccagtaccacactcatgaagaaaga

SEQ ID NO: 201230 - DNA, 25 bp, Probe Sequence
ccagtccccacagcataacagggtc

SEQ ID NO: 201231 - DNA, 25 bp, Probe Sequence
ccagtccctcgttgcaggacagggt

SEQ ID NO: 201232 - DNA, 25 bp, Probe Sequence
ccagtccctcgttgcaggacagggt

SEQ ID NO: 201233 - DNA, 25 bp, Probe Sequence
ccacccccattatataagggctatt

SEQ ID NO: 201234 - DNA, 25 bp, Probe Sequence
ccacccccaatacgacaggaagact

SEQ ID NO: 201235 - DNA, 25 bp, Probe Sequence
gcgcccacttagaaggacggtaccg

SEQ ID NO: 201236 - DNA, 25 bp, Probe Sequence
ccagcaccctggagcgagggtaccc

SEQ ID NO: 201237 - DNA, 25 bp, Probe Sequence
ccagcaccctccaggacaggagatc

SEQ ID NO: 201238 - DNA, 25 bp, Probe Sequence
ccagcatcccccagaacaagaaggt

SEQ ID NO: 201239 - DNA, 25 bp, Probe Sequence
ccacccccatctcagaacagaaggg

SEQ ID NO: 201240 - DNA, 25 bp, Probe Sequence
ccagcacagcccactgagaagagct

SEQ ID NO: 201241 - DNA, 25 bp, Probe Sequence
ccagacccttaccagaagcagtgtg

SEQ ID NO: 201242 - DNA, 25 bp, Probe Sequence
ccagactgttgctaggatatagggg

SEQ ID NO: 201243 - DNA, 25 bp, Probe Sequence
ccagactcctcatggataggtcggg

SEQ ID NO: 201244 - DNA, 25 bp, Probe Sequence
ccacagtcctcagggtaattaaggt

SEQ ID NO: 201245 - DNA, 25 bp, Probe Sequence
ccaccacagatggggtcaaaaaggt

SEQ ID NO: 201246 - DNA, 25 bp, Probe Sequence
ccagtcacagattcaggagttcaaa

SEQ ID NO: 201247 - DNA, 25 bp, Probe Sequence
ccagctccagcttcgggtctgaagc

SEQ ID NO: 201248 - DNA, 25 bp, Probe Sequence
ccagtctcggacttggttgttgcgc

SEQ ID NO: 201249 - DNA, 25 bp, Probe Sequence
ccagacttaacattttggtctctgc

SEQ ID NO: 201250 - DNA, 25 bp, Probe Sequence
ccagacattaaggtccaagatcctg

SEQ ID NO: 201251 - DNA, 25 bp, Probe Sequence
ccagacactgaaggaccacaggccc

SEQ ID NO: 201252 - DNA, 25 bp, Probe Sequence
gcccacctaagctgactcagggccc

SEQ ID NO: 201253 - DNA, 25 bp, Probe Sequence
ccaccacctcagggaccagagggct

SEQ ID NO: 201254 - DNA, 25 bp, Probe Sequence
ccacaaccaatgggtccaggaccta

SEQ ID NO: 201255 - DNA, 25 bp, Probe Sequence
ccacacccaagatttcaaagacaaa

SEQ ID NO: 201256 - DNA, 25 bp, Probe Sequence
ccacccacattgactaatccaacta

SEQ ID NO: 201257 - DNA, 25 bp, Probe Sequence
ccagcagccatcttaatacattaaa

SEQ ID NO: 201258 - DNA, 25 bp, Probe Sequence
ccagagccccaaactcttaacaagt

SEQ ID NO: 201259 - DNA, 25 bp, Probe Sequence
gcacaaaaccaaaacttaagtagca

SEQ ID NO: 201260 - DNA, 25 bp, Probe Sequence
taatactacctaattgttactgtgg

SEQ ID NO: 201261 - DNA, 25 bp, Probe Sequence
ccacccacacttgtgattacgcggg

SEQ ID NO: 201262 - DNA, 25 bp, Probe Sequence
ccagacctactggtgtgagtacagg

SEQ ID NO: 201263 - DNA, 25 bp, Probe Sequence
ccagagtacctggtgggctggcaga

SEQ ID NO: 201264 - DNA, 25 bp, Probe Sequence
ccagacatacgctggagccaggagc

SEQ ID NO: 201265 - DNA, 25 bp, Probe Sequence
ccagccttcatgtgcgagacggcac

SEQ ID NO: 201266 - DNA, 25 bp, Probe Sequence
ccacctgcatgctctggcaacagga

SEQ ID NO: 201267 - DNA, 25 bp, Probe Sequence
ccactcagatcctggaaggcagcaa

SEQ ID NO: 201268 - DNA, 25 bp, Probe Sequence
ccaccaatgcgctggacttgaattc

SEQ ID NO: 201269 - DNA, 25 bp, Probe Sequence
ccagccatgatgctcagtgaccgac

SEQ ID NO: 201270 - DNA, 25 bp, Probe Sequence
ccagcgatggtgacttgaccttgcc

SEQ ID NO: 201271 - DNA, 25 bp, Probe Sequence
ccagctgagcgtgcgctgggtgtcg

SEQ ID NO: 201272 - DNA, 25 bp, Probe Sequence
ccagcgtgcagtgagctggcctgcc

SEQ ID NO: 201273 - DNA, 25 bp, Probe Sequence
ccagcaggagctgcttcagccgaga

SEQ ID NO: 201274 - DNA, 25 bp, Probe Sequence
ccagccgactggagcaggcagcagc

SEQ ID NO: 201275 - DNA, 25 bp, Probe Sequence
ccagccgagtgtggggtgctgctgc

SEQ ID NO: 201276 - DNA, 25 bp, Probe Sequence
ccacgagcaagtgagcagatcctcc

SEQ ID NO: 201277 - DNA, 25 bp, Probe Sequence
ccagcacaaagtccacagtgtattc

SEQ ID NO: 201278 - DNA, 25 bp, Probe Sequence
ccagctctaggtccaattgttctgc

SEQ ID NO: 201279 - DNA, 25 bp, Probe Sequence
ccagctccacgtccaagaagtagtt

SEQ ID NO: 201280 - DNA, 25 bp, Probe Sequence
ccagcatccattcctaataaaaatt

SEQ ID NO: 201281 - DNA, 25 bp, Probe Sequence
ccaaccattggtcaccagaaatcca

SEQ ID NO: 201282 - DNA, 25 bp, Probe Sequence
ccaccagttgtggcgtccagaaagc

SEQ ID NO: 201283 - DNA, 25 bp, Probe Sequence
ccaccagaatgcagttccagcttag

SEQ ID NO: 201284 - DNA, 25 bp, Probe Sequence
ccaccagatgaactctacctttgct

SEQ ID NO: 201285 - DNA, 25 bp, Probe Sequence
ccacggtagcacttgaccttttcga

SEQ ID NO: 201286 - DNA, 25 bp, Probe Sequence
ccagaggctatgcttagatttttct

SEQ ID NO: 201287 - DNA, 25 bp, Probe Sequence
ccacagtgctcagttgtacttttta

SEQ ID NO: 201288 - DNA, 25 bp, Probe Sequence
ccagcatggcacattacacttctgt

SEQ ID NO: 201289 - DNA, 25 bp, Probe Sequence
ccagcacgccaagtacacttgctct

SEQ ID NO: 201290 - DNA, 25 bp, Probe Sequence
ccagcacccaaggccagtacatggt

SEQ ID NO: 201291 - DNA, 25 bp, Probe Sequence
ccagcacccaaggccagtacatggt

SEQ ID NO: 201292 - DNA, 25 bp, Probe Sequence
ccagaccatccatccagaagcatgt

SEQ ID NO: 201293 - DNA, 25 bp, Probe Sequence
ccagcgcgatgaacgccgcaagtgg

SEQ ID NO: 201294 - DNA, 25 bp, Probe Sequence
ccagcgcgatgaacgccgcaagtgg

SEQ ID NO: 201295 - DNA, 25 bp, Probe Sequence
ccacggcatggggaggccagctgga

SEQ ID NO: 201296 - DNA, 25 bp, Probe Sequence
ccagcaccttgggagtccagatggg

SEQ ID NO: 201297 - DNA, 25 bp, Probe Sequence
ccaccccattgaagtccaaggggat

SEQ ID NO: 201298 - DNA, 25 bp, Probe Sequence
ccaccttattgaaggcccactgtag

SEQ ID NO: 201299 - DNA, 25 bp, Probe Sequence
ccaccaatcgagaaagcccagggac

SEQ ID NO: 201300 - DNA, 25 bp, Probe Sequence
ccagccaagggcaaagtcggcgggc

SEQ ID NO: 201301 - DNA, 25 bp, Probe Sequence
ccagcacacagggctatttctccaa

SEQ ID NO: 201302 - DNA, 25 bp, Probe Sequence
ccagctgcaatggcactgcagtact

SEQ ID NO: 201303 - DNA, 25 bp, Probe Sequence
ccagctcagcacaactgcaagaatg

SEQ ID NO: 201304 - DNA, 25 bp, Probe Sequence
ccagcagagcctacatgcgcagaca

SEQ ID NO: 201305 - DNA, 25 bp, Probe Sequence
ccagcatggctggagaggcaggcat

SEQ ID NO: 201306 - DNA, 25 bp, Probe Sequence
ccagcatgctctgtgacgaggctaa

SEQ ID NO: 201307 - DNA, 25 bp, Probe Sequence
ccagctctgcatttgacaaatgcca

SEQ ID NO: 201308 - DNA, 25 bp, Probe Sequence
ccaccatgtcttgcaatgagcacct

SEQ ID NO: 201309 - DNA, 25 bp, Probe Sequence
ccagactttgatgactagcacccac

SEQ ID NO: 201310 - DNA, 25 bp, Probe Sequence
ccagactttgatgactagcacccac

SEQ ID NO: 201311 - DNA, 25 bp, Probe Sequence
ccagagcggtatctctggcaccaca

SEQ ID NO: 201312 - DNA, 25 bp, Probe Sequence
ccagcagcggtatgttgggccagag

SEQ ID NO: 201313 - DNA, 25 bp, Probe Sequence
ccagcggcgctacattggggtgatg

SEQ ID NO: 201314 - DNA, 25 bp, Probe Sequence
ccagcggcgctacattggggtgatg

SEQ ID NO: 201315 - DNA, 25 bp, Probe Sequence
ccagaggtgccacctacaacgtcat

SEQ ID NO: 201316 - DNA, 25 bp, Probe Sequence
ccagagcgttaccctcaatagctat

SEQ ID NO: 201317 - DNA, 25 bp, Probe Sequence
ccagctcttacccctataagtactc

SEQ ID NO: 201318 - DNA, 25 bp, Probe Sequence
ccagctcttactcttcaagttcaac

SEQ ID NO: 201319 - DNA, 25 bp, Probe Sequence
ccagactgtcccagtcctatgtcag

SEQ ID NO: 201320 - DNA, 25 bp, Probe Sequence
tccaggcttaccagacgtattcctc

SEQ ID NO: 201321 - DNA, 25 bp, Probe Sequence
gccaggtccacaaaggaaattcccg

SEQ ID NO: 201322 - DNA, 25 bp, Probe Sequence
gccgattccctaagggttacgccat

SEQ ID NO: 201323 - DNA, 25 bp, Probe Sequence
ccagttcctctttggtgtacagact

SEQ ID NO: 201324 - DNA, 25 bp, Probe Sequence
ccagttcttctgaaagtgtgacagt

SEQ ID NO: 201325 - DNA, 25 bp, Probe Sequence
ccagatcctgtcatcaaggtgaacg

SEQ ID NO: 201326 - DNA, 25 bp, Probe Sequence
ccagatcgcttgcttcattggtcaa

SEQ ID NO: 201327 - DNA, 25 bp, Probe Sequence
gccagtcgggtttcctggagcaatg

SEQ ID NO: 201328 - DNA, 25 bp, Probe Sequence
ccagctccaaagcacctaagaatgg

SEQ ID NO: 201329 - DNA, 25 bp, Probe Sequence
ccagcagaagggcacctcagaaaca

SEQ ID NO: 201330 - DNA, 25 bp, Probe Sequence
ccagcaagggattcgggcgaagaca

SEQ ID NO: 201331 - DNA, 25 bp, Probe Sequence
ccagcaagaagaacgtcggagacaa

SEQ ID NO: 201332 - DNA, 25 bp, Probe Sequence
ccagacaagagaaggcctgtatgaa

SEQ ID NO: 201333 - DNA, 25 bp, Probe Sequence
ccagaagaagacagcctgttacgac

SEQ ID NO: 201334 - DNA, 25 bp, Probe Sequence
gccaccagaaaaagagtttacgcct

SEQ ID NO: 201335 - DNA, 25 bp, Probe Sequence
ccaccagaaacccagaagtaccgct

SEQ ID NO: 201336 - DNA, 25 bp, Probe Sequence
ccagcagaaatacagcagaagggcc

SEQ ID NO: 201337 - DNA, 25 bp, Probe Sequence
ccagagccaccacaggaggcagctg

SEQ ID NO: 201338 - DNA, 25 bp, Probe Sequence
ccagacccacagtaagagcagcttg

SEQ ID NO: 201339 - DNA, 25 bp, Probe Sequence
ccagccccaaatcaagccatggtgg

SEQ ID NO: 201340 - DNA, 25 bp, Probe Sequence
ccagagcccaagagaatccaggaaa

SEQ ID NO: 201341 - DNA, 25 bp, Probe Sequence
ccagagcgcagcagcctaattcagg

SEQ ID NO: 201342 - DNA, 25 bp, Probe Sequence
ccagagagactccttcaaggctgga

SEQ ID NO: 201343 - DNA, 25 bp, Probe Sequence
ccagcaaacccttcacaggctgcat

SEQ ID NO: 201344 - DNA, 25 bp, Probe Sequence
ccagaagccctcacatcagtggatg

SEQ ID NO: 201345 - DNA, 25 bp, Probe Sequence
ccagcggctcccaaaatggcgatga

SEQ ID NO: 201346 - DNA, 25 bp, Probe Sequence
ccagcacgtcctgaacagagcgcag

SEQ ID NO: 201347 - DNA, 25 bp, Probe Sequence
ccagctctacctgactctgggagct

SEQ ID NO: 201348 - DNA, 25 bp, Probe Sequence
ccacatggacctgacgcgggaggtg

SEQ ID NO: 201349 - DNA, 25 bp, Probe Sequence
ccactgggagccgacatccaaggtt

SEQ ID NO: 201350 - DNA, 25 bp, Probe Sequence
ccagctggggcctctgaagggattc

SEQ ID NO: 201351 - DNA, 25 bp, Probe Sequence
ccagctggggcctctgaagggattc

SEQ ID NO: 201352 - DNA, 25 bp, Probe Sequence
ccacgcgtccggatgaagttgattg

SEQ ID NO: 201353 - DNA, 25 bp, Probe Sequence
ccacgggccggacagaagttcaggg

SEQ ID NO: 201354 - DNA, 25 bp, Probe Sequence
ccaccgcccggatggggtagaatgg

SEQ ID NO: 201355 - DNA, 25 bp, Probe Sequence
ccactcgggctgcaaaaggtgaaaa

SEQ ID NO: 201356 - DNA, 25 bp, Probe Sequence
ccactggtgctgagtcagagggaaa

SEQ ID NO: 201357 - DNA, 25 bp, Probe Sequence
ccagctgttcccctcgggaacatga

SEQ ID NO: 201358 - DNA, 25 bp, Probe Sequence
ccagcattccccattgtgtaaataa

SEQ ID NO: 201359 - DNA, 25 bp, Probe Sequence
ccagaatcccaaaatgatgtaggaa

SEQ ID NO: 201360 - DNA, 25 bp, Probe Sequence
ccagatacacccaaagtatcaggac

SEQ ID NO: 201361 - DNA, 25 bp, Probe Sequence
ccaccaacctcctgtatctggagct

SEQ ID NO: 201362 - DNA, 25 bp, Probe Sequence
gccctcacaccagacctacggaggg

SEQ ID NO: 201363 - DNA, 25 bp, Probe Sequence
ccacctactcatgcacctaattgga

SEQ ID NO: 201364 - DNA, 25 bp, Probe Sequence
ccactctaagggacgctcacttata

SEQ ID NO: 201365 - DNA, 25 bp, Probe Sequence
ccagcctgtgagggtcctgactgga

SEQ ID NO: 201366 - DNA, 25 bp, Probe Sequence
ccagcatgcgggattccctcattga

SEQ ID NO: 201367 - DNA, 25 bp, Probe Sequence
ccagcatgcgggattccctcattga

SEQ ID NO: 201368 - DNA, 25 bp, Probe Sequence
ccagctggcagggtgccaaccatgc

SEQ ID NO: 201369 - DNA, 25 bp, Probe Sequence
ccagatggcatggttgctctattgg

SEQ ID NO: 201370 - DNA, 25 bp, Probe Sequence
ccagaacaggccttctatatggtgg

SEQ ID NO: 201371 - DNA, 25 bp, Probe Sequence
ccagaactgatctcttttggtgtgg

SEQ ID NO: 201372 - DNA, 25 bp, Probe Sequence
ccacccatgacctttttcactgtgg

SEQ ID NO: 201373 - DNA, 25 bp, Probe Sequence
ccaccgaatgctgctcatttggctg

SEQ ID NO: 201374 - DNA, 25 bp, Probe Sequence
ccagcgccaaggacctttgcagcgc

SEQ ID NO: 201375 - DNA, 25 bp, Probe Sequence
ccagccctgggggtttaagctctgc

SEQ ID NO: 201376 - DNA, 25 bp, Probe Sequence
ccacccaggcctggttagtgactcc

SEQ ID NO: 201377 - DNA, 25 bp, Probe Sequence
ccagccctactcgggatgagtgctt

SEQ ID NO: 201378 - DNA, 25 bp, Probe Sequence
ccagcttgctactgaggccaggctg

SEQ ID NO: 201379 - DNA, 25 bp, Probe Sequence
ccagctgccaaacagcagcctgccg

SEQ ID NO: 201380 - DNA, 25 bp, Probe Sequence
ccagctggacaagcagatcacgccg

SEQ ID NO: 201381 - DNA, 25 bp, Probe Sequence
ccactgtcacattggcaatcatcac

SEQ ID NO: 201382 - DNA, 25 bp, Probe Sequence
ccagcggcagtgacagaatccaaag

SEQ ID NO: 201383 - DNA, 25 bp, Probe Sequence
ccagagacacacaagagcaccaaag

SEQ ID NO: 201384 - DNA, 25 bp, Probe Sequence
ccagaaacacttcgctgctgcaagc

SEQ ID NO: 201385 - DNA, 25 bp, Probe Sequence
ccagaaacttgagctggcatcctcc

SEQ ID NO: 201386 - DNA, 25 bp, Probe Sequence
ccagcaaactgaatccggttcctct

SEQ ID NO: 201387 - DNA, 25 bp, Probe Sequence
ccaccagcaggaatgcagcggattc

SEQ ID NO: 201388 - DNA, 25 bp, Probe Sequence
ccagctggtggattcaaggtctcaa

SEQ ID NO: 201389 - DNA, 25 bp, Probe Sequence
ccagctagttgcacagagaatcatg

SEQ ID NO: 201390 - DNA, 25 bp, Probe Sequence
ccagcaggttgctaaaagaaggcat

SEQ ID NO: 201391 - DNA, 25 bp, Probe Sequence
ccagcaggttgttagagcctgggat

SEQ ID NO: 201392 - DNA, 25 bp, Probe Sequence
ccagaacgtggtttgcctgaggctg

SEQ ID NO: 201393 - DNA, 25 bp, Probe Sequence
ccaagactattggttgcctagagct

SEQ ID NO: 201394 - DNA, 25 bp, Probe Sequence
ccaagactaatctcagccaaacctg

SEQ ID NO: 201395 - DNA, 25 bp, Probe Sequence
gccaaactggattacccctacttgg

SEQ ID NO: 201396 - DNA, 25 bp, Probe Sequence
ccacaactggccactccaaatttgc

SEQ ID NO: 201397 - DNA, 25 bp, Probe Sequence
gccaccacgggtttggaagtttgct

SEQ ID NO: 201398 - DNA, 25 bp, Probe Sequence
ccacccgggctgttgaggtattgcc

SEQ ID NO: 201399 - DNA, 25 bp, Probe Sequence
ccagccttggtgaggacagtgttgg

SEQ ID NO: 201400 - DNA, 25 bp, Probe Sequence
ccacctattttcctgatcagttggt

SEQ ID NO: 201401 - DNA, 25 bp, Probe Sequence
ccagcctatcgttgatggatatttg

SEQ ID NO: 201402 - DNA, 25 bp, Probe Sequence
ccagagctctgccctgaggatataa

SEQ ID NO: 201403 - DNA, 25 bp, Probe Sequence
ccagagtgtcatccttgtgcttaag

SEQ ID NO: 201404 - DNA, 25 bp, Probe Sequence
ccagcagaacattcttctcttcaaa

SEQ ID NO: 201405 - DNA, 25 bp, Probe Sequence
ccagcaactatgacttcgtctatga

SEQ ID NO: 201406 - DNA, 25 bp, Probe Sequence
ccagacctcagcgtgtgggctgaga

SEQ ID NO: 201407 - DNA, 25 bp, Probe Sequence
ccagctgcccggtggggcagacctg

SEQ ID NO: 201408 - DNA, 25 bp, Probe Sequence
ccagctgcccggtggggcagacctg

SEQ ID NO: 201409 - DNA, 25 bp, Probe Sequence
ccactcccacggctggggacaatgg

SEQ ID NO: 201410 - DNA, 25 bp, Probe Sequence
ccacgaccccgacgggggcaagatg

SEQ ID NO: 201411 - DNA, 25 bp, Probe Sequence
ccaaagcccggatccaggcgggagc

SEQ ID NO: 201412 - DNA, 25 bp, Probe Sequence
ccaacacccaggagctcagggggca

SEQ ID NO: 201413 - DNA, 25 bp, Probe Sequence
ccaacacccaggagctcagggggca

SEQ ID NO: 201414 - DNA, 25 bp, Probe Sequence
ccagcgcccgggaagctactggggc

SEQ ID NO: 201415 - DNA, 25 bp, Probe Sequence
ccagcagctctggggggtactgggt

SEQ ID NO: 201416 - DNA, 25 bp, Probe Sequence
ccagagcctgctggtggaggagcgc

SEQ ID NO: 201417 - DNA, 25 bp, Probe Sequence
ccagcagccgcggtaattccagctc

SEQ ID NO: 201418 - DNA, 25 bp, Probe Sequence
ccagcagctgggctacgtgctggcc

SEQ ID NO: 201419 - DNA, 25 bp, Probe Sequence
ccagcagctgggctacgtgctggcc

SEQ ID NO: 201420 - DNA, 25 bp, Probe Sequence
ccagcttggtgtagacagtctgaac

SEQ ID NO: 201421 - DNA, 25 bp, Probe Sequence
ccagcctgggcaacaagagcgaaac

SEQ ID NO: 201422 - DNA, 25 bp, Probe Sequence
ccaccatggccaacaacgaaggact

SEQ ID NO: 201423 - DNA, 25 bp, Probe Sequence
ccaccatggctgcaatccgaaagaa

SEQ ID NO: 201424 - DNA, 25 bp, Probe Sequence
ccaccattgcattacaacctctaac

SEQ ID NO: 201425 - DNA, 25 bp, Probe Sequence
ccaccattggataaaccactatccc

SEQ ID NO: 201426 - DNA, 25 bp, Probe Sequence
ccagccgtgggcaaaccctgaagac

SEQ ID NO: 201427 - DNA, 25 bp, Probe Sequence
ccacgcaagaggatccgcctaagat

SEQ ID NO: 201428 - DNA, 25 bp, Probe Sequence
ccagaagaggaggttgcccagaaga

SEQ ID NO: 201429 - DNA, 25 bp, Probe Sequence
ccagcaaaggaggttctgcctgtaa

SEQ ID NO: 201430 - DNA, 25 bp, Probe Sequence
ccagcaaagatacctgcttcttcta

SEQ ID NO: 201431 - DNA, 25 bp, Probe Sequence
ccagcaacagtcaacatttccctta

SEQ ID NO: 201432 - DNA, 25 bp, Probe Sequence
ccagaaaccttatttgtgactttgg

SEQ ID NO: 201433 - DNA, 25 bp, Probe Sequence
ccagagatacacttccttgttcttt

SEQ ID NO: 201434 - DNA, 25 bp, Probe Sequence
ccaaatcaatacactagttgtttct

SEQ ID NO: 201435 - DNA, 25 bp, Probe Sequence
ccaaatgcaggatagtaatttttgt

SEQ ID NO: 201436 - DNA, 25 bp, Probe Sequence
taccagtaggacataatttttggct

SEQ ID NO: 201437 - DNA, 25 bp, Probe Sequence
ccacagtaggacaccatccttctgt

SEQ ID NO: 201438 - DNA, 25 bp, Probe Sequence
ccaagctagtccgggatgcctttgc

SEQ ID NO: 201439 - DNA, 25 bp, Probe Sequence
ccaagtaccacggctatccttatag

SEQ ID NO: 201440 - DNA, 25 bp, Probe Sequence
ccaccatagaacgagcaaccttgac

SEQ ID NO: 201441 - DNA, 25 bp, Probe Sequence
ccacctcagaaacgttcctggatcc

SEQ ID NO: 201442 - DNA, 25 bp, Probe Sequence
ccagcccaaatgtagtctgccttga

SEQ ID NO: 201443 - DNA, 25 bp, Probe Sequence
ccagcccactgctagtttgactttt

SEQ ID NO: 201444 - DNA, 25 bp, Probe Sequence
ccactcaccctagcattacttatat

SEQ ID NO: 201445 - DNA, 25 bp, Probe Sequence
ccactcaccctagcattacttatat

SEQ ID NO: 201446 - DNA, 25 bp, Probe Sequence
ccactcaccctagcattacttatat

SEQ ID NO: 201447 - DNA, 25 bp, Probe Sequence
ccactcgactttccaacatttttgt

SEQ ID NO: 201448 - DNA, 25 bp, Probe Sequence
ccacctactctttcagttttctggc

SEQ ID NO: 201449 - DNA, 25 bp, Probe Sequence
ccaccaacactttagattgcttttg

SEQ ID NO: 201450 - DNA, 25 bp, Probe Sequence
ccagcaaacctttagattttcatct

SEQ ID NO: 201451 - DNA, 25 bp, Probe Sequence
ccagcaagatctcagctaaattcta

SEQ ID NO: 201452 - DNA, 25 bp, Probe Sequence
ccagacactctgaagctcagaatta

SEQ ID NO: 201453 - DNA, 25 bp, Probe Sequence
ccaccaccaccaccaaatgaaatta

SEQ ID NO: 201454 - DNA, 25 bp, Probe Sequence
ccaccaccaccaccaaatgaaatta

SEQ ID NO: 201455 - DNA, 25 bp, Probe Sequence
ccacctccaataccaaggtctttat

SEQ ID NO: 201456 - DNA, 25 bp, Probe Sequence
ccaccacccagaggacaggaatttt

SEQ ID NO: 201457 - DNA, 25 bp, Probe Sequence
ccagacacccgctgatcagagacat

SEQ ID NO: 201458 - DNA, 25 bp, Probe Sequence
ccagaaccaacaagattgagaattt

SEQ ID NO: 201459 - DNA, 25 bp, Probe Sequence
ccagcaacacaaccatgtttttatt

SEQ ID NO: 201460 - DNA, 25 bp, Probe Sequence
ccacctcaacacctttattttctga

SEQ ID NO: 201461 - DNA, 25 bp, Probe Sequence
ccaccacacccagctaatttttgat

SEQ ID NO: 201462 - DNA, 25 bp, Probe Sequence
ccacccacactatcatagatttctt

SEQ ID NO: 201463 - DNA, 25 bp, Probe Sequence
ccaccccacaattttatgacttcca

SEQ ID NO: 201464 - DNA, 25 bp, Probe Sequence
ccaccagaaaaacttgtggtactca

SEQ ID NO: 201465 - DNA, 25 bp, Probe Sequence
ccagccgagaacaagaaggacttct

SEQ ID NO: 201466 - DNA, 25 bp, Probe Sequence
ccagcaccgtcagtggaaaacttta

SEQ ID NO: 201467 - DNA, 25 bp, Probe Sequence
gcggcactggtcatggaaaacgaat

SEQ ID NO: 201468 - DNA, 25 bp, Probe Sequence
ccactctggacaataaaaacgaatg

SEQ ID NO: 201469 - DNA, 25 bp, Probe Sequence
ccacatccggcaataaaaaaccgca

SEQ ID NO: 201470 - DNA, 25 bp, Probe Sequence
ccaccacccactatatgagaaccga

SEQ ID NO: 201471 - DNA, 25 bp, Probe Sequence
ccacctggcacagttgctgaagaac

SEQ ID NO: 201472 - DNA, 25 bp, Probe Sequence
ccagacgctgctttgtgctaaaagc

SEQ ID NO: 201473 - DNA, 25 bp, Probe Sequence
ccagcactggtcatgtctaaaggtc

SEQ ID NO: 201474 - DNA, 25 bp, Probe Sequence
ccagccttgtttccaaaactctcag

SEQ ID NO: 201475 - DNA, 25 bp, Probe Sequence
ccagccactttgcaaaaactgtcag

SEQ ID NO: 201476 - DNA, 25 bp, Probe Sequence
ccacagccttggaaacagacctcca

SEQ ID NO: 201477 - DNA, 25 bp, Probe Sequence
ccaatgccgtagatgaaccctacaa

SEQ ID NO: 201478 - DNA, 25 bp, Probe Sequence
ccactctggtggataagttcaataa

SEQ ID NO: 201479 - DNA, 25 bp, Probe Sequence
ccacctggcatgcttaaactgtaaa

SEQ ID NO: 201480 - DNA, 25 bp, Probe Sequence
ccaccaggtgcctttcaaatttaga

SEQ ID NO: 201481 - DNA, 25 bp, Probe Sequence
ccactgtttctcctataaatgtaaa

SEQ ID NO: 201482 - DNA, 25 bp, Probe Sequence
ccactgctggtcgcttacacagtat

SEQ ID NO: 201483 - DNA, 25 bp, Probe Sequence
ccacctgagtggcctttagagatgt

SEQ ID NO: 201484 - DNA, 25 bp, Probe Sequence
ccactgcaagcggctgcttgtgggg

SEQ ID NO: 201485 - DNA, 25 bp, Probe Sequence
ccagctgatgaaggcatctgatgcc

SEQ ID NO: 201486 - DNA, 25 bp, Probe Sequence
ccagctgatgaaggcatctgatgcc

SEQ ID NO: 201487 - DNA, 25 bp, Probe Sequence
ccagccatgctgagcatctgagctc

SEQ ID NO: 201488 - DNA, 25 bp, Probe Sequence
ccacctgcatgagcacgtgcattgc

SEQ ID NO: 201489 - DNA, 25 bp, Probe Sequence
ccagactgatgagcacatctctctg

SEQ ID NO: 201490 - DNA, 25 bp, Probe Sequence
ccacatggtgcactgcagtcttctg

SEQ ID NO: 201491 - DNA, 25 bp, Probe Sequence
ccagctgctgtcaggtctgatagtc

SEQ ID NO: 201492 - DNA, 25 bp, Probe Sequence
ccagcagcagtttgcttctgttgtc

SEQ ID NO: 201493 - DNA, 25 bp, Probe Sequence
ccagcagcagttggcgtggatgtcc

SEQ ID NO: 201494 - DNA, 25 bp, Probe Sequence
ccagcagcgggcgtgggagatacgg

SEQ ID NO: 201495 - DNA, 25 bp, Probe Sequence
ccagctgctcgggaggctggggcgg

SEQ ID NO: 201496 - DNA, 25 bp, Probe Sequence
ccagcttcttgcaaggctgagtgag

SEQ ID NO: 201497 - DNA, 25 bp, Probe Sequence
ccagcttttgatggagcgtgtcagt

SEQ ID NO: 201498 - DNA, 25 bp, Probe Sequence
ccacttcctgatggacgggcaggtc

SEQ ID NO: 201499 - DNA, 25 bp, Probe Sequence
ccacctcatcggcaagggagcagcc

SEQ ID NO: 201500 - DNA, 25 bp, Probe Sequence
ccagctccccagaaaatgtatgcac

SEQ ID NO: 201501 - DNA, 25 bp, Probe Sequence
ccagccaccaacagattgtgtgccc

SEQ ID NO: 201502 - DNA, 25 bp, Probe Sequence
ccaccactcacagctgcagggtgcc

SEQ ID NO: 201503 - DNA, 25 bp, Probe Sequence
ccagccatctgcaatgggaggttgc

SEQ ID NO: 201504 - DNA, 25 bp, Probe Sequence
ccagcagcctgttctggatttgctg

SEQ ID NO: 201505 - DNA, 25 bp, Probe Sequence
ccagcacacagatgcggttcatggc

SEQ ID NO: 201506 - DNA, 25 bp, Probe Sequence
ccagacacaggtgctgtctctggct

SEQ ID NO: 201507 - DNA, 25 bp, Probe Sequence
ccagccaaggctggcagatcacttg

SEQ ID NO: 201508 - DNA, 25 bp, Probe Sequence
ccagaaggatgccgcagaccattat

SEQ ID NO: 201509 - DNA, 25 bp, Probe Sequence
ccaactggtctggcaactacttcac

SEQ ID NO: 201510 - DNA, 25 bp, Probe Sequence
gccagtcggactgcgacatagccca

SEQ ID NO: 201511 - DNA, 25 bp, Probe Sequence
ccacctggaccaggaataccacctc

SEQ ID NO: 201512 - DNA, 25 bp, Probe Sequence
ccacctactccaagagtaagttctg

SEQ ID NO: 201513 - DNA, 25 bp, Probe Sequence
ccagcccactaaaggtaaccctatg

SEQ ID NO: 201514 - DNA, 25 bp, Probe Sequence
gcccctcctaaagctgaagccaaag

SEQ ID NO: 201515 - DNA, 25 bp, Probe Sequence
ccacctagggaagcatgaaccacag

SEQ ID NO: 201516 - DNA, 25 bp, Probe Sequence
ccacctactgtatgacaccacattc

SEQ ID NO: 201517 - DNA, 25 bp, Probe Sequence
ccacctcctgagagccactaatgta

SEQ ID NO: 201518 - DNA, 25 bp, Probe Sequence
ccaccccagtgaggacctcgatgtc

SEQ ID NO: 201519 - DNA, 25 bp, Probe Sequence
ccaccccactgggacacaagttcag

SEQ ID NO: 201520 - DNA, 25 bp, Probe Sequence
ccaccacaagtccccaagagtgtga

SEQ ID NO: 201521 - DNA, 25 bp, Probe Sequence
ccagccacgtggagcctagagtgag

SEQ ID NO: 201522 - DNA, 25 bp, Probe Sequence
ccagcactttgggtggctaaggcag

SEQ ID NO: 201523 - DNA, 25 bp, Probe Sequence
ccagcaatttgggaggccgaggcag

SEQ ID NO: 201524 - DNA, 25 bp, Probe Sequence
ccagcactttgggagtgccgaggca

SEQ ID NO: 201525 - DNA, 25 bp, Probe Sequence
ccagcactttgggagtgccaaggca

SEQ ID NO: 201526 - DNA, 25 bp, Probe Sequence
ccagcagttcggggacagcaataga

SEQ ID NO: 201527 - DNA, 25 bp, Probe Sequence
ccagctactcgggagactgagacca

SEQ ID NO: 201528 - DNA, 25 bp, Probe Sequence
ccagctactcgagaggctgagagag

SEQ ID NO: 201529 - DNA, 25 bp, Probe Sequence
ccagctactcgggaggctgaggcag

SEQ ID NO: 201530 - DNA, 25 bp, Probe Sequence
ccagctatctgcctgacaggctgtg

SEQ ID NO: 201531 - DNA, 25 bp, Probe Sequence
ccagctcacttggaaggctgttcca

SEQ ID NO: 201532 - DNA, 25 bp, Probe Sequence
ccagcatactccaaactgtttctga

SEQ ID NO: 201533 - DNA, 25 bp, Probe Sequence
ccagcactatccaacctttctgaag

SEQ ID NO: 201534 - DNA, 25 bp, Probe Sequence
ccacttacccaccttatgtgactag

SEQ ID NO: 201535 - DNA, 25 bp, Probe Sequence
gccattttcccaagttcctacaggg

SEQ ID NO: 201536 - DNA, 25 bp, Probe Sequence
ccagccttacccattgactcaaggg

SEQ ID NO: 201537 - DNA, 25 bp, Probe Sequence
ccagaaaacttcattagctcaagaa

SEQ ID NO: 201538 - DNA, 25 bp, Probe Sequence
ccagaatcattaatatttgagaaaa

SEQ ID NO: 201539 - DNA, 25 bp, Probe Sequence
ccagaatctacaatgaactcaaaca

SEQ ID NO: 201540 - DNA, 25 bp, Probe Sequence
ccagaatccatgctcagcctagaaa

SEQ ID NO: 201541 - DNA, 25 bp, Probe Sequence
ccagaatcaatttcctcaagccaga

SEQ ID NO: 201542 - DNA, 25 bp, Probe Sequence
ccagccactgtttacggagagccag

SEQ ID NO: 201543 - DNA, 25 bp, Probe Sequence
ccagaactctataactgggcccctc

SEQ ID NO: 201544 - DNA, 25 bp, Probe Sequence
ccagaacatgccttagggactttcc

SEQ ID NO: 201545 - DNA, 25 bp, Probe Sequence
ccagcaccattctataggcaacttt

SEQ ID NO: 201546 - DNA, 25 bp, Probe Sequence
ccagcccagccatcaagaacttctg

SEQ ID NO: 201547 - DNA, 25 bp, Probe Sequence
ccactgcccctcgaagaattttgca

SEQ ID NO: 201548 - DNA, 25 bp, Probe Sequence
ccaccttcatccgaaagttctacac

SEQ ID NO: 201549 - DNA, 25 bp, Probe Sequence
ccacctgtctcacaagaacttcact

SEQ ID NO: 201550 - DNA, 25 bp, Probe Sequence
ccagctccctactatcagagacttg

SEQ ID NO: 201551 - DNA, 25 bp, Probe Sequence
ccagcccttcatgctcattagtatc

SEQ ID NO: 201552 - DNA, 25 bp, Probe Sequence
ccaccacagtgatctcacattttgc

SEQ ID NO: 201553 - DNA, 25 bp, Probe Sequence
ccagccctgtattcttattcttcag

SEQ ID NO: 201554 - DNA, 25 bp, Probe Sequence
ccagctaatttttgtattttcagta

SEQ ID NO: 201555 - DNA, 25 bp, Probe Sequence
ccagctccatatattgtttaccttc

SEQ ID NO: 201556 - DNA, 25 bp, Probe Sequence
ccagctctgttgattttaaagcctc

SEQ ID NO: 201557 - DNA, 25 bp, Probe Sequence
ccacctgtctttgcttaaagagcct

SEQ ID NO: 201558 - DNA, 25 bp, Probe Sequence
ccacctggtcttgttcttatggact

SEQ ID NO: 201559 - DNA, 25 bp, Probe Sequence
ccagcctggtgcgtacattctgtag

SEQ ID NO: 201560 - DNA, 25 bp, Probe Sequence
ccagcctggattgccacagtgcaat

SEQ ID NO: 201561 - DNA, 25 bp, Probe Sequence
ccacgtgacagtgcctgggaatgta

SEQ ID NO: 201562 - DNA, 25 bp, Probe Sequence
ccactgctgaatcctcaatggaaag

SEQ ID NO: 201563 - DNA, 25 bp, Probe Sequence
gccaataaacctgaggccagcttag

SEQ ID NO: 201564 - DNA, 25 bp, Probe Sequence
gctgacaaaaactcccgcaaaaggg

SEQ ID NO: 201565 - DNA, 25 bp, Probe Sequence
ccactcaaagtctcccgaaaggtct

SEQ ID NO: 201566 - DNA, 25 bp, Probe Sequence
ccaccaaagttcaccctgaaggctg

SEQ ID NO: 201567 - DNA, 25 bp, Probe Sequence
ccaccaaagttcaccctgaaggctg

SEQ ID NO: 201568 - DNA, 25 bp, Probe Sequence
ccagcccgagttctctcttaaatgg

SEQ ID NO: 201569 - DNA, 25 bp, Probe Sequence
ccagcccgtaatatctttacacaga

SEQ ID NO: 201570 - DNA, 25 bp, Probe Sequence
ccagcctctgtagttctttttacaa

SEQ ID NO: 201571 - DNA, 25 bp, Probe Sequence
ccactttgattttcttggaatacaa

SEQ ID NO: 201572 - DNA, 25 bp, Probe Sequence
ccacttggatttcctatagcaaaga

SEQ ID NO: 201573 - DNA, 25 bp, Probe Sequence
ccagctgtatattatccctaaaaat

SEQ ID NO: 201574 - DNA, 25 bp, Probe Sequence
ccagcttttcctgcagctcaagaaa

SEQ ID NO: 201575 - DNA, 25 bp, Probe Sequence
ccactctgttttggcagtaaatcgt

SEQ ID NO: 201576 - DNA, 25 bp, Probe Sequence
ccaccagcttccagagattaaagtt

SEQ ID NO: 201577 - DNA, 25 bp, Probe Sequence
ccaccgcttcctggagggcaaaatc

SEQ ID NO: 201578 - DNA, 25 bp, Probe Sequence
ccaccgcttcctggagggcaaaatc

SEQ ID NO: 201579 - DNA, 25 bp, Probe Sequence
ccaccactaacgcatggagacaggt

SEQ ID NO: 201580 - DNA, 25 bp, Probe Sequence
ccagcccctgacccaggaagagttt

SEQ ID NO: 201581 - DNA, 25 bp, Probe Sequence
ccagcacgcgtacgacggcaaggat

SEQ ID NO: 201582 - DNA, 25 bp, Probe Sequence
ccagcgccagtagtgacaggggcga

SEQ ID NO: 201583 - DNA, 25 bp, Probe Sequence
ccagcaccagctttacagggcagtg

SEQ ID NO: 201584 - DNA, 25 bp, Probe Sequence
ccaaatcgatttgaggagagagcct

SEQ ID NO: 201585 - DNA, 25 bp, Probe Sequence
ccaattcgtacgtggagaagtggga

SEQ ID NO: 201586 - DNA, 25 bp, Probe Sequence
ccacctctggaaatgggagggtccg

SEQ ID NO: 201587 - DNA, 25 bp, Probe Sequence
ccagcctaggaattcggttagtact

SEQ ID NO: 201588 - DNA, 25 bp, Probe Sequence
ccagcactgaggtgagaggctgtag

SEQ ID NO: 201589 - DNA, 25 bp, Probe Sequence
ccagcctatggctttaggctagctg

SEQ ID NO: 201590 - DNA, 25 bp, Probe Sequence
ccactttgagtggatccagaagctg

SEQ ID NO: 201591 - DNA, 25 bp, Probe Sequence
ccagctgttactaagccatgtggct

SEQ ID NO: 201592 - DNA, 25 bp, Probe Sequence
ccagctttagccaactttctgtgaa

SEQ ID NO: 201593 - DNA, 25 bp, Probe Sequence
ccacgttagccagttgttcttgatg

SEQ ID NO: 201594 - DNA, 25 bp, Probe Sequence
ccacgttagcccaggctctgagagc

SEQ ID NO: 201595 - DNA, 25 bp, Probe Sequence
ccacctgtgaccccgtggtggagga

SEQ ID NO: 201596 - DNA, 25 bp, Probe Sequence
ccagcccgaacaccattgagggagc

SEQ ID NO: 201597 - DNA, 25 bp, Probe Sequence
ccaccctagacaacatagtgaggcc

SEQ ID NO: 201598 - DNA, 25 bp, Probe Sequence
ccacctacaacgtcatagtggaggc

SEQ ID NO: 201599 - DNA, 25 bp, Probe Sequence
ccagcttccaactctagggattcat

SEQ ID NO: 201600 - DNA, 25 bp, Probe Sequence
ccacttaatcacttctatggactta

SEQ ID NO: 201601 - DNA, 25 bp, Probe Sequence
ccactacactccagcctgggtgata

SEQ ID NO: 201602 - DNA, 25 bp, Probe Sequence
ccactgtactccagcgtgggcaaca

SEQ ID NO: 201603 - DNA, 25 bp, Probe Sequence
ccactgtactccagcctggacaaca

SEQ ID NO: 201604 - DNA, 25 bp, Probe Sequence
ccagcttccaaagtgactgaacaag

SEQ ID NO: 201605 - DNA, 25 bp, Probe Sequence
ccagcctcctaactgacagaatctg

SEQ ID NO: 201606 - DNA, 25 bp, Probe Sequence
ccagccctctcaagttaaacgaact

SEQ ID NO: 201607 - DNA, 25 bp, Probe Sequence
ccagccctctcaagttaaacgaact

SEQ ID NO: 201608 - DNA, 25 bp, Probe Sequence
ccaccctggtagatgaacagcccct

SEQ ID NO: 201609 - DNA, 25 bp, Probe Sequence
ccaccctttcacaagcaacagactc

SEQ ID NO: 201610 - DNA, 25 bp, Probe Sequence
ccaccctcgatcagagacaactcgc

SEQ ID NO: 201611 - DNA, 25 bp, Probe Sequence
ccacctttgcaacgcggaatatcac

SEQ ID NO: 201612 - DNA, 25 bp, Probe Sequence
ccagcctgggcaacgagtgaaactc

SEQ ID NO: 201613 - DNA, 25 bp, Probe Sequence
ccagcctggccaacatggtgaaacc

SEQ ID NO: 201614 - DNA, 25 bp, Probe Sequence
ccagcctgcccaacatagtgaaact

SEQ ID NO: 201615 - DNA, 25 bp, Probe Sequence
ccagctccccacgagatggaacaga

SEQ ID NO: 201616 - DNA, 25 bp, Probe Sequence
ccagcttccctgcagaggtgataga

SEQ ID NO: 201617 - DNA, 25 bp, Probe Sequence
ccagcttccctccaggaggttcttg

SEQ ID NO: 201618 - DNA, 25 bp, Probe Sequence
gccactcgccttcttagagttttat

SEQ ID NO: 201619 - DNA, 25 bp, Probe Sequence
ccaccagaatctcctctacagattt

SEQ ID NO: 201620 - DNA, 25 bp, Probe Sequence
ccaccatgaatccattcctgatcct

SEQ ID NO: 201621 - DNA, 25 bp, Probe Sequence
ccagccatcaagaacttctgatctc

SEQ ID NO: 201622 - DNA, 25 bp, Probe Sequence
ccagctgcatcagccagcttctagg

SEQ ID NO: 201623 - DNA, 25 bp, Probe Sequence
ccagctccacagtgttgccagagcc

SEQ ID NO: 201624 - DNA, 25 bp, Probe Sequence
ccacgcacgtgatttgtccagcgac

SEQ ID NO: 201625 - DNA, 25 bp, Probe Sequence
ccacccatggcaaattccatggcac

SEQ ID NO: 201626 - DNA, 25 bp, Probe Sequence
ccagcccagaatactggtctggacc

SEQ ID NO: 201627 - DNA, 25 bp, Probe Sequence
ccagcaccatagctctggctcagag

SEQ ID NO: 201628 - DNA, 25 bp, Probe Sequence
ccagctctcgaggttgcttcatgat

SEQ ID NO: 201629 - DNA, 25 bp, Probe Sequence
ccacctggaggatttctctgttatt

SEQ ID NO: 201630 - DNA, 25 bp, Probe Sequence
ccaccggctggaattgctctggtta

SEQ ID NO: 201631 - DNA, 25 bp, Probe Sequence
ccaccacgtggcagtgcctgaggaa

SEQ ID NO: 201632 - DNA, 25 bp, Probe Sequence
ccagctagggccagtgacagttgca

SEQ ID NO: 201633 - DNA, 25 bp, Probe Sequence
ccagcgggtctgagtgtgaggtgcc

SEQ ID NO: 201634 - DNA, 25 bp, Probe Sequence
ccagctggattattttggagcctgc

SEQ ID NO: 201635 - DNA, 25 bp, Probe Sequence
ccagctggttggttgttgggcattg

SEQ ID NO: 201636 - DNA, 25 bp, Probe Sequence
ccacgtgtgaagtgtagtggcatcc

SEQ ID NO: 201637 - DNA, 25 bp, Probe Sequence
ccagcttggaagagctcctgtccac

SEQ ID NO: 201638 - DNA, 25 bp, Probe Sequence
ccagctgggaaggactcggtgatac

SEQ ID NO: 201639 - DNA, 25 bp, Probe Sequence
ccagctgaggcagagaccgcaggag

SEQ ID NO: 201640 - DNA, 25 bp, Probe Sequence
ccagctgcaacggagactctggcgg

SEQ ID NO: 201641 - DNA, 25 bp, Probe Sequence
ccagctactcaggaggctcagcagc

SEQ ID NO: 201642 - DNA, 25 bp, Probe Sequence
ccagctattcaggaggctgaggtgg

SEQ ID NO: 201643 - DNA, 25 bp, Probe Sequence
ccagcggctcaggagcccaggtggg

SEQ ID NO: 201644 - DNA, 25 bp, Probe Sequence
ccagctagccaatcatccagtttgg

SEQ ID NO: 201645 - DNA, 25 bp, Probe Sequence
ccagcatggtgaaaccctgtctcta

SEQ ID NO: 201646 - DNA, 25 bp, Probe Sequence
ccagctaggaaaccctgtgtgtcat

SEQ ID NO: 201647 - DNA, 25 bp, Probe Sequence
ccagctaggcaatgccttttttttt

SEQ ID NO: 201648 - DNA, 25 bp, Probe Sequence
ccagctagctcctgtgttttgtttt

SEQ ID NO: 201649 - DNA, 25 bp, Probe Sequence
ccacgacagcttatgtttggtttaa

SEQ ID NO: 201650 - DNA, 25 bp, Probe Sequence
ccacagtgacttatttgtagttgtt

SEQ ID NO: 201651 - DNA, 25 bp, Probe Sequence
ccaaggactttggtggcgagaactt

SEQ ID NO: 201652 - DNA, 25 bp, Probe Sequence
ccagcgaggttgggcggccagaagt

SEQ ID NO: 201653 - DNA, 25 bp, Probe Sequence
ccagcgaggttgggcggccagaagt

SEQ ID NO: 201654 - DNA, 25 bp, Probe Sequence
ccagcgggtctggggtctatgtgag

SEQ ID NO: 201655 - DNA, 25 bp, Probe Sequence
ccagctgggtctcctgggcaagaag

SEQ ID NO: 201656 - DNA, 25 bp, Probe Sequence
ccagctgtggaccactgcctgaaag

SEQ ID NO: 201657 - DNA, 25 bp, Probe Sequence
ccagctcatgaagacagccctcaag

SEQ ID NO: 201658 - DNA, 25 bp, Probe Sequence
ccagctcaagcagaggcctacacga

SEQ ID NO: 201659 - DNA, 25 bp, Probe Sequence
ccactaacaaagccctgacaggttc

SEQ ID NO: 201660 - DNA, 25 bp, Probe Sequence
ccactaaccttgcctggtacagtat

SEQ ID NO: 201661 - DNA, 25 bp, Probe Sequence
ccactaagacttctgactccaattt

SEQ ID NO: 201662 - DNA, 25 bp, Probe Sequence
ccactgaaaccctgacccagaaaag

SEQ ID NO: 201663 - DNA, 25 bp, Probe Sequence
ccacccaacccaaaccatgagaatt

SEQ ID NO: 201664 - DNA, 25 bp, Probe Sequence
ccaagccgacccaaaccagggtgtg

SEQ ID NO: 201665 - DNA, 25 bp, Probe Sequence
ccaaccccactgaacacaagcgggg

SEQ ID NO: 201666 - DNA, 25 bp, Probe Sequence
ccaacactaccaaatcccggatgac

SEQ ID NO: 201667 - DNA, 25 bp, Probe Sequence
ccaacactaccaaatcccggatgac

SEQ ID NO: 201668 - DNA, 25 bp, Probe Sequence
ccaaattttgcgctcggtgcgatac

SEQ ID NO: 201669 - DNA, 25 bp, Probe Sequence
ccaaattttgcgctcggtgcgatac

SEQ ID NO: 201670 - DNA, 25 bp, Probe Sequence
ccacgtgtttggcatcaggggcagc

SEQ ID NO: 201671 - DNA, 25 bp, Probe Sequence
gccgccggttgggtcgaggcggacg

SEQ ID NO: 201672 - DNA, 25 bp, Probe Sequence
ccaccgcaaatgcttctaggcggac

SEQ ID NO: 201673 - DNA, 25 bp, Probe Sequence
ccacacgctttttttaggtgcaggg

SEQ ID NO: 201674 - DNA, 25 bp, Probe Sequence
ccaccgcttagagatttggggggct

SEQ ID NO: 201675 - DNA, 25 bp, Probe Sequence
ccactcgtgtaagcagtttggtgga

SEQ ID NO: 201676 - DNA, 25 bp, Probe Sequence
ccactttgtcaagctcatttcctgg

SEQ ID NO: 201677 - DNA, 25 bp, Probe Sequence
ccacctaatagagctggtgctcctg

SEQ ID NO: 201678 - DNA, 25 bp, Probe Sequence
ccaccttacagaggttctgcctgct

SEQ ID NO: 201679 - DNA, 25 bp, Probe Sequence
ccacctcagaagtgtcatctctctc

SEQ ID NO: 201680 - DNA, 25 bp, Probe Sequence
ccaccctcagaagtgtcatctctct

SEQ ID NO: 201681 - DNA, 25 bp, Probe Sequence
ccagccttatgaactgaattctaaa

SEQ ID NO: 201682 - DNA, 25 bp, Probe Sequence
ccagcctggatgaatctgacctcta

SEQ ID NO: 201683 - DNA, 25 bp, Probe Sequence
ccagccagaattttgacttctagga

SEQ ID NO: 201684 - DNA, 25 bp, Probe Sequence
ccagccactacttgtttgcgctagg

SEQ ID NO: 201685 - DNA, 25 bp, Probe Sequence
ccagccacctccttattttggatga

SEQ ID NO: 201686 - DNA, 25 bp, Probe Sequence
ccaccagcctaaggtgttcaggaag

SEQ ID NO: 201687 - DNA, 25 bp, Probe Sequence
ccactggcccaagaagcatctagaa

SEQ ID NO: 201688 - DNA, 25 bp, Probe Sequence
ccagctgtgctcaaatggaaatcca

SEQ ID NO: 201689 - DNA, 25 bp, Probe Sequence
ccagcatatgtaagtggaactcaga

SEQ ID NO: 201690 - DNA, 25 bp, Probe Sequence
ccagctctgtgtaggtaaccagatg

SEQ ID NO: 201691 - DNA, 25 bp, Probe Sequence
ccagccttctccgtaattagcatgg

SEQ ID NO: 201692 - DNA, 25 bp, Probe Sequence
ccacctcatcctccaaaagtgctgg

SEQ ID NO: 201693 - DNA, 25 bp, Probe Sequence
ccacttcccatctgtaatttgcagg

SEQ ID NO: 201694 - DNA, 25 bp, Probe Sequence
ccaaatctccttggaatttcacgac

SEQ ID NO: 201695 - DNA, 25 bp, Probe Sequence
ccaaatcagttcacaatttcccgcc

SEQ ID NO: 201696 - DNA, 25 bp, Probe Sequence
ccaaatcagttcacaatttcccgcc

SEQ ID NO: 201697 - DNA, 25 bp, Probe Sequence
ccaccattgtagagaatttccttcc

SEQ ID NO: 201698 - DNA, 25 bp, Probe Sequence
ccaccactgtttagaatgacccttg

SEQ ID NO: 201699 - DNA, 25 bp, Probe Sequence
ccaccaggcattagaggtccacctc

SEQ ID NO: 201700 - DNA, 25 bp, Probe Sequence
ccaccaagatgagcagggcccttgc

SEQ ID NO: 201701 - DNA, 25 bp, Probe Sequence
ccagctcacaagctcaggagcgccg

SEQ ID NO: 201702 - DNA, 25 bp, Probe Sequence
ccagcctgcaacttgcactgatgca

SEQ ID NO: 201703 - DNA, 25 bp, Probe Sequence
ccagccatgagactcccagatggga

SEQ ID NO: 201704 - DNA, 25 bp, Probe Sequence
ccagcctgcggtccatgtgcagggg

SEQ ID NO: 201705 - DNA, 25 bp, Probe Sequence
ccagcctgggcgcagtggtgctggg

SEQ ID NO: 201706 - DNA, 25 bp, Probe Sequence
ccagctgggggccagtgggggaggt

SEQ ID NO: 201707 - DNA, 25 bp, Probe Sequence
ccagctgggggccagtgggggaggt

SEQ ID NO: 201708 - DNA, 25 bp, Probe Sequence
ccagctggacgggctggtctggggg

SEQ ID NO: 201709 - DNA, 25 bp, Probe Sequence
ccagctggacgggctggtctggggg

SEQ ID NO: 201710 - DNA, 25 bp, Probe Sequence
ccactgagagctgctcctttggggg

SEQ ID NO: 201711 - DNA, 25 bp, Probe Sequence
ccaccaagccgggcagcctggtggg

SEQ ID NO: 201712 - DNA, 25 bp, Probe Sequence
ccaccaaggagggcgcactgtgtga

SEQ ID NO: 201713 - DNA, 25 bp, Probe Sequence
ccagcgcaaggaggggctgcttctg

SEQ ID NO: 201714 - DNA, 25 bp, Probe Sequence
ccagccaaagacagcagcattccca

SEQ ID NO: 201715 - DNA, 25 bp, Probe Sequence
ccagccaaagatcggatttgtccaa

SEQ ID NO: 201716 - DNA, 25 bp, Probe Sequence
ccactgcctgaaaggtttgtacaga

SEQ ID NO: 201717 - DNA, 25 bp, Probe Sequence
ccagctggcaacacgtttgcaaagg

SEQ ID NO: 201718 - DNA, 25 bp, Probe Sequence
ccagctgagacactgtgattttaaa

SEQ ID NO: 201719 - DNA, 25 bp, Probe Sequence
ccagcgacactcattcattgaagaa

SEQ ID NO: 201720 - DNA, 25 bp, Probe Sequence
ccacgtccctgttttcaaagatagt

SEQ ID NO: 201721 - DNA, 25 bp, Probe Sequence
ccacagatcccttaatttaaataag

SEQ ID NO: 201722 - DNA, 25 bp, Probe Sequence
ccaagcttcctgtaaactataagaa

SEQ ID NO: 201723 - DNA, 25 bp, Probe Sequence
ccaacttgtttcacgctatatcagg

SEQ ID NO: 201724 - DNA, 25 bp, Probe Sequence
ccacctgggttcatgggcatatcag

SEQ ID NO: 201725 - DNA, 25 bp, Probe Sequence
ccagccttggttctgtgccaagcat

SEQ ID NO: 201726 - DNA, 25 bp, Probe Sequence
ccaagcttgggtttctctagacatc

SEQ ID NO: 201727 - DNA, 25 bp, Probe Sequence
ccaaattggcgtttgtcatcagaat

SEQ ID NO: 201728 - DNA, 25 bp, Probe Sequence
ccaaactggactctcgtgcagaaaa

SEQ ID NO: 201729 - DNA, 25 bp, Probe Sequence
ccacgacgagagctccatgtcagga

SEQ ID NO: 201730 - DNA, 25 bp, Probe Sequence
ccaccggaggtggcaatgcccgaga

SEQ ID NO: 201731 - DNA, 25 bp, Probe Sequence
ccacccggggcgtgggctatgagac

SEQ ID NO: 201732 - DNA, 25 bp, Probe Sequence
ccacccttgtatcctgggtcttaga

SEQ ID NO: 201733 - DNA, 25 bp, Probe Sequence
ccacccttgtatcctgggtcttaga

SEQ ID NO: 201734 - DNA, 25 bp, Probe Sequence
ccagccctagccaacatggtgtaaa

SEQ ID NO: 201735 - DNA, 25 bp, Probe Sequence
ccaccatccccatcatgggtatcgt

SEQ ID NO: 201736 - DNA, 25 bp, Probe Sequence
ccaccatccccatcatgggtatcgt

SEQ ID NO: 201737 - DNA, 25 bp, Probe Sequence
ccaccatccccatcatgggtatcgt

SEQ ID NO: 201738 - DNA, 25 bp, Probe Sequence
ccaccaaccagaacgtggtttgcct

SEQ ID NO: 201739 - DNA, 25 bp, Probe Sequence
ccaccaaccagaacgtggtttgcct

SEQ ID NO: 201740 - DNA, 25 bp, Probe Sequence
ccacaaagcccatctctggtttgag

SEQ ID NO: 201741 - DNA, 25 bp, Probe Sequence
ccaccacagacctaccacgtggatg

SEQ ID NO: 201742 - DNA, 25 bp, Probe Sequence
ccaccaccatccaacagacctggtg

SEQ ID NO: 201743 - DNA, 25 bp, Probe Sequence
ccaccagcacagccaaaacctgggg

SEQ ID NO: 201744 - DNA, 25 bp, Probe Sequence
ccaccacaagtggaggcagcctgag

SEQ ID NO: 201745 - DNA, 25 bp, Probe Sequence
ccacacagaatcgggggactggacc

SEQ ID NO: 201746 - DNA, 25 bp, Probe Sequence
ccaccacaaagggctggacttgagg

SEQ ID NO: 201747 - DNA, 25 bp, Probe Sequence
ccactccaaagtccatggattcaat

SEQ ID NO: 201748 - DNA, 25 bp, Probe Sequence
ccagctgccacaagtccagaataca

SEQ ID NO: 201749 - DNA, 25 bp, Probe Sequence
ccagcgccaaggacatcaagaagat

SEQ ID NO: 201750 - DNA, 25 bp, Probe Sequence
ccagcctcacagcactattgtaaac

SEQ ID NO: 201751 - DNA, 25 bp, Probe Sequence
ccaccgctctggatcatggtactag

SEQ ID NO: 201752 - DNA, 25 bp, Probe Sequence
ccaaggcattcgatgcgtgtttaat

SEQ ID NO: 201753 - DNA, 25 bp, Probe Sequence
ccaaattcatctcctcgattttaat

SEQ ID NO: 201754 - DNA, 25 bp, Probe Sequence
ccaaagtcactcctgttttgttttg

SEQ ID NO: 201755 - DNA, 25 bp, Probe Sequence
ccaccctgactagtcattttgtttt

SEQ ID NO: 201756 - DNA, 25 bp, Probe Sequence
ccagctgcttaacctttttgatttt

SEQ ID NO: 201757 - DNA, 25 bp, Probe Sequence
ccagccttcaagcaatcctagttga

SEQ ID NO: 201758 - DNA, 25 bp, Probe Sequence
ccaccactaggtcatcttatttgat

SEQ ID NO: 201759 - DNA, 25 bp, Probe Sequence
ccacgccaaggtccatctggttggt

SEQ ID NO: 201760 - DNA, 25 bp, Probe Sequence
ccacggacagggatctcggtggggc

SEQ ID NO: 201761 - DNA, 25 bp, Probe Sequence
ccacctgacggtgatcttgggcaga

SEQ ID NO: 201762 - DNA, 25 bp, Probe Sequence
ccacttgaacagagaattggtagag

SEQ ID NO: 201763 - DNA, 25 bp, Probe Sequence
ccactttgcaaaaactgtcaggagg

SEQ ID NO: 201764 - DNA, 25 bp, Probe Sequence
ccacttgtcacgccaaatgaagaga

SEQ ID NO: 201765 - DNA, 25 bp, Probe Sequence
ccacctggcacagaatatgcactgt

SEQ ID NO: 201766 - DNA, 25 bp, Probe Sequence
ccacctccaagccgagtcacttggt

SEQ ID NO: 201767 - DNA, 25 bp, Probe Sequence
ccacctttgacactgactcacagtg

SEQ ID NO: 201768 - DNA, 25 bp, Probe Sequence
ccaccagaagatccgcatctcaaag

SEQ ID NO: 201769 - DNA, 25 bp, Probe Sequence
ccaccataaacccagcatcaggcag

SEQ ID NO: 201770 - DNA, 25 bp, Probe Sequence
ccaccatacaggctatacacgagag

SEQ ID NO: 201771 - DNA, 25 bp, Probe Sequence
ccaccatcctggactggcgaggaag

SEQ ID NO: 201772 - DNA, 25 bp, Probe Sequence
ccacctctcttgaggcggtgagcag

SEQ ID NO: 201773 - DNA, 25 bp, Probe Sequence
gccaccctattggggcaacaggagg

SEQ ID NO: 201774 - DNA, 25 bp, Probe Sequence
ccagccctatgtggagagcgacagt

SEQ ID NO: 201775 - DNA, 25 bp, Probe Sequence
ccacgcctctaggagcagtgacgtg

SEQ ID NO: 201776 - DNA, 25 bp, Probe Sequence
ccaccgccagaggtgcactactgga

SEQ ID NO: 201777 - DNA, 25 bp, Probe Sequence
ccagccccattttgacatcaaggat

SEQ ID NO: 201778 - DNA, 25 bp, Probe Sequence
ccaccatttttaacatgcaagcggt

SEQ ID NO: 201779 - DNA, 25 bp, Probe Sequence
ccaccagtgtatcaccagagtcctg

SEQ ID NO: 201780 - DNA, 25 bp, Probe Sequence
ccagctggggtgcagacaggtcctg

SEQ ID NO: 201781 - DNA, 25 bp, Probe Sequence
ccagcggccagggagaaggacgtgg

SEQ ID NO: 201782 - DNA, 25 bp, Probe Sequence
ccagccccaacgtgggcactgatgg

SEQ ID NO: 201783 - DNA, 25 bp, Probe Sequence
ccagccggacaccggccgcattgag

SEQ ID NO: 201784 - DNA, 25 bp, Probe Sequence
tccagccggacaccggccgcattga

SEQ ID NO: 201785 - DNA, 25 bp, Probe Sequence
ccagcgggaacctgccgctggctac

SEQ ID NO: 201786 - DNA, 25 bp, Probe Sequence
ccagcgggaacctgccgctggctac

SEQ ID NO: 201787 - DNA, 25 bp, Probe Sequence
ccacagggaacctgggttcttctgg

SEQ ID NO: 201788 - DNA, 25 bp, Probe Sequence
ccacagggtctccttgggtatgttc

SEQ ID NO: 201789 - DNA, 25 bp, Probe Sequence
ccacgggcctcccagagtgaaggcc

SEQ ID NO: 201790 - DNA, 25 bp, Probe Sequence
ccagcgcagccccaagaggatgggg

SEQ ID NO: 201791 - DNA, 25 bp, Probe Sequence
ccagcctctcccaaaggaagcgttg

SEQ ID NO: 201792 - DNA, 25 bp, Probe Sequence
ccaccctgccatctgaggaaggggt

SEQ ID NO: 201793 - DNA, 25 bp, Probe Sequence
ccagccgtggagctgtggaattggg

SEQ ID NO: 201794 - DNA, 25 bp, Probe Sequence
ccagcctggcgacggaggaatgctg

SEQ ID NO: 201795 - DNA, 25 bp, Probe Sequence
ccagcgtggtggtgcaggacgtggc

SEQ ID NO: 201796 - DNA, 25 bp, Probe Sequence
ccagcgcggggagtgaggaggggtc

SEQ ID NO: 201797 - DNA, 25 bp, Probe Sequence
ccacctgggggcaagcacaggggat

SEQ ID NO: 201798 - DNA, 25 bp, Probe Sequence
ccactgtcacagagaatgccacggg

SEQ ID NO: 201799 - DNA, 25 bp, Probe Sequence
ccactatacagcctactgtcgcagt

SEQ ID NO: 201800 - DNA, 25 bp, Probe Sequence
ccagccatgtacgttgctatccagg

SEQ ID NO: 201801 - DNA, 25 bp, Probe Sequence
ccacctgtgaccatccaacagtgga

SEQ ID NO: 201802 - DNA, 25 bp, Probe Sequence
ccacctcccttgatcatacagtgag

SEQ ID NO: 201803 - DNA, 25 bp, Probe Sequence
ccacctcccttgatcatacagtgag

SEQ ID NO: 201804 - DNA, 25 bp, Probe Sequence
ccacctcccttgatcatacagtgag

SEQ ID NO: 201805 - DNA, 25 bp, Probe Sequence
ccacttccttcgtatctggagggtt

SEQ ID NO: 201806 - DNA, 25 bp, Probe Sequence
ccactcttctctgggacttgtgggc

SEQ ID NO: 201807 - DNA, 25 bp, Probe Sequence
ccaccttcttacgctatggcaggta

SEQ ID NO: 201808 - DNA, 25 bp, Probe Sequence
ccagcctatctattgcattttgtgc

SEQ ID NO: 201809 - DNA, 25 bp, Probe Sequence
ccagccctgtagccatctattggca

SEQ ID NO: 201810 - DNA, 25 bp, Probe Sequence
ccacctccatcccatctatgggaag

SEQ ID NO: 201811 - DNA, 25 bp, Probe Sequence
ccacaacgtgtccattatcctgaag

SEQ ID NO: 201812 - DNA, 25 bp, Probe Sequence
ccacagaagctttgtttcttgggca

SEQ ID NO: 201813 - DNA, 25 bp, Probe Sequence
ccaagctacttcctgtacttaaaag

SEQ ID NO: 201814 - DNA, 25 bp, Probe Sequence
ccacattttcttatggcattaaaaa

SEQ ID NO: 201815 - DNA, 25 bp, Probe Sequence
ccactttttgttgggcaatatgaaa

SEQ ID NO: 201816 - DNA, 25 bp, Probe Sequence
ccagcgctttgggtgagtgcagtga

SEQ ID NO: 201817 - DNA, 25 bp, Probe Sequence
ccactatcatggccgtgcagtttga

SEQ ID NO: 201818 - DNA, 25 bp, Probe Sequence
ccactgtgcaggtgctattgttact

SEQ ID NO: 201819 - DNA, 25 bp, Probe Sequence
ccacctgcaggtgcatttggtcctt

SEQ ID NO: 201820 - DNA, 25 bp, Probe Sequence
ccacctgcaggggcttagtgtctgg

SEQ ID NO: 201821 - DNA, 25 bp, Probe Sequence
ccaccacaggggacaagattcttga

SEQ ID NO: 201822 - DNA, 25 bp, Probe Sequence
ccacccagagaagcacactttgtga

SEQ ID NO: 201823 - DNA, 25 bp, Probe Sequence
ccaccccaagcagtacgcttgctgg

SEQ ID NO: 201824 - DNA, 25 bp, Probe Sequence
ccaccaccagaagagctgcttgact

SEQ ID NO: 201825 - DNA, 25 bp, Probe Sequence
ccacccttgtcaggagccattgacg

SEQ ID NO: 201826 - DNA, 25 bp, Probe Sequence
ccacctctttctgccagatgaacag

SEQ ID NO: 201827 - DNA, 25 bp, Probe Sequence
ccacgcttttatccagagagaccac

SEQ ID NO: 201828 - DNA, 25 bp, Probe Sequence
ccacctttctgaatcagacacaagc

SEQ ID NO: 201829 - DNA, 25 bp, Probe Sequence
ccagccatgtttacagagccagcaa

SEQ ID NO: 201830 - DNA, 25 bp, Probe Sequence
ccagcctgggtgacagagcaatacc

SEQ ID NO: 201831 - DNA, 25 bp, Probe Sequence
ccagcctgggcgacagagcgagact

SEQ ID NO: 201832 - DNA, 25 bp, Probe Sequence
ccagccacaccagcagaggatgacg

SEQ ID NO: 201833 - DNA, 25 bp, Probe Sequence
ccagccacaccagcagaggatgacg

SEQ ID NO: 201834 - DNA, 25 bp, Probe Sequence
ccagcgccagcgaggggagcagcgc

SEQ ID NO: 201835 - DNA, 25 bp, Probe Sequence
ccacatgccttaaggggaccgtggc

SEQ ID NO: 201836 - DNA, 25 bp, Probe Sequence
ccacctgcagaacggagtgtccggg

SEQ ID NO: 201837 - DNA, 25 bp, Probe Sequence
ccagccagcagcacggatgttactg

SEQ ID NO: 201838 - DNA, 25 bp, Probe Sequence
ccaccacactcccgagtgtcttgga

SEQ ID NO: 201839 - DNA, 25 bp, Probe Sequence
ccaccatctttgcaggttgctttgc

SEQ ID NO: 201840 - DNA, 25 bp, Probe Sequence
ccacccttggagttgtatgcttatc

SEQ ID NO: 201841 - DNA, 25 bp, Probe Sequence
ccacctctgtgtgtgatgtagcttt

SEQ ID NO: 201842 - DNA, 25 bp, Probe Sequence
ccaccctgggtgtatgtgagtgtgc

SEQ ID NO: 201843 - DNA, 25 bp, Probe Sequence
ccacaccctggttttgtgtagccgc

SEQ ID NO: 201844 - DNA, 25 bp, Probe Sequence
ccacagcccttgtggatgtgtcccc

SEQ ID NO: 201845 - DNA, 25 bp, Probe Sequence
ccaacccctgaggaagatgggggca

SEQ ID NO: 201846 - DNA, 25 bp, Probe Sequence
ccaagagccctaaaaatggttatct

SEQ ID NO: 201847 - DNA, 25 bp, Probe Sequence
ccaaggccgacttttctgggatgtc

SEQ ID NO: 201848 - DNA, 25 bp, Probe Sequence
ccacggcggagcgacttgtggggca

SEQ ID NO: 201849 - DNA, 25 bp, Probe Sequence
ccacggtgagggccgatgtctggga

SEQ ID NO: 201850 - DNA, 25 bp, Probe Sequence
ccacggaggggaagattcaggaatt

SEQ ID NO: 201851 - DNA, 25 bp, Probe Sequence
ccacaggccaggtaagtacacgaga

SEQ ID NO: 201852 - DNA, 25 bp, Probe Sequence
ccaccccgttgacgtcaatgggagt

SEQ ID NO: 201853 - DNA, 25 bp, Probe Sequence
ccaccccgatttagacctgcgggtg

SEQ ID NO: 201854 - DNA, 25 bp, Probe Sequence
ccaccccaactatgtcactgcgggg

SEQ ID NO: 201855 - DNA, 25 bp, Probe Sequence
ccagccggattctggaccacagggg

SEQ ID NO: 201856 - DNA, 25 bp, Probe Sequence
ccacgtggaccaagtgaccaccgtg

SEQ ID NO: 201857 - DNA, 25 bp, Probe Sequence
ccacagggacacaccattacacctg

SEQ ID NO: 201858 - DNA, 25 bp, Probe Sequence
ccaagatggccctgacttaatcctt

SEQ ID NO: 201859 - DNA, 25 bp, Probe Sequence
ccacagtcccgagactgggatcccc

SEQ ID NO: 201860 - DNA, 25 bp, Probe Sequence
ccacgactccaagatcaagttcccg

SEQ ID NO: 201861 - DNA, 25 bp, Probe Sequence
ccacagactaatggctatgaccttc

SEQ ID NO: 201862 - DNA, 25 bp, Probe Sequence
ccaccagtaccagtagcactctgtc

SEQ ID NO: 201863 - DNA, 25 bp, Probe Sequence
ccagccatgaattcagtgaactctt

SEQ ID NO: 201864 - DNA, 25 bp, Probe Sequence
ccagcctgatgctcatggatttcta

SEQ ID NO: 201865 - DNA, 25 bp, Probe Sequence
ccagcctgtccctgttgtaaggaag

SEQ ID NO: 201866 - DNA, 25 bp, Probe Sequence
ccagccttcacctggccatgaagga

SEQ ID NO: 201867 - DNA, 25 bp, Probe Sequence
ccagcctatcaccatgactgacagc

SEQ ID NO: 201868 - DNA, 25 bp, Probe Sequence
ccagcctatcaccatgactgacagc

SEQ ID NO: 201869 - DNA, 25 bp, Probe Sequence
ccagcctgccaggatggtgtcagaa

SEQ ID NO: 201870 - DNA, 25 bp, Probe Sequence
ccagcctccctgtggatatgagagt

SEQ ID NO: 201871 - DNA, 25 bp, Probe Sequence
ccacctgcctctcaggaaggagttt

SEQ ID NO: 201872 - DNA, 25 bp, Probe Sequence
ccaccgccactgtgtgaaactgtat

SEQ ID NO: 201873 - DNA, 25 bp, Probe Sequence
ccaccgttagctgtgaatagtataa

SEQ ID NO: 201874 - DNA, 25 bp, Probe Sequence
ccaacctctttgggagaagtatgaa

SEQ ID NO: 201875 - DNA, 25 bp, Probe Sequence
ccacaccggccactgaaggagggca

SEQ ID NO: 201876 - DNA, 25 bp, Probe Sequence
ccacgactatgctgtaagagaggta

SEQ ID NO: 201877 - DNA, 25 bp, Probe Sequence
ccactgcccgctttcaaggcaagat

SEQ ID NO: 201878 - DNA, 25 bp, Probe Sequence
ccacctgccctgctacaggaagagt

SEQ ID NO: 201879 - DNA, 25 bp, Probe Sequence
ccacctcccatacgcaaggggatgt

SEQ ID NO: 201880 - DNA, 25 bp, Probe Sequence
ccacccctcaatgtagggaggtaca

SEQ ID NO: 201881 - DNA, 25 bp, Probe Sequence
ccacccaatgaaaaaaggatctgga

SEQ ID NO: 201882 - DNA, 25 bp, Probe Sequence
ccacaccaaccaaccaatagacagg

SEQ ID NO: 201883 - DNA, 25 bp, Probe Sequence
ccaccaacagccactcagaaaagac

SEQ ID NO: 201884 - DNA, 25 bp, Probe Sequence
ccacgccacagggttagaaccaacg

SEQ ID NO: 201885 - DNA, 25 bp, Probe Sequence
ccactgcctgcttggctgtgaaaag

SEQ ID NO: 201886 - DNA, 25 bp, Probe Sequence
ccacagcctctgacatgcgatttga

SEQ ID NO: 201887 - DNA, 25 bp, Probe Sequence
ccacacatcatcggcagccattgga

SEQ ID NO: 201888 - DNA, 25 bp, Probe Sequence
ccaccagtgcaggctgcctatcaga

SEQ ID NO: 201889 - DNA, 25 bp, Probe Sequence
ccaccagtgcaggctgcctatcaga

SEQ ID NO: 201890 - DNA, 25 bp, Probe Sequence
ccacgactgcaggctgtgactgatg

SEQ ID NO: 201891 - DNA, 25 bp, Probe Sequence
ccacgcacacagtgagcagctgcag

SEQ ID NO: 201892 - DNA, 25 bp, Probe Sequence
ccacaacaagctccaactcagctgt

SEQ ID NO: 201893 - DNA, 25 bp, Probe Sequence
ccaccacaactggatccatcggatc

SEQ ID NO: 201894 - DNA, 25 bp, Probe Sequence
ccaccacaactggatccatcggatc

SEQ ID NO: 201895 - DNA, 25 bp, Probe Sequence
ccaccccacttaggatgtggccctg

SEQ ID NO: 201896 - DNA, 25 bp, Probe Sequence
ccaaccaccttagcatgtatcactc

SEQ ID NO: 201897 - DNA, 25 bp, Probe Sequence
ccaaagcccaacacttgacagtcat

SEQ ID NO: 201898 - DNA, 25 bp, Probe Sequence
gccaaggaccctatcgtcaatgtat

SEQ ID NO: 201899 - DNA, 25 bp, Probe Sequence
ccaccccacactgtatctaatgtat

SEQ ID NO: 201900 - DNA, 25 bp, Probe Sequence
ccaccctcctattgtgtctgaagtt

SEQ ID NO: 201901 - DNA, 25 bp, Probe Sequence
ccacgcgacgtgttgtgtctgagat

SEQ ID NO: 201902 - DNA, 25 bp, Probe Sequence
ccaccggcactcagttatgcagatg

SEQ ID NO: 201903 - DNA, 25 bp, Probe Sequence
ccaccttgcatccagggtatggtgt

SEQ ID NO: 201904 - DNA, 25 bp, Probe Sequence
ccaccatgtgcacgatgggctcagc

SEQ ID NO: 201905 - DNA, 25 bp, Probe Sequence
ccaccgtagaatcgcctaccatttg

SEQ ID NO: 201906 - DNA, 25 bp, Probe Sequence
ccaccctagcaatatcaaccattaa

SEQ ID NO: 201907 - DNA, 25 bp, Probe Sequence
ccacgcttcagctactatctaatca

SEQ ID NO: 201908 - DNA, 25 bp, Probe Sequence
ccacctcatagctttacacattttg

SEQ ID NO: 201909 - DNA, 25 bp, Probe Sequence
ccactctcatggttcatagtattca

SEQ ID NO: 201910 - DNA, 25 bp, Probe Sequence
ccacgtgcatgtctatggcatggtc

SEQ ID NO: 201911 - DNA, 25 bp, Probe Sequence
ccacggagatcctaagctggctgtc

SEQ ID NO: 201912 - DNA, 25 bp, Probe Sequence
ccacctgaggacaaagctggcgctc

SEQ ID NO: 201913 - DNA, 25 bp, Probe Sequence
ccacctgatgagccaggagctgccg

SEQ ID NO: 201914 - DNA, 25 bp, Probe Sequence
ccacctgatgagccaggagctgccg

SEQ ID NO: 201915 - DNA, 25 bp, Probe Sequence
ccaccagtgttccagatgcttctga

SEQ ID NO: 201916 - DNA, 25 bp, Probe Sequence
ccagccagtggcagagaaatatcac

SEQ ID NO: 201917 - DNA, 25 bp, Probe Sequence
ccaccagctagcccaggaaatactt

SEQ ID NO: 201918 - DNA, 25 bp, Probe Sequence
ccaccaccagtgacatgaaaatttt

SEQ ID NO: 201919 - DNA, 25 bp, Probe Sequence
gccagccgacgaaaaccagataatt

SEQ ID NO: 201920 - DNA, 25 bp, Probe Sequence
ccaccgtcgcacaaatctcgaaaca

SEQ ID NO: 201921 - DNA, 25 bp, Probe Sequence
ccactgctgtcagcgttccgaaagc

SEQ ID NO: 201922 - DNA, 25 bp, Probe Sequence
ccaccattacccctcctaagagagg

SEQ ID NO: 201923 - DNA, 25 bp, Probe Sequence
ccacaggtacctccacacttgggag

SEQ ID NO: 201924 - DNA, 25 bp, Probe Sequence
ccacagttgaggggaactttgccag

SEQ ID NO: 201925 - DNA, 25 bp, Probe Sequence
gccacagttgaggggaactttgcca

SEQ ID NO: 201926 - DNA, 25 bp, Probe Sequence
ccaaggagcagcggctgaacttcgg

SEQ ID NO: 201927 - DNA, 25 bp, Probe Sequence
ccaccgacaccaagaacgtgcagtt

SEQ ID NO: 201928 - DNA, 25 bp, Probe Sequence
gccacgaaaccaaatgggtggtctt

SEQ ID NO: 201929 - DNA, 25 bp, Probe Sequence
ccacgcaaagccacattgaattttt

SEQ ID NO: 201930 - DNA, 25 bp, Probe Sequence
tccaagacacccacttaagttcttt

SEQ ID NO: 201931 - DNA, 25 bp, Probe Sequence
ccacgagctcccagagtgcaagttc

SEQ ID NO: 201932 - DNA, 25 bp, Probe Sequence
ccacgtgaccaacatgcacgagatg

SEQ ID NO: 201933 - DNA, 25 bp, Probe Sequence
ccacgtgaccaacttgcgcaagatg

SEQ ID NO: 201934 - DNA, 25 bp, Probe Sequence
ccacgatgcagcgtatttcacactg

SEQ ID NO: 201935 - DNA, 25 bp, Probe Sequence
ccaccatcagcttttgtctacaggt

SEQ ID NO: 201936 - DNA, 25 bp, Probe Sequence
ccaccttgtgttctgctgaagtctg

SEQ ID NO: 201937 - DNA, 25 bp, Probe Sequence
ccaccagggcttcagcaggagcctg

SEQ ID NO: 201938 - DNA, 25 bp, Probe Sequence
ccaccaaggcctagacacggcactg

SEQ ID NO: 201939 - DNA, 25 bp, Probe Sequence
ccaccaaggcctagacacggcactg

SEQ ID NO: 201940 - DNA, 25 bp, Probe Sequence
ccaccagggccaataggcattcctg

SEQ ID NO: 201941 - DNA, 25 bp, Probe Sequence
ccaccatggaccagaagtctctctg

SEQ ID NO: 201942 - DNA, 25 bp, Probe Sequence
ccaccataattccgaaggccacgtt

SEQ ID NO: 201943 - DNA, 25 bp, Probe Sequence
ccacccctgatacaactgccaggtt

SEQ ID NO: 201944 - DNA, 25 bp, Probe Sequence
ccacccctgatacatgagccagtga

SEQ ID NO: 201945 - DNA, 25 bp, Probe Sequence
ccacgcgcacttacacgagaagaca

SEQ ID NO: 201946 - DNA, 25 bp, Probe Sequence
ccacgctgcccaacatcatgaaagc

SEQ ID NO: 201947 - DNA, 25 bp, Probe Sequence
ccactcgctctaaagcaatagcatc

SEQ ID NO: 201948 - DNA, 25 bp, Probe Sequence
ccaccagctccagacagtaactaag

SEQ ID NO: 201949 - DNA, 25 bp, Probe Sequence
ccaccagctccagacagtaactaag

SEQ ID NO: 201950 - DNA, 25 bp, Probe Sequence
ccaccagccatgaattcagtgaact

SEQ ID NO: 201951 - DNA, 25 bp, Probe Sequence
ccacctggctgctattgcaggaggc

SEQ ID NO: 201952 - DNA, 25 bp, Probe Sequence
ccaccaggctcaagatgctggaggt

SEQ ID NO: 201953 - DNA, 25 bp, Probe Sequence
ccaccctgccagatctggaggacta

SEQ ID NO: 201954 - DNA, 25 bp, Probe Sequence
ccaccctccagaatcctgatggtat

SEQ ID NO: 201955 - DNA, 25 bp, Probe Sequence
ccaccctccagaatcctgatggtat

SEQ ID NO: 201956 - DNA, 25 bp, Probe Sequence
ccacgtctacatgtacgtgttcatc

SEQ ID NO: 201957 - DNA, 25 bp, Probe Sequence
gcctcagttacttttcagtttgccc

SEQ ID NO: 201958 - DNA, 25 bp, Probe Sequence
gccattattacttttggtatcccag

SEQ ID NO: 201959 - DNA, 25 bp, Probe Sequence
gccaatacgaattcttgcctttcca

SEQ ID NO: 201960 - DNA, 25 bp, Probe Sequence
gccaataggactttccgttgacgtc

SEQ ID NO: 201961 - DNA, 25 bp, Probe Sequence
ccaatatggccttcacccatgtagc

SEQ ID NO: 201962 - DNA, 25 bp, Probe Sequence
ccaatgaccctgttccagattcagt

SEQ ID NO: 201963 - DNA, 25 bp, Probe Sequence
gcccgaccctgaccaggtagacggg

SEQ ID NO: 201964 - DNA, 25 bp, Probe Sequence
gccctgaacttgtccgggtagggag

SEQ ID NO: 201965 - DNA, 25 bp, Probe Sequence
ccacgccgtgtgtcacgggctaggg

SEQ ID NO: 201966 - DNA, 25 bp, Probe Sequence
ccacgccgagcatgacgggaagccg

SEQ ID NO: 201967 - DNA, 25 bp, Probe Sequence
ccacaacgtgcggacgcaggagccc

SEQ ID NO: 201968 - DNA, 25 bp, Probe Sequence
ccaatacgggtgatggtgcccccaa

SEQ ID NO: 201969 - DNA, 25 bp, Probe Sequence
ccacaaaggtgtgttgagcccattc

SEQ ID NO: 201970 - DNA, 25 bp, Probe Sequence
ccacttaggttactcttcctcatag

SEQ ID NO: 201971 - DNA, 25 bp, Probe Sequence
ccacattgaagttgtgtgcagtggc

SEQ ID NO: 201972 - DNA, 25 bp, Probe Sequence
ccaccatgaagtctggcaactcgga

SEQ ID NO: 201973 - DNA, 25 bp, Probe Sequence
ccacgcagaatacctcgaaccaggc

SEQ ID NO: 201974 - DNA, 25 bp, Probe Sequence
ccaagaagtaccagaaggtggcctg

SEQ ID NO: 201975 - DNA, 25 bp, Probe Sequence
ccaaacctagccagggtctgttctt

SEQ ID NO: 201976 - DNA, 25 bp, Probe Sequence
ccaaaatctcatgaatggtgtttac

SEQ ID NO: 201977 - DNA, 25 bp, Probe Sequence
ccaaagccaactgatgttttagggg

SEQ ID NO: 201978 - DNA, 25 bp, Probe Sequence
ccaaagccacaagattttatgactg

SEQ ID NO: 201979 - DNA, 25 bp, Probe Sequence
ccaccatgcccagctaatttttgta

SEQ ID NO: 201980 - DNA, 25 bp, Probe Sequence
ccaccacgcctgactaattttgtat

SEQ ID NO: 201981 - DNA, 25 bp, Probe Sequence
ccaccacgtggcctactttgaggcc

SEQ ID NO: 201982 - DNA, 25 bp, Probe Sequence
ccacctcgtggcctcaagatggcag

SEQ ID NO: 201983 - DNA, 25 bp, Probe Sequence
ccacggcgtctgttcgaaggcaatg

SEQ ID NO: 201984 - DNA, 25 bp, Probe Sequence
ccacaaggccttccggaggcaagat

SEQ ID NO: 201985 - DNA, 25 bp, Probe Sequence
ccacacagccccagctggggcaaac

SEQ ID NO: 201986 - DNA, 25 bp, Probe Sequence
ccaaggcccctgtctggaggaaatg

SEQ ID NO: 201987 - DNA, 25 bp, Probe Sequence
ccacggtcgcctctgagaaggaatc

SEQ ID NO: 201988 - DNA, 25 bp, Probe Sequence
ccacggtcgcctctgagaaggaatc

SEQ ID NO: 201989 - DNA, 25 bp, Probe Sequence
ccacagcttcccccatagaaggatt

SEQ ID NO: 201990 - DNA, 25 bp, Probe Sequence
ccaccattcctgcttgatggggctc

SEQ ID NO: 201991 - DNA, 25 bp, Probe Sequence
ccaccttgctctgtgaagacggctg

SEQ ID NO: 201992 - DNA, 25 bp, Probe Sequence
ccacctccagctggggagacggtga

SEQ ID NO: 201993 - DNA, 25 bp, Probe Sequence
ccaccgctggctgggaggagtcgga

SEQ ID NO: 201994 - DNA, 25 bp, Probe Sequence
ccaagggtgcggcggagatcgaatt

SEQ ID NO: 201995 - DNA, 25 bp, Probe Sequence
ccaaggatcatctccggaatggaag

SEQ ID NO: 201996 - DNA, 25 bp, Probe Sequence
ccaacgtgatattccttgaagtaga

SEQ ID NO: 201997 - DNA, 25 bp, Probe Sequence
ccaagccgttatgatctgcaatgta

SEQ ID NO: 201998 - DNA, 25 bp, Probe Sequence
ccactggcgtcttcaccaccatgga

SEQ ID NO: 201999 - DNA, 25 bp, Probe Sequence
ccaccagaggctcacgacgatggca

SEQ ID NO: 202000 - DNA, 25 bp, Probe Sequence
ccacccaggctctacgagaagcggg

SEQ ID NO: 202001 - DNA, 25 bp, Probe Sequence
ccacctcgccttacacatgaagagg

SEQ ID NO: 202002 - DNA, 25 bp, Probe Sequence
ccacctgccagtctcgtaagagatg

SEQ ID NO: 202003 - DNA, 25 bp, Probe Sequence
ccacctccgagagcctggatgtgat

SEQ ID NO: 202004 - DNA, 25 bp, Probe Sequence
ccactctgggaggtacttgatgaac

SEQ ID NO: 202005 - DNA, 25 bp, Probe Sequence
ccactcagggaggtcccagcatcaa

SEQ ID NO: 202006 - DNA, 25 bp, Probe Sequence
ccactgcacgggagccacagatggg

SEQ ID NO: 202007 - DNA, 25 bp, Probe Sequence
ccactgcagcgactgagcctagggg

SEQ ID NO: 202008 - DNA, 25 bp, Probe Sequence
ccaccaggattggcctgctgctagg

SEQ ID NO: 202009 - DNA, 25 bp, Probe Sequence
ccaccatgttcaaccatctgtcatg

SEQ ID NO: 202010 - DNA, 25 bp, Probe Sequence
ccaccttgcacaagcatcttctcag

SEQ ID NO: 202011 - DNA, 25 bp, Probe Sequence
ccaccatatcaaagctttcatggaa

SEQ ID NO: 202012 - DNA, 25 bp, Probe Sequence
ccaccataaaacccttgagcacaac

SEQ ID NO: 202013 - DNA, 25 bp, Probe Sequence
ccacccaataactctaatgcagcgg

SEQ ID NO: 202014 - DNA, 25 bp, Probe Sequence
ccacccagaaaccttggatactgag

SEQ ID NO: 202015 - DNA, 25 bp, Probe Sequence
ccacccagagcaccctctggttgtg

SEQ ID NO: 202016 - DNA, 25 bp, Probe Sequence
ccactctgggcactgagttcagtcg

SEQ ID NO: 202017 - DNA, 25 bp, Probe Sequence
ccacctgagtcaatgcccaagatgc

SEQ ID NO: 202018 - DNA, 25 bp, Probe Sequence
ccacaggcgctcaatgcctactatc

SEQ ID NO: 202019 - DNA, 25 bp, Probe Sequence
gccacttgactcagcagtgcatcta

SEQ ID NO: 202020 - DNA, 25 bp, Probe Sequence
ccacttgccacttgcagtcaacaac

SEQ ID NO: 202021 - DNA, 25 bp, Probe Sequence
ccacaggccagctattgtaaaagct

SEQ ID NO: 202022 - DNA, 25 bp, Probe Sequence
ccacaaacacttagttaacagctaa

SEQ ID NO: 202023 - DNA, 25 bp, Probe Sequence
ccaaaacatttactttcagccttgt

SEQ ID NO: 202024 - DNA, 25 bp, Probe Sequence
ccaaaaacttcacagacacctctct

SEQ ID NO: 202025 - DNA, 25 bp, Probe Sequence
ccaaaaacttcacagacacctctct

SEQ ID NO: 202026 - DNA, 25 bp, Probe Sequence
ccacaagggctatgggaccaccctg

SEQ ID NO: 202027 - DNA, 25 bp, Probe Sequence
ccacaagaatgttaggggcaccctc

SEQ ID NO: 202028 - DNA, 25 bp, Probe Sequence
ccaagatgtataaagggttccaagc

SEQ ID NO: 202029 - DNA, 25 bp, Probe Sequence
ccaagatgtataaagggttccaagc

SEQ ID NO: 202030 - DNA, 25 bp, Probe Sequence
ccaagatgtataaagggttccaagc

SEQ ID NO: 202031 - DNA, 25 bp, Probe Sequence
ccaagactttattgggcctcttcac

SEQ ID NO: 202032 - DNA, 25 bp, Probe Sequence
ccaagactttattgggcctcttcac

SEQ ID NO: 202033 - DNA, 25 bp, Probe Sequence
ccaagtctgggaagtgccctttctc

SEQ ID NO: 202034 - DNA, 25 bp, Probe Sequence
gcctgaggcgggaaatccccattcc

SEQ ID NO: 202035 - DNA, 25 bp, Probe Sequence
gcctaggggagtttctacccagact

SEQ ID NO: 202036 - DNA, 25 bp, Probe Sequence
gactcaccggggatttccaagtctc

SEQ ID NO: 202037 - DNA, 25 bp, Probe Sequence
ggccaccgggttctttgaagtgatg

SEQ ID NO: 202038 - DNA, 25 bp, Probe Sequence
gcagcccggggtattcctatagggc

SEQ ID NO: 202039 - DNA, 25 bp, Probe Sequence
gccccagggagtcccttttgatggg

SEQ ID NO: 202040 - DNA, 25 bp, Probe Sequence
gccaagggtggtgtccatttctggg

SEQ ID NO: 202041 - DNA, 25 bp, Probe Sequence
gccaaggggtgtgcctgataccaag

SEQ ID NO: 202042 - DNA, 25 bp, Probe Sequence
gccaaggaatttggcctgtaaaata

SEQ ID NO: 202043 - DNA, 25 bp, Probe Sequence
ccacaagcaaaccactttagagaaa

SEQ ID NO: 202044 - DNA, 25 bp, Probe Sequence
ccacaactcaacggctacatagaaa

SEQ ID NO: 202045 - DNA, 25 bp, Probe Sequence
ccaaaccaccggcacagagcaagaa

SEQ ID NO: 202046 - DNA, 25 bp, Probe Sequence
ccacgtccgccagggcaagaggagg

SEQ ID NO: 202047 - DNA, 25 bp, Probe Sequence
ccacttccacaaggactggcagcgg

SEQ ID NO: 202048 - DNA, 25 bp, Probe Sequence
ccactgtagccatggaggtgcggcc

SEQ ID NO: 202049 - DNA, 25 bp, Probe Sequence
ccactgaactgtcaggcgtctgacg

SEQ ID NO: 202050 - DNA, 25 bp, Probe Sequence
ccactgaacttccggactcatgtaa

SEQ ID NO: 202051 - DNA, 25 bp, Probe Sequence
ccactcagcatcagcgtggcagtca

SEQ ID NO: 202052 - DNA, 25 bp, Probe Sequence
ccaccccatccagtggaatgcacca

SEQ ID NO: 202053 - DNA, 25 bp, Probe Sequence
ccaccctccgtggatgataatctca

SEQ ID NO: 202054 - DNA, 25 bp, Probe Sequence
ccaccctccgtggatgataatctca

SEQ ID NO: 202055 - DNA, 25 bp, Probe Sequence
ccaccctcagcggatgataatctca

SEQ ID NO: 202056 - DNA, 25 bp, Probe Sequence
ccaccctcagcggatgataatctca

SEQ ID NO: 202057 - DNA, 25 bp, Probe Sequence
ccacccatgggctatatgatggcca

SEQ ID NO: 202058 - DNA, 25 bp, Probe Sequence
ccacatcacctgctacatgatggcc

SEQ ID NO: 202059 - DNA, 25 bp, Probe Sequence
ccacatcaagtgctctaaggcctat

SEQ ID NO: 202060 - DNA, 25 bp, Probe Sequence
ccacatatcaggaccgagtggcccc

SEQ ID NO: 202061 - DNA, 25 bp, Probe Sequence
ccactatggtgggctcactggccct

SEQ ID NO: 202062 - DNA, 25 bp, Probe Sequence
ccaactggcagggtagtggctccca

SEQ ID NO: 202063 - DNA, 25 bp, Probe Sequence
ccaactcagtgtttaaggcacaccc

SEQ ID NO: 202064 - DNA, 25 bp, Probe Sequence
ccaacttgttgcttaatgcccaacc

SEQ ID NO: 202065 - DNA, 25 bp, Probe Sequence
ccacgctggagtttaatccctcact

SEQ ID NO: 202066 - DNA, 25 bp, Probe Sequence
ccactgagaaagctaagccctacat

SEQ ID NO: 202067 - DNA, 25 bp, Probe Sequence
ccacgtgtaagctttgagccctagc

SEQ ID NO: 202068 - DNA, 25 bp, Probe Sequence
ccaaggaacgccataggacttcctt

SEQ ID NO: 202069 - DNA, 25 bp, Probe Sequence
ccaagccaacccatggcgacattat

SEQ ID NO: 202070 - DNA, 25 bp, Probe Sequence
ccacaggaaccccagttgacagttt

SEQ ID NO: 202071 - DNA, 25 bp, Probe Sequence
ccaaggaatcagtggattacagttt

SEQ ID NO: 202072 - DNA, 25 bp, Probe Sequence
ccaaactaagggcttctagctttat

SEQ ID NO: 202073 - DNA, 25 bp, Probe Sequence
ccaaacccaggtttctcttgcttgg

SEQ ID NO: 202074 - DNA, 25 bp, Probe Sequence
ccacggcctgaggtggtttctcttg

SEQ ID NO: 202075 - DNA, 25 bp, Probe Sequence
ccacagtgcctgggctaattttttg

SEQ ID NO: 202076 - DNA, 25 bp, Probe Sequence
ccacagtgacctgcgcaatgtttat

SEQ ID NO: 202077 - DNA, 25 bp, Probe Sequence
ccacagtgcagcctggccagaattt

SEQ ID NO: 202078 - DNA, 25 bp, Probe Sequence
ccacaggcagccctgggacatagga

SEQ ID NO: 202079 - DNA, 25 bp, Probe Sequence
ccacttcagccgaggctccaagagt

SEQ ID NO: 202080 - DNA, 25 bp, Probe Sequence
ccacttcagccgaggctccaagagt

SEQ ID NO: 202081 - DNA, 25 bp, Probe Sequence
ccactgtcctccaaggctacaggac

SEQ ID NO: 202082 - DNA, 25 bp, Probe Sequence
ccacatggcctccaaggagtaagac

SEQ ID NO: 202083 - DNA, 25 bp, Probe Sequence
ccactgactatccacaactgtaaaa

SEQ ID NO: 202084 - DNA, 25 bp, Probe Sequence
ccacttctccaacttctgtttaatc

SEQ ID NO: 202085 - DNA, 25 bp, Probe Sequence
ccactgtctccttttatatattatt

SEQ ID NO: 202086 - DNA, 25 bp, Probe Sequence
ccacagctaacgttgttaattgctt

SEQ ID NO: 202087 - DNA, 25 bp, Probe Sequence
ccactctttagtttttgattctgat

SEQ ID NO: 202088 - DNA, 25 bp, Probe Sequence
ccacataatccacttagctttttgt

SEQ ID NO: 202089 - DNA, 25 bp, Probe Sequence
ccaaaatgcacactgcgggttattg

SEQ ID NO: 202090 - DNA, 25 bp, Probe Sequence
ccaaaatctggcctggatttatgct

SEQ ID NO: 202091 - DNA, 25 bp, Probe Sequence
ccaattttcagacatgagctttgct

SEQ ID NO: 202092 - DNA, 25 bp, Probe Sequence
ccaaatttctgagctacaagtttag

SEQ ID NO: 202093 - DNA, 25 bp, Probe Sequence
ccaaatacttaggcaaaatgtctct

SEQ ID NO: 202094 - DNA, 25 bp, Probe Sequence
ccacaaagcctagcaccaaacttct

SEQ ID NO: 202095 - DNA, 25 bp, Probe Sequence
ccaaaacccatgccatgccaaacta

SEQ ID NO: 202096 - DNA, 25 bp, Probe Sequence
ccaagaagcccatcatcggaatatt

SEQ ID NO: 202097 - DNA, 25 bp, Probe Sequence
ccaaaacacacaccagttgcgaagt

SEQ ID NO: 202098 - DNA, 25 bp, Probe Sequence
ccaaataaacgtcctgtctagcagc

SEQ ID NO: 202099 - DNA, 25 bp, Probe Sequence
ccaagcatcatatcctaaggcatac

SEQ ID NO: 202100 - DNA, 25 bp, Probe Sequence
ccactgcaacaagcgtgagactcca

SEQ ID NO: 202101 - DNA, 25 bp, Probe Sequence
ccacgctgagcacgaaggcaaaccc

SEQ ID NO: 202102 - DNA, 25 bp, Probe Sequence
ccacctgacaaagggctgatattca

SEQ ID NO: 202103 - DNA, 25 bp, Probe Sequence
ccacgctgacaaccattcatattta

SEQ ID NO: 202104 - DNA, 25 bp, Probe Sequence
ccacatctacaacgttatcgtcaca

SEQ ID NO: 202105 - DNA, 25 bp, Probe Sequence
gcccctaagattttaagtacgatgg

SEQ ID NO: 202106 - DNA, 25 bp, Probe Sequence
ccacccaagacttatacccaggatg

SEQ ID NO: 202107 - DNA, 25 bp, Probe Sequence
ccacccaaatgtgtacacctgcggg

SEQ ID NO: 202108 - DNA, 25 bp, Probe Sequence
ccacccaggagtgtggccacgtggg

SEQ ID NO: 202109 - DNA, 25 bp, Probe Sequence
ccaaaggcggctgtgcgctaagtgg

SEQ ID NO: 202110 - DNA, 25 bp, Probe Sequence
ccaaatggagagtgtagcctgaggg

SEQ ID NO: 202111 - DNA, 25 bp, Probe Sequence
ccacgtgggagaggctcagcctggc

SEQ ID NO: 202112 - DNA, 25 bp, Probe Sequence
ccacctgtgtgagtccatcactgtg

SEQ ID NO: 202113 - DNA, 25 bp, Probe Sequence
ccaacagttgctgactcacattagt

SEQ ID NO: 202114 - DNA, 25 bp, Probe Sequence
ccaaaattgagccactgcactccag

SEQ ID NO: 202115 - DNA, 25 bp, Probe Sequence
gccaaaatcgtcgagatacccttca

SEQ ID NO: 202116 - DNA, 25 bp, Probe Sequence
ccaaactgctgtggggacattttat

SEQ ID NO: 202117 - DNA, 25 bp, Probe Sequence
ccacccagctggagaacatatgatt

SEQ ID NO: 202118 - DNA, 25 bp, Probe Sequence
ccacgcctggccagaagacatgatt

SEQ ID NO: 202119 - DNA, 25 bp, Probe Sequence
ccactgccgccgactgcagtgacat

SEQ ID NO: 202120 - DNA, 25 bp, Probe Sequence
ccactcctgatagctgtgtgatcat

SEQ ID NO: 202121 - DNA, 25 bp, Probe Sequence
ccaccctgtgataattgttattaat

SEQ ID NO: 202122 - DNA, 25 bp, Probe Sequence
ccaccccttgctgtgtgtatatata

SEQ ID NO: 202123 - DNA, 25 bp, Probe Sequence
ccacccctgctcattggtggatgtt

SEQ ID NO: 202124 - DNA, 25 bp, Probe Sequence
ccacccactggccataggtacaatt

SEQ ID NO: 202125 - DNA, 25 bp, Probe Sequence
ccaccccaggcttagaggacagaaa

SEQ ID NO: 202126 - DNA, 25 bp, Probe Sequence
ccaccccatactggatcctgaagaa

SEQ ID NO: 202127 - DNA, 25 bp, Probe Sequence
ccactctatcaaagccatcctgaaa

SEQ ID NO: 202128 - DNA, 25 bp, Probe Sequence
ccaatatatcgtgtatccgaaaatt

SEQ ID NO: 202129 - DNA, 25 bp, Probe Sequence
ccaacttcagtaccccaaatacaat

SEQ ID NO: 202130 - DNA, 25 bp, Probe Sequence
ccaagcttgcatctctgaccaaatt

SEQ ID NO: 202131 - DNA, 25 bp, Probe Sequence
ccaacgcatgctcctggagctcaca

SEQ ID NO: 202132 - DNA, 25 bp, Probe Sequence
ccacaccatgatccgaggagccaac

SEQ ID NO: 202133 - DNA, 25 bp, Probe Sequence
ccacatcacagcatcagggggctca

SEQ ID NO: 202134 - DNA, 25 bp, Probe Sequence
ccacacatagccaacatcgggcgcc

SEQ ID NO: 202135 - DNA, 25 bp, Probe Sequence
ccaccggatcattcagcaggactgc

SEQ ID NO: 202136 - DNA, 25 bp, Probe Sequence
ccacgctggcatctgatgggactgg

SEQ ID NO: 202137 - DNA, 25 bp, Probe Sequence
ccacgctgccgctgatgatgaagtg

SEQ ID NO: 202138 - DNA, 25 bp, Probe Sequence
ccacgctgccgctgatgatgaagtg

SEQ ID NO: 202139 - DNA, 25 bp, Probe Sequence
ccacttgctctgtggtggggtcctt

SEQ ID NO: 202140 - DNA, 25 bp, Probe Sequence
ccacttttgctacgatgtggccctg

SEQ ID NO: 202141 - DNA, 25 bp, Probe Sequence
ccacattttataggagggatccagt

SEQ ID NO: 202142 - DNA, 25 bp, Probe Sequence
ccacactctttagagagttagcttc

SEQ ID NO: 202143 - DNA, 25 bp, Probe Sequence
ctacaacaatgcttaggcttttcta

SEQ ID NO: 202144 - DNA, 25 bp, Probe Sequence
gccaaccattccatatctgttaagt

SEQ ID NO: 202145 - DNA, 25 bp, Probe Sequence
gccacaccggcggtaccagtaagtg

SEQ ID NO: 202146 - DNA, 25 bp, Probe Sequence
ccaaccccgagaaccagttcagagt

SEQ ID NO: 202147 - DNA, 25 bp, Probe Sequence
ccaaacctgcacctaaagtctcagc

SEQ ID NO: 202148 - DNA, 25 bp, Probe Sequence
ccaagtccagcccagagcaaagcta

SEQ ID NO: 202149 - DNA, 25 bp, Probe Sequence
ccacagagcacaccacgaaacactg

SEQ ID NO: 202150 - DNA, 25 bp, Probe Sequence
ccaaagccacccaagagaaatctcc

SEQ ID NO: 202151 - DNA, 25 bp, Probe Sequence
ccaaagccaataaagtgatacaccc

SEQ ID NO: 202152 - DNA, 25 bp, Probe Sequence
ccacaatgccaagacggagaccaca

SEQ ID NO: 202153 - DNA, 25 bp, Probe Sequence
ccaacttcagagaacctgagacctc

SEQ ID NO: 202154 - DNA, 25 bp, Probe Sequence
ccaactacgaccgggacaagctctt

SEQ ID NO: 202155 - DNA, 25 bp, Probe Sequence
ccaacttggacgctgcagaatggct

SEQ ID NO: 202156 - DNA, 25 bp, Probe Sequence
ccaactacggcgctctatattttag

SEQ ID NO: 202157 - DNA, 25 bp, Probe Sequence
gccacagtacagtctggtccttttc

SEQ ID NO: 202158 - DNA, 25 bp, Probe Sequence
gccaactaagttgtccttttctggt

SEQ ID NO: 202159 - DNA, 25 bp, Probe Sequence
ccaacaacgtgtgcaccggtgtgct

SEQ ID NO: 202160 - DNA, 25 bp, Probe Sequence
ccaaaacgttgcgattataagtgtg

SEQ ID NO: 202161 - DNA, 25 bp, Probe Sequence
ccaaggcctcttctttgacatggag

SEQ ID NO: 202162 - DNA, 25 bp, Probe Sequence
ccaaacatctttcagctgctgggag

SEQ ID NO: 202163 - DNA, 25 bp, Probe Sequence
ccacaatgagtaaaagctccatgag

SEQ ID NO: 202164 - DNA, 25 bp, Probe Sequence
ccacagctatttctcaccaatgagt

SEQ ID NO: 202165 - DNA, 25 bp, Probe Sequence
ccacaaattcagtgcccaatgaggc

SEQ ID NO: 202166 - DNA, 25 bp, Probe Sequence
ccaaatgatccgcgtcccgaatgct

SEQ ID NO: 202167 - DNA, 25 bp, Probe Sequence
ccactatacccgaccagatcaaatc

SEQ ID NO: 202168 - DNA, 25 bp, Probe Sequence
ccacatatatatgcacgtagttaat

SEQ ID NO: 202169 - DNA, 25 bp, Probe Sequence
ccactttgtccatgccatttagcaa

SEQ ID NO: 202170 - DNA, 25 bp, Probe Sequence
ccactgattgtggcaacagctttgc

SEQ ID NO: 202171 - DNA, 25 bp, Probe Sequence
ccactgatttataacatgtctcatg

SEQ ID NO: 202172 - DNA, 25 bp, Probe Sequence
ccactgttgtatacgcttattgaga

SEQ ID NO: 202173 - DNA, 25 bp, Probe Sequence
gccatttatgaactcctttttaagg

SEQ ID NO: 202174 - DNA, 25 bp, Probe Sequence
gccatttatgaactcctttttaagg

SEQ ID NO: 202175 - DNA, 25 bp, Probe Sequence
gcgattaagcagctcctttgttaaa

SEQ ID NO: 202176 - DNA, 25 bp, Probe Sequence
gcgaaataagcctcatccttaaaga

SEQ ID NO: 202177 - DNA, 25 bp, Probe Sequence
ccaaaagtgcattcaaccttaccaa

SEQ ID NO: 202178 - DNA, 25 bp, Probe Sequence
ccaacatagctaaaccctgtctcta

SEQ ID NO: 202179 - DNA, 25 bp, Probe Sequence
ccaacatcagaaaacctgacggcta

SEQ ID NO: 202180 - DNA, 25 bp, Probe Sequence
ccaaatgttgtaacactcggcccca

SEQ ID NO: 202181 - DNA, 25 bp, Probe Sequence
ccaagatgtcgtaacaactccgccc

SEQ ID NO: 202182 - DNA, 25 bp, Probe Sequence
ccaaatgggattcatgaccctctca

SEQ ID NO: 202183 - DNA, 25 bp, Probe Sequence
ccactgtgggcatcagaggccctct

SEQ ID NO: 202184 - DNA, 25 bp, Probe Sequence
ccactttccatccaaggccaaagag

SEQ ID NO: 202185 - DNA, 25 bp, Probe Sequence
ccactttccactcagcagagctatg

SEQ ID NO: 202186 - DNA, 25 bp, Probe Sequence
ccactttccactcagcagagctatg

SEQ ID NO: 202187 - DNA, 25 bp, Probe Sequence
ccacgattctgagccctgagtatgc

SEQ ID NO: 202188 - DNA, 25 bp, Probe Sequence
ccactgcactctgcaaccagtgttg

SEQ ID NO: 202189 - DNA, 25 bp, Probe Sequence
ccacgcactcctctgtagatgtgtg

SEQ ID NO: 202190 - DNA, 25 bp, Probe Sequence
ccacgcactgttcatgtgaccttgg

SEQ ID NO: 202191 - DNA, 25 bp, Probe Sequence
ccacgcactgttcatgtgaccttgg

SEQ ID NO: 202192 - DNA, 25 bp, Probe Sequence
ccaagcacttatgaggcacctactg

SEQ ID NO: 202193 - DNA, 25 bp, Probe Sequence
ccacaagtgttgtggccttcctgaa

SEQ ID NO: 202194 - DNA, 25 bp, Probe Sequence
ccaacgtgtcagtggtggacctgac

SEQ ID NO: 202195 - DNA, 25 bp, Probe Sequence
ccacggttatatgtgtgtccctcat

SEQ ID NO: 202196 - DNA, 25 bp, Probe Sequence
ccacggcttcttgtggttactgacc

SEQ ID NO: 202197 - DNA, 25 bp, Probe Sequence
ccacggcactccgcgagctgtatcg

SEQ ID NO: 202198 - DNA, 25 bp, Probe Sequence
ccacaggacttcgcagatgtcacat

SEQ ID NO: 202199 - DNA, 25 bp, Probe Sequence
ccacggcatctagccatgcttaaac

SEQ ID NO: 202200 - DNA, 25 bp, Probe Sequence
ccactggcacatcacacatgttaaa

SEQ ID NO: 202201 - DNA, 25 bp, Probe Sequence
ccacatgacagacacaaggctcaga

SEQ ID NO: 202202 - DNA, 25 bp, Probe Sequence
ccaagcacagaataattccacaaca

SEQ ID NO: 202203 - DNA, 25 bp, Probe Sequence
ccaaccaacaaacatgccatcactg

SEQ ID NO: 202204 - DNA, 25 bp, Probe Sequence
ccaacaaacccaactctaatgctgc

SEQ ID NO: 202205 - DNA, 25 bp, Probe Sequence
ccaacaaagacctatcctggtggag

SEQ ID NO: 202206 - DNA, 25 bp, Probe Sequence
ccacccaacgctgtcctggtggtat

SEQ ID NO: 202207 - DNA, 25 bp, Probe Sequence
ccacacctatccttttgaggggctt

SEQ ID NO: 202208 - DNA, 25 bp, Probe Sequence
ccacccatatcctgctcagaggagg

SEQ ID NO: 202209 - DNA, 25 bp, Probe Sequence
ccactcctactccagtatcagctgg

SEQ ID NO: 202210 - DNA, 25 bp, Probe Sequence
ccactcctactccagtatcagctgg

SEQ ID NO: 202211 - DNA, 25 bp, Probe Sequence
ccacatcttattcagcttcggtgtc

SEQ ID NO: 202212 - DNA, 25 bp, Probe Sequence
ccactctgttcgcagcagtctgcgc

SEQ ID NO: 202213 - DNA, 25 bp, Probe Sequence
ccacactcgtcttagcacttacgtt

SEQ ID NO: 202214 - DNA, 25 bp, Probe Sequence
ccaacttggcagtaaatctacgtat

SEQ ID NO: 202215 - DNA, 25 bp, Probe Sequence
ccaacgtggcaattgcaaccgagga

SEQ ID NO: 202216 - DNA, 25 bp, Probe Sequence
ccaaagttcacaatgtggccgagga

SEQ ID NO: 202217 - DNA, 25 bp, Probe Sequence
ccaaagttcacaatgtggccgagga

SEQ ID NO: 202218 - DNA, 25 bp, Probe Sequence
ccaacacttagggaggccgaggcgg

SEQ ID NO: 202219 - DNA, 25 bp, Probe Sequence
ccaacacttagggaggccgaggcgg

SEQ ID NO: 202220 - DNA, 25 bp, Probe Sequence
ccaaatcttggctgggcacggtggc

SEQ ID NO: 202221 - DNA, 25 bp, Probe Sequence
ccaaccagtgcgtgggccacaggga

SEQ ID NO: 202222 - DNA, 25 bp, Probe Sequence
ccaaaaagcgcctggacaagctgga

SEQ ID NO: 202223 - DNA, 25 bp, Probe Sequence
tccaatttaaaccaggaaagggatg

SEQ ID NO: 202224 - DNA, 25 bp, Probe Sequence
gctccttagaaatgggaagggaggc

SEQ ID NO: 202225 - DNA, 25 bp, Probe Sequence
gccatttaggtaagggtagggcact

SEQ ID NO: 202226 - DNA, 25 bp, Probe Sequence
gctaactagggaaggcttgaaggcc

SEQ ID NO: 202227 - DNA, 25 bp, Probe Sequence
ccaactactgcgagggtgagtgccc

SEQ ID NO: 202228 - DNA, 25 bp, Probe Sequence
ccacagtacggctggcagggtggac

SEQ ID NO: 202229 - DNA, 25 bp, Probe Sequence
ccactgccaacgtgtcagtggtgga

SEQ ID NO: 202230 - DNA, 25 bp, Probe Sequence
ccacgctcaagccaggctgggggtt

SEQ ID NO: 202231 - DNA, 25 bp, Probe Sequence
ccacgctcaagccaggctgggggtt

SEQ ID NO: 202232 - DNA, 25 bp, Probe Sequence
ccaatttatccatctgggtggtgcc

SEQ ID NO: 202233 - DNA, 25 bp, Probe Sequence
ccacaggtaccagatgggctgcgag

SEQ ID NO: 202234 - DNA, 25 bp, Probe Sequence
ccacaggctgaccacaggggctgtg

SEQ ID NO: 202235 - DNA, 25 bp, Probe Sequence
ccacggtcgcagccagacgtgagct

SEQ ID NO: 202236 - DNA, 25 bp, Probe Sequence
ccacggagagcattcagacatatga

SEQ ID NO: 202237 - DNA, 25 bp, Probe Sequence
ccacatgctcaaaatcaaatgatac

SEQ ID NO: 202238 - DNA, 25 bp, Probe Sequence
ccacatgataaactcaccataagca

SEQ ID NO: 202239 - DNA, 25 bp, Probe Sequence
ccaagtcaacctgctctacagcaaa

SEQ ID NO: 202240 - DNA, 25 bp, Probe Sequence
ccaagctgcaagatgacctcaagga

SEQ ID NO: 202241 - DNA, 25 bp, Probe Sequence
ccacagtgagaactgagcccgcagg

SEQ ID NO: 202242 - DNA, 25 bp, Probe Sequence
gccacagtcgaaaaatcccaaggcc

SEQ ID NO: 202243 - DNA, 25 bp, Probe Sequence
ccactgctcggaaatatgcccactt

SEQ ID NO: 202244 - DNA, 25 bp, Probe Sequence
ccacatcccacaaaatggcccttgg

SEQ ID NO: 202245 - DNA, 25 bp, Probe Sequence
ccactccacactctatatttctgtg

SEQ ID NO: 202246 - DNA, 25 bp, Probe Sequence
ccacatatacttctataagagcgtg

SEQ ID NO: 202247 - DNA, 25 bp, Probe Sequence
ccaaaacatatcataataagccatt

SEQ ID NO: 202248 - DNA, 25 bp, Probe Sequence
ccaaacgcttccgcaaagctcagtg

SEQ ID NO: 202249 - DNA, 25 bp, Probe Sequence
ccaacttctaaccgcaatagtgact

SEQ ID NO: 202250 - DNA, 25 bp, Probe Sequence
ccacttcctaatgccctatgtgtat

SEQ ID NO: 202251 - DNA, 25 bp, Probe Sequence
ccacttcctgatttccctgaaatat

SEQ ID NO: 202252 - DNA, 25 bp, Probe Sequence
ccactctcaggctcaccttaaaatc

SEQ ID NO: 202253 - DNA, 25 bp, Probe Sequence
ccacttccgctgtcacggtaaagtc

SEQ ID NO: 202254 - DNA, 25 bp, Probe Sequence
gccagttcgggatcgtgtagccggc

SEQ ID NO: 202255 - DNA, 25 bp, Probe Sequence
gccagtcacgtttaggtggggcgtg

SEQ ID NO: 202256 - DNA, 25 bp, Probe Sequence
gccaatcaggttaaagagggcgttg

SEQ ID NO: 202257 - DNA, 25 bp, Probe Sequence
ccaacagaattatataggtgctttt

SEQ ID NO: 202258 - DNA, 25 bp, Probe Sequence
ccaaaaatcatatcttgctttcatt

SEQ ID NO: 202259 - DNA, 25 bp, Probe Sequence
ccaaactctataccttgatttctgg

SEQ ID NO: 202260 - DNA, 25 bp, Probe Sequence
ccacacatccacaaatctctgattg

SEQ ID NO: 202261 - DNA, 25 bp, Probe Sequence
ccacacaagcagatattgccttgct

SEQ ID NO: 202262 - DNA, 25 bp, Probe Sequence
ccaagaagatgtcgattccattctc

SEQ ID NO: 202263 - DNA, 25 bp, Probe Sequence
ccaaaagggtcatcatctctgcccc

SEQ ID NO: 202264 - DNA, 25 bp, Probe Sequence
ccaaaagggtcatcatctctgcccc

SEQ ID NO: 202265 - DNA, 25 bp, Probe Sequence
ccaaaagggtcatcatctctgcccc

SEQ ID NO: 202266 - DNA, 25 bp, Probe Sequence
ccaataaagcagtatttctaccctt

SEQ ID NO: 202267 - DNA, 25 bp, Probe Sequence
ccaaaaaacttgctcttatcttctc

SEQ ID NO: 202268 - DNA, 25 bp, Probe Sequence
ccaaagagaacctttctgtgacatt

SEQ ID NO: 202269 - DNA, 25 bp, Probe Sequence
ccaatcagttcactcattcctggtc

SEQ ID NO: 202270 - DNA, 25 bp, Probe Sequence
gccaaaggtcacttttctttcctgc

SEQ ID NO: 202271 - DNA, 25 bp, Probe Sequence
gccaaaggtcacttttctttcctgc

SEQ ID NO: 202272 - DNA, 25 bp, Probe Sequence
ccacataattattctattcctccct

SEQ ID NO: 202273 - DNA, 25 bp, Probe Sequence
ccactagttcatcctaattctctaa

SEQ ID NO: 202274 - DNA, 25 bp, Probe Sequence
ccactggtgatacctcacattcaat

SEQ ID NO: 202275 - DNA, 25 bp, Probe Sequence
ccactgttgaacacatcattatttt

SEQ ID NO: 202276 - DNA, 25 bp, Probe Sequence
ccacatgtggaagaacctttaatca

SEQ ID NO: 202277 - DNA, 25 bp, Probe Sequence
ccacatcgagaaaccacccttggaa

SEQ ID NO: 202278 - DNA, 25 bp, Probe Sequence
ccactgtgaagaacaccatggtgtg

SEQ ID NO: 202279 - DNA, 25 bp, Probe Sequence
ccacttgccagcacggtgagtgttt

SEQ ID NO: 202280 - DNA, 25 bp, Probe Sequence
ccactgctccccgggatatgtggct

SEQ ID NO: 202281 - DNA, 25 bp, Probe Sequence
ccaacccagcccagactgggctttt

SEQ ID NO: 202282 - DNA, 25 bp, Probe Sequence
ccaaacccaccattcactggtgctg

SEQ ID NO: 202283 - DNA, 25 bp, Probe Sequence
ccaacgtccttgttgcactttgggt

SEQ ID NO: 202284 - DNA, 25 bp, Probe Sequence
ccaaagatcagcatggtccctgttg

SEQ ID NO: 202285 - DNA, 25 bp, Probe Sequence
ccacagcgtatgatgggtcctctct

SEQ ID NO: 202286 - DNA, 25 bp, Probe Sequence
ccaagtgttggtgggaattcctttg

SEQ ID NO: 202287 - DNA, 25 bp, Probe Sequence
ccaaatgtgtctgggcttttcactt

SEQ ID NO: 202288 - DNA, 25 bp, Probe Sequence
ccaataggtgatcttaattactttc

SEQ ID NO: 202289 - DNA, 25 bp, Probe Sequence
ccacaggttgtcattacttaattat

SEQ ID NO: 202290 - DNA, 25 bp, Probe Sequence
ccacagagttggatccctcatgaat

SEQ ID NO: 202291 - DNA, 25 bp, Probe Sequence
ccacaagggaacatcctatcatctg

SEQ ID NO: 202292 - DNA, 25 bp, Probe Sequence
ccacttgtgacatatttcttgctct

SEQ ID NO: 202293 - DNA, 25 bp, Probe Sequence
ccaaggtgatcatcttcgaggcctg

SEQ ID NO: 202294 - DNA, 25 bp, Probe Sequence
ccaagtggatatgctgctccaggaa

SEQ ID NO: 202295 - DNA, 25 bp, Probe Sequence
ccaactgggatattgcccacatgat

SEQ ID NO: 202296 - DNA, 25 bp, Probe Sequence
gcctctcatagaaattgcctccagt

SEQ ID NO: 202297 - DNA, 25 bp, Probe Sequence
ccactgcgaaaattcattccgctgt

SEQ ID NO: 202298 - DNA, 25 bp, Probe Sequence
ccactggtggaaccatgaacgctgc

SEQ ID NO: 202299 - DNA, 25 bp, Probe Sequence
ccactcgtggccggagaacctggcc

SEQ ID NO: 202300 - DNA, 25 bp, Probe Sequence
ccaagagttccagaccagcctggcc

SEQ ID NO: 202301 - DNA, 25 bp, Probe Sequence
ccaagtggaccagagtcatccttct

SEQ ID NO: 202302 - DNA, 25 bp, Probe Sequence
ccaagttgcccagaaagactgtctg

SEQ ID NO: 202303 - DNA, 25 bp, Probe Sequence
ccaagcttcaaggcaaaaatcgttg

SEQ ID NO: 202304 - DNA, 25 bp, Probe Sequence
ccaacttgcagtgtattaatgctga

SEQ ID NO: 202305 - DNA, 25 bp, Probe Sequence
ccaacctcaggcttagatcaatgta

SEQ ID NO: 202306 - DNA, 25 bp, Probe Sequence
ccaactccgtctcaagcatattaac

SEQ ID NO: 202307 - DNA, 25 bp, Probe Sequence
ccaactccgtcttccatgaaataaa

SEQ ID NO: 202308 - DNA, 25 bp, Probe Sequence
ccaagttccttggccatgcagaaag

SEQ ID NO: 202309 - DNA, 25 bp, Probe Sequence
ccacagctgactagggccagcgcaa

SEQ ID NO: 202310 - DNA, 25 bp, Probe Sequence
ccaatgccacagaggatcacccaga

SEQ ID NO: 202311 - DNA, 25 bp, Probe Sequence
ccaaccacattggccacacaggcta

SEQ ID NO: 202312 - DNA, 25 bp, Probe Sequence
ccacagaccaagggctcacagtctg

SEQ ID NO: 202313 - DNA, 25 bp, Probe Sequence
ccacatgaaatgtgtgcccatggct

SEQ ID NO: 202314 - DNA, 25 bp, Probe Sequence
ccactgcacattcaggccagtgagc

SEQ ID NO: 202315 - DNA, 25 bp, Probe Sequence
ccacatctcagctggagccattgac

SEQ ID NO: 202316 - DNA, 25 bp, Probe Sequence
ccacatgctccatctactttggtta

SEQ ID NO: 202317 - DNA, 25 bp, Probe Sequence
ccaatgcatcctactcgcttaggtc

SEQ ID NO: 202318 - DNA, 25 bp, Probe Sequence
ccactgcagacgacctcatcaaggt

SEQ ID NO: 202319 - DNA, 25 bp, Probe Sequence
ccactggacagctcagtaagcctgg

SEQ ID NO: 202320 - DNA, 25 bp, Probe Sequence
ccacagtgcctgtacaggaaggtgc

SEQ ID NO: 202321 - DNA, 25 bp, Probe Sequence
ccacaggcctgatccacaatggaga

SEQ ID NO: 202322 - DNA, 25 bp, Probe Sequence
ccacagatccatttttagggaaggg

SEQ ID NO: 202323 - DNA, 25 bp, Probe Sequence
ccacaatcctctacttcagtgggat

SEQ ID NO: 202324 - DNA, 25 bp, Probe Sequence
ccactaacttccatgcttcagagat

SEQ ID NO: 202325 - DNA, 25 bp, Probe Sequence
ccactccatttctccattcatgaga

SEQ ID NO: 202326 - DNA, 25 bp, Probe Sequence
ccactccttttcctgcaagagatga

SEQ ID NO: 202327 - DNA, 25 bp, Probe Sequence
ccactcactttgcaatagccgtgca

SEQ ID NO: 202328 - DNA, 25 bp, Probe Sequence
ccactccatgtttgcaatacacaat

SEQ ID NO: 202329 - DNA, 25 bp, Probe Sequence
ccactccatgctcttcagcaataat

SEQ ID NO: 202330 - DNA, 25 bp, Probe Sequence
ccactccattcagatcatgaaggtg

SEQ ID NO: 202331 - DNA, 25 bp, Probe Sequence
ccacttcttcacatgacacagggga

SEQ ID NO: 202332 - DNA, 25 bp, Probe Sequence
ccacttctgtatttgaagggagcag

SEQ ID NO: 202333 - DNA, 25 bp, Probe Sequence
ccactgtactcattcataaggtagg

SEQ ID NO: 202334 - DNA, 25 bp, Probe Sequence
ccactgtcactcctcagaaagctaa

SEQ ID NO: 202335 - DNA, 25 bp, Probe Sequence
ccaagtcagcacccaaaggtcaatg

SEQ ID NO: 202336 - DNA, 25 bp, Probe Sequence
ccaagtcggacagaaggcccatgag

SEQ ID NO: 202337 - DNA, 25 bp, Probe Sequence
ccaaagtgacaagagcaggcccata

SEQ ID NO: 202338 - DNA, 25 bp, Probe Sequence
ccacaatggcacaataaagcccctt

SEQ ID NO: 202339 - DNA, 25 bp, Probe Sequence
ccaaagcaagctttgagagccacct

SEQ ID NO: 202340 - DNA, 25 bp, Probe Sequence
ccacaggatacatgacaggccagcc

SEQ ID NO: 202341 - DNA, 25 bp, Probe Sequence
ccacagggcattgggcactgggcac

SEQ ID NO: 202342 - DNA, 25 bp, Probe Sequence
ccacatgggagtgggctcggggcca

SEQ ID NO: 202343 - DNA, 25 bp, Probe Sequence
ccacaggatcagaggctggggccaa

SEQ ID NO: 202344 - DNA, 25 bp, Probe Sequence
ccacaggacgtgtggtggcgcctgg

SEQ ID NO: 202345 - DNA, 25 bp, Probe Sequence
ccaatgtggccgtggtacggatgaa

SEQ ID NO: 202346 - DNA, 25 bp, Probe Sequence
ccaatctggactgtactcgggagag

SEQ ID NO: 202347 - DNA, 25 bp, Probe Sequence
ccacattgcaaccctacctgtgggc

SEQ ID NO: 202348 - DNA, 25 bp, Probe Sequence
ccaaatgcaggccctccatttgggg

SEQ ID NO: 202349 - DNA, 25 bp, Probe Sequence
ccaatcctggctacttttcttagag

SEQ ID NO: 202350 - DNA, 25 bp, Probe Sequence
ccacatcaatggactgttagttttg

SEQ ID NO: 202351 - DNA, 25 bp, Probe Sequence
gccaatgaatgtactctgtgcatga

SEQ ID NO: 202352 - DNA, 25 bp, Probe Sequence
gccaattagttctgtgctggttgca

SEQ ID NO: 202353 - DNA, 25 bp, Probe Sequence
ccacttgagtgaggagtgcggggag

SEQ ID NO: 202354 - DNA, 25 bp, Probe Sequence
ccactagagtgaaagggtatgagag

SEQ ID NO: 202355 - DNA, 25 bp, Probe Sequence
gcattctggacctctgggttgggat

SEQ ID NO: 202356 - DNA, 25 bp, Probe Sequence
gcctctgggccgtttggtagtaatc

SEQ ID NO: 202357 - DNA, 25 bp, Probe Sequence
gccagctggcccagtgggtagtgaa

SEQ ID NO: 202358 - DNA, 25 bp, Probe Sequence
ccactgccgcaagtgcggcttcgtg

SEQ ID NO: 202359 - DNA, 25 bp, Probe Sequence
ccacagcactccgtggtgtgtttgc

SEQ ID NO: 202360 - DNA, 25 bp, Probe Sequence
ccaagcacgcttgagttgtatgtga

SEQ ID NO: 202361 - DNA, 25 bp, Probe Sequence
ccaaatcgctgagctgcttgtttaa

SEQ ID NO: 202362 - DNA, 25 bp, Probe Sequence
gccaaattatgtgtctagtaactag

SEQ ID NO: 202363 - DNA, 25 bp, Probe Sequence
gccgacttttctgggatgtcaacta

SEQ ID NO: 202364 - DNA, 25 bp, Probe Sequence
ccaaattttctcatgatctcaccta

SEQ ID NO: 202365 - DNA, 25 bp, Probe Sequence
ccacaaatctactttgtctccataa

SEQ ID NO: 202366 - DNA, 25 bp, Probe Sequence
ccaaaatccagaccttatccacaac

SEQ ID NO: 202367 - DNA, 25 bp, Probe Sequence
ccaagttctagggccgtcaggacac

SEQ ID NO: 202368 - DNA, 25 bp, Probe Sequence
ccaaatggcggatgacgccggtgca

SEQ ID NO: 202369 - DNA, 25 bp, Probe Sequence
ccaaatggggcccatggccttgagc

SEQ ID NO: 202370 - DNA, 25 bp, Probe Sequence
ccactctgggtcagagagctctggt

SEQ ID NO: 202371 - DNA, 25 bp, Probe Sequence
ccaagccaggttgaggtctggtaac

SEQ ID NO: 202372 - DNA, 25 bp, Probe Sequence
ccaaggcggccgtcaggtttggaat

SEQ ID NO: 202373 - DNA, 25 bp, Probe Sequence
ccacaatgggccgcgagtttgggaa

SEQ ID NO: 202374 - DNA, 25 bp, Probe Sequence
ccacattggcccttggattgttcgg

SEQ ID NO: 202375 - DNA, 25 bp, Probe Sequence
ccaacggcaccagcggtgttcaggg

SEQ ID NO: 202376 - DNA, 25 bp, Probe Sequence
ccaacgacctagtggcgttccatga

SEQ ID NO: 202377 - DNA, 25 bp, Probe Sequence
ccaacaacaatattagtcgtatcca

SEQ ID NO: 202378 - DNA, 25 bp, Probe Sequence
ccaagaacacaattcattttcacca

SEQ ID NO: 202379 - DNA, 25 bp, Probe Sequence
ccaaacactagctctgtattaatcc

SEQ ID NO: 202380 - DNA, 25 bp, Probe Sequence
ccaaccctgagcactcttatcaatc

SEQ ID NO: 202381 - DNA, 25 bp, Probe Sequence
ccaaatcctggaaccatacatcagg

SEQ ID NO: 202382 - DNA, 25 bp, Probe Sequence
ccacaacccatgacactatgaagca

SEQ ID NO: 202383 - DNA, 25 bp, Probe Sequence
ccaacagaacaggatctgggagcga

SEQ ID NO: 202384 - DNA, 25 bp, Probe Sequence
ccaacaaaagtgtctctgtggagcc

SEQ ID NO: 202385 - DNA, 25 bp, Probe Sequence
ccacacataatcttttgttgagatg

SEQ ID NO: 202386 - DNA, 25 bp, Probe Sequence
ccacagtagctgtcaattattgaga

SEQ ID NO: 202387 - DNA, 25 bp, Probe Sequence
ccacagtagatgtccacataataaa

SEQ ID NO: 202388 - DNA, 25 bp, Probe Sequence
ccacaatcaagttccaaatgaagaa

SEQ ID NO: 202389 - DNA, 25 bp, Probe Sequence
ccaatacatcacatcagcagaatga

SEQ ID NO: 202390 - DNA, 25 bp, Probe Sequence
ccaacactctcaatgcgctatgtgg

SEQ ID NO: 202391 - DNA, 25 bp, Probe Sequence
ccaaggtgctagtgtatgagttgtt

SEQ ID NO: 202392 - DNA, 25 bp, Probe Sequence
ccaagggccagacatttttgtgttg

SEQ ID NO: 202393 - DNA, 25 bp, Probe Sequence
ccacaccgggatgctttgtttgttc

SEQ ID NO: 202394 - DNA, 25 bp, Probe Sequence
ccacaccggatgtcatctttgtatt

SEQ ID NO: 202395 - DNA, 25 bp, Probe Sequence
ccacaccacggagcatctgttgatt

SEQ ID NO: 202396 - DNA, 25 bp, Probe Sequence
ccaagccatcagctccttgggactg

SEQ ID NO: 202397 - DNA, 25 bp, Probe Sequence
ccaaggccatcggccatcggaacta

SEQ ID NO: 202398 - DNA, 25 bp, Probe Sequence
ccacaggccagggcttctgagccct

SEQ ID NO: 202399 - DNA, 25 bp, Probe Sequence
ccacaggacggtttatgagcacaca

SEQ ID NO: 202400 - DNA, 25 bp, Probe Sequence
ccaacgagcggaaaatggcagacaa

SEQ ID NO: 202401 - DNA, 25 bp, Probe Sequence
ccacatttgggtgctgggcaacagg

SEQ ID NO: 202402 - DNA, 25 bp, Probe Sequence
gccagatttggggcatttggaaata

SEQ ID NO: 202403 - DNA, 25 bp, Probe Sequence
ccacatttggctgcatcttgaatta

SEQ ID NO: 202404 - DNA, 25 bp, Probe Sequence
ccacatcttggagggcatctgcctt

SEQ ID NO: 202405 - DNA, 25 bp, Probe Sequence
ccacatcttggagggcatctgcctt

SEQ ID NO: 202406 - DNA, 25 bp, Probe Sequence
ccacacattaatggcatgatttttt

SEQ ID NO: 202407 - DNA, 25 bp, Probe Sequence
ccaagcattactgcaggatctccag

SEQ ID NO: 202408 - DNA, 25 bp, Probe Sequence
ccaactacactgactggttcgaggt

SEQ ID NO: 202409 - DNA, 25 bp, Probe Sequence
ccacactcaactactgcgtatggcg

SEQ ID NO: 202410 - DNA, 25 bp, Probe Sequence
ccaatgccatttactgccttgtgac

SEQ ID NO: 202411 - DNA, 25 bp, Probe Sequence
ccacatcctgtgtatctgagcacgt

SEQ ID NO: 202412 - DNA, 25 bp, Probe Sequence
ccacaccgtggaagagaagattatc

SEQ ID NO: 202413 - DNA, 25 bp, Probe Sequence
ccaaccctggcacaggtcatgtctg

SEQ ID NO: 202414 - DNA, 25 bp, Probe Sequence
ccaaccctgagaaagtcctgctcag

SEQ ID NO: 202415 - DNA, 25 bp, Probe Sequence
ccaacacctcaaaacacctggtgtt

SEQ ID NO: 202416 - DNA, 25 bp, Probe Sequence
ccacagtgcctattgatacttgggg

SEQ ID NO: 202417 - DNA, 25 bp, Probe Sequence
ccacattgattttaactgctttggt

SEQ ID NO: 202418 - DNA, 25 bp, Probe Sequence
ccacattcttgacaactatttgctt

SEQ ID NO: 202419 - DNA, 25 bp, Probe Sequence
gccaatttatagcaaatcatccatt

SEQ ID NO: 202420 - DNA, 25 bp, Probe Sequence
gccaagtgcctatgcaaaccagctt

SEQ ID NO: 202421 - DNA, 25 bp, Probe Sequence
ccaactgccagctctgaactgagtc

SEQ ID NO: 202422 - DNA, 25 bp, Probe Sequence
ccaactgcaccaacgaactgtacat

SEQ ID NO: 202423 - DNA, 25 bp, Probe Sequence
ccacactgtcccttgcaaggtgaca

SEQ ID NO: 202424 - DNA, 25 bp, Probe Sequence
ccacactgtcccttgcaaggtgaca

SEQ ID NO: 202425 - DNA, 25 bp, Probe Sequence
ccacaagtccccaagagtgtgatat

SEQ ID NO: 202426 - DNA, 25 bp, Probe Sequence
ccacaagtaccggaagctggtgaag

SEQ ID NO: 202427 - DNA, 25 bp, Probe Sequence
ccacaagtactccggcagggagggt

SEQ ID NO: 202428 - DNA, 25 bp, Probe Sequence
ccacaggtaccacacatgtggaggc

SEQ ID NO: 202429 - DNA, 25 bp, Probe Sequence
ccaattgaacgccaaattgggcctg

SEQ ID NO: 202430 - DNA, 25 bp, Probe Sequence
ccaagttacagtcaatgggccgtgg

SEQ ID NO: 202431 - DNA, 25 bp, Probe Sequence
ccaagctgaagggccgtgggcggct

SEQ ID NO: 202432 - DNA, 25 bp, Probe Sequence
ccaaggacaaggggcgtgcctggcg

SEQ ID NO: 202433 - DNA, 25 bp, Probe Sequence
ccaagggaggtgggagtgtagcctc

SEQ ID NO: 202434 - DNA, 25 bp, Probe Sequence
ccaacggagttccagagtgtgagga

SEQ ID NO: 202435 - DNA, 25 bp, Probe Sequence
ccaaccggggctcagcggaggatgt

SEQ ID NO: 202436 - DNA, 25 bp, Probe Sequence
ccaacgccgtgtggtacggggctgt

SEQ ID NO: 202437 - DNA, 25 bp, Probe Sequence
ccaagaggcggagggtcggtgacgt

SEQ ID NO: 202438 - DNA, 25 bp, Probe Sequence
ccacagcagaagccggagtcggagc

SEQ ID NO: 202439 - DNA, 25 bp, Probe Sequence
ccaacgagagccagagcctcgatga

SEQ ID NO: 202440 - DNA, 25 bp, Probe Sequence
ccacatctaaccaggccctgatgta

SEQ ID NO: 202441 - DNA, 25 bp, Probe Sequence
ccaattctccctatgacctatgtag

SEQ ID NO: 202442 - DNA, 25 bp, Probe Sequence
ccaaatcccgatttgacaaatgcca

SEQ ID NO: 202443 - DNA, 25 bp, Probe Sequence
ccacatatacacctgatagtcaaat

SEQ ID NO: 202444 - DNA, 25 bp, Probe Sequence
ccacacatctccctaagtcagagtg

SEQ ID NO: 202445 - DNA, 25 bp, Probe Sequence
ccacactgtgcccatctacgagggg

SEQ ID NO: 202446 - DNA, 25 bp, Probe Sequence
ccacaagtgctcgtgctgtgcgagg

SEQ ID NO: 202447 - DNA, 25 bp, Probe Sequence
ccacaggtctaggctggctttgcaa

SEQ ID NO: 202448 - DNA, 25 bp, Probe Sequence
ccacaagtcatacctggatgtcagc

SEQ ID NO: 202449 - DNA, 25 bp, Probe Sequence
ccacacagtggcactggagtctctc

SEQ ID NO: 202450 - DNA, 25 bp, Probe Sequence
ccaagcaggtgtacttgcctgcgta

SEQ ID NO: 202451 - DNA, 25 bp, Probe Sequence
ccaagaggcttcactgcctctgctt

SEQ ID NO: 202452 - DNA, 25 bp, Probe Sequence
ccaagtggctttatggacgctgcat

SEQ ID NO: 202453 - DNA, 25 bp, Probe Sequence
ccaacttcttaatggaacatatagc

SEQ ID NO: 202454 - DNA, 25 bp, Probe Sequence
ccaatcttctacttggttaagacag

SEQ ID NO: 202455 - DNA, 25 bp, Probe Sequence
ccaatttgatcacttaggattaaag

SEQ ID NO: 202456 - DNA, 25 bp, Probe Sequence
ccacattttcatttaggagctagac

SEQ ID NO: 202457 - DNA, 25 bp, Probe Sequence
ccacatgttctgtcttgaggagcca

SEQ ID NO: 202458 - DNA, 25 bp, Probe Sequence
ccaagaccttgcatgagttgccatg

SEQ ID NO: 202459 - DNA, 25 bp, Probe Sequence
ccaaaactctgtacagtgacactgg

SEQ ID NO: 202460 - DNA, 25 bp, Probe Sequence
ccaaccacacttacgtcattgtagt

SEQ ID NO: 202461 - DNA, 25 bp, Probe Sequence
ccaaccccatgaattgtgttattgt

SEQ ID NO: 202462 - DNA, 25 bp, Probe Sequence
ccaaccagcctgacaacttttttgc

SEQ ID NO: 202463 - DNA, 25 bp, Probe Sequence
ccaacttcgctgccaactttggtgc

SEQ ID NO: 202464 - DNA, 25 bp, Probe Sequence
ccaaccctggtccagctgagggtgc

SEQ ID NO: 202465 - DNA, 25 bp, Probe Sequence
gccacctccgttgccatatgggtgg

SEQ ID NO: 202466 - DNA, 25 bp, Probe Sequence
ccacactgcttaatggccacatgcc

SEQ ID NO: 202467 - DNA, 25 bp, Probe Sequence
ccacacatgtggaggcagcttgctg

SEQ ID NO: 202468 - DNA, 25 bp, Probe Sequence
ccacacatgcaggcctggatcctgc

SEQ ID NO: 202469 - DNA, 25 bp, Probe Sequence
ccacattggccagtggactcatcca

SEQ ID NO: 202470 - DNA, 25 bp, Probe Sequence
ccacatcgtgccatggactaccagt

SEQ ID NO: 202471 - DNA, 25 bp, Probe Sequence
ccaaccatgcctactgagtatccac

SEQ ID NO: 202472 - DNA, 25 bp, Probe Sequence
ccacagccatcagcactggaatgcc

SEQ ID NO: 202473 - DNA, 25 bp, Probe Sequence
ccaagcctatcacgcgtgaatcggt

SEQ ID NO: 202474 - DNA, 25 bp, Probe Sequence
ccaacgcagagccagctgttcagcg

SEQ ID NO: 202475 - DNA, 25 bp, Probe Sequence
ccaaggcagggactggagaagccaa

SEQ ID NO: 202476 - DNA, 25 bp, Probe Sequence
ccaaagatgcctatgggaaccaaaa

SEQ ID NO: 202477 - DNA, 25 bp, Probe Sequence
ccaaggactctcaggaggacttaca

SEQ ID NO: 202478 - DNA, 25 bp, Probe Sequence
ccaagccattccaggaggcagcctc

SEQ ID NO: 202479 - DNA, 25 bp, Probe Sequence
ccaagccagatctacgagataaccc

SEQ ID NO: 202480 - DNA, 25 bp, Probe Sequence
ccacaccagatgaaggatgtgcccc

SEQ ID NO: 202481 - DNA, 25 bp, Probe Sequence
ccacaccatcatgaaacagctcctc

SEQ ID NO: 202482 - DNA, 25 bp, Probe Sequence
gccaatgccatcttaaatcagttcc

SEQ ID NO: 202483 - DNA, 25 bp, Probe Sequence
gccatagcctggttaaagttcccca

SEQ ID NO: 202484 - DNA, 25 bp, Probe Sequence
ccaagcactgctctgaaagtttaac

SEQ ID NO: 202485 - DNA, 25 bp, Probe Sequence
ccaagccctggataatgctttactt

SEQ ID NO: 202486 - DNA, 25 bp, Probe Sequence
ccacagacctggtgtaatttcacaa

SEQ ID NO: 202487 - DNA, 25 bp, Probe Sequence
ccaacacctgtgtggaatgccgcaa

SEQ ID NO: 202488 - DNA, 25 bp, Probe Sequence
gccaacggcaagtggttcgacaagc

SEQ ID NO: 202489 - DNA, 25 bp, Probe Sequence
ccaattccaaggagttctcagaaca

SEQ ID NO: 202490 - DNA, 25 bp, Probe Sequence
ccaatcccaccgatgttctaaagat

SEQ ID NO: 202491 - DNA, 25 bp, Probe Sequence
ccaaacccccttgtcagagcaagtg

SEQ ID NO: 202492 - DNA, 25 bp, Probe Sequence
ccaaaccgactcagtcgcaccaagt

SEQ ID NO: 202493 - DNA, 25 bp, Probe Sequence
ccaaacctgatcagcccctaaaggt

SEQ ID NO: 202494 - DNA, 25 bp, Probe Sequence
ccaaagcctgaaggcttcctccacg

SEQ ID NO: 202495 - DNA, 25 bp, Probe Sequence
ccaaagacatccagttggctcgccg

SEQ ID NO: 202496 - DNA, 25 bp, Probe Sequence
ccaaaaagccatgattgtcctggtg

SEQ ID NO: 202497 - DNA, 25 bp, Probe Sequence
ccaaaaagccacattgctctctcct

SEQ ID NO: 202498 - DNA, 25 bp, Probe Sequence
ccaaaccactttttgcagctttctc

SEQ ID NO: 202499 - DNA, 25 bp, Probe Sequence
ccaaggccacctttgatgccatttc

SEQ ID NO: 202500 - DNA, 25 bp, Probe Sequence
ccaagagccaatatctaggcatttt

SEQ ID NO: 202501 - DNA, 25 bp, Probe Sequence
gccaatgagggatttatagcatctt

SEQ ID NO: 202502 - DNA, 25 bp, Probe Sequence
ccaacctggaatttggctcttatcc

SEQ ID NO: 202503 - DNA, 25 bp, Probe Sequence
ccaaccttatttgcctcattggcca

SEQ ID NO: 202504 - DNA, 25 bp, Probe Sequence
ccaactttccgctcttcattggaaa

SEQ ID NO: 202505 - DNA, 25 bp, Probe Sequence
ccaactttcatcgtgaattcttgaa

SEQ ID NO: 202506 - DNA, 25 bp, Probe Sequence
ccaacatatctcatgaatattcgtg

SEQ ID NO: 202507 - DNA, 25 bp, Probe Sequence
gccaatcaacatgctggtgaaggtg

SEQ ID NO: 202508 - DNA, 25 bp, Probe Sequence
ccaacagacctgcagctgagggtcc

SEQ ID NO: 202509 - DNA, 25 bp, Probe Sequence
ccacacgcactttatgagggagacc

SEQ ID NO: 202510 - DNA, 25 bp, Probe Sequence
ccacacgcacttatcaggaacgcct

SEQ ID NO: 202511 - DNA, 25 bp, Probe Sequence
ccaacttgctttccagaatacccta

SEQ ID NO: 202512 - DNA, 25 bp, Probe Sequence
ccaaccctttgcagaaatctgcaat

SEQ ID NO: 202513 - DNA, 25 bp, Probe Sequence
ccacacctgttagagatgaaccaat

SEQ ID NO: 202514 - DNA, 25 bp, Probe Sequence
ccacaccattaacaagatgagcctt

SEQ ID NO: 202515 - DNA, 25 bp, Probe Sequence
ccaagccttcaacagaagctgtgct

SEQ ID NO: 202516 - DNA, 25 bp, Probe Sequence
ccaacctgccaacagcaagcggatt

SEQ ID NO: 202517 - DNA, 25 bp, Probe Sequence
ccaatcctccggtgcaggagaattt

SEQ ID NO: 202518 - DNA, 25 bp, Probe Sequence
gccacctccgggtggtggagttcct

SEQ ID NO: 202519 - DNA, 25 bp, Probe Sequence
gcaactccctgggtaagagggacga

SEQ ID NO: 202520 - DNA, 25 bp, Probe Sequence
gccacccctggttacaggagtacca

SEQ ID NO: 202521 - DNA, 25 bp, Probe Sequence
gcctcccacatgccttaaggggacc

SEQ ID NO: 202522 - DNA, 25 bp, Probe Sequence
gccaagccacagcctttaaacgaga

SEQ ID NO: 202523 - DNA, 25 bp, Probe Sequence
ccaagccgaagttaacagaatgatg

SEQ ID NO: 202524 - DNA, 25 bp, Probe Sequence
ccaacactgaagacctaaggtagat

SEQ ID NO: 202525 - DNA, 25 bp, Probe Sequence
ccaagcccagagccctaagattaca

SEQ ID NO: 202526 - DNA, 25 bp, Probe Sequence
ccaatcccatagcccggtaatgact

SEQ ID NO: 202527 - DNA, 25 bp, Probe Sequence
ccaatcatccaccagtcagactgaa

SEQ ID NO: 202528 - DNA, 25 bp, Probe Sequence
ccaatctccactctgctatagcaga

SEQ ID NO: 202529 - DNA, 25 bp, Probe Sequence
ccaatcagatcttcggcctgagcga

SEQ ID NO: 202530 - DNA, 25 bp, Probe Sequence
ccacaaatctgaagctcctcgcagg

SEQ ID NO: 202531 - DNA, 25 bp, Probe Sequence
ccaaatacatgaagcttcatgcact

SEQ ID NO: 202532 - DNA, 25 bp, Probe Sequence
ccaaatccaatgctcctcacatatt

SEQ ID NO: 202533 - DNA, 25 bp, Probe Sequence
gccaagtaaagcccagagaagattc

SEQ ID NO: 202534 - DNA, 25 bp, Probe Sequence
ccaatctcaatccctcaaaacaatc

SEQ ID NO: 202535 - DNA, 25 bp, Probe Sequence
ccaatctcaatccctcaaaacaatc

SEQ ID NO: 202536 - DNA, 25 bp, Probe Sequence
gccaacgaagccttcattaaaatgt

SEQ ID NO: 202537 - DNA, 25 bp, Probe Sequence
ccaacccagctaattctgaaatatt

SEQ ID NO: 202538 - DNA, 25 bp, Probe Sequence
ccacacccagctgatatagaacatt

SEQ ID NO: 202539 - DNA, 25 bp, Probe Sequence
ccacaacacagtaattggtcacttg

SEQ ID NO: 202540 - DNA, 25 bp, Probe Sequence
gccacagaactgatccttgacactt

SEQ ID NO: 202541 - DNA, 25 bp, Probe Sequence
ccaaatgagctcatcctgggctggt

SEQ ID NO: 202542 - DNA, 25 bp, Probe Sequence
ccaactgcagccaatcgcatggagc

SEQ ID NO: 202543 - DNA, 25 bp, Probe Sequence
gccatccgagttactcatgagacca

SEQ ID NO: 202544 - DNA, 25 bp, Probe Sequence
gccatccaggagctgttcaagcgca

SEQ ID NO: 202545 - DNA, 25 bp, Probe Sequence
ccacacagtcagcaatgtccagaca

SEQ ID NO: 202546 - DNA, 25 bp, Probe Sequence
ccacacttcacgtcagctacatagt

SEQ ID NO: 202547 - DNA, 25 bp, Probe Sequence
ccacacctgggctatgtcatatttg

SEQ ID NO: 202548 - DNA, 25 bp, Probe Sequence
ccaaggctggtcaaggcaacatctc

SEQ ID NO: 202549 - DNA, 25 bp, Probe Sequence
ccaagtgtgcccagggctgcatctg

SEQ ID NO: 202550 - DNA, 25 bp, Probe Sequence
ccaagggccacccgaggaagcagta

SEQ ID NO: 202551 - DNA, 25 bp, Probe Sequence
ccaagcgtcagagcctgcagacaac

SEQ ID NO: 202552 - DNA, 25 bp, Probe Sequence
gccaaggtccgagtgctggacccgg

SEQ ID NO: 202553 - DNA, 25 bp, Probe Sequence
ccaaggtgctagggattacgggtgt

SEQ ID NO: 202554 - DNA, 25 bp, Probe Sequence
ccaagactgttgggtctgaccggct

SEQ ID NO: 202555 - DNA, 25 bp, Probe Sequence
gccaagacgattgtttaccctcttt

SEQ ID NO: 202556 - DNA, 25 bp, Probe Sequence
gccaacaagcctgcttaattttttt

SEQ ID NO: 202557 - DNA, 25 bp, Probe Sequence
gccaacaactctgattaactattcc

SEQ ID NO: 202558 - DNA, 25 bp, Probe Sequence
ccacacaacacctattccaaaatcg

SEQ ID NO: 202559 - DNA, 25 bp, Probe Sequence
ccacaagcagcaaccaagccagaaa

SEQ ID NO: 202560 - DNA, 25 bp, Probe Sequence
ccaaatgacatagtaggctctgaaa

SEQ ID NO: 202561 - DNA, 25 bp, Probe Sequence
ccaagtgacccagggcctgacaaaa

SEQ ID NO: 202562 - DNA, 25 bp, Probe Sequence
ccaaggaccacagaacagaaacaag

SEQ ID NO: 202563 - DNA, 25 bp, Probe Sequence
gccagggggccagaaggactgacac

SEQ ID NO: 202564 - DNA, 25 bp, Probe Sequence
ccaagggagcctgagagctgcctgg

SEQ ID NO: 202565 - DNA, 25 bp, Probe Sequence
ccaagggagcctgagagctgcctgg

SEQ ID NO: 202566 - DNA, 25 bp, Probe Sequence
gccaaaagagccaaggaagccgcag

SEQ ID NO: 202567 - DNA, 25 bp, Probe Sequence
gccaaatagacccgtgtacaatgag

SEQ ID NO: 202568 - DNA, 25 bp, Probe Sequence
ccaagaagacccgtgtgaagctgcc

SEQ ID NO: 202569 - DNA, 25 bp, Probe Sequence
ccaatgactacctggtgacctcaca

SEQ ID NO: 202570 - DNA, 25 bp, Probe Sequence
ccaatgactacctggtgacctcaca

SEQ ID NO: 202571 - DNA, 25 bp, Probe Sequence
gccaagatacccttagtgaccaacg

SEQ ID NO: 202572 - DNA, 25 bp, Probe Sequence
gccaagagagcctcttgtggacccc

SEQ ID NO: 202573 - DNA, 25 bp, Probe Sequence
gccaagtgcctaattttaacccaga

SEQ ID NO: 202574 - DNA, 25 bp, Probe Sequence
gcacaattttccacttaaccaggaa

SEQ ID NO: 202575 - DNA, 25 bp, Probe Sequence
ccaagttgaccatcttcagagccgg

SEQ ID NO: 202576 - DNA, 25 bp, Probe Sequence
ccaagatcttcctgttgcaggcctg

SEQ ID NO: 202577 - DNA, 25 bp, Probe Sequence
gccaagaactcctggccaggactgc

SEQ ID NO: 202578 - DNA, 25 bp, Probe Sequence
ccaagtgaccaccgtgaagtgccta

SEQ ID NO: 202579 - DNA, 25 bp, Probe Sequence
gccaatgtgaaccggaagttgccca

SEQ ID NO: 202580 - DNA, 25 bp, Probe Sequence
ccaaggatgcaacggatcgctgctg

SEQ ID NO: 202581 - DNA, 25 bp, Probe Sequence
ccacagccacatttcagacctgctg

SEQ ID NO: 202582 - DNA, 25 bp, Probe Sequence
ccacagcccaagcagatagctcatg

SEQ ID NO: 202583 - DNA, 25 bp, Probe Sequence
ccacagctctcttctcatgtaaatg

SEQ ID NO: 202584 - DNA, 25 bp, Probe Sequence
ccaatgctgcatcatctcagtaagg

SEQ ID NO: 202585 - DNA, 25 bp, Probe Sequence
ccaagccgcttgccagaaagctgcg

SEQ ID NO: 202586 - DNA, 25 bp, Probe Sequence
ccaaagcccatgtaaggagctgagt

SEQ ID NO: 202587 - DNA, 25 bp, Probe Sequence
ccaaatgcgccaccaaggcagtcga

SEQ ID NO: 202588 - DNA, 25 bp, Probe Sequence
ccaaaggctgcagatcagtggtctg

SEQ ID NO: 202589 - DNA, 25 bp, Probe Sequence
gccaaggcagccagatcatgaggtc

SEQ ID NO: 202590 - DNA, 25 bp, Probe Sequence
ccacacgtgcctggtcaggctggct

SEQ ID NO: 202591 - DNA, 25 bp, Probe Sequence
gccaccgtgactggcattgctgtgg

SEQ ID NO: 202592 - DNA, 25 bp, Probe Sequence
gcaccctttcctgtcgggaagggag

SEQ ID NO: 202593 - DNA, 25 bp, Probe Sequence
gccaaccttgctcttggggaagggg

SEQ ID NO: 202594 - DNA, 25 bp, Probe Sequence
gcctcctgttgtctttggtcagggg

SEQ ID NO: 202595 - DNA, 25 bp, Probe Sequence
gccacctgtagtatttgccttgatt

SEQ ID NO: 202596 - DNA, 25 bp, Probe Sequence
gccactagttagattttcggatttg

SEQ ID NO: 202597 - DNA, 25 bp, Probe Sequence
ccaaagtgtcatatttactggtcct

SEQ ID NO: 202598 - DNA, 25 bp, Probe Sequence
ccacaagattgaattccgtctctgt

SEQ ID NO: 202599 - DNA, 25 bp, Probe Sequence
ccacaagagatggaatgccctcctg

SEQ ID NO: 202600 - DNA, 25 bp, Probe Sequence
ccaatgggtggaatgatgccacctg

SEQ ID NO: 202601 - DNA, 25 bp, Probe Sequence
ccaagtggcgaagcaaaatcctcct

SEQ ID NO: 202602 - DNA, 25 bp, Probe Sequence
ccaagtggacaacaacaatcgcctg

SEQ ID NO: 202603 - DNA, 25 bp, Probe Sequence
gccaactggaaacaccaactgatgt

SEQ ID NO: 202604 - DNA, 25 bp, Probe Sequence
gccaacgccaaaacctaacttggca

SEQ ID NO: 202605 - DNA, 25 bp, Probe Sequence
gccaacagggaaactcttcacctcc

SEQ ID NO: 202606 - DNA, 25 bp, Probe Sequence
ccaaagatgagatactgcccaccac

SEQ ID NO: 202607 - DNA, 25 bp, Probe Sequence
ccaaaggtgtcacctcagtctctca

SEQ ID NO: 202608 - DNA, 25 bp, Probe Sequence
ccaagtggtgtatgtcttctccaag

SEQ ID NO: 202609 - DNA, 25 bp, Probe Sequence
ccaagtgacagcaatgctgtttcac

SEQ ID NO: 202610 - DNA, 25 bp, Probe Sequence
ccaagatgacactgcaggttaaggg

SEQ ID NO: 202611 - DNA, 25 bp, Probe Sequence
ccaagaactcggggtgtcagagggc

SEQ ID NO: 202612 - DNA, 25 bp, Probe Sequence
ccaaaaccaggctggtgcccgaggg

SEQ ID NO: 202613 - DNA, 25 bp, Probe Sequence
ccaaacccaggcaagggtcctcagc

SEQ ID NO: 202614 - DNA, 25 bp, Probe Sequence
ccacaaccgcagcgaggagtttctc

SEQ ID NO: 202615 - DNA, 25 bp, Probe Sequence
ccaaaggctcaatggattatgtttc

SEQ ID NO: 202616 - DNA, 25 bp, Probe Sequence
ccaaaggctgcgaggttgtggtgtc

SEQ ID NO: 202617 - DNA, 25 bp, Probe Sequence
ccaacagggtgagtggttgttgctc

SEQ ID NO: 202618 - DNA, 25 bp, Probe Sequence
ccaacagggtgcttacatatttgta

SEQ ID NO: 202619 - DNA, 25 bp, Probe Sequence
ccaacagcggcctttctatggagtc

SEQ ID NO: 202620 - DNA, 25 bp, Probe Sequence
ccaaaagtgctgctccgaggcatga

SEQ ID NO: 202621 - DNA, 25 bp, Probe Sequence
ccaaaagtgctgctccgaggcatga

SEQ ID NO: 202622 - DNA, 25 bp, Probe Sequence
ccaacacagtgctgtctggcggcac

SEQ ID NO: 202623 - DNA, 25 bp, Probe Sequence
ccaatgcagccggggctggcgacac

SEQ ID NO: 202624 - DNA, 25 bp, Probe Sequence
ccaaccatgcagcctgagctgggac

SEQ ID NO: 202625 - DNA, 25 bp, Probe Sequence
ccaagctcatcgcagatgcctggaa

SEQ ID NO: 202626 - DNA, 25 bp, Probe Sequence
ccaattcagcggtatccgaattatg

SEQ ID NO: 202627 - DNA, 25 bp, Probe Sequence
ccaagtagctcggaccgcaagtgca

SEQ ID NO: 202628 - DNA, 25 bp, Probe Sequence
ccaagtactcggtgtcagagcagat

SEQ ID NO: 202629 - DNA, 25 bp, Probe Sequence
ccaaggtgccagctattcaacagaa

SEQ ID NO: 202630 - DNA, 25 bp, Probe Sequence
ccaagatgttcatgtagtattgaaa

SEQ ID NO: 202631 - DNA, 25 bp, Probe Sequence
ccaactgttacaatcaaggtctatg

SEQ ID NO: 202632 - DNA, 25 bp, Probe Sequence
gccagatgtgttcagtaaggtcgag

SEQ ID NO: 202633 - DNA, 25 bp, Probe Sequence
gccaagcctagtgatcagggttgag

SEQ ID NO: 202634 - DNA, 25 bp, Probe Sequence
ccaacctttaactctgtatcagtca

SEQ ID NO: 202635 - DNA, 25 bp, Probe Sequence
ccaaccatattaacacctagcaagt

SEQ ID NO: 202636 - DNA, 25 bp, Probe Sequence
ccaagaatttgacaactcacaagct

SEQ ID NO: 202637 - DNA, 25 bp, Probe Sequence
ccaaaagcttcttaagctgataagc

SEQ ID NO: 202638 - DNA, 25 bp, Probe Sequence
ccacaagcgttccacgagcgaaggc

SEQ ID NO: 202639 - DNA, 25 bp, Probe Sequence
ccaactgcgttggacaccataagcc

SEQ ID NO: 202640 - DNA, 25 bp, Probe Sequence
ccaactcactgtgctcctaaaggca

SEQ ID NO: 202641 - DNA, 25 bp, Probe Sequence
gccacacaacgtgtcctggagagac

SEQ ID NO: 202642 - DNA, 25 bp, Probe Sequence
gccaaaacgcctgccaagaagacca

SEQ ID NO: 202643 - DNA, 25 bp, Probe Sequence
gccagaaaatcctgccaaaaacctt

SEQ ID NO: 202644 - DNA, 25 bp, Probe Sequence
gccaaaaatggctggaagacattta

SEQ ID NO: 202645 - DNA, 25 bp, Probe Sequence
gccaaagaagattggggggtatgtc

SEQ ID NO: 202646 - DNA, 25 bp, Probe Sequence
gccaacaaaaagccgcggatgcaaa

SEQ ID NO: 202647 - DNA, 25 bp, Probe Sequence
gccaatcaggcaaagaccggaaaga

SEQ ID NO: 202648 - DNA, 25 bp, Probe Sequence
gccaattcctcagacctgctaaaag

SEQ ID NO: 202649 - DNA, 25 bp, Probe Sequence
gccaagtccaattatcttctaggat

SEQ ID NO: 202650 - DNA, 25 bp, Probe Sequence
ccaagataccattcatcaactggcc

SEQ ID NO: 202651 - DNA, 25 bp, Probe Sequence
ccaagatgattcaaacaccagatgc

SEQ ID NO: 202652 - DNA, 25 bp, Probe Sequence
ccaaaaacatcacctctagcatcac

SEQ ID NO: 202653 - DNA, 25 bp, Probe Sequence
ccaaacaacatccctccagatattg

SEQ ID NO: 202654 - DNA, 25 bp, Probe Sequence
ccaactcggagtcctccagtgatct

SEQ ID NO: 202655 - DNA, 25 bp, Probe Sequence
ccaaccaggcttcctgcaaagacca

SEQ ID NO: 202656 - DNA, 25 bp, Probe Sequence
ccaatgccaggttccatactactta

SEQ ID NO: 202657 - DNA, 25 bp, Probe Sequence
gccaagtaagtatcatcctcattta

SEQ ID NO: 202658 - DNA, 25 bp, Probe Sequence
gccaattatcatcatatttacattt

SEQ ID NO: 202659 - DNA, 25 bp, Probe Sequence
ccaatttcatgttgatgatatacac

SEQ ID NO: 202660 - DNA, 25 bp, Probe Sequence
ccaagatatctcatgatgtatatac

SEQ ID NO: 202661 - DNA, 25 bp, Probe Sequence
ccaacattccttggtgagaccatta

SEQ ID NO: 202662 - DNA, 25 bp, Probe Sequence
ccaaatgttctttcttgcagccaaa

SEQ ID NO: 202663 - DNA, 25 bp, Probe Sequence
ccaaattgcttttcacatgtgccac

SEQ ID NO: 202664 - DNA, 25 bp, Probe Sequence
ccaaagtatgtttcatgcagccccc

SEQ ID NO: 202665 - DNA, 25 bp, Probe Sequence
tccaaggacatcttggctacccctc

SEQ ID NO: 202666 - DNA, 25 bp, Probe Sequence
gccagggcctgggactaccaggcct

SEQ ID NO: 202667 - DNA, 25 bp, Probe Sequence
gccaagtttggcgctattctggccc

SEQ ID NO: 202668 - DNA, 25 bp, Probe Sequence
ccaaggtaccatcctaggctgacac

SEQ ID NO: 202669 - DNA, 25 bp, Probe Sequence
ccaagctgtagctatgacggcgcgc

SEQ ID NO: 202670 - DNA, 25 bp, Probe Sequence
ccaactgatgagtatctaggatgcc

SEQ ID NO: 202671 - DNA, 25 bp, Probe Sequence
ccaagtgctcagatctaaagcctct

SEQ ID NO: 202672 - DNA, 25 bp, Probe Sequence
ccaagtgcctgaacatctgggccct

SEQ ID NO: 202673 - DNA, 25 bp, Probe Sequence
ccaaatggctgagctagctcccctg

SEQ ID NO: 202674 - DNA, 25 bp, Probe Sequence
ccaaaggaggcagtccttgcagcct

SEQ ID NO: 202675 - DNA, 25 bp, Probe Sequence
gccagaattgaggtggccattcctt

SEQ ID NO: 202676 - DNA, 25 bp, Probe Sequence
gcccaagtaagtgttctcctggcct

SEQ ID NO: 202677 - DNA, 25 bp, Probe Sequence
gccagccagtccctgttttactggc

SEQ ID NO: 202678 - DNA, 25 bp, Probe Sequence
gccaaaggccccttgttagctggcc

SEQ ID NO: 202679 - DNA, 25 bp, Probe Sequence
ccaagtggcccaggctctgaactgg

SEQ ID NO: 202680 - DNA, 25 bp, Probe Sequence
gccaagtacttccagtcgaatgctg

SEQ ID NO: 202681 - DNA, 25 bp, Probe Sequence
gccaagaacctcaagctcacggaga

SEQ ID NO: 202682 - DNA, 25 bp, Probe Sequence
ccaagactggccaagccactgtggc

SEQ ID NO: 202683 - DNA, 25 bp, Probe Sequence
ccaaactgcagcgcaggcacagtga

SEQ ID NO: 202684 - DNA, 25 bp, Probe Sequence
ccaaactcgtacggcaagtatttca

SEQ ID NO: 202685 - DNA, 25 bp, Probe Sequence
ccaaaccagtacaactatattgcat

SEQ ID NO: 202686 - DNA, 25 bp, Probe Sequence
ccaagtgcacagaaccatttttgca

SEQ ID NO: 202687 - DNA, 25 bp, Probe Sequence
ccaagcgcacgatccagtttgtgga

SEQ ID NO: 202688 - DNA, 25 bp, Probe Sequence
ccaagacactgaccgggcttttcag

SEQ ID NO: 202689 - DNA, 25 bp, Probe Sequence
ccaacacaaggcggggatgcttcca

SEQ ID NO: 202690 - DNA, 25 bp, Probe Sequence
ccaagaccccaaggagatctacacg

SEQ ID NO: 202691 - DNA, 25 bp, Probe Sequence
ccaagatctccagaagcaacttcac

SEQ ID NO: 202692 - DNA, 25 bp, Probe Sequence
ccaatctctccctcatgaaaacaag

SEQ ID NO: 202693 - DNA, 25 bp, Probe Sequence
ccaattgctttacctgaacaaatgg

SEQ ID NO: 202694 - DNA, 25 bp, Probe Sequence
ccaattgttctgctctaactgatac

SEQ ID NO: 202695 - DNA, 25 bp, Probe Sequence
ccaagtgtttcttttgacagatatc

SEQ ID NO: 202696 - DNA, 25 bp, Probe Sequence
gacggttcttttctagatttcctct

SEQ ID NO: 202697 - DNA, 25 bp, Probe Sequence
gccgtgggttttcaagtttactcat

SEQ ID NO: 202698 - DNA, 25 bp, Probe Sequence
gccggtagttcgagaagctccggcc

SEQ ID NO: 202699 - DNA, 25 bp, Probe Sequence
gccaggtagattctttactactgga

SEQ ID NO: 202700 - DNA, 25 bp, Probe Sequence
ccaaggagattgttttccttctgaa

SEQ ID NO: 202701 - DNA, 25 bp, Probe Sequence
ccaaggagatcgccattggccgtct

SEQ ID NO: 202702 - DNA, 25 bp, Probe Sequence
ccaagatggtagccattggccacat

SEQ ID NO: 202703 - DNA, 25 bp, Probe Sequence
ccaagtggaaggcgatgcacaacag

SEQ ID NO: 202704 - DNA, 25 bp, Probe Sequence
gccaacggagaggtgaatccccagt

SEQ ID NO: 202705 - DNA, 25 bp, Probe Sequence
gccaagcccagaagtggtccgcaag

SEQ ID NO: 202706 - DNA, 25 bp, Probe Sequence
ccaagctccctactgtgtcagaaat

SEQ ID NO: 202707 - DNA, 25 bp, Probe Sequence
ccaatcctccaacttgatgcagaag

SEQ ID NO: 202708 - DNA, 25 bp, Probe Sequence
ccaatttcaaatcggataggagtgt

SEQ ID NO: 202709 - DNA, 25 bp, Probe Sequence
ccaatgaaaaaaggatctggagtgg

SEQ ID NO: 202710 - DNA, 25 bp, Probe Sequence
ccaagaaagccgggatctggagtga

SEQ ID NO: 202711 - DNA, 25 bp, Probe Sequence
ccaaaaaggcttctctgaagaggaa

SEQ ID NO: 202712 - DNA, 25 bp, Probe Sequence
ccaaccttgggtattacaattgaat

SEQ ID NO: 202713 - DNA, 25 bp, Probe Sequence
ccaacccttgggatggaaaatcact

SEQ ID NO: 202714 - DNA, 25 bp, Probe Sequence
ccaactccttgtggaccgcaagaaa

SEQ ID NO: 202715 - DNA, 25 bp, Probe Sequence
ccaactccttgtgatatctttgcca

SEQ ID NO: 202716 - DNA, 25 bp, Probe Sequence
ccaagtactttccaatctcagtcac

SEQ ID NO: 202717 - DNA, 25 bp, Probe Sequence
ccaatttcttagtcacttctgtcct

SEQ ID NO: 202718 - DNA, 25 bp, Probe Sequence
ccaatctatttatcctctccatgat

SEQ ID NO: 202719 - DNA, 25 bp, Probe Sequence
ccaatctatctaaatttcatccatt

SEQ ID NO: 202720 - DNA, 25 bp, Probe Sequence
gccaatcctcttaagtattcctgtc

SEQ ID NO: 202721 - DNA, 25 bp, Probe Sequence
gccaattttatgaaacagtcctaca

SEQ ID NO: 202722 - DNA, 25 bp, Probe Sequence
ccaatatagcaaaaccagtctctac

SEQ ID NO: 202723 - DNA, 25 bp, Probe Sequence
gccaaacagccaaattctgccatta

SEQ ID NO: 202724 - DNA, 25 bp, Probe Sequence
ccaagatgacctgtttcgatgtaaa

SEQ ID NO: 202725 - DNA, 25 bp, Probe Sequence
gccactggagggatttcgaccatat

SEQ ID NO: 202726 - DNA, 25 bp, Probe Sequence
gccacgaagggttttctcatcgtcg

SEQ ID NO: 202727 - DNA, 25 bp, Probe Sequence
gccaaaaggttgtgctatccagatt

SEQ ID NO: 202728 - DNA, 25 bp, Probe Sequence
ccaatcagcaggagatcgcctccct

SEQ ID NO: 202729 - DNA, 25 bp, Probe Sequence
gccagtccatggagcaaggcttccc

SEQ ID NO: 202730 - DNA, 25 bp, Probe Sequence
ccaagcctgagggcaaggctataat

SEQ ID NO: 202731 - DNA, 25 bp, Probe Sequence
ccaaggctgtgggcaaggtcatccc

SEQ ID NO: 202732 - DNA, 25 bp, Probe Sequence
ccaatgccgagtggctgactgtact

SEQ ID NO: 202733 - DNA, 25 bp, Probe Sequence
ccaatgccaggctgcgcagtgaaga

SEQ ID NO: 202734 - DNA, 25 bp, Probe Sequence
ccaatgtcaggccaggcactgtctg

SEQ ID NO: 202735 - DNA, 25 bp, Probe Sequence
gccaataaaggcccagtgtctgttg

SEQ ID NO: 202736 - DNA, 25 bp, Probe Sequence
gccaaaaagggccactgtcgatatg

SEQ ID NO: 202737 - DNA, 25 bp, Probe Sequence
ccaataatagtcccacagggaacct

SEQ ID NO: 202738 - DNA, 25 bp, Probe Sequence
ccaatgaataatccgccagaacgac

SEQ ID NO: 202739 - DNA, 25 bp, Probe Sequence
ccaatagtgacttgtcgcatgaacg

SEQ ID NO: 202740 - DNA, 25 bp, Probe Sequence
ccaatgatgtgccttctccatatga

SEQ ID NO: 202741 - DNA, 25 bp, Probe Sequence
ccaacttgcagtacagcctcagatg

SEQ ID NO: 202742 - DNA, 25 bp, Probe Sequence
gccaatttaacagtctcatcagtga

SEQ ID NO: 202743 - DNA, 25 bp, Probe Sequence
gccaatttcaagttccaagttgcta

SEQ ID NO: 202744 - DNA, 25 bp, Probe Sequence
gccaatcttcaaccctaactagaca

SEQ ID NO: 202745 - DNA, 25 bp, Probe Sequence
gccaagtataatcggtccccagaga

SEQ ID NO: 202746 - DNA, 25 bp, Probe Sequence
ccaaaactggggtcagcctcagggc

SEQ ID NO: 202747 - DNA, 25 bp, Probe Sequence
ccaaaactggggtcagcctcagggc

SEQ ID NO: 202748 - DNA, 25 bp, Probe Sequence
ccaaaactggggtcagcctcagggc

SEQ ID NO: 202749 - DNA, 25 bp, Probe Sequence
ccaaaaggaataaagcctgcgtggc

SEQ ID NO: 202750 - DNA, 25 bp, Probe Sequence
gccaacgaggaacacagctctgggg

SEQ ID NO: 202751 - DNA, 25 bp, Probe Sequence
ccaacaaggagggcgacttcgtgct

SEQ ID NO: 202752 - DNA, 25 bp, Probe Sequence
ccaacaatggcacatcaactccttc

SEQ ID NO: 202753 - DNA, 25 bp, Probe Sequence
gccaagaagggccttactccttcac

SEQ ID NO: 202754 - DNA, 25 bp, Probe Sequence
gccaaagttggagttagtatgttca

SEQ ID NO: 202755 - DNA, 25 bp, Probe Sequence
gccaaagttggagttcgtatgttga

SEQ ID NO: 202756 - DNA, 25 bp, Probe Sequence
ccaaggctatgccaggtcatgttct

SEQ ID NO: 202757 - DNA, 25 bp, Probe Sequence
gccacagccaatgatgtgccttctc

SEQ ID NO: 202758 - DNA, 25 bp, Probe Sequence
ccaaccagatgctgggcgatctcat

SEQ ID NO: 202759 - DNA, 25 bp, Probe Sequence
ccaatgccttgcactgtgccattca

SEQ ID NO: 202760 - DNA, 25 bp, Probe Sequence
ccaatcgccacatcctgcgattcaa

SEQ ID NO: 202761 - DNA, 25 bp, Probe Sequence
ccaatcccacctcctggtgtagaat

SEQ ID NO: 202762 - DNA, 25 bp, Probe Sequence
ccaaccttattctgtgtgtagacat

SEQ ID NO: 202763 - DNA, 25 bp, Probe Sequence
ccaactttgttaagtggctcagaaa

SEQ ID NO: 202764 - DNA, 25 bp, Probe Sequence
ccaactattttgaggatgttgagat

SEQ ID NO: 202765 - DNA, 25 bp, Probe Sequence
gccaactattttgaggatgttgaga

SEQ ID NO: 202766 - DNA, 25 bp, Probe Sequence
gccaagatttttaactggttatgta

SEQ ID NO: 202767 - DNA, 25 bp, Probe Sequence
ccaagtctttcaacggatccttgaa

SEQ ID NO: 202768 - DNA, 25 bp, Probe Sequence
gccatggcttttaaggataccggaa

SEQ ID NO: 202769 - DNA, 25 bp, Probe Sequence
gccaggtgtcttgtggacacggaac

SEQ ID NO: 202770 - DNA, 25 bp, Probe Sequence
ccaacgattctcgtcatgaccgaaa

SEQ ID NO: 202771 - DNA, 25 bp, Probe Sequence
gccaacaccttcacatggctctaaa

SEQ ID NO: 202772 - DNA, 25 bp, Probe Sequence
gcccaatcatttgcaatgccctaat

SEQ ID NO: 202773 - DNA, 25 bp, Probe Sequence
gcctcttttcagaagtgccgtgact

SEQ ID NO: 202774 - DNA, 25 bp, Probe Sequence
gccactttgaaatgatgcgcctgac

SEQ ID NO: 202775 - DNA, 25 bp, Probe Sequence
gccatctgcgtgacaataaacatta

SEQ ID NO: 202776 - DNA, 25 bp, Probe Sequence
gccatctaggcacacaaacatttaa

SEQ ID NO: 202777 - DNA, 25 bp, Probe Sequence
gccactggcagctaaaaaaggtaag

SEQ ID NO: 202778 - DNA, 25 bp, Probe Sequence
gccaccgcgcggaagtagacgtaag

SEQ ID NO: 202779 - DNA, 25 bp, Probe Sequence
gccaccgagcgagcagctcggtcca

SEQ ID NO: 202780 - DNA, 25 bp, Probe Sequence
ccaactgatccagatgctacgctcc

SEQ ID NO: 202781 - DNA, 25 bp, Probe Sequence
ccaactactccctcaagtacaagct

SEQ ID NO: 202782 - DNA, 25 bp, Probe Sequence
ccaacttctacctatcaagttctgt

SEQ ID NO: 202783 - DNA, 25 bp, Probe Sequence
ccaagctacatccagaattagtttg

SEQ ID NO: 202784 - DNA, 25 bp, Probe Sequence
gccaagctacatccagaattagttt

SEQ ID NO: 202785 - DNA, 25 bp, Probe Sequence
ccaagcaacttcataatcagattat

SEQ ID NO: 202786 - DNA, 25 bp, Probe Sequence
ccaaggacaggcttcagcatcagca

SEQ ID NO: 202787 - DNA, 25 bp, Probe Sequence
ccaaggacaggcttcagcatcagca

SEQ ID NO: 202788 - DNA, 25 bp, Probe Sequence
ccaagtgataacttcgaagccatag

SEQ ID NO: 202789 - DNA, 25 bp, Probe Sequence
ccaagagaaatctccaggctctccc

SEQ ID NO: 202790 - DNA, 25 bp, Probe Sequence
ccaagagtaagttctgctacctccc

SEQ ID NO: 202791 - DNA, 25 bp, Probe Sequence
ccaatagttagatctaccctgcctg

SEQ ID NO: 202792 - DNA, 25 bp, Probe Sequence
ccaacagataaatataacccctggg

SEQ ID NO: 202793 - DNA, 25 bp, Probe Sequence
ccaacaggaagctcatcaaccaatc

SEQ ID NO: 202794 - DNA, 25 bp, Probe Sequence
ccaagcaaagtctgctcgaggagtc

SEQ ID NO: 202795 - DNA, 25 bp, Probe Sequence
ccaagtaagtccaacgaaagccatg

SEQ ID NO: 202796 - DNA, 25 bp, Probe Sequence
gccagagaataagccctgttacctg

SEQ ID NO: 202797 - DNA, 25 bp, Probe Sequence
gccaaacaatacccacttgtcacgc

SEQ ID NO: 202798 - DNA, 25 bp, Probe Sequence
gccaaaatattccccttatctttga

SEQ ID NO: 202799 - DNA, 25 bp, Probe Sequence
gcacaaagtttctctttactgccac

SEQ ID NO: 202800 - DNA, 25 bp, Probe Sequence
gccaaagttttccatctcgagggac

SEQ ID NO: 202801 - DNA, 25 bp, Probe Sequence
gccatcaagaacttctgatctcctg

SEQ ID NO: 202802 - DNA, 25 bp, Probe Sequence
ccaatggatgacttctttcagtgtg

SEQ ID NO: 202803 - DNA, 25 bp, Probe Sequence
ccaagtagctgctaccttctttggc

SEQ ID NO: 202804 - DNA, 25 bp, Probe Sequence
ccaagatatgtggactctctcctga

SEQ ID NO: 202805 - DNA, 25 bp, Probe Sequence
ccaatatgattccacccatggcaaa

SEQ ID NO: 202806 - DNA, 25 bp, Probe Sequence
ccaatatgattccacccatggcaaa

SEQ ID NO: 202807 - DNA, 25 bp, Probe Sequence
ccaatgtttctcaagctcgtcaaga

SEQ ID NO: 202808 - DNA, 25 bp, Probe Sequence
gccaatgtcgttcgccaagtacaga

SEQ ID NO: 202809 - DNA, 25 bp, Probe Sequence
ccaagtttgttgaaagtgatgcaga

SEQ ID NO: 202810 - DNA, 25 bp, Probe Sequence
ccaagccttgctagtcattaacaga

SEQ ID NO: 202811 - DNA, 25 bp, Probe Sequence
ccaacctgggtgtcatttctcagaa

SEQ ID NO: 202812 - DNA, 25 bp, Probe Sequence
ccaacctcggggatgtgtgcagaca

SEQ ID NO: 202813 - DNA, 25 bp, Probe Sequence
ccaacctcggggatgtgtgcagaca

SEQ ID NO: 202814 - DNA, 25 bp, Probe Sequence
gccccagtcaggccgttttagaaga

SEQ ID NO: 202815 - DNA, 25 bp, Probe Sequence
gccaccagggttcttttgaaatagt

SEQ ID NO: 202816 - DNA, 25 bp, Probe Sequence
gccaacaggagcgtccttttctaat

SEQ ID NO: 202817 - DNA, 25 bp, Probe Sequence
gccacacacagggctccttaaggat

SEQ ID NO: 202818 - DNA, 25 bp, Probe Sequence
gcctgaaggtaacattggcagtaat

SEQ ID NO: 202819 - DNA, 25 bp, Probe Sequence
gcccaagcctaaaaaggcccctgca

SEQ ID NO: 202820 - DNA, 25 bp, Probe Sequence
gccagagggtaaaaaagccccagca

SEQ ID NO: 202821 - DNA, 25 bp, Probe Sequence
gccaaggagtacaagaccaccctag

SEQ ID NO: 202822 - DNA, 25 bp, Probe Sequence
gccaaggtcttcaagaaccccaagt

SEQ ID NO: 202823 - DNA, 25 bp, Probe Sequence
gcatagaattgttaccaacctccaa

SEQ ID NO: 202824 - DNA, 25 bp, Probe Sequence
gccagaattacggctagcacctagc

SEQ ID NO: 202825 - DNA, 25 bp, Probe Sequence
gccaagatgccagatgaaccactag

SEQ ID NO: 202826 - DNA, 25 bp, Probe Sequence
gccaaagccatgccataaccattac

SEQ ID NO: 202827 - DNA, 25 bp, Probe Sequence
gccaacatctcactgcaattctatc

SEQ ID NO: 202828 - DNA, 25 bp, Probe Sequence
gccaagcattgcgtgaagtgcaaca

SEQ ID NO: 202829 - DNA, 25 bp, Probe Sequence
ccaactccctgaatgacgacatcag

SEQ ID NO: 202830 - DNA, 25 bp, Probe Sequence
ccaactgctcacagaacggatcatg

SEQ ID NO: 202831 - DNA, 25 bp, Probe Sequence
ccaacagtctcattgagagcggtgc

SEQ ID NO: 202832 - DNA, 25 bp, Probe Sequence
ccaacagcctcaaagccatggcgcc

SEQ ID NO: 202833 - DNA, 25 bp, Probe Sequence
ccaacgcccatgtggtggctgatcg

SEQ ID NO: 202834 - DNA, 25 bp, Probe Sequence
ccaacgcccatgtggtggctgatcg

SEQ ID NO: 202835 - DNA, 25 bp, Probe Sequence
ccaacgcccatgtggtggctgatcg

SEQ ID NO: 202836 - DNA, 25 bp, Probe Sequence
ccaagagtcctgtgcactggtagct

SEQ ID NO: 202837 - DNA, 25 bp, Probe Sequence
gccaaggatccttctgcagtggcga

SEQ ID NO: 202838 - DNA, 25 bp, Probe Sequence
gccaatagacctacacggccaaatt

SEQ ID NO: 202839 - DNA, 25 bp, Probe Sequence
gccaagagaccagcctggccagtat

SEQ ID NO: 202840 - DNA, 25 bp, Probe Sequence
ccaaggatccaagatatgccagata

SEQ ID NO: 202841 - DNA, 25 bp, Probe Sequence
ccaaggtgcacatgaaatgctttct

SEQ ID NO: 202842 - DNA, 25 bp, Probe Sequence
ccaaggacaaggacactctgacatt

SEQ ID NO: 202843 - DNA, 25 bp, Probe Sequence
ccaatgagaaagccctgcttgtgag

SEQ ID NO: 202844 - DNA, 25 bp, Probe Sequence
gccaatagaaactgctcaatgctgt

SEQ ID NO: 202845 - DNA, 25 bp, Probe Sequence
gccacccattcagggcatatctgga

SEQ ID NO: 202846 - DNA, 25 bp, Probe Sequence
gccacccattcagggcatatctgga

SEQ ID NO: 202847 - DNA, 25 bp, Probe Sequence
gccacccattcagggcatatctgga

SEQ ID NO: 202848 - DNA, 25 bp, Probe Sequence
gccacccattcagggcatatctgga

SEQ ID NO: 202849 - DNA, 25 bp, Probe Sequence
gccacccattcagggcatatctgga

SEQ ID NO: 202850 - DNA, 25 bp, Probe Sequence
gccacccattcagggcatatctgga

SEQ ID NO: 202851 - DNA, 25 bp, Probe Sequence
gccagtctatacaggattctcagca

SEQ ID NO: 202852 - DNA, 25 bp, Probe Sequence
gccacttatgccagcgagtgtgcca

SEQ ID NO: 202853 - DNA, 25 bp, Probe Sequence
gcctttagcctctgaatgataccac

SEQ ID NO: 202854 - DNA, 25 bp, Probe Sequence
gccttggactcatgtttgaatcgaa

SEQ ID NO: 202855 - DNA, 25 bp, Probe Sequence
gccttgggcccaacattggtgaaaa

SEQ ID NO: 202856 - DNA, 25 bp, Probe Sequence
gccactggggacagcatcgctgtaa

SEQ ID NO: 202857 - DNA, 25 bp, Probe Sequence
ccaatgggaactctggccaagactc

SEQ ID NO: 202858 - DNA, 25 bp, Probe Sequence
ccaagggatcgcagggcctaggtgc

SEQ ID NO: 202859 - DNA, 25 bp, Probe Sequence
ccaagaggcggagggccgctgacgt

SEQ ID NO: 202860 - DNA, 25 bp, Probe Sequence
ccaagaaggaggcgccgcccatgga

SEQ ID NO: 202861 - DNA, 25 bp, Probe Sequence
gccaaaaggacgcccacggggagat

SEQ ID NO: 202862 - DNA, 25 bp, Probe Sequence
gcccagggaaggctccgtgggaggc

SEQ ID NO: 202863 - DNA, 25 bp, Probe Sequence
ccaagtgggtgtcttcagtgggggc

SEQ ID NO: 202864 - DNA, 25 bp, Probe Sequence
ccaagcggggctctggcaaggtgag

SEQ ID NO: 202865 - DNA, 25 bp, Probe Sequence
gccaagggggtgactggaagttgtg

SEQ ID NO: 202866 - DNA, 25 bp, Probe Sequence
gccaatatggggatgtggaattttt

SEQ ID NO: 202867 - DNA, 25 bp, Probe Sequence
ccaactgcgaggagtgcgacgtgag

SEQ ID NO: 202868 - DNA, 25 bp, Probe Sequence
ccaagccggtgactgtgcgtggctg

SEQ ID NO: 202869 - DNA, 25 bp, Probe Sequence
ccaagctcatcgtggtggtgcggga

SEQ ID NO: 202870 - DNA, 25 bp, Probe Sequence
ccaagcctgtgatgacatggtgctg

SEQ ID NO: 202871 - DNA, 25 bp, Probe Sequence
gccaagactgtggccgcaggaagct

SEQ ID NO: 202872 - DNA, 25 bp, Probe Sequence
ccaagagtgtggtgcgggcgctctt

SEQ ID NO: 202873 - DNA, 25 bp, Probe Sequence
gccaggagttcgagcctggcccaac

SEQ ID NO: 202874 - DNA, 25 bp, Probe Sequence
gcctgggttcgtagtattggattat

SEQ ID NO: 202875 - DNA, 25 bp, Probe Sequence
gccacctttggtatttgcagcttac

SEQ ID NO: 202876 - DNA, 25 bp, Probe Sequence
gccaccttgcgtgatgtaatcctta

SEQ ID NO: 202877 - DNA, 25 bp, Probe Sequence
gccaccattcggctgtacatcgata

SEQ ID NO: 202878 - DNA, 25 bp, Probe Sequence
gccaatgatatggcagcttctacat

SEQ ID NO: 202879 - DNA, 25 bp, Probe Sequence
ccaagtatgctactgtctccagaac

SEQ ID NO: 202880 - DNA, 25 bp, Probe Sequence
gccagagtaattctctcactaccac

SEQ ID NO: 202881 - DNA, 25 bp, Probe Sequence
gccagactgaagttccctctaaagg

SEQ ID NO: 202882 - DNA, 25 bp, Probe Sequence
ccaatcaaagtccaatcttacaagg

SEQ ID NO: 202883 - DNA, 25 bp, Probe Sequence
ccaatccaagtcaaactttgcacat

SEQ ID NO: 202884 - DNA, 25 bp, Probe Sequence
ccaatccaatctaaaaatgtgccag

SEQ ID NO: 202885 - DNA, 25 bp, Probe Sequence
gccacaccaattcctaaattgtagg

SEQ ID NO: 202886 - DNA, 25 bp, Probe Sequence
gccaagccagttccattaaattcag

SEQ ID NO: 202887 - DNA, 25 bp, Probe Sequence
gccaatcctgtaggcacaaaaccag

SEQ ID NO: 202888 - DNA, 25 bp, Probe Sequence
gccaatcctgaatctgcaacaactt

SEQ ID NO: 202889 - DNA, 25 bp, Probe Sequence
ccaactgtcaaccttgacaaattgt

SEQ ID NO: 202890 - DNA, 25 bp, Probe Sequence
ccaagttcattgccctgttacaggt

SEQ ID NO: 202891 - DNA, 25 bp, Probe Sequence
ccaagtgcatatgggtctgtcaaag

SEQ ID NO: 202892 - DNA, 25 bp, Probe Sequence
ccaagtgttgggccatctgccaaga

SEQ ID NO: 202893 - DNA, 25 bp, Probe Sequence
gccaagttgtaaccatcatgtgaaa

SEQ ID NO: 202894 - DNA, 25 bp, Probe Sequence
gccaaatttagtctgatctgaatgc

SEQ ID NO: 202895 - DNA, 25 bp, Probe Sequence
gccaaagtatacattcactgtctgg

SEQ ID NO: 202896 - DNA, 25 bp, Probe Sequence
gccaaaaacctttcatctggtcagg

SEQ ID NO: 202897 - DNA, 25 bp, Probe Sequence
gccacaaggaccgtttcatttcagg

SEQ ID NO: 202898 - DNA, 25 bp, Probe Sequence
gccgaaggacctgctgatattccgt

SEQ ID NO: 202899 - DNA, 25 bp, Probe Sequence
gccacagcggaatcagcggttccgt

SEQ ID NO: 202900 - DNA, 25 bp, Probe Sequence
gcccgggaagaattcgcttccacct

SEQ ID NO: 202901 - DNA, 25 bp, Probe Sequence
gccaagttcaagtttcctggccacc

SEQ ID NO: 202902 - DNA, 25 bp, Probe Sequence
ccaaggccaaagagcagccagaccc

SEQ ID NO: 202903 - DNA, 25 bp, Probe Sequence
ccaagacaaggaaggcatccctcct

SEQ ID NO: 202904 - DNA, 25 bp, Probe Sequence
gccaaaatagagagtatacagtcct

SEQ ID NO: 202905 - DNA, 25 bp, Probe Sequence
gccaaagggccaaggattgatgtcc

SEQ ID NO: 202906 - DNA, 25 bp, Probe Sequence
gccaaggagggaacatgtatgtaaa

SEQ ID NO: 202907 - DNA, 25 bp, Probe Sequence
gccacgcagatgccgattgctttgt

SEQ ID NO: 202908 - DNA, 25 bp, Probe Sequence
gccaaggatgtgccttctactttat

SEQ ID NO: 202909 - DNA, 25 bp, Probe Sequence
gccaaagatttcttcttcgttcaag

SEQ ID NO: 202910 - DNA, 25 bp, Probe Sequence
gccaataattgtttttcgctaccta

SEQ ID NO: 202911 - DNA, 25 bp, Probe Sequence
gccctaacatgttctaatcctaaaa

SEQ ID NO: 202912 - DNA, 25 bp, Probe Sequence
gccactaactggactaatatgtatc

SEQ ID NO: 202913 - DNA, 25 bp, Probe Sequence
gccacatgatgcatagagcctcttt

SEQ ID NO: 202914 - DNA, 25 bp, Probe Sequence
gccaatgaggtaggcctgatctttg

SEQ ID NO: 202915 - DNA, 25 bp, Probe Sequence
gccagacaagtatgcccactttcac

SEQ ID NO: 202916 - DNA, 25 bp, Probe Sequence
gccagactacactgcttacgttgcc

SEQ ID NO: 202917 - DNA, 25 bp, Probe Sequence
gccagactgacctgatgtaaatgtt

SEQ ID NO: 202918 - DNA, 25 bp, Probe Sequence
ccaatctccccgatgagcaagtgct

SEQ ID NO: 202919 - DNA, 25 bp, Probe Sequence
ccaattccccacatagggcctgatt

SEQ ID NO: 202920 - DNA, 25 bp, Probe Sequence
gccaatactccagattcgggctgtg

SEQ ID NO: 202921 - DNA, 25 bp, Probe Sequence
gccaaagtgacttactgcggttgcg

SEQ ID NO: 202922 - DNA, 25 bp, Probe Sequence
ccaatctgtactcatgtggggacca

SEQ ID NO: 202923 - DNA, 25 bp, Probe Sequence
gccaacgtagtccatgtgaagtcac

SEQ ID NO: 202924 - DNA, 25 bp, Probe Sequence
gccaaattgggcctgtaaggccgtt

SEQ ID NO: 202925 - DNA, 25 bp, Probe Sequence
gccaaattggccgttagccacctgg

SEQ ID NO: 202926 - DNA, 25 bp, Probe Sequence
gccaagacgtcaatttagctgcatc

SEQ ID NO: 202927 - DNA, 25 bp, Probe Sequence
gccaagacgtcaatttagctgcatc

SEQ ID NO: 202928 - DNA, 25 bp, Probe Sequence
gccaagatcatttattccgctgcat

SEQ ID NO: 202929 - DNA, 25 bp, Probe Sequence
gccacaagattgaattccgtctctg

SEQ ID NO: 202930 - DNA, 25 bp, Probe Sequence
gccaacatggagaaaccctgtctct

SEQ ID NO: 202931 - DNA, 25 bp, Probe Sequence
gccaatatgggtgttctgtgatatt

SEQ ID NO: 202932 - DNA, 25 bp, Probe Sequence
gccacatagtttcctttttaactgc

SEQ ID NO: 202933 - DNA, 25 bp, Probe Sequence
gcccaaggttgttttgcgtaactga

SEQ ID NO: 202934 - DNA, 25 bp, Probe Sequence
gcccaaagttgatattcaatttcaa

SEQ ID NO: 202935 - DNA, 25 bp, Probe Sequence
gccaaaatgcttgatattaattaat

SEQ ID NO: 202936 - DNA, 25 bp, Probe Sequence
gccaaaatgttggtaacaattccgg

SEQ ID NO: 202937 - DNA, 25 bp, Probe Sequence
gccaaaatgtcgtaacaactccgcc

SEQ ID NO: 202938 - DNA, 25 bp, Probe Sequence
ccaatggtctggacaacaagctccg

SEQ ID NO: 202939 - DNA, 25 bp, Probe Sequence
gccaagtggtggcgacaactgcgcg

SEQ ID NO: 202940 - DNA, 25 bp, Probe Sequence
ccaagcgaggagtccaaagctcagg

SEQ ID NO: 202941 - DNA, 25 bp, Probe Sequence
ccaagcgaggagtccaaagctcagg

SEQ ID NO: 202942 - DNA, 25 bp, Probe Sequence
gccaaggggagcacagtaggaggtg

SEQ ID NO: 202943 - DNA, 25 bp, Probe Sequence
gccacggccgagggagaaggagtat

SEQ ID NO: 202944 - DNA, 25 bp, Probe Sequence
ccaagactggagataggcagggcta

SEQ ID NO: 202945 - DNA, 25 bp, Probe Sequence
ccaagcactgtgccatgtcagcaag

SEQ ID NO: 202946 - DNA, 25 bp, Probe Sequence
ccaagcagtgtgccctagcagagga

SEQ ID NO: 202947 - DNA, 25 bp, Probe Sequence
ccaagcagatgctgcaaacagctaa

SEQ ID NO: 202948 - DNA, 25 bp, Probe Sequence
ccaatgcacagggctgcaacaccac

SEQ ID NO: 202949 - DNA, 25 bp, Probe Sequence
ccaatgcagaaggcaccacagagac

SEQ ID NO: 202950 - DNA, 25 bp, Probe Sequence
gccaagatccaggcactcaatgggc

SEQ ID NO: 202951 - DNA, 25 bp, Probe Sequence
gccaaggcacagcgtagatctggaa

SEQ ID NO: 202952 - DNA, 25 bp, Probe Sequence
gccaagcggctgcagtccattggca

SEQ ID NO: 202953 - DNA, 25 bp, Probe Sequence
gccaagcggctgcagtccattggca

SEQ ID NO: 202954 - DNA, 25 bp, Probe Sequence
gccaagcggctgcagtccattggca

SEQ ID NO: 202955 - DNA, 25 bp, Probe Sequence
gccagaaggctttatcattcagtct

SEQ ID NO: 202956 - DNA, 25 bp, Probe Sequence
ccaatagcactttcattgccagtgt

SEQ ID NO: 202957 - DNA, 25 bp, Probe Sequence
ccaatggcctggccattctcagcct

SEQ ID NO: 202958 - DNA, 25 bp, Probe Sequence
ccaagcagacgaggactacagccac

SEQ ID NO: 202959 - DNA, 25 bp, Probe Sequence
gccaaggcacgagtaacaagctcac

SEQ ID NO: 202960 - DNA, 25 bp, Probe Sequence
gccaatgtgctttgtaacagagcca

SEQ ID NO: 202961 - DNA, 25 bp, Probe Sequence
gccaagtcttcatttggggccaaag

SEQ ID NO: 202962 - DNA, 25 bp, Probe Sequence
gccaatatgtctgttaggggatact

SEQ ID NO: 202963 - DNA, 25 bp, Probe Sequence
gccacaggtttcatcgacggtgact

SEQ ID NO: 202964 - DNA, 25 bp, Probe Sequence
gccagggtttacccagtgggacaga

SEQ ID NO: 202965 - DNA, 25 bp, Probe Sequence
gcccgtggttaagatgctccgtgaa

SEQ ID NO: 202966 - DNA, 25 bp, Probe Sequence
tacctaggttaacaaccctgttgag

SEQ ID NO: 202967 - DNA, 25 bp, Probe Sequence
tacctatttttacactaactttctg

SEQ ID NO: 202968 - DNA, 25 bp, Probe Sequence
gccctttttgtacagaagcacttcc

SEQ ID NO: 202969 - DNA, 25 bp, Probe Sequence
gccaatcttagcctaaaagaaattg

SEQ ID NO: 202970 - DNA, 25 bp, Probe Sequence
gccacactggtgtctgaaaggaata

SEQ ID NO: 202971 - DNA, 25 bp, Probe Sequence
gccacactggtgtctgaaaggaata

SEQ ID NO: 202972 - DNA, 25 bp, Probe Sequence
gccagccaggcgggctcaaggaaag

SEQ ID NO: 202973 - DNA, 25 bp, Probe Sequence
gccagcgccgtaggaataggaacca

SEQ ID NO: 202974 - DNA, 25 bp, Probe Sequence
gccagagccttaataaacgtccaca

SEQ ID NO: 202975 - DNA, 25 bp, Probe Sequence
gccaactgcaaaaaaagcctccaag

SEQ ID NO: 202976 - DNA, 25 bp, Probe Sequence
gccaaagagaactacatactgccca

SEQ ID NO: 202977 - DNA, 25 bp, Probe Sequence
gccaaagaaatctatcacttcacct

SEQ ID NO: 202978 - DNA, 25 bp, Probe Sequence
gccacaagaacatgtctgtacacct

SEQ ID NO: 202979 - DNA, 25 bp, Probe Sequence
gccacaaatactggggtccccatta

SEQ ID NO: 202980 - DNA, 25 bp, Probe Sequence
gctacgacgactgggggggccagta

SEQ ID NO: 202981 - DNA, 25 bp, Probe Sequence
tccaggacaacctgggggccgcagg

SEQ ID NO: 202982 - DNA, 25 bp, Probe Sequence
tccacctcagggtggggcgggcagg

SEQ ID NO: 202983 - DNA, 25 bp, Probe Sequence
gccaccagcaggccaaggtgacggg

SEQ ID NO: 202984 - DNA, 25 bp, Probe Sequence
gccacactgaggacaaggccggcgg

SEQ ID NO: 202985 - DNA, 25 bp, Probe Sequence
gccacttgagtgaggagtgcgggga

SEQ ID NO: 202986 - DNA, 25 bp, Probe Sequence
gccacttactgtgtgacatttgggg

SEQ ID NO: 202987 - DNA, 25 bp, Probe Sequence
gccaattcttggtagttctcttggg

SEQ ID NO: 202988 - DNA, 25 bp, Probe Sequence
ccaatcttgctttgtgtatctcatt

SEQ ID NO: 202989 - DNA, 25 bp, Probe Sequence
gccaatttgttcctgtattcatgta

SEQ ID NO: 202990 - DNA, 25 bp, Probe Sequence
ccaatgtgtttgccatgtttgacca

SEQ ID NO: 202991 - DNA, 25 bp, Probe Sequence
gccagtttggtgcagaatgtgacga

SEQ ID NO: 202992 - DNA, 25 bp, Probe Sequence
tccgtcatggcgctgaaggtagcga

SEQ ID NO: 202993 - DNA, 25 bp, Probe Sequence
gccgtgtatcagcgaaggttgggac

SEQ ID NO: 202994 - DNA, 25 bp, Probe Sequence
gccaggtcctagccaatggtctgga

SEQ ID NO: 202995 - DNA, 25 bp, Probe Sequence
gccagaacaccatggggcttggata

SEQ ID NO: 202996 - DNA, 25 bp, Probe Sequence
gccacaactacatggtgttcggatc

SEQ ID NO: 202997 - DNA, 25 bp, Probe Sequence
gccacagactaatggctatgacctt

SEQ ID NO: 202998 - DNA, 25 bp, Probe Sequence
gccacacgtaactgagatgctcctt

SEQ ID NO: 202999 - DNA, 25 bp, Probe Sequence
gccaaagccaactgatgttttaggg

SEQ ID NO: 203000 - DNA, 25 bp, Probe Sequence
gccaaagcaaacggtttctcctgtg

SEQ ID NO: 203001 - DNA, 25 bp, Probe Sequence
gccaagacaaaggcggtttcccgct

SEQ ID NO: 203002 - DNA, 25 bp, Probe Sequence
gccaagatcaaggctcgagatcttc

SEQ ID NO: 203003 - DNA, 25 bp, Probe Sequence
gccactgcaacaagcgtgagactcc

SEQ ID NO: 203004 - DNA, 25 bp, Probe Sequence
gccacaaaccaggccaagatccacg

SEQ ID NO: 203005 - DNA, 25 bp, Probe Sequence
gccaagtttcaggccaatgatcccc

SEQ ID NO: 203006 - DNA, 25 bp, Probe Sequence
ccaagagcttgacccaagtccgagc

SEQ ID NO: 203007 - DNA, 25 bp, Probe Sequence
ccaagagcggtaccggcattgcggc

SEQ ID NO: 203008 - DNA, 25 bp, Probe Sequence
gccaagagcggtaccggcattgcgg

SEQ ID NO: 203009 - DNA, 25 bp, Probe Sequence
gccagagagagccttcacggacggc

SEQ ID NO: 203010 - DNA, 25 bp, Probe Sequence
gccacagagaggcatcacggaagcc

SEQ ID NO: 203011 - DNA, 25 bp, Probe Sequence
gccaatgtgggcgtcactaaagcaa

SEQ ID NO: 203012 - DNA, 25 bp, Probe Sequence
gccacagtgggcggactgcttgagc

SEQ ID NO: 203013 - DNA, 25 bp, Probe Sequence
gccacaggggccaactagggccagg

SEQ ID NO: 203014 - DNA, 25 bp, Probe Sequence
gccagaggggctcaaaaggcccgtt

SEQ ID NO: 203015 - DNA, 25 bp, Probe Sequence
gccagggcaggcagaagctagggcc

SEQ ID NO: 203016 - DNA, 25 bp, Probe Sequence
gccactggcaccataacatggggcc

SEQ ID NO: 203017 - DNA, 25 bp, Probe Sequence
gccactgacaccgagtactcggaga

SEQ ID NO: 203018 - DNA, 25 bp, Probe Sequence
gccaagacccgctgatgatcaagat

SEQ ID NO: 203019 - DNA, 25 bp, Probe Sequence
gccaagcttctggttgattaatgag

SEQ ID NO: 203020 - DNA, 25 bp, Probe Sequence
gccactgaatgccttctttcaatag

SEQ ID NO: 203021 - DNA, 25 bp, Probe Sequence
ccaatgccacctcatggtcagtatg

SEQ ID NO: 203022 - DNA, 25 bp, Probe Sequence
gccaaaacgggagtgtgcagtcagg

SEQ ID NO: 203023 - DNA, 25 bp, Probe Sequence
gccaacacagtgctgtctggcggca

SEQ ID NO: 203024 - DNA, 25 bp, Probe Sequence
gccaacacgcctcatctgagggagc

SEQ ID NO: 203025 - DNA, 25 bp, Probe Sequence
gccaacacgcctcatctgagggagc

SEQ ID NO: 203026 - DNA, 25 bp, Probe Sequence
ccaagtacctgcctcacagtgcagg

SEQ ID NO: 203027 - DNA, 25 bp, Probe Sequence
ccaattacctgctgatgagtgcaac

SEQ ID NO: 203028 - DNA, 25 bp, Probe Sequence
ccaattcctgcttcatggatgtgaa

SEQ ID NO: 203029 - DNA, 25 bp, Probe Sequence
ccaagatcctgcctctggtgagagg

SEQ ID NO: 203030 - DNA, 25 bp, Probe Sequence
ccaagtcccaggagcgagtggaagg

SEQ ID NO: 203031 - DNA, 25 bp, Probe Sequence
ccaagtccctgtggagaagtgtgaa

SEQ ID NO: 203032 - DNA, 25 bp, Probe Sequence
gccaagtcagccttctgttggttaa

SEQ ID NO: 203033 - DNA, 25 bp, Probe Sequence
gccaactcccagagctgatgctatt

SEQ ID NO: 203034 - DNA, 25 bp, Probe Sequence
gccaaccccatgaattgtgttattg

SEQ ID NO: 203035 - DNA, 25 bp, Probe Sequence
gccaacctcacaggaggtggtgatg

SEQ ID NO: 203036 - DNA, 25 bp, Probe Sequence
gccaacgcacagactgaccgagtgg

SEQ ID NO: 203037 - DNA, 25 bp, Probe Sequence
gccagcccacagatgatgaagaaat

SEQ ID NO: 203038 - DNA, 25 bp, Probe Sequence
gccagccagaaggcactgaaggaga

SEQ ID NO: 203039 - DNA, 25 bp, Probe Sequence
gccaatgcaagaggccaaggctgga

SEQ ID NO: 203040 - DNA, 25 bp, Probe Sequence
gccaatgaagagagcactgttgaac

SEQ ID NO: 203041 - DNA, 25 bp, Probe Sequence
gccacatcatagttcaccttatcaa

SEQ ID NO: 203042 - DNA, 25 bp, Probe Sequence
gccactgatgaatcgcactgttcgt

SEQ ID NO: 203043 - DNA, 25 bp, Probe Sequence
gccagctgctacttcgacattgagc

SEQ ID NO: 203044 - DNA, 25 bp, Probe Sequence
gccactggagacaagcaatctgaat

SEQ ID NO: 203045 - DNA, 25 bp, Probe Sequence
gccaaggagatcatgcagcatcgct

SEQ ID NO: 203046 - DNA, 25 bp, Probe Sequence
gccacactgagtgagctgcactgtg

SEQ ID NO: 203047 - DNA, 25 bp, Probe Sequence
gccacactgagtgagctgcactgtg

SEQ ID NO: 203048 - DNA, 25 bp, Probe Sequence
gccaccatatgtgtgtgcctaggtc

SEQ ID NO: 203049 - DNA, 25 bp, Probe Sequence
gccccaagtaagagcgagtctgctt

SEQ ID NO: 203050 - DNA, 25 bp, Probe Sequence
gccaccacgtagtcaagggtctctt

SEQ ID NO: 203051 - DNA, 25 bp, Probe Sequence
gccaccccattaaagtgcagttcct

SEQ ID NO: 203052 - DNA, 25 bp, Probe Sequence
gccaacccatgctaaaatctgtttc

SEQ ID NO: 203053 - DNA, 25 bp, Probe Sequence
gccaacacctcaaaacacctggtgt

SEQ ID NO: 203054 - DNA, 25 bp, Probe Sequence
gccaagatccatctaaactggagtg

SEQ ID NO: 203055 - DNA, 25 bp, Probe Sequence
ccaagtctctggtaactctgttatg

SEQ ID NO: 203056 - DNA, 25 bp, Probe Sequence
gccaagttgtgtttacttttcattc

SEQ ID NO: 203057 - DNA, 25 bp, Probe Sequence
gccactgtgtttctagcactggcct

SEQ ID NO: 203058 - DNA, 25 bp, Probe Sequence
gccactgggtcacgagaacgagtct

SEQ ID NO: 203059 - DNA, 25 bp, Probe Sequence
gccaccgactatgagaactatgccc

SEQ ID NO: 203060 - DNA, 25 bp, Probe Sequence
gccaccaactaaccaagcttggcct

SEQ ID NO: 203061 - DNA, 25 bp, Probe Sequence
gccgtccaggaactcaagcgggtct

SEQ ID NO: 203062 - DNA, 25 bp, Probe Sequence
gccatttggtgataccgggggcttc

SEQ ID NO: 203063 - DNA, 25 bp, Probe Sequence
gcggttggctttgttgggtgagctt

SEQ ID NO: 203064 - DNA, 25 bp, Probe Sequence
gccatgatcaggcattggttgggga

SEQ ID NO: 203065 - DNA, 25 bp, Probe Sequence
gccaaaggctgcgaggttgtggtgt

SEQ ID NO: 203066 - DNA, 25 bp, Probe Sequence
gccacaggggcaagagggtggtttt

SEQ ID NO: 203067 - DNA, 25 bp, Probe Sequence
gccagggagacaagggagtcggtgt

SEQ ID NO: 203068 - DNA, 25 bp, Probe Sequence
gccagggttcgggagagcccttgtc

SEQ ID NO: 203069 - DNA, 25 bp, Probe Sequence
gccaggggaaggagtccctgcagtc

SEQ ID NO: 203070 - DNA, 25 bp, Probe Sequence
gccaagggaaggtgtgattctctga

SEQ ID NO: 203071 - DNA, 25 bp, Probe Sequence
gccaaggtcaagccagggaacttca

SEQ ID NO: 203072 - DNA, 25 bp, Probe Sequence
ccaaggccaggacgtggaggtggac

SEQ ID NO: 203073 - DNA, 25 bp, Probe Sequence
tctaacccagggcatggggttgggg

SEQ ID NO: 203074 - DNA, 25 bp, Probe Sequence
tccggccgttggctgagggtgggag

SEQ ID NO: 203075 - DNA, 25 bp, Probe Sequence
gccgaccggggcaagaagactgagg

SEQ ID NO: 203076 - DNA, 25 bp, Probe Sequence
gcctcccgggtggatgaagccaggc

SEQ ID NO: 203077 - DNA, 25 bp, Probe Sequence
gccacagcacctgggtatgacccag

SEQ ID NO: 203078 - DNA, 25 bp, Probe Sequence
gccacagtacttcagagacccatgt

SEQ ID NO: 203079 - DNA, 25 bp, Probe Sequence
gccaccattcctggaaaccacagtc

SEQ ID NO: 203080 - DNA, 25 bp, Probe Sequence
ccaatagtccagcaaacagccaggc

SEQ ID NO: 203081 - DNA, 25 bp, Probe Sequence
ccaatactcccactgaaaccagatc

SEQ ID NO: 203082 - DNA, 25 bp, Probe Sequence
ccaataatgccccagaaccaggacc

SEQ ID NO: 203083 - DNA, 25 bp, Probe Sequence
gccatcatcattccctagaaactgc

SEQ ID NO: 203084 - DNA, 25 bp, Probe Sequence
gccacagattggcccagaaactgca

SEQ ID NO: 203085 - DNA, 25 bp, Probe Sequence
gccacagcaggtgcgcaacatgacg

SEQ ID NO: 203086 - DNA, 25 bp, Probe Sequence
gccacagcaggtgcgcaacatgacg

SEQ ID NO: 203087 - DNA, 25 bp, Probe Sequence
gccacaatggtgcgcatgaatgtcc

SEQ ID NO: 203088 - DNA, 25 bp, Probe Sequence
gccacacagtgaagccatgattgcc

SEQ ID NO: 203089 - DNA, 25 bp, Probe Sequence
gccactcagtgcagctgcgattaac

SEQ ID NO: 203090 - DNA, 25 bp, Probe Sequence
gccacactggctttgaggtagcacg

SEQ ID NO: 203091 - DNA, 25 bp, Probe Sequence
gccaacgccgtcaatgagggcacct

SEQ ID NO: 203092 - DNA, 25 bp, Probe Sequence
gccaacgtcaacattgggagcctca

SEQ ID NO: 203093 - DNA, 25 bp, Probe Sequence
gccacacgttacaggagaagaccag

SEQ ID NO: 203094 - DNA, 25 bp, Probe Sequence
gccaaggttgtcctggaggcagaca

SEQ ID NO: 203095 - DNA, 25 bp, Probe Sequence
gccaaggccatgatgctgcgggcag

SEQ ID NO: 203096 - DNA, 25 bp, Probe Sequence
gccagaagactgattggagggccct

SEQ ID NO: 203097 - DNA, 25 bp, Probe Sequence
gccagaacatgtcttggtaccttgt

SEQ ID NO: 203098 - DNA, 25 bp, Probe Sequence
gccataacagatttaggtttctttc

SEQ ID NO: 203099 - DNA, 25 bp, Probe Sequence
gccacagaactagaggtcttctctt

SEQ ID NO: 203100 - DNA, 25 bp, Probe Sequence
gccacctactccaagagtaagttct

SEQ ID NO: 203101 - DNA, 25 bp, Probe Sequence
gccagcactaccctatagtttgttt

SEQ ID NO: 203102 - DNA, 25 bp, Probe Sequence
gccaccccacttaggtaggtgcttc

SEQ ID NO: 203103 - DNA, 25 bp, Probe Sequence
gccaccccactcttaatcagtggtg

SEQ ID NO: 203104 - DNA, 25 bp, Probe Sequence
gccaccctcaatataatcagcggac

SEQ ID NO: 203105 - DNA, 25 bp, Probe Sequence
gccaaactgcgtctcaacgtggacg

SEQ ID NO: 203106 - DNA, 25 bp, Probe Sequence
gccaagactggccaagccactgtgg

SEQ ID NO: 203107 - DNA, 25 bp, Probe Sequence
gccacaactggccagacttttggct

SEQ ID NO: 203108 - DNA, 25 bp, Probe Sequence
gccaatagtggctgagtttcgcact

SEQ ID NO: 203109 - DNA, 25 bp, Probe Sequence
ccaatggctggcagcttttcagcaa

SEQ ID NO: 203110 - DNA, 25 bp, Probe Sequence
gccaatggcaacagctttgccactc

SEQ ID NO: 203111 - DNA, 25 bp, Probe Sequence
gccaagcctgacacatttgacagtg

SEQ ID NO: 203112 - DNA, 25 bp, Probe Sequence
gccaagcctgacacatttgacagtg

SEQ ID NO: 203113 - DNA, 25 bp, Probe Sequence
ccaaggccacaggatacatgacagg

SEQ ID NO: 203114 - DNA, 25 bp, Probe Sequence
gccatgggctacgtggacgacacgc

SEQ ID NO: 203115 - DNA, 25 bp, Probe Sequence
gccagggtgacagtggagggcctct

SEQ ID NO: 203116 - DNA, 25 bp, Probe Sequence
gccaagttacagtcaatgggccgtg

SEQ ID NO: 203117 - DNA, 25 bp, Probe Sequence
gccatagttaaaaagtaccagctct

SEQ ID NO: 203118 - DNA, 25 bp, Probe Sequence
gccaaataaaaggtgtgcccagtct

SEQ ID NO: 203119 - DNA, 25 bp, Probe Sequence
gccaagataacaaagcgctgatcca

SEQ ID NO: 203120 - DNA, 25 bp, Probe Sequence
gccacagacttcaaaggcgtctaag

SEQ ID NO: 203121 - DNA, 25 bp, Probe Sequence
gccaagaccccaaggagatctacac

SEQ ID NO: 203122 - DNA, 25 bp, Probe Sequence
gccaagacgggcaaaagtctgacac

SEQ ID NO: 203123 - DNA, 25 bp, Probe Sequence
gccaaacgtgtaacaattatgccaa

SEQ ID NO: 203124 - DNA, 25 bp, Probe Sequence
gccaaacgtgtaacaattatgccaa

SEQ ID NO: 203125 - DNA, 25 bp, Probe Sequence
gccaaacctgtgtaggcattttata

SEQ ID NO: 203126 - DNA, 25 bp, Probe Sequence
gcctggccctgggagggatttcaga

SEQ ID NO: 203127 - DNA, 25 bp, Probe Sequence
gccgactccgtggaggaagtaaaga

SEQ ID NO: 203128 - DNA, 25 bp, Probe Sequence
gccagacccctggggctaacaaagt

SEQ ID NO: 203129 - DNA, 25 bp, Probe Sequence
gccaaaccagctcatttcaacaaag

SEQ ID NO: 203130 - DNA, 25 bp, Probe Sequence
gccaaaccagctcatttcaacaaag

SEQ ID NO: 203131 - DNA, 25 bp, Probe Sequence
gctcagtaaagtcttccatccaaaa

SEQ ID NO: 203132 - DNA, 25 bp, Probe Sequence
gccagaaaagagccttcccattgaa

SEQ ID NO: 203133 - DNA, 25 bp, Probe Sequence
gccaagaaatagacgctctccatcc

SEQ ID NO: 203134 - DNA, 25 bp, Probe Sequence
gccaagatatgtggactctctcctg

SEQ ID NO: 203135 - DNA, 25 bp, Probe Sequence
gccaaatacatgaagcttcatgcac

SEQ ID NO: 203136 - DNA, 25 bp, Probe Sequence
gccaacatcaccatcattgagcacc

SEQ ID NO: 203137 - DNA, 25 bp, Probe Sequence
gccaactaacattgcattgattcat

SEQ ID NO: 203138 - DNA, 25 bp, Probe Sequence
gccaagtacacttgctctttctgtg

SEQ ID NO: 203139 - DNA, 25 bp, Probe Sequence
gccaagatgacagattttgatcgtt

SEQ ID NO: 203140 - DNA, 25 bp, Probe Sequence
gccaagatgacagattttgatcgtt

SEQ ID NO: 203141 - DNA, 25 bp, Probe Sequence
gccaggtggcaattattaatggtgg

SEQ ID NO: 203142 - DNA, 25 bp, Probe Sequence
gccaatgggccatgtttattgtgga

SEQ ID NO: 203143 - DNA, 25 bp, Probe Sequence
gccactggtgcgtgtgtcttttgaa

SEQ ID NO: 203144 - DNA, 25 bp, Probe Sequence
gccaatggtgctttggatactcgga

SEQ ID NO: 203145 - DNA, 25 bp, Probe Sequence
gccaaggtgctagtgtatgagttgt

SEQ ID NO: 203146 - DNA, 25 bp, Probe Sequence
gccaagcttgtgagagctggttgct

SEQ ID NO: 203147 - DNA, 25 bp, Probe Sequence
gccaactgtggtgagctggtagcac

SEQ ID NO: 203148 - DNA, 25 bp, Probe Sequence
gccagacgctggggatgctggtaca

SEQ ID NO: 203149 - DNA, 25 bp, Probe Sequence
gccaacgtggggtcatcatcaacac

SEQ ID NO: 203150 - DNA, 25 bp, Probe Sequence
gccaacactgtctgtctcaaatact

SEQ ID NO: 203151 - DNA, 25 bp, Probe Sequence
gccaacactatatgtgcctcaagaa

SEQ ID NO: 203152 - DNA, 25 bp, Probe Sequence
gccaaccatgcagaggcccagagac

SEQ ID NO: 203153 - DNA, 25 bp, Probe Sequence
gccacaccagcagaggatgacgagg

SEQ ID NO: 203154 - DNA, 25 bp, Probe Sequence
gccacaccagcagaggatgacgagg

SEQ ID NO: 203155 - DNA, 25 bp, Probe Sequence
gccaacctgcagcgagagagaagag

SEQ ID NO: 203156 - DNA, 25 bp, Probe Sequence
gccaacttgagggaagggggcgtct

SEQ ID NO: 203157 - DNA, 25 bp, Probe Sequence
gccaacctcaggcaacgggtggagc

SEQ ID NO: 203158 - DNA, 25 bp, Probe Sequence
gccaggcctgtgggaacagggctgg

SEQ ID NO: 203159 - DNA, 25 bp, Probe Sequence
gccacccggggagtatgtggtggtg

SEQ ID NO: 203160 - DNA, 25 bp, Probe Sequence
gccacccaaggggaagcttcggagc

SEQ ID NO: 203161 - DNA, 25 bp, Probe Sequence
gccagccaaaaggtaccccgatggc

SEQ ID NO: 203162 - DNA, 25 bp, Probe Sequence
gccaccaaaagtaactaccttcgag

SEQ ID NO: 203163 - DNA, 25 bp, Probe Sequence
gccacatcaaaacgtttcactttct

SEQ ID NO: 203164 - DNA, 25 bp, Probe Sequence
ccaatcgaaaggattcttcttctca

SEQ ID NO: 203165 - DNA, 25 bp, Probe Sequence
ccaatctacaagtctctgtctttta

SEQ ID NO: 203166 - DNA, 25 bp, Probe Sequence
ccaataccaaggtctttatcattca

SEQ ID NO: 203167 - DNA, 25 bp, Probe Sequence
gccaaacactagctctgtattaatc

SEQ ID NO: 203168 - DNA, 25 bp, Probe Sequence
gccagaacaccagcttggagtcaac

SEQ ID NO: 203169 - DNA, 25 bp, Probe Sequence
gccagtaccaacgtatgctgagcac

SEQ ID NO: 203170 - DNA, 25 bp, Probe Sequence
gccagaacacaaagtcctgcagcag

SEQ ID NO: 203171 - DNA, 25 bp, Probe Sequence
gccaatagctaaagcccccagtatc

SEQ ID NO: 203172 - DNA, 25 bp, Probe Sequence
gccaaggctataacccagagcgtca

SEQ ID NO: 203173 - DNA, 25 bp, Probe Sequence
gccaatgggatcaccaaagcctgcc

SEQ ID NO: 203174 - DNA, 25 bp, Probe Sequence
gccaaggtgccagccaaagacagca

SEQ ID NO: 203175 - DNA, 25 bp, Probe Sequence
gccagaagatcctccacaagaaagg

SEQ ID NO: 203176 - DNA, 25 bp, Probe Sequence
gccagggctggagaacaagaaaggg

SEQ ID NO: 203177 - DNA, 25 bp, Probe Sequence
gccagggcatggttaaagtcaaggg

SEQ ID NO: 203178 - DNA, 25 bp, Probe Sequence
gccactgccagtgtcctaataaggg

SEQ ID NO: 203179 - DNA, 25 bp, Probe Sequence
gccacagtcctggacctgaagaagg

SEQ ID NO: 203180 - DNA, 25 bp, Probe Sequence
gccacaatcgggagtcagagccaga

SEQ ID NO: 203181 - DNA, 25 bp, Probe Sequence
gccaacagtggtgttcagagcctca

SEQ ID NO: 203182 - DNA, 25 bp, Probe Sequence
gccactgcagtgattgttagaggta

SEQ ID NO: 203183 - DNA, 25 bp, Probe Sequence
gccactcagatgagggctgtggtgc

SEQ ID NO: 203184 - DNA, 25 bp, Probe Sequence
gccactctgtatcaggctctttgct

SEQ ID NO: 203185 - DNA, 25 bp, Probe Sequence
gccactcataatgttgtcatttgaa

SEQ ID NO: 203186 - DNA, 25 bp, Probe Sequence
gccacttgattggtcagtacccaga

SEQ ID NO: 203187 - DNA, 25 bp, Probe Sequence
gccaattttcatgatgtgacccagg

SEQ ID NO: 203188 - DNA, 25 bp, Probe Sequence
gccaatgggccatctggaccaaagg

SEQ ID NO: 203189 - DNA, 25 bp, Probe Sequence
gccaatgggccatctggaccaaagg

SEQ ID NO: 203190 - DNA, 25 bp, Probe Sequence
gccaatgggccatctggaccaaagg

SEQ ID NO: 203191 - DNA, 25 bp, Probe Sequence
gccaaggaggaagggacagagctag

SEQ ID NO: 203192 - DNA, 25 bp, Probe Sequence
gccaagcaagaactcttgattacta

SEQ ID NO: 203193 - DNA, 25 bp, Probe Sequence
gccaagaggaattcgttacaaacat

SEQ ID NO: 203194 - DNA, 25 bp, Probe Sequence
gccaaagtatttgtatgaatcaaca

SEQ ID NO: 203195 - DNA, 25 bp, Probe Sequence
gccaaaatattgtgtatacatatat

SEQ ID NO: 203196 - DNA, 25 bp, Probe Sequence
gccaagaatcatagtttcattttat

SEQ ID NO: 203197 - DNA, 25 bp, Probe Sequence
ccaattgatcatgttagcttctatt

SEQ ID NO: 203198 - DNA, 25 bp, Probe Sequence
gccagattctatgtctaattgcata

SEQ ID NO: 203199 - DNA, 25 bp, Probe Sequence
gccacttcaaccaaaatcgatatca

SEQ ID NO: 203200 - DNA, 25 bp, Probe Sequence
gccaattcccataacagatagataa

SEQ ID NO: 203201 - DNA, 25 bp, Probe Sequence
gccaagaagcccaacaatggaaaac

SEQ ID NO: 203202 - DNA, 25 bp, Probe Sequence
gccaagtggaccacagctgtgcggc

SEQ ID NO: 203203 - DNA, 25 bp, Probe Sequence
gccaagcggaccagagctgtgcagc

SEQ ID NO: 203204 - DNA, 25 bp, Probe Sequence
gccaaggagacgtggctggcgcttc

SEQ ID NO: 203205 - DNA, 25 bp, Probe Sequence
gccaagatgaagcaggagcccgttc

SEQ ID NO: 203206 - DNA, 25 bp, Probe Sequence
gccaggaaggtgggaccgggttatg

SEQ ID NO: 203207 - DNA, 25 bp, Probe Sequence
gccagggaaggggccggagcctggg

SEQ ID NO: 203208 - DNA, 25 bp, Probe Sequence
gccgggaagaaatggggccacgagg

SEQ ID NO: 203209 - DNA, 25 bp, Probe Sequence
gccagggcaagaaataccgcccacg

SEQ ID NO: 203210 - DNA, 25 bp, Probe Sequence
gccaggtgcacctaaaggctgaccc

SEQ ID NO: 203211 - DNA, 25 bp, Probe Sequence
gccacctgactttcagatgggaaga

SEQ ID NO: 203212 - DNA, 25 bp, Probe Sequence
gccactctcgtcttcgatgtggagc

SEQ ID NO: 203213 - DNA, 25 bp, Probe Sequence
gccaattacatccgagctgggactc

SEQ ID NO: 203214 - DNA, 25 bp, Probe Sequence
gccagatctactgcaactggggcct

SEQ ID NO: 203215 - DNA, 25 bp, Probe Sequence
gccaactactgcgagggtgagtgcc

SEQ ID NO: 203216 - DNA, 25 bp, Probe Sequence
gccaactactgcgagggtgagtgcc

SEQ ID NO: 203217 - DNA, 25 bp, Probe Sequence
gccaactactgcgagggtgagtgcc

SEQ ID NO: 203218 - DNA, 25 bp, Probe Sequence
gccacctgcacaaagatggtgcctc

SEQ ID NO: 203219 - DNA, 25 bp, Probe Sequence
gccaccagatacacatgaggcccct

SEQ ID NO: 203220 - DNA, 25 bp, Probe Sequence
gccacagaaaccgatgctgagcccg

SEQ ID NO: 203221 - DNA, 25 bp, Probe Sequence
gccaaaagacatccagctagcacgc

SEQ ID NO: 203222 - DNA, 25 bp, Probe Sequence
gccaaaagacatccagctagcacgc

SEQ ID NO: 203223 - DNA, 25 bp, Probe Sequence
gccacaccaggtcgcagcaaatggc

SEQ ID NO: 203224 - DNA, 25 bp, Probe Sequence
gccacccagaagactgtggatggcc

SEQ ID NO: 203225 - DNA, 25 bp, Probe Sequence
gccagactttcaacgaggatgactc

SEQ ID NO: 203226 - DNA, 25 bp, Probe Sequence
gccagacttatgggtcaggagcccc

SEQ ID NO: 203227 - DNA, 25 bp, Probe Sequence
gccaactcattgggttgtagccaaa

SEQ ID NO: 203228 - DNA, 25 bp, Probe Sequence
gccaactttgttaagtggctcagaa

SEQ ID NO: 203229 - DNA, 25 bp, Probe Sequence
gccaccttggttccagtgctggaaa

SEQ ID NO: 203230 - DNA, 25 bp, Probe Sequence
gccaccttggttccagtgctggaaa

SEQ ID NO: 203231 - DNA, 25 bp, Probe Sequence
gccacctgggtcactggaggaccaa

SEQ ID NO: 203232 - DNA, 25 bp, Probe Sequence
gccacctgggtcactggaggaccaa

SEQ ID NO: 203233 - DNA, 25 bp, Probe Sequence
gccaccatggggacctgagagggaa

SEQ ID NO: 203234 - DNA, 25 bp, Probe Sequence
gccacattgagatgatccttacgga

SEQ ID NO: 203235 - DNA, 25 bp, Probe Sequence
gcctattgtgtgcttgttactggac

SEQ ID NO: 203236 - DNA, 25 bp, Probe Sequence
gccaattttgtgactgttaccatgt

SEQ ID NO: 203237 - DNA, 25 bp, Probe Sequence
gccaagtgtggtaatgttcacctgc

SEQ ID NO: 203238 - DNA, 25 bp, Probe Sequence
gccaatgggtggaatgatgccacct

SEQ ID NO: 203239 - DNA, 25 bp, Probe Sequence
gccaaggagtgagatagccagcgct

SEQ ID NO: 203240 - DNA, 25 bp, Probe Sequence
gccaagtggacagtctggccactgt

SEQ ID NO: 203241 - DNA, 25 bp, Probe Sequence
gccaaggacatcgacgggcacatgg

SEQ ID NO: 203242 - DNA, 25 bp, Probe Sequence
gccaagatgaatacacagccaatag

SEQ ID NO: 203243 - DNA, 25 bp, Probe Sequence
gccaacttctaaccgcaatagtgac

SEQ ID NO: 203244 - DNA, 25 bp, Probe Sequence
gccacagcttaaaactcaaaggacc

SEQ ID NO: 203245 - DNA, 25 bp, Probe Sequence
gccagccttggaaaatagtcatgga

SEQ ID NO: 203246 - DNA, 25 bp, Probe Sequence
gccacctttgatgccatttctaaga

SEQ ID NO: 203247 - DNA, 25 bp, Probe Sequence
gcctccgaaggagtatttacaagaa

SEQ ID NO: 203248 - DNA, 25 bp, Probe Sequence
gccaaagatcggatttgtccaaaat

SEQ ID NO: 203249 - DNA, 25 bp, Probe Sequence
gccaaattctggcctgctgtgtaca

SEQ ID NO: 203250 - DNA, 25 bp, Probe Sequence
gccaggtcttgaaggctgtccaacg

SEQ ID NO: 203251 - DNA, 25 bp, Probe Sequence
gccaggccccatggagggtatactg

SEQ ID NO: 203252 - DNA, 25 bp, Probe Sequence
gccacagccccaggagaggaatttg

SEQ ID NO: 203253 - DNA, 25 bp, Probe Sequence
gccagcccccaggtagaaacgtggg

SEQ ID NO: 203254 - DNA, 25 bp, Probe Sequence
gccacaccccaagagactagcagtg

SEQ ID NO: 203255 - DNA, 25 bp, Probe Sequence
gccaagcccgaaggacctagagtca

SEQ ID NO: 203256 - DNA, 25 bp, Probe Sequence
gccaaggcgggcagaccatgaggtc

SEQ ID NO: 203257 - DNA, 25 bp, Probe Sequence
gccaaggcgggcagatcacaaggtc

SEQ ID NO: 203258 - DNA, 25 bp, Probe Sequence
gccaaggcgggcagatcacaaagtc

SEQ ID NO: 203259 - DNA, 25 bp, Probe Sequence
gccaggggggacctagagcaactta

SEQ ID NO: 203260 - DNA, 25 bp, Probe Sequence
gccagagtgggctgggaccagactt

SEQ ID NO: 203261 - DNA, 25 bp, Probe Sequence
gccagcagtacgtggtagccacaat

SEQ ID NO: 203262 - DNA, 25 bp, Probe Sequence
gccagcctacaggaggaaaagcaag

SEQ ID NO: 203263 - DNA, 25 bp, Probe Sequence
gccagcctacaggaggaaaagcaag

SEQ ID NO: 203264 - DNA, 25 bp, Probe Sequence
gccacacatccagattaaaagccag

SEQ ID NO: 203265 - DNA, 25 bp, Probe Sequence
gccaagcatccagaccacaaatgca

SEQ ID NO: 203266 - DNA, 25 bp, Probe Sequence
gccaagatccactaccggaagaaga

SEQ ID NO: 203267 - DNA, 25 bp, Probe Sequence
gccaagctgtcctgggctaagaaga

SEQ ID NO: 203268 - DNA, 25 bp, Probe Sequence
gccaagatgttcatgtagtattgaa

SEQ ID NO: 203269 - DNA, 25 bp, Probe Sequence
gcccatggactcacttttgtaacaa

SEQ ID NO: 203270 - DNA, 25 bp, Probe Sequence
gccactgtactgcagcttgggtaac

SEQ ID NO: 203271 - DNA, 25 bp, Probe Sequence
gccaagtgcaggcatctcggggata

SEQ ID NO: 203272 - DNA, 25 bp, Probe Sequence
gccaagtgcaggaaccggaggaagg

SEQ ID NO: 203273 - DNA, 25 bp, Probe Sequence
gccagagtcagggggccggtgaagg

SEQ ID NO: 203274 - DNA, 25 bp, Probe Sequence
gccaaatccggagccaagagaaatg

SEQ ID NO: 203275 - DNA, 25 bp, Probe Sequence
gccaaatctcgccaagtaggaaagg

SEQ ID NO: 203276 - DNA, 25 bp, Probe Sequence
gccagaacaagccaaggagccaaga

SEQ ID NO: 203277 - DNA, 25 bp, Probe Sequence
gccaagccagatctacgagataacc

SEQ ID NO: 203278 - DNA, 25 bp, Probe Sequence
gccaaccatatccatcaacaaaaca

SEQ ID NO: 203279 - DNA, 25 bp, Probe Sequence
gccacagtagatgtccacataataa

SEQ ID NO: 203280 - DNA, 25 bp, Probe Sequence
gccacagaggatcacccagaaacca

SEQ ID NO: 203281 - DNA, 25 bp, Probe Sequence
gccacatacgtttccctgaaacctt

SEQ ID NO: 203282 - DNA, 25 bp, Probe Sequence
gccagaaagtgttcccaaaacctga

SEQ ID NO: 203283 - DNA, 25 bp, Probe Sequence
gccaaatttgtagtgccaacatttt

SEQ ID NO: 203284 - DNA, 25 bp, Probe Sequence
gccccaattgaacgccaaattgggc

SEQ ID NO: 203285 - DNA, 25 bp, Probe Sequence
gacccattttactctggataagggc

SEQ ID NO: 203286 - DNA, 25 bp, Probe Sequence
gccctctttaccactggaactggag

SEQ ID NO: 203287 - DNA, 25 bp, Probe Sequence
gccacactgacttccattttaagct

SEQ ID NO: 203288 - DNA, 25 bp, Probe Sequence
gccaagtgcactgaattttggtgtc

SEQ ID NO: 203289 - DNA, 25 bp, Probe Sequence
gccaagtgcattaacaccgatggtt

SEQ ID NO: 203290 - DNA, 25 bp, Probe Sequence
gccaacctatgttacacgtgagatt

SEQ ID NO: 203291 - DNA, 25 bp, Probe Sequence
gccaaactctttcccagatgacaat

SEQ ID NO: 203292 - DNA, 25 bp, Probe Sequence
gccacagagcctattccaagagtct

SEQ ID NO: 203293 - DNA, 25 bp, Probe Sequence
gccaagagcagtttatgtgccagga

SEQ ID NO: 203294 - DNA, 25 bp, Probe Sequence
gccaagccaggaaacaccaagatgg

SEQ ID NO: 203295 - DNA, 25 bp, Probe Sequence
gccaagaggtgcgagaaggccgagg

SEQ ID NO: 203296 - DNA, 25 bp, Probe Sequence
gccaaatggatccacgaggccaaag

SEQ ID NO: 203297 - DNA, 25 bp, Probe Sequence
gccaaatagatccagcagaagaaag

SEQ ID NO: 203298 - DNA, 25 bp, Probe Sequence
gccaagacacatcagggaatacaga

SEQ ID NO: 203299 - DNA, 25 bp, Probe Sequence
gccaagcacacccaggagaactgtg

SEQ ID NO: 203300 - DNA, 25 bp, Probe Sequence
gccaaagcatcctggcaaagctgcc

SEQ ID NO: 203301 - DNA, 25 bp, Probe Sequence
gccacacgtgcctggtcaggctggc

SEQ ID NO: 203302 - DNA, 25 bp, Probe Sequence
gccatacagggctgttgcccaggcc

SEQ ID NO: 203303 - DNA, 25 bp, Probe Sequence
gccaaggagacttttgcatccaccg

SEQ ID NO: 203304 - DNA, 25 bp, Probe Sequence
gccagggaatgttcttcttccactc

SEQ ID NO: 203305 - DNA, 25 bp, Probe Sequence
gccagggaatggctccttataccaa

SEQ ID NO: 203306 - DNA, 25 bp, Probe Sequence
gccagcggaaggttcattcgcatag

SEQ ID NO: 203307 - DNA, 25 bp, Probe Sequence
gccaaggaagacttcttggcatctg

SEQ ID NO: 203308 - DNA, 25 bp, Probe Sequence
gccacattaaggcctctctggcagc

SEQ ID NO: 203309 - DNA, 25 bp, Probe Sequence
gccacgtatagtcctagctgacgcc

SEQ ID NO: 203310 - DNA, 25 bp, Probe Sequence
gccatctggcaggtggctacgacgc

SEQ ID NO: 203311 - DNA, 25 bp, Probe Sequence
gccacagaatgcggcctagcaaggc

SEQ ID NO: 203312 - DNA, 25 bp, Probe Sequence
gccaaagcatcagcaccagaacgca

SEQ ID NO: 203313 - DNA, 25 bp, Probe Sequence
gccagaagtgcagagtcagagtcct

SEQ ID NO: 203314 - DNA, 25 bp, Probe Sequence
gccaggactgcaaggctctgcagcc

SEQ ID NO: 203315 - DNA, 25 bp, Probe Sequence
gccaaacttctggcttgtgctcgga

SEQ ID NO: 203316 - DNA, 25 bp, Probe Sequence
gccatacatttcacttgattctgtg

SEQ ID NO: 203317 - DNA, 25 bp, Probe Sequence
gccacagttatcactgcttatctct

SEQ ID NO: 203318 - DNA, 25 bp, Probe Sequence
gccacatttgcaaccttggccatct

SEQ ID NO: 203319 - DNA, 25 bp, Probe Sequence
gccacacagacacactaggcctgtg

SEQ ID NO: 203320 - DNA, 25 bp, Probe Sequence
gcgcaaaatcaaacaaggcctgggc

SEQ ID NO: 203321 - DNA, 25 bp, Probe Sequence
gccaaacgcagagcaagggctgtgt

SEQ ID NO: 203322 - DNA, 25 bp, Probe Sequence
gccaaatctgggacaagcgagtttt

SEQ ID NO: 203323 - DNA, 25 bp, Probe Sequence
gccaacagcatgggtaagggctact

SEQ ID NO: 203324 - DNA, 25 bp, Probe Sequence
gccaacgagcggaaaatggcagaca

SEQ ID NO: 203325 - DNA, 25 bp, Probe Sequence
gccaagcagacgaggactacagcca

SEQ ID NO: 203326 - DNA, 25 bp, Probe Sequence
gccaaccagatgaggagctcaagcc

SEQ ID NO: 203327 - DNA, 25 bp, Probe Sequence
gccacccaagggcaccacatgtgcc

SEQ ID NO: 203328 - DNA, 25 bp, Probe Sequence
gaatcccgggccaagaaattccagc

SEQ ID NO: 203329 - DNA, 25 bp, Probe Sequence
gaaggccggacagagcaatcttccc

SEQ ID NO: 203330 - DNA, 25 bp, Probe Sequence
gggaccggataacaatttcacacag

SEQ ID NO: 203331 - DNA, 25 bp, Probe Sequence
gccgtctctggatcggaatttacct

SEQ ID NO: 203332 - DNA, 25 bp, Probe Sequence
gccacattcggagcagggttttcag

SEQ ID NO: 203333 - DNA, 25 bp, Probe Sequence
gccacagtcttatcaagtatcctat

SEQ ID NO: 203334 - DNA, 25 bp, Probe Sequence
gccacagactttgaagaaacttttg

SEQ ID NO: 203335 - DNA, 25 bp, Probe Sequence
gccatagaagtttgcaagaagttta

SEQ ID NO: 203336 - DNA, 25 bp, Probe Sequence
gccataattgttccgaatttctcca

SEQ ID NO: 203337 - DNA, 25 bp, Probe Sequence
gctgtacctttgagaacttcctagg

SEQ ID NO: 203338 - DNA, 25 bp, Probe Sequence
gctatttgtttgcagaacacccaag

SEQ ID NO: 203339 - DNA, 25 bp, Probe Sequence
gacactgtggttgcaaaacccacgg

SEQ ID NO: 203340 - DNA, 25 bp, Probe Sequence
gccactgtgggcatcagaggccctc

SEQ ID NO: 203341 - DNA, 25 bp, Probe Sequence
gccacggaagactggtctgcagctc

SEQ ID NO: 203342 - DNA, 25 bp, Probe Sequence
gccacggaagactggtctgcagctc

SEQ ID NO: 203343 - DNA, 25 bp, Probe Sequence
gccacggaagactggtctgcagctc

SEQ ID NO: 203344 - DNA, 25 bp, Probe Sequence
gccactgaactgtcaggcgtctgac

SEQ ID NO: 203345 - DNA, 25 bp, Probe Sequence
gccaagcaactgtaggcagctcatg

SEQ ID NO: 203346 - DNA, 25 bp, Probe Sequence
gccaagagacgcaagacgatgcagg

SEQ ID NO: 203347 - DNA, 25 bp, Probe Sequence
gccaagcaaggccagatggatgctg

SEQ ID NO: 203348 - DNA, 25 bp, Probe Sequence
gccaactatggccatgtgtacgcgg

SEQ ID NO: 203349 - DNA, 25 bp, Probe Sequence
gccaaatatgacctgttacaaagag

SEQ ID NO: 203350 - DNA, 25 bp, Probe Sequence
gcgcaatattcaccgtatataaaaa

SEQ ID NO: 203351 - DNA, 25 bp, Probe Sequence
gccactatcatctagggcaataaaa

SEQ ID NO: 203352 - DNA, 25 bp, Probe Sequence
gccactatctccattgaagctgaaa

SEQ ID NO: 203353 - DNA, 25 bp, Probe Sequence
gccacttcccagtgaactacatact

SEQ ID NO: 203354 - DNA, 25 bp, Probe Sequence
tccacttcctaatactataccttcg

SEQ ID NO: 203355 - DNA, 25 bp, Probe Sequence
gccacttccttattcctgtatggta

SEQ ID NO: 203356 - DNA, 25 bp, Probe Sequence
gccactttgcaaaaactgtcaggag

SEQ ID NO: 203357 - DNA, 25 bp, Probe Sequence
gccacatttgccatatcgattctgc

SEQ ID NO: 203358 - DNA, 25 bp, Probe Sequence
gccagtatgtctttcattgctttgc

SEQ ID NO: 203359 - DNA, 25 bp, Probe Sequence
gccaagattgctctattgcattcca

SEQ ID NO: 203360 - DNA, 25 bp, Probe Sequence
gccaaattggcattttgttctgcaa

SEQ ID NO: 203361 - DNA, 25 bp, Probe Sequence
gccaaattcacagtttttatctaaa

SEQ ID NO: 203362 - DNA, 25 bp, Probe Sequence
gccaaatacattttgtccttctaaa

SEQ ID NO: 203363 - DNA, 25 bp, Probe Sequence
gccggaactggttaccaaggacaag

SEQ ID NO: 203364 - DNA, 25 bp, Probe Sequence
gccgtaactggaatcttcataggtc

SEQ ID NO: 203365 - DNA, 25 bp, Probe Sequence
gccagtaacttgttttatagtggtc

SEQ ID NO: 203366 - DNA, 25 bp, Probe Sequence
gccaggaggcttcgttttagtggaa

SEQ ID NO: 203367 - DNA, 25 bp, Probe Sequence
gccaggggtaccaagtgtttgcgca

SEQ ID NO: 203368 - DNA, 25 bp, Probe Sequence
gccaggggtaccaagtgtttgcgca

SEQ ID NO: 203369 - DNA, 25 bp, Probe Sequence
gccaggggtaccaagtgtttgcgca

SEQ ID NO: 203370 - DNA, 25 bp, Probe Sequence
gccaggggatttggggctttcttga

SEQ ID NO: 203371 - DNA, 25 bp, Probe Sequence
gccagtaaggttccttgcattctgc

SEQ ID NO: 203372 - DNA, 25 bp, Probe Sequence
gccagatgtaggcttattctttgga

SEQ ID NO: 203373 - DNA, 25 bp, Probe Sequence
gccgaatgagggtaggcctttggtt

SEQ ID NO: 203374 - DNA, 25 bp, Probe Sequence
gcgcggatcatgatgccaacctctt

SEQ ID NO: 203375 - DNA, 25 bp, Probe Sequence
gcgattgattcagtgcccacaatgt

SEQ ID NO: 203376 - DNA, 25 bp, Probe Sequence
gcgatatagtgaggccccatctcaa

SEQ ID NO: 203377 - DNA, 25 bp, Probe Sequence
gccactggtgatacctcacattcaa

SEQ ID NO: 203378 - DNA, 25 bp, Probe Sequence
gccacagcgtgcatgtctgcacaag

SEQ ID NO: 203379 - DNA, 25 bp, Probe Sequence
gccatgagcttcgttctacgtgaac

SEQ ID NO: 203380 - DNA, 25 bp, Probe Sequence
gccacagctgctgtcattgacttaa

SEQ ID NO: 203381 - DNA, 25 bp, Probe Sequence
gcagaatttgcgatgtacttaaact

SEQ ID NO: 203382 - DNA, 25 bp, Probe Sequence
gccagcatttggatttctttaaaac

SEQ ID NO: 203383 - DNA, 25 bp, Probe Sequence
gccacttaaatcattcttaacagaa

SEQ ID NO: 203384 - DNA, 25 bp, Probe Sequence
gccactttacaagttctttttgcat

SEQ ID NO: 203385 - DNA, 25 bp, Probe Sequence
gccactttacgcaactcaatttctg

SEQ ID NO: 203386 - DNA, 25 bp, Probe Sequence
gccacttttcggatagcaatcttgg

SEQ ID NO: 203387 - DNA, 25 bp, Probe Sequence
gccattgtttgcctttaattggggg

SEQ ID NO: 203388 - DNA, 25 bp, Probe Sequence
gcctccagacagctaatactcgggg

SEQ ID NO: 203389 - DNA, 25 bp, Probe Sequence
gcctccaaggagtaagacccctgga

SEQ ID NO: 203390 - DNA, 25 bp, Probe Sequence
gccccaaggccttagcttccttggc

SEQ ID NO: 203391 - DNA, 25 bp, Probe Sequence
gccccaaggccttagcttccttggc

SEQ ID NO: 203392 - DNA, 25 bp, Probe Sequence
gcctcaagcttcctaatcttcttgg

SEQ ID NO: 203393 - DNA, 25 bp, Probe Sequence
gccatgcagtttggacaacctttgg

SEQ ID NO: 203394 - DNA, 25 bp, Probe Sequence
gccagcacctaggacttcgagttgg

SEQ ID NO: 203395 - DNA, 25 bp, Probe Sequence
gccagctcaaagcatgtttggcttg

SEQ ID NO: 203396 - DNA, 25 bp, Probe Sequence
gccagtctgaacctgaggttgcttt

SEQ ID NO: 203397 - DNA, 25 bp, Probe Sequence
gccagtttagggcagtagctgcttt

SEQ ID NO: 203398 - DNA, 25 bp, Probe Sequence
gccagtcctagctgcacagggcagc

SEQ ID NO: 203399 - DNA, 25 bp, Probe Sequence
gccatgtcttaggtgcagctgtgcc

SEQ ID NO: 203400 - DNA, 25 bp, Probe Sequence
gcgaactgtagagtgcagggacccc

SEQ ID NO: 203401 - DNA, 25 bp, Probe Sequence
gccagaattggactgctgtggactc

SEQ ID NO: 203402 - DNA, 25 bp, Probe Sequence
gcgcataaaggaatggtggactttc

SEQ ID NO: 203403 - DNA, 25 bp, Probe Sequence
gccaaaaggtatgggggcttcatga

SEQ ID NO: 203404 - DNA, 25 bp, Probe Sequence
gccagtaaggtttaaggttatggag

SEQ ID NO: 203405 - DNA, 25 bp, Probe Sequence
gccagtgaattaataaggccttttc

SEQ ID NO: 203406 - DNA, 25 bp, Probe Sequence
gccactgtatgtataaagccattga

SEQ ID NO: 203407 - DNA, 25 bp, Probe Sequence
gccactgtttacggagagccagaaa

SEQ ID NO: 203408 - DNA, 25 bp, Probe Sequence
gccatgtttttagaggccataccaa

SEQ ID NO: 203409 - DNA, 25 bp, Probe Sequence
gccagcactagcctaggaggtttta

SEQ ID NO: 203410 - DNA, 25 bp, Probe Sequence
gccagatcatgaggtcaggaggtcg

SEQ ID NO: 203411 - DNA, 25 bp, Probe Sequence
gccagacatacgctggagccaggag

SEQ ID NO: 203412 - DNA, 25 bp, Probe Sequence
gccaaaatgtaaagaccatcgagac

SEQ ID NO: 203413 - DNA, 25 bp, Probe Sequence
gccaccattggagtggacttcgaga

SEQ ID NO: 203414 - DNA, 25 bp, Probe Sequence
gccaccagtggacctagcctggatg

SEQ ID NO: 203415 - DNA, 25 bp, Probe Sequence
gccactcacggacaagagctggaga

SEQ ID NO: 203416 - DNA, 25 bp, Probe Sequence
gccactctgggtcagagagctctgg

SEQ ID NO: 203417 - DNA, 25 bp, Probe Sequence
gccactgctgtggtcaggaattccc

SEQ ID NO: 203418 - DNA, 25 bp, Probe Sequence
gccactgtgtgaaactgtatctgcc

SEQ ID NO: 203419 - DNA, 25 bp, Probe Sequence
gccagtgaggtcccagtagtctaaa

SEQ ID NO: 203420 - DNA, 25 bp, Probe Sequence
gccaggggtggccatgtaagtccca

SEQ ID NO: 203421 - DNA, 25 bp, Probe Sequence
gccaggtggtatcttaggccatgcc

SEQ ID NO: 203422 - DNA, 25 bp, Probe Sequence
gccagtgggagatgttagactcatg

SEQ ID NO: 203423 - DNA, 25 bp, Probe Sequence
gccagtgaaggtttgaagagtataa

SEQ ID NO: 203424 - DNA, 25 bp, Probe Sequence
gccagtcagagtgttagcagcagct

SEQ ID NO: 203425 - DNA, 25 bp, Probe Sequence
gccatggatgaacttgtagcagcgg

SEQ ID NO: 203426 - DNA, 25 bp, Probe Sequence
gccacagtggaaattctgccgagcc

SEQ ID NO: 203427 - DNA, 25 bp, Probe Sequence
gccacgatgagatgttctccgacat

SEQ ID NO: 203428 - DNA, 25 bp, Probe Sequence
gccagggctgactccttgaaatttc

SEQ ID NO: 203429 - DNA, 25 bp, Probe Sequence
gccagaggccattacctgaaatttc

SEQ ID NO: 203430 - DNA, 25 bp, Probe Sequence
gccagaaggacaacatatgaagctt

SEQ ID NO: 203431 - DNA, 25 bp, Probe Sequence
gccagacagtatacccaaactttta

SEQ ID NO: 203432 - DNA, 25 bp, Probe Sequence
gccagatcagtatcccacatgggag

SEQ ID NO: 203433 - DNA, 25 bp, Probe Sequence
gccaaatgggccccactgagcaagg

SEQ ID NO: 203434 - DNA, 25 bp, Probe Sequence
gccaactatgcagcccacaagaagg

SEQ ID NO: 203435 - DNA, 25 bp, Probe Sequence
gccaaaatgacgaacacaaagggaa

SEQ ID NO: 203436 - DNA, 25 bp, Probe Sequence
gccaaaatatctagctgcacaaagc

SEQ ID NO: 203437 - DNA, 25 bp, Probe Sequence
gccacaagttctatcacagcaactc

SEQ ID NO: 203438 - DNA, 25 bp, Probe Sequence
gccaaagtgtcttcataccaaatta

SEQ ID NO: 203439 - DNA, 25 bp, Probe Sequence
gccagaaggactgacaccacagatg

SEQ ID NO: 203440 - DNA, 25 bp, Probe Sequence
gccacaggagacattactatagcat

SEQ ID NO: 203441 - DNA, 25 bp, Probe Sequence
gccacagaaggcatcatattgattg

SEQ ID NO: 203442 - DNA, 25 bp, Probe Sequence
gccacattaggatccagtcatctgt

SEQ ID NO: 203443 - DNA, 25 bp, Probe Sequence
gcgagattgtgcgaaccatgctccg

SEQ ID NO: 203444 - DNA, 25 bp, Probe Sequence
gccatgtgctggtaacgcatgcctg

SEQ ID NO: 203445 - DNA, 25 bp, Probe Sequence
gccatggcggattctgagcgcctct

SEQ ID NO: 203446 - DNA, 25 bp, Probe Sequence
gccagacatggtggctcacacctgt

SEQ ID NO: 203447 - DNA, 25 bp, Probe Sequence
gccagcagctggggctctagaagtc

SEQ ID NO: 203448 - DNA, 25 bp, Probe Sequence
gccagcagtggtctttgaagcacct

SEQ ID NO: 203449 - DNA, 25 bp, Probe Sequence
gccacagagaggcctttgttgtact

SEQ ID NO: 203450 - DNA, 25 bp, Probe Sequence
gccacacagtgcattgttttttcta

SEQ ID NO: 203451 - DNA, 25 bp, Probe Sequence
gccataaattttgtcttgtactcag

SEQ ID NO: 203452 - DNA, 25 bp, Probe Sequence
gcctgaccttttgcttagttgacag

SEQ ID NO: 203453 - DNA, 25 bp, Probe Sequence
gccataccgtttgattgtttgactt

SEQ ID NO: 203454 - DNA, 25 bp, Probe Sequence
gccacaccagtgaatgccttttata

SEQ ID NO: 203455 - DNA, 25 bp, Probe Sequence
gccactccagagaacctcttgggag

SEQ ID NO: 203456 - DNA, 25 bp, Probe Sequence
gccagccaagtcttcatttggggcc

SEQ ID NO: 203457 - DNA, 25 bp, Probe Sequence
gccatctgctaagaagactggggct

SEQ ID NO: 203458 - DNA, 25 bp, Probe Sequence
gccacgtggagcctagagtgagggc

SEQ ID NO: 203459 - DNA, 25 bp, Probe Sequence
gccacgatggtggtgaggaaccgcc

SEQ ID NO: 203460 - DNA, 25 bp, Probe Sequence
gccacggctggtgagaaccccagca

SEQ ID NO: 203461 - DNA, 25 bp, Probe Sequence
gccagaattgtcatagaaccccaga

SEQ ID NO: 203462 - DNA, 25 bp, Probe Sequence
gccaacttgagcaatctgaaggccc

SEQ ID NO: 203463 - DNA, 25 bp, Probe Sequence
gccacactcagccacacatgaatgg

SEQ ID NO: 203464 - DNA, 25 bp, Probe Sequence
gccacattcagtcgccacaagaaac

SEQ ID NO: 203465 - DNA, 25 bp, Probe Sequence
gccacactcatgcttacatagaaag

SEQ ID NO: 203466 - DNA, 25 bp, Probe Sequence
gccacagctctgtcattacaggaca

SEQ ID NO: 203467 - DNA, 25 bp, Probe Sequence
gccactccagaaatccaggagattg

SEQ ID NO: 203468 - DNA, 25 bp, Probe Sequence
gccacagccaagtacaagtgcaaat

SEQ ID NO: 203469 - DNA, 25 bp, Probe Sequence
gccaggccaaggacgagctgtagag

SEQ ID NO: 203470 - DNA, 25 bp, Probe Sequence
gccagcggaccatcggctggcagag

SEQ ID NO: 203471 - DNA, 25 bp, Probe Sequence
gccacggccatgagggctggagacc

SEQ ID NO: 203472 - DNA, 25 bp, Probe Sequence
gccacaaccatggggtgtgcaacca

SEQ ID NO: 203473 - DNA, 25 bp, Probe Sequence
gccagaaccagcgggtggccttagg

SEQ ID NO: 203474 - DNA, 25 bp, Probe Sequence
gccacaagatcagggcagggcttta

SEQ ID NO: 203475 - DNA, 25 bp, Probe Sequence
gccatcaggaactcagaggtatgaa

SEQ ID NO: 203476 - DNA, 25 bp, Probe Sequence
gccacagtgacctgcgcaatgttta

SEQ ID NO: 203477 - DNA, 25 bp, Probe Sequence
gccacagtgacctgcgcaatgttta

SEQ ID NO: 203478 - DNA, 25 bp, Probe Sequence
gccacagtgacctgcgcaatgttta

SEQ ID NO: 203479 - DNA, 25 bp, Probe Sequence
gccacagtgacctgcgcaatgttta

SEQ ID NO: 203480 - DNA, 25 bp, Probe Sequence
gccacaggaaactacatcattatta

SEQ ID NO: 203481 - DNA, 25 bp, Probe Sequence
gccaaagaatcagtgaatgcagctt

SEQ ID NO: 203482 - DNA, 25 bp, Probe Sequence
gccaaataaacaggatcagcgcttt

SEQ ID NO: 203483 - DNA, 25 bp, Probe Sequence
gccaaataaacaggatcagcgcttt

SEQ ID NO: 203484 - DNA, 25 bp, Probe Sequence
gccaccatgcaatccagtgaggctt

SEQ ID NO: 203485 - DNA, 25 bp, Probe Sequence
gccacagccctatgctgtgcatggc

SEQ ID NO: 203486 - DNA, 25 bp, Probe Sequence
gccacatcttcttggcatctgggga

SEQ ID NO: 203487 - DNA, 25 bp, Probe Sequence
gccactacatcgttatctggaggca

SEQ ID NO: 203488 - DNA, 25 bp, Probe Sequence
gccagctaattttatcaaagcagca

SEQ ID NO: 203489 - DNA, 25 bp, Probe Sequence
gccaccattggattacacaatgaca

SEQ ID NO: 203490 - DNA, 25 bp, Probe Sequence
gccacttgctaatacagctctgaca

SEQ ID NO: 203491 - DNA, 25 bp, Probe Sequence
gccacttgcagtcaacaacgacacc

SEQ ID NO: 203492 - DNA, 25 bp, Probe Sequence
gccgcttcattcaagaacctacatc

SEQ ID NO: 203493 - DNA, 25 bp, Probe Sequence
gcctttttacagtcacctgaacaat

SEQ ID NO: 203494 - DNA, 25 bp, Probe Sequence
gcctcccagtactgacctgaaaact

SEQ ID NO: 203495 - DNA, 25 bp, Probe Sequence
gcctcggcgtactggttgtaggcgt

SEQ ID NO: 203496 - DNA, 25 bp, Probe Sequence
gcccgggacagttggtgtttggccg

SEQ ID NO: 203497 - DNA, 25 bp, Probe Sequence
gccactgggggtggctgttcgggac

SEQ ID NO: 203498 - DNA, 25 bp, Probe Sequence
gccactgaaggggagcttcccggag

SEQ ID NO: 203499 - DNA, 25 bp, Probe Sequence
gccagctaaggggtggggctgcggg

SEQ ID NO: 203500 - DNA, 25 bp, Probe Sequence
gccaccagttcgagggggcggagga

SEQ ID NO: 203501 - DNA, 25 bp, Probe Sequence
gccacgtgttctgaggggaagtgcc

SEQ ID NO: 203502 - DNA, 25 bp, Probe Sequence
gccagctgtaccagggggagaggct

SEQ ID NO: 203503 - DNA, 25 bp, Probe Sequence
gccactgtggcgtgggtggcagagg

SEQ ID NO: 203504 - DNA, 25 bp, Probe Sequence
gcctctttgggacggggatggtttg

SEQ ID NO: 203505 - DNA, 25 bp, Probe Sequence
gccttttggagggagggctggccca

SEQ ID NO: 203506 - DNA, 25 bp, Probe Sequence
gccaaactggagactcggggcagcc

SEQ ID NO: 203507 - DNA, 25 bp, Probe Sequence
gccagaactgagcgctgtggggagc

SEQ ID NO: 203508 - DNA, 25 bp, Probe Sequence
gccaggactgatgagattggcgtgg

SEQ ID NO: 203509 - DNA, 25 bp, Probe Sequence
gccatggacatctcagagggccgct

SEQ ID NO: 203510 - DNA, 25 bp, Probe Sequence
gccatgaatcaagccagggccgttg

SEQ ID NO: 203511 - DNA, 25 bp, Probe Sequence
gccagaaaaagttggtgcccctgaa

SEQ ID NO: 203512 - DNA, 25 bp, Probe Sequence
gccaggaaacgatttgggcctctgt

SEQ ID NO: 203513 - DNA, 25 bp, Probe Sequence
gccagttactcagattctggactct

SEQ ID NO: 203514 - DNA, 25 bp, Probe Sequence
gccttgaccgcagatttcggaaact

SEQ ID NO: 203515 - DNA, 25 bp, Probe Sequence
gccagctaccgggtttccaaaagct

SEQ ID NO: 203516 - DNA, 25 bp, Probe Sequence
gccactgcacacggctgtttacaac

SEQ ID NO: 203517 - DNA, 25 bp, Probe Sequence
gccagcaaagccgatgtccagaaac

SEQ ID NO: 203518 - DNA, 25 bp, Probe Sequence
gccagaaatgtgaagtgctagctga

SEQ ID NO: 203519 - DNA, 25 bp, Probe Sequence
gccagccaatgtgggcgtcactaaa

SEQ ID NO: 203520 - DNA, 25 bp, Probe Sequence
gccagcgagaagcgcgtcaagaaga

SEQ ID NO: 203521 - DNA, 25 bp, Probe Sequence
gccagcgaaagatgccactcagtat

SEQ ID NO: 203522 - DNA, 25 bp, Probe Sequence
gccactggataatgctgagatagaa

SEQ ID NO: 203523 - DNA, 25 bp, Probe Sequence
gccacgtgtcagtacagagaaacaa

SEQ ID NO: 203524 - DNA, 25 bp, Probe Sequence
gccacctgatgactaatgacaacaa

SEQ ID NO: 203525 - DNA, 25 bp, Probe Sequence
gccagtcttgcaatcaggtcagaaa

SEQ ID NO: 203526 - DNA, 25 bp, Probe Sequence
gccagtccttatgtgataaactaag

SEQ ID NO: 203527 - DNA, 25 bp, Probe Sequence
gccatggcgtatatgttcaaattca

SEQ ID NO: 203528 - DNA, 25 bp, Probe Sequence
gccaggcgttttctgagcatacctg

SEQ ID NO: 203529 - DNA, 25 bp, Probe Sequence
gccatggcagtgacatgtttgtcat

SEQ ID NO: 203530 - DNA, 25 bp, Probe Sequence
gccacagagttcattgctctcagta

SEQ ID NO: 203531 - DNA, 25 bp, Probe Sequence
gccacttatttattcatctcaggaa

SEQ ID NO: 203532 - DNA, 25 bp, Probe Sequence
gccactttgtaatattcagagagca

SEQ ID NO: 203533 - DNA, 25 bp, Probe Sequence
gccatggttgcttgttatccgggca

SEQ ID NO: 203534 - DNA, 25 bp, Probe Sequence
gccaggtagtgtagtatcaggagtg

SEQ ID NO: 203535 - DNA, 25 bp, Probe Sequence
gccagcaatcagtgatgtatctgag

SEQ ID NO: 203536 - DNA, 25 bp, Probe Sequence
gccagaatcaatttcctcaagccag

SEQ ID NO: 203537 - DNA, 25 bp, Probe Sequence
gccgggcagattacctgaggtcagg

SEQ ID NO: 203538 - DNA, 25 bp, Probe Sequence
gcacgggagaaatccacgtaacctt

SEQ ID NO: 203539 - DNA, 25 bp, Probe Sequence
gatcgggaaaaaattcggcctcctg

SEQ ID NO: 203540 - DNA, 25 bp, Probe Sequence
gccagggccgaagtttaggcccctg

SEQ ID NO: 203541 - DNA, 25 bp, Probe Sequence
gccggtccgaggggtgaagctcgtg

SEQ ID NO: 203542 - DNA, 25 bp, Probe Sequence
gccagtccaggagggtgtaagttct

SEQ ID NO: 203543 - DNA, 25 bp, Probe Sequence
gccacccaggcctggttagtgactc

SEQ ID NO: 203544 - DNA, 25 bp, Probe Sequence
gccacccagtggttactttatgcac

SEQ ID NO: 203545 - DNA, 25 bp, Probe Sequence
gccagccgagtgcttatttctacag

SEQ ID NO: 203546 - DNA, 25 bp, Probe Sequence
gccagggtggtcttgatctcctgac

SEQ ID NO: 203547 - DNA, 25 bp, Probe Sequence
gccagaggcttttgtcattctggag

SEQ ID NO: 203548 - DNA, 25 bp, Probe Sequence
gccagtccctgttttactggcacca

SEQ ID NO: 203549 - DNA, 25 bp, Probe Sequence
gccagtcacctgattaaccaattct

SEQ ID NO: 203550 - DNA, 25 bp, Probe Sequence
gccatgtacactgtaaatagccttt

SEQ ID NO: 203551 - DNA, 25 bp, Probe Sequence
gccatggctcctgtgaaaaagcttg

SEQ ID NO: 203552 - DNA, 25 bp, Probe Sequence
gccaggcactctgtagtcttcagtg

SEQ ID NO: 203553 - DNA, 25 bp, Probe Sequence
gccagcagaacagaagctcaacagt

SEQ ID NO: 203554 - DNA, 25 bp, Probe Sequence
gccagcaacacagagcactaggttc

SEQ ID NO: 203555 - DNA, 25 bp, Probe Sequence
gccagcaacaatgtgaccgatatgt

SEQ ID NO: 203556 - DNA, 25 bp, Probe Sequence
gccagctaaccagaacacatgatgt

SEQ ID NO: 203557 - DNA, 25 bp, Probe Sequence
gccagctctaccgaagacctggggt

SEQ ID NO: 203558 - DNA, 25 bp, Probe Sequence
gccactgtcaccgaaaaaggtgttg

SEQ ID NO: 203559 - DNA, 25 bp, Probe Sequence
gccatcgtagcctaaaagcgtatgt

SEQ ID NO: 203560 - DNA, 25 bp, Probe Sequence
gccttgaagagtaattgactggatt

SEQ ID NO: 203561 - DNA, 25 bp, Probe Sequence
gcatttaatacccctgactggacac

SEQ ID NO: 203562 - DNA, 25 bp, Probe Sequence
gtggtactacgggaacgtgacgcgg

SEQ ID NO: 203563 - DNA, 25 bp, Probe Sequence
gcttttcttcgggatacctactggc

SEQ ID NO: 203564 - DNA, 25 bp, Probe Sequence
gccattcctaaacagcccaactggc

SEQ ID NO: 203565 - DNA, 25 bp, Probe Sequence
gccataccacaaggtacgtccattt

SEQ ID NO: 203566 - DNA, 25 bp, Probe Sequence
gccatactctttggcatccagtctc

SEQ ID NO: 203567 - DNA, 25 bp, Probe Sequence
gccaccatgtattcatccagagttc

SEQ ID NO: 203568 - DNA, 25 bp, Probe Sequence
gccacctggatattacagctgtttg

SEQ ID NO: 203569 - DNA, 25 bp, Probe Sequence
gccagccggcagtgaagagtgactt

SEQ ID NO: 203570 - DNA, 25 bp, Probe Sequence
gccaccaggatgtgaaggatgtcca

SEQ ID NO: 203571 - DNA, 25 bp, Probe Sequence
gccatcgaggacttataatgtactc

SEQ ID NO: 203572 - DNA, 25 bp, Probe Sequence
gccagctcagagtttaggtgtacac

SEQ ID NO: 203573 - DNA, 25 bp, Probe Sequence
gccagttatggctataggtgctaca

SEQ ID NO: 203574 - DNA, 25 bp, Probe Sequence
gccagtattacattgaagactacct

SEQ ID NO: 203575 - DNA, 25 bp, Probe Sequence
gccagagattatcaatccagcccct

SEQ ID NO: 203576 - DNA, 25 bp, Probe Sequence
gccagaggtttccaatcagccttgc

SEQ ID NO: 203577 - DNA, 25 bp, Probe Sequence
gccacggtgattggccatataattg

SEQ ID NO: 203578 - DNA, 25 bp, Probe Sequence
gccacggatggtggcctcaacctga

SEQ ID NO: 203579 - DNA, 25 bp, Probe Sequence
gccactggtggaaccatgaacgctg

SEQ ID NO: 203580 - DNA, 25 bp, Probe Sequence
gccactgggtgagctgttcacggtc

SEQ ID NO: 203581 - DNA, 25 bp, Probe Sequence
gccacacaggctatctgaacacggt

SEQ ID NO: 203582 - DNA, 25 bp, Probe Sequence
gccaccgcagtctttaacactggta

SEQ ID NO: 203583 - DNA, 25 bp, Probe Sequence
gccaccgcatttatagatcagatgg

SEQ ID NO: 203584 - DNA, 25 bp, Probe Sequence
gccagccagtcataatagtagagga

SEQ ID NO: 203585 - DNA, 25 bp, Probe Sequence
gccagccagtctaactagttcaagc

SEQ ID NO: 203586 - DNA, 25 bp, Probe Sequence
gccactgctgatgtagcttgttcag

SEQ ID NO: 203587 - DNA, 25 bp, Probe Sequence
gccacgcgcacagacatttgtcagg

SEQ ID NO: 203588 - DNA, 25 bp, Probe Sequence
gccacgtaaccactgcatatgttgg

SEQ ID NO: 203589 - DNA, 25 bp, Probe Sequence
gccacctacaacgtcatagtggagg

SEQ ID NO: 203590 - DNA, 25 bp, Probe Sequence
gccacttagcacttgtataatcaga

SEQ ID NO: 203591 - DNA, 25 bp, Probe Sequence
gccacccccatggtgtcaatagagg

SEQ ID NO: 203592 - DNA, 25 bp, Probe Sequence
gccatcccccgattgtcaatggcag

SEQ ID NO: 203593 - DNA, 25 bp, Probe Sequence
gccactccacaaatgatgttttcag

SEQ ID NO: 203594 - DNA, 25 bp, Probe Sequence
gccacatctgcaatgattattgttt

SEQ ID NO: 203595 - DNA, 25 bp, Probe Sequence
gccacaggcctgagatttcatctgc

SEQ ID NO: 203596 - DNA, 25 bp, Probe Sequence
gccacgcaactgagaatctcttctt

SEQ ID NO: 203597 - DNA, 25 bp, Probe Sequence
gccacagacctgaaggatctctctt

SEQ ID NO: 203598 - DNA, 25 bp, Probe Sequence
gccacatggcttgtgagtgctgctc

SEQ ID NO: 203599 - DNA, 25 bp, Probe Sequence
gccagagtctgtcctggtgtgtgaa

SEQ ID NO: 203600 - DNA, 25 bp, Probe Sequence
gccactgatcttcctggacaggagg

SEQ ID NO: 203601 - DNA, 25 bp, Probe Sequence
gccactgatcttcctggacaggagt

SEQ ID NO: 203602 - DNA, 25 bp, Probe Sequence
gccacgtgtctgaagctgccagtgg

SEQ ID NO: 203603 - DNA, 25 bp, Probe Sequence
gccactgttatgtacacacagatcg

SEQ ID NO: 203604 - DNA, 25 bp, Probe Sequence
gccacttttgcatgacaatgatact

SEQ ID NO: 203605 - DNA, 25 bp, Probe Sequence
gccactcacttataaagatacttat

SEQ ID NO: 203606 - DNA, 25 bp, Probe Sequence
gccaccactgtttagaatgaccctt

SEQ ID NO: 203607 - DNA, 25 bp, Probe Sequence
gccaccttcttgtgtatattacttg

SEQ ID NO: 203608 - DNA, 25 bp, Probe Sequence
gccactttttcatttataatcactt

SEQ ID NO: 203609 - DNA, 25 bp, Probe Sequence
gccaccagttcctatgtaaagcctg

SEQ ID NO: 203610 - DNA, 25 bp, Probe Sequence
gccaccaaatctgtctagaatcctg

SEQ ID NO: 203611 - DNA, 25 bp, Probe Sequence
gccacctaatcagttatgagtacca

SEQ ID NO: 203612 - DNA, 25 bp, Probe Sequence
gccacctaagagcataactaacact

SEQ ID NO: 203613 - DNA, 25 bp, Probe Sequence
gccacctgaagatatgccacaaaca

SEQ ID NO: 203614 - DNA, 25 bp, Probe Sequence
gccagggatcaaactgcatccaaac

SEQ ID NO: 203615 - DNA, 25 bp, Probe Sequence
gccagggacttcggtgcagattaag

SEQ ID NO: 203616 - DNA, 25 bp, Probe Sequence
gccagggacagtgtgctcagtaaag

SEQ ID NO: 203617 - DNA, 25 bp, Probe Sequence
gccaggtgaacggtgcctgggtgca

SEQ ID NO: 203618 - DNA, 25 bp, Probe Sequence
gccagagggactcctgcaagggcga

SEQ ID NO: 203619 - DNA, 25 bp, Probe Sequence
gccagaggtgcactactggaggagc

SEQ ID NO: 203620 - DNA, 25 bp, Probe Sequence
gccagccttgcactgtgggggctgg

SEQ ID NO: 203621 - DNA, 25 bp, Probe Sequence
gccaccatcacaggtgagagggcag

SEQ ID NO: 203622 - DNA, 25 bp, Probe Sequence
gccagccattaccagatatgggagt

SEQ ID NO: 203623 - DNA, 25 bp, Probe Sequence
gccaccatgatacaggggcagagtg

SEQ ID NO: 203624 - DNA, 25 bp, Probe Sequence
gccaccaaactcctggacagttgga

SEQ ID NO: 203625 - DNA, 25 bp, Probe Sequence
gccatcccaacccaaactgttgaag

SEQ ID NO: 203626 - DNA, 25 bp, Probe Sequence
gccatcacttaactataactcttaa

SEQ ID NO: 203627 - DNA, 25 bp, Probe Sequence
gccatagtataacacctctctttat

SEQ ID NO: 203628 - DNA, 25 bp, Probe Sequence
gccaggcgtcaagatgcgctgcttt

SEQ ID NO: 203629 - DNA, 25 bp, Probe Sequence
gccagagggcacagaacatgtttgt

SEQ ID NO: 203630 - DNA, 25 bp, Probe Sequence
gccagagcccacatgaactgttgga

SEQ ID NO: 203631 - DNA, 25 bp, Probe Sequence
gccagtgtccaaggacagtttgtca

SEQ ID NO: 203632 - DNA, 25 bp, Probe Sequence
gccagagttccagtcaatttcatta

SEQ ID NO: 203633 - DNA, 25 bp, Probe Sequence
gccaggttccatactacttaaatta

SEQ ID NO: 203634 - DNA, 25 bp, Probe Sequence
gccaggtcccattttctgttagatg

SEQ ID NO: 203635 - DNA, 25 bp, Probe Sequence
gccactgtctccttttatatattat

SEQ ID NO: 203636 - DNA, 25 bp, Probe Sequence
gccactctttccagattgagtctgt

SEQ ID NO: 203637 - DNA, 25 bp, Probe Sequence
gccagctcctttaagattgtcctgt

SEQ ID NO: 203638 - DNA, 25 bp, Probe Sequence
gccagaggctgtgtagaggctcctg

SEQ ID NO: 203639 - DNA, 25 bp, Probe Sequence
gccaggacgttctagcaggtcatcg

SEQ ID NO: 203640 - DNA, 25 bp, Probe Sequence
gccaggtcaatacttgggtcctgag

SEQ ID NO: 203641 - DNA, 25 bp, Probe Sequence
gccaggtcaatacttgggtcctgag

SEQ ID NO: 203642 - DNA, 25 bp, Probe Sequence
gccaggccaacaggacggcgcctgg

SEQ ID NO: 203643 - DNA, 25 bp, Probe Sequence
gccagcacccaaggaagatgaccgg

SEQ ID NO: 203644 - DNA, 25 bp, Probe Sequence
gccagcacccaaggaagatgaccgg

SEQ ID NO: 203645 - DNA, 25 bp, Probe Sequence
gccagcgcgacgagaaagaggcggc

SEQ ID NO: 203646 - DNA, 25 bp, Probe Sequence
gccaggaactgaccacctaggtggc

SEQ ID NO: 203647 - DNA, 25 bp, Probe Sequence
gccaggaggagaccccaagctggga

SEQ ID NO: 203648 - DNA, 25 bp, Probe Sequence
gccaggtggaaatcctacagcgcgt

SEQ ID NO: 203649 - DNA, 25 bp, Probe Sequence
gccacgtggaaacaatcatcagatc

SEQ ID NO: 203650 - DNA, 25 bp, Probe Sequence
gccacctggattctattgccagctc

SEQ ID NO: 203651 - DNA, 25 bp, Probe Sequence
gccaccatggatgcactttgaagtc

SEQ ID NO: 203652 - DNA, 25 bp, Probe Sequence
gccactgaggatgacatccgtggcc

SEQ ID NO: 203653 - DNA, 25 bp, Probe Sequence
gccagctaggaagagccagctctgc

SEQ ID NO: 203654 - DNA, 25 bp, Probe Sequence
gccagctacatgaagaagcacgtcg

SEQ ID NO: 203655 - DNA, 25 bp, Probe Sequence
gccactgcctgcaaacagactggga

SEQ ID NO: 203656 - DNA, 25 bp, Probe Sequence
gccagtcctaaaagagctcctgaag

SEQ ID NO: 203657 - DNA, 25 bp, Probe Sequence
gccagacctcaatgagtgcccaagc

SEQ ID NO: 203658 - DNA, 25 bp, Probe Sequence
gccaccaacagattgtgtgcccaat

SEQ ID NO: 203659 - DNA, 25 bp, Probe Sequence
gccacccagccttggtgtcaatgtg

SEQ ID NO: 203660 - DNA, 25 bp, Probe Sequence
gccacccagccttggtgtcaatgtg

SEQ ID NO: 203661 - DNA, 25 bp, Probe Sequence
gccacccagccttggtgtcaatgtg

SEQ ID NO: 203662 - DNA, 25 bp, Probe Sequence
gccaccacaggctggggcaagacca

SEQ ID NO: 203663 - DNA, 25 bp, Probe Sequence
gccagaagcggtggggacaggacac

SEQ ID NO: 203664 - DNA, 25 bp, Probe Sequence
gccagagagcggaagtgcccggaac

SEQ ID NO: 203665 - DNA, 25 bp, Probe Sequence
gccagagtggggatggtctgtgacc

SEQ ID NO: 203666 - DNA, 25 bp, Probe Sequence
gccactctggggaatggctgtgtac

SEQ ID NO: 203667 - DNA, 25 bp, Probe Sequence
gccacccgctggaggtggggctggc

SEQ ID NO: 203668 - DNA, 25 bp, Probe Sequence
gccacgcccggtgagggtggtgagg

SEQ ID NO: 203669 - DNA, 25 bp, Probe Sequence
gccactgctccgtggaggaggttgg

SEQ ID NO: 203670 - DNA, 25 bp, Probe Sequence
gccactgctgcaaatttgggtggat

SEQ ID NO: 203671 - DNA, 25 bp, Probe Sequence
gccacttccttgaatggaggatgca

SEQ ID NO: 203672 - DNA, 25 bp, Probe Sequence
gccagacccttgatggaggatacgg

SEQ ID NO: 203673 - DNA, 25 bp, Probe Sequence
gccagtacatcatgggcgtggatac

SEQ ID NO: 203674 - DNA, 25 bp, Probe Sequence
gccagaggctgcaaggagcggggtc

SEQ ID NO: 203675 - DNA, 25 bp, Probe Sequence
gccaggtgcttattaggccgtgctc

SEQ ID NO: 203676 - DNA, 25 bp, Probe Sequence
gccaggctgtctgcatgaggaggtg

SEQ ID NO: 203677 - DNA, 25 bp, Probe Sequence
gccaggcagcctgcaaacaggtgcg

SEQ ID NO: 203678 - DNA, 25 bp, Probe Sequence
gccaggaggcttcaagaggagggca

SEQ ID NO: 203679 - DNA, 25 bp, Probe Sequence
gccaccaagttgagagctggagggg

SEQ ID NO: 203680 - DNA, 25 bp, Probe Sequence
gccaccaagagagcaatgggcaggg

SEQ ID NO: 203681 - DNA, 25 bp, Probe Sequence
gccaccaaattacctaggctgaggt

SEQ ID NO: 203682 - DNA, 25 bp, Probe Sequence
gccacccaattacctaggctgaggt

SEQ ID NO: 203683 - DNA, 25 bp, Probe Sequence
gccagaacatcttcgcctggtgtgg

SEQ ID NO: 203684 - DNA, 25 bp, Probe Sequence
gccagaaagtgggcctgctgtgcac

SEQ ID NO: 203685 - DNA, 25 bp, Probe Sequence
gccagcacaagactggcctcgagcc

SEQ ID NO: 203686 - DNA, 25 bp, Probe Sequence
gccaccattgagaagctcctgagca

SEQ ID NO: 203687 - DNA, 25 bp, Probe Sequence
gccactgtgaggaaggacaggcacc

SEQ ID NO: 203688 - DNA, 25 bp, Probe Sequence
gccacctgctggggaggcagagacc

SEQ ID NO: 203689 - DNA, 25 bp, Probe Sequence
gccagcaggcgtcagaggcggacgc

SEQ ID NO: 203690 - DNA, 25 bp, Probe Sequence
gccagaggccagcatggaagtgaag

SEQ ID NO: 203691 - DNA, 25 bp, Probe Sequence
gccagcatgtcctcaatgaacggtg

SEQ ID NO: 203692 - DNA, 25 bp, Probe Sequence
gccactgtccaggcaaatgccaggc

SEQ ID NO: 203693 - DNA, 25 bp, Probe Sequence
gccactgtccggaaattcatggttg

SEQ ID NO: 203694 - DNA, 25 bp, Probe Sequence
gccacctctggaaatacttggctct

SEQ ID NO: 203695 - DNA, 25 bp, Probe Sequence
gccacgattggagaatactttgctt

SEQ ID NO: 203696 - DNA, 25 bp, Probe Sequence
gccacgtgaggcataatactatttt

SEQ ID NO: 203697 - DNA, 25 bp, Probe Sequence
gccactctggacctaatagctgttc

SEQ ID NO: 203698 - DNA, 25 bp, Probe Sequence
gccaccagcaaggataaacatgtcc

SEQ ID NO: 203699 - DNA, 25 bp, Probe Sequence
gccaccaaggggtaaagctccattc

SEQ ID NO: 203700 - DNA, 25 bp, Probe Sequence
gccttgacggggaaggactccacta

SEQ ID NO: 203701 - DNA, 25 bp, Probe Sequence
gccttgaccttcccaaggttactca

SEQ ID NO: 203702 - DNA, 25 bp, Probe Sequence
gcctgaactctttactgggttacca

SEQ ID NO: 203703 - DNA, 25 bp, Probe Sequence
gcctcaaacttatgtggttcgagaa

SEQ ID NO: 203704 - DNA, 25 bp, Probe Sequence
gccagcagagacttagggattttaa

SEQ ID NO: 203705 - DNA, 25 bp, Probe Sequence
gccagcaagagttaggggccttagg

SEQ ID NO: 203706 - DNA, 25 bp, Probe Sequence
gccagaaatatttgcgggactcaaa

SEQ ID NO: 203707 - DNA, 25 bp, Probe Sequence
gccagcaagtaatgctttactccaa

SEQ ID NO: 203708 - DNA, 25 bp, Probe Sequence
gccagcaagtccttgtggtagccct

SEQ ID NO: 203709 - DNA, 25 bp, Probe Sequence
gccatgaagtcaccgggatgaacct

SEQ ID NO: 203710 - DNA, 25 bp, Probe Sequence
gccagacaccccggtggaagcattt

SEQ ID NO: 203711 - DNA, 25 bp, Probe Sequence
gccaggcctccgtggggagataaca

SEQ ID NO: 203712 - DNA, 25 bp, Probe Sequence
gccaggccaaagtgggggcaacagc

SEQ ID NO: 203713 - DNA, 25 bp, Probe Sequence
gcgacctcgaagtgggaaacacagt

SEQ ID NO: 203714 - DNA, 25 bp, Probe Sequence
gcctcccgaagtgctgggattacag

SEQ ID NO: 203715 - DNA, 25 bp, Probe Sequence
gccttcactaggagtgggatccagg

SEQ ID NO: 203716 - DNA, 25 bp, Probe Sequence
gcctacacaagggaggggaacattc

SEQ ID NO: 203717 - DNA, 25 bp, Probe Sequence
gcctagacaacatgacaagccccat

SEQ ID NO: 203718 - DNA, 25 bp, Probe Sequence
gccttggctcagggctaatgcgccc

SEQ ID NO: 203719 - DNA, 25 bp, Probe Sequence
gccttcctaggacacaggggactcc

SEQ ID NO: 203720 - DNA, 25 bp, Probe Sequence
gccttcccggggtgaaggacatcaa

SEQ ID NO: 203721 - DNA, 25 bp, Probe Sequence
gccttcgcggggcaaaatggagctc

SEQ ID NO: 203722 - DNA, 25 bp, Probe Sequence
gccttccggcgcataaagtcagcaa

SEQ ID NO: 203723 - DNA, 25 bp, Probe Sequence
gccttccggcgcataaagtcagcaa

SEQ ID NO: 203724 - DNA, 25 bp, Probe Sequence
gcctgtcggcccgtagatttatcaa

SEQ ID NO: 203725 - DNA, 25 bp, Probe Sequence
gccatgtgacagaggctctttctaa

SEQ ID NO: 203726 - DNA, 25 bp, Probe Sequence
gccactgacatgacacctgtgttat

SEQ ID NO: 203727 - DNA, 25 bp, Probe Sequence
gccaccactgtgatgcgaaatgatc

SEQ ID NO: 203728 - DNA, 25 bp, Probe Sequence
gccatccacgtggggaatcagactt

SEQ ID NO: 203729 - DNA, 25 bp, Probe Sequence
gccaccactggacggagatcgagtt

SEQ ID NO: 203730 - DNA, 25 bp, Probe Sequence
gccacccccacatgtgatgagagtt

SEQ ID NO: 203731 - DNA, 25 bp, Probe Sequence
gccacctctctctttgtagaatgag

SEQ ID NO: 203732 - DNA, 25 bp, Probe Sequence
gccagcaccctctggtgagaagagg

SEQ ID NO: 203733 - DNA, 25 bp, Probe Sequence
gccagaagcctgtgatggtgaagag

SEQ ID NO: 203734 - DNA, 25 bp, Probe Sequence
gccagttgcctgaagtagggaagct

SEQ ID NO: 203735 - DNA, 25 bp, Probe Sequence
gccagtgtccagagggggatcgctg

SEQ ID NO: 203736 - DNA, 25 bp, Probe Sequence
gccagtgtcttagcagggtcttgtg

SEQ ID NO: 203737 - DNA, 25 bp, Probe Sequence
gccagctctattaccaggttttaaa

SEQ ID NO: 203738 - DNA, 25 bp, Probe Sequence
gccaccatgttgacataagttccta

SEQ ID NO: 203739 - DNA, 25 bp, Probe Sequence
gccaccatgaaagaagcatgtcgct

SEQ ID NO: 203740 - DNA, 25 bp, Probe Sequence
gccaccaaaatgtaaattcgaacca

SEQ ID NO: 203741 - DNA, 25 bp, Probe Sequence
gccaccatcatcggcgagtgggtaa

SEQ ID NO: 203742 - DNA, 25 bp, Probe Sequence
gccaccgccacagagatggctataa

SEQ ID NO: 203743 - DNA, 25 bp, Probe Sequence
gccattagcccagacaggactaagg

SEQ ID NO: 203744 - DNA, 25 bp, Probe Sequence
gccattgacctaaacgccaggggag

SEQ ID NO: 203745 - DNA, 25 bp, Probe Sequence
gccagtgtcctaataagggaatgaa

SEQ ID NO: 203746 - DNA, 25 bp, Probe Sequence
gccagagtttaattttagactgcaa

SEQ ID NO: 203747 - DNA, 25 bp, Probe Sequence
gccaggtttaatgctaagacacact

SEQ ID NO: 203748 - DNA, 25 bp, Probe Sequence
gccagtatgttgtaagaaagccctt

SEQ ID NO: 203749 - DNA, 25 bp, Probe Sequence
gccaggatgtgatttagtatccctg

SEQ ID NO: 203750 - DNA, 25 bp, Probe Sequence
gccagtatagtttctgttccctgca

SEQ ID NO: 203751 - DNA, 25 bp, Probe Sequence
gccagcttgagtcactcttgtacaa

SEQ ID NO: 203752 - DNA, 25 bp, Probe Sequence
gccagttgtatccacagcttctgga

SEQ ID NO: 203753 - DNA, 25 bp, Probe Sequence
gccagttcctcgtagagattggact

SEQ ID NO: 203754 - DNA, 25 bp, Probe Sequence
gccagattaacaggaatgaagaact

SEQ ID NO: 203755 - DNA, 25 bp, Probe Sequence
gccagttaccattgccagagaaatc

SEQ ID NO: 203756 - DNA, 25 bp, Probe Sequence
gccaccaagagaacggagcagactc

SEQ ID NO: 203757 - DNA, 25 bp, Probe Sequence
gccagcgtaggagtcatcgacaacg

SEQ ID NO: 203758 - DNA, 25 bp, Probe Sequence
gccacgtgagaattcctgagagcct

SEQ ID NO: 203759 - DNA, 25 bp, Probe Sequence
gccatcgtgggtgcttgagagctct

SEQ ID NO: 203760 - DNA, 25 bp, Probe Sequence
gccagttggagtgctggagactttg

SEQ ID NO: 203761 - DNA, 25 bp, Probe Sequence
gccattgggatctctggactctttg

SEQ ID NO: 203762 - DNA, 25 bp, Probe Sequence
gccataggtgatgttcctccatctt

SEQ ID NO: 203763 - DNA, 25 bp, Probe Sequence
gccatggagtccattgcactccatc

SEQ ID NO: 203764 - DNA, 25 bp, Probe Sequence
gccttgacaccgttagctgaacagt

SEQ ID NO: 203765 - DNA, 25 bp, Probe Sequence
gccttccaccggagagactactgac

SEQ ID NO: 203766 - DNA, 25 bp, Probe Sequence
gccatccaaccttgaagtcctaaac

SEQ ID NO: 203767 - DNA, 25 bp, Probe Sequence
gccagaaactcattgaagtggacga

SEQ ID NO: 203768 - DNA, 25 bp, Probe Sequence
gccatcatgaacgacaccgtaacta

SEQ ID NO: 203769 - DNA, 25 bp, Probe Sequence
gccagatgcaaaacacggctacgtc

SEQ ID NO: 203770 - DNA, 25 bp, Probe Sequence
gccagacaacatcaaggctctcttc

SEQ ID NO: 203771 - DNA, 25 bp, Probe Sequence
gccagatgacacttaagacctactt

SEQ ID NO: 203772 - DNA, 25 bp, Probe Sequence
gccagagtccaaagcagcacctgac

SEQ ID NO: 203773 - DNA, 25 bp, Probe Sequence
gccagaggccacaagattcctaacc

SEQ ID NO: 203774 - DNA, 25 bp, Probe Sequence
gccagaggcaaaagatgtttgtttc

SEQ ID NO: 203775 - DNA, 25 bp, Probe Sequence
gccagggcaacaataattggagttc

SEQ ID NO: 203776 - DNA, 25 bp, Probe Sequence
gccacctgctatagctaatggaggt

SEQ ID NO: 203777 - DNA, 25 bp, Probe Sequence
gccagcttgcttctcaaggaggttt

SEQ ID NO: 203778 - DNA, 25 bp, Probe Sequence
gccagattcctcagcagatgaatgg

SEQ ID NO: 203779 - DNA, 25 bp, Probe Sequence
gccagatacactccagttcacagtg

SEQ ID NO: 203780 - DNA, 25 bp, Probe Sequence
gccagatacactccagttcacagtg

SEQ ID NO: 203781 - DNA, 25 bp, Probe Sequence
gccagttcatctcagagtccaggcc

SEQ ID NO: 203782 - DNA, 25 bp, Probe Sequence
gccagttcatctcagagtccaggcc

SEQ ID NO: 203783 - DNA, 25 bp, Probe Sequence
gccagcattcattgtaagttccctc

SEQ ID NO: 203784 - DNA, 25 bp, Probe Sequence
gccagcagagcatgttggacacccc

SEQ ID NO: 203785 - DNA, 25 bp, Probe Sequence
gccagcagagcatgttggacacccc

SEQ ID NO: 203786 - DNA, 25 bp, Probe Sequence
gccagcatgtgccaatgactgtcac

SEQ ID NO: 203787 - DNA, 25 bp, Probe Sequence
gccagtcagcagtcatgcacgctga

SEQ ID NO: 203788 - DNA, 25 bp, Probe Sequence
gccagcaccagatgcatgagctaat

SEQ ID NO: 203789 - DNA, 25 bp, Probe Sequence
gccagcccacaactagtattcagcc

SEQ ID NO: 203790 - DNA, 25 bp, Probe Sequence
gccagccaccaacagattgtgtgcc

SEQ ID NO: 203791 - DNA, 25 bp, Probe Sequence
gccaggtatagatcatcttggtcga

SEQ ID NO: 203792 - DNA, 25 bp, Probe Sequence
gccagagttagcagtcttttagaca

SEQ ID NO: 203793 - DNA, 25 bp, Probe Sequence
gccagactggcacagttttctgaga

SEQ ID NO: 203794 - DNA, 25 bp, Probe Sequence
gccagcacggtgagtgtttgtagat

SEQ ID NO: 203795 - DNA, 25 bp, Probe Sequence
gccagccaggttgggttctggcaag

SEQ ID NO: 203796 - DNA, 25 bp, Probe Sequence
gccagccagtgcccgaggccaggaa

SEQ ID NO: 203797 - DNA, 25 bp, Probe Sequence
gccaccacactgacgtggtcaggga

SEQ ID NO: 203798 - DNA, 25 bp, Probe Sequence
gccaccacagctatgcagggcatgg

SEQ ID NO: 203799 - DNA, 25 bp, Probe Sequence
gccagcgagcagcgcatcagggagc

SEQ ID NO: 203800 - DNA, 25 bp, Probe Sequence
gccagccatgctgagcatctgagct

SEQ ID NO: 203801 - DNA, 25 bp, Probe Sequence
gccatgcaactccatgcctatttac

SEQ ID NO: 203802 - DNA, 25 bp, Probe Sequence
gccaccactggagctcagtgtgccc

SEQ ID NO: 203803 - DNA, 25 bp, Probe Sequence
gccagcggtggaggctgagtcgcag

SEQ ID NO: 203804 - DNA, 25 bp, Probe Sequence
gccagcttatagtcctagtcagcag

SEQ ID NO: 203805 - DNA, 25 bp, Probe Sequence
gccagcattgatgaacggatgaaga

SEQ ID NO: 203806 - DNA, 25 bp, Probe Sequence
gccaggctgtcatccatggtgaaga

SEQ ID NO: 203807 - DNA, 25 bp, Probe Sequence
gccaggagcgcatctcaatggaaac

SEQ ID NO: 203808 - DNA, 25 bp, Probe Sequence
gccagagcctgaactcgcatgagaa

SEQ ID NO: 203809 - DNA, 25 bp, Probe Sequence
gccagacactgaaagccatgaagaa

SEQ ID NO: 203810 - DNA, 25 bp, Probe Sequence
gccagcatcttgtaactaaatgata

SEQ ID NO: 203811 - DNA, 25 bp, Probe Sequence
gccaccttctacctaaatgtcctgg

SEQ ID NO: 203812 - DNA, 25 bp, Probe Sequence
gcctccttctcaaatttttcaatgg

SEQ ID NO: 203813 - DNA, 25 bp, Probe Sequence
gcctacttcgagatctcggccaaga

SEQ ID NO: 203814 - DNA, 25 bp, Probe Sequence
gccagcatttcgatcctcgtcaggt

SEQ ID NO: 203815 - DNA, 25 bp, Probe Sequence
gccatgcttttgtaacttgccaggt

SEQ ID NO: 203816 - DNA, 25 bp, Probe Sequence
gccagctctgcatttgacaaatgcc

SEQ ID NO: 203817 - DNA, 25 bp, Probe Sequence
gccaggtgtgatagcagcaattgtc

SEQ ID NO: 203818 - DNA, 25 bp, Probe Sequence
gccagctgtctgacacacaaatggt

SEQ ID NO: 203819 - DNA, 25 bp, Probe Sequence
gccagctctgtgacccaagagtgag

SEQ ID NO: 203820 - DNA, 25 bp, Probe Sequence
gccagcagtggaagcctcaagcaag

SEQ ID NO: 203821 - DNA, 25 bp, Probe Sequence
gccagcatgtggagtggaggagatg

SEQ ID NO: 203822 - DNA, 25 bp, Probe Sequence
gccagctggtgagggcagaggcaga

SEQ ID NO: 203823 - DNA, 25 bp, Probe Sequence
gccagggatagagcagatgagcagt

SEQ ID NO: 203824 - DNA, 25 bp, Probe Sequence
gccagtggagggacatgatggacta

SEQ ID NO: 203825 - DNA, 25 bp, Probe Sequence
gccatagggcgtctgaagctctagg

SEQ ID NO: 203826 - DNA, 25 bp, Probe Sequence
gccagagtgatggggcgagactcca

SEQ ID NO: 203827 - DNA, 25 bp, Probe Sequence
gccagagctatggagtggatcactg

SEQ ID NO: 203828 - DNA, 25 bp, Probe Sequence
gccagctctcagaagtggcccatgc

SEQ ID NO: 203829 - DNA, 25 bp, Probe Sequence
gccagcttcagcaagaggatccaga

SEQ ID NO: 203830 - DNA, 25 bp, Probe Sequence
gccagttggggaccagcatcatgaa

SEQ ID NO: 203831 - DNA, 25 bp, Probe Sequence
gccagtgtggccaagaagtgatgtc

SEQ ID NO: 203832 - DNA, 25 bp, Probe Sequence
gccagagtggccagaagatgcagag

SEQ ID NO: 203833 - DNA, 25 bp, Probe Sequence
gccagacgttctagaagtgcaagca

SEQ ID NO: 203834 - DNA, 25 bp, Probe Sequence
gccagttgttcttgatgaatctata

SEQ ID NO: 203835 - DNA, 25 bp, Probe Sequence
gccagttgaatttatggaatctacc

SEQ ID NO: 203836 - DNA, 25 bp, Probe Sequence
gccagcttaatgaatttagatgtac

SEQ ID NO: 203837 - DNA, 25 bp, Probe Sequence
gccatcttagacagttggtgtaata

SEQ ID NO: 203838 - DNA, 25 bp, Probe Sequence
gccagcttagagaggcagtgcgtaa

SEQ ID NO: 203839 - DNA, 25 bp, Probe Sequence
gccagctatcaactcgcgccctgga

SEQ ID NO: 203840 - DNA, 25 bp, Probe Sequence
gccagtatctccccagacactggca

SEQ ID NO: 203841 - DNA, 25 bp, Probe Sequence
gccatgtacgacgacgagagcgcca

SEQ ID NO: 203842 - DNA, 25 bp, Probe Sequence
gccatgttcgacttcagcgagaagc

SEQ ID NO: 203843 - DNA, 25 bp, Probe Sequence
gccagtgctgcttcttgcaaaaaaa

SEQ ID NO: 203844 - DNA, 25 bp, Probe Sequence
gccaggtggacttgaccaactacat

SEQ ID NO: 203845 - DNA, 25 bp, Probe Sequence
gccagggccatctgagccagaagaa

SEQ ID NO: 203846 - DNA, 25 bp, Probe Sequence
gccaggtgtctatactcgagtgact

SEQ ID NO: 203847 - DNA, 25 bp, Probe Sequence
gccagcttacatttacccaaactgt

SEQ ID NO: 203848 - DNA, 25 bp, Probe Sequence
gccagtataggaaacctcaatcttt

SEQ ID NO: 203849 - DNA, 25 bp, Probe Sequence
gccagttctgtaagtgccatcaatt

SEQ ID NO: 203850 - DNA, 25 bp, Probe Sequence
gccgtgtcgtatgacctagtaaact

SEQ ID NO: 203851 - DNA, 25 bp, Probe Sequence
gcctttcctacgtactcgtgaattt

SEQ ID NO: 203852 - DNA, 25 bp, Probe Sequence
gccatttcctacgattttgtcacaa

SEQ ID NO: 203853 - DNA, 25 bp, Probe Sequence
gccatttcctacgattttgtcacaa

SEQ ID NO: 203854 - DNA, 25 bp, Probe Sequence
gccagcttccttgataccttgaaga

SEQ ID NO: 203855 - DNA, 25 bp, Probe Sequence
gccagaacttgtatcaacttgaggg

SEQ ID NO: 203856 - DNA, 25 bp, Probe Sequence
gccagaacttgtatcaacttgaggg

SEQ ID NO: 203857 - DNA, 25 bp, Probe Sequence
gcctcaactttatccacatgaaatg

SEQ ID NO: 203858 - DNA, 25 bp, Probe Sequence
gccatgcaagttatagctcacagga

SEQ ID NO: 203859 - DNA, 25 bp, Probe Sequence
gccatattcattaaagcccaaattc

SEQ ID NO: 203860 - DNA, 25 bp, Probe Sequence
gccatgattatcgcagaacgacaga

SEQ ID NO: 203861 - DNA, 25 bp, Probe Sequence
gccagattggcactagaacgaaaaa

SEQ ID NO: 203862 - DNA, 25 bp, Probe Sequence
gccagactgtctcaaataaataaat

SEQ ID NO: 203863 - DNA, 25 bp, Probe Sequence
gccagacaactgcatagtagataca

SEQ ID NO: 203864 - DNA, 25 bp, Probe Sequence
gccatggcaacacactctgaatcca

SEQ ID NO: 203865 - DNA, 25 bp, Probe Sequence
gccattagaccttcttatcatccat

SEQ ID NO: 203866 - DNA, 25 bp, Probe Sequence
gccttaatcctggttaccgtgtgta

SEQ ID NO: 203867 - DNA, 25 bp, Probe Sequence
gcctaaagtacgtgcccagggagaa

SEQ ID NO: 203868 - DNA, 25 bp, Probe Sequence
gctgtttgagtttgatacccgggac

SEQ ID NO: 203869 - DNA, 25 bp, Probe Sequence
gctgtttgagtttgatacccgggac

SEQ ID NO: 203870 - DNA, 25 bp, Probe Sequence
gaggtggaatccgaagtcctgggac

SEQ ID NO: 203871 - DNA, 25 bp, Probe Sequence
gccagggtcaccaaggtcctgggca

SEQ ID NO: 203872 - DNA, 25 bp, Probe Sequence
gccagggctcagatggggcctgggc

SEQ ID NO: 203873 - DNA, 25 bp, Probe Sequence
gccagttgctagccaggtgacctgg

SEQ ID NO: 203874 - DNA, 25 bp, Probe Sequence
gccagtgttcagcaggatcatgcct

SEQ ID NO: 203875 - DNA, 25 bp, Probe Sequence
gccatgtgtagcctatggcatcccc

SEQ ID NO: 203876 - DNA, 25 bp, Probe Sequence
gccagcgccatgctgaggcgcttcc

SEQ ID NO: 203877 - DNA, 25 bp, Probe Sequence
gccatgctgagcatctgagctcgct

SEQ ID NO: 203878 - DNA, 25 bp, Probe Sequence
gccagtgatcacctgagtcagagtt

SEQ ID NO: 203879 - DNA, 25 bp, Probe Sequence
gccagtcaccgtggctcaaacttgt

SEQ ID NO: 203880 - DNA, 25 bp, Probe Sequence
gccagcaacctgaatctcaaacctg

SEQ ID NO: 203881 - DNA, 25 bp, Probe Sequence
gccagcacttgctcatttaatcctg

SEQ ID NO: 203882 - DNA, 25 bp, Probe Sequence
gccagcacttgctcatttaatcctg

SEQ ID NO: 203883 - DNA, 25 bp, Probe Sequence
gccagcatttccgattttgacatat

SEQ ID NO: 203884 - DNA, 25 bp, Probe Sequence
gccagttaccagattacacatcccc

SEQ ID NO: 203885 - DNA, 25 bp, Probe Sequence
gccagatcaacctgtagaagaccct

SEQ ID NO: 203886 - DNA, 25 bp, Probe Sequence
gccagatctacgagataaccccaag

SEQ ID NO: 203887 - DNA, 25 bp, Probe Sequence
gccatactacgggaactacgactac

SEQ ID NO: 203888 - DNA, 25 bp, Probe Sequence
gccatactacgggaactacgactac

SEQ ID NO: 203889 - DNA, 25 bp, Probe Sequence
gccatactacgggaactacgactac

SEQ ID NO: 203890 - DNA, 25 bp, Probe Sequence
gccatgacaatggtgtgaactacaa

SEQ ID NO: 203891 - DNA, 25 bp, Probe Sequence
gccatgacaatggtgtgaactacaa

SEQ ID NO: 203892 - DNA, 25 bp, Probe Sequence
gccagcctatgaggagttctacaac

SEQ ID NO: 203893 - DNA, 25 bp, Probe Sequence
gccagccttaaagtagtccattctt

SEQ ID NO: 203894 - DNA, 25 bp, Probe Sequence
gccagttaaaactggctattctttt

SEQ ID NO: 203895 - DNA, 25 bp, Probe Sequence
gccgttttagaagagcttttacttg

SEQ ID NO: 203896 - DNA, 25 bp, Probe Sequence
gcctttattgggagacttttgtctt

SEQ ID NO: 203897 - DNA, 25 bp, Probe Sequence
gcctttgggtccagagtttctttct

SEQ ID NO: 203898 - DNA, 25 bp, Probe Sequence
gccttttagccctaatgaccttttg

SEQ ID NO: 203899 - DNA, 25 bp, Probe Sequence
gcctttctctccgtaaactatttag

SEQ ID NO: 203900 - DNA, 25 bp, Probe Sequence
gcctatacccggcaaattatgtgga

SEQ ID NO: 203901 - DNA, 25 bp, Probe Sequence
gcctatagtcctataagcttttcca

SEQ ID NO: 203902 - DNA, 25 bp, Probe Sequence
gacttacacgttcaacttttgcctg

SEQ ID NO: 203903 - DNA, 25 bp, Probe Sequence
gccttcactttacaaattcaagcct

SEQ ID NO: 203904 - DNA, 25 bp, Probe Sequence
gccttttgtagccacaaaccaggcg

SEQ ID NO: 203905 - DNA, 25 bp, Probe Sequence
gccatgtttgtgtccacaaacaaga

SEQ ID NO: 203906 - DNA, 25 bp, Probe Sequence
gccagagtttgagcaggaagaggat

SEQ ID NO: 203907 - DNA, 25 bp, Probe Sequence
gccagagtttgagcaggaagaggat

SEQ ID NO: 203908 - DNA, 25 bp, Probe Sequence
gccagcctccgagagggagagagag

SEQ ID NO: 203909 - DNA, 25 bp, Probe Sequence
gccaggcccgaaggcaacagagggc

SEQ ID NO: 203910 - DNA, 25 bp, Probe Sequence
gccttgcccagaactaccactgggc

SEQ ID NO: 203911 - DNA, 25 bp, Probe Sequence
gccataaacagtacttccttgactc

SEQ ID NO: 203912 - DNA, 25 bp, Probe Sequence
gccaggcaagaaagcttccttcaac

SEQ ID NO: 203913 - DNA, 25 bp, Probe Sequence
gccagtgggagaatgcttgccttgc

SEQ ID NO: 203914 - DNA, 25 bp, Probe Sequence
gccataggggcagtcctgccttaca

SEQ ID NO: 203915 - DNA, 25 bp, Probe Sequence
gccatcatggggcacctgaaaagaa

SEQ ID NO: 203916 - DNA, 25 bp, Probe Sequence
gccagatgacgtgatccttaaagac

SEQ ID NO: 203917 - DNA, 25 bp, Probe Sequence
gccagtgaagtccacgtgcttaagg

SEQ ID NO: 203918 - DNA, 25 bp, Probe Sequence
gccagtacattctacgtattaagtc

SEQ ID NO: 203919 - DNA, 25 bp, Probe Sequence
gccattatccccagcaaaaagctcc

SEQ ID NO: 203920 - DNA, 25 bp, Probe Sequence
gcctttgccatcactgccattaagg

SEQ ID NO: 203921 - DNA, 25 bp, Probe Sequence
gcctctttgcaaccgggtcagaatg

SEQ ID NO: 203922 - DNA, 25 bp, Probe Sequence
gcctctttgcaaccgggtcagaatg

SEQ ID NO: 203923 - DNA, 25 bp, Probe Sequence
gccatcgcagtaaccgttgtggacg

SEQ ID NO: 203924 - DNA, 25 bp, Probe Sequence
gccagctcagtggaccgtgtggaac

SEQ ID NO: 203925 - DNA, 25 bp, Probe Sequence
gccatccagtctgccttggatcaaa

SEQ ID NO: 203926 - DNA, 25 bp, Probe Sequence
gccagcaattctggcacttggctgt

SEQ ID NO: 203927 - DNA, 25 bp, Probe Sequence
gccagaatctcattactgcttcatt

SEQ ID NO: 203928 - DNA, 25 bp, Probe Sequence
gccaggcatctggtatatgaatcag

SEQ ID NO: 203929 - DNA, 25 bp, Probe Sequence
gccagatgattgttcaaagcacaga

SEQ ID NO: 203930 - DNA, 25 bp, Probe Sequence
gccagctgatctatcaagtgcaggg

SEQ ID NO: 203931 - DNA, 25 bp, Probe Sequence
gccaggatgctcagctggccaggag

SEQ ID NO: 203932 - DNA, 25 bp, Probe Sequence
gccaggagtacgccgtcaagatcat

SEQ ID NO: 203933 - DNA, 25 bp, Probe Sequence
gccagatggatacgaattcaagttc

SEQ ID NO: 203934 - DNA, 25 bp, Probe Sequence
gccagtggattttatgtcttgttga

SEQ ID NO: 203935 - DNA, 25 bp, Probe Sequence
gccagtggttattcagcgtttttta

SEQ ID NO: 203936 - DNA, 25 bp, Probe Sequence
gccaggaatctattgtgtttttctt

SEQ ID NO: 203937 - DNA, 25 bp, Probe Sequence
gccaggatgggactggtcgtgtttg

SEQ ID NO: 203938 - DNA, 25 bp, Probe Sequence
gccgagatgggaggaccgttttcct

SEQ ID NO: 203939 - DNA, 25 bp, Probe Sequence
gccagtgttggctgtcagtgttatt

SEQ ID NO: 203940 - DNA, 25 bp, Probe Sequence
gccattttgggcatatgtatcttta

SEQ ID NO: 203941 - DNA, 25 bp, Probe Sequence
gccagtgtggggatcatatactgtt

SEQ ID NO: 203942 - DNA, 25 bp, Probe Sequence
gccagtggtttcatcaatcatgcct

SEQ ID NO: 203943 - DNA, 25 bp, Probe Sequence
gccatgagggttaatcacatagtcc

SEQ ID NO: 203944 - DNA, 25 bp, Probe Sequence
gccaggtggaatatgacccatctcc

SEQ ID NO: 203945 - DNA, 25 bp, Probe Sequence
gccagacaaattatgactccttcct

SEQ ID NO: 203946 - DNA, 25 bp, Probe Sequence
gcgaaaagcttaaagcctttcctct

SEQ ID NO: 203947 - DNA, 25 bp, Probe Sequence
gccagtagagttattgtctattttt

SEQ ID NO: 203948 - DNA, 25 bp, Probe Sequence
gcccttcaatttgtttcttcaatat

SEQ ID NO: 203949 - DNA, 25 bp, Probe Sequence
gcgcgttaatcccttattttagtga

SEQ ID NO: 203950 - DNA, 25 bp, Probe Sequence
gccttttactagctactttagaaat

SEQ ID NO: 203951 - DNA, 25 bp, Probe Sequence
gccttttattagttcgttttgctga

SEQ ID NO: 203952 - DNA, 25 bp, Probe Sequence
gcctttttttgattacctgtagtgc

SEQ ID NO: 203953 - DNA, 25 bp, Probe Sequence
gctcgttttagtgaaccgtcagatc

SEQ ID NO: 203954 - DNA, 25 bp, Probe Sequence
gactgttagaaggggaccgacaaca

SEQ ID NO: 203955 - DNA, 25 bp, Probe Sequence
gtggttaactggactgacctaaacg

SEQ ID NO: 203956 - DNA, 25 bp, Probe Sequence
gaggttaagcccaagatcccaaagg

SEQ ID NO: 203957 - DNA, 25 bp, Probe Sequence
gcagtttgaatcgcggtgcgacgaa

SEQ ID NO: 203958 - DNA, 25 bp, Probe Sequence
gcctctgtgttcccgttagggacat

SEQ ID NO: 203959 - DNA, 25 bp, Probe Sequence
gccttagtcgctcagttagttgtga

SEQ ID NO: 203960 - DNA, 25 bp, Probe Sequence
gccttagttcagagttgtgtgtcag

SEQ ID NO: 203961 - DNA, 25 bp, Probe Sequence
gccagtagtgtagtgcggtgtgctt

SEQ ID NO: 203962 - DNA, 25 bp, Probe Sequence
gccagtagtgtagtgcggtgtgctt

SEQ ID NO: 203963 - DNA, 25 bp, Probe Sequence
gccagtcactgtcatcgttgtgtcc

SEQ ID NO: 203964 - DNA, 25 bp, Probe Sequence
gccatgactgttccatcagattatg

SEQ ID NO: 203965 - DNA, 25 bp, Probe Sequence
gccagtgctgttactgcatttagca

SEQ ID NO: 203966 - DNA, 25 bp, Probe Sequence
gccagtgtgactatgcacctaattt

SEQ ID NO: 203967 - DNA, 25 bp, Probe Sequence
gccagtgtcctttcttatacacgta

SEQ ID NO: 203968 - DNA, 25 bp, Probe Sequence
gccatcattactaatttttccctct

SEQ ID NO: 203969 - DNA, 25 bp, Probe Sequence
gccttctactttaaagtgtccttgt

SEQ ID NO: 203970 - DNA, 25 bp, Probe Sequence
gcctttattttatgagccccagttt

SEQ ID NO: 203971 - DNA, 25 bp, Probe Sequence
gcctttatttttaacctgccaacat

SEQ ID NO: 203972 - DNA, 25 bp, Probe Sequence
gcctttatttttaacctgccaacat

SEQ ID NO: 203973 - DNA, 25 bp, Probe Sequence
gccttttttaaaactcatcacagaa

SEQ ID NO: 203974 - DNA, 25 bp, Probe Sequence
gcctatttaatggaacctccataaa

SEQ ID NO: 203975 - DNA, 25 bp, Probe Sequence
gccttgatgtactggagcaatcaga

SEQ ID NO: 203976 - DNA, 25 bp, Probe Sequence
gccttcatgaaactggacacaccag

SEQ ID NO: 203977 - DNA, 25 bp, Probe Sequence
gccatcctgcaatctaagccacaat

SEQ ID NO: 203978 - DNA, 25 bp, Probe Sequence
gccatcactcaaccataacacttga

SEQ ID NO: 203979 - DNA, 25 bp, Probe Sequence
gccatcttcaagggactcatcatat

SEQ ID NO: 203980 - DNA, 25 bp, Probe Sequence
gccatcaaagggaacccatttgcca

SEQ ID NO: 203981 - DNA, 25 bp, Probe Sequence
gccatttgaggggagcccatggggc

SEQ ID NO: 203982 - DNA, 25 bp, Probe Sequence
gccattgctgagctgggcatctatc

SEQ ID NO: 203983 - DNA, 25 bp, Probe Sequence
gccatctggcattgaagctgcttat

SEQ ID NO: 203984 - DNA, 25 bp, Probe Sequence
gccatcatgggtcgcatgcatgctc

SEQ ID NO: 203985 - DNA, 25 bp, Probe Sequence
gccaggcgcagtggcacatgcctgt

SEQ ID NO: 203986 - DNA, 25 bp, Probe Sequence
gccagtggcagtgtatgctcatact

SEQ ID NO: 203987 - DNA, 25 bp, Probe Sequence
gccagggctcatgaatctcattctc

SEQ ID NO: 203988 - DNA, 25 bp, Probe Sequence
gccagatggaaggcaacatacatcc

SEQ ID NO: 203989 - DNA, 25 bp, Probe Sequence
gccagagtgatggcaccatcatagc

SEQ ID NO: 203990 - DNA, 25 bp, Probe Sequence
gccatgttgagctacttcaagccgc

SEQ ID NO: 203991 - DNA, 25 bp, Probe Sequence
gccagttggaagttccagccacaga

SEQ ID NO: 203992 - DNA, 25 bp, Probe Sequence
gccgtatgatgatgttcccgatttc

SEQ ID NO: 203993 - DNA, 25 bp, Probe Sequence
gccttattaagctccagaaattctg

SEQ ID NO: 203994 - DNA, 25 bp, Probe Sequence
gccttttcaagtgtgacaaactcac

SEQ ID NO: 203995 - DNA, 25 bp, Probe Sequence
gccatttaccttctaataaccctgc

SEQ ID NO: 203996 - DNA, 25 bp, Probe Sequence
gccttttcctctctaagagttctca

SEQ ID NO: 203997 - DNA, 25 bp, Probe Sequence
gccatgtttgggcctaaaggctttg

SEQ ID NO: 203998 - DNA, 25 bp, Probe Sequence
tgccatagtatgggccccgggattt

SEQ ID NO: 203999 - DNA, 25 bp, Probe Sequence
gccatagagagcagcctcgaggtgg

SEQ ID NO: 204000 - DNA, 25 bp, Probe Sequence
gcctagcagatgaagcttgccagca

SEQ ID NO: 204001 - DNA, 25 bp, Probe Sequence
gccatgagcagcaaagtctctcgcg

SEQ ID NO: 204002 - DNA, 25 bp, Probe Sequence
gccattgccatatttattcggtgga

SEQ ID NO: 204003 - DNA, 25 bp, Probe Sequence
gccgtccattgtcaacgaggtgctc

SEQ ID NO: 204004 - DNA, 25 bp, Probe Sequence
gccagttctggataatccactgtcc

SEQ ID NO: 204005 - DNA, 25 bp, Probe Sequence
gccagtggcttattaattccgatac

SEQ ID NO: 204006 - DNA, 25 bp, Probe Sequence
gccaggatggtctcaatctcctgat

SEQ ID NO: 204007 - DNA, 25 bp, Probe Sequence
gccagatgaggggacatttccttca

SEQ ID NO: 204008 - DNA, 25 bp, Probe Sequence
gccagaacggcaagagtgtccagta

SEQ ID NO: 204009 - DNA, 25 bp, Probe Sequence
gccatgaatcggggggcacgcagct

SEQ ID NO: 204010 - DNA, 25 bp, Probe Sequence
gccatgaatcctgtggagcatcctt

SEQ ID NO: 204011 - DNA, 25 bp, Probe Sequence
gccaggcatggtgggaggcacctgt

SEQ ID NO: 204012 - DNA, 25 bp, Probe Sequence
gccaggatggttagatacacagcat

SEQ ID NO: 204013 - DNA, 25 bp, Probe Sequence
gccattatggcccagtacaagacct

SEQ ID NO: 204014 - DNA, 25 bp, Probe Sequence
gccatcaatgaccccttcattgacc

SEQ ID NO: 204015 - DNA, 25 bp, Probe Sequence
gccatcaaactcattgtcactgtcc

SEQ ID NO: 204016 - DNA, 25 bp, Probe Sequence
gccatctgaacttgtttgcactgct

SEQ ID NO: 204017 - DNA, 25 bp, Probe Sequence
gccttggactcattgactccagcta

SEQ ID NO: 204018 - DNA, 25 bp, Probe Sequence
gccattacctgctgactgcggtata

SEQ ID NO: 204019 - DNA, 25 bp, Probe Sequence
gccattcacctggagtcctaatcca

SEQ ID NO: 204020 - DNA, 25 bp, Probe Sequence
gccattcgtatgcagccttgaaggg

SEQ ID NO: 204021 - DNA, 25 bp, Probe Sequence
gccaggcttggcacatgatgtgaag

SEQ ID NO: 204022 - DNA, 25 bp, Probe Sequence
gccaggattccaggcagcaggttgg

SEQ ID NO: 204023 - DNA, 25 bp, Probe Sequence
gccaggtttcaggacaggaaggagt

SEQ ID NO: 204024 - DNA, 25 bp, Probe Sequence
gccaggggtctggagatgaaagcga

SEQ ID NO: 204025 - DNA, 25 bp, Probe Sequence
gccaggtgggctggtgtaacaccag

SEQ ID NO: 204026 - DNA, 25 bp, Probe Sequence
gccagttgtgcacttttacaagccg

SEQ ID NO: 204027 - DNA, 25 bp, Probe Sequence
gccatgaaatgtactttgagaagcc

SEQ ID NO: 204028 - DNA, 25 bp, Probe Sequence
gccagacacaggactctgcaaggag

SEQ ID NO: 204029 - DNA, 25 bp, Probe Sequence
gccagtcacgagaacccagtggaca

SEQ ID NO: 204030 - DNA, 25 bp, Probe Sequence
gccttgtggtgttccatcaggtact

SEQ ID NO: 204031 - DNA, 25 bp, Probe Sequence
gccttgttgcgttccaggatgttgg

SEQ ID NO: 204032 - DNA, 25 bp, Probe Sequence
gcctttctggtttcggagcacgtaa

SEQ ID NO: 204033 - DNA, 25 bp, Probe Sequence
gcctatcgggcttaccagaactggg

SEQ ID NO: 204034 - DNA, 25 bp, Probe Sequence
gccttcgtgagcacggctaagtgcc

SEQ ID NO: 204035 - DNA, 25 bp, Probe Sequence
gccattggctggaacggcatcaact

SEQ ID NO: 204036 - DNA, 25 bp, Probe Sequence
gccatgtggggaaggttagacttgc

SEQ ID NO: 204037 - DNA, 25 bp, Probe Sequence
gccttggcgttactgttggacttgg

SEQ ID NO: 204038 - DNA, 25 bp, Probe Sequence
gcctctgggaaagtttggccaatgg

SEQ ID NO: 204039 - DNA, 25 bp, Probe Sequence
gcctgggtaaggatgctttcaagga

SEQ ID NO: 204040 - DNA, 25 bp, Probe Sequence
gcctaggctaatcttgttccaaaac

SEQ ID NO: 204041 - DNA, 25 bp, Probe Sequence
gcctaggctcaatgtctttggaatt

SEQ ID NO: 204042 - DNA, 25 bp, Probe Sequence
gccttcaatcaatattttggttttc

SEQ ID NO: 204043 - DNA, 25 bp, Probe Sequence
gccttccacaaatccatttgttgct

SEQ ID NO: 204044 - DNA, 25 bp, Probe Sequence
gccttggagcaagcacactttgtag

SEQ ID NO: 204045 - DNA, 25 bp, Probe Sequence
gccagggcagcaaacatccttgttc

SEQ ID NO: 204046 - DNA, 25 bp, Probe Sequence
gccatggagaacgaattgcctttca

SEQ ID NO: 204047 - DNA, 25 bp, Probe Sequence
gccatgaaggtcgagctgtgcagtt

SEQ ID NO: 204048 - DNA, 25 bp, Probe Sequence
gccatgaaggtaacaggcatctttc

SEQ ID NO: 204049 - DNA, 25 bp, Probe Sequence
gccatcacagagaacgtctgttttc

SEQ ID NO: 204050 - DNA, 25 bp, Probe Sequence
gcctcataggtagggtgcatgcagc

SEQ ID NO: 204051 - DNA, 25 bp, Probe Sequence
gccattgacctggaggatgcagcca

SEQ ID NO: 204052 - DNA, 25 bp, Probe Sequence
gccagtgagccttgggaggccagag

SEQ ID NO: 204053 - DNA, 25 bp, Probe Sequence
gccagggccttgtatgaagcaggag

SEQ ID NO: 204054 - DNA, 25 bp, Probe Sequence
gccagatccttccaatgaagcgaga

SEQ ID NO: 204055 - DNA, 25 bp, Probe Sequence
gccagatcagctcaagtgaccaaat

SEQ ID NO: 204056 - DNA, 25 bp, Probe Sequence
gccagatctaggtcagacaccagca

SEQ ID NO: 204057 - DNA, 25 bp, Probe Sequence
gccagtcaagcatagaattgcatcc

SEQ ID NO: 204058 - DNA, 25 bp, Probe Sequence
gccagtcatcactggacacgtctcc

SEQ ID NO: 204059 - DNA, 25 bp, Probe Sequence
gctgtgattcagtgaaccttgccct

SEQ ID NO: 204060 - DNA, 25 bp, Probe Sequence
gcctatgggaaatggctgtgctccc

SEQ ID NO: 204061 - DNA, 25 bp, Probe Sequence
gccaggggctaatggtgtcactgtg

SEQ ID NO: 204062 - DNA, 25 bp, Probe Sequence
gccaggggctaatggtgtcactgtg

SEQ ID NO: 204063 - DNA, 25 bp, Probe Sequence
gccaggaggtgaaggccgtcctgga

SEQ ID NO: 204064 - DNA, 25 bp, Probe Sequence
gcctgtggggtcagaggtcgtggaa

SEQ ID NO: 204065 - DNA, 25 bp, Probe Sequence
gccaggcaggggtgggggtggaggc

SEQ ID NO: 204066 - DNA, 25 bp, Probe Sequence
gccaggcgggctcaaggaaaggggg

SEQ ID NO: 204067 - DNA, 25 bp, Probe Sequence
gccaggctgggggttggaacagggg

SEQ ID NO: 204068 - DNA, 25 bp, Probe Sequence
gccaggctgggggttggaacagggg

SEQ ID NO: 204069 - DNA, 25 bp, Probe Sequence
gccttctggggcgaattacggaggg

SEQ ID NO: 204070 - DNA, 25 bp, Probe Sequence
gcgttttgggcagtacatacatggg

SEQ ID NO: 204071 - DNA, 25 bp, Probe Sequence
gcctttatgtggcaccaactgtgtg

SEQ ID NO: 204072 - DNA, 25 bp, Probe Sequence
gccttaaagtagtccattcttgcta

SEQ ID NO: 204073 - DNA, 25 bp, Probe Sequence
gcctgtaaatgtattcattcttaat

SEQ ID NO: 204074 - DNA, 25 bp, Probe Sequence
gccattgaaattcttacttggtatg

SEQ ID NO: 204075 - DNA, 25 bp, Probe Sequence
gccagtgaaataccactacctttat

SEQ ID NO: 204076 - DNA, 25 bp, Probe Sequence
gccattcagaaaagacttcctttgt

SEQ ID NO: 204077 - DNA, 25 bp, Probe Sequence
gccaggaacaagagttgctttggat

SEQ ID NO: 204078 - DNA, 25 bp, Probe Sequence
gccaggtacaagcagtcagttctcg

SEQ ID NO: 204079 - DNA, 25 bp, Probe Sequence
gccaggtgaccatggctacattgcc

SEQ ID NO: 204080 - DNA, 25 bp, Probe Sequence
gccagggcttacctgtacactgact

SEQ ID NO: 204081 - DNA, 25 bp, Probe Sequence
gccagtagcatatgcttgtctcaaa

SEQ ID NO: 204082 - DNA, 25 bp, Probe Sequence
gccagatagggccttcctacagagc

SEQ ID NO: 204083 - DNA, 25 bp, Probe Sequence
gccaggagaggacttccctgcagca

SEQ ID NO: 204084 - DNA, 25 bp, Probe Sequence
gccagtggagtcctggctccagagc

SEQ ID NO: 204085 - DNA, 25 bp, Probe Sequence
gccagatgaaatgctgccgcaatgg

SEQ ID NO: 204086 - DNA, 25 bp, Probe Sequence
gccttgcaaatgcgcactctatgga

SEQ ID NO: 204087 - DNA, 25 bp, Probe Sequence
gccttgggcatcacatttaccagtt

SEQ ID NO: 204088 - DNA, 25 bp, Probe Sequence
gccttaggcatgtgcaagtcccagg

SEQ ID NO: 204089 - DNA, 25 bp, Probe Sequence
gccttgatgacttacaagccctcaa

SEQ ID NO: 204090 - DNA, 25 bp, Probe Sequence
gccatgtttcatcaaggcaccacat

SEQ ID NO: 204091 - DNA, 25 bp, Probe Sequence
gccatatttctatttggaccacata

SEQ ID NO: 204092 - DNA, 25 bp, Probe Sequence
gccttggtcttctcgacacaatatt

SEQ ID NO: 204093 - DNA, 25 bp, Probe Sequence
gcctgtggtttctcctacaagtgag

SEQ ID NO: 204094 - DNA, 25 bp, Probe Sequence
gcctaggatttgtttgctaaagatc

SEQ ID NO: 204095 - DNA, 25 bp, Probe Sequence
gcctaagtgttgtttctgcaccatg

SEQ ID NO: 204096 - DNA, 25 bp, Probe Sequence
gcctagttgctgaaatttcctgctg

SEQ ID NO: 204097 - DNA, 25 bp, Probe Sequence
gccattgcctatattttctcagctc

SEQ ID NO: 204098 - DNA, 25 bp, Probe Sequence
gccattgactgctatatggttcggt

SEQ ID NO: 204099 - DNA, 25 bp, Probe Sequence
gccaggaatgcttatggtagcgatg

SEQ ID NO: 204100 - DNA, 25 bp, Probe Sequence
gccagtgacagttgcagaaatgagg

SEQ ID NO: 204101 - DNA, 25 bp, Probe Sequence
gccatgtgtcaggagggaaaggcct

SEQ ID NO: 204102 - DNA, 25 bp, Probe Sequence
gccagtgtcagggtcggagtggcct

SEQ ID NO: 204103 - DNA, 25 bp, Probe Sequence
gccgggggttcataggtcactggct

SEQ ID NO: 204104 - DNA, 25 bp, Probe Sequence
gccgaaggtttccattggacctgcc

SEQ ID NO: 204105 - DNA, 25 bp, Probe Sequence
gccatgaaaggatgctttgggcccc

SEQ ID NO: 204106 - DNA, 25 bp, Probe Sequence
gccatggcagggtcgggggatgccg

SEQ ID NO: 204107 - DNA, 25 bp, Probe Sequence
gccaggcacaggttggggggctgcc

SEQ ID NO: 204108 - DNA, 25 bp, Probe Sequence
gccattccactgtttgggaactccc

SEQ ID NO: 204109 - DNA, 25 bp, Probe Sequence
gccttccagctgtttgaccgaacag

SEQ ID NO: 204110 - DNA, 25 bp, Probe Sequence
gccttccagctgtttgaccgaacag

SEQ ID NO: 204111 - DNA, 25 bp, Probe Sequence
gccttcaagcgtcagaccgagtgca

SEQ ID NO: 204112 - DNA, 25 bp, Probe Sequence
gccagtgcaagctggtggtcgagga

SEQ ID NO: 204113 - DNA, 25 bp, Probe Sequence
gccattgcacactggggtgatgggt

SEQ ID NO: 204114 - DNA, 25 bp, Probe Sequence
gccagtgcaccagcagtttaggtgt

SEQ ID NO: 204115 - DNA, 25 bp, Probe Sequence
gccatggacgcagcagttacagcac

SEQ ID NO: 204116 - DNA, 25 bp, Probe Sequence
gccatgagccgctacatactcatca

SEQ ID NO: 204117 - DNA, 25 bp, Probe Sequence
gccatgcagcacttaaacttgtgat

SEQ ID NO: 204118 - DNA, 25 bp, Probe Sequence
gccatgctgactgagtgactggaga

SEQ ID NO: 204119 - DNA, 25 bp, Probe Sequence
gccatgattgctgctggacttgttg

SEQ ID NO: 204120 - DNA, 25 bp, Probe Sequence
gccagtgcatatgatgtgacatttt

SEQ ID NO: 204121 - DNA, 25 bp, Probe Sequence
gccaggaacctgtccaatttggaga

SEQ ID NO: 204122 - DNA, 25 bp, Probe Sequence
gccatggtaccggggacttgggaga

SEQ ID NO: 204123 - DNA, 25 bp, Probe Sequence
gccgttagcgactgcgacgttcgat

SEQ ID NO: 204124 - DNA, 25 bp, Probe Sequence
gcccattaccacatgtagccttgga

SEQ ID NO: 204125 - DNA, 25 bp, Probe Sequence
gcccatgaaccctctgatcactggg

SEQ ID NO: 204126 - DNA, 25 bp, Probe Sequence
gcctataatcccagctactcaggag

SEQ ID NO: 204127 - DNA, 25 bp, Probe Sequence
gccttggtagccaccagtgggtgtg

SEQ ID NO: 204128 - DNA, 25 bp, Probe Sequence
gcctttgtacccaatgacggttgct

SEQ ID NO: 204129 - DNA, 25 bp, Probe Sequence
gccatttataaagaactgtggacag

SEQ ID NO: 204130 - DNA, 25 bp, Probe Sequence
gcctactctaaagccgcatttgaaa

SEQ ID NO: 204131 - DNA, 25 bp, Probe Sequence
gcctactttaacacctgtcagagaa

SEQ ID NO: 204132 - DNA, 25 bp, Probe Sequence
gcctattttgagagccttctagaga

SEQ ID NO: 204133 - DNA, 25 bp, Probe Sequence
gcctctctttagtggctctttagag

SEQ ID NO: 204134 - DNA, 25 bp, Probe Sequence
gccttcctctcagaggtgttctaag

SEQ ID NO: 204135 - DNA, 25 bp, Probe Sequence
gccttcagtcatgctatgggattta

SEQ ID NO: 204136 - DNA, 25 bp, Probe Sequence
gcctttgttgccatggttactactg

SEQ ID NO: 204137 - DNA, 25 bp, Probe Sequence
gccattagttgaaaggttgctcatg

SEQ ID NO: 204138 - DNA, 25 bp, Probe Sequence
gccgatatggtgaagaccttctctt

SEQ ID NO: 204139 - DNA, 25 bp, Probe Sequence
gccagtatggtgaaaccctgtctct

SEQ ID NO: 204140 - DNA, 25 bp, Probe Sequence
gccagtatggtgaaaccctgtctct

SEQ ID NO: 204141 - DNA, 25 bp, Probe Sequence
gccatgagattgtgcagaccctgtc

SEQ ID NO: 204142 - DNA, 25 bp, Probe Sequence
gccatgaattcagtgaactcttttc

SEQ ID NO: 204143 - DNA, 25 bp, Probe Sequence
gccatgggaagtccctttgcactgc

SEQ ID NO: 204144 - DNA, 25 bp, Probe Sequence
gccatgggaagtccctttgcactgc

SEQ ID NO: 204145 - DNA, 25 bp, Probe Sequence
gccatggggagtgcctgttaataca

SEQ ID NO: 204146 - DNA, 25 bp, Probe Sequence
gccaggaaaggctaggttcagtaga

SEQ ID NO: 204147 - DNA, 25 bp, Probe Sequence
gccaggaacccttaaacagttgcac

SEQ ID NO: 204148 - DNA, 25 bp, Probe Sequence
gccaggaaggccaaaatcaagagtg

SEQ ID NO: 204149 - DNA, 25 bp, Probe Sequence
gccaggagcgttatcaacgcaagga

SEQ ID NO: 204150 - DNA, 25 bp, Probe Sequence
gccggaagcttaccagccgagaagg

SEQ ID NO: 204151 - DNA, 25 bp, Probe Sequence
gcctgaggggtacagcaaaggggac

SEQ ID NO: 204152 - DNA, 25 bp, Probe Sequence
gcctacgccgtagacaacacagggt

SEQ ID NO: 204153 - DNA, 25 bp, Probe Sequence
gcctacctcttagacatgttgtgag

SEQ ID NO: 204154 - DNA, 25 bp, Probe Sequence
gcctcactgacagaccagcattttt

SEQ ID NO: 204155 - DNA, 25 bp, Probe Sequence
gccttctagcacgccaaataaattc

SEQ ID NO: 204156 - DNA, 25 bp, Probe Sequence
gccattccgatctgccttatgaaat

SEQ ID NO: 204157 - DNA, 25 bp, Probe Sequence
gccataaccattacttactgcaagc

SEQ ID NO: 204158 - DNA, 25 bp, Probe Sequence
gccatatcccattggttaaaagcaa

SEQ ID NO: 204159 - DNA, 25 bp, Probe Sequence
gccatgtctcactgtttaaataaaa

SEQ ID NO: 204160 - DNA, 25 bp, Probe Sequence
gccttgccatcttgtggccgaataa

SEQ ID NO: 204161 - DNA, 25 bp, Probe Sequence
gccaggcacatttgatggttgcatc

SEQ ID NO: 204162 - DNA, 25 bp, Probe Sequence
gcctcacagctttgatggcagtgcc

SEQ ID NO: 204163 - DNA, 25 bp, Probe Sequence
gccatcgagctgagtgtgatcatcc

SEQ ID NO: 204164 - DNA, 25 bp, Probe Sequence
gccatgagatgtagccttgtaggct

SEQ ID NO: 204165 - DNA, 25 bp, Probe Sequence
gccatagatcattcctttcaactgg

SEQ ID NO: 204166 - DNA, 25 bp, Probe Sequence
gccatatgatatacctcaccgagca

SEQ ID NO: 204167 - DNA, 25 bp, Probe Sequence
gccattatcagtgcctcatctgtgc

SEQ ID NO: 204168 - DNA, 25 bp, Probe Sequence
gccatgttaatgacccagcttgggg

SEQ ID NO: 204169 - DNA, 25 bp, Probe Sequence
gccatggtaatcctgctcagtacga

SEQ ID NO: 204170 - DNA, 25 bp, Probe Sequence
gccatggtattccactacatgagca

SEQ ID NO: 204171 - DNA, 25 bp, Probe Sequence
gccatgtgatgttccacaagtgcag

SEQ ID NO: 204172 - DNA, 25 bp, Probe Sequence
gccatgtgatctggtcaagatgaag

SEQ ID NO: 204173 - DNA, 25 bp, Probe Sequence
gccatatgatttacagatctatcct

SEQ ID NO: 204174 - DNA, 25 bp, Probe Sequence
gccatctcaattaccatatatacac

SEQ ID NO: 204175 - DNA, 25 bp, Probe Sequence
gccattaaacaggttctgacccagc

SEQ ID NO: 204176 - DNA, 25 bp, Probe Sequence
gccttaacacagctctatacctaga

SEQ ID NO: 204177 - DNA, 25 bp, Probe Sequence
gccttagcagaagataaatcctacc

SEQ ID NO: 204178 - DNA, 25 bp, Probe Sequence
gccttcaaaggcctaaaagcctcac

SEQ ID NO: 204179 - DNA, 25 bp, Probe Sequence
gccttgcaaaacctgcacaatcagt

SEQ ID NO: 204180 - DNA, 25 bp, Probe Sequence
gccagtgcactcaagcctgagcaat

SEQ ID NO: 204181 - DNA, 25 bp, Probe Sequence
gccaggtcatcaccattggcaatga

SEQ ID NO: 204182 - DNA, 25 bp, Probe Sequence
gccatggtcaccgtgctggagatgg

SEQ ID NO: 204183 - DNA, 25 bp, Probe Sequence
gccatggagagtgtctgcggatact

SEQ ID NO: 204184 - DNA, 25 bp, Probe Sequence
gccaggagttgtctgcgagattgta

SEQ ID NO: 204185 - DNA, 25 bp, Probe Sequence
gccagtgtggttgtagagattgtag

SEQ ID NO: 204186 - DNA, 25 bp, Probe Sequence
gcctctgtccttgtaagtcagttga

SEQ ID NO: 204187 - DNA, 25 bp, Probe Sequence
gactctactttgggtcccagatgta

SEQ ID NO: 204188 - DNA, 25 bp, Probe Sequence
gcctctaccatgtgagtcccagaga

SEQ ID NO: 204189 - DNA, 25 bp, Probe Sequence
gccttcagcctagatggtgcaaagc

SEQ ID NO: 204190 - DNA, 25 bp, Probe Sequence
gcctttgccctgaggtgttacaatc

SEQ ID NO: 204191 - DNA, 25 bp, Probe Sequence
gcctctttcctgttgttgttaatga

SEQ ID NO: 204192 - DNA, 25 bp, Probe Sequence
gcctttccaggtacttttgcagtga

SEQ ID NO: 204193 - DNA, 25 bp, Probe Sequence
gccattctctgcagttttctgttgg

SEQ ID NO: 204194 - DNA, 25 bp, Probe Sequence
gcctttctagtcctattctattgca

SEQ ID NO: 204195 - DNA, 25 bp, Probe Sequence
gccatactccacagaatcttatcac

SEQ ID NO: 204196 - DNA, 25 bp, Probe Sequence
gccttgcttgccagaatttgacttt

SEQ ID NO: 204197 - DNA, 25 bp, Probe Sequence
gccttgcacagccactgagtatttt

SEQ ID NO: 204198 - DNA, 25 bp, Probe Sequence
gccttgattgctcctagttatatac

SEQ ID NO: 204199 - DNA, 25 bp, Probe Sequence
gcctttctctcagtgtttatctaca

SEQ ID NO: 204200 - DNA, 25 bp, Probe Sequence
gcctttctctcagtgtttatctaca

SEQ ID NO: 204201 - DNA, 25 bp, Probe Sequence
gccattttgatcatttgtcactata

SEQ ID NO: 204202 - DNA, 25 bp, Probe Sequence
gccattcatatagtattgttagcca

SEQ ID NO: 204203 - DNA, 25 bp, Probe Sequence
gccttcattattacacgttccagtt

SEQ ID NO: 204204 - DNA, 25 bp, Probe Sequence
gccatctattttaaagctatccagg

SEQ ID NO: 204205 - DNA, 25 bp, Probe Sequence
gccatcctcattgagaattctccgg

SEQ ID NO: 204206 - DNA, 25 bp, Probe Sequence
gccgcactcagttatggcttctacg

SEQ ID NO: 204207 - DNA, 25 bp, Probe Sequence
gccgcactcagttatggcttctacg

SEQ ID NO: 204208 - DNA, 25 bp, Probe Sequence
gccatgagtatgctcaggcttcaga

SEQ ID NO: 204209 - DNA, 25 bp, Probe Sequence
gccatatccatctgcaggaacagca

SEQ ID NO: 204210 - DNA, 25 bp, Probe Sequence
gccatacatgtctgcaatgaagaga

SEQ ID NO: 204211 - DNA, 25 bp, Probe Sequence
gccatcacaatcaaacagatcctat

SEQ ID NO: 204212 - DNA, 25 bp, Probe Sequence
gccatacagaaatcactccagaagc

SEQ ID NO: 204213 - DNA, 25 bp, Probe Sequence
gcctcaaagaaaacccagagtgccc

SEQ ID NO: 204214 - DNA, 25 bp, Probe Sequence
gcctaatggagaagacccacgtgct

SEQ ID NO: 204215 - DNA, 25 bp, Probe Sequence
gccatggtggagggcacttcaggtc

SEQ ID NO: 204216 - DNA, 25 bp, Probe Sequence
gccatggatggagcccttgggctct

SEQ ID NO: 204217 - DNA, 25 bp, Probe Sequence
gccatatagcaggcacgtccgggtc

SEQ ID NO: 204218 - DNA, 25 bp, Probe Sequence
gccatatagcaggcacgtccgggtc

SEQ ID NO: 204219 - DNA, 25 bp, Probe Sequence
gccatatagcaggcacgtccgggtc

SEQ ID NO: 204220 - DNA, 25 bp, Probe Sequence
gccatgaccatgtactgccaagtgg

SEQ ID NO: 204221 - DNA, 25 bp, Probe Sequence
gccaggcaagaactccagagctctg

SEQ ID NO: 204222 - DNA, 25 bp, Probe Sequence
gccaggctagagatcctgcagctcc

SEQ ID NO: 204223 - DNA, 25 bp, Probe Sequence
gcctagctagaggatctgtgacccc

SEQ ID NO: 204224 - DNA, 25 bp, Probe Sequence
gcgtcagtgagggttttcatagctt

SEQ ID NO: 204225 - DNA, 25 bp, Probe Sequence
gcgaccaagacgattttctgcctta

SEQ ID NO: 204226 - DNA, 25 bp, Probe Sequence
gcgtcgccaaaaatttacttcgcca

SEQ ID NO: 204227 - DNA, 25 bp, Probe Sequence
gcgtcgccaaaactagtgttcttta

SEQ ID NO: 204228 - DNA, 25 bp, Probe Sequence
gcagccccaaaactggggtcagcct

SEQ ID NO: 204229 - DNA, 25 bp, Probe Sequence
gcctaccaacaactgggcttatcac

SEQ ID NO: 204230 - DNA, 25 bp, Probe Sequence
gcctaccgagtatttccttacagtg

SEQ ID NO: 204231 - DNA, 25 bp, Probe Sequence
gcctattcgcaggatttctcattac

SEQ ID NO: 204232 - DNA, 25 bp, Probe Sequence
gcctcactgcggcttatacagtacc

SEQ ID NO: 204233 - DNA, 25 bp, Probe Sequence
gcctcctgaaggtggaagctatgct

SEQ ID NO: 204234 - DNA, 25 bp, Probe Sequence
gcctcctgccgatcagtggaaatgg

SEQ ID NO: 204235 - DNA, 25 bp, Probe Sequence
tcctgtccggaattggggaatgaca

SEQ ID NO: 204236 - DNA, 25 bp, Probe Sequence
gccatgaccgttatgaggaaatatc

SEQ ID NO: 204237 - DNA, 25 bp, Probe Sequence
gccatgaccctgtggatgggagaat

SEQ ID NO: 204238 - DNA, 25 bp, Probe Sequence
gcctgaacccgggtgatggctgaac

SEQ ID NO: 204239 - DNA, 25 bp, Probe Sequence
gccatgagagtgcgaggctgggctg

SEQ ID NO: 204240 - DNA, 25 bp, Probe Sequence
gccatgaggctgtgaccagcgctgt

SEQ ID NO: 204241 - DNA, 25 bp, Probe Sequence
gccatgagcggtccattacgcagat

SEQ ID NO: 204242 - DNA, 25 bp, Probe Sequence
gccatggaggatgctaaaccattga

SEQ ID NO: 204243 - DNA, 25 bp, Probe Sequence
gccaggatggcgaggaactcaataa

SEQ ID NO: 204244 - DNA, 25 bp, Probe Sequence
gcctcttgaggtgggaataaaaact

SEQ ID NO: 204245 - DNA, 25 bp, Probe Sequence
gccatccgagggcacctggaaaaca

SEQ ID NO: 204246 - DNA, 25 bp, Probe Sequence
gcctccgcaggacaccgaggaagat

SEQ ID NO: 204247 - DNA, 25 bp, Probe Sequence
gccatcgccaagtaagaaagtgaag

SEQ ID NO: 204248 - DNA, 25 bp, Probe Sequence
gcctcagcctcccaagtaggtggga

SEQ ID NO: 204249 - DNA, 25 bp, Probe Sequence
gcctccccattgcctggggatggga

SEQ ID NO: 204250 - DNA, 25 bp, Probe Sequence
gccatgcactctatccgggagatgg

SEQ ID NO: 204251 - DNA, 25 bp, Probe Sequence
gccatccattcacagccaggagatg

SEQ ID NO: 204252 - DNA, 25 bp, Probe Sequence
gccatgcaattcatcccagaggaac

SEQ ID NO: 204253 - DNA, 25 bp, Probe Sequence
gcctgcaattttacctagctaccac

SEQ ID NO: 204254 - DNA, 25 bp, Probe Sequence
gccttaggggatgccgctgacatcc

SEQ ID NO: 204255 - DNA, 25 bp, Probe Sequence
gcctattgcgggaggagctacagct

SEQ ID NO: 204256 - DNA, 25 bp, Probe Sequence
gcctcttcacggattactacggccg

SEQ ID NO: 204257 - DNA, 25 bp, Probe Sequence
gcctttccgctgagtccagattggc

SEQ ID NO: 204258 - DNA, 25 bp, Probe Sequence
gcctttccgctgagtccagattggc

SEQ ID NO: 204259 - DNA, 25 bp, Probe Sequence
gccatcttcgagtggtccagtgttc

SEQ ID NO: 204260 - DNA, 25 bp, Probe Sequence
gccatcttcgagtggtccagtgttc

SEQ ID NO: 204261 - DNA, 25 bp, Probe Sequence
gccatcttcgagtggtccagtgttc

SEQ ID NO: 204262 - DNA, 25 bp, Probe Sequence
gccatcttcaagtttgttcagtcta

SEQ ID NO: 204263 - DNA, 25 bp, Probe Sequence
gccatcttcaagtttgttcagtcta

SEQ ID NO: 204264 - DNA, 25 bp, Probe Sequence
gccatcattatatgtttaagtctat

SEQ ID NO: 204265 - DNA, 25 bp, Probe Sequence
gccttactaagcatatgatagttca

SEQ ID NO: 204266 - DNA, 25 bp, Probe Sequence
gcctccacttacctggaggcccatc

SEQ ID NO: 204267 - DNA, 25 bp, Probe Sequence
gccatccacttattaatggacccat

SEQ ID NO: 204268 - DNA, 25 bp, Probe Sequence
gccatctcactctaaagataacctg

SEQ ID NO: 204269 - DNA, 25 bp, Probe Sequence
gccatcatcgcgccaaattttgcgc

SEQ ID NO: 204270 - DNA, 25 bp, Probe Sequence
gccatgcaagcagaaaagttcccct

SEQ ID NO: 204271 - DNA, 25 bp, Probe Sequence
gccatgaaccattataaaatcccaa

SEQ ID NO: 204272 - DNA, 25 bp, Probe Sequence
gcctaacatttagtaaacactcaaa

SEQ ID NO: 204273 - DNA, 25 bp, Probe Sequence
gctttttgtctagataacctctttt

SEQ ID NO: 204274 - DNA, 25 bp, Probe Sequence
gcctaattgttaggtagcccttact

SEQ ID NO: 204275 - DNA, 25 bp, Probe Sequence
gctcagagccggtggtagaccttac

SEQ ID NO: 204276 - DNA, 25 bp, Probe Sequence
gccgagcgggaacggaaccgacagc

SEQ ID NO: 204277 - DNA, 25 bp, Probe Sequence
gcccggtaatgactgggtccagagc

SEQ ID NO: 204278 - DNA, 25 bp, Probe Sequence
gcctacttcaagcggggcaaggccc

SEQ ID NO: 204279 - DNA, 25 bp, Probe Sequence
gcgggctaccagtgatgggttggct

SEQ ID NO: 204280 - DNA, 25 bp, Probe Sequence
gccttgaacgagtgcgggctggtgc

SEQ ID NO: 204281 - DNA, 25 bp, Probe Sequence
gccttgaaaatagtggggggcactc

SEQ ID NO: 204282 - DNA, 25 bp, Probe Sequence
gccttgaattaagtcttccttccct

SEQ ID NO: 204283 - DNA, 25 bp, Probe Sequence
gccttgtgattatcttctccacatc

SEQ ID NO: 204284 - DNA, 25 bp, Probe Sequence
gccttagatctctcgccgccaatgc

SEQ ID NO: 204285 - DNA, 25 bp, Probe Sequence
gccttcagtaatccccttaaggaga

SEQ ID NO: 204286 - DNA, 25 bp, Probe Sequence
gccttaggcaaacctcactagggaa

SEQ ID NO: 204287 - DNA, 25 bp, Probe Sequence
gccttaccaaatcctagtgttatac

SEQ ID NO: 204288 - DNA, 25 bp, Probe Sequence
gccttcaccacatattagtgcttga

SEQ ID NO: 204289 - DNA, 25 bp, Probe Sequence
gccttcccccgtaaatgatatcatc

SEQ ID NO: 204290 - DNA, 25 bp, Probe Sequence
gccttcaatcctgataatccttatc

SEQ ID NO: 204291 - DNA, 25 bp, Probe Sequence
gcctatgacaccccttttgtgtatg

SEQ ID NO: 204292 - DNA, 25 bp, Probe Sequence
gcctgtagtcctagctacttgggag

SEQ ID NO: 204293 - DNA, 25 bp, Probe Sequence
gccatcaaatccaattcctggtggg

SEQ ID NO: 204294 - DNA, 25 bp, Probe Sequence
gcgatcacccgaaagcctggtgtct

SEQ ID NO: 204295 - DNA, 25 bp, Probe Sequence
gcctcacacttgaaagacggtgttt

SEQ ID NO: 204296 - DNA, 25 bp, Probe Sequence
gcctgcacgctggctaaaacggctt

SEQ ID NO: 204297 - DNA, 25 bp, Probe Sequence
gccataagccgcaagacatgacgtt

SEQ ID NO: 204298 - DNA, 25 bp, Probe Sequence
gccataatcctctgaatgatgcatt

SEQ ID NO: 204299 - DNA, 25 bp, Probe Sequence
gccataatctctgtgaatttgtcct

SEQ ID NO: 204300 - DNA, 25 bp, Probe Sequence
gccttattagccagattgtgtcctc

SEQ ID NO: 204301 - DNA, 25 bp, Probe Sequence
gccttttccacacgcattaatagtc

SEQ ID NO: 204302 - DNA, 25 bp, Probe Sequence
gccttttctaaagatcaatactata

SEQ ID NO: 204303 - DNA, 25 bp, Probe Sequence
gcctttttaaactatcatcctgtaa

SEQ ID NO: 204304 - DNA, 25 bp, Probe Sequence
gcctttttgattaaattcctgctcc

SEQ ID NO: 204305 - DNA, 25 bp, Probe Sequence
gcctcttaaggaaaatttgcttcca

SEQ ID NO: 204306 - DNA, 25 bp, Probe Sequence
gcgtttccccgcataaacaacataa

SEQ ID NO: 204307 - DNA, 25 bp, Probe Sequence
ggtttggactggagccaagaaaaca

SEQ ID NO: 204308 - DNA, 25 bp, Probe Sequence
gcgtgtttacggaggaagaggacag

SEQ ID NO: 204309 - DNA, 25 bp, Probe Sequence
gccattttactgcacccaaaggaat

SEQ ID NO: 204310 - DNA, 25 bp, Probe Sequence
gccatatttattcggtggaaaaaat

SEQ ID NO: 204311 - DNA, 25 bp, Probe Sequence
gcctgattttggctttagaaaacat

SEQ ID NO: 204312 - DNA, 25 bp, Probe Sequence
gcctgttttgagtgcttaatacaat

SEQ ID NO: 204313 - DNA, 25 bp, Probe Sequence
gcctttgttcagtccaataaacttt

SEQ ID NO: 204314 - DNA, 25 bp, Probe Sequence
gccttgttgtctcacacaaaagcct

SEQ ID NO: 204315 - DNA, 25 bp, Probe Sequence
gcctgttgttctcattacaaccctt

SEQ ID NO: 204316 - DNA, 25 bp, Probe Sequence
gccatcttaatacattaaaccagtt

SEQ ID NO: 204317 - DNA, 25 bp, Probe Sequence
gccatcttctcatgtatcttaaccc

SEQ ID NO: 204318 - DNA, 25 bp, Probe Sequence
gccatttccctgaacagatacatac

SEQ ID NO: 204319 - DNA, 25 bp, Probe Sequence
gccattgtactccagcctggacaac

SEQ ID NO: 204320 - DNA, 25 bp, Probe Sequence
gccattgtactccagcctggacaac

SEQ ID NO: 204321 - DNA, 25 bp, Probe Sequence
gccattgacacagtagcagtagaat

SEQ ID NO: 204322 - DNA, 25 bp, Probe Sequence
gccatgctgagacgaagcagctgac

SEQ ID NO: 204323 - DNA, 25 bp, Probe Sequence
gccatgctgagacaaagcagctgac

SEQ ID NO: 204324 - DNA, 25 bp, Probe Sequence
gccatcgtgggctacaaggactcgc

SEQ ID NO: 204325 - DNA, 25 bp, Probe Sequence
gccatggggatataaatacacccgg

SEQ ID NO: 204326 - DNA, 25 bp, Probe Sequence
gccatggggatcaaggagacccgga

SEQ ID NO: 204327 - DNA, 25 bp, Probe Sequence
gcctggacgccaatgtgaaccggaa

SEQ ID NO: 204328 - DNA, 25 bp, Probe Sequence
gcctggaacctaagaccctgaattc

SEQ ID NO: 204329 - DNA, 25 bp, Probe Sequence
gcctgtggaccggaagcaccaaatg

SEQ ID NO: 204330 - DNA, 25 bp, Probe Sequence
gcctgtggaccggaagcaccaaatg

SEQ ID NO: 204331 - DNA, 25 bp, Probe Sequence
gccattcaactcggaaactataagt

SEQ ID NO: 204332 - DNA, 25 bp, Probe Sequence
gctcaagcaacttcgaagccaaaat

SEQ ID NO: 204333 - DNA, 25 bp, Probe Sequence
gcctctgcaactacaaggccaagca

SEQ ID NO: 204334 - DNA, 25 bp, Probe Sequence
gcctagcatagtacctgactcaata

SEQ ID NO: 204335 - DNA, 25 bp, Probe Sequence
gccattctagattacaattccattg

SEQ ID NO: 204336 - DNA, 25 bp, Probe Sequence
gccatatttgctttgaactctgatt

SEQ ID NO: 204337 - DNA, 25 bp, Probe Sequence
gcctatgtggctgatggcaccatgt

SEQ ID NO: 204338 - DNA, 25 bp, Probe Sequence
gcctataggcattatgtccctcaaa

SEQ ID NO: 204339 - DNA, 25 bp, Probe Sequence
gcctatggatcatgcttccttaata

SEQ ID NO: 204340 - DNA, 25 bp, Probe Sequence
gccataggaacacttctgtctacat

SEQ ID NO: 204341 - DNA, 25 bp, Probe Sequence
gccatcgagaagctcttgtgaaata

SEQ ID NO: 204342 - DNA, 25 bp, Probe Sequence
gcctttgacagttcttggaattttc

SEQ ID NO: 204343 - DNA, 25 bp, Probe Sequence
gcctttgacctgtcaaggaactcag

SEQ ID NO: 204344 - DNA, 25 bp, Probe Sequence
gcctctggattcacgggaacgatgc

SEQ ID NO: 204345 - DNA, 25 bp, Probe Sequence
gcctctggaacgtgtccaacgaggt

SEQ ID NO: 204346 - DNA, 25 bp, Probe Sequence
gcctcgaaagctgttgagccacggc

SEQ ID NO: 204347 - DNA, 25 bp, Probe Sequence
gcctcgaaatgcagaacgacgccgg

SEQ ID NO: 204348 - DNA, 25 bp, Probe Sequence
gccatagaaattggtgtctcccctg

SEQ ID NO: 204349 - DNA, 25 bp, Probe Sequence
gcctatgaggacagtgtccgccctg

SEQ ID NO: 204350 - DNA, 25 bp, Probe Sequence
gcctcagagaactctggaacccgtt

SEQ ID NO: 204351 - DNA, 25 bp, Probe Sequence
gcctcaaaattagtagacctgccct

SEQ ID NO: 204352 - DNA, 25 bp, Probe Sequence
gccatatgacaacaaagtctttcct

SEQ ID NO: 204353 - DNA, 25 bp, Probe Sequence
gcctcagacactactgaggtggttc

SEQ ID NO: 204354 - DNA, 25 bp, Probe Sequence
gcctccatgcctaggtggtggtaca

SEQ ID NO: 204355 - DNA, 25 bp, Probe Sequence
gccatccaccttcagatgtgtctac

SEQ ID NO: 204356 - DNA, 25 bp, Probe Sequence
gccatcaccgagaacagtatgtgta

SEQ ID NO: 204357 - DNA, 25 bp, Probe Sequence
gccatcctggagtacactgttgtct

SEQ ID NO: 204358 - DNA, 25 bp, Probe Sequence
gccatcctggagtacactgttgtct

SEQ ID NO: 204359 - DNA, 25 bp, Probe Sequence
gccatcctggagtacactgttgtct

SEQ ID NO: 204360 - DNA, 25 bp, Probe Sequence
gccatcctggagtacactgttgtct

SEQ ID NO: 204361 - DNA, 25 bp, Probe Sequence
gccatcctgactgctcagctggatg

SEQ ID NO: 204362 - DNA, 25 bp, Probe Sequence
gccatcctgttgggcatgctggatc

SEQ ID NO: 204363 - DNA, 25 bp, Probe Sequence
gccatcaccttctgcagcagaggca

SEQ ID NO: 204364 - DNA, 25 bp, Probe Sequence
gccatccagctggacgacgaacata

SEQ ID NO: 204365 - DNA, 25 bp, Probe Sequence
gccatccagctggacgacgaacgta

SEQ ID NO: 204366 - DNA, 25 bp, Probe Sequence
gccatgaagctgggcttcagtaggc

SEQ ID NO: 204367 - DNA, 25 bp, Probe Sequence
gccatacagctggccatgatatgtt

SEQ ID NO: 204368 - DNA, 25 bp, Probe Sequence
gccatgaagtgaggagatggttatt

SEQ ID NO: 204369 - DNA, 25 bp, Probe Sequence
gccatcatagtagcaattgtaatgt

SEQ ID NO: 204370 - DNA, 25 bp, Probe Sequence
gccatcatagagctgactggtacag

SEQ ID NO: 204371 - DNA, 25 bp, Probe Sequence
gccatctgggcagtcaggggcaagg

SEQ ID NO: 204372 - DNA, 25 bp, Probe Sequence
gccatccaggcagaggagatcatga

SEQ ID NO: 204373 - DNA, 25 bp, Probe Sequence
gccatccacacttagagagcttgag

SEQ ID NO: 204374 - DNA, 25 bp, Probe Sequence
gcctccacctagaagctgaatagtg

SEQ ID NO: 204375 - DNA, 25 bp, Probe Sequence
gcctacccaacacgctggtatttgg

SEQ ID NO: 204376 - DNA, 25 bp, Probe Sequence
gccttcataccccgaagtctttgag

SEQ ID NO: 204377 - DNA, 25 bp, Probe Sequence
gccttcataccccgaagtctttgag

SEQ ID NO: 204378 - DNA, 25 bp, Probe Sequence
gccttattccactgctggggattga

SEQ ID NO: 204379 - DNA, 25 bp, Probe Sequence
gcctatttcctatgctggagttttg

SEQ ID NO: 204380 - DNA, 25 bp, Probe Sequence
gccttgcttataacagtggaggtat

SEQ ID NO: 204381 - DNA, 25 bp, Probe Sequence
gcatctgttcaaagtcgtagggctt

SEQ ID NO: 204382 - DNA, 25 bp, Probe Sequence
gccgtaaataggctcatctacctct

SEQ ID NO: 204383 - DNA, 25 bp, Probe Sequence
gcctttttaggccacagtgacctgc

SEQ ID NO: 204384 - DNA, 25 bp, Probe Sequence
gcctttttaggccacagtgacctgc

SEQ ID NO: 204385 - DNA, 25 bp, Probe Sequence
gcctttttaggccacagtgacctgc

SEQ ID NO: 204386 - DNA, 25 bp, Probe Sequence
gcctttttaggccacagtgacctgc

SEQ ID NO: 204387 - DNA, 25 bp, Probe Sequence
gcctttgttaagcagcgagggcgcg

SEQ ID NO: 204388 - DNA, 25 bp, Probe Sequence
gccttagagtacagatgggtgtgcc

SEQ ID NO: 204389 - DNA, 25 bp, Probe Sequence
gccttggagggtcagggctgatacc

SEQ ID NO: 204390 - DNA, 25 bp, Probe Sequence
gccttgtgccagttgaagaggtgga

SEQ ID NO: 204391 - DNA, 25 bp, Probe Sequence
gcctttgacagatacgcagatgcgg

SEQ ID NO: 204392 - DNA, 25 bp, Probe Sequence
gcctttgacctggatgccaagcggc

SEQ ID NO: 204393 - DNA, 25 bp, Probe Sequence
gcctttgacctggatgccaagcggc

SEQ ID NO: 204394 - DNA, 25 bp, Probe Sequence
gccatcttgatgccaggacacacag

SEQ ID NO: 204395 - DNA, 25 bp, Probe Sequence
gccatctatggggtaccccaagtcg

SEQ ID NO: 204396 - DNA, 25 bp, Probe Sequence
gcctttggtgtgtaccccaatgtat

SEQ ID NO: 204397 - DNA, 25 bp, Probe Sequence
gcctttgtgtgtatctctccaataa

SEQ ID NO: 204398 - DNA, 25 bp, Probe Sequence
gccatagtttgttaatctcaactaa

SEQ ID NO: 204399 - DNA, 25 bp, Probe Sequence
gcctctggcttgagaacttactaaa

SEQ ID NO: 204400 - DNA, 25 bp, Probe Sequence
gccttgcttttatcacttaatttga

SEQ ID NO: 204401 - DNA, 25 bp, Probe Sequence
gcctcctttaattcctaagactgat

SEQ ID NO: 204402 - DNA, 25 bp, Probe Sequence
gccttctttcaatagcaaatgcttt

SEQ ID NO: 204403 - DNA, 25 bp, Probe Sequence
gccatcttagcctaaagtattgctt

SEQ ID NO: 204404 - DNA, 25 bp, Probe Sequence
gccattaaagcttatcaccggctct

SEQ ID NO: 204405 - DNA, 25 bp, Probe Sequence
gccattacaactgtcccggagacaa

SEQ ID NO: 204406 - DNA, 25 bp, Probe Sequence
gccttacgactacagccagtcagac

SEQ ID NO: 204407 - DNA, 25 bp, Probe Sequence
gcctttcagacatcccaggtgaagc

SEQ ID NO: 204408 - DNA, 25 bp, Probe Sequence
gcctttccaatagccccatgaaaag

SEQ ID NO: 204409 - DNA, 25 bp, Probe Sequence
gccttctccaaagccacatgtaaag

SEQ ID NO: 204410 - DNA, 25 bp, Probe Sequence
gccatcttcagcaaacccaaaaaaa

SEQ ID NO: 204411 - DNA, 25 bp, Probe Sequence
gccatttgtgtaatctccaaaagtg

SEQ ID NO: 204412 - DNA, 25 bp, Probe Sequence
gccttatgtgctttcctacaaaatg

SEQ ID NO: 204413 - DNA, 25 bp, Probe Sequence
gccatatcatgtgtgtacgctgaaa

SEQ ID NO: 204414 - DNA, 25 bp, Probe Sequence
gccatcattgcatctatgcaggcta

SEQ ID NO: 204415 - DNA, 25 bp, Probe Sequence
gccttgctgcagacttcaggctacc

SEQ ID NO: 204416 - DNA, 25 bp, Probe Sequence
gccatatgtgagacccacagctgac

SEQ ID NO: 204417 - DNA, 25 bp, Probe Sequence
gccattctagacatccctgtctaca

SEQ ID NO: 204418 - DNA, 25 bp, Probe Sequence
gccattcatgaactcctttttaagg

SEQ ID NO: 204419 - DNA, 25 bp, Probe Sequence
gccttctgacctccattaatgtaag

SEQ ID NO: 204420 - DNA, 25 bp, Probe Sequence
gccttctcggctcttgacacttagc

SEQ ID NO: 204421 - DNA, 25 bp, Probe Sequence
gccttgatcggtctcaacagggagc

SEQ ID NO: 204422 - DNA, 25 bp, Probe Sequence
gccttgacagttcatcttcaggtgt

SEQ ID NO: 204423 - DNA, 25 bp, Probe Sequence
gccattcaggtgttacttgtggata

SEQ ID NO: 204424 - DNA, 25 bp, Probe Sequence
gccttcgcttggaacctgggaaaga

SEQ ID NO: 204425 - DNA, 25 bp, Probe Sequence
gccttcgcttggaacctgggaaaga

SEQ ID NO: 204426 - DNA, 25 bp, Probe Sequence
gccttcgacttggaccggatgaagc

SEQ ID NO: 204427 - DNA, 25 bp, Probe Sequence
gcctttgactatgccaccaagaagg

SEQ ID NO: 204428 - DNA, 25 bp, Probe Sequence
gccttaacgagagccgcgagggcag

SEQ ID NO: 204429 - DNA, 25 bp, Probe Sequence
gcctttacaggtgcacaagaacgct

SEQ ID NO: 204430 - DNA, 25 bp, Probe Sequence
gcccttaactacgaactgaattgta

SEQ ID NO: 204431 - DNA, 25 bp, Probe Sequence
gcctcctaacttgaactggtggtga

SEQ ID NO: 204432 - DNA, 25 bp, Probe Sequence
gcctcctagttctgaaaagttggaa

SEQ ID NO: 204433 - DNA, 25 bp, Probe Sequence
gccttctgagctgtctaaaagttac

SEQ ID NO: 204434 - DNA, 25 bp, Probe Sequence
gccttgctagtcattaacagaaata

SEQ ID NO: 204435 - DNA, 25 bp, Probe Sequence
gcctttggacctaacactatacaca

SEQ ID NO: 204436 - DNA, 25 bp, Probe Sequence
gcctggtgatggtgaacttctacaa

SEQ ID NO: 204437 - DNA, 25 bp, Probe Sequence
gccatcctgttgtgaagttctatct

SEQ ID NO: 204438 - DNA, 25 bp, Probe Sequence
gccatccctaggaggatctctgtct

SEQ ID NO: 204439 - DNA, 25 bp, Probe Sequence
gcctccgtcaggagagacgcagccc

SEQ ID NO: 204440 - DNA, 25 bp, Probe Sequence
gccattgcgttggtggagaaggccc

SEQ ID NO: 204441 - DNA, 25 bp, Probe Sequence
gccatcggcttggagcgctatgagg

SEQ ID NO: 204442 - DNA, 25 bp, Probe Sequence
gccatcttgtctggaatgctgtgtg

SEQ ID NO: 204443 - DNA, 25 bp, Probe Sequence
gccatcttgtctggagacaagtctg

SEQ ID NO: 204444 - DNA, 25 bp, Probe Sequence
gccatctcaaatggaacacgccatg

SEQ ID NO: 204445 - DNA, 25 bp, Probe Sequence
gccatctgccaagagacagcgaccc

SEQ ID NO: 204446 - DNA, 25 bp, Probe Sequence
tgccccaaaggagactgacccggcg

SEQ ID NO: 204447 - DNA, 25 bp, Probe Sequence
gcccctgacaggatactgagccaag

SEQ ID NO: 204448 - DNA, 25 bp, Probe Sequence
gccatccgacggatattagtcatca

SEQ ID NO: 204449 - DNA, 25 bp, Probe Sequence
gccatagccaccctttgaaatgctc

SEQ ID NO: 204450 - DNA, 25 bp, Probe Sequence
gcctaccaagactttgagaatcact

SEQ ID NO: 204451 - DNA, 25 bp, Probe Sequence
gcctcacaagagtgttacaattcaa

SEQ ID NO: 204452 - DNA, 25 bp, Probe Sequence
gcctaaagtggcatctggaattgaa

SEQ ID NO: 204453 - DNA, 25 bp, Probe Sequence
gcctaaactgacatcatcctatgga

SEQ ID NO: 204454 - DNA, 25 bp, Probe Sequence
gcctacaactgagctcaccacaggc

SEQ ID NO: 204455 - DNA, 25 bp, Probe Sequence
gcctaagagcatatatacccacgct

SEQ ID NO: 204456 - DNA, 25 bp, Probe Sequence
gcctaaagccatattcattcaccat

SEQ ID NO: 204457 - DNA, 25 bp, Probe Sequence
gccttctgagaaagcttcttcccaa

SEQ ID NO: 204458 - DNA, 25 bp, Probe Sequence
gccttcaacagaagctgtgctgcca

SEQ ID NO: 204459 - DNA, 25 bp, Probe Sequence
gccttcatacagatgctgattaaag

SEQ ID NO: 204460 - DNA, 25 bp, Probe Sequence
gccttatccagcattatttgaaaac

SEQ ID NO: 204461 - DNA, 25 bp, Probe Sequence
gcctattcagctagttttgtaaatg

SEQ ID NO: 204462 - DNA, 25 bp, Probe Sequence
gcctttgggttttctgtacagattg

SEQ ID NO: 204463 - DNA, 25 bp, Probe Sequence
gccttttgatgccgtactgtaagct

SEQ ID NO: 204464 - DNA, 25 bp, Probe Sequence
gccttgctgctgtggatacggaaat

SEQ ID NO: 204465 - DNA, 25 bp, Probe Sequence
gccttcatctgcagtaacgggggga

SEQ ID NO: 204466 - DNA, 25 bp, Probe Sequence
gccttcctcaagaaagctgtggtgc

SEQ ID NO: 204467 - DNA, 25 bp, Probe Sequence
gccttaccaagttgtgcttttctgt

SEQ ID NO: 204468 - DNA, 25 bp, Probe Sequence
gccttcactaaggacacatttactc

SEQ ID NO: 204469 - DNA, 25 bp, Probe Sequence
gcctccctcagagacaaagtcactt

SEQ ID NO: 204470 - DNA, 25 bp, Probe Sequence
gcctgccttggacaaagaatccctc

SEQ ID NO: 204471 - DNA, 25 bp, Probe Sequence
gcctttttactatacagcataccac

SEQ ID NO: 204472 - DNA, 25 bp, Probe Sequence
gccattttatgagcagaactgtaag

SEQ ID NO: 204473 - DNA, 25 bp, Probe Sequence
gccttttagacttggactgaggcag

SEQ ID NO: 204474 - DNA, 25 bp, Probe Sequence
gcctacctaagtgggatagaggatg

SEQ ID NO: 204475 - DNA, 25 bp, Probe Sequence
gcctgacccaggctgctaagagggc

SEQ ID NO: 204476 - DNA, 25 bp, Probe Sequence
gcctgacctcagagtgtccaggggc

SEQ ID NO: 204477 - DNA, 25 bp, Probe Sequence
gctgtaccacagagccgggtgtgaa

SEQ ID NO: 204478 - DNA, 25 bp, Probe Sequence
gcctcccatatgggcctgagttgta

SEQ ID NO: 204479 - DNA, 25 bp, Probe Sequence
gcctcatccttcactcagttgtgaa

SEQ ID NO: 204480 - DNA, 25 bp, Probe Sequence
gccttcctagctgtcttggtgaaac

SEQ ID NO: 204481 - DNA, 25 bp, Probe Sequence
gcctacatccttttctacgtggaac

SEQ ID NO: 204482 - DNA, 25 bp, Probe Sequence
gccttcttctttttgacgtgcagaa

SEQ ID NO: 204483 - DNA, 25 bp, Probe Sequence
gccattcccttaggctttagcagct

SEQ ID NO: 204484 - DNA, 25 bp, Probe Sequence
gccattcctccttggtgggaatcat

SEQ ID NO: 204485 - DNA, 25 bp, Probe Sequence
gccttacctctatgtggccaatggc

SEQ ID NO: 204486 - DNA, 25 bp, Probe Sequence
gccttcaagttattgggctcagtgc

SEQ ID NO: 204487 - DNA, 25 bp, Probe Sequence
gccttcacgcataaaggcagtcgta

SEQ ID NO: 204488 - DNA, 25 bp, Probe Sequence
gccttcacgcataagaggcagtgcg

SEQ ID NO: 204489 - DNA, 25 bp, Probe Sequence
gcctctgagtgccaagcgacgtggc

SEQ ID NO: 204490 - DNA, 25 bp, Probe Sequence
gccattgcactccagtctgggtgac

SEQ ID NO: 204491 - DNA, 25 bp, Probe Sequence
gccattgcaatccagcctggacaac

SEQ ID NO: 204492 - DNA, 25 bp, Probe Sequence
gccattgcactcaagcctgggcaat

SEQ ID NO: 204493 - DNA, 25 bp, Probe Sequence
gccattgcactctagtgtggctgac

SEQ ID NO: 204494 - DNA, 25 bp, Probe Sequence
gccttgactcagatggtgcatatgc

SEQ ID NO: 204495 - DNA, 25 bp, Probe Sequence
gcctgtatcttgggggacagggctg

SEQ ID NO: 204496 - DNA, 25 bp, Probe Sequence
gccttagtctgtgggggtgggtggg

SEQ ID NO: 204497 - DNA, 25 bp, Probe Sequence
gcctaatgtctgggggcagctggcg

SEQ ID NO: 204498 - DNA, 25 bp, Probe Sequence
gcctactgtcgcagtccagggacag

SEQ ID NO: 204499 - DNA, 25 bp, Probe Sequence
gccgacgtggtagactggatccagc

SEQ ID NO: 204500 - DNA, 25 bp, Probe Sequence
gccttttggtaatgctgtttctgct

SEQ ID NO: 204501 - DNA, 25 bp, Probe Sequence
gccattttaacatttctgtatttga

SEQ ID NO: 204502 - DNA, 25 bp, Probe Sequence
gccatttacatccatatcttttttt

SEQ ID NO: 204503 - DNA, 25 bp, Probe Sequence
gccttacagtccaacctttttctgt

SEQ ID NO: 204504 - DNA, 25 bp, Probe Sequence
gccttcaagacctcgtcttatttcc

SEQ ID NO: 204505 - DNA, 25 bp, Probe Sequence
gccattgccagaaagagcgatttat

SEQ ID NO: 204506 - DNA, 25 bp, Probe Sequence
gccattccagaagtagcttatccta

SEQ ID NO: 204507 - DNA, 25 bp, Probe Sequence
gccttccaatattactaatctcatt

SEQ ID NO: 204508 - DNA, 25 bp, Probe Sequence
gccttccagtatttcataatgatct

SEQ ID NO: 204509 - DNA, 25 bp, Probe Sequence
gccttgcgctgttgcgtaactggct

SEQ ID NO: 204510 - DNA, 25 bp, Probe Sequence
gccttgccgtgactgtcagtcttat

SEQ ID NO: 204511 - DNA, 25 bp, Probe Sequence
gccatagggtgacttaccttgtcac

SEQ ID NO: 204512 - DNA, 25 bp, Probe Sequence
gccattatggtttttcctttctctc

SEQ ID NO: 204513 - DNA, 25 bp, Probe Sequence
gccatttttgcattgtttcgttttt

SEQ ID NO: 204514 - DNA, 25 bp, Probe Sequence
gccttgtgttcattttgttattttg

SEQ ID NO: 204515 - DNA, 25 bp, Probe Sequence
gccattggctatttaaacttgtatt

SEQ ID NO: 204516 - DNA, 25 bp, Probe Sequence
gccattgttgaactaaagccttttt

SEQ ID NO: 204517 - DNA, 25 bp, Probe Sequence
gcctagttcatcataaatgcctatc

SEQ ID NO: 204518 - DNA, 25 bp, Probe Sequence
gccttgttattgtaagtgccttcaa

SEQ ID NO: 204519 - DNA, 25 bp, Probe Sequence
gccttgtttgggagttgcccacata

SEQ ID NO: 204520 - DNA, 25 bp, Probe Sequence
gccttttggttgagatgtgaaacta

SEQ ID NO: 204521 - DNA, 25 bp, Probe Sequence
gccttctaagttgagaggacaaaac

SEQ ID NO: 204522 - DNA, 25 bp, Probe Sequence
gccttgctaatttcggtggaccaac

SEQ ID NO: 204523 - DNA, 25 bp, Probe Sequence
gccatttcactatccgtggaggcag

SEQ ID NO: 204524 - DNA, 25 bp, Probe Sequence
gccttatcatcctcactgtggagta

SEQ ID NO: 204525 - DNA, 25 bp, Probe Sequence
gcctcaaccctggcaattatagcta

SEQ ID NO: 204526 - DNA, 25 bp, Probe Sequence
gcctgcaaccagatgttttactagt

SEQ ID NO: 204527 - DNA, 25 bp, Probe Sequence
gctctggattaaagcttttagccgg

SEQ ID NO: 204528 - DNA, 25 bp, Probe Sequence
gccgacagtatgtttctattacacg

SEQ ID NO: 204529 - DNA, 25 bp, Probe Sequence
gcctcacagcttctagtaaatcctg

SEQ ID NO: 204530 - DNA, 25 bp, Probe Sequence
gcccacatttttctcaggttctgtg

SEQ ID NO: 204531 - DNA, 25 bp, Probe Sequence
gcccttttgtgggcagcaaattctt

SEQ ID NO: 204532 - DNA, 25 bp, Probe Sequence
gcctttttgtcacctcaatatttac

SEQ ID NO: 204533 - DNA, 25 bp, Probe Sequence
gcctatgtttttatcacattgctta

SEQ ID NO: 204534 - DNA, 25 bp, Probe Sequence
gcctatggaatagtttcctgtcctg

SEQ ID NO: 204535 - DNA, 25 bp, Probe Sequence
gccttggaaagctgacactgtctct

SEQ ID NO: 204536 - DNA, 25 bp, Probe Sequence
gccttcagggagttgacagtgtcct

SEQ ID NO: 204537 - DNA, 25 bp, Probe Sequence
gcctttgtcagtctacaatgccctt

SEQ ID NO: 204538 - DNA, 25 bp, Probe Sequence
gccttttcagtgctacaattgagat

SEQ ID NO: 204539 - DNA, 25 bp, Probe Sequence
gcctatttaggtgacactatagaac

SEQ ID NO: 204540 - DNA, 25 bp, Probe Sequence
gccttgtgttcagtgaacccaagaa

SEQ ID NO: 204541 - DNA, 25 bp, Probe Sequence
gcctttattaccaagcccagagata

SEQ ID NO: 204542 - DNA, 25 bp, Probe Sequence
gcccttatccaacatcccagggcag

SEQ ID NO: 204543 - DNA, 25 bp, Probe Sequence
gccccaggccaaatacccagaggcc

SEQ ID NO: 204544 - DNA, 25 bp, Probe Sequence
gcctccggacaagtcacattcatgg

SEQ ID NO: 204545 - DNA, 25 bp, Probe Sequence
gcctagaggactagatcaccttagt

SEQ ID NO: 204546 - DNA, 25 bp, Probe Sequence
gcctacgtgactgagaccgctgagg

SEQ ID NO: 204547 - DNA, 25 bp, Probe Sequence
gcctaagagactggtgacatccaca

SEQ ID NO: 204548 - DNA, 25 bp, Probe Sequence
gcctatctgaagcgctgtttgcagc

SEQ ID NO: 204549 - DNA, 25 bp, Probe Sequence
gccatatctgcaggagagctgttct

SEQ ID NO: 204550 - DNA, 25 bp, Probe Sequence
gcctgctgctcagagatgatcttta

SEQ ID NO: 204551 - DNA, 25 bp, Probe Sequence
gcctgatgtcacctcatgatttgct

SEQ ID NO: 204552 - DNA, 25 bp, Probe Sequence
gcctcagtcatgacgcaactgcggc

SEQ ID NO: 204553 - DNA, 25 bp, Probe Sequence
gcctctgcagagagatactaagcag

SEQ ID NO: 204554 - DNA, 25 bp, Probe Sequence
gccttgatgaggcccagcaaacagg

SEQ ID NO: 204555 - DNA, 25 bp, Probe Sequence
gcctatgtggaggccaaccagatgc

SEQ ID NO: 204556 - DNA, 25 bp, Probe Sequence
gccttgtggagcgctgggagcagga

SEQ ID NO: 204557 - DNA, 25 bp, Probe Sequence
gccttgagggaggggcatggaggac

SEQ ID NO: 204558 - DNA, 25 bp, Probe Sequence
gcctctggtaggattgcaggggtcc

SEQ ID NO: 204559 - DNA, 25 bp, Probe Sequence
gcctctggtttgcttcgagaaggac

SEQ ID NO: 204560 - DNA, 25 bp, Probe Sequence
gccatttccctgtttcagagaacgt

SEQ ID NO: 204561 - DNA, 25 bp, Probe Sequence
gccatttcccttttcagagaatgta

SEQ ID NO: 204562 - DNA, 25 bp, Probe Sequence
gccatttcagccactttcaagatgt

SEQ ID NO: 204563 - DNA, 25 bp, Probe Sequence
gcctcttcagctctttgtaggttct

SEQ ID NO: 204564 - DNA, 25 bp, Probe Sequence
gcctttcagtagcttgtagttcagg

SEQ ID NO: 204565 - DNA, 25 bp, Probe Sequence
gcctttcagaggcttggtgttcagg

SEQ ID NO: 204566 - DNA, 25 bp, Probe Sequence
gccttgcacacaggtgttggtgatg

SEQ ID NO: 204567 - DNA, 25 bp, Probe Sequence
gcctctcacaaaagatcctggatgg

SEQ ID NO: 204568 - DNA, 25 bp, Probe Sequence
gcctatgcacaatttatagcaagag

SEQ ID NO: 204569 - DNA, 25 bp, Probe Sequence
gccattcacagtgtaaggcagcact

SEQ ID NO: 204570 - DNA, 25 bp, Probe Sequence
gccattagttaggcaagtcaattct

SEQ ID NO: 204571 - DNA, 25 bp, Probe Sequence
gccattggcttctcagatgtatttc

SEQ ID NO: 204572 - DNA, 25 bp, Probe Sequence
gccattcatgcttctatgcatatta

SEQ ID NO: 204573 - DNA, 25 bp, Probe Sequence
gcctcatgatattgttgcatctgaa

SEQ ID NO: 204574 - DNA, 25 bp, Probe Sequence
gccttgatcatagttcatacatata

SEQ ID NO: 204575 - DNA, 25 bp, Probe Sequence
gcctagcaatccatcagacaatcca

SEQ ID NO: 204576 - DNA, 25 bp, Probe Sequence
gcctacatttgcagacagacacagt

SEQ ID NO: 204577 - DNA, 25 bp, Probe Sequence
gccattcttgcttagacagtcagca

SEQ ID NO: 204578 - DNA, 25 bp, Probe Sequence
gcctttggctactcagtgagcacaa

SEQ ID NO: 204579 - DNA, 25 bp, Probe Sequence
gccattatcctactccaagatcaag

SEQ ID NO: 204580 - DNA, 25 bp, Probe Sequence
gccattatctcttttccagtattaa

SEQ ID NO: 204581 - DNA, 25 bp, Probe Sequence
gccttattgctacttcaagctcttt

SEQ ID NO: 204582 - DNA, 25 bp, Probe Sequence
gcctctgtttacaagcagcctttgg

SEQ ID NO: 204583 - DNA, 25 bp, Probe Sequence
gccattgattcttcagaactttctg

SEQ ID NO: 204584 - DNA, 25 bp, Probe Sequence
gccttacctacagcactatgtgcat

SEQ ID NO: 204585 - DNA, 25 bp, Probe Sequence
gcctctcagccatgaccgttatgag

SEQ ID NO: 204586 - DNA, 25 bp, Probe Sequence
gccgtttgagtttggctgcgggtgg

SEQ ID NO: 204587 - DNA, 25 bp, Probe Sequence
gcctttctattttttggtgcgggag

SEQ ID NO: 204588 - DNA, 25 bp, Probe Sequence
gccttttatttcttggagcataggt

SEQ ID NO: 204589 - DNA, 25 bp, Probe Sequence
gccttgtttcttgatggcagcctgg

SEQ ID NO: 204590 - DNA, 25 bp, Probe Sequence
gcctagtttctgtgtgaactctcag

SEQ ID NO: 204591 - DNA, 25 bp, Probe Sequence
gcctttctgcctggtgaaagctcca

SEQ ID NO: 204592 - DNA, 25 bp, Probe Sequence
gccttccatcctgatggcaagagct

SEQ ID NO: 204593 - DNA, 25 bp, Probe Sequence
gccttccattgtgatgacgtcaaac

SEQ ID NO: 204594 - DNA, 25 bp, Probe Sequence
gccttcctggtgtaatcagtagata

SEQ ID NO: 204595 - DNA, 25 bp, Probe Sequence
gccttgtgctggagcaccagccaga

SEQ ID NO: 204596 - DNA, 25 bp, Probe Sequence
gccttgtatgtgtgccaatgccagg

SEQ ID NO: 204597 - DNA, 25 bp, Probe Sequence
gccttgtcagtgtgtggaccatggt

SEQ ID NO: 204598 - DNA, 25 bp, Probe Sequence
gccttgactggctaggagaccttgg

SEQ ID NO: 204599 - DNA, 25 bp, Probe Sequence
gcctaactgagctctggactttggg

SEQ ID NO: 204600 - DNA, 25 bp, Probe Sequence
gcctaggctacttaggaatttgcag

SEQ ID NO: 204601 - DNA, 25 bp, Probe Sequence
gcctcaggtttattggcgataatca

SEQ ID NO: 204602 - DNA, 25 bp, Probe Sequence
gcctcagcgtacctcattagtaatt

SEQ ID NO: 204603 - DNA, 25 bp, Probe Sequence
gccttcctgatcctctgtagaaagg

SEQ ID NO: 204604 - DNA, 25 bp, Probe Sequence
gccttcctgatcctctgtagaaagg

SEQ ID NO: 204605 - DNA, 25 bp, Probe Sequence
gccttctctgaaaatgtatgaacag

SEQ ID NO: 204606 - DNA, 25 bp, Probe Sequence
gccttcctgagacctgcaatatgaa

SEQ ID NO: 204607 - DNA, 25 bp, Probe Sequence
gcctacctacatcctcagatggacc

SEQ ID NO: 204608 - DNA, 25 bp, Probe Sequence
gcctgatccatatgtctaaggacac

SEQ ID NO: 204609 - DNA, 25 bp, Probe Sequence
gccttgccacaacctgaagtgattc

SEQ ID NO: 204610 - DNA, 25 bp, Probe Sequence
gcctagccactagttagattttcgg

SEQ ID NO: 204611 - DNA, 25 bp, Probe Sequence
gcctaggagtttaagtttgtagtgc

SEQ ID NO: 204612 - DNA, 25 bp, Probe Sequence
gcctcgtgagcttttttgcttatca

SEQ ID NO: 204613 - DNA, 25 bp, Probe Sequence
gccttggatggagagttctttccta

SEQ ID NO: 204614 - DNA, 25 bp, Probe Sequence
gcctctgagatgctaatttatttcc

SEQ ID NO: 204615 - DNA, 25 bp, Probe Sequence
gccttcagggttagcttcatgtaat

SEQ ID NO: 204616 - DNA, 25 bp, Probe Sequence
gcctacagtggggtgcagtccaaga

SEQ ID NO: 204617 - DNA, 25 bp, Probe Sequence
gccttcagctggtgggccgagaggc

SEQ ID NO: 204618 - DNA, 25 bp, Probe Sequence
gcctctcagctagttggcgggggtg

SEQ ID NO: 204619 - DNA, 25 bp, Probe Sequence
gcctccgctaccaggagtacgtgac

SEQ ID NO: 204620 - DNA, 25 bp, Probe Sequence
gccccagctgacatggaaatacagt

SEQ ID NO: 204621 - DNA, 25 bp, Probe Sequence
gcctctccgaacgcaacatgaaggt

SEQ ID NO: 204622 - DNA, 25 bp, Probe Sequence
gcctgcatcctgtgtacaacatgac

SEQ ID NO: 204623 - DNA, 25 bp, Probe Sequence
gcctgcatcctgtgtacaacatgac

SEQ ID NO: 204624 - DNA, 25 bp, Probe Sequence
gcctcattgagatgtaccgagacct

SEQ ID NO: 204625 - DNA, 25 bp, Probe Sequence
gccttggcgacagaacgagactccc

SEQ ID NO: 204626 - DNA, 25 bp, Probe Sequence
gccttggctagagaactcacagctc

SEQ ID NO: 204627 - DNA, 25 bp, Probe Sequence
gccttggtggcaaatatctcatctg

SEQ ID NO: 204628 - DNA, 25 bp, Probe Sequence
gcctctgaggtgatgagtgtgtctg

SEQ ID NO: 204629 - DNA, 25 bp, Probe Sequence
gcctcttgggttgggtgttgattat

SEQ ID NO: 204630 - DNA, 25 bp, Probe Sequence
gcctctcggtggtgggattatgaat

SEQ ID NO: 204631 - DNA, 25 bp, Probe Sequence
gcctgtccgatttggctgggaaaat

SEQ ID NO: 204632 - DNA, 25 bp, Probe Sequence
gccttccgagtagctggaactgcag

SEQ ID NO: 204633 - DNA, 25 bp, Probe Sequence
gcctatgccaagtccctggaaaagg

SEQ ID NO: 204634 - DNA, 25 bp, Probe Sequence
gcctatgtaggttctctgacaaaag

SEQ ID NO: 204635 - DNA, 25 bp, Probe Sequence
gcctagcttgcgtgcttgaggaagg

SEQ ID NO: 204636 - DNA, 25 bp, Probe Sequence
gcctcagtctggagtgggataggag

SEQ ID NO: 204637 - DNA, 25 bp, Probe Sequence
gcctattctgggctggattctgaag

SEQ ID NO: 204638 - DNA, 25 bp, Probe Sequence
gcctttataggcctcagatactgaa

SEQ ID NO: 204639 - DNA, 25 bp, Probe Sequence
gcctttgaagtgcctctgattctat

SEQ ID NO: 204640 - DNA, 25 bp, Probe Sequence
gccttctagattcactgtcttttga

SEQ ID NO: 204641 - DNA, 25 bp, Probe Sequence
gccttttattggacttatcattagt

SEQ ID NO: 204642 - DNA, 25 bp, Probe Sequence
gcctattgtgacttacttatctgta

SEQ ID NO: 204643 - DNA, 25 bp, Probe Sequence
gcctttggatcagggcttgactcat

SEQ ID NO: 204644 - DNA, 25 bp, Probe Sequence
gccttggagtgcaggtaaatgctca

SEQ ID NO: 204645 - DNA, 25 bp, Probe Sequence
gccttgtggtggctgtacaggacca

SEQ ID NO: 204646 - DNA, 25 bp, Probe Sequence
gcctctaccgagctgtcagcaagac

SEQ ID NO: 204647 - DNA, 25 bp, Probe Sequence
gccttactggcaatgcttccacagc

SEQ ID NO: 204648 - DNA, 25 bp, Probe Sequence
gccttgagtggcctgatcgccacag

SEQ ID NO: 204649 - DNA, 25 bp, Probe Sequence
gccttacagagcctggatccatcaa

SEQ ID NO: 204650 - DNA, 25 bp, Probe Sequence
gccttgtcacgcctggcatagaggt

SEQ ID NO: 204651 - DNA, 25 bp, Probe Sequence
gccttgtagaggtagcatgcacagg

SEQ ID NO: 204652 - DNA, 25 bp, Probe Sequence
gcctttcagctattcagtgccagcg

SEQ ID NO: 204653 - DNA, 25 bp, Probe Sequence
gcctaggatgtattcagatgggtgg

SEQ ID NO: 204654 - DNA, 25 bp, Probe Sequence
gcctaggactcatagtgtccagcag

SEQ ID NO: 204655 - DNA, 25 bp, Probe Sequence
gcctcagcgtcaacgagttcaaaga

SEQ ID NO: 204656 - DNA, 25 bp, Probe Sequence
gcgacatggccaaacgtaccaagaa

SEQ ID NO: 204657 - DNA, 25 bp, Probe Sequence
gcgactggctcaacaattaccacct

SEQ ID NO: 204658 - DNA, 25 bp, Probe Sequence
gcccatggtctatagtatacctctc

SEQ ID NO: 204659 - DNA, 25 bp, Probe Sequence
gcctcaactctatagctctaactgg

SEQ ID NO: 204660 - DNA, 25 bp, Probe Sequence
gcctcactatctacaacttaacatc

SEQ ID NO: 204661 - DNA, 25 bp, Probe Sequence
gcctcactatctacaacttaacatc

SEQ ID NO: 204662 - DNA, 25 bp, Probe Sequence
gcctagcattcttctttggaaatct

SEQ ID NO: 204663 - DNA, 25 bp, Probe Sequence
gcctaaatgctagttgtgggaatac

SEQ ID NO: 204664 - DNA, 25 bp, Probe Sequence
gcccaaagcccgctgtggatagacc

SEQ ID NO: 204665 - DNA, 25 bp, Probe Sequence
gcagacgaagtccacgtggctgaaa

SEQ ID NO: 204666 - DNA, 25 bp, Probe Sequence
gcgaaggagtggactggagcgtaac

SEQ ID NO: 204667 - DNA, 25 bp, Probe Sequence
gcgcaaccagcggctcgaggttgac

SEQ ID NO: 204668 - DNA, 25 bp, Probe Sequence
gcctactcagtggtcagcggaaact

SEQ ID NO: 204669 - DNA, 25 bp, Probe Sequence
gcctgaatcattctcgatttaactc

SEQ ID NO: 204670 - DNA, 25 bp, Probe Sequence
gcctggacactaacaattctacacc

SEQ ID NO: 204671 - DNA, 25 bp, Probe Sequence
gcctgtacaccatgtctagtggcac

SEQ ID NO: 204672 - DNA, 25 bp, Probe Sequence
gccttccactgattggctggtgtag

SEQ ID NO: 204673 - DNA, 25 bp, Probe Sequence
gccttccactgattggctggtgtag

SEQ ID NO: 204674 - DNA, 25 bp, Probe Sequence
gccttcagcctgagatgcgggatat

SEQ ID NO: 204675 - DNA, 25 bp, Probe Sequence
gccttcacctggccatgaaggacct

SEQ ID NO: 204676 - DNA, 25 bp, Probe Sequence
gccttatagtggcactagtcacctt

SEQ ID NO: 204677 - DNA, 25 bp, Probe Sequence
gccttatagtaggaatgtgtcccca

SEQ ID NO: 204678 - DNA, 25 bp, Probe Sequence
gccttaaaaccatgtatgtgcgctg

SEQ ID NO: 204679 - DNA, 25 bp, Probe Sequence
gcctccaagaagctggttgactgat

SEQ ID NO: 204680 - DNA, 25 bp, Probe Sequence
gcctgggctacactgtggttgacga

SEQ ID NO: 204681 - DNA, 25 bp, Probe Sequence
gcgctggtcggaagattgctggact

SEQ ID NO: 204682 - DNA, 25 bp, Probe Sequence
gcctagcacgtggaattcgcgaagc

SEQ ID NO: 204683 - DNA, 25 bp, Probe Sequence
gcctatgatcgtagcacttggggag

SEQ ID NO: 204684 - DNA, 25 bp, Probe Sequence
gccttacgtctgatcttgatggggg

SEQ ID NO: 204685 - DNA, 25 bp, Probe Sequence
gccttcaatactttgcattttggga

SEQ ID NO: 204686 - DNA, 25 bp, Probe Sequence
gcctgtaatcccagttatctcagga

SEQ ID NO: 204687 - DNA, 25 bp, Probe Sequence
gcctgtattcccagctagtcgggag

SEQ ID NO: 204688 - DNA, 25 bp, Probe Sequence
gcctgtagtcccagctacttgggag

SEQ ID NO: 204689 - DNA, 25 bp, Probe Sequence
gcctgtaatcccagctactcgggag

SEQ ID NO: 204690 - DNA, 25 bp, Probe Sequence
gcctgtgaacccacgtttggtgagt

SEQ ID NO: 204691 - DNA, 25 bp, Probe Sequence
gcctgtaatcccagcactttgggag

SEQ ID NO: 204692 - DNA, 25 bp, Probe Sequence
gcctgtggtcccaaccagtttggga

SEQ ID NO: 204693 - DNA, 25 bp, Probe Sequence
gcctgctgtgtacaccaaggtggtg

SEQ ID NO: 204694 - DNA, 25 bp, Probe Sequence
gcctgtctgtagaggccactgtgtt

SEQ ID NO: 204695 - DNA, 25 bp, Probe Sequence
gcctggcttagaagaccttggtatt

SEQ ID NO: 204696 - DNA, 25 bp, Probe Sequence
gcctcacattaaaaactcatcccat

SEQ ID NO: 204697 - DNA, 25 bp, Probe Sequence
gcctccttcaaaaagcaatctggaa

SEQ ID NO: 204698 - DNA, 25 bp, Probe Sequence
gcctgccttcaattttgatccttta

SEQ ID NO: 204699 - DNA, 25 bp, Probe Sequence
gcctttgacacttttatgcacttaa

SEQ ID NO: 204700 - DNA, 25 bp, Probe Sequence
gcctttgatcacctttgtaacaaga

SEQ ID NO: 204701 - DNA, 25 bp, Probe Sequence
gcctggtgtcaacttttaagcaaca

SEQ ID NO: 204702 - DNA, 25 bp, Probe Sequence
gccttgcatgttgtagttagagaca

SEQ ID NO: 204703 - DNA, 25 bp, Probe Sequence
gccttatatatcacactattgtaga

SEQ ID NO: 204704 - DNA, 25 bp, Probe Sequence
gccttcatattcatcaactcatgaa

SEQ ID NO: 204705 - DNA, 25 bp, Probe Sequence
gccgaattggactacctcatggatg

SEQ ID NO: 204706 - DNA, 25 bp, Probe Sequence
gccttattatactacatggcagttg

SEQ ID NO: 204707 - DNA, 25 bp, Probe Sequence
gccttattcatactagcatgctcat

SEQ ID NO: 204708 - DNA, 25 bp, Probe Sequence
gccttttcatttccagcatctggct

SEQ ID NO: 204709 - DNA, 25 bp, Probe Sequence
gccttaggacttgcacatgtggcca

SEQ ID NO: 204710 - DNA, 25 bp, Probe Sequence
gcctaggaagcccccatggggaagg

SEQ ID NO: 204711 - DNA, 25 bp, Probe Sequence
gcccggaaccgggctgggtagagtg

SEQ ID NO: 204712 - DNA, 25 bp, Probe Sequence
gcccgaagacctctgcggggagacg

SEQ ID NO: 204713 - DNA, 25 bp, Probe Sequence
gccccaagaccatcctaagggccgc

SEQ ID NO: 204714 - DNA, 25 bp, Probe Sequence
gccgccaagttatccaaaaccaaag

SEQ ID NO: 204715 - DNA, 25 bp, Probe Sequence
gcctctgaagttggacagcaaaacc

SEQ ID NO: 204716 - DNA, 25 bp, Probe Sequence
gcctcgatacgctggaaaaagtgcg

SEQ ID NO: 204717 - DNA, 25 bp, Probe Sequence
gcctagactcgctgcacaagaacag

SEQ ID NO: 204718 - DNA, 25 bp, Probe Sequence
gcctaccgctcttgcaataattggc

SEQ ID NO: 204719 - DNA, 25 bp, Probe Sequence
gcctaccaccattccatatttaagt

SEQ ID NO: 204720 - DNA, 25 bp, Probe Sequence
gcctaattccatcccgtagtaagat

SEQ ID NO: 204721 - DNA, 25 bp, Probe Sequence
gcctttttcactgtgtatggaatga

SEQ ID NO: 204722 - DNA, 25 bp, Probe Sequence
gcctagatttgcttttgtggggaga

SEQ ID NO: 204723 - DNA, 25 bp, Probe Sequence
gcctattttgcattctcttgggtat

SEQ ID NO: 204724 - DNA, 25 bp, Probe Sequence
ctccctgccctccattcagggagaa

SEQ ID NO: 204725 - DNA, 25 bp, Probe Sequence
gcctttcttatactctagaatatac

SEQ ID NO: 204726 - DNA, 25 bp, Probe Sequence
gcctatggctttaggctagctgtta

SEQ ID NO: 204727 - DNA, 25 bp, Probe Sequence
gcctctggctattaacataccctag

SEQ ID NO: 204728 - DNA, 25 bp, Probe Sequence
gcctctgacagtgaaatacgcgtac

SEQ ID NO: 204729 - DNA, 25 bp, Probe Sequence
gcgcttgcaattgttgaagccctga

SEQ ID NO: 204730 - DNA, 25 bp, Probe Sequence
gcctactttcttcaagacctgagcc

SEQ ID NO: 204731 - DNA, 25 bp, Probe Sequence
gcctaccaccttcagaagtcgacct

SEQ ID NO: 204732 - DNA, 25 bp, Probe Sequence
gcttgaaaccttcacttaggaacgt

SEQ ID NO: 204733 - DNA, 25 bp, Probe Sequence
gcatcgaaaccttttgcttggggat

SEQ ID NO: 204734 - DNA, 25 bp, Probe Sequence
gccgttagcgttacgttggaggtct

SEQ ID NO: 204735 - DNA, 25 bp, Probe Sequence
gcctgttacgacatcgatgtggagg

SEQ ID NO: 204736 - DNA, 25 bp, Probe Sequence
gcctttaccacctagttgatagtta

SEQ ID NO: 204737 - DNA, 25 bp, Probe Sequence
gcctttgcccacaagagaatgacac

SEQ ID NO: 204738 - DNA, 25 bp, Probe Sequence
gcctgagtttacaaacacatcacct

SEQ ID NO: 204739 - DNA, 25 bp, Probe Sequence
gcctgcctacttctacaatgcattc

SEQ ID NO: 204740 - DNA, 25 bp, Probe Sequence
gccttcaagtctctgacaaatgtgc

SEQ ID NO: 204741 - DNA, 25 bp, Probe Sequence
gccttactatatatgggaatgtcta

SEQ ID NO: 204742 - DNA, 25 bp, Probe Sequence
gcctgtactactctagggagtatgc

SEQ ID NO: 204743 - DNA, 25 bp, Probe Sequence
gcctgtgcctttcctagaaagttaa

SEQ ID NO: 204744 - DNA, 25 bp, Probe Sequence
gcctgtaatcccctaataagtctaa

SEQ ID NO: 204745 - DNA, 25 bp, Probe Sequence
gccgggtcagccctgacaaaggtca

SEQ ID NO: 204746 - DNA, 25 bp, Probe Sequence
gcctctggtctgccaggtgaacggt

SEQ ID NO: 204747 - DNA, 25 bp, Probe Sequence
gcctctgttgtcaatggaaatgcgg

SEQ ID NO: 204748 - DNA, 25 bp, Probe Sequence
gcctgctgtgtacatctgagcatcc

SEQ ID NO: 204749 - DNA, 25 bp, Probe Sequence
gcctctgtgttggtgtggatcctaa

SEQ ID NO: 204750 - DNA, 25 bp, Probe Sequence
gcctttgctgtacaggatcccaatg

SEQ ID NO: 204751 - DNA, 25 bp, Probe Sequence
gcctttcagctaccagtttgcaata

SEQ ID NO: 204752 - DNA, 25 bp, Probe Sequence
gccttatacgtgtagcttatgcaag

SEQ ID NO: 204753 - DNA, 25 bp, Probe Sequence
gcctcattactgtagagttcagaca

SEQ ID NO: 204754 - DNA, 25 bp, Probe Sequence
gccttctccatatgaagtcagaggt

SEQ ID NO: 204755 - DNA, 25 bp, Probe Sequence
gccttcttagcgtctggtcagagag

SEQ ID NO: 204756 - DNA, 25 bp, Probe Sequence
gcctctactggcgctgccaaggctg

SEQ ID NO: 204757 - DNA, 25 bp, Probe Sequence
gcctgtatcaggggcaccaatgtgc

SEQ ID NO: 204758 - DNA, 25 bp, Probe Sequence
gcctttgcggggctcgatgatgcgc

SEQ ID NO: 204759 - DNA, 25 bp, Probe Sequence
gcctttgctagggtgtcttgtgctg

SEQ ID NO: 204760 - DNA, 25 bp, Probe Sequence
gcctttgctagggtgtcttgtgctg

SEQ ID NO: 204761 - DNA, 25 bp, Probe Sequence
gcctttcttgggaattctggctgaa

SEQ ID NO: 204762 - DNA, 25 bp, Probe Sequence
gcctgttctgggcatttcatgtcaa

SEQ ID NO: 204763 - DNA, 25 bp, Probe Sequence
gcctactctgtggtgaataatggac

SEQ ID NO: 204764 - DNA, 25 bp, Probe Sequence
gcctactctggccatgcctaatata

SEQ ID NO: 204765 - DNA, 25 bp, Probe Sequence
gcctcacctgacaatgttttaaatc

SEQ ID NO: 204766 - DNA, 25 bp, Probe Sequence
gcctctcctgatgcatttgtaaaca

SEQ ID NO: 204767 - DNA, 25 bp, Probe Sequence
gcctctccatcatgttttaacatac

SEQ ID NO: 204768 - DNA, 25 bp, Probe Sequence
gcctttcagaggagttcacacctcg

SEQ ID NO: 204769 - DNA, 25 bp, Probe Sequence
gccttttgaggggttcccatcatcc

SEQ ID NO: 204770 - DNA, 25 bp, Probe Sequence
gcctttctgaatgttatctccaacc

SEQ ID NO: 204771 - DNA, 25 bp, Probe Sequence
gcctttgaaagatctatgttctctc

SEQ ID NO: 204772 - DNA, 25 bp, Probe Sequence
gcctattgaaaaggttgtatcacac

SEQ ID NO: 204773 - DNA, 25 bp, Probe Sequence
gcctaaaatatccgctgtgcttcac

SEQ ID NO: 204774 - DNA, 25 bp, Probe Sequence
gcctagggcagtgctgcatggctgc

SEQ ID NO: 204775 - DNA, 25 bp, Probe Sequence
gcctcaggtgcagtctatgatggag

SEQ ID NO: 204776 - DNA, 25 bp, Probe Sequence
gcctcacaatgcacgtgggagatga

SEQ ID NO: 204777 - DNA, 25 bp, Probe Sequence
gcctactgagcaaggttgggtgctt

SEQ ID NO: 204778 - DNA, 25 bp, Probe Sequence
gctctacgagaagcggggtcaggcc

SEQ ID NO: 204779 - DNA, 25 bp, Probe Sequence
gcctaagagcacaacgggagggaca

SEQ ID NO: 204780 - DNA, 25 bp, Probe Sequence
gcctacaggacaaagtgagaaagat

SEQ ID NO: 204781 - DNA, 25 bp, Probe Sequence
gccgtcaggacacgggagggtttgg

SEQ ID NO: 204782 - DNA, 25 bp, Probe Sequence
gcctttggcaccggagtggagttcg

SEQ ID NO: 204783 - DNA, 25 bp, Probe Sequence
gcctttgaggccgggtgcagtggct

SEQ ID NO: 204784 - DNA, 25 bp, Probe Sequence
gccttagggcactgggctgttgttc

SEQ ID NO: 204785 - DNA, 25 bp, Probe Sequence
gcctttgttcactgtgagttctgat

SEQ ID NO: 204786 - DNA, 25 bp, Probe Sequence
gcctttctctcctagtgagtgtgct

SEQ ID NO: 204787 - DNA, 25 bp, Probe Sequence
gccttttttctttgagtgctgcaag

SEQ ID NO: 204788 - DNA, 25 bp, Probe Sequence
gcctatctattgcattttgtgctaa

SEQ ID NO: 204789 - DNA, 25 bp, Probe Sequence
gcctgatgctcatggatttctagtg

SEQ ID NO: 204790 - DNA, 25 bp, Probe Sequence
gcctagcgaggcaaattctgattga

SEQ ID NO: 204791 - DNA, 25 bp, Probe Sequence
gcctagcgaggcaaattctgattga

SEQ ID NO: 204792 - DNA, 25 bp, Probe Sequence
gcctcagcagatgggcaaggtttga

SEQ ID NO: 204793 - DNA, 25 bp, Probe Sequence
gcctacagcagctcatagaggtctt

SEQ ID NO: 204794 - DNA, 25 bp, Probe Sequence
gcctaagcaggtaagcagatgccta

SEQ ID NO: 204795 - DNA, 25 bp, Probe Sequence
gcctctagaggtaaagccacgtgtc

SEQ ID NO: 204796 - DNA, 25 bp, Probe Sequence
gcctttatgttcaatcccaggatat

SEQ ID NO: 204797 - DNA, 25 bp, Probe Sequence
gcctcattgagttctataagcacga

SEQ ID NO: 204798 - DNA, 25 bp, Probe Sequence
gcctcatctgggtagtggacagcgc

SEQ ID NO: 204799 - DNA, 25 bp, Probe Sequence
gcctcatctgcaatgtaggggccgg

SEQ ID NO: 204800 - DNA, 25 bp, Probe Sequence
gcctagctcttgtcacaggtggtga

SEQ ID NO: 204801 - DNA, 25 bp, Probe Sequence
gcctagtccgcgggacggataacaa

SEQ ID NO: 204802 - DNA, 25 bp, Probe Sequence
gcctaggccgcgggacggataacaa

SEQ ID NO: 204803 - DNA, 25 bp, Probe Sequence
gcctaggccgcgggacggataacaa

SEQ ID NO: 204804 - DNA, 25 bp, Probe Sequence
gcctaggccgcgggacggataacaa

SEQ ID NO: 204805 - DNA, 25 bp, Probe Sequence
gcctaggccgcgggacggataacaa

SEQ ID NO: 204806 - DNA, 25 bp, Probe Sequence
gcctaggccgcgggacggataacaa

SEQ ID NO: 204807 - DNA, 25 bp, Probe Sequence
gccgggtctgccctaaggataaatg

SEQ ID NO: 204808 - DNA, 25 bp, Probe Sequence
gccggagtcccgatgcaggacaaga

SEQ ID NO: 204809 - DNA, 25 bp, Probe Sequence
gcctctggtctctgttcagaaccag

SEQ ID NO: 204810 - DNA, 25 bp, Probe Sequence
gcctttggcatctgttgcaacacgg

SEQ ID NO: 204811 - DNA, 25 bp, Probe Sequence
gcctctctggaatctgtcaacccag

SEQ ID NO: 204812 - DNA, 25 bp, Probe Sequence
gcctttggagacatgaccactgaag

SEQ ID NO: 204813 - DNA, 25 bp, Probe Sequence
gcctcatggtaaactcaaactgaaa

SEQ ID NO: 204814 - DNA, 25 bp, Probe Sequence
gcctcatcgtactctcaaaagtgtt

SEQ ID NO: 204815 - DNA, 25 bp, Probe Sequence
gcctctgtttctgctctgaaagttt

SEQ ID NO: 204816 - DNA, 25 bp, Probe Sequence
gcctttttcacagtgcataagcagt

SEQ ID NO: 204817 - DNA, 25 bp, Probe Sequence
gccttttataatggctgcatggaag

SEQ ID NO: 204818 - DNA, 25 bp, Probe Sequence
gcctggcatttatgcccagtacatg

SEQ ID NO: 204819 - DNA, 25 bp, Probe Sequence
gccgaagttatggaccgctagcatc

SEQ ID NO: 204820 - DNA, 25 bp, Probe Sequence
gcctatatttgacaccagctgagca

SEQ ID NO: 204821 - DNA, 25 bp, Probe Sequence
gcctatactaactttgatgctgagc

SEQ ID NO: 204822 - DNA, 25 bp, Probe Sequence
gcctaactgaactgcgttgagctgc

SEQ ID NO: 204823 - DNA, 25 bp, Probe Sequence
gcctacctggtcattttagctgttg

SEQ ID NO: 204824 - DNA, 25 bp, Probe Sequence
gcctacggtgtcagtgttggacctg

SEQ ID NO: 204825 - DNA, 25 bp, Probe Sequence
gcctaagagtaaagtgtttgtcact

SEQ ID NO: 204826 - DNA, 25 bp, Probe Sequence
gcctaaaagaaattgctttagcttc

SEQ ID NO: 204827 - DNA, 25 bp, Probe Sequence
gcctaactatgggacagctttacga

SEQ ID NO: 204828 - DNA, 25 bp, Probe Sequence
gcctatacctggcacctcattaaga

SEQ ID NO: 204829 - DNA, 25 bp, Probe Sequence
gcctatatatcagggaccacattat

SEQ ID NO: 204830 - DNA, 25 bp, Probe Sequence
gcctgtaatgcactgatgtcctttt

SEQ ID NO: 204831 - DNA, 25 bp, Probe Sequence
gcctattaccattgtgatgcgttct

SEQ ID NO: 204832 - DNA, 25 bp, Probe Sequence
gcccaatccatattggtggtccccc

SEQ ID NO: 204833 - DNA, 25 bp, Probe Sequence
gcctccatccagtatggcggacatc

SEQ ID NO: 204834 - DNA, 25 bp, Probe Sequence
gcctctcagccgttgattgtaactt

SEQ ID NO: 204835 - DNA, 25 bp, Probe Sequence
gcctgtggcctgaatgatagtattt

SEQ ID NO: 204836 - DNA, 25 bp, Probe Sequence
gccgtggtctatatcgagatcctgg

SEQ ID NO: 204837 - DNA, 25 bp, Probe Sequence
gcctagtggcttataaagctgctag

SEQ ID NO: 204838 - DNA, 25 bp, Probe Sequence
gcctggtggttaaaatacgattcct

SEQ ID NO: 204839 - DNA, 25 bp, Probe Sequence
gctgggtttcaacaaacgtgccatt

SEQ ID NO: 204840 - DNA, 25 bp, Probe Sequence
gcttggggtcaagaaacagccagca

SEQ ID NO: 204841 - DNA, 25 bp, Probe Sequence
gctggggttgacttaaacctgagag

SEQ ID NO: 204842 - DNA, 25 bp, Probe Sequence
gccgggttacttatcccaggcagaa

SEQ ID NO: 204843 - DNA, 25 bp, Probe Sequence
gcctggttaaagttccccagtgcct

SEQ ID NO: 204844 - DNA, 25 bp, Probe Sequence
gcctgactataaaattccagcctgg

SEQ ID NO: 204845 - DNA, 25 bp, Probe Sequence
gcctaacaaagacacttgcctgtgg

SEQ ID NO: 204846 - DNA, 25 bp, Probe Sequence
gccggaaagaccgacggcacgtgcc

SEQ ID NO: 204847 - DNA, 25 bp, Probe Sequence
gccggacaatcagcaaatacctggc

SEQ ID NO: 204848 - DNA, 25 bp, Probe Sequence
gccgcaaaggcagcaggctaccgga

SEQ ID NO: 204849 - DNA, 25 bp, Probe Sequence
gcctcaaggtcagagactgacttgc

SEQ ID NO: 204850 - DNA, 25 bp, Probe Sequence
gcctacagtggctacaaatacgtgg

SEQ ID NO: 204851 - DNA, 25 bp, Probe Sequence
gcctacgtgagccaacaagaagcag

SEQ ID NO: 204852 - DNA, 25 bp, Probe Sequence
gcctgacctgaattaaagtactgac

SEQ ID NO: 204853 - DNA, 25 bp, Probe Sequence
gcctacctcagatagacagtgccag

SEQ ID NO: 204854 - DNA, 25 bp, Probe Sequence
gcctactcccaagtaagagcaaatc

SEQ ID NO: 204855 - DNA, 25 bp, Probe Sequence
gcctacattcacttctaaagtctat

SEQ ID NO: 204856 - DNA, 25 bp, Probe Sequence
gcctggactcacttcttaagtatgt

SEQ ID NO: 204857 - DNA, 25 bp, Probe Sequence
gcctggagacatttctactggtacc

SEQ ID NO: 204858 - DNA, 25 bp, Probe Sequence
gcctatagagatttctcctgatttg

SEQ ID NO: 204859 - DNA, 25 bp, Probe Sequence
gcctactgtgtttccactgagtgct

SEQ ID NO: 204860 - DNA, 25 bp, Probe Sequence
gcctatcgatgggtagcaagagtct

SEQ ID NO: 204861 - DNA, 25 bp, Probe Sequence
gcgctacgctgagtatagccacttt

SEQ ID NO: 204862 - DNA, 25 bp, Probe Sequence
gcctatggggaattgctgctcttta

SEQ ID NO: 204863 - DNA, 25 bp, Probe Sequence
gcctttgccttattctgtgcatggg

SEQ ID NO: 204864 - DNA, 25 bp, Probe Sequence
gcctttgcatcatttatcttgtgga

SEQ ID NO: 204865 - DNA, 25 bp, Probe Sequence
gcctttgatcaacctttgtgtgcga

SEQ ID NO: 204866 - DNA, 25 bp, Probe Sequence
gcctttgatcaacctttgtgtgcga

SEQ ID NO: 204867 - DNA, 25 bp, Probe Sequence
gcctttgagcgacctttgggcaggt

SEQ ID NO: 204868 - DNA, 25 bp, Probe Sequence
gcctttgggcaggtgtagaaattat

SEQ ID NO: 204869 - DNA, 25 bp, Probe Sequence
gcctttgtggatgctgtgcataaac

SEQ ID NO: 204870 - DNA, 25 bp, Probe Sequence
gcctttgatggtgttcatttgcatt

SEQ ID NO: 204871 - DNA, 25 bp, Probe Sequence
gcctaaagccatattcattcaccat

SEQ ID NO: 204872 - DNA, 25 bp, Probe Sequence
gcctaaaggatattctcatggggat

SEQ ID NO: 204873 - DNA, 25 bp, Probe Sequence
gcctgcaaacgttgtcatcgaaggg

SEQ ID NO: 204874 - DNA, 25 bp, Probe Sequence
gcctatataagttggcatggcaggg

SEQ ID NO: 204875 - DNA, 25 bp, Probe Sequence
gcctatataagttggcatggcaggg

SEQ ID NO: 204876 - DNA, 25 bp, Probe Sequence
gcctcattcacagcggaggtgagag

SEQ ID NO: 204877 - DNA, 25 bp, Probe Sequence
gcctcagtgtagtggaagtgataat

SEQ ID NO: 204878 - DNA, 25 bp, Probe Sequence
gcctgaggtattgtgaagattagtt

SEQ ID NO: 204879 - DNA, 25 bp, Probe Sequence
gcctatgcgtttgtatatgctctaa

SEQ ID NO: 204880 - DNA, 25 bp, Probe Sequence
gcctatggctttcgaaacatccaga

SEQ ID NO: 204881 - DNA, 25 bp, Probe Sequence
gcctgtggtttccacagaagcacca

SEQ ID NO: 204882 - DNA, 25 bp, Probe Sequence
gcctgtggctttagttatacagccc

SEQ ID NO: 204883 - DNA, 25 bp, Probe Sequence
gcctggcctgaatattatactactc

SEQ ID NO: 204884 - DNA, 25 bp, Probe Sequence
gcctggcctgacaaaaaatccaatg

SEQ ID NO: 204885 - DNA, 25 bp, Probe Sequence
gcctgtgcttactgtagtaccacac

SEQ ID NO: 204886 - DNA, 25 bp, Probe Sequence
gcctagcaacgcttgtaggactcac

SEQ ID NO: 204887 - DNA, 25 bp, Probe Sequence
gcctggcaaccaaatcgaatctctc

SEQ ID NO: 204888 - DNA, 25 bp, Probe Sequence
gcctctgaacggaacagtgtcccca

SEQ ID NO: 204889 - DNA, 25 bp, Probe Sequence
gcctctctgttgaaacggtccagcc

SEQ ID NO: 204890 - DNA, 25 bp, Probe Sequence
gcctggcagtgtcaagcctgaaacc

SEQ ID NO: 204891 - DNA, 25 bp, Probe Sequence
gcctccagatggaaaggcgggcccg

SEQ ID NO: 204892 - DNA, 25 bp, Probe Sequence
gcctcgagtgcgatatggcaaagcc

SEQ ID NO: 204893 - DNA, 25 bp, Probe Sequence
gcctgaaaggtttgtacagatgcat

SEQ ID NO: 204894 - DNA, 25 bp, Probe Sequence
tgcctggaagggacccacgagtttt

SEQ ID NO: 204895 - DNA, 25 bp, Probe Sequence
gcctggcagtctgacccaaagttgc

SEQ ID NO: 204896 - DNA, 25 bp, Probe Sequence
gcctccaggtccgcaagaacaagcg

SEQ ID NO: 204897 - DNA, 25 bp, Probe Sequence
gccgaagtgtccgcactgtaaagca

SEQ ID NO: 204898 - DNA, 25 bp, Probe Sequence
gcccaaggctacaaagctagaaagt

SEQ ID NO: 204899 - DNA, 25 bp, Probe Sequence
gccgcaatggttcacagttgatacg

SEQ ID NO: 204900 - DNA, 25 bp, Probe Sequence
gcctgccatggtacagaactggatt

SEQ ID NO: 204901 - DNA, 25 bp, Probe Sequence
gcctcctggttctatacgtgaatac

SEQ ID NO: 204902 - DNA, 25 bp, Probe Sequence
gcctcgggcacgctacgagagtaca

SEQ ID NO: 204903 - DNA, 25 bp, Probe Sequence
gcctctaggagcagtgacgtgtgta

SEQ ID NO: 204904 - DNA, 25 bp, Probe Sequence
gccctgagagaccagttcttttaga

SEQ ID NO: 204905 - DNA, 25 bp, Probe Sequence
gcccaggacaaaattcttagtaatg

SEQ ID NO: 204906 - DNA, 25 bp, Probe Sequence
gcctaggaagaccagtttaagaata

SEQ ID NO: 204907 - DNA, 25 bp, Probe Sequence
gcctgggaagttctgttgctgcaga

SEQ ID NO: 204908 - DNA, 25 bp, Probe Sequence
gcctggtaaattccatgtgcctctg

SEQ ID NO: 204909 - DNA, 25 bp, Probe Sequence
gcctgtggaagcttggcttctttgc

SEQ ID NO: 204910 - DNA, 25 bp, Probe Sequence
gcctggaaagacacctctgtctggg

SEQ ID NO: 204911 - DNA, 25 bp, Probe Sequence
gcctcaaaagtcacagcttagctgg

SEQ ID NO: 204912 - DNA, 25 bp, Probe Sequence
gcctgcaagggtgacagtggggggc

SEQ ID NO: 204913 - DNA, 25 bp, Probe Sequence
gcctgatggggtgacttggcctggg

SEQ ID NO: 204914 - DNA, 25 bp, Probe Sequence
gcctgagtgggtggtttgcgaggat

SEQ ID NO: 204915 - DNA, 25 bp, Probe Sequence
gcctcagaggaggagtattccacca

SEQ ID NO: 204916 - DNA, 25 bp, Probe Sequence
gcctatgaagatgagtacagctact

SEQ ID NO: 204917 - DNA, 25 bp, Probe Sequence
gcctgcagagaagaaacctactaca

SEQ ID NO: 204918 - DNA, 25 bp, Probe Sequence
gcctagtgaactcaagctgtagcca

SEQ ID NO: 204919 - DNA, 25 bp, Probe Sequence
gcctttgcaaggcaggttagtcacc

SEQ ID NO: 204920 - DNA, 25 bp, Probe Sequence
gcctctgtgccatggatgattcttt

SEQ ID NO: 204921 - DNA, 25 bp, Probe Sequence
gcctctgccactttgaattctgtgc

SEQ ID NO: 204922 - DNA, 25 bp, Probe Sequence
gcctctccaggattgtatgtttcaa

SEQ ID NO: 204923 - DNA, 25 bp, Probe Sequence
gcctctgctcggcaaaatttcacct

SEQ ID NO: 204924 - DNA, 25 bp, Probe Sequence
gcctccatgggttcagatattttcc

SEQ ID NO: 204925 - DNA, 25 bp, Probe Sequence
gcctccatggagtacttcaaatctg

SEQ ID NO: 204926 - DNA, 25 bp, Probe Sequence
gcctccaggcaggattcagcacaac

SEQ ID NO: 204927 - DNA, 25 bp, Probe Sequence
gcctccctcagcgagatctgagcat

SEQ ID NO: 204928 - DNA, 25 bp, Probe Sequence
gcctcagctcatcgcaagagtagca

SEQ ID NO: 204929 - DNA, 25 bp, Probe Sequence
gcctcagcctcctgagtagctggga

SEQ ID NO: 204930 - DNA, 25 bp, Probe Sequence
gcctccccacaaggcgaggggagtt

SEQ ID NO: 204931 - DNA, 25 bp, Probe Sequence
gcctcaccacggaccaaagggagtc

SEQ ID NO: 204932 - DNA, 25 bp, Probe Sequence
gctctggcccggaaaccggggatgc

SEQ ID NO: 204933 - DNA, 25 bp, Probe Sequence
gcctgccccggaaactcaagatggc

SEQ ID NO: 204934 - DNA, 25 bp, Probe Sequence
gcctgccccggcagagattatgcag

SEQ ID NO: 204935 - DNA, 25 bp, Probe Sequence
gcctgcagtggccgaggagattcag

SEQ ID NO: 204936 - DNA, 25 bp, Probe Sequence
gcctcagggcttggggcaggcatgg

SEQ ID NO: 204937 - DNA, 25 bp, Probe Sequence
gcctcgggcgtatgtctgtaggaac

SEQ ID NO: 204938 - DNA, 25 bp, Probe Sequence
gcctcccaggtttgatcttagaata

SEQ ID NO: 204939 - DNA, 25 bp, Probe Sequence
gcctagccagggccatgtcttaggt

SEQ ID NO: 204940 - DNA, 25 bp, Probe Sequence
gcctacctgcggaatgctgtggtgg

SEQ ID NO: 204941 - DNA, 25 bp, Probe Sequence
gcctatcacgcgtgaatcggtgtcc

SEQ ID NO: 204942 - DNA, 25 bp, Probe Sequence
gcgctggcaagcccgaatcggttta

SEQ ID NO: 204943 - DNA, 25 bp, Probe Sequence
gcctggaacctgagagcgagtatta

SEQ ID NO: 204944 - DNA, 25 bp, Probe Sequence
gcctacagaacgagcatcgagtgct

SEQ ID NO: 204945 - DNA, 25 bp, Probe Sequence
gcctcatcgacacgtcgtggagcgc

SEQ ID NO: 204946 - DNA, 25 bp, Probe Sequence
gcctgctcaccatctcagtgagggg

SEQ ID NO: 204947 - DNA, 25 bp, Probe Sequence
gcctgctagacatctgctaaaatgc

SEQ ID NO: 204948 - DNA, 25 bp, Probe Sequence
gcctctatgtattggctactacagt

SEQ ID NO: 204949 - DNA, 25 bp, Probe Sequence
gcctcaacaagggccacaaagtgac

SEQ ID NO: 204950 - DNA, 25 bp, Probe Sequence
gcctcaagaaaggcccggaagcgcc

SEQ ID NO: 204951 - DNA, 25 bp, Probe Sequence
gccgagataaaggcaccgaacagcg

SEQ ID NO: 204952 - DNA, 25 bp, Probe Sequence
gcctggtggagaacaacgaacgggt

SEQ ID NO: 204953 - DNA, 25 bp, Probe Sequence
gcctcagggataatccacaggttgg

SEQ ID NO: 204954 - DNA, 25 bp, Probe Sequence
gcctagggatgacgtcacgcagttc

SEQ ID NO: 204955 - DNA, 25 bp, Probe Sequence
gcctggataatgcttccgccttcca

SEQ ID NO: 204956 - DNA, 25 bp, Probe Sequence
gccgctaaatagctcacgttaggca

SEQ ID NO: 204957 - DNA, 25 bp, Probe Sequence
gcctcttaatcccatcaagatgtag

SEQ ID NO: 204958 - DNA, 25 bp, Probe Sequence
gcctcttttacttccaggatgctga

SEQ ID NO: 204959 - DNA, 25 bp, Probe Sequence
gcctcattatgtcaaccaggtccag

SEQ ID NO: 204960 - DNA, 25 bp, Probe Sequence
gcctgaggagctccaaccagggaag

SEQ ID NO: 204961 - DNA, 25 bp, Probe Sequence
gccgtggagtggatgccaatagaaa

SEQ ID NO: 204962 - DNA, 25 bp, Probe Sequence
gcctcttcctgcattgtcaaaaaaa

SEQ ID NO: 204963 - DNA, 25 bp, Probe Sequence
gcctcacttctcactgtaaacatta

SEQ ID NO: 204964 - DNA, 25 bp, Probe Sequence
gcctcaaattgctggtgaatacata

SEQ ID NO: 204965 - DNA, 25 bp, Probe Sequence
gcctcacaatgtgggaatttgacat

SEQ ID NO: 204966 - DNA, 25 bp, Probe Sequence
gccgccatgttcctgatattagttc

SEQ ID NO: 204967 - DNA, 25 bp, Probe Sequence
gcccatcgtcctagaattaattccc

SEQ ID NO: 204968 - DNA, 25 bp, Probe Sequence
gcctctgtggtaaaagtgaattccc

SEQ ID NO: 204969 - DNA, 25 bp, Probe Sequence
gcctcttagtaaatgaatcgttacc

SEQ ID NO: 204970 - DNA, 25 bp, Probe Sequence
gcctcttaccatatgacacgtgtca

SEQ ID NO: 204971 - DNA, 25 bp, Probe Sequence
gcctcttaactgtaacaatgttcat

SEQ ID NO: 204972 - DNA, 25 bp, Probe Sequence
gcctcttagacgatctccagatgta

SEQ ID NO: 204973 - DNA, 25 bp, Probe Sequence
gcctctctaaagaactgaccagcca

SEQ ID NO: 204974 - DNA, 25 bp, Probe Sequence
gcctcttccaaaactggctggacca

SEQ ID NO: 204975 - DNA, 25 bp, Probe Sequence
gcttttctgaaacggcgaggaccac

SEQ ID NO: 204976 - DNA, 25 bp, Probe Sequence
gcctctacatgaaatctgtcgcagg

SEQ ID NO: 204977 - DNA, 25 bp, Probe Sequence
gcctctctgtgctaacatttcagac

SEQ ID NO: 204978 - DNA, 25 bp, Probe Sequence
gcctcatctgtcaaacaagagagat

SEQ ID NO: 204979 - DNA, 25 bp, Probe Sequence
gcctcatccttaaagagaagtcacc

SEQ ID NO: 204980 - DNA, 25 bp, Probe Sequence
gcctcagggatcacgagagagtcct

SEQ ID NO: 204981 - DNA, 25 bp, Probe Sequence
gcctgctgcggaacgcgcaggagct

SEQ ID NO: 204982 - DNA, 25 bp, Probe Sequence
gcctgtgagatgagggcagcctcta

SEQ ID NO: 204983 - DNA, 25 bp, Probe Sequence
gcctctgcaatattctggcaattta

SEQ ID NO: 204984 - DNA, 25 bp, Probe Sequence
gcctcagatatactcatgcaaatat

SEQ ID NO: 204985 - DNA, 25 bp, Probe Sequence
gcctcagtaactgatgcaatcaact

SEQ ID NO: 204986 - DNA, 25 bp, Probe Sequence
gcctagtattccatctacagcacag

SEQ ID NO: 204987 - DNA, 25 bp, Probe Sequence
gcctagtcattatttgctgtcgggt

SEQ ID NO: 204988 - DNA, 25 bp, Probe Sequence
gcctcagtattcttagcttttgttg

SEQ ID NO: 204989 - DNA, 25 bp, Probe Sequence
gcctcttatgttaacgtttgctatt

SEQ ID NO: 204990 - DNA, 25 bp, Probe Sequence
gcctgttgtggagtacgctttggac

SEQ ID NO: 204991 - DNA, 25 bp, Probe Sequence
gccgacgggagtaagccctggtggt

SEQ ID NO: 204992 - DNA, 25 bp, Probe Sequence
gccgtccaggagctactcaggaagg

SEQ ID NO: 204993 - DNA, 25 bp, Probe Sequence
gcctgtagcaggagccctgaggagg

SEQ ID NO: 204994 - DNA, 25 bp, Probe Sequence
gcctcggtgctgggcaccatggaga

SEQ ID NO: 204995 - DNA, 25 bp, Probe Sequence
gcctcatgggtgtagccgcatggca

SEQ ID NO: 204996 - DNA, 25 bp, Probe Sequence
gcctcagtggagtctcccaagcaag

SEQ ID NO: 204997 - DNA, 25 bp, Probe Sequence
gcctgcagctggattacgcaacagt

SEQ ID NO: 204998 - DNA, 25 bp, Probe Sequence
gcgctggcgttacagcgcaacagca

SEQ ID NO: 204999 - DNA, 25 bp, Probe Sequence
gcctgcgctcttactatgagaccag

SEQ ID NO: 205000 - DNA, 25 bp, Probe Sequence
gcctcactattacttgaactttcca

SEQ ID NO: 205001 - DNA, 25 bp, Probe Sequence
gcctcctgttgacacaattgttgct

SEQ ID NO: 205002 - DNA, 25 bp, Probe Sequence
gcctgcctttgacacttttatgcac

SEQ ID NO: 205003 - DNA, 25 bp, Probe Sequence
gcctgttcttctccaattttgagcg

SEQ ID NO: 205004 - DNA, 25 bp, Probe Sequence
gcctgtttttgagaattccagagcc

SEQ ID NO: 205005 - DNA, 25 bp, Probe Sequence
gcctgcagcgttgagaaacccagcc

SEQ ID NO: 205006 - DNA, 25 bp, Probe Sequence
gcctctggggctggaaagcctcagc

SEQ ID NO: 205007 - DNA, 25 bp, Probe Sequence
gcctctcgcatggcggatgacatgc

SEQ ID NO: 205008 - DNA, 25 bp, Probe Sequence
gcctctccagccaacatgcaaggct

SEQ ID NO: 205009 - DNA, 25 bp, Probe Sequence
gcctgctcctggaatacacagactc

SEQ ID NO: 205010 - DNA, 25 bp, Probe Sequence
gcctgctcctggaatacacagactc

SEQ ID NO: 205011 - DNA, 25 bp, Probe Sequence
gcctgcatcatctttggcagacaga

SEQ ID NO: 205012 - DNA, 25 bp, Probe Sequence
gcctgctttgctggctgcaacagca

SEQ ID NO: 205013 - DNA, 25 bp, Probe Sequence
gcctgcttggctgtgaaaagtaaga

SEQ ID NO: 205014 - DNA, 25 bp, Probe Sequence
gcctctgagccgcaggaaatgtcca

SEQ ID NO: 205015 - DNA, 25 bp, Probe Sequence
gcctctgcccagcaatggggtcatg

SEQ ID NO: 205016 - DNA, 25 bp, Probe Sequence
gcctgctcccaattatgttaatctg

SEQ ID NO: 205017 - DNA, 25 bp, Probe Sequence
gcctgtgccggatcatggacaatgg

SEQ ID NO: 205018 - DNA, 25 bp, Probe Sequence
gcctgtcacaactttgagaccagag

SEQ ID NO: 205019 - DNA, 25 bp, Probe Sequence
gcctagtcactatttacaatcagag

SEQ ID NO: 205020 - DNA, 25 bp, Probe Sequence
gcctgaatctgcttatattcaatag

SEQ ID NO: 205021 - DNA, 25 bp, Probe Sequence
gccgtgttgccttatatgaatatgc

SEQ ID NO: 205022 - DNA, 25 bp, Probe Sequence
gccgatttccattataggggccaaa

SEQ ID NO: 205023 - DNA, 25 bp, Probe Sequence
gccgatttccattataggggccaaa

SEQ ID NO: 205024 - DNA, 25 bp, Probe Sequence
gcctcattttctttcaggaggatct

SEQ ID NO: 205025 - DNA, 25 bp, Probe Sequence
gcctcttctgacttctcaaaggaca

SEQ ID NO: 205026 - DNA, 25 bp, Probe Sequence
gcctccctgaatggcatccagatgg

SEQ ID NO: 205027 - DNA, 25 bp, Probe Sequence
gcctctctgctgatgacatacgtgg

SEQ ID NO: 205028 - DNA, 25 bp, Probe Sequence
gcctctgcgctgaggacagggacgc

SEQ ID NO: 205029 - DNA, 25 bp, Probe Sequence
gcctctgcgctgaggacagggacgc

SEQ ID NO: 205030 - DNA, 25 bp, Probe Sequence
gcctcacagtgcagggcggtatgcc

SEQ ID NO: 205031 - DNA, 25 bp, Probe Sequence
gcctgcacagtgccaggagacgatt

SEQ ID NO: 205032 - DNA, 25 bp, Probe Sequence
gcctgcaagcccagggcgagtattg

SEQ ID NO: 205033 - DNA, 25 bp, Probe Sequence
gcctgctgacttaggtggcgtgttt

SEQ ID NO: 205034 - DNA, 25 bp, Probe Sequence
gcctgctgatcttaagaagagaata

SEQ ID NO: 205035 - DNA, 25 bp, Probe Sequence
gcctgcggccgagaaatgcaatgct

SEQ ID NO: 205036 - DNA, 25 bp, Probe Sequence
gcctgcaggttggcaaaagcagctt

SEQ ID NO: 205037 - DNA, 25 bp, Probe Sequence
gcctgaggttggatgagatcatttc

SEQ ID NO: 205038 - DNA, 25 bp, Probe Sequence
gcctgatgtagtctagaatcctgtg

SEQ ID NO: 205039 - DNA, 25 bp, Probe Sequence
gcctgagaatggctaggaactggag

SEQ ID NO: 205040 - DNA, 25 bp, Probe Sequence
gcctgagcttagctcagcgccgggg

SEQ ID NO: 205041 - DNA, 25 bp, Probe Sequence
gcctgagcttagctcagcgccgggg

SEQ ID NO: 205042 - DNA, 25 bp, Probe Sequence
gcctgagcttagctcagcgccgggg

SEQ ID NO: 205043 - DNA, 25 bp, Probe Sequence
gcctgagtctagcctgggagccagg

SEQ ID NO: 205044 - DNA, 25 bp, Probe Sequence
gcctgagctcttctgtaagctgggg

SEQ ID NO: 205045 - DNA, 25 bp, Probe Sequence
cgcagtggggacagccacagacggg

SEQ ID NO: 205046 - DNA, 25 bp, Probe Sequence
gcctctctgttaactacagcagaag

SEQ ID NO: 205047 - DNA, 25 bp, Probe Sequence
gcctcctttttcaagcagcggataa

SEQ ID NO: 205048 - DNA, 25 bp, Probe Sequence
gcctcagcctttgcacatggtaatg

SEQ ID NO: 205049 - DNA, 25 bp, Probe Sequence
gcctctgcctctaaaatggtgaatt

SEQ ID NO: 205050 - DNA, 25 bp, Probe Sequence
gcctgtgacctcaattaaagcaatt

SEQ ID NO: 205051 - DNA, 25 bp, Probe Sequence
gcctctggttctataaacaagtcat

SEQ ID NO: 205052 - DNA, 25 bp, Probe Sequence
gcctccgtctctatataaggaattt

SEQ ID NO: 205053 - DNA, 25 bp, Probe Sequence
gcctccacctatattatgagagcaa

SEQ ID NO: 205054 - DNA, 25 bp, Probe Sequence
gcctcagaccttagcttgaagcagc

SEQ ID NO: 205055 - DNA, 25 bp, Probe Sequence
gcctccacaccaagctagaaggctt

SEQ ID NO: 205056 - DNA, 25 bp, Probe Sequence
gcctcacagcactattgtaaaccct

SEQ ID NO: 205057 - DNA, 25 bp, Probe Sequence
gcctctcacatctatggtagtcacc

SEQ ID NO: 205058 - DNA, 25 bp, Probe Sequence
gcctcgacacaatgtcatgatcagc

SEQ ID NO: 205059 - DNA, 25 bp, Probe Sequence
gcctgtgatgacatggtgctgattc

SEQ ID NO: 205060 - DNA, 25 bp, Probe Sequence
gccgtgatgctcaggcttgaaatcg

SEQ ID NO: 205061 - DNA, 25 bp, Probe Sequence
gcctgaagtctagcttggatatatg

SEQ ID NO: 205062 - DNA, 25 bp, Probe Sequence
gcctgaaatatatgctggaggtgga

SEQ ID NO: 205063 - DNA, 25 bp, Probe Sequence
gccgtatctacatgtggatgggaca

SEQ ID NO: 205064 - DNA, 25 bp, Probe Sequence
gccggcacttcaacgagctggaggc

SEQ ID NO: 205065 - DNA, 25 bp, Probe Sequence
gccgtgcatctgaatttcaggggtc

SEQ ID NO: 205066 - DNA, 25 bp, Probe Sequence
gccgtgtttatgcctcacgggcttg

SEQ ID NO: 205067 - DNA, 25 bp, Probe Sequence
gcctgtgtacctcgtaggaacgctg

SEQ ID NO: 205068 - DNA, 25 bp, Probe Sequence
gcctctggaacctgaggcggctgct

SEQ ID NO: 205069 - DNA, 25 bp, Probe Sequence
gcctcgcgaacgccgggctggatta

SEQ ID NO: 205070 - DNA, 25 bp, Probe Sequence
gcctcagcttatgcatctggtggga

SEQ ID NO: 205071 - DNA, 25 bp, Probe Sequence
gcctgagtgtattgcatctcttgat

SEQ ID NO: 205072 - DNA, 25 bp, Probe Sequence
gcctcgatgctgttgcagctcaggt

SEQ ID NO: 205073 - DNA, 25 bp, Probe Sequence
gcctctactgatacatgtctgtgtt

SEQ ID NO: 205074 - DNA, 25 bp, Probe Sequence
gcctctgacattactgtctctcagt

SEQ ID NO: 205075 - DNA, 25 bp, Probe Sequence
gcctcagtgcttatgtcatagcctt

SEQ ID NO: 205076 - DNA, 25 bp, Probe Sequence
gcctgacggccaggtcatcaccatt

SEQ ID NO: 205077 - DNA, 25 bp, Probe Sequence
gcccaaggccaaatatccctttaag

SEQ ID NO: 205078 - DNA, 25 bp, Probe Sequence
gcctaaggaaagactggcttttggg

SEQ ID NO: 205079 - DNA, 25 bp, Probe Sequence
gcctacagtaaagtcctgattttag

SEQ ID NO: 205080 - DNA, 25 bp, Probe Sequence
gcctcatcagtaacacatggctgct

SEQ ID NO: 205081 - DNA, 25 bp, Probe Sequence
gcctcagagtcaaccatgacgcacc

SEQ ID NO: 205082 - DNA, 25 bp, Probe Sequence
gcctcgatgacagaatgacaccttg

SEQ ID NO: 205083 - DNA, 25 bp, Probe Sequence
gccggctgctcagaagataccgtga

SEQ ID NO: 205084 - DNA, 25 bp, Probe Sequence
gcctggtccagttggagaccgtcaa

SEQ ID NO: 205085 - DNA, 25 bp, Probe Sequence
gcctggttctgctgctagaacttga

SEQ ID NO: 205086 - DNA, 25 bp, Probe Sequence
gcctggtacagatctgtgagaagta

SEQ ID NO: 205087 - DNA, 25 bp, Probe Sequence
gccgtgtccaatcattatggagcca

SEQ ID NO: 205088 - DNA, 25 bp, Probe Sequence
gcctccatccaaggcattgggacca

SEQ ID NO: 205089 - DNA, 25 bp, Probe Sequence
gcctccatctcatgtatcatctgga

SEQ ID NO: 205090 - DNA, 25 bp, Probe Sequence
gcctccatcatgaagaagctcttga

SEQ ID NO: 205091 - DNA, 25 bp, Probe Sequence
gcctcctaatgaaacttgtaccgtg

SEQ ID NO: 205092 - DNA, 25 bp, Probe Sequence
gcctcctaatgaaacttgtaccgtg

SEQ ID NO: 205093 - DNA, 25 bp, Probe Sequence
gcctcttatgatatccttgtgaacc

SEQ ID NO: 205094 - DNA, 25 bp, Probe Sequence
gcctcaggtgtgcttttgggactgc

SEQ ID NO: 205095 - DNA, 25 bp, Probe Sequence
gcctcagcagttctttggattaatg

SEQ ID NO: 205096 - DNA, 25 bp, Probe Sequence
gcctcatccttgtatttaattaatt

SEQ ID NO: 205097 - DNA, 25 bp, Probe Sequence
gcctcatccttgtatttaattaatt

SEQ ID NO: 205098 - DNA, 25 bp, Probe Sequence
gcctctccctcattaaagttttata

SEQ ID NO: 205099 - DNA, 25 bp, Probe Sequence
gccgctcgcgatctaatgagtttta

SEQ ID NO: 205100 - DNA, 25 bp, Probe Sequence
gcctcttgagtagcttggtttatag

SEQ ID NO: 205101 - DNA, 25 bp, Probe Sequence
gcctcttgagtagctgggtgtacag

SEQ ID NO: 205102 - DNA, 25 bp, Probe Sequence
gcctcacgagtagctgggactacag

SEQ ID NO: 205103 - DNA, 25 bp, Probe Sequence
gcctcaccaccgatgagtacgacgg

SEQ ID NO: 205104 - DNA, 25 bp, Probe Sequence
gcctcacttctgcttaggaaagcgg

SEQ ID NO: 205105 - DNA, 25 bp, Probe Sequence
gcctcaccattgctgaagagagaga

SEQ ID NO: 205106 - DNA, 25 bp, Probe Sequence
gcctcacatattctaaggtgcagag

SEQ ID NO: 205107 - DNA, 25 bp, Probe Sequence
gcctcctttccatagagctgcagaa

SEQ ID NO: 205108 - DNA, 25 bp, Probe Sequence
gcctcatcttctagcataaagtcaa

SEQ ID NO: 205109 - DNA, 25 bp, Probe Sequence
gcctcccttgatgtcaagatccatg

SEQ ID NO: 205110 - DNA, 25 bp, Probe Sequence
gcctgcaccaaagtctcaagctttg

SEQ ID NO: 205111 - DNA, 25 bp, Probe Sequence
gccgaggccaacagagcacttatgg

SEQ ID NO: 205112 - DNA, 25 bp, Probe Sequence
gcctgaactcaccatagagacccat

SEQ ID NO: 205113 - DNA, 25 bp, Probe Sequence
gcctgacagccaggctgaggccaca

SEQ ID NO: 205114 - DNA, 25 bp, Probe Sequence
gcctgactctgaggagcaagccaag

SEQ ID NO: 205115 - DNA, 25 bp, Probe Sequence
gcctgactctgaggagcaagccaag

SEQ ID NO: 205116 - DNA, 25 bp, Probe Sequence
gcctgagctctggtgaaatgctgat

SEQ ID NO: 205117 - DNA, 25 bp, Probe Sequence
gcctcaggctggggcagcatcgaac

SEQ ID NO: 205118 - DNA, 25 bp, Probe Sequence
gcctgctggcattggccagaccaca

SEQ ID NO: 205119 - DNA, 25 bp, Probe Sequence
gcctgaggatgaggtcaacactgca

SEQ ID NO: 205120 - DNA, 25 bp, Probe Sequence
gcgcggtggagggaaacgcctccgt

SEQ ID NO: 205121 - DNA, 25 bp, Probe Sequence
gcctgcgggaggtgaaagtctccgt

SEQ ID NO: 205122 - DNA, 25 bp, Probe Sequence
gcctcttggaggtggatgggccagc

SEQ ID NO: 205123 - DNA, 25 bp, Probe Sequence
gcctcttcggtgcggcagagggaca

SEQ ID NO: 205124 - DNA, 25 bp, Probe Sequence
gcctgttgtggggtggggggagagg

SEQ ID NO: 205125 - DNA, 25 bp, Probe Sequence
gccctcgtcctggggacgtggaggg

SEQ ID NO: 205126 - DNA, 25 bp, Probe Sequence
gccgtcccctccaggagtgtgaggg

SEQ ID NO: 205127 - DNA, 25 bp, Probe Sequence
gccgttactgccctgtggggcaagg

SEQ ID NO: 205128 - DNA, 25 bp, Probe Sequence
gccgttactgccctgtggggcaagg

SEQ ID NO: 205129 - DNA, 25 bp, Probe Sequence
gccgctatattccagcttgggtgac

SEQ ID NO: 205130 - DNA, 25 bp, Probe Sequence
gcctgcttaggctatgttagctgtg

SEQ ID NO: 205131 - DNA, 25 bp, Probe Sequence
gccgccaacatggtgttcaggcgct

SEQ ID NO: 205132 - DNA, 25 bp, Probe Sequence
gcctgcctgacatggaggctgtggc

SEQ ID NO: 205133 - DNA, 25 bp, Probe Sequence
gcctccaagcagctgttgctatggc

SEQ ID NO: 205134 - DNA, 25 bp, Probe Sequence
gcctcacaagtgcgaagtctggtaa

SEQ ID NO: 205135 - DNA, 25 bp, Probe Sequence
gcctccagcgagcacaagtgcaggt

SEQ ID NO: 205136 - DNA, 25 bp, Probe Sequence
gcctccagcgagcacaagtgcaggt

SEQ ID NO: 205137 - DNA, 25 bp, Probe Sequence
gcctctactgagcccattcatgtag

SEQ ID NO: 205138 - DNA, 25 bp, Probe Sequence
gcctcatttgattccttctatttgc

SEQ ID NO: 205139 - DNA, 25 bp, Probe Sequence
gcctcagatttcttctagtatttgc

SEQ ID NO: 205140 - DNA, 25 bp, Probe Sequence
gcctcagattccttctaaacacagc

SEQ ID NO: 205141 - DNA, 25 bp, Probe Sequence
gcctgatgttccattcaacaccaag

SEQ ID NO: 205142 - DNA, 25 bp, Probe Sequence
gccgatgttcatcgtaaacaccaac

SEQ ID NO: 205143 - DNA, 25 bp, Probe Sequence
gcctgtgtcctacagatgcacactc

SEQ ID NO: 205144 - DNA, 25 bp, Probe Sequence
gcctgttggtcactgtgcagcagtc

SEQ ID NO: 205145 - DNA, 25 bp, Probe Sequence
gcctgttggtcactgtgcagcagtc

SEQ ID NO: 205146 - DNA, 25 bp, Probe Sequence
gcctgtctgtgccagtgacaatgcc

SEQ ID NO: 205147 - DNA, 25 bp, Probe Sequence
gcctgttgtcgcagcagacagtcag

SEQ ID NO: 205148 - DNA, 25 bp, Probe Sequence
gcgctcaatccgttgaacagtcgtg

SEQ ID NO: 205149 - DNA, 25 bp, Probe Sequence
gcgctgaatcccacaactgtgtgat

SEQ ID NO: 205150 - DNA, 25 bp, Probe Sequence
gcctgaagcctcacagctttgatgg

SEQ ID NO: 205151 - DNA, 25 bp, Probe Sequence
gcctggtatgtcttcatagtcattg

SEQ ID NO: 205152 - DNA, 25 bp, Probe Sequence
gcctgagctgcttcactagggaatc

SEQ ID NO: 205153 - DNA, 25 bp, Probe Sequence
gcctgactgcatactttggcagact

SEQ ID NO: 205154 - DNA, 25 bp, Probe Sequence
gcctgcttgcatattggaagatgtt

SEQ ID NO: 205155 - DNA, 25 bp, Probe Sequence
gcctcctgctttacaacagttctgg

SEQ ID NO: 205156 - DNA, 25 bp, Probe Sequence
gcccttctttaattggttctcagtt

SEQ ID NO: 205157 - DNA, 25 bp, Probe Sequence
gcctctcttttattgtaatgtgctc

SEQ ID NO: 205158 - DNA, 25 bp, Probe Sequence
gcctcatgactttatagttatgtct

SEQ ID NO: 205159 - DNA, 25 bp, Probe Sequence
gcctcatgcctgaatcaaattttta

SEQ ID NO: 205160 - DNA, 25 bp, Probe Sequence
gcctgtggcttatacttgtgtatac

SEQ ID NO: 205161 - DNA, 25 bp, Probe Sequence
gcctctttcatgtgacttgtgtcta

SEQ ID NO: 205162 - DNA, 25 bp, Probe Sequence
gcctctttgcatcagattttcacag

SEQ ID NO: 205163 - DNA, 25 bp, Probe Sequence
gcctctgttgatgacagtcgtctag

SEQ ID NO: 205164 - DNA, 25 bp, Probe Sequence
gcctcattcagatacagaacttcag

SEQ ID NO: 205165 - DNA, 25 bp, Probe Sequence
gcctcagtggatccagcaacatctt

SEQ ID NO: 205166 - DNA, 25 bp, Probe Sequence
gcctcaggcaattagacactttgga

SEQ ID NO: 205167 - DNA, 25 bp, Probe Sequence
gcctcaggttcacgtgcttttgaga

SEQ ID NO: 205168 - DNA, 25 bp, Probe Sequence
gcctctctttattggctctttagag

SEQ ID NO: 205169 - DNA, 25 bp, Probe Sequence
gcctctctttattggctctttagag

SEQ ID NO: 205170 - DNA, 25 bp, Probe Sequence
gcctctctttattggctctttagag

SEQ ID NO: 205171 - DNA, 25 bp, Probe Sequence
gcctggccattatggcccagtacaa

SEQ ID NO: 205172 - DNA, 25 bp, Probe Sequence
gcctgggctatttccccagtagcat

SEQ ID NO: 205173 - DNA, 25 bp, Probe Sequence
gcctggccaataatgccccagaacc

SEQ ID NO: 205174 - DNA, 25 bp, Probe Sequence
gcctggtagtaagacacgagagcct

SEQ ID NO: 205175 - DNA, 25 bp, Probe Sequence
gccggtggctacatcagacaggacc

SEQ ID NO: 205176 - DNA, 25 bp, Probe Sequence
gcctgagtggctgcttaggacgttt

SEQ ID NO: 205177 - DNA, 25 bp, Probe Sequence
gcctggtgtgcttattcaggtttat

SEQ ID NO: 205178 - DNA, 25 bp, Probe Sequence
gccgtgggcaaaatacaatttcatt

SEQ ID NO: 205179 - DNA, 25 bp, Probe Sequence
gcctgctgggagtaattcctttagc

SEQ ID NO: 205180 - DNA, 25 bp, Probe Sequence
gcctccgtggctttctggattaatg

SEQ ID NO: 205181 - DNA, 25 bp, Probe Sequence
gcctccctgaggttcttgtatagac

SEQ ID NO: 205182 - DNA, 25 bp, Probe Sequence
gcctgccacggggtgttggatatgg

SEQ ID NO: 205183 - DNA, 25 bp, Probe Sequence
gccccactgtcctgggagttggtgc

SEQ ID NO: 205184 - DNA, 25 bp, Probe Sequence
gccccactgtcctgggagttggtgc

SEQ ID NO: 205185 - DNA, 25 bp, Probe Sequence
gccgcaagttcctggagacggtgga

SEQ ID NO: 205186 - DNA, 25 bp, Probe Sequence
gcccacaaaccccaaaagcgtgtga

SEQ ID NO: 205187 - DNA, 25 bp, Probe Sequence
gctccacgaaccccaaagaattatg

SEQ ID NO: 205188 - DNA, 25 bp, Probe Sequence
gcctcctgacagcaataaataattt

SEQ ID NO: 205189 - DNA, 25 bp, Probe Sequence
gcctgccaagctggaagttaagttt

SEQ ID NO: 205190 - DNA, 25 bp, Probe Sequence
gcctgctgaccggcaagtacaagta

SEQ ID NO: 205191 - DNA, 25 bp, Probe Sequence
gcctgctttccagacttctgagata

SEQ ID NO: 205192 - DNA, 25 bp, Probe Sequence
gcctctgtatcctgtattcagaatt

SEQ ID NO: 205193 - DNA, 25 bp, Probe Sequence
gcctctgtcaatgtgtttgcaacct

SEQ ID NO: 205194 - DNA, 25 bp, Probe Sequence
gcctctggaagtctgctgtgaattt

SEQ ID NO: 205195 - DNA, 25 bp, Probe Sequence
gcctctgtgggtgtgtgtaagttaa

SEQ ID NO: 205196 - DNA, 25 bp, Probe Sequence
gcctctgggaattttgtcaagattt

SEQ ID NO: 205197 - DNA, 25 bp, Probe Sequence
gcctctgagtcagcactcttaaagt

SEQ ID NO: 205198 - DNA, 25 bp, Probe Sequence
gcctgtagccaccaatgtttcaaga

SEQ ID NO: 205199 - DNA, 25 bp, Probe Sequence
gccggagtggtattctggtataagc

SEQ ID NO: 205200 - DNA, 25 bp, Probe Sequence
gccggttgacttctctgctagaaga

SEQ ID NO: 205201 - DNA, 25 bp, Probe Sequence
gccgagtgtgaccgtttgctaaata

SEQ ID NO: 205202 - DNA, 25 bp, Probe Sequence
gcctgggaactggtgtagctgcaag

SEQ ID NO: 205203 - DNA, 25 bp, Probe Sequence
gcctgctccaacggagttccagagt

SEQ ID NO: 205204 - DNA, 25 bp, Probe Sequence
gcctgtctcagattgggattaacat

SEQ ID NO: 205205 - DNA, 25 bp, Probe Sequence
gcctgttggatcaggttcccatttc

SEQ ID NO: 205206 - DNA, 25 bp, Probe Sequence
gcctgcaggtggaggggatccattt

SEQ ID NO: 205207 - DNA, 25 bp, Probe Sequence
gccgagcaggcgtgcggaactttta

SEQ ID NO: 205208 - DNA, 25 bp, Probe Sequence
gcctgatgggcctggtagttttcca

SEQ ID NO: 205209 - DNA, 25 bp, Probe Sequence
gcctgctgagctctggttaggttac

SEQ ID NO: 205210 - DNA, 25 bp, Probe Sequence
gcctgtagggctggactgaggttca

SEQ ID NO: 205211 - DNA, 25 bp, Probe Sequence
gcctctaggacggactgttgctatc

SEQ ID NO: 205212 - DNA, 25 bp, Probe Sequence
gcctcattctgagggagctttcact

SEQ ID NO: 205213 - DNA, 25 bp, Probe Sequence
gcctcgtctgagggctgtaagcctg

SEQ ID NO: 205214 - DNA, 25 bp, Probe Sequence
gcctggactgatggaggccaaggtc

SEQ ID NO: 205215 - DNA, 25 bp, Probe Sequence
gcctggatgtgatggcgtcacagaa

SEQ ID NO: 205216 - DNA, 25 bp, Probe Sequence
gcctgggtaaccatggtgagaccct

SEQ ID NO: 205217 - DNA, 25 bp, Probe Sequence
gcctgggaacattgttggaaaccct

SEQ ID NO: 205218 - DNA, 25 bp, Probe Sequence
gcctggccaacttgttgctgagcaa

SEQ ID NO: 205219 - DNA, 25 bp, Probe Sequence
gcctgaggccaggagtttgacacca

SEQ ID NO: 205220 - DNA, 25 bp, Probe Sequence
gcctgggctcaagaatctgaacctt

SEQ ID NO: 205221 - DNA, 25 bp, Probe Sequence
gcctcggtaacaggatgagaaccct

SEQ ID NO: 205222 - DNA, 25 bp, Probe Sequence
gcctgggtgacaagagcgaaactcc

SEQ ID NO: 205223 - DNA, 25 bp, Probe Sequence
gcctggacaacatagtaataccctc

SEQ ID NO: 205224 - DNA, 25 bp, Probe Sequence
gccggccaccaataatatgaatccc

SEQ ID NO: 205225 - DNA, 25 bp, Probe Sequence
gccggtaatcctcctaatgaaccca

SEQ ID NO: 205226 - DNA, 25 bp, Probe Sequence
gcctcttagagcctgtgcataaaac

SEQ ID NO: 205227 - DNA, 25 bp, Probe Sequence
gcctgctcatggaccggcttaaaca

SEQ ID NO: 205228 - DNA, 25 bp, Probe Sequence
gcctccaggtcccagtgaatgaaaa

SEQ ID NO: 205229 - DNA, 25 bp, Probe Sequence
gcctggaggtgcacttcgtggaaca

SEQ ID NO: 205230 - DNA, 25 bp, Probe Sequence
gcctgaagcgtgaacttcgtggtcg

SEQ ID NO: 205231 - DNA, 25 bp, Probe Sequence
gcctccgagtggactgggatgaccg

SEQ ID NO: 205232 - DNA, 25 bp, Probe Sequence
gcctccagatgtttctgctttggcc

SEQ ID NO: 205233 - DNA, 25 bp, Probe Sequence
gcctgcaatattttatgatttggca

SEQ ID NO: 205234 - DNA, 25 bp, Probe Sequence
gccgcattataaattcatgttgcta

SEQ ID NO: 205235 - DNA, 25 bp, Probe Sequence
gcctgcactttgatgtcatgtgttc

SEQ ID NO: 205236 - DNA, 25 bp, Probe Sequence
gcctgctcttataatgactggttct

SEQ ID NO: 205237 - DNA, 25 bp, Probe Sequence
gcctctgtttcatgatgcatgggtc

SEQ ID NO: 205238 - DNA, 25 bp, Probe Sequence
gcctgttctccatagagagttccta

SEQ ID NO: 205239 - DNA, 25 bp, Probe Sequence
gcctggactctagacagtttcttat

SEQ ID NO: 205240 - DNA, 25 bp, Probe Sequence
gcctgaaatttgaacagctttccaa

SEQ ID NO: 205241 - DNA, 25 bp, Probe Sequence
gcctgaaattgtgccgtgttgcctt

SEQ ID NO: 205242 - DNA, 25 bp, Probe Sequence
gcctggaatgccaccaggtatgccc

SEQ ID NO: 205243 - DNA, 25 bp, Probe Sequence
gcctggtggtatctgaggtgaccac

SEQ ID NO: 205244 - DNA, 25 bp, Probe Sequence
gcctgttgcaggttttggtacttta

SEQ ID NO: 205245 - DNA, 25 bp, Probe Sequence
gcctgtgtgcaggtctttggcatga

SEQ ID NO: 205246 - DNA, 25 bp, Probe Sequence
gcctctgtgagttcatctgatgatt

SEQ ID NO: 205247 - DNA, 25 bp, Probe Sequence
gcctgatgaggacgcttatgatatg

SEQ ID NO: 205248 - DNA, 25 bp, Probe Sequence
gcctgccagtgactcttagtgtctg

SEQ ID NO: 205249 - DNA, 25 bp, Probe Sequence
gcctcctggactactagtcctcagg

SEQ ID NO: 205250 - DNA, 25 bp, Probe Sequence
gcccattggcaatgaggctgcccag

SEQ ID NO: 205251 - DNA, 25 bp, Probe Sequence
gcctctgtgaggtggatgtcccagg

SEQ ID NO: 205252 - DNA, 25 bp, Probe Sequence
gcctggtgagggtgatgttcgggag

SEQ ID NO: 205253 - DNA, 25 bp, Probe Sequence
gcctgttgaggctggagttaggagg

SEQ ID NO: 205254 - DNA, 25 bp, Probe Sequence
gcctggtccatctggagttttgagg

SEQ ID NO: 205255 - DNA, 25 bp, Probe Sequence
gccggactattcagatattttctgg

SEQ ID NO: 205256 - DNA, 25 bp, Probe Sequence
gccggctttctgagtagagttagga

SEQ ID NO: 205257 - DNA, 25 bp, Probe Sequence
gccggattttaaatagcgtattgta

SEQ ID NO: 205258 - DNA, 25 bp, Probe Sequence
gcctgtgctttttgacttcagtttg

SEQ ID NO: 205259 - DNA, 25 bp, Probe Sequence
gcctccctttagaatgtcacatttt

SEQ ID NO: 205260 - DNA, 25 bp, Probe Sequence
gcctgcctcaatcagtattcatatt

SEQ ID NO: 205261 - DNA, 25 bp, Probe Sequence
gcctgcagtggaaagtgtatagtgt

SEQ ID NO: 205262 - DNA, 25 bp, Probe Sequence
gcctgttgctgaaagctttggtttt

SEQ ID NO: 205263 - DNA, 25 bp, Probe Sequence
gccgtctctgttcttatgtttataa

SEQ ID NO: 205264 - DNA, 25 bp, Probe Sequence
gccggtctgcttcttgtaaaaacct

SEQ ID NO: 205265 - DNA, 25 bp, Probe Sequence
gcctcgatctttttgattaagagca

SEQ ID NO: 205266 - DNA, 25 bp, Probe Sequence
gcctggttcagtatgtatagaagca

SEQ ID NO: 205267 - DNA, 25 bp, Probe Sequence
gcctgaattatgctcttatgtgaag

SEQ ID NO: 205268 - DNA, 25 bp, Probe Sequence
gcctgatactggcattttgtagatg

SEQ ID NO: 205269 - DNA, 25 bp, Probe Sequence
gcctggattgagcatgatgtttgga

SEQ ID NO: 205270 - DNA, 25 bp, Probe Sequence
gcctctgattcattaagtttgccac

SEQ ID NO: 205271 - DNA, 25 bp, Probe Sequence
gcctgttatattcagtgtgtgccac

SEQ ID NO: 205272 - DNA, 25 bp, Probe Sequence
gcctgcattctatttacagtgtacc

SEQ ID NO: 205273 - DNA, 25 bp, Probe Sequence
gcctgcttataaatcatgttgctac

SEQ ID NO: 205274 - DNA, 25 bp, Probe Sequence
gcctctgcaatccatatatatcctg

SEQ ID NO: 205275 - DNA, 25 bp, Probe Sequence
gcctccaaggcattcgatgcgtgtt

SEQ ID NO: 205276 - DNA, 25 bp, Probe Sequence
gcctccaaggactgtctggcaatga

SEQ ID NO: 205277 - DNA, 25 bp, Probe Sequence
gcctcgaagggattcctggagcagc

SEQ ID NO: 205278 - DNA, 25 bp, Probe Sequence
gcctctgaagaacacctgaagcagc

SEQ ID NO: 205279 - DNA, 25 bp, Probe Sequence
gcctccgagaagcatccaaaagcag

SEQ ID NO: 205280 - DNA, 25 bp, Probe Sequence
gcctcgctgggattgacacaaacac

SEQ ID NO: 205281 - DNA, 25 bp, Probe Sequence
gcctgcgcaaggtgacacacgagtc

SEQ ID NO: 205282 - DNA, 25 bp, Probe Sequence
gcctccaaagcaaacgacgttctgg

SEQ ID NO: 205283 - DNA, 25 bp, Probe Sequence
gcctccaaacatcacctaattaaga

SEQ ID NO: 205284 - DNA, 25 bp, Probe Sequence
gcctcccaaattctctagtttatag

SEQ ID NO: 205285 - DNA, 25 bp, Probe Sequence
gccctctgccagattttggtttaga

SEQ ID NO: 205286 - DNA, 25 bp, Probe Sequence
gcctgtctgacacgttttggtattt

SEQ ID NO: 205287 - DNA, 25 bp, Probe Sequence
gcctgtctgacacgttttggtattt

SEQ ID NO: 205288 - DNA, 25 bp, Probe Sequence
gcctcctgacttattcatagtattg

SEQ ID NO: 205289 - DNA, 25 bp, Probe Sequence
gccccaccttgcagtacattcaagt

SEQ ID NO: 205290 - DNA, 25 bp, Probe Sequence
gccccagaactatcttttcggttgt

SEQ ID NO: 205291 - DNA, 25 bp, Probe Sequence
gcccgaaacacatattatttgactc

SEQ ID NO: 205292 - DNA, 25 bp, Probe Sequence
gccccaaagcctgaaggcttcctcc

SEQ ID NO: 205293 - DNA, 25 bp, Probe Sequence
gccccaaagcctgaaggcttcctcc

SEQ ID NO: 205294 - DNA, 25 bp, Probe Sequence
gcctcctaccctggaaagattacca

SEQ ID NO: 205295 - DNA, 25 bp, Probe Sequence
gcctccaaccctagcaaaagtgcaa

SEQ ID NO: 205296 - DNA, 25 bp, Probe Sequence
gcctgcaaaaccatgagcctattaa

SEQ ID NO: 205297 - DNA, 25 bp, Probe Sequence
gcctgcaaacagactgggatctgtt

SEQ ID NO: 205298 - DNA, 25 bp, Probe Sequence
gcctcgatgacaatctgggagtgtg

SEQ ID NO: 205299 - DNA, 25 bp, Probe Sequence
gcctgagtgaccatagagagatgat

SEQ ID NO: 205300 - DNA, 25 bp, Probe Sequence
gcctcggcagccataggagcgaaca

SEQ ID NO: 205301 - DNA, 25 bp, Probe Sequence
gcctgcggcttaatttgactcaaca

SEQ ID NO: 205302 - DNA, 25 bp, Probe Sequence
gcctgcgttcttttttcataaaaat

SEQ ID NO: 205303 - DNA, 25 bp, Probe Sequence
gcctgtccgtctttgtcaataacat

SEQ ID NO: 205304 - DNA, 25 bp, Probe Sequence
gcctgtcacgtttgtctctaaaaaa

SEQ ID NO: 205305 - DNA, 25 bp, Probe Sequence
gcctgggtgacaagagcgaaactcc

SEQ ID NO: 205306 - DNA, 25 bp, Probe Sequence
gcctcgggagctcggagacatgaac

SEQ ID NO: 205307 - DNA, 25 bp, Probe Sequence
gcctgcaggcagctggggatcagga

SEQ ID NO: 205308 - DNA, 25 bp, Probe Sequence
gcctgcaggcatggtgtggtatagc

SEQ ID NO: 205309 - DNA, 25 bp, Probe Sequence
gcctggcgcatagtgtggacttcac

SEQ ID NO: 205310 - DNA, 25 bp, Probe Sequence
gcctgcgagaagctggaagccacca

SEQ ID NO: 205311 - DNA, 25 bp, Probe Sequence
gcctggacgacagagaagaacctgt

SEQ ID NO: 205312 - DNA, 25 bp, Probe Sequence
gcctgggcaacaaagtgggactctg

SEQ ID NO: 205313 - DNA, 25 bp, Probe Sequence
gccggagcaagccagactccagaat

SEQ ID NO: 205314 - DNA, 25 bp, Probe Sequence
gccgagtgacagagacgctcaggct

SEQ ID NO: 205315 - DNA, 25 bp, Probe Sequence
gcctggctagtgaaaggtcaactgt

SEQ ID NO: 205316 - DNA, 25 bp, Probe Sequence
gcctggcttcagccaacgttgactt

SEQ ID NO: 205317 - DNA, 25 bp, Probe Sequence
gcctggttatggaggggcagcttct

SEQ ID NO: 205318 - DNA, 25 bp, Probe Sequence
gcctgttaactttgtggaagcttct

SEQ ID NO: 205319 - DNA, 25 bp, Probe Sequence
gccgtgggtctaattgtggccttct

SEQ ID NO: 205320 - DNA, 25 bp, Probe Sequence
gcctgtgcaggtgattggggctctg

SEQ ID NO: 205321 - DNA, 25 bp, Probe Sequence
gcctgctgtggtgattttgaggatg

SEQ ID NO: 205322 - DNA, 25 bp, Probe Sequence
gccgtgttgtcacatttcggctgct

SEQ ID NO: 205323 - DNA, 25 bp, Probe Sequence
gcctgtgtatgaagaattgtcccct

SEQ ID NO: 205324 - DNA, 25 bp, Probe Sequence
gcctggggcatctatattaccggct

SEQ ID NO: 205325 - DNA, 25 bp, Probe Sequence
gcctggggtgggtatacctggggct

SEQ ID NO: 205326 - DNA, 25 bp, Probe Sequence
gcctgccctgtgtcgtaaaatgggg

SEQ ID NO: 205327 - DNA, 25 bp, Probe Sequence
gcctgccctgtgtcgtaaaatgggg

SEQ ID NO: 205328 - DNA, 25 bp, Probe Sequence
gcctgcctctggttctataaacaag

SEQ ID NO: 205329 - DNA, 25 bp, Probe Sequence
gcctgtcatcatggatcttataatc

SEQ ID NO: 205330 - DNA, 25 bp, Probe Sequence
gcgttctctgaacattaccgacaac

SEQ ID NO: 205331 - DNA, 25 bp, Probe Sequence
gcgttctctgaacattaccgacaac

SEQ ID NO: 205332 - DNA, 25 bp, Probe Sequence
gcgttctctgaacattaccgacaac

SEQ ID NO: 205333 - DNA, 25 bp, Probe Sequence
gcgcattcaaaacagtctcagtaac

SEQ ID NO: 205334 - DNA, 25 bp, Probe Sequence
gccggcaacttcaagttcggacagc

SEQ ID NO: 205335 - DNA, 25 bp, Probe Sequence
gccgaggagtacgagttcctgaccc

SEQ ID NO: 205336 - DNA, 25 bp, Probe Sequence
gcctgagggctgtcgagtgagctgc

SEQ ID NO: 205337 - DNA, 25 bp, Probe Sequence
gcctgaagagccagagctagctctg

SEQ ID NO: 205338 - DNA, 25 bp, Probe Sequence
gcctggcagatgcctggcatataca

SEQ ID NO: 205339 - DNA, 25 bp, Probe Sequence
gcctgaccatggagcataagcaaag

SEQ ID NO: 205340 - DNA, 25 bp, Probe Sequence
gcctgaggctgtaactgagagaaag

SEQ ID NO: 205341 - DNA, 25 bp, Probe Sequence
gcctgcagagctagagacaaaaaaa

SEQ ID NO: 205342 - DNA, 25 bp, Probe Sequence
gcctggcagctctgatcaggaaagt

SEQ ID NO: 205343 - DNA, 25 bp, Probe Sequence
gcctgatgaccctacaggtcgtgct

SEQ ID NO: 205344 - DNA, 25 bp, Probe Sequence
gcctgagaaggccatcgtgggtgct

SEQ ID NO: 205345 - DNA, 25 bp, Probe Sequence
gcctgagaagagcctggccaaggtg

SEQ ID NO: 205346 - DNA, 25 bp, Probe Sequence
gcctgacctgagactgtcgcagagg

SEQ ID NO: 205347 - DNA, 25 bp, Probe Sequence
gcctgttctggatttgctgcagagt

SEQ ID NO: 205348 - DNA, 25 bp, Probe Sequence
gccggtgatggtatgctgcagttca

SEQ ID NO: 205349 - DNA, 25 bp, Probe Sequence
gcctgaggtgtgcaggcgcgtgtgc

SEQ ID NO: 205350 - DNA, 25 bp, Probe Sequence
gcctgagtgctttgataccagccgc

SEQ ID NO: 205351 - DNA, 25 bp, Probe Sequence
gcctgactgcttccaagtcagctcc

SEQ ID NO: 205352 - DNA, 25 bp, Probe Sequence
gcctgagctttgaacagtcagtact

SEQ ID NO: 205353 - DNA, 25 bp, Probe Sequence
gcctggcctcagaatgcattcttac

SEQ ID NO: 205354 - DNA, 25 bp, Probe Sequence
gccgtgctctagacagctacttata

SEQ ID NO: 205355 - DNA, 25 bp, Probe Sequence
gcctgacacacggcattagctgtta

SEQ ID NO: 205356 - DNA, 25 bp, Probe Sequence
gccgcacacaggcctagaggtaacc

SEQ ID NO: 205357 - DNA, 25 bp, Probe Sequence
gccgaatcagctgtaaggaggaact

SEQ ID NO: 205358 - DNA, 25 bp, Probe Sequence
gcctgaatactcgtaacagatgaga

SEQ ID NO: 205359 - DNA, 25 bp, Probe Sequence
gcctgcagttcggtagaagagagat

SEQ ID NO: 205360 - DNA, 25 bp, Probe Sequence
gcctgcactttgctgtggcaggcag

SEQ ID NO: 205361 - DNA, 25 bp, Probe Sequence
gcctgcgtgttgagtgtgtgggcgg

SEQ ID NO: 205362 - DNA, 25 bp, Probe Sequence
gcctgcctaggctgcatgggggcag

SEQ ID NO: 205363 - DNA, 25 bp, Probe Sequence
gcctcctggtcatatgatgctgggg

SEQ ID NO: 205364 - DNA, 25 bp, Probe Sequence
gccccttgacgcaatggcgtaggcg

SEQ ID NO: 205365 - DNA, 25 bp, Probe Sequence
gcccgttccgcagggactagaggct

SEQ ID NO: 205366 - DNA, 25 bp, Probe Sequence
gccgtgtatccgtgtgaagcagaac

SEQ ID NO: 205367 - DNA, 25 bp, Probe Sequence
gccgagtaaggcgcgagcggaacaa

SEQ ID NO: 205368 - DNA, 25 bp, Probe Sequence
gcctggctaaggcacagagggtaag

SEQ ID NO: 205369 - DNA, 25 bp, Probe Sequence
gccgtagacaacacagggttagcag

SEQ ID NO: 205370 - DNA, 25 bp, Probe Sequence
gcctgctacaaaaacaaggtcgtcg

SEQ ID NO: 205371 - DNA, 25 bp, Probe Sequence
gcctgggcaagagaataagacttcg

SEQ ID NO: 205372 - DNA, 25 bp, Probe Sequence
gcctgggcaggggcttaaacagtgc

SEQ ID NO: 205373 - DNA, 25 bp, Probe Sequence
gcctggaggtgctttcccaacaggc

SEQ ID NO: 205374 - DNA, 25 bp, Probe Sequence
gccctggatgtttatcacccaagcc

SEQ ID NO: 205375 - DNA, 25 bp, Probe Sequence
gcccctttctaagacaaggctcagc

SEQ ID NO: 205376 - DNA, 25 bp, Probe Sequence
gcctccattgtggacagctacgaga

SEQ ID NO: 205377 - DNA, 25 bp, Probe Sequence
gcctccatcttggcaagatatgaaa

SEQ ID NO: 205378 - DNA, 25 bp, Probe Sequence
gcctccattaccagttgcaattgtg

SEQ ID NO: 205379 - DNA, 25 bp, Probe Sequence
gcctccttaccaaatatggatattc

SEQ ID NO: 205380 - DNA, 25 bp, Probe Sequence
gcctgcatctttgaaacggatattc

SEQ ID NO: 205381 - DNA, 25 bp, Probe Sequence
gcctgctttcgttaactgtgtatgt

SEQ ID NO: 205382 - DNA, 25 bp, Probe Sequence
gcctgctctaaattatccagtgtat

SEQ ID NO: 205383 - DNA, 25 bp, Probe Sequence
gcctggccaaacacttggtgcattt

SEQ ID NO: 205384 - DNA, 25 bp, Probe Sequence
gcctcctcaaatcacatttgtgcct

SEQ ID NO: 205385 - DNA, 25 bp, Probe Sequence
gcctgcgggcctaacatgttgtgcc

SEQ ID NO: 205386 - DNA, 25 bp, Probe Sequence
gcctgggcaacaaacgtagtgcaac

SEQ ID NO: 205387 - DNA, 25 bp, Probe Sequence
gccgaacaagcagacctttaaccct

SEQ ID NO: 205388 - DNA, 25 bp, Probe Sequence
gcctgaacagaatcatccttaaatg

SEQ ID NO: 205389 - DNA, 25 bp, Probe Sequence
gccgtattcatcgacacctaaaatc

SEQ ID NO: 205390 - DNA, 25 bp, Probe Sequence
gccgtattctcatgatcccagataa

SEQ ID NO: 205391 - DNA, 25 bp, Probe Sequence
gccgaatttgtcgtgcctacaatca

SEQ ID NO: 205392 - DNA, 25 bp, Probe Sequence
gccgaattcagtacgagcttcttga

SEQ ID NO: 205393 - DNA, 25 bp, Probe Sequence
gccgattcacaggaggacttcttcc

SEQ ID NO: 205394 - DNA, 25 bp, Probe Sequence
gcctgtcacggagggattgatcttc

SEQ ID NO: 205395 - DNA, 25 bp, Probe Sequence
gccgtcactggggtggcaatgtcct

SEQ ID NO: 205396 - DNA, 25 bp, Probe Sequence
gccgtcactggggtggcaatgtcct

SEQ ID NO: 205397 - DNA, 25 bp, Probe Sequence
gccgtagtatgatctgggattccat

SEQ ID NO: 205398 - DNA, 25 bp, Probe Sequence
gccggagttgcattctagtttctga

SEQ ID NO: 205399 - DNA, 25 bp, Probe Sequence
gccggaggcactgacagttgccagg

SEQ ID NO: 205400 - DNA, 25 bp, Probe Sequence
gcctgtgggacaagatagccgcgca

SEQ ID NO: 205401 - DNA, 25 bp, Probe Sequence
gcctgtgggacaagatagccgcgca

SEQ ID NO: 205402 - DNA, 25 bp, Probe Sequence
gcctgcagggagagaaactcgcaaa

SEQ ID NO: 205403 - DNA, 25 bp, Probe Sequence
gccgagagggactattacccaagag

SEQ ID NO: 205404 - DNA, 25 bp, Probe Sequence
gcctgaaggaactattgccctctgg

SEQ ID NO: 205405 - DNA, 25 bp, Probe Sequence
gcctgatagaagtgcattctcctcc

SEQ ID NO: 205406 - DNA, 25 bp, Probe Sequence
gcctgaagaacagtaactgccatca

SEQ ID NO: 205407 - DNA, 25 bp, Probe Sequence
gcctgtgacaacgtagagcgcgtgc

SEQ ID NO: 205408 - DNA, 25 bp, Probe Sequence
gcctgtgatggggtcaaggactgcc

SEQ ID NO: 205409 - DNA, 25 bp, Probe Sequence
gccggaagacgccagaggagctact

SEQ ID NO: 205410 - DNA, 25 bp, Probe Sequence
gcctggaagtgcctaaggacagagc

SEQ ID NO: 205411 - DNA, 25 bp, Probe Sequence
gcctgctcaaaattacaggcaggga

SEQ ID NO: 205412 - DNA, 25 bp, Probe Sequence
gcctccaaaatctgcatcagcggca

SEQ ID NO: 205413 - DNA, 25 bp, Probe Sequence
gcctgactaacttccatggcatgga

SEQ ID NO: 205414 - DNA, 25 bp, Probe Sequence
gcctgctctaactgaagtcagtcac

SEQ ID NO: 205415 - DNA, 25 bp, Probe Sequence
gcctggattcaaggaattagctcag

SEQ ID NO: 205416 - DNA, 25 bp, Probe Sequence
gcctgggtgcaaagaacggcttggc

SEQ ID NO: 205417 - DNA, 25 bp, Probe Sequence
gcccggccaaatcccgatttgacaa

SEQ ID NO: 205418 - DNA, 25 bp, Probe Sequence
gcctgcaagaaaagtgccgatttac

SEQ ID NO: 205419 - DNA, 25 bp, Probe Sequence
gcctgaagaaaattgcctcagcctc

SEQ ID NO: 205420 - DNA, 25 bp, Probe Sequence
gcctgaagtgatcacatcccagttc

SEQ ID NO: 205421 - DNA, 25 bp, Probe Sequence
gccgatcagtggaaatggccaatat

SEQ ID NO: 205422 - DNA, 25 bp, Probe Sequence
gccgaagcaggagatgctcctcagc

SEQ ID NO: 205423 - DNA, 25 bp, Probe Sequence
gcctgtaattgagcctctctgatga

SEQ ID NO: 205424 - DNA, 25 bp, Probe Sequence
gcctgaaagtggcccatcattcata

SEQ ID NO: 205425 - DNA, 25 bp, Probe Sequence
gcctgagaggctggagcccatggct

SEQ ID NO: 205426 - DNA, 25 bp, Probe Sequence
gcctgagagagcgatgtcctcgagg

SEQ ID NO: 205427 - DNA, 25 bp, Probe Sequence
gcctgctgaaggacttcctgaagaa

SEQ ID NO: 205428 - DNA, 25 bp, Probe Sequence
gcctgtgagggtcctgactggagca

SEQ ID NO: 205429 - DNA, 25 bp, Probe Sequence
gcctgtggtggtctgtgtaatgctt

SEQ ID NO: 205430 - DNA, 25 bp, Probe Sequence
gcctgtgggagtcctgtgaatctct

SEQ ID NO: 205431 - DNA, 25 bp, Probe Sequence
gccggagcagatcggctgagcagat

SEQ ID NO: 205432 - DNA, 25 bp, Probe Sequence
gccggatgcatatactgagcaactg

SEQ ID NO: 205433 - DNA, 25 bp, Probe Sequence
gcctgggcaacttagctgcaactgg

SEQ ID NO: 205434 - DNA, 25 bp, Probe Sequence
gcctgcatggcaccgtaagaagctg

SEQ ID NO: 205435 - DNA, 25 bp, Probe Sequence
gcctgccagcgtggacaagaaggtc

SEQ ID NO: 205436 - DNA, 25 bp, Probe Sequence
gcctgctctgccaagacaagaactt

SEQ ID NO: 205437 - DNA, 25 bp, Probe Sequence
gcctgcctggcatttcagagacagc

SEQ ID NO: 205438 - DNA, 25 bp, Probe Sequence
gcctgcccagactgatgagcacatc

SEQ ID NO: 205439 - DNA, 25 bp, Probe Sequence
gcctgcaatcaggtgaatatacagc

SEQ ID NO: 205440 - DNA, 25 bp, Probe Sequence
gcctgcaagtgcctgaaggacagct

SEQ ID NO: 205441 - DNA, 25 bp, Probe Sequence
gcctgagagctgcctggggaagaca

SEQ ID NO: 205442 - DNA, 25 bp, Probe Sequence
gcctgagagctgcctggggaagaca

SEQ ID NO: 205443 - DNA, 25 bp, Probe Sequence
gcctgaagctgccagctgtggtgac

SEQ ID NO: 205444 - DNA, 25 bp, Probe Sequence
gcctgaattcaggcttgtggagcca

SEQ ID NO: 205445 - DNA, 25 bp, Probe Sequence
gcctgcaaccaacttctgcaattca

SEQ ID NO: 205446 - DNA, 25 bp, Probe Sequence
gcctgcaccgaactcataggatgga

SEQ ID NO: 205447 - DNA, 25 bp, Probe Sequence
gcctgccggaagtcggtgatgattg

SEQ ID NO: 205448 - DNA, 25 bp, Probe Sequence
gccgtccgaaggcgagagcaggaat

SEQ ID NO: 205449 - DNA, 25 bp, Probe Sequence
gccgtcctgagggggaagtgagaag

SEQ ID NO: 205450 - DNA, 25 bp, Probe Sequence
gcctgctcacgaggtggctgaagta

SEQ ID NO: 205451 - DNA, 25 bp, Probe Sequence
gcctgctaccatgtgaggatgaaac

SEQ ID NO: 205452 - DNA, 25 bp, Probe Sequence
gccggacctttgagcatacaccgag

SEQ ID NO: 205453 - DNA, 25 bp, Probe Sequence
gccgaggcgtttgaatctagcctag

SEQ ID NO: 205454 - DNA, 25 bp, Probe Sequence
gccgcagggctattgcttatgccac

SEQ ID NO: 205455 - DNA, 25 bp, Probe Sequence
gcccaaggtattctctcctatggaa

SEQ ID NO: 205456 - DNA, 25 bp, Probe Sequence
gccccggctttgattcagtcggaat

SEQ ID NO: 205457 - DNA, 25 bp, Probe Sequence
gcccctggagttgttttcggcaggg

SEQ ID NO: 205458 - DNA, 25 bp, Probe Sequence
gcaccgataggttttttgctccggg

SEQ ID NO: 205459 - DNA, 25 bp, Probe Sequence
gccgccataggaattatttcgttgg

SEQ ID NO: 205460 - DNA, 25 bp, Probe Sequence
gccccgaaggcggtgtatggattgg

SEQ ID NO: 205461 - DNA, 25 bp, Probe Sequence
gccccggactcgcgaagaggagtgc

SEQ ID NO: 205462 - DNA, 25 bp, Probe Sequence
gccgccgtgttccacgagaaggact

SEQ ID NO: 205463 - DNA, 25 bp, Probe Sequence
gccgccgtgttccacgagaaggact

SEQ ID NO: 205464 - DNA, 25 bp, Probe Sequence
gcccaggtttctctggaaagctcca

SEQ ID NO: 205465 - DNA, 25 bp, Probe Sequence
gcccaggtagtccagctctgggacc

SEQ ID NO: 205466 - DNA, 25 bp, Probe Sequence
gccgatgtctgggaacttgggacgc

SEQ ID NO: 205467 - DNA, 25 bp, Probe Sequence
gcctgcaccgggagttgagggagca

SEQ ID NO: 205468 - DNA, 25 bp, Probe Sequence
gcctgacctcggtagtcatggggga

SEQ ID NO: 205469 - DNA, 25 bp, Probe Sequence
gcttaccccttagaccaagaatctt

SEQ ID NO: 205470 - DNA, 25 bp, Probe Sequence
tcctaacttttagatttaacattgt

SEQ ID NO: 205471 - DNA, 25 bp, Probe Sequence
tgccctacttttaactttgaacttg

SEQ ID NO: 205472 - DNA, 25 bp, Probe Sequence
gccctagtgggtatctcttagactt

SEQ ID NO: 205473 - DNA, 25 bp, Probe Sequence
gccctgaatggtgcactggtttaat

SEQ ID NO: 205474 - DNA, 25 bp, Probe Sequence
gccctggtgggaacgactttgagat

SEQ ID NO: 205475 - DNA, 25 bp, Probe Sequence
gccgtttcttaacatgttgagagat

SEQ ID NO: 205476 - DNA, 25 bp, Probe Sequence
gcctgtttctgtcatgtagtttcaa

SEQ ID NO: 205477 - DNA, 25 bp, Probe Sequence
gccggcttcgtgaaggagttctccc

SEQ ID NO: 205478 - DNA, 25 bp, Probe Sequence
gccgtgtttggtcgatagaatcccc

SEQ ID NO: 205479 - DNA, 25 bp, Probe Sequence
gcctggctaatgtggcataaaccct

SEQ ID NO: 205480 - DNA, 25 bp, Probe Sequence
gcctggcttacatggtgaaacccca

SEQ ID NO: 205481 - DNA, 25 bp, Probe Sequence
gcctggccaacatggtgaaaccccg

SEQ ID NO: 205482 - DNA, 25 bp, Probe Sequence
gcctggccaacatgacaaaaccatc

SEQ ID NO: 205483 - DNA, 25 bp, Probe Sequence
gcctggccaacatggcaaaacccca

SEQ ID NO: 205484 - DNA, 25 bp, Probe Sequence
gcctggccaacatggcaaaacccca

SEQ ID NO: 205485 - DNA, 25 bp, Probe Sequence
gcctggccaacatggcaaaacccta

SEQ ID NO: 205486 - DNA, 25 bp, Probe Sequence
gcctggccaacatggcaaaaccctg

SEQ ID NO: 205487 - DNA, 25 bp, Probe Sequence
gcctggccaacatggcgaattcccg

SEQ ID NO: 205488 - DNA, 25 bp, Probe Sequence
gcctggccaacatggcgaattcccg

SEQ ID NO: 205489 - DNA, 25 bp, Probe Sequence
gcctggccaacatgatgagacctcc

SEQ ID NO: 205490 - DNA, 25 bp, Probe Sequence
gcctgcaggcaagtcatgagagagt

SEQ ID NO: 205491 - DNA, 25 bp, Probe Sequence
gcctgagatgcacggaacagcagtc

SEQ ID NO: 205492 - DNA, 25 bp, Probe Sequence
gcctggtgacactaagagcatgctc

SEQ ID NO: 205493 - DNA, 25 bp, Probe Sequence
gcctgggatcaccagagctgtgatg

SEQ ID NO: 205494 - DNA, 25 bp, Probe Sequence
gcctgtgtgcaagcacagcgctggt

SEQ ID NO: 205495 - DNA, 25 bp, Probe Sequence
gcctgttggcaagagctggtattcc

SEQ ID NO: 205496 - DNA, 25 bp, Probe Sequence
gcctgttgaaggtacatcgtttgca

SEQ ID NO: 205497 - DNA, 25 bp, Probe Sequence
gcctgtaacaagccagattttttaa

SEQ ID NO: 205498 - DNA, 25 bp, Probe Sequence
gcctggaccagcccaatggttataa

SEQ ID NO: 205499 - DNA, 25 bp, Probe Sequence
gcactgtgaccgagaacttttaaga

SEQ ID NO: 205500 - DNA, 25 bp, Probe Sequence
gccgggacgaagcacttggtaacag

SEQ ID NO: 205501 - DNA, 25 bp, Probe Sequence
gccgttatcgaacgacatctgatgt

SEQ ID NO: 205502 - DNA, 25 bp, Probe Sequence
gccgatgaacgttgctgatcttatc

SEQ ID NO: 205503 - DNA, 25 bp, Probe Sequence
gccgtaacctaaattgtgatctggg

SEQ ID NO: 205504 - DNA, 25 bp, Probe Sequence
gccggaagcctattcgcaggatttc

SEQ ID NO: 205505 - DNA, 25 bp, Probe Sequence
gcccgatacgctgagtgtggtttgc

SEQ ID NO: 205506 - DNA, 25 bp, Probe Sequence
gccgacaccaccaagtgggagtggc

SEQ ID NO: 205507 - DNA, 25 bp, Probe Sequence
gccgagacaaccgacagggctgggc

SEQ ID NO: 205508 - DNA, 25 bp, Probe Sequence
gccgagacaaccgacagggctgggc

SEQ ID NO: 205509 - DNA, 25 bp, Probe Sequence
gccgagacaaccgacagggctgggc

SEQ ID NO: 205510 - DNA, 25 bp, Probe Sequence
gccgtgagacccgtagtgtcatggg

SEQ ID NO: 205511 - DNA, 25 bp, Probe Sequence
gccgtgagctgcaggtactgctagg

SEQ ID NO: 205512 - DNA, 25 bp, Probe Sequence
gccggacatcatgagtggctgtcgg

SEQ ID NO: 205513 - DNA, 25 bp, Probe Sequence
gccgggcatgatggtggtggcctgt

SEQ ID NO: 205514 - DNA, 25 bp, Probe Sequence
gcctgggcaatggctgcgtagccat

SEQ ID NO: 205515 - DNA, 25 bp, Probe Sequence
gcctgaccattggagagctacagca

SEQ ID NO: 205516 - DNA, 25 bp, Probe Sequence
gccgactatagctacgctagctcct

SEQ ID NO: 205517 - DNA, 25 bp, Probe Sequence
gcctggattgacaacatcctcccag

SEQ ID NO: 205518 - DNA, 25 bp, Probe Sequence
gcccgaatgagggagcctcccgaag

SEQ ID NO: 205519 - DNA, 25 bp, Probe Sequence
gccccaagggtagggctgccgatca

SEQ ID NO: 205520 - DNA, 25 bp, Probe Sequence
gccccaggctgaatacccagggaca

SEQ ID NO: 205521 - DNA, 25 bp, Probe Sequence
gcccccgtgttggaaagtggcccag

SEQ ID NO: 205522 - DNA, 25 bp, Probe Sequence
gccccctggtttgcaatggaacctt

SEQ ID NO: 205523 - DNA, 25 bp, Probe Sequence
gcccccgaattcacaaactaggtat

SEQ ID NO: 205524 - DNA, 25 bp, Probe Sequence
gcccccaactccaacaggattattt

SEQ ID NO: 205525 - DNA, 25 bp, Probe Sequence
gccccactttactaagtagtcatcc

SEQ ID NO: 205526 - DNA, 25 bp, Probe Sequence
gccccagttccacatttgattacac

SEQ ID NO: 205527 - DNA, 25 bp, Probe Sequence
gccccagtacttcatcttgaacttg

SEQ ID NO: 205528 - DNA, 25 bp, Probe Sequence
gcacctcagactctcaacttaactg

SEQ ID NO: 205529 - DNA, 25 bp, Probe Sequence
gctggccgactcttaaggaaaatag

SEQ ID NO: 205530 - DNA, 25 bp, Probe Sequence
gcccctggtcccaagggaacatcag

SEQ ID NO: 205531 - DNA, 25 bp, Probe Sequence
gcccctggtcccaagggaacatcag

SEQ ID NO: 205532 - DNA, 25 bp, Probe Sequence
gctaccggtctgtggggaaatcctc

SEQ ID NO: 205533 - DNA, 25 bp, Probe Sequence
gccctcaggttgtgaccgagattcc

SEQ ID NO: 205534 - DNA, 25 bp, Probe Sequence
gcccctggtagatgtccagaatgtc

SEQ ID NO: 205535 - DNA, 25 bp, Probe Sequence
gccgcctgaaagtgtcttgggctaa

SEQ ID NO: 205536 - DNA, 25 bp, Probe Sequence
tcccccaaactgattataggtaaca

SEQ ID NO: 205537 - DNA, 25 bp, Probe Sequence
gccccgaagactcctaataggtcaa

SEQ ID NO: 205538 - DNA, 25 bp, Probe Sequence
gccggccaagaccgtcaacatttag

SEQ ID NO: 205539 - DNA, 25 bp, Probe Sequence
gcctgggaagacaggccctcttcaa

SEQ ID NO: 205540 - DNA, 25 bp, Probe Sequence
gcctggagaattaaggaccctgatc

SEQ ID NO: 205541 - DNA, 25 bp, Probe Sequence
gcctggagaattcagtgcagccagg

SEQ ID NO: 205542 - DNA, 25 bp, Probe Sequence
gcctggaggagtggactagccggtc

SEQ ID NO: 205543 - DNA, 25 bp, Probe Sequence
gcctgtgagggtgagcccaatggct

SEQ ID NO: 205544 - DNA, 25 bp, Probe Sequence
gccgctgtgggtgacaacattggct

SEQ ID NO: 205545 - DNA, 25 bp, Probe Sequence
gcctggggatgggatcaccttccag

SEQ ID NO: 205546 - DNA, 25 bp, Probe Sequence
gcctggtggaatgatccacttctca

SEQ ID NO: 205547 - DNA, 25 bp, Probe Sequence
gccgcggaaatgctccgctagcaat

SEQ ID NO: 205548 - DNA, 25 bp, Probe Sequence
gcgcccgaatctggcttggcggaat

SEQ ID NO: 205549 - DNA, 25 bp, Probe Sequence
gccccaaagggctgactgagaactc

SEQ ID NO: 205550 - DNA, 25 bp, Probe Sequence
gccccccaaggacatctggaatgtc

SEQ ID NO: 205551 - DNA, 25 bp, Probe Sequence
gcccttgaaagtgcaatttggtacc

SEQ ID NO: 205552 - DNA, 25 bp, Probe Sequence
gccgcctgataactggcattttgta

SEQ ID NO: 205553 - DNA, 25 bp, Probe Sequence
gccgccgtgcagttggaattgatca

SEQ ID NO: 205554 - DNA, 25 bp, Probe Sequence
gccgctgctgagattgcagtattta

SEQ ID NO: 205555 - DNA, 25 bp, Probe Sequence
gccgctgctgagattgcagtattta

SEQ ID NO: 205556 - DNA, 25 bp, Probe Sequence
gcctgtgctgtgactcgagtcacac

SEQ ID NO: 205557 - DNA, 25 bp, Probe Sequence
gcctgtgctatgtgcagaaccactt

SEQ ID NO: 205558 - DNA, 25 bp, Probe Sequence
gcctgtgtggatatggcaccaattc

SEQ ID NO: 205559 - DNA, 25 bp, Probe Sequence
gccgtggattcaaggaccagatcta

SEQ ID NO: 205560 - DNA, 25 bp, Probe Sequence
gccgtggtgatcaccaccaggctgg

SEQ ID NO: 205561 - DNA, 25 bp, Probe Sequence
gccgtggtaccccagatagacatgg

SEQ ID NO: 205562 - DNA, 25 bp, Probe Sequence
gccggtgaaccctgataccaggagc

SEQ ID NO: 205563 - DNA, 25 bp, Probe Sequence
gccggtcaaaggaggcaccaagtgc

SEQ ID NO: 205564 - DNA, 25 bp, Probe Sequence
gccggcttcgaggagggcaagaagg

SEQ ID NO: 205565 - DNA, 25 bp, Probe Sequence
gccggcttcgaggagggcaagaagg

SEQ ID NO: 205566 - DNA, 25 bp, Probe Sequence
gccggcttctacaagtgcatggcaa

SEQ ID NO: 205567 - DNA, 25 bp, Probe Sequence
gcctggttgctattagttctctcac

SEQ ID NO: 205568 - DNA, 25 bp, Probe Sequence
gcctggcctgttaagtgttaactat

SEQ ID NO: 205569 - DNA, 25 bp, Probe Sequence
gcctggcaggtggtagatgttattt

SEQ ID NO: 205570 - DNA, 25 bp, Probe Sequence
gcctggcagtgggtagggtagaggg

SEQ ID NO: 205571 - DNA, 25 bp, Probe Sequence
gcctggatctgggacgtggttcggc

SEQ ID NO: 205572 - DNA, 25 bp, Probe Sequence
gcctggcactgggaggtgggggtga

SEQ ID NO: 205573 - DNA, 25 bp, Probe Sequence
gcctggcactgggaggtgggggtga

SEQ ID NO: 205574 - DNA, 25 bp, Probe Sequence
gcctgatgcaggcaaacggggctgg

SEQ ID NO: 205575 - DNA, 25 bp, Probe Sequence
gcctgatgcaggcaaatggggctgg

SEQ ID NO: 205576 - DNA, 25 bp, Probe Sequence
gccgtctggatgaccagagggctag

SEQ ID NO: 205577 - DNA, 25 bp, Probe Sequence
gcctgtgcttgaacctgaggcactg

SEQ ID NO: 205578 - DNA, 25 bp, Probe Sequence
gcctgtctgctatagctcagtgact

SEQ ID NO: 205579 - DNA, 25 bp, Probe Sequence
gcctgtcattatgcccagtacatga

SEQ ID NO: 205580 - DNA, 25 bp, Probe Sequence
gccggcattatgccccagaacagac

SEQ ID NO: 205581 - DNA, 25 bp, Probe Sequence
gccggattatgaaatgcacgacacc

SEQ ID NO: 205582 - DNA, 25 bp, Probe Sequence
gcggaaggatcataacggagcccgg

SEQ ID NO: 205583 - DNA, 25 bp, Probe Sequence
gccgaagagaagcaactgtgccccg

SEQ ID NO: 205584 - DNA, 25 bp, Probe Sequence
gcctgagcgagacggaacctggctc

SEQ ID NO: 205585 - DNA, 25 bp, Probe Sequence
gcctgagaaacggctaccacatcca

SEQ ID NO: 205586 - DNA, 25 bp, Probe Sequence
gccggaaagcgtgccaatcaacatg

SEQ ID NO: 205587 - DNA, 25 bp, Probe Sequence
gccggtgaacgtgcaaaacaggctc

SEQ ID NO: 205588 - DNA, 25 bp, Probe Sequence
gcctgtttaccaaaaacatcacctc

SEQ ID NO: 205589 - DNA, 25 bp, Probe Sequence
gcctgtttacgtccaaggatgcacg

SEQ ID NO: 205590 - DNA, 25 bp, Probe Sequence
gcctgtctgttggcctcaagtgatc

SEQ ID NO: 205591 - DNA, 25 bp, Probe Sequence
gcctgttggtggcatcaaggagaag

SEQ ID NO: 205592 - DNA, 25 bp, Probe Sequence
gcctgtctcacttttccaggagaca

SEQ ID NO: 205593 - DNA, 25 bp, Probe Sequence
gcctgattatctcttctactatata

SEQ ID NO: 205594 - DNA, 25 bp, Probe Sequence
gcctggctatgctgtttactaataa

SEQ ID NO: 205595 - DNA, 25 bp, Probe Sequence
gcccccattcgtataataattacat

SEQ ID NO: 205596 - DNA, 25 bp, Probe Sequence
tgcctcgagttagttttacaattaa

SEQ ID NO: 205597 - DNA, 25 bp, Probe Sequence
gcccagtgtccagttttacatatgc

SEQ ID NO: 205598 - DNA, 25 bp, Probe Sequence
gcccttcctactattaatttttgag

SEQ ID NO: 205599 - DNA, 25 bp, Probe Sequence
gcgacctttactttatacttttctg

SEQ ID NO: 205600 - DNA, 25 bp, Probe Sequence
gcgcagtttccctggaatctttttg

SEQ ID NO: 205601 - DNA, 25 bp, Probe Sequence
ggattttacccagaatacttgccgc

SEQ ID NO: 205602 - DNA, 25 bp, Probe Sequence
gaattttgacgtgaataagtatctc

SEQ ID NO: 205603 - DNA, 25 bp, Probe Sequence
gaattttatggtgcattacgtgggc

SEQ ID NO: 205604 - DNA, 25 bp, Probe Sequence
gcgatttacaaatcctaagatggag

SEQ ID NO: 205605 - DNA, 25 bp, Probe Sequence
gcacttttacaagccgcaaaggcag

SEQ ID NO: 205606 - DNA, 25 bp, Probe Sequence
gcctgtattcactatcttcgagaga

SEQ ID NO: 205607 - DNA, 25 bp, Probe Sequence
gccgtaccactggcatcgtgatgga

SEQ ID NO: 205608 - DNA, 25 bp, Probe Sequence
gcctgtcagcctgggcaatggctgc

SEQ ID NO: 205609 - DNA, 25 bp, Probe Sequence
gcctgtcactgatcagcagatactg

SEQ ID NO: 205610 - DNA, 25 bp, Probe Sequence
gcctgtgacgatccaagacacttgg

SEQ ID NO: 205611 - DNA, 25 bp, Probe Sequence
gcctgtggctgaccaatacgattgc

SEQ ID NO: 205612 - DNA, 25 bp, Probe Sequence
gcctgtggctgaccaatacgattgc

SEQ ID NO: 205613 - DNA, 25 bp, Probe Sequence
gcctgtggctgaccaagaccaatgc

SEQ ID NO: 205614 - DNA, 25 bp, Probe Sequence
gcctgttctgaggcaataacaagtt

SEQ ID NO: 205615 - DNA, 25 bp, Probe Sequence
gcctgtgacgagtcctgcaagacgt

SEQ ID NO: 205616 - DNA, 25 bp, Probe Sequence
gcctgataaattcctcatagcaagt

SEQ ID NO: 205617 - DNA, 25 bp, Probe Sequence
gcctgttgaatgtccatgctacaag

SEQ ID NO: 205618 - DNA, 25 bp, Probe Sequence
gcctggtgaggaaatgcttcagatg

SEQ ID NO: 205619 - DNA, 25 bp, Probe Sequence
gcctgttagtgattgtttcacatgt

SEQ ID NO: 205620 - DNA, 25 bp, Probe Sequence
gcctgtgtgggcattttccagatga

SEQ ID NO: 205621 - DNA, 25 bp, Probe Sequence
gccggggagattttatccatgtcat

SEQ ID NO: 205622 - DNA, 25 bp, Probe Sequence
gccgcctggaatgtcttcacggcag

SEQ ID NO: 205623 - DNA, 25 bp, Probe Sequence
gccgtgggcaaaccctgaagacacc

SEQ ID NO: 205624 - DNA, 25 bp, Probe Sequence
gccgccggaaagcgtgccaatcaac

SEQ ID NO: 205625 - DNA, 25 bp, Probe Sequence
gccgcaccgtaggtgtgtccaagaa

SEQ ID NO: 205626 - DNA, 25 bp, Probe Sequence
gccgcaccttgtcatgtaccatcaa

SEQ ID NO: 205627 - DNA, 25 bp, Probe Sequence
gccgcaccttgtcatgtaccatcaa

SEQ ID NO: 205628 - DNA, 25 bp, Probe Sequence
tcctgccctttctgtacctgggcag

SEQ ID NO: 205629 - DNA, 25 bp, Probe Sequence
gccgcccatttaagtacagtggatg

SEQ ID NO: 205630 - DNA, 25 bp, Probe Sequence
gctcccaattatgttaatctgcagt

SEQ ID NO: 205631 - DNA, 25 bp, Probe Sequence
gccctatttatgtttctactcgggg

SEQ ID NO: 205632 - DNA, 25 bp, Probe Sequence
gccgcttctttgggaatacctgggc

SEQ ID NO: 205633 - DNA, 25 bp, Probe Sequence
gcacctattttggaaaactgggatt

SEQ ID NO: 205634 - DNA, 25 bp, Probe Sequence
gcccacgttctcaaaaactcaggat

SEQ ID NO: 205635 - DNA, 25 bp, Probe Sequence
gcccgtgtacatgaccaagccggat

SEQ ID NO: 205636 - DNA, 25 bp, Probe Sequence
gcccgggccatcgccattgctgcgg

SEQ ID NO: 205637 - DNA, 25 bp, Probe Sequence
gccggtgggaggtgcatggcatcgg

SEQ ID NO: 205638 - DNA, 25 bp, Probe Sequence
gcctggtctggacacagtgcccgtg

SEQ ID NO: 205639 - DNA, 25 bp, Probe Sequence
gccggatgctggagaagggcgtcat

SEQ ID NO: 205640 - DNA, 25 bp, Probe Sequence
gccggtgcgctgctgaaaacgattc

SEQ ID NO: 205641 - DNA, 25 bp, Probe Sequence
gccggtgcattcctgaaatagatga

SEQ ID NO: 205642 - DNA, 25 bp, Probe Sequence
gcctgggcctgtgggacaagatagc

SEQ ID NO: 205643 - DNA, 25 bp, Probe Sequence
gcctgggcctgtgggacaagatagc

SEQ ID NO: 205644 - DNA, 25 bp, Probe Sequence
gcctgggcgctgatgaaggagatcg

SEQ ID NO: 205645 - DNA, 25 bp, Probe Sequence
gcgctggctcagtcaataaaggatc

SEQ ID NO: 205646 - DNA, 25 bp, Probe Sequence
gcctggccagacaagacgactgtca

SEQ ID NO: 205647 - DNA, 25 bp, Probe Sequence
gcctggacgacaagacgaacatcaa

SEQ ID NO: 205648 - DNA, 25 bp, Probe Sequence
gcctggagcggctaaggggacagaa

SEQ ID NO: 205649 - DNA, 25 bp, Probe Sequence
gcctggagcctgtagggctggactg

SEQ ID NO: 205650 - DNA, 25 bp, Probe Sequence
gcctgggccaagtggcaggttgggg

SEQ ID NO: 205651 - DNA, 25 bp, Probe Sequence
gccgacccaaaccagggtgtgggca

SEQ ID NO: 205652 - DNA, 25 bp, Probe Sequence
gccggtcctgaataagggaggtggt

SEQ ID NO: 205653 - DNA, 25 bp, Probe Sequence
gcctgtgtcccattaacacagtgag

SEQ ID NO: 205654 - DNA, 25 bp, Probe Sequence
gccgtggccagctacaacatgggca

SEQ ID NO: 205655 - DNA, 25 bp, Probe Sequence
gccgtgtgcagcctatcaagctggc

SEQ ID NO: 205656 - DNA, 25 bp, Probe Sequence
gccgagtatgccttcaagctggcgc

SEQ ID NO: 205657 - DNA, 25 bp, Probe Sequence
gccgagactgtctgaagctgggccc

SEQ ID NO: 205658 - DNA, 25 bp, Probe Sequence
gcctggcttgtgtgagcgtgtggac

SEQ ID NO: 205659 - DNA, 25 bp, Probe Sequence
gcctggctgttgaaggccgtgggcc

SEQ ID NO: 205660 - DNA, 25 bp, Probe Sequence
gccgtgtcattcaagagccaggtgg

SEQ ID NO: 205661 - DNA, 25 bp, Probe Sequence
gcctgtgaattgagtgctctgatgt

SEQ ID NO: 205662 - DNA, 25 bp, Probe Sequence
gccgatgactccatggctactgata

SEQ ID NO: 205663 - DNA, 25 bp, Probe Sequence
gcctgtgactctgtgatgtatcatg

SEQ ID NO: 205664 - DNA, 25 bp, Probe Sequence
gccgaactgctcctcatgggcagtt

SEQ ID NO: 205665 - DNA, 25 bp, Probe Sequence
gccgaactgctcctcatgggcagtt

SEQ ID NO: 205666 - DNA, 25 bp, Probe Sequence
gcctggagtgtacaccgagttgtcc

SEQ ID NO: 205667 - DNA, 25 bp, Probe Sequence
gcctggagtctacacacaagtgact

SEQ ID NO: 205668 - DNA, 25 bp, Probe Sequence
gccgaagtcttcagcaagaggattc

SEQ ID NO: 205669 - DNA, 25 bp, Probe Sequence
gcctggacctggagaagggacctac

SEQ ID NO: 205670 - DNA, 25 bp, Probe Sequence
gcctggacctggggctagaggaggg

SEQ ID NO: 205671 - DNA, 25 bp, Probe Sequence
gcctggacctggggctagaggaggg

SEQ ID NO: 205672 - DNA, 25 bp, Probe Sequence
gcctggaggtggggttgggattggg

SEQ ID NO: 205673 - DNA, 25 bp, Probe Sequence
gccggggtcagaggattgccgaagg

SEQ ID NO: 205674 - DNA, 25 bp, Probe Sequence
gcccgggatgggagaccagagcggc

SEQ ID NO: 205675 - DNA, 25 bp, Probe Sequence
gccccggatggacacaccagaagac

SEQ ID NO: 205676 - DNA, 25 bp, Probe Sequence
gcccccaagagggcagctccagaag

SEQ ID NO: 205677 - DNA, 25 bp, Probe Sequence
gccccctatgtagcagatgccaact

SEQ ID NO: 205678 - DNA, 25 bp, Probe Sequence
gccccatgccattagttgtcaaaat

SEQ ID NO: 205679 - DNA, 25 bp, Probe Sequence
gccccacctgtaggggatgaaggga

SEQ ID NO: 205680 - DNA, 25 bp, Probe Sequence
gccctgcccattttgaaggaacaaa

SEQ ID NO: 205681 - DNA, 25 bp, Probe Sequence
gccctcccacttctgaagttcaaat

SEQ ID NO: 205682 - DNA, 25 bp, Probe Sequence
gccctaccacggggaaagcatcagc

SEQ ID NO: 205683 - DNA, 25 bp, Probe Sequence
gccgctcctatctagaggcaacact

SEQ ID NO: 205684 - DNA, 25 bp, Probe Sequence
gccgctcagctttgatggaacaacg

SEQ ID NO: 205685 - DNA, 25 bp, Probe Sequence
gcctggcccataatgtgaacataag

SEQ ID NO: 205686 - DNA, 25 bp, Probe Sequence
gcctggctctcatcatatgcaatac

SEQ ID NO: 205687 - DNA, 25 bp, Probe Sequence
gccggctgtcattcatgtgattgat

SEQ ID NO: 205688 - DNA, 25 bp, Probe Sequence
gccgagatgccattctcttagtgat

SEQ ID NO: 205689 - DNA, 25 bp, Probe Sequence
gccgagtgcttatttctacagatgt

SEQ ID NO: 205690 - DNA, 25 bp, Probe Sequence
gccgagtgcctatcagagaaggaga

SEQ ID NO: 205691 - DNA, 25 bp, Probe Sequence
gccgagtggctcagtgacacggaga

SEQ ID NO: 205692 - DNA, 25 bp, Probe Sequence
gccgggcagctaaggcagccggagc

SEQ ID NO: 205693 - DNA, 25 bp, Probe Sequence
gccggcagccatatggacgggacgc

SEQ ID NO: 205694 - DNA, 25 bp, Probe Sequence
gccgggaatctagacttggatctgc

SEQ ID NO: 205695 - DNA, 25 bp, Probe Sequence
gccggtgatactggtagttggtgtg

SEQ ID NO: 205696 - DNA, 25 bp, Probe Sequence
gccggaatatcggggtcaagggatt

SEQ ID NO: 205697 - DNA, 25 bp, Probe Sequence
gaagctgaaacgtgggtaaggattt

SEQ ID NO: 205698 - DNA, 25 bp, Probe Sequence
gccggaaacgcaagggtacagaagt

SEQ ID NO: 205699 - DNA, 25 bp, Probe Sequence
gccggataagccaggagtgtatact

SEQ ID NO: 205700 - DNA, 25 bp, Probe Sequence
gccgtgtgaaccatgtgactttgtc

SEQ ID NO: 205701 - DNA, 25 bp, Probe Sequence
gccgtttcagtcttcaatctgtttt

SEQ ID NO: 205702 - DNA, 25 bp, Probe Sequence
gccgatacttgttattgtctgcttt

SEQ ID NO: 205703 - DNA, 25 bp, Probe Sequence
gccgtagctttcgttggagtctata

SEQ ID NO: 205704 - DNA, 25 bp, Probe Sequence
gccccagcacacacttgggattatg

SEQ ID NO: 205705 - DNA, 25 bp, Probe Sequence
gccccagcacacacttgggattatg

SEQ ID NO: 205706 - DNA, 25 bp, Probe Sequence
gccccaacactggctttgagattta

SEQ ID NO: 205707 - DNA, 25 bp, Probe Sequence
gccccaacactggctttgagattta

SEQ ID NO: 205708 - DNA, 25 bp, Probe Sequence
gccccaatgcttctatatgctaagt

SEQ ID NO: 205709 - DNA, 25 bp, Probe Sequence
gccccagatgcagtccatgactaaa

SEQ ID NO: 205710 - DNA, 25 bp, Probe Sequence
gccgctgcagaaatccagaagcatc

SEQ ID NO: 205711 - DNA, 25 bp, Probe Sequence
gcctggcatagagtaggtactccat

SEQ ID NO: 205712 - DNA, 25 bp, Probe Sequence
gcctggcaagagaacgagactccat

SEQ ID NO: 205713 - DNA, 25 bp, Probe Sequence
gcctggcgacagagcaagactctgt

SEQ ID NO: 205714 - DNA, 25 bp, Probe Sequence
gcctggcgacggaggaatgctgtct

SEQ ID NO: 205715 - DNA, 25 bp, Probe Sequence
gccgaggagcgagacgaagctgtgg

SEQ ID NO: 205716 - DNA, 25 bp, Probe Sequence
gccggctggcagaggcgaactgtag

SEQ ID NO: 205717 - DNA, 25 bp, Probe Sequence
gccggcatgggttggcagggtgggc

SEQ ID NO: 205718 - DNA, 25 bp, Probe Sequence
gccccatcggtgtgtaaggtggcct

SEQ ID NO: 205719 - DNA, 25 bp, Probe Sequence
gccccttggtcttggaggggaccat

SEQ ID NO: 205720 - DNA, 25 bp, Probe Sequence
gcccgtaggttaagaggtcagcatt

SEQ ID NO: 205721 - DNA, 25 bp, Probe Sequence
gcccttagatgtccggggctgcacg

SEQ ID NO: 205722 - DNA, 25 bp, Probe Sequence
gcccttagatgtccggggctgcacg

SEQ ID NO: 205723 - DNA, 25 bp, Probe Sequence
gccgtacgtgtgtctggagtgcggg

SEQ ID NO: 205724 - DNA, 25 bp, Probe Sequence
gccgagacctgaactttgagcgtgg

SEQ ID NO: 205725 - DNA, 25 bp, Probe Sequence
gccgaccactgactttgtgacttag

SEQ ID NO: 205726 - DNA, 25 bp, Probe Sequence
gccgactatcggtctcttgagatct

SEQ ID NO: 205727 - DNA, 25 bp, Probe Sequence
gccgatttgcagctgtcatggagtc

SEQ ID NO: 205728 - DNA, 25 bp, Probe Sequence
gccgagctcgagcagctcaagggcc

SEQ ID NO: 205729 - DNA, 25 bp, Probe Sequence
gccctccagacataaggaggccaga

SEQ ID NO: 205730 - DNA, 25 bp, Probe Sequence
gcccctgactgatggcaggaatcca

SEQ ID NO: 205731 - DNA, 25 bp, Probe Sequence
gcccccctgagatctgaggatagca

SEQ ID NO: 205732 - DNA, 25 bp, Probe Sequence
gcccctacggctttaggcatggagc

SEQ ID NO: 205733 - DNA, 25 bp, Probe Sequence
gcccgttcggtctgaggaaggccgg

SEQ ID NO: 205734 - DNA, 25 bp, Probe Sequence
gccctttcctgtaaaccacaggact

SEQ ID NO: 205735 - DNA, 25 bp, Probe Sequence
gccctttgacctggcaagcaccagg

SEQ ID NO: 205736 - DNA, 25 bp, Probe Sequence
gccccctacccaatggcaatatgaa

SEQ ID NO: 205737 - DNA, 25 bp, Probe Sequence
gccgtcctataataggctttagagc

SEQ ID NO: 205738 - DNA, 25 bp, Probe Sequence
gccctgccctaaagggctcttgagc

SEQ ID NO: 205739 - DNA, 25 bp, Probe Sequence
gccggccctgaaggtttctatgaag

SEQ ID NO: 205740 - DNA, 25 bp, Probe Sequence
gcctggctcacgaggttggctggaa

SEQ ID NO: 205741 - DNA, 25 bp, Probe Sequence
gcctggtcaccagggctgcttttaa

SEQ ID NO: 205742 - DNA, 25 bp, Probe Sequence
gcctggccagaagacatgattttaa

SEQ ID NO: 205743 - DNA, 25 bp, Probe Sequence
gcctgggcggcagagcaaaactgaa

SEQ ID NO: 205744 - DNA, 25 bp, Probe Sequence
gcctgggcaacacagcaagatcctg

SEQ ID NO: 205745 - DNA, 25 bp, Probe Sequence
gcctgggtgacagagcaagattcca

SEQ ID NO: 205746 - DNA, 25 bp, Probe Sequence
gcctgggtgacagatcgaggtcctg

SEQ ID NO: 205747 - DNA, 25 bp, Probe Sequence
gcctgggtgacaaagtgagactccg

SEQ ID NO: 205748 - DNA, 25 bp, Probe Sequence
gcctgggctacagagtgagactgca

SEQ ID NO: 205749 - DNA, 25 bp, Probe Sequence
gcctgggcgacagagtgagaatctg

SEQ ID NO: 205750 - DNA, 25 bp, Probe Sequence
gcctgggagacagagcgagactctg

SEQ ID NO: 205751 - DNA, 25 bp, Probe Sequence
gcctggggcacccagcggaatgtgc

SEQ ID NO: 205752 - DNA, 25 bp, Probe Sequence
gcctggtccatcccatggaagtggc

SEQ ID NO: 205753 - DNA, 25 bp, Probe Sequence
gccgggccggacagagcagatgccc

SEQ ID NO: 205754 - DNA, 25 bp, Probe Sequence
gccggcttcgcgggcgacgatgccc

SEQ ID NO: 205755 - DNA, 25 bp, Probe Sequence
gccgttggctgagggtgggagccac

SEQ ID NO: 205756 - DNA, 25 bp, Probe Sequence
gccccttgctgagggtagcaggacc

SEQ ID NO: 205757 - DNA, 25 bp, Probe Sequence
gcccctcagctgctttaagtgactc

SEQ ID NO: 205758 - DNA, 25 bp, Probe Sequence
gcccctcagcagagtggtgcagttt

SEQ ID NO: 205759 - DNA, 25 bp, Probe Sequence
gccgcttagcgttgtttgatttttg

SEQ ID NO: 205760 - DNA, 25 bp, Probe Sequence
gccgctacatctgttacttttgttg

SEQ ID NO: 205761 - DNA, 25 bp, Probe Sequence
gccctttctggttactgtggcttta

SEQ ID NO: 205762 - DNA, 25 bp, Probe Sequence
gcccccgggatgaactagtgtttgt

SEQ ID NO: 205763 - DNA, 25 bp, Probe Sequence
gcccccggaggctcatgggaattgt

SEQ ID NO: 205764 - DNA, 25 bp, Probe Sequence
gcccaccccaagcttgggaagcgtg

SEQ ID NO: 205765 - DNA, 25 bp, Probe Sequence
gcccccgccagtcttagactggctg

SEQ ID NO: 205766 - DNA, 25 bp, Probe Sequence
gccccacttcgtcaatagacacttt

SEQ ID NO: 205767 - DNA, 25 bp, Probe Sequence
gccccatcttggcttgaagaacagt

SEQ ID NO: 205768 - DNA, 25 bp, Probe Sequence
gccggactctggacaatgacatcct

SEQ ID NO: 205769 - DNA, 25 bp, Probe Sequence
gccggactctggacaatgacatcct

SEQ ID NO: 205770 - DNA, 25 bp, Probe Sequence
gccggccagggaatgagcacacctg

SEQ ID NO: 205771 - DNA, 25 bp, Probe Sequence
gccggtggtggactatgaacactgc

SEQ ID NO: 205772 - DNA, 25 bp, Probe Sequence
gcctggttgtggtttgtgacttgtg

SEQ ID NO: 205773 - DNA, 25 bp, Probe Sequence
gcctggttttctaatgctgtcatct

SEQ ID NO: 205774 - DNA, 25 bp, Probe Sequence
gcctggactatcatatatctgtgca

SEQ ID NO: 205775 - DNA, 25 bp, Probe Sequence
gccgagaaatctagcaccttgcatg

SEQ ID NO: 205776 - DNA, 25 bp, Probe Sequence
gccgagaaatctagcaccttgcatg

SEQ ID NO: 205777 - DNA, 25 bp, Probe Sequence
gccgagcttgtgattctgagcttgc

SEQ ID NO: 205778 - DNA, 25 bp, Probe Sequence
gccggcttgtgtttgtacattgcac

SEQ ID NO: 205779 - DNA, 25 bp, Probe Sequence
gccgagcttggtttcaacatctaat

SEQ ID NO: 205780 - DNA, 25 bp, Probe Sequence
gccgggtttttggaatctacatgtc

SEQ ID NO: 205781 - DNA, 25 bp, Probe Sequence
gccccgtttcttacaataaatgttg

SEQ ID NO: 205782 - DNA, 25 bp, Probe Sequence
gccgtttttattacacttagtgtat

SEQ ID NO: 205783 - DNA, 25 bp, Probe Sequence
gcccttggttaaattaggcagttct

SEQ ID NO: 205784 - DNA, 25 bp, Probe Sequence
gcccttggtcaatattctgggaagc

SEQ ID NO: 205785 - DNA, 25 bp, Probe Sequence
gccgtggggccaagatttctgaaac

SEQ ID NO: 205786 - DNA, 25 bp, Probe Sequence
gccgtggggccaagatttctgaaac

SEQ ID NO: 205787 - DNA, 25 bp, Probe Sequence
gccgctgggaggagttttatcaggg

SEQ ID NO: 205788 - DNA, 25 bp, Probe Sequence
gccgatgtgcctcagggtttacagg

SEQ ID NO: 205789 - DNA, 25 bp, Probe Sequence
gccgttctctcgtgggagacgcagg

SEQ ID NO: 205790 - DNA, 25 bp, Probe Sequence
gccggtcgtgagtgacgatgacagt

SEQ ID NO: 205791 - DNA, 25 bp, Probe Sequence
gcctggtgcgtacattctgtagagt

SEQ ID NO: 205792 - DNA, 25 bp, Probe Sequence
gccggtgagtagcactctctgagag

SEQ ID NO: 205793 - DNA, 25 bp, Probe Sequence
gcccggtttgtgatcctgagagtct

SEQ ID NO: 205794 - DNA, 25 bp, Probe Sequence
gcccgttttggtactaaggtgctca

SEQ ID NO: 205795 - DNA, 25 bp, Probe Sequence
gccccttttgaggctctcaagttct

SEQ ID NO: 205796 - DNA, 25 bp, Probe Sequence
gcccattgctttaggcctggagact

SEQ ID NO: 205797 - DNA, 25 bp, Probe Sequence
gccctccttctgggcactaagaagg

SEQ ID NO: 205798 - DNA, 25 bp, Probe Sequence
gccgttgctactgtcatctgcaaag

SEQ ID NO: 205799 - DNA, 25 bp, Probe Sequence
gccgtcaccgatgtcatcatcaaga

SEQ ID NO: 205800 - DNA, 25 bp, Probe Sequence
gccggcagtctgggtactcagagat

SEQ ID NO: 205801 - DNA, 25 bp, Probe Sequence
gccggctcctgcaaatgcaaagagt

SEQ ID NO: 205802 - DNA, 25 bp, Probe Sequence
gccgagccagccaaaatagaagctt

SEQ ID NO: 205803 - DNA, 25 bp, Probe Sequence
gccggcggctcatgaagaggctctg

SEQ ID NO: 205804 - DNA, 25 bp, Probe Sequence
gctctggggcttcagaaggcttgaa

SEQ ID NO: 205805 - DNA, 25 bp, Probe Sequence
gctcggggcattgattccagttacc

SEQ ID NO: 205806 - DNA, 25 bp, Probe Sequence
gccgtggggtgacttcctggtcacc

SEQ ID NO: 205807 - DNA, 25 bp, Probe Sequence
gccgagagggtgacctctctgggca

SEQ ID NO: 205808 - DNA, 25 bp, Probe Sequence
gccgaggcgggcggatcatgaggtc

SEQ ID NO: 205809 - DNA, 25 bp, Probe Sequence
gccgaggtgggaggatcattggatc

SEQ ID NO: 205810 - DNA, 25 bp, Probe Sequence
gccgaggtgggcgggtcagttgagg

SEQ ID NO: 205811 - DNA, 25 bp, Probe Sequence
gccggggttggggcacaattgtgga

SEQ ID NO: 205812 - DNA, 25 bp, Probe Sequence
gccgcgggacggatacaattttcac

SEQ ID NO: 205813 - DNA, 25 bp, Probe Sequence
gccgcgggaccggataacaatttca

SEQ ID NO: 205814 - DNA, 25 bp, Probe Sequence
gcccgggacggataacaatttcaca

SEQ ID NO: 205815 - DNA, 25 bp, Probe Sequence
gccgcgggacggataacaatttcac

SEQ ID NO: 205816 - DNA, 25 bp, Probe Sequence
gccgcgggacggataacaatttcac

SEQ ID NO: 205817 - DNA, 25 bp, Probe Sequence
gccgcgggacggataacaatttcac

SEQ ID NO: 205818 - DNA, 25 bp, Probe Sequence
gccgcgggacggataacaatttcac

SEQ ID NO: 205819 - DNA, 25 bp, Probe Sequence
gccgcgggacggataacaatttcac

SEQ ID NO: 205820 - DNA, 25 bp, Probe Sequence
gccgcgggacggataacaatttcac

SEQ ID NO: 205821 - DNA, 25 bp, Probe Sequence
gccgcgggacggataacaatttcac

SEQ ID NO: 205822 - DNA, 25 bp, Probe Sequence
gccgcgggacggataacaatttcac

SEQ ID NO: 205823 - DNA, 25 bp, Probe Sequence
gccgcgggacggataacaatttcac

SEQ ID NO: 205824 - DNA, 25 bp, Probe Sequence
gccgcgggacggataacaatttcac

SEQ ID NO: 205825 - DNA, 25 bp, Probe Sequence
gccgcgggacggataacaatttcac

SEQ ID NO: 205826 - DNA, 25 bp, Probe Sequence
gccgcgggacggataacaatttcac

SEQ ID NO: 205827 - DNA, 25 bp, Probe Sequence
gccgcgggacggataacaatttcac

SEQ ID NO: 205828 - DNA, 25 bp, Probe Sequence
gccgcgggacggataacaatttcac

SEQ ID NO: 205829 - DNA, 25 bp, Probe Sequence
gccgcgggacggataacaatttcac

SEQ ID NO: 205830 - DNA, 25 bp, Probe Sequence
gccgcgggacggataacaatttcac

SEQ ID NO: 205831 - DNA, 25 bp, Probe Sequence
gccgcgggacggataacaatttcac

SEQ ID NO: 205832 - DNA, 25 bp, Probe Sequence
gccgcgggacggataacaatttcac

SEQ ID NO: 205833 - DNA, 25 bp, Probe Sequence
gccgcgggacggataacaatttcac

SEQ ID NO: 205834 - DNA, 25 bp, Probe Sequence
gccgcgggacggataacaatttcac

SEQ ID NO: 205835 - DNA, 25 bp, Probe Sequence
gccgcgggacggataacaatttcac

SEQ ID NO: 205836 - DNA, 25 bp, Probe Sequence
gccgcgggacggataacaatttcac

SEQ ID NO: 205837 - DNA, 25 bp, Probe Sequence
gccgcgggacggataacaatttcac

SEQ ID NO: 205838 - DNA, 25 bp, Probe Sequence
gccgcgggacggataacaatttcac

SEQ ID NO: 205839 - DNA, 25 bp, Probe Sequence
gccgcgggacggataacaatttcac

SEQ ID NO: 205840 - DNA, 25 bp, Probe Sequence
gccgcgggacggataacaatttcac

SEQ ID NO: 205841 - DNA, 25 bp, Probe Sequence
gccgcgggacggataacaatttcac

SEQ ID NO: 205842 - DNA, 25 bp, Probe Sequence
gccgcgggacggataacaatttcac

SEQ ID NO: 205843 - DNA, 25 bp, Probe Sequence
gccgcgggacggataacaatttcac

SEQ ID NO: 205844 - DNA, 25 bp, Probe Sequence
gccgcgggacggataacaatttcac

SEQ ID NO: 205845 - DNA, 25 bp, Probe Sequence
gccgcgggacggataacaatttcac

SEQ ID NO: 205846 - DNA, 25 bp, Probe Sequence
gccgcgggacggataacaatttcac

SEQ ID NO: 205847 - DNA, 25 bp, Probe Sequence
gccgcgggacggataacaatttcac

SEQ ID NO: 205848 - DNA, 25 bp, Probe Sequence
gccgcgggacggataacaatttcac

SEQ ID NO: 205849 - DNA, 25 bp, Probe Sequence
gccgcgggacggataacaatttcac

SEQ ID NO: 205850 - DNA, 25 bp, Probe Sequence
gccgcgggacggataacaatttcac

SEQ ID NO: 205851 - DNA, 25 bp, Probe Sequence
gccgcgggacggataacaatttcac

SEQ ID NO: 205852 - DNA, 25 bp, Probe Sequence
gccgcgggacggataacaatttcac

SEQ ID NO: 205853 - DNA, 25 bp, Probe Sequence
gccgcgggacggataacaatttcac

SEQ ID NO: 205854 - DNA, 25 bp, Probe Sequence
gccgcgggacggataacaatttcac

SEQ ID NO: 205855 - DNA, 25 bp, Probe Sequence
gccgcgggacggataacaatgttca

SEQ ID NO: 205856 - DNA, 25 bp, Probe Sequence
gccgcgggacggatgaacaatgttc

SEQ ID NO: 205857 - DNA, 25 bp, Probe Sequence
gccgtggtacggatgaagcgtgccg

SEQ ID NO: 205858 - DNA, 25 bp, Probe Sequence
gccggaggacgagctggaggatctg

SEQ ID NO: 205859 - DNA, 25 bp, Probe Sequence
gccggggcaggtacagggagtgcta

SEQ ID NO: 205860 - DNA, 25 bp, Probe Sequence
gccgggggcagtctgagagaggcca

SEQ ID NO: 205861 - DNA, 25 bp, Probe Sequence
gccgggcatggagtgcgtgaagagc

SEQ ID NO: 205862 - DNA, 25 bp, Probe Sequence
gccggcgatgaggtcaatgtagagg

SEQ ID NO: 205863 - DNA, 25 bp, Probe Sequence
gccgctctgtgacaaatgtgggagt

SEQ ID NO: 205864 - DNA, 25 bp, Probe Sequence
gccgctctctggaacagcatgggct

SEQ ID NO: 205865 - DNA, 25 bp, Probe Sequence
gccctacttccaggatggatgcatc

SEQ ID NO: 205866 - DNA, 25 bp, Probe Sequence
gccgtactccatgggctggatagcg

SEQ ID NO: 205867 - DNA, 25 bp, Probe Sequence
gccgtgagtgccaagcgggaagccc

SEQ ID NO: 205868 - DNA, 25 bp, Probe Sequence
gccgtgagtcaggcctgggttggcc

SEQ ID NO: 205869 - DNA, 25 bp, Probe Sequence
gccgtgagtcaggcctgggttggcc

SEQ ID NO: 205870 - DNA, 25 bp, Probe Sequence
gccgtgaacgagacgaggctggccc

SEQ ID NO: 205871 - DNA, 25 bp, Probe Sequence
gccggagcggagagaggcggagcgg

SEQ ID NO: 205872 - DNA, 25 bp, Probe Sequence
gccgggctgggaatggggacacggt

SEQ ID NO: 205873 - DNA, 25 bp, Probe Sequence
gccggcacgggcattgggaaacagc

SEQ ID NO: 205874 - DNA, 25 bp, Probe Sequence
gcccggctggacattttgaagattc

SEQ ID NO: 205875 - DNA, 25 bp, Probe Sequence
gccctagggagcagttacaagggcc

SEQ ID NO: 205876 - DNA, 25 bp, Probe Sequence
gccccaggggcggggaaggcatggc

SEQ ID NO: 205877 - DNA, 25 bp, Probe Sequence
gccccaggagaataggcaccggctg

SEQ ID NO: 205878 - DNA, 25 bp, Probe Sequence
gccccaggagaataggcaccggctg

SEQ ID NO: 205879 - DNA, 25 bp, Probe Sequence
gccccaggagaataggcaccggctg

SEQ ID NO: 205880 - DNA, 25 bp, Probe Sequence
gcccctcagagacatagtggccggg

SEQ ID NO: 205881 - DNA, 25 bp, Probe Sequence
gcccctgcgacagaagttggctgcc

SEQ ID NO: 205882 - DNA, 25 bp, Probe Sequence
gccccttcagaccaagaatttgaca

SEQ ID NO: 205883 - DNA, 25 bp, Probe Sequence
gccccctagccacataataggcgat

SEQ ID NO: 205884 - DNA, 25 bp, Probe Sequence
gccctctaacctctgagaagatctg

SEQ ID NO: 205885 - DNA, 25 bp, Probe Sequence
gcccctttcttttgtgaatttgaag

SEQ ID NO: 205886 - DNA, 25 bp, Probe Sequence
gccccttttctgtaagtctcttggg

SEQ ID NO: 205887 - DNA, 25 bp, Probe Sequence
gcccactaaaggtaaccctatgtag

SEQ ID NO: 205888 - DNA, 25 bp, Probe Sequence
gcccgtaaagagtatccctttcgat

SEQ ID NO: 205889 - DNA, 25 bp, Probe Sequence
gccctggataatgctttactttctg

SEQ ID NO: 205890 - DNA, 25 bp, Probe Sequence
gccctggataatgctttactttctg

SEQ ID NO: 205891 - DNA, 25 bp, Probe Sequence
gcccttgtccatgtagtttgtttcc

SEQ ID NO: 205892 - DNA, 25 bp, Probe Sequence
gcccgtgttctcacagttattaacc

SEQ ID NO: 205893 - DNA, 25 bp, Probe Sequence
gcccaagttcggccaaattgtcaac

SEQ ID NO: 205894 - DNA, 25 bp, Probe Sequence
gcccaagatcgtcaaaaagagaacc

SEQ ID NO: 205895 - DNA, 25 bp, Probe Sequence
gcccgaccaggccaaaaagacaagc

SEQ ID NO: 205896 - DNA, 25 bp, Probe Sequence
gccggacgcgagcagatgaacgaac

SEQ ID NO: 205897 - DNA, 25 bp, Probe Sequence
gccggcagtgaagagtgacttgaag

SEQ ID NO: 205898 - DNA, 25 bp, Probe Sequence
gccgagcatggaagagggctctgga

SEQ ID NO: 205899 - DNA, 25 bp, Probe Sequence
gccggctcgagagggatgtctggtc

SEQ ID NO: 205900 - DNA, 25 bp, Probe Sequence
gccgccacgagagggcaggagagcc

SEQ ID NO: 205901 - DNA, 25 bp, Probe Sequence
gccgctagtgactcagtggcagagt

SEQ ID NO: 205902 - DNA, 25 bp, Probe Sequence
gccccagtgcctagatgcatggctg

SEQ ID NO: 205903 - DNA, 25 bp, Probe Sequence
gccccaagcctgagaggctggagcc

SEQ ID NO: 205904 - DNA, 25 bp, Probe Sequence
gccccagataggtggtgccagtggc

SEQ ID NO: 205905 - DNA, 25 bp, Probe Sequence
gccccaagatggggtaacagtggga

SEQ ID NO: 205906 - DNA, 25 bp, Probe Sequence
gcccataaatggggataactatcta

SEQ ID NO: 205907 - DNA, 25 bp, Probe Sequence
gccgcaagaagggagccaagctgac

SEQ ID NO: 205908 - DNA, 25 bp, Probe Sequence
gccgcaagaagggagccaagctgac

SEQ ID NO: 205909 - DNA, 25 bp, Probe Sequence
gccgcaagaagggagccaagctgac

SEQ ID NO: 205910 - DNA, 25 bp, Probe Sequence
gcccacctggcagaaaatctacttc

SEQ ID NO: 205911 - DNA, 25 bp, Probe Sequence
gccccacagacagaacagttctttc

SEQ ID NO: 205912 - DNA, 25 bp, Probe Sequence
gccctgacagcctggaaaacattcc

SEQ ID NO: 205913 - DNA, 25 bp, Probe Sequence
gcccctcagacatgttacagcaaat

SEQ ID NO: 205914 - DNA, 25 bp, Probe Sequence
gccccatcagagttcttacgggtgg

SEQ ID NO: 205915 - DNA, 25 bp, Probe Sequence
gcccgtcagagtcttttgtggtgct

SEQ ID NO: 205916 - DNA, 25 bp, Probe Sequence
gcccagctaatttttgtatttttag

SEQ ID NO: 205917 - DNA, 25 bp, Probe Sequence
gctccgccctttttaattagtgtag

SEQ ID NO: 205918 - DNA, 25 bp, Probe Sequence
gccccacacgctttttttaggtgca

SEQ ID NO: 205919 - DNA, 25 bp, Probe Sequence
gcgttaatcccttattttagtgaca

SEQ ID NO: 205920 - DNA, 25 bp, Probe Sequence
gcagtttatccctggttctgaggag

SEQ ID NO: 205921 - DNA, 25 bp, Probe Sequence
gcgaagttatccttagtttgcaaat

SEQ ID NO: 205922 - DNA, 25 bp, Probe Sequence
gcccagttcaccctgatttaggaga

SEQ ID NO: 205923 - DNA, 25 bp, Probe Sequence
gcccctctcaccttgtaaagtgtga

SEQ ID NO: 205924 - DNA, 25 bp, Probe Sequence
gccccagacccatgtgcaaaggaga

SEQ ID NO: 205925 - DNA, 25 bp, Probe Sequence
gccccagacccatgtgcaaaggaga

SEQ ID NO: 205926 - DNA, 25 bp, Probe Sequence
gccccagacccatgtgcaaaggaga

SEQ ID NO: 205927 - DNA, 25 bp, Probe Sequence
gcccccacctaagtcacaaaatgag

SEQ ID NO: 205928 - DNA, 25 bp, Probe Sequence
gcccaggacctgtgcaatcaaatat

SEQ ID NO: 205929 - DNA, 25 bp, Probe Sequence
gcccaggtgttatggactaaatttt

SEQ ID NO: 205930 - DNA, 25 bp, Probe Sequence
gccccttctctatgaacttaaaatc

SEQ ID NO: 205931 - DNA, 25 bp, Probe Sequence
gccccttccaaacgcattgaaaaat

SEQ ID NO: 205932 - DNA, 25 bp, Probe Sequence
gccgcttcttccaaagaaaacaaat

SEQ ID NO: 205933 - DNA, 25 bp, Probe Sequence
gccgcttccctcaagagtaactaca

SEQ ID NO: 205934 - DNA, 25 bp, Probe Sequence
gcccttgcacatgtaagttactcga

SEQ ID NO: 205935 - DNA, 25 bp, Probe Sequence
gccgtctgtgaacaagattcctcaa

SEQ ID NO: 205936 - DNA, 25 bp, Probe Sequence
gccgggtaaagctgtatgccatcat

SEQ ID NO: 205937 - DNA, 25 bp, Probe Sequence
gccgaggataaggagtggatgcccg

SEQ ID NO: 205938 - DNA, 25 bp, Probe Sequence
gccgaacatcaagggatcatatgcc

SEQ ID NO: 205939 - DNA, 25 bp, Probe Sequence
gccgcaacagcaggggcgatatcct

SEQ ID NO: 205940 - DNA, 25 bp, Probe Sequence
gccgcaagcagtggcggaaccggca

SEQ ID NO: 205941 - DNA, 25 bp, Probe Sequence
gccgggcagaggctgcaatctcggc

SEQ ID NO: 205942 - DNA, 25 bp, Probe Sequence
gccgggcacgtgtgagttcagcgtg

SEQ ID NO: 205943 - DNA, 25 bp, Probe Sequence
gccgggacagtgtggccgagcagat

SEQ ID NO: 205944 - DNA, 25 bp, Probe Sequence
gccgggacagtgtggccgagcagat

SEQ ID NO: 205945 - DNA, 25 bp, Probe Sequence
gccggtatcgtgtggcagcacgtgt

SEQ ID NO: 205946 - DNA, 25 bp, Probe Sequence
gccggatacggggagagagagctta

SEQ ID NO: 205947 - DNA, 25 bp, Probe Sequence
gccgtgatatcgttaaagaagttgc

SEQ ID NO: 205948 - DNA, 25 bp, Probe Sequence
gccgttctgccatcaacgaagtggt

SEQ ID NO: 205949 - DNA, 25 bp, Probe Sequence
gccgcttctgtagattttgattgtg

SEQ ID NO: 205950 - DNA, 25 bp, Probe Sequence
gcccatacagtctctaattatctga

SEQ ID NO: 205951 - DNA, 25 bp, Probe Sequence
gccctaagcttcttggaatatcatg

SEQ ID NO: 205952 - DNA, 25 bp, Probe Sequence
gccgccatggctcctgtgaaaaagc

SEQ ID NO: 205953 - DNA, 25 bp, Probe Sequence
gccgatcagagctgtgagttaacac

SEQ ID NO: 205954 - DNA, 25 bp, Probe Sequence
gccgtgaggctcatagttgatgagg

SEQ ID NO: 205955 - DNA, 25 bp, Probe Sequence
gccgagatgagcggatagcttgagc

SEQ ID NO: 205956 - DNA, 25 bp, Probe Sequence
gccgcagcatcgacagcgagttcag

SEQ ID NO: 205957 - DNA, 25 bp, Probe Sequence
gccgcacatcatcagcgcgcaagag

SEQ ID NO: 205958 - DNA, 25 bp, Probe Sequence
gccgctctatctggctagcaaggaa

SEQ ID NO: 205959 - DNA, 25 bp, Probe Sequence
gccgccatcaatgcacgcaagatga

SEQ ID NO: 205960 - DNA, 25 bp, Probe Sequence
gccgcctaaggacgacaagaagaag

SEQ ID NO: 205961 - DNA, 25 bp, Probe Sequence
gccgacttaatgacttctgaaagaa

SEQ ID NO: 205962 - DNA, 25 bp, Probe Sequence
gccctttaagtttatgctaggcaag

SEQ ID NO: 205963 - DNA, 25 bp, Probe Sequence
ggacgtaaagtagtaaaggaatgca

SEQ ID NO: 205964 - DNA, 25 bp, Probe Sequence
gcgacgaaggagtaggtggtgggat

SEQ ID NO: 205965 - DNA, 25 bp, Probe Sequence
gcgagaaggaagtggtctctgccca

SEQ ID NO: 205966 - DNA, 25 bp, Probe Sequence
gcgagaaggaagtggtctctgccca

SEQ ID NO: 205967 - DNA, 25 bp, Probe Sequence
gcgcagacaggacagaggaccctta

SEQ ID NO: 205968 - DNA, 25 bp, Probe Sequence
gccgtcagggaaggaagcaacatta

SEQ ID NO: 205969 - DNA, 25 bp, Probe Sequence
gccgatagcgctcacgcaagcatgg

SEQ ID NO: 205970 - DNA, 25 bp, Probe Sequence
gccgactccatgcagcagaagctag

SEQ ID NO: 205971 - DNA, 25 bp, Probe Sequence
gccgcacactatgagcaacatgcag

SEQ ID NO: 205972 - DNA, 25 bp, Probe Sequence
gccgaccatctggatcacatcaagg

SEQ ID NO: 205973 - DNA, 25 bp, Probe Sequence
gccgagacgctggcagagaccgagc

SEQ ID NO: 205974 - DNA, 25 bp, Probe Sequence
gccgcaggagcgcatggtcggagaa

SEQ ID NO: 205975 - DNA, 25 bp, Probe Sequence
gccgagcagggcgagttcgaggagg

SEQ ID NO: 205976 - DNA, 25 bp, Probe Sequence
gccgaggcaggcggatcacttgagg

SEQ ID NO: 205977 - DNA, 25 bp, Probe Sequence
gccgaggcaggcagatcacaagctt

SEQ ID NO: 205978 - DNA, 25 bp, Probe Sequence
gccgaggcaggtggatcacaaggcc

SEQ ID NO: 205979 - DNA, 25 bp, Probe Sequence
gccgggcatggtggcacatgcctgt

SEQ ID NO: 205980 - DNA, 25 bp, Probe Sequence
gccgggcatgacggctcatgcctgt

SEQ ID NO: 205981 - DNA, 25 bp, Probe Sequence
gccgtagcatgattgcgctcatgga

SEQ ID NO: 205982 - DNA, 25 bp, Probe Sequence
gccgatgatgtaaccctgcatgact

SEQ ID NO: 205983 - DNA, 25 bp, Probe Sequence
gcccatgattacgtcatccagacta

SEQ ID NO: 205984 - DNA, 25 bp, Probe Sequence
gccgtgctgtcaacatcatccggca

SEQ ID NO: 205985 - DNA, 25 bp, Probe Sequence
gccgctcatccgccagatttgagca

SEQ ID NO: 205986 - DNA, 25 bp, Probe Sequence
gccgcatcttggcaagttgcagaga

SEQ ID NO: 205987 - DNA, 25 bp, Probe Sequence
gccgcatcttggcaagttgcagaga

SEQ ID NO: 205988 - DNA, 25 bp, Probe Sequence
gccgcatcttggcaagttgcagaga

SEQ ID NO: 205989 - DNA, 25 bp, Probe Sequence
gccgcatcttggcaagttgcagaga

SEQ ID NO: 205990 - DNA, 25 bp, Probe Sequence
gccgcagctgttcatggtgagcaag

SEQ ID NO: 205991 - DNA, 25 bp, Probe Sequence
gccgcagtgagtcaggctgggaggg

SEQ ID NO: 205992 - DNA, 25 bp, Probe Sequence
gccgcggagctcgcggaggcaaggc

SEQ ID NO: 205993 - DNA, 25 bp, Probe Sequence
gcccagggtcaccaggggaagtttg

SEQ ID NO: 205994 - DNA, 25 bp, Probe Sequence
gcccgagggaccctggatggatgta

SEQ ID NO: 205995 - DNA, 25 bp, Probe Sequence
gcccggggccaggaaagcagagaca

SEQ ID NO: 205996 - DNA, 25 bp, Probe Sequence
gcccatggcccccaataaaggcagc

SEQ ID NO: 205997 - DNA, 25 bp, Probe Sequence
gcccaccatttgcaataagaccatg

SEQ ID NO: 205998 - DNA, 25 bp, Probe Sequence
gcccactaaggcaaaatagccccaa

SEQ ID NO: 205999 - DNA, 25 bp, Probe Sequence
gcccagtacaacagaaatgttccat

SEQ ID NO: 206000 - DNA, 25 bp, Probe Sequence
gcgacataacaagggaacttccaca

SEQ ID NO: 206001 - DNA, 25 bp, Probe Sequence
gcgaagacaaacggatgcacccgtc

SEQ ID NO: 206002 - DNA, 25 bp, Probe Sequence
gccgaggagggcagatcacgaggtc

SEQ ID NO: 206003 - DNA, 25 bp, Probe Sequence
gccgaggcgggtggatcacaaggtc

SEQ ID NO: 206004 - DNA, 25 bp, Probe Sequence
gccctggctggtatgaccacagttc

SEQ ID NO: 206005 - DNA, 25 bp, Probe Sequence
gccctgtaagtacacacacggtgat

SEQ ID NO: 206006 - DNA, 25 bp, Probe Sequence
gcccctaggtagacagacttgggtg

SEQ ID NO: 206007 - DNA, 25 bp, Probe Sequence
taacctaggtaacagttcagtagtt

SEQ ID NO: 206008 - DNA, 25 bp, Probe Sequence
ttcccttgggaactagctacttggt

SEQ ID NO: 206009 - DNA, 25 bp, Probe Sequence
gccccttaacagcctagaactttgg

SEQ ID NO: 206010 - DNA, 25 bp, Probe Sequence
gcccctgtaatacataagtttataa

SEQ ID NO: 206011 - DNA, 25 bp, Probe Sequence
gcccctggcaaacatcaggtatata

SEQ ID NO: 206012 - DNA, 25 bp, Probe Sequence
gccccaggaaaactcagtgcagtcc

SEQ ID NO: 206013 - DNA, 25 bp, Probe Sequence
gcccgaggaaggcttgtgtgtcctc

SEQ ID NO: 206014 - DNA, 25 bp, Probe Sequence
gccctggaggaggcttttgtctcat

SEQ ID NO: 206015 - DNA, 25 bp, Probe Sequence
gccgctgagggagcattcacatgtg

SEQ ID NO: 206016 - DNA, 25 bp, Probe Sequence
gcccatgaggtcattctgaaggcca

SEQ ID NO: 206017 - DNA, 25 bp, Probe Sequence
gcccatgaagatcttcttcttggac

SEQ ID NO: 206018 - DNA, 25 bp, Probe Sequence
gcccaataaacattcccttggatgt

SEQ ID NO: 206019 - DNA, 25 bp, Probe Sequence
gcccataagaaaatccctgaggaag

SEQ ID NO: 206020 - DNA, 25 bp, Probe Sequence
gcaccatattggagtacctacaata

SEQ ID NO: 206021 - DNA, 25 bp, Probe Sequence
gccccttgttggtacattccagagg

SEQ ID NO: 206022 - DNA, 25 bp, Probe Sequence
gcccctttgatgaggccctcagggg

SEQ ID NO: 206023 - DNA, 25 bp, Probe Sequence
gccctctttgagaatggcccttgcc

SEQ ID NO: 206024 - DNA, 25 bp, Probe Sequence
gccccagtgaggaagacctcctgcc

SEQ ID NO: 206025 - DNA, 25 bp, Probe Sequence
gccccaggaggagaggctttctcgg

SEQ ID NO: 206026 - DNA, 25 bp, Probe Sequence
gccccattggggagtgatctcttgg

SEQ ID NO: 206027 - DNA, 25 bp, Probe Sequence
gccgacttgtgaagaaggttcccgc

SEQ ID NO: 206028 - DNA, 25 bp, Probe Sequence
gccgccattaaacaggttctgaccc

SEQ ID NO: 206029 - DNA, 25 bp, Probe Sequence
gccgcgagtaaaaaggctccagccc

SEQ ID NO: 206030 - DNA, 25 bp, Probe Sequence
gccgcgagtaaaaaggctccagccc

SEQ ID NO: 206031 - DNA, 25 bp, Probe Sequence
gccgaaggagtaaaggtgctgcatg

SEQ ID NO: 206032 - DNA, 25 bp, Probe Sequence
gccgcaagtggatccagtgcttcaa

SEQ ID NO: 206033 - DNA, 25 bp, Probe Sequence
gccgcaagtggatccagtgcttcaa

SEQ ID NO: 206034 - DNA, 25 bp, Probe Sequence
gcccagcagtggaaccagtactatc

SEQ ID NO: 206035 - DNA, 25 bp, Probe Sequence
gcccagcagtggaaccagtactatc

SEQ ID NO: 206036 - DNA, 25 bp, Probe Sequence
gcccaggctagcttccagaaagcac

SEQ ID NO: 206037 - DNA, 25 bp, Probe Sequence
gccctggaagttcaggggcccagga

SEQ ID NO: 206038 - DNA, 25 bp, Probe Sequence
gcccaggggtacaggaggcctctgg

SEQ ID NO: 206039 - DNA, 25 bp, Probe Sequence
gcccgggcgctgtggaagagattct

SEQ ID NO: 206040 - DNA, 25 bp, Probe Sequence
gcccggatggggtagaatggacctt

SEQ ID NO: 206041 - DNA, 25 bp, Probe Sequence
gccccgtgagtgcaagatgagagcc

SEQ ID NO: 206042 - DNA, 25 bp, Probe Sequence
gccgccgagtgcctatcagagaagg

SEQ ID NO: 206043 - DNA, 25 bp, Probe Sequence
gccccagggctcttcagaaagcatc

SEQ ID NO: 206044 - DNA, 25 bp, Probe Sequence
gccccagggctcttcagaaagcatc

SEQ ID NO: 206045 - DNA, 25 bp, Probe Sequence
gcccctggttcactgcagacagtgg

SEQ ID NO: 206046 - DNA, 25 bp, Probe Sequence
gccccatgacatgaggaatcatctg

SEQ ID NO: 206047 - DNA, 25 bp, Probe Sequence
gcccgatgatcaaatgaagtccatt

SEQ ID NO: 206048 - DNA, 25 bp, Probe Sequence
gccgcggatgcaaaaagctgccctt

SEQ ID NO: 206049 - DNA, 25 bp, Probe Sequence
gccgctggctcaaagacaatgttat

SEQ ID NO: 206050 - DNA, 25 bp, Probe Sequence
gcccggacaagttttgcttattcca

SEQ ID NO: 206051 - DNA, 25 bp, Probe Sequence
gcccaggacagactatggactttct

SEQ ID NO: 206052 - DNA, 25 bp, Probe Sequence
gcccatagagggctgagtcacttct

SEQ ID NO: 206053 - DNA, 25 bp, Probe Sequence
gccccagaggtcctggccaaatatg

SEQ ID NO: 206054 - DNA, 25 bp, Probe Sequence
gccgaagaagctctgctccaaatgg

SEQ ID NO: 206055 - DNA, 25 bp, Probe Sequence
gccgaagagagtgctgtacaggagg

SEQ ID NO: 206056 - DNA, 25 bp, Probe Sequence
gctagcaaatagttcgttcaaagtg

SEQ ID NO: 206057 - DNA, 25 bp, Probe Sequence
gccgcagagatgttgacgcctaaga

SEQ ID NO: 206058 - DNA, 25 bp, Probe Sequence
gccgcagagatcctgcctgcggagc

SEQ ID NO: 206059 - DNA, 25 bp, Probe Sequence
gccgccaatgcttgttcaggcacgc

SEQ ID NO: 206060 - DNA, 25 bp, Probe Sequence
gccgcatgcggcaatttgacgacct

SEQ ID NO: 206061 - DNA, 25 bp, Probe Sequence
gccgcatggaaccttgagaacccag

SEQ ID NO: 206062 - DNA, 25 bp, Probe Sequence
gccgcaggagagtttggaatccgga

SEQ ID NO: 206063 - DNA, 25 bp, Probe Sequence
gccgcaggagagtttggaatccgga

SEQ ID NO: 206064 - DNA, 25 bp, Probe Sequence
gccgcggaggctacgaatactcgga

SEQ ID NO: 206065 - DNA, 25 bp, Probe Sequence
gccgcggaggctacgaatactcgga

SEQ ID NO: 206066 - DNA, 25 bp, Probe Sequence
gccctggaggctgcaacatacctca

SEQ ID NO: 206067 - DNA, 25 bp, Probe Sequence
gcccctgcaggggcagagtatccta

SEQ ID NO: 206068 - DNA, 25 bp, Probe Sequence
gcccagatctgcacaaagtattcta

SEQ ID NO: 206069 - DNA, 25 bp, Probe Sequence
gcccgcctcattgagatgtaccgag

SEQ ID NO: 206070 - DNA, 25 bp, Probe Sequence
gccccaacactggatggttctgtag

SEQ ID NO: 206071 - DNA, 25 bp, Probe Sequence
gccccatacacatatgatgcccgta

SEQ ID NO: 206072 - DNA, 25 bp, Probe Sequence
gctggccattattaagtccctgtaa

SEQ ID NO: 206073 - DNA, 25 bp, Probe Sequence
gccctcattaaagcagccggtgtaa

SEQ ID NO: 206074 - DNA, 25 bp, Probe Sequence
gccgctctgttgtgggggaggtgaa

SEQ ID NO: 206075 - DNA, 25 bp, Probe Sequence
gccctccttgttgtggacagggaag

SEQ ID NO: 206076 - DNA, 25 bp, Probe Sequence
gcccctctacgtggggacagcagga

SEQ ID NO: 206077 - DNA, 25 bp, Probe Sequence
gcccctccaagtgaggtcgcaggag

SEQ ID NO: 206078 - DNA, 25 bp, Probe Sequence
gcccagcccagggtttgtctgagaa

SEQ ID NO: 206079 - DNA, 25 bp, Probe Sequence
gccccttcatgagcttattatggac

SEQ ID NO: 206080 - DNA, 25 bp, Probe Sequence
gcccgcttgtcagttctgaaatggg

SEQ ID NO: 206081 - DNA, 25 bp, Probe Sequence
gcccctcattccttccaagatgaga

SEQ ID NO: 206082 - DNA, 25 bp, Probe Sequence
gcccctcctccgaccaaggaggaag

SEQ ID NO: 206083 - DNA, 25 bp, Probe Sequence
gccccctgctgcagaccataaagga

SEQ ID NO: 206084 - DNA, 25 bp, Probe Sequence
gccctcctctgtcaacatcaaagag

SEQ ID NO: 206085 - DNA, 25 bp, Probe Sequence
gccccctgctgtgtaacaatgtggc

SEQ ID NO: 206086 - DNA, 25 bp, Probe Sequence
gccgcaccctgagcatggacaaggg

SEQ ID NO: 206087 - DNA, 25 bp, Probe Sequence
gccccgcctgacatggaacagaacg

SEQ ID NO: 206088 - DNA, 25 bp, Probe Sequence
gccgccagtccattcttaaggaact

SEQ ID NO: 206089 - DNA, 25 bp, Probe Sequence
gccgcaagacatgacgttagggact

SEQ ID NO: 206090 - DNA, 25 bp, Probe Sequence
gccgcagtacatgaccttatgggac

SEQ ID NO: 206091 - DNA, 25 bp, Probe Sequence
gcccagtagtcttcttttgagtgcc

SEQ ID NO: 206092 - DNA, 25 bp, Probe Sequence
gccctggatgatgccttttccatcc

SEQ ID NO: 206093 - DNA, 25 bp, Probe Sequence
gcccgtgttggccattggtactggg

SEQ ID NO: 206094 - DNA, 25 bp, Probe Sequence
gcccggcttaggactgggagtgtga

SEQ ID NO: 206095 - DNA, 25 bp, Probe Sequence
gccctgtccatacccatgtaaggtg

SEQ ID NO: 206096 - DNA, 25 bp, Probe Sequence
gccctgtccatacccatgtaaggtg

SEQ ID NO: 206097 - DNA, 25 bp, Probe Sequence
gccctcttagtagcattgaacgtgc

SEQ ID NO: 206098 - DNA, 25 bp, Probe Sequence
gccctgttacagagcagtggacctg

SEQ ID NO: 206099 - DNA, 25 bp, Probe Sequence
gccgcgattccgaggatggagccgc

SEQ ID NO: 206100 - DNA, 25 bp, Probe Sequence
gccgccctctggatggaggagggcc

SEQ ID NO: 206101 - DNA, 25 bp, Probe Sequence
gccgccccagcatggggggcaggtc

SEQ ID NO: 206102 - DNA, 25 bp, Probe Sequence
gcgcccgactactcgggcgcagaac

SEQ ID NO: 206103 - DNA, 25 bp, Probe Sequence
gcccgctgttactttgctaggaaac

SEQ ID NO: 206104 - DNA, 25 bp, Probe Sequence
gccctgcagttagtttgcgggaact

SEQ ID NO: 206105 - DNA, 25 bp, Probe Sequence
gccctgcatgcagccattgggggaa

SEQ ID NO: 206106 - DNA, 25 bp, Probe Sequence
gccctggaggcggtgcggcagggaa

SEQ ID NO: 206107 - DNA, 25 bp, Probe Sequence
gcccttgacggcactggaggagcca

SEQ ID NO: 206108 - DNA, 25 bp, Probe Sequence
gccctctacggacagagactgacca

SEQ ID NO: 206109 - DNA, 25 bp, Probe Sequence
gcatccctgggatgtaaggtaccac

SEQ ID NO: 206110 - DNA, 25 bp, Probe Sequence
gccctcatggaaggtgacgttcccg

SEQ ID NO: 206111 - DNA, 25 bp, Probe Sequence
gcccttcaaaggtacatgtgttcca

SEQ ID NO: 206112 - DNA, 25 bp, Probe Sequence
gcccttctgaagaatgcactgcctt

SEQ ID NO: 206113 - DNA, 25 bp, Probe Sequence
gcccggctgataaagcactttctct

SEQ ID NO: 206114 - DNA, 25 bp, Probe Sequence
gccccgtatgcttacattattgctc

SEQ ID NO: 206115 - DNA, 25 bp, Probe Sequence
gccccagattggtatcttctatgaa

SEQ ID NO: 206116 - DNA, 25 bp, Probe Sequence
gccccaattcctacttcatggatgt

SEQ ID NO: 206117 - DNA, 25 bp, Probe Sequence
gcccgatttcctcaggaggcatgtc

SEQ ID NO: 206118 - DNA, 25 bp, Probe Sequence
gcccgagtactaaaggagagatgcc

SEQ ID NO: 206119 - DNA, 25 bp, Probe Sequence
gccccgatagctttgtgggcgcatc

SEQ ID NO: 206120 - DNA, 25 bp, Probe Sequence
gcccaccaagctaaagaggctgccc

SEQ ID NO: 206121 - DNA, 25 bp, Probe Sequence
gcccaccaagctaaagaggctgccc

SEQ ID NO: 206122 - DNA, 25 bp, Probe Sequence
gccccaaagctgcacaaggtcattg

SEQ ID NO: 206123 - DNA, 25 bp, Probe Sequence
gcgcccaagtctgggaagtgccctt

SEQ ID NO: 206124 - DNA, 25 bp, Probe Sequence
gctgcccaaatcagccaaggttagt

SEQ ID NO: 206125 - DNA, 25 bp, Probe Sequence
gccccaaatcaagccatggtggtgg

SEQ ID NO: 206126 - DNA, 25 bp, Probe Sequence
gccgctgcatgatcaacctcatgga

SEQ ID NO: 206127 - DNA, 25 bp, Probe Sequence
gccgctcagaccaaggcgcagagca

SEQ ID NO: 206128 - DNA, 25 bp, Probe Sequence
gccgcattgacaagaagatcgagtt

SEQ ID NO: 206129 - DNA, 25 bp, Probe Sequence
gcccttgacattgagattgccacct

SEQ ID NO: 206130 - DNA, 25 bp, Probe Sequence
gccctatggcacgtaatgtgccccc

SEQ ID NO: 206131 - DNA, 25 bp, Probe Sequence
gccctgagcggcataatatctacac

SEQ ID NO: 206132 - DNA, 25 bp, Probe Sequence
gcccagagaccagtggaagtacaca

SEQ ID NO: 206133 - DNA, 25 bp, Probe Sequence
gccgcaagaccagggtcactggaga

SEQ ID NO: 206134 - DNA, 25 bp, Probe Sequence
gccgcatgaaccggatgtctcggca

SEQ ID NO: 206135 - DNA, 25 bp, Probe Sequence
gctgcagctgaaatcggattcgtcc

SEQ ID NO: 206136 - DNA, 25 bp, Probe Sequence
gcgagagaacctgatcatgcgccct

SEQ ID NO: 206137 - DNA, 25 bp, Probe Sequence
gggccatatactcaactggccttcc

SEQ ID NO: 206138 - DNA, 25 bp, Probe Sequence
gctaccaatatcatacgggactttc

SEQ ID NO: 206139 - DNA, 25 bp, Probe Sequence
gccccatcaatgatacgtggatcca

SEQ ID NO: 206140 - DNA, 25 bp, Probe Sequence
gccgcgataacagtacgtgtgcatg

SEQ ID NO: 206141 - DNA, 25 bp, Probe Sequence
gccgcagtacactatacgatcgtag

SEQ ID NO: 206142 - DNA, 25 bp, Probe Sequence
gcccgaacattctacgtattagtca

SEQ ID NO: 206143 - DNA, 25 bp, Probe Sequence
gccctgtcctggtggtattttcaat

SEQ ID NO: 206144 - DNA, 25 bp, Probe Sequence
gccctggcctggtgtgtatagacca

SEQ ID NO: 206145 - DNA, 25 bp, Probe Sequence
gccctggctcatatacatgttgaga

SEQ ID NO: 206146 - DNA, 25 bp, Probe Sequence
gccctggatcaaccagatcctgcag

SEQ ID NO: 206147 - DNA, 25 bp, Probe Sequence
gccctctaatccgagctaccaggga

SEQ ID NO: 206148 - DNA, 25 bp, Probe Sequence
gcgcctgtaatcccagctactcggg

SEQ ID NO: 206149 - DNA, 25 bp, Probe Sequence
gcccgctcagatgaactgaccaggc

SEQ ID NO: 206150 - DNA, 25 bp, Probe Sequence
gcccctgagatgagacgcctcatag

SEQ ID NO: 206151 - DNA, 25 bp, Probe Sequence
gccgctgctaatcagatgcgcaact

SEQ ID NO: 206152 - DNA, 25 bp, Probe Sequence
gccccagagaaactgccacatacac

SEQ ID NO: 206153 - DNA, 25 bp, Probe Sequence
gccgccaagagcgaagcccagaaac

SEQ ID NO: 206154 - DNA, 25 bp, Probe Sequence
gccccctgggtacccaggcaagcag

SEQ ID NO: 206155 - DNA, 25 bp, Probe Sequence
gcccccaaggtctaccaagagacat

SEQ ID NO: 206156 - DNA, 25 bp, Probe Sequence
gccccacaagtgttaccatggcaaa

SEQ ID NO: 206157 - DNA, 25 bp, Probe Sequence
gccccacaagtgttaccatggcaaa

SEQ ID NO: 206158 - DNA, 25 bp, Probe Sequence
gcccccaattcgtacgtggagaagt

SEQ ID NO: 206159 - DNA, 25 bp, Probe Sequence
gcccctacttctcaagctgggaagg

SEQ ID NO: 206160 - DNA, 25 bp, Probe Sequence
gcccctacttgggaattgaggagcc

SEQ ID NO: 206161 - DNA, 25 bp, Probe Sequence
gccccgagtgttggatttgcaacag

SEQ ID NO: 206162 - DNA, 25 bp, Probe Sequence
gcccgaaggtacaagttgcagaagc

SEQ ID NO: 206163 - DNA, 25 bp, Probe Sequence
gccgcagaagcgagatgacgaaggg

SEQ ID NO: 206164 - DNA, 25 bp, Probe Sequence
gccgcggagcgtgagagggagctgg

SEQ ID NO: 206165 - DNA, 25 bp, Probe Sequence
gccgcctggctgagatggggtgggc

SEQ ID NO: 206166 - DNA, 25 bp, Probe Sequence
gccgctctggtcgtaggggatgagg

SEQ ID NO: 206167 - DNA, 25 bp, Probe Sequence
gccgctctgtggatgagactttgag

SEQ ID NO: 206168 - DNA, 25 bp, Probe Sequence
gccgctgctgggagagatcccctgg

SEQ ID NO: 206169 - DNA, 25 bp, Probe Sequence
gccgctctagggaagggaccatgga

SEQ ID NO: 206170 - DNA, 25 bp, Probe Sequence
gcccctcaggagcaggtgaagaggc

SEQ ID NO: 206171 - DNA, 25 bp, Probe Sequence
gcccccaggacaagtggtatgacca

SEQ ID NO: 206172 - DNA, 25 bp, Probe Sequence
gccccacaggacggtttatgagcac

SEQ ID NO: 206173 - DNA, 25 bp, Probe Sequence
gcccaccaggtctagatccttatgg

SEQ ID NO: 206174 - DNA, 25 bp, Probe Sequence
gcccccactttaacactctatgtgg

SEQ ID NO: 206175 - DNA, 25 bp, Probe Sequence
gcccctactttaacactctatgtgg

SEQ ID NO: 206176 - DNA, 25 bp, Probe Sequence
gccccatcacttacagaaccaattc

SEQ ID NO: 206177 - DNA, 25 bp, Probe Sequence
gccctatattatggtgacacctata

SEQ ID NO: 206178 - DNA, 25 bp, Probe Sequence
gccgctgtttgtacagacagcctgc

SEQ ID NO: 206179 - DNA, 25 bp, Probe Sequence
gccgctgctttgaaagagaacctag

SEQ ID NO: 206180 - DNA, 25 bp, Probe Sequence
gccgctgcattgagaacaaactgga

SEQ ID NO: 206181 - DNA, 25 bp, Probe Sequence
gccgcttcttcatcatcaacaagga

SEQ ID NO: 206182 - DNA, 25 bp, Probe Sequence
gccgcttttcatcacaagcttgaat

SEQ ID NO: 206183 - DNA, 25 bp, Probe Sequence
gccctgacccaaaaagccatgattg

SEQ ID NO: 206184 - DNA, 25 bp, Probe Sequence
gccctaccacaagaagcggaagtat

SEQ ID NO: 206185 - DNA, 25 bp, Probe Sequence
gcccgatccaaagaagatgtggcag

SEQ ID NO: 206186 - DNA, 25 bp, Probe Sequence
gcccgtgtagaaggcgtgtttgcag

SEQ ID NO: 206187 - DNA, 25 bp, Probe Sequence
gcgcgcctgtaatcccagctactcg

SEQ ID NO: 206188 - DNA, 25 bp, Probe Sequence
gcgcgcgcctgtaatcccagctact

SEQ ID NO: 206189 - DNA, 25 bp, Probe Sequence
gccgctgtctgattttaagctggca

SEQ ID NO: 206190 - DNA, 25 bp, Probe Sequence
gccgctgctctggtttgcagagagc

SEQ ID NO: 206191 - DNA, 25 bp, Probe Sequence
gccgcagccatgagtatgctcaggc

SEQ ID NO: 206192 - DNA, 25 bp, Probe Sequence
gccccagcagtttgatgtcatggtg

SEQ ID NO: 206193 - DNA, 25 bp, Probe Sequence
gccgcagagaagactatgttggtgg

SEQ ID NO: 206194 - DNA, 25 bp, Probe Sequence
gccgctagtgaggctgaggggtgcc

SEQ ID NO: 206195 - DNA, 25 bp, Probe Sequence
gccgctagaggcctgaggatgagct

SEQ ID NO: 206196 - DNA, 25 bp, Probe Sequence
gccctgagtgaccatcatgtatacc

SEQ ID NO: 206197 - DNA, 25 bp, Probe Sequence
gcccttaatccatttaaccctgagt

SEQ ID NO: 206198 - DNA, 25 bp, Probe Sequence
gcccaataaggatttagaaccagag

SEQ ID NO: 206199 - DNA, 25 bp, Probe Sequence
gcccagctacgacatggagtaccag

SEQ ID NO: 206200 - DNA, 25 bp, Probe Sequence
gcccagctacgacatggagtaccag

SEQ ID NO: 206201 - DNA, 25 bp, Probe Sequence
gcccagttggtgaagagacttacag

SEQ ID NO: 206202 - DNA, 25 bp, Probe Sequence
gcccagattggttgaaaaccctgtc

SEQ ID NO: 206203 - DNA, 25 bp, Probe Sequence
gcccaggaggattacttcaacctgg

SEQ ID NO: 206204 - DNA, 25 bp, Probe Sequence
gccctgggcgtgtagtgtaactgga

SEQ ID NO: 206205 - DNA, 25 bp, Probe Sequence
gccctcgtgctggaatggttgtctg

SEQ ID NO: 206206 - DNA, 25 bp, Probe Sequence
gacttactgcggttgcgttagtttc

SEQ ID NO: 206207 - DNA, 25 bp, Probe Sequence
gccccactgaggtgctgttggttta

SEQ ID NO: 206208 - DNA, 25 bp, Probe Sequence
gcgttcctgaagtggccgaggttaa

SEQ ID NO: 206209 - DNA, 25 bp, Probe Sequence
gcgtctccgatcggaggcacgaggc

SEQ ID NO: 206210 - DNA, 25 bp, Probe Sequence
gcccgcttatgcgtatgtgcacggg

SEQ ID NO: 206211 - DNA, 25 bp, Probe Sequence
gccccctatgacgtcatgacggtaa

SEQ ID NO: 206212 - DNA, 25 bp, Probe Sequence
gccccctatgacgtcaatgacggta

SEQ ID NO: 206213 - DNA, 25 bp, Probe Sequence
gccccctatgacgtcaatgacggta

SEQ ID NO: 206214 - DNA, 25 bp, Probe Sequence
gccccctatgacgtcaatgacggta

SEQ ID NO: 206215 - DNA, 25 bp, Probe Sequence
gccccctatgacgtcaatgacggta

SEQ ID NO: 206216 - DNA, 25 bp, Probe Sequence
gcccccattgacgcgaatgggctgt

SEQ ID NO: 206217 - DNA, 25 bp, Probe Sequence
gccccagtgtgggacctatgggctc

SEQ ID NO: 206218 - DNA, 25 bp, Probe Sequence
gcccctggacggtccagcaggtgct

SEQ ID NO: 206219 - DNA, 25 bp, Probe Sequence
gccgcgtggacggatcacgatttca

SEQ ID NO: 206220 - DNA, 25 bp, Probe Sequence
gcccggacacggacaggattgacag

SEQ ID NO: 206221 - DNA, 25 bp, Probe Sequence
gcccaggatcctgggggtcgtggct

SEQ ID NO: 206222 - DNA, 25 bp, Probe Sequence
gccccgctccttaggaatgttagct

SEQ ID NO: 206223 - DNA, 25 bp, Probe Sequence
gccccagctacttgggaggctgaag

SEQ ID NO: 206224 - DNA, 25 bp, Probe Sequence
gccgcctggactgatggaggccaag

SEQ ID NO: 206225 - DNA, 25 bp, Probe Sequence
gccgccggaaggtgggtgacatgtg

SEQ ID NO: 206226 - DNA, 25 bp, Probe Sequence
gccgcccgaaggtacaagttgcaga

SEQ ID NO: 206227 - DNA, 25 bp, Probe Sequence
gcccccagaagcgcagaagattgta

SEQ ID NO: 206228 - DNA, 25 bp, Probe Sequence
gcccccatgacggcaagacggtaaa

SEQ ID NO: 206229 - DNA, 25 bp, Probe Sequence
gccccactgtcatcaagataaaaac

SEQ ID NO: 206230 - DNA, 25 bp, Probe Sequence
gcccgcatattaggcgcagataaaa

SEQ ID NO: 206231 - DNA, 25 bp, Probe Sequence
gccccatttagccctgatatgatta

SEQ ID NO: 206232 - DNA, 25 bp, Probe Sequence
gccccttagccagttgtatattatt

SEQ ID NO: 206233 - DNA, 25 bp, Probe Sequence
gccctctttccaagctggacaattt

SEQ ID NO: 206234 - DNA, 25 bp, Probe Sequence
gcccattctaccaacggaattctta

SEQ ID NO: 206235 - DNA, 25 bp, Probe Sequence
gcgacttccacaacctggatttttt

SEQ ID NO: 206236 - DNA, 25 bp, Probe Sequence
ggggtttcttcctgatttttagcag

SEQ ID NO: 206237 - DNA, 25 bp, Probe Sequence
ggggtttcttcctgatttttagcag

SEQ ID NO: 206238 - DNA, 25 bp, Probe Sequence
gctggtttttacaccttgatttcga

SEQ ID NO: 206239 - DNA, 25 bp, Probe Sequence
gcgtttttaacctgcaagttctcag

SEQ ID NO: 206240 - DNA, 25 bp, Probe Sequence
gcgtctttcatcacttgtgggtttc

SEQ ID NO: 206241 - DNA, 25 bp, Probe Sequence
gccctttacctcctgtgggtgaatg

SEQ ID NO: 206242 - DNA, 25 bp, Probe Sequence
gcccttcagcggcgagtgggtaatt

SEQ ID NO: 206243 - DNA, 25 bp, Probe Sequence
gcccttcagggagatgggggtcatt

SEQ ID NO: 206244 - DNA, 25 bp, Probe Sequence
gcccttcagggagatgggggtcatt

SEQ ID NO: 206245 - DNA, 25 bp, Probe Sequence
gcccttaaggaggtcgtggtcttgt

SEQ ID NO: 206246 - DNA, 25 bp, Probe Sequence
gcccttaggccgttgggactttgat

SEQ ID NO: 206247 - DNA, 25 bp, Probe Sequence
gcccttaggccgttgggactttgat

SEQ ID NO: 206248 - DNA, 25 bp, Probe Sequence
gcccatttacacttttgagactttt

SEQ ID NO: 206249 - DNA, 25 bp, Probe Sequence
gccctcattaaccatttcaatctga

SEQ ID NO: 206250 - DNA, 25 bp, Probe Sequence
gccccattgaatgcaagtgatacta

SEQ ID NO: 206251 - DNA, 25 bp, Probe Sequence
gccccaggaagcgaaggaacaaaag

SEQ ID NO: 206252 - DNA, 25 bp, Probe Sequence
gccccagcaggtggcaatggcaaca

SEQ ID NO: 206253 - DNA, 25 bp, Probe Sequence
gcccttatggggtatggcatcagct

SEQ ID NO: 206254 - DNA, 25 bp, Probe Sequence
gccctcctggtatttgacaactgcc

SEQ ID NO: 206255 - DNA, 25 bp, Probe Sequence
gccctcctgcagtatttatggcctc

SEQ ID NO: 206256 - DNA, 25 bp, Probe Sequence
gccccctgcaatctttggaggagtc

SEQ ID NO: 206257 - DNA, 25 bp, Probe Sequence
gcccctgcccttattgggggacaga

SEQ ID NO: 206258 - DNA, 25 bp, Probe Sequence
gcaacctccccttcttggggaaatg

SEQ ID NO: 206259 - DNA, 25 bp, Probe Sequence
gcaccttcccacattcgaaggaaga

SEQ ID NO: 206260 - DNA, 25 bp, Probe Sequence
gccctgtccaccaggataagtgaca

SEQ ID NO: 206261 - DNA, 25 bp, Probe Sequence
gccctgagcccacggaaaaggccag

SEQ ID NO: 206262 - DNA, 25 bp, Probe Sequence
gcccgacctggcggataaagtggcc

SEQ ID NO: 206263 - DNA, 25 bp, Probe Sequence
gcccccactgtggagataagaaggg

SEQ ID NO: 206264 - DNA, 25 bp, Probe Sequence
gcccctcactgggttcggaggagag

SEQ ID NO: 206265 - DNA, 25 bp, Probe Sequence
gcccaccttgatcatcggggaggag

SEQ ID NO: 206266 - DNA, 25 bp, Probe Sequence
gcccctctctacatctggggatgca

SEQ ID NO: 206267 - DNA, 25 bp, Probe Sequence
gccccattctcactgctatctgggg

SEQ ID NO: 206268 - DNA, 25 bp, Probe Sequence
gccgccattgactgctatatggttc

SEQ ID NO: 206269 - DNA, 25 bp, Probe Sequence
gccccttcactggtaatgtgtccat

SEQ ID NO: 206270 - DNA, 25 bp, Probe Sequence
gcccctctactgtaaatgtgcctta

SEQ ID NO: 206271 - DNA, 25 bp, Probe Sequence
gccccattgacgcaaatggcggtag

SEQ ID NO: 206272 - DNA, 25 bp, Probe Sequence
gccccattgacgcaaatggccggta

SEQ ID NO: 206273 - DNA, 25 bp, Probe Sequence
gccccatggacgcaaatggccggta

SEQ ID NO: 206274 - DNA, 25 bp, Probe Sequence
gccccatggaggccaaatggccgtt

SEQ ID NO: 206275 - DNA, 25 bp, Probe Sequence
gccccatgcgagtccagaaggaggt

SEQ ID NO: 206276 - DNA, 25 bp, Probe Sequence
gccccagcaagagcacaagaggaag

SEQ ID NO: 206277 - DNA, 25 bp, Probe Sequence
gccccagcaagagcacaagaggaag

SEQ ID NO: 206278 - DNA, 25 bp, Probe Sequence
gcccctgcacaagacaacagaatcc

SEQ ID NO: 206279 - DNA, 25 bp, Probe Sequence
gccctccagccagggcaacagagca

SEQ ID NO: 206280 - DNA, 25 bp, Probe Sequence
gccctcaaggtgctcaacatgatgc

SEQ ID NO: 206281 - DNA, 25 bp, Probe Sequence
gcccatgcaaggctactactgatca

SEQ ID NO: 206282 - DNA, 25 bp, Probe Sequence
gcccagccagtaagcactacaatca

SEQ ID NO: 206283 - DNA, 25 bp, Probe Sequence
gccccactgacaagcactgacagac

SEQ ID NO: 206284 - DNA, 25 bp, Probe Sequence
gccctgactgacaaggccatcgtga

SEQ ID NO: 206285 - DNA, 25 bp, Probe Sequence
gccctgcacgggagacaggtctgtc

SEQ ID NO: 206286 - DNA, 25 bp, Probe Sequence
gcccatagccggacggggatctgag

SEQ ID NO: 206287 - DNA, 25 bp, Probe Sequence
gccgcccctacttgggaattgagga

SEQ ID NO: 206288 - DNA, 25 bp, Probe Sequence
gcagtcccctacaagtggtggggga

SEQ ID NO: 206289 - DNA, 25 bp, Probe Sequence
gcccctcctgcagcgaggatgggag

SEQ ID NO: 206290 - DNA, 25 bp, Probe Sequence
gcccgctcctcagtgggggaaggag

SEQ ID NO: 206291 - DNA, 25 bp, Probe Sequence
gcgtcctctttcttggggaagttga

SEQ ID NO: 206292 - DNA, 25 bp, Probe Sequence
gcttcctttctacaggacgaattga

SEQ ID NO: 206293 - DNA, 25 bp, Probe Sequence
gattaccccgggagactgaactgca

SEQ ID NO: 206294 - DNA, 25 bp, Probe Sequence
gattagccttcgcggggcaaaatgg

SEQ ID NO: 206295 - DNA, 25 bp, Probe Sequence
gttggcttaccatgggaaaacaggt

SEQ ID NO: 206296 - DNA, 25 bp, Probe Sequence
gctgtggtttcctactagaggtaat

SEQ ID NO: 206297 - DNA, 25 bp, Probe Sequence
gcagataatttttagcttagggcct

SEQ ID NO: 206298 - DNA, 25 bp, Probe Sequence
ggaaattcgtgatgttagtaacctt

SEQ ID NO: 206299 - DNA, 25 bp, Probe Sequence
gcgacaactccgtgtagcattaacc

SEQ ID NO: 206300 - DNA, 25 bp, Probe Sequence
gcccagaccacgtgggacagaactc

SEQ ID NO: 206301 - DNA, 25 bp, Probe Sequence
gcccagacgccgtggaggtcacggg

SEQ ID NO: 206302 - DNA, 25 bp, Probe Sequence
gcccaaggtcgtaagcaagctactg

SEQ ID NO: 206303 - DNA, 25 bp, Probe Sequence
gccccaggttgataaatctattgat

SEQ ID NO: 206304 - DNA, 25 bp, Probe Sequence
gccccaggttgataaatctattgat

SEQ ID NO: 206305 - DNA, 25 bp, Probe Sequence
gccccacctctgtaaaggctttgtg

SEQ ID NO: 206306 - DNA, 25 bp, Probe Sequence
gcccctctttgtaaggccttgtatg

SEQ ID NO: 206307 - DNA, 25 bp, Probe Sequence
gcccacacgttgtatttggttgata

SEQ ID NO: 206308 - DNA, 25 bp, Probe Sequence
gcccaagtgttgtctctttgttgtc

SEQ ID NO: 206309 - DNA, 25 bp, Probe Sequence
gcccaactgtcaaccttgacaaatt

SEQ ID NO: 206310 - DNA, 25 bp, Probe Sequence
gcccccgtcattggcttaaaatgtg

SEQ ID NO: 206311 - DNA, 25 bp, Probe Sequence
gcccccgtatgagaataaatattgg

SEQ ID NO: 206312 - DNA, 25 bp, Probe Sequence
gcccctcctagatacatacaatctt

SEQ ID NO: 206313 - DNA, 25 bp, Probe Sequence
gccctatcctctccaaatgaaatct

SEQ ID NO: 206314 - DNA, 25 bp, Probe Sequence
gccccatccacaacaaatgattatt

SEQ ID NO: 206315 - DNA, 25 bp, Probe Sequence
gccgccactcgcaacatggagaaga

SEQ ID NO: 206316 - DNA, 25 bp, Probe Sequence
gccctcaccgagtcagagacggagt

SEQ ID NO: 206317 - DNA, 25 bp, Probe Sequence
gccctgcacctgtgcagcgaagctt

SEQ ID NO: 206318 - DNA, 25 bp, Probe Sequence
gccctactcgggatgagtgctttgc

SEQ ID NO: 206319 - DNA, 25 bp, Probe Sequence
gccctacaaggagtggagtgctgtc

SEQ ID NO: 206320 - DNA, 25 bp, Probe Sequence
gcccgacaagaataactatgctgcc

SEQ ID NO: 206321 - DNA, 25 bp, Probe Sequence
gcccgacatcttttaatcattcacc

SEQ ID NO: 206322 - DNA, 25 bp, Probe Sequence
gccccactttcaagaatcagacagc

SEQ ID NO: 206323 - DNA, 25 bp, Probe Sequence
gccccagattacatgtatctgaggc

SEQ ID NO: 206324 - DNA, 25 bp, Probe Sequence
gcccagaattacaagtatggagccc

SEQ ID NO: 206325 - DNA, 25 bp, Probe Sequence
gccccatttgaattgtaagcactct

SEQ ID NO: 206326 - DNA, 25 bp, Probe Sequence
gccgccaatatgcactgtacattcc

SEQ ID NO: 206327 - DNA, 25 bp, Probe Sequence
gccgcctgcaatcaggtgaatatac

SEQ ID NO: 206328 - DNA, 25 bp, Probe Sequence
gcccctgcgggatggcattgatgac

SEQ ID NO: 206329 - DNA, 25 bp, Probe Sequence
gcccctgcgggatggcattgatgac

SEQ ID NO: 206330 - DNA, 25 bp, Probe Sequence
gccccatctgctcaaggatgtgggc

SEQ ID NO: 206331 - DNA, 25 bp, Probe Sequence
gccccttgtgctcagagtggatgtt

SEQ ID NO: 206332 - DNA, 25 bp, Probe Sequence
gccccattctgcatgagaatttggt

SEQ ID NO: 206333 - DNA, 25 bp, Probe Sequence
gccccattccttggtaattagccac

SEQ ID NO: 206334 - DNA, 25 bp, Probe Sequence
gccccacccctgggagatgtagcaa

SEQ ID NO: 206335 - DNA, 25 bp, Probe Sequence
gccccaccagcctaaggtgttcagg

SEQ ID NO: 206336 - DNA, 25 bp, Probe Sequence
gccccattcacctgtggatttgtgc

SEQ ID NO: 206337 - DNA, 25 bp, Probe Sequence
gctgcaaatccagctttgttttggg

SEQ ID NO: 206338 - DNA, 25 bp, Probe Sequence
gctgcaatgaccatcgttttcactt

SEQ ID NO: 206339 - DNA, 25 bp, Probe Sequence
gcgagtacctatggtatgttctctt

SEQ ID NO: 206340 - DNA, 25 bp, Probe Sequence
gagttgacgtatgtgggacctagcc

SEQ ID NO: 206341 - DNA, 25 bp, Probe Sequence
gcagttagtttgcgggaactcagct

SEQ ID NO: 206342 - DNA, 25 bp, Probe Sequence
gctgttggtcaggacgggaagctgg

SEQ ID NO: 206343 - DNA, 25 bp, Probe Sequence
gccctgataagcggctggtgacgct

SEQ ID NO: 206344 - DNA, 25 bp, Probe Sequence
gccctgaagattgaggctacagtga

SEQ ID NO: 206345 - DNA, 25 bp, Probe Sequence
gcccaagagactggagaccaatatg

SEQ ID NO: 206346 - DNA, 25 bp, Probe Sequence
gccccagactctgcaacaacatgga

SEQ ID NO: 206347 - DNA, 25 bp, Probe Sequence
gccccagatttgacgtgcaactcaa

SEQ ID NO: 206348 - DNA, 25 bp, Probe Sequence
gcccgaagtggtcctggactcagat

SEQ ID NO: 206349 - DNA, 25 bp, Probe Sequence
gcccctcgtgtgaccatagattgag

SEQ ID NO: 206350 - DNA, 25 bp, Probe Sequence
gcccctggtctgtgatcagcaagaa

SEQ ID NO: 206351 - DNA, 25 bp, Probe Sequence
gcccctggcactgattgacaagcag

SEQ ID NO: 206352 - DNA, 25 bp, Probe Sequence
gcccctggagatgattgagccgcgc

SEQ ID NO: 206353 - DNA, 25 bp, Probe Sequence
gcccctggatgctaacaggggcgcc

SEQ ID NO: 206354 - DNA, 25 bp, Probe Sequence
gccccatgggcacgggaggggcgcc

SEQ ID NO: 206355 - DNA, 25 bp, Probe Sequence
gcccctgggattagccaggtgggct

SEQ ID NO: 206356 - DNA, 25 bp, Probe Sequence
gcccctggggtttgcagggtgctgc

SEQ ID NO: 206357 - DNA, 25 bp, Probe Sequence
gccctcgggctttgatgggtggcag

SEQ ID NO: 206358 - DNA, 25 bp, Probe Sequence
gccctttgtgtttgaggatgcttaa

SEQ ID NO: 206359 - DNA, 25 bp, Probe Sequence
gccctttgtcttcagtggctgtgga

SEQ ID NO: 206360 - DNA, 25 bp, Probe Sequence
gccccattatttagattgagcttgt

SEQ ID NO: 206361 - DNA, 25 bp, Probe Sequence
gccccatctgatgttatatgactat

SEQ ID NO: 206362 - DNA, 25 bp, Probe Sequence
gccccattaaggaatcagagatcat

SEQ ID NO: 206363 - DNA, 25 bp, Probe Sequence
gccccttgatgggaacatcagatct

SEQ ID NO: 206364 - DNA, 25 bp, Probe Sequence
gccccatctgtcgagatcacaagtt

SEQ ID NO: 206365 - DNA, 25 bp, Probe Sequence
gccccactggcagtacatcaagtgt

SEQ ID NO: 206366 - DNA, 25 bp, Probe Sequence
gccccacggaggaatgcaaggcctg

SEQ ID NO: 206367 - DNA, 25 bp, Probe Sequence
gccccacggaggaatgcaaggcctg

SEQ ID NO: 206368 - DNA, 25 bp, Probe Sequence
gcccccgagcaagatgcagaagccc

SEQ ID NO: 206369 - DNA, 25 bp, Probe Sequence
gcccccgaagctctgcagaagaagc

SEQ ID NO: 206370 - DNA, 25 bp, Probe Sequence
gccccctgacctgtgagaaggacgg

SEQ ID NO: 206371 - DNA, 25 bp, Probe Sequence
gccccctgggtaatagtgaagagcg

SEQ ID NO: 206372 - DNA, 25 bp, Probe Sequence
gcccttcgcacataaatgtgaacag

SEQ ID NO: 206373 - DNA, 25 bp, Probe Sequence
gccctatcgaagccagaaagccaag

SEQ ID NO: 206374 - DNA, 25 bp, Probe Sequence
gccctgactaccctggaagtagcag

SEQ ID NO: 206375 - DNA, 25 bp, Probe Sequence
gccctgcctacttggaaagttgagg

SEQ ID NO: 206376 - DNA, 25 bp, Probe Sequence
gccctgctcccaagtacaaatagag

SEQ ID NO: 206377 - DNA, 25 bp, Probe Sequence
gccctgctacctagtttgttagtgc

SEQ ID NO: 206378 - DNA, 25 bp, Probe Sequence
gcccatggcatcatagttgtgtatg

SEQ ID NO: 206379 - DNA, 25 bp, Probe Sequence
gccctgctgctggggttgattttga

SEQ ID NO: 206380 - DNA, 25 bp, Probe Sequence
gccctcaggaggttgtgtcttgtag

SEQ ID NO: 206381 - DNA, 25 bp, Probe Sequence
gccctcgagatgattatcgtaggag

SEQ ID NO: 206382 - DNA, 25 bp, Probe Sequence
gcccacgacaggatttggagatgga

SEQ ID NO: 206383 - DNA, 25 bp, Probe Sequence
gcccctccagggttgaaggcaagag

SEQ ID NO: 206384 - DNA, 25 bp, Probe Sequence
gccccagctaaggttgaagccaagg

SEQ ID NO: 206385 - DNA, 25 bp, Probe Sequence
gccccagcctaggtggaggcaagtg

SEQ ID NO: 206386 - DNA, 25 bp, Probe Sequence
gcccgagcctgggtgggagctgggc

SEQ ID NO: 206387 - DNA, 25 bp, Probe Sequence
gcccgagcctgggtgggagctgggc

SEQ ID NO: 206388 - DNA, 25 bp, Probe Sequence
gcccgggatggagtgcagtgagccg

SEQ ID NO: 206389 - DNA, 25 bp, Probe Sequence
gccctggggcagatggtgagctctg

SEQ ID NO: 206390 - DNA, 25 bp, Probe Sequence
gccctgtgggctgtgccaagtgtgc

SEQ ID NO: 206391 - DNA, 25 bp, Probe Sequence
gccctgtgggctgtgccaagtgtgc

SEQ ID NO: 206392 - DNA, 25 bp, Probe Sequence
gcccggtgtgcgggtgcactatggc

SEQ ID NO: 206393 - DNA, 25 bp, Probe Sequence
gccctgtttgcctgtgtggatggca

SEQ ID NO: 206394 - DNA, 25 bp, Probe Sequence
gcccctctgtggggatgcgtggtgc

SEQ ID NO: 206395 - DNA, 25 bp, Probe Sequence
gcccccattggacgtcaaagacggt

SEQ ID NO: 206396 - DNA, 25 bp, Probe Sequence
gccccctatggacgtcaaagacggt

SEQ ID NO: 206397 - DNA, 25 bp, Probe Sequence
gccccctatggacgtcaatgacggt

SEQ ID NO: 206398 - DNA, 25 bp, Probe Sequence
gccccctgagagaatggagttcagt

SEQ ID NO: 206399 - DNA, 25 bp, Probe Sequence
gccccctatatgtaaagttcagttt

SEQ ID NO: 206400 - DNA, 25 bp, Probe Sequence
gggtcctttggagttactgcagtta

SEQ ID NO: 206401 - DNA, 25 bp, Probe Sequence
gcgattccctcgtcaatttgggttg

SEQ ID NO: 206402 - DNA, 25 bp, Probe Sequence
gcgtgatccccgggattgtgggggc

SEQ ID NO: 206403 - DNA, 25 bp, Probe Sequence
gcccgccccatgggattgagggacg

SEQ ID NO: 206404 - DNA, 25 bp, Probe Sequence
gccccctctgcgggatgtgaggaca

SEQ ID NO: 206405 - DNA, 25 bp, Probe Sequence
gccctcacgtgggtgtgaaggacgt

SEQ ID NO: 206406 - DNA, 25 bp, Probe Sequence
gccctacctgctgttgcaattggca

SEQ ID NO: 206407 - DNA, 25 bp, Probe Sequence
gcccaacacttgacagtcatatttc

SEQ ID NO: 206408 - DNA, 25 bp, Probe Sequence
gcccaacaaggaatttatgctctgc

SEQ ID NO: 206409 - DNA, 25 bp, Probe Sequence
gcccgtattgggaattatcatctgg

SEQ ID NO: 206410 - DNA, 25 bp, Probe Sequence
gcccaggactggagctttctctggc

SEQ ID NO: 206411 - DNA, 25 bp, Probe Sequence
gcccaggactgcattgttttctagc

SEQ ID NO: 206412 - DNA, 25 bp, Probe Sequence
gcccagaactgcatttgattaaaga

SEQ ID NO: 206413 - DNA, 25 bp, Probe Sequence
gcccaacaccttcttctaggtgcag

SEQ ID NO: 206414 - DNA, 25 bp, Probe Sequence
gcgcgcaacagccatggcttttaag

SEQ ID NO: 206415 - DNA, 25 bp, Probe Sequence
gccctggggcagaagctgcccagaa

SEQ ID NO: 206416 - DNA, 25 bp, Probe Sequence
gcccttggagaccagtcacaaatac

SEQ ID NO: 206417 - DNA, 25 bp, Probe Sequence
gccctttggtcactgtaaatatgaa

SEQ ID NO: 206418 - DNA, 25 bp, Probe Sequence
gcccattggttctctctaattcaat

SEQ ID NO: 206419 - DNA, 25 bp, Probe Sequence
gcacctttcttctgttcaagttttc

SEQ ID NO: 206420 - DNA, 25 bp, Probe Sequence
gcgcagtttttttttcttgtctata

SEQ ID NO: 206421 - DNA, 25 bp, Probe Sequence
gcccttgctcttatttttggcagaa

SEQ ID NO: 206422 - DNA, 25 bp, Probe Sequence
gccctttgtcccattatttggagca

SEQ ID NO: 206423 - DNA, 25 bp, Probe Sequence
gcccccttaaactttgtcatggaga

SEQ ID NO: 206424 - DNA, 25 bp, Probe Sequence
gccctggttccatgtttctgatggg

SEQ ID NO: 206425 - DNA, 25 bp, Probe Sequence
gccctggcacggtgtattctggggc

SEQ ID NO: 206426 - DNA, 25 bp, Probe Sequence
gccctggccggggagttcatcaggg

SEQ ID NO: 206427 - DNA, 25 bp, Probe Sequence
gccctgtgtggggtgggtacactgg

SEQ ID NO: 206428 - DNA, 25 bp, Probe Sequence
gccctgttgggtatagatgacctgg

SEQ ID NO: 206429 - DNA, 25 bp, Probe Sequence
gccctttgctttctattacttgtgc

SEQ ID NO: 206430 - DNA, 25 bp, Probe Sequence
gccctatgatctatcctttacttga

SEQ ID NO: 206431 - DNA, 25 bp, Probe Sequence
gcccattgacgtcataattgacgta

SEQ ID NO: 206432 - DNA, 25 bp, Probe Sequence
gcccagtggagtaatttatgcctta

SEQ ID NO: 206433 - DNA, 25 bp, Probe Sequence
gcccactgggtgaagttaagctgta

SEQ ID NO: 206434 - DNA, 25 bp, Probe Sequence
gcgctcacgcaagcatggttaacgt

SEQ ID NO: 206435 - DNA, 25 bp, Probe Sequence
gcccaccaaccaagtgttacaagcc

SEQ ID NO: 206436 - DNA, 25 bp, Probe Sequence
gcccctacacgaagctgcttgagca

SEQ ID NO: 206437 - DNA, 25 bp, Probe Sequence
gccccatgacctttctttgaagaac

SEQ ID NO: 206438 - DNA, 25 bp, Probe Sequence
gccccgattgctcctgttaaaggaa

SEQ ID NO: 206439 - DNA, 25 bp, Probe Sequence
gccctccattgtttgtcatgaaatt

SEQ ID NO: 206440 - DNA, 25 bp, Probe Sequence
gcccattcatttgctgattatactt

SEQ ID NO: 206441 - DNA, 25 bp, Probe Sequence
gccctatctttgggatttacatgga

SEQ ID NO: 206442 - DNA, 25 bp, Probe Sequence
gcccttccttgagatgatacacgag

SEQ ID NO: 206443 - DNA, 25 bp, Probe Sequence
gcgtccctttacagaatgacaggcc

SEQ ID NO: 206444 - DNA, 25 bp, Probe Sequence
gcgctacaattttcattatcttaag

SEQ ID NO: 206445 - DNA, 25 bp, Probe Sequence
gcacttaattcttcccatttcaaaa

SEQ ID NO: 206446 - DNA, 25 bp, Probe Sequence
gccctgaagctggaaccttccaaca

SEQ ID NO: 206447 - DNA, 25 bp, Probe Sequence
gcccattagggacactatagaacaa

SEQ ID NO: 206448 - DNA, 25 bp, Probe Sequence
gcccagctcagggataaccagggac

SEQ ID NO: 206449 - DNA, 25 bp, Probe Sequence
gcccagccagttaagcacaaaggaa

SEQ ID NO: 206450 - DNA, 25 bp, Probe Sequence
gcccagactttacgactacacaata

SEQ ID NO: 206451 - DNA, 25 bp, Probe Sequence
gcccagacttctccaaggacaacag

SEQ ID NO: 206452 - DNA, 25 bp, Probe Sequence
gcccagacttctccaaggacaacag

SEQ ID NO: 206453 - DNA, 25 bp, Probe Sequence
gcccccttttgacggtcaatgcggt

SEQ ID NO: 206454 - DNA, 25 bp, Probe Sequence
gcccccttattggacgttcatggac

SEQ ID NO: 206455 - DNA, 25 bp, Probe Sequence
gcccctcctttgtcacagattagga

SEQ ID NO: 206456 - DNA, 25 bp, Probe Sequence
gcccctcttttgtcacagattagga

SEQ ID NO: 206457 - DNA, 25 bp, Probe Sequence
gccctgcatctatttgaaagcatac

SEQ ID NO: 206458 - DNA, 25 bp, Probe Sequence
gcccccgtattgacgtcatgacggt

SEQ ID NO: 206459 - DNA, 25 bp, Probe Sequence
gcccaacgattctcgtcatgaccga

SEQ ID NO: 206460 - DNA, 25 bp, Probe Sequence
gccctatggatgttccgtctgtggg

SEQ ID NO: 206461 - DNA, 25 bp, Probe Sequence
gcccgtggacttgcgactgggagac

SEQ ID NO: 206462 - DNA, 25 bp, Probe Sequence
gcccgcaagcagagggactcggaga

SEQ ID NO: 206463 - DNA, 25 bp, Probe Sequence
gccctggcagaaggggagcccgagg

SEQ ID NO: 206464 - DNA, 25 bp, Probe Sequence
gccctggctgaaggagaaactccaa

SEQ ID NO: 206465 - DNA, 25 bp, Probe Sequence
gccctgcctgaagtgcgagaaatgt

SEQ ID NO: 206466 - DNA, 25 bp, Probe Sequence
gccctgcctgtgtgggagggtggtt

SEQ ID NO: 206467 - DNA, 25 bp, Probe Sequence
gccctgcctgtgtgggagggtggtt

SEQ ID NO: 206468 - DNA, 25 bp, Probe Sequence
gcccgctttacctatggtggttgtt

SEQ ID NO: 206469 - DNA, 25 bp, Probe Sequence
gccccttttaccagtggctgaatct

SEQ ID NO: 206470 - DNA, 25 bp, Probe Sequence
gcccatcttctgaatcccttgggaa

SEQ ID NO: 206471 - DNA, 25 bp, Probe Sequence
gctacttttgaagccttgcctaaga

SEQ ID NO: 206472 - DNA, 25 bp, Probe Sequence
gcgatttttggtgccttacttttat

SEQ ID NO: 206473 - DNA, 25 bp, Probe Sequence
gctctttattggtggcttaagcttt

SEQ ID NO: 206474 - DNA, 25 bp, Probe Sequence
gcacttgggattggggttaagcctt

SEQ ID NO: 206475 - DNA, 25 bp, Probe Sequence
gccctggctttaaggtttagctcca

SEQ ID NO: 206476 - DNA, 25 bp, Probe Sequence
gcccgtgtttcaaagtcttcatgcc

SEQ ID NO: 206477 - DNA, 25 bp, Probe Sequence
gcccctttatcacagagtatgctat

SEQ ID NO: 206478 - DNA, 25 bp, Probe Sequence
gccctctaataagacattagctgtc

SEQ ID NO: 206479 - DNA, 25 bp, Probe Sequence
gcccctatgatttgtcactatagat

SEQ ID NO: 206480 - DNA, 25 bp, Probe Sequence
gcccctagattgctcaatcaatcac

SEQ ID NO: 206481 - DNA, 25 bp, Probe Sequence
gccctgcttttgcataatgcaatca

SEQ ID NO: 206482 - DNA, 25 bp, Probe Sequence
gccctgttgtgtatagatgcaagat

SEQ ID NO: 206483 - DNA, 25 bp, Probe Sequence
gcccgttcagatctgcgagaagtgc

SEQ ID NO: 206484 - DNA, 25 bp, Probe Sequence
gcccttgtcagattcctgggcactc

SEQ ID NO: 206485 - DNA, 25 bp, Probe Sequence
gccctttaatcagcataggcactaa

SEQ ID NO: 206486 - DNA, 25 bp, Probe Sequence
gcccattccagagcctaagcctgga

SEQ ID NO: 206487 - DNA, 25 bp, Probe Sequence
gcccattcctacctcggaggtggag

SEQ ID NO: 206488 - DNA, 25 bp, Probe Sequence
gccctaccaaccttgaagagttctg

SEQ ID NO: 206489 - DNA, 25 bp, Probe Sequence
gccctacacaggccttcagaaggtc

SEQ ID NO: 206490 - DNA, 25 bp, Probe Sequence
gcccataatcacactgtcaactgtt

SEQ ID NO: 206491 - DNA, 25 bp, Probe Sequence
gccctctaataagatatcagctgtc

SEQ ID NO: 206492 - DNA, 25 bp, Probe Sequence
gccctctagtcagttatattgctat

SEQ ID NO: 206493 - DNA, 25 bp, Probe Sequence
gccctctgagatggcgtatctatcg

SEQ ID NO: 206494 - DNA, 25 bp, Probe Sequence
gccctctgatgatggcattctcctg

SEQ ID NO: 206495 - DNA, 25 bp, Probe Sequence
gccccgctacatagttcacctgggg

SEQ ID NO: 206496 - DNA, 25 bp, Probe Sequence
gcccacctgaggatcatcgacgggg

SEQ ID NO: 206497 - DNA, 25 bp, Probe Sequence
gcgcccctgcagattccagcagggt

SEQ ID NO: 206498 - DNA, 25 bp, Probe Sequence
gccctgccagcgaattccagaggca

SEQ ID NO: 206499 - DNA, 25 bp, Probe Sequence
gcccgtcatgctactcatcgtagcc

SEQ ID NO: 206500 - DNA, 25 bp, Probe Sequence
gcccattcatgtagctacagttagc

SEQ ID NO: 206501 - DNA, 25 bp, Probe Sequence
gccctctgcttcaacatcgatgaag

SEQ ID NO: 206502 - DNA, 25 bp, Probe Sequence
gcccctgtgtgtgctcagtgccatg

SEQ ID NO: 206503 - DNA, 25 bp, Probe Sequence
gcccggatgttgatcatgctggtgg

SEQ ID NO: 206504 - DNA, 25 bp, Probe Sequence
gcccgaatgttgttgcacaggtgct

SEQ ID NO: 206505 - DNA, 25 bp, Probe Sequence
gcccgtggttgtagtgcagagtgcc

SEQ ID NO: 206506 - DNA, 25 bp, Probe Sequence
gcgccggcttcgaggagggcaagaa

SEQ ID NO: 206507 - DNA, 25 bp, Probe Sequence
gcgccgcaaaaccgggggcaagaga

SEQ ID NO: 206508 - DNA, 25 bp, Probe Sequence
gcgccgcaaaaccgggggcaagaga

SEQ ID NO: 206509 - DNA, 25 bp, Probe Sequence
gcgccgcaaaaccgggggcaagaga

SEQ ID NO: 206510 - DNA, 25 bp, Probe Sequence
gcccgcatggttgggtgggagcaaa

SEQ ID NO: 206511 - DNA, 25 bp, Probe Sequence
gccctgattgggcactggtgaaaag

SEQ ID NO: 206512 - DNA, 25 bp, Probe Sequence
gccctcgtgggcacattgttaattg

SEQ ID NO: 206513 - DNA, 25 bp, Probe Sequence
gcgactagggacacttgtaaataga

SEQ ID NO: 206514 - DNA, 25 bp, Probe Sequence
gcccgaggagcctcctgaaggtgga

SEQ ID NO: 206515 - DNA, 25 bp, Probe Sequence
gcccaagtaccgtggaaggtggatt

SEQ ID NO: 206516 - DNA, 25 bp, Probe Sequence
gcgccagtggagtgggtgaaaggga

SEQ ID NO: 206517 - DNA, 25 bp, Probe Sequence
gctccgtgggcgaggtacagtggga

SEQ ID NO: 206518 - DNA, 25 bp, Probe Sequence
gccctgggcgatgaggtacggtggg

SEQ ID NO: 206519 - DNA, 25 bp, Probe Sequence
gcccgtgctggaaaagtgagaggtc

SEQ ID NO: 206520 - DNA, 25 bp, Probe Sequence
gcccgcgctgcagcaagaaggtgta

SEQ ID NO: 206521 - DNA, 25 bp, Probe Sequence
gcccctgctgcagcagaggagaaga

SEQ ID NO: 206522 - DNA, 25 bp, Probe Sequence
gccccgagatgccgagcaagaagaa

SEQ ID NO: 206523 - DNA, 25 bp, Probe Sequence
gccccgatcatgcggaggtcagtca

SEQ ID NO: 206524 - DNA, 25 bp, Probe Sequence
gcgcaccagaagctaaagtcttgat

SEQ ID NO: 206525 - DNA, 25 bp, Probe Sequence
gcccctgtacatccaagagtctggt

SEQ ID NO: 206526 - DNA, 25 bp, Probe Sequence
gcccactgaatataaccctggtttt

SEQ ID NO: 206527 - DNA, 25 bp, Probe Sequence
gcccagctactaaaaatacttgtat

SEQ ID NO: 206528 - DNA, 25 bp, Probe Sequence
gcccaggacgattcagaaactgttt

SEQ ID NO: 206529 - DNA, 25 bp, Probe Sequence
gccctggtcgcataaatttgtctgt

SEQ ID NO: 206530 - DNA, 25 bp, Probe Sequence
gccctgaggtgttacaatcttgtct

SEQ ID NO: 206531 - DNA, 25 bp, Probe Sequence
gccctgggtgtctacaataggctca

SEQ ID NO: 206532 - DNA, 25 bp, Probe Sequence
gcccttggtggcagcaatagagcaa

SEQ ID NO: 206533 - DNA, 25 bp, Probe Sequence
gcccctgggagcggaaaggaaacag

SEQ ID NO: 206534 - DNA, 25 bp, Probe Sequence
gcccgctgggagggtacatggatga

SEQ ID NO: 206535 - DNA, 25 bp, Probe Sequence
gccccggcagagattatgcagtaag

SEQ ID NO: 206536 - DNA, 25 bp, Probe Sequence
gccccggagcagattgcagcggaca

SEQ ID NO: 206537 - DNA, 25 bp, Probe Sequence
gccccgcaagaggtgtggctggacc

SEQ ID NO: 206538 - DNA, 25 bp, Probe Sequence
gccccgcaagaggtgtggctggacc

SEQ ID NO: 206539 - DNA, 25 bp, Probe Sequence
gccctgatgaagcttgagttggtcc

SEQ ID NO: 206540 - DNA, 25 bp, Probe Sequence
gccctatgagatctgggtggaggcc

SEQ ID NO: 206541 - DNA, 25 bp, Probe Sequence
gcgcattaactgcctggaagggacc

SEQ ID NO: 206542 - DNA, 25 bp, Probe Sequence
gcccaagatctgacggaagctgagg

SEQ ID NO: 206543 - DNA, 25 bp, Probe Sequence
gccctggacttcgagcaagagatgg

SEQ ID NO: 206544 - DNA, 25 bp, Probe Sequence
gcccgagccatatagcaggcacgtc

SEQ ID NO: 206545 - DNA, 25 bp, Probe Sequence
gcccgagccatatagcaggcacgtc

SEQ ID NO: 206546 - DNA, 25 bp, Probe Sequence
gcccgagccatatagcaggcacgtc

SEQ ID NO: 206547 - DNA, 25 bp, Probe Sequence
gcccggaatgcagagctccggctgc

SEQ ID NO: 206548 - DNA, 25 bp, Probe Sequence
gccctggaagagcactactggatgt

SEQ ID NO: 206549 - DNA, 25 bp, Probe Sequence
gccctggaagagcagcacagcctgc

SEQ ID NO: 206550 - DNA, 25 bp, Probe Sequence
gccctgaagaaatgcaaaccctccc

SEQ ID NO: 206551 - DNA, 25 bp, Probe Sequence
gccctgaagcagcaatcaaatccct

SEQ ID NO: 206552 - DNA, 25 bp, Probe Sequence
gcccggcacagccatgatcaaggcg

SEQ ID NO: 206553 - DNA, 25 bp, Probe Sequence
gcccgtgcacgtggtcaatgtggac

SEQ ID NO: 206554 - DNA, 25 bp, Probe Sequence
gcccttctcagtagtagtgctgtat

SEQ ID NO: 206555 - DNA, 25 bp, Probe Sequence
gccctcctccagtgatggcattatt

SEQ ID NO: 206556 - DNA, 25 bp, Probe Sequence
gccccctgcacaagtgtgacatcta

SEQ ID NO: 206557 - DNA, 25 bp, Probe Sequence
gcgatatcctctgacgtatcatctt

SEQ ID NO: 206558 - DNA, 25 bp, Probe Sequence
gcgtattctgtcgagcagtctttcc

SEQ ID NO: 206559 - DNA, 25 bp, Probe Sequence
gcgtgacttctaaactttatcccat

SEQ ID NO: 206560 - DNA, 25 bp, Probe Sequence
gcgtgttctgtaatatttcctctaa

SEQ ID NO: 206561 - DNA, 25 bp, Probe Sequence
gccctttcaaatatgctggtctaca

SEQ ID NO: 206562 - DNA, 25 bp, Probe Sequence
gccctcttcaagcctggtgaggaaa

SEQ ID NO: 206563 - DNA, 25 bp, Probe Sequence
gccctcccatacaggctggataaaa

SEQ ID NO: 206564 - DNA, 25 bp, Probe Sequence
gccctggaaaatcgcctgagataca

SEQ ID NO: 206565 - DNA, 25 bp, Probe Sequence
gccctggacatgtacctgcagaata

SEQ ID NO: 206566 - DNA, 25 bp, Probe Sequence
gcccaggagcaaattcgcagaatga

SEQ ID NO: 206567 - DNA, 25 bp, Probe Sequence
gcccagtgacttatggccaatgttt

SEQ ID NO: 206568 - DNA, 25 bp, Probe Sequence
gcccaaactcatatgggaattgttt

SEQ ID NO: 206569 - DNA, 25 bp, Probe Sequence
gcccaaatcagccaaggttagtttt

SEQ ID NO: 206570 - DNA, 25 bp, Probe Sequence
gcgcctgtatcctgaggttttctat

SEQ ID NO: 206571 - DNA, 25 bp, Probe Sequence
gcgcatcagtgttctctgaggtcct

SEQ ID NO: 206572 - DNA, 25 bp, Probe Sequence
gcgacgtggctcgagaagcattcat

SEQ ID NO: 206573 - DNA, 25 bp, Probe Sequence
gccctgtggcttgaggcatttacaa

SEQ ID NO: 206574 - DNA, 25 bp, Probe Sequence
gccctgctggtaagagagttgtcac

SEQ ID NO: 206575 - DNA, 25 bp, Probe Sequence
gcccatctacgaggggtatgccctc

SEQ ID NO: 206576 - DNA, 25 bp, Probe Sequence
gccctccagagaggggctgctacct

SEQ ID NO: 206577 - DNA, 25 bp, Probe Sequence
gccctccagagaggggctgctacct

SEQ ID NO: 206578 - DNA, 25 bp, Probe Sequence
gccctggatgagtgggccggctgct

SEQ ID NO: 206579 - DNA, 25 bp, Probe Sequence
gctggtggaactgggcccaggtagg

SEQ ID NO: 206580 - DNA, 25 bp, Probe Sequence
gcgagttaacgtggacaaggttctg

SEQ ID NO: 206581 - DNA, 25 bp, Probe Sequence
gcgaagtaaagagaagggcttgcca

SEQ ID NO: 206582 - DNA, 25 bp, Probe Sequence
gcgaagtgaaggagacaccgttccg

SEQ ID NO: 206583 - DNA, 25 bp, Probe Sequence
gctgtttggcagttaaacacgttta

SEQ ID NO: 206584 - DNA, 25 bp, Probe Sequence
gctgtttactaataataccttgggc

SEQ ID NO: 206585 - DNA, 25 bp, Probe Sequence
gcgtttggctaaggaggaacttgga

SEQ ID NO: 206586 - DNA, 25 bp, Probe Sequence
gcgtttatctcacaacgaactggct

SEQ ID NO: 206587 - DNA, 25 bp, Probe Sequence
gcggtttgttcacacaggaatggat

SEQ ID NO: 206588 - DNA, 25 bp, Probe Sequence
gcggtgttttttcatgcttcaagac

SEQ ID NO: 206589 - DNA, 25 bp, Probe Sequence
tcggtgctacggatggattacaaag

SEQ ID NO: 206590 - DNA, 25 bp, Probe Sequence
gcgtggatacggtgtgactcacggg

SEQ ID NO: 206591 - DNA, 25 bp, Probe Sequence
gcgggtacaagatctaccccggaca

SEQ ID NO: 206592 - DNA, 25 bp, Probe Sequence
gcgggcaagctaaaccagttccgga

SEQ ID NO: 206593 - DNA, 25 bp, Probe Sequence
gcgaggagtccaaagctcaggacct

SEQ ID NO: 206594 - DNA, 25 bp, Probe Sequence
gcgagcaccccaaagtgcacaaagc

SEQ ID NO: 206595 - DNA, 25 bp, Probe Sequence
gcgtagcctcctttctgcagaaagg

SEQ ID NO: 206596 - DNA, 25 bp, Probe Sequence
gcccgcacacctttgctacaaaggg

SEQ ID NO: 206597 - DNA, 25 bp, Probe Sequence
gcccgcaaagctcgcgctacaaaac

SEQ ID NO: 206598 - DNA, 25 bp, Probe Sequence
gctcccaagttgggtacaaaccagg

SEQ ID NO: 206599 - DNA, 25 bp, Probe Sequence
gcgcctcaaattcagtgcaaaaacg

SEQ ID NO: 206600 - DNA, 25 bp, Probe Sequence
gccctactatattaatgcaaccata

SEQ ID NO: 206601 - DNA, 25 bp, Probe Sequence
gccctagctaagtcactgaaaggaa

SEQ ID NO: 206602 - DNA, 25 bp, Probe Sequence
gccctacgaggagctggaggcggag

SEQ ID NO: 206603 - DNA, 25 bp, Probe Sequence
gccctacgaggagctggaggcggag

SEQ ID NO: 206604 - DNA, 25 bp, Probe Sequence
gccctgaagggagctgtggatggag

SEQ ID NO: 206605 - DNA, 25 bp, Probe Sequence
gccctgaagagggcagtggcccgag

SEQ ID NO: 206606 - DNA, 25 bp, Probe Sequence
gcccagagggagggggccctcattc

SEQ ID NO: 206607 - DNA, 25 bp, Probe Sequence
gcccaagtctgggaagtgccctttc

SEQ ID NO: 206608 - DNA, 25 bp, Probe Sequence
gcccaggccagggcatctggagtct

SEQ ID NO: 206609 - DNA, 25 bp, Probe Sequence
gcccaggcatagacgagctggcgtt

SEQ ID NO: 206610 - DNA, 25 bp, Probe Sequence
gcccagtgactgacatacatagcag

SEQ ID NO: 206611 - DNA, 25 bp, Probe Sequence
gcccgttgctgcctgaatcagaagg

SEQ ID NO: 206612 - DNA, 25 bp, Probe Sequence
gccctgtgtggcttggatgagagca

SEQ ID NO: 206613 - DNA, 25 bp, Probe Sequence
gcccacatggcctgcgtagatgtga

SEQ ID NO: 206614 - DNA, 25 bp, Probe Sequence
gcccacacagacttgcaataaggct

SEQ ID NO: 206615 - DNA, 25 bp, Probe Sequence
gcccagcactgtctcatagaaggct

SEQ ID NO: 206616 - DNA, 25 bp, Probe Sequence
gcccgagctggtgcattacagagag

SEQ ID NO: 206617 - DNA, 25 bp, Probe Sequence
gcccgactggatcctgggcgagatc

SEQ ID NO: 206618 - DNA, 25 bp, Probe Sequence
gcccgaatctacgtgtccaatgacg

SEQ ID NO: 206619 - DNA, 25 bp, Probe Sequence
gcccgacgaaaggatgccaaatctg

SEQ ID NO: 206620 - DNA, 25 bp, Probe Sequence
gcccgagaaaccacacataatcttt

SEQ ID NO: 206621 - DNA, 25 bp, Probe Sequence
gcgccagtgaaataccactaccttt

SEQ ID NO: 206622 - DNA, 25 bp, Probe Sequence
gcgccagtgaattaataaggccttt

SEQ ID NO: 206623 - DNA, 25 bp, Probe Sequence
gcccatgatgacccaaactggcact

SEQ ID NO: 206624 - DNA, 25 bp, Probe Sequence
gcccagaacatgccttagggacttt

SEQ ID NO: 206625 - DNA, 25 bp, Probe Sequence
gcccgaacaccattgagggagctgg

SEQ ID NO: 206626 - DNA, 25 bp, Probe Sequence
gcccgaagcacagtggacggtcatg

SEQ ID NO: 206627 - DNA, 25 bp, Probe Sequence
gccctgttgcagggaggcggtggcc

SEQ ID NO: 206628 - DNA, 25 bp, Probe Sequence
gccctgtgtgggacagggtacgccc

SEQ ID NO: 206629 - DNA, 25 bp, Probe Sequence
gcccaaggctggagggtcagcccca

SEQ ID NO: 206630 - DNA, 25 bp, Probe Sequence
gcccaaggtctgtgatgggcagcct

SEQ ID NO: 206631 - DNA, 25 bp, Probe Sequence
gcccagggcgacagaggggcactgg

SEQ ID NO: 206632 - DNA, 25 bp, Probe Sequence
gccctgggaggctgcaggggcttgc

SEQ ID NO: 206633 - DNA, 25 bp, Probe Sequence
gccctgggggcaccagaaggattgg

SEQ ID NO: 206634 - DNA, 25 bp, Probe Sequence
gcccgggccgagaagaaggctgctg

SEQ ID NO: 206635 - DNA, 25 bp, Probe Sequence
gcccaggagccatgaggacagttgt

SEQ ID NO: 206636 - DNA, 25 bp, Probe Sequence
gccctggacatcgatagggatgcag

SEQ ID NO: 206637 - DNA, 25 bp, Probe Sequence
gccctgtaatcctgggcatcaaggg

SEQ ID NO: 206638 - DNA, 25 bp, Probe Sequence
gcgtatgtaattcagcggtaccggg

SEQ ID NO: 206639 - DNA, 25 bp, Probe Sequence
gcgtatgtaataaaggacgccctcc

SEQ ID NO: 206640 - DNA, 25 bp, Probe Sequence
gcgcgttaatgagcagggcgccttc

SEQ ID NO: 206641 - DNA, 25 bp, Probe Sequence
gcgctggcgtaagcatggggtcttt

SEQ ID NO: 206642 - DNA, 25 bp, Probe Sequence
gcgctgccgtattttgatcaaggtt

SEQ ID NO: 206643 - DNA, 25 bp, Probe Sequence
gccctcatgtttgtgataaccgtgg

SEQ ID NO: 206644 - DNA, 25 bp, Probe Sequence
gccctttttagggaagctgttggag

SEQ ID NO: 206645 - DNA, 25 bp, Probe Sequence
gcccttggtctatggttgtttagag

SEQ ID NO: 206646 - DNA, 25 bp, Probe Sequence
gctccctgggaaagcgtttttgcgt

SEQ ID NO: 206647 - DNA, 25 bp, Probe Sequence
gctccctgggaaagcgtttttgcgt

SEQ ID NO: 206648 - DNA, 25 bp, Probe Sequence
gcccatctgtgacacctttttaggt

SEQ ID NO: 206649 - DNA, 25 bp, Probe Sequence
gcccatgctgaagacgcatattaaa

SEQ ID NO: 206650 - DNA, 25 bp, Probe Sequence
gccctgagagcagatggctttggag

SEQ ID NO: 206651 - DNA, 25 bp, Probe Sequence
gcccacatgatcagtggctttgaat

SEQ ID NO: 206652 - DNA, 25 bp, Probe Sequence
gcccatgatagcagctgcagctttg

SEQ ID NO: 206653 - DNA, 25 bp, Probe Sequence
gcccatgatgagtttgcatcacctg

SEQ ID NO: 206654 - DNA, 25 bp, Probe Sequence
gccctgatatgattactatgagctg

SEQ ID NO: 206655 - DNA, 25 bp, Probe Sequence
gcccatcaagaaagtcatggtggcc

SEQ ID NO: 206656 - DNA, 25 bp, Probe Sequence
gcgccacaagaacatgtctgtacac

SEQ ID NO: 206657 - DNA, 25 bp, Probe Sequence
gcccaaaggagcttcttagacacaa

SEQ ID NO: 206658 - DNA, 25 bp, Probe Sequence
gcccagattgtgtttctaagaaata

SEQ ID NO: 206659 - DNA, 25 bp, Probe Sequence
gcccagttgatttttattgaagatg

SEQ ID NO: 206660 - DNA, 25 bp, Probe Sequence
gcgccacttcctttgtgtttatatg

SEQ ID NO: 206661 - DNA, 25 bp, Probe Sequence
gcgaatcttcttttagtgattaagc

SEQ ID NO: 206662 - DNA, 25 bp, Probe Sequence
gcgcacacttgatgaaggtgttttc

SEQ ID NO: 206663 - DNA, 25 bp, Probe Sequence
gcgcacacttgatgaaggtgttttc

SEQ ID NO: 206664 - DNA, 25 bp, Probe Sequence
gcgacctttgggcaggtttctgctt

SEQ ID NO: 206665 - DNA, 25 bp, Probe Sequence
gcgaaaattcggccagggttctcgc

SEQ ID NO: 206666 - DNA, 25 bp, Probe Sequence
gcgtaacaaccgcattggcttcgcc

SEQ ID NO: 206667 - DNA, 25 bp, Probe Sequence
gcgaaaggacagactgttggctttg

SEQ ID NO: 206668 - DNA, 25 bp, Probe Sequence
gcggaaggaattgcgggccttcaag

SEQ ID NO: 206669 - DNA, 25 bp, Probe Sequence
gcgagaaggggcgcgatttcttccg

SEQ ID NO: 206670 - DNA, 25 bp, Probe Sequence
gcaaggaccgggagatcttacgcca

SEQ ID NO: 206671 - DNA, 25 bp, Probe Sequence
gttggaatcggtttgcatttacgcc

SEQ ID NO: 206672 - DNA, 25 bp, Probe Sequence
gcgtacatacggttctgttataccc

SEQ ID NO: 206673 - DNA, 25 bp, Probe Sequence
gcgtaagagggctctggtcttccaa

SEQ ID NO: 206674 - DNA, 25 bp, Probe Sequence
gcccaagtgaggtttggtcacatcc

SEQ ID NO: 206675 - DNA, 25 bp, Probe Sequence
gccctgaggagagggtagtcagcat

SEQ ID NO: 206676 - DNA, 25 bp, Probe Sequence
gccctgtgggttcctaggactaggg

SEQ ID NO: 206677 - DNA, 25 bp, Probe Sequence
gccctgtgggttcctaggactaggg

SEQ ID NO: 206678 - DNA, 25 bp, Probe Sequence
gccctggggttcttcagagaacacc

SEQ ID NO: 206679 - DNA, 25 bp, Probe Sequence
gccctggtggtgtgtggagcaccca

SEQ ID NO: 206680 - DNA, 25 bp, Probe Sequence
gccctgaaggtgagtgaggccctcg

SEQ ID NO: 206681 - DNA, 25 bp, Probe Sequence
gcccggagtggaagctgaagcctgc

SEQ ID NO: 206682 - DNA, 25 bp, Probe Sequence
gcccgtggtggactataagcactgc

SEQ ID NO: 206683 - DNA, 25 bp, Probe Sequence
gcccgtgatgggctatatctgccgc

SEQ ID NO: 206684 - DNA, 25 bp, Probe Sequence
gccctgatgatgctgctgtaatccc

SEQ ID NO: 206685 - DNA, 25 bp, Probe Sequence
gccctgatgggtggaccaccagcct

SEQ ID NO: 206686 - DNA, 25 bp, Probe Sequence
gccctgacgctatgacacacagcgc

SEQ ID NO: 206687 - DNA, 25 bp, Probe Sequence
gccctggctgcttcatgccagaggc

SEQ ID NO: 206688 - DNA, 25 bp, Probe Sequence
gcccaggctggagtgcaatgctgtg

SEQ ID NO: 206689 - DNA, 25 bp, Probe Sequence
gcccaggctggagtgcaatggcatg

SEQ ID NO: 206690 - DNA, 25 bp, Probe Sequence
gcccaggctggagtgcagtggcatg

SEQ ID NO: 206691 - DNA, 25 bp, Probe Sequence
gcccggctgcgtagcagttgagtga

SEQ ID NO: 206692 - DNA, 25 bp, Probe Sequence
gcccaggctctgatgccttgaattg

SEQ ID NO: 206693 - DNA, 25 bp, Probe Sequence
gcccacttctggccattctagatag

SEQ ID NO: 206694 - DNA, 25 bp, Probe Sequence
gctacaattaggcttctcgacgtcc

SEQ ID NO: 206695 - DNA, 25 bp, Probe Sequence
gctacaagtactggttctcccagcc

SEQ ID NO: 206696 - DNA, 25 bp, Probe Sequence
gcccagaatactggtctggaccccg

SEQ ID NO: 206697 - DNA, 25 bp, Probe Sequence
gcccagcaacctgtggagacaaccc

SEQ ID NO: 206698 - DNA, 25 bp, Probe Sequence
gcccaggagactttgaatgatcaca

SEQ ID NO: 206699 - DNA, 25 bp, Probe Sequence
gcccaggaaatactcaacagcagac

SEQ ID NO: 206700 - DNA, 25 bp, Probe Sequence
gcccagaacaatgctaaagtagctg

SEQ ID NO: 206701 - DNA, 25 bp, Probe Sequence
gcccaagatcaatgctcaagttttg

SEQ ID NO: 206702 - DNA, 25 bp, Probe Sequence
gcccagctcaaatgctactactttg

SEQ ID NO: 206703 - DNA, 25 bp, Probe Sequence
gcccagctgcaaatgatggacctcc

SEQ ID NO: 206704 - DNA, 25 bp, Probe Sequence
gcccagatggaaatcagaccactca

SEQ ID NO: 206705 - DNA, 25 bp, Probe Sequence
gccctggtgcggacagagcacagcc

SEQ ID NO: 206706 - DNA, 25 bp, Probe Sequence
gcccatttggtgaaagacatgtcgt

SEQ ID NO: 206707 - DNA, 25 bp, Probe Sequence
gcccatgttttgggaacatctctgg

SEQ ID NO: 206708 - DNA, 25 bp, Probe Sequence
gcccatggtgttgtgtacactgtgg

SEQ ID NO: 206709 - DNA, 25 bp, Probe Sequence
gcgtggcttttggtgtcaccattga

SEQ ID NO: 206710 - DNA, 25 bp, Probe Sequence
gctggaattttgatgacctattgga

SEQ ID NO: 206711 - DNA, 25 bp, Probe Sequence
gcagttttggggcacctcttaattc

SEQ ID NO: 206712 - DNA, 25 bp, Probe Sequence
gcgaattttgggcctatctctgagc

SEQ ID NO: 206713 - DNA, 25 bp, Probe Sequence
gcgaaggttgggactcgactggtgt

SEQ ID NO: 206714 - DNA, 25 bp, Probe Sequence
gcccagctgtaaggaccgggggtct

SEQ ID NO: 206715 - DNA, 25 bp, Probe Sequence
gcccaggagagaacacggggaggtt

SEQ ID NO: 206716 - DNA, 25 bp, Probe Sequence
gcccaggagctagactgccttgagg

SEQ ID NO: 206717 - DNA, 25 bp, Probe Sequence
gcccaggatttccacatcttggtga

SEQ ID NO: 206718 - DNA, 25 bp, Probe Sequence
gcccaggatttccacatcttggtga

SEQ ID NO: 206719 - DNA, 25 bp, Probe Sequence
gcccagttctatgacatcatctggt

SEQ ID NO: 206720 - DNA, 25 bp, Probe Sequence
gccctttcatatgatcttctaagtt

SEQ ID NO: 206721 - DNA, 25 bp, Probe Sequence
gcccttgtctgagatgctggtaatg

SEQ ID NO: 206722 - DNA, 25 bp, Probe Sequence
gccctatgtggagagcgacagtagg

SEQ ID NO: 206723 - DNA, 25 bp, Probe Sequence
gccctagtagcagccatacaggagc

SEQ ID NO: 206724 - DNA, 25 bp, Probe Sequence
gcccttgattctgcagcatgaaaac

SEQ ID NO: 206725 - DNA, 25 bp, Probe Sequence
gcccttgccttttcaacacaaatca

SEQ ID NO: 206726 - DNA, 25 bp, Probe Sequence
gccctcgccctgaagaaatgcaaac

SEQ ID NO: 206727 - DNA, 25 bp, Probe Sequence
gcccaccacctgaatgcagaggaaa

SEQ ID NO: 206728 - DNA, 25 bp, Probe Sequence
gcccaccacctgaatgcagaggaaa

SEQ ID NO: 206729 - DNA, 25 bp, Probe Sequence
gcccagctccctgtgattgagaata

SEQ ID NO: 206730 - DNA, 25 bp, Probe Sequence
gcccaggagctcgccaatggaattc

SEQ ID NO: 206731 - DNA, 25 bp, Probe Sequence
gcccagatgttagccaaggacttgt

SEQ ID NO: 206732 - DNA, 25 bp, Probe Sequence
gcccagccttcagggccatggatgt

SEQ ID NO: 206733 - DNA, 25 bp, Probe Sequence
gcccagccttcagggccatggatgt

SEQ ID NO: 206734 - DNA, 25 bp, Probe Sequence
gcccttcttcaggactctgggctgg

SEQ ID NO: 206735 - DNA, 25 bp, Probe Sequence
gcccttttgcaaactatggccatct

SEQ ID NO: 206736 - DNA, 25 bp, Probe Sequence
gcccttactagaccaatgggactta

SEQ ID NO: 206737 - DNA, 25 bp, Probe Sequence
gcccttcccaaggtgtggtgactgt

SEQ ID NO: 206738 - DNA, 25 bp, Probe Sequence
gcccttcctagggtgtggagagcgg

SEQ ID NO: 206739 - DNA, 25 bp, Probe Sequence
gccctacccagaatggggagcagga

SEQ ID NO: 206740 - DNA, 25 bp, Probe Sequence
gccctaggccagcctgggataagag

SEQ ID NO: 206741 - DNA, 25 bp, Probe Sequence
gccctggtgctacgtggtgaaggac

SEQ ID NO: 206742 - DNA, 25 bp, Probe Sequence
gccctgcttgtgagtgggagaggta

SEQ ID NO: 206743 - DNA, 25 bp, Probe Sequence
gccctgctctggcaggcaggcaaag

SEQ ID NO: 206744 - DNA, 25 bp, Probe Sequence
gccctgtgccaggaggctggctgga

SEQ ID NO: 206745 - DNA, 25 bp, Probe Sequence
gccctgatccagatgcagaggccag

SEQ ID NO: 206746 - DNA, 25 bp, Probe Sequence
gcccaagcctgagaagagcctggcc

SEQ ID NO: 206747 - DNA, 25 bp, Probe Sequence
gcccacgctggggaaagcgggaagc

SEQ ID NO: 206748 - DNA, 25 bp, Probe Sequence
gcccacctggatgagacggtctggg

SEQ ID NO: 206749 - DNA, 25 bp, Probe Sequence
gcccagctcaaacagaaggtcatga

SEQ ID NO: 206750 - DNA, 25 bp, Probe Sequence
gccctgctgtaacaatacctcatgt

SEQ ID NO: 206751 - DNA, 25 bp, Probe Sequence
gcccacgaagatcacatattctcgc

SEQ ID NO: 206752 - DNA, 25 bp, Probe Sequence
gcccagcagaagcattatctttgcc

SEQ ID NO: 206753 - DNA, 25 bp, Probe Sequence
gcgatgcacaacagattatacggca

SEQ ID NO: 206754 - DNA, 25 bp, Probe Sequence
gcgatctcttctgaggatccggcaa

SEQ ID NO: 206755 - DNA, 25 bp, Probe Sequence
gcgcctttctgccggacgcgagcag

SEQ ID NO: 206756 - DNA, 25 bp, Probe Sequence
gccctcattctgcacgacgatgagg

SEQ ID NO: 206757 - DNA, 25 bp, Probe Sequence
gccctacatctgccagttcgggatc

SEQ ID NO: 206758 - DNA, 25 bp, Probe Sequence
gcgcgtacttgctttgtaagtgatc

SEQ ID NO: 206759 - DNA, 25 bp, Probe Sequence
gcgcgtacttgctttgtaagtgatc

SEQ ID NO: 206760 - DNA, 25 bp, Probe Sequence
gccctatcttgtgagtggggcatct

SEQ ID NO: 206761 - DNA, 25 bp, Probe Sequence
gccctgcttttctaggatgtggcct

SEQ ID NO: 206762 - DNA, 25 bp, Probe Sequence
gccctgttcttcagaaggtgagtgg

SEQ ID NO: 206763 - DNA, 25 bp, Probe Sequence
gccctgaactcttggaagagctggc

SEQ ID NO: 206764 - DNA, 25 bp, Probe Sequence
gccctgccaccaagttgagagctgg

SEQ ID NO: 206765 - DNA, 25 bp, Probe Sequence
gccctctcccaagggatcgcagggc

SEQ ID NO: 206766 - DNA, 25 bp, Probe Sequence
gccctccttcgatgtgcaggtgggc

SEQ ID NO: 206767 - DNA, 25 bp, Probe Sequence
gccctgcaggtctacggagttgagg

SEQ ID NO: 206768 - DNA, 25 bp, Probe Sequence
gccctctggcagtacatcaagtgta

SEQ ID NO: 206769 - DNA, 25 bp, Probe Sequence
gccctcatgtgtctacagatggtaa

SEQ ID NO: 206770 - DNA, 25 bp, Probe Sequence
gccctcatgttcaccagggaacagg

SEQ ID NO: 206771 - DNA, 25 bp, Probe Sequence
gccctagtagcaattaaggaaatag

SEQ ID NO: 206772 - DNA, 25 bp, Probe Sequence
gccctaacgtgtaaactgaagcctg

SEQ ID NO: 206773 - DNA, 25 bp, Probe Sequence
gcccaacaatggaaaactaagcacc

SEQ ID NO: 206774 - DNA, 25 bp, Probe Sequence
gcgaaacaaatcacacctcaaggcc

SEQ ID NO: 206775 - DNA, 25 bp, Probe Sequence
gcgaacactttcaccattacaggcc

SEQ ID NO: 206776 - DNA, 25 bp, Probe Sequence
gcgaagctttctacacgttggtgtg

SEQ ID NO: 206777 - DNA, 25 bp, Probe Sequence
gcccagcttaatagcaaggaggtag

SEQ ID NO: 206778 - DNA, 25 bp, Probe Sequence
gcccaggcaaaccaagtgcaggtca

SEQ ID NO: 206779 - DNA, 25 bp, Probe Sequence
gcccagtccatacactgtggatgtc

SEQ ID NO: 206780 - DNA, 25 bp, Probe Sequence
gcccagtaatagtagcctctgtgac

SEQ ID NO: 206781 - DNA, 25 bp, Probe Sequence
gcccaggagttggaggctgcattga

SEQ ID NO: 206782 - DNA, 25 bp, Probe Sequence
gcccacgagttcaaggctgcagtga

SEQ ID NO: 206783 - DNA, 25 bp, Probe Sequence
gcccatggactcttcagtctggagg

SEQ ID NO: 206784 - DNA, 25 bp, Probe Sequence
gcccagtcgtcatcagatgcttgcg

SEQ ID NO: 206785 - DNA, 25 bp, Probe Sequence
gcccatgtgtgttgagagcttctca

SEQ ID NO: 206786 - DNA, 25 bp, Probe Sequence
gcccatgtgtgttgagagcttctca

SEQ ID NO: 206787 - DNA, 25 bp, Probe Sequence
gcccatgtgtgttgagagcttctca

SEQ ID NO: 206788 - DNA, 25 bp, Probe Sequence
gcccatgtgtgttgagagcttctca

SEQ ID NO: 206789 - DNA, 25 bp, Probe Sequence
gccctgctagatagagatgcgctca

SEQ ID NO: 206790 - DNA, 25 bp, Probe Sequence
gccctcacagaggagatgctgctga

SEQ ID NO: 206791 - DNA, 25 bp, Probe Sequence
gcccatgcaaatgcacgtgctgctg

SEQ ID NO: 206792 - DNA, 25 bp, Probe Sequence
gccctgcagctagcaagtcttgtgt

SEQ ID NO: 206793 - DNA, 25 bp, Probe Sequence
gcccatggctgagaagttctggtgg

SEQ ID NO: 206794 - DNA, 25 bp, Probe Sequence
gcccagcattgactaatgttcagtg

SEQ ID NO: 206795 - DNA, 25 bp, Probe Sequence
gcccagcttgcattgtttctaggag

SEQ ID NO: 206796 - DNA, 25 bp, Probe Sequence
gcccactgcattttctggaaggaca

SEQ ID NO: 206797 - DNA, 25 bp, Probe Sequence
gcccttgcacttggctgccaaagaa

SEQ ID NO: 206798 - DNA, 25 bp, Probe Sequence
gccctccactctggtactatcagag

SEQ ID NO: 206799 - DNA, 25 bp, Probe Sequence
gccctatacactgggattatcaggc

SEQ ID NO: 206800 - DNA, 25 bp, Probe Sequence
gccctataaatggcttgtattgaac

SEQ ID NO: 206801 - DNA, 25 bp, Probe Sequence
gccctacaaatgtatatgccctccc

SEQ ID NO: 206802 - DNA, 25 bp, Probe Sequence
gcgactgaagaatattcgggcccat

SEQ ID NO: 206803 - DNA, 25 bp, Probe Sequence
gccctattgaattttcagggaccag

SEQ ID NO: 206804 - DNA, 25 bp, Probe Sequence
gccctatgcttcattaagggagcac

SEQ ID NO: 206805 - DNA, 25 bp, Probe Sequence
gcccttggtctgctccatggagggc

SEQ ID NO: 206806 - DNA, 25 bp, Probe Sequence
gcccatctggggggcctgtaggggc

SEQ ID NO: 206807 - DNA, 25 bp, Probe Sequence
gccctgcggtgggtgggtacaggtc

SEQ ID NO: 206808 - DNA, 25 bp, Probe Sequence
gccctgcgggagcaactgaacaggc

SEQ ID NO: 206809 - DNA, 25 bp, Probe Sequence
gcgccgaggggccaaatgagactga

SEQ ID NO: 206810 - DNA, 25 bp, Probe Sequence
gcccagaagtcccaaattatcagtt

SEQ ID NO: 206811 - DNA, 25 bp, Probe Sequence
gccctgcgcagggccaagttcaagt

SEQ ID NO: 206812 - DNA, 25 bp, Probe Sequence
gccctgcaggcgggaaacatccagg

SEQ ID NO: 206813 - DNA, 25 bp, Probe Sequence
gcgccgctagctgggaaaacactag

SEQ ID NO: 206814 - DNA, 25 bp, Probe Sequence
gccctgccactattaaaaactgaga

SEQ ID NO: 206815 - DNA, 25 bp, Probe Sequence
gcccttcctgacgagaaaacagcaa

SEQ ID NO: 206816 - DNA, 25 bp, Probe Sequence
gcccttcactgcatagacagaacag

SEQ ID NO: 206817 - DNA, 25 bp, Probe Sequence
gcccttcagtgcgatcaaagttcta

SEQ ID NO: 206818 - DNA, 25 bp, Probe Sequence
gcgcgatgccgggatcaaagtctgt

SEQ ID NO: 206819 - DNA, 25 bp, Probe Sequence
gcccatgcctgggaaggtgatagac

SEQ ID NO: 206820 - DNA, 25 bp, Probe Sequence
gccctttggtaactggcaatgcaat

SEQ ID NO: 206821 - DNA, 25 bp, Probe Sequence
gcccaatttgaaagtgtgcagtaat

SEQ ID NO: 206822 - DNA, 25 bp, Probe Sequence
gcccagtttgttcatgtcagtgaga

SEQ ID NO: 206823 - DNA, 25 bp, Probe Sequence
gcccagactttactgcagcacagtg

SEQ ID NO: 206824 - DNA, 25 bp, Probe Sequence
gcccaggtacgaagctgcaactctg

SEQ ID NO: 206825 - DNA, 25 bp, Probe Sequence
gcgccagagtgctgacgccttactg

SEQ ID NO: 206826 - DNA, 25 bp, Probe Sequence
gcgccacaagcaaaccagctttctt

SEQ ID NO: 206827 - DNA, 25 bp, Probe Sequence
gcccatccatgcacattacttagct

SEQ ID NO: 206828 - DNA, 25 bp, Probe Sequence
gccctctcagcaagcatgtagtaac

SEQ ID NO: 206829 - DNA, 25 bp, Probe Sequence
gccctgcctgcaggctgtgaagatg

SEQ ID NO: 206830 - DNA, 25 bp, Probe Sequence
gcgcctacagcagctcatagaggtc

SEQ ID NO: 206831 - DNA, 25 bp, Probe Sequence
gcccagagcatagatgcatgaagcg

SEQ ID NO: 206832 - DNA, 25 bp, Probe Sequence
gcccagagcaagatgctgagtggca

SEQ ID NO: 206833 - DNA, 25 bp, Probe Sequence
gcccagccactgatgctggatgacc

SEQ ID NO: 206834 - DNA, 25 bp, Probe Sequence
gcgccagcaagtaatgctttactcc

SEQ ID NO: 206835 - DNA, 25 bp, Probe Sequence
gcccagaattttattgacagcctga

SEQ ID NO: 206836 - DNA, 25 bp, Probe Sequence
gcccaagtgataacttcgaagccat

SEQ ID NO: 206837 - DNA, 25 bp, Probe Sequence
gcccaggtacaactttcaagacact

SEQ ID NO: 206838 - DNA, 25 bp, Probe Sequence
gcccagggagacgggatggagacac

SEQ ID NO: 206839 - DNA, 25 bp, Probe Sequence
gcccagtgggaagatgtggtacaga

SEQ ID NO: 206840 - DNA, 25 bp, Probe Sequence
gcccacgggacagattttcctgacc

SEQ ID NO: 206841 - DNA, 25 bp, Probe Sequence
gcgcccagtggagtaatttatgcct

SEQ ID NO: 206842 - DNA, 25 bp, Probe Sequence
gcgcccaggtccaagtttgagcctg

SEQ ID NO: 206843 - DNA, 25 bp, Probe Sequence
gcccacaggtcaaactgttggcatt

SEQ ID NO: 206844 - DNA, 25 bp, Probe Sequence
gcccaaggtgagcatccatctagca

SEQ ID NO: 206845 - DNA, 25 bp, Probe Sequence
gcgacacagctggcagcagatctat

SEQ ID NO: 206846 - DNA, 25 bp, Probe Sequence
gcgacacagctggcagcagatctat

SEQ ID NO: 206847 - DNA, 25 bp, Probe Sequence
gcgcaacagcagcctgcagctggat

SEQ ID NO: 206848 - DNA, 25 bp, Probe Sequence
gcgagatcatcaagcgcttcgagca

SEQ ID NO: 206849 - DNA, 25 bp, Probe Sequence
gctgaactacagcttcgagaaccaa

SEQ ID NO: 206850 - DNA, 25 bp, Probe Sequence
gcgaactctacttgtagcaaactat

SEQ ID NO: 206851 - DNA, 25 bp, Probe Sequence
gcgccaaggacatcaagaagatctt

SEQ ID NO: 206852 - DNA, 25 bp, Probe Sequence
gcccatgttacattagagaggacta

SEQ ID NO: 206853 - DNA, 25 bp, Probe Sequence
gcccatgtaaggagctgagttctta

SEQ ID NO: 206854 - DNA, 25 bp, Probe Sequence
gcccagccaaagatcggatttgtcc

SEQ ID NO: 206855 - DNA, 25 bp, Probe Sequence
gcccacgaatggatcaggaagtctc

SEQ ID NO: 206856 - DNA, 25 bp, Probe Sequence
gcccatttgaagaccaggaagttga

SEQ ID NO: 206857 - DNA, 25 bp, Probe Sequence
gcccatttaagtacagtggatgtgg

SEQ ID NO: 206858 - DNA, 25 bp, Probe Sequence
gcccattgaaagtcatcaggcctga

SEQ ID NO: 206859 - DNA, 25 bp, Probe Sequence
gcccatggcaacttcaaggctctga

SEQ ID NO: 206860 - DNA, 25 bp, Probe Sequence
gcccattgctaagcgaggttatcct

SEQ ID NO: 206861 - DNA, 25 bp, Probe Sequence
gcccatagtacgccataggggactt

SEQ ID NO: 206862 - DNA, 25 bp, Probe Sequence
gccctcaggatcccagagggcctgc

SEQ ID NO: 206863 - DNA, 25 bp, Probe Sequence
gcgcctcgcgaacgccgggctggat

SEQ ID NO: 206864 - DNA, 25 bp, Probe Sequence
gcgccccaggcaccagggcgtgatg

SEQ ID NO: 206865 - DNA, 25 bp, Probe Sequence
gcgctcccaggagaaacaagcttga

SEQ ID NO: 206866 - DNA, 25 bp, Probe Sequence
gcgctgccgcgcagcttgaacgact

SEQ ID NO: 206867 - DNA, 25 bp, Probe Sequence
gcgccaccgacgcggaagactataa

SEQ ID NO: 206868 - DNA, 25 bp, Probe Sequence
gcccaccactcccaggaatattgaa

SEQ ID NO: 206869 - DNA, 25 bp, Probe Sequence
gcgctcccttctgggtgttatggaa

SEQ ID NO: 206870 - DNA, 25 bp, Probe Sequence
gcccagccttctgttctatttaaga

SEQ ID NO: 206871 - DNA, 25 bp, Probe Sequence
gcccagcctatctattgcattttgt

SEQ ID NO: 206872 - DNA, 25 bp, Probe Sequence
gcccatgcatttgtaataatcttct

SEQ ID NO: 206873 - DNA, 25 bp, Probe Sequence
gcccttcctgaatatagcacttttg

SEQ ID NO: 206874 - DNA, 25 bp, Probe Sequence
gcccttgcctctaaatagcactttt

SEQ ID NO: 206875 - DNA, 25 bp, Probe Sequence
gcgcgtgtgcgtttcaataaagttt

SEQ ID NO: 206876 - DNA, 25 bp, Probe Sequence
gctggttggttaataaacagtacct

SEQ ID NO: 206877 - DNA, 25 bp, Probe Sequence
gcgtggggttataaaaactatcgag

SEQ ID NO: 206878 - DNA, 25 bp, Probe Sequence
gcgccggattttaaatagcgtattg

SEQ ID NO: 206879 - DNA, 25 bp, Probe Sequence
gcgtgctggttttgttaggcgttag

SEQ ID NO: 206880 - DNA, 25 bp, Probe Sequence
gcgtctggcattgttcaatccagat

SEQ ID NO: 206881 - DNA, 25 bp, Probe Sequence
gcgttcgcagttgcagcgattgcaa

SEQ ID NO: 206882 - DNA, 25 bp, Probe Sequence
gcgttcgagtaccctatcttgaact

SEQ ID NO: 206883 - DNA, 25 bp, Probe Sequence
gcgatatcgaaaggactctcttcat

SEQ ID NO: 206884 - DNA, 25 bp, Probe Sequence
gcgcactctgaaagtttgctctaaa

SEQ ID NO: 206885 - DNA, 25 bp, Probe Sequence
gcccttcaggaaatggctgtaagaa

SEQ ID NO: 206886 - DNA, 25 bp, Probe Sequence
gcccattcatggtaagtcttaagct

SEQ ID NO: 206887 - DNA, 25 bp, Probe Sequence
gcccttgatggctcatgtcaaacgt

SEQ ID NO: 206888 - DNA, 25 bp, Probe Sequence
gcgccctagacaagctaaccaggtt

SEQ ID NO: 206889 - DNA, 25 bp, Probe Sequence
gccctcagaacaatccgattcacgt

SEQ ID NO: 206890 - DNA, 25 bp, Probe Sequence
gccctagacaatacgatggaacgtt

SEQ ID NO: 206891 - DNA, 25 bp, Probe Sequence
gcgccctgatcagatgtatggcaac

SEQ ID NO: 206892 - DNA, 25 bp, Probe Sequence
gcccactgctcattgtataagcccc

SEQ ID NO: 206893 - DNA, 25 bp, Probe Sequence
gcccatgcctacagatctaggacac

SEQ ID NO: 206894 - DNA, 25 bp, Probe Sequence
gaatcgcctaccatttggtgcaagc

SEQ ID NO: 206895 - DNA, 25 bp, Probe Sequence
gattggccccctatagggccagcac

SEQ ID NO: 206896 - DNA, 25 bp, Probe Sequence
gcaaagtaacctatacaggccagca

SEQ ID NO: 206897 - DNA, 25 bp, Probe Sequence
gcccagctaacacttttaggaacag

SEQ ID NO: 206898 - DNA, 25 bp, Probe Sequence
gcccacctcacactttgtgggtgta

SEQ ID NO: 206899 - DNA, 25 bp, Probe Sequence
gcccatatccacatgttgctagagg

SEQ ID NO: 206900 - DNA, 25 bp, Probe Sequence
gcccaatgtcctcttagagcagggt

SEQ ID NO: 206901 - DNA, 25 bp, Probe Sequence
gcccaaagagctcctgtaagaggga

SEQ ID NO: 206902 - DNA, 25 bp, Probe Sequence
gctcccacagtgccttttaaggggg

SEQ ID NO: 206903 - DNA, 25 bp, Probe Sequence
gcccaaaggggttgtgaatggggag

SEQ ID NO: 206904 - DNA, 25 bp, Probe Sequence
gcccagcacaggaagtcgggaaggg

SEQ ID NO: 206905 - DNA, 25 bp, Probe Sequence
gcccagaagatcaaggctgcagtga

SEQ ID NO: 206906 - DNA, 25 bp, Probe Sequence
gcccaggagatcaaggctgcagtga

SEQ ID NO: 206907 - DNA, 25 bp, Probe Sequence
gcccaggagctcaagattgcagtga

SEQ ID NO: 206908 - DNA, 25 bp, Probe Sequence
gcccatgccatggcggattctgagc

SEQ ID NO: 206909 - DNA, 25 bp, Probe Sequence
gcccatggagcagggatgtcacgtc

SEQ ID NO: 206910 - DNA, 25 bp, Probe Sequence
gcccatgtgcaaggagagcgaccac

SEQ ID NO: 206911 - DNA, 25 bp, Probe Sequence
gcccactgacagtgaggaacacggg

SEQ ID NO: 206912 - DNA, 25 bp, Probe Sequence
gcccagcccagggggaaagggagca

SEQ ID NO: 206913 - DNA, 25 bp, Probe Sequence
gcccagcggagggtggaacggcgtc

SEQ ID NO: 206914 - DNA, 25 bp, Probe Sequence
gcccagcttcagattggacgcggtg

SEQ ID NO: 206915 - DNA, 25 bp, Probe Sequence
gcccacaacgtgcggacgcaggagc

SEQ ID NO: 206916 - DNA, 25 bp, Probe Sequence
tccccgacgtaacatctggcgagac

SEQ ID NO: 206917 - DNA, 25 bp, Probe Sequence
tccccaaccgtgcaacgtgtaactt

SEQ ID NO: 206918 - DNA, 25 bp, Probe Sequence
tccttgggggttccacgtgtaagct

SEQ ID NO: 206919 - DNA, 25 bp, Probe Sequence
gcgtagggggtcataaggatagact

SEQ ID NO: 206920 - DNA, 25 bp, Probe Sequence
gcgtaaggggatttctaaagcaggc

SEQ ID NO: 206921 - DNA, 25 bp, Probe Sequence
gcgttcggagttttcagaactcata

SEQ ID NO: 206922 - DNA, 25 bp, Probe Sequence
gcgctgtgaggacatcctgcagcag

SEQ ID NO: 206923 - DNA, 25 bp, Probe Sequence
gcgctgatgaaggagatcgaggcgg

SEQ ID NO: 206924 - DNA, 25 bp, Probe Sequence
gcgcgaagaggggcggtgctgacgc

SEQ ID NO: 206925 - DNA, 25 bp, Probe Sequence
gcgcgtccattggtcggctggacga

SEQ ID NO: 206926 - DNA, 25 bp, Probe Sequence
gcgcttcgcttggtgagtgcgtact

SEQ ID NO: 206927 - DNA, 25 bp, Probe Sequence
gcgcttgtcacggcaggaggtacaa

SEQ ID NO: 206928 - DNA, 25 bp, Probe Sequence
gcccttcactcctgagaaaaaggaa

SEQ ID NO: 206929 - DNA, 25 bp, Probe Sequence
gttctcccccagtgaaaaagagtct

SEQ ID NO: 206930 - DNA, 25 bp, Probe Sequence
gcttctccccggagtcagtacaact

SEQ ID NO: 206931 - DNA, 25 bp, Probe Sequence
gcttctccccggagtcagtacaact

SEQ ID NO: 206932 - DNA, 25 bp, Probe Sequence
gcttctccccggagtcagtacaact

SEQ ID NO: 206933 - DNA, 25 bp, Probe Sequence
gctgtacccctcaaggatttaaact

SEQ ID NO: 206934 - DNA, 25 bp, Probe Sequence
gcgatactccccacgaatgtgaaga

SEQ ID NO: 206935 - DNA, 25 bp, Probe Sequence
gcggtcacccaaacgaaggcaaaga

SEQ ID NO: 206936 - DNA, 25 bp, Probe Sequence
gcgttttctaaatcaatgcttaata

SEQ ID NO: 206937 - DNA, 25 bp, Probe Sequence
gctggctggcctaaaaacctaaata

SEQ ID NO: 206938 - DNA, 25 bp, Probe Sequence
gcgtggtgccatgaaggaaagaaac

SEQ ID NO: 206939 - DNA, 25 bp, Probe Sequence
gcgcaggcacagtgacgtgaaagtc

SEQ ID NO: 206940 - DNA, 25 bp, Probe Sequence
gcgatacctagggcggaagtgctct

SEQ ID NO: 206941 - DNA, 25 bp, Probe Sequence
gcaaaccgagggggatgattcgtct

SEQ ID NO: 206942 - DNA, 25 bp, Probe Sequence
gcccaccaggaggggacttagccat

SEQ ID NO: 206943 - DNA, 25 bp, Probe Sequence
gcccaccgtgagggctgagtgctgc

SEQ ID NO: 206944 - DNA, 25 bp, Probe Sequence
gcccttctcaaggtggagctctggg

SEQ ID NO: 206945 - DNA, 25 bp, Probe Sequence
gcccttgctcaatcagttgttggag

SEQ ID NO: 206946 - DNA, 25 bp, Probe Sequence
gcgctctcgtctgacatttgtttgg

SEQ ID NO: 206947 - DNA, 25 bp, Probe Sequence
gcgctctcgtctgacatttgtttgg

SEQ ID NO: 206948 - DNA, 25 bp, Probe Sequence
gcgtccgcatgctaatcgcttttta

SEQ ID NO: 206949 - DNA, 25 bp, Probe Sequence
gcgcagccgcatgaaccggatgtct

SEQ ID NO: 206950 - DNA, 25 bp, Probe Sequence
gcgcgagcggctaaagaagatgttg

SEQ ID NO: 206951 - DNA, 25 bp, Probe Sequence
gcccagatggctcagtgaatccttg

SEQ ID NO: 206952 - DNA, 25 bp, Probe Sequence
gcccatgatggccatagatttgcct

SEQ ID NO: 206953 - DNA, 25 bp, Probe Sequence
gcccttagctgtaataatgcatctg

SEQ ID NO: 206954 - DNA, 25 bp, Probe Sequence
gcccttaatgctacaagagctgctg

SEQ ID NO: 206955 - DNA, 25 bp, Probe Sequence
gcccagaagtcaggcaagcagctgc

SEQ ID NO: 206956 - DNA, 25 bp, Probe Sequence
gcccagagggcagccatagtgtgcc

SEQ ID NO: 206957 - DNA, 25 bp, Probe Sequence
gcccaactggcagggtagtggctcc

SEQ ID NO: 206958 - DNA, 25 bp, Probe Sequence
gcccaagaggaaggtcagctccgcc

SEQ ID NO: 206959 - DNA, 25 bp, Probe Sequence
gcccaaggcggagaagatctcattc

SEQ ID NO: 206960 - DNA, 25 bp, Probe Sequence
gcccaactggccagtacatcacagt

SEQ ID NO: 206961 - DNA, 25 bp, Probe Sequence
ggtaactccctgttaatacagttgc

SEQ ID NO: 206962 - DNA, 25 bp, Probe Sequence
gctgtaaatctactactaaaacgtc

SEQ ID NO: 206963 - DNA, 25 bp, Probe Sequence
gcgtaaccgcatcaggaatgaccct

SEQ ID NO: 206964 - DNA, 25 bp, Probe Sequence
gcggaactcttcctggaatgcattc

SEQ ID NO: 206965 - DNA, 25 bp, Probe Sequence
gctgtcaacttttgtggttgtagca

SEQ ID NO: 206966 - DNA, 25 bp, Probe Sequence
gctgtttttgtgcctgtttgaagct

SEQ ID NO: 206967 - DNA, 25 bp, Probe Sequence
gcttccttggtagtgtacgcagcct

SEQ ID NO: 206968 - DNA, 25 bp, Probe Sequence
gcagtcctttgccattggaggctcc

SEQ ID NO: 206969 - DNA, 25 bp, Probe Sequence
gcgtagctttcgtggagttctatat

SEQ ID NO: 206970 - DNA, 25 bp, Probe Sequence
gcagacgtccctgagaggttcttga

SEQ ID NO: 206971 - DNA, 25 bp, Probe Sequence
gcagacgtccctgagaggttcttga

SEQ ID NO: 206972 - DNA, 25 bp, Probe Sequence
gcagttaacttccaggagttcctca

SEQ ID NO: 206973 - DNA, 25 bp, Probe Sequence
gcgcttcgagcagaagggattccgc

SEQ ID NO: 206974 - DNA, 25 bp, Probe Sequence
gcccttggaggcaggcatgattgtc

SEQ ID NO: 206975 - DNA, 25 bp, Probe Sequence
gcgcggggagtcgaggcatttgcgc

SEQ ID NO: 206976 - DNA, 25 bp, Probe Sequence
tcctggtatgacaacgaatttggct

SEQ ID NO: 206977 - DNA, 25 bp, Probe Sequence
gcgctgttacaatctgtattggtgc

SEQ ID NO: 206978 - DNA, 25 bp, Probe Sequence
gcgctgctttgtggttgatattggc

SEQ ID NO: 206979 - DNA, 25 bp, Probe Sequence
gcagattattcctttaacggccgga

SEQ ID NO: 206980 - DNA, 25 bp, Probe Sequence
gcgttatctcagcttcttcaggcgg

SEQ ID NO: 206981 - DNA, 25 bp, Probe Sequence
gcgcttactacatgccaagcactgc

SEQ ID NO: 206982 - DNA, 25 bp, Probe Sequence
gcccatgaataatacacgacctgtt

SEQ ID NO: 206983 - DNA, 25 bp, Probe Sequence
gcccagaatgaccagaccgaatggt

SEQ ID NO: 206984 - DNA, 25 bp, Probe Sequence
gcccaacagtcggtccaagaggtgg

SEQ ID NO: 206985 - DNA, 25 bp, Probe Sequence
gcccagaagtggtccgcaagatggg

SEQ ID NO: 206986 - DNA, 25 bp, Probe Sequence
gcccagacagaggccctgatgaggg

SEQ ID NO: 206987 - DNA, 25 bp, Probe Sequence
gcccaggatgtggcccagaggtgca

SEQ ID NO: 206988 - DNA, 25 bp, Probe Sequence
gcccaagtgtcctgcaggctgtaat

SEQ ID NO: 206989 - DNA, 25 bp, Probe Sequence
gcccaattgtgcaagtgccctggac

SEQ ID NO: 206990 - DNA, 25 bp, Probe Sequence
gcccaataggcatttgccagccgac

SEQ ID NO: 206991 - DNA, 25 bp, Probe Sequence
gcccagaaggaacgccagcggcaga

SEQ ID NO: 206992 - DNA, 25 bp, Probe Sequence
gcccagaaggaacgccagcggcaga

SEQ ID NO: 206993 - DNA, 25 bp, Probe Sequence
gcccagaaggaacgccagcggcaga

SEQ ID NO: 206994 - DNA, 25 bp, Probe Sequence
gcccaggttggagtgcaccgggcag

SEQ ID NO: 206995 - DNA, 25 bp, Probe Sequence
gcccaggatgctttggcctatgggg

SEQ ID NO: 206996 - DNA, 25 bp, Probe Sequence
gcccatgttgtatgacacatatagg

SEQ ID NO: 206997 - DNA, 25 bp, Probe Sequence
gcccaggtgatctcaaatactggca

SEQ ID NO: 206998 - DNA, 25 bp, Probe Sequence
gcccagttccgggagcaactggaca

SEQ ID NO: 206999 - DNA, 25 bp, Probe Sequence
gcccaattgtcactgtggaaccaag

SEQ ID NO: 207000 - DNA, 25 bp, Probe Sequence
gcccatttgagccctggataacaag

SEQ ID NO: 207001 - DNA, 25 bp, Probe Sequence
gcccagtgggtcttggcataagtag

SEQ ID NO: 207002 - DNA, 25 bp, Probe Sequence
gcccagcgggtctgagtgtgaggtg

SEQ ID NO: 207003 - DNA, 25 bp, Probe Sequence
gcccaggtgtacttgagctgtgagg

SEQ ID NO: 207004 - DNA, 25 bp, Probe Sequence
gcccagggctgcatctgcaaggggc

SEQ ID NO: 207005 - DNA, 25 bp, Probe Sequence
gcccaaggctgcattccagtatggt

SEQ ID NO: 207006 - DNA, 25 bp, Probe Sequence
gcccaaggctgcattccagtatggt

SEQ ID NO: 207007 - DNA, 25 bp, Probe Sequence
gcccacgtggccattgcagtagagg

SEQ ID NO: 207008 - DNA, 25 bp, Probe Sequence
gcccatgggtcccttactagagagg

SEQ ID NO: 207009 - DNA, 25 bp, Probe Sequence
gcccagccgtgggcttaggagagag

SEQ ID NO: 207010 - DNA, 25 bp, Probe Sequence
gcccagctccttgttattgagaatg

SEQ ID NO: 207011 - DNA, 25 bp, Probe Sequence
gcccattgccataaattttgtcttg

SEQ ID NO: 207012 - DNA, 25 bp, Probe Sequence
gcgcctatctcattcagaatatttt

SEQ ID NO: 207013 - DNA, 25 bp, Probe Sequence
gcgcctcttcttagttgatgattta

SEQ ID NO: 207014 - DNA, 25 bp, Probe Sequence
gcgcctcttcttagttgatgattta

SEQ ID NO: 207015 - DNA, 25 bp, Probe Sequence
gcgcctcttcttagttgatgattta

SEQ ID NO: 207016 - DNA, 25 bp, Probe Sequence
gcgcctcttcttagttgatgattta

SEQ ID NO: 207017 - DNA, 25 bp, Probe Sequence
gcgcctcttcttagttgatgattta

SEQ ID NO: 207018 - DNA, 25 bp, Probe Sequence
gcgcctcttcttagttgatgattta

SEQ ID NO: 207019 - DNA, 25 bp, Probe Sequence
gcgcttcagagcttttctatgcatt

SEQ ID NO: 207020 - DNA, 25 bp, Probe Sequence
gcccagagatcaatcttttctattg

SEQ ID NO: 207021 - DNA, 25 bp, Probe Sequence
gcccaatctagaatatgtctgctct

SEQ ID NO: 207022 - DNA, 25 bp, Probe Sequence
gcccaactacgcagacatgctcatc

SEQ ID NO: 207023 - DNA, 25 bp, Probe Sequence
gcccaacttcacaagatcacagctc

SEQ ID NO: 207024 - DNA, 25 bp, Probe Sequence
gcccacagtgcattccagtgaagct

SEQ ID NO: 207025 - DNA, 25 bp, Probe Sequence
gcccagcaggcaggtctggatgatg

SEQ ID NO: 207026 - DNA, 25 bp, Probe Sequence
gcgcctagagctggtgctggaagcc

SEQ ID NO: 207027 - DNA, 25 bp, Probe Sequence
gcccaggcagctggtggtgggcgct

SEQ ID NO: 207028 - DNA, 25 bp, Probe Sequence
gcccaggcagctggtggtgggcgct

SEQ ID NO: 207029 - DNA, 25 bp, Probe Sequence
gcccaggagcagctgggggttccac

SEQ ID NO: 207030 - DNA, 25 bp, Probe Sequence
gcccagtgagacggctggcaggtac

SEQ ID NO: 207031 - DNA, 25 bp, Probe Sequence
gcccagtaagcgccaggtggtggca

SEQ ID NO: 207032 - DNA, 25 bp, Probe Sequence
gcccagcttgggcccagctgggctc

SEQ ID NO: 207033 - DNA, 25 bp, Probe Sequence
gcggctttgagacctacgaggcatg

SEQ ID NO: 207034 - DNA, 25 bp, Probe Sequence
gcgacatttggcctgcagaatagga

SEQ ID NO: 207035 - DNA, 25 bp, Probe Sequence
gcgcacgtctatggatggcaaatgc

SEQ ID NO: 207036 - DNA, 25 bp, Probe Sequence
gcgcacttgctgatattgcacagtc

SEQ ID NO: 207037 - DNA, 25 bp, Probe Sequence
gcgccctgcagatttacacagacat

SEQ ID NO: 207038 - DNA, 25 bp, Probe Sequence
gcgagttcaacatgaccaacttggt

SEQ ID NO: 207039 - DNA, 25 bp, Probe Sequence
gctgaaaaggctgaattacgggtaa

SEQ ID NO: 207040 - DNA, 25 bp, Probe Sequence
gctgtagaaccctaaataagtggta

SEQ ID NO: 207041 - DNA, 25 bp, Probe Sequence
gcgacccacgtctacatgtacgtgt

SEQ ID NO: 207042 - DNA, 25 bp, Probe Sequence
gcccacccagtgtaatgtcactgct

SEQ ID NO: 207043 - DNA, 25 bp, Probe Sequence
gcccactcctcctatatacagtgat

SEQ ID NO: 207044 - DNA, 25 bp, Probe Sequence
gcccagacctcggtgatcactgagg

SEQ ID NO: 207045 - DNA, 25 bp, Probe Sequence
gcccagaagttggcatgtcctgtgg

SEQ ID NO: 207046 - DNA, 25 bp, Probe Sequence
gcgacagcacagttctgtgtcctct

SEQ ID NO: 207047 - DNA, 25 bp, Probe Sequence
gcgacagcacagttctgtgtcctct

SEQ ID NO: 207048 - DNA, 25 bp, Probe Sequence
gcgctgagaaagttttctgcctcct

SEQ ID NO: 207049 - DNA, 25 bp, Probe Sequence
gctgaacaaagtagctttccccaag

SEQ ID NO: 207050 - DNA, 25 bp, Probe Sequence
gcagaaagaatgggtcttcccaaca

SEQ ID NO: 207051 - DNA, 25 bp, Probe Sequence
gcgcctagcaaggtgcctttgtacc

SEQ ID NO: 207052 - DNA, 25 bp, Probe Sequence
gcgcagtacctggccacttatggcc

SEQ ID NO: 207053 - DNA, 25 bp, Probe Sequence
gcgaagaatgccaacacctcaaaac

SEQ ID NO: 207054 - DNA, 25 bp, Probe Sequence
gcacaccgagctgaacctgcaaaaa

SEQ ID NO: 207055 - DNA, 25 bp, Probe Sequence
gcacttccagccaggcttaaaaaaa

SEQ ID NO: 207056 - DNA, 25 bp, Probe Sequence
gcgtttgggcgcagcattaaaaaaa

SEQ ID NO: 207057 - DNA, 25 bp, Probe Sequence
gcagctttgggtgatcttgaaaatc

SEQ ID NO: 207058 - DNA, 25 bp, Probe Sequence
gcgcttctttctgactctaaaatat

SEQ ID NO: 207059 - DNA, 25 bp, Probe Sequence
gcgccattttttacttaatgcagct

SEQ ID NO: 207060 - DNA, 25 bp, Probe Sequence
gcgtctttgtttctatcagtctttg

SEQ ID NO: 207061 - DNA, 25 bp, Probe Sequence
gcgatctcctttgactacagtaaag

SEQ ID NO: 207062 - DNA, 25 bp, Probe Sequence
gcgctcacacttcaaaaccaataag

SEQ ID NO: 207063 - DNA, 25 bp, Probe Sequence
gcgcttcaccatcaagataacacaa

SEQ ID NO: 207064 - DNA, 25 bp, Probe Sequence
gcgcttcaccatcaagataacacaa

SEQ ID NO: 207065 - DNA, 25 bp, Probe Sequence
gcgttcatccataccaacaaagtca

SEQ ID NO: 207066 - DNA, 25 bp, Probe Sequence
gcgttattctagacttattagccat

SEQ ID NO: 207067 - DNA, 25 bp, Probe Sequence
gcgtatattatactgcctcttaggt

SEQ ID NO: 207068 - DNA, 25 bp, Probe Sequence
gcgtctatatgatactcatctgtga

SEQ ID NO: 207069 - DNA, 25 bp, Probe Sequence
gcgctatttcaggcacatcattgga

SEQ ID NO: 207070 - DNA, 25 bp, Probe Sequence
gcgtcttccacaacatattgaacct

SEQ ID NO: 207071 - DNA, 25 bp, Probe Sequence
gctacgacgacttcatgatctactg

SEQ ID NO: 207072 - DNA, 25 bp, Probe Sequence
gctggcgaccaagagattccagggc

SEQ ID NO: 207073 - DNA, 25 bp, Probe Sequence
gcgaggtcgcaactgagatctccat

SEQ ID NO: 207074 - DNA, 25 bp, Probe Sequence
gcgctttggcaccatgagttctatg

SEQ ID NO: 207075 - DNA, 25 bp, Probe Sequence
gcgattgtgacaacatagcttatga

SEQ ID NO: 207076 - DNA, 25 bp, Probe Sequence
gcgattggcttagtcagcttagcat

SEQ ID NO: 207077 - DNA, 25 bp, Probe Sequence
gcgattgtttgaatctgcagatgca

SEQ ID NO: 207078 - DNA, 25 bp, Probe Sequence
gcgacttttattgcagatgtcttta

SEQ ID NO: 207079 - DNA, 25 bp, Probe Sequence
gcggtactttgagcagttattggag

SEQ ID NO: 207080 - DNA, 25 bp, Probe Sequence
gcgggttttggcagtagcatcgatg

SEQ ID NO: 207081 - DNA, 25 bp, Probe Sequence
gcggagtttttcgtggatccaggcc

SEQ ID NO: 207082 - DNA, 25 bp, Probe Sequence
gcgggatcctttccggagaaagcgc

SEQ ID NO: 207083 - DNA, 25 bp, Probe Sequence
gcgaattcctagacacctggaacag

SEQ ID NO: 207084 - DNA, 25 bp, Probe Sequence
gcgcaaatactggaacctgtaacag

SEQ ID NO: 207085 - DNA, 25 bp, Probe Sequence
gcccagatgttggaaaagtaccagc

SEQ ID NO: 207086 - DNA, 25 bp, Probe Sequence
gcccaggatgctataaaatcaccac

SEQ ID NO: 207087 - DNA, 25 bp, Probe Sequence
gcccaggatgctataaaatcaccac

SEQ ID NO: 207088 - DNA, 25 bp, Probe Sequence
gcccaggagtttgagaccagctaag

SEQ ID NO: 207089 - DNA, 25 bp, Probe Sequence
gcgctcgaggttatggaacagcaca

SEQ ID NO: 207090 - DNA, 25 bp, Probe Sequence
gcccagtggttgtggaacccatctc

SEQ ID NO: 207091 - DNA, 25 bp, Probe Sequence
gcgccatttttttggaaacctctgc

SEQ ID NO: 207092 - DNA, 25 bp, Probe Sequence
gcgccatttatgaggagtcaaatcc

SEQ ID NO: 207093 - DNA, 25 bp, Probe Sequence
gcccaatctctatggcaacatcgtc

SEQ ID NO: 207094 - DNA, 25 bp, Probe Sequence
gcccaatctctatggcaacatcgtc

SEQ ID NO: 207095 - DNA, 25 bp, Probe Sequence
gcccaacatcaaagacaccatcgga

SEQ ID NO: 207096 - DNA, 25 bp, Probe Sequence
gcccagactgatgagcacatctctc

SEQ ID NO: 207097 - DNA, 25 bp, Probe Sequence
gcccagagctgtcaggaccatgaag

SEQ ID NO: 207098 - DNA, 25 bp, Probe Sequence
gcccagactggacaacacagtatga

SEQ ID NO: 207099 - DNA, 25 bp, Probe Sequence
gcgaaatgctggatccccagtgtat

SEQ ID NO: 207100 - DNA, 25 bp, Probe Sequence
gcgcaaagttgatgcctacggatca

SEQ ID NO: 207101 - DNA, 25 bp, Probe Sequence
gcgccggattattgctgcaactggc

SEQ ID NO: 207102 - DNA, 25 bp, Probe Sequence
gcccagggtattggcaagcttgcca

SEQ ID NO: 207103 - DNA, 25 bp, Probe Sequence
gcccagactgcattttgcagagctt

SEQ ID NO: 207104 - DNA, 25 bp, Probe Sequence
gctgctgctgacgactctgtgcagc

SEQ ID NO: 207105 - DNA, 25 bp, Probe Sequence
gcgcatgctgctggcagatcagggc

SEQ ID NO: 207106 - DNA, 25 bp, Probe Sequence
gcgcatgagctggagtcctaggcac

SEQ ID NO: 207107 - DNA, 25 bp, Probe Sequence
gctgtactctttgctagtaccaaaa

SEQ ID NO: 207108 - DNA, 25 bp, Probe Sequence
gtggttctttccagttaggaaatat

SEQ ID NO: 207109 - DNA, 25 bp, Probe Sequence
gctggtcttttccggttgttgaaga

SEQ ID NO: 207110 - DNA, 25 bp, Probe Sequence
gctttttgtctggggctggaataaa

SEQ ID NO: 207111 - DNA, 25 bp, Probe Sequence
gcttttagtttctcttaatcaaaat

SEQ ID NO: 207112 - DNA, 25 bp, Probe Sequence
gctttctggttaaggttaacaccag

SEQ ID NO: 207113 - DNA, 25 bp, Probe Sequence
gcgactcggttaagggaaagcgccg

SEQ ID NO: 207114 - DNA, 25 bp, Probe Sequence
gctggctttttcaggccaaagcagc

SEQ ID NO: 207115 - DNA, 25 bp, Probe Sequence
gctggcctatatatcagggaccaca

SEQ ID NO: 207116 - DNA, 25 bp, Probe Sequence
gcgagtctaataatccagctactca

SEQ ID NO: 207117 - DNA, 25 bp, Probe Sequence
gcgagctgtacttatcggtgaatca

SEQ ID NO: 207118 - DNA, 25 bp, Probe Sequence
gcgagctgtacttatcggtgaatca

SEQ ID NO: 207119 - DNA, 25 bp, Probe Sequence
gcgatgttgactgcacaggtaatac

SEQ ID NO: 207120 - DNA, 25 bp, Probe Sequence
gcgatcctgatggtccgggagatga

SEQ ID NO: 207121 - DNA, 25 bp, Probe Sequence
gcgactggacaagctgaggaagaat

SEQ ID NO: 207122 - DNA, 25 bp, Probe Sequence
gcgactggacaagctgaggaagaat

SEQ ID NO: 207123 - DNA, 25 bp, Probe Sequence
gcgcagcttgaacgactaaagcaga

SEQ ID NO: 207124 - DNA, 25 bp, Probe Sequence
gcgccacataaccattctgaagctg

SEQ ID NO: 207125 - DNA, 25 bp, Probe Sequence
gcccagcacaggtatttcaggtgtg

SEQ ID NO: 207126 - DNA, 25 bp, Probe Sequence
gcgcatcagacagaacgtgcaggtg

SEQ ID NO: 207127 - DNA, 25 bp, Probe Sequence
gcccagagaccagctggcagggtgc

SEQ ID NO: 207128 - DNA, 25 bp, Probe Sequence
gcccagacaccagcatgtagacctg

SEQ ID NO: 207129 - DNA, 25 bp, Probe Sequence
gcagctcaaaacgcttagcctagcc

SEQ ID NO: 207130 - DNA, 25 bp, Probe Sequence
gcgctagtgagatgccttagtctgt

SEQ ID NO: 207131 - DNA, 25 bp, Probe Sequence
gcgattgcgcaatgccataaatttc

SEQ ID NO: 207132 - DNA, 25 bp, Probe Sequence
gcgcttgcagcatggctgaccaact

SEQ ID NO: 207133 - DNA, 25 bp, Probe Sequence
gcgacaagatcatctactcacactt

SEQ ID NO: 207134 - DNA, 25 bp, Probe Sequence
gcgaaagatcaaggtctgcaaggga

SEQ ID NO: 207135 - DNA, 25 bp, Probe Sequence
gcgaaagaaaggcatctagttgaga

SEQ ID NO: 207136 - DNA, 25 bp, Probe Sequence
gcgatacgaaactcacgagatgtga

SEQ ID NO: 207137 - DNA, 25 bp, Probe Sequence
gcgatcaaagttctacgtgcgagag

SEQ ID NO: 207138 - DNA, 25 bp, Probe Sequence
gcccacatattacaacttcagaatg

SEQ ID NO: 207139 - DNA, 25 bp, Probe Sequence
gcgcaccttataccagaattcagta

SEQ ID NO: 207140 - DNA, 25 bp, Probe Sequence
gcccagctataaccagtatcagcag

SEQ ID NO: 207141 - DNA, 25 bp, Probe Sequence
gcgccagttagctcaatatcatgcc

SEQ ID NO: 207142 - DNA, 25 bp, Probe Sequence
gcccaagctgactaatacatctggc

SEQ ID NO: 207143 - DNA, 25 bp, Probe Sequence
gcccaaggacatccatgccaagtgc

SEQ ID NO: 207144 - DNA, 25 bp, Probe Sequence
gcccagaggatcacggggctgcgag

SEQ ID NO: 207145 - DNA, 25 bp, Probe Sequence
gcgccagggctcagatggggcctgg

SEQ ID NO: 207146 - DNA, 25 bp, Probe Sequence
gcgatcaagggctggagcggcgcat

SEQ ID NO: 207147 - DNA, 25 bp, Probe Sequence
gcgccgcaaggcactgagcaggcga

SEQ ID NO: 207148 - DNA, 25 bp, Probe Sequence
gcgctgcccgaggggagcaaggaca

SEQ ID NO: 207149 - DNA, 25 bp, Probe Sequence
gcgaccccgtggtgaggagaaatgg

SEQ ID NO: 207150 - DNA, 25 bp, Probe Sequence
gctagtccgcgggttcggatacaat

SEQ ID NO: 207151 - DNA, 25 bp, Probe Sequence
gcgaggggggtgttcggatcacacc

SEQ ID NO: 207152 - DNA, 25 bp, Probe Sequence
gcgcaaggtggcctgtattggggca

SEQ ID NO: 207153 - DNA, 25 bp, Probe Sequence
gcgaaggaccggaaaggagcgccta

SEQ ID NO: 207154 - DNA, 25 bp, Probe Sequence
gcgtcggacgagcgcaaaagcgcct

SEQ ID NO: 207155 - DNA, 25 bp, Probe Sequence
gcgtcctgaggagagaaccggcgct

SEQ ID NO: 207156 - DNA, 25 bp, Probe Sequence
gcgccgcgaggtgagattccggagg

SEQ ID NO: 207157 - DNA, 25 bp, Probe Sequence
gcgccgtgggtggagcaggaggggc

SEQ ID NO: 207158 - DNA, 25 bp, Probe Sequence
gcgccctggtgactgtggatgaggt

SEQ ID NO: 207159 - DNA, 25 bp, Probe Sequence
gcgctgccaaggctgtgggcaaggt

SEQ ID NO: 207160 - DNA, 25 bp, Probe Sequence
gcgctgccaaggctgtgggcaaggt

SEQ ID NO: 207161 - DNA, 25 bp, Probe Sequence
gcgcttctttggcggtgacaggggt

SEQ ID NO: 207162 - DNA, 25 bp, Probe Sequence
gcgcttctctcgtcggcggacttgt

SEQ ID NO: 207163 - DNA, 25 bp, Probe Sequence
gcgcggctgctcaaggtgggagccg

SEQ ID NO: 207164 - DNA, 25 bp, Probe Sequence
gcgcgtcgccaaagtgacaggcggt

SEQ ID NO: 207165 - DNA, 25 bp, Probe Sequence
gcgccttcctgaagtacagggcgtc

SEQ ID NO: 207166 - DNA, 25 bp, Probe Sequence
gcggatcacctgaggtcgggagttc

SEQ ID NO: 207167 - DNA, 25 bp, Probe Sequence
gcggatcacctgaggtcgggagttc

SEQ ID NO: 207168 - DNA, 25 bp, Probe Sequence
gcggatcacctgaggtcgggagttc

SEQ ID NO: 207169 - DNA, 25 bp, Probe Sequence
gcgcctgacgtcatgggagtttgtt

SEQ ID NO: 207170 - DNA, 25 bp, Probe Sequence
gcgtatgtcctaagctggagttctg

SEQ ID NO: 207171 - DNA, 25 bp, Probe Sequence
gcgtcaatcctacgggatcatttaa

SEQ ID NO: 207172 - DNA, 25 bp, Probe Sequence
gcgtcacctcaaggggccatggtga

SEQ ID NO: 207173 - DNA, 25 bp, Probe Sequence
gcccacccagatggggccagagtct

SEQ ID NO: 207174 - DNA, 25 bp, Probe Sequence
gcccacactgattgaggagcggaga

SEQ ID NO: 207175 - DNA, 25 bp, Probe Sequence
gcccacatctgcgtggagtgcgggg

SEQ ID NO: 207176 - DNA, 25 bp, Probe Sequence
gcccacgccgagcaggcgtgcggaa

SEQ ID NO: 207177 - DNA, 25 bp, Probe Sequence
gcccagcctcggagggtgggcaacc

SEQ ID NO: 207178 - DNA, 25 bp, Probe Sequence
gcacgtttcgtgaggggggatgccc

SEQ ID NO: 207179 - DNA, 25 bp, Probe Sequence
gcgcttaacgtgagggtgggtccag

SEQ ID NO: 207180 - DNA, 25 bp, Probe Sequence
gcttaaactgtaaagagtgggtcaa

SEQ ID NO: 207181 - DNA, 25 bp, Probe Sequence
gcgttggcacttaccaagttggata

SEQ ID NO: 207182 - DNA, 25 bp, Probe Sequence
gcgttagcgtttccggttggagagt

SEQ ID NO: 207183 - DNA, 25 bp, Probe Sequence
gcgatgtcagcggatgtcacgagct

SEQ ID NO: 207184 - DNA, 25 bp, Probe Sequence
gctggatcaggtaaagggccccttc

SEQ ID NO: 207185 - DNA, 25 bp, Probe Sequence
gcgctgaaggaatagggcggctttc

SEQ ID NO: 207186 - DNA, 25 bp, Probe Sequence
gcgcggagagacgcagcggaggttt

SEQ ID NO: 207187 - DNA, 25 bp, Probe Sequence
gcgcgtggagcagctcacgcgggac

SEQ ID NO: 207188 - DNA, 25 bp, Probe Sequence
gcgcgcaagagggcagaccgataga

SEQ ID NO: 207189 - DNA, 25 bp, Probe Sequence
gcgtgcagtagagagcaaagatggc

SEQ ID NO: 207190 - DNA, 25 bp, Probe Sequence
gcgtcaacgagttcaaagagctggt

SEQ ID NO: 207191 - DNA, 25 bp, Probe Sequence
gcgcccataagatcacaggtggagt

SEQ ID NO: 207192 - DNA, 25 bp, Probe Sequence
gcgcacgctacagtacaagctgctg

SEQ ID NO: 207193 - DNA, 25 bp, Probe Sequence
gcgcacttacacgagaagacattca

SEQ ID NO: 207194 - DNA, 25 bp, Probe Sequence
gcgcccgacacatggtgatgcagaa

SEQ ID NO: 207195 - DNA, 25 bp, Probe Sequence
gcgttgcgacagtggtggtataaaa

SEQ ID NO: 207196 - DNA, 25 bp, Probe Sequence
gcgttgaactgccaggtgtggattg

SEQ ID NO: 207197 - DNA, 25 bp, Probe Sequence
gcgttgaattaactttagattgact

SEQ ID NO: 207198 - DNA, 25 bp, Probe Sequence
gcgatgatgaatcttttcttcttga

SEQ ID NO: 207199 - DNA, 25 bp, Probe Sequence
gcgcaatgccataaatttcttcatc

SEQ ID NO: 207200 - DNA, 25 bp, Probe Sequence
gctgcacgccagaactctgtctggc

SEQ ID NO: 207201 - DNA, 25 bp, Probe Sequence
gcgactgcgacgttcgatcttgcat

SEQ ID NO: 207202 - DNA, 25 bp, Probe Sequence
gcgcatctgcaatggatggtcgtgc

SEQ ID NO: 207203 - DNA, 25 bp, Probe Sequence
gcgctcatggatacagatggctctg

SEQ ID NO: 207204 - DNA, 25 bp, Probe Sequence
gcgtcaggcttgaatatctcagaac

SEQ ID NO: 207205 - DNA, 25 bp, Probe Sequence
gctgtaacttgtttgctatggaact

SEQ ID NO: 207206 - DNA, 25 bp, Probe Sequence
gcagtagaacctcgtggggcaacat

SEQ ID NO: 207207 - DNA, 25 bp, Probe Sequence
gcgaaaacgggaagctatgcagaat

SEQ ID NO: 207208 - DNA, 25 bp, Probe Sequence
gcgaattacggagggttctggaagg

SEQ ID NO: 207209 - DNA, 25 bp, Probe Sequence
gctgaaggggcttggtgtttgtaag

SEQ ID NO: 207210 - DNA, 25 bp, Probe Sequence
gctgtacagggctaggttttttcaa

SEQ ID NO: 207211 - DNA, 25 bp, Probe Sequence
gcttccaggttaaggttctccgaga

SEQ ID NO: 207212 - DNA, 25 bp, Probe Sequence
gcttccaggttaaggttctccgaga

SEQ ID NO: 207213 - DNA, 25 bp, Probe Sequence
gcttccaggttaaggttctccgaga

SEQ ID NO: 207214 - DNA, 25 bp, Probe Sequence
gatttagggatcgggtttactcaga

SEQ ID NO: 207215 - DNA, 25 bp, Probe Sequence
gagttgggaaagcagttggactaga

SEQ ID NO: 207216 - DNA, 25 bp, Probe Sequence
gcgttgcaggaatgggcttggcagc

SEQ ID NO: 207217 - DNA, 25 bp, Probe Sequence
gcgcagcgggaatgagcggggatgc

SEQ ID NO: 207218 - DNA, 25 bp, Probe Sequence
gcgatccagtgatgagtcggggaca

SEQ ID NO: 207219 - DNA, 25 bp, Probe Sequence
gcgacacgtatgaggccgtggtcac

SEQ ID NO: 207220 - DNA, 25 bp, Probe Sequence
gcgacagtggggggcccatggtcgc

SEQ ID NO: 207221 - DNA, 25 bp, Probe Sequence
gcgtatggcgggacaaccatggctg

SEQ ID NO: 207222 - DNA, 25 bp, Probe Sequence
gcgtatggccacagaagttgctgct

SEQ ID NO: 207223 - DNA, 25 bp, Probe Sequence
gcgatttggccataagtcgtgcctg

SEQ ID NO: 207224 - DNA, 25 bp, Probe Sequence
gcgagggaccatcaagtgcaacttt

SEQ ID NO: 207225 - DNA, 25 bp, Probe Sequence
gcggaccaccatcaacaagaatgct

SEQ ID NO: 207226 - DNA, 25 bp, Probe Sequence
gcgggctcaaattcttcgaaagtgg

SEQ ID NO: 207227 - DNA, 25 bp, Probe Sequence
gcgaggcctattgttgaataaatgt

SEQ ID NO: 207228 - DNA, 25 bp, Probe Sequence
gcgggcacttggggggaaagttgag

SEQ ID NO: 207229 - DNA, 25 bp, Probe Sequence
gcgggaactgggagggaagggtgag

SEQ ID NO: 207230 - DNA, 25 bp, Probe Sequence
gcggggaggaggaggacgacgacga

SEQ ID NO: 207231 - DNA, 25 bp, Probe Sequence
gcgggaactaagctatgaggacata

SEQ ID NO: 207232 - DNA, 25 bp, Probe Sequence
gcgggaggtagacatgtagcagtaa

SEQ ID NO: 207233 - DNA, 25 bp, Probe Sequence
gcgcagatgcagctgaagtactaca

SEQ ID NO: 207234 - DNA, 25 bp, Probe Sequence
gcgcgtagttgctaacagcaaagag

SEQ ID NO: 207235 - DNA, 25 bp, Probe Sequence
gcgcccatgttgtatgacacatata

SEQ ID NO: 207236 - DNA, 25 bp, Probe Sequence
gcgcgcctgctgttgcagaggagaa

SEQ ID NO: 207237 - DNA, 25 bp, Probe Sequence
gcgcgctcgagctatgaatctcgga

SEQ ID NO: 207238 - DNA, 25 bp, Probe Sequence
gcgctcgagctatgaatctcggaaa

SEQ ID NO: 207239 - DNA, 25 bp, Probe Sequence
gcgccgtgctacgagacggtgaagg

SEQ ID NO: 207240 - DNA, 25 bp, Probe Sequence
gcgccgtgcagagagagcggagcag

SEQ ID NO: 207241 - DNA, 25 bp, Probe Sequence
gcgacgtcacagtgacggccatcgg

SEQ ID NO: 207242 - DNA, 25 bp, Probe Sequence
gcgcaaatagagttccggagctggg

SEQ ID NO: 207243 - DNA, 25 bp, Probe Sequence
gcgccagggagttcgtggagcggga

SEQ ID NO: 207244 - DNA, 25 bp, Probe Sequence
gcgcagcaagtgcatccgagcgagc

SEQ ID NO: 207245 - DNA, 25 bp, Probe Sequence
gcccaagtggaccagagtcatcctt

SEQ ID NO: 207246 - DNA, 25 bp, Probe Sequence
gcccacgctggacattgtcgcaagt

SEQ ID NO: 207247 - DNA, 25 bp, Probe Sequence
gcgacagagtgagaatctgtctcaa

SEQ ID NO: 207248 - DNA, 25 bp, Probe Sequence
gcgacagtctgcataacattgtaac

SEQ ID NO: 207249 - DNA, 25 bp, Probe Sequence
gcgacactgtgcattgcattatgga

SEQ ID NO: 207250 - DNA, 25 bp, Probe Sequence
gcgagcacattacttgctgcatggg

SEQ ID NO: 207251 - DNA, 25 bp, Probe Sequence
gcccacagtctggctcatgatgtgg

SEQ ID NO: 207252 - DNA, 25 bp, Probe Sequence
gcgtcagaccgagtgcatggtagag

SEQ ID NO: 207253 - DNA, 25 bp, Probe Sequence
gcgctaaggatgactctggtcagag

SEQ ID NO: 207254 - DNA, 25 bp, Probe Sequence
gcgccaatggtcatcatggactggg

SEQ ID NO: 207255 - DNA, 25 bp, Probe Sequence
gcccaatgagacatctagggagtcc

SEQ ID NO: 207256 - DNA, 25 bp, Probe Sequence
gcccaatgaataatccgccagaacg

SEQ ID NO: 207257 - DNA, 25 bp, Probe Sequence
gcccaatcagaagccgcgatttcag

SEQ ID NO: 207258 - DNA, 25 bp, Probe Sequence
gcaccaaaggaccttcgttaagtga

SEQ ID NO: 207259 - DNA, 25 bp, Probe Sequence
gctccaaagggcgttcgcttagcag

SEQ ID NO: 207260 - DNA, 25 bp, Probe Sequence
gcgccaaagtggacatgacgttcga

SEQ ID NO: 207261 - DNA, 25 bp, Probe Sequence
gcgaggaactggacaacgcactcaa

SEQ ID NO: 207262 - DNA, 25 bp, Probe Sequence
gcgtctgaacttccatccagaccaa

SEQ ID NO: 207263 - DNA, 25 bp, Probe Sequence
gcgtgtgaaacgcctagagaccccg

SEQ ID NO: 207264 - DNA, 25 bp, Probe Sequence
gcgggaaacgctgaaagccatccac

SEQ ID NO: 207265 - DNA, 25 bp, Probe Sequence
gcgggaacctggaaagcagcaccca

SEQ ID NO: 207266 - DNA, 25 bp, Probe Sequence
gacttcaagcctgaagaccagcccc

SEQ ID NO: 207267 - DNA, 25 bp, Probe Sequence
gcccaagagcttgaggaccagcctg

SEQ ID NO: 207268 - DNA, 25 bp, Probe Sequence
gcccacagccttggaaacagacctc

SEQ ID NO: 207269 - DNA, 25 bp, Probe Sequence
gcgccagagcgtgggcaacgaggcc

SEQ ID NO: 207270 - DNA, 25 bp, Probe Sequence
gcgccagggcagggaagtcagacct

SEQ ID NO: 207271 - DNA, 25 bp, Probe Sequence
gcattagggccctcagtagtcatcc

SEQ ID NO: 207272 - DNA, 25 bp, Probe Sequence
gctgtctgggccaagacgtcaattt

SEQ ID NO: 207273 - DNA, 25 bp, Probe Sequence
gctgtctgggccaagacgtcaattt

SEQ ID NO: 207274 - DNA, 25 bp, Probe Sequence
gcgcctggtcaccagggctgctttt

SEQ ID NO: 207275 - DNA, 25 bp, Probe Sequence
gcgcctggtcaccagggctgctttt

SEQ ID NO: 207276 - DNA, 25 bp, Probe Sequence
gcgtaggatcctgtttgtaatgcta

SEQ ID NO: 207277 - DNA, 25 bp, Probe Sequence
gcgtgagaatcactcctgtgttacc

SEQ ID NO: 207278 - DNA, 25 bp, Probe Sequence
gcgatagatgaactcaccgggagct

SEQ ID NO: 207279 - DNA, 25 bp, Probe Sequence
gcgcattggacgtccattgggagtt

SEQ ID NO: 207280 - DNA, 25 bp, Probe Sequence
gcgtgtgtgcaaactcttgagggtt

SEQ ID NO: 207281 - DNA, 25 bp, Probe Sequence
gcgttcttatacactgaaggagctg

SEQ ID NO: 207282 - DNA, 25 bp, Probe Sequence
gcgcttttccacaatggcaaggtcc

SEQ ID NO: 207283 - DNA, 25 bp, Probe Sequence
gcgttcttccacattgataatttag

SEQ ID NO: 207284 - DNA, 25 bp, Probe Sequence
gcgcttctttccatactatgtttac

SEQ ID NO: 207285 - DNA, 25 bp, Probe Sequence
gcgtctctgttgattccaagtttcc

SEQ ID NO: 207286 - DNA, 25 bp, Probe Sequence
gcgagtcatgggattcagcaccttg

SEQ ID NO: 207287 - DNA, 25 bp, Probe Sequence
gcgcaatcatagcacactgaagcct

SEQ ID NO: 207288 - DNA, 25 bp, Probe Sequence
gcgttctagcagacactgactgcgc

SEQ ID NO: 207289 - DNA, 25 bp, Probe Sequence
gcgtctatccagacctactggcaac

SEQ ID NO: 207290 - DNA, 25 bp, Probe Sequence
gcgtttccatgtgctaatgttgcac

SEQ ID NO: 207291 - DNA, 25 bp, Probe Sequence
gcgttttgcagtacatcaatgggcg

SEQ ID NO: 207292 - DNA, 25 bp, Probe Sequence
gcgttttgcagtacatcaatgggcg

SEQ ID NO: 207293 - DNA, 25 bp, Probe Sequence
gcgttttgcagtacatctatgggcg

SEQ ID NO: 207294 - DNA, 25 bp, Probe Sequence
gcgctttcatgcctattgttggtaa

SEQ ID NO: 207295 - DNA, 25 bp, Probe Sequence
gcgctattcatctgctttttgtaac

SEQ ID NO: 207296 - DNA, 25 bp, Probe Sequence
gcgctattcatctgctttttgtaac

SEQ ID NO: 207297 - DNA, 25 bp, Probe Sequence
gcgactcttgcattgctttttgtcc

SEQ ID NO: 207298 - DNA, 25 bp, Probe Sequence
gctgacgttcttgcttttggcgccc

SEQ ID NO: 207299 - DNA, 25 bp, Probe Sequence
gcgaatttctctgatttgtgggcac

SEQ ID NO: 207300 - DNA, 25 bp, Probe Sequence
gcggaattccgttctgggaagccaa

SEQ ID NO: 207301 - DNA, 25 bp, Probe Sequence
gcgtaacgtgggttggaaggacaag

SEQ ID NO: 207302 - DNA, 25 bp, Probe Sequence
gctgttaaagggttgggacctcaca

SEQ ID NO: 207303 - DNA, 25 bp, Probe Sequence
gcgtgtaccggtgggaggttctata

SEQ ID NO: 207304 - DNA, 25 bp, Probe Sequence
gcgttaaagcgctcagaggatgtta

SEQ ID NO: 207305 - DNA, 25 bp, Probe Sequence
gcgttggtgcacgttatggtgtttc

SEQ ID NO: 207306 - DNA, 25 bp, Probe Sequence
gcgaaagtggcattataggtgtttc

SEQ ID NO: 207307 - DNA, 25 bp, Probe Sequence
gcgaggactgagcctcggtgttttt

SEQ ID NO: 207308 - DNA, 25 bp, Probe Sequence
gcgaggacgtggtgggtcctctggt

SEQ ID NO: 207309 - DNA, 25 bp, Probe Sequence
gcggaatctgggtgcagttcctgca

SEQ ID NO: 207310 - DNA, 25 bp, Probe Sequence
gcgtcaacaggtaacacttccgctg

SEQ ID NO: 207311 - DNA, 25 bp, Probe Sequence
gcgaagaggagtgccacttctacgc

SEQ ID NO: 207312 - DNA, 25 bp, Probe Sequence
gcgaagagcaggaacttctgtgtat

SEQ ID NO: 207313 - DNA, 25 bp, Probe Sequence
gcgacaagagcgagactctgtctga

SEQ ID NO: 207314 - DNA, 25 bp, Probe Sequence
gcgcgagaagcgagaccttagaagg

SEQ ID NO: 207315 - DNA, 25 bp, Probe Sequence
gagggaacgctatccaaaaagttgg

SEQ ID NO: 207316 - DNA, 25 bp, Probe Sequence
gctgggaccgtttcaacaaaactct

SEQ ID NO: 207317 - DNA, 25 bp, Probe Sequence
gcggtcaaggatttaaaaccacctg

SEQ ID NO: 207318 - DNA, 25 bp, Probe Sequence
gcggccaggtgtttacaccaacgtg

SEQ ID NO: 207319 - DNA, 25 bp, Probe Sequence
gcgggcgggtttatccaaagggatg

SEQ ID NO: 207320 - DNA, 25 bp, Probe Sequence
gcggagggacttcaatcacatcaat

SEQ ID NO: 207321 - DNA, 25 bp, Probe Sequence
gcggcagaggaataagtaccgattc

SEQ ID NO: 207322 - DNA, 25 bp, Probe Sequence
gcgggagatgaacgacctaccggac

SEQ ID NO: 207323 - DNA, 25 bp, Probe Sequence
gcgggagatgaacgacctaccggac

SEQ ID NO: 207324 - DNA, 25 bp, Probe Sequence
gcgcggaagaaggtgcgtccgcggc

SEQ ID NO: 207325 - DNA, 25 bp, Probe Sequence
gcgggacatgatcatcctacccgag

SEQ ID NO: 207326 - DNA, 25 bp, Probe Sequence
gcggggtatcctgtaggcaagatcg

SEQ ID NO: 207327 - DNA, 25 bp, Probe Sequence
gcgctggaggactgtatgggcaagt

SEQ ID NO: 207328 - DNA, 25 bp, Probe Sequence
gcgaagagagagtgtatgaccaggt

SEQ ID NO: 207329 - DNA, 25 bp, Probe Sequence
gcgaaggcaggttattagaagagtc

SEQ ID NO: 207330 - DNA, 25 bp, Probe Sequence
gcgacagtaggctgcatctggagag

SEQ ID NO: 207331 - DNA, 25 bp, Probe Sequence
gcgcaagtactccgtgtggatcggc

SEQ ID NO: 207332 - DNA, 25 bp, Probe Sequence
gcgccaggtgtgggtgtacacaggc

SEQ ID NO: 207333 - DNA, 25 bp, Probe Sequence
gctccaactcagtgtttaaggcaca

SEQ ID NO: 207334 - DNA, 25 bp, Probe Sequence
gcgccacactggtgtctgaaaggaa

SEQ ID NO: 207335 - DNA, 25 bp, Probe Sequence
gcgcctcctgtgcgggaaagagacc

SEQ ID NO: 207336 - DNA, 25 bp, Probe Sequence
gcgacactcattcattgaagaagtg

SEQ ID NO: 207337 - DNA, 25 bp, Probe Sequence
gcgatcctgcttccaaagatcaggt

SEQ ID NO: 207338 - DNA, 25 bp, Probe Sequence
gcgatggccctcatgaagccatgcc

SEQ ID NO: 207339 - DNA, 25 bp, Probe Sequence
gcgaggacactaaggcatcactgct

SEQ ID NO: 207340 - DNA, 25 bp, Probe Sequence
gcgcgaacactggaatgcatatact

SEQ ID NO: 207341 - DNA, 25 bp, Probe Sequence
gcgcgcatgccagggaagactacaa

SEQ ID NO: 207342 - DNA, 25 bp, Probe Sequence
gcgctgctgcgtgtgaaacgcctag

SEQ ID NO: 207343 - DNA, 25 bp, Probe Sequence
gcgccgctgctgggagagatcccct

SEQ ID NO: 207344 - DNA, 25 bp, Probe Sequence
gcgcacgtgggaatggcagactccg

SEQ ID NO: 207345 - DNA, 25 bp, Probe Sequence
gcgcgagttggaatcgaagcctctt

SEQ ID NO: 207346 - DNA, 25 bp, Probe Sequence
gcgctcggtggatggaagccgtctg

SEQ ID NO: 207347 - DNA, 25 bp, Probe Sequence
gcgctgatgaccccggacaccgacg

SEQ ID NO: 207348 - DNA, 25 bp, Probe Sequence
gcgtgaactcgtgggatccttatgt

SEQ ID NO: 207349 - DNA, 25 bp, Probe Sequence
gcgtgtacggtgggaggtctatata

SEQ ID NO: 207350 - DNA, 25 bp, Probe Sequence
gcgtgtacggtgggaggtctatata

SEQ ID NO: 207351 - DNA, 25 bp, Probe Sequence
gcgaacccagtggaaggatctactg

SEQ ID NO: 207352 - DNA, 25 bp, Probe Sequence
gcgcaagagccagtcaaaggtccag

SEQ ID NO: 207353 - DNA, 25 bp, Probe Sequence
gcgcaaggtgacacacgagtcgccc

SEQ ID NO: 207354 - DNA, 25 bp, Probe Sequence
gcgaaggaggagcactgcctcagcc

SEQ ID NO: 207355 - DNA, 25 bp, Probe Sequence
gcgccagcggtggaggctgagtcgc

SEQ ID NO: 207356 - DNA, 25 bp, Probe Sequence
gcgcaatgctgacttggagctagat

SEQ ID NO: 207357 - DNA, 25 bp, Probe Sequence
gcgcatgtgaacttggagctgcatt

SEQ ID NO: 207358 - DNA, 25 bp, Probe Sequence
gcgagtgaacttgagccagggcatg

SEQ ID NO: 207359 - DNA, 25 bp, Probe Sequence
gcgagttacaccaaccaggacagaa

SEQ ID NO: 207360 - DNA, 25 bp, Probe Sequence
gctgttttgacctccatagaagaca

SEQ ID NO: 207361 - DNA, 25 bp, Probe Sequence
gctggttgtagaccccaaaagtaag

SEQ ID NO: 207362 - DNA, 25 bp, Probe Sequence
gtaatttacaccagaaataccaagg

SEQ ID NO: 207363 - DNA, 25 bp, Probe Sequence
gcagaatttgccacaggaaacgaca

SEQ ID NO: 207364 - DNA, 25 bp, Probe Sequence
gcgagttgctcccgaaggaactgac

SEQ ID NO: 207365 - DNA, 25 bp, Probe Sequence
gctagttgcgtcccagggaccaaga

SEQ ID NO: 207366 - DNA, 25 bp, Probe Sequence
gcgagtacacacacgggaaagaaac

SEQ ID NO: 207367 - DNA, 25 bp, Probe Sequence
gcgaggcccaccgtgaggtaatgaa

SEQ ID NO: 207368 - DNA, 25 bp, Probe Sequence
gcgaggttatcctgaggtgacatta

SEQ ID NO: 207369 - DNA, 25 bp, Probe Sequence
gcgaggatttcaggagcgaggattt

SEQ ID NO: 207370 - DNA, 25 bp, Probe Sequence
gcgagaccttagaaggcagcgcttc

SEQ ID NO: 207371 - DNA, 25 bp, Probe Sequence
gcgaaaattctgagtctgccttcca

SEQ ID NO: 207372 - DNA, 25 bp, Probe Sequence
gcgctaacattcactcttgtttgtc

SEQ ID NO: 207373 - DNA, 25 bp, Probe Sequence
gcgtatccttctacttatttagatc

SEQ ID NO: 207374 - DNA, 25 bp, Probe Sequence
gcgttcctgttagcataatgtgagg

SEQ ID NO: 207375 - DNA, 25 bp, Probe Sequence
gcgttcgctgaaaggcatcggtgcc

SEQ ID NO: 207376 - DNA, 25 bp, Probe Sequence
gcgctttggaaggcgcacggggcga

SEQ ID NO: 207377 - DNA, 25 bp, Probe Sequence
gcgcctcatggaagccccggaggcg

SEQ ID NO: 207378 - DNA, 25 bp, Probe Sequence
gcgcctgctggaagatgccgattag

SEQ ID NO: 207379 - DNA, 25 bp, Probe Sequence
gcgcatcttcgaaaacggctacgac

SEQ ID NO: 207380 - DNA, 25 bp, Probe Sequence
gcgctggccgtggaacggtgacggc

SEQ ID NO: 207381 - DNA, 25 bp, Probe Sequence
gcgctggccgtggaacggtgacggc

SEQ ID NO: 207382 - DNA, 25 bp, Probe Sequence
gcgcttcatcggcatacggatgcgg

SEQ ID NO: 207383 - DNA, 25 bp, Probe Sequence
gcgcgtgactggttgagcgggcagg

SEQ ID NO: 207384 - DNA, 25 bp, Probe Sequence
gcgcgattgggacagtcgccaggga

SEQ ID NO: 207385 - DNA, 25 bp, Probe Sequence
gcgcgcttgggagaaggccggaagc

SEQ ID NO: 207386 - DNA, 25 bp, Probe Sequence
gctggtcgggaatacctgggaagtt

SEQ ID NO: 207387 - DNA, 25 bp, Probe Sequence
gctgttggggaagcccccaagagat

SEQ ID NO: 207388 - DNA, 25 bp, Probe Sequence
ggctcccgaggagcaccccgtgctg

SEQ ID NO: 207389 - DNA, 25 bp, Probe Sequence
gcgctcagtgtagaaacccacgtct

SEQ ID NO: 207390 - DNA, 25 bp, Probe Sequence
gctccagggagttaactcttcttct

SEQ ID NO: 207391 - DNA, 25 bp, Probe Sequence
gctccaccaataaacgtttcgatct

SEQ ID NO: 207392 - DNA, 25 bp, Probe Sequence
gctccacgtccaagaagtagttcac

SEQ ID NO: 207393 - DNA, 25 bp, Probe Sequence
gctccacaacactggacttgggctc

SEQ ID NO: 207394 - DNA, 25 bp, Probe Sequence
gcgcaccattgctcaggattatggg

SEQ ID NO: 207395 - DNA, 25 bp, Probe Sequence
gcgcaggactcagatgacttcgagg

SEQ ID NO: 207396 - DNA, 25 bp, Probe Sequence
gcgcgagacacagagagcttcttat

SEQ ID NO: 207397 - DNA, 25 bp, Probe Sequence
gcgctgcagcaagaaggtgtacttc

SEQ ID NO: 207398 - DNA, 25 bp, Probe Sequence
gcgcaggaactgtgtgtgtcctaca

SEQ ID NO: 207399 - DNA, 25 bp, Probe Sequence
gcgcggcaacttccgggtatgagat

SEQ ID NO: 207400 - DNA, 25 bp, Probe Sequence
gcgcggcaacttccgggtatgagat

SEQ ID NO: 207401 - DNA, 25 bp, Probe Sequence
gcgggccctgtacgaggggtatgca

SEQ ID NO: 207402 - DNA, 25 bp, Probe Sequence
gcggggccattcgtaggatgggtga

SEQ ID NO: 207403 - DNA, 25 bp, Probe Sequence
gcgtgaggacaaactccgcaggggc

SEQ ID NO: 207404 - DNA, 25 bp, Probe Sequence
gcgcgaggtttaccgcaagggacgg

SEQ ID NO: 207405 - DNA, 25 bp, Probe Sequence
gctccgggttgacaaatggtggggt

SEQ ID NO: 207406 - DNA, 25 bp, Probe Sequence
gctcctcggattgaaagtgtggaga

SEQ ID NO: 207407 - DNA, 25 bp, Probe Sequence
gcatcccgttctttaacgtaatgta

SEQ ID NO: 207408 - DNA, 25 bp, Probe Sequence
gctgttgcttttgtaacgtaggctt

SEQ ID NO: 207409 - DNA, 25 bp, Probe Sequence
gcgtgttgtacatacagaggtaact

SEQ ID NO: 207410 - DNA, 25 bp, Probe Sequence
gcagatggaattttaatagttacac

SEQ ID NO: 207411 - DNA, 25 bp, Probe Sequence
gcgaccatatggggaatagtacacc

SEQ ID NO: 207412 - DNA, 25 bp, Probe Sequence
gcgaacactggaatgcatatactac

SEQ ID NO: 207413 - DNA, 25 bp, Probe Sequence
gcgaacctatgctcagatattcatc

SEQ ID NO: 207414 - DNA, 25 bp, Probe Sequence
gcgaacattatatccagaatcatgg

SEQ ID NO: 207415 - DNA, 25 bp, Probe Sequence
gcgacaatggaagccatagcaatgg

SEQ ID NO: 207416 - DNA, 25 bp, Probe Sequence
gcgagaagcgagaccttagaaggca

SEQ ID NO: 207417 - DNA, 25 bp, Probe Sequence
gcgagtacgaccgtgctgtgaagga

SEQ ID NO: 207418 - DNA, 25 bp, Probe Sequence
gcgcgagatcgagcagctggtgggc

SEQ ID NO: 207419 - DNA, 25 bp, Probe Sequence
gcgctgcagaccgtcaatggagcag

SEQ ID NO: 207420 - DNA, 25 bp, Probe Sequence
gcgcgccaagctggacaggcagcgc

SEQ ID NO: 207421 - DNA, 25 bp, Probe Sequence
gcgcgctacactgactggctcagcg

SEQ ID NO: 207422 - DNA, 25 bp, Probe Sequence
gcgcgatcacgtgacatgcaccgcg

SEQ ID NO: 207423 - DNA, 25 bp, Probe Sequence
gcgcgtgctggtggacatggacggc

SEQ ID NO: 207424 - DNA, 25 bp, Probe Sequence
gcgcgtgtgcgaggagatcgccatt

SEQ ID NO: 207425 - DNA, 25 bp, Probe Sequence
gcgctatcgcagggagatgctggcc

SEQ ID NO: 207426 - DNA, 25 bp, Probe Sequence
gcgctggtgcaggcacagacaggcc

SEQ ID NO: 207427 - DNA, 25 bp, Probe Sequence
gcgctggatcaagaactgcctgtgc

SEQ ID NO: 207428 - DNA, 25 bp, Probe Sequence
gcgctggatcaagaactgcctgtgc

SEQ ID NO: 207429 - DNA, 25 bp, Probe Sequence
gcgctggatcaagaactgcctgtgc

SEQ ID NO: 207430 - DNA, 25 bp, Probe Sequence
gcgctggtggatgaatgctgcctgc

SEQ ID NO: 207431 - DNA, 25 bp, Probe Sequence
gcgcgtgtggttgagctgaatgagg

SEQ ID NO: 207432 - DNA, 25 bp, Probe Sequence
gcgggtcagttgaggtcaggagttc

SEQ ID NO: 207433 - DNA, 25 bp, Probe Sequence
gctgggccagaaaatttcactaggt

SEQ ID NO: 207434 - DNA, 25 bp, Probe Sequence
gcgggccagcttctctaagctgaag

SEQ ID NO: 207435 - DNA, 25 bp, Probe Sequence
gcgggccagcttctctaagctgaag

SEQ ID NO: 207436 - DNA, 25 bp, Probe Sequence
gcgggcacacgctcttacagtcgat

SEQ ID NO: 207437 - DNA, 25 bp, Probe Sequence
gcgaggataagctggttgatgggat

SEQ ID NO: 207438 - DNA, 25 bp, Probe Sequence
gcggctgagaagtgcctttagttga

SEQ ID NO: 207439 - DNA, 25 bp, Probe Sequence
gcgtctagaaaatctcagttcccac

SEQ ID NO: 207440 - DNA, 25 bp, Probe Sequence
gctgtcggtgacagccacagttcct

SEQ ID NO: 207441 - DNA, 25 bp, Probe Sequence
gcgacctggcacagtgccagacccc

SEQ ID NO: 207442 - DNA, 25 bp, Probe Sequence
gcgactcttcacagtgcaaattccc

SEQ ID NO: 207443 - DNA, 25 bp, Probe Sequence
gcgcttcttccaggacaagcgcccg

SEQ ID NO: 207444 - DNA, 25 bp, Probe Sequence
gcgggctgtccggaaataccaggaa

SEQ ID NO: 207445 - DNA, 25 bp, Probe Sequence
gcggcctggtggggactgagccgcg

SEQ ID NO: 207446 - DNA, 25 bp, Probe Sequence
gcggcctggtggggactgagccgcg

SEQ ID NO: 207447 - DNA, 25 bp, Probe Sequence
gcggcctggtggggactgagccgcg

SEQ ID NO: 207448 - DNA, 25 bp, Probe Sequence
gcgacgtgagtctgagtctgatccc

SEQ ID NO: 207449 - DNA, 25 bp, Probe Sequence
gcgatgcggcggcgttattcccatg

SEQ ID NO: 207450 - DNA, 25 bp, Probe Sequence
gcgtctggggcatggtgaacccacc

SEQ ID NO: 207451 - DNA, 25 bp, Probe Sequence
gcgtcccagtgatgagggcacttac

SEQ ID NO: 207452 - DNA, 25 bp, Probe Sequence
gctgttccgtaaccaggtcatcatt

SEQ ID NO: 207453 - DNA, 25 bp, Probe Sequence
gcgtcctcgaaaccacgagcaagtg

SEQ ID NO: 207454 - DNA, 25 bp, Probe Sequence
gcgctcttactatgagaccagcaag

SEQ ID NO: 207455 - DNA, 25 bp, Probe Sequence
gcgcatcttacttcaaaaaatggga

SEQ ID NO: 207456 - DNA, 25 bp, Probe Sequence
gcgagatctacttgaaaaccttgga

SEQ ID NO: 207457 - DNA, 25 bp, Probe Sequence
gcgagatccctccaaaatcaagtgg

SEQ ID NO: 207458 - DNA, 25 bp, Probe Sequence
gcgagatccctccaaaatcaagtgg

SEQ ID NO: 207459 - DNA, 25 bp, Probe Sequence
gcgcacccactcgatgggtagggga

SEQ ID NO: 207460 - DNA, 25 bp, Probe Sequence
gcgcacagtcaatcagggtagaggg

SEQ ID NO: 207461 - DNA, 25 bp, Probe Sequence
gcgcagcagcccttcaggaaatggc

SEQ ID NO: 207462 - DNA, 25 bp, Probe Sequence
gcgacagacccctgacaagagcagg

SEQ ID NO: 207463 - DNA, 25 bp, Probe Sequence
gcgaagtgcatctcccataaacgag

SEQ ID NO: 207464 - DNA, 25 bp, Probe Sequence
gctgaccgcgcagccgcatgaaccg

SEQ ID NO: 207465 - DNA, 25 bp, Probe Sequence
gcgtccggcatggcggagagaacgt

SEQ ID NO: 207466 - DNA, 25 bp, Probe Sequence
gcgattcgagctccagctaggatga

SEQ ID NO: 207467 - DNA, 25 bp, Probe Sequence
gcgattcgagctccagctaggatga

SEQ ID NO: 207468 - DNA, 25 bp, Probe Sequence
gcgtccgagctgccagcaaagagat

SEQ ID NO: 207469 - DNA, 25 bp, Probe Sequence
gcgtctggagcgggaaaagcacttc

SEQ ID NO: 207470 - DNA, 25 bp, Probe Sequence
gcgacggagtttcacaagcctgatc

SEQ ID NO: 207471 - DNA, 25 bp, Probe Sequence
gcggctagattctcagattcacctt

SEQ ID NO: 207472 - DNA, 25 bp, Probe Sequence
gcggtgcagttttcaactgacctct

SEQ ID NO: 207473 - DNA, 25 bp, Probe Sequence
gcggaaattcttgtgcgcacacttg

SEQ ID NO: 207474 - DNA, 25 bp, Probe Sequence
gcgagacaatacacattccaactat

SEQ ID NO: 207475 - DNA, 25 bp, Probe Sequence
gcggacctgacagcattccaataaa

SEQ ID NO: 207476 - DNA, 25 bp, Probe Sequence
gcgcagacctaaactgatcctaaag

SEQ ID NO: 207477 - DNA, 25 bp, Probe Sequence
gcgagaggcttacctatgggccaag

SEQ ID NO: 207478 - DNA, 25 bp, Probe Sequence
gcgtggggtagcagatggagtaatg

SEQ ID NO: 207479 - DNA, 25 bp, Probe Sequence
gcaggaggcctgatatttagtaatg

SEQ ID NO: 207480 - DNA, 25 bp, Probe Sequence
gcgttggccgacttcttagagaagg

SEQ ID NO: 207481 - DNA, 25 bp, Probe Sequence
gcgttgagctgcttcaactttggaa

SEQ ID NO: 207482 - DNA, 25 bp, Probe Sequence
gcgaaaggattagcagtgtgtgaga

SEQ ID NO: 207483 - DNA, 25 bp, Probe Sequence
gcgaacaagaaactgctgggatcaa

SEQ ID NO: 207484 - DNA, 25 bp, Probe Sequence
gcgcatcatcaaaaatcctatggat

SEQ ID NO: 207485 - DNA, 25 bp, Probe Sequence
gcgcagccagaagcctgtgatggtg

SEQ ID NO: 207486 - DNA, 25 bp, Probe Sequence
gcgctgtcatgatgttcgttggctt

SEQ ID NO: 207487 - DNA, 25 bp, Probe Sequence
gcgagtcatgtagtgtggtagaatt

SEQ ID NO: 207488 - DNA, 25 bp, Probe Sequence
gcgagtgatgctagctgagtgttta

SEQ ID NO: 207489 - DNA, 25 bp, Probe Sequence
gcgcactgcgtggcgaatgtaaacg

SEQ ID NO: 207490 - DNA, 25 bp, Probe Sequence
gcgcactgctgttcagataggggac

SEQ ID NO: 207491 - DNA, 25 bp, Probe Sequence
gcgtatgtgtatttgctggggaaaa

SEQ ID NO: 207492 - DNA, 25 bp, Probe Sequence
gcgtaggcttttcggtggagttcct

SEQ ID NO: 207493 - DNA, 25 bp, Probe Sequence
gcgctgggctgttttagtgccaggc

SEQ ID NO: 207494 - DNA, 25 bp, Probe Sequence
gcgctgggttttaggagccgtaacg

SEQ ID NO: 207495 - DNA, 25 bp, Probe Sequence
gcacctggtttcggggacagtaggg

SEQ ID NO: 207496 - DNA, 25 bp, Probe Sequence
gcgcttggttacgggatccagatag

SEQ ID NO: 207497 - DNA, 25 bp, Probe Sequence
gcgttggttcaccaggacgtgatgg

SEQ ID NO: 207498 - DNA, 25 bp, Probe Sequence
gcggggtacacaagaggggatgagt

SEQ ID NO: 207499 - DNA, 25 bp, Probe Sequence
gcggggtacacaagaggggatgagt

SEQ ID NO: 207500 - DNA, 25 bp, Probe Sequence
gcgagacgtgatcacgagggagttt

SEQ ID NO: 207501 - DNA, 25 bp, Probe Sequence
gcgagctctggagagggggttgtct

SEQ ID NO: 207502 - DNA, 25 bp, Probe Sequence
gcgcacctcgtggggtggttgtgat

SEQ ID NO: 207503 - DNA, 25 bp, Probe Sequence
gcgcttcgcgggcagagagtggtac

SEQ ID NO: 207504 - DNA, 25 bp, Probe Sequence
gcgctactgcagcggagcacagggt

SEQ ID NO: 207505 - DNA, 25 bp, Probe Sequence
gcgtcatctacaagctgggtggcga

SEQ ID NO: 207506 - DNA, 25 bp, Probe Sequence
gcggccatgactggctactggttgt

SEQ ID NO: 207507 - DNA, 25 bp, Probe Sequence
gcgttagcatctggtttgctgtatg

SEQ ID NO: 207508 - DNA, 25 bp, Probe Sequence
gcgtaagcattgttgttctgttttg

SEQ ID NO: 207509 - DNA, 25 bp, Probe Sequence
gcgttgcacttgtcattgtgtttct

SEQ ID NO: 207510 - DNA, 25 bp, Probe Sequence
gcgttgcctgtgttgttgttttagt

SEQ ID NO: 207511 - DNA, 25 bp, Probe Sequence
gcgtgtggcagttttagttattagt

SEQ ID NO: 207512 - DNA, 25 bp, Probe Sequence
gcgtgtggcagttttaagttattag

SEQ ID NO: 207513 - DNA, 25 bp, Probe Sequence
gcgtgtggcagttttaagttattag

SEQ ID NO: 207514 - DNA, 25 bp, Probe Sequence
gcgtgtggcagttttaagttattag

SEQ ID NO: 207515 - DNA, 25 bp, Probe Sequence
gcgtgtggcagttttaagttattag

SEQ ID NO: 207516 - DNA, 25 bp, Probe Sequence
gcgtgtggcagttttaagttattag

SEQ ID NO: 207517 - DNA, 25 bp, Probe Sequence
gcgtgtggcagttttaagttattag

SEQ ID NO: 207518 - DNA, 25 bp, Probe Sequence
gcgcagggccaagttcaagtttcct

SEQ ID NO: 207519 - DNA, 25 bp, Probe Sequence
gcgcaggacacattcctcaatggta

SEQ ID NO: 207520 - DNA, 25 bp, Probe Sequence
gcgaggtgagcttcctcaattgctc

SEQ ID NO: 207521 - DNA, 25 bp, Probe Sequence
gcgaggagagcatccactgcaagtc

SEQ ID NO: 207522 - DNA, 25 bp, Probe Sequence
gcgaggaggctagcatctacgacaa

SEQ ID NO: 207523 - DNA, 25 bp, Probe Sequence
gcgagtgggttctatcttctaagat

SEQ ID NO: 207524 - DNA, 25 bp, Probe Sequence
gcgagtgggtaattgttgctcacca

SEQ ID NO: 207525 - DNA, 25 bp, Probe Sequence
gcgagtgtggaacctgatcagatac

SEQ ID NO: 207526 - DNA, 25 bp, Probe Sequence
gcgtggtggccatagacaacaagtt

SEQ ID NO: 207527 - DNA, 25 bp, Probe Sequence
gcggtcgacatttcagaaatcaagc

SEQ ID NO: 207528 - DNA, 25 bp, Probe Sequence
gcggtcgacatttcagaaatcaagc

SEQ ID NO: 207529 - DNA, 25 bp, Probe Sequence
gcgtgccatgacaaaggataacaac

SEQ ID NO: 207530 - DNA, 25 bp, Probe Sequence
gcgcaccatctcaagggaatacaca

SEQ ID NO: 207531 - DNA, 25 bp, Probe Sequence
gcgatcttctgccatggatgaaaac

SEQ ID NO: 207532 - DNA, 25 bp, Probe Sequence
gcgagattatcctgatggagatgga

SEQ ID NO: 207533 - DNA, 25 bp, Probe Sequence
gcgaacgcagcctttgagagtgggc

SEQ ID NO: 207534 - DNA, 25 bp, Probe Sequence
gcgagactaactttgagagtgtaac

SEQ ID NO: 207535 - DNA, 25 bp, Probe Sequence
gcgtaatttcattttagcatgtcaa

SEQ ID NO: 207536 - DNA, 25 bp, Probe Sequence
gcgtacactctcatattgtctattg

SEQ ID NO: 207537 - DNA, 25 bp, Probe Sequence
gcgtaacagcctacattgccttggc

SEQ ID NO: 207538 - DNA, 25 bp, Probe Sequence
gcgtaacagcctacattgccttggc

SEQ ID NO: 207539 - DNA, 25 bp, Probe Sequence
gcgtaacagcctacattgccttggc

SEQ ID NO: 207540 - DNA, 25 bp, Probe Sequence
gcgtaacagcctacattgccttggc

SEQ ID NO: 207541 - DNA, 25 bp, Probe Sequence
gcggaagggtacagccaatgcccga

SEQ ID NO: 207542 - DNA, 25 bp, Probe Sequence
gcggaagggtaaagccggggcagca

SEQ ID NO: 207543 - DNA, 25 bp, Probe Sequence
gcggaagcgttccaaatctcgggaa

SEQ ID NO: 207544 - DNA, 25 bp, Probe Sequence
gcggcaagccgtcaagatgatttgg

SEQ ID NO: 207545 - DNA, 25 bp, Probe Sequence
gcgatgatgggcctggcaacatttt

SEQ ID NO: 207546 - DNA, 25 bp, Probe Sequence
gcgcagtgggcgagatctcatcagc

SEQ ID NO: 207547 - DNA, 25 bp, Probe Sequence
gcgaggggtgggatcacagcatctc

SEQ ID NO: 207548 - DNA, 25 bp, Probe Sequence
gcgcagaagaaggatggtcaccaac

SEQ ID NO: 207549 - DNA, 25 bp, Probe Sequence
gcgagaggaaccagacctcatcagc

SEQ ID NO: 207550 - DNA, 25 bp, Probe Sequence
gcggaggaacgccgagcagtacaag

SEQ ID NO: 207551 - DNA, 25 bp, Probe Sequence
gctggagaaatcgggggctcgacgc

SEQ ID NO: 207552 - DNA, 25 bp, Probe Sequence
gcggagcaaagtatgggccagggag

SEQ ID NO: 207553 - DNA, 25 bp, Probe Sequence
gcggaagaaggtgcgtccgcggctg

SEQ ID NO: 207554 - DNA, 25 bp, Probe Sequence
tcggggagcggtgaaccgagggccg

SEQ ID NO: 207555 - DNA, 25 bp, Probe Sequence
tcacgggcacgggtaacgtgaacgt

SEQ ID NO: 207556 - DNA, 25 bp, Probe Sequence
gcaccaaccgtgataacctatactg

SEQ ID NO: 207557 - DNA, 25 bp, Probe Sequence
gcagtaacggggggacctatactga

SEQ ID NO: 207558 - DNA, 25 bp, Probe Sequence
gcgtaactggcggaaacccagaggc

SEQ ID NO: 207559 - DNA, 25 bp, Probe Sequence
gcgttagcggcattaattcaccaat

SEQ ID NO: 207560 - DNA, 25 bp, Probe Sequence
gcgtgatagcggtctgacttcaccg

SEQ ID NO: 207561 - DNA, 25 bp, Probe Sequence
gcgttatctgaattggcgagccacc

SEQ ID NO: 207562 - DNA, 25 bp, Probe Sequence
gcggcatttggtcgggcagccgcac

SEQ ID NO: 207563 - DNA, 25 bp, Probe Sequence
gctggttttggacagcgacaccggc

SEQ ID NO: 207564 - DNA, 25 bp, Probe Sequence
gttgtcctgcagaaagaggccctcg

SEQ ID NO: 207565 - DNA, 25 bp, Probe Sequence
gctgttccaacagacagggcctagc

SEQ ID NO: 207566 - DNA, 25 bp, Probe Sequence
gcgttatcaacgcaaggactggtga

SEQ ID NO: 207567 - DNA, 25 bp, Probe Sequence
gcgtctcacatacagaaatttgggc

SEQ ID NO: 207568 - DNA, 25 bp, Probe Sequence
gcgatccacaagtcgattgctattg

SEQ ID NO: 207569 - DNA, 25 bp, Probe Sequence
gctgtccaggaacatgatttgtgct

SEQ ID NO: 207570 - DNA, 25 bp, Probe Sequence
gcgtctctaagggtttctgtgattg

SEQ ID NO: 207571 - DNA, 25 bp, Probe Sequence
gcgtattatagacttttcttcaaac

SEQ ID NO: 207572 - DNA, 25 bp, Probe Sequence
gcgtgggctagacttatactaaaag

SEQ ID NO: 207573 - DNA, 25 bp, Probe Sequence
gctcggcaccaactaagaaaaaaag

SEQ ID NO: 207574 - DNA, 25 bp, Probe Sequence
gcaatggcctaaaaacaataaaaag

SEQ ID NO: 207575 - DNA, 25 bp, Probe Sequence
gcgtggatccctcaaccaagaagaa

SEQ ID NO: 207576 - DNA, 25 bp, Probe Sequence
gcgtggcctacgtgagccaacaaga

SEQ ID NO: 207577 - DNA, 25 bp, Probe Sequence
gcgggcctaagaccggaagcaggaa

SEQ ID NO: 207578 - DNA, 25 bp, Probe Sequence
gcgacccaaggaccacagaacagaa

SEQ ID NO: 207579 - DNA, 25 bp, Probe Sequence
gcgacccaaggaccacagaacagaa

SEQ ID NO: 207580 - DNA, 25 bp, Probe Sequence
gcgtcccagggaccaagagaaagaa

SEQ ID NO: 207581 - DNA, 25 bp, Probe Sequence
gcgtcaccggtcaccaggagtgaaa

SEQ ID NO: 207582 - DNA, 25 bp, Probe Sequence
gcgaacttatgacaccagaaggaac

SEQ ID NO: 207583 - DNA, 25 bp, Probe Sequence
gctaagggctacccgagtgggaagc

SEQ ID NO: 207584 - DNA, 25 bp, Probe Sequence
gctagatgggtaccaggtggggtta

SEQ ID NO: 207585 - DNA, 25 bp, Probe Sequence
gctctgagggtcccacttggaggaa

SEQ ID NO: 207586 - DNA, 25 bp, Probe Sequence
gcgtcaggatgttgccacttggagt

SEQ ID NO: 207587 - DNA, 25 bp, Probe Sequence
gcgacaacatgcagacagccgtggt

SEQ ID NO: 207588 - DNA, 25 bp, Probe Sequence
gcgcacagacatttgtcagggtggt

SEQ ID NO: 207589 - DNA, 25 bp, Probe Sequence
gcgacagacatctggaggacctgtt

SEQ ID NO: 207590 - DNA, 25 bp, Probe Sequence
gcgtcgacattgaagaggtggctgc

SEQ ID NO: 207591 - DNA, 25 bp, Probe Sequence
gcgttgtcaatggtgaggatgcggt

SEQ ID NO: 207592 - DNA, 25 bp, Probe Sequence
gcgttgtccatgtgcaagtctgtgg

SEQ ID NO: 207593 - DNA, 25 bp, Probe Sequence
gcgtggaggctgttaagatgctgga

SEQ ID NO: 207594 - DNA, 25 bp, Probe Sequence
gcgttaagtcggtaagctagaggat

SEQ ID NO: 207595 - DNA, 25 bp, Probe Sequence
gcgtaactgccacttaagcggcggt

SEQ ID NO: 207596 - DNA, 25 bp, Probe Sequence
gcggcaagaccgagaactgcgcggt

SEQ ID NO: 207597 - DNA, 25 bp, Probe Sequence
gcgagaagccggacgagttcgagtc

SEQ ID NO: 207598 - DNA, 25 bp, Probe Sequence
gctgagaactctgtaagtcccttta

SEQ ID NO: 207599 - DNA, 25 bp, Probe Sequence
gcgatgaacgtcttacaactcagtt

SEQ ID NO: 207600 - DNA, 25 bp, Probe Sequence
gcgtgaactctgttaaaactgatta

SEQ ID NO: 207601 - DNA, 25 bp, Probe Sequence
gcggaactgcgcttaaaacagcgga

SEQ ID NO: 207602 - DNA, 25 bp, Probe Sequence
gctggaactgccttaccaaggcgag

SEQ ID NO: 207603 - DNA, 25 bp, Probe Sequence
gcgagcaaggtccttccatagtgac

SEQ ID NO: 207604 - DNA, 25 bp, Probe Sequence
gcgaaaggtgctggaccatcgagac

SEQ ID NO: 207605 - DNA, 25 bp, Probe Sequence
gcgaggaggagttaccattgagcag

SEQ ID NO: 207606 - DNA, 25 bp, Probe Sequence
gcgagacctgggtggatgctgagcg

SEQ ID NO: 207607 - DNA, 25 bp, Probe Sequence
gcgatccatctacgtaggtggtcga

SEQ ID NO: 207608 - DNA, 25 bp, Probe Sequence
gcgaacgctacgccatggtttatgg

SEQ ID NO: 207609 - DNA, 25 bp, Probe Sequence
gcgaatcctccgctgaggtgatttg

SEQ ID NO: 207610 - DNA, 25 bp, Probe Sequence
gctggatctcccggggagttacgct

SEQ ID NO: 207611 - DNA, 25 bp, Probe Sequence
gctgttcccacaaaggactaagcct

SEQ ID NO: 207612 - DNA, 25 bp, Probe Sequence
gcgttcttagaataactactgcaca

SEQ ID NO: 207613 - DNA, 25 bp, Probe Sequence
gcagtttaagtattggaatttcaca

SEQ ID NO: 207614 - DNA, 25 bp, Probe Sequence
gcgtcttatattctgaaacttgcta

SEQ ID NO: 207615 - DNA, 25 bp, Probe Sequence
gcgtgtttaatgatgatgactccgc

SEQ ID NO: 207616 - DNA, 25 bp, Probe Sequence
gcgtgtttgactacagtgagtactg

SEQ ID NO: 207617 - DNA, 25 bp, Probe Sequence
gcgtttgtcatcagaatcagaggta

SEQ ID NO: 207618 - DNA, 25 bp, Probe Sequence
gcgttttggcagtacatcaatggcg

SEQ ID NO: 207619 - DNA, 25 bp, Probe Sequence
gcgttctttagaccaatgcattgcg

SEQ ID NO: 207620 - DNA, 25 bp, Probe Sequence
gcggcgttgtagttaagctcgtgta

SEQ ID NO: 207621 - DNA, 25 bp, Probe Sequence
gcggcgtgttaggaatgacctggaa

SEQ ID NO: 207622 - DNA, 25 bp, Probe Sequence
gcgacggataaggcctgaactggga

SEQ ID NO: 207623 - DNA, 25 bp, Probe Sequence
gcgaatggaagggcacaggtgcggg

SEQ ID NO: 207624 - DNA, 25 bp, Probe Sequence
gcgaatgaagaggcccggggaggac

SEQ ID NO: 207625 - DNA, 25 bp, Probe Sequence
gcgtacacagtgaccctggatggac

SEQ ID NO: 207626 - DNA, 25 bp, Probe Sequence
gcgtcaacggccactgtgtgtggct

SEQ ID NO: 207627 - DNA, 25 bp, Probe Sequence
gcgtgaagggcctggtggcggtaat

SEQ ID NO: 207628 - DNA, 25 bp, Probe Sequence
gcggagggatctttggggtacccat

SEQ ID NO: 207629 - DNA, 25 bp, Probe Sequence
gcgtggtgggctatgggatatacta

SEQ ID NO: 207630 - DNA, 25 bp, Probe Sequence
gcgaggatgggagggggtgctgagc

SEQ ID NO: 207631 - DNA, 25 bp, Probe Sequence
gcgagcgagggagaggagggagagg

SEQ ID NO: 207632 - DNA, 25 bp, Probe Sequence
gcgacaggtaggggcgaggggagct

SEQ ID NO: 207633 - DNA, 25 bp, Probe Sequence
gcgaggttgggcggccagaagtgag

SEQ ID NO: 207634 - DNA, 25 bp, Probe Sequence
gcggtgtctggaggacttgacgtca

SEQ ID NO: 207635 - DNA, 25 bp, Probe Sequence
gcgtcttctagagagcttagtgtat

SEQ ID NO: 207636 - DNA, 25 bp, Probe Sequence
gcgtcatgttcaaggagccggtgga

SEQ ID NO: 207637 - DNA, 25 bp, Probe Sequence
gctgtcgattaagaccggagcttgt

SEQ ID NO: 207638 - DNA, 25 bp, Probe Sequence
gcgttattcaagcactccagacttg

SEQ ID NO: 207639 - DNA, 25 bp, Probe Sequence
gcgttgatgctcagaatcgcctacc

SEQ ID NO: 207640 - DNA, 25 bp, Probe Sequence
gcgtattgtatatacgcctcacact

SEQ ID NO: 207641 - DNA, 25 bp, Probe Sequence
gcgtactggttgtaggcgtagctgc

SEQ ID NO: 207642 - DNA, 25 bp, Probe Sequence
gcgtggtggtggaagcctgtagtcc

SEQ ID NO: 207643 - DNA, 25 bp, Probe Sequence
gcgtggtggtggaagcctgtagtcc

SEQ ID NO: 207644 - DNA, 25 bp, Probe Sequence
gcgtggtggctggagaccataacct

SEQ ID NO: 207645 - DNA, 25 bp, Probe Sequence
gcgatcattgatggggagctctaca

SEQ ID NO: 207646 - DNA, 25 bp, Probe Sequence
gcgacagctgggctgaatatcacag

SEQ ID NO: 207647 - DNA, 25 bp, Probe Sequence
gcgacgcgctggcgttacagcgcaa

SEQ ID NO: 207648 - DNA, 25 bp, Probe Sequence
gcgatcgctgccaggatatacgtaa

SEQ ID NO: 207649 - DNA, 25 bp, Probe Sequence
gcgacgtgcagatggctgtgtctgt

SEQ ID NO: 207650 - DNA, 25 bp, Probe Sequence
gcgataacagtacgtgtgcatgtgt

SEQ ID NO: 207651 - DNA, 25 bp, Probe Sequence
gcgataacagtcatgtggagatgaa

SEQ ID NO: 207652 - DNA, 25 bp, Probe Sequence
gcgatgcgacaggcatgatggaggt

SEQ ID NO: 207653 - DNA, 25 bp, Probe Sequence
gcgtgctgaagagtgtggctgtgaa

SEQ ID NO: 207654 - DNA, 25 bp, Probe Sequence
gcgtgatatgcacctgcaacggaga

SEQ ID NO: 207655 - DNA, 25 bp, Probe Sequence
gctggcattgccctcaacgaccact

SEQ ID NO: 207656 - DNA, 25 bp, Probe Sequence
gcggcatgtgaccatcattgaactg

SEQ ID NO: 207657 - DNA, 25 bp, Probe Sequence
gcgtattgagcacattaagcattct

SEQ ID NO: 207658 - DNA, 25 bp, Probe Sequence
gcgttaagcacctttatcttcatga

SEQ ID NO: 207659 - DNA, 25 bp, Probe Sequence
gcgattatacaaattatgtcttcca

SEQ ID NO: 207660 - DNA, 25 bp, Probe Sequence
gcgacattatcaggtttgcgcctcc

SEQ ID NO: 207661 - DNA, 25 bp, Probe Sequence
gcgatctcatcaaggtgacgccctc

SEQ ID NO: 207662 - DNA, 25 bp, Probe Sequence
gcgactcattgacttgcacagtcct

SEQ ID NO: 207663 - DNA, 25 bp, Probe Sequence
gcgacctggagaaggatgtcatgct

SEQ ID NO: 207664 - DNA, 25 bp, Probe Sequence
gcgactcggagagtgcagattcact

SEQ ID NO: 207665 - DNA, 25 bp, Probe Sequence
gcgactggagagggtgagtagccac

SEQ ID NO: 207666 - DNA, 25 bp, Probe Sequence
gcgacacagaagggggtggggcggg

SEQ ID NO: 207667 - DNA, 25 bp, Probe Sequence
gcgacacagaagggggtggggcggg

SEQ ID NO: 207668 - DNA, 25 bp, Probe Sequence
gcgaggctgaaggagccgggacgcg

SEQ ID NO: 207669 - DNA, 25 bp, Probe Sequence
gcgagattgaagaagggtgcggttg

SEQ ID NO: 207670 - DNA, 25 bp, Probe Sequence
gcgaggtcagaggagggcatgggtt

SEQ ID NO: 207671 - DNA, 25 bp, Probe Sequence
gcgagcctgcaggggagagctgagg

SEQ ID NO: 207672 - DNA, 25 bp, Probe Sequence
gcgagcctgcaggggagagctgagg

SEQ ID NO: 207673 - DNA, 25 bp, Probe Sequence
gcgaccggcagcttatgagccaggt

SEQ ID NO: 207674 - DNA, 25 bp, Probe Sequence
gcggcttgtgcagcaatggccaaga

SEQ ID NO: 207675 - DNA, 25 bp, Probe Sequence
gcggctgctcgaacagattgcgagc

SEQ ID NO: 207676 - DNA, 25 bp, Probe Sequence
gcgagcttcagcagcagagtgacac

SEQ ID NO: 207677 - DNA, 25 bp, Probe Sequence
gcgtcttcacagcgaatacacagcc

SEQ ID NO: 207678 - DNA, 25 bp, Probe Sequence
gcgttgctgtcccagcaaacacacc

SEQ ID NO: 207679 - DNA, 25 bp, Probe Sequence
gcgttgctgtcccagcaaacacacc

SEQ ID NO: 207680 - DNA, 25 bp, Probe Sequence
gcgtcctgatgaggatgtgaatccc

SEQ ID NO: 207681 - DNA, 25 bp, Probe Sequence
gcgataccagagcagataatcagct

SEQ ID NO: 207682 - DNA, 25 bp, Probe Sequence
gcgtaccagaagtatgactcatgca

SEQ ID NO: 207683 - DNA, 25 bp, Probe Sequence
gcgacagctcagtgaagtcttcatt

SEQ ID NO: 207684 - DNA, 25 bp, Probe Sequence
gcgagacacagagagcttcttatgt

SEQ ID NO: 207685 - DNA, 25 bp, Probe Sequence
gcgacaacaacaagtgtgccttctg

SEQ ID NO: 207686 - DNA, 25 bp, Probe Sequence
gcgtcagtatagaggcctttgcatc

SEQ ID NO: 207687 - DNA, 25 bp, Probe Sequence
gcgatttcacagttggcacttctgc

SEQ ID NO: 207688 - DNA, 25 bp, Probe Sequence
gcgaggtagcagtgtcgcctcgccc

SEQ ID NO: 207689 - DNA, 25 bp, Probe Sequence
gcgaggaagacattgaccgctgcgt

SEQ ID NO: 207690 - DNA, 25 bp, Probe Sequence
gcgaggaagagcagcactggtccca

SEQ ID NO: 207691 - DNA, 25 bp, Probe Sequence
gcggacgtcattgtcctagcaggaa

SEQ ID NO: 207692 - DNA, 25 bp, Probe Sequence
gcggaaaaatctacctatgaagaat

SEQ ID NO: 207693 - DNA, 25 bp, Probe Sequence
gcgggcacaacattatcctcaaaac

SEQ ID NO: 207694 - DNA, 25 bp, Probe Sequence
gcgttcataactgtcctcaacaaca

SEQ ID NO: 207695 - DNA, 25 bp, Probe Sequence
gcgtacaatattgatctcctaagac

SEQ ID NO: 207696 - DNA, 25 bp, Probe Sequence
gcgtctcatctttcataaccacaag

SEQ ID NO: 207697 - DNA, 25 bp, Probe Sequence
gcgtaatgcacttatccacaaatca

SEQ ID NO: 207698 - DNA, 25 bp, Probe Sequence
gcgtgaagcgcttttccacaatggc

SEQ ID NO: 207699 - DNA, 25 bp, Probe Sequence
gcgtagaccatactttccagtagct

SEQ ID NO: 207700 - DNA, 25 bp, Probe Sequence
gcgtatacgagccttcacgcataag

SEQ ID NO: 207701 - DNA, 25 bp, Probe Sequence
gctgctgagacgacactaccaataa

SEQ ID NO: 207702 - DNA, 25 bp, Probe Sequence
gctgctgagaagagccactaactcg

SEQ ID NO: 207703 - DNA, 25 bp, Probe Sequence
gctggcatcaatcagcccaagaccc

SEQ ID NO: 207704 - DNA, 25 bp, Probe Sequence
gcgtgcaatatctgccagcagaacc

SEQ ID NO: 207705 - DNA, 25 bp, Probe Sequence
gcgtcatgttcaccaactgcatgca

SEQ ID NO: 207706 - DNA, 25 bp, Probe Sequence
gcgtctgcttcagggacatgagcac

SEQ ID NO: 207707 - DNA, 25 bp, Probe Sequence
gcgtgctctctcggaataagacaga

SEQ ID NO: 207708 - DNA, 25 bp, Probe Sequence
gcgtctcccctgtcaatgagaatca

SEQ ID NO: 207709 - DNA, 25 bp, Probe Sequence
gcgtccagcctctaaatggaatgtt

SEQ ID NO: 207710 - DNA, 25 bp, Probe Sequence
gcgtctgcaccttcagaaacagtgc

SEQ ID NO: 207711 - DNA, 25 bp, Probe Sequence
gcgattgctctttctgcagcatagc

SEQ ID NO: 207712 - DNA, 25 bp, Probe Sequence
gcgagtctgctactgctaaagctgt

SEQ ID NO: 207713 - DNA, 25 bp, Probe Sequence
gcgacctgcgagactcacaagaggg

SEQ ID NO: 207714 - DNA, 25 bp, Probe Sequence
gcgagcctgggatcaccagagctgt

SEQ ID NO: 207715 - DNA, 25 bp, Probe Sequence
gcgatgccgggatcaaagtctgttc

SEQ ID NO: 207716 - DNA, 25 bp, Probe Sequence
gcgaccctgatgaactaagatttaa

SEQ ID NO: 207717 - DNA, 25 bp, Probe Sequence
gcgggaccggataacaatttcacac

SEQ ID NO: 207718 - DNA, 25 bp, Probe Sequence
gcgggaggggctacaaatgcttgac

SEQ ID NO: 207719 - DNA, 25 bp, Probe Sequence
gcgtggggggctgcagaagattctc

SEQ ID NO: 207720 - DNA, 25 bp, Probe Sequence
gcggggcggcgagaggaaacgcggc

SEQ ID NO: 207721 - DNA, 25 bp, Probe Sequence
gcgagtgtcgggagccggaactggg

SEQ ID NO: 207722 - DNA, 25 bp, Probe Sequence
gcgtgagtttggaggggaacgtgtc

SEQ ID NO: 207723 - DNA, 25 bp, Probe Sequence
gcggaggtgggtgagtttccgtggc

SEQ ID NO: 207724 - DNA, 25 bp, Probe Sequence
gcggacgcgggggagaatgacctgt

SEQ ID NO: 207725 - DNA, 25 bp, Probe Sequence
gcggcccctggagatgattgagccg

SEQ ID NO: 207726 - DNA, 25 bp, Probe Sequence
gcggccccttgatagttcacaagag

SEQ ID NO: 207727 - DNA, 25 bp, Probe Sequence
gcggggcgccagtgaattaataagg

SEQ ID NO: 207728 - DNA, 25 bp, Probe Sequence
gcgggtgtccgtccggaaatgaagg

SEQ ID NO: 207729 - DNA, 25 bp, Probe Sequence
gctgggttttgccggaaaattgcag

SEQ ID NO: 207730 - DNA, 25 bp, Probe Sequence
gcgttttctgtgttgccaaaatccc

SEQ ID NO: 207731 - DNA, 25 bp, Probe Sequence
gcgtctttgcatttctgcgaaagat

SEQ ID NO: 207732 - DNA, 25 bp, Probe Sequence
gcgtgacctcattttcagaattctg

SEQ ID NO: 207733 - DNA, 25 bp, Probe Sequence
gcggacattcactgaaatcatctct

SEQ ID NO: 207734 - DNA, 25 bp, Probe Sequence
gcggatcctgcagaaactcgctgtg

SEQ ID NO: 207735 - DNA, 25 bp, Probe Sequence
gctgcagggccagaaacctttgtta

SEQ ID NO: 207736 - DNA, 25 bp, Probe Sequence
gcgagggcaatggcaacaactttga

SEQ ID NO: 207737 - DNA, 25 bp, Probe Sequence
gcgagcggagtgaacaacctttcat

SEQ ID NO: 207738 - DNA, 25 bp, Probe Sequence
gcggctggatggaaactacttgaag

SEQ ID NO: 207739 - DNA, 25 bp, Probe Sequence
gcggccgagaaatgcaatgctggat

SEQ ID NO: 207740 - DNA, 25 bp, Probe Sequence
gcgtgcctaaattaacctggtcatg

SEQ ID NO: 207741 - DNA, 25 bp, Probe Sequence
gcgtcagcatttataatcctggtgc

SEQ ID NO: 207742 - DNA, 25 bp, Probe Sequence
gcaggcactgctcattaatcctggg

SEQ ID NO: 207743 - DNA, 25 bp, Probe Sequence
gcgagcgctgcgtgaacaccagcgg

SEQ ID NO: 207744 - DNA, 25 bp, Probe Sequence
gcgaggcagagattgcagtgagcca

SEQ ID NO: 207745 - DNA, 25 bp, Probe Sequence
gcgaggcagagattgcagtgagcca

SEQ ID NO: 207746 - DNA, 25 bp, Probe Sequence
gcgagtgcaggtacgaggagcgcag

SEQ ID NO: 207747 - DNA, 25 bp, Probe Sequence
gcgatgtgctttatggcaggcgcaa

SEQ ID NO: 207748 - DNA, 25 bp, Probe Sequence
gcgtggctgtttttgaactgcctgg

SEQ ID NO: 207749 - DNA, 25 bp, Probe Sequence
gctctgggacttttatgctcccaga

SEQ ID NO: 207750 - DNA, 25 bp, Probe Sequence
gcatcattcggctgttaccaaaaca

SEQ ID NO: 207751 - DNA, 25 bp, Probe Sequence
gctcttcggcatacgggccaaaaga

SEQ ID NO: 207752 - DNA, 25 bp, Probe Sequence
gcgtgctcttcattggggccaatga

SEQ ID NO: 207753 - DNA, 25 bp, Probe Sequence
gcgtgccaatcaacatgctggtgaa

SEQ ID NO: 207754 - DNA, 25 bp, Probe Sequence
gcgtgacaatccaatgccgagtggc

SEQ ID NO: 207755 - DNA, 25 bp, Probe Sequence
gcgtgagaagccatgagcagcaaag

SEQ ID NO: 207756 - DNA, 25 bp, Probe Sequence
gcgtggatatcgacgagtgccgaga

SEQ ID NO: 207757 - DNA, 25 bp, Probe Sequence
gcgaggagtgcgacgtgagtctgag

SEQ ID NO: 207758 - DNA, 25 bp, Probe Sequence
gcgaggctgtgcacaaggctgagct

SEQ ID NO: 207759 - DNA, 25 bp, Probe Sequence
gcgaggcaggcatgagtgcctggct

SEQ ID NO: 207760 - DNA, 25 bp, Probe Sequence
gcgagaatggatcaatggtgccacg

SEQ ID NO: 207761 - DNA, 25 bp, Probe Sequence
gcgttatgagatcaagatgaccaag

SEQ ID NO: 207762 - DNA, 25 bp, Probe Sequence
gcgtacatgaatcagtatagacatc

SEQ ID NO: 207763 - DNA, 25 bp, Probe Sequence
gctgaacagactcagtctacctcca

SEQ ID NO: 207764 - DNA, 25 bp, Probe Sequence
gctgaagcagcccgcatattaggcg

SEQ ID NO: 207765 - DNA, 25 bp, Probe Sequence
gctgaagcagcccgcatattaggcg

SEQ ID NO: 207766 - DNA, 25 bp, Probe Sequence
gctgaagcagcccgcatattaggcg

SEQ ID NO: 207767 - DNA, 25 bp, Probe Sequence
gcaggccagtcacgtttaggtgggg

SEQ ID NO: 207768 - DNA, 25 bp, Probe Sequence
gctgtgctcggacggaaagcggggc

SEQ ID NO: 207769 - DNA, 25 bp, Probe Sequence
gcggtgcggcagggaagaggggtgc

SEQ ID NO: 207770 - DNA, 25 bp, Probe Sequence
gcgagtggcgcaggtaacagaccgc

SEQ ID NO: 207771 - DNA, 25 bp, Probe Sequence
gcgagtgagcagcgatacctagggc

SEQ ID NO: 207772 - DNA, 25 bp, Probe Sequence
gctggttgcgcagatacctaggctt

SEQ ID NO: 207773 - DNA, 25 bp, Probe Sequence
gcggatggccgaaaatctaggcttc

SEQ ID NO: 207774 - DNA, 25 bp, Probe Sequence
gcggtgcgacgaaggagtaggtggt

SEQ ID NO: 207775 - DNA, 25 bp, Probe Sequence
gctggtctaccaggtagttggggag

SEQ ID NO: 207776 - DNA, 25 bp, Probe Sequence
gcaggtttccctgcagtatgagaaa

SEQ ID NO: 207777 - DNA, 25 bp, Probe Sequence
gcaggttttggtactttagaaatgt

SEQ ID NO: 207778 - DNA, 25 bp, Probe Sequence
gcggttttagatgctttgttttgat

SEQ ID NO: 207779 - DNA, 25 bp, Probe Sequence
gcggtgttcatgatttcttttattc

SEQ ID NO: 207780 - DNA, 25 bp, Probe Sequence
gcgtgatgttacttatctctttaaa

SEQ ID NO: 207781 - DNA, 25 bp, Probe Sequence
gcgtcaggtactacatagctctgta

SEQ ID NO: 207782 - DNA, 25 bp, Probe Sequence
gcgtctgatgtgtcattaagtgcag

SEQ ID NO: 207783 - DNA, 25 bp, Probe Sequence
gcgtctgatgtgtcattaagtgcag

SEQ ID NO: 207784 - DNA, 25 bp, Probe Sequence
gcgtcatcttcgttgtagtgaggtc

SEQ ID NO: 207785 - DNA, 25 bp, Probe Sequence
gcgtgctgccatcgttgtaggagta

SEQ ID NO: 207786 - DNA, 25 bp, Probe Sequence
gcgtggccagagagcggaagtgccc

SEQ ID NO: 207787 - DNA, 25 bp, Probe Sequence
gggcccgaggtgcgtgagtaccggg

SEQ ID NO: 207788 - DNA, 25 bp, Probe Sequence
gcgaggccgaggtgggcagatcact

SEQ ID NO: 207789 - DNA, 25 bp, Probe Sequence
gcgaggcaagggttgcactggacca

SEQ ID NO: 207790 - DNA, 25 bp, Probe Sequence
gcggtccaggtcttcatctatgacc

SEQ ID NO: 207791 - DNA, 25 bp, Probe Sequence
gcggacggagctgttcattgccgcc

SEQ ID NO: 207792 - DNA, 25 bp, Probe Sequence
gcgggggagggcaaattcaccagca

SEQ ID NO: 207793 - DNA, 25 bp, Probe Sequence
gcggggcgaagagaatacagactat

SEQ ID NO: 207794 - DNA, 25 bp, Probe Sequence
gcgggcgtgggagatacgggcatag

SEQ ID NO: 207795 - DNA, 25 bp, Probe Sequence
gctggcgcgggatgaggacgggcca

SEQ ID NO: 207796 - DNA, 25 bp, Probe Sequence
gcgggcggatcatgaggtcaggaga

SEQ ID NO: 207797 - DNA, 25 bp, Probe Sequence
gcgatcctggcacgtactgtaggag

SEQ ID NO: 207798 - DNA, 25 bp, Probe Sequence
gcgtcctcaaggcatctggagggct

SEQ ID NO: 207799 - DNA, 25 bp, Probe Sequence
gcgtcttcaagccgtgggaggagcg

SEQ ID NO: 207800 - DNA, 25 bp, Probe Sequence
gcgtcttcaccaccatggagaaggc

SEQ ID NO: 207801 - DNA, 25 bp, Probe Sequence
gcgtcttcaccaccatggagaaggc

SEQ ID NO: 207802 - DNA, 25 bp, Probe Sequence
gcggcttgtccctaggaagaggcga

SEQ ID NO: 207803 - DNA, 25 bp, Probe Sequence
gcggcctttgttaagcagcgagggc

SEQ ID NO: 207804 - DNA, 25 bp, Probe Sequence
gcggcctcgcttgaaggagggcgtc

SEQ ID NO: 207805 - DNA, 25 bp, Probe Sequence
gctggtgccgttgagaagggggtcc

SEQ ID NO: 207806 - DNA, 25 bp, Probe Sequence
gctggttcgtggagacggagggggc

SEQ ID NO: 207807 - DNA, 25 bp, Probe Sequence
gcggaatcggtggtagaggtcgggg

SEQ ID NO: 207808 - DNA, 25 bp, Probe Sequence
gagaattaggtcaaagggtcaatac

SEQ ID NO: 207809 - DNA, 25 bp, Probe Sequence
gcagaacttcgtgaatgtattaaaa

SEQ ID NO: 207810 - DNA, 25 bp, Probe Sequence
gcggctttagtatagtattgagtac

SEQ ID NO: 207811 - DNA, 25 bp, Probe Sequence
gcggctaaagtctctccaaggtgac

SEQ ID NO: 207812 - DNA, 25 bp, Probe Sequence
gcggctacaatgcctacggaggcgg

SEQ ID NO: 207813 - DNA, 25 bp, Probe Sequence
gcggctcacacagcgaaggaggggc

SEQ ID NO: 207814 - DNA, 25 bp, Probe Sequence
gcggtaccagtgcacagaggggttt

SEQ ID NO: 207815 - DNA, 25 bp, Probe Sequence
gcggtaggcgtgtacggtgggaggt

SEQ ID NO: 207816 - DNA, 25 bp, Probe Sequence
gcggtaggcgtgtacggtgggaggt

SEQ ID NO: 207817 - DNA, 25 bp, Probe Sequence
gcggtaggcgtgtacggtgggaggt

SEQ ID NO: 207818 - DNA, 25 bp, Probe Sequence
gcggtaggcgtgtacggtgggaggt

SEQ ID NO: 207819 - DNA, 25 bp, Probe Sequence
gcggtaggcgtgtacggtgggaggt

SEQ ID NO: 207820 - DNA, 25 bp, Probe Sequence
gcggtaggcgtgtacggtgggaggt

SEQ ID NO: 207821 - DNA, 25 bp, Probe Sequence
gcggtaggcgtgtacggtgggaggt

SEQ ID NO: 207822 - DNA, 25 bp, Probe Sequence
gcggtaggcgtgtacggtgggaggt

SEQ ID NO: 207823 - DNA, 25 bp, Probe Sequence
gcggtaggcgtgtacggtgggaggt

SEQ ID NO: 207824 - DNA, 25 bp, Probe Sequence
gcggtaggcgtgtacggtgggaggt

SEQ ID NO: 207825 - DNA, 25 bp, Probe Sequence
gcggtaggcgtgtacggtgggaggt

SEQ ID NO: 207826 - DNA, 25 bp, Probe Sequence
gctggaagggacacagtggggcagg

SEQ ID NO: 207827 - DNA, 25 bp, Probe Sequence
gcggcattgtgggcttaggcgaaac

SEQ ID NO: 207828 - DNA, 25 bp, Probe Sequence
gcgtcatcgtggttatgaccatctt

SEQ ID NO: 207829 - DNA, 25 bp, Probe Sequence
gctgatccagatgttatgctcctgc

SEQ ID NO: 207830 - DNA, 25 bp, Probe Sequence
gcgttacagcgcaacagcagcctgc

SEQ ID NO: 207831 - DNA, 25 bp, Probe Sequence
gcgatatacacagcagacctagcca

SEQ ID NO: 207832 - DNA, 25 bp, Probe Sequence
gcgtgaccagcagagcttctgagga

SEQ ID NO: 207833 - DNA, 25 bp, Probe Sequence
gcggaggcagcaaatgttacagatc

SEQ ID NO: 207834 - DNA, 25 bp, Probe Sequence
gctgcggtgcaagaatgctaaacca

SEQ ID NO: 207835 - DNA, 25 bp, Probe Sequence
gcgtgcggcagaaaatcgagaagga

SEQ ID NO: 207836 - DNA, 25 bp, Probe Sequence
gcgtgcggcagaaaatcgagaagga

SEQ ID NO: 207837 - DNA, 25 bp, Probe Sequence
gcggggcgctgagattgagtacgcc

SEQ ID NO: 207838 - DNA, 25 bp, Probe Sequence
gcggcccactgcattgtgggacacc

SEQ ID NO: 207839 - DNA, 25 bp, Probe Sequence
gctggcaaacgcccttctggaaaag

SEQ ID NO: 207840 - DNA, 25 bp, Probe Sequence
gcgtcaaatgtcctgtctcatggaa

SEQ ID NO: 207841 - DNA, 25 bp, Probe Sequence
gcggcatgaatgtatctgtctgctc

SEQ ID NO: 207842 - DNA, 25 bp, Probe Sequence
gctggcagcattgcatgattctcca

SEQ ID NO: 207843 - DNA, 25 bp, Probe Sequence
gctggagactggcagtgtcccaatc

SEQ ID NO: 207844 - DNA, 25 bp, Probe Sequence
gctggagactggcagtgtcccaatc

SEQ ID NO: 207845 - DNA, 25 bp, Probe Sequence
gcggctaggggagatccagcacatg

SEQ ID NO: 207846 - DNA, 25 bp, Probe Sequence
gcggtatgggggcttcatgaagaag

SEQ ID NO: 207847 - DNA, 25 bp, Probe Sequence
gcgttcagggagattactatggaga

SEQ ID NO: 207848 - DNA, 25 bp, Probe Sequence
gcgtcggtagacattgttctgtgga

SEQ ID NO: 207849 - DNA, 25 bp, Probe Sequence
gctgtccaggacagttgaactgatg

SEQ ID NO: 207850 - DNA, 25 bp, Probe Sequence
gcgtcgggagcaaagggacatatgc

SEQ ID NO: 207851 - DNA, 25 bp, Probe Sequence
gcgtcgaggtggagcgcgacaacct

SEQ ID NO: 207852 - DNA, 25 bp, Probe Sequence
gcgtctgggtgtggagctccaagac

SEQ ID NO: 207853 - DNA, 25 bp, Probe Sequence
gcgggggaggaggtccaagaagtca

SEQ ID NO: 207854 - DNA, 25 bp, Probe Sequence
gcgtggggcggggattattggcgtc

SEQ ID NO: 207855 - DNA, 25 bp, Probe Sequence
gcgtggagggggaatgtgtgctggc

SEQ ID NO: 207856 - DNA, 25 bp, Probe Sequence
gctggtgcagatgaactacgtgggc

SEQ ID NO: 207857 - DNA, 25 bp, Probe Sequence
gcgtgtcagtattgtgtgacgctgg

SEQ ID NO: 207858 - DNA, 25 bp, Probe Sequence
gcgtggcagccatgctggcctgtgc

SEQ ID NO: 207859 - DNA, 25 bp, Probe Sequence
gcgtgcatgcgcacgtgtgcaagtg

SEQ ID NO: 207860 - DNA, 25 bp, Probe Sequence
gcgtctgccataggaatgtgagagg

SEQ ID NO: 207861 - DNA, 25 bp, Probe Sequence
gcggtgcgatgatgacagtgtcggc

SEQ ID NO: 207862 - DNA, 25 bp, Probe Sequence
gcgtgtgtgaaagcaggtggaccat

SEQ ID NO: 207863 - DNA, 25 bp, Probe Sequence
gcgtgggcaacagagtaagacctgt

SEQ ID NO: 207864 - DNA, 25 bp, Probe Sequence
gcgtgggcaacgaggccgagatctg

SEQ ID NO: 207865 - DNA, 25 bp, Probe Sequence
gctggggcgacgtggacaataatgt

SEQ ID NO: 207866 - DNA, 25 bp, Probe Sequence
gcgggagtggagtggaagaagaggg

SEQ ID NO: 207867 - DNA, 25 bp, Probe Sequence
gcgggagtggagtggaagaagaggg

SEQ ID NO: 207868 - DNA, 25 bp, Probe Sequence
gcgggggtggctgggaagtgaaacg

SEQ ID NO: 207869 - DNA, 25 bp, Probe Sequence
gcgggcagggttgggctgaatcaaa

SEQ ID NO: 207870 - DNA, 25 bp, Probe Sequence
gcgggcagggttgggctgaatcaaa

SEQ ID NO: 207871 - DNA, 25 bp, Probe Sequence
gcggagaagtttgactgccactact

SEQ ID NO: 207872 - DNA, 25 bp, Probe Sequence
gcggaaagtctttatcacttattcg

SEQ ID NO: 207873 - DNA, 25 bp, Probe Sequence
gctggtcatggtgtgtacctgtaat

SEQ ID NO: 207874 - DNA, 25 bp, Probe Sequence
gctggcctgagaggggagccgatgc

SEQ ID NO: 207875 - DNA, 25 bp, Probe Sequence
gctggtcggaagattgctggactcg

SEQ ID NO: 207876 - DNA, 25 bp, Probe Sequence
gcggggcaaatgagtctggcgccgc

SEQ ID NO: 207877 - DNA, 25 bp, Probe Sequence
gcgggagcaactgaacaggccgcgc

SEQ ID NO: 207878 - DNA, 25 bp, Probe Sequence
gcgggtgcagaagatccgagccggc

SEQ ID NO: 207879 - DNA, 25 bp, Probe Sequence
gcggggcagaaagccatggaccagc

SEQ ID NO: 207880 - DNA, 25 bp, Probe Sequence
gcagcatgaggggctacccgagccc

SEQ ID NO: 207881 - DNA, 25 bp, Probe Sequence
gcgtaggagatctctgtggagcctg

SEQ ID NO: 207882 - DNA, 25 bp, Probe Sequence
gcgtgggatgtgcgtgcatgccacc

SEQ ID NO: 207883 - DNA, 25 bp, Probe Sequence
gcgtgcttatgaccaacattcatcc

SEQ ID NO: 207884 - DNA, 25 bp, Probe Sequence
gcggcgctataatatcattccagtt

SEQ ID NO: 207885 - DNA, 25 bp, Probe Sequence
gcgtctttgtatccaagtccattgt

SEQ ID NO: 207886 - DNA, 25 bp, Probe Sequence
gctgtaatcatgaacctaggccacc

SEQ ID NO: 207887 - DNA, 25 bp, Probe Sequence
gcgtacatattgaccaatggcctct

SEQ ID NO: 207888 - DNA, 25 bp, Probe Sequence
gcggcacattggacatgctaacctc

SEQ ID NO: 207889 - DNA, 25 bp, Probe Sequence
gcggcagcatatggactcagacagt

SEQ ID NO: 207890 - DNA, 25 bp, Probe Sequence
gcgtgcacatatgggtgctggcaga

SEQ ID NO: 207891 - DNA, 25 bp, Probe Sequence
gcgtgccattgctgagctgggcatc

SEQ ID NO: 207892 - DNA, 25 bp, Probe Sequence
gcggacagctgcttacatgttcatc

SEQ ID NO: 207893 - DNA, 25 bp, Probe Sequence
gcgtgcagagctgtagtatcagcta

SEQ ID NO: 207894 - DNA, 25 bp, Probe Sequence
gcggcacatgccatatgctcagccg

SEQ ID NO: 207895 - DNA, 25 bp, Probe Sequence
gcggcacgagtcacatctgaaggtt

SEQ ID NO: 207896 - DNA, 25 bp, Probe Sequence
gcggcactactcacaatagcaaaga

SEQ ID NO: 207897 - DNA, 25 bp, Probe Sequence
gctggcaccagtcagcggggagaag

SEQ ID NO: 207898 - DNA, 25 bp, Probe Sequence
gcggcaccagctcggagagaaagga

SEQ ID NO: 207899 - DNA, 25 bp, Probe Sequence
gcggccgcaggaagaagaactcaga

SEQ ID NO: 207900 - DNA, 25 bp, Probe Sequence
gcggcggcgagaggatgaacaacaa

SEQ ID NO: 207901 - DNA, 25 bp, Probe Sequence
gcggtacagagcggtgatcaaagcc

SEQ ID NO: 207902 - DNA, 25 bp, Probe Sequence
gcggtaagcatccgaataaatcctc

SEQ ID NO: 207903 - DNA, 25 bp, Probe Sequence
gctggctcaactgctattaaacctc

SEQ ID NO: 207904 - DNA, 25 bp, Probe Sequence
gcagggaacttcagaaaaccccttg

SEQ ID NO: 207905 - DNA, 25 bp, Probe Sequence
gcggacagttccagaaacagaccct

SEQ ID NO: 207906 - DNA, 25 bp, Probe Sequence
gcggggctctccagaacatcatccc

SEQ ID NO: 207907 - DNA, 25 bp, Probe Sequence
gctggggcccgagagatggtggccc

SEQ ID NO: 207908 - DNA, 25 bp, Probe Sequence
gctggagaggcagacggtgggaccc

SEQ ID NO: 207909 - DNA, 25 bp, Probe Sequence
gcttaaggactatggaatggatctc

SEQ ID NO: 207910 - DNA, 25 bp, Probe Sequence
gcttaaggactatggagtggatctc

SEQ ID NO: 207911 - DNA, 25 bp, Probe Sequence
gcttaaggactatggagtggatctc

SEQ ID NO: 207912 - DNA, 25 bp, Probe Sequence
gcttttggacttcggcagtctgtcc

SEQ ID NO: 207913 - DNA, 25 bp, Probe Sequence
gctgcctgggaaagggcagttttac

SEQ ID NO: 207914 - DNA, 25 bp, Probe Sequence
gctggctggacgaggtagttctaat

SEQ ID NO: 207915 - DNA, 25 bp, Probe Sequence
gcgtggatgtcctgcggattttatt

SEQ ID NO: 207916 - DNA, 25 bp, Probe Sequence
gcgtgaagttgcagtagattgtcta

SEQ ID NO: 207917 - DNA, 25 bp, Probe Sequence
gcgtgagggtgcactcagggtgttg

SEQ ID NO: 207918 - DNA, 25 bp, Probe Sequence
gcgtatgggacacaagggagctctg

SEQ ID NO: 207919 - DNA, 25 bp, Probe Sequence
gcgtgatggttacactagaagccca

SEQ ID NO: 207920 - DNA, 25 bp, Probe Sequence
gggtttacaggagaggactgccagt

SEQ ID NO: 207921 - DNA, 25 bp, Probe Sequence
gcggttattcggtgagcggtggtgg

SEQ ID NO: 207922 - DNA, 25 bp, Probe Sequence
gcggcttttcggagcatgcatgttt

SEQ ID NO: 207923 - DNA, 25 bp, Probe Sequence
gcggcttttcggagcatgcatgttt

SEQ ID NO: 207924 - DNA, 25 bp, Probe Sequence
gcggttttcatggagactgtcttac

SEQ ID NO: 207925 - DNA, 25 bp, Probe Sequence
gcggttattcttgacactcttaaca

SEQ ID NO: 207926 - DNA, 25 bp, Probe Sequence
gctggttattcttaccctgtgagaa

SEQ ID NO: 207927 - DNA, 25 bp, Probe Sequence
gcggctgaatttcggcacctgcaat

SEQ ID NO: 207928 - DNA, 25 bp, Probe Sequence
gcggatgcaaaaagctgcccttcac

SEQ ID NO: 207929 - DNA, 25 bp, Probe Sequence
gctgactaatacatctggctttccc

SEQ ID NO: 207930 - DNA, 25 bp, Probe Sequence
gctggccacaagattgaattccgtc

SEQ ID NO: 207931 - DNA, 25 bp, Probe Sequence
gctggccaacgtcttgctgatgacg

SEQ ID NO: 207932 - DNA, 25 bp, Probe Sequence
gcgtcagctaggccaataggaacag

SEQ ID NO: 207933 - DNA, 25 bp, Probe Sequence
gcggcagtgtgtccatcatattaaa

SEQ ID NO: 207934 - DNA, 25 bp, Probe Sequence
gcgtgcattatcaacatcatattca

SEQ ID NO: 207935 - DNA, 25 bp, Probe Sequence
gctgtcaatacctcatactgcttta

SEQ ID NO: 207936 - DNA, 25 bp, Probe Sequence
gctgaaaatcagctttgcctttaat

SEQ ID NO: 207937 - DNA, 25 bp, Probe Sequence
gctggagcccagctttttggtaatg

SEQ ID NO: 207938 - DNA, 25 bp, Probe Sequence
gctgaagccccgtatatttaattta

SEQ ID NO: 207939 - DNA, 25 bp, Probe Sequence
gctggacacccgcatgtgtaacaac

SEQ ID NO: 207940 - DNA, 25 bp, Probe Sequence
gctgggagaacgcttgttcccactc

SEQ ID NO: 207941 - DNA, 25 bp, Probe Sequence
gcggaacaatagctggttatttctc

SEQ ID NO: 207942 - DNA, 25 bp, Probe Sequence
gcggaaaatggcagacaatttttcg

SEQ ID NO: 207943 - DNA, 25 bp, Probe Sequence
gctggaaattcctgacgttcattga

SEQ ID NO: 207944 - DNA, 25 bp, Probe Sequence
gcggaaacagaaaacgttgtgtgac

SEQ ID NO: 207945 - DNA, 25 bp, Probe Sequence
gcgggccaagtgtaacggctggtgt

SEQ ID NO: 207946 - DNA, 25 bp, Probe Sequence
gcgggtccagtgtcaacagtatcat

SEQ ID NO: 207947 - DNA, 25 bp, Probe Sequence
gcgggttcggatacaatgtcacaca

SEQ ID NO: 207948 - DNA, 25 bp, Probe Sequence
gcgggacggatgaacaatgttcaca

SEQ ID NO: 207949 - DNA, 25 bp, Probe Sequence
gcgggacggataacaatttcacaca

SEQ ID NO: 207950 - DNA, 25 bp, Probe Sequence
gcgggacggataacaatttcacaca

SEQ ID NO: 207951 - DNA, 25 bp, Probe Sequence
gcgggacggataacaatttcacaca

SEQ ID NO: 207952 - DNA, 25 bp, Probe Sequence
gcgggacggataacaatttcacaca

SEQ ID NO: 207953 - DNA, 25 bp, Probe Sequence
gcgggacggataacaatttcacaca

SEQ ID NO: 207954 - DNA, 25 bp, Probe Sequence
gcgggacggataacatttcacacag

SEQ ID NO: 207955 - DNA, 25 bp, Probe Sequence
gcgggacggataacatttcacacag

SEQ ID NO: 207956 - DNA, 25 bp, Probe Sequence
gctgggaggtaaactttcctctgaa

SEQ ID NO: 207957 - DNA, 25 bp, Probe Sequence
gcgggaggtgaaagtctccgtggtg

SEQ ID NO: 207958 - DNA, 25 bp, Probe Sequence
gcaggaggggagacccaccttgaag

SEQ ID NO: 207959 - DNA, 25 bp, Probe Sequence
gcaggaggggagacccaccttgaag

SEQ ID NO: 207960 - DNA, 25 bp, Probe Sequence
gcggaattgagagatccactctgga

SEQ ID NO: 207961 - DNA, 25 bp, Probe Sequence
gctggaaagagtgatgcctggggaa

SEQ ID NO: 207962 - DNA, 25 bp, Probe Sequence
gctggaaacatcactgcgtactgga

SEQ ID NO: 207963 - DNA, 25 bp, Probe Sequence
gctggccaaataccttcaactgaga

SEQ ID NO: 207964 - DNA, 25 bp, Probe Sequence
gctggcctgttaactgataactaga

SEQ ID NO: 207965 - DNA, 25 bp, Probe Sequence
gctgggttggtgaattaactaatgg

SEQ ID NO: 207966 - DNA, 25 bp, Probe Sequence
gctggtgacggtagcattacccaaa

SEQ ID NO: 207967 - DNA, 25 bp, Probe Sequence
gctgaaggtgttacctcaccaaata

SEQ ID NO: 207968 - DNA, 25 bp, Probe Sequence
gctgtggtatgttagctttaaaaga

SEQ ID NO: 207969 - DNA, 25 bp, Probe Sequence
gcgtggtccttaggcttacaatgtg

SEQ ID NO: 207970 - DNA, 25 bp, Probe Sequence
gcgtgtgggttatgtttctggctgg

SEQ ID NO: 207971 - DNA, 25 bp, Probe Sequence
gcggtggttcattcctttcagccat

SEQ ID NO: 207972 - DNA, 25 bp, Probe Sequence
gcggaggcttgggtgcgttcaagat

SEQ ID NO: 207973 - DNA, 25 bp, Probe Sequence
gcggttttggcagtgggatatggaa

SEQ ID NO: 207974 - DNA, 25 bp, Probe Sequence
gcggttttggcagtacatcaatggc

SEQ ID NO: 207975 - DNA, 25 bp, Probe Sequence
gcggttttggcagtacatcaatggg

SEQ ID NO: 207976 - DNA, 25 bp, Probe Sequence
gcggttgtttgtggaccactgcgtg

SEQ ID NO: 207977 - DNA, 25 bp, Probe Sequence
gcggtatgttgggccagagcatccg

SEQ ID NO: 207978 - DNA, 25 bp, Probe Sequence
gcggatgataatctcaagacacctc

SEQ ID NO: 207979 - DNA, 25 bp, Probe Sequence
gctggatgacattttgaagtaccac

SEQ ID NO: 207980 - DNA, 25 bp, Probe Sequence
gctggaggtaattggctaaccagcc

SEQ ID NO: 207981 - DNA, 25 bp, Probe Sequence
gcggaggtaaagaaccactcagcat

SEQ ID NO: 207982 - DNA, 25 bp, Probe Sequence
gcgggtggaaaatcccgcagtccag

SEQ ID NO: 207983 - DNA, 25 bp, Probe Sequence
gcgggtggaacagtcaacctttcta

SEQ ID NO: 207984 - DNA, 25 bp, Probe Sequence
gcggagtggaacgtacatcctgact

SEQ ID NO: 207985 - DNA, 25 bp, Probe Sequence
gctgaagtactacaactccgacgtg

SEQ ID NO: 207986 - DNA, 25 bp, Probe Sequence
gctggattactacaaccacaacctg

SEQ ID NO: 207987 - DNA, 25 bp, Probe Sequence
gcggcttatacagtaccctaacctg

SEQ ID NO: 207988 - DNA, 25 bp, Probe Sequence
gcggattgcaaagttcgcctttgac

SEQ ID NO: 207989 - DNA, 25 bp, Probe Sequence
gctggattgcagagttaagtttatg

SEQ ID NO: 207990 - DNA, 25 bp, Probe Sequence
gctggattcgattgccaaggctcgt

SEQ ID NO: 207991 - DNA, 25 bp, Probe Sequence
gctgagtttggagcagggtccatcc

SEQ ID NO: 207992 - DNA, 25 bp, Probe Sequence
gctagacaaggatagtggctaccca

SEQ ID NO: 207993 - DNA, 25 bp, Probe Sequence
gctggaaaggccagcagccttccca

SEQ ID NO: 207994 - DNA, 25 bp, Probe Sequence
gctggatagagtcatggcccattga

SEQ ID NO: 207995 - DNA, 25 bp, Probe Sequence
gcggtaatgctggtggtctgcatca

SEQ ID NO: 207996 - DNA, 25 bp, Probe Sequence
gcggatcaagcaattggtctatcaa

SEQ ID NO: 207997 - DNA, 25 bp, Probe Sequence
gctggcctacagtggctacaaatac

SEQ ID NO: 207998 - DNA, 25 bp, Probe Sequence
gctggattgatacggggaaaacatc

SEQ ID NO: 207999 - DNA, 25 bp, Probe Sequence
gctggcattgtatactagaaaactg

SEQ ID NO: 208000 - DNA, 25 bp, Probe Sequence
gcggtttgcaacttaaatatcactc

SEQ ID NO: 208001 - DNA, 25 bp, Probe Sequence
gcggttctggaaaggcacttgcctc

SEQ ID NO: 208002 - DNA, 25 bp, Probe Sequence
gcgtgatcacggaataggcaaactt

SEQ ID NO: 208003 - DNA, 25 bp, Probe Sequence
gcggatcacgaggtcaggagatcga

SEQ ID NO: 208004 - DNA, 25 bp, Probe Sequence
gcggatcacgaggtcaggagatcga

SEQ ID NO: 208005 - DNA, 25 bp, Probe Sequence
tgtagtgaggacccacggggagcct

SEQ ID NO: 208006 - DNA, 25 bp, Probe Sequence
gcgggacagatgcatggagcagctg

SEQ ID NO: 208007 - DNA, 25 bp, Probe Sequence
gctggctgtcttgtgtgcagcctga

SEQ ID NO: 208008 - DNA, 25 bp, Probe Sequence
gcggtgatcgtcatggaccgctcga

SEQ ID NO: 208009 - DNA, 25 bp, Probe Sequence
gctgagtacgtcgtggagtccactg

SEQ ID NO: 208010 - DNA, 25 bp, Probe Sequence
gcgtctgacagtcctgagaattatt

SEQ ID NO: 208011 - DNA, 25 bp, Probe Sequence
gcgtgtgacagtcttgcattctgtt

SEQ ID NO: 208012 - DNA, 25 bp, Probe Sequence
gcgtgtgacagtcttgcattctgtt

SEQ ID NO: 208013 - DNA, 25 bp, Probe Sequence
gcgtgtgacagtaagctaacctttg

SEQ ID NO: 208014 - DNA, 25 bp, Probe Sequence
gcgtgagcaaggagaagtccgcttc

SEQ ID NO: 208015 - DNA, 25 bp, Probe Sequence
gctggacaagatctacagccggcct

SEQ ID NO: 208016 - DNA, 25 bp, Probe Sequence
gctggccagtgtgtcctgtaagact

SEQ ID NO: 208017 - DNA, 25 bp, Probe Sequence
gcggcagattgtggacctggacact

SEQ ID NO: 208018 - DNA, 25 bp, Probe Sequence
gcgggatgctaaacattgaaagctg

SEQ ID NO: 208019 - DNA, 25 bp, Probe Sequence
gcgggctggctaacattgctatatt

SEQ ID NO: 208020 - DNA, 25 bp, Probe Sequence
gcgtgaacgtgaactgtgtgaacat

SEQ ID NO: 208021 - DNA, 25 bp, Probe Sequence
gcgggagcgtgatgtgctggaacgg

SEQ ID NO: 208022 - DNA, 25 bp, Probe Sequence
gcggcgagtgtgaagtgggctgggt

SEQ ID NO: 208023 - DNA, 25 bp, Probe Sequence
gctggctacggaagctcagtgctgt

SEQ ID NO: 208024 - DNA, 25 bp, Probe Sequence
gcggtaggtatagagagctgtcaca

SEQ ID NO: 208025 - DNA, 25 bp, Probe Sequence
gctgtggggtgaaccgacttcaagg

SEQ ID NO: 208026 - DNA, 25 bp, Probe Sequence
gctcggaaatatgcccacttggtgg

SEQ ID NO: 208027 - DNA, 25 bp, Probe Sequence
gcaggcaagattaaccctttggggg

SEQ ID NO: 208028 - DNA, 25 bp, Probe Sequence
gcggaagtttgaacccttatgtggg

SEQ ID NO: 208029 - DNA, 25 bp, Probe Sequence
gctggacgtttgaactctgttaata

SEQ ID NO: 208030 - DNA, 25 bp, Probe Sequence
gctggactgttttgacctggtttaa

SEQ ID NO: 208031 - DNA, 25 bp, Probe Sequence
gcggaaagttagtgcttgttctaag

SEQ ID NO: 208032 - DNA, 25 bp, Probe Sequence
gcggaatgtgcttagtatttggtca

SEQ ID NO: 208033 - DNA, 25 bp, Probe Sequence
gcggactgatgttagactttggata

SEQ ID NO: 208034 - DNA, 25 bp, Probe Sequence
gctggaatgggcgagacattgctgc

SEQ ID NO: 208035 - DNA, 25 bp, Probe Sequence
gctggccatggagaaagctgacttg

SEQ ID NO: 208036 - DNA, 25 bp, Probe Sequence
gctggccaagatgaggaccacttca

SEQ ID NO: 208037 - DNA, 25 bp, Probe Sequence
gctgagcacgaaggcaaaccctact

SEQ ID NO: 208038 - DNA, 25 bp, Probe Sequence
gcggactaatcttcaactcctacat

SEQ ID NO: 208039 - DNA, 25 bp, Probe Sequence
gcggcagctctattatcaagtccta

SEQ ID NO: 208040 - DNA, 25 bp, Probe Sequence
gcggtgctgcatattcatacctgta

SEQ ID NO: 208041 - DNA, 25 bp, Probe Sequence
gctggaggatcacttcagcccagga

SEQ ID NO: 208042 - DNA, 25 bp, Probe Sequence
gctggagttcagaaacgaagcggag

SEQ ID NO: 208043 - DNA, 25 bp, Probe Sequence
gctgcaggttgataaacaaacggga

SEQ ID NO: 208044 - DNA, 25 bp, Probe Sequence
gctgcaggttgtaaatagtgtacga

SEQ ID NO: 208045 - DNA, 25 bp, Probe Sequence
gtccctttcccaatatgctacggga

SEQ ID NO: 208046 - DNA, 25 bp, Probe Sequence
gctcttctttcccaaaattagggag

SEQ ID NO: 208047 - DNA, 25 bp, Probe Sequence
gctgctttaaaagaaatgctaagga

SEQ ID NO: 208048 - DNA, 25 bp, Probe Sequence
gcggggacaaactacttcatcaagg

SEQ ID NO: 208049 - DNA, 25 bp, Probe Sequence
gcggacggataacatttcacacagg

SEQ ID NO: 208050 - DNA, 25 bp, Probe Sequence
gcgtggcagaatacctctttgacaa

SEQ ID NO: 208051 - DNA, 25 bp, Probe Sequence
gcggctgagaatgcacttactggct

SEQ ID NO: 208052 - DNA, 25 bp, Probe Sequence
gctggcagaaattgaccttcggcaa

SEQ ID NO: 208053 - DNA, 25 bp, Probe Sequence
gctggacaaatcgcccatcagatac

SEQ ID NO: 208054 - DNA, 25 bp, Probe Sequence
gcggtaattccagctccaatagcgt

SEQ ID NO: 208055 - DNA, 25 bp, Probe Sequence
gcggtaattccagctccaatagcgt

SEQ ID NO: 208056 - DNA, 25 bp, Probe Sequence
gcgtggaattccacgcgagtgccgg

SEQ ID NO: 208057 - DNA, 25 bp, Probe Sequence
ggtaggcttccgagaggagccctga

SEQ ID NO: 208058 - DNA, 25 bp, Probe Sequence
gcggaccattccgaggggagtccag

SEQ ID NO: 208059 - DNA, 25 bp, Probe Sequence
gcggaactctcctgtggagaggccc

SEQ ID NO: 208060 - DNA, 25 bp, Probe Sequence
gcggaacaagaagctgctgcgggcc

SEQ ID NO: 208061 - DNA, 25 bp, Probe Sequence
gcggggcaaaatggagctcgaggcc

SEQ ID NO: 208062 - DNA, 25 bp, Probe Sequence
gcggggcaaaatgtcctcgtacgcc

SEQ ID NO: 208063 - DNA, 25 bp, Probe Sequence
gcggtggacaaaagcaaccctacct

SEQ ID NO: 208064 - DNA, 25 bp, Probe Sequence
gcgtgggcatcaaactgagaccccc

SEQ ID NO: 208065 - DNA, 25 bp, Probe Sequence
gctggggctgcagaagggaccctgc

SEQ ID NO: 208066 - DNA, 25 bp, Probe Sequence
gcggtggcatctgcaatggggacgg

SEQ ID NO: 208067 - DNA, 25 bp, Probe Sequence
gcgtgtgacagtgtatggggctgca

SEQ ID NO: 208068 - DNA, 25 bp, Probe Sequence
gcgtgggcagaggaatgtgggctat

SEQ ID NO: 208069 - DNA, 25 bp, Probe Sequence
gcgggatgtgggcagtaggatatgc

SEQ ID NO: 208070 - DNA, 25 bp, Probe Sequence
gcgggtgtggagtcaggatggagtc

SEQ ID NO: 208071 - DNA, 25 bp, Probe Sequence
gcggacgaggcatcatgtgcatgga

SEQ ID NO: 208072 - DNA, 25 bp, Probe Sequence
gcgggctgaatgcgatggattacat

SEQ ID NO: 208073 - DNA, 25 bp, Probe Sequence
gcgtgtgtagagtgtcgatgttgca

SEQ ID NO: 208074 - DNA, 25 bp, Probe Sequence
gctgtggtagagttcctacttcaga

SEQ ID NO: 208075 - DNA, 25 bp, Probe Sequence
gcgggtggagaacgtttgtcagggg

SEQ ID NO: 208076 - DNA, 25 bp, Probe Sequence
gcgggaaagaggctttgctttgcgc

SEQ ID NO: 208077 - DNA, 25 bp, Probe Sequence
gcggctacaaagcgtttctttactt

SEQ ID NO: 208078 - DNA, 25 bp, Probe Sequence
gctggcctcagactgtggtttttta

SEQ ID NO: 208079 - DNA, 25 bp, Probe Sequence
gctggcctcagactgtggtttttta

SEQ ID NO: 208080 - DNA, 25 bp, Probe Sequence
gcggcctgatatcatggtcatttgt

SEQ ID NO: 208081 - DNA, 25 bp, Probe Sequence
gcgtgtctgcagtcaaggattcttc

SEQ ID NO: 208082 - DNA, 25 bp, Probe Sequence
gcgtggtatcacaggatttcatcat

SEQ ID NO: 208083 - DNA, 25 bp, Probe Sequence
gctgtaggagcctggtcatctctac

SEQ ID NO: 208084 - DNA, 25 bp, Probe Sequence
gcggcaccatagtggattgcctaca

SEQ ID NO: 208085 - DNA, 25 bp, Probe Sequence
gcggcttctggatggactgagataa

SEQ ID NO: 208086 - DNA, 25 bp, Probe Sequence
gcggcattgctaaggtcctgtgaca

SEQ ID NO: 208087 - DNA, 25 bp, Probe Sequence
gctggcattcttgggactttgccaa

SEQ ID NO: 208088 - DNA, 25 bp, Probe Sequence
gctggccttggcagatgttttctca

SEQ ID NO: 208089 - DNA, 25 bp, Probe Sequence
gctgtcacggtaaagtccgccatca

SEQ ID NO: 208090 - DNA, 25 bp, Probe Sequence
gctgtcttgtaaaagcccagatcac

SEQ ID NO: 208091 - DNA, 25 bp, Probe Sequence
gctgtcttctaaaaagccacgacat

SEQ ID NO: 208092 - DNA, 25 bp, Probe Sequence
gcggtgtctaaacaagccaatgcaa

SEQ ID NO: 208093 - DNA, 25 bp, Probe Sequence
gaggtcccaaggaacgccataggac

SEQ ID NO: 208094 - DNA, 25 bp, Probe Sequence
gcggtcgcaaaggataccctggagt

SEQ ID NO: 208095 - DNA, 25 bp, Probe Sequence
gcggtggagggaaacgcctccgtct

SEQ ID NO: 208096 - DNA, 25 bp, Probe Sequence
gcggggactggaataccacgctggc

SEQ ID NO: 208097 - DNA, 25 bp, Probe Sequence
gcggggactggaataccacgctggc

SEQ ID NO: 208098 - DNA, 25 bp, Probe Sequence
gcggtggacgagctgggcaaagtgc

SEQ ID NO: 208099 - DNA, 25 bp, Probe Sequence
gcgggtgacgtccaggagagggagc

SEQ ID NO: 208100 - DNA, 25 bp, Probe Sequence
gcgggagaactcactgaggatgagg

SEQ ID NO: 208101 - DNA, 25 bp, Probe Sequence
gcgggtacccatgatgagccgcgag

SEQ ID NO: 208102 - DNA, 25 bp, Probe Sequence
gcgggtgaagctatcaagcccagag

SEQ ID NO: 208103 - DNA, 25 bp, Probe Sequence
gcgggaggatcacttgaagccagga

SEQ ID NO: 208104 - DNA, 25 bp, Probe Sequence
gcgggtggatcacttgaggtcagga

SEQ ID NO: 208105 - DNA, 25 bp, Probe Sequence
gcggtgctggtatttagagcgcagc

SEQ ID NO: 208106 - DNA, 25 bp, Probe Sequence
gcggctctagctctgataacacaga

SEQ ID NO: 208107 - DNA, 25 bp, Probe Sequence
gcgtggcttctttgacaagcacatc

SEQ ID NO: 208108 - DNA, 25 bp, Probe Sequence
gcgtggtcctttgcaagagcgcaga

SEQ ID NO: 208109 - DNA, 25 bp, Probe Sequence
gcgggaactaatccagaggaggagg

SEQ ID NO: 208110 - DNA, 25 bp, Probe Sequence
gcggtgcaagcttgtctcaatgatg

SEQ ID NO: 208111 - DNA, 25 bp, Probe Sequence
gcggtgaagaatgctcagatggctc

SEQ ID NO: 208112 - DNA, 25 bp, Probe Sequence
gcggataaagtggccagtgtgtacg

SEQ ID NO: 208113 - DNA, 25 bp, Probe Sequence
gctggaaccaggacgcggtgtacat

SEQ ID NO: 208114 - DNA, 25 bp, Probe Sequence
gctggacccaagagtcctgtgcact

SEQ ID NO: 208115 - DNA, 25 bp, Probe Sequence
gctggaccaaggatgacgatgtgcc

SEQ ID NO: 208116 - DNA, 25 bp, Probe Sequence
gcggaaggagaaatgcacgaggcaa

SEQ ID NO: 208117 - DNA, 25 bp, Probe Sequence
gcggagacgtaaagcattaatgcaa

SEQ ID NO: 208118 - DNA, 25 bp, Probe Sequence
gcggagacgtaaagcattaatgcaa

SEQ ID NO: 208119 - DNA, 25 bp, Probe Sequence
gcggagacgtaaagcattaatgcaa

SEQ ID NO: 208120 - DNA, 25 bp, Probe Sequence
gcggagacgtaaagcattaatgcaa

SEQ ID NO: 208121 - DNA, 25 bp, Probe Sequence
gcgggcagaggactactacagatgc

SEQ ID NO: 208122 - DNA, 25 bp, Probe Sequence
gcgggcagaggactactacagatgc

SEQ ID NO: 208123 - DNA, 25 bp, Probe Sequence
gctggactgaagactatctggcatg

SEQ ID NO: 208124 - DNA, 25 bp, Probe Sequence
gctggagtcaagatagcggggccct

SEQ ID NO: 208125 - DNA, 25 bp, Probe Sequence
gcggtgtatggattggggatgcccc

SEQ ID NO: 208126 - DNA, 25 bp, Probe Sequence
gcgggtctgagtgtgaggtgccact

SEQ ID NO: 208127 - DNA, 25 bp, Probe Sequence
gctaggctgctgctgtatgggtaca

SEQ ID NO: 208128 - DNA, 25 bp, Probe Sequence
gctaggctgctgctgtatgggtaca

SEQ ID NO: 208129 - DNA, 25 bp, Probe Sequence
gcttacgtcgtgtgctgggcaaaca

SEQ ID NO: 208130 - DNA, 25 bp, Probe Sequence
gcttccccagtagctgggaccacag

SEQ ID NO: 208131 - DNA, 25 bp, Probe Sequence
gcttcccctgaatctgtcgggaaga

SEQ ID NO: 208132 - DNA, 25 bp, Probe Sequence
gctggacccgtatctatgcaaagaa

SEQ ID NO: 208133 - DNA, 25 bp, Probe Sequence
gctggacgggtaccaaacaagactt

SEQ ID NO: 208134 - DNA, 25 bp, Probe Sequence
gctggaatggttatcacaagaaggc

SEQ ID NO: 208135 - DNA, 25 bp, Probe Sequence
gcggtgggtgtcatcaaagcagtgg

SEQ ID NO: 208136 - DNA, 25 bp, Probe Sequence
gcggtgggtgtcatcaaagcagtgg

SEQ ID NO: 208137 - DNA, 25 bp, Probe Sequence
gcggtgggtgtcatcaaagcagtgg

SEQ ID NO: 208138 - DNA, 25 bp, Probe Sequence
gcggtgggtgtcatcaaagcagtgg

SEQ ID NO: 208139 - DNA, 25 bp, Probe Sequence
gcgggaggtgacatcatgaagtttt

SEQ ID NO: 208140 - DNA, 25 bp, Probe Sequence
gctggaggggccactgagattgtct

SEQ ID NO: 208141 - DNA, 25 bp, Probe Sequence
gcgtggaaccggacatcaaggatct

SEQ ID NO: 208142 - DNA, 25 bp, Probe Sequence
gcgtggtcagctgggacgagggctg

SEQ ID NO: 208143 - DNA, 25 bp, Probe Sequence
gcggttcatcatggagagtggggcc

SEQ ID NO: 208144 - DNA, 25 bp, Probe Sequence
gcggcagctaccgagagtgcggagc

SEQ ID NO: 208145 - DNA, 25 bp, Probe Sequence
gcggcaggactgcagagcagatggc

SEQ ID NO: 208146 - DNA, 25 bp, Probe Sequence
gcggcatgcagaggtatgggtgtcg

SEQ ID NO: 208147 - DNA, 25 bp, Probe Sequence
gcggcagagttgttcaggttgcctg

SEQ ID NO: 208148 - DNA, 25 bp, Probe Sequence
gcggcaggtgtacaggacgtctggt

SEQ ID NO: 208149 - DNA, 25 bp, Probe Sequence
gctggaatttacaggagtgtcggct

SEQ ID NO: 208150 - DNA, 25 bp, Probe Sequence
gcggaattctccaagaagtgttcgg

SEQ ID NO: 208151 - DNA, 25 bp, Probe Sequence
gctgtaatgtctccaggaagcctac

SEQ ID NO: 208152 - DNA, 25 bp, Probe Sequence
gctggaatttgctgtgcagagccat

SEQ ID NO: 208153 - DNA, 25 bp, Probe Sequence
gctggccttgactttgaagcaatcc

SEQ ID NO: 208154 - DNA, 25 bp, Probe Sequence
gctggcccatgaagtaaatatatcc

SEQ ID NO: 208155 - DNA, 25 bp, Probe Sequence
gctggcccatgcttaaacattttta

SEQ ID NO: 208156 - DNA, 25 bp, Probe Sequence
gctggccgccattaaacaggttctg

SEQ ID NO: 208157 - DNA, 25 bp, Probe Sequence
gcgtggcgaatgtaaacgtccgcgc

SEQ ID NO: 208158 - DNA, 25 bp, Probe Sequence
gcgtggaggtgatatcaccctcagg

SEQ ID NO: 208159 - DNA, 25 bp, Probe Sequence
gcggagaatgtatattgcctctgct

SEQ ID NO: 208160 - DNA, 25 bp, Probe Sequence
gcggagtgagtttttccgtgctgtg

SEQ ID NO: 208161 - DNA, 25 bp, Probe Sequence
gcggtggatgatatttttgctgatt

SEQ ID NO: 208162 - DNA, 25 bp, Probe Sequence
gcggatttgttgttgttgctgtttc

SEQ ID NO: 208163 - DNA, 25 bp, Probe Sequence
gcggtgtaggtgttgtgagcttttg

SEQ ID NO: 208164 - DNA, 25 bp, Probe Sequence
gcggttggtcagtgtgaatttgtga

SEQ ID NO: 208165 - DNA, 25 bp, Probe Sequence
gcaggataggtagtaaagtttggat

SEQ ID NO: 208166 - DNA, 25 bp, Probe Sequence
gctggagacgtcgtaaatatttaca

SEQ ID NO: 208167 - DNA, 25 bp, Probe Sequence
gctgggaattcagaggaatgtcttc

SEQ ID NO: 208168 - DNA, 25 bp, Probe Sequence
gctggccatttagaggaattctagg

SEQ ID NO: 208169 - DNA, 25 bp, Probe Sequence
gctggattcttgtcaggaaaactag

SEQ ID NO: 208170 - DNA, 25 bp, Probe Sequence
gctggaatttgtggctgatgaaggc

SEQ ID NO: 208171 - DNA, 25 bp, Probe Sequence
gctggagacgtcattgaagaggctg

SEQ ID NO: 208172 - DNA, 25 bp, Probe Sequence
gctcgaggagtctgtaaggtcatgt

SEQ ID NO: 208173 - DNA, 25 bp, Probe Sequence
gcgggtggatcatctaaggtcagga

SEQ ID NO: 208174 - DNA, 25 bp, Probe Sequence
gcgggatgtcactccgaggtcaaaa

SEQ ID NO: 208175 - DNA, 25 bp, Probe Sequence
gcggtgactatctccgtgtgtggag

SEQ ID NO: 208176 - DNA, 25 bp, Probe Sequence
gcgggcttgaaggccctgatgggtg

SEQ ID NO: 208177 - DNA, 25 bp, Probe Sequence
gcgggctctacagcggctgaatgag

SEQ ID NO: 208178 - DNA, 25 bp, Probe Sequence
gcggtgttcactgtggcattaggtg

SEQ ID NO: 208179 - DNA, 25 bp, Probe Sequence
gctgagggtcctgtctgttagaagg

SEQ ID NO: 208180 - DNA, 25 bp, Probe Sequence
gcgggatctcgtatctttaaaaagc

SEQ ID NO: 208181 - DNA, 25 bp, Probe Sequence
gctggtatctcctctaagtaaggaa

SEQ ID NO: 208182 - DNA, 25 bp, Probe Sequence
gctgtgctatttgacaaacttagga

SEQ ID NO: 208183 - DNA, 25 bp, Probe Sequence
gctggtgttctgcaaaacttggaca

SEQ ID NO: 208184 - DNA, 25 bp, Probe Sequence
gctgggtggcagtgtacttttggct

SEQ ID NO: 208185 - DNA, 25 bp, Probe Sequence
gctgggtcagggttagtctgtctcc

SEQ ID NO: 208186 - DNA, 25 bp, Probe Sequence
gctggaacgggagttcttcttcagc

SEQ ID NO: 208187 - DNA, 25 bp, Probe Sequence
gctgggacgagggagtttcatgttg

SEQ ID NO: 208188 - DNA, 25 bp, Probe Sequence
gcgggaagactgccaatatgtctgt

SEQ ID NO: 208189 - DNA, 25 bp, Probe Sequence
gcgggaagatcgcatgagtccggga

SEQ ID NO: 208190 - DNA, 25 bp, Probe Sequence
gcgggaggattgcttgagcccagga

SEQ ID NO: 208191 - DNA, 25 bp, Probe Sequence
gcgggaagtgtgcttctcagggagg

SEQ ID NO: 208192 - DNA, 25 bp, Probe Sequence
gcggcagaatgttggctaccagggt

SEQ ID NO: 208193 - DNA, 25 bp, Probe Sequence
gcgggtgttaggtatccaggaggcc

SEQ ID NO: 208194 - DNA, 25 bp, Probe Sequence
gcgggtggtgggccaaggaggagct

SEQ ID NO: 208195 - DNA, 25 bp, Probe Sequence
gcaccggggcatcaaaggtgtggtg

SEQ ID NO: 208196 - DNA, 25 bp, Probe Sequence
gcggaggcggatcaacaagcgtggg

SEQ ID NO: 208197 - DNA, 25 bp, Probe Sequence
gcggaggttgagcaactacactgcg

SEQ ID NO: 208198 - DNA, 25 bp, Probe Sequence
gctggaggaaggcacctacagctgc

SEQ ID NO: 208199 - DNA, 25 bp, Probe Sequence
gctggggtatgttggccccagcccc

SEQ ID NO: 208200 - DNA, 25 bp, Probe Sequence
gctggtattaggggagacaccccct

SEQ ID NO: 208201 - DNA, 25 bp, Probe Sequence
gcggcttctttggaaggacccgcgt

SEQ ID NO: 208202 - DNA, 25 bp, Probe Sequence
gctggtgttggtgagaggacccgtg

SEQ ID NO: 208203 - DNA, 25 bp, Probe Sequence
gctgtagctttagaagtggccctct

SEQ ID NO: 208204 - DNA, 25 bp, Probe Sequence
gctggactgttggcagaaggaccgc

SEQ ID NO: 208205 - DNA, 25 bp, Probe Sequence
gctggctcagtcaataaaggatccg

SEQ ID NO: 208206 - DNA, 25 bp, Probe Sequence
gctggctacacaatcgaatggtttg

SEQ ID NO: 208207 - DNA, 25 bp, Probe Sequence
gctggccaagaagtatgatgcgttt

SEQ ID NO: 208208 - DNA, 25 bp, Probe Sequence
gctgtcagaaaagggctgggcttgg

SEQ ID NO: 208209 - DNA, 25 bp, Probe Sequence
gcggctgtaaaggtctttgttgctg

SEQ ID NO: 208210 - DNA, 25 bp, Probe Sequence
gctgtggtccaaggccatttttgct

SEQ ID NO: 208211 - DNA, 25 bp, Probe Sequence
gctgaactccgaggacacttttgtg

SEQ ID NO: 208212 - DNA, 25 bp, Probe Sequence
gctaaccgtgaacacttaatgttga

SEQ ID NO: 208213 - DNA, 25 bp, Probe Sequence
gctaagcccttctaactttgagttg

SEQ ID NO: 208214 - DNA, 25 bp, Probe Sequence
gctggagcccagtctgaacttgaga

SEQ ID NO: 208215 - DNA, 25 bp, Probe Sequence
gctggaggcggaggagtgcgggatc

SEQ ID NO: 208216 - DNA, 25 bp, Probe Sequence
gctggaggcggaggagtgcgggatc

SEQ ID NO: 208217 - DNA, 25 bp, Probe Sequence
gctgggacggattcttgcgggaagc

SEQ ID NO: 208218 - DNA, 25 bp, Probe Sequence
gcggctacggcagtacgcggagaag

SEQ ID NO: 208219 - DNA, 25 bp, Probe Sequence
gcggctacggcagtacgcggagaag

SEQ ID NO: 208220 - DNA, 25 bp, Probe Sequence
gctggatttggggaccgcagagaag

SEQ ID NO: 208221 - DNA, 25 bp, Probe Sequence
gctggccttggggacgagggagagg

SEQ ID NO: 208222 - DNA, 25 bp, Probe Sequence
gctgtcccagaaccagggaggcaag

SEQ ID NO: 208223 - DNA, 25 bp, Probe Sequence
gctggtaaaagctagaggagacaca

SEQ ID NO: 208224 - DNA, 25 bp, Probe Sequence
gctggctggagctatgttgggggct

SEQ ID NO: 208225 - DNA, 25 bp, Probe Sequence
gctggcaggatgaatgtgggggtgg

SEQ ID NO: 208226 - DNA, 25 bp, Probe Sequence
gcggaggctttgaaggagctggctc

SEQ ID NO: 208227 - DNA, 25 bp, Probe Sequence
gcggaggcttcaattgtacacagtt

SEQ ID NO: 208228 - DNA, 25 bp, Probe Sequence
gctggggcttctagagttcaagatc

SEQ ID NO: 208229 - DNA, 25 bp, Probe Sequence
gcgggtggatcacgaggtcaggata

SEQ ID NO: 208230 - DNA, 25 bp, Probe Sequence
gcggctgggatcctaagctttgata

SEQ ID NO: 208231 - DNA, 25 bp, Probe Sequence
gcggctgggatcctaagctttgata

SEQ ID NO: 208232 - DNA, 25 bp, Probe Sequence
gcggctggcaactgaaggctggaac

SEQ ID NO: 208233 - DNA, 25 bp, Probe Sequence
gctgacaagccccgaaggctgggac

SEQ ID NO: 208234 - DNA, 25 bp, Probe Sequence
gctgaaagtccccgaatgggtggat

SEQ ID NO: 208235 - DNA, 25 bp, Probe Sequence
gctaaaacggtttgatgatccaggt

SEQ ID NO: 208236 - DNA, 25 bp, Probe Sequence
gctacccagcatcttaaaccagctt

SEQ ID NO: 208237 - DNA, 25 bp, Probe Sequence
gctacccagcatcttaaaccagctt

SEQ ID NO: 208238 - DNA, 25 bp, Probe Sequence
gatggccccaaactaaagccactac

SEQ ID NO: 208239 - DNA, 25 bp, Probe Sequence
gcatggaaccaacgtaaatgcccat

SEQ ID NO: 208240 - DNA, 25 bp, Probe Sequence
gctggacacggacctaataccttga

SEQ ID NO: 208241 - DNA, 25 bp, Probe Sequence
gctggctagtggcttattacttgtg

SEQ ID NO: 208242 - DNA, 25 bp, Probe Sequence
gctggccagtggaaatattcaagtc

SEQ ID NO: 208243 - DNA, 25 bp, Probe Sequence
gctggacgaggatctcttcagagga

SEQ ID NO: 208244 - DNA, 25 bp, Probe Sequence
gcggaggctgggatctagcgagaga

SEQ ID NO: 208245 - DNA, 25 bp, Probe Sequence
gcggggtgtgtgtgtgcatggaaga

SEQ ID NO: 208246 - DNA, 25 bp, Probe Sequence
gctggtggtccttgattgtggaaga

SEQ ID NO: 208247 - DNA, 25 bp, Probe Sequence
gctgtgtactcctgtttggaagtat

SEQ ID NO: 208248 - DNA, 25 bp, Probe Sequence
gctggttcttcacgtagtggaaggg

SEQ ID NO: 208249 - DNA, 25 bp, Probe Sequence
gctgtttcctagctaggagcaggct

SEQ ID NO: 208250 - DNA, 25 bp, Probe Sequence
gcggttccggagctgaagcagatca

SEQ ID NO: 208251 - DNA, 25 bp, Probe Sequence
gctggttccacttcaatgacagtac

SEQ ID NO: 208252 - DNA, 25 bp, Probe Sequence
gctggttctatttaatggacatgag

SEQ ID NO: 208253 - DNA, 25 bp, Probe Sequence
gctggtacaagttgtgggactgcat

SEQ ID NO: 208254 - DNA, 25 bp, Probe Sequence
gctgtaacgacttcaggagtcactg

SEQ ID NO: 208255 - DNA, 25 bp, Probe Sequence
gcggacaccattaaatagtgcactg

SEQ ID NO: 208256 - DNA, 25 bp, Probe Sequence
gctggtcactcatggaatcctgcag

SEQ ID NO: 208257 - DNA, 25 bp, Probe Sequence
gcggtcagtataaaatacatgtcgc

SEQ ID NO: 208258 - DNA, 25 bp, Probe Sequence
gcggcatcagttacaaaacattctc

SEQ ID NO: 208259 - DNA, 25 bp, Probe Sequence
gcggctgcagtctacaaactttgcc

SEQ ID NO: 208260 - DNA, 25 bp, Probe Sequence
gctggctgatgatacaaccctggac

SEQ ID NO: 208261 - DNA, 25 bp, Probe Sequence
gctggctgatgatacaaccctggac

SEQ ID NO: 208262 - DNA, 25 bp, Probe Sequence
gctgcggaaacagtatcggccagac

SEQ ID NO: 208263 - DNA, 25 bp, Probe Sequence
gcggaaagtgagtatgcggctgcac

SEQ ID NO: 208264 - DNA, 25 bp, Probe Sequence
gcggaactcgagtcatgcaggagct

SEQ ID NO: 208265 - DNA, 25 bp, Probe Sequence
gcggaattcgaaatggctggcggta

SEQ ID NO: 208266 - DNA, 25 bp, Probe Sequence
gcggaagtatgagttggggcgccca

SEQ ID NO: 208267 - DNA, 25 bp, Probe Sequence
gcggcaagtacttttgggagaccag

SEQ ID NO: 208268 - DNA, 25 bp, Probe Sequence
gcggcacagtgaagtgttgaggacc

SEQ ID NO: 208269 - DNA, 25 bp, Probe Sequence
gcggccctgaagaaggcggacgtca

SEQ ID NO: 208270 - DNA, 25 bp, Probe Sequence
gcggaccgaatcaggcggatggtcg

SEQ ID NO: 208271 - DNA, 25 bp, Probe Sequence
gcggaccgagacagtgcagaagctg

SEQ ID NO: 208272 - DNA, 25 bp, Probe Sequence
gctggatcctaaccctgaatattgg

SEQ ID NO: 208273 - DNA, 25 bp, Probe Sequence
gctggtcctgaagcactaccttcag

SEQ ID NO: 208274 - DNA, 25 bp, Probe Sequence
gctgtgtgccgggaacacccggagg

SEQ ID NO: 208275 - DNA, 25 bp, Probe Sequence
gctgtgtgccgggaacacccggagg

SEQ ID NO: 208276 - DNA, 25 bp, Probe Sequence
gctggggctggagaccacaaggagg

SEQ ID NO: 208277 - DNA, 25 bp, Probe Sequence
gctggctggggagtacatcatcctg

SEQ ID NO: 208278 - DNA, 25 bp, Probe Sequence
gctggtggggcagacccgaaaatcc

SEQ ID NO: 208279 - DNA, 25 bp, Probe Sequence
gctggtggggcagcaccgtgaagac

SEQ ID NO: 208280 - DNA, 25 bp, Probe Sequence
gctgtgcggtaagcatccgaataaa

SEQ ID NO: 208281 - DNA, 25 bp, Probe Sequence
gctgtgtggtaatactctgacaaca

SEQ ID NO: 208282 - DNA, 25 bp, Probe Sequence
gcttgctggtctaagtcttaacccc

SEQ ID NO: 208283 - DNA, 25 bp, Probe Sequence
gctggcttgacatgctgtattccac

SEQ ID NO: 208284 - DNA, 25 bp, Probe Sequence
gcggtcgcgcggatcatgatgccaa

SEQ ID NO: 208285 - DNA, 25 bp, Probe Sequence
gctggtgcacctgggttatggtaag

SEQ ID NO: 208286 - DNA, 25 bp, Probe Sequence
gctggctatccgggtgttagctgac

SEQ ID NO: 208287 - DNA, 25 bp, Probe Sequence
gctggattgccacagttatcactgc

SEQ ID NO: 208288 - DNA, 25 bp, Probe Sequence
gctggaacatgacagcttcatcagg

SEQ ID NO: 208289 - DNA, 25 bp, Probe Sequence
gctggctcaaggccgattcacagga

SEQ ID NO: 208290 - DNA, 25 bp, Probe Sequence
gcggcccatagcgagtgtcagggac

SEQ ID NO: 208291 - DNA, 25 bp, Probe Sequence
gcggcggcaatcgtgcgcaatgaag

SEQ ID NO: 208292 - DNA, 25 bp, Probe Sequence
gcggcaggcagagatcatggatatg

SEQ ID NO: 208293 - DNA, 25 bp, Probe Sequence
gctggatggggccattcgtatgcag

SEQ ID NO: 208294 - DNA, 25 bp, Probe Sequence
gctggagtgggtacatcacttgagg

SEQ ID NO: 208295 - DNA, 25 bp, Probe Sequence
gctgctcagctgccagatcagcatc

SEQ ID NO: 208296 - DNA, 25 bp, Probe Sequence
gctgtccatccaccagctggtggaa

SEQ ID NO: 208297 - DNA, 25 bp, Probe Sequence
gctgtactgccacaaagcttcacag

SEQ ID NO: 208298 - DNA, 25 bp, Probe Sequence
gctgtagctgtactacaagcccacc

SEQ ID NO: 208299 - DNA, 25 bp, Probe Sequence
gctgtagctgtactacaagcccacc

SEQ ID NO: 208300 - DNA, 25 bp, Probe Sequence
gctgtgttgttatgaagtccaccct

SEQ ID NO: 208301 - DNA, 25 bp, Probe Sequence
gctggtggattatcacagatctaca

SEQ ID NO: 208302 - DNA, 25 bp, Probe Sequence
gcggtcacattgtcacatcatttta

SEQ ID NO: 208303 - DNA, 25 bp, Probe Sequence
gctggctaattgacagtatttctca

SEQ ID NO: 208304 - DNA, 25 bp, Probe Sequence
gctggcaatattacaatccttgacc

SEQ ID NO: 208305 - DNA, 25 bp, Probe Sequence
gctggcacaataccgcatcagtatg

SEQ ID NO: 208306 - DNA, 25 bp, Probe Sequence
gcggcagccacgaagccagtatggc

SEQ ID NO: 208307 - DNA, 25 bp, Probe Sequence
gcggcagctcagcaagtggtggacc

SEQ ID NO: 208308 - DNA, 25 bp, Probe Sequence
gctggcttcagggagggttagcctg

SEQ ID NO: 208309 - DNA, 25 bp, Probe Sequence
gctgaggtagggacgtgctgtaggc

SEQ ID NO: 208310 - DNA, 25 bp, Probe Sequence
gctggcgatcagggatcttgttgca

SEQ ID NO: 208311 - DNA, 25 bp, Probe Sequence
gctggccatcgagctgagtgtgatc

SEQ ID NO: 208312 - DNA, 25 bp, Probe Sequence
gcggcctctgagacatgaagacacc

SEQ ID NO: 208313 - DNA, 25 bp, Probe Sequence
gctgtgcgggagatgaacgacctac

SEQ ID NO: 208314 - DNA, 25 bp, Probe Sequence
gctggctgcgcatcgatgaccagac

SEQ ID NO: 208315 - DNA, 25 bp, Probe Sequence
gctggctgcgcatcgatgaccagac

SEQ ID NO: 208316 - DNA, 25 bp, Probe Sequence
gctggctgcgcatcgatgaccagac

SEQ ID NO: 208317 - DNA, 25 bp, Probe Sequence
gctggatgtgcatctggcctatgac

SEQ ID NO: 208318 - DNA, 25 bp, Probe Sequence
gctggacatatactgggcttcacac

SEQ ID NO: 208319 - DNA, 25 bp, Probe Sequence
gctggacagtggaggcgtcctcagc

SEQ ID NO: 208320 - DNA, 25 bp, Probe Sequence
gctggactggagaagatgcctgccc

SEQ ID NO: 208321 - DNA, 25 bp, Probe Sequence
gctggactggagaagatgcctgccc

SEQ ID NO: 208322 - DNA, 25 bp, Probe Sequence
gctggaagaggcagattctccctca

SEQ ID NO: 208323 - DNA, 25 bp, Probe Sequence
gctggcaacaacagattctcttggc

SEQ ID NO: 208324 - DNA, 25 bp, Probe Sequence
gctgtcaaaatccaagctgccttcc

SEQ ID NO: 208325 - DNA, 25 bp, Probe Sequence
gctggcaaagatgggacacctgtcc

SEQ ID NO: 208326 - DNA, 25 bp, Probe Sequence
gctgaatcaaatgggagccctccag

SEQ ID NO: 208327 - DNA, 25 bp, Probe Sequence
gcatggtcaaacttagccatcccct

SEQ ID NO: 208328 - DNA, 25 bp, Probe Sequence
gctggtaaacaactgcccatcagcc

SEQ ID NO: 208329 - DNA, 25 bp, Probe Sequence
gctggagaagacactcctgagggct

SEQ ID NO: 208330 - DNA, 25 bp, Probe Sequence
gctggagataacagcctcttgcccg

SEQ ID NO: 208331 - DNA, 25 bp, Probe Sequence
gctggagataacagcctcttgcccg

SEQ ID NO: 208332 - DNA, 25 bp, Probe Sequence
gctgttgataatatctctcacccgg

SEQ ID NO: 208333 - DNA, 25 bp, Probe Sequence
gctgatcaaaatttgctctcccacc

SEQ ID NO: 208334 - DNA, 25 bp, Probe Sequence
gctgatctactctgttaccaatggc

SEQ ID NO: 208335 - DNA, 25 bp, Probe Sequence
gctgtctacaatcctgtattcaagg

SEQ ID NO: 208336 - DNA, 25 bp, Probe Sequence
gctgtcgagaaacctttaatatttg

SEQ ID NO: 208337 - DNA, 25 bp, Probe Sequence
gctgtggacaaagcttacaagttgc

SEQ ID NO: 208338 - DNA, 25 bp, Probe Sequence
gctgtgggaactgggatccaatttg

SEQ ID NO: 208339 - DNA, 25 bp, Probe Sequence
gctggatgagcatcatggtgcccaa

SEQ ID NO: 208340 - DNA, 25 bp, Probe Sequence
gctggacagcaaggcgtctcttatt

SEQ ID NO: 208341 - DNA, 25 bp, Probe Sequence
gctggcaagacaaccattctgtata

SEQ ID NO: 208342 - DNA, 25 bp, Probe Sequence
gctgtcaagagctccaggctagacc

SEQ ID NO: 208343 - DNA, 25 bp, Probe Sequence
gctgtatagacagtcctgcttcaga

SEQ ID NO: 208344 - DNA, 25 bp, Probe Sequence
gctgtcaagacgtgtcatgtacatt

SEQ ID NO: 208345 - DNA, 25 bp, Probe Sequence
gctggcaacacgtttgcaaaggttt

SEQ ID NO: 208346 - DNA, 25 bp, Probe Sequence
gctggctcctcggattgaaagtgtg

SEQ ID NO: 208347 - DNA, 25 bp, Probe Sequence
gctggtccccaaggcattaggatgg

SEQ ID NO: 208348 - DNA, 25 bp, Probe Sequence
gctgtctccgcggaagtcagggcgg

SEQ ID NO: 208349 - DNA, 25 bp, Probe Sequence
gctgttgcctgggcagggggaaggg

SEQ ID NO: 208350 - DNA, 25 bp, Probe Sequence
gctggtccctgctagggagctattg

SEQ ID NO: 208351 - DNA, 25 bp, Probe Sequence
gctggtcaccatgaaccacattgtg

SEQ ID NO: 208352 - DNA, 25 bp, Probe Sequence
gctggtcgtattacctcagaggtat

SEQ ID NO: 208353 - DNA, 25 bp, Probe Sequence
gctgtgccgcttttttagggctcac

SEQ ID NO: 208354 - DNA, 25 bp, Probe Sequence
gctgatccctgagatccttgggatc

SEQ ID NO: 208355 - DNA, 25 bp, Probe Sequence
gctggcctcaggtttattggcgata

SEQ ID NO: 208356 - DNA, 25 bp, Probe Sequence
gctggactcggtctttgaggagccg

SEQ ID NO: 208357 - DNA, 25 bp, Probe Sequence
gctggacaggttcacggaggatgcc

SEQ ID NO: 208358 - DNA, 25 bp, Probe Sequence
gctggagacgttccgggaggagctc

SEQ ID NO: 208359 - DNA, 25 bp, Probe Sequence
gctgtggacgcttgtggaggaaacc

SEQ ID NO: 208360 - DNA, 25 bp, Probe Sequence
gctgtgggtctgctgggtggcagaa

SEQ ID NO: 208361 - DNA, 25 bp, Probe Sequence
gctggggagtagtggatgtctgcaa

SEQ ID NO: 208362 - DNA, 25 bp, Probe Sequence
gctgggggtatggaattggctgagg

SEQ ID NO: 208363 - DNA, 25 bp, Probe Sequence
gcatggttcgtgccaaattccgaag

SEQ ID NO: 208364 - DNA, 25 bp, Probe Sequence
gcatggttcgtgccaaattccgaag

SEQ ID NO: 208365 - DNA, 25 bp, Probe Sequence
gctgtttcagcgccaggtattctta

SEQ ID NO: 208366 - DNA, 25 bp, Probe Sequence
gctgtggtggcggctggtttaaaag

SEQ ID NO: 208367 - DNA, 25 bp, Probe Sequence
gctgcggtggggagctataaaaatg

SEQ ID NO: 208368 - DNA, 25 bp, Probe Sequence
gctggtgtggctggtcgtaaacagt

SEQ ID NO: 208369 - DNA, 25 bp, Probe Sequence
gctggtgttatcatcgaggaacttt

SEQ ID NO: 208370 - DNA, 25 bp, Probe Sequence
gctgtgtgttctgttaagttctttc

SEQ ID NO: 208371 - DNA, 25 bp, Probe Sequence
gctgttgttgaagggaaaccattcc

SEQ ID NO: 208372 - DNA, 25 bp, Probe Sequence
gctgggtctgacaaggacccgtgtc

SEQ ID NO: 208373 - DNA, 25 bp, Probe Sequence
gctgggtctggagggacctcggagt

SEQ ID NO: 208374 - DNA, 25 bp, Probe Sequence
gcggcggctttggtgactctagata

SEQ ID NO: 208375 - DNA, 25 bp, Probe Sequence
gcggctggttttggacagcgacacc

SEQ ID NO: 208376 - DNA, 25 bp, Probe Sequence
gctgggccttttgtagccaagacgc

SEQ ID NO: 208377 - DNA, 25 bp, Probe Sequence
gctgggctaagtaaataggaattgg

SEQ ID NO: 208378 - DNA, 25 bp, Probe Sequence
gctggtcttggtaagtataaatttt

SEQ ID NO: 208379 - DNA, 25 bp, Probe Sequence
gctgtgtattttaactaccagattt

SEQ ID NO: 208380 - DNA, 25 bp, Probe Sequence
gctgttaatgtatactactggtggt

SEQ ID NO: 208381 - DNA, 25 bp, Probe Sequence
gctgtgcaacttccaacaagcggag

SEQ ID NO: 208382 - DNA, 25 bp, Probe Sequence
gctggcaagcaaatccgacacgacg

SEQ ID NO: 208383 - DNA, 25 bp, Probe Sequence
gcggctcatgaagcatcgagctcca

SEQ ID NO: 208384 - DNA, 25 bp, Probe Sequence
gcggctgcatgacactggaggtcaa

SEQ ID NO: 208385 - DNA, 25 bp, Probe Sequence
gcggcatgagtatctgggatgtgaa

SEQ ID NO: 208386 - DNA, 25 bp, Probe Sequence
gcggcatggtgatcaggacatccca

SEQ ID NO: 208387 - DNA, 25 bp, Probe Sequence
gctgtgaggtcatcggaatcccgac

SEQ ID NO: 208388 - DNA, 25 bp, Probe Sequence
gctggtggtcgaggagtactacgag

SEQ ID NO: 208389 - DNA, 25 bp, Probe Sequence
gctgtgtgcccgtggccaataagag

SEQ ID NO: 208390 - DNA, 25 bp, Probe Sequence
gctgttcttcttagggccatagatg

SEQ ID NO: 208391 - DNA, 25 bp, Probe Sequence
gctgtcttttataggcactcatcaa

SEQ ID NO: 208392 - DNA, 25 bp, Probe Sequence
gctgtctatatggaagccactccct

SEQ ID NO: 208393 - DNA, 25 bp, Probe Sequence
gctgagaaaggcaccagctccttgg

SEQ ID NO: 208394 - DNA, 25 bp, Probe Sequence
gctggagagagggagcttgctgcct

SEQ ID NO: 208395 - DNA, 25 bp, Probe Sequence
gctggcgagtggggtgagtgctctg

SEQ ID NO: 208396 - DNA, 25 bp, Probe Sequence
gctggcactgtacgagtgaggcctg

SEQ ID NO: 208397 - DNA, 25 bp, Probe Sequence
gctgaggcaggacagtggggctaac

SEQ ID NO: 208398 - DNA, 25 bp, Probe Sequence
gctggcgcaggagagcgggcgcaag

SEQ ID NO: 208399 - DNA, 25 bp, Probe Sequence
gctggtggaagctatcaggaccaat

SEQ ID NO: 208400 - DNA, 25 bp, Probe Sequence
gctgggtgagatttaagacagactc

SEQ ID NO: 208401 - DNA, 25 bp, Probe Sequence
gctggtgaccatgtttgacaagctc

SEQ ID NO: 208402 - DNA, 25 bp, Probe Sequence
gctggtgacctcactgtcagagagc

SEQ ID NO: 208403 - DNA, 25 bp, Probe Sequence
gctggaggccgaacgtcaggagcgg

SEQ ID NO: 208404 - DNA, 25 bp, Probe Sequence
gctgaggccgccagggagaagggcc

SEQ ID NO: 208405 - DNA, 25 bp, Probe Sequence
gctgggccctgtgtgggacagggta

SEQ ID NO: 208406 - DNA, 25 bp, Probe Sequence
gctggcttcacgtggcaggaaggcc

SEQ ID NO: 208407 - DNA, 25 bp, Probe Sequence
gctgaggaacggggcaggcaaggtc

SEQ ID NO: 208408 - DNA, 25 bp, Probe Sequence
gctggaacctgggaggcagaagtct

SEQ ID NO: 208409 - DNA, 25 bp, Probe Sequence
gctggatacactggcagagctcaca

SEQ ID NO: 208410 - DNA, 25 bp, Probe Sequence
gctggcaactctgaagtcatcctgc

SEQ ID NO: 208411 - DNA, 25 bp, Probe Sequence
gctggcacacacctgtagtcccagc

SEQ ID NO: 208412 - DNA, 25 bp, Probe Sequence
gcggctgcaatgccttaacgagagc

SEQ ID NO: 208413 - DNA, 25 bp, Probe Sequence
gcggctttggtttattgtggggata

SEQ ID NO: 208414 - DNA, 25 bp, Probe Sequence
gctgtcctttttttttgaggaatag

SEQ ID NO: 208415 - DNA, 25 bp, Probe Sequence
gctggcctgttttatttcttttata

SEQ ID NO: 208416 - DNA, 25 bp, Probe Sequence
gctggcctgttttatttcttttata

SEQ ID NO: 208417 - DNA, 25 bp, Probe Sequence
gctggttttgctgactttttgtttt

SEQ ID NO: 208418 - DNA, 25 bp, Probe Sequence
gctggtgtctagtgtttttttccct

SEQ ID NO: 208419 - DNA, 25 bp, Probe Sequence
gctggtgtctagtgtttttttccct

SEQ ID NO: 208420 - DNA, 25 bp, Probe Sequence
gctgatctgttaaaatttctttccc

SEQ ID NO: 208421 - DNA, 25 bp, Probe Sequence
gctgtgctgttagtaatgcaccttt

SEQ ID NO: 208422 - DNA, 25 bp, Probe Sequence
gcggctgtccagaaaacgtaatgag

SEQ ID NO: 208423 - DNA, 25 bp, Probe Sequence
gctggctcccagattaatgcataaa

SEQ ID NO: 208424 - DNA, 25 bp, Probe Sequence
gctggcccagcagggggagtacagt

SEQ ID NO: 208425 - DNA, 25 bp, Probe Sequence
gctggccgcaaggtggtggctgaag

SEQ ID NO: 208426 - DNA, 25 bp, Probe Sequence
gctggcgcctaggttgtgttgagag

SEQ ID NO: 208427 - DNA, 25 bp, Probe Sequence
gctggcggcgagagggtatcaagta

SEQ ID NO: 208428 - DNA, 25 bp, Probe Sequence
gctggagaagggcgtcatatctgac

SEQ ID NO: 208429 - DNA, 25 bp, Probe Sequence
gcggaagggatgccagtcactgccc

SEQ ID NO: 208430 - DNA, 25 bp, Probe Sequence
gcggcgggagaggcagtcccgccag

SEQ ID NO: 208431 - DNA, 25 bp, Probe Sequence
gctggcgagggactcgttaccatca

SEQ ID NO: 208432 - DNA, 25 bp, Probe Sequence
gctgggagagggtgttgagttcact

SEQ ID NO: 208433 - DNA, 25 bp, Probe Sequence
gctgtgggaaggtgtcctgtgtcac

SEQ ID NO: 208434 - DNA, 25 bp, Probe Sequence
gctgtggcaagaagaaggtctggtt

SEQ ID NO: 208435 - DNA, 25 bp, Probe Sequence
gctgggctcagtagaagcagacggt

SEQ ID NO: 208436 - DNA, 25 bp, Probe Sequence
gcggctgcacagagatgtagatggg

SEQ ID NO: 208437 - DNA, 25 bp, Probe Sequence
gcggctccgacgcaggtggagctgc

SEQ ID NO: 208438 - DNA, 25 bp, Probe Sequence
gctggcctggaccgcaatgggaggc

SEQ ID NO: 208439 - DNA, 25 bp, Probe Sequence
gcggctactacaaccagagcgaggc

SEQ ID NO: 208440 - DNA, 25 bp, Probe Sequence
gcggctactacaaccagagcgaggc

SEQ ID NO: 208441 - DNA, 25 bp, Probe Sequence
gcggctactacaaccagagcgaggc

SEQ ID NO: 208442 - DNA, 25 bp, Probe Sequence
gcggctactacaaccagagcgaggc

SEQ ID NO: 208443 - DNA, 25 bp, Probe Sequence
gctggcttctcctacaagcagcaag

SEQ ID NO: 208444 - DNA, 25 bp, Probe Sequence
gctggcttccactccaagaaggtgg

SEQ ID NO: 208445 - DNA, 25 bp, Probe Sequence
gctggatacaggcaccaagaggcgg

SEQ ID NO: 208446 - DNA, 25 bp, Probe Sequence
gctggcattcagggtgacatgatgg

SEQ ID NO: 208447 - DNA, 25 bp, Probe Sequence
gctgtcatctcagttcgatatttta

SEQ ID NO: 208448 - DNA, 25 bp, Probe Sequence
gctgattcttgattcccaattctca

SEQ ID NO: 208449 - DNA, 25 bp, Probe Sequence
gctgttcaagaaacctcttcaagac

SEQ ID NO: 208450 - DNA, 25 bp, Probe Sequence
gctgaaagaaaatcctgtcaaccta

SEQ ID NO: 208451 - DNA, 25 bp, Probe Sequence
gctgaataaagtttttgacttcctt

SEQ ID NO: 208452 - DNA, 25 bp, Probe Sequence
gctgaataaagtttttgacttcctt

SEQ ID NO: 208453 - DNA, 25 bp, Probe Sequence
gctagtaaaaccttgtacttctcta

SEQ ID NO: 208454 - DNA, 25 bp, Probe Sequence
gctggaaagatagcagtgttctcct

SEQ ID NO: 208455 - DNA, 25 bp, Probe Sequence
gctggcaccattttagtgctggccc

SEQ ID NO: 208456 - DNA, 25 bp, Probe Sequence
gctggcagccagggagaatgggccc

SEQ ID NO: 208457 - DNA, 25 bp, Probe Sequence
gctggcctgcgcagagattggctgt

SEQ ID NO: 208458 - DNA, 25 bp, Probe Sequence
gctgtgcgtcccagtgatgagggca

SEQ ID NO: 208459 - DNA, 25 bp, Probe Sequence
gctgccttggccagtaggaggcgac

SEQ ID NO: 208460 - DNA, 25 bp, Probe Sequence
gctggtgggccgagaggcaggaagc

SEQ ID NO: 208461 - DNA, 25 bp, Probe Sequence
gctggtggggtgatagggtgggcta

SEQ ID NO: 208462 - DNA, 25 bp, Probe Sequence
gctggtggggtgatagggtgggcta

SEQ ID NO: 208463 - DNA, 25 bp, Probe Sequence
gctgggtggggccagagggaccagt

SEQ ID NO: 208464 - DNA, 25 bp, Probe Sequence
gctggaatgggccttgaggagcccg

SEQ ID NO: 208465 - DNA, 25 bp, Probe Sequence
gctggacgggcctgaaggagaccag

SEQ ID NO: 208466 - DNA, 25 bp, Probe Sequence
gctggagggcgaagtgaaggagaca

SEQ ID NO: 208467 - DNA, 25 bp, Probe Sequence
gctggcagagtctaagtgttctgag

SEQ ID NO: 208468 - DNA, 25 bp, Probe Sequence
gctggcagaacctggtccatgaggt

SEQ ID NO: 208469 - DNA, 25 bp, Probe Sequence
gctggagaccacggagttcatcatc

SEQ ID NO: 208470 - DNA, 25 bp, Probe Sequence
gctggagacaccggagtatgtgcag

SEQ ID NO: 208471 - DNA, 25 bp, Probe Sequence
gctggaacgcggagtgtgagagctc

SEQ ID NO: 208472 - DNA, 25 bp, Probe Sequence
gctggaaccagacttctggggctca

SEQ ID NO: 208473 - DNA, 25 bp, Probe Sequence
gctggagaatcatttcctggaatct

SEQ ID NO: 208474 - DNA, 25 bp, Probe Sequence
gctgggaaattcatgtggatctggg

SEQ ID NO: 208475 - DNA, 25 bp, Probe Sequence
gctggtgaacttctgtggccaccac

SEQ ID NO: 208476 - DNA, 25 bp, Probe Sequence
gctggtgaacttctgtggccaccac

SEQ ID NO: 208477 - DNA, 25 bp, Probe Sequence
gctggaaatcttctcgctccagcaa

SEQ ID NO: 208478 - DNA, 25 bp, Probe Sequence
gctggaaagctgtctttctctgaaa

SEQ ID NO: 208479 - DNA, 25 bp, Probe Sequence
gctggggagtccaatctcctgaaag

SEQ ID NO: 208480 - DNA, 25 bp, Probe Sequence
gctgggggggcattcccagtaggaa

SEQ ID NO: 208481 - DNA, 25 bp, Probe Sequence
gctggcagggtgccaaccatgcaga

SEQ ID NO: 208482 - DNA, 25 bp, Probe Sequence
gctggaggatgtacaggccaaggtc

SEQ ID NO: 208483 - DNA, 25 bp, Probe Sequence
gctgagaagacttctggcagcaacg

SEQ ID NO: 208484 - DNA, 25 bp, Probe Sequence
gctggaattcaatggcgcatctcgg

SEQ ID NO: 208485 - DNA, 25 bp, Probe Sequence
gctggccattgccatatttattcgg

SEQ ID NO: 208486 - DNA, 25 bp, Probe Sequence
gcggctgctacaaatgttgttcagg

SEQ ID NO: 208487 - DNA, 25 bp, Probe Sequence
gcggctggagaattgcttgaacctg

SEQ ID NO: 208488 - DNA, 25 bp, Probe Sequence
gcggctggagaattgcttgaacctg

SEQ ID NO: 208489 - DNA, 25 bp, Probe Sequence
gctgttgaggtattgcctaaggctg

SEQ ID NO: 208490 - DNA, 25 bp, Probe Sequence
gctgttgaggtacttgctgggacgg

SEQ ID NO: 208491 - DNA, 25 bp, Probe Sequence
gctgtgggaggagtcggggaaaggc

SEQ ID NO: 208492 - DNA, 25 bp, Probe Sequence
gctgtgggggcagctggggttggag

SEQ ID NO: 208493 - DNA, 25 bp, Probe Sequence
gctgggaggtgaccatagggctctg

SEQ ID NO: 208494 - DNA, 25 bp, Probe Sequence
gctggtagagacccaggagtgcctg

SEQ ID NO: 208495 - DNA, 25 bp, Probe Sequence
gctggagaagcaggcctgcgagctg

SEQ ID NO: 208496 - DNA, 25 bp, Probe Sequence
gctggaggctcagcgtgcagaggcc

SEQ ID NO: 208497 - DNA, 25 bp, Probe Sequence
gctggagcgctcggaggagagggct

SEQ ID NO: 208498 - DNA, 25 bp, Probe Sequence
gctggagcgctcggaggagagggct

SEQ ID NO: 208499 - DNA, 25 bp, Probe Sequence
gctggagcagctgaacgagcagttt

SEQ ID NO: 208500 - DNA, 25 bp, Probe Sequence
gctggacatgtcctacgagcagctg

SEQ ID NO: 208501 - DNA, 25 bp, Probe Sequence
gctgggcagacacatcgtagcagtg

SEQ ID NO: 208502 - DNA, 25 bp, Probe Sequence
gctggtcagcactccagtagcgaga

SEQ ID NO: 208503 - DNA, 25 bp, Probe Sequence
gctggagcgcagcgccgaagggact

SEQ ID NO: 208504 - DNA, 25 bp, Probe Sequence
gctggaccgcgagcgacagaaacta

SEQ ID NO: 208505 - DNA, 25 bp, Probe Sequence
gctggcaaacaagctgcacagaaat

SEQ ID NO: 208506 - DNA, 25 bp, Probe Sequence
gctggcttagcagccaccagaatga

SEQ ID NO: 208507 - DNA, 25 bp, Probe Sequence
gctggcacggcagccacaagtgagg

SEQ ID NO: 208508 - DNA, 25 bp, Probe Sequence
gctggagcggcagatcagccaggat

SEQ ID NO: 208509 - DNA, 25 bp, Probe Sequence
gctgggtgcatcatgtaactggcat

SEQ ID NO: 208510 - DNA, 25 bp, Probe Sequence
gctgggccattacaacttcataatc

SEQ ID NO: 208511 - DNA, 25 bp, Probe Sequence
gctgggcaagtcaaaactatagaag

SEQ ID NO: 208512 - DNA, 25 bp, Probe Sequence
gctcgcaataccaaagtcgcaagaa

SEQ ID NO: 208513 - DNA, 25 bp, Probe Sequence
gctggactggccaaggtggctctaa

SEQ ID NO: 208514 - DNA, 25 bp, Probe Sequence
gctggcctgtgcccaggctggagct

SEQ ID NO: 208515 - DNA, 25 bp, Probe Sequence
gctggctctgatgattccagagcct

SEQ ID NO: 208516 - DNA, 25 bp, Probe Sequence
gcggcgtgagaagccatgagcagca

SEQ ID NO: 208517 - DNA, 25 bp, Probe Sequence
gctgggggagttcctgaggacccac

SEQ ID NO: 208518 - DNA, 25 bp, Probe Sequence
gctggggagctgaagcacgggcccc

SEQ ID NO: 208519 - DNA, 25 bp, Probe Sequence
gctggaggaggagcagcaggccctc

SEQ ID NO: 208520 - DNA, 25 bp, Probe Sequence
gctggaggaggagcagcaggccctc

SEQ ID NO: 208521 - DNA, 25 bp, Probe Sequence
gctgggtatagaacacaggcactct

SEQ ID NO: 208522 - DNA, 25 bp, Probe Sequence
gctgggttaataaattgcctcattc

SEQ ID NO: 208523 - DNA, 25 bp, Probe Sequence
gctgggtttgatggcttatgccttt

SEQ ID NO: 208524 - DNA, 25 bp, Probe Sequence
gctgggatcttgatgcttgctttat

SEQ ID NO: 208525 - DNA, 25 bp, Probe Sequence
gctggagagttgatacctgcagtca

SEQ ID NO: 208526 - DNA, 25 bp, Probe Sequence
gctggtgtcttgagaccagcctgcc

SEQ ID NO: 208527 - DNA, 25 bp, Probe Sequence
gctggagttgctcaaccagctcgac

SEQ ID NO: 208528 - DNA, 25 bp, Probe Sequence
gctggatgtctccaagctcacagac

SEQ ID NO: 208529 - DNA, 25 bp, Probe Sequence
gctggtacattgaactgcacagacc

SEQ ID NO: 208530 - DNA, 25 bp, Probe Sequence
gctggtacatgctaacgcatggcat

SEQ ID NO: 208531 - DNA, 25 bp, Probe Sequence
gctggggcatcttagagcatccaca

SEQ ID NO: 208532 - DNA, 25 bp, Probe Sequence
gctgaagctgccatggacatctcag

SEQ ID NO: 208533 - DNA, 25 bp, Probe Sequence
gctgtatagtgcctgctgacttagg

SEQ ID NO: 208534 - DNA, 25 bp, Probe Sequence
gctggcagcgtcctggaaaaagcaa

SEQ ID NO: 208535 - DNA, 25 bp, Probe Sequence
gctggcagtgatggggccaagattg

SEQ ID NO: 208536 - DNA, 25 bp, Probe Sequence
gctggagtgtgatgggctcgatctt

SEQ ID NO: 208537 - DNA, 25 bp, Probe Sequence
gctggaatgcagtggcgggatctca

SEQ ID NO: 208538 - DNA, 25 bp, Probe Sequence
gctggcgtctgctggagaggatgtc

SEQ ID NO: 208539 - DNA, 25 bp, Probe Sequence
gctggcgtctgctggagaggatgtc

SEQ ID NO: 208540 - DNA, 25 bp, Probe Sequence
gctggctccagatggaattgacatc

SEQ ID NO: 208541 - DNA, 25 bp, Probe Sequence
gctggctaacattgctatattgaac

SEQ ID NO: 208542 - DNA, 25 bp, Probe Sequence
gctggctgagactctgtgatcatga

SEQ ID NO: 208543 - DNA, 25 bp, Probe Sequence
gctggtgctgcttttgtacatacat

SEQ ID NO: 208544 - DNA, 25 bp, Probe Sequence
gctggtgctgcttttgtacatacat

SEQ ID NO: 208545 - DNA, 25 bp, Probe Sequence
gctgaggactgtctgtacatgacat

SEQ ID NO: 208546 - DNA, 25 bp, Probe Sequence
gctgggactgtggagctggatgacc

SEQ ID NO: 208547 - DNA, 25 bp, Probe Sequence
gctgtggttgctgagggatgagggg

SEQ ID NO: 208548 - DNA, 25 bp, Probe Sequence
gctggggaagcggggagaggggtca

SEQ ID NO: 208549 - DNA, 25 bp, Probe Sequence
gctggggaaagcgggaagcgctcgc

SEQ ID NO: 208550 - DNA, 25 bp, Probe Sequence
gctgtgttaattgtggaagcctcca

SEQ ID NO: 208551 - DNA, 25 bp, Probe Sequence
gctggtagtggtgctgtgcaacctg

SEQ ID NO: 208552 - DNA, 25 bp, Probe Sequence
gctggttgaggtggctggcacctgt

SEQ ID NO: 208553 - DNA, 25 bp, Probe Sequence
gctggtctggagttgctgaatgttg

SEQ ID NO: 208554 - DNA, 25 bp, Probe Sequence
gctgcagatcagtggtctgaattga

SEQ ID NO: 208555 - DNA, 25 bp, Probe Sequence
gctgagatcgtgctactgcagtcca

SEQ ID NO: 208556 - DNA, 25 bp, Probe Sequence
gctgattcgggagctagccgaattc

SEQ ID NO: 208557 - DNA, 25 bp, Probe Sequence
gctgatacgttgactccgggattcc

SEQ ID NO: 208558 - DNA, 25 bp, Probe Sequence
gctgagatctttagtacgtggagtc

SEQ ID NO: 208559 - DNA, 25 bp, Probe Sequence
gctggtcctttttcgggagttagat

SEQ ID NO: 208560 - DNA, 25 bp, Probe Sequence
gctggttgtttttcaggggcctgag

SEQ ID NO: 208561 - DNA, 25 bp, Probe Sequence
gctggttagctgttaaggtggcgtg

SEQ ID NO: 208562 - DNA, 25 bp, Probe Sequence
gctggtttagctggatatgggaggg

SEQ ID NO: 208563 - DNA, 25 bp, Probe Sequence
gctgagtttcctagtagcaaaggca

SEQ ID NO: 208564 - DNA, 25 bp, Probe Sequence
gctggtttcccttacacatagcaga

SEQ ID NO: 208565 - DNA, 25 bp, Probe Sequence
gctggctggtacattgaactgcaca

SEQ ID NO: 208566 - DNA, 25 bp, Probe Sequence
gctggctaatacatatatacctaca

SEQ ID NO: 208567 - DNA, 25 bp, Probe Sequence
gctgtcaaataggtgtgaccctact

SEQ ID NO: 208568 - DNA, 25 bp, Probe Sequence
gctggagaaagtttgcaaccccatc

SEQ ID NO: 208569 - DNA, 25 bp, Probe Sequence
gctgggcaaagtgctgacgcccacc

SEQ ID NO: 208570 - DNA, 25 bp, Probe Sequence
gctgtgcgctaagtggcagacgctc

SEQ ID NO: 208571 - DNA, 25 bp, Probe Sequence
gctggcatgcatgttggcatgaacc

SEQ ID NO: 208572 - DNA, 25 bp, Probe Sequence
gctggctattctccacatgagacca

SEQ ID NO: 208573 - DNA, 25 bp, Probe Sequence
gctggcatcatttcaccatgtattt

SEQ ID NO: 208574 - DNA, 25 bp, Probe Sequence
gctggacgtgaaggcatctaatcta

SEQ ID NO: 208575 - DNA, 25 bp, Probe Sequence
gctggacgtcaggctgtttgatgct

SEQ ID NO: 208576 - DNA, 25 bp, Probe Sequence
gctggcagttcggctagatttctgt

SEQ ID NO: 208577 - DNA, 25 bp, Probe Sequence
gctgggtcctggaaggaattataat

SEQ ID NO: 208578 - DNA, 25 bp, Probe Sequence
gctgggccctggagggtcaagagcc

SEQ ID NO: 208579 - DNA, 25 bp, Probe Sequence
gctggaaccatggagggtgtagaag

SEQ ID NO: 208580 - DNA, 25 bp, Probe Sequence
gctggaacacagaagagaggaggtt

SEQ ID NO: 208581 - DNA, 25 bp, Probe Sequence
gctggaagccatcaaacgtgacttt

SEQ ID NO: 208582 - DNA, 25 bp, Probe Sequence
gctggaaagatatgaactgattttt

SEQ ID NO: 208583 - DNA, 25 bp, Probe Sequence
gctggtgaagaagacgcggttcctg

SEQ ID NO: 208584 - DNA, 25 bp, Probe Sequence
gctggtttgaagccccaggtatccc

SEQ ID NO: 208585 - DNA, 25 bp, Probe Sequence
gctggtctacaagttctagagtatg

SEQ ID NO: 208586 - DNA, 25 bp, Probe Sequence
gctgtttacaacctgtacgctgtgt

SEQ ID NO: 208587 - DNA, 25 bp, Probe Sequence
gctgtaataaagccggtgcgctgct

SEQ ID NO: 208588 - DNA, 25 bp, Probe Sequence
gctggagaacaagcggctgtgcagg

SEQ ID NO: 208589 - DNA, 25 bp, Probe Sequence
gctggtgaaccaggggtgttgatgg

SEQ ID NO: 208590 - DNA, 25 bp, Probe Sequence
gctggtgaaccaggggtgttgatgg

SEQ ID NO: 208591 - DNA, 25 bp, Probe Sequence
gctggtggacgaggtggtacgaggg

SEQ ID NO: 208592 - DNA, 25 bp, Probe Sequence
gctggatggggagacgttcgaggtg

SEQ ID NO: 208593 - DNA, 25 bp, Probe Sequence
gctggcagggaagccgtataagtat

SEQ ID NO: 208594 - DNA, 25 bp, Probe Sequence
gctgaaggagaagcccctgtggttt

SEQ ID NO: 208595 - DNA, 25 bp, Probe Sequence
gctgggagaaggggctcctgggtgt

SEQ ID NO: 208596 - DNA, 25 bp, Probe Sequence
gctggagaaaggggcccagccgctg

SEQ ID NO: 208597 - DNA, 25 bp, Probe Sequence
gctggatgacaaggacctcccaagt

SEQ ID NO: 208598 - DNA, 25 bp, Probe Sequence
gctggtgaagatgaccgcccaggag

SEQ ID NO: 208599 - DNA, 25 bp, Probe Sequence
gctgggacagagactccccaaggac

SEQ ID NO: 208600 - DNA, 25 bp, Probe Sequence
gctgttgacttgttgccctgaagta

SEQ ID NO: 208601 - DNA, 25 bp, Probe Sequence
gctgttgcagcaggctttccggcag

SEQ ID NO: 208602 - DNA, 25 bp, Probe Sequence
gctggatctgctgtttgaagcgcag

SEQ ID NO: 208603 - DNA, 25 bp, Probe Sequence
gctggatctgctgtttgaagcgcag

SEQ ID NO: 208604 - DNA, 25 bp, Probe Sequence
gctgtgcttgcaggtttgtagtcta

SEQ ID NO: 208605 - DNA, 25 bp, Probe Sequence
gctgttatgctgtttcctagctagg

SEQ ID NO: 208606 - DNA, 25 bp, Probe Sequence
gctgttgtacatgatcctgacaaga

SEQ ID NO: 208607 - DNA, 25 bp, Probe Sequence
gctgttgtacatgatcctgacaaga

SEQ ID NO: 208608 - DNA, 25 bp, Probe Sequence
gctgtatctactcaactaacaaagt

SEQ ID NO: 208609 - DNA, 25 bp, Probe Sequence
gctgatcttgacaaaactttagcaa

SEQ ID NO: 208610 - DNA, 25 bp, Probe Sequence
gctgtctggctgtataactcttaca

SEQ ID NO: 208611 - DNA, 25 bp, Probe Sequence
gctgttagtaatgcacctttggcag

SEQ ID NO: 208612 - DNA, 25 bp, Probe Sequence
gctgttttactgtctacttttcagg

SEQ ID NO: 208613 - DNA, 25 bp, Probe Sequence
gctgttttactgtctacttttcagg

SEQ ID NO: 208614 - DNA, 25 bp, Probe Sequence
gctgttaatttgtgactttgcccca

SEQ ID NO: 208615 - DNA, 25 bp, Probe Sequence
gctggtttgtagttgaatattggcc

SEQ ID NO: 208616 - DNA, 25 bp, Probe Sequence
gctggttttggttatggattgccca

SEQ ID NO: 208617 - DNA, 25 bp, Probe Sequence
gctgtatccctgttgtgaggttcct

SEQ ID NO: 208618 - DNA, 25 bp, Probe Sequence
gctgaatcttttttggacttctgct

SEQ ID NO: 208619 - DNA, 25 bp, Probe Sequence
gctgaatcttttttggacttctgct

SEQ ID NO: 208620 - DNA, 25 bp, Probe Sequence
gctggttttgttaggcgttagtata

SEQ ID NO: 208621 - DNA, 25 bp, Probe Sequence
gctgtgttttttattcttggataca

SEQ ID NO: 208622 - DNA, 25 bp, Probe Sequence
gctggcttggatctcgtttttaacc

SEQ ID NO: 208623 - DNA, 25 bp, Probe Sequence
gctggaatggttgttgttttccact

SEQ ID NO: 208624 - DNA, 25 bp, Probe Sequence
gctggatatggtgccgctgtagtac

SEQ ID NO: 208625 - DNA, 25 bp, Probe Sequence
gctgattgtgctaagccctgtcaaa

SEQ ID NO: 208626 - DNA, 25 bp, Probe Sequence
gctgatgattctagtgccttgaata

SEQ ID NO: 208627 - DNA, 25 bp, Probe Sequence
gctggttgctccttttgagcatatg

SEQ ID NO: 208628 - DNA, 25 bp, Probe Sequence
gctggttcactcttcagcatttatg

SEQ ID NO: 208629 - DNA, 25 bp, Probe Sequence
gctggattacgcaacagtaaatcct

SEQ ID NO: 208630 - DNA, 25 bp, Probe Sequence
gctgttacacacacagtaatacctg

SEQ ID NO: 208631 - DNA, 25 bp, Probe Sequence
gctgttaacaacatgtttgtctcga

SEQ ID NO: 208632 - DNA, 25 bp, Probe Sequence
gctgtaagaaacagttctttgtcag

SEQ ID NO: 208633 - DNA, 25 bp, Probe Sequence
gctggtaaaatcactggcatgttgt

SEQ ID NO: 208634 - DNA, 25 bp, Probe Sequence
gctggatcaagaattgcctggctgt

SEQ ID NO: 208635 - DNA, 25 bp, Probe Sequence
gctggatttcagatactctgctgtt

SEQ ID NO: 208636 - DNA, 25 bp, Probe Sequence
gctggatctccagaactgttctctg

SEQ ID NO: 208637 - DNA, 25 bp, Probe Sequence
gctgtattgtacaaagcgtgttctg

SEQ ID NO: 208638 - DNA, 25 bp, Probe Sequence
gctgtgcctgtatgactggtatacc

SEQ ID NO: 208639 - DNA, 25 bp, Probe Sequence
gctgggcattgaggaagccttcacc

SEQ ID NO: 208640 - DNA, 25 bp, Probe Sequence
gctggtgcaagggacgcttggacaa

SEQ ID NO: 208641 - DNA, 25 bp, Probe Sequence
gctggcacaaggaggcctggacttc

SEQ ID NO: 208642 - DNA, 25 bp, Probe Sequence
gctgaggacaggcttgcctggactt

SEQ ID NO: 208643 - DNA, 25 bp, Probe Sequence
gctgtggacagtcgttgccagctgc

SEQ ID NO: 208644 - DNA, 25 bp, Probe Sequence
gctggggcagtagtcatggcagact

SEQ ID NO: 208645 - DNA, 25 bp, Probe Sequence
gctggatggctgaactgctggatat

SEQ ID NO: 208646 - DNA, 25 bp, Probe Sequence
gctgtgatgtcgctgtcaggatcat

SEQ ID NO: 208647 - DNA, 25 bp, Probe Sequence
gctgggcacgttgagtgaatctcag

SEQ ID NO: 208648 - DNA, 25 bp, Probe Sequence
gctgggcacgttgagtgaatctcag

SEQ ID NO: 208649 - DNA, 25 bp, Probe Sequence
gctgggtgggtttggagttcttggc

SEQ ID NO: 208650 - DNA, 25 bp, Probe Sequence
gctgttgatggggtgggtgttttta

SEQ ID NO: 208651 - DNA, 25 bp, Probe Sequence
gctggtgaggaggtggagccttttg

SEQ ID NO: 208652 - DNA, 25 bp, Probe Sequence
gctggtgcaaggagaagcgtcattt

SEQ ID NO: 208653 - DNA, 25 bp, Probe Sequence
gctggaagatggacgtactttgtct

SEQ ID NO: 208654 - DNA, 25 bp, Probe Sequence
gctgggaggttactttgttgcctag

SEQ ID NO: 208655 - DNA, 25 bp, Probe Sequence
gctggatgactgttactcttttttc

SEQ ID NO: 208656 - DNA, 25 bp, Probe Sequence
gctggtgcgctatacttaattttta

SEQ ID NO: 208657 - DNA, 25 bp, Probe Sequence
gctgggcagtttttctgtattttat

SEQ ID NO: 208658 - DNA, 25 bp, Probe Sequence
gctggacagatttgctttgttatag

SEQ ID NO: 208659 - DNA, 25 bp, Probe Sequence
gctggagctgtggacttttgtacat

SEQ ID NO: 208660 - DNA, 25 bp, Probe Sequence
gctgatcactgggacctggttccag

SEQ ID NO: 208661 - DNA, 25 bp, Probe Sequence
gctgatcactgggacctggttccag

SEQ ID NO: 208662 - DNA, 25 bp, Probe Sequence
gctgactcggaaggaggtctacatc

SEQ ID NO: 208663 - DNA, 25 bp, Probe Sequence
gctggtggagaacgcggtgctcaag

SEQ ID NO: 208664 - DNA, 25 bp, Probe Sequence
gctggggcaacacgcagtactatgg

SEQ ID NO: 208665 - DNA, 25 bp, Probe Sequence
gctggggcaacactctgagttctgg

SEQ ID NO: 208666 - DNA, 25 bp, Probe Sequence
gctggagtgcagtggtgcagtcttg

SEQ ID NO: 208667 - DNA, 25 bp, Probe Sequence
gctggagtgcagtgatgtgatcttg

SEQ ID NO: 208668 - DNA, 25 bp, Probe Sequence
gctggagtcagccatgaggtcagga

SEQ ID NO: 208669 - DNA, 25 bp, Probe Sequence
gctggaacagcactggcaggcaggg

SEQ ID NO: 208670 - DNA, 25 bp, Probe Sequence
gctggacatgaacacactgcaggcg

SEQ ID NO: 208671 - DNA, 25 bp, Probe Sequence
gctggacatgaacacactgcaggcg

SEQ ID NO: 208672 - DNA, 25 bp, Probe Sequence
gctggacatgaacacactgcaggcg

SEQ ID NO: 208673 - DNA, 25 bp, Probe Sequence
gctggagatagacaactctgagctg

SEQ ID NO: 208674 - DNA, 25 bp, Probe Sequence
gctgcaaattgataacttcgctaca

SEQ ID NO: 208675 - DNA, 25 bp, Probe Sequence
gctgaacctatttactttctgaccc

SEQ ID NO: 208676 - DNA, 25 bp, Probe Sequence
gctgagacccatgtccatgttgtac

SEQ ID NO: 208677 - DNA, 25 bp, Probe Sequence
gctgagacccatgtccatgttgtac

SEQ ID NO: 208678 - DNA, 25 bp, Probe Sequence
gctggacctcattaaagtgcatgga

SEQ ID NO: 208679 - DNA, 25 bp, Probe Sequence
gctggacctcattaaagtgcatgga

SEQ ID NO: 208680 - DNA, 25 bp, Probe Sequence
gctggacctcattaaagtgcatgga

SEQ ID NO: 208681 - DNA, 25 bp, Probe Sequence
gctggtgcttattgagatttgctgt

SEQ ID NO: 208682 - DNA, 25 bp, Probe Sequence
gctggtgcttattgagatttgctgt

SEQ ID NO: 208683 - DNA, 25 bp, Probe Sequence
gctgtagctatcatagctttgctct

SEQ ID NO: 208684 - DNA, 25 bp, Probe Sequence
gctgttctaaatagcttcgtctcag

SEQ ID NO: 208685 - DNA, 25 bp, Probe Sequence
gctgtttccaaactacagtcctatg

SEQ ID NO: 208686 - DNA, 25 bp, Probe Sequence
gctgtgccctgacagtaagtcggat

SEQ ID NO: 208687 - DNA, 25 bp, Probe Sequence
gctctgacccaaatttagtcccaga

SEQ ID NO: 208688 - DNA, 25 bp, Probe Sequence
gctgttcctagctactataacccag

SEQ ID NO: 208689 - DNA, 25 bp, Probe Sequence
gctgtgagccttcacttgtacagtc

SEQ ID NO: 208690 - DNA, 25 bp, Probe Sequence
gctgtggatcttcacttgtagcaca

SEQ ID NO: 208691 - DNA, 25 bp, Probe Sequence
gctgtggaattcaatcctcatgtgc

SEQ ID NO: 208692 - DNA, 25 bp, Probe Sequence
gctggagaatatgagtgccatgcat

SEQ ID NO: 208693 - DNA, 25 bp, Probe Sequence
gctgtggaatttaatcctcatgttc

SEQ ID NO: 208694 - DNA, 25 bp, Probe Sequence
gctgttgacatactcattgcctact

SEQ ID NO: 208695 - DNA, 25 bp, Probe Sequence
gctgtattcatatattgctatttct

SEQ ID NO: 208696 - DNA, 25 bp, Probe Sequence
gctgtagtcagtcattttggttttc

SEQ ID NO: 208697 - DNA, 25 bp, Probe Sequence
gctgtttcattcctttgggtaagcc

SEQ ID NO: 208698 - DNA, 25 bp, Probe Sequence
gctgtttcactggttatgcggcgga

SEQ ID NO: 208699 - DNA, 25 bp, Probe Sequence
gctgtttcactggttatgcggcgga

SEQ ID NO: 208700 - DNA, 25 bp, Probe Sequence
gctgttacaataattacgctggtac

SEQ ID NO: 208701 - DNA, 25 bp, Probe Sequence
gctggtaaacacaaatcatgtcaat

SEQ ID NO: 208702 - DNA, 25 bp, Probe Sequence
gctgggcacaacttcagagcattca

SEQ ID NO: 208703 - DNA, 25 bp, Probe Sequence
gctgggactcaattcaggctatgta

SEQ ID NO: 208704 - DNA, 25 bp, Probe Sequence
gctggaggctcagcaagtgccatgc

SEQ ID NO: 208705 - DNA, 25 bp, Probe Sequence
gctggagcccatggctagtggctca

SEQ ID NO: 208706 - DNA, 25 bp, Probe Sequence
gctggacgccaactaggctgagcaa

SEQ ID NO: 208707 - DNA, 25 bp, Probe Sequence
gctggactgctgtacatcaaggaca

SEQ ID NO: 208708 - DNA, 25 bp, Probe Sequence
gctgggctgctgtgcagagtataag

SEQ ID NO: 208709 - DNA, 25 bp, Probe Sequence
gctgaacttgatacactgaatgaag

SEQ ID NO: 208710 - DNA, 25 bp, Probe Sequence
gctggatgtagctcagttgatgaag

SEQ ID NO: 208711 - DNA, 25 bp, Probe Sequence
gctggtgcttgagctgtgctgtaac

SEQ ID NO: 208712 - DNA, 25 bp, Probe Sequence
gctggtgtagcagtattttagccac

SEQ ID NO: 208713 - DNA, 25 bp, Probe Sequence
gctgggtagcaccatttctttcatg

SEQ ID NO: 208714 - DNA, 25 bp, Probe Sequence
gctgtgtgaagccatactttttcag

SEQ ID NO: 208715 - DNA, 25 bp, Probe Sequence
gctgttacactaccaaactgtcagt

SEQ ID NO: 208716 - DNA, 25 bp, Probe Sequence
gctgttacactaccaaactgtcagt

SEQ ID NO: 208717 - DNA, 25 bp, Probe Sequence
gctgttaaattggcaaagctctaaa

SEQ ID NO: 208718 - DNA, 25 bp, Probe Sequence
gctgttagaatgtgcaagcacttgg

SEQ ID NO: 208719 - DNA, 25 bp, Probe Sequence
gctgttgtaaagaagagagctgctt

SEQ ID NO: 208720 - DNA, 25 bp, Probe Sequence
gctgtttgaagcgcagcaggtgcat

SEQ ID NO: 208721 - DNA, 25 bp, Probe Sequence
gctgtaggaagcgccattcttccct

SEQ ID NO: 208722 - DNA, 25 bp, Probe Sequence
gctggaggaagggtgtttgtccact

SEQ ID NO: 208723 - DNA, 25 bp, Probe Sequence
gctggtttacagatgttttccactg

SEQ ID NO: 208724 - DNA, 25 bp, Probe Sequence
gctggtttacgccgctttctgacac

SEQ ID NO: 208725 - DNA, 25 bp, Probe Sequence
gctgtctactacggcagttttacac

SEQ ID NO: 208726 - DNA, 25 bp, Probe Sequence
gctgtgcctaggggagtttctaccc

SEQ ID NO: 208727 - DNA, 25 bp, Probe Sequence
gctggtctcaagtggtatcctcacc

SEQ ID NO: 208728 - DNA, 25 bp, Probe Sequence
gctgctttaagaagaaatacccact

SEQ ID NO: 208729 - DNA, 25 bp, Probe Sequence
gctatttcaaaggaaccagcccacg

SEQ ID NO: 208730 - DNA, 25 bp, Probe Sequence
gctcttctcagaagtgacaccaacc

SEQ ID NO: 208731 - DNA, 25 bp, Probe Sequence
gctgttcatcgacgaggtccacatg

SEQ ID NO: 208732 - DNA, 25 bp, Probe Sequence
gctggtatcagaacagcttccctca

SEQ ID NO: 208733 - DNA, 25 bp, Probe Sequence
gctgggacagatgatcataccctca

SEQ ID NO: 208734 - DNA, 25 bp, Probe Sequence
gctgtggagagaagaacaccccagg

SEQ ID NO: 208735 - DNA, 25 bp, Probe Sequence
gctggggaggcagagaccctgcaat

SEQ ID NO: 208736 - DNA, 25 bp, Probe Sequence
gctggatcgaggagatgccctctga

SEQ ID NO: 208737 - DNA, 25 bp, Probe Sequence
gctggaggactgagttgccatggag

SEQ ID NO: 208738 - DNA, 25 bp, Probe Sequence
gctggggaagctctagctcagtggc

SEQ ID NO: 208739 - DNA, 25 bp, Probe Sequence
gctgggtgaagtcacagctcaagga

SEQ ID NO: 208740 - DNA, 25 bp, Probe Sequence
gctggttgaagtagactcctcagtg

SEQ ID NO: 208741 - DNA, 25 bp, Probe Sequence
gctgggcttagatcattcctcagtg

SEQ ID NO: 208742 - DNA, 25 bp, Probe Sequence
gctgggccaaattatgtgtctagta

SEQ ID NO: 208743 - DNA, 25 bp, Probe Sequence
gctggtgccactaatattgatctaa

SEQ ID NO: 208744 - DNA, 25 bp, Probe Sequence
gctggtgcctctctattggtaatgt

SEQ ID NO: 208745 - DNA, 25 bp, Probe Sequence
gctgtggccctgagaaagatcacgt

SEQ ID NO: 208746 - DNA, 25 bp, Probe Sequence
gctgggtccttttaagcactggtaa

SEQ ID NO: 208747 - DNA, 25 bp, Probe Sequence
gctgggtagctctttgaaggtggat

SEQ ID NO: 208748 - DNA, 25 bp, Probe Sequence
gctgggtatgtgcttgaaggaattt

SEQ ID NO: 208749 - DNA, 25 bp, Probe Sequence
gctgggcaatggcctcacataggaa

SEQ ID NO: 208750 - DNA, 25 bp, Probe Sequence
gctggtctgtggccttaagagaatg

SEQ ID NO: 208751 - DNA, 25 bp, Probe Sequence
gctggtctgtggccttaagagaatg

SEQ ID NO: 208752 - DNA, 25 bp, Probe Sequence
gctgtgactcttcctcataagagat

SEQ ID NO: 208753 - DNA, 25 bp, Probe Sequence
gctgcgacctctgttcgagaagaag

SEQ ID NO: 208754 - DNA, 25 bp, Probe Sequence
gctggtcccacacatccaggaaaga

SEQ ID NO: 208755 - DNA, 25 bp, Probe Sequence
gctggtcccacacatccaggaaaga

SEQ ID NO: 208756 - DNA, 25 bp, Probe Sequence
gctggatcacatatcctgcctaaag

SEQ ID NO: 208757 - DNA, 25 bp, Probe Sequence
gctgagacgacactaccaataaacc

SEQ ID NO: 208758 - DNA, 25 bp, Probe Sequence
gctgaattctaaatccttaacatcc

SEQ ID NO: 208759 - DNA, 25 bp, Probe Sequence
gctggattacagtatgcctctacag

SEQ ID NO: 208760 - DNA, 25 bp, Probe Sequence
gctggatggaaactacttgaagccg

SEQ ID NO: 208761 - DNA, 25 bp, Probe Sequence
gctggaggaagccttctctgccagc

SEQ ID NO: 208762 - DNA, 25 bp, Probe Sequence
gctggaggaagccttctctgccagc

SEQ ID NO: 208763 - DNA, 25 bp, Probe Sequence
gctgggttatgcctgttgtcgcagc

SEQ ID NO: 208764 - DNA, 25 bp, Probe Sequence
gctgggatcaagcttttctggccat

SEQ ID NO: 208765 - DNA, 25 bp, Probe Sequence
gctgggcaaggtgttgtctgacttt

SEQ ID NO: 208766 - DNA, 25 bp, Probe Sequence
gctgaggtagagggttgcctgagtt

SEQ ID NO: 208767 - DNA, 25 bp, Probe Sequence
gctgggctgtggggttgccagaagc

SEQ ID NO: 208768 - DNA, 25 bp, Probe Sequence
gctgtcccagtggagttccaggagc

SEQ ID NO: 208769 - DNA, 25 bp, Probe Sequence
gctgtcccagtggagttccaggagc

SEQ ID NO: 208770 - DNA, 25 bp, Probe Sequence
gctgtcccagtggagttccaggagc

SEQ ID NO: 208771 - DNA, 25 bp, Probe Sequence
gctgttcacaggtgcggtcataaca

SEQ ID NO: 208772 - DNA, 25 bp, Probe Sequence
gctgaaacagtgccgacttgcaaac

SEQ ID NO: 208773 - DNA, 25 bp, Probe Sequence
gctgagaacttgggcactggagccc

SEQ ID NO: 208774 - DNA, 25 bp, Probe Sequence
gctgagaattcagggattggagtat

SEQ ID NO: 208775 - DNA, 25 bp, Probe Sequence
gctgcagggtagagatcattttaag

SEQ ID NO: 208776 - DNA, 25 bp, Probe Sequence
gctggtggatggtgacttttgaaga

SEQ ID NO: 208777 - DNA, 25 bp, Probe Sequence
gctggtgctggtcagactttttttg

SEQ ID NO: 208778 - DNA, 25 bp, Probe Sequence
gctgggatggacttactattcttgt

SEQ ID NO: 208779 - DNA, 25 bp, Probe Sequence
gctgggaaacaatgccatagattta

SEQ ID NO: 208780 - DNA, 25 bp, Probe Sequence
gctgaaataacagaccaagcatatg

SEQ ID NO: 208781 - DNA, 25 bp, Probe Sequence
gctgacatcatacctaatggcgaaa

SEQ ID NO: 208782 - DNA, 25 bp, Probe Sequence
gctgttaacccactgcatgcagaaa

SEQ ID NO: 208783 - DNA, 25 bp, Probe Sequence
gctgtatgaagcctcaccagcagga

SEQ ID NO: 208784 - DNA, 25 bp, Probe Sequence
gctgaatgcttgctacgagcggtgg

SEQ ID NO: 208785 - DNA, 25 bp, Probe Sequence
gctggtctctgctgaaggttgtaag

SEQ ID NO: 208786 - DNA, 25 bp, Probe Sequence
gctgtcctctgaaggcggttgttta

SEQ ID NO: 208787 - DNA, 25 bp, Probe Sequence
gctgcaattctgaggggggtttggg

SEQ ID NO: 208788 - DNA, 25 bp, Probe Sequence
gctgtattttacattggttgtgggg

SEQ ID NO: 208789 - DNA, 25 bp, Probe Sequence
gtcctttccctgatgggttggggca

SEQ ID NO: 208790 - DNA, 25 bp, Probe Sequence
gctaatttcccatagccgtggggtg

SEQ ID NO: 208791 - DNA, 25 bp, Probe Sequence
gctaacctctaatgggagttggctt

SEQ ID NO: 208792 - DNA, 25 bp, Probe Sequence
gctgtcccctagtgagggactgtgt

SEQ ID NO: 208793 - DNA, 25 bp, Probe Sequence
gcttccctctagaaaggcccaagtc

SEQ ID NO: 208794 - DNA, 25 bp, Probe Sequence
gctgaccgttaaatgagggcaaatc

SEQ ID NO: 208795 - DNA, 25 bp, Probe Sequence
gctcatctggttcaagagggaattc

SEQ ID NO: 208796 - DNA, 25 bp, Probe Sequence
gctgctgggatagaaagcccacttc

SEQ ID NO: 208797 - DNA, 25 bp, Probe Sequence
gctgtaaaagctttagatcctcttc

SEQ ID NO: 208798 - DNA, 25 bp, Probe Sequence
gctgtaaaggtctttgttgctgttg

SEQ ID NO: 208799 - DNA, 25 bp, Probe Sequence
gctgctaaatctcctatttttttaa

SEQ ID NO: 208800 - DNA, 25 bp, Probe Sequence
gctgctaaatctcctatttttttaa

SEQ ID NO: 208801 - DNA, 25 bp, Probe Sequence
gctctactacttgaatgattttgga

SEQ ID NO: 208802 - DNA, 25 bp, Probe Sequence
gctgttttctctgaatgtcttggtg

SEQ ID NO: 208803 - DNA, 25 bp, Probe Sequence
gctgtcttagctcaaatctgttgtg

SEQ ID NO: 208804 - DNA, 25 bp, Probe Sequence
gctgtcttagctcaaatctgttgtg

SEQ ID NO: 208805 - DNA, 25 bp, Probe Sequence
gctgtcttagctcaaatctgttgtg

SEQ ID NO: 208806 - DNA, 25 bp, Probe Sequence
gctgtgctgtatcctcaagttattg

SEQ ID NO: 208807 - DNA, 25 bp, Probe Sequence
gctgtatggattagcatcagtgaag

SEQ ID NO: 208808 - DNA, 25 bp, Probe Sequence
gctgtgcaggctttgcatctgtggc

SEQ ID NO: 208809 - DNA, 25 bp, Probe Sequence
gctgtcaggcatttcattgttgttt

SEQ ID NO: 208810 - DNA, 25 bp, Probe Sequence
gctgtcaggtttgatctcagtgtaa

SEQ ID NO: 208811 - DNA, 25 bp, Probe Sequence
gctgtcgccatgaaggtcgagctgt

SEQ ID NO: 208812 - DNA, 25 bp, Probe Sequence
gctgcacgcattactgcctagagga

SEQ ID NO: 208813 - DNA, 25 bp, Probe Sequence
gctgtacttactccctgaggtaggg

SEQ ID NO: 208814 - DNA, 25 bp, Probe Sequence
gctgtacttactccctgaggtaggg

SEQ ID NO: 208815 - DNA, 25 bp, Probe Sequence
gctgtgaggctagtcccagaagcta

SEQ ID NO: 208816 - DNA, 25 bp, Probe Sequence
gctgtgaggtcgttgctcgaaatga

SEQ ID NO: 208817 - DNA, 25 bp, Probe Sequence
gctgtgagtcccttgtggaatataa

SEQ ID NO: 208818 - DNA, 25 bp, Probe Sequence
gctgtgattccgtttgtatctgtaa

SEQ ID NO: 208819 - DNA, 25 bp, Probe Sequence
gctgagaacgcatctttagctaaac

SEQ ID NO: 208820 - DNA, 25 bp, Probe Sequence
gctggtaagagagttgtcactacta

SEQ ID NO: 208821 - DNA, 25 bp, Probe Sequence
gctggtaagcggtaatacatatgga

SEQ ID NO: 208822 - DNA, 25 bp, Probe Sequence
gctgtgggagggtaaatattgatgg

SEQ ID NO: 208823 - DNA, 25 bp, Probe Sequence
gctggggatgctggtacaagttgtg

SEQ ID NO: 208824 - DNA, 25 bp, Probe Sequence
gctgaaggagctgcattaattctgg

SEQ ID NO: 208825 - DNA, 25 bp, Probe Sequence
gctgagaccagggtcttatctctct

SEQ ID NO: 208826 - DNA, 25 bp, Probe Sequence
gctgaagtaacttcttactgctctc

SEQ ID NO: 208827 - DNA, 25 bp, Probe Sequence
gctgaagtaccagcagtgacagcca

SEQ ID NO: 208828 - DNA, 25 bp, Probe Sequence
gctgggattacaggtgtgaaccact

SEQ ID NO: 208829 - DNA, 25 bp, Probe Sequence
gctgggactacaggcatgtgatatg

SEQ ID NO: 208830 - DNA, 25 bp, Probe Sequence
gctggtattacaggcatgcgtcacc

SEQ ID NO: 208831 - DNA, 25 bp, Probe Sequence
gctgggattacaggcatgcaccacc

SEQ ID NO: 208832 - DNA, 25 bp, Probe Sequence
gctgggtctcctgggcaagaagaag

SEQ ID NO: 208833 - DNA, 25 bp, Probe Sequence
gctgacgtacctgagcatggacggg

SEQ ID NO: 208834 - DNA, 25 bp, Probe Sequence
gctgtcgggactgagcaggcaatgg

SEQ ID NO: 208835 - DNA, 25 bp, Probe Sequence
gctgtaggggcgctgcagtcaaaat

SEQ ID NO: 208836 - DNA, 25 bp, Probe Sequence
gctggggatggggcatggtcaaact

SEQ ID NO: 208837 - DNA, 25 bp, Probe Sequence
gctgggaatggggtgccccagcctt

SEQ ID NO: 208838 - DNA, 25 bp, Probe Sequence
gagggcaaaggaactacctgccttt

SEQ ID NO: 208839 - DNA, 25 bp, Probe Sequence
gcttgggaaagctcataaccctcat

SEQ ID NO: 208840 - DNA, 25 bp, Probe Sequence
gctgggagacgacagaaagccactg

SEQ ID NO: 208841 - DNA, 25 bp, Probe Sequence
gctgtaaactgacaggggctcctgt

SEQ ID NO: 208842 - DNA, 25 bp, Probe Sequence
gctgcagaacggacttgggagccct

SEQ ID NO: 208843 - DNA, 25 bp, Probe Sequence
gctgcagaacggacttgggagccct

SEQ ID NO: 208844 - DNA, 25 bp, Probe Sequence
gctcttcacatcccattgggactcc

SEQ ID NO: 208845 - DNA, 25 bp, Probe Sequence
gctcgccaatggaattcctgactct

SEQ ID NO: 208846 - DNA, 25 bp, Probe Sequence
gctctacagcaaagacaccgagttt

SEQ ID NO: 208847 - DNA, 25 bp, Probe Sequence
gctctaccgaagacctggggtttat

SEQ ID NO: 208848 - DNA, 25 bp, Probe Sequence
tcctaccgaggggcctggtggtaca

SEQ ID NO: 208849 - DNA, 25 bp, Probe Sequence
tcctaccgaggggcctggtggtaca

SEQ ID NO: 208850 - DNA, 25 bp, Probe Sequence
gctttccaaggtgccatgagggtta

SEQ ID NO: 208851 - DNA, 25 bp, Probe Sequence
gcttccttagagagcctggggttag

SEQ ID NO: 208852 - DNA, 25 bp, Probe Sequence
gctgtgccttaacttggctgtggag

SEQ ID NO: 208853 - DNA, 25 bp, Probe Sequence
gctgggctaggaatggccttggagg

SEQ ID NO: 208854 - DNA, 25 bp, Probe Sequence
gctggggcagagaggcctgggagga

SEQ ID NO: 208855 - DNA, 25 bp, Probe Sequence
gctgggagagagaaatgactgagat

SEQ ID NO: 208856 - DNA, 25 bp, Probe Sequence
gctgggaggtggtctgaagcagaca

SEQ ID NO: 208857 - DNA, 25 bp, Probe Sequence
gctgggcctgggctgtcagaaagta

SEQ ID NO: 208858 - DNA, 25 bp, Probe Sequence
gctgggaggggcctctgaacggaac

SEQ ID NO: 208859 - DNA, 25 bp, Probe Sequence
gctgggcaggggcatcagaaggtgc

SEQ ID NO: 208860 - DNA, 25 bp, Probe Sequence
gctgagcccagggcgacagaggggc

SEQ ID NO: 208861 - DNA, 25 bp, Probe Sequence
gctgagcaacagaaaaaggcggcca

SEQ ID NO: 208862 - DNA, 25 bp, Probe Sequence
gctgagaatgaggaataatggggag

SEQ ID NO: 208863 - DNA, 25 bp, Probe Sequence
gctggtggatgtggtgacggggcag

SEQ ID NO: 208864 - DNA, 25 bp, Probe Sequence
gctggtggtgctgggaatggggtgc

SEQ ID NO: 208865 - DNA, 25 bp, Probe Sequence
gctgctggaggtgtaatggacgtta

SEQ ID NO: 208866 - DNA, 25 bp, Probe Sequence
gctgtggaggtcacagctgctcctt

SEQ ID NO: 208867 - DNA, 25 bp, Probe Sequence
gctggtgcaggtaccagtgtctgtg

SEQ ID NO: 208868 - DNA, 25 bp, Probe Sequence
gctggtggtgattgcacacgacgtg

SEQ ID NO: 208869 - DNA, 25 bp, Probe Sequence
gctggtggtgattgcacacgacgtg

SEQ ID NO: 208870 - DNA, 25 bp, Probe Sequence
gctgagtttctgtccaatgagcagg

SEQ ID NO: 208871 - DNA, 25 bp, Probe Sequence
gctgacctcgcttaagggcagggag

SEQ ID NO: 208872 - DNA, 25 bp, Probe Sequence
gctgaactgtcctaaggcaggggcg

SEQ ID NO: 208873 - DNA, 25 bp, Probe Sequence
gctgaaacttcaagggcagtggcca

SEQ ID NO: 208874 - DNA, 25 bp, Probe Sequence
gctgatcaacccggggagtactcag

SEQ ID NO: 208875 - DNA, 25 bp, Probe Sequence
gctgccccgcgagtgggagaacaac

SEQ ID NO: 208876 - DNA, 25 bp, Probe Sequence
gctccccacgagatggaacagaccg

SEQ ID NO: 208877 - DNA, 25 bp, Probe Sequence
gctgaccccggattaaaagcctcat

SEQ ID NO: 208878 - DNA, 25 bp, Probe Sequence
gctcctgccaggattaaaagtccat

SEQ ID NO: 208879 - DNA, 25 bp, Probe Sequence
gctcaggcctgggtctaaggggcac

SEQ ID NO: 208880 - DNA, 25 bp, Probe Sequence
gctggggtggtctataaggatggca

SEQ ID NO: 208881 - DNA, 25 bp, Probe Sequence
gctggtggcaggattccagagccgc

SEQ ID NO: 208882 - DNA, 25 bp, Probe Sequence
gctggtgtctgggttataggcctga

SEQ ID NO: 208883 - DNA, 25 bp, Probe Sequence
gctggtgtgtggatcggatgggcaa

SEQ ID NO: 208884 - DNA, 25 bp, Probe Sequence
gctgggtgctggattctgaggtgct

SEQ ID NO: 208885 - DNA, 25 bp, Probe Sequence
gctgaggttggcattttagtgatta

SEQ ID NO: 208886 - DNA, 25 bp, Probe Sequence
gctgagctgtgggagggtaaatatt

SEQ ID NO: 208887 - DNA, 25 bp, Probe Sequence
gctgacttccttggttaagctgtct

SEQ ID NO: 208888 - DNA, 25 bp, Probe Sequence
gctgtcctgcacttcaggtgcaagc

SEQ ID NO: 208889 - DNA, 25 bp, Probe Sequence
gctgtcccacaccgtggaagagaag

SEQ ID NO: 208890 - DNA, 25 bp, Probe Sequence
gctgcttcctcctggaaattgacga

SEQ ID NO: 208891 - DNA, 25 bp, Probe Sequence
gctgttccattctgtgtagcaccat

SEQ ID NO: 208892 - DNA, 25 bp, Probe Sequence
gctgttccattctgtgtagcaccat

SEQ ID NO: 208893 - DNA, 25 bp, Probe Sequence
gctgtaccagccttggtagccatgg

SEQ ID NO: 208894 - DNA, 25 bp, Probe Sequence
gctgtatgccatcatggggcacctg

SEQ ID NO: 208895 - DNA, 25 bp, Probe Sequence
gctctgagcagctgcacgatggtgc

SEQ ID NO: 208896 - DNA, 25 bp, Probe Sequence
gctgtcagtgctggacgaagtgcta

SEQ ID NO: 208897 - DNA, 25 bp, Probe Sequence
gctggggctgcaccgacagtgcaga

SEQ ID NO: 208898 - DNA, 25 bp, Probe Sequence
gctgggtgctggcacagcactatgt

SEQ ID NO: 208899 - DNA, 25 bp, Probe Sequence
gctgtctggcggcaccaccatgtac

SEQ ID NO: 208900 - DNA, 25 bp, Probe Sequence
gctgtctggaatcctgccaggggac

SEQ ID NO: 208901 - DNA, 25 bp, Probe Sequence
gctgtctgccaactggtagaggcaa

SEQ ID NO: 208902 - DNA, 25 bp, Probe Sequence
gctgtcagcctaatctgtaggagca

SEQ ID NO: 208903 - DNA, 25 bp, Probe Sequence
gctgctacttcgacattgagcggcg

SEQ ID NO: 208904 - DNA, 25 bp, Probe Sequence
gctgaatcttaatttagagggtaca

SEQ ID NO: 208905 - DNA, 25 bp, Probe Sequence
gctaaaacaattctgagaggaaatg

SEQ ID NO: 208906 - DNA, 25 bp, Probe Sequence
tccagccaatcagggcctggggaat

SEQ ID NO: 208907 - DNA, 25 bp, Probe Sequence
gctgagcaaacagctgcccgggaac

SEQ ID NO: 208908 - DNA, 25 bp, Probe Sequence
gctgagcaaacagctgcccgggaac

SEQ ID NO: 208909 - DNA, 25 bp, Probe Sequence
gctgaagcaagaacccgcatgggaa

SEQ ID NO: 208910 - DNA, 25 bp, Probe Sequence
gctgggcagagaggcctgggaggaa

SEQ ID NO: 208911 - DNA, 25 bp, Probe Sequence
gctgggcaatgaggccctgcacagc

SEQ ID NO: 208912 - DNA, 25 bp, Probe Sequence
gctgggcaatgaggccctgcacagc

SEQ ID NO: 208913 - DNA, 25 bp, Probe Sequence
gctgtggtatcaacagcctgcacac

SEQ ID NO: 208914 - DNA, 25 bp, Probe Sequence
gctgggctcactacatgggccagcc

SEQ ID NO: 208915 - DNA, 25 bp, Probe Sequence
gctgaggtagctacagagcttccca

SEQ ID NO: 208916 - DNA, 25 bp, Probe Sequence
gctggtggagtcatgactgtcctca

SEQ ID NO: 208917 - DNA, 25 bp, Probe Sequence
gctggtggagtcatgactgtcctca

SEQ ID NO: 208918 - DNA, 25 bp, Probe Sequence
gctggggagcacttaattcttccca

SEQ ID NO: 208919 - DNA, 25 bp, Probe Sequence
gctgttggacaaatatcttattccc

SEQ ID NO: 208920 - DNA, 25 bp, Probe Sequence
gctgttggacaaatatcttattccc

SEQ ID NO: 208921 - DNA, 25 bp, Probe Sequence
gctgtttgccagctgtatattatcc

SEQ ID NO: 208922 - DNA, 25 bp, Probe Sequence
gctgttgctgccatgttaatgaccc

SEQ ID NO: 208923 - DNA, 25 bp, Probe Sequence
gctgggctgtttgtattgagttgca

SEQ ID NO: 208924 - DNA, 25 bp, Probe Sequence
gctcttttggctgtaatgggtgcat

SEQ ID NO: 208925 - DNA, 25 bp, Probe Sequence
gctgttactggttgaaagtgtgcct

SEQ ID NO: 208926 - DNA, 25 bp, Probe Sequence
gctgtgacctgggagaagcagagtc

SEQ ID NO: 208927 - DNA, 25 bp, Probe Sequence
gctgtccttggcggaacagcagctg

SEQ ID NO: 208928 - DNA, 25 bp, Probe Sequence
gctgtccctagtgggcacgagtggc

SEQ ID NO: 208929 - DNA, 25 bp, Probe Sequence
gctgttgcccaggctggagtgcagt

SEQ ID NO: 208930 - DNA, 25 bp, Probe Sequence
gctgatacccaggcagtagctgatg

SEQ ID NO: 208931 - DNA, 25 bp, Probe Sequence
gctgctgatccatgaggtcctagcc

SEQ ID NO: 208932 - DNA, 25 bp, Probe Sequence
gctgctcttctagggacctatgggg

SEQ ID NO: 208933 - DNA, 25 bp, Probe Sequence
gctgtctttcagaagacctggtggg

SEQ ID NO: 208934 - DNA, 25 bp, Probe Sequence
gctgttttagtgccaggctgcggtg

SEQ ID NO: 208935 - DNA, 25 bp, Probe Sequence
gctgggtgtaggcactgcagggaga

SEQ ID NO: 208936 - DNA, 25 bp, Probe Sequence
gctgtgtctgtatacactgggtaac

SEQ ID NO: 208937 - DNA, 25 bp, Probe Sequence
gctgtatctgtatacctgtaatata

SEQ ID NO: 208938 - DNA, 25 bp, Probe Sequence
gctgaactgtcttgaccattgacta

SEQ ID NO: 208939 - DNA, 25 bp, Probe Sequence
gctgaaggcacctactcagtatctt

SEQ ID NO: 208940 - DNA, 25 bp, Probe Sequence
gctgaagaacctaccgacatgtgat

SEQ ID NO: 208941 - DNA, 25 bp, Probe Sequence
gctgaaagtctctgaagacctgatg

SEQ ID NO: 208942 - DNA, 25 bp, Probe Sequence
gctgagcaagttcaataaagattct

SEQ ID NO: 208943 - DNA, 25 bp, Probe Sequence
gctacaaggtacgcaataactgttt

SEQ ID NO: 208944 - DNA, 25 bp, Probe Sequence
gctgcgaagggaatgccaacaactt

SEQ ID NO: 208945 - DNA, 25 bp, Probe Sequence
gctgtgagtgggtctcccaagacta

SEQ ID NO: 208946 - DNA, 25 bp, Probe Sequence
gctgtgctgtggcatccggaacagc

SEQ ID NO: 208947 - DNA, 25 bp, Probe Sequence
gctgagcgatactttcggcagcacc

SEQ ID NO: 208948 - DNA, 25 bp, Probe Sequence
gctgtggacatctttcaacactgcc

SEQ ID NO: 208949 - DNA, 25 bp, Probe Sequence
gctgtaacacaagtagatgcctgaa

SEQ ID NO: 208950 - DNA, 25 bp, Probe Sequence
gctgtctgcaacatcatgaagcctg

SEQ ID NO: 208951 - DNA, 25 bp, Probe Sequence
gctgttgttccattgaagccgactc

SEQ ID NO: 208952 - DNA, 25 bp, Probe Sequence
gctgacttttgataggccatgcctt

SEQ ID NO: 208953 - DNA, 25 bp, Probe Sequence
gctgactccttgaaatttctggatg

SEQ ID NO: 208954 - DNA, 25 bp, Probe Sequence
gctgcacccacttaatctactgtgg

SEQ ID NO: 208955 - DNA, 25 bp, Probe Sequence
gctcctcactggtatactatcatcc

SEQ ID NO: 208956 - DNA, 25 bp, Probe Sequence
gctgaccctggtagaggtcatcatc

SEQ ID NO: 208957 - DNA, 25 bp, Probe Sequence
gctgaccactggatgctctatgaat

SEQ ID NO: 208958 - DNA, 25 bp, Probe Sequence
gctgatcggctgtatgactccatga

SEQ ID NO: 208959 - DNA, 25 bp, Probe Sequence
gctgtcagaggagcagctatctgat

SEQ ID NO: 208960 - DNA, 25 bp, Probe Sequence
gctgtcacgggagttcctgttaaag

SEQ ID NO: 208961 - DNA, 25 bp, Probe Sequence
gctgtgacatgaagcggtctctgtt

SEQ ID NO: 208962 - DNA, 25 bp, Probe Sequence
gctgtgcagaagtcattgttctttc

SEQ ID NO: 208963 - DNA, 25 bp, Probe Sequence
gctgtgtaacacagattctcctctg

SEQ ID NO: 208964 - DNA, 25 bp, Probe Sequence
gctgtgtaacacagattctcctctg

SEQ ID NO: 208965 - DNA, 25 bp, Probe Sequence
gctgtgtaacacagattctcctctg

SEQ ID NO: 208966 - DNA, 25 bp, Probe Sequence
gctgaggaagacagatctttctgca

SEQ ID NO: 208967 - DNA, 25 bp, Probe Sequence
gctgggcatgagaccaagggtgcgg

SEQ ID NO: 208968 - DNA, 25 bp, Probe Sequence
gctgaagctgagttacgaaggcgaa

SEQ ID NO: 208969 - DNA, 25 bp, Probe Sequence
gctgcaactcagttttggcggagca

SEQ ID NO: 208970 - DNA, 25 bp, Probe Sequence
gctgtacatcgtattacacctgagg

SEQ ID NO: 208971 - DNA, 25 bp, Probe Sequence
gctgtcagatttgtgcaagccctgc

SEQ ID NO: 208972 - DNA, 25 bp, Probe Sequence
gctgtcagtgttattactcacatgc

SEQ ID NO: 208973 - DNA, 25 bp, Probe Sequence
gctgtcatcttagttggaccaactt

SEQ ID NO: 208974 - DNA, 25 bp, Probe Sequence
gctgagacttacacgttcaactttt

SEQ ID NO: 208975 - DNA, 25 bp, Probe Sequence
gctgagagctaaaccaaacaatttt

SEQ ID NO: 208976 - DNA, 25 bp, Probe Sequence
gctgtggctgcagaccaacaaatct

SEQ ID NO: 208977 - DNA, 25 bp, Probe Sequence
gctgggctctgtactatgcaaaatc

SEQ ID NO: 208978 - DNA, 25 bp, Probe Sequence
gctgaggatgggcctagcagatgaa

SEQ ID NO: 208979 - DNA, 25 bp, Probe Sequence
gctgtgcaggaccctgtcatgagaa

SEQ ID NO: 208980 - DNA, 25 bp, Probe Sequence
gctgtgctgaccatcgacgagaagg

SEQ ID NO: 208981 - DNA, 25 bp, Probe Sequence
gctgtgtcccttggtggagagggcg

SEQ ID NO: 208982 - DNA, 25 bp, Probe Sequence
gctgttcaacgaggatgtggaggag

SEQ ID NO: 208983 - DNA, 25 bp, Probe Sequence
gctgtcattacagggatgggcaggc

SEQ ID NO: 208984 - DNA, 25 bp, Probe Sequence
gctgattgtccgcagagggcagtct

SEQ ID NO: 208985 - DNA, 25 bp, Probe Sequence
gctgggcatccgcaccgtagccatc

SEQ ID NO: 208986 - DNA, 25 bp, Probe Sequence
gctgggcctgcacagtcttgaggcc

SEQ ID NO: 208987 - DNA, 25 bp, Probe Sequence
gctgggcctgcaggagttgttccag

SEQ ID NO: 208988 - DNA, 25 bp, Probe Sequence
gctgacacaccgtatgttgttagag

SEQ ID NO: 208989 - DNA, 25 bp, Probe Sequence
gctgaaaccagctcgaatatatgga

SEQ ID NO: 208990 - DNA, 25 bp, Probe Sequence
gctgtaactatctctgtgaagtgtg

SEQ ID NO: 208991 - DNA, 25 bp, Probe Sequence
gctgaccccaatacttgcagaggtg

SEQ ID NO: 208992 - DNA, 25 bp, Probe Sequence
gctgaccctcaaatacggagcgaag

SEQ ID NO: 208993 - DNA, 25 bp, Probe Sequence
gctgggcagcagtataacaggagga

SEQ ID NO: 208994 - DNA, 25 bp, Probe Sequence
gctgtggcatgaaagcagccatgga

SEQ ID NO: 208995 - DNA, 25 bp, Probe Sequence
gctgggcaaacaggccatcgatgat

SEQ ID NO: 208996 - DNA, 25 bp, Probe Sequence
gctgtggaataaggcccagtgcagt

SEQ ID NO: 208997 - DNA, 25 bp, Probe Sequence
gctgggaccaaccgggtgagatcca

SEQ ID NO: 208998 - DNA, 25 bp, Probe Sequence
gctgggagaaactgggaaacaaacg

SEQ ID NO: 208999 - DNA, 25 bp, Probe Sequence
gctgggagaaactggcaaggagaag

SEQ ID NO: 209000 - DNA, 25 bp, Probe Sequence
gctgggagcaaagcgctgagggagc

SEQ ID NO: 209001 - DNA, 25 bp, Probe Sequence
gctgtgtacaaggccctgagtgacc

SEQ ID NO: 209002 - DNA, 25 bp, Probe Sequence
gctgtattcaaggctcctattcgac

SEQ ID NO: 209003 - DNA, 25 bp, Probe Sequence
gctgtttcaagcatttgtacatatt

SEQ ID NO: 209004 - DNA, 25 bp, Probe Sequence
gctgtgtcttacttgatttattctt

SEQ ID NO: 209005 - DNA, 25 bp, Probe Sequence
gctgtggggacattttataatctat

SEQ ID NO: 209006 - DNA, 25 bp, Probe Sequence
gctgagactgcgattattaaatttt

SEQ ID NO: 209007 - DNA, 25 bp, Probe Sequence
gctgtgaggctcatttcaaactatt

SEQ ID NO: 209008 - DNA, 25 bp, Probe Sequence
gctgtcgtcttcctaaaagctattt

SEQ ID NO: 209009 - DNA, 25 bp, Probe Sequence
gctgttgtctgatctaagacctagt

SEQ ID NO: 209010 - DNA, 25 bp, Probe Sequence
gctgatagggattgtacaacctgtt

SEQ ID NO: 209011 - DNA, 25 bp, Probe Sequence
gctgacagtctgacaccaaactctg

SEQ ID NO: 209012 - DNA, 25 bp, Probe Sequence
gctgagctgactgagcctgaactag

SEQ ID NO: 209013 - DNA, 25 bp, Probe Sequence
gctgaggcctttgctggacagatga

SEQ ID NO: 209014 - DNA, 25 bp, Probe Sequence
gctgtcgccttttagaaggagaaac

SEQ ID NO: 209015 - DNA, 25 bp, Probe Sequence
gctgtccagttcccagaaggcatat

SEQ ID NO: 209016 - DNA, 25 bp, Probe Sequence
gctgtcctatatcacaatgaacatt

SEQ ID NO: 209017 - DNA, 25 bp, Probe Sequence
gctgattcctataccactcaaatgt

SEQ ID NO: 209018 - DNA, 25 bp, Probe Sequence
gctgatgatccgaataactacctgt

SEQ ID NO: 209019 - DNA, 25 bp, Probe Sequence
gctgatacccagacataccagcctt

SEQ ID NO: 209020 - DNA, 25 bp, Probe Sequence
gctgataccaatatcaccagcattc

SEQ ID NO: 209021 - DNA, 25 bp, Probe Sequence
gctgagatgcgcaaattcactcccc

SEQ ID NO: 209022 - DNA, 25 bp, Probe Sequence
gctgcatatgcctacaaagctctga

SEQ ID NO: 209023 - DNA, 25 bp, Probe Sequence
gctgcatatgcctacaaagctctga

SEQ ID NO: 209024 - DNA, 25 bp, Probe Sequence
gctgcagtgcgtgaacgtgtcggtg

SEQ ID NO: 209025 - DNA, 25 bp, Probe Sequence
gctcagtcaataaaggatccgggcc

SEQ ID NO: 209026 - DNA, 25 bp, Probe Sequence
gctcgtgcagcttgtagaacctggc

SEQ ID NO: 209027 - DNA, 25 bp, Probe Sequence
gcatctgggcttaaacccataggta

SEQ ID NO: 209028 - DNA, 25 bp, Probe Sequence
gctgtgtacatctgagcatcccaaa

SEQ ID NO: 209029 - DNA, 25 bp, Probe Sequence
gctgtgatactgagagctacctatt

SEQ ID NO: 209030 - DNA, 25 bp, Probe Sequence
gctgatacctgaagcactcccaggc

SEQ ID NO: 209031 - DNA, 25 bp, Probe Sequence
gctgatgaatttgactgcccttcag

SEQ ID NO: 209032 - DNA, 25 bp, Probe Sequence
gctgtaatgccagaggcagcctgtg

SEQ ID NO: 209033 - DNA, 25 bp, Probe Sequence
gctgttgtgcacgtcaggacgctgt

SEQ ID NO: 209034 - DNA, 25 bp, Probe Sequence
gctgtgtgtgagcagtggacacgtg

SEQ ID NO: 209035 - DNA, 25 bp, Probe Sequence
gctgtgaggcagctctggaacgtga

SEQ ID NO: 209036 - DNA, 25 bp, Probe Sequence
gctgtggagtgacctggtgcaggaa

SEQ ID NO: 209037 - DNA, 25 bp, Probe Sequence
gctgtgtagcacactgagtgacgca

SEQ ID NO: 209038 - DNA, 25 bp, Probe Sequence
gctgagcctgctagactgagtgact

SEQ ID NO: 209039 - DNA, 25 bp, Probe Sequence
gctgtgcactcaacaagagttctga

SEQ ID NO: 209040 - DNA, 25 bp, Probe Sequence
gctgtgcgtgctgacagttttgcaa

SEQ ID NO: 209041 - DNA, 25 bp, Probe Sequence
gctgctgcagagtgaacttttccaa

SEQ ID NO: 209042 - DNA, 25 bp, Probe Sequence
gctgcaaggacgtcacgggtccaga

SEQ ID NO: 209043 - DNA, 25 bp, Probe Sequence
gctgcaaggacgtcacgggtccaga

SEQ ID NO: 209044 - DNA, 25 bp, Probe Sequence
gctgaaggggcattgggccaccgta

SEQ ID NO: 209045 - DNA, 25 bp, Probe Sequence
gctgcaggaaggtatggggccattt

SEQ ID NO: 209046 - DNA, 25 bp, Probe Sequence
gctgcaaccgttggatgaggtcatt

SEQ ID NO: 209047 - DNA, 25 bp, Probe Sequence
gctgcagacgctttcagtgggttga

SEQ ID NO: 209048 - DNA, 25 bp, Probe Sequence
gctgacctcatctgaggggctgtcc

SEQ ID NO: 209049 - DNA, 25 bp, Probe Sequence
gctgacatatgcattgggagttggc

SEQ ID NO: 209050 - DNA, 25 bp, Probe Sequence
gctgacattgaccttaaagatgacc

SEQ ID NO: 209051 - DNA, 25 bp, Probe Sequence
gctgacatctgtgtttcaagtgggg

SEQ ID NO: 209052 - DNA, 25 bp, Probe Sequence
gctgtgctcttgctgttagaaggag

SEQ ID NO: 209053 - DNA, 25 bp, Probe Sequence
gctgtctgcattttcttggagaaat

SEQ ID NO: 209054 - DNA, 25 bp, Probe Sequence
gctgtccgtcttcattaaataatac

SEQ ID NO: 209055 - DNA, 25 bp, Probe Sequence
gctgtctctttcacctaataaatac

SEQ ID NO: 209056 - DNA, 25 bp, Probe Sequence
gctgtctttctgagatctaattcca

SEQ ID NO: 209057 - DNA, 25 bp, Probe Sequence
gctgatattttgataacaatctcta

SEQ ID NO: 209058 - DNA, 25 bp, Probe Sequence
gctgtcttgtttcagaagtcttggc

SEQ ID NO: 209059 - DNA, 25 bp, Probe Sequence
gctgtcttttcttggaacatcttac

SEQ ID NO: 209060 - DNA, 25 bp, Probe Sequence
gctgtgctttattagtaaaattgca

SEQ ID NO: 209061 - DNA, 25 bp, Probe Sequence
gctgagctttaatttcaagtctaca

SEQ ID NO: 209062 - DNA, 25 bp, Probe Sequence
gctgtctttccattaaagaaacacc

SEQ ID NO: 209063 - DNA, 25 bp, Probe Sequence
gctactttgtgagtaaagaaaacaa

SEQ ID NO: 209064 - DNA, 25 bp, Probe Sequence
gcagacccgggtaagtaaaggcaga

SEQ ID NO: 209065 - DNA, 25 bp, Probe Sequence
gctacccgagtttagtaacagtgca

SEQ ID NO: 209066 - DNA, 25 bp, Probe Sequence
gctgacaccgaccggagtactagcc

SEQ ID NO: 209067 - DNA, 25 bp, Probe Sequence
gctgaacctgagggagacaacggca

SEQ ID NO: 209068 - DNA, 25 bp, Probe Sequence
gctgaacctcgaggaactccaggac

SEQ ID NO: 209069 - DNA, 25 bp, Probe Sequence
gctgagaagtggaggccccaggaca

SEQ ID NO: 209070 - DNA, 25 bp, Probe Sequence
gctgaggttctgagggcaccgagac

SEQ ID NO: 209071 - DNA, 25 bp, Probe Sequence
gctgaggtgtagatggaacgctaaa

SEQ ID NO: 209072 - DNA, 25 bp, Probe Sequence
gctgagttgaagaaggagtcgctga

SEQ ID NO: 209073 - DNA, 25 bp, Probe Sequence
gctgagtggcattggaggcttcgtg

SEQ ID NO: 209074 - DNA, 25 bp, Probe Sequence
gctgtgtggcattgtgagttggggc

SEQ ID NO: 209075 - DNA, 25 bp, Probe Sequence
gctgtgtgaatcgtgggtgggatgg

SEQ ID NO: 209076 - DNA, 25 bp, Probe Sequence
gctgaggagagccgagttggactgg

SEQ ID NO: 209077 - DNA, 25 bp, Probe Sequence
gctgatgggctgagaacatggactg

SEQ ID NO: 209078 - DNA, 25 bp, Probe Sequence
gctgtgccctgagagaatggaagaa

SEQ ID NO: 209079 - DNA, 25 bp, Probe Sequence
gctgaccaagatggaggacgaggat

SEQ ID NO: 209080 - DNA, 25 bp, Probe Sequence
gctgaccagaactgcacgcaagagt

SEQ ID NO: 209081 - DNA, 25 bp, Probe Sequence
gctgtacacaagcagacagaaatgc

SEQ ID NO: 209082 - DNA, 25 bp, Probe Sequence
gctgtgatcatccacaagccaaaga

SEQ ID NO: 209083 - DNA, 25 bp, Probe Sequence
gctgatgcacagggagcaccaaagg

SEQ ID NO: 209084 - DNA, 25 bp, Probe Sequence
gctgccactgaggagttcatcaagc

SEQ ID NO: 209085 - DNA, 25 bp, Probe Sequence
gctgacagctgacctttgtcatctt

SEQ ID NO: 209086 - DNA, 25 bp, Probe Sequence
gctgaagcaggccatgcttacctta

SEQ ID NO: 209087 - DNA, 25 bp, Probe Sequence
gctgagatcaggatgttccgcttca

SEQ ID NO: 209088 - DNA, 25 bp, Probe Sequence
gctgagctgggcatctatccagctg

SEQ ID NO: 209089 - DNA, 25 bp, Probe Sequence
gctgagtcacgtgcatatccagtcc

SEQ ID NO: 209090 - DNA, 25 bp, Probe Sequence
gctgagtatagtaagtcctcttcca

SEQ ID NO: 209091 - DNA, 25 bp, Probe Sequence
gctgattgaaaaagatccttcatta

SEQ ID NO: 209092 - DNA, 25 bp, Probe Sequence
gctgtgaaaataagttgttcatcca

SEQ ID NO: 209093 - DNA, 25 bp, Probe Sequence
gctgaccaactgacgtatgtttccc

SEQ ID NO: 209094 - DNA, 25 bp, Probe Sequence
gctgatccagagcacagatctgttt

SEQ ID NO: 209095 - DNA, 25 bp, Probe Sequence
gctgtgctgtggctgagtatggtgt

SEQ ID NO: 209096 - DNA, 25 bp, Probe Sequence
gctgtgctgtggctgagtatggtgt

SEQ ID NO: 209097 - DNA, 25 bp, Probe Sequence
gctgtgctgtggctgagtatggtgt

SEQ ID NO: 209098 - DNA, 25 bp, Probe Sequence
gctgagttgtgccttgtagaattgc

SEQ ID NO: 209099 - DNA, 25 bp, Probe Sequence
gctgatgggatgcctattaatgttg

SEQ ID NO: 209100 - DNA, 25 bp, Probe Sequence
gctgaggagcagctttaggtatgga

SEQ ID NO: 209101 - DNA, 25 bp, Probe Sequence
gctgagcgagtgaaagctgaggtag

SEQ ID NO: 209102 - DNA, 25 bp, Probe Sequence
gctgagcctgcggctcatgctgaag

SEQ ID NO: 209103 - DNA, 25 bp, Probe Sequence
gctgtgcacaaggctgagctgaaga

SEQ ID NO: 209104 - DNA, 25 bp, Probe Sequence
gctgtgagccgggcagctaaggcag

SEQ ID NO: 209105 - DNA, 25 bp, Probe Sequence
gctgcataatcgggcgtcaaggcgc

SEQ ID NO: 209106 - DNA, 25 bp, Probe Sequence
gctgcatgagaagcggtacctgcgg

SEQ ID NO: 209107 - DNA, 25 bp, Probe Sequence
gctgacgaggccctggacagtgggc

SEQ ID NO: 209108 - DNA, 25 bp, Probe Sequence
gctgtcagcaagacggtgtatgggg

SEQ ID NO: 209109 - DNA, 25 bp, Probe Sequence
gctgtcagccagaagggttcaggcc

SEQ ID NO: 209110 - DNA, 25 bp, Probe Sequence
gctgtcacactgaagttttgtcctc

SEQ ID NO: 209111 - DNA, 25 bp, Probe Sequence
gctgtcacaatcaatgtttttatct

SEQ ID NO: 209112 - DNA, 25 bp, Probe Sequence
gctgtcaagacattgcttcaacatt

SEQ ID NO: 209113 - DNA, 25 bp, Probe Sequence
gctgctaaggcaaatctcaactaca

SEQ ID NO: 209114 - DNA, 25 bp, Probe Sequence
gctgtagaagcagttctcagactga

SEQ ID NO: 209115 - DNA, 25 bp, Probe Sequence
gctgtcagattaattccatgatcac

SEQ ID NO: 209116 - DNA, 25 bp, Probe Sequence
gctgtcagattaattccatgatcac

SEQ ID NO: 209117 - DNA, 25 bp, Probe Sequence
gctgtcagtgaattagcaggtcatc

SEQ ID NO: 209118 - DNA, 25 bp, Probe Sequence
gctgacgctgaaatagagcccaaag

SEQ ID NO: 209119 - DNA, 25 bp, Probe Sequence
gctgagcgtgatgatctagcctcca

SEQ ID NO: 209120 - DNA, 25 bp, Probe Sequence
gctgagcgtgatgatctagcctcca

SEQ ID NO: 209121 - DNA, 25 bp, Probe Sequence
gctgcaggagttcgcaatcctcagc

SEQ ID NO: 209122 - DNA, 25 bp, Probe Sequence
gctgtagtgttgtaacctgctgcac

SEQ ID NO: 209123 - DNA, 25 bp, Probe Sequence
gctgtgcagatgtgtatggccttgg

SEQ ID NO: 209124 - DNA, 25 bp, Probe Sequence
gctgatgaacaccttggctttgcat

SEQ ID NO: 209125 - DNA, 25 bp, Probe Sequence
gctgatgaaacactgacctcttgtc

SEQ ID NO: 209126 - DNA, 25 bp, Probe Sequence
gctgcaggaaatagatcgttatgcc

SEQ ID NO: 209127 - DNA, 25 bp, Probe Sequence
gctgcattgagctatggtcgtgcca

SEQ ID NO: 209128 - DNA, 25 bp, Probe Sequence
gctgatggagagtgtttcacaggca

SEQ ID NO: 209129 - DNA, 25 bp, Probe Sequence
gctgaaggacgatgtgtactgtgag

SEQ ID NO: 209130 - DNA, 25 bp, Probe Sequence
gctgaggtgggaaggtggcttgagt

SEQ ID NO: 209131 - DNA, 25 bp, Probe Sequence
gctgagggtggaggccggattgtac

SEQ ID NO: 209132 - DNA, 25 bp, Probe Sequence
gctgaaggatgaagaccggattttc

SEQ ID NO: 209133 - DNA, 25 bp, Probe Sequence
gctgaaggagattgggcggatttga

SEQ ID NO: 209134 - DNA, 25 bp, Probe Sequence
gctgagcagggcggggctgagtaaa

SEQ ID NO: 209135 - DNA, 25 bp, Probe Sequence
gctgcaaggagcggggtcgtgaccg

SEQ ID NO: 209136 - DNA, 25 bp, Probe Sequence
gctgatgagcgaggcgggtgctggc

SEQ ID NO: 209137 - DNA, 25 bp, Probe Sequence
gctgtgcgcgcggagagaggtgcgc

SEQ ID NO: 209138 - DNA, 25 bp, Probe Sequence
gctgtgccatcggcaaagccaggca

SEQ ID NO: 209139 - DNA, 25 bp, Probe Sequence
gctgtgcgatacgaaactcacgaga

SEQ ID NO: 209140 - DNA, 25 bp, Probe Sequence
gctgagctacatgatcaacttggag

SEQ ID NO: 209141 - DNA, 25 bp, Probe Sequence
gctgatcagaatggcaatgacaatg

SEQ ID NO: 209142 - DNA, 25 bp, Probe Sequence
gctctgcattcaggcagctgcaaca

SEQ ID NO: 209143 - DNA, 25 bp, Probe Sequence
gctgcgcatcgatgaccagacagtc

SEQ ID NO: 209144 - DNA, 25 bp, Probe Sequence
gctgcgcatcgatgaccagacagtc

SEQ ID NO: 209145 - DNA, 25 bp, Probe Sequence
gctgcgcggctactacaatcagagc

SEQ ID NO: 209146 - DNA, 25 bp, Probe Sequence
gctgagcgcttactacatgccaagc

SEQ ID NO: 209147 - DNA, 25 bp, Probe Sequence
gctgaggctgcagctgaagccaagg

SEQ ID NO: 209148 - DNA, 25 bp, Probe Sequence
gctgatgctcaagctgttgacatac

SEQ ID NO: 209149 - DNA, 25 bp, Probe Sequence
gctgcagtcaatccgataactaaga

SEQ ID NO: 209150 - DNA, 25 bp, Probe Sequence
gctgcatgaaagccgaagttatgga

SEQ ID NO: 209151 - DNA, 25 bp, Probe Sequence
gctgcagatcagttgctgaagctta

SEQ ID NO: 209152 - DNA, 25 bp, Probe Sequence
gctgagtctgattgctgcagcctgg

SEQ ID NO: 209153 - DNA, 25 bp, Probe Sequence
gctgagattatattatgcctggtga

SEQ ID NO: 209154 - DNA, 25 bp, Probe Sequence
gctgcactttaaccctagataggtg

SEQ ID NO: 209155 - DNA, 25 bp, Probe Sequence
gctgcttgtttactccttaagtcga

SEQ ID NO: 209156 - DNA, 25 bp, Probe Sequence
gctgttggtgatattcctggagtcc

SEQ ID NO: 209157 - DNA, 25 bp, Probe Sequence
gctgttggagtaattccaggtctct

SEQ ID NO: 209158 - DNA, 25 bp, Probe Sequence
gctgttgtgagtcttcagcaccctc

SEQ ID NO: 209159 - DNA, 25 bp, Probe Sequence
gctgatcttgaatctgagacccctg

SEQ ID NO: 209160 - DNA, 25 bp, Probe Sequence
gctgatggatgacacggatcccctg

SEQ ID NO: 209161 - DNA, 25 bp, Probe Sequence
gctgatggatgacacggatcccctg

SEQ ID NO: 209162 - DNA, 25 bp, Probe Sequence
gctgagaataatgtgtatcctgttg

SEQ ID NO: 209163 - DNA, 25 bp, Probe Sequence
gctgcgaaagtgctcaaccttgtgc

SEQ ID NO: 209164 - DNA, 25 bp, Probe Sequence
gctgcagtacagtgacacagtctca

SEQ ID NO: 209165 - DNA, 25 bp, Probe Sequence
gctgaggcaggagaagcacttcaac

SEQ ID NO: 209166 - DNA, 25 bp, Probe Sequence
gctgaggtgtacaggcatgcactca

SEQ ID NO: 209167 - DNA, 25 bp, Probe Sequence
gctgtctgctgtaaaggctgcagcc

SEQ ID NO: 209168 - DNA, 25 bp, Probe Sequence
gctgattgagatcaacgccagcccc

SEQ ID NO: 209169 - DNA, 25 bp, Probe Sequence
gctgaatgagtggaccagtgcagac

SEQ ID NO: 209170 - DNA, 25 bp, Probe Sequence
gctgaaggtgctggagatgccaagt

SEQ ID NO: 209171 - DNA, 25 bp, Probe Sequence
gctgttaatgctgggatccatattt

SEQ ID NO: 209172 - DNA, 25 bp, Probe Sequence
gctgtctgtacttgtgaaacattgt

SEQ ID NO: 209173 - DNA, 25 bp, Probe Sequence
gctgatctgtccggcatcagcaacc

SEQ ID NO: 209174 - DNA, 25 bp, Probe Sequence
gctgatggtggggcacagtagcgca

SEQ ID NO: 209175 - DNA, 25 bp, Probe Sequence
gctgctgtgagggaccagtactgaa

SEQ ID NO: 209176 - DNA, 25 bp, Probe Sequence
gctgcctcgtgcgggagtacggcag

SEQ ID NO: 209177 - DNA, 25 bp, Probe Sequence
gctgagccagtcaaggaggtgaggg

SEQ ID NO: 209178 - DNA, 25 bp, Probe Sequence
gctgagcacgctggggatggtggta

SEQ ID NO: 209179 - DNA, 25 bp, Probe Sequence
gctgagcacgcagagagcatgggcg

SEQ ID NO: 209180 - DNA, 25 bp, Probe Sequence
gctgagcacgcagacactgtgcagc

SEQ ID NO: 209181 - DNA, 25 bp, Probe Sequence
gctgcaaatgatggacctccagcga

SEQ ID NO: 209182 - DNA, 25 bp, Probe Sequence
gctgcaagcagtgaccatgcgcagg

SEQ ID NO: 209183 - DNA, 25 bp, Probe Sequence
gctgcaacaggtgctgcacgcaggc

SEQ ID NO: 209184 - DNA, 25 bp, Probe Sequence
gctgcaggtggtgcgggaagccagc

SEQ ID NO: 209185 - DNA, 25 bp, Probe Sequence
gctgcaggtggtgcgggaagccagc

SEQ ID NO: 209186 - DNA, 25 bp, Probe Sequence
gctgcgtggatatcgacgagtgccg

SEQ ID NO: 209187 - DNA, 25 bp, Probe Sequence
gctgctggagtatctagtaatcctt

SEQ ID NO: 209188 - DNA, 25 bp, Probe Sequence
gctgttgtggtttttagtgcactta

SEQ ID NO: 209189 - DNA, 25 bp, Probe Sequence
gctgtttgcctttcgtgaacacatt

SEQ ID NO: 209190 - DNA, 25 bp, Probe Sequence
gctgccttggtctaggtgaaaaaat

SEQ ID NO: 209191 - DNA, 25 bp, Probe Sequence
gctacctggtccctgtcagaaggga

SEQ ID NO: 209192 - DNA, 25 bp, Probe Sequence
gctccagatggggctgttaaagggt

SEQ ID NO: 209193 - DNA, 25 bp, Probe Sequence
gctgcatagagctctccttgaaaac

SEQ ID NO: 209194 - DNA, 25 bp, Probe Sequence
gctgcaaggccaacagctgtgcaaa

SEQ ID NO: 209195 - DNA, 25 bp, Probe Sequence
gctgcacggatacatgggaataact

SEQ ID NO: 209196 - DNA, 25 bp, Probe Sequence
gctgagcggatgcatctggggatga

SEQ ID NO: 209197 - DNA, 25 bp, Probe Sequence
gctgagcccaggactgggtagcccc

SEQ ID NO: 209198 - DNA, 25 bp, Probe Sequence
gctgagttcaggactcggtggaccc

SEQ ID NO: 209199 - DNA, 25 bp, Probe Sequence
gctgaattagtggcttggggggtgg

SEQ ID NO: 209200 - DNA, 25 bp, Probe Sequence
gctgaagaaatcatctgagggggag

SEQ ID NO: 209201 - DNA, 25 bp, Probe Sequence
gctgaaaattacttaaggaagagaa

SEQ ID NO: 209202 - DNA, 25 bp, Probe Sequence
gctgtatattatccctaaaaataag

SEQ ID NO: 209203 - DNA, 25 bp, Probe Sequence
gctgtttttcctcatacaagtaaac

SEQ ID NO: 209204 - DNA, 25 bp, Probe Sequence
gctgttccttctctgatacgggaag

SEQ ID NO: 209205 - DNA, 25 bp, Probe Sequence
gctgtactctaccgtaaccttagag

SEQ ID NO: 209206 - DNA, 25 bp, Probe Sequence
gctgtcagccaaggtggagagctct

SEQ ID NO: 209207 - DNA, 25 bp, Probe Sequence
gctgtcagccaaggtggagagctct

SEQ ID NO: 209208 - DNA, 25 bp, Probe Sequence
gctgtcagccagaagagtgcatgag

SEQ ID NO: 209209 - DNA, 25 bp, Probe Sequence
gcagtcatgatgttagactcattga

SEQ ID NO: 209210 - DNA, 25 bp, Probe Sequence
gctcctgaggatggatctgcagata

SEQ ID NO: 209211 - DNA, 25 bp, Probe Sequence
gctgcctgagtcacatgtacatctt

SEQ ID NO: 209212 - DNA, 25 bp, Probe Sequence
gctgttctgtcaactgtaattgttc

SEQ ID NO: 209213 - DNA, 25 bp, Probe Sequence
gctgttctgtcaactgtaattgttc

SEQ ID NO: 209214 - DNA, 25 bp, Probe Sequence
gctgtcttgtatcctggtttcatgt

SEQ ID NO: 209215 - DNA, 25 bp, Probe Sequence
gctgattattggctttatttgatga

SEQ ID NO: 209216 - DNA, 25 bp, Probe Sequence
gctgattcagttcaaaattaatgca

SEQ ID NO: 209217 - DNA, 25 bp, Probe Sequence
gctgaatccttctaaattctaagaa

SEQ ID NO: 209218 - DNA, 25 bp, Probe Sequence
gctccaccttcatattggctaggta

SEQ ID NO: 209219 - DNA, 25 bp, Probe Sequence
gctgccaacttctaaccgcaatagt

SEQ ID NO: 209220 - DNA, 25 bp, Probe Sequence
gctgtaattctaaacctgcacttgt

SEQ ID NO: 209221 - DNA, 25 bp, Probe Sequence
gctgtaattctaaactgacctttcc

SEQ ID NO: 209222 - DNA, 25 bp, Probe Sequence
gctgtaattctaaactgacctttcc

SEQ ID NO: 209223 - DNA, 25 bp, Probe Sequence
gctgttaacaatcagctgtttttcc

SEQ ID NO: 209224 - DNA, 25 bp, Probe Sequence
gctgttatacattaccgttatgtca

SEQ ID NO: 209225 - DNA, 25 bp, Probe Sequence
gctgtattaatcacgcgatgttgac

SEQ ID NO: 209226 - DNA, 25 bp, Probe Sequence
gctgctttaatagcctcattaccta

SEQ ID NO: 209227 - DNA, 25 bp, Probe Sequence
gctgttcttgcataggctcttaagc

SEQ ID NO: 209228 - DNA, 25 bp, Probe Sequence
gctgttcttgcataggctcttaagc

SEQ ID NO: 209229 - DNA, 25 bp, Probe Sequence
gctgttcttgcataggctcttaagc

SEQ ID NO: 209230 - DNA, 25 bp, Probe Sequence
gctgattctggttatctctttaagg

SEQ ID NO: 209231 - DNA, 25 bp, Probe Sequence
gctgttgctggaaacttgctttagg

SEQ ID NO: 209232 - DNA, 25 bp, Probe Sequence
gctgttggtgcaagccatgtcttct

SEQ ID NO: 209233 - DNA, 25 bp, Probe Sequence
gtttgggccctcagttgctaagggc

SEQ ID NO: 209234 - DNA, 25 bp, Probe Sequence
gctctcgtaaccaggttctacaggg

SEQ ID NO: 209235 - DNA, 25 bp, Probe Sequence
gctctttcagacccggttgcaaagg

SEQ ID NO: 209236 - DNA, 25 bp, Probe Sequence
gctgcatggtagttggggatccaaa

SEQ ID NO: 209237 - DNA, 25 bp, Probe Sequence
gctgtagaaccccaggaaagaacgg

SEQ ID NO: 209238 - DNA, 25 bp, Probe Sequence
gctgtagattacgtgaaggaagaga

SEQ ID NO: 209239 - DNA, 25 bp, Probe Sequence
gctgtagatcagcctgtgaaggaca

SEQ ID NO: 209240 - DNA, 25 bp, Probe Sequence
gctgtagtgagctgtcattgtgcca

SEQ ID NO: 209241 - DNA, 25 bp, Probe Sequence
gctgtatggatgcaggtcttgccag

SEQ ID NO: 209242 - DNA, 25 bp, Probe Sequence
gctgtttgagcggatgtgcatggcc

SEQ ID NO: 209243 - DNA, 25 bp, Probe Sequence
gctgtttgctgctttatgcaggtgc

SEQ ID NO: 209244 - DNA, 25 bp, Probe Sequence
gctgtatttccagtacatagctcaa

SEQ ID NO: 209245 - DNA, 25 bp, Probe Sequence
gctgtattccacgaggcattgagaa

SEQ ID NO: 209246 - DNA, 25 bp, Probe Sequence
gctgtagctgttggaggctttgaca

SEQ ID NO: 209247 - DNA, 25 bp, Probe Sequence
gctgatctgaggtaaactttgaagt

SEQ ID NO: 209248 - DNA, 25 bp, Probe Sequence
gctgcctgtggtgaactttggctcc

SEQ ID NO: 209249 - DNA, 25 bp, Probe Sequence
gctcctggagttaagcttactgccc

SEQ ID NO: 209250 - DNA, 25 bp, Probe Sequence
gctgctctggtgattcttgtaccta

SEQ ID NO: 209251 - DNA, 25 bp, Probe Sequence
gctgttttgttgacattctgaatgc

SEQ ID NO: 209252 - DNA, 25 bp, Probe Sequence
gctgttttgttgacattctgaatgc

SEQ ID NO: 209253 - DNA, 25 bp, Probe Sequence
gctgttttgttgacattctgaatgc

SEQ ID NO: 209254 - DNA, 25 bp, Probe Sequence
gctgtttttcttagtgctaatacct

SEQ ID NO: 209255 - DNA, 25 bp, Probe Sequence
gctgtacattgcgtttttaacctgc

SEQ ID NO: 209256 - DNA, 25 bp, Probe Sequence
gctgtactgtgtgttttcactttgc

SEQ ID NO: 209257 - DNA, 25 bp, Probe Sequence
gctgaaggctcccattttcagttcc

SEQ ID NO: 209258 - DNA, 25 bp, Probe Sequence
gctgagagtctcttgtttgtctgtc

SEQ ID NO: 209259 - DNA, 25 bp, Probe Sequence
gctgaattgtgatttttttatgcca

SEQ ID NO: 209260 - DNA, 25 bp, Probe Sequence
gctgatctcgagtgttattttctga

SEQ ID NO: 209261 - DNA, 25 bp, Probe Sequence
gctgcaccgataggttttttgctcc

SEQ ID NO: 209262 - DNA, 25 bp, Probe Sequence
gctgatgcaagttcctttttggtcc

SEQ ID NO: 209263 - DNA, 25 bp, Probe Sequence
gctgtacgttacaagtttggtcatt

SEQ ID NO: 209264 - DNA, 25 bp, Probe Sequence
gctgtaccttagctgtgtttgctta

SEQ ID NO: 209265 - DNA, 25 bp, Probe Sequence
gctgtttttgagcttctcattgtgt

SEQ ID NO: 209266 - DNA, 25 bp, Probe Sequence
gctgtttttaccatgtttgtttttg

SEQ ID NO: 209267 - DNA, 25 bp, Probe Sequence
gctgttacttttattttattccttg

SEQ ID NO: 209268 - DNA, 25 bp, Probe Sequence
gctgttacttttttaactcctgcgc

SEQ ID NO: 209269 - DNA, 25 bp, Probe Sequence
gctgtatactatttattcaacttat

SEQ ID NO: 209270 - DNA, 25 bp, Probe Sequence
gctgttagctctttattcttatttt

SEQ ID NO: 209271 - DNA, 25 bp, Probe Sequence
gctgataatgcctgtgttctttttg

SEQ ID NO: 209272 - DNA, 25 bp, Probe Sequence
gctcaaacgtaggcgtctgtgtttc

SEQ ID NO: 209273 - DNA, 25 bp, Probe Sequence
gctgcacaaagttaccttctgtttc

SEQ ID NO: 209274 - DNA, 25 bp, Probe Sequence
gctgaaactcaatcaggtttcaagg

SEQ ID NO: 209275 - DNA, 25 bp, Probe Sequence
gctgatctactataaggtattctat

SEQ ID NO: 209276 - DNA, 25 bp, Probe Sequence
gctgctcggctatctgcaggttttc

SEQ ID NO: 209277 - DNA, 25 bp, Probe Sequence
gctgacagttagggcaagcttcatt

SEQ ID NO: 209278 - DNA, 25 bp, Probe Sequence
gctgcacatgtcttgggaacggaaa

SEQ ID NO: 209279 - DNA, 25 bp, Probe Sequence
gctgcacatgtcttgggaacggaaa

SEQ ID NO: 209280 - DNA, 25 bp, Probe Sequence
gctgcacatgtcttgggaacggaaa

SEQ ID NO: 209281 - DNA, 25 bp, Probe Sequence
gctgcatatggcctgggagtcatgg

SEQ ID NO: 209282 - DNA, 25 bp, Probe Sequence
gctgcaatggcactgcagtactcat

SEQ ID NO: 209283 - DNA, 25 bp, Probe Sequence
gctgatattgcacagtcacagctga

SEQ ID NO: 209284 - DNA, 25 bp, Probe Sequence
gctgctgcagatcggagtcaagtca

SEQ ID NO: 209285 - DNA, 25 bp, Probe Sequence
gctgcagacagcgatgattcaagac

SEQ ID NO: 209286 - DNA, 25 bp, Probe Sequence
gctgagccacaatccaagaacctgg

SEQ ID NO: 209287 - DNA, 25 bp, Probe Sequence
gctcgccacaaatatgggtactgcg

SEQ ID NO: 209288 - DNA, 25 bp, Probe Sequence
gctcccaaggacgatgggttcctca

SEQ ID NO: 209289 - DNA, 25 bp, Probe Sequence
gctcaaccgagttctaggcttcaaa

SEQ ID NO: 209290 - DNA, 25 bp, Probe Sequence
gctgtatcctgagttgtagcctctg

SEQ ID NO: 209291 - DNA, 25 bp, Probe Sequence
gctgaatcctgctatggtaccattc

SEQ ID NO: 209292 - DNA, 25 bp, Probe Sequence
gctgatatctggttagtatgtcatt

SEQ ID NO: 209293 - DNA, 25 bp, Probe Sequence
gctgattcttgacagatttagtcgt

SEQ ID NO: 209294 - DNA, 25 bp, Probe Sequence
gctgttcgtagtttgtataatcagt

SEQ ID NO: 209295 - DNA, 25 bp, Probe Sequence
gctcctagtagttttgttaagtctt

SEQ ID NO: 209296 - DNA, 25 bp, Probe Sequence
gctcctagaagtcttaattgtgttt

SEQ ID NO: 209297 - DNA, 25 bp, Probe Sequence
gctcgaaaccgttctaagactgctt

SEQ ID NO: 209298 - DNA, 25 bp, Probe Sequence
gcatcaacgcgcagacctaaactga

SEQ ID NO: 209299 - DNA, 25 bp, Probe Sequence
gctgcaactggcaaacctgccgacg

SEQ ID NO: 209300 - DNA, 25 bp, Probe Sequence
gctgcattctaggaggcctcctgac

SEQ ID NO: 209301 - DNA, 25 bp, Probe Sequence
gctgttttggacctcccatagaaga

SEQ ID NO: 209302 - DNA, 25 bp, Probe Sequence
gctgttttgacctcccatagaagac

SEQ ID NO: 209303 - DNA, 25 bp, Probe Sequence
gctgttttgacactctcactatgag

SEQ ID NO: 209304 - DNA, 25 bp, Probe Sequence
gctgtttgtaatagtgcacactgca

SEQ ID NO: 209305 - DNA, 25 bp, Probe Sequence
gctgtttgttatatgctgcttaata

SEQ ID NO: 209306 - DNA, 25 bp, Probe Sequence
gctgttctatgttttgctgttattt

SEQ ID NO: 209307 - DNA, 25 bp, Probe Sequence
gctgattaagctgagtggttttttg

SEQ ID NO: 209308 - DNA, 25 bp, Probe Sequence
gctgattcagatgccagggccttgt

SEQ ID NO: 209309 - DNA, 25 bp, Probe Sequence
gctgataagctggctgaagagcatt

SEQ ID NO: 209310 - DNA, 25 bp, Probe Sequence
gctgaggagctggccaagtgacttg

SEQ ID NO: 209311 - DNA, 25 bp, Probe Sequence
gctgagggagcattcacatgtgact

SEQ ID NO: 209312 - DNA, 25 bp, Probe Sequence
gctgagcggcagaaacttgtctcat

SEQ ID NO: 209313 - DNA, 25 bp, Probe Sequence
gctgagggaagttctttgcctgctg

SEQ ID NO: 209314 - DNA, 25 bp, Probe Sequence
gctgagggtctttgtttgggtttat

SEQ ID NO: 209315 - DNA, 25 bp, Probe Sequence
gctgcagaggactggtttgtttttt

SEQ ID NO: 209316 - DNA, 25 bp, Probe Sequence
gctgcaagtaccgctgttgtgattg

SEQ ID NO: 209317 - DNA, 25 bp, Probe Sequence
gctgaattagcctcgatctttttga

SEQ ID NO: 209318 - DNA, 25 bp, Probe Sequence
gctgaaatgagctaagcccttggat

SEQ ID NO: 209319 - DNA, 25 bp, Probe Sequence
gctcaattaaaagcctatcagtttg

SEQ ID NO: 209320 - DNA, 25 bp, Probe Sequence
gctaatttcaaagctatcattttct

SEQ ID NO: 209321 - DNA, 25 bp, Probe Sequence
gctgaagttcacagcacttgttagt

SEQ ID NO: 209322 - DNA, 25 bp, Probe Sequence
gctgttgtgctcattagtttgtata

SEQ ID NO: 209323 - DNA, 25 bp, Probe Sequence
gctgttgctgctattgatgcataac

SEQ ID NO: 209324 - DNA, 25 bp, Probe Sequence
gctctccttgatggtgtcataccag

SEQ ID NO: 209325 - DNA, 25 bp, Probe Sequence
gctgcatactttttgtctagctgtt

SEQ ID NO: 209326 - DNA, 25 bp, Probe Sequence
gctgcatccctaattgtacacagtt

SEQ ID NO: 209327 - DNA, 25 bp, Probe Sequence
gctgcaagctgcagtttaacatgtg

SEQ ID NO: 209328 - DNA, 25 bp, Probe Sequence
gctgcagagttatcattaaagtcac

SEQ ID NO: 209329 - DNA, 25 bp, Probe Sequence
gctgatggatatgaaccaccagtcc

SEQ ID NO: 209330 - DNA, 25 bp, Probe Sequence
gctgatgatcaataactccaattct

SEQ ID NO: 209331 - DNA, 25 bp, Probe Sequence
gctgatccagaaggagctcaccatt

SEQ ID NO: 209332 - DNA, 25 bp, Probe Sequence
gctgagcagcagggaatgtcaccct

SEQ ID NO: 209333 - DNA, 25 bp, Probe Sequence
gctgttccggaaatactctttaatc

SEQ ID NO: 209334 - DNA, 25 bp, Probe Sequence
gctgttcctgtaagtttgctattaa

SEQ ID NO: 209335 - DNA, 25 bp, Probe Sequence
gctgttcatctttgatgtctgtttt

SEQ ID NO: 209336 - DNA, 25 bp, Probe Sequence
gctgttatctatcttattgttcttg

SEQ ID NO: 209337 - DNA, 25 bp, Probe Sequence
gctgttacttgctttgagttggaat

SEQ ID NO: 209338 - DNA, 25 bp, Probe Sequence
gctgttagctaacttgcacagggag

SEQ ID NO: 209339 - DNA, 25 bp, Probe Sequence
gctgttcagccaatggtgtcagtaa

SEQ ID NO: 209340 - DNA, 25 bp, Probe Sequence
gctgttcaaacaagctgtatataaa

SEQ ID NO: 209341 - DNA, 25 bp, Probe Sequence
gctgactacgaatctgtgaatgaat

SEQ ID NO: 209342 - DNA, 25 bp, Probe Sequence
gctgatgatacaaccctggacgatt

SEQ ID NO: 209343 - DNA, 25 bp, Probe Sequence
gctgatgatacaaccctggacgatt

SEQ ID NO: 209344 - DNA, 25 bp, Probe Sequence
gcttgctcgcatacagacggacagt

SEQ ID NO: 209345 - DNA, 25 bp, Probe Sequence
gctgacaccatccagacaaagactc

SEQ ID NO: 209346 - DNA, 25 bp, Probe Sequence
gctgacccagctaaagatgagacca

SEQ ID NO: 209347 - DNA, 25 bp, Probe Sequence
gctgaacccatgtttatgagagata

SEQ ID NO: 209348 - DNA, 25 bp, Probe Sequence
gctgaaatcctccatggtggacaag

SEQ ID NO: 209349 - DNA, 25 bp, Probe Sequence
gctgaccttcatcagtgggagaaca

SEQ ID NO: 209350 - DNA, 25 bp, Probe Sequence
gctgcagcctactcagtggtcagcg

SEQ ID NO: 209351 - DNA, 25 bp, Probe Sequence
gctgcagcctaacgtgtggttttaa

SEQ ID NO: 209352 - DNA, 25 bp, Probe Sequence
gctgcgtgctcaagagtctggtttg

SEQ ID NO: 209353 - DNA, 25 bp, Probe Sequence
gctgctgcagctgaaatcggattcg

SEQ ID NO: 209354 - DNA, 25 bp, Probe Sequence
gctgcggcaccatagtggattgcct

SEQ ID NO: 209355 - DNA, 25 bp, Probe Sequence
gctgccgagcgtgaggagactcagc

SEQ ID NO: 209356 - DNA, 25 bp, Probe Sequence
gctgttcatggtgagcaagaccggc

SEQ ID NO: 209357 - DNA, 25 bp, Probe Sequence
gctctgttggctggaaaaccggtgt

SEQ ID NO: 209358 - DNA, 25 bp, Probe Sequence
gctctttctgtggcaaaaccaagat

SEQ ID NO: 209359 - DNA, 25 bp, Probe Sequence
gctctactcctgcaaatgggtacag

SEQ ID NO: 209360 - DNA, 25 bp, Probe Sequence
tgcctactaatggaaaaggttaata

SEQ ID NO: 209361 - DNA, 25 bp, Probe Sequence
gcttcctcaaggagccagttaaaaa

SEQ ID NO: 209362 - DNA, 25 bp, Probe Sequence
gctaaactaaccccagtgtcacaaa

SEQ ID NO: 209363 - DNA, 25 bp, Probe Sequence
gctacttccaagtgtggttacaaat

SEQ ID NO: 209364 - DNA, 25 bp, Probe Sequence
gctgagctgattaagctgagtggtt

SEQ ID NO: 209365 - DNA, 25 bp, Probe Sequence
gctgagcaacatcaggcctgatttc

SEQ ID NO: 209366 - DNA, 25 bp, Probe Sequence
gctgcagaacagtgtaatatgcttc

SEQ ID NO: 209367 - DNA, 25 bp, Probe Sequence
gctgcacaccagtagtatggcatgc

SEQ ID NO: 209368 - DNA, 25 bp, Probe Sequence
gctgcttctcagtcatgaatgtggc

SEQ ID NO: 209369 - DNA, 25 bp, Probe Sequence
gctgctacagcgtgacgctggcacg

SEQ ID NO: 209370 - DNA, 25 bp, Probe Sequence
gctgcacaaggtggacaaggcaagc

SEQ ID NO: 209371 - DNA, 25 bp, Probe Sequence
gctgatgaaggagatcgaggcggcg

SEQ ID NO: 209372 - DNA, 25 bp, Probe Sequence
gctgatcgaagagtatgggctccgg

SEQ ID NO: 209373 - DNA, 25 bp, Probe Sequence
gctgaaggcagacaaggcccgcaag

SEQ ID NO: 209374 - DNA, 25 bp, Probe Sequence
gctgaaggaggctgagacccgagca

SEQ ID NO: 209375 - DNA, 25 bp, Probe Sequence
gctgaaggaggctgagacccgagca

SEQ ID NO: 209376 - DNA, 25 bp, Probe Sequence
gctgcagatgtggccatcgaacacc

SEQ ID NO: 209377 - DNA, 25 bp, Probe Sequence
gctgcaggtgcatctctggacatgc

SEQ ID NO: 209378 - DNA, 25 bp, Probe Sequence
gctgcggtgagagtttactgtcccc

SEQ ID NO: 209379 - DNA, 25 bp, Probe Sequence
gctgctggggcaatttttccacccc

SEQ ID NO: 209380 - DNA, 25 bp, Probe Sequence
gctgctgcagaatattttccaagct

SEQ ID NO: 209381 - DNA, 25 bp, Probe Sequence
gctctgtaatggagatatgccaaat

SEQ ID NO: 209382 - DNA, 25 bp, Probe Sequence
gctctgtagttgctaatttaaccca

SEQ ID NO: 209383 - DNA, 25 bp, Probe Sequence
gctcttagttcagtaaaatacgccc

SEQ ID NO: 209384 - DNA, 25 bp, Probe Sequence
gctcttccttagtcataaattgtgc

SEQ ID NO: 209385 - DNA, 25 bp, Probe Sequence
gctctaaatgctagctctaaattgt

SEQ ID NO: 209386 - DNA, 25 bp, Probe Sequence
gctgcttaagctggcccacaagtac

SEQ ID NO: 209387 - DNA, 25 bp, Probe Sequence
gctgattgctcgggtcaaagatgaa

SEQ ID NO: 209388 - DNA, 25 bp, Probe Sequence
gctgatctctcggcagaaactctac

SEQ ID NO: 209389 - DNA, 25 bp, Probe Sequence
gctgatgcctcaccaaaaagcaact

SEQ ID NO: 209390 - DNA, 25 bp, Probe Sequence
gctgagcccggctgataaagcactt

SEQ ID NO: 209391 - DNA, 25 bp, Probe Sequence
gctcgccctggacatcgatagggat

SEQ ID NO: 209392 - DNA, 25 bp, Probe Sequence
gctccaacggagttccagagtgtga

SEQ ID NO: 209393 - DNA, 25 bp, Probe Sequence
gctgaccacgccgaatccggaagaa

SEQ ID NO: 209394 - DNA, 25 bp, Probe Sequence
tgccccactttaagccaaaagaaag

SEQ ID NO: 209395 - DNA, 25 bp, Probe Sequence
gctcccactcaatacaaaaaggccc

SEQ ID NO: 209396 - DNA, 25 bp, Probe Sequence
gctcccctaatgacctaaatacact

SEQ ID NO: 209397 - DNA, 25 bp, Probe Sequence
gctcccatccaaatcctactaggaa

SEQ ID NO: 209398 - DNA, 25 bp, Probe Sequence
gctacactacaagacatacccgaag

SEQ ID NO: 209399 - DNA, 25 bp, Probe Sequence
gctaggcttcaagattgtctccaag

SEQ ID NO: 209400 - DNA, 25 bp, Probe Sequence
gctgaatcttagcagattctctcct

SEQ ID NO: 209401 - DNA, 25 bp, Probe Sequence
gctgagctcttagaatttcatccta

SEQ ID NO: 209402 - DNA, 25 bp, Probe Sequence
gctgactttagttccttcatggtaa

SEQ ID NO: 209403 - DNA, 25 bp, Probe Sequence
gctattgaaaaactttctggaaagg

SEQ ID NO: 209404 - DNA, 25 bp, Probe Sequence
gcatagttaaaaccttgctagccaa

SEQ ID NO: 209405 - DNA, 25 bp, Probe Sequence
gctctttacaatatgctggctacca

SEQ ID NO: 209406 - DNA, 25 bp, Probe Sequence
gctgcttttcagtgttcagcatacc

SEQ ID NO: 209407 - DNA, 25 bp, Probe Sequence
gctgctttatcctgtaatcagatgg

SEQ ID NO: 209408 - DNA, 25 bp, Probe Sequence
gctgctttgcagtggtttcagaggc

SEQ ID NO: 209409 - DNA, 25 bp, Probe Sequence
gctgctcctcaagtggttgttaatc

SEQ ID NO: 209410 - DNA, 25 bp, Probe Sequence
gctgaccacaagggctatgggacca

SEQ ID NO: 209411 - DNA, 25 bp, Probe Sequence
gctgaccacaggggctgtgggtcct

SEQ ID NO: 209412 - DNA, 25 bp, Probe Sequence
gctgatccaacctgagtggagtcag

SEQ ID NO: 209413 - DNA, 25 bp, Probe Sequence
gctgagctcaagttagcctagtcta

SEQ ID NO: 209414 - DNA, 25 bp, Probe Sequence
gctgactcaaggaagagtcacctga

SEQ ID NO: 209415 - DNA, 25 bp, Probe Sequence
gctgcctataggagtcttccttttt

SEQ ID NO: 209416 - DNA, 25 bp, Probe Sequence
gctgactagcagccttaattccatt

SEQ ID NO: 209417 - DNA, 25 bp, Probe Sequence
gctgaccgagtcatcaaccagatcc

SEQ ID NO: 209418 - DNA, 25 bp, Probe Sequence
gctgaccgagatctgcaccaagatc

SEQ ID NO: 209419 - DNA, 25 bp, Probe Sequence
gctgaccgagatctgcaccaagatc

SEQ ID NO: 209420 - DNA, 25 bp, Probe Sequence
gctgaccgagatctgcaccaagatc

SEQ ID NO: 209421 - DNA, 25 bp, Probe Sequence
gctgcatcttggactatccgaagag

SEQ ID NO: 209422 - DNA, 25 bp, Probe Sequence
gctgacttggagctagatgaggtgg

SEQ ID NO: 209423 - DNA, 25 bp, Probe Sequence
gctgcacttctacgctgagcagggc

SEQ ID NO: 209424 - DNA, 25 bp, Probe Sequence
gcagccccaagtgaggggccgtggc

SEQ ID NO: 209425 - DNA, 25 bp, Probe Sequence
gctccccagaggaggggccttgacc

SEQ ID NO: 209426 - DNA, 25 bp, Probe Sequence
gctccccagggttagggtgctggtg

SEQ ID NO: 209427 - DNA, 25 bp, Probe Sequence
gctcccccaccatagggtgattgag

SEQ ID NO: 209428 - DNA, 25 bp, Probe Sequence
gctctacttatccgaaccaatttag

SEQ ID NO: 209429 - DNA, 25 bp, Probe Sequence
gctgctactttgtgcaagaactttg

SEQ ID NO: 209430 - DNA, 25 bp, Probe Sequence
gctgctcctttgggggaatgtttgg

SEQ ID NO: 209431 - DNA, 25 bp, Probe Sequence
gctctcccttggtaagacttatttt

SEQ ID NO: 209432 - DNA, 25 bp, Probe Sequence
gctcccctgcaaataaagccttttt

SEQ ID NO: 209433 - DNA, 25 bp, Probe Sequence
gctcccctcggagaagagctgttca

SEQ ID NO: 209434 - DNA, 25 bp, Probe Sequence
gctccgggtggataaggcagctgct

SEQ ID NO: 209435 - DNA, 25 bp, Probe Sequence
gctccgggtggataaggcagctgct

SEQ ID NO: 209436 - DNA, 25 bp, Probe Sequence
gctctcgccgaggaacaagtcggtc

SEQ ID NO: 209437 - DNA, 25 bp, Probe Sequence
gctctgctgcccaaaagacgttttc

SEQ ID NO: 209438 - DNA, 25 bp, Probe Sequence
gcatctggcctataatgcccgtttc

SEQ ID NO: 209439 - DNA, 25 bp, Probe Sequence
gcattaccttacatgactaattttt

SEQ ID NO: 209440 - DNA, 25 bp, Probe Sequence
gctttccttggattggctaaattgg

SEQ ID NO: 209441 - DNA, 25 bp, Probe Sequence
gctttcttagtcttacctagtctga

SEQ ID NO: 209442 - DNA, 25 bp, Probe Sequence
gctgcttttagtttctcttaatcaa

SEQ ID NO: 209443 - DNA, 25 bp, Probe Sequence
gctgctgttttgctattcttaaact

SEQ ID NO: 209444 - DNA, 25 bp, Probe Sequence
gctgcttgttttaagtcctttttat

SEQ ID NO: 209445 - DNA, 25 bp, Probe Sequence
gctcctgtgttttgtttttgttttg

SEQ ID NO: 209446 - DNA, 25 bp, Probe Sequence
gctgacaggtttctgttatctgcat

SEQ ID NO: 209447 - DNA, 25 bp, Probe Sequence
gctgaatgtcttatatgcattatct

SEQ ID NO: 209448 - DNA, 25 bp, Probe Sequence
gctgaatttttgctgcacatgctta

SEQ ID NO: 209449 - DNA, 25 bp, Probe Sequence
gctgacgccttactggcaatgcttc

SEQ ID NO: 209450 - DNA, 25 bp, Probe Sequence
gcatacctttatgggattctacctg

SEQ ID NO: 209451 - DNA, 25 bp, Probe Sequence
gctgcccgtggtggactataagcac

SEQ ID NO: 209452 - DNA, 25 bp, Probe Sequence
gctgccggtggtggactatgaacac

SEQ ID NO: 209453 - DNA, 25 bp, Probe Sequence
gctgaggcctggggatgtgaacaac

SEQ ID NO: 209454 - DNA, 25 bp, Probe Sequence
gctgatggcaccatgtgtggtccag

SEQ ID NO: 209455 - DNA, 25 bp, Probe Sequence
gtgttgggcagattgtgggtgaagt

SEQ ID NO: 209456 - DNA, 25 bp, Probe Sequence
gctgatggctcaggatgtgtgttga

SEQ ID NO: 209457 - DNA, 25 bp, Probe Sequence
gctgatgttcaggcagtcttagcaa

SEQ ID NO: 209458 - DNA, 25 bp, Probe Sequence
gctgagatgagggcagctctctcca

SEQ ID NO: 209459 - DNA, 25 bp, Probe Sequence
gctgcgatagatgaactcaccggga

SEQ ID NO: 209460 - DNA, 25 bp, Probe Sequence
gctgctgaagagaggtgccggggag

SEQ ID NO: 209461 - DNA, 25 bp, Probe Sequence
gctgcacatagtactttgccttgag

SEQ ID NO: 209462 - DNA, 25 bp, Probe Sequence
gctgaatagtgctttggcttgtcga

SEQ ID NO: 209463 - DNA, 25 bp, Probe Sequence
gctgaagaggatatgtttgcatggc

SEQ ID NO: 209464 - DNA, 25 bp, Probe Sequence
gctgaaggtgagtggagtgctgcca

SEQ ID NO: 209465 - DNA, 25 bp, Probe Sequence
gctgcagagtgtcacggagatggga

SEQ ID NO: 209466 - DNA, 25 bp, Probe Sequence
gctgcagattatccatcgggtgcga

SEQ ID NO: 209467 - DNA, 25 bp, Probe Sequence
gctagtatcatgccacggcactcta

SEQ ID NO: 209468 - DNA, 25 bp, Probe Sequence
gctgcagtatgtatcggcatcctcc

SEQ ID NO: 209469 - DNA, 25 bp, Probe Sequence
gctgcagtatgtatcggcatcctcc

SEQ ID NO: 209470 - DNA, 25 bp, Probe Sequence
gctgcacattgtctcagagccagta

SEQ ID NO: 209471 - DNA, 25 bp, Probe Sequence
gctgacagttgggaatccagcttcc

SEQ ID NO: 209472 - DNA, 25 bp, Probe Sequence
gctgaagctttgcccaaacaatcca

SEQ ID NO: 209473 - DNA, 25 bp, Probe Sequence
gctaacttagtgcaaacataacttt

SEQ ID NO: 209474 - DNA, 25 bp, Probe Sequence
gctacctaaggttaacatgtcacta

SEQ ID NO: 209475 - DNA, 25 bp, Probe Sequence
gctaaccaggtttaccatctcactc

SEQ ID NO: 209476 - DNA, 25 bp, Probe Sequence
gctaacaaggtgaaactccgccttt

SEQ ID NO: 209477 - DNA, 25 bp, Probe Sequence
gcttcactaggaaacctacccttca

SEQ ID NO: 209478 - DNA, 25 bp, Probe Sequence
gctataagtgaagacctacctttcc

SEQ ID NO: 209479 - DNA, 25 bp, Probe Sequence
gctctaatggaaaaatggccctctt

SEQ ID NO: 209480 - DNA, 25 bp, Probe Sequence
gctccacaggacataggcaagcctt

SEQ ID NO: 209481 - DNA, 25 bp, Probe Sequence
gctgccaaagccttagacaagcgcc

SEQ ID NO: 209482 - DNA, 25 bp, Probe Sequence
gctgcactaacctttggtatccttt

SEQ ID NO: 209483 - DNA, 25 bp, Probe Sequence
gctgcactacacctatctggataca

SEQ ID NO: 209484 - DNA, 25 bp, Probe Sequence
gctgcagtacagcaatggcgatcag

SEQ ID NO: 209485 - DNA, 25 bp, Probe Sequence
gctgcagtacagcaatggcgatcag

SEQ ID NO: 209486 - DNA, 25 bp, Probe Sequence
gctgagaacacggagtgcttgcatc

SEQ ID NO: 209487 - DNA, 25 bp, Probe Sequence
gctgagaacgcgggtgcagcgtgtg

SEQ ID NO: 209488 - DNA, 25 bp, Probe Sequence
gctgagggcacgggatgctgggatg

SEQ ID NO: 209489 - DNA, 25 bp, Probe Sequence
gctagggctcggtcacgaggtggaa

SEQ ID NO: 209490 - DNA, 25 bp, Probe Sequence
gctcggcagtcatactggggtgcga

SEQ ID NO: 209491 - DNA, 25 bp, Probe Sequence
gctgcagccagagttacgcgggggc

SEQ ID NO: 209492 - DNA, 25 bp, Probe Sequence
gctgcaaagcatggtgaggcccagg

SEQ ID NO: 209493 - DNA, 25 bp, Probe Sequence
gctgcagaagcaggcgcaaacacag

SEQ ID NO: 209494 - DNA, 25 bp, Probe Sequence
gctgcaccagttggcaatgcaacag

SEQ ID NO: 209495 - DNA, 25 bp, Probe Sequence
gctgcccactgcatcaggaacaaaa

SEQ ID NO: 209496 - DNA, 25 bp, Probe Sequence
gctgcccactgcaaaaaaccgaatc

SEQ ID NO: 209497 - DNA, 25 bp, Probe Sequence
gctgccgaggcagaaaacggtgtat

SEQ ID NO: 209498 - DNA, 25 bp, Probe Sequence
gctgccacagggtcaaaggaggttt

SEQ ID NO: 209499 - DNA, 25 bp, Probe Sequence
gctgctgactgaggtcaacaggcgg

SEQ ID NO: 209500 - DNA, 25 bp, Probe Sequence
gctgctcatctggttcaagagggaa

SEQ ID NO: 209501 - DNA, 25 bp, Probe Sequence
gctctgcattcaatccaagtgggag

SEQ ID NO: 209502 - DNA, 25 bp, Probe Sequence
gctcctgacctccctgggagggtgc

SEQ ID NO: 209503 - DNA, 25 bp, Probe Sequence
gctcctgacctccctgggagggtgc

SEQ ID NO: 209504 - DNA, 25 bp, Probe Sequence
gctctgtcacccaggctggagtgag

SEQ ID NO: 209505 - DNA, 25 bp, Probe Sequence
gctgcttccgccagcaggagaatcc

SEQ ID NO: 209506 - DNA, 25 bp, Probe Sequence
gctgctgaacgtcagccggatcatc

SEQ ID NO: 209507 - DNA, 25 bp, Probe Sequence
gctgcgtaggtctacatcttactca

SEQ ID NO: 209508 - DNA, 25 bp, Probe Sequence
gctgctgttggtcccattaagcaac

SEQ ID NO: 209509 - DNA, 25 bp, Probe Sequence
gctgctctgtgactaggttgaaaac

SEQ ID NO: 209510 - DNA, 25 bp, Probe Sequence
gctgctgacgctctgggtgaagaat

SEQ ID NO: 209511 - DNA, 25 bp, Probe Sequence
gctgcatgtattctggggcattgta

SEQ ID NO: 209512 - DNA, 25 bp, Probe Sequence
gctgaccttcggcatgacattgatc

SEQ ID NO: 209513 - DNA, 25 bp, Probe Sequence
gctcccttccggtacatgaacgaag

SEQ ID NO: 209514 - DNA, 25 bp, Probe Sequence
gctcctttcccctgatcagagaaag

SEQ ID NO: 209515 - DNA, 25 bp, Probe Sequence
gctgcgcttcttctcagagaagagt

SEQ ID NO: 209516 - DNA, 25 bp, Probe Sequence
gctccgtagtcttaggaaagttgcc

SEQ ID NO: 209517 - DNA, 25 bp, Probe Sequence
gctccgtgtacctgccaaatggatc

SEQ ID NO: 209518 - DNA, 25 bp, Probe Sequence
gctcacgttaggcatgaaacaggac

SEQ ID NO: 209519 - DNA, 25 bp, Probe Sequence
gctgccatggccctggagaaaaagc

SEQ ID NO: 209520 - DNA, 25 bp, Probe Sequence
gctgaatgacacttttaagacaatg

SEQ ID NO: 209521 - DNA, 25 bp, Probe Sequence
gctgagctccaggtttaagaatgaa

SEQ ID NO: 209522 - DNA, 25 bp, Probe Sequence
gctgccgcctgagtttcaagaatta

SEQ ID NO: 209523 - DNA, 25 bp, Probe Sequence
gctcccactggtttaatagttactt

SEQ ID NO: 209524 - DNA, 25 bp, Probe Sequence
gctgcactattggttcttaagtttt

SEQ ID NO: 209525 - DNA, 25 bp, Probe Sequence
gctgaaattcatgtgttcaaatctt

SEQ ID NO: 209526 - DNA, 25 bp, Probe Sequence
gctgaattactactgtgtgcaagtt

SEQ ID NO: 209527 - DNA, 25 bp, Probe Sequence
gctgactccaagctgcatggcaagt

SEQ ID NO: 209528 - DNA, 25 bp, Probe Sequence
gctgcgtcctagctagaggaatggc

SEQ ID NO: 209529 - DNA, 25 bp, Probe Sequence
gctcccattaggagcaggaatggca

SEQ ID NO: 209530 - DNA, 25 bp, Probe Sequence
gctgcctcatatccgggggaatgtg

SEQ ID NO: 209531 - DNA, 25 bp, Probe Sequence
gctccactatggtgggctcactggc

SEQ ID NO: 209532 - DNA, 25 bp, Probe Sequence
gctctactcagccatggggtacggc

SEQ ID NO: 209533 - DNA, 25 bp, Probe Sequence
gcttggtcacttcgtggctaaggta

SEQ ID NO: 209534 - DNA, 25 bp, Probe Sequence
gctcggtccttccgaggaagctaag

SEQ ID NO: 209535 - DNA, 25 bp, Probe Sequence
gctgcagggccactggaaggaacat

SEQ ID NO: 209536 - DNA, 25 bp, Probe Sequence
gctgcaggcggacgaacatctgacc

SEQ ID NO: 209537 - DNA, 25 bp, Probe Sequence
gctcgtgctgtgcgaggatctcact

SEQ ID NO: 209538 - DNA, 25 bp, Probe Sequence
gctctgcatggtgacatggaccaga

SEQ ID NO: 209539 - DNA, 25 bp, Probe Sequence
gctgctcaggcagtttggactacag

SEQ ID NO: 209540 - DNA, 25 bp, Probe Sequence
gctccagagccattggtacaaatgc

SEQ ID NO: 209541 - DNA, 25 bp, Probe Sequence
gctccagaaagctagtatcatgcca

SEQ ID NO: 209542 - DNA, 25 bp, Probe Sequence
gctgcaccaaagtagttcacggtat

SEQ ID NO: 209543 - DNA, 25 bp, Probe Sequence
gctgcccgaatgttgttgcacaggt

SEQ ID NO: 209544 - DNA, 25 bp, Probe Sequence
gctgcaccggcacattatgatggag

SEQ ID NO: 209545 - DNA, 25 bp, Probe Sequence
gctgcccagctacgatctatatgct

SEQ ID NO: 209546 - DNA, 25 bp, Probe Sequence
gctgcagctctgacacaacataatg

SEQ ID NO: 209547 - DNA, 25 bp, Probe Sequence
gctgcatctggagcagcccaagcct

SEQ ID NO: 209548 - DNA, 25 bp, Probe Sequence
gctgaagctgcagcacatccaggcc

SEQ ID NO: 209549 - DNA, 25 bp, Probe Sequence
gctgaagctgcagcacatccaggcc

SEQ ID NO: 209550 - DNA, 25 bp, Probe Sequence
gctgaagctgagccaggcgcacagc

SEQ ID NO: 209551 - DNA, 25 bp, Probe Sequence
gctgaagtgtgcaggctcacaccaa

SEQ ID NO: 209552 - DNA, 25 bp, Probe Sequence
gctgcatgagtacctggtcaaccac

SEQ ID NO: 209553 - DNA, 25 bp, Probe Sequence
gctgcagttcagccgttgaacacat

SEQ ID NO: 209554 - DNA, 25 bp, Probe Sequence
gctgcagtaagccagattactccac

SEQ ID NO: 209555 - DNA, 25 bp, Probe Sequence
gctgagctgacccaggagatgtccc

SEQ ID NO: 209556 - DNA, 25 bp, Probe Sequence
gctgagaacctgggaattcctgcac

SEQ ID NO: 209557 - DNA, 25 bp, Probe Sequence
gctagactccctggagtattcgccc

SEQ ID NO: 209558 - DNA, 25 bp, Probe Sequence
gctgaaggccctgagattggcgccc

SEQ ID NO: 209559 - DNA, 25 bp, Probe Sequence
gctgaagaccaaccacattggccac

SEQ ID NO: 209560 - DNA, 25 bp, Probe Sequence
gctctctgatcctagaaattaccac

SEQ ID NO: 209561 - DNA, 25 bp, Probe Sequence
gctgctattttatattatgactgct

SEQ ID NO: 209562 - DNA, 25 bp, Probe Sequence
gctgctattttatattatgactgct

SEQ ID NO: 209563 - DNA, 25 bp, Probe Sequence
gctgactttgtatctaagacctgcc

SEQ ID NO: 209564 - DNA, 25 bp, Probe Sequence
gctgactttgtatctaagacctgcc

SEQ ID NO: 209565 - DNA, 25 bp, Probe Sequence
gctgccttatattcctacattccag

SEQ ID NO: 209566 - DNA, 25 bp, Probe Sequence
gctgcctcattttcacagcactact

SEQ ID NO: 209567 - DNA, 25 bp, Probe Sequence
gctgctgcacagactatacggctga

SEQ ID NO: 209568 - DNA, 25 bp, Probe Sequence
gctgcatcacatacaacattgttgt

SEQ ID NO: 209569 - DNA, 25 bp, Probe Sequence
gctgagcacatgacagggagcctgg

SEQ ID NO: 209570 - DNA, 25 bp, Probe Sequence
gctgagcacagcatgaggccagggc

SEQ ID NO: 209571 - DNA, 25 bp, Probe Sequence
gctgacatagtggatggacagatgg

SEQ ID NO: 209572 - DNA, 25 bp, Probe Sequence
gctgaaagtggtggggcagggccgc

SEQ ID NO: 209573 - DNA, 25 bp, Probe Sequence
gctcaaggtgggagccgtggtcctc

SEQ ID NO: 209574 - DNA, 25 bp, Probe Sequence
gctcgaagtttaatcgttggtccca

SEQ ID NO: 209575 - DNA, 25 bp, Probe Sequence
tttgacgtatatgacgcctttcccc

SEQ ID NO: 209576 - DNA, 25 bp, Probe Sequence
gctaaattatatgaacctttcccca

SEQ ID NO: 209577 - DNA, 25 bp, Probe Sequence
gctgaaatattaagaacacttctac

SEQ ID NO: 209578 - DNA, 25 bp, Probe Sequence
gctgaaaacataacccactctgtcc

SEQ ID NO: 209579 - DNA, 25 bp, Probe Sequence
gctgaaagtaaacactcatttctgc

SEQ ID NO: 209580 - DNA, 25 bp, Probe Sequence
gctgacagatgggaacaatcttttt

SEQ ID NO: 209581 - DNA, 25 bp, Probe Sequence
gctgacaatcaattcacatttttta

SEQ ID NO: 209582 - DNA, 25 bp, Probe Sequence
gctgacatatctgatcatctctttc

SEQ ID NO: 209583 - DNA, 25 bp, Probe Sequence
gctgaaatgcagatgaccacattca

SEQ ID NO: 209584 - DNA, 25 bp, Probe Sequence
gctgccagatggatacgaattcaag

SEQ ID NO: 209585 - DNA, 25 bp, Probe Sequence
gctgccgtgaggacctgaactcacc

SEQ ID NO: 209586 - DNA, 25 bp, Probe Sequence
gctccggtgagtctggagtccggtc

SEQ ID NO: 209587 - DNA, 25 bp, Probe Sequence
gctgcccattaacaggggcacagag

SEQ ID NO: 209588 - DNA, 25 bp, Probe Sequence
gctgcctcaacactgaaggttgaca

SEQ ID NO: 209589 - DNA, 25 bp, Probe Sequence
gctgcttggaagcctggacgtgaca

SEQ ID NO: 209590 - DNA, 25 bp, Probe Sequence
gctgctcttggggttgaagtcacat

SEQ ID NO: 209591 - DNA, 25 bp, Probe Sequence
gctgctttggacaactgacaatatg

SEQ ID NO: 209592 - DNA, 25 bp, Probe Sequence
gctgctaccacatgacagacacaag

SEQ ID NO: 209593 - DNA, 25 bp, Probe Sequence
gctgcaacatcaactggcatacaca

SEQ ID NO: 209594 - DNA, 25 bp, Probe Sequence
gctgcatcactgtcctggaaatcac

SEQ ID NO: 209595 - DNA, 25 bp, Probe Sequence
gctgctgcacaaggtggacaaggca

SEQ ID NO: 209596 - DNA, 25 bp, Probe Sequence
gctgctcaacaggatggccatcaaa

SEQ ID NO: 209597 - DNA, 25 bp, Probe Sequence
gctgctgccagagcaagctcacatc

SEQ ID NO: 209598 - DNA, 25 bp, Probe Sequence
gctgcatccaaggaactagcttcta

SEQ ID NO: 209599 - DNA, 25 bp, Probe Sequence
gctgctaatgatgctggctacttta

SEQ ID NO: 209600 - DNA, 25 bp, Probe Sequence
gctgctaatcagatgcgcaacttcc

SEQ ID NO: 209601 - DNA, 25 bp, Probe Sequence
gctgctaacagcattgcctgtgctc

SEQ ID NO: 209602 - DNA, 25 bp, Probe Sequence
gctctggacagaagtcaatgccttg

SEQ ID NO: 209603 - DNA, 25 bp, Probe Sequence
gcatcgtaacaagatttgcttggac

SEQ ID NO: 209604 - DNA, 25 bp, Probe Sequence
gctctgtaaagggtcttcctgaaga

SEQ ID NO: 209605 - DNA, 25 bp, Probe Sequence
gctctgcgaagtccagcaagtattg

SEQ ID NO: 209606 - DNA, 25 bp, Probe Sequence
gctgccattagtaaggatttcgtga

SEQ ID NO: 209607 - DNA, 25 bp, Probe Sequence
gctgcacctatgattggttatccaa

SEQ ID NO: 209608 - DNA, 25 bp, Probe Sequence
gctgccacctgtttttgctagaaac

SEQ ID NO: 209609 - DNA, 25 bp, Probe Sequence
gctgcaagaacttttccagataaaa

SEQ ID NO: 209610 - DNA, 25 bp, Probe Sequence
gctgcagaagtttgttccaaacaag

SEQ ID NO: 209611 - DNA, 25 bp, Probe Sequence
gctgctgaagttatggaaacatcaa

SEQ ID NO: 209612 - DNA, 25 bp, Probe Sequence
gctccaatggcaagtggtaccacac

SEQ ID NO: 209613 - DNA, 25 bp, Probe Sequence
gctccctgatctatgaagactccat

SEQ ID NO: 209614 - DNA, 25 bp, Probe Sequence
gctccctgatctatgaagactccat

SEQ ID NO: 209615 - DNA, 25 bp, Probe Sequence
gctgacttgtctttgcaatatttct

SEQ ID NO: 209616 - DNA, 25 bp, Probe Sequence
gctgaattgtgtcctatagttacat

SEQ ID NO: 209617 - DNA, 25 bp, Probe Sequence
gctgaacggcgtgcattatcaacat

SEQ ID NO: 209618 - DNA, 25 bp, Probe Sequence
gctttggccttgacaacatcaacat

SEQ ID NO: 209619 - DNA, 25 bp, Probe Sequence
gctgacttccttgctacagcaagct

SEQ ID NO: 209620 - DNA, 25 bp, Probe Sequence
gctgaatctcctgcaaaactggctg

SEQ ID NO: 209621 - DNA, 25 bp, Probe Sequence
gctgactccaccgaagaggtgcgcc

SEQ ID NO: 209622 - DNA, 25 bp, Probe Sequence
gctgactccaccgaagaggtgcgcc

SEQ ID NO: 209623 - DNA, 25 bp, Probe Sequence
gctgcacctacggaacgagtatgcc

SEQ ID NO: 209624 - DNA, 25 bp, Probe Sequence
gctgaagaactgaaactggccaccc

SEQ ID NO: 209625 - DNA, 25 bp, Probe Sequence
gctgaaggcagtaagctcggctcac

SEQ ID NO: 209626 - DNA, 25 bp, Probe Sequence
gctgaaatgcaggaagtggtggcaa

SEQ ID NO: 209627 - DNA, 25 bp, Probe Sequence
gctgaatatactgtgtggtggagag

SEQ ID NO: 209628 - DNA, 25 bp, Probe Sequence
gctgaaatccaacttgagctggctg

SEQ ID NO: 209629 - DNA, 25 bp, Probe Sequence
gctgaattccaaccatgagttgcct

SEQ ID NO: 209630 - DNA, 25 bp, Probe Sequence
gctgaagcccaacgcaggtagcgac

SEQ ID NO: 209631 - DNA, 25 bp, Probe Sequence
gctgaagccccacagctgtgggctg

SEQ ID NO: 209632 - DNA, 25 bp, Probe Sequence
gctgaagtaccaccactgtgtgggt

SEQ ID NO: 209633 - DNA, 25 bp, Probe Sequence
gctgaagtaccaccactgtgtgggt

SEQ ID NO: 209634 - DNA, 25 bp, Probe Sequence
gctgaaaaccaacctatgcaggctg

SEQ ID NO: 209635 - DNA, 25 bp, Probe Sequence
gctgaaaaccacctggtctgcatgt

SEQ ID NO: 209636 - DNA, 25 bp, Probe Sequence
gctgaaaaatgacttggtctgattt

SEQ ID NO: 209637 - DNA, 25 bp, Probe Sequence
gctgcaataaaacttggccgatatg

SEQ ID NO: 209638 - DNA, 25 bp, Probe Sequence
gctgaaccaagatttctgccagaat

SEQ ID NO: 209639 - DNA, 25 bp, Probe Sequence
gctgaaacacagtagtcttatgaaa

SEQ ID NO: 209640 - DNA, 25 bp, Probe Sequence
gctgaatacaagtctttatatagag

SEQ ID NO: 209641 - DNA, 25 bp, Probe Sequence
gctgcatacgccactttgtgattga

SEQ ID NO: 209642 - DNA, 25 bp, Probe Sequence
gctgctactagctctttgagataat

SEQ ID NO: 209643 - DNA, 25 bp, Probe Sequence
gctgctgttgagtgtttggagttct

SEQ ID NO: 209644 - DNA, 25 bp, Probe Sequence
gctgctttcagatgtttatctttta

SEQ ID NO: 209645 - DNA, 25 bp, Probe Sequence
gctgcttgtcagtttgttcgtctgt

SEQ ID NO: 209646 - DNA, 25 bp, Probe Sequence
gctcctgacagttctgatttcctgt

SEQ ID NO: 209647 - DNA, 25 bp, Probe Sequence
gctgcggacagagctactaccgcgc

SEQ ID NO: 209648 - DNA, 25 bp, Probe Sequence
gctgcatgcgagtgctgtactaccg

SEQ ID NO: 209649 - DNA, 25 bp, Probe Sequence
gctcctgagttcactgctactcagc

SEQ ID NO: 209650 - DNA, 25 bp, Probe Sequence
gctcctgagttcactgctactcagc

SEQ ID NO: 209651 - DNA, 25 bp, Probe Sequence
gctcctgagttcactgctactcagc

SEQ ID NO: 209652 - DNA, 25 bp, Probe Sequence
gctgccctcttaagagcttgctgac

SEQ ID NO: 209653 - DNA, 25 bp, Probe Sequence
gctgccaccttatgcagtgcatcga

SEQ ID NO: 209654 - DNA, 25 bp, Probe Sequence
gctgcttcctgagacagatgctcaa

SEQ ID NO: 209655 - DNA, 25 bp, Probe Sequence
gctgcatgtccgcaaatggctgcaa

SEQ ID NO: 209656 - DNA, 25 bp, Probe Sequence
gctgcagaccgtcaatggagcagag

SEQ ID NO: 209657 - DNA, 25 bp, Probe Sequence
gctgcagaccagaaaggggcgcgag

SEQ ID NO: 209658 - DNA, 25 bp, Probe Sequence
gctgaagcacattattggggctgag

SEQ ID NO: 209659 - DNA, 25 bp, Probe Sequence
gctgcaatgccttaacgagagccgc

SEQ ID NO: 209660 - DNA, 25 bp, Probe Sequence
gctgcaggctttcagctgagcagcc

SEQ ID NO: 209661 - DNA, 25 bp, Probe Sequence
gctgcatgacctaccaggacagaac

SEQ ID NO: 209662 - DNA, 25 bp, Probe Sequence
gctgcatgacactggaggtcaaccg

SEQ ID NO: 209663 - DNA, 25 bp, Probe Sequence
gctctgaatttggcaagctcaagtc

SEQ ID NO: 209664 - DNA, 25 bp, Probe Sequence
gctcatgaatttggccatgccctgg

SEQ ID NO: 209665 - DNA, 25 bp, Probe Sequence
gctctggagttctacacacctgagg

SEQ ID NO: 209666 - DNA, 25 bp, Probe Sequence
gctgctgcgtgtgaaacgcctagag

SEQ ID NO: 209667 - DNA, 25 bp, Probe Sequence
gctgcgtatgtgaaagtccctagaa

SEQ ID NO: 209668 - DNA, 25 bp, Probe Sequence
gctgaaaatgaaactggcacatgag

SEQ ID NO: 209669 - DNA, 25 bp, Probe Sequence
gctgaatatatgaccacgctcaccc

SEQ ID NO: 209670 - DNA, 25 bp, Probe Sequence
gctgaatgaagcccagcctagcacc

SEQ ID NO: 209671 - DNA, 25 bp, Probe Sequence
gctgaatgaagcccagcctagcacc

SEQ ID NO: 209672 - DNA, 25 bp, Probe Sequence
gctgcaatgaagccctgatgaagct

SEQ ID NO: 209673 - DNA, 25 bp, Probe Sequence
gctgcttggagttcagtgagagctg

SEQ ID NO: 209674 - DNA, 25 bp, Probe Sequence
gctctgtagcagacacggaagagtc

SEQ ID NO: 209675 - DNA, 25 bp, Probe Sequence
gctgctttgctgttcgtgatatgag

SEQ ID NO: 209676 - DNA, 25 bp, Probe Sequence
gctgctcatcagtgcctggtataat

SEQ ID NO: 209677 - DNA, 25 bp, Probe Sequence
gctgcatgatcaacctcatggataa

SEQ ID NO: 209678 - DNA, 25 bp, Probe Sequence
gctgctgagcaccctgatgaagtgg

SEQ ID NO: 209679 - DNA, 25 bp, Probe Sequence
gctgctgatgaagatgatgacgatg

SEQ ID NO: 209680 - DNA, 25 bp, Probe Sequence
gctgcgcagcgggaatgagcgggga

SEQ ID NO: 209681 - DNA, 25 bp, Probe Sequence
gctgctcaggagccaacaggaaata

SEQ ID NO: 209682 - DNA, 25 bp, Probe Sequence
gctgctcaggaggaactggacggag

SEQ ID NO: 209683 - DNA, 25 bp, Probe Sequence
gctgctgctgaagggacttgtaggg

SEQ ID NO: 209684 - DNA, 25 bp, Probe Sequence
gctgcggaaggtgctggtgatgctg

SEQ ID NO: 209685 - DNA, 25 bp, Probe Sequence
gctccagatcagatcgatgggattg

SEQ ID NO: 209686 - DNA, 25 bp, Probe Sequence
gctgccgatcagagctgtgagttaa

SEQ ID NO: 209687 - DNA, 25 bp, Probe Sequence
gctgccagacatacgctggagccag

SEQ ID NO: 209688 - DNA, 25 bp, Probe Sequence
gctgcctactgtcctgtgaagagcc

SEQ ID NO: 209689 - DNA, 25 bp, Probe Sequence
gctgctatcttgcggtagcacaggc

SEQ ID NO: 209690 - DNA, 25 bp, Probe Sequence
gctctgctcattcggctaagtaggc

SEQ ID NO: 209691 - DNA, 25 bp, Probe Sequence
gctgctgtcatcaaggctcgaaaac

SEQ ID NO: 209692 - DNA, 25 bp, Probe Sequence
gctcttcattacttttgaaacagtc

SEQ ID NO: 209693 - DNA, 25 bp, Probe Sequence
gctctcctttctgatctaaaaactc

SEQ ID NO: 209694 - DNA, 25 bp, Probe Sequence
gctcccgtttcaatgtccaataaat

SEQ ID NO: 209695 - DNA, 25 bp, Probe Sequence
gctcctttggatgcagtcctttaat

SEQ ID NO: 209696 - DNA, 25 bp, Probe Sequence
gctccttggagacacatcactatgt

SEQ ID NO: 209697 - DNA, 25 bp, Probe Sequence
gctgccgggaatctagacttggatc

SEQ ID NO: 209698 - DNA, 25 bp, Probe Sequence
gctgctgggaaatgtggacctggat

SEQ ID NO: 209699 - DNA, 25 bp, Probe Sequence
gctgctttgaaagagaacctagatt

SEQ ID NO: 209700 - DNA, 25 bp, Probe Sequence
gctgcttttacagggaagcttattc

SEQ ID NO: 209701 - DNA, 25 bp, Probe Sequence
gctcctttgggggaatgtttggcaa

SEQ ID NO: 209702 - DNA, 25 bp, Probe Sequence
gctcctttgggacccagatcatcgg

SEQ ID NO: 209703 - DNA, 25 bp, Probe Sequence
gctccagaagggtgcccagtcaggc

SEQ ID NO: 209704 - DNA, 25 bp, Probe Sequence
gctccagggtggggccatcaggagc

SEQ ID NO: 209705 - DNA, 25 bp, Probe Sequence
gctgccaggggggacctagagcaac

SEQ ID NO: 209706 - DNA, 25 bp, Probe Sequence
gctgccaagggtggacacggctgca

SEQ ID NO: 209707 - DNA, 25 bp, Probe Sequence
gctgcccagggcagatgcaggggag

SEQ ID NO: 209708 - DNA, 25 bp, Probe Sequence
gctcggctggacaagcaaggcaaag

SEQ ID NO: 209709 - DNA, 25 bp, Probe Sequence
gctgctgtgctgtggagaaagaaga

SEQ ID NO: 209710 - DNA, 25 bp, Probe Sequence
gctgcgtctactgcgagaatgaaga

SEQ ID NO: 209711 - DNA, 25 bp, Probe Sequence
gctgcctccatttctgggaaagacc

SEQ ID NO: 209712 - DNA, 25 bp, Probe Sequence
gctgcctcgatttgtgcgtgtgaac

SEQ ID NO: 209713 - DNA, 25 bp, Probe Sequence
gctgcctcgatttgtgcgtgtgaac

SEQ ID NO: 209714 - DNA, 25 bp, Probe Sequence
gctgcctcgatttgtgcgtgtgaac

SEQ ID NO: 209715 - DNA, 25 bp, Probe Sequence
gctgctccacatttgtagcgaacac

SEQ ID NO: 209716 - DNA, 25 bp, Probe Sequence
gctgcagccactttgtgagtgagaa

SEQ ID NO: 209717 - DNA, 25 bp, Probe Sequence
gctgcagccaagtctgtgagtgaag

SEQ ID NO: 209718 - DNA, 25 bp, Probe Sequence
gctgcacaagagccttgattgaaga

SEQ ID NO: 209719 - DNA, 25 bp, Probe Sequence
gctgcagcggcgcctagaagacgag

SEQ ID NO: 209720 - DNA, 25 bp, Probe Sequence
gctgccctgctcctgaggaggagat

SEQ ID NO: 209721 - DNA, 25 bp, Probe Sequence
gctgctcctgttcgacacagtggag

SEQ ID NO: 209722 - DNA, 25 bp, Probe Sequence
gctgctcctggctagatcacaggac

SEQ ID NO: 209723 - DNA, 25 bp, Probe Sequence
gctgctcaggagtcatgcttaggat

SEQ ID NO: 209724 - DNA, 25 bp, Probe Sequence
gctgcacagagacggctgatagaga

SEQ ID NO: 209725 - DNA, 25 bp, Probe Sequence
gctgcagaggttactgaagagcaat

SEQ ID NO: 209726 - DNA, 25 bp, Probe Sequence
gctgcaatgggctctgagctggaga

SEQ ID NO: 209727 - DNA, 25 bp, Probe Sequence
gctgcaatctcagtgcctgagggaa

SEQ ID NO: 209728 - DNA, 25 bp, Probe Sequence
gctgcattatcagcactggggcagt

SEQ ID NO: 209729 - DNA, 25 bp, Probe Sequence
gctgctttcccaggagggtgaagat

SEQ ID NO: 209730 - DNA, 25 bp, Probe Sequence
gctccaagttcaaggaggtcaagaa

SEQ ID NO: 209731 - DNA, 25 bp, Probe Sequence
gctccacaggcctacgtgagtgaaa

SEQ ID NO: 209732 - DNA, 25 bp, Probe Sequence
gctgccaaagccaactgatgtttta

SEQ ID NO: 209733 - DNA, 25 bp, Probe Sequence
gctgccaagtactacgatgccattg

SEQ ID NO: 209734 - DNA, 25 bp, Probe Sequence
gctctgcatagtttactgaaacgag

SEQ ID NO: 209735 - DNA, 25 bp, Probe Sequence
gctgctgcagaggttactgaagagc

SEQ ID NO: 209736 - DNA, 25 bp, Probe Sequence
gctgctgaaggattacaagagatac

SEQ ID NO: 209737 - DNA, 25 bp, Probe Sequence
gctgctgcgggaagcccgagtactg

SEQ ID NO: 209738 - DNA, 25 bp, Probe Sequence
gctcgggatgccttccgagttttct

SEQ ID NO: 209739 - DNA, 25 bp, Probe Sequence
gctgcggagaacagcctagtggctt

SEQ ID NO: 209740 - DNA, 25 bp, Probe Sequence
gctgcttggggcttggcatagggtg

SEQ ID NO: 209741 - DNA, 25 bp, Probe Sequence
gctgctaagcccttggcaggggtgg

SEQ ID NO: 209742 - DNA, 25 bp, Probe Sequence
gctgctgaagcgcgaggagcgggcg

SEQ ID NO: 209743 - DNA, 25 bp, Probe Sequence
gctgctcagggccggtgagcgcagc

SEQ ID NO: 209744 - DNA, 25 bp, Probe Sequence
gctgcaggcgggggtgatcagctgg

SEQ ID NO: 209745 - DNA, 25 bp, Probe Sequence
gctgcaggcgggggtgatcagctgg

SEQ ID NO: 209746 - DNA, 25 bp, Probe Sequence
gctgcaccagcgcgtggagcagctc

SEQ ID NO: 209747 - DNA, 25 bp, Probe Sequence
gctgcaccacactggagaactacaa

SEQ ID NO: 209748 - DNA, 25 bp, Probe Sequence
gctgcaccacactggagaactacaa

SEQ ID NO: 209749 - DNA, 25 bp, Probe Sequence
gctgcacccatctgcggatggtact

SEQ ID NO: 209750 - DNA, 25 bp, Probe Sequence
gctgccccacaacgtgcaggagatc

SEQ ID NO: 209751 - DNA, 25 bp, Probe Sequence
gctgccagcctctacttgtagagtc

SEQ ID NO: 209752 - DNA, 25 bp, Probe Sequence
gctccagagccatctctgagactcc

SEQ ID NO: 209753 - DNA, 25 bp, Probe Sequence
gctgcacgtggatcctgagaacttc

SEQ ID NO: 209754 - DNA, 25 bp, Probe Sequence
gctgcacgtggatcctgagaacttc

SEQ ID NO: 209755 - DNA, 25 bp, Probe Sequence
gctctcagtaaacctgaacacttgg

SEQ ID NO: 209756 - DNA, 25 bp, Probe Sequence
gctcctctagttagctgaaactggg

SEQ ID NO: 209757 - DNA, 25 bp, Probe Sequence
gctgcgtgttgatttggaggcactg

SEQ ID NO: 209758 - DNA, 25 bp, Probe Sequence
gctgcagtgagttatgatcgcacca

SEQ ID NO: 209759 - DNA, 25 bp, Probe Sequence
gctgcagtgagctatgatcacgccg

SEQ ID NO: 209760 - DNA, 25 bp, Probe Sequence
gctgcacatggacgacagccactgc

SEQ ID NO: 209761 - DNA, 25 bp, Probe Sequence
gctgcactgtgacaagctgcacgtg

SEQ ID NO: 209762 - DNA, 25 bp, Probe Sequence
gctgcacggagttgagctcatcatc

SEQ ID NO: 209763 - DNA, 25 bp, Probe Sequence
gctgcgcaaagttgatgcctacgga

SEQ ID NO: 209764 - DNA, 25 bp, Probe Sequence
gctgcagctaagaagctcatcaacg

SEQ ID NO: 209765 - DNA, 25 bp, Probe Sequence
gctgcagtacagaatccacattcag

SEQ ID NO: 209766 - DNA, 25 bp, Probe Sequence
gctgcaggaagaatgccttccagga

SEQ ID NO: 209767 - DNA, 25 bp, Probe Sequence
gctcggcaagttctcccaggagaaa

SEQ ID NO: 209768 - DNA, 25 bp, Probe Sequence
gctcgggagattcagccgtgaagca

SEQ ID NO: 209769 - DNA, 25 bp, Probe Sequence
gctgctgtggttcaaccaggcaaga

SEQ ID NO: 209770 - DNA, 25 bp, Probe Sequence
gctgctttatctataacaggcaaaa

SEQ ID NO: 209771 - DNA, 25 bp, Probe Sequence
gctgctataaatatgggtccacaaa

SEQ ID NO: 209772 - DNA, 25 bp, Probe Sequence
gctctgaagaagcagcgtaccaaaa

SEQ ID NO: 209773 - DNA, 25 bp, Probe Sequence
gctgcaacagaagcaggtgcagcca

SEQ ID NO: 209774 - DNA, 25 bp, Probe Sequence
gctgcccagctgtcaaggtcaggca

SEQ ID NO: 209775 - DNA, 25 bp, Probe Sequence
gctgcccaccgcaagggcagcagca

SEQ ID NO: 209776 - DNA, 25 bp, Probe Sequence
gctgcccacatgcaaggaccagcat

SEQ ID NO: 209777 - DNA, 25 bp, Probe Sequence
gctgctctcacatacagaggccgag

SEQ ID NO: 209778 - DNA, 25 bp, Probe Sequence
gctgccaacatcttcagcattccgt

SEQ ID NO: 209779 - DNA, 25 bp, Probe Sequence
gctgccaacaccaagattggccccc

SEQ ID NO: 209780 - DNA, 25 bp, Probe Sequence
gctgccaacaccaagattggccccc

SEQ ID NO: 209781 - DNA, 25 bp, Probe Sequence
gctgccaacaccaagattggccccc

SEQ ID NO: 209782 - DNA, 25 bp, Probe Sequence
gctgcccaagaaagcattacccgcc

SEQ ID NO: 209783 - DNA, 25 bp, Probe Sequence
gctgcggaacaagcttgtccgcctc

SEQ ID NO: 209784 - DNA, 25 bp, Probe Sequence
gctgcaggtcagcaactgtgtcgtg

SEQ ID NO: 209785 - DNA, 25 bp, Probe Sequence
gctgcgcgtcgccaaagtgacaggc

SEQ ID NO: 209786 - DNA, 25 bp, Probe Sequence
gctgcttgtccaaatcaggatccac

SEQ ID NO: 209787 - DNA, 25 bp, Probe Sequence
gctcttctggactcaggatcgcaga

SEQ ID NO: 209788 - DNA, 25 bp, Probe Sequence
gctgctctgaggtaaaggtccatga

SEQ ID NO: 209789 - DNA, 25 bp, Probe Sequence
gctgcactggtggaagaagcgatct

SEQ ID NO: 209790 - DNA, 25 bp, Probe Sequence
gctgcactggcaagaaaatggaccc

SEQ ID NO: 209791 - DNA, 25 bp, Probe Sequence
gctgcaagtaagtatgaaggaggct

SEQ ID NO: 209792 - DNA, 25 bp, Probe Sequence
gctgcagtataaaagagcaaagagc

SEQ ID NO: 209793 - DNA, 25 bp, Probe Sequence
gctgcgtgtgaaacgcctagagacc

SEQ ID NO: 209794 - DNA, 25 bp, Probe Sequence
gctgctttacaactgcccagaaaag

SEQ ID NO: 209795 - DNA, 25 bp, Probe Sequence
gctgccttagactctccaatgaatg

SEQ ID NO: 209796 - DNA, 25 bp, Probe Sequence
gctgctttgtgtcacctcagtgact

SEQ ID NO: 209797 - DNA, 25 bp, Probe Sequence
gctgctgtttgcaaattccaggctt

SEQ ID NO: 209798 - DNA, 25 bp, Probe Sequence
gctgctgtttcaaagatggacctct

SEQ ID NO: 209799 - DNA, 25 bp, Probe Sequence
gctgctgtgtgtggactgaacacct

SEQ ID NO: 209800 - DNA, 25 bp, Probe Sequence
gctgctgtggttccaaatccattag

SEQ ID NO: 209801 - DNA, 25 bp, Probe Sequence
gctgcattgagacttgaaacctttg

SEQ ID NO: 209802 - DNA, 25 bp, Probe Sequence
gctgcattcatggttagaagctttc

SEQ ID NO: 209803 - DNA, 25 bp, Probe Sequence
gctgcaggtggcagacaacttctcc

SEQ ID NO: 209804 - DNA, 25 bp, Probe Sequence
gctcgggaggcgaagcgttgtcctc

SEQ ID NO: 209805 - DNA, 25 bp, Probe Sequence
gctctgggggaatggtgtcatccac

SEQ ID NO: 209806 - DNA, 25 bp, Probe Sequence
gctgctttgggcaggtggagcaccc

SEQ ID NO: 209807 - DNA, 25 bp, Probe Sequence
gctcatttcggacggatggatccct

SEQ ID NO: 209808 - DNA, 25 bp, Probe Sequence
gctgcattggcggaggtgtggacct

SEQ ID NO: 209809 - DNA, 25 bp, Probe Sequence
gctgcagctgatgggggatcgcaat

SEQ ID NO: 209810 - DNA, 25 bp, Probe Sequence
gctgcctgagaggggacatatgcat

SEQ ID NO: 209811 - DNA, 25 bp, Probe Sequence
gctgctatgaagcccgacttcaatg

SEQ ID NO: 209812 - DNA, 25 bp, Probe Sequence
gctctggatacaccgaatgaccagg

SEQ ID NO: 209813 - DNA, 25 bp, Probe Sequence
gctgctggtggatcagatatacgag

SEQ ID NO: 209814 - DNA, 25 bp, Probe Sequence
gctctacgcggtggactacgagacc

SEQ ID NO: 209815 - DNA, 25 bp, Probe Sequence
gctgctcccgttggctttatgagca

SEQ ID NO: 209816 - DNA, 25 bp, Probe Sequence
gctgcacccagagcaactcttgaga

SEQ ID NO: 209817 - DNA, 25 bp, Probe Sequence
gctgcagactcatcctttttaaatg

SEQ ID NO: 209818 - DNA, 25 bp, Probe Sequence
gctgcagatccacactttgtcaaag

SEQ ID NO: 209819 - DNA, 25 bp, Probe Sequence
gctgcattgccaaagtgtcttcata

SEQ ID NO: 209820 - DNA, 25 bp, Probe Sequence
gctgctggagcaaactgtctccgca

SEQ ID NO: 209821 - DNA, 25 bp, Probe Sequence
gctgcatagttgtactgtgcctgtc

SEQ ID NO: 209822 - DNA, 25 bp, Probe Sequence
gctgcatggcaagttctgtggttct

SEQ ID NO: 209823 - DNA, 25 bp, Probe Sequence
gctgcaggagacatcggcgagctgc

SEQ ID NO: 209824 - DNA, 25 bp, Probe Sequence
gctctgggacccagcgattgagggg

SEQ ID NO: 209825 - DNA, 25 bp, Probe Sequence
gctctggttcccaggttccagatgc

SEQ ID NO: 209826 - DNA, 25 bp, Probe Sequence
gctctggattccatttgggtcagcc

SEQ ID NO: 209827 - DNA, 25 bp, Probe Sequence
gctctattctccagttggtcaagcc

SEQ ID NO: 209828 - DNA, 25 bp, Probe Sequence
gctcgtatcgccaagctcgaaaagg

SEQ ID NO: 209829 - DNA, 25 bp, Probe Sequence
gctcgtatcgccaagctcgaaaagg

SEQ ID NO: 209830 - DNA, 25 bp, Probe Sequence
gctccgtgcgccaggaaaacgtgac

SEQ ID NO: 209831 - DNA, 25 bp, Probe Sequence
gctctcttcccctgtaagaggtggc

SEQ ID NO: 209832 - DNA, 25 bp, Probe Sequence
gctgcctagcctgtgggcaaagggc

SEQ ID NO: 209833 - DNA, 25 bp, Probe Sequence
gctccttgctgcgctggaggaagag

SEQ ID NO: 209834 - DNA, 25 bp, Probe Sequence
gctcctagatccttgaagtgtgaac

SEQ ID NO: 209835 - DNA, 25 bp, Probe Sequence
gctcgctgaacctcgaggaactcca

SEQ ID NO: 209836 - DNA, 25 bp, Probe Sequence
gctccgaaggctccagtgtgaatct

SEQ ID NO: 209837 - DNA, 25 bp, Probe Sequence
gctcgaaatgaccgcaaggaaattg

SEQ ID NO: 209838 - DNA, 25 bp, Probe Sequence
gctcaaattatccctaaagaatcgg

SEQ ID NO: 209839 - DNA, 25 bp, Probe Sequence
gctaaacttcctggtgggaatgtgg

SEQ ID NO: 209840 - DNA, 25 bp, Probe Sequence
gctcctcacttcctagatgggatgg

SEQ ID NO: 209841 - DNA, 25 bp, Probe Sequence
gctcccatgcttcttacacagagag

SEQ ID NO: 209842 - DNA, 25 bp, Probe Sequence
gctccccatttttataccaaaggtg

SEQ ID NO: 209843 - DNA, 25 bp, Probe Sequence
gctccacctactgtaaccaaatgat

SEQ ID NO: 209844 - DNA, 25 bp, Probe Sequence
gctcccctcagtgtcaactaaggat

SEQ ID NO: 209845 - DNA, 25 bp, Probe Sequence
gcatccccatcatgctgtaactgac

SEQ ID NO: 209846 - DNA, 25 bp, Probe Sequence
gctctgattcactgtgtcaaaggct

SEQ ID NO: 209847 - DNA, 25 bp, Probe Sequence
gctgccttcaccacatattagtgct

SEQ ID NO: 209848 - DNA, 25 bp, Probe Sequence
gctgcctgccccacttgaaggcagg

SEQ ID NO: 209849 - DNA, 25 bp, Probe Sequence
gctgcctgccacttactggaagtga

SEQ ID NO: 209850 - DNA, 25 bp, Probe Sequence
gctcctgcagccttgtgctggagca

SEQ ID NO: 209851 - DNA, 25 bp, Probe Sequence
gctgcccactgctttgatgggcttc

SEQ ID NO: 209852 - DNA, 25 bp, Probe Sequence
gctgcctttcatcctggagatgttc

SEQ ID NO: 209853 - DNA, 25 bp, Probe Sequence
gctcttttacctcatatatcccaga

SEQ ID NO: 209854 - DNA, 25 bp, Probe Sequence
gctcgttttctcccaattacagcaa

SEQ ID NO: 209855 - DNA, 25 bp, Probe Sequence
gctcgttttctcccaattacagcaa

SEQ ID NO: 209856 - DNA, 25 bp, Probe Sequence
gctcctatttctctgattgtaatgt

SEQ ID NO: 209857 - DNA, 25 bp, Probe Sequence
gctcgctactttgatgaactctttc

SEQ ID NO: 209858 - DNA, 25 bp, Probe Sequence
gctccctacgatgagaactggttct

SEQ ID NO: 209859 - DNA, 25 bp, Probe Sequence
gctccctacgatgagaactggttct

SEQ ID NO: 209860 - DNA, 25 bp, Probe Sequence
gctccctactatcagagacttgtcc

SEQ ID NO: 209861 - DNA, 25 bp, Probe Sequence
gctcctccctgataagagttgtcca

SEQ ID NO: 209862 - DNA, 25 bp, Probe Sequence
gctccttactgcacaaagggctcca

SEQ ID NO: 209863 - DNA, 25 bp, Probe Sequence
gctcgtaacattccacgagggcccc

SEQ ID NO: 209864 - DNA, 25 bp, Probe Sequence
gctctggaggctgccatcgagaacc

SEQ ID NO: 209865 - DNA, 25 bp, Probe Sequence
gctcgtgactgcgaccatgcagatg

SEQ ID NO: 209866 - DNA, 25 bp, Probe Sequence
gctgctggcttagcttgactgtttc

SEQ ID NO: 209867 - DNA, 25 bp, Probe Sequence
gctcgagttcctacagagttttcta

SEQ ID NO: 209868 - DNA, 25 bp, Probe Sequence
gctccaggtttgagatggtattgct

SEQ ID NO: 209869 - DNA, 25 bp, Probe Sequence
gctccacagctatcggtggttctgc

SEQ ID NO: 209870 - DNA, 25 bp, Probe Sequence
gctctacctgtggcgttttgtggcc

SEQ ID NO: 209871 - DNA, 25 bp, Probe Sequence
gctgctggccggatgcatttttgag

SEQ ID NO: 209872 - DNA, 25 bp, Probe Sequence
gctctggccagggtgcttttggaaa

SEQ ID NO: 209873 - DNA, 25 bp, Probe Sequence
gctctggctcgagggtggtctgagc

SEQ ID NO: 209874 - DNA, 25 bp, Probe Sequence
gctgctggctggaggggatgcaggg

SEQ ID NO: 209875 - DNA, 25 bp, Probe Sequence
gctgctgagcaggggtgggacatga

SEQ ID NO: 209876 - DNA, 25 bp, Probe Sequence
gctctggtggcactgtgggagacac

SEQ ID NO: 209877 - DNA, 25 bp, Probe Sequence
gctgctgggatggtggtgaatgact

SEQ ID NO: 209878 - DNA, 25 bp, Probe Sequence
gctgctgggatggtggtgaatgact

SEQ ID NO: 209879 - DNA, 25 bp, Probe Sequence
gctgctgggtgctggagaatctggt

SEQ ID NO: 209880 - DNA, 25 bp, Probe Sequence
gctgctgggtgctggagaatctggt

SEQ ID NO: 209881 - DNA, 25 bp, Probe Sequence
gctgctggtgtgggtgacatggtga

SEQ ID NO: 209882 - DNA, 25 bp, Probe Sequence
gctcgatgtgtgtttgacatggctg

SEQ ID NO: 209883 - DNA, 25 bp, Probe Sequence
gctgcagtgtttcgggcatgggcaa

SEQ ID NO: 209884 - DNA, 25 bp, Probe Sequence
gctgcgcagatttgcagggttgaga

SEQ ID NO: 209885 - DNA, 25 bp, Probe Sequence
gctgcctgatgttcagtacttcaaa

SEQ ID NO: 209886 - DNA, 25 bp, Probe Sequence
gctgccgtgtaagagtggaactgtc

SEQ ID NO: 209887 - DNA, 25 bp, Probe Sequence
gctcctggctagatcacaggaccct

SEQ ID NO: 209888 - DNA, 25 bp, Probe Sequence
gctgcctgcagtggttccatgaggc

SEQ ID NO: 209889 - DNA, 25 bp, Probe Sequence
gctgcctatatctacatccgagggg

SEQ ID NO: 209890 - DNA, 25 bp, Probe Sequence
gctgccgtatctacatgtggatggg

SEQ ID NO: 209891 - DNA, 25 bp, Probe Sequence
gctgcatcgtgttgtattgggatgg

SEQ ID NO: 209892 - DNA, 25 bp, Probe Sequence
gctgccggatgacattgaggacgag

SEQ ID NO: 209893 - DNA, 25 bp, Probe Sequence
gctcccgatgaagttgcgtgggatt

SEQ ID NO: 209894 - DNA, 25 bp, Probe Sequence
gctcaacgtgacggtggtgacgtcc

SEQ ID NO: 209895 - DNA, 25 bp, Probe Sequence
gctcgggctgacgggtgctagagct

SEQ ID NO: 209896 - DNA, 25 bp, Probe Sequence
gctgcggggaagggtcctgagcagg

SEQ ID NO: 209897 - DNA, 25 bp, Probe Sequence
gctgccgtggaatggtttgatggga

SEQ ID NO: 209898 - DNA, 25 bp, Probe Sequence
gcttcacaggaagggttggtgtaaa

SEQ ID NO: 209899 - DNA, 25 bp, Probe Sequence
gctctggagtaaatggttggctcta

SEQ ID NO: 209900 - DNA, 25 bp, Probe Sequence
gctcgtgtttcaaggtttgttactt

SEQ ID NO: 209901 - DNA, 25 bp, Probe Sequence
gctcctgcattgtcttggtttgatt

SEQ ID NO: 209902 - DNA, 25 bp, Probe Sequence
gctctgtgcagtacctggttgagtg

SEQ ID NO: 209903 - DNA, 25 bp, Probe Sequence
gctgcattgactaccagatttattt

SEQ ID NO: 209904 - DNA, 25 bp, Probe Sequence
gctgctttctgaccaaatgtttttc

SEQ ID NO: 209905 - DNA, 25 bp, Probe Sequence
gctctttcacagaacttggttttca

SEQ ID NO: 209906 - DNA, 25 bp, Probe Sequence
gcttttcccaatgctaatttccaaa

SEQ ID NO: 209907 - DNA, 25 bp, Probe Sequence
gctccattcctagtcttaattacca

SEQ ID NO: 209908 - DNA, 25 bp, Probe Sequence
gcatcctacctgggtttttatccac

SEQ ID NO: 209909 - DNA, 25 bp, Probe Sequence
gctccagacctaggttttttctctt

SEQ ID NO: 209910 - DNA, 25 bp, Probe Sequence
gctcaccacttagcctgttttttta

SEQ ID NO: 209911 - DNA, 25 bp, Probe Sequence
gctccaagagtagctttttttcatc

SEQ ID NO: 209912 - DNA, 25 bp, Probe Sequence
gctccaagggaatgtctttctcaat

SEQ ID NO: 209913 - DNA, 25 bp, Probe Sequence
gctccaagcggaccggtggttcaaa

SEQ ID NO: 209914 - DNA, 25 bp, Probe Sequence
gctcccaagacattcacgtggttca

SEQ ID NO: 209915 - DNA, 25 bp, Probe Sequence
gctgccagaaacgaacctctttgaa

SEQ ID NO: 209916 - DNA, 25 bp, Probe Sequence
gctccacaacccaagcaacatttgt

SEQ ID NO: 209917 - DNA, 25 bp, Probe Sequence
gctcagcttaacctcacaacttaag

SEQ ID NO: 209918 - DNA, 25 bp, Probe Sequence
gctgctgctgtcacaacatgaactg

SEQ ID NO: 209919 - DNA, 25 bp, Probe Sequence
gctgctagccaggaacatggactga

SEQ ID NO: 209920 - DNA, 25 bp, Probe Sequence
gctgcttccaggtatctacactgtt

SEQ ID NO: 209921 - DNA, 25 bp, Probe Sequence
gctgctgtgcaagacattagccctt

SEQ ID NO: 209922 - DNA, 25 bp, Probe Sequence
gctgctgtgcagagtataagatttt

SEQ ID NO: 209923 - DNA, 25 bp, Probe Sequence
gctctgatgccttgaattggttttg

SEQ ID NO: 209924 - DNA, 25 bp, Probe Sequence
gctctctcctaacttagtaatgatg

SEQ ID NO: 209925 - DNA, 25 bp, Probe Sequence
gctcttctctaacttggttaaccat

SEQ ID NO: 209926 - DNA, 25 bp, Probe Sequence
gctcctccgaagaggtttcccagga

SEQ ID NO: 209927 - DNA, 25 bp, Probe Sequence
gctaacacgaaacctgtttactaag

SEQ ID NO: 209928 - DNA, 25 bp, Probe Sequence
gcattaccatgaaaacgttaaagaa

SEQ ID NO: 209929 - DNA, 25 bp, Probe Sequence
gctccccaaaaaggccacaaagaca

SEQ ID NO: 209930 - DNA, 25 bp, Probe Sequence
gctccctaaaaccatgcctaagtac

SEQ ID NO: 209931 - DNA, 25 bp, Probe Sequence
gctctcctaagagccttcatgcaca

SEQ ID NO: 209932 - DNA, 25 bp, Probe Sequence
gctcccaaagagacctttgctcagg

SEQ ID NO: 209933 - DNA, 25 bp, Probe Sequence
gctcccgaaggaactgacttcatgt

SEQ ID NO: 209934 - DNA, 25 bp, Probe Sequence
gctccttgaaggtaggatgctttgc

SEQ ID NO: 209935 - DNA, 25 bp, Probe Sequence
gctccagctaggatgatcgaggttg

SEQ ID NO: 209936 - DNA, 25 bp, Probe Sequence
gctccccagtgattttaggggttca

SEQ ID NO: 209937 - DNA, 25 bp, Probe Sequence
gctatcccaggatgttcggacttgg

SEQ ID NO: 209938 - DNA, 25 bp, Probe Sequence
gctcacccagcagatgttcgatgcc

SEQ ID NO: 209939 - DNA, 25 bp, Probe Sequence
gctcatccgtcagctgaactagacc

SEQ ID NO: 209940 - DNA, 25 bp, Probe Sequence
gctctgtctggagcataacccacag

SEQ ID NO: 209941 - DNA, 25 bp, Probe Sequence
gctctttgcagtggtctaccatcac

SEQ ID NO: 209942 - DNA, 25 bp, Probe Sequence
gctctttgcagtggtctaccatcac

SEQ ID NO: 209943 - DNA, 25 bp, Probe Sequence
gctgctttctgttgtcattgctgtt

SEQ ID NO: 209944 - DNA, 25 bp, Probe Sequence
gctgcttctgctatatttgtgatat

SEQ ID NO: 209945 - DNA, 25 bp, Probe Sequence
gctgctaagctgatgactgtttttt

SEQ ID NO: 209946 - DNA, 25 bp, Probe Sequence
gctgctccaggagattgtccttcat

SEQ ID NO: 209947 - DNA, 25 bp, Probe Sequence
gctgctgtcaggtctgatagtcctc

SEQ ID NO: 209948 - DNA, 25 bp, Probe Sequence
gctgcgtgtggactgaaatgcctca

SEQ ID NO: 209949 - DNA, 25 bp, Probe Sequence
gctgctgttgcagtataaacactag

SEQ ID NO: 209950 - DNA, 25 bp, Probe Sequence
gctgctggtcctaagagcatgctgt

SEQ ID NO: 209951 - DNA, 25 bp, Probe Sequence
gctgctggtcaaaaagatagtgtct

SEQ ID NO: 209952 - DNA, 25 bp, Probe Sequence
gctgctttgtcaaaaggaagtctct

SEQ ID NO: 209953 - DNA, 25 bp, Probe Sequence
gctgcttttaccaggaaagactatt

SEQ ID NO: 209954 - DNA, 25 bp, Probe Sequence
gcttgtgtccccagtacaaacttta

SEQ ID NO: 209955 - DNA, 25 bp, Probe Sequence
gctcgttcccaatgtatcttaatga

SEQ ID NO: 209956 - DNA, 25 bp, Probe Sequence
gctgctgccacataaggtctttgaa

SEQ ID NO: 209957 - DNA, 25 bp, Probe Sequence
gctgctctcctgtaactttctagga

SEQ ID NO: 209958 - DNA, 25 bp, Probe Sequence
gctcctttctgatcttcactaagaa

SEQ ID NO: 209959 - DNA, 25 bp, Probe Sequence
gctcctttcacttcgctagtaagaa

SEQ ID NO: 209960 - DNA, 25 bp, Probe Sequence
gctccatttccgagctcctaagaaa

SEQ ID NO: 209961 - DNA, 25 bp, Probe Sequence
gctgctcagtttgtggcgaataaaa

SEQ ID NO: 209962 - DNA, 25 bp, Probe Sequence
gctccagtcttccgacaaactaaca

SEQ ID NO: 209963 - DNA, 25 bp, Probe Sequence
gctccaagcttcctgtaaactataa

SEQ ID NO: 209964 - DNA, 25 bp, Probe Sequence
gctcccacctcacttagagtaaaag

SEQ ID NO: 209965 - DNA, 25 bp, Probe Sequence
gctccgaatgtgcttaagtggaaag

SEQ ID NO: 209966 - DNA, 25 bp, Probe Sequence
gctccgtcattaccataggggactt

SEQ ID NO: 209967 - DNA, 25 bp, Probe Sequence
gctccgtcattaccataggggactt

SEQ ID NO: 209968 - DNA, 25 bp, Probe Sequence
gctctgtgtatatctcttggaaaat

SEQ ID NO: 209969 - DNA, 25 bp, Probe Sequence
gctcctgaaattgcatccgaagaag

SEQ ID NO: 209970 - DNA, 25 bp, Probe Sequence
gctccagacctggaatccacaaaag

SEQ ID NO: 209971 - DNA, 25 bp, Probe Sequence
gctccagacctggaatccacaaaag

SEQ ID NO: 209972 - DNA, 25 bp, Probe Sequence
gctgccaacctgagaagtcaccaaa

SEQ ID NO: 209973 - DNA, 25 bp, Probe Sequence
gctgccaactacattgagtctccag

SEQ ID NO: 209974 - DNA, 25 bp, Probe Sequence
gctgccaactattttgaggatgttg

SEQ ID NO: 209975 - DNA, 25 bp, Probe Sequence
gctgccatacgtgttcagtgtgaat

SEQ ID NO: 209976 - DNA, 25 bp, Probe Sequence
gctgccaactgagttatctagtgat

SEQ ID NO: 209977 - DNA, 25 bp, Probe Sequence
gctgcctattgagtggtatagctgt

SEQ ID NO: 209978 - DNA, 25 bp, Probe Sequence
gctgcctcaacagggctgtattctg

SEQ ID NO: 209979 - DNA, 25 bp, Probe Sequence
gctgcctgaaacgttgctttgtatt

SEQ ID NO: 209980 - DNA, 25 bp, Probe Sequence
gctgccagaacctggtatctgtatc

SEQ ID NO: 209981 - DNA, 25 bp, Probe Sequence
gctctagaatagttggttgcagttc

SEQ ID NO: 209982 - DNA, 25 bp, Probe Sequence
gctcttaaagcaacctgtcagtttt

SEQ ID NO: 209983 - DNA, 25 bp, Probe Sequence
gctctctaacaggaccatcacagct

SEQ ID NO: 209984 - DNA, 25 bp, Probe Sequence
gctccagacagcctacaacaagctc

SEQ ID NO: 209985 - DNA, 25 bp, Probe Sequence
gctcccactgccatatataagcaca

SEQ ID NO: 209986 - DNA, 25 bp, Probe Sequence
gctccaattgctgttttacacagga

SEQ ID NO: 209987 - DNA, 25 bp, Probe Sequence
gctctcctagctgttcttcagaatt

SEQ ID NO: 209988 - DNA, 25 bp, Probe Sequence
gctgccaatgcactcgatcttgtca

SEQ ID NO: 209989 - DNA, 25 bp, Probe Sequence
gctgccaatgcactcgatcttgtca

SEQ ID NO: 209990 - DNA, 25 bp, Probe Sequence
gctgccatcattcggatgctcaaca

SEQ ID NO: 209991 - DNA, 25 bp, Probe Sequence
gctgccatgcaaaggtggacaccat

SEQ ID NO: 209992 - DNA, 25 bp, Probe Sequence
gctgcctcaaagggaaatcctcttt

SEQ ID NO: 209993 - DNA, 25 bp, Probe Sequence
gctcctcaagatcataacatactat

SEQ ID NO: 209994 - DNA, 25 bp, Probe Sequence
gctgcccaacatcatgaaagccaag

SEQ ID NO: 209995 - DNA, 25 bp, Probe Sequence
gctcttctacagcaatgatagccat

SEQ ID NO: 209996 - DNA, 25 bp, Probe Sequence
gctcttccgcatcaggtaacaggtt

SEQ ID NO: 209997 - DNA, 25 bp, Probe Sequence
gctttgcccaaacaatccatggatg

SEQ ID NO: 209998 - DNA, 25 bp, Probe Sequence
gctaaggaaggagaatcgctggaac

SEQ ID NO: 209999 - DNA, 25 bp, Probe Sequence
gctccgcaaaggtggctactggtac

SEQ ID NO: 210000 - DNA, 25 bp, Probe Sequence
gctacaacaaagtgttcctggccaa

SEQ ID NO: 210001 - DNA, 25 bp, Probe Sequence
gctacgaaagtgagctttttccaac

SEQ ID NO: 210002 - DNA, 25 bp, Probe Sequence
gctatctttaggcagttatttccaa

SEQ ID NO: 210003 - DNA, 25 bp, Probe Sequence
gctgcctcttggtggcagtattccc

SEQ ID NO: 210004 - DNA, 25 bp, Probe Sequence
gctgcctctgtaaattcatgtattc

SEQ ID NO: 210005 - DNA, 25 bp, Probe Sequence
gctgccaggataatttctgcttgcc

SEQ ID NO: 210006 - DNA, 25 bp, Probe Sequence
gctgccgaaaatatcaggctgccaa

SEQ ID NO: 210007 - DNA, 25 bp, Probe Sequence
gctgctgccgaaaatatcaggctgc

SEQ ID NO: 210008 - DNA, 25 bp, Probe Sequence
gctctgccatggactatacaagcag

SEQ ID NO: 210009 - DNA, 25 bp, Probe Sequence
gctgctccagtattatggcatgacg

SEQ ID NO: 210010 - DNA, 25 bp, Probe Sequence
gctcttgcaataattggcagatgcc

SEQ ID NO: 210011 - DNA, 25 bp, Probe Sequence
gctcctgcaacaattccatcggaat

SEQ ID NO: 210012 - DNA, 25 bp, Probe Sequence
gctctgagccagattaacaggaatg

SEQ ID NO: 210013 - DNA, 25 bp, Probe Sequence
gctccagcgggagaacgataatgca

SEQ ID NO: 210014 - DNA, 25 bp, Probe Sequence
gctccagtcggagaatccagaaagg

SEQ ID NO: 210015 - DNA, 25 bp, Probe Sequence
gctccagatagagcttatccagata

SEQ ID NO: 210016 - DNA, 25 bp, Probe Sequence
gctctagcagagttttgattaccac

SEQ ID NO: 210017 - DNA, 25 bp, Probe Sequence
gctcttgccactgttatgtacacac

SEQ ID NO: 210018 - DNA, 25 bp, Probe Sequence
gctcctctactctttgagacatcac

SEQ ID NO: 210019 - DNA, 25 bp, Probe Sequence
gctcgtatgacttgttttcattcat

SEQ ID NO: 210020 - DNA, 25 bp, Probe Sequence
gctcaggaactgcttttgattcaca

SEQ ID NO: 210021 - DNA, 25 bp, Probe Sequence
gctctcgacttgaattatccttcca

SEQ ID NO: 210022 - DNA, 25 bp, Probe Sequence
gctcttcatttgatttcgaggcaag

SEQ ID NO: 210023 - DNA, 25 bp, Probe Sequence
gctcctgttctgacctcaaaaacag

SEQ ID NO: 210024 - DNA, 25 bp, Probe Sequence
gctccaggactccctcaataatgag

SEQ ID NO: 210025 - DNA, 25 bp, Probe Sequence
gctcatttacatggctccaagaaag

SEQ ID NO: 210026 - DNA, 25 bp, Probe Sequence
gctcatttaagcctaacaacaacct

SEQ ID NO: 210027 - DNA, 25 bp, Probe Sequence
gctgcctggaagcattacaacacca

SEQ ID NO: 210028 - DNA, 25 bp, Probe Sequence
gctccagaagagcttaaacatcctg

SEQ ID NO: 210029 - DNA, 25 bp, Probe Sequence
gctgccccagagcattaaacatggg

SEQ ID NO: 210030 - DNA, 25 bp, Probe Sequence
gctccccagcaagatacaacagtgg

SEQ ID NO: 210031 - DNA, 25 bp, Probe Sequence
gctcaaccggcccaacaagaggaat

SEQ ID NO: 210032 - DNA, 25 bp, Probe Sequence
gctccctctgaggaaccaaaggaag

SEQ ID NO: 210033 - DNA, 25 bp, Probe Sequence
gctccaccaaggtaccaagggcagc

SEQ ID NO: 210034 - DNA, 25 bp, Probe Sequence
gctaaagtagctgtgctaggggcct

SEQ ID NO: 210035 - DNA, 25 bp, Probe Sequence
gctaatactgagcaggtagtggggc

SEQ ID NO: 210036 - DNA, 25 bp, Probe Sequence
gctactcatgggcagttacctgggc

SEQ ID NO: 210037 - DNA, 25 bp, Probe Sequence
gctcccggcacacgagtgtccgggg

SEQ ID NO: 210038 - DNA, 25 bp, Probe Sequence
gctccggtgacgaaagtccatggcg

SEQ ID NO: 210039 - DNA, 25 bp, Probe Sequence
gctcctggtgagcacgtgtttgtga

SEQ ID NO: 210040 - DNA, 25 bp, Probe Sequence
gctcctttaggactgggtggatgga

SEQ ID NO: 210041 - DNA, 25 bp, Probe Sequence
gctctattaagctgtggtggggatg

SEQ ID NO: 210042 - DNA, 25 bp, Probe Sequence
gctctttcaaaggtaatggcccatc

SEQ ID NO: 210043 - DNA, 25 bp, Probe Sequence
gctctcctacaaggttagtgccctc

SEQ ID NO: 210044 - DNA, 25 bp, Probe Sequence
gctgccaggaaacgatttgggcctc

SEQ ID NO: 210045 - DNA, 25 bp, Probe Sequence
gctccatctgaatcgattttctgcc

SEQ ID NO: 210046 - DNA, 25 bp, Probe Sequence
gctccatagacatcagtattctgcc

SEQ ID NO: 210047 - DNA, 25 bp, Probe Sequence
gctcctgcgacatcaggttctcagt

SEQ ID NO: 210048 - DNA, 25 bp, Probe Sequence
gctccaggactaactttgctaattt

SEQ ID NO: 210049 - DNA, 25 bp, Probe Sequence
gctgccaaactcatttgttgcagtt

SEQ ID NO: 210050 - DNA, 25 bp, Probe Sequence
gctgccacaaccagtgtgctgcagg

SEQ ID NO: 210051 - DNA, 25 bp, Probe Sequence
gctgccacgaccaagtgacagcaat

SEQ ID NO: 210052 - DNA, 25 bp, Probe Sequence
gctgcccagagagaatgtcacagat

SEQ ID NO: 210053 - DNA, 25 bp, Probe Sequence
gctcttgcagaaggaactaccattt

SEQ ID NO: 210054 - DNA, 25 bp, Probe Sequence
gctcctctgttttacatactcatta

SEQ ID NO: 210055 - DNA, 25 bp, Probe Sequence
gctgccttgtgtgcgactgagatgc

SEQ ID NO: 210056 - DNA, 25 bp, Probe Sequence
gctgccctgtgtgggactgagtggc

SEQ ID NO: 210057 - DNA, 25 bp, Probe Sequence
gctgccctgtgtgggactgagtggc

SEQ ID NO: 210058 - DNA, 25 bp, Probe Sequence
gctgccctgtgtgggactgagtggc

SEQ ID NO: 210059 - DNA, 25 bp, Probe Sequence
gctgcctctggtggatatgcggagg

SEQ ID NO: 210060 - DNA, 25 bp, Probe Sequence
gctgcccggtcctatgaggcagtgc

SEQ ID NO: 210061 - DNA, 25 bp, Probe Sequence
gctgcctgggtgccatcaaggagaa

SEQ ID NO: 210062 - DNA, 25 bp, Probe Sequence
gctcctgggggtcattagaagctct

SEQ ID NO: 210063 - DNA, 25 bp, Probe Sequence
gctcgtcgggggctgggagatgttc

SEQ ID NO: 210064 - DNA, 25 bp, Probe Sequence
gctcctgcgtggagggggaatgtgt

SEQ ID NO: 210065 - DNA, 25 bp, Probe Sequence
gctcccctgctgaaggtggggattg

SEQ ID NO: 210066 - DNA, 25 bp, Probe Sequence
gctcgcaccttggaggtcgaggctg

SEQ ID NO: 210067 - DNA, 25 bp, Probe Sequence
gctcctctcctggaggattgcaggt

SEQ ID NO: 210068 - DNA, 25 bp, Probe Sequence
gctccctcttttgatcgaatgttta

SEQ ID NO: 210069 - DNA, 25 bp, Probe Sequence
gctccactttttctaccttggaact

SEQ ID NO: 210070 - DNA, 25 bp, Probe Sequence
gctccactttttctaccttggaact

SEQ ID NO: 210071 - DNA, 25 bp, Probe Sequence
gctccatatattgtttaccttcaaa

SEQ ID NO: 210072 - DNA, 25 bp, Probe Sequence
gctccagtatgtgtaccatcttgta

SEQ ID NO: 210073 - DNA, 25 bp, Probe Sequence
gctccagtatgtgtaccatcttgta

SEQ ID NO: 210074 - DNA, 25 bp, Probe Sequence
gctccagtatgtgtaccatcttgta

SEQ ID NO: 210075 - DNA, 25 bp, Probe Sequence
gctcgcgcttcatttccctcattgt

SEQ ID NO: 210076 - DNA, 25 bp, Probe Sequence
gctcctcttcaattgattcttgctt

SEQ ID NO: 210077 - DNA, 25 bp, Probe Sequence
gctccacccatactggatctagcat

SEQ ID NO: 210078 - DNA, 25 bp, Probe Sequence
gctccacctctgcagtgatcataag

SEQ ID NO: 210079 - DNA, 25 bp, Probe Sequence
gctcagtccttgcaatgttctaggt

SEQ ID NO: 210080 - DNA, 25 bp, Probe Sequence
gctctttttgtattttcgtagtaga

SEQ ID NO: 210081 - DNA, 25 bp, Probe Sequence
gctctttgctttttcgttgtctgag

SEQ ID NO: 210082 - DNA, 25 bp, Probe Sequence
gctcttaatgtattcctttttagta

SEQ ID NO: 210083 - DNA, 25 bp, Probe Sequence
gctgcctatttatctctgtttttgc

SEQ ID NO: 210084 - DNA, 25 bp, Probe Sequence
gctctcaaatttttctgtattctac

SEQ ID NO: 210085 - DNA, 25 bp, Probe Sequence
gctctcaatttttccgtattctact

SEQ ID NO: 210086 - DNA, 25 bp, Probe Sequence
gctaaactttactgatgtatatcca

SEQ ID NO: 210087 - DNA, 25 bp, Probe Sequence
gctaagtttaagtagtgtatcctgc

SEQ ID NO: 210088 - DNA, 25 bp, Probe Sequence
gctacttgtttacattgtacactgc

SEQ ID NO: 210089 - DNA, 25 bp, Probe Sequence
gctgcctttgtttctgcattaaacc

SEQ ID NO: 210090 - DNA, 25 bp, Probe Sequence
gctccgtgtgatgcccagtaaagcc

SEQ ID NO: 210091 - DNA, 25 bp, Probe Sequence
gctccgcctgcagcgttgagaaacc

SEQ ID NO: 210092 - DNA, 25 bp, Probe Sequence
gctccagcttcatcagttgagtacc

SEQ ID NO: 210093 - DNA, 25 bp, Probe Sequence
gctccagcttcatcagttgagtacc

SEQ ID NO: 210094 - DNA, 25 bp, Probe Sequence
gctcaacctcaaggagtacaacctg

SEQ ID NO: 210095 - DNA, 25 bp, Probe Sequence
gctcaggaccaaggttaaatccctt

SEQ ID NO: 210096 - DNA, 25 bp, Probe Sequence
gctagaggccaagtgcactgaattt

SEQ ID NO: 210097 - DNA, 25 bp, Probe Sequence
gctgcgagggcaacgccaacaattt

SEQ ID NO: 210098 - DNA, 25 bp, Probe Sequence
gctgcgagggaaggaccacgtggtc

SEQ ID NO: 210099 - DNA, 25 bp, Probe Sequence
gctccaaggaattgtctcctggggc

SEQ ID NO: 210100 - DNA, 25 bp, Probe Sequence
gctccaaggaattgtctcctggggc

SEQ ID NO: 210101 - DNA, 25 bp, Probe Sequence
gctcaacatggatctgttccggtct

SEQ ID NO: 210102 - DNA, 25 bp, Probe Sequence
gctctaaggaccgtcctgcgagatc

SEQ ID NO: 210103 - DNA, 25 bp, Probe Sequence
gcattgaattcatcgatcctgggtc

SEQ ID NO: 210104 - DNA, 25 bp, Probe Sequence
gctcttatctttggtggctgtggtc

SEQ ID NO: 210105 - DNA, 25 bp, Probe Sequence
gctcatttcttccaacctggagctc

SEQ ID NO: 210106 - DNA, 25 bp, Probe Sequence
gctcgtttagtgaaccgtcagatcg

SEQ ID NO: 210107 - DNA, 25 bp, Probe Sequence
gctcgtttagtgaaccgtcagatcg

SEQ ID NO: 210108 - DNA, 25 bp, Probe Sequence
gctcgtttagtgaaccgtcagatcg

SEQ ID NO: 210109 - DNA, 25 bp, Probe Sequence
gctctctctgtaggaaccttatgac

SEQ ID NO: 210110 - DNA, 25 bp, Probe Sequence
gctcttttagtgaacgtcagatcgc

SEQ ID NO: 210111 - DNA, 25 bp, Probe Sequence
gctcaactaagaccaagtcctcgct

SEQ ID NO: 210112 - DNA, 25 bp, Probe Sequence
gctcaactactcaagcaattccttt

SEQ ID NO: 210113 - DNA, 25 bp, Probe Sequence
gctcacaatactgaactatcgttta

SEQ ID NO: 210114 - DNA, 25 bp, Probe Sequence
gctaagatgacgaagccccgtctct

SEQ ID NO: 210115 - DNA, 25 bp, Probe Sequence
gctaaaaaggattccgtctccttca

SEQ ID NO: 210116 - DNA, 25 bp, Probe Sequence
gctcgaagggagagccagctccccc

SEQ ID NO: 210117 - DNA, 25 bp, Probe Sequence
gctccaaggaggagtctgcccactg

SEQ ID NO: 210118 - DNA, 25 bp, Probe Sequence
gctccaagaaagaatcacctcccag

SEQ ID NO: 210119 - DNA, 25 bp, Probe Sequence
gctgccaagaaagactgagcccctc

SEQ ID NO: 210120 - DNA, 25 bp, Probe Sequence
gctgccatcaagaaactctaccagg

SEQ ID NO: 210121 - DNA, 25 bp, Probe Sequence
gctgccatatgagtaactctggtag

SEQ ID NO: 210122 - DNA, 25 bp, Probe Sequence
gctccaaggctatgccaggtcatgt

SEQ ID NO: 210123 - DNA, 25 bp, Probe Sequence
gctccatacctaagtcagaccagct

SEQ ID NO: 210124 - DNA, 25 bp, Probe Sequence
gctccaacctgcatgacagatcaag

SEQ ID NO: 210125 - DNA, 25 bp, Probe Sequence
gctctcatacccagcaagctgcaga

SEQ ID NO: 210126 - DNA, 25 bp, Probe Sequence
gctccatagacgtgaggctgagatg

SEQ ID NO: 210127 - DNA, 25 bp, Probe Sequence
gctgccaggacgaaagcgaggcggt

SEQ ID NO: 210128 - DNA, 25 bp, Probe Sequence
gctcctgcgatcgaaggggacttga

SEQ ID NO: 210129 - DNA, 25 bp, Probe Sequence
gctccctgcactgagcgggtttagg

SEQ ID NO: 210130 - DNA, 25 bp, Probe Sequence
gctccagtgcaggggcgtagtggga

SEQ ID NO: 210131 - DNA, 25 bp, Probe Sequence
gctccagtgcaggggcgtagtggga

SEQ ID NO: 210132 - DNA, 25 bp, Probe Sequence
gctccagctgaggagaagaaagtgg

SEQ ID NO: 210133 - DNA, 25 bp, Probe Sequence
gctcccgacgatcatgcagaagtag

SEQ ID NO: 210134 - DNA, 25 bp, Probe Sequence
gctcctcaccaacagaacaggatct

SEQ ID NO: 210135 - DNA, 25 bp, Probe Sequence
gctcccagatgtaaagaacgcgact

SEQ ID NO: 210136 - DNA, 25 bp, Probe Sequence
gctccaggcagaaaagaccctgcct

SEQ ID NO: 210137 - DNA, 25 bp, Probe Sequence
gctccagacataaatagctcactgc

SEQ ID NO: 210138 - DNA, 25 bp, Probe Sequence
gctccattctgtagcattgccagcg

SEQ ID NO: 210139 - DNA, 25 bp, Probe Sequence
gctgccattcttgattgctagagtt

SEQ ID NO: 210140 - DNA, 25 bp, Probe Sequence
gctccagtccacactgtagatcgtg

SEQ ID NO: 210141 - DNA, 25 bp, Probe Sequence
gctcaagcccaatctgggactggga

SEQ ID NO: 210142 - DNA, 25 bp, Probe Sequence
gctctacctgactctgggagctgca

SEQ ID NO: 210143 - DNA, 25 bp, Probe Sequence
gctcttttattcctggtgttcacat

SEQ ID NO: 210144 - DNA, 25 bp, Probe Sequence
gctcgattttttctgaatcataatt

SEQ ID NO: 210145 - DNA, 25 bp, Probe Sequence
gctcctcttttgacttggactatga

SEQ ID NO: 210146 - DNA, 25 bp, Probe Sequence
gctctgtttttggctgtgagactag

SEQ ID NO: 210147 - DNA, 25 bp, Probe Sequence
gctctgttgctgaggctggagtgca

SEQ ID NO: 210148 - DNA, 25 bp, Probe Sequence
gctctgtcttgtcggggagatgggc

SEQ ID NO: 210149 - DNA, 25 bp, Probe Sequence
gctcatggatttctagtgaagggca

SEQ ID NO: 210150 - DNA, 25 bp, Probe Sequence
gctctttcttgagaggagagaccac

SEQ ID NO: 210151 - DNA, 25 bp, Probe Sequence
gctcctctttcacaggagataagag

SEQ ID NO: 210152 - DNA, 25 bp, Probe Sequence
gctgcctttccacagctataatgga

SEQ ID NO: 210153 - DNA, 25 bp, Probe Sequence
gctcctattgcctagagagacagtg

SEQ ID NO: 210154 - DNA, 25 bp, Probe Sequence
gctctgtgtctagtgtagaacatgg

SEQ ID NO: 210155 - DNA, 25 bp, Probe Sequence
gctttcttactgacagcaaccagga

SEQ ID NO: 210156 - DNA, 25 bp, Probe Sequence
gctccatttactgagaagcacaggt

SEQ ID NO: 210157 - DNA, 25 bp, Probe Sequence
gctctcattcagctagagacagata

SEQ ID NO: 210158 - DNA, 25 bp, Probe Sequence
gctcttcatccgggagaagtacatg

SEQ ID NO: 210159 - DNA, 25 bp, Probe Sequence
gctcctgcacctctggatagtgata

SEQ ID NO: 210160 - DNA, 25 bp, Probe Sequence
gctccagcacctcaatgaatgtgta

SEQ ID NO: 210161 - DNA, 25 bp, Probe Sequence
gctccgcgtcggtagacattgttct

SEQ ID NO: 210162 - DNA, 25 bp, Probe Sequence
gatcccgatagtgagtaagttcttc

SEQ ID NO: 210163 - DNA, 25 bp, Probe Sequence
gctccgcagaagagagtaagttccc

SEQ ID NO: 210164 - DNA, 25 bp, Probe Sequence
gctcataggaacaggtagactttca

SEQ ID NO: 210165 - DNA, 25 bp, Probe Sequence
gctcagggaacaggtggcacagctt

SEQ ID NO: 210166 - DNA, 25 bp, Probe Sequence
gctcttggatatcattggccatgtt

SEQ ID NO: 210167 - DNA, 25 bp, Probe Sequence
gctctgttgatcatttgggagatgt

SEQ ID NO: 210168 - DNA, 25 bp, Probe Sequence
gctctctctgttgatggtgaagatg

SEQ ID NO: 210169 - DNA, 25 bp, Probe Sequence
gctctgccatggttatctggaaatg

SEQ ID NO: 210170 - DNA, 25 bp, Probe Sequence
gctccagctcaaccatctgaggaag

SEQ ID NO: 210171 - DNA, 25 bp, Probe Sequence
gctccactgccctttgagggatgga

SEQ ID NO: 210172 - DNA, 25 bp, Probe Sequence
gctccctgttcttgggtaaggaaat

SEQ ID NO: 210173 - DNA, 25 bp, Probe Sequence
gctagaggtcctggggtaagagaaa

SEQ ID NO: 210174 - DNA, 25 bp, Probe Sequence
gctacaggtgccggaccaacaagaa

SEQ ID NO: 210175 - DNA, 25 bp, Probe Sequence
gctcagagtctgggtaccccaggct

SEQ ID NO: 210176 - DNA, 25 bp, Probe Sequence
gctctgacctctttagacaccagag

SEQ ID NO: 210177 - DNA, 25 bp, Probe Sequence
gctctagacatgatcttggacctgg

SEQ ID NO: 210178 - DNA, 25 bp, Probe Sequence
gctctagaccagatgttggctgctg

SEQ ID NO: 210179 - DNA, 25 bp, Probe Sequence
gctctagattctattttcatgcatc

SEQ ID NO: 210180 - DNA, 25 bp, Probe Sequence
gctctagatttgaagtgtccttgta

SEQ ID NO: 210181 - DNA, 25 bp, Probe Sequence
gctccgtaatgaatgttgtcttaaa

SEQ ID NO: 210182 - DNA, 25 bp, Probe Sequence
gctcctctaaacatttgctgttcaa

SEQ ID NO: 210183 - DNA, 25 bp, Probe Sequence
gctctttcagagaactttgcctaca

SEQ ID NO: 210184 - DNA, 25 bp, Probe Sequence
gctgccttcaagcatctgtttaaca

SEQ ID NO: 210185 - DNA, 25 bp, Probe Sequence
gctgccattagcttggctcttaaag

SEQ ID NO: 210186 - DNA, 25 bp, Probe Sequence
gctgccacaagtagatgctctctac

SEQ ID NO: 210187 - DNA, 25 bp, Probe Sequence
gctcagatctaaagcctctgcaaca

SEQ ID NO: 210188 - DNA, 25 bp, Probe Sequence
gctccactgacaagcccagtgactg

SEQ ID NO: 210189 - DNA, 25 bp, Probe Sequence
gctacaatgagcagcgcatcagaca

SEQ ID NO: 210190 - DNA, 25 bp, Probe Sequence
gctccaatgagatcctcaagcacat

SEQ ID NO: 210191 - DNA, 25 bp, Probe Sequence
gctccggcagagtgctgaagccata

SEQ ID NO: 210192 - DNA, 25 bp, Probe Sequence
gctcagtggacgtggcactggccac

SEQ ID NO: 210193 - DNA, 25 bp, Probe Sequence
gctcattggccggaggaagctcacc

SEQ ID NO: 210194 - DNA, 25 bp, Probe Sequence
gctcattggccggaggaagctcacc

SEQ ID NO: 210195 - DNA, 25 bp, Probe Sequence
gctcagtggcagctccgaagctgcg

SEQ ID NO: 210196 - DNA, 25 bp, Probe Sequence
gctctgtgcaggcataatgtcaggc

SEQ ID NO: 210197 - DNA, 25 bp, Probe Sequence
gctccagctgtgcaaatcatcttga

SEQ ID NO: 210198 - DNA, 25 bp, Probe Sequence
gctcatgcaggaaagtacattagaa

SEQ ID NO: 210199 - DNA, 25 bp, Probe Sequence
gctccagaaagactcactgctcaca

SEQ ID NO: 210200 - DNA, 25 bp, Probe Sequence
gctgccagatggaaggacgctcaaa

SEQ ID NO: 210201 - DNA, 25 bp, Probe Sequence
gctctcagacgaagaggcgagaaag

SEQ ID NO: 210202 - DNA, 25 bp, Probe Sequence
gctcctgaaggaagtgccaaacatg

SEQ ID NO: 210203 - DNA, 25 bp, Probe Sequence
gctcctggacagtgtcctatggctg

SEQ ID NO: 210204 - DNA, 25 bp, Probe Sequence
gctcctgtgtaaagatgccttgtcg

SEQ ID NO: 210205 - DNA, 25 bp, Probe Sequence
gctccattctcagggagcctaccta

SEQ ID NO: 210206 - DNA, 25 bp, Probe Sequence
gctctttctgcagcatagcttgtca

SEQ ID NO: 210207 - DNA, 25 bp, Probe Sequence
gctcatcaagctggctaagcctgcc

SEQ ID NO: 210208 - DNA, 25 bp, Probe Sequence
gctcagcatctgtgcttagcaggcc

SEQ ID NO: 210209 - DNA, 25 bp, Probe Sequence
gctactgcatctggcctataatgcc

SEQ ID NO: 210210 - DNA, 25 bp, Probe Sequence
gctccttgcatggctcattaggttc

SEQ ID NO: 210211 - DNA, 25 bp, Probe Sequence
gctcactggcatggccttccgtgtc

SEQ ID NO: 210212 - DNA, 25 bp, Probe Sequence
gctccagtgcgtgctgtctgtggag

SEQ ID NO: 210213 - DNA, 25 bp, Probe Sequence
gctccaggcagtgttctgccgagac

SEQ ID NO: 210214 - DNA, 25 bp, Probe Sequence
gctccaagcagtttgaagcccaatc

SEQ ID NO: 210215 - DNA, 25 bp, Probe Sequence
gcactaccaattcaatgcccttcat

SEQ ID NO: 210216 - DNA, 25 bp, Probe Sequence
gctcgacaaaatttactcacattca

SEQ ID NO: 210217 - DNA, 25 bp, Probe Sequence
gctcaaacaaaacatctcaagtccc

SEQ ID NO: 210218 - DNA, 25 bp, Probe Sequence
gctaattcccaccttcgaagattac

SEQ ID NO: 210219 - DNA, 25 bp, Probe Sequence
gcataaatccctgtttagtgttaca

SEQ ID NO: 210220 - DNA, 25 bp, Probe Sequence
gctacattcccttttttctgtgaaa

SEQ ID NO: 210221 - DNA, 25 bp, Probe Sequence
gctccttctgtgtttttttctgaac

SEQ ID NO: 210222 - DNA, 25 bp, Probe Sequence
gctccttctgtgtttttttctgaac

SEQ ID NO: 210223 - DNA, 25 bp, Probe Sequence
gctccttctggtatatgcatgtcac

SEQ ID NO: 210224 - DNA, 25 bp, Probe Sequence
gctcctgttgggatggatggcccgg

SEQ ID NO: 210225 - DNA, 25 bp, Probe Sequence
gctccctgtggagctgaagggcggc

SEQ ID NO: 210226 - DNA, 25 bp, Probe Sequence
gctcctcttggagaagctgttgctg

SEQ ID NO: 210227 - DNA, 25 bp, Probe Sequence
gctccttttgagcatatgcgtgtga

SEQ ID NO: 210228 - DNA, 25 bp, Probe Sequence
gctcctaaagcacaactgtgtgcag

SEQ ID NO: 210229 - DNA, 25 bp, Probe Sequence
gctccttaacagcagagtatcatga

SEQ ID NO: 210230 - DNA, 25 bp, Probe Sequence
gctcgcccgccagaagaatatgaaa

SEQ ID NO: 210231 - DNA, 25 bp, Probe Sequence
gctccaccctcagcagatgataata

SEQ ID NO: 210232 - DNA, 25 bp, Probe Sequence
gctccaccctcagcggatgataatc

SEQ ID NO: 210233 - DNA, 25 bp, Probe Sequence
gctccaccctcagcggatgataatc

SEQ ID NO: 210234 - DNA, 25 bp, Probe Sequence
gctcccaccctggtagatgaacagc

SEQ ID NO: 210235 - DNA, 25 bp, Probe Sequence
gctcgtcaccttcgtgaataccaag

SEQ ID NO: 210236 - DNA, 25 bp, Probe Sequence
gctcgatcaccgagggtaccagtcc

SEQ ID NO: 210237 - DNA, 25 bp, Probe Sequence
gctcctaacatgcaggtgtcaccag

SEQ ID NO: 210238 - DNA, 25 bp, Probe Sequence
gctcttcacataaagcttgctaccg

SEQ ID NO: 210239 - DNA, 25 bp, Probe Sequence
gctcttgacacttagccgctgtctc

SEQ ID NO: 210240 - DNA, 25 bp, Probe Sequence
gctctacaactgggacagctgtgcc

SEQ ID NO: 210241 - DNA, 25 bp, Probe Sequence
gctctggaagggcagatgttctgga

SEQ ID NO: 210242 - DNA, 25 bp, Probe Sequence
gctctggaagggcagatgttctgga

SEQ ID NO: 210243 - DNA, 25 bp, Probe Sequence
gctctggaagggcagatgttctgga

SEQ ID NO: 210244 - DNA, 25 bp, Probe Sequence
gctccaaatggagagtgtagcctga

SEQ ID NO: 210245 - DNA, 25 bp, Probe Sequence
gctctactataaaagcttacttgat

SEQ ID NO: 210246 - DNA, 25 bp, Probe Sequence
gctcccctataatctgctgagtaat

SEQ ID NO: 210247 - DNA, 25 bp, Probe Sequence
gctcccccaaacaagtgagaacata

SEQ ID NO: 210248 - DNA, 25 bp, Probe Sequence
gctcccctcaaaaagaagacactgt

SEQ ID NO: 210249 - DNA, 25 bp, Probe Sequence
gctcgggtcaaagatgaaatcacag

SEQ ID NO: 210250 - DNA, 25 bp, Probe Sequence
gctcctgttaaaggaactgacagca

SEQ ID NO: 210251 - DNA, 25 bp, Probe Sequence
gctcctttaagattgtcctgtgaca

SEQ ID NO: 210252 - DNA, 25 bp, Probe Sequence
gctcctttccataaatccttgatga

SEQ ID NO: 210253 - DNA, 25 bp, Probe Sequence
gctccttcactactaactgttgaga

SEQ ID NO: 210254 - DNA, 25 bp, Probe Sequence
gctacttcctcctatacattttggt

SEQ ID NO: 210255 - DNA, 25 bp, Probe Sequence
gctacgtcgccctggacttcgagca

SEQ ID NO: 210256 - DNA, 25 bp, Probe Sequence
gctccagtcccagtgggacctcaaa

SEQ ID NO: 210257 - DNA, 25 bp, Probe Sequence
gcttcagtcccaatgtaaacctaac

SEQ ID NO: 210258 - DNA, 25 bp, Probe Sequence
gctccatttcctgtaaatcgctgaa

SEQ ID NO: 210259 - DNA, 25 bp, Probe Sequence
gctccatttcttgctggaacagttt

SEQ ID NO: 210260 - DNA, 25 bp, Probe Sequence
gctccatttttccacagcgtggttt

SEQ ID NO: 210261 - DNA, 25 bp, Probe Sequence
gctacatctacttctaccagagagt

SEQ ID NO: 210262 - DNA, 25 bp, Probe Sequence
gctcacacttcaaaaccaataagcc

SEQ ID NO: 210263 - DNA, 25 bp, Probe Sequence
gctcacccgcatcaacaatctaagc

SEQ ID NO: 210264 - DNA, 25 bp, Probe Sequence
gctcacagacgccaaacgcattaac

SEQ ID NO: 210265 - DNA, 25 bp, Probe Sequence
gctcctgacagtcatacctgaaaca

SEQ ID NO: 210266 - DNA, 25 bp, Probe Sequence
gctccttgccatccgacggatatta

SEQ ID NO: 210267 - DNA, 25 bp, Probe Sequence
gctccatctcctccgaagggaatga

SEQ ID NO: 210268 - DNA, 25 bp, Probe Sequence
gctccattcactcccaggtgagaat

SEQ ID NO: 210269 - DNA, 25 bp, Probe Sequence
gctccatacagttctcagagcgggt

SEQ ID NO: 210270 - DNA, 25 bp, Probe Sequence
gctcctacagcaagctgctgtgcgg

SEQ ID NO: 210271 - DNA, 25 bp, Probe Sequence
gctccatacagcaggcactgtggct

SEQ ID NO: 210272 - DNA, 25 bp, Probe Sequence
gctcaggagcgaaggactgtgaact

SEQ ID NO: 210273 - DNA, 25 bp, Probe Sequence
gctctggtggctagggatgtactca

SEQ ID NO: 210274 - DNA, 25 bp, Probe Sequence
gctctgggatgcaggcatgcttctc

SEQ ID NO: 210275 - DNA, 25 bp, Probe Sequence
gctcgtagatcaaacatgcacttta

SEQ ID NO: 210276 - DNA, 25 bp, Probe Sequence
gctcagatagaatgacagtccgtca

SEQ ID NO: 210277 - DNA, 25 bp, Probe Sequence
gctagaaacaagacgacctacaata

SEQ ID NO: 210278 - DNA, 25 bp, Probe Sequence
gctaataaatgaccagtttacctga

SEQ ID NO: 210279 - DNA, 25 bp, Probe Sequence
gctcagtaaagccttggtcttctcg

SEQ ID NO: 210280 - DNA, 25 bp, Probe Sequence
gctaggtacaccttagttcatgttg

SEQ ID NO: 210281 - DNA, 25 bp, Probe Sequence
gctatggtaccattctaatgtatgt

SEQ ID NO: 210282 - DNA, 25 bp, Probe Sequence
gctctcctgacttttaatgtcattt

SEQ ID NO: 210283 - DNA, 25 bp, Probe Sequence
gctctcctgacttttaatgtcattt

SEQ ID NO: 210284 - DNA, 25 bp, Probe Sequence
gctccttgactattttcagctctgg

SEQ ID NO: 210285 - DNA, 25 bp, Probe Sequence
gctcgctgagaaagtccttgctggg

SEQ ID NO: 210286 - DNA, 25 bp, Probe Sequence
gctcgctgagaaagtccttgctggg

SEQ ID NO: 210287 - DNA, 25 bp, Probe Sequence
gctcgctgagaaagtccttgctggg

SEQ ID NO: 210288 - DNA, 25 bp, Probe Sequence
gctcctggcctcatcctagagaggc

SEQ ID NO: 210289 - DNA, 25 bp, Probe Sequence
gctccatgacagtcttgccatagaa

SEQ ID NO: 210290 - DNA, 25 bp, Probe Sequence
gctctgagacgtttgccatgagggc

SEQ ID NO: 210291 - DNA, 25 bp, Probe Sequence
gctctgactttcagcatcatgcagg

SEQ ID NO: 210292 - DNA, 25 bp, Probe Sequence
gctctactcttgctcagcggagagg

SEQ ID NO: 210293 - DNA, 25 bp, Probe Sequence
gctctggtgttgcccagcaggaaac

SEQ ID NO: 210294 - DNA, 25 bp, Probe Sequence
gctcgtggaatgccggggccagagc

SEQ ID NO: 210295 - DNA, 25 bp, Probe Sequence
gctccaggccatgtggggccagagc

SEQ ID NO: 210296 - DNA, 25 bp, Probe Sequence
gctccgtctcagaggtgggatgcag

SEQ ID NO: 210297 - DNA, 25 bp, Probe Sequence
gctccgttcggaggtgaaggctggc

SEQ ID NO: 210298 - DNA, 25 bp, Probe Sequence
gctccgttcggaggtgaaggctggc

SEQ ID NO: 210299 - DNA, 25 bp, Probe Sequence
gctctcttccgcaagggcaaggtgc

SEQ ID NO: 210300 - DNA, 25 bp, Probe Sequence
gctccctgcgagatgacgagaggcg

SEQ ID NO: 210301 - DNA, 25 bp, Probe Sequence
gctcacttcgacatcacgggaatga

SEQ ID NO: 210302 - DNA, 25 bp, Probe Sequence
gctccgactacagcatgtggaggaa

SEQ ID NO: 210303 - DNA, 25 bp, Probe Sequence
gctctgggtgaggtaggcgggaaag

SEQ ID NO: 210304 - DNA, 25 bp, Probe Sequence
gctctgtttgtgtctgaggaggaga

SEQ ID NO: 210305 - DNA, 25 bp, Probe Sequence
gctcgttctttagcagacatagcaa

SEQ ID NO: 210306 - DNA, 25 bp, Probe Sequence
gctctttatgtatctaacagatgga

SEQ ID NO: 210307 - DNA, 25 bp, Probe Sequence
gcttttgatgtctccaagtagtcca

SEQ ID NO: 210308 - DNA, 25 bp, Probe Sequence
gctctttctgtctcgctagacagat

SEQ ID NO: 210309 - DNA, 25 bp, Probe Sequence
gctctctttacgccctatgagatct

SEQ ID NO: 210310 - DNA, 25 bp, Probe Sequence
gctcttgttgcccaggctagagtgc

SEQ ID NO: 210311 - DNA, 25 bp, Probe Sequence
gctctgtgtaggtaaccagatggct

SEQ ID NO: 210312 - DNA, 25 bp, Probe Sequence
gctctgtccgcaaaaccaaatctgg

SEQ ID NO: 210313 - DNA, 25 bp, Probe Sequence
gcagctttcagcaacgttggaacgg

SEQ ID NO: 210314 - DNA, 25 bp, Probe Sequence
gctctttcagccgtttggaacagaa

SEQ ID NO: 210315 - DNA, 25 bp, Probe Sequence
gctcttctagccctttataaaagga

SEQ ID NO: 210316 - DNA, 25 bp, Probe Sequence
gctctagtaccttttcagtaaagtg

SEQ ID NO: 210317 - DNA, 25 bp, Probe Sequence
gctctcaacaccttgtatttaatag

SEQ ID NO: 210318 - DNA, 25 bp, Probe Sequence
gctcccacgcaagtggcactttaag

SEQ ID NO: 210319 - DNA, 25 bp, Probe Sequence
gctcccaggaacagccttatagaga

SEQ ID NO: 210320 - DNA, 25 bp, Probe Sequence
gctctaggaaacaccagtcttgaga

SEQ ID NO: 210321 - DNA, 25 bp, Probe Sequence
gctcttgaggaagcccaggctcgga

SEQ ID NO: 210322 - DNA, 25 bp, Probe Sequence
gctcttagctgagtgtcccgcgggg

SEQ ID NO: 210323 - DNA, 25 bp, Probe Sequence
gcatcctatgagtttcaaccaggtg

SEQ ID NO: 210324 - DNA, 25 bp, Probe Sequence
gctccgaggattccgacgcggaaac

SEQ ID NO: 210325 - DNA, 25 bp, Probe Sequence
gctccgaggtggacgagccgtagct

SEQ ID NO: 210326 - DNA, 25 bp, Probe Sequence
gctccgagagctgtggacaggccag

SEQ ID NO: 210327 - DNA, 25 bp, Probe Sequence
gctcgcaaatctttgatacggccgg

SEQ ID NO: 210328 - DNA, 25 bp, Probe Sequence
gcatagatttgcagttacggcctgg

SEQ ID NO: 210329 - DNA, 25 bp, Probe Sequence
gctctgattggaggcttgaggccct

SEQ ID NO: 210330 - DNA, 25 bp, Probe Sequence
gctcaactggggctggagccacttc

SEQ ID NO: 210331 - DNA, 25 bp, Probe Sequence
gctccgtggggcatcatgaggagat

SEQ ID NO: 210332 - DNA, 25 bp, Probe Sequence
gctcctgagcggaatcctgcaaaga

SEQ ID NO: 210333 - DNA, 25 bp, Probe Sequence
gctcctgctgggactcaattcaggc

SEQ ID NO: 210334 - DNA, 25 bp, Probe Sequence
gctcaccgtggattttctcatagga

SEQ ID NO: 210335 - DNA, 25 bp, Probe Sequence
gctcccatttgttgcttctcaaaat

SEQ ID NO: 210336 - DNA, 25 bp, Probe Sequence
gctccgggcatttgatgtaccagac

SEQ ID NO: 210337 - DNA, 25 bp, Probe Sequence
gctccgggcatttgatgtaccagac

SEQ ID NO: 210338 - DNA, 25 bp, Probe Sequence
gctctgcgaggaccgagaacacgac

SEQ ID NO: 210339 - DNA, 25 bp, Probe Sequence
gctcgctggggcctggaagaggagg

SEQ ID NO: 210340 - DNA, 25 bp, Probe Sequence
gctcttggggttgaagtcacatagc

SEQ ID NO: 210341 - DNA, 25 bp, Probe Sequence
gctcctgggcagatggggtcaaggc

SEQ ID NO: 210342 - DNA, 25 bp, Probe Sequence
gctcactgggactgaggggctgggc

SEQ ID NO: 210343 - DNA, 25 bp, Probe Sequence
gctcactgggactgaggggctgggc

SEQ ID NO: 210344 - DNA, 25 bp, Probe Sequence
gctccgagcggctgggtgagcagaa

SEQ ID NO: 210345 - DNA, 25 bp, Probe Sequence
gctccgagcggctgggtgagcagaa

SEQ ID NO: 210346 - DNA, 25 bp, Probe Sequence
gctctaactggctagaagtgcccaa

SEQ ID NO: 210347 - DNA, 25 bp, Probe Sequence
gctcagattatgctaaagtggccaa

SEQ ID NO: 210348 - DNA, 25 bp, Probe Sequence
gctcagcttatctccaagattccac

SEQ ID NO: 210349 - DNA, 25 bp, Probe Sequence
gctcagcttatctccaagattccac

SEQ ID NO: 210350 - DNA, 25 bp, Probe Sequence
gctcacagtaactcagagattacca

SEQ ID NO: 210351 - DNA, 25 bp, Probe Sequence
gctaagggactctatccattgagca

SEQ ID NO: 210352 - DNA, 25 bp, Probe Sequence
gctccgggaactgcagctgtgcagc

SEQ ID NO: 210353 - DNA, 25 bp, Probe Sequence
gctccgggaactgcagctgtgcagc

SEQ ID NO: 210354 - DNA, 25 bp, Probe Sequence
gctctgggaagagttcgctgtgcca

SEQ ID NO: 210355 - DNA, 25 bp, Probe Sequence
gctctgaaaagtacttctgctgctc

SEQ ID NO: 210356 - DNA, 25 bp, Probe Sequence
gctcaaagcaagagctgtctctgac

SEQ ID NO: 210357 - DNA, 25 bp, Probe Sequence
gctctcggcggaagtgatcgctgtg

SEQ ID NO: 210358 - DNA, 25 bp, Probe Sequence
gctccctggctgagctgaatgatgt

SEQ ID NO: 210359 - DNA, 25 bp, Probe Sequence
gctcttagggtactcaattttatgt

SEQ ID NO: 210360 - DNA, 25 bp, Probe Sequence
gctcttcgggagaatctttattttc

SEQ ID NO: 210361 - DNA, 25 bp, Probe Sequence
gctctacgggagcacagtggaccat

SEQ ID NO: 210362 - DNA, 25 bp, Probe Sequence
gctctacagcgttgcagaacatgaa

SEQ ID NO: 210363 - DNA, 25 bp, Probe Sequence
gctctatcgtgatgctaacagaact

SEQ ID NO: 210364 - DNA, 25 bp, Probe Sequence
gctcttgaccaagtatgacaacctc

SEQ ID NO: 210365 - DNA, 25 bp, Probe Sequence
gctcatttcctggtatgacaacgaa

SEQ ID NO: 210366 - DNA, 25 bp, Probe Sequence
gctcaattcctggtgagtgcagctg

SEQ ID NO: 210367 - DNA, 25 bp, Probe Sequence
gctacttcccggacggtgtttattg

SEQ ID NO: 210368 - DNA, 25 bp, Probe Sequence
gctacacgaccgggggtatactacg

SEQ ID NO: 210369 - DNA, 25 bp, Probe Sequence
gctacacgaccgggggtatactacg

SEQ ID NO: 210370 - DNA, 25 bp, Probe Sequence
gctacccaccttgtgaaatcctatc

SEQ ID NO: 210371 - DNA, 25 bp, Probe Sequence
gctccccacatcatcgtgggtaccc

SEQ ID NO: 210372 - DNA, 25 bp, Probe Sequence
gctccctgaacactcggaggtggcg

SEQ ID NO: 210373 - DNA, 25 bp, Probe Sequence
gctccccatcaccactgggaggtgg

SEQ ID NO: 210374 - DNA, 25 bp, Probe Sequence
gctccccacactgcaggaggatttg

SEQ ID NO: 210375 - DNA, 25 bp, Probe Sequence
gctcccttcattgcatctgaggact

SEQ ID NO: 210376 - DNA, 25 bp, Probe Sequence
gctcgggtcatcaactatgaggagt

SEQ ID NO: 210377 - DNA, 25 bp, Probe Sequence
gctatggacctcggcctgaggagta

SEQ ID NO: 210378 - DNA, 25 bp, Probe Sequence
gctcatggacaaggttctcagggaa

SEQ ID NO: 210379 - DNA, 25 bp, Probe Sequence
gctcttcacgcagattctgcgggtc

SEQ ID NO: 210380 - DNA, 25 bp, Probe Sequence
gctctacacgcagagatcgctgctg

SEQ ID NO: 210381 - DNA, 25 bp, Probe Sequence
gctctgcagctggccgagaagctgg

SEQ ID NO: 210382 - DNA, 25 bp, Probe Sequence
gctcgcatgcatgccgacatgatgg

SEQ ID NO: 210383 - DNA, 25 bp, Probe Sequence
gctcagatgcagtcaccagcatgag

SEQ ID NO: 210384 - DNA, 25 bp, Probe Sequence
gctcatcacagctgccagcttggtg

SEQ ID NO: 210385 - DNA, 25 bp, Probe Sequence
gctctccagtagcacagatgtctgc

SEQ ID NO: 210386 - DNA, 25 bp, Probe Sequence
gctctccagcacagacgatggctac

SEQ ID NO: 210387 - DNA, 25 bp, Probe Sequence
gctctccagcacagacgatggctac

SEQ ID NO: 210388 - DNA, 25 bp, Probe Sequence
gctcatccaactccacggagatcat

SEQ ID NO: 210389 - DNA, 25 bp, Probe Sequence
gctctgccattcaactcggaaacta

SEQ ID NO: 210390 - DNA, 25 bp, Probe Sequence
gctctgccattcaactcggaaacta

SEQ ID NO: 210391 - DNA, 25 bp, Probe Sequence
gctctgccattcaactcggaaacta

SEQ ID NO: 210392 - DNA, 25 bp, Probe Sequence
gctctgccattcaactcggaaacta

SEQ ID NO: 210393 - DNA, 25 bp, Probe Sequence
gctctgccattcaactcggaaacta

SEQ ID NO: 210394 - DNA, 25 bp, Probe Sequence
gctcccttctatacaggaatctctg

SEQ ID NO: 210395 - DNA, 25 bp, Probe Sequence
gctccctattttggaatgcacttcc

SEQ ID NO: 210396 - DNA, 25 bp, Probe Sequence
gctaatgctcttgtgtagtcacttc

SEQ ID NO: 210397 - DNA, 25 bp, Probe Sequence
gctcatagccttgcactgagcacag

SEQ ID NO: 210398 - DNA, 25 bp, Probe Sequence
gctcgaggccatgagcagatatacc

SEQ ID NO: 210399 - DNA, 25 bp, Probe Sequence
gctagcagtgagtgagctgtatagt

SEQ ID NO: 210400 - DNA, 25 bp, Probe Sequence
gctcaggtgactggagcccgagggc

SEQ ID NO: 210401 - DNA, 25 bp, Probe Sequence
gctcagtgatcaggggctcctggtg

SEQ ID NO: 210402 - DNA, 25 bp, Probe Sequence
gctcagtgatcaggggctcctggtg

SEQ ID NO: 210403 - DNA, 25 bp, Probe Sequence
gctcaatgatcccagagctcctgac

SEQ ID NO: 210404 - DNA, 25 bp, Probe Sequence
gctcagcagctcctgagttcctaat

SEQ ID NO: 210405 - DNA, 25 bp, Probe Sequence
gctagctgctcaagagttttcagta

SEQ ID NO: 210406 - DNA, 25 bp, Probe Sequence
gctcagtgccatgcgttcgctgaaa

SEQ ID NO: 210407 - DNA, 25 bp, Probe Sequence
gctctattatgggcttcctggaact

SEQ ID NO: 210408 - DNA, 25 bp, Probe Sequence
gttgtttcccttgcatgggacgaaa

SEQ ID NO: 210409 - DNA, 25 bp, Probe Sequence
gcttttacctttgatcccaggagaa

SEQ ID NO: 210410 - DNA, 25 bp, Probe Sequence
gctctttactcaatggtacccaggg

SEQ ID NO: 210411 - DNA, 25 bp, Probe Sequence
gctctcatatacaattactgaccta

SEQ ID NO: 210412 - DNA, 25 bp, Probe Sequence
gctctcagagggaccctgatccata

SEQ ID NO: 210413 - DNA, 25 bp, Probe Sequence
gctctccaagaagccgctcagatat

SEQ ID NO: 210414 - DNA, 25 bp, Probe Sequence
gctctccaaataggagcctcccatc

SEQ ID NO: 210415 - DNA, 25 bp, Probe Sequence
gctctcagcacagtacgagaccctg

SEQ ID NO: 210416 - DNA, 25 bp, Probe Sequence
gctctaagatctaagatggcccggc

SEQ ID NO: 210417 - DNA, 25 bp, Probe Sequence
gctctagtggtacaggcccagatgc

SEQ ID NO: 210418 - DNA, 25 bp, Probe Sequence
gctctactacatgggggacctgatc

SEQ ID NO: 210419 - DNA, 25 bp, Probe Sequence
gctcaatgtcaccgtggtgaccttc

SEQ ID NO: 210420 - DNA, 25 bp, Probe Sequence
gctcaccatcatgaggttaacttcc

SEQ ID NO: 210421 - DNA, 25 bp, Probe Sequence
gctccgattgcaaaattacctccag

SEQ ID NO: 210422 - DNA, 25 bp, Probe Sequence
gctccgttcagacagctgacgttag

SEQ ID NO: 210423 - DNA, 25 bp, Probe Sequence
gctcagcgtctctatcaagctggtg

SEQ ID NO: 210424 - DNA, 25 bp, Probe Sequence
gctcaggctgtgttctcaggatgac

SEQ ID NO: 210425 - DNA, 25 bp, Probe Sequence
gctcaggtgtggacgagtgtgcccg

SEQ ID NO: 210426 - DNA, 25 bp, Probe Sequence
gctctagattggcccatggtgccag

SEQ ID NO: 210427 - DNA, 25 bp, Probe Sequence
gctcagcagataaccaaggtgccag

SEQ ID NO: 210428 - DNA, 25 bp, Probe Sequence
gctcaagtctataaagggccaggaa

SEQ ID NO: 210429 - DNA, 25 bp, Probe Sequence
gctcagagtttcaaagaccacgtta

SEQ ID NO: 210430 - DNA, 25 bp, Probe Sequence
gctccgattatgacagtgacgggtc

SEQ ID NO: 210431 - DNA, 25 bp, Probe Sequence
gctccgcatactgagaatctaggcc

SEQ ID NO: 210432 - DNA, 25 bp, Probe Sequence
gctcacccacgaggactacatggaa

SEQ ID NO: 210433 - DNA, 25 bp, Probe Sequence
gctcccccagcgtatctatatggaa

SEQ ID NO: 210434 - DNA, 25 bp, Probe Sequence
gctccctcgctgcgatctattgaaa

SEQ ID NO: 210435 - DNA, 25 bp, Probe Sequence
gctccctgtccaagtgccttggaga

SEQ ID NO: 210436 - DNA, 25 bp, Probe Sequence
gctctttgtcaaagatggtctgtag

SEQ ID NO: 210437 - DNA, 25 bp, Probe Sequence
gctctgtttaattctgctgtctgct

SEQ ID NO: 210438 - DNA, 25 bp, Probe Sequence
gctctacttgaatctgatccttacc

SEQ ID NO: 210439 - DNA, 25 bp, Probe Sequence
gctcgacatggattacagagtcttg

SEQ ID NO: 210440 - DNA, 25 bp, Probe Sequence
gctagacatctgctaaaatgcttgc

SEQ ID NO: 210441 - DNA, 25 bp, Probe Sequence
gctagactgtgtctgaatcatgtct

SEQ ID NO: 210442 - DNA, 25 bp, Probe Sequence
gctcccattgtacagcatgctatct

SEQ ID NO: 210443 - DNA, 25 bp, Probe Sequence
gctctgcgtttacaggcttgtgact

SEQ ID NO: 210444 - DNA, 25 bp, Probe Sequence
gctcgtgtaatagagagtgttgctc

SEQ ID NO: 210445 - DNA, 25 bp, Probe Sequence
gctcaggtcttaggggtgtcatgct

SEQ ID NO: 210446 - DNA, 25 bp, Probe Sequence
gctcaggtcaaatgtgtggggctgg

SEQ ID NO: 210447 - DNA, 25 bp, Probe Sequence
gctcaggacaaagggcaggtggggc

SEQ ID NO: 210448 - DNA, 25 bp, Probe Sequence
gctaataacaaccacacattgggcc

SEQ ID NO: 210449 - DNA, 25 bp, Probe Sequence
gctcatcatacagaccaccatatgt

SEQ ID NO: 210450 - DNA, 25 bp, Probe Sequence
gctctgaatcaaacccactgatgcc

SEQ ID NO: 210451 - DNA, 25 bp, Probe Sequence
gctctgagaagcacagctacctgcc

SEQ ID NO: 210452 - DNA, 25 bp, Probe Sequence
gctctgagccagttcagtacctgga

SEQ ID NO: 210453 - DNA, 25 bp, Probe Sequence
gctctgagccagttcagtacctgga

SEQ ID NO: 210454 - DNA, 25 bp, Probe Sequence
gctctgaccaagcagacatcctgac

SEQ ID NO: 210455 - DNA, 25 bp, Probe Sequence
gcttgaccgaaggatttctgacaga

SEQ ID NO: 210456 - DNA, 25 bp, Probe Sequence
gcttgacctggggcaattacataca

SEQ ID NO: 210457 - DNA, 25 bp, Probe Sequence
gctataccttaggttaccataactt

SEQ ID NO: 210458 - DNA, 25 bp, Probe Sequence
gctcagagcagcaggtgttacccaa

SEQ ID NO: 210459 - DNA, 25 bp, Probe Sequence
gctcagagatctaagctgctttcca

SEQ ID NO: 210460 - DNA, 25 bp, Probe Sequence
gctcgagcaattggctctgcttcag

SEQ ID NO: 210461 - DNA, 25 bp, Probe Sequence
gctagagacattgccggtatgcgag

SEQ ID NO: 210462 - DNA, 25 bp, Probe Sequence
gctaagactgggtcctttggagtta

SEQ ID NO: 210463 - DNA, 25 bp, Probe Sequence
gctaagaatgggccctttgcccagc

SEQ ID NO: 210464 - DNA, 25 bp, Probe Sequence
gctaggtttgggatttcttcagttc

SEQ ID NO: 210465 - DNA, 25 bp, Probe Sequence
gctcatgtttttcttttctgtagga

SEQ ID NO: 210466 - DNA, 25 bp, Probe Sequence
gctcagttttgttttgttttggcag

SEQ ID NO: 210467 - DNA, 25 bp, Probe Sequence
gctcagttttgttttgttttggcag

SEQ ID NO: 210468 - DNA, 25 bp, Probe Sequence
gctctttcttgctgttttaatgtgg

SEQ ID NO: 210469 - DNA, 25 bp, Probe Sequence
gctctttcttgctgttttaatgtgg

SEQ ID NO: 210470 - DNA, 25 bp, Probe Sequence
gctctttctctgttggttatatagt

SEQ ID NO: 210471 - DNA, 25 bp, Probe Sequence
gctactttcccagggctatatggca

SEQ ID NO: 210472 - DNA, 25 bp, Probe Sequence
gctcactggtccggaggttatgtct

SEQ ID NO: 210473 - DNA, 25 bp, Probe Sequence
gctcccactccatgaggtatttcag

SEQ ID NO: 210474 - DNA, 25 bp, Probe Sequence
gctcccactccatgaggtatttctt

SEQ ID NO: 210475 - DNA, 25 bp, Probe Sequence
gctcattaatcctgggagtctttgt

SEQ ID NO: 210476 - DNA, 25 bp, Probe Sequence
gctcaaattcttcgaaagtggttgg

SEQ ID NO: 210477 - DNA, 25 bp, Probe Sequence
gctaccatttccttaaggtgttgag

SEQ ID NO: 210478 - DNA, 25 bp, Probe Sequence
gctcacctctagccttaaggggggc

SEQ ID NO: 210479 - DNA, 25 bp, Probe Sequence
gctccctcatcagcgaacagtgggt

SEQ ID NO: 210480 - DNA, 25 bp, Probe Sequence
gctccctcatcagcgaacagtgggt

SEQ ID NO: 210481 - DNA, 25 bp, Probe Sequence
gctccctcatcagcgaacagtgggt

SEQ ID NO: 210482 - DNA, 25 bp, Probe Sequence
gctccctcatcagcgaacagtgggt

SEQ ID NO: 210483 - DNA, 25 bp, Probe Sequence
gctccctcatcagcgaacagtgggt

SEQ ID NO: 210484 - DNA, 25 bp, Probe Sequence
gctaccacatgacagacacaaggct

SEQ ID NO: 210485 - DNA, 25 bp, Probe Sequence
gctcccaatgtcttacgagatggct

SEQ ID NO: 210486 - DNA, 25 bp, Probe Sequence
gctacgagcgtctcctgaagatgca

SEQ ID NO: 210487 - DNA, 25 bp, Probe Sequence
gctaacgggatatgctgagaatgag

SEQ ID NO: 210488 - DNA, 25 bp, Probe Sequence
gctcagtcagagattaggaaatagt

SEQ ID NO: 210489 - DNA, 25 bp, Probe Sequence
gctcattaagaagtgcagcaggtta

SEQ ID NO: 210490 - DNA, 25 bp, Probe Sequence
gctctctggattagtgcgggtatag

SEQ ID NO: 210491 - DNA, 25 bp, Probe Sequence
gctctgtgcgggcatcgtggtaatg

SEQ ID NO: 210492 - DNA, 25 bp, Probe Sequence
gctctgagctggagacggcgatgga

SEQ ID NO: 210493 - DNA, 25 bp, Probe Sequence
gctctggttttgtggaatgagcaga

SEQ ID NO: 210494 - DNA, 25 bp, Probe Sequence
gctcgagatcttcgcgggaagaaga

SEQ ID NO: 210495 - DNA, 25 bp, Probe Sequence
gctctgagagcttacgtaaaagaac

SEQ ID NO: 210496 - DNA, 25 bp, Probe Sequence
gctcgcagactgtgctataaactgc

SEQ ID NO: 210497 - DNA, 25 bp, Probe Sequence
gcttcagattttcataaacgactta

SEQ ID NO: 210498 - DNA, 25 bp, Probe Sequence
gctctagttcttaacaaccgacact

SEQ ID NO: 210499 - DNA, 25 bp, Probe Sequence
gctctgagttctgtgaccaaagcca

SEQ ID NO: 210500 - DNA, 25 bp, Probe Sequence
gctctgtgtttcaataccatccact

SEQ ID NO: 210501 - DNA, 25 bp, Probe Sequence
gctctgtatttatcagcgatgcccc

SEQ ID NO: 210502 - DNA, 25 bp, Probe Sequence
gctcagtattgcctggcctgagacc

SEQ ID NO: 210503 - DNA, 25 bp, Probe Sequence
gctcaatgagtgcctacagcagaaa

SEQ ID NO: 210504 - DNA, 25 bp, Probe Sequence
gctcaatgctgtagagctcagcagc

SEQ ID NO: 210505 - DNA, 25 bp, Probe Sequence
gctcaactgtgagctcgacaggttg

SEQ ID NO: 210506 - DNA, 25 bp, Probe Sequence
gctcccatgtaatagcacagttatt

SEQ ID NO: 210507 - DNA, 25 bp, Probe Sequence
gctcaccagtaacacctgtgtgtgt

SEQ ID NO: 210508 - DNA, 25 bp, Probe Sequence
gctcagggagaacggccagagtggc

SEQ ID NO: 210509 - DNA, 25 bp, Probe Sequence
gctcaagcagcacagaggaaggggc

SEQ ID NO: 210510 - DNA, 25 bp, Probe Sequence
gctcatcagccaggagagctgtgag

SEQ ID NO: 210511 - DNA, 25 bp, Probe Sequence
gctcatcgcaccaatattgcagact

SEQ ID NO: 210512 - DNA, 25 bp, Probe Sequence
gctcatggctagcatatgggcactt

SEQ ID NO: 210513 - DNA, 25 bp, Probe Sequence
gctcatgagcgtctgtggagccatc

SEQ ID NO: 210514 - DNA, 25 bp, Probe Sequence
gctctgatgcgaaggggcagaactc

SEQ ID NO: 210515 - DNA, 25 bp, Probe Sequence
gctctgtctgattgaggcgcagacc

SEQ ID NO: 210516 - DNA, 25 bp, Probe Sequence
gctctgctgtgatgggctaggcact

SEQ ID NO: 210517 - DNA, 25 bp, Probe Sequence
gctctgtagatgtgcgcatgatcga

SEQ ID NO: 210518 - DNA, 25 bp, Probe Sequence
gctctgtggagatggctgtcgcagt

SEQ ID NO: 210519 - DNA, 25 bp, Probe Sequence
gctagagggactggtgtccttccaa

SEQ ID NO: 210520 - DNA, 25 bp, Probe Sequence
gctcgagagggctggtccttattta

SEQ ID NO: 210521 - DNA, 25 bp, Probe Sequence
gctctggagagggggttgtctttct

SEQ ID NO: 210522 - DNA, 25 bp, Probe Sequence
gctcaagggcagcggatttgttgtt

SEQ ID NO: 210523 - DNA, 25 bp, Probe Sequence
gctcaattggccagacatttaatgt

SEQ ID NO: 210524 - DNA, 25 bp, Probe Sequence
gctacttagcctcaagacaactgtc

SEQ ID NO: 210525 - DNA, 25 bp, Probe Sequence
gctactcaagcctgcaaaacctttt

SEQ ID NO: 210526 - DNA, 25 bp, Probe Sequence
gctctccagaggtgaaaggctattg

SEQ ID NO: 210527 - DNA, 25 bp, Probe Sequence
gctaccagctatgccaaaccttggc

SEQ ID NO: 210528 - DNA, 25 bp, Probe Sequence
gctaagagcttcgtgctgaacctgg

SEQ ID NO: 210529 - DNA, 25 bp, Probe Sequence
gctcaatcagttgttggagcactga

SEQ ID NO: 210530 - DNA, 25 bp, Probe Sequence
gctcaacagattgccaaggacatgg

SEQ ID NO: 210531 - DNA, 25 bp, Probe Sequence
gctcaaaacccttatggaatgtgtt

SEQ ID NO: 210532 - DNA, 25 bp, Probe Sequence
gctcataagagtctcaatggagttt

SEQ ID NO: 210533 - DNA, 25 bp, Probe Sequence
gctcaagtgtctatacaggaggctt

SEQ ID NO: 210534 - DNA, 25 bp, Probe Sequence
gctaatgtgtaaatggcaaaggtgt

SEQ ID NO: 210535 - DNA, 25 bp, Probe Sequence
gctacttggaattggaaatcgcctg

SEQ ID NO: 210536 - DNA, 25 bp, Probe Sequence
gctacaaggatcttggaccaggctc

SEQ ID NO: 210537 - DNA, 25 bp, Probe Sequence
gctaacgagatactgcaggcataac

SEQ ID NO: 210538 - DNA, 25 bp, Probe Sequence
gctcaaccaatataggatatagtaa

SEQ ID NO: 210539 - DNA, 25 bp, Probe Sequence
gctacatccagaattagtttgagga

SEQ ID NO: 210540 - DNA, 25 bp, Probe Sequence
gctcatatactttctagttatcaga

SEQ ID NO: 210541 - DNA, 25 bp, Probe Sequence
gctctgacactttcagttctatgaa

SEQ ID NO: 210542 - DNA, 25 bp, Probe Sequence
gctctcatgactatgcagtttctaa

SEQ ID NO: 210543 - DNA, 25 bp, Probe Sequence
gctcttaccattccttttgatcagc

SEQ ID NO: 210544 - DNA, 25 bp, Probe Sequence
gctaatgaccaacctgtttctacct

SEQ ID NO: 210545 - DNA, 25 bp, Probe Sequence
gctactgacccagagcatgtttacc

SEQ ID NO: 210546 - DNA, 25 bp, Probe Sequence
gctcacccaggaacaagtatctgac

SEQ ID NO: 210547 - DNA, 25 bp, Probe Sequence
gctcacctcactaaccagtatatgc

SEQ ID NO: 210548 - DNA, 25 bp, Probe Sequence
gctcacctcactaaccagtatatgc

SEQ ID NO: 210549 - DNA, 25 bp, Probe Sequence
gctacactgactaccgagttggaac

SEQ ID NO: 210550 - DNA, 25 bp, Probe Sequence
gctacctcctggagatttccagaac

SEQ ID NO: 210551 - DNA, 25 bp, Probe Sequence
gctacaaccaggaggtgggccagac

SEQ ID NO: 210552 - DNA, 25 bp, Probe Sequence
gctaccaccgcgttcgggtgtagaa

SEQ ID NO: 210553 - DNA, 25 bp, Probe Sequence
gctaccaaccagaccaggacttaat

SEQ ID NO: 210554 - DNA, 25 bp, Probe Sequence
gctaaaaccgtggcttgttgatgac

SEQ ID NO: 210555 - DNA, 25 bp, Probe Sequence
gctagtactttgtccattttatgaa

SEQ ID NO: 210556 - DNA, 25 bp, Probe Sequence
gctctgtgccagttaagatttttaa

SEQ ID NO: 210557 - DNA, 25 bp, Probe Sequence
gctctgtgccagttaagatttttaa

SEQ ID NO: 210558 - DNA, 25 bp, Probe Sequence
gctctgtccagaattgcaggtcttt

SEQ ID NO: 210559 - DNA, 25 bp, Probe Sequence
gctctgtagcagaaactgagctccg

SEQ ID NO: 210560 - DNA, 25 bp, Probe Sequence
gctctctgagagaatcactcaattc

SEQ ID NO: 210561 - DNA, 25 bp, Probe Sequence
gctctgctgagaatgtacagtttgc

SEQ ID NO: 210562 - DNA, 25 bp, Probe Sequence
gctcttagcacactcacagatgttt

SEQ ID NO: 210563 - DNA, 25 bp, Probe Sequence
gctcttggacacacagtgtcttcct

SEQ ID NO: 210564 - DNA, 25 bp, Probe Sequence
gctcttaaactgtgtgttctccatg

SEQ ID NO: 210565 - DNA, 25 bp, Probe Sequence
gcttccaagaggtaagtcttcctgg

SEQ ID NO: 210566 - DNA, 25 bp, Probe Sequence
gcttcgaagcgaaaagtcctaatag

SEQ ID NO: 210567 - DNA, 25 bp, Probe Sequence
gcttcgaagcgaaaagtcctaatag

SEQ ID NO: 210568 - DNA, 25 bp, Probe Sequence
gctaccggcagaaggactcctatat

SEQ ID NO: 210569 - DNA, 25 bp, Probe Sequence
gctaccgtggggaagtgactaatat

SEQ ID NO: 210570 - DNA, 25 bp, Probe Sequence
gctaccgtggtggagtgaagtcagt

SEQ ID NO: 210571 - DNA, 25 bp, Probe Sequence
gctaccgtctgggacagtatactat

SEQ ID NO: 210572 - DNA, 25 bp, Probe Sequence
gctagtttctggtgaattattcatt

SEQ ID NO: 210573 - DNA, 25 bp, Probe Sequence
gcttgtttggcttgggatttttccg

SEQ ID NO: 210574 - DNA, 25 bp, Probe Sequence
gctctttattcttatttttttcctg

SEQ ID NO: 210575 - DNA, 25 bp, Probe Sequence
gctttaaatctaccattttactagt

SEQ ID NO: 210576 - DNA, 25 bp, Probe Sequence
gctacttaatctatatgtttccttg

SEQ ID NO: 210577 - DNA, 25 bp, Probe Sequence
gctacacgtagcctttttacttttg

SEQ ID NO: 210578 - DNA, 25 bp, Probe Sequence
gctacctggatccatcattttactg

SEQ ID NO: 210579 - DNA, 25 bp, Probe Sequence
gctaatgctagaccagtatttaagg

SEQ ID NO: 210580 - DNA, 25 bp, Probe Sequence
gctcacattcgtcagtgactccaac

SEQ ID NO: 210581 - DNA, 25 bp, Probe Sequence
gctctggtggatgattatctgctaa

SEQ ID NO: 210582 - DNA, 25 bp, Probe Sequence
gctcggtgatgtgattctgctgcaa

SEQ ID NO: 210583 - DNA, 25 bp, Probe Sequence
gctcggctgatttttgtttactttt

SEQ ID NO: 210584 - DNA, 25 bp, Probe Sequence
gctaggatttcaaatgtttacttgt

SEQ ID NO: 210585 - DNA, 25 bp, Probe Sequence
gctcaggaaattcaccattccactt

SEQ ID NO: 210586 - DNA, 25 bp, Probe Sequence
gctaggtagttcaatcctctgtccg

SEQ ID NO: 210587 - DNA, 25 bp, Probe Sequence
gctacagtgagtcaaaatcctgcca

SEQ ID NO: 210588 - DNA, 25 bp, Probe Sequence
gcataaggcaggtaaactcttccag

SEQ ID NO: 210589 - DNA, 25 bp, Probe Sequence
gctagggcagggaccaaatgaacag

SEQ ID NO: 210590 - DNA, 25 bp, Probe Sequence
gctaggagcctgccagaacaaggcc

SEQ ID NO: 210591 - DNA, 25 bp, Probe Sequence
gctcttgagcccttgaaatatggcc

SEQ ID NO: 210592 - DNA, 25 bp, Probe Sequence
gcttcggcgccagtgaaataccact

SEQ ID NO: 210593 - DNA, 25 bp, Probe Sequence
gctacttcccagtcataataataat

SEQ ID NO: 210594 - DNA, 25 bp, Probe Sequence
gctcaccccaaagtattaaaagtag

SEQ ID NO: 210595 - DNA, 25 bp, Probe Sequence
gctcttgccacaaaatcctaaaagt

SEQ ID NO: 210596 - DNA, 25 bp, Probe Sequence
gctctatctcacaaagagactaaaa

SEQ ID NO: 210597 - DNA, 25 bp, Probe Sequence
gcttactacccaacttcaaaactag

SEQ ID NO: 210598 - DNA, 25 bp, Probe Sequence
gctaacctcccaagtcttaaagcag

SEQ ID NO: 210599 - DNA, 25 bp, Probe Sequence
gctaaaccccatctctacaaaaaat

SEQ ID NO: 210600 - DNA, 25 bp, Probe Sequence
gctaaaccctgtctctactaaaaat

SEQ ID NO: 210601 - DNA, 25 bp, Probe Sequence
gctaaaccctggtacatcgtatata

SEQ ID NO: 210602 - DNA, 25 bp, Probe Sequence
gctcaaatcccgatgcaatcttaaa

SEQ ID NO: 210603 - DNA, 25 bp, Probe Sequence
gctaaatttcgtagcactgtttaca

SEQ ID NO: 210604 - DNA, 25 bp, Probe Sequence
gctaaattacaattgtcatttataa

SEQ ID NO: 210605 - DNA, 25 bp, Probe Sequence
gctaagtatatatctgagcactggt

SEQ ID NO: 210606 - DNA, 25 bp, Probe Sequence
gctaaggatgactctggtcagagat

SEQ ID NO: 210607 - DNA, 25 bp, Probe Sequence
gctaattggatttctctgtgcatga

SEQ ID NO: 210608 - DNA, 25 bp, Probe Sequence
gctactgagtcatgatccttgctga

SEQ ID NO: 210609 - DNA, 25 bp, Probe Sequence
gctcatccagtctgacctcagaaga

SEQ ID NO: 210610 - DNA, 25 bp, Probe Sequence
gctcaccagcagtgaatccaaaaaa

SEQ ID NO: 210611 - DNA, 25 bp, Probe Sequence
gctcaaagctgatcttgccacacag

SEQ ID NO: 210612 - DNA, 25 bp, Probe Sequence
gctaacgcttccagaccgcggccta

SEQ ID NO: 210613 - DNA, 25 bp, Probe Sequence
gctagaagctgtctaggtccgtccg

SEQ ID NO: 210614 - DNA, 25 bp, Probe Sequence
gctagtggctgacaaggaccttctg

SEQ ID NO: 210615 - DNA, 25 bp, Probe Sequence
gctcaggtctgcttggaggatgcct

SEQ ID NO: 210616 - DNA, 25 bp, Probe Sequence
gctaggcaagcaggaggtgatccga

SEQ ID NO: 210617 - DNA, 25 bp, Probe Sequence
gctcttgagacaggaggcttgccga

SEQ ID NO: 210618 - DNA, 25 bp, Probe Sequence
gctctgataagaggaggctcacttg

SEQ ID NO: 210619 - DNA, 25 bp, Probe Sequence
gctctactgacgggagctgcactgt

SEQ ID NO: 210620 - DNA, 25 bp, Probe Sequence
gctctgcacagaagggcctgcaagt

SEQ ID NO: 210621 - DNA, 25 bp, Probe Sequence
gctcatgaagacagccctcaaggaa

SEQ ID NO: 210622 - DNA, 25 bp, Probe Sequence
gctctgaacatcgcccaaagatcaa

SEQ ID NO: 210623 - DNA, 25 bp, Probe Sequence
gctctgcaattcgttcccaagagaa

SEQ ID NO: 210624 - DNA, 25 bp, Probe Sequence
gctaaacttttggccaagagaatga

SEQ ID NO: 210625 - DNA, 25 bp, Probe Sequence
gctaaccactcgctctaaagcaata

SEQ ID NO: 210626 - DNA, 25 bp, Probe Sequence
gctcaaccctcatatttcaagacat

SEQ ID NO: 210627 - DNA, 25 bp, Probe Sequence
gctaatggcctattatttatttcac

SEQ ID NO: 210628 - DNA, 25 bp, Probe Sequence
gctcaatgcctggaatattaattaa

SEQ ID NO: 210629 - DNA, 25 bp, Probe Sequence
gctcaaggatccaatcaaccatcat

SEQ ID NO: 210630 - DNA, 25 bp, Probe Sequence
gctctctggtccatgaactcatttc

SEQ ID NO: 210631 - DNA, 25 bp, Probe Sequence
gctcttggtcatgtgaactgcacga

SEQ ID NO: 210632 - DNA, 25 bp, Probe Sequence
gctcttggtcatgtgaactgcacga

SEQ ID NO: 210633 - DNA, 25 bp, Probe Sequence
gctcttggtcatgtgaactgcacga

SEQ ID NO: 210634 - DNA, 25 bp, Probe Sequence
gctcttggtcatgtgaactgcacga

SEQ ID NO: 210635 - DNA, 25 bp, Probe Sequence
gctcttggtcatgtgaactgcacga

SEQ ID NO: 210636 - DNA, 25 bp, Probe Sequence
gctatggaggtggtgaaattcgtga

SEQ ID NO: 210637 - DNA, 25 bp, Probe Sequence
gctcacgaggtggctgaagtaccag

SEQ ID NO: 210638 - DNA, 25 bp, Probe Sequence
gctcactgcgaaggcaggttattag

SEQ ID NO: 210639 - DNA, 25 bp, Probe Sequence
gctactcggactctttattagaaca

SEQ ID NO: 210640 - DNA, 25 bp, Probe Sequence
gcaacttggatatgtttttataaga

SEQ ID NO: 210641 - DNA, 25 bp, Probe Sequence
gctctcttggtaactcctttaaaga

SEQ ID NO: 210642 - DNA, 25 bp, Probe Sequence
gctacaggtcaacttcctgttaaaa

SEQ ID NO: 210643 - DNA, 25 bp, Probe Sequence
gctaatagatcttttaccactaaaa

SEQ ID NO: 210644 - DNA, 25 bp, Probe Sequence
gctaatattacttctgggactttat

SEQ ID NO: 210645 - DNA, 25 bp, Probe Sequence
gctacttatttacttggacttgcat

SEQ ID NO: 210646 - DNA, 25 bp, Probe Sequence
gctctctaatttatcggcagcttct

SEQ ID NO: 210647 - DNA, 25 bp, Probe Sequence
gctctccagcatacatttctggagc

SEQ ID NO: 210648 - DNA, 25 bp, Probe Sequence
gctctctacatacctatcatgtgcc

SEQ ID NO: 210649 - DNA, 25 bp, Probe Sequence
gctcttcaaaggtaatggcccatcg

SEQ ID NO: 210650 - DNA, 25 bp, Probe Sequence
gctttgaaccgtaatcagtcaccag

SEQ ID NO: 210651 - DNA, 25 bp, Probe Sequence
gctctaggacccaattctatagccc

SEQ ID NO: 210652 - DNA, 25 bp, Probe Sequence
gctctagatacagcatttctatgat

SEQ ID NO: 210653 - DNA, 25 bp, Probe Sequence
gctcaagaagcagctctataacatc

SEQ ID NO: 210654 - DNA, 25 bp, Probe Sequence
gctcagtatatctatctttaacaca

SEQ ID NO: 210655 - DNA, 25 bp, Probe Sequence
gctcagtgactgtgttgtgattcat

SEQ ID NO: 210656 - DNA, 25 bp, Probe Sequence
gctcagtcactctgtgtctgatcta

SEQ ID NO: 210657 - DNA, 25 bp, Probe Sequence
gctcatgtgcacgttttctgtttaa

SEQ ID NO: 210658 - DNA, 25 bp, Probe Sequence
gctcattctcgtagctttttaaaaa

SEQ ID NO: 210659 - DNA, 25 bp, Probe Sequence
gctctcttgtgtacttattgtttaa

SEQ ID NO: 210660 - DNA, 25 bp, Probe Sequence
gctcttcttgcttttagctgaatga

SEQ ID NO: 210661 - DNA, 25 bp, Probe Sequence
gctcattcttcttttatgattcata

SEQ ID NO: 210662 - DNA, 25 bp, Probe Sequence
gctaatgtgacttttcagcttatca

SEQ ID NO: 210663 - DNA, 25 bp, Probe Sequence
gctaatgattcatctgaggtttcag

SEQ ID NO: 210664 - DNA, 25 bp, Probe Sequence
gctaatttcaaaaactaccagttct

SEQ ID NO: 210665 - DNA, 25 bp, Probe Sequence
gctcaacccaaaagaaagacagggt

SEQ ID NO: 210666 - DNA, 25 bp, Probe Sequence
gctaccaaaaatgacaaccagggat

SEQ ID NO: 210667 - DNA, 25 bp, Probe Sequence
gctaccaccgaaaagagaacctgga

SEQ ID NO: 210668 - DNA, 25 bp, Probe Sequence
gctaccccgataaactcacaggtgc

SEQ ID NO: 210669 - DNA, 25 bp, Probe Sequence
gctactccgggaacacacagggtgg

SEQ ID NO: 210670 - DNA, 25 bp, Probe Sequence
gctactccgggaacacacagggtgg

SEQ ID NO: 210671 - DNA, 25 bp, Probe Sequence
gctactccgggaacacacagggtgg

SEQ ID NO: 210672 - DNA, 25 bp, Probe Sequence
gctacttcaggaagcgccgaggggc

SEQ ID NO: 210673 - DNA, 25 bp, Probe Sequence
gctacttgggaagcagcggctggag

SEQ ID NO: 210674 - DNA, 25 bp, Probe Sequence
gctacttgggaagcagcggctggag

SEQ ID NO: 210675 - DNA, 25 bp, Probe Sequence
gctacttggagggggagcgggatgc

SEQ ID NO: 210676 - DNA, 25 bp, Probe Sequence
gctaggctgatggggaagggggctg

SEQ ID NO: 210677 - DNA, 25 bp, Probe Sequence
gctaggatgatcgaggttgtttgca

SEQ ID NO: 210678 - DNA, 25 bp, Probe Sequence
gctaggatgatcgaggttgtttgca

SEQ ID NO: 210679 - DNA, 25 bp, Probe Sequence
gctctctagatccactgtggttggc

SEQ ID NO: 210680 - DNA, 25 bp, Probe Sequence
gctcttatggcacagctgtgtatag

SEQ ID NO: 210681 - DNA, 25 bp, Probe Sequence
gctctctgtgaccatcagctttagg

SEQ ID NO: 210682 - DNA, 25 bp, Probe Sequence
gctctctgtgaccatcagctttagg

SEQ ID NO: 210683 - DNA, 25 bp, Probe Sequence
gctctctgtgaccatcagctttagg

SEQ ID NO: 210684 - DNA, 25 bp, Probe Sequence
gctctctgtgaccatcagctttagg

SEQ ID NO: 210685 - DNA, 25 bp, Probe Sequence
gctctctgtgaccatcagctttagg

SEQ ID NO: 210686 - DNA, 25 bp, Probe Sequence
gctctctgtgaccccaatttgagtt

SEQ ID NO: 210687 - DNA, 25 bp, Probe Sequence
gctcttcatacttctattttgaggt

SEQ ID NO: 210688 - DNA, 25 bp, Probe Sequence
gctcatgctataatcctatcatttt

SEQ ID NO: 210689 - DNA, 25 bp, Probe Sequence
gctcatgcctgcaatgctagtgctt

SEQ ID NO: 210690 - DNA, 25 bp, Probe Sequence
gctctcctgcaacttgagtctcagg

SEQ ID NO: 210691 - DNA, 25 bp, Probe Sequence
gctctcccaactattaatgagtttc

SEQ ID NO: 210692 - DNA, 25 bp, Probe Sequence
gcttcccatttgtgtaatatttacc

SEQ ID NO: 210693 - DNA, 25 bp, Probe Sequence
gctatgcctttatggttaagattag

SEQ ID NO: 210694 - DNA, 25 bp, Probe Sequence
gctatgcctgtatggagtctaacat

SEQ ID NO: 210695 - DNA, 25 bp, Probe Sequence
gctaacttgaagtgtgagatgcacc

SEQ ID NO: 210696 - DNA, 25 bp, Probe Sequence
gctacttagaggtgctaatcccgat

SEQ ID NO: 210697 - DNA, 25 bp, Probe Sequence
gctacactaggggatctgaaacttg

SEQ ID NO: 210698 - DNA, 25 bp, Probe Sequence
gctacatcgaggaccttaagtgccg

SEQ ID NO: 210699 - DNA, 25 bp, Probe Sequence
gctacttgaggtcatcagcatggtc

SEQ ID NO: 210700 - DNA, 25 bp, Probe Sequence
gctcttctaggtaaagctgagatca

SEQ ID NO: 210701 - DNA, 25 bp, Probe Sequence
gctcttctaggtaaagctgagatca

SEQ ID NO: 210702 - DNA, 25 bp, Probe Sequence
gctctcgccagggccaaggagatgc

SEQ ID NO: 210703 - DNA, 25 bp, Probe Sequence
gctcacagcccgacgaaaggatgcc

SEQ ID NO: 210704 - DNA, 25 bp, Probe Sequence
gctcagcatgccttgaggggaggag

SEQ ID NO: 210705 - DNA, 25 bp, Probe Sequence
gctactatcctgaggctgagggttt

SEQ ID NO: 210706 - DNA, 25 bp, Probe Sequence
gctaccagctacagcgtggggttgt

SEQ ID NO: 210707 - DNA, 25 bp, Probe Sequence
gctacaccccagcggggtgggttct

SEQ ID NO: 210708 - DNA, 25 bp, Probe Sequence
gctcacccaggacgtgagggtctgg

SEQ ID NO: 210709 - DNA, 25 bp, Probe Sequence
gctcacctagacatgtgttctttgc

SEQ ID NO: 210710 - DNA, 25 bp, Probe Sequence
gctctactaaatttgctactgtttg

SEQ ID NO: 210711 - DNA, 25 bp, Probe Sequence
gctctaatcacaatattaactgttt

SEQ ID NO: 210712 - DNA, 25 bp, Probe Sequence
gctctttcatcttaaacactttcga

SEQ ID NO: 210713 - DNA, 25 bp, Probe Sequence
gctcactttcatttaatccattgtc

SEQ ID NO: 210714 - DNA, 25 bp, Probe Sequence
gctcaatttctaggtcctttgtcta

SEQ ID NO: 210715 - DNA, 25 bp, Probe Sequence
gctcaaacgtgtatcacttttcaaa

SEQ ID NO: 210716 - DNA, 25 bp, Probe Sequence
gctcaatacctggcctcatttaaaa

SEQ ID NO: 210717 - DNA, 25 bp, Probe Sequence
gctcatataattggcctctttggaa

SEQ ID NO: 210718 - DNA, 25 bp, Probe Sequence
gctcttgcttctggggctattggag

SEQ ID NO: 210719 - DNA, 25 bp, Probe Sequence
gctcttgcttctggggctattggag

SEQ ID NO: 210720 - DNA, 25 bp, Probe Sequence
gctcttgcttctggggctattggag

SEQ ID NO: 210721 - DNA, 25 bp, Probe Sequence
gctctctgtatagggccataatgga

SEQ ID NO: 210722 - DNA, 25 bp, Probe Sequence
gctctatgttgaggactcaggtgga

SEQ ID NO: 210723 - DNA, 25 bp, Probe Sequence
gcttagcttgatgaccaggatgtta

SEQ ID NO: 210724 - DNA, 25 bp, Probe Sequence
gcttagtcagctgcccaagaactag

SEQ ID NO: 210725 - DNA, 25 bp, Probe Sequence
gctttaagcaccctagaggactagg

SEQ ID NO: 210726 - DNA, 25 bp, Probe Sequence
gcttctggaaacaggggacaaccga

SEQ ID NO: 210727 - DNA, 25 bp, Probe Sequence
gcttcttgtaaaaacctgaacccag

SEQ ID NO: 210728 - DNA, 25 bp, Probe Sequence
gcttcttgtaaaaacctgaacccag

SEQ ID NO: 210729 - DNA, 25 bp, Probe Sequence
gctctctttgataaaggcactaatc

SEQ ID NO: 210730 - DNA, 25 bp, Probe Sequence
gctcttctgggtaaagcactatgtc

SEQ ID NO: 210731 - DNA, 25 bp, Probe Sequence
gctctcatctgggacatccagcaaa

SEQ ID NO: 210732 - DNA, 25 bp, Probe Sequence
gctcatcattgtggaaggctgccaa

SEQ ID NO: 210733 - DNA, 25 bp, Probe Sequence
gctcatatgtgtgcacgcttggaca

SEQ ID NO: 210734 - DNA, 25 bp, Probe Sequence
gctcatatgtattgcctgttgcttt

SEQ ID NO: 210735 - DNA, 25 bp, Probe Sequence
gctagaggaatggctttgcttgaat

SEQ ID NO: 210736 - DNA, 25 bp, Probe Sequence
gctaagtcaagggttcactgcattt

SEQ ID NO: 210737 - DNA, 25 bp, Probe Sequence
gctaagtcaagggttcactgcattt

SEQ ID NO: 210738 - DNA, 25 bp, Probe Sequence
gctaacttagtcaattccatcttac

SEQ ID NO: 210739 - DNA, 25 bp, Probe Sequence
gctaacttccactaatccattatcc

SEQ ID NO: 210740 - DNA, 25 bp, Probe Sequence
gctaaatctcagtctacaaccttgc

SEQ ID NO: 210741 - DNA, 25 bp, Probe Sequence
gctagaattaccgaggagcctcatc

SEQ ID NO: 210742 - DNA, 25 bp, Probe Sequence
gctaaatccccaggaagtggacttt

SEQ ID NO: 210743 - DNA, 25 bp, Probe Sequence
gctaacctacctgcaaggagagctc

SEQ ID NO: 210744 - DNA, 25 bp, Probe Sequence
gctaacttaatcacagaggtgacat

SEQ ID NO: 210745 - DNA, 25 bp, Probe Sequence
gctaacttatttgggcaggatatac

SEQ ID NO: 210746 - DNA, 25 bp, Probe Sequence
gctcttctagtatcgtgcagtgctt

SEQ ID NO: 210747 - DNA, 25 bp, Probe Sequence
gctttcatgacaaggcccagtcagt

SEQ ID NO: 210748 - DNA, 25 bp, Probe Sequence
gctttaatcaggacaccgtgaggac

SEQ ID NO: 210749 - DNA, 25 bp, Probe Sequence
gctttgagttggaatcggtttgcat

SEQ ID NO: 210750 - DNA, 25 bp, Probe Sequence
gctaatatccattgaatcggtagtc

SEQ ID NO: 210751 - DNA, 25 bp, Probe Sequence
gctacatcgccaaagtccagtgtgc

SEQ ID NO: 210752 - DNA, 25 bp, Probe Sequence
gcatacttgaaggagccctttccca

SEQ ID NO: 210753 - DNA, 25 bp, Probe Sequence
gctaaagaacagagccttccctcag

SEQ ID NO: 210754 - DNA, 25 bp, Probe Sequence
gctaaagaacagagccttccctcag

SEQ ID NO: 210755 - DNA, 25 bp, Probe Sequence
gctaaagagaagatctctgcccttc

SEQ ID NO: 210756 - DNA, 25 bp, Probe Sequence
gctacatagaaaaatccacccctta

SEQ ID NO: 210757 - DNA, 25 bp, Probe Sequence
gctacttaagacaacttgcaccact

SEQ ID NO: 210758 - DNA, 25 bp, Probe Sequence
gctactgctagatatcacttactca

SEQ ID NO: 210759 - DNA, 25 bp, Probe Sequence
gctactctcacagaagtatatcctt

SEQ ID NO: 210760 - DNA, 25 bp, Probe Sequence
gctcactggccagagacattgatgg

SEQ ID NO: 210761 - DNA, 25 bp, Probe Sequence
gctcacttgcaagtacaatcaaggg

SEQ ID NO: 210762 - DNA, 25 bp, Probe Sequence
gctcatttcatgctctgcaaaagga

SEQ ID NO: 210763 - DNA, 25 bp, Probe Sequence
gctaatagctggttcaactgcagga

SEQ ID NO: 210764 - DNA, 25 bp, Probe Sequence
gctcaatagattgctcaaatcaggt

SEQ ID NO: 210765 - DNA, 25 bp, Probe Sequence
gctcaaggacaggctacaatacagg

SEQ ID NO: 210766 - DNA, 25 bp, Probe Sequence
gctaagcacactctccagaacagtg

SEQ ID NO: 210767 - DNA, 25 bp, Probe Sequence
gctaagcccttactagaccaatggg

SEQ ID NO: 210768 - DNA, 25 bp, Probe Sequence
gctttccatttacctgactaaacag

SEQ ID NO: 210769 - DNA, 25 bp, Probe Sequence
gctcttcagtggaccttgagctaat

SEQ ID NO: 210770 - DNA, 25 bp, Probe Sequence
gctcttggtgaaggtatgtgggaga

SEQ ID NO: 210771 - DNA, 25 bp, Probe Sequence
gctcttcgaaggctctggggaggcc

SEQ ID NO: 210772 - DNA, 25 bp, Probe Sequence
gctcttccaaggatatttgggctgc

SEQ ID NO: 210773 - DNA, 25 bp, Probe Sequence
gctcttcctggggacaatgtgggct

SEQ ID NO: 210774 - DNA, 25 bp, Probe Sequence
gctcaatccgttgaacagtcgtgct

SEQ ID NO: 210775 - DNA, 25 bp, Probe Sequence
gctcaattccttacaaaatcttcat

SEQ ID NO: 210776 - DNA, 25 bp, Probe Sequence
gctcaggtctgtttgtaaatcttta

SEQ ID NO: 210777 - DNA, 25 bp, Probe Sequence
gctctttctgattattctaattgtt

SEQ ID NO: 210778 - DNA, 25 bp, Probe Sequence
gctcttcatctaaggtctgagactt

SEQ ID NO: 210779 - DNA, 25 bp, Probe Sequence
gctcttcacttcagctcagtagctt

SEQ ID NO: 210780 - DNA, 25 bp, Probe Sequence
gctctacctcacagctgaaacttta

SEQ ID NO: 210781 - DNA, 25 bp, Probe Sequence
gctaaggctgacagtggaatcttct

SEQ ID NO: 210782 - DNA, 25 bp, Probe Sequence
gctagagcctactgtgaaatcactg

SEQ ID NO: 210783 - DNA, 25 bp, Probe Sequence
gctaaacttgctgctaagtactgaa

SEQ ID NO: 210784 - DNA, 25 bp, Probe Sequence
gctaatgggctagctgtactgacag

SEQ ID NO: 210785 - DNA, 25 bp, Probe Sequence
gctcacttggtgatatgtcctatat

SEQ ID NO: 210786 - DNA, 25 bp, Probe Sequence
gctacttctgtaaagtcagcctcac

SEQ ID NO: 210787 - DNA, 25 bp, Probe Sequence
gctaccatcctaatcagtcagcagt

SEQ ID NO: 210788 - DNA, 25 bp, Probe Sequence
gctagtatcctaaagctgcagagct

SEQ ID NO: 210789 - DNA, 25 bp, Probe Sequence
gctcagattttaaggctgtagcttg

SEQ ID NO: 210790 - DNA, 25 bp, Probe Sequence
gctacatttccaaggtgaagatgtg

SEQ ID NO: 210791 - DNA, 25 bp, Probe Sequence
gctacattgtcctggccaaggactt

SEQ ID NO: 210792 - DNA, 25 bp, Probe Sequence
gctacagtgacctgtaagtggcagt

SEQ ID NO: 210793 - DNA, 25 bp, Probe Sequence
gctacggtatccggaagctacagat

SEQ ID NO: 210794 - DNA, 25 bp, Probe Sequence
gctacggtatccggaagctacagat

SEQ ID NO: 210795 - DNA, 25 bp, Probe Sequence
gctacgggccctagacaatacgatg

SEQ ID NO: 210796 - DNA, 25 bp, Probe Sequence
gtatagggcccctataatcctgctt

SEQ ID NO: 210797 - DNA, 25 bp, Probe Sequence
gctataggtgctacaaaaacacagc

SEQ ID NO: 210798 - DNA, 25 bp, Probe Sequence
gctacagagcttcccaagaagacag

SEQ ID NO: 210799 - DNA, 25 bp, Probe Sequence
gctacagacttggaacaactcacag

SEQ ID NO: 210800 - DNA, 25 bp, Probe Sequence
gctcattattttttgcacactcaca

SEQ ID NO: 210801 - DNA, 25 bp, Probe Sequence
gctcattgatacttaaggcatcttc

SEQ ID NO: 210802 - DNA, 25 bp, Probe Sequence
gctcaggaaatcttacagcacgtgc

SEQ ID NO: 210803 - DNA, 25 bp, Probe Sequence
gctcatgttattctacacacagatc

SEQ ID NO: 210804 - DNA, 25 bp, Probe Sequence
gctcatgttattgttgacatgaatc

SEQ ID NO: 210805 - DNA, 25 bp, Probe Sequence
gctcatgcaatacttttaaggatgc

SEQ ID NO: 210806 - DNA, 25 bp, Probe Sequence
gctcagctactgatttttgtgattt

SEQ ID NO: 210807 - DNA, 25 bp, Probe Sequence
gctcatccctgaatatttgctgaat

SEQ ID NO: 210808 - DNA, 25 bp, Probe Sequence
gctcatccgccagatttgagcagcg

SEQ ID NO: 210809 - DNA, 25 bp, Probe Sequence
gctatgcccccgtatgggcagggac

SEQ ID NO: 210810 - DNA, 25 bp, Probe Sequence
gctaccaacctatttggccgaggca

SEQ ID NO: 210811 - DNA, 25 bp, Probe Sequence
gctaacaaccgctttgagacaggga

SEQ ID NO: 210812 - DNA, 25 bp, Probe Sequence
gctacatattctgctttgaaccgta

SEQ ID NO: 210813 - DNA, 25 bp, Probe Sequence
gctaagttcttgggagacccgttat

SEQ ID NO: 210814 - DNA, 25 bp, Probe Sequence
gctaaattctagtgacccatgtgtc

SEQ ID NO: 210815 - DNA, 25 bp, Probe Sequence
gctaaattcaactagcccctgtttt

SEQ ID NO: 210816 - DNA, 25 bp, Probe Sequence
gctacagatgtatttgagttccgtt

SEQ ID NO: 210817 - DNA, 25 bp, Probe Sequence
gcataagtaatctcctgtcctttgg

SEQ ID NO: 210818 - DNA, 25 bp, Probe Sequence
gctaagcatattttctctaggcttt

SEQ ID NO: 210819 - DNA, 25 bp, Probe Sequence
gctcaagctgatcattccttttttt

SEQ ID NO: 210820 - DNA, 25 bp, Probe Sequence
gctcaactgctaatttctcttggct

SEQ ID NO: 210821 - DNA, 25 bp, Probe Sequence
gctcaatcttgagtttgctttactg

SEQ ID NO: 210822 - DNA, 25 bp, Probe Sequence
gctcactctctggtgctttttagag

SEQ ID NO: 210823 - DNA, 25 bp, Probe Sequence
gctcaagctcgcatgattattaaaa

SEQ ID NO: 210824 - DNA, 25 bp, Probe Sequence
gctaacacagaccattctctactaa

SEQ ID NO: 210825 - DNA, 25 bp, Probe Sequence
gctacaatcatgtatcaattccagg

SEQ ID NO: 210826 - DNA, 25 bp, Probe Sequence
gctacagtgacgccaagtccagtga

SEQ ID NO: 210827 - DNA, 25 bp, Probe Sequence
gctacagtgggaacaggctcaggac

SEQ ID NO: 210828 - DNA, 25 bp, Probe Sequence
gctacagtgaaagcacccaactcca

SEQ ID NO: 210829 - DNA, 25 bp, Probe Sequence
gctacaggacaagcaaacctcagcc

SEQ ID NO: 210830 - DNA, 25 bp, Probe Sequence
gctacaggacaagcaaacctcagcc

SEQ ID NO: 210831 - DNA, 25 bp, Probe Sequence
gctagccaacaagcgtgtgccaagc

SEQ ID NO: 210832 - DNA, 25 bp, Probe Sequence
gctactgcataccagcctgggcaac

SEQ ID NO: 210833 - DNA, 25 bp, Probe Sequence
gctactgcagcggagcacagggttc

SEQ ID NO: 210834 - DNA, 25 bp, Probe Sequence
gctactgcagacgacgagctgagct

SEQ ID NO: 210835 - DNA, 25 bp, Probe Sequence
gctcatctgctgtaatggtgctggt

SEQ ID NO: 210836 - DNA, 25 bp, Probe Sequence
gctcatcaccatcagcggcatggtg

SEQ ID NO: 210837 - DNA, 25 bp, Probe Sequence
gctcatactcataatggcctgttga

SEQ ID NO: 210838 - DNA, 25 bp, Probe Sequence
gctcatccatctagggtgcgtagaa

SEQ ID NO: 210839 - DNA, 25 bp, Probe Sequence
gctaccactaggtggatagtaaatt

SEQ ID NO: 210840 - DNA, 25 bp, Probe Sequence
gctcaccctgggcggagcaaagtat

SEQ ID NO: 210841 - DNA, 25 bp, Probe Sequence
gctcatctttggagggtgccaggta

SEQ ID NO: 210842 - DNA, 25 bp, Probe Sequence
gctcagcttctgataaggtctcagg

SEQ ID NO: 210843 - DNA, 25 bp, Probe Sequence
gcttctatgcatattaggctacgta

SEQ ID NO: 210844 - DNA, 25 bp, Probe Sequence
gcttctggaccttgaccttcagaac

SEQ ID NO: 210845 - DNA, 25 bp, Probe Sequence
gctaaagaacttgccactaaactgg

SEQ ID NO: 210846 - DNA, 25 bp, Probe Sequence
gctaaagaacttctgcacgcaaaag

SEQ ID NO: 210847 - DNA, 25 bp, Probe Sequence
gctatggaaagctttctaccaaagg

SEQ ID NO: 210848 - DNA, 25 bp, Probe Sequence
gctataacagcaacttcccaaaagg

SEQ ID NO: 210849 - DNA, 25 bp, Probe Sequence
gctaagagcatcactgatccctgga

SEQ ID NO: 210850 - DNA, 25 bp, Probe Sequence
gctcaacgacatcgtgattctccag

SEQ ID NO: 210851 - DNA, 25 bp, Probe Sequence
gctcataagtacttgtgtcatccag

SEQ ID NO: 210852 - DNA, 25 bp, Probe Sequence
gctaatactcacatgttctccaatc

SEQ ID NO: 210853 - DNA, 25 bp, Probe Sequence
gctaatccacaattgtatcctatta

SEQ ID NO: 210854 - DNA, 25 bp, Probe Sequence
gctatactccaactttactaaacgg

SEQ ID NO: 210855 - DNA, 25 bp, Probe Sequence
gctaaggctaaagttgatctgaaca

SEQ ID NO: 210856 - DNA, 25 bp, Probe Sequence
gctaaggcatgaaaatctcttgaac

SEQ ID NO: 210857 - DNA, 25 bp, Probe Sequence
gctaagacaggccagtttgtgaatc

SEQ ID NO: 210858 - DNA, 25 bp, Probe Sequence
gctaatgaagcccagcttctgagga

SEQ ID NO: 210859 - DNA, 25 bp, Probe Sequence
gctaaatagctcacgttaggcatga

SEQ ID NO: 210860 - DNA, 25 bp, Probe Sequence
gctacaataatatctgttactcaca

SEQ ID NO: 210861 - DNA, 25 bp, Probe Sequence
gctacttcaagctctttaaatcacc

SEQ ID NO: 210862 - DNA, 25 bp, Probe Sequence
gctacttcaagctcatgtttgaccg

SEQ ID NO: 210863 - DNA, 25 bp, Probe Sequence
gctactcttagctacttagctgagg

SEQ ID NO: 210864 - DNA, 25 bp, Probe Sequence
gctagtagtagatcaatgggcagtg

SEQ ID NO: 210865 - DNA, 25 bp, Probe Sequence
gctatgctagctttcaaacaggaga

SEQ ID NO: 210866 - DNA, 25 bp, Probe Sequence
gctcatgttctacacagacttgtat

SEQ ID NO: 210867 - DNA, 25 bp, Probe Sequence
gctcatcttagaccacagactgact

SEQ ID NO: 210868 - DNA, 25 bp, Probe Sequence
gctcatcactggtcaacagaatgca

SEQ ID NO: 210869 - DNA, 25 bp, Probe Sequence
gctcatcctgctgacagcacaatga

SEQ ID NO: 210870 - DNA, 25 bp, Probe Sequence
gctcatcatcactggccatcagaga

SEQ ID NO: 210871 - DNA, 25 bp, Probe Sequence
gctatcatcacctccatgggatttc

SEQ ID NO: 210872 - DNA, 25 bp, Probe Sequence
gctacatcctactgtgcgtgtatat

SEQ ID NO: 210873 - DNA, 25 bp, Probe Sequence
gctcattccttctggaggacacaca

SEQ ID NO: 210874 - DNA, 25 bp, Probe Sequence
gctacctgcggctggatggaaacta

SEQ ID NO: 210875 - DNA, 25 bp, Probe Sequence
gctacgaggagctggaggagaatta

SEQ ID NO: 210876 - DNA, 25 bp, Probe Sequence
gctacaaggagccagggaagcctca

SEQ ID NO: 210877 - DNA, 25 bp, Probe Sequence
gctcaaagacagcgcatggaagctc

SEQ ID NO: 210878 - DNA, 25 bp, Probe Sequence
gctcaacaaagctgtctgggccaaa

SEQ ID NO: 210879 - DNA, 25 bp, Probe Sequence
gctacagcaaagcccattggccaga

SEQ ID NO: 210880 - DNA, 25 bp, Probe Sequence
gcttgcagaaggtgtgctggacgtg

SEQ ID NO: 210881 - DNA, 25 bp, Probe Sequence
gctcatggacgtgcatgtcttctgc

SEQ ID NO: 210882 - DNA, 25 bp, Probe Sequence
gctcaagacttcattatttgccttt

SEQ ID NO: 210883 - DNA, 25 bp, Probe Sequence
gctcaaaatactaatttcactttgt

SEQ ID NO: 210884 - DNA, 25 bp, Probe Sequence
gctaccaaacacattctcctttgaa

SEQ ID NO: 210885 - DNA, 25 bp, Probe Sequence
gctaaaaccacctaatgctcttatg

SEQ ID NO: 210886 - DNA, 25 bp, Probe Sequence
gctacaaacaatgccacgcttatag

SEQ ID NO: 210887 - DNA, 25 bp, Probe Sequence
gctcaccaaagatccaccatatcaa

SEQ ID NO: 210888 - DNA, 25 bp, Probe Sequence
gctcattctagatcacaaccttcta

SEQ ID NO: 210889 - DNA, 25 bp, Probe Sequence
gctcaccttaaaatcagcccttgat

SEQ ID NO: 210890 - DNA, 25 bp, Probe Sequence
gctcaatgttaagatggcccttgac

SEQ ID NO: 210891 - DNA, 25 bp, Probe Sequence
gctactgtttatgaagctctctaac

SEQ ID NO: 210892 - DNA, 25 bp, Probe Sequence
gctactggttcagcaactgcagaaa

SEQ ID NO: 210893 - DNA, 25 bp, Probe Sequence
gctactgtctccagaacacgaaaat

SEQ ID NO: 210894 - DNA, 25 bp, Probe Sequence
gctacttatcctggtaccagcagaa

SEQ ID NO: 210895 - DNA, 25 bp, Probe Sequence
gctacttcgtcagctaaccagaaac

SEQ ID NO: 210896 - DNA, 25 bp, Probe Sequence
gctcactcccttgctatagcaagct

SEQ ID NO: 210897 - DNA, 25 bp, Probe Sequence
gctcactcttttccaggacagcaat

SEQ ID NO: 210898 - DNA, 25 bp, Probe Sequence
gctcaagttttggaggacatgatca

SEQ ID NO: 210899 - DNA, 25 bp, Probe Sequence
gctaaggatttgaagctggcagact

SEQ ID NO: 210900 - DNA, 25 bp, Probe Sequence
gcttagagatttggggggctctggc

SEQ ID NO: 210901 - DNA, 25 bp, Probe Sequence
gctagaagttgtatgggcacctgcc

SEQ ID NO: 210902 - DNA, 25 bp, Probe Sequence
gctagatactggaaacctaactgca

SEQ ID NO: 210903 - DNA, 25 bp, Probe Sequence
gctagatactggaaacctaactgca

SEQ ID NO: 210904 - DNA, 25 bp, Probe Sequence
gctcagcaagtgcacaagccttact

SEQ ID NO: 210905 - DNA, 25 bp, Probe Sequence
gctcagacagggtgtgctgggcatc

SEQ ID NO: 210906 - DNA, 25 bp, Probe Sequence
gctcaacatgggtagtctgggaaga

SEQ ID NO: 210907 - DNA, 25 bp, Probe Sequence
gctcaacatcgatcaccttggtgaa

SEQ ID NO: 210908 - DNA, 25 bp, Probe Sequence
gctcagtcacgtccacgggggacga

SEQ ID NO: 210909 - DNA, 25 bp, Probe Sequence
gctagtcacagttaccgcgtgtact

SEQ ID NO: 210910 - DNA, 25 bp, Probe Sequence
gctcagtgaagtacacctgtgtggc

SEQ ID NO: 210911 - DNA, 25 bp, Probe Sequence
gctcatctggagccgagccttaggc

SEQ ID NO: 210912 - DNA, 25 bp, Probe Sequence
gctcactggagatgacacgtgcgtg

SEQ ID NO: 210913 - DNA, 25 bp, Probe Sequence
gctaatgagatttacccgtgtgcta

SEQ ID NO: 210914 - DNA, 25 bp, Probe Sequence
gctaatcagtattgaggccggaggg

SEQ ID NO: 210915 - DNA, 25 bp, Probe Sequence
gctacagcgtgacgctggcacggct

SEQ ID NO: 210916 - DNA, 25 bp, Probe Sequence
gctacacctgagccaggctcttgcc

SEQ ID NO: 210917 - DNA, 25 bp, Probe Sequence
gctcaacatataacatggtgctgtg

SEQ ID NO: 210918 - DNA, 25 bp, Probe Sequence
gctcaatgtcaaggcagtgctgtgg

SEQ ID NO: 210919 - DNA, 25 bp, Probe Sequence
gctcacagtcttccagttctggagt

SEQ ID NO: 210920 - DNA, 25 bp, Probe Sequence
gctcaacttctatggtatggactac

SEQ ID NO: 210921 - DNA, 25 bp, Probe Sequence
gctaaattctatttttggtctcatc

SEQ ID NO: 210922 - DNA, 25 bp, Probe Sequence
gctaatttctatttcttgccgagtt

SEQ ID NO: 210923 - DNA, 25 bp, Probe Sequence
gctcaagtttgctgtctttagaatg

SEQ ID NO: 210924 - DNA, 25 bp, Probe Sequence
gctcaggttgtgttccttatggaga

SEQ ID NO: 210925 - DNA, 25 bp, Probe Sequence
gctcagtgctttttgcctttaagaa

SEQ ID NO: 210926 - DNA, 25 bp, Probe Sequence
gctaagcctgatctcctgtaaaaac

SEQ ID NO: 210927 - DNA, 25 bp, Probe Sequence
gctacatagtgtctcactttccaag

SEQ ID NO: 210928 - DNA, 25 bp, Probe Sequence
gctaagagagtcaccatcatgccca

SEQ ID NO: 210929 - DNA, 25 bp, Probe Sequence
gctagagcttgtatccatcactgcc

SEQ ID NO: 210930 - DNA, 25 bp, Probe Sequence
gctagtgcttgggatcgtacatgtt

SEQ ID NO: 210931 - DNA, 25 bp, Probe Sequence
gctcaggcttgaaatcgcattattt

SEQ ID NO: 210932 - DNA, 25 bp, Probe Sequence
gctcaggcttaggctcagattattc

SEQ ID NO: 210933 - DNA, 25 bp, Probe Sequence
gctcagagttctgtcgtgtgcacac

SEQ ID NO: 210934 - DNA, 25 bp, Probe Sequence
gctcagtgtcccattgtggagcgcc

SEQ ID NO: 210935 - DNA, 25 bp, Probe Sequence
gctacgtccgtgtctggaaggtgcc

SEQ ID NO: 210936 - DNA, 25 bp, Probe Sequence
gctacgtccgtgtctggaaggtgcc

SEQ ID NO: 210937 - DNA, 25 bp, Probe Sequence
gctcacacccagcacggaggtgtgc

SEQ ID NO: 210938 - DNA, 25 bp, Probe Sequence
gctcaacccagttacagggtgtttg

SEQ ID NO: 210939 - DNA, 25 bp, Probe Sequence
gctcactccgaattagcggtgtatt

SEQ ID NO: 210940 - DNA, 25 bp, Probe Sequence
gctcagctccaggaaagatggggag

SEQ ID NO: 210941 - DNA, 25 bp, Probe Sequence
gctagagccggacatgcaggggaaa

SEQ ID NO: 210942 - DNA, 25 bp, Probe Sequence
gctagcaggggcatggggcgtgaag

SEQ ID NO: 210943 - DNA, 25 bp, Probe Sequence
gctagaggcctgaggatgagctgga

SEQ ID NO: 210944 - DNA, 25 bp, Probe Sequence
gctaactcctgatctaactgatgaa

SEQ ID NO: 210945 - DNA, 25 bp, Probe Sequence
gctattatccgatccataaagccct

SEQ ID NO: 210946 - DNA, 25 bp, Probe Sequence
gctatgtgacccacgtgcaaatctc

SEQ ID NO: 210947 - DNA, 25 bp, Probe Sequence
gctattgaccactacgtgacacctg

SEQ ID NO: 210948 - DNA, 25 bp, Probe Sequence
gcttggattgcctaactacactgct

SEQ ID NO: 210949 - DNA, 25 bp, Probe Sequence
gcttggattgcctaactacactgct

SEQ ID NO: 210950 - DNA, 25 bp, Probe Sequence
gctagctaggcagtaataaactctg

SEQ ID NO: 210951 - DNA, 25 bp, Probe Sequence
gcttccaaatgttgtaacactcggc

SEQ ID NO: 210952 - DNA, 25 bp, Probe Sequence
gcttagcccaggactttcagacggc

SEQ ID NO: 210953 - DNA, 25 bp, Probe Sequence
gctataccctggtattccgtttgcc

SEQ ID NO: 210954 - DNA, 25 bp, Probe Sequence
gctatgacgcagctgtgatatgcac

SEQ ID NO: 210955 - DNA, 25 bp, Probe Sequence
gctataagcggggtctccggaacca

SEQ ID NO: 210956 - DNA, 25 bp, Probe Sequence
gctaacaggggcgccgtaaagccca

SEQ ID NO: 210957 - DNA, 25 bp, Probe Sequence
gctaatcgggccatccgtagagcgg

SEQ ID NO: 210958 - DNA, 25 bp, Probe Sequence
gctaatcgggccatccgtagagcgg

SEQ ID NO: 210959 - DNA, 25 bp, Probe Sequence
gctactatggaccactccgaagtgt

SEQ ID NO: 210960 - DNA, 25 bp, Probe Sequence
gcatccagatggggaccggagggtc

SEQ ID NO: 210961 - DNA, 25 bp, Probe Sequence
gctacgagagacgcaacgagggtgc

SEQ ID NO: 210962 - DNA, 25 bp, Probe Sequence
gctacgagagtcacaggtagtgggt

SEQ ID NO: 210963 - DNA, 25 bp, Probe Sequence
gctaccaggcctgcaggtttgggca

SEQ ID NO: 210964 - DNA, 25 bp, Probe Sequence
gctaccaggacggagtctactgggc

SEQ ID NO: 210965 - DNA, 25 bp, Probe Sequence
gctaccagcaccataatccagtggg

SEQ ID NO: 210966 - DNA, 25 bp, Probe Sequence
gctaaggtcctgtgacagcagtggt

SEQ ID NO: 210967 - DNA, 25 bp, Probe Sequence
gctaatgattcaatgcgagacaaga

SEQ ID NO: 210968 - DNA, 25 bp, Probe Sequence
gctaatcattgcatgtgcatggaaa

SEQ ID NO: 210969 - DNA, 25 bp, Probe Sequence
gctactgattgctgctattgacaga

SEQ ID NO: 210970 - DNA, 25 bp, Probe Sequence
gctcactgtgagcaatgtgctgaaa

SEQ ID NO: 210971 - DNA, 25 bp, Probe Sequence
gctcactgcttgcactgtgcttagg

SEQ ID NO: 210972 - DNA, 25 bp, Probe Sequence
gctcacaattgtgcattcttagggt

SEQ ID NO: 210973 - DNA, 25 bp, Probe Sequence
gctaggattgtgccatctttaaaat

SEQ ID NO: 210974 - DNA, 25 bp, Probe Sequence
gctatgtgtcagagcatctttgatc

SEQ ID NO: 210975 - DNA, 25 bp, Probe Sequence
gctacagtcatgaacttttggcgtc

SEQ ID NO: 210976 - DNA, 25 bp, Probe Sequence
gctagcagtggcactttatagccac

SEQ ID NO: 210977 - DNA, 25 bp, Probe Sequence
gctagcatatgggcactttacagaa

SEQ ID NO: 210978 - DNA, 25 bp, Probe Sequence
gctataaggccagtcggactgcgac

SEQ ID NO: 210979 - DNA, 25 bp, Probe Sequence
gctactcaggaggttggggcagaat

SEQ ID NO: 210980 - DNA, 25 bp, Probe Sequence
gctactcaggaggttggggcagaat

SEQ ID NO: 210981 - DNA, 25 bp, Probe Sequence
gctactcaggaggttggggcagaat

SEQ ID NO: 210982 - DNA, 25 bp, Probe Sequence
gctactcaggaggttggggcagaat

SEQ ID NO: 210983 - DNA, 25 bp, Probe Sequence
gctagccaggcaaagggggcaatgg

SEQ ID NO: 210984 - DNA, 25 bp, Probe Sequence
gctagtgagtccaagtggtggaaaa

SEQ ID NO: 210985 - DNA, 25 bp, Probe Sequence
gctagctcccctgtgagggcaatga

SEQ ID NO: 210986 - DNA, 25 bp, Probe Sequence
gctcacccacattctatgactggaa

SEQ ID NO: 210987 - DNA, 25 bp, Probe Sequence
gctcagcatccaaatccgataaaga

SEQ ID NO: 210988 - DNA, 25 bp, Probe Sequence
gctcactctaaatcagcaaaagaca

SEQ ID NO: 210989 - DNA, 25 bp, Probe Sequence
gctaagcatatattccaaagaaaat

SEQ ID NO: 210990 - DNA, 25 bp, Probe Sequence
gctagattcatatcctaagtaaaga

SEQ ID NO: 210991 - DNA, 25 bp, Probe Sequence
gctagactcttaccgtcgtggagag

SEQ ID NO: 210992 - DNA, 25 bp, Probe Sequence
gctacaccattactttcttgagaca

SEQ ID NO: 210993 - DNA, 25 bp, Probe Sequence
gctactcacattagatgcatcctgg

SEQ ID NO: 210994 - DNA, 25 bp, Probe Sequence
gctcaatcacaaggtgcatgccatg

SEQ ID NO: 210995 - DNA, 25 bp, Probe Sequence
gctcaaccgaattgctgctcaggag

SEQ ID NO: 210996 - DNA, 25 bp, Probe Sequence
gctcacagtagccatagctgacagc

SEQ ID NO: 210997 - DNA, 25 bp, Probe Sequence
gctcacaatgagcgatctggcagtg

SEQ ID NO: 210998 - DNA, 25 bp, Probe Sequence
gctcactcagtgggtttgatgtggt

SEQ ID NO: 210999 - DNA, 25 bp, Probe Sequence
gctcactcagtgggtttgatgtggt

SEQ ID NO: 211000 - DNA, 25 bp, Probe Sequence
gctaccaggtctgttgagggttcta

SEQ ID NO: 211001 - DNA, 25 bp, Probe Sequence
gctagccagtacgactagggacttc

SEQ ID NO: 211002 - DNA, 25 bp, Probe Sequence
gctaccgcatcaacctgcagatgcg

SEQ ID NO: 211003 - DNA, 25 bp, Probe Sequence
gctagcgacatcactgatgagcaga

SEQ ID NO: 211004 - DNA, 25 bp, Probe Sequence
gctcagcgacttttattgcagatgt

SEQ ID NO: 211005 - DNA, 25 bp, Probe Sequence
gctcacaattgtctctcacagtgta

SEQ ID NO: 211006 - DNA, 25 bp, Probe Sequence
gctacaatctgtgtcatatagttaa

SEQ ID NO: 211007 - DNA, 25 bp, Probe Sequence
gctaaattccgtctgattctaatag

SEQ ID NO: 211008 - DNA, 25 bp, Probe Sequence
gctaagaaccttaatactataaaca

SEQ ID NO: 211009 - DNA, 25 bp, Probe Sequence
gctcaatctacagtttattcatata

SEQ ID NO: 211010 - DNA, 25 bp, Probe Sequence
gctaaataactttcatcatcacata

SEQ ID NO: 211011 - DNA, 25 bp, Probe Sequence
gctcaaaacactacatccacattat

SEQ ID NO: 211012 - DNA, 25 bp, Probe Sequence
gctcaaaagcccagtgtctgtttcc

SEQ ID NO: 211013 - DNA, 25 bp, Probe Sequence
gctaaacctccaagtgtcatgattt

SEQ ID NO: 211014 - DNA, 25 bp, Probe Sequence
gctaaaccattgagatatgaagatt

SEQ ID NO: 211015 - DNA, 25 bp, Probe Sequence
gctaacgacagaacctatgcaagtt

SEQ ID NO: 211016 - DNA, 25 bp, Probe Sequence
gcatagacccagatctcctggttga

SEQ ID NO: 211017 - DNA, 25 bp, Probe Sequence
gctagagaccgagtgtcctcagtat

SEQ ID NO: 211018 - DNA, 25 bp, Probe Sequence
gctaaagtgccagtgtatgtatgtt

SEQ ID NO: 211019 - DNA, 25 bp, Probe Sequence
gctacaagttcatccatggctggtt

SEQ ID NO: 211020 - DNA, 25 bp, Probe Sequence
gctacaagttcatccatggctggtt

SEQ ID NO: 211021 - DNA, 25 bp, Probe Sequence
gctaggagttcaagccatgcctgca

SEQ ID NO: 211022 - DNA, 25 bp, Probe Sequence
gctcaattgttctgatagcactatt

SEQ ID NO: 211023 - DNA, 25 bp, Probe Sequence
gctaggcgtgtttgatgcgctttta

SEQ ID NO: 211024 - DNA, 25 bp, Probe Sequence
gctagtcgatagagcggctttagta

SEQ ID NO: 211025 - DNA, 25 bp, Probe Sequence
gctaggcagaagaggattcccagga

SEQ ID NO: 211026 - DNA, 25 bp, Probe Sequence
gctacacagaagacctatttccgga

SEQ ID NO: 211027 - DNA, 25 bp, Probe Sequence
gctactggaagtaaagcactccgga

SEQ ID NO: 211028 - DNA, 25 bp, Probe Sequence
gctactcgggagactgagaccacgg

SEQ ID NO: 211029 - DNA, 25 bp, Probe Sequence
gctactcgggaggccaaggcacaag

SEQ ID NO: 211030 - DNA, 25 bp, Probe Sequence
gctatccgtggatacagacgcttag

SEQ ID NO: 211031 - DNA, 25 bp, Probe Sequence
gctcacgcctgtaatcccagcactt

SEQ ID NO: 211032 - DNA, 25 bp, Probe Sequence
gctcacacttgtaatcccagcattt

SEQ ID NO: 211033 - DNA, 25 bp, Probe Sequence
gctcacacctataatcccagcaatt

SEQ ID NO: 211034 - DNA, 25 bp, Probe Sequence
gctcacacctataatataggcactt

SEQ ID NO: 211035 - DNA, 25 bp, Probe Sequence
gcttacatctggaatctgaggcatc

SEQ ID NO: 211036 - DNA, 25 bp, Probe Sequence
gctaacgctgcatgatctgtgtgac

SEQ ID NO: 211037 - DNA, 25 bp, Probe Sequence
gctaagggcacagtctgctggagtc

SEQ ID NO: 211038 - DNA, 25 bp, Probe Sequence
gctacaaactcagctgtacagttcg

SEQ ID NO: 211039 - DNA, 25 bp, Probe Sequence
gctaaacacttcagctcaactgtcg

SEQ ID NO: 211040 - DNA, 25 bp, Probe Sequence
gctcacgcaagcatggttaacgtcc

SEQ ID NO: 211041 - DNA, 25 bp, Probe Sequence
gctcaacaaggtcattcagggacac

SEQ ID NO: 211042 - DNA, 25 bp, Probe Sequence
gctcaagtcaggaggccggagatca

SEQ ID NO: 211043 - DNA, 25 bp, Probe Sequence
gctagtgtcagggtacatatgaaat

SEQ ID NO: 211044 - DNA, 25 bp, Probe Sequence
gctagtctcagggtcagtggataag

SEQ ID NO: 211045 - DNA, 25 bp, Probe Sequence
gctagtgcacaggctgtactttagg

SEQ ID NO: 211046 - DNA, 25 bp, Probe Sequence
gctagtgaggtctttcctttgggag

SEQ ID NO: 211047 - DNA, 25 bp, Probe Sequence
gttgaaggtacatcgtttgcaaatg

SEQ ID NO: 211048 - DNA, 25 bp, Probe Sequence
gcttttcctcactcacgtggaaatg

SEQ ID NO: 211049 - DNA, 25 bp, Probe Sequence
gcttttttgcctgtcagaagaagtg

SEQ ID NO: 211050 - DNA, 25 bp, Probe Sequence
gctttgggtacgtgcagcactacgg

SEQ ID NO: 211051 - DNA, 25 bp, Probe Sequence
gctttaggaagttgcccttacaggt

SEQ ID NO: 211052 - DNA, 25 bp, Probe Sequence
gcatttagaggggaccacgggaggg

SEQ ID NO: 211053 - DNA, 25 bp, Probe Sequence
gctaggacgcgggacgcggggagtg

SEQ ID NO: 211054 - DNA, 25 bp, Probe Sequence
gcttgaacccaggaggcggaggttg

SEQ ID NO: 211055 - DNA, 25 bp, Probe Sequence
gcttagcaaacagcggcacgatggg

SEQ ID NO: 211056 - DNA, 25 bp, Probe Sequence
gcttcagcaggagcctggactcatc

SEQ ID NO: 211057 - DNA, 25 bp, Probe Sequence
gctacacacagagatctggcacccc

SEQ ID NO: 211058 - DNA, 25 bp, Probe Sequence
gctcaaacagaaggtcatgacccac

SEQ ID NO: 211059 - DNA, 25 bp, Probe Sequence
gctaacaagaacgcttccatctcaa

SEQ ID NO: 211060 - DNA, 25 bp, Probe Sequence
gctacgcaattctcgattctttgaa

SEQ ID NO: 211061 - DNA, 25 bp, Probe Sequence
gctactgcatatgacaactttgttg

SEQ ID NO: 211062 - DNA, 25 bp, Probe Sequence
gctaatcagatgcgcaacttcctgg

SEQ ID NO: 211063 - DNA, 25 bp, Probe Sequence
gctaatagtgggtatagtgcctgtg

SEQ ID NO: 211064 - DNA, 25 bp, Probe Sequence
gctatgctagggcttggctgtaggt

SEQ ID NO: 211065 - DNA, 25 bp, Probe Sequence
gctatgcatagcctaagagttatag

SEQ ID NO: 211066 - DNA, 25 bp, Probe Sequence
gctagaatgcttcaagaatagaggg

SEQ ID NO: 211067 - DNA, 25 bp, Probe Sequence
gctagagtttatcaacacagaggtg

SEQ ID NO: 211068 - DNA, 25 bp, Probe Sequence
gctacagacttataacagcatagtg

SEQ ID NO: 211069 - DNA, 25 bp, Probe Sequence
gctaagcatatcctagacactgggg

SEQ ID NO: 211070 - DNA, 25 bp, Probe Sequence
gctaagcgaggttatcctgaggtga

SEQ ID NO: 211071 - DNA, 25 bp, Probe Sequence
gctaaccaggctgacaactgagatg

SEQ ID NO: 211072 - DNA, 25 bp, Probe Sequence
gctatgaccattaggcctatctagg

SEQ ID NO: 211073 - DNA, 25 bp, Probe Sequence
gctatgaccattaggcctatttagg

SEQ ID NO: 211074 - DNA, 25 bp, Probe Sequence
gctatgaccattaggcctatttagg

SEQ ID NO: 211075 - DNA, 25 bp, Probe Sequence
gctatgaccattaggcctatttagg

SEQ ID NO: 211076 - DNA, 25 bp, Probe Sequence
gctatgaccattaggcctatttagg

SEQ ID NO: 211077 - DNA, 25 bp, Probe Sequence
gctatgaccattaggcctatttagg

SEQ ID NO: 211078 - DNA, 25 bp, Probe Sequence
gctatgaccattaggcctatttagg

SEQ ID NO: 211079 - DNA, 25 bp, Probe Sequence
gctatgaccattaggcctatttagg

SEQ ID NO: 211080 - DNA, 25 bp, Probe Sequence
gctatgaccattaggcctatttagg

SEQ ID NO: 211081 - DNA, 25 bp, Probe Sequence
gctatgaccattaggcctatttagg

SEQ ID NO: 211082 - DNA, 25 bp, Probe Sequence
gctatgaccattaggcctatttagg

SEQ ID NO: 211083 - DNA, 25 bp, Probe Sequence
gctatgaccattaggcctatttagg

SEQ ID NO: 211084 - DNA, 25 bp, Probe Sequence
gctatgaccattaggcctatttagg

SEQ ID NO: 211085 - DNA, 25 bp, Probe Sequence
gctatgaccattaggcctatttagg

SEQ ID NO: 211086 - DNA, 25 bp, Probe Sequence
gctatgaccattaggcctatttagg

SEQ ID NO: 211087 - DNA, 25 bp, Probe Sequence
gctatgaccattaggcctatttagg

SEQ ID NO: 211088 - DNA, 25 bp, Probe Sequence
gctatgaccattaggcctatttagg

SEQ ID NO: 211089 - DNA, 25 bp, Probe Sequence
gctatgaccattaggcctatttagg

SEQ ID NO: 211090 - DNA, 25 bp, Probe Sequence
gctatgaccattaggcctatttagg

SEQ ID NO: 211091 - DNA, 25 bp, Probe Sequence
gctatgaccattaggcctatttagg

SEQ ID NO: 211092 - DNA, 25 bp, Probe Sequence
gctatgaccattaggcctatttagg

SEQ ID NO: 211093 - DNA, 25 bp, Probe Sequence
gctatgaccattaggcctatttagg

SEQ ID NO: 211094 - DNA, 25 bp, Probe Sequence
gctatgaccattaggcctatttagg

SEQ ID NO: 211095 - DNA, 25 bp, Probe Sequence
gctatgaccattaggcctatttagg

SEQ ID NO: 211096 - DNA, 25 bp, Probe Sequence
gctatgaccattaggcctatttagg

SEQ ID NO: 211097 - DNA, 25 bp, Probe Sequence
gctatgaccattaggcctatttagg

SEQ ID NO: 211098 - DNA, 25 bp, Probe Sequence
gctatgaccattaggcctatttagg

SEQ ID NO: 211099 - DNA, 25 bp, Probe Sequence
gctatgaccattaggcctatttagg

SEQ ID NO: 211100 - DNA, 25 bp, Probe Sequence
gctatgaccattaggcctatttagg

SEQ ID NO: 211101 - DNA, 25 bp, Probe Sequence
gctatgaccattaggcctatttagg

SEQ ID NO: 211102 - DNA, 25 bp, Probe Sequence
gctatgaccattaggcctatttagg

SEQ ID NO: 211103 - DNA, 25 bp, Probe Sequence
gctatgaccattaggcctatttagg

SEQ ID NO: 211104 - DNA, 25 bp, Probe Sequence
gctatgaccattaggcctatttagg

SEQ ID NO: 211105 - DNA, 25 bp, Probe Sequence
gctatgaccattaggcctatttagg

SEQ ID NO: 211106 - DNA, 25 bp, Probe Sequence
gctatgaccattaggcctatttagg

SEQ ID NO: 211107 - DNA, 25 bp, Probe Sequence
gctatgaccattaggcctatttagg

SEQ ID NO: 211108 - DNA, 25 bp, Probe Sequence
gctatgaccattaggcctatttagg

SEQ ID NO: 211109 - DNA, 25 bp, Probe Sequence
gctcaataataaagcctgattctga

SEQ ID NO: 211110 - DNA, 25 bp, Probe Sequence
gctaatgaatatgaagctgtttttc

SEQ ID NO: 211111 - DNA, 25 bp, Probe Sequence
gctagaaacctaactgattcttctc

SEQ ID NO: 211112 - DNA, 25 bp, Probe Sequence
gctaggcaccctaatctgttttatc

SEQ ID NO: 211113 - DNA, 25 bp, Probe Sequence
gctatggcacccagattaactgtta

SEQ ID NO: 211114 - DNA, 25 bp, Probe Sequence
gctaggcagtaataaactctgttac

SEQ ID NO: 211115 - DNA, 25 bp, Probe Sequence
gctagaggattgtaaatatctttta

SEQ ID NO: 211116 - DNA, 25 bp, Probe Sequence
gctcaatgcttatgcaaatcatctc

SEQ ID NO: 211117 - DNA, 25 bp, Probe Sequence
gctactgtgtcttcagcaatcaggg

SEQ ID NO: 211118 - DNA, 25 bp, Probe Sequence
gctactgtgtcttcagcaatcaggg

SEQ ID NO: 211119 - DNA, 25 bp, Probe Sequence
gcttatgctgtttccaagggtaggt

SEQ ID NO: 211120 - DNA, 25 bp, Probe Sequence
gcttggccttaatagtgtagatggt

SEQ ID NO: 211121 - DNA, 25 bp, Probe Sequence
gctttcctctaaaaagatcgtgttt

SEQ ID NO: 211122 - DNA, 25 bp, Probe Sequence
gctacaccattaagaatatgtcctt

SEQ ID NO: 211123 - DNA, 25 bp, Probe Sequence
gctacacaatctacgacacgtccac

SEQ ID NO: 211124 - DNA, 25 bp, Probe Sequence
gctacagaggccacacatggtccag

SEQ ID NO: 211125 - DNA, 25 bp, Probe Sequence
gctaagcaagctaaccttatcctgc

SEQ ID NO: 211126 - DNA, 25 bp, Probe Sequence
gctaacaagtattctctaaacacct

SEQ ID NO: 211127 - DNA, 25 bp, Probe Sequence
gctaagagaatcactctccttacct

SEQ ID NO: 211128 - DNA, 25 bp, Probe Sequence
gagaaggagtcgccactccttaccc

SEQ ID NO: 211129 - DNA, 25 bp, Probe Sequence
gcagaagggtggacctgccttactc

SEQ ID NO: 211130 - DNA, 25 bp, Probe Sequence
gctaagggaggcatctctgttacca

SEQ ID NO: 211131 - DNA, 25 bp, Probe Sequence
gctaaggggagaaatcagtaacact

SEQ ID NO: 211132 - DNA, 25 bp, Probe Sequence
gctagggtgggaagctggtgagcca

SEQ ID NO: 211133 - DNA, 25 bp, Probe Sequence
gctagaggcttttattagaagccat

SEQ ID NO: 211134 - DNA, 25 bp, Probe Sequence
gcttagtctgttttctaaagccagg

SEQ ID NO: 211135 - DNA, 25 bp, Probe Sequence
gcttgactctgttattcggaaaggg

SEQ ID NO: 211136 - DNA, 25 bp, Probe Sequence
gcttagttttcttggggccagggct

SEQ ID NO: 211137 - DNA, 25 bp, Probe Sequence
gcttggtttatctggtgcaaaggcc

SEQ ID NO: 211138 - DNA, 25 bp, Probe Sequence
gcttggtttataggcgcatgccacc

SEQ ID NO: 211139 - DNA, 25 bp, Probe Sequence
gcttgagtttgaacgccatgaccct

SEQ ID NO: 211140 - DNA, 25 bp, Probe Sequence
gctacagtttagtccgcatgatctc

SEQ ID NO: 211141 - DNA, 25 bp, Probe Sequence
gctacagtgtctcgatgccataatc

SEQ ID NO: 211142 - DNA, 25 bp, Probe Sequence
gctacagtgtctcgatgccataatc

SEQ ID NO: 211143 - DNA, 25 bp, Probe Sequence
gctacagatgtggcctccagagggc

SEQ ID NO: 211144 - DNA, 25 bp, Probe Sequence
gctacagattccgttcagtgtggcc

SEQ ID NO: 211145 - DNA, 25 bp, Probe Sequence
gctacacaacaagttcgtggtcatc

SEQ ID NO: 211146 - DNA, 25 bp, Probe Sequence
gctaacaacagaatatccaggtcac

SEQ ID NO: 211147 - DNA, 25 bp, Probe Sequence
gctaaaataaatcgacagtgtctca

SEQ ID NO: 211148 - DNA, 25 bp, Probe Sequence
gctaagccaagaaggaactttccca

SEQ ID NO: 211149 - DNA, 25 bp, Probe Sequence
gcttggaagataagtggttttccca

SEQ ID NO: 211150 - DNA, 25 bp, Probe Sequence
gctaccaaatcaatgtgactatttc

SEQ ID NO: 211151 - DNA, 25 bp, Probe Sequence
gctaccagagaccaagacacattcc

SEQ ID NO: 211152 - DNA, 25 bp, Probe Sequence
gctaccagaccagagcacaagtcct

SEQ ID NO: 211153 - DNA, 25 bp, Probe Sequence
gctactcgaacagatgagctatttt

SEQ ID NO: 211154 - DNA, 25 bp, Probe Sequence
gctacgtaaagattggccttggctt

SEQ ID NO: 211155 - DNA, 25 bp, Probe Sequence
gcttttaaagaaacttggctgctta

SEQ ID NO: 211156 - DNA, 25 bp, Probe Sequence
gctttggaaagatttagttcttggt

SEQ ID NO: 211157 - DNA, 25 bp, Probe Sequence
gctagggaaagttggagctccttta

SEQ ID NO: 211158 - DNA, 25 bp, Probe Sequence
gctagaggaatactctgtcccctgt

SEQ ID NO: 211159 - DNA, 25 bp, Probe Sequence
gctagggactaactgttgctcttgg

SEQ ID NO: 211160 - DNA, 25 bp, Probe Sequence
gctataggacgcagctgttgccatg

SEQ ID NO: 211161 - DNA, 25 bp, Probe Sequence
gctacagtgagccttgattgtgtca

SEQ ID NO: 211162 - DNA, 25 bp, Probe Sequence
gctacgaaatgcttgctcaggctca

SEQ ID NO: 211163 - DNA, 25 bp, Probe Sequence
gctagcgaagaggtgaagcctcctg

SEQ ID NO: 211164 - DNA, 25 bp, Probe Sequence
gcttgccaaggcagaggcctgggct

SEQ ID NO: 211165 - DNA, 25 bp, Probe Sequence
gctagccctaggaaggccaggagcc

SEQ ID NO: 211166 - DNA, 25 bp, Probe Sequence
gctactccagaggctgaggccggag

SEQ ID NO: 211167 - DNA, 25 bp, Probe Sequence
gctacttgagaggctgaggcacgag

SEQ ID NO: 211168 - DNA, 25 bp, Probe Sequence
gctactcgagaggctgagagaggag

SEQ ID NO: 211169 - DNA, 25 bp, Probe Sequence
gctactcgagaggctaaggcaggaa

SEQ ID NO: 211170 - DNA, 25 bp, Probe Sequence
gctactcaggaggctaaggcatgaa

SEQ ID NO: 211171 - DNA, 25 bp, Probe Sequence
gctactcagtgagatgggagatcac

SEQ ID NO: 211172 - DNA, 25 bp, Probe Sequence
gctagtcctgctgatgggcaaagaa

SEQ ID NO: 211173 - DNA, 25 bp, Probe Sequence
gctagctattgcaaatgagggaaga

SEQ ID NO: 211174 - DNA, 25 bp, Probe Sequence
gctacttcgacattgagcggcgtga

SEQ ID NO: 211175 - DNA, 25 bp, Probe Sequence
gctacctggccaaggctgaccagaa

SEQ ID NO: 211176 - DNA, 25 bp, Probe Sequence
gctacctgtgaaagagctgagctga

SEQ ID NO: 211177 - DNA, 25 bp, Probe Sequence
gctacatctgtgtatactgtcctgg

SEQ ID NO: 211178 - DNA, 25 bp, Probe Sequence
gctacacagctgctttgctcaaagc

SEQ ID NO: 211179 - DNA, 25 bp, Probe Sequence
gctactcctcgttacatgacataca

SEQ ID NO: 211180 - DNA, 25 bp, Probe Sequence
gctacatcctcattgttcacagtga

SEQ ID NO: 211181 - DNA, 25 bp, Probe Sequence
gctacccgactgttgcatcagtacc

SEQ ID NO: 211182 - DNA, 25 bp, Probe Sequence
gctaaacctctgtttcatgctaacc

SEQ ID NO: 211183 - DNA, 25 bp, Probe Sequence
gctacaacccatgattattttcctg

SEQ ID NO: 211184 - DNA, 25 bp, Probe Sequence
gctacacacccatattgtgtgttct

SEQ ID NO: 211185 - DNA, 25 bp, Probe Sequence
gctacaatgacagagttggcttaca

SEQ ID NO: 211186 - DNA, 25 bp, Probe Sequence
gctaacagccgcctgtatgtttcaa

SEQ ID NO: 211187 - DNA, 25 bp, Probe Sequence
gctacatcagggtgcgattctatga

SEQ ID NO: 211188 - DNA, 25 bp, Probe Sequence
gctatccagggcttaacctatatga

SEQ ID NO: 211189 - DNA, 25 bp, Probe Sequence
gctactccagggtgacctcagaagt

SEQ ID NO: 211190 - DNA, 25 bp, Probe Sequence
gctaccctcctgtgagagtctgaag

SEQ ID NO: 211191 - DNA, 25 bp, Probe Sequence
gctagccaaacttcaaattctgtca

SEQ ID NO: 211192 - DNA, 25 bp, Probe Sequence
gctaaaacactaggatttatctgca

SEQ ID NO: 211193 - DNA, 25 bp, Probe Sequence
gctaaacatcactctgaatttatga

SEQ ID NO: 211194 - DNA, 25 bp, Probe Sequence
gctaacatcatcttccttattttca

SEQ ID NO: 211195 - DNA, 25 bp, Probe Sequence
gctaactcctgatcgtttctgtaga

SEQ ID NO: 211196 - DNA, 25 bp, Probe Sequence
gctatgaccacttaggcctatttta

SEQ ID NO: 211197 - DNA, 25 bp, Probe Sequence
gctagactgccttgaggctgctgtc

SEQ ID NO: 211198 - DNA, 25 bp, Probe Sequence
gcttgaagcctaccacgatgtcaat

SEQ ID NO: 211199 - DNA, 25 bp, Probe Sequence
gcttgactactgtccaaattcagtc

SEQ ID NO: 211200 - DNA, 25 bp, Probe Sequence
gctatacaagaactaaaccagactg

SEQ ID NO: 211201 - DNA, 25 bp, Probe Sequence
gcttcaaaatagagaatcccacttt

SEQ ID NO: 211202 - DNA, 25 bp, Probe Sequence
gcttacaaaacagggtcaccagtgc

SEQ ID NO: 211203 - DNA, 25 bp, Probe Sequence
gctttcacaaacagtgcttccagtc

SEQ ID NO: 211204 - DNA, 25 bp, Probe Sequence
gctttaaaggctgtgttgctatggc

SEQ ID NO: 211205 - DNA, 25 bp, Probe Sequence
gctataaagcagtatttttcttgac

SEQ ID NO: 211206 - DNA, 25 bp, Probe Sequence
gctacacaagatctgccttttattc

SEQ ID NO: 211207 - DNA, 25 bp, Probe Sequence
gctacctagtttgttagtgcatttg

SEQ ID NO: 211208 - DNA, 25 bp, Probe Sequence
gctacttcctttttcaagtcattca

SEQ ID NO: 211209 - DNA, 25 bp, Probe Sequence
gcttccgccttccaaggagccgtca

SEQ ID NO: 211210 - DNA, 25 bp, Probe Sequence
gcttgcttactctacaagggacagt

SEQ ID NO: 211211 - DNA, 25 bp, Probe Sequence
gctttgtgtccagccggggctgtaa

SEQ ID NO: 211212 - DNA, 25 bp, Probe Sequence
gcttctttctcagtttattggttga

SEQ ID NO: 211213 - DNA, 25 bp, Probe Sequence
gctagcttattcttgtgtacttttt

SEQ ID NO: 211214 - DNA, 25 bp, Probe Sequence
gctagcttattcttgtgtacttttt

SEQ ID NO: 211215 - DNA, 25 bp, Probe Sequence
gctacttgttacctctattttttgt

SEQ ID NO: 211216 - DNA, 25 bp, Probe Sequence
gctacttgctaaagttctctttctt

SEQ ID NO: 211217 - DNA, 25 bp, Probe Sequence
gctactgtctagagcttgtctcaat

SEQ ID NO: 211218 - DNA, 25 bp, Probe Sequence
gctactgtttgaatgtattccctcc

SEQ ID NO: 211219 - DNA, 25 bp, Probe Sequence
gctatctgtcttttgctgatctaca

SEQ ID NO: 211220 - DNA, 25 bp, Probe Sequence
gctatttctctgtatctatgcatca

SEQ ID NO: 211221 - DNA, 25 bp, Probe Sequence
gctaaactgtcattgtgcatctctg

SEQ ID NO: 211222 - DNA, 25 bp, Probe Sequence
gctaaactgtcatattgctgtcttg

SEQ ID NO: 211223 - DNA, 25 bp, Probe Sequence
gctatgccactgttgaatttttccc

SEQ ID NO: 211224 - DNA, 25 bp, Probe Sequence
gctatggctatcttgtcttttccac

SEQ ID NO: 211225 - DNA, 25 bp, Probe Sequence
gctttgctgtacatcgtattacacc

SEQ ID NO: 211226 - DNA, 25 bp, Probe Sequence
gcttaggctcagattattcttactc

SEQ ID NO: 211227 - DNA, 25 bp, Probe Sequence
gcttgaggctcgttttagtgatacc

SEQ ID NO: 211228 - DNA, 25 bp, Probe Sequence
gctttgcagtcgtgtaattggccca

SEQ ID NO: 211229 - DNA, 25 bp, Probe Sequence
gctttgggctgagctaacaggacca

SEQ ID NO: 211230 - DNA, 25 bp, Probe Sequence
gcatttcccgggacagacaaactgc

SEQ ID NO: 211231 - DNA, 25 bp, Probe Sequence
gcatttcccgggacagacaaactgc

SEQ ID NO: 211232 - DNA, 25 bp, Probe Sequence
gctatccgtctaaacagaaaactgt

SEQ ID NO: 211233 - DNA, 25 bp, Probe Sequence
gctttcgctctaagattaaaaatgc

SEQ ID NO: 211234 - DNA, 25 bp, Probe Sequence
gcttttgctctaaggtcactgagaa

SEQ ID NO: 211235 - DNA, 25 bp, Probe Sequence
gcttttttccaactacggagtgtca

SEQ ID NO: 211236 - DNA, 25 bp, Probe Sequence
gcttaccgcaccattccggagtgta

SEQ ID NO: 211237 - DNA, 25 bp, Probe Sequence
gctagacccaccaactaggtaatgt

SEQ ID NO: 211238 - DNA, 25 bp, Probe Sequence
gctagacctagatgagtcaggataa

SEQ ID NO: 211239 - DNA, 25 bp, Probe Sequence
gctagcacctagcatttcagcagag

SEQ ID NO: 211240 - DNA, 25 bp, Probe Sequence
gctagacctgcaaaacaacaaaata

SEQ ID NO: 211241 - DNA, 25 bp, Probe Sequence
gctacccaatggacacactccaaaa

SEQ ID NO: 211242 - DNA, 25 bp, Probe Sequence
gctaaaatatcactcatccttaaac

SEQ ID NO: 211243 - DNA, 25 bp, Probe Sequence
gctacaagtaacaatcagtctaaaa

SEQ ID NO: 211244 - DNA, 25 bp, Probe Sequence
gctataagtacaatcccccagatca

SEQ ID NO: 211245 - DNA, 25 bp, Probe Sequence
gctactatctaatcatcacccgaag

SEQ ID NO: 211246 - DNA, 25 bp, Probe Sequence
gctatctgattggaaacctgccgac

SEQ ID NO: 211247 - DNA, 25 bp, Probe Sequence
gctacgaacaaaacgcagcgcatgg

SEQ ID NO: 211248 - DNA, 25 bp, Probe Sequence
gctacgaggaacaccggcaagagta

SEQ ID NO: 211249 - DNA, 25 bp, Probe Sequence
gctagctcggaaaatcctacaagag

SEQ ID NO: 211250 - DNA, 25 bp, Probe Sequence
gctactcgcggtcatactcgcggag

SEQ ID NO: 211251 - DNA, 25 bp, Probe Sequence
gctacagcgtggacaaatctctcag

SEQ ID NO: 211252 - DNA, 25 bp, Probe Sequence
gctagagcgtgagaacaccctgttg

SEQ ID NO: 211253 - DNA, 25 bp, Probe Sequence
gctagggctagagcagacccgggta

SEQ ID NO: 211254 - DNA, 25 bp, Probe Sequence
gctatggggagaggacaacacggag

SEQ ID NO: 211255 - DNA, 25 bp, Probe Sequence
gctatgggaaaggccaagctgctgg

SEQ ID NO: 211256 - DNA, 25 bp, Probe Sequence
gctagatagagaggacccgctgcga

SEQ ID NO: 211257 - DNA, 25 bp, Probe Sequence
gctatgatggagcacacctctgtgg

SEQ ID NO: 211258 - DNA, 25 bp, Probe Sequence
gctacatggagaaagctctgtggat

SEQ ID NO: 211259 - DNA, 25 bp, Probe Sequence
gctacggagagctctgctgtgatgg

SEQ ID NO: 211260 - DNA, 25 bp, Probe Sequence
gctacggcctgggctaggtgagctg

SEQ ID NO: 211261 - DNA, 25 bp, Probe Sequence
gctagaggcttgtgtgcacgtgagc

SEQ ID NO: 211262 - DNA, 25 bp, Probe Sequence
gctataaccagtatcagcagtatgc

SEQ ID NO: 211263 - DNA, 25 bp, Probe Sequence
gctatattccagcttgggtgacaga

SEQ ID NO: 211264 - DNA, 25 bp, Probe Sequence
gcatgacgtccgctttggagaacta

SEQ ID NO: 211265 - DNA, 25 bp, Probe Sequence
gctacagccctgactttgagaaact

SEQ ID NO: 211266 - DNA, 25 bp, Probe Sequence
gctacagccctgactttgagaaact

SEQ ID NO: 211267 - DNA, 25 bp, Probe Sequence
gctatgcagacctgtctgtgtgact

SEQ ID NO: 211268 - DNA, 25 bp, Probe Sequence
gctatcagactctaggttgatgcat

SEQ ID NO: 211269 - DNA, 25 bp, Probe Sequence
gctacgatgctggtggtgaagcctt

SEQ ID NO: 211270 - DNA, 25 bp, Probe Sequence
gctacgagctgcctgacggccaggt

SEQ ID NO: 211271 - DNA, 25 bp, Probe Sequence
gctaccagcggtacagagcggtgat

SEQ ID NO: 211272 - DNA, 25 bp, Probe Sequence
gctactcagctgcttaagctggccc

SEQ ID NO: 211273 - DNA, 25 bp, Probe Sequence
gctatctgcactctaaactgcaaac

SEQ ID NO: 211274 - DNA, 25 bp, Probe Sequence
gctacatgacgacaaagctgctaaa

SEQ ID NO: 211275 - DNA, 25 bp, Probe Sequence
gctacgacgacttcaactgcaacat

SEQ ID NO: 211276 - DNA, 25 bp, Probe Sequence
gctacgatggatatgaaatcagtta

SEQ ID NO: 211277 - DNA, 25 bp, Probe Sequence
gcttattggaaatatctcagttagt

SEQ ID NO: 211278 - DNA, 25 bp, Probe Sequence
gctttttaactatccagtcaacttt

SEQ ID NO: 211279 - DNA, 25 bp, Probe Sequence
gctttgttttttcctgcagtcagaa

SEQ ID NO: 211280 - DNA, 25 bp, Probe Sequence
gcttttattcgtcctttgacaaaag

SEQ ID NO: 211281 - DNA, 25 bp, Probe Sequence
gctttatcatctttacccaaataaa

SEQ ID NO: 211282 - DNA, 25 bp, Probe Sequence
gctttttcttatttccaaatacttg

SEQ ID NO: 211283 - DNA, 25 bp, Probe Sequence
gctttattttagtctccttttcagg

SEQ ID NO: 211284 - DNA, 25 bp, Probe Sequence
gctatgtcatatttgggccctattt

SEQ ID NO: 211285 - DNA, 25 bp, Probe Sequence
gctatgctaattaggtgtccacact

SEQ ID NO: 211286 - DNA, 25 bp, Probe Sequence
gctatcataatctttgttcccgttc

SEQ ID NO: 211287 - DNA, 25 bp, Probe Sequence
gctatataaggtcattccctgagtc

SEQ ID NO: 211288 - DNA, 25 bp, Probe Sequence
gctttaaatgctcttcgcaatacat

SEQ ID NO: 211289 - DNA, 25 bp, Probe Sequence
gctttgataagcacttctagaacat

SEQ ID NO: 211290 - DNA, 25 bp, Probe Sequence
gcttttatagactcttagaactgta

SEQ ID NO: 211291 - DNA, 25 bp, Probe Sequence
gctttaatagcctcattacctagga

SEQ ID NO: 211292 - DNA, 25 bp, Probe Sequence
gcttctggtagccacttaaccatac

SEQ ID NO: 211293 - DNA, 25 bp, Probe Sequence
gctatgtggtaatattcattgccat

SEQ ID NO: 211294 - DNA, 25 bp, Probe Sequence
gctagtcgtagtctttagcacacta

SEQ ID NO: 211295 - DNA, 25 bp, Probe Sequence
gcacgtcggtttccttaagacagat

SEQ ID NO: 211296 - DNA, 25 bp, Probe Sequence
gcacttcggttttttccgcatgtac

SEQ ID NO: 211297 - DNA, 25 bp, Probe Sequence
gcattggtgggtctcaatccttaac

SEQ ID NO: 211298 - DNA, 25 bp, Probe Sequence
gctatgttggtatctttccctaatc

SEQ ID NO: 211299 - DNA, 25 bp, Probe Sequence
gctagtgatggttgtagtttctata

SEQ ID NO: 211300 - DNA, 25 bp, Probe Sequence
gctacatcataatgctggttttgct

SEQ ID NO: 211301 - DNA, 25 bp, Probe Sequence
gctactagacaagttgctttggcag

SEQ ID NO: 211302 - DNA, 25 bp, Probe Sequence
gctactaggcaagttgctttggcag

SEQ ID NO: 211303 - DNA, 25 bp, Probe Sequence
gctactgaggccaggctgataggag

SEQ ID NO: 211304 - DNA, 25 bp, Probe Sequence
gcttctgaactgagccggagagaga

SEQ ID NO: 211305 - DNA, 25 bp, Probe Sequence
gctacttgactgagcctggaatgag

SEQ ID NO: 211306 - DNA, 25 bp, Probe Sequence
gctacttgagaagctgaggaaggag

SEQ ID NO: 211307 - DNA, 25 bp, Probe Sequence
gctacttgggaggctgaggcaccag

SEQ ID NO: 211308 - DNA, 25 bp, Probe Sequence
gctacttgggaggctgaggcagagc

SEQ ID NO: 211309 - DNA, 25 bp, Probe Sequence
gctacttgggaggctgagacaggag

SEQ ID NO: 211310 - DNA, 25 bp, Probe Sequence
gctacttgggaggctgagacaggag

SEQ ID NO: 211311 - DNA, 25 bp, Probe Sequence
gctacttgggaggctgaagcaggag

SEQ ID NO: 211312 - DNA, 25 bp, Probe Sequence
gctacttgaaaggctgaggcaggag

SEQ ID NO: 211313 - DNA, 25 bp, Probe Sequence
gctacttaggaggctgaggtggcag

SEQ ID NO: 211314 - DNA, 25 bp, Probe Sequence
gctacttgggaggctgaggtgggag

SEQ ID NO: 211315 - DNA, 25 bp, Probe Sequence
gctacttgggaggctgaggtgggag

SEQ ID NO: 211316 - DNA, 25 bp, Probe Sequence
gctagattgggaggttggctggtca

SEQ ID NO: 211317 - DNA, 25 bp, Probe Sequence
gctagtgtatgagttgttgttggga

SEQ ID NO: 211318 - DNA, 25 bp, Probe Sequence
gctattgttaatttcttgttgtgca

SEQ ID NO: 211319 - DNA, 25 bp, Probe Sequence
gctacatctgttacttttgttggtg

SEQ ID NO: 211320 - DNA, 25 bp, Probe Sequence
gctatactgtttccatttttgtttt

SEQ ID NO: 211321 - DNA, 25 bp, Probe Sequence
gctatagtcactatattttgccttt

SEQ ID NO: 211322 - DNA, 25 bp, Probe Sequence
gctattatactactttctcgttatt

SEQ ID NO: 211323 - DNA, 25 bp, Probe Sequence
gctatttcactttttgacttgactt

SEQ ID NO: 211324 - DNA, 25 bp, Probe Sequence
gcatgtttacctgttggcttgcttt

SEQ ID NO: 211325 - DNA, 25 bp, Probe Sequence
gctttctacctgaaatgtgtagctt

SEQ ID NO: 211326 - DNA, 25 bp, Probe Sequence
gctttcctgcactaacattttgccg

SEQ ID NO: 211327 - DNA, 25 bp, Probe Sequence
gctttcctggctaattatttgatcc

SEQ ID NO: 211328 - DNA, 25 bp, Probe Sequence
gcttgtcctggttattgtcggtatc

SEQ ID NO: 211329 - DNA, 25 bp, Probe Sequence
gctttcctgatttatagaccagaat

SEQ ID NO: 211330 - DNA, 25 bp, Probe Sequence
gcttcttcgttaatagattatttca

SEQ ID NO: 211331 - DNA, 25 bp, Probe Sequence
gcttccacagctaacgttgttaatt

SEQ ID NO: 211332 - DNA, 25 bp, Probe Sequence
gctatccatgccaaacgtgtaacaa

SEQ ID NO: 211333 - DNA, 25 bp, Probe Sequence
gctatagctaatggaggtggaacac

SEQ ID NO: 211334 - DNA, 25 bp, Probe Sequence
gcttctgtaagcaacgggaacacct

SEQ ID NO: 211335 - DNA, 25 bp, Probe Sequence
gcttagaaacagcggaaacctcttt

SEQ ID NO: 211336 - DNA, 25 bp, Probe Sequence
gcttaagaagggcaagttcccattc

SEQ ID NO: 211337 - DNA, 25 bp, Probe Sequence
gcataacaagggcccatcgattccc

SEQ ID NO: 211338 - DNA, 25 bp, Probe Sequence
gcatagtgcaaggagctccatttcc

SEQ ID NO: 211339 - DNA, 25 bp, Probe Sequence
gctagctctgagccagttcagtacc

SEQ ID NO: 211340 - DNA, 25 bp, Probe Sequence
gctagctctgagccagttcagtacc

SEQ ID NO: 211341 - DNA, 25 bp, Probe Sequence
gctaccggccatttagatgactgca

SEQ ID NO: 211342 - DNA, 25 bp, Probe Sequence
gctactccgctatctgagagagctg

SEQ ID NO: 211343 - DNA, 25 bp, Probe Sequence
gctagcctcctatgatatgcggctg

SEQ ID NO: 211344 - DNA, 25 bp, Probe Sequence
gctactcatcacacgctgtggatgg

SEQ ID NO: 211345 - DNA, 25 bp, Probe Sequence
gctacctcccacgtgaggatgtggt

SEQ ID NO: 211346 - DNA, 25 bp, Probe Sequence
gctacctcccacgtgaggatgtggt

SEQ ID NO: 211347 - DNA, 25 bp, Probe Sequence
gctacgtgcctctttggctatgatg

SEQ ID NO: 211348 - DNA, 25 bp, Probe Sequence
gctactgtgcaagtttaatgtgaat

SEQ ID NO: 211349 - DNA, 25 bp, Probe Sequence
gctagctgtcaaatttattgccaag

SEQ ID NO: 211350 - DNA, 25 bp, Probe Sequence
gctacttatattatctgctgcatca

SEQ ID NO: 211351 - DNA, 25 bp, Probe Sequence
gctactttgtattttatgcatgctc

SEQ ID NO: 211352 - DNA, 25 bp, Probe Sequence
gctagtttgtatttctaacttctac

SEQ ID NO: 211353 - DNA, 25 bp, Probe Sequence
gctactagagatattcttatttcac

SEQ ID NO: 211354 - DNA, 25 bp, Probe Sequence
gctactagagatattcttatttcac

SEQ ID NO: 211355 - DNA, 25 bp, Probe Sequence
gctactagagatattcttatttcac

SEQ ID NO: 211356 - DNA, 25 bp, Probe Sequence
gctactagagatattcttatttcac

SEQ ID NO: 211357 - DNA, 25 bp, Probe Sequence
gctttagatgtcagtctcgttacca

SEQ ID NO: 211358 - DNA, 25 bp, Probe Sequence
gctttaaaattagtctgtatcacca

SEQ ID NO: 211359 - DNA, 25 bp, Probe Sequence
gcatttggactgaaagtgctttccg

SEQ ID NO: 211360 - DNA, 25 bp, Probe Sequence
gctattaacccatggtgattccggt

SEQ ID NO: 211361 - DNA, 25 bp, Probe Sequence
gctttcaaagccaggacttctagga

SEQ ID NO: 211362 - DNA, 25 bp, Probe Sequence
gcttcaacggccattgagctttggg

SEQ ID NO: 211363 - DNA, 25 bp, Probe Sequence
gttctactgacctttgtccttaggt

SEQ ID NO: 211364 - DNA, 25 bp, Probe Sequence
gctttacaacagttctggcctcaag

SEQ ID NO: 211365 - DNA, 25 bp, Probe Sequence
gcttttcataaatcccctcataggc

SEQ ID NO: 211366 - DNA, 25 bp, Probe Sequence
gcattttattaattccttaggggca

SEQ ID NO: 211367 - DNA, 25 bp, Probe Sequence
gcattttttaacctcctaagtatca

SEQ ID NO: 211368 - DNA, 25 bp, Probe Sequence
gctttttgggaccatcactgagagt

SEQ ID NO: 211369 - DNA, 25 bp, Probe Sequence
gctttcttgggacccatttcagctc

SEQ ID NO: 211370 - DNA, 25 bp, Probe Sequence
gctttctgtgcgcatgcgccatgac

SEQ ID NO: 211371 - DNA, 25 bp, Probe Sequence
gctttctgtgcgcatgcgccatgac

SEQ ID NO: 211372 - DNA, 25 bp, Probe Sequence
gctattgcaggcgcagccagtgtct

SEQ ID NO: 211373 - DNA, 25 bp, Probe Sequence
gctattgcaggaggccacactgatg

SEQ ID NO: 211374 - DNA, 25 bp, Probe Sequence
gctatgtggaggccctacacagttg

SEQ ID NO: 211375 - DNA, 25 bp, Probe Sequence
gctagctaagagacctatcagagat

SEQ ID NO: 211376 - DNA, 25 bp, Probe Sequence
gctactaatacttctctcagcagtt

SEQ ID NO: 211377 - DNA, 25 bp, Probe Sequence
gctatatttagcaacactccatgta

SEQ ID NO: 211378 - DNA, 25 bp, Probe Sequence
gctacatttacacatctagcagtca

SEQ ID NO: 211379 - DNA, 25 bp, Probe Sequence
gctacatttacacatctagcagtca

SEQ ID NO: 211380 - DNA, 25 bp, Probe Sequence
gctacattaccacattgaagatgca

SEQ ID NO: 211381 - DNA, 25 bp, Probe Sequence
gctagtttctccaatgctgaggtac

SEQ ID NO: 211382 - DNA, 25 bp, Probe Sequence
gctacttgtcttgcttatggcatga

SEQ ID NO: 211383 - DNA, 25 bp, Probe Sequence
gctacgtgctcttgtttgggattaa

SEQ ID NO: 211384 - DNA, 25 bp, Probe Sequence
gctactctcatctgtgtgtatgtgt

SEQ ID NO: 211385 - DNA, 25 bp, Probe Sequence
gctattctcgctgggatcttgatgc

SEQ ID NO: 211386 - DNA, 25 bp, Probe Sequence
gctattaccatggtgatgcggtttt

SEQ ID NO: 211387 - DNA, 25 bp, Probe Sequence
gctattaccatggtgatgcggtttt

SEQ ID NO: 211388 - DNA, 25 bp, Probe Sequence
gctattaccatggtgatgcggtttt

SEQ ID NO: 211389 - DNA, 25 bp, Probe Sequence
gctatacccatgtgatccgttttgg

SEQ ID NO: 211390 - DNA, 25 bp, Probe Sequence
gctattccaatcatgtcctttatcc

SEQ ID NO: 211391 - DNA, 25 bp, Probe Sequence
gcttaccaatgcctgtctttgattc

SEQ ID NO: 211392 - DNA, 25 bp, Probe Sequence
gcttaccaatgcctgtctttgattc

SEQ ID NO: 211393 - DNA, 25 bp, Probe Sequence
gctagaacaatgcagattcatccat

SEQ ID NO: 211394 - DNA, 25 bp, Probe Sequence
gctagaacaatgcagattcatccat

SEQ ID NO: 211395 - DNA, 25 bp, Probe Sequence
gctagatgacaaaatgacacacaca

SEQ ID NO: 211396 - DNA, 25 bp, Probe Sequence
gctatgaggcatatgtactgaacat

SEQ ID NO: 211397 - DNA, 25 bp, Probe Sequence
gctatggccacgcaactgagaatct

SEQ ID NO: 211398 - DNA, 25 bp, Probe Sequence
gctatgggcctaaattgggctctag

SEQ ID NO: 211399 - DNA, 25 bp, Probe Sequence
gctacttgcctacagtggggtgcag

SEQ ID NO: 211400 - DNA, 25 bp, Probe Sequence
gctacttcttcatagaaggggagct

SEQ ID NO: 211401 - DNA, 25 bp, Probe Sequence
gcttcccttaccttatggggatcta

SEQ ID NO: 211402 - DNA, 25 bp, Probe Sequence
gctttcagcacttctagttggggtt

SEQ ID NO: 211403 - DNA, 25 bp, Probe Sequence
gctttccacagtcagaataggtttt

SEQ ID NO: 211404 - DNA, 25 bp, Probe Sequence
gcttaccagccgagaaggaattcct

SEQ ID NO: 211405 - DNA, 25 bp, Probe Sequence
gcttagcccctggtaaccattattc

SEQ ID NO: 211406 - DNA, 25 bp, Probe Sequence
gcttaccatcctgtctaccagatga

SEQ ID NO: 211407 - DNA, 25 bp, Probe Sequence
gcatttcgtttggttagtcagcatt

SEQ ID NO: 211408 - DNA, 25 bp, Probe Sequence
gctttctcttgtggcttctgtagaa

SEQ ID NO: 211409 - DNA, 25 bp, Probe Sequence
gctttctcttgtggcttctgtagaa

SEQ ID NO: 211410 - DNA, 25 bp, Probe Sequence
gcttctcccataggtagtttaacag

SEQ ID NO: 211411 - DNA, 25 bp, Probe Sequence
gcttcacggtctcaagtgtttacac

SEQ ID NO: 211412 - DNA, 25 bp, Probe Sequence
gcttccagagattaaagtttgtaca

SEQ ID NO: 211413 - DNA, 25 bp, Probe Sequence
gcttttaataaatcttctgctacaa

SEQ ID NO: 211414 - DNA, 25 bp, Probe Sequence
gctttgtaatacttgcatgcttctt

SEQ ID NO: 211415 - DNA, 25 bp, Probe Sequence
gctttgtacgccttaatgttcattt

SEQ ID NO: 211416 - DNA, 25 bp, Probe Sequence
gctttccagcccctttatatattgg

SEQ ID NO: 211417 - DNA, 25 bp, Probe Sequence
gctttgggctctgctatttgtttgc

SEQ ID NO: 211418 - DNA, 25 bp, Probe Sequence
gctttctgacttgcatttctgactt

SEQ ID NO: 211419 - DNA, 25 bp, Probe Sequence
gcttatttagctgaccttactttag

SEQ ID NO: 211420 - DNA, 25 bp, Probe Sequence
gctatagattacatgacctgtgact

SEQ ID NO: 211421 - DNA, 25 bp, Probe Sequence
gctataattccgccaaagtggcttc

SEQ ID NO: 211422 - DNA, 25 bp, Probe Sequence
gctatcaaggccctcgtaaagccca

SEQ ID NO: 211423 - DNA, 25 bp, Probe Sequence
gcagaaggtctggtcggcaaactcc

SEQ ID NO: 211424 - DNA, 25 bp, Probe Sequence
gcagtcggttggagcgagcatcccc

SEQ ID NO: 211425 - DNA, 25 bp, Probe Sequence
gcattgaagttgcaaagcggcccct

SEQ ID NO: 211426 - DNA, 25 bp, Probe Sequence
gctagcaagtgacaaagctggacct

SEQ ID NO: 211427 - DNA, 25 bp, Probe Sequence
gctagcactgatcctaaagcaagca

SEQ ID NO: 211428 - DNA, 25 bp, Probe Sequence
gctaccttcattaagcagcatgacc

SEQ ID NO: 211429 - DNA, 25 bp, Probe Sequence
gctacctagcatatgagagagacaa

SEQ ID NO: 211430 - DNA, 25 bp, Probe Sequence
gctatcaagcccagagagagacgtg

SEQ ID NO: 211431 - DNA, 25 bp, Probe Sequence
gcattcaggaccttgaggacacgtg

SEQ ID NO: 211432 - DNA, 25 bp, Probe Sequence
gcttcggatgtcttggagacctctg

SEQ ID NO: 211433 - DNA, 25 bp, Probe Sequence
gcatccgaattgtctggaagttttg

SEQ ID NO: 211434 - DNA, 25 bp, Probe Sequence
gcttagaattgctggatgcattttt

SEQ ID NO: 211435 - DNA, 25 bp, Probe Sequence
gcttattttgttggagtattattga

SEQ ID NO: 211436 - DNA, 25 bp, Probe Sequence
gcttacaattgtgacttcctataat

SEQ ID NO: 211437 - DNA, 25 bp, Probe Sequence
gctttattttaacactcatctgaat

SEQ ID NO: 211438 - DNA, 25 bp, Probe Sequence
gcatgtatgtatctaaacacccaca

SEQ ID NO: 211439 - DNA, 25 bp, Probe Sequence
gcatcattttaccaaacataccgag

SEQ ID NO: 211440 - DNA, 25 bp, Probe Sequence
gaataatctacgtgactggttgcgc

SEQ ID NO: 211441 - DNA, 25 bp, Probe Sequence
gaataatctacgtgactggttgcgc

SEQ ID NO: 211442 - DNA, 25 bp, Probe Sequence
gaataatctacgtgactggttgcgc

SEQ ID NO: 211443 - DNA, 25 bp, Probe Sequence
gcttaatctggtttacggatgtgac

SEQ ID NO: 211444 - DNA, 25 bp, Probe Sequence
gctatgacactttttattggattca

SEQ ID NO: 211445 - DNA, 25 bp, Probe Sequence
gctagccctatttcttgtgatatta

SEQ ID NO: 211446 - DNA, 25 bp, Probe Sequence
gctacctcatttttctatgaatgtt

SEQ ID NO: 211447 - DNA, 25 bp, Probe Sequence
gctttctcttctgtgccagaacttc

SEQ ID NO: 211448 - DNA, 25 bp, Probe Sequence
gcttcttcttcttgtcaggcaaaca

SEQ ID NO: 211449 - DNA, 25 bp, Probe Sequence
gctttacattgcagataggaaggag

SEQ ID NO: 211450 - DNA, 25 bp, Probe Sequence
gctttactctcatgtggcaaacgtg

SEQ ID NO: 211451 - DNA, 25 bp, Probe Sequence
gctttcagtcattcagggaaacaga

SEQ ID NO: 211452 - DNA, 25 bp, Probe Sequence
gcttggatatcttcggggacctgaa

SEQ ID NO: 211453 - DNA, 25 bp, Probe Sequence
gcttagttgaacagggccctgaagc

SEQ ID NO: 211454 - DNA, 25 bp, Probe Sequence
gcttggggaacttgtgtccctaatg

SEQ ID NO: 211455 - DNA, 25 bp, Probe Sequence
gctttggaaattattgcctctgata

SEQ ID NO: 211456 - DNA, 25 bp, Probe Sequence
gctttggaaatactcaggctgtttt

SEQ ID NO: 211457 - DNA, 25 bp, Probe Sequence
gctattcgtaagttctgtgcagttt

SEQ ID NO: 211458 - DNA, 25 bp, Probe Sequence
gctatcagcctgtgattttcagctt

SEQ ID NO: 211459 - DNA, 25 bp, Probe Sequence
gctatacctgatattggtgaggtga

SEQ ID NO: 211460 - DNA, 25 bp, Probe Sequence
gcttctcttattcgtgttaggtgcc

SEQ ID NO: 211461 - DNA, 25 bp, Probe Sequence
gctattccgcattcttttcaggacc

SEQ ID NO: 211462 - DNA, 25 bp, Probe Sequence
gctaccaatgactttcttcacagaa

SEQ ID NO: 211463 - DNA, 25 bp, Probe Sequence
gctaccttgagtgctcagccaagac

SEQ ID NO: 211464 - DNA, 25 bp, Probe Sequence
gctaccttgagtgctcagccaagac

SEQ ID NO: 211465 - DNA, 25 bp, Probe Sequence
gctagccaggtgacctggacaagtc

SEQ ID NO: 211466 - DNA, 25 bp, Probe Sequence
gctacctgggattgtggcatcaact

SEQ ID NO: 211467 - DNA, 25 bp, Probe Sequence
gctagctctaaattgtgtacaacta

SEQ ID NO: 211468 - DNA, 25 bp, Probe Sequence
gctagccgaattcgaaaaactctcg

SEQ ID NO: 211469 - DNA, 25 bp, Probe Sequence
gcatggccgaaacagaagccctgtc

SEQ ID NO: 211470 - DNA, 25 bp, Probe Sequence
gcatggccgaaacagaagccctgtc

SEQ ID NO: 211471 - DNA, 25 bp, Probe Sequence
gcttccagtgaacaaacctgctgtt

SEQ ID NO: 211472 - DNA, 25 bp, Probe Sequence
gctatcaagtaatcccaggctcagt

SEQ ID NO: 211473 - DNA, 25 bp, Probe Sequence
gcataactataatcccagctacttg

SEQ ID NO: 211474 - DNA, 25 bp, Probe Sequence
gctagcctacaaatcctactaatgg

SEQ ID NO: 211475 - DNA, 25 bp, Probe Sequence
gctatgctaaacagcctttacatgt

SEQ ID NO: 211476 - DNA, 25 bp, Probe Sequence
gctattacccatggccttataatta

SEQ ID NO: 211477 - DNA, 25 bp, Probe Sequence
gcttaactgacagatgttaaagctt

SEQ ID NO: 211478 - DNA, 25 bp, Probe Sequence
gcttctactaatcaataaacgcttt

SEQ ID NO: 211479 - DNA, 25 bp, Probe Sequence
gcattctatttacagtgtacccttt

SEQ ID NO: 211480 - DNA, 25 bp, Probe Sequence
gctttactcttgagtgtctcctttt

SEQ ID NO: 211481 - DNA, 25 bp, Probe Sequence
gcttttgcttctgagatttttggtt

SEQ ID NO: 211482 - DNA, 25 bp, Probe Sequence
gcatttagtttgtatctttccaggc

SEQ ID NO: 211483 - DNA, 25 bp, Probe Sequence
gcatttacttttttgaccacgagcc

SEQ ID NO: 211484 - DNA, 25 bp, Probe Sequence
gcatttacttttttgaccacgagcc

SEQ ID NO: 211485 - DNA, 25 bp, Probe Sequence
gcatttacttttttgaccacgagcc

SEQ ID NO: 211486 - DNA, 25 bp, Probe Sequence
gcttttcttttctaaccaagaggct

SEQ ID NO: 211487 - DNA, 25 bp, Probe Sequence
gcttattctttttctacttaattca

SEQ ID NO: 211488 - DNA, 25 bp, Probe Sequence
gcttttaatttacttgtacaattca

SEQ ID NO: 211489 - DNA, 25 bp, Probe Sequence
gcttttattaattgttgtcctaatg

SEQ ID NO: 211490 - DNA, 25 bp, Probe Sequence
gcttacctacatacgtgttcctagt

SEQ ID NO: 211491 - DNA, 25 bp, Probe Sequence
gctacccataagaatgctgtttgct

SEQ ID NO: 211492 - DNA, 25 bp, Probe Sequence
gctatcaccacatgtatcaattctt

SEQ ID NO: 211493 - DNA, 25 bp, Probe Sequence
gctatccgacatgttcagaccatgt

SEQ ID NO: 211494 - DNA, 25 bp, Probe Sequence
gctatacgagagaatccagtctatg

SEQ ID NO: 211495 - DNA, 25 bp, Probe Sequence
gctatacgagagaatccagtctatg

SEQ ID NO: 211496 - DNA, 25 bp, Probe Sequence
gcttcaatagccgattcgatcaagt

SEQ ID NO: 211497 - DNA, 25 bp, Probe Sequence
gctttgacacccagcagtaagctaa

SEQ ID NO: 211498 - DNA, 25 bp, Probe Sequence
gctattatacaccacctgtagaaaa

SEQ ID NO: 211499 - DNA, 25 bp, Probe Sequence
gctatttgacacagctttggaaaga

SEQ ID NO: 211500 - DNA, 25 bp, Probe Sequence
gctatttgacaaacttaggaaagta

SEQ ID NO: 211501 - DNA, 25 bp, Probe Sequence
gctttgtgacaagctctcaaaaaat

SEQ ID NO: 211502 - DNA, 25 bp, Probe Sequence
gcttggatggaaacacggtaaaaat

SEQ ID NO: 211503 - DNA, 25 bp, Probe Sequence
gcttggggattcgctggtaagcggt

SEQ ID NO: 211504 - DNA, 25 bp, Probe Sequence
gcttaggcgcagacgggttagggga

SEQ ID NO: 211505 - DNA, 25 bp, Probe Sequence
tgttatgggcccagctttggggggc

SEQ ID NO: 211506 - DNA, 25 bp, Probe Sequence
gcttcctggcccacaaaagggggct

SEQ ID NO: 211507 - DNA, 25 bp, Probe Sequence
gcttcccctgcctgaagaaggcgga

SEQ ID NO: 211508 - DNA, 25 bp, Probe Sequence
gcttcccagcttcacaataaacggc

SEQ ID NO: 211509 - DNA, 25 bp, Probe Sequence
gctatccagcgtactccaaagattc

SEQ ID NO: 211510 - DNA, 25 bp, Probe Sequence
gctaccctgccaagcgcaagagaaa

SEQ ID NO: 211511 - DNA, 25 bp, Probe Sequence
gctaccacatccaaggaaggcagca

SEQ ID NO: 211512 - DNA, 25 bp, Probe Sequence
gctaccaatctgaattcgaggccca

SEQ ID NO: 211513 - DNA, 25 bp, Probe Sequence
gctagccaaagcattggagacccta

SEQ ID NO: 211514 - DNA, 25 bp, Probe Sequence
gctagcccagagggtgggagcctaa

SEQ ID NO: 211515 - DNA, 25 bp, Probe Sequence
gctacccagagggcgtggagcgcat

SEQ ID NO: 211516 - DNA, 25 bp, Probe Sequence
gctataccaatgatgttgagtggca

SEQ ID NO: 211517 - DNA, 25 bp, Probe Sequence
gctagacaaggttgctgttgtgcag

SEQ ID NO: 211518 - DNA, 25 bp, Probe Sequence
gctagacaaggttgctgttgtgcag

SEQ ID NO: 211519 - DNA, 25 bp, Probe Sequence
gcttgctatcaagactttggagggg

SEQ ID NO: 211520 - DNA, 25 bp, Probe Sequence
gctttgacaaaatgactggctcctg

SEQ ID NO: 211521 - DNA, 25 bp, Probe Sequence
gctttacaatccagactcagggcag

SEQ ID NO: 211522 - DNA, 25 bp, Probe Sequence
gctattaaaatttcatgccgggcgc

SEQ ID NO: 211523 - DNA, 25 bp, Probe Sequence
gcttctcaaaatatacctcttgccc

SEQ ID NO: 211524 - DNA, 25 bp, Probe Sequence
gcttcaccaagacctacactgttgg

SEQ ID NO: 211525 - DNA, 25 bp, Probe Sequence
gcttcaccaagacctacactgttgg

SEQ ID NO: 211526 - DNA, 25 bp, Probe Sequence
gcttcaccaagacctacactgttgg

SEQ ID NO: 211527 - DNA, 25 bp, Probe Sequence
gcttcacagaccgtagacactttcg

SEQ ID NO: 211528 - DNA, 25 bp, Probe Sequence
gcttcacaatggccatgaacgcctt

SEQ ID NO: 211529 - DNA, 25 bp, Probe Sequence
gcttcaaaggtcaaacattacaaaa

SEQ ID NO: 211530 - DNA, 25 bp, Probe Sequence
gcttatttggtcacacatctaagac

SEQ ID NO: 211531 - DNA, 25 bp, Probe Sequence
gcttttattgtcacccaaagatgcc

SEQ ID NO: 211532 - DNA, 25 bp, Probe Sequence
gcttttttcccatccatagagcatg

SEQ ID NO: 211533 - DNA, 25 bp, Probe Sequence
gcttttttcccatccatagagcatg

SEQ ID NO: 211534 - DNA, 25 bp, Probe Sequence
gcttttcttacctattcaaggaata

SEQ ID NO: 211535 - DNA, 25 bp, Probe Sequence
gctttttctccctttaagagcacat

SEQ ID NO: 211536 - DNA, 25 bp, Probe Sequence
gctttctattcctatgtgaaacagc

SEQ ID NO: 211537 - DNA, 25 bp, Probe Sequence
gctttaattcacttgttcagatcag

SEQ ID NO: 211538 - DNA, 25 bp, Probe Sequence
gctatgtgcagaaccactttggtcc

SEQ ID NO: 211539 - DNA, 25 bp, Probe Sequence
gctaggaaaccctgtgtgtcatgcc

SEQ ID NO: 211540 - DNA, 25 bp, Probe Sequence
gctatggaataccctgggtgtgtgc

SEQ ID NO: 211541 - DNA, 25 bp, Probe Sequence
gctatggaatgccccatggggctct

SEQ ID NO: 211542 - DNA, 25 bp, Probe Sequence
gctaggagtgcgacaagcagttcct

SEQ ID NO: 211543 - DNA, 25 bp, Probe Sequence
gctagggccagtgacagttgcagaa

SEQ ID NO: 211544 - DNA, 25 bp, Probe Sequence
gctagcacgccgcatacgtggagaa

SEQ ID NO: 211545 - DNA, 25 bp, Probe Sequence
gctagcacgccgcatacgtggagaa

SEQ ID NO: 211546 - DNA, 25 bp, Probe Sequence
gctagctcggcactacactagggaa

SEQ ID NO: 211547 - DNA, 25 bp, Probe Sequence
gctagctcaggatgacattgatggc

SEQ ID NO: 211548 - DNA, 25 bp, Probe Sequence
gctagtgcgatgtttcaggaggctg

SEQ ID NO: 211549 - DNA, 25 bp, Probe Sequence
gctatgtgctgggtacatggaagga

SEQ ID NO: 211550 - DNA, 25 bp, Probe Sequence
gctagtggacaatcagtgtagtgtt

SEQ ID NO: 211551 - DNA, 25 bp, Probe Sequence
gctttggtcataggcaagtttgttt

SEQ ID NO: 211552 - DNA, 25 bp, Probe Sequence
gctttgagtcaaggggcttcactgc

SEQ ID NO: 211553 - DNA, 25 bp, Probe Sequence
gctaggggatgaggggcttcctggg

SEQ ID NO: 211554 - DNA, 25 bp, Probe Sequence
gctatttggatgcaggccttgccag

SEQ ID NO: 211555 - DNA, 25 bp, Probe Sequence
gctatctatgtggatcaggacttgc

SEQ ID NO: 211556 - DNA, 25 bp, Probe Sequence
gctattatgctgatggagcatgctt

SEQ ID NO: 211557 - DNA, 25 bp, Probe Sequence
gctattgctgctgtcaatgcattgc

SEQ ID NO: 211558 - DNA, 25 bp, Probe Sequence
gctatggcatcatataatttgctag

SEQ ID NO: 211559 - DNA, 25 bp, Probe Sequence
gctattgaagtatatttgcgacttt

SEQ ID NO: 211560 - DNA, 25 bp, Probe Sequence
gctttagattatatattccgcactt

SEQ ID NO: 211561 - DNA, 25 bp, Probe Sequence
gcttattttattattactgcagtag

SEQ ID NO: 211562 - DNA, 25 bp, Probe Sequence
gcttttgttctctcagtacttgtta

SEQ ID NO: 211563 - DNA, 25 bp, Probe Sequence
gctttcgattttgcttacagtagtt

SEQ ID NO: 211564 - DNA, 25 bp, Probe Sequence
gcttccgattttatgtgaactcaat

SEQ ID NO: 211565 - DNA, 25 bp, Probe Sequence
gcttcacaatgtctcgtgttccaaa

SEQ ID NO: 211566 - DNA, 25 bp, Probe Sequence
gcttctaattcctggttgacagaca

SEQ ID NO: 211567 - DNA, 25 bp, Probe Sequence
gctagccaatcatccagtttggcag

SEQ ID NO: 211568 - DNA, 25 bp, Probe Sequence
gctatgccttgcacacaggtgttgg

SEQ ID NO: 211569 - DNA, 25 bp, Probe Sequence
gcattgctttccactgaggttgggg

SEQ ID NO: 211570 - DNA, 25 bp, Probe Sequence
gcttctttccatactatgtttacaa

SEQ ID NO: 211571 - DNA, 25 bp, Probe Sequence
gctattttgcgaactatcttctcca

SEQ ID NO: 211572 - DNA, 25 bp, Probe Sequence
gcttttagctgcactatgtgcccca

SEQ ID NO: 211573 - DNA, 25 bp, Probe Sequence
gctattcaaagccagctaacccctg

SEQ ID NO: 211574 - DNA, 25 bp, Probe Sequence
gctattctattggagtagcctccct

SEQ ID NO: 211575 - DNA, 25 bp, Probe Sequence
gctattgctcttcagtaacctctgc

SEQ ID NO: 211576 - DNA, 25 bp, Probe Sequence
gctatattttgctaaactgccctct

SEQ ID NO: 211577 - DNA, 25 bp, Probe Sequence
gctatatttgcttaacgtggtgctt

SEQ ID NO: 211578 - DNA, 25 bp, Probe Sequence
gctatgttctgggaatgcagtggtg

SEQ ID NO: 211579 - DNA, 25 bp, Probe Sequence
gctagttgggaggctgagatgggag

SEQ ID NO: 211580 - DNA, 25 bp, Probe Sequence
gctagtcgggaggctgagacaggag

SEQ ID NO: 211581 - DNA, 25 bp, Probe Sequence
gctattcgggaggctgagacaggag

SEQ ID NO: 211582 - DNA, 25 bp, Probe Sequence
gctatgggaagaacatggcctggaa

SEQ ID NO: 211583 - DNA, 25 bp, Probe Sequence
gctatcgtgaagtgcgccacaagca

SEQ ID NO: 211584 - DNA, 25 bp, Probe Sequence
gctttgcaggagttagccgaccacg

SEQ ID NO: 211585 - DNA, 25 bp, Probe Sequence
gctttatggattgatccacgcccgc

SEQ ID NO: 211586 - DNA, 25 bp, Probe Sequence
gctttaggcatgattccaactggct

SEQ ID NO: 211587 - DNA, 25 bp, Probe Sequence
gctttggagtcacacagacctggct

SEQ ID NO: 211588 - DNA, 25 bp, Probe Sequence
gctttggactatgagaaacttctta

SEQ ID NO: 211589 - DNA, 25 bp, Probe Sequence
gcttactaactgggcaaacctccca

SEQ ID NO: 211590 - DNA, 25 bp, Probe Sequence
gttactaattaggtcaagcctgaca

SEQ ID NO: 211591 - DNA, 25 bp, Probe Sequence
gcttatcggattagttacgcttacc

SEQ ID NO: 211592 - DNA, 25 bp, Probe Sequence
gcttagctgaagttctaaccttcct

SEQ ID NO: 211593 - DNA, 25 bp, Probe Sequence
gctttctgacactttcacttttgca

SEQ ID NO: 211594 - DNA, 25 bp, Probe Sequence
gctttagagcctttcacctaatcat

SEQ ID NO: 211595 - DNA, 25 bp, Probe Sequence
gctttgaagcaccttccctgagaag

SEQ ID NO: 211596 - DNA, 25 bp, Probe Sequence
gctttgaagcaccttccctgagaag

SEQ ID NO: 211597 - DNA, 25 bp, Probe Sequence
gcttaatgagaccatctccttgggc

SEQ ID NO: 211598 - DNA, 25 bp, Probe Sequence
gcttcagggacgtccagatcggtga

SEQ ID NO: 211599 - DNA, 25 bp, Probe Sequence
gcttcagggacgtccagatcggtga

SEQ ID NO: 211600 - DNA, 25 bp, Probe Sequence
gcttcaggggctgtgaatgctcgga

SEQ ID NO: 211601 - DNA, 25 bp, Probe Sequence
gcttcacgggcctgtactgtgagag

SEQ ID NO: 211602 - DNA, 25 bp, Probe Sequence
gcttgaaggccctgatgggtggacc

SEQ ID NO: 211603 - DNA, 25 bp, Probe Sequence
gcttaaccctcttatgggatgagga

SEQ ID NO: 211604 - DNA, 25 bp, Probe Sequence
gcattaccccacacagggtggcaga

SEQ ID NO: 211605 - DNA, 25 bp, Probe Sequence
gcttagcctccaagtgggactacga

SEQ ID NO: 211606 - DNA, 25 bp, Probe Sequence
gcttccgctgccaggacgaaagcga

SEQ ID NO: 211607 - DNA, 25 bp, Probe Sequence
gctttctgcctcataaccagcaagc

SEQ ID NO: 211608 - DNA, 25 bp, Probe Sequence
gctatttggctggtgagacacgatc

SEQ ID NO: 211609 - DNA, 25 bp, Probe Sequence
gctattctgttgccagagggagtta

SEQ ID NO: 211610 - DNA, 25 bp, Probe Sequence
gctattgagattccagtggtgactt

SEQ ID NO: 211611 - DNA, 25 bp, Probe Sequence
gctattgagtatattgagtaccttc

SEQ ID NO: 211612 - DNA, 25 bp, Probe Sequence
gctattgcctgtgatctttacgctt

SEQ ID NO: 211613 - DNA, 25 bp, Probe Sequence
gctatgagccatagcctatttaggt

SEQ ID NO: 211614 - DNA, 25 bp, Probe Sequence
gctatgaccataggcctattaggtg

SEQ ID NO: 211615 - DNA, 25 bp, Probe Sequence
gctagaacaacgcctgtcacagagt

SEQ ID NO: 211616 - DNA, 25 bp, Probe Sequence
gctatgaagcccgacttcaatggtc

SEQ ID NO: 211617 - DNA, 25 bp, Probe Sequence
gcttgtacctgtgttcagtggttcc

SEQ ID NO: 211618 - DNA, 25 bp, Probe Sequence
gctttcccgatgttcagcatggtgt

SEQ ID NO: 211619 - DNA, 25 bp, Probe Sequence
gcattgctgcgcagatttgcagggt

SEQ ID NO: 211620 - DNA, 25 bp, Probe Sequence
gcatgcctgaggaatgtatttggct

SEQ ID NO: 211621 - DNA, 25 bp, Probe Sequence
gcatcattagtgaaattattggttg

SEQ ID NO: 211622 - DNA, 25 bp, Probe Sequence
gctagtgagctagattcattgaatt

SEQ ID NO: 211623 - DNA, 25 bp, Probe Sequence
gctttgagccactttttgacaaaaa

SEQ ID NO: 211624 - DNA, 25 bp, Probe Sequence
gctttagccaactttctgtgaaggc

SEQ ID NO: 211625 - DNA, 25 bp, Probe Sequence
gctttaaatagcttgttgattggga

SEQ ID NO: 211626 - DNA, 25 bp, Probe Sequence
gctatttggaagtgattgaaggggc

SEQ ID NO: 211627 - DNA, 25 bp, Probe Sequence
gcttttgaatagtgggagacgggag

SEQ ID NO: 211628 - DNA, 25 bp, Probe Sequence
gcttgattaaaggccggtttggaca

SEQ ID NO: 211629 - DNA, 25 bp, Probe Sequence
gcttcactgcaaagagactggttgt

SEQ ID NO: 211630 - DNA, 25 bp, Probe Sequence
gcttcaccaagttcaatgttgatga

SEQ ID NO: 211631 - DNA, 25 bp, Probe Sequence
gcttcaacatcaattatctgaggaa

SEQ ID NO: 211632 - DNA, 25 bp, Probe Sequence
gctatcatgccaactactgcgaggg

SEQ ID NO: 211633 - DNA, 25 bp, Probe Sequence
gctatcatgccaactactgcgaggg

SEQ ID NO: 211634 - DNA, 25 bp, Probe Sequence
gctatcatgccaactactgcgaggg

SEQ ID NO: 211635 - DNA, 25 bp, Probe Sequence
gctatcgccagtgacatgcaagatg

SEQ ID NO: 211636 - DNA, 25 bp, Probe Sequence
gctttgcctgtggcattgcaaatca

SEQ ID NO: 211637 - DNA, 25 bp, Probe Sequence
gcttctactgtgacacttatctcac

SEQ ID NO: 211638 - DNA, 25 bp, Probe Sequence
gctagtggagtgaccttacccaagt

SEQ ID NO: 211639 - DNA, 25 bp, Probe Sequence
gctaggcaaggctacttcaatgcac

SEQ ID NO: 211640 - DNA, 25 bp, Probe Sequence
gcttgaccatgccaacttgcagtac

SEQ ID NO: 211641 - DNA, 25 bp, Probe Sequence
gctatatcactgcccaacatcagaa

SEQ ID NO: 211642 - DNA, 25 bp, Probe Sequence
gctttgcacttctaactgtgcaatt

SEQ ID NO: 211643 - DNA, 25 bp, Probe Sequence
gcttcatgcacttaaagaagtattt

SEQ ID NO: 211644 - DNA, 25 bp, Probe Sequence
gcttcatgcctacgtaaggtctttg

SEQ ID NO: 211645 - DNA, 25 bp, Probe Sequence
gcttcagagtacctttgtatttgag

SEQ ID NO: 211646 - DNA, 25 bp, Probe Sequence
gcttagatttcctattggcttagag

SEQ ID NO: 211647 - DNA, 25 bp, Probe Sequence
gcttagatttcctattggcttagag

SEQ ID NO: 211648 - DNA, 25 bp, Probe Sequence
gctttgcatattcacacatggtcaa

SEQ ID NO: 211649 - DNA, 25 bp, Probe Sequence
gctttcaatatgctcaacgcattca

SEQ ID NO: 211650 - DNA, 25 bp, Probe Sequence
gctattagtgacctatgacagtttg

SEQ ID NO: 211651 - DNA, 25 bp, Probe Sequence
gctttaaatcttaagcaatattttt

SEQ ID NO: 211652 - DNA, 25 bp, Probe Sequence
gcttccaaatcctgaaatagatgtt

SEQ ID NO: 211653 - DNA, 25 bp, Probe Sequence
gcttccagcaacttcgatgaaagta

SEQ ID NO: 211654 - DNA, 25 bp, Probe Sequence
gctttccagacttctgagatagcct

SEQ ID NO: 211655 - DNA, 25 bp, Probe Sequence
gctttacctgcagctcagatagcct

SEQ ID NO: 211656 - DNA, 25 bp, Probe Sequence
gcttttgaccaggtagatgatcatt

SEQ ID NO: 211657 - DNA, 25 bp, Probe Sequence
gcttcttcaggcggtagctgattct

SEQ ID NO: 211658 - DNA, 25 bp, Probe Sequence
gctttacaggctgctagcttgtata

SEQ ID NO: 211659 - DNA, 25 bp, Probe Sequence
gctttagcttctggtcagcactgat

SEQ ID NO: 211660 - DNA, 25 bp, Probe Sequence
gctatatggttcggtaggctgtgta

SEQ ID NO: 211661 - DNA, 25 bp, Probe Sequence
gctagtggtttaataggcttgctat

SEQ ID NO: 211662 - DNA, 25 bp, Probe Sequence
gctttggtttctcagacatgtcttt

SEQ ID NO: 211663 - DNA, 25 bp, Probe Sequence
gctagggtctacttctactgtattg

SEQ ID NO: 211664 - DNA, 25 bp, Probe Sequence
gctatgcagtgtgatctttatttat

SEQ ID NO: 211665 - DNA, 25 bp, Probe Sequence
gctatcgtgaggtccactatgtcct

SEQ ID NO: 211666 - DNA, 25 bp, Probe Sequence
gctatcgtgaggtccactatgtcct

SEQ ID NO: 211667 - DNA, 25 bp, Probe Sequence
gctatcggggactacaatggccacg

SEQ ID NO: 211668 - DNA, 25 bp, Probe Sequence
gctatcggggactacaatggccacg

SEQ ID NO: 211669 - DNA, 25 bp, Probe Sequence
gctaggtggtgtcaagcaggcgctc

SEQ ID NO: 211670 - DNA, 25 bp, Probe Sequence
gcattgactggtttacaggccctgc

SEQ ID NO: 211671 - DNA, 25 bp, Probe Sequence
gcattgactggtttacaggccctgc

SEQ ID NO: 211672 - DNA, 25 bp, Probe Sequence
gcttcagtgaatgtacagtgcccgg

SEQ ID NO: 211673 - DNA, 25 bp, Probe Sequence
gcatctagtaggtaaaggccgagga

SEQ ID NO: 211674 - DNA, 25 bp, Probe Sequence
gcttaggggagaacaggccacatgg

SEQ ID NO: 211675 - DNA, 25 bp, Probe Sequence
gcttaggggactgcatgggaagcac

SEQ ID NO: 211676 - DNA, 25 bp, Probe Sequence
gcttcaagaggagggcactagggcc

SEQ ID NO: 211677 - DNA, 25 bp, Probe Sequence
gcttcaaagctgtctgggccaagac

SEQ ID NO: 211678 - DNA, 25 bp, Probe Sequence
gcttcaaagctgtctgggccaagac

SEQ ID NO: 211679 - DNA, 25 bp, Probe Sequence
gcttcaacagtgtttggacggaaca

SEQ ID NO: 211680 - DNA, 25 bp, Probe Sequence
gcttcaatcaggtttggtggaggca

SEQ ID NO: 211681 - DNA, 25 bp, Probe Sequence
gctttagcagagaataggaggaacc

SEQ ID NO: 211682 - DNA, 25 bp, Probe Sequence
gctttcagggcctacgagtgaaggg

SEQ ID NO: 211683 - DNA, 25 bp, Probe Sequence
gctattcggccttcacgcataaagg

SEQ ID NO: 211684 - DNA, 25 bp, Probe Sequence
gctatcttggacatacagtaattgt

SEQ ID NO: 211685 - DNA, 25 bp, Probe Sequence
gctatttggatgacaaagctactaa

SEQ ID NO: 211686 - DNA, 25 bp, Probe Sequence
gctttggtacatcacagcaattaga

SEQ ID NO: 211687 - DNA, 25 bp, Probe Sequence
gctttctaacaccatccaatctaga

SEQ ID NO: 211688 - DNA, 25 bp, Probe Sequence
gctttgctgggacataacatccaga

SEQ ID NO: 211689 - DNA, 25 bp, Probe Sequence
gctttgggtgaccagccactcaaag

SEQ ID NO: 211690 - DNA, 25 bp, Probe Sequence
gctttgggtgaccagccactcaaag

SEQ ID NO: 211691 - DNA, 25 bp, Probe Sequence
gctttgggtgaccagccactcaaag

SEQ ID NO: 211692 - DNA, 25 bp, Probe Sequence
gcttcaacggaccacaccaaaatgc

SEQ ID NO: 211693 - DNA, 25 bp, Probe Sequence
gcttcgatcagaactagcacgagac

SEQ ID NO: 211694 - DNA, 25 bp, Probe Sequence
gcttcgacaaatgtgtcaagcagca

SEQ ID NO: 211695 - DNA, 25 bp, Probe Sequence
gctttgacaagttctgtgccaacac

SEQ ID NO: 211696 - DNA, 25 bp, Probe Sequence
gctattacaactagcattgcctcaa

SEQ ID NO: 211697 - DNA, 25 bp, Probe Sequence
gctataatagaaggattcccatccc

SEQ ID NO: 211698 - DNA, 25 bp, Probe Sequence
gctataaactatgctactctcatac

SEQ ID NO: 211699 - DNA, 25 bp, Probe Sequence
gcttcaaactaggtattctgggaat

SEQ ID NO: 211700 - DNA, 25 bp, Probe Sequence
gcttaccctgatttattcagtggtt

SEQ ID NO: 211701 - DNA, 25 bp, Probe Sequence
gcttatggttgtaggattcaggggt

SEQ ID NO: 211702 - DNA, 25 bp, Probe Sequence
gctttagtgcaggcctgttctgagg

SEQ ID NO: 211703 - DNA, 25 bp, Probe Sequence
gctatggggattgctggctcagatg

SEQ ID NO: 211704 - DNA, 25 bp, Probe Sequence
gctaggccttgggatggctgcagtg

SEQ ID NO: 211705 - DNA, 25 bp, Probe Sequence
gctattgccattaccataccattgg

SEQ ID NO: 211706 - DNA, 25 bp, Probe Sequence
gcttcaggttgacatacctgatgtg

SEQ ID NO: 211707 - DNA, 25 bp, Probe Sequence
gcttccgaagaactgaccattgctg

SEQ ID NO: 211708 - DNA, 25 bp, Probe Sequence
gcttacgaactactgagccaggctg

SEQ ID NO: 211709 - DNA, 25 bp, Probe Sequence
gcttcagaaggcactaaaggtggtg

SEQ ID NO: 211710 - DNA, 25 bp, Probe Sequence
gctatagtgaagtttcaagaagggg

SEQ ID NO: 211711 - DNA, 25 bp, Probe Sequence
gctttgtgctggcttagaaagtggg

SEQ ID NO: 211712 - DNA, 25 bp, Probe Sequence
gctttggggattcacgtggtggcgg

SEQ ID NO: 211713 - DNA, 25 bp, Probe Sequence
gcttcggaggaacccagagcggagg

SEQ ID NO: 211714 - DNA, 25 bp, Probe Sequence
gctttgtggtagctgccggggagaa

SEQ ID NO: 211715 - DNA, 25 bp, Probe Sequence
gctttggaaggcgcacggggcgaag

SEQ ID NO: 211716 - DNA, 25 bp, Probe Sequence
gcattatgccaaaggcccgggggtc

SEQ ID NO: 211717 - DNA, 25 bp, Probe Sequence
gcatccatccagatgaacgtggccg

SEQ ID NO: 211718 - DNA, 25 bp, Probe Sequence
gcatcacccagttgtttggaggcaa

SEQ ID NO: 211719 - DNA, 25 bp, Probe Sequence
gcttgcgggttttgtgaaggcaatg

SEQ ID NO: 211720 - DNA, 25 bp, Probe Sequence
gctttggttttgctgatgaaatcag

SEQ ID NO: 211721 - DNA, 25 bp, Probe Sequence
gcttgggtttctctagacatcaacc

SEQ ID NO: 211722 - DNA, 25 bp, Probe Sequence
gcttccagtttttctagataaacct

SEQ ID NO: 211723 - DNA, 25 bp, Probe Sequence
gcttccttgtgccttaaaaaacctg

SEQ ID NO: 211724 - DNA, 25 bp, Probe Sequence
gcttccggctccaggaaataaccat

SEQ ID NO: 211725 - DNA, 25 bp, Probe Sequence
gagttgggacccgggaagaaccatg

SEQ ID NO: 211726 - DNA, 25 bp, Probe Sequence
gctttggtgccacctgcgtgaagaa

SEQ ID NO: 211727 - DNA, 25 bp, Probe Sequence
gctttgctaccatcgtggaagaatg

SEQ ID NO: 211728 - DNA, 25 bp, Probe Sequence
gctttgctaccaggtctgttgaggg

SEQ ID NO: 211729 - DNA, 25 bp, Probe Sequence
gctttgttccaggagtttggtgaca

SEQ ID NO: 211730 - DNA, 25 bp, Probe Sequence
gctttgttccaggtgaatcagtggc

SEQ ID NO: 211731 - DNA, 25 bp, Probe Sequence
gctttgctttcttgtggacagcttg

SEQ ID NO: 211732 - DNA, 25 bp, Probe Sequence
gctttgctttcttgtggacagcttg

SEQ ID NO: 211733 - DNA, 25 bp, Probe Sequence
gcttatgtctagcgtgttatgctat

SEQ ID NO: 211734 - DNA, 25 bp, Probe Sequence
gctttgattcagtcggaatggcgct

SEQ ID NO: 211735 - DNA, 25 bp, Probe Sequence
gctttttattcggacaggccacatg

SEQ ID NO: 211736 - DNA, 25 bp, Probe Sequence
gctatttaaggggagcaggagtgca

SEQ ID NO: 211737 - DNA, 25 bp, Probe Sequence
gcttttaatgcgggagctgcgattt

SEQ ID NO: 211738 - DNA, 25 bp, Probe Sequence
gcttttagaggcaatacaggtttag

SEQ ID NO: 211739 - DNA, 25 bp, Probe Sequence
gcttgcttagatgttccaaatttag

SEQ ID NO: 211740 - DNA, 25 bp, Probe Sequence
gcttttagtcatgtccaaattgtgt

SEQ ID NO: 211741 - DNA, 25 bp, Probe Sequence
gctttgtgtgtctgttaaatgaatg

SEQ ID NO: 211742 - DNA, 25 bp, Probe Sequence
gctttctttcatcttcagcactgga

SEQ ID NO: 211743 - DNA, 25 bp, Probe Sequence
gcttttgaatatcttccacagaggg

SEQ ID NO: 211744 - DNA, 25 bp, Probe Sequence
gcttttgttgattttggcactatct

SEQ ID NO: 211745 - DNA, 25 bp, Probe Sequence
gctttttgctgtgattgcgcacgtg

SEQ ID NO: 211746 - DNA, 25 bp, Probe Sequence
gcttattattgtgaccatcctgctg

SEQ ID NO: 211747 - DNA, 25 bp, Probe Sequence
gcttattattttccaactctggaaa

SEQ ID NO: 211748 - DNA, 25 bp, Probe Sequence
gcttctgttgactctaactttgaaa

SEQ ID NO: 211749 - DNA, 25 bp, Probe Sequence
gctttttgcactttcagactttgat

SEQ ID NO: 211750 - DNA, 25 bp, Probe Sequence
gctttctcggtatcagcagtttaaa

SEQ ID NO: 211751 - DNA, 25 bp, Probe Sequence
gctttccaaatctggcagatgttta

SEQ ID NO: 211752 - DNA, 25 bp, Probe Sequence
gcttcggaaactgtgcatagttcta

SEQ ID NO: 211753 - DNA, 25 bp, Probe Sequence
gcttagtataaatgtgtcacttcta

SEQ ID NO: 211754 - DNA, 25 bp, Probe Sequence
gctttctttacgtattcctttgcac

SEQ ID NO: 211755 - DNA, 25 bp, Probe Sequence
gctttcattaagcacatcctttctg

SEQ ID NO: 211756 - DNA, 25 bp, Probe Sequence
gctttgattcacagactcaacttgt

SEQ ID NO: 211757 - DNA, 25 bp, Probe Sequence
gctttgttgatctgagccttctatg

SEQ ID NO: 211758 - DNA, 25 bp, Probe Sequence
gctatttgtgtaagactgctgtcat

SEQ ID NO: 211759 - DNA, 25 bp, Probe Sequence
gctatcttgttaagaaggtcgtgca

SEQ ID NO: 211760 - DNA, 25 bp, Probe Sequence
gctatcctttcaaacagctattggc

SEQ ID NO: 211761 - DNA, 25 bp, Probe Sequence
gcttcaatcttcaagaactttgtca

SEQ ID NO: 211762 - DNA, 25 bp, Probe Sequence
gcttcaaggcaaaaatcgttgtcac

SEQ ID NO: 211763 - DNA, 25 bp, Probe Sequence
gctatcccactaaatattgtaatcc

SEQ ID NO: 211764 - DNA, 25 bp, Probe Sequence
gcttccaggtagttatagtactcca

SEQ ID NO: 211765 - DNA, 25 bp, Probe Sequence
gcttccggctggtagtagttccgct

SEQ ID NO: 211766 - DNA, 25 bp, Probe Sequence
gcttaacgtgagggtgggtccagtg

SEQ ID NO: 211767 - DNA, 25 bp, Probe Sequence
gcagtaccttagggttttgccattg

SEQ ID NO: 211768 - DNA, 25 bp, Probe Sequence
gctttcggtgagggcttttgtactg

SEQ ID NO: 211769 - DNA, 25 bp, Probe Sequence
gctttcggggggaagctctgagctc

SEQ ID NO: 211770 - DNA, 25 bp, Probe Sequence
gcttttgaggggctgacttcaatcc

SEQ ID NO: 211771 - DNA, 25 bp, Probe Sequence
gcttttaggggtttctgacatatat

SEQ ID NO: 211772 - DNA, 25 bp, Probe Sequence
gcttatgatagtcttttctaattct

SEQ ID NO: 211773 - DNA, 25 bp, Probe Sequence
gcttcctcatgaacttttctaatag

SEQ ID NO: 211774 - DNA, 25 bp, Probe Sequence
gctttgtatcaccttttctttaaag

SEQ ID NO: 211775 - DNA, 25 bp, Probe Sequence
gctttgtatgcactttgtttttttc

SEQ ID NO: 211776 - DNA, 25 bp, Probe Sequence
gcttctttcgaaagtttcttgttca

SEQ ID NO: 211777 - DNA, 25 bp, Probe Sequence
gctttttaagtgattatcttttctt

SEQ ID NO: 211778 - DNA, 25 bp, Probe Sequence
gcatttttacgtacttgagcttttt

SEQ ID NO: 211779 - DNA, 25 bp, Probe Sequence
gctttgttacagacccaagctgtcc

SEQ ID NO: 211780 - DNA, 25 bp, Probe Sequence
gcttcagttttgtgccaacattcca

SEQ ID NO: 211781 - DNA, 25 bp, Probe Sequence
gcttcagttgggtggcaaatttgct

SEQ ID NO: 211782 - DNA, 25 bp, Probe Sequence
gcttcggggcagaggacgatgacct

SEQ ID NO: 211783 - DNA, 25 bp, Probe Sequence
gcttttatccagagagaccacacca

SEQ ID NO: 211784 - DNA, 25 bp, Probe Sequence
gctttctaccgttaagagacatcca

SEQ ID NO: 211785 - DNA, 25 bp, Probe Sequence
gcttttgaaccttaatgagagtctg

SEQ ID NO: 211786 - DNA, 25 bp, Probe Sequence
gctatttccccaagaagatttctga

SEQ ID NO: 211787 - DNA, 25 bp, Probe Sequence
gcttggggcaagtgaagtttgtgac

SEQ ID NO: 211788 - DNA, 25 bp, Probe Sequence
gctttggcacaacttcaacatttgg

SEQ ID NO: 211789 - DNA, 25 bp, Probe Sequence
gctttgtgctcagaatctacattcc

SEQ ID NO: 211790 - DNA, 25 bp, Probe Sequence
gctatatatctctctacatatcccc

SEQ ID NO: 211791 - DNA, 25 bp, Probe Sequence
gctatcttccaacaatgctgaccac

SEQ ID NO: 211792 - DNA, 25 bp, Probe Sequence
gctatcttggaaaattgcatacgtc

SEQ ID NO: 211793 - DNA, 25 bp, Probe Sequence
gctatcttggaaaattgcatacgtc

SEQ ID NO: 211794 - DNA, 25 bp, Probe Sequence
gcttctcatggatgaagtattcgac

SEQ ID NO: 211795 - DNA, 25 bp, Probe Sequence
gcttctgggggggtgatctcagagc

SEQ ID NO: 211796 - DNA, 25 bp, Probe Sequence
gcttcatggatgtgaaatgcccagg

SEQ ID NO: 211797 - DNA, 25 bp, Probe Sequence
gctttgctcagtgatacccacatgg

SEQ ID NO: 211798 - DNA, 25 bp, Probe Sequence
gctttgctcaggaagacattgccat

SEQ ID NO: 211799 - DNA, 25 bp, Probe Sequence
gctttgtcagctcaggtctgtctac

SEQ ID NO: 211800 - DNA, 25 bp, Probe Sequence
gcttctgtagtgtagctgcacgtcc

SEQ ID NO: 211801 - DNA, 25 bp, Probe Sequence
gctttgtacaatagtgcatcttcca

SEQ ID NO: 211802 - DNA, 25 bp, Probe Sequence
gctttagaagcatctcatttctcag

SEQ ID NO: 211803 - DNA, 25 bp, Probe Sequence
gctattcccagctgctgatgttccc

SEQ ID NO: 211804 - DNA, 25 bp, Probe Sequence
gctattacacactactgcagatttt

SEQ ID NO: 211805 - DNA, 25 bp, Probe Sequence
gctttgaccactgcatgaactgctt

SEQ ID NO: 211806 - DNA, 25 bp, Probe Sequence
gctttgatcaaatgcataacctgcc

SEQ ID NO: 211807 - DNA, 25 bp, Probe Sequence
gcttcatgattaccacagagacctc

SEQ ID NO: 211808 - DNA, 25 bp, Probe Sequence
gctatagtggcgcacaagcgctctg

SEQ ID NO: 211809 - DNA, 25 bp, Probe Sequence
gctattttgcataatcaaggcactg

SEQ ID NO: 211810 - DNA, 25 bp, Probe Sequence
gcattgttcgttacatggtccatca

SEQ ID NO: 211811 - DNA, 25 bp, Probe Sequence
gcttttgtgtcattcatggtcgatg

SEQ ID NO: 211812 - DNA, 25 bp, Probe Sequence
gcttttgatacttgcaggggtgaca

SEQ ID NO: 211813 - DNA, 25 bp, Probe Sequence
gctttggatactcggatggagtgaa

SEQ ID NO: 211814 - DNA, 25 bp, Probe Sequence
gctatatggctatttggatgacaaa

SEQ ID NO: 211815 - DNA, 25 bp, Probe Sequence
gctatatctgtaatttatcaacatg

SEQ ID NO: 211816 - DNA, 25 bp, Probe Sequence
gcttagcatctactctgtataacgc

SEQ ID NO: 211817 - DNA, 25 bp, Probe Sequence
gcttacttttcaacataattcccag

SEQ ID NO: 211818 - DNA, 25 bp, Probe Sequence
gcttactgttctgctaaatgaccta

SEQ ID NO: 211819 - DNA, 25 bp, Probe Sequence
gcagtcatttttgtaaagaccttgc

SEQ ID NO: 211820 - DNA, 25 bp, Probe Sequence
gcagtcatttttgtaaagaccttgc

SEQ ID NO: 211821 - DNA, 25 bp, Probe Sequence
gcattcctttgagaactagtcctgt

SEQ ID NO: 211822 - DNA, 25 bp, Probe Sequence
gcttcctgcggagacttcaggtgct

SEQ ID NO: 211823 - DNA, 25 bp, Probe Sequence
gcttcctcgaggaactggcttggtt

SEQ ID NO: 211824 - DNA, 25 bp, Probe Sequence
gcttccatcttgcattatttatagt

SEQ ID NO: 211825 - DNA, 25 bp, Probe Sequence
gctttgctttggtctatctttgagc

SEQ ID NO: 211826 - DNA, 25 bp, Probe Sequence
gctatagcctgtcacaactttgaga

SEQ ID NO: 211827 - DNA, 25 bp, Probe Sequence
gcttcatgccactgaatacgttgaa

SEQ ID NO: 211828 - DNA, 25 bp, Probe Sequence
gctttgccctggtagggcagtaaca

SEQ ID NO: 211829 - DNA, 25 bp, Probe Sequence
gcttggcacctggaagtaggtggca

SEQ ID NO: 211830 - DNA, 25 bp, Probe Sequence
gctttgcacctgcactttggtgaca

SEQ ID NO: 211831 - DNA, 25 bp, Probe Sequence
gcttcgacatgccagactttgagga

SEQ ID NO: 211832 - DNA, 25 bp, Probe Sequence
gctatcacacagcatcacatgttag

SEQ ID NO: 211833 - DNA, 25 bp, Probe Sequence
gctatagctcagtgactgtgttgtg

SEQ ID NO: 211834 - DNA, 25 bp, Probe Sequence
gcttactagctcagtgatcttggcc

SEQ ID NO: 211835 - DNA, 25 bp, Probe Sequence
gcttaacccatgagctccatgtgcc

SEQ ID NO: 211836 - DNA, 25 bp, Probe Sequence
gcttacaccatgtggatgctctgtc

SEQ ID NO: 211837 - DNA, 25 bp, Probe Sequence
gcttacatccttcgattactattcg

SEQ ID NO: 211838 - DNA, 25 bp, Probe Sequence
gctatatatcctttaatcacatttt

SEQ ID NO: 211839 - DNA, 25 bp, Probe Sequence
gcactacattctgtaaccttgtttc

SEQ ID NO: 211840 - DNA, 25 bp, Probe Sequence
gcttaatttttttgctcttgattta

SEQ ID NO: 211841 - DNA, 25 bp, Probe Sequence
gctttttggttcacacttatttata

SEQ ID NO: 211842 - DNA, 25 bp, Probe Sequence
gctttgtcggcattttacttttgtt

SEQ ID NO: 211843 - DNA, 25 bp, Probe Sequence
gctatttctgtattttttgtttgta

SEQ ID NO: 211844 - DNA, 25 bp, Probe Sequence
gcttccttgaaacatttttgtgcta

SEQ ID NO: 211845 - DNA, 25 bp, Probe Sequence
gcttccttaaattaatatgtttgtg

SEQ ID NO: 211846 - DNA, 25 bp, Probe Sequence
gctttctctatagatacacagtttc

SEQ ID NO: 211847 - DNA, 25 bp, Probe Sequence
gcttctcactcatcactaacaaggt

SEQ ID NO: 211848 - DNA, 25 bp, Probe Sequence
gctttctctcattatgtaagtacgt

SEQ ID NO: 211849 - DNA, 25 bp, Probe Sequence
gcattttcattatttgggtaggtga

SEQ ID NO: 211850 - DNA, 25 bp, Probe Sequence
gcttctctagtatctgtttagggaa

SEQ ID NO: 211851 - DNA, 25 bp, Probe Sequence
gcttctcctgtgaacttcttaggga

SEQ ID NO: 211852 - DNA, 25 bp, Probe Sequence
gcttcttatggcacctttcagagag

SEQ ID NO: 211853 - DNA, 25 bp, Probe Sequence
gctttctattgaaggcttttgacgg

SEQ ID NO: 211854 - DNA, 25 bp, Probe Sequence
gcttatcgtggaagagtgtcccagc

SEQ ID NO: 211855 - DNA, 25 bp, Probe Sequence
gcttagctgtgagaagttcccacct

SEQ ID NO: 211856 - DNA, 25 bp, Probe Sequence
gcttactttgagtgatcctccaact

SEQ ID NO: 211857 - DNA, 25 bp, Probe Sequence
gcttttttaaggtatcaccaagtag

SEQ ID NO: 211858 - DNA, 25 bp, Probe Sequence
gcttttcttgaatattcccatagtt

SEQ ID NO: 211859 - DNA, 25 bp, Probe Sequence
gctttacgctgaattattccacata

SEQ ID NO: 211860 - DNA, 25 bp, Probe Sequence
gcttatactgctagaatttccgtga

SEQ ID NO: 211861 - DNA, 25 bp, Probe Sequence
gcttatactgtggaatgcctgcggg

SEQ ID NO: 211862 - DNA, 25 bp, Probe Sequence
gcttcactagggaatcctgcggcag

SEQ ID NO: 211863 - DNA, 25 bp, Probe Sequence
gcttcatctttggctaccaggacag

SEQ ID NO: 211864 - DNA, 25 bp, Probe Sequence
gcttcatcgtcggtccgggctgcca

SEQ ID NO: 211865 - DNA, 25 bp, Probe Sequence
gcttcaagggagtacgtgcatctgc

SEQ ID NO: 211866 - DNA, 25 bp, Probe Sequence
gcttcaaggtatcacgtcatggggc

SEQ ID NO: 211867 - DNA, 25 bp, Probe Sequence
gcttcaaggtatcacatcatggggc

SEQ ID NO: 211868 - DNA, 25 bp, Probe Sequence
gcttcaaggcttccactgcaaaaca

SEQ ID NO: 211869 - DNA, 25 bp, Probe Sequence
gcttcatgccagaggcccaaatcca

SEQ ID NO: 211870 - DNA, 25 bp, Probe Sequence
gctttggcagctatggaagaaccaa

SEQ ID NO: 211871 - DNA, 25 bp, Probe Sequence
gcattgtctcctatggacgaaacaa

SEQ ID NO: 211872 - DNA, 25 bp, Probe Sequence
gctatttctccaatgtacaataaaa

SEQ ID NO: 211873 - DNA, 25 bp, Probe Sequence
gcttcttacggatgagcaatgcaag

SEQ ID NO: 211874 - DNA, 25 bp, Probe Sequence
gctttctcagggtagagcaagtggt

SEQ ID NO: 211875 - DNA, 25 bp, Probe Sequence
gcattgccccggaagatcaagtcgt

SEQ ID NO: 211876 - DNA, 25 bp, Probe Sequence
gcatagatccacgaggcaccaaggc

SEQ ID NO: 211877 - DNA, 25 bp, Probe Sequence
gcttgacacatcaagttatcaaggc

SEQ ID NO: 211878 - DNA, 25 bp, Probe Sequence
gcttgaatgccacgcggtacaaagg

SEQ ID NO: 211879 - DNA, 25 bp, Probe Sequence
gctttaccagggtcatctccaagaa

SEQ ID NO: 211880 - DNA, 25 bp, Probe Sequence
gcttcagaaaaaacattcccaacac

SEQ ID NO: 211881 - DNA, 25 bp, Probe Sequence
gcttcagaaaaaacattcccaacac

SEQ ID NO: 211882 - DNA, 25 bp, Probe Sequence
gcataggagataaaacccccactga

SEQ ID NO: 211883 - DNA, 25 bp, Probe Sequence
gcataggagataaaacccccactga

SEQ ID NO: 211884 - DNA, 25 bp, Probe Sequence
gcttcagagatcaaacacctgcccc

SEQ ID NO: 211885 - DNA, 25 bp, Probe Sequence
gcttctagtaaatcctggcagatct

SEQ ID NO: 211886 - DNA, 25 bp, Probe Sequence
gcttcttgtgttttactgtcagatt

SEQ ID NO: 211887 - DNA, 25 bp, Probe Sequence
gcttcttgtgttttactgtcagatt

SEQ ID NO: 211888 - DNA, 25 bp, Probe Sequence
gcttctcttggtgtccatacatatg

SEQ ID NO: 211889 - DNA, 25 bp, Probe Sequence
gttgccgggtcatgttaattgggaa

SEQ ID NO: 211890 - DNA, 25 bp, Probe Sequence
gctttggggctaggcatctatattg

SEQ ID NO: 211891 - DNA, 25 bp, Probe Sequence
gctttggctggccactgagggtagg

SEQ ID NO: 211892 - DNA, 25 bp, Probe Sequence
gctttggcttgtcgaatgagcgtag

SEQ ID NO: 211893 - DNA, 25 bp, Probe Sequence
gctttgagatttcagctatgctaga

SEQ ID NO: 211894 - DNA, 25 bp, Probe Sequence
gcttctggagcttgtcaccattgga

SEQ ID NO: 211895 - DNA, 25 bp, Probe Sequence
gcttcatgatgatattgcccttgtg

SEQ ID NO: 211896 - DNA, 25 bp, Probe Sequence
gcttatgatatacttgtctgcagtg

SEQ ID NO: 211897 - DNA, 25 bp, Probe Sequence
gctttgataagagctgtgctgtggc

SEQ ID NO: 211898 - DNA, 25 bp, Probe Sequence
gctttgataagagctgtgctgtggc

SEQ ID NO: 211899 - DNA, 25 bp, Probe Sequence
gcttgtgtgaggcaatcatggtggc

SEQ ID NO: 211900 - DNA, 25 bp, Probe Sequence
gcttattagagctacatatggcgat

SEQ ID NO: 211901 - DNA, 25 bp, Probe Sequence
gcataacataagtactcatttgtaa

SEQ ID NO: 211902 - DNA, 25 bp, Probe Sequence
gcatataccatacacttaagaaatt

SEQ ID NO: 211903 - DNA, 25 bp, Probe Sequence
gctattgttactcttacgaatattt

SEQ ID NO: 211904 - DNA, 25 bp, Probe Sequence
gaaggctctagtcttaggaggtttt

SEQ ID NO: 211905 - DNA, 25 bp, Probe Sequence
gaagcacgtaggtgccgttttttat

SEQ ID NO: 211906 - DNA, 25 bp, Probe Sequence
gcaaagactaggtgtatattttttt

SEQ ID NO: 211907 - DNA, 25 bp, Probe Sequence
gcttaactgttgtgtatcttttttg

SEQ ID NO: 211908 - DNA, 25 bp, Probe Sequence
gcttagctgctattgaatttctttt

SEQ ID NO: 211909 - DNA, 25 bp, Probe Sequence
gcttcagcatctcctgttttttgat

SEQ ID NO: 211910 - DNA, 25 bp, Probe Sequence
gcttggcctcctttatgatgtgcat

SEQ ID NO: 211911 - DNA, 25 bp, Probe Sequence
gcttacctactgttatctctaaaat

SEQ ID NO: 211912 - DNA, 25 bp, Probe Sequence
gcatcaacctacttagaagctgaaa

SEQ ID NO: 211913 - DNA, 25 bp, Probe Sequence
gcatccccgacttcagggacaaact

SEQ ID NO: 211914 - DNA, 25 bp, Probe Sequence
gcatcctcggttgagagtaaaaggc

SEQ ID NO: 211915 - DNA, 25 bp, Probe Sequence
gcatctatgggcattatgagctaaa

SEQ ID NO: 211916 - DNA, 25 bp, Probe Sequence
gctttgtcatcagtgctatagtaaa

SEQ ID NO: 211917 - DNA, 25 bp, Probe Sequence
gctttgtcttgcttatagtcattaa

SEQ ID NO: 211918 - DNA, 25 bp, Probe Sequence
gctttgccttcgttcagtatgttaa

SEQ ID NO: 211919 - DNA, 25 bp, Probe Sequence
gctttgccttatttccacatttaaa

SEQ ID NO: 211920 - DNA, 25 bp, Probe Sequence
gctttcctatatcttctattctaga

SEQ ID NO: 211921 - DNA, 25 bp, Probe Sequence
gcttttttgagaatccaattctcag

SEQ ID NO: 211922 - DNA, 25 bp, Probe Sequence
gcttttattcagcatcctttatctg

SEQ ID NO: 211923 - DNA, 25 bp, Probe Sequence
gctttgtagtgggttttctgtgctg

SEQ ID NO: 211924 - DNA, 25 bp, Probe Sequence
gcatattaaagggttatccactgtg

SEQ ID NO: 211925 - DNA, 25 bp, Probe Sequence
gcttataacccttttcacaagctga

SEQ ID NO: 211926 - DNA, 25 bp, Probe Sequence
gcttataataccttttccttgtgtg

SEQ ID NO: 211927 - DNA, 25 bp, Probe Sequence
gcttttacactattttgactttgag

SEQ ID NO: 211928 - DNA, 25 bp, Probe Sequence
gctttttcacgcatggtactcttga

SEQ ID NO: 211929 - DNA, 25 bp, Probe Sequence
gcatctttaaggagaggccctatga

SEQ ID NO: 211930 - DNA, 25 bp, Probe Sequence
gctttgtcaaggatgtagccaacat

SEQ ID NO: 211931 - DNA, 25 bp, Probe Sequence
gctttggcaaagcttacgcggctac

SEQ ID NO: 211932 - DNA, 25 bp, Probe Sequence
gttgtcagaattgttgaaaactcac

SEQ ID NO: 211933 - DNA, 25 bp, Probe Sequence
gcttgttgacttgttaaaccttctg

SEQ ID NO: 211934 - DNA, 25 bp, Probe Sequence
gcacatttggtttattaacccttgc

SEQ ID NO: 211935 - DNA, 25 bp, Probe Sequence
gcatcttgggtgaattaagaccttt

SEQ ID NO: 211936 - DNA, 25 bp, Probe Sequence
gcttttgcggacatgtttcctcatt

SEQ ID NO: 211937 - DNA, 25 bp, Probe Sequence
gcttttcggagcatgcatgtttata

SEQ ID NO: 211938 - DNA, 25 bp, Probe Sequence
gctttctcatgaagtagcatttccc

SEQ ID NO: 211939 - DNA, 25 bp, Probe Sequence
gcttggtcagcagcatggagttccc

SEQ ID NO: 211940 - DNA, 25 bp, Probe Sequence
gctttgtgagccgtgtcgtatgacc

SEQ ID NO: 211941 - DNA, 25 bp, Probe Sequence
gcttctttcacagtgttgataacaa

SEQ ID NO: 211942 - DNA, 25 bp, Probe Sequence
gcttttctcttctttgagaagccag

SEQ ID NO: 211943 - DNA, 25 bp, Probe Sequence
gcttgttgccttgtttattccggaa

SEQ ID NO: 211944 - DNA, 25 bp, Probe Sequence
gcttgttgagttttttgttgtctgg

SEQ ID NO: 211945 - DNA, 25 bp, Probe Sequence
gcttgtgctgaggttttagcttttc

SEQ ID NO: 211946 - DNA, 25 bp, Probe Sequence
gcttggcatcaggtgtttagtaggt

SEQ ID NO: 211947 - DNA, 25 bp, Probe Sequence
gcttagttctcttttgatgtaggtt

SEQ ID NO: 211948 - DNA, 25 bp, Probe Sequence
gctttgctttctattgaaggctttt

SEQ ID NO: 211949 - DNA, 25 bp, Probe Sequence
gcattgttttttctacctgcttgtc

SEQ ID NO: 211950 - DNA, 25 bp, Probe Sequence
gctttttaattaatatgcctgtttt

SEQ ID NO: 211951 - DNA, 25 bp, Probe Sequence
gctttttagtctttatcattctatg

SEQ ID NO: 211952 - DNA, 25 bp, Probe Sequence
gctttttgggctttgagattgtgag

SEQ ID NO: 211953 - DNA, 25 bp, Probe Sequence
gcatttttaggttagccagtgtgac

SEQ ID NO: 211954 - DNA, 25 bp, Probe Sequence
gcatttttaggtcattgcttgtacc

SEQ ID NO: 211955 - DNA, 25 bp, Probe Sequence
gctttcttacttgttttgtgaccta

SEQ ID NO: 211956 - DNA, 25 bp, Probe Sequence
gcttcgttgaattttttttgacact

SEQ ID NO: 211957 - DNA, 25 bp, Probe Sequence
gcttttctgtattttatttagacaa

SEQ ID NO: 211958 - DNA, 25 bp, Probe Sequence
gctttactgttacctgtttaggcct

SEQ ID NO: 211959 - DNA, 25 bp, Probe Sequence
gcatttattggttttttctagggct

SEQ ID NO: 211960 - DNA, 25 bp, Probe Sequence
gcttatatttgcttgtttggcttgg

SEQ ID NO: 211961 - DNA, 25 bp, Probe Sequence
gctttgtctggctgtggttcagtga

SEQ ID NO: 211962 - DNA, 25 bp, Probe Sequence
gctttctctggccaagtttcaggcc

SEQ ID NO: 211963 - DNA, 25 bp, Probe Sequence
gctttctccatccagattgtgacgg

SEQ ID NO: 211964 - DNA, 25 bp, Probe Sequence
gcttcatccctctcaagtaatggct

SEQ ID NO: 211965 - DNA, 25 bp, Probe Sequence
gcttcatagtcctccagctaaattt

SEQ ID NO: 211966 - DNA, 25 bp, Probe Sequence
gcttgcatagtcggcactcagtaaa

SEQ ID NO: 211967 - DNA, 25 bp, Probe Sequence
gctttctgtctggaacattaataat

SEQ ID NO: 211968 - DNA, 25 bp, Probe Sequence
gcttttcctccattaatacatatat

SEQ ID NO: 211969 - DNA, 25 bp, Probe Sequence
gctttacctctattgccatgaatta

SEQ ID NO: 211970 - DNA, 25 bp, Probe Sequence
gctttacctctattgccatgaatta

SEQ ID NO: 211971 - DNA, 25 bp, Probe Sequence
gctttatcccatggagccagaagaa

SEQ ID NO: 211972 - DNA, 25 bp, Probe Sequence
gctttgatcgcgcatgacaagaaaa

SEQ ID NO: 211973 - DNA, 25 bp, Probe Sequence
gctttgctcgagctgtgcggaacca

SEQ ID NO: 211974 - DNA, 25 bp, Probe Sequence
gcttactgaaggcaggtaatccaga

SEQ ID NO: 211975 - DNA, 25 bp, Probe Sequence
gcttaggaaagcggctgttgctcca

SEQ ID NO: 211976 - DNA, 25 bp, Probe Sequence
gcttagtattgacactctctaccaa

SEQ ID NO: 211977 - DNA, 25 bp, Probe Sequence
gcttgaaatcgagttctcttagcca

SEQ ID NO: 211978 - DNA, 25 bp, Probe Sequence
gcttcaaactagactacttctccat

SEQ ID NO: 211979 - DNA, 25 bp, Probe Sequence
gcttttactcagatggcttatggag

SEQ ID NO: 211980 - DNA, 25 bp, Probe Sequence
gcttttactaattcgcatctggaag

SEQ ID NO: 211981 - DNA, 25 bp, Probe Sequence
gcttactactaagtggctgctgcga

SEQ ID NO: 211982 - DNA, 25 bp, Probe Sequence
gcttagccactcagatggtgatgca

SEQ ID NO: 211983 - DNA, 25 bp, Probe Sequence
gctttccctgacaaggctgctgaag

SEQ ID NO: 211984 - DNA, 25 bp, Probe Sequence
gctttcacacggcagtgtgctgggc

SEQ ID NO: 211985 - DNA, 25 bp, Probe Sequence
gctttcagccattgtgggtatggac

SEQ ID NO: 211986 - DNA, 25 bp, Probe Sequence
gctttatgccattgggctgctgcat

SEQ ID NO: 211987 - DNA, 25 bp, Probe Sequence
gcttaatgacattgcgacagtctgc

SEQ ID NO: 211988 - DNA, 25 bp, Probe Sequence
gcttgtcaccattggacagtctccc

SEQ ID NO: 211989 - DNA, 25 bp, Probe Sequence
gctttgacgtattatctgttgcctt

SEQ ID NO: 211990 - DNA, 25 bp, Probe Sequence
gctttatctgtatatctgaactctt

SEQ ID NO: 211991 - DNA, 25 bp, Probe Sequence
gcttttgtgtaaatgctgacctcct

SEQ ID NO: 211992 - DNA, 25 bp, Probe Sequence
gcttttggctactatggaccactcc

SEQ ID NO: 211993 - DNA, 25 bp, Probe Sequence
gcttgcttggtatgcttacctgggc

SEQ ID NO: 211994 - DNA, 25 bp, Probe Sequence
gctttagcagctttgcatttcctgt

SEQ ID NO: 211995 - DNA, 25 bp, Probe Sequence
gctttaatgctgttatctatcttat

SEQ ID NO: 211996 - DNA, 25 bp, Probe Sequence
gctttaaagattagcacatttgtgc

SEQ ID NO: 211997 - DNA, 25 bp, Probe Sequence
gctttcaaatactgcatgcacctcc

SEQ ID NO: 211998 - DNA, 25 bp, Probe Sequence
gctttcaactgtactgctgcagctt

SEQ ID NO: 211999 - DNA, 25 bp, Probe Sequence
gctttcagatgtgcatatgagcaga

SEQ ID NO: 212000 - DNA, 25 bp, Probe Sequence
gctttagatatggctggagagtaat

SEQ ID NO: 212001 - DNA, 25 bp, Probe Sequence
gctttatgatatcaaagactcattg

SEQ ID NO: 212002 - DNA, 25 bp, Probe Sequence
gctttctgaaacaaagactcatttt

SEQ ID NO: 212003 - DNA, 25 bp, Probe Sequence
gcttttgcaaataacaggatttcat

SEQ ID NO: 212004 - DNA, 25 bp, Probe Sequence
gcatcactgccatcagaaaggttac

SEQ ID NO: 212005 - DNA, 25 bp, Probe Sequence
gctttgctgatgtagacaagagtta

SEQ ID NO: 212006 - DNA, 25 bp, Probe Sequence
gctttatggccactgagagaattca

SEQ ID NO: 212007 - DNA, 25 bp, Probe Sequence
gctttgctgcccggagagtagtccg

SEQ ID NO: 212008 - DNA, 25 bp, Probe Sequence
gcttctctggaccctagggtcactg

SEQ ID NO: 212009 - DNA, 25 bp, Probe Sequence
gcttttggagcgggcaggggactca

SEQ ID NO: 212010 - DNA, 25 bp, Probe Sequence
gcttcgcgggcagagagtggtacta

SEQ ID NO: 212011 - DNA, 25 bp, Probe Sequence
gctttgcgggcatgcagacggttaa

SEQ ID NO: 212012 - DNA, 25 bp, Probe Sequence
gctttgcgggcatgcagacggttaa

SEQ ID NO: 212013 - DNA, 25 bp, Probe Sequence
gcttagggagcattgatttgtgtct

SEQ ID NO: 212014 - DNA, 25 bp, Probe Sequence
gctttcgaatgctgatatctggtta

SEQ ID NO: 212015 - DNA, 25 bp, Probe Sequence
gctttctgttgtcattgctgttgtc

SEQ ID NO: 212016 - DNA, 25 bp, Probe Sequence
gctttctattacttgtgcatttgcc

SEQ ID NO: 212017 - DNA, 25 bp, Probe Sequence
gctttccaaagatgtatgttgcata

SEQ ID NO: 212018 - DNA, 25 bp, Probe Sequence
gctttctgaacagctggtgtagcta

SEQ ID NO: 212019 - DNA, 25 bp, Probe Sequence
gcttatcttccacttgcaggtttat

SEQ ID NO: 212020 - DNA, 25 bp, Probe Sequence
gctttttgcccttgcataggatgct

SEQ ID NO: 212021 - DNA, 25 bp, Probe Sequence
gcattcctgtccaccaaggattgta

SEQ ID NO: 212022 - DNA, 25 bp, Probe Sequence
gcttcctcagcctccaaagtggagc

SEQ ID NO: 212023 - DNA, 25 bp, Probe Sequence
gcttcccagcctcacaatgtgggaa

SEQ ID NO: 212024 - DNA, 25 bp, Probe Sequence
gcttctccagccacgttggagggac

SEQ ID NO: 212025 - DNA, 25 bp, Probe Sequence
gctttccagagacagtcaggaccga

SEQ ID NO: 212026 - DNA, 25 bp, Probe Sequence
gctttccagaaggcaccagagccct

SEQ ID NO: 212027 - DNA, 25 bp, Probe Sequence
gcttgacccagggggcagaggttgc

SEQ ID NO: 212028 - DNA, 25 bp, Probe Sequence
gcttaccacagggaggcaagctcaa

SEQ ID NO: 212029 - DNA, 25 bp, Probe Sequence
gcttaggccagagtgatggcaccat

SEQ ID NO: 212030 - DNA, 25 bp, Probe Sequence
gctttagcaagcagatggtcacaat

SEQ ID NO: 212031 - DNA, 25 bp, Probe Sequence
gctttcagcaagagatggtcacatc

SEQ ID NO: 212032 - DNA, 25 bp, Probe Sequence
gcttctcagtcatgaatgtggccat

SEQ ID NO: 212033 - DNA, 25 bp, Probe Sequence
gctttagtgcaaatcagcacgccta

SEQ ID NO: 212034 - DNA, 25 bp, Probe Sequence
gctttaggaatatcatgctgacaca

SEQ ID NO: 212035 - DNA, 25 bp, Probe Sequence
gctttcaaatcgtccgcgatgacat

SEQ ID NO: 212036 - DNA, 25 bp, Probe Sequence
gcttccaagttgttcgggccaagga

SEQ ID NO: 212037 - DNA, 25 bp, Probe Sequence
gctttcggctcggaggaggccaagg

SEQ ID NO: 212038 - DNA, 25 bp, Probe Sequence
gctttaggtcaggccaatggtcaca

SEQ ID NO: 212039 - DNA, 25 bp, Probe Sequence
gcttctcagagccaccaaaggacaa

SEQ ID NO: 212040 - DNA, 25 bp, Probe Sequence
gctttcagagctactaggagggcca

SEQ ID NO: 212041 - DNA, 25 bp, Probe Sequence
gcttccagcagcggtatgttgggcc

SEQ ID NO: 212042 - DNA, 25 bp, Probe Sequence
gcttcacgcactatcgatagggcac

SEQ ID NO: 212043 - DNA, 25 bp, Probe Sequence
gcttcagtcctcacatgataataca

SEQ ID NO: 212044 - DNA, 25 bp, Probe Sequence
gcttcagttactcatcataccacac

SEQ ID NO: 212045 - DNA, 25 bp, Probe Sequence
gcattactttctctgaaggaagccc

SEQ ID NO: 212046 - DNA, 25 bp, Probe Sequence
gcttcacttttcctggctgtagagc

SEQ ID NO: 212047 - DNA, 25 bp, Probe Sequence
gcttcacttttcctggctgtagagc

SEQ ID NO: 212048 - DNA, 25 bp, Probe Sequence
gcttatgcctctactgtggttatcc

SEQ ID NO: 212049 - DNA, 25 bp, Probe Sequence
gcttctgcgctggtgcttagtaacc

SEQ ID NO: 212050 - DNA, 25 bp, Probe Sequence
gcttctgtgtgcttctatagaaggg

SEQ ID NO: 212051 - DNA, 25 bp, Probe Sequence
gcattttgggcttaagattgccagc

SEQ ID NO: 212052 - DNA, 25 bp, Probe Sequence
gctttaggagtgcagactctgcctc

SEQ ID NO: 212053 - DNA, 25 bp, Probe Sequence
gcttgtggagttgatgactttctgt

SEQ ID NO: 212054 - DNA, 25 bp, Probe Sequence
gctttctcagttacatgttttgtgt

SEQ ID NO: 212055 - DNA, 25 bp, Probe Sequence
gcttacagcagatactgtttctctg

SEQ ID NO: 212056 - DNA, 25 bp, Probe Sequence
gcttcaatgactccaatatttgctt

SEQ ID NO: 212057 - DNA, 25 bp, Probe Sequence
gcttctgaactcgggtttcttagta

SEQ ID NO: 212058 - DNA, 25 bp, Probe Sequence
gcttcaattccggagtcttcgttta

SEQ ID NO: 212059 - DNA, 25 bp, Probe Sequence
gcttcaattccggagtcttcgttta

SEQ ID NO: 212060 - DNA, 25 bp, Probe Sequence
gcttcaattccggagtcttcgttta

SEQ ID NO: 212061 - DNA, 25 bp, Probe Sequence
gctttatatatcccagtctgacagt

SEQ ID NO: 212062 - DNA, 25 bp, Probe Sequence
gcatttggtcgggcagccgcacact

SEQ ID NO: 212063 - DNA, 25 bp, Probe Sequence
gcattgggctcggctcggagaatgc

SEQ ID NO: 212064 - DNA, 25 bp, Probe Sequence
gcttggagtcagccttgaaggacct

SEQ ID NO: 212065 - DNA, 25 bp, Probe Sequence
gcattcgaggagcaagaaccacctg

SEQ ID NO: 212066 - DNA, 25 bp, Probe Sequence
gcttccactgcaaaaaatgctccgt

SEQ ID NO: 212067 - DNA, 25 bp, Probe Sequence
gcttcctcatgcattctcaatgcca

SEQ ID NO: 212068 - DNA, 25 bp, Probe Sequence
gcttcctgattcagtcacagccatc

SEQ ID NO: 212069 - DNA, 25 bp, Probe Sequence
gcttcatcagttgagtaccaatgcc

SEQ ID NO: 212070 - DNA, 25 bp, Probe Sequence
gcttcatcagttgagtaccaatgcc

SEQ ID NO: 212071 - DNA, 25 bp, Probe Sequence
gcttcataatctgttaacattccaa

SEQ ID NO: 212072 - DNA, 25 bp, Probe Sequence
gcttacaatatctttaggttcctga

SEQ ID NO: 212073 - DNA, 25 bp, Probe Sequence
gcttatcttttttgagagtgtccga

SEQ ID NO: 212074 - DNA, 25 bp, Probe Sequence
gctttcattttctcataggctttat

SEQ ID NO: 212075 - DNA, 25 bp, Probe Sequence
gctttcatttcttccattaattaca

SEQ ID NO: 212076 - DNA, 25 bp, Probe Sequence
gcttcatttgtctagccttaacaaa

SEQ ID NO: 212077 - DNA, 25 bp, Probe Sequence
gcttctgttgtccactgattaatca

SEQ ID NO: 212078 - DNA, 25 bp, Probe Sequence
gctttttgatgggctactcatacag

SEQ ID NO: 212079 - DNA, 25 bp, Probe Sequence
gcttttctgtaggtaccaccatggc

SEQ ID NO: 212080 - DNA, 25 bp, Probe Sequence
gctttctttgaggagacagcccgcc

SEQ ID NO: 212081 - DNA, 25 bp, Probe Sequence
gcttctttggcggtgacaggggtgc

SEQ ID NO: 212082 - DNA, 25 bp, Probe Sequence
gcttctttgccggtatcgtgtggca

SEQ ID NO: 212083 - DNA, 25 bp, Probe Sequence
gcttctttcatcttactagtatggc

SEQ ID NO: 212084 - DNA, 25 bp, Probe Sequence
gcatacttaatcataaagctgtctt

SEQ ID NO: 212085 - DNA, 25 bp, Probe Sequence
gcatacttttccacacatctttgga

SEQ ID NO: 212086 - DNA, 25 bp, Probe Sequence
gcttattttcctaactccatcttag

SEQ ID NO: 212087 - DNA, 25 bp, Probe Sequence
gcatttaattcccataccaaccttg

SEQ ID NO: 212088 - DNA, 25 bp, Probe Sequence
gcttgttgattgggaacatacacgt

SEQ ID NO: 212089 - DNA, 25 bp, Probe Sequence
gcttttctatgccatgactgctaac

SEQ ID NO: 212090 - DNA, 25 bp, Probe Sequence
gctttatgaagccaactctgaacac

SEQ ID NO: 212091 - DNA, 25 bp, Probe Sequence
gcttggtgtagacagtctgaacagt

SEQ ID NO: 212092 - DNA, 25 bp, Probe Sequence
gcttgtgggctagaggctgaccagc

SEQ ID NO: 212093 - DNA, 25 bp, Probe Sequence
gcttggaggctttagtcattcccag

SEQ ID NO: 212094 - DNA, 25 bp, Probe Sequence
gcttggcaagtttgaactcacaggc

SEQ ID NO: 212095 - DNA, 25 bp, Probe Sequence
gcttccatggcaacagatgcctaag

SEQ ID NO: 212096 - DNA, 25 bp, Probe Sequence
gcttcatctggcaacatctttatcc

SEQ ID NO: 212097 - DNA, 25 bp, Probe Sequence
gcttaccagtgatcttctgatcttc

SEQ ID NO: 212098 - DNA, 25 bp, Probe Sequence
gcttaccgtcagatgtctctgttgc

SEQ ID NO: 212099 - DNA, 25 bp, Probe Sequence
gcttaacttcacatattgatttccg

SEQ ID NO: 212100 - DNA, 25 bp, Probe Sequence
gctttaatctgcactcattgaagtc

SEQ ID NO: 212101 - DNA, 25 bp, Probe Sequence
gctttacactagacacatgcaaatg

SEQ ID NO: 212102 - DNA, 25 bp, Probe Sequence
gctttacatggaatcatcagccttg

SEQ ID NO: 212103 - DNA, 25 bp, Probe Sequence
gcttcacacatgaaattgagaaatg

SEQ ID NO: 212104 - DNA, 25 bp, Probe Sequence
gcttacatagacattgcagatcaaa

SEQ ID NO: 212105 - DNA, 25 bp, Probe Sequence
gttccataaatgcccgacaagtaag

SEQ ID NO: 212106 - DNA, 25 bp, Probe Sequence
gcttcctgtaatcccgaaggggaag

SEQ ID NO: 212107 - DNA, 25 bp, Probe Sequence
gcttccacttcatattacgggcggg

SEQ ID NO: 212108 - DNA, 25 bp, Probe Sequence
gcttcccttatgtaactgctagccc

SEQ ID NO: 212109 - DNA, 25 bp, Probe Sequence
gcttccctataataaggacccttgt

SEQ ID NO: 212110 - DNA, 25 bp, Probe Sequence
gcttcccttaaccagaggggccatt

SEQ ID NO: 212111 - DNA, 25 bp, Probe Sequence
gcattcagtccttaaggggtttatt

SEQ ID NO: 212112 - DNA, 25 bp, Probe Sequence
gcttccccaacaggagcaggtttga

SEQ ID NO: 212113 - DNA, 25 bp, Probe Sequence
gcattccccatcttaactgatttaa

SEQ ID NO: 212114 - DNA, 25 bp, Probe Sequence
gcttctacctcagctacttatttac

SEQ ID NO: 212115 - DNA, 25 bp, Probe Sequence
gcattaacccattttatttcctgtc

SEQ ID NO: 212116 - DNA, 25 bp, Probe Sequence
gcattaacccattttatttcctgtc

SEQ ID NO: 212117 - DNA, 25 bp, Probe Sequence
gcattaacccattttatttcctgtc

SEQ ID NO: 212118 - DNA, 25 bp, Probe Sequence
gctttactgctaattttttcctgct

SEQ ID NO: 212119 - DNA, 25 bp, Probe Sequence
gcttttgctgctatttttttgcccc

SEQ ID NO: 212120 - DNA, 25 bp, Probe Sequence
gcttttgtgttatttgttttcactc

SEQ ID NO: 212121 - DNA, 25 bp, Probe Sequence
gcttttgtgttatttgttttcactc

SEQ ID NO: 212122 - DNA, 25 bp, Probe Sequence
gcattttgtgttttgagttccctca

SEQ ID NO: 212123 - DNA, 25 bp, Probe Sequence
gcttttgattatatgcagattccta

SEQ ID NO: 212124 - DNA, 25 bp, Probe Sequence
gcttctagttattcgaatatgctac

SEQ ID NO: 212125 - DNA, 25 bp, Probe Sequence
gctttatctgtttagacatctgcta

SEQ ID NO: 212126 - DNA, 25 bp, Probe Sequence
gcttttcacatttatggctctgtag

SEQ ID NO: 212127 - DNA, 25 bp, Probe Sequence
gcttgttaatgtcagtctgtgctga

SEQ ID NO: 212128 - DNA, 25 bp, Probe Sequence
gcttattaaatgtgtgctggtagga

SEQ ID NO: 212129 - DNA, 25 bp, Probe Sequence
gcttttactctgttgtgaggggaag

SEQ ID NO: 212130 - DNA, 25 bp, Probe Sequence
gcattttgaaatttctaggggaatc

SEQ ID NO: 212131 - DNA, 25 bp, Probe Sequence
gcttttgtaacttgccaggtggact

SEQ ID NO: 212132 - DNA, 25 bp, Probe Sequence
gcttttgtcaagcacttagatggat

SEQ ID NO: 212133 - DNA, 25 bp, Probe Sequence
gcttttggcgcccacagtgatgatg

SEQ ID NO: 212134 - DNA, 25 bp, Probe Sequence
gcttttggcgcccacagtgatgatg

SEQ ID NO: 212135 - DNA, 25 bp, Probe Sequence
gcttttgggactgcatggatatgtg

SEQ ID NO: 212136 - DNA, 25 bp, Probe Sequence
gctttaggggctacagagtcgaggg

SEQ ID NO: 212137 - DNA, 25 bp, Probe Sequence
gcttagggaagctggagtcgaaatg

SEQ ID NO: 212138 - DNA, 25 bp, Probe Sequence
gcatcgaaggggctggagaagaaag

SEQ ID NO: 212139 - DNA, 25 bp, Probe Sequence
gcttaggaatgccctttatggaaag

SEQ ID NO: 212140 - DNA, 25 bp, Probe Sequence
gcttaaccatgcctccattgggaag

SEQ ID NO: 212141 - DNA, 25 bp, Probe Sequence
gcttagtcctctcctagggagaagc

SEQ ID NO: 212142 - DNA, 25 bp, Probe Sequence
gcttgagtcccacgtgggggaggag

SEQ ID NO: 212143 - DNA, 25 bp, Probe Sequence
gcttgaatgtcccagtctattcggg

SEQ ID NO: 212144 - DNA, 25 bp, Probe Sequence
gcttgtcaacaccatgttcttcaag

SEQ ID NO: 212145 - DNA, 25 bp, Probe Sequence
gcttccaacaggttactggcaatgc

SEQ ID NO: 212146 - DNA, 25 bp, Probe Sequence
gcttcaaaaggaaactacagtcgtc

SEQ ID NO: 212147 - DNA, 25 bp, Probe Sequence
gcttcgagaaggacaaatacatttt

SEQ ID NO: 212148 - DNA, 25 bp, Probe Sequence
gcttcaaacagccgcaaaactcaat

SEQ ID NO: 212149 - DNA, 25 bp, Probe Sequence
gcttataaagctccgattatctcaa

SEQ ID NO: 212150 - DNA, 25 bp, Probe Sequence
gcttctcgaatttatgtatttcaac

SEQ ID NO: 212151 - DNA, 25 bp, Probe Sequence
gcttcacaacaatatctatttctac

SEQ ID NO: 212152 - DNA, 25 bp, Probe Sequence
gcttataacaggccatccatttttg

SEQ ID NO: 212153 - DNA, 25 bp, Probe Sequence
gcttaaaaggcctgcatgaggattg

SEQ ID NO: 212154 - DNA, 25 bp, Probe Sequence
gcttaaggatgtgattggatggatc

SEQ ID NO: 212155 - DNA, 25 bp, Probe Sequence
gcttattgggtgccatttgatattc

SEQ ID NO: 212156 - DNA, 25 bp, Probe Sequence
gcttaaagaatgccctttatgatgc

SEQ ID NO: 212157 - DNA, 25 bp, Probe Sequence
gcttgtaaggaactgtatccaggcc

SEQ ID NO: 212158 - DNA, 25 bp, Probe Sequence
gcattgtccgagaggaccagaccct

SEQ ID NO: 212159 - DNA, 25 bp, Probe Sequence
gcttgactcgtttggatcacaaccg

SEQ ID NO: 212160 - DNA, 25 bp, Probe Sequence
gcttgaatctgtattacccagaagc

SEQ ID NO: 212161 - DNA, 25 bp, Probe Sequence
gcttaccattggtaacccagagtgc

SEQ ID NO: 212162 - DNA, 25 bp, Probe Sequence
gcattgacacaacgtaacaccagca

SEQ ID NO: 212163 - DNA, 25 bp, Probe Sequence
gcttgcatccaactgtgatgagcct

SEQ ID NO: 212164 - DNA, 25 bp, Probe Sequence
gcttacgaagtggctgagaggggca

SEQ ID NO: 212165 - DNA, 25 bp, Probe Sequence
gcttgcaaaagtggcacagagttag

SEQ ID NO: 212166 - DNA, 25 bp, Probe Sequence
gcttcaatattggaaccagtttgct

SEQ ID NO: 212167 - DNA, 25 bp, Probe Sequence
gcttcaatagtggaatctactttca

SEQ ID NO: 212168 - DNA, 25 bp, Probe Sequence
gcttccatagtggagacttgctttt

SEQ ID NO: 212169 - DNA, 25 bp, Probe Sequence
gcttctcattatggaacttcttact

SEQ ID NO: 212170 - DNA, 25 bp, Probe Sequence
gcttctctctcagaacttttatcta

SEQ ID NO: 212171 - DNA, 25 bp, Probe Sequence
gcttatgactcaaaacgtcctacag

SEQ ID NO: 212172 - DNA, 25 bp, Probe Sequence
gcttatacgaaaacccacattccaa

SEQ ID NO: 212173 - DNA, 25 bp, Probe Sequence
gcttattcggaacattcctctgtaa

SEQ ID NO: 212174 - DNA, 25 bp, Probe Sequence
gcattttcaaatttatccccgtaat

SEQ ID NO: 212175 - DNA, 25 bp, Probe Sequence
gcttatgtgctattttaccaacgtc

SEQ ID NO: 212176 - DNA, 25 bp, Probe Sequence
gcttagtgtgaagttgatacgcaag

SEQ ID NO: 212177 - DNA, 25 bp, Probe Sequence
gcttcagtggagaataaaccagctg

SEQ ID NO: 212178 - DNA, 25 bp, Probe Sequence
gcttcgtcggcaaaaataatgtgca

SEQ ID NO: 212179 - DNA, 25 bp, Probe Sequence
gcttcagccaggcaagaaagcttcc

SEQ ID NO: 212180 - DNA, 25 bp, Probe Sequence
gcttccacagcgtaaatacacccac

SEQ ID NO: 212181 - DNA, 25 bp, Probe Sequence
gcttgcccaggttcaaactggaaga

SEQ ID NO: 212182 - DNA, 25 bp, Probe Sequence
gcttcctcagagctcaggagcgggc

SEQ ID NO: 212183 - DNA, 25 bp, Probe Sequence
gcttcctcagagctcaggagcgggc

SEQ ID NO: 212184 - DNA, 25 bp, Probe Sequence
gcttttcagagcctgggtgcgggca

SEQ ID NO: 212185 - DNA, 25 bp, Probe Sequence
gcttttagaagacatgtgctgggca

SEQ ID NO: 212186 - DNA, 25 bp, Probe Sequence
gcttttggacagagagctgtgccag

SEQ ID NO: 212187 - DNA, 25 bp, Probe Sequence
gcattttggcactgggatgggatgg

SEQ ID NO: 212188 - DNA, 25 bp, Probe Sequence
gcttggtcgcagtgactgtggtgtc

SEQ ID NO: 212189 - DNA, 25 bp, Probe Sequence
gcttcagtccagggctcatggaggc

SEQ ID NO: 212190 - DNA, 25 bp, Probe Sequence
gcttcagtgtgcaggctctgaggct

SEQ ID NO: 212191 - DNA, 25 bp, Probe Sequence
gcatagggcttagcctgcaggcttc

SEQ ID NO: 212192 - DNA, 25 bp, Probe Sequence
gcttgtcacttgaatcccgtgattg

SEQ ID NO: 212193 - DNA, 25 bp, Probe Sequence
gcttgatcctgggaggcagaggttg

SEQ ID NO: 212194 - DNA, 25 bp, Probe Sequence
gcttctgcctactgagcaaggttgg

SEQ ID NO: 212195 - DNA, 25 bp, Probe Sequence
gcttatgccgactatagctacgcta

SEQ ID NO: 212196 - DNA, 25 bp, Probe Sequence
gcttgaatcaaccaatctgatctgc

SEQ ID NO: 212197 - DNA, 25 bp, Probe Sequence
gcatatggcttgtcagagctcattc

SEQ ID NO: 212198 - DNA, 25 bp, Probe Sequence
gcattggcagttaagtttccacgta

SEQ ID NO: 212199 - DNA, 25 bp, Probe Sequence
gcattatgttctctggtaacacgta

SEQ ID NO: 212200 - DNA, 25 bp, Probe Sequence
gcttagtgtctctaaaaaccgaata

SEQ ID NO: 212201 - DNA, 25 bp, Probe Sequence
gcttgactgcttttaaatgaccaaa

SEQ ID NO: 212202 - DNA, 25 bp, Probe Sequence
gcttgactgcttttaaatgaccaaa

SEQ ID NO: 212203 - DNA, 25 bp, Probe Sequence
gcttctctgttagtctattgggaaa

SEQ ID NO: 212204 - DNA, 25 bp, Probe Sequence
gcttctcatgttcccgagttgaaaa

SEQ ID NO: 212205 - DNA, 25 bp, Probe Sequence
gcttatattttgccagtgcatatga

SEQ ID NO: 212206 - DNA, 25 bp, Probe Sequence
gcttgctactgaggccaggctgata

SEQ ID NO: 212207 - DNA, 25 bp, Probe Sequence
gcttctatttcgaccgcgatgatgt

SEQ ID NO: 212208 - DNA, 25 bp, Probe Sequence
gcttctcatttctacactactgagt

SEQ ID NO: 212209 - DNA, 25 bp, Probe Sequence
gcttgtctttcagcatcggtagtgc

SEQ ID NO: 212210 - DNA, 25 bp, Probe Sequence
gcttgtttgactacacagtggcctc

SEQ ID NO: 212211 - DNA, 25 bp, Probe Sequence
gcttttggcactgctcacagagccc

SEQ ID NO: 212212 - DNA, 25 bp, Probe Sequence
gcttttcagttgttacagagctcag

SEQ ID NO: 212213 - DNA, 25 bp, Probe Sequence
gcttttgctgctgtgttaatgtcat

SEQ ID NO: 212214 - DNA, 25 bp, Probe Sequence
gcttttgctgttgcctttggcatca

SEQ ID NO: 212215 - DNA, 25 bp, Probe Sequence
gcttatttttccttcagatgtctca

SEQ ID NO: 212216 - DNA, 25 bp, Probe Sequence
gcttattgttccaagacattgtcaa

SEQ ID NO: 212217 - DNA, 25 bp, Probe Sequence
gcttttgtatcttgacacattgtga

SEQ ID NO: 212218 - DNA, 25 bp, Probe Sequence
gcttcatagtattggagcacatgtt

SEQ ID NO: 212219 - DNA, 25 bp, Probe Sequence
gcatcttaggaactgctgaagtaac

SEQ ID NO: 212220 - DNA, 25 bp, Probe Sequence
gcatttagcacaatttgagactgaa

SEQ ID NO: 212221 - DNA, 25 bp, Probe Sequence
gcttcttgacatgctgcataactac

SEQ ID NO: 212222 - DNA, 25 bp, Probe Sequence
gcttttgcacagacttcatataatc

SEQ ID NO: 212223 - DNA, 25 bp, Probe Sequence
gcttgatgtcacacatttccaatct

SEQ ID NO: 212224 - DNA, 25 bp, Probe Sequence
gcttgttatggtttctgccagattc

SEQ ID NO: 212225 - DNA, 25 bp, Probe Sequence
gcttggatattttaatgcacgttgc

SEQ ID NO: 212226 - DNA, 25 bp, Probe Sequence
gcttggttctgtgaacaagcttcag

SEQ ID NO: 212227 - DNA, 25 bp, Probe Sequence
gcttgagtcatcagccaacagactg

SEQ ID NO: 212228 - DNA, 25 bp, Probe Sequence
gcttcctgtagggcaagaactggaa

SEQ ID NO: 212229 - DNA, 25 bp, Probe Sequence
gcttgactggatggaaggagactta

SEQ ID NO: 212230 - DNA, 25 bp, Probe Sequence
gcttgactcagtgatgcagaacctt

SEQ ID NO: 212231 - DNA, 25 bp, Probe Sequence
gcattgaatgtgtgtcgaacctcta

SEQ ID NO: 212232 - DNA, 25 bp, Probe Sequence
gcattgacaagaagatcgagttcca

SEQ ID NO: 212233 - DNA, 25 bp, Probe Sequence
gcttaacacaaacagcctcagaccc

SEQ ID NO: 212234 - DNA, 25 bp, Probe Sequence
gcttaaacttccagctctatcacca

SEQ ID NO: 212235 - DNA, 25 bp, Probe Sequence
gcttacaagttgctactggatcagg

SEQ ID NO: 212236 - DNA, 25 bp, Probe Sequence
gcttcactaattgtatctgagcaca

SEQ ID NO: 212237 - DNA, 25 bp, Probe Sequence
gcttactaacagatagtgaggcgag

SEQ ID NO: 212238 - DNA, 25 bp, Probe Sequence
gcttcctaacatccttggactgaga

SEQ ID NO: 212239 - DNA, 25 bp, Probe Sequence
gcttcccagaggtctgtgcgactag

SEQ ID NO: 212240 - DNA, 25 bp, Probe Sequence
gcttctgagggccattgctgggcta

SEQ ID NO: 212241 - DNA, 25 bp, Probe Sequence
gcattggacgtccattgggagtttt

SEQ ID NO: 212242 - DNA, 25 bp, Probe Sequence
gcattgaacgtgctggccgactatc

SEQ ID NO: 212243 - DNA, 25 bp, Probe Sequence
gcttgagtcaagcctgtccagagtt

SEQ ID NO: 212244 - DNA, 25 bp, Probe Sequence
gcttgcacgcggccttggcagcagc

SEQ ID NO: 212245 - DNA, 25 bp, Probe Sequence
gcttcacggctggctatgtggacag

SEQ ID NO: 212246 - DNA, 25 bp, Probe Sequence
gcttcaaggctggggatgagctgac

SEQ ID NO: 212247 - DNA, 25 bp, Probe Sequence
gcttccaggctggatggagtgccct

SEQ ID NO: 212248 - DNA, 25 bp, Probe Sequence
gcttccaggctggatggagtgccct

SEQ ID NO: 212249 - DNA, 25 bp, Probe Sequence
gcttgctatacttacgagatgccct

SEQ ID NO: 212250 - DNA, 25 bp, Probe Sequence
gcttatcacctttcatggatcacgc

SEQ ID NO: 212251 - DNA, 25 bp, Probe Sequence
gcatttcacctttctgcaacaagtt

SEQ ID NO: 212252 - DNA, 25 bp, Probe Sequence
gcttgtcctgctacttgctaaagtt

SEQ ID NO: 212253 - DNA, 25 bp, Probe Sequence
gcttgagccattattgctaaggccc

SEQ ID NO: 212254 - DNA, 25 bp, Probe Sequence
gcttgagaacttttgtaacgtggag

SEQ ID NO: 212255 - DNA, 25 bp, Probe Sequence
gcttcaatacttggctttaggtggc

SEQ ID NO: 212256 - DNA, 25 bp, Probe Sequence
gcttgtagcaccagctattggctgt

SEQ ID NO: 212257 - DNA, 25 bp, Probe Sequence
gcattctacatactggctaaggtct

SEQ ID NO: 212258 - DNA, 25 bp, Probe Sequence
gcttctcagatgtatttcaaggact

SEQ ID NO: 212259 - DNA, 25 bp, Probe Sequence
gcttccaggtgaaactctatgacat

SEQ ID NO: 212260 - DNA, 25 bp, Probe Sequence
gcttgcggcgggaatcaccagaatc

SEQ ID NO: 212261 - DNA, 25 bp, Probe Sequence
gcttggagcggctccagctgcaagc

SEQ ID NO: 212262 - DNA, 25 bp, Probe Sequence
gcttgaggccagacctactgtagcc

SEQ ID NO: 212263 - DNA, 25 bp, Probe Sequence
gcttcacctagaactgacgtactcc

SEQ ID NO: 212264 - DNA, 25 bp, Probe Sequence
gcatctcccataaacgaggtactgc

SEQ ID NO: 212265 - DNA, 25 bp, Probe Sequence
gcttcctcagcaaaggggaatctgt

SEQ ID NO: 212266 - DNA, 25 bp, Probe Sequence
gcattttcaagaagacggattatct

SEQ ID NO: 212267 - DNA, 25 bp, Probe Sequence
tcattcattcaaaaactacttagtg

SEQ ID NO: 212268 - DNA, 25 bp, Probe Sequence
gcttattcaagagatcttcattaag

SEQ ID NO: 212269 - DNA, 25 bp, Probe Sequence
gcttatacacaattcattctttgca

SEQ ID NO: 212270 - DNA, 25 bp, Probe Sequence
gcttatacacaattcattctttgca

SEQ ID NO: 212271 - DNA, 25 bp, Probe Sequence
gcttctgcaccttatcttaaagcac

SEQ ID NO: 212272 - DNA, 25 bp, Probe Sequence
gcttcgcatccttagctttacgtaa

SEQ ID NO: 212273 - DNA, 25 bp, Probe Sequence
gcattcgctcctgagcggaatcctg

SEQ ID NO: 212274 - DNA, 25 bp, Probe Sequence
gcttctgctcctgatgtggatgacc

SEQ ID NO: 212275 - DNA, 25 bp, Probe Sequence
gcttatgtcgctgcctgtgaggcac

SEQ ID NO: 212276 - DNA, 25 bp, Probe Sequence
gcataattagctgactgtgacccaa

SEQ ID NO: 212277 - DNA, 25 bp, Probe Sequence
gcatattcgatgcaatcctgaccaa

SEQ ID NO: 212278 - DNA, 25 bp, Probe Sequence
gcatttccgcaggagcctgggcaag

SEQ ID NO: 212279 - DNA, 25 bp, Probe Sequence
gcttccactgcagtgcagacgggcg

SEQ ID NO: 212280 - DNA, 25 bp, Probe Sequence
gcttcagccttctgagcagctggga

SEQ ID NO: 212281 - DNA, 25 bp, Probe Sequence
gcttcagccttctgagcagctggga

SEQ ID NO: 212282 - DNA, 25 bp, Probe Sequence
gcttggcctggacaatgctggaaag

SEQ ID NO: 212283 - DNA, 25 bp, Probe Sequence
gcttatgcacgtatattggtatagt

SEQ ID NO: 212284 - DNA, 25 bp, Probe Sequence
gcttagccattgatattgcagttac

SEQ ID NO: 212285 - DNA, 25 bp, Probe Sequence
gcttcactgcttttaatacttagca

SEQ ID NO: 212286 - DNA, 25 bp, Probe Sequence
gcttacctgtacactgacttgagac

SEQ ID NO: 212287 - DNA, 25 bp, Probe Sequence
gcttgtgcctgtggttaacatctca

SEQ ID NO: 212288 - DNA, 25 bp, Probe Sequence
gcttatggcatgagggacctctcgg

SEQ ID NO: 212289 - DNA, 25 bp, Probe Sequence
gcttaggtatctgtgactcttgggc

SEQ ID NO: 212290 - DNA, 25 bp, Probe Sequence
gcttcaagtttcatgaatctgtaac

SEQ ID NO: 212291 - DNA, 25 bp, Probe Sequence
gcttccagtgattttgataatgcca

SEQ ID NO: 212292 - DNA, 25 bp, Probe Sequence
gcattccagtacactgacaaacacg

SEQ ID NO: 212293 - DNA, 25 bp, Probe Sequence
gcttccctcactgtgtacagaacgc

SEQ ID NO: 212294 - DNA, 25 bp, Probe Sequence
gcattccccattgctgatacaaatg

SEQ ID NO: 212295 - DNA, 25 bp, Probe Sequence
gcatttacctctgtaccaacagagg

SEQ ID NO: 212296 - DNA, 25 bp, Probe Sequence
gcttgaacgcctgcgtgtgaacaga

SEQ ID NO: 212297 - DNA, 25 bp, Probe Sequence
gcttggaagcctggacgtgacacga

SEQ ID NO: 212298 - DNA, 25 bp, Probe Sequence
gcttggatcagtaagtctggttccc

SEQ ID NO: 212299 - DNA, 25 bp, Probe Sequence
gcttgggagttgttgggttcctgcg

SEQ ID NO: 212300 - DNA, 25 bp, Probe Sequence
gcttctgagatttttggtttccttg

SEQ ID NO: 212301 - DNA, 25 bp, Probe Sequence
gcttgtggatttctatgttatgccg

SEQ ID NO: 212302 - DNA, 25 bp, Probe Sequence
gcttgctggatttgtgttagctatg

SEQ ID NO: 212303 - DNA, 25 bp, Probe Sequence
gcttgctgtgagtgtctctagggtg

SEQ ID NO: 212304 - DNA, 25 bp, Probe Sequence
gcttctgtttggtcttagagtgttt

SEQ ID NO: 212305 - DNA, 25 bp, Probe Sequence
gcttctggttctttattgggttatg

SEQ ID NO: 212306 - DNA, 25 bp, Probe Sequence
gcttctggttgattaatgagggcat

SEQ ID NO: 212307 - DNA, 25 bp, Probe Sequence
gcttcgtgtctgactttgaggagct

SEQ ID NO: 212308 - DNA, 25 bp, Probe Sequence
gcattatgtgtaactctggcaggac

SEQ ID NO: 212309 - DNA, 25 bp, Probe Sequence
gcttatgtaacaggatggggcgctc

SEQ ID NO: 212310 - DNA, 25 bp, Probe Sequence
gcttcttgcaaggctgagtgaggcc

SEQ ID NO: 212311 - DNA, 25 bp, Probe Sequence
gcttcttctcagacgctggaggtga

SEQ ID NO: 212312 - DNA, 25 bp, Probe Sequence
gcttctgggcagactctggtcaaga

SEQ ID NO: 212313 - DNA, 25 bp, Probe Sequence
gcttcgtgctgaacctgggcaaaga

SEQ ID NO: 212314 - DNA, 25 bp, Probe Sequence
gcttcttgaagacctatgtaaagaa

SEQ ID NO: 212315 - DNA, 25 bp, Probe Sequence
gcttctcttagacgctttaaagttc

SEQ ID NO: 212316 - DNA, 25 bp, Probe Sequence
gcttcatcgtaactgcttctagaga

SEQ ID NO: 212317 - DNA, 25 bp, Probe Sequence
gcttctcaatactattgcttcaggc

SEQ ID NO: 212318 - DNA, 25 bp, Probe Sequence
gcttctccaagacttcttcaatgga

SEQ ID NO: 212319 - DNA, 25 bp, Probe Sequence
gcttgcttaagacttgcccaagtcc

SEQ ID NO: 212320 - DNA, 25 bp, Probe Sequence
gcttcagtaaagcagccctggtcag

SEQ ID NO: 212321 - DNA, 25 bp, Probe Sequence
gcttcccagataagcagcccaggaa

SEQ ID NO: 212322 - DNA, 25 bp, Probe Sequence
gcttcctggagttacctcagcagaa

SEQ ID NO: 212323 - DNA, 25 bp, Probe Sequence
gcttccggagacaaccctggaaaca

SEQ ID NO: 212324 - DNA, 25 bp, Probe Sequence
gcttccttaatcacacctgcaaagt

SEQ ID NO: 212325 - DNA, 25 bp, Probe Sequence
tctaggctaagtatgcacctaaata

SEQ ID NO: 212326 - DNA, 25 bp, Probe Sequence
gcttgtgtacagtgctcacctaaat

SEQ ID NO: 212327 - DNA, 25 bp, Probe Sequence
gcttggaagagcctggacactaaca

SEQ ID NO: 212328 - DNA, 25 bp, Probe Sequence
gcttaagtgtgcctggcaaccaaat

SEQ ID NO: 212329 - DNA, 25 bp, Probe Sequence
gcttcttcggctcggagcccaagat

SEQ ID NO: 212330 - DNA, 25 bp, Probe Sequence
gcttacatagaaagagagcccaaga

SEQ ID NO: 212331 - DNA, 25 bp, Probe Sequence
gcttccatcagtaagatggccccag

SEQ ID NO: 212332 - DNA, 25 bp, Probe Sequence
gcattcacacgtgtgtgtgtcccag

SEQ ID NO: 212333 - DNA, 25 bp, Probe Sequence
gcttagagagatctgctgtctccca

SEQ ID NO: 212334 - DNA, 25 bp, Probe Sequence
gcttcatgacaacggctttccagta

SEQ ID NO: 212335 - DNA, 25 bp, Probe Sequence
gcttcagcagaaaacttcccgttct

SEQ ID NO: 212336 - DNA, 25 bp, Probe Sequence
gcttcagtgacaaacatatcctttc

SEQ ID NO: 212337 - DNA, 25 bp, Probe Sequence
gcttcagaacttaattcatctaatc

SEQ ID NO: 212338 - DNA, 25 bp, Probe Sequence
gcttcaggtcttaatgcctccatac

SEQ ID NO: 212339 - DNA, 25 bp, Probe Sequence
gcttgatggttttgatcctcgaggc

SEQ ID NO: 212340 - DNA, 25 bp, Probe Sequence
gcattgttgttctgttttgagggtt

SEQ ID NO: 212341 - DNA, 25 bp, Probe Sequence
gcaaggtgcctccctttaaggattt

SEQ ID NO: 212342 - DNA, 25 bp, Probe Sequence
gcatacgtctgtgcaattttttatt

SEQ ID NO: 212343 - DNA, 25 bp, Probe Sequence
gcatacgtctgtgcaattttttatt

SEQ ID NO: 212344 - DNA, 25 bp, Probe Sequence
gcttctgtttccatcctattgaatt

SEQ ID NO: 212345 - DNA, 25 bp, Probe Sequence
gcttgaggcctctgggtttgaattc

SEQ ID NO: 212346 - DNA, 25 bp, Probe Sequence
tgcctatgcccctgggccagggatt

SEQ ID NO: 212347 - DNA, 25 bp, Probe Sequence
gcttgatggcaatcctggaagggtt

SEQ ID NO: 212348 - DNA, 25 bp, Probe Sequence
gcttgatgagaaggacccacggcgt

SEQ ID NO: 212349 - DNA, 25 bp, Probe Sequence
gcttgggaaggattacggggcgctg

SEQ ID NO: 212350 - DNA, 25 bp, Probe Sequence
gcttgggatggttgtggggggctgg

SEQ ID NO: 212351 - DNA, 25 bp, Probe Sequence
gcatggaggggcactggggaaggtc

SEQ ID NO: 212352 - DNA, 25 bp, Probe Sequence
gagggtgggggcacggaattcgaag

SEQ ID NO: 212353 - DNA, 25 bp, Probe Sequence
gttggggactggagggaatagggag

SEQ ID NO: 212354 - DNA, 25 bp, Probe Sequence
ttggggaacggcactgggtaccgtg

SEQ ID NO: 212355 - DNA, 25 bp, Probe Sequence
ttccggaacgccactgggcagtaca

SEQ ID NO: 212356 - DNA, 25 bp, Probe Sequence
gcatccggaacagctccgtgtactg

SEQ ID NO: 212357 - DNA, 25 bp, Probe Sequence
gcttctgggaagtcctcagagtaca

SEQ ID NO: 212358 - DNA, 25 bp, Probe Sequence
gcttctgggtagcactggtttgcat

SEQ ID NO: 212359 - DNA, 25 bp, Probe Sequence
gcttctgtggaacgagggtttattt

SEQ ID NO: 212360 - DNA, 25 bp, Probe Sequence
gcatacgtgtggcgggactttgatt

SEQ ID NO: 212361 - DNA, 25 bp, Probe Sequence
gcaaaggataccctggagtttacac

SEQ ID NO: 212362 - DNA, 25 bp, Probe Sequence
gcaagggattcgggcgaagacaaac

SEQ ID NO: 212363 - DNA, 25 bp, Probe Sequence
gaactggctccggggaaagaatagg

SEQ ID NO: 212364 - DNA, 25 bp, Probe Sequence
gcagaaccccgccgtgtaaagaggc

SEQ ID NO: 212365 - DNA, 25 bp, Probe Sequence
gcagaagtttgagggtggaaaggcc

SEQ ID NO: 212366 - DNA, 25 bp, Probe Sequence
gcagttgttccaggggtgaagcctc

SEQ ID NO: 212367 - DNA, 25 bp, Probe Sequence
gcaggatttgccgggtaaagctgta

SEQ ID NO: 212368 - DNA, 25 bp, Probe Sequence
gaatgaattctagggctaagtgtag

SEQ ID NO: 212369 - DNA, 25 bp, Probe Sequence
gcttaatttaagtctgaatggtatt

SEQ ID NO: 212370 - DNA, 25 bp, Probe Sequence
gcttcagatttaaggctgacaggaa

SEQ ID NO: 212371 - DNA, 25 bp, Probe Sequence
gcttaatgtatggggcttaggaacc

SEQ ID NO: 212372 - DNA, 25 bp, Probe Sequence
gcttgaactaggggaaaggccactc

SEQ ID NO: 212373 - DNA, 25 bp, Probe Sequence
gcttccctaactgcaaaggcaatct

SEQ ID NO: 212374 - DNA, 25 bp, Probe Sequence
gcttgccctaagcagaaagtgcctt

SEQ ID NO: 212375 - DNA, 25 bp, Probe Sequence
gcttccgccagacaacatgtggtct

SEQ ID NO: 212376 - DNA, 25 bp, Probe Sequence
gcttctggccagggatcctgggtct

SEQ ID NO: 212377 - DNA, 25 bp, Probe Sequence
gcattctaggaggcctcctgactta

SEQ ID NO: 212378 - DNA, 25 bp, Probe Sequence
gcttctcagagagccttgctttggt

SEQ ID NO: 212379 - DNA, 25 bp, Probe Sequence
gcttcgagtgaagctcttcctgggg

SEQ ID NO: 212380 - DNA, 25 bp, Probe Sequence
gcttcagggagtgttcccagggagc

SEQ ID NO: 212381 - DNA, 25 bp, Probe Sequence
gcttctggaagggctatcctggggg

SEQ ID NO: 212382 - DNA, 25 bp, Probe Sequence
gcttgttggggagttcctggaagtg

SEQ ID NO: 212383 - DNA, 25 bp, Probe Sequence
gcagggcggggaggttagggtgtga

SEQ ID NO: 212384 - DNA, 25 bp, Probe Sequence
gcatgggaagcacggaatatagggt

SEQ ID NO: 212385 - DNA, 25 bp, Probe Sequence
ggggaaagtcaacatagtggttagg

SEQ ID NO: 212386 - DNA, 25 bp, Probe Sequence
gagggaaaacaagagactattatga

SEQ ID NO: 212387 - DNA, 25 bp, Probe Sequence
gagtgggtcaaagtaaactgaattg

SEQ ID NO: 212388 - DNA, 25 bp, Probe Sequence
gagggtggcagtgtacccgtcatta

SEQ ID NO: 212389 - DNA, 25 bp, Probe Sequence
tgcccgggcaactgaagccttttga

SEQ ID NO: 212390 - DNA, 25 bp, Probe Sequence
gcatccggttactgggcaatttcta

SEQ ID NO: 212391 - DNA, 25 bp, Probe Sequence
gcatcgccgtcaaaagggcttatta

SEQ ID NO: 212392 - DNA, 25 bp, Probe Sequence
gcattgccctcaacgaccactttgt

SEQ ID NO: 212393 - DNA, 25 bp, Probe Sequence
gcttccctatgcagaacctgctttt

SEQ ID NO: 212394 - DNA, 25 bp, Probe Sequence
gcttctttactccagaactctgttc

SEQ ID NO: 212395 - DNA, 25 bp, Probe Sequence
gcttctggtgatgaaggccctttcg

SEQ ID NO: 212396 - DNA, 25 bp, Probe Sequence
gcttctgagttgaggagccttcacc

SEQ ID NO: 212397 - DNA, 25 bp, Probe Sequence
gcttctgagttgaggagccttcacc

SEQ ID NO: 212398 - DNA, 25 bp, Probe Sequence
gcttctgagttgaggagccttcacc

SEQ ID NO: 212399 - DNA, 25 bp, Probe Sequence
gcttcatggtgactcggtcctatac

SEQ ID NO: 212400 - DNA, 25 bp, Probe Sequence
gcttcagggacatgagcaccgagcg

SEQ ID NO: 212401 - DNA, 25 bp, Probe Sequence
gcattgcggacctaaagctgctggc

SEQ ID NO: 212402 - DNA, 25 bp, Probe Sequence
gcttcggacccatattttccatagc

SEQ ID NO: 212403 - DNA, 25 bp, Probe Sequence
gcttcgagaaccaagctttcccgat

SEQ ID NO: 212404 - DNA, 25 bp, Probe Sequence
gcttcgagaaccaagctttcccgat

SEQ ID NO: 212405 - DNA, 25 bp, Probe Sequence
gcttctgaaaggtgctttctccatt

SEQ ID NO: 212406 - DNA, 25 bp, Probe Sequence
gcttgtgagaaacctcttttcttta

SEQ ID NO: 212407 - DNA, 25 bp, Probe Sequence
gcttgggaaatgctttcttcgtact

SEQ ID NO: 212408 - DNA, 25 bp, Probe Sequence
gcttgtggtatgtgttttccaaact

SEQ ID NO: 212409 - DNA, 25 bp, Probe Sequence
gcacttggggcttttttctaatttg

SEQ ID NO: 212410 - DNA, 25 bp, Probe Sequence
gcaccgggttatctttctttatgtt

SEQ ID NO: 212411 - DNA, 25 bp, Probe Sequence
gaccagggttcacattggccaagtt

SEQ ID NO: 212412 - DNA, 25 bp, Probe Sequence
gcaccggaattcctttgggatgaat

SEQ ID NO: 212413 - DNA, 25 bp, Probe Sequence
gcaccgggagttgagggagcagacg

SEQ ID NO: 212414 - DNA, 25 bp, Probe Sequence
gcttcgggagttcaggccagagatc

SEQ ID NO: 212415 - DNA, 25 bp, Probe Sequence
gcttgggaagcctggtgccgatggc

SEQ ID NO: 212416 - DNA, 25 bp, Probe Sequence
gcacgtggtacctggtgggattggt

SEQ ID NO: 212417 - DNA, 25 bp, Probe Sequence
gcataaggttcgggaagaggttgtt

SEQ ID NO: 212418 - DNA, 25 bp, Probe Sequence
gcttgggtagtggaaagggtgtttg

SEQ ID NO: 212419 - DNA, 25 bp, Probe Sequence
gcttcgttaggctggagggcatgtt

SEQ ID NO: 212420 - DNA, 25 bp, Probe Sequence
gcttcgatgagagcggcaagggcaa

SEQ ID NO: 212421 - DNA, 25 bp, Probe Sequence
gcttcgagaagcgccacaagaacat

SEQ ID NO: 212422 - DNA, 25 bp, Probe Sequence
gcttcgagaagcgccacaagaacat

SEQ ID NO: 212423 - DNA, 25 bp, Probe Sequence
gcttcgagaagcgccacaagaacat

SEQ ID NO: 212424 - DNA, 25 bp, Probe Sequence
gcatctcaacaaccaccaaatttta

SEQ ID NO: 212425 - DNA, 25 bp, Probe Sequence
gcattgaaaaccacaacttttacct

SEQ ID NO: 212426 - DNA, 25 bp, Probe Sequence
gcatctgtaacagcattaactgtct

SEQ ID NO: 212427 - DNA, 25 bp, Probe Sequence
gcatctgtaacagcattaactgtct

SEQ ID NO: 212428 - DNA, 25 bp, Probe Sequence
gcatttaccaacatgtatctgtcta

SEQ ID NO: 212429 - DNA, 25 bp, Probe Sequence
gcttctacacaggagtctatattct

SEQ ID NO: 212430 - DNA, 25 bp, Probe Sequence
gcaccagaaaggcactgcattcatc

SEQ ID NO: 212431 - DNA, 25 bp, Probe Sequence
gcatccttagatgggacgcataatc

SEQ ID NO: 212432 - DNA, 25 bp, Probe Sequence
gcatcgctgtaaaaagcctaccaat

SEQ ID NO: 212433 - DNA, 25 bp, Probe Sequence
gcatcaggtggcaaaattcattcta

SEQ ID NO: 212434 - DNA, 25 bp, Probe Sequence
gcatcagagatgacacggatcgcca

SEQ ID NO: 212435 - DNA, 25 bp, Probe Sequence
gcattgctgtgtgtggacagccaca

SEQ ID NO: 212436 - DNA, 25 bp, Probe Sequence
gcttggtgtcctgggaagacatcca

SEQ ID NO: 212437 - DNA, 25 bp, Probe Sequence
gcttgttatccgggcaatggaacgg

SEQ ID NO: 212438 - DNA, 25 bp, Probe Sequence
gcttgaaatctgcggcaattggagt

SEQ ID NO: 212439 - DNA, 25 bp, Probe Sequence
gcattggaacgcagtcagatttgaa

SEQ ID NO: 212440 - DNA, 25 bp, Probe Sequence
gcttggcgggggacagattctatga

SEQ ID NO: 212441 - DNA, 25 bp, Probe Sequence
gcttccgccggggagattttatcca

SEQ ID NO: 212442 - DNA, 25 bp, Probe Sequence
gattctcagtactggcgttttacca

SEQ ID NO: 212443 - DNA, 25 bp, Probe Sequence
gcatttacaactatggctttattaa

SEQ ID NO: 212444 - DNA, 25 bp, Probe Sequence
gcatcttcgaaaacggctacgaccc

SEQ ID NO: 212445 - DNA, 25 bp, Probe Sequence
gcatactgagaatctaggccacccc

SEQ ID NO: 212446 - DNA, 25 bp, Probe Sequence
gcatgccagaagtggcaggggccat

SEQ ID NO: 212447 - DNA, 25 bp, Probe Sequence
gcatcaaggacatggccgggctgct

SEQ ID NO: 212448 - DNA, 25 bp, Probe Sequence
gcattgaggatagatgcaggcgggt

SEQ ID NO: 212449 - DNA, 25 bp, Probe Sequence
gcttggagtcaactacatgaggatg

SEQ ID NO: 212450 - DNA, 25 bp, Probe Sequence
gcttcagggccaggcagagagtgag

SEQ ID NO: 212451 - DNA, 25 bp, Probe Sequence
gcttcaggtgcccagagatcaggtg

SEQ ID NO: 212452 - DNA, 25 bp, Probe Sequence
gcttcaggatccaagtgacaaagtt

SEQ ID NO: 212453 - DNA, 25 bp, Probe Sequence
gcttcacctccctatgtgaactgta

SEQ ID NO: 212454 - DNA, 25 bp, Probe Sequence
gcttcacctccctatgtgaactgta

SEQ ID NO: 212455 - DNA, 25 bp, Probe Sequence
gcttgatccatgtccaggtgcaact

SEQ ID NO: 212456 - DNA, 25 bp, Probe Sequence
gcttgagtcagctgcagggcagtgg

SEQ ID NO: 212457 - DNA, 25 bp, Probe Sequence
gcttgattcctgccatatggaggag

SEQ ID NO: 212458 - DNA, 25 bp, Probe Sequence
gcattttcctccaaaaggcagacct

SEQ ID NO: 212459 - DNA, 25 bp, Probe Sequence
gcttctttgcccaaaatgcagtgcc

SEQ ID NO: 212460 - DNA, 25 bp, Probe Sequence
gcttcctctgcgccagaagaaggcc

SEQ ID NO: 212461 - DNA, 25 bp, Probe Sequence
gcttcctctgatgctgacaaggtgg

SEQ ID NO: 212462 - DNA, 25 bp, Probe Sequence
gcttcagcttaactgacagatgtta

SEQ ID NO: 212463 - DNA, 25 bp, Probe Sequence
gcttcgtctgggacgcgttcataac

SEQ ID NO: 212464 - DNA, 25 bp, Probe Sequence
gcttcagtattgtggggctcataaa

SEQ ID NO: 212465 - DNA, 25 bp, Probe Sequence
gcttcagcataagctgtgaggccag

SEQ ID NO: 212466 - DNA, 25 bp, Probe Sequence
gcattagctaaagtggaggactcca

SEQ ID NO: 212467 - DNA, 25 bp, Probe Sequence
gcatctgctctacctggtgatggac

SEQ ID NO: 212468 - DNA, 25 bp, Probe Sequence
gcatctgctctacctggtgatggac

SEQ ID NO: 212469 - DNA, 25 bp, Probe Sequence
gcttcctggtcttatcatggacaat

SEQ ID NO: 212470 - DNA, 25 bp, Probe Sequence
gcttcattgagctataattgatata

SEQ ID NO: 212471 - DNA, 25 bp, Probe Sequence
gcttcagtagccaatttgatcattt

SEQ ID NO: 212472 - DNA, 25 bp, Probe Sequence
gcatcaagtactcatttgcctttga

SEQ ID NO: 212473 - DNA, 25 bp, Probe Sequence
gcattaacggagtttgccaagtgca

SEQ ID NO: 212474 - DNA, 25 bp, Probe Sequence
gcattgaacgagaaagtgccttgga

SEQ ID NO: 212475 - DNA, 25 bp, Probe Sequence
gcttgacctgcacaaatgccatatt

SEQ ID NO: 212476 - DNA, 25 bp, Probe Sequence
gcattactctgcactatagccattt

SEQ ID NO: 212477 - DNA, 25 bp, Probe Sequence
gcattaattgatttaaccattatac

SEQ ID NO: 212478 - DNA, 25 bp, Probe Sequence
gcattagtttatattcacgtacagc

SEQ ID NO: 212479 - DNA, 25 bp, Probe Sequence
gcataaggtttatctcaagtctcaa

SEQ ID NO: 212480 - DNA, 25 bp, Probe Sequence
gcttcagggttatgtctatgttcat

SEQ ID NO: 212481 - DNA, 25 bp, Probe Sequence
gcttctatggtttcttctaattctt

SEQ ID NO: 212482 - DNA, 25 bp, Probe Sequence
gcttctatggtttcttctaattctt

SEQ ID NO: 212483 - DNA, 25 bp, Probe Sequence
gcttgctgaggtcttttagttggta

SEQ ID NO: 212484 - DNA, 25 bp, Probe Sequence
gcttgtgaggttttatccagctttg

SEQ ID NO: 212485 - DNA, 25 bp, Probe Sequence
gcttccaggtatctacactgttagt

SEQ ID NO: 212486 - DNA, 25 bp, Probe Sequence
gcattccatggtgttaacatggtat

SEQ ID NO: 212487 - DNA, 25 bp, Probe Sequence
gcttgcttagtgattaactgcttat

SEQ ID NO: 212488 - DNA, 25 bp, Probe Sequence
gcatttatatggagattactttatg

SEQ ID NO: 212489 - DNA, 25 bp, Probe Sequence
gcttcttagatgctgattcttttga

SEQ ID NO: 212490 - DNA, 25 bp, Probe Sequence
gcttgctatatactgggtgcttagg

SEQ ID NO: 212491 - DNA, 25 bp, Probe Sequence
gcttgactatacaggccttgaactt

SEQ ID NO: 212492 - DNA, 25 bp, Probe Sequence
gttgacttcacggggattccagtct

SEQ ID NO: 212493 - DNA, 25 bp, Probe Sequence
gcttgagcttcagcggaattcgaaa

SEQ ID NO: 212494 - DNA, 25 bp, Probe Sequence
gcttgactctagtttgacattgtga

SEQ ID NO: 212495 - DNA, 25 bp, Probe Sequence
gcattgagtccaggggacatcgtca

SEQ ID NO: 212496 - DNA, 25 bp, Probe Sequence
gcattttcccaggagagctctgtca

SEQ ID NO: 212497 - DNA, 25 bp, Probe Sequence
gcatatttcctcaacatactgtgtc

SEQ ID NO: 212498 - DNA, 25 bp, Probe Sequence
gcatatcttctcagcaataactcca

SEQ ID NO: 212499 - DNA, 25 bp, Probe Sequence
gcttcatcctgcacaataaactccg

SEQ ID NO: 212500 - DNA, 25 bp, Probe Sequence
gcttgcatctctgaccaaatttcac

SEQ ID NO: 212501 - DNA, 25 bp, Probe Sequence
gcttctctctcatcggagatattgc

SEQ ID NO: 212502 - DNA, 25 bp, Probe Sequence
gcttctctatccaggatgatgagtc

SEQ ID NO: 212503 - DNA, 25 bp, Probe Sequence
gcttgaccacacagcacagatgatg

SEQ ID NO: 212504 - DNA, 25 bp, Probe Sequence
gcttcctgtccgaatcagcatgatt

SEQ ID NO: 212505 - DNA, 25 bp, Probe Sequence
gcattggtgatgctgtatcctgagt

SEQ ID NO: 212506 - DNA, 25 bp, Probe Sequence
gcatttttgttgaaccataaagttt

SEQ ID NO: 212507 - DNA, 25 bp, Probe Sequence
gcttctcttttgaaacaatactcat

SEQ ID NO: 212508 - DNA, 25 bp, Probe Sequence
gcttgttgtcccaatgaaatactga

SEQ ID NO: 212509 - DNA, 25 bp, Probe Sequence
gcatattttccctgcaagattagaa

SEQ ID NO: 212510 - DNA, 25 bp, Probe Sequence
gcttctactccatagcacagttaaa

SEQ ID NO: 212511 - DNA, 25 bp, Probe Sequence
gcttctttcgcttgatacagtgtat

SEQ ID NO: 212512 - DNA, 25 bp, Probe Sequence
gcttctcttcgcatagtcacgtagc

SEQ ID NO: 212513 - DNA, 25 bp, Probe Sequence
gcttctcttcgcatagtcacgtagc

SEQ ID NO: 212514 - DNA, 25 bp, Probe Sequence
gcatttcgatcctcgtcaggtgcag

SEQ ID NO: 212515 - DNA, 25 bp, Probe Sequence
gcttgtccatctggtctaaggtggc

SEQ ID NO: 212516 - DNA, 25 bp, Probe Sequence
gcttgctctcaagggtgacagtagg

SEQ ID NO: 212517 - DNA, 25 bp, Probe Sequence
gcttctgcctagcgataccaagagg

SEQ ID NO: 212518 - DNA, 25 bp, Probe Sequence
gcattccttgagctgtacgggaagt

SEQ ID NO: 212519 - DNA, 25 bp, Probe Sequence
gcattccaataaagcatacgggaac

SEQ ID NO: 212520 - DNA, 25 bp, Probe Sequence
gcattatcccagagaacgaagaaat

SEQ ID NO: 212521 - DNA, 25 bp, Probe Sequence
gcattaaaaattcccgcaaactata

SEQ ID NO: 212522 - DNA, 25 bp, Probe Sequence
gcttgccaaaataaccgaaggaaag

SEQ ID NO: 212523 - DNA, 25 bp, Probe Sequence
gcttccgaaatgcactccagaagaa

SEQ ID NO: 212524 - DNA, 25 bp, Probe Sequence
gcttgtcaaattgccttcatggaaa

SEQ ID NO: 212525 - DNA, 25 bp, Probe Sequence
gcttccaatcttgctttgtgtatct

SEQ ID NO: 212526 - DNA, 25 bp, Probe Sequence
gcattccaatttcatgttgatgata

SEQ ID NO: 212527 - DNA, 25 bp, Probe Sequence
gcttgagcgtttccatgtgctaatg

SEQ ID NO: 212528 - DNA, 25 bp, Probe Sequence
gcttgggatcgtacatgttaatttt

SEQ ID NO: 212529 - DNA, 25 bp, Probe Sequence
gcttgggtggatgctgctcattaat

SEQ ID NO: 212530 - DNA, 25 bp, Probe Sequence
gcttgggtgtgatcttcagtatatg

SEQ ID NO: 212531 - DNA, 25 bp, Probe Sequence
gcttgggtgtgatcttcagtatatg

SEQ ID NO: 212532 - DNA, 25 bp, Probe Sequence
gcttgatggttcaactccaatttgt

SEQ ID NO: 212533 - DNA, 25 bp, Probe Sequence
gcttgtgattctgagcttgcaatgc

SEQ ID NO: 212534 - DNA, 25 bp, Probe Sequence
gcattgatgaacggatgaagaagct

SEQ ID NO: 212535 - DNA, 25 bp, Probe Sequence
gcatagagaacgtggcagcaagctg

SEQ ID NO: 212536 - DNA, 25 bp, Probe Sequence
gcataggtaaagcgcagaatggcca

SEQ ID NO: 212537 - DNA, 25 bp, Probe Sequence
gcattaatggaagacatcagcatgg

SEQ ID NO: 212538 - DNA, 25 bp, Probe Sequence
gcatcaactgaacgcaaatcagcca

SEQ ID NO: 212539 - DNA, 25 bp, Probe Sequence
gcataagctgaactaaaataaaaat

SEQ ID NO: 212540 - DNA, 25 bp, Probe Sequence
gaaacagggtaaaagtggacaattg

SEQ ID NO: 212541 - DNA, 25 bp, Probe Sequence
taataggtggtatagcagtaatttt

SEQ ID NO: 212542 - DNA, 25 bp, Probe Sequence
gaatgaatcggtaagtgggactttt

SEQ ID NO: 212543 - DNA, 25 bp, Probe Sequence
gcagaaagtcgcatagggtttttta

SEQ ID NO: 212544 - DNA, 25 bp, Probe Sequence
gcagaacgcccaaggtggtttctcc

SEQ ID NO: 212545 - DNA, 25 bp, Probe Sequence
gcataacccacaggcgttttttctg

SEQ ID NO: 212546 - DNA, 25 bp, Probe Sequence
gcatataccttcacagttcttaata

SEQ ID NO: 212547 - DNA, 25 bp, Probe Sequence
gcattaccttctgttccttatgata

SEQ ID NO: 212548 - DNA, 25 bp, Probe Sequence
gcttgtctttctgctaagctgttaa

SEQ ID NO: 212549 - DNA, 25 bp, Probe Sequence
gcttccttactcgtatactttatat

SEQ ID NO: 212550 - DNA, 25 bp, Probe Sequence
gcataccttacagtattactttcta

SEQ ID NO: 212551 - DNA, 25 bp, Probe Sequence
gcataccattgaaacatgccacttg

SEQ ID NO: 212552 - DNA, 25 bp, Probe Sequence
gcatacctggaaaatgcttctgtcc

SEQ ID NO: 212553 - DNA, 25 bp, Probe Sequence
gcatagcagtagctgttgtttgggc

SEQ ID NO: 212554 - DNA, 25 bp, Probe Sequence
gcatcaattcagctcttcttttgga

SEQ ID NO: 212555 - DNA, 25 bp, Probe Sequence
gcatacattgaggttcactctttgt

SEQ ID NO: 212556 - DNA, 25 bp, Probe Sequence
gcattctagaagcacacctcttttt

SEQ ID NO: 212557 - DNA, 25 bp, Probe Sequence
gcatatgtaaaatcccattctgtgt

SEQ ID NO: 212558 - DNA, 25 bp, Probe Sequence
gcatagttgtactgtgcctgtctgt

SEQ ID NO: 212559 - DNA, 25 bp, Probe Sequence
gcatagattctccagagtccatgcc

SEQ ID NO: 212560 - DNA, 25 bp, Probe Sequence
gcataatgtcattcaggttcatcca

SEQ ID NO: 212561 - DNA, 25 bp, Probe Sequence
gcatctataatgtcagcttatccta

SEQ ID NO: 212562 - DNA, 25 bp, Probe Sequence
gcatcatataatttgctagtcatcc

SEQ ID NO: 212563 - DNA, 25 bp, Probe Sequence
gcattatcaacatcatattcagccc

SEQ ID NO: 212564 - DNA, 25 bp, Probe Sequence
gcattatcattggatgtttccccac

SEQ ID NO: 212565 - DNA, 25 bp, Probe Sequence
gcataactgctgtttttctgacaac

SEQ ID NO: 212566 - DNA, 25 bp, Probe Sequence
gcatatactgtctctgtttgcatca

SEQ ID NO: 212567 - DNA, 25 bp, Probe Sequence
gcatgctacgatcaggttctgtcct

SEQ ID NO: 212568 - DNA, 25 bp, Probe Sequence
gcatcagcagcctagggttctgttt

SEQ ID NO: 212569 - DNA, 25 bp, Probe Sequence
gcatcaggtaacaggtttcttgtac

SEQ ID NO: 212570 - DNA, 25 bp, Probe Sequence
gcatcagggacgtcgtttacttcca

SEQ ID NO: 212571 - DNA, 25 bp, Probe Sequence
gcatcagggacgtcgtttacttcca

SEQ ID NO: 212572 - DNA, 25 bp, Probe Sequence
gcataggggtacatttacattctgt

SEQ ID NO: 212573 - DNA, 25 bp, Probe Sequence
gcagcatggggtttttattatgttt

SEQ ID NO: 212574 - DNA, 25 bp, Probe Sequence
gcattgggccatagtttgttaatct

SEQ ID NO: 212575 - DNA, 25 bp, Probe Sequence
gcattttgcacagtgtttgttttcc

SEQ ID NO: 212576 - DNA, 25 bp, Probe Sequence
gcattgtgctgctgcattcatggtt

SEQ ID NO: 212577 - DNA, 25 bp, Probe Sequence
gcttgagcaccgcatcggctgcatt

SEQ ID NO: 212578 - DNA, 25 bp, Probe Sequence
gcttgagagagccagttgtgtgcat

SEQ ID NO: 212579 - DNA, 25 bp, Probe Sequence
gcttgcatcagacatctttgctcct

SEQ ID NO: 212580 - DNA, 25 bp, Probe Sequence
gcttctgtatctacttcatgctgac

SEQ ID NO: 212581 - DNA, 25 bp, Probe Sequence
gcattgtagtctccatatctgtatt

SEQ ID NO: 212582 - DNA, 25 bp, Probe Sequence
gcttgtatatgcttgaactttctta

SEQ ID NO: 212583 - DNA, 25 bp, Probe Sequence
gcattgatcatactgtggttcttcg

SEQ ID NO: 212584 - DNA, 25 bp, Probe Sequence
gcattccataaggcatttcttgagg

SEQ ID NO: 212585 - DNA, 25 bp, Probe Sequence
gcattagcaaattttacttacagtc

SEQ ID NO: 212586 - DNA, 25 bp, Probe Sequence
gcttctcttactatactcatacatt

SEQ ID NO: 212587 - DNA, 25 bp, Probe Sequence
gcttgttttcttaatatgcttcttg

SEQ ID NO: 212588 - DNA, 25 bp, Probe Sequence
gcttctctttgtagttgatgctttg

SEQ ID NO: 212589 - DNA, 25 bp, Probe Sequence
gcttgtcattctgtttgcagtattt

SEQ ID NO: 212590 - DNA, 25 bp, Probe Sequence
gcttgttctcaggctttgataagta

SEQ ID NO: 212591 - DNA, 25 bp, Probe Sequence
gcttgtgcctcaactgtttaagtga

SEQ ID NO: 212592 - DNA, 25 bp, Probe Sequence
gcttgtcttgtacgctttatccaaa

SEQ ID NO: 212593 - DNA, 25 bp, Probe Sequence
gcttgattcttccctttaggattca

SEQ ID NO: 212594 - DNA, 25 bp, Probe Sequence
gcttctgaattcccttctgagttaa

SEQ ID NO: 212595 - DNA, 25 bp, Probe Sequence
gcttctgatttttcttgcattttaa

SEQ ID NO: 212596 - DNA, 25 bp, Probe Sequence
gcttgctgacttgttttcttgtgaa

SEQ ID NO: 212597 - DNA, 25 bp, Probe Sequence
gcatctctattagatctttagggga

SEQ ID NO: 212598 - DNA, 25 bp, Probe Sequence
gcatttttgcagattcttggctggg

SEQ ID NO: 212599 - DNA, 25 bp, Probe Sequence
gcattctttgaactgccttacatgt

SEQ ID NO: 212600 - DNA, 25 bp, Probe Sequence
gcattcttctgggtggttcacattt

SEQ ID NO: 212601 - DNA, 25 bp, Probe Sequence
gcttgctgctcttggggttgaagtc

SEQ ID NO: 212602 - DNA, 25 bp, Probe Sequence
gcttctgcctaaagtggtcaacaca

SEQ ID NO: 212603 - DNA, 25 bp, Probe Sequence
gcatgcctggtaattgggaaaaatt

SEQ ID NO: 212604 - DNA, 25 bp, Probe Sequence
gcatgacattgatcgccgtagaaaa

SEQ ID NO: 212605 - DNA, 25 bp, Probe Sequence
gcagaagtgttcctttagacaaagt

SEQ ID NO: 212606 - DNA, 25 bp, Probe Sequence
gcattttggctcctttggtcaaaga

SEQ ID NO: 212607 - DNA, 25 bp, Probe Sequence
gcattttcatggctcttaataaaca

SEQ ID NO: 212608 - DNA, 25 bp, Probe Sequence
gcattgtgcaatacagtttcattaa

SEQ ID NO: 212609 - DNA, 25 bp, Probe Sequence
gcattggagcttctttatctgccag

SEQ ID NO: 212610 - DNA, 25 bp, Probe Sequence
gcatttgatctcttcattttggcca

SEQ ID NO: 212611 - DNA, 25 bp, Probe Sequence
gcatttagcatggctctgacgaggc

SEQ ID NO: 212612 - DNA, 25 bp, Probe Sequence
gcatcttcatgaagggcgcgacccg

SEQ ID NO: 212613 - DNA, 25 bp, Probe Sequence
gcattctgataacggcagctttcct

SEQ ID NO: 212614 - DNA, 25 bp, Probe Sequence
gcttctgaaatgctgtctttcccag

SEQ ID NO: 212615 - DNA, 25 bp, Probe Sequence
gcattgccaaagtgtcttcatacca

SEQ ID NO: 212616 - DNA, 25 bp, Probe Sequence
gcattaaaccaatattgatcacaca

SEQ ID NO: 212617 - DNA, 25 bp, Probe Sequence
gcattaaccacaaagtctatccaca

SEQ ID NO: 212618 - DNA, 25 bp, Probe Sequence
gcatttacagaacagctctaccgat

SEQ ID NO: 212619 - DNA, 25 bp, Probe Sequence
gcatttaagaggcagtgcaagccaa

SEQ ID NO: 212620 - DNA, 25 bp, Probe Sequence
gcttggaatgtgttgatgtgcacag

SEQ ID NO: 212621 - DNA, 25 bp, Probe Sequence
gcttgtctcaatgatggtgctcaga

SEQ ID NO: 212622 - DNA, 25 bp, Probe Sequence
gcttgtgtgcacgtgagcgtgcgag

SEQ ID NO: 212623 - DNA, 25 bp, Probe Sequence
gcttgcttgagcttcagcggaattc

SEQ ID NO: 212624 - DNA, 25 bp, Probe Sequence
gcttgctcaagctcgcatgattatt

SEQ ID NO: 212625 - DNA, 25 bp, Probe Sequence
gcttgtcaagctactgcatgcagag

SEQ ID NO: 212626 - DNA, 25 bp, Probe Sequence
gcttgtctgcagagtcacagcagcc

SEQ ID NO: 212627 - DNA, 25 bp, Probe Sequence
gcttgtctgcagagtcacagcagcc

SEQ ID NO: 212628 - DNA, 25 bp, Probe Sequence
gcttggcacagatatgcgcacacct

SEQ ID NO: 212629 - DNA, 25 bp, Probe Sequence
gcttggtggagatgctgcaccgctc

SEQ ID NO: 212630 - DNA, 25 bp, Probe Sequence
gcttgggaggaccatggggcacaat

SEQ ID NO: 212631 - DNA, 25 bp, Probe Sequence
gcttgagaaggcccggaggcgaagc

SEQ ID NO: 212632 - DNA, 25 bp, Probe Sequence
gcattgagaagccagcctcagacct

SEQ ID NO: 212633 - DNA, 25 bp, Probe Sequence
gcatagaaaggacatcaagctgtat

SEQ ID NO: 212634 - DNA, 25 bp, Probe Sequence
gcattgtaacgaccacatagtattg

SEQ ID NO: 212635 - DNA, 25 bp, Probe Sequence
gcttgtaacaatccagggagctctg

SEQ ID NO: 212636 - DNA, 25 bp, Probe Sequence
gcatatgtatgacatcctgggtcct

SEQ ID NO: 212637 - DNA, 25 bp, Probe Sequence
gcttgcattctgtatttcgtgtctc

SEQ ID NO: 212638 - DNA, 25 bp, Probe Sequence
gcattgtccagatttgtcgtgttac

SEQ ID NO: 212639 - DNA, 25 bp, Probe Sequence
gcttgtgccaaagtattggtctcca

SEQ ID NO: 212640 - DNA, 25 bp, Probe Sequence
gcattggtagacaccggtgcatcct

SEQ ID NO: 212641 - DNA, 25 bp, Probe Sequence
gcattgttatacatactgtgtacct

SEQ ID NO: 212642 - DNA, 25 bp, Probe Sequence
gcttgctttcacaaacagtgcttcc

SEQ ID NO: 212643 - DNA, 25 bp, Probe Sequence
gcttcctgatacaagacgacttcgt

SEQ ID NO: 212644 - DNA, 25 bp, Probe Sequence
gcttccagatgtagagactccttcc

SEQ ID NO: 212645 - DNA, 25 bp, Probe Sequence
gcattccagccttggactcattgac

SEQ ID NO: 212646 - DNA, 25 bp, Probe Sequence
gcttcccgcaaggacatgctggatg

SEQ ID NO: 212647 - DNA, 25 bp, Probe Sequence
gcttgagcccaagagcttgaggacc

SEQ ID NO: 212648 - DNA, 25 bp, Probe Sequence
gcttgagcccaagaggtggaggtta

SEQ ID NO: 212649 - DNA, 25 bp, Probe Sequence
gcttgagcccataagcctgggagtt

SEQ ID NO: 212650 - DNA, 25 bp, Probe Sequence
gcttgggccagaagtgcggaatgtt

SEQ ID NO: 212651 - DNA, 25 bp, Probe Sequence
gcttggctgaagatgatgtggaatg

SEQ ID NO: 212652 - DNA, 25 bp, Probe Sequence
gcttcctgagacagatgctcaagtg

SEQ ID NO: 212653 - DNA, 25 bp, Probe Sequence
gcttgtctggtcaacattccagtgt

SEQ ID NO: 212654 - DNA, 25 bp, Probe Sequence
gcttgtctggtaataatcacttctg

SEQ ID NO: 212655 - DNA, 25 bp, Probe Sequence
gcttccgttacaagatgaggtctgt

SEQ ID NO: 212656 - DNA, 25 bp, Probe Sequence
gcttcctgaaaaagattgtcgctat

SEQ ID NO: 212657 - DNA, 25 bp, Probe Sequence
gcattactgaaatacataggcttat

SEQ ID NO: 212658 - DNA, 25 bp, Probe Sequence
gcatttctgcgaaagatcaaggtct

SEQ ID NO: 212659 - DNA, 25 bp, Probe Sequence
gcatatctcgccaggatgtaggctc

SEQ ID NO: 212660 - DNA, 25 bp, Probe Sequence
gcttgctccctacgatgagaactgg

SEQ ID NO: 212661 - DNA, 25 bp, Probe Sequence
gcatcttccaccaagaacaattggc

SEQ ID NO: 212662 - DNA, 25 bp, Probe Sequence
gcatttccaccagaacttgaggcaa

SEQ ID NO: 212663 - DNA, 25 bp, Probe Sequence
gcattatccagaactgaagttgccc

SEQ ID NO: 212664 - DNA, 25 bp, Probe Sequence
gcttgagccagaatctcaggacccc

SEQ ID NO: 212665 - DNA, 25 bp, Probe Sequence
gcttggccaagagaggcatcctcaa

SEQ ID NO: 212666 - DNA, 25 bp, Probe Sequence
gcttgtccacgtggcaggtgactaa

SEQ ID NO: 212667 - DNA, 25 bp, Probe Sequence
gcatatggctacatcgaggacctta

SEQ ID NO: 212668 - DNA, 25 bp, Probe Sequence
gcatcggtacttgagcaatgcctac

SEQ ID NO: 212669 - DNA, 25 bp, Probe Sequence
gcatcaggcagaccttagggcctca

SEQ ID NO: 212670 - DNA, 25 bp, Probe Sequence
gcatcaacagcacagacagcgagcg

SEQ ID NO: 212671 - DNA, 25 bp, Probe Sequence
gcatacaagcatgatgacactggcc

SEQ ID NO: 212672 - DNA, 25 bp, Probe Sequence
gcatcacggatcaatagactgtact

SEQ ID NO: 212673 - DNA, 25 bp, Probe Sequence
gcttccagactcagcagctgctaga

SEQ ID NO: 212674 - DNA, 25 bp, Probe Sequence
gcttccagactctttgcgttggaga

SEQ ID NO: 212675 - DNA, 25 bp, Probe Sequence
gcttcctgacatttgtggcataaaa

SEQ ID NO: 212676 - DNA, 25 bp, Probe Sequence
gcttcctgacaattcccatattaat

SEQ ID NO: 212677 - DNA, 25 bp, Probe Sequence
gcattttgagcatttcaaatcagta

SEQ ID NO: 212678 - DNA, 25 bp, Probe Sequence
gcttgatggagatctctaccatgga

SEQ ID NO: 212679 - DNA, 25 bp, Probe Sequence
gcattgtgtagctagttttctggaa

SEQ ID NO: 212680 - DNA, 25 bp, Probe Sequence
gcattggcgatttgtctgattctgg

SEQ ID NO: 212681 - DNA, 25 bp, Probe Sequence
gcttgagatatttcctcagcctgaa

SEQ ID NO: 212682 - DNA, 25 bp, Probe Sequence
gcttgcagcatattagaacagacga

SEQ ID NO: 212683 - DNA, 25 bp, Probe Sequence
gcttggctatcttggacatacagta

SEQ ID NO: 212684 - DNA, 25 bp, Probe Sequence
gcttgcactttgtgagtattctatg

SEQ ID NO: 212685 - DNA, 25 bp, Probe Sequence
gcttgcaatttttaacttcatgatg

SEQ ID NO: 212686 - DNA, 25 bp, Probe Sequence
gcttccacttcaaaccttcagtgag

SEQ ID NO: 212687 - DNA, 25 bp, Probe Sequence
gcttccacactcaaatctctaagta

SEQ ID NO: 212688 - DNA, 25 bp, Probe Sequence
gcttgcgctcaccatcaataaaagt

SEQ ID NO: 212689 - DNA, 25 bp, Probe Sequence
gcttcctcaggctagcaaaaatatc

SEQ ID NO: 212690 - DNA, 25 bp, Probe Sequence
gcttgccagcaaggccaaagcaaac

SEQ ID NO: 212691 - DNA, 25 bp, Probe Sequence
gcttgtgcagcaatggccaagatca

SEQ ID NO: 212692 - DNA, 25 bp, Probe Sequence
gcatttccatgacgcacattatgca

SEQ ID NO: 212693 - DNA, 25 bp, Probe Sequence
gcatctgaagatgggactgtgtaca

SEQ ID NO: 212694 - DNA, 25 bp, Probe Sequence
gcatctggagggccatcttggcaca

SEQ ID NO: 212695 - DNA, 25 bp, Probe Sequence
gcattcgcagtgcccagtgatggca

SEQ ID NO: 212696 - DNA, 25 bp, Probe Sequence
gcttccatgatgcacagtatctgct

SEQ ID NO: 212697 - DNA, 25 bp, Probe Sequence
gcatcccatatcaagatggattgcc

SEQ ID NO: 212698 - DNA, 25 bp, Probe Sequence
gcatcatgaagaccagcaggtccgc

SEQ ID NO: 212699 - DNA, 25 bp, Probe Sequence
gcttgtgaggacgcgtccacagggc

SEQ ID NO: 212700 - DNA, 25 bp, Probe Sequence
gcttgggatgactgcgatcccgtgt

SEQ ID NO: 212701 - DNA, 25 bp, Probe Sequence
gcatgagggatggcccggccaaagt

SEQ ID NO: 212702 - DNA, 25 bp, Probe Sequence
gcatgaggggctgccggagcccctc

SEQ ID NO: 212703 - DNA, 25 bp, Probe Sequence
gcatgaggggctgccggagcccctc

SEQ ID NO: 212704 - DNA, 25 bp, Probe Sequence
gcataggaggctctcgatagcacct

SEQ ID NO: 212705 - DNA, 25 bp, Probe Sequence
gcatacggatgcggacgatcacacc

SEQ ID NO: 212706 - DNA, 25 bp, Probe Sequence
gcttgggatgatggaggtactgcca

SEQ ID NO: 212707 - DNA, 25 bp, Probe Sequence
gcatcgtgggtggagaggacgccga

SEQ ID NO: 212708 - DNA, 25 bp, Probe Sequence
gcattgtgggcttaggcgaaacggt

SEQ ID NO: 212709 - DNA, 25 bp, Probe Sequence
gcatttggatgtacagatcgactac

SEQ ID NO: 212710 - DNA, 25 bp, Probe Sequence
gcatttagtgttcttcagcatgtcc

SEQ ID NO: 212711 - DNA, 25 bp, Probe Sequence
gcattgtttctttcatgtagcatgt

SEQ ID NO: 212712 - DNA, 25 bp, Probe Sequence
gcattgcatgcttttccattaatta

SEQ ID NO: 212713 - DNA, 25 bp, Probe Sequence
gcattgcttttatagattcttgatt

SEQ ID NO: 212714 - DNA, 25 bp, Probe Sequence
gcatttgatttctaggtcaattgat

SEQ ID NO: 212715 - DNA, 25 bp, Probe Sequence
gcatttgactctcaggacattctcc

SEQ ID NO: 212716 - DNA, 25 bp, Probe Sequence
gcatcattgaaccaggcaacttctc

SEQ ID NO: 212717 - DNA, 25 bp, Probe Sequence
gcatattagcatcagtcaacccctg

SEQ ID NO: 212718 - DNA, 25 bp, Probe Sequence
gcttgctcaattgatcatgaccctc

SEQ ID NO: 212719 - DNA, 25 bp, Probe Sequence
gcattgtctgaagttagcacctctt

SEQ ID NO: 212720 - DNA, 25 bp, Probe Sequence
gcattcgctacaattccatgcctgt

SEQ ID NO: 212721 - DNA, 25 bp, Probe Sequence
gcattcttacacatctatcctagac

SEQ ID NO: 212722 - DNA, 25 bp, Probe Sequence
gcattcttactcctaaacagcagtc

SEQ ID NO: 212723 - DNA, 25 bp, Probe Sequence
gcattctttgcttctgaaacttggc

SEQ ID NO: 212724 - DNA, 25 bp, Probe Sequence
gcattgattttttgacaagtctgta

SEQ ID NO: 212725 - DNA, 25 bp, Probe Sequence
gcatttgtttaataagcataccatt

SEQ ID NO: 212726 - DNA, 25 bp, Probe Sequence
gcattgcttgctgtataaaaaactt

SEQ ID NO: 212727 - DNA, 25 bp, Probe Sequence
gcattcatctctcaaacttagtttt

SEQ ID NO: 212728 - DNA, 25 bp, Probe Sequence
gcattgccatctcaaaatctgattt

SEQ ID NO: 212729 - DNA, 25 bp, Probe Sequence
gcattgtattccaaagacgacaatt

SEQ ID NO: 212730 - DNA, 25 bp, Probe Sequence
gcttgcgtttcaagaaagcccatgt

SEQ ID NO: 212731 - DNA, 25 bp, Probe Sequence
gcttgaggcatttacaaagcccagc

SEQ ID NO: 212732 - DNA, 25 bp, Probe Sequence
gcttggagagcttcacaaatgcccc

SEQ ID NO: 212733 - DNA, 25 bp, Probe Sequence
gcttggatggctgaaacatggaccc

SEQ ID NO: 212734 - DNA, 25 bp, Probe Sequence
gcttgcgtggctgtttcatgaccgc

SEQ ID NO: 212735 - DNA, 25 bp, Probe Sequence
gcttgctctgggacttttatgctcc

SEQ ID NO: 212736 - DNA, 25 bp, Probe Sequence
gcatgtgttgctcagtttttcccac

SEQ ID NO: 212737 - DNA, 25 bp, Probe Sequence
gcatttaatacctttttcttcacta

SEQ ID NO: 212738 - DNA, 25 bp, Probe Sequence
gcatttttatgcttattttctgtca

SEQ ID NO: 212739 - DNA, 25 bp, Probe Sequence
gcatccttcaatgacacttttgtcc

SEQ ID NO: 212740 - DNA, 25 bp, Probe Sequence
gcatcctaagatgatacctttgttg

SEQ ID NO: 212741 - DNA, 25 bp, Probe Sequence
gcattgcctattgatacactttact

SEQ ID NO: 212742 - DNA, 25 bp, Probe Sequence
gcattgactaatgttcagtgaaatc

SEQ ID NO: 212743 - DNA, 25 bp, Probe Sequence
gcattgtctcaatttccacaagaac

SEQ ID NO: 212744 - DNA, 25 bp, Probe Sequence
gcatttcttcactccgaagccaaat

SEQ ID NO: 212745 - DNA, 25 bp, Probe Sequence
gcattccatcccttcctgaaggggg

SEQ ID NO: 212746 - DNA, 25 bp, Probe Sequence
gcattcccaccaactacaaggggca

SEQ ID NO: 212747 - DNA, 25 bp, Probe Sequence
gcattcctctagattgcacaaggga

SEQ ID NO: 212748 - DNA, 25 bp, Probe Sequence
gcatccccagtgacggaaagggcat

SEQ ID NO: 212749 - DNA, 25 bp, Probe Sequence
gcattcaatctgtaccggaggttca

SEQ ID NO: 212750 - DNA, 25 bp, Probe Sequence
gcattcctcctgaccagcagaggtt

SEQ ID NO: 212751 - DNA, 25 bp, Probe Sequence
gcatacaccacatgaaacatcctat

SEQ ID NO: 212752 - DNA, 25 bp, Probe Sequence
gcattcataattacaaccattcaat

SEQ ID NO: 212753 - DNA, 25 bp, Probe Sequence
gcattcttgtaacacctctcaatgg

SEQ ID NO: 212754 - DNA, 25 bp, Probe Sequence
gcattcattgtaagttccctctttg

SEQ ID NO: 212755 - DNA, 25 bp, Probe Sequence
gcatgataattgagttttcctttgt

SEQ ID NO: 212756 - DNA, 25 bp, Probe Sequence
gcattacattaccgtgttattttta

SEQ ID NO: 212757 - DNA, 25 bp, Probe Sequence
gcattcatcctacagagttatttat

SEQ ID NO: 212758 - DNA, 25 bp, Probe Sequence
gcatcttaaagctgagtgtatttct

SEQ ID NO: 212759 - DNA, 25 bp, Probe Sequence
gcttgtacatgatcttgtgttttgc

SEQ ID NO: 212760 - DNA, 25 bp, Probe Sequence
gcttgctatctgtatttgaattttt

SEQ ID NO: 212761 - DNA, 25 bp, Probe Sequence
gcttgctcctttttgaatctacaga

SEQ ID NO: 212762 - DNA, 25 bp, Probe Sequence
gcttgctcctttttgaatctacaga

SEQ ID NO: 212763 - DNA, 25 bp, Probe Sequence
gcttgttctttcgtgcatgtgtaag

SEQ ID NO: 212764 - DNA, 25 bp, Probe Sequence
gcttgtgtctttctggagagaagaa

SEQ ID NO: 212765 - DNA, 25 bp, Probe Sequence
gcttgatttgtttagactgaaggaa

SEQ ID NO: 212766 - DNA, 25 bp, Probe Sequence
gcttgcatctggaaagatgagctgt

SEQ ID NO: 212767 - DNA, 25 bp, Probe Sequence
gcttgcatggagttagatcctgctg

SEQ ID NO: 212768 - DNA, 25 bp, Probe Sequence
gcattgctgtgaattagctcacttg

SEQ ID NO: 212769 - DNA, 25 bp, Probe Sequence
gcattctgctggattgccacagtta

SEQ ID NO: 212770 - DNA, 25 bp, Probe Sequence
gcattggctgaaaatcacttaaatg

SEQ ID NO: 212771 - DNA, 25 bp, Probe Sequence
gcattatctaattaccttcaggtgg

SEQ ID NO: 212772 - DNA, 25 bp, Probe Sequence
gcattcctagtcgttgcttcagtgt

SEQ ID NO: 212773 - DNA, 25 bp, Probe Sequence
gcattctctaggtttgcatgtagct

SEQ ID NO: 212774 - DNA, 25 bp, Probe Sequence
gcatcccatctggtttcagagtctt

SEQ ID NO: 212775 - DNA, 25 bp, Probe Sequence
gcaccttcgggtccaggactacaac

SEQ ID NO: 212776 - DNA, 25 bp, Probe Sequence
gacccccagggctgagttaaaggag

SEQ ID NO: 212777 - DNA, 25 bp, Probe Sequence
gatccggtcggataagagttaagga

SEQ ID NO: 212778 - DNA, 25 bp, Probe Sequence
gttcaggtcgttccaggggtagagg

SEQ ID NO: 212779 - DNA, 25 bp, Probe Sequence
gcatctcaggtcctctagaggggaa

SEQ ID NO: 212780 - DNA, 25 bp, Probe Sequence
gcttggtttgcagttgagaggggag

SEQ ID NO: 212781 - DNA, 25 bp, Probe Sequence
gcatttctttacttgcaaggggaca

SEQ ID NO: 212782 - DNA, 25 bp, Probe Sequence
gcatttcttccattgtgaatacgaa

SEQ ID NO: 212783 - DNA, 25 bp, Probe Sequence
gcatttaatctcagttaagcacaac

SEQ ID NO: 212784 - DNA, 25 bp, Probe Sequence
gcatcagtaagtatttagcagaaac

SEQ ID NO: 212785 - DNA, 25 bp, Probe Sequence
gcatgcttaaggattccaaacgact

SEQ ID NO: 212786 - DNA, 25 bp, Probe Sequence
gcatcatgaactcgtttgtaaacga

SEQ ID NO: 212787 - DNA, 25 bp, Probe Sequence
gcatatacactacttggaaaccaaa

SEQ ID NO: 212788 - DNA, 25 bp, Probe Sequence
gcttgaagaactatgatccccagaa

SEQ ID NO: 212789 - DNA, 25 bp, Probe Sequence
gcttgaacacagtattttcccaata

SEQ ID NO: 212790 - DNA, 25 bp, Probe Sequence
gcttgaacacagtatcttcccaata

SEQ ID NO: 212791 - DNA, 25 bp, Probe Sequence
gcttgacaacaacctatgcaccagg

SEQ ID NO: 212792 - DNA, 25 bp, Probe Sequence
gcttgtgagaaaccttgccatctat

SEQ ID NO: 212793 - DNA, 25 bp, Probe Sequence
gcttgggagtcaaactgctcatatt

SEQ ID NO: 212794 - DNA, 25 bp, Probe Sequence
gcttgaaagttactgctgctctatt

SEQ ID NO: 212795 - DNA, 25 bp, Probe Sequence
gcttgaagaggatgccgtcccgaaa

SEQ ID NO: 212796 - DNA, 25 bp, Probe Sequence
gcttggggaaaggaatctgcaacta

SEQ ID NO: 212797 - DNA, 25 bp, Probe Sequence
gcatctggggatgaggttgcttact

SEQ ID NO: 212798 - DNA, 25 bp, Probe Sequence
gcttggtcagctgcaggttgtaaat

SEQ ID NO: 212799 - DNA, 25 bp, Probe Sequence
gcttggtcagctgcaggttgtaaat

SEQ ID NO: 212800 - DNA, 25 bp, Probe Sequence
gcatctggctgaaggcggggctaaa

SEQ ID NO: 212801 - DNA, 25 bp, Probe Sequence
gcattgctgccaaggcagttggctg

SEQ ID NO: 212802 - DNA, 25 bp, Probe Sequence
gcattgcagcggggcactgggctgc

SEQ ID NO: 212803 - DNA, 25 bp, Probe Sequence
gcatctgcaatggggacgggggcac

SEQ ID NO: 212804 - DNA, 25 bp, Probe Sequence
gcattcttcaggtaatgggggctca

SEQ ID NO: 212805 - DNA, 25 bp, Probe Sequence
gcattgcctcaaaaactgggaccaa

SEQ ID NO: 212806 - DNA, 25 bp, Probe Sequence
gcttgcagtgccaaaatcgcggcac

SEQ ID NO: 212807 - DNA, 25 bp, Probe Sequence
gcttgactgccacagcatctgtggc

SEQ ID NO: 212808 - DNA, 25 bp, Probe Sequence
gcttgttgccacaaaggtgtgttga

SEQ ID NO: 212809 - DNA, 25 bp, Probe Sequence
gcaggggcatcagaaggtgctaagc

SEQ ID NO: 212810 - DNA, 25 bp, Probe Sequence
gcaggtagcaagggcccagcaaatg

SEQ ID NO: 212811 - DNA, 25 bp, Probe Sequence
gcagtccacgacagaacaaatattc

SEQ ID NO: 212812 - DNA, 25 bp, Probe Sequence
gcacgctacgagagtcacaggtagt

SEQ ID NO: 212813 - DNA, 25 bp, Probe Sequence
gcatttacaagaagtatccagtggt

SEQ ID NO: 212814 - DNA, 25 bp, Probe Sequence
gcattattataaagctcaaccgagt

SEQ ID NO: 212815 - DNA, 25 bp, Probe Sequence
gcattttctggaaggacaccgaccc

SEQ ID NO: 212816 - DNA, 25 bp, Probe Sequence
gcattttctggacaaacctcagccc

SEQ ID NO: 212817 - DNA, 25 bp, Probe Sequence
gcatttcctggagaatatatcccta

SEQ ID NO: 212818 - DNA, 25 bp, Probe Sequence
gcatttcctgtgagcatacaaccct

SEQ ID NO: 212819 - DNA, 25 bp, Probe Sequence
gcatttcctgatgacagaacagtgc

SEQ ID NO: 212820 - DNA, 25 bp, Probe Sequence
gcatctcctcttaaggatacgtgcc

SEQ ID NO: 212821 - DNA, 25 bp, Probe Sequence
gcattcgttatacggaagatgatga

SEQ ID NO: 212822 - DNA, 25 bp, Probe Sequence
gcattaatgttactgtgggctgtgg

SEQ ID NO: 212823 - DNA, 25 bp, Probe Sequence
gcatttataatcctggtgctcatgg

SEQ ID NO: 212824 - DNA, 25 bp, Probe Sequence
gcttgtagcacaaaggctcagctgg

SEQ ID NO: 212825 - DNA, 25 bp, Probe Sequence
gcattgctcagcccaagggagtgct

SEQ ID NO: 212826 - DNA, 25 bp, Probe Sequence
gcatcatggtgcccaagagggtgca

SEQ ID NO: 212827 - DNA, 25 bp, Probe Sequence
gcatctgttgcaacacgggggcaat

SEQ ID NO: 212828 - DNA, 25 bp, Probe Sequence
gcatctatgatgtaccaggaaggca

SEQ ID NO: 212829 - DNA, 25 bp, Probe Sequence
gcatcagtggcttccagggcatgaa

SEQ ID NO: 212830 - DNA, 25 bp, Probe Sequence
gcatcttggtcatcagttcataatc

SEQ ID NO: 212831 - DNA, 25 bp, Probe Sequence
gcatcttggtccgatactctgagag

SEQ ID NO: 212832 - DNA, 25 bp, Probe Sequence
gcatttagatcacatgagagcaaag

SEQ ID NO: 212833 - DNA, 25 bp, Probe Sequence
gcatttgcaaactaagctgcaccat

SEQ ID NO: 212834 - DNA, 25 bp, Probe Sequence
gcttggaaatgaatatgctgcactt

SEQ ID NO: 212835 - DNA, 25 bp, Probe Sequence
gcttggatctagacagcatctgttc

SEQ ID NO: 212836 - DNA, 25 bp, Probe Sequence
gcttggcagctactagcattatctg

SEQ ID NO: 212837 - DNA, 25 bp, Probe Sequence
gcattggctctacagcgttgcagaa

SEQ ID NO: 212838 - DNA, 25 bp, Probe Sequence
gcttggttacgggatccagatagga

SEQ ID NO: 212839 - DNA, 25 bp, Probe Sequence
gcttggtgtgccggaaacgcaaggg

SEQ ID NO: 212840 - DNA, 25 bp, Probe Sequence
gcattacttccagaatacccagggt

SEQ ID NO: 212841 - DNA, 25 bp, Probe Sequence
gtcccctaaggaaatccgagcggct

SEQ ID NO: 212842 - DNA, 25 bp, Probe Sequence
gtcaccctaaggaaaggaattggca

SEQ ID NO: 212843 - DNA, 25 bp, Probe Sequence
gcataacctaagacagggaattggg

SEQ ID NO: 212844 - DNA, 25 bp, Probe Sequence
gcatagacctgaccaaggtgccagc

SEQ ID NO: 212845 - DNA, 25 bp, Probe Sequence
gcatactctgcttccaaggggggaa

SEQ ID NO: 212846 - DNA, 25 bp, Probe Sequence
gcatacatctcatccacaggggaag

SEQ ID NO: 212847 - DNA, 25 bp, Probe Sequence
gcatcttctcattcccatgtggaac

SEQ ID NO: 212848 - DNA, 25 bp, Probe Sequence
gcatcttctcattcccatgtggaac

SEQ ID NO: 212849 - DNA, 25 bp, Probe Sequence
gcatcttctaacccatcgcaaagag

SEQ ID NO: 212850 - DNA, 25 bp, Probe Sequence
gcatatgtaagtggaactcagaagg

SEQ ID NO: 212851 - DNA, 25 bp, Probe Sequence
gcatcagtcacgttaaccagatgac

SEQ ID NO: 212852 - DNA, 25 bp, Probe Sequence
gcatcatgttctgtaactctactcc

SEQ ID NO: 212853 - DNA, 25 bp, Probe Sequence
gcatcttttgatacaatctcctttc

SEQ ID NO: 212854 - DNA, 25 bp, Probe Sequence
gcatctctttgcaagaatcagccag

SEQ ID NO: 212855 - DNA, 25 bp, Probe Sequence
gcattgctgataccaatatcaccag

SEQ ID NO: 212856 - DNA, 25 bp, Probe Sequence
gcattcatgatgcaaaatcagtggc

SEQ ID NO: 212857 - DNA, 25 bp, Probe Sequence
gcattctgaggatagcatatttcat

SEQ ID NO: 212858 - DNA, 25 bp, Probe Sequence
gcattcagggtttgcttgacgattt

SEQ ID NO: 212859 - DNA, 25 bp, Probe Sequence
gcattaagtcctccatatgaccatt

SEQ ID NO: 212860 - DNA, 25 bp, Probe Sequence
gcattaaacagcctcattaaatgtt

SEQ ID NO: 212861 - DNA, 25 bp, Probe Sequence
gcattagaccatggttgatgcaaca

SEQ ID NO: 212862 - DNA, 25 bp, Probe Sequence
gcattcagaaggtttggcgacgttt

SEQ ID NO: 212863 - DNA, 25 bp, Probe Sequence
gcatctcgtaggtgtgtctactggg

SEQ ID NO: 212864 - DNA, 25 bp, Probe Sequence
gcattcgtaaggcctgtctggtttg

SEQ ID NO: 212865 - DNA, 25 bp, Probe Sequence
gcttggtacaagcttatgctgtctt

SEQ ID NO: 212866 - DNA, 25 bp, Probe Sequence
gcttgtggaaagcttacagcagtat

SEQ ID NO: 212867 - DNA, 25 bp, Probe Sequence
gcattgtgctaacagtaaaagtagt

SEQ ID NO: 212868 - DNA, 25 bp, Probe Sequence
gcattgtctatacatgcaaaagact

SEQ ID NO: 212869 - DNA, 25 bp, Probe Sequence
gcattgtatatgtgaagcaaactct

SEQ ID NO: 212870 - DNA, 25 bp, Probe Sequence
gcatgtgaaatgttacgaccaccgt

SEQ ID NO: 212871 - DNA, 25 bp, Probe Sequence
gaatagaaattagtactcccctcct

SEQ ID NO: 212872 - DNA, 25 bp, Probe Sequence
gcatgaaaatattttagccccctca

SEQ ID NO: 212873 - DNA, 25 bp, Probe Sequence
gcataaatattaatgattgctaaga

SEQ ID NO: 212874 - DNA, 25 bp, Probe Sequence
gcattactattaactctgcatagac

SEQ ID NO: 212875 - DNA, 25 bp, Probe Sequence
gcattagaacaaaccatgctgggtt

SEQ ID NO: 212876 - DNA, 25 bp, Probe Sequence
gcagggaagacaagccaggcacgat

SEQ ID NO: 212877 - DNA, 25 bp, Probe Sequence
gcaggccacatgtggccatctgctc

SEQ ID NO: 212878 - DNA, 25 bp, Probe Sequence
gcaggcgaagcttgggatctggcca

SEQ ID NO: 212879 - DNA, 25 bp, Probe Sequence
gcaggcgaagcttgggatctggcca

SEQ ID NO: 212880 - DNA, 25 bp, Probe Sequence
gcaggcgaagcttgggatctggcca

SEQ ID NO: 212881 - DNA, 25 bp, Probe Sequence
gcaggagtacgacgagtcgggcccc

SEQ ID NO: 212882 - DNA, 25 bp, Probe Sequence
gcacgaggcctgtggagtaggtccc

SEQ ID NO: 212883 - DNA, 25 bp, Probe Sequence
gaagaccctgactggtaagaccatc

SEQ ID NO: 212884 - DNA, 25 bp, Probe Sequence
gcagaaccgtgagtgaattaaacct

SEQ ID NO: 212885 - DNA, 25 bp, Probe Sequence
gcataatgccagtacagacttagga

SEQ ID NO: 212886 - DNA, 25 bp, Probe Sequence
gcatccagccctgagacatgtagga

SEQ ID NO: 212887 - DNA, 25 bp, Probe Sequence
gcatcactgtgcctgagaaattgaa

SEQ ID NO: 212888 - DNA, 25 bp, Probe Sequence
gcatatgcagcccgtgctaacatga

SEQ ID NO: 212889 - DNA, 25 bp, Probe Sequence
gcattagatgcaggtcgtacataac

SEQ ID NO: 212890 - DNA, 25 bp, Probe Sequence
gcattgagctatggtcgtgccacta

SEQ ID NO: 212891 - DNA, 25 bp, Probe Sequence
gcatatcagaatttcttcccattgc

SEQ ID NO: 212892 - DNA, 25 bp, Probe Sequence
gcatagagacagtcccctcgataga

SEQ ID NO: 212893 - DNA, 25 bp, Probe Sequence
gcattgagaacttcccttgcaaatt

SEQ ID NO: 212894 - DNA, 25 bp, Probe Sequence
gcatattatacatccctgtgagcca

SEQ ID NO: 212895 - DNA, 25 bp, Probe Sequence
gcatttgagaaggctctgctgggtc

SEQ ID NO: 212896 - DNA, 25 bp, Probe Sequence
gcatcctgaatggaatctgtgggac

SEQ ID NO: 212897 - DNA, 25 bp, Probe Sequence
gcatacttggagaacgtgcttgaag

SEQ ID NO: 212898 - DNA, 25 bp, Probe Sequence
gcattctctgctggtaattcctgaa

SEQ ID NO: 212899 - DNA, 25 bp, Probe Sequence
gcatttctgtgaaactgcccaagaa

SEQ ID NO: 212900 - DNA, 25 bp, Probe Sequence
gcatttctggaaacatactgcaata

SEQ ID NO: 212901 - DNA, 25 bp, Probe Sequence
gcattttggcagatgcatagagaca

SEQ ID NO: 212902 - DNA, 25 bp, Probe Sequence
gcatcttagaagagcataatgacat

SEQ ID NO: 212903 - DNA, 25 bp, Probe Sequence
gcatcttacagtcagcacagaacac

SEQ ID NO: 212904 - DNA, 25 bp, Probe Sequence
gcatctgtaactaaccgtgatcatc

SEQ ID NO: 212905 - DNA, 25 bp, Probe Sequence
gcatctttagctaaacttcgcattg

SEQ ID NO: 212906 - DNA, 25 bp, Probe Sequence
gcattttaataaactcccaagggag

SEQ ID NO: 212907 - DNA, 25 bp, Probe Sequence
gcattttaaacaagatccctagatg

SEQ ID NO: 212908 - DNA, 25 bp, Probe Sequence
gcattaataaaaggtcttccaggaa

SEQ ID NO: 212909 - DNA, 25 bp, Probe Sequence
gcattgccagaaaaagatcttccag

SEQ ID NO: 212910 - DNA, 25 bp, Probe Sequence
gcatatgcctgctgagcaagccttc

SEQ ID NO: 212911 - DNA, 25 bp, Probe Sequence
gcatcagccgcattgaataccaggg

SEQ ID NO: 212912 - DNA, 25 bp, Probe Sequence
gcatactagagacatttcaagtgct

SEQ ID NO: 212913 - DNA, 25 bp, Probe Sequence
gcatttgatagtcatttcaatgctc

SEQ ID NO: 212914 - DNA, 25 bp, Probe Sequence
gcattttggatgccatttgattgta

SEQ ID NO: 212915 - DNA, 25 bp, Probe Sequence
gcatttgtgaggcccatggttgaga

SEQ ID NO: 212916 - DNA, 25 bp, Probe Sequence
gcatttgtagcaacctggatggagt

SEQ ID NO: 212917 - DNA, 25 bp, Probe Sequence
gcatcttagagcatccacagtgggt

SEQ ID NO: 212918 - DNA, 25 bp, Probe Sequence
gcatatcacccaacgccaggtggag

SEQ ID NO: 212919 - DNA, 25 bp, Probe Sequence
gcatatcatcagccttggccatggt

SEQ ID NO: 212920 - DNA, 25 bp, Probe Sequence
gcatcgtccgtgacgacatgctgtg

SEQ ID NO: 212921 - DNA, 25 bp, Probe Sequence
gcatcgtccgtgacgacatgctgtg

SEQ ID NO: 212922 - DNA, 25 bp, Probe Sequence
gcttggccgagtcacaggtgacccg

SEQ ID NO: 212923 - DNA, 25 bp, Probe Sequence
gcatttggtgaacaaggagtcgtca

SEQ ID NO: 212924 - DNA, 25 bp, Probe Sequence
gcattaggtggatactggagtggac

SEQ ID NO: 212925 - DNA, 25 bp, Probe Sequence
gcactacctgggtggtcaggagccc

SEQ ID NO: 212926 - DNA, 25 bp, Probe Sequence
gcatctttccggaggctaacagacc

SEQ ID NO: 212927 - DNA, 25 bp, Probe Sequence
gcattatttcagctgtggctttcag

SEQ ID NO: 212928 - DNA, 25 bp, Probe Sequence
gcattgaactgagcttggcatttat

SEQ ID NO: 212929 - DNA, 25 bp, Probe Sequence
gcattggatctatcttggatatcat

SEQ ID NO: 212930 - DNA, 25 bp, Probe Sequence
gcttggcgtcaggcttgaatatctc

SEQ ID NO: 212931 - DNA, 25 bp, Probe Sequence
gcagtggtggcagcagtaagagcca

SEQ ID NO: 212932 - DNA, 25 bp, Probe Sequence
gcatctggattctgcctaataaaaa

SEQ ID NO: 212933 - DNA, 25 bp, Probe Sequence
gcattgaaactaccaaaataaagtg

SEQ ID NO: 212934 - DNA, 25 bp, Probe Sequence
gcaggaataccgcaaaaagcaccgg

SEQ ID NO: 212935 - DNA, 25 bp, Probe Sequence
gcatgggaaccctactgacaagcag

SEQ ID NO: 212936 - DNA, 25 bp, Probe Sequence
gcattaaacctcactgaaacctgaa

SEQ ID NO: 212937 - DNA, 25 bp, Probe Sequence
gcattaaagactgatgctaaacctc

SEQ ID NO: 212938 - DNA, 25 bp, Probe Sequence
gcattcgcaaggagtggaaaccacc

SEQ ID NO: 212939 - DNA, 25 bp, Probe Sequence
gcatctcgagggggtggcaatcacc

SEQ ID NO: 212940 - DNA, 25 bp, Probe Sequence
gcatcctgaggaagttgtattagct

SEQ ID NO: 212941 - DNA, 25 bp, Probe Sequence
gcattcgatgcgtgtttaatgatga

SEQ ID NO: 212942 - DNA, 25 bp, Probe Sequence
gcaccaggtaccagtactgtgactt

SEQ ID NO: 212943 - DNA, 25 bp, Probe Sequence
tcaggctggtaccggtccggaattc

SEQ ID NO: 212944 - DNA, 25 bp, Probe Sequence
gcaggctggtaccggtccggaattc

SEQ ID NO: 212945 - DNA, 25 bp, Probe Sequence
gcaggctggtaccggtccggaattc

SEQ ID NO: 212946 - DNA, 25 bp, Probe Sequence
gcaggctggtaccggtccggaattc

SEQ ID NO: 212947 - DNA, 25 bp, Probe Sequence
gcaggctggtaccggtccggaattc

SEQ ID NO: 212948 - DNA, 25 bp, Probe Sequence
gcaggctggtaccggtccggaattc

SEQ ID NO: 212949 - DNA, 25 bp, Probe Sequence
gcaggctggtaccggtccggaattc

SEQ ID NO: 212950 - DNA, 25 bp, Probe Sequence
gcaggctggtaccggtccggaattc

SEQ ID NO: 212951 - DNA, 25 bp, Probe Sequence
gcaggctggtaccggtccggaattc

SEQ ID NO: 212952 - DNA, 25 bp, Probe Sequence
gcaggctggtaccggtccggaattc

SEQ ID NO: 212953 - DNA, 25 bp, Probe Sequence
gcaggctggtaccggtccggaattc

SEQ ID NO: 212954 - DNA, 25 bp, Probe Sequence
gcaggctggtaccggtccggaattc

SEQ ID NO: 212955 - DNA, 25 bp, Probe Sequence
gcaggctggtaccggtccggaattc

SEQ ID NO: 212956 - DNA, 25 bp, Probe Sequence
gcaggctggtaccggtccggaattc

SEQ ID NO: 212957 - DNA, 25 bp, Probe Sequence
gcaggctggtaccggtccggaattc

SEQ ID NO: 212958 - DNA, 25 bp, Probe Sequence
gcaggctggtaccggtccggaattc

SEQ ID NO: 212959 - DNA, 25 bp, Probe Sequence
gcaggctggtaccggtccggaattc

SEQ ID NO: 212960 - DNA, 25 bp, Probe Sequence
gcaggctggtaccggtccggaattc

SEQ ID NO: 212961 - DNA, 25 bp, Probe Sequence
gcaggctggtaccggtccggaattc

SEQ ID NO: 212962 - DNA, 25 bp, Probe Sequence
gcaggctggtaccggtccggaattc

SEQ ID NO: 212963 - DNA, 25 bp, Probe Sequence
gcaggctggtaccggtccggaattc

SEQ ID NO: 212964 - DNA, 25 bp, Probe Sequence
gcaggctggtaccggtccggaattc

SEQ ID NO: 212965 - DNA, 25 bp, Probe Sequence
gcaggctggtaccggtccggaattc

SEQ ID NO: 212966 - DNA, 25 bp, Probe Sequence
gcaggctggtaccggtccggaattc

SEQ ID NO: 212967 - DNA, 25 bp, Probe Sequence
gcaggctggtaccggtccggaattc

SEQ ID NO: 212968 - DNA, 25 bp, Probe Sequence
gcaggctggtaccggtccggaattc

SEQ ID NO: 212969 - DNA, 25 bp, Probe Sequence
gcaggctggtaccggtccggaattc

SEQ ID NO: 212970 - DNA, 25 bp, Probe Sequence
gcaggctggtaccggtccggaattc

SEQ ID NO: 212971 - DNA, 25 bp, Probe Sequence
gcaggctggtaccggtccggaattc

SEQ ID NO: 212972 - DNA, 25 bp, Probe Sequence
gcaggctggtaccggtccggaattc

SEQ ID NO: 212973 - DNA, 25 bp, Probe Sequence
gcaggctggtaccggtccggaattc

SEQ ID NO: 212974 - DNA, 25 bp, Probe Sequence
gcaggctggtaccggtccggaattc

SEQ ID NO: 212975 - DNA, 25 bp, Probe Sequence
gcaggctggtaccggtccggaattc

SEQ ID NO: 212976 - DNA, 25 bp, Probe Sequence
gcaggctggtaccggtccggaattc

SEQ ID NO: 212977 - DNA, 25 bp, Probe Sequence
gcaggctggtaccggtccggaattc

SEQ ID NO: 212978 - DNA, 25 bp, Probe Sequence
gcaggctggtaccggtccggaattc

SEQ ID NO: 212979 - DNA, 25 bp, Probe Sequence
gcaggctggtaccggtccggaattc

SEQ ID NO: 212980 - DNA, 25 bp, Probe Sequence
gcaggctggtaccggtccggaattc

SEQ ID NO: 212981 - DNA, 25 bp, Probe Sequence
gcaggctggtaccggtccggaattc

SEQ ID NO: 212982 - DNA, 25 bp, Probe Sequence
gcaggctggtaccggtccggaattc

SEQ ID NO: 212983 - DNA, 25 bp, Probe Sequence
gcaggctggtaccggtccggaattc

SEQ ID NO: 212984 - DNA, 25 bp, Probe Sequence
gcaggctggtaccggtccggaattc

SEQ ID NO: 212985 - DNA, 25 bp, Probe Sequence
gcaggctggtaccggtccggaattc

SEQ ID NO: 212986 - DNA, 25 bp, Probe Sequence
gcaggctggtaccggtccggaattc

SEQ ID NO: 212987 - DNA, 25 bp, Probe Sequence
gcaggctggtaccggtccggaattc

SEQ ID NO: 212988 - DNA, 25 bp, Probe Sequence
gcaggctggtaccggtccggaattc

SEQ ID NO: 212989 - DNA, 25 bp, Probe Sequence
gcaggctggtaccggtccggaattc

SEQ ID NO: 212990 - DNA, 25 bp, Probe Sequence
gcaggctggtaccggtccggaattc

SEQ ID NO: 212991 - DNA, 25 bp, Probe Sequence
gcaggctggtaccggtccggaattc

SEQ ID NO: 212992 - DNA, 25 bp, Probe Sequence
gcaggctggtaccggtccggaattc

SEQ ID NO: 212993 - DNA, 25 bp, Probe Sequence
gcaggctggtaccggtccggaattc

SEQ ID NO: 212994 - DNA, 25 bp, Probe Sequence
gcaggctggtaccggtccggaattc

SEQ ID NO: 212995 - DNA, 25 bp, Probe Sequence
gcaggctggtaccggtccggaattc

SEQ ID NO: 212996 - DNA, 25 bp, Probe Sequence
gcaggctggtaccggtccggaattc

SEQ ID NO: 212997 - DNA, 25 bp, Probe Sequence
gcaggctggtaccggtccggaattc

SEQ ID NO: 212998 - DNA, 25 bp, Probe Sequence
gcaggctggtaccggtccggaattc

SEQ ID NO: 212999 - DNA, 25 bp, Probe Sequence
gcaggctggtaccggtccggaattc

SEQ ID NO: 213000 - DNA, 25 bp, Probe Sequence
gcaggctggtaccggtccggaattc

SEQ ID NO: 213001 - DNA, 25 bp, Probe Sequence
gcaggctggtaccggtccggaattc

SEQ ID NO: 213002 - DNA, 25 bp, Probe Sequence
gcaggctggtaccggtccggaattc

SEQ ID NO: 213003 - DNA, 25 bp, Probe Sequence
gcaggctggtaccggtccggaattc

SEQ ID NO: 213004 - DNA, 25 bp, Probe Sequence
gcaggctggtaccggtccggaattc

SEQ ID NO: 213005 - DNA, 25 bp, Probe Sequence
gcaggctggtaccggtccggaattc

SEQ ID NO: 213006 - DNA, 25 bp, Probe Sequence
gcaggctggtaccggtccggaattc

SEQ ID NO: 213007 - DNA, 25 bp, Probe Sequence
gcaggctggtaccggtccggaattc

SEQ ID NO: 213008 - DNA, 25 bp, Probe Sequence
gcaggctggtaccggtccggaattc

SEQ ID NO: 213009 - DNA, 25 bp, Probe Sequence
gcaggctggtaccggtccggaattc

SEQ ID NO: 213010 - DNA, 25 bp, Probe Sequence
gcaggctggtaccggtccggaattc

SEQ ID NO: 213011 - DNA, 25 bp, Probe Sequence
gcaggctggtaccggtccggaattc

SEQ ID NO: 213012 - DNA, 25 bp, Probe Sequence
gcaggctggtaccggtccggaattc

SEQ ID NO: 213013 - DNA, 25 bp, Probe Sequence
gcaggctggtaccggtccggaattc

SEQ ID NO: 213014 - DNA, 25 bp, Probe Sequence
gcaggctggtaccggtccggaattc

SEQ ID NO: 213015 - DNA, 25 bp, Probe Sequence
gcaggctggtaccggtccggaattc

SEQ ID NO: 213016 - DNA, 25 bp, Probe Sequence
gcaggctggtaccggtccggaattc

SEQ ID NO: 213017 - DNA, 25 bp, Probe Sequence
gcaggctggtaccggtccggaattc

SEQ ID NO: 213018 - DNA, 25 bp, Probe Sequence
gcaggctggtaccggtccggaattc

SEQ ID NO: 213019 - DNA, 25 bp, Probe Sequence
gcaggctggtaccggtccggaattc

SEQ ID NO: 213020 - DNA, 25 bp, Probe Sequence
gcaggctggtaccggtccggaattc

SEQ ID NO: 213021 - DNA, 25 bp, Probe Sequence
gcaggctggtaccggtccggaattc

SEQ ID NO: 213022 - DNA, 25 bp, Probe Sequence
gcaggctggtaccggtccggaattc

SEQ ID NO: 213023 - DNA, 25 bp, Probe Sequence
gcaggctggtaccggtccggaattc

SEQ ID NO: 213024 - DNA, 25 bp, Probe Sequence
gcaggctggtaccggtccggaattc

SEQ ID NO: 213025 - DNA, 25 bp, Probe Sequence
gcaggctggtaccggtccggaattc

SEQ ID NO: 213026 - DNA, 25 bp, Probe Sequence
gcaggctggtaccggtccggaattc

SEQ ID NO: 213027 - DNA, 25 bp, Probe Sequence
gcaggctggtaccggtccggaattc

SEQ ID NO: 213028 - DNA, 25 bp, Probe Sequence
gcaggctggtaccggtccggaattc

SEQ ID NO: 213029 - DNA, 25 bp, Probe Sequence
gcaggctggtaccggtccggaattc

SEQ ID NO: 213030 - DNA, 25 bp, Probe Sequence
gcaggctggtaccggtccggaattc

SEQ ID NO: 213031 - DNA, 25 bp, Probe Sequence
gcaggctggtaccggtccggaattc

SEQ ID NO: 213032 - DNA, 25 bp, Probe Sequence
gcaggctggtaccggtccggaattc

SEQ ID NO: 213033 - DNA, 25 bp, Probe Sequence
gcaggctggtaccggtccggaattc

SEQ ID NO: 213034 - DNA, 25 bp, Probe Sequence
gcaggctggtaccggtccggaattc

SEQ ID NO: 213035 - DNA, 25 bp, Probe Sequence
gcaggctggtaccggtccggaattc

SEQ ID NO: 213036 - DNA, 25 bp, Probe Sequence
gcaggctggtaccggtccggaattc

SEQ ID NO: 213037 - DNA, 25 bp, Probe Sequence
gcaggctggtaccggtccggaattc

SEQ ID NO: 213038 - DNA, 25 bp, Probe Sequence
gcaggctggtaccggtccggaattc

SEQ ID NO: 213039 - DNA, 25 bp, Probe Sequence
gcaggctggtaccggtccggaattc

SEQ ID NO: 213040 - DNA, 25 bp, Probe Sequence
gcaggctggtaccggtccggaattc

SEQ ID NO: 213041 - DNA, 25 bp, Probe Sequence
gcaggctggtaccggtccggaattc

SEQ ID NO: 213042 - DNA, 25 bp, Probe Sequence
gcaggctggtaccggtccggaattc

SEQ ID NO: 213043 - DNA, 25 bp, Probe Sequence
gcaggctggtaccggtccggaattc

SEQ ID NO: 213044 - DNA, 25 bp, Probe Sequence
gcaggctggtaccggtccggaattc

SEQ ID NO: 213045 - DNA, 25 bp, Probe Sequence
gcaggctggtaccggtccggaattc

SEQ ID NO: 213046 - DNA, 25 bp, Probe Sequence
gcaggctggtaccggtccggaattc

SEQ ID NO: 213047 - DNA, 25 bp, Probe Sequence
gcaggctggtaccggtccggaattc

SEQ ID NO: 213048 - DNA, 25 bp, Probe Sequence
gcaggctggtaccggtccggaattc

SEQ ID NO: 213049 - DNA, 25 bp, Probe Sequence
gcaggctggtaccggtccggaattc

SEQ ID NO: 213050 - DNA, 25 bp, Probe Sequence
gcaggctggtaccggtccggaattc

SEQ ID NO: 213051 - DNA, 25 bp, Probe Sequence
gcaggctggtaccggtccggaattc

SEQ ID NO: 213052 - DNA, 25 bp, Probe Sequence
gcaggctggtaccggtccggaattc

SEQ ID NO: 213053 - DNA, 25 bp, Probe Sequence
gcaggctggtaccggtccggaattc

SEQ ID NO: 213054 - DNA, 25 bp, Probe Sequence
gcaggctggtaccggtccggaattc

SEQ ID NO: 213055 - DNA, 25 bp, Probe Sequence
gcaggctggtaccggtccggaattc

SEQ ID NO: 213056 - DNA, 25 bp, Probe Sequence
gcaggctggtaccggtccggaattc

SEQ ID NO: 213057 - DNA, 25 bp, Probe Sequence
gcaggctggtaccggtccggaattc

SEQ ID NO: 213058 - DNA, 25 bp, Probe Sequence
gcaggctggtaccggtccggaattc

SEQ ID NO: 213059 - DNA, 25 bp, Probe Sequence
gcaggctggtaccggtccggaattc

SEQ ID NO: 213060 - DNA, 25 bp, Probe Sequence
gcaggctggtaccggtccggaattc

SEQ ID NO: 213061 - DNA, 25 bp, Probe Sequence
gcaggctggtaccggtccggaattc

SEQ ID NO: 213062 - DNA, 25 bp, Probe Sequence
gcaggctggtaccggtccggaattc

SEQ ID NO: 213063 - DNA, 25 bp, Probe Sequence
gcaggctggtaccggtccggaattc

SEQ ID NO: 213064 - DNA, 25 bp, Probe Sequence
gcaggctggtaccggtccggaattc

SEQ ID NO: 213065 - DNA, 25 bp, Probe Sequence
gcaggctggtaccggtccggaattc

SEQ ID NO: 213066 - DNA, 25 bp, Probe Sequence
gcaggctggtaccggtccggaattc

SEQ ID NO: 213067 - DNA, 25 bp, Probe Sequence
gcatgagctgatcagcctgtgccac

SEQ ID NO: 213068 - DNA, 25 bp, Probe Sequence
gcatgccagaggtcgctggcagctc

SEQ ID NO: 213069 - DNA, 25 bp, Probe Sequence
gcatgccatgagaggggtgctgatg

SEQ ID NO: 213070 - DNA, 25 bp, Probe Sequence
gcatccattgatttcaagactgatt

SEQ ID NO: 213071 - DNA, 25 bp, Probe Sequence
gcatcaagatctttaatccattgtc

SEQ ID NO: 213072 - DNA, 25 bp, Probe Sequence
gcatagagacatctgagaccctcag

SEQ ID NO: 213073 - DNA, 25 bp, Probe Sequence
gcatatcagtctctgagggcttcct

SEQ ID NO: 213074 - DNA, 25 bp, Probe Sequence
gcatgacagattctggttggtgact

SEQ ID NO: 213075 - DNA, 25 bp, Probe Sequence
gcatccaataccagctagtggacat

SEQ ID NO: 213076 - DNA, 25 bp, Probe Sequence
gcatcacctaccaggatgtctggag

SEQ ID NO: 213077 - DNA, 25 bp, Probe Sequence
gcatcaccctcggtgggtttggagc

SEQ ID NO: 213078 - DNA, 25 bp, Probe Sequence
gcattgccttcggtttgtatttagt

SEQ ID NO: 213079 - DNA, 25 bp, Probe Sequence
gcattacgtgggcattgtcttttta

SEQ ID NO: 213080 - DNA, 25 bp, Probe Sequence
gcattcatcgtgaggggtctttgtc

SEQ ID NO: 213081 - DNA, 25 bp, Probe Sequence
gcattatccaattggtttgctattt

SEQ ID NO: 213082 - DNA, 25 bp, Probe Sequence
gcatttccaaatgtgttgagcactc

SEQ ID NO: 213083 - DNA, 25 bp, Probe Sequence
gcatttggacaacttgatgtaactg

SEQ ID NO: 213084 - DNA, 25 bp, Probe Sequence
gcatcagggacagctttgctaccag

SEQ ID NO: 213085 - DNA, 25 bp, Probe Sequence
gcatcagggaaacttaggctgctag

SEQ ID NO: 213086 - DNA, 25 bp, Probe Sequence
gcacgtggcatacatcatcaggtcg

SEQ ID NO: 213087 - DNA, 25 bp, Probe Sequence
gcattgctggctgagtccagggctg

SEQ ID NO: 213088 - DNA, 25 bp, Probe Sequence
gcattccgtatttccagcagactgg

SEQ ID NO: 213089 - DNA, 25 bp, Probe Sequence
gcattctggtgtttcacaaaagcag

SEQ ID NO: 213090 - DNA, 25 bp, Probe Sequence
gcatttggttctagcaacaatactg

SEQ ID NO: 213091 - DNA, 25 bp, Probe Sequence
gcatttgcgtttggatggcaatcgc

SEQ ID NO: 213092 - DNA, 25 bp, Probe Sequence
gcatatatacttccgaggcacctgc

SEQ ID NO: 213093 - DNA, 25 bp, Probe Sequence
gcatacattcttcaagatcccattt

SEQ ID NO: 213094 - DNA, 25 bp, Probe Sequence
gcatagattctataaattcttactt

SEQ ID NO: 213095 - DNA, 25 bp, Probe Sequence
gcatcaattcttgcatatatgttta

SEQ ID NO: 213096 - DNA, 25 bp, Probe Sequence
gcatatactcaaagcatttaatcta

SEQ ID NO: 213097 - DNA, 25 bp, Probe Sequence
gcattactgacatgtttgattcatc

SEQ ID NO: 213098 - DNA, 25 bp, Probe Sequence
gcattactgactgcttatgtatctt

SEQ ID NO: 213099 - DNA, 25 bp, Probe Sequence
gcatatacaagctcttaatattctg

SEQ ID NO: 213100 - DNA, 25 bp, Probe Sequence
gcattcaataaagtgtatatgtttc

SEQ ID NO: 213101 - DNA, 25 bp, Probe Sequence
gcattactctggtggattgttctag

SEQ ID NO: 213102 - DNA, 25 bp, Probe Sequence
gcattactctggtggattgttctag

SEQ ID NO: 213103 - DNA, 25 bp, Probe Sequence
gcattatctatgcagcatggggttt

SEQ ID NO: 213104 - DNA, 25 bp, Probe Sequence
gcatcttgctagacctagatgagtc

SEQ ID NO: 213105 - DNA, 25 bp, Probe Sequence
gcatctttggtcttcaatcagtccc

SEQ ID NO: 213106 - DNA, 25 bp, Probe Sequence
gcatctctgctcccatgtaatagca

SEQ ID NO: 213107 - DNA, 25 bp, Probe Sequence
gcatgcagagcatgtctgaaaggag

SEQ ID NO: 213108 - DNA, 25 bp, Probe Sequence
gcatagccaacttgatagaaaggag

SEQ ID NO: 213109 - DNA, 25 bp, Probe Sequence
gcatacgcatgactacattacaacg

SEQ ID NO: 213110 - DNA, 25 bp, Probe Sequence
gcatacagtgagcacatctagctga

SEQ ID NO: 213111 - DNA, 25 bp, Probe Sequence
gcataagtgacatcctcacgacctc

SEQ ID NO: 213112 - DNA, 25 bp, Probe Sequence
gcagatagtagagggccctgcctac

SEQ ID NO: 213113 - DNA, 25 bp, Probe Sequence
gcataagtagattaatcctgctctt

SEQ ID NO: 213114 - DNA, 25 bp, Probe Sequence
gcattacttatatgatatgtctcca

SEQ ID NO: 213115 - DNA, 25 bp, Probe Sequence
gcattacttatatgatatgtctcca

SEQ ID NO: 213116 - DNA, 25 bp, Probe Sequence
gcattacttatatgatatgtctcca

SEQ ID NO: 213117 - DNA, 25 bp, Probe Sequence
gcattatcattattgaaatctggga

SEQ ID NO: 213118 - DNA, 25 bp, Probe Sequence
gcatgctacttgcctacagtggggt

SEQ ID NO: 213119 - DNA, 25 bp, Probe Sequence
gcatcaaatacctgctgttcggatt

SEQ ID NO: 213120 - DNA, 25 bp, Probe Sequence
gcattaatcacctgtttgtggtcat

SEQ ID NO: 213121 - DNA, 25 bp, Probe Sequence
gcataaacaccttgaatttgatttt

SEQ ID NO: 213122 - DNA, 25 bp, Probe Sequence
gcatcagaaacgagctttggttttt

SEQ ID NO: 213123 - DNA, 25 bp, Probe Sequence
gcataaagaggctgtcctttttttt

SEQ ID NO: 213124 - DNA, 25 bp, Probe Sequence
gcataaagaggctgtcctttttttt

SEQ ID NO: 213125 - DNA, 25 bp, Probe Sequence
gcatacttacctagtgaaacttttc

SEQ ID NO: 213126 - DNA, 25 bp, Probe Sequence
gcatttttgcacaaggaattgcttt

SEQ ID NO: 213127 - DNA, 25 bp, Probe Sequence
gcattctgttacctgtgatattttt

SEQ ID NO: 213128 - DNA, 25 bp, Probe Sequence
gcatatcaattaggcacatgttttg

SEQ ID NO: 213129 - DNA, 25 bp, Probe Sequence
gcatatgtcattccccatatgtgtt

SEQ ID NO: 213130 - DNA, 25 bp, Probe Sequence
gcatttgcatttgctctttcatctc

SEQ ID NO: 213131 - DNA, 25 bp, Probe Sequence
gcatttgctttcctctgagattcta

SEQ ID NO: 213132 - DNA, 25 bp, Probe Sequence
gcatcttgtatcgattatggttctg

SEQ ID NO: 213133 - DNA, 25 bp, Probe Sequence
gcatcagtgttctctgaggtcctgt

SEQ ID NO: 213134 - DNA, 25 bp, Probe Sequence
gcatctcatttctcagagagaccat

SEQ ID NO: 213135 - DNA, 25 bp, Probe Sequence
gcatgaatcgcctcacagaatccat

SEQ ID NO: 213136 - DNA, 25 bp, Probe Sequence
gcataatgcccagacaggacttagg

SEQ ID NO: 213137 - DNA, 25 bp, Probe Sequence
gcattatgcccagtacatgacgtta

SEQ ID NO: 213138 - DNA, 25 bp, Probe Sequence
gcattatgcccagtacatgacctta

SEQ ID NO: 213139 - DNA, 25 bp, Probe Sequence
gcattactacagtacatggctaatc

SEQ ID NO: 213140 - DNA, 25 bp, Probe Sequence
gcattagctcactttcatttaatcc

SEQ ID NO: 213141 - DNA, 25 bp, Probe Sequence
gcattagagcactttgcaattgcat

SEQ ID NO: 213142 - DNA, 25 bp, Probe Sequence
gcactaagtcatttgcactggttgg

SEQ ID NO: 213143 - DNA, 25 bp, Probe Sequence
gcattagcagatgtccactgcgttg

SEQ ID NO: 213144 - DNA, 25 bp, Probe Sequence
gcattacagagtatcaccttgagac

SEQ ID NO: 213145 - DNA, 25 bp, Probe Sequence
gcagggatgttattacttctgaatc

SEQ ID NO: 213146 - DNA, 25 bp, Probe Sequence
gcattagatttctcatttgccaata

SEQ ID NO: 213147 - DNA, 25 bp, Probe Sequence
gcatatgggtctgtcaaagcctata

SEQ ID NO: 213148 - DNA, 25 bp, Probe Sequence
gcatattgcagtccactaaatgtgc

SEQ ID NO: 213149 - DNA, 25 bp, Probe Sequence
gcatttgcctcacctgacaatgttt

SEQ ID NO: 213150 - DNA, 25 bp, Probe Sequence
gcatttttgcatctgacattttacc

SEQ ID NO: 213151 - DNA, 25 bp, Probe Sequence
gcattttctgattttatacccactg

SEQ ID NO: 213152 - DNA, 25 bp, Probe Sequence
gcattttgttacttgctaccctgag

SEQ ID NO: 213153 - DNA, 25 bp, Probe Sequence
gcatgtgtttttgaaaacgctgcgg

SEQ ID NO: 213154 - DNA, 25 bp, Probe Sequence
gcatagtttactgaaacgagtggtc

SEQ ID NO: 213155 - DNA, 25 bp, Probe Sequence
gcaaggccaaagcaaacggtttctc

SEQ ID NO: 213156 - DNA, 25 bp, Probe Sequence
gaggcgacataacaagggaacttcc

SEQ ID NO: 213157 - DNA, 25 bp, Probe Sequence
gcaggccacaaatactggggtcccc

SEQ ID NO: 213158 - DNA, 25 bp, Probe Sequence
gcatcgagaaaatcaacggaaccca

SEQ ID NO: 213159 - DNA, 25 bp, Probe Sequence
gcatcgagaaaatcaacggaaccca

SEQ ID NO: 213160 - DNA, 25 bp, Probe Sequence
gcatcgagaaaatcaacggaaccca

SEQ ID NO: 213161 - DNA, 25 bp, Probe Sequence
gcatcatatcctaaggcatacggaa

SEQ ID NO: 213162 - DNA, 25 bp, Probe Sequence
gcatcatgacctaacgaactcagga

SEQ ID NO: 213163 - DNA, 25 bp, Probe Sequence
gcatatgcacgttcactgcaaagca

SEQ ID NO: 213164 - DNA, 25 bp, Probe Sequence
gcatcatctcagtaaggaagagcat

SEQ ID NO: 213165 - DNA, 25 bp, Probe Sequence
gcatattcaggaatgcatgagattt

SEQ ID NO: 213166 - DNA, 25 bp, Probe Sequence
gcatcttaacacaatgcacttttaa

SEQ ID NO: 213167 - DNA, 25 bp, Probe Sequence
gcatttcacaagagccattattgca

SEQ ID NO: 213168 - DNA, 25 bp, Probe Sequence
gcatttaatcagacctgcatttaat

SEQ ID NO: 213169 - DNA, 25 bp, Probe Sequence
gcattaggtatgacttgttctgagt

SEQ ID NO: 213170 - DNA, 25 bp, Probe Sequence
gcattaggtcttgtgtttgatgtgt

SEQ ID NO: 213171 - DNA, 25 bp, Probe Sequence
gcatttggtgcttgacgtattattg

SEQ ID NO: 213172 - DNA, 25 bp, Probe Sequence
gcatgttgatgcccgaagaaaattt

SEQ ID NO: 213173 - DNA, 25 bp, Probe Sequence
gcatatgagctgcagcaataaaagt

SEQ ID NO: 213174 - DNA, 25 bp, Probe Sequence
gcatatgagctgaagatcgccaaca

SEQ ID NO: 213175 - DNA, 25 bp, Probe Sequence
gcatatgagctgaagatcgccaaca

SEQ ID NO: 213176 - DNA, 25 bp, Probe Sequence
gcatcatcacgaagcagctccaaaa

SEQ ID NO: 213177 - DNA, 25 bp, Probe Sequence
gcatcatgttgaagcaccgaaagat

SEQ ID NO: 213178 - DNA, 25 bp, Probe Sequence
gcatatactgagcaactgcacaatg

SEQ ID NO: 213179 - DNA, 25 bp, Probe Sequence
gcatagacgcagctgcacagaaata

SEQ ID NO: 213180 - DNA, 25 bp, Probe Sequence
gcattaccggtcgatgcaacgagtg

SEQ ID NO: 213181 - DNA, 25 bp, Probe Sequence
gcagaacggagtgtccgggtgcagt

SEQ ID NO: 213182 - DNA, 25 bp, Probe Sequence
gcagtagggaggggcaggggtaagg

SEQ ID NO: 213183 - DNA, 25 bp, Probe Sequence
gcagtaggagagactcggggttctc

SEQ ID NO: 213184 - DNA, 25 bp, Probe Sequence
gcatgaagcgaacatctgggtggtt

SEQ ID NO: 213185 - DNA, 25 bp, Probe Sequence
gcatcaacgctgagttgtgccttgt

SEQ ID NO: 213186 - DNA, 25 bp, Probe Sequence
gcatagagcctctttcatgtgactt

SEQ ID NO: 213187 - DNA, 25 bp, Probe Sequence
gcatatggcaacgttcatgttcatc

SEQ ID NO: 213188 - DNA, 25 bp, Probe Sequence
gcatatggcacaggcctgcaatcct

SEQ ID NO: 213189 - DNA, 25 bp, Probe Sequence
gcatatgaaagactctgcctgctta

SEQ ID NO: 213190 - DNA, 25 bp, Probe Sequence
gcatcagggatactccagtcttgtc

SEQ ID NO: 213191 - DNA, 25 bp, Probe Sequence
gcatgaaggctcctgtctgactatt

SEQ ID NO: 213192 - DNA, 25 bp, Probe Sequence
gcatcagaggccagtagctttcttg

SEQ ID NO: 213193 - DNA, 25 bp, Probe Sequence
gcatcactatacggtgactttcctg

SEQ ID NO: 213194 - DNA, 25 bp, Probe Sequence
gcatcactaacctgacagttgttgc

SEQ ID NO: 213195 - DNA, 25 bp, Probe Sequence
gcatcagcaaaaattacagtggttg

SEQ ID NO: 213196 - DNA, 25 bp, Probe Sequence
gcatctgaagcatataaaggtctgg

SEQ ID NO: 213197 - DNA, 25 bp, Probe Sequence
gcattagtattttaaggagcactgt

SEQ ID NO: 213198 - DNA, 25 bp, Probe Sequence
gcattagttcatgtagatgggcatc

SEQ ID NO: 213199 - DNA, 25 bp, Probe Sequence
gcatttctatagatagttgtgcttt

SEQ ID NO: 213200 - DNA, 25 bp, Probe Sequence
gcatttgtcaatgacagtttctttt

SEQ ID NO: 213201 - DNA, 25 bp, Probe Sequence
gcatttcatgaaaaagctgcttctt

SEQ ID NO: 213202 - DNA, 25 bp, Probe Sequence
gcatttccaaagtagcatcttgcta

SEQ ID NO: 213203 - DNA, 25 bp, Probe Sequence
gcatttcaaatgttagatattgcta

SEQ ID NO: 213204 - DNA, 25 bp, Probe Sequence
gcatagcgatgcctgttggaattgc

SEQ ID NO: 213205 - DNA, 25 bp, Probe Sequence
gcatgatgagtctgaaggcatttgc

SEQ ID NO: 213206 - DNA, 25 bp, Probe Sequence
gcatcatggtcacatttgcattgtt

SEQ ID NO: 213207 - DNA, 25 bp, Probe Sequence
gcatcatggtcacatttgcattgtt

SEQ ID NO: 213208 - DNA, 25 bp, Probe Sequence
gcatatgtatgatagtgtgcatgtg

SEQ ID NO: 213209 - DNA, 25 bp, Probe Sequence
gcatatgctgggagtcacattgcct

SEQ ID NO: 213210 - DNA, 25 bp, Probe Sequence
gcatcctgtggtgtccatgaggtac

SEQ ID NO: 213211 - DNA, 25 bp, Probe Sequence
gcatctggtggagttgactgagtgg

SEQ ID NO: 213212 - DNA, 25 bp, Probe Sequence
gcatcatagctatgcctgtatggag

SEQ ID NO: 213213 - DNA, 25 bp, Probe Sequence
gcatatatcatgacacttcttggag

SEQ ID NO: 213214 - DNA, 25 bp, Probe Sequence
gcatgcaacagcacattctctggtg

SEQ ID NO: 213215 - DNA, 25 bp, Probe Sequence
gcatcaaagcatcttgcattatgca

SEQ ID NO: 213216 - DNA, 25 bp, Probe Sequence
gcatagaatgttggccttgcagcat

SEQ ID NO: 213217 - DNA, 25 bp, Probe Sequence
gcatatgcattctttcatcttgcac

SEQ ID NO: 213218 - DNA, 25 bp, Probe Sequence
gcatacttcatttcctgtgagcttg

SEQ ID NO: 213219 - DNA, 25 bp, Probe Sequence
gcatcactctcctcagtgttgatgt

SEQ ID NO: 213220 - DNA, 25 bp, Probe Sequence
gcatattttctctaggcttttttcc

SEQ ID NO: 213221 - DNA, 25 bp, Probe Sequence
gcatatttatgcttaggtcttttca

SEQ ID NO: 213222 - DNA, 25 bp, Probe Sequence
gcatatttattgaactgtctaattg

SEQ ID NO: 213223 - DNA, 25 bp, Probe Sequence
gcatttgtaataatcttcttcatag

SEQ ID NO: 213224 - DNA, 25 bp, Probe Sequence
gcatcttacagattttacttcaatt

SEQ ID NO: 213225 - DNA, 25 bp, Probe Sequence
gcattataggtgtttccacatgaat

SEQ ID NO: 213226 - DNA, 25 bp, Probe Sequence
gcatatttcagtgctgtcaccgtat

SEQ ID NO: 213227 - DNA, 25 bp, Probe Sequence
gcatttgctactgtgtctggttaat

SEQ ID NO: 213228 - DNA, 25 bp, Probe Sequence
gcatcctgtactgtgtctggaagcc

SEQ ID NO: 213229 - DNA, 25 bp, Probe Sequence
gcatttgctcactactgtctaaagt

SEQ ID NO: 213230 - DNA, 25 bp, Probe Sequence
gcatcttctcactatgtgctgtagt

SEQ ID NO: 213231 - DNA, 25 bp, Probe Sequence
gcatctgattcttgttgctgtacaa

SEQ ID NO: 213232 - DNA, 25 bp, Probe Sequence
gcatcaatatctctgtctgggacga

SEQ ID NO: 213233 - DNA, 25 bp, Probe Sequence
gcatcagtactttgtatgggatatt

SEQ ID NO: 213234 - DNA, 25 bp, Probe Sequence
gcatctgtactttgtttgccttgat

SEQ ID NO: 213235 - DNA, 25 bp, Probe Sequence
gcatcgctgtccaagtgtttcttgt

SEQ ID NO: 213236 - DNA, 25 bp, Probe Sequence
gcattttccttcatttctttaacaa

SEQ ID NO: 213237 - DNA, 25 bp, Probe Sequence
gcattttcatgttcttttttttagc

SEQ ID NO: 213238 - DNA, 25 bp, Probe Sequence
gcatttatttattactttagttacg

SEQ ID NO: 213239 - DNA, 25 bp, Probe Sequence
gcatttctcctatagatctgtagtt

SEQ ID NO: 213240 - DNA, 25 bp, Probe Sequence
gcatttccttaccacatatatacta

SEQ ID NO: 213241 - DNA, 25 bp, Probe Sequence
gacttctttaggcagataaaacgtc

SEQ ID NO: 213242 - DNA, 25 bp, Probe Sequence
gagttgttttggcaccagatcaacg

SEQ ID NO: 213243 - DNA, 25 bp, Probe Sequence
gcatttgtttctggaaggagtcaac

SEQ ID NO: 213244 - DNA, 25 bp, Probe Sequence
gcattttttttgagtgatctgcaca

SEQ ID NO: 213245 - DNA, 25 bp, Probe Sequence
gcatacttgttgtttggtaatgaac

SEQ ID NO: 213246 - DNA, 25 bp, Probe Sequence
gcatatgtctttttttctaattccg

SEQ ID NO: 213247 - DNA, 25 bp, Probe Sequence
gcatagtcgtatgttttgaggaaag

SEQ ID NO: 213248 - DNA, 25 bp, Probe Sequence
gcatattcctatgcatttctagata

SEQ ID NO: 213249 - DNA, 25 bp, Probe Sequence
gcatttcatctgctatggccatggt

SEQ ID NO: 213250 - DNA, 25 bp, Probe Sequence
gcatcttctgtgcctagcacaagag

SEQ ID NO: 213251 - DNA, 25 bp, Probe Sequence
gcatattttgatttgccatcaagag

SEQ ID NO: 213252 - DNA, 25 bp, Probe Sequence
gcatatttatatctgcctgcatttg

SEQ ID NO: 213253 - DNA, 25 bp, Probe Sequence
gcatttgcttaagtgcctatctaaa

SEQ ID NO: 213254 - DNA, 25 bp, Probe Sequence
gcatttctaggacttttctaacata

SEQ ID NO: 213255 - DNA, 25 bp, Probe Sequence
gcatttctggggattgcttataaca

SEQ ID NO: 213256 - DNA, 25 bp, Probe Sequence
gcatttagaaagattctcattgaaa

SEQ ID NO: 213257 - DNA, 25 bp, Probe Sequence
gcatttggaaacgcactgcttcaaa

SEQ ID NO: 213258 - DNA, 25 bp, Probe Sequence
gcatgttaagtatggtcgcagtaaa

SEQ ID NO: 213259 - DNA, 25 bp, Probe Sequence
gcaaaaaatctctggccgtaaaccg

SEQ ID NO: 213260 - DNA, 25 bp, Probe Sequence
gcatggggaacgttggccagaaaac

SEQ ID NO: 213261 - DNA, 25 bp, Probe Sequence
gcaggcggatcacttgaggtcagaa

SEQ ID NO: 213262 - DNA, 25 bp, Probe Sequence
gcatgacctatcagtatggtgctaa

SEQ ID NO: 213263 - DNA, 25 bp, Probe Sequence
gcatagtcaactagtaagctgtaca

SEQ ID NO: 213264 - DNA, 25 bp, Probe Sequence
gcataccaccatgtagcagctacat

SEQ ID NO: 213265 - DNA, 25 bp, Probe Sequence
gcatcccagccaggttcagtggcag

SEQ ID NO: 213266 - DNA, 25 bp, Probe Sequence
gcatccgagacagaacatgctcaaa

SEQ ID NO: 213267 - DNA, 25 bp, Probe Sequence
gcatctcgggcagtagcgcccgaca

SEQ ID NO: 213268 - DNA, 25 bp, Probe Sequence
gcatctgagcgagaaggctctggaa

SEQ ID NO: 213269 - DNA, 25 bp, Probe Sequence
gcatctgcaaaggggcgtcggacaa

SEQ ID NO: 213270 - DNA, 25 bp, Probe Sequence
gcatctgcaaaggggcatcggagaa

SEQ ID NO: 213271 - DNA, 25 bp, Probe Sequence
gcatgtcaaatgcatcctctagaaa

SEQ ID NO: 213272 - DNA, 25 bp, Probe Sequence
gcatgtcaaatgcatcctctagaaa

SEQ ID NO: 213273 - DNA, 25 bp, Probe Sequence
gcatgtcacagacaccggtgtagga

SEQ ID NO: 213274 - DNA, 25 bp, Probe Sequence
gcatattcagaggagcctgttggca

SEQ ID NO: 213275 - DNA, 25 bp, Probe Sequence
gcatattccagagcctgtctgctat

SEQ ID NO: 213276 - DNA, 25 bp, Probe Sequence
gcatttctcaatggatttctgcttc

SEQ ID NO: 213277 - DNA, 25 bp, Probe Sequence
gcatctagccaaggatcattctcct

SEQ ID NO: 213278 - DNA, 25 bp, Probe Sequence
gcatcaagagaagtgacggctcctg

SEQ ID NO: 213279 - DNA, 25 bp, Probe Sequence
gcataaggaacttcactgtctctgc

SEQ ID NO: 213280 - DNA, 25 bp, Probe Sequence
gcatgacggaacaataggactcccc

SEQ ID NO: 213281 - DNA, 25 bp, Probe Sequence
gcatgagcgagaatggctacgaccc

SEQ ID NO: 213282 - DNA, 25 bp, Probe Sequence
gcatgggcatggaggacgccttcaa

SEQ ID NO: 213283 - DNA, 25 bp, Probe Sequence
gcatgtgccaggaacacaacctcac

SEQ ID NO: 213284 - DNA, 25 bp, Probe Sequence
gcatgtgccaggaacacaacctcac

SEQ ID NO: 213285 - DNA, 25 bp, Probe Sequence
gcatgtgcctggaactaccgagtag

SEQ ID NO: 213286 - DNA, 25 bp, Probe Sequence
gcatccacggatactgaggggtgac

SEQ ID NO: 213287 - DNA, 25 bp, Probe Sequence
gcatccaagccatatatggacgttc

SEQ ID NO: 213288 - DNA, 25 bp, Probe Sequence
gcatccaattcccaaggacaggctt

SEQ ID NO: 213289 - DNA, 25 bp, Probe Sequence
gcatccattcttgtttaagccttcc

SEQ ID NO: 213290 - DNA, 25 bp, Probe Sequence
gcatgctcagtggggttttaggctg

SEQ ID NO: 213291 - DNA, 25 bp, Probe Sequence
gcatcttgctgttgttttgctcgga

SEQ ID NO: 213292 - DNA, 25 bp, Probe Sequence
gcatctgtgctgaatgtcttatatg

SEQ ID NO: 213293 - DNA, 25 bp, Probe Sequence
gcatctactgatattatcacatggt

SEQ ID NO: 213294 - DNA, 25 bp, Probe Sequence
gcatttctgactttatcctgttgtt

SEQ ID NO: 213295 - DNA, 25 bp, Probe Sequence
gcatttggacagtttcttgttgtgt

SEQ ID NO: 213296 - DNA, 25 bp, Probe Sequence
gcatttggttatttctggtatcggt

SEQ ID NO: 213297 - DNA, 25 bp, Probe Sequence
gcataggctttactttagttcgctg

SEQ ID NO: 213298 - DNA, 25 bp, Probe Sequence
gcagtggcttctatgttttgggttg

SEQ ID NO: 213299 - DNA, 25 bp, Probe Sequence
gcagtggcttctatgttttgggttg

SEQ ID NO: 213300 - DNA, 25 bp, Probe Sequence
gcagtgtctttagatatttgaggga

SEQ ID NO: 213301 - DNA, 25 bp, Probe Sequence
gcatcgtagttaaatctctcgaggg

SEQ ID NO: 213302 - DNA, 25 bp, Probe Sequence
gcatcgccagcatttcgatcctcgt

SEQ ID NO: 213303 - DNA, 25 bp, Probe Sequence
gcatctggcagctaccatgcatggt

SEQ ID NO: 213304 - DNA, 25 bp, Probe Sequence
gcatcgctcagatccgtggtgagat

SEQ ID NO: 213305 - DNA, 25 bp, Probe Sequence
gcatctgcacatttccgtgttacag

SEQ ID NO: 213306 - DNA, 25 bp, Probe Sequence
gcatcccatttgtggtcattcctgc

SEQ ID NO: 213307 - DNA, 25 bp, Probe Sequence
gcatcggattggttagccttcattg

SEQ ID NO: 213308 - DNA, 25 bp, Probe Sequence
gcatcagtgaggcttcagcctcctt

SEQ ID NO: 213309 - DNA, 25 bp, Probe Sequence
gcatccggaggttcacaacctctgt

SEQ ID NO: 213310 - DNA, 25 bp, Probe Sequence
gcatcgggagtgaagcacagttctt

SEQ ID NO: 213311 - DNA, 25 bp, Probe Sequence
gcatgcctggaatcccagctacttg

SEQ ID NO: 213312 - DNA, 25 bp, Probe Sequence
gcatcctggacatgactgctgttct

SEQ ID NO: 213313 - DNA, 25 bp, Probe Sequence
gcatcttggaaatcattgtgtgtct

SEQ ID NO: 213314 - DNA, 25 bp, Probe Sequence
gcatcatagccagaccttgtttcta

SEQ ID NO: 213315 - DNA, 25 bp, Probe Sequence
gcatcaaaacattcctagtgttcaa

SEQ ID NO: 213316 - DNA, 25 bp, Probe Sequence
gcatcaagtacttcctgacgatgga

SEQ ID NO: 213317 - DNA, 25 bp, Probe Sequence
gcatatggtgaattactactgttga

SEQ ID NO: 213318 - DNA, 25 bp, Probe Sequence
gcatatggcattttactgatcttct

SEQ ID NO: 213319 - DNA, 25 bp, Probe Sequence
gcatagctacaattatctgatcttg

SEQ ID NO: 213320 - DNA, 25 bp, Probe Sequence
gcatagctccgactacagcatgtgg

SEQ ID NO: 213321 - DNA, 25 bp, Probe Sequence
gcataggctcttaagcagcatggaa

SEQ ID NO: 213322 - DNA, 25 bp, Probe Sequence
gcataggctcttaagcagcatggaa

SEQ ID NO: 213323 - DNA, 25 bp, Probe Sequence
gcatcaactttgtggcaatgaaatt

SEQ ID NO: 213324 - DNA, 25 bp, Probe Sequence
gcatccactttgtgtctccaaattg

SEQ ID NO: 213325 - DNA, 25 bp, Probe Sequence
gcatgccacttcgttttcaaatatt

SEQ ID NO: 213326 - DNA, 25 bp, Probe Sequence
gcagccgtgggcaaaatacaatttc

SEQ ID NO: 213327 - DNA, 25 bp, Probe Sequence
gcagccgtgggcaaaatacgatttc

SEQ ID NO: 213328 - DNA, 25 bp, Probe Sequence
gcatgccggtgtaaaatcgttcccc

SEQ ID NO: 213329 - DNA, 25 bp, Probe Sequence
gcatccgcctggataatgcttccgc

SEQ ID NO: 213330 - DNA, 25 bp, Probe Sequence
gcatcccctgaggaattcaaccaca

SEQ ID NO: 213331 - DNA, 25 bp, Probe Sequence
gcatgcccaagagactggagaccaa

SEQ ID NO: 213332 - DNA, 25 bp, Probe Sequence
gcatgcccctgagcactacagggtg

SEQ ID NO: 213333 - DNA, 25 bp, Probe Sequence
gcaggcctatgagagctacaagaag

SEQ ID NO: 213334 - DNA, 25 bp, Probe Sequence
gcatggccttgggaggacgggcctc

SEQ ID NO: 213335 - DNA, 25 bp, Probe Sequence
gcatgcagccattgggggaatcccc

SEQ ID NO: 213336 - DNA, 25 bp, Probe Sequence
gcatcatgtaatctgggacctgcca

SEQ ID NO: 213337 - DNA, 25 bp, Probe Sequence
gcatcatgtagacagctatgaccat

SEQ ID NO: 213338 - DNA, 25 bp, Probe Sequence
gcatcagtgaagacatgatcaacca

SEQ ID NO: 213339 - DNA, 25 bp, Probe Sequence
gcataatgagagactggctagcaca

SEQ ID NO: 213340 - DNA, 25 bp, Probe Sequence
gcataagaggcagtgcgaacaaact

SEQ ID NO: 213341 - DNA, 25 bp, Probe Sequence
gcataaaggcagtcgtacatactac

SEQ ID NO: 213342 - DNA, 25 bp, Probe Sequence
gcatgaacactgctcgctacaagct

SEQ ID NO: 213343 - DNA, 25 bp, Probe Sequence
gcatccataatccttctaatagcca

SEQ ID NO: 213344 - DNA, 25 bp, Probe Sequence
gcatccaatgacctatgtaacggca

SEQ ID NO: 213345 - DNA, 25 bp, Probe Sequence
gcatcgaagagcataatccacagag

SEQ ID NO: 213346 - DNA, 25 bp, Probe Sequence
gcatctggggctttgtcaacaagga

SEQ ID NO: 213347 - DNA, 25 bp, Probe Sequence
gcatataagagttatgttagccagg

SEQ ID NO: 213348 - DNA, 25 bp, Probe Sequence
gcatgtaatggtatcttaaagtgtg

SEQ ID NO: 213349 - DNA, 25 bp, Probe Sequence
gcatgttcattgcaacttaaaagcg

SEQ ID NO: 213350 - DNA, 25 bp, Probe Sequence
gcatcttctgaggtcaattaaaagg

SEQ ID NO: 213351 - DNA, 25 bp, Probe Sequence
gcatattcagtggtcttttcaagag

SEQ ID NO: 213352 - DNA, 25 bp, Probe Sequence
gcatattaggctacgtattccacat

SEQ ID NO: 213353 - DNA, 25 bp, Probe Sequence
gcatagctaccttcagaatttagtg

SEQ ID NO: 213354 - DNA, 25 bp, Probe Sequence
gcatacatacattaagatatttact

SEQ ID NO: 213355 - DNA, 25 bp, Probe Sequence
gcatactacataatataatccatac

SEQ ID NO: 213356 - DNA, 25 bp, Probe Sequence
gcatgactaaatacattgtccctcg

SEQ ID NO: 213357 - DNA, 25 bp, Probe Sequence
gcatagctaataacaaccacacatt

SEQ ID NO: 213358 - DNA, 25 bp, Probe Sequence
gcatatccaaaaaccataccactaa

SEQ ID NO: 213359 - DNA, 25 bp, Probe Sequence
gcatctctctaacactcatacaaat

SEQ ID NO: 213360 - DNA, 25 bp, Probe Sequence
gcatcctccagctgacagaaaaatc

SEQ ID NO: 213361 - DNA, 25 bp, Probe Sequence
gcatccattcctaataaaaattccc

SEQ ID NO: 213362 - DNA, 25 bp, Probe Sequence
gcatcgatacctcaacatcaattta

SEQ ID NO: 213363 - DNA, 25 bp, Probe Sequence
gcatcgttgccacaatagaataaat

SEQ ID NO: 213364 - DNA, 25 bp, Probe Sequence
gcatcgctcgtcctcaagaaaaagt

SEQ ID NO: 213365 - DNA, 25 bp, Probe Sequence
gcatcatgcatcttactgaaggtaa

SEQ ID NO: 213366 - DNA, 25 bp, Probe Sequence
gcatatgctactaatcaagagtagg

SEQ ID NO: 213367 - DNA, 25 bp, Probe Sequence
gcatatgtagtcaatacagacacac

SEQ ID NO: 213368 - DNA, 25 bp, Probe Sequence
gcatatctggtaattatgaatctag

SEQ ID NO: 213369 - DNA, 25 bp, Probe Sequence
gcatagctggtacatgctaacgcat

SEQ ID NO: 213370 - DNA, 25 bp, Probe Sequence
gcatagtctgtttctgctgacagga

SEQ ID NO: 213371 - DNA, 25 bp, Probe Sequence
gcataggctgacttttgcagatgga

SEQ ID NO: 213372 - DNA, 25 bp, Probe Sequence
gcatcttctggcttgactggatgga

SEQ ID NO: 213373 - DNA, 25 bp, Probe Sequence
gcatgttctggttgtctgtgtcagc

SEQ ID NO: 213374 - DNA, 25 bp, Probe Sequence
gcatgtgttgggtgcatgcttccgg

SEQ ID NO: 213375 - DNA, 25 bp, Probe Sequence
gcatgttacatttactttcacggaa

SEQ ID NO: 213376 - DNA, 25 bp, Probe Sequence
gcatggaaattaagtgtttcgtaca

SEQ ID NO: 213377 - DNA, 25 bp, Probe Sequence
gcaggagtttaaccttccagtcagg

SEQ ID NO: 213378 - DNA, 25 bp, Probe Sequence
gcaccaaagaaagcgtcccatcgta

SEQ ID NO: 213379 - DNA, 25 bp, Probe Sequence
gcaccaaaggaaaacttcaacgcaa

SEQ ID NO: 213380 - DNA, 25 bp, Probe Sequence
gcaggaaggtaaagcctaagtccct

SEQ ID NO: 213381 - DNA, 25 bp, Probe Sequence
gcaggaaagtacgcccaagattttg

SEQ ID NO: 213382 - DNA, 25 bp, Probe Sequence
gcatgggggtaccccaatctgaagt

SEQ ID NO: 213383 - DNA, 25 bp, Probe Sequence
gcagggaggttttccaactgttgga

SEQ ID NO: 213384 - DNA, 25 bp, Probe Sequence
gcaggtcagaggctcctaactgggc

SEQ ID NO: 213385 - DNA, 25 bp, Probe Sequence
gcatgcccaaggctacaaagctaga

SEQ ID NO: 213386 - DNA, 25 bp, Probe Sequence
gcatccccgctgatatcaacagtga

SEQ ID NO: 213387 - DNA, 25 bp, Probe Sequence
gcatccctcctgatcagcagaggtt

SEQ ID NO: 213388 - DNA, 25 bp, Probe Sequence
gcatccctcctgatcagcagaggtt

SEQ ID NO: 213389 - DNA, 25 bp, Probe Sequence
gcatcacctcctaaactgagcagtc

SEQ ID NO: 213390 - DNA, 25 bp, Probe Sequence
gcataactacataaacagcagaggt

SEQ ID NO: 213391 - DNA, 25 bp, Probe Sequence
gcagcaactactgaagaaaggacca

SEQ ID NO: 213392 - DNA, 25 bp, Probe Sequence
gcatgcacctcctgtaaaaggttga

SEQ ID NO: 213393 - DNA, 25 bp, Probe Sequence
gcatcaccatgcctggctaattttt

SEQ ID NO: 213394 - DNA, 25 bp, Probe Sequence
gcatccagattcagcgaactttctt

SEQ ID NO: 213395 - DNA, 25 bp, Probe Sequence
gcatcggactgaaccaactttggaa

SEQ ID NO: 213396 - DNA, 25 bp, Probe Sequence
gcacggaaacccatatttagtactt

SEQ ID NO: 213397 - DNA, 25 bp, Probe Sequence
gcaaagaaccccagtttcctatttg

SEQ ID NO: 213398 - DNA, 25 bp, Probe Sequence
gcatgaccaaacccaggtttctctt

SEQ ID NO: 213399 - DNA, 25 bp, Probe Sequence
gcaggcgcaaactcgattttctacg

SEQ ID NO: 213400 - DNA, 25 bp, Probe Sequence
gcatgttaattctggttctatctac

SEQ ID NO: 213401 - DNA, 25 bp, Probe Sequence
gcatgctgtttgtggcactttatct

SEQ ID NO: 213402 - DNA, 25 bp, Probe Sequence
gcatgctttctttgagttttaaatt

SEQ ID NO: 213403 - DNA, 25 bp, Probe Sequence
gcatcttttgcactaccttcaagaa

SEQ ID NO: 213404 - DNA, 25 bp, Probe Sequence
gcatcattcaagcatatcgtgtaaa

SEQ ID NO: 213405 - DNA, 25 bp, Probe Sequence
gcatcatgtgcatggaccacctgga

SEQ ID NO: 213406 - DNA, 25 bp, Probe Sequence
gcatctctgaggttccctcatggag

SEQ ID NO: 213407 - DNA, 25 bp, Probe Sequence
gcatcctgggtttcaccagtgacgc

SEQ ID NO: 213408 - DNA, 25 bp, Probe Sequence
gcatcctggagactaaagattgcac

SEQ ID NO: 213409 - DNA, 25 bp, Probe Sequence
gcatcctggtacacaagtgcagcca

SEQ ID NO: 213410 - DNA, 25 bp, Probe Sequence
gcatccgggagcaacagctgtcagc

SEQ ID NO: 213411 - DNA, 25 bp, Probe Sequence
gcatccttggagagagctgagagct

SEQ ID NO: 213412 - DNA, 25 bp, Probe Sequence
gcatcgcggtggctagcaagacgta

SEQ ID NO: 213413 - DNA, 25 bp, Probe Sequence
gcatgcctggggatcatcaagttgg

SEQ ID NO: 213414 - DNA, 25 bp, Probe Sequence
gcatgctcaggcagggctagagttt

SEQ ID NO: 213415 - DNA, 25 bp, Probe Sequence
gcatcagcggcacagtgaagtgttg

SEQ ID NO: 213416 - DNA, 25 bp, Probe Sequence
gcatgcaccagtcatgtgaaggtat

SEQ ID NO: 213417 - DNA, 25 bp, Probe Sequence
gcatcacaatgtagatctccaggct

SEQ ID NO: 213418 - DNA, 25 bp, Probe Sequence
gcatgacagatgttgacttagtgta

SEQ ID NO: 213419 - DNA, 25 bp, Probe Sequence
gcatcaagtttaattcggtagtttg

SEQ ID NO: 213420 - DNA, 25 bp, Probe Sequence
gcatcttttcactttccagtagtca

SEQ ID NO: 213421 - DNA, 25 bp, Probe Sequence
gcatccagttcatcttaagaatgtc

SEQ ID NO: 213422 - DNA, 25 bp, Probe Sequence
gcatcactggtatcttcatgacaga

SEQ ID NO: 213423 - DNA, 25 bp, Probe Sequence
gcatcaatgctaaattctatgaaac

SEQ ID NO: 213424 - DNA, 25 bp, Probe Sequence
gcataacattcaagcgctgctcaaa

SEQ ID NO: 213425 - DNA, 25 bp, Probe Sequence
gcataaatctcagactacagaacat

SEQ ID NO: 213426 - DNA, 25 bp, Probe Sequence
gcataagtcctctccaacagaatat

SEQ ID NO: 213427 - DNA, 25 bp, Probe Sequence
gcataaaccctgtctctactgaaaa

SEQ ID NO: 213428 - DNA, 25 bp, Probe Sequence
gcatcagaactagcacctttgaaaa

SEQ ID NO: 213429 - DNA, 25 bp, Probe Sequence
gcatagacaaaggccttaacaaacg

SEQ ID NO: 213430 - DNA, 25 bp, Probe Sequence
gcaggaaaattgtttgaacccagga

SEQ ID NO: 213431 - DNA, 25 bp, Probe Sequence
gcaggaaagaattaccactaccaag

SEQ ID NO: 213432 - DNA, 25 bp, Probe Sequence
gcaggaaatggtttcttctattcag

SEQ ID NO: 213433 - DNA, 25 bp, Probe Sequence
gcatccaagcatgatgagccctctc

SEQ ID NO: 213434 - DNA, 25 bp, Probe Sequence
gcatcgcacagtggaagcaaaccaa

SEQ ID NO: 213435 - DNA, 25 bp, Probe Sequence
gcatcgcatcgtggtgtgtcaatgc

SEQ ID NO: 213436 - DNA, 25 bp, Probe Sequence
gcatactctggctttgtgactgata

SEQ ID NO: 213437 - DNA, 25 bp, Probe Sequence
gcagacattggttttgattgtaaca

SEQ ID NO: 213438 - DNA, 25 bp, Probe Sequence
gcatgacatgggaggcgatggggac

SEQ ID NO: 213439 - DNA, 25 bp, Probe Sequence
gcagattcaggcatggattccgtga

SEQ ID NO: 213440 - DNA, 25 bp, Probe Sequence
gcatgtgtgcacactttaccgtagc

SEQ ID NO: 213441 - DNA, 25 bp, Probe Sequence
gcatctgccacaagttctatcacag

SEQ ID NO: 213442 - DNA, 25 bp, Probe Sequence
gcatgtccgcatggtcatcattaac

SEQ ID NO: 213443 - DNA, 25 bp, Probe Sequence
gcatgtacgctcataatcgagtgcc

SEQ ID NO: 213444 - DNA, 25 bp, Probe Sequence
gcaggccgtcttaattattcctttc

SEQ ID NO: 213445 - DNA, 25 bp, Probe Sequence
gcaggcctgtctgtgtgattgtcag

SEQ ID NO: 213446 - DNA, 25 bp, Probe Sequence
gggtccccgaagatctcaggaattt

SEQ ID NO: 213447 - DNA, 25 bp, Probe Sequence
gaggtggccccatattaacaaattg

SEQ ID NO: 213448 - DNA, 25 bp, Probe Sequence
gggtggagcccagaaacctgaattt

SEQ ID NO: 213449 - DNA, 25 bp, Probe Sequence
gggccagggccagaaagtcggtatc

SEQ ID NO: 213450 - DNA, 25 bp, Probe Sequence
gggcggggctgagtaaatgccggct

SEQ ID NO: 213451 - DNA, 25 bp, Probe Sequence
gtaggccgtctagaactggcatggt

SEQ ID NO: 213452 - DNA, 25 bp, Probe Sequence
gcaagggtttgggaacattgatggc

SEQ ID NO: 213453 - DNA, 25 bp, Probe Sequence
gcatggttacattggcgaatttgaa

SEQ ID NO: 213454 - DNA, 25 bp, Probe Sequence
gcatgttcaaaatggaagccatgaa

SEQ ID NO: 213455 - DNA, 25 bp, Probe Sequence
gcatgtccgcaaatggctgcaaaag

SEQ ID NO: 213456 - DNA, 25 bp, Probe Sequence
gcatcatgtctgttagggaaagcag

SEQ ID NO: 213457 - DNA, 25 bp, Probe Sequence
gcatacctggatgtaaacagcagtc

SEQ ID NO: 213458 - DNA, 25 bp, Probe Sequence
gcatccgtagtttaaacaagcctcc

SEQ ID NO: 213459 - DNA, 25 bp, Probe Sequence
gcaacgtggtcttggacacaaccat

SEQ ID NO: 213460 - DNA, 25 bp, Probe Sequence
gcatcaggtgtttagtaggttccat

SEQ ID NO: 213461 - DNA, 25 bp, Probe Sequence
gcatcgtgtttcagttggcatttca

SEQ ID NO: 213462 - DNA, 25 bp, Probe Sequence
gcaggctttcacaaggtgacttacg

SEQ ID NO: 213463 - DNA, 25 bp, Probe Sequence
gcatccctctacaaggtgcatttaa

SEQ ID NO: 213464 - DNA, 25 bp, Probe Sequence
gcatctggcctggaactggtgttaa

SEQ ID NO: 213465 - DNA, 25 bp, Probe Sequence
gcatcaacttgcacactggtgtcta

SEQ ID NO: 213466 - DNA, 25 bp, Probe Sequence
gcatcaatcttatactgagattctg

SEQ ID NO: 213467 - DNA, 25 bp, Probe Sequence
gcatcctttatctgtgacttcatgc

SEQ ID NO: 213468 - DNA, 25 bp, Probe Sequence
gcatccatgtttccagtgtttcggt

SEQ ID NO: 213469 - DNA, 25 bp, Probe Sequence
gcatctgtagtcccagctacttggg

SEQ ID NO: 213470 - DNA, 25 bp, Probe Sequence
gcataaagtcagcacaactcttgga

SEQ ID NO: 213471 - DNA, 25 bp, Probe Sequence
gcataaagtcaaataagcctctctg

SEQ ID NO: 213472 - DNA, 25 bp, Probe Sequence
gcatcaaggtatataggcccgcaga

SEQ ID NO: 213473 - DNA, 25 bp, Probe Sequence
gcatcaccagtattagaggcaccgc

SEQ ID NO: 213474 - DNA, 25 bp, Probe Sequence
tcatagtcgtattttgccaccgtaa

SEQ ID NO: 213475 - DNA, 25 bp, Probe Sequence
gcatgcatttttgttgaaccataaa

SEQ ID NO: 213476 - DNA, 25 bp, Probe Sequence
gcatacactttctttacacctaata

SEQ ID NO: 213477 - DNA, 25 bp, Probe Sequence
gcatacagctgtaatttaacccaga

SEQ ID NO: 213478 - DNA, 25 bp, Probe Sequence
gcagtcaggcctgttataaccgctg

SEQ ID NO: 213479 - DNA, 25 bp, Probe Sequence
gcagaaggaaagtaatggaccagtg

SEQ ID NO: 213480 - DNA, 25 bp, Probe Sequence
gaatagccataagaaaaccaggcca

SEQ ID NO: 213481 - DNA, 25 bp, Probe Sequence
gcaaaactcaaggaggcccggggca

SEQ ID NO: 213482 - DNA, 25 bp, Probe Sequence
gaaaaataagggcccagcacggtag

SEQ ID NO: 213483 - DNA, 25 bp, Probe Sequence
gtataaaatgcgtgaacccgggagg

SEQ ID NO: 213484 - DNA, 25 bp, Probe Sequence
gcaggaaaatcactcgaatccggga

SEQ ID NO: 213485 - DNA, 25 bp, Probe Sequence
gcatgtgaagaatgtctgtaccttg

SEQ ID NO: 213486 - DNA, 25 bp, Probe Sequence
gcagtactgaaagcagccagtcggc

SEQ ID NO: 213487 - DNA, 25 bp, Probe Sequence
gcatgtcctcaatgaacggtgcggc

SEQ ID NO: 213488 - DNA, 25 bp, Probe Sequence
gcatcgcctacaagaactgggagac

SEQ ID NO: 213489 - DNA, 25 bp, Probe Sequence
gcacgtttattccacggtagaggga

SEQ ID NO: 213490 - DNA, 25 bp, Probe Sequence
gcatgcatgtttatagctccagcca

SEQ ID NO: 213491 - DNA, 25 bp, Probe Sequence
gcatcttattcacagcttgcagcct

SEQ ID NO: 213492 - DNA, 25 bp, Probe Sequence
gcatcttaataaagtgtgagcagca

SEQ ID NO: 213493 - DNA, 25 bp, Probe Sequence
gcatcagtgacagagggccagcaga

SEQ ID NO: 213494 - DNA, 25 bp, Probe Sequence
gcatgccatgaaggaaagccacgct

SEQ ID NO: 213495 - DNA, 25 bp, Probe Sequence
gcatgccacacaagaaggacctgta

SEQ ID NO: 213496 - DNA, 25 bp, Probe Sequence
gcatgtacccaaagtgttctgattc

SEQ ID NO: 213497 - DNA, 25 bp, Probe Sequence
gcatgaaagccgaagttatggaccg

SEQ ID NO: 213498 - DNA, 25 bp, Probe Sequence
gcatgacaacacatagattagaagt

SEQ ID NO: 213499 - DNA, 25 bp, Probe Sequence
gcatgaaacaatttcttatctcagt

SEQ ID NO: 213500 - DNA, 25 bp, Probe Sequence
gcatcatcaaaagttatcttccgtt

SEQ ID NO: 213501 - DNA, 25 bp, Probe Sequence
gcatctaataacataatctgttgtt

SEQ ID NO: 213502 - DNA, 25 bp, Probe Sequence
gcatccaaaaatcatatcttgcttt

SEQ ID NO: 213503 - DNA, 25 bp, Probe Sequence
gcatcctattacagaactccatgtt

SEQ ID NO: 213504 - DNA, 25 bp, Probe Sequence
gcatcctttgagattatgtccactt

SEQ ID NO: 213505 - DNA, 25 bp, Probe Sequence
gcatgctgcttaagacttttagatt

SEQ ID NO: 213506 - DNA, 25 bp, Probe Sequence
gcatcaggtgctagacatggttaga

SEQ ID NO: 213507 - DNA, 25 bp, Probe Sequence
gcatcaggtctgggcaagtagcagg

SEQ ID NO: 213508 - DNA, 25 bp, Probe Sequence
gcatgaggtctgccagaaggccctg

SEQ ID NO: 213509 - DNA, 25 bp, Probe Sequence
gcatgaggcccacgagttctccaac

SEQ ID NO: 213510 - DNA, 25 bp, Probe Sequence
gcatggaaatcatagtccccactct

SEQ ID NO: 213511 - DNA, 25 bp, Probe Sequence
gcatggaaaagaccttgccagagcc

SEQ ID NO: 213512 - DNA, 25 bp, Probe Sequence
gcaggaataacattccccagaccct

SEQ ID NO: 213513 - DNA, 25 bp, Probe Sequence
gcatgaaaaaacaccgctgttccgt

SEQ ID NO: 213514 - DNA, 25 bp, Probe Sequence
gcagaagaagaagcggaccttccgc

SEQ ID NO: 213515 - DNA, 25 bp, Probe Sequence
gcaggatgaaaagctttcccgcctg

SEQ ID NO: 213516 - DNA, 25 bp, Probe Sequence
gcaggaggtggagaggtaccggctt

SEQ ID NO: 213517 - DNA, 25 bp, Probe Sequence
gcaggcccggatgacagtaccgaaa

SEQ ID NO: 213518 - DNA, 25 bp, Probe Sequence
gcaggccaaggtgacggggctacaa

SEQ ID NO: 213519 - DNA, 25 bp, Probe Sequence
gcaggcaaacggggctgggggagcc

SEQ ID NO: 213520 - DNA, 25 bp, Probe Sequence
gcaggagaaggcgtaccgggacggc

SEQ ID NO: 213521 - DNA, 25 bp, Probe Sequence
gcagggaagtcatatccgtggacca

SEQ ID NO: 213522 - DNA, 25 bp, Probe Sequence
gcagagggtgtgtttaccaggacct

SEQ ID NO: 213523 - DNA, 25 bp, Probe Sequence
gcaggaaggttcacaccaggagcga

SEQ ID NO: 213524 - DNA, 25 bp, Probe Sequence
gcatggagggatccagaacctggac

SEQ ID NO: 213525 - DNA, 25 bp, Probe Sequence
gcatgaagtttcgcaacatggagac

SEQ ID NO: 213526 - DNA, 25 bp, Probe Sequence
gcatgattgtgttgctgccaaatga

SEQ ID NO: 213527 - DNA, 25 bp, Probe Sequence
gcatgattgtgctgctgccaaatga

SEQ ID NO: 213528 - DNA, 25 bp, Probe Sequence
gcatgatagtcatttgcccgtcaag

SEQ ID NO: 213529 - DNA, 25 bp, Probe Sequence
gcatgatttatgattcccctggatt

SEQ ID NO: 213530 - DNA, 25 bp, Probe Sequence
gcaagttagttacctcctagataca

SEQ ID NO: 213531 - DNA, 25 bp, Probe Sequence
gaactgtaaaccatccacatttgca

SEQ ID NO: 213532 - DNA, 25 bp, Probe Sequence
gaattaaaattcataaagtctcatc

SEQ ID NO: 213533 - DNA, 25 bp, Probe Sequence
gcactataactcatgcttaaaccca

SEQ ID NO: 213534 - DNA, 25 bp, Probe Sequence
gcacaggtcaccatcttaaacaaca

SEQ ID NO: 213535 - DNA, 25 bp, Probe Sequence
gcagacgtgacctagttttgaaacc

SEQ ID NO: 213536 - DNA, 25 bp, Probe Sequence
gcatccgtgatgctcagtgttcaaa

SEQ ID NO: 213537 - DNA, 25 bp, Probe Sequence
gcatccactatactcatcttataac

SEQ ID NO: 213538 - DNA, 25 bp, Probe Sequence
gcatgtcacttaatctctcagattt

SEQ ID NO: 213539 - DNA, 25 bp, Probe Sequence
gcatcacacttaactcatctaactg

SEQ ID NO: 213540 - DNA, 25 bp, Probe Sequence
gcatccaatggaactcaaagcctac

SEQ ID NO: 213541 - DNA, 25 bp, Probe Sequence
gcatcagaaggtgctaagccctctc

SEQ ID NO: 213542 - DNA, 25 bp, Probe Sequence
gcatgcaggggtatgaaggccagcc

SEQ ID NO: 213543 - DNA, 25 bp, Probe Sequence
gcatcgtggtgtgtcaatgccacat

SEQ ID NO: 213544 - DNA, 25 bp, Probe Sequence
gcatccatgtgtggactcaagtcct

SEQ ID NO: 213545 - DNA, 25 bp, Probe Sequence
gcatccttgctgaactacagcttcg

SEQ ID NO: 213546 - DNA, 25 bp, Probe Sequence
gcatcctgcatgaaattgcccttgg

SEQ ID NO: 213547 - DNA, 25 bp, Probe Sequence
gcatgcccatgaaaaagcacttgtc

SEQ ID NO: 213548 - DNA, 25 bp, Probe Sequence
gcatgcccatatcaaaacatctaat

SEQ ID NO: 213549 - DNA, 25 bp, Probe Sequence
gcatccgccattcagaacaggaagg

SEQ ID NO: 213550 - DNA, 25 bp, Probe Sequence
gcatccgcgtcctgagagagatggt

SEQ ID NO: 213551 - DNA, 25 bp, Probe Sequence
gcatctagccatgcttaaacatttt

SEQ ID NO: 213552 - DNA, 25 bp, Probe Sequence
gcatctttatttaccaactttgcaa

SEQ ID NO: 213553 - DNA, 25 bp, Probe Sequence
gcatctgttgaaatgctcaagactt

SEQ ID NO: 213554 - DNA, 25 bp, Probe Sequence
gcatctgtatgagcccagagtccta

SEQ ID NO: 213555 - DNA, 25 bp, Probe Sequence
gcatcattagatgcactgctgagtc

SEQ ID NO: 213556 - DNA, 25 bp, Probe Sequence
gcatctaaggcatctcagagctctc

SEQ ID NO: 213557 - DNA, 25 bp, Probe Sequence
gcatccagggcattgtggatgccta

SEQ ID NO: 213558 - DNA, 25 bp, Probe Sequence
gcatcaggggctggatggagccggg

SEQ ID NO: 213559 - DNA, 25 bp, Probe Sequence
gcatcagggggctcagagtctgggt

SEQ ID NO: 213560 - DNA, 25 bp, Probe Sequence
gcatgcggggaggaagaggtggcct

SEQ ID NO: 213561 - DNA, 25 bp, Probe Sequence
gcatcctggttcaaacgggtgcctg

SEQ ID NO: 213562 - DNA, 25 bp, Probe Sequence
gcatgtaggtgtaaacgctggtgtc

SEQ ID NO: 213563 - DNA, 25 bp, Probe Sequence
gcatctactctgtataacgcatgag

SEQ ID NO: 213564 - DNA, 25 bp, Probe Sequence
gcatgctacctgtgaggcatggaaa

SEQ ID NO: 213565 - DNA, 25 bp, Probe Sequence
gcatgtccctgaagaggtgctagct

SEQ ID NO: 213566 - DNA, 25 bp, Probe Sequence
gcatcgcacctgaggtggtcatgtg

SEQ ID NO: 213567 - DNA, 25 bp, Probe Sequence
gcatcggcacgaaggttgtctgctg

SEQ ID NO: 213568 - DNA, 25 bp, Probe Sequence
gcaggtgacggccttagatctctcg

SEQ ID NO: 213569 - DNA, 25 bp, Probe Sequence
gcatggtgatggccgaccagaacca

SEQ ID NO: 213570 - DNA, 25 bp, Probe Sequence
gcagggtgggggaggactcacaata

SEQ ID NO: 213571 - DNA, 25 bp, Probe Sequence
gcaggggaccccatggaaaagatgg

SEQ ID NO: 213572 - DNA, 25 bp, Probe Sequence
gcaggtggaccccaaataatctagc

SEQ ID NO: 213573 - DNA, 25 bp, Probe Sequence
gcaggctgaagcgcaaaagaagaaa

SEQ ID NO: 213574 - DNA, 25 bp, Probe Sequence
gcagggtagtgtcagaagaagccta

SEQ ID NO: 213575 - DNA, 25 bp, Probe Sequence
gcatggagccaacaaggagaacctg

SEQ ID NO: 213576 - DNA, 25 bp, Probe Sequence
gcagggcctaacaaggaaacctggg

SEQ ID NO: 213577 - DNA, 25 bp, Probe Sequence
gactacccagaagggcacaaggggg

SEQ ID NO: 213578 - DNA, 25 bp, Probe Sequence
gcatcccccaaagttcacaatgtgg

SEQ ID NO: 213579 - DNA, 25 bp, Probe Sequence
gcatctctgaccaaatttcacataa

SEQ ID NO: 213580 - DNA, 25 bp, Probe Sequence
gcatcctgaccatgactatcattca

SEQ ID NO: 213581 - DNA, 25 bp, Probe Sequence
gcatctctgacaccaatcagatctt

SEQ ID NO: 213582 - DNA, 25 bp, Probe Sequence
gcatctgctgcccagcaacgagtgc

SEQ ID NO: 213583 - DNA, 25 bp, Probe Sequence
gcatctgcttcggagactcaggtgg

SEQ ID NO: 213584 - DNA, 25 bp, Probe Sequence
gcatcatctttggcagacagagaat

SEQ ID NO: 213585 - DNA, 25 bp, Probe Sequence
gcatctcttctccataagatagtgt

SEQ ID NO: 213586 - DNA, 25 bp, Probe Sequence
gcaggctcacaccaattgatagagt

SEQ ID NO: 213587 - DNA, 25 bp, Probe Sequence
gcatcttccactttctagagagaaa

SEQ ID NO: 213588 - DNA, 25 bp, Probe Sequence
gcatctgtccaccttatagaaacat

SEQ ID NO: 213589 - DNA, 25 bp, Probe Sequence
gcatctgttccatttatacccagag

SEQ ID NO: 213590 - DNA, 25 bp, Probe Sequence
gcacagtatctattggaaccaaaag

SEQ ID NO: 213591 - DNA, 25 bp, Probe Sequence
gcatgaatgattctagacactaaga

SEQ ID NO: 213592 - DNA, 25 bp, Probe Sequence
gcatgtcattgtctatgacagcgtc

SEQ ID NO: 213593 - DNA, 25 bp, Probe Sequence
gcatctgctgtgtgcgagacactgt

SEQ ID NO: 213594 - DNA, 25 bp, Probe Sequence
gcatcctaggcggagtcatcagcgc

SEQ ID NO: 213595 - DNA, 25 bp, Probe Sequence
gcatcctgagacagttgcacagtgc

SEQ ID NO: 213596 - DNA, 25 bp, Probe Sequence
gcatccttaatgcttctcagtcttc

SEQ ID NO: 213597 - DNA, 25 bp, Probe Sequence
gcatccttgaaccatatcaaagtga

SEQ ID NO: 213598 - DNA, 25 bp, Probe Sequence
gcatcatctatctcacttcaaaatg

SEQ ID NO: 213599 - DNA, 25 bp, Probe Sequence
gcatgctatagctaacttccaacta

SEQ ID NO: 213600 - DNA, 25 bp, Probe Sequence
gcatcattagcagctttccatctct

SEQ ID NO: 213601 - DNA, 25 bp, Probe Sequence
gcatcttatgctaattagccctgct

SEQ ID NO: 213602 - DNA, 25 bp, Probe Sequence
gcatctgtattttatagtcagcctt

SEQ ID NO: 213603 - DNA, 25 bp, Probe Sequence
gcatctggtttgctgtatgaccttg

SEQ ID NO: 213604 - DNA, 25 bp, Probe Sequence
gcatgctcagctaatagctgttgag

SEQ ID NO: 213605 - DNA, 25 bp, Probe Sequence
gcatctgactgcaataatgtgctaa

SEQ ID NO: 213606 - DNA, 25 bp, Probe Sequence
gcatgcaaatctacaatggtctcaa

SEQ ID NO: 213607 - DNA, 25 bp, Probe Sequence
gcatgacacagctcgggctgtcaga

SEQ ID NO: 213608 - DNA, 25 bp, Probe Sequence
gcatgactcacatcgtgcgggaagt

SEQ ID NO: 213609 - DNA, 25 bp, Probe Sequence
gcatcgccgcatacttggagaacgt

SEQ ID NO: 213610 - DNA, 25 bp, Probe Sequence
gcatcggctgcattgtggtggataa

SEQ ID NO: 213611 - DNA, 25 bp, Probe Sequence
gcatcggctgcattgtggtggataa

SEQ ID NO: 213612 - DNA, 25 bp, Probe Sequence
gcatctgggctaggcctcttagagc

SEQ ID NO: 213613 - DNA, 25 bp, Probe Sequence
gcagggctggaggcctcttagacat

SEQ ID NO: 213614 - DNA, 25 bp, Probe Sequence
gcaggaaaatgtgctattgagattc

SEQ ID NO: 213615 - DNA, 25 bp, Probe Sequence
gcatgtatcaacacttcatttttat

SEQ ID NO: 213616 - DNA, 25 bp, Probe Sequence
gcatgattctccagtatatttgtaa

SEQ ID NO: 213617 - DNA, 25 bp, Probe Sequence
gcatctttcagcctggagactgtgc

SEQ ID NO: 213618 - DNA, 25 bp, Probe Sequence
gcatctcttgagcctgagaagtgga

SEQ ID NO: 213619 - DNA, 25 bp, Probe Sequence
gcatgtattggcctggaggtggggt

SEQ ID NO: 213620 - DNA, 25 bp, Probe Sequence
gcagaattccgtcagatgtgggccg

SEQ ID NO: 213621 - DNA, 25 bp, Probe Sequence
gaattacgggaaactgccccacttg

SEQ ID NO: 213622 - DNA, 25 bp, Probe Sequence
gaataaaggggtagcccgacagtgg

SEQ ID NO: 213623 - DNA, 25 bp, Probe Sequence
gcagataacagctggttggccggtg

SEQ ID NO: 213624 - DNA, 25 bp, Probe Sequence
gcatgagaccaagggtgcggcggag

SEQ ID NO: 213625 - DNA, 25 bp, Probe Sequence
gcatgatcccaggctctgggtggtg

SEQ ID NO: 213626 - DNA, 25 bp, Probe Sequence
gcatgtcgctatgcactgcaagtga

SEQ ID NO: 213627 - DNA, 25 bp, Probe Sequence
gcatgccgccatggcagcaaagctg

SEQ ID NO: 213628 - DNA, 25 bp, Probe Sequence
gcatccagcctttcaaagctgactc

SEQ ID NO: 213629 - DNA, 25 bp, Probe Sequence
gcatggtgctttttaactttcatcg

SEQ ID NO: 213630 - DNA, 25 bp, Probe Sequence
gcatggtgctttttaactttcatcg

SEQ ID NO: 213631 - DNA, 25 bp, Probe Sequence
gcatggtgctttttaactttcatcg

SEQ ID NO: 213632 - DNA, 25 bp, Probe Sequence
gcatggttgttagaagtctgtaagt

SEQ ID NO: 213633 - DNA, 25 bp, Probe Sequence
gcatccctgttgcaaagtctgtatg

SEQ ID NO: 213634 - DNA, 25 bp, Probe Sequence
gcatcctgtgtacaacatgacattt

SEQ ID NO: 213635 - DNA, 25 bp, Probe Sequence
gcatccttgaggcaactatcatatt

SEQ ID NO: 213636 - DNA, 25 bp, Probe Sequence
gcatccttcagacagttatatcctc

SEQ ID NO: 213637 - DNA, 25 bp, Probe Sequence
gcatccttagtgaacttctgttgtc

SEQ ID NO: 213638 - DNA, 25 bp, Probe Sequence
gcatctcctagctatttcttttgcc

SEQ ID NO: 213639 - DNA, 25 bp, Probe Sequence
gcatctcttagatttacattataac

SEQ ID NO: 213640 - DNA, 25 bp, Probe Sequence
gcatccttctattctactgatcaga

SEQ ID NO: 213641 - DNA, 25 bp, Probe Sequence
gcatgtctgctctgatatacgtcga

SEQ ID NO: 213642 - DNA, 25 bp, Probe Sequence
gcatctctgctgttgacaatggctc

SEQ ID NO: 213643 - DNA, 25 bp, Probe Sequence
gcatctctgctgttgacaatggctc

SEQ ID NO: 213644 - DNA, 25 bp, Probe Sequence
gcatctctgctgttgacaatggctc

SEQ ID NO: 213645 - DNA, 25 bp, Probe Sequence
gcatgctgctggcagatcagggcca

SEQ ID NO: 213646 - DNA, 25 bp, Probe Sequence
gcatctcacatggagaaggtgcatc

SEQ ID NO: 213647 - DNA, 25 bp, Probe Sequence
gcatctatgcaggctactggtgcag

SEQ ID NO: 213648 - DNA, 25 bp, Probe Sequence
gcatctgatgccttcatctgttcag

SEQ ID NO: 213649 - DNA, 25 bp, Probe Sequence
gcatctgatgccttcatctgttcag

SEQ ID NO: 213650 - DNA, 25 bp, Probe Sequence
gcatctcatcttgcattctgatcaa

SEQ ID NO: 213651 - DNA, 25 bp, Probe Sequence
gcatccacatggcattcatgctcta

SEQ ID NO: 213652 - DNA, 25 bp, Probe Sequence
gcatgccacagtagatgtccacata

SEQ ID NO: 213653 - DNA, 25 bp, Probe Sequence
gcatccaattttgcacaatacagtg

SEQ ID NO: 213654 - DNA, 25 bp, Probe Sequence
gcatccagtccttacagaccaagga

SEQ ID NO: 213655 - DNA, 25 bp, Probe Sequence
gcatccatattcaaggcagaccata

SEQ ID NO: 213656 - DNA, 25 bp, Probe Sequence
gcatgcgagcattgaaggaccaata

SEQ ID NO: 213657 - DNA, 25 bp, Probe Sequence
gcatgtgtgttgaatgtcacaaatg

SEQ ID NO: 213658 - DNA, 25 bp, Probe Sequence
gcatgacagtataagacaccagcag

SEQ ID NO: 213659 - DNA, 25 bp, Probe Sequence
gcatgtcactattaagcccaagagc

SEQ ID NO: 213660 - DNA, 25 bp, Probe Sequence
gcatgtcctgattcccaatgcaggg

SEQ ID NO: 213661 - DNA, 25 bp, Probe Sequence
gcatgtcgttacatcactgacggta

SEQ ID NO: 213662 - DNA, 25 bp, Probe Sequence
gcatctgcgtgaacgtaggaaggaa

SEQ ID NO: 213663 - DNA, 25 bp, Probe Sequence
gcatccatggctacgttgacgaggt

SEQ ID NO: 213664 - DNA, 25 bp, Probe Sequence
gcatccatggctacgttgacgaggt

SEQ ID NO: 213665 - DNA, 25 bp, Probe Sequence
gcatcgagaccccatcagaggaggt

SEQ ID NO: 213666 - DNA, 25 bp, Probe Sequence
gcatgatgaacctgtcgactgggcg

SEQ ID NO: 213667 - DNA, 25 bp, Probe Sequence
gcatcgtatcctatggacggtcgga

SEQ ID NO: 213668 - DNA, 25 bp, Probe Sequence
gcatggttgctctattggactaccg

SEQ ID NO: 213669 - DNA, 25 bp, Probe Sequence
gcatgggcatgtgtgggaaatcctg

SEQ ID NO: 213670 - DNA, 25 bp, Probe Sequence
gcaggcatggtgtggtatagcatcc

SEQ ID NO: 213671 - DNA, 25 bp, Probe Sequence
gcaggcagggtgcgaatggaagggc

SEQ ID NO: 213672 - DNA, 25 bp, Probe Sequence
gcaggggcgtgttgagtgccaagga

SEQ ID NO: 213673 - DNA, 25 bp, Probe Sequence
gcaggactgtagaagcggccaggaa

SEQ ID NO: 213674 - DNA, 25 bp, Probe Sequence
gcatggacgtggagtcccacgtgtc

SEQ ID NO: 213675 - DNA, 25 bp, Probe Sequence
gcatggacgaggtgtccctgagcgc

SEQ ID NO: 213676 - DNA, 25 bp, Probe Sequence
gcagtcctgggtttcaattggcagc

SEQ ID NO: 213677 - DNA, 25 bp, Probe Sequence
gcatgacactggaggtcaaccggag

SEQ ID NO: 213678 - DNA, 25 bp, Probe Sequence
gcatgatcgtggtggtagccaccat

SEQ ID NO: 213679 - DNA, 25 bp, Probe Sequence
gcagattttgcaggtgtggaacgcc

SEQ ID NO: 213680 - DNA, 25 bp, Probe Sequence
gcatgtatgttgctgtctggactcc

SEQ ID NO: 213681 - DNA, 25 bp, Probe Sequence
gcatgcatatactgtctctgtttgc

SEQ ID NO: 213682 - DNA, 25 bp, Probe Sequence
gcatgcatagaaagccatcagttcc

SEQ ID NO: 213683 - DNA, 25 bp, Probe Sequence
gcatgccagagacttcacagtttct

SEQ ID NO: 213684 - DNA, 25 bp, Probe Sequence
gcatggcagcaaatgccaacatttt

SEQ ID NO: 213685 - DNA, 25 bp, Probe Sequence
gcatgtaaagtgctcagcatctgtg

SEQ ID NO: 213686 - DNA, 25 bp, Probe Sequence
gcatgtaaaatcttcagctggtgga

SEQ ID NO: 213687 - DNA, 25 bp, Probe Sequence
gcagatttaccatcatgtgactgga

SEQ ID NO: 213688 - DNA, 25 bp, Probe Sequence
gcagggatgaccacataccaggaat

SEQ ID NO: 213689 - DNA, 25 bp, Probe Sequence
gcaggagtggactcatgaccatgag

SEQ ID NO: 213690 - DNA, 25 bp, Probe Sequence
gcaggggtgatccctcagggggaat

SEQ ID NO: 213691 - DNA, 25 bp, Probe Sequence
gcaggggagaaatagcagaggggct

SEQ ID NO: 213692 - DNA, 25 bp, Probe Sequence
gcagggaagaacagagtatgggtca

SEQ ID NO: 213693 - DNA, 25 bp, Probe Sequence
gcagggaaatggggcttgttaataa

SEQ ID NO: 213694 - DNA, 25 bp, Probe Sequence
gcagggaagggcctgggcttgaatg

SEQ ID NO: 213695 - DNA, 25 bp, Probe Sequence
gcaggctacactggcggggatgtga

SEQ ID NO: 213696 - DNA, 25 bp, Probe Sequence
gcaggcttcctgcagactgtataga

SEQ ID NO: 213697 - DNA, 25 bp, Probe Sequence
gcaggcttgcaggatgcaaggttaa

SEQ ID NO: 213698 - DNA, 25 bp, Probe Sequence
gcatgcagcctgtcggcagagtgtc

SEQ ID NO: 213699 - DNA, 25 bp, Probe Sequence
gcatgcgcacgtgtgcaagtgtgtg

SEQ ID NO: 213700 - DNA, 25 bp, Probe Sequence
gcatggagcagggaagggctgtctg

SEQ ID NO: 213701 - DNA, 25 bp, Probe Sequence
gcatggacggcatggtgctggtgtg

SEQ ID NO: 213702 - DNA, 25 bp, Probe Sequence
gcatgagggacctctcgggatgtgg

SEQ ID NO: 213703 - DNA, 25 bp, Probe Sequence
gagtgaaaccatcccggggtggaag

SEQ ID NO: 213704 - DNA, 25 bp, Probe Sequence
gcaggggacctgtgtggggtgtgaa

SEQ ID NO: 213705 - DNA, 25 bp, Probe Sequence
gcagacaggaactggtgggaggtca

SEQ ID NO: 213706 - DNA, 25 bp, Probe Sequence
gcaggaggtggctggtgttaggtca

SEQ ID NO: 213707 - DNA, 25 bp, Probe Sequence
gcaggaggggccggagtattgggac

SEQ ID NO: 213708 - DNA, 25 bp, Probe Sequence
gcagggtgaggctggactttggggg

SEQ ID NO: 213709 - DNA, 25 bp, Probe Sequence
gcaggaagattctgagacatttcgc

SEQ ID NO: 213710 - DNA, 25 bp, Probe Sequence
gcaggagagattgcaacaccatccc

SEQ ID NO: 213711 - DNA, 25 bp, Probe Sequence
gcaggagtgtttgtcaggctcccgc

SEQ ID NO: 213712 - DNA, 25 bp, Probe Sequence
gcaggaggtattctagttccaatat

SEQ ID NO: 213713 - DNA, 25 bp, Probe Sequence
gcaggatttattcaagatactagcc

SEQ ID NO: 213714 - DNA, 25 bp, Probe Sequence
gcagaggttactgaagagcaatagc

SEQ ID NO: 213715 - DNA, 25 bp, Probe Sequence
gcaggccctccagaagaagctgaag

SEQ ID NO: 213716 - DNA, 25 bp, Probe Sequence
gcaggccctccagaagaagctgaag

SEQ ID NO: 213717 - DNA, 25 bp, Probe Sequence
gcagggcctggcatagagtaggtac

SEQ ID NO: 213718 - DNA, 25 bp, Probe Sequence
gcaggacaggccgctaaagtgtgac

SEQ ID NO: 213719 - DNA, 25 bp, Probe Sequence
gcaggagccggatgccaagggtgac

SEQ ID NO: 213720 - DNA, 25 bp, Probe Sequence
gcatgttccaagacagtatggggtg

SEQ ID NO: 213721 - DNA, 25 bp, Probe Sequence
gcatgagtccgggatgttggaggct

SEQ ID NO: 213722 - DNA, 25 bp, Probe Sequence
gcatggtcagactcggtgtcaggta

SEQ ID NO: 213723 - DNA, 25 bp, Probe Sequence
gcatgagtgtactgctgaggtcagg

SEQ ID NO: 213724 - DNA, 25 bp, Probe Sequence
gcatgaggataaggcacagggagtg

SEQ ID NO: 213725 - DNA, 25 bp, Probe Sequence
gcatgcaggactgccagcgggagct

SEQ ID NO: 213726 - DNA, 25 bp, Probe Sequence
gcatcgaggctataggacgcagctg

SEQ ID NO: 213727 - DNA, 25 bp, Probe Sequence
gcatcgatgtgctgtggatatcggt

SEQ ID NO: 213728 - DNA, 25 bp, Probe Sequence
gcatgcagtgctgtttgatagcatt

SEQ ID NO: 213729 - DNA, 25 bp, Probe Sequence
gcatgggctgcattatctacagcat

SEQ ID NO: 213730 - DNA, 25 bp, Probe Sequence
gcatgggtcatttcccagcatgaac

SEQ ID NO: 213731 - DNA, 25 bp, Probe Sequence
gcatggcaattattgccccagtaca

SEQ ID NO: 213732 - DNA, 25 bp, Probe Sequence
gcatgcgaatctttgcgcctaatca

SEQ ID NO: 213733 - DNA, 25 bp, Probe Sequence
gcaggatatctatgagactgtcatc

SEQ ID NO: 213734 - DNA, 25 bp, Probe Sequence
gcatgaagatcactgggggtctcct

SEQ ID NO: 213735 - DNA, 25 bp, Probe Sequence
gcatgaaatcatgttggagatctct

SEQ ID NO: 213736 - DNA, 25 bp, Probe Sequence
gcatggcaagttctgtggttctgag

SEQ ID NO: 213737 - DNA, 25 bp, Probe Sequence
gcaggcacaactctttatacggttg

SEQ ID NO: 213738 - DNA, 25 bp, Probe Sequence
gcatggaaacttttcacatgggttt

SEQ ID NO: 213739 - DNA, 25 bp, Probe Sequence
gcatggaaaacgtttgctgtttttc

SEQ ID NO: 213740 - DNA, 25 bp, Probe Sequence
gcatgctgaagctaagtaactttta

SEQ ID NO: 213741 - DNA, 25 bp, Probe Sequence
gcatgtctatgcttgaggaactttt

SEQ ID NO: 213742 - DNA, 25 bp, Probe Sequence
gcatgctttcccagaactgtttttg

SEQ ID NO: 213743 - DNA, 25 bp, Probe Sequence
gcatgcttttccattaattactttc

SEQ ID NO: 213744 - DNA, 25 bp, Probe Sequence
gcatgtctttacttgaaaaactctt

SEQ ID NO: 213745 - DNA, 25 bp, Probe Sequence
gcatgtacttaccgaagcgaacgca

SEQ ID NO: 213746 - DNA, 25 bp, Probe Sequence
gcaggacctagcagaactaacagat

SEQ ID NO: 213747 - DNA, 25 bp, Probe Sequence
gcagacacttaacaaaaagcaaaca

SEQ ID NO: 213748 - DNA, 25 bp, Probe Sequence
gcagacttcgaacaacagaaagcaa

SEQ ID NO: 213749 - DNA, 25 bp, Probe Sequence
gcagggtaaaccgatcaaccacaga

SEQ ID NO: 213750 - DNA, 25 bp, Probe Sequence
gcatgggtaagggctactatctcaa

SEQ ID NO: 213751 - DNA, 25 bp, Probe Sequence
gcatgggtaatacctgcctccatga

SEQ ID NO: 213752 - DNA, 25 bp, Probe Sequence
gcatggtttaacttcctcatcagaa

SEQ ID NO: 213753 - DNA, 25 bp, Probe Sequence
gcatgtacttatccatactaataaa

SEQ ID NO: 213754 - DNA, 25 bp, Probe Sequence
gcatgtcctttccaactggaaagtc

SEQ ID NO: 213755 - DNA, 25 bp, Probe Sequence
gcatgttcttgtcacactgggtgag

SEQ ID NO: 213756 - DNA, 25 bp, Probe Sequence
gcatgttcttgtcacactgggtgag

SEQ ID NO: 213757 - DNA, 25 bp, Probe Sequence
gcatgctgccttcaagcatctgttt

SEQ ID NO: 213758 - DNA, 25 bp, Probe Sequence
gcatgctactgtctagagcttgtct

SEQ ID NO: 213759 - DNA, 25 bp, Probe Sequence
gcatgaactgcttctaaattatttt

SEQ ID NO: 213760 - DNA, 25 bp, Probe Sequence
gcaggaccggtggcagttggtttaa

SEQ ID NO: 213761 - DNA, 25 bp, Probe Sequence
gcaggacgggcccaaagttatttat

SEQ ID NO: 213762 - DNA, 25 bp, Probe Sequence
gcagagacagggaggaagtttttat

SEQ ID NO: 213763 - DNA, 25 bp, Probe Sequence
gcagaggggtataggaaggtttcca

SEQ ID NO: 213764 - DNA, 25 bp, Probe Sequence
gcatggagccgctgtggacaggttt

SEQ ID NO: 213765 - DNA, 25 bp, Probe Sequence
gcatgtgtggcgggtggagaagctg

SEQ ID NO: 213766 - DNA, 25 bp, Probe Sequence
gcatggagagagagcggaaagtgag

SEQ ID NO: 213767 - DNA, 25 bp, Probe Sequence
gcaggaggtggtggcaaacctacag

SEQ ID NO: 213768 - DNA, 25 bp, Probe Sequence
gcatgatgggtcctccaggacctcc

SEQ ID NO: 213769 - DNA, 25 bp, Probe Sequence
gcatgacggctcatgcctgtaatcc

SEQ ID NO: 213770 - DNA, 25 bp, Probe Sequence
gcatggtggctcatgcctgtaatcc

SEQ ID NO: 213771 - DNA, 25 bp, Probe Sequence
gcatggtggctcatgcctgtaatcc

SEQ ID NO: 213772 - DNA, 25 bp, Probe Sequence
gcatggtggctcatgcctgtaatcc

SEQ ID NO: 213773 - DNA, 25 bp, Probe Sequence
gcatggtggtgcatgcctacagtcc

SEQ ID NO: 213774 - DNA, 25 bp, Probe Sequence
gcatcctgggctacactgagcacca

SEQ ID NO: 213775 - DNA, 25 bp, Probe Sequence
gcatgctcatgaccaacacatacac

SEQ ID NO: 213776 - DNA, 25 bp, Probe Sequence
gcatgtcatacactaagcagccagc

SEQ ID NO: 213777 - DNA, 25 bp, Probe Sequence
gcatgtctacaatgactctcgtgtc

SEQ ID NO: 213778 - DNA, 25 bp, Probe Sequence
gcatgtctacagaatttctcctcct

SEQ ID NO: 213779 - DNA, 25 bp, Probe Sequence
gcatgtagatagcatttatttctgt

SEQ ID NO: 213780 - DNA, 25 bp, Probe Sequence
gcatgtgggacgtttctgcatttgg

SEQ ID NO: 213781 - DNA, 25 bp, Probe Sequence
gcatgtggatgacacaatccctggg

SEQ ID NO: 213782 - DNA, 25 bp, Probe Sequence
gcatgtgaatgttagaacctctcag

SEQ ID NO: 213783 - DNA, 25 bp, Probe Sequence
gcaggaagttcagagttctaggagt

SEQ ID NO: 213784 - DNA, 25 bp, Probe Sequence
gcagaaggtacagagcctccgaagg

SEQ ID NO: 213785 - DNA, 25 bp, Probe Sequence
gcatgaaggtccctgatgacccgga

SEQ ID NO: 213786 - DNA, 25 bp, Probe Sequence
gcatggggagccttgaacccaaatc

SEQ ID NO: 213787 - DNA, 25 bp, Probe Sequence
gcagggtgatggtgaagaacagaat

SEQ ID NO: 213788 - DNA, 25 bp, Probe Sequence
gcatggttggtgagaatctaataac

SEQ ID NO: 213789 - DNA, 25 bp, Probe Sequence
gcatggtgtggtatagcatcctcaa

SEQ ID NO: 213790 - DNA, 25 bp, Probe Sequence
gcagtctggaataaagccccctagt

SEQ ID NO: 213791 - DNA, 25 bp, Probe Sequence
gcagttgttgaaaacgtccccattt

SEQ ID NO: 213792 - DNA, 25 bp, Probe Sequence
gcatgagttttacaagtgacccttc

SEQ ID NO: 213793 - DNA, 25 bp, Probe Sequence
gcaggtgtttgagaagtcccccctg

SEQ ID NO: 213794 - DNA, 25 bp, Probe Sequence
gcaggtttaggaccaggtccccttg

SEQ ID NO: 213795 - DNA, 25 bp, Probe Sequence
gcaggttggagtgactggtgggcct

SEQ ID NO: 213796 - DNA, 25 bp, Probe Sequence
gcatggtcggagaactccgggacct

SEQ ID NO: 213797 - DNA, 25 bp, Probe Sequence
gcagtttggaaactccggcggctgc

SEQ ID NO: 213798 - DNA, 25 bp, Probe Sequence
gcaggaggagaacatcacacgggct

SEQ ID NO: 213799 - DNA, 25 bp, Probe Sequence
gcatgcgatgtatgtttccacgggc

SEQ ID NO: 213800 - DNA, 25 bp, Probe Sequence
gcatgagcttgctgttgtacacagg

SEQ ID NO: 213801 - DNA, 25 bp, Probe Sequence
gcatgagcttgctgttgtacacagg

SEQ ID NO: 213802 - DNA, 25 bp, Probe Sequence
gcatgagcttgctgttgtacacagg

SEQ ID NO: 213803 - DNA, 25 bp, Probe Sequence
gcatgacatctgggtcatctgtcct

SEQ ID NO: 213804 - DNA, 25 bp, Probe Sequence
gcatgtatcttgcctcagatatact

SEQ ID NO: 213805 - DNA, 25 bp, Probe Sequence
gcagtgttaggagacaacataacca

SEQ ID NO: 213806 - DNA, 25 bp, Probe Sequence
gcaggcttctggtagccacttaacc

SEQ ID NO: 213807 - DNA, 25 bp, Probe Sequence
gcaggctagagggggcagttatgac

SEQ ID NO: 213808 - DNA, 25 bp, Probe Sequence
gcatgaggagggaagcagcctttag

SEQ ID NO: 213809 - DNA, 25 bp, Probe Sequence
gcagaagagagtaagttcccttgga

SEQ ID NO: 213810 - DNA, 25 bp, Probe Sequence
gcaggtagatgggtttctactttaa

SEQ ID NO: 213811 - DNA, 25 bp, Probe Sequence
gcactggggaggaattccatttcca

SEQ ID NO: 213812 - DNA, 25 bp, Probe Sequence
gcaagggaaggtgttgcatccccag

SEQ ID NO: 213813 - DNA, 25 bp, Probe Sequence
gcagtgggacccgtttatacccagt

SEQ ID NO: 213814 - DNA, 25 bp, Probe Sequence
gcagtaatgacaccctttatatccc

SEQ ID NO: 213815 - DNA, 25 bp, Probe Sequence
gcagttggtacctttcaagatacca

SEQ ID NO: 213816 - DNA, 25 bp, Probe Sequence
gcagtggtggtttttaatgaacaga

SEQ ID NO: 213817 - DNA, 25 bp, Probe Sequence
gcagaagtggatgaaaacgaacaag

SEQ ID NO: 213818 - DNA, 25 bp, Probe Sequence
gcagtgagttttccaaactgaaggg

SEQ ID NO: 213819 - DNA, 25 bp, Probe Sequence
gcaggagtttatccgtttgggagaa

SEQ ID NO: 213820 - DNA, 25 bp, Probe Sequence
gcaggacgttagactgttgggacag

SEQ ID NO: 213821 - DNA, 25 bp, Probe Sequence
gcaggggcttagtgtctggacaggg

SEQ ID NO: 213822 - DNA, 25 bp, Probe Sequence
gcaggggcgtaagggctgggtttgg

SEQ ID NO: 213823 - DNA, 25 bp, Probe Sequence
gcaggaagcagttagagcggtcgtt

SEQ ID NO: 213824 - DNA, 25 bp, Probe Sequence
gcagtggaattttgagcgaccttta

SEQ ID NO: 213825 - DNA, 25 bp, Probe Sequence
gcatgtggactgttggaagcctcat

SEQ ID NO: 213826 - DNA, 25 bp, Probe Sequence
gcatgtggagctgagtgacaccatc

SEQ ID NO: 213827 - DNA, 25 bp, Probe Sequence
gcatgtgccaatgactgtcaccttc

SEQ ID NO: 213828 - DNA, 25 bp, Probe Sequence
gcatggccaaattctggcctgctgt

SEQ ID NO: 213829 - DNA, 25 bp, Probe Sequence
gcatgagtgctgtaatttcctcagt

SEQ ID NO: 213830 - DNA, 25 bp, Probe Sequence
gcaggtgcccaattttctactggct

SEQ ID NO: 213831 - DNA, 25 bp, Probe Sequence
gcaggtgtccacttaactgactagc

SEQ ID NO: 213832 - DNA, 25 bp, Probe Sequence
gcaggagttcctgaagctggcttga

SEQ ID NO: 213833 - DNA, 25 bp, Probe Sequence
gcaggttccatggcaaagcggttga

SEQ ID NO: 213834 - DNA, 25 bp, Probe Sequence
gcaggaaccgcgagatggtctagag

SEQ ID NO: 213835 - DNA, 25 bp, Probe Sequence
gcatggatctcccgaaattggccag

SEQ ID NO: 213836 - DNA, 25 bp, Probe Sequence
gcaggagcatttcaaggtggccaga

SEQ ID NO: 213837 - DNA, 25 bp, Probe Sequence
gcaggagaattttgacgtgaataag

SEQ ID NO: 213838 - DNA, 25 bp, Probe Sequence
gcatggagaatccttgccttacttt

SEQ ID NO: 213839 - DNA, 25 bp, Probe Sequence
gcatggatacctctggcatgagaca

SEQ ID NO: 213840 - DNA, 25 bp, Probe Sequence
gcatgtcataacccaggatcaaatc

SEQ ID NO: 213841 - DNA, 25 bp, Probe Sequence
gcatgtatacaaacgaatagcagat

SEQ ID NO: 213842 - DNA, 25 bp, Probe Sequence
gcatggataagtgtgaactgaatgt

SEQ ID NO: 213843 - DNA, 25 bp, Probe Sequence
gcagtgaatgtggatctaacgaaat

SEQ ID NO: 213844 - DNA, 25 bp, Probe Sequence
gcaggttctgcgactgatgcacagc

SEQ ID NO: 213845 - DNA, 25 bp, Probe Sequence
gcatggtgatctggagctagcagca

SEQ ID NO: 213846 - DNA, 25 bp, Probe Sequence
gcatgtgatatgatgctcggctgat

SEQ ID NO: 213847 - DNA, 25 bp, Probe Sequence
gcatggaagatgcctgggctgtctt

SEQ ID NO: 213848 - DNA, 25 bp, Probe Sequence
gcagggaggctttggcatgacttaa

SEQ ID NO: 213849 - DNA, 25 bp, Probe Sequence
gcagggagcccatgctcatggttga

SEQ ID NO: 213850 - DNA, 25 bp, Probe Sequence
gcatgggagcaacttgttcgtgggt

SEQ ID NO: 213851 - DNA, 25 bp, Probe Sequence
gcatgaattgcattatgttctctgg

SEQ ID NO: 213852 - DNA, 25 bp, Probe Sequence
gcatgcaagtgagagcttcctgagc

SEQ ID NO: 213853 - DNA, 25 bp, Probe Sequence
gcatgaagagatgggctctgctctg

SEQ ID NO: 213854 - DNA, 25 bp, Probe Sequence
gcatgaagagatgggctctgctctg

SEQ ID NO: 213855 - DNA, 25 bp, Probe Sequence
gcatgtcagatggcgtggtctgcag

SEQ ID NO: 213856 - DNA, 25 bp, Probe Sequence
gcatgactatgacgactcatctgag

SEQ ID NO: 213857 - DNA, 25 bp, Probe Sequence
gcatgaccaacaactcatctggatt

SEQ ID NO: 213858 - DNA, 25 bp, Probe Sequence
gcaggccaagaaccgctggatgatc

SEQ ID NO: 213859 - DNA, 25 bp, Probe Sequence
gcagggaaaatggcgctggccatgc

SEQ ID NO: 213860 - DNA, 25 bp, Probe Sequence
gcatgcaggtaactgacgatgccct

SEQ ID NO: 213861 - DNA, 25 bp, Probe Sequence
gcatgaggtcagctttctgcctcat

SEQ ID NO: 213862 - DNA, 25 bp, Probe Sequence
gcatggcaatcgctctgtctcttct

SEQ ID NO: 213863 - DNA, 25 bp, Probe Sequence
gcatgtaaggcaatctttcctgttg

SEQ ID NO: 213864 - DNA, 25 bp, Probe Sequence
gcatgtgtcagagtgttgttccgtt

SEQ ID NO: 213865 - DNA, 25 bp, Probe Sequence
gcatgtctgagattcttgtttcctt

SEQ ID NO: 213866 - DNA, 25 bp, Probe Sequence
gcatgctctgtaatttgattttttt

SEQ ID NO: 213867 - DNA, 25 bp, Probe Sequence
gcatgtcttagcactgattattggt

SEQ ID NO: 213868 - DNA, 25 bp, Probe Sequence
gcatggcttcacactgtttgtgtag

SEQ ID NO: 213869 - DNA, 25 bp, Probe Sequence
gcaggttatcagatggttctgaatg

SEQ ID NO: 213870 - DNA, 25 bp, Probe Sequence
gcaggaaatagatcgttatgccagt

SEQ ID NO: 213871 - DNA, 25 bp, Probe Sequence
gcagggagcaattccagtttcacct

SEQ ID NO: 213872 - DNA, 25 bp, Probe Sequence
gcaggtagctctgacactttcagtt

SEQ ID NO: 213873 - DNA, 25 bp, Probe Sequence
gcatgggatttggccatttctatgg

SEQ ID NO: 213874 - DNA, 25 bp, Probe Sequence
gcatgggaatttgctttcgtgatat

SEQ ID NO: 213875 - DNA, 25 bp, Probe Sequence
gcatgggtcatttgtcttgggtgtc

SEQ ID NO: 213876 - DNA, 25 bp, Probe Sequence
gcatgattgtgcttaacttggttgt

SEQ ID NO: 213877 - DNA, 25 bp, Probe Sequence
gcatgattgtgcttaacttggttgt

SEQ ID NO: 213878 - DNA, 25 bp, Probe Sequence
gcatgagctgctgtaaactatttgt

SEQ ID NO: 213879 - DNA, 25 bp, Probe Sequence
gtgagtgcttttaactagtcggggt

SEQ ID NO: 213880 - DNA, 25 bp, Probe Sequence
gcaggtctttgtaacagggcagtgt

SEQ ID NO: 213881 - DNA, 25 bp, Probe Sequence
gcaggttagcgttgaaggtggtatg

SEQ ID NO: 213882 - DNA, 25 bp, Probe Sequence
gcaggctgatagccctgaagagatg

SEQ ID NO: 213883 - DNA, 25 bp, Probe Sequence
gcaggctggttggcataatatgtaa

SEQ ID NO: 213884 - DNA, 25 bp, Probe Sequence
gcaggtctgctttgtcttatatttg

SEQ ID NO: 213885 - DNA, 25 bp, Probe Sequence
gcatgagttcttgttcttcagttaa

SEQ ID NO: 213886 - DNA, 25 bp, Probe Sequence
gcatgttatttactttctagataaa

SEQ ID NO: 213887 - DNA, 25 bp, Probe Sequence
gcatgcttcttttttgttacataca

SEQ ID NO: 213888 - DNA, 25 bp, Probe Sequence
gcatgcttctgtgtgcttctataga

SEQ ID NO: 213889 - DNA, 25 bp, Probe Sequence
gcatgttcttgttgcttccagatga

SEQ ID NO: 213890 - DNA, 25 bp, Probe Sequence
gcatgattattctgcttccagtagg

SEQ ID NO: 213891 - DNA, 25 bp, Probe Sequence
gcatgagctacctcatctctagaag

SEQ ID NO: 213892 - DNA, 25 bp, Probe Sequence
gcatgactcctaaaccataatatct

SEQ ID NO: 213893 - DNA, 25 bp, Probe Sequence
gcatgcttcttagaccagaacatgt

SEQ ID NO: 213894 - DNA, 25 bp, Probe Sequence
gcatgtttaacatccagcactgtaa

SEQ ID NO: 213895 - DNA, 25 bp, Probe Sequence
gcatgtttaacatccagcactgtaa

SEQ ID NO: 213896 - DNA, 25 bp, Probe Sequence
gcatgttgtagttagagacactgta

SEQ ID NO: 213897 - DNA, 25 bp, Probe Sequence
gcatgttccagagtcagaacctgta

SEQ ID NO: 213898 - DNA, 25 bp, Probe Sequence
gcaggtgcgagagttgtaccagtaa

SEQ ID NO: 213899 - DNA, 25 bp, Probe Sequence
gcaggccaggaagtataatagcaaa

SEQ ID NO: 213900 - DNA, 25 bp, Probe Sequence
gcagggcagtgggcttaatgagagg

SEQ ID NO: 213901 - DNA, 25 bp, Probe Sequence
gcaggctgagatgggttaatcaaga

SEQ ID NO: 213902 - DNA, 25 bp, Probe Sequence
gcatgttggaacgtctagggagaag

SEQ ID NO: 213903 - DNA, 25 bp, Probe Sequence
gcatgttggaacgtctagggagaag

SEQ ID NO: 213904 - DNA, 25 bp, Probe Sequence
gcatgttggaacgtctagggagaag

SEQ ID NO: 213905 - DNA, 25 bp, Probe Sequence
gcagttcgaactgcctggggacttc

SEQ ID NO: 213906 - DNA, 25 bp, Probe Sequence
gcaggtcaacactggtggaaacttc

SEQ ID NO: 213907 - DNA, 25 bp, Probe Sequence
gcagggctcaactggaggaacaaat

SEQ ID NO: 213908 - DNA, 25 bp, Probe Sequence
gcaggcctcattatgtggagcaact

SEQ ID NO: 213909 - DNA, 25 bp, Probe Sequence
gcaggcctagaaattgatagccagc

SEQ ID NO: 213910 - DNA, 25 bp, Probe Sequence
gcagtccatgactaaatcttccgca

SEQ ID NO: 213911 - DNA, 25 bp, Probe Sequence
gcagtcaagagataattaggggtca

SEQ ID NO: 213912 - DNA, 25 bp, Probe Sequence
gcagataaacaagaaagcctttgca

SEQ ID NO: 213913 - DNA, 25 bp, Probe Sequence
gcaaagaacaacacagtcactcctg

SEQ ID NO: 213914 - DNA, 25 bp, Probe Sequence
gcagaaaaacctacagctaaccgtg

SEQ ID NO: 213915 - DNA, 25 bp, Probe Sequence
gcagtaaaaactatccagcaacatt

SEQ ID NO: 213916 - DNA, 25 bp, Probe Sequence
gcagcagaaacagcttttcgaaagt

SEQ ID NO: 213917 - DNA, 25 bp, Probe Sequence
gcatgatgagctgacctatttctga

SEQ ID NO: 213918 - DNA, 25 bp, Probe Sequence
gcatgtaattgatcatatttctgcc

SEQ ID NO: 213919 - DNA, 25 bp, Probe Sequence
gcatgtaattgatcatatttctgcc

SEQ ID NO: 213920 - DNA, 25 bp, Probe Sequence
gcaggactggcattgcactagtctg

SEQ ID NO: 213921 - DNA, 25 bp, Probe Sequence
gcaggactggcattgcactagtctg

SEQ ID NO: 213922 - DNA, 25 bp, Probe Sequence
gcatggcctgcgttgacatcaacga

SEQ ID NO: 213923 - DNA, 25 bp, Probe Sequence
gcatggcctgcgttgacatcaacga

SEQ ID NO: 213924 - DNA, 25 bp, Probe Sequence
gcaggcaatgcgagagataaaggac

SEQ ID NO: 213925 - DNA, 25 bp, Probe Sequence
gcaggaaccggaggaaggaactgac

SEQ ID NO: 213926 - DNA, 25 bp, Probe Sequence
gcaggctaccggacggcaggttata

SEQ ID NO: 213927 - DNA, 25 bp, Probe Sequence
gcagttaccctaagacagagcctaa

SEQ ID NO: 213928 - DNA, 25 bp, Probe Sequence
gcagtatggcccaggtaagttcaaa

SEQ ID NO: 213929 - DNA, 25 bp, Probe Sequence
gcagtgggccaaggggtatgttaaa

SEQ ID NO: 213930 - DNA, 25 bp, Probe Sequence
gcaggggcctttccaaatgtctgaa

SEQ ID NO: 213931 - DNA, 25 bp, Probe Sequence
gcatggggcttggctccaagttcaa

SEQ ID NO: 213932 - DNA, 25 bp, Probe Sequence
gcatgggtgttgcattgactttaat

SEQ ID NO: 213933 - DNA, 25 bp, Probe Sequence
gcatgggcaccacatttcttatatt

SEQ ID NO: 213934 - DNA, 25 bp, Probe Sequence
gcaggtgattctcagtttgttcatc

SEQ ID NO: 213935 - DNA, 25 bp, Probe Sequence
gcagacgctttcagtgggttgacgg

SEQ ID NO: 213936 - DNA, 25 bp, Probe Sequence
gcaggcgattccagtggggttgggc

SEQ ID NO: 213937 - DNA, 25 bp, Probe Sequence
gcatggagttcccgtgggtggtgtc

SEQ ID NO: 213938 - DNA, 25 bp, Probe Sequence
gcaggcagattgggtggtagtggga

SEQ ID NO: 213939 - DNA, 25 bp, Probe Sequence
gcatggagatttagtcccaggggca

SEQ ID NO: 213940 - DNA, 25 bp, Probe Sequence
gcatggagaattccgcttcggtgga

SEQ ID NO: 213941 - DNA, 25 bp, Probe Sequence
gcatggagcaatctcgcagtgcagt

SEQ ID NO: 213942 - DNA, 25 bp, Probe Sequence
gcatggagcaatctcgcagtgcagt

SEQ ID NO: 213943 - DNA, 25 bp, Probe Sequence
gcatgtgagttccccatgcctaaga

SEQ ID NO: 213944 - DNA, 25 bp, Probe Sequence
gcaggagtactgcacggcatacgtg

SEQ ID NO: 213945 - DNA, 25 bp, Probe Sequence
gcaggtgtcaggcttgatggacggt

SEQ ID NO: 213946 - DNA, 25 bp, Probe Sequence
gcaggctgttggcatagctggcctc

SEQ ID NO: 213947 - DNA, 25 bp, Probe Sequence
gcaggcggggcagtatgtgatggac

SEQ ID NO: 213948 - DNA, 25 bp, Probe Sequence
gcagggggtgagacctgtgtgacgc

SEQ ID NO: 213949 - DNA, 25 bp, Probe Sequence
gcatggtggcgtatgcctgtaatcc

SEQ ID NO: 213950 - DNA, 25 bp, Probe Sequence
gcatggtggcgtatgcctgtaatcc

SEQ ID NO: 213951 - DNA, 25 bp, Probe Sequence
gcatggtggcgggcacctgtaatcc

SEQ ID NO: 213952 - DNA, 25 bp, Probe Sequence
gcatggtgacgggcacctgtagtcc

SEQ ID NO: 213953 - DNA, 25 bp, Probe Sequence
gcatgggcatccgcctggataatgc

SEQ ID NO: 213954 - DNA, 25 bp, Probe Sequence
gcatgggcggatgccgggcatgagc

SEQ ID NO: 213955 - DNA, 25 bp, Probe Sequence
gcatggggtacccttggcatgatgc

SEQ ID NO: 213956 - DNA, 25 bp, Probe Sequence
gcaggggagcatgatcttggcactg

SEQ ID NO: 213957 - DNA, 25 bp, Probe Sequence
gcagggcagactgacggacggacga

SEQ ID NO: 213958 - DNA, 25 bp, Probe Sequence
gcaggcgcagacggggaagcggagc

SEQ ID NO: 213959 - DNA, 25 bp, Probe Sequence
gcaggtcagcccaggaattggcaga

SEQ ID NO: 213960 - DNA, 25 bp, Probe Sequence
gcagggccagtcagagtgttagcag

SEQ ID NO: 213961 - DNA, 25 bp, Probe Sequence
gcagaggcctacacgatttactgcc

SEQ ID NO: 213962 - DNA, 25 bp, Probe Sequence
gcaggacttagcacgagattcactt

SEQ ID NO: 213963 - DNA, 25 bp, Probe Sequence
gcaggacttaatctgtagtctttag

SEQ ID NO: 213964 - DNA, 25 bp, Probe Sequence
gcaggacttaagaagcttttctccg

SEQ ID NO: 213965 - DNA, 25 bp, Probe Sequence
gcaggactgtaataaatggatctct

SEQ ID NO: 213966 - DNA, 25 bp, Probe Sequence
gcagatgccgttcaaaaggtcgatt

SEQ ID NO: 213967 - DNA, 25 bp, Probe Sequence
gcaggccatatttaacaagttcgat

SEQ ID NO: 213968 - DNA, 25 bp, Probe Sequence
gcaggcctgcaagaaaagtgccgat

SEQ ID NO: 213969 - DNA, 25 bp, Probe Sequence
gcaggcctatgatgccaagggccag

SEQ ID NO: 213970 - DNA, 25 bp, Probe Sequence
gcagtctctaggccaaaaacttgtg

SEQ ID NO: 213971 - DNA, 25 bp, Probe Sequence
gcagttctggtctcaaaaccatcag

SEQ ID NO: 213972 - DNA, 25 bp, Probe Sequence
gcagagctcgtttagtgaaccgtca

SEQ ID NO: 213973 - DNA, 25 bp, Probe Sequence
gcagagctcgtttagtgaaccgtca

SEQ ID NO: 213974 - DNA, 25 bp, Probe Sequence
gcagagctcgtttagtgaaccgtca

SEQ ID NO: 213975 - DNA, 25 bp, Probe Sequence
gcagagctcgtttagtgaaccgtca

SEQ ID NO: 213976 - DNA, 25 bp, Probe Sequence
gcagagctcgtttagtgaaccgtca

SEQ ID NO: 213977 - DNA, 25 bp, Probe Sequence
gcagagctcgtttagtgaaccgtca

SEQ ID NO: 213978 - DNA, 25 bp, Probe Sequence
gcagagctcgtttagtgaaccgtca

SEQ ID NO: 213979 - DNA, 25 bp, Probe Sequence
gcagagctcgtttagtgaaccgtca

SEQ ID NO: 213980 - DNA, 25 bp, Probe Sequence
gcagagctcgtttagtgaaccgtca

SEQ ID NO: 213981 - DNA, 25 bp, Probe Sequence
gcagagctcgtttagtgaaccgtca

SEQ ID NO: 213982 - DNA, 25 bp, Probe Sequence
gcagagctcgtttagtgaaccgtca

SEQ ID NO: 213983 - DNA, 25 bp, Probe Sequence
gcagagctcgtttagtgaaccgtca

SEQ ID NO: 213984 - DNA, 25 bp, Probe Sequence
gcagagctcgtttagtgaaccgtca

SEQ ID NO: 213985 - DNA, 25 bp, Probe Sequence
gcagagctcgtttagtgaaccgtca

SEQ ID NO: 213986 - DNA, 25 bp, Probe Sequence
gcagagctcgtttagtgaaccgtca

SEQ ID NO: 213987 - DNA, 25 bp, Probe Sequence
gcagagctcgtttagtgaaccgtca

SEQ ID NO: 213988 - DNA, 25 bp, Probe Sequence
gcagagctcgtttagtgaaccgtca

SEQ ID NO: 213989 - DNA, 25 bp, Probe Sequence
gcagagctcgtttagtgaaccgtca

SEQ ID NO: 213990 - DNA, 25 bp, Probe Sequence
gcagagctcgtttagtgaaccgtca

SEQ ID NO: 213991 - DNA, 25 bp, Probe Sequence
gcagagctcgtttagtgaaccgtca

SEQ ID NO: 213992 - DNA, 25 bp, Probe Sequence
gcagagctcgtttagtgaaccgtca

SEQ ID NO: 213993 - DNA, 25 bp, Probe Sequence
gcagagctcgtttagtgaaccgtca

SEQ ID NO: 213994 - DNA, 25 bp, Probe Sequence
gcagagctcgtttagtgaaccgtca

SEQ ID NO: 213995 - DNA, 25 bp, Probe Sequence
gcagagctcgtttagtgaaccgtca

SEQ ID NO: 213996 - DNA, 25 bp, Probe Sequence
gcagagctcgtttagtgaaccgtca

SEQ ID NO: 213997 - DNA, 25 bp, Probe Sequence
gcagagctcgtttagtgaaccgtca

SEQ ID NO: 213998 - DNA, 25 bp, Probe Sequence
gcagagctcgtttagtgaaccgtca

SEQ ID NO: 213999 - DNA, 25 bp, Probe Sequence
gcagagctcgtttagtgaaccgtca

SEQ ID NO: 214000 - DNA, 25 bp, Probe Sequence
gcagagctcgtttagtgaaccgtca

SEQ ID NO: 214001 - DNA, 25 bp, Probe Sequence
gcagagctcgtttagtgaaccgtca

SEQ ID NO: 214002 - DNA, 25 bp, Probe Sequence
gcagagctcgtttagtgaaccgtca

SEQ ID NO: 214003 - DNA, 25 bp, Probe Sequence
gcagagctcgtttagtgaaccgtca

SEQ ID NO: 214004 - DNA, 25 bp, Probe Sequence
gcagagctcgtttagtgaaccgtca

SEQ ID NO: 214005 - DNA, 25 bp, Probe Sequence
gcagagctcgtttagtgaaccgtca

SEQ ID NO: 214006 - DNA, 25 bp, Probe Sequence
gcagagctcgtttagtgaaccgtca

SEQ ID NO: 214007 - DNA, 25 bp, Probe Sequence
gcagagctcgtttagtgaaccgtca

SEQ ID NO: 214008 - DNA, 25 bp, Probe Sequence
gcagagctcgtttagtgaaccgtca

SEQ ID NO: 214009 - DNA, 25 bp, Probe Sequence
gcagagctcgtttagtgaaccgtca

SEQ ID NO: 214010 - DNA, 25 bp, Probe Sequence
gcagagctcgtttagtgaaccgtca

SEQ ID NO: 214011 - DNA, 25 bp, Probe Sequence
gcagagctcgtttagtgaaccgtca

SEQ ID NO: 214012 - DNA, 25 bp, Probe Sequence
gcagagctcgtttagtgaaccgtca

SEQ ID NO: 214013 - DNA, 25 bp, Probe Sequence
gcagagctcgtttagtgaaccgtca

SEQ ID NO: 214014 - DNA, 25 bp, Probe Sequence
gcagagctcgtttagtgaaccgtca

SEQ ID NO: 214015 - DNA, 25 bp, Probe Sequence
gacctttaaagacttccctcagatg

SEQ ID NO: 214016 - DNA, 25 bp, Probe Sequence
gaccaatatagagaaaccccgtctc

SEQ ID NO: 214017 - DNA, 25 bp, Probe Sequence
gaccaacatggagaaaccccgtgtc

SEQ ID NO: 214018 - DNA, 25 bp, Probe Sequence
gcagaagaaggaaagtccccctgtg

SEQ ID NO: 214019 - DNA, 25 bp, Probe Sequence
gcagaacaaggacaaaacctttgtg

SEQ ID NO: 214020 - DNA, 25 bp, Probe Sequence
gcaggacagggtcatcataaccata

SEQ ID NO: 214021 - DNA, 25 bp, Probe Sequence
gcaggacagggtcatcataaccata

SEQ ID NO: 214022 - DNA, 25 bp, Probe Sequence
gcagtgggggtgctcagaaccacac

SEQ ID NO: 214023 - DNA, 25 bp, Probe Sequence
gcatgtggaggcttggatggaaaca

SEQ ID NO: 214024 - DNA, 25 bp, Probe Sequence
gcatgtgctatgcctaggtggtgca

SEQ ID NO: 214025 - DNA, 25 bp, Probe Sequence
gcatggctctgacgaggcagtggag

SEQ ID NO: 214026 - DNA, 25 bp, Probe Sequence
gcatggatgctagttcactgtggag

SEQ ID NO: 214027 - DNA, 25 bp, Probe Sequence
gcatggactaggaccctggaggcag

SEQ ID NO: 214028 - DNA, 25 bp, Probe Sequence
gcaggactcagatgacttcgaggcc

SEQ ID NO: 214029 - DNA, 25 bp, Probe Sequence
gcaaacccaggcaatctaggtccca

SEQ ID NO: 214030 - DNA, 25 bp, Probe Sequence
gcagaacccagggaccatgggcgcc

SEQ ID NO: 214031 - DNA, 25 bp, Probe Sequence
gcaggactgggggaactggagtgtc

SEQ ID NO: 214032 - DNA, 25 bp, Probe Sequence
gcaggagggagggtggctttgctgt

SEQ ID NO: 214033 - DNA, 25 bp, Probe Sequence
gcagggaggtaaatgccttttggca

SEQ ID NO: 214034 - DNA, 25 bp, Probe Sequence
gcaaaatggtccaggcattttggaa

SEQ ID NO: 214035 - DNA, 25 bp, Probe Sequence
gcaaacaagtttgggactattagat

SEQ ID NO: 214036 - DNA, 25 bp, Probe Sequence
gcagagaaactttaggttcattgag

SEQ ID NO: 214037 - DNA, 25 bp, Probe Sequence
ggaggaacaaactcttcttggggag

SEQ ID NO: 214038 - DNA, 25 bp, Probe Sequence
tggttgaaaggtctagttttgggag

SEQ ID NO: 214039 - DNA, 25 bp, Probe Sequence
gagtatttaaggataattttgtggg

SEQ ID NO: 214040 - DNA, 25 bp, Probe Sequence
gcagtatttctacccttttagattt

SEQ ID NO: 214041 - DNA, 25 bp, Probe Sequence
gcagtgcttttgatcacttacaaat

SEQ ID NO: 214042 - DNA, 25 bp, Probe Sequence
gcagtttaggacctgctgtcataaa

SEQ ID NO: 214043 - DNA, 25 bp, Probe Sequence
gcagttgccaattccattttaaaat

SEQ ID NO: 214044 - DNA, 25 bp, Probe Sequence
gcagattgcctttgtccttcaaaaa

SEQ ID NO: 214045 - DNA, 25 bp, Probe Sequence
gcaggatgccctgatcctaagaagg

SEQ ID NO: 214046 - DNA, 25 bp, Probe Sequence
gcaggtcatgccagaccaaagagtg

SEQ ID NO: 214047 - DNA, 25 bp, Probe Sequence
gcatggatcttcgtaccaagagcac

SEQ ID NO: 214048 - DNA, 25 bp, Probe Sequence
gcatggcagcttcctacagtagaaa

SEQ ID NO: 214049 - DNA, 25 bp, Probe Sequence
gcagtgcctgtgacaacgtagagcg

SEQ ID NO: 214050 - DNA, 25 bp, Probe Sequence
gcaggccagtgggaagcaagaaggg

SEQ ID NO: 214051 - DNA, 25 bp, Probe Sequence
gcagtgtgtcgggaagggatagtgg

SEQ ID NO: 214052 - DNA, 25 bp, Probe Sequence
gcagtctgacggggcagcagcagaa

SEQ ID NO: 214053 - DNA, 25 bp, Probe Sequence
gcaggctactggtgcagaggaagca

SEQ ID NO: 214054 - DNA, 25 bp, Probe Sequence
gcaggccatcatcatcggagtgaag

SEQ ID NO: 214055 - DNA, 25 bp, Probe Sequence
gcaggcccttatggggtatggcatc

SEQ ID NO: 214056 - DNA, 25 bp, Probe Sequence
gcaggcgagattacgaggcgaggct

SEQ ID NO: 214057 - DNA, 25 bp, Probe Sequence
gcaggcgtttatttctgcagggctg

SEQ ID NO: 214058 - DNA, 25 bp, Probe Sequence
gcaggcgtttatttctgcagggctg

SEQ ID NO: 214059 - DNA, 25 bp, Probe Sequence
gcaggcgtttatttctgcagggctg

SEQ ID NO: 214060 - DNA, 25 bp, Probe Sequence
gcaggcgatcattatttcgaagttc

SEQ ID NO: 214061 - DNA, 25 bp, Probe Sequence
gcatggcatgtattatttagttgtt

SEQ ID NO: 214062 - DNA, 25 bp, Probe Sequence
gcatggattccatgttcatgagttt

SEQ ID NO: 214063 - DNA, 25 bp, Probe Sequence
gcaggatttcattatctgcctgggt

SEQ ID NO: 214064 - DNA, 25 bp, Probe Sequence
gcatggtgttcactacctcgaagtc

SEQ ID NO: 214065 - DNA, 25 bp, Probe Sequence
gcatggatgttgctgagccctacaa

SEQ ID NO: 214066 - DNA, 25 bp, Probe Sequence
gcatggagttagatcctgctggcaa

SEQ ID NO: 214067 - DNA, 25 bp, Probe Sequence
gcatgggcataaatttctgccataa

SEQ ID NO: 214068 - DNA, 25 bp, Probe Sequence
gcatgggacgaaagcttggctccaa

SEQ ID NO: 214069 - DNA, 25 bp, Probe Sequence
gcaggctcaaggaagcttgttccaa

SEQ ID NO: 214070 - DNA, 25 bp, Probe Sequence
gcaggcaacaaggacctttcataca

SEQ ID NO: 214071 - DNA, 25 bp, Probe Sequence
gcagagctcgtttagtgaaccgtca

SEQ ID NO: 214072 - DNA, 25 bp, Probe Sequence
gcagagctcgtttagtgaaccgtca

SEQ ID NO: 214073 - DNA, 25 bp, Probe Sequence
gcagagctcgtttagtgaaccgtca

SEQ ID NO: 214074 - DNA, 25 bp, Probe Sequence
gcagagctcgtttagtgaaccgtca

SEQ ID NO: 214075 - DNA, 25 bp, Probe Sequence
gcagagctcgtttagtgaaccgtca

SEQ ID NO: 214076 - DNA, 25 bp, Probe Sequence
gcagagctcgtttagtgaaccgtca

SEQ ID NO: 214077 - DNA, 25 bp, Probe Sequence
gcagagctcgtttagtgaaccgtca

SEQ ID NO: 214078 - DNA, 25 bp, Probe Sequence
gcagagctcgtttagtgaaccgtca

SEQ ID NO: 214079 - DNA, 25 bp, Probe Sequence
gcagagctcgtttagtgaaccgtca

SEQ ID NO: 214080 - DNA, 25 bp, Probe Sequence
gcagagctcgtttagtgaaccgtca

SEQ ID NO: 214081 - DNA, 25 bp, Probe Sequence
gcagagctcgtttagtgaaccgtca

SEQ ID NO: 214082 - DNA, 25 bp, Probe Sequence
gcagagctcgtttagtgaaccgtca

SEQ ID NO: 214083 - DNA, 25 bp, Probe Sequence
gcagagctcgtttagtgaaccgtca

SEQ ID NO: 214084 - DNA, 25 bp, Probe Sequence
gcagagctcgtttagtgaaccgtca

SEQ ID NO: 214085 - DNA, 25 bp, Probe Sequence
gcagagctcgtttagtgaaccgtca

SEQ ID NO: 214086 - DNA, 25 bp, Probe Sequence
gcagagctcgtttagtgaaccgtca

SEQ ID NO: 214087 - DNA, 25 bp, Probe Sequence
gcagagctcgtttagtgaaccgtca

SEQ ID NO: 214088 - DNA, 25 bp, Probe Sequence
gcagagctcgtttagtgaaccgtca

SEQ ID NO: 214089 - DNA, 25 bp, Probe Sequence
gcagagctcgtttagtgaaccgtca

SEQ ID NO: 214090 - DNA, 25 bp, Probe Sequence
gcagagctcgtttagtgaaccgtca

SEQ ID NO: 214091 - DNA, 25 bp, Probe Sequence
gcagagctcgtttagtgaaccgtca

SEQ ID NO: 214092 - DNA, 25 bp, Probe Sequence
gcagagctcgtttagtgaaccgtca

SEQ ID NO: 214093 - DNA, 25 bp, Probe Sequence
gcagagctcgtttagtgaaccgtca

SEQ ID NO: 214094 - DNA, 25 bp, Probe Sequence
gcagagctcgtttagtgaaccgtca

SEQ ID NO: 214095 - DNA, 25 bp, Probe Sequence
gcagagctcgtttagtgaaccgtca

SEQ ID NO: 214096 - DNA, 25 bp, Probe Sequence
gcagagctcgtttagtgaaccgtca

SEQ ID NO: 214097 - DNA, 25 bp, Probe Sequence
gcagagctcgtttagtgaaccgtca

SEQ ID NO: 214098 - DNA, 25 bp, Probe Sequence
gcagagctcgtttagtgaaccgtca

SEQ ID NO: 214099 - DNA, 25 bp, Probe Sequence
gcagagctcgtttagtgaaccgtca

SEQ ID NO: 214100 - DNA, 25 bp, Probe Sequence
gcagagctcgtttagtgaaccgtca

SEQ ID NO: 214101 - DNA, 25 bp, Probe Sequence
gcagagctcgtttagtgaaccgtca

SEQ ID NO: 214102 - DNA, 25 bp, Probe Sequence
gcagagctcgtttagtgaaccgtca

SEQ ID NO: 214103 - DNA, 25 bp, Probe Sequence
gcagagctcgtttagtgaaccgtca

SEQ ID NO: 214104 - DNA, 25 bp, Probe Sequence
gcagagctcgtttagtgaaccgtca

SEQ ID NO: 214105 - DNA, 25 bp, Probe Sequence
gcagagctcgtttagtgaaccgtca

SEQ ID NO: 214106 - DNA, 25 bp, Probe Sequence
gcagagctcgtttagtgaaccgtca

SEQ ID NO: 214107 - DNA, 25 bp, Probe Sequence
gcagagctcgtttagtgaaccgtca

SEQ ID NO: 214108 - DNA, 25 bp, Probe Sequence
gcagagctcgtttagtgaaccgtca

SEQ ID NO: 214109 - DNA, 25 bp, Probe Sequence
gcagagctcgtttagtgaaccgtca

SEQ ID NO: 214110 - DNA, 25 bp, Probe Sequence
gcagagctcgtttagtgaaccgtca

SEQ ID NO: 214111 - DNA, 25 bp, Probe Sequence
gcagagctcgtttagtgaaccgtca

SEQ ID NO: 214112 - DNA, 25 bp, Probe Sequence
gcagagctcgtttagtgaaccgtca

SEQ ID NO: 214113 - DNA, 25 bp, Probe Sequence
gcagagctcgtttagtgaaccgtca

SEQ ID NO: 214114 - DNA, 25 bp, Probe Sequence
gcagagctcgtttagtgaaccgtca

SEQ ID NO: 214115 - DNA, 25 bp, Probe Sequence
gcagagctcgtttagtgaaccgtca

SEQ ID NO: 214116 - DNA, 25 bp, Probe Sequence
gcaggtggctggtttgaagccccag

SEQ ID NO: 214117 - DNA, 25 bp, Probe Sequence
gcaggagaatggcgtgaacccggga

SEQ ID NO: 214118 - DNA, 25 bp, Probe Sequence
gcaggagaatggcgtgaacccggga

SEQ ID NO: 214119 - DNA, 25 bp, Probe Sequence
gcaggagaatggcgtgaacccggga

SEQ ID NO: 214120 - DNA, 25 bp, Probe Sequence
gcaggagaatggcgtgaacccggga

SEQ ID NO: 214121 - DNA, 25 bp, Probe Sequence
gcaggagaatggcgtgaacccggga

SEQ ID NO: 214122 - DNA, 25 bp, Probe Sequence
gcaggagaatcactttaacccggga

SEQ ID NO: 214123 - DNA, 25 bp, Probe Sequence
gcaggagagtccagattaccacgaa

SEQ ID NO: 214124 - DNA, 25 bp, Probe Sequence
gcaggagaatcacttgaacccagga

SEQ ID NO: 214125 - DNA, 25 bp, Probe Sequence
gcagaggcataaggttcgggaagag

SEQ ID NO: 214126 - DNA, 25 bp, Probe Sequence
gaagaccaattgaacggaggggaca

SEQ ID NO: 214127 - DNA, 25 bp, Probe Sequence
gaaggtaatatgagggcttggggca

SEQ ID NO: 214128 - DNA, 25 bp, Probe Sequence
gaagtgtgttaaggggtcggctaag

SEQ ID NO: 214129 - DNA, 25 bp, Probe Sequence
gaatggtttaggtggtctggacaat

SEQ ID NO: 214130 - DNA, 25 bp, Probe Sequence
gaatttattaaatgccgggagagta

SEQ ID NO: 214131 - DNA, 25 bp, Probe Sequence
gaatgtgactaagaagcctggggag

SEQ ID NO: 214132 - DNA, 25 bp, Probe Sequence
gcagggactggagaagccaagggga

SEQ ID NO: 214133 - DNA, 25 bp, Probe Sequence
gcaggaattaaccgacgccatgggg

SEQ ID NO: 214134 - DNA, 25 bp, Probe Sequence
ggtcaaaacctgctccgaggtggac

SEQ ID NO: 214135 - DNA, 25 bp, Probe Sequence
gcagttaaaaagctcgtagttggat

SEQ ID NO: 214136 - DNA, 25 bp, Probe Sequence
gcagatcccaaatgttcgatatggc

SEQ ID NO: 214137 - DNA, 25 bp, Probe Sequence
gcaggcccagaactcttcttgggcc

SEQ ID NO: 214138 - DNA, 25 bp, Probe Sequence
gcaggcagccgagatgctttatgga

SEQ ID NO: 214139 - DNA, 25 bp, Probe Sequence
gcaggcccatgggaatttggtgatt

SEQ ID NO: 214140 - DNA, 25 bp, Probe Sequence
gcaggccgaggtagacagatggctt

SEQ ID NO: 214141 - DNA, 25 bp, Probe Sequence
gcagaccgagaaatgacgtcatcct

SEQ ID NO: 214142 - DNA, 25 bp, Probe Sequence
gcagtctaacagttaccgcacctgt

SEQ ID NO: 214143 - DNA, 25 bp, Probe Sequence
gcaggtgattcagctacttgaggtc

SEQ ID NO: 214144 - DNA, 25 bp, Probe Sequence
gcaggtgtacaggacgtctggtgac

SEQ ID NO: 214145 - DNA, 25 bp, Probe Sequence
gcacggcaacatcatcaacggggct

SEQ ID NO: 214146 - DNA, 25 bp, Probe Sequence
gcagaggctgcagcctaacgtgtgg

SEQ ID NO: 214147 - DNA, 25 bp, Probe Sequence
gcaggcgctgcaggaagaatgcctt

SEQ ID NO: 214148 - DNA, 25 bp, Probe Sequence
gcagtggtaccaataatgcccgtct

SEQ ID NO: 214149 - DNA, 25 bp, Probe Sequence
gcaggaccaggcataatgcccagat

SEQ ID NO: 214150 - DNA, 25 bp, Probe Sequence
gcagcaactgggatacgccagccac

SEQ ID NO: 214151 - DNA, 25 bp, Probe Sequence
gcaaaagcgaatagacccctgccat

SEQ ID NO: 214152 - DNA, 25 bp, Probe Sequence
gcagagaacagaaagtacccccatc

SEQ ID NO: 214153 - DNA, 25 bp, Probe Sequence
gcagaatgaaagaaggccagccacc

SEQ ID NO: 214154 - DNA, 25 bp, Probe Sequence
gcaggacagcaaggaggccaacgcc

SEQ ID NO: 214155 - DNA, 25 bp, Probe Sequence
gcaggccgaagcggaggaagcccag

SEQ ID NO: 214156 - DNA, 25 bp, Probe Sequence
gcaggccagaggccggaacacacct

SEQ ID NO: 214157 - DNA, 25 bp, Probe Sequence
gcaggcacaggtccagggagacaga

SEQ ID NO: 214158 - DNA, 25 bp, Probe Sequence
gcaggacaagttcctggggcgctgg

SEQ ID NO: 214159 - DNA, 25 bp, Probe Sequence
gcaggatcaggttagggcgagcgct

SEQ ID NO: 214160 - DNA, 25 bp, Probe Sequence
gcaggccaggcaagaggagcaggtg

SEQ ID NO: 214161 - DNA, 25 bp, Probe Sequence
gcaggctgaggtcctggagtgcgtg

SEQ ID NO: 214162 - DNA, 25 bp, Probe Sequence
gcaggaggtgatccgaggctgggaa

SEQ ID NO: 214163 - DNA, 25 bp, Probe Sequence
gcaggcgagaggcgaggctgagcga

SEQ ID NO: 214164 - DNA, 25 bp, Probe Sequence
gcaggcgagagactggggtgctggg

SEQ ID NO: 214165 - DNA, 25 bp, Probe Sequence
gcaggagatgaacgcccagttgagt

SEQ ID NO: 214166 - DNA, 25 bp, Probe Sequence
gcaggagctggatccagcgtcagtg

SEQ ID NO: 214167 - DNA, 25 bp, Probe Sequence
gcaggactcatatccaggctcaaat

SEQ ID NO: 214168 - DNA, 25 bp, Probe Sequence
gcaggttttgacaagcccatattac

SEQ ID NO: 214169 - DNA, 25 bp, Probe Sequence
gcagtggcttagaaagtccaattcc

SEQ ID NO: 214170 - DNA, 25 bp, Probe Sequence
gcagtggtttatttgcaaaattcct

SEQ ID NO: 214171 - DNA, 25 bp, Probe Sequence
gcagtggttcactttaaaacacaca

SEQ ID NO: 214172 - DNA, 25 bp, Probe Sequence
gcagggattctatcaataaggccaa

SEQ ID NO: 214173 - DNA, 25 bp, Probe Sequence
gagggacctgaactttctggaagac

SEQ ID NO: 214174 - DNA, 25 bp, Probe Sequence
gcaggcgtgcggaacttttagcaaa

SEQ ID NO: 214175 - DNA, 25 bp, Probe Sequence
gcagtcccttgtcttattcagaata

SEQ ID NO: 214176 - DNA, 25 bp, Probe Sequence
gcagtcacttttccttagaaggtca

SEQ ID NO: 214177 - DNA, 25 bp, Probe Sequence
gcagttcttttcctaaatcgattcg

SEQ ID NO: 214178 - DNA, 25 bp, Probe Sequence
gcagttcattgttttaagggattgg

SEQ ID NO: 214179 - DNA, 25 bp, Probe Sequence
gcaggattcttattaaaggtagggt

SEQ ID NO: 214180 - DNA, 25 bp, Probe Sequence
gcagaattctgataaagggaggggg

SEQ ID NO: 214181 - DNA, 25 bp, Probe Sequence
gcagaattgcttgaacccagggggc

SEQ ID NO: 214182 - DNA, 25 bp, Probe Sequence
gcagaattgcttgaacccagggggc

SEQ ID NO: 214183 - DNA, 25 bp, Probe Sequence
gcagaattgcttgaacccagggggc

SEQ ID NO: 214184 - DNA, 25 bp, Probe Sequence
gcagagattggcaaatcacccaggg

SEQ ID NO: 214185 - DNA, 25 bp, Probe Sequence
gcagaatcttgaaaagcccagagat

SEQ ID NO: 214186 - DNA, 25 bp, Probe Sequence
gcaggcctgtgctgagaggcctggt

SEQ ID NO: 214187 - DNA, 25 bp, Probe Sequence
gcaggctgcctatcagaaagtggtg

SEQ ID NO: 214188 - DNA, 25 bp, Probe Sequence
gcaggctgcctatcagaaagtggtg

SEQ ID NO: 214189 - DNA, 25 bp, Probe Sequence
gcagggccacttcataattttgtct

SEQ ID NO: 214190 - DNA, 25 bp, Probe Sequence
gcagtttctctacatgggctttgac

SEQ ID NO: 214191 - DNA, 25 bp, Probe Sequence
gcagttcattattttgtggttctat

SEQ ID NO: 214192 - DNA, 25 bp, Probe Sequence
gcagttcctaatacctacttttatt

SEQ ID NO: 214193 - DNA, 25 bp, Probe Sequence
gcagattcctttacttttgtttgtg

SEQ ID NO: 214194 - DNA, 25 bp, Probe Sequence
gcagataccatcaaattggttctgg

SEQ ID NO: 214195 - DNA, 25 bp, Probe Sequence
gcagaagcagtcaagtcgtttcgtt

SEQ ID NO: 214196 - DNA, 25 bp, Probe Sequence
gcaggggagccgagttgctctgtta

SEQ ID NO: 214197 - DNA, 25 bp, Probe Sequence
gcagggagaccagagttgtagattg

SEQ ID NO: 214198 - DNA, 25 bp, Probe Sequence
gcagggaatgcatcgggtgtagctg

SEQ ID NO: 214199 - DNA, 25 bp, Probe Sequence
gcagttgagtaatgctggttagctg

SEQ ID NO: 214200 - DNA, 25 bp, Probe Sequence
gcagtatggtacttggcctcaagct

SEQ ID NO: 214201 - DNA, 25 bp, Probe Sequence
gcagttactgactttccatcaaata

SEQ ID NO: 214202 - DNA, 25 bp, Probe Sequence
gcagagtctctgcgttacaaactcc

SEQ ID NO: 214203 - DNA, 25 bp, Probe Sequence
gcaggtttagtttactcaatctccc

SEQ ID NO: 214204 - DNA, 25 bp, Probe Sequence
gcaggttcgaggcgattcgagctcc

SEQ ID NO: 214205 - DNA, 25 bp, Probe Sequence
gcagggtcgggggatgccgatgggc

SEQ ID NO: 214206 - DNA, 25 bp, Probe Sequence
gcaggacacgggccagatgcaccgg

SEQ ID NO: 214207 - DNA, 25 bp, Probe Sequence
gcaggtaaggagacagagaccggca

SEQ ID NO: 214208 - DNA, 25 bp, Probe Sequence
gcagggagggtgacaagcacaccct

SEQ ID NO: 214209 - DNA, 25 bp, Probe Sequence
gcagggagagggccaaggacaattg

SEQ ID NO: 214210 - DNA, 25 bp, Probe Sequence
gcaggaagcccacgaagatcacata

SEQ ID NO: 214211 - DNA, 25 bp, Probe Sequence
gcaggagtacaccagaagcacttca

SEQ ID NO: 214212 - DNA, 25 bp, Probe Sequence
gcagaggttccaagaccaattcccc

SEQ ID NO: 214213 - DNA, 25 bp, Probe Sequence
gcagaggttccaagaccaattcccc

SEQ ID NO: 214214 - DNA, 25 bp, Probe Sequence
gcaggaatctccacacaaatgtccc

SEQ ID NO: 214215 - DNA, 25 bp, Probe Sequence
gcaggaactcaagtacagcaattac

SEQ ID NO: 214216 - DNA, 25 bp, Probe Sequence
gcaggagccccaagatgagaataac

SEQ ID NO: 214217 - DNA, 25 bp, Probe Sequence
gcagatgaccacattcaaggaagaa

SEQ ID NO: 214218 - DNA, 25 bp, Probe Sequence
gcaggcatccagcataaagaaagaa

SEQ ID NO: 214219 - DNA, 25 bp, Probe Sequence
gcagacattaagaagatggccaagc

SEQ ID NO: 214220 - DNA, 25 bp, Probe Sequence
gcagattgcaatagactatgaggct

SEQ ID NO: 214221 - DNA, 25 bp, Probe Sequence
gcagtgtgccacactgtggccttag

SEQ ID NO: 214222 - DNA, 25 bp, Probe Sequence
gcagttcctcctctggaatgtagac

SEQ ID NO: 214223 - DNA, 25 bp, Probe Sequence
gcagtaccattaccagtaatctcaa

SEQ ID NO: 214224 - DNA, 25 bp, Probe Sequence
gcagtaaactgagagtagagtgctt

SEQ ID NO: 214225 - DNA, 25 bp, Probe Sequence
gcagtcctacgtggggaagcggtca

SEQ ID NO: 214226 - DNA, 25 bp, Probe Sequence
gcagtccccagtgttgaagctgtcc

SEQ ID NO: 214227 - DNA, 25 bp, Probe Sequence
gcaggcttcctgatagtggacgtcc

SEQ ID NO: 214228 - DNA, 25 bp, Probe Sequence
gcaggttcggcatgagtgtgaagtt

SEQ ID NO: 214229 - DNA, 25 bp, Probe Sequence
gcaggctgtttatatgttcacagtt

SEQ ID NO: 214230 - DNA, 25 bp, Probe Sequence
gcaggctttcaagaagtgccagttg

SEQ ID NO: 214231 - DNA, 25 bp, Probe Sequence
gcaggcttaccaggaagcatttgaa

SEQ ID NO: 214232 - DNA, 25 bp, Probe Sequence
gcaggcttaccaggaagcatttgaa

SEQ ID NO: 214233 - DNA, 25 bp, Probe Sequence
gcaggcttaacagttggcatcgtac

SEQ ID NO: 214234 - DNA, 25 bp, Probe Sequence
gcaggcttagtcgtggctactgttc

SEQ ID NO: 214235 - DNA, 25 bp, Probe Sequence
gcaggcaaaacaaatgtaatgttgc

SEQ ID NO: 214236 - DNA, 25 bp, Probe Sequence
gcaggcaaacactggaaagtctgtt

SEQ ID NO: 214237 - DNA, 25 bp, Probe Sequence
gcagtcaaaataaggcaataaccat

SEQ ID NO: 214238 - DNA, 25 bp, Probe Sequence
gcagtaaatcaatggaacatcccaa

SEQ ID NO: 214239 - DNA, 25 bp, Probe Sequence
gcagtttctcttggacaaccggaat

SEQ ID NO: 214240 - DNA, 25 bp, Probe Sequence
gcaggtattttctcacatcctgtgg

SEQ ID NO: 214241 - DNA, 25 bp, Probe Sequence
gcagtggtctttgaagcacctgtgg

SEQ ID NO: 214242 - DNA, 25 bp, Probe Sequence
gcagtaggcttatgtacacctctta

SEQ ID NO: 214243 - DNA, 25 bp, Probe Sequence
gcacttgtgctttcagttagccttc

SEQ ID NO: 214244 - DNA, 25 bp, Probe Sequence
gcagcgaagcttagcgttcatccgt

SEQ ID NO: 214245 - DNA, 25 bp, Probe Sequence
gcagacaagtgggcggtgtccatta

SEQ ID NO: 214246 - DNA, 25 bp, Probe Sequence
gcagaaaaaggctgtgctgccctga

SEQ ID NO: 214247 - DNA, 25 bp, Probe Sequence
gcaaacacaacctctggtcctataa

SEQ ID NO: 214248 - DNA, 25 bp, Probe Sequence
gcaagtcgcaaagctgggatcccaa

SEQ ID NO: 214249 - DNA, 25 bp, Probe Sequence
gcagaggggaatggcggagaccaca

SEQ ID NO: 214250 - DNA, 25 bp, Probe Sequence
gcaggggcgagcacggaacaatggg

SEQ ID NO: 214251 - DNA, 25 bp, Probe Sequence
gcaggtggggctcctgtacgaagag

SEQ ID NO: 214252 - DNA, 25 bp, Probe Sequence
gcagggccaggtcgctgtaagaagt

SEQ ID NO: 214253 - DNA, 25 bp, Probe Sequence
gcaggaccacttcgtcaaatgcagg

SEQ ID NO: 214254 - DNA, 25 bp, Probe Sequence
gcaggacatgccttgttaataaaac

SEQ ID NO: 214255 - DNA, 25 bp, Probe Sequence
gcagtcctgcattttatccatggaa

SEQ ID NO: 214256 - DNA, 25 bp, Probe Sequence
gcagttcatgatttagtcctcagaa

SEQ ID NO: 214257 - DNA, 25 bp, Probe Sequence
gcaggtcagcaactgtgtcgtgagc

SEQ ID NO: 214258 - DNA, 25 bp, Probe Sequence
gcaggctatgccctgggtgtgggac

SEQ ID NO: 214259 - DNA, 25 bp, Probe Sequence
gcaggtaccagtgtctgtgacgagc

SEQ ID NO: 214260 - DNA, 25 bp, Probe Sequence
gcagaagacggggattgtgagcggc

SEQ ID NO: 214261 - DNA, 25 bp, Probe Sequence
gcagcagaacggtggggcgctgcct

SEQ ID NO: 214262 - DNA, 25 bp, Probe Sequence
gagcaaaatggggtggggcccgtgt

SEQ ID NO: 214263 - DNA, 25 bp, Probe Sequence
gcagaacataccgggtggtccctgg

SEQ ID NO: 214264 - DNA, 25 bp, Probe Sequence
gcagtgacaagacaggtggggcctg

SEQ ID NO: 214265 - DNA, 25 bp, Probe Sequence
gcaggcacctacaaggttgtgccct

SEQ ID NO: 214266 - DNA, 25 bp, Probe Sequence
gcaggcaccaggacggatggagccc

SEQ ID NO: 214267 - DNA, 25 bp, Probe Sequence
gcagtctcctggaggagcagttcca

SEQ ID NO: 214268 - DNA, 25 bp, Probe Sequence
gcagtctcctggaggagcagttcca

SEQ ID NO: 214269 - DNA, 25 bp, Probe Sequence
gcaggctgctgctgagaaggcagtg

SEQ ID NO: 214270 - DNA, 25 bp, Probe Sequence
gcaggctctggattaaagcttttag

SEQ ID NO: 214271 - DNA, 25 bp, Probe Sequence
gcaggcatgcatagctaaaacttgt

SEQ ID NO: 214272 - DNA, 25 bp, Probe Sequence
gcaggactcctgagaactgtgctgg

SEQ ID NO: 214273 - DNA, 25 bp, Probe Sequence
gcaggatcgacgcgcttctgtatgg

SEQ ID NO: 214274 - DNA, 25 bp, Probe Sequence
gcaggtctagcagagttgtgtcagg

SEQ ID NO: 214275 - DNA, 25 bp, Probe Sequence
gcaggctgtaatgcagtttaatcag

SEQ ID NO: 214276 - DNA, 25 bp, Probe Sequence
gcagacatgtctgtacttgaaatca

SEQ ID NO: 214277 - DNA, 25 bp, Probe Sequence
gcaggtgttgaaaattatagccagc

SEQ ID NO: 214278 - DNA, 25 bp, Probe Sequence
gcaggttattagaagagtcccatga

SEQ ID NO: 214279 - DNA, 25 bp, Probe Sequence
gcagagtataatcgtaattcatccg

SEQ ID NO: 214280 - DNA, 25 bp, Probe Sequence
gcacgtatcgaacacttgcttcgca

SEQ ID NO: 214281 - DNA, 25 bp, Probe Sequence
gcaggtgtgaaatacaggcctccac

SEQ ID NO: 214282 - DNA, 25 bp, Probe Sequence
gcaggtggaaacggagctcttcccc

SEQ ID NO: 214283 - DNA, 25 bp, Probe Sequence
gcagagggaaaggctcaccctccca

SEQ ID NO: 214284 - DNA, 25 bp, Probe Sequence
gcagggctgaaaactgcccttgggc

SEQ ID NO: 214285 - DNA, 25 bp, Probe Sequence
gcaggaggacagagtgccctggggc

SEQ ID NO: 214286 - DNA, 25 bp, Probe Sequence
gcaggagtcaagatgcccgagggtc

SEQ ID NO: 214287 - DNA, 25 bp, Probe Sequence
gcaggagctcaacgtgacggtggtg

SEQ ID NO: 214288 - DNA, 25 bp, Probe Sequence
gcaggaccacaccatcagagagggt

SEQ ID NO: 214289 - DNA, 25 bp, Probe Sequence
gcaggacatcctggacgacagtggc

SEQ ID NO: 214290 - DNA, 25 bp, Probe Sequence
gcaggacactggctcagtagtgcct

SEQ ID NO: 214291 - DNA, 25 bp, Probe Sequence
gcaggacacattcctcaatggtaag

SEQ ID NO: 214292 - DNA, 25 bp, Probe Sequence
gcaggaacttcagcaagcagtaggt

SEQ ID NO: 214293 - DNA, 25 bp, Probe Sequence
gcaggaagtgttgctgacagtgcag

SEQ ID NO: 214294 - DNA, 25 bp, Probe Sequence
gcaggcaaggtcactgctcagtcac

SEQ ID NO: 214295 - DNA, 25 bp, Probe Sequence
gcagtgaaagtattgctgccttcat

SEQ ID NO: 214296 - DNA, 25 bp, Probe Sequence
gcagtgagctatgatcacgccgcta

SEQ ID NO: 214297 - DNA, 25 bp, Probe Sequence
gcagtgccaacatgcactgcccaca

SEQ ID NO: 214298 - DNA, 25 bp, Probe Sequence
gcagtgctgaaattcatcctacgga

SEQ ID NO: 214299 - DNA, 25 bp, Probe Sequence
gcagtgctgaaattcatcctacgga

SEQ ID NO: 214300 - DNA, 25 bp, Probe Sequence
gcagtgtgaatagcaaggacagaca

SEQ ID NO: 214301 - DNA, 25 bp, Probe Sequence
gcagtgatggttgccaggacgaatt

SEQ ID NO: 214302 - DNA, 25 bp, Probe Sequence
gcaggtggccatccgagaggcctat

SEQ ID NO: 214303 - DNA, 25 bp, Probe Sequence
gcaggggacattcagggctgtctac

SEQ ID NO: 214304 - DNA, 25 bp, Probe Sequence
gcaggagaccttcagcgggatggat

SEQ ID NO: 214305 - DNA, 25 bp, Probe Sequence
gcaggagtccgtcagcaagaagggg

SEQ ID NO: 214306 - DNA, 25 bp, Probe Sequence
gcaggaccatcggcaggaaacacag

SEQ ID NO: 214307 - DNA, 25 bp, Probe Sequence
gcaggagcgcatggtcggagaactc

SEQ ID NO: 214308 - DNA, 25 bp, Probe Sequence
gcaggagcaagagcggcaagagcgc

SEQ ID NO: 214309 - DNA, 25 bp, Probe Sequence
gcaggcagaggagcaggccaggcaa

SEQ ID NO: 214310 - DNA, 25 bp, Probe Sequence
gcaggcagaggaaacggcaggggag

SEQ ID NO: 214311 - DNA, 25 bp, Probe Sequence
gcaggaggatgaaccagagggggac

SEQ ID NO: 214312 - DNA, 25 bp, Probe Sequence
gcagtaagccagacgaaggccggac

SEQ ID NO: 214313 - DNA, 25 bp, Probe Sequence
gcagctcaagcttgaaggacccggg

SEQ ID NO: 214314 - DNA, 25 bp, Probe Sequence
gagtcctgggggtcaccccagggct

SEQ ID NO: 214315 - DNA, 25 bp, Probe Sequence
gagtcctgggggtcaccccagggct

SEQ ID NO: 214316 - DNA, 25 bp, Probe Sequence
gcagacctgggggtgaacccagtcc

SEQ ID NO: 214317 - DNA, 25 bp, Probe Sequence
gcagacctgggggtgaacccagtcc

SEQ ID NO: 214318 - DNA, 25 bp, Probe Sequence
gcagacctgggggtgaacccagtcc

SEQ ID NO: 214319 - DNA, 25 bp, Probe Sequence
gcaaactggggctaaatccgcagca

SEQ ID NO: 214320 - DNA, 25 bp, Probe Sequence
gcagacactttaccaaatcctacaa

SEQ ID NO: 214321 - DNA, 25 bp, Probe Sequence
gcaggacattcttgccgtattctca

SEQ ID NO: 214322 - DNA, 25 bp, Probe Sequence
gcaggaacttctgtgtatatctgaa

SEQ ID NO: 214323 - DNA, 25 bp, Probe Sequence
gcaggaacccttggtcacatgtgac

SEQ ID NO: 214324 - DNA, 25 bp, Probe Sequence
gcagtgaaccatgatcactcacccc

SEQ ID NO: 214325 - DNA, 25 bp, Probe Sequence
gcagtgtacccgtcattatcagcac

SEQ ID NO: 214326 - DNA, 25 bp, Probe Sequence
gcaggtttccccattatgcatatag

SEQ ID NO: 214327 - DNA, 25 bp, Probe Sequence
gcaggttgtgacattgtaccattag

SEQ ID NO: 214328 - DNA, 25 bp, Probe Sequence
gcaggtgtgtaggttgagtctttaa

SEQ ID NO: 214329 - DNA, 25 bp, Probe Sequence
gcagtggtttgcagtggcttactgg

SEQ ID NO: 214330 - DNA, 25 bp, Probe Sequence
gcagaggatcagaaccggtacctgg

SEQ ID NO: 214331 - DNA, 25 bp, Probe Sequence
gcagagagtactgcggtgtccctgg

SEQ ID NO: 214332 - DNA, 25 bp, Probe Sequence
gcagagaattgcgggttctacccag

SEQ ID NO: 214333 - DNA, 25 bp, Probe Sequence
gcaggatgacgctggctgatgatac

SEQ ID NO: 214334 - DNA, 25 bp, Probe Sequence
gcaggatgacgctggctgatgatac

SEQ ID NO: 214335 - DNA, 25 bp, Probe Sequence
gcaggaggccacactgatgttctaa

SEQ ID NO: 214336 - DNA, 25 bp, Probe Sequence
gcaggaagctcctcagattttctca

SEQ ID NO: 214337 - DNA, 25 bp, Probe Sequence
gcaggacgccattaagtgtctgttt

SEQ ID NO: 214338 - DNA, 25 bp, Probe Sequence
gcaggagaccatcgcagagtttttg

SEQ ID NO: 214339 - DNA, 25 bp, Probe Sequence
gcaggaggctcatgggtggttgctg

SEQ ID NO: 214340 - DNA, 25 bp, Probe Sequence
gcagtcaggcctagaggctggcgtc

SEQ ID NO: 214341 - DNA, 25 bp, Probe Sequence
gcaggcattccaaggcctgggtcct

SEQ ID NO: 214342 - DNA, 25 bp, Probe Sequence
gcaggttactcagcagtttgtgcct

SEQ ID NO: 214343 - DNA, 25 bp, Probe Sequence
gcagacttaaagtagctttgtacgc

SEQ ID NO: 214344 - DNA, 25 bp, Probe Sequence
gcagagttaagttgtctttcttcct

SEQ ID NO: 214345 - DNA, 25 bp, Probe Sequence
gcagatgcttaagtcaactatttta

SEQ ID NO: 214346 - DNA, 25 bp, Probe Sequence
gcagtatgtagagagcttttttgag

SEQ ID NO: 214347 - DNA, 25 bp, Probe Sequence
gcagtaatgcaagagtccttttgtg

SEQ ID NO: 214348 - DNA, 25 bp, Probe Sequence
gcaggacaagagtcagacttttggt

SEQ ID NO: 214349 - DNA, 25 bp, Probe Sequence
gcaggagcagcggaagacagtcttc

SEQ ID NO: 214350 - DNA, 25 bp, Probe Sequence
gcaggaggtggacagagtctctcat

SEQ ID NO: 214351 - DNA, 25 bp, Probe Sequence
gcagggttgggctgaatcaaatggg

SEQ ID NO: 214352 - DNA, 25 bp, Probe Sequence
gcagggttgggctgaatcaaatggg

SEQ ID NO: 214353 - DNA, 25 bp, Probe Sequence
gcaggcattttgctggacaccaagg

SEQ ID NO: 214354 - DNA, 25 bp, Probe Sequence
gcaggctttccggcagaacgcatcc

SEQ ID NO: 214355 - DNA, 25 bp, Probe Sequence
gcagggcttcgtgagaatgccgcca

SEQ ID NO: 214356 - DNA, 25 bp, Probe Sequence
gcaggtcttcggacgcaagaagaca

SEQ ID NO: 214357 - DNA, 25 bp, Probe Sequence
gcaggagttgaaatgcctagaaaca

SEQ ID NO: 214358 - DNA, 25 bp, Probe Sequence
gcagggatcgttacccgaactgcat

SEQ ID NO: 214359 - DNA, 25 bp, Probe Sequence
gcaagtgtcgtggacttcgtactgc

SEQ ID NO: 214360 - DNA, 25 bp, Probe Sequence
gcaggtgcgcgtggaattcatggac

SEQ ID NO: 214361 - DNA, 25 bp, Probe Sequence
gcaggtgtggtgcgaccagagacac

SEQ ID NO: 214362 - DNA, 25 bp, Probe Sequence
gcagaggttgtagtgagccgagatc

SEQ ID NO: 214363 - DNA, 25 bp, Probe Sequence
gcaggatgttttaggagaagctcca

SEQ ID NO: 214364 - DNA, 25 bp, Probe Sequence
gcaggagtggtaagccagggatcaa

SEQ ID NO: 214365 - DNA, 25 bp, Probe Sequence
gcaggcagatcacgaggtcaggagt

SEQ ID NO: 214366 - DNA, 25 bp, Probe Sequence
gcagtcagatctgaggatctgaggt

SEQ ID NO: 214367 - DNA, 25 bp, Probe Sequence
gcagtcagacatggagttagtggta

SEQ ID NO: 214368 - DNA, 25 bp, Probe Sequence
gcaggagcacatgagcatctcgggc

SEQ ID NO: 214369 - DNA, 25 bp, Probe Sequence
gcaggagcatctacacagcttgggt

SEQ ID NO: 214370 - DNA, 25 bp, Probe Sequence
gcaggagattcagcacctagtgtct

SEQ ID NO: 214371 - DNA, 25 bp, Probe Sequence
gcaggaatgccccatcctgaaacca

SEQ ID NO: 214372 - DNA, 25 bp, Probe Sequence
gcagtgaagccaagccaggaaacac

SEQ ID NO: 214373 - DNA, 25 bp, Probe Sequence
gcaggaacagcgtctcaggaacaac

SEQ ID NO: 214374 - DNA, 25 bp, Probe Sequence
gcaggacacagggtgtggtactgac

SEQ ID NO: 214375 - DNA, 25 bp, Probe Sequence
gcaggcaccaggctgggatgagctg

SEQ ID NO: 214376 - DNA, 25 bp, Probe Sequence
gcaggcagccagcacaggagatgct

SEQ ID NO: 214377 - DNA, 25 bp, Probe Sequence
gcaggagccatcttgcaggtgtgat

SEQ ID NO: 214378 - DNA, 25 bp, Probe Sequence
gcaggaacatcattcatggcagtga

SEQ ID NO: 214379 - DNA, 25 bp, Probe Sequence
gcaggtagctgaagctggcagagga

SEQ ID NO: 214380 - DNA, 25 bp, Probe Sequence
gcaggaggctgaactacaggaatct

SEQ ID NO: 214381 - DNA, 25 bp, Probe Sequence
gcagtgaccttcataaagcatataa

SEQ ID NO: 214382 - DNA, 25 bp, Probe Sequence
gcaggagcaattataaaatcttcaa

SEQ ID NO: 214383 - DNA, 25 bp, Probe Sequence
gcaggaggttatataccatcttgag

SEQ ID NO: 214384 - DNA, 25 bp, Probe Sequence
gcaggaagctaaattactccactgg

SEQ ID NO: 214385 - DNA, 25 bp, Probe Sequence
gcagggagtaaaagcctgccgggcc

SEQ ID NO: 214386 - DNA, 25 bp, Probe Sequence
gcaggtgttaaaggacccaggcttc

SEQ ID NO: 214387 - DNA, 25 bp, Probe Sequence
gcaggtgttaattggatccctttcc

SEQ ID NO: 214388 - DNA, 25 bp, Probe Sequence
gcaggtgttggatttgctccagtat

SEQ ID NO: 214389 - DNA, 25 bp, Probe Sequence
gcaggtgttggatttgctccagtat

SEQ ID NO: 214390 - DNA, 25 bp, Probe Sequence
gcaggtgttggatttgctccagtat

SEQ ID NO: 214391 - DNA, 25 bp, Probe Sequence
gcaggtgttggatttgctccagtat

SEQ ID NO: 214392 - DNA, 25 bp, Probe Sequence
gcagtgctttggctatgtcgacata

SEQ ID NO: 214393 - DNA, 25 bp, Probe Sequence
gcagtgctatttcttgtgcctaaga

SEQ ID NO: 214394 - DNA, 25 bp, Probe Sequence
gcagtctttgtgcgttggcattgga

SEQ ID NO: 214395 - DNA, 25 bp, Probe Sequence
gcagtttggtggcatgctacttgcc

SEQ ID NO: 214396 - DNA, 25 bp, Probe Sequence
gcagtttcgctcagagcttgtctcc

SEQ ID NO: 214397 - DNA, 25 bp, Probe Sequence
gcagatatctgcctcaaacttatgt

SEQ ID NO: 214398 - DNA, 25 bp, Probe Sequence
gcagaacgctggcatcagctatctt

SEQ ID NO: 214399 - DNA, 25 bp, Probe Sequence
gcaggtgcagcaggtgctcaatatc

SEQ ID NO: 214400 - DNA, 25 bp, Probe Sequence
gcaggtgacaggcctagctatagtt

SEQ ID NO: 214401 - DNA, 25 bp, Probe Sequence
gcagtgggcaggatcatgcctcagt

SEQ ID NO: 214402 - DNA, 25 bp, Probe Sequence
gcagtgggcgagatctcatcagccc

SEQ ID NO: 214403 - DNA, 25 bp, Probe Sequence
gcagtgcggcaaagtgttcaggcga

SEQ ID NO: 214404 - DNA, 25 bp, Probe Sequence
gcaggagtagtattgatgtaaggaa

SEQ ID NO: 214405 - DNA, 25 bp, Probe Sequence
gcaggacgaggatggctacaggatg

SEQ ID NO: 214406 - DNA, 25 bp, Probe Sequence
gcagtgggtggaggaccgggagctt

SEQ ID NO: 214407 - DNA, 25 bp, Probe Sequence
gcagtgggtggaggaccgggagctt

SEQ ID NO: 214408 - DNA, 25 bp, Probe Sequence
gcagtgggtggaggaccgggagctt

SEQ ID NO: 214409 - DNA, 25 bp, Probe Sequence
gcagtgggatgggcggctgaggaac

SEQ ID NO: 214410 - DNA, 25 bp, Probe Sequence
gcagtgggtctgggacagacttcac

SEQ ID NO: 214411 - DNA, 25 bp, Probe Sequence
gcagtgggtgatggacacagacatg

SEQ ID NO: 214412 - DNA, 25 bp, Probe Sequence
gcaggggcagattgtcagaagcttc

SEQ ID NO: 214413 - DNA, 25 bp, Probe Sequence
gcaggtgctggacgtcgacagctgc

SEQ ID NO: 214414 - DNA, 25 bp, Probe Sequence
gcagagtctcagcatgatcagtcct

SEQ ID NO: 214415 - DNA, 25 bp, Probe Sequence
gcaggtgcatcgccagcatttcgat

SEQ ID NO: 214416 - DNA, 25 bp, Probe Sequence
gcaggtcatcagactagtgctgagt

SEQ ID NO: 214417 - DNA, 25 bp, Probe Sequence
gcaggtcagcacgttgctgtcgatt

SEQ ID NO: 214418 - DNA, 25 bp, Probe Sequence
gcagttctactggtggactttcttc

SEQ ID NO: 214419 - DNA, 25 bp, Probe Sequence
gcagttcaactctgacacttgtagt

SEQ ID NO: 214420 - DNA, 25 bp, Probe Sequence
gcagaactagacacccttgaagatt

SEQ ID NO: 214421 - DNA, 25 bp, Probe Sequence
gcaggagccaatatcccttacttta

SEQ ID NO: 214422 - DNA, 25 bp, Probe Sequence
gcaggatccaaagaagttcctttac

SEQ ID NO: 214423 - DNA, 25 bp, Probe Sequence
gcaggtcgtacataacttccggtaa

SEQ ID NO: 214424 - DNA, 25 bp, Probe Sequence
gcaggacgagaataacgctagcagg

SEQ ID NO: 214425 - DNA, 25 bp, Probe Sequence
gcagggggatgaaaaactcagcaga

SEQ ID NO: 214426 - DNA, 25 bp, Probe Sequence
gcaggtggggataaaatctcataca

SEQ ID NO: 214427 - DNA, 25 bp, Probe Sequence
gcaggtggtggagcacatctttgat

SEQ ID NO: 214428 - DNA, 25 bp, Probe Sequence
gcaggtatgttcgcaattcgtgctg

SEQ ID NO: 214429 - DNA, 25 bp, Probe Sequence
gcagggactagaggctttcggcttt

SEQ ID NO: 214430 - DNA, 25 bp, Probe Sequence
gcaggtgattggggctctgattggc

SEQ ID NO: 214431 - DNA, 25 bp, Probe Sequence
gcagggttcagcagttatgtgggag

SEQ ID NO: 214432 - DNA, 25 bp, Probe Sequence
gcaggtttcagctgattggcagcag

SEQ ID NO: 214433 - DNA, 25 bp, Probe Sequence
gcagtgtttcatgagttacaagtgt

SEQ ID NO: 214434 - DNA, 25 bp, Probe Sequence
gcagctgttccgggttacggacttc

SEQ ID NO: 214435 - DNA, 25 bp, Probe Sequence
gcactctgttggggtttgggaccct

SEQ ID NO: 214436 - DNA, 25 bp, Probe Sequence
gcactctgttggggtttgggaccct

SEQ ID NO: 214437 - DNA, 25 bp, Probe Sequence
gcacctttgaggttgttttgcaccg

SEQ ID NO: 214438 - DNA, 25 bp, Probe Sequence
gcacgccttgagcagtcagcattgc

SEQ ID NO: 214439 - DNA, 25 bp, Probe Sequence
gcagtccttgagaaggcatgttcca

SEQ ID NO: 214440 - DNA, 25 bp, Probe Sequence
gcagtgctctgaaggagtatcttac

SEQ ID NO: 214441 - DNA, 25 bp, Probe Sequence
gcagtgctctgaaggagtatcttac

SEQ ID NO: 214442 - DNA, 25 bp, Probe Sequence
gcagatgatctgagcgagattacca

SEQ ID NO: 214443 - DNA, 25 bp, Probe Sequence
gcagttcattgaggcagctctacta

SEQ ID NO: 214444 - DNA, 25 bp, Probe Sequence
gcagattttacaggtttctaattct

SEQ ID NO: 214445 - DNA, 25 bp, Probe Sequence
gcagtgttgatgtgggtatttacct

SEQ ID NO: 214446 - DNA, 25 bp, Probe Sequence
gcagggaggggggttattaggattg

SEQ ID NO: 214447 - DNA, 25 bp, Probe Sequence
gcagggagatgtgggttccttcgtg

SEQ ID NO: 214448 - DNA, 25 bp, Probe Sequence
gcagggaatgttgtatctttggagg

SEQ ID NO: 214449 - DNA, 25 bp, Probe Sequence
gcagtaaccattgtcatcgttggaa

SEQ ID NO: 214450 - DNA, 25 bp, Probe Sequence
gcagtaactcgtggtgttgccatgg

SEQ ID NO: 214451 - DNA, 25 bp, Probe Sequence
gcagataatgctttcttttccagtc

SEQ ID NO: 214452 - DNA, 25 bp, Probe Sequence
gcagataatgatgactagttcacac

SEQ ID NO: 214453 - DNA, 25 bp, Probe Sequence
gcagtagtgtggactagaacaaccc

SEQ ID NO: 214454 - DNA, 25 bp, Probe Sequence
gcagtagcattcataattacaacca

SEQ ID NO: 214455 - DNA, 25 bp, Probe Sequence
gcactacatgtaaattaagcccaaa

SEQ ID NO: 214456 - DNA, 25 bp, Probe Sequence
gcagtacataatagttaagccaagc

SEQ ID NO: 214457 - DNA, 25 bp, Probe Sequence
gcagtatatatttgtggttggcaag

SEQ ID NO: 214458 - DNA, 25 bp, Probe Sequence
gcagttttactgttgtcgctacagc

SEQ ID NO: 214459 - DNA, 25 bp, Probe Sequence
gcaggattcaaagttgtacatacat

SEQ ID NO: 214460 - DNA, 25 bp, Probe Sequence
gcaggtaacaaaagtcaaagtattt

SEQ ID NO: 214461 - DNA, 25 bp, Probe Sequence
gcaggtatcactagaggtcaagagt

SEQ ID NO: 214462 - DNA, 25 bp, Probe Sequence
gcagtgctcagcattacgtaagaat

SEQ ID NO: 214463 - DNA, 25 bp, Probe Sequence
gcagtggcgatttgaccagataaat

SEQ ID NO: 214464 - DNA, 25 bp, Probe Sequence
gcagggcctctaacctgtgatgtca

SEQ ID NO: 214465 - DNA, 25 bp, Probe Sequence
gcaggtgccatcacgcttgtgatgt

SEQ ID NO: 214466 - DNA, 25 bp, Probe Sequence
gcaggtgccatcacgcttgtgatgt

SEQ ID NO: 214467 - DNA, 25 bp, Probe Sequence
gcaggtgccatcacgcttgtgatgt

SEQ ID NO: 214468 - DNA, 25 bp, Probe Sequence
gcaggatccaggcctgcatgtgtgg

SEQ ID NO: 214469 - DNA, 25 bp, Probe Sequence
gcagtgtccattcatgagtgtgaca

SEQ ID NO: 214470 - DNA, 25 bp, Probe Sequence
gcagtgtctcttccagggggaattc

SEQ ID NO: 214471 - DNA, 25 bp, Probe Sequence
gcagagttgtgtcagggggaagatc

SEQ ID NO: 214472 - DNA, 25 bp, Probe Sequence
gcaggatcaggacacgaggaagagt

SEQ ID NO: 214473 - DNA, 25 bp, Probe Sequence
gcaggtgagcgacgaccttacagag

SEQ ID NO: 214474 - DNA, 25 bp, Probe Sequence
gcaggagatggacgagaatccccag

SEQ ID NO: 214475 - DNA, 25 bp, Probe Sequence
gcaggaggcaattaggattgcccag

SEQ ID NO: 214476 - DNA, 25 bp, Probe Sequence
gcaggagtacagtggcattatctca

SEQ ID NO: 214477 - DNA, 25 bp, Probe Sequence
gcaggagtatggttgagatgctacc

SEQ ID NO: 214478 - DNA, 25 bp, Probe Sequence
gcaggagtcatggctcatacgctac

SEQ ID NO: 214479 - DNA, 25 bp, Probe Sequence
gcagtagtcattgcatgtctccaca

SEQ ID NO: 214480 - DNA, 25 bp, Probe Sequence
gcaggagtatattgatgcattctca

SEQ ID NO: 214481 - DNA, 25 bp, Probe Sequence
gcaggagttgaattcatgtctatta

SEQ ID NO: 214482 - DNA, 25 bp, Probe Sequence
gcaggagatttatcagactcttcat

SEQ ID NO: 214483 - DNA, 25 bp, Probe Sequence
gcaggagttcgtcagagctctggca

SEQ ID NO: 214484 - DNA, 25 bp, Probe Sequence
gcaggagttcgtcagagctctggca

SEQ ID NO: 214485 - DNA, 25 bp, Probe Sequence
gcaggagttcgtcagagctctggca

SEQ ID NO: 214486 - DNA, 25 bp, Probe Sequence
gcaggagtgctggtgaggaggtgga

SEQ ID NO: 214487 - DNA, 25 bp, Probe Sequence
gcaggaggctgacaatgaggtagac

SEQ ID NO: 214488 - DNA, 25 bp, Probe Sequence
gcaggtgagcaaccagttggctagg

SEQ ID NO: 214489 - DNA, 25 bp, Probe Sequence
gcagaggcgaactgtagagtgcagg

SEQ ID NO: 214490 - DNA, 25 bp, Probe Sequence
gcagagagccaatcagacgtcgcag

SEQ ID NO: 214491 - DNA, 25 bp, Probe Sequence
gcaggaggcagcgacagtttcgaga

SEQ ID NO: 214492 - DNA, 25 bp, Probe Sequence
gcagttggcgtggatgtcctgcgga

SEQ ID NO: 214493 - DNA, 25 bp, Probe Sequence
gcagttggccagagagcctggtgct

SEQ ID NO: 214494 - DNA, 25 bp, Probe Sequence
gcagtacagcaactacagcgtgaac

SEQ ID NO: 214495 - DNA, 25 bp, Probe Sequence
gcagattccacaggacacgaaggct

SEQ ID NO: 214496 - DNA, 25 bp, Probe Sequence
gcagattacatgagaccaggcgttc

SEQ ID NO: 214497 - DNA, 25 bp, Probe Sequence
gcaggtcacaggtcaccatggggat

SEQ ID NO: 214498 - DNA, 25 bp, Probe Sequence
gcaggtcacaggtcaccatggggaa

SEQ ID NO: 214499 - DNA, 25 bp, Probe Sequence
gcagggcacaatgaccttgtcgaaa

SEQ ID NO: 214500 - DNA, 25 bp, Probe Sequence
gcagggcaggatgcccactgtcagc

SEQ ID NO: 214501 - DNA, 25 bp, Probe Sequence
gcaggatgggctgtccatgatgatc

SEQ ID NO: 214502 - DNA, 25 bp, Probe Sequence
gcaggatggactcttgcacatcact

SEQ ID NO: 214503 - DNA, 25 bp, Probe Sequence
gcagggctattgcttatgccactca

SEQ ID NO: 214504 - DNA, 25 bp, Probe Sequence
gcaggtgtagtggtcttgctgcttc

SEQ ID NO: 214505 - DNA, 25 bp, Probe Sequence
gcagtgttagcttagttctcttttg

SEQ ID NO: 214506 - DNA, 25 bp, Probe Sequence
gcagtgatctagatttttttttttt

SEQ ID NO: 214507 - DNA, 25 bp, Probe Sequence
gcaggattcagtttcgttttgtttt

SEQ ID NO: 214508 - DNA, 25 bp, Probe Sequence
gcagtatatttcttcgttcttttta

SEQ ID NO: 214509 - DNA, 25 bp, Probe Sequence
gcagtgatgtttttcgttccttgta

SEQ ID NO: 214510 - DNA, 25 bp, Probe Sequence
gcaggttcacttacactgttcttgt

SEQ ID NO: 214511 - DNA, 25 bp, Probe Sequence
gcaggttagtctcacagttgctgtc

SEQ ID NO: 214512 - DNA, 25 bp, Probe Sequence
gcaggtccgctataatgctctgctg

SEQ ID NO: 214513 - DNA, 25 bp, Probe Sequence
gcaggtttgttggcagatgctcgtt

SEQ ID NO: 214514 - DNA, 25 bp, Probe Sequence
gcaggtttgttgaaatacagttttg

SEQ ID NO: 214515 - DNA, 25 bp, Probe Sequence
gcaggttttttgttacgctgctgtc

SEQ ID NO: 214516 - DNA, 25 bp, Probe Sequence
gcagagttgttcaggttgcctgggc

SEQ ID NO: 214517 - DNA, 25 bp, Probe Sequence
gcagagtttttgtacattgcccggc

SEQ ID NO: 214518 - DNA, 25 bp, Probe Sequence
gcaggtgtttggcatcgatgctctc

SEQ ID NO: 214519 - DNA, 25 bp, Probe Sequence
gcaggggatggcctgatcgagctgc

SEQ ID NO: 214520 - DNA, 25 bp, Probe Sequence
gcaggggatggcctgatcgagctgc

SEQ ID NO: 214521 - DNA, 25 bp, Probe Sequence
gcaggatggtagcctactgcactga

SEQ ID NO: 214522 - DNA, 25 bp, Probe Sequence
gcaggatttgcatatactcaaagca

SEQ ID NO: 214523 - DNA, 25 bp, Probe Sequence
gcaggatctctgacaatgagtgaaa

SEQ ID NO: 214524 - DNA, 25 bp, Probe Sequence
gcaggattcacttatgggtaaaagt

SEQ ID NO: 214525 - DNA, 25 bp, Probe Sequence
gcaggtccactatttctgcagaaaa

SEQ ID NO: 214526 - DNA, 25 bp, Probe Sequence
gcagtttgactgtttgcctgagaaa

SEQ ID NO: 214527 - DNA, 25 bp, Probe Sequence
gcaggtgatgccgatttccattata

SEQ ID NO: 214528 - DNA, 25 bp, Probe Sequence
gcagaggatctcatttgactttgtt

SEQ ID NO: 214529 - DNA, 25 bp, Probe Sequence
gcaggatgacacagtctacatgggc

SEQ ID NO: 214530 - DNA, 25 bp, Probe Sequence
gcaggatgactcaatgttaaagcat

SEQ ID NO: 214531 - DNA, 25 bp, Probe Sequence
gcagggccatgactcattagaacat

SEQ ID NO: 214532 - DNA, 25 bp, Probe Sequence
gcaggtgcagtgttcagtcagcaag

SEQ ID NO: 214533 - DNA, 25 bp, Probe Sequence
gcagggcatcaagagtcagcatcag

SEQ ID NO: 214534 - DNA, 25 bp, Probe Sequence
gcagtggctacaggaactgaatgtg

SEQ ID NO: 214535 - DNA, 25 bp, Probe Sequence
gcaggtgcaacactcaagtctattg

SEQ ID NO: 214536 - DNA, 25 bp, Probe Sequence
gcaggatgccatgtgcgagactatg

SEQ ID NO: 214537 - DNA, 25 bp, Probe Sequence
gcagatcaccacgtggatatataga

SEQ ID NO: 214538 - DNA, 25 bp, Probe Sequence
gcagtacctcatggagtgctcacta

SEQ ID NO: 214539 - DNA, 25 bp, Probe Sequence
gcagtgaactctggtgtctcaaaga

SEQ ID NO: 214540 - DNA, 25 bp, Probe Sequence
gcagtgtaattgcctgttaaaagtt

SEQ ID NO: 214541 - DNA, 25 bp, Probe Sequence
gcagttgtatggcgtctgcaccaag

SEQ ID NO: 214542 - DNA, 25 bp, Probe Sequence
gcagttctcttacgtggactcagag

SEQ ID NO: 214543 - DNA, 25 bp, Probe Sequence
gcagtcctgccttggatgcagagct

SEQ ID NO: 214544 - DNA, 25 bp, Probe Sequence
gcagttcatgcagtcggtcaagagg

SEQ ID NO: 214545 - DNA, 25 bp, Probe Sequence
gcagtgctctgagccctaggattca

SEQ ID NO: 214546 - DNA, 25 bp, Probe Sequence
gcagtgcttgcagttcaaacagaat

SEQ ID NO: 214547 - DNA, 25 bp, Probe Sequence
gcagtcttcagcctattatcaaaac

SEQ ID NO: 214548 - DNA, 25 bp, Probe Sequence
gcagtctcgtccaatttctatagca

SEQ ID NO: 214549 - DNA, 25 bp, Probe Sequence
gcagtcctgggcatgattgtagaga

SEQ ID NO: 214550 - DNA, 25 bp, Probe Sequence
gcagtacttggcctgtatataatgg

SEQ ID NO: 214551 - DNA, 25 bp, Probe Sequence
gcagaacctcagcctgttaactttg

SEQ ID NO: 214552 - DNA, 25 bp, Probe Sequence
gcagaaaatctacgtattaattcat

SEQ ID NO: 214553 - DNA, 25 bp, Probe Sequence
gcagaatcaatcacttttaaatcag

SEQ ID NO: 214554 - DNA, 25 bp, Probe Sequence
gcaagactgattctgtttggaacag

SEQ ID NO: 214555 - DNA, 25 bp, Probe Sequence
gcagagcaatttctgtttaagaaac

SEQ ID NO: 214556 - DNA, 25 bp, Probe Sequence
gcagagcaagggctgtgttttggaa

SEQ ID NO: 214557 - DNA, 25 bp, Probe Sequence
gcagatcggtggccttgatgttccg

SEQ ID NO: 214558 - DNA, 25 bp, Probe Sequence
gcagtcctgggcttcatgatgatat

SEQ ID NO: 214559 - DNA, 25 bp, Probe Sequence
gcagattgcatgggcataaatttct

SEQ ID NO: 214560 - DNA, 25 bp, Probe Sequence
gcagtcgcctagaaaacttgctctc

SEQ ID NO: 214561 - DNA, 25 bp, Probe Sequence
gcagtgcatagcgaggaagacattg

SEQ ID NO: 214562 - DNA, 25 bp, Probe Sequence
gcagtcaacaacgacaccagtgagt

SEQ ID NO: 214563 - DNA, 25 bp, Probe Sequence
gcagatcaccttgcacatgaagtga

SEQ ID NO: 214564 - DNA, 25 bp, Probe Sequence
gcagtccctcacctgtgaagtggat

SEQ ID NO: 214565 - DNA, 25 bp, Probe Sequence
gcagatccactcccgaaagatgaat

SEQ ID NO: 214566 - DNA, 25 bp, Probe Sequence
gcagtacagctccaatggcaagtgg

SEQ ID NO: 214567 - DNA, 25 bp, Probe Sequence
gcagtgggcatcggcattgccgtgg

SEQ ID NO: 214568 - DNA, 25 bp, Probe Sequence
gcagtggttccatttctagattgtg

SEQ ID NO: 214569 - DNA, 25 bp, Probe Sequence
gcagtttttgacttcatagattatg

SEQ ID NO: 214570 - DNA, 25 bp, Probe Sequence
gcaggtgtttgaattccagttgact

SEQ ID NO: 214571 - DNA, 25 bp, Probe Sequence
gcagggagtacagttcttttcattc

SEQ ID NO: 214572 - DNA, 25 bp, Probe Sequence
gcagaggagtagggtcctttcagcc

SEQ ID NO: 214573 - DNA, 25 bp, Probe Sequence
gcagggagaagctggcacctgtacc

SEQ ID NO: 214574 - DNA, 25 bp, Probe Sequence
gcagggaatcctggagcacttgttc

SEQ ID NO: 214575 - DNA, 25 bp, Probe Sequence
gcagagaaattcgagaccattttgc

SEQ ID NO: 214576 - DNA, 25 bp, Probe Sequence
gcagggcagcagtgaaccagttgtc

SEQ ID NO: 214577 - DNA, 25 bp, Probe Sequence
gcaggtgaagaggcccaaggatgtc

SEQ ID NO: 214578 - DNA, 25 bp, Probe Sequence
gcaggtgatagtggccgtgaggagc

SEQ ID NO: 214579 - DNA, 25 bp, Probe Sequence
gcagtccatagaagagcgtgagaaa

SEQ ID NO: 214580 - DNA, 25 bp, Probe Sequence
gcagtgtcgtgagtggcagtgagat

SEQ ID NO: 214581 - DNA, 25 bp, Probe Sequence
gcagtgggcatagggcagctcagtc

SEQ ID NO: 214582 - DNA, 25 bp, Probe Sequence
gcagtgagatcattggacactggac

SEQ ID NO: 214583 - DNA, 25 bp, Probe Sequence
gcagctggacaaccaattggatgca

SEQ ID NO: 214584 - DNA, 25 bp, Probe Sequence
gcagtggacataagcattgggccat

SEQ ID NO: 214585 - DNA, 25 bp, Probe Sequence
gcagggcaagcttcttgcgtgcatc

SEQ ID NO: 214586 - DNA, 25 bp, Probe Sequence
gcagggcaagcttcttgcgtgcatc

SEQ ID NO: 214587 - DNA, 25 bp, Probe Sequence
gcagagacaggaggcatcgcggctg

SEQ ID NO: 214588 - DNA, 25 bp, Probe Sequence
gcaggtggtgacgatctgggctgca

SEQ ID NO: 214589 - DNA, 25 bp, Probe Sequence
gcaggtggtcaggcagcaagagctg

SEQ ID NO: 214590 - DNA, 25 bp, Probe Sequence
gcaggtgaccagaatgaggcacatg

SEQ ID NO: 214591 - DNA, 25 bp, Probe Sequence
gcagtgagagctcctctgaggaaga

SEQ ID NO: 214592 - DNA, 25 bp, Probe Sequence
gcaggtggctgcattcaggcatgga

SEQ ID NO: 214593 - DNA, 25 bp, Probe Sequence
gcaggtggtgagttcttgctgcggt

SEQ ID NO: 214594 - DNA, 25 bp, Probe Sequence
gcagtggaggattacttcatgcgca

SEQ ID NO: 214595 - DNA, 25 bp, Probe Sequence
gcagtggcacgattatggctcattg

SEQ ID NO: 214596 - DNA, 25 bp, Probe Sequence
gcagtggcactttatagccacggct

SEQ ID NO: 214597 - DNA, 25 bp, Probe Sequence
gcagggcctctgcagataaatgtgc

SEQ ID NO: 214598 - DNA, 25 bp, Probe Sequence
gcagaggttcatgggacacagttgg

SEQ ID NO: 214599 - DNA, 25 bp, Probe Sequence
gcagtgcagtttcacagatcgttgt

SEQ ID NO: 214600 - DNA, 25 bp, Probe Sequence
gcagtgcagtttcacagatcgttgt

SEQ ID NO: 214601 - DNA, 25 bp, Probe Sequence
gcagtgcagtttcacagatcgttgt

SEQ ID NO: 214602 - DNA, 25 bp, Probe Sequence
gcagtcattctgaaaggacctttcc

SEQ ID NO: 214603 - DNA, 25 bp, Probe Sequence
gcagtccttcaaagatgaccaccat

SEQ ID NO: 214604 - DNA, 25 bp, Probe Sequence
gcagtcagccacaaactgacccaga

SEQ ID NO: 214605 - DNA, 25 bp, Probe Sequence
gcagtagcaaaccaaacctcagcca

SEQ ID NO: 214606 - DNA, 25 bp, Probe Sequence
gcagtagcaaaccaaacctcagcca

SEQ ID NO: 214607 - DNA, 25 bp, Probe Sequence
gcagtacaaggaccaggccgacaag

SEQ ID NO: 214608 - DNA, 25 bp, Probe Sequence
gcagttgcaaggtaacctccgaggc

SEQ ID NO: 214609 - DNA, 25 bp, Probe Sequence
gcagtgtagggatgcaaacccaggc

SEQ ID NO: 214610 - DNA, 25 bp, Probe Sequence
gcagagtaggcacgggaaccggcac

SEQ ID NO: 214611 - DNA, 25 bp, Probe Sequence
gcagttagtcttggagaccctggcc

SEQ ID NO: 214612 - DNA, 25 bp, Probe Sequence
gcagtttgtctactgcattcccgtg

SEQ ID NO: 214613 - DNA, 25 bp, Probe Sequence
gcagtatagctttggcatgttcatg

SEQ ID NO: 214614 - DNA, 25 bp, Probe Sequence
gcagttcactgtggacagtttgaca

SEQ ID NO: 214615 - DNA, 25 bp, Probe Sequence
gcagtgcagcagctggacactttgc

SEQ ID NO: 214616 - DNA, 25 bp, Probe Sequence
gcagtgccatggacgcagcagttac

SEQ ID NO: 214617 - DNA, 25 bp, Probe Sequence
gcagttgcaggagatgcctctgagt

SEQ ID NO: 214618 - DNA, 25 bp, Probe Sequence
gcagtggtgtgagatgccctgcacc

SEQ ID NO: 214619 - DNA, 25 bp, Probe Sequence
gcagtgggtgaaatgggtccctggg

SEQ ID NO: 214620 - DNA, 25 bp, Probe Sequence
gcagctgaggtagagggttgcctga

SEQ ID NO: 214621 - DNA, 25 bp, Probe Sequence
gcagagagactaagggcacttcctg

SEQ ID NO: 214622 - DNA, 25 bp, Probe Sequence
gcacgacacataagaatccttcctt

SEQ ID NO: 214623 - DNA, 25 bp, Probe Sequence
gcagtggaaatgcaatcctcattat

SEQ ID NO: 214624 - DNA, 25 bp, Probe Sequence
gcagtggaaatggttccttgcaaac

SEQ ID NO: 214625 - DNA, 25 bp, Probe Sequence
gcagcgggatctcgtatctttaaaa

SEQ ID NO: 214626 - DNA, 25 bp, Probe Sequence
gcactgtggcaataacttttgaatt

SEQ ID NO: 214627 - DNA, 25 bp, Probe Sequence
gcagtgtagccataactttctgatg

SEQ ID NO: 214628 - DNA, 25 bp, Probe Sequence
gcactgaagctataaattacctggt

SEQ ID NO: 214629 - DNA, 25 bp, Probe Sequence
gcagtaagctaacagtggacacaga

SEQ ID NO: 214630 - DNA, 25 bp, Probe Sequence
gcagtaattacagcattgcaggaaa

SEQ ID NO: 214631 - DNA, 25 bp, Probe Sequence
gcagtccattcagacattgggagca

SEQ ID NO: 214632 - DNA, 25 bp, Probe Sequence
gcagttttctgcaactctggagaag

SEQ ID NO: 214633 - DNA, 25 bp, Probe Sequence
gcagtgccttcaaagtacgagaagc

SEQ ID NO: 214634 - DNA, 25 bp, Probe Sequence
gcagggcatcatcaatttcgagcag

SEQ ID NO: 214635 - DNA, 25 bp, Probe Sequence
gcagttccatgcaaatattcgtgtt

SEQ ID NO: 214636 - DNA, 25 bp, Probe Sequence
gcagtttcctatagctacagttttt

SEQ ID NO: 214637 - DNA, 25 bp, Probe Sequence
gcacttacgtttcaaaagcttgtca

SEQ ID NO: 214638 - DNA, 25 bp, Probe Sequence
gtcactccgttttgcaaaaggtggc

SEQ ID NO: 214639 - DNA, 25 bp, Probe Sequence
gaccattagttctcaactagggatg

SEQ ID NO: 214640 - DNA, 25 bp, Probe Sequence
gagctacaagtttagcaactcgggg

SEQ ID NO: 214641 - DNA, 25 bp, Probe Sequence
gcagttccagattacaaaccgggtc

SEQ ID NO: 214642 - DNA, 25 bp, Probe Sequence
gcacttcgtggaacactaccgggag

SEQ ID NO: 214643 - DNA, 25 bp, Probe Sequence
gcagtctcggaaacacagagccagg

SEQ ID NO: 214644 - DNA, 25 bp, Probe Sequence
gcagtcccagctactcaggagactg

SEQ ID NO: 214645 - DNA, 25 bp, Probe Sequence
gcagtcccagccactcaagaggctg

SEQ ID NO: 214646 - DNA, 25 bp, Probe Sequence
gcagatccacactttgtcaaaggag

SEQ ID NO: 214647 - DNA, 25 bp, Probe Sequence
gcagattagtaattgttaatgccaa

SEQ ID NO: 214648 - DNA, 25 bp, Probe Sequence
gcagaaactccattttcaatgccaa

SEQ ID NO: 214649 - DNA, 25 bp, Probe Sequence
gcagaaacggttcacattccattat

SEQ ID NO: 214650 - DNA, 25 bp, Probe Sequence
gcagcaaaccttggaaaaccttatg

SEQ ID NO: 214651 - DNA, 25 bp, Probe Sequence
gcagagtatttataaaactgtcttt

SEQ ID NO: 214652 - DNA, 25 bp, Probe Sequence
gcagagtccttgtttaaaggtcatt

SEQ ID NO: 214653 - DNA, 25 bp, Probe Sequence
gcagtcccttaatattgaggctgca

SEQ ID NO: 214654 - DNA, 25 bp, Probe Sequence
gcagtccacgtagagatgtagggca

SEQ ID NO: 214655 - DNA, 25 bp, Probe Sequence
gcagtacgcggagaagaaggccaag

SEQ ID NO: 214656 - DNA, 25 bp, Probe Sequence
gcagtacgcggagaagaaggccaag

SEQ ID NO: 214657 - DNA, 25 bp, Probe Sequence
gcaaacggtcatcaagaaacgaagt

SEQ ID NO: 214658 - DNA, 25 bp, Probe Sequence
gcagaacggctacgaaaatccaacc

SEQ ID NO: 214659 - DNA, 25 bp, Probe Sequence
gcagaaaggtgacgattctcactca

SEQ ID NO: 214660 - DNA, 25 bp, Probe Sequence
gcagtaagatgtgctgtacctgaca

SEQ ID NO: 214661 - DNA, 25 bp, Probe Sequence
gcagtggagagttcctgacagcata

SEQ ID NO: 214662 - DNA, 25 bp, Probe Sequence
gcagtgggagcagcgctggatcaag

SEQ ID NO: 214663 - DNA, 25 bp, Probe Sequence
gcagtggtagctgcaagggcaggga

SEQ ID NO: 214664 - DNA, 25 bp, Probe Sequence
gcagtgagtcaggctgggagggcgg

SEQ ID NO: 214665 - DNA, 25 bp, Probe Sequence
gcagatgactcactgtgggggggtg

SEQ ID NO: 214666 - DNA, 25 bp, Probe Sequence
gcagggcacagaaggctggggtggg

SEQ ID NO: 214667 - DNA, 25 bp, Probe Sequence
gcagtcagccaattgcctggcaggt

SEQ ID NO: 214668 - DNA, 25 bp, Probe Sequence
gcagagaccatctgccattcagctg

SEQ ID NO: 214669 - DNA, 25 bp, Probe Sequence
gcagagagctccaccatttggtgct

SEQ ID NO: 214670 - DNA, 25 bp, Probe Sequence
gcagagagctccaccatttggtgct

SEQ ID NO: 214671 - DNA, 25 bp, Probe Sequence
gcagagagctccaccatttggtgct

SEQ ID NO: 214672 - DNA, 25 bp, Probe Sequence
gcagagagctccaccatttggtgct

SEQ ID NO: 214673 - DNA, 25 bp, Probe Sequence
gcagatcaacacagtcaaagcggct

SEQ ID NO: 214674 - DNA, 25 bp, Probe Sequence
gcagtgaaacaaataacagacgatg

SEQ ID NO: 214675 - DNA, 25 bp, Probe Sequence
gcagggagaaacaccagacttgagt

SEQ ID NO: 214676 - DNA, 25 bp, Probe Sequence
gcagccgaaacctcgatggcttggt

SEQ ID NO: 214677 - DNA, 25 bp, Probe Sequence
gcagttaataccatcaaagctttgt

SEQ ID NO: 214678 - DNA, 25 bp, Probe Sequence
gcagtgaacttcattataacttggt

SEQ ID NO: 214679 - DNA, 25 bp, Probe Sequence
gcagtgatattatttccataactta

SEQ ID NO: 214680 - DNA, 25 bp, Probe Sequence
gcagattttatcattcacaactcaa

SEQ ID NO: 214681 - DNA, 25 bp, Probe Sequence
gcagatacttatactttgaattcaa

SEQ ID NO: 214682 - DNA, 25 bp, Probe Sequence
gcagaaatattcatccaggttaacc

SEQ ID NO: 214683 - DNA, 25 bp, Probe Sequence
gcagaacaaatcaatccacggatgg

SEQ ID NO: 214684 - DNA, 25 bp, Probe Sequence
gcagttctactcgatcaccaagatg

SEQ ID NO: 214685 - DNA, 25 bp, Probe Sequence
gcagtgtgtctttcagcaccaagtc

SEQ ID NO: 214686 - DNA, 25 bp, Probe Sequence
gcagtgtgctgttgtgcacgtcagg

SEQ ID NO: 214687 - DNA, 25 bp, Probe Sequence
gcagctgtgctgttcatcacaggca

SEQ ID NO: 214688 - DNA, 25 bp, Probe Sequence
gcagctgattgtgctcaggtatgcg

SEQ ID NO: 214689 - DNA, 25 bp, Probe Sequence
gcagtgttcatagtcaggcgttagt

SEQ ID NO: 214690 - DNA, 25 bp, Probe Sequence
gcagtgatactattcaggatggtgg

SEQ ID NO: 214691 - DNA, 25 bp, Probe Sequence
gcagtgcatattaacaagggtagat

SEQ ID NO: 214692 - DNA, 25 bp, Probe Sequence
gcagtgctgagtaacaccaggctcc

SEQ ID NO: 214693 - DNA, 25 bp, Probe Sequence
gcagtccaggttgcactggttgcac

SEQ ID NO: 214694 - DNA, 25 bp, Probe Sequence
gcagatacaagtaagactgggatca

SEQ ID NO: 214695 - DNA, 25 bp, Probe Sequence
gcagaaatctttggacttggtatta

SEQ ID NO: 214696 - DNA, 25 bp, Probe Sequence
gcagatgtagtttcagacttggagt

SEQ ID NO: 214697 - DNA, 25 bp, Probe Sequence
gcagatgtagtttcagacttggagt

SEQ ID NO: 214698 - DNA, 25 bp, Probe Sequence
gcagatggagtaatggtcacgaggt

SEQ ID NO: 214699 - DNA, 25 bp, Probe Sequence
gcagtatgcttaatggtagcaactg

SEQ ID NO: 214700 - DNA, 25 bp, Probe Sequence
gcagatatctcttggggatggtcat

SEQ ID NO: 214701 - DNA, 25 bp, Probe Sequence
gcagatatcctgaaggcttgctgtc

SEQ ID NO: 214702 - DNA, 25 bp, Probe Sequence
gcagaatctagcatgatgccttgaa

SEQ ID NO: 214703 - DNA, 25 bp, Probe Sequence
gcagtgactgtggtgtccttgagat

SEQ ID NO: 214704 - DNA, 25 bp, Probe Sequence
gcagtgagccacttgttctgtgtga

SEQ ID NO: 214705 - DNA, 25 bp, Probe Sequence
gcagtgtgctacatttgtgcttgtg

SEQ ID NO: 214706 - DNA, 25 bp, Probe Sequence
gcagatgctaatttctcttgctcct

SEQ ID NO: 214707 - DNA, 25 bp, Probe Sequence
gcagatgtatcttgtcaatactacc

SEQ ID NO: 214708 - DNA, 25 bp, Probe Sequence
gcagctgaagtactacaactccgac

SEQ ID NO: 214709 - DNA, 25 bp, Probe Sequence
gcaaggcaattccacatcctcgtgg

SEQ ID NO: 214710 - DNA, 25 bp, Probe Sequence
gcagaggtttgggggctcagatggg

SEQ ID NO: 214711 - DNA, 25 bp, Probe Sequence
gcagaggggcagaggcccacattgg

SEQ ID NO: 214712 - DNA, 25 bp, Probe Sequence
gcagtgggagacaaagcctcggtcc

SEQ ID NO: 214713 - DNA, 25 bp, Probe Sequence
gcagtggctgagtgaacatctgagc

SEQ ID NO: 214714 - DNA, 25 bp, Probe Sequence
gcagggctgtgtgaaacatggttgt

SEQ ID NO: 214715 - DNA, 25 bp, Probe Sequence
gcagggctaggcgagagcctggggt

SEQ ID NO: 214716 - DNA, 25 bp, Probe Sequence
gcagtcatcttgggagaccgggagg

SEQ ID NO: 214717 - DNA, 25 bp, Probe Sequence
gcagagctgcttgaaccctggaagt

SEQ ID NO: 214718 - DNA, 25 bp, Probe Sequence
gcagaccctatatgcctgcatctaa

SEQ ID NO: 214719 - DNA, 25 bp, Probe Sequence
gcagaccctgtctaaaggctgaatt

SEQ ID NO: 214720 - DNA, 25 bp, Probe Sequence
gcagctaccgtagaatggcatttta

SEQ ID NO: 214721 - DNA, 25 bp, Probe Sequence
gcagaggcacagatgtaaggtttat

SEQ ID NO: 214722 - DNA, 25 bp, Probe Sequence
gcagtcgccagaagtagacctgtct

SEQ ID NO: 214723 - DNA, 25 bp, Probe Sequence
gcagacctggtactagacaattcta

SEQ ID NO: 214724 - DNA, 25 bp, Probe Sequence
gcagacctaggtcagacttttcctt

SEQ ID NO: 214725 - DNA, 25 bp, Probe Sequence
gcagaaaaggggggtcgtgtccact

SEQ ID NO: 214726 - DNA, 25 bp, Probe Sequence
gcagaagaaggaccggtatgagatc

SEQ ID NO: 214727 - DNA, 25 bp, Probe Sequence
gcagaacaaggggaggtggacatgg

SEQ ID NO: 214728 - DNA, 25 bp, Probe Sequence
gcagaggaaacggcaggggaggtgg

SEQ ID NO: 214729 - DNA, 25 bp, Probe Sequence
gcagaggagaaagagcggcggcggc

SEQ ID NO: 214730 - DNA, 25 bp, Probe Sequence
gcagagtgctgagaccgggaggggc

SEQ ID NO: 214731 - DNA, 25 bp, Probe Sequence
gcagagtgctgagaccgggaggggc

SEQ ID NO: 214732 - DNA, 25 bp, Probe Sequence
gcagactgggattttgaggtggggc

SEQ ID NO: 214733 - DNA, 25 bp, Probe Sequence
gcagtctgggagtctttggagtaag

SEQ ID NO: 214734 - DNA, 25 bp, Probe Sequence
gcagtggggaccttattgatgaaag

SEQ ID NO: 214735 - DNA, 25 bp, Probe Sequence
gcagagggtactttcttatgctgga

SEQ ID NO: 214736 - DNA, 25 bp, Probe Sequence
gcagagggacaagcatttcatcttg

SEQ ID NO: 214737 - DNA, 25 bp, Probe Sequence
gcagtgcatcgaaaccttttgcttg

SEQ ID NO: 214738 - DNA, 25 bp, Probe Sequence
gcagtagcgacatctcattttgaag

SEQ ID NO: 214739 - DNA, 25 bp, Probe Sequence
gcagttggatcagctcctttacaaa

SEQ ID NO: 214740 - DNA, 25 bp, Probe Sequence
gcagtctgtgaaggcgcacttcttc

SEQ ID NO: 214741 - DNA, 25 bp, Probe Sequence
gcagttacaagggcctgcatcatct

SEQ ID NO: 214742 - DNA, 25 bp, Probe Sequence
gcacttacagataggccttcttgtg

SEQ ID NO: 214743 - DNA, 25 bp, Probe Sequence
gcagatttcagtctgacatttattc

SEQ ID NO: 214744 - DNA, 25 bp, Probe Sequence
gcagatgcttttctcaaactttcct

SEQ ID NO: 214745 - DNA, 25 bp, Probe Sequence
gcagtgctggttctccaacagagtg

SEQ ID NO: 214746 - DNA, 25 bp, Probe Sequence
gcagtgcttgttgttgctgagcagg

SEQ ID NO: 214747 - DNA, 25 bp, Probe Sequence
gcagtgtataatttctgtctacagc

SEQ ID NO: 214748 - DNA, 25 bp, Probe Sequence
gcagtggaaatccctgatctgattc

SEQ ID NO: 214749 - DNA, 25 bp, Probe Sequence
gcagtgagcacatctagctgacgat

SEQ ID NO: 214750 - DNA, 25 bp, Probe Sequence
gcagaggaacagccagcagaagatg

SEQ ID NO: 214751 - DNA, 25 bp, Probe Sequence
gcaacgtactggccgccatgaggaa

SEQ ID NO: 214752 - DNA, 25 bp, Probe Sequence
gcaacgtgatggaggacttggggga

SEQ ID NO: 214753 - DNA, 25 bp, Probe Sequence
gcaacgtccgacagaacgaggggac

SEQ ID NO: 214754 - DNA, 25 bp, Probe Sequence
gcaagaccatggattaccggggaac

SEQ ID NO: 214755 - DNA, 25 bp, Probe Sequence
gcagaacactaacctgaccgtgggc

SEQ ID NO: 214756 - DNA, 25 bp, Probe Sequence
gcagaaacacaagcggctctatgag

SEQ ID NO: 214757 - DNA, 25 bp, Probe Sequence
gcagaaccattaggcaggtctttac

SEQ ID NO: 214758 - DNA, 25 bp, Probe Sequence
gcagacatcgcaacgctgaggattc

SEQ ID NO: 214759 - DNA, 25 bp, Probe Sequence
gcagacatcgcaacgctgaggattc

SEQ ID NO: 214760 - DNA, 25 bp, Probe Sequence
gcagaatagccatgctagagcccct

SEQ ID NO: 214761 - DNA, 25 bp, Probe Sequence
gcagacatagctgcttcagtgcccc

SEQ ID NO: 214762 - DNA, 25 bp, Probe Sequence
gcagatagactgcttgaacccagga

SEQ ID NO: 214763 - DNA, 25 bp, Probe Sequence
gcagaaggactcctatatcgccagc

SEQ ID NO: 214764 - DNA, 25 bp, Probe Sequence
gcagtcaggagctgttcaggcttct

SEQ ID NO: 214765 - DNA, 25 bp, Probe Sequence
gcagtagtgaccttctcaagctgtc

SEQ ID NO: 214766 - DNA, 25 bp, Probe Sequence
gcagtcaggggcagctgaccatgga

SEQ ID NO: 214767 - DNA, 25 bp, Probe Sequence
gcactcagggacatgaacagtatga

SEQ ID NO: 214768 - DNA, 25 bp, Probe Sequence
gcacctgtagagatcaccaatctgg

SEQ ID NO: 214769 - DNA, 25 bp, Probe Sequence
gcagttgtatgatctcggcacactg

SEQ ID NO: 214770 - DNA, 25 bp, Probe Sequence
gcagtgtcctgtcttgagccactgc

SEQ ID NO: 214771 - DNA, 25 bp, Probe Sequence
gcagtgtacttttggctgccaatgt

SEQ ID NO: 214772 - DNA, 25 bp, Probe Sequence
gcagtacacttgctggtctaggtat

SEQ ID NO: 214773 - DNA, 25 bp, Probe Sequence
gcagttaacatgcatgggctggttt

SEQ ID NO: 214774 - DNA, 25 bp, Probe Sequence
gcagtctgaaagctgaatcacaatt

SEQ ID NO: 214775 - DNA, 25 bp, Probe Sequence
gcagtcagaacacttgcttcactag

SEQ ID NO: 214776 - DNA, 25 bp, Probe Sequence
gcaccacaaccgacttcatcaagtc

SEQ ID NO: 214777 - DNA, 25 bp, Probe Sequence
gcaccacaaccgacttcatcaagtc

SEQ ID NO: 214778 - DNA, 25 bp, Probe Sequence
gcaagctaaccttatcctgcattgt

SEQ ID NO: 214779 - DNA, 25 bp, Probe Sequence
gcagacatgaatacatttcccacct

SEQ ID NO: 214780 - DNA, 25 bp, Probe Sequence
gcagacaagaatgtgcccaaccttc

SEQ ID NO: 214781 - DNA, 25 bp, Probe Sequence
gcagagctagaaaagcctagaggct

SEQ ID NO: 214782 - DNA, 25 bp, Probe Sequence
gcagagcaggccgaacgctatgagg

SEQ ID NO: 214783 - DNA, 25 bp, Probe Sequence
gcagatggccaagacgctgagcgag

SEQ ID NO: 214784 - DNA, 25 bp, Probe Sequence
gcagtgagccaagatcgcccatggc

SEQ ID NO: 214785 - DNA, 25 bp, Probe Sequence
gcagtgagccaagatcaagccattg

SEQ ID NO: 214786 - DNA, 25 bp, Probe Sequence
gcagtgagccaagatcaagccattg

SEQ ID NO: 214787 - DNA, 25 bp, Probe Sequence
gcagtgagccgagatggtgccactg

SEQ ID NO: 214788 - DNA, 25 bp, Probe Sequence
gcagtgagccgagatggtgccactg

SEQ ID NO: 214789 - DNA, 25 bp, Probe Sequence
gcagtgagccgagattgtgccactg

SEQ ID NO: 214790 - DNA, 25 bp, Probe Sequence
gcagtgatcccagatcatggccact

SEQ ID NO: 214791 - DNA, 25 bp, Probe Sequence
gcagtatgcccagcagtggaaccag

SEQ ID NO: 214792 - DNA, 25 bp, Probe Sequence
gcagtatgcccagcagtggaaccag

SEQ ID NO: 214793 - DNA, 25 bp, Probe Sequence
gcaccatcagccacgggatcgtgga

SEQ ID NO: 214794 - DNA, 25 bp, Probe Sequence
gcagacgctgccacggagatcgtgg

SEQ ID NO: 214795 - DNA, 25 bp, Probe Sequence
gcagacctagccatgggcacaagag

SEQ ID NO: 214796 - DNA, 25 bp, Probe Sequence
gcagactataccactggtcaggtct

SEQ ID NO: 214797 - DNA, 25 bp, Probe Sequence
gcagatccaagttttgcggggtcta

SEQ ID NO: 214798 - DNA, 25 bp, Probe Sequence
gcagatctcagacagtgtgcggcgg

SEQ ID NO: 214799 - DNA, 25 bp, Probe Sequence
gcagatgctaagtggtggggatgag

SEQ ID NO: 214800 - DNA, 25 bp, Probe Sequence
gcagtacatcaatgggcgtggatag

SEQ ID NO: 214801 - DNA, 25 bp, Probe Sequence
gcagtacatcaatgggcgtggatag

SEQ ID NO: 214802 - DNA, 25 bp, Probe Sequence
gcagtacatcaatgggcgtggatag

SEQ ID NO: 214803 - DNA, 25 bp, Probe Sequence
gcagtacatacatgggcgtgatagc

SEQ ID NO: 214804 - DNA, 25 bp, Probe Sequence
gcagtacattccaagggtgatcata

SEQ ID NO: 214805 - DNA, 25 bp, Probe Sequence
gcagtgacagtgcccagggctctga

SEQ ID NO: 214806 - DNA, 25 bp, Probe Sequence
gcagagaagcttcatcaagccatga

SEQ ID NO: 214807 - DNA, 25 bp, Probe Sequence
gcagtgagtgttcatagcagtagca

SEQ ID NO: 214808 - DNA, 25 bp, Probe Sequence
gcagtaattatgttccagattgacc

SEQ ID NO: 214809 - DNA, 25 bp, Probe Sequence
gcagaaatcctatttcagtggacca

SEQ ID NO: 214810 - DNA, 25 bp, Probe Sequence
gcagaaatttaaacacatgttccat

SEQ ID NO: 214811 - DNA, 25 bp, Probe Sequence
gcagacggttaaatgattttgctag

SEQ ID NO: 214812 - DNA, 25 bp, Probe Sequence
gcagacggttaaatgattttgctag

SEQ ID NO: 214813 - DNA, 25 bp, Probe Sequence
gcagagttgtttaagtggttctagc

SEQ ID NO: 214814 - DNA, 25 bp, Probe Sequence
gcacagtttttgcgtcttgtttgct

SEQ ID NO: 214815 - DNA, 25 bp, Probe Sequence
gcaagcttttttattttttatacag

SEQ ID NO: 214816 - DNA, 25 bp, Probe Sequence
gcagactttgtatttatgttccttt

SEQ ID NO: 214817 - DNA, 25 bp, Probe Sequence
gcagtctactagattgtgatccctt

SEQ ID NO: 214818 - DNA, 25 bp, Probe Sequence
gcagttatccatcttggtgcatcct

SEQ ID NO: 214819 - DNA, 25 bp, Probe Sequence
gcagctttcctgacatgcaaggatc

SEQ ID NO: 214820 - DNA, 25 bp, Probe Sequence
gcagagttcagcaatatgataggga

SEQ ID NO: 214821 - DNA, 25 bp, Probe Sequence
gcagagttcaggcagtaatgtgagc

SEQ ID NO: 214822 - DNA, 25 bp, Probe Sequence
gcagattgctcgggatgttgatgga

SEQ ID NO: 214823 - DNA, 25 bp, Probe Sequence
gcagatctctctgggattgcttcgg

SEQ ID NO: 214824 - DNA, 25 bp, Probe Sequence
gcagaccattgggaattcctgtggc

SEQ ID NO: 214825 - DNA, 25 bp, Probe Sequence
gcagactccggtcattactgtgtct

SEQ ID NO: 214826 - DNA, 25 bp, Probe Sequence
gcagcactccaactagaatactttt

SEQ ID NO: 214827 - DNA, 25 bp, Probe Sequence
gcagctgagtacttaaattcttttt

SEQ ID NO: 214828 - DNA, 25 bp, Probe Sequence
gcagctagctacgcaatgtgcctgt

SEQ ID NO: 214829 - DNA, 25 bp, Probe Sequence
gcagccatcattgtgcttggctttg

SEQ ID NO: 214830 - DNA, 25 bp, Probe Sequence
gcagctgcacctatgattggttatc

SEQ ID NO: 214831 - DNA, 25 bp, Probe Sequence
gcagtttgtttgatttatacttttg

SEQ ID NO: 214832 - DNA, 25 bp, Probe Sequence
gcagtttatttgtagtttctctctt

SEQ ID NO: 214833 - DNA, 25 bp, Probe Sequence
gcagtttttttactattccatcatg

SEQ ID NO: 214834 - DNA, 25 bp, Probe Sequence
gcagttttctcttttgattcaatta

SEQ ID NO: 214835 - DNA, 25 bp, Probe Sequence
gcagaaattccctactgttatttat

SEQ ID NO: 214836 - DNA, 25 bp, Probe Sequence
gcagtatttcagcctgattgtgttt

SEQ ID NO: 214837 - DNA, 25 bp, Probe Sequence
gcagattaatccctctttttgtgac

SEQ ID NO: 214838 - DNA, 25 bp, Probe Sequence
gcagatttatgccttattttttagc

SEQ ID NO: 214839 - DNA, 25 bp, Probe Sequence
gcagttaagtcttatttcattcaga

SEQ ID NO: 214840 - DNA, 25 bp, Probe Sequence
gcagtttaaagattttcaacgacga

SEQ ID NO: 214841 - DNA, 25 bp, Probe Sequence
gcagttttaatttttagcctaccat

SEQ ID NO: 214842 - DNA, 25 bp, Probe Sequence
gcagtctttgattattttgtggtcc

SEQ ID NO: 214843 - DNA, 25 bp, Probe Sequence
gcagttgttattacatccttgtggc

SEQ ID NO: 214844 - DNA, 25 bp, Probe Sequence
gcagtagatttaactgatctctgag

SEQ ID NO: 214845 - DNA, 25 bp, Probe Sequence
gcagtaggtaagtctgatcagtttg

SEQ ID NO: 214846 - DNA, 25 bp, Probe Sequence
gcagatatggagagagctgacaatc

SEQ ID NO: 214847 - DNA, 25 bp, Probe Sequence
gcagataggaaggagcagacattaa

SEQ ID NO: 214848 - DNA, 25 bp, Probe Sequence
gcagtaggcaaggagaacccattgg

SEQ ID NO: 214849 - DNA, 25 bp, Probe Sequence
gcaatcagtgaagaaaaactccgtg

SEQ ID NO: 214850 - DNA, 25 bp, Probe Sequence
gcagaagctaaagccaaagcccaag

SEQ ID NO: 214851 - DNA, 25 bp, Probe Sequence
gcagacagccattgacctaaacgcc

SEQ ID NO: 214852 - DNA, 25 bp, Probe Sequence
gcagtcatcctcaaccaagaaatcc

SEQ ID NO: 214853 - DNA, 25 bp, Probe Sequence
gcagtcatcctcaaccaagaaatcc

SEQ ID NO: 214854 - DNA, 25 bp, Probe Sequence
gcagtcatcctcaaccaagaaatcc

SEQ ID NO: 214855 - DNA, 25 bp, Probe Sequence
gcagtcagccaaagataaacaacca

SEQ ID NO: 214856 - DNA, 25 bp, Probe Sequence
gcagtcatgcacgctgataaaaaaa

SEQ ID NO: 214857 - DNA, 25 bp, Probe Sequence
gcagagcatcaaattaaacagacag

SEQ ID NO: 214858 - DNA, 25 bp, Probe Sequence
gcagagctcacagatgagaaacgcc

SEQ ID NO: 214859 - DNA, 25 bp, Probe Sequence
gcagagcgacaagaagctcacccag

SEQ ID NO: 214860 - DNA, 25 bp, Probe Sequence
gcagcggcactacaagccaaatcag

SEQ ID NO: 214861 - DNA, 25 bp, Probe Sequence
gcagccaagctacatccagaattag

SEQ ID NO: 214862 - DNA, 25 bp, Probe Sequence
gcaccaagtctattacaggcatggt

SEQ ID NO: 214863 - DNA, 25 bp, Probe Sequence
gcagaacgttcatttcaggagcttc

SEQ ID NO: 214864 - DNA, 25 bp, Probe Sequence
gcagtccctgtgactgtcatggagc

SEQ ID NO: 214865 - DNA, 25 bp, Probe Sequence
gcagctctcactttctttgagctcc

SEQ ID NO: 214866 - DNA, 25 bp, Probe Sequence
gcagttccttgctaatctgagctac

SEQ ID NO: 214867 - DNA, 25 bp, Probe Sequence
gcagttgcctatgtttagcaaattt

SEQ ID NO: 214868 - DNA, 25 bp, Probe Sequence
gtctgggttgacctaggccaattct

SEQ ID NO: 214869 - DNA, 25 bp, Probe Sequence
gggctgggtacactggggaatgtta

SEQ ID NO: 214870 - DNA, 25 bp, Probe Sequence
gcagagctgaggcacactggtgttt

SEQ ID NO: 214871 - DNA, 25 bp, Probe Sequence
gcagagtgaactacagcagtgatct

SEQ ID NO: 214872 - DNA, 25 bp, Probe Sequence
gcagattgtaatccagtcttctggt

SEQ ID NO: 214873 - DNA, 25 bp, Probe Sequence
gcagatttatactcctgacgtgtct

SEQ ID NO: 214874 - DNA, 25 bp, Probe Sequence
gcagtatttgagcagggacagtcat

SEQ ID NO: 214875 - DNA, 25 bp, Probe Sequence
gcagtatttgagcagggacagtcat

SEQ ID NO: 214876 - DNA, 25 bp, Probe Sequence
gcagtaatgtgactaggtacatgta

SEQ ID NO: 214877 - DNA, 25 bp, Probe Sequence
gcagtagctgcttttgtcataaata

SEQ ID NO: 214878 - DNA, 25 bp, Probe Sequence
gcagagaatcttttgcactaagtca

SEQ ID NO: 214879 - DNA, 25 bp, Probe Sequence
gcagagcacatttgcctactaatgg

SEQ ID NO: 214880 - DNA, 25 bp, Probe Sequence
gcagatattctagcatattgtcaga

SEQ ID NO: 214881 - DNA, 25 bp, Probe Sequence
gcagtattatctccactttcaatct

SEQ ID NO: 214882 - DNA, 25 bp, Probe Sequence
gcagcaattgtccaacttcataatg

SEQ ID NO: 214883 - DNA, 25 bp, Probe Sequence
gcagcagatcgtaaccattatagac

SEQ ID NO: 214884 - DNA, 25 bp, Probe Sequence
gcagcagattgtaatccagtcttct

SEQ ID NO: 214885 - DNA, 25 bp, Probe Sequence
gcagcaatgctaaacctctgtttca

SEQ ID NO: 214886 - DNA, 25 bp, Probe Sequence
gcagagacacagatctttgttctga

SEQ ID NO: 214887 - DNA, 25 bp, Probe Sequence
tcaaaggcaaagattgttagatcag

SEQ ID NO: 214888 - DNA, 25 bp, Probe Sequence
gcagatgggcaaggtttgaatagga

SEQ ID NO: 214889 - DNA, 25 bp, Probe Sequence
gcagagggcagatgcttgatagatt

SEQ ID NO: 214890 - DNA, 25 bp, Probe Sequence
gcagatgtccagtgctggatgtaaa

SEQ ID NO: 214891 - DNA, 25 bp, Probe Sequence
gcagtactcagatgtgtgatgaatg

SEQ ID NO: 214892 - DNA, 25 bp, Probe Sequence
gcagtagcatcgatgtgctgtggat

SEQ ID NO: 214893 - DNA, 25 bp, Probe Sequence
gcagacctgtgcatgtgctatgcct

SEQ ID NO: 214894 - DNA, 25 bp, Probe Sequence
gcagactggctgaagctttgcccaa

SEQ ID NO: 214895 - DNA, 25 bp, Probe Sequence
gcagacagaggattgtgtcgtgcca

SEQ ID NO: 214896 - DNA, 25 bp, Probe Sequence
gcagatggtgagctctggttgccaa

SEQ ID NO: 214897 - DNA, 25 bp, Probe Sequence
gcagatggtgatttccctgacacca

SEQ ID NO: 214898 - DNA, 25 bp, Probe Sequence
gcagcaggtgctggacgtcgacagc

SEQ ID NO: 214899 - DNA, 25 bp, Probe Sequence
gcagcatggagccaaggtctgtccc

SEQ ID NO: 214900 - DNA, 25 bp, Probe Sequence
gcagctgaaatcggattcgtcccgc

SEQ ID NO: 214901 - DNA, 25 bp, Probe Sequence
gcagtcaagtcgtttcgttagcaca

SEQ ID NO: 214902 - DNA, 25 bp, Probe Sequence
gcagctaaggctttatctttcgaca

SEQ ID NO: 214903 - DNA, 25 bp, Probe Sequence
gcaccacggcgtttttttacaacat

SEQ ID NO: 214904 - DNA, 25 bp, Probe Sequence
gcaccagtggggcatttttacgaac

SEQ ID NO: 214905 - DNA, 25 bp, Probe Sequence
gcaccagtggggcatctttaccaaa

SEQ ID NO: 214906 - DNA, 25 bp, Probe Sequence
gcaccagtctggctttaaaccaact

SEQ ID NO: 214907 - DNA, 25 bp, Probe Sequence
gcacctgtcggaaggtcaaggccaa

SEQ ID NO: 214908 - DNA, 25 bp, Probe Sequence
gcacgcagattagcaggccaaggtc

SEQ ID NO: 214909 - DNA, 25 bp, Probe Sequence
gcagccacatttgcaaccttggcca

SEQ ID NO: 214910 - DNA, 25 bp, Probe Sequence
gcagccaaggtcagaccgggaagct

SEQ ID NO: 214911 - DNA, 25 bp, Probe Sequence
gcagccggctggaaaccgtagggag

SEQ ID NO: 214912 - DNA, 25 bp, Probe Sequence
gcagcctggaaaaacttaaggtggc

SEQ ID NO: 214913 - DNA, 25 bp, Probe Sequence
gcagccatggaagaccttacacggt

SEQ ID NO: 214914 - DNA, 25 bp, Probe Sequence
gcagccagggcttacctgtacactg

SEQ ID NO: 214915 - DNA, 25 bp, Probe Sequence
gcagaagggccatagttcatccagc

SEQ ID NO: 214916 - DNA, 25 bp, Probe Sequence
gcagaagagtgcgatcaagaaccca

SEQ ID NO: 214917 - DNA, 25 bp, Probe Sequence
gcagttgatgccattagatacccag

SEQ ID NO: 214918 - DNA, 25 bp, Probe Sequence
gcagctctagccaagtagatacttg

SEQ ID NO: 214919 - DNA, 25 bp, Probe Sequence
gcactcggctgcaaagtgaggcttc

SEQ ID NO: 214920 - DNA, 25 bp, Probe Sequence
gcagaatggctgcacgtaggttccc

SEQ ID NO: 214921 - DNA, 25 bp, Probe Sequence
gcagaatgtgatgacctggggtccc

SEQ ID NO: 214922 - DNA, 25 bp, Probe Sequence
gcacagttatcgtgaagggccccag

SEQ ID NO: 214923 - DNA, 25 bp, Probe Sequence
gcagctacttcgtggagtggatccc

SEQ ID NO: 214924 - DNA, 25 bp, Probe Sequence
gcagctacttcgtggagtggatccc

SEQ ID NO: 214925 - DNA, 25 bp, Probe Sequence
gcagtacgtgagtgtgcagaagatc

SEQ ID NO: 214926 - DNA, 25 bp, Probe Sequence
gcagtaatgtgagcaatggggagca

SEQ ID NO: 214927 - DNA, 25 bp, Probe Sequence
gcagttatttccaatgcgaagagcc

SEQ ID NO: 214928 - DNA, 25 bp, Probe Sequence
gcagtttcttgggacataggagcgc

SEQ ID NO: 214929 - DNA, 25 bp, Probe Sequence
gcagtagattgtctaaagctacagt

SEQ ID NO: 214930 - DNA, 25 bp, Probe Sequence
gcagtatatatgtgctgaaatctca

SEQ ID NO: 214931 - DNA, 25 bp, Probe Sequence
gcagttgtgaaagcaccatcatcat

SEQ ID NO: 214932 - DNA, 25 bp, Probe Sequence
gcagtatggcagtggcagcctcacc

SEQ ID NO: 214933 - DNA, 25 bp, Probe Sequence
gcagtttcagtttcagcctaagaga

SEQ ID NO: 214934 - DNA, 25 bp, Probe Sequence
gcagagttagttcagctagaagacg

SEQ ID NO: 214935 - DNA, 25 bp, Probe Sequence
gcactgtcaagtccaagtacaaggc

SEQ ID NO: 214936 - DNA, 25 bp, Probe Sequence
gcagctcctttgtaagtaccaggtc

SEQ ID NO: 214937 - DNA, 25 bp, Probe Sequence
gcagcatccttagatgggacgcata

SEQ ID NO: 214938 - DNA, 25 bp, Probe Sequence
gcacgtcttgaccttgaacgcaaag

SEQ ID NO: 214939 - DNA, 25 bp, Probe Sequence
gcactggtttttctaggaagcaggc

SEQ ID NO: 214940 - DNA, 25 bp, Probe Sequence
gcagcggttattcggtgagcggtgg

SEQ ID NO: 214941 - DNA, 25 bp, Probe Sequence
gcagcgggaatgagcggggatgccg

SEQ ID NO: 214942 - DNA, 25 bp, Probe Sequence
gcagagggcaagggaggggtggtat

SEQ ID NO: 214943 - DNA, 25 bp, Probe Sequence
gcagaagtccagcgggggtgggaga

SEQ ID NO: 214944 - DNA, 25 bp, Probe Sequence
gcagaactgaagcggggtctgggcc

SEQ ID NO: 214945 - DNA, 25 bp, Probe Sequence
gcagaaagagggctagtcactgggc

SEQ ID NO: 214946 - DNA, 25 bp, Probe Sequence
gcagaaagggccttgaatcctggcc

SEQ ID NO: 214947 - DNA, 25 bp, Probe Sequence
gcagaagatgggcctccagaactcc

SEQ ID NO: 214948 - DNA, 25 bp, Probe Sequence
gcagacaaggtcccaaagacagcag

SEQ ID NO: 214949 - DNA, 25 bp, Probe Sequence
gcagaagccttcctcaagaaagctg

SEQ ID NO: 214950 - DNA, 25 bp, Probe Sequence
gcagattcactttataggaacagct

SEQ ID NO: 214951 - DNA, 25 bp, Probe Sequence
gcagttagctcatttgagataaagt

SEQ ID NO: 214952 - DNA, 25 bp, Probe Sequence
gcagttcaacatgatggagaacgcc

SEQ ID NO: 214953 - DNA, 25 bp, Probe Sequence
gcagttcgaaggtctgctgggcacc

SEQ ID NO: 214954 - DNA, 25 bp, Probe Sequence
gcagtttgaggagctgctgcgcctc

SEQ ID NO: 214955 - DNA, 25 bp, Probe Sequence
gcagtttagtaggcttagatctcaa

SEQ ID NO: 214956 - DNA, 25 bp, Probe Sequence
gcagatttcagtagtcaagactcca

SEQ ID NO: 214957 - DNA, 25 bp, Probe Sequence
gcagttggagctgatcacaacccag

SEQ ID NO: 214958 - DNA, 25 bp, Probe Sequence
gcagactttgctgataaactcaatg

SEQ ID NO: 214959 - DNA, 25 bp, Probe Sequence
gcagacttctctgtagatcgctgag

SEQ ID NO: 214960 - DNA, 25 bp, Probe Sequence
gcagttcttctcatagatagctgta

SEQ ID NO: 214961 - DNA, 25 bp, Probe Sequence
gcagttcagtgcctttgttggtagt

SEQ ID NO: 214962 - DNA, 25 bp, Probe Sequence
gcagttacagcaccattgttttagc

SEQ ID NO: 214963 - DNA, 25 bp, Probe Sequence
gcagaataccacgatgacttcttcc

SEQ ID NO: 214964 - DNA, 25 bp, Probe Sequence
gcagaattcccgtactgattagtca

SEQ ID NO: 214965 - DNA, 25 bp, Probe Sequence
gcagcagttccgctttatctattac

SEQ ID NO: 214966 - DNA, 25 bp, Probe Sequence
gcagcagttccgctttatctattac

SEQ ID NO: 214967 - DNA, 25 bp, Probe Sequence
gcagagtctttgctgtgctttaatt

SEQ ID NO: 214968 - DNA, 25 bp, Probe Sequence
gcagagtgatttcagcttccaaact

SEQ ID NO: 214969 - DNA, 25 bp, Probe Sequence
gcagataattatccaggcttaaagt

SEQ ID NO: 214970 - DNA, 25 bp, Probe Sequence
gcagatgacatttgccttgcctgaa

SEQ ID NO: 214971 - DNA, 25 bp, Probe Sequence
gcagatgattgctaattccttgaag

SEQ ID NO: 214972 - DNA, 25 bp, Probe Sequence
gcagtatgacaattcttgctagaga

SEQ ID NO: 214973 - DNA, 25 bp, Probe Sequence
gcagtatgcccacatttatgccacc

SEQ ID NO: 214974 - DNA, 25 bp, Probe Sequence
gcagttcctaaatgattctcacaag

SEQ ID NO: 214975 - DNA, 25 bp, Probe Sequence
gcagcagttcctaaatgattctcac

SEQ ID NO: 214976 - DNA, 25 bp, Probe Sequence
gcagatgtttcttgaatgctttgtc

SEQ ID NO: 214977 - DNA, 25 bp, Probe Sequence
gcagagtttctctatcgcattggtc

SEQ ID NO: 214978 - DNA, 25 bp, Probe Sequence
gcagagtgtcgatatcgcagctttc

SEQ ID NO: 214979 - DNA, 25 bp, Probe Sequence
gcagagtgtctctggcacagtttgc

SEQ ID NO: 214980 - DNA, 25 bp, Probe Sequence
gcaagatgcaactggagagctttgg

SEQ ID NO: 214981 - DNA, 25 bp, Probe Sequence
gcagatatcacctggatccttagca

SEQ ID NO: 214982 - DNA, 25 bp, Probe Sequence
gcagatgtccactgtttctctgcat

SEQ ID NO: 214983 - DNA, 25 bp, Probe Sequence
gcagacatggcatctgttccttgct

SEQ ID NO: 214984 - DNA, 25 bp, Probe Sequence
gcagacatggcatctgttccttgct

SEQ ID NO: 214985 - DNA, 25 bp, Probe Sequence
gcagacatggcatctgttccttgct

SEQ ID NO: 214986 - DNA, 25 bp, Probe Sequence
gcagaacctgaacgacctgatgctg

SEQ ID NO: 214987 - DNA, 25 bp, Probe Sequence
gcagatcaacaggatggagctcttc

SEQ ID NO: 214988 - DNA, 25 bp, Probe Sequence
gcagaccagcagtgggctgttctgc

SEQ ID NO: 214989 - DNA, 25 bp, Probe Sequence
gcagcatcctgagtggtgggtaccc

SEQ ID NO: 214990 - DNA, 25 bp, Probe Sequence
gcagacgttctggagaaggcaacac

SEQ ID NO: 214991 - DNA, 25 bp, Probe Sequence
gcagactggtctgaaggtgtacagg

SEQ ID NO: 214992 - DNA, 25 bp, Probe Sequence
gcagcactagttggacaggggagcc

SEQ ID NO: 214993 - DNA, 25 bp, Probe Sequence
gcagcactgtgtttacaggggggag

SEQ ID NO: 214994 - DNA, 25 bp, Probe Sequence
gcagagtgcttcttattcggcaggg

SEQ ID NO: 214995 - DNA, 25 bp, Probe Sequence
gcaaggtctattatcccaacagaag

SEQ ID NO: 214996 - DNA, 25 bp, Probe Sequence
gcagcaggtgcttttttcaagacag

SEQ ID NO: 214997 - DNA, 25 bp, Probe Sequence
gcagatggtgctttttacccagatg

SEQ ID NO: 214998 - DNA, 25 bp, Probe Sequence
gcagatggtgctttttacccagatg

SEQ ID NO: 214999 - DNA, 25 bp, Probe Sequence
gcagaggtgtttaagagcccagaaa

SEQ ID NO: 215000 - DNA, 25 bp, Probe Sequence
gcagaggtttactaggccaaagaaa

SEQ ID NO: 215001 - DNA, 25 bp, Probe Sequence
gcagaagttttcagggcattaaata

SEQ ID NO: 215002 - DNA, 25 bp, Probe Sequence
gcagattttttcagaggtgacaatt

SEQ ID NO: 215003 - DNA, 25 bp, Probe Sequence
gcagaaatttacacagagcatgaaa

SEQ ID NO: 215004 - DNA, 25 bp, Probe Sequence
gcagatattgtttcaatcagagcag

SEQ ID NO: 215005 - DNA, 25 bp, Probe Sequence
gcagattctcatccccatagatgca

SEQ ID NO: 215006 - DNA, 25 bp, Probe Sequence
gcagaatattgtcctcattgcatgt

SEQ ID NO: 215007 - DNA, 25 bp, Probe Sequence
gcagaggttagtagcatgcgctgtg

SEQ ID NO: 215008 - DNA, 25 bp, Probe Sequence
gcagaggttgcagtgagctggggtc

SEQ ID NO: 215009 - DNA, 25 bp, Probe Sequence
gcagagtgtcacggagatgggaccc

SEQ ID NO: 215010 - DNA, 25 bp, Probe Sequence
gcagaagtaggcgtatgggataact

SEQ ID NO: 215011 - DNA, 25 bp, Probe Sequence
gcagatctgtagccagtcagaggag

SEQ ID NO: 215012 - DNA, 25 bp, Probe Sequence
gcagatcatctgtggtcaggcgttc

SEQ ID NO: 215013 - DNA, 25 bp, Probe Sequence
gcagatatctgcatgtgtcatgaag

SEQ ID NO: 215014 - DNA, 25 bp, Probe Sequence
gcagatgatcacatttatggagatt

SEQ ID NO: 215015 - DNA, 25 bp, Probe Sequence
gcagatcaagcgccagaatggagat

SEQ ID NO: 215016 - DNA, 25 bp, Probe Sequence
gcagataagcagacactccagagtg

SEQ ID NO: 215017 - DNA, 25 bp, Probe Sequence
gcagcaggagcgacactaccagctg

SEQ ID NO: 215018 - DNA, 25 bp, Probe Sequence
gcagagggctgggaactgcgcttgc

SEQ ID NO: 215019 - DNA, 25 bp, Probe Sequence
gcagactcagctcgtgacattctga

SEQ ID NO: 215020 - DNA, 25 bp, Probe Sequence
gcagactctcatcatgcaaattagc

SEQ ID NO: 215021 - DNA, 25 bp, Probe Sequence
gcagagttatcattaaagtcacttg

SEQ ID NO: 215022 - DNA, 25 bp, Probe Sequence
gcagatttcgaatatagctatcatt

SEQ ID NO: 215023 - DNA, 25 bp, Probe Sequence
gcagactcctgaaacagactactct

SEQ ID NO: 215024 - DNA, 25 bp, Probe Sequence
gcagcaccgtgaagacgaatatgat

SEQ ID NO: 215025 - DNA, 25 bp, Probe Sequence
gcagcaatggtaagcgtaaagtttt

SEQ ID NO: 215026 - DNA, 25 bp, Probe Sequence
gcagatcaggacacttagcaaatgt

SEQ ID NO: 215027 - DNA, 25 bp, Probe Sequence
gcagacacacctgttggaaatgatc

SEQ ID NO: 215028 - DNA, 25 bp, Probe Sequence
gcagaccgctcgggcatggagaatt

SEQ ID NO: 215029 - DNA, 25 bp, Probe Sequence
gcagagagcagcgccgatgtgaaga

SEQ ID NO: 215030 - DNA, 25 bp, Probe Sequence
gcagagagcagcgccgatgtgaaga

SEQ ID NO: 215031 - DNA, 25 bp, Probe Sequence
gcagatgcagcagatccgcatgtcc

SEQ ID NO: 215032 - DNA, 25 bp, Probe Sequence
gcagcaagcatctatgctgccagtg

SEQ ID NO: 215033 - DNA, 25 bp, Probe Sequence
gcagatagctcatggctagcatatg

SEQ ID NO: 215034 - DNA, 25 bp, Probe Sequence
gcagatcactttagccacagtgttt

SEQ ID NO: 215035 - DNA, 25 bp, Probe Sequence
gcagatagctattcattccagattt

SEQ ID NO: 215036 - DNA, 25 bp, Probe Sequence
gcagaactgcagtcactgcacgttt

SEQ ID NO: 215037 - DNA, 25 bp, Probe Sequence
gcagagcagctccctcgctgcgatc

SEQ ID NO: 215038 - DNA, 25 bp, Probe Sequence
gcagagcagatgatcggagcagcat

SEQ ID NO: 215039 - DNA, 25 bp, Probe Sequence
gcagaggatgacgaggatgatgaca

SEQ ID NO: 215040 - DNA, 25 bp, Probe Sequence
gcagaggatgacgaggatgatgaca

SEQ ID NO: 215041 - DNA, 25 bp, Probe Sequence
gcagagggactcggagatcatgcag

SEQ ID NO: 215042 - DNA, 25 bp, Probe Sequence
gcagaaggactcaacagcatctcag

SEQ ID NO: 215043 - DNA, 25 bp, Probe Sequence
gcagagacagacaaagcgttaggag

SEQ ID NO: 215044 - DNA, 25 bp, Probe Sequence
gcagaacaaacaaggcattcatggg

SEQ ID NO: 215045 - DNA, 25 bp, Probe Sequence
gcagaaataagcagcctccagcgag

SEQ ID NO: 215046 - DNA, 25 bp, Probe Sequence
gcagatgtgataagtccccgagggc

SEQ ID NO: 215047 - DNA, 25 bp, Probe Sequence
gcagattgagtacccagcacgagga

SEQ ID NO: 215048 - DNA, 25 bp, Probe Sequence
gcagttcgtggcacaagcaggtgaa

SEQ ID NO: 215049 - DNA, 25 bp, Probe Sequence
gcagttcggggacagcaatagaagg

SEQ ID NO: 215050 - DNA, 25 bp, Probe Sequence
gcagttgcaggcagacggagcagag

SEQ ID NO: 215051 - DNA, 25 bp, Probe Sequence
gcagattgagtgatgctggggcaga

SEQ ID NO: 215052 - DNA, 25 bp, Probe Sequence
gcagattgagtgatgctgggcagag

SEQ ID NO: 215053 - DNA, 25 bp, Probe Sequence
gcagatcggctgagcagatctcaga

SEQ ID NO: 215054 - DNA, 25 bp, Probe Sequence
gcagacgcacatgctggatgtcatg

SEQ ID NO: 215055 - DNA, 25 bp, Probe Sequence
gcagacagcagctcagctgattctg

SEQ ID NO: 215056 - DNA, 25 bp, Probe Sequence
gcagacagcacacgaaatactattt

SEQ ID NO: 215057 - DNA, 25 bp, Probe Sequence
gcagctgctacacaacaagttcgtg

SEQ ID NO: 215058 - DNA, 25 bp, Probe Sequence
gcagcgcaaacagaacttctctggg

SEQ ID NO: 215059 - DNA, 25 bp, Probe Sequence
gcagacaaatatgcagcacttgcta

SEQ ID NO: 215060 - DNA, 25 bp, Probe Sequence
gcagaaatccagaagcatccttaat

SEQ ID NO: 215061 - DNA, 25 bp, Probe Sequence
gcagaacataaaacatccttacttt

SEQ ID NO: 215062 - DNA, 25 bp, Probe Sequence
gcaagttaaaacaacgtgaattctt

SEQ ID NO: 215063 - DNA, 25 bp, Probe Sequence
gcaagttaccaaaactgtgataacc

SEQ ID NO: 215064 - DNA, 25 bp, Probe Sequence
gcacatgtaccctagaacttaaagt

SEQ ID NO: 215065 - DNA, 25 bp, Probe Sequence
gcagagggcgctttaacttcaaaaa

SEQ ID NO: 215066 - DNA, 25 bp, Probe Sequence
gcagaggcggtcttcaacatcctgc

SEQ ID NO: 215067 - DNA, 25 bp, Probe Sequence
gcagaggacggatctagctcctgta

SEQ ID NO: 215068 - DNA, 25 bp, Probe Sequence
gcactaatctggtgtcactctctaa

SEQ ID NO: 215069 - DNA, 25 bp, Probe Sequence
gcagaaattcagtgtgtttctacag

SEQ ID NO: 215070 - DNA, 25 bp, Probe Sequence
gcagagacttagggattttaaattg

SEQ ID NO: 215071 - DNA, 25 bp, Probe Sequence
gcagcgactagggacacttgtaaat

SEQ ID NO: 215072 - DNA, 25 bp, Probe Sequence
gcaccccaagaagctattacagaga

SEQ ID NO: 215073 - DNA, 25 bp, Probe Sequence
gcaccacgtggatctatttacaagt

SEQ ID NO: 215074 - DNA, 25 bp, Probe Sequence
gcacctgctgctgcgattttaaagg

SEQ ID NO: 215075 - DNA, 25 bp, Probe Sequence
gcagccgtcgttgatgttattcggg

SEQ ID NO: 215076 - DNA, 25 bp, Probe Sequence
gcacctcctttttttagtcgagata

SEQ ID NO: 215077 - DNA, 25 bp, Probe Sequence
gcactctcggattcctttaccgaat

SEQ ID NO: 215078 - DNA, 25 bp, Probe Sequence
gcactcattttaacttaactcgttt

SEQ ID NO: 215079 - DNA, 25 bp, Probe Sequence
gcacttctgtaaacttactagcttt

SEQ ID NO: 215080 - DNA, 25 bp, Probe Sequence
gcagagctcattgaagtttctcaca

SEQ ID NO: 215081 - DNA, 25 bp, Probe Sequence
gcagagctcattgaagtttctcaca

SEQ ID NO: 215082 - DNA, 25 bp, Probe Sequence
gcagagtttgatagtctttctaaaa

SEQ ID NO: 215083 - DNA, 25 bp, Probe Sequence
gcagctgattcgagtatattgtaag

SEQ ID NO: 215084 - DNA, 25 bp, Probe Sequence
gcagcattaccagggaatttgtcag

SEQ ID NO: 215085 - DNA, 25 bp, Probe Sequence
gcagctctgacccaaatttagtccc

SEQ ID NO: 215086 - DNA, 25 bp, Probe Sequence
gcagctgcatgatctgccattctct

SEQ ID NO: 215087 - DNA, 25 bp, Probe Sequence
gcagctcaaccaacttgctgcctac

SEQ ID NO: 215088 - DNA, 25 bp, Probe Sequence
gcagctacaacatcatggatcccag

SEQ ID NO: 215089 - DNA, 25 bp, Probe Sequence
gcagaactaatggctgtgacttcag

SEQ ID NO: 215090 - DNA, 25 bp, Probe Sequence
gcagaactggatacgctgagtgaag

SEQ ID NO: 215091 - DNA, 25 bp, Probe Sequence
gcagaagctggatgcacaggtcaag

SEQ ID NO: 215092 - DNA, 25 bp, Probe Sequence
gcagatacctgctaccagtgataag

SEQ ID NO: 215093 - DNA, 25 bp, Probe Sequence
gcagacatcctgaagtagggcaact

SEQ ID NO: 215094 - DNA, 25 bp, Probe Sequence
gcagaatccagtgggtgagtgccct

SEQ ID NO: 215095 - DNA, 25 bp, Probe Sequence
gcagatatccaaagggtgcagcccc

SEQ ID NO: 215096 - DNA, 25 bp, Probe Sequence
gcagatattcaaaacgtcagcaacc

SEQ ID NO: 215097 - DNA, 25 bp, Probe Sequence
gcaccttgagataatcctacaacca

SEQ ID NO: 215098 - DNA, 25 bp, Probe Sequence
gcactgctctgaaagtttaacatac

SEQ ID NO: 215099 - DNA, 25 bp, Probe Sequence
gcagagctctcaaagctggtgaaga

SEQ ID NO: 215100 - DNA, 25 bp, Probe Sequence
gcagagcttgatcgccagtggaaga

SEQ ID NO: 215101 - DNA, 25 bp, Probe Sequence
gcagagtgtgcttggagtcagagaa

SEQ ID NO: 215102 - DNA, 25 bp, Probe Sequence
gcagaaggcacggagtcagagccaa

SEQ ID NO: 215103 - DNA, 25 bp, Probe Sequence
gcagaatgccaccaagtatggcaac

SEQ ID NO: 215104 - DNA, 25 bp, Probe Sequence
gcagagaccctgcatgtaggtcaca

SEQ ID NO: 215105 - DNA, 25 bp, Probe Sequence
gcagaaccactgcctgaagaaccag

SEQ ID NO: 215106 - DNA, 25 bp, Probe Sequence
gcagaagaccgacgaggatgactag

SEQ ID NO: 215107 - DNA, 25 bp, Probe Sequence
gcagaggcccagagacatgggccag

SEQ ID NO: 215108 - DNA, 25 bp, Probe Sequence
gcagaggctcctggtacatcgagaa

SEQ ID NO: 215109 - DNA, 25 bp, Probe Sequence
gcagatgcgcattttgatggttgga

SEQ ID NO: 215110 - DNA, 25 bp, Probe Sequence
gcagctcagatctgtgaggtggtac

SEQ ID NO: 215111 - DNA, 25 bp, Probe Sequence
gcagcagctgcttgggaaggttcag

SEQ ID NO: 215112 - DNA, 25 bp, Probe Sequence
gcagcagtattggaggggctacagg

SEQ ID NO: 215113 - DNA, 25 bp, Probe Sequence
gcagcgaactgcgacgatcacttag

SEQ ID NO: 215114 - DNA, 25 bp, Probe Sequence
gcagaacattcagaatcaggtcagc

SEQ ID NO: 215115 - DNA, 25 bp, Probe Sequence
gcagacatttcagcatatcaagagc

SEQ ID NO: 215116 - DNA, 25 bp, Probe Sequence
gcagcactcttaggcttgcttactc

SEQ ID NO: 215117 - DNA, 25 bp, Probe Sequence
gcagagctttacctcttagcacatc

SEQ ID NO: 215118 - DNA, 25 bp, Probe Sequence
gcagctgttttcacttagcatatcg

SEQ ID NO: 215119 - DNA, 25 bp, Probe Sequence
gcagctttcttaactatcctaacaa

SEQ ID NO: 215120 - DNA, 25 bp, Probe Sequence
gcagcatttaaatcttccacaaacc

SEQ ID NO: 215121 - DNA, 25 bp, Probe Sequence
gcacctgtgaagccctttaaacacc

SEQ ID NO: 215122 - DNA, 25 bp, Probe Sequence
gcacattgttagagtattatcaagt

SEQ ID NO: 215123 - DNA, 25 bp, Probe Sequence
gcaatggttatttacaagtcaatct

SEQ ID NO: 215124 - DNA, 25 bp, Probe Sequence
gcagctggtggttaacaagtggatc

SEQ ID NO: 215125 - DNA, 25 bp, Probe Sequence
gcagcggatgcgggaagccggactc

SEQ ID NO: 215126 - DNA, 25 bp, Probe Sequence
gcagctggtggaggaaacgctacct

SEQ ID NO: 215127 - DNA, 25 bp, Probe Sequence
gcagagagggtccaaacctgcacct

SEQ ID NO: 215128 - DNA, 25 bp, Probe Sequence
gcagagagggcaaaggcatcctgca

SEQ ID NO: 215129 - DNA, 25 bp, Probe Sequence
gcagaaggagatcactgccctggca

SEQ ID NO: 215130 - DNA, 25 bp, Probe Sequence
gcagaaggggacaccctggaaggtc

SEQ ID NO: 215131 - DNA, 25 bp, Probe Sequence
gcaccaggggatgcaccctgtgcta

SEQ ID NO: 215132 - DNA, 25 bp, Probe Sequence
gcaccagcggtgttcagggtgtccc

SEQ ID NO: 215133 - DNA, 25 bp, Probe Sequence
gcagacctattcccaggaagtctcc

SEQ ID NO: 215134 - DNA, 25 bp, Probe Sequence
gcagacctttcgggagaaggcagcg

SEQ ID NO: 215135 - DNA, 25 bp, Probe Sequence
gcaactcgttcctgcaggagaaggc

SEQ ID NO: 215136 - DNA, 25 bp, Probe Sequence
gcagacccttgactccaggggagat

SEQ ID NO: 215137 - DNA, 25 bp, Probe Sequence
gcagactccttcatccaggatgaga

SEQ ID NO: 215138 - DNA, 25 bp, Probe Sequence
gcagagccactatctccattgaagc

SEQ ID NO: 215139 - DNA, 25 bp, Probe Sequence
gcagagccttcgtttagtgaaccgt

SEQ ID NO: 215140 - DNA, 25 bp, Probe Sequence
gcaccactgtcgtttaccacagttt

SEQ ID NO: 215141 - DNA, 25 bp, Probe Sequence
gcacctatgattggttatccaatgc

SEQ ID NO: 215142 - DNA, 25 bp, Probe Sequence
gcagaccagactggtcttatcagcc

SEQ ID NO: 215143 - DNA, 25 bp, Probe Sequence
gcagaaaagctgctgctcctgctgc

SEQ ID NO: 215144 - DNA, 25 bp, Probe Sequence
gcagagtaagtgccgcctctgcgct

SEQ ID NO: 215145 - DNA, 25 bp, Probe Sequence
gcagaagtagatgccactgtcctcc

SEQ ID NO: 215146 - DNA, 25 bp, Probe Sequence
gcagaagctggaggcacaacgcacc

SEQ ID NO: 215147 - DNA, 25 bp, Probe Sequence
gcagctgagctgattgccaactcac

SEQ ID NO: 215148 - DNA, 25 bp, Probe Sequence
gcagatggacagttgcacacactag

SEQ ID NO: 215149 - DNA, 25 bp, Probe Sequence
gcagcagaaccactgacagagctag

SEQ ID NO: 215150 - DNA, 25 bp, Probe Sequence
gcagctgccaccttatgcagtgcat

SEQ ID NO: 215151 - DNA, 25 bp, Probe Sequence
gcagagcatgcaggctttggtgaac

SEQ ID NO: 215152 - DNA, 25 bp, Probe Sequence
gcagagctcgttttagtgaaccgtc

SEQ ID NO: 215153 - DNA, 25 bp, Probe Sequence
gcagagctcgttttagtgaaccgtc

SEQ ID NO: 215154 - DNA, 25 bp, Probe Sequence
gcagagctcgtttagttgaaccgtc

SEQ ID NO: 215155 - DNA, 25 bp, Probe Sequence
gcagagctcgtttagtgaacccgtc

SEQ ID NO: 215156 - DNA, 25 bp, Probe Sequence
gcagagctcgtttagtgaaccgttc

SEQ ID NO: 215157 - DNA, 25 bp, Probe Sequence
gcagagctcgtgtatagtgacccgt

SEQ ID NO: 215158 - DNA, 25 bp, Probe Sequence
gcagcagctttgaacgtagcgcctg

SEQ ID NO: 215159 - DNA, 25 bp, Probe Sequence
gcagcagaagtaggcgtatgggata

SEQ ID NO: 215160 - DNA, 25 bp, Probe Sequence
gcagagaagtagtgtccaggcacat

SEQ ID NO: 215161 - DNA, 25 bp, Probe Sequence
gcagcatgaatgtgaagtgaaccca

SEQ ID NO: 215162 - DNA, 25 bp, Probe Sequence
gcagcagatggagaattacccgaaa

SEQ ID NO: 215163 - DNA, 25 bp, Probe Sequence
gcagcagtgaaccagttgtccaaga

SEQ ID NO: 215164 - DNA, 25 bp, Probe Sequence
gcagcagtgtaccagtgtcactctg

SEQ ID NO: 215165 - DNA, 25 bp, Probe Sequence
gcagctgttagaatgtgcaagcact

SEQ ID NO: 215166 - DNA, 25 bp, Probe Sequence
gcagcagtaattatggtgcactttt

SEQ ID NO: 215167 - DNA, 25 bp, Probe Sequence
gcagcagtaaatcatgtggacttca

SEQ ID NO: 215168 - DNA, 25 bp, Probe Sequence
gcagcagaaaattatgcaacactta

SEQ ID NO: 215169 - DNA, 25 bp, Probe Sequence
gcagaaacatggaatgccagacgct

SEQ ID NO: 215170 - DNA, 25 bp, Probe Sequence
gcagaaacagcagcatgctcaccct

SEQ ID NO: 215171 - DNA, 25 bp, Probe Sequence
gcagaagaagaccattactttaggc

SEQ ID NO: 215172 - DNA, 25 bp, Probe Sequence
gcagaacaagcaaaacccttacagg

SEQ ID NO: 215173 - DNA, 25 bp, Probe Sequence
gcagaactggcttgaggcctttgaa

SEQ ID NO: 215174 - DNA, 25 bp, Probe Sequence
gcagaacgctcttgaaacaagtaat

SEQ ID NO: 215175 - DNA, 25 bp, Probe Sequence
gcagcataacccttaaataatttca

SEQ ID NO: 215176 - DNA, 25 bp, Probe Sequence
gcaaacagccctaaataaatctaaa

SEQ ID NO: 215177 - DNA, 25 bp, Probe Sequence
gcagaggcagcacgtatttaatact

SEQ ID NO: 215178 - DNA, 25 bp, Probe Sequence
gcagcagcccaagtgctttaaagcc

SEQ ID NO: 215179 - DNA, 25 bp, Probe Sequence
gcactgggccaggtcttgaaggctg

SEQ ID NO: 215180 - DNA, 25 bp, Probe Sequence
gcagctcccaatgtcttacgagatg

SEQ ID NO: 215181 - DNA, 25 bp, Probe Sequence
gcagctactcgcgaggttgaggcag

SEQ ID NO: 215182 - DNA, 25 bp, Probe Sequence
gcagctactcgcgaggttgaggcag

SEQ ID NO: 215183 - DNA, 25 bp, Probe Sequence
gcagcctcttccagttgaggtgttt

SEQ ID NO: 215184 - DNA, 25 bp, Probe Sequence
gcagctgctgaaccctttagggcat

SEQ ID NO: 215185 - DNA, 25 bp, Probe Sequence
gcagccagtgctctctgtatagggc

SEQ ID NO: 215186 - DNA, 25 bp, Probe Sequence
gcagacacagaccttgtatcctggc

SEQ ID NO: 215187 - DNA, 25 bp, Probe Sequence
gcagacatcatggcgtggaacggtt

SEQ ID NO: 215188 - DNA, 25 bp, Probe Sequence
gcagcaactgctagggaaatgattt

SEQ ID NO: 215189 - DNA, 25 bp, Probe Sequence
gcagcagacgcttggtgattgaatt

SEQ ID NO: 215190 - DNA, 25 bp, Probe Sequence
gcagcaatgcagatttggtgaatat

SEQ ID NO: 215191 - DNA, 25 bp, Probe Sequence
gcagagcagctgattcgagtatatt

SEQ ID NO: 215192 - DNA, 25 bp, Probe Sequence
gcagagcacatatggggtccatttt

SEQ ID NO: 215193 - DNA, 25 bp, Probe Sequence
gcagagcctagctgtttatcctgtt

SEQ ID NO: 215194 - DNA, 25 bp, Probe Sequence
gcagacagagacctttgcttcctgt

SEQ ID NO: 215195 - DNA, 25 bp, Probe Sequence
gcagctctggacattctgtgtccct

SEQ ID NO: 215196 - DNA, 25 bp, Probe Sequence
gcagctgcggtccatcttggtcaag

SEQ ID NO: 215197 - DNA, 25 bp, Probe Sequence
gcagcctgagctacttcaagctcat

SEQ ID NO: 215198 - DNA, 25 bp, Probe Sequence
gcagccaaagacctaactcagtccc

SEQ ID NO: 215199 - DNA, 25 bp, Probe Sequence
gcagagcaccaaggtcaacctgctg

SEQ ID NO: 215200 - DNA, 25 bp, Probe Sequence
gcagaagcacaagccaaactggccg

SEQ ID NO: 215201 - DNA, 25 bp, Probe Sequence
gcagacgatcacgactcaaaagagc

SEQ ID NO: 215202 - DNA, 25 bp, Probe Sequence
gcagacatgtccgagtccaagagcg

SEQ ID NO: 215203 - DNA, 25 bp, Probe Sequence
gcagagatgcacaggctcaagagag

SEQ ID NO: 215204 - DNA, 25 bp, Probe Sequence
gcagcatatcagaaatctctagaag

SEQ ID NO: 215205 - DNA, 25 bp, Probe Sequence
gcactatgagatgctcttcaactcc

SEQ ID NO: 215206 - DNA, 25 bp, Probe Sequence
gcactttgtcgctattaacatcctt

SEQ ID NO: 215207 - DNA, 25 bp, Probe Sequence
gcacctttctgtctaaatgcgaatg

SEQ ID NO: 215208 - DNA, 25 bp, Probe Sequence
gcaacctttgtgttacagattaaaa

SEQ ID NO: 215209 - DNA, 25 bp, Probe Sequence
gcagacactcttaactgaagtaaat

SEQ ID NO: 215210 - DNA, 25 bp, Probe Sequence
gcagcatccctagtcaacaggtaaa

SEQ ID NO: 215211 - DNA, 25 bp, Probe Sequence
gcactgcagcctgggcaacagagtg

SEQ ID NO: 215212 - DNA, 25 bp, Probe Sequence
gcagctgagcctggacatcaacaaa

SEQ ID NO: 215213 - DNA, 25 bp, Probe Sequence
gcagctatgaatgcaaggccacaca

SEQ ID NO: 215214 - DNA, 25 bp, Probe Sequence
gcagctatacaaagagagccaactt

SEQ ID NO: 215215 - DNA, 25 bp, Probe Sequence
gcagcaaaccaccaagatacacatt

SEQ ID NO: 215216 - DNA, 25 bp, Probe Sequence
gcagcagataaccgcaagataactc

SEQ ID NO: 215217 - DNA, 25 bp, Probe Sequence
gcagcgaaagctctaggaacaacca

SEQ ID NO: 215218 - DNA, 25 bp, Probe Sequence
gcagagaacgcaactcaggcaccaa

SEQ ID NO: 215219 - DNA, 25 bp, Probe Sequence
gcagagaactgaagtgcagccatca

SEQ ID NO: 215220 - DNA, 25 bp, Probe Sequence
gcagcagagacgacgcctgcagcaa

SEQ ID NO: 215221 - DNA, 25 bp, Probe Sequence
gcagcatcagacacatgatccgcaa

SEQ ID NO: 215222 - DNA, 25 bp, Probe Sequence
gcagctgcgacttctgctacgaatt

SEQ ID NO: 215223 - DNA, 25 bp, Probe Sequence
gcaccatgactgtcgtactggatgt

SEQ ID NO: 215224 - DNA, 25 bp, Probe Sequence
gcagagatgaggtccttctggacta

SEQ ID NO: 215225 - DNA, 25 bp, Probe Sequence
gcagacagaagtccttgcagatgac

SEQ ID NO: 215226 - DNA, 25 bp, Probe Sequence
gcagacagagtggccatgtatgtgc

SEQ ID NO: 215227 - DNA, 25 bp, Probe Sequence
gcagcaagggcagcagagttgggtg

SEQ ID NO: 215228 - DNA, 25 bp, Probe Sequence
gcagactgctgcgaacagagtggtg

SEQ ID NO: 215229 - DNA, 25 bp, Probe Sequence
gcagctctgtctgattgaggcgcag

SEQ ID NO: 215230 - DNA, 25 bp, Probe Sequence
gcagcagtagctatggcagtggcag

SEQ ID NO: 215231 - DNA, 25 bp, Probe Sequence
gcagcagtagctatggcagtggcag

SEQ ID NO: 215232 - DNA, 25 bp, Probe Sequence
gcagcagatgtgttcttgccttgcg

SEQ ID NO: 215233 - DNA, 25 bp, Probe Sequence
gcagctgcatgggctcaaaactggc

SEQ ID NO: 215234 - DNA, 25 bp, Probe Sequence
gacgagacccaaatgatccgcgtcc

SEQ ID NO: 215235 - DNA, 25 bp, Probe Sequence
gcagcggatcctcaatagccactgc

SEQ ID NO: 215236 - DNA, 25 bp, Probe Sequence
gcagcagtgatcctctgaacctgca

SEQ ID NO: 215237 - DNA, 25 bp, Probe Sequence
gcagcagtgttcggaagaccatgtt

SEQ ID NO: 215238 - DNA, 25 bp, Probe Sequence
gcagctggtctctgaatgacgttac

SEQ ID NO: 215239 - DNA, 25 bp, Probe Sequence
gcagcatgcgattcttattgacctt

SEQ ID NO: 215240 - DNA, 25 bp, Probe Sequence
gcagagctctttatgtgacctgtca

SEQ ID NO: 215241 - DNA, 25 bp, Probe Sequence
gcagcagcctattttgagagccttc

SEQ ID NO: 215242 - DNA, 25 bp, Probe Sequence
gcagccgctttgaggatgttcgaac

SEQ ID NO: 215243 - DNA, 25 bp, Probe Sequence
gcagccgcaatggattcaagttcga

SEQ ID NO: 215244 - DNA, 25 bp, Probe Sequence
gcacggccaccatgaagtctggcaa

SEQ ID NO: 215245 - DNA, 25 bp, Probe Sequence
gcagctagccaggcaaagggggcaa

SEQ ID NO: 215246 - DNA, 25 bp, Probe Sequence
gcagcttgggccagaagtgcggaat

SEQ ID NO: 215247 - DNA, 25 bp, Probe Sequence
gcacttgaaggctggggcccaggca

SEQ ID NO: 215248 - DNA, 25 bp, Probe Sequence
gcacttgaaggctggggcccaggca

SEQ ID NO: 215249 - DNA, 25 bp, Probe Sequence
gcactttatgagggagaccccgaca

SEQ ID NO: 215250 - DNA, 25 bp, Probe Sequence
gcactgttttgggagttcctgctaa

SEQ ID NO: 215251 - DNA, 25 bp, Probe Sequence
gcactttcaagtgagctgttgcgta

SEQ ID NO: 215252 - DNA, 25 bp, Probe Sequence
gcacttcgccctgatatgtgtgctc

SEQ ID NO: 215253 - DNA, 25 bp, Probe Sequence
gcacgtaacctgcaatgtcgcttac

SEQ ID NO: 215254 - DNA, 25 bp, Probe Sequence
gcagcttcatactcgagattcacat

SEQ ID NO: 215255 - DNA, 25 bp, Probe Sequence
gcagcttatgtctagcgtgttatgc

SEQ ID NO: 215256 - DNA, 25 bp, Probe Sequence
gcagctgtcatttggctgtgcgtgc

SEQ ID NO: 215257 - DNA, 25 bp, Probe Sequence
gcagcagctatccgagctgcgggcc

SEQ ID NO: 215258 - DNA, 25 bp, Probe Sequence
gcagcgccatgaccagcaagggtcc

SEQ ID NO: 215259 - DNA, 25 bp, Probe Sequence
gcagcacactcatatcaatggtgtc

SEQ ID NO: 215260 - DNA, 25 bp, Probe Sequence
gcagccattcaagcaatcctataca

SEQ ID NO: 215261 - DNA, 25 bp, Probe Sequence
gcagctaccagaggcagtacataat

SEQ ID NO: 215262 - DNA, 25 bp, Probe Sequence
gcagctgtgccacgggtcagctgag

SEQ ID NO: 215263 - DNA, 25 bp, Probe Sequence
gcagcgcaggcacagtgacgtgaaa

SEQ ID NO: 215264 - DNA, 25 bp, Probe Sequence
gcagcgagggagctgctctgctacg

SEQ ID NO: 215265 - DNA, 25 bp, Probe Sequence
gcacgaaggcaaaccctactgcaac

SEQ ID NO: 215266 - DNA, 25 bp, Probe Sequence
gcactaaggacaaactgtcagccag

SEQ ID NO: 215267 - DNA, 25 bp, Probe Sequence
gcaccaatgccacagaggatcaccc

SEQ ID NO: 215268 - DNA, 25 bp, Probe Sequence
gcaccaatccgctgaagagctcagg

SEQ ID NO: 215269 - DNA, 25 bp, Probe Sequence
gcagctttacgtggaagagcgcgct

SEQ ID NO: 215270 - DNA, 25 bp, Probe Sequence
gcagaattattgggtagggcgggaa

SEQ ID NO: 215271 - DNA, 25 bp, Probe Sequence
gcagcaactctatggtagggggaga

SEQ ID NO: 215272 - DNA, 25 bp, Probe Sequence
gcagacctcgaaatgatagacggta

SEQ ID NO: 215273 - DNA, 25 bp, Probe Sequence
gcagactctcagtaatatcccttgt

SEQ ID NO: 215274 - DNA, 25 bp, Probe Sequence
gcagaatactgtttcccagctttta

SEQ ID NO: 215275 - DNA, 25 bp, Probe Sequence
gcagaatgattgctggccaggtttt

SEQ ID NO: 215276 - DNA, 25 bp, Probe Sequence
gcagacatcctgttagctgcaggtt

SEQ ID NO: 215277 - DNA, 25 bp, Probe Sequence
gcagagctgcattgactaccagatt

SEQ ID NO: 215278 - DNA, 25 bp, Probe Sequence
gcagcagctgggcctgaagcagcag

SEQ ID NO: 215279 - DNA, 25 bp, Probe Sequence
gcacatgctgcccatgtgacaggcc

SEQ ID NO: 215280 - DNA, 25 bp, Probe Sequence
gcacatcgctgaggattcagaccgc

SEQ ID NO: 215281 - DNA, 25 bp, Probe Sequence
gcacatcgctgaggattcagaccgc

SEQ ID NO: 215282 - DNA, 25 bp, Probe Sequence
gcaccactgcacattcaggccagtg

SEQ ID NO: 215283 - DNA, 25 bp, Probe Sequence
gcaccccagtcttcatcatctgggc

SEQ ID NO: 215284 - DNA, 25 bp, Probe Sequence
gcagcacgccagataactcagaaga

SEQ ID NO: 215285 - DNA, 25 bp, Probe Sequence
gcagccccgactattcgtgggcatg

SEQ ID NO: 215286 - DNA, 25 bp, Probe Sequence
gcagacacgccctcttagtagggac

SEQ ID NO: 215287 - DNA, 25 bp, Probe Sequence
gcaccacccctcaattattactggg

SEQ ID NO: 215288 - DNA, 25 bp, Probe Sequence
gcaatacccctatagcattaggtag

SEQ ID NO: 215289 - DNA, 25 bp, Probe Sequence
gcagcaatccttgcaaaatttggat

SEQ ID NO: 215290 - DNA, 25 bp, Probe Sequence
gcagcaaactggatggaattggaga

SEQ ID NO: 215291 - DNA, 25 bp, Probe Sequence
gcagaaagtcctgggctaggagagt

SEQ ID NO: 215292 - DNA, 25 bp, Probe Sequence
gcagagccagaccagggtggtaggc

SEQ ID NO: 215293 - DNA, 25 bp, Probe Sequence
gcagcacgcaggcggggcagtatgt

SEQ ID NO: 215294 - DNA, 25 bp, Probe Sequence
gcagctcggggaggcagatgaggag

SEQ ID NO: 215295 - DNA, 25 bp, Probe Sequence
gcagaaggagcgcctagagctggtg

SEQ ID NO: 215296 - DNA, 25 bp, Probe Sequence
gcagaacgagggccagagcagaaaa

SEQ ID NO: 215297 - DNA, 25 bp, Probe Sequence
gcagacagagaattggagtgaagaa

SEQ ID NO: 215298 - DNA, 25 bp, Probe Sequence
gcagcacaagattttgggaccacaa

SEQ ID NO: 215299 - DNA, 25 bp, Probe Sequence
gcagcacacgactctgcggagaagc

SEQ ID NO: 215300 - DNA, 25 bp, Probe Sequence
gcagaccgtcaatggagcagaggcg

SEQ ID NO: 215301 - DNA, 25 bp, Probe Sequence
gcagactgggcttagcgtgagcagg

SEQ ID NO: 215302 - DNA, 25 bp, Probe Sequence
gcagaccaagaggatgctggacatg

SEQ ID NO: 215303 - DNA, 25 bp, Probe Sequence
gcagagcccagagatggagccagct

SEQ ID NO: 215304 - DNA, 25 bp, Probe Sequence
gcagagcccagtggtctgtgaggtt

SEQ ID NO: 215305 - DNA, 25 bp, Probe Sequence
gcagagccaagcagacagtgggtct

SEQ ID NO: 215306 - DNA, 25 bp, Probe Sequence
gcagcaactagcaggcgggaatctg

SEQ ID NO: 215307 - DNA, 25 bp, Probe Sequence
gcagaatctggccatgactggcgaa

SEQ ID NO: 215308 - DNA, 25 bp, Probe Sequence
gcagaatctggtagactgctctggg

SEQ ID NO: 215309 - DNA, 25 bp, Probe Sequence
gcagaatctggtagactgctctggg

SEQ ID NO: 215310 - DNA, 25 bp, Probe Sequence
gcagaatctggtagactgctctggg

SEQ ID NO: 215311 - DNA, 25 bp, Probe Sequence
gcagacattggggttgctatgggga

SEQ ID NO: 215312 - DNA, 25 bp, Probe Sequence
gcagcagttgggtcctaatgatggc

SEQ ID NO: 215313 - DNA, 25 bp, Probe Sequence
gcagcgtatcaaactaaaaggcacc

SEQ ID NO: 215314 - DNA, 25 bp, Probe Sequence
gcagccttctactttaaagtgtcct

SEQ ID NO: 215315 - DNA, 25 bp, Probe Sequence
gcagacatcctgacattgtgacaag

SEQ ID NO: 215316 - DNA, 25 bp, Probe Sequence
gcagacagcctgtatgtagagaaga

SEQ ID NO: 215317 - DNA, 25 bp, Probe Sequence
gcagacgtctggttcaaagagttgg

SEQ ID NO: 215318 - DNA, 25 bp, Probe Sequence
gcagacttttgtagcaggcagagat

SEQ ID NO: 215319 - DNA, 25 bp, Probe Sequence
gcagcactattttcactgtcagcag

SEQ ID NO: 215320 - DNA, 25 bp, Probe Sequence
gcagacaatttttcgctccatgatg

SEQ ID NO: 215321 - DNA, 25 bp, Probe Sequence
gcagcagacatggtttaccatagat

SEQ ID NO: 215322 - DNA, 25 bp, Probe Sequence
gcagcatttgctactaaccacagat

SEQ ID NO: 215323 - DNA, 25 bp, Probe Sequence
gcagcttgatggttcaactccaatt

SEQ ID NO: 215324 - DNA, 25 bp, Probe Sequence
gcagcttgtggaacagagccacgtg

SEQ ID NO: 215325 - DNA, 25 bp, Probe Sequence
gcactgtgtagtcatggcccatgtg

SEQ ID NO: 215326 - DNA, 25 bp, Probe Sequence
gcagctgttcagccaatggtgtcag

SEQ ID NO: 215327 - DNA, 25 bp, Probe Sequence
gcagctgtgccacgaccgtggctat

SEQ ID NO: 215328 - DNA, 25 bp, Probe Sequence
gcagcttgtagaacctggcgatctc

SEQ ID NO: 215329 - DNA, 25 bp, Probe Sequence
gcagcctgattacccagggctgcca

SEQ ID NO: 215330 - DNA, 25 bp, Probe Sequence
gcagcactgattgaccacagttgcc

SEQ ID NO: 215331 - DNA, 25 bp, Probe Sequence
gcagcactaaaagcactctgagtca

SEQ ID NO: 215332 - DNA, 25 bp, Probe Sequence
gcagcactaaaagcactctgagtca

SEQ ID NO: 215333 - DNA, 25 bp, Probe Sequence
gcagcaaaggaagacttggcccagg

SEQ ID NO: 215334 - DNA, 25 bp, Probe Sequence
gcagctaaagaattccttggtgccg

SEQ ID NO: 215335 - DNA, 25 bp, Probe Sequence
gcagcgtaggagatctctgtggagc

SEQ ID NO: 215336 - DNA, 25 bp, Probe Sequence
gcagcaatgcactggttcgggagcc

SEQ ID NO: 215337 - DNA, 25 bp, Probe Sequence
gcagaagcactatgtgtacggcccc

SEQ ID NO: 215338 - DNA, 25 bp, Probe Sequence
gcagacagccgtggtgatcaccacc

SEQ ID NO: 215339 - DNA, 25 bp, Probe Sequence
gcagaagatcgtggtgcatccatac

SEQ ID NO: 215340 - DNA, 25 bp, Probe Sequence
gcagaacatggaggtcaccgatgct

SEQ ID NO: 215341 - DNA, 25 bp, Probe Sequence
gcactactggatgtcagcggagaaa

SEQ ID NO: 215342 - DNA, 25 bp, Probe Sequence
gcacatgagcatctcgggcagtagc

SEQ ID NO: 215343 - DNA, 25 bp, Probe Sequence
gcagcagcatgcacttcttggtagc

SEQ ID NO: 215344 - DNA, 25 bp, Probe Sequence
gcacgctgaatcctgctatggtacc

SEQ ID NO: 215345 - DNA, 25 bp, Probe Sequence
gcagctggattacgcaacagtaaat

SEQ ID NO: 215346 - DNA, 25 bp, Probe Sequence
gcactgaagtagcaccactaaacat

SEQ ID NO: 215347 - DNA, 25 bp, Probe Sequence
gcaccgacttctcctgtaagaaaat

SEQ ID NO: 215348 - DNA, 25 bp, Probe Sequence
gcacgggtgtcgaggcaggaaggat

SEQ ID NO: 215349 - DNA, 25 bp, Probe Sequence
gcaaggggcctgaggcctcagtggg

SEQ ID NO: 215350 - DNA, 25 bp, Probe Sequence
gcaaggggcctgaggcctcagtggg

SEQ ID NO: 215351 - DNA, 25 bp, Probe Sequence
gcaccggccaggaggcttcaagagg

SEQ ID NO: 215352 - DNA, 25 bp, Probe Sequence
gcacccctgagaaagacttcgctga

SEQ ID NO: 215353 - DNA, 25 bp, Probe Sequence
gcacccggcacagacactgtgctgg

SEQ ID NO: 215354 - DNA, 25 bp, Probe Sequence
gcacccactcgagaattggctcagc

SEQ ID NO: 215355 - DNA, 25 bp, Probe Sequence
gcagcgcatcttcgaaaacggctac

SEQ ID NO: 215356 - DNA, 25 bp, Probe Sequence
gcagcagcacttcaaactctgtttc

SEQ ID NO: 215357 - DNA, 25 bp, Probe Sequence
gcagcaacattgtaacattggtttc

SEQ ID NO: 215358 - DNA, 25 bp, Probe Sequence
gcagcaacatggtttgactccattt

SEQ ID NO: 215359 - DNA, 25 bp, Probe Sequence
gcagaaaagatttatcagccatgct

SEQ ID NO: 215360 - DNA, 25 bp, Probe Sequence
gcagcaagaagtaaaccctgtctgt

SEQ ID NO: 215361 - DNA, 25 bp, Probe Sequence
gcaccattagttaacaaagtctttg

SEQ ID NO: 215362 - DNA, 25 bp, Probe Sequence
gcaccttacttgaccatttgtttct

SEQ ID NO: 215363 - DNA, 25 bp, Probe Sequence
gcaactggccatttgccaattttcc

SEQ ID NO: 215364 - DNA, 25 bp, Probe Sequence
gcaccaggttcaaggcatttgttgc

SEQ ID NO: 215365 - DNA, 25 bp, Probe Sequence
gcaaggcgacatgcaactgttgttg

SEQ ID NO: 215366 - DNA, 25 bp, Probe Sequence
gcagctggccctgaactgggcatgg

SEQ ID NO: 215367 - DNA, 25 bp, Probe Sequence
gcaccacctctggaaatgggagggt

SEQ ID NO: 215368 - DNA, 25 bp, Probe Sequence
gcagcgggcactggcagaaggtggt

SEQ ID NO: 215369 - DNA, 25 bp, Probe Sequence
gcagcagctagccaggcaaaggggg

SEQ ID NO: 215370 - DNA, 25 bp, Probe Sequence
gcagacaggcgctggacagaggggc

SEQ ID NO: 215371 - DNA, 25 bp, Probe Sequence
gcagcatcgtggggccacagaaggc

SEQ ID NO: 215372 - DNA, 25 bp, Probe Sequence
gcagctttggagacacaaaagagac

SEQ ID NO: 215373 - DNA, 25 bp, Probe Sequence
gcagccctggacagcattaacgagc

SEQ ID NO: 215374 - DNA, 25 bp, Probe Sequence
gcaccatcaggtaactgtacccatg

SEQ ID NO: 215375 - DNA, 25 bp, Probe Sequence
gcagcacaaggaactcgaagtctct

SEQ ID NO: 215376 - DNA, 25 bp, Probe Sequence
gcagcagcaaggatccagacgaagt

SEQ ID NO: 215377 - DNA, 25 bp, Probe Sequence
gcagctgcaagggctcccaaaaaaa

SEQ ID NO: 215378 - DNA, 25 bp, Probe Sequence
gcagctgtagaaccccaggaaagaa

SEQ ID NO: 215379 - DNA, 25 bp, Probe Sequence
gcacgtgagagaccctcgcaaaatg

SEQ ID NO: 215380 - DNA, 25 bp, Probe Sequence
gcaccgatgagaactctccttattg

SEQ ID NO: 215381 - DNA, 25 bp, Probe Sequence
gcagcccatacagtctctaattatc

SEQ ID NO: 215382 - DNA, 25 bp, Probe Sequence
gcagcacagcagactagttaatcta

SEQ ID NO: 215383 - DNA, 25 bp, Probe Sequence
gcagcagaggcagattttgacatag

SEQ ID NO: 215384 - DNA, 25 bp, Probe Sequence
gcagcgtggcttctttgacaagcac

SEQ ID NO: 215385 - DNA, 25 bp, Probe Sequence
gcagctgcgtcttgttggtgataac

SEQ ID NO: 215386 - DNA, 25 bp, Probe Sequence
gcagctggccttctggactaaggca

SEQ ID NO: 215387 - DNA, 25 bp, Probe Sequence
gcagcaaccactgcagcgactaggg

SEQ ID NO: 215388 - DNA, 25 bp, Probe Sequence
gcagaaccactgacagagctagagg

SEQ ID NO: 215389 - DNA, 25 bp, Probe Sequence
gcagaagacacgtgagctgcaggag

SEQ ID NO: 215390 - DNA, 25 bp, Probe Sequence
gcagcaaattcttgagccatgaaag

SEQ ID NO: 215391 - DNA, 25 bp, Probe Sequence
gcagaacttcgccatgtgatgacaa

SEQ ID NO: 215392 - DNA, 25 bp, Probe Sequence
gcagacatcaatggcgtgaatacgt

SEQ ID NO: 215393 - DNA, 25 bp, Probe Sequence
gcagacatcaatggcgtgatacgtt

SEQ ID NO: 215394 - DNA, 25 bp, Probe Sequence
gcagactgctaaggtgaagctgtgg

SEQ ID NO: 215395 - DNA, 25 bp, Probe Sequence
gcagccgttgcaggcgaagttgatt

SEQ ID NO: 215396 - DNA, 25 bp, Probe Sequence
gcagctcttctcaaggctagttgtg

SEQ ID NO: 215397 - DNA, 25 bp, Probe Sequence
gcagcacattgtggagtgtgattct

SEQ ID NO: 215398 - DNA, 25 bp, Probe Sequence
gcagcagttggcgtggatgtcctgc

SEQ ID NO: 215399 - DNA, 25 bp, Probe Sequence
gcagcagacgtgctgtattgcccag

SEQ ID NO: 215400 - DNA, 25 bp, Probe Sequence
gcagacactgcatgtcataacccag

SEQ ID NO: 215401 - DNA, 25 bp, Probe Sequence
gcagaatggcctcataagctcacag

SEQ ID NO: 215402 - DNA, 25 bp, Probe Sequence
gcagaagtacatcggaagcacatca

SEQ ID NO: 215403 - DNA, 25 bp, Probe Sequence
gcagaagtactctgcctgactgcat

SEQ ID NO: 215404 - DNA, 25 bp, Probe Sequence
gcagaagtcaactgtgtgagtgtga

SEQ ID NO: 215405 - DNA, 25 bp, Probe Sequence
gcagaagtcaactgtgtgagtgtga

SEQ ID NO: 215406 - DNA, 25 bp, Probe Sequence
gcagacagtaacgtcagttgatgct

SEQ ID NO: 215407 - DNA, 25 bp, Probe Sequence
gcagaacaaatcgtcaggtgcctgg

SEQ ID NO: 215408 - DNA, 25 bp, Probe Sequence
gcagcccagtatggtacagagcctg

SEQ ID NO: 215409 - DNA, 25 bp, Probe Sequence
gcagctcaagttggaggctggcgtg

SEQ ID NO: 215410 - DNA, 25 bp, Probe Sequence
gcaccacagtagctggctgaagctt

SEQ ID NO: 215411 - DNA, 25 bp, Probe Sequence
gcactccaggggttgtgggtttgtc

SEQ ID NO: 215412 - DNA, 25 bp, Probe Sequence
gacggaatgggatgggggcttcggt

SEQ ID NO: 215413 - DNA, 25 bp, Probe Sequence
gaccaaaaggcatatgggtttaggt

SEQ ID NO: 215414 - DNA, 25 bp, Probe Sequence
gggcaataccgtgttggttttgact

SEQ ID NO: 215415 - DNA, 25 bp, Probe Sequence
gcaccaaaccctctgaggttttact

SEQ ID NO: 215416 - DNA, 25 bp, Probe Sequence
gcacctaaacatgtgtattttttac

SEQ ID NO: 215417 - DNA, 25 bp, Probe Sequence
gcagctttatactttttactttcaa

SEQ ID NO: 215418 - DNA, 25 bp, Probe Sequence
gaatctaaacgttggtcaccttcga

SEQ ID NO: 215419 - DNA, 25 bp, Probe Sequence
gaaataaaagggagccgcttacaag

SEQ ID NO: 215420 - DNA, 25 bp, Probe Sequence
gaaagggaaagtgtactggtacaag

SEQ ID NO: 215421 - DNA, 25 bp, Probe Sequence
gaagggaaagagggtacttgccaca

SEQ ID NO: 215422 - DNA, 25 bp, Probe Sequence
gcaaacgctaaagagcccttgcctc

SEQ ID NO: 215423 - DNA, 25 bp, Probe Sequence
gcacgtggctaatagggcctctgcc

SEQ ID NO: 215424 - DNA, 25 bp, Probe Sequence
gcactgcggcacctaagaagcctta

SEQ ID NO: 215425 - DNA, 25 bp, Probe Sequence
gcagctgcagggataaggagactaa

SEQ ID NO: 215426 - DNA, 25 bp, Probe Sequence
gcagcggttttcatggagactgtct

SEQ ID NO: 215427 - DNA, 25 bp, Probe Sequence
gcacggactcttactgctaactttt

SEQ ID NO: 215428 - DNA, 25 bp, Probe Sequence
gcagccacaccaattcctaaattgt

SEQ ID NO: 215429 - DNA, 25 bp, Probe Sequence
gcaccaagtcatgtttaaaagacca

SEQ ID NO: 215430 - DNA, 25 bp, Probe Sequence
gcagccagatacagtgttgaaaagt

SEQ ID NO: 215431 - DNA, 25 bp, Probe Sequence
gcaccatcaagcatcgtagttaaat

SEQ ID NO: 215432 - DNA, 25 bp, Probe Sequence
gcaccaaccttcgggattgaatttc

SEQ ID NO: 215433 - DNA, 25 bp, Probe Sequence
gcaccaaatttctgagctacaagtt

SEQ ID NO: 215434 - DNA, 25 bp, Probe Sequence
gcaccctactcttgctggtaaaatc

SEQ ID NO: 215435 - DNA, 25 bp, Probe Sequence
gcaccctactcttgctggtaaaatc

SEQ ID NO: 215436 - DNA, 25 bp, Probe Sequence
gcaccaccaatcgctttaatgcttc

SEQ ID NO: 215437 - DNA, 25 bp, Probe Sequence
gcaccaacagaaagcattcagggtt

SEQ ID NO: 215438 - DNA, 25 bp, Probe Sequence
gcacgaacgacatgttcttgttcaa

SEQ ID NO: 215439 - DNA, 25 bp, Probe Sequence
gcactcaactgacaggttttacaga

SEQ ID NO: 215440 - DNA, 25 bp, Probe Sequence
gcaccaaatcacgggacttccaaga

SEQ ID NO: 215441 - DNA, 25 bp, Probe Sequence
gcaccagatcaacgggactttccaa

SEQ ID NO: 215442 - DNA, 25 bp, Probe Sequence
gcaccagacacccaggacttattta

SEQ ID NO: 215443 - DNA, 25 bp, Probe Sequence
gcaccaaaccaagtgcctcatttct

SEQ ID NO: 215444 - DNA, 25 bp, Probe Sequence
gcagacaaaatcaacatggtcattt

SEQ ID NO: 215445 - DNA, 25 bp, Probe Sequence
gcagaaggatatcgacaaggatctt

SEQ ID NO: 215446 - DNA, 25 bp, Probe Sequence
gcaaaggaatcctgcaggctcttcc

SEQ ID NO: 215447 - DNA, 25 bp, Probe Sequence
gcaccagtaaacttcaagctgcttt

SEQ ID NO: 215448 - DNA, 25 bp, Probe Sequence
gcaagagaaaaatccactgccttcc

SEQ ID NO: 215449 - DNA, 25 bp, Probe Sequence
gcaaagacaaaatcttactttccag

SEQ ID NO: 215450 - DNA, 25 bp, Probe Sequence
gagggtttaaagcttacttccagtg

SEQ ID NO: 215451 - DNA, 25 bp, Probe Sequence
gagggtttaaagcttacttccagtg

SEQ ID NO: 215452 - DNA, 25 bp, Probe Sequence
gcacgtttttagagttgagttcccg

SEQ ID NO: 215453 - DNA, 25 bp, Probe Sequence
gcagccatttttcacgttgcagttg

SEQ ID NO: 215454 - DNA, 25 bp, Probe Sequence
gcagccatttttcacgttgcagttg

SEQ ID NO: 215455 - DNA, 25 bp, Probe Sequence
gcactgatttcgaccaggttcgttc

SEQ ID NO: 215456 - DNA, 25 bp, Probe Sequence
gcactgatttcgaccaggttcgttc

SEQ ID NO: 215457 - DNA, 25 bp, Probe Sequence
gcactgattcctggaggtggtcgtt

SEQ ID NO: 215458 - DNA, 25 bp, Probe Sequence
gcacatgttactgagggagatttta

SEQ ID NO: 215459 - DNA, 25 bp, Probe Sequence
gcagcctgtagtgatggggccgtaa

SEQ ID NO: 215460 - DNA, 25 bp, Probe Sequence
gcagcctgcaaacaggtgcgtcgga

SEQ ID NO: 215461 - DNA, 25 bp, Probe Sequence
gcagccgcatgaaccggatgtctcg

SEQ ID NO: 215462 - DNA, 25 bp, Probe Sequence
gcagccctgttcgagaagacgcggc

SEQ ID NO: 215463 - DNA, 25 bp, Probe Sequence
gcagcgccgaagggactggcagggc

SEQ ID NO: 215464 - DNA, 25 bp, Probe Sequence
gcagcaggctaccggacggcaggtt

SEQ ID NO: 215465 - DNA, 25 bp, Probe Sequence
gcagcaggctaccggacggcaggtt

SEQ ID NO: 215466 - DNA, 25 bp, Probe Sequence
gcagctggtaccggtccggaattcc

SEQ ID NO: 215467 - DNA, 25 bp, Probe Sequence
gcactttactatggtggggaatccc

SEQ ID NO: 215468 - DNA, 25 bp, Probe Sequence
gcactgacctttgtggagtacatcc

SEQ ID NO: 215469 - DNA, 25 bp, Probe Sequence
gcactgtcgttggcctgtagtaaag

SEQ ID NO: 215470 - DNA, 25 bp, Probe Sequence
gcacgtcgtactgatgggctaggta

SEQ ID NO: 215471 - DNA, 25 bp, Probe Sequence
gcacctttgccagagtttgagcagg

SEQ ID NO: 215472 - DNA, 25 bp, Probe Sequence
gcacctttgccagagtttgagcagg

SEQ ID NO: 215473 - DNA, 25 bp, Probe Sequence
gcacctttgccacactgagtgagct

SEQ ID NO: 215474 - DNA, 25 bp, Probe Sequence
gcacctttgccacactgagtgagct

SEQ ID NO: 215475 - DNA, 25 bp, Probe Sequence
gcacccattccaaagctttattacc

SEQ ID NO: 215476 - DNA, 25 bp, Probe Sequence
gcacttttgccatcagcttatttaa

SEQ ID NO: 215477 - DNA, 25 bp, Probe Sequence
gcacttctacactcaggtaaatgcg

SEQ ID NO: 215478 - DNA, 25 bp, Probe Sequence
gcagctttaaaatggctaaccacag

SEQ ID NO: 215479 - DNA, 25 bp, Probe Sequence
gcacttttatactaattaacccatt

SEQ ID NO: 215480 - DNA, 25 bp, Probe Sequence
gcagctgttttattgccattcaact

SEQ ID NO: 215481 - DNA, 25 bp, Probe Sequence
gcagcttttccatatcagctcaacc

SEQ ID NO: 215482 - DNA, 25 bp, Probe Sequence
gcactatctttttctcagttacctg

SEQ ID NO: 215483 - DNA, 25 bp, Probe Sequence
gcagcatgatttatactcatttggg

SEQ ID NO: 215484 - DNA, 25 bp, Probe Sequence
gcagcatgagttatactcaatttgg

SEQ ID NO: 215485 - DNA, 25 bp, Probe Sequence
gcagcatagcttgtcaataatggaa

SEQ ID NO: 215486 - DNA, 25 bp, Probe Sequence
gcagcacacgaagtcaaaagagatt

SEQ ID NO: 215487 - DNA, 25 bp, Probe Sequence
gcagcacctgacgataaaaacatac

SEQ ID NO: 215488 - DNA, 25 bp, Probe Sequence
gcagcaggcagctctggaaaatgaa

SEQ ID NO: 215489 - DNA, 25 bp, Probe Sequence
gcagcagcggctcaggacaaagggc

SEQ ID NO: 215490 - DNA, 25 bp, Probe Sequence
gcagcacgccagtggtcagaagctg

SEQ ID NO: 215491 - DNA, 25 bp, Probe Sequence
gcagcacagcgacggtgggaagatg

SEQ ID NO: 215492 - DNA, 25 bp, Probe Sequence
gcacctgcgcctgtgtggaaatttg

SEQ ID NO: 215493 - DNA, 25 bp, Probe Sequence
gcacctggccaggtgtacaaccttc

SEQ ID NO: 215494 - DNA, 25 bp, Probe Sequence
gcagcctgcagctggattacgcaac

SEQ ID NO: 215495 - DNA, 25 bp, Probe Sequence
gcagcagctaccaagaaaccagccc

SEQ ID NO: 215496 - DNA, 25 bp, Probe Sequence
gcagcagctaccaagaaaccagccc

SEQ ID NO: 215497 - DNA, 25 bp, Probe Sequence
gcagcagtattcatgatcataccaa

SEQ ID NO: 215498 - DNA, 25 bp, Probe Sequence
gcagcagtcttcataaacacattta

SEQ ID NO: 215499 - DNA, 25 bp, Probe Sequence
gcagcactactgagaaatcacttaa

SEQ ID NO: 215500 - DNA, 25 bp, Probe Sequence
gcagctctattgaataacatgcatc

SEQ ID NO: 215501 - DNA, 25 bp, Probe Sequence
gcagctgtagtgacaatctcagagc

SEQ ID NO: 215502 - DNA, 25 bp, Probe Sequence
gcagctgccctgagcttcaggcagc

SEQ ID NO: 215503 - DNA, 25 bp, Probe Sequence
gcagctgccctgagcttcaggcagc

SEQ ID NO: 215504 - DNA, 25 bp, Probe Sequence
gcaccctgcgagccatcgcaggcaa

SEQ ID NO: 215505 - DNA, 25 bp, Probe Sequence
gcaccagtcaagttgtgaacaagca

SEQ ID NO: 215506 - DNA, 25 bp, Probe Sequence
gcaccagtcagaccgatatgtcaaa

SEQ ID NO: 215507 - DNA, 25 bp, Probe Sequence
gcaccatggcgcccaagggcaaagt

SEQ ID NO: 215508 - DNA, 25 bp, Probe Sequence
gcagcagatgggcaaagagtaccgt

SEQ ID NO: 215509 - DNA, 25 bp, Probe Sequence
gcagcaatagagcaaaggttacctt

SEQ ID NO: 215510 - DNA, 25 bp, Probe Sequence
gcacaagcaaagaggcttcttcctt

SEQ ID NO: 215511 - DNA, 25 bp, Probe Sequence
gcactattaatatacttctctcctt

SEQ ID NO: 215512 - DNA, 25 bp, Probe Sequence
gcactcgcaatttaactttaactat

SEQ ID NO: 215513 - DNA, 25 bp, Probe Sequence
gcacccacttaatctactgtggtgt

SEQ ID NO: 215514 - DNA, 25 bp, Probe Sequence
gcaccaacgaactgtacatgatgat

SEQ ID NO: 215515 - DNA, 25 bp, Probe Sequence
gcactccgtaactcaacatggcatg

SEQ ID NO: 215516 - DNA, 25 bp, Probe Sequence
gcagctccttactgcacaaagggct

SEQ ID NO: 215517 - DNA, 25 bp, Probe Sequence
gcacccttatgttactaaagcctag

SEQ ID NO: 215518 - DNA, 25 bp, Probe Sequence
gcactttttcgctatttaagttgga

SEQ ID NO: 215519 - DNA, 25 bp, Probe Sequence
gcactttctacctttgtatgagatt

SEQ ID NO: 215520 - DNA, 25 bp, Probe Sequence
gcaccctgctaattttttgtatttt

SEQ ID NO: 215521 - DNA, 25 bp, Probe Sequence
gcacgggtcagattatttttgatta

SEQ ID NO: 215522 - DNA, 25 bp, Probe Sequence
gcacgctggtgctaagtatttttta

SEQ ID NO: 215523 - DNA, 25 bp, Probe Sequence
gcagcctgcggccaggctttttatt

SEQ ID NO: 215524 - DNA, 25 bp, Probe Sequence
gcagcagtcctgaatggtgtttcat

SEQ ID NO: 215525 - DNA, 25 bp, Probe Sequence
gcagcacttcaaactctgtttcaat

SEQ ID NO: 215526 - DNA, 25 bp, Probe Sequence
gcagcagctaacagctctgtgattc

SEQ ID NO: 215527 - DNA, 25 bp, Probe Sequence
gcagcaggacaccgctgctggtgtc

SEQ ID NO: 215528 - DNA, 25 bp, Probe Sequence
gcagaacacacaggctcgtgctgtc

SEQ ID NO: 215529 - DNA, 25 bp, Probe Sequence
gcagcacgacgagccgtgctactgg

SEQ ID NO: 215530 - DNA, 25 bp, Probe Sequence
gcagcacgcaggtttccatgctgac

SEQ ID NO: 215531 - DNA, 25 bp, Probe Sequence
gcagcagctgcagattatccatcgg

SEQ ID NO: 215532 - DNA, 25 bp, Probe Sequence
gcagcagcggcgttttgctgtgctg

SEQ ID NO: 215533 - DNA, 25 bp, Probe Sequence
gcagccgcagagatgttgatgccta

SEQ ID NO: 215534 - DNA, 25 bp, Probe Sequence
gcagcagcctgaaacttgagagcga

SEQ ID NO: 215535 - DNA, 25 bp, Probe Sequence
gcagcaatctgttacacagcagcac

SEQ ID NO: 215536 - DNA, 25 bp, Probe Sequence
gcagcaagctgatatcatcccattg

SEQ ID NO: 215537 - DNA, 25 bp, Probe Sequence
gcagcaagatcatcatcgtcaatcg

SEQ ID NO: 215538 - DNA, 25 bp, Probe Sequence
gcacgaccatccattgcagatgcgc

SEQ ID NO: 215539 - DNA, 25 bp, Probe Sequence
gcagctaccatcctaatcagtcagc

SEQ ID NO: 215540 - DNA, 25 bp, Probe Sequence
gcacttctacagactgatcagtcac

SEQ ID NO: 215541 - DNA, 25 bp, Probe Sequence
gcagccaagagccatctgaagccac

SEQ ID NO: 215542 - DNA, 25 bp, Probe Sequence
gcagctgaatgggtcggagcgggcg

SEQ ID NO: 215543 - DNA, 25 bp, Probe Sequence
gcagctgaagccaaggctagggccg

SEQ ID NO: 215544 - DNA, 25 bp, Probe Sequence
gcagcagaaagtaggtacatggccc

SEQ ID NO: 215545 - DNA, 25 bp, Probe Sequence
gcagctctgaagtggttctgaacac

SEQ ID NO: 215546 - DNA, 25 bp, Probe Sequence
gcagccagaacaacgtggtgagacc

SEQ ID NO: 215547 - DNA, 25 bp, Probe Sequence
gcagccaaatcttgcctgtgctggg

SEQ ID NO: 215548 - DNA, 25 bp, Probe Sequence
gcagcaaactgccgtgctggcaggg

SEQ ID NO: 215549 - DNA, 25 bp, Probe Sequence
gcacgaccatcgctggggtggtcta

SEQ ID NO: 215550 - DNA, 25 bp, Probe Sequence
gcacgactttggctgggatggataa

SEQ ID NO: 215551 - DNA, 25 bp, Probe Sequence
gcagcctttgggcaggtgtagaaat

SEQ ID NO: 215552 - DNA, 25 bp, Probe Sequence
gcagcctttgccacaaggtcaaaag

SEQ ID NO: 215553 - DNA, 25 bp, Probe Sequence
gcacctgttccaactaagactaaag

SEQ ID NO: 215554 - DNA, 25 bp, Probe Sequence
gcacctgtaccaacaaatactcaga

SEQ ID NO: 215555 - DNA, 25 bp, Probe Sequence
gcactctaacttatgtgaactgaga

SEQ ID NO: 215556 - DNA, 25 bp, Probe Sequence
gcagctgggactgtgaggaccgaga

SEQ ID NO: 215557 - DNA, 25 bp, Probe Sequence
gcacgtggaattcgcgaagctgcca

SEQ ID NO: 215558 - DNA, 25 bp, Probe Sequence
gcagcatcatggaagggggcggcca

SEQ ID NO: 215559 - DNA, 25 bp, Probe Sequence
gcagcatcgtgaagggctggggcct

SEQ ID NO: 215560 - DNA, 25 bp, Probe Sequence
gcagcaggtgaagaggcagggcccc

SEQ ID NO: 215561 - DNA, 25 bp, Probe Sequence
gcagcaggtgaagaggcagggcccc

SEQ ID NO: 215562 - DNA, 25 bp, Probe Sequence
gcagcggctgggaaggacaggtcca

SEQ ID NO: 215563 - DNA, 25 bp, Probe Sequence
gcagcggctgggaaggacaggtcca

SEQ ID NO: 215564 - DNA, 25 bp, Probe Sequence
gcagcggctgggaaggacaggtcca

SEQ ID NO: 215565 - DNA, 25 bp, Probe Sequence
gcagcaggtgttacccaaggtcaca

SEQ ID NO: 215566 - DNA, 25 bp, Probe Sequence
gcagcttgtttgactacacagtggc

SEQ ID NO: 215567 - DNA, 25 bp, Probe Sequence
gcagctgtgtttctgataagtactg

SEQ ID NO: 215568 - DNA, 25 bp, Probe Sequence
gcagctgtgtttctgataagtactg

SEQ ID NO: 215569 - DNA, 25 bp, Probe Sequence
gcagctcagctgattctgaaggcca

SEQ ID NO: 215570 - DNA, 25 bp, Probe Sequence
gcaccaggctgttgccaaggcaact

SEQ ID NO: 215571 - DNA, 25 bp, Probe Sequence
gcaccggccttgatgaggcaatgga

SEQ ID NO: 215572 - DNA, 25 bp, Probe Sequence
gcaccaggccttattaagagcagag

SEQ ID NO: 215573 - DNA, 25 bp, Probe Sequence
gcacctcatgccttccattaaagag

SEQ ID NO: 215574 - DNA, 25 bp, Probe Sequence
gcaccctgggttataaggaggctta

SEQ ID NO: 215575 - DNA, 25 bp, Probe Sequence
gcagccactggcagctaaaaaaggt

SEQ ID NO: 215576 - DNA, 25 bp, Probe Sequence
gcacccccacttgacacagataggt

SEQ ID NO: 215577 - DNA, 25 bp, Probe Sequence
gcacccctctttcaaatgataatat

SEQ ID NO: 215578 - DNA, 25 bp, Probe Sequence
gcaccttcttttgagacattagcca

SEQ ID NO: 215579 - DNA, 25 bp, Probe Sequence
gcacttttgttacaatgcttatgct

SEQ ID NO: 215580 - DNA, 25 bp, Probe Sequence
gcactttagtgctcatttcttgtct

SEQ ID NO: 215581 - DNA, 25 bp, Probe Sequence
gcagctttaggtatggattgatgac

SEQ ID NO: 215582 - DNA, 25 bp, Probe Sequence
gcagccttgaagttggggtcagcct

SEQ ID NO: 215583 - DNA, 25 bp, Probe Sequence
gcagccttgaagttggggtcagcct

SEQ ID NO: 215584 - DNA, 25 bp, Probe Sequence
gcagcatcttgaataagtggttctt

SEQ ID NO: 215585 - DNA, 25 bp, Probe Sequence
gcactctatgtgaggcggctatatt

SEQ ID NO: 215586 - DNA, 25 bp, Probe Sequence
gcagcgctagtgagatgccttagtc

SEQ ID NO: 215587 - DNA, 25 bp, Probe Sequence
gcagcgggcgatggaccagaagatc

SEQ ID NO: 215588 - DNA, 25 bp, Probe Sequence
gcagcggcgcgagcgcaacaacatc

SEQ ID NO: 215589 - DNA, 25 bp, Probe Sequence
gcagctgcaagccattcgaataatt

SEQ ID NO: 215590 - DNA, 25 bp, Probe Sequence
gcagcaccacctttgagaagtctct

SEQ ID NO: 215591 - DNA, 25 bp, Probe Sequence
gcagccccagtgaggaagacctcct

SEQ ID NO: 215592 - DNA, 25 bp, Probe Sequence
gcagcttcgaggacaggaaaggccc

SEQ ID NO: 215593 - DNA, 25 bp, Probe Sequence
gcagcttctgggaccataagtttac

SEQ ID NO: 215594 - DNA, 25 bp, Probe Sequence
gcagcttcttgttccataggattaa

SEQ ID NO: 215595 - DNA, 25 bp, Probe Sequence
gcagcttggtattgcagagaagatt

SEQ ID NO: 215596 - DNA, 25 bp, Probe Sequence
gcagcttactcataacaagatcaca

SEQ ID NO: 215597 - DNA, 25 bp, Probe Sequence
gcagcatccacttcataattaaaaa

SEQ ID NO: 215598 - DNA, 25 bp, Probe Sequence
gcaccctctccatttgatagaaact

SEQ ID NO: 215599 - DNA, 25 bp, Probe Sequence
gcaccctctactcagttgttactga

SEQ ID NO: 215600 - DNA, 25 bp, Probe Sequence
gcactaccataaccagtttgcgagt

SEQ ID NO: 215601 - DNA, 25 bp, Probe Sequence
gcaccaactatcacatttctcgaat

SEQ ID NO: 215602 - DNA, 25 bp, Probe Sequence
gcaccacctatcatatttgccacac

SEQ ID NO: 215603 - DNA, 25 bp, Probe Sequence
gcagcccccagaatgttctggacat

SEQ ID NO: 215604 - DNA, 25 bp, Probe Sequence
gcagcaggcccaagtgctgctctga

SEQ ID NO: 215605 - DNA, 25 bp, Probe Sequence
gcagcatgtgctaataggtgccaat

SEQ ID NO: 215606 - DNA, 25 bp, Probe Sequence
gcagctgcttataaagctccgatta

SEQ ID NO: 215607 - DNA, 25 bp, Probe Sequence
gcactaaatagctactccagatata

SEQ ID NO: 215608 - DNA, 25 bp, Probe Sequence
gcagctgaaaagcttcaagagatct

SEQ ID NO: 215609 - DNA, 25 bp, Probe Sequence
gcagctcataagagtctcaatggag

SEQ ID NO: 215610 - DNA, 25 bp, Probe Sequence
gcagctcatagaggtcttgaagggg

SEQ ID NO: 215611 - DNA, 25 bp, Probe Sequence
gcagctctgcacgagtttgaaaccg

SEQ ID NO: 215612 - DNA, 25 bp, Probe Sequence
gcagcctccatgatgtagtaaccaa

SEQ ID NO: 215613 - DNA, 25 bp, Probe Sequence
gcagccccagctaaggttgaagcca

SEQ ID NO: 215614 - DNA, 25 bp, Probe Sequence
gcagccccagctaaggttgaagcca

SEQ ID NO: 215615 - DNA, 25 bp, Probe Sequence
gcagctcccaggaggcatggaggga

SEQ ID NO: 215616 - DNA, 25 bp, Probe Sequence
gcagcccaaggatccagggtgcagg

SEQ ID NO: 215617 - DNA, 25 bp, Probe Sequence
gcactgccaacctcacaggaggtgg

SEQ ID NO: 215618 - DNA, 25 bp, Probe Sequence
gcacctgcaacggagactccggtgg

SEQ ID NO: 215619 - DNA, 25 bp, Probe Sequence
gcactcatctaagaactcgtagctc

SEQ ID NO: 215620 - DNA, 25 bp, Probe Sequence
gcagctgatctgtaaatgactttaa

SEQ ID NO: 215621 - DNA, 25 bp, Probe Sequence
gcagccactgtatgatattttaagc

SEQ ID NO: 215622 - DNA, 25 bp, Probe Sequence
gcagctcagctgcagatgcttttct

SEQ ID NO: 215623 - DNA, 25 bp, Probe Sequence
gcagctcatgtgcacgttttctgtt

SEQ ID NO: 215624 - DNA, 25 bp, Probe Sequence
gcagcaattaagggtcttcatgttc

SEQ ID NO: 215625 - DNA, 25 bp, Probe Sequence
gcagcaataaagcagcgtttctatg

SEQ ID NO: 215626 - DNA, 25 bp, Probe Sequence
gcagccaaaggtaggctgttcttgg

SEQ ID NO: 215627 - DNA, 25 bp, Probe Sequence
gcagctccaagggaatgtctttctc

SEQ ID NO: 215628 - DNA, 25 bp, Probe Sequence
gcagccccagaggagagagacattc

SEQ ID NO: 215629 - DNA, 25 bp, Probe Sequence
gcaccaccacagcacagctaatttg

SEQ ID NO: 215630 - DNA, 25 bp, Probe Sequence
gcacctataatcccagctacttggg

SEQ ID NO: 215631 - DNA, 25 bp, Probe Sequence
gcaccttgatatccccagagtgggt

SEQ ID NO: 215632 - DNA, 25 bp, Probe Sequence
gcagcctggtatagcccagcagtgg

SEQ ID NO: 215633 - DNA, 25 bp, Probe Sequence
gcacctgtggataggccagcagtca

SEQ ID NO: 215634 - DNA, 25 bp, Probe Sequence
gcagctctggttagacaagtgatca

SEQ ID NO: 215635 - DNA, 25 bp, Probe Sequence
gcagcattgctgttgatattagtga

SEQ ID NO: 215636 - DNA, 25 bp, Probe Sequence
gcagcatatctgccttttgggaatg

SEQ ID NO: 215637 - DNA, 25 bp, Probe Sequence
gcagcagagctgattgagtggatga

SEQ ID NO: 215638 - DNA, 25 bp, Probe Sequence
gcagcccgcatattaggcgcagata

SEQ ID NO: 215639 - DNA, 25 bp, Probe Sequence
gcagcccgcatattaggcgcagata

SEQ ID NO: 215640 - DNA, 25 bp, Probe Sequence
gcaccttcatcagcggcatgatgta

SEQ ID NO: 215641 - DNA, 25 bp, Probe Sequence
gcagcttctctatccaggatgatga

SEQ ID NO: 215642 - DNA, 25 bp, Probe Sequence
gcagccatttctgctgagcgagtga

SEQ ID NO: 215643 - DNA, 25 bp, Probe Sequence
gcagctcaatgagtgcctacagcag

SEQ ID NO: 215644 - DNA, 25 bp, Probe Sequence
gcagcacacatattcagtgccatgg

SEQ ID NO: 215645 - DNA, 25 bp, Probe Sequence
gcagcagcccagaagcatcagatgg

SEQ ID NO: 215646 - DNA, 25 bp, Probe Sequence
gcagcatggcacaaacatggctggg

SEQ ID NO: 215647 - DNA, 25 bp, Probe Sequence
gcagctgtctaaaatgcagtggggt

SEQ ID NO: 215648 - DNA, 25 bp, Probe Sequence
gcagcctgtaaccatcggctgggcc

SEQ ID NO: 215649 - DNA, 25 bp, Probe Sequence
gcagccttagacatcaggtgaggat

SEQ ID NO: 215650 - DNA, 25 bp, Probe Sequence
gcactgccttacatccgtgatgtgg

SEQ ID NO: 215651 - DNA, 25 bp, Probe Sequence
gcagcccctataacacagatttgag

SEQ ID NO: 215652 - DNA, 25 bp, Probe Sequence
gcagcagccagccttaaagtagtcc

SEQ ID NO: 215653 - DNA, 25 bp, Probe Sequence
gcagcctgcagcctgaagattttgc

SEQ ID NO: 215654 - DNA, 25 bp, Probe Sequence
gcagcctgcagcctgaagattttgc

SEQ ID NO: 215655 - DNA, 25 bp, Probe Sequence
gcacctgatgcggaatgaagctcgt

SEQ ID NO: 215656 - DNA, 25 bp, Probe Sequence
gcaccgagctggagactggcagtgt

SEQ ID NO: 215657 - DNA, 25 bp, Probe Sequence
gcagcctgagggttgactggattgg

SEQ ID NO: 215658 - DNA, 25 bp, Probe Sequence
gcacctcttggactgaatcgtttgt

SEQ ID NO: 215659 - DNA, 25 bp, Probe Sequence
gcagcacttaggagaactgctccag

SEQ ID NO: 215660 - DNA, 25 bp, Probe Sequence
gcagcctttgagtttgacatccatc

SEQ ID NO: 215661 - DNA, 25 bp, Probe Sequence
gcagcctatggctttcgaaacatcc

SEQ ID NO: 215662 - DNA, 25 bp, Probe Sequence
gcagcctggtgaccgtgaaaatcgc

SEQ ID NO: 215663 - DNA, 25 bp, Probe Sequence
gcacgcatgtgtaccagtggacttt

SEQ ID NO: 215664 - DNA, 25 bp, Probe Sequence
gcaccttatcaacgggactttccaa

SEQ ID NO: 215665 - DNA, 25 bp, Probe Sequence
gcacttttcatcagggacttcttaa

SEQ ID NO: 215666 - DNA, 25 bp, Probe Sequence
gcaccctaatgcataagctttttaa

SEQ ID NO: 215667 - DNA, 25 bp, Probe Sequence
gcaccattctataggcaacttttta

SEQ ID NO: 215668 - DNA, 25 bp, Probe Sequence
gcacgctgtctcaatgtgaattttc

SEQ ID NO: 215669 - DNA, 25 bp, Probe Sequence
gcacgcagatcccatggacatttgg

SEQ ID NO: 215670 - DNA, 25 bp, Probe Sequence
gcacgcagatcccatggacatttgg

SEQ ID NO: 215671 - DNA, 25 bp, Probe Sequence
gcagctgccaacaagaagcattaga

SEQ ID NO: 215672 - DNA, 25 bp, Probe Sequence
gcagctgcaagacatgggccttgtc

SEQ ID NO: 215673 - DNA, 25 bp, Probe Sequence
gcagctgctggacgtcaggctgttt

SEQ ID NO: 215674 - DNA, 25 bp, Probe Sequence
gcagctcctagccatagagcttcct

SEQ ID NO: 215675 - DNA, 25 bp, Probe Sequence
gcagcagccaggacatatagcctcc

SEQ ID NO: 215676 - DNA, 25 bp, Probe Sequence
gcagcgctcagaatggaagccatcg

SEQ ID NO: 215677 - DNA, 25 bp, Probe Sequence
gcagctgatcagaatggcaatgaca

SEQ ID NO: 215678 - DNA, 25 bp, Probe Sequence
gcactgtctattaaatatctcgatt

SEQ ID NO: 215679 - DNA, 25 bp, Probe Sequence
gcactcttattcatgagtccgtatc

SEQ ID NO: 215680 - DNA, 25 bp, Probe Sequence
gcacctaatgttagagcacctaaac

SEQ ID NO: 215681 - DNA, 25 bp, Probe Sequence
gcagcctcaggagcgagacttcaag

SEQ ID NO: 215682 - DNA, 25 bp, Probe Sequence
gcagcctcaggagcgagacttcaag

SEQ ID NO: 215683 - DNA, 25 bp, Probe Sequence
gcagcccaagctgtgaactcacaag

SEQ ID NO: 215684 - DNA, 25 bp, Probe Sequence
gcagcttaagatattactattcagc

SEQ ID NO: 215685 - DNA, 25 bp, Probe Sequence
gcacttatacccataccattagcag

SEQ ID NO: 215686 - DNA, 25 bp, Probe Sequence
gcacttatacccataccattagcag

SEQ ID NO: 215687 - DNA, 25 bp, Probe Sequence
gcaccttatcttaaagcacttacag

SEQ ID NO: 215688 - DNA, 25 bp, Probe Sequence
gcaccagttttgaacagagccctca

SEQ ID NO: 215689 - DNA, 25 bp, Probe Sequence
gcaccgcattgggaaacagcagcct

SEQ ID NO: 215690 - DNA, 25 bp, Probe Sequence
gcacatctgggtgaaggaatgcctt

SEQ ID NO: 215691 - DNA, 25 bp, Probe Sequence
gcacctgggctggaatccagatgcc

SEQ ID NO: 215692 - DNA, 25 bp, Probe Sequence
gcagccgcggtaattccagctccaa

SEQ ID NO: 215693 - DNA, 25 bp, Probe Sequence
gcagccagaatgaaatgcaccagtc

SEQ ID NO: 215694 - DNA, 25 bp, Probe Sequence
gcagccataaaaagcaacagtcctc

SEQ ID NO: 215695 - DNA, 25 bp, Probe Sequence
gcaccaaactacaaagattagctca

SEQ ID NO: 215696 - DNA, 25 bp, Probe Sequence
gcacccaactagctctatgtttaca

SEQ ID NO: 215697 - DNA, 25 bp, Probe Sequence
gcacgccaagtacacttgctctttc

SEQ ID NO: 215698 - DNA, 25 bp, Probe Sequence
gcaaccacaggacactaaacttctc

SEQ ID NO: 215699 - DNA, 25 bp, Probe Sequence
gcaaaaactgctccaaaaccttctc

SEQ ID NO: 215700 - DNA, 25 bp, Probe Sequence
gcaaattcacttgggttacctgcct

SEQ ID NO: 215701 - DNA, 25 bp, Probe Sequence
gcaaagacaccgagtttggctacca

SEQ ID NO: 215702 - DNA, 25 bp, Probe Sequence
gcaaagaacactagtttcatttact

SEQ ID NO: 215703 - DNA, 25 bp, Probe Sequence
gcaaccccatcttgttttaggaatt

SEQ ID NO: 215704 - DNA, 25 bp, Probe Sequence
gaaggccccaagcttctatggtttc

SEQ ID NO: 215705 - DNA, 25 bp, Probe Sequence
gaaggccccaagcttctatggtttc

SEQ ID NO: 215706 - DNA, 25 bp, Probe Sequence
gcactagcctaggaggttttagtct

SEQ ID NO: 215707 - DNA, 25 bp, Probe Sequence
gcaccatcctggaaggttattacct

SEQ ID NO: 215708 - DNA, 25 bp, Probe Sequence
gcagcatactttcaaattattacca

SEQ ID NO: 215709 - DNA, 25 bp, Probe Sequence
gcacatccttgtctaatttcaataa

SEQ ID NO: 215710 - DNA, 25 bp, Probe Sequence
gcacatccctagatactactcaagt

SEQ ID NO: 215711 - DNA, 25 bp, Probe Sequence
gcaccacagtataaaatactacagc

SEQ ID NO: 215712 - DNA, 25 bp, Probe Sequence
gcaccactatataattatttaatgt

SEQ ID NO: 215713 - DNA, 25 bp, Probe Sequence
gcagccccagtgactgtatttactg

SEQ ID NO: 215714 - DNA, 25 bp, Probe Sequence
gcaccatccactgtgtttattgatg

SEQ ID NO: 215715 - DNA, 25 bp, Probe Sequence
gcaccactaccacgtatgtacatgg

SEQ ID NO: 215716 - DNA, 25 bp, Probe Sequence
gcagcctcttagtgctattcattgg

SEQ ID NO: 215717 - DNA, 25 bp, Probe Sequence
gcactctctaaatcttccttgtgag

SEQ ID NO: 215718 - DNA, 25 bp, Probe Sequence
gcaagtgcacaagccttactttggt

SEQ ID NO: 215719 - DNA, 25 bp, Probe Sequence
gcaaatgctatagaataacttgcat

SEQ ID NO: 215720 - DNA, 25 bp, Probe Sequence
gcacaggttgtggattaatctttat

SEQ ID NO: 215721 - DNA, 25 bp, Probe Sequence
gcaccgtcatggcttaatgtttatt

SEQ ID NO: 215722 - DNA, 25 bp, Probe Sequence
gcaccgaacagcgttgaattaactt

SEQ ID NO: 215723 - DNA, 25 bp, Probe Sequence
gcacctgaacagtttatcgaccagt

SEQ ID NO: 215724 - DNA, 25 bp, Probe Sequence
gcacctgaaacaagtttaccactca

SEQ ID NO: 215725 - DNA, 25 bp, Probe Sequence
gcagccatgaaaaccttatgaccgt

SEQ ID NO: 215726 - DNA, 25 bp, Probe Sequence
gcagccatgaaaaccttatgaccgt

SEQ ID NO: 215727 - DNA, 25 bp, Probe Sequence
gcagccagacaagccttgaatcctt

SEQ ID NO: 215728 - DNA, 25 bp, Probe Sequence
gcagcatgcatgtataggccgaact

SEQ ID NO: 215729 - DNA, 25 bp, Probe Sequence
gcagcattagagtgccagaattagc

SEQ ID NO: 215730 - DNA, 25 bp, Probe Sequence
gcagctgaagcagcccgcatattag

SEQ ID NO: 215731 - DNA, 25 bp, Probe Sequence
gcagcagtctgcttcccaataaagc

SEQ ID NO: 215732 - DNA, 25 bp, Probe Sequence
gcagcagtctgcttcccaataaagc

SEQ ID NO: 215733 - DNA, 25 bp, Probe Sequence
gcacagggattctcacaatagccga

SEQ ID NO: 215734 - DNA, 25 bp, Probe Sequence
gcacgttttaacatgatagacgcaa

SEQ ID NO: 215735 - DNA, 25 bp, Probe Sequence
gcacagttgttttaaggatgacgac

SEQ ID NO: 215736 - DNA, 25 bp, Probe Sequence
gcactgctttgtttaaaggactgca

SEQ ID NO: 215737 - DNA, 25 bp, Probe Sequence
gcagctgtctctgttcaaaggaact

SEQ ID NO: 215738 - DNA, 25 bp, Probe Sequence
gcagctgttgtccttaaaaatgaat

SEQ ID NO: 215739 - DNA, 25 bp, Probe Sequence
gcagcttggtcacttgattagaaaa

SEQ ID NO: 215740 - DNA, 25 bp, Probe Sequence
gcacttgccccactgtaaatataca

SEQ ID NO: 215741 - DNA, 25 bp, Probe Sequence
gcagcttgaacgactaaagcagaaa

SEQ ID NO: 215742 - DNA, 25 bp, Probe Sequence
gcagctctgagccagattaacagga

SEQ ID NO: 215743 - DNA, 25 bp, Probe Sequence
gcagctctacctgtgaatggagagc

SEQ ID NO: 215744 - DNA, 25 bp, Probe Sequence
gcagctgcttccgggatgagagcac

SEQ ID NO: 215745 - DNA, 25 bp, Probe Sequence
gcagcaggctccctgagtgatgagc

SEQ ID NO: 215746 - DNA, 25 bp, Probe Sequence
gcagcggctcctccagtgaaaggag

SEQ ID NO: 215747 - DNA, 25 bp, Probe Sequence
gcagctggagctaaaggaagggcag

SEQ ID NO: 215748 - DNA, 25 bp, Probe Sequence
gcagctgcagagaggaggaagacta

SEQ ID NO: 215749 - DNA, 25 bp, Probe Sequence
gcacgtgcagagggatggacaagct

SEQ ID NO: 215750 - DNA, 25 bp, Probe Sequence
gcagcggtatgttgggccagagcat

SEQ ID NO: 215751 - DNA, 25 bp, Probe Sequence
gcacggtctgaatctgcacagagca

SEQ ID NO: 215752 - DNA, 25 bp, Probe Sequence
gcacggtctgaatctgcacagagca

SEQ ID NO: 215753 - DNA, 25 bp, Probe Sequence
gcacggtctgaatctgcacagagca

SEQ ID NO: 215754 - DNA, 25 bp, Probe Sequence
gcagccgttgaatctgtcagtctct

SEQ ID NO: 215755 - DNA, 25 bp, Probe Sequence
gcagcccgcttatgcgtatgtgcac

SEQ ID NO: 215756 - DNA, 25 bp, Probe Sequence
gcaccagcactttatctgttgagcc

SEQ ID NO: 215757 - DNA, 25 bp, Probe Sequence
gcactggattaaaatgtctgcatca

SEQ ID NO: 215758 - DNA, 25 bp, Probe Sequence
gcacttatgtagactgcatttccaa

SEQ ID NO: 215759 - DNA, 25 bp, Probe Sequence
gcacagtagaattccattgtcaaat

SEQ ID NO: 215760 - DNA, 25 bp, Probe Sequence
gcacagtcatcaatgacagctttca

SEQ ID NO: 215761 - DNA, 25 bp, Probe Sequence
gcacagatcagaaaacttacagtaa

SEQ ID NO: 215762 - DNA, 25 bp, Probe Sequence
gcagcgatagtatactttattgtag

SEQ ID NO: 215763 - DNA, 25 bp, Probe Sequence
gcactgatgtgttgaaccttattct

SEQ ID NO: 215764 - DNA, 25 bp, Probe Sequence
gcactattgtaaaccctgctctttc

SEQ ID NO: 215765 - DNA, 25 bp, Probe Sequence
gcaccatggtgaaacctcgtcttta

SEQ ID NO: 215766 - DNA, 25 bp, Probe Sequence
gcagcttggatgaggacacctcact

SEQ ID NO: 215767 - DNA, 25 bp, Probe Sequence
gcagctgaagagcgaatatcctgac

SEQ ID NO: 215768 - DNA, 25 bp, Probe Sequence
gcactaaggccgtgtctctgaggac

SEQ ID NO: 215769 - DNA, 25 bp, Probe Sequence
gcaccagaagctaaagtcttgatgc

SEQ ID NO: 215770 - DNA, 25 bp, Probe Sequence
gcaccactcctgatagctgtgtgat

SEQ ID NO: 215771 - DNA, 25 bp, Probe Sequence
gcacccttgtacagtgtctgtgcca

SEQ ID NO: 215772 - DNA, 25 bp, Probe Sequence
gcaaatgggtacagtctcaggacaa

SEQ ID NO: 215773 - DNA, 25 bp, Probe Sequence
gcacctgggtatgacccagagacag

SEQ ID NO: 215774 - DNA, 25 bp, Probe Sequence
tcaacggtttggatcctagaaggta

SEQ ID NO: 215775 - DNA, 25 bp, Probe Sequence
tcagacccttaggaaagtacacagg

SEQ ID NO: 215776 - DNA, 25 bp, Probe Sequence
gcagcccctaagtgcaaacacagca

SEQ ID NO: 215777 - DNA, 25 bp, Probe Sequence
gcaaccctcatgaagtacaaccagc

SEQ ID NO: 215778 - DNA, 25 bp, Probe Sequence
gcacccagcttaagtagaagacatt

SEQ ID NO: 215779 - DNA, 25 bp, Probe Sequence
gcaaccagatgttttactagtgaat

SEQ ID NO: 215780 - DNA, 25 bp, Probe Sequence
gcacccagcaacgtgtactcgtgca

SEQ ID NO: 215781 - DNA, 25 bp, Probe Sequence
gcacctcaatgaatgtgtactcgct

SEQ ID NO: 215782 - DNA, 25 bp, Probe Sequence
gcacctcaaatttgccatgctggct

SEQ ID NO: 215783 - DNA, 25 bp, Probe Sequence
gcacctcaaatttgccatgctggct

SEQ ID NO: 215784 - DNA, 25 bp, Probe Sequence
gcacgccatcaatgccatcgtgcgc

SEQ ID NO: 215785 - DNA, 25 bp, Probe Sequence
gcacgccatcaatgccatcgtgcgc

SEQ ID NO: 215786 - DNA, 25 bp, Probe Sequence
gcacctaatgcatccaggtgagggc

SEQ ID NO: 215787 - DNA, 25 bp, Probe Sequence
gcagcttagtcattccaggcaagtc

SEQ ID NO: 215788 - DNA, 25 bp, Probe Sequence
gcagcttagccacgtgaggcataat

SEQ ID NO: 215789 - DNA, 25 bp, Probe Sequence
gcagccttgcctctatgagatcaaa

SEQ ID NO: 215790 - DNA, 25 bp, Probe Sequence
gcagctttgtcgtcatgtagcacaa

SEQ ID NO: 215791 - DNA, 25 bp, Probe Sequence
gcagctcatcttacacttgaacaca

SEQ ID NO: 215792 - DNA, 25 bp, Probe Sequence
gcactgctcattaatcctgggagtc

SEQ ID NO: 215793 - DNA, 25 bp, Probe Sequence
gcacctgcatgatgtgcagctggag

SEQ ID NO: 215794 - DNA, 25 bp, Probe Sequence
gcaccatgctggttaggaagatcca

SEQ ID NO: 215795 - DNA, 25 bp, Probe Sequence
gcacgtgcttgcttgaaaagtctca

SEQ ID NO: 215796 - DNA, 25 bp, Probe Sequence
gcacctgctgtgtatactcgagtta

SEQ ID NO: 215797 - DNA, 25 bp, Probe Sequence
gcaccactgggaactctggacttga

SEQ ID NO: 215798 - DNA, 25 bp, Probe Sequence
gcaccagtttgaggctctgggcctg

SEQ ID NO: 215799 - DNA, 25 bp, Probe Sequence
gcagctggtaggatgtctggtgccc

SEQ ID NO: 215800 - DNA, 25 bp, Probe Sequence
gcagctggaaatcttctcgctccag

SEQ ID NO: 215801 - DNA, 25 bp, Probe Sequence
gcagcggaaaaggcccagctcaagt

SEQ ID NO: 215802 - DNA, 25 bp, Probe Sequence
gcagcgagatacaagttcaagcata

SEQ ID NO: 215803 - DNA, 25 bp, Probe Sequence
gcagccatttcttgttacatgaaaa

SEQ ID NO: 215804 - DNA, 25 bp, Probe Sequence
gcacgatgcctggagttactgtaaa

SEQ ID NO: 215805 - DNA, 25 bp, Probe Sequence
gcacgatgcctggagttactgtaaa

SEQ ID NO: 215806 - DNA, 25 bp, Probe Sequence
gcacgagccagaaatcttctgaaaa

SEQ ID NO: 215807 - DNA, 25 bp, Probe Sequence
gcacgcaactaaatcccgaaataca

SEQ ID NO: 215808 - DNA, 25 bp, Probe Sequence
gcaactgactagttcccctaataat

SEQ ID NO: 215809 - DNA, 25 bp, Probe Sequence
gcaaaattacctccagttatgaaga

SEQ ID NO: 215810 - DNA, 25 bp, Probe Sequence
gcaaaaacttgcccaactagaagag

SEQ ID NO: 215811 - DNA, 25 bp, Probe Sequence
gcaccagaactagcacctctgaaaa

SEQ ID NO: 215812 - DNA, 25 bp, Probe Sequence
gcactcccactaactagctatgtaa

SEQ ID NO: 215813 - DNA, 25 bp, Probe Sequence
gcaccacgacaaacacagctagaaa

SEQ ID NO: 215814 - DNA, 25 bp, Probe Sequence
gcacccagccaaacacataacaata

SEQ ID NO: 215815 - DNA, 25 bp, Probe Sequence
gcaaccggacaatataccagctttt

SEQ ID NO: 215816 - DNA, 25 bp, Probe Sequence
gcagcccgaccaataaacctgcttt

SEQ ID NO: 215817 - DNA, 25 bp, Probe Sequence
gcacttcccaaaaaacctggagtct

SEQ ID NO: 215818 - DNA, 25 bp, Probe Sequence
gcagcccacaaaaaaagccatgaag

SEQ ID NO: 215819 - DNA, 25 bp, Probe Sequence
gcagctcccaaaaatagacgcacca

SEQ ID NO: 215820 - DNA, 25 bp, Probe Sequence
gcagctgccccaaaaagagcgtcag

SEQ ID NO: 215821 - DNA, 25 bp, Probe Sequence
gcagcccccatgcagaagaggctcc

SEQ ID NO: 215822 - DNA, 25 bp, Probe Sequence
gcagcctcagaaggaacaaggcccc

SEQ ID NO: 215823 - DNA, 25 bp, Probe Sequence
gcagcctctgaagagccatagggcc

SEQ ID NO: 215824 - DNA, 25 bp, Probe Sequence
gcagcctatcaagctggccagggtc

SEQ ID NO: 215825 - DNA, 25 bp, Probe Sequence
gcacctactccgtgtcagtggtgga

SEQ ID NO: 215826 - DNA, 25 bp, Probe Sequence
gcaccaaccagcgggtgctgtggtg

SEQ ID NO: 215827 - DNA, 25 bp, Probe Sequence
gcagctgcaagtaccgctgttgtga

SEQ ID NO: 215828 - DNA, 25 bp, Probe Sequence
gcagctgcaacattccagtgtttga

SEQ ID NO: 215829 - DNA, 25 bp, Probe Sequence
gcagctgcagctactggaggttctg

SEQ ID NO: 215830 - DNA, 25 bp, Probe Sequence
gcagctgcagtctgggagtctttgg

SEQ ID NO: 215831 - DNA, 25 bp, Probe Sequence
gcagcgttcagggagattactatgg

SEQ ID NO: 215832 - DNA, 25 bp, Probe Sequence
gcagccttatggagaggaccatgtg

SEQ ID NO: 215833 - DNA, 25 bp, Probe Sequence
gcagccttatggagaggaccatgtg

SEQ ID NO: 215834 - DNA, 25 bp, Probe Sequence
gcagcctttgagagtgggcgagtga

SEQ ID NO: 215835 - DNA, 25 bp, Probe Sequence
gcacctgggcagtgatacgctgggc

SEQ ID NO: 215836 - DNA, 25 bp, Probe Sequence
gcacttagtgcattggaacgcagtc

SEQ ID NO: 215837 - DNA, 25 bp, Probe Sequence
gcactttagcaaccacactgcagga

SEQ ID NO: 215838 - DNA, 25 bp, Probe Sequence
gcactgtggacacccagttcatcga

SEQ ID NO: 215839 - DNA, 25 bp, Probe Sequence
gcaccgtgaagacgaatatgatctg

SEQ ID NO: 215840 - DNA, 25 bp, Probe Sequence
gcaccagatgcatgagctaattatc

SEQ ID NO: 215841 - DNA, 25 bp, Probe Sequence
gcaccagcatgaagacataccgagc

SEQ ID NO: 215842 - DNA, 25 bp, Probe Sequence
gcagctgacagaaatgctacccagc

SEQ ID NO: 215843 - DNA, 25 bp, Probe Sequence
gcagctgacagaaatgctacccagc

SEQ ID NO: 215844 - DNA, 25 bp, Probe Sequence
gcagctgcacagaaatacacaacaa

SEQ ID NO: 215845 - DNA, 25 bp, Probe Sequence
gcactggcagctttgtaaaaagcct

SEQ ID NO: 215846 - DNA, 25 bp, Probe Sequence
gcactggcactgctgttacagatcc

SEQ ID NO: 215847 - DNA, 25 bp, Probe Sequence
gcagctgagcctctacatgaaatct

SEQ ID NO: 215848 - DNA, 25 bp, Probe Sequence
gcacttgcactttaatgagtctaag

SEQ ID NO: 215849 - DNA, 25 bp, Probe Sequence
gcactgtgccatgtcagcaagtcat

SEQ ID NO: 215850 - DNA, 25 bp, Probe Sequence
gcagctggtcatgaaccacatgcat

SEQ ID NO: 215851 - DNA, 25 bp, Probe Sequence
gcagcgtttctatgacacatgcaag

SEQ ID NO: 215852 - DNA, 25 bp, Probe Sequence
gcagccttggctagagaactcacag

SEQ ID NO: 215853 - DNA, 25 bp, Probe Sequence
gcagccttggctagagaactcacag

SEQ ID NO: 215854 - DNA, 25 bp, Probe Sequence
gcagccttggtggcaaatatctcat

SEQ ID NO: 215855 - DNA, 25 bp, Probe Sequence
gcagcgtgcggggaagtcactgaaa

SEQ ID NO: 215856 - DNA, 25 bp, Probe Sequence
gcacttgtaggggacccgaaataca

SEQ ID NO: 215857 - DNA, 25 bp, Probe Sequence
gcactgtagcagaggtcgacgaaaa

SEQ ID NO: 215858 - DNA, 25 bp, Probe Sequence
gcagctgtacagggcgggagaagcg

SEQ ID NO: 215859 - DNA, 25 bp, Probe Sequence
gcagcgatacctagggcggaagtgc

SEQ ID NO: 215860 - DNA, 25 bp, Probe Sequence
gcagcgaaccatcttcagtgagtgt

SEQ ID NO: 215861 - DNA, 25 bp, Probe Sequence
gcagccagacgcagtacgtggtgat

SEQ ID NO: 215862 - DNA, 25 bp, Probe Sequence
gcagcctgaagattttgcagtttat

SEQ ID NO: 215863 - DNA, 25 bp, Probe Sequence
gcagcgctacaattttcattatctt

SEQ ID NO: 215864 - DNA, 25 bp, Probe Sequence
gcaccaaagccctcattgactatga

SEQ ID NO: 215865 - DNA, 25 bp, Probe Sequence
gcaccattggctcctgtttgaaatg

SEQ ID NO: 215866 - DNA, 25 bp, Probe Sequence
gcagccattggcactcatgaggatg

SEQ ID NO: 215867 - DNA, 25 bp, Probe Sequence
gcacgttggctgactgatgaggaca

SEQ ID NO: 215868 - DNA, 25 bp, Probe Sequence
gcacgttggctgactgatgaggaca

SEQ ID NO: 215869 - DNA, 25 bp, Probe Sequence
gcaccttgacttggcagcatggagc

SEQ ID NO: 215870 - DNA, 25 bp, Probe Sequence
gcagcgattgcaactggcctggccg

SEQ ID NO: 215871 - DNA, 25 bp, Probe Sequence
gcagcgatggctactacgtggcgct

SEQ ID NO: 215872 - DNA, 25 bp, Probe Sequence
gcacggcagcttaacgatgcccatt

SEQ ID NO: 215873 - DNA, 25 bp, Probe Sequence
gcacggcatggatgacgatggcaca

SEQ ID NO: 215874 - DNA, 25 bp, Probe Sequence
gcagccagatggtagagcgcagatg

SEQ ID NO: 215875 - DNA, 25 bp, Probe Sequence
gcagccgcacactatgagcaacatg

SEQ ID NO: 215876 - DNA, 25 bp, Probe Sequence
gcaccagctcatgtaggcactgtca

SEQ ID NO: 215877 - DNA, 25 bp, Probe Sequence
gcaccagtatcttagtgaccctcgg

SEQ ID NO: 215878 - DNA, 25 bp, Probe Sequence
gcaccactaaacatagcacaacgag

SEQ ID NO: 215879 - DNA, 25 bp, Probe Sequence
gcagccacaaaactgtaacctcaag

SEQ ID NO: 215880 - DNA, 25 bp, Probe Sequence
gcagccacgaagccagtatggccag

SEQ ID NO: 215881 - DNA, 25 bp, Probe Sequence
gcagccaccagcgaatgctaggtct

SEQ ID NO: 215882 - DNA, 25 bp, Probe Sequence
gcaccagcacaggacgagaggatcc

SEQ ID NO: 215883 - DNA, 25 bp, Probe Sequence
gcaccagccctatgtggagagcgac

SEQ ID NO: 215884 - DNA, 25 bp, Probe Sequence
gcaccggtcctcgtagatggagatc

SEQ ID NO: 215885 - DNA, 25 bp, Probe Sequence
gcaacggtgaaggctcgatcctgtc

SEQ ID NO: 215886 - DNA, 25 bp, Probe Sequence
gcaccgagaggggctttcctctctc

SEQ ID NO: 215887 - DNA, 25 bp, Probe Sequence
gcagcctttggggtcatgacccttc

SEQ ID NO: 215888 - DNA, 25 bp, Probe Sequence
gcagccattgggggaatccccttgc

SEQ ID NO: 215889 - DNA, 25 bp, Probe Sequence
gcacgaggagggcagagtccgttgc

SEQ ID NO: 215890 - DNA, 25 bp, Probe Sequence
gcacagggagcaccaaaggaccttc

SEQ ID NO: 215891 - DNA, 25 bp, Probe Sequence
gcacagttcaccgagaagctgactt

SEQ ID NO: 215892 - DNA, 25 bp, Probe Sequence
gcacttccactcctgatgtgtatgc

SEQ ID NO: 215893 - DNA, 25 bp, Probe Sequence
gcacttgcaaccgtctgttatgctg

SEQ ID NO: 215894 - DNA, 25 bp, Probe Sequence
gcacttaaagcgtgttgcagcgccg

SEQ ID NO: 215895 - DNA, 25 bp, Probe Sequence
gcacttaggtggtgaatgtgactaa

SEQ ID NO: 215896 - DNA, 25 bp, Probe Sequence
gcactttgacggttagatgccacca

SEQ ID NO: 215897 - DNA, 25 bp, Probe Sequence
gcaccatctgcacagagtactgccc

SEQ ID NO: 215898 - DNA, 25 bp, Probe Sequence
gcagccttcatgccagagatctgtg

SEQ ID NO: 215899 - DNA, 25 bp, Probe Sequence
gcagccacacagacatagactggtg

SEQ ID NO: 215900 - DNA, 25 bp, Probe Sequence
gcagccagcacaggagatgctctgt

SEQ ID NO: 215901 - DNA, 25 bp, Probe Sequence
gcagcgagctgcaatgagattcgtg

SEQ ID NO: 215902 - DNA, 25 bp, Probe Sequence
gcagcgaggagtttctcattgctgg

SEQ ID NO: 215903 - DNA, 25 bp, Probe Sequence
gcagctgggagatttctttggcatg

SEQ ID NO: 215904 - DNA, 25 bp, Probe Sequence
gcagctgggagatttctttggcatg

SEQ ID NO: 215905 - DNA, 25 bp, Probe Sequence
gcacgtagcacattctgcttgtcct

SEQ ID NO: 215906 - DNA, 25 bp, Probe Sequence
gcacgagagccactgctgatgtagc

SEQ ID NO: 215907 - DNA, 25 bp, Probe Sequence
gcagctgtcatggagtcaattcagg

SEQ ID NO: 215908 - DNA, 25 bp, Probe Sequence
gcactgctatcaggactgagccagg

SEQ ID NO: 215909 - DNA, 25 bp, Probe Sequence
gcacgtcacaggagacagcgggggg

SEQ ID NO: 215910 - DNA, 25 bp, Probe Sequence
gcacttcatgggaggggacgtcggc

SEQ ID NO: 215911 - DNA, 25 bp, Probe Sequence
gcactttgggaagccgaggtgggcg

SEQ ID NO: 215912 - DNA, 25 bp, Probe Sequence
gcacttatgaggcacctactgagat

SEQ ID NO: 215913 - DNA, 25 bp, Probe Sequence
gcacttagaggccctttgcttattt

SEQ ID NO: 215914 - DNA, 25 bp, Probe Sequence
gcaccacagaaacctcagtgttttt

SEQ ID NO: 215915 - DNA, 25 bp, Probe Sequence
gcacccgagattctatgtgtagatt

SEQ ID NO: 215916 - DNA, 25 bp, Probe Sequence
gcacccgaagtgctgccatgaaatt

SEQ ID NO: 215917 - DNA, 25 bp, Probe Sequence
gcacccggagctggcagacaagaat

SEQ ID NO: 215918 - DNA, 25 bp, Probe Sequence
gcacccggagctggcagacaagaat

SEQ ID NO: 215919 - DNA, 25 bp, Probe Sequence
gcagcctcgaggtggagaagaagga

SEQ ID NO: 215920 - DNA, 25 bp, Probe Sequence
gcacctcgcgtggctgggaaggagg

SEQ ID NO: 215921 - DNA, 25 bp, Probe Sequence
gcacctcgggttcgggaggagctgt

SEQ ID NO: 215922 - DNA, 25 bp, Probe Sequence
gcagccgccgttaccgagagaggcg

SEQ ID NO: 215923 - DNA, 25 bp, Probe Sequence
gcacagcccctctatccaaggggct

SEQ ID NO: 215924 - DNA, 25 bp, Probe Sequence
gcactcacgccctaataaggagcga

SEQ ID NO: 215925 - DNA, 25 bp, Probe Sequence
gcactcacgccctaataaggagcga

SEQ ID NO: 215926 - DNA, 25 bp, Probe Sequence
gcactcacgccctaataaggagcga

SEQ ID NO: 215927 - DNA, 25 bp, Probe Sequence
gcacccaccctgtagaagatggaat

SEQ ID NO: 215928 - DNA, 25 bp, Probe Sequence
gcacccaccctgtagaagatggaat

SEQ ID NO: 215929 - DNA, 25 bp, Probe Sequence
gcacccacatcctgtgcatcaagga

SEQ ID NO: 215930 - DNA, 25 bp, Probe Sequence
gcagccacaatcgggagtcagagcc

SEQ ID NO: 215931 - DNA, 25 bp, Probe Sequence
gcagcctacagcggggagagtgaca

SEQ ID NO: 215932 - DNA, 25 bp, Probe Sequence
gcagcctgaagcgccagaagcggca

SEQ ID NO: 215933 - DNA, 25 bp, Probe Sequence
gcaccagaagcagaagaacaggaag

SEQ ID NO: 215934 - DNA, 25 bp, Probe Sequence
gcagccaacagacacatgaaaaaac

SEQ ID NO: 215935 - DNA, 25 bp, Probe Sequence
gcagccacacgttacaggagaagac

SEQ ID NO: 215936 - DNA, 25 bp, Probe Sequence
gcagccaaaggccacggagaacacg

SEQ ID NO: 215937 - DNA, 25 bp, Probe Sequence
gcagcgcagagcgggctcgaagaaa

SEQ ID NO: 215938 - DNA, 25 bp, Probe Sequence
gcagcgccagcgcgacgagaaagag

SEQ ID NO: 215939 - DNA, 25 bp, Probe Sequence
gcagccctggcggagggatgcaggt

SEQ ID NO: 215940 - DNA, 25 bp, Probe Sequence
gcagcctgccgggcagggagcagcc

SEQ ID NO: 215941 - DNA, 25 bp, Probe Sequence
gcacgcttcagggtaagctgcagcc

SEQ ID NO: 215942 - DNA, 25 bp, Probe Sequence
gcactgtccaaggaagagtgccctc

SEQ ID NO: 215943 - DNA, 25 bp, Probe Sequence
gcacggctacatcaagggcatcgtc

SEQ ID NO: 215944 - DNA, 25 bp, Probe Sequence
gcacgagtcacatctgaaggttcac

SEQ ID NO: 215945 - DNA, 25 bp, Probe Sequence
gcaccgtcatcgggatggtgtccac

SEQ ID NO: 215946 - DNA, 25 bp, Probe Sequence
gcaccgtgccaaagactggatgccc

SEQ ID NO: 215947 - DNA, 25 bp, Probe Sequence
gcactggtccaaggtcggaggagac

SEQ ID NO: 215948 - DNA, 25 bp, Probe Sequence
gcaagggccaaggccggtgggaatt

SEQ ID NO: 215949 - DNA, 25 bp, Probe Sequence
gcactttggaacgctgggtggattg

SEQ ID NO: 215950 - DNA, 25 bp, Probe Sequence
gcactttggcaagctctttgggctg

SEQ ID NO: 215951 - DNA, 25 bp, Probe Sequence
gcacttgcttgatgtatctttggcg

SEQ ID NO: 215952 - DNA, 25 bp, Probe Sequence
gcactctgatcatgcagttacttag

SEQ ID NO: 215953 - DNA, 25 bp, Probe Sequence
gcactctgatcatgcagttacttag

SEQ ID NO: 215954 - DNA, 25 bp, Probe Sequence
gcactatgtctgggttgacctaggc

SEQ ID NO: 215955 - DNA, 25 bp, Probe Sequence
gcactgcaatctgggttacggagtg

SEQ ID NO: 215956 - DNA, 25 bp, Probe Sequence
gcacggtttgtgatcacaatagtgt

SEQ ID NO: 215957 - DNA, 25 bp, Probe Sequence
gcacacttttgtgtcgtgaagttct

SEQ ID NO: 215958 - DNA, 25 bp, Probe Sequence
gcacctttatgtatgcaggggtctg

SEQ ID NO: 215959 - DNA, 25 bp, Probe Sequence
gcacgttgctgagtaaagaggtgtt

SEQ ID NO: 215960 - DNA, 25 bp, Probe Sequence
gcactatatcgagtacatacaggta

SEQ ID NO: 215961 - DNA, 25 bp, Probe Sequence
gcacttatcaggaacgcctcgatac

SEQ ID NO: 215962 - DNA, 25 bp, Probe Sequence
gcacttactggtaggaccaagcatc

SEQ ID NO: 215963 - DNA, 25 bp, Probe Sequence
gcacttattttctgaccatcgctgc

SEQ ID NO: 215964 - DNA, 25 bp, Probe Sequence
gcacatttcacatatcgactacctg

SEQ ID NO: 215965 - DNA, 25 bp, Probe Sequence
gcacatgttcaaattagttgcccat

SEQ ID NO: 215966 - DNA, 25 bp, Probe Sequence
gcagccttaattccatttgcagcct

SEQ ID NO: 215967 - DNA, 25 bp, Probe Sequence
gcagcctttttattgtcagaccatt

SEQ ID NO: 215968 - DNA, 25 bp, Probe Sequence
gcacacgttttatggagtacttgtt

SEQ ID NO: 215969 - DNA, 25 bp, Probe Sequence
gcaccgtaattctggtgtacttgcc

SEQ ID NO: 215970 - DNA, 25 bp, Probe Sequence
gcaccttaagattagggtggcattg

SEQ ID NO: 215971 - DNA, 25 bp, Probe Sequence
gcaccttaatattattggggttggt

SEQ ID NO: 215972 - DNA, 25 bp, Probe Sequence
gcactctgatcaataaaaggggtcc

SEQ ID NO: 215973 - DNA, 25 bp, Probe Sequence
gcactatgttaatatatgatgtggt

SEQ ID NO: 215974 - DNA, 25 bp, Probe Sequence
gcaccatgattccaatcttgtgtgt

SEQ ID NO: 215975 - DNA, 25 bp, Probe Sequence
gcacggagtccgtccagttgtcgga

SEQ ID NO: 215976 - DNA, 25 bp, Probe Sequence
gcacgaggacctggtctttgtggga

SEQ ID NO: 215977 - DNA, 25 bp, Probe Sequence
gcactggaaaccttctcttggaaga

SEQ ID NO: 215978 - DNA, 25 bp, Probe Sequence
gcaccaaggacgtttcttcagaaga

SEQ ID NO: 215979 - DNA, 25 bp, Probe Sequence
gcaactcggacgtgtatgaaaatga

SEQ ID NO: 215980 - DNA, 25 bp, Probe Sequence
gcacagctgcggtgatcgtcatgga

SEQ ID NO: 215981 - DNA, 25 bp, Probe Sequence
gcacgtgctgtgacgatggctgaac

SEQ ID NO: 215982 - DNA, 25 bp, Probe Sequence
gcacctgcgtctggatgactgtgac

SEQ ID NO: 215983 - DNA, 25 bp, Probe Sequence
gcacagtgccttgggactggactgg

SEQ ID NO: 215984 - DNA, 25 bp, Probe Sequence
gcacttgatttgggccttgaagagt

SEQ ID NO: 215985 - DNA, 25 bp, Probe Sequence
gcaccagaaccaacaagattgagaa

SEQ ID NO: 215986 - DNA, 25 bp, Probe Sequence
gcaccagcaccctcagagaaaatag

SEQ ID NO: 215987 - DNA, 25 bp, Probe Sequence
gcacgagccatccagaagaaaattg

SEQ ID NO: 215988 - DNA, 25 bp, Probe Sequence
gcacgagccatccagaagaaaattg

SEQ ID NO: 215989 - DNA, 25 bp, Probe Sequence
gcacggatccggcagaaggacgaag

SEQ ID NO: 215990 - DNA, 25 bp, Probe Sequence
gcacccaccgtggaggaggaaggca

SEQ ID NO: 215991 - DNA, 25 bp, Probe Sequence
gcacccatgcatgcttggagggtga

SEQ ID NO: 215992 - DNA, 25 bp, Probe Sequence
gcagccccaagcctgagaggctgga

SEQ ID NO: 215993 - DNA, 25 bp, Probe Sequence
gcacgagctcgggtgaggagctggt

SEQ ID NO: 215994 - DNA, 25 bp, Probe Sequence
gcaccagctctgtgttgtggctgtg

SEQ ID NO: 215995 - DNA, 25 bp, Probe Sequence
gcacaagccttactttggttaccgt

SEQ ID NO: 215996 - DNA, 25 bp, Probe Sequence
gcactaccctatagtttgttttcct

SEQ ID NO: 215997 - DNA, 25 bp, Probe Sequence
gcagccaccctgtgataattgttat

SEQ ID NO: 215998 - DNA, 25 bp, Probe Sequence
gcacacacgagcttagtaactttac

SEQ ID NO: 215999 - DNA, 25 bp, Probe Sequence
gcactccacagcttttacactattt

SEQ ID NO: 216000 - DNA, 25 bp, Probe Sequence
gcaccagcaacacttgtaaatttgt

SEQ ID NO: 216001 - DNA, 25 bp, Probe Sequence
gcaccgcccagtggagaaattcgtc

SEQ ID NO: 216002 - DNA, 25 bp, Probe Sequence
gcaccacctttgagaagtctctgtt

SEQ ID NO: 216003 - DNA, 25 bp, Probe Sequence
gcacaacacattacccacgtttgtg

SEQ ID NO: 216004 - DNA, 25 bp, Probe Sequence
gcacaactctttatacggttggctc

SEQ ID NO: 216005 - DNA, 25 bp, Probe Sequence
gcacaactctttatacggttggctc

SEQ ID NO: 216006 - DNA, 25 bp, Probe Sequence
gcaaagtcttttggatgggttggga

SEQ ID NO: 216007 - DNA, 25 bp, Probe Sequence
gaattggcaattggaggcggtagtg

SEQ ID NO: 216008 - DNA, 25 bp, Probe Sequence
gcacatcggaatcggtcgggtcagt

SEQ ID NO: 216009 - DNA, 25 bp, Probe Sequence
gcaccgagagatcgtacgggacttt

SEQ ID NO: 216010 - DNA, 25 bp, Probe Sequence
gcaccgtggaggccacaggagcaga

SEQ ID NO: 216011 - DNA, 25 bp, Probe Sequence
gcactttgggtggctaaggcagata

SEQ ID NO: 216012 - DNA, 25 bp, Probe Sequence
gcacttggggttttacgcaatgaca

SEQ ID NO: 216013 - DNA, 25 bp, Probe Sequence
gcacttggggtcttatctgttggac

SEQ ID NO: 216014 - DNA, 25 bp, Probe Sequence
gcagcctagggttctgtttagacta

SEQ ID NO: 216015 - DNA, 25 bp, Probe Sequence
gcaccaagcggaactgcgcttaaaa

SEQ ID NO: 216016 - DNA, 25 bp, Probe Sequence
gcagccacagattgatcatctgcct

SEQ ID NO: 216017 - DNA, 25 bp, Probe Sequence
gcagccagatgaagtctctcagatg

SEQ ID NO: 216018 - DNA, 25 bp, Probe Sequence
gcagccagatgaagtctctcagatg

SEQ ID NO: 216019 - DNA, 25 bp, Probe Sequence
gcaccagatgcaacctcactatggt

SEQ ID NO: 216020 - DNA, 25 bp, Probe Sequence
gcaccagatgccattacatttattg

SEQ ID NO: 216021 - DNA, 25 bp, Probe Sequence
gcacataggccttctgaatttcata

SEQ ID NO: 216022 - DNA, 25 bp, Probe Sequence
gcactgggttcagaagaccatagct

SEQ ID NO: 216023 - DNA, 25 bp, Probe Sequence
gcactggactccggaaggacacagc

SEQ ID NO: 216024 - DNA, 25 bp, Probe Sequence
gcactggtcaccaggccatgaagcg

SEQ ID NO: 216025 - DNA, 25 bp, Probe Sequence
gcaccagtaccaacagcacagaggc

SEQ ID NO: 216026 - DNA, 25 bp, Probe Sequence
gcaccagacactcacagcaaggatg

SEQ ID NO: 216027 - DNA, 25 bp, Probe Sequence
gcaccagacgcgatggcaaagtgga

SEQ ID NO: 216028 - DNA, 25 bp, Probe Sequence
gcaccacttgctactggagaggatg

SEQ ID NO: 216029 - DNA, 25 bp, Probe Sequence
gcaccacttgctactggagaggatg

SEQ ID NO: 216030 - DNA, 25 bp, Probe Sequence
gcaccacttcatcatgaatgctggt

SEQ ID NO: 216031 - DNA, 25 bp, Probe Sequence
gcaccgtcatcgccatgaatgggat

SEQ ID NO: 216032 - DNA, 25 bp, Probe Sequence
gcaccgcatcggctgcattgtggtg

SEQ ID NO: 216033 - DNA, 25 bp, Probe Sequence
gcacctgctgctggcggtgagcagg

SEQ ID NO: 216034 - DNA, 25 bp, Probe Sequence
gcagcctctccatggatgagaaagt

SEQ ID NO: 216035 - DNA, 25 bp, Probe Sequence
gcagcctcactctaggatgaagcct

SEQ ID NO: 216036 - DNA, 25 bp, Probe Sequence
gcacctcctgcaagaaaagctgctg

SEQ ID NO: 216037 - DNA, 25 bp, Probe Sequence
gcactcacgcgctagaattaccgag

SEQ ID NO: 216038 - DNA, 25 bp, Probe Sequence
gcacatcactcaggaaacttcagcg

SEQ ID NO: 216039 - DNA, 25 bp, Probe Sequence
gcactaggcacgtaacctgcaatgt

SEQ ID NO: 216040 - DNA, 25 bp, Probe Sequence
gcaccaggacttcaactcagctgtg

SEQ ID NO: 216041 - DNA, 25 bp, Probe Sequence
gcaccacaagtttcacagtcagcgg

SEQ ID NO: 216042 - DNA, 25 bp, Probe Sequence
gcactccaaattagaaggccggccc

SEQ ID NO: 216043 - DNA, 25 bp, Probe Sequence
gcaccagaataattgtgggtcttcc

SEQ ID NO: 216044 - DNA, 25 bp, Probe Sequence
gcaccaaaatcaacgggactttccg

SEQ ID NO: 216045 - DNA, 25 bp, Probe Sequence
gcaccaaaatcaacgggactttccg

SEQ ID NO: 216046 - DNA, 25 bp, Probe Sequence
gcaccaaaatcaacgggactttcca

SEQ ID NO: 216047 - DNA, 25 bp, Probe Sequence
gcaccaaaatcaacgggactttcca

SEQ ID NO: 216048 - DNA, 25 bp, Probe Sequence
gcaccaaaatcaacgggactttcca

SEQ ID NO: 216049 - DNA, 25 bp, Probe Sequence
gcaccaaaatcaacgggactttcca

SEQ ID NO: 216050 - DNA, 25 bp, Probe Sequence
gcaccaaaatcaacgggactttcca

SEQ ID NO: 216051 - DNA, 25 bp, Probe Sequence
gcaccaaaatcaacgggactttcca

SEQ ID NO: 216052 - DNA, 25 bp, Probe Sequence
gcaccaaaatcaacgggactttcca

SEQ ID NO: 216053 - DNA, 25 bp, Probe Sequence
gcaccaaaatcaacgggactttcca

SEQ ID NO: 216054 - DNA, 25 bp, Probe Sequence
gcaccaaaatcaacgggactttcca

SEQ ID NO: 216055 - DNA, 25 bp, Probe Sequence
gcaccaaaatcaacgggactttcca

SEQ ID NO: 216056 - DNA, 25 bp, Probe Sequence
gcaccaaaatcaacgggactttcca

SEQ ID NO: 216057 - DNA, 25 bp, Probe Sequence
gcaccaaaatcaacgggactttcca

SEQ ID NO: 216058 - DNA, 25 bp, Probe Sequence
gcaccaaaatcaacgggactttcca

SEQ ID NO: 216059 - DNA, 25 bp, Probe Sequence
gcaccaaaatcaacgggactttcca

SEQ ID NO: 216060 - DNA, 25 bp, Probe Sequence
gcaccaaaatcaacgggactttcca

SEQ ID NO: 216061 - DNA, 25 bp, Probe Sequence
gcaccaaaatcaacgggactttcca

SEQ ID NO: 216062 - DNA, 25 bp, Probe Sequence
gcaccaaaatcaacgggactttcca

SEQ ID NO: 216063 - DNA, 25 bp, Probe Sequence
gcaccaaaatcaacgggactttcca

SEQ ID NO: 216064 - DNA, 25 bp, Probe Sequence
gcaccaaaatcaacgggactttcca

SEQ ID NO: 216065 - DNA, 25 bp, Probe Sequence
gcaccaaaatcaacgggactttcca

SEQ ID NO: 216066 - DNA, 25 bp, Probe Sequence
gcaccaaaatcaacgggactttcca

SEQ ID NO: 216067 - DNA, 25 bp, Probe Sequence
gcaccaaaatcaacgggactttcca

SEQ ID NO: 216068 - DNA, 25 bp, Probe Sequence
gcaccaaaatcaacgggactttcca

SEQ ID NO: 216069 - DNA, 25 bp, Probe Sequence
gcaccaaaatcaacgggactttcca

SEQ ID NO: 216070 - DNA, 25 bp, Probe Sequence
gcaccaaaatcaacgggactttcca

SEQ ID NO: 216071 - DNA, 25 bp, Probe Sequence
gcaccaaaatcaacgggactttcca

SEQ ID NO: 216072 - DNA, 25 bp, Probe Sequence
gcaccaaaatcaacgggactttcca

SEQ ID NO: 216073 - DNA, 25 bp, Probe Sequence
gcaccaaaatcaacgggactttcca

SEQ ID NO: 216074 - DNA, 25 bp, Probe Sequence
gcaccaaaatcaacgggactttcca

SEQ ID NO: 216075 - DNA, 25 bp, Probe Sequence
gcaccaaaatcaacgggactttcca

SEQ ID NO: 216076 - DNA, 25 bp, Probe Sequence
gcaccaaaatcaacgggactttcca

SEQ ID NO: 216077 - DNA, 25 bp, Probe Sequence
gcaccaaaatcaacgggactttcca

SEQ ID NO: 216078 - DNA, 25 bp, Probe Sequence
gcaccaaaatcaacgggactttcca

SEQ ID NO: 216079 - DNA, 25 bp, Probe Sequence
gcaccaaaatcaacgggactttcca

SEQ ID NO: 216080 - DNA, 25 bp, Probe Sequence
gcaccaaaatcaacgggactttcca

SEQ ID NO: 216081 - DNA, 25 bp, Probe Sequence
gcaccaaaatcaacgggactttcca

SEQ ID NO: 216082 - DNA, 25 bp, Probe Sequence
gcaccaaaatcaacgggactttcca

SEQ ID NO: 216083 - DNA, 25 bp, Probe Sequence
gcaccaaaatcaacgggactttcca

SEQ ID NO: 216084 - DNA, 25 bp, Probe Sequence
gcaccaaaatcaacgggactttcca

SEQ ID NO: 216085 - DNA, 25 bp, Probe Sequence
gcaccaaaatcaacgggactttcca

SEQ ID NO: 216086 - DNA, 25 bp, Probe Sequence
gcaccaaaatcaacgggactttcca

SEQ ID NO: 216087 - DNA, 25 bp, Probe Sequence
gcaccaaaatcaacgggactttcca

SEQ ID NO: 216088 - DNA, 25 bp, Probe Sequence
gcaccaaaatcaacgggactttcca

SEQ ID NO: 216089 - DNA, 25 bp, Probe Sequence
gcaccaaaatcaacgggactttcca

SEQ ID NO: 216090 - DNA, 25 bp, Probe Sequence
gcaccaaaatcaacgggactttcca

SEQ ID NO: 216091 - DNA, 25 bp, Probe Sequence
gcaccaaaatcaacgggactttcca

SEQ ID NO: 216092 - DNA, 25 bp, Probe Sequence
gcaccaaaatcaacgggactttcca

SEQ ID NO: 216093 - DNA, 25 bp, Probe Sequence
gcaccaaaatcaacgggactttcca

SEQ ID NO: 216094 - DNA, 25 bp, Probe Sequence
gcaccaaaatcaacgggactttcca

SEQ ID NO: 216095 - DNA, 25 bp, Probe Sequence
gcaccaaaatcaacgggactttcca

SEQ ID NO: 216096 - DNA, 25 bp, Probe Sequence
gcaccaaaatcaacgggactttcca

SEQ ID NO: 216097 - DNA, 25 bp, Probe Sequence
gcaccaaaatgcaacgggactctcc

SEQ ID NO: 216098 - DNA, 25 bp, Probe Sequence
gcaccaagaataagccatgaagtca

SEQ ID NO: 216099 - DNA, 25 bp, Probe Sequence
gcactcaatgacaatctggagaagg

SEQ ID NO: 216100 - DNA, 25 bp, Probe Sequence
gcactccagacttgattaaatgtcc

SEQ ID NO: 216101 - DNA, 25 bp, Probe Sequence
gcacccagacacgatctacagtgtg

SEQ ID NO: 216102 - DNA, 25 bp, Probe Sequence
gcacaaagactgcttcacctgtagt

SEQ ID NO: 216103 - DNA, 25 bp, Probe Sequence
gagcgaagacttttcgctcccagct

SEQ ID NO: 216104 - DNA, 25 bp, Probe Sequence
gcaaaagacttggtgcgcacccggc

SEQ ID NO: 216105 - DNA, 25 bp, Probe Sequence
gcacattaacttctggactgccggc

SEQ ID NO: 216106 - DNA, 25 bp, Probe Sequence
gcacgaacttccaggagccggtgca

SEQ ID NO: 216107 - DNA, 25 bp, Probe Sequence
gcacttggttccatggagcctggat

SEQ ID NO: 216108 - DNA, 25 bp, Probe Sequence
gcacgtttacctaggacagctggat

SEQ ID NO: 216109 - DNA, 25 bp, Probe Sequence
gcaattttacctagctaccactagg

SEQ ID NO: 216110 - DNA, 25 bp, Probe Sequence
gcactcagttatggcttctacggct

SEQ ID NO: 216111 - DNA, 25 bp, Probe Sequence
gcactcagttatggcttctacggct

SEQ ID NO: 216112 - DNA, 25 bp, Probe Sequence
gcaccagtggtggcttcagtgctgg

SEQ ID NO: 216113 - DNA, 25 bp, Probe Sequence
gcaccagtgcttggcatcaggtgtt

SEQ ID NO: 216114 - DNA, 25 bp, Probe Sequence
gcaccgtcagctacaatgggatctt

SEQ ID NO: 216115 - DNA, 25 bp, Probe Sequence
gcacccatcacccaagggtagtctt

SEQ ID NO: 216116 - DNA, 25 bp, Probe Sequence
gcacccacaacctggggaactgctc

SEQ ID NO: 216117 - DNA, 25 bp, Probe Sequence
gcacttcaaacctcatgggttctcc

SEQ ID NO: 216118 - DNA, 25 bp, Probe Sequence
gcaattaaaccagttaagtctccca

SEQ ID NO: 216119 - DNA, 25 bp, Probe Sequence
gatcattaacccgagtacctttact

SEQ ID NO: 216120 - DNA, 25 bp, Probe Sequence
gcaatatcaaccattaaccttccct

SEQ ID NO: 216121 - DNA, 25 bp, Probe Sequence
gcaagagagcctactgtaaccctca

SEQ ID NO: 216122 - DNA, 25 bp, Probe Sequence
gcaaaggtctctggctagcgacatc

SEQ ID NO: 216123 - DNA, 25 bp, Probe Sequence
gcacacagtgatcgccaataggact

SEQ ID NO: 216124 - DNA, 25 bp, Probe Sequence
gcacctgagacccaatgagaatcaa

SEQ ID NO: 216125 - DNA, 25 bp, Probe Sequence
gcaccacagaccgagaagaagccac

SEQ ID NO: 216126 - DNA, 25 bp, Probe Sequence
gcacctcagcccagaacaatgctaa

SEQ ID NO: 216127 - DNA, 25 bp, Probe Sequence
gcacccactgaaaaacaagttgagt

SEQ ID NO: 216128 - DNA, 25 bp, Probe Sequence
gcacctgcctgaaatatacacagtt

SEQ ID NO: 216129 - DNA, 25 bp, Probe Sequence
gcacatctttgatcatctaatctgg

SEQ ID NO: 216130 - DNA, 25 bp, Probe Sequence
gcactgcttacttcttcaaaggtcc

SEQ ID NO: 216131 - DNA, 25 bp, Probe Sequence
gcactgcgtggcgaatgtaaacgtc

SEQ ID NO: 216132 - DNA, 25 bp, Probe Sequence
gcactgcctgagaaatgtcccagag

SEQ ID NO: 216133 - DNA, 25 bp, Probe Sequence
gcactcatctgacagaatccctgag

SEQ ID NO: 216134 - DNA, 25 bp, Probe Sequence
gcactctattctaacaccctgagtc

SEQ ID NO: 216135 - DNA, 25 bp, Probe Sequence
gcaccttatctatcacagaccagta

SEQ ID NO: 216136 - DNA, 25 bp, Probe Sequence
gcaactttgaaagagcactaggaag

SEQ ID NO: 216137 - DNA, 25 bp, Probe Sequence
gcaactctttttggggctagcaata

SEQ ID NO: 216138 - DNA, 25 bp, Probe Sequence
gcacattgctttatcgtgagctctc

SEQ ID NO: 216139 - DNA, 25 bp, Probe Sequence
gcacgtggcactaatctggtgtcac

SEQ ID NO: 216140 - DNA, 25 bp, Probe Sequence
gcacttggagtgcatcatagttcta

SEQ ID NO: 216141 - DNA, 25 bp, Probe Sequence
gcacgggggatgccatcagtgtcat

SEQ ID NO: 216142 - DNA, 25 bp, Probe Sequence
gcaccattgcggtcgcgcggatcat

SEQ ID NO: 216143 - DNA, 25 bp, Probe Sequence
gcaccagcagcggctaggggagatc

SEQ ID NO: 216144 - DNA, 25 bp, Probe Sequence
gcaccatggcggaagacatggagac

SEQ ID NO: 216145 - DNA, 25 bp, Probe Sequence
gcaactggggcctacatacaaaatt

SEQ ID NO: 216146 - DNA, 25 bp, Probe Sequence
gcacctggaacagtaactaacacat

SEQ ID NO: 216147 - DNA, 25 bp, Probe Sequence
gcacctaaggaatactacacagcat

SEQ ID NO: 216148 - DNA, 25 bp, Probe Sequence
gcaccatagtggattgcctacaact

SEQ ID NO: 216149 - DNA, 25 bp, Probe Sequence
gcacagtcaaggagtgcctacctcc

SEQ ID NO: 216150 - DNA, 25 bp, Probe Sequence
gcaagtagtggatcacctatcccct

SEQ ID NO: 216151 - DNA, 25 bp, Probe Sequence
gcaaggagtggaaaccaccaccgtt

SEQ ID NO: 216152 - DNA, 25 bp, Probe Sequence
gcaagaaggaaaatccctgcaacgt

SEQ ID NO: 216153 - DNA, 25 bp, Probe Sequence
gcaaccaggaacagcaaatgcaaaa

SEQ ID NO: 216154 - DNA, 25 bp, Probe Sequence
gaagcacaggaaggggaaacagttc

SEQ ID NO: 216155 - DNA, 25 bp, Probe Sequence
gaaacggagttacaagaggctacca

SEQ ID NO: 216156 - DNA, 25 bp, Probe Sequence
taaacgggtcttcaaggtggtagag

SEQ ID NO: 216157 - DNA, 25 bp, Probe Sequence
gcaaacgttgtcatcgaagggaagg

SEQ ID NO: 216158 - DNA, 25 bp, Probe Sequence
gcaaacggtttctcctgtggatagt

SEQ ID NO: 216159 - DNA, 25 bp, Probe Sequence
gcaagagggtttttaccatatgttg

SEQ ID NO: 216160 - DNA, 25 bp, Probe Sequence
gcaagttggatttctgaacttttat

SEQ ID NO: 216161 - DNA, 25 bp, Probe Sequence
gcaagtctgggagctagttttctaa

SEQ ID NO: 216162 - DNA, 25 bp, Probe Sequence
gcaaatggtggtgtttatgctttaa

SEQ ID NO: 216163 - DNA, 25 bp, Probe Sequence
gcaaatggctaccgttttacaataa

SEQ ID NO: 216164 - DNA, 25 bp, Probe Sequence
gaaagggcaaccattctaaatcctt

SEQ ID NO: 216165 - DNA, 25 bp, Probe Sequence
gcaaaaccatgagcctattaaacct

SEQ ID NO: 216166 - DNA, 25 bp, Probe Sequence
gcaaacgccaggtgcttattaggcc

SEQ ID NO: 216167 - DNA, 25 bp, Probe Sequence
gaatacctattgtgtacagggacac

SEQ ID NO: 216168 - DNA, 25 bp, Probe Sequence
gcaaactcgattttctacggttgca

SEQ ID NO: 216169 - DNA, 25 bp, Probe Sequence
gcaactcatcgattgatttacggcg

SEQ ID NO: 216170 - DNA, 25 bp, Probe Sequence
gcaccctggatcttttgacgtggtt

SEQ ID NO: 216171 - DNA, 25 bp, Probe Sequence
gcacccaggattgttacagggatca

SEQ ID NO: 216172 - DNA, 25 bp, Probe Sequence
gcacccagaaggctcagacgcagag

SEQ ID NO: 216173 - DNA, 25 bp, Probe Sequence
gcaccctgcaagtaatcaacacata

SEQ ID NO: 216174 - DNA, 25 bp, Probe Sequence
gcaccacgcaagaagatccatcgca

SEQ ID NO: 216175 - DNA, 25 bp, Probe Sequence
gcacgcagacaactgcgtcctggac

SEQ ID NO: 216176 - DNA, 25 bp, Probe Sequence
gcacgagaatcacttgagcctggga

SEQ ID NO: 216177 - DNA, 25 bp, Probe Sequence
gcactgaagaactgtcagctcagcg

SEQ ID NO: 216178 - DNA, 25 bp, Probe Sequence
gcacgacgatgaggtgacagtcacg

SEQ ID NO: 216179 - DNA, 25 bp, Probe Sequence
gcacgcaagtgagcagacaccaccg

SEQ ID NO: 216180 - DNA, 25 bp, Probe Sequence
gcaccagtgggtggatgtccacggg

SEQ ID NO: 216181 - DNA, 25 bp, Probe Sequence
gcacggggactggagagccaccagg

SEQ ID NO: 216182 - DNA, 25 bp, Probe Sequence
gcacggaagacaagagagtagcctc

SEQ ID NO: 216183 - DNA, 25 bp, Probe Sequence
gcacagacttgatggtggctaccac

SEQ ID NO: 216184 - DNA, 25 bp, Probe Sequence
gcacaactgttctctgagtggaacc

SEQ ID NO: 216185 - DNA, 25 bp, Probe Sequence
gcactgacagttgccagggtgacag

SEQ ID NO: 216186 - DNA, 25 bp, Probe Sequence
gcacccatttgcccaggcagtgggc

SEQ ID NO: 216187 - DNA, 25 bp, Probe Sequence
gcacccatttgcccaggcagtgggc

SEQ ID NO: 216188 - DNA, 25 bp, Probe Sequence
gcacccattctgtacagggagtgag

SEQ ID NO: 216189 - DNA, 25 bp, Probe Sequence
gcacccgctatgtccagaaaggaga

SEQ ID NO: 216190 - DNA, 25 bp, Probe Sequence
gcaccatggtaaccacagtggcgag

SEQ ID NO: 216191 - DNA, 25 bp, Probe Sequence
gcaccagaggaagagtctgcctatg

SEQ ID NO: 216192 - DNA, 25 bp, Probe Sequence
gcaccgtgtgaatagtatcaagcag

SEQ ID NO: 216193 - DNA, 25 bp, Probe Sequence
gcaccgggcgattggaacacagaga

SEQ ID NO: 216194 - DNA, 25 bp, Probe Sequence
gcaccaggagctatcaggagcacgg

SEQ ID NO: 216195 - DNA, 25 bp, Probe Sequence
gcacctggcagcttgtgagaggcct

SEQ ID NO: 216196 - DNA, 25 bp, Probe Sequence
gcaccagtgactgtgagcacggcat

SEQ ID NO: 216197 - DNA, 25 bp, Probe Sequence
gcaccactggcatggatggcggcat

SEQ ID NO: 216198 - DNA, 25 bp, Probe Sequence
gcaccctggtcacctgtgtgacatt

SEQ ID NO: 216199 - DNA, 25 bp, Probe Sequence
gcaccgtcgatctacgggatctttc

SEQ ID NO: 216200 - DNA, 25 bp, Probe Sequence
gcaccgaaatcaacgggactttcca

SEQ ID NO: 216201 - DNA, 25 bp, Probe Sequence
gcacctaagcaaagcgaagatttcc

SEQ ID NO: 216202 - DNA, 25 bp, Probe Sequence
gcaccgcaatttacagaaattgtca

SEQ ID NO: 216203 - DNA, 25 bp, Probe Sequence
gcacacctttattcagaactttagt

SEQ ID NO: 216204 - DNA, 25 bp, Probe Sequence
gcaactctggctttcataagtagta

SEQ ID NO: 216205 - DNA, 25 bp, Probe Sequence
gcacactctgggatggaagtagctg

SEQ ID NO: 216206 - DNA, 25 bp, Probe Sequence
gcacagatttggagagaagctactc

SEQ ID NO: 216207 - DNA, 25 bp, Probe Sequence
gcacagattttcagaatggtacgta

SEQ ID NO: 216208 - DNA, 25 bp, Probe Sequence
gcaaatattacaccaagggacgtag

SEQ ID NO: 216209 - DNA, 25 bp, Probe Sequence
gcaaatagtgtatgcatggggagcc

SEQ ID NO: 216210 - DNA, 25 bp, Probe Sequence
gcaaatgagtttcgctgttatgtga

SEQ ID NO: 216211 - DNA, 25 bp, Probe Sequence
gcaactcatgactatcctgatattg

SEQ ID NO: 216212 - DNA, 25 bp, Probe Sequence
gcaccctgagctgcatgctgaattg

SEQ ID NO: 216213 - DNA, 25 bp, Probe Sequence
gcactctctgagagctccaatttca

SEQ ID NO: 216214 - DNA, 25 bp, Probe Sequence
gcacatgcctgtaatcccagttatc

SEQ ID NO: 216215 - DNA, 25 bp, Probe Sequence
gcactgttctctactccaaatatga

SEQ ID NO: 216216 - DNA, 25 bp, Probe Sequence
gcactttgttattcccatttgagag

SEQ ID NO: 216217 - DNA, 25 bp, Probe Sequence
gcactttgttgacttccatggtgtg

SEQ ID NO: 216218 - DNA, 25 bp, Probe Sequence
gcactctttcagctatctatgtgga

SEQ ID NO: 216219 - DNA, 25 bp, Probe Sequence
gcactttatgcacgtattattgaca

SEQ ID NO: 216220 - DNA, 25 bp, Probe Sequence
gcactgttagaatttgtcgggcaaa

SEQ ID NO: 216221 - DNA, 25 bp, Probe Sequence
gcactgttgaacatggacaggagaa

SEQ ID NO: 216222 - DNA, 25 bp, Probe Sequence
gcacatttagtaaggacacaggaga

SEQ ID NO: 216223 - DNA, 25 bp, Probe Sequence
gcacactttgtgagaaccaatggga

SEQ ID NO: 216224 - DNA, 25 bp, Probe Sequence
gcaagtaatgctttactccaaggga

SEQ ID NO: 216225 - DNA, 25 bp, Probe Sequence
gcacagctaatgattcaatgcgaga

SEQ ID NO: 216226 - DNA, 25 bp, Probe Sequence
gcactgtgtgcagtttgcaacaaag

SEQ ID NO: 216227 - DNA, 25 bp, Probe Sequence
gcactggcctgcattgaataaaatc

SEQ ID NO: 216228 - DNA, 25 bp, Probe Sequence
gcactaccgatgctgaaagacaagc

SEQ ID NO: 216229 - DNA, 25 bp, Probe Sequence
gcaccccggtggaagagacactgcg

SEQ ID NO: 216230 - DNA, 25 bp, Probe Sequence
gcacccacacgtagaaagaggctca

SEQ ID NO: 216231 - DNA, 25 bp, Probe Sequence
gcaccctgagcatggacaagggctt

SEQ ID NO: 216232 - DNA, 25 bp, Probe Sequence
gcaccctgggacccagaagtgcccc

SEQ ID NO: 216233 - DNA, 25 bp, Probe Sequence
gcactccttggagcaaaagcccact

SEQ ID NO: 216234 - DNA, 25 bp, Probe Sequence
gcacattcattctcaaaaacccacc

SEQ ID NO: 216235 - DNA, 25 bp, Probe Sequence
gcacattcattctcaaaaacccacc

SEQ ID NO: 216236 - DNA, 25 bp, Probe Sequence
gcacgtcttcactaaaggaatcccc

SEQ ID NO: 216237 - DNA, 25 bp, Probe Sequence
gcacctctttcataagtgagttact

SEQ ID NO: 216238 - DNA, 25 bp, Probe Sequence
gcactcacttccaaaagattgttgt

SEQ ID NO: 216239 - DNA, 25 bp, Probe Sequence
gcacgcatttcggaagaatattttt

SEQ ID NO: 216240 - DNA, 25 bp, Probe Sequence
gcacctttggcagcagtcacataat

SEQ ID NO: 216241 - DNA, 25 bp, Probe Sequence
gcaccctcataagtcgtcactaata

SEQ ID NO: 216242 - DNA, 25 bp, Probe Sequence
gcacgcactaaagcactcaaagacg

SEQ ID NO: 216243 - DNA, 25 bp, Probe Sequence
gcacgacctgtacagccaaacacag

SEQ ID NO: 216244 - DNA, 25 bp, Probe Sequence
gcactcccagtgtgggcaacaagag

SEQ ID NO: 216245 - DNA, 25 bp, Probe Sequence
gcactccaggctaggggacaaagcg

SEQ ID NO: 216246 - DNA, 25 bp, Probe Sequence
gcacccaggctttagagaagtatag

SEQ ID NO: 216247 - DNA, 25 bp, Probe Sequence
gcaccgaactcataggatggataca

SEQ ID NO: 216248 - DNA, 25 bp, Probe Sequence
gcacagctaacacttttaggaacag

SEQ ID NO: 216249 - DNA, 25 bp, Probe Sequence
gcaccatccatcattatgtagatga

SEQ ID NO: 216250 - DNA, 25 bp, Probe Sequence
gcacctactttaatgatatagcaca

SEQ ID NO: 216251 - DNA, 25 bp, Probe Sequence
gcactgctccttcagtaatacagaa

SEQ ID NO: 216252 - DNA, 25 bp, Probe Sequence
gcacgtgctgctgtactaaaagaac

SEQ ID NO: 216253 - DNA, 25 bp, Probe Sequence
gcacggcatcgtcaccaactgggac

SEQ ID NO: 216254 - DNA, 25 bp, Probe Sequence
gcacaggtccgcaaccagataggga

SEQ ID NO: 216255 - DNA, 25 bp, Probe Sequence
gcacggaacagcagtcagaagggtt

SEQ ID NO: 216256 - DNA, 25 bp, Probe Sequence
gcacttgaatccatgtcacaggggg

SEQ ID NO: 216257 - DNA, 25 bp, Probe Sequence
gcacctttaaggaccagctgggctg

SEQ ID NO: 216258 - DNA, 25 bp, Probe Sequence
gcaccggtagagggcacaggaggcc

SEQ ID NO: 216259 - DNA, 25 bp, Probe Sequence
gcaccctggaaggccacggagggag

SEQ ID NO: 216260 - DNA, 25 bp, Probe Sequence
gcacctatggacttccagctggagg

SEQ ID NO: 216261 - DNA, 25 bp, Probe Sequence
gcacctcatggttttcaggatgctg

SEQ ID NO: 216262 - DNA, 25 bp, Probe Sequence
gcaccctgagtgcttcgtgtgtgcc

SEQ ID NO: 216263 - DNA, 25 bp, Probe Sequence
gcacccaagtgtttggcttctggct

SEQ ID NO: 216264 - DNA, 25 bp, Probe Sequence
gcacccaaagtgggtgctgacggct

SEQ ID NO: 216265 - DNA, 25 bp, Probe Sequence
gcacccatatgggaatgttgaaact

SEQ ID NO: 216266 - DNA, 25 bp, Probe Sequence
gcaccctcagagaaaatagcaaacc

SEQ ID NO: 216267 - DNA, 25 bp, Probe Sequence
gcaccatctcaagggaatacacata

SEQ ID NO: 216268 - DNA, 25 bp, Probe Sequence
gcacctccacaccagagtacaatgt

SEQ ID NO: 216269 - DNA, 25 bp, Probe Sequence
gcacctcagaaacagacaccatctg

SEQ ID NO: 216270 - DNA, 25 bp, Probe Sequence
gcacctggaaaatgaactcacccac

SEQ ID NO: 216271 - DNA, 25 bp, Probe Sequence
gcacgtgagaaaactgcgagccagc

SEQ ID NO: 216272 - DNA, 25 bp, Probe Sequence
gcacatgcggtatgacgcggacgcg

SEQ ID NO: 216273 - DNA, 25 bp, Probe Sequence
gcacatcgcgtgtgagtgcaccagc

SEQ ID NO: 216274 - DNA, 25 bp, Probe Sequence
gcacatacggattcttgctgccgga

SEQ ID NO: 216275 - DNA, 25 bp, Probe Sequence
gcacatacgatattgcctggtagta

SEQ ID NO: 216276 - DNA, 25 bp, Probe Sequence
gcacatccagatacccagtggcatt

SEQ ID NO: 216277 - DNA, 25 bp, Probe Sequence
gcactccaaactaagggcttctagc

SEQ ID NO: 216278 - DNA, 25 bp, Probe Sequence
gcactcctcactcaagtggctattg

SEQ ID NO: 216279 - DNA, 25 bp, Probe Sequence
gcactcccttagacagggcaattgc

SEQ ID NO: 216280 - DNA, 25 bp, Probe Sequence
gcacttcctgtaccagggagagtgt

SEQ ID NO: 216281 - DNA, 25 bp, Probe Sequence
gcacttacacttccagcgaggagag

SEQ ID NO: 216282 - DNA, 25 bp, Probe Sequence
gcacaaatcaacccactgcagtggg

SEQ ID NO: 216283 - DNA, 25 bp, Probe Sequence
gcacaacatcgaagtcctggagggg

SEQ ID NO: 216284 - DNA, 25 bp, Probe Sequence
gcacaacatcgaagtcctggagggg

SEQ ID NO: 216285 - DNA, 25 bp, Probe Sequence
gcacaacatcgaagtcctggagggg

SEQ ID NO: 216286 - DNA, 25 bp, Probe Sequence
gcacaacatcaaagtcctggagggg

SEQ ID NO: 216287 - DNA, 25 bp, Probe Sequence
gcacttctcacagttcctggggaag

SEQ ID NO: 216288 - DNA, 25 bp, Probe Sequence
gcacttctcacagttcctggggaag

SEQ ID NO: 216289 - DNA, 25 bp, Probe Sequence
gcactccactacatccatgatggga

SEQ ID NO: 216290 - DNA, 25 bp, Probe Sequence
gcacccactgttaccagaagctgct

SEQ ID NO: 216291 - DNA, 25 bp, Probe Sequence
gcacccggtggatgctcagagatgg

SEQ ID NO: 216292 - DNA, 25 bp, Probe Sequence
gcacctcaggtgcacttacatatgg

SEQ ID NO: 216293 - DNA, 25 bp, Probe Sequence
gcacgatgggctcagctttcagaag

SEQ ID NO: 216294 - DNA, 25 bp, Probe Sequence
gcacgatggtgggcacttgtagtcc

SEQ ID NO: 216295 - DNA, 25 bp, Probe Sequence
gcacgaggggcttgtaggatatata

SEQ ID NO: 216296 - DNA, 25 bp, Probe Sequence
gcacggtggcacatggcttgtaatc

SEQ ID NO: 216297 - DNA, 25 bp, Probe Sequence
gcacatttgggcagcacttgtcaac

SEQ ID NO: 216298 - DNA, 25 bp, Probe Sequence
gcacatttgggagctggagaacagg

SEQ ID NO: 216299 - DNA, 25 bp, Probe Sequence
gcactctgggaacctataaaggcag

SEQ ID NO: 216300 - DNA, 25 bp, Probe Sequence
gcactgtgggatgccgaggagggca

SEQ ID NO: 216301 - DNA, 25 bp, Probe Sequence
gcacgctgggatgtgggtcatgagc

SEQ ID NO: 216302 - DNA, 25 bp, Probe Sequence
gcactgtggccaagaggtgcttgag

SEQ ID NO: 216303 - DNA, 25 bp, Probe Sequence
gcactgttgcctgggctggaatgca

SEQ ID NO: 216304 - DNA, 25 bp, Probe Sequence
gcactgttgactctgcatatttatt

SEQ ID NO: 216305 - DNA, 25 bp, Probe Sequence
gcactagtcaccttaagtagattac

SEQ ID NO: 216306 - DNA, 25 bp, Probe Sequence
gcacgagaacaactacgtgatgaat

SEQ ID NO: 216307 - DNA, 25 bp, Probe Sequence
gcacgatcagcagcactagttggac

SEQ ID NO: 216308 - DNA, 25 bp, Probe Sequence
gcacgctgagcaccaagagcttgtg

SEQ ID NO: 216309 - DNA, 25 bp, Probe Sequence
gcacgctacagtacaagctgctgga

SEQ ID NO: 216310 - DNA, 25 bp, Probe Sequence
gcacgaggatgttctcagctctggc

SEQ ID NO: 216311 - DNA, 25 bp, Probe Sequence
gcactgggcatcaatcagccttgtc

SEQ ID NO: 216312 - DNA, 25 bp, Probe Sequence
gcactgcacagaatgtcaccttctc

SEQ ID NO: 216313 - DNA, 25 bp, Probe Sequence
gcactacagttgtcaagaatgcatc

SEQ ID NO: 216314 - DNA, 25 bp, Probe Sequence
gcactgaatgttccactgaagtggc

SEQ ID NO: 216315 - DNA, 25 bp, Probe Sequence
gcactgatagttggcattactgttg

SEQ ID NO: 216316 - DNA, 25 bp, Probe Sequence
gcacgatgagattgcctaccatttt

SEQ ID NO: 216317 - DNA, 25 bp, Probe Sequence
gcacctgtgattgtactcttatcat

SEQ ID NO: 216318 - DNA, 25 bp, Probe Sequence
gcacctgtgattgataggccttcca

SEQ ID NO: 216319 - DNA, 25 bp, Probe Sequence
gcacctctgttcatagagcgtctct

SEQ ID NO: 216320 - DNA, 25 bp, Probe Sequence
gcacccatttcgaagaggatcagca

SEQ ID NO: 216321 - DNA, 25 bp, Probe Sequence
gcacccattggcctggaagaaaggc

SEQ ID NO: 216322 - DNA, 25 bp, Probe Sequence
gcacccatgggctctgacagaaagc

SEQ ID NO: 216323 - DNA, 25 bp, Probe Sequence
gcacccagagcaactcttgagaaag

SEQ ID NO: 216324 - DNA, 25 bp, Probe Sequence
gcacacctacacctcttgaaaatag

SEQ ID NO: 216325 - DNA, 25 bp, Probe Sequence
gcacacctacacctcttgaaaatag

SEQ ID NO: 216326 - DNA, 25 bp, Probe Sequence
gcacacacttgctcgttagaaagag

SEQ ID NO: 216327 - DNA, 25 bp, Probe Sequence
gcactcagcatttcctgatgacaga

SEQ ID NO: 216328 - DNA, 25 bp, Probe Sequence
gcactggatacccatgactgcaaga

SEQ ID NO: 216329 - DNA, 25 bp, Probe Sequence
gcacttctcctgcagactgaagact

SEQ ID NO: 216330 - DNA, 25 bp, Probe Sequence
gcactacttgcttatattgacaaca

SEQ ID NO: 216331 - DNA, 25 bp, Probe Sequence
gcactggcaagaaaatggacccacc

SEQ ID NO: 216332 - DNA, 25 bp, Probe Sequence
gcactaggagactacatgggcgcct

SEQ ID NO: 216333 - DNA, 25 bp, Probe Sequence
gcacataaacaccaacgatggcctc

SEQ ID NO: 216334 - DNA, 25 bp, Probe Sequence
gcacaagaaccagactatcgagcgc

SEQ ID NO: 216335 - DNA, 25 bp, Probe Sequence
gcacaaaagccagactgactcacct

SEQ ID NO: 216336 - DNA, 25 bp, Probe Sequence
gcaaataaccatgtcaaataccctg

SEQ ID NO: 216337 - DNA, 25 bp, Probe Sequence
gcaacaacctagttagtaccccagc

SEQ ID NO: 216338 - DNA, 25 bp, Probe Sequence
gcaaaaccttgagattcaccggcga

SEQ ID NO: 216339 - DNA, 25 bp, Probe Sequence
gcaaaaaattatagtttctctggcc

SEQ ID NO: 216340 - DNA, 25 bp, Probe Sequence
gcaaataaatccttgttttgtcttc

SEQ ID NO: 216341 - DNA, 25 bp, Probe Sequence
gcaaataaatccttgttttgtcttc

SEQ ID NO: 216342 - DNA, 25 bp, Probe Sequence
gaaataaccccgtgcatatatggtc

SEQ ID NO: 216343 - DNA, 25 bp, Probe Sequence
gaagcagccccagggaccaattttc

SEQ ID NO: 216344 - DNA, 25 bp, Probe Sequence
gaagcagccccagggaccaattttc

SEQ ID NO: 216345 - DNA, 25 bp, Probe Sequence
gcaaactctctctggacaaagtctt

SEQ ID NO: 216346 - DNA, 25 bp, Probe Sequence
gcactgaatgcctacaggacaaagt

SEQ ID NO: 216347 - DNA, 25 bp, Probe Sequence
gcactaatggtgtctgagagcaaaa

SEQ ID NO: 216348 - DNA, 25 bp, Probe Sequence
gcactcttctggctgacagcacaag

SEQ ID NO: 216349 - DNA, 25 bp, Probe Sequence
gcactatggcttgtacaaccagtcg

SEQ ID NO: 216350 - DNA, 25 bp, Probe Sequence
gcacacggctgtttacaactaactg

SEQ ID NO: 216351 - DNA, 25 bp, Probe Sequence
gcactgggctgttgttccattgaag

SEQ ID NO: 216352 - DNA, 25 bp, Probe Sequence
gcactaggttcaattccctgaaggt

SEQ ID NO: 216353 - DNA, 25 bp, Probe Sequence
gcacaacgtcgaagttctggagggg

SEQ ID NO: 216354 - DNA, 25 bp, Probe Sequence
gcacaaccagctgagggtgaagcgg

SEQ ID NO: 216355 - DNA, 25 bp, Probe Sequence
gcactactagtggaggggcatttgg

SEQ ID NO: 216356 - DNA, 25 bp, Probe Sequence
gcaaagtcaagtggagggcatttgg

SEQ ID NO: 216357 - DNA, 25 bp, Probe Sequence
gcaaagtgcaagcgagtacctatgg

SEQ ID NO: 216358 - DNA, 25 bp, Probe Sequence
gcacacgtggggcttaccagtggcc

SEQ ID NO: 216359 - DNA, 25 bp, Probe Sequence
gcaccgagggagcaatacctgtggc

SEQ ID NO: 216360 - DNA, 25 bp, Probe Sequence
gcaccgcagggacagatattaccgt

SEQ ID NO: 216361 - DNA, 25 bp, Probe Sequence
gcaccgcagaggtggatcgacgccc

SEQ ID NO: 216362 - DNA, 25 bp, Probe Sequence
gcactttgaatctggatcaaccttg

SEQ ID NO: 216363 - DNA, 25 bp, Probe Sequence
gcacatacctattttgtagacttac

SEQ ID NO: 216364 - DNA, 25 bp, Probe Sequence
gcaatggtgtagttcttagacctaa

SEQ ID NO: 216365 - DNA, 25 bp, Probe Sequence
gcacggaggagctctttgacttctt

SEQ ID NO: 216366 - DNA, 25 bp, Probe Sequence
gcacggaagagtttgtcttgcttta

SEQ ID NO: 216367 - DNA, 25 bp, Probe Sequence
gcaatggagaagcaaatttgtttca

SEQ ID NO: 216368 - DNA, 25 bp, Probe Sequence
gcacaagagaaactcctagtttaga

SEQ ID NO: 216369 - DNA, 25 bp, Probe Sequence
gcaaaaagcaggccacaaccttaac

SEQ ID NO: 216370 - DNA, 25 bp, Probe Sequence
gcaagcaccaaccccataaagtgac

SEQ ID NO: 216371 - DNA, 25 bp, Probe Sequence
gcaaacctacgtcagaagcaattca

SEQ ID NO: 216372 - DNA, 25 bp, Probe Sequence
gcaaatctccataggtagaaaacac

SEQ ID NO: 216373 - DNA, 25 bp, Probe Sequence
gcacagtcctcattcaggcaataaa

SEQ ID NO: 216374 - DNA, 25 bp, Probe Sequence
gcacgtggtcaatgtggacatccag

SEQ ID NO: 216375 - DNA, 25 bp, Probe Sequence
gcacagtggctcatgcctgtaatcc

SEQ ID NO: 216376 - DNA, 25 bp, Probe Sequence
gcacagtggctcatgcctgtaatcc

SEQ ID NO: 216377 - DNA, 25 bp, Probe Sequence
gcacagtggctcatgcctgtaatcc

SEQ ID NO: 216378 - DNA, 25 bp, Probe Sequence
gcacaatgaccttgtcgaaatccac

SEQ ID NO: 216379 - DNA, 25 bp, Probe Sequence
gcacttgacctcggcagagaagtag

SEQ ID NO: 216380 - DNA, 25 bp, Probe Sequence
gcactccagcctgggagacagaaag

SEQ ID NO: 216381 - DNA, 25 bp, Probe Sequence
gcactccagcctgggtgacaagagt

SEQ ID NO: 216382 - DNA, 25 bp, Probe Sequence
gcactccagcctgggtgacaagagt

SEQ ID NO: 216383 - DNA, 25 bp, Probe Sequence
gcactccagcctgggcgacagagcg

SEQ ID NO: 216384 - DNA, 25 bp, Probe Sequence
gcactccagcctgggtgacagagtg

SEQ ID NO: 216385 - DNA, 25 bp, Probe Sequence
gcactccagcctgggtgacagagtg

SEQ ID NO: 216386 - DNA, 25 bp, Probe Sequence
gcactccagcctgggtgacagggtg

SEQ ID NO: 216387 - DNA, 25 bp, Probe Sequence
gcactccagcctgggtgacggaata

SEQ ID NO: 216388 - DNA, 25 bp, Probe Sequence
gcactccagcctgggtgacagtgag

SEQ ID NO: 216389 - DNA, 25 bp, Probe Sequence
gcactccagcctgggtgacagagag

SEQ ID NO: 216390 - DNA, 25 bp, Probe Sequence
gcactctagcctgggtgacagagcg

SEQ ID NO: 216391 - DNA, 25 bp, Probe Sequence
gcacgctggcctatatatcagggac

SEQ ID NO: 216392 - DNA, 25 bp, Probe Sequence
gcacatcgtcgtattgatcagctga

SEQ ID NO: 216393 - DNA, 25 bp, Probe Sequence
gcacgcaacgtagatgcatcacaca

SEQ ID NO: 216394 - DNA, 25 bp, Probe Sequence
gcacgagcacttagcttgttcagat

SEQ ID NO: 216395 - DNA, 25 bp, Probe Sequence
gcacggagttgagctcatcatcagt

SEQ ID NO: 216396 - DNA, 25 bp, Probe Sequence
gcacgagtgtattggtctgtctgct

SEQ ID NO: 216397 - DNA, 25 bp, Probe Sequence
gcacagcatgtattttcttctcttc

SEQ ID NO: 216398 - DNA, 25 bp, Probe Sequence
gcacagcatgtattttcttctcttc

SEQ ID NO: 216399 - DNA, 25 bp, Probe Sequence
gcacagcatgtattttcttctcttc

SEQ ID NO: 216400 - DNA, 25 bp, Probe Sequence
gcacagcatgtattttcttctcttc

SEQ ID NO: 216401 - DNA, 25 bp, Probe Sequence
gcacagattttttctttctgctttt

SEQ ID NO: 216402 - DNA, 25 bp, Probe Sequence
gcaaatgttgtctctcattgccgta

SEQ ID NO: 216403 - DNA, 25 bp, Probe Sequence
gcaaaggttacctttttgtatggtg

SEQ ID NO: 216404 - DNA, 25 bp, Probe Sequence
gcaaaggattaggaacctttttatg

SEQ ID NO: 216405 - DNA, 25 bp, Probe Sequence
gcaaaggtaagttacagcttgtttt

SEQ ID NO: 216406 - DNA, 25 bp, Probe Sequence
gcaaaagtgccggttagtcaggttt

SEQ ID NO: 216407 - DNA, 25 bp, Probe Sequence
gcaaagggccagttgtttcagttta

SEQ ID NO: 216408 - DNA, 25 bp, Probe Sequence
gcaaatgccctctctggtgacgttt

SEQ ID NO: 216409 - DNA, 25 bp, Probe Sequence
gcaaaatcttccagctgtacgttac

SEQ ID NO: 216410 - DNA, 25 bp, Probe Sequence
gcaaaagtgttcaattgtcctccca

SEQ ID NO: 216411 - DNA, 25 bp, Probe Sequence
gcacaaggttgtaaactccatcctg

SEQ ID NO: 216412 - DNA, 25 bp, Probe Sequence
gacagggttacatccccaaggtgag

SEQ ID NO: 216413 - DNA, 25 bp, Probe Sequence
gaagacagcttagaagtccaaggga

SEQ ID NO: 216414 - DNA, 25 bp, Probe Sequence
gcaaacctatacacaaccaagtgaa

SEQ ID NO: 216415 - DNA, 25 bp, Probe Sequence
gcaaaccaatacatcacatcagcag

SEQ ID NO: 216416 - DNA, 25 bp, Probe Sequence
gcacaaccataatgatcagtatgaa

SEQ ID NO: 216417 - DNA, 25 bp, Probe Sequence
gcacacctaaatggatttattgcca

SEQ ID NO: 216418 - DNA, 25 bp, Probe Sequence
gcacacacaaaaacagtataataca

SEQ ID NO: 216419 - DNA, 25 bp, Probe Sequence
gcacagcaagactccgtctcaaaaa

SEQ ID NO: 216420 - DNA, 25 bp, Probe Sequence
gcacacgagacacttggtttcacaa

SEQ ID NO: 216421 - DNA, 25 bp, Probe Sequence
gcacacgagaacatgcctctcgcaa

SEQ ID NO: 216422 - DNA, 25 bp, Probe Sequence
gcacagcgataacttcttcacatgc

SEQ ID NO: 216423 - DNA, 25 bp, Probe Sequence
gcacagttgagaaactctcctgccg

SEQ ID NO: 216424 - DNA, 25 bp, Probe Sequence
gcactgtaagaagctgtccagctgg

SEQ ID NO: 216425 - DNA, 25 bp, Probe Sequence
gcacttcaagaagtcactgtcagag

SEQ ID NO: 216426 - DNA, 25 bp, Probe Sequence
gcacatcaacgagctgactatgaag

SEQ ID NO: 216427 - DNA, 25 bp, Probe Sequence
gcacatgcggcattttactatgaaa

SEQ ID NO: 216428 - DNA, 25 bp, Probe Sequence
gcactgggcattaccatagagaaca

SEQ ID NO: 216429 - DNA, 25 bp, Probe Sequence
gcactgtggttcctgcatgaagaca

SEQ ID NO: 216430 - DNA, 25 bp, Probe Sequence
gcacgtgatttgtccagcgacactc

SEQ ID NO: 216431 - DNA, 25 bp, Probe Sequence
gcacagatatgtagcacacagcgac

SEQ ID NO: 216432 - DNA, 25 bp, Probe Sequence
gcacacatcagtgcacacggatgca

SEQ ID NO: 216433 - DNA, 25 bp, Probe Sequence
gcaagacagtgctcagaaggaaatt

SEQ ID NO: 216434 - DNA, 25 bp, Probe Sequence
gcacagaaggccaagatgaggctaa

SEQ ID NO: 216435 - DNA, 25 bp, Probe Sequence
gcactgccagtggagatgggcgtca

SEQ ID NO: 216436 - DNA, 25 bp, Probe Sequence
gcactgccaatggacaggtgaacct

SEQ ID NO: 216437 - DNA, 25 bp, Probe Sequence
gcactgccaaggctgtgtgtgcacc

SEQ ID NO: 216438 - DNA, 25 bp, Probe Sequence
gcacgccagaaggatgccgcagacc

SEQ ID NO: 216439 - DNA, 25 bp, Probe Sequence
gcacaacatgaagctccctgtgccg

SEQ ID NO: 216440 - DNA, 25 bp, Probe Sequence
gcacaacaaatttctcctgtaccta

SEQ ID NO: 216441 - DNA, 25 bp, Probe Sequence
gcaaatataaggtccctgactactg

SEQ ID NO: 216442 - DNA, 25 bp, Probe Sequence
gcaaataaacgctcactccgaatta

SEQ ID NO: 216443 - DNA, 25 bp, Probe Sequence
gcaagagaaagccctaccacaagaa

SEQ ID NO: 216444 - DNA, 25 bp, Probe Sequence
gcaagagaaagccctaccacaagaa

SEQ ID NO: 216445 - DNA, 25 bp, Probe Sequence
gcaagagaaagccctaccacaagaa

SEQ ID NO: 216446 - DNA, 25 bp, Probe Sequence
gcaaagcaccgcaacatgaccgaaa

SEQ ID NO: 216447 - DNA, 25 bp, Probe Sequence
gcaaatgacccaagcatgaactaaa

SEQ ID NO: 216448 - DNA, 25 bp, Probe Sequence
gcaaaacatacaagggacaaaagac

SEQ ID NO: 216449 - DNA, 25 bp, Probe Sequence
gcaacaaaaaagccccaatgaaata

SEQ ID NO: 216450 - DNA, 25 bp, Probe Sequence
gcaaaaacgattccgaaacataata

SEQ ID NO: 216451 - DNA, 25 bp, Probe Sequence
gcacaggagtgccatacccaaaaaa

SEQ ID NO: 216452 - DNA, 25 bp, Probe Sequence
gcaagaaggcgatagcttttagaaa

SEQ ID NO: 216453 - DNA, 25 bp, Probe Sequence
gcaaatagagactcgttatttaaag

SEQ ID NO: 216454 - DNA, 25 bp, Probe Sequence
gcaaacagaaatcaggtgttttaag

SEQ ID NO: 216455 - DNA, 25 bp, Probe Sequence
gcaataccaaatatacaggtttagt

SEQ ID NO: 216456 - DNA, 25 bp, Probe Sequence
gatttccaaattcagacccttagga

SEQ ID NO: 216457 - DNA, 25 bp, Probe Sequence
gacttaaaatctataccacctggga

SEQ ID NO: 216458 - DNA, 25 bp, Probe Sequence
gaagaacaaaaagaaagccgggcat

SEQ ID NO: 216459 - DNA, 25 bp, Probe Sequence
gaagcccaacaatggaaaactaagc

SEQ ID NO: 216460 - DNA, 25 bp, Probe Sequence
gaatcaccagaatccgaggggccaa

SEQ ID NO: 216461 - DNA, 25 bp, Probe Sequence
gcactcctggaatcacagaggggtc

SEQ ID NO: 216462 - DNA, 25 bp, Probe Sequence
gcacatcccagacatcatcaaggtg

SEQ ID NO: 216463 - DNA, 25 bp, Probe Sequence
gcactccagcgacagagcaagactc

SEQ ID NO: 216464 - DNA, 25 bp, Probe Sequence
gcactccacgagcgacgtggtgcgg

SEQ ID NO: 216465 - DNA, 25 bp, Probe Sequence
gcactttctacgctcgggagcggct

SEQ ID NO: 216466 - DNA, 25 bp, Probe Sequence
gcactgcctaaacgggggaggacgc

SEQ ID NO: 216467 - DNA, 25 bp, Probe Sequence
gcactgcctgaaggcgagtgtgggc

SEQ ID NO: 216468 - DNA, 25 bp, Probe Sequence
gcactatcgatagggcaccgcgtgc

SEQ ID NO: 216469 - DNA, 25 bp, Probe Sequence
gcactgtctatctggatcccagggc

SEQ ID NO: 216470 - DNA, 25 bp, Probe Sequence
gcacattcacagtagttcccagggc

SEQ ID NO: 216471 - DNA, 25 bp, Probe Sequence
gcacttcaaggtgctccgagatgga

SEQ ID NO: 216472 - DNA, 25 bp, Probe Sequence
gcactacagggtgctgggcagtgtg

SEQ ID NO: 216473 - DNA, 25 bp, Probe Sequence
gcacaaagggctccatacagcaggc

SEQ ID NO: 216474 - DNA, 25 bp, Probe Sequence
gcactgacagtggatccaacaatgt

SEQ ID NO: 216475 - DNA, 25 bp, Probe Sequence
gcactgacatatgctacaacatgga

SEQ ID NO: 216476 - DNA, 25 bp, Probe Sequence
gcactttatagccacggctgcacag

SEQ ID NO: 216477 - DNA, 25 bp, Probe Sequence
gcactagtatagcatggggaaccac

SEQ ID NO: 216478 - DNA, 25 bp, Probe Sequence
gcacacactaagtccgtggatacca

SEQ ID NO: 216479 - DNA, 25 bp, Probe Sequence
gcaacgcttacgtgttgatcccagt

SEQ ID NO: 216480 - DNA, 25 bp, Probe Sequence
gcacatccttgaggtactcatacct

SEQ ID NO: 216481 - DNA, 25 bp, Probe Sequence
gcacatccatgtcagtacacttgcc

SEQ ID NO: 216482 - DNA, 25 bp, Probe Sequence
gcactcacgtgcatgatgcccaatg

SEQ ID NO: 216483 - DNA, 25 bp, Probe Sequence
gcactgagccatgatggcgccactg

SEQ ID NO: 216484 - DNA, 25 bp, Probe Sequence
gcacgtgcacatggctgcagtggac

SEQ ID NO: 216485 - DNA, 25 bp, Probe Sequence
gcactgtctcagcctgcagagaaga

SEQ ID NO: 216486 - DNA, 25 bp, Probe Sequence
gcacttctagtcagatacagattca

SEQ ID NO: 216487 - DNA, 25 bp, Probe Sequence
gcactattcacacagaacacattca

SEQ ID NO: 216488 - DNA, 25 bp, Probe Sequence
gcactgtcctcaaagaccatctgta

SEQ ID NO: 216489 - DNA, 25 bp, Probe Sequence
gcactgtctcatagaaggctctggt

SEQ ID NO: 216490 - DNA, 25 bp, Probe Sequence
gcacgtcactgagaattctggcgca

SEQ ID NO: 216491 - DNA, 25 bp, Probe Sequence
gcacggcgctgagacagagctggag

SEQ ID NO: 216492 - DNA, 25 bp, Probe Sequence
gcacgggcatgtgaaatttgcatca

SEQ ID NO: 216493 - DNA, 25 bp, Probe Sequence
gcacgggctgaggaacctctggcaa

SEQ ID NO: 216494 - DNA, 25 bp, Probe Sequence
gcaatgggtggagaccctggatatc

SEQ ID NO: 216495 - DNA, 25 bp, Probe Sequence
gcacagggacgagcacgaggatata

SEQ ID NO: 216496 - DNA, 25 bp, Probe Sequence
gcaacggcacaaaactagaagaacc

SEQ ID NO: 216497 - DNA, 25 bp, Probe Sequence
gcaaaagcaattcagtggaagaagg

SEQ ID NO: 216498 - DNA, 25 bp, Probe Sequence
gcaaataccttgtttggaactgcaa

SEQ ID NO: 216499 - DNA, 25 bp, Probe Sequence
gcaaaactttgactatggcgtatta

SEQ ID NO: 216500 - DNA, 25 bp, Probe Sequence
gcaagaaagggattgtgggtcagtc

SEQ ID NO: 216501 - DNA, 25 bp, Probe Sequence
gcacagtaagactttgcatggagta

SEQ ID NO: 216502 - DNA, 25 bp, Probe Sequence
gcacaaaagcactttgagtggcact

SEQ ID NO: 216503 - DNA, 25 bp, Probe Sequence
gcacaaatgagtggcagttgctgga

SEQ ID NO: 216504 - DNA, 25 bp, Probe Sequence
gcacaggatggggcaagctctggca

SEQ ID NO: 216505 - DNA, 25 bp, Probe Sequence
gcacagagatgtagatgggccgcag

SEQ ID NO: 216506 - DNA, 25 bp, Probe Sequence
gcacggagttgaggaggcgctggcc

SEQ ID NO: 216507 - DNA, 25 bp, Probe Sequence
gcacgtgagcgtgcgagtgcacgtc

SEQ ID NO: 216508 - DNA, 25 bp, Probe Sequence
gcacaagacctctgacagcacgttc

SEQ ID NO: 216509 - DNA, 25 bp, Probe Sequence
gcacaaggcctctggcatttgtggg

SEQ ID NO: 216510 - DNA, 25 bp, Probe Sequence
gcacaaacttgctgctgcttagatc

SEQ ID NO: 216511 - DNA, 25 bp, Probe Sequence
gcacaattcttgaactgatgtcagc

SEQ ID NO: 216512 - DNA, 25 bp, Probe Sequence
gcaacaatcactagactactcagct

SEQ ID NO: 216513 - DNA, 25 bp, Probe Sequence
gcacacaaagcaagcaccatctggg

SEQ ID NO: 216514 - DNA, 25 bp, Probe Sequence
gcaagcagagagagacgacgacgaa

SEQ ID NO: 216515 - DNA, 25 bp, Probe Sequence
gcacagcggattggactgagcagtc

SEQ ID NO: 216516 - DNA, 25 bp, Probe Sequence
gcacagaggcaaggcgtcagcaggc

SEQ ID NO: 216517 - DNA, 25 bp, Probe Sequence
gcaagaagcaaagtggacggccggg

SEQ ID NO: 216518 - DNA, 25 bp, Probe Sequence
gcaaaagaacacatacgtgcggtca

SEQ ID NO: 216519 - DNA, 25 bp, Probe Sequence
gcactaaaacaggtcaggccgggca

SEQ ID NO: 216520 - DNA, 25 bp, Probe Sequence
gcaaaaaacaggaaggcactcccaa

SEQ ID NO: 216521 - DNA, 25 bp, Probe Sequence
gcaacaacacctcggaggtctacca

SEQ ID NO: 216522 - DNA, 25 bp, Probe Sequence
gcaaagcaccctcaaaagctgcacc

SEQ ID NO: 216523 - DNA, 25 bp, Probe Sequence
gcaagaaccctgccaagtactacac

SEQ ID NO: 216524 - DNA, 25 bp, Probe Sequence
gcactacaggcccatgaattacttc

SEQ ID NO: 216525 - DNA, 25 bp, Probe Sequence
gcacaaaggccgcttatgcctctac

SEQ ID NO: 216526 - DNA, 25 bp, Probe Sequence
gcacaacactggggagtcacccttc

SEQ ID NO: 216527 - DNA, 25 bp, Probe Sequence
gcacaacactggggagtcacccttc

SEQ ID NO: 216528 - DNA, 25 bp, Probe Sequence
gcacaacactggggagtcacccttc

SEQ ID NO: 216529 - DNA, 25 bp, Probe Sequence
gcacaggtccagggagacagactct

SEQ ID NO: 216530 - DNA, 25 bp, Probe Sequence
gcacaggcgccagggcagggaagtc

SEQ ID NO: 216531 - DNA, 25 bp, Probe Sequence
gcacaggggcagggttctgactggc

SEQ ID NO: 216532 - DNA, 25 bp, Probe Sequence
gcacattgaccagcttgtctgtctg

SEQ ID NO: 216533 - DNA, 25 bp, Probe Sequence
gcacattgatgcggccatggttttg

SEQ ID NO: 216534 - DNA, 25 bp, Probe Sequence
gcacatcgctgacgctgattgtgtt

SEQ ID NO: 216535 - DNA, 25 bp, Probe Sequence
gcacagcatatgttcatgaatgtct

SEQ ID NO: 216536 - DNA, 25 bp, Probe Sequence
gcacagctgtggtcagaagcatttg

SEQ ID NO: 216537 - DNA, 25 bp, Probe Sequence
gcacacatgagcgacaaactcaaga

SEQ ID NO: 216538 - DNA, 25 bp, Probe Sequence
gcacaatgcccacatcatcttaaga

SEQ ID NO: 216539 - DNA, 25 bp, Probe Sequence
gcacaagcctcagtaactgatgcaa

SEQ ID NO: 216540 - DNA, 25 bp, Probe Sequence
gcacaggccaaggccctgagcaagc

SEQ ID NO: 216541 - DNA, 25 bp, Probe Sequence
gcactagccatagctggtgacaaac

SEQ ID NO: 216542 - DNA, 25 bp, Probe Sequence
gcactaggcgcagttgtgtagcagt

SEQ ID NO: 216543 - DNA, 25 bp, Probe Sequence
gcacatggagccaatatgcgaacag

SEQ ID NO: 216544 - DNA, 25 bp, Probe Sequence
gcacagaggctcaacacagatccaa

SEQ ID NO: 216545 - DNA, 25 bp, Probe Sequence
gcactgatgggctcacatatacgaa

SEQ ID NO: 216546 - DNA, 25 bp, Probe Sequence
gcactaggactgacaatccaggcag

SEQ ID NO: 216547 - DNA, 25 bp, Probe Sequence
gcactttaggaaatcgaggcgagtg

SEQ ID NO: 216548 - DNA, 25 bp, Probe Sequence
gcactttgagagagccgagagcgcg

SEQ ID NO: 216549 - DNA, 25 bp, Probe Sequence
gcactttcggaggccgaggtgggag

SEQ ID NO: 216550 - DNA, 25 bp, Probe Sequence
gcactttcggaggccgaggtgggag

SEQ ID NO: 216551 - DNA, 25 bp, Probe Sequence
gcactttgggaggcctaagtgggtg

SEQ ID NO: 216552 - DNA, 25 bp, Probe Sequence
gcactttgggaggccaagacgggcg

SEQ ID NO: 216553 - DNA, 25 bp, Probe Sequence
gcactttgggaggccaaggcaggtg

SEQ ID NO: 216554 - DNA, 25 bp, Probe Sequence
gcactttgggaggccaaggcagcca

SEQ ID NO: 216555 - DNA, 25 bp, Probe Sequence
gcactttgggaggccaaggcaggca

SEQ ID NO: 216556 - DNA, 25 bp, Probe Sequence
gcactttgggaggccaaggcaggca

SEQ ID NO: 216557 - DNA, 25 bp, Probe Sequence
gcactttgggaggccaaggcaggcg

SEQ ID NO: 216558 - DNA, 25 bp, Probe Sequence
gcactttgggaggccaaggcgggca

SEQ ID NO: 216559 - DNA, 25 bp, Probe Sequence
gcactttgggaggccaaggcgggca

SEQ ID NO: 216560 - DNA, 25 bp, Probe Sequence
gcactttgggaggccaaggagggca

SEQ ID NO: 216561 - DNA, 25 bp, Probe Sequence
gcactttgggaggccaaggtaggca

SEQ ID NO: 216562 - DNA, 25 bp, Probe Sequence
gcactcaggggtgccaggtgtgagg

SEQ ID NO: 216563 - DNA, 25 bp, Probe Sequence
gcactcaggggtgccaggtgtgagg

SEQ ID NO: 216564 - DNA, 25 bp, Probe Sequence
gcactcatgagggcttccactgtgc

SEQ ID NO: 216565 - DNA, 25 bp, Probe Sequence
gcacttgagtcgactggaggctgcc

SEQ ID NO: 216566 - DNA, 25 bp, Probe Sequence
gcactctgttgcctgtgaggagctt

SEQ ID NO: 216567 - DNA, 25 bp, Probe Sequence
gcaaatcatctgcatgtgcatcaag

SEQ ID NO: 216568 - DNA, 25 bp, Probe Sequence
gcaacagcaatgtcagattgcacag

SEQ ID NO: 216569 - DNA, 25 bp, Probe Sequence
gcaacagctgcaagctgtccagcag

SEQ ID NO: 216570 - DNA, 25 bp, Probe Sequence
gcaaatgtgacactgtctatcagta

SEQ ID NO: 216571 - DNA, 25 bp, Probe Sequence
gcaaatgtgacactgtctatcagta

SEQ ID NO: 216572 - DNA, 25 bp, Probe Sequence
gcaacagggacagctgccaataccc

SEQ ID NO: 216573 - DNA, 25 bp, Probe Sequence
gcaaagctgggatcccaatccagac

SEQ ID NO: 216574 - DNA, 25 bp, Probe Sequence
gcaaagagggggacaagtacaagct

SEQ ID NO: 216575 - DNA, 25 bp, Probe Sequence
gcaaaagggcccctcgtagcaaggt

SEQ ID NO: 216576 - DNA, 25 bp, Probe Sequence
gcaaaagtggggctaaatgaagtgt

SEQ ID NO: 216577 - DNA, 25 bp, Probe Sequence
gcaacacgggggcaattgtgacata

SEQ ID NO: 216578 - DNA, 25 bp, Probe Sequence
gcacagcgacggtgggaagatgcct

SEQ ID NO: 216579 - DNA, 25 bp, Probe Sequence
gcacagtgacggttctagatctgag

SEQ ID NO: 216580 - DNA, 25 bp, Probe Sequence
gcacaggcagcaaggtcatggtctg

SEQ ID NO: 216581 - DNA, 25 bp, Probe Sequence
gcacaggctagaggcacgggctgat

SEQ ID NO: 216582 - DNA, 25 bp, Probe Sequence
gcacaatgctagtgtcagggtacat

SEQ ID NO: 216583 - DNA, 25 bp, Probe Sequence
gcaaagttccagagggctgaccctc

SEQ ID NO: 216584 - DNA, 25 bp, Probe Sequence
gcaaagtggataaagcctggtccct

SEQ ID NO: 216585 - DNA, 25 bp, Probe Sequence
gcaaaggctacaaaggggtcaccag

SEQ ID NO: 216586 - DNA, 25 bp, Probe Sequence
gaaggagtggactggagcgtaactg

SEQ ID NO: 216587 - DNA, 25 bp, Probe Sequence
gcaacgggtgactggaagggcctga

SEQ ID NO: 216588 - DNA, 25 bp, Probe Sequence
gcaactggaaggaacggatgggcct

SEQ ID NO: 216589 - DNA, 25 bp, Probe Sequence
gcaatgttctaggtgaccctgggct

SEQ ID NO: 216590 - DNA, 25 bp, Probe Sequence
gcaagtttgttgacctacatgggct

SEQ ID NO: 216591 - DNA, 25 bp, Probe Sequence
gcaaattgtattgtcaacatgggtc

SEQ ID NO: 216592 - DNA, 25 bp, Probe Sequence
gcaagtttcagtgtcaaatggcggt

SEQ ID NO: 216593 - DNA, 25 bp, Probe Sequence
gcaagatttcagcctggaagagggc

SEQ ID NO: 216594 - DNA, 25 bp, Probe Sequence
gcacagtatttgctgcagaacagtg

SEQ ID NO: 216595 - DNA, 25 bp, Probe Sequence
gcacattacttgctgcatgggagga

SEQ ID NO: 216596 - DNA, 25 bp, Probe Sequence
gcactacagttgctagtgctgggtg

SEQ ID NO: 216597 - DNA, 25 bp, Probe Sequence
gcacttcaggtgcaagctgggctcc

SEQ ID NO: 216598 - DNA, 25 bp, Probe Sequence
gcacatcatcagcgcgcaagagggc

SEQ ID NO: 216599 - DNA, 25 bp, Probe Sequence
gcacagcctgcaaggccgcaggagc

SEQ ID NO: 216600 - DNA, 25 bp, Probe Sequence
gcaacaaagatgcctcgcagcgagc

SEQ ID NO: 216601 - DNA, 25 bp, Probe Sequence
gcaaaattgatgactcgtgccaacg

SEQ ID NO: 216602 - DNA, 25 bp, Probe Sequence
gcacaaattgtagcaagcgatccag

SEQ ID NO: 216603 - DNA, 25 bp, Probe Sequence
gcaaaatttttctagcttccatcct

SEQ ID NO: 216604 - DNA, 25 bp, Probe Sequence
gcaaaattttaatctggcaattatg

SEQ ID NO: 216605 - DNA, 25 bp, Probe Sequence
gcacaaatttaacggcttcactgga

SEQ ID NO: 216606 - DNA, 25 bp, Probe Sequence
gcacacaaatcctggagcttttggg

SEQ ID NO: 216607 - DNA, 25 bp, Probe Sequence
gcacacaaatcctggagcttttggg

SEQ ID NO: 216608 - DNA, 25 bp, Probe Sequence
gcacacacttactaggacagttttc

SEQ ID NO: 216609 - DNA, 25 bp, Probe Sequence
gcacacacttaaagctatccgtcta

SEQ ID NO: 216610 - DNA, 25 bp, Probe Sequence
gcaaccttaattcagctgaagtact

SEQ ID NO: 216611 - DNA, 25 bp, Probe Sequence
gcaacgataaaacagctagactttg

SEQ ID NO: 216612 - DNA, 25 bp, Probe Sequence
gcaaaataaaatctcggtgttctat

SEQ ID NO: 216613 - DNA, 25 bp, Probe Sequence
gcaaagaaggtgtccacggtggttt

SEQ ID NO: 216614 - DNA, 25 bp, Probe Sequence
gcaagagggcagggccggggtttgt

SEQ ID NO: 216615 - DNA, 25 bp, Probe Sequence
gcaagcaggagagactcggggttct

SEQ ID NO: 216616 - DNA, 25 bp, Probe Sequence
gcaaggggacagagtgtgggcttag

SEQ ID NO: 216617 - DNA, 25 bp, Probe Sequence
gaaggggcccttctgagacagtaaa

SEQ ID NO: 216618 - DNA, 25 bp, Probe Sequence
gaattggggtctttgtggggtattg

SEQ ID NO: 216619 - DNA, 25 bp, Probe Sequence
gcactagttgtgaatttagggtgtt

SEQ ID NO: 216620 - DNA, 25 bp, Probe Sequence
gcaaggttggcattcctcaggagaa

SEQ ID NO: 216621 - DNA, 25 bp, Probe Sequence
gcaaggcattcgctcctgagcggaa

SEQ ID NO: 216622 - DNA, 25 bp, Probe Sequence
gcacatggaaggcccctggtatgga

SEQ ID NO: 216623 - DNA, 25 bp, Probe Sequence
gcacttgaggagctcagattttaag

SEQ ID NO: 216624 - DNA, 25 bp, Probe Sequence
gcaaccagtgagctagaaggcaaag

SEQ ID NO: 216625 - DNA, 25 bp, Probe Sequence
gcaaacgtcgagtgagagacaagga

SEQ ID NO: 216626 - DNA, 25 bp, Probe Sequence
gaaacgccggaacaaaaatgaggtg

SEQ ID NO: 216627 - DNA, 25 bp, Probe Sequence
gcaaaggccggctatgaaaaactgg

SEQ ID NO: 216628 - DNA, 25 bp, Probe Sequence
gcaacgaccgtctggggaagaaggt

SEQ ID NO: 216629 - DNA, 25 bp, Probe Sequence
gcaaaaactgtcaggagggacccgt

SEQ ID NO: 216630 - DNA, 25 bp, Probe Sequence
gcaaaaaaagcaaggctggtaaccg

SEQ ID NO: 216631 - DNA, 25 bp, Probe Sequence
gacgaaagtccatggcggttcaggc

SEQ ID NO: 216632 - DNA, 25 bp, Probe Sequence
gactaaaggttacctgttgtcgtga

SEQ ID NO: 216633 - DNA, 25 bp, Probe Sequence
gaaaacaggtaatggtttcaatggt

SEQ ID NO: 216634 - DNA, 25 bp, Probe Sequence
gaaagaccgaactggtttcgctgtc

SEQ ID NO: 216635 - DNA, 25 bp, Probe Sequence
gaaaacggcggatcaggtctcgttc

SEQ ID NO: 216636 - DNA, 25 bp, Probe Sequence
gaacatcgccgacaacgggggtctc

SEQ ID NO: 216637 - DNA, 25 bp, Probe Sequence
gcaagttcctggagacggtggagtt

SEQ ID NO: 216638 - DNA, 25 bp, Probe Sequence
gcaagtgaccgacaaaattccagtt

SEQ ID NO: 216639 - DNA, 25 bp, Probe Sequence
gcaaggtggctgacggaaagtccgt

SEQ ID NO: 216640 - DNA, 25 bp, Probe Sequence
gcaaggtggtggctgaagtgtacga

SEQ ID NO: 216641 - DNA, 25 bp, Probe Sequence
gcaagatctgcgtgaacggggacga

SEQ ID NO: 216642 - DNA, 25 bp, Probe Sequence
gcaaagctgccacccaaggggaagc

SEQ ID NO: 216643 - DNA, 25 bp, Probe Sequence
gcaaaccccctcaaaggtgacttgg

SEQ ID NO: 216644 - DNA, 25 bp, Probe Sequence
gcaaaacccgtctttatgtgcctgg

SEQ ID NO: 216645 - DNA, 25 bp, Probe Sequence
gcaaaggccgggtgttggccggagt

SEQ ID NO: 216646 - DNA, 25 bp, Probe Sequence
gcaaagggctgggactggtggcctt

SEQ ID NO: 216647 - DNA, 25 bp, Probe Sequence
gcaaaaggcggcaagcgggacttct

SEQ ID NO: 216648 - DNA, 25 bp, Probe Sequence
gcacaaggtggacaaggcaagcgtc

SEQ ID NO: 216649 - DNA, 25 bp, Probe Sequence
gcactagttggacaggggagccaga

SEQ ID NO: 216650 - DNA, 25 bp, Probe Sequence
gcacaatggtggttcacgggggcaa

SEQ ID NO: 216651 - DNA, 25 bp, Probe Sequence
gcacaatggtcgttaaggcgtgtac

SEQ ID NO: 216652 - DNA, 25 bp, Probe Sequence
gcaaatgggcgtacggcgttgtacg

SEQ ID NO: 216653 - DNA, 25 bp, Probe Sequence
gcaaaggaggttctgcctgtaattg

SEQ ID NO: 216654 - DNA, 25 bp, Probe Sequence
gcaaagggcctcaattcctgtaaga

SEQ ID NO: 216655 - DNA, 25 bp, Probe Sequence
gcacacagtgtgcaatttcgtggaa

SEQ ID NO: 216656 - DNA, 25 bp, Probe Sequence
gcacacaggctgtgttggcttgaag

SEQ ID NO: 216657 - DNA, 25 bp, Probe Sequence
gcaaagtgctgaagctcactcggaa

SEQ ID NO: 216658 - DNA, 25 bp, Probe Sequence
gcaaaggcagcaggctaccggacgg

SEQ ID NO: 216659 - DNA, 25 bp, Probe Sequence
gcaaaggccaactaccgtggaggtg

SEQ ID NO: 216660 - DNA, 25 bp, Probe Sequence
gcaaggccaccactaggagggggtc

SEQ ID NO: 216661 - DNA, 25 bp, Probe Sequence
gaaggagctcccaggaggggcttct

SEQ ID NO: 216662 - DNA, 25 bp, Probe Sequence
gaaggagctcccaggaggggcttct

SEQ ID NO: 216663 - DNA, 25 bp, Probe Sequence
gagggaagtcctagggtggtttcag

SEQ ID NO: 216664 - DNA, 25 bp, Probe Sequence
gaaggccgtctcagaagggtacaag

SEQ ID NO: 216665 - DNA, 25 bp, Probe Sequence
gaacccgggaggcacaggttccagt

SEQ ID NO: 216666 - DNA, 25 bp, Probe Sequence
gaatccctccgtaaaaggtgtccag

SEQ ID NO: 216667 - DNA, 25 bp, Probe Sequence
gaatacccctgttaaggtggtagat

SEQ ID NO: 216668 - DNA, 25 bp, Probe Sequence
gcaaacttcctgaactgggtggtga

SEQ ID NO: 216669 - DNA, 25 bp, Probe Sequence
gcaagcctagggaccagggtgagga

SEQ ID NO: 216670 - DNA, 25 bp, Probe Sequence
gcacagcctcggggatggggaggga

SEQ ID NO: 216671 - DNA, 25 bp, Probe Sequence
gcaaagtcggcgggcgctggaagta

SEQ ID NO: 216672 - DNA, 25 bp, Probe Sequence
gcaaactcaaggcatcatctggaag

SEQ ID NO: 216673 - DNA, 25 bp, Probe Sequence
gcactttccagggatactgagaaga

SEQ ID NO: 216674 - DNA, 25 bp, Probe Sequence
gcacttgtcgtggtttcagagatga

SEQ ID NO: 216675 - DNA, 25 bp, Probe Sequence
gcacttcttctgctttcaaggagag

SEQ ID NO: 216676 - DNA, 25 bp, Probe Sequence
gcacttctccagcatatgtaagtgg

SEQ ID NO: 216677 - DNA, 25 bp, Probe Sequence
gcaataaaaggttatatcagctggg

SEQ ID NO: 216678 - DNA, 25 bp, Probe Sequence
gcacagcatagaaggtatttcagcc

SEQ ID NO: 216679 - DNA, 25 bp, Probe Sequence
gcacagcaaattgtgtccccagctc

SEQ ID NO: 216680 - DNA, 25 bp, Probe Sequence
gaatgccaagtgctatacgccagtc

SEQ ID NO: 216681 - DNA, 25 bp, Probe Sequence
gcaaccaagtcatgcatgaggtcag

SEQ ID NO: 216682 - DNA, 25 bp, Probe Sequence
gcaactaagtgaatgctcaaccagg

SEQ ID NO: 216683 - DNA, 25 bp, Probe Sequence
gcaagtaagtgaattagggggcatt

SEQ ID NO: 216684 - DNA, 25 bp, Probe Sequence
gcaaggaggtttgaaggaagttcgt

SEQ ID NO: 216685 - DNA, 25 bp, Probe Sequence
gcaagggaccttaaaacaatttctg

SEQ ID NO: 216686 - DNA, 25 bp, Probe Sequence
gcaaaggacctttagaataagtatc

SEQ ID NO: 216687 - DNA, 25 bp, Probe Sequence
gcaaaagaactttacctgaaccctg

SEQ ID NO: 216688 - DNA, 25 bp, Probe Sequence
gcaaaagaactgtcctaatgatatc

SEQ ID NO: 216689 - DNA, 25 bp, Probe Sequence
gcacagaacttgtaccatttgaatc

SEQ ID NO: 216690 - DNA, 25 bp, Probe Sequence
gcaaaccttcaagctgtgtaatatt

SEQ ID NO: 216691 - DNA, 25 bp, Probe Sequence
gcaaactgctcacaccaagtagaaa

SEQ ID NO: 216692 - DNA, 25 bp, Probe Sequence
gcacaagcttcaatagccgattcga

SEQ ID NO: 216693 - DNA, 25 bp, Probe Sequence
gcacaagttcatatgcctatgagtc

SEQ ID NO: 216694 - DNA, 25 bp, Probe Sequence
gcacaggttctcagtctaagctatg

SEQ ID NO: 216695 - DNA, 25 bp, Probe Sequence
gcacttgtcttaagcctacagtatc

SEQ ID NO: 216696 - DNA, 25 bp, Probe Sequence
gcacattctctttagttaaggcacc

SEQ ID NO: 216697 - DNA, 25 bp, Probe Sequence
gcactttgctttaatataaatgcaa

SEQ ID NO: 216698 - DNA, 25 bp, Probe Sequence
gcacatttgcctactaatggaaaag

SEQ ID NO: 216699 - DNA, 25 bp, Probe Sequence
gcacagagggctacttcatggagga

SEQ ID NO: 216700 - DNA, 25 bp, Probe Sequence
gcaaagtgacttgagcatctgaaga

SEQ ID NO: 216701 - DNA, 25 bp, Probe Sequence
gcaaacgcctctgaccaggagagga

SEQ ID NO: 216702 - DNA, 25 bp, Probe Sequence
gcactttcttctgactgctgtgatt

SEQ ID NO: 216703 - DNA, 25 bp, Probe Sequence
gcacattatgtttgcaactggtata

SEQ ID NO: 216704 - DNA, 25 bp, Probe Sequence
gcacttacatgcatatacttgtata

SEQ ID NO: 216705 - DNA, 25 bp, Probe Sequence
gcacttaagcacctccatattatga

SEQ ID NO: 216706 - DNA, 25 bp, Probe Sequence
gcacttaagccgcagctgctataga

SEQ ID NO: 216707 - DNA, 25 bp, Probe Sequence
gcacttctacgctgagcagggcgac

SEQ ID NO: 216708 - DNA, 25 bp, Probe Sequence
gcacatgtttcagagagcacagggt

SEQ ID NO: 216709 - DNA, 25 bp, Probe Sequence
gcacatggtaatgaagcactgtttt

SEQ ID NO: 216710 - DNA, 25 bp, Probe Sequence
gcacaggctgttgaagcattttctc

SEQ ID NO: 216711 - DNA, 25 bp, Probe Sequence
gcacagtgcctttacagatttacgt

SEQ ID NO: 216712 - DNA, 25 bp, Probe Sequence
gcacagctgcctataggagtcttcc

SEQ ID NO: 216713 - DNA, 25 bp, Probe Sequence
gcacaaggcctaatgaggtcaccct

SEQ ID NO: 216714 - DNA, 25 bp, Probe Sequence
gcaagacccatgatactagaccact

SEQ ID NO: 216715 - DNA, 25 bp, Probe Sequence
gcaaaacctgcacaatcagtcccta

SEQ ID NO: 216716 - DNA, 25 bp, Probe Sequence
gcaaaaccaagatcacagtacacca

SEQ ID NO: 216717 - DNA, 25 bp, Probe Sequence
gcaagaccgaagtaaactacactca

SEQ ID NO: 216718 - DNA, 25 bp, Probe Sequence
gcaagaccaagggcaggacccatcc

SEQ ID NO: 216719 - DNA, 25 bp, Probe Sequence
gcaagacgatgcagggtgagggccc

SEQ ID NO: 216720 - DNA, 25 bp, Probe Sequence
gcacagacagcgagcgctggaaggc

SEQ ID NO: 216721 - DNA, 25 bp, Probe Sequence
gcacatgaagtgagcttggcagtat

SEQ ID NO: 216722 - DNA, 25 bp, Probe Sequence
gcacagtcaatgagttggagtttac

SEQ ID NO: 216723 - DNA, 25 bp, Probe Sequence
gcacactcacagatgtttgaggctt

SEQ ID NO: 216724 - DNA, 25 bp, Probe Sequence
gcacattatcagactttgagaacat

SEQ ID NO: 216725 - DNA, 25 bp, Probe Sequence
gcacacattaggcattgagacttca

SEQ ID NO: 216726 - DNA, 25 bp, Probe Sequence
gcaacttcacagtttgaacttcgag

SEQ ID NO: 216727 - DNA, 25 bp, Probe Sequence
gcacagcctcacacttgaaagacgg

SEQ ID NO: 216728 - DNA, 25 bp, Probe Sequence
gcaagcctcctgatcaggaaaccag

SEQ ID NO: 216729 - DNA, 25 bp, Probe Sequence
gcaagcaccacgtttgacaacttcc

SEQ ID NO: 216730 - DNA, 25 bp, Probe Sequence
gcaacccctgctcagaaacttatca

SEQ ID NO: 216731 - DNA, 25 bp, Probe Sequence
gcaaacctcagcctggaggcacttt

SEQ ID NO: 216732 - DNA, 25 bp, Probe Sequence
gcaaactatggccatctgagtactt

SEQ ID NO: 216733 - DNA, 25 bp, Probe Sequence
gcacaagagatggcagtcggctagc

SEQ ID NO: 216734 - DNA, 25 bp, Probe Sequence
gcacaagatgcatgaagggctactt

SEQ ID NO: 216735 - DNA, 25 bp, Probe Sequence
gcacaaataaacagtgaattctcgt

SEQ ID NO: 216736 - DNA, 25 bp, Probe Sequence
gcaaacaagcaagtagtaatctcaa

SEQ ID NO: 216737 - DNA, 25 bp, Probe Sequence
gcaacacagcaccatcaggtaactg

SEQ ID NO: 216738 - DNA, 25 bp, Probe Sequence
gcacataacactccaatgatagttt

SEQ ID NO: 216739 - DNA, 25 bp, Probe Sequence
gcacatccacacccaatgggtggat

SEQ ID NO: 216740 - DNA, 25 bp, Probe Sequence
gcaaccacacgcacgtggtggtgta

SEQ ID NO: 216741 - DNA, 25 bp, Probe Sequence
gcaaaaagctgcagccggtgcctgc

SEQ ID NO: 216742 - DNA, 25 bp, Probe Sequence
gcaataaagtttttggtgccctgaa

SEQ ID NO: 216743 - DNA, 25 bp, Probe Sequence
gcaataaagtttttggtgccctgaa

SEQ ID NO: 216744 - DNA, 25 bp, Probe Sequence
gaataaaggttggggtggccataat

SEQ ID NO: 216745 - DNA, 25 bp, Probe Sequence
gaacatagagtttggggccgaaaat

SEQ ID NO: 216746 - DNA, 25 bp, Probe Sequence
gcaaataactcctgtgagcctcaat

SEQ ID NO: 216747 - DNA, 25 bp, Probe Sequence
gcaaagagtccgtgtggccaatatg

SEQ ID NO: 216748 - DNA, 25 bp, Probe Sequence
gcaaaactcccatgtctgcagagat

SEQ ID NO: 216749 - DNA, 25 bp, Probe Sequence
gcaacttttccatgctcttaatgta

SEQ ID NO: 216750 - DNA, 25 bp, Probe Sequence
gcaaattctgttctccttaagtggc

SEQ ID NO: 216751 - DNA, 25 bp, Probe Sequence
gcacatatggcacttcactccattt

SEQ ID NO: 216752 - DNA, 25 bp, Probe Sequence
gcaaatcacagcttcttcgtttaag

SEQ ID NO: 216753 - DNA, 25 bp, Probe Sequence
gcaaaccgtgccctggtattgtcag

SEQ ID NO: 216754 - DNA, 25 bp, Probe Sequence
gcaacgccagccatctggtatgttc

SEQ ID NO: 216755 - DNA, 25 bp, Probe Sequence
gcaagcgagtacctatggtatgttc

SEQ ID NO: 216756 - DNA, 25 bp, Probe Sequence
gcaacattgtaacattggtttcccg

SEQ ID NO: 216757 - DNA, 25 bp, Probe Sequence
gcaaaattgccacattttcttatgg

SEQ ID NO: 216758 - DNA, 25 bp, Probe Sequence
gcaaaattccaagctaccatgtaac

SEQ ID NO: 216759 - DNA, 25 bp, Probe Sequence
gcaaaaatcgttgtcacatcagtga

SEQ ID NO: 216760 - DNA, 25 bp, Probe Sequence
gcaaagttcacaatgtacacaagtg

SEQ ID NO: 216761 - DNA, 25 bp, Probe Sequence
gcaaagcttgccctgatcaaagagg

SEQ ID NO: 216762 - DNA, 25 bp, Probe Sequence
gcaagtcttgcccaataaaaacgct

SEQ ID NO: 216763 - DNA, 25 bp, Probe Sequence
gaactaggcctcaaaaacatacgta

SEQ ID NO: 216764 - DNA, 25 bp, Probe Sequence
gaactaggcctcaaaaacatacgta

SEQ ID NO: 216765 - DNA, 25 bp, Probe Sequence
gcaacttaccactaaatccttgagt

SEQ ID NO: 216766 - DNA, 25 bp, Probe Sequence
gcaactgttacttcaaccatctagg

SEQ ID NO: 216767 - DNA, 25 bp, Probe Sequence
gcaacggtgacacttactttaggcc

SEQ ID NO: 216768 - DNA, 25 bp, Probe Sequence
gcaacgcggaatatcacaccggcct

SEQ ID NO: 216769 - DNA, 25 bp, Probe Sequence
gacgtcggacagatactctcgtgca

SEQ ID NO: 216770 - DNA, 25 bp, Probe Sequence
gcaagttggcctatacccggcaaat

SEQ ID NO: 216771 - DNA, 25 bp, Probe Sequence
gcaaattcccagatttgaagacaaa

SEQ ID NO: 216772 - DNA, 25 bp, Probe Sequence
gcaaattccatggcaccgtcaaggc

SEQ ID NO: 216773 - DNA, 25 bp, Probe Sequence
gcaaactacatggactctgtccctg

SEQ ID NO: 216774 - DNA, 25 bp, Probe Sequence
gcaaacttcgtactttctatgagaa

SEQ ID NO: 216775 - DNA, 25 bp, Probe Sequence
gcaacaagttagttttcaagcagtt

SEQ ID NO: 216776 - DNA, 25 bp, Probe Sequence
gcaactagttttcaacatactttag

SEQ ID NO: 216777 - DNA, 25 bp, Probe Sequence
gcaaagagagttacgaattacgtta

SEQ ID NO: 216778 - DNA, 25 bp, Probe Sequence
gcaacaggagtttcatggattacag

SEQ ID NO: 216779 - DNA, 25 bp, Probe Sequence
gcaatgggccgttagcgttacgttg

SEQ ID NO: 216780 - DNA, 25 bp, Probe Sequence
gcaaatggcggtaggcgtgtacggt

SEQ ID NO: 216781 - DNA, 25 bp, Probe Sequence
gcaaatggcggtaggcgtgtacggt

SEQ ID NO: 216782 - DNA, 25 bp, Probe Sequence
gcaaatggcggtaggcgtgtacggt

SEQ ID NO: 216783 - DNA, 25 bp, Probe Sequence
gcaaatggcggtaggcgtgtacggt

SEQ ID NO: 216784 - DNA, 25 bp, Probe Sequence
gcaaatggcggtaggcgtgtacggt

SEQ ID NO: 216785 - DNA, 25 bp, Probe Sequence
gcaaatggcggtaggcgtgtacggt

SEQ ID NO: 216786 - DNA, 25 bp, Probe Sequence
gcaaatggctggtaggcgtgtacgg

SEQ ID NO: 216787 - DNA, 25 bp, Probe Sequence
gcacagtgtgggttgcgggtgctgg

SEQ ID NO: 216788 - DNA, 25 bp, Probe Sequence
gcacattagggtgggcgtgctgcgg

SEQ ID NO: 216789 - DNA, 25 bp, Probe Sequence
gcacaccaggagagagctggccaag

SEQ ID NO: 216790 - DNA, 25 bp, Probe Sequence
gcaaagaggaactgctggccacgag

SEQ ID NO: 216791 - DNA, 25 bp, Probe Sequence
gcaagaaggacctgtacctggccag

SEQ ID NO: 216792 - DNA, 25 bp, Probe Sequence
gcacagccaagagcggtaccggcat

SEQ ID NO: 216793 - DNA, 25 bp, Probe Sequence
gcacaggaagtcgggaaggggccct

SEQ ID NO: 216794 - DNA, 25 bp, Probe Sequence
gcacaaggggccgtggaggggcgtc

SEQ ID NO: 216795 - DNA, 25 bp, Probe Sequence
gcaaccgggtcagaatggcggcagt

SEQ ID NO: 216796 - DNA, 25 bp, Probe Sequence
gcaacgctatgcttcaaacgcggtg

SEQ ID NO: 216797 - DNA, 25 bp, Probe Sequence
gcaagcagtgactttagacctaggc

SEQ ID NO: 216798 - DNA, 25 bp, Probe Sequence
gcaacaggtgaatgaacctagagcg

SEQ ID NO: 216799 - DNA, 25 bp, Probe Sequence
gcacaaaatgaatgaggtctgggct

SEQ ID NO: 216800 - DNA, 25 bp, Probe Sequence
gcaaaagcgaacctgctatcttggt

SEQ ID NO: 216801 - DNA, 25 bp, Probe Sequence
gcaaataccaacattgttatgccag

SEQ ID NO: 216802 - DNA, 25 bp, Probe Sequence
gcacaatacctaactcatgtttccc

SEQ ID NO: 216803 - DNA, 25 bp, Probe Sequence
gcaaaacctaggtcattttacttca

SEQ ID NO: 216804 - DNA, 25 bp, Probe Sequence
gcaaaatcccaaacttgttacctga

SEQ ID NO: 216805 - DNA, 25 bp, Probe Sequence
gcaacaacccagaacttacaaactt

SEQ ID NO: 216806 - DNA, 25 bp, Probe Sequence
gcaaacaactcgatgctgtaagaag

SEQ ID NO: 216807 - DNA, 25 bp, Probe Sequence
gcaaacagcaatgatcttccaataa

SEQ ID NO: 216808 - DNA, 25 bp, Probe Sequence
gcaaatcacatatcttataaaggct

SEQ ID NO: 216809 - DNA, 25 bp, Probe Sequence
gaacccaagtctttcaacggatcct

SEQ ID NO: 216810 - DNA, 25 bp, Probe Sequence
gaactcgaggttctgaaggggctca

SEQ ID NO: 216811 - DNA, 25 bp, Probe Sequence
gcaacatctgggatgccatgaaggg

SEQ ID NO: 216812 - DNA, 25 bp, Probe Sequence
gcaacatcctaattggctcagtgca

SEQ ID NO: 216813 - DNA, 25 bp, Probe Sequence
gcaaatacaatcagcccagtgcaaa

SEQ ID NO: 216814 - DNA, 25 bp, Probe Sequence
gcaagtacatcaatgggccgtggat

SEQ ID NO: 216815 - DNA, 25 bp, Probe Sequence
gcaaccgcaagaagcccgggatcta

SEQ ID NO: 216816 - DNA, 25 bp, Probe Sequence
gcacacccagagaaaccgaagatcc

SEQ ID NO: 216817 - DNA, 25 bp, Probe Sequence
gcacaggctcttgaaccaaactgcc

SEQ ID NO: 216818 - DNA, 25 bp, Probe Sequence
gcacagagctcaagtaatttacacc

SEQ ID NO: 216819 - DNA, 25 bp, Probe Sequence
gcacaggtgctacaagagcatagcc

SEQ ID NO: 216820 - DNA, 25 bp, Probe Sequence
gcaaggatgtgaacaaggtcgccta

SEQ ID NO: 216821 - DNA, 25 bp, Probe Sequence
gcacaagtataagattgtatccata

SEQ ID NO: 216822 - DNA, 25 bp, Probe Sequence
gcaaaatgcctagatattatcctac

SEQ ID NO: 216823 - DNA, 25 bp, Probe Sequence
gcaaaagacgtcttttctctatacc

SEQ ID NO: 216824 - DNA, 25 bp, Probe Sequence
gcaaataaggatgtgttctctgaga

SEQ ID NO: 216825 - DNA, 25 bp, Probe Sequence
gcaagaaagagatggtcctgtagaa

SEQ ID NO: 216826 - DNA, 25 bp, Probe Sequence
gcaaaactgtagggtcctgaggaca

SEQ ID NO: 216827 - DNA, 25 bp, Probe Sequence
gcaaaccttgacgggactgggagac

SEQ ID NO: 216828 - DNA, 25 bp, Probe Sequence
gcaaaggcaaaggcggctcgggaga

SEQ ID NO: 216829 - DNA, 25 bp, Probe Sequence
gcaaagcgagaagagagccggtgga

SEQ ID NO: 216830 - DNA, 25 bp, Probe Sequence
gcaaaggagagacagcccccattac

SEQ ID NO: 216831 - DNA, 25 bp, Probe Sequence
gcaagggcagaacactaacctgacc

SEQ ID NO: 216832 - DNA, 25 bp, Probe Sequence
gcacagccgagatgtagtactcctg

SEQ ID NO: 216833 - DNA, 25 bp, Probe Sequence
gcacattggacatgctaacctcacc

SEQ ID NO: 216834 - DNA, 25 bp, Probe Sequence
gcacaaggtcaagatgaaccaccaa

SEQ ID NO: 216835 - DNA, 25 bp, Probe Sequence
gcacaaggtcaagatgaaccaccaa

SEQ ID NO: 216836 - DNA, 25 bp, Probe Sequence
gcaaagtgtacagtctgaaaccgta

SEQ ID NO: 216837 - DNA, 25 bp, Probe Sequence
gcaaagaagaagctgacacaccgta

SEQ ID NO: 216838 - DNA, 25 bp, Probe Sequence
gcaaataaagacctgagaaccttcc

SEQ ID NO: 216839 - DNA, 25 bp, Probe Sequence
gcaagacaaaactgaaaccctcttt

SEQ ID NO: 216840 - DNA, 25 bp, Probe Sequence
gcaaagcaattatataaaaccacaa

SEQ ID NO: 216841 - DNA, 25 bp, Probe Sequence
gcacaagaagtctcaaaattccgaa

SEQ ID NO: 216842 - DNA, 25 bp, Probe Sequence
gcaaagaggctaaaaacctgtggaa

SEQ ID NO: 216843 - DNA, 25 bp, Probe Sequence
gcaaacagggaaccgtctctataga

SEQ ID NO: 216844 - DNA, 25 bp, Probe Sequence
gcaaacagggcatccaattctacac

SEQ ID NO: 216845 - DNA, 25 bp, Probe Sequence
gcaaaagtgccatccagaaaaccat

SEQ ID NO: 216846 - DNA, 25 bp, Probe Sequence
gcaaaagtgcaattccaaaagccaa

SEQ ID NO: 216847 - DNA, 25 bp, Probe Sequence
gcaaacaggcagttggccagagagc

SEQ ID NO: 216848 - DNA, 25 bp, Probe Sequence
gcacaagcggtgtaggctccaatgc

SEQ ID NO: 216849 - DNA, 25 bp, Probe Sequence
gcacaaggagattcggcagctactg

SEQ ID NO: 216850 - DNA, 25 bp, Probe Sequence
gcacaggtggctttggcacaacttc

SEQ ID NO: 216851 - DNA, 25 bp, Probe Sequence
gcacagttggattaaagcagtctct

SEQ ID NO: 216852 - DNA, 25 bp, Probe Sequence
gcacagagcatggtaacaagagact

SEQ ID NO: 216853 - DNA, 25 bp, Probe Sequence
gcaaagctgttttagcagaggctgg

SEQ ID NO: 216854 - DNA, 25 bp, Probe Sequence
gcacatcatggtattcaggggctag

SEQ ID NO: 216855 - DNA, 25 bp, Probe Sequence
gcacactggtgtttctgcgagaatg

SEQ ID NO: 216856 - DNA, 25 bp, Probe Sequence
gcacatctgggcagttgtaccatgc

SEQ ID NO: 216857 - DNA, 25 bp, Probe Sequence
gcacatctttcagattcacacaagc

SEQ ID NO: 216858 - DNA, 25 bp, Probe Sequence
gcacatctttcagattcacacaagc

SEQ ID NO: 216859 - DNA, 25 bp, Probe Sequence
gcacatgttatggcagattgaaaag

SEQ ID NO: 216860 - DNA, 25 bp, Probe Sequence
gcacatttgtgcttgataagaagaa

SEQ ID NO: 216861 - DNA, 25 bp, Probe Sequence
gcacatagtatggtgatataacatt

SEQ ID NO: 216862 - DNA, 25 bp, Probe Sequence
gcacacggatgccatgatcatcgac

SEQ ID NO: 216863 - DNA, 25 bp, Probe Sequence
gcacacgtgtgttctgcattgcatc

SEQ ID NO: 216864 - DNA, 25 bp, Probe Sequence
gcacacctgtctttgtgcatgccaa

SEQ ID NO: 216865 - DNA, 25 bp, Probe Sequence
gcacatgccatgttttcgtggcaaa

SEQ ID NO: 216866 - DNA, 25 bp, Probe Sequence
gcacattcagaagctcgatagcaac

SEQ ID NO: 216867 - DNA, 25 bp, Probe Sequence
gcacattcacaccttgtaagaatct

SEQ ID NO: 216868 - DNA, 25 bp, Probe Sequence
gcacatctcccacttggagagagag

SEQ ID NO: 216869 - DNA, 25 bp, Probe Sequence
gcacatgccccaaatggaaggcacc

SEQ ID NO: 216870 - DNA, 25 bp, Probe Sequence
gcacatcccgaaagcagagaggccc

SEQ ID NO: 216871 - DNA, 25 bp, Probe Sequence
gcacaacacagctaacacaaggccc

SEQ ID NO: 216872 - DNA, 25 bp, Probe Sequence
gcacagacatcctacagaagaacac

SEQ ID NO: 216873 - DNA, 25 bp, Probe Sequence
gcacagtctacacagaaaatgtcga

SEQ ID NO: 216874 - DNA, 25 bp, Probe Sequence
gcacatttctagaggaatattccaa

SEQ ID NO: 216875 - DNA, 25 bp, Probe Sequence
gcacagctttacagatgagtatcta

SEQ ID NO: 216876 - DNA, 25 bp, Probe Sequence
gcacacatttacctagcacatatat

SEQ ID NO: 216877 - DNA, 25 bp, Probe Sequence
gcacaatttctcctagagacattgt

SEQ ID NO: 216878 - DNA, 25 bp, Probe Sequence
gcacacagctcttcttaaaattgaa

SEQ ID NO: 216879 - DNA, 25 bp, Probe Sequence
gcaaatatgcatttccaaacttgaa

SEQ ID NO: 216880 - DNA, 25 bp, Probe Sequence
gcacagaataattccacaacaggaa

SEQ ID NO: 216881 - DNA, 25 bp, Probe Sequence
gcacagccagaaacgaccaagaaca

SEQ ID NO: 216882 - DNA, 25 bp, Probe Sequence
gcaacgaaaggaacgcaagaacaga

SEQ ID NO: 216883 - DNA, 25 bp, Probe Sequence
gcaaagaagggtacgacagacactg

SEQ ID NO: 216884 - DNA, 25 bp, Probe Sequence
gcaaagaagtgcattcgagagccaa

SEQ ID NO: 216885 - DNA, 25 bp, Probe Sequence
gcaaaagaccacagctgaaggcatc

SEQ ID NO: 216886 - DNA, 25 bp, Probe Sequence
gcaaagagactggttgtcgggacat

SEQ ID NO: 216887 - DNA, 25 bp, Probe Sequence
gcaaaacattggtgccgtgcatcac

SEQ ID NO: 216888 - DNA, 25 bp, Probe Sequence
gcaaaaactgtgggaagatgaactt

SEQ ID NO: 216889 - DNA, 25 bp, Probe Sequence
gcaaaaccaccaggaggcataactt

SEQ ID NO: 216890 - DNA, 25 bp, Probe Sequence
gcaaaagctcaggaaaacatcaaca

SEQ ID NO: 216891 - DNA, 25 bp, Probe Sequence
gcaaatactggtatggatacagaca

SEQ ID NO: 216892 - DNA, 25 bp, Probe Sequence
gcaaagattgttagatcagataaaa

SEQ ID NO: 216893 - DNA, 25 bp, Probe Sequence
gcacagggtgtgagatctgttggaa

SEQ ID NO: 216894 - DNA, 25 bp, Probe Sequence
gcacaggagatgctctgtgtctggg

SEQ ID NO: 216895 - DNA, 25 bp, Probe Sequence
gcaaggcagatattggaggaggggg

SEQ ID NO: 216896 - DNA, 25 bp, Probe Sequence
gcaaagcgaaagcggcaggatcgac

SEQ ID NO: 216897 - DNA, 25 bp, Probe Sequence
gcaaacgagaagaaggaggaaccca

SEQ ID NO: 216898 - DNA, 25 bp, Probe Sequence
gcaacagggacaacgaggtggactt

SEQ ID NO: 216899 - DNA, 25 bp, Probe Sequence
gcacagggttgcaaccaggctgggt

SEQ ID NO: 216900 - DNA, 25 bp, Probe Sequence
gcacaggtgtgtggaggccgtggtc

SEQ ID NO: 216901 - DNA, 25 bp, Probe Sequence
gcaacagtgcttggactcaggggtc

SEQ ID NO: 216902 - DNA, 25 bp, Probe Sequence
gcaaccagttggctaggggagcagg

SEQ ID NO: 216903 - DNA, 25 bp, Probe Sequence
gcaactcaagggcgagtggaaccgt

SEQ ID NO: 216904 - DNA, 25 bp, Probe Sequence
gcaactctatggtagggggagaggg

SEQ ID NO: 216905 - DNA, 25 bp, Probe Sequence
gcaacattgtcattaaggacgacgt

SEQ ID NO: 216906 - DNA, 25 bp, Probe Sequence
gcaacttctcagtcaaaaatacttc

SEQ ID NO: 216907 - DNA, 25 bp, Probe Sequence
gcaactttggaaaactcctcttcac

SEQ ID NO: 216908 - DNA, 25 bp, Probe Sequence
gcacactgttaattacaacctcttc

SEQ ID NO: 216909 - DNA, 25 bp, Probe Sequence
gcaactggtaattgcagaatccact

SEQ ID NO: 216910 - DNA, 25 bp, Probe Sequence
gcacagtagtaaagctgcctgccct

SEQ ID NO: 216911 - DNA, 25 bp, Probe Sequence
gcaactgcagaaaatgtcctccctt

SEQ ID NO: 216912 - DNA, 25 bp, Probe Sequence
gcaactgcagaaaatgtcctccctt

SEQ ID NO: 216913 - DNA, 25 bp, Probe Sequence
gcaagctcgatcgacttgcctacat

SEQ ID NO: 216914 - DNA, 25 bp, Probe Sequence
gcaagccaaggcttagcctccatga

SEQ ID NO: 216915 - DNA, 25 bp, Probe Sequence
gcaacaaaagcatcagcctccttac

SEQ ID NO: 216916 - DNA, 25 bp, Probe Sequence
gcaacaacaagggagctcactcagt

SEQ ID NO: 216917 - DNA, 25 bp, Probe Sequence
gcaacaacaagggagctcactcagt

SEQ ID NO: 216918 - DNA, 25 bp, Probe Sequence
gcaaaagacaaggctgcaaacattt

SEQ ID NO: 216919 - DNA, 25 bp, Probe Sequence
gcaagtaggcaggagctcaataaat

SEQ ID NO: 216920 - DNA, 25 bp, Probe Sequence
gcaagaagccagaactgttggaatg

SEQ ID NO: 216921 - DNA, 25 bp, Probe Sequence
gcaagagctgtagcctgtcggttgc

SEQ ID NO: 216922 - DNA, 25 bp, Probe Sequence
gcacaactgtagtcccagctacttg

SEQ ID NO: 216923 - DNA, 25 bp, Probe Sequence
gcacaacattatcctcaaaacttct

SEQ ID NO: 216924 - DNA, 25 bp, Probe Sequence
gcacaataaaaccaacaccattctt

SEQ ID NO: 216925 - DNA, 25 bp, Probe Sequence
gcacagtgaaaacaatctatcattg

SEQ ID NO: 216926 - DNA, 25 bp, Probe Sequence
gaatgatgatcaaacgtatcccatg

SEQ ID NO: 216927 - DNA, 25 bp, Probe Sequence
gcaagagatcatatcctcagaccag

SEQ ID NO: 216928 - DNA, 25 bp, Probe Sequence
gcaacaactgttcctcaaagctaag

SEQ ID NO: 216929 - DNA, 25 bp, Probe Sequence
gcacacacctgtagtcccaggtact

SEQ ID NO: 216930 - DNA, 25 bp, Probe Sequence
gcacacacctgtaatcgtagctgag

SEQ ID NO: 216931 - DNA, 25 bp, Probe Sequence
gcacaccacttccatttttgatgac

SEQ ID NO: 216932 - DNA, 25 bp, Probe Sequence
gcaaatactgtgccattttatatca

SEQ ID NO: 216933 - DNA, 25 bp, Probe Sequence
gcacaatagtgagtacatttgaatt

SEQ ID NO: 216934 - DNA, 25 bp, Probe Sequence
gcacacgggaatgcacttgtcatat

SEQ ID NO: 216935 - DNA, 25 bp, Probe Sequence
gcacacgtcaggaagcagcttgtca

SEQ ID NO: 216936 - DNA, 25 bp, Probe Sequence
gcacacgtagagtggctagtgaagg

SEQ ID NO: 216937 - DNA, 25 bp, Probe Sequence
gcaacggggagcctgatgaggacgc

SEQ ID NO: 216938 - DNA, 25 bp, Probe Sequence
gcaaaggggcgtcggacaagtgcag

SEQ ID NO: 216939 - DNA, 25 bp, Probe Sequence
gcacaaggtgctgcgggaatcaggc

SEQ ID NO: 216940 - DNA, 25 bp, Probe Sequence
gcacaggtgccatcgaggttcagga

SEQ ID NO: 216941 - DNA, 25 bp, Probe Sequence
gcacagtgtgcctgatgggacatga

SEQ ID NO: 216942 - DNA, 25 bp, Probe Sequence
gcaagcttgacgggtggactaatga

SEQ ID NO: 216943 - DNA, 25 bp, Probe Sequence
gcaactggaccctgatgagaagata

SEQ ID NO: 216944 - DNA, 25 bp, Probe Sequence
gcaacagcaacagctagggactgat

SEQ ID NO: 216945 - DNA, 25 bp, Probe Sequence
gcaaagagaatgaacaggcggctga

SEQ ID NO: 216946 - DNA, 25 bp, Probe Sequence
gcaacagatcaaacacggtggtcat

SEQ ID NO: 216947 - DNA, 25 bp, Probe Sequence
gcacacagacagtgcacacggtgca

SEQ ID NO: 216948 - DNA, 25 bp, Probe Sequence
gcaaagagagtcgcatctcagtgca

SEQ ID NO: 216949 - DNA, 25 bp, Probe Sequence
gcaaagaggagcgagaatcagagag

SEQ ID NO: 216950 - DNA, 25 bp, Probe Sequence
gcaaacatgtgagaatatctatggg

SEQ ID NO: 216951 - DNA, 25 bp, Probe Sequence
gcaacacagatggctacaatttccc

SEQ ID NO: 216952 - DNA, 25 bp, Probe Sequence
gcaacaatgtgaccgatatgttccc

SEQ ID NO: 216953 - DNA, 25 bp, Probe Sequence
gcaacagcagtgtacaaggtgtcag

SEQ ID NO: 216954 - DNA, 25 bp, Probe Sequence
gcaacagcattattaagctgctttg

SEQ ID NO: 216955 - DNA, 25 bp, Probe Sequence
gcacagggcttatagctgcttcatt

SEQ ID NO: 216956 - DNA, 25 bp, Probe Sequence
gcacagcaggttactcagcagtttg

SEQ ID NO: 216957 - DNA, 25 bp, Probe Sequence
gcacagggtatagtcatggcagtaa

SEQ ID NO: 216958 - DNA, 25 bp, Probe Sequence
gcacaacagattatacggcatgaat

SEQ ID NO: 216959 - DNA, 25 bp, Probe Sequence
gcacacctttgactacaactgcaga

SEQ ID NO: 216960 - DNA, 25 bp, Probe Sequence
gcacaactttgacataagctctaca

SEQ ID NO: 216961 - DNA, 25 bp, Probe Sequence
gcaaacgttcagccattagcactca

SEQ ID NO: 216962 - DNA, 25 bp, Probe Sequence
gcaacactggtcctcagtgtcacca

SEQ ID NO: 216963 - DNA, 25 bp, Probe Sequence
gcaacagctgtcagccaacatcatc

SEQ ID NO: 216964 - DNA, 25 bp, Probe Sequence
gcacaactctgcaggactcatatcc

SEQ ID NO: 216965 - DNA, 25 bp, Probe Sequence
gcacaacttcagagcattcatcacc

SEQ ID NO: 216966 - DNA, 25 bp, Probe Sequence
gcacaccaagataccattcatcaac

SEQ ID NO: 216967 - DNA, 25 bp, Probe Sequence
gcacacacaaatatagatgtaactt

SEQ ID NO: 216968 - DNA, 25 bp, Probe Sequence
gcaaccaactaattatgaaactgta

SEQ ID NO: 216969 - DNA, 25 bp, Probe Sequence
gcaagcctacatcagcaatgacctc

SEQ ID NO: 216970 - DNA, 25 bp, Probe Sequence
gcaactatgaactagctgtggccct

SEQ ID NO: 216971 - DNA, 25 bp, Probe Sequence
gcaagctggatagagtcatggccca

SEQ ID NO: 216972 - DNA, 25 bp, Probe Sequence
gcaactgcaaagagccaggcatcgc

SEQ ID NO: 216973 - DNA, 25 bp, Probe Sequence
gcaactgcaaagagccaggcatcgc

SEQ ID NO: 216974 - DNA, 25 bp, Probe Sequence
gcaagctcgaccatgccaagagact

SEQ ID NO: 216975 - DNA, 25 bp, Probe Sequence
gcaaattcatccacacaaacacaat

SEQ ID NO: 216976 - DNA, 25 bp, Probe Sequence
gcaaattcacctacacagttctgga

SEQ ID NO: 216977 - DNA, 25 bp, Probe Sequence
gcaaattagccaatgtatctttgag

SEQ ID NO: 216978 - DNA, 25 bp, Probe Sequence
gcaaattagtcattatttactgaac

SEQ ID NO: 216979 - DNA, 25 bp, Probe Sequence
gcaagttttcccatttcgagacatc

SEQ ID NO: 216980 - DNA, 25 bp, Probe Sequence
gcaacttgttcccaaagctggagaa

SEQ ID NO: 216981 - DNA, 25 bp, Probe Sequence
gcaactgccttccagaaacagtgag

SEQ ID NO: 216982 - DNA, 25 bp, Probe Sequence
gcaaatactgcccgcaaagctcgcg

SEQ ID NO: 216983 - DNA, 25 bp, Probe Sequence
gcaagacactgctcagcaacctaga

SEQ ID NO: 216984 - DNA, 25 bp, Probe Sequence
gcacagaattgcgcagtacctggcc

SEQ ID NO: 216985 - DNA, 25 bp, Probe Sequence
gcacagaatatgcactgtccatcat

SEQ ID NO: 216986 - DNA, 25 bp, Probe Sequence
gcacaatcttggtcatgtcctgagg

SEQ ID NO: 216987 - DNA, 25 bp, Probe Sequence
gcaaatcatgggctgattcatggag

SEQ ID NO: 216988 - DNA, 25 bp, Probe Sequence
gcaactgtgggcaataatatggcat

SEQ ID NO: 216989 - DNA, 25 bp, Probe Sequence
gcacacgctgcgccggaagtgtgaa

SEQ ID NO: 216990 - DNA, 25 bp, Probe Sequence
gcacaagagcatccagaacagcctg

SEQ ID NO: 216991 - DNA, 25 bp, Probe Sequence
gcacacagagattctggatctcctg

SEQ ID NO: 216992 - DNA, 25 bp, Probe Sequence
gcacagagacacgggcatccttgac

SEQ ID NO: 216993 - DNA, 25 bp, Probe Sequence
gcacaaatctcagatgctcctgtca

SEQ ID NO: 216994 - DNA, 25 bp, Probe Sequence
gcacaaactcagcatctagttctaa

SEQ ID NO: 216995 - DNA, 25 bp, Probe Sequence
gcaagaattcagttctgttatctgt

SEQ ID NO: 216996 - DNA, 25 bp, Probe Sequence
gcacaaacgatattccttatctgta

SEQ ID NO: 216997 - DNA, 25 bp, Probe Sequence
gcacaaggagtattctctttctagg

SEQ ID NO: 216998 - DNA, 25 bp, Probe Sequence
gcacaagggacagtgcctttaacca

SEQ ID NO: 216999 - DNA, 25 bp, Probe Sequence
gcaacagcgaaagacattgccccca

SEQ ID NO: 217000 - DNA, 25 bp, Probe Sequence
gcacaatggaacagaactcaccctc

SEQ ID NO: 217001 - DNA, 25 bp, Probe Sequence
gcacaagacaacagaatccatcagg

SEQ ID NO: 217002 - DNA, 25 bp, Probe Sequence
gcaagggacgcttggacaacgggca

SEQ ID NO: 217003 - DNA, 25 bp, Probe Sequence
gcaatggagattctggaagcccttt

SEQ ID NO: 217004 - DNA, 25 bp, Probe Sequence
gcaatggagaagtggacatttccaa

SEQ ID NO: 217005 - DNA, 25 bp, Probe Sequence
gcaacgagcaaaaaactctgtctca

SEQ ID NO: 217006 - DNA, 25 bp, Probe Sequence
gcaacgagcaaaaaactctgtctca

SEQ ID NO: 217007 - DNA, 25 bp, Probe Sequence
gcaaaaaagcaaaactccatctcaa

SEQ ID NO: 217008 - DNA, 25 bp, Probe Sequence
gcaacaaaagccaatcagacctctg

SEQ ID NO: 217009 - DNA, 25 bp, Probe Sequence
gcaaagactaccaagcagaagcacg

SEQ ID NO: 217010 - DNA, 25 bp, Probe Sequence
gcaaatgcacctcctgcaagaaaag

SEQ ID NO: 217011 - DNA, 25 bp, Probe Sequence
gcaagatcacctgcgggatcacaga

SEQ ID NO: 217012 - DNA, 25 bp, Probe Sequence
gcaaatatgacatcttggcctcaga

SEQ ID NO: 217013 - DNA, 25 bp, Probe Sequence
gcaacattgcattttggatgccatt

SEQ ID NO: 217014 - DNA, 25 bp, Probe Sequence
gcaacacagatatgtggagctcttc

SEQ ID NO: 217015 - DNA, 25 bp, Probe Sequence
gcaaatcaggaagtgcttgtctggc

SEQ ID NO: 217016 - DNA, 25 bp, Probe Sequence
gcaaatcggtgcactgatcgctgcc

SEQ ID NO: 217017 - DNA, 25 bp, Probe Sequence
gcaaatggggcccttgtcagcatct

SEQ ID NO: 217018 - DNA, 25 bp, Probe Sequence
gcaaatgtgtgagctgcttggacct

SEQ ID NO: 217019 - DNA, 25 bp, Probe Sequence
gcaagagtctcatgatcctggtgcc

SEQ ID NO: 217020 - DNA, 25 bp, Probe Sequence
gcaagctggccgtcaacatggtgcc

SEQ ID NO: 217021 - DNA, 25 bp, Probe Sequence
gaactgtcctaaggcaggggcgagc

SEQ ID NO: 217022 - DNA, 25 bp, Probe Sequence
gcaacttccaacaagcggagaaagc

SEQ ID NO: 217023 - DNA, 25 bp, Probe Sequence
gcaaattcaccagcaggggctagga

SEQ ID NO: 217024 - DNA, 25 bp, Probe Sequence
gcaaatcttacagccggtcaagaag

SEQ ID NO: 217025 - DNA, 25 bp, Probe Sequence
gcacaatttatagcaagagtcaaag

SEQ ID NO: 217026 - DNA, 25 bp, Probe Sequence
gcacacttgtaaccatatgtgtata

SEQ ID NO: 217027 - DNA, 25 bp, Probe Sequence
gcaatccagtgaggcttcagtgtac

SEQ ID NO: 217028 - DNA, 25 bp, Probe Sequence
gcaacgccagcaggcgtcagaggcg

SEQ ID NO: 217029 - DNA, 25 bp, Probe Sequence
gcaacgtcgcgtggtctcagacgtg

SEQ ID NO: 217030 - DNA, 25 bp, Probe Sequence
gcacactgtcggagttctatcactt

SEQ ID NO: 217031 - DNA, 25 bp, Probe Sequence
gcaaagcatcggactgaaccaactt

SEQ ID NO: 217032 - DNA, 25 bp, Probe Sequence
gcaaacaatgctctaatcacaatat

SEQ ID NO: 217033 - DNA, 25 bp, Probe Sequence
gcaaacgtctgcaattctccagttt

SEQ ID NO: 217034 - DNA, 25 bp, Probe Sequence
gcaaagtgtcgatatcccagctttc

SEQ ID NO: 217035 - DNA, 25 bp, Probe Sequence
gcaaaatctcattaacagtcctttc

SEQ ID NO: 217036 - DNA, 25 bp, Probe Sequence
gcaaatcatcttgaggatttctttc

SEQ ID NO: 217037 - DNA, 25 bp, Probe Sequence
gcaaatctctttagcactattttaa

SEQ ID NO: 217038 - DNA, 25 bp, Probe Sequence
gcaaattctagatatcattatttca

SEQ ID NO: 217039 - DNA, 25 bp, Probe Sequence
gcacacatttaatcttttgcatcga

SEQ ID NO: 217040 - DNA, 25 bp, Probe Sequence
gcacactttgaccctttgtaggatt

SEQ ID NO: 217041 - DNA, 25 bp, Probe Sequence
gcaattatggaccctacttattttc

SEQ ID NO: 217042 - DNA, 25 bp, Probe Sequence
gcaaaagaacagactccctttttca

SEQ ID NO: 217043 - DNA, 25 bp, Probe Sequence
gcacaaccaaaattggcctttttct

SEQ ID NO: 217044 - DNA, 25 bp, Probe Sequence
gcaaaccaatggtgatcctctattt

SEQ ID NO: 217045 - DNA, 25 bp, Probe Sequence
gaatgtccgaagagtggccttttcc

SEQ ID NO: 217046 - DNA, 25 bp, Probe Sequence
gaattccgtatcagtcaccatttta

SEQ ID NO: 217047 - DNA, 25 bp, Probe Sequence
gcaactttgttcagtgccagcgatt

SEQ ID NO: 217048 - DNA, 25 bp, Probe Sequence
gcaacatttgttgaggccttatgat

SEQ ID NO: 217049 - DNA, 25 bp, Probe Sequence
gcaacaactttcaaggtccttgctg

SEQ ID NO: 217050 - DNA, 25 bp, Probe Sequence
gaccaccgttaagggccatttggag

SEQ ID NO: 217051 - DNA, 25 bp, Probe Sequence
gattcccaggaaccggaatttggcg

SEQ ID NO: 217052 - DNA, 25 bp, Probe Sequence
gtaccaagaaagtcgggatcgtcgg

SEQ ID NO: 217053 - DNA, 25 bp, Probe Sequence
gaatcccaaaggtagtgcttgttcg

SEQ ID NO: 217054 - DNA, 25 bp, Probe Sequence
gaagcccaagaagattgtaaatgcc

SEQ ID NO: 217055 - DNA, 25 bp, Probe Sequence
gaagctcgaagcaggtttaggacca

SEQ ID NO: 217056 - DNA, 25 bp, Probe Sequence
gcaaatctacaaaggttcttgaacc

SEQ ID NO: 217057 - DNA, 25 bp, Probe Sequence
gcaaatctacaatggtctcaaaatt

SEQ ID NO: 217058 - DNA, 25 bp, Probe Sequence
gcaaactaaatcactcgctcaattg

SEQ ID NO: 217059 - DNA, 25 bp, Probe Sequence
gcaaccaaaggcaccggccttgatg

SEQ ID NO: 217060 - DNA, 25 bp, Probe Sequence
gcaacaacacggactccgagttcga

SEQ ID NO: 217061 - DNA, 25 bp, Probe Sequence
gcacaacagaattacaccgagtggc

SEQ ID NO: 217062 - DNA, 25 bp, Probe Sequence
gcacaatcaggaatacagccaaggg

SEQ ID NO: 217063 - DNA, 25 bp, Probe Sequence
gcacaatcaggaatacagccaaggg

SEQ ID NO: 217064 - DNA, 25 bp, Probe Sequence
gcaaatcatgtaagaccaggagagg

SEQ ID NO: 217065 - DNA, 25 bp, Probe Sequence
gcaacatgtgagtgaaaggcaagtg

SEQ ID NO: 217066 - DNA, 25 bp, Probe Sequence
gcaacatggatgtgattcccaacac

SEQ ID NO: 217067 - DNA, 25 bp, Probe Sequence
gcaactgctgttcgtacacagaaac

SEQ ID NO: 217068 - DNA, 25 bp, Probe Sequence
gcaaagctgttgcacatggcgataa

SEQ ID NO: 217069 - DNA, 25 bp, Probe Sequence
gcaaagcattctcatcagtcgcaat

SEQ ID NO: 217070 - DNA, 25 bp, Probe Sequence
gcaacagactctcacagggcaaaaa

SEQ ID NO: 217071 - DNA, 25 bp, Probe Sequence
gcacaagacctgcagaagtggacag

SEQ ID NO: 217072 - DNA, 25 bp, Probe Sequence
gcacaagaagcgtgagacgccacca

SEQ ID NO: 217073 - DNA, 25 bp, Probe Sequence
gcaagtggaggactgatgacgcccc

SEQ ID NO: 217074 - DNA, 25 bp, Probe Sequence
gaagggggacctggtacccagtgat

SEQ ID NO: 217075 - DNA, 25 bp, Probe Sequence
gcaaggagcggggtcgtgaccgctt

SEQ ID NO: 217076 - DNA, 25 bp, Probe Sequence
gcaaggaggtcaacctggactccta

SEQ ID NO: 217077 - DNA, 25 bp, Probe Sequence
gcaacaagggtgaccgcgacttcta

SEQ ID NO: 217078 - DNA, 25 bp, Probe Sequence
gcaacacggagtacacctgtttcca

SEQ ID NO: 217079 - DNA, 25 bp, Probe Sequence
gcaacacggagtacacctgtttcca

SEQ ID NO: 217080 - DNA, 25 bp, Probe Sequence
gcaaaattagtcgccttcgtcgaga

SEQ ID NO: 217081 - DNA, 25 bp, Probe Sequence
gcaaagaacgctctcctttgccgaa

SEQ ID NO: 217082 - DNA, 25 bp, Probe Sequence
gactattaagctgtcgtcttcctaa

SEQ ID NO: 217083 - DNA, 25 bp, Probe Sequence
gaattaaaggggatttcgctaacag

SEQ ID NO: 217084 - DNA, 25 bp, Probe Sequence
gaatttaaatggtgcctacctaacg

SEQ ID NO: 217085 - DNA, 25 bp, Probe Sequence
gcaagttaaagactgtgtctgccct

SEQ ID NO: 217086 - DNA, 25 bp, Probe Sequence
gcaagtttatcagagtatcgccatg

SEQ ID NO: 217087 - DNA, 25 bp, Probe Sequence
gcaagaagttatcagtaccagcagc

SEQ ID NO: 217088 - DNA, 25 bp, Probe Sequence
gcaaaaatctatcaccagcaacaga

SEQ ID NO: 217089 - DNA, 25 bp, Probe Sequence
gcaagaaatctacatccaccaaaat

SEQ ID NO: 217090 - DNA, 25 bp, Probe Sequence
gcaaaacacggctacgtctcacaaa

SEQ ID NO: 217091 - DNA, 25 bp, Probe Sequence
gcaaaatcaagagatggcttacaaa

SEQ ID NO: 217092 - DNA, 25 bp, Probe Sequence
gcaataaagtcagctggctttctca

SEQ ID NO: 217093 - DNA, 25 bp, Probe Sequence
gcaaaaattacagtggttgatgcct

SEQ ID NO: 217094 - DNA, 25 bp, Probe Sequence
gaagcccattaattgggttccccat

SEQ ID NO: 217095 - DNA, 25 bp, Probe Sequence
gaatccaaatactgggttctcccgt

SEQ ID NO: 217096 - DNA, 25 bp, Probe Sequence
gaattaggaaaacggttcaccagtg

SEQ ID NO: 217097 - DNA, 25 bp, Probe Sequence
gaaccaccaaaatgcttacatccgt

SEQ ID NO: 217098 - DNA, 25 bp, Probe Sequence
gaaccaccaaaatgcttacatccgt

SEQ ID NO: 217099 - DNA, 25 bp, Probe Sequence
gacaacacggaaaggtattcttcgt

SEQ ID NO: 217100 - DNA, 25 bp, Probe Sequence
gcaaacactggaaagtctgtttttt

SEQ ID NO: 217101 - DNA, 25 bp, Probe Sequence
gcaacaggtggaaagacattcttgt

SEQ ID NO: 217102 - DNA, 25 bp, Probe Sequence
tccactggggaggaggttccttttg

SEQ ID NO: 217103 - DNA, 25 bp, Probe Sequence
tgccttttggggtccaatctttttg

SEQ ID NO: 217104 - DNA, 25 bp, Probe Sequence
gacttttggggctggatagttctct

SEQ ID NO: 217105 - DNA, 25 bp, Probe Sequence
gcaagtgtaggacggggtggtttca

SEQ ID NO: 217106 - DNA, 25 bp, Probe Sequence
gcaacatggggacgggggtatacac

SEQ ID NO: 217107 - DNA, 25 bp, Probe Sequence
gcaagaggctggcgatcagggatct

SEQ ID NO: 217108 - DNA, 25 bp, Probe Sequence
gcaagacagtgcgcttcaacgtgct

SEQ ID NO: 217109 - DNA, 25 bp, Probe Sequence
gcaagacagtgcgcttcaacgtgct

SEQ ID NO: 217110 - DNA, 25 bp, Probe Sequence
gcaagacagtgcgcttcaacgtgct

SEQ ID NO: 217111 - DNA, 25 bp, Probe Sequence
gcaagccaggcccttcatgaaggcc

SEQ ID NO: 217112 - DNA, 25 bp, Probe Sequence
gcaaggctgggtaatgtgaaggccc

SEQ ID NO: 217113 - DNA, 25 bp, Probe Sequence
gcaagacatggcctgtatgagaaga

SEQ ID NO: 217114 - DNA, 25 bp, Probe Sequence
gcaacattatgaaggatggatcaga

SEQ ID NO: 217115 - DNA, 25 bp, Probe Sequence
gcaatgaggagaagctgaggtgtag

SEQ ID NO: 217116 - DNA, 25 bp, Probe Sequence
gcaagcagtgaccatgcgcagggtt

SEQ ID NO: 217117 - DNA, 25 bp, Probe Sequence
gcaacagtacgagactctgttccaa

SEQ ID NO: 217118 - DNA, 25 bp, Probe Sequence
gcaacagtacgagactctgttccaa

SEQ ID NO: 217119 - DNA, 25 bp, Probe Sequence
gcaacagtacgagactctgttccaa

SEQ ID NO: 217120 - DNA, 25 bp, Probe Sequence
gcaacaaagcaagaccctatctcta

SEQ ID NO: 217121 - DNA, 25 bp, Probe Sequence
gcaaagagacaaaagcagccgatcc

SEQ ID NO: 217122 - DNA, 25 bp, Probe Sequence
gcacaagaacagcgtcagccagatc

SEQ ID NO: 217123 - DNA, 25 bp, Probe Sequence
gcacaatgccaatggtgagtgacac

SEQ ID NO: 217124 - DNA, 25 bp, Probe Sequence
gcaaatgaccactgtgagtgcaaca

SEQ ID NO: 217125 - DNA, 25 bp, Probe Sequence
gcaatgtacgccaagttcgaccagt

SEQ ID NO: 217126 - DNA, 25 bp, Probe Sequence
gcaatgtcccagggaatctggctac

SEQ ID NO: 217127 - DNA, 25 bp, Probe Sequence
gcaagtcacttgagagtccaatcac

SEQ ID NO: 217128 - DNA, 25 bp, Probe Sequence
gcaaatctcttgcaagaacagcaca

SEQ ID NO: 217129 - DNA, 25 bp, Probe Sequence
gcaaatggctgcaaaagcccagcaa

SEQ ID NO: 217130 - DNA, 25 bp, Probe Sequence
gcaacatggtgttaacctctcaatt

SEQ ID NO: 217131 - DNA, 25 bp, Probe Sequence
gcaacatggtttgactccattttga

SEQ ID NO: 217132 - DNA, 25 bp, Probe Sequence
gcaacatgctttaaccccattgtat

SEQ ID NO: 217133 - DNA, 25 bp, Probe Sequence
gcaaggcatttaacagagcctctta

SEQ ID NO: 217134 - DNA, 25 bp, Probe Sequence
gcaacgtcttgaacaggcgctgatg

SEQ ID NO: 217135 - DNA, 25 bp, Probe Sequence
gcaaagtgctcaagaagtggcattg

SEQ ID NO: 217136 - DNA, 25 bp, Probe Sequence
gcaaaggccaatgttggtgctggca

SEQ ID NO: 217137 - DNA, 25 bp, Probe Sequence
gcaaagagccattcagcttcagtct

SEQ ID NO: 217138 - DNA, 25 bp, Probe Sequence
gcaagaatactggcagttcactgtg

SEQ ID NO: 217139 - DNA, 25 bp, Probe Sequence
gcaagaaaagctgctgctcctgctg

SEQ ID NO: 217140 - DNA, 25 bp, Probe Sequence
gcaaacacaatgaggtctggcatct

SEQ ID NO: 217141 - DNA, 25 bp, Probe Sequence
gcaacatccaatgtgtttgccatgt

SEQ ID NO: 217142 - DNA, 25 bp, Probe Sequence
gcaacaggcagagctgtgtcgcaca

SEQ ID NO: 217143 - DNA, 25 bp, Probe Sequence
gcaaatggcagtgtgctgtcacctg

SEQ ID NO: 217144 - DNA, 25 bp, Probe Sequence
gcaaatgacactgtgcagctccttg

SEQ ID NO: 217145 - DNA, 25 bp, Probe Sequence
gcaaattcatcattgggctcacttc

SEQ ID NO: 217146 - DNA, 25 bp, Probe Sequence
gcacaagtcctctgacagcacattc

SEQ ID NO: 217147 - DNA, 25 bp, Probe Sequence
gcaaagtagtcaggaatcgatctcg

SEQ ID NO: 217148 - DNA, 25 bp, Probe Sequence
gcaaagaattcttgatcaaatccag

SEQ ID NO: 217149 - DNA, 25 bp, Probe Sequence
gcaaagatcttttatgccacccagt

SEQ ID NO: 217150 - DNA, 25 bp, Probe Sequence
gcaaattctttgtctgttcaccagt

SEQ ID NO: 217151 - DNA, 25 bp, Probe Sequence
gcaaatctttccatcttacagagtg

SEQ ID NO: 217152 - DNA, 25 bp, Probe Sequence
gcaaagtttacgacactgggactga

SEQ ID NO: 217153 - DNA, 25 bp, Probe Sequence
gaatagacattagacagggacctga

SEQ ID NO: 217154 - DNA, 25 bp, Probe Sequence
gaatagtcaaagcagcagcggcggc

SEQ ID NO: 217155 - DNA, 25 bp, Probe Sequence
gaatcatcaaaacggcaatatgggc

SEQ ID NO: 217156 - DNA, 25 bp, Probe Sequence
gcaaatgcaaaaactctttgagagg

SEQ ID NO: 217157 - DNA, 25 bp, Probe Sequence
gcaagccacacgggttgggagaggt

SEQ ID NO: 217158 - DNA, 25 bp, Probe Sequence
gcaagcacacccgtggttgtgaaaa

SEQ ID NO: 217159 - DNA, 25 bp, Probe Sequence
gcaagcaacggtgtgtctggaccct

SEQ ID NO: 217160 - DNA, 25 bp, Probe Sequence
gcaaggattgggggtcgtgcagccc

SEQ ID NO: 217161 - DNA, 25 bp, Probe Sequence
gcaagaagccggtagtctacacccg

SEQ ID NO: 217162 - DNA, 25 bp, Probe Sequence
gcaagaagcccgggatctacacccg

SEQ ID NO: 217163 - DNA, 25 bp, Probe Sequence
gcaagtacccagaagtccacattcc

SEQ ID NO: 217164 - DNA, 25 bp, Probe Sequence
gcaaggagctccatttccgagctcc

SEQ ID NO: 217165 - DNA, 25 bp, Probe Sequence
gcaaggccttatgtgtacgacctca

SEQ ID NO: 217166 - DNA, 25 bp, Probe Sequence
gcaaagatttcatggctaagacctc

SEQ ID NO: 217167 - DNA, 25 bp, Probe Sequence
gcaaagtgatcctgaggattacagc

SEQ ID NO: 217168 - DNA, 25 bp, Probe Sequence
gcaagggcatcctgggaaatgccat

SEQ ID NO: 217169 - DNA, 25 bp, Probe Sequence
gcaagggtcccgaggaggagcaccc

SEQ ID NO: 217170 - DNA, 25 bp, Probe Sequence
gaatgctgggtggcaggttggggcc

SEQ ID NO: 217171 - DNA, 25 bp, Probe Sequence
gatatttagtccacttttagccaaa

SEQ ID NO: 217172 - DNA, 25 bp, Probe Sequence
gcaattccagtcctaagtattacct

SEQ ID NO: 217173 - DNA, 25 bp, Probe Sequence
gcaacatcgaaaccaaccataacct

SEQ ID NO: 217174 - DNA, 25 bp, Probe Sequence
gcaagctgggaaacaatgccataga

SEQ ID NO: 217175 - DNA, 25 bp, Probe Sequence
gcaacagcgagactccatctcaaaa

SEQ ID NO: 217176 - DNA, 25 bp, Probe Sequence
gcaacagcgagactccatctcaaaa

SEQ ID NO: 217177 - DNA, 25 bp, Probe Sequence
gaatcgcctgacacctgaagaaatc

SEQ ID NO: 217178 - DNA, 25 bp, Probe Sequence
gaattggcatacccctggtgaagat

SEQ ID NO: 217179 - DNA, 25 bp, Probe Sequence
gcaaatgaacaccccgatgagatac

SEQ ID NO: 217180 - DNA, 25 bp, Probe Sequence
gcaaatgatggacctccagcgagtc

SEQ ID NO: 217181 - DNA, 25 bp, Probe Sequence
gcaaatgaggagtgccagcagtgtg

SEQ ID NO: 217182 - DNA, 25 bp, Probe Sequence
gcaaaggcagcttcccgagctgatg

SEQ ID NO: 217183 - DNA, 25 bp, Probe Sequence
gcaaagggcattccttgagctgtac

SEQ ID NO: 217184 - DNA, 25 bp, Probe Sequence
gcaagaggactttctccgtgtacag

SEQ ID NO: 217185 - DNA, 25 bp, Probe Sequence
gcaaagataattttcgctggtgaac

SEQ ID NO: 217186 - DNA, 25 bp, Probe Sequence
gcaaagaaattcgccttggccaacc

SEQ ID NO: 217187 - DNA, 25 bp, Probe Sequence
gcaagcaaaattcctgcctttctaa

SEQ ID NO: 217188 - DNA, 25 bp, Probe Sequence
gcaacaaacataccctttatctctg

SEQ ID NO: 217189 - DNA, 25 bp, Probe Sequence
gcaaattcacatattttcgacttga

SEQ ID NO: 217190 - DNA, 25 bp, Probe Sequence
gcaacaggctttttctgtgagactg

SEQ ID NO: 217191 - DNA, 25 bp, Probe Sequence
gcaacaagtgctttgggggattgca

SEQ ID NO: 217192 - DNA, 25 bp, Probe Sequence
gcaaaggatctgttaagaggatgaa

SEQ ID NO: 217193 - DNA, 25 bp, Probe Sequence
gcaaagtgttgcaataaagggtcag

SEQ ID NO: 217194 - DNA, 25 bp, Probe Sequence
gcaatagtttgcatagaggtaccag

SEQ ID NO: 217195 - DNA, 25 bp, Probe Sequence
gcaaatgtctaaccagatgagtttc

SEQ ID NO: 217196 - DNA, 25 bp, Probe Sequence
gcaaatcttagacatggtggtactg

SEQ ID NO: 217197 - DNA, 25 bp, Probe Sequence
gcaaatggtgcggtaggcgtgtacg

SEQ ID NO: 217198 - DNA, 25 bp, Probe Sequence
gcaaatgggcggtaggcgtgtacgg

SEQ ID NO: 217199 - DNA, 25 bp, Probe Sequence
gcaaatgggcggtaggcgtgtacgg

SEQ ID NO: 217200 - DNA, 25 bp, Probe Sequence
gcaaatgggcggtaggcgtgtacgg

SEQ ID NO: 217201 - DNA, 25 bp, Probe Sequence
gcaaatgggcggtaggcgtgtacgg

SEQ ID NO: 217202 - DNA, 25 bp, Probe Sequence
gcaaatgggcggtaggcgtgtacgg

SEQ ID NO: 217203 - DNA, 25 bp, Probe Sequence
gcaaatgggcggtaggcgtgtacgg

SEQ ID NO: 217204 - DNA, 25 bp, Probe Sequence
gcaaatgggcggtaggcgtgtacgg

SEQ ID NO: 217205 - DNA, 25 bp, Probe Sequence
gcaaatgggcggtaggcgtgtacgg

SEQ ID NO: 217206 - DNA, 25 bp, Probe Sequence
gcaaatgggcggtaggcgtgtacgg

SEQ ID NO: 217207 - DNA, 25 bp, Probe Sequence
gcaaatgggcggtaggcgtgtacgg

SEQ ID NO: 217208 - DNA, 25 bp, Probe Sequence
gcaaatgggcggtaggcgtgtacgg

SEQ ID NO: 217209 - DNA, 25 bp, Probe Sequence
gcaaatgggcggtaggcgtgtacgg

SEQ ID NO: 217210 - DNA, 25 bp, Probe Sequence
gcaaatgggcggtaggcgtgtacgg

SEQ ID NO: 217211 - DNA, 25 bp, Probe Sequence
gcaaatgggcggtaggcgtgtacgg

SEQ ID NO: 217212 - DNA, 25 bp, Probe Sequence
gcaaatgggcggtaggcgtgtacgg

SEQ ID NO: 217213 - DNA, 25 bp, Probe Sequence
gcaaatgggcggtaggcgtgtacgg

SEQ ID NO: 217214 - DNA, 25 bp, Probe Sequence
gcaaatgggcggtaggcgtgtacgg

SEQ ID NO: 217215 - DNA, 25 bp, Probe Sequence
gcaaatgggcggtaggcgtgtacgg

SEQ ID NO: 217216 - DNA, 25 bp, Probe Sequence
gcaaatgggcggtaggcgtgtacgg

SEQ ID NO: 217217 - DNA, 25 bp, Probe Sequence
gcaaatgggcggtaggcgtgtacgg

SEQ ID NO: 217218 - DNA, 25 bp, Probe Sequence
gcaaatgggcggtaggcgtgtacgg

SEQ ID NO: 217219 - DNA, 25 bp, Probe Sequence
gcaaatgggcggtaggcgtgtacgg

SEQ ID NO: 217220 - DNA, 25 bp, Probe Sequence
gcaaatgggcggtaggcgtgtacgg

SEQ ID NO: 217221 - DNA, 25 bp, Probe Sequence
gcaaatgggcggtaggcgtgtacgg

SEQ ID NO: 217222 - DNA, 25 bp, Probe Sequence
gcaaatgggcggtaggcgtgtacgg

SEQ ID NO: 217223 - DNA, 25 bp, Probe Sequence
gcaaatgggcggtaggcgtgtacgg

SEQ ID NO: 217224 - DNA, 25 bp, Probe Sequence
gcaaatgggcggtaggcgtgtacgg

SEQ ID NO: 217225 - DNA, 25 bp, Probe Sequence
gcaaatgggcggtaggcgtgtacgg

SEQ ID NO: 217226 - DNA, 25 bp, Probe Sequence
gcaaatgggcggtaggcgtgtacgg

SEQ ID NO: 217227 - DNA, 25 bp, Probe Sequence
gcaaatgggcggtaggcgtgtacgg

SEQ ID NO: 217228 - DNA, 25 bp, Probe Sequence
gcaaatgggcggtaggcgtgtacgg

SEQ ID NO: 217229 - DNA, 25 bp, Probe Sequence
gcaaatgggcggtaggcgtgtacgg

SEQ ID NO: 217230 - DNA, 25 bp, Probe Sequence
gcaaatgggcggtaggcgtgtacgg

SEQ ID NO: 217231 - DNA, 25 bp, Probe Sequence
gcaaatgggcggtaggcgtgtacgg

SEQ ID NO: 217232 - DNA, 25 bp, Probe Sequence
gcaaatgggcggtaggcgtgtacgg

SEQ ID NO: 217233 - DNA, 25 bp, Probe Sequence
gcaaatgggcggtaggcgtgtacgg

SEQ ID NO: 217234 - DNA, 25 bp, Probe Sequence
gcaaatgggcggtaggcgtgtacgg

SEQ ID NO: 217235 - DNA, 25 bp, Probe Sequence
gcaaatgggcggtaggcgtgtacgg

SEQ ID NO: 217236 - DNA, 25 bp, Probe Sequence
gcaaatgggcggtaggcgtgtacgg

SEQ ID NO: 217237 - DNA, 25 bp, Probe Sequence
gcaaatggtcggtaggcgtgtacgg

SEQ ID NO: 217238 - DNA, 25 bp, Probe Sequence
gcaaatggtagacagccgaatcagc

SEQ ID NO: 217239 - DNA, 25 bp, Probe Sequence
gcaacatttgggccagctaaacatg

SEQ ID NO: 217240 - DNA, 25 bp, Probe Sequence
gcaaatgtgtgctcaagctaataag

SEQ ID NO: 217241 - DNA, 25 bp, Probe Sequence
gcaaatgtgtcataagtcctataaa

SEQ ID NO: 217242 - DNA, 25 bp, Probe Sequence
gcaagtgttttatggggatcaaatg

SEQ ID NO: 217243 - DNA, 25 bp, Probe Sequence
gcaactgttttcttagttacagaag

SEQ ID NO: 217244 - DNA, 25 bp, Probe Sequence
gcaactttttcttaccattcaaagt

SEQ ID NO: 217245 - DNA, 25 bp, Probe Sequence
gcaacaacttacttactatttatca

SEQ ID NO: 217246 - DNA, 25 bp, Probe Sequence
gcaacaaactccttaatttgctcta

SEQ ID NO: 217247 - DNA, 25 bp, Probe Sequence
gcaaagtgactctgtatttgtctta

SEQ ID NO: 217248 - DNA, 25 bp, Probe Sequence
gcaaaataacctggttctgactttg

SEQ ID NO: 217249 - DNA, 25 bp, Probe Sequence
gcaacaatgtaactggtcttgactt

SEQ ID NO: 217250 - DNA, 25 bp, Probe Sequence
gcaaaatgacagctagtgcttggga

SEQ ID NO: 217251 - DNA, 25 bp, Probe Sequence
gcaaaagcaaggaagcactggggag

SEQ ID NO: 217252 - DNA, 25 bp, Probe Sequence
gcaaaagtcaggtacactggacaga

SEQ ID NO: 217253 - DNA, 25 bp, Probe Sequence
gcaaacagcacactaatcctggagc

SEQ ID NO: 217254 - DNA, 25 bp, Probe Sequence
gcaagaaacctatttttgtccaatg

SEQ ID NO: 217255 - DNA, 25 bp, Probe Sequence
gcaagaaagcctctttgcaaccggg

SEQ ID NO: 217256 - DNA, 25 bp, Probe Sequence
gtagacagggctctttgggggatgg

SEQ ID NO: 217257 - DNA, 25 bp, Probe Sequence
gaataactgttcgtttgaggggtgg

SEQ ID NO: 217258 - DNA, 25 bp, Probe Sequence
gcaaaactttccaactgagtggagt

SEQ ID NO: 217259 - DNA, 25 bp, Probe Sequence
gcaaggactttgtacatttgggagt

SEQ ID NO: 217260 - DNA, 25 bp, Probe Sequence
gcaaggacgtgatcctgcttgggga

SEQ ID NO: 217261 - DNA, 25 bp, Probe Sequence
gcaaatgggcggtaggcgtgtacgg

SEQ ID NO: 217262 - DNA, 25 bp, Probe Sequence
gcaaatgggcggtaggcgtgtacgg

SEQ ID NO: 217263 - DNA, 25 bp, Probe Sequence
gcaaatgggcggtaggcgtgtacgg

SEQ ID NO: 217264 - DNA, 25 bp, Probe Sequence
gcaaatgggcggtaggcgtgtacgg

SEQ ID NO: 217265 - DNA, 25 bp, Probe Sequence
gcaaatgggcggtaggcgtgtacgg

SEQ ID NO: 217266 - DNA, 25 bp, Probe Sequence
gcaaatgggcggtaggcgtgtacgg

SEQ ID NO: 217267 - DNA, 25 bp, Probe Sequence
gcaaatgggcggtaggcgtgtacgg

SEQ ID NO: 217268 - DNA, 25 bp, Probe Sequence
gcaaatgggcggtaggcgtgtacgg

SEQ ID NO: 217269 - DNA, 25 bp, Probe Sequence
gcaaatgggcggtaggcgtgtacgg

SEQ ID NO: 217270 - DNA, 25 bp, Probe Sequence
gcaaatgggcggtaggcgtgtacgg

SEQ ID NO: 217271 - DNA, 25 bp, Probe Sequence
gcaaatgggcggtaggcgtgtacgg

SEQ ID NO: 217272 - DNA, 25 bp, Probe Sequence
gcaaatgggcggtaggcgtgtacgg

SEQ ID NO: 217273 - DNA, 25 bp, Probe Sequence
gcaaatgggcggtaggcgtgtacgg

SEQ ID NO: 217274 - DNA, 25 bp, Probe Sequence
gcaaatgggcggtaggcgtgtacgg

SEQ ID NO: 217275 - DNA, 25 bp, Probe Sequence
gcaaatgggcggtaggcgtgtacgg

SEQ ID NO: 217276 - DNA, 25 bp, Probe Sequence
gcaaatgggcggtaggcgtgtacgg

SEQ ID NO: 217277 - DNA, 25 bp, Probe Sequence
gcaaatgggcggtaggcgtgtacgg

SEQ ID NO: 217278 - DNA, 25 bp, Probe Sequence
gcaaatgggcggtaggcgtgtacgg

SEQ ID NO: 217279 - DNA, 25 bp, Probe Sequence
gcaaatgggcggtaggcgtgtacgg

SEQ ID NO: 217280 - DNA, 25 bp, Probe Sequence
gcaaatgggcggtaggcgtgtacgg

SEQ ID NO: 217281 - DNA, 25 bp, Probe Sequence
gcaaatgggcggtaggcgtgtacgg

SEQ ID NO: 217282 - DNA, 25 bp, Probe Sequence
gcaaatgggcggtaggcgtgtacgg

SEQ ID NO: 217283 - DNA, 25 bp, Probe Sequence
gcaaatgggcggtaggcgtgtacgg

SEQ ID NO: 217284 - DNA, 25 bp, Probe Sequence
gcaaatgggcggtaggcgtgtacgg

SEQ ID NO: 217285 - DNA, 25 bp, Probe Sequence
gcaaatgggcggtaggcgtgtacgg

SEQ ID NO: 217286 - DNA, 25 bp, Probe Sequence
gcaaatgggcggtaggcgtgtacgg

SEQ ID NO: 217287 - DNA, 25 bp, Probe Sequence
gcaaatgggcggtaggcgtgtacgg

SEQ ID NO: 217288 - DNA, 25 bp, Probe Sequence
gcaaatgggcggtaggcgtgtacgg

SEQ ID NO: 217289 - DNA, 25 bp, Probe Sequence
gcaaatgggcggtaggcgtgtacgg

SEQ ID NO: 217290 - DNA, 25 bp, Probe Sequence
gcaaatgggcggtaggcgtgtacgg

SEQ ID NO: 217291 - DNA, 25 bp, Probe Sequence
gcaaatgggcggtaggcgtgtacgg

SEQ ID NO: 217292 - DNA, 25 bp, Probe Sequence
gcaaatgggcggtaggcgtgtacgg

SEQ ID NO: 217293 - DNA, 25 bp, Probe Sequence
gcaaatgggcggtaggcgtgtacgg

SEQ ID NO: 217294 - DNA, 25 bp, Probe Sequence
gcaaatgggcggtaggcgtgtacgg

SEQ ID NO: 217295 - DNA, 25 bp, Probe Sequence
gcaaatgggcggtaggcgtgtacgg

SEQ ID NO: 217296 - DNA, 25 bp, Probe Sequence
gcaaatgggcggtaggcgtgtacgg

SEQ ID NO: 217297 - DNA, 25 bp, Probe Sequence
gcaaatgggcggtaggcgtgtacgg

SEQ ID NO: 217298 - DNA, 25 bp, Probe Sequence
gcaaatgggcggtaggcgttgtacg

SEQ ID NO: 217299 - DNA, 25 bp, Probe Sequence
gcaaatggtcggtaggcgttgtacg

SEQ ID NO: 217300 - DNA, 25 bp, Probe Sequence
gaattggccccatggcttgatgtga

SEQ ID NO: 217301 - DNA, 25 bp, Probe Sequence
gcaaggaaaccatctgccgtgtgac

SEQ ID NO: 217302 - DNA, 25 bp, Probe Sequence
gcaaggtaacctccgaggctatggc

SEQ ID NO: 217303 - DNA, 25 bp, Probe Sequence
gcaaggggagcccagtgggcctggc

SEQ ID NO: 217304 - DNA, 25 bp, Probe Sequence
gaatcgggcactgtgtggagccccc

SEQ ID NO: 217305 - DNA, 25 bp, Probe Sequence
gaatcaggggctgtaatggcctttc

SEQ ID NO: 217306 - DNA, 25 bp, Probe Sequence
gcaaccggttctttagggtattgct

SEQ ID NO: 217307 - DNA, 25 bp, Probe Sequence
gcaacacgtttgcaaaggttttatt

SEQ ID NO: 217308 - DNA, 25 bp, Probe Sequence
gcaacagctcctccgaagaggtttc

SEQ ID NO: 217309 - DNA, 25 bp, Probe Sequence
gcaaacacgctgcgatacggcggtc

SEQ ID NO: 217310 - DNA, 25 bp, Probe Sequence
gcaaagaccagggaagcggcagagc

SEQ ID NO: 217311 - DNA, 25 bp, Probe Sequence
gcaacttccagtgcaaggacgtcct

SEQ ID NO: 217312 - DNA, 25 bp, Probe Sequence
gaatgcttgggtgaagcgaagttct

SEQ ID NO: 217313 - DNA, 25 bp, Probe Sequence
gcaatcttcccagacacgaaaggca

SEQ ID NO: 217314 - DNA, 25 bp, Probe Sequence
gcaacttccacaaaatcaaggtgaa

SEQ ID NO: 217315 - DNA, 25 bp, Probe Sequence
gcaagttacaattacagccaggcct

SEQ ID NO: 217316 - DNA, 25 bp, Probe Sequence
gcaagtgtgagcagtaagccagacg

SEQ ID NO: 217317 - DNA, 25 bp, Probe Sequence
gcaagtgtatcccatcattgccgag

SEQ ID NO: 217318 - DNA, 25 bp, Probe Sequence
gcaagcagtacagtggcattcccag

SEQ ID NO: 217319 - DNA, 25 bp, Probe Sequence
gcaacagaaagtggcttggaagtct

SEQ ID NO: 217320 - DNA, 25 bp, Probe Sequence
gcaaccacaggtgtatggcaatgat

SEQ ID NO: 217321 - DNA, 25 bp, Probe Sequence
gcaaccatcactgataaggagatgc

SEQ ID NO: 217322 - DNA, 25 bp, Probe Sequence
gcaacgccagcttcagcaagaggat

SEQ ID NO: 217323 - DNA, 25 bp, Probe Sequence
gcaacgccagcttcagcaagaggat

SEQ ID NO: 217324 - DNA, 25 bp, Probe Sequence
gcaacggcagccgaagagagtgctg

SEQ ID NO: 217325 - DNA, 25 bp, Probe Sequence
gcaactgagcatttcaagacagctc

SEQ ID NO: 217326 - DNA, 25 bp, Probe Sequence
gcaacatggagaataagcacagatt

SEQ ID NO: 217327 - DNA, 25 bp, Probe Sequence
gcaacagaagctgcaatcaccattc

SEQ ID NO: 217328 - DNA, 25 bp, Probe Sequence
gcaacaagagtgaaactccgtcttt

SEQ ID NO: 217329 - DNA, 25 bp, Probe Sequence
gcaacaagagcgaaactctgtctca

SEQ ID NO: 217330 - DNA, 25 bp, Probe Sequence
gcaacagcagagcatgactttgtct

SEQ ID NO: 217331 - DNA, 25 bp, Probe Sequence
gcaaccaaagattccagtgtttgag

SEQ ID NO: 217332 - DNA, 25 bp, Probe Sequence
gcaacagtaattcacagttttgatg

SEQ ID NO: 217333 - DNA, 25 bp, Probe Sequence
gcaaagctgtttcaatggtgtagtg

SEQ ID NO: 217334 - DNA, 25 bp, Probe Sequence
gcaaacttctgatcgttggtagtgt

SEQ ID NO: 217335 - DNA, 25 bp, Probe Sequence
gcaaacttttctggtaagttgtctg

SEQ ID NO: 217336 - DNA, 25 bp, Probe Sequence
gcaagacccttctctagaatttcca

SEQ ID NO: 217337 - DNA, 25 bp, Probe Sequence
gcaagacccttctgatcaggaggtt

SEQ ID NO: 217338 - DNA, 25 bp, Probe Sequence
gcaaaaccttgcaatatcagctaga

SEQ ID NO: 217339 - DNA, 25 bp, Probe Sequence
gcaaacacctttacacgctagatgg

SEQ ID NO: 217340 - DNA, 25 bp, Probe Sequence
gcaaagccctggaatcctgtaatgt

SEQ ID NO: 217341 - DNA, 25 bp, Probe Sequence
gcaaagcctgggaatctgctcattg

SEQ ID NO: 217342 - DNA, 25 bp, Probe Sequence
gcaatggcactgcagtactcattcc

SEQ ID NO: 217343 - DNA, 25 bp, Probe Sequence
gcaagtaatcaacacatattagctg

SEQ ID NO: 217344 - DNA, 25 bp, Probe Sequence
gcaagtagatgcaaggagttcaaga

SEQ ID NO: 217345 - DNA, 25 bp, Probe Sequence
gcaattcacagcaaagtagtcagga

SEQ ID NO: 217346 - DNA, 25 bp, Probe Sequence
gaattaattaggaagccagtggatt

SEQ ID NO: 217347 - DNA, 25 bp, Probe Sequence
gaattgcactttctacctttgtatg

SEQ ID NO: 217348 - DNA, 25 bp, Probe Sequence
gcaataccgttgtaatcctttctaa

SEQ ID NO: 217349 - DNA, 25 bp, Probe Sequence
gcaaagccagcttgaaaccttcact

SEQ ID NO: 217350 - DNA, 25 bp, Probe Sequence
gcaaagtctgctcgaggagtctgta

SEQ ID NO: 217351 - DNA, 25 bp, Probe Sequence
gcaaagtcctcattggtggcaacag

SEQ ID NO: 217352 - DNA, 25 bp, Probe Sequence
gcaagagtcgttttgcggaacgcga

SEQ ID NO: 217353 - DNA, 25 bp, Probe Sequence
gcaagacggtgtatggggaccagag

SEQ ID NO: 217354 - DNA, 25 bp, Probe Sequence
gcaaggggtgtaatggggctgggtt

SEQ ID NO: 217355 - DNA, 25 bp, Probe Sequence
gaagaggctgttgagggtccgactc

SEQ ID NO: 217356 - DNA, 25 bp, Probe Sequence
gcaaagcctttaaagagtcctcagc

SEQ ID NO: 217357 - DNA, 25 bp, Probe Sequence
gcaatgactcttaaaagttcgaggc

SEQ ID NO: 217358 - DNA, 25 bp, Probe Sequence
gcaagagtctttgaaataagcccat

SEQ ID NO: 217359 - DNA, 25 bp, Probe Sequence
gcaaagaatttatgacaaagtcccc

SEQ ID NO: 217360 - DNA, 25 bp, Probe Sequence
gcaaagactttatgactagtacacc

SEQ ID NO: 217361 - DNA, 25 bp, Probe Sequence
gcaacaactttgagagccgtgaggc

SEQ ID NO: 217362 - DNA, 25 bp, Probe Sequence
gcaaacacagtcctggagcgtgtgg

SEQ ID NO: 217363 - DNA, 25 bp, Probe Sequence
gcaaaacaggctctagcgttcgaac

SEQ ID NO: 217364 - DNA, 25 bp, Probe Sequence
gcaaagtgctgggttatgcctgttg

SEQ ID NO: 217365 - DNA, 25 bp, Probe Sequence
gcaaagtcattgcttgtgcactatc

SEQ ID NO: 217366 - DNA, 25 bp, Probe Sequence
gcaatcttcctgcaagtgacaatgc

SEQ ID NO: 217367 - DNA, 25 bp, Probe Sequence
gcaacactccatgtagctaatattt

SEQ ID NO: 217368 - DNA, 25 bp, Probe Sequence
gcaaaccctggttgctgtatttgtt

SEQ ID NO: 217369 - DNA, 25 bp, Probe Sequence
gaagtccagggttgcttggtttact

SEQ ID NO: 217370 - DNA, 25 bp, Probe Sequence
gaagtccagggttgcttggtttact

SEQ ID NO: 217371 - DNA, 25 bp, Probe Sequence
gaagtcagaggttaggaagtttatt

SEQ ID NO: 217372 - DNA, 25 bp, Probe Sequence
gcaactagcaggcgggaatctgttt

SEQ ID NO: 217373 - DNA, 25 bp, Probe Sequence
gcaactccatgacgctgggatttct

SEQ ID NO: 217374 - DNA, 25 bp, Probe Sequence
gaattccagaacatggttccaagct

SEQ ID NO: 217375 - DNA, 25 bp, Probe Sequence
gaattcccaatcagagggctgaaca

SEQ ID NO: 217376 - DNA, 25 bp, Probe Sequence
gaattcccctctggagggctatggc

SEQ ID NO: 217377 - DNA, 25 bp, Probe Sequence
gaatcttgcctgttaagggcttgat

SEQ ID NO: 217378 - DNA, 25 bp, Probe Sequence
gaattaccagttacggacatggctg

SEQ ID NO: 217379 - DNA, 25 bp, Probe Sequence
gaatcgaacagtctcaaagtggaag

SEQ ID NO: 217380 - DNA, 25 bp, Probe Sequence
gcaacggaggctcacgaggtacaag

SEQ ID NO: 217381 - DNA, 25 bp, Probe Sequence
gaagcggagccacaggggcaactac

SEQ ID NO: 217382 - DNA, 25 bp, Probe Sequence
gaattggaggcattagtgggaagga

SEQ ID NO: 217383 - DNA, 25 bp, Probe Sequence
gattctggaggcacgggggtaactg

SEQ ID NO: 217384 - DNA, 25 bp, Probe Sequence
gaatctggagtgaggggtaaaagct

SEQ ID NO: 217385 - DNA, 25 bp, Probe Sequence
gaatcaagttgtgggtggaaaaatc

SEQ ID NO: 217386 - DNA, 25 bp, Probe Sequence
gaataacctggctgggctgaaactg

SEQ ID NO: 217387 - DNA, 25 bp, Probe Sequence
gcaattacgtgtcaactgtgaaatg

SEQ ID NO: 217388 - DNA, 25 bp, Probe Sequence
gcaaaacggctgaacctggcaactg

SEQ ID NO: 217389 - DNA, 25 bp, Probe Sequence
gcaaacacatggccaaccagcgggc

SEQ ID NO: 217390 - DNA, 25 bp, Probe Sequence
gcaaccactgcagcgactagggaca

SEQ ID NO: 217391 - DNA, 25 bp, Probe Sequence
gcaatacctgaagatcatggggaag

SEQ ID NO: 217392 - DNA, 25 bp, Probe Sequence
gcaaacttcacaggaaggatgccta

SEQ ID NO: 217393 - DNA, 25 bp, Probe Sequence
gcaaggcttacagaaggatgttcct

SEQ ID NO: 217394 - DNA, 25 bp, Probe Sequence
gcaaggcttacagaaggatgttcct

SEQ ID NO: 217395 - DNA, 25 bp, Probe Sequence
gcaaggcttacagaaggatgttcct

SEQ ID NO: 217396 - DNA, 25 bp, Probe Sequence
gcaacccttcagaaaggctttgctc

SEQ ID NO: 217397 - DNA, 25 bp, Probe Sequence
gcaagcacacttgtaaccatatgtg

SEQ ID NO: 217398 - DNA, 25 bp, Probe Sequence
gcaagctgattaaatgacactcata

SEQ ID NO: 217399 - DNA, 25 bp, Probe Sequence
gcaatgcagatttggtgaatattta

SEQ ID NO: 217400 - DNA, 25 bp, Probe Sequence
gcaagctgacaggctgtgaaatatg

SEQ ID NO: 217401 - DNA, 25 bp, Probe Sequence
gcaactatcctctgaagaagggcac

SEQ ID NO: 217402 - DNA, 25 bp, Probe Sequence
gaatctatcccataaaaggaactca

SEQ ID NO: 217403 - DNA, 25 bp, Probe Sequence
gcaactgttccgcaaactggggcta

SEQ ID NO: 217404 - DNA, 25 bp, Probe Sequence
gcaacatgttccagaacctaaccaa

SEQ ID NO: 217405 - DNA, 25 bp, Probe Sequence
tgcacactttaccgtagctaaaccc

SEQ ID NO: 217406 - DNA, 25 bp, Probe Sequence
gcaatcgtatggctttctctaaccc

SEQ ID NO: 217407 - DNA, 25 bp, Probe Sequence
gcaacatcaggcctgatttctccaa

SEQ ID NO: 217408 - DNA, 25 bp, Probe Sequence
gcaatgaagagccttttccctaaat

SEQ ID NO: 217409 - DNA, 25 bp, Probe Sequence
gcaaaatgactcatcacttcccaaa

SEQ ID NO: 217410 - DNA, 25 bp, Probe Sequence
gcaaaatgacaaatccagccagcaa

SEQ ID NO: 217411 - DNA, 25 bp, Probe Sequence
gcaacacatgaaaactcatgcccca

SEQ ID NO: 217412 - DNA, 25 bp, Probe Sequence
gcaaagcatacagaattcattacaa

SEQ ID NO: 217413 - DNA, 25 bp, Probe Sequence
gcaaacacacactaattcctggcag

SEQ ID NO: 217414 - DNA, 25 bp, Probe Sequence
gcaacaagaacaaactccatctcaa

SEQ ID NO: 217415 - DNA, 25 bp, Probe Sequence
gcaaaaagttgttccttctcaaggc

SEQ ID NO: 217416 - DNA, 25 bp, Probe Sequence
gcaacttcgttgaattttcaccaac

SEQ ID NO: 217417 - DNA, 25 bp, Probe Sequence
gcaactcagtttatttaaccattcc

SEQ ID NO: 217418 - DNA, 25 bp, Probe Sequence
gcaaccttattttactacacgcatt

SEQ ID NO: 217419 - DNA, 25 bp, Probe Sequence
gaacttatttttcaaccatttcaca

SEQ ID NO: 217420 - DNA, 25 bp, Probe Sequence
gaatttaattttcaccccaataatg

SEQ ID NO: 217421 - DNA, 25 bp, Probe Sequence
gaattgtaatttcttacctaagtct

SEQ ID NO: 217422 - DNA, 25 bp, Probe Sequence
gaattgtagtttgtttagcctggtt

SEQ ID NO: 217423 - DNA, 25 bp, Probe Sequence
gcaataccgtgttggttttgactgg

SEQ ID NO: 217424 - DNA, 25 bp, Probe Sequence
gcaatggccgtagcgtttacgtgga

SEQ ID NO: 217425 - DNA, 25 bp, Probe Sequence
gcaatggcggtaggcgtgtacggtg

SEQ ID NO: 217426 - DNA, 25 bp, Probe Sequence
gcaatggcggtaggcgtgtacggtg

SEQ ID NO: 217427 - DNA, 25 bp, Probe Sequence
gcaatgagcggttccgctgccctga

SEQ ID NO: 217428 - DNA, 25 bp, Probe Sequence
gcaagaggagagagcgcctccagtc

SEQ ID NO: 217429 - DNA, 25 bp, Probe Sequence
gcaaggagaagctgcactccctgac

SEQ ID NO: 217430 - DNA, 25 bp, Probe Sequence
gcaatggtgaactagacccctggtc

SEQ ID NO: 217431 - DNA, 25 bp, Probe Sequence
gcaacttgaatctgataggccggcc

SEQ ID NO: 217432 - DNA, 25 bp, Probe Sequence
gcaacttggctatctttgggggcct

SEQ ID NO: 217433 - DNA, 25 bp, Probe Sequence
gcaacctggttatttatgtggggcc

SEQ ID NO: 217434 - DNA, 25 bp, Probe Sequence
gaatcctggcctggaatttgggcag

SEQ ID NO: 217435 - DNA, 25 bp, Probe Sequence
gcaatcctgtgtcaagaatctcgtg

SEQ ID NO: 217436 - DNA, 25 bp, Probe Sequence
gcaaccctgaggaagacctcacagc

SEQ ID NO: 217437 - DNA, 25 bp, Probe Sequence
gcaaccagatagggagatgcctgaa

SEQ ID NO: 217438 - DNA, 25 bp, Probe Sequence
gcaacagcaggggcgatatcctctg

SEQ ID NO: 217439 - DNA, 25 bp, Probe Sequence
gcaacagaggtggcctcattttctc

SEQ ID NO: 217440 - DNA, 25 bp, Probe Sequence
gcaacagacactgccacaatttcag

SEQ ID NO: 217441 - DNA, 25 bp, Probe Sequence
gcaacaggcattactcgccattgat

SEQ ID NO: 217442 - DNA, 25 bp, Probe Sequence
gcaacaatgactatgtgcctgtgtg

SEQ ID NO: 217443 - DNA, 25 bp, Probe Sequence
gcaacaatgttcagtctttgctgga

SEQ ID NO: 217444 - DNA, 25 bp, Probe Sequence
gcaacaagtgtctttggttataaat

SEQ ID NO: 217445 - DNA, 25 bp, Probe Sequence
gcaagaacagtccatgttgtatata

SEQ ID NO: 217446 - DNA, 25 bp, Probe Sequence
gcaacactcagtttatttaatactt

SEQ ID NO: 217447 - DNA, 25 bp, Probe Sequence
gcaacacttgacttcatcttaatgt

SEQ ID NO: 217448 - DNA, 25 bp, Probe Sequence
gcaaccatgtgtgtcctataatggg

SEQ ID NO: 217449 - DNA, 25 bp, Probe Sequence
gcaaactgtgcttctctatgataat

SEQ ID NO: 217450 - DNA, 25 bp, Probe Sequence
gcaacaactgcaattctcattgcaa

SEQ ID NO: 217451 - DNA, 25 bp, Probe Sequence
gcaacaaatgttaccacagctatgg

SEQ ID NO: 217452 - DNA, 25 bp, Probe Sequence
gcaacttcaattaccaacgcagatg

SEQ ID NO: 217453 - DNA, 25 bp, Probe Sequence
gcaacttcaagttcggacagcggcg

SEQ ID NO: 217454 - DNA, 25 bp, Probe Sequence
gcaagctccaagagacccaggacag

SEQ ID NO: 217455 - DNA, 25 bp, Probe Sequence
gcaagcccttgatgaccaagaggcg

SEQ ID NO: 217456 - DNA, 25 bp, Probe Sequence
gcaagcacctgttaataaaggtctt

SEQ ID NO: 217457 - DNA, 25 bp, Probe Sequence
gcaagttctataaacaagggtgtta

SEQ ID NO: 217458 - DNA, 25 bp, Probe Sequence
gcaagttgtataactcaggcgtctt

SEQ ID NO: 217459 - DNA, 25 bp, Probe Sequence
gcaagtatgatgggcaccgggtctg

SEQ ID NO: 217460 - DNA, 25 bp, Probe Sequence
gcaactgtgtgtacaccagggatct

SEQ ID NO: 217461 - DNA, 25 bp, Probe Sequence
gcaacaaggtaaccactgatcatta

SEQ ID NO: 217462 - DNA, 25 bp, Probe Sequence
gcaagccaagtatatccagcactta

SEQ ID NO: 217463 - DNA, 25 bp, Probe Sequence
gcaacaagaataaatccatgggtcg

SEQ ID NO: 217464 - DNA, 25 bp, Probe Sequence
gcaacacggatgataccatcgggga

SEQ ID NO: 217465 - DNA, 25 bp, Probe Sequence
gcaaacaggtgcgtcggaccgagaa

SEQ ID NO: 217466 - DNA, 25 bp, Probe Sequence
gcaaaatggagctcgaggccatgag

SEQ ID NO: 217467 - DNA, 25 bp, Probe Sequence
gcaagacggagagggcagagcaaga

SEQ ID NO: 217468 - DNA, 25 bp, Probe Sequence
gcaagatggggagtgagaggctggg

SEQ ID NO: 217469 - DNA, 25 bp, Probe Sequence
gcaataggcgggtgggtgcgtgctt

SEQ ID NO: 217470 - DNA, 25 bp, Probe Sequence
gcaacagggtggtggacctcatggc

SEQ ID NO: 217471 - DNA, 25 bp, Probe Sequence
gcaagtgggaggcggcccatgaggc

SEQ ID NO: 217472 - DNA, 25 bp, Probe Sequence
gcaagtgagcgaccttatctctgtg

SEQ ID NO: 217473 - DNA, 25 bp, Probe Sequence
gcaagggctactatgatgcctatct

SEQ ID NO: 217474 - DNA, 25 bp, Probe Sequence
gcaaggcctactagctagagtctgg

SEQ ID NO: 217475 - DNA, 25 bp, Probe Sequence
gcaagtgccttgatgtaattccatg

SEQ ID NO: 217476 - DNA, 25 bp, Probe Sequence
gcaactgactggtattaaattctct

SEQ ID NO: 217477 - DNA, 25 bp, Probe Sequence
gcaactaataaattaaacctattct

SEQ ID NO: 217478 - DNA, 25 bp, Probe Sequence
gcaacaatattaagtaacacctact

SEQ ID NO: 217479 - DNA, 25 bp, Probe Sequence
gaatagaattcaacataacaagctc

SEQ ID NO: 217480 - DNA, 25 bp, Probe Sequence
gcaacagcactgcctaaaagcaagc

SEQ ID NO: 217481 - DNA, 25 bp, Probe Sequence
gcaagcaactcagcataaggccagt

SEQ ID NO: 217482 - DNA, 25 bp, Probe Sequence
gcaagccactatcatctagggcaat

SEQ ID NO: 217483 - DNA, 25 bp, Probe Sequence
gcaagccctgaaatacagagcccaa

SEQ ID NO: 217484 - DNA, 25 bp, Probe Sequence
gcaaccgcaagtaaagagtctccac

SEQ ID NO: 217485 - DNA, 25 bp, Probe Sequence
gcaactggagagctttggttacaca

SEQ ID NO: 217486 - DNA, 25 bp, Probe Sequence
gcaactgggaagaagtggcctcaaa

SEQ ID NO: 217487 - DNA, 25 bp, Probe Sequence
gcaagctgggtagcaggcagatcca

SEQ ID NO: 217488 - DNA, 25 bp, Probe Sequence
gcaagaggcgtagtaatcaatcaca

SEQ ID NO: 217489 - DNA, 25 bp, Probe Sequence
gcaagaggtaaattcacacatacgg

SEQ ID NO: 217490 - DNA, 25 bp, Probe Sequence
gcaaaagatgcttaccgaatccgga

SEQ ID NO: 217491 - DNA, 25 bp, Probe Sequence
gcaaaaatctcttcccgatctagga

SEQ ID NO: 217492 - DNA, 25 bp, Probe Sequence
gcaacggtctttgaagagcttggaa

SEQ ID NO: 217493 - DNA, 25 bp, Probe Sequence
gcaagggctctgtgacaaggaagga

SEQ ID NO: 217494 - DNA, 25 bp, Probe Sequence
gcaactggcctggccgcaacagcag

SEQ ID NO: 217495 - DNA, 25 bp, Probe Sequence
gcaacattgcctcacggaatgaaga

SEQ ID NO: 217496 - DNA, 25 bp, Probe Sequence
gcaactgtacatccacaggcaaaaa

SEQ ID NO: 217497 - DNA, 25 bp, Probe Sequence
gcaagtgaacaccctgacaggaatg

SEQ ID NO: 217498 - DNA, 25 bp, Probe Sequence
gcaactgggcaccattacaggaaga

SEQ ID NO: 217499 - DNA, 25 bp, Probe Sequence
gcaatgctggcctgttaactgataa

SEQ ID NO: 217500 - DNA, 25 bp, Probe Sequence
gcaaggatgcctttacaggtgcaca

SEQ ID NO: 217501 - DNA, 25 bp, Probe Sequence
gcaaggatgcactattggatgcgta

SEQ ID NO: 217502 - DNA, 25 bp, Probe Sequence
gcaagcagatcgtagctggggtgaa

SEQ ID NO: 217503 - DNA, 25 bp, Probe Sequence
gcaatgcggctgcactggtggaaga

SEQ ID NO: 217504 - DNA, 25 bp, Probe Sequence
gcaagccagctgatatggtagcaac

SEQ ID NO: 217505 - DNA, 25 bp, Probe Sequence
gcaagcctgcagataggggcagcag

SEQ ID NO: 217506 - DNA, 25 bp, Probe Sequence
gcaagactcacaagacgggaagctg

SEQ ID NO: 217507 - DNA, 25 bp, Probe Sequence
gcaagcaccacagtagctggctgaa

SEQ ID NO: 217508 - DNA, 25 bp, Probe Sequence
gcaagagcgcagaaagcgtctggag

SEQ ID NO: 217509 - DNA, 25 bp, Probe Sequence
gcaagctacagcaaagcccattggc

SEQ ID NO: 217510 - DNA, 25 bp, Probe Sequence
gcaagaatcgcaaaaggcatttcaa

SEQ ID NO: 217511 - DNA, 25 bp, Probe Sequence
gcaagaaaatcaaaccatattacca

SEQ ID NO: 217512 - DNA, 25 bp, Probe Sequence
gaatgaatcaactgaccttgggcca

SEQ ID NO: 217513 - DNA, 25 bp, Probe Sequence
gcaagaatcttctcacttattggta

SEQ ID NO: 217514 - DNA, 25 bp, Probe Sequence
gcaagaatcttctcacttattggta

SEQ ID NO: 217515 - DNA, 25 bp, Probe Sequence
gcaagaatcttctcacttattggta

SEQ ID NO: 217516 - DNA, 25 bp, Probe Sequence
gcaagaatctcgcccaggtgaatgg

SEQ ID NO: 217517 - DNA, 25 bp, Probe Sequence
gcaagaatctcgcccaggtgaatgg

SEQ ID NO: 217518 - DNA, 25 bp, Probe Sequence
gcaaaatatgcccgagctgagagag

SEQ ID NO: 217519 - DNA, 25 bp, Probe Sequence
gcaacaatatgcagcaatggtaagc

SEQ ID NO: 217520 - DNA, 25 bp, Probe Sequence
gcaactagagcaaactggtacagcc

SEQ ID NO: 217521 - DNA, 25 bp, Probe Sequence
gcaatttagcatgttggaacgtcta

SEQ ID NO: 217522 - DNA, 25 bp, Probe Sequence
gcaactgaagccttttgagaccctg

SEQ ID NO: 217523 - DNA, 25 bp, Probe Sequence
gcaagctgagaacctgggaattcct

SEQ ID NO: 217524 - DNA, 25 bp, Probe Sequence
gcaatccagcctcatgggaagtcct

SEQ ID NO: 217525 - DNA, 25 bp, Probe Sequence
gcaaccaccatggaccagaagtctc

SEQ ID NO: 217526 - DNA, 25 bp, Probe Sequence
gcaagccaacaggtcacagaagcca

SEQ ID NO: 217527 - DNA, 25 bp, Probe Sequence
gcaagaatcaaggcccgcagatgct

SEQ ID NO: 217528 - DNA, 25 bp, Probe Sequence
gcaagaattatgacccacacactcc

SEQ ID NO: 217529 - DNA, 25 bp, Probe Sequence
gcaagaactgtatccaaacacctgt

SEQ ID NO: 217530 - DNA, 25 bp, Probe Sequence
gcaagaatctgtttcacacacacac

SEQ ID NO: 217531 - DNA, 25 bp, Probe Sequence
gcaagatgatttgtatcttagacga

SEQ ID NO: 217532 - DNA, 25 bp, Probe Sequence
gcaaggtgcttgttatgtctagaaa

SEQ ID NO: 217533 - DNA, 25 bp, Probe Sequence
gcaagagatgcgcttatgtatataa

SEQ ID NO: 217534 - DNA, 25 bp, Probe Sequence
gcaatcgtgcgcaatgaagtgattg

SEQ ID NO: 217535 - DNA, 25 bp, Probe Sequence
gcaacctgaaagtgagagtgaacct

SEQ ID NO: 217536 - DNA, 25 bp, Probe Sequence
gcaacctgggcgacggagtgagact

SEQ ID NO: 217537 - DNA, 25 bp, Probe Sequence
gcaatctgggttacggagtgagact

SEQ ID NO: 217538 - DNA, 25 bp, Probe Sequence
gcaattgggtctctggcaggcaata

SEQ ID NO: 217539 - DNA, 25 bp, Probe Sequence
gcaattaggattgcccaggagtcca

SEQ ID NO: 217540 - DNA, 25 bp, Probe Sequence
taaatacgttagcacttgagtcgac

SEQ ID NO: 217541 - DNA, 25 bp, Probe Sequence
gaaataaggggccacttggttggtg

SEQ ID NO: 217542 - DNA, 25 bp, Probe Sequence
gcaactttgcgggggttgccttggg

SEQ ID NO: 217543 - DNA, 25 bp, Probe Sequence
gcaactttcaagtgcgttctttaga

SEQ ID NO: 217544 - DNA, 25 bp, Probe Sequence
gcaagcatttcatatttgttactct

SEQ ID NO: 217545 - DNA, 25 bp, Probe Sequence
gcaagatgttctgtgtgggcttcct

SEQ ID NO: 217546 - DNA, 25 bp, Probe Sequence
gcaacagcgtgctcatgagcggctt

SEQ ID NO: 217547 - DNA, 25 bp, Probe Sequence
gcaacactggattcagtgcaggttt

SEQ ID NO: 217548 - DNA, 25 bp, Probe Sequence
gcaacatctggatcgtgaagccagg

SEQ ID NO: 217549 - DNA, 25 bp, Probe Sequence
gcaacatttaacttctcgcacatgg

SEQ ID NO: 217550 - DNA, 25 bp, Probe Sequence
gcaacttggacttgtcctcagcagc

SEQ ID NO: 217551 - DNA, 25 bp, Probe Sequence
gcaataattggcagatgcccactgc

SEQ ID NO: 217552 - DNA, 25 bp, Probe Sequence
gcaagacatgggccttgtcgatctg

SEQ ID NO: 217553 - DNA, 25 bp, Probe Sequence
gcaagcaagaggccgtggctgctgt

SEQ ID NO: 217554 - DNA, 25 bp, Probe Sequence
gcaagcaagtatgctgctctctctg

SEQ ID NO: 217555 - DNA, 25 bp, Probe Sequence
gcaacagagcaagactccatctcaa

SEQ ID NO: 217556 - DNA, 25 bp, Probe Sequence
gcaacagcagcctgcagctggatta

SEQ ID NO: 217557 - DNA, 25 bp, Probe Sequence
gcaacacgtgatagcaggtgatact

SEQ ID NO: 217558 - DNA, 25 bp, Probe Sequence
gcaacatcgtcaacaatgtctgcgc

SEQ ID NO: 217559 - DNA, 25 bp, Probe Sequence
gcaagctcttcacgcagattctgcg

SEQ ID NO: 217560 - DNA, 25 bp, Probe Sequence
gcaatgcctcatatgcatactctgg

SEQ ID NO: 217561 - DNA, 25 bp, Probe Sequence
gcaatgacaatgtctgctctctctg

SEQ ID NO: 217562 - DNA, 25 bp, Probe Sequence
gcaatgatattgccctcatcaagct

SEQ ID NO: 217563 - DNA, 25 bp, Probe Sequence
gcaagtcatagcagttcagtgcctt

SEQ ID NO: 217564 - DNA, 25 bp, Probe Sequence
gcaaaattcattctatgtgccgttt

SEQ ID NO: 217565 - DNA, 25 bp, Probe Sequence
taaaactatactgacccgttttcag

SEQ ID NO: 217566 - DNA, 25 bp, Probe Sequence
gaactttgtcctgaaccttttacag

SEQ ID NO: 217567 - DNA, 25 bp, Probe Sequence
gaactttgtcctgaaccttttacag

SEQ ID NO: 217568 - DNA, 25 bp, Probe Sequence
gcaactcctgacaattaagcctttt

SEQ ID NO: 217569 - DNA, 25 bp, Probe Sequence
gaactccgacaaagttcccattgcc

SEQ ID NO: 217570 - DNA, 25 bp, Probe Sequence
gcaaccctgaagagtttgtcattgt

SEQ ID NO: 217571 - DNA, 25 bp, Probe Sequence
gcaagccactcataatgttgtcatt

SEQ ID NO: 217572 - DNA, 25 bp, Probe Sequence
gcaaccctagattccttgagcatgt

SEQ ID NO: 217573 - DNA, 25 bp, Probe Sequence
gcaaccccagtggcagttatgtgtc

SEQ ID NO: 217574 - DNA, 25 bp, Probe Sequence
gcaaccccagaaggcatctatgaga

SEQ ID NO: 217575 - DNA, 25 bp, Probe Sequence
gcaagcctgccgaggcaatggtgct

SEQ ID NO: 217576 - DNA, 25 bp, Probe Sequence
gcaagggcccagcaaatgagagcta

SEQ ID NO: 217577 - DNA, 25 bp, Probe Sequence
gcaagtggcatccctaaaacctgag

SEQ ID NO: 217578 - DNA, 25 bp, Probe Sequence
gcaaggtcatccctgagctgaacgg

SEQ ID NO: 217579 - DNA, 25 bp, Probe Sequence
gcaagtggatctgcagtctgacggg

SEQ ID NO: 217580 - DNA, 25 bp, Probe Sequence
gcaatggcgtaggcgtgtacggtgg

SEQ ID NO: 217581 - DNA, 25 bp, Probe Sequence
gcaatggagacccggggggtgggat

SEQ ID NO: 217582 - DNA, 25 bp, Probe Sequence
gcaatggaaccttggcaggcgtggt

SEQ ID NO: 217583 - DNA, 25 bp, Probe Sequence
gcaaggaacgtcttggggcttctcg

SEQ ID NO: 217584 - DNA, 25 bp, Probe Sequence
gcaagggaattcttgtgtgctgctt

SEQ ID NO: 217585 - DNA, 25 bp, Probe Sequence
gcaaggtgaatggcacctggctgca

SEQ ID NO: 217586 - DNA, 25 bp, Probe Sequence
gcaaggtgaatggcacctggctgca

SEQ ID NO: 217587 - DNA, 25 bp, Probe Sequence
gaattggaatccgatgatggctgaa

SEQ ID NO: 217588 - DNA, 25 bp, Probe Sequence
gaattgaatctccaatgcatccata

SEQ ID NO: 217589 - DNA, 25 bp, Probe Sequence
gcaagtgatagcggaggcaccacga

SEQ ID NO: 217590 - DNA, 25 bp, Probe Sequence
gcaacagatccagggagcattcacc

SEQ ID NO: 217591 - DNA, 25 bp, Probe Sequence
gcaagaacatatgccagttcctcgt

SEQ ID NO: 217592 - DNA, 25 bp, Probe Sequence
gaagaagtacaagctttctcgagct

SEQ ID NO: 217593 - DNA, 25 bp, Probe Sequence
gaaggagtaattgtttttggcacca

SEQ ID NO: 217594 - DNA, 25 bp, Probe Sequence
gaagggtaattccctatgttcccag

SEQ ID NO: 217595 - DNA, 25 bp, Probe Sequence
gacgggcttttagcagcatgtaccc

SEQ ID NO: 217596 - DNA, 25 bp, Probe Sequence
gcaatagcagttataacagatgtga

SEQ ID NO: 217597 - DNA, 25 bp, Probe Sequence
gcaatcagccaaaatgatacctgga

SEQ ID NO: 217598 - DNA, 25 bp, Probe Sequence
gcaatggccaatgtacatggtggac

SEQ ID NO: 217599 - DNA, 25 bp, Probe Sequence
gcaatggccaatgtacatggtggac

SEQ ID NO: 217600 - DNA, 25 bp, Probe Sequence
gcaatgccaccatgatacaggggca

SEQ ID NO: 217601 - DNA, 25 bp, Probe Sequence
gcaagtaccatggaccatgccaggc

SEQ ID NO: 217602 - DNA, 25 bp, Probe Sequence
gcaatgtaagtgcccataccagcca

SEQ ID NO: 217603 - DNA, 25 bp, Probe Sequence
gcaagaaagcttccttcaacctgca

SEQ ID NO: 217604 - DNA, 25 bp, Probe Sequence
gcaagccaacttctttagcagttaa

SEQ ID NO: 217605 - DNA, 25 bp, Probe Sequence
gcaacagacctaatttttggttact

SEQ ID NO: 217606 - DNA, 25 bp, Probe Sequence
gaacgacctaagattacgttattgg

SEQ ID NO: 217607 - DNA, 25 bp, Probe Sequence
gcaaggccctaaaatatcactgtta

SEQ ID NO: 217608 - DNA, 25 bp, Probe Sequence
gaatctggttaaccaacctgtccaa

SEQ ID NO: 217609 - DNA, 25 bp, Probe Sequence
gcaacggttgcatctgcatatccta

SEQ ID NO: 217610 - DNA, 25 bp, Probe Sequence
gcaatgccactgcatccatgcattc

SEQ ID NO: 217611 - DNA, 25 bp, Probe Sequence
gcaagctgatatcatcccattgcat

SEQ ID NO: 217612 - DNA, 25 bp, Probe Sequence
gcaactgaatgccttccattagata

SEQ ID NO: 217613 - DNA, 25 bp, Probe Sequence
gcaactacagcctcctatgtgtaat

SEQ ID NO: 217614 - DNA, 25 bp, Probe Sequence
gcaatctaagccacaatggtgcgca

SEQ ID NO: 217615 - DNA, 25 bp, Probe Sequence
gcaactgtacctgactggaggagtc

SEQ ID NO: 217616 - DNA, 25 bp, Probe Sequence
gcaactgtcagcgcaatgggggaga

SEQ ID NO: 217617 - DNA, 25 bp, Probe Sequence
gcaatttagccctatgcctgtgggc

SEQ ID NO: 217618 - DNA, 25 bp, Probe Sequence
gaattttccataacgatggcgggaa

SEQ ID NO: 217619 - DNA, 25 bp, Probe Sequence
gaattggttaaccttattgggaatg

SEQ ID NO: 217620 - DNA, 25 bp, Probe Sequence
gaataactaaccctccctgggaatg

SEQ ID NO: 217621 - DNA, 25 bp, Probe Sequence
gaataccagaaacatctacttgggt

SEQ ID NO: 217622 - DNA, 25 bp, Probe Sequence
gacttcggctaacacgcagttagtc

SEQ ID NO: 217623 - DNA, 25 bp, Probe Sequence
gacttaggaacctaccagttggcca

SEQ ID NO: 217624 - DNA, 25 bp, Probe Sequence
gacttatgggactttctacttggca

SEQ ID NO: 217625 - DNA, 25 bp, Probe Sequence
gaattgggggctttctttgtgacca

SEQ ID NO: 217626 - DNA, 25 bp, Probe Sequence
gaattagcggtgtatttcttgaagt

SEQ ID NO: 217627 - DNA, 25 bp, Probe Sequence
gaattgtgggggtggttaatgggca

SEQ ID NO: 217628 - DNA, 25 bp, Probe Sequence
gaattgggaaggctgtgttaattgt

SEQ ID NO: 217629 - DNA, 25 bp, Probe Sequence
gaattcgaaatggctggcggtaagg

SEQ ID NO: 217630 - DNA, 25 bp, Probe Sequence
gcaatagcgacgcgctggcgttaca

SEQ ID NO: 217631 - DNA, 25 bp, Probe Sequence
gcaactcaaggctgcttctgttaac

SEQ ID NO: 217632 - DNA, 25 bp, Probe Sequence
gcaacatacatccataattgtttaa

SEQ ID NO: 217633 - DNA, 25 bp, Probe Sequence
gcaacatgcactggctcattttatg

SEQ ID NO: 217634 - DNA, 25 bp, Probe Sequence
gcaagatgactggctttactatttg

SEQ ID NO: 217635 - DNA, 25 bp, Probe Sequence
gaagtgggccatagtcctttagaaa

SEQ ID NO: 217636 - DNA, 25 bp, Probe Sequence
gaattggagtgacgtatcttagaaa

SEQ ID NO: 217637 - DNA, 25 bp, Probe Sequence
gcaagatggagagggtatctatgca

SEQ ID NO: 217638 - DNA, 25 bp, Probe Sequence
gcaagatccaatcagatcatgcttc

SEQ ID NO: 217639 - DNA, 25 bp, Probe Sequence
gcaaggcatcaacgagtttctcagg

SEQ ID NO: 217640 - DNA, 25 bp, Probe Sequence
gcaagggacaggattcttcaggcgt

SEQ ID NO: 217641 - DNA, 25 bp, Probe Sequence
gcaagcggattgctttgcactcagg

SEQ ID NO: 217642 - DNA, 25 bp, Probe Sequence
gcaagaggatcgcttgagcccagga

SEQ ID NO: 217643 - DNA, 25 bp, Probe Sequence
gcaagtggttcagttgaggccagaa

SEQ ID NO: 217644 - DNA, 25 bp, Probe Sequence
gcaagtggcactttaagccctgcat

SEQ ID NO: 217645 - DNA, 25 bp, Probe Sequence
gcaagctcaattataagcctccacc

SEQ ID NO: 217646 - DNA, 25 bp, Probe Sequence
gcaacgcaatctataatctccttcc

SEQ ID NO: 217647 - DNA, 25 bp, Probe Sequence
gcaatagcaaccataactgccactg

SEQ ID NO: 217648 - DNA, 25 bp, Probe Sequence
gcaagagcaacggctggatcctgcc

SEQ ID NO: 217649 - DNA, 25 bp, Probe Sequence
gcaagagatggccacggctgcttcc

SEQ ID NO: 217650 - DNA, 25 bp, Probe Sequence
gcaagatcatgaagacgggcggcac

SEQ ID NO: 217651 - DNA, 25 bp, Probe Sequence
gcaattgtaatgacgggccgacacc

SEQ ID NO: 217652 - DNA, 25 bp, Probe Sequence
gcaattggtggagggagctctacag

SEQ ID NO: 217653 - DNA, 25 bp, Probe Sequence
gaattgagtgaagtggtcctgatgg

SEQ ID NO: 217654 - DNA, 25 bp, Probe Sequence
gcaattcggtcaattgtcactgtca

SEQ ID NO: 217655 - DNA, 25 bp, Probe Sequence
gcaactctcgtcttatcacaatgcc

SEQ ID NO: 217656 - DNA, 25 bp, Probe Sequence
gcaactgtctgacttgataactcca

SEQ ID NO: 217657 - DNA, 25 bp, Probe Sequence
gcaaggatctactttaattccacac

SEQ ID NO: 217658 - DNA, 25 bp, Probe Sequence
gcaaggtgcgttctagatgtcatcc

SEQ ID NO: 217659 - DNA, 25 bp, Probe Sequence
gcaaggatttacctatggctgacct

SEQ ID NO: 217660 - DNA, 25 bp, Probe Sequence
gcaagtttctgaagttggtggccgc

SEQ ID NO: 217661 - DNA, 25 bp, Probe Sequence
gcaacttcttccgtgtggttgtggc

SEQ ID NO: 217662 - DNA, 25 bp, Probe Sequence
gcaacttcatttggcttgtgtgcat

SEQ ID NO: 217663 - DNA, 25 bp, Probe Sequence
gcaagtcttttgatagatgtcataa

SEQ ID NO: 217664 - DNA, 25 bp, Probe Sequence
gcaagctttttgatgatgctgtacg

SEQ ID NO: 217665 - DNA, 25 bp, Probe Sequence
gcaactttctatttagctgtcacta

SEQ ID NO: 217666 - DNA, 25 bp, Probe Sequence
gcaagcattcatttttagctcgctc

SEQ ID NO: 217667 - DNA, 25 bp, Probe Sequence
gcaacatctcatttcttccttttgc

SEQ ID NO: 217668 - DNA, 25 bp, Probe Sequence
gcaactgttttgatccatttcttac

SEQ ID NO: 217669 - DNA, 25 bp, Probe Sequence
gcaacttcgtgatgtggctgttttg

SEQ ID NO: 217670 - DNA, 25 bp, Probe Sequence
gcaactttgctgtgattccgtttgt

SEQ ID NO: 217671 - DNA, 25 bp, Probe Sequence
gcaactttgctgtgattccgtttgt

SEQ ID NO: 217672 - DNA, 25 bp, Probe Sequence
gaatcacactggatgtctccgtttt

SEQ ID NO: 217673 - DNA, 25 bp, Probe Sequence
gaataagctggatctccaatgtttt

SEQ ID NO: 217674 - DNA, 25 bp, Probe Sequence
gcaacattctgggactctttttctt

SEQ ID NO: 217675 - DNA, 25 bp, Probe Sequence
gcaacgtctgtcgacacgatttgtt

SEQ ID NO: 217676 - DNA, 25 bp, Probe Sequence
gcaacccagggatccatttttggtc

SEQ ID NO: 217677 - DNA, 25 bp, Probe Sequence
gcaactggggaaggctactgtttgt

SEQ ID NO: 217678 - DNA, 25 bp, Probe Sequence
gcaaggttgggtgcttcatttgtgt

SEQ ID NO: 217679 - DNA, 25 bp, Probe Sequence
gcaagcttctggttctttattgggt

SEQ ID NO: 217680 - DNA, 25 bp, Probe Sequence
gcaatcgatttctctttagtcgttg

SEQ ID NO: 217681 - DNA, 25 bp, Probe Sequence
gaacgttctatgaatttcgtactta

SEQ ID NO: 217682 - DNA, 25 bp, Probe Sequence
gaatctgtgaatggttttccgttta

SEQ ID NO: 217683 - DNA, 25 bp, Probe Sequence
gaattcgaattctgtttcccttgta

SEQ ID NO: 217684 - DNA, 25 bp, Probe Sequence
gaattccaacttgtttcacgctata

SEQ ID NO: 217685 - DNA, 25 bp, Probe Sequence
gaagtccggggtattatgtgcttag

SEQ ID NO: 217686 - DNA, 25 bp, Probe Sequence
taatttcggggatttctgtggtagg

SEQ ID NO: 217687 - DNA, 25 bp, Probe Sequence
gaattcccgggatatcgcgggcggc

SEQ ID NO: 217688 - DNA, 25 bp, Probe Sequence
gaattcccgggatcgggattaggtg

SEQ ID NO: 217689 - DNA, 25 bp, Probe Sequence
gaatagcccgaggaccgggctgggg

SEQ ID NO: 217690 - DNA, 25 bp, Probe Sequence
gaatgccaagaagggccagggtggg

SEQ ID NO: 217691 - DNA, 25 bp, Probe Sequence
gaatgccaagaagggccagggtggg

SEQ ID NO: 217692 - DNA, 25 bp, Probe Sequence
gaatcccacatggggccggtgatgg

SEQ ID NO: 217693 - DNA, 25 bp, Probe Sequence
gaatccccttgctggctggggagta

SEQ ID NO: 217694 - DNA, 25 bp, Probe Sequence
gaataaacgtgaggtctggagggtc

SEQ ID NO: 217695 - DNA, 25 bp, Probe Sequence
gaattgtacagtgggtggaaagggc

SEQ ID NO: 217696 - DNA, 25 bp, Probe Sequence
gcaatttaagttacttgaaactcgc

SEQ ID NO: 217697 - DNA, 25 bp, Probe Sequence
gcaaccataacttatcttgtccttc

SEQ ID NO: 217698 - DNA, 25 bp, Probe Sequence
gcaaccatccgatttctcaatcttt

SEQ ID NO: 217699 - DNA, 25 bp, Probe Sequence
gcaaccatccgatttctcaatcttt

SEQ ID NO: 217700 - DNA, 25 bp, Probe Sequence
gcaacctcaaacaccaatgctgttg

SEQ ID NO: 217701 - DNA, 25 bp, Probe Sequence
gcaatcctaaatatgccaagaggtg

SEQ ID NO: 217702 - DNA, 25 bp, Probe Sequence
gcaatgctcaaacacccaagtggcc

SEQ ID NO: 217703 - DNA, 25 bp, Probe Sequence
gcaagctgaagaccaaccacattgg

SEQ ID NO: 217704 - DNA, 25 bp, Probe Sequence
gcaagcatggaatcagatcctaagc

SEQ ID NO: 217705 - DNA, 25 bp, Probe Sequence
gcaactggcaaacctgccgacgccg

SEQ ID NO: 217706 - DNA, 25 bp, Probe Sequence
gcaactgcgtaaccagtggatattt

SEQ ID NO: 217707 - DNA, 25 bp, Probe Sequence
gcaatctgagtactgaagtggcttt

SEQ ID NO: 217708 - DNA, 25 bp, Probe Sequence
gcaattgagctaggatcaggccact

SEQ ID NO: 217709 - DNA, 25 bp, Probe Sequence
gcaatgctgacttggagctagatga

SEQ ID NO: 217710 - DNA, 25 bp, Probe Sequence
gcaatgagcattccgatgtgattga

SEQ ID NO: 217711 - DNA, 25 bp, Probe Sequence
gaattgcttccggatgactgaccaa

SEQ ID NO: 217712 - DNA, 25 bp, Probe Sequence
gaattgggtgaccacgtgaccaact

SEQ ID NO: 217713 - DNA, 25 bp, Probe Sequence
gaattggttgctagcacttaaaatt

SEQ ID NO: 217714 - DNA, 25 bp, Probe Sequence
gaataggttgcttctaccacctgtt

SEQ ID NO: 217715 - DNA, 25 bp, Probe Sequence
gcaatagttggatttatctacgggt

SEQ ID NO: 217716 - DNA, 25 bp, Probe Sequence
gcaagagtgtgaaatctcagatact

SEQ ID NO: 217717 - DNA, 25 bp, Probe Sequence
gcaagcaggtgaggtccagagatat

SEQ ID NO: 217718 - DNA, 25 bp, Probe Sequence
gcaagacgctgatgctcaagctgtt

SEQ ID NO: 217719 - DNA, 25 bp, Probe Sequence
gcaatgatgcctaccaaacatttcc

SEQ ID NO: 217720 - DNA, 25 bp, Probe Sequence
gaataatcataccaccaacttccta

SEQ ID NO: 217721 - DNA, 25 bp, Probe Sequence
gaaatctactagagacacccctaag

SEQ ID NO: 217722 - DNA, 25 bp, Probe Sequence
gagatttacggtaaacggcccactg

SEQ ID NO: 217723 - DNA, 25 bp, Probe Sequence
gcaagttcacgggcaaggcggtccc

SEQ ID NO: 217724 - DNA, 25 bp, Probe Sequence
gaatgttaccggctgttggatctgc

SEQ ID NO: 217725 - DNA, 25 bp, Probe Sequence
gaagttccctgtgtttaaggccgtg

SEQ ID NO: 217726 - DNA, 25 bp, Probe Sequence
gaattttgtattcttattaaacgtg

SEQ ID NO: 217727 - DNA, 25 bp, Probe Sequence
gaagtcttaaggctccctgaaacct

SEQ ID NO: 217728 - DNA, 25 bp, Probe Sequence
gaattttagggtacacgagcacaac

SEQ ID NO: 217729 - DNA, 25 bp, Probe Sequence
gcaattactactcgttctgggcaga

SEQ ID NO: 217730 - DNA, 25 bp, Probe Sequence
gaattaaacttgtgtcgtgctgata

SEQ ID NO: 217731 - DNA, 25 bp, Probe Sequence
gaattaaatcttctatctgagagta

SEQ ID NO: 217732 - DNA, 25 bp, Probe Sequence
gcaaccgaattccagtttagaggcg

SEQ ID NO: 217733 - DNA, 25 bp, Probe Sequence
gaatccaaattgaagttcgaagagg

SEQ ID NO: 217734 - DNA, 25 bp, Probe Sequence
gcaatccaggataaggtgttggaga

SEQ ID NO: 217735 - DNA, 25 bp, Probe Sequence
gcaaccatgttaactgtattgacac

SEQ ID NO: 217736 - DNA, 25 bp, Probe Sequence
gcaacctcactatggtatgctggcc

SEQ ID NO: 217737 - DNA, 25 bp, Probe Sequence
gcaaccacagtattcctttgtctgt

SEQ ID NO: 217738 - DNA, 25 bp, Probe Sequence
gcaactgccatttaaatgttgtctt

SEQ ID NO: 217739 - DNA, 25 bp, Probe Sequence
gcaagatctcagctaaattctattt

SEQ ID NO: 217740 - DNA, 25 bp, Probe Sequence
gcaagtctcaggaaatggtgcattt

SEQ ID NO: 217741 - DNA, 25 bp, Probe Sequence
gcaagttcatggagcttggcctctc

SEQ ID NO: 217742 - DNA, 25 bp, Probe Sequence
gaatttgggggcaacccttgcccag

SEQ ID NO: 217743 - DNA, 25 bp, Probe Sequence
gaattgagggagagacctttcttcc

SEQ ID NO: 217744 - DNA, 25 bp, Probe Sequence
gaatcgagggaatcagttcttacac

SEQ ID NO: 217745 - DNA, 25 bp, Probe Sequence
gcaacgggctgaaggcacgtttccc

SEQ ID NO: 217746 - DNA, 25 bp, Probe Sequence
gcaacgtgggcaagtcattgtcctc

SEQ ID NO: 217747 - DNA, 25 bp, Probe Sequence
gcaacgtttacattatagccacatc

SEQ ID NO: 217748 - DNA, 25 bp, Probe Sequence
gcaaccttgtactttacaatcatgc

SEQ ID NO: 217749 - DNA, 25 bp, Probe Sequence
gcaatccattatttaatacaacatc

SEQ ID NO: 217750 - DNA, 25 bp, Probe Sequence
gcaacctgtctttatctaaagcatt

SEQ ID NO: 217751 - DNA, 25 bp, Probe Sequence
gcaagacttttgtcataaattcttt

SEQ ID NO: 217752 - DNA, 25 bp, Probe Sequence
gcaagcatctatgctgccagtgaaa

SEQ ID NO: 217753 - DNA, 25 bp, Probe Sequence
gcaagcatctgaaaccactggcaaa

SEQ ID NO: 217754 - DNA, 25 bp, Probe Sequence
gcaatttgaaaggcaaggtaggagg

SEQ ID NO: 217755 - DNA, 25 bp, Probe Sequence
gaataggaaaccttgttggctgtgg

SEQ ID NO: 217756 - DNA, 25 bp, Probe Sequence
gaatagtcaaagttagtggtaggag

SEQ ID NO: 217757 - DNA, 25 bp, Probe Sequence
gaatattaaagtgtgctggacatgg

SEQ ID NO: 217758 - DNA, 25 bp, Probe Sequence
gaataaagaggtgccttcagctggt

SEQ ID NO: 217759 - DNA, 25 bp, Probe Sequence
gaatacagaaggttcacccgcagcg

SEQ ID NO: 217760 - DNA, 25 bp, Probe Sequence
gaatacagaaggttcacccgcagcg

SEQ ID NO: 217761 - DNA, 25 bp, Probe Sequence
gaattcagaaaaccacttaagcaag

SEQ ID NO: 217762 - DNA, 25 bp, Probe Sequence
gaattacaaacacagttgaaagact

SEQ ID NO: 217763 - DNA, 25 bp, Probe Sequence
gacttaaccctttgctgtcaaaaga

SEQ ID NO: 217764 - DNA, 25 bp, Probe Sequence
gaattacacaacgttttcctcaaga

SEQ ID NO: 217765 - DNA, 25 bp, Probe Sequence
gaattgaatctagagtcttccccga

SEQ ID NO: 217766 - DNA, 25 bp, Probe Sequence
gaattcaattaacacgtcacctgcc

SEQ ID NO: 217767 - DNA, 25 bp, Probe Sequence
gaatattatgtaaagaccacccctc

SEQ ID NO: 217768 - DNA, 25 bp, Probe Sequence
gaatttatgaacacccatttcctga

SEQ ID NO: 217769 - DNA, 25 bp, Probe Sequence
gaattgggcaacaccttgttctata

SEQ ID NO: 217770 - DNA, 25 bp, Probe Sequence
gaattggaaataacctactatctag

SEQ ID NO: 217771 - DNA, 25 bp, Probe Sequence
gcaacctgaaaaaggctgtcattct

SEQ ID NO: 217772 - DNA, 25 bp, Probe Sequence
gcaacgctgtaatatggctgtatca

SEQ ID NO: 217773 - DNA, 25 bp, Probe Sequence
gcaagcgctgctgtaacgacttcag

SEQ ID NO: 217774 - DNA, 25 bp, Probe Sequence
gcaatggcgcttacaggcggtattg

SEQ ID NO: 217775 - DNA, 25 bp, Probe Sequence
gcaagagcaattactactcgttctg

SEQ ID NO: 217776 - DNA, 25 bp, Probe Sequence
gcaagagattaccttctccttctgc

SEQ ID NO: 217777 - DNA, 25 bp, Probe Sequence
gcaagatgaatacctcatcccctct

SEQ ID NO: 217778 - DNA, 25 bp, Probe Sequence
gaagtcagtagttattctcccatga

SEQ ID NO: 217779 - DNA, 25 bp, Probe Sequence
gcaagttagcactttattcccgcag

SEQ ID NO: 217780 - DNA, 25 bp, Probe Sequence
gcaaggacagcagctatattcccca

SEQ ID NO: 217781 - DNA, 25 bp, Probe Sequence
gaaggacagccagatttctcctttg

SEQ ID NO: 217782 - DNA, 25 bp, Probe Sequence
gcaaggacagctttgcagttctcct

SEQ ID NO: 217783 - DNA, 25 bp, Probe Sequence
gcaatggtcagctgtgcttgcttcc

SEQ ID NO: 217784 - DNA, 25 bp, Probe Sequence
gcaaggctactactgatcatgtttc

SEQ ID NO: 217785 - DNA, 25 bp, Probe Sequence
gcaagatgtggtactgaatgtgcct

SEQ ID NO: 217786 - DNA, 25 bp, Probe Sequence
gcaatagtgactctgtgcttgtctg

SEQ ID NO: 217787 - DNA, 25 bp, Probe Sequence
gcaataattttttgtatgtcatact

SEQ ID NO: 217788 - DNA, 25 bp, Probe Sequence
gaatacttttagttaatccacaatc

SEQ ID NO: 217789 - DNA, 25 bp, Probe Sequence
gatgttctgtttttataacctacca

SEQ ID NO: 217790 - DNA, 25 bp, Probe Sequence
gaattttttccttcaaccaagtgca

SEQ ID NO: 217791 - DNA, 25 bp, Probe Sequence
gaattttttcctaaagactgtatat

SEQ ID NO: 217792 - DNA, 25 bp, Probe Sequence
gaattatgattctgggctggactgt

SEQ ID NO: 217793 - DNA, 25 bp, Probe Sequence
gaattaaccaggccgtggaagccca

SEQ ID NO: 217794 - DNA, 25 bp, Probe Sequence
gaattagaaacccttgtcagagccc

SEQ ID NO: 217795 - DNA, 25 bp, Probe Sequence
gaattcaaaattgagctctaggccc

SEQ ID NO: 217796 - DNA, 25 bp, Probe Sequence
gcaattcaaaactggctgatgagga

SEQ ID NO: 217797 - DNA, 25 bp, Probe Sequence
gtatggataaacctgacgtagagat

SEQ ID NO: 217798 - DNA, 25 bp, Probe Sequence
gtatgtgttgagtggccgtgacgta

SEQ ID NO: 217799 - DNA, 25 bp, Probe Sequence
gttgtttttccggagatagtgctac

SEQ ID NO: 217800 - DNA, 25 bp, Probe Sequence
gtaggtttcctctggaagcttactg

SEQ ID NO: 217801 - DNA, 25 bp, Probe Sequence
gcaagggtacgctgggcaagttcac

SEQ ID NO: 217802 - DNA, 25 bp, Probe Sequence
gcaaggtttccttgaccaggttgcc

SEQ ID NO: 217803 - DNA, 25 bp, Probe Sequence
gcaaggtttgctgtccaaggtgtaa

SEQ ID NO: 217804 - DNA, 25 bp, Probe Sequence
gcaaggagtctcaggccaaggatgt

SEQ ID NO: 217805 - DNA, 25 bp, Probe Sequence
gcaaggaatgccagtgtaagagatg

SEQ ID NO: 217806 - DNA, 25 bp, Probe Sequence
gcaagagtgtccagtatgtaaagct

SEQ ID NO: 217807 - DNA, 25 bp, Probe Sequence
gcaagggacctgcttctattagccc

SEQ ID NO: 217808 - DNA, 25 bp, Probe Sequence
gcaatgggagtttgttttgggcacc

SEQ ID NO: 217809 - DNA, 25 bp, Probe Sequence
gcaatgggagtttgttttggcacct

SEQ ID NO: 217810 - DNA, 25 bp, Probe Sequence
gcaatgggagtttgttttggcacca

SEQ ID NO: 217811 - DNA, 25 bp, Probe Sequence
gcaagctgtggcttttttccaactc

SEQ ID NO: 217812 - DNA, 25 bp, Probe Sequence
gcaagctgtggcttttttccaactc

SEQ ID NO: 217813 - DNA, 25 bp, Probe Sequence
gcaagtgtggatttggttctcccat

SEQ ID NO: 217814 - DNA, 25 bp, Probe Sequence
gcaagttgaatttgctgactccagc

SEQ ID NO: 217815 - DNA, 25 bp, Probe Sequence
gcaagcttgccaataccctgggcaa

SEQ ID NO: 217816 - DNA, 25 bp, Probe Sequence
gaatctgtcacctccattggagcag

SEQ ID NO: 217817 - DNA, 25 bp, Probe Sequence
gcaatttatcaagccagtggaagca

SEQ ID NO: 217818 - DNA, 25 bp, Probe Sequence
gaattctagaacccaggtgcaactg

SEQ ID NO: 217819 - DNA, 25 bp, Probe Sequence
gaattctgaaaatgaggtcacgctg

SEQ ID NO: 217820 - DNA, 25 bp, Probe Sequence
gaatattgacaagctaggacacctg

SEQ ID NO: 217821 - DNA, 25 bp, Probe Sequence
gcaatattacaatccttgacctcag

SEQ ID NO: 217822 - DNA, 25 bp, Probe Sequence
gcaagtgtggtagctattgacaaca

SEQ ID NO: 217823 - DNA, 25 bp, Probe Sequence
gcaaggctcctaactcattgggaac

SEQ ID NO: 217824 - DNA, 25 bp, Probe Sequence
gcaaccattctaaatccttggtaag

SEQ ID NO: 217825 - DNA, 25 bp, Probe Sequence
gaatccttctgtaactttggtaact

SEQ ID NO: 217826 - DNA, 25 bp, Probe Sequence
gaatcggattataagcttctagcta

SEQ ID NO: 217827 - DNA, 25 bp, Probe Sequence
gaatttgatcgttcagttccacttg

SEQ ID NO: 217828 - DNA, 25 bp, Probe Sequence
gaatttgccttcagttaacatggga

SEQ ID NO: 217829 - DNA, 25 bp, Probe Sequence
gaattattgcatttagttaacggaa

SEQ ID NO: 217830 - DNA, 25 bp, Probe Sequence
gaataccctgaaagttaaggagaag

SEQ ID NO: 217831 - DNA, 25 bp, Probe Sequence
gaataatccgccagaacgaccagaa

SEQ ID NO: 217832 - DNA, 25 bp, Probe Sequence
gaatatcctggttgggactgcccag

SEQ ID NO: 217833 - DNA, 25 bp, Probe Sequence
gaattccgagtgtgaactttcagcc

SEQ ID NO: 217834 - DNA, 25 bp, Probe Sequence
gaatttacaatgtcagtacctagcc

SEQ ID NO: 217835 - DNA, 25 bp, Probe Sequence
gaatctttcaagggaattacacgtt

SEQ ID NO: 217836 - DNA, 25 bp, Probe Sequence
gcaatctttcagacaggatgttgac

SEQ ID NO: 217837 - DNA, 25 bp, Probe Sequence
gaattgttagaatatttgacttttt

SEQ ID NO: 217838 - DNA, 25 bp, Probe Sequence
gaatacgtgaaacatatagaagatc

SEQ ID NO: 217839 - DNA, 25 bp, Probe Sequence
gaatatttggaacttaccaagtcct

SEQ ID NO: 217840 - DNA, 25 bp, Probe Sequence
gaatattttaacttccttggactca

SEQ ID NO: 217841 - DNA, 25 bp, Probe Sequence
gaatattttggagcctttggagaga

SEQ ID NO: 217842 - DNA, 25 bp, Probe Sequence
gaattccggcgaccgtgtgggatga

SEQ ID NO: 217843 - DNA, 25 bp, Probe Sequence
gaatcgccacaggactgttctgggg

SEQ ID NO: 217844 - DNA, 25 bp, Probe Sequence
gcaatctcatcactggaatgttcca

SEQ ID NO: 217845 - DNA, 25 bp, Probe Sequence
gcaagcactcaaggcatacttacta

SEQ ID NO: 217846 - DNA, 25 bp, Probe Sequence
gcaagcactgcgagacctgcatatc

SEQ ID NO: 217847 - DNA, 25 bp, Probe Sequence
gcaagagctagattgagccgccatt

SEQ ID NO: 217848 - DNA, 25 bp, Probe Sequence
gcaatgatgccaaggtgccagccaa

SEQ ID NO: 217849 - DNA, 25 bp, Probe Sequence
gcaagctgccaagttgcaacctctt

SEQ ID NO: 217850 - DNA, 25 bp, Probe Sequence
gcaagtctctatttcaatcccttac

SEQ ID NO: 217851 - DNA, 25 bp, Probe Sequence
gcaatgttctcaattttcgttttca

SEQ ID NO: 217852 - DNA, 25 bp, Probe Sequence
gaatggttccccacaggatttcaac

SEQ ID NO: 217853 - DNA, 25 bp, Probe Sequence
gaattgtttcccatgaagctgatta

SEQ ID NO: 217854 - DNA, 25 bp, Probe Sequence
gcaagatgttaccacctggaggatt

SEQ ID NO: 217855 - DNA, 25 bp, Probe Sequence
gcaatatagtacaacctcagggagt

SEQ ID NO: 217856 - DNA, 25 bp, Probe Sequence
gcaattcagttcaacacaagtttgt

SEQ ID NO: 217857 - DNA, 25 bp, Probe Sequence
gaattcgtttccgggttgagtctgg

SEQ ID NO: 217858 - DNA, 25 bp, Probe Sequence
gcaatgtcttgtaccttgagttgag

SEQ ID NO: 217859 - DNA, 25 bp, Probe Sequence
gcaagcttctgttactagcgtgtga

SEQ ID NO: 217860 - DNA, 25 bp, Probe Sequence
gcaatgcttctgaatacgtgaagcc

SEQ ID NO: 217861 - DNA, 25 bp, Probe Sequence
gcaatttctatatcaggacagcaac

SEQ ID NO: 217862 - DNA, 25 bp, Probe Sequence
gcaagttccatggaagctaagaacc

SEQ ID NO: 217863 - DNA, 25 bp, Probe Sequence
gcaatgcttccacagcgtaaataca

SEQ ID NO: 217864 - DNA, 25 bp, Probe Sequence
gcaatggggagcagctgtaaataca

SEQ ID NO: 217865 - DNA, 25 bp, Probe Sequence
gcaaggccagaccctgaaaagcagc

SEQ ID NO: 217866 - DNA, 25 bp, Probe Sequence
gcaagtcatagaagtcgaaacatag

SEQ ID NO: 217867 - DNA, 25 bp, Probe Sequence
gcaattcatacttgccaaaacatga

SEQ ID NO: 217868 - DNA, 25 bp, Probe Sequence
gcaatgtagacttatttctgaatgc

SEQ ID NO: 217869 - DNA, 25 bp, Probe Sequence
gcaagatcgaccttttctgttttgt

SEQ ID NO: 217870 - DNA, 25 bp, Probe Sequence
gcaaggccaccagcttggagagctt

SEQ ID NO: 217871 - DNA, 25 bp, Probe Sequence
gcaaggccaacagctgtgcaaagcc

SEQ ID NO: 217872 - DNA, 25 bp, Probe Sequence
gaattgttacatcatgctggaacct

SEQ ID NO: 217873 - DNA, 25 bp, Probe Sequence
gcaatagattagtcagatctgagta

SEQ ID NO: 217874 - DNA, 25 bp, Probe Sequence
gaatagactcaagtatgcgttgact

SEQ ID NO: 217875 - DNA, 25 bp, Probe Sequence
gaattggccaggcatggtggctcat

SEQ ID NO: 217876 - DNA, 25 bp, Probe Sequence
gcaatatggatcaggcagtgtttct

SEQ ID NO: 217877 - DNA, 25 bp, Probe Sequence
gcaatggagtgcacggtctgaatct

SEQ ID NO: 217878 - DNA, 25 bp, Probe Sequence
gcaagatggctcaaaatgtcataca

SEQ ID NO: 217879 - DNA, 25 bp, Probe Sequence
gcaatgctgaccaagaagatcaaac

SEQ ID NO: 217880 - DNA, 25 bp, Probe Sequence
gcaatgtgcatgcctaaatggaaac

SEQ ID NO: 217881 - DNA, 25 bp, Probe Sequence
gcaatggtgccttcaaaaaatcctt

SEQ ID NO: 217882 - DNA, 25 bp, Probe Sequence
gcaattttctgctaaaaagtccttg

SEQ ID NO: 217883 - DNA, 25 bp, Probe Sequence
gaataattcctaacacttcattttg

SEQ ID NO: 217884 - DNA, 25 bp, Probe Sequence
gaattttcctactgagttgttgctg

SEQ ID NO: 217885 - DNA, 25 bp, Probe Sequence
gcaatggttctctgttgtgtgtgtg

SEQ ID NO: 217886 - DNA, 25 bp, Probe Sequence
gcaatgttttgctttgctctctggt

SEQ ID NO: 217887 - DNA, 25 bp, Probe Sequence
gcaagtttatactctgcttagtctc

SEQ ID NO: 217888 - DNA, 25 bp, Probe Sequence
gcaagtcttttctacctatgagcct

SEQ ID NO: 217889 - DNA, 25 bp, Probe Sequence
gcaagtcgtgagtcaaactgctgcc

SEQ ID NO: 217890 - DNA, 25 bp, Probe Sequence
gcaagagctggacaacctgctgcat

SEQ ID NO: 217891 - DNA, 25 bp, Probe Sequence
gcaaggcgcacagaacatcagctga

SEQ ID NO: 217892 - DNA, 25 bp, Probe Sequence
gcaagtgggctggaacatgcagctg

SEQ ID NO: 217893 - DNA, 25 bp, Probe Sequence
gcaagcacttggggacagcatgagc

SEQ ID NO: 217894 - DNA, 25 bp, Probe Sequence
gcaagcacttggggacagcatgagc

SEQ ID NO: 217895 - DNA, 25 bp, Probe Sequence
gcaagactgtggacctgcaggatgc

SEQ ID NO: 217896 - DNA, 25 bp, Probe Sequence
gcaagatcctgtacagccagtgtgg

SEQ ID NO: 217897 - DNA, 25 bp, Probe Sequence
gcaagtactgttagcctttctgcac

SEQ ID NO: 217898 - DNA, 25 bp, Probe Sequence
gcaagtcctgtaacctgtacaacaa

SEQ ID NO: 217899 - DNA, 25 bp, Probe Sequence
gcaagatcctgtacagccagtgtgg

SEQ ID NO: 217900 - DNA, 25 bp, Probe Sequence
gcaattccctactgaagactggagc

SEQ ID NO: 217901 - DNA, 25 bp, Probe Sequence
gcaattccctactgaagactggagc

SEQ ID NO: 217902 - DNA, 25 bp, Probe Sequence
gcaatgccgcctaaggacgacaaga

SEQ ID NO: 217903 - DNA, 25 bp, Probe Sequence
gcaatgactcccaagggccaaaaga

SEQ ID NO: 217904 - DNA, 25 bp, Probe Sequence
gcaatacctgatggagggcagctac

SEQ ID NO: 217905 - DNA, 25 bp, Probe Sequence
gcaagagcctatcagagggcacagc

SEQ ID NO: 217906 - DNA, 25 bp, Probe Sequence
gcaatggcccagcagacgagacagc

SEQ ID NO: 217907 - DNA, 25 bp, Probe Sequence
gcaatgggctctgagctggagacgg

SEQ ID NO: 217908 - DNA, 25 bp, Probe Sequence
gcaatggcagcgggacgctggatct

SEQ ID NO: 217909 - DNA, 25 bp, Probe Sequence
gcaatgtagctgaggactggtctga

SEQ ID NO: 217910 - DNA, 25 bp, Probe Sequence
gaattcaggatgctaggggctactt

SEQ ID NO: 217911 - DNA, 25 bp, Probe Sequence
gaattaagcagaaagggccttgaat

SEQ ID NO: 217912 - DNA, 25 bp, Probe Sequence
gaatcaaacataccaggatggcttg

SEQ ID NO: 217913 - DNA, 25 bp, Probe Sequence
gaatagcaaacaacgatggtgaatg

SEQ ID NO: 217914 - DNA, 25 bp, Probe Sequence
gaatagccagcatttccgattttga

SEQ ID NO: 217915 - DNA, 25 bp, Probe Sequence
gaatatgccaactgccaatcatgtt

SEQ ID NO: 217916 - DNA, 25 bp, Probe Sequence
gaattccgatcaacaaaatggtatt

SEQ ID NO: 217917 - DNA, 25 bp, Probe Sequence
gaattcaagcatatttaagggcatt

SEQ ID NO: 217918 - DNA, 25 bp, Probe Sequence
gaatacaagatggttgccgggtcat

SEQ ID NO: 217919 - DNA, 25 bp, Probe Sequence
gcaatacgagcagtttcaaggaata

SEQ ID NO: 217920 - DNA, 25 bp, Probe Sequence
gaattcccagttcctgagcagttca

SEQ ID NO: 217921 - DNA, 25 bp, Probe Sequence
gaattacggcttttacagcaacaat

SEQ ID NO: 217922 - DNA, 25 bp, Probe Sequence
gaattaactgccctatccaaaaaga

SEQ ID NO: 217923 - DNA, 25 bp, Probe Sequence
gaattcacccccactgaaaaagatg

SEQ ID NO: 217924 - DNA, 25 bp, Probe Sequence
gaattccccacctgtagtaacagcc

SEQ ID NO: 217925 - DNA, 25 bp, Probe Sequence
gaattccccttagaattatatctct

SEQ ID NO: 217926 - DNA, 25 bp, Probe Sequence
gcaattccctttctgtttgatgtcc

SEQ ID NO: 217927 - DNA, 25 bp, Probe Sequence
gcaattccctttctgtttgatgtcc

SEQ ID NO: 217928 - DNA, 25 bp, Probe Sequence
gcaattccagtttcacctaagtctc

SEQ ID NO: 217929 - DNA, 25 bp, Probe Sequence
gaattgagagatggtaccaaagctg

SEQ ID NO: 217930 - DNA, 25 bp, Probe Sequence
gaattcatgaagataaagggctaca

SEQ ID NO: 217931 - DNA, 25 bp, Probe Sequence
gaattaaagctgcaagaggactcca

SEQ ID NO: 217932 - DNA, 25 bp, Probe Sequence
gaattacacctggaaatctatgctc

SEQ ID NO: 217933 - DNA, 25 bp, Probe Sequence
gaattacctcctgtatgttgccata

SEQ ID NO: 217934 - DNA, 25 bp, Probe Sequence
gaattgggtacagtattgtgctcct

SEQ ID NO: 217935 - DNA, 25 bp, Probe Sequence
gaatttgtgacagctgcagttgctc

SEQ ID NO: 217936 - DNA, 25 bp, Probe Sequence
gaattttcaacccagaatttcttat

SEQ ID NO: 217937 - DNA, 25 bp, Probe Sequence
gaattcctcagataaggttccaaat

SEQ ID NO: 217938 - DNA, 25 bp, Probe Sequence
gaattcccgtactgattagtcaaca

SEQ ID NO: 217939 - DNA, 25 bp, Probe Sequence
gaataaccttcctgatctggtttca

SEQ ID NO: 217940 - DNA, 25 bp, Probe Sequence
gaataaccctgggcagtggttctta

SEQ ID NO: 217941 - DNA, 25 bp, Probe Sequence
gaatgacatcgtgcggcagggtcct

SEQ ID NO: 217942 - DNA, 25 bp, Probe Sequence
gcaatcaacggcaaggatggagatc

SEQ ID NO: 217943 - DNA, 25 bp, Probe Sequence
gcaataaaggtcgtgaagatctctc

SEQ ID NO: 217944 - DNA, 25 bp, Probe Sequence
gcaatacagtttcattaactccttc

SEQ ID NO: 217945 - DNA, 25 bp, Probe Sequence
gaatgacgttaatgttcctgccttc

SEQ ID NO: 217946 - DNA, 25 bp, Probe Sequence
gcaatcattttttaagtgcctcctt

SEQ ID NO: 217947 - DNA, 25 bp, Probe Sequence
gaattccctggatagtccaagcttt

SEQ ID NO: 217948 - DNA, 25 bp, Probe Sequence
gaattccctggatagtccaagcttt

SEQ ID NO: 217949 - DNA, 25 bp, Probe Sequence
gcaattccaccttaaacaccagttt

SEQ ID NO: 217950 - DNA, 25 bp, Probe Sequence
gaatttgaagctgaaacctctttaa

SEQ ID NO: 217951 - DNA, 25 bp, Probe Sequence
gaatcctacgacacaaactttacaa

SEQ ID NO: 217952 - DNA, 25 bp, Probe Sequence
gaattgtcccaaaagtacctgtaca

SEQ ID NO: 217953 - DNA, 25 bp, Probe Sequence
gaattgtcccaaaagtacctgtaca

SEQ ID NO: 217954 - DNA, 25 bp, Probe Sequence
gaattgacgcaaacaagcccagtgt

SEQ ID NO: 217955 - DNA, 25 bp, Probe Sequence
gaattgttgcaaagtagtgaatggc

SEQ ID NO: 217956 - DNA, 25 bp, Probe Sequence
gaattgttgcagtgttggagatgcc

SEQ ID NO: 217957 - DNA, 25 bp, Probe Sequence
gaattgattggccagtttggtgtcg

SEQ ID NO: 217958 - DNA, 25 bp, Probe Sequence
gaattattggtagatggcagtccca

SEQ ID NO: 217959 - DNA, 25 bp, Probe Sequence
gaattatttctgacacatgaagccc

SEQ ID NO: 217960 - DNA, 25 bp, Probe Sequence
gaattgcatcgtgctcatcgacagc

SEQ ID NO: 217961 - DNA, 25 bp, Probe Sequence
gaattgcatcgtgctcatcgacagc

SEQ ID NO: 217962 - DNA, 25 bp, Probe Sequence
gcaattgctatcgccagtgacatgc

SEQ ID NO: 217963 - DNA, 25 bp, Probe Sequence
gcaatagcacagccatccaggagct

SEQ ID NO: 217964 - DNA, 25 bp, Probe Sequence
gcaagtgagcagtctctaggccaaa

SEQ ID NO: 217965 - DNA, 25 bp, Probe Sequence
gcaagatcacaggcaaacccatcaa

SEQ ID NO: 217966 - DNA, 25 bp, Probe Sequence
gcaataagagcgaaactccatctca

SEQ ID NO: 217967 - DNA, 25 bp, Probe Sequence
gcaatacaaagaacctgtctgtgca

SEQ ID NO: 217968 - DNA, 25 bp, Probe Sequence
gcaatacacagttatcctttcacag

SEQ ID NO: 217969 - DNA, 25 bp, Probe Sequence
gcaataccagaaaacttcattagct

SEQ ID NO: 217970 - DNA, 25 bp, Probe Sequence
gcaatcctcaaacatgtggttatct

SEQ ID NO: 217971 - DNA, 25 bp, Probe Sequence
gcaatcgctgagtacaatgctcctt

SEQ ID NO: 217972 - DNA, 25 bp, Probe Sequence
gaatcttggctaaactctttaggtt

SEQ ID NO: 217973 - DNA, 25 bp, Probe Sequence
gaatcttggaatgcagcttttttgg

SEQ ID NO: 217974 - DNA, 25 bp, Probe Sequence
gaatttagatcttatattggtttgc

SEQ ID NO: 217975 - DNA, 25 bp, Probe Sequence
gaatcctcaatggaaagggtcgact

SEQ ID NO: 217976 - DNA, 25 bp, Probe Sequence
gcaataactctgggaggggctcgag

SEQ ID NO: 217977 - DNA, 25 bp, Probe Sequence
gaatatactctgtgagccaggtatg

SEQ ID NO: 217978 - DNA, 25 bp, Probe Sequence
gaattgccgctgccggagcggagag

SEQ ID NO: 217979 - DNA, 25 bp, Probe Sequence
gaattcgcgtgtggcagagggagga

SEQ ID NO: 217980 - DNA, 25 bp, Probe Sequence
gcaatgccctgggtcaagtggaggc

SEQ ID NO: 217981 - DNA, 25 bp, Probe Sequence
gcaatgcctgtggaacaattggact

SEQ ID NO: 217982 - DNA, 25 bp, Probe Sequence
gcaagtttgccatccatggtgaccc

SEQ ID NO: 217983 - DNA, 25 bp, Probe Sequence
gaagtcgtccaagtcaagtggcccg

SEQ ID NO: 217984 - DNA, 25 bp, Probe Sequence
gaatttgctccggccaaattggccg

SEQ ID NO: 217985 - DNA, 25 bp, Probe Sequence
gaatttgcctctaaaccttggatcc

SEQ ID NO: 217986 - DNA, 25 bp, Probe Sequence
gaatttggctacagcaacagggtgg

SEQ ID NO: 217987 - DNA, 25 bp, Probe Sequence
gaatatgtcagggcaacaccgtggt

SEQ ID NO: 217988 - DNA, 25 bp, Probe Sequence
gaatttatgggtacaacgtatgttc

SEQ ID NO: 217989 - DNA, 25 bp, Probe Sequence
gaatttacgtctgcaatctagatgc

SEQ ID NO: 217990 - DNA, 25 bp, Probe Sequence
gaatttagcttgcccgatctagagg

SEQ ID NO: 217991 - DNA, 25 bp, Probe Sequence
gaattccgttacggcctagaaggcg

SEQ ID NO: 217992 - DNA, 25 bp, Probe Sequence
gaattaggtgtagggcttgggggag

SEQ ID NO: 217993 - DNA, 25 bp, Probe Sequence
gaattactggtcgggttccgtggct

SEQ ID NO: 217994 - DNA, 25 bp, Probe Sequence
taattctctttatggttccggaggc

SEQ ID NO: 217995 - DNA, 25 bp, Probe Sequence
gaatttcttttgtgtatggggcatg

SEQ ID NO: 217996 - DNA, 25 bp, Probe Sequence
gaattattttctgagtcaccttgag

SEQ ID NO: 217997 - DNA, 25 bp, Probe Sequence
gaattaattttgcaacccactgatg

SEQ ID NO: 217998 - DNA, 25 bp, Probe Sequence
gaattatactttagaccaaacagat

SEQ ID NO: 217999 - DNA, 25 bp, Probe Sequence
gaatttgtttattacagctctacct

SEQ ID NO: 218000 - DNA, 25 bp, Probe Sequence
gaattttgttcttgacagttaactg

SEQ ID NO: 218001 - DNA, 25 bp, Probe Sequence
gaattatagtccatgaggttcaaca

SEQ ID NO: 218002 - DNA, 25 bp, Probe Sequence
gcaagttcagtggcattgtggttga

SEQ ID NO: 218003 - DNA, 25 bp, Probe Sequence
gcaagtgtcgtggtctgagacaggg

SEQ ID NO: 218004 - DNA, 25 bp, Probe Sequence
gcaatttgggaggctgagacaggag

SEQ ID NO: 218005 - DNA, 25 bp, Probe Sequence
gcaattccagcttgggcaacagagg

SEQ ID NO: 218006 - DNA, 25 bp, Probe Sequence
gcaaggacatctttggagacatggt

SEQ ID NO: 218007 - DNA, 25 bp, Probe Sequence
gcaaggatcagtttccggaggtcta

SEQ ID NO: 218008 - DNA, 25 bp, Probe Sequence
gcaatgtaaatgtatcctgaaggtg

SEQ ID NO: 218009 - DNA, 25 bp, Probe Sequence
gcaatgtaaatgtatcctgaaggtg

SEQ ID NO: 218010 - DNA, 25 bp, Probe Sequence
gcaatgcccatagacctgaatgtta

SEQ ID NO: 218011 - DNA, 25 bp, Probe Sequence
gcaatgctctgctggtttattttca

SEQ ID NO: 218012 - DNA, 25 bp, Probe Sequence
gcaagttactcgttgttttacaaat

SEQ ID NO: 218013 - DNA, 25 bp, Probe Sequence
gcaattcgattagctgtgtcttaca

SEQ ID NO: 218014 - DNA, 25 bp, Probe Sequence
gaattcacttgagtcctatgccttc

SEQ ID NO: 218015 - DNA, 25 bp, Probe Sequence
gacattacttcattcccgttgtcag

SEQ ID NO: 218016 - DNA, 25 bp, Probe Sequence
gacattacttcattcccgttgtcag

SEQ ID NO: 218017 - DNA, 25 bp, Probe Sequence
gaattagtactattcctgttgtaaa

SEQ ID NO: 218018 - DNA, 25 bp, Probe Sequence
gaatttgtacttgctctggtaaaat

SEQ ID NO: 218019 - DNA, 25 bp, Probe Sequence
gaagttaacttttcagagccaaaat

SEQ ID NO: 218020 - DNA, 25 bp, Probe Sequence
gaattggaagctgttaagctagcaa

SEQ ID NO: 218021 - DNA, 25 bp, Probe Sequence
gaagtggaaccgcttactacagaag

SEQ ID NO: 218022 - DNA, 25 bp, Probe Sequence
gcaatggaagactggttacatggag

SEQ ID NO: 218023 - DNA, 25 bp, Probe Sequence
gaatcaattccccgttaatggagcg

SEQ ID NO: 218024 - DNA, 25 bp, Probe Sequence
gaatcacctcccagtaaagtagcca

SEQ ID NO: 218025 - DNA, 25 bp, Probe Sequence
gaatcccacccaaaaataactgcct

SEQ ID NO: 218026 - DNA, 25 bp, Probe Sequence
gaatccctgcctaaaattaactgct

SEQ ID NO: 218027 - DNA, 25 bp, Probe Sequence
gaaccctccataaacctggagtgac

SEQ ID NO: 218028 - DNA, 25 bp, Probe Sequence
gaaccctccataaacctggagtgac

SEQ ID NO: 218029 - DNA, 25 bp, Probe Sequence
gaagctccccacatcatcgtgggta

SEQ ID NO: 218030 - DNA, 25 bp, Probe Sequence
gaacctccggccatggtggaagaac

SEQ ID NO: 218031 - DNA, 25 bp, Probe Sequence
gaactccctgctgttttagaaaaag

SEQ ID NO: 218032 - DNA, 25 bp, Probe Sequence
gaatcactttcagacttaagaataa

SEQ ID NO: 218033 - DNA, 25 bp, Probe Sequence
gcaatcgtcttcatattgtttttat

SEQ ID NO: 218034 - DNA, 25 bp, Probe Sequence
gcaatccacttgcattagtttatat

SEQ ID NO: 218035 - DNA, 25 bp, Probe Sequence
gcaatcaccattcttcgaattgatg

SEQ ID NO: 218036 - DNA, 25 bp, Probe Sequence
gcaatgctgtttcactggttatgcg

SEQ ID NO: 218037 - DNA, 25 bp, Probe Sequence
gcaatgctaaacctctgtttcatgc

SEQ ID NO: 218038 - DNA, 25 bp, Probe Sequence
gaatgctgacaacgattggttccga

SEQ ID NO: 218039 - DNA, 25 bp, Probe Sequence
gaataacaatggtaggcttccagtt

SEQ ID NO: 218040 - DNA, 25 bp, Probe Sequence
gaataacccagatgcgctttaattt

SEQ ID NO: 218041 - DNA, 25 bp, Probe Sequence
gcaataactccatgggctctgggac

SEQ ID NO: 218042 - DNA, 25 bp, Probe Sequence
gcaattgttgcctcggcagctggtg

SEQ ID NO: 218043 - DNA, 25 bp, Probe Sequence
gcaattattgcccgaagctatagtg

SEQ ID NO: 218044 - DNA, 25 bp, Probe Sequence
gcaatctttcctgttgtaaatcttc

SEQ ID NO: 218045 - DNA, 25 bp, Probe Sequence
gaattttcctttctcagaactacct

SEQ ID NO: 218046 - DNA, 25 bp, Probe Sequence
gaattatcccttgtaaataccacag

SEQ ID NO: 218047 - DNA, 25 bp, Probe Sequence
gaatttagccctactacattttaag

SEQ ID NO: 218048 - DNA, 25 bp, Probe Sequence
gaattcaagaactcacagcatttta

SEQ ID NO: 218049 - DNA, 25 bp, Probe Sequence
gcaatctgcaaataactcctccatt

SEQ ID NO: 218050 - DNA, 25 bp, Probe Sequence
gcaatctgcaaataactcctccatt

SEQ ID NO: 218051 - DNA, 25 bp, Probe Sequence
gcaattccataaacacatcctggtg

SEQ ID NO: 218052 - DNA, 25 bp, Probe Sequence
gaattcgaaaaactctcggatcagg

SEQ ID NO: 218053 - DNA, 25 bp, Probe Sequence
gaattaaaagaacggcagcacaagg

SEQ ID NO: 218054 - DNA, 25 bp, Probe Sequence
gcaatgtaaacgtaactcaaccagt

SEQ ID NO: 218055 - DNA, 25 bp, Probe Sequence
gcaatgtaaacgtaactcaaccagt

SEQ ID NO: 218056 - DNA, 25 bp, Probe Sequence
gcaatgtaaacgtaactcaaccagt

SEQ ID NO: 218057 - DNA, 25 bp, Probe Sequence
gaattaaaccattacatgccccttc

SEQ ID NO: 218058 - DNA, 25 bp, Probe Sequence
gaattaaaccattacatgccccttc

SEQ ID NO: 218059 - DNA, 25 bp, Probe Sequence
gaatttactactttatgtcctgctc

SEQ ID NO: 218060 - DNA, 25 bp, Probe Sequence
gcaatttagattcactgatgtcctt

SEQ ID NO: 218061 - DNA, 25 bp, Probe Sequence
gaattcctttgggatgaatcagcat

SEQ ID NO: 218062 - DNA, 25 bp, Probe Sequence
gaatatcctgtggacttggaaatta

SEQ ID NO: 218063 - DNA, 25 bp, Probe Sequence
gaattctgggctgccaggaaacgat

SEQ ID NO: 218064 - DNA, 25 bp, Probe Sequence
gaattagggtgggctctaaatccat

SEQ ID NO: 218065 - DNA, 25 bp, Probe Sequence
gaattgagtgtgtaggctccctatc

SEQ ID NO: 218066 - DNA, 25 bp, Probe Sequence
gaattggacagatggcagccaccat

SEQ ID NO: 218067 - DNA, 25 bp, Probe Sequence
gaattggatcaaagccaccatcaaa

SEQ ID NO: 218068 - DNA, 25 bp, Probe Sequence
gaattggagaaaggccccaaccagg

SEQ ID NO: 218069 - DNA, 25 bp, Probe Sequence
gaatcttgaaaagcccagagatcca

SEQ ID NO: 218070 - DNA, 25 bp, Probe Sequence
gaatttgaaagctttcctctgtcca

SEQ ID NO: 218071 - DNA, 25 bp, Probe Sequence
gaattctggtcacattccatttctc

SEQ ID NO: 218072 - DNA, 25 bp, Probe Sequence
gaatactggccatatttgcttgagc

SEQ ID NO: 218073 - DNA, 25 bp, Probe Sequence
gaatactggccagagggctgtgctg

SEQ ID NO: 218074 - DNA, 25 bp, Probe Sequence
gaatagtgccgcgataacagtacgt

SEQ ID NO: 218075 - DNA, 25 bp, Probe Sequence
gcaatcaggtcagaaagggatgagt

SEQ ID NO: 218076 - DNA, 25 bp, Probe Sequence
gcaatcggtctatagatgtgtcatg

SEQ ID NO: 218077 - DNA, 25 bp, Probe Sequence
gcaattcgtgctgatcatgattttg

SEQ ID NO: 218078 - DNA, 25 bp, Probe Sequence
gcaattagtctgtcactccatttag

SEQ ID NO: 218079 - DNA, 25 bp, Probe Sequence
gcaattagtctgtcactccatttgg

SEQ ID NO: 218080 - DNA, 25 bp, Probe Sequence
gaatgctagctctcttgaatttgga

SEQ ID NO: 218081 - DNA, 25 bp, Probe Sequence
gcaatgcatatctgtttattctggg

SEQ ID NO: 218082 - DNA, 25 bp, Probe Sequence
gcaatgatgtgctgcttctgatttt

SEQ ID NO: 218083 - DNA, 25 bp, Probe Sequence
gcaatgtgtgcttggatcatttttt

SEQ ID NO: 218084 - DNA, 25 bp, Probe Sequence
gcaatgtgtaatgatatttctgtac

SEQ ID NO: 218085 - DNA, 25 bp, Probe Sequence
gaattgccagataatctttctggaa

SEQ ID NO: 218086 - DNA, 25 bp, Probe Sequence
gaattccagttgacttcagaggaga

SEQ ID NO: 218087 - DNA, 25 bp, Probe Sequence
gaattctggttgtaatagatgacag

SEQ ID NO: 218088 - DNA, 25 bp, Probe Sequence
gaatatctctgaagctggattgata

SEQ ID NO: 218089 - DNA, 25 bp, Probe Sequence
gaatacctgaagtgatcatgtaact

SEQ ID NO: 218090 - DNA, 25 bp, Probe Sequence
gcaataccaaagtcgcaagaatggc

SEQ ID NO: 218091 - DNA, 25 bp, Probe Sequence
gaatacctagatgtggaatgcatgg

SEQ ID NO: 218092 - DNA, 25 bp, Probe Sequence
gaataaccatgtgcatggacagcca

SEQ ID NO: 218093 - DNA, 25 bp, Probe Sequence
gaatgaacttgcagcaaaccttgga

SEQ ID NO: 218094 - DNA, 25 bp, Probe Sequence
gaatgacacttctacagaacaacgg

SEQ ID NO: 218095 - DNA, 25 bp, Probe Sequence
gcaatgatgcactttaactgaagat

SEQ ID NO: 218096 - DNA, 25 bp, Probe Sequence
gcaatatgacattcttggtgacagt

SEQ ID NO: 218097 - DNA, 25 bp, Probe Sequence
gcaattagacactttggaagatggc

SEQ ID NO: 218098 - DNA, 25 bp, Probe Sequence
gaattggatctgtctctggaaaatc

SEQ ID NO: 218099 - DNA, 25 bp, Probe Sequence
gcaatcaggattactaaaaaccagg

SEQ ID NO: 218100 - DNA, 25 bp, Probe Sequence
gaatggtactacaaccaattccaag

SEQ ID NO: 218101 - DNA, 25 bp, Probe Sequence
gaatgaaaattaactaaacaggatt

SEQ ID NO: 218102 - DNA, 25 bp, Probe Sequence
gaataccaattcaaccaccaaggaa

SEQ ID NO: 218103 - DNA, 25 bp, Probe Sequence
gaattccatactataaactaggaat

SEQ ID NO: 218104 - DNA, 25 bp, Probe Sequence
gaattccaagctgtcagacctggac

SEQ ID NO: 218105 - DNA, 25 bp, Probe Sequence
gaattaacagccctcaacgtgatga

SEQ ID NO: 218106 - DNA, 25 bp, Probe Sequence
gaattcaacagagaaacggcaggaa

SEQ ID NO: 218107 - DNA, 25 bp, Probe Sequence
gaattggccgaggagaagcgcgagg

SEQ ID NO: 218108 - DNA, 25 bp, Probe Sequence
gcaattggcgggcatggaggtgggt

SEQ ID NO: 218109 - DNA, 25 bp, Probe Sequence
gaatctgggaggtggaggtcatggt

SEQ ID NO: 218110 - DNA, 25 bp, Probe Sequence
gaattggcgagccaccgtggatcag

SEQ ID NO: 218111 - DNA, 25 bp, Probe Sequence
gaattgggagctctcagcgacatca

SEQ ID NO: 218112 - DNA, 25 bp, Probe Sequence
gcaattggttctcctgcattgagat

SEQ ID NO: 218113 - DNA, 25 bp, Probe Sequence
gcaatgtgagtttactgattgtgga

SEQ ID NO: 218114 - DNA, 25 bp, Probe Sequence
gcaatgtgatttaaggttttgtttt

SEQ ID NO: 218115 - DNA, 25 bp, Probe Sequence
gagtggattttatttttcgttattg

SEQ ID NO: 218116 - DNA, 25 bp, Probe Sequence
gaattattttaatattccttattga

SEQ ID NO: 218117 - DNA, 25 bp, Probe Sequence
gaccaagtttaaaagtacctatgtg

SEQ ID NO: 218118 - DNA, 25 bp, Probe Sequence
gactagttttgaggtcaaacctatg

SEQ ID NO: 218119 - DNA, 25 bp, Probe Sequence
gaatcacttttaggatgtaacttta

SEQ ID NO: 218120 - DNA, 25 bp, Probe Sequence
gaatctcttattttgggaagctgtt

SEQ ID NO: 218121 - DNA, 25 bp, Probe Sequence
gaatccttcagttcttacacgtatc

SEQ ID NO: 218122 - DNA, 25 bp, Probe Sequence
gaatactaaggactgaagccactac

SEQ ID NO: 218123 - DNA, 25 bp, Probe Sequence
gaattctaaggcatgaagctaagag

SEQ ID NO: 218124 - DNA, 25 bp, Probe Sequence
gaatttaagcgcaagtactccaatg

SEQ ID NO: 218125 - DNA, 25 bp, Probe Sequence
tttttgggaccatcactgagagtca

SEQ ID NO: 218126 - DNA, 25 bp, Probe Sequence
gaatttaatgcaggagtacaccaga

SEQ ID NO: 218127 - DNA, 25 bp, Probe Sequence
gaatctttaccagttcaatgcacag

SEQ ID NO: 218128 - DNA, 25 bp, Probe Sequence
gaattcatacccagccaatgcagaa

SEQ ID NO: 218129 - DNA, 25 bp, Probe Sequence
gaatattactaaccaagctgcgaaa

SEQ ID NO: 218130 - DNA, 25 bp, Probe Sequence
gaattgaatgtatccaacgcaataa

SEQ ID NO: 218131 - DNA, 25 bp, Probe Sequence
gaattgacattgaaatctaggaaaa

SEQ ID NO: 218132 - DNA, 25 bp, Probe Sequence
gaattgagcttcatgtcaaaacgga

SEQ ID NO: 218133 - DNA, 25 bp, Probe Sequence
gaatgtggttatggccgaaaaggat

SEQ ID NO: 218134 - DNA, 25 bp, Probe Sequence
gaatttcttatccagccaaacgaag

SEQ ID NO: 218135 - DNA, 25 bp, Probe Sequence
gcaattcgtcgactagacaaaccaa

SEQ ID NO: 218136 - DNA, 25 bp, Probe Sequence
gcaattcagatgcctctacaataaa

SEQ ID NO: 218137 - DNA, 25 bp, Probe Sequence
gcaatctcagaagcttacaaataga

SEQ ID NO: 218138 - DNA, 25 bp, Probe Sequence
gcaatagcagaagaccagaagacag

SEQ ID NO: 218139 - DNA, 25 bp, Probe Sequence
gcaatggcccaggattcaagaactg

SEQ ID NO: 218140 - DNA, 25 bp, Probe Sequence
gcaatttcgtgccattcaggaattc

SEQ ID NO: 218141 - DNA, 25 bp, Probe Sequence
gaatttgcatggtcttcggaatttt

SEQ ID NO: 218142 - DNA, 25 bp, Probe Sequence
gcaattggcatgttttcaggaggat

SEQ ID NO: 218143 - DNA, 25 bp, Probe Sequence
gcaatgctccgattatgacagtgac

SEQ ID NO: 218144 - DNA, 25 bp, Probe Sequence
gcaatgtccgcatcaacttgcagaa

SEQ ID NO: 218145 - DNA, 25 bp, Probe Sequence
gcaaggctctgcagccaatgcagaa

SEQ ID NO: 218146 - DNA, 25 bp, Probe Sequence
gcaatggctgcgtagccatcagcag

SEQ ID NO: 218147 - DNA, 25 bp, Probe Sequence
gcaatggcacgaaagctacagatgt

SEQ ID NO: 218148 - DNA, 25 bp, Probe Sequence
gcaatgccatcctgcgctacattgc

SEQ ID NO: 218149 - DNA, 25 bp, Probe Sequence
gcaatcacaccatgccatgttttcc

SEQ ID NO: 218150 - DNA, 25 bp, Probe Sequence
gaatcaagccaccaacttttaccta

SEQ ID NO: 218151 - DNA, 25 bp, Probe Sequence
gaatcactacacattcctttagtct

SEQ ID NO: 218152 - DNA, 25 bp, Probe Sequence
gcaatcctatacaaccgtatcggcg

SEQ ID NO: 218153 - DNA, 25 bp, Probe Sequence
gcaatttataaacctgtcactgatt

SEQ ID NO: 218154 - DNA, 25 bp, Probe Sequence
gcaatcctaagatcctgcttgttgt

SEQ ID NO: 218155 - DNA, 25 bp, Probe Sequence
gaattcccagattcctcttttgatc

SEQ ID NO: 218156 - DNA, 25 bp, Probe Sequence
gcaatttccacctctgtgtgtgtac

SEQ ID NO: 218157 - DNA, 25 bp, Probe Sequence
gaatttgacctctctgactgggaca

SEQ ID NO: 218158 - DNA, 25 bp, Probe Sequence
gaatatatgaccacgctcacccgca

SEQ ID NO: 218159 - DNA, 25 bp, Probe Sequence
gcaatatcaaacatcagctaaccga

SEQ ID NO: 218160 - DNA, 25 bp, Probe Sequence
gaatcacagaacaatcctgaaccag

SEQ ID NO: 218161 - DNA, 25 bp, Probe Sequence
gcaatgacagaacttccaccaacgc

SEQ ID NO: 218162 - DNA, 25 bp, Probe Sequence
gcaatccatgagcctgtgctgagcc

SEQ ID NO: 218163 - DNA, 25 bp, Probe Sequence
gcaatcacaacactggctgagcgga

SEQ ID NO: 218164 - DNA, 25 bp, Probe Sequence
gaatcacgacgcggcagacaaggcc

SEQ ID NO: 218165 - DNA, 25 bp, Probe Sequence
gaatcaagcaatccagcctcatggg

SEQ ID NO: 218166 - DNA, 25 bp, Probe Sequence
gcaatataaatgtcaccctgggcgc

SEQ ID NO: 218167 - DNA, 25 bp, Probe Sequence
gcaatataccaatctcctgaggctt

SEQ ID NO: 218168 - DNA, 25 bp, Probe Sequence
gcaatgatagccattctcactcacc

SEQ ID NO: 218169 - DNA, 25 bp, Probe Sequence
gcaatgatagccattctcactcacc

SEQ ID NO: 218170 - DNA, 25 bp, Probe Sequence
gcaatgttgccagtgtctgtctgca

SEQ ID NO: 218171 - DNA, 25 bp, Probe Sequence
gcaatgttgccagtgtctgtctgca

SEQ ID NO: 218172 - DNA, 25 bp, Probe Sequence
gcaattctgagctatgatttcatga

SEQ ID NO: 218173 - DNA, 25 bp, Probe Sequence
gcaattgtgctcttcatttaggatg

SEQ ID NO: 218174 - DNA, 25 bp, Probe Sequence
gcaattgtgctcttcatttaggatg

SEQ ID NO: 218175 - DNA, 25 bp, Probe Sequence
gcaattctcgattctttgaagagat

SEQ ID NO: 218176 - DNA, 25 bp, Probe Sequence
gcaatttccttttgtgcaagcagtg

SEQ ID NO: 218177 - DNA, 25 bp, Probe Sequence
gaattttcttggtgcaaagtgtatc

SEQ ID NO: 218178 - DNA, 25 bp, Probe Sequence
gaataactttggttcttgagatggt

SEQ ID NO: 218179 - DNA, 25 bp, Probe Sequence
gaaaccactaggttctaggtcctgg

SEQ ID NO: 218180 - DNA, 25 bp, Probe Sequence
gaatacccagggtcttatttttgtg

SEQ ID NO: 218181 - DNA, 25 bp, Probe Sequence
gaattcttcggagcttgtcttattt

SEQ ID NO: 218182 - DNA, 25 bp, Probe Sequence
gaatttcttgcgctttgattttttt

SEQ ID NO: 218183 - DNA, 25 bp, Probe Sequence
gaatttcttgcgctttgattttttt

SEQ ID NO: 218184 - DNA, 25 bp, Probe Sequence
gaatattttcgatctgcgattgttt

SEQ ID NO: 218185 - DNA, 25 bp, Probe Sequence
gcaattttgaaatgttgcttgttct

SEQ ID NO: 218186 - DNA, 25 bp, Probe Sequence
gcaatttagaactagattttggtta

SEQ ID NO: 218187 - DNA, 25 bp, Probe Sequence
gaattataaacgctcttctggaata

SEQ ID NO: 218188 - DNA, 25 bp, Probe Sequence
gaatttaaagaatgctatcttggaa

SEQ ID NO: 218189 - DNA, 25 bp, Probe Sequence
gcaatttagagcaagggctgcagct

SEQ ID NO: 218190 - DNA, 25 bp, Probe Sequence
gcaattttggtctgcgccacataac

SEQ ID NO: 218191 - DNA, 25 bp, Probe Sequence
gcaatgtggtgcgttgggaattcaa

SEQ ID NO: 218192 - DNA, 25 bp, Probe Sequence
gcaatgaggtgtcgctgcagcagca

SEQ ID NO: 218193 - DNA, 25 bp, Probe Sequence
gcaatcagatggaccagctagcacc

SEQ ID NO: 218194 - DNA, 25 bp, Probe Sequence
gcaatcagggagggctggtgcatcc

SEQ ID NO: 218195 - DNA, 25 bp, Probe Sequence
gcaatcgagtgactggtctgttccc

SEQ ID NO: 218196 - DNA, 25 bp, Probe Sequence
gcaatggagacccaccaatgatccc

SEQ ID NO: 218197 - DNA, 25 bp, Probe Sequence
gaattggagtctcaccatggctccc

SEQ ID NO: 218198 - DNA, 25 bp, Probe Sequence
gaattggattctctcatcaaggcta

SEQ ID NO: 218199 - DNA, 25 bp, Probe Sequence
gaattggagaccttcacagagggcg

SEQ ID NO: 218200 - DNA, 25 bp, Probe Sequence
gaattgcgggccttcaagttattgg

SEQ ID NO: 218201 - DNA, 25 bp, Probe Sequence
gaatatctggggtccaagggattgg

SEQ ID NO: 218202 - DNA, 25 bp, Probe Sequence
gaatacgtttgactcacgggatttc

SEQ ID NO: 218203 - DNA, 25 bp, Probe Sequence
gaagacgtcattgcccagggtattg

SEQ ID NO: 218204 - DNA, 25 bp, Probe Sequence
gaagacgtcattgcccagggtattg

SEQ ID NO: 218205 - DNA, 25 bp, Probe Sequence
gaatcacttataccaaagccttatg

SEQ ID NO: 218206 - DNA, 25 bp, Probe Sequence
gcaatcacacatgtcaacaatcctt

SEQ ID NO: 218207 - DNA, 25 bp, Probe Sequence
gaatcaacaaaaacttgcatcgtaa

SEQ ID NO: 218208 - DNA, 25 bp, Probe Sequence
gaatcccaaatgtgttatgctaaat

SEQ ID NO: 218209 - DNA, 25 bp, Probe Sequence
gaatccagatggcatggttgctcta

SEQ ID NO: 218210 - DNA, 25 bp, Probe Sequence
gaatccagatggcatggttgctcta

SEQ ID NO: 218211 - DNA, 25 bp, Probe Sequence
gaatcccatgggggtcccatgacat

SEQ ID NO: 218212 - DNA, 25 bp, Probe Sequence
gaatcctctggaaggcactcagcat

SEQ ID NO: 218213 - DNA, 25 bp, Probe Sequence
gcaatgccttaacgagagccgcgag

SEQ ID NO: 218214 - DNA, 25 bp, Probe Sequence
gaattcctcaagcaggcctggttta

SEQ ID NO: 218215 - DNA, 25 bp, Probe Sequence
gaatttctcagacaaacaggattta

SEQ ID NO: 218216 - DNA, 25 bp, Probe Sequence
gaatttctaatctgtgaaggcagta

SEQ ID NO: 218217 - DNA, 25 bp, Probe Sequence
gaatctgtccgtctgtaaggcgtag

SEQ ID NO: 218218 - DNA, 25 bp, Probe Sequence
gaatttccatgccgtctacagggat

SEQ ID NO: 218219 - DNA, 25 bp, Probe Sequence
gaattctcactggggcgaaggagtg

SEQ ID NO: 218220 - DNA, 25 bp, Probe Sequence
gaattggactgctgtggactccact

SEQ ID NO: 218221 - DNA, 25 bp, Probe Sequence
gaattatcactacagaactccatct

SEQ ID NO: 218222 - DNA, 25 bp, Probe Sequence
gaatcttgagtacgtggaccattgc

SEQ ID NO: 218223 - DNA, 25 bp, Probe Sequence
gaatcttgagtacgtggaccattgc

SEQ ID NO: 218224 - DNA, 25 bp, Probe Sequence
gaattttgatacatggactcagccc

SEQ ID NO: 218225 - DNA, 25 bp, Probe Sequence
gaatttagcatggatcttcgtacca

SEQ ID NO: 218226 - DNA, 25 bp, Probe Sequence
gaattgcacagctcatttgcgaacg

SEQ ID NO: 218227 - DNA, 25 bp, Probe Sequence
gaattgcaaaagtttcagcagaagc

SEQ ID NO: 218228 - DNA, 25 bp, Probe Sequence
gcaatctgcacaaaggtgtctcaca

SEQ ID NO: 218229 - DNA, 25 bp, Probe Sequence
gaatgaactaaggtgtctaccatga

SEQ ID NO: 218230 - DNA, 25 bp, Probe Sequence
gaatatcctagagcagttaactaca

SEQ ID NO: 218231 - DNA, 25 bp, Probe Sequence
gaataagccaggtgtctatactcga

SEQ ID NO: 218232 - DNA, 25 bp, Probe Sequence
gaagaaccaggagcggattctccgc

SEQ ID NO: 218233 - DNA, 25 bp, Probe Sequence
gaagaaccaggagcggattctccgc

SEQ ID NO: 218234 - DNA, 25 bp, Probe Sequence
gtacaaccagttgaaatttccagta

SEQ ID NO: 218235 - DNA, 25 bp, Probe Sequence
gaatcaaccgtaaaaatgtcttcat

SEQ ID NO: 218236 - DNA, 25 bp, Probe Sequence
gaattaccagaatactatgaattaa

SEQ ID NO: 218237 - DNA, 25 bp, Probe Sequence
gaattgaaagaatgcatggtggtta

SEQ ID NO: 218238 - DNA, 25 bp, Probe Sequence
gaattgaagaggaagctggggcagc

SEQ ID NO: 218239 - DNA, 25 bp, Probe Sequence
gaatctgacaagcacttagaggccc

SEQ ID NO: 218240 - DNA, 25 bp, Probe Sequence
gcaatcatagattaccttacagacc

SEQ ID NO: 218241 - DNA, 25 bp, Probe Sequence
gcaatcagataatgcctcccagcac

SEQ ID NO: 218242 - DNA, 25 bp, Probe Sequence
gcaatcagactgtcgacattccaga

SEQ ID NO: 218243 - DNA, 25 bp, Probe Sequence
gcaatctcatttgactatacgataa

SEQ ID NO: 218244 - DNA, 25 bp, Probe Sequence
gcaataattactacttacaataaaa

SEQ ID NO: 218245 - DNA, 25 bp, Probe Sequence
gaatattcccatagtttcaaaaagt

SEQ ID NO: 218246 - DNA, 25 bp, Probe Sequence
gcaatttcccaatgtacctataaga

SEQ ID NO: 218247 - DNA, 25 bp, Probe Sequence
gcaatttcccaatgtacctataaga

SEQ ID NO: 218248 - DNA, 25 bp, Probe Sequence
gaatgaaatccgagtacctattaga

SEQ ID NO: 218249 - DNA, 25 bp, Probe Sequence
gaataaattatgagctatcctttca

SEQ ID NO: 218250 - DNA, 25 bp, Probe Sequence
gaattagtttgcacttcctattgga

SEQ ID NO: 218251 - DNA, 25 bp, Probe Sequence
gacgtatgtttccctttgtgaatta

SEQ ID NO: 218252 - DNA, 25 bp, Probe Sequence
gaattcattttccacgttctagcat

SEQ ID NO: 218253 - DNA, 25 bp, Probe Sequence
gaattctttctttcctactacattc

SEQ ID NO: 218254 - DNA, 25 bp, Probe Sequence
gaattgtattaaacactacaaagtc

SEQ ID NO: 218255 - DNA, 25 bp, Probe Sequence
gaattgtatcttcatccttagcaca

SEQ ID NO: 218256 - DNA, 25 bp, Probe Sequence
gcaattattttgttcctggagcaag

SEQ ID NO: 218257 - DNA, 25 bp, Probe Sequence
gcaataatgtttctccataacagag

SEQ ID NO: 218258 - DNA, 25 bp, Probe Sequence
gaatcaagtaatcattctaaagatg

SEQ ID NO: 218259 - DNA, 25 bp, Probe Sequence
gaataggtatgaaatgtctacgtgt

SEQ ID NO: 218260 - DNA, 25 bp, Probe Sequence
gaattggcatgtgtatgttcccagt

SEQ ID NO: 218261 - DNA, 25 bp, Probe Sequence
gaattggttggttttatccatgtct

SEQ ID NO: 218262 - DNA, 25 bp, Probe Sequence
gcaattgtgttacttttattatttg

SEQ ID NO: 218263 - DNA, 25 bp, Probe Sequence
gcaatctggttgtgatttatatttt

SEQ ID NO: 218264 - DNA, 25 bp, Probe Sequence
gcaattttggatgattattctttgt

SEQ ID NO: 218265 - DNA, 25 bp, Probe Sequence
gaattcttaaggcatcttttctctg

SEQ ID NO: 218266 - DNA, 25 bp, Probe Sequence
gaattctaacagatactttgttcgt

SEQ ID NO: 218267 - DNA, 25 bp, Probe Sequence
gaattcgatataagtacttttacag

SEQ ID NO: 218268 - DNA, 25 bp, Probe Sequence
gaatatgcagtatgggactttgaaa

SEQ ID NO: 218269 - DNA, 25 bp, Probe Sequence
gaatatgcgtagaccatactttcca

SEQ ID NO: 218270 - DNA, 25 bp, Probe Sequence
gaatatgcgtagaccatactttcca

SEQ ID NO: 218271 - DNA, 25 bp, Probe Sequence
gaatatcgtcttcctatttgctaag

SEQ ID NO: 218272 - DNA, 25 bp, Probe Sequence
gaattcagagctttctcatctttta

SEQ ID NO: 218273 - DNA, 25 bp, Probe Sequence
gaattcagagctttctcatctttta

SEQ ID NO: 218274 - DNA, 25 bp, Probe Sequence
gaattcaggctagtgttgcagtata

SEQ ID NO: 218275 - DNA, 25 bp, Probe Sequence
gaattcatggccatctatatgtcaa

SEQ ID NO: 218276 - DNA, 25 bp, Probe Sequence
gaattcacacctaaatcgtcatcaa

SEQ ID NO: 218277 - DNA, 25 bp, Probe Sequence
gaattctgcacttacacgtactcaa

SEQ ID NO: 218278 - DNA, 25 bp, Probe Sequence
gaattgcagtcacaacagctactcc

SEQ ID NO: 218279 - DNA, 25 bp, Probe Sequence
gaattggatagatacagccctacaa

SEQ ID NO: 218280 - DNA, 25 bp, Probe Sequence
gaattggagcatttaaccagcccag

SEQ ID NO: 218281 - DNA, 25 bp, Probe Sequence
gaatttggtgattttccacagaatg

SEQ ID NO: 218282 - DNA, 25 bp, Probe Sequence
gcaattggagtatttacaccataga

SEQ ID NO: 218283 - DNA, 25 bp, Probe Sequence
gaatctggaatcggtgacacccatg

SEQ ID NO: 218284 - DNA, 25 bp, Probe Sequence
gaatcaggagcctggacactgccat

SEQ ID NO: 218285 - DNA, 25 bp, Probe Sequence
gaatcaggagcctggacactgccat

SEQ ID NO: 218286 - DNA, 25 bp, Probe Sequence
gaatcagaaccagatgacacatgaa

SEQ ID NO: 218287 - DNA, 25 bp, Probe Sequence
gaatcagaatgagcagaccaaaaca

SEQ ID NO: 218288 - DNA, 25 bp, Probe Sequence
gaatagtgatggagacctaagttag

SEQ ID NO: 218289 - DNA, 25 bp, Probe Sequence
gaattgtatggtcaggccaagcctc

SEQ ID NO: 218290 - DNA, 25 bp, Probe Sequence
gaattggcttctcaggctcaaggta

SEQ ID NO: 218291 - DNA, 25 bp, Probe Sequence
gaattggtttcatggtataggtttt

SEQ ID NO: 218292 - DNA, 25 bp, Probe Sequence
gaattttgtctcttttttggtctct

SEQ ID NO: 218293 - DNA, 25 bp, Probe Sequence
gcaattttgtcctttactgtagtct

SEQ ID NO: 218294 - DNA, 25 bp, Probe Sequence
gcaatctttgtgatattacttcgct

SEQ ID NO: 218295 - DNA, 25 bp, Probe Sequence
gcaatttctagttattattctagcc

SEQ ID NO: 218296 - DNA, 25 bp, Probe Sequence
gaattgctctgggttagatcgcgac

SEQ ID NO: 218297 - DNA, 25 bp, Probe Sequence
gaattcctgtggcacaatcggactt

SEQ ID NO: 218298 - DNA, 25 bp, Probe Sequence
taattcttggatgacgtcggcgttg

SEQ ID NO: 218299 - DNA, 25 bp, Probe Sequence
gaatttgtggggttgtggaggttgt

SEQ ID NO: 218300 - DNA, 25 bp, Probe Sequence
gaattgcttgtgtgcatgtgttggg

SEQ ID NO: 218301 - DNA, 25 bp, Probe Sequence
gaatcgatgggggatgcttcatgtg

SEQ ID NO: 218302 - DNA, 25 bp, Probe Sequence
gaattatgattaggtcgtcattgtc

SEQ ID NO: 218303 - DNA, 25 bp, Probe Sequence
gaatatatttacttcctctagtgaa

SEQ ID NO: 218304 - DNA, 25 bp, Probe Sequence
gaattcatgttacattatcggtaaa

SEQ ID NO: 218305 - DNA, 25 bp, Probe Sequence
gaatgactattacaaacttatccaa

SEQ ID NO: 218306 - DNA, 25 bp, Probe Sequence
gaatattttagttaacgcttctaca

SEQ ID NO: 218307 - DNA, 25 bp, Probe Sequence
gcaatttcttaggtaaccttatatt

SEQ ID NO: 218308 - DNA, 25 bp, Probe Sequence
gaatctttatcagaaactggttttg

SEQ ID NO: 218309 - DNA, 25 bp, Probe Sequence
gaattgtcattcacacacctacttt

SEQ ID NO: 218310 - DNA, 25 bp, Probe Sequence
gaattgcttataaaccagccacttc

SEQ ID NO: 218311 - DNA, 25 bp, Probe Sequence
gaattccaagaatccaggcatctat

SEQ ID NO: 218312 - DNA, 25 bp, Probe Sequence
gaattaccaagatgccttgcttcag

SEQ ID NO: 218313 - DNA, 25 bp, Probe Sequence
gaattctccaaaacaattttctgca

SEQ ID NO: 218314 - DNA, 25 bp, Probe Sequence
gaattcccgggatgcatttttgagt

SEQ ID NO: 218315 - DNA, 25 bp, Probe Sequence
gaattcccgggatgacatattattt

SEQ ID NO: 218316 - DNA, 25 bp, Probe Sequence
gaattttccgtatcttgatctgagt

SEQ ID NO: 218317 - DNA, 25 bp, Probe Sequence
gaatcgttacctcatttttggtcaa

SEQ ID NO: 218318 - DNA, 25 bp, Probe Sequence
gaatagtttactgtgtttgctctta

SEQ ID NO: 218319 - DNA, 25 bp, Probe Sequence
gaatagacttccactttgtaattag

SEQ ID NO: 218320 - DNA, 25 bp, Probe Sequence
gaattagcctcgatctttttgatta

SEQ ID NO: 218321 - DNA, 25 bp, Probe Sequence
gaattaactcgtatttttctatggt

SEQ ID NO: 218322 - DNA, 25 bp, Probe Sequence
gaatttacctatcttgctatttttt

SEQ ID NO: 218323 - DNA, 25 bp, Probe Sequence
gaatttaatttgcactaagtcattt

SEQ ID NO: 218324 - DNA, 25 bp, Probe Sequence
gacttgtaatttgcatcctggtgat

SEQ ID NO: 218325 - DNA, 25 bp, Probe Sequence
gaatctgtatagagcccatcgttga

SEQ ID NO: 218326 - DNA, 25 bp, Probe Sequence
gaattgattaatgccctttctcaag

SEQ ID NO: 218327 - DNA, 25 bp, Probe Sequence
gaatagttcatttcacctgtttaag

SEQ ID NO: 218328 - DNA, 25 bp, Probe Sequence
gaataacgatttcccgtcttgactg

SEQ ID NO: 218329 - DNA, 25 bp, Probe Sequence
gaatacaaactactcccagttagat

SEQ ID NO: 218330 - DNA, 25 bp, Probe Sequence
gaatccaaactaatccatcaccggg

SEQ ID NO: 218331 - DNA, 25 bp, Probe Sequence
gaatagaaatgctaacctacctgca

SEQ ID NO: 218332 - DNA, 25 bp, Probe Sequence
gaataaatgctgtaacttgtttgct

SEQ ID NO: 218333 - DNA, 25 bp, Probe Sequence
gaatacaatcctttgcattgttaag

SEQ ID NO: 218334 - DNA, 25 bp, Probe Sequence
gaatattaagccttttgtaaatgtc

SEQ ID NO: 218335 - DNA, 25 bp, Probe Sequence
gaatcattaacttttggtacgagaa

SEQ ID NO: 218336 - DNA, 25 bp, Probe Sequence
gaatcttaactcctagagcaactct

SEQ ID NO: 218337 - DNA, 25 bp, Probe Sequence
gaattttgatctttagagacactag

SEQ ID NO: 218338 - DNA, 25 bp, Probe Sequence
gaattcttgatcaaatccagagctc

SEQ ID NO: 218339 - DNA, 25 bp, Probe Sequence
gaatatttgatttagccaacatgcc

SEQ ID NO: 218340 - DNA, 25 bp, Probe Sequence
gcaatttcgtgctcaccaagactcc

SEQ ID NO: 218341 - DNA, 25 bp, Probe Sequence
gcaatttaggattcacgcaagtttc

SEQ ID NO: 218342 - DNA, 25 bp, Probe Sequence
gaatttggacatgccccaatgcttc

SEQ ID NO: 218343 - DNA, 25 bp, Probe Sequence
gaattcgcgaagctgccaaagcctt

SEQ ID NO: 218344 - DNA, 25 bp, Probe Sequence
gcaattacgaagcatctgccaaccc

SEQ ID NO: 218345 - DNA, 25 bp, Probe Sequence
gaattacgagcaaagcatgcacaac

SEQ ID NO: 218346 - DNA, 25 bp, Probe Sequence
gaattgccaaataagcatggagatc

SEQ ID NO: 218347 - DNA, 25 bp, Probe Sequence
gaattgtcacaatagcagagccatt

SEQ ID NO: 218348 - DNA, 25 bp, Probe Sequence
gaattctccataacatgaatgaaat

SEQ ID NO: 218349 - DNA, 25 bp, Probe Sequence
gaattgctcctgcatgcaactaatt

SEQ ID NO: 218350 - DNA, 25 bp, Probe Sequence
gaattgctcctgcatgcaactaatt

SEQ ID NO: 218351 - DNA, 25 bp, Probe Sequence
gaattgctcctgcatgcaactaatt

SEQ ID NO: 218352 - DNA, 25 bp, Probe Sequence
gaatatgaactgttgcaactgaacg

SEQ ID NO: 218353 - DNA, 25 bp, Probe Sequence
gaattgcttggattgctacatggac

SEQ ID NO: 218354 - DNA, 25 bp, Probe Sequence
gaattgaatggagtctgcagatggg

SEQ ID NO: 218355 - DNA, 25 bp, Probe Sequence
gaatatgagtgccatgcatccaatt

SEQ ID NO: 218356 - DNA, 25 bp, Probe Sequence
gaatatagctaggtccaatgttaaa

SEQ ID NO: 218357 - DNA, 25 bp, Probe Sequence
gaattggatcacctcacagtttcag

SEQ ID NO: 218358 - DNA, 25 bp, Probe Sequence
gcaatatggcatacctacattttcc

SEQ ID NO: 218359 - DNA, 25 bp, Probe Sequence
gcaattgtgtatctaagacctccaa

SEQ ID NO: 218360 - DNA, 25 bp, Probe Sequence
gaatattatccctaatacctgccac

SEQ ID NO: 218361 - DNA, 25 bp, Probe Sequence
gaatattatccctaatacctgccac

SEQ ID NO: 218362 - DNA, 25 bp, Probe Sequence
gaatattatccctaatacctgccac

SEQ ID NO: 218363 - DNA, 25 bp, Probe Sequence
gaatttcacctgtaaacctgagtcg

SEQ ID NO: 218364 - DNA, 25 bp, Probe Sequence
gaatttgctttgtttactgctagta

SEQ ID NO: 218365 - DNA, 25 bp, Probe Sequence
gaatttttagatagctcctcaagat

SEQ ID NO: 218366 - DNA, 25 bp, Probe Sequence
gaattgtttctgggctcattaaaaa

SEQ ID NO: 218367 - DNA, 25 bp, Probe Sequence
gaatttttctgtctttggagagtat

SEQ ID NO: 218368 - DNA, 25 bp, Probe Sequence
gaattttggtgtctttccatgtggt

SEQ ID NO: 218369 - DNA, 25 bp, Probe Sequence
gaattttgatttcttaaagtgtgtt

SEQ ID NO: 218370 - DNA, 25 bp, Probe Sequence
gaattctctgatgtcgattaaggtg

SEQ ID NO: 218371 - DNA, 25 bp, Probe Sequence
gaatcccttcagtcacattaggggg

SEQ ID NO: 218372 - DNA, 25 bp, Probe Sequence
gaatccctctaagtctgcttgatag

SEQ ID NO: 218373 - DNA, 25 bp, Probe Sequence
gaatcctattaatgctgagagatcc

SEQ ID NO: 218374 - DNA, 25 bp, Probe Sequence
gaatccttaaaggtgagccctcata

SEQ ID NO: 218375 - DNA, 25 bp, Probe Sequence
gaattaataattgtgagcccataga

SEQ ID NO: 218376 - DNA, 25 bp, Probe Sequence
gaattactgcacacctggttcacga

SEQ ID NO: 218377 - DNA, 25 bp, Probe Sequence
gaattcactagcacagtagttgaca

SEQ ID NO: 218378 - DNA, 25 bp, Probe Sequence
gaatacacaagctcagtaggctcca

SEQ ID NO: 218379 - DNA, 25 bp, Probe Sequence
gaattctatagtgcctgggtctcag

SEQ ID NO: 218380 - DNA, 25 bp, Probe Sequence
gaattatattggtccagaagttcaa

SEQ ID NO: 218381 - DNA, 25 bp, Probe Sequence
gaattaagtgagtcaagccaagtaa

SEQ ID NO: 218382 - DNA, 25 bp, Probe Sequence
gaattaggtaacaagcccattatgc

SEQ ID NO: 218383 - DNA, 25 bp, Probe Sequence
gaattaggctaaaaggtcttgcagt

SEQ ID NO: 218384 - DNA, 25 bp, Probe Sequence
gaatttgggacaggcactatttgca

SEQ ID NO: 218385 - DNA, 25 bp, Probe Sequence
gaatgttggatctcagactaaccat

SEQ ID NO: 218386 - DNA, 25 bp, Probe Sequence
gaattttaaatgccacagaacctat

SEQ ID NO: 218387 - DNA, 25 bp, Probe Sequence
gaatcattttcctgccagatacctt

SEQ ID NO: 218388 - DNA, 25 bp, Probe Sequence
gaatacttttcagccaataatttat

SEQ ID NO: 218389 - DNA, 25 bp, Probe Sequence
gaatactaattatccattccttttg

SEQ ID NO: 218390 - DNA, 25 bp, Probe Sequence
gaattcataatcaaacctaaccttt

SEQ ID NO: 218391 - DNA, 25 bp, Probe Sequence
gaatacatgatcctcaactgctaac

SEQ ID NO: 218392 - DNA, 25 bp, Probe Sequence
gcaattatgtagccaccgttagctg

SEQ ID NO: 218393 - DNA, 25 bp, Probe Sequence
gaatgttgaatgtcaccgtatgcgt

SEQ ID NO: 218394 - DNA, 25 bp, Probe Sequence
gaatattaatctgctagtatggaag

SEQ ID NO: 218395 - DNA, 25 bp, Probe Sequence
gaattgtaactccatatattgaata

SEQ ID NO: 218396 - DNA, 25 bp, Probe Sequence
gcaattgaaacatgtcttctcacaa

SEQ ID NO: 218397 - DNA, 25 bp, Probe Sequence
gaataaagtaatcctttcatcaaaa

SEQ ID NO: 218398 - DNA, 25 bp, Probe Sequence
gaataaaggctacaggctccaaaaa

SEQ ID NO: 218399 - DNA, 25 bp, Probe Sequence
gaataaagagccacgtcctacaacc

SEQ ID NO: 218400 - DNA, 25 bp, Probe Sequence
gaatatgaaaccattgctcctagag

SEQ ID NO: 218401 - DNA, 25 bp, Probe Sequence
gaattaaatcctccagcttttgaac

SEQ ID NO: 218402 - DNA, 25 bp, Probe Sequence
gaattccaataccggctatgttaaa

SEQ ID NO: 218403 - DNA, 25 bp, Probe Sequence
gaattacaatacatggctttttaga

SEQ ID NO: 218404 - DNA, 25 bp, Probe Sequence
gaattacagacaacgcgcttttgct

SEQ ID NO: 218405 - DNA, 25 bp, Probe Sequence
gaattgtagtcaacggtcagcttgt

SEQ ID NO: 218406 - DNA, 25 bp, Probe Sequence
gaattgctcaggttgtgttccttat

SEQ ID NO: 218407 - DNA, 25 bp, Probe Sequence
gaatttgcagttatgttgtcgtgta

SEQ ID NO: 218408 - DNA, 25 bp, Probe Sequence
gaatttgagttcttgatgtaccagc

SEQ ID NO: 218409 - DNA, 25 bp, Probe Sequence
gaatttaggtcaatttatctagtcc

SEQ ID NO: 218410 - DNA, 25 bp, Probe Sequence
gaattctagcaatcttttcatagta

SEQ ID NO: 218411 - DNA, 25 bp, Probe Sequence
gaattgtctgaatgctctcatttca

SEQ ID NO: 218412 - DNA, 25 bp, Probe Sequence
gaattgcctgtaagtcctggtcatc

SEQ ID NO: 218413 - DNA, 25 bp, Probe Sequence
gcaattgcctatgctttctttcatc

SEQ ID NO: 218414 - DNA, 25 bp, Probe Sequence
gaattgcattatgttctctggtaac

SEQ ID NO: 218415 - DNA, 25 bp, Probe Sequence
gcaattgatattgcctgctttgagc

SEQ ID NO: 218416 - DNA, 25 bp, Probe Sequence
gaattagatagtgcatcttctgagg

SEQ ID NO: 218417 - DNA, 25 bp, Probe Sequence
gaattggtcactgcatcttgtatcg

SEQ ID NO: 218418 - DNA, 25 bp, Probe Sequence
gaattgtgggctactttgtatctgg

SEQ ID NO: 218419 - DNA, 25 bp, Probe Sequence
gaatttgactgggctttgttgctgg

SEQ ID NO: 218420 - DNA, 25 bp, Probe Sequence
gaatttgactggttcacctgtgtac

SEQ ID NO: 218421 - DNA, 25 bp, Probe Sequence
gaatttagtagtccatgccttctca

SEQ ID NO: 218422 - DNA, 25 bp, Probe Sequence
gaatttgattcatgacatccatttc

SEQ ID NO: 218423 - DNA, 25 bp, Probe Sequence
gaatttgtgtttgctgcctctatct

SEQ ID NO: 218424 - DNA, 25 bp, Probe Sequence
gaattgaggatttggctgcgactta

SEQ ID NO: 218425 - DNA, 25 bp, Probe Sequence
gaatcagggatttgggagtctatgc

SEQ ID NO: 218426 - DNA, 25 bp, Probe Sequence
gaattcccattaatgagcagtcttc

SEQ ID NO: 218427 - DNA, 25 bp, Probe Sequence
gaattcccattaatgagcagtcttc

SEQ ID NO: 218428 - DNA, 25 bp, Probe Sequence
gaattcttgcccttaagtgcttttg

SEQ ID NO: 218429 - DNA, 25 bp, Probe Sequence
gaattttctccttagaagtattttg

SEQ ID NO: 218430 - DNA, 25 bp, Probe Sequence
gaatatcttccacagagggaagttt

SEQ ID NO: 218431 - DNA, 25 bp, Probe Sequence
gaattgcttgaactcaggaggcaga

SEQ ID NO: 218432 - DNA, 25 bp, Probe Sequence
gaattgcttgaacctggaaggcaga

SEQ ID NO: 218433 - DNA, 25 bp, Probe Sequence
gaattgcttgaacctgggaagtcga

SEQ ID NO: 218434 - DNA, 25 bp, Probe Sequence
gaattgcttgaacctgggaagtcga

SEQ ID NO: 218435 - DNA, 25 bp, Probe Sequence
gaattgcttgaacccagggggcaga

SEQ ID NO: 218436 - DNA, 25 bp, Probe Sequence
gaattgcttgaacccagggggcaga

SEQ ID NO: 218437 - DNA, 25 bp, Probe Sequence
gaattgcttgaacccaggaggcgga

SEQ ID NO: 218438 - DNA, 25 bp, Probe Sequence
gaattgcttgaacccaggaagtggc

SEQ ID NO: 218439 - DNA, 25 bp, Probe Sequence
gaattgcttgaacccaggaagtggc

SEQ ID NO: 218440 - DNA, 25 bp, Probe Sequence
gaattgcttaccaaaggctagtgcg

SEQ ID NO: 218441 - DNA, 25 bp, Probe Sequence
gaattgctgtatgagaaggtattta

SEQ ID NO: 218442 - DNA, 25 bp, Probe Sequence
gaatatgtttgtagagatactattt

SEQ ID NO: 218443 - DNA, 25 bp, Probe Sequence
gaatttgatctttgcaaactgtata

SEQ ID NO: 218444 - DNA, 25 bp, Probe Sequence
gaatttcacatttgtaactatgatt

SEQ ID NO: 218445 - DNA, 25 bp, Probe Sequence
gaattgtgcaatttgtagaacttta

SEQ ID NO: 218446 - DNA, 25 bp, Probe Sequence
gaattgctgtctatgattgtacttt

SEQ ID NO: 218447 - DNA, 25 bp, Probe Sequence
gaattgattcttatttcactgatac

SEQ ID NO: 218448 - DNA, 25 bp, Probe Sequence
gaattgatgttttcttgtgggcatc

SEQ ID NO: 218449 - DNA, 25 bp, Probe Sequence
gaatacttactatgtatcaggcatc

SEQ ID NO: 218450 - DNA, 25 bp, Probe Sequence
gaatttgtgacttagttctgccctt

SEQ ID NO: 218451 - DNA, 25 bp, Probe Sequence
gaatttgttgtattttctcccagta

SEQ ID NO: 218452 - DNA, 25 bp, Probe Sequence
gaatttgttgtattttctcccagta

SEQ ID NO: 218453 - DNA, 25 bp, Probe Sequence
gaattttagtactctgcatgccaca

SEQ ID NO: 218454 - DNA, 25 bp, Probe Sequence
gaatcttctagagagttgctgacca

SEQ ID NO: 218455 - DNA, 25 bp, Probe Sequence
gaattgtccagagcttcttgcagcc

SEQ ID NO: 218456 - DNA, 25 bp, Probe Sequence
gaattcagctaacgcttccagaccg

SEQ ID NO: 218457 - DNA, 25 bp, Probe Sequence
gaattagctcagagattggccccta

SEQ ID NO: 218458 - DNA, 25 bp, Probe Sequence
gaattcaaatgtacatgtggccctt

SEQ ID NO: 218459 - DNA, 25 bp, Probe Sequence
gaattacactgtactttcctctagg

SEQ ID NO: 218460 - DNA, 25 bp, Probe Sequence
gaatttcaaggcctttcacatctag

SEQ ID NO: 218461 - DNA, 25 bp, Probe Sequence
gaatttccagtgttcagtaaatagc

SEQ ID NO: 218462 - DNA, 25 bp, Probe Sequence
gaatttctcgttcatgttttagcaa

SEQ ID NO: 218463 - DNA, 25 bp, Probe Sequence
gaatttctctttagttctttgcaag

SEQ ID NO: 218464 - DNA, 25 bp, Probe Sequence
gaatttcctgtttgtgatctattat

SEQ ID NO: 218465 - DNA, 25 bp, Probe Sequence
gaattgattctaaggtgatgttctt

SEQ ID NO: 218466 - DNA, 25 bp, Probe Sequence
gaatatcatgccaaagaggagtgtc

SEQ ID NO: 218467 - DNA, 25 bp, Probe Sequence
gaatttggaagctagaatggtggga

SEQ ID NO: 218468 - DNA, 25 bp, Probe Sequence
gaatactcggaccagaagtcgggaa

SEQ ID NO: 218469 - DNA, 25 bp, Probe Sequence
gaatactcggaccagaagtcgggaa

SEQ ID NO: 218470 - DNA, 25 bp, Probe Sequence
gaatacacaggatttgaagtcagaa

SEQ ID NO: 218471 - DNA, 25 bp, Probe Sequence
gaatagacagggagaactcgtcggc

SEQ ID NO: 218472 - DNA, 25 bp, Probe Sequence
gaaaaccggaagggcctgatagccg

SEQ ID NO: 218473 - DNA, 25 bp, Probe Sequence
gaataaacggcaaagaggctatact

SEQ ID NO: 218474 - DNA, 25 bp, Probe Sequence
gaattttgggctaaggagcctggct

SEQ ID NO: 218475 - DNA, 25 bp, Probe Sequence
gaatttctaggaaacgtgcctttgt

SEQ ID NO: 218476 - DNA, 25 bp, Probe Sequence
gaattctgctatggcaaacatgtac

SEQ ID NO: 218477 - DNA, 25 bp, Probe Sequence
gaattctgtagaacagactgctaag

SEQ ID NO: 218478 - DNA, 25 bp, Probe Sequence
gaatttgtcagaaacctgcagggac

SEQ ID NO: 218479 - DNA, 25 bp, Probe Sequence
gaatttgaaatggaccctggggctt

SEQ ID NO: 218480 - DNA, 25 bp, Probe Sequence
gaattctaggcagcaccttagggag

SEQ ID NO: 218481 - DNA, 25 bp, Probe Sequence
gaattcgaggagcccttctggggcc

SEQ ID NO: 218482 - DNA, 25 bp, Probe Sequence
gaattccaggagcctgttcctgctt

SEQ ID NO: 218483 - DNA, 25 bp, Probe Sequence
gaattccaggagcctgttcctgctt

SEQ ID NO: 218484 - DNA, 25 bp, Probe Sequence
gaattgccgagaaatctagcacctt

SEQ ID NO: 218485 - DNA, 25 bp, Probe Sequence
gaatatgctccattatatcctcatc

SEQ ID NO: 218486 - DNA, 25 bp, Probe Sequence
gaattgcccgtttccatacagggtc

SEQ ID NO: 218487 - DNA, 25 bp, Probe Sequence
gaatgtcccagtctattcgggagtc

SEQ ID NO: 218488 - DNA, 25 bp, Probe Sequence
gaattcccagccccattggggagtg

SEQ ID NO: 218489 - DNA, 25 bp, Probe Sequence
gaattcccagagttcgaggtggtgg

SEQ ID NO: 218490 - DNA, 25 bp, Probe Sequence
gaatttccactttccaggtagatga

SEQ ID NO: 218491 - DNA, 25 bp, Probe Sequence
gaatttgcatacttacctagtgaaa

SEQ ID NO: 218492 - DNA, 25 bp, Probe Sequence
gaattgtaacactacacggtgtaca

SEQ ID NO: 218493 - DNA, 25 bp, Probe Sequence
gaatttgacaactcacaagctggaa

SEQ ID NO: 218494 - DNA, 25 bp, Probe Sequence
gaatattatatttcacaaggggata

SEQ ID NO: 218495 - DNA, 25 bp, Probe Sequence
gaatttgtgtgtaaacggggatatc

SEQ ID NO: 218496 - DNA, 25 bp, Probe Sequence
gaatcttttgcattgtacgtgggaa

SEQ ID NO: 218497 - DNA, 25 bp, Probe Sequence
gaatttcattatgtcacagtgatgc

SEQ ID NO: 218498 - DNA, 25 bp, Probe Sequence
gaattctatttgggcaagagatgcg

SEQ ID NO: 218499 - DNA, 25 bp, Probe Sequence
gaattctgtatcctggcaacagtca

SEQ ID NO: 218500 - DNA, 25 bp, Probe Sequence
gaattctgtgaatttcaacattatt

SEQ ID NO: 218501 - DNA, 25 bp, Probe Sequence
gaatttggaacaagtgtcactatat

SEQ ID NO: 218502 - DNA, 25 bp, Probe Sequence
gaatttgcaggtgaagacacttctg

SEQ ID NO: 218503 - DNA, 25 bp, Probe Sequence
gaatcttcaggacaaacacatctgg

SEQ ID NO: 218504 - DNA, 25 bp, Probe Sequence
gaattcaaggaccaattacctgctg

SEQ ID NO: 218505 - DNA, 25 bp, Probe Sequence
gaattcagagtgactagaagaccag

SEQ ID NO: 218506 - DNA, 25 bp, Probe Sequence
gaatctgaggtgataaatgttgttt

SEQ ID NO: 218507 - DNA, 25 bp, Probe Sequence
gaatctagtaatttatcagttttgt

SEQ ID NO: 218508 - DNA, 25 bp, Probe Sequence
gaatcctgtcacactacagtcattt

SEQ ID NO: 218509 - DNA, 25 bp, Probe Sequence
gaatccctacagccatggcaatatt

SEQ ID NO: 218510 - DNA, 25 bp, Probe Sequence
gaattactagtgccatctgaatgat

SEQ ID NO: 218511 - DNA, 25 bp, Probe Sequence
gaattgagtcaacttctgaagataa

SEQ ID NO: 218512 - DNA, 25 bp, Probe Sequence
gaattgcatccattcttctgaaata

SEQ ID NO: 218513 - DNA, 25 bp, Probe Sequence
gaatcgttcaatggttatactacta

SEQ ID NO: 218514 - DNA, 25 bp, Probe Sequence
gaattctacatcggtctaatctact

SEQ ID NO: 218515 - DNA, 25 bp, Probe Sequence
gaattcaatgcagcagcttaatttt

SEQ ID NO: 218516 - DNA, 25 bp, Probe Sequence
gaattactgcaatggtatatctgta

SEQ ID NO: 218517 - DNA, 25 bp, Probe Sequence
gaattcccagagtttcaattgtaaa

SEQ ID NO: 218518 - DNA, 25 bp, Probe Sequence
gaattccctagctggagaagtcaca

SEQ ID NO: 218519 - DNA, 25 bp, Probe Sequence
gaattcatactagagagaaacccta

SEQ ID NO: 218520 - DNA, 25 bp, Probe Sequence
gaatttcattagtataaagttccca

SEQ ID NO: 218521 - DNA, 25 bp, Probe Sequence
gaattttctctattatatatttccc

SEQ ID NO: 218522 - DNA, 25 bp, Probe Sequence
gaattttctctctataagtttctgt

SEQ ID NO: 218523 - DNA, 25 bp, Probe Sequence
gaattttgccactgaatgccttctt

SEQ ID NO: 218524 - DNA, 25 bp, Probe Sequence
gaatttttcaaggattgcactgagt

SEQ ID NO: 218525 - DNA, 25 bp, Probe Sequence
gaattcctatcataagtatctgtgt

SEQ ID NO: 218526 - DNA, 25 bp, Probe Sequence
gaattcactgttaacgtaagtatgc

SEQ ID NO: 218527 - DNA, 25 bp, Probe Sequence
gaattctgtgttaaccagaactcca

SEQ ID NO: 218528 - DNA, 25 bp, Probe Sequence
gaattcatgatgagacagtccaact

SEQ ID NO: 218529 - DNA, 25 bp, Probe Sequence
gaatatagagcaaagcaatccaaga

SEQ ID NO: 218530 - DNA, 25 bp, Probe Sequence
gaattcaggcattcacaagatgcag

SEQ ID NO: 218531 - DNA, 25 bp, Probe Sequence
gaatctgcactgaaatgtagacagc

SEQ ID NO: 218532 - DNA, 25 bp, Probe Sequence
gaatcgtagcaatgaagcgagcctt

SEQ ID NO: 218533 - DNA, 25 bp, Probe Sequence
gaatcagatcgagtccaaggcagcc

SEQ ID NO: 218534 - DNA, 25 bp, Probe Sequence
gaatcaactgatgccagcagaaagc

SEQ ID NO: 218535 - DNA, 25 bp, Probe Sequence
gaataactgatttgcacagctgaat

SEQ ID NO: 218536 - DNA, 25 bp, Probe Sequence
gaatgaaggtgatcctgtaaccctc

SEQ ID NO: 218537 - DNA, 25 bp, Probe Sequence
gaataacgtgtcctgctttggcaga

SEQ ID NO: 218538 - DNA, 25 bp, Probe Sequence
gaattttttcctaccattatggctt

SEQ ID NO: 218539 - DNA, 25 bp, Probe Sequence
gaatttttactatggcagatatggt

SEQ ID NO: 218540 - DNA, 25 bp, Probe Sequence
gaatttttacaaggtctacaggtga

SEQ ID NO: 218541 - DNA, 25 bp, Probe Sequence
gaaggctttaaaggccaagaaggca

SEQ ID NO: 218542 - DNA, 25 bp, Probe Sequence
gaaggattacggggcgctgaaagac

SEQ ID NO: 218543 - DNA, 25 bp, Probe Sequence
gaacgaccccgagtggtggaaatgc

SEQ ID NO: 218544 - DNA, 25 bp, Probe Sequence
gaattgccccaggagtgggagaaca

SEQ ID NO: 218545 - DNA, 25 bp, Probe Sequence
gaattccttcagggtgatgccaggt

SEQ ID NO: 218546 - DNA, 25 bp, Probe Sequence
gaatatgcactctgggttgcctgga

SEQ ID NO: 218547 - DNA, 25 bp, Probe Sequence
gaatatgaatgctgggcgtgttggc

SEQ ID NO: 218548 - DNA, 25 bp, Probe Sequence
gaatacacatgcaggacgttagact

SEQ ID NO: 218549 - DNA, 25 bp, Probe Sequence
gaatgaccagcaaaaggtttactaa

SEQ ID NO: 218550 - DNA, 25 bp, Probe Sequence
gaatcaacatatggtagggattaca

SEQ ID NO: 218551 - DNA, 25 bp, Probe Sequence
gaatagtatatcttttaatgtcaga

SEQ ID NO: 218552 - DNA, 25 bp, Probe Sequence
gaatacttaagcttgtacatgatct

SEQ ID NO: 218553 - DNA, 25 bp, Probe Sequence
gaattcctctatttgttcagatctc

SEQ ID NO: 218554 - DNA, 25 bp, Probe Sequence
gaattcctgttctagatctcagaca

SEQ ID NO: 218555 - DNA, 25 bp, Probe Sequence
gaattcctccaatgactcaagcaca

SEQ ID NO: 218556 - DNA, 25 bp, Probe Sequence
gaatactcttgcaatacctaaagca

SEQ ID NO: 218557 - DNA, 25 bp, Probe Sequence
gaataccctctttatataaatcaaa

SEQ ID NO: 218558 - DNA, 25 bp, Probe Sequence
gaatttccatgtcaacatagtccag

SEQ ID NO: 218559 - DNA, 25 bp, Probe Sequence
gaattcccggtattatgagtccact

SEQ ID NO: 218560 - DNA, 25 bp, Probe Sequence
gaattcccgggatcaagaccctact

SEQ ID NO: 218561 - DNA, 25 bp, Probe Sequence
gaattcccgggataaaccatcagcc

SEQ ID NO: 218562 - DNA, 25 bp, Probe Sequence
gaattcccgggatgataacaatgca

SEQ ID NO: 218563 - DNA, 25 bp, Probe Sequence
gaattcccgggataatgacttgaaa

SEQ ID NO: 218564 - DNA, 25 bp, Probe Sequence
gaattcccgggattgagtgagccaa

SEQ ID NO: 218565 - DNA, 25 bp, Probe Sequence
gaataccctgggtgtgtgcaaatac

SEQ ID NO: 218566 - DNA, 25 bp, Probe Sequence
gaataccctaagaccaataaatact

SEQ ID NO: 218567 - DNA, 25 bp, Probe Sequence
gaatacagcctatacccatactaac

SEQ ID NO: 218568 - DNA, 25 bp, Probe Sequence
gaatatactgtttacctcacactaa

SEQ ID NO: 218569 - DNA, 25 bp, Probe Sequence
gaatataaactgtacacataattat

SEQ ID NO: 218570 - DNA, 25 bp, Probe Sequence
gaatataaatgcctaatttcattct

SEQ ID NO: 218571 - DNA, 25 bp, Probe Sequence
gaatatcaatacctgcctttcataa

SEQ ID NO: 218572 - DNA, 25 bp, Probe Sequence
gaattaatgcacatccttatctcat

SEQ ID NO: 218573 - DNA, 25 bp, Probe Sequence
gaattcagtgaactcttttctcatt

SEQ ID NO: 218574 - DNA, 25 bp, Probe Sequence
gaattcaggatacaacttcttgtgt

SEQ ID NO: 218575 - DNA, 25 bp, Probe Sequence
gaattcagtataatacactactttc

SEQ ID NO: 218576 - DNA, 25 bp, Probe Sequence
gaattcaacataacaagctcattat

SEQ ID NO: 218577 - DNA, 25 bp, Probe Sequence
gaattaagcttaagggcagtatttc

SEQ ID NO: 218578 - DNA, 25 bp, Probe Sequence
gaactacgactacgggagctactcc

SEQ ID NO: 218579 - DNA, 25 bp, Probe Sequence
gaactacgactacgggagctactcc

SEQ ID NO: 218580 - DNA, 25 bp, Probe Sequence
gaactacgactacgggagctactcc

SEQ ID NO: 218581 - DNA, 25 bp, Probe Sequence
gaatttcgcaccctgacgattactc

SEQ ID NO: 218582 - DNA, 25 bp, Probe Sequence
gaatcaaccaatctgatctgcagta

SEQ ID NO: 218583 - DNA, 25 bp, Probe Sequence
gaatacccagagattgctgctgttc

SEQ ID NO: 218584 - DNA, 25 bp, Probe Sequence
gaatacttataaactgttgttcctg

SEQ ID NO: 218585 - DNA, 25 bp, Probe Sequence
gaatttcttaaggctaatattccat

SEQ ID NO: 218586 - DNA, 25 bp, Probe Sequence
gaattctcctaaagtactaatattt

SEQ ID NO: 218587 - DNA, 25 bp, Probe Sequence
gaatcttccctgaactaccaagttt

SEQ ID NO: 218588 - DNA, 25 bp, Probe Sequence
gaatcattaccttttaccagctttt

SEQ ID NO: 218589 - DNA, 25 bp, Probe Sequence
gaatcctaggtatataatcaccttt

SEQ ID NO: 218590 - DNA, 25 bp, Probe Sequence
gaatccgggcaattggggcccttgg

SEQ ID NO: 218591 - DNA, 25 bp, Probe Sequence
gaattcccgcaatgaaggccagggg

SEQ ID NO: 218592 - DNA, 25 bp, Probe Sequence
gaattcaccctatgacattgccttg

SEQ ID NO: 218593 - DNA, 25 bp, Probe Sequence
gaatttccactatatcaacctcatc

SEQ ID NO: 218594 - DNA, 25 bp, Probe Sequence
gaatttccctatcgataatctgtgc

SEQ ID NO: 218595 - DNA, 25 bp, Probe Sequence
gaatatatccctactgtctttgaca

SEQ ID NO: 218596 - DNA, 25 bp, Probe Sequence
gaattatgccagtactacattgtaa

SEQ ID NO: 218597 - DNA, 25 bp, Probe Sequence
gaatctgatccttaccctatgataa

SEQ ID NO: 218598 - DNA, 25 bp, Probe Sequence
gaatctgataaatagctctaaatac

SEQ ID NO: 218599 - DNA, 25 bp, Probe Sequence
gaatctatagttcactgacacagta

SEQ ID NO: 218600 - DNA, 25 bp, Probe Sequence
gaattatagtacccacacatgcaaa

SEQ ID NO: 218601 - DNA, 25 bp, Probe Sequence
gaatatgaaggcacaccactgaaat

SEQ ID NO: 218602 - DNA, 25 bp, Probe Sequence
gaattagaagtggacgcctgaatat

SEQ ID NO: 218603 - DNA, 25 bp, Probe Sequence
gaattaacaggctcacctagacatg

SEQ ID NO: 218604 - DNA, 25 bp, Probe Sequence
gaattaacagccttgccacgaacag

SEQ ID NO: 218605 - DNA, 25 bp, Probe Sequence
gaattcaacaaatccactgatgcat

SEQ ID NO: 218606 - DNA, 25 bp, Probe Sequence
gaattacaataatctcgccaatgct

SEQ ID NO: 218607 - DNA, 25 bp, Probe Sequence
gaattcaatattcacctgccagact

SEQ ID NO: 218608 - DNA, 25 bp, Probe Sequence
gaatctcgtgacaaaggcccaatct

SEQ ID NO: 218609 - DNA, 25 bp, Probe Sequence
gaatcattggtaatgagcgccggat

SEQ ID NO: 218610 - DNA, 25 bp, Probe Sequence
gaatatctgaggaaactgcacttga

SEQ ID NO: 218611 - DNA, 25 bp, Probe Sequence
gaatatctggatcaactacctgatt

SEQ ID NO: 218612 - DNA, 25 bp, Probe Sequence
gaatatcggattcatgcatcagttt

SEQ ID NO: 218613 - DNA, 25 bp, Probe Sequence
gaattcttgataaatgactgttttt

SEQ ID NO: 218614 - DNA, 25 bp, Probe Sequence
gaatacatcttaggggcgtttttgc

SEQ ID NO: 218615 - DNA, 25 bp, Probe Sequence
gaataattgatagggcagctgtttg

SEQ ID NO: 218616 - DNA, 25 bp, Probe Sequence
gaatacattgcgagggcctggtaca

SEQ ID NO: 218617 - DNA, 25 bp, Probe Sequence
gaatcgctctggtggatgggtgtac

SEQ ID NO: 218618 - DNA, 25 bp, Probe Sequence
gaatcgctctggtggatgggtgtac

SEQ ID NO: 218619 - DNA, 25 bp, Probe Sequence
gaatcatggttctgcagtctggtgt

SEQ ID NO: 218620 - DNA, 25 bp, Probe Sequence
gaatcggattcatcaacgttgactc

SEQ ID NO: 218621 - DNA, 25 bp, Probe Sequence
gaatcggattcatcaacgttgactc

SEQ ID NO: 218622 - DNA, 25 bp, Probe Sequence
gaatcttaactgtctacgttggctg

SEQ ID NO: 218623 - DNA, 25 bp, Probe Sequence
gaattttacatggtactcttgttga

SEQ ID NO: 218624 - DNA, 25 bp, Probe Sequence
gaatttggcacagttactcactttg

SEQ ID NO: 218625 - DNA, 25 bp, Probe Sequence
gaatttgagatctttcactcactag

SEQ ID NO: 218626 - DNA, 25 bp, Probe Sequence
gaatttagctgtatcaaactagtgc

SEQ ID NO: 218627 - DNA, 25 bp, Probe Sequence
gaattttctgctactaaaaactgcc

SEQ ID NO: 218628 - DNA, 25 bp, Probe Sequence
gaattactctgcctctaaagaatgt

SEQ ID NO: 218629 - DNA, 25 bp, Probe Sequence
gaatttccgtgaatagcaacaatgt

SEQ ID NO: 218630 - DNA, 25 bp, Probe Sequence
gaatttgtcgtgcctacaatcaaga

SEQ ID NO: 218631 - DNA, 25 bp, Probe Sequence
gaatttcttgtggctggttaataca

SEQ ID NO: 218632 - DNA, 25 bp, Probe Sequence
gaatttttgtagggattgaagccag

SEQ ID NO: 218633 - DNA, 25 bp, Probe Sequence
gaatctgtgttcaccgtggaaggcg

SEQ ID NO: 218634 - DNA, 25 bp, Probe Sequence
gaatttgtatcatgggaggtgggag

SEQ ID NO: 218635 - DNA, 25 bp, Probe Sequence
gaattcacatcctgggtgggacaga

SEQ ID NO: 218636 - DNA, 25 bp, Probe Sequence
gaatttacattttggtggcgaagat

SEQ ID NO: 218637 - DNA, 25 bp, Probe Sequence
gaatttccagcctggtgcgtacatt

SEQ ID NO: 218638 - DNA, 25 bp, Probe Sequence
gaatttctcacccactgtggttcac

SEQ ID NO: 218639 - DNA, 25 bp, Probe Sequence
gaatttcaagccttcgctagtctcc

SEQ ID NO: 218640 - DNA, 25 bp, Probe Sequence
gaatttgaagacatccgtgtccctc

SEQ ID NO: 218641 - DNA, 25 bp, Probe Sequence
gaatttgaagacatggtggctgaga

SEQ ID NO: 218642 - DNA, 25 bp, Probe Sequence
gaatttgcggatgctgaggaggatg

SEQ ID NO: 218643 - DNA, 25 bp, Probe Sequence
gaattctagtcagctgcaggcggga

SEQ ID NO: 218644 - DNA, 25 bp, Probe Sequence
gaatagccagtagtgtagtgcggtg

SEQ ID NO: 218645 - DNA, 25 bp, Probe Sequence
gaatagccagtagtgtagtgcggtg

SEQ ID NO: 218646 - DNA, 25 bp, Probe Sequence
gaatcactcaattcctattggagtg

SEQ ID NO: 218647 - DNA, 25 bp, Probe Sequence
gaatcactcaaacccaggaggcgga

SEQ ID NO: 218648 - DNA, 25 bp, Probe Sequence
gaatctccaaaagaggagtcatcaa

SEQ ID NO: 218649 - DNA, 25 bp, Probe Sequence
gaatctcatcaataaattagttcaa

SEQ ID NO: 218650 - DNA, 25 bp, Probe Sequence
gaatgttaataaatttcagtttagt

SEQ ID NO: 218651 - DNA, 25 bp, Probe Sequence
gaatttttgaattttcctagcatcg

SEQ ID NO: 218652 - DNA, 25 bp, Probe Sequence
gaataatttgtttctacctaatgct

SEQ ID NO: 218653 - DNA, 25 bp, Probe Sequence
gaatagtttgtcatccacttagtgt

SEQ ID NO: 218654 - DNA, 25 bp, Probe Sequence
gaattttttctattacttatggatc

SEQ ID NO: 218655 - DNA, 25 bp, Probe Sequence
gaattttttctgtagtgctgtatta

SEQ ID NO: 218656 - DNA, 25 bp, Probe Sequence
gaatatttattcttcagaggtaaca

SEQ ID NO: 218657 - DNA, 25 bp, Probe Sequence
gaatatttataacagtatgccaaca

SEQ ID NO: 218658 - DNA, 25 bp, Probe Sequence
gaatttaatcctcatgttccaaaac

SEQ ID NO: 218659 - DNA, 25 bp, Probe Sequence
gaatttaatgatgtctttccaaaaa

SEQ ID NO: 218660 - DNA, 25 bp, Probe Sequence
gaacttatgggggtcttcgcaaaag

SEQ ID NO: 218661 - DNA, 25 bp, Probe Sequence
gaacctgtagggtgttggcaaggac

SEQ ID NO: 218662 - DNA, 25 bp, Probe Sequence
gaaacgtgagggtgaggagcgggac

SEQ ID NO: 218663 - DNA, 25 bp, Probe Sequence
gaaactgtggggttagccacgcaac

SEQ ID NO: 218664 - DNA, 25 bp, Probe Sequence
gaaggctggggatataacaaacaaa

SEQ ID NO: 218665 - DNA, 25 bp, Probe Sequence
gaaggatcgggtagctcaaaagaag

SEQ ID NO: 218666 - DNA, 25 bp, Probe Sequence
gaatgaaccggcttgcatccggaaa

SEQ ID NO: 218667 - DNA, 25 bp, Probe Sequence
gaatgattccagcttatcgtaaata

SEQ ID NO: 218668 - DNA, 25 bp, Probe Sequence
gaatctctccagagttgcatgtaga

SEQ ID NO: 218669 - DNA, 25 bp, Probe Sequence
gaatctctggctatttattagaaag

SEQ ID NO: 218670 - DNA, 25 bp, Probe Sequence
gaatcactgttctgttaaagaagca

SEQ ID NO: 218671 - DNA, 25 bp, Probe Sequence
gaatcactgctcctagttcaaaggg

SEQ ID NO: 218672 - DNA, 25 bp, Probe Sequence
gaatcacaactgtatgtctatagga

SEQ ID NO: 218673 - DNA, 25 bp, Probe Sequence
gaatcagaattgtttcccatgaagc

SEQ ID NO: 218674 - DNA, 25 bp, Probe Sequence
gaatcatggttgttttgtctcacgt

SEQ ID NO: 218675 - DNA, 25 bp, Probe Sequence
gaatcagaatgtcttggttcaaatt

SEQ ID NO: 218676 - DNA, 25 bp, Probe Sequence
gaatatgcctctcttttcataaata

SEQ ID NO: 218677 - DNA, 25 bp, Probe Sequence
gaatcacccggagtgcttatcttaa

SEQ ID NO: 218678 - DNA, 25 bp, Probe Sequence
gaataacctgagactgtgtaattta

SEQ ID NO: 218679 - DNA, 25 bp, Probe Sequence
gaataacgcttggcggtcaaggatt

SEQ ID NO: 218680 - DNA, 25 bp, Probe Sequence
gaatttctcctggggctcagagtgt

SEQ ID NO: 218681 - DNA, 25 bp, Probe Sequence
gaatttctcctggggctcagagtgt

SEQ ID NO: 218682 - DNA, 25 bp, Probe Sequence
gaatttcatcctatgacattggctt

SEQ ID NO: 218683 - DNA, 25 bp, Probe Sequence
gaattataccatttactctgttttc

SEQ ID NO: 218684 - DNA, 25 bp, Probe Sequence
gaattacccatgtttattgtattta

SEQ ID NO: 218685 - DNA, 25 bp, Probe Sequence
gaattaaccaacttgttgcttaatg

SEQ ID NO: 218686 - DNA, 25 bp, Probe Sequence
gaatacaaccaatagtctttaagca

SEQ ID NO: 218687 - DNA, 25 bp, Probe Sequence
gaataccaacaatttgctcttcaaa

SEQ ID NO: 218688 - DNA, 25 bp, Probe Sequence
gaatacttaatatctcctctcttca

SEQ ID NO: 218689 - DNA, 25 bp, Probe Sequence
gaatatctgtattataaccattgtt

SEQ ID NO: 218690 - DNA, 25 bp, Probe Sequence
gaattttgatatcatacccagcatt

SEQ ID NO: 218691 - DNA, 25 bp, Probe Sequence
gaatattataagcatcccatatcaa

SEQ ID NO: 218692 - DNA, 25 bp, Probe Sequence
gaatattaacgcgttcgcagttgca

SEQ ID NO: 218693 - DNA, 25 bp, Probe Sequence
gaatcagtaagtgtaaggtgtactt

SEQ ID NO: 218694 - DNA, 25 bp, Probe Sequence
gaatctcaaagtgaaaggaccagtt

SEQ ID NO: 218695 - DNA, 25 bp, Probe Sequence
gaatatcaacaagaatagggccatt

SEQ ID NO: 218696 - DNA, 25 bp, Probe Sequence
gaatatcaaacagattggcaccttt

SEQ ID NO: 218697 - DNA, 25 bp, Probe Sequence
gaatattaaaaggtggactctttat

SEQ ID NO: 218698 - DNA, 25 bp, Probe Sequence
gaatttaattggatgcagtctgtat

SEQ ID NO: 218699 - DNA, 25 bp, Probe Sequence
gaattttatatttatgcagttgtac

SEQ ID NO: 218700 - DNA, 25 bp, Probe Sequence
gaatttaaggtcttcatgtttaaag

SEQ ID NO: 218701 - DNA, 25 bp, Probe Sequence
gaatttaccttctagcgttatagta

SEQ ID NO: 218702 - DNA, 25 bp, Probe Sequence
gaatcttggccgtccaggttatgga

SEQ ID NO: 218703 - DNA, 25 bp, Probe Sequence
gaatcctggctcagcgggagtttga

SEQ ID NO: 218704 - DNA, 25 bp, Probe Sequence
gaatccccattccagcagtagattt

SEQ ID NO: 218705 - DNA, 25 bp, Probe Sequence
gaactcaccattccaaacgatttga

SEQ ID NO: 218706 - DNA, 25 bp, Probe Sequence
gaatctacgtgtccaatgacgacat

SEQ ID NO: 218707 - DNA, 25 bp, Probe Sequence
gaattatctgtgaaccatacgtgat

SEQ ID NO: 218708 - DNA, 25 bp, Probe Sequence
gaatattcgtgcaaaaatcctcaac

SEQ ID NO: 218709 - DNA, 25 bp, Probe Sequence
gaatcctcttgagaagactctctac

SEQ ID NO: 218710 - DNA, 25 bp, Probe Sequence
gaatacctgggcaaagatgttcttc

SEQ ID NO: 218711 - DNA, 25 bp, Probe Sequence
gaatcacttgaggccaggagttcgg

SEQ ID NO: 218712 - DNA, 25 bp, Probe Sequence
gaatcagctgaaccaagccagttgg

SEQ ID NO: 218713 - DNA, 25 bp, Probe Sequence
gaatagcatcgacatcacgagaagg

SEQ ID NO: 218714 - DNA, 25 bp, Probe Sequence
gaatcagatcgtcacactctactgc

SEQ ID NO: 218715 - DNA, 25 bp, Probe Sequence
gaatctctggtcactcattgacagg

SEQ ID NO: 218716 - DNA, 25 bp, Probe Sequence
gaatttggctgcattatggaaggct

SEQ ID NO: 218717 - DNA, 25 bp, Probe Sequence
gaatttgctggacgtttgaactctg

SEQ ID NO: 218718 - DNA, 25 bp, Probe Sequence
gaattagtaactgtatgaagtcata

SEQ ID NO: 218719 - DNA, 25 bp, Probe Sequence
gaattagatgttaggttggagacag

SEQ ID NO: 218720 - DNA, 25 bp, Probe Sequence
gaattatatctattgtgtctgtgaa

SEQ ID NO: 218721 - DNA, 25 bp, Probe Sequence
gaattatgctcttatgtgaagtaaa

SEQ ID NO: 218722 - DNA, 25 bp, Probe Sequence
gaatttgcattccatggtgttaaca

SEQ ID NO: 218723 - DNA, 25 bp, Probe Sequence
gaattatgattctattttctcaata

SEQ ID NO: 218724 - DNA, 25 bp, Probe Sequence
gaatctgtgtattttttcaagagag

SEQ ID NO: 218725 - DNA, 25 bp, Probe Sequence
gaatttttttatcctgcagagcaag

SEQ ID NO: 218726 - DNA, 25 bp, Probe Sequence
gaatctaagtctgcacctgcaagca

SEQ ID NO: 218727 - DNA, 25 bp, Probe Sequence
gaatattagatttcctcatgataca

SEQ ID NO: 218728 - DNA, 25 bp, Probe Sequence
gaatactgcaactatcctctgaaga

SEQ ID NO: 218729 - DNA, 25 bp, Probe Sequence
gaatacacagaactctgctcagacg

SEQ ID NO: 218730 - DNA, 25 bp, Probe Sequence
gaatacaagcattccatgtacacat

SEQ ID NO: 218731 - DNA, 25 bp, Probe Sequence
gaatgactatctggacatctatgcc

SEQ ID NO: 218732 - DNA, 25 bp, Probe Sequence
gaatactattgttcgatacctggga

SEQ ID NO: 218733 - DNA, 25 bp, Probe Sequence
gaatcatgatctatacgcaaccgga

SEQ ID NO: 218734 - DNA, 25 bp, Probe Sequence
gaatctgacatcatgacaacaaatg

SEQ ID NO: 218735 - DNA, 25 bp, Probe Sequence
gaatctgcaacaactttcaaggtcc

SEQ ID NO: 218736 - DNA, 25 bp, Probe Sequence
gaatctggatcaaccttgaaaaaat

SEQ ID NO: 218737 - DNA, 25 bp, Probe Sequence
gaatcaggcactgctcgcagaagga

SEQ ID NO: 218738 - DNA, 25 bp, Probe Sequence
gaatagctgactgtcccaattaaca

SEQ ID NO: 218739 - DNA, 25 bp, Probe Sequence
gaatacaggctttcctcaattcaaa

SEQ ID NO: 218740 - DNA, 25 bp, Probe Sequence
gaatcacatagattctcctccgtca

SEQ ID NO: 218741 - DNA, 25 bp, Probe Sequence
gaataagaatttgcatacttaccta

SEQ ID NO: 218742 - DNA, 25 bp, Probe Sequence
gaataagcacctatggacttccagc

SEQ ID NO: 218743 - DNA, 25 bp, Probe Sequence
gaatcagagactccttgagacccca

SEQ ID NO: 218744 - DNA, 25 bp, Probe Sequence
gaatcagtcactactggaactgcac

SEQ ID NO: 218745 - DNA, 25 bp, Probe Sequence
gaatatgctgcactttacaaccact

SEQ ID NO: 218746 - DNA, 25 bp, Probe Sequence
gaataggagattagagaaatatgct

SEQ ID NO: 218747 - DNA, 25 bp, Probe Sequence
gaatcatgtggaggggccagaggct

SEQ ID NO: 218748 - DNA, 25 bp, Probe Sequence
gaatcatgccgtggtgtctcggatg

SEQ ID NO: 218749 - DNA, 25 bp, Probe Sequence
gaatatgctgtggggtactggatac

SEQ ID NO: 218750 - DNA, 25 bp, Probe Sequence
gaatagtctgggctagatacatcac

SEQ ID NO: 218751 - DNA, 25 bp, Probe Sequence
gaataactgggacgtgtgcgcagac

SEQ ID NO: 218752 - DNA, 25 bp, Probe Sequence
gaaggaatgggaccttctaatctct

SEQ ID NO: 218753 - DNA, 25 bp, Probe Sequence
gaatatggatcgccagtctttacat

SEQ ID NO: 218754 - DNA, 25 bp, Probe Sequence
gaatctgtctcccagttatgaatca

SEQ ID NO: 218755 - DNA, 25 bp, Probe Sequence
gaatcgtgtcctatttaactttgtg

SEQ ID NO: 218756 - DNA, 25 bp, Probe Sequence
gactctcctaacactaaactgcttg

SEQ ID NO: 218757 - DNA, 25 bp, Probe Sequence
gaatgcccagaaaagccaaactctt

SEQ ID NO: 218758 - DNA, 25 bp, Probe Sequence
gaatcattaaatgcatgccaaagcc

SEQ ID NO: 218759 - DNA, 25 bp, Probe Sequence
gaatttcaatgagcgccaacagatt

SEQ ID NO: 218760 - DNA, 25 bp, Probe Sequence
gaatattgtgtcaaccagaaagatt

SEQ ID NO: 218761 - DNA, 25 bp, Probe Sequence
gaatctactggctaccacaaaatta

SEQ ID NO: 218762 - DNA, 25 bp, Probe Sequence
gaatctgaaatctaccaagacaatt

SEQ ID NO: 218763 - DNA, 25 bp, Probe Sequence
gaatctgataataaccggaatagct

SEQ ID NO: 218764 - DNA, 25 bp, Probe Sequence
gaatctgtcattataccagaaagtt

SEQ ID NO: 218765 - DNA, 25 bp, Probe Sequence
gaatcgctgtttcatgtgcaggaag

SEQ ID NO: 218766 - DNA, 25 bp, Probe Sequence
gaatcgctgtttcatgtgcaggaag

SEQ ID NO: 218767 - DNA, 25 bp, Probe Sequence
gaatagctctgttgtgatggggtca

SEQ ID NO: 218768 - DNA, 25 bp, Probe Sequence
gaatagcttgaacctgggaagcaga

SEQ ID NO: 218769 - DNA, 25 bp, Probe Sequence
gaatcgccgaaaagcggagcggaag

SEQ ID NO: 218770 - DNA, 25 bp, Probe Sequence
gaatccgtgaaggaggcccaggaga

SEQ ID NO: 218771 - DNA, 25 bp, Probe Sequence
gaatccgtgaaggaggcccaggaga

SEQ ID NO: 218772 - DNA, 25 bp, Probe Sequence
gaatcaaatgggagccctccagaca

SEQ ID NO: 218773 - DNA, 25 bp, Probe Sequence
gaataagtggagagaccccctgaac

SEQ ID NO: 218774 - DNA, 25 bp, Probe Sequence
gaagaagaggcgagaacgacccccg

SEQ ID NO: 218775 - DNA, 25 bp, Probe Sequence
gatcgccaaggtcttcaagaacccc

SEQ ID NO: 218776 - DNA, 25 bp, Probe Sequence
gattacaaacccacaaggagtccct

SEQ ID NO: 218777 - DNA, 25 bp, Probe Sequence
gaacctacaaactcaagagagtccc

SEQ ID NO: 218778 - DNA, 25 bp, Probe Sequence
gaatccggacaatgacgagaggccc

SEQ ID NO: 218779 - DNA, 25 bp, Probe Sequence
gaatctcggaaattactcaaaccat

SEQ ID NO: 218780 - DNA, 25 bp, Probe Sequence
gaatcttagattttagacaaactca

SEQ ID NO: 218781 - DNA, 25 bp, Probe Sequence
gaatcttcacaatttggtcaaactg

SEQ ID NO: 218782 - DNA, 25 bp, Probe Sequence
gaatctcacaaatgtttgccatgac

SEQ ID NO: 218783 - DNA, 25 bp, Probe Sequence
gaatccaaatacccgtgtcatgaac

SEQ ID NO: 218784 - DNA, 25 bp, Probe Sequence
gaatgcacaagaaccacaattaaga

SEQ ID NO: 218785 - DNA, 25 bp, Probe Sequence
gaatcactgtgaacgcaaatgagta

SEQ ID NO: 218786 - DNA, 25 bp, Probe Sequence
gaatgcactggcagggatcaggtgt

SEQ ID NO: 218787 - DNA, 25 bp, Probe Sequence
gaatcacagatgtggaatatttgtc

SEQ ID NO: 218788 - DNA, 25 bp, Probe Sequence
gaatcacagaaacactttttatata

SEQ ID NO: 218789 - DNA, 25 bp, Probe Sequence
gaatccaaaattccatcttcttttc

SEQ ID NO: 218790 - DNA, 25 bp, Probe Sequence
gaatcacttaataccgtatcttcta

SEQ ID NO: 218791 - DNA, 25 bp, Probe Sequence
gaatcatttaataccgtgtcttcta

SEQ ID NO: 218792 - DNA, 25 bp, Probe Sequence
gaattttcagatattggtccatgat

SEQ ID NO: 218793 - DNA, 25 bp, Probe Sequence
gaatctttgagcaaattttctcagt

SEQ ID NO: 218794 - DNA, 25 bp, Probe Sequence
gaatttgggataatttttctatatt

SEQ ID NO: 218795 - DNA, 25 bp, Probe Sequence
gaatctaggagctgattttttgaaa

SEQ ID NO: 218796 - DNA, 25 bp, Probe Sequence
gaatctacaacatgatgcctcttgt

SEQ ID NO: 218797 - DNA, 25 bp, Probe Sequence
gaatccaaccttagctgctttgctc

SEQ ID NO: 218798 - DNA, 25 bp, Probe Sequence
gaatccagactcttcctggactggc

SEQ ID NO: 218799 - DNA, 25 bp, Probe Sequence
gaatccagactcttcctggactggc

SEQ ID NO: 218800 - DNA, 25 bp, Probe Sequence
gaatccagactcttcctggactggc

SEQ ID NO: 218801 - DNA, 25 bp, Probe Sequence
gaatcatgaacctctgaggactcag

SEQ ID NO: 218802 - DNA, 25 bp, Probe Sequence
gaatcatggacggacagaggatgca

SEQ ID NO: 218803 - DNA, 25 bp, Probe Sequence
gaatatgccaagtacagatagtgag

SEQ ID NO: 218804 - DNA, 25 bp, Probe Sequence
gaatatgcctgttcctgtgatgtgg

SEQ ID NO: 218805 - DNA, 25 bp, Probe Sequence
gaatatgcactgtccatcatgttta

SEQ ID NO: 218806 - DNA, 25 bp, Probe Sequence
gaatatcctcatgcagctttatgaa

SEQ ID NO: 218807 - DNA, 25 bp, Probe Sequence
gaatatctgctctctgttagatctc

SEQ ID NO: 218808 - DNA, 25 bp, Probe Sequence
gaatatccgatgctttgaatcatgc

SEQ ID NO: 218809 - DNA, 25 bp, Probe Sequence
gaatttcgatgcctatgtgagcacc

SEQ ID NO: 218810 - DNA, 25 bp, Probe Sequence
gaatttgtcacgactgtgcagcagc

SEQ ID NO: 218811 - DNA, 25 bp, Probe Sequence
gaatcatctgatgtatgctgtgaga

SEQ ID NO: 218812 - DNA, 25 bp, Probe Sequence
gaatcatgcgctgtgatgttattgc

SEQ ID NO: 218813 - DNA, 25 bp, Probe Sequence
gaatctgcaccaagatgtttagctt

SEQ ID NO: 218814 - DNA, 25 bp, Probe Sequence
gaatttctcaattgtatctagttaa

SEQ ID NO: 218815 - DNA, 25 bp, Probe Sequence
gaatctctatactgtactaatttac

SEQ ID NO: 218816 - DNA, 25 bp, Probe Sequence
gaatgttcacactggttaatctttt

SEQ ID NO: 218817 - DNA, 25 bp, Probe Sequence
gaatattgccacagagttcattgct

SEQ ID NO: 218818 - DNA, 25 bp, Probe Sequence
gaataagcctcccatttcaagcttc

SEQ ID NO: 218819 - DNA, 25 bp, Probe Sequence
gaataaccacatactttccatctac

SEQ ID NO: 218820 - DNA, 25 bp, Probe Sequence
gaatttccataacttttcttatctg

SEQ ID NO: 218821 - DNA, 25 bp, Probe Sequence
gaatcattactctatgttgttttac

SEQ ID NO: 218822 - DNA, 25 bp, Probe Sequence
gaatattattagtctgcatggttaa

SEQ ID NO: 218823 - DNA, 25 bp, Probe Sequence
gaatttgtcaagtctcaggttatca

SEQ ID NO: 218824 - DNA, 25 bp, Probe Sequence
gaatttccagaatgcaggttctaaa

SEQ ID NO: 218825 - DNA, 25 bp, Probe Sequence
gaatcttccaacaggagtgcctagt

SEQ ID NO: 218826 - DNA, 25 bp, Probe Sequence
gaatgcttccaaaagagcccagtgg

SEQ ID NO: 218827 - DNA, 25 bp, Probe Sequence
gaatcatttgccaaaagcccaaggc

SEQ ID NO: 218828 - DNA, 25 bp, Probe Sequence
gaatgctttgttacagacccaagct

SEQ ID NO: 218829 - DNA, 25 bp, Probe Sequence
gacgtccgctttggagaactacatc

SEQ ID NO: 218830 - DNA, 25 bp, Probe Sequence
gaaggccgtcctggagaaaactgac

SEQ ID NO: 218831 - DNA, 25 bp, Probe Sequence
gaatggacgtgctgggaccaactca

SEQ ID NO: 218832 - DNA, 25 bp, Probe Sequence
gaagtgaggatgagacccagcccct

SEQ ID NO: 218833 - DNA, 25 bp, Probe Sequence
gaagctaggagttggagtcccgcct

SEQ ID NO: 218834 - DNA, 25 bp, Probe Sequence
gaagaagaagtacaacgcgcggttc

SEQ ID NO: 218835 - DNA, 25 bp, Probe Sequence
gaagtaaagaaacagacccgcttct

SEQ ID NO: 218836 - DNA, 25 bp, Probe Sequence
gaaatggaatactgaagggcccttc

SEQ ID NO: 218837 - DNA, 25 bp, Probe Sequence
gaaatagaacctgtagggtgttggc

SEQ ID NO: 218838 - DNA, 25 bp, Probe Sequence
gaacaaggccctgaggggttggtct

SEQ ID NO: 218839 - DNA, 25 bp, Probe Sequence
gacggggctcctgaggggtacaggt

SEQ ID NO: 218840 - DNA, 25 bp, Probe Sequence
gtcagggggccggtgaaggtcctgg

SEQ ID NO: 218841 - DNA, 25 bp, Probe Sequence
gaaggggagtccgaactagtctcag

SEQ ID NO: 218842 - DNA, 25 bp, Probe Sequence
gaaggaggaacccaagtagctttgt

SEQ ID NO: 218843 - DNA, 25 bp, Probe Sequence
gaatcaaaacccacagtccattgtg

SEQ ID NO: 218844 - DNA, 25 bp, Probe Sequence
gaataaattcccaacttctcttgct

SEQ ID NO: 218845 - DNA, 25 bp, Probe Sequence
gaataacattctgtagttcctaaaa

SEQ ID NO: 218846 - DNA, 25 bp, Probe Sequence
gaataccactctgtaattgcaaaaa

SEQ ID NO: 218847 - DNA, 25 bp, Probe Sequence
gaatacacatctctgtcagtgtgaa

SEQ ID NO: 218848 - DNA, 25 bp, Probe Sequence
gaatatccacaaattcagtgcccaa

SEQ ID NO: 218849 - DNA, 25 bp, Probe Sequence
gaatcccaataatagtcccacaggg

SEQ ID NO: 218850 - DNA, 25 bp, Probe Sequence
gaatcccaggtaggaacctccagta

SEQ ID NO: 218851 - DNA, 25 bp, Probe Sequence
gaatccgggtggcagaggctacagt

SEQ ID NO: 218852 - DNA, 25 bp, Probe Sequence
gaatttggagggcaggcacgaagaa

SEQ ID NO: 218853 - DNA, 25 bp, Probe Sequence
gaatctgggtgggaagacaggacag

SEQ ID NO: 218854 - DNA, 25 bp, Probe Sequence
gaatcaggcgattgaagaactcgag

SEQ ID NO: 218855 - DNA, 25 bp, Probe Sequence
gaatcaatctgtcaaggaaggatgg

SEQ ID NO: 218856 - DNA, 25 bp, Probe Sequence
gaatgagtccctttggaaggaggtg

SEQ ID NO: 218857 - DNA, 25 bp, Probe Sequence
gaatctgcccctgttgaggtgggtg

SEQ ID NO: 218858 - DNA, 25 bp, Probe Sequence
gaatatgcgcacctcgtggggtggt

SEQ ID NO: 218859 - DNA, 25 bp, Probe Sequence
gaatatctccctgcgagtgttgtct

SEQ ID NO: 218860 - DNA, 25 bp, Probe Sequence
gaatgagtcccagagagtcgttcgg

SEQ ID NO: 218861 - DNA, 25 bp, Probe Sequence
gaatcactcccaggtggtgagcatt

SEQ ID NO: 218862 - DNA, 25 bp, Probe Sequence
gaatcctcctacttgagacactgta

SEQ ID NO: 218863 - DNA, 25 bp, Probe Sequence
gaatcgctactggaaggagcaccac

SEQ ID NO: 218864 - DNA, 25 bp, Probe Sequence
gaatcagtaacaccattgagaccac

SEQ ID NO: 218865 - DNA, 25 bp, Probe Sequence
gaatctgaaaacaatggaaccatgc

SEQ ID NO: 218866 - DNA, 25 bp, Probe Sequence
gaatctgagacatcttgcctacttt

SEQ ID NO: 218867 - DNA, 25 bp, Probe Sequence
gaatctaaagcactcgtctactgtt

SEQ ID NO: 218868 - DNA, 25 bp, Probe Sequence
gaatatatgaagccagctgttactg

SEQ ID NO: 218869 - DNA, 25 bp, Probe Sequence
gaatatgctgaatagtgctttggct

SEQ ID NO: 218870 - DNA, 25 bp, Probe Sequence
gaatcatcgatctatagttgttggc

SEQ ID NO: 218871 - DNA, 25 bp, Probe Sequence
gaatcaggcctgaagtacgtggctg

SEQ ID NO: 218872 - DNA, 25 bp, Probe Sequence
gaatccgccagttggagcgtgcgat

SEQ ID NO: 218873 - DNA, 25 bp, Probe Sequence
gaatcatcagccttggtcagaatgc

SEQ ID NO: 218874 - DNA, 25 bp, Probe Sequence
gaatcatcccatcagataatatctg

SEQ ID NO: 218875 - DNA, 25 bp, Probe Sequence
gaatcttccagcttgatatctgatc

SEQ ID NO: 218876 - DNA, 25 bp, Probe Sequence
gaatcgttgcaggtgagtccatcag

SEQ ID NO: 218877 - DNA, 25 bp, Probe Sequence
gaatcttcaaggacagaccacagta

SEQ ID NO: 218878 - DNA, 25 bp, Probe Sequence
gaatcatcaaagctcacaccaaatt

SEQ ID NO: 218879 - DNA, 25 bp, Probe Sequence
gaatgccaaactagctcacctattt

SEQ ID NO: 218880 - DNA, 25 bp, Probe Sequence
gaatgaacatactcaccctagttag

SEQ ID NO: 218881 - DNA, 25 bp, Probe Sequence
gaatgaagaactgtggcctaattgg

SEQ ID NO: 218882 - DNA, 25 bp, Probe Sequence
gaatcaaagactgtctctattattt

SEQ ID NO: 218883 - DNA, 25 bp, Probe Sequence
gaatattcgcacgtgtatttttttg

SEQ ID NO: 218884 - DNA, 25 bp, Probe Sequence
gaatattctccaggatcatatgtta

SEQ ID NO: 218885 - DNA, 25 bp, Probe Sequence
gaatttgggcagatatagcattaat

SEQ ID NO: 218886 - DNA, 25 bp, Probe Sequence
gaatttgggctgctgtagcctattt

SEQ ID NO: 218887 - DNA, 25 bp, Probe Sequence
gaatgattggcctgttaacatttat

SEQ ID NO: 218888 - DNA, 25 bp, Probe Sequence
gaatgttggttttaatacttgattt

SEQ ID NO: 218889 - DNA, 25 bp, Probe Sequence
gaatgttggttttaatacttgattt

SEQ ID NO: 218890 - DNA, 25 bp, Probe Sequence
gaatatctgttaattattacagtgt

SEQ ID NO: 218891 - DNA, 25 bp, Probe Sequence
gaatagcttcatatgtttacacgtt

SEQ ID NO: 218892 - DNA, 25 bp, Probe Sequence
gaatagtctctaattactacctctt

SEQ ID NO: 218893 - DNA, 25 bp, Probe Sequence
gaataatcctgaagaatcccacata

SEQ ID NO: 218894 - DNA, 25 bp, Probe Sequence
gaatatattctacttttccatgcaa

SEQ ID NO: 218895 - DNA, 25 bp, Probe Sequence
gaatatgattctaatctctgttcca

SEQ ID NO: 218896 - DNA, 25 bp, Probe Sequence
gaatagatgtatacagtctggatgc

SEQ ID NO: 218897 - DNA, 25 bp, Probe Sequence
gaatcaatggataagcgtgggtgga

SEQ ID NO: 218898 - DNA, 25 bp, Probe Sequence
gaatagatctggatatgggtgtgga

SEQ ID NO: 218899 - DNA, 25 bp, Probe Sequence
gaatagtgcattagtttgcctggag

SEQ ID NO: 218900 - DNA, 25 bp, Probe Sequence
gaatagtgctttggcttgtcgaatg

SEQ ID NO: 218901 - DNA, 25 bp, Probe Sequence
gaaggccttatccatttcgattgtg

SEQ ID NO: 218902 - DNA, 25 bp, Probe Sequence
gaatgaccttatctgtttcctggat

SEQ ID NO: 218903 - DNA, 25 bp, Probe Sequence
gaatgacagggatttacttccggtt

SEQ ID NO: 218904 - DNA, 25 bp, Probe Sequence
gaatgaaggtaactacgttttgcac

SEQ ID NO: 218905 - DNA, 25 bp, Probe Sequence
gaagaaggaacgtccagatttctaa

SEQ ID NO: 218906 - DNA, 25 bp, Probe Sequence
gaataagggcccgatgcagcatttt

SEQ ID NO: 218907 - DNA, 25 bp, Probe Sequence
gaatataaagccccagaatgtccct

SEQ ID NO: 218908 - DNA, 25 bp, Probe Sequence
gaatcatgttagcccatcagaatgt

SEQ ID NO: 218909 - DNA, 25 bp, Probe Sequence
gaatcaatgtagcctcttaatccca

SEQ ID NO: 218910 - DNA, 25 bp, Probe Sequence
gaatcagttcagacagctgtattcc

SEQ ID NO: 218911 - DNA, 25 bp, Probe Sequence
gaatcagtcactacgattatttcgg

SEQ ID NO: 218912 - DNA, 25 bp, Probe Sequence
gaatgctgcgacaagcagatttttg

SEQ ID NO: 218913 - DNA, 25 bp, Probe Sequence
gaatccgaggcattgatatcattaa

SEQ ID NO: 218914 - DNA, 25 bp, Probe Sequence
gaatccgcagactcatgtcattgaa

SEQ ID NO: 218915 - DNA, 25 bp, Probe Sequence
gaatcctgctttacaggatcatgta

SEQ ID NO: 218916 - DNA, 25 bp, Probe Sequence
gaatcctgctatggtaccattctaa

SEQ ID NO: 218917 - DNA, 25 bp, Probe Sequence
gaatcatagcttctacctcagctac

SEQ ID NO: 218918 - DNA, 25 bp, Probe Sequence
gaatcagtggttcatcaccagccac

SEQ ID NO: 218919 - DNA, 25 bp, Probe Sequence
gaatactggctttggcactactagt

SEQ ID NO: 218920 - DNA, 25 bp, Probe Sequence
gaatatgtggctaatctccttaagt

SEQ ID NO: 218921 - DNA, 25 bp, Probe Sequence
gaatcagatagaattttctttagta

SEQ ID NO: 218922 - DNA, 25 bp, Probe Sequence
gaatagatacttcttcataaaacat

SEQ ID NO: 218923 - DNA, 25 bp, Probe Sequence
gaatcaggacctcactcagaaagac

SEQ ID NO: 218924 - DNA, 25 bp, Probe Sequence
gaatcaggacctcactcagaaagac

SEQ ID NO: 218925 - DNA, 25 bp, Probe Sequence
gaataggagcccatgctagaagtac

SEQ ID NO: 218926 - DNA, 25 bp, Probe Sequence
gaatagacagtcagtccgcaagata

SEQ ID NO: 218927 - DNA, 25 bp, Probe Sequence
gactcgaaaattgtccaagaagcca

SEQ ID NO: 218928 - DNA, 25 bp, Probe Sequence
gactcgggctttgtcctcaaagagt

SEQ ID NO: 218929 - DNA, 25 bp, Probe Sequence
gaatcagggttaggctccatattta

SEQ ID NO: 218930 - DNA, 25 bp, Probe Sequence
gaatcaggcggatggtcgttaacaa

SEQ ID NO: 218931 - DNA, 25 bp, Probe Sequence
gaatgctgtttgtggtacttaagaa

SEQ ID NO: 218932 - DNA, 25 bp, Probe Sequence
gaatctgtattgttcttactgaaac

SEQ ID NO: 218933 - DNA, 25 bp, Probe Sequence
gaatcgtatcgtatgtccgctatcc

SEQ ID NO: 218934 - DNA, 25 bp, Probe Sequence
gaatcaaatcgaaggtgaagccacc

SEQ ID NO: 218935 - DNA, 25 bp, Probe Sequence
gaataacacagaagttgtcaccact

SEQ ID NO: 218936 - DNA, 25 bp, Probe Sequence
gaatctactgagagccgtcaggcct

SEQ ID NO: 218937 - DNA, 25 bp, Probe Sequence
gaatcaagccagggccgttggctta

SEQ ID NO: 218938 - DNA, 25 bp, Probe Sequence
gaatgcaataggggcctgctgtggc

SEQ ID NO: 218939 - DNA, 25 bp, Probe Sequence
gaatcaatctggcttctgcattact

SEQ ID NO: 218940 - DNA, 25 bp, Probe Sequence
gaataagcggtgttcatgatttctt

SEQ ID NO: 218941 - DNA, 25 bp, Probe Sequence
gaataagcgatatttattatctgca

SEQ ID NO: 218942 - DNA, 25 bp, Probe Sequence
gaatatgcaggctaatttgtacaga

SEQ ID NO: 218943 - DNA, 25 bp, Probe Sequence
gaagagggtaatctggaagagtttc

SEQ ID NO: 218944 - DNA, 25 bp, Probe Sequence
gaatgcatgggttatttggtaggtt

SEQ ID NO: 218945 - DNA, 25 bp, Probe Sequence
gaatgcatatttttttacctggttg

SEQ ID NO: 218946 - DNA, 25 bp, Probe Sequence
gaatattttatctttccttggcttt

SEQ ID NO: 218947 - DNA, 25 bp, Probe Sequence
gaatattttatctttccttggcttt

SEQ ID NO: 218948 - DNA, 25 bp, Probe Sequence
gaatattttatacgtctccttgttt

SEQ ID NO: 218949 - DNA, 25 bp, Probe Sequence
gaatctcattatgacttcaccatct

SEQ ID NO: 218950 - DNA, 25 bp, Probe Sequence
gaatcaatcataaaatgcacacctt

SEQ ID NO: 218951 - DNA, 25 bp, Probe Sequence
gaatagacatcaaactcaatgcttt

SEQ ID NO: 218952 - DNA, 25 bp, Probe Sequence
gaatagaattgcactcagaacttat

SEQ ID NO: 218953 - DNA, 25 bp, Probe Sequence
gaatatctcttgatatagaattttt

SEQ ID NO: 218954 - DNA, 25 bp, Probe Sequence
gaatctcaatctcttgaaatttatt

SEQ ID NO: 218955 - DNA, 25 bp, Probe Sequence
gaatcagatattccttcacctttga

SEQ ID NO: 218956 - DNA, 25 bp, Probe Sequence
gaatcatgaattcccttgtttcaaa

SEQ ID NO: 218957 - DNA, 25 bp, Probe Sequence
gaatcagaggcaccttgttttcaca

SEQ ID NO: 218958 - DNA, 25 bp, Probe Sequence
gaatctgataggccggccttctaca

SEQ ID NO: 218959 - DNA, 25 bp, Probe Sequence
gaatcagaagctcctggatgcctta

SEQ ID NO: 218960 - DNA, 25 bp, Probe Sequence
gaatctggagtcctggatccttttc

SEQ ID NO: 218961 - DNA, 25 bp, Probe Sequence
gaatctggttttggacaatgcttct

SEQ ID NO: 218962 - DNA, 25 bp, Probe Sequence
gaatcgtccttataacagcttatga

SEQ ID NO: 218963 - DNA, 25 bp, Probe Sequence
gaatcttctctttgacaattcctag

SEQ ID NO: 218964 - DNA, 25 bp, Probe Sequence
gaatcagttcttacacaatatcccg

SEQ ID NO: 218965 - DNA, 25 bp, Probe Sequence
gaatcgtatctatctcacagctgac

SEQ ID NO: 218966 - DNA, 25 bp, Probe Sequence
gaatctgaccattttacgtctctac

SEQ ID NO: 218967 - DNA, 25 bp, Probe Sequence
gaatgtactgcatgttaccatctta

SEQ ID NO: 218968 - DNA, 25 bp, Probe Sequence
gaatctacagcagtttcctgccttc

SEQ ID NO: 218969 - DNA, 25 bp, Probe Sequence
gaatgaaaagctttcctgcttggca

SEQ ID NO: 218970 - DNA, 25 bp, Probe Sequence
gaataataatttacatacttggcat

SEQ ID NO: 218971 - DNA, 25 bp, Probe Sequence
gaatacttttgcatatgtcttgata

SEQ ID NO: 218972 - DNA, 25 bp, Probe Sequence
gaatactaggccatatgtcatataa

SEQ ID NO: 218973 - DNA, 25 bp, Probe Sequence
gaatacaagcctatgcgtgaaaaaa

SEQ ID NO: 218974 - DNA, 25 bp, Probe Sequence
gaataatcacgctttcctgaatcca

SEQ ID NO: 218975 - DNA, 25 bp, Probe Sequence
gaatactgcttgtttcggaatataa

SEQ ID NO: 218976 - DNA, 25 bp, Probe Sequence
gaataatgattatctattgtatata

SEQ ID NO: 218977 - DNA, 25 bp, Probe Sequence
gaataatgtgtatctcaagactaat

SEQ ID NO: 218978 - DNA, 25 bp, Probe Sequence
gaatcaatcattgccctaactatag

SEQ ID NO: 218979 - DNA, 25 bp, Probe Sequence
aatcagtattgaggccggagggcag

SEQ ID NO: 218980 - DNA, 25 bp, Probe Sequence
gaatcccaatctatctaaatttcat

SEQ ID NO: 218981 - DNA, 25 bp, Probe Sequence
gaatccacaactatcaaaataacac

SEQ ID NO: 218982 - DNA, 25 bp, Probe Sequence
gaatacacatacaaacacacaataa

SEQ ID NO: 218983 - DNA, 25 bp, Probe Sequence
gaatcatactacggactagacatag

SEQ ID NO: 218984 - DNA, 25 bp, Probe Sequence
gaatcatacaaaaactcaatataga

SEQ ID NO: 218985 - DNA, 25 bp, Probe Sequence
gaatatgagcaaaaactgatcttaa

SEQ ID NO: 218986 - DNA, 25 bp, Probe Sequence
gaatatgcctgtaaactctctgaac

SEQ ID NO: 218987 - DNA, 25 bp, Probe Sequence
gaatatgcctgtaaactctctgaac

SEQ ID NO: 218988 - DNA, 25 bp, Probe Sequence
gaatctgcctgaaagggctggagcc

SEQ ID NO: 218989 - DNA, 25 bp, Probe Sequence
gaatctggccatgactggcgaagtc

SEQ ID NO: 218990 - DNA, 25 bp, Probe Sequence
gaatgcgagcaacacagggaagatt

SEQ ID NO: 218991 - DNA, 25 bp, Probe Sequence
gaatcagatgaacagcaccaggaaa

SEQ ID NO: 218992 - DNA, 25 bp, Probe Sequence
gaatcagatggacactcacatggga

SEQ ID NO: 218993 - DNA, 25 bp, Probe Sequence
gaatcagatggacactcacatggga

SEQ ID NO: 218994 - DNA, 25 bp, Probe Sequence
gaatcaagtccctcacatgggctat

SEQ ID NO: 218995 - DNA, 25 bp, Probe Sequence
gaataattcagtttagtgagtgctt

SEQ ID NO: 218996 - DNA, 25 bp, Probe Sequence
gaatcattctatcttatgttgtctt

SEQ ID NO: 218997 - DNA, 25 bp, Probe Sequence
gaatcttgtatttctggttcattat

SEQ ID NO: 218998 - DNA, 25 bp, Probe Sequence
gaatctgtcgacactgggctgaaat

SEQ ID NO: 218999 - DNA, 25 bp, Probe Sequence
gaatgcctaacaggctggggacgca

SEQ ID NO: 219000 - DNA, 25 bp, Probe Sequence
gaatgaaaagactttgggcaccaac

SEQ ID NO: 219001 - DNA, 25 bp, Probe Sequence
gaatgggcacggtttggccgaacac

SEQ ID NO: 219002 - DNA, 25 bp, Probe Sequence
gaatggagacgttttgacctgggac

SEQ ID NO: 219003 - DNA, 25 bp, Probe Sequence
gaatggaacgacagtacttcagtcc

SEQ ID NO: 219004 - DNA, 25 bp, Probe Sequence
gaaggaactggcactccaaactaag

SEQ ID NO: 219005 - DNA, 25 bp, Probe Sequence
gaaggattcggctccggaactgaat

SEQ ID NO: 219006 - DNA, 25 bp, Probe Sequence
gaaggattcggctccggaactgaat

SEQ ID NO: 219007 - DNA, 25 bp, Probe Sequence
gaagaggtcctctcttggaactgga

SEQ ID NO: 219008 - DNA, 25 bp, Probe Sequence
gaatctagtcctgagcgggaagctg

SEQ ID NO: 219009 - DNA, 25 bp, Probe Sequence
gaatcccttgtggactggggacagg

SEQ ID NO: 219010 - DNA, 25 bp, Probe Sequence
gaatcccttgaacctgggaggtgga

SEQ ID NO: 219011 - DNA, 25 bp, Probe Sequence
gaatctcttgaaaccgggaggcgga

SEQ ID NO: 219012 - DNA, 25 bp, Probe Sequence
gaatctcttgaaaccgggaggcgga

SEQ ID NO: 219013 - DNA, 25 bp, Probe Sequence
gaatcatcttgaatccgggaggtgg

SEQ ID NO: 219014 - DNA, 25 bp, Probe Sequence
gaatcacttgcactccggaggtaga

SEQ ID NO: 219015 - DNA, 25 bp, Probe Sequence
gaatcacttgagcccaggaggtgga

SEQ ID NO: 219016 - DNA, 25 bp, Probe Sequence
gaatcacttgagcccaggaggtgga

SEQ ID NO: 219017 - DNA, 25 bp, Probe Sequence
gaatcactaaggtcaggaagttcaa

SEQ ID NO: 219018 - DNA, 25 bp, Probe Sequence
gaatcatcggggtcaggtcagtgtc

SEQ ID NO: 219019 - DNA, 25 bp, Probe Sequence
gaatacgtggggggcatcagcatgc

SEQ ID NO: 219020 - DNA, 25 bp, Probe Sequence
gaatcctgggggaaggcacaccgaa

SEQ ID NO: 219021 - DNA, 25 bp, Probe Sequence
gaatccagtgggtgagtgccctcag

SEQ ID NO: 219022 - DNA, 25 bp, Probe Sequence
gaatcagcaggggaaggctctcttg

SEQ ID NO: 219023 - DNA, 25 bp, Probe Sequence
gaatgagagggcagaggtctctcca

SEQ ID NO: 219024 - DNA, 25 bp, Probe Sequence
gaataatggcacataacactccaat

SEQ ID NO: 219025 - DNA, 25 bp, Probe Sequence
gaatagggccaaagacagacccatc

SEQ ID NO: 219026 - DNA, 25 bp, Probe Sequence
gaatagttccaaatccagaatgcct

SEQ ID NO: 219027 - DNA, 25 bp, Probe Sequence
gaatagctagcctgtccaaaacatt

SEQ ID NO: 219028 - DNA, 25 bp, Probe Sequence
gaatgcctagaatgttccaagcact

SEQ ID NO: 219029 - DNA, 25 bp, Probe Sequence
gaatcagctgaatttgtgtgtaaac

SEQ ID NO: 219030 - DNA, 25 bp, Probe Sequence
gaatcagggatgactcagttacaga

SEQ ID NO: 219031 - DNA, 25 bp, Probe Sequence
gaatcagtatagacatcaataacat

SEQ ID NO: 219032 - DNA, 25 bp, Probe Sequence
gaatgcagattacactgatcttatg

SEQ ID NO: 219033 - DNA, 25 bp, Probe Sequence
gaataatctaccctgactaaagctt

SEQ ID NO: 219034 - DNA, 25 bp, Probe Sequence
gaataagtaccgattccacatcatt

SEQ ID NO: 219035 - DNA, 25 bp, Probe Sequence
gaatgcacaaagctgttgtctacaa

SEQ ID NO: 219036 - DNA, 25 bp, Probe Sequence
gaagaaaaggcgggtccataagaag

SEQ ID NO: 219037 - DNA, 25 bp, Probe Sequence
gaatgaacaagtgaaggccatcaaa

SEQ ID NO: 219038 - DNA, 25 bp, Probe Sequence
gaataaattccttatggccatcaag

SEQ ID NO: 219039 - DNA, 25 bp, Probe Sequence
gaataatttcctttgatgacatgtc

SEQ ID NO: 219040 - DNA, 25 bp, Probe Sequence
gaatagattctctcctgattattta

SEQ ID NO: 219041 - DNA, 25 bp, Probe Sequence
gaatagatagttctgcctctttttt

SEQ ID NO: 219042 - DNA, 25 bp, Probe Sequence
gaatactcagttccaacttgtgatt

SEQ ID NO: 219043 - DNA, 25 bp, Probe Sequence
gaataccagttcaggtgcagctctt

SEQ ID NO: 219044 - DNA, 25 bp, Probe Sequence
gaatacacagtgaccaatgtgcctc

SEQ ID NO: 219045 - DNA, 25 bp, Probe Sequence
gaataacacttcaaagtcatcttgc

SEQ ID NO: 219046 - DNA, 25 bp, Probe Sequence
gaataacactaattcagcctcccga

SEQ ID NO: 219047 - DNA, 25 bp, Probe Sequence
gaataaactcaattgtccatcttta

SEQ ID NO: 219048 - DNA, 25 bp, Probe Sequence
gaatgtaacaaatgtcctccctatg

SEQ ID NO: 219049 - DNA, 25 bp, Probe Sequence
gaatgtaaaaattggtcaccctaag

SEQ ID NO: 219050 - DNA, 25 bp, Probe Sequence
gaagattagacacttccccaacgaa

SEQ ID NO: 219051 - DNA, 25 bp, Probe Sequence
gaatggaagacacttacctaacaag

SEQ ID NO: 219052 - DNA, 25 bp, Probe Sequence
gaatctaaaccttacatgtgtaaag

SEQ ID NO: 219053 - DNA, 25 bp, Probe Sequence
gtacttactccctgaggtagggaat

SEQ ID NO: 219054 - DNA, 25 bp, Probe Sequence
gaagttgtcccctgggaagggcagc

SEQ ID NO: 219055 - DNA, 25 bp, Probe Sequence
gaaggtgtccccttgggacgtcaat

SEQ ID NO: 219056 - DNA, 25 bp, Probe Sequence
gaagattttgtcttctgggggtctt

SEQ ID NO: 219057 - DNA, 25 bp, Probe Sequence
gaatgcttcattatctttggaggtt

SEQ ID NO: 219058 - DNA, 25 bp, Probe Sequence
gaatcttttagacatctggaagcct

SEQ ID NO: 219059 - DNA, 25 bp, Probe Sequence
gaatctttctcgaagatctggtcaa

SEQ ID NO: 219060 - DNA, 25 bp, Probe Sequence
gaatctttatctgagctgcttgtca

SEQ ID NO: 219061 - DNA, 25 bp, Probe Sequence
gaatctttttgatcgactgctacgt

SEQ ID NO: 219062 - DNA, 25 bp, Probe Sequence
gaatcatgaatttgcaacagaccta

SEQ ID NO: 219063 - DNA, 25 bp, Probe Sequence
gaatctcaagattcagtagacctaa

SEQ ID NO: 219064 - DNA, 25 bp, Probe Sequence
gaatctctaatatgtgtgatggtca

SEQ ID NO: 219065 - DNA, 25 bp, Probe Sequence
gaatcccacatattcttgggctctc

SEQ ID NO: 219066 - DNA, 25 bp, Probe Sequence
gaatgtcctcactttgtgggtcaca

SEQ ID NO: 219067 - DNA, 25 bp, Probe Sequence
gaatctacctcaatatgggtatcac

SEQ ID NO: 219068 - DNA, 25 bp, Probe Sequence
gaatgaacctagagcggtgacatga

SEQ ID NO: 219069 - DNA, 25 bp, Probe Sequence
gaatgaacctagagcggtgacatga

SEQ ID NO: 219070 - DNA, 25 bp, Probe Sequence
gaataatctttgcctggagtgacac

SEQ ID NO: 219071 - DNA, 25 bp, Probe Sequence
gaatgcagacttttgtagcaggcag

SEQ ID NO: 219072 - DNA, 25 bp, Probe Sequence
gaatcagatcctaagccatagacag

SEQ ID NO: 219073 - DNA, 25 bp, Probe Sequence
gaatcagttctaagcctaggccttt

SEQ ID NO: 219074 - DNA, 25 bp, Probe Sequence
gaatccatttcaacctagagtctga

SEQ ID NO: 219075 - DNA, 25 bp, Probe Sequence
gaatctgcttactcactagaacttc

SEQ ID NO: 219076 - DNA, 25 bp, Probe Sequence
gaatctgcttactcactagaacttc

SEQ ID NO: 219077 - DNA, 25 bp, Probe Sequence
gaatgatctgtgtgaccttgaactt

SEQ ID NO: 219078 - DNA, 25 bp, Probe Sequence
gaatactggcagttcactgtggaca

SEQ ID NO: 219079 - DNA, 25 bp, Probe Sequence
gaatactggtgttagctgagaactc

SEQ ID NO: 219080 - DNA, 25 bp, Probe Sequence
gaatactcaggttagaatgaactgt

SEQ ID NO: 219081 - DNA, 25 bp, Probe Sequence
gaatcctcctgataacatcaaggat

SEQ ID NO: 219082 - DNA, 25 bp, Probe Sequence
gaatccaactgatgagtatctagga

SEQ ID NO: 219083 - DNA, 25 bp, Probe Sequence
gaatgccgaatttggtacacatgtg

SEQ ID NO: 219084 - DNA, 25 bp, Probe Sequence
gaatgagcccattcatggtaagtct

SEQ ID NO: 219085 - DNA, 25 bp, Probe Sequence
gaatcagagtcttatcaaaagctat

SEQ ID NO: 219086 - DNA, 25 bp, Probe Sequence
gaataagtctcccacagttgtataa

SEQ ID NO: 219087 - DNA, 25 bp, Probe Sequence
gaataatgtccctcattttgactat

SEQ ID NO: 219088 - DNA, 25 bp, Probe Sequence
gaatactgccatgcttattttgcct

SEQ ID NO: 219089 - DNA, 25 bp, Probe Sequence
gaatgaatgccagctctgcttggcc

SEQ ID NO: 219090 - DNA, 25 bp, Probe Sequence
gaatgagctgcttaactctttccac

SEQ ID NO: 219091 - DNA, 25 bp, Probe Sequence
gaatgctgtcttgacatctcttgcc

SEQ ID NO: 219092 - DNA, 25 bp, Probe Sequence
gaatgctgtcttgacatctcttgcc

SEQ ID NO: 219093 - DNA, 25 bp, Probe Sequence
gaatctctgttgacagcttttcgct

SEQ ID NO: 219094 - DNA, 25 bp, Probe Sequence
gaatctctgctcacgttctgagcat

SEQ ID NO: 219095 - DNA, 25 bp, Probe Sequence
gaatgcttgctacgagcggtggctc

SEQ ID NO: 219096 - DNA, 25 bp, Probe Sequence
gaatgctcatctttggagggtgcca

SEQ ID NO: 219097 - DNA, 25 bp, Probe Sequence
gaatgctcatctttggagggtgcca

SEQ ID NO: 219098 - DNA, 25 bp, Probe Sequence
gaatgctctattgggggaagacaaa

SEQ ID NO: 219099 - DNA, 25 bp, Probe Sequence
gaatgtcattagaggagaccaagga

SEQ ID NO: 219100 - DNA, 25 bp, Probe Sequence
gaatggcatccagatggggaccgga

SEQ ID NO: 219101 - DNA, 25 bp, Probe Sequence
gaaggccatgctgtggttgtcggag

SEQ ID NO: 219102 - DNA, 25 bp, Probe Sequence
gaatgtccagttttgtctttgggcc

SEQ ID NO: 219103 - DNA, 25 bp, Probe Sequence
gaatctcctttatgttgttttcctt

SEQ ID NO: 219104 - DNA, 25 bp, Probe Sequence
gaatcatccttaaatgggatttatc

SEQ ID NO: 219105 - DNA, 25 bp, Probe Sequence
gaatgtcctgaaaagggtgttggga

SEQ ID NO: 219106 - DNA, 25 bp, Probe Sequence
gaatgcttcgttatgggttttggcc

SEQ ID NO: 219107 - DNA, 25 bp, Probe Sequence
gaatgctatcgaatctatgaggctt

SEQ ID NO: 219108 - DNA, 25 bp, Probe Sequence
gaatgctatacaactgctgcaggaa

SEQ ID NO: 219109 - DNA, 25 bp, Probe Sequence
gaatgattacagatggatatacagt

SEQ ID NO: 219110 - DNA, 25 bp, Probe Sequence
gaaaatccgcaaaaatacgtagtcg

SEQ ID NO: 219111 - DNA, 25 bp, Probe Sequence
gaaaatacggaaactagcctagtgt

SEQ ID NO: 219112 - DNA, 25 bp, Probe Sequence
gaaagtacggttgcaacggctggct

SEQ ID NO: 219113 - DNA, 25 bp, Probe Sequence
gaagattacggtaacggccacttgg

SEQ ID NO: 219114 - DNA, 25 bp, Probe Sequence
gaagatggttggcgacgtgaccggg

SEQ ID NO: 219115 - DNA, 25 bp, Probe Sequence
gaaggagtttctgggcaggaccggt

SEQ ID NO: 219116 - DNA, 25 bp, Probe Sequence
gaatggggtggtggggggcaccctg

SEQ ID NO: 219117 - DNA, 25 bp, Probe Sequence
gaagggaggtgggccgtggcccttg

SEQ ID NO: 219118 - DNA, 25 bp, Probe Sequence
gaagtgaaggagacaccgttccgcc

SEQ ID NO: 219119 - DNA, 25 bp, Probe Sequence
gaagaggagcgagcctttgtacccc

SEQ ID NO: 219120 - DNA, 25 bp, Probe Sequence
gaatggataggaaccttgggactca

SEQ ID NO: 219121 - DNA, 25 bp, Probe Sequence
gaatgtttggcaacctttgtgttac

SEQ ID NO: 219122 - DNA, 25 bp, Probe Sequence
gaatgatcctggagctttgctttct

SEQ ID NO: 219123 - DNA, 25 bp, Probe Sequence
gaatgaccggttactgttttgcctt

SEQ ID NO: 219124 - DNA, 25 bp, Probe Sequence
gaatccctgagttacagtatacagc

SEQ ID NO: 219125 - DNA, 25 bp, Probe Sequence
gaatcccacagaagcagagttacag

SEQ ID NO: 219126 - DNA, 25 bp, Probe Sequence
gaatctgcccagagcaagatgctga

SEQ ID NO: 219127 - DNA, 25 bp, Probe Sequence
gaatccccagcagctgaagctggaa

SEQ ID NO: 219128 - DNA, 25 bp, Probe Sequence
gaatcttccagagatatcacttaat

SEQ ID NO: 219129 - DNA, 25 bp, Probe Sequence
gaatctaccctgcagatattctaat

SEQ ID NO: 219130 - DNA, 25 bp, Probe Sequence
gaatcttcccctaaagatgctaatc

SEQ ID NO: 219131 - DNA, 25 bp, Probe Sequence
gaatctttcccatgagaagctggtg

SEQ ID NO: 219132 - DNA, 25 bp, Probe Sequence
gaatcttttccccagtatagtggaa

SEQ ID NO: 219133 - DNA, 25 bp, Probe Sequence
gaatcattactgtgtatgttagggt

SEQ ID NO: 219134 - DNA, 25 bp, Probe Sequence
gaatgcacttggtttattgttgggg

SEQ ID NO: 219135 - DNA, 25 bp, Probe Sequence
gaatcctatctcttatcagtcattg

SEQ ID NO: 219136 - DNA, 25 bp, Probe Sequence
gaatcctattgctaagcatatattc

SEQ ID NO: 219137 - DNA, 25 bp, Probe Sequence
gaatcgctgaagaagccagaagaca

SEQ ID NO: 219138 - DNA, 25 bp, Probe Sequence
gaatcgctgaagaagccagaagaca

SEQ ID NO: 219139 - DNA, 25 bp, Probe Sequence
gaatctgcggaactgcgcataaaaa

SEQ ID NO: 219140 - DNA, 25 bp, Probe Sequence
gaatctctgggacacattcaaagca

SEQ ID NO: 219141 - DNA, 25 bp, Probe Sequence
gaatcctgtggacacctatgacgtc

SEQ ID NO: 219142 - DNA, 25 bp, Probe Sequence
gaatcccggataaagccaacgtgca

SEQ ID NO: 219143 - DNA, 25 bp, Probe Sequence
gaatccagtggatcaagaaagcagg

SEQ ID NO: 219144 - DNA, 25 bp, Probe Sequence
gaatgggggaagaaaactctggtgc

SEQ ID NO: 219145 - DNA, 25 bp, Probe Sequence
gaatctggcgtggcagaatacctct

SEQ ID NO: 219146 - DNA, 25 bp, Probe Sequence
gaatcagtgcttgtgaatgacttct

SEQ ID NO: 219147 - DNA, 25 bp, Probe Sequence
gaatgcacttctgtggaggcacctt

SEQ ID NO: 219148 - DNA, 25 bp, Probe Sequence
gaatgctccctggtgaggtactgca

SEQ ID NO: 219149 - DNA, 25 bp, Probe Sequence
gaatgtcagacatgtgaagaactat

SEQ ID NO: 219150 - DNA, 25 bp, Probe Sequence
gaatgtatccaacgcaataaatata

SEQ ID NO: 219151 - DNA, 25 bp, Probe Sequence
gaatctaagcacaatgcattcaaaa

SEQ ID NO: 219152 - DNA, 25 bp, Probe Sequence
gaatcctagcacacctcagaaaaaa

SEQ ID NO: 219153 - DNA, 25 bp, Probe Sequence
gaatctctctgaacacctcaggaaa

SEQ ID NO: 219154 - DNA, 25 bp, Probe Sequence
gaatcttggttctgatatggactag

SEQ ID NO: 219155 - DNA, 25 bp, Probe Sequence
gaatcggggtcagttaagcctcagt

SEQ ID NO: 219156 - DNA, 25 bp, Probe Sequence
gaatgggggacagaatcatgactca

SEQ ID NO: 219157 - DNA, 25 bp, Probe Sequence
gaaggagaggccgaggaagaccccg

SEQ ID NO: 219158 - DNA, 25 bp, Probe Sequence
gaaggacagagtcaacaggaccccg

SEQ ID NO: 219159 - DNA, 25 bp, Probe Sequence
gaagaacaattagactggacccacc

SEQ ID NO: 219160 - DNA, 25 bp, Probe Sequence
gaatgtaactcaaaactggacccca

SEQ ID NO: 219161 - DNA, 25 bp, Probe Sequence
gaatgtactctaaaagtcgtgatca

SEQ ID NO: 219162 - DNA, 25 bp, Probe Sequence
gaatgcagtgccttcaaagtacgag

SEQ ID NO: 219163 - DNA, 25 bp, Probe Sequence
gaatcggctctcgaaggtgaagcga

SEQ ID NO: 219164 - DNA, 25 bp, Probe Sequence
gaatccgctctttgtcggaagctga

SEQ ID NO: 219165 - DNA, 25 bp, Probe Sequence
gaatccgctctttgtcggaagctga

SEQ ID NO: 219166 - DNA, 25 bp, Probe Sequence
gaataagctactatcctgaggctga

SEQ ID NO: 219167 - DNA, 25 bp, Probe Sequence
gaatcaagtcactctcatgggaaga

SEQ ID NO: 219168 - DNA, 25 bp, Probe Sequence
gaatcaagtcagcaacagagcaaaa

SEQ ID NO: 219169 - DNA, 25 bp, Probe Sequence
gaatccactcacgttcataagagaa

SEQ ID NO: 219170 - DNA, 25 bp, Probe Sequence
gaatcacacgaagagatctagagta

SEQ ID NO: 219171 - DNA, 25 bp, Probe Sequence
gaatctgcacagagcaagatgctga

SEQ ID NO: 219172 - DNA, 25 bp, Probe Sequence
gaatctgcacagagcaagatgctga

SEQ ID NO: 219173 - DNA, 25 bp, Probe Sequence
gaatctgcacagagcaagatgctga

SEQ ID NO: 219174 - DNA, 25 bp, Probe Sequence
gaatgtgcagaggatacgcatggaa

SEQ ID NO: 219175 - DNA, 25 bp, Probe Sequence
gaatgacgcagctttggtttctcag

SEQ ID NO: 219176 - DNA, 25 bp, Probe Sequence
gaatgccaccttattctggctactc

SEQ ID NO: 219177 - DNA, 25 bp, Probe Sequence
gaatcattttctattgtggtattat

SEQ ID NO: 219178 - DNA, 25 bp, Probe Sequence
gaatgcttttccacgtagacttatc

SEQ ID NO: 219179 - DNA, 25 bp, Probe Sequence
gaatgtttctccatcccagagagat

SEQ ID NO: 219180 - DNA, 25 bp, Probe Sequence
gaatggaattaaatctctaaaaacg

SEQ ID NO: 219181 - DNA, 25 bp, Probe Sequence
gaaggacgttcaacctccaaagcag

SEQ ID NO: 219182 - DNA, 25 bp, Probe Sequence
gaacagacgggaagcgtacgaagcg

SEQ ID NO: 219183 - DNA, 25 bp, Probe Sequence
gaacttcggagacggtccagacagg

SEQ ID NO: 219184 - DNA, 25 bp, Probe Sequence
gaactctagccgtggtccaggagac

SEQ ID NO: 219185 - DNA, 25 bp, Probe Sequence
gaacactaccgggagatcttcgaca

SEQ ID NO: 219186 - DNA, 25 bp, Probe Sequence
gaagactagccgtgttttctcagac

SEQ ID NO: 219187 - DNA, 25 bp, Probe Sequence
gaatgacattgctgtcgttttttat

SEQ ID NO: 219188 - DNA, 25 bp, Probe Sequence
gaatgcacaatttgtcctaatttat

SEQ ID NO: 219189 - DNA, 25 bp, Probe Sequence
gaatgagagatttcccatatttcca

SEQ ID NO: 219190 - DNA, 25 bp, Probe Sequence
gaatgacagcattacctccagatat

SEQ ID NO: 219191 - DNA, 25 bp, Probe Sequence
gaatgactttagaaccgcatgatac

SEQ ID NO: 219192 - DNA, 25 bp, Probe Sequence
gaatgactggcatgaacacgtcttt

SEQ ID NO: 219193 - DNA, 25 bp, Probe Sequence
gaatcaccatcaagaaacgcttcaa

SEQ ID NO: 219194 - DNA, 25 bp, Probe Sequence
gaagacccatctcaacgttaaacgt

SEQ ID NO: 219195 - DNA, 25 bp, Probe Sequence
gaatgacctctctgaaattgaaaac

SEQ ID NO: 219196 - DNA, 25 bp, Probe Sequence
gaatccctgttgctacattgactaa

SEQ ID NO: 219197 - DNA, 25 bp, Probe Sequence
gaatgccctttgctagccatgggct

SEQ ID NO: 219198 - DNA, 25 bp, Probe Sequence
gaatgccctggctaaagctactgtg

SEQ ID NO: 219199 - DNA, 25 bp, Probe Sequence
gaaggccaagaagcctgcactggtg

SEQ ID NO: 219200 - DNA, 25 bp, Probe Sequence
gaaggccaagaagcctgcactggtg

SEQ ID NO: 219201 - DNA, 25 bp, Probe Sequence
gaaggaagcgtagccggattatgaa

SEQ ID NO: 219202 - DNA, 25 bp, Probe Sequence
gaaggcaggcgcaaacgggcataaa

SEQ ID NO: 219203 - DNA, 25 bp, Probe Sequence
gaagggcgatcgcgagcggcaaaaa

SEQ ID NO: 219204 - DNA, 25 bp, Probe Sequence
gaaggtgtcaagtggggaataataa

SEQ ID NO: 219205 - DNA, 25 bp, Probe Sequence
gaagtactaagcagctacgaaaaaa

SEQ ID NO: 219206 - DNA, 25 bp, Probe Sequence
gaatgtacttagtatctactcccaa

SEQ ID NO: 219207 - DNA, 25 bp, Probe Sequence
gaatgatcattttgcaagccacacg

SEQ ID NO: 219208 - DNA, 25 bp, Probe Sequence
gaatgaagattcccagtctattgtt

SEQ ID NO: 219209 - DNA, 25 bp, Probe Sequence
gaatcactgattttcagtcttttcc

SEQ ID NO: 219210 - DNA, 25 bp, Probe Sequence
gaatccaattgatcatgttagcttc

SEQ ID NO: 219211 - DNA, 25 bp, Probe Sequence
gaatccagattaacatgccttcttg

SEQ ID NO: 219212 - DNA, 25 bp, Probe Sequence
gaatcaagattaggcaagttgttgt

SEQ ID NO: 219213 - DNA, 25 bp, Probe Sequence
gaatcatcttttgaagctttctgtt

SEQ ID NO: 219214 - DNA, 25 bp, Probe Sequence
gaatcatcttttgaagctttctgtt

SEQ ID NO: 219215 - DNA, 25 bp, Probe Sequence
gaatcatcttttgaagctttctgtt

SEQ ID NO: 219216 - DNA, 25 bp, Probe Sequence
gaatcatcttttgaagctttctgtt

SEQ ID NO: 219217 - DNA, 25 bp, Probe Sequence
gaactcctttaagggtctcagttag

SEQ ID NO: 219218 - DNA, 25 bp, Probe Sequence
gaacttgccttcagggttagcttca

SEQ ID NO: 219219 - DNA, 25 bp, Probe Sequence
gaacttcgtcctgaggttactctat

SEQ ID NO: 219220 - DNA, 25 bp, Probe Sequence
gaaggtcgttctcagtgaaaatcca

SEQ ID NO: 219221 - DNA, 25 bp, Probe Sequence
gaatggcacgaaatgttggaaagtc

SEQ ID NO: 219222 - DNA, 25 bp, Probe Sequence
gaatgtactgtaatgcttgtatgta

SEQ ID NO: 219223 - DNA, 25 bp, Probe Sequence
gaatctgacttacgccattattacg

SEQ ID NO: 219224 - DNA, 25 bp, Probe Sequence
gaatctcctctacagatttttgctg

SEQ ID NO: 219225 - DNA, 25 bp, Probe Sequence
gaatcttccttgcgatgtttctgca

SEQ ID NO: 219226 - DNA, 25 bp, Probe Sequence
gaatctgtcgttctcatttatgatc

SEQ ID NO: 219227 - DNA, 25 bp, Probe Sequence
gaatctgctcagttccatatttcat

SEQ ID NO: 219228 - DNA, 25 bp, Probe Sequence
gaatccatcagggccatgagtgtca

SEQ ID NO: 219229 - DNA, 25 bp, Probe Sequence
gaatgctgtcgggactgagcaggca

SEQ ID NO: 219230 - DNA, 25 bp, Probe Sequence
gaaggcctggagtctacaccaaggt

SEQ ID NO: 219231 - DNA, 25 bp, Probe Sequence
gaacgtcctaaaacacctatggctt

SEQ ID NO: 219232 - DNA, 25 bp, Probe Sequence
gaatggtcctaaaacaccagtacat

SEQ ID NO: 219233 - DNA, 25 bp, Probe Sequence
gtaggttccataaatgcccgacaag

SEQ ID NO: 219234 - DNA, 25 bp, Probe Sequence
gaatggtaccagacgtgctccaaca

SEQ ID NO: 219235 - DNA, 25 bp, Probe Sequence
gaatgatatttcctattcgcctaca

SEQ ID NO: 219236 - DNA, 25 bp, Probe Sequence
gaatgctgctttttattctcctaac

SEQ ID NO: 219237 - DNA, 25 bp, Probe Sequence
gaatcttttggtttctcactgcata

SEQ ID NO: 219238 - DNA, 25 bp, Probe Sequence
gaatcgtttgtctagactacatgta

SEQ ID NO: 219239 - DNA, 25 bp, Probe Sequence
gaatcatgttcgcaagtctgccatt

SEQ ID NO: 219240 - DNA, 25 bp, Probe Sequence
gaatgctttcccaaattccattatt

SEQ ID NO: 219241 - DNA, 25 bp, Probe Sequence
gaagttttccatcttcccaaattct

SEQ ID NO: 219242 - DNA, 25 bp, Probe Sequence
gaagttaatgtcagcttgcccaggt

SEQ ID NO: 219243 - DNA, 25 bp, Probe Sequence
gaagataacttgagcaccgtcatgg

SEQ ID NO: 219244 - DNA, 25 bp, Probe Sequence
gaatgtcaagcaaatggaccagaag

SEQ ID NO: 219245 - DNA, 25 bp, Probe Sequence
gaatctcatcactttgagcacacac

SEQ ID NO: 219246 - DNA, 25 bp, Probe Sequence
gaatctgcacaggcttcagcaaaaa

SEQ ID NO: 219247 - DNA, 25 bp, Probe Sequence
gaatctgccactttgcagccatttt

SEQ ID NO: 219248 - DNA, 25 bp, Probe Sequence
gaatctgccactttgcagccatttt

SEQ ID NO: 219249 - DNA, 25 bp, Probe Sequence
gaatctccaatgcctgattatctct

SEQ ID NO: 219250 - DNA, 25 bp, Probe Sequence
gaatccttgctcctgaatatcttta

SEQ ID NO: 219251 - DNA, 25 bp, Probe Sequence
gaatctttgcgcctaatcatgtcgt

SEQ ID NO: 219252 - DNA, 25 bp, Probe Sequence
gaatgaattggtcactgcatcttgt

SEQ ID NO: 219253 - DNA, 25 bp, Probe Sequence
gaatgaaatgcaccagtctggcttt

SEQ ID NO: 219254 - DNA, 25 bp, Probe Sequence
gaaggcatatgttcgactggctcct

SEQ ID NO: 219255 - DNA, 25 bp, Probe Sequence
gaatgcagcattgtctttgtctgtc

SEQ ID NO: 219256 - DNA, 25 bp, Probe Sequence
gaatgcatgcttcttttttgttaca

SEQ ID NO: 219257 - DNA, 25 bp, Probe Sequence
gaatgcattcttttttttttcggag

SEQ ID NO: 219258 - DNA, 25 bp, Probe Sequence
gaatgctgaatcttttttttgacgg

SEQ ID NO: 219259 - DNA, 25 bp, Probe Sequence
gaatgctgaatcttttttttgacgg

SEQ ID NO: 219260 - DNA, 25 bp, Probe Sequence
gaatgcgtgctggttttgttaggcg

SEQ ID NO: 219261 - DNA, 25 bp, Probe Sequence
gaatgcagagatgtgttgggtttgg

SEQ ID NO: 219262 - DNA, 25 bp, Probe Sequence
gaatgcatgtatgctgtgggccagg

SEQ ID NO: 219263 - DNA, 25 bp, Probe Sequence
gaatgtagcatagctggagcacatg

SEQ ID NO: 219264 - DNA, 25 bp, Probe Sequence
gaatgtagcaagtcttgtacaacga

SEQ ID NO: 219265 - DNA, 25 bp, Probe Sequence
gaatccagcacgtctgtgtgagtaa

SEQ ID NO: 219266 - DNA, 25 bp, Probe Sequence
gaatccaagtcaattgtgactgcaa

SEQ ID NO: 219267 - DNA, 25 bp, Probe Sequence
gaatctaagccaggttgcaatgagg

SEQ ID NO: 219268 - DNA, 25 bp, Probe Sequence
gaatgttaccaggcatggcagtggg

SEQ ID NO: 219269 - DNA, 25 bp, Probe Sequence
gaatgtttcgtgccatgggtaatca

SEQ ID NO: 219270 - DNA, 25 bp, Probe Sequence
gaatgcatatttgggctgggtatgg

SEQ ID NO: 219271 - DNA, 25 bp, Probe Sequence
gaatctgcagtttactgagggcatt

SEQ ID NO: 219272 - DNA, 25 bp, Probe Sequence
gaatcgctgtactacaggaagatgt

SEQ ID NO: 219273 - DNA, 25 bp, Probe Sequence
gaatcggagcgaagcagagaggtgg

SEQ ID NO: 219274 - DNA, 25 bp, Probe Sequence
gaagggactaaatgctggggaggta

SEQ ID NO: 219275 - DNA, 25 bp, Probe Sequence
gaaggttctaagacgtgggatcgtt

SEQ ID NO: 219276 - DNA, 25 bp, Probe Sequence
gaaggcttcaggacctgcttggtca

SEQ ID NO: 219277 - DNA, 25 bp, Probe Sequence
gaatgcttaaggatgtgattggatg

SEQ ID NO: 219278 - DNA, 25 bp, Probe Sequence
gaatctaagaggttccagctggtgg

SEQ ID NO: 219279 - DNA, 25 bp, Probe Sequence
gaatgttcagaggtggccgtggtgg

SEQ ID NO: 219280 - DNA, 25 bp, Probe Sequence
gaatctcttgggagtcttgggtggc

SEQ ID NO: 219281 - DNA, 25 bp, Probe Sequence
gaatcctgtgggaccttatttgagg

SEQ ID NO: 219282 - DNA, 25 bp, Probe Sequence
gaatccagtgaggaattttattggt

SEQ ID NO: 219283 - DNA, 25 bp, Probe Sequence
gaatcctgcgacgattttatttcta

SEQ ID NO: 219284 - DNA, 25 bp, Probe Sequence
gaatcttgcccgtttatgtatgctc

SEQ ID NO: 219285 - DNA, 25 bp, Probe Sequence
gaatccccacgaacgcgatatgccg

SEQ ID NO: 219286 - DNA, 25 bp, Probe Sequence
gaatccccaaatctcaatggcctgt

SEQ ID NO: 219287 - DNA, 25 bp, Probe Sequence
gaatggcccaaacctgacatggaca

SEQ ID NO: 219288 - DNA, 25 bp, Probe Sequence
gaatggccaaagttttctggtcttg

SEQ ID NO: 219289 - DNA, 25 bp, Probe Sequence
gaaggcaccaggtatttctttttgt

SEQ ID NO: 219290 - DNA, 25 bp, Probe Sequence
gaaaccgttggtccatttttgtctg

SEQ ID NO: 219291 - DNA, 25 bp, Probe Sequence
gaaaccgttggtccatttttgtctg

SEQ ID NO: 219292 - DNA, 25 bp, Probe Sequence
gaatgaccattttgataagtttttt

SEQ ID NO: 219293 - DNA, 25 bp, Probe Sequence
gaatggtcaagttatactttttatt

SEQ ID NO: 219294 - DNA, 25 bp, Probe Sequence
gaatgtttactgttattctttaaga

SEQ ID NO: 219295 - DNA, 25 bp, Probe Sequence
gaatgtttagtattgtacttaaatg

SEQ ID NO: 219296 - DNA, 25 bp, Probe Sequence
gaatgtttatgaatagtttccaaat

SEQ ID NO: 219297 - DNA, 25 bp, Probe Sequence
gaatgtttatgaatagtttccaaat

SEQ ID NO: 219298 - DNA, 25 bp, Probe Sequence
gaagtttggaatcccttcctggatg

SEQ ID NO: 219299 - DNA, 25 bp, Probe Sequence
gaactacaggaacagcttcgggcag

SEQ ID NO: 219300 - DNA, 25 bp, Probe Sequence
gaatcgtttgaacacgggaggcgga

SEQ ID NO: 219301 - DNA, 25 bp, Probe Sequence
gaacagtgggcagaacgggaacggg

SEQ ID NO: 219302 - DNA, 25 bp, Probe Sequence
gacacgggccagatgcaccggcaga

SEQ ID NO: 219303 - DNA, 25 bp, Probe Sequence
gaaggtgggagcaccacgacaaaca

SEQ ID NO: 219304 - DNA, 25 bp, Probe Sequence
gaagggccggtagttcgagaagctc

SEQ ID NO: 219305 - DNA, 25 bp, Probe Sequence
gaatggtccaggttcttctagatga

SEQ ID NO: 219306 - DNA, 25 bp, Probe Sequence
gaatctgtccatctgtttataatca

SEQ ID NO: 219307 - DNA, 25 bp, Probe Sequence
gaatcgtgctgtatgcttactaaca

SEQ ID NO: 219308 - DNA, 25 bp, Probe Sequence
gaatcctctgagacagctctttaag

SEQ ID NO: 219309 - DNA, 25 bp, Probe Sequence
gaatcctatggtatttgaacagact

SEQ ID NO: 219310 - DNA, 25 bp, Probe Sequence
gaatccctgttcattgtaagcactt

SEQ ID NO: 219311 - DNA, 25 bp, Probe Sequence
gaatccactatgatgggtaacattt

SEQ ID NO: 219312 - DNA, 25 bp, Probe Sequence
gaatccactatgatgggaaacattt

SEQ ID NO: 219313 - DNA, 25 bp, Probe Sequence
gaatccactatgatgggaaacattt

SEQ ID NO: 219314 - DNA, 25 bp, Probe Sequence
gaatcgcttctcttttgaaacaata

SEQ ID NO: 219315 - DNA, 25 bp, Probe Sequence
gaaggctgtcttagtgcaaaaaaca

SEQ ID NO: 219316 - DNA, 25 bp, Probe Sequence
gaatgtttctgggtcattaacaagt

SEQ ID NO: 219317 - DNA, 25 bp, Probe Sequence
gaatggacttggggattccactggt

SEQ ID NO: 219318 - DNA, 25 bp, Probe Sequence
gaatgagagcaaagcgcgagtccgc

SEQ ID NO: 219319 - DNA, 25 bp, Probe Sequence
gaatgagatcagagccaagaagcgt

SEQ ID NO: 219320 - DNA, 25 bp, Probe Sequence
gaatggcatgaacccaagaggcagg

SEQ ID NO: 219321 - DNA, 25 bp, Probe Sequence
gaatggttaccttagaagaatttgg

SEQ ID NO: 219322 - DNA, 25 bp, Probe Sequence
gaaggacatacaggtaaaatgaggt

SEQ ID NO: 219323 - DNA, 25 bp, Probe Sequence
gaaggaacacactttgggcttggcc

SEQ ID NO: 219324 - DNA, 25 bp, Probe Sequence
gaagggactctagatggccttgacc

SEQ ID NO: 219325 - DNA, 25 bp, Probe Sequence
gaatggtacgtatatgtgcttaaaa

SEQ ID NO: 219326 - DNA, 25 bp, Probe Sequence
gaatggctaagttttggacatcgat

SEQ ID NO: 219327 - DNA, 25 bp, Probe Sequence
gaatcctggagtttatgccatttgc

SEQ ID NO: 219328 - DNA, 25 bp, Probe Sequence
gaatcattgggtatacctgtcatgt

SEQ ID NO: 219329 - DNA, 25 bp, Probe Sequence
gaatcattggtagatatcctgcaca

SEQ ID NO: 219330 - DNA, 25 bp, Probe Sequence
gaatgttggtaccttccatcaagca

SEQ ID NO: 219331 - DNA, 25 bp, Probe Sequence
gaatggtggtggctttacattgcag

SEQ ID NO: 219332 - DNA, 25 bp, Probe Sequence
gaatggttactgtttatactgtggt

SEQ ID NO: 219333 - DNA, 25 bp, Probe Sequence
gaatgcagggaacactaagctgtga

SEQ ID NO: 219334 - DNA, 25 bp, Probe Sequence
gaatgcagaagaagaccattacttt

SEQ ID NO: 219335 - DNA, 25 bp, Probe Sequence
gaaggaggaaacgttcaccttgtct

SEQ ID NO: 219336 - DNA, 25 bp, Probe Sequence
gaagagacgggtgtaaagcctccta

SEQ ID NO: 219337 - DNA, 25 bp, Probe Sequence
gaaggcctaagtgtagcaaccatct

SEQ ID NO: 219338 - DNA, 25 bp, Probe Sequence
gaatgggaaagggtgaggacttcac

SEQ ID NO: 219339 - DNA, 25 bp, Probe Sequence
gaatgaggaaagcctaggatttaaa

SEQ ID NO: 219340 - DNA, 25 bp, Probe Sequence
gaccggagggtcagaattcaaaatc

SEQ ID NO: 219341 - DNA, 25 bp, Probe Sequence
gagccgggtttgcgtttatattagc

SEQ ID NO: 219342 - DNA, 25 bp, Probe Sequence
gacggggtttcaccgtgttagtcag

SEQ ID NO: 219343 - DNA, 25 bp, Probe Sequence
gaaggcacgtttcccgggaagatct

SEQ ID NO: 219344 - DNA, 25 bp, Probe Sequence
gaatgtcaagctttgctccctagaa

SEQ ID NO: 219345 - DNA, 25 bp, Probe Sequence
gaatgatacgattatgcccaatatt

SEQ ID NO: 219346 - DNA, 25 bp, Probe Sequence
gaatgatacgattatgcccaatatt

SEQ ID NO: 219347 - DNA, 25 bp, Probe Sequence
gaatgatacttgactccacataaga

SEQ ID NO: 219348 - DNA, 25 bp, Probe Sequence
gaatgacctatggcttactgaatgg

SEQ ID NO: 219349 - DNA, 25 bp, Probe Sequence
gaatgcacctgtgtccaaagtcgcc

SEQ ID NO: 219350 - DNA, 25 bp, Probe Sequence
gaatgagcctggtaccaacttcgtc

SEQ ID NO: 219351 - DNA, 25 bp, Probe Sequence
gaatgaccgagaacaaacaccagac

SEQ ID NO: 219352 - DNA, 25 bp, Probe Sequence
gaatgacatcggggacaccacgaac

SEQ ID NO: 219353 - DNA, 25 bp, Probe Sequence
gaatgccacgcggtacaaaggaaaa

SEQ ID NO: 219354 - DNA, 25 bp, Probe Sequence
gaaggcaactgcgtaaccagtggat

SEQ ID NO: 219355 - DNA, 25 bp, Probe Sequence
gaaggcggggctaatccagatgcta

SEQ ID NO: 219356 - DNA, 25 bp, Probe Sequence
gaatgaaggaacacaccaagctaca

SEQ ID NO: 219357 - DNA, 25 bp, Probe Sequence
gaatgaagctgataggaccttgata

SEQ ID NO: 219358 - DNA, 25 bp, Probe Sequence
gaatgaagctgatcatggtcaggtg

SEQ ID NO: 219359 - DNA, 25 bp, Probe Sequence
gaatgtatgtgtccaggcgcagtgg

SEQ ID NO: 219360 - DNA, 25 bp, Probe Sequence
gaatgtgcagtatgctggccttgac

SEQ ID NO: 219361 - DNA, 25 bp, Probe Sequence
gaatgctgcaattcagggctcttca

SEQ ID NO: 219362 - DNA, 25 bp, Probe Sequence
gaatgctggtcagtgggacattttg

SEQ ID NO: 219363 - DNA, 25 bp, Probe Sequence
gaatctgtgtgacttgggcattgta

SEQ ID NO: 219364 - DNA, 25 bp, Probe Sequence
gaatctgatatgtctggtagcatgt

SEQ ID NO: 219365 - DNA, 25 bp, Probe Sequence
gaatgtatttctaatgcatgatgca

SEQ ID NO: 219366 - DNA, 25 bp, Probe Sequence
gaatgtcctggcagatgctctcaag

SEQ ID NO: 219367 - DNA, 25 bp, Probe Sequence
gaatgatgcctactttcttcaagac

SEQ ID NO: 219368 - DNA, 25 bp, Probe Sequence
gaatgagatcattccttttacaggc

SEQ ID NO: 219369 - DNA, 25 bp, Probe Sequence
gaatgcctattctattttctgcagt

SEQ ID NO: 219370 - DNA, 25 bp, Probe Sequence
gaatggcttttagtaatctacatgg

SEQ ID NO: 219371 - DNA, 25 bp, Probe Sequence
gaatgcctgtttactcagagtttat

SEQ ID NO: 219372 - DNA, 25 bp, Probe Sequence
gaatgccgtcttggaagccgatttt

SEQ ID NO: 219373 - DNA, 25 bp, Probe Sequence
gaatctagacttggatctgccagtt

SEQ ID NO: 219374 - DNA, 25 bp, Probe Sequence
gaatctagactttcttgtatacatt

SEQ ID NO: 219375 - DNA, 25 bp, Probe Sequence
gaatgtaactttccatgtaccaagc

SEQ ID NO: 219376 - DNA, 25 bp, Probe Sequence
gaatgtaactttccatgtaccaagc

SEQ ID NO: 219377 - DNA, 25 bp, Probe Sequence
gaatgtatatctttgccgcaaccaa

SEQ ID NO: 219378 - DNA, 25 bp, Probe Sequence
gaatgagaatcaactcctcaactca

SEQ ID NO: 219379 - DNA, 25 bp, Probe Sequence
gaaggcaacattccctgaacatact

SEQ ID NO: 219380 - DNA, 25 bp, Probe Sequence
gaaggccaatttgtggactcctacg

SEQ ID NO: 219381 - DNA, 25 bp, Probe Sequence
gaaggcaagttgggcttgcccctac

SEQ ID NO: 219382 - DNA, 25 bp, Probe Sequence
gaaaaagtggggcatcctccttatc

SEQ ID NO: 219383 - DNA, 25 bp, Probe Sequence
gaatggaagtttacaatcactcctt

SEQ ID NO: 219384 - DNA, 25 bp, Probe Sequence
gaatgagacgaattatcatcagaac

SEQ ID NO: 219385 - DNA, 25 bp, Probe Sequence
gaatgttcgagttcctcagcaacca

SEQ ID NO: 219386 - DNA, 25 bp, Probe Sequence
gaagtgtcagatgatccccaagtct

SEQ ID NO: 219387 - DNA, 25 bp, Probe Sequence
gaaggtcagtcagccaaggagatgc

SEQ ID NO: 219388 - DNA, 25 bp, Probe Sequence
gaatgcagttccagcttaggaagcc

SEQ ID NO: 219389 - DNA, 25 bp, Probe Sequence
gaatgagtttgcagccaaggctaca

SEQ ID NO: 219390 - DNA, 25 bp, Probe Sequence
gaaggccattgaagccgtggccatc

SEQ ID NO: 219391 - DNA, 25 bp, Probe Sequence
gaaggaatgagaagatctatccaat

SEQ ID NO: 219392 - DNA, 25 bp, Probe Sequence
gaaggcacaggaggatctctaaagc

SEQ ID NO: 219393 - DNA, 25 bp, Probe Sequence
gaatggcagccgtttcttaacatgt

SEQ ID NO: 219394 - DNA, 25 bp, Probe Sequence
gaatggcagccgtttcttaacatgt

SEQ ID NO: 219395 - DNA, 25 bp, Probe Sequence
gaatgtgccccttctctaagaaaat

SEQ ID NO: 219396 - DNA, 25 bp, Probe Sequence
gaatgattcccctcatagaaagaca

SEQ ID NO: 219397 - DNA, 25 bp, Probe Sequence
gaatgttcaaactttatagataact

SEQ ID NO: 219398 - DNA, 25 bp, Probe Sequence
gaatgttaatccatattggcagaac

SEQ ID NO: 219399 - DNA, 25 bp, Probe Sequence
gaatccctgatgtcttattggaaca

SEQ ID NO: 219400 - DNA, 25 bp, Probe Sequence
gaatcctgtgaattctaacagatac

SEQ ID NO: 219401 - DNA, 25 bp, Probe Sequence
gaatcctgtgaatgtccaaaagcct

SEQ ID NO: 219402 - DNA, 25 bp, Probe Sequence
gaatgccctcaatccgagaaagcct

SEQ ID NO: 219403 - DNA, 25 bp, Probe Sequence
gaatcgcttgaacccaggagacggt

SEQ ID NO: 219404 - DNA, 25 bp, Probe Sequence
gaatcgcttgaacctgcgaggcaga

SEQ ID NO: 219405 - DNA, 25 bp, Probe Sequence
gaatcgcttgaacctgcgaggcaga

SEQ ID NO: 219406 - DNA, 25 bp, Probe Sequence
gaatcgctggaacctgggaggcaga

SEQ ID NO: 219407 - DNA, 25 bp, Probe Sequence
gaatctcttgaacctgggaggtgaa

SEQ ID NO: 219408 - DNA, 25 bp, Probe Sequence
gaatctcttgaacctgggaggtgaa

SEQ ID NO: 219409 - DNA, 25 bp, Probe Sequence
gaatctcttgaacctgggaggcgga

SEQ ID NO: 219410 - DNA, 25 bp, Probe Sequence
gaatgccttggggcgtggaagggca

SEQ ID NO: 219411 - DNA, 25 bp, Probe Sequence
gaatgccagtggggatgcgggggga

SEQ ID NO: 219412 - DNA, 25 bp, Probe Sequence
gaagaagtggggtgggacgacagtg

SEQ ID NO: 219413 - DNA, 25 bp, Probe Sequence
gaaggagaggggtgggccaggggct

SEQ ID NO: 219414 - DNA, 25 bp, Probe Sequence
gaaggagaggggtgggccaggggct

SEQ ID NO: 219415 - DNA, 25 bp, Probe Sequence
gacccaaaggcgtgaacatcggggg

SEQ ID NO: 219416 - DNA, 25 bp, Probe Sequence
gacccaagggagtgaacaccggtgc

SEQ ID NO: 219417 - DNA, 25 bp, Probe Sequence
gaaccaaggcaactacaaactcctg

SEQ ID NO: 219418 - DNA, 25 bp, Probe Sequence
gaatccacaaaagccaaaccagctc

SEQ ID NO: 219419 - DNA, 25 bp, Probe Sequence
gaatccacaaaagccaaaccagctc

SEQ ID NO: 219420 - DNA, 25 bp, Probe Sequence
gaatgcaccaaatatcccaaaactc

SEQ ID NO: 219421 - DNA, 25 bp, Probe Sequence
gaatgccgccaagttatccaaaacc

SEQ ID NO: 219422 - DNA, 25 bp, Probe Sequence
gaatgccactctgtaattgcaaaaa

SEQ ID NO: 219423 - DNA, 25 bp, Probe Sequence
gaatgccactctgtaattgcaaaaa

SEQ ID NO: 219424 - DNA, 25 bp, Probe Sequence
gaatgccttctttcaatagcaaatg

SEQ ID NO: 219425 - DNA, 25 bp, Probe Sequence
gaatgccttcaagcacaaagtgatg

SEQ ID NO: 219426 - DNA, 25 bp, Probe Sequence
gaaggcattaagcccagatgcaggt

SEQ ID NO: 219427 - DNA, 25 bp, Probe Sequence
gaatgcagcaaactggtgcagacaa

SEQ ID NO: 219428 - DNA, 25 bp, Probe Sequence
gaatgccaaaatcagcagtctcctg

SEQ ID NO: 219429 - DNA, 25 bp, Probe Sequence
gaatgccaaaatcagcagtctcctg

SEQ ID NO: 219430 - DNA, 25 bp, Probe Sequence
gaatgccaggaatgagtgttaatga

SEQ ID NO: 219431 - DNA, 25 bp, Probe Sequence
gaatgccaggaatattgtcatcctt

SEQ ID NO: 219432 - DNA, 25 bp, Probe Sequence
gaatgctggtggttctattcctttg

SEQ ID NO: 219433 - DNA, 25 bp, Probe Sequence
gaatgtgggactacaattcctggaa

SEQ ID NO: 219434 - DNA, 25 bp, Probe Sequence
gaatctggaactaatgtcacagcat

SEQ ID NO: 219435 - DNA, 25 bp, Probe Sequence
gaatcgtgaacattatctcaatatt

SEQ ID NO: 219436 - DNA, 25 bp, Probe Sequence
gaatcgtgaacattatctcaatatt

SEQ ID NO: 219437 - DNA, 25 bp, Probe Sequence
gaatctgtagcatcttctcaattgg

SEQ ID NO: 219438 - DNA, 25 bp, Probe Sequence
gaatctgtagcatcttctcaattgg

SEQ ID NO: 219439 - DNA, 25 bp, Probe Sequence
gaatctgaagaccggctagttgctg

SEQ ID NO: 219440 - DNA, 25 bp, Probe Sequence
gaatgtgaagcccaatgccagtcgg

SEQ ID NO: 219441 - DNA, 25 bp, Probe Sequence
gaagtgaaacgattgctgagtacag

SEQ ID NO: 219442 - DNA, 25 bp, Probe Sequence
gaaggctcaagcacagccagttatg

SEQ ID NO: 219443 - DNA, 25 bp, Probe Sequence
gaatgagtcaacacagcttttgcca

SEQ ID NO: 219444 - DNA, 25 bp, Probe Sequence
gaatgaaccattagatgctttgtgt

SEQ ID NO: 219445 - DNA, 25 bp, Probe Sequence
gaatgataccattcagattgatttg

SEQ ID NO: 219446 - DNA, 25 bp, Probe Sequence
gaatgagcctcagcagatgggcaag

SEQ ID NO: 219447 - DNA, 25 bp, Probe Sequence
gaatgagctgcttgtcaaggccctg

SEQ ID NO: 219448 - DNA, 25 bp, Probe Sequence
gaatgacattgacttcaggcaatct

SEQ ID NO: 219449 - DNA, 25 bp, Probe Sequence
gaatgacgatgccttcaaaatgctg

SEQ ID NO: 219450 - DNA, 25 bp, Probe Sequence
gaatgaagccttgtacagagctggg

SEQ ID NO: 219451 - DNA, 25 bp, Probe Sequence
gaagtgaggcttgggaagaccgccc

SEQ ID NO: 219452 - DNA, 25 bp, Probe Sequence
gaaggaagctatgtgaagaatggta

SEQ ID NO: 219453 - DNA, 25 bp, Probe Sequence
gaatggaatcgcagctgggaaatta

SEQ ID NO: 219454 - DNA, 25 bp, Probe Sequence
gaatgtacacgcatgctgaagctaa

SEQ ID NO: 219455 - DNA, 25 bp, Probe Sequence
gaatgcatccaccctgagaagcagc

SEQ ID NO: 219456 - DNA, 25 bp, Probe Sequence
gaatgatgccacctggaccaggaat

SEQ ID NO: 219457 - DNA, 25 bp, Probe Sequence
gaatgtgaaactgctccacgaaccc

SEQ ID NO: 219458 - DNA, 25 bp, Probe Sequence
gaagtaaaccgtgctcgttacatgc

SEQ ID NO: 219459 - DNA, 25 bp, Probe Sequence
gaagaagaaccgtgttttacagatc

SEQ ID NO: 219460 - DNA, 25 bp, Probe Sequence
gaagaacaaccgcaggtcgaattgt

SEQ ID NO: 219461 - DNA, 25 bp, Probe Sequence
gaagaaaaccatgaagctgctacat

SEQ ID NO: 219462 - DNA, 25 bp, Probe Sequence
gaagtccaccctgtgggcacaataa

SEQ ID NO: 219463 - DNA, 25 bp, Probe Sequence
gaatgtcccaactaaagaccagtta

SEQ ID NO: 219464 - DNA, 25 bp, Probe Sequence
gaatgttctggacatgcaccaccag

SEQ ID NO: 219465 - DNA, 25 bp, Probe Sequence
gaatgattctggtggaccactagct

SEQ ID NO: 219466 - DNA, 25 bp, Probe Sequence
gaatgattgcttaggaactgacaac

SEQ ID NO: 219467 - DNA, 25 bp, Probe Sequence
gaatgatatgttatgtacaaccagc

SEQ ID NO: 219468 - DNA, 25 bp, Probe Sequence
gaatgtatttccttacagtccatta

SEQ ID NO: 219469 - DNA, 25 bp, Probe Sequence
gaatggagttccagacgctcaatct

SEQ ID NO: 219470 - DNA, 25 bp, Probe Sequence
gaatggagttccagacgctcaatct

SEQ ID NO: 219471 - DNA, 25 bp, Probe Sequence
gaaggagtaccaggacgccttcctc

SEQ ID NO: 219472 - DNA, 25 bp, Probe Sequence
gaagggctcggagacctacagcccc

SEQ ID NO: 219473 - DNA, 25 bp, Probe Sequence
gaaggcgcgggataagtaccggcac

SEQ ID NO: 219474 - DNA, 25 bp, Probe Sequence
gacaggtggggaaaaggcccgtgag

SEQ ID NO: 219475 - DNA, 25 bp, Probe Sequence
gacaaaggggtgagggatgacggaa

SEQ ID NO: 219476 - DNA, 25 bp, Probe Sequence
gaacagggggtgtggtttctgggag

SEQ ID NO: 219477 - DNA, 25 bp, Probe Sequence
gaacagggggtgtggtttctgggag

SEQ ID NO: 219478 - DNA, 25 bp, Probe Sequence
gataagggggagttgaatttagctt

SEQ ID NO: 219479 - DNA, 25 bp, Probe Sequence
gaaaggggcgtctaagttctggctc

SEQ ID NO: 219480 - DNA, 25 bp, Probe Sequence
gaaggggtggttgagtttgcctctt

SEQ ID NO: 219481 - DNA, 25 bp, Probe Sequence
gaaggggtggttgagtttgcctctt

SEQ ID NO: 219482 - DNA, 25 bp, Probe Sequence
gaaggggtggttgagtttgcctctt

SEQ ID NO: 219483 - DNA, 25 bp, Probe Sequence
gaagaggtcgtggtacttttcaacg

SEQ ID NO: 219484 - DNA, 25 bp, Probe Sequence
gaaggtggtgcgctacttagtcaaa

SEQ ID NO: 219485 - DNA, 25 bp, Probe Sequence
gagggttggcctgagttaggaaaca

SEQ ID NO: 219486 - DNA, 25 bp, Probe Sequence
gaaggtagaacagagtgtaggaact

SEQ ID NO: 219487 - DNA, 25 bp, Probe Sequence
gaaggagaaaaacagtcggaagcag

SEQ ID NO: 219488 - DNA, 25 bp, Probe Sequence
gaacgaggggacgtaacggaggcag

SEQ ID NO: 219489 - DNA, 25 bp, Probe Sequence
gaatggagctggggcttagctggga

SEQ ID NO: 219490 - DNA, 25 bp, Probe Sequence
gaatgaggtctgggctaggtagaaa

SEQ ID NO: 219491 - DNA, 25 bp, Probe Sequence
gaatgcggcctagcaaggcaagaaa

SEQ ID NO: 219492 - DNA, 25 bp, Probe Sequence
gaatgcaggaaagagatcgaagaga

SEQ ID NO: 219493 - DNA, 25 bp, Probe Sequence
gaatgtacacaagatgcggaaatga

SEQ ID NO: 219494 - DNA, 25 bp, Probe Sequence
gaatgtcacccagagcggactgatg

SEQ ID NO: 219495 - DNA, 25 bp, Probe Sequence
gaatgccagacgctggggatgctgg

SEQ ID NO: 219496 - DNA, 25 bp, Probe Sequence
gaatccgaagtcctgggactgcggg

SEQ ID NO: 219497 - DNA, 25 bp, Probe Sequence
gaatccccagtttggggcttgtggg

SEQ ID NO: 219498 - DNA, 25 bp, Probe Sequence
gaaggcccactgaggcaggttcgtg

SEQ ID NO: 219499 - DNA, 25 bp, Probe Sequence
gaaggcccactgaggcaggttcgtg

SEQ ID NO: 219500 - DNA, 25 bp, Probe Sequence
gaaggcaccgaagagccctgtaggg

SEQ ID NO: 219501 - DNA, 25 bp, Probe Sequence
gaaggcaccgaagagccctgtaggg

SEQ ID NO: 219502 - DNA, 25 bp, Probe Sequence
gaaggacgaaagtgacctgcaagga

SEQ ID NO: 219503 - DNA, 25 bp, Probe Sequence
gacggaaacaggtgaaccctgagaa

SEQ ID NO: 219504 - DNA, 25 bp, Probe Sequence
gaaggcaaacacctttacacgctag

SEQ ID NO: 219505 - DNA, 25 bp, Probe Sequence
gaatgaagaagctctcctacatccg

SEQ ID NO: 219506 - DNA, 25 bp, Probe Sequence
gaatgaagaagctctcctacatccg

SEQ ID NO: 219507 - DNA, 25 bp, Probe Sequence
gaatgaagaagctctcctacatccg

SEQ ID NO: 219508 - DNA, 25 bp, Probe Sequence
gaatgctagaagaaggctctttccg

SEQ ID NO: 219509 - DNA, 25 bp, Probe Sequence
gaatggaaaaatctctcttgctccc

SEQ ID NO: 219510 - DNA, 25 bp, Probe Sequence
gaaggtgaagtaccccttcatccct

SEQ ID NO: 219511 - DNA, 25 bp, Probe Sequence
gaagccgagggacagccataacacc

SEQ ID NO: 219512 - DNA, 25 bp, Probe Sequence
gaatgagcaggtgaaagccatcaaa

SEQ ID NO: 219513 - DNA, 25 bp, Probe Sequence
gaatgagagtctgtagtgcgacaaa

SEQ ID NO: 219514 - DNA, 25 bp, Probe Sequence
gaatgatggatctgctgtgtccaaa

SEQ ID NO: 219515 - DNA, 25 bp, Probe Sequence
gaatgggcaaatctgtccaaacagc

SEQ ID NO: 219516 - DNA, 25 bp, Probe Sequence
gaaggagaagctcccatccaaatcc

SEQ ID NO: 219517 - DNA, 25 bp, Probe Sequence
gaatgagcagatgtacacccgagta

SEQ ID NO: 219518 - DNA, 25 bp, Probe Sequence
gaaggaataatctaccctgactaaa

SEQ ID NO: 219519 - DNA, 25 bp, Probe Sequence
gaatggagatgatcccttgctgact

SEQ ID NO: 219520 - DNA, 25 bp, Probe Sequence
gaatggagatgatcccttgctgact

SEQ ID NO: 219521 - DNA, 25 bp, Probe Sequence
gaatggacagaccacgcacgtgatt

SEQ ID NO: 219522 - DNA, 25 bp, Probe Sequence
gaatgaccaggccagtgttgtcact

SEQ ID NO: 219523 - DNA, 25 bp, Probe Sequence
gaatgcccagggacgtgtgaatgcc

SEQ ID NO: 219524 - DNA, 25 bp, Probe Sequence
gaaggccgggacatggcgaaccgga

SEQ ID NO: 219525 - DNA, 25 bp, Probe Sequence
gaagtgctccgggcatttgatgtac

SEQ ID NO: 219526 - DNA, 25 bp, Probe Sequence
gaagtgatgagcaccattccttagg

SEQ ID NO: 219527 - DNA, 25 bp, Probe Sequence
gaagttacttcgagcacctatagtg

SEQ ID NO: 219528 - DNA, 25 bp, Probe Sequence
gaatgtgttttatacccgatcgtgt

SEQ ID NO: 219529 - DNA, 25 bp, Probe Sequence
gaatggtttttcaccaccatcgaca

SEQ ID NO: 219530 - DNA, 25 bp, Probe Sequence
gaatggtttttcaccaccatcgaca

SEQ ID NO: 219531 - DNA, 25 bp, Probe Sequence
gaaggagtttccatccaccaaaaga

SEQ ID NO: 219532 - DNA, 25 bp, Probe Sequence
gaaggagtttccatatgccgatgcc

SEQ ID NO: 219533 - DNA, 25 bp, Probe Sequence
gaaggagtttccatatgccgatgcc

SEQ ID NO: 219534 - DNA, 25 bp, Probe Sequence
gagatgggatttccacggggagccc

SEQ ID NO: 219535 - DNA, 25 bp, Probe Sequence
gaaggttattacctaatggagatcc

SEQ ID NO: 219536 - DNA, 25 bp, Probe Sequence
gaaggactgaaaagtcttgtggaca

SEQ ID NO: 219537 - DNA, 25 bp, Probe Sequence
gaaggttggagttggtctaggacat

SEQ ID NO: 219538 - DNA, 25 bp, Probe Sequence
gaaggtttctaaattgtaggagcag

SEQ ID NO: 219539 - DNA, 25 bp, Probe Sequence
gaagggttttcaattcaatacgcgg

SEQ ID NO: 219540 - DNA, 25 bp, Probe Sequence
gaaggcttttgacggtaataggtgg

SEQ ID NO: 219541 - DNA, 25 bp, Probe Sequence
gaaggcggtgtatggattggggatg

SEQ ID NO: 219542 - DNA, 25 bp, Probe Sequence
gaatgtggagtacagttccgggagg

SEQ ID NO: 219543 - DNA, 25 bp, Probe Sequence
gaatgaggtgaactggtctcactgg

SEQ ID NO: 219544 - DNA, 25 bp, Probe Sequence
gaatggatggagcctttcatcctgg

SEQ ID NO: 219545 - DNA, 25 bp, Probe Sequence
gaaggatggacggaaacctcgactt

SEQ ID NO: 219546 - DNA, 25 bp, Probe Sequence
gaaggcatggaagagaatggttact

SEQ ID NO: 219547 - DNA, 25 bp, Probe Sequence
gaatgcggtgtagaaatgtttactg

SEQ ID NO: 219548 - DNA, 25 bp, Probe Sequence
gaatgcaggtgttgaaggatctttg

SEQ ID NO: 219549 - DNA, 25 bp, Probe Sequence
gaatgagacctaccagtattatggc

SEQ ID NO: 219550 - DNA, 25 bp, Probe Sequence
gaatggtgctcttcacgttttgacg

SEQ ID NO: 219551 - DNA, 25 bp, Probe Sequence
gaaggcagcataattcgttgtatga

SEQ ID NO: 219552 - DNA, 25 bp, Probe Sequence
gaaggcagcaaggttttgtggatct

SEQ ID NO: 219553 - DNA, 25 bp, Probe Sequence
gaatgtgccattgtttgctgttttt

SEQ ID NO: 219554 - DNA, 25 bp, Probe Sequence
gaatgttcatagctgctttatctat

SEQ ID NO: 219555 - DNA, 25 bp, Probe Sequence
gaatgttcatctaggttctcatgcc

SEQ ID NO: 219556 - DNA, 25 bp, Probe Sequence
gaatggtagtgtggttgctcacgca

SEQ ID NO: 219557 - DNA, 25 bp, Probe Sequence
gaaggaagttcagatcacagcatga

SEQ ID NO: 219558 - DNA, 25 bp, Probe Sequence
gaaggagcagtgaagccaagccagg

SEQ ID NO: 219559 - DNA, 25 bp, Probe Sequence
gaagtacagtgttctaggtttgctg

SEQ ID NO: 219560 - DNA, 25 bp, Probe Sequence
gaagtaacttaaaggtcacactgac

SEQ ID NO: 219561 - DNA, 25 bp, Probe Sequence
gaaggaccggaaaggagcgcctact

SEQ ID NO: 219562 - DNA, 25 bp, Probe Sequence
gaaggctctgggttacagaggccca

SEQ ID NO: 219563 - DNA, 25 bp, Probe Sequence
gaatggcctggtctacatgaagtac

SEQ ID NO: 219564 - DNA, 25 bp, Probe Sequence
gaaggcctttggtgagaagtcaagt

SEQ ID NO: 219565 - DNA, 25 bp, Probe Sequence
gaaggaattttacagaagctacaga

SEQ ID NO: 219566 - DNA, 25 bp, Probe Sequence
gacgggagtttaccccgatcacaga

SEQ ID NO: 219567 - DNA, 25 bp, Probe Sequence
gaagggagtgttgctcccagtccag

SEQ ID NO: 219568 - DNA, 25 bp, Probe Sequence
gaaggcggagtcgatctcccaaaag

SEQ ID NO: 219569 - DNA, 25 bp, Probe Sequence
gaaggctggaccatgcatccttaaa

SEQ ID NO: 219570 - DNA, 25 bp, Probe Sequence
gaaggctgtggaagaacctatacaa

SEQ ID NO: 219571 - DNA, 25 bp, Probe Sequence
gaaggctgtggaagaacctatacaa

SEQ ID NO: 219572 - DNA, 25 bp, Probe Sequence
gaaggcgtctgttgagcctttctct

SEQ ID NO: 219573 - DNA, 25 bp, Probe Sequence
gaatgggacaggtaccttccacttg

SEQ ID NO: 219574 - DNA, 25 bp, Probe Sequence
gaagtggaaggatcgactcggtaaa

SEQ ID NO: 219575 - DNA, 25 bp, Probe Sequence
gaagcggaaggggaatcgcgggaag

SEQ ID NO: 219576 - DNA, 25 bp, Probe Sequence
gaatgttggggtgaagctgtaggaa

SEQ ID NO: 219577 - DNA, 25 bp, Probe Sequence
gaagtacggggacagcggggagcag

SEQ ID NO: 219578 - DNA, 25 bp, Probe Sequence
gaatgtacgggacccaggggcagca

SEQ ID NO: 219579 - DNA, 25 bp, Probe Sequence
gaaggaaaggacagcggcggcagca

SEQ ID NO: 219580 - DNA, 25 bp, Probe Sequence
gaaggaagggtgtggggtcagcagg

SEQ ID NO: 219581 - DNA, 25 bp, Probe Sequence
gaaggagagggtgaggaagaaggag

SEQ ID NO: 219582 - DNA, 25 bp, Probe Sequence
gaaggcggaggtgaaggtggggcag

SEQ ID NO: 219583 - DNA, 25 bp, Probe Sequence
gaagtggggtggaagaagtggggtg

SEQ ID NO: 219584 - DNA, 25 bp, Probe Sequence
gaagtgggggaagtagaggaagtgg

SEQ ID NO: 219585 - DNA, 25 bp, Probe Sequence
gaagggttcgagctaagttcttggg

SEQ ID NO: 219586 - DNA, 25 bp, Probe Sequence
gaccgttttcagggacgttttgatg

SEQ ID NO: 219587 - DNA, 25 bp, Probe Sequence
gaaccttgattctggaaactttgat

SEQ ID NO: 219588 - DNA, 25 bp, Probe Sequence
gaatgtaaattgtctggaacctttg

SEQ ID NO: 219589 - DNA, 25 bp, Probe Sequence
gaagttatattctcaagtttatttt

SEQ ID NO: 219590 - DNA, 25 bp, Probe Sequence
gaatggtatttcttcagttttattt

SEQ ID NO: 219591 - DNA, 25 bp, Probe Sequence
gaaggtcgagctgtgcagttttagc

SEQ ID NO: 219592 - DNA, 25 bp, Probe Sequence
gacaggcggccctggatgtttatca

SEQ ID NO: 219593 - DNA, 25 bp, Probe Sequence
gaatggtaaacttgagcatcttttc

SEQ ID NO: 219594 - DNA, 25 bp, Probe Sequence
gaatggtcaggaatttgttttctca

SEQ ID NO: 219595 - DNA, 25 bp, Probe Sequence
gaatgtgggtgatctgcttttatct

SEQ ID NO: 219596 - DNA, 25 bp, Probe Sequence
gaatggatggtggaccctactattc

SEQ ID NO: 219597 - DNA, 25 bp, Probe Sequence
gaatgggggccaatattcaacattc

SEQ ID NO: 219598 - DNA, 25 bp, Probe Sequence
gaaggagggctcaaattcatcctct

SEQ ID NO: 219599 - DNA, 25 bp, Probe Sequence
gaatgggaccttctaatctctcatg

SEQ ID NO: 219600 - DNA, 25 bp, Probe Sequence
gaatgcaggccttttggaacatctc

SEQ ID NO: 219601 - DNA, 25 bp, Probe Sequence
gaatgcagtctttgtaggaaagctt

SEQ ID NO: 219602 - DNA, 25 bp, Probe Sequence
gaatgcgtgcttttaaaaggccgcc

SEQ ID NO: 219603 - DNA, 25 bp, Probe Sequence
gaatgtgtgagttcacccagaggcc

SEQ ID NO: 219604 - DNA, 25 bp, Probe Sequence
gaatgtgcgaaacccaacaagcctg

SEQ ID NO: 219605 - DNA, 25 bp, Probe Sequence
gaatgtactgaacctactaaccctt

SEQ ID NO: 219606 - DNA, 25 bp, Probe Sequence
gaaggactgaacctgcataccatcc

SEQ ID NO: 219607 - DNA, 25 bp, Probe Sequence
gaatgtccgagaattcttcttccgt

SEQ ID NO: 219608 - DNA, 25 bp, Probe Sequence
gaatgcttcaagatttccttgcctg

SEQ ID NO: 219609 - DNA, 25 bp, Probe Sequence
gaatgcttagagttcataaaataat

SEQ ID NO: 219610 - DNA, 25 bp, Probe Sequence
gaatgctgtaacctcaaaacagagt

SEQ ID NO: 219611 - DNA, 25 bp, Probe Sequence
gaatgcgggcgtgcagcagaacaac

SEQ ID NO: 219612 - DNA, 25 bp, Probe Sequence
gaatgaggggcttcacgagaggcca

SEQ ID NO: 219613 - DNA, 25 bp, Probe Sequence
gaatgagggagcctcccgaaggatt

SEQ ID NO: 219614 - DNA, 25 bp, Probe Sequence
gaagaggcagattctccctcaaagt

SEQ ID NO: 219615 - DNA, 25 bp, Probe Sequence
gaagggctctaatccaaaagtacca

SEQ ID NO: 219616 - DNA, 25 bp, Probe Sequence
gaagggcttcacgaccaaaggtgtc

SEQ ID NO: 219617 - DNA, 25 bp, Probe Sequence
gaagggcggcctcaaagtggctttt

SEQ ID NO: 219618 - DNA, 25 bp, Probe Sequence
gaagggaagccacaaaccagatttt

SEQ ID NO: 219619 - DNA, 25 bp, Probe Sequence
gaagggcaacttcaagacacataat

SEQ ID NO: 219620 - DNA, 25 bp, Probe Sequence
gaaggaccacttctcatattagatt

SEQ ID NO: 219621 - DNA, 25 bp, Probe Sequence
gaaggagccaacaatgtaagctaat

SEQ ID NO: 219622 - DNA, 25 bp, Probe Sequence
gaaggacacagaatggataagccag

SEQ ID NO: 219623 - DNA, 25 bp, Probe Sequence
gaatgaggactgtcaggtgacgccc

SEQ ID NO: 219624 - DNA, 25 bp, Probe Sequence
gaatgagcaacttcagagtgtcaaa

SEQ ID NO: 219625 - DNA, 25 bp, Probe Sequence
gaatgggcatctaaggcatctcaga

SEQ ID NO: 219626 - DNA, 25 bp, Probe Sequence
gaaggctactaagtgactcatgggc

SEQ ID NO: 219627 - DNA, 25 bp, Probe Sequence
gaaggccactgatgctgaggcagat

SEQ ID NO: 219628 - DNA, 25 bp, Probe Sequence
gaaggccactgatctgaggcagatg

SEQ ID NO: 219629 - DNA, 25 bp, Probe Sequence
gaatgtgaagctcactgtgagcaat

SEQ ID NO: 219630 - DNA, 25 bp, Probe Sequence
gaatgaatatgtctgtgtgaacaca

SEQ ID NO: 219631 - DNA, 25 bp, Probe Sequence
gaatgaatatggtttgtgctggaag

SEQ ID NO: 219632 - DNA, 25 bp, Probe Sequence
gaatgactctgtctttgcatggaaa

SEQ ID NO: 219633 - DNA, 25 bp, Probe Sequence
gaatgaatatttccttgatgctggt

SEQ ID NO: 219634 - DNA, 25 bp, Probe Sequence
gaatgaaatgttctgatgttgatgt

SEQ ID NO: 219635 - DNA, 25 bp, Probe Sequence
gaatgacaggtgcttggttatcttc

SEQ ID NO: 219636 - DNA, 25 bp, Probe Sequence
gaatggtgagtgcttcagttatagt

SEQ ID NO: 219637 - DNA, 25 bp, Probe Sequence
gaatggctttgattttgttatcgat

SEQ ID NO: 219638 - DNA, 25 bp, Probe Sequence
gaatgtctgtagtcagttgtttaca

SEQ ID NO: 219639 - DNA, 25 bp, Probe Sequence
gaatgtatgtactgtattgtcatca

SEQ ID NO: 219640 - DNA, 25 bp, Probe Sequence
gaatgtggcaacttgcttgtgccta

SEQ ID NO: 219641 - DNA, 25 bp, Probe Sequence
gaatgtgagcacactgcaggtgacc

SEQ ID NO: 219642 - DNA, 25 bp, Probe Sequence
gaatgatgtcactcatggtggacgc

SEQ ID NO: 219643 - DNA, 25 bp, Probe Sequence
gaatgagcgcactgtggtggtggct

SEQ ID NO: 219644 - DNA, 25 bp, Probe Sequence
gaatgagggccgagatgcagtgact

SEQ ID NO: 219645 - DNA, 25 bp, Probe Sequence
gaatgggtgccgtgttatactgttt

SEQ ID NO: 219646 - DNA, 25 bp, Probe Sequence
gaatgtagccctttttgtactgata

SEQ ID NO: 219647 - DNA, 25 bp, Probe Sequence
gaatgtacctctattagtttcaatt

SEQ ID NO: 219648 - DNA, 25 bp, Probe Sequence
gaatgttccttatctgagttgtaat

SEQ ID NO: 219649 - DNA, 25 bp, Probe Sequence
gaatgattccatacccgttagagaa

SEQ ID NO: 219650 - DNA, 25 bp, Probe Sequence
gaatgattccatacccgttagagaa

SEQ ID NO: 219651 - DNA, 25 bp, Probe Sequence
gaatgtttgatggcgccgtgtagaa

SEQ ID NO: 219652 - DNA, 25 bp, Probe Sequence
gaatgttgttgcacaggtgctacaa

SEQ ID NO: 219653 - DNA, 25 bp, Probe Sequence
gaatgatggttaccagagactgaga

SEQ ID NO: 219654 - DNA, 25 bp, Probe Sequence
gaatgtggaattcaaggctcagaag

SEQ ID NO: 219655 - DNA, 25 bp, Probe Sequence
gaatgctcgataaaatcactctcag

SEQ ID NO: 219656 - DNA, 25 bp, Probe Sequence
gaatgctagctctgagccagttcag

SEQ ID NO: 219657 - DNA, 25 bp, Probe Sequence
gaatgctagctctgagccagttcag

SEQ ID NO: 219658 - DNA, 25 bp, Probe Sequence
gaatgatcatcctgcgcaaattcag

SEQ ID NO: 219659 - DNA, 25 bp, Probe Sequence
gaatgcactgcctgagaaatgtccc

SEQ ID NO: 219660 - DNA, 25 bp, Probe Sequence
gaatgactgcaacaggcacttccca

SEQ ID NO: 219661 - DNA, 25 bp, Probe Sequence
gaatggtgcatacaaggccatcccc

SEQ ID NO: 219662 - DNA, 25 bp, Probe Sequence
gaagggtcaaaaagctccagcccag

SEQ ID NO: 219663 - DNA, 25 bp, Probe Sequence
gaagggtcaaaaagctccagcccag

SEQ ID NO: 219664 - DNA, 25 bp, Probe Sequence
gaagtggtccaaaggcaaagttcgg

SEQ ID NO: 219665 - DNA, 25 bp, Probe Sequence
gaaggggccgtgaggaagatccgca

SEQ ID NO: 219666 - DNA, 25 bp, Probe Sequence
gaaggctgggcaggtggtgacgatc

SEQ ID NO: 219667 - DNA, 25 bp, Probe Sequence
gaaggctgggcaggtggtgacgatc

SEQ ID NO: 219668 - DNA, 25 bp, Probe Sequence
gaagtggttctgctggtacgatttg

SEQ ID NO: 219669 - DNA, 25 bp, Probe Sequence
gaatgggattggcaagtaacttctg

SEQ ID NO: 219670 - DNA, 25 bp, Probe Sequence
gaaggagttgggcagctaatttggt

SEQ ID NO: 219671 - DNA, 25 bp, Probe Sequence
gaaggaatcccagttctaaattgtt

SEQ ID NO: 219672 - DNA, 25 bp, Probe Sequence
gaaggaatcccagttctaaattgtt

SEQ ID NO: 219673 - DNA, 25 bp, Probe Sequence
gaaggaattttctctctataagttt

SEQ ID NO: 219674 - DNA, 25 bp, Probe Sequence
gaaggaaggttctgacagacaatgg

SEQ ID NO: 219675 - DNA, 25 bp, Probe Sequence
gaaggaaactcctgacagtcttgtg

SEQ ID NO: 219676 - DNA, 25 bp, Probe Sequence
gaatggataaattggtagactcttt

SEQ ID NO: 219677 - DNA, 25 bp, Probe Sequence
gaatggtttaaactgatgactttta

SEQ ID NO: 219678 - DNA, 25 bp, Probe Sequence
gaaggccttaacctgattatttgga

SEQ ID NO: 219679 - DNA, 25 bp, Probe Sequence
gaaggacactaaagcctttattgta

SEQ ID NO: 219680 - DNA, 25 bp, Probe Sequence
gaatgaaccatccatcaacttctat

SEQ ID NO: 219681 - DNA, 25 bp, Probe Sequence
gaatgttactcaatcagcactcttt

SEQ ID NO: 219682 - DNA, 25 bp, Probe Sequence
gaatgtcaacgattagtcatgcaat

SEQ ID NO: 219683 - DNA, 25 bp, Probe Sequence
gaatggcaatcctaaatatgccaag

SEQ ID NO: 219684 - DNA, 25 bp, Probe Sequence
gaatggataactagaataaccgatg

SEQ ID NO: 219685 - DNA, 25 bp, Probe Sequence
gaatgaaatcctaaaatacctttct

SEQ ID NO: 219686 - DNA, 25 bp, Probe Sequence
gacgacaatccaaaaaccttctact

SEQ ID NO: 219687 - DNA, 25 bp, Probe Sequence
gaagtcaattcaaaggacctgcccc

SEQ ID NO: 219688 - DNA, 25 bp, Probe Sequence
gaagcgaataaaggggccgcgcccg

SEQ ID NO: 219689 - DNA, 25 bp, Probe Sequence
gaagcgaataaaggggccgcgcccg

SEQ ID NO: 219690 - DNA, 25 bp, Probe Sequence
gaatggaaaccatagagcccacggc

SEQ ID NO: 219691 - DNA, 25 bp, Probe Sequence
gaatgtgaacaccaaagaatgcctc

SEQ ID NO: 219692 - DNA, 25 bp, Probe Sequence
gaatgtgagccatggggagtgcctg

SEQ ID NO: 219693 - DNA, 25 bp, Probe Sequence
gaagggcaccaccaggagtggagcc

SEQ ID NO: 219694 - DNA, 25 bp, Probe Sequence
gaagtggcattcttctgggtggttc

SEQ ID NO: 219695 - DNA, 25 bp, Probe Sequence
gaatgttgtatctttggaggggttt

SEQ ID NO: 219696 - DNA, 25 bp, Probe Sequence
gaatgattgttctttcacttgggct

SEQ ID NO: 219697 - DNA, 25 bp, Probe Sequence
gaatgggtcttttcggtggagataa

SEQ ID NO: 219698 - DNA, 25 bp, Probe Sequence
gaaggagtccctttggtgtgtgaat

SEQ ID NO: 219699 - DNA, 25 bp, Probe Sequence
gaagggtacacattcgggtgaaata

SEQ ID NO: 219700 - DNA, 25 bp, Probe Sequence
gaaggtttccattggacctgccaat

SEQ ID NO: 219701 - DNA, 25 bp, Probe Sequence
gaagattttgctttaacctaactcg

SEQ ID NO: 219702 - DNA, 25 bp, Probe Sequence
gaagcagttattttctacgctacct

SEQ ID NO: 219703 - DNA, 25 bp, Probe Sequence
gaagcagttattttctacgctacct

SEQ ID NO: 219704 - DNA, 25 bp, Probe Sequence
gaagcagttattttctacgctacct

SEQ ID NO: 219705 - DNA, 25 bp, Probe Sequence
gaaggagacttgttctagcgtgccc

SEQ ID NO: 219706 - DNA, 25 bp, Probe Sequence
gaaggatccctgtttgtgggtgtgg

SEQ ID NO: 219707 - DNA, 25 bp, Probe Sequence
gaaggaccctggaatgggtgcaatg

SEQ ID NO: 219708 - DNA, 25 bp, Probe Sequence
gaatggtcctgtggggggtattgaa

SEQ ID NO: 219709 - DNA, 25 bp, Probe Sequence
gaaggcccttaatgcaggctatatc

SEQ ID NO: 219710 - DNA, 25 bp, Probe Sequence
gaaggccctgaagctgatggggtca

SEQ ID NO: 219711 - DNA, 25 bp, Probe Sequence
gaaggccctaatgaaggctgtggca

SEQ ID NO: 219712 - DNA, 25 bp, Probe Sequence
gaaggccctacgaagtgttgggcag

SEQ ID NO: 219713 - DNA, 25 bp, Probe Sequence
gaaggcccagaccagagtatgttgc

SEQ ID NO: 219714 - DNA, 25 bp, Probe Sequence
gaatggcaacagacagaagtacttt

SEQ ID NO: 219715 - DNA, 25 bp, Probe Sequence
gaatggttcaccgaagtgactctat

SEQ ID NO: 219716 - DNA, 25 bp, Probe Sequence
gaatgagacgcagacaagtactaag

SEQ ID NO: 219717 - DNA, 25 bp, Probe Sequence
gaatggtagcagccacaagtaaagg

SEQ ID NO: 219718 - DNA, 25 bp, Probe Sequence
gaatggtcgttggaggtcagaatgg

SEQ ID NO: 219719 - DNA, 25 bp, Probe Sequence
gaaggatgcctgcaagggcgactcg

SEQ ID NO: 219720 - DNA, 25 bp, Probe Sequence
gaaggatgcctgcaagggcgactcg

SEQ ID NO: 219721 - DNA, 25 bp, Probe Sequence
gaaggctggcatggagcgggaactg

SEQ ID NO: 219722 - DNA, 25 bp, Probe Sequence
gaatgtgcggcaagaggagaagact

SEQ ID NO: 219723 - DNA, 25 bp, Probe Sequence
gaatgagggcatcataggccagaca

SEQ ID NO: 219724 - DNA, 25 bp, Probe Sequence
gaaggagctcaccattggctcgaag

SEQ ID NO: 219725 - DNA, 25 bp, Probe Sequence
gaaggtggaccagggtctgcaagtt

SEQ ID NO: 219726 - DNA, 25 bp, Probe Sequence
gaacgtgccccagaatgaggcagtt

SEQ ID NO: 219727 - DNA, 25 bp, Probe Sequence
gaaggatcccaaggaatgggcagct

SEQ ID NO: 219728 - DNA, 25 bp, Probe Sequence
gaaggtcaccaacactgaagaccta

SEQ ID NO: 219729 - DNA, 25 bp, Probe Sequence
gaaggtcccaaattcttgagggtca

SEQ ID NO: 219730 - DNA, 25 bp, Probe Sequence
gaaggctcattcaatttctctagca

SEQ ID NO: 219731 - DNA, 25 bp, Probe Sequence
gaatggctgtgtacatgctgtcttc

SEQ ID NO: 219732 - DNA, 25 bp, Probe Sequence
gaatggtttgaggtgatctcgcaaa

SEQ ID NO: 219733 - DNA, 25 bp, Probe Sequence
gaatgtttctggggtaccaatacga

SEQ ID NO: 219734 - DNA, 25 bp, Probe Sequence
gaagtctccaggaagaaccctaaat

SEQ ID NO: 219735 - DNA, 25 bp, Probe Sequence
gaagtcaccgggatgaacctatcct

SEQ ID NO: 219736 - DNA, 25 bp, Probe Sequence
gaatgtgcaacgtggctgaaatcta

SEQ ID NO: 219737 - DNA, 25 bp, Probe Sequence
gaatgtgcagtgtcttgtaacaact

SEQ ID NO: 219738 - DNA, 25 bp, Probe Sequence
gaatggactgtttgtacgaagcatg

SEQ ID NO: 219739 - DNA, 25 bp, Probe Sequence
gaaggcactgttaccatagaagatg

SEQ ID NO: 219740 - DNA, 25 bp, Probe Sequence
gaatgtcagtgttcagccaaacagt

SEQ ID NO: 219741 - DNA, 25 bp, Probe Sequence
gaatgtccattttgcacataccagt

SEQ ID NO: 219742 - DNA, 25 bp, Probe Sequence
gaatgatccatcttgctaatagcta

SEQ ID NO: 219743 - DNA, 25 bp, Probe Sequence
gaatgtccatgctacaagaagttat

SEQ ID NO: 219744 - DNA, 25 bp, Probe Sequence
gaatgttctctttggcaacttatcc

SEQ ID NO: 219745 - DNA, 25 bp, Probe Sequence
gaagttccaacatcacttctgcctc

SEQ ID NO: 219746 - DNA, 25 bp, Probe Sequence
gaagttacaggctagcacaatacct

SEQ ID NO: 219747 - DNA, 25 bp, Probe Sequence
gaatgttaactgctgtaaatcctag

SEQ ID NO: 219748 - DNA, 25 bp, Probe Sequence
gaatgttacctgtgccagaattaga

SEQ ID NO: 219749 - DNA, 25 bp, Probe Sequence
gaacgtacctgagcctgcaaatgta

SEQ ID NO: 219750 - DNA, 25 bp, Probe Sequence
gaagagtatccttccttcagggttt

SEQ ID NO: 219751 - DNA, 25 bp, Probe Sequence
gaatggtggcttgtttcatggtttt

SEQ ID NO: 219752 - DNA, 25 bp, Probe Sequence
gaatgactttttgctgtgatggttt

SEQ ID NO: 219753 - DNA, 25 bp, Probe Sequence
gaatgacttcttcttggtggcttgt

SEQ ID NO: 219754 - DNA, 25 bp, Probe Sequence
gaatgacaagggcttggtgagagag

SEQ ID NO: 219755 - DNA, 25 bp, Probe Sequence
gaaggaagatggttgggtgaaagta

SEQ ID NO: 219756 - DNA, 25 bp, Probe Sequence
gaagggtgcggttggggatgaggta

SEQ ID NO: 219757 - DNA, 25 bp, Probe Sequence
gaaggggaggtcctgtggtagcttg

SEQ ID NO: 219758 - DNA, 25 bp, Probe Sequence
gaaggagtaggtggtgggatctcac

SEQ ID NO: 219759 - DNA, 25 bp, Probe Sequence
gaatgttgtgtttgcggtggttgac

SEQ ID NO: 219760 - DNA, 25 bp, Probe Sequence
gaatgtgtggtgatcgagtggtctg

SEQ ID NO: 219761 - DNA, 25 bp, Probe Sequence
gaagggaggattcatgctctgggcg

SEQ ID NO: 219762 - DNA, 25 bp, Probe Sequence
gaaggccatcgtgggtgcttgagag

SEQ ID NO: 219763 - DNA, 25 bp, Probe Sequence
gaatgtgccacctgactttcagatg

SEQ ID NO: 219764 - DNA, 25 bp, Probe Sequence
gaatgtgcccttagagcgcactagt

SEQ ID NO: 219765 - DNA, 25 bp, Probe Sequence
gaaggactgcttcatatactgatgt

SEQ ID NO: 219766 - DNA, 25 bp, Probe Sequence
gaaggactgcttcatatactgatgt

SEQ ID NO: 219767 - DNA, 25 bp, Probe Sequence
gaatggttgccactgttattagatt

SEQ ID NO: 219768 - DNA, 25 bp, Probe Sequence
gaatgtttccattgattatgaaatg

SEQ ID NO: 219769 - DNA, 25 bp, Probe Sequence
gaatgatttccacgagggacagagg

SEQ ID NO: 219770 - DNA, 25 bp, Probe Sequence
gaagatcctccacaagaaagggaaa

SEQ ID NO: 219771 - DNA, 25 bp, Probe Sequence
gaatgatctctctgaatcctaaggg

SEQ ID NO: 219772 - DNA, 25 bp, Probe Sequence
gaatgacttcataaagtttggtgtg

SEQ ID NO: 219773 - DNA, 25 bp, Probe Sequence
gaatgactctgaatgcagacttttg

SEQ ID NO: 219774 - DNA, 25 bp, Probe Sequence
gaatgtttgtcatatgcttcttgca

SEQ ID NO: 219775 - DNA, 25 bp, Probe Sequence
gaatgtgttgtccaaaatgcctgtt

SEQ ID NO: 219776 - DNA, 25 bp, Probe Sequence
gaatgtatttgctgacaaccattaa

SEQ ID NO: 219777 - DNA, 25 bp, Probe Sequence
gaaggagttgcggacaatcctcaat

SEQ ID NO: 219778 - DNA, 25 bp, Probe Sequence
gaaggagttcctgcataaccagggg

SEQ ID NO: 219779 - DNA, 25 bp, Probe Sequence
gaatgtggtaactctctaccaggag

SEQ ID NO: 219780 - DNA, 25 bp, Probe Sequence
gaatggggagactcctcaagcaggc

SEQ ID NO: 219781 - DNA, 25 bp, Probe Sequence
gaatgggtggataccgtcaagctgg

SEQ ID NO: 219782 - DNA, 25 bp, Probe Sequence
gaatggtgtgaacccggaagtcgga

SEQ ID NO: 219783 - DNA, 25 bp, Probe Sequence
gaaggttgacacaggaaagtcgtac

SEQ ID NO: 219784 - DNA, 25 bp, Probe Sequence
gaagttgtgacctgtacttgtacta

SEQ ID NO: 219785 - DNA, 25 bp, Probe Sequence
gaagtcttggactgcaactacatac

SEQ ID NO: 219786 - DNA, 25 bp, Probe Sequence
gaagacttggcccaggaaaaacctg

SEQ ID NO: 219787 - DNA, 25 bp, Probe Sequence
gaactcccagcccaggaaagttcca

SEQ ID NO: 219788 - DNA, 25 bp, Probe Sequence
gaatgttccagcgactggacaagct

SEQ ID NO: 219789 - DNA, 25 bp, Probe Sequence
gaatgattctagacactaagatatg

SEQ ID NO: 219790 - DNA, 25 bp, Probe Sequence
gaatgtctcttcaatctccagaaag

SEQ ID NO: 219791 - DNA, 25 bp, Probe Sequence
gaatggcctcataagctcacagaaa

SEQ ID NO: 219792 - DNA, 25 bp, Probe Sequence
gaatgatagtcatactcctggaaca

SEQ ID NO: 219793 - DNA, 25 bp, Probe Sequence
gaatgatgagtttcctccaggacat

SEQ ID NO: 219794 - DNA, 25 bp, Probe Sequence
gaatgtgattcacaccacagagact

SEQ ID NO: 219795 - DNA, 25 bp, Probe Sequence
gaatggagtcctgtgcacaaatctg

SEQ ID NO: 219796 - DNA, 25 bp, Probe Sequence
gaatgtgaatcctttccttatggcc

SEQ ID NO: 219797 - DNA, 25 bp, Probe Sequence
gaatgtgaacttcattctgaaggga

SEQ ID NO: 219798 - DNA, 25 bp, Probe Sequence
gaatgtacacttttttagagggcac

SEQ ID NO: 219799 - DNA, 25 bp, Probe Sequence
gaatgtacactgtggttatggtcac

SEQ ID NO: 219800 - DNA, 25 bp, Probe Sequence
gaatgtaggaatgagtgttgggcac

SEQ ID NO: 219801 - DNA, 25 bp, Probe Sequence
gaatgaggaaattgagggcagggca

SEQ ID NO: 219802 - DNA, 25 bp, Probe Sequence
gaatgagtgttaatgagtccaggag

SEQ ID NO: 219803 - DNA, 25 bp, Probe Sequence
gaaggcattctttagtggcaggctg

SEQ ID NO: 219804 - DNA, 25 bp, Probe Sequence
gaaggatgtgtttggcctgaggcgg

SEQ ID NO: 219805 - DNA, 25 bp, Probe Sequence
gaaggcgagctcaggcgtgaatgtg

SEQ ID NO: 219806 - DNA, 25 bp, Probe Sequence
gaaggctatctggggcaggcacaaa

SEQ ID NO: 219807 - DNA, 25 bp, Probe Sequence
gaaggatatattcggatggcaagaa

SEQ ID NO: 219808 - DNA, 25 bp, Probe Sequence
gaaggatcataacggagcccggagg

SEQ ID NO: 219809 - DNA, 25 bp, Probe Sequence
gaaggcacataatagagctcaaacg

SEQ ID NO: 219810 - DNA, 25 bp, Probe Sequence
gaaggcaaggagcagcatgtcacat

SEQ ID NO: 219811 - DNA, 25 bp, Probe Sequence
gaatgtgcacagaacacgtggctca

SEQ ID NO: 219812 - DNA, 25 bp, Probe Sequence
gaatgtgacagtacagcctgatgac

SEQ ID NO: 219813 - DNA, 25 bp, Probe Sequence
gaatggcacagcattctcttaccag

SEQ ID NO: 219814 - DNA, 25 bp, Probe Sequence
gaatggcacactttcaacgactcca

SEQ ID NO: 219815 - DNA, 25 bp, Probe Sequence
gaaggcagactattcacagccctat

SEQ ID NO: 219816 - DNA, 25 bp, Probe Sequence
gaatggctgatctaataatgttgac

SEQ ID NO: 219817 - DNA, 25 bp, Probe Sequence
gaatgtttccaaaagtcgcatcgct

SEQ ID NO: 219818 - DNA, 25 bp, Probe Sequence
gaatggattccacacagtggatagc

SEQ ID NO: 219819 - DNA, 25 bp, Probe Sequence
gaaggatgtccacatgcctaagcac

SEQ ID NO: 219820 - DNA, 25 bp, Probe Sequence
gaaggatgtccacatgcctaagcac

SEQ ID NO: 219821 - DNA, 25 bp, Probe Sequence
gaaggatgtccacatgcctaagcac

SEQ ID NO: 219822 - DNA, 25 bp, Probe Sequence
gaaggattcagcaaagacaacagag

SEQ ID NO: 219823 - DNA, 25 bp, Probe Sequence
gaaggaccatgggaacatcaaggcc

SEQ ID NO: 219824 - DNA, 25 bp, Probe Sequence
gaaccaagatgggggaccagcaacc

SEQ ID NO: 219825 - DNA, 25 bp, Probe Sequence
gaaggctcaagggggagccgcctgc

SEQ ID NO: 219826 - DNA, 25 bp, Probe Sequence
gaagaccaagggcgacttcatcctg

SEQ ID NO: 219827 - DNA, 25 bp, Probe Sequence
gaaggccaagagccttccttcagcc

SEQ ID NO: 219828 - DNA, 25 bp, Probe Sequence
gaaggctcaaacctgatctgagtac

SEQ ID NO: 219829 - DNA, 25 bp, Probe Sequence
gaaggcatataagacctctgtatct

SEQ ID NO: 219830 - DNA, 25 bp, Probe Sequence
gaaggctaccatgagctgcactttt

SEQ ID NO: 219831 - DNA, 25 bp, Probe Sequence
gaaggtagagcccactgctcattgt

SEQ ID NO: 219832 - DNA, 25 bp, Probe Sequence
gaatgtgttgatgtgcacagctaat

SEQ ID NO: 219833 - DNA, 25 bp, Probe Sequence
gaagtgagccatggtgctaatgaat

SEQ ID NO: 219834 - DNA, 25 bp, Probe Sequence
gaatgtgcctctagtgtgaattttg

SEQ ID NO: 219835 - DNA, 25 bp, Probe Sequence
gaaggccttaggtgttgcatgtcta

SEQ ID NO: 219836 - DNA, 25 bp, Probe Sequence
gaaggcacttaatagtacatcatgt

SEQ ID NO: 219837 - DNA, 25 bp, Probe Sequence
gaaggcctgctctaaattatccagt

SEQ ID NO: 219838 - DNA, 25 bp, Probe Sequence
gaatggcctgtattcactatcttcg

SEQ ID NO: 219839 - DNA, 25 bp, Probe Sequence
gaaggcgcaggcttactgagctgtc

SEQ ID NO: 219840 - DNA, 25 bp, Probe Sequence
gaaggcgcaggatatccaggttaca

SEQ ID NO: 219841 - DNA, 25 bp, Probe Sequence
gaaggctgaacacaggcttgttaat

SEQ ID NO: 219842 - DNA, 25 bp, Probe Sequence
gaaggctgggagcagctttgttaaa

SEQ ID NO: 219843 - DNA, 25 bp, Probe Sequence
gacatggcctgggtacttttaaaag

SEQ ID NO: 219844 - DNA, 25 bp, Probe Sequence
gaatggtcttggcactattacacaa

SEQ ID NO: 219845 - DNA, 25 bp, Probe Sequence
gagagagtttggcaccaactggccc

SEQ ID NO: 219846 - DNA, 25 bp, Probe Sequence
gaatggactttgcacactttggccc

SEQ ID NO: 219847 - DNA, 25 bp, Probe Sequence
gaatggactttgcacactttggccc

SEQ ID NO: 219848 - DNA, 25 bp, Probe Sequence
gaatggattggtcctgccttttgtc

SEQ ID NO: 219849 - DNA, 25 bp, Probe Sequence
gaatgtatattgtcttgtaatgttg

SEQ ID NO: 219850 - DNA, 25 bp, Probe Sequence
gaatgttgatttcctaacagcattg

SEQ ID NO: 219851 - DNA, 25 bp, Probe Sequence
gaatgttcagttctagccaaggtag

SEQ ID NO: 219852 - DNA, 25 bp, Probe Sequence
gaagtagatgttataccactggtgg

SEQ ID NO: 219853 - DNA, 25 bp, Probe Sequence
gaaggggtattttgccactggagga

SEQ ID NO: 219854 - DNA, 25 bp, Probe Sequence
gaaggtttgtctaagctgcctgggt

SEQ ID NO: 219855 - DNA, 25 bp, Probe Sequence
gaatgttttgtggaccactttggtt

SEQ ID NO: 219856 - DNA, 25 bp, Probe Sequence
gaatgttttgtggacacgttggttt

SEQ ID NO: 219857 - DNA, 25 bp, Probe Sequence
gaatgtattttgtaccgtgtttctt

SEQ ID NO: 219858 - DNA, 25 bp, Probe Sequence
gaagtcttttctaccgacttctcca

SEQ ID NO: 219859 - DNA, 25 bp, Probe Sequence
gaagtagtaaccgtggagctgactc

SEQ ID NO: 219860 - DNA, 25 bp, Probe Sequence
gaaggcagtaacctttcatcatgat

SEQ ID NO: 219861 - DNA, 25 bp, Probe Sequence
gaaggtgtctaccattctactgcat

SEQ ID NO: 219862 - DNA, 25 bp, Probe Sequence
gaatgtggtacaaagttagctctga

SEQ ID NO: 219863 - DNA, 25 bp, Probe Sequence
gaatggggatatgtgcctgttcgac

SEQ ID NO: 219864 - DNA, 25 bp, Probe Sequence
gaaggtggaagctatgctggttccc

SEQ ID NO: 219865 - DNA, 25 bp, Probe Sequence
gaaggtgcaggacctggagacccgc

SEQ ID NO: 219866 - DNA, 25 bp, Probe Sequence
gaaggtgcaggacctggagacccgc

SEQ ID NO: 219867 - DNA, 25 bp, Probe Sequence
gaatggctaggaactggagtgcatc

SEQ ID NO: 219868 - DNA, 25 bp, Probe Sequence
gaaggctggcagaacgcaagtgcat

SEQ ID NO: 219869 - DNA, 25 bp, Probe Sequence
gaaggcgatgcacaacagattatac

SEQ ID NO: 219870 - DNA, 25 bp, Probe Sequence
gaaggccagcagaagtagattaaaa

SEQ ID NO: 219871 - DNA, 25 bp, Probe Sequence
gaaggctccacttgttcttaaagac

SEQ ID NO: 219872 - DNA, 25 bp, Probe Sequence
gaaggcaacacagtgtgttccaaaa

SEQ ID NO: 219873 - DNA, 25 bp, Probe Sequence
gaatggatacctctgtgtcctaagt

SEQ ID NO: 219874 - DNA, 25 bp, Probe Sequence
gaatggaattctctgtaagcctagt

SEQ ID NO: 219875 - DNA, 25 bp, Probe Sequence
gaatggtttatgaacttcccatagg

SEQ ID NO: 219876 - DNA, 25 bp, Probe Sequence
gaatgtgttttgcagttaccatctc

SEQ ID NO: 219877 - DNA, 25 bp, Probe Sequence
gaatgtgttgtttggttctactgca

SEQ ID NO: 219878 - DNA, 25 bp, Probe Sequence
gaatggttgttgttttccactgaga

SEQ ID NO: 219879 - DNA, 25 bp, Probe Sequence
gaatggtttttgttgagtctctgaa

SEQ ID NO: 219880 - DNA, 25 bp, Probe Sequence
gaaggtatttatcatagttgcccat

SEQ ID NO: 219881 - DNA, 25 bp, Probe Sequence
gaaggaagcgttcttggtgctacac

SEQ ID NO: 219882 - DNA, 25 bp, Probe Sequence
gaaggaactttcggctataattccg

SEQ ID NO: 219883 - DNA, 25 bp, Probe Sequence
gaaggacacttctgccatgataacc

SEQ ID NO: 219884 - DNA, 25 bp, Probe Sequence
gaaggacacttctgccatgataacc

SEQ ID NO: 219885 - DNA, 25 bp, Probe Sequence
gaaggacacttctgccatgataacc

SEQ ID NO: 219886 - DNA, 25 bp, Probe Sequence
gaaggacacttgtatgctagtctat

SEQ ID NO: 219887 - DNA, 25 bp, Probe Sequence
gaaggacacttgtatgctagtctat

SEQ ID NO: 219888 - DNA, 25 bp, Probe Sequence
gaaggcattgctgtagtcagtcatt

SEQ ID NO: 219889 - DNA, 25 bp, Probe Sequence
gaaggcagtgtggtatatgtgtgca

SEQ ID NO: 219890 - DNA, 25 bp, Probe Sequence
gaaggcagtgacattcagtggcagt

SEQ ID NO: 219891 - DNA, 25 bp, Probe Sequence
gaaggcaatatcctgtctctgtgca

SEQ ID NO: 219892 - DNA, 25 bp, Probe Sequence
gaaggattgatcagagcattgtgca

SEQ ID NO: 219893 - DNA, 25 bp, Probe Sequence
gaaggggatcgcaacatctggatcg

SEQ ID NO: 219894 - DNA, 25 bp, Probe Sequence
gaatgggcgtccaaatatggttata

SEQ ID NO: 219895 - DNA, 25 bp, Probe Sequence
gaaggggtcaacattggcttagagg

SEQ ID NO: 219896 - DNA, 25 bp, Probe Sequence
gaagggtaataggttggttgcagtg

SEQ ID NO: 219897 - DNA, 25 bp, Probe Sequence
gaaggagacctgtgcttggttcact

SEQ ID NO: 219898 - DNA, 25 bp, Probe Sequence
gaagtggacctggttgttcactcct

SEQ ID NO: 219899 - DNA, 25 bp, Probe Sequence
gaatgtgatgacctggggtccctgc

SEQ ID NO: 219900 - DNA, 25 bp, Probe Sequence
gaatggcatatactgaggtggtcgt

SEQ ID NO: 219901 - DNA, 25 bp, Probe Sequence
gaaggcattactgggtaccggccaa

SEQ ID NO: 219902 - DNA, 25 bp, Probe Sequence
gaaggacaagcaggtctaccgggcc

SEQ ID NO: 219903 - DNA, 25 bp, Probe Sequence
gaatgtctataaggtctaaaggtag

SEQ ID NO: 219904 - DNA, 25 bp, Probe Sequence
gaatgtctaaagtgtagcatgaagg

SEQ ID NO: 219905 - DNA, 25 bp, Probe Sequence
gaatgtggattacagcaagctgaag

SEQ ID NO: 219906 - DNA, 25 bp, Probe Sequence
gaatgtgtttgcagagctagtggat

SEQ ID NO: 219907 - DNA, 25 bp, Probe Sequence
gaatgtgtcttgcgagctgttgtag

SEQ ID NO: 219908 - DNA, 25 bp, Probe Sequence
gaatggagtctgcagatgggttcgc

SEQ ID NO: 219909 - DNA, 25 bp, Probe Sequence
gaaggcatgttccagaaaggtctct

SEQ ID NO: 219910 - DNA, 25 bp, Probe Sequence
gaaggctcatggcaagaaagtgctc

SEQ ID NO: 219911 - DNA, 25 bp, Probe Sequence
gaaggctgctggagctggcaaggtc

SEQ ID NO: 219912 - DNA, 25 bp, Probe Sequence
gaaggctgctggagctggcaaggtc

SEQ ID NO: 219913 - DNA, 25 bp, Probe Sequence
gaaggctgctggagctggcaaggtc

SEQ ID NO: 219914 - DNA, 25 bp, Probe Sequence
gaaggctgctggagctggcaaggtc

SEQ ID NO: 219915 - DNA, 25 bp, Probe Sequence
gaatggctttggacttgcagaatgt

SEQ ID NO: 219916 - DNA, 25 bp, Probe Sequence
gaaggatcttagactctgccgagtt

SEQ ID NO: 219917 - DNA, 25 bp, Probe Sequence
gaatggatcaatggtgccacggagc

SEQ ID NO: 219918 - DNA, 25 bp, Probe Sequence
gaaggacacggtgcagcagagggtg

SEQ ID NO: 219919 - DNA, 25 bp, Probe Sequence
gaaggacggttatcagagagatggg

SEQ ID NO: 219920 - DNA, 25 bp, Probe Sequence
gaatggtgggaatgtcagtagtgcc

SEQ ID NO: 219921 - DNA, 25 bp, Probe Sequence
gaaggctggacaagttcgtcctgcc

SEQ ID NO: 219922 - DNA, 25 bp, Probe Sequence
gaaggctgccaggtgtatggcttct

SEQ ID NO: 219923 - DNA, 25 bp, Probe Sequence
gaatggctgtgcgggacagatgcat

SEQ ID NO: 219924 - DNA, 25 bp, Probe Sequence
gaatggcggcagtggagcatcgtca

SEQ ID NO: 219925 - DNA, 25 bp, Probe Sequence
gaatggcggcagtggagcatcgtca

SEQ ID NO: 219926 - DNA, 25 bp, Probe Sequence
gaaggcgaaggcctacatccttttc

SEQ ID NO: 219927 - DNA, 25 bp, Probe Sequence
gaaggcaggaaccaagccctttatt

SEQ ID NO: 219928 - DNA, 25 bp, Probe Sequence
gaaggcgcgatatgaacgttttgtt

SEQ ID NO: 219929 - DNA, 25 bp, Probe Sequence
gaaggcggatgatgggcgtcccttc

SEQ ID NO: 219930 - DNA, 25 bp, Probe Sequence
gaaggcggatgatgggcgtcccttc

SEQ ID NO: 219931 - DNA, 25 bp, Probe Sequence
gaaggcggatgatgggcgtcccttc

SEQ ID NO: 219932 - DNA, 25 bp, Probe Sequence
gaagtggtgatgtgttggtctccgg

SEQ ID NO: 219933 - DNA, 25 bp, Probe Sequence
gaatgtcttatattgttctgactgc

SEQ ID NO: 219934 - DNA, 25 bp, Probe Sequence
gaatgtcttatatgcattatctttt

SEQ ID NO: 219935 - DNA, 25 bp, Probe Sequence
gaatgtcataaatctaggccctgat

SEQ ID NO: 219936 - DNA, 25 bp, Probe Sequence
gaagtaaaaaactcctgtgtggcag

SEQ ID NO: 219937 - DNA, 25 bp, Probe Sequence
gaagtaaggaaggacccagtaggag

SEQ ID NO: 219938 - DNA, 25 bp, Probe Sequence
gaaggagggaaggacgcttgcaagg

SEQ ID NO: 219939 - DNA, 25 bp, Probe Sequence
gaaggggaaatcagcagtgtgcaac

SEQ ID NO: 219940 - DNA, 25 bp, Probe Sequence
gaaggggatctatttctagtgaacc

SEQ ID NO: 219941 - DNA, 25 bp, Probe Sequence
gaaggcggaattccctcagtagaac

SEQ ID NO: 219942 - DNA, 25 bp, Probe Sequence
gaaggcaccaatttcgtcgtggacc

SEQ ID NO: 219943 - DNA, 25 bp, Probe Sequence
gaaggccgtgaagtcgtcagaacac

SEQ ID NO: 219944 - DNA, 25 bp, Probe Sequence
gaaggctgtctgtacttgtgaaaca

SEQ ID NO: 219945 - DNA, 25 bp, Probe Sequence
gaaggctgctgttggtgttaagaag

SEQ ID NO: 219946 - DNA, 25 bp, Probe Sequence
gaatggccgttcttgattattacag

SEQ ID NO: 219947 - DNA, 25 bp, Probe Sequence
gaaggtgggtcatgtattaatcagt

SEQ ID NO: 219948 - DNA, 25 bp, Probe Sequence
gaaggttttctctattggaccagta

SEQ ID NO: 219949 - DNA, 25 bp, Probe Sequence
gaagtgggttctgcaaggagcctat

SEQ ID NO: 219950 - DNA, 25 bp, Probe Sequence
gaagtgctggttaccaactttcctg

SEQ ID NO: 219951 - DNA, 25 bp, Probe Sequence
gaagctacttttgaagccttgccta

SEQ ID NO: 219952 - DNA, 25 bp, Probe Sequence
gaagtccttatgttaagccctggca

SEQ ID NO: 219953 - DNA, 25 bp, Probe Sequence
gaagtcctttacgaagactcgtcaa

SEQ ID NO: 219954 - DNA, 25 bp, Probe Sequence
gaagtcttttcaccaaaccctgact

SEQ ID NO: 219955 - DNA, 25 bp, Probe Sequence
gaaggcttttcataaatcccctcat

SEQ ID NO: 219956 - DNA, 25 bp, Probe Sequence
gaaggtgtgtaatacaaacccctct

SEQ ID NO: 219957 - DNA, 25 bp, Probe Sequence
gaaggcaggttattagaagagtccc

SEQ ID NO: 219958 - DNA, 25 bp, Probe Sequence
gaaggctaatcttaagagcgatgac

SEQ ID NO: 219959 - DNA, 25 bp, Probe Sequence
gaatggcttatcttgacaggcagtg

SEQ ID NO: 219960 - DNA, 25 bp, Probe Sequence
gaaggcactgactgaagacaggatg

SEQ ID NO: 219961 - DNA, 25 bp, Probe Sequence
gaagtggcagtctacgacaaggatg

SEQ ID NO: 219962 - DNA, 25 bp, Probe Sequence
gaatggggttacaaagtgagagcct

SEQ ID NO: 219963 - DNA, 25 bp, Probe Sequence
gaatggtgtttacagtgctgcaaat

SEQ ID NO: 219964 - DNA, 25 bp, Probe Sequence
gaaggtgggtgacatgtggatcttg

SEQ ID NO: 219965 - DNA, 25 bp, Probe Sequence
gaatggggcaatcaatggctgtctt

SEQ ID NO: 219966 - DNA, 25 bp, Probe Sequence
gaatggcggagaccacactggtcct

SEQ ID NO: 219967 - DNA, 25 bp, Probe Sequence
gaaggaggagagactcacggagctc

SEQ ID NO: 219968 - DNA, 25 bp, Probe Sequence
gaatggagtgaatacacagtagcat

SEQ ID NO: 219969 - DNA, 25 bp, Probe Sequence
gaatggaggtcattacacctactct

SEQ ID NO: 219970 - DNA, 25 bp, Probe Sequence
gaaggatttcaaacaccaattgctt

SEQ ID NO: 219971 - DNA, 25 bp, Probe Sequence
gaaggagtttcaacatccagcttca

SEQ ID NO: 219972 - DNA, 25 bp, Probe Sequence
gaaggatgctgtgatccacgcactt

SEQ ID NO: 219973 - DNA, 25 bp, Probe Sequence
gaagtgagtgacacacccagctttg

SEQ ID NO: 219974 - DNA, 25 bp, Probe Sequence
gaatggaagacatcctacgctgctt

SEQ ID NO: 219975 - DNA, 25 bp, Probe Sequence
gaaggaaaattttagcgtgctcact

SEQ ID NO: 219976 - DNA, 25 bp, Probe Sequence
gaaggacaatcctggcacgactact

SEQ ID NO: 219977 - DNA, 25 bp, Probe Sequence
gaatgggactcctggagtcctcctg

SEQ ID NO: 219978 - DNA, 25 bp, Probe Sequence
gaagaggactactggtttctccttt

SEQ ID NO: 219979 - DNA, 25 bp, Probe Sequence
gaaggatactggtgttttctgactt

SEQ ID NO: 219980 - DNA, 25 bp, Probe Sequence
gaaggtggggaggaatgtttaatct

SEQ ID NO: 219981 - DNA, 25 bp, Probe Sequence
gaaggtggggaggaatgtttaatct

SEQ ID NO: 219982 - DNA, 25 bp, Probe Sequence
gaaggtggtgggcagatgccgggcc

SEQ ID NO: 219983 - DNA, 25 bp, Probe Sequence
gaaggtaggagagaggtctgaggca

SEQ ID NO: 219984 - DNA, 25 bp, Probe Sequence
gaaggaacggatgggcctctagtga

SEQ ID NO: 219985 - DNA, 25 bp, Probe Sequence
gaaggaactgccattgccatatagg

SEQ ID NO: 219986 - DNA, 25 bp, Probe Sequence
gaaggacaacccttgcagaattggg

SEQ ID NO: 219987 - DNA, 25 bp, Probe Sequence
gaagggaagcctgcgggcttcggaa

SEQ ID NO: 219988 - DNA, 25 bp, Probe Sequence
gaagggaagccgtcaggtgggcgag

SEQ ID NO: 219989 - DNA, 25 bp, Probe Sequence
gaaggagaaggcacaggaccggctg

SEQ ID NO: 219990 - DNA, 25 bp, Probe Sequence
gaaggagaaggcacaggaccggctg

SEQ ID NO: 219991 - DNA, 25 bp, Probe Sequence
gaaggccggcgtgcagaaacaggct

SEQ ID NO: 219992 - DNA, 25 bp, Probe Sequence
gaaggcctcgttgagagaaggtctc

SEQ ID NO: 219993 - DNA, 25 bp, Probe Sequence
gaaggcctgaggtctgcggaaggtg

SEQ ID NO: 219994 - DNA, 25 bp, Probe Sequence
gaaggcagggaggcctggcagggtc

SEQ ID NO: 219995 - DNA, 25 bp, Probe Sequence
gaaggagggtaggcagggaggctct

SEQ ID NO: 219996 - DNA, 25 bp, Probe Sequence
gaaggctgctggcaaaggggacgtc

SEQ ID NO: 219997 - DNA, 25 bp, Probe Sequence
gaagtccagcgggggtgggagaatc

SEQ ID NO: 219998 - DNA, 25 bp, Probe Sequence
gaaggctgtgaccgggatgggaaat

SEQ ID NO: 219999 - DNA, 25 bp, Probe Sequence
gaagaggaacagagctctgggaaag

SEQ ID NO: 220000 - DNA, 25 bp, Probe Sequence
gaagggaatatgggccaggtactga

SEQ ID NO: 220001 - DNA, 25 bp, Probe Sequence
gaaggtcagaattcccagagtcctc

SEQ ID NO: 220002 - DNA, 25 bp, Probe Sequence
gaagggaacttctacagtgctacgc

SEQ ID NO: 220003 - DNA, 25 bp, Probe Sequence
gaatgggacctttgacagcagaccc

SEQ ID NO: 220004 - DNA, 25 bp, Probe Sequence
gaaggccaccgaaaagcagcacatc

SEQ ID NO: 220005 - DNA, 25 bp, Probe Sequence
gaaggccaagaaatagacgctctcc

SEQ ID NO: 220006 - DNA, 25 bp, Probe Sequence
gaaggccaaccatgagacacatcgc

SEQ ID NO: 220007 - DNA, 25 bp, Probe Sequence
gaagtgcatattcattgatgccaag

SEQ ID NO: 220008 - DNA, 25 bp, Probe Sequence
gaatggcattttactcatctataaa

SEQ ID NO: 220009 - DNA, 25 bp, Probe Sequence
gaagtcatttttcattatttgtact

SEQ ID NO: 220010 - DNA, 25 bp, Probe Sequence
gacagttgttttgagtttcgtacca

SEQ ID NO: 220011 - DNA, 25 bp, Probe Sequence
gaagttggtcctgatgtcttctttc

SEQ ID NO: 220012 - DNA, 25 bp, Probe Sequence
gaacttcctttgttagtatctttga

SEQ ID NO: 220013 - DNA, 25 bp, Probe Sequence
gaacgtccttgtgaagacctttatc

SEQ ID NO: 220014 - DNA, 25 bp, Probe Sequence
gaagcgtgacttctaaactttatcc

SEQ ID NO: 220015 - DNA, 25 bp, Probe Sequence
gaagggtcatgtgttaactataatc

SEQ ID NO: 220016 - DNA, 25 bp, Probe Sequence
gaaggcccaggtcaacatctaagcc

SEQ ID NO: 220017 - DNA, 25 bp, Probe Sequence
gaaggcccaggtcaacatctaagcc

SEQ ID NO: 220018 - DNA, 25 bp, Probe Sequence
gaaggtcagggtcacccaagcaaca

SEQ ID NO: 220019 - DNA, 25 bp, Probe Sequence
gaaggaagtggtctccgaattcaag

SEQ ID NO: 220020 - DNA, 25 bp, Probe Sequence
gaaggaagagggatccgtctcttaa

SEQ ID NO: 220021 - DNA, 25 bp, Probe Sequence
gaacaaatggtgcttaccctttgaa

SEQ ID NO: 220022 - DNA, 25 bp, Probe Sequence
gacgaattgaggcttaaactttact

SEQ ID NO: 220023 - DNA, 25 bp, Probe Sequence
gacggtaaggagatatagagttttt

SEQ ID NO: 220024 - DNA, 25 bp, Probe Sequence
gaaggttaggatttaacagtcattt

SEQ ID NO: 220025 - DNA, 25 bp, Probe Sequence
gaaggatattaataaacagagcttt

SEQ ID NO: 220026 - DNA, 25 bp, Probe Sequence
gaaggatttcatcaataacagactc

SEQ ID NO: 220027 - DNA, 25 bp, Probe Sequence
gaaggccttcatcttcaagtactcg

SEQ ID NO: 220028 - DNA, 25 bp, Probe Sequence
gaaggctctctctttctagaggtgc

SEQ ID NO: 220029 - DNA, 25 bp, Probe Sequence
gaaggcattctgggagcattaggtc

SEQ ID NO: 220030 - DNA, 25 bp, Probe Sequence
gaatggaaatgtcgactatatgaga

SEQ ID NO: 220031 - DNA, 25 bp, Probe Sequence
gaatggaggatgcagcttaagatat

SEQ ID NO: 220032 - DNA, 25 bp, Probe Sequence
gaatggaggagacgtattacaactt

SEQ ID NO: 220033 - DNA, 25 bp, Probe Sequence
gaatggaaagatctcattaccacac

SEQ ID NO: 220034 - DNA, 25 bp, Probe Sequence
gaagctagaaccacatgtacacacc

SEQ ID NO: 220035 - DNA, 25 bp, Probe Sequence
gaagctaaacccatatgcaaagacc

SEQ ID NO: 220036 - DNA, 25 bp, Probe Sequence
gaagtaattcagctacagggtgacc

SEQ ID NO: 220037 - DNA, 25 bp, Probe Sequence
gaaggacttgactccaggtgcagag

SEQ ID NO: 220038 - DNA, 25 bp, Probe Sequence
gaaggacttgagggccagttattgc

SEQ ID NO: 220039 - DNA, 25 bp, Probe Sequence
gaagggcggggagagtgccattgcc

SEQ ID NO: 220040 - DNA, 25 bp, Probe Sequence
gaaggaccggtatgagatcaattcc

SEQ ID NO: 220041 - DNA, 25 bp, Probe Sequence
gaagatgacccgtggaacacttgcc

SEQ ID NO: 220042 - DNA, 25 bp, Probe Sequence
gaagtcgacctgtggcaaatgtggc

SEQ ID NO: 220043 - DNA, 25 bp, Probe Sequence
gaagtcgaagtttgaagatatggca

SEQ ID NO: 220044 - DNA, 25 bp, Probe Sequence
gaagggaatgtttgagttgatgctc

SEQ ID NO: 220045 - DNA, 25 bp, Probe Sequence
gaaggggctgtcgtgtgtgtggccc

SEQ ID NO: 220046 - DNA, 25 bp, Probe Sequence
gaaggggctgtcgtgtgtgtggccc

SEQ ID NO: 220047 - DNA, 25 bp, Probe Sequence
gaaggcagtggcaactgtggggccc

SEQ ID NO: 220048 - DNA, 25 bp, Probe Sequence
gaaggcagtggcaactgtggggccc

SEQ ID NO: 220049 - DNA, 25 bp, Probe Sequence
gaaggcagtggcaactgtggggccc

SEQ ID NO: 220050 - DNA, 25 bp, Probe Sequence
gaaggacggcaagtgggtggtgcag

SEQ ID NO: 220051 - DNA, 25 bp, Probe Sequence
gaaggacgtggagtgtggggaagga

SEQ ID NO: 220052 - DNA, 25 bp, Probe Sequence
gaaggggatggaatgggggaagagg

SEQ ID NO: 220053 - DNA, 25 bp, Probe Sequence
gaaggcgaggagagtgaggaggagg

SEQ ID NO: 220054 - DNA, 25 bp, Probe Sequence
gaaggcgaggagagtgaggaggagg

SEQ ID NO: 220055 - DNA, 25 bp, Probe Sequence
gaagtcgggcaagaaggagaagaag

SEQ ID NO: 220056 - DNA, 25 bp, Probe Sequence
gaagtggctgaggtggaagaagaag

SEQ ID NO: 220057 - DNA, 25 bp, Probe Sequence
gaagagctcaggtggaaaaggaggg

SEQ ID NO: 220058 - DNA, 25 bp, Probe Sequence
gaaggctcatggtgtggacaaggtc

SEQ ID NO: 220059 - DNA, 25 bp, Probe Sequence
gaaggctagcaatgtgtgccagaag

SEQ ID NO: 220060 - DNA, 25 bp, Probe Sequence
gaaggctggatatggtgccgctgta

SEQ ID NO: 220061 - DNA, 25 bp, Probe Sequence
gaaggctgtgatgtcgctgtcagga

SEQ ID NO: 220062 - DNA, 25 bp, Probe Sequence
gaaggctgttcgagagctgcttacc

SEQ ID NO: 220063 - DNA, 25 bp, Probe Sequence
gaaggcttacgagagcagcttgatg

SEQ ID NO: 220064 - DNA, 25 bp, Probe Sequence
gaaggttatcagtaagcagctagag

SEQ ID NO: 220065 - DNA, 25 bp, Probe Sequence
gaaggactattatagcagcagacgc

SEQ ID NO: 220066 - DNA, 25 bp, Probe Sequence
gaagggctcagtaaacgctctgcca

SEQ ID NO: 220067 - DNA, 25 bp, Probe Sequence
gaaggccatacattgacacgatctc

SEQ ID NO: 220068 - DNA, 25 bp, Probe Sequence
gaatggcaaacaaacggaccagaag

SEQ ID NO: 220069 - DNA, 25 bp, Probe Sequence
gaagcacaacaaaaagggcctaaag

SEQ ID NO: 220070 - DNA, 25 bp, Probe Sequence
gaagcaaaaatgtgagggtcctgga

SEQ ID NO: 220071 - DNA, 25 bp, Probe Sequence
gaagtaggaattcatgggtcctcaa

SEQ ID NO: 220072 - DNA, 25 bp, Probe Sequence
gaagtaaaattgccgggcaagggca

SEQ ID NO: 220073 - DNA, 25 bp, Probe Sequence
gaaggtgacgttcccggagagggca

SEQ ID NO: 220074 - DNA, 25 bp, Probe Sequence
gaaggatgacagctcctggaggagg

SEQ ID NO: 220075 - DNA, 25 bp, Probe Sequence
gaaggaaccttcttgtggaagcagc

SEQ ID NO: 220076 - DNA, 25 bp, Probe Sequence
gaaggacagcgcagctctattaagc

SEQ ID NO: 220077 - DNA, 25 bp, Probe Sequence
gaaggagcagacattaatatccatg

SEQ ID NO: 220078 - DNA, 25 bp, Probe Sequence
gaaggactgccaaattttctcatga

SEQ ID NO: 220079 - DNA, 25 bp, Probe Sequence
gaaggagccgcatggctgtttcgaa

SEQ ID NO: 220080 - DNA, 25 bp, Probe Sequence
gaaggacctgcagtcctttcttgtc

SEQ ID NO: 220081 - DNA, 25 bp, Probe Sequence
gaagtcaagtcaccgcattttggct

SEQ ID NO: 220082 - DNA, 25 bp, Probe Sequence
gaaggcaatgacacgattatgtgcg

SEQ ID NO: 220083 - DNA, 25 bp, Probe Sequence
gaaggcatccatacctgcattttgc

SEQ ID NO: 220084 - DNA, 25 bp, Probe Sequence
gaaggcccatgaggcatgcatttaa

SEQ ID NO: 220085 - DNA, 25 bp, Probe Sequence
gaaggcccatgcaaatgcacgtgct

SEQ ID NO: 220086 - DNA, 25 bp, Probe Sequence
gaaccagcagcagctatccgagctg

SEQ ID NO: 220087 - DNA, 25 bp, Probe Sequence
gaagggcagcaggacaccgctgctg

SEQ ID NO: 220088 - DNA, 25 bp, Probe Sequence
gaaggaggtggacgagcagatgctg

SEQ ID NO: 220089 - DNA, 25 bp, Probe Sequence
gaaggacctgaggcagacgagcaca

SEQ ID NO: 220090 - DNA, 25 bp, Probe Sequence
gaaggtcctcagggaccagatgagg

SEQ ID NO: 220091 - DNA, 25 bp, Probe Sequence
gaaggctggcactgtacgagtgagg

SEQ ID NO: 220092 - DNA, 25 bp, Probe Sequence
gaaggccgcatctgtgaagcagaga

SEQ ID NO: 220093 - DNA, 25 bp, Probe Sequence
gaaggcggctgatgagagcgagaga

SEQ ID NO: 220094 - DNA, 25 bp, Probe Sequence
gaaggcggctgatgagagcgagaga

SEQ ID NO: 220095 - DNA, 25 bp, Probe Sequence
gaaggcggctgcacagagatgtaga

SEQ ID NO: 220096 - DNA, 25 bp, Probe Sequence
gaaggcgaggactaacttataggtg

SEQ ID NO: 220097 - DNA, 25 bp, Probe Sequence
gaagtgagaagagaactttagagaa

SEQ ID NO: 220098 - DNA, 25 bp, Probe Sequence
gaagctggaaaccgacgtagcaaat

SEQ ID NO: 220099 - DNA, 25 bp, Probe Sequence
gaagtagaaacaggaagtcataaat

SEQ ID NO: 220100 - DNA, 25 bp, Probe Sequence
gaagtcgaaacataggtagcaacta

SEQ ID NO: 220101 - DNA, 25 bp, Probe Sequence
gaagtttaactaagagtatctttag

SEQ ID NO: 220102 - DNA, 25 bp, Probe Sequence
gaagttacaagttacaatttggtga

SEQ ID NO: 220103 - DNA, 25 bp, Probe Sequence
gaagttaaggcataaagtctttaat

SEQ ID NO: 220104 - DNA, 25 bp, Probe Sequence
gaagattaaactggactagccttat

SEQ ID NO: 220105 - DNA, 25 bp, Probe Sequence
gaagtcaaatactgaatagaccaat

SEQ ID NO: 220106 - DNA, 25 bp, Probe Sequence
gaagtcaagatgtcctaaggcccag

SEQ ID NO: 220107 - DNA, 25 bp, Probe Sequence
gaagtcagaatggcctgtattcact

SEQ ID NO: 220108 - DNA, 25 bp, Probe Sequence
gaaggcgtatggctgatctgacctc

SEQ ID NO: 220109 - DNA, 25 bp, Probe Sequence
gaaggcgtatggctgatctgacctc

SEQ ID NO: 220110 - DNA, 25 bp, Probe Sequence
gaaggccacaggagatgctatcaat

SEQ ID NO: 220111 - DNA, 25 bp, Probe Sequence
gaaggctgccaggggatttcgaagt

SEQ ID NO: 220112 - DNA, 25 bp, Probe Sequence
gaaggtgactagctatactccaact

SEQ ID NO: 220113 - DNA, 25 bp, Probe Sequence
gaaggtgccgagctataaacctcca

SEQ ID NO: 220114 - DNA, 25 bp, Probe Sequence
gaaggggcagcgctaacgatgcctc

SEQ ID NO: 220115 - DNA, 25 bp, Probe Sequence
gaaggtggcctggatccaggacttc

SEQ ID NO: 220116 - DNA, 25 bp, Probe Sequence
gaaggaggcgctctctgaggaaatc

SEQ ID NO: 220117 - DNA, 25 bp, Probe Sequence
gaaggtcccgttagagcgaaatgct

SEQ ID NO: 220118 - DNA, 25 bp, Probe Sequence
gaagtgttcctttagacaaagttgt

SEQ ID NO: 220119 - DNA, 25 bp, Probe Sequence
gaagttgttttgtaatctactttgt

SEQ ID NO: 220120 - DNA, 25 bp, Probe Sequence
gaagtgggtgaattctactttttat

SEQ ID NO: 220121 - DNA, 25 bp, Probe Sequence
gaactggaggtcattacgttaagtg

SEQ ID NO: 220122 - DNA, 25 bp, Probe Sequence
gtcaatggtgaagattacggtaacg

SEQ ID NO: 220123 - DNA, 25 bp, Probe Sequence
ggcaaggtaacctgggaggcaacaa

SEQ ID NO: 220124 - DNA, 25 bp, Probe Sequence
gagaacgaccccgagtggtggaaat

SEQ ID NO: 220125 - DNA, 25 bp, Probe Sequence
ggaaaaccccatgaatgcgggaaat

SEQ ID NO: 220126 - DNA, 25 bp, Probe Sequence
gaaaggaccagacttcaacggggag

SEQ ID NO: 220127 - DNA, 25 bp, Probe Sequence
gaacccagtcccatacactggggca

SEQ ID NO: 220128 - DNA, 25 bp, Probe Sequence
gaaggctatgtcccagaacactggg

SEQ ID NO: 220129 - DNA, 25 bp, Probe Sequence
gaaggctgagtcccagcattcactt

SEQ ID NO: 220130 - DNA, 25 bp, Probe Sequence
gaaggctgatgaaccaattgcagat

SEQ ID NO: 220131 - DNA, 25 bp, Probe Sequence
gaaggagagatcaacaatgtgcagt

SEQ ID NO: 220132 - DNA, 25 bp, Probe Sequence
gaaggaccgaaaatggcagatattc

SEQ ID NO: 220133 - DNA, 25 bp, Probe Sequence
gaaggaactgaaggtggcagagatt

SEQ ID NO: 220134 - DNA, 25 bp, Probe Sequence
gaaggcaacgcatgatggggcgcca

SEQ ID NO: 220135 - DNA, 25 bp, Probe Sequence
gaaggcatctcgttcaggggccttt

SEQ ID NO: 220136 - DNA, 25 bp, Probe Sequence
gaaggttgtggtaggggccatttgt

SEQ ID NO: 220137 - DNA, 25 bp, Probe Sequence
gaaggtgcgttgtaggggtattgat

SEQ ID NO: 220138 - DNA, 25 bp, Probe Sequence
gaaggattcctgtaagggtgactca

SEQ ID NO: 220139 - DNA, 25 bp, Probe Sequence
gaaggattcctatgtgggcgacgag

SEQ ID NO: 220140 - DNA, 25 bp, Probe Sequence
gaaggattcctatgtgggcgacgag

SEQ ID NO: 220141 - DNA, 25 bp, Probe Sequence
gaaggaacactgtagtataccccaa

SEQ ID NO: 220142 - DNA, 25 bp, Probe Sequence
gaaggctaaatgaatattatcccta

SEQ ID NO: 220143 - DNA, 25 bp, Probe Sequence
gaaggctaaatgaatattatcccta

SEQ ID NO: 220144 - DNA, 25 bp, Probe Sequence
gaaggctgaaaggatgactttcgct

SEQ ID NO: 220145 - DNA, 25 bp, Probe Sequence
gaaggtgaaaggaagtatttgctgc

SEQ ID NO: 220146 - DNA, 25 bp, Probe Sequence
gaaggagcagaagggcactttgacc

SEQ ID NO: 220147 - DNA, 25 bp, Probe Sequence
gaaggaaagggggctgtatacagct

SEQ ID NO: 220148 - DNA, 25 bp, Probe Sequence
gaagggaacgttcatgttaacatgt

SEQ ID NO: 220149 - DNA, 25 bp, Probe Sequence
gaagggtaggttagatgctattaag

SEQ ID NO: 220150 - DNA, 25 bp, Probe Sequence
gaaggggagagaggatgatcgaaaa

SEQ ID NO: 220151 - DNA, 25 bp, Probe Sequence
gaagaaggatcgggtagctcaaaag

SEQ ID NO: 220152 - DNA, 25 bp, Probe Sequence
gaagtaggcaaggctgggcacatca

SEQ ID NO: 220153 - DNA, 25 bp, Probe Sequence
gaaggagagcaagctcctgccaacc

SEQ ID NO: 220154 - DNA, 25 bp, Probe Sequence
gaaggatgaaaggcctgtgacgatc

SEQ ID NO: 220155 - DNA, 25 bp, Probe Sequence
gaaggagaaagcccgacacagctgc

SEQ ID NO: 220156 - DNA, 25 bp, Probe Sequence
gaaggagtcaacaccaacagctctg

SEQ ID NO: 220157 - DNA, 25 bp, Probe Sequence
gaaggagtacctcctggcaactatg

SEQ ID NO: 220158 - DNA, 25 bp, Probe Sequence
gaagggctaatgacctgggagctag

SEQ ID NO: 220159 - DNA, 25 bp, Probe Sequence
gaaggctgccaaagacagggtgcta

SEQ ID NO: 220160 - DNA, 25 bp, Probe Sequence
gaagtctgcagaatagagggagcct

SEQ ID NO: 220161 - DNA, 25 bp, Probe Sequence
gaaggctcagcagaggtgggatccc

SEQ ID NO: 220162 - DNA, 25 bp, Probe Sequence
gaaggctcagcagaggtgggatccc

SEQ ID NO: 220163 - DNA, 25 bp, Probe Sequence
gaaggcacacagagattctggatct

SEQ ID NO: 220164 - DNA, 25 bp, Probe Sequence
gaaggcaagattggcatatcattgt

SEQ ID NO: 220165 - DNA, 25 bp, Probe Sequence
gaaggcaacattggcctgcactgcc

SEQ ID NO: 220166 - DNA, 25 bp, Probe Sequence
gaaggaaattccagcgctgcttcat

SEQ ID NO: 220167 - DNA, 25 bp, Probe Sequence
gaaggaacagttaccctgctttgcc

SEQ ID NO: 220168 - DNA, 25 bp, Probe Sequence
gaaggatacattattcgtgtttgca

SEQ ID NO: 220169 - DNA, 25 bp, Probe Sequence
gaaggactctctatttctggtcgac

SEQ ID NO: 220170 - DNA, 25 bp, Probe Sequence
gaaggagttcacagaagcggtggaa

SEQ ID NO: 220171 - DNA, 25 bp, Probe Sequence
gaagggttcctgaaaggagcagagc

SEQ ID NO: 220172 - DNA, 25 bp, Probe Sequence
gaagtggattctaagaagaggcaat

SEQ ID NO: 220173 - DNA, 25 bp, Probe Sequence
gaagggaattacagaaggcctttga

SEQ ID NO: 220174 - DNA, 25 bp, Probe Sequence
gaagggatataagttatttactttg

SEQ ID NO: 220175 - DNA, 25 bp, Probe Sequence
gaagggcattaggagtgtttcattt

SEQ ID NO: 220176 - DNA, 25 bp, Probe Sequence
gaaggacttcgggtgtttgacaagg

SEQ ID NO: 220177 - DNA, 25 bp, Probe Sequence
gaaggacttcgggtgtttgacaagg

SEQ ID NO: 220178 - DNA, 25 bp, Probe Sequence
gaaggaataggagggtttgggtgtg

SEQ ID NO: 220179 - DNA, 25 bp, Probe Sequence
gaaggcaagagggggtggaggggtg

SEQ ID NO: 220180 - DNA, 25 bp, Probe Sequence
gaaggaatggtggggtggcgtttgg

SEQ ID NO: 220181 - DNA, 25 bp, Probe Sequence
gaaggcataggccagggtggttatt

SEQ ID NO: 220182 - DNA, 25 bp, Probe Sequence
gaagtgctatacggttaggtctgtt

SEQ ID NO: 220183 - DNA, 25 bp, Probe Sequence
gaagtagtacttgattggtcatttg

SEQ ID NO: 220184 - DNA, 25 bp, Probe Sequence
gaagtagtttgatgatttgtttggc

SEQ ID NO: 220185 - DNA, 25 bp, Probe Sequence
gaaggttgtatgtaaatctgctttg

SEQ ID NO: 220186 - DNA, 25 bp, Probe Sequence
gaaggttgtatgtaaatctgctttg

SEQ ID NO: 220187 - DNA, 25 bp, Probe Sequence
gaagttagttgtcttctctgtgctg

SEQ ID NO: 220188 - DNA, 25 bp, Probe Sequence
gaaggtagtaccattgtatgtatgt

SEQ ID NO: 220189 - DNA, 25 bp, Probe Sequence
gaaggtagttttgtgtgactgtgac

SEQ ID NO: 220190 - DNA, 25 bp, Probe Sequence
gaaggcagaaatctttggacttggt

SEQ ID NO: 220191 - DNA, 25 bp, Probe Sequence
gaagtctgaaatgttcgttttgtgg

SEQ ID NO: 220192 - DNA, 25 bp, Probe Sequence
gaagtgtctaatgcattaacttttg

SEQ ID NO: 220193 - DNA, 25 bp, Probe Sequence
gaagtgtctaatgcattaacttttg

SEQ ID NO: 220194 - DNA, 25 bp, Probe Sequence
gaagattcatagtactttgactcca

SEQ ID NO: 220195 - DNA, 25 bp, Probe Sequence
gaaggacaggtatgtgcattgccca

SEQ ID NO: 220196 - DNA, 25 bp, Probe Sequence
gaaggagggtcatttagtcacgaac

SEQ ID NO: 220197 - DNA, 25 bp, Probe Sequence
gaaggaggtgtcagaattacgagca

SEQ ID NO: 220198 - DNA, 25 bp, Probe Sequence
gaagtgggcttcagatttaaggctg

SEQ ID NO: 220199 - DNA, 25 bp, Probe Sequence
gaagtaccttcgcagtgtaggagat

SEQ ID NO: 220200 - DNA, 25 bp, Probe Sequence
gaaggacttgctgggaggctgagag

SEQ ID NO: 220201 - DNA, 25 bp, Probe Sequence
gaaggacttggcgaaggcagtggca

SEQ ID NO: 220202 - DNA, 25 bp, Probe Sequence
gaaggacctggcgaaggcagtggca

SEQ ID NO: 220203 - DNA, 25 bp, Probe Sequence
gaaggaactggtagtgccgatggca

SEQ ID NO: 220204 - DNA, 25 bp, Probe Sequence
gaaggcaagattgtgtcccattccc

SEQ ID NO: 220205 - DNA, 25 bp, Probe Sequence
gaaggcaattaatgtccctaccatc

SEQ ID NO: 220206 - DNA, 25 bp, Probe Sequence
gaaggcagattaattttctcttaat

SEQ ID NO: 220207 - DNA, 25 bp, Probe Sequence
gaaggctattgagtttcactgttta

SEQ ID NO: 220208 - DNA, 25 bp, Probe Sequence
gaaggctcttggaataactgaaatt

SEQ ID NO: 220209 - DNA, 25 bp, Probe Sequence
gaaggatttgtagtgaccgaagctg

SEQ ID NO: 220210 - DNA, 25 bp, Probe Sequence
gaaggcttatgatgctacccacctt

SEQ ID NO: 220211 - DNA, 25 bp, Probe Sequence
gaaggagtgtgaggatacccacctt

SEQ ID NO: 220212 - DNA, 25 bp, Probe Sequence
gaagagggatggacaaccccctatt

SEQ ID NO: 220213 - DNA, 25 bp, Probe Sequence
tgaagggtggttcaccggttcttca

SEQ ID NO: 220214 - DNA, 25 bp, Probe Sequence
gaagtggggcttcaccaagttcaat

SEQ ID NO: 220215 - DNA, 25 bp, Probe Sequence
gaagtggggagtatccaacttaggg

SEQ ID NO: 220216 - DNA, 25 bp, Probe Sequence
gaagggggaatatcacacaccgggg

SEQ ID NO: 220217 - DNA, 25 bp, Probe Sequence
gaacgtgggacaataccaagagctg

SEQ ID NO: 220218 - DNA, 25 bp, Probe Sequence
gaaggggacaacatcccagatgcat

SEQ ID NO: 220219 - DNA, 25 bp, Probe Sequence
gaagtgtggttcagggccagtgcat

SEQ ID NO: 220220 - DNA, 25 bp, Probe Sequence
gaagtgtggttcagggccagtgcat

SEQ ID NO: 220221 - DNA, 25 bp, Probe Sequence
gaagtctggtggtgggtcgtaagtt

SEQ ID NO: 220222 - DNA, 25 bp, Probe Sequence
gaagcttggaggagggttgtaaaag

SEQ ID NO: 220223 - DNA, 25 bp, Probe Sequence
gaagtgtgaaggacgggtgccttta

SEQ ID NO: 220224 - DNA, 25 bp, Probe Sequence
gaagggggggcacggtgcctgtaat

SEQ ID NO: 220225 - DNA, 25 bp, Probe Sequence
gaaggagtcggggggacactgggat

SEQ ID NO: 220226 - DNA, 25 bp, Probe Sequence
gaaggagaatcgctggaacctggga

SEQ ID NO: 220227 - DNA, 25 bp, Probe Sequence
gaaggagaatctcttgaacctggca

SEQ ID NO: 220228 - DNA, 25 bp, Probe Sequence
gaaggtgattctcctaggtcactgg

SEQ ID NO: 220229 - DNA, 25 bp, Probe Sequence
gaaggtgctcttactcagttaatga

SEQ ID NO: 220230 - DNA, 25 bp, Probe Sequence
gaagtgcgtcgaaatggattacata

SEQ ID NO: 220231 - DNA, 25 bp, Probe Sequence
gaagttgcatccacatggcattcat

SEQ ID NO: 220232 - DNA, 25 bp, Probe Sequence
gaaggtgacagcttcatgtgtgtta

SEQ ID NO: 220233 - DNA, 25 bp, Probe Sequence
gaaggtgatgccttcttccattact

SEQ ID NO: 220234 - DNA, 25 bp, Probe Sequence
gaaggagatgccccttctactactt

SEQ ID NO: 220235 - DNA, 25 bp, Probe Sequence
gaagggtcctggactctactacgtg

SEQ ID NO: 220236 - DNA, 25 bp, Probe Sequence
gaaggagtcctgcatcttttttttt

SEQ ID NO: 220237 - DNA, 25 bp, Probe Sequence
gaaggagtccttgcatcaatttttc

SEQ ID NO: 220238 - DNA, 25 bp, Probe Sequence
gaaggagtttgtgactattctcatc

SEQ ID NO: 220239 - DNA, 25 bp, Probe Sequence
gaaggcacttttagaatgattccat

SEQ ID NO: 220240 - DNA, 25 bp, Probe Sequence
gaaggactataaagataataccagc

SEQ ID NO: 220241 - DNA, 25 bp, Probe Sequence
gaaggttctaataataaagccagga

SEQ ID NO: 220242 - DNA, 25 bp, Probe Sequence
gaagaggacggtcacgaagccgaga

SEQ ID NO: 220243 - DNA, 25 bp, Probe Sequence
gagaggacggggcacaaaccctgac

SEQ ID NO: 220244 - DNA, 25 bp, Probe Sequence
gaaggacgaagaggacaaagcccgg

SEQ ID NO: 220245 - DNA, 25 bp, Probe Sequence
gaaggaccagtgtgacaagtgccgg

SEQ ID NO: 220246 - DNA, 25 bp, Probe Sequence
gaagtaacagtttctagttgccgaa

SEQ ID NO: 220247 - DNA, 25 bp, Probe Sequence
gaagggacagttactaaccctgaat

SEQ ID NO: 220248 - DNA, 25 bp, Probe Sequence
gaagtggaacgtataaaggctgaat

SEQ ID NO: 220249 - DNA, 25 bp, Probe Sequence
gaagggaactcttttccaatggaat

SEQ ID NO: 220250 - DNA, 25 bp, Probe Sequence
gaaccggaccctaatcaaacgaatg

SEQ ID NO: 220251 - DNA, 25 bp, Probe Sequence
gaaggggacctcatctagaaaagag

SEQ ID NO: 220252 - DNA, 25 bp, Probe Sequence
gaaggggacctcatctagaaaagag

SEQ ID NO: 220253 - DNA, 25 bp, Probe Sequence
gaaggggaccgacaacaggagagga

SEQ ID NO: 220254 - DNA, 25 bp, Probe Sequence
gaaggttgcacccacatataaaagg

SEQ ID NO: 220255 - DNA, 25 bp, Probe Sequence
gaaggatggcatctccatgtagaat

SEQ ID NO: 220256 - DNA, 25 bp, Probe Sequence
gaaggtgaatttccatgtcaacata

SEQ ID NO: 220257 - DNA, 25 bp, Probe Sequence
gaaggatggaattactatgaccaac

SEQ ID NO: 220258 - DNA, 25 bp, Probe Sequence
gaaggaacaccattctgataccaga

SEQ ID NO: 220259 - DNA, 25 bp, Probe Sequence
gaaggacaagcactcacagagccca

SEQ ID NO: 220260 - DNA, 25 bp, Probe Sequence
gaaggacaagcactcacagagccca

SEQ ID NO: 220261 - DNA, 25 bp, Probe Sequence
gaaggaactcatcgcagagaccatc

SEQ ID NO: 220262 - DNA, 25 bp, Probe Sequence
gaaggaacgatgacaggtcgcatga

SEQ ID NO: 220263 - DNA, 25 bp, Probe Sequence
gaagtaaccatggacgtcagaagac

SEQ ID NO: 220264 - DNA, 25 bp, Probe Sequence
gaagtgcaacaacacctcggaggtc

SEQ ID NO: 220265 - DNA, 25 bp, Probe Sequence
gaaggcaacatacatccataattgt

SEQ ID NO: 220266 - DNA, 25 bp, Probe Sequence
gaagtcaaagagtattcagcgttgg

SEQ ID NO: 220267 - DNA, 25 bp, Probe Sequence
gaagtcacgccaatggctcagcagt

SEQ ID NO: 220268 - DNA, 25 bp, Probe Sequence
gaagtccttgcaagacgctgatgct

SEQ ID NO: 220269 - DNA, 25 bp, Probe Sequence
gaagtgcctatgatgaagctttagg

SEQ ID NO: 220270 - DNA, 25 bp, Probe Sequence
gaagtccatgtgataattgtaaagg

SEQ ID NO: 220271 - DNA, 25 bp, Probe Sequence
gaagtcctacttatgtaatgaatgt

SEQ ID NO: 220272 - DNA, 25 bp, Probe Sequence
gaagtagtactctcagaaaggagaa

SEQ ID NO: 220273 - DNA, 25 bp, Probe Sequence
gaagaggtggcctcatggatcgtgg

SEQ ID NO: 220274 - DNA, 25 bp, Probe Sequence
gaaggtggtgcccactgtgtacatg

SEQ ID NO: 220275 - DNA, 25 bp, Probe Sequence
gaaggtggtgcccactgtgtacatg

SEQ ID NO: 220276 - DNA, 25 bp, Probe Sequence
gaagggctactgcagctttacatgc

SEQ ID NO: 220277 - DNA, 25 bp, Probe Sequence
gaaggtttcagcagtattacaccac

SEQ ID NO: 220278 - DNA, 25 bp, Probe Sequence
gaaggtgctaccattattttgccac

SEQ ID NO: 220279 - DNA, 25 bp, Probe Sequence
gaaggactatcccttttttgtagat

SEQ ID NO: 220280 - DNA, 25 bp, Probe Sequence
gaaggtctcattcggtgttttggga

SEQ ID NO: 220281 - DNA, 25 bp, Probe Sequence
gaaggtttcgagcgttttgctggca

SEQ ID NO: 220282 - DNA, 25 bp, Probe Sequence
gaaggttgccaatgggctgttgggc

SEQ ID NO: 220283 - DNA, 25 bp, Probe Sequence
gaaggttgccaatgggctgttgggc

SEQ ID NO: 220284 - DNA, 25 bp, Probe Sequence
gaaggattcctaagggatttgtgtg

SEQ ID NO: 220285 - DNA, 25 bp, Probe Sequence
gaacaaggtctcaggggtattgcta

SEQ ID NO: 220286 - DNA, 25 bp, Probe Sequence
gaacaggactccaggactgttttat

SEQ ID NO: 220287 - DNA, 25 bp, Probe Sequence
gaagggcacctgagtaatgttttaa

SEQ ID NO: 220288 - DNA, 25 bp, Probe Sequence
gaagggcacctgtaattcatatttg

SEQ ID NO: 220289 - DNA, 25 bp, Probe Sequence
gaagatgctcaccccaagttatggt

SEQ ID NO: 220290 - DNA, 25 bp, Probe Sequence
gaagtccagcctaagcaacatagtg

SEQ ID NO: 220291 - DNA, 25 bp, Probe Sequence
gaagtagcaccactaaacatagcac

SEQ ID NO: 220292 - DNA, 25 bp, Probe Sequence
gaagtaacttcttactgctctcaca

SEQ ID NO: 220293 - DNA, 25 bp, Probe Sequence
gaagtgagagttgaactgccattca

SEQ ID NO: 220294 - DNA, 25 bp, Probe Sequence
gaaggaagatctaagcactgtctgt

SEQ ID NO: 220295 - DNA, 25 bp, Probe Sequence
gaaggaaacataccactctcatggt

SEQ ID NO: 220296 - DNA, 25 bp, Probe Sequence
gaaggaatatcatcgtctccagagc

SEQ ID NO: 220297 - DNA, 25 bp, Probe Sequence
gaagtgatcagaagaggaccccagc

SEQ ID NO: 220298 - DNA, 25 bp, Probe Sequence
gaagtggcagcagaggaacccaatg

SEQ ID NO: 220299 - DNA, 25 bp, Probe Sequence
gaagtggagccgagtgacaccattg

SEQ ID NO: 220300 - DNA, 25 bp, Probe Sequence
gaagtggagccgagtgacaccattg

SEQ ID NO: 220301 - DNA, 25 bp, Probe Sequence
gaagtagagcttatatgcccctatt

SEQ ID NO: 220302 - DNA, 25 bp, Probe Sequence
gaagtggcctaaattcaccctgatc

SEQ ID NO: 220303 - DNA, 25 bp, Probe Sequence
gaaggggtaagctgacgtgctgtgc

SEQ ID NO: 220304 - DNA, 25 bp, Probe Sequence
gaaggaggtgacttcgcctgtgatg

SEQ ID NO: 220305 - DNA, 25 bp, Probe Sequence
gaaggagcggaggctgtgctcggtg

SEQ ID NO: 220306 - DNA, 25 bp, Probe Sequence
gaaggatctggtgctgctttcagat

SEQ ID NO: 220307 - DNA, 25 bp, Probe Sequence
gaaggactatgtggcagtgttaatg

SEQ ID NO: 220308 - DNA, 25 bp, Probe Sequence
gaaggattatgaggaggttggtgtg

SEQ ID NO: 220309 - DNA, 25 bp, Probe Sequence
gaaggatttagtagattctgttaga

SEQ ID NO: 220310 - DNA, 25 bp, Probe Sequence
gaaggactctcacttatttgtttca

SEQ ID NO: 220311 - DNA, 25 bp, Probe Sequence
gaaggagcttcccttctttattctc

SEQ ID NO: 220312 - DNA, 25 bp, Probe Sequence
gaaggagttccggtttgagccatcc

SEQ ID NO: 220313 - DNA, 25 bp, Probe Sequence
gaaggagaacccagttgacttgcct

SEQ ID NO: 220314 - DNA, 25 bp, Probe Sequence
gaagtaaaccaaatgttctttcttg

SEQ ID NO: 220315 - DNA, 25 bp, Probe Sequence
gacataactcccagtttgttttagt

SEQ ID NO: 220316 - DNA, 25 bp, Probe Sequence
gaagagacttttgtttgtgtttaat

SEQ ID NO: 220317 - DNA, 25 bp, Probe Sequence
gacaggactttatacctcttttact

SEQ ID NO: 220318 - DNA, 25 bp, Probe Sequence
gaaggttttaccattctatttgcct

SEQ ID NO: 220319 - DNA, 25 bp, Probe Sequence
gaaggtttcaatgcaatttttggtt

SEQ ID NO: 220320 - DNA, 25 bp, Probe Sequence
gaaggaaccaatcagctggttatgg

SEQ ID NO: 220321 - DNA, 25 bp, Probe Sequence
gaagtgaactcaaaaatgtgttgaa

SEQ ID NO: 220322 - DNA, 25 bp, Probe Sequence
gaaggatattcatcaaactgctaaa

SEQ ID NO: 220323 - DNA, 25 bp, Probe Sequence
gaagtcagtccatcagatttgctct

SEQ ID NO: 220324 - DNA, 25 bp, Probe Sequence
gaagtcagtccatcagatttgctct

SEQ ID NO: 220325 - DNA, 25 bp, Probe Sequence
gaagtattgtattcagtttacatgc

SEQ ID NO: 220326 - DNA, 25 bp, Probe Sequence
gaagttagacattagggtgccagcc

SEQ ID NO: 220327 - DNA, 25 bp, Probe Sequence
gaagttagaagatgagttccccggc

SEQ ID NO: 220328 - DNA, 25 bp, Probe Sequence
gaagtttgaggacaggtccccagcc

SEQ ID NO: 220329 - DNA, 25 bp, Probe Sequence
gaacttcggggacgacatccccagc

SEQ ID NO: 220330 - DNA, 25 bp, Probe Sequence
gaagtacgggaaggattcctgccag

SEQ ID NO: 220331 - DNA, 25 bp, Probe Sequence
gaagttctgaggctggacatcggcc

SEQ ID NO: 220332 - DNA, 25 bp, Probe Sequence
gaagtatgctgaaggctgtcactcg

SEQ ID NO: 220333 - DNA, 25 bp, Probe Sequence
gaagttgctaagtgtgcttagtttt

SEQ ID NO: 220334 - DNA, 25 bp, Probe Sequence
gaaggtctacagttatcattatttt

SEQ ID NO: 220335 - DNA, 25 bp, Probe Sequence
gaacagttccgtaagctctttattg

SEQ ID NO: 220336 - DNA, 25 bp, Probe Sequence
gatagttcccgtaacacttgtaaca

SEQ ID NO: 220337 - DNA, 25 bp, Probe Sequence
gaagtgttcacagtgtagacgggaa

SEQ ID NO: 220338 - DNA, 25 bp, Probe Sequence
gaaggggatcaagggacggctgaac

SEQ ID NO: 220339 - DNA, 25 bp, Probe Sequence
gaaggaggatcgagagccggtgaat

SEQ ID NO: 220340 - DNA, 25 bp, Probe Sequence
gaagggtgagacggagccggaagtt

SEQ ID NO: 220341 - DNA, 25 bp, Probe Sequence
gaagggttatgtggtccgaatcagt

SEQ ID NO: 220342 - DNA, 25 bp, Probe Sequence
gaagggattttggctcaaaacgatc

SEQ ID NO: 220343 - DNA, 25 bp, Probe Sequence
gaagggatttatgtgcacaaccacc

SEQ ID NO: 220344 - DNA, 25 bp, Probe Sequence
gaagtggtttcctgataacaagcaa

SEQ ID NO: 220345 - DNA, 25 bp, Probe Sequence
gaaggtattttctgacttgcaatgc

SEQ ID NO: 220346 - DNA, 25 bp, Probe Sequence
gaaggatatttctggagtgtcaatt

SEQ ID NO: 220347 - DNA, 25 bp, Probe Sequence
gaaggattcttcacaggtgttcata

SEQ ID NO: 220348 - DNA, 25 bp, Probe Sequence
gaaggttcattcgcataggtgtgag

SEQ ID NO: 220349 - DNA, 25 bp, Probe Sequence
gaaggtcttccttgagaggttgagc

SEQ ID NO: 220350 - DNA, 25 bp, Probe Sequence
gaaggtgttcctgaagtatctgaaa

SEQ ID NO: 220351 - DNA, 25 bp, Probe Sequence
gaaggtctgttagttaatttgagat

SEQ ID NO: 220352 - DNA, 25 bp, Probe Sequence
gaagttatgcttgttggaattggtg

SEQ ID NO: 220353 - DNA, 25 bp, Probe Sequence
gaagtttgcttcttatggtataata

SEQ ID NO: 220354 - DNA, 25 bp, Probe Sequence
gaaggaccttatttggcatataaaa

SEQ ID NO: 220355 - DNA, 25 bp, Probe Sequence
gaaggaccaggaaggaaagatgaaa

SEQ ID NO: 220356 - DNA, 25 bp, Probe Sequence
gaaggagtcagataggaaagatggc

SEQ ID NO: 220357 - DNA, 25 bp, Probe Sequence
gaaggtggagataagctgcaagggg

SEQ ID NO: 220358 - DNA, 25 bp, Probe Sequence
gaaggtgcgtgaaactcaaagttgc

SEQ ID NO: 220359 - DNA, 25 bp, Probe Sequence
gaaggtgcgtgtaaagagatatatt

SEQ ID NO: 220360 - DNA, 25 bp, Probe Sequence
gaaggtggagtatagaagaatatcc

SEQ ID NO: 220361 - DNA, 25 bp, Probe Sequence
gaaggggagcgacagtcacatttac

SEQ ID NO: 220362 - DNA, 25 bp, Probe Sequence
gaaggggagagtcggctcaatctgg

SEQ ID NO: 220363 - DNA, 25 bp, Probe Sequence
gaaggtgtgaggaggatccatggtg

SEQ ID NO: 220364 - DNA, 25 bp, Probe Sequence
gaaggtcttgtgagcagcccagacg

SEQ ID NO: 220365 - DNA, 25 bp, Probe Sequence
gaaggtctttgagagctggatgcac

SEQ ID NO: 220366 - DNA, 25 bp, Probe Sequence
gaaggtcctggacagcaggaggctc

SEQ ID NO: 220367 - DNA, 25 bp, Probe Sequence
gaagtgccgcggaaagtggaggtga

SEQ ID NO: 220368 - DNA, 25 bp, Probe Sequence
gaaggacgctggaaagtcggccaag

SEQ ID NO: 220369 - DNA, 25 bp, Probe Sequence
gaagtgcatgtgaagaatggttgcc

SEQ ID NO: 220370 - DNA, 25 bp, Probe Sequence
gaagtgcatgctaggaatttctcaa

SEQ ID NO: 220371 - DNA, 25 bp, Probe Sequence
gaagtctcatgttgcattttccaaa

SEQ ID NO: 220372 - DNA, 25 bp, Probe Sequence
gaagtctatgaacttaccagatgta

SEQ ID NO: 220373 - DNA, 25 bp, Probe Sequence
gaagtctctaatctacaagcacatt

SEQ ID NO: 220374 - DNA, 25 bp, Probe Sequence
gaagtgcattcgagagccaagattt

SEQ ID NO: 220375 - DNA, 25 bp, Probe Sequence
gaagtgcttcagagagtgaatgttc

SEQ ID NO: 220376 - DNA, 25 bp, Probe Sequence
gaagtgctttattgaggagatcccg

SEQ ID NO: 220377 - DNA, 25 bp, Probe Sequence
gaagtgtccttgtagatagactgcc

SEQ ID NO: 220378 - DNA, 25 bp, Probe Sequence
gaagttactatgaagaatgccccaa

SEQ ID NO: 220379 - DNA, 25 bp, Probe Sequence
gaagtcatataatcagagtcccaag

SEQ ID NO: 220380 - DNA, 25 bp, Probe Sequence
gaagaccatatactggcaatcctca

SEQ ID NO: 220381 - DNA, 25 bp, Probe Sequence
gaagtgtctgtacggaatgcccttt

SEQ ID NO: 220382 - DNA, 25 bp, Probe Sequence
gaagattcctcaggtcaacaccatc

SEQ ID NO: 220383 - DNA, 25 bp, Probe Sequence
gaagttccactaaaaatgccccagg

SEQ ID NO: 220384 - DNA, 25 bp, Probe Sequence
gaagttccactaaaaatgccccagg

SEQ ID NO: 220385 - DNA, 25 bp, Probe Sequence
gaagttccactaaaaatgccccagg

SEQ ID NO: 220386 - DNA, 25 bp, Probe Sequence
gaagtatctcctttaaatgtcacca

SEQ ID NO: 220387 - DNA, 25 bp, Probe Sequence
gaacgtctgccctatcaactttcga

SEQ ID NO: 220388 - DNA, 25 bp, Probe Sequence
gaaggtctctccttcaacaagctgg

SEQ ID NO: 220389 - DNA, 25 bp, Probe Sequence
gaagtgtccccgtaattatgtggtg

SEQ ID NO: 220390 - DNA, 25 bp, Probe Sequence
gaagtgtccaaacaggttgtgtgct

SEQ ID NO: 220391 - DNA, 25 bp, Probe Sequence
gaagtgtccgagcaatggtttgtgt

SEQ ID NO: 220392 - DNA, 25 bp, Probe Sequence
gaagagttggacacatcgttaggct

SEQ ID NO: 220393 - DNA, 25 bp, Probe Sequence
gaaggatcggaagtcatggttaatg

SEQ ID NO: 220394 - DNA, 25 bp, Probe Sequence
gaaggagagggagtctggtgtcttg

SEQ ID NO: 220395 - DNA, 25 bp, Probe Sequence
gaaggagaggaggtgatctgttctc

SEQ ID NO: 220396 - DNA, 25 bp, Probe Sequence
gaaggagagggcggagctggcccac

SEQ ID NO: 220397 - DNA, 25 bp, Probe Sequence
gaaggagagggcggagctggcccac

SEQ ID NO: 220398 - DNA, 25 bp, Probe Sequence
gaaggatgaattgcgggagactctc

SEQ ID NO: 220399 - DNA, 25 bp, Probe Sequence
gaaggtggatgtggtggccgagacc

SEQ ID NO: 220400 - DNA, 25 bp, Probe Sequence
gaaggtggataccatgagctcttca

SEQ ID NO: 220401 - DNA, 25 bp, Probe Sequence
gaagtggccatcgagaggtctggat

SEQ ID NO: 220402 - DNA, 25 bp, Probe Sequence
gaagtggccatcgagaggtctggat

SEQ ID NO: 220403 - DNA, 25 bp, Probe Sequence
gaagtggctatcctaaactggttta

SEQ ID NO: 220404 - DNA, 25 bp, Probe Sequence
gaagtgactgttgtaccatggttgt

SEQ ID NO: 220405 - DNA, 25 bp, Probe Sequence
gaagattggtctttacctaggctgt

SEQ ID NO: 220406 - DNA, 25 bp, Probe Sequence
gaagcatagggcctttaaaagtgtt

SEQ ID NO: 220407 - DNA, 25 bp, Probe Sequence
gaagagagggaacaacacggtttag

SEQ ID NO: 220408 - DNA, 25 bp, Probe Sequence
gaaagcgggcagagaaagggggaag

SEQ ID NO: 220409 - DNA, 25 bp, Probe Sequence
gaagaggtccgcaaggcaaggggga

SEQ ID NO: 220410 - DNA, 25 bp, Probe Sequence
gaagaaatccgaactcaaggagctc

SEQ ID NO: 220411 - DNA, 25 bp, Probe Sequence
gaagaactcaagcatttcattgcag

SEQ ID NO: 220412 - DNA, 25 bp, Probe Sequence
gaagatgccttacgtctgatcttga

SEQ ID NO: 220413 - DNA, 25 bp, Probe Sequence
gaagtgtttcaagtggatctcagta

SEQ ID NO: 220414 - DNA, 25 bp, Probe Sequence
gaagtttccacattggttggataag

SEQ ID NO: 220415 - DNA, 25 bp, Probe Sequence
gaactttcccacactactgaatgga

SEQ ID NO: 220416 - DNA, 25 bp, Probe Sequence
gaactacccctcagctgaaagtggt

SEQ ID NO: 220417 - DNA, 25 bp, Probe Sequence
gaagtcacaccctccgaaagatgag

SEQ ID NO: 220418 - DNA, 25 bp, Probe Sequence
gaagtcacaccctccgaaagatgag

SEQ ID NO: 220419 - DNA, 25 bp, Probe Sequence
gaagtctcagtttacccaaagaagg

SEQ ID NO: 220420 - DNA, 25 bp, Probe Sequence
gaaatgtagtttcccaaactgcctt

SEQ ID NO: 220421 - DNA, 25 bp, Probe Sequence
gaaatgtagtttcccaaactgcctt

SEQ ID NO: 220422 - DNA, 25 bp, Probe Sequence
gaagagttgtttagtcaaagctact

SEQ ID NO: 220423 - DNA, 25 bp, Probe Sequence
gaagtttgtaaggtccaagtattgg

SEQ ID NO: 220424 - DNA, 25 bp, Probe Sequence
gaaggttgaaaattccaagtaactg

SEQ ID NO: 220425 - DNA, 25 bp, Probe Sequence
gaagttaaacaataaagtcagcttg

SEQ ID NO: 220426 - DNA, 25 bp, Probe Sequence
gaagttaacatcaatcaaaatccag

SEQ ID NO: 220427 - DNA, 25 bp, Probe Sequence
gaagttgtagtcacagaaattccta

SEQ ID NO: 220428 - DNA, 25 bp, Probe Sequence
gaagttgtagctccaaatgaatttc

SEQ ID NO: 220429 - DNA, 25 bp, Probe Sequence
gaagtgcagtaccagcatcgcgaac

SEQ ID NO: 220430 - DNA, 25 bp, Probe Sequence
gaagtgcagtaccagcatcgcgaac

SEQ ID NO: 220431 - DNA, 25 bp, Probe Sequence
gaagtggtgagccatatctgatgga

SEQ ID NO: 220432 - DNA, 25 bp, Probe Sequence
gaaggtcatgcagatgatctgagcg

SEQ ID NO: 220433 - DNA, 25 bp, Probe Sequence
gaaggatctgagtatgatgccaagt

SEQ ID NO: 220434 - DNA, 25 bp, Probe Sequence
gaagtgattcagtttcctctacgga

SEQ ID NO: 220435 - DNA, 25 bp, Probe Sequence
gaagtgatgtctttgtcctgatcca

SEQ ID NO: 220436 - DNA, 25 bp, Probe Sequence
gaaggatgtctgaattcctcagata

SEQ ID NO: 220437 - DNA, 25 bp, Probe Sequence
gaagtcaagcttttttcagacaaaa

SEQ ID NO: 220438 - DNA, 25 bp, Probe Sequence
gaagttcagtttttactgaggaaat

SEQ ID NO: 220439 - DNA, 25 bp, Probe Sequence
gaagtaactttagaggaggatctga

SEQ ID NO: 220440 - DNA, 25 bp, Probe Sequence
gaagaggacttttgggaagagattc

SEQ ID NO: 220441 - DNA, 25 bp, Probe Sequence
gaaggtggcttgagttcaggagttc

SEQ ID NO: 220442 - DNA, 25 bp, Probe Sequence
gaaggatcgcttgagcctaggagat

SEQ ID NO: 220443 - DNA, 25 bp, Probe Sequence
gaagggagattggcacctagtggct

SEQ ID NO: 220444 - DNA, 25 bp, Probe Sequence
gaagggagctctggaccctcagagc

SEQ ID NO: 220445 - DNA, 25 bp, Probe Sequence
gaagaggacactggtagcctagagg

SEQ ID NO: 220446 - DNA, 25 bp, Probe Sequence
gaaggtaacattgatgactcgctca

SEQ ID NO: 220447 - DNA, 25 bp, Probe Sequence
gaaggtaactacgttttgcacagag

SEQ ID NO: 220448 - DNA, 25 bp, Probe Sequence
gaaggtagagctggagcttttacag

SEQ ID NO: 220449 - DNA, 25 bp, Probe Sequence
gaagatcaagcaaggacattttcca

SEQ ID NO: 220450 - DNA, 25 bp, Probe Sequence
gaagatggagcaacagttttctgta

SEQ ID NO: 220451 - DNA, 25 bp, Probe Sequence
gaagtcactgtgtactaccagtcag

SEQ ID NO: 220452 - DNA, 25 bp, Probe Sequence
gaaggatatgttccatcagccgtac

SEQ ID NO: 220453 - DNA, 25 bp, Probe Sequence
gaaggtgactgggcatcagccctcc

SEQ ID NO: 220454 - DNA, 25 bp, Probe Sequence
gaaggatgtctgggatgcagcttgg

SEQ ID NO: 220455 - DNA, 25 bp, Probe Sequence
gaaggatgtcgtggagagggaggca

SEQ ID NO: 220456 - DNA, 25 bp, Probe Sequence
gaaggtgaggtgtgagggaggagac

SEQ ID NO: 220457 - DNA, 25 bp, Probe Sequence
gaagggatcaggttggggggcagcc

SEQ ID NO: 220458 - DNA, 25 bp, Probe Sequence
gaaggtacagagcctccgaagggcc

SEQ ID NO: 220459 - DNA, 25 bp, Probe Sequence
gaaggtacagagcctccgaagggcc

SEQ ID NO: 220460 - DNA, 25 bp, Probe Sequence
gaaggtacagagcctccgaagggcc

SEQ ID NO: 220461 - DNA, 25 bp, Probe Sequence
gaagggcactggcttagcaggggtg

SEQ ID NO: 220462 - DNA, 25 bp, Probe Sequence
gaagtcaactggcttgggtgctggt

SEQ ID NO: 220463 - DNA, 25 bp, Probe Sequence
gaagttaagcagcctttctgtggag

SEQ ID NO: 220464 - DNA, 25 bp, Probe Sequence
gaagttaagatgcttacgcattctg

SEQ ID NO: 220465 - DNA, 25 bp, Probe Sequence
gaagtctaaaggtcccagtccatct

SEQ ID NO: 220466 - DNA, 25 bp, Probe Sequence
gaagtctaaaggtcccagtccatct

SEQ ID NO: 220467 - DNA, 25 bp, Probe Sequence
gaagttatgaattactccttccagt

SEQ ID NO: 220468 - DNA, 25 bp, Probe Sequence
gaaggtgcatcacaacacactttca

SEQ ID NO: 220469 - DNA, 25 bp, Probe Sequence
gaaggatatcacccagaacatagta

SEQ ID NO: 220470 - DNA, 25 bp, Probe Sequence
gaagtaatcatctgcaaccatgtgt

SEQ ID NO: 220471 - DNA, 25 bp, Probe Sequence
gaagtatgactcatgcaaagcattt

SEQ ID NO: 220472 - DNA, 25 bp, Probe Sequence
gaagtcatatccgtggaccatttgt

SEQ ID NO: 220473 - DNA, 25 bp, Probe Sequence
gaaggatttctgacagactatcttt

SEQ ID NO: 220474 - DNA, 25 bp, Probe Sequence
gaaggattttatcgctttctgctct

SEQ ID NO: 220475 - DNA, 25 bp, Probe Sequence
gaagggcatcatgacctcttggcct

SEQ ID NO: 220476 - DNA, 25 bp, Probe Sequence
gaagggagcatagcatatctgtggc

SEQ ID NO: 220477 - DNA, 25 bp, Probe Sequence
gaagggaaacacatgggtgcttatt

SEQ ID NO: 220478 - DNA, 25 bp, Probe Sequence
gaagggaagaacctcaggaccaact

SEQ ID NO: 220479 - DNA, 25 bp, Probe Sequence
gaagggggcaacctggaagccaagg

SEQ ID NO: 220480 - DNA, 25 bp, Probe Sequence
gaaggggcagaagctgatcatcacc

SEQ ID NO: 220481 - DNA, 25 bp, Probe Sequence
gaaggatttggtccgtcataaccca

SEQ ID NO: 220482 - DNA, 25 bp, Probe Sequence
gaaggtttggcgacgtttccatcaa

SEQ ID NO: 220483 - DNA, 25 bp, Probe Sequence
gaagagtattgagcccgtttcatca

SEQ ID NO: 220484 - DNA, 25 bp, Probe Sequence
gaagattgagggactactttccaga

SEQ ID NO: 220485 - DNA, 25 bp, Probe Sequence
gaagggcgtaatgcacttatccaca

SEQ ID NO: 220486 - DNA, 25 bp, Probe Sequence
gaagatgggtggtcccattttccaa

SEQ ID NO: 220487 - DNA, 25 bp, Probe Sequence
gaagtctggtgatgctgccattgtt

SEQ ID NO: 220488 - DNA, 25 bp, Probe Sequence
gaagtctggtgatgctgccattgtt

SEQ ID NO: 220489 - DNA, 25 bp, Probe Sequence
gaaggtggtgatggtcatttatttg

SEQ ID NO: 220490 - DNA, 25 bp, Probe Sequence
gaaggtcaagatgtactgctattta

SEQ ID NO: 220491 - DNA, 25 bp, Probe Sequence
gaaggtctagatttcctgctcttaa

SEQ ID NO: 220492 - DNA, 25 bp, Probe Sequence
gaaggtctagatttcctgctcttaa

SEQ ID NO: 220493 - DNA, 25 bp, Probe Sequence
gaaggtttgatagccttttcaacaa

SEQ ID NO: 220494 - DNA, 25 bp, Probe Sequence
gaagtcagttaagctcttttctcta

SEQ ID NO: 220495 - DNA, 25 bp, Probe Sequence
gaagttgtcaccactttattctgga

SEQ ID NO: 220496 - DNA, 25 bp, Probe Sequence
gaagttttccaatttgatatttcct

SEQ ID NO: 220497 - DNA, 25 bp, Probe Sequence
gaagttttacaccatctacaatccc

SEQ ID NO: 220498 - DNA, 25 bp, Probe Sequence
gaagttttagcggtcaatttgcctt

SEQ ID NO: 220499 - DNA, 25 bp, Probe Sequence
gaagtgtgtaagggtccagctgatc

SEQ ID NO: 220500 - DNA, 25 bp, Probe Sequence
gaagtggtaccaggtgggcatcata

SEQ ID NO: 220501 - DNA, 25 bp, Probe Sequence
gaagttgtcagatgagctgggctca

SEQ ID NO: 220502 - DNA, 25 bp, Probe Sequence
gaagttgatgatagaggcttgtaca

SEQ ID NO: 220503 - DNA, 25 bp, Probe Sequence
gaagtctcattcgtggttgagcaca

SEQ ID NO: 220504 - DNA, 25 bp, Probe Sequence
gaagatgtcacaagggattggcaat

SEQ ID NO: 220505 - DNA, 25 bp, Probe Sequence
gaaggtgccattcttatgagccaaa

SEQ ID NO: 220506 - DNA, 25 bp, Probe Sequence
gaaggtgccattcttatgagccaaa

SEQ ID NO: 220507 - DNA, 25 bp, Probe Sequence
gaaggtgacaatctccaatagactt

SEQ ID NO: 220508 - DNA, 25 bp, Probe Sequence
gaaggtcaaaaaccatataatcatc

SEQ ID NO: 220509 - DNA, 25 bp, Probe Sequence
gagaggccaaagaacctttactcca

SEQ ID NO: 220510 - DNA, 25 bp, Probe Sequence
gaagtcaaacaccctttgtattcca

SEQ ID NO: 220511 - DNA, 25 bp, Probe Sequence
gaagtgaaggcgggaatttattcga

SEQ ID NO: 220512 - DNA, 25 bp, Probe Sequence
gaagataaacacctgaaatttcgta

SEQ ID NO: 220513 - DNA, 25 bp, Probe Sequence
gaagtttatcagggaacactctcag

SEQ ID NO: 220514 - DNA, 25 bp, Probe Sequence
gaagtttgtcgctgatggcatcttc

SEQ ID NO: 220515 - DNA, 25 bp, Probe Sequence
gaagttatggaccgctagcatctgt

SEQ ID NO: 220516 - DNA, 25 bp, Probe Sequence
gaagttttcagcatgctacgtgatg

SEQ ID NO: 220517 - DNA, 25 bp, Probe Sequence
gaagttttatgcgtgtgacagtgta

SEQ ID NO: 220518 - DNA, 25 bp, Probe Sequence
gaagagctttcactgctgattagtg

SEQ ID NO: 220519 - DNA, 25 bp, Probe Sequence
gaaggttgctgctttgtttgtctaa

SEQ ID NO: 220520 - DNA, 25 bp, Probe Sequence
gaaggttgctgtgctatttgacaaa

SEQ ID NO: 220521 - DNA, 25 bp, Probe Sequence
gaagggtggatggctgcattgaaca

SEQ ID NO: 220522 - DNA, 25 bp, Probe Sequence
gaagtgggcagatcgcttgagccaa

SEQ ID NO: 220523 - DNA, 25 bp, Probe Sequence
gaagtctgacaatccttgagaatct

SEQ ID NO: 220524 - DNA, 25 bp, Probe Sequence
gaagttactgtagctgatcacattc

SEQ ID NO: 220525 - DNA, 25 bp, Probe Sequence
gaagttgactctactttgaccttcc

SEQ ID NO: 220526 - DNA, 25 bp, Probe Sequence
gaagggttccagtttgacactgacg

SEQ ID NO: 220527 - DNA, 25 bp, Probe Sequence
gaaggtatttcactttggcactgac

SEQ ID NO: 220528 - DNA, 25 bp, Probe Sequence
gaaggtaagctttctaggcctgacc

SEQ ID NO: 220529 - DNA, 25 bp, Probe Sequence
gaagggaacttgcctgaggtggact

SEQ ID NO: 220530 - DNA, 25 bp, Probe Sequence
gaaggtgcagaccgtgttggtggcg

SEQ ID NO: 220531 - DNA, 25 bp, Probe Sequence
gaagggcagacggtacatgtcccag

SEQ ID NO: 220532 - DNA, 25 bp, Probe Sequence
gaagtagaaccggagcaggcagcca

SEQ ID NO: 220533 - DNA, 25 bp, Probe Sequence
gaagtagtccgggccatggataaga

SEQ ID NO: 220534 - DNA, 25 bp, Probe Sequence
gaagattgtggggccactggaagtg

SEQ ID NO: 220535 - DNA, 25 bp, Probe Sequence
gaagtcaggtggttccggaatggcc

SEQ ID NO: 220536 - DNA, 25 bp, Probe Sequence
gaagtcggtggcctcttaaaggaca

SEQ ID NO: 220537 - DNA, 25 bp, Probe Sequence
gaagttggtggccgccatcaaagcc

SEQ ID NO: 220538 - DNA, 25 bp, Probe Sequence
gaagttgggtaggctgtgtatggac

SEQ ID NO: 220539 - DNA, 25 bp, Probe Sequence
gaaggtgaagttgtttgggcacgta

SEQ ID NO: 220540 - DNA, 25 bp, Probe Sequence
gaaggtgaaggtgctcacgggcacg

SEQ ID NO: 220541 - DNA, 25 bp, Probe Sequence
gaaggtcaatgcatgactacaagga

SEQ ID NO: 220542 - DNA, 25 bp, Probe Sequence
gaagagtgcttgagttacagaaggc

SEQ ID NO: 220543 - DNA, 25 bp, Probe Sequence
gaagtgtgctatatttagaacagtc

SEQ ID NO: 220544 - DNA, 25 bp, Probe Sequence
gaagtcactgagatcttaaaggtca

SEQ ID NO: 220545 - DNA, 25 bp, Probe Sequence
gaagtcctggaggggaatgagcagt

SEQ ID NO: 220546 - DNA, 25 bp, Probe Sequence
gaagtgctctcggcggaagtgatcg

SEQ ID NO: 220547 - DNA, 25 bp, Probe Sequence
gaagtgccctggaagaaggcctgct

SEQ ID NO: 220548 - DNA, 25 bp, Probe Sequence
gaagggccctgaggaaggcacactt

SEQ ID NO: 220549 - DNA, 25 bp, Probe Sequence
gaaggtggccgtgaattaagtgatt

SEQ ID NO: 220550 - DNA, 25 bp, Probe Sequence
gaaggtgaaccttgaagaagagtgt

SEQ ID NO: 220551 - DNA, 25 bp, Probe Sequence
gaaggtcaagttggaggaacagctg

SEQ ID NO: 220552 - DNA, 25 bp, Probe Sequence
gaaggtgaagatgggcaggaaggct

SEQ ID NO: 220553 - DNA, 25 bp, Probe Sequence
gaagggtcaatgttgggagtggttg

SEQ ID NO: 220554 - DNA, 25 bp, Probe Sequence
gaagagttatatttaggaggcttta

SEQ ID NO: 220555 - DNA, 25 bp, Probe Sequence
gaagttaattatacaataggctggt

SEQ ID NO: 220556 - DNA, 25 bp, Probe Sequence
gaaggtgttgtttcagataggggtc

SEQ ID NO: 220557 - DNA, 25 bp, Probe Sequence
gaaggtgcttgttaatgagagagtg

SEQ ID NO: 220558 - DNA, 25 bp, Probe Sequence
gaaggtggttaaaagcatatgctgg

SEQ ID NO: 220559 - DNA, 25 bp, Probe Sequence
gaagtgctggtatattccagacatg

SEQ ID NO: 220560 - DNA, 25 bp, Probe Sequence
gaaggtgcccatgatgttgcagtcg

SEQ ID NO: 220561 - DNA, 25 bp, Probe Sequence
gaaggtggactctatgtatgcatga

SEQ ID NO: 220562 - DNA, 25 bp, Probe Sequence
gaagtgtgaacctgtgatgcatcct

SEQ ID NO: 220563 - DNA, 25 bp, Probe Sequence
gaagtggagaagggtgcagcaggct

SEQ ID NO: 220564 - DNA, 25 bp, Probe Sequence
gaagggagaatgatggcagacgaac

SEQ ID NO: 220565 - DNA, 25 bp, Probe Sequence
gaagggcagacaatgcatggctgat

SEQ ID NO: 220566 - DNA, 25 bp, Probe Sequence
gaagtggcagtacttgcggattggc

SEQ ID NO: 220567 - DNA, 25 bp, Probe Sequence
gaagagggacagtctgcccatcgac

SEQ ID NO: 220568 - DNA, 25 bp, Probe Sequence
gaagagagtaagttcccttggagga

SEQ ID NO: 220569 - DNA, 25 bp, Probe Sequence
gatgaatttcaaaacgcctcgggga

SEQ ID NO: 220570 - DNA, 25 bp, Probe Sequence
gaacatttaaagcgaatctctagga

SEQ ID NO: 220571 - DNA, 25 bp, Probe Sequence
gaaacttaaatgttattatctgggc

SEQ ID NO: 220572 - DNA, 25 bp, Probe Sequence
gaaacttaacagatactcagatgtg

SEQ ID NO: 220573 - DNA, 25 bp, Probe Sequence
gaagtctataaagttgcctctcagt

SEQ ID NO: 220574 - DNA, 25 bp, Probe Sequence
gaagtctataaatgactgcaaagtg

SEQ ID NO: 220575 - DNA, 25 bp, Probe Sequence
gaagtctggaaatcacccaaggctt

SEQ ID NO: 220576 - DNA, 25 bp, Probe Sequence
gaaggggtgatatcacctccacgct

SEQ ID NO: 220577 - DNA, 25 bp, Probe Sequence
gaagggtgagtagacctccattgct

SEQ ID NO: 220578 - DNA, 25 bp, Probe Sequence
gaaggggattacctctatctctatt

SEQ ID NO: 220579 - DNA, 25 bp, Probe Sequence
gaaggggagtacagctctctggaac

SEQ ID NO: 220580 - DNA, 25 bp, Probe Sequence
gaaggggagtacagctctctggaac

SEQ ID NO: 220581 - DNA, 25 bp, Probe Sequence
gaaggggagtacagctctctggaac

SEQ ID NO: 220582 - DNA, 25 bp, Probe Sequence
gaaggggagaacgtctccagacaga

SEQ ID NO: 220583 - DNA, 25 bp, Probe Sequence
gaagggtgatgtaactttgagaaga

SEQ ID NO: 220584 - DNA, 25 bp, Probe Sequence
gaagggctgattgtgctttatgaat

SEQ ID NO: 220585 - DNA, 25 bp, Probe Sequence
gaaggtggcttttgctttatagttt

SEQ ID NO: 220586 - DNA, 25 bp, Probe Sequence
gaaggtgctcttaatctgttacagt

SEQ ID NO: 220587 - DNA, 25 bp, Probe Sequence
gaagtggtgcttgactttgccattt

SEQ ID NO: 220588 - DNA, 25 bp, Probe Sequence
gaagattggcttgaattagatcata

SEQ ID NO: 220589 - DNA, 25 bp, Probe Sequence
gaagtagtgtctgccatacatgtta

SEQ ID NO: 220590 - DNA, 25 bp, Probe Sequence
gaagtggatagattctcaattgtta

SEQ ID NO: 220591 - DNA, 25 bp, Probe Sequence
gaagtggctgaatctcattgtattt

SEQ ID NO: 220592 - DNA, 25 bp, Probe Sequence
gaaggggaactgctttgacttcagt

SEQ ID NO: 220593 - DNA, 25 bp, Probe Sequence
gaagaggggacacccttgaccttgt

SEQ ID NO: 220594 - DNA, 25 bp, Probe Sequence
gaagagggtgaatccaaggcctttc

SEQ ID NO: 220595 - DNA, 25 bp, Probe Sequence
gaagggcggaaaaccaggcgcttca

SEQ ID NO: 220596 - DNA, 25 bp, Probe Sequence
gaagggcggaaaaccaggcgcttca

SEQ ID NO: 220597 - DNA, 25 bp, Probe Sequence
gaaggggagaaaagccagtgtatgt

SEQ ID NO: 220598 - DNA, 25 bp, Probe Sequence
gaagggtgaggagacaaggattgag

SEQ ID NO: 220599 - DNA, 25 bp, Probe Sequence
gaaggtggggaggaagaggaggagg

SEQ ID NO: 220600 - DNA, 25 bp, Probe Sequence
gaaggtggggaggaagaggaggagg

SEQ ID NO: 220601 - DNA, 25 bp, Probe Sequence
gaaggggaacagtagtggccagtgg

SEQ ID NO: 220602 - DNA, 25 bp, Probe Sequence
gaaggggaatcgcgggaagctggcc

SEQ ID NO: 220603 - DNA, 25 bp, Probe Sequence
gaaggggagagacaggggccgccct

SEQ ID NO: 220604 - DNA, 25 bp, Probe Sequence
gaaggtggaggagatcgcggccagc

SEQ ID NO: 220605 - DNA, 25 bp, Probe Sequence
gaaggtggaggagagctcgtggctc

SEQ ID NO: 220606 - DNA, 25 bp, Probe Sequence
gaagggcgtggtgacttggcatatc

SEQ ID NO: 220607 - DNA, 25 bp, Probe Sequence
gaagttggttatgatgctatggctg

SEQ ID NO: 220608 - DNA, 25 bp, Probe Sequence
gaagtcttctttgatctcgagatcc

SEQ ID NO: 220609 - DNA, 25 bp, Probe Sequence
gaagtcatgtctttgggtcgatgtc

SEQ ID NO: 220610 - DNA, 25 bp, Probe Sequence
gaagtgctgcttatctggggttttc

SEQ ID NO: 220611 - DNA, 25 bp, Probe Sequence
gaagatcgcatgagtccgggatgtt

SEQ ID NO: 220612 - DNA, 25 bp, Probe Sequence
gaagaagctgacacaccgtatgttg

SEQ ID NO: 220613 - DNA, 25 bp, Probe Sequence
gaagtcaggagttccacatggagaa

SEQ ID NO: 220614 - DNA, 25 bp, Probe Sequence
gaagtaaagaatcgcctggactatc

SEQ ID NO: 220615 - DNA, 25 bp, Probe Sequence
gaagtctgaagaacgccttcatttc

SEQ ID NO: 220616 - DNA, 25 bp, Probe Sequence
gaagactgaagactagccccttttc

SEQ ID NO: 220617 - DNA, 25 bp, Probe Sequence
gaagaatacaggctttcctcaattc

SEQ ID NO: 220618 - DNA, 25 bp, Probe Sequence
gaagaacggggctcttctcatttca

SEQ ID NO: 220619 - DNA, 25 bp, Probe Sequence
gaaagggggactatttattctgcct

SEQ ID NO: 220620 - DNA, 25 bp, Probe Sequence
gaaagtgggtttgattaaatggatc

SEQ ID NO: 220621 - DNA, 25 bp, Probe Sequence
gaaggtgtggggaagcattaaagga

SEQ ID NO: 220622 - DNA, 25 bp, Probe Sequence
gaagggtctggaagagcttgaaagg

SEQ ID NO: 220623 - DNA, 25 bp, Probe Sequence
gaagggtctggcatccatatgagga

SEQ ID NO: 220624 - DNA, 25 bp, Probe Sequence
gaagggcattggccattctattgtg

SEQ ID NO: 220625 - DNA, 25 bp, Probe Sequence
gaagggcaaagatttcaatcatgtg

SEQ ID NO: 220626 - DNA, 25 bp, Probe Sequence
gaagggaaatgtggatcatcttgtg

SEQ ID NO: 220627 - DNA, 25 bp, Probe Sequence
gaagggaagaggggatctttggact

SEQ ID NO: 220628 - DNA, 25 bp, Probe Sequence
gaagaagaaaggggaccgctgtgcc

SEQ ID NO: 220629 - DNA, 25 bp, Probe Sequence
gaagacaaacggatgcacccgtctt

SEQ ID NO: 220630 - DNA, 25 bp, Probe Sequence
gaagacaaagctaaagaaacgttct

SEQ ID NO: 220631 - DNA, 25 bp, Probe Sequence
gaagacaaactgagggacaaggcca

SEQ ID NO: 220632 - DNA, 25 bp, Probe Sequence
gaagacagggtgacctggaaaccca

SEQ ID NO: 220633 - DNA, 25 bp, Probe Sequence
gaagagaaggttccggaagacagca

SEQ ID NO: 220634 - DNA, 25 bp, Probe Sequence
gaagtgttgaggacccgcagagaca

SEQ ID NO: 220635 - DNA, 25 bp, Probe Sequence
gaagtttcagtgaccttgagggcta

SEQ ID NO: 220636 - DNA, 25 bp, Probe Sequence
gaagtgctgtgaaggctcttgcggg

SEQ ID NO: 220637 - DNA, 25 bp, Probe Sequence
gaagatcttgctagtgccataggtg

SEQ ID NO: 220638 - DNA, 25 bp, Probe Sequence
gaagtccatattgggccaggtgcgg

SEQ ID NO: 220639 - DNA, 25 bp, Probe Sequence
gaagatcacctgagcccaggagctc

SEQ ID NO: 220640 - DNA, 25 bp, Probe Sequence
gaagtcagcttgagcatacagctgc

SEQ ID NO: 220641 - DNA, 25 bp, Probe Sequence
gaagtccaatgcatgataccagagc

SEQ ID NO: 220642 - DNA, 25 bp, Probe Sequence
gaagtccaatgcatgataccagagc

SEQ ID NO: 220643 - DNA, 25 bp, Probe Sequence
gaagtccaatgcatgataccagagc

SEQ ID NO: 220644 - DNA, 25 bp, Probe Sequence
gaagtccaaggctaagcacactctc

SEQ ID NO: 220645 - DNA, 25 bp, Probe Sequence
gaagtctaagagtccatgccagacc

SEQ ID NO: 220646 - DNA, 25 bp, Probe Sequence
gaagtcccaatgtcttcatcagcac

SEQ ID NO: 220647 - DNA, 25 bp, Probe Sequence
gaagtatccaattatgtgacaacct

SEQ ID NO: 220648 - DNA, 25 bp, Probe Sequence
gaagtcacactattgggaaacctgt

SEQ ID NO: 220649 - DNA, 25 bp, Probe Sequence
gaagtacgctgaacgagatctactt

SEQ ID NO: 220650 - DNA, 25 bp, Probe Sequence
gaagagcgactctctggagctactc

SEQ ID NO: 220651 - DNA, 25 bp, Probe Sequence
gaagggtctgcatcacaagatcctc

SEQ ID NO: 220652 - DNA, 25 bp, Probe Sequence
gaagggtgtgcataaattctatact

SEQ ID NO: 220653 - DNA, 25 bp, Probe Sequence
gaagagcgtgtataaaactgaagcc

SEQ ID NO: 220654 - DNA, 25 bp, Probe Sequence
gaagagtgtgctgataaacctacca

SEQ ID NO: 220655 - DNA, 25 bp, Probe Sequence
gaagtgcctctggaaaaggctaagc

SEQ ID NO: 220656 - DNA, 25 bp, Probe Sequence
gaagttcagctgttgaaacgaaaac

SEQ ID NO: 220657 - DNA, 25 bp, Probe Sequence
gaagtgatagcctttcagggaaaac

SEQ ID NO: 220658 - DNA, 25 bp, Probe Sequence
gaagtgaatgcctgtcacggaggga

SEQ ID NO: 220659 - DNA, 25 bp, Probe Sequence
gaagtgaaggcaagtcaactgcagg

SEQ ID NO: 220660 - DNA, 25 bp, Probe Sequence
gaagatgaagtggctgttgacatgg

SEQ ID NO: 220661 - DNA, 25 bp, Probe Sequence
gaagaacgaatcattacaggtcctg

SEQ ID NO: 220662 - DNA, 25 bp, Probe Sequence
gaagagctagactcttaccgtcgtg

SEQ ID NO: 220663 - DNA, 25 bp, Probe Sequence
gaagatgtaactattagagctgggc

SEQ ID NO: 220664 - DNA, 25 bp, Probe Sequence
gaagagtcccatgaaaggtggctcc

SEQ ID NO: 220665 - DNA, 25 bp, Probe Sequence
gaagagcttcctttaaagttcctat

SEQ ID NO: 220666 - DNA, 25 bp, Probe Sequence
gaagagcttcctttaaagttcctat

SEQ ID NO: 220667 - DNA, 25 bp, Probe Sequence
gaagagcttcctttaaagttcctat

SEQ ID NO: 220668 - DNA, 25 bp, Probe Sequence
gaagagtgacgttgtctaagatgta

SEQ ID NO: 220669 - DNA, 25 bp, Probe Sequence
gaagaaggaggagtctgaagagtca

SEQ ID NO: 220670 - DNA, 25 bp, Probe Sequence
gaagatcttagaggttgaagcccac

SEQ ID NO: 220671 - DNA, 25 bp, Probe Sequence
gaagtcttcagacgtttagtcaagc

SEQ ID NO: 220672 - DNA, 25 bp, Probe Sequence
gaagatattctctgtgtctaaacac

SEQ ID NO: 220673 - DNA, 25 bp, Probe Sequence
gaagatctttcccatcttgcaaact

SEQ ID NO: 220674 - DNA, 25 bp, Probe Sequence
gaagattttcgcgttctgcgatacc

SEQ ID NO: 220675 - DNA, 25 bp, Probe Sequence
gaagtattcccaatcactggtcatc

SEQ ID NO: 220676 - DNA, 25 bp, Probe Sequence
gaagtgaatctcgaaccgcatgttc

SEQ ID NO: 220677 - DNA, 25 bp, Probe Sequence
gaagggatctatcacctctgtacag

SEQ ID NO: 220678 - DNA, 25 bp, Probe Sequence
gaagaggcctatgaccttggccgca

SEQ ID NO: 220679 - DNA, 25 bp, Probe Sequence
gaagatggccgtgaccttcatcggc

SEQ ID NO: 220680 - DNA, 25 bp, Probe Sequence
gaagatggacggtatttcaacggcc

SEQ ID NO: 220681 - DNA, 25 bp, Probe Sequence
gaagatttcggtttcacaaatggca

SEQ ID NO: 220682 - DNA, 25 bp, Probe Sequence
gaagttgttggtagtcaaatttgat

SEQ ID NO: 220683 - DNA, 25 bp, Probe Sequence
gaagtggttgtgttgtagggttgca

SEQ ID NO: 220684 - DNA, 25 bp, Probe Sequence
gacagtagggttggtgggagttgcg

SEQ ID NO: 220685 - DNA, 25 bp, Probe Sequence
gaagtcaaggttagtgggcctcggg

SEQ ID NO: 220686 - DNA, 25 bp, Probe Sequence
gaagcaacaggtggaggggaccgcc

SEQ ID NO: 220687 - DNA, 25 bp, Probe Sequence
gaagaacagaccctgggtcccacac

SEQ ID NO: 220688 - DNA, 25 bp, Probe Sequence
gaagaacaggcctggagtctacacc

SEQ ID NO: 220689 - DNA, 25 bp, Probe Sequence
gaagaacaggcctggagtctacacc

SEQ ID NO: 220690 - DNA, 25 bp, Probe Sequence
gaagaacaggcctggagtctacacc

SEQ ID NO: 220691 - DNA, 25 bp, Probe Sequence
gaagattgaaccaggcgttgacccg

SEQ ID NO: 220692 - DNA, 25 bp, Probe Sequence
gaagattagcccagtgcggtggcac

SEQ ID NO: 220693 - DNA, 25 bp, Probe Sequence
gaagtttcgcaacatggagacggcg

SEQ ID NO: 220694 - DNA, 25 bp, Probe Sequence
gaagttattcaagatggagtcagag

SEQ ID NO: 220695 - DNA, 25 bp, Probe Sequence
gaagttattcaagatggagtcagag

SEQ ID NO: 220696 - DNA, 25 bp, Probe Sequence
gaagtgtcaatatgttggagcggat

SEQ ID NO: 220697 - DNA, 25 bp, Probe Sequence
gaagtgatgctaactgttctgggga

SEQ ID NO: 220698 - DNA, 25 bp, Probe Sequence
gaagtatctgatctggtgtccgtga

SEQ ID NO: 220699 - DNA, 25 bp, Probe Sequence
gaagtatctgatctggtgtccgtga

SEQ ID NO: 220700 - DNA, 25 bp, Probe Sequence
gaagtatttgttgtatcctgataat

SEQ ID NO: 220701 - DNA, 25 bp, Probe Sequence
gaagttttcattaaagccacagaat

SEQ ID NO: 220702 - DNA, 25 bp, Probe Sequence
gaagaattaattgagcccacgagtt

SEQ ID NO: 220703 - DNA, 25 bp, Probe Sequence
gaagtgcattagtagaagccacctg

SEQ ID NO: 220704 - DNA, 25 bp, Probe Sequence
gaagtgttaatacatcacatcttat

SEQ ID NO: 220705 - DNA, 25 bp, Probe Sequence
gaagacctaaaggctcagattctag

SEQ ID NO: 220706 - DNA, 25 bp, Probe Sequence
gaagggctgaaccctcagccttgac

SEQ ID NO: 220707 - DNA, 25 bp, Probe Sequence
gaagaggctgagttagtcccttaga

SEQ ID NO: 220708 - DNA, 25 bp, Probe Sequence
gaagaggtcaatgggaacgtctaga

SEQ ID NO: 220709 - DNA, 25 bp, Probe Sequence
gaagggcgcatatggaacggctctc

SEQ ID NO: 220710 - DNA, 25 bp, Probe Sequence
gaagggcactattgggtgggcctgg

SEQ ID NO: 220711 - DNA, 25 bp, Probe Sequence
gaagaggcaggatggcttggggctg

SEQ ID NO: 220712 - DNA, 25 bp, Probe Sequence
gaagggttcaggccctggagagctg

SEQ ID NO: 220713 - DNA, 25 bp, Probe Sequence
gaagggatctcgtgtttgctgagtg

SEQ ID NO: 220714 - DNA, 25 bp, Probe Sequence
gaagggactgtgttgcttgtgaagc

SEQ ID NO: 220715 - DNA, 25 bp, Probe Sequence
gaagggaagtgcatctgtcagccag

SEQ ID NO: 220716 - DNA, 25 bp, Probe Sequence
gaagggacagacatgttcatcatca

SEQ ID NO: 220717 - DNA, 25 bp, Probe Sequence
gaagtgtgccagtatggttcatctg

SEQ ID NO: 220718 - DNA, 25 bp, Probe Sequence
gaagtggacgcctgaatatgtgact

SEQ ID NO: 220719 - DNA, 25 bp, Probe Sequence
gaagtagactcctcagtggtggtga

SEQ ID NO: 220720 - DNA, 25 bp, Probe Sequence
gaagtacttcctctgggtggtgaag

SEQ ID NO: 220721 - DNA, 25 bp, Probe Sequence
gaagtcccgcctcataagtggaagg

SEQ ID NO: 220722 - DNA, 25 bp, Probe Sequence
gaaaccctccgcaatacttggaaat

SEQ ID NO: 220723 - DNA, 25 bp, Probe Sequence
gaaacctcctaatgacctggaattg

SEQ ID NO: 220724 - DNA, 25 bp, Probe Sequence
gaaccactgtccaggagcgtggttt

SEQ ID NO: 220725 - DNA, 25 bp, Probe Sequence
gaagaacgtaaatgcactgttttta

SEQ ID NO: 220726 - DNA, 25 bp, Probe Sequence
gaaaagctgttagaaggttacctca

SEQ ID NO: 220727 - DNA, 25 bp, Probe Sequence
gaagaactttggcggcgggaacacg

SEQ ID NO: 220728 - DNA, 25 bp, Probe Sequence
gaagactcgggaggaccagggaagc

SEQ ID NO: 220729 - DNA, 25 bp, Probe Sequence
gaagacccctctgccgagggaggtt

SEQ ID NO: 220730 - DNA, 25 bp, Probe Sequence
gaagaggcctttccaagaggaaggg

SEQ ID NO: 220731 - DNA, 25 bp, Probe Sequence
gaagagccggttcaagcatctgatg

SEQ ID NO: 220732 - DNA, 25 bp, Probe Sequence
gaagtgaccgtgagagacatgctgt

SEQ ID NO: 220733 - DNA, 25 bp, Probe Sequence
gaagtcgaggctgcaagtgagctga

SEQ ID NO: 220734 - DNA, 25 bp, Probe Sequence
gaagtcgaggctgcaagtgagctga

SEQ ID NO: 220735 - DNA, 25 bp, Probe Sequence
gaagtggagattgcaattgagctag

SEQ ID NO: 220736 - DNA, 25 bp, Probe Sequence
gaagtgctgagagttcaaagaatca

SEQ ID NO: 220737 - DNA, 25 bp, Probe Sequence
gaagtcggagctaattagacatctg

SEQ ID NO: 220738 - DNA, 25 bp, Probe Sequence
gaagtcgcggtcatcaggaacttct

SEQ ID NO: 220739 - DNA, 25 bp, Probe Sequence
gaagttgccattctctgcagttttc

SEQ ID NO: 220740 - DNA, 25 bp, Probe Sequence
gaagtcaacattgcctgaatgtctg

SEQ ID NO: 220741 - DNA, 25 bp, Probe Sequence
gaagtcatcaatgacctcaaccatt

SEQ ID NO: 220742 - DNA, 25 bp, Probe Sequence
gaagtacaagctttctcgagctttt

SEQ ID NO: 220743 - DNA, 25 bp, Probe Sequence
gaagtcaagtctcttaagctattag

SEQ ID NO: 220744 - DNA, 25 bp, Probe Sequence
gaagtccatgttcattcaaattttg

SEQ ID NO: 220745 - DNA, 25 bp, Probe Sequence
gaagtacattcaaattgcaacagtt

SEQ ID NO: 220746 - DNA, 25 bp, Probe Sequence
gaagaacattccttactaagttaag

SEQ ID NO: 220747 - DNA, 25 bp, Probe Sequence
gaagagagactcggttctaacttcg

SEQ ID NO: 220748 - DNA, 25 bp, Probe Sequence
gaagataaccggctcattcacttcc

SEQ ID NO: 220749 - DNA, 25 bp, Probe Sequence
gaagtcaacctgggtatctggatat

SEQ ID NO: 220750 - DNA, 25 bp, Probe Sequence
gaagtggatgccccttgatgggaac

SEQ ID NO: 220751 - DNA, 25 bp, Probe Sequence
gaagggctgccttattttagagcac

SEQ ID NO: 220752 - DNA, 25 bp, Probe Sequence
gaagggctcctgtataaaatatgca

SEQ ID NO: 220753 - DNA, 25 bp, Probe Sequence
gaagggccacggaccacataataat

SEQ ID NO: 220754 - DNA, 25 bp, Probe Sequence
gaagtacacagggtgaacataaaaa

SEQ ID NO: 220755 - DNA, 25 bp, Probe Sequence
gaagtgaccacaaggatttagaata

SEQ ID NO: 220756 - DNA, 25 bp, Probe Sequence
gaagagacccttgaaacatgaaaaa

SEQ ID NO: 220757 - DNA, 25 bp, Probe Sequence
gaagatgtcctttgaaactcagaaa

SEQ ID NO: 220758 - DNA, 25 bp, Probe Sequence
gaagtctagcttggatatatgctac

SEQ ID NO: 220759 - DNA, 25 bp, Probe Sequence
gaagtacatctttgctgtggctcac

SEQ ID NO: 220760 - DNA, 25 bp, Probe Sequence
gacagtgaaatacgcgtactacgac

SEQ ID NO: 220761 - DNA, 25 bp, Probe Sequence
gacggaaattccataaaccaatcac

SEQ ID NO: 220762 - DNA, 25 bp, Probe Sequence
gacaaaaactccatggggccaaatc

SEQ ID NO: 220763 - DNA, 25 bp, Probe Sequence
gagcaaactccatattggggggaaa

SEQ ID NO: 220764 - DNA, 25 bp, Probe Sequence
gaaaatgccctatttgcaggggtat

SEQ ID NO: 220765 - DNA, 25 bp, Probe Sequence
gaagaggccccaatggggcggtgac

SEQ ID NO: 220766 - DNA, 25 bp, Probe Sequence
gaagaggccccggcatggggatctg

SEQ ID NO: 220767 - DNA, 25 bp, Probe Sequence
gaagatctaccccagggagaatctg

SEQ ID NO: 220768 - DNA, 25 bp, Probe Sequence
gaagtgctagctgaaggatgagcag

SEQ ID NO: 220769 - DNA, 25 bp, Probe Sequence
gaagtgtgaacttcagcagctgaga

SEQ ID NO: 220770 - DNA, 25 bp, Probe Sequence
gaagatgaagccaaagagctgcaga

SEQ ID NO: 220771 - DNA, 25 bp, Probe Sequence
gaagtgaacggcagagtgagatatt

SEQ ID NO: 220772 - DNA, 25 bp, Probe Sequence
gaagtcagaccgctgagtatatgca

SEQ ID NO: 220773 - DNA, 25 bp, Probe Sequence
gaagtggtcagcctatggtttgcag

SEQ ID NO: 220774 - DNA, 25 bp, Probe Sequence
gaagtggcatcatttattgtgatcg

SEQ ID NO: 220775 - DNA, 25 bp, Probe Sequence
gaagttgctatggctatcttgtctt

SEQ ID NO: 220776 - DNA, 25 bp, Probe Sequence
gaagtgtgtcctgatgctggtgtta

SEQ ID NO: 220777 - DNA, 25 bp, Probe Sequence
gaagtggtcctgatggagggcgaca

SEQ ID NO: 220778 - DNA, 25 bp, Probe Sequence
gaagtgttctggttggggccaggca

SEQ ID NO: 220779 - DNA, 25 bp, Probe Sequence
gaagtgttctggttggggccaggca

SEQ ID NO: 220780 - DNA, 25 bp, Probe Sequence
gaaatttcggaccaggaccaggaag

SEQ ID NO: 220781 - DNA, 25 bp, Probe Sequence
gaagtttatggagcgcgaccctgat

SEQ ID NO: 220782 - DNA, 25 bp, Probe Sequence
gaagttatacggaagcgtctcctca

SEQ ID NO: 220783 - DNA, 25 bp, Probe Sequence
gaagttgaactttcggatcagcctg

SEQ ID NO: 220784 - DNA, 25 bp, Probe Sequence
gaagttggcacttagcaggctacct

SEQ ID NO: 220785 - DNA, 25 bp, Probe Sequence
gaagtatacacttccgctgtaccac

SEQ ID NO: 220786 - DNA, 25 bp, Probe Sequence
gaagttgacctaaacatgtaaccat

SEQ ID NO: 220787 - DNA, 25 bp, Probe Sequence
gaagttttgtatcatagtaatcctg

SEQ ID NO: 220788 - DNA, 25 bp, Probe Sequence
gaagtgctctttatgtatctaacag

SEQ ID NO: 220789 - DNA, 25 bp, Probe Sequence
gaagttcgatgtcttactccaacag

SEQ ID NO: 220790 - DNA, 25 bp, Probe Sequence
gaagtaacttacataattcatacag

SEQ ID NO: 220791 - DNA, 25 bp, Probe Sequence
gaagtgagcactaaattcaatacat

SEQ ID NO: 220792 - DNA, 25 bp, Probe Sequence
gaagtaggctgccatattcagaggc

SEQ ID NO: 220793 - DNA, 25 bp, Probe Sequence
gaagtgcagatgaccacattcaagg

SEQ ID NO: 220794 - DNA, 25 bp, Probe Sequence
gaagtgcagatgacaatttaaggaa

SEQ ID NO: 220795 - DNA, 25 bp, Probe Sequence
gaagctggtacccctgaaggagacc

SEQ ID NO: 220796 - DNA, 25 bp, Probe Sequence
gacccctagcccattagggacacta

SEQ ID NO: 220797 - DNA, 25 bp, Probe Sequence
gaacctctacctgttaggtgtggta

SEQ ID NO: 220798 - DNA, 25 bp, Probe Sequence
gaagccctttccagtagggtgggca

SEQ ID NO: 220799 - DNA, 25 bp, Probe Sequence
gaacccaatcccagttggcagtgca

SEQ ID NO: 220800 - DNA, 25 bp, Probe Sequence
gaagtcctgaccgagttgggcagtc

SEQ ID NO: 220801 - DNA, 25 bp, Probe Sequence
gaagttctgacttttcagggctacc

SEQ ID NO: 220802 - DNA, 25 bp, Probe Sequence
gaagtgtccacttttcagtagatac

SEQ ID NO: 220803 - DNA, 25 bp, Probe Sequence
gaagtgcccatcaattgctgcagct

SEQ ID NO: 220804 - DNA, 25 bp, Probe Sequence
gaagtcccagcattgatggcagcgc

SEQ ID NO: 220805 - DNA, 25 bp, Probe Sequence
gaagtcaccagatgtgtccgaaata

SEQ ID NO: 220806 - DNA, 25 bp, Probe Sequence
gaagtcaccttctttcgtgaatgtt

SEQ ID NO: 220807 - DNA, 25 bp, Probe Sequence
gaagcatccctttgtatactgtttt

SEQ ID NO: 220808 - DNA, 25 bp, Probe Sequence
gaagatgcactttctgtaactttgt

SEQ ID NO: 220809 - DNA, 25 bp, Probe Sequence
gaagtgcatctcccataaacgaggt

SEQ ID NO: 220810 - DNA, 25 bp, Probe Sequence
gaagtgaacccactgaaaagtgatt

SEQ ID NO: 220811 - DNA, 25 bp, Probe Sequence
gaagttgacttactgaagaatggag

SEQ ID NO: 220812 - DNA, 25 bp, Probe Sequence
gaagttcatcatcaaaaattggtgt

SEQ ID NO: 220813 - DNA, 25 bp, Probe Sequence
gaagttcacaggcaatacattgtct

SEQ ID NO: 220814 - DNA, 25 bp, Probe Sequence
gaagttccatggcgttttgtaatca

SEQ ID NO: 220815 - DNA, 25 bp, Probe Sequence
gaagcgtttaggcatgtttaacatc

SEQ ID NO: 220816 - DNA, 25 bp, Probe Sequence
gaagcagttagagcggtcgttggcc

SEQ ID NO: 220817 - DNA, 25 bp, Probe Sequence
gaagtctctgaagaggtgcggtggc

SEQ ID NO: 220818 - DNA, 25 bp, Probe Sequence
gaagatcttggacagcgtgggtatc

SEQ ID NO: 220819 - DNA, 25 bp, Probe Sequence
gaagatcttggacagcgtgggtatc

SEQ ID NO: 220820 - DNA, 25 bp, Probe Sequence
gaagtcttcaggggagattgtctac

SEQ ID NO: 220821 - DNA, 25 bp, Probe Sequence
gaagtctgaactgggtgcctgttac

SEQ ID NO: 220822 - DNA, 25 bp, Probe Sequence
gaagtctttctgtgtcgtgaatagc

SEQ ID NO: 220823 - DNA, 25 bp, Probe Sequence
gaagttttcatgtgtagtgtgctca

SEQ ID NO: 220824 - DNA, 25 bp, Probe Sequence
gaagttttcatgtgtagtgtgctca

SEQ ID NO: 220825 - DNA, 25 bp, Probe Sequence
gaagtcatatgttgtctttgttgta

SEQ ID NO: 220826 - DNA, 25 bp, Probe Sequence
gaagtatatgtaaatgtctgttttt

SEQ ID NO: 220827 - DNA, 25 bp, Probe Sequence
gaagttagtttgtatatattattat

SEQ ID NO: 220828 - DNA, 25 bp, Probe Sequence
gaagatcaagtttgtacataacact

SEQ ID NO: 220829 - DNA, 25 bp, Probe Sequence
gaagttgcactatgtaccatactct

SEQ ID NO: 220830 - DNA, 25 bp, Probe Sequence
gaagattgtcgtattccaagtctaa

SEQ ID NO: 220831 - DNA, 25 bp, Probe Sequence
gaagattgtgttttctccactgatt

SEQ ID NO: 220832 - DNA, 25 bp, Probe Sequence
gaagattctgagacatttcgcctga

SEQ ID NO: 220833 - DNA, 25 bp, Probe Sequence
gaagatcatcaaacatagtgtcttg

SEQ ID NO: 220834 - DNA, 25 bp, Probe Sequence
gaagtacagtaattctgctcttggt

SEQ ID NO: 220835 - DNA, 25 bp, Probe Sequence
gaagtgaaaaggtcctctgaggatc

SEQ ID NO: 220836 - DNA, 25 bp, Probe Sequence
gaagctgaaacctctttaaatcttc

SEQ ID NO: 220837 - DNA, 25 bp, Probe Sequence
gaggtaaagtctgtttatttggtgt

SEQ ID NO: 220838 - DNA, 25 bp, Probe Sequence
gaagtaaatgttcttctgaattttg

SEQ ID NO: 220839 - DNA, 25 bp, Probe Sequence
gaagtatgaatgcgtgtgtctaaat

SEQ ID NO: 220840 - DNA, 25 bp, Probe Sequence
gaagtgagcgctgggctgttttagt

SEQ ID NO: 220841 - DNA, 25 bp, Probe Sequence
gaagatgagagctgggactttggca

SEQ ID NO: 220842 - DNA, 25 bp, Probe Sequence
gaagtcagagagccggaccatcgga

SEQ ID NO: 220843 - DNA, 25 bp, Probe Sequence
gaagtgcagagtcagagtcctggga

SEQ ID NO: 220844 - DNA, 25 bp, Probe Sequence
gaagtgccaggttttcactgtcaga

SEQ ID NO: 220845 - DNA, 25 bp, Probe Sequence
gaagatctcaggaatttttgtaggg

SEQ ID NO: 220846 - DNA, 25 bp, Probe Sequence
gaagtttggttatatttcagtgaaa

SEQ ID NO: 220847 - DNA, 25 bp, Probe Sequence
gaagttctgtgatagaccttaaata

SEQ ID NO: 220848 - DNA, 25 bp, Probe Sequence
gaagtttctgtttgacgtttgagtg

SEQ ID NO: 220849 - DNA, 25 bp, Probe Sequence
gaagagtttgttttgtttgtcatgt

SEQ ID NO: 220850 - DNA, 25 bp, Probe Sequence
gaagatgattggtttatttcccttt

SEQ ID NO: 220851 - DNA, 25 bp, Probe Sequence
gaagaaaggactttgttaatcttct

SEQ ID NO: 220852 - DNA, 25 bp, Probe Sequence
gaagaaatagaattaggttttgcct

SEQ ID NO: 220853 - DNA, 25 bp, Probe Sequence
gaagtttagcaatatgacattcttg

SEQ ID NO: 220854 - DNA, 25 bp, Probe Sequence
gaagatcccaaatttgaagtcatcg

SEQ ID NO: 220855 - DNA, 25 bp, Probe Sequence
gaagaccacaaaaaggaggatctgg

SEQ ID NO: 220856 - DNA, 25 bp, Probe Sequence
gaagaccaccaaactggtaatattt

SEQ ID NO: 220857 - DNA, 25 bp, Probe Sequence
gaagtgcctaaaactgtgctagttg

SEQ ID NO: 220858 - DNA, 25 bp, Probe Sequence
gaagttctgttatctgtgtatattg

SEQ ID NO: 220859 - DNA, 25 bp, Probe Sequence
gaagtctatttatattgtcatttta

SEQ ID NO: 220860 - DNA, 25 bp, Probe Sequence
gaagtctgttaatagtgatttagtc

SEQ ID NO: 220861 - DNA, 25 bp, Probe Sequence
gaagtcgttgaaggagtgcttgttg

SEQ ID NO: 220862 - DNA, 25 bp, Probe Sequence
gaagacggtggaaagtgttcagttg

SEQ ID NO: 220863 - DNA, 25 bp, Probe Sequence
gaaacggtggacagtgctgaacctt

SEQ ID NO: 220864 - DNA, 25 bp, Probe Sequence
gaagaatcctggacttggctagccc

SEQ ID NO: 220865 - DNA, 25 bp, Probe Sequence
gaagtaccgctgggtggagcagcac

SEQ ID NO: 220866 - DNA, 25 bp, Probe Sequence
gaagatcctgcaggtggtggtccag

SEQ ID NO: 220867 - DNA, 25 bp, Probe Sequence
gaagaccatcaggttccttcacagc

SEQ ID NO: 220868 - DNA, 25 bp, Probe Sequence
gaagatctcaaccttcgcttgaaga

SEQ ID NO: 220869 - DNA, 25 bp, Probe Sequence
gaagtatcatacccatctgtttaca

SEQ ID NO: 220870 - DNA, 25 bp, Probe Sequence
gaagtgaatgactatatgctgtatt

SEQ ID NO: 220871 - DNA, 25 bp, Probe Sequence
gaagtaagacaatgcgagactggtg

SEQ ID NO: 220872 - DNA, 25 bp, Probe Sequence
gaagtacatgaactcagggccggtt

SEQ ID NO: 220873 - DNA, 25 bp, Probe Sequence
gaagtagctgagtctccagtcactg

SEQ ID NO: 220874 - DNA, 25 bp, Probe Sequence
gaagtcactgcagtgcttgcagttc

SEQ ID NO: 220875 - DNA, 25 bp, Probe Sequence
gaagaactaatcaacatgttttatt

SEQ ID NO: 220876 - DNA, 25 bp, Probe Sequence
gaagtcttaatcagcagattatgtt

SEQ ID NO: 220877 - DNA, 25 bp, Probe Sequence
gaagtgcgtaccagaagtatgactc

SEQ ID NO: 220878 - DNA, 25 bp, Probe Sequence
gaagtcctgttcagaaggactctca

SEQ ID NO: 220879 - DNA, 25 bp, Probe Sequence
gaagaccctacagatagaacccaga

SEQ ID NO: 220880 - DNA, 25 bp, Probe Sequence
gaagacgtcgttgaacaacccatac

SEQ ID NO: 220881 - DNA, 25 bp, Probe Sequence
gaagactgctttcgttattactcct

SEQ ID NO: 220882 - DNA, 25 bp, Probe Sequence
gaagacccaggtttttcagcttctg

SEQ ID NO: 220883 - DNA, 25 bp, Probe Sequence
gaagacccagagagcactttgtttg

SEQ ID NO: 220884 - DNA, 25 bp, Probe Sequence
gaagaagaaggaacccatagcttgg

SEQ ID NO: 220885 - DNA, 25 bp, Probe Sequence
gaagagaaagactccgtacattcca

SEQ ID NO: 220886 - DNA, 25 bp, Probe Sequence
gaagaaacgactcgaaaattgtcca

SEQ ID NO: 220887 - DNA, 25 bp, Probe Sequence
gaagaaaccaccattaatcagcttt

SEQ ID NO: 220888 - DNA, 25 bp, Probe Sequence
tcaaaaaaaccactaatacttgtat

SEQ ID NO: 220889 - DNA, 25 bp, Probe Sequence
taaagaacttgccactaaactgggt

SEQ ID NO: 220890 - DNA, 25 bp, Probe Sequence
gaagagaagcttcccttaaccagag

SEQ ID NO: 220891 - DNA, 25 bp, Probe Sequence
gaagaggcggtcagatgtacccagg

SEQ ID NO: 220892 - DNA, 25 bp, Probe Sequence
gaagagggccctggatgtaattcag

SEQ ID NO: 220893 - DNA, 25 bp, Probe Sequence
gaagagcgatcagcattgagtccag

SEQ ID NO: 220894 - DNA, 25 bp, Probe Sequence
gaagagctgacatatggacctgccc

SEQ ID NO: 220895 - DNA, 25 bp, Probe Sequence
gaagagtgacaaatcctgacaccca

SEQ ID NO: 220896 - DNA, 25 bp, Probe Sequence
gaagagtactacatctacattcagc

SEQ ID NO: 220897 - DNA, 25 bp, Probe Sequence
gaagatcacaccttttaatgtagct

SEQ ID NO: 220898 - DNA, 25 bp, Probe Sequence
gaagtcatgcacctgtttacatgga

SEQ ID NO: 220899 - DNA, 25 bp, Probe Sequence
gaagtcacatctcatatcacatcag

SEQ ID NO: 220900 - DNA, 25 bp, Probe Sequence
gaagtccatctattacatcactggt

SEQ ID NO: 220901 - DNA, 25 bp, Probe Sequence
gaagtcctgctataccacagagttc

SEQ ID NO: 220902 - DNA, 25 bp, Probe Sequence
gaagtgcgtgcatggaccatcagga

SEQ ID NO: 220903 - DNA, 25 bp, Probe Sequence
gaagatgcatgaataggtccaacca

SEQ ID NO: 220904 - DNA, 25 bp, Probe Sequence
gaagatgaaataagtccagacaaag

SEQ ID NO: 220905 - DNA, 25 bp, Probe Sequence
gaagtaccagaacacatcactgaag

SEQ ID NO: 220906 - DNA, 25 bp, Probe Sequence
gaagtccctgaaagagctgcaggaa

SEQ ID NO: 220907 - DNA, 25 bp, Probe Sequence
gaagttgcttgaaagcactcggaga

SEQ ID NO: 220908 - DNA, 25 bp, Probe Sequence
gaagtttatcactccttagaagaaa

SEQ ID NO: 220909 - DNA, 25 bp, Probe Sequence
gaagtttgtccttctgctattgatc

SEQ ID NO: 220910 - DNA, 25 bp, Probe Sequence
gaagtagtgtccaggcacattgtgt

SEQ ID NO: 220911 - DNA, 25 bp, Probe Sequence
gaagacaggccgagtgatgcttggg

SEQ ID NO: 220912 - DNA, 25 bp, Probe Sequence
gaagatttgccaatggtgctttgga

SEQ ID NO: 220913 - DNA, 25 bp, Probe Sequence
gaagatagctctctgactgctttgg

SEQ ID NO: 220914 - DNA, 25 bp, Probe Sequence
gaagaggctgccttgacttgttgga

SEQ ID NO: 220915 - DNA, 25 bp, Probe Sequence
gaagatttgcatgatatgcttgctt

SEQ ID NO: 220916 - DNA, 25 bp, Probe Sequence
gaagtttatgctaatattgtgtaac

SEQ ID NO: 220917 - DNA, 25 bp, Probe Sequence
gaagattttgccacatttgattata

SEQ ID NO: 220918 - DNA, 25 bp, Probe Sequence
gaagattttgccacatttgattata

SEQ ID NO: 220919 - DNA, 25 bp, Probe Sequence
gaagttcttgcaaactcttactaca

SEQ ID NO: 220920 - DNA, 25 bp, Probe Sequence
gaagatgattctgtaccctagtata

SEQ ID NO: 220921 - DNA, 25 bp, Probe Sequence
gaagcagtttttgccctatttagtc

SEQ ID NO: 220922 - DNA, 25 bp, Probe Sequence
gaagagtttctttctagctttgagg

SEQ ID NO: 220923 - DNA, 25 bp, Probe Sequence
gaagacctactttaacatcctcatc

SEQ ID NO: 220924 - DNA, 25 bp, Probe Sequence
gaagaaatactctgaacaagtccgt

SEQ ID NO: 220925 - DNA, 25 bp, Probe Sequence
gaagaaaactattgtactcttttgt

SEQ ID NO: 220926 - DNA, 25 bp, Probe Sequence
gaagaaacagataccatactcattt

SEQ ID NO: 220927 - DNA, 25 bp, Probe Sequence
gaagatgctagcgaacctatgctca

SEQ ID NO: 220928 - DNA, 25 bp, Probe Sequence
gaagatcaaggctgcagtgagctat

SEQ ID NO: 220929 - DNA, 25 bp, Probe Sequence
gaagatcacggaggcagtcagccaa

SEQ ID NO: 220930 - DNA, 25 bp, Probe Sequence
gaagtcaggccagagcacaaaagca

SEQ ID NO: 220931 - DNA, 25 bp, Probe Sequence
gaagtcacgtcgtaaaaagacacca

SEQ ID NO: 220932 - DNA, 25 bp, Probe Sequence
gaagtcaagtctcatcaatcatcag

SEQ ID NO: 220933 - DNA, 25 bp, Probe Sequence
gaagtcaagtcttgcaactcatcag

SEQ ID NO: 220934 - DNA, 25 bp, Probe Sequence
gaagtaactcctcattcaagaccct

SEQ ID NO: 220935 - DNA, 25 bp, Probe Sequence
gaagatgaactgcagcgtatcaaac

SEQ ID NO: 220936 - DNA, 25 bp, Probe Sequence
gaagagcataatccacagagtgaaa

SEQ ID NO: 220937 - DNA, 25 bp, Probe Sequence
gaagacctcagccacagctgtaagc

SEQ ID NO: 220938 - DNA, 25 bp, Probe Sequence
gaagatgcctagtagaggaaagctt

SEQ ID NO: 220939 - DNA, 25 bp, Probe Sequence
gaagagccgcagtgggaggcacgtc

SEQ ID NO: 220940 - DNA, 25 bp, Probe Sequence
gaagagacctcataatgggcacagt

SEQ ID NO: 220941 - DNA, 25 bp, Probe Sequence
gaagcggcctcatcaatgggcagat

SEQ ID NO: 220942 - DNA, 25 bp, Probe Sequence
gaagacagccctcaaggaagatggt

SEQ ID NO: 220943 - DNA, 25 bp, Probe Sequence
gaagagagaccgtcgggggctgagg

SEQ ID NO: 220944 - DNA, 25 bp, Probe Sequence
gaagtaccaccactgtgtgggtgag

SEQ ID NO: 220945 - DNA, 25 bp, Probe Sequence
gaagttctctgggagtgtgggtaca

SEQ ID NO: 220946 - DNA, 25 bp, Probe Sequence
gaagtctctctgggcaggtgtagtg

SEQ ID NO: 220947 - DNA, 25 bp, Probe Sequence
gaagtcatcttggagcgtatggagg

SEQ ID NO: 220948 - DNA, 25 bp, Probe Sequence
gaagtcatactttgcgttaggtgtg

SEQ ID NO: 220949 - DNA, 25 bp, Probe Sequence
gaaccaactaatggtctaggttagg

SEQ ID NO: 220950 - DNA, 25 bp, Probe Sequence
gaagcaagtctagtttcaaggtcta

SEQ ID NO: 220951 - DNA, 25 bp, Probe Sequence
gaagagagtatcatttataccttct

SEQ ID NO: 220952 - DNA, 25 bp, Probe Sequence
gaagatattaccactgatcacacag

SEQ ID NO: 220953 - DNA, 25 bp, Probe Sequence
gaagattttctcaatggatatcata

SEQ ID NO: 220954 - DNA, 25 bp, Probe Sequence
gaagtttttgcattggtaagagcat

SEQ ID NO: 220955 - DNA, 25 bp, Probe Sequence
gaagtctttagactgcccacattca

SEQ ID NO: 220956 - DNA, 25 bp, Probe Sequence
gaagtctttagaccttaatgtacat

SEQ ID NO: 220957 - DNA, 25 bp, Probe Sequence
gaagactttaatccgtcaaattctt

SEQ ID NO: 220958 - DNA, 25 bp, Probe Sequence
gaagaaatcttagcggaaattatat

SEQ ID NO: 220959 - DNA, 25 bp, Probe Sequence
gaagattatcattgacaaggaatat

SEQ ID NO: 220960 - DNA, 25 bp, Probe Sequence
gaagatctaccaatcaaatgcaaaa

SEQ ID NO: 220961 - DNA, 25 bp, Probe Sequence
gaagatttccaccaactgaatcatt

SEQ ID NO: 220962 - DNA, 25 bp, Probe Sequence
gaagtttcccacttgtggatgttta

SEQ ID NO: 220963 - DNA, 25 bp, Probe Sequence
gaagtatctgccaacctgaggttca

SEQ ID NO: 220964 - DNA, 25 bp, Probe Sequence
gaagtatgatgcgtttttggcctca

SEQ ID NO: 220965 - DNA, 25 bp, Probe Sequence
gaagttagcactatgtttacatgca

SEQ ID NO: 220966 - DNA, 25 bp, Probe Sequence
gaagttgaaattttgcttgagcagc

SEQ ID NO: 220967 - DNA, 25 bp, Probe Sequence
gaagttgacagcttggctgcctggc

SEQ ID NO: 220968 - DNA, 25 bp, Probe Sequence
gaagataaagccactgcctagcacc

SEQ ID NO: 220969 - DNA, 25 bp, Probe Sequence
gaagtaaagccgcctggctgagatg

SEQ ID NO: 220970 - DNA, 25 bp, Probe Sequence
gaagattgggggctggctgaggaaa

SEQ ID NO: 220971 - DNA, 25 bp, Probe Sequence
gaagattggacagcaggtcgacaga

SEQ ID NO: 220972 - DNA, 25 bp, Probe Sequence
gaagatctgtgacttcgacctgggc

SEQ ID NO: 220973 - DNA, 25 bp, Probe Sequence
gaagattgtcacacgagccaagtct

SEQ ID NO: 220974 - DNA, 25 bp, Probe Sequence
gaagttctcacttgccaatatagta

SEQ ID NO: 220975 - DNA, 25 bp, Probe Sequence
gaagattcatagtgtaatatggata

SEQ ID NO: 220976 - DNA, 25 bp, Probe Sequence
gaagttcagagttctaggagtggaa

SEQ ID NO: 220977 - DNA, 25 bp, Probe Sequence
gaagattagctctttacgatggaaa

SEQ ID NO: 220978 - DNA, 25 bp, Probe Sequence
gaagatgtgatgagcttaccagaaa

SEQ ID NO: 220979 - DNA, 25 bp, Probe Sequence
gaagatggtgtcaatggcccgaaac

SEQ ID NO: 220980 - DNA, 25 bp, Probe Sequence
gaagttgagtttgccggcatagccc

SEQ ID NO: 220981 - DNA, 25 bp, Probe Sequence
gaagttactttgcccatgtgaaccc

SEQ ID NO: 220982 - DNA, 25 bp, Probe Sequence
gaagtttctttacctgctgacaggt

SEQ ID NO: 220983 - DNA, 25 bp, Probe Sequence
gaagttttattcagtgtatgggtct

SEQ ID NO: 220984 - DNA, 25 bp, Probe Sequence
gaacctttaatcagagaagtaatct

SEQ ID NO: 220985 - DNA, 25 bp, Probe Sequence
gaaagtttgtacagggtaaatctat

SEQ ID NO: 220986 - DNA, 25 bp, Probe Sequence
gaaagtttgtacagggtaaatctat

SEQ ID NO: 220987 - DNA, 25 bp, Probe Sequence
gaagtttctttcaggtgtaaataat

SEQ ID NO: 220988 - DNA, 25 bp, Probe Sequence
gaagttttactccaggttattgcaa

SEQ ID NO: 220989 - DNA, 25 bp, Probe Sequence
gaagttatttccaagtttgtgtata

SEQ ID NO: 220990 - DNA, 25 bp, Probe Sequence
gaagtttttctttgtgtttggatca

SEQ ID NO: 220991 - DNA, 25 bp, Probe Sequence
gaagtttttctttgtgtttggatca

SEQ ID NO: 220992 - DNA, 25 bp, Probe Sequence
gaagaattctaacattgtttagact

SEQ ID NO: 220993 - DNA, 25 bp, Probe Sequence
gaaccaccaaatctgacttttacat

SEQ ID NO: 220994 - DNA, 25 bp, Probe Sequence
gaaccaccaaatctgacttttacat

SEQ ID NO: 220995 - DNA, 25 bp, Probe Sequence
gaaccaaaggtcaccttcttgactc

SEQ ID NO: 220996 - DNA, 25 bp, Probe Sequence
gaacctaggtatatcctttggtctt

SEQ ID NO: 220997 - DNA, 25 bp, Probe Sequence
tgaagtctaggttacccatttttgg

SEQ ID NO: 220998 - DNA, 25 bp, Probe Sequence
gaagttaagttcagcctcatattct

SEQ ID NO: 220999 - DNA, 25 bp, Probe Sequence
gaagatctagatgctgtgggttttc

SEQ ID NO: 221000 - DNA, 25 bp, Probe Sequence
gaagttagcatcctgggccagtttg

SEQ ID NO: 221001 - DNA, 25 bp, Probe Sequence
gaagttatgcaggggtcacagttat

SEQ ID NO: 221002 - DNA, 25 bp, Probe Sequence
gaagttgatgtggatggtacagtag

SEQ ID NO: 221003 - DNA, 25 bp, Probe Sequence
gaagtttgtggatggcctgatgatc

SEQ ID NO: 221004 - DNA, 25 bp, Probe Sequence
gaagttggatgggataccgagatta

SEQ ID NO: 221005 - DNA, 25 bp, Probe Sequence
gaagctgaggtgggaaggtggcttg

SEQ ID NO: 221006 - DNA, 25 bp, Probe Sequence
gaagagacgtggtaagtgcggtgca

SEQ ID NO: 221007 - DNA, 25 bp, Probe Sequence
gaagatgagcttcaaattccagtta

SEQ ID NO: 221008 - DNA, 25 bp, Probe Sequence
gaagtatgcttataattcacattga

SEQ ID NO: 221009 - DNA, 25 bp, Probe Sequence
gaagatccttatatttacatctagt

SEQ ID NO: 221010 - DNA, 25 bp, Probe Sequence
gaagatccatttaagaacacatgta

SEQ ID NO: 221011 - DNA, 25 bp, Probe Sequence
gaagttcttatgaccacagatcatc

SEQ ID NO: 221012 - DNA, 25 bp, Probe Sequence
gaagtttctgaaagtcagatgacac

SEQ ID NO: 221013 - DNA, 25 bp, Probe Sequence
gaagtttctgatagtgtctgcacaa

SEQ ID NO: 221014 - DNA, 25 bp, Probe Sequence
gaagatatttgtagtaatgcctgga

SEQ ID NO: 221015 - DNA, 25 bp, Probe Sequence
gaagtatttgtgagggacagcgatg

SEQ ID NO: 221016 - DNA, 25 bp, Probe Sequence
gacagttacctggcagggacgctgg

SEQ ID NO: 221017 - DNA, 25 bp, Probe Sequence
gaagtacattctggccaggcacgat

SEQ ID NO: 221018 - DNA, 25 bp, Probe Sequence
gaagaactgtcagctcagcgttgac

SEQ ID NO: 221019 - DNA, 25 bp, Probe Sequence
gaagaattgttcgagcctgggagtt

SEQ ID NO: 221020 - DNA, 25 bp, Probe Sequence
gaagagttgtacgcccaggcaacaa

SEQ ID NO: 221021 - DNA, 25 bp, Probe Sequence
gaagagtgaaactccatctccaaaa

SEQ ID NO: 221022 - DNA, 25 bp, Probe Sequence
gaagaggtggaaccgtcccaaaatg

SEQ ID NO: 221023 - DNA, 25 bp, Probe Sequence
gaagaggtggaaccgtcccaaaatg

SEQ ID NO: 221024 - DNA, 25 bp, Probe Sequence
gaagatggtaaactcccccaatact

SEQ ID NO: 221025 - DNA, 25 bp, Probe Sequence
gaagtattaataatcacctctgcaa

SEQ ID NO: 221026 - DNA, 25 bp, Probe Sequence
gaagtttcttcagtccctgatcaga

SEQ ID NO: 221027 - DNA, 25 bp, Probe Sequence
gaagtatacctgcctaccttgcaga

SEQ ID NO: 221028 - DNA, 25 bp, Probe Sequence
gaagtcaaccagaccaccttatacc

SEQ ID NO: 221029 - DNA, 25 bp, Probe Sequence
gaagattaccagatcatcagtttag

SEQ ID NO: 221030 - DNA, 25 bp, Probe Sequence
gaagattgacaggttcatgcaggct

SEQ ID NO: 221031 - DNA, 25 bp, Probe Sequence
gaagatatgactgattctgactgta

SEQ ID NO: 221032 - DNA, 25 bp, Probe Sequence
gaagatgatgatgatgatgattttg

SEQ ID NO: 221033 - DNA, 25 bp, Probe Sequence
gaagagatggaattattgctgacat

SEQ ID NO: 221034 - DNA, 25 bp, Probe Sequence
gaagagctggcttcaagcctggctt

SEQ ID NO: 221035 - DNA, 25 bp, Probe Sequence
gaagaagaggcctagcctgagccaa

SEQ ID NO: 221036 - DNA, 25 bp, Probe Sequence
gaagaaagacatcagccagtgcact

SEQ ID NO: 221037 - DNA, 25 bp, Probe Sequence
gaagaagaagtcttacaccactccc

SEQ ID NO: 221038 - DNA, 25 bp, Probe Sequence
gaagaggaagacgcaccatccttcg

SEQ ID NO: 221039 - DNA, 25 bp, Probe Sequence
gaagacgatctgagcacaccaaatg

SEQ ID NO: 221040 - DNA, 25 bp, Probe Sequence
gaagagagacatcgtgcaacccaat

SEQ ID NO: 221041 - DNA, 25 bp, Probe Sequence
gaagagccactcgtaacagcgaacg

SEQ ID NO: 221042 - DNA, 25 bp, Probe Sequence
gaagaactgaccaatatccgcaacg

SEQ ID NO: 221043 - DNA, 25 bp, Probe Sequence
gaagtactggcgattctctgagggc

SEQ ID NO: 221044 - DNA, 25 bp, Probe Sequence
gaagctacggagtttacagaaggca

SEQ ID NO: 221045 - DNA, 25 bp, Probe Sequence
gaagtagggacagaagcagaagagt

SEQ ID NO: 221046 - DNA, 25 bp, Probe Sequence
gaagagagggacagaccgtcagaaa

SEQ ID NO: 221047 - DNA, 25 bp, Probe Sequence
gaagagaagggtttcacgggaagag

SEQ ID NO: 221048 - DNA, 25 bp, Probe Sequence
gaagaaacttgctgctcgggaagaa

SEQ ID NO: 221049 - DNA, 25 bp, Probe Sequence
gaagaagaccattactttaggcaaa

SEQ ID NO: 221050 - DNA, 25 bp, Probe Sequence
gaagatgcaaccaatcctgcttctg

SEQ ID NO: 221051 - DNA, 25 bp, Probe Sequence
gaagatgtcaccaatcctttgcaga

SEQ ID NO: 221052 - DNA, 25 bp, Probe Sequence
gaagattcctaaaatttgagagaca

SEQ ID NO: 221053 - DNA, 25 bp, Probe Sequence
gaagattttacatatccttggatca

SEQ ID NO: 221054 - DNA, 25 bp, Probe Sequence
gaagacatttatgaatcgtaggact

SEQ ID NO: 221055 - DNA, 25 bp, Probe Sequence
gaagacatttttacatcccgaagga

SEQ ID NO: 221056 - DNA, 25 bp, Probe Sequence
gaagacattgaataaccctgggcag

SEQ ID NO: 221057 - DNA, 25 bp, Probe Sequence
gaagaattgagttaccctaagacag

SEQ ID NO: 221058 - DNA, 25 bp, Probe Sequence
gaagaacaagttactccaaagacag

SEQ ID NO: 221059 - DNA, 25 bp, Probe Sequence
gaagaataagtccccaagaaagcta

SEQ ID NO: 221060 - DNA, 25 bp, Probe Sequence
gaagacaaacttgccaaagctacaa

SEQ ID NO: 221061 - DNA, 25 bp, Probe Sequence
gaagaattactagctcaaggtgaat

SEQ ID NO: 221062 - DNA, 25 bp, Probe Sequence
gaagaatcagtaagtgtaaggtgta

SEQ ID NO: 221063 - DNA, 25 bp, Probe Sequence
gaagaacagtaaaatcacagcggaa

SEQ ID NO: 221064 - DNA, 25 bp, Probe Sequence
gaagatactgaagaacatcacttaa

SEQ ID NO: 221065 - DNA, 25 bp, Probe Sequence
gaagatttcagagtatgacatcact

SEQ ID NO: 221066 - DNA, 25 bp, Probe Sequence
gaagatttctctgagatcatgagtt

SEQ ID NO: 221067 - DNA, 25 bp, Probe Sequence
gaagactgatccgcgatatacctgt

SEQ ID NO: 221068 - DNA, 25 bp, Probe Sequence
gaagaagctctcgacaatacccgtt

SEQ ID NO: 221069 - DNA, 25 bp, Probe Sequence
gaagatgacatctccatgcatacta

SEQ ID NO: 221070 - DNA, 25 bp, Probe Sequence
gaagatgacctaagtgtgactgcag

SEQ ID NO: 221071 - DNA, 25 bp, Probe Sequence
gaagacatcctgagcagtgccagct

SEQ ID NO: 221072 - DNA, 25 bp, Probe Sequence
gaagaatcctgagctcgccaataag

SEQ ID NO: 221073 - DNA, 25 bp, Probe Sequence
gaagcaacctaagtgcctatcaaca

SEQ ID NO: 221074 - DNA, 25 bp, Probe Sequence
gaagagacttgaatatcctagagca

SEQ ID NO: 221075 - DNA, 25 bp, Probe Sequence
gaagagacggaatcttctgaactgc

SEQ ID NO: 221076 - DNA, 25 bp, Probe Sequence
gaagaatccgagtgtttgccaggct

SEQ ID NO: 221077 - DNA, 25 bp, Probe Sequence
gaagttactatgtttaagccagact

SEQ ID NO: 221078 - DNA, 25 bp, Probe Sequence
gaagttattatctcgaactgacact

SEQ ID NO: 221079 - DNA, 25 bp, Probe Sequence
gaagtatccttctggacactggcag

SEQ ID NO: 221080 - DNA, 25 bp, Probe Sequence
gaagttcctgtccagagacctgttc

SEQ ID NO: 221081 - DNA, 25 bp, Probe Sequence
gaagaaaagctccaggatccctgtc

SEQ ID NO: 221082 - DNA, 25 bp, Probe Sequence
gaagaaaagctccaggatccctgtc

SEQ ID NO: 221083 - DNA, 25 bp, Probe Sequence
gaagaaacagctcatgaggctacgg

SEQ ID NO: 221084 - DNA, 25 bp, Probe Sequence
gaagagagaacaatatagagcccac

SEQ ID NO: 221085 - DNA, 25 bp, Probe Sequence
gaagatgagaacaaaataactactg

SEQ ID NO: 221086 - DNA, 25 bp, Probe Sequence
gaagatggaactcgaaatcccaatg

SEQ ID NO: 221087 - DNA, 25 bp, Probe Sequence
gaagatggaatccagcatcagttca

SEQ ID NO: 221088 - DNA, 25 bp, Probe Sequence
gaagatggaatgaagccgttggctg

SEQ ID NO: 221089 - DNA, 25 bp, Probe Sequence
gaagtattctgtacacagatccctg

SEQ ID NO: 221090 - DNA, 25 bp, Probe Sequence
gaagtatgtgtgttacaccctcaca

SEQ ID NO: 221091 - DNA, 25 bp, Probe Sequence
gaagtatgtgtgttacaccctcaca

SEQ ID NO: 221092 - DNA, 25 bp, Probe Sequence
gaagatatgctggttgtagacccca

SEQ ID NO: 221093 - DNA, 25 bp, Probe Sequence
gaagatagtggttgaagccccagca

SEQ ID NO: 221094 - DNA, 25 bp, Probe Sequence
gaagcaaggagccggagctcccaca

SEQ ID NO: 221095 - DNA, 25 bp, Probe Sequence
gaagcaagtgacaaggacgcccgaa

SEQ ID NO: 221096 - DNA, 25 bp, Probe Sequence
gaagaagtcagcttgagcatacagc

SEQ ID NO: 221097 - DNA, 25 bp, Probe Sequence
gaagagcactactggatgtcagcgg

SEQ ID NO: 221098 - DNA, 25 bp, Probe Sequence
gaagagattatgggtgaagaaggga

SEQ ID NO: 221099 - DNA, 25 bp, Probe Sequence
gaagaaggtgatggtgaggaagagg

SEQ ID NO: 221100 - DNA, 25 bp, Probe Sequence
gaagaaggtgatggtgaggaagagg

SEQ ID NO: 221101 - DNA, 25 bp, Probe Sequence
gaagatgcatggaggcgggccaagt

SEQ ID NO: 221102 - DNA, 25 bp, Probe Sequence
gaagactttttggggctgcaagcta

SEQ ID NO: 221103 - DNA, 25 bp, Probe Sequence
gaagaattttgaggggcatgatagc

SEQ ID NO: 221104 - DNA, 25 bp, Probe Sequence
gaagaatattcgggcccatagaggg

SEQ ID NO: 221105 - DNA, 25 bp, Probe Sequence
gaagaaatgattaaccctggaggct

SEQ ID NO: 221106 - DNA, 25 bp, Probe Sequence
gaagaaatgcggaaccacggccgct

SEQ ID NO: 221107 - DNA, 25 bp, Probe Sequence
gaagaaatgccacaaacaggctctt

SEQ ID NO: 221108 - DNA, 25 bp, Probe Sequence
gaagtttccagcaaaaccctcatca

SEQ ID NO: 221109 - DNA, 25 bp, Probe Sequence
gacagtttccgcagaaatcctattt

SEQ ID NO: 221110 - DNA, 25 bp, Probe Sequence
gaagtttcctcataacatttatctt

SEQ ID NO: 221111 - DNA, 25 bp, Probe Sequence
gaagcttttctccgaatttgtactt

SEQ ID NO: 221112 - DNA, 25 bp, Probe Sequence
gaagagcttttcggacctgttacta

SEQ ID NO: 221113 - DNA, 25 bp, Probe Sequence
gaagagaatattcctacttgcagta

SEQ ID NO: 221114 - DNA, 25 bp, Probe Sequence
gaagatgacatcacctattggctta

SEQ ID NO: 221115 - DNA, 25 bp, Probe Sequence
gaagagatctgtgcccatgggtctc

SEQ ID NO: 221116 - DNA, 25 bp, Probe Sequence
gaagatgactggactcaaagtaccc

SEQ ID NO: 221117 - DNA, 25 bp, Probe Sequence
gaagagctggcgaccaagagattcc

SEQ ID NO: 221118 - DNA, 25 bp, Probe Sequence
gaagacggcatcatcacgaagcagc

SEQ ID NO: 221119 - DNA, 25 bp, Probe Sequence
gaagttcagatcacagcatgaagaa

SEQ ID NO: 221120 - DNA, 25 bp, Probe Sequence
gaagttcttcaggcctgtagaaaga

SEQ ID NO: 221121 - DNA, 25 bp, Probe Sequence
gaagattatgtgccccggaaagcaa

SEQ ID NO: 221122 - DNA, 25 bp, Probe Sequence
gaagattgcgagcaccttatccgaa

SEQ ID NO: 221123 - DNA, 25 bp, Probe Sequence
gaagaagtgcatggatccctttcaa

SEQ ID NO: 221124 - DNA, 25 bp, Probe Sequence
gaagctagttgatttccagttgcac

SEQ ID NO: 221125 - DNA, 25 bp, Probe Sequence
gaagacagaaggtctgccagcttac

SEQ ID NO: 221126 - DNA, 25 bp, Probe Sequence
gaagacagccggactgtccatcgac

SEQ ID NO: 221127 - DNA, 25 bp, Probe Sequence
gaagatggacgtactttgtctgact

SEQ ID NO: 221128 - DNA, 25 bp, Probe Sequence
gaagatctaagcactgtctgttgtc

SEQ ID NO: 221129 - DNA, 25 bp, Probe Sequence
gaagatgccagagtgggtcctcttc

SEQ ID NO: 221130 - DNA, 25 bp, Probe Sequence
gaagataacacttgattccatttca

SEQ ID NO: 221131 - DNA, 25 bp, Probe Sequence
gaagattatcaattgtcctatttta

SEQ ID NO: 221132 - DNA, 25 bp, Probe Sequence
gaagtttctacattctctatttttg

SEQ ID NO: 221133 - DNA, 25 bp, Probe Sequence
gaagttggctactctcagaatttgg

SEQ ID NO: 221134 - DNA, 25 bp, Probe Sequence
gaagttttagttagagcaaataggc

SEQ ID NO: 221135 - DNA, 25 bp, Probe Sequence
gaagttttgagttttagaaagtgct

SEQ ID NO: 221136 - DNA, 25 bp, Probe Sequence
gaagttcttgaagcttagttaccat

SEQ ID NO: 221137 - DNA, 25 bp, Probe Sequence
gaagctttccgagcttcactttcca

SEQ ID NO: 221138 - DNA, 25 bp, Probe Sequence
gaagctttttgagctcatcctcatg

SEQ ID NO: 221139 - DNA, 25 bp, Probe Sequence
gaagcttttggggtcagatctctgg

SEQ ID NO: 221140 - DNA, 25 bp, Probe Sequence
gaagcttttggggtcagatctctgg

SEQ ID NO: 221141 - DNA, 25 bp, Probe Sequence
gaacatgtcttcctgagtcagtgcc

SEQ ID NO: 221142 - DNA, 25 bp, Probe Sequence
gaagatgtcgtccgagtatatgcag

SEQ ID NO: 221143 - DNA, 25 bp, Probe Sequence
gaagttgcgtgtggtgatgatcgaa

SEQ ID NO: 221144 - DNA, 25 bp, Probe Sequence
gaagatacgctgcagttgatggaaa

SEQ ID NO: 221145 - DNA, 25 bp, Probe Sequence
gaagttccagatcttgtggagaatt

SEQ ID NO: 221146 - DNA, 25 bp, Probe Sequence
gaagattcctggtatttctcgaatt

SEQ ID NO: 221147 - DNA, 25 bp, Probe Sequence
gaagaactcggtattccagaatcac

SEQ ID NO: 221148 - DNA, 25 bp, Probe Sequence
gaagcacttcggtgtttaaatatac

SEQ ID NO: 221149 - DNA, 25 bp, Probe Sequence
gaagaccaggcctggttttattaga

SEQ ID NO: 221150 - DNA, 25 bp, Probe Sequence
gaagaaaggcttgagatcttttaag

SEQ ID NO: 221151 - DNA, 25 bp, Probe Sequence
gaagaaatccgcagaagcttattaa

SEQ ID NO: 221152 - DNA, 25 bp, Probe Sequence
gaagcaagaaggcgatagcttttag

SEQ ID NO: 221153 - DNA, 25 bp, Probe Sequence
gaactagagcagccatgtgtagcct

SEQ ID NO: 221154 - DNA, 25 bp, Probe Sequence
gaagatcgatcgccacatgtatcac

SEQ ID NO: 221155 - DNA, 25 bp, Probe Sequence
gaagatctgctcaagacgtccagca

SEQ ID NO: 221156 - DNA, 25 bp, Probe Sequence
gaagatcactcaagactatgggcag

SEQ ID NO: 221157 - DNA, 25 bp, Probe Sequence
gaagagcaatagccacttgagtgag

SEQ ID NO: 221158 - DNA, 25 bp, Probe Sequence
gaagagtttggctttcatgagaata

SEQ ID NO: 221159 - DNA, 25 bp, Probe Sequence
gaagagccactgccattaaagaata

SEQ ID NO: 221160 - DNA, 25 bp, Probe Sequence
gaagatcaacgcctcactgaaacat

SEQ ID NO: 221161 - DNA, 25 bp, Probe Sequence
gaagatcaccattgctgactgtgga

SEQ ID NO: 221162 - DNA, 25 bp, Probe Sequence
gaagatctcgcttggtcatgtggat

SEQ ID NO: 221163 - DNA, 25 bp, Probe Sequence
gaagatgggcttcttgtgagtcccc

SEQ ID NO: 221164 - DNA, 25 bp, Probe Sequence
gaagaggtgcttctgatctgtccag

SEQ ID NO: 221165 - DNA, 25 bp, Probe Sequence
gaagaggtgctgcagctggtggacg

SEQ ID NO: 221166 - DNA, 25 bp, Probe Sequence
gaagaggatatcgtggccaggcggt

SEQ ID NO: 221167 - DNA, 25 bp, Probe Sequence
gaagaggagatcgatggatagtcgg

SEQ ID NO: 221168 - DNA, 25 bp, Probe Sequence
gaagaaggacgcggacttgcgggcc

SEQ ID NO: 221169 - DNA, 25 bp, Probe Sequence
gaagagagagaccctcactgctggg

SEQ ID NO: 221170 - DNA, 25 bp, Probe Sequence
gaagagagagaccctcactgctggg

SEQ ID NO: 221171 - DNA, 25 bp, Probe Sequence
gaagcagaggcccctaactgcatct

SEQ ID NO: 221172 - DNA, 25 bp, Probe Sequence
gaacgggcagggcaactgctacaag

SEQ ID NO: 221173 - DNA, 25 bp, Probe Sequence
gaagatgggcagggtgaaactaaca

SEQ ID NO: 221174 - DNA, 25 bp, Probe Sequence
gaagatgtggcgggatggtaatgaa

SEQ ID NO: 221175 - DNA, 25 bp, Probe Sequence
gaagttgcgtgggattcaaagaagc

SEQ ID NO: 221176 - DNA, 25 bp, Probe Sequence
gaagttggtggtggtcggaaagcta

SEQ ID NO: 221177 - DNA, 25 bp, Probe Sequence
gaagttcaggggcccaggaagagca

SEQ ID NO: 221178 - DNA, 25 bp, Probe Sequence
gaagagtataaacccaggtgagaca

SEQ ID NO: 221179 - DNA, 25 bp, Probe Sequence
gaagagtaatcatgcaccgtgtgaa

SEQ ID NO: 221180 - DNA, 25 bp, Probe Sequence
gaagttcatatcggcacttgtggaa

SEQ ID NO: 221181 - DNA, 25 bp, Probe Sequence
gaagttcatgacagatctatttcaa

SEQ ID NO: 221182 - DNA, 25 bp, Probe Sequence
gaagatctctaccatttaattaaga

SEQ ID NO: 221183 - DNA, 25 bp, Probe Sequence
gaagatcattaccaaaaatagcagg

SEQ ID NO: 221184 - DNA, 25 bp, Probe Sequence
gaagattctcaccactgaagggcgt

SEQ ID NO: 221185 - DNA, 25 bp, Probe Sequence
gaagatctctgcctacatgaagtcc

SEQ ID NO: 221186 - DNA, 25 bp, Probe Sequence
gaagatctctgcctacatgaagtcc

SEQ ID NO: 221187 - DNA, 25 bp, Probe Sequence
gaagatctccgagcaaagctccagg

SEQ ID NO: 221188 - DNA, 25 bp, Probe Sequence
gaagagccacaagaagagccggaga

SEQ ID NO: 221189 - DNA, 25 bp, Probe Sequence
gaagacctaggccatagagcacagt

SEQ ID NO: 221190 - DNA, 25 bp, Probe Sequence
gaagacatcaaaggatcatggacag

SEQ ID NO: 221191 - DNA, 25 bp, Probe Sequence
gaagttgctggagatcagtgcagaa

SEQ ID NO: 221192 - DNA, 25 bp, Probe Sequence
gaagcttctggaattcgtgctggtc

SEQ ID NO: 221193 - DNA, 25 bp, Probe Sequence
gaagattctgtgatctcactctcag

SEQ ID NO: 221194 - DNA, 25 bp, Probe Sequence
gaagattcaggaattcctctctggg

SEQ ID NO: 221195 - DNA, 25 bp, Probe Sequence
gaagttcatggatcaacatccggag

SEQ ID NO: 221196 - DNA, 25 bp, Probe Sequence
gaagttgtgtgtacaagactcttga

SEQ ID NO: 221197 - DNA, 25 bp, Probe Sequence
gaagttgcagtttagacacatgttg

SEQ ID NO: 221198 - DNA, 25 bp, Probe Sequence
gaagattgcagccaagaggaattcg

SEQ ID NO: 221199 - DNA, 25 bp, Probe Sequence
gaagttcccatgagtgattatgctg

SEQ ID NO: 221200 - DNA, 25 bp, Probe Sequence
gaagaatccaactgatgagtatcta

SEQ ID NO: 221201 - DNA, 25 bp, Probe Sequence
gaagatcgccaagagatcaaagata

SEQ ID NO: 221202 - DNA, 25 bp, Probe Sequence
gaagaccatcaagtccaacaagcaa

SEQ ID NO: 221203 - DNA, 25 bp, Probe Sequence
gaagagcccacagtcatcaaaaagt

SEQ ID NO: 221204 - DNA, 25 bp, Probe Sequence
gaagatgacccagatcatgtttgag

SEQ ID NO: 221205 - DNA, 25 bp, Probe Sequence
gaagatcacccagctgtgttcagaa

SEQ ID NO: 221206 - DNA, 25 bp, Probe Sequence
gaagacaaggccctgatcttggtag

SEQ ID NO: 221207 - DNA, 25 bp, Probe Sequence
gaagaacaggtcatcagcctcggac

SEQ ID NO: 221208 - DNA, 25 bp, Probe Sequence
gaagagcgagagattcatgccaccg

SEQ ID NO: 221209 - DNA, 25 bp, Probe Sequence
gaagaagcagagactgttggcccgg

SEQ ID NO: 221210 - DNA, 25 bp, Probe Sequence
gaagaagcagagactgttggcccgg

SEQ ID NO: 221211 - DNA, 25 bp, Probe Sequence
gaagagacatgtaccttgaccatcg

SEQ ID NO: 221212 - DNA, 25 bp, Probe Sequence
gaagatggatattccattctccacg

SEQ ID NO: 221213 - DNA, 25 bp, Probe Sequence
gaagttgctatatcattttcagcag

SEQ ID NO: 221214 - DNA, 25 bp, Probe Sequence
gaactgggaattggtttcatggtat

SEQ ID NO: 221215 - DNA, 25 bp, Probe Sequence
gacagggctaattaatttgctttat

SEQ ID NO: 221216 - DNA, 25 bp, Probe Sequence
gaagaggcttctcctgttttatata

SEQ ID NO: 221217 - DNA, 25 bp, Probe Sequence
gaaaccttttctcaattagaagaca

SEQ ID NO: 221218 - DNA, 25 bp, Probe Sequence
gaagaacttttccatgcaaccaaac

SEQ ID NO: 221219 - DNA, 25 bp, Probe Sequence
gaagaggttgttcaccatataaaca

SEQ ID NO: 221220 - DNA, 25 bp, Probe Sequence
gaagaggttttcgttccatgaaatt

SEQ ID NO: 221221 - DNA, 25 bp, Probe Sequence
gaagagtgtcttaagcctaatatta

SEQ ID NO: 221222 - DNA, 25 bp, Probe Sequence
gaagactcgtcaacagcttaaatct

SEQ ID NO: 221223 - DNA, 25 bp, Probe Sequence
gaagatttattagctttaactttag

SEQ ID NO: 221224 - DNA, 25 bp, Probe Sequence
gaagatttttaactactgaatgcta

SEQ ID NO: 221225 - DNA, 25 bp, Probe Sequence
gaagatgcttttcactttgtcagtt

SEQ ID NO: 221226 - DNA, 25 bp, Probe Sequence
gaagattgtcctacaatttggattt

SEQ ID NO: 221227 - DNA, 25 bp, Probe Sequence
gaagataatctctcctatctgagaa

SEQ ID NO: 221228 - DNA, 25 bp, Probe Sequence
gaagatagttttgctgatgatcaat

SEQ ID NO: 221229 - DNA, 25 bp, Probe Sequence
gaagatcattgtaattcaaatccat

SEQ ID NO: 221230 - DNA, 25 bp, Probe Sequence
gaagactggatacttctgtatctgt

SEQ ID NO: 221231 - DNA, 25 bp, Probe Sequence
gaagactgagtaaatcgttgtgatc

SEQ ID NO: 221232 - DNA, 25 bp, Probe Sequence
gaagagaggtaatttgttagcatca

SEQ ID NO: 221233 - DNA, 25 bp, Probe Sequence
gaagaggccatggtttgttggagac

SEQ ID NO: 221234 - DNA, 25 bp, Probe Sequence
gaagactggagtggtgtttggtgcc

SEQ ID NO: 221235 - DNA, 25 bp, Probe Sequence
gaagactggactgttgttttagaat

SEQ ID NO: 221236 - DNA, 25 bp, Probe Sequence
gaagcacggaatatagggttagatg

SEQ ID NO: 221237 - DNA, 25 bp, Probe Sequence
gaagactgttaaaagcggtgaagat

SEQ ID NO: 221238 - DNA, 25 bp, Probe Sequence
gaagactggttacatggaggggatt

SEQ ID NO: 221239 - DNA, 25 bp, Probe Sequence
gaagaggagttacagcgggagtggc

SEQ ID NO: 221240 - DNA, 25 bp, Probe Sequence
gaagacgaggtggagtgggtagtgg

SEQ ID NO: 221241 - DNA, 25 bp, Probe Sequence
gaagaagggtgcggttggggatgag

SEQ ID NO: 221242 - DNA, 25 bp, Probe Sequence
gaagaagaggggtccagtgggtctg

SEQ ID NO: 221243 - DNA, 25 bp, Probe Sequence
gaagcgggaggatcgcttgggctca

SEQ ID NO: 221244 - DNA, 25 bp, Probe Sequence
gaagagggattgctcctctgagccc

SEQ ID NO: 221245 - DNA, 25 bp, Probe Sequence
gaagacgagttggtggtgctgcagc

SEQ ID NO: 221246 - DNA, 25 bp, Probe Sequence
gaagactgcgttggtggtcaagtcc

SEQ ID NO: 221247 - DNA, 25 bp, Probe Sequence
gaagatcagtttgggcttcacagtg

SEQ ID NO: 221248 - DNA, 25 bp, Probe Sequence
gaagacagcttttccgctgaagctt

SEQ ID NO: 221249 - DNA, 25 bp, Probe Sequence
gaagacagctgtgaccataaatatt

SEQ ID NO: 221250 - DNA, 25 bp, Probe Sequence
gaagacatgctacaactactatttt

SEQ ID NO: 221251 - DNA, 25 bp, Probe Sequence
gaagacatgctgctatggtcactga

SEQ ID NO: 221252 - DNA, 25 bp, Probe Sequence
gaagacagcgaaatggcgcctccgg

SEQ ID NO: 221253 - DNA, 25 bp, Probe Sequence
gaagaaggaaagtccccctgtgtgg

SEQ ID NO: 221254 - DNA, 25 bp, Probe Sequence
gaagattagaaatcgcgacacattt

SEQ ID NO: 221255 - DNA, 25 bp, Probe Sequence
gaagcgataaaacttgctgaagttc

SEQ ID NO: 221256 - DNA, 25 bp, Probe Sequence
gaagaaaggggcgtctaagttctgg

SEQ ID NO: 221257 - DNA, 25 bp, Probe Sequence
gaagaagaggggcttatttttctag

SEQ ID NO: 221258 - DNA, 25 bp, Probe Sequence
gaaaaagagtctgttgattttcctc

SEQ ID NO: 221259 - DNA, 25 bp, Probe Sequence
gaaacgagggctgatcttactggaa

SEQ ID NO: 221260 - DNA, 25 bp, Probe Sequence
gaagaggagggtgtgtctgatgtgg

SEQ ID NO: 221261 - DNA, 25 bp, Probe Sequence
gaagaggaagtttgtcgctgatggc

SEQ ID NO: 221262 - DNA, 25 bp, Probe Sequence
gaagaggaaagctgtggcattggtc

SEQ ID NO: 221263 - DNA, 25 bp, Probe Sequence
gaagaggtaatttgggacagtgtgg

SEQ ID NO: 221264 - DNA, 25 bp, Probe Sequence
gaagacgcttagttgggggtgtggg

SEQ ID NO: 221265 - DNA, 25 bp, Probe Sequence
gaagacgcgtcgttgggttttggag

SEQ ID NO: 221266 - DNA, 25 bp, Probe Sequence
gaagaactctctggggagtttcatt

SEQ ID NO: 221267 - DNA, 25 bp, Probe Sequence
gaagcaacattctgggactcttttt

SEQ ID NO: 221268 - DNA, 25 bp, Probe Sequence
gaagaactgtcttggatacctattt

SEQ ID NO: 221269 - DNA, 25 bp, Probe Sequence
gaagacctgtgcatggagaatctga

SEQ ID NO: 221270 - DNA, 25 bp, Probe Sequence
gaagagcctttagcagaattgtcaa

SEQ ID NO: 221271 - DNA, 25 bp, Probe Sequence
gaagcacctttaggcgaaggaacag

SEQ ID NO: 221272 - DNA, 25 bp, Probe Sequence
gaagactttgccgcagtaggtcagg

SEQ ID NO: 221273 - DNA, 25 bp, Probe Sequence
gaagcacttcaacccaggaggtgga

SEQ ID NO: 221274 - DNA, 25 bp, Probe Sequence
gaagattgtaaggcagcggcaggag

SEQ ID NO: 221275 - DNA, 25 bp, Probe Sequence
gaagatgatgtgtggctggatcagt

SEQ ID NO: 221276 - DNA, 25 bp, Probe Sequence
gaagatacatattggtggcagagct

SEQ ID NO: 221277 - DNA, 25 bp, Probe Sequence
gaagatcacatattctcgcgggtgc

SEQ ID NO: 221278 - DNA, 25 bp, Probe Sequence
gaagatactatattgctgcgtccta

SEQ ID NO: 221279 - DNA, 25 bp, Probe Sequence
gaagaacagaattgctcctgcatgc

SEQ ID NO: 221280 - DNA, 25 bp, Probe Sequence
gaagaacagaattgctcctgcatgc

SEQ ID NO: 221281 - DNA, 25 bp, Probe Sequence
gaagaagagatgttgtcctgacact

SEQ ID NO: 221282 - DNA, 25 bp, Probe Sequence
gaagatcaagatcattgctcctcct

SEQ ID NO: 221283 - DNA, 25 bp, Probe Sequence
gaagatctgagtcacatggcaattc

SEQ ID NO: 221284 - DNA, 25 bp, Probe Sequence
gaagatctgtgccaaccactacatc

SEQ ID NO: 221285 - DNA, 25 bp, Probe Sequence
gaagatcatcaccaaggccaagtcc

SEQ ID NO: 221286 - DNA, 25 bp, Probe Sequence
gaagacatactgaaggcatgcaagc

SEQ ID NO: 221287 - DNA, 25 bp, Probe Sequence
gaagaactctgcaggacattgccca

SEQ ID NO: 221288 - DNA, 25 bp, Probe Sequence
gaagagttctggggtcactctctca

SEQ ID NO: 221289 - DNA, 25 bp, Probe Sequence
gaagagtgtctgcaattcactgcca

SEQ ID NO: 221290 - DNA, 25 bp, Probe Sequence
gaagagattctgcagacatacttga

SEQ ID NO: 221291 - DNA, 25 bp, Probe Sequence
gaagagattccagaatcatcatctg

SEQ ID NO: 221292 - DNA, 25 bp, Probe Sequence
gaagatgttcgcgattatcttctat

SEQ ID NO: 221293 - DNA, 25 bp, Probe Sequence
gaagatgtccgaaaactggctgttg

SEQ ID NO: 221294 - DNA, 25 bp, Probe Sequence
gaagatggccaaaacacagcctgcc

SEQ ID NO: 221295 - DNA, 25 bp, Probe Sequence
gaagatggacttcatgcaagttggc

SEQ ID NO: 221296 - DNA, 25 bp, Probe Sequence
gaagatgtgactgcaaagcaggctg

SEQ ID NO: 221297 - DNA, 25 bp, Probe Sequence
gaagatgctggagaatatgagtgcc

SEQ ID NO: 221298 - DNA, 25 bp, Probe Sequence
gaagatgctggagaatatgagtgcc

SEQ ID NO: 221299 - DNA, 25 bp, Probe Sequence
gaagactgagacaaattgaggagga

SEQ ID NO: 221300 - DNA, 25 bp, Probe Sequence
gaagactgtacaatttgagccgggt

SEQ ID NO: 221301 - DNA, 25 bp, Probe Sequence
gaagacctaggtttgagttctggct

SEQ ID NO: 221302 - DNA, 25 bp, Probe Sequence
gaagacccaaaacagctttgtctcc

SEQ ID NO: 221303 - DNA, 25 bp, Probe Sequence
gaagaccgagaagaaacttgctgct

SEQ ID NO: 221304 - DNA, 25 bp, Probe Sequence
gaagactgaaaatacaactcccatc

SEQ ID NO: 221305 - DNA, 25 bp, Probe Sequence
gaagactgaaaatacaactcccatc

SEQ ID NO: 221306 - DNA, 25 bp, Probe Sequence
gaagaggaagtataacacttcccaa

SEQ ID NO: 221307 - DNA, 25 bp, Probe Sequence
gaagaggaggtagagacggtaagga

SEQ ID NO: 221308 - DNA, 25 bp, Probe Sequence
gaagaggaggaagacgaggattaaa

SEQ ID NO: 221309 - DNA, 25 bp, Probe Sequence
gaagaggaagaaggtggggaggaag

SEQ ID NO: 221310 - DNA, 25 bp, Probe Sequence
gaagaggatgaggaggaggaggaag

SEQ ID NO: 221311 - DNA, 25 bp, Probe Sequence
gaagatgtgctgggggagggcgctc

SEQ ID NO: 221312 - DNA, 25 bp, Probe Sequence
gaagagcattcatcgtgaggggtct

SEQ ID NO: 221313 - DNA, 25 bp, Probe Sequence
gaaccattacgcccagggttcactc

SEQ ID NO: 221314 - DNA, 25 bp, Probe Sequence
gaaccaaggccacctggattctatt

SEQ ID NO: 221315 - DNA, 25 bp, Probe Sequence
gaagctcacgggcaaggatgttaat

SEQ ID NO: 221316 - DNA, 25 bp, Probe Sequence
gaagctccgggtgtagattcccttg

SEQ ID NO: 221317 - DNA, 25 bp, Probe Sequence
gaagcacctggggctggagatcccc

SEQ ID NO: 221318 - DNA, 25 bp, Probe Sequence
gaagacggacgtggaggatccccag

SEQ ID NO: 221319 - DNA, 25 bp, Probe Sequence
gaagacggtcgaacttgactatcta

SEQ ID NO: 221320 - DNA, 25 bp, Probe Sequence
gaagacggtcgaaactgacatctag

SEQ ID NO: 221321 - DNA, 25 bp, Probe Sequence
gaagagccgtcagagtgggcctggc

SEQ ID NO: 221322 - DNA, 25 bp, Probe Sequence
gaagacctggcaggagggggctggg

SEQ ID NO: 221323 - DNA, 25 bp, Probe Sequence
gaagcagactggctagggaccttgg

SEQ ID NO: 221324 - DNA, 25 bp, Probe Sequence
gaagcagttgtccttgtgagaaccg

SEQ ID NO: 221325 - DNA, 25 bp, Probe Sequence
gaagagatttgcctttgaatcagaa

SEQ ID NO: 221326 - DNA, 25 bp, Probe Sequence
gaagagacttccttgcaagcattaa

SEQ ID NO: 221327 - DNA, 25 bp, Probe Sequence
gaagaagcatcccgtcaatgttgac

SEQ ID NO: 221328 - DNA, 25 bp, Probe Sequence
gaagaacaccaacaagtgctccctg

SEQ ID NO: 221329 - DNA, 25 bp, Probe Sequence
gaagaagacacattcctagttcccc

SEQ ID NO: 221330 - DNA, 25 bp, Probe Sequence
gaagaatgcagccttcctaggtcca

SEQ ID NO: 221331 - DNA, 25 bp, Probe Sequence
gaagaaatcggtcctgatgctgatc

SEQ ID NO: 221332 - DNA, 25 bp, Probe Sequence
gaagaaatggagcgatgactgactg

SEQ ID NO: 221333 - DNA, 25 bp, Probe Sequence
gaagaaatgctacctgggattgtgg

SEQ ID NO: 221334 - DNA, 25 bp, Probe Sequence
gaagagaatgtgaatgttggtttga

SEQ ID NO: 221335 - DNA, 25 bp, Probe Sequence
gaagagtctgagttgtctgtttcta

SEQ ID NO: 221336 - DNA, 25 bp, Probe Sequence
gaagaactagttcttacttcaaaag

SEQ ID NO: 221337 - DNA, 25 bp, Probe Sequence
gaagaactcagtgaatctactccag

SEQ ID NO: 221338 - DNA, 25 bp, Probe Sequence
gaagacatctcagtacactctttta

SEQ ID NO: 221339 - DNA, 25 bp, Probe Sequence
gaagaccttctgcaatgcattttga

SEQ ID NO: 221340 - DNA, 25 bp, Probe Sequence
gaagagtcttatccagaccttggaa

SEQ ID NO: 221341 - DNA, 25 bp, Probe Sequence
gaagatggttattaacactgtgctg

SEQ ID NO: 221342 - DNA, 25 bp, Probe Sequence
gaagatggaataacaaactgtgctc

SEQ ID NO: 221343 - DNA, 25 bp, Probe Sequence
gaagatgcgcaaacgctacagcgtg

SEQ ID NO: 221344 - DNA, 25 bp, Probe Sequence
gaagatgagcggggctgacaccgtt

SEQ ID NO: 221345 - DNA, 25 bp, Probe Sequence
gaagaagcttaggcagggctctctt

SEQ ID NO: 221346 - DNA, 25 bp, Probe Sequence
gaagaggtcaaatgggctctctcat

SEQ ID NO: 221347 - DNA, 25 bp, Probe Sequence
gaagaggggacaggcgtgcatctcc

SEQ ID NO: 221348 - DNA, 25 bp, Probe Sequence
gaagctgcagaggacatcgcgtacc

SEQ ID NO: 221349 - DNA, 25 bp, Probe Sequence
gaagcacatgaaaaccattacctga

SEQ ID NO: 221350 - DNA, 25 bp, Probe Sequence
gaagcagcagaaaagtcactacaga

SEQ ID NO: 221351 - DNA, 25 bp, Probe Sequence
gaagagcagtcacagatcaccagcc

SEQ ID NO: 221352 - DNA, 25 bp, Probe Sequence
gaagagagacagtacatgccctggg

SEQ ID NO: 221353 - DNA, 25 bp, Probe Sequence
gaagaaacagattctgcgcttgatt

SEQ ID NO: 221354 - DNA, 25 bp, Probe Sequence
gaagaacctgatttgcactctgtag

SEQ ID NO: 221355 - DNA, 25 bp, Probe Sequence
gaagaaccatgaagtggctgctgct

SEQ ID NO: 221356 - DNA, 25 bp, Probe Sequence
gaagacactcagccggagttgtacc

SEQ ID NO: 221357 - DNA, 25 bp, Probe Sequence
gaagacagccagtggtggtgattac

SEQ ID NO: 221358 - DNA, 25 bp, Probe Sequence
gaagccagctgaagatgagtggggt

SEQ ID NO: 221359 - DNA, 25 bp, Probe Sequence
gaagcagcctgggatgaggtagggg

SEQ ID NO: 221360 - DNA, 25 bp, Probe Sequence
gacatcagttgtttaaacggggtat

SEQ ID NO: 221361 - DNA, 25 bp, Probe Sequence
gaagccttggtctaacacgggactt

SEQ ID NO: 221362 - DNA, 25 bp, Probe Sequence
gaaccttagtcgggactgtggcact

SEQ ID NO: 221363 - DNA, 25 bp, Probe Sequence
gaacgcctttggagacatgaccact

SEQ ID NO: 221364 - DNA, 25 bp, Probe Sequence
gaacggctttggcagacagtaacgt

SEQ ID NO: 221365 - DNA, 25 bp, Probe Sequence
gaagaacttcggcaacgagaacact

SEQ ID NO: 221366 - DNA, 25 bp, Probe Sequence
gaagaactgtggcctaattggaaag

SEQ ID NO: 221367 - DNA, 25 bp, Probe Sequence
gaagacatctttactttatggagac

SEQ ID NO: 221368 - DNA, 25 bp, Probe Sequence
gaagaatttttcttagtgcagaaca

SEQ ID NO: 221369 - DNA, 25 bp, Probe Sequence
gaagacacgttttatggagcagaca

SEQ ID NO: 221370 - DNA, 25 bp, Probe Sequence
gaagagcatccgttcgagaagcgcc

SEQ ID NO: 221371 - DNA, 25 bp, Probe Sequence
gaagagctagagtcggagaatgccc

SEQ ID NO: 221372 - DNA, 25 bp, Probe Sequence
gaagagcttggatgtgaatcaggac

SEQ ID NO: 221373 - DNA, 25 bp, Probe Sequence
gaagagcaaggaagtgcattagtag

SEQ ID NO: 221374 - DNA, 25 bp, Probe Sequence
gaagagatggccagtgattgaatat

SEQ ID NO: 221375 - DNA, 25 bp, Probe Sequence
gaagacggcagtgttcagaattcca

SEQ ID NO: 221376 - DNA, 25 bp, Probe Sequence
gaagatggggcttttggaattcgca

SEQ ID NO: 221377 - DNA, 25 bp, Probe Sequence
gaagaaccctgactttgtttctgca

SEQ ID NO: 221378 - DNA, 25 bp, Probe Sequence
gaagaatttctgcttctctttgtag

SEQ ID NO: 221379 - DNA, 25 bp, Probe Sequence
gaagaactgtctattttctcagtca

SEQ ID NO: 221380 - DNA, 25 bp, Probe Sequence
gaagcaccggaacttgctactacca

SEQ ID NO: 221381 - DNA, 25 bp, Probe Sequence
gaagcaccggaacttgctactacca

SEQ ID NO: 221382 - DNA, 25 bp, Probe Sequence
gaagaccaggaagttgatcaatccc

SEQ ID NO: 221383 - DNA, 25 bp, Probe Sequence
gaagaaaggacagttcacaatctag

SEQ ID NO: 221384 - DNA, 25 bp, Probe Sequence
gaagaaaattaattcacttcctgaa

SEQ ID NO: 221385 - DNA, 25 bp, Probe Sequence
gaagaaatttatggttcccatcaaa

SEQ ID NO: 221386 - DNA, 25 bp, Probe Sequence
gaagaaactctctgtatgtcctaga

SEQ ID NO: 221387 - DNA, 25 bp, Probe Sequence
gaagcagaaccatactatttgcttt

SEQ ID NO: 221388 - DNA, 25 bp, Probe Sequence
gaagcacaacgacattgacgtgttc

SEQ ID NO: 221389 - DNA, 25 bp, Probe Sequence
gaagaacaagatgagtgacggcaag

SEQ ID NO: 221390 - DNA, 25 bp, Probe Sequence
gaagaaatctgtgagtggaacaaaa

SEQ ID NO: 221391 - DNA, 25 bp, Probe Sequence
gaagaagcctctggtgggaaaaaag

SEQ ID NO: 221392 - DNA, 25 bp, Probe Sequence
gaagaatccacttcggccaaaaagg

SEQ ID NO: 221393 - DNA, 25 bp, Probe Sequence
agaactctattttggctaacatgca

SEQ ID NO: 221394 - DNA, 25 bp, Probe Sequence
gaagagagatttccagcgatccaca

SEQ ID NO: 221395 - DNA, 25 bp, Probe Sequence
gaagaggcatcttcaagatcaccaa

SEQ ID NO: 221396 - DNA, 25 bp, Probe Sequence
gaagatgagccttgcagatatctgc

SEQ ID NO: 221397 - DNA, 25 bp, Probe Sequence
gaagaggcactgtagcagctgctgc

SEQ ID NO: 221398 - DNA, 25 bp, Probe Sequence
gaagaggcctcatggcctccttact

SEQ ID NO: 221399 - DNA, 25 bp, Probe Sequence
gaagagagactatgtcttctcttac

SEQ ID NO: 221400 - DNA, 25 bp, Probe Sequence
gaagagagatcgtgctgttcgcctc

SEQ ID NO: 221401 - DNA, 25 bp, Probe Sequence
gaagatgatgaccctgttgtggccc

SEQ ID NO: 221402 - DNA, 25 bp, Probe Sequence
gaagcttagctgctgttgatggggt

SEQ ID NO: 221403 - DNA, 25 bp, Probe Sequence
gacaggatctgccctgtaaggggcc

SEQ ID NO: 221404 - DNA, 25 bp, Probe Sequence
gaagagcatctcccagaagaaggtg

SEQ ID NO: 221405 - DNA, 25 bp, Probe Sequence
gaagatgttcgccgaggaggaggct

SEQ ID NO: 221406 - DNA, 25 bp, Probe Sequence
gaagagttcggggccatgagagagc

SEQ ID NO: 221407 - DNA, 25 bp, Probe Sequence
gaagagatacggacctccaatgagg

SEQ ID NO: 221408 - DNA, 25 bp, Probe Sequence
gaacgaaccaggcaccaatggtatc

SEQ ID NO: 221409 - DNA, 25 bp, Probe Sequence
gacacgaactggagattaacgtact

SEQ ID NO: 221410 - DNA, 25 bp, Probe Sequence
gaacgaacgtgatggttaagctacc

SEQ ID NO: 221411 - DNA, 25 bp, Probe Sequence
gacagggaagctacaggttacaaca

SEQ ID NO: 221412 - DNA, 25 bp, Probe Sequence
gaagaatgaactaaggtgtctacca

SEQ ID NO: 221413 - DNA, 25 bp, Probe Sequence
gaagacatcagatctaggatgtgct

SEQ ID NO: 221414 - DNA, 25 bp, Probe Sequence
gaagacatgattttaatgagtgctt

SEQ ID NO: 221415 - DNA, 25 bp, Probe Sequence
gaagacagattcttcagccctttgg

SEQ ID NO: 221416 - DNA, 25 bp, Probe Sequence
gaagacagattctacggcactgctt

SEQ ID NO: 221417 - DNA, 25 bp, Probe Sequence
gaagacagattctacggcactgctt

SEQ ID NO: 221418 - DNA, 25 bp, Probe Sequence
gaagactgattggagggccctatct

SEQ ID NO: 221419 - DNA, 25 bp, Probe Sequence
gaagactgattggagggccctatct

SEQ ID NO: 221420 - DNA, 25 bp, Probe Sequence
gaagactgattggagggccctatct

SEQ ID NO: 221421 - DNA, 25 bp, Probe Sequence
gaagaagattcatacgcctctactg

SEQ ID NO: 221422 - DNA, 25 bp, Probe Sequence
gaagcagagttcgaacgtgccggct

SEQ ID NO: 221423 - DNA, 25 bp, Probe Sequence
gaagcatgtgttgaacctctacctg

SEQ ID NO: 221424 - DNA, 25 bp, Probe Sequence
gaagctgttctaacaccaaaacgct

SEQ ID NO: 221425 - DNA, 25 bp, Probe Sequence
gaagctttttatgtaaattggttga

SEQ ID NO: 221426 - DNA, 25 bp, Probe Sequence
gaagcctttgttgttgaagaatggg

SEQ ID NO: 221427 - DNA, 25 bp, Probe Sequence
gaacctgccgtttgctttgtaacgt

SEQ ID NO: 221428 - DNA, 25 bp, Probe Sequence
gaaccagccgtattttacatgaagc

SEQ ID NO: 221429 - DNA, 25 bp, Probe Sequence
gaagaagctctttctgttactgaac

SEQ ID NO: 221430 - DNA, 25 bp, Probe Sequence
gaagagacattaagagttcctgaaa

SEQ ID NO: 221431 - DNA, 25 bp, Probe Sequence
gaagagtgcagtactggtccacaga

SEQ ID NO: 221432 - DNA, 25 bp, Probe Sequence
gaagagtgcagtactggtccacaga

SEQ ID NO: 221433 - DNA, 25 bp, Probe Sequence
gaagagtcagacggaatcgaaacgt

SEQ ID NO: 221434 - DNA, 25 bp, Probe Sequence
gaagacacagaccggtttcaagggg

SEQ ID NO: 221435 - DNA, 25 bp, Probe Sequence
gaagccaaggccaggttctgggtgt

SEQ ID NO: 221436 - DNA, 25 bp, Probe Sequence
gaagccaaggccaggttctgggtgt

SEQ ID NO: 221437 - DNA, 25 bp, Probe Sequence
gaacttgagaccgcgttggggattg

SEQ ID NO: 221438 - DNA, 25 bp, Probe Sequence
gaactgttgaaccaattgggtggat

SEQ ID NO: 221439 - DNA, 25 bp, Probe Sequence
gaagcttaagacaagagagtgggtt

SEQ ID NO: 221440 - DNA, 25 bp, Probe Sequence
gaagctgctcaacaaagtgtggaag

SEQ ID NO: 221441 - DNA, 25 bp, Probe Sequence
gaagcgaacatctgggtggttagca

SEQ ID NO: 221442 - DNA, 25 bp, Probe Sequence
gaacgccaaattgggcctgtaaggc

SEQ ID NO: 221443 - DNA, 25 bp, Probe Sequence
gaagagccagcagtaaggactggaa

SEQ ID NO: 221444 - DNA, 25 bp, Probe Sequence
gaagactacctatgatagaggcaat

SEQ ID NO: 221445 - DNA, 25 bp, Probe Sequence
gaagacacaaaatctagagaggtta

SEQ ID NO: 221446 - DNA, 25 bp, Probe Sequence
gaagaccattactttaggcaaatta

SEQ ID NO: 221447 - DNA, 25 bp, Probe Sequence
gaagacttctatgctaaccgaatta

SEQ ID NO: 221448 - DNA, 25 bp, Probe Sequence
gaagacttctatgctaaccgaatta

SEQ ID NO: 221449 - DNA, 25 bp, Probe Sequence
gaagacttctatgctaaccgaatta

SEQ ID NO: 221450 - DNA, 25 bp, Probe Sequence
gaagacttctatgctaaccgaatta

SEQ ID NO: 221451 - DNA, 25 bp, Probe Sequence
gaagagtttatggcaaagatttttg

SEQ ID NO: 221452 - DNA, 25 bp, Probe Sequence
gaaaatcctgagggaagttcttaga

SEQ ID NO: 221453 - DNA, 25 bp, Probe Sequence
gaagctattcggataatttcttaaa

SEQ ID NO: 221454 - DNA, 25 bp, Probe Sequence
gaagctcttcgggagaatctttatt

SEQ ID NO: 221455 - DNA, 25 bp, Probe Sequence
gaagccattggggagttcagtggaa

SEQ ID NO: 221456 - DNA, 25 bp, Probe Sequence
gaagagcaggggtggccaggagata

SEQ ID NO: 221457 - DNA, 25 bp, Probe Sequence
gacagtatggggtggtaagataagg

SEQ ID NO: 221458 - DNA, 25 bp, Probe Sequence
gaagactggggctgagtagttaagc

SEQ ID NO: 221459 - DNA, 25 bp, Probe Sequence
gaacctgggaggcagaagtctacag

SEQ ID NO: 221460 - DNA, 25 bp, Probe Sequence
gaactcgggagatggaggtttgcag

SEQ ID NO: 221461 - DNA, 25 bp, Probe Sequence
gaaccgcccagtgcaggtatttcag

SEQ ID NO: 221462 - DNA, 25 bp, Probe Sequence
gaaccctacatggaagcgtttctca

SEQ ID NO: 221463 - DNA, 25 bp, Probe Sequence
gaaccttgaaggtgctctttctgct

SEQ ID NO: 221464 - DNA, 25 bp, Probe Sequence
gaagccctgcaaacgtgctttttga

SEQ ID NO: 221465 - DNA, 25 bp, Probe Sequence
gaagcaccgtgtaggctttttctgc

SEQ ID NO: 221466 - DNA, 25 bp, Probe Sequence
gaagaccgtgtcagactcatgcatt

SEQ ID NO: 221467 - DNA, 25 bp, Probe Sequence
gaagaccagcataattgacccactc

SEQ ID NO: 221468 - DNA, 25 bp, Probe Sequence
gaagactcatctttgtgatgcccaa

SEQ ID NO: 221469 - DNA, 25 bp, Probe Sequence
gaagactatttacttctcaaaagaa

SEQ ID NO: 221470 - DNA, 25 bp, Probe Sequence
gaagcaataactagttcctatgaaa

SEQ ID NO: 221471 - DNA, 25 bp, Probe Sequence
gaagaagcatacaattccctcatga

SEQ ID NO: 221472 - DNA, 25 bp, Probe Sequence
gaagaaggatttactcctctgatgt

SEQ ID NO: 221473 - DNA, 25 bp, Probe Sequence
gaagcaagtgctgagcaccctgcga

SEQ ID NO: 221474 - DNA, 25 bp, Probe Sequence
gaagctaaattactccactggaatg

SEQ ID NO: 221475 - DNA, 25 bp, Probe Sequence
gaagaataatctacgtgactggttg

SEQ ID NO: 221476 - DNA, 25 bp, Probe Sequence
gaagaaaatcttggtatggtgatga

SEQ ID NO: 221477 - DNA, 25 bp, Probe Sequence
gaagagtaattgactggatttagat

SEQ ID NO: 221478 - DNA, 25 bp, Probe Sequence
gaagagataaggactggagctaatg

SEQ ID NO: 221479 - DNA, 25 bp, Probe Sequence
gaagcaatagaggttaagctactga

SEQ ID NO: 221480 - DNA, 25 bp, Probe Sequence
gaagactagtggtggattccatgac

SEQ ID NO: 221481 - DNA, 25 bp, Probe Sequence
gaagactgagggcggtggcagcgag

SEQ ID NO: 221482 - DNA, 25 bp, Probe Sequence
gaagagtcgggcatgggtgctggag

SEQ ID NO: 221483 - DNA, 25 bp, Probe Sequence
gaagagccgttcagtgtttagagag

SEQ ID NO: 221484 - DNA, 25 bp, Probe Sequence
gaagactttgtcgtgtacttaggaa

SEQ ID NO: 221485 - DNA, 25 bp, Probe Sequence
gaagacttctggcagcaacgtaaaa

SEQ ID NO: 221486 - DNA, 25 bp, Probe Sequence
gaagactgtctaaaggatgcctgga

SEQ ID NO: 221487 - DNA, 25 bp, Probe Sequence
gaagactgccaatatgtctgttagg

SEQ ID NO: 221488 - DNA, 25 bp, Probe Sequence
gaagaccgcaagtatgagtatctca

SEQ ID NO: 221489 - DNA, 25 bp, Probe Sequence
gaagaccaggactacagctttccta

SEQ ID NO: 221490 - DNA, 25 bp, Probe Sequence
gaagaccagtgaattacgatattta

SEQ ID NO: 221491 - DNA, 25 bp, Probe Sequence
gaagacattgactttagccatttgt

SEQ ID NO: 221492 - DNA, 25 bp, Probe Sequence
gaagactgaaatttcctttcgtcct

SEQ ID NO: 221493 - DNA, 25 bp, Probe Sequence
gaagaccaaatattccttgatggcc

SEQ ID NO: 221494 - DNA, 25 bp, Probe Sequence
gaagaccaaatattccttgatggcc

SEQ ID NO: 221495 - DNA, 25 bp, Probe Sequence
gaagacctacaattactatagcaca

SEQ ID NO: 221496 - DNA, 25 bp, Probe Sequence
gaagaccatgtctactaattacaaa

SEQ ID NO: 221497 - DNA, 25 bp, Probe Sequence
gaagactgatcttaaagcttacaca

SEQ ID NO: 221498 - DNA, 25 bp, Probe Sequence
gaagcaagactaaagatgtataagc

SEQ ID NO: 221499 - DNA, 25 bp, Probe Sequence
gaagcggtgtagtagcatttttgca

SEQ ID NO: 221500 - DNA, 25 bp, Probe Sequence
gaagccctgtgacaatttgggaaaa

SEQ ID NO: 221501 - DNA, 25 bp, Probe Sequence
gaacccagtgccttattctgtggcc

SEQ ID NO: 221502 - DNA, 25 bp, Probe Sequence
gaactaaagccatttggtatggcca

SEQ ID NO: 221503 - DNA, 25 bp, Probe Sequence
gaagctaaagtcttgatgccatcaa

SEQ ID NO: 221504 - DNA, 25 bp, Probe Sequence
gaagcatcaaagccttagaccagat

SEQ ID NO: 221505 - DNA, 25 bp, Probe Sequence
gaagaagacagcctgttacgacatc

SEQ ID NO: 221506 - DNA, 25 bp, Probe Sequence
gaagcagtccagagtctaggcaatt

SEQ ID NO: 221507 - DNA, 25 bp, Probe Sequence
gaagagtcatgcaggcctggagata

SEQ ID NO: 221508 - DNA, 25 bp, Probe Sequence
gaagagatctgccagacgcgaactc

SEQ ID NO: 221509 - DNA, 25 bp, Probe Sequence
gaagagatgctccagacagcctaca

SEQ ID NO: 221510 - DNA, 25 bp, Probe Sequence
gaagcaagcatgacagacacagctg

SEQ ID NO: 221511 - DNA, 25 bp, Probe Sequence
gaagagcagctgtcactcatcagtg

SEQ ID NO: 221512 - DNA, 25 bp, Probe Sequence
gaagcgcactgctgttcagataggg

SEQ ID NO: 221513 - DNA, 25 bp, Probe Sequence
gaagagcaatgaagctgcatccaag

SEQ ID NO: 221514 - DNA, 25 bp, Probe Sequence
gaagcagcttgaggcatcattagat

SEQ ID NO: 221515 - DNA, 25 bp, Probe Sequence
gaagcagtgtgggcctgaagtgtga

SEQ ID NO: 221516 - DNA, 25 bp, Probe Sequence
gaagcattgtgctgtctgaaaataa

SEQ ID NO: 221517 - DNA, 25 bp, Probe Sequence
gaagaatctccaactgaaaaacatc

SEQ ID NO: 221518 - DNA, 25 bp, Probe Sequence
gaagacttcagccactaaaaactgt

SEQ ID NO: 221519 - DNA, 25 bp, Probe Sequence
gaagacaactgtctgaagtatttgt

SEQ ID NO: 221520 - DNA, 25 bp, Probe Sequence
gaagacatactgcttgattttaata

SEQ ID NO: 221521 - DNA, 25 bp, Probe Sequence
gaagcactgttggttgtttggttag

SEQ ID NO: 221522 - DNA, 25 bp, Probe Sequence
gaagcactgttggttgtttggttag

SEQ ID NO: 221523 - DNA, 25 bp, Probe Sequence
gaagactggtggtgtcagaagctta

SEQ ID NO: 221524 - DNA, 25 bp, Probe Sequence
gaagactacatccaggacaaattta

SEQ ID NO: 221525 - DNA, 25 bp, Probe Sequence
gaagacgcacaccactgtaaattct

SEQ ID NO: 221526 - DNA, 25 bp, Probe Sequence
gaagaccctggcgagtatgaatgta

SEQ ID NO: 221527 - DNA, 25 bp, Probe Sequence
gaagaccctggcgagtatgaatgta

SEQ ID NO: 221528 - DNA, 25 bp, Probe Sequence
gaagactgtcttcagcgtgaactaa

SEQ ID NO: 221529 - DNA, 25 bp, Probe Sequence
gaagcaatttcccaatgtacctata

SEQ ID NO: 221530 - DNA, 25 bp, Probe Sequence
gaagcaatttcccaatgtacctata

SEQ ID NO: 221531 - DNA, 25 bp, Probe Sequence
gaagaatctacaccatattccctca

SEQ ID NO: 221532 - DNA, 25 bp, Probe Sequence
gaagaatatcactctggatgatgcc

SEQ ID NO: 221533 - DNA, 25 bp, Probe Sequence
gaagcgtaatcattcatcgtggctc

SEQ ID NO: 221534 - DNA, 25 bp, Probe Sequence
gaagaacattattcatctctcctcc

SEQ ID NO: 221535 - DNA, 25 bp, Probe Sequence
gaagacttgatttgattccattcac

SEQ ID NO: 221536 - DNA, 25 bp, Probe Sequence
gaagactgatggttttggcattgac

SEQ ID NO: 221537 - DNA, 25 bp, Probe Sequence
gaagactctggactcattgctgatt

SEQ ID NO: 221538 - DNA, 25 bp, Probe Sequence
gaagagcttggagtcagccttgaag

SEQ ID NO: 221539 - DNA, 25 bp, Probe Sequence
gaagcagaaggagcgcctagagctg

SEQ ID NO: 221540 - DNA, 25 bp, Probe Sequence
gaagcagaggcctcctctggagtga

SEQ ID NO: 221541 - DNA, 25 bp, Probe Sequence
gaagcagggctcaaggtggtaggct

SEQ ID NO: 221542 - DNA, 25 bp, Probe Sequence
gaagcaggatttgtgcctgtaatgc

SEQ ID NO: 221543 - DNA, 25 bp, Probe Sequence
gaacgagtattcagctcttcacagg

SEQ ID NO: 221544 - DNA, 25 bp, Probe Sequence
gaagctggtctgatggccttaagag

SEQ ID NO: 221545 - DNA, 25 bp, Probe Sequence
gaagctggtctgatggccttaagag

SEQ ID NO: 221546 - DNA, 25 bp, Probe Sequence
gaagctagtctgatggccttaaaag

SEQ ID NO: 221547 - DNA, 25 bp, Probe Sequence
gaagctaggtacaccttagttcatg

SEQ ID NO: 221548 - DNA, 25 bp, Probe Sequence
gaagccagactacactgcttacgtt

SEQ ID NO: 221549 - DNA, 25 bp, Probe Sequence
gtaccacccagtctttacagatgaa

SEQ ID NO: 221550 - DNA, 25 bp, Probe Sequence
gaaccaccaagtctcttggagggtg

SEQ ID NO: 221551 - DNA, 25 bp, Probe Sequence
gaagcgaaaattctataggcaggag

SEQ ID NO: 221552 - DNA, 25 bp, Probe Sequence
gaagcagaagaagcctctggtggga

SEQ ID NO: 221553 - DNA, 25 bp, Probe Sequence
gaagcagaagaagcctctggtggga

SEQ ID NO: 221554 - DNA, 25 bp, Probe Sequence
gaagaactgagtgtcgtgctgggga

SEQ ID NO: 221555 - DNA, 25 bp, Probe Sequence
gaagaactgcggatggcgcttgagc

SEQ ID NO: 221556 - DNA, 25 bp, Probe Sequence
gaagaccttggattgccagtgtggg

SEQ ID NO: 221557 - DNA, 25 bp, Probe Sequence
gaagcaactgggcaccattacagga

SEQ ID NO: 221558 - DNA, 25 bp, Probe Sequence
gaagaatcggcatttccttaccaca

SEQ ID NO: 221559 - DNA, 25 bp, Probe Sequence
gaagcaatttcagttcctttctaag

SEQ ID NO: 221560 - DNA, 25 bp, Probe Sequence
gaagcactttgatctctttttgagg

SEQ ID NO: 221561 - DNA, 25 bp, Probe Sequence
gaagcaggtagaaagttccctgagg

SEQ ID NO: 221562 - DNA, 25 bp, Probe Sequence
gaactggaagctaagtatacgctgc

SEQ ID NO: 221563 - DNA, 25 bp, Probe Sequence
gaagcagtaatgcagcagtaagccg

SEQ ID NO: 221564 - DNA, 25 bp, Probe Sequence
gaagcaggcctgaagcctaggtcag

SEQ ID NO: 221565 - DNA, 25 bp, Probe Sequence
gaagagctgccaaagccaactgatg

SEQ ID NO: 221566 - DNA, 25 bp, Probe Sequence
gaagagcacaagaaccagactatcg

SEQ ID NO: 221567 - DNA, 25 bp, Probe Sequence
gaagagcctgaaccacaggtaccag

SEQ ID NO: 221568 - DNA, 25 bp, Probe Sequence
gaagcatcctaaaagcagtgaaaca

SEQ ID NO: 221569 - DNA, 25 bp, Probe Sequence
gaagctcacgtggaccagaaaaaca

SEQ ID NO: 221570 - DNA, 25 bp, Probe Sequence
gaaccacagtggttgcacaactgaa

SEQ ID NO: 221571 - DNA, 25 bp, Probe Sequence
gaaccaagtttcgccatgctggatg

SEQ ID NO: 221572 - DNA, 25 bp, Probe Sequence
gaaccaaatactgcccatggcctgt

SEQ ID NO: 221573 - DNA, 25 bp, Probe Sequence
gaagaagaagaagccgatgatgacg

SEQ ID NO: 221574 - DNA, 25 bp, Probe Sequence
gaagaaaagacacccctgcaagtgg

SEQ ID NO: 221575 - DNA, 25 bp, Probe Sequence
gaagaactatgatccccagaaggac

SEQ ID NO: 221576 - DNA, 25 bp, Probe Sequence
gaagaacttgattcactaatgacag

SEQ ID NO: 221577 - DNA, 25 bp, Probe Sequence
gaagcaaggagtaccatagatacag

SEQ ID NO: 221578 - DNA, 25 bp, Probe Sequence
gaagacaaccttccaagatgcctgg

SEQ ID NO: 221579 - DNA, 25 bp, Probe Sequence
gaagcaatcttcctgctaaggccat

SEQ ID NO: 221580 - DNA, 25 bp, Probe Sequence
gaagaactccagctgattgtgaatg

SEQ ID NO: 221581 - DNA, 25 bp, Probe Sequence
gaagaaacctggcttgtgaggacgc

SEQ ID NO: 221582 - DNA, 25 bp, Probe Sequence
gaagcaaatccttgtttgggctggc

SEQ ID NO: 221583 - DNA, 25 bp, Probe Sequence
gaagcaaacggattttgagcacagg

SEQ ID NO: 221584 - DNA, 25 bp, Probe Sequence
gaagcatcgaggctataggacgcag

SEQ ID NO: 221585 - DNA, 25 bp, Probe Sequence
gaagcacaaggcagtgtagatccag

SEQ ID NO: 221586 - DNA, 25 bp, Probe Sequence
gaagccagactgatctctgagctcc

SEQ ID NO: 221587 - DNA, 25 bp, Probe Sequence
gaagccagactgatctctgagctcc

SEQ ID NO: 221588 - DNA, 25 bp, Probe Sequence
gaagacagtcttacttagatctgat

SEQ ID NO: 221589 - DNA, 25 bp, Probe Sequence
gaagactgtatttgctataacttta

SEQ ID NO: 221590 - DNA, 25 bp, Probe Sequence
gaagaatgtggttgctaaacaaaga

SEQ ID NO: 221591 - DNA, 25 bp, Probe Sequence
gaagacattggtttgttgacaataa

SEQ ID NO: 221592 - DNA, 25 bp, Probe Sequence
gaagactgatgttcatgggtaaaat

SEQ ID NO: 221593 - DNA, 25 bp, Probe Sequence
gaagaatgttgatggtgctagaaga

SEQ ID NO: 221594 - DNA, 25 bp, Probe Sequence
gaagaatgcttaaggatgtgattgg

SEQ ID NO: 221595 - DNA, 25 bp, Probe Sequence
gaagaatcttacagatgctgctata

SEQ ID NO: 221596 - DNA, 25 bp, Probe Sequence
gaagaactctccagggatctagtga

SEQ ID NO: 221597 - DNA, 25 bp, Probe Sequence
gaagaacctacaaatgaagtgagtc

SEQ ID NO: 221598 - DNA, 25 bp, Probe Sequence
gaagaacctttaatcagagaagtaa

SEQ ID NO: 221599 - DNA, 25 bp, Probe Sequence
gaagaacctagtctagagacaatga

SEQ ID NO: 221600 - DNA, 25 bp, Probe Sequence
gaagaaactagccttgtggagtata

SEQ ID NO: 221601 - DNA, 25 bp, Probe Sequence
gaagaatgctcttggtctgtgggtc

SEQ ID NO: 221602 - DNA, 25 bp, Probe Sequence
gaagacatacatctttgctggagac

SEQ ID NO: 221603 - DNA, 25 bp, Probe Sequence
gaagaaagatgtttggcgtagcaga

SEQ ID NO: 221604 - DNA, 25 bp, Probe Sequence
gaagaaagatgactgatgtggtagg

SEQ ID NO: 221605 - DNA, 25 bp, Probe Sequence
gaagaagtagagatgctggtggcag

SEQ ID NO: 221606 - DNA, 25 bp, Probe Sequence
gaagaagtagagatgctggtggcag

SEQ ID NO: 221607 - DNA, 25 bp, Probe Sequence
gaagacagaatggaggtggggcctt

SEQ ID NO: 221608 - DNA, 25 bp, Probe Sequence
gaagaagagatcgaggttgaggagg

SEQ ID NO: 221609 - DNA, 25 bp, Probe Sequence
gaagaaggaccggtatgagatcaat

SEQ ID NO: 221610 - DNA, 25 bp, Probe Sequence
gaagaatgagacgcagacaagtact

SEQ ID NO: 221611 - DNA, 25 bp, Probe Sequence
gaagacaatacccagagctcaatcc

SEQ ID NO: 221612 - DNA, 25 bp, Probe Sequence
gaagacagcaacttgaagacatata

SEQ ID NO: 221613 - DNA, 25 bp, Probe Sequence
gaagaccatagctgagaactaatgc

SEQ ID NO: 221614 - DNA, 25 bp, Probe Sequence
gaagcactcggctgcaaagtgaggc

SEQ ID NO: 221615 - DNA, 25 bp, Probe Sequence
gaagaccatgtctgcaaaggagaag

SEQ ID NO: 221616 - DNA, 25 bp, Probe Sequence
gaagcagaagaccgacgaggatgac

SEQ ID NO: 221617 - DNA, 25 bp, Probe Sequence
gaagctgacagctcagaggcacctg

SEQ ID NO: 221618 - DNA, 25 bp, Probe Sequence
gaagctgcaacatgtgtggacagtg

SEQ ID NO: 221619 - DNA, 25 bp, Probe Sequence
gaagctgcagaatgtgatgacctgg

SEQ ID NO: 221620 - DNA, 25 bp, Probe Sequence
gaagctggagttgcatgaccaagat

SEQ ID NO: 221621 - DNA, 25 bp, Probe Sequence
gaagcttgagtttgaacgccatgac

SEQ ID NO: 221622 - DNA, 25 bp, Probe Sequence
gaagcttgcagtgatcccagatcat

SEQ ID NO: 221623 - DNA, 25 bp, Probe Sequence
gaagctcagcaaagacccaaatatc

SEQ ID NO: 221624 - DNA, 25 bp, Probe Sequence
gaagccatgactgttccatcagatt

SEQ ID NO: 221625 - DNA, 25 bp, Probe Sequence
gaagctctgtccattccaagaaaag

SEQ ID NO: 221626 - DNA, 25 bp, Probe Sequence
gaagcttgacgcaccaagcggaact

SEQ ID NO: 221627 - DNA, 25 bp, Probe Sequence
gaagcttgacgcaccaagcggaact

SEQ ID NO: 221628 - DNA, 25 bp, Probe Sequence
gaagcttgggttcctggtgagagac

SEQ ID NO: 221629 - DNA, 25 bp, Probe Sequence
gaagctgttagtactcggtgggaaa

SEQ ID NO: 221630 - DNA, 25 bp, Probe Sequence
gaagctatgtcataccagttgtgaa

SEQ ID NO: 221631 - DNA, 25 bp, Probe Sequence
gaagcaaccaaagcagtcactgaga

SEQ ID NO: 221632 - DNA, 25 bp, Probe Sequence
gaagcaattcagatgatagtccagg

SEQ ID NO: 221633 - DNA, 25 bp, Probe Sequence
gaacagttcactttattccctgggt

SEQ ID NO: 221634 - DNA, 25 bp, Probe Sequence
gaacagttcactttattccctgggt

SEQ ID NO: 221635 - DNA, 25 bp, Probe Sequence
gagcaggtaagttcaccttcctggc

SEQ ID NO: 221636 - DNA, 25 bp, Probe Sequence
gaagaaaatttccgcttcctggtct

SEQ ID NO: 221637 - DNA, 25 bp, Probe Sequence
gaagaaatcacgcagccttttggtt

SEQ ID NO: 221638 - DNA, 25 bp, Probe Sequence
gaagaaatccgaaacataattctga

SEQ ID NO: 221639 - DNA, 25 bp, Probe Sequence
gaagacattcacgacaaaaacgcga

SEQ ID NO: 221640 - DNA, 25 bp, Probe Sequence
gaagacattcatgcagccaacagac

SEQ ID NO: 221641 - DNA, 25 bp, Probe Sequence
gaagacattatcaaggaccagatcc

SEQ ID NO: 221642 - DNA, 25 bp, Probe Sequence
gaagcagttagaatctaccaggcac

SEQ ID NO: 221643 - DNA, 25 bp, Probe Sequence
gaagcagttgtgtcagctactgcgg

SEQ ID NO: 221644 - DNA, 25 bp, Probe Sequence
gaacgtaggaaggaagcgtagccgg

SEQ ID NO: 221645 - DNA, 25 bp, Probe Sequence
gaactgggagggaagggtgagacgg

SEQ ID NO: 221646 - DNA, 25 bp, Probe Sequence
gaagcggtggggacaggacacgaat

SEQ ID NO: 221647 - DNA, 25 bp, Probe Sequence
gaagcagcgttcctgaagtggccga

SEQ ID NO: 221648 - DNA, 25 bp, Probe Sequence
gaagctgccatgtcatctaaaacac

SEQ ID NO: 221649 - DNA, 25 bp, Probe Sequence
gaagctggcaaatttgaagcaaatg

SEQ ID NO: 221650 - DNA, 25 bp, Probe Sequence
gaagcttgcaggatagattgaaatg

SEQ ID NO: 221651 - DNA, 25 bp, Probe Sequence
gaagcgagagtcttgtgatgctgag

SEQ ID NO: 221652 - DNA, 25 bp, Probe Sequence
gaagctgagactcatggatccccag

SEQ ID NO: 221653 - DNA, 25 bp, Probe Sequence
gaagcgaattcagagaggcccagta

SEQ ID NO: 221654 - DNA, 25 bp, Probe Sequence
gaagccaattcaccagggaccagat

SEQ ID NO: 221655 - DNA, 25 bp, Probe Sequence
gaagcaaattccgagcattacatca

SEQ ID NO: 221656 - DNA, 25 bp, Probe Sequence
gaagcaacgtccctgttgcagtgca

SEQ ID NO: 221657 - DNA, 25 bp, Probe Sequence
gaagcagatcgagacgtgcggtcac

SEQ ID NO: 221658 - DNA, 25 bp, Probe Sequence
gaagcagtgggagcagcgctggatc

SEQ ID NO: 221659 - DNA, 25 bp, Probe Sequence
gaagcagtgggagcagcgctggatc

SEQ ID NO: 221660 - DNA, 25 bp, Probe Sequence
gaagcagtgggagcagcgctggatc

SEQ ID NO: 221661 - DNA, 25 bp, Probe Sequence
gaagcagtgggagcagcgctggatc

SEQ ID NO: 221662 - DNA, 25 bp, Probe Sequence
gaagcaggaagcggggcagcagcac

SEQ ID NO: 221663 - DNA, 25 bp, Probe Sequence
gaagcagctgaagcagcccgcatat

SEQ ID NO: 221664 - DNA, 25 bp, Probe Sequence
gaagcagctgaagcagcccgcatat

SEQ ID NO: 221665 - DNA, 25 bp, Probe Sequence
gaagcatatgtcattccccatatgt

SEQ ID NO: 221666 - DNA, 25 bp, Probe Sequence
gaagcatataacagcccatgtgagt

SEQ ID NO: 221667 - DNA, 25 bp, Probe Sequence
gaagcagtcatacgtacacttgaat

SEQ ID NO: 221668 - DNA, 25 bp, Probe Sequence
gaagctgtgctacgtcgccctggac

SEQ ID NO: 221669 - DNA, 25 bp, Probe Sequence
gaagcatgctgcctatgcttggcct

SEQ ID NO: 221670 - DNA, 25 bp, Probe Sequence
gaagcatgtcgctatgcactgcaag

SEQ ID NO: 221671 - DNA, 25 bp, Probe Sequence
gaagcatgtggatgacacaatccct

SEQ ID NO: 221672 - DNA, 25 bp, Probe Sequence
gaagcaggcgcaaacacagacctct

SEQ ID NO: 221673 - DNA, 25 bp, Probe Sequence
gaagcaggggcaagataacctctca

SEQ ID NO: 221674 - DNA, 25 bp, Probe Sequence
gaagaacggcatgaacagtcttcag

SEQ ID NO: 221675 - DNA, 25 bp, Probe Sequence
gaagacagtggtcaagagacttgag

SEQ ID NO: 221676 - DNA, 25 bp, Probe Sequence
gaagaaggaagccatcaggagcctg

SEQ ID NO: 221677 - DNA, 25 bp, Probe Sequence
gaagaagcgaggggcacggcgctga

SEQ ID NO: 221678 - DNA, 25 bp, Probe Sequence
gaagaagctaatggcagacttgttg

SEQ ID NO: 221679 - DNA, 25 bp, Probe Sequence
gaagaaaatcattgcagacattaag

SEQ ID NO: 221680 - DNA, 25 bp, Probe Sequence
gaagaatatattacagcatttcaga

SEQ ID NO: 221681 - DNA, 25 bp, Probe Sequence
gaagaatgtggcaaagcatttagcc

SEQ ID NO: 221682 - DNA, 25 bp, Probe Sequence
gaagaagctggcggatctagtgacc

SEQ ID NO: 221683 - DNA, 25 bp, Probe Sequence
gaagaagctgtggcaaaagctgata

SEQ ID NO: 221684 - DNA, 25 bp, Probe Sequence
gaagaagatgtgttaaactgtcaaa

SEQ ID NO: 221685 - DNA, 25 bp, Probe Sequence
gaagaaatgggtaacaggcctcaag

SEQ ID NO: 221686 - DNA, 25 bp, Probe Sequence
gaagaaagtggcagaccggctcaca

SEQ ID NO: 221687 - DNA, 25 bp, Probe Sequence
gaagaaataaatctttggctcacaa

SEQ ID NO: 221688 - DNA, 25 bp, Probe Sequence
gaagaacaaaaggctttggcaacag

SEQ ID NO: 221689 - DNA, 25 bp, Probe Sequence
gaacacccacaggtcttggtaacaa

SEQ ID NO: 221690 - DNA, 25 bp, Probe Sequence
gaagaaggacaagcttgcgaacaca

SEQ ID NO: 221691 - DNA, 25 bp, Probe Sequence
gaagcacaggtcaccatcttaaaca

SEQ ID NO: 221692 - DNA, 25 bp, Probe Sequence
gaagaatgtgtcagagtctttaaac

SEQ ID NO: 221693 - DNA, 25 bp, Probe Sequence
gaagcaatgttctgtgattttccaa

SEQ ID NO: 221694 - DNA, 25 bp, Probe Sequence
gaagcaatgtactgagtcctgtgga

SEQ ID NO: 221695 - DNA, 25 bp, Probe Sequence
gaagctgagatctttagtacgtgga

SEQ ID NO: 221696 - DNA, 25 bp, Probe Sequence
gaagctgaaccttattcacagtgaa

SEQ ID NO: 221697 - DNA, 25 bp, Probe Sequence
gaaccatgatcccaatccaagtgaa

SEQ ID NO: 221698 - DNA, 25 bp, Probe Sequence
gaagcaactgtacatccacaggcaa

SEQ ID NO: 221699 - DNA, 25 bp, Probe Sequence
gaagaatctaagcagccactggctg

SEQ ID NO: 221700 - DNA, 25 bp, Probe Sequence
gaagcactgagcaagaaccctggct

SEQ ID NO: 221701 - DNA, 25 bp, Probe Sequence
gaagcagctgatcagaatggcaatg

SEQ ID NO: 221702 - DNA, 25 bp, Probe Sequence
gaagctgctcatgatggctggtatc

SEQ ID NO: 221703 - DNA, 25 bp, Probe Sequence
gaagctggcttgacatgctgtattc

SEQ ID NO: 221704 - DNA, 25 bp, Probe Sequence
gaagcgagtgatgctagctgagtgt

SEQ ID NO: 221705 - DNA, 25 bp, Probe Sequence
gaagccagccaggagagcaagttgc

SEQ ID NO: 221706 - DNA, 25 bp, Probe Sequence
gaagaagctcaggaagcaagcatgg

SEQ ID NO: 221707 - DNA, 25 bp, Probe Sequence
gaagaacatcatttaccatgcagtg

SEQ ID NO: 221708 - DNA, 25 bp, Probe Sequence
gaagacactcatttatctgtcctgt

SEQ ID NO: 221709 - DNA, 25 bp, Probe Sequence
gaagacagcctgttacgacatcgat

SEQ ID NO: 221710 - DNA, 25 bp, Probe Sequence
gaagaacctgtttcagcacatagtc

SEQ ID NO: 221711 - DNA, 25 bp, Probe Sequence
gaagacacctgtgcatagcagatca

SEQ ID NO: 221712 - DNA, 25 bp, Probe Sequence
gaagacagctggtccacagcagaaa

SEQ ID NO: 221713 - DNA, 25 bp, Probe Sequence
gaagcacttggtaacaggcacatct

SEQ ID NO: 221714 - DNA, 25 bp, Probe Sequence
gaagcacctggagaactcatgccat

SEQ ID NO: 221715 - DNA, 25 bp, Probe Sequence
gaagaagcgtaaagactatccatgt

SEQ ID NO: 221716 - DNA, 25 bp, Probe Sequence
gaagaagctgttcagactttcaatt

SEQ ID NO: 221717 - DNA, 25 bp, Probe Sequence
gaagaactcactcagaccttcatga

SEQ ID NO: 221718 - DNA, 25 bp, Probe Sequence
gaaccagcctgtcagagcctttaaa

SEQ ID NO: 221719 - DNA, 25 bp, Probe Sequence
gaaccaggcctggaatacttgtacc

SEQ ID NO: 221720 - DNA, 25 bp, Probe Sequence
gaagcacagtccctaatttctgctg

SEQ ID NO: 221721 - DNA, 25 bp, Probe Sequence
gaaccagttgttttgtcttgcgggt

SEQ ID NO: 221722 - DNA, 25 bp, Probe Sequence
gaacgttttgactgtcagtgcctag

SEQ ID NO: 221723 - DNA, 25 bp, Probe Sequence
gaagcggtttgcatttacgcctgta

SEQ ID NO: 221724 - DNA, 25 bp, Probe Sequence
gaagctggattacatcctgggcctg

SEQ ID NO: 221725 - DNA, 25 bp, Probe Sequence
gaagctggattacatcctgggcctg

SEQ ID NO: 221726 - DNA, 25 bp, Probe Sequence
gaagcagaagttagcatcctgggcc

SEQ ID NO: 221727 - DNA, 25 bp, Probe Sequence
gaagctcaaagtcaaaaaatctcgt

SEQ ID NO: 221728 - DNA, 25 bp, Probe Sequence
gaagctcaaaggtcaaaaaatctcg

SEQ ID NO: 221729 - DNA, 25 bp, Probe Sequence
gaagctaaatgataaaaacacatgg

SEQ ID NO: 221730 - DNA, 25 bp, Probe Sequence
gaagaaaccaagacattacaccatg

SEQ ID NO: 221731 - DNA, 25 bp, Probe Sequence
gaagaactccaagctgctgagcacc

SEQ ID NO: 221732 - DNA, 25 bp, Probe Sequence
gaagaatatgtatgcccgagaccgt

SEQ ID NO: 221733 - DNA, 25 bp, Probe Sequence
gaagacaatttagcatagacccaga

SEQ ID NO: 221734 - DNA, 25 bp, Probe Sequence
gaagacaattatcaaccacgtggag

SEQ ID NO: 221735 - DNA, 25 bp, Probe Sequence
gaagacacgaatcatgactcacgat

SEQ ID NO: 221736 - DNA, 25 bp, Probe Sequence
gaagcaaaaagccagactagcatgt

SEQ ID NO: 221737 - DNA, 25 bp, Probe Sequence
gaagcataatccaacagaatcaatt

SEQ ID NO: 221738 - DNA, 25 bp, Probe Sequence
gaagcaaatctatctgcaagaatat

SEQ ID NO: 221739 - DNA, 25 bp, Probe Sequence
gaagcacagctttacagatgagtat

SEQ ID NO: 221740 - DNA, 25 bp, Probe Sequence
gaagcatgctgcataaaaacataaa

SEQ ID NO: 221741 - DNA, 25 bp, Probe Sequence
gaagcagagttacaggacatgatta

SEQ ID NO: 221742 - DNA, 25 bp, Probe Sequence
gaagaatttcagaagtactgtgaag

SEQ ID NO: 221743 - DNA, 25 bp, Probe Sequence
gaagcattcattcaagctacttgac

SEQ ID NO: 221744 - DNA, 25 bp, Probe Sequence
gaagcacttgctcaaaatctgtgac

SEQ ID NO: 221745 - DNA, 25 bp, Probe Sequence
gaagaattgcttcgacaaatgtgtc

SEQ ID NO: 221746 - DNA, 25 bp, Probe Sequence
gaagacaatcataaaaaagctgttc

SEQ ID NO: 221747 - DNA, 25 bp, Probe Sequence
gaagaacctcaggaccaacttgtct

SEQ ID NO: 221748 - DNA, 25 bp, Probe Sequence
gaaccaccattggacctatcttggc

SEQ ID NO: 221749 - DNA, 25 bp, Probe Sequence
gaagcccctgtggtttgacgtatat

SEQ ID NO: 221750 - DNA, 25 bp, Probe Sequence
gaagcactttctcttaacttaattt

SEQ ID NO: 221751 - DNA, 25 bp, Probe Sequence
gaagcagttctctttataaagtgtt

SEQ ID NO: 221752 - DNA, 25 bp, Probe Sequence
gaagcgtttatttatacatctctgt

SEQ ID NO: 221753 - DNA, 25 bp, Probe Sequence
gaagcttttagctcagaagcgtcat

SEQ ID NO: 221754 - DNA, 25 bp, Probe Sequence
gaagcttgttcgtaaaacgctggac

SEQ ID NO: 221755 - DNA, 25 bp, Probe Sequence
gaagctttgcccaaacaatccatgg

SEQ ID NO: 221756 - DNA, 25 bp, Probe Sequence
gaacttagacctctcaacacagtat

SEQ ID NO: 221757 - DNA, 25 bp, Probe Sequence
gaagcttcatgcacttaaagaagta

SEQ ID NO: 221758 - DNA, 25 bp, Probe Sequence
gaacttgcacttcttaaggaacagc

SEQ ID NO: 221759 - DNA, 25 bp, Probe Sequence
gaagcttcagttctggtaaaagaga

SEQ ID NO: 221760 - DNA, 25 bp, Probe Sequence
gaagctttgaggctggtatacaaat

SEQ ID NO: 221761 - DNA, 25 bp, Probe Sequence
gaagaatgatgatggctggtatgaa

SEQ ID NO: 221762 - DNA, 25 bp, Probe Sequence
gaagctaggatttgatgagtgtgaa

SEQ ID NO: 221763 - DNA, 25 bp, Probe Sequence
gaagctcatggtgcacaactgggaa

SEQ ID NO: 221764 - DNA, 25 bp, Probe Sequence
gaagccagatgtgatgtacgcggac

SEQ ID NO: 221765 - DNA, 25 bp, Probe Sequence
gacgcaaatggtcgtagtcttaccg

SEQ ID NO: 221766 - DNA, 25 bp, Probe Sequence
gaagcttagttaccattcttacctg

SEQ ID NO: 221767 - DNA, 25 bp, Probe Sequence
gaagaaagttcagatccgtatcact

SEQ ID NO: 221768 - DNA, 25 bp, Probe Sequence
gaagaaaaaagcaccgattcctcaa

SEQ ID NO: 221769 - DNA, 25 bp, Probe Sequence
gaagaaggaaacaccgagtctctgt

SEQ ID NO: 221770 - DNA, 25 bp, Probe Sequence
gaagccaggaatttcccaggacctg

SEQ ID NO: 221771 - DNA, 25 bp, Probe Sequence
gaagccgagttcacaaagtccattg

SEQ ID NO: 221772 - DNA, 25 bp, Probe Sequence
gaagccgattttgcaaagaggggat

SEQ ID NO: 221773 - DNA, 25 bp, Probe Sequence
gaagcaccttaagattagggtggca

SEQ ID NO: 221774 - DNA, 25 bp, Probe Sequence
gaagaagtttcagataagggcagtg

SEQ ID NO: 221775 - DNA, 25 bp, Probe Sequence
gaagaactcccagctagagcgtgag

SEQ ID NO: 221776 - DNA, 25 bp, Probe Sequence
gaagaaccgcttgccagaattgtgg

SEQ ID NO: 221777 - DNA, 25 bp, Probe Sequence
gaagctgaaagtccccgaatgggtg

SEQ ID NO: 221778 - DNA, 25 bp, Probe Sequence
gaagcaggtcgtctacgaatggttt

SEQ ID NO: 221779 - DNA, 25 bp, Probe Sequence
gaagcagagtcgcggggagatggtc

SEQ ID NO: 221780 - DNA, 25 bp, Probe Sequence
gaagcagatcagccgggtggaggcg

SEQ ID NO: 221781 - DNA, 25 bp, Probe Sequence
gaagaagcagactggctagggacct

SEQ ID NO: 221782 - DNA, 25 bp, Probe Sequence
gaagcaactgccagtcttggaacct

SEQ ID NO: 221783 - DNA, 25 bp, Probe Sequence
gaacgactggctcttaggacaaaag

SEQ ID NO: 221784 - DNA, 25 bp, Probe Sequence
gaagcatgcctggtaattgggaaaa

SEQ ID NO: 221785 - DNA, 25 bp, Probe Sequence
gaagcaattgctcatgttggccaaa

SEQ ID NO: 221786 - DNA, 25 bp, Probe Sequence
gaagctatctgctgagtgtgctaaa

SEQ ID NO: 221787 - DNA, 25 bp, Probe Sequence
gaagccattgccaagggtatccgga

SEQ ID NO: 221788 - DNA, 25 bp, Probe Sequence
gaagccttgcctaagagtaaagtgt

SEQ ID NO: 221789 - DNA, 25 bp, Probe Sequence
gaacggtcagtcaaggatcataagt

SEQ ID NO: 221790 - DNA, 25 bp, Probe Sequence
gaacggcatcaggcacagatagatc

SEQ ID NO: 221791 - DNA, 25 bp, Probe Sequence
gaacggcatcaggcacagatagatc

SEQ ID NO: 221792 - DNA, 25 bp, Probe Sequence
gaacggcatcaggcacagatagatc

SEQ ID NO: 221793 - DNA, 25 bp, Probe Sequence
gaacggcatcaggcacagatagatc

SEQ ID NO: 221794 - DNA, 25 bp, Probe Sequence
gaacggcatcaggcacagatagatc

SEQ ID NO: 221795 - DNA, 25 bp, Probe Sequence
gaacggcatcaggcacagatagatc

SEQ ID NO: 221796 - DNA, 25 bp, Probe Sequence
gaagcaggcactgctcattaatcct

SEQ ID NO: 221797 - DNA, 25 bp, Probe Sequence
gaagcagccactcattgtacaaatg

SEQ ID NO: 221798 - DNA, 25 bp, Probe Sequence
gaagcgcatacgcatgactacatta

SEQ ID NO: 221799 - DNA, 25 bp, Probe Sequence
gaagcagaagtccatattgcaatta

SEQ ID NO: 221800 - DNA, 25 bp, Probe Sequence
gaagcagactgtggctatgactatg

SEQ ID NO: 221801 - DNA, 25 bp, Probe Sequence
gaagcagcctctggatgctgagtgg

SEQ ID NO: 221802 - DNA, 25 bp, Probe Sequence
gaagcagctctgtctgattgaggcg

SEQ ID NO: 221803 - DNA, 25 bp, Probe Sequence
gaagcagctgctggtggcttgggac

SEQ ID NO: 221804 - DNA, 25 bp, Probe Sequence
gaagcagctgggggcaggaagcaga

SEQ ID NO: 221805 - DNA, 25 bp, Probe Sequence
gaagcactagagaagaatgacatgg

SEQ ID NO: 221806 - DNA, 25 bp, Probe Sequence
gaagctctggagccagtgcattatg

SEQ ID NO: 221807 - DNA, 25 bp, Probe Sequence
gaagctctcgagtggctcatcagag

SEQ ID NO: 221808 - DNA, 25 bp, Probe Sequence
gaagcttcgtgaggtcatgcacaag

SEQ ID NO: 221809 - DNA, 25 bp, Probe Sequence
gaagctgtcagcaagcacctcaaat

SEQ ID NO: 221810 - DNA, 25 bp, Probe Sequence
gaagctgtcagcaagcacctcaaat

SEQ ID NO: 221811 - DNA, 25 bp, Probe Sequence
gaagctgtacatgcagctcatcccg

SEQ ID NO: 221812 - DNA, 25 bp, Probe Sequence
gaagctgtacaggacgattcactgc

SEQ ID NO: 221813 - DNA, 25 bp, Probe Sequence
gaagcacaaatctcagatgctcctg

SEQ ID NO: 221814 - DNA, 25 bp, Probe Sequence
gaacccaatgctgcagttcctgatg

SEQ ID NO: 221815 - DNA, 25 bp, Probe Sequence
gaacttcaagttcttccaatgagga

SEQ ID NO: 221816 - DNA, 25 bp, Probe Sequence
gaactaccctggttactctagagga

SEQ ID NO: 221817 - DNA, 25 bp, Probe Sequence
gaagcttctccaagacttcttcaat

SEQ ID NO: 221818 - DNA, 25 bp, Probe Sequence
gaagcttctccaagacttcttcaat

SEQ ID NO: 221819 - DNA, 25 bp, Probe Sequence
gaagctttgaagcgctacttagcat

SEQ ID NO: 221820 - DNA, 25 bp, Probe Sequence
gaagcattaacatggtacagtccta

SEQ ID NO: 221821 - DNA, 25 bp, Probe Sequence
gaagcacaaaaagggacagtcggaa

SEQ ID NO: 221822 - DNA, 25 bp, Probe Sequence
gaagcccaatggcgagaagccggac

SEQ ID NO: 221823 - DNA, 25 bp, Probe Sequence
gaactccacggtgagggccgatgtc

SEQ ID NO: 221824 - DNA, 25 bp, Probe Sequence
gaaccccagggatccatgcggattc

SEQ ID NO: 221825 - DNA, 25 bp, Probe Sequence
gaactccaaatgcaacttcgggctc

SEQ ID NO: 221826 - DNA, 25 bp, Probe Sequence
gaagcccgaagacagatacggcgtc

SEQ ID NO: 221827 - DNA, 25 bp, Probe Sequence
gaagccctaaagaatgcaacctagt

SEQ ID NO: 221828 - DNA, 25 bp, Probe Sequence
gaagcccaaagctacacatacctcg

SEQ ID NO: 221829 - DNA, 25 bp, Probe Sequence
gaagcttcaaaaggcagctctcctg

SEQ ID NO: 221830 - DNA, 25 bp, Probe Sequence
gaagcttcaaaaggcagctctcctg

SEQ ID NO: 221831 - DNA, 25 bp, Probe Sequence
gaagcttcaaatatcaacctatata

SEQ ID NO: 221832 - DNA, 25 bp, Probe Sequence
gaagcccgcaatgttaccatggaaa

SEQ ID NO: 221833 - DNA, 25 bp, Probe Sequence
gaagccctaatccagttcctggaac

SEQ ID NO: 221834 - DNA, 25 bp, Probe Sequence
gaagcacttactgaaatcgctggta

SEQ ID NO: 221835 - DNA, 25 bp, Probe Sequence
gaagcaccaactgagaaccctgctc

SEQ ID NO: 221836 - DNA, 25 bp, Probe Sequence
gaagaagccacagagagaaccacca

SEQ ID NO: 221837 - DNA, 25 bp, Probe Sequence
gaaacatcccagccaagaactggta

SEQ ID NO: 221838 - DNA, 25 bp, Probe Sequence
gaagaacgccaaccagcagaaggag

SEQ ID NO: 221839 - DNA, 25 bp, Probe Sequence
gaagcacccacacgtagaaagaggc

SEQ ID NO: 221840 - DNA, 25 bp, Probe Sequence
gaagcaccaacagtggataaagaaa

SEQ ID NO: 221841 - DNA, 25 bp, Probe Sequence
gaagcccccattcgtataataatta

SEQ ID NO: 221842 - DNA, 25 bp, Probe Sequence
gaagaacgccttcatttcatgcaaa

SEQ ID NO: 221843 - DNA, 25 bp, Probe Sequence
gaagctcacgccttagtttgaaaca

SEQ ID NO: 221844 - DNA, 25 bp, Probe Sequence
gaacgcacgcctgagatttggccac

SEQ ID NO: 221845 - DNA, 25 bp, Probe Sequence
gaaccaaggtgtcattgtcccatgc

SEQ ID NO: 221846 - DNA, 25 bp, Probe Sequence
gaagcactgaaaatagtgttcccag

SEQ ID NO: 221847 - DNA, 25 bp, Probe Sequence
gaagcactataatattgttcccata

SEQ ID NO: 221848 - DNA, 25 bp, Probe Sequence
gaagcagtgtaattgcctgttaaaa

SEQ ID NO: 221849 - DNA, 25 bp, Probe Sequence
gaagcagatgtatggcctgacattc

SEQ ID NO: 221850 - DNA, 25 bp, Probe Sequence
gaagcatgcagttcaactctgacac

SEQ ID NO: 221851 - DNA, 25 bp, Probe Sequence
gaagctgagctgaacacattacgat

SEQ ID NO: 221852 - DNA, 25 bp, Probe Sequence
gaagctgggatggacttactattct

SEQ ID NO: 221853 - DNA, 25 bp, Probe Sequence
gaagctagtgaagctacactgtttt

SEQ ID NO: 221854 - DNA, 25 bp, Probe Sequence
gaagcagattgatccgtttgatttt

SEQ ID NO: 221855 - DNA, 25 bp, Probe Sequence
gaagcaatgcattacttgttttaga

SEQ ID NO: 221856 - DNA, 25 bp, Probe Sequence
gaagcatagcttttagctctaataa

SEQ ID NO: 221857 - DNA, 25 bp, Probe Sequence
gaagctgagtctttcaccaataaac

SEQ ID NO: 221858 - DNA, 25 bp, Probe Sequence
gaacggttttccaaagcagacagca

SEQ ID NO: 221859 - DNA, 25 bp, Probe Sequence
gaagcactttttaacaacatgaaac

SEQ ID NO: 221860 - DNA, 25 bp, Probe Sequence
gaagcactcttcagagactacgtcc

SEQ ID NO: 221861 - DNA, 25 bp, Probe Sequence
gaagcagctctataacatctacgcc

SEQ ID NO: 221862 - DNA, 25 bp, Probe Sequence
gaagcaacattaaattctagacatt

SEQ ID NO: 221863 - DNA, 25 bp, Probe Sequence
gaagcataattatctgcctttcatt

SEQ ID NO: 221864 - DNA, 25 bp, Probe Sequence
gaagcatttgtttctactttgatat

SEQ ID NO: 221865 - DNA, 25 bp, Probe Sequence
gaagcaattggcacatctttctata

SEQ ID NO: 221866 - DNA, 25 bp, Probe Sequence
gaagcaattagtttctcattcagaa

SEQ ID NO: 221867 - DNA, 25 bp, Probe Sequence
gaagctattgtctattcaattcaaa

SEQ ID NO: 221868 - DNA, 25 bp, Probe Sequence
gaagcagcacgtctatctatacaca

SEQ ID NO: 221869 - DNA, 25 bp, Probe Sequence
gaagcagcctgtgtatattcctaac

SEQ ID NO: 221870 - DNA, 25 bp, Probe Sequence
gaagcagcttgtctttattatgcaa

SEQ ID NO: 221871 - DNA, 25 bp, Probe Sequence
gaagcatgtcgtctttatcgctcag

SEQ ID NO: 221872 - DNA, 25 bp, Probe Sequence
gaagcagggtgtcttgacccatggc

SEQ ID NO: 221873 - DNA, 25 bp, Probe Sequence
gaagaaggcggcgttgtccatgtgc

SEQ ID NO: 221874 - DNA, 25 bp, Probe Sequence
gaagaagtcgagggagccgctgaag

SEQ ID NO: 221875 - DNA, 25 bp, Probe Sequence
gaagaagaccaagaagcgtcagtgt

SEQ ID NO: 221876 - DNA, 25 bp, Probe Sequence
gaagaagacggagcagcagcggcgg

SEQ ID NO: 221877 - DNA, 25 bp, Probe Sequence
gaagaagacggagcagcagcggcgg

SEQ ID NO: 221878 - DNA, 25 bp, Probe Sequence
gaagaaggcggagggcagcagccgg

SEQ ID NO: 221879 - DNA, 25 bp, Probe Sequence
gaagaaggtgaagatcgagctggat

SEQ ID NO: 221880 - DNA, 25 bp, Probe Sequence
gacagggtggaagagggtggtatat

SEQ ID NO: 221881 - DNA, 25 bp, Probe Sequence
gaagcgtacgaagcgggtggaaaat

SEQ ID NO: 221882 - DNA, 25 bp, Probe Sequence
gaagctggaaaagggccgcatggaa

SEQ ID NO: 221883 - DNA, 25 bp, Probe Sequence
gaagaagacagagacgcaagagaaa

SEQ ID NO: 221884 - DNA, 25 bp, Probe Sequence
gaagaatgccaacacctcaaaacac

SEQ ID NO: 221885 - DNA, 25 bp, Probe Sequence
gaagaatggtagcagccacaagtaa

SEQ ID NO: 221886 - DNA, 25 bp, Probe Sequence
gaagcacaggtaacacccaagtaga

SEQ ID NO: 221887 - DNA, 25 bp, Probe Sequence
gaaccaggttgatctgccacagaaa

SEQ ID NO: 221888 - DNA, 25 bp, Probe Sequence
gaaccatgtattaaccacacttaaa

SEQ ID NO: 221889 - DNA, 25 bp, Probe Sequence
gaacctgtttaacagctgtaaccaa

SEQ ID NO: 221890 - DNA, 25 bp, Probe Sequence
gaagcctgggaatcaagtttgaaac

SEQ ID NO: 221891 - DNA, 25 bp, Probe Sequence
gaaccggtaaactagtacaggtctg

SEQ ID NO: 221892 - DNA, 25 bp, Probe Sequence
gaacttgcgtaagaaaacacttctg

SEQ ID NO: 221893 - DNA, 25 bp, Probe Sequence
gaagcaccgaaagataaatgatttt

SEQ ID NO: 221894 - DNA, 25 bp, Probe Sequence
gaacctagaagggataatcgttgct

SEQ ID NO: 221895 - DNA, 25 bp, Probe Sequence
gaagcccaaggggtacatttattgc

SEQ ID NO: 221896 - DNA, 25 bp, Probe Sequence
gaacctaatggtgcttattttccta

SEQ ID NO: 221897 - DNA, 25 bp, Probe Sequence
gaaatctagaggatctctccttttt

SEQ ID NO: 221898 - DNA, 25 bp, Probe Sequence
gaacctcaagtcactgtagctttag

SEQ ID NO: 221899 - DNA, 25 bp, Probe Sequence
gaacgacaagtctgtgaaggatctg

SEQ ID NO: 221900 - DNA, 25 bp, Probe Sequence
gaacggcaagagtgtccagtatgta

SEQ ID NO: 221901 - DNA, 25 bp, Probe Sequence
gaactgggaaggatccaggttcgct

SEQ ID NO: 221902 - DNA, 25 bp, Probe Sequence
gaactggtgaagcttggaagttgca

SEQ ID NO: 221903 - DNA, 25 bp, Probe Sequence
gaagctcggtcgcgggaagaggcgg

SEQ ID NO: 221904 - DNA, 25 bp, Probe Sequence
gaagctcggtcgcgggaagaggcgg

SEQ ID NO: 221905 - DNA, 25 bp, Probe Sequence
gaagcctcccgttggagtgagagcc

SEQ ID NO: 221906 - DNA, 25 bp, Probe Sequence
gaacctctcctgagggggaatcctg

SEQ ID NO: 221907 - DNA, 25 bp, Probe Sequence
gaagccctcaagtggggcgagtcct

SEQ ID NO: 221908 - DNA, 25 bp, Probe Sequence
gaagcccaccactagggggagacat

SEQ ID NO: 221909 - DNA, 25 bp, Probe Sequence
gaagccccaggctggagataacagc

SEQ ID NO: 221910 - DNA, 25 bp, Probe Sequence
gaacctcacaggcaggctaaacaag

SEQ ID NO: 221911 - DNA, 25 bp, Probe Sequence
gaaccctcggatacgatagaaaatg

SEQ ID NO: 221912 - DNA, 25 bp, Probe Sequence
gaagctcccggaaagagcagaggga

SEQ ID NO: 221913 - DNA, 25 bp, Probe Sequence
gaagctcatctcaggaaagcgccag

SEQ ID NO: 221914 - DNA, 25 bp, Probe Sequence
gaagctacctgtgaaagagctgagc

SEQ ID NO: 221915 - DNA, 25 bp, Probe Sequence
gaagctactttcccagggctatatg

SEQ ID NO: 221916 - DNA, 25 bp, Probe Sequence
gaagcgatcttttccgccggaatcc

SEQ ID NO: 221917 - DNA, 25 bp, Probe Sequence
gaagcaataagttcctctgcggacc

SEQ ID NO: 221918 - DNA, 25 bp, Probe Sequence
gaagcacatcgacttctctctgtgc

SEQ ID NO: 221919 - DNA, 25 bp, Probe Sequence
gaagcacacaggctgtgttggcttg

SEQ ID NO: 221920 - DNA, 25 bp, Probe Sequence
gaagcaacatgcactggctcatttt

SEQ ID NO: 221921 - DNA, 25 bp, Probe Sequence
gaagcaatagcatatgcattctttc

SEQ ID NO: 221922 - DNA, 25 bp, Probe Sequence
gaagcactgacatatgctacaacat

SEQ ID NO: 221923 - DNA, 25 bp, Probe Sequence
gaagcactacagttgtcaagaatgc

SEQ ID NO: 221924 - DNA, 25 bp, Probe Sequence
gaagcaatacagtgtaacatgtcac

SEQ ID NO: 221925 - DNA, 25 bp, Probe Sequence
gaagctaagcagttagaactgtgac

SEQ ID NO: 221926 - DNA, 25 bp, Probe Sequence
gaagctacaagtaacaatcagtcta

SEQ ID NO: 221927 - DNA, 25 bp, Probe Sequence
gaagctacaagagacttcgctcgaa

SEQ ID NO: 221928 - DNA, 25 bp, Probe Sequence
gaagctcaacgagaatcactctgga

SEQ ID NO: 221929 - DNA, 25 bp, Probe Sequence
gaagctgcaatcaccattcttcgaa

SEQ ID NO: 221930 - DNA, 25 bp, Probe Sequence
gaagctgcttacgaatttgccgaca

SEQ ID NO: 221931 - DNA, 25 bp, Probe Sequence
gaagctcttcaatgatgcaattcga

SEQ ID NO: 221932 - DNA, 25 bp, Probe Sequence
gaagcttgtgcctgacaattacccc

SEQ ID NO: 221933 - DNA, 25 bp, Probe Sequence
gacacttacctaacaagtactgctc

SEQ ID NO: 221934 - DNA, 25 bp, Probe Sequence
gaacttcaccgagaatgaccttctg

SEQ ID NO: 221935 - DNA, 25 bp, Probe Sequence
gaaccacttctagagtacctttgcc

SEQ ID NO: 221936 - DNA, 25 bp, Probe Sequence
gaaccactgtcaagtaatccttaaa

SEQ ID NO: 221937 - DNA, 25 bp, Probe Sequence
gaagcccagtgaattagtcggttag

SEQ ID NO: 221938 - DNA, 25 bp, Probe Sequence
gaagccatttgatttggtaggtgtg

SEQ ID NO: 221939 - DNA, 25 bp, Probe Sequence
gaacctttgcgctggataaggggga

SEQ ID NO: 221940 - DNA, 25 bp, Probe Sequence
gaacctttctcatggatttttgtgg

SEQ ID NO: 221941 - DNA, 25 bp, Probe Sequence
gaagcctttgctagggtgtcttgtg

SEQ ID NO: 221942 - DNA, 25 bp, Probe Sequence
gaagcgtcagtgtaaagttcttttt

SEQ ID NO: 221943 - DNA, 25 bp, Probe Sequence
gaagcgtcagaacaaagacctaatg

SEQ ID NO: 221944 - DNA, 25 bp, Probe Sequence
gaagcctgcagagaagaaacctact

SEQ ID NO: 221945 - DNA, 25 bp, Probe Sequence
gaagcctgcagagaagaaacctact

SEQ ID NO: 221946 - DNA, 25 bp, Probe Sequence
gaagctcggaaaaacaaccatcatt

SEQ ID NO: 221947 - DNA, 25 bp, Probe Sequence
gaactcggaagacaaaggcgctttg

SEQ ID NO: 221948 - DNA, 25 bp, Probe Sequence
gaagctgggagcaaggaaagggtct

SEQ ID NO: 221949 - DNA, 25 bp, Probe Sequence
gaagctgtggctcatgtggaaggca

SEQ ID NO: 221950 - DNA, 25 bp, Probe Sequence
gaagcatgcatggcaggctgtgaca

SEQ ID NO: 221951 - DNA, 25 bp, Probe Sequence
gaagctgatgcatctgttgacatgt

SEQ ID NO: 221952 - DNA, 25 bp, Probe Sequence
gaagctacccatatgtctgtcatta

SEQ ID NO: 221953 - DNA, 25 bp, Probe Sequence
gaagctaacgctgcatgatctgtgt

SEQ ID NO: 221954 - DNA, 25 bp, Probe Sequence
gaagctattcctggcttttctactc

SEQ ID NO: 221955 - DNA, 25 bp, Probe Sequence
gaagcttgtgttttttatgccctca

SEQ ID NO: 221956 - DNA, 25 bp, Probe Sequence
gaagctgggactttaaggccctatc

SEQ ID NO: 221957 - DNA, 25 bp, Probe Sequence
gaagcgaggattttacgagtctctt

SEQ ID NO: 221958 - DNA, 25 bp, Probe Sequence
gaagctgcaggatgcctactacatc

SEQ ID NO: 221959 - DNA, 25 bp, Probe Sequence
gaagctgattacgcagcacatactt

SEQ ID NO: 221960 - DNA, 25 bp, Probe Sequence
gaagcttctgaccacagagtacctg

SEQ ID NO: 221961 - DNA, 25 bp, Probe Sequence
gaagccgatgatgacgaggacgatg

SEQ ID NO: 221962 - DNA, 25 bp, Probe Sequence
gaagcaggagctgtcgggaagatca

SEQ ID NO: 221963 - DNA, 25 bp, Probe Sequence
gaagcaggattgtataggcagaaaa

SEQ ID NO: 221964 - DNA, 25 bp, Probe Sequence
gaagctggttgactgattagataaa

SEQ ID NO: 221965 - DNA, 25 bp, Probe Sequence
gaagcggctgaatataagtatgaaa

SEQ ID NO: 221966 - DNA, 25 bp, Probe Sequence
gaacagggcaataacaagtcacaaa

SEQ ID NO: 221967 - DNA, 25 bp, Probe Sequence
gaagcagggtgaatactagggcata

SEQ ID NO: 221968 - DNA, 25 bp, Probe Sequence
gaagcaggcggatcacttgagccca

SEQ ID NO: 221969 - DNA, 25 bp, Probe Sequence
gaagcaccgtgaaggtatctgccca

SEQ ID NO: 221970 - DNA, 25 bp, Probe Sequence
gaagcagcacagaagagagatagcc

SEQ ID NO: 221971 - DNA, 25 bp, Probe Sequence
gaagcagaggttgcagtgagctggg

SEQ ID NO: 221972 - DNA, 25 bp, Probe Sequence
gaagcagaggttgcagtgagctgag

SEQ ID NO: 221973 - DNA, 25 bp, Probe Sequence
gaacgactctgatgatgtagatgac

SEQ ID NO: 221974 - DNA, 25 bp, Probe Sequence
gaagctttctgttgatgttaactga

SEQ ID NO: 221975 - DNA, 25 bp, Probe Sequence
gaagctttctgttgatgttaactga

SEQ ID NO: 221976 - DNA, 25 bp, Probe Sequence
gaagctttctgttgatgttaactga

SEQ ID NO: 221977 - DNA, 25 bp, Probe Sequence
gaagctcacgttgatgtcaagacta

SEQ ID NO: 221978 - DNA, 25 bp, Probe Sequence
gaagctttattcgagaacaggtgaa

SEQ ID NO: 221979 - DNA, 25 bp, Probe Sequence
gaacttcgcctggagaacagagtgc

SEQ ID NO: 221980 - DNA, 25 bp, Probe Sequence
gaacttcgcctggagaacagagtgc

SEQ ID NO: 221981 - DNA, 25 bp, Probe Sequence
gaagctccgaccgacatcacggagc

SEQ ID NO: 221982 - DNA, 25 bp, Probe Sequence
gaagctgcacgaggagtacacgcgc

SEQ ID NO: 221983 - DNA, 25 bp, Probe Sequence
gaactgcacgcaagagtgcgtctcg

SEQ ID NO: 221984 - DNA, 25 bp, Probe Sequence
gaagctatccatggattgatgtctc

SEQ ID NO: 221985 - DNA, 25 bp, Probe Sequence
gaagcctcctggtcatatgatgctg

SEQ ID NO: 221986 - DNA, 25 bp, Probe Sequence
gaagctcactgtgagcaatgtgctg

SEQ ID NO: 221987 - DNA, 25 bp, Probe Sequence
gaagcacactgagaaagcggaagat

SEQ ID NO: 221988 - DNA, 25 bp, Probe Sequence
gaagcagcactacattgacctgaaa

SEQ ID NO: 221989 - DNA, 25 bp, Probe Sequence
gaagcagactcacaagaaagtgcag

SEQ ID NO: 221990 - DNA, 25 bp, Probe Sequence
gaagcataccaaaagatcagagaag

SEQ ID NO: 221991 - DNA, 25 bp, Probe Sequence
gaagcattccattctcgtggaggag

SEQ ID NO: 221992 - DNA, 25 bp, Probe Sequence
gaagcaagccaagtctgtgggtgac

SEQ ID NO: 221993 - DNA, 25 bp, Probe Sequence
gaagcaactagatgtggctgggaca

SEQ ID NO: 221994 - DNA, 25 bp, Probe Sequence
gaagcacgcaagcgccgtgaagagc

SEQ ID NO: 221995 - DNA, 25 bp, Probe Sequence
gaagcaagacagagcactgctgtaa

SEQ ID NO: 221996 - DNA, 25 bp, Probe Sequence
gaagcctgagcaagtgagggtagaa

SEQ ID NO: 221997 - DNA, 25 bp, Probe Sequence
gaagcgcgaggcatgggtgcgcgaa

SEQ ID NO: 221998 - DNA, 25 bp, Probe Sequence
gaagcagcagatcagtgggatgagg

SEQ ID NO: 221999 - DNA, 25 bp, Probe Sequence
gaagcatcaatgatcttggatgggc

SEQ ID NO: 222000 - DNA, 25 bp, Probe Sequence
gaagctcaagtctataaagggccag

SEQ ID NO: 222001 - DNA, 25 bp, Probe Sequence
gaagcgagaccttagaaggcagcgc

SEQ ID NO: 222002 - DNA, 25 bp, Probe Sequence
gaacgattctgccacagaaggcatc

SEQ ID NO: 222003 - DNA, 25 bp, Probe Sequence
gaagcgagctctgcataaaccagca

SEQ ID NO: 222004 - DNA, 25 bp, Probe Sequence
gaagcagactgcatgataaacggaa

SEQ ID NO: 222005 - DNA, 25 bp, Probe Sequence
gaagcagagctggttcaagaaggaa

SEQ ID NO: 222006 - DNA, 25 bp, Probe Sequence
gaagcagatgcttttcaggtatcaa

SEQ ID NO: 222007 - DNA, 25 bp, Probe Sequence
gaagcacacaatttccaggatgctg

SEQ ID NO: 222008 - DNA, 25 bp, Probe Sequence
gaagcagccaaatcacagtgggtgt

SEQ ID NO: 222009 - DNA, 25 bp, Probe Sequence
gaagcagccagatgaggcggtgagc

SEQ ID NO: 222010 - DNA, 25 bp, Probe Sequence
gaagcagcactgcagaggcttgtgg

SEQ ID NO: 222011 - DNA, 25 bp, Probe Sequence
gaagctgcagctcagagtttttatc

SEQ ID NO: 222012 - DNA, 25 bp, Probe Sequence
gaagcggttcattgctattattgca

SEQ ID NO: 222013 - DNA, 25 bp, Probe Sequence
gaagcttgattctgtgattgaattc

SEQ ID NO: 222014 - DNA, 25 bp, Probe Sequence
gaacgtgcaggtgtttgaattccag

SEQ ID NO: 222015 - DNA, 25 bp, Probe Sequence
gaacctgaaggcattttttccagag

SEQ ID NO: 222016 - DNA, 25 bp, Probe Sequence
gaagccaaagatgttttttattcag

SEQ ID NO: 222017 - DNA, 25 bp, Probe Sequence
gaagccacaattgttattgctgaga

SEQ ID NO: 222018 - DNA, 25 bp, Probe Sequence
gaagccgacaagatgtttctgagaa

SEQ ID NO: 222019 - DNA, 25 bp, Probe Sequence
gaagcctgcaaacgttgtcatcgaa

SEQ ID NO: 222020 - DNA, 25 bp, Probe Sequence
gaagctctctaactttgatactcat

SEQ ID NO: 222021 - DNA, 25 bp, Probe Sequence
gaacgattcgagccttacactctat

SEQ ID NO: 222022 - DNA, 25 bp, Probe Sequence
gaaccacaagagacttgacctcctg

SEQ ID NO: 222023 - DNA, 25 bp, Probe Sequence
gaagccacaatgttcttggcccatc

SEQ ID NO: 222024 - DNA, 25 bp, Probe Sequence
gaagccagacttcatggtcactctg

SEQ ID NO: 222025 - DNA, 25 bp, Probe Sequence
gaagctacacatttgggtaatctag

SEQ ID NO: 222026 - DNA, 25 bp, Probe Sequence
gaactgacacaaggtgcttaatttt

SEQ ID NO: 222027 - DNA, 25 bp, Probe Sequence
gaagctgacacaccgtatgttgtta

SEQ ID NO: 222028 - DNA, 25 bp, Probe Sequence
gaagctcaacacctaaattattaat

SEQ ID NO: 222029 - DNA, 25 bp, Probe Sequence
gaaccaacccaaatgtccaacaatg

SEQ ID NO: 222030 - DNA, 25 bp, Probe Sequence
gaaccaacccaaatgtccaacaatg

SEQ ID NO: 222031 - DNA, 25 bp, Probe Sequence
gaaccacccctaagcatgttacaag

SEQ ID NO: 222032 - DNA, 25 bp, Probe Sequence
gaaccacgatatgaagattccaaat

SEQ ID NO: 222033 - DNA, 25 bp, Probe Sequence
gaagccaagccaggaaacaccaaga

SEQ ID NO: 222034 - DNA, 25 bp, Probe Sequence
gaagctgatacctgaagcactccca

SEQ ID NO: 222035 - DNA, 25 bp, Probe Sequence
gaagcttacgttcatgtcaaccaat

SEQ ID NO: 222036 - DNA, 25 bp, Probe Sequence
gaagctgtaccaacaagatgcaaaa

SEQ ID NO: 222037 - DNA, 25 bp, Probe Sequence
gaagctgaagcctgcacagtgtcca

SEQ ID NO: 222038 - DNA, 25 bp, Probe Sequence
gaagcataagcttcccatttcacaa

SEQ ID NO: 222039 - DNA, 25 bp, Probe Sequence
gaagctgatacttctccttttgctc

SEQ ID NO: 222040 - DNA, 25 bp, Probe Sequence
gaagcatttcatttgcacatctttc

SEQ ID NO: 222041 - DNA, 25 bp, Probe Sequence
gaagctgagtcttctgcatcagatt

SEQ ID NO: 222042 - DNA, 25 bp, Probe Sequence
gaagctgactgccctggcagatttg

SEQ ID NO: 222043 - DNA, 25 bp, Probe Sequence
gaagctgaatgtcctcactttgtgg

SEQ ID NO: 222044 - DNA, 25 bp, Probe Sequence
gaagctgaatgggtccgttggcaca

SEQ ID NO: 222045 - DNA, 25 bp, Probe Sequence
gaagctgaaggttcctatcatcgac

SEQ ID NO: 222046 - DNA, 25 bp, Probe Sequence
gaagctgataggaccttgatatata

SEQ ID NO: 222047 - DNA, 25 bp, Probe Sequence
gaagctgaagggaggaaatgttaca

SEQ ID NO: 222048 - DNA, 25 bp, Probe Sequence
gaagcctgggcctggaaatgtctaa

SEQ ID NO: 222049 - DNA, 25 bp, Probe Sequence
gaacctggcaactgaatgccttcca

SEQ ID NO: 222050 - DNA, 25 bp, Probe Sequence
gaacctagcacccgagattctatgt

SEQ ID NO: 222051 - DNA, 25 bp, Probe Sequence
gaacctaccacagagaatctatccc

SEQ ID NO: 222052 - DNA, 25 bp, Probe Sequence
gaacctaccagttggccatgatgtc

SEQ ID NO: 222053 - DNA, 25 bp, Probe Sequence
gaagcctactggagagtcaggactt

SEQ ID NO: 222054 - DNA, 25 bp, Probe Sequence
gaagccttgtacagagctgggatcc

SEQ ID NO: 222055 - DNA, 25 bp, Probe Sequence
gaagctgtatggctggagcgtggtc

SEQ ID NO: 222056 - DNA, 25 bp, Probe Sequence
gaagctggggtcagagctgccaggc

SEQ ID NO: 222057 - DNA, 25 bp, Probe Sequence
gaagcttggggactgactccagagc

SEQ ID NO: 222058 - DNA, 25 bp, Probe Sequence
gaagcttgccagcaaggccaaagca

SEQ ID NO: 222059 - DNA, 25 bp, Probe Sequence
gaagctctggtgcaaaccaaggacc

SEQ ID NO: 222060 - DNA, 25 bp, Probe Sequence
gaagctctggtgcaaaccaaggacc

SEQ ID NO: 222061 - DNA, 25 bp, Probe Sequence
gaactggcactccaaactaagggct

SEQ ID NO: 222062 - DNA, 25 bp, Probe Sequence
gaacagtactccacaaacatgggtg

SEQ ID NO: 222063 - DNA, 25 bp, Probe Sequence
gaagccatttcagacaagacaggag

SEQ ID NO: 222064 - DNA, 25 bp, Probe Sequence
gaagctccactacacaaggcagcaa

SEQ ID NO: 222065 - DNA, 25 bp, Probe Sequence
gaagctccctagtgagaggataaat

SEQ ID NO: 222066 - DNA, 25 bp, Probe Sequence
gaagcatcacccaaggatattgtaa

SEQ ID NO: 222067 - DNA, 25 bp, Probe Sequence
gaagcgccactcaagttcttttaac

SEQ ID NO: 222068 - DNA, 25 bp, Probe Sequence
gaagctgtccataaattgctgactt

SEQ ID NO: 222069 - DNA, 25 bp, Probe Sequence
gaagctgatgcctcatttctacatt

SEQ ID NO: 222070 - DNA, 25 bp, Probe Sequence
gaagctgtacccaatttaattccat

SEQ ID NO: 222071 - DNA, 25 bp, Probe Sequence
gaagcgtagccggattatgaaatgc

SEQ ID NO: 222072 - DNA, 25 bp, Probe Sequence
gaacgtggccgaggttgacaaggtc

SEQ ID NO: 222073 - DNA, 25 bp, Probe Sequence
gaacctatcggctgtttgcagtggt

SEQ ID NO: 222074 - DNA, 25 bp, Probe Sequence
gaacctagaaaacatccagtggatt

SEQ ID NO: 222075 - DNA, 25 bp, Probe Sequence
gaacctgagccaaacttccagttat

SEQ ID NO: 222076 - DNA, 25 bp, Probe Sequence
gaagctctgcaggatatagcccgga

SEQ ID NO: 222077 - DNA, 25 bp, Probe Sequence
gaagcttcagaaaccgtgggaccag

SEQ ID NO: 222078 - DNA, 25 bp, Probe Sequence
gaacttagaagggcgtggcctctga

SEQ ID NO: 222079 - DNA, 25 bp, Probe Sequence
gaacttaactatcggctttcttact

SEQ ID NO: 222080 - DNA, 25 bp, Probe Sequence
gaagcttaagtgaggatttccttgc

SEQ ID NO: 222081 - DNA, 25 bp, Probe Sequence
gaagccaaggtgagaagttcacttg

SEQ ID NO: 222082 - DNA, 25 bp, Probe Sequence
gaaccacaggacgggaactactttg

SEQ ID NO: 222083 - DNA, 25 bp, Probe Sequence
gaagcccaggacgattcagaaactg

SEQ ID NO: 222084 - DNA, 25 bp, Probe Sequence
gaacccgtatacataaaatctagac

SEQ ID NO: 222085 - DNA, 25 bp, Probe Sequence
gaaccctgtctctaccaaaattaca

SEQ ID NO: 222086 - DNA, 25 bp, Probe Sequence
gaaccctgtctctaccaaaattaca

SEQ ID NO: 222087 - DNA, 25 bp, Probe Sequence
gaaccctttcacttcaaaaactcag

SEQ ID NO: 222088 - DNA, 25 bp, Probe Sequence
gatcccgatttcaccaggaaactgt

SEQ ID NO: 222089 - DNA, 25 bp, Probe Sequence
gacatccagtgtacctacggaaatc

SEQ ID NO: 222090 - DNA, 25 bp, Probe Sequence
gaaccagtgtgagcgagtctaataa

SEQ ID NO: 222091 - DNA, 25 bp, Probe Sequence
gaacgcaaatcagccactttaatta

SEQ ID NO: 222092 - DNA, 25 bp, Probe Sequence
gaacccgtcactattttagattcct

SEQ ID NO: 222093 - DNA, 25 bp, Probe Sequence
gaaccagggcctggtttctcaggac

SEQ ID NO: 222094 - DNA, 25 bp, Probe Sequence
gaaccgtgaggatgttgactacgca

SEQ ID NO: 222095 - DNA, 25 bp, Probe Sequence
gaacctgtaggatcttatttggaat

SEQ ID NO: 222096 - DNA, 25 bp, Probe Sequence
gaacctgctcaggaagccttttgat

SEQ ID NO: 222097 - DNA, 25 bp, Probe Sequence
gaactccgaggacacttttgtgggg

SEQ ID NO: 222098 - DNA, 25 bp, Probe Sequence
gaactcctgagtactcaccaggtag

SEQ ID NO: 222099 - DNA, 25 bp, Probe Sequence
gaaccctggtggtccaccattggat

SEQ ID NO: 222100 - DNA, 25 bp, Probe Sequence
gaagcctgtggatgatcaatccttt

SEQ ID NO: 222101 - DNA, 25 bp, Probe Sequence
gaagctggtggatccaatcctttct

SEQ ID NO: 222102 - DNA, 25 bp, Probe Sequence
gaagcttgtgtatccattatcatgt

SEQ ID NO: 222103 - DNA, 25 bp, Probe Sequence
gaagctcctggatgccttaaaaaat

SEQ ID NO: 222104 - DNA, 25 bp, Probe Sequence
gaagcccgaatgaccctagaaacga

SEQ ID NO: 222105 - DNA, 25 bp, Probe Sequence
gaagctgccgaaatgctattagcaa

SEQ ID NO: 222106 - DNA, 25 bp, Probe Sequence
gaagctgctcagtttgtggcgaata

SEQ ID NO: 222107 - DNA, 25 bp, Probe Sequence
gaagctgcatgtgtttgacgcaaac

SEQ ID NO: 222108 - DNA, 25 bp, Probe Sequence
gaagctgagtttctgtccaatgagc

SEQ ID NO: 222109 - DNA, 25 bp, Probe Sequence
gaagctgagtttctgtccaatgagc

SEQ ID NO: 222110 - DNA, 25 bp, Probe Sequence
gaagctgttctcaggatcactgggc

SEQ ID NO: 222111 - DNA, 25 bp, Probe Sequence
gaagctttcgggaagcctggacgtc

SEQ ID NO: 222112 - DNA, 25 bp, Probe Sequence
gaacctttctgtgacattggaagtc

SEQ ID NO: 222113 - DNA, 25 bp, Probe Sequence
gaaccttatcttcattgtgctggag

SEQ ID NO: 222114 - DNA, 25 bp, Probe Sequence
gaagctcttatctttggtggctgtg

SEQ ID NO: 222115 - DNA, 25 bp, Probe Sequence
gaagccttatcgatgcattgaatgt

SEQ ID NO: 222116 - DNA, 25 bp, Probe Sequence
gaagcctgcaaccagtgcaagaaag

SEQ ID NO: 222117 - DNA, 25 bp, Probe Sequence
gaacctagagcggtgacatgaaaat

SEQ ID NO: 222118 - DNA, 25 bp, Probe Sequence
gaacctggagcctgaatacattttc

SEQ ID NO: 222119 - DNA, 25 bp, Probe Sequence
gaaccctggcactggagaattgatt

SEQ ID NO: 222120 - DNA, 25 bp, Probe Sequence
gaaccactggcctagtacaacagag

SEQ ID NO: 222121 - DNA, 25 bp, Probe Sequence
gaagccttggtctaaacaccgagac

SEQ ID NO: 222122 - DNA, 25 bp, Probe Sequence
gaagccattatggtaaacgcccaga

SEQ ID NO: 222123 - DNA, 25 bp, Probe Sequence
gaacctgtctgagaaactctctgaa

SEQ ID NO: 222124 - DNA, 25 bp, Probe Sequence
gaacctactgcaaaaagattgtcca

SEQ ID NO: 222125 - DNA, 25 bp, Probe Sequence
gaagctcttctaaaaaatgatacac

SEQ ID NO: 222126 - DNA, 25 bp, Probe Sequence
gaagccctcattaaccatttcaatc

SEQ ID NO: 222127 - DNA, 25 bp, Probe Sequence
gaagccctctacagactgagtctat

SEQ ID NO: 222128 - DNA, 25 bp, Probe Sequence
gaagccctgctggtaagagagttgt

SEQ ID NO: 222129 - DNA, 25 bp, Probe Sequence
gaagcccctctaaagagatctcgac

SEQ ID NO: 222130 - DNA, 25 bp, Probe Sequence
gaactgacctctaaagcagcgtgag

SEQ ID NO: 222131 - DNA, 25 bp, Probe Sequence
gaagctctgcccaaacaatctgtgg

SEQ ID NO: 222132 - DNA, 25 bp, Probe Sequence
gaagctctgcccaaacaatctgtgg

SEQ ID NO: 222133 - DNA, 25 bp, Probe Sequence
gaagctgccaccacaatagcttgtg

SEQ ID NO: 222134 - DNA, 25 bp, Probe Sequence
gaagcatcttcctcagaagatctgg

SEQ ID NO: 222135 - DNA, 25 bp, Probe Sequence
gaagcatttctatagatagttgtgc

SEQ ID NO: 222136 - DNA, 25 bp, Probe Sequence
gaagcatttctgatactttctgtca

SEQ ID NO: 222137 - DNA, 25 bp, Probe Sequence
gaagcatttggcatttatttgtgag

SEQ ID NO: 222138 - DNA, 25 bp, Probe Sequence
gaagctgctggggccatgtttttag

SEQ ID NO: 222139 - DNA, 25 bp, Probe Sequence
gaagctggtggtccttgattgtgga

SEQ ID NO: 222140 - DNA, 25 bp, Probe Sequence
gaagctggtcagttttacagtgaga

SEQ ID NO: 222141 - DNA, 25 bp, Probe Sequence
gaagctgaaatgtcacttcaaggag

SEQ ID NO: 222142 - DNA, 25 bp, Probe Sequence
gaagcatcaacctacttagaagctg

SEQ ID NO: 222143 - DNA, 25 bp, Probe Sequence
gaagctgctaactaccaagacacta

SEQ ID NO: 222144 - DNA, 25 bp, Probe Sequence
gaacctcatatctcacacaaattga

SEQ ID NO: 222145 - DNA, 25 bp, Probe Sequence
gaagcccatgatgacccaaactggc

SEQ ID NO: 222146 - DNA, 25 bp, Probe Sequence
gaagcatgtctagtgtctccaaact

SEQ ID NO: 222147 - DNA, 25 bp, Probe Sequence
gaagctgtctgagcagctcggaatt

SEQ ID NO: 222148 - DNA, 25 bp, Probe Sequence
gaagcctgcagaatactcttgcaat

SEQ ID NO: 222149 - DNA, 25 bp, Probe Sequence
gaaccaggcataattttatgatggc

SEQ ID NO: 222150 - DNA, 25 bp, Probe Sequence
gaaccagatcactatgttgtagttg

SEQ ID NO: 222151 - DNA, 25 bp, Probe Sequence
gaaccacataattcttgggtttccg

SEQ ID NO: 222152 - DNA, 25 bp, Probe Sequence
gaacctgaagatgttcgcgattatc

SEQ ID NO: 222153 - DNA, 25 bp, Probe Sequence
gaagcttgtaggggtctgggtctgc

SEQ ID NO: 222154 - DNA, 25 bp, Probe Sequence
gaagcttttggacttcggcagtctg

SEQ ID NO: 222155 - DNA, 25 bp, Probe Sequence
gaacccttggagccaatggagactg

SEQ ID NO: 222156 - DNA, 25 bp, Probe Sequence
gaagcccgtgtgagaagtgaatgct

SEQ ID NO: 222157 - DNA, 25 bp, Probe Sequence
gaagccagcagtgtggaggtgacgt

SEQ ID NO: 222158 - DNA, 25 bp, Probe Sequence
gaagcctcagtggtggaattccagg

SEQ ID NO: 222159 - DNA, 25 bp, Probe Sequence
gaacctaggcttggaattcacactg

SEQ ID NO: 222160 - DNA, 25 bp, Probe Sequence
gaacctggactgaagaaccacctag

SEQ ID NO: 222161 - DNA, 25 bp, Probe Sequence
gaacctgcagatgaaggaacagcct

SEQ ID NO: 222162 - DNA, 25 bp, Probe Sequence
gaacatcagccatacggaacctgct

SEQ ID NO: 222163 - DNA, 25 bp, Probe Sequence
gaagctagctcatccctgaatattt

SEQ ID NO: 222164 - DNA, 25 bp, Probe Sequence
gaagctgcccatccgcagtaatatc

SEQ ID NO: 222165 - DNA, 25 bp, Probe Sequence
gaacaggccattggcagggtcaccc

SEQ ID NO: 222166 - DNA, 25 bp, Probe Sequence
gaagccatgtatatgtggttcaccc

SEQ ID NO: 222167 - DNA, 25 bp, Probe Sequence
gaagccatgtacatgcagtgcccag

SEQ ID NO: 222168 - DNA, 25 bp, Probe Sequence
gaagcatttacaggcaatgtacagc

SEQ ID NO: 222169 - DNA, 25 bp, Probe Sequence
gaagcttttccaagtgtgagcgccc

SEQ ID NO: 222170 - DNA, 25 bp, Probe Sequence
gaagctgtatgacattgatgtggcc

SEQ ID NO: 222171 - DNA, 25 bp, Probe Sequence
gaagcttatgagtactgttgatccc

SEQ ID NO: 222172 - DNA, 25 bp, Probe Sequence
gaagcttgctggtagcacttgctac

SEQ ID NO: 222173 - DNA, 25 bp, Probe Sequence
gaagctcgttaccagcttctgtcgc

SEQ ID NO: 222174 - DNA, 25 bp, Probe Sequence
gaagcctgcttaaactgtgtgatgt

SEQ ID NO: 222175 - DNA, 25 bp, Probe Sequence
gaagctcttcatgaactgatcgaca

SEQ ID NO: 222176 - DNA, 25 bp, Probe Sequence
gaagctgtggcaaaagctgataagc

SEQ ID NO: 222177 - DNA, 25 bp, Probe Sequence
gaactgggccaagctgtgcaaggac

SEQ ID NO: 222178 - DNA, 25 bp, Probe Sequence
gaactggggtaagggcaggagccag

SEQ ID NO: 222179 - DNA, 25 bp, Probe Sequence
gaagcggtggtagcggaggctgtag

SEQ ID NO: 222180 - DNA, 25 bp, Probe Sequence
gaagcggtcaaaccgggtggtgcga

SEQ ID NO: 222181 - DNA, 25 bp, Probe Sequence
gaagctttcaaagccaggacttcta

SEQ ID NO: 222182 - DNA, 25 bp, Probe Sequence
gaagcgtttatagaaggatcatttg

SEQ ID NO: 222183 - DNA, 25 bp, Probe Sequence
gaagcggttatagccattgacattg

SEQ ID NO: 222184 - DNA, 25 bp, Probe Sequence
gaagctggttatatccaaactggtg

SEQ ID NO: 222185 - DNA, 25 bp, Probe Sequence
gaagctggttatatccaaactggtg

SEQ ID NO: 222186 - DNA, 25 bp, Probe Sequence
gaagcggtggaagccaaacaggtgg

SEQ ID NO: 222187 - DNA, 25 bp, Probe Sequence
gattcgggcgaagacaaacggatgc

SEQ ID NO: 222188 - DNA, 25 bp, Probe Sequence
gaacgcggaaggatcataacggagc

SEQ ID NO: 222189 - DNA, 25 bp, Probe Sequence
gaaccgagaagagtttaggggcagg

SEQ ID NO: 222190 - DNA, 25 bp, Probe Sequence
gaagccaaagaagattggggggtat

SEQ ID NO: 222191 - DNA, 25 bp, Probe Sequence
gaagccaaggaagagtcggaggagt

SEQ ID NO: 222192 - DNA, 25 bp, Probe Sequence
gaagccaagtggggtgctgggagga

SEQ ID NO: 222193 - DNA, 25 bp, Probe Sequence
gaagccggggagggcagttgaggac

SEQ ID NO: 222194 - DNA, 25 bp, Probe Sequence
gaaccagggaggggcagggcaaggc

SEQ ID NO: 222195 - DNA, 25 bp, Probe Sequence
gaacctgggaagacctggcaggagg

SEQ ID NO: 222196 - DNA, 25 bp, Probe Sequence
gaacctgggaagtcgaggctgcaag

SEQ ID NO: 222197 - DNA, 25 bp, Probe Sequence
gaacctgggaagtcgaggctgcaag

SEQ ID NO: 222198 - DNA, 25 bp, Probe Sequence
gaagcctgggagaagctgacccggg

SEQ ID NO: 222199 - DNA, 25 bp, Probe Sequence
gaaccggagagccagctaaggggtg

SEQ ID NO: 222200 - DNA, 25 bp, Probe Sequence
gaagcggagagagccaagacggagg

SEQ ID NO: 222201 - DNA, 25 bp, Probe Sequence
gaagctggaggaggccgagaaggcg

SEQ ID NO: 222202 - DNA, 25 bp, Probe Sequence
gaagctggaggaggccgagaaggcg

SEQ ID NO: 222203 - DNA, 25 bp, Probe Sequence
gaagctgccaagcagggagaacctg

SEQ ID NO: 222204 - DNA, 25 bp, Probe Sequence
gaagcgccagaaacgagagaacgat

SEQ ID NO: 222205 - DNA, 25 bp, Probe Sequence
gaagcccaacatagacgagacacca

SEQ ID NO: 222206 - DNA, 25 bp, Probe Sequence
gaagctgactagagacagcaaaata

SEQ ID NO: 222207 - DNA, 25 bp, Probe Sequence
gaagctcaccagaacaagctagaag

SEQ ID NO: 222208 - DNA, 25 bp, Probe Sequence
gaagctacacatagaacaacatgac

SEQ ID NO: 222209 - DNA, 25 bp, Probe Sequence
gaagccaactagccaacacagagcc

SEQ ID NO: 222210 - DNA, 25 bp, Probe Sequence
gaagccaatcaactatacacaatac

SEQ ID NO: 222211 - DNA, 25 bp, Probe Sequence
gaagcgcagtcacctgaaacgagac

SEQ ID NO: 222212 - DNA, 25 bp, Probe Sequence
gaacgcagtacgaaagcggaagggg

SEQ ID NO: 222213 - DNA, 25 bp, Probe Sequence
gaaccagtactatcagaaccagggc

SEQ ID NO: 222214 - DNA, 25 bp, Probe Sequence
gaaccagtactatcagaaccagggc

SEQ ID NO: 222215 - DNA, 25 bp, Probe Sequence
gaaccagtactatcagaaccagggc

SEQ ID NO: 222216 - DNA, 25 bp, Probe Sequence
gaaccgttcgtcgagaactcagtct

SEQ ID NO: 222217 - DNA, 25 bp, Probe Sequence
gaaacgcccctggcaaacatcaggt

SEQ ID NO: 222218 - DNA, 25 bp, Probe Sequence
gaacagcccctggatgctaacaggg

SEQ ID NO: 222219 - DNA, 25 bp, Probe Sequence
gaacacccctgactctggagtggtg

SEQ ID NO: 222220 - DNA, 25 bp, Probe Sequence
gaaccaacctacggatgactcgtgc

SEQ ID NO: 222221 - DNA, 25 bp, Probe Sequence
gaaccaaagttctgataccttgttt

SEQ ID NO: 222222 - DNA, 25 bp, Probe Sequence
gaagccccgtttgtaagcgtgtgtt

SEQ ID NO: 222223 - DNA, 25 bp, Probe Sequence
gaacctgggtgtattaactttgtgt

SEQ ID NO: 222224 - DNA, 25 bp, Probe Sequence
gaagccagggtgttctaaactcttt

SEQ ID NO: 222225 - DNA, 25 bp, Probe Sequence
gaaccaggggctgtaatggcctttc

SEQ ID NO: 222226 - DNA, 25 bp, Probe Sequence
gaaccagaaggaatttagccctact

SEQ ID NO: 222227 - DNA, 25 bp, Probe Sequence
gaaccagaggagttcttgaccccaa

SEQ ID NO: 222228 - DNA, 25 bp, Probe Sequence
gaagccgaggcagttgttgaaacca

SEQ ID NO: 222229 - DNA, 25 bp, Probe Sequence
gaagcctctggcactgatgtgaaac

SEQ ID NO: 222230 - DNA, 25 bp, Probe Sequence
gaagccatccgcagtgaaagacagt

SEQ ID NO: 222231 - DNA, 25 bp, Probe Sequence
gaagcctccctcagagacaaagtca

SEQ ID NO: 222232 - DNA, 25 bp, Probe Sequence
gaacctcctagcactgtgaaagtca

SEQ ID NO: 222233 - DNA, 25 bp, Probe Sequence
gaagcctcctaccctggaaagatta

SEQ ID NO: 222234 - DNA, 25 bp, Probe Sequence
gaagcctcctaccctggaaagatta

SEQ ID NO: 222235 - DNA, 25 bp, Probe Sequence
gaagcctcctaccctggaaagatta

SEQ ID NO: 222236 - DNA, 25 bp, Probe Sequence
gaagctcaccttcgacgaggaagct

SEQ ID NO: 222237 - DNA, 25 bp, Probe Sequence
gaagctcaccttcgacgaggaagct

SEQ ID NO: 222238 - DNA, 25 bp, Probe Sequence
gaagctgactccattctgggaacgc

SEQ ID NO: 222239 - DNA, 25 bp, Probe Sequence
gaagctgtgcccttttaggatacgt

SEQ ID NO: 222240 - DNA, 25 bp, Probe Sequence
gaagcggccatggtttgcaggagac

SEQ ID NO: 222241 - DNA, 25 bp, Probe Sequence
gaagctgggcagcctggtggagaac

SEQ ID NO: 222242 - DNA, 25 bp, Probe Sequence
gaacatgtggcgttgtgctgtggac

SEQ ID NO: 222243 - DNA, 25 bp, Probe Sequence
gaagcctgagcaggtctctgtgggc

SEQ ID NO: 222244 - DNA, 25 bp, Probe Sequence
gaagcctgacaggaccggtgtggtc

SEQ ID NO: 222245 - DNA, 25 bp, Probe Sequence
gaagcctgaacccgggtgatggctg

SEQ ID NO: 222246 - DNA, 25 bp, Probe Sequence
gaagctaaatcccactggggctgct

SEQ ID NO: 222247 - DNA, 25 bp, Probe Sequence
gaagctaaatgctccctatgttgct

SEQ ID NO: 222248 - DNA, 25 bp, Probe Sequence
gaagctaagcactgctgcctagtct

SEQ ID NO: 222249 - DNA, 25 bp, Probe Sequence
gaagctaatcactggcaggagcctg

SEQ ID NO: 222250 - DNA, 25 bp, Probe Sequence
gaagctaatcattctgaaggacaag

SEQ ID NO: 222251 - DNA, 25 bp, Probe Sequence
gaagcctatcttggaatgggaaacc

SEQ ID NO: 222252 - DNA, 25 bp, Probe Sequence
gaaccttttcacaatagggagagcc

SEQ ID NO: 222253 - DNA, 25 bp, Probe Sequence
gaagcgcttttccacaatggcaagg

SEQ ID NO: 222254 - DNA, 25 bp, Probe Sequence
gaagctgctcgctcagaaatacaag

SEQ ID NO: 222255 - DNA, 25 bp, Probe Sequence
gaagctgctcgctcagaaatacaag

SEQ ID NO: 222256 - DNA, 25 bp, Probe Sequence
gaagctgtgcagtataaaactcaag

SEQ ID NO: 222257 - DNA, 25 bp, Probe Sequence
gaagctgatgcacagggagcaccaa

SEQ ID NO: 222258 - DNA, 25 bp, Probe Sequence
gaactggtctcactggaaccagaac

SEQ ID NO: 222259 - DNA, 25 bp, Probe Sequence
gaactgttccagatacattaaaggc

SEQ ID NO: 222260 - DNA, 25 bp, Probe Sequence
gaacttgtaagtgacaaacttggct

SEQ ID NO: 222261 - DNA, 25 bp, Probe Sequence
gaagctaaaagtgtcaagcgttgac

SEQ ID NO: 222262 - DNA, 25 bp, Probe Sequence
gaacccaaattcccaagtgttgagc

SEQ ID NO: 222263 - DNA, 25 bp, Probe Sequence
gaacccagaatctttgagggtaagg

SEQ ID NO: 222264 - DNA, 25 bp, Probe Sequence
gaactctcacgttcttgggtgaaat

SEQ ID NO: 222265 - DNA, 25 bp, Probe Sequence
gaagctctaggttcagcggaggtaa

SEQ ID NO: 222266 - DNA, 25 bp, Probe Sequence
gaagctggattgatacggggaaaac

SEQ ID NO: 222267 - DNA, 25 bp, Probe Sequence
gaagctggatttgagactggaggac

SEQ ID NO: 222268 - DNA, 25 bp, Probe Sequence
gaagctgagcctgctagactgagtg

SEQ ID NO: 222269 - DNA, 25 bp, Probe Sequence
gaagctgttgcttgcatacagggct

SEQ ID NO: 222270 - DNA, 25 bp, Probe Sequence
gaagctgtgtgcggaccaggagtgc

SEQ ID NO: 222271 - DNA, 25 bp, Probe Sequence
gaactgttgccgttattacatcaga

SEQ ID NO: 222272 - DNA, 25 bp, Probe Sequence
gacacttagccgctgtctcgccgtg

SEQ ID NO: 222273 - DNA, 25 bp, Probe Sequence
gaactcatacttgggattaccaggt

SEQ ID NO: 222274 - DNA, 25 bp, Probe Sequence
gaaccaacaaagacctatcctggtg

SEQ ID NO: 222275 - DNA, 25 bp, Probe Sequence
gaacccaaagagacccttcgagaag

SEQ ID NO: 222276 - DNA, 25 bp, Probe Sequence
gaacccaaaagactaaattgatcaa

SEQ ID NO: 222277 - DNA, 25 bp, Probe Sequence
gaaccatcaatatgactacacattt

SEQ ID NO: 222278 - DNA, 25 bp, Probe Sequence
gaagcgcatctttcagattcacaca

SEQ ID NO: 222279 - DNA, 25 bp, Probe Sequence
gaagcgcatctttcagattcacaca

SEQ ID NO: 222280 - DNA, 25 bp, Probe Sequence
gaaccatgcatgaacagtatcagtc

SEQ ID NO: 222281 - DNA, 25 bp, Probe Sequence
gaacgaatggaagatggtctcacca

SEQ ID NO: 222282 - DNA, 25 bp, Probe Sequence
gaacgatgggaacagggccaggctg

SEQ ID NO: 222283 - DNA, 25 bp, Probe Sequence
gaacgtggtgaagacaggccgagtg

SEQ ID NO: 222284 - DNA, 25 bp, Probe Sequence
gaagcgggtggaaaatcccgcagtc

SEQ ID NO: 222285 - DNA, 25 bp, Probe Sequence
gaagcccgtgaaaaattgctccgtc

SEQ ID NO: 222286 - DNA, 25 bp, Probe Sequence
gaagctctcttgaaataattgtctc

SEQ ID NO: 222287 - DNA, 25 bp, Probe Sequence
gaagctgtcttttatcattagaaca

SEQ ID NO: 222288 - DNA, 25 bp, Probe Sequence
gaagctgttctcattaaacaccaaa

SEQ ID NO: 222289 - DNA, 25 bp, Probe Sequence
gaagctgtgtctttagacaaccctg

SEQ ID NO: 222290 - DNA, 25 bp, Probe Sequence
gaagcctttgtatgacagacccatg

SEQ ID NO: 222291 - DNA, 25 bp, Probe Sequence
gaaccattatgacatggagaccaca

SEQ ID NO: 222292 - DNA, 25 bp, Probe Sequence
gaagctgctttgtgaggtgactcca

SEQ ID NO: 222293 - DNA, 25 bp, Probe Sequence
gaagctgcgttgccaacgtcacatc

SEQ ID NO: 222294 - DNA, 25 bp, Probe Sequence
gaagcgagctggcagaagtctccct

SEQ ID NO: 222295 - DNA, 25 bp, Probe Sequence
gaacggctgcatgaggctgtgttcc

SEQ ID NO: 222296 - DNA, 25 bp, Probe Sequence
gaacgtgctcacatgaggcttcggt

SEQ ID NO: 222297 - DNA, 25 bp, Probe Sequence
gaacggtcaatttgagccgcgtcga

SEQ ID NO: 222298 - DNA, 25 bp, Probe Sequence
gaactgtgtctaagggtcggtcggt

SEQ ID NO: 222299 - DNA, 25 bp, Probe Sequence
gaactggaaaggctgtctggggtct

SEQ ID NO: 222300 - DNA, 25 bp, Probe Sequence
gaagctggaaaccatcattctgaga

SEQ ID NO: 222301 - DNA, 25 bp, Probe Sequence
gaagctgagaagtagcctatctatg

SEQ ID NO: 222302 - DNA, 25 bp, Probe Sequence
gaagctggaatttgcccttctgttt

SEQ ID NO: 222303 - DNA, 25 bp, Probe Sequence
gaagcctgaatgggctcacttttct

SEQ ID NO: 222304 - DNA, 25 bp, Probe Sequence
gaagcggaatgggtactgtctagga

SEQ ID NO: 222305 - DNA, 25 bp, Probe Sequence
gaactgggagtgcgccattccagga

SEQ ID NO: 222306 - DNA, 25 bp, Probe Sequence
gaactgtgggttctctataagtggc

SEQ ID NO: 222307 - DNA, 25 bp, Probe Sequence
gaactgtggcctaattggaaagtgg

SEQ ID NO: 222308 - DNA, 25 bp, Probe Sequence
gaagcctaactttttacacagtggt

SEQ ID NO: 222309 - DNA, 25 bp, Probe Sequence
gaacctgatattattgaacaactgg

SEQ ID NO: 222310 - DNA, 25 bp, Probe Sequence
gaagcctatagaactataactgtct

SEQ ID NO: 222311 - DNA, 25 bp, Probe Sequence
gaagccctggaaaatcgcctgagat

SEQ ID NO: 222312 - DNA, 25 bp, Probe Sequence
gaagccatcgagttaccacctggca

SEQ ID NO: 222313 - DNA, 25 bp, Probe Sequence
gaaccagcagggaacacccagtgcc

SEQ ID NO: 222314 - DNA, 25 bp, Probe Sequence
gaacctgcagaaatacaaggcggcc

SEQ ID NO: 222315 - DNA, 25 bp, Probe Sequence
gaagcctgccagaaaaaggccctcc

SEQ ID NO: 222316 - DNA, 25 bp, Probe Sequence
gaagcctcaagcaagaccagggcct

SEQ ID NO: 222317 - DNA, 25 bp, Probe Sequence
gaagcctgaaattgtgccgtgttgc

SEQ ID NO: 222318 - DNA, 25 bp, Probe Sequence
gaagccaagaaaggctcctgctctc

SEQ ID NO: 222319 - DNA, 25 bp, Probe Sequence
gaagctgtggaaccacatcctcctc

SEQ ID NO: 222320 - DNA, 25 bp, Probe Sequence
gaactgtgtgaacatcagatgcccg

SEQ ID NO: 222321 - DNA, 25 bp, Probe Sequence
gaacggaaagccaaatctcgccaag

SEQ ID NO: 222322 - DNA, 25 bp, Probe Sequence
gaacgtaaaatcatcattttgcaat

SEQ ID NO: 222323 - DNA, 25 bp, Probe Sequence
gaacctcaggaccaacttgtctgaa

SEQ ID NO: 222324 - DNA, 25 bp, Probe Sequence
gaacccagagcatccgatggtagaa

SEQ ID NO: 222325 - DNA, 25 bp, Probe Sequence
gaacccaaatcagcttaggcaaagt

SEQ ID NO: 222326 - DNA, 25 bp, Probe Sequence
gaagccctagagttttagaaatact

SEQ ID NO: 222327 - DNA, 25 bp, Probe Sequence
gaacccagagttattagagacttct

SEQ ID NO: 222328 - DNA, 25 bp, Probe Sequence
gaagcctcagatgtcttttaatctt

SEQ ID NO: 222329 - DNA, 25 bp, Probe Sequence
gaagcctgagtgctcacttaaacac

SEQ ID NO: 222330 - DNA, 25 bp, Probe Sequence
gaacctgtgatgcatccttttcaaa

SEQ ID NO: 222331 - DNA, 25 bp, Probe Sequence
gaagccatgtctcactgtttaaata

SEQ ID NO: 222332 - DNA, 25 bp, Probe Sequence
gaagccttcattgctgatcttgaca

SEQ ID NO: 222333 - DNA, 25 bp, Probe Sequence
gaagcctaccacgatgtcaatgtca

SEQ ID NO: 222334 - DNA, 25 bp, Probe Sequence
gaagccagatacaaatgttagtcag

SEQ ID NO: 222335 - DNA, 25 bp, Probe Sequence
gaagccactgacaattctcatctga

SEQ ID NO: 222336 - DNA, 25 bp, Probe Sequence
gaagccactgacatgacacctgtgt

SEQ ID NO: 222337 - DNA, 25 bp, Probe Sequence
gaagcgtcatactgagcaggtgtct

SEQ ID NO: 222338 - DNA, 25 bp, Probe Sequence
gaagcgtatggccacagaagttgct

SEQ ID NO: 222339 - DNA, 25 bp, Probe Sequence
gaagctgatcatggtcaggtgagtt

SEQ ID NO: 222340 - DNA, 25 bp, Probe Sequence
gaagctgatgcatgtcagaatgatt

SEQ ID NO: 222341 - DNA, 25 bp, Probe Sequence
gaagctgtctgaggcaatcatgatt

SEQ ID NO: 222342 - DNA, 25 bp, Probe Sequence
gaagctgtctgaagaatgcacttta

SEQ ID NO: 222343 - DNA, 25 bp, Probe Sequence
gaagcctgctgcataaactcttaaa

SEQ ID NO: 222344 - DNA, 25 bp, Probe Sequence
gaacctctcagataaccacaataag

SEQ ID NO: 222345 - DNA, 25 bp, Probe Sequence
gaaccataaccatactaccatcaat

SEQ ID NO: 222346 - DNA, 25 bp, Probe Sequence
gaagccatgaattagaactacattc

SEQ ID NO: 222347 - DNA, 25 bp, Probe Sequence
gaaccaacaatagcagctccatttc

SEQ ID NO: 222348 - DNA, 25 bp, Probe Sequence
gaaccaacaatagcagctccatttc

SEQ ID NO: 222349 - DNA, 25 bp, Probe Sequence
gaaccagcgcaagcgccgcaagttc

SEQ ID NO: 222350 - DNA, 25 bp, Probe Sequence
gaagcctggagaccgtggcaagctg

SEQ ID NO: 222351 - DNA, 25 bp, Probe Sequence
gaagcctggaacctggccaagtgtt

SEQ ID NO: 222352 - DNA, 25 bp, Probe Sequence
gaagccaggagtttgagaccagtgt

SEQ ID NO: 222353 - DNA, 25 bp, Probe Sequence
gaaccggcatgctaaggcattactg

SEQ ID NO: 222354 - DNA, 25 bp, Probe Sequence
gaacctgtcagctcaggaccatcag

SEQ ID NO: 222355 - DNA, 25 bp, Probe Sequence
gaagccagtagtacaagagcctaac

SEQ ID NO: 222356 - DNA, 25 bp, Probe Sequence
gaaccaggaatggaaaccatagagc

SEQ ID NO: 222357 - DNA, 25 bp, Probe Sequence
gaaccaggtgctgaatcttctgaga

SEQ ID NO: 222358 - DNA, 25 bp, Probe Sequence
gaaccgggccgttctctcgtgggag

SEQ ID NO: 222359 - DNA, 25 bp, Probe Sequence
gaaccgcggtggcttccgcggaggt

SEQ ID NO: 222360 - DNA, 25 bp, Probe Sequence
gaaaggctgggtcttgggaccttgt

SEQ ID NO: 222361 - DNA, 25 bp, Probe Sequence
gaaccacagggtccctgagggcctt

SEQ ID NO: 222362 - DNA, 25 bp, Probe Sequence
gaactccagtttcactgggcatcct

SEQ ID NO: 222363 - DNA, 25 bp, Probe Sequence
gaaccacaggtaccagatgggctgc

SEQ ID NO: 222364 - DNA, 25 bp, Probe Sequence
gaactcactgatgagcagcttgggc

SEQ ID NO: 222365 - DNA, 25 bp, Probe Sequence
gaagcgcctctaacagcaggcatga

SEQ ID NO: 222366 - DNA, 25 bp, Probe Sequence
gaagccactatacgacaggtaccgg

SEQ ID NO: 222367 - DNA, 25 bp, Probe Sequence
gaagccaaagagaaaggtacctggg

SEQ ID NO: 222368 - DNA, 25 bp, Probe Sequence
gaacgaattcaaaagagaacctggg

SEQ ID NO: 222369 - DNA, 25 bp, Probe Sequence
gaacgttgtacacacaaacctggtg

SEQ ID NO: 222370 - DNA, 25 bp, Probe Sequence
gaaccattttcacctattaccagtg

SEQ ID NO: 222371 - DNA, 25 bp, Probe Sequence
gaagccatccttgtcaatatatttg

SEQ ID NO: 222372 - DNA, 25 bp, Probe Sequence
gaagccatcaagtcttcactcatca

SEQ ID NO: 222373 - DNA, 25 bp, Probe Sequence
gaagccatacagaaatcactccaga

SEQ ID NO: 222374 - DNA, 25 bp, Probe Sequence
gaagccaaaatgaagctctcagaaa

SEQ ID NO: 222375 - DNA, 25 bp, Probe Sequence
gaagcctacaagaagtacatcaaag

SEQ ID NO: 222376 - DNA, 25 bp, Probe Sequence
gaagcctggctacaatactgcacaa

SEQ ID NO: 222377 - DNA, 25 bp, Probe Sequence
gaaccatggctatgagaaccccacc

SEQ ID NO: 222378 - DNA, 25 bp, Probe Sequence
gaactgcatggctatggggattccc

SEQ ID NO: 222379 - DNA, 25 bp, Probe Sequence
gaaccagagtctgtggatgtccctg

SEQ ID NO: 222380 - DNA, 25 bp, Probe Sequence
gaaccaggttcttgcgcgtctatcg

SEQ ID NO: 222381 - DNA, 25 bp, Probe Sequence
gaagccatggttcatcaggtgctct

SEQ ID NO: 222382 - DNA, 25 bp, Probe Sequence
gaaccattcattcatcatttcctga

SEQ ID NO: 222383 - DNA, 25 bp, Probe Sequence
gaagccttcattcaaatgtgccaca

SEQ ID NO: 222384 - DNA, 25 bp, Probe Sequence
gaagccaaacagccaaattctgcca

SEQ ID NO: 222385 - DNA, 25 bp, Probe Sequence
gaagcgccacaagaacatgtctgta

SEQ ID NO: 222386 - DNA, 25 bp, Probe Sequence
gaacctcacagggggcttctgatac

SEQ ID NO: 222387 - DNA, 25 bp, Probe Sequence
gaaccaccatgggtggccactatac

SEQ ID NO: 222388 - DNA, 25 bp, Probe Sequence
gaaccccaagttcagcattctgacc

SEQ ID NO: 222389 - DNA, 25 bp, Probe Sequence
gaagccccagagaatctaactcatg

SEQ ID NO: 222390 - DNA, 25 bp, Probe Sequence
gacctagtatggataaacctgacgt

SEQ ID NO: 222391 - DNA, 25 bp, Probe Sequence
gaactggctgatagtggaatacctg

SEQ ID NO: 222392 - DNA, 25 bp, Probe Sequence
gaacgtcagcagctagagaccctga

SEQ ID NO: 222393 - DNA, 25 bp, Probe Sequence
gaacagtcagcagggtaaaccgatc

SEQ ID NO: 222394 - DNA, 25 bp, Probe Sequence
gaacgtcatcgtttggaaagcgtcg

SEQ ID NO: 222395 - DNA, 25 bp, Probe Sequence
gaacctcctgttaggcaaaggcact

SEQ ID NO: 222396 - DNA, 25 bp, Probe Sequence
gaacctcttgttgggcatgatggca

SEQ ID NO: 222397 - DNA, 25 bp, Probe Sequence
gaacttcttttgaaattggagtcaa

SEQ ID NO: 222398 - DNA, 25 bp, Probe Sequence
gaactttttctctgttaattcctgg

SEQ ID NO: 222399 - DNA, 25 bp, Probe Sequence
gaactagttttatgtcaaacccagg

SEQ ID NO: 222400 - DNA, 25 bp, Probe Sequence
gaaccactgtttcactgcatagtcc

SEQ ID NO: 222401 - DNA, 25 bp, Probe Sequence
gaacctgtgtttcacgtgactcagc

SEQ ID NO: 222402 - DNA, 25 bp, Probe Sequence
gaaccactggttcacctacaatgag

SEQ ID NO: 222403 - DNA, 25 bp, Probe Sequence
gaaccttttctttcactaaagatga

SEQ ID NO: 222404 - DNA, 25 bp, Probe Sequence
gacacgtaaacccttctaaaatcag

SEQ ID NO: 222405 - DNA, 25 bp, Probe Sequence
gaacttaaactcttaccaaaatctg

SEQ ID NO: 222406 - DNA, 25 bp, Probe Sequence
gaactgtgcaaaatctgtaggaaac

SEQ ID NO: 222407 - DNA, 25 bp, Probe Sequence
gaaccctaaatttatggagaccgtg

SEQ ID NO: 222408 - DNA, 25 bp, Probe Sequence
gaagcccctaataaatgaagctgct

SEQ ID NO: 222409 - DNA, 25 bp, Probe Sequence
gaagcccctaataaatgaagctgct

SEQ ID NO: 222410 - DNA, 25 bp, Probe Sequence
gaaccacctgaacaaactggccgag

SEQ ID NO: 222411 - DNA, 25 bp, Probe Sequence
gaaccacctggggaggaggcgggag

SEQ ID NO: 222412 - DNA, 25 bp, Probe Sequence
gaaccacggcggtgaagcagtggga

SEQ ID NO: 222413 - DNA, 25 bp, Probe Sequence
gaaccctgtcggagccaagttcgac

SEQ ID NO: 222414 - DNA, 25 bp, Probe Sequence
gaaccctaatggaggcagttttgag

SEQ ID NO: 222415 - DNA, 25 bp, Probe Sequence
gcggtgcacgaggtggaggtggtca

SEQ ID NO: 222416 - DNA, 25 bp, Probe Sequence
gaacaactgggcctgggatggggct

SEQ ID NO: 222417 - DNA, 25 bp, Probe Sequence
gaacaccggtgcggtgggcagctac

SEQ ID NO: 222418 - DNA, 25 bp, Probe Sequence
gaagcccgagtgggatgcggctgac

SEQ ID NO: 222419 - DNA, 25 bp, Probe Sequence
gaagccctgctgtgctgatgggctc

SEQ ID NO: 222420 - DNA, 25 bp, Probe Sequence
gaagccctgccaacgtgggataagc

SEQ ID NO: 222421 - DNA, 25 bp, Probe Sequence
gaagcgccgctctgagggcgagaag

SEQ ID NO: 222422 - DNA, 25 bp, Probe Sequence
gaagcgtctgcggcagagtggggaa

SEQ ID NO: 222423 - DNA, 25 bp, Probe Sequence
gaactgtctgccgagagcagctgga

SEQ ID NO: 222424 - DNA, 25 bp, Probe Sequence
gaagcgtctgcacagaggctggtat

SEQ ID NO: 222425 - DNA, 25 bp, Probe Sequence
gaagcgtcgaaaaggtcttgattct

SEQ ID NO: 222426 - DNA, 25 bp, Probe Sequence
gaaccctgaagttggtcctgatgtc

SEQ ID NO: 222427 - DNA, 25 bp, Probe Sequence
gaaccctgataccaggagcctgggc

SEQ ID NO: 222428 - DNA, 25 bp, Probe Sequence
gaactttattcatgggctgcggagg

SEQ ID NO: 222429 - DNA, 25 bp, Probe Sequence
gaactattcactgtcgagatggcta

SEQ ID NO: 222430 - DNA, 25 bp, Probe Sequence
gaaccatgtcctggtttgcatggcc

SEQ ID NO: 222431 - DNA, 25 bp, Probe Sequence
gaaccatgtgactttgtcacagccc

SEQ ID NO: 222432 - DNA, 25 bp, Probe Sequence
gaactctgtcacaagttctacctcc

SEQ ID NO: 222433 - DNA, 25 bp, Probe Sequence
gaactttcggctataattccgccaa

SEQ ID NO: 222434 - DNA, 25 bp, Probe Sequence
gaacgttgctggttgaaatcccgag

SEQ ID NO: 222435 - DNA, 25 bp, Probe Sequence
gaagccttctggggcgaattacgga

SEQ ID NO: 222436 - DNA, 25 bp, Probe Sequence
gaacctcgtggggacaattaccgag

SEQ ID NO: 222437 - DNA, 25 bp, Probe Sequence
gaacctcgtggggcaacatgtaaat

SEQ ID NO: 222438 - DNA, 25 bp, Probe Sequence
gaaccatggagggcccatctggata

SEQ ID NO: 222439 - DNA, 25 bp, Probe Sequence
gaacctggagtactgtatcatggtc

SEQ ID NO: 222440 - DNA, 25 bp, Probe Sequence
gaagcctgctgggagcgtgaatgac

SEQ ID NO: 222441 - DNA, 25 bp, Probe Sequence
gaagccgtctgatgcaggaagatga

SEQ ID NO: 222442 - DNA, 25 bp, Probe Sequence
gaagcgctgcaggaggtggaagatg

SEQ ID NO: 222443 - DNA, 25 bp, Probe Sequence
gaagcgctgcaggacgtggaagacg

SEQ ID NO: 222444 - DNA, 25 bp, Probe Sequence
gaaccacatgtgtgtgggacaccca

SEQ ID NO: 222445 - DNA, 25 bp, Probe Sequence
gaacgtcagttcgtgttgacgccgt

SEQ ID NO: 222446 - DNA, 25 bp, Probe Sequence
gaacgtgcagttcgtgtttgacgcc

SEQ ID NO: 222447 - DNA, 25 bp, Probe Sequence
gaacgtagtgagccttgattatacc

SEQ ID NO: 222448 - DNA, 25 bp, Probe Sequence
gaacttaatcccttcattaacagga

SEQ ID NO: 222449 - DNA, 25 bp, Probe Sequence
gaacctaaccactaccttacagtga

SEQ ID NO: 222450 - DNA, 25 bp, Probe Sequence
gaacttagcctttacctgtgaagtg

SEQ ID NO: 222451 - DNA, 25 bp, Probe Sequence
gaactcaagtcttacgctttgggag

SEQ ID NO: 222452 - DNA, 25 bp, Probe Sequence
gaactgccaacgggctctttggaga

SEQ ID NO: 222453 - DNA, 25 bp, Probe Sequence
gaactgccaacagactctttggaga

SEQ ID NO: 222454 - DNA, 25 bp, Probe Sequence
gaacgccaaactgctctcagtatag

SEQ ID NO: 222455 - DNA, 25 bp, Probe Sequence
gaagccagagaacttttcttattgg

SEQ ID NO: 222456 - DNA, 25 bp, Probe Sequence
gaaccaagccctttatttatctggc

SEQ ID NO: 222457 - DNA, 25 bp, Probe Sequence
gaaccaaatcgtttactgctcttac

SEQ ID NO: 222458 - DNA, 25 bp, Probe Sequence
gaacgcaaacttcgtactttctatg

SEQ ID NO: 222459 - DNA, 25 bp, Probe Sequence
gaaccaaatgtgtctgggcttttca

SEQ ID NO: 222460 - DNA, 25 bp, Probe Sequence
gaaccaattgggtggatttgattct

SEQ ID NO: 222461 - DNA, 25 bp, Probe Sequence
gaaccgtgttggtgctgctaagttt

SEQ ID NO: 222462 - DNA, 25 bp, Probe Sequence
gaacgttcttgtctgtgtacagttt

SEQ ID NO: 222463 - DNA, 25 bp, Probe Sequence
gaaccttcaagcttatcgtaccttc

SEQ ID NO: 222464 - DNA, 25 bp, Probe Sequence
gaacctgctaaggccatcaaaccta

SEQ ID NO: 222465 - DNA, 25 bp, Probe Sequence
gaacctgctaaggccatcaaaccta

SEQ ID NO: 222466 - DNA, 25 bp, Probe Sequence
gaaccatgcaagaagcgcagccacc

SEQ ID NO: 222467 - DNA, 25 bp, Probe Sequence
gaaccataagggggacaccgcctgt

SEQ ID NO: 222468 - DNA, 25 bp, Probe Sequence
gaaccaaatatccaagacccagctc

SEQ ID NO: 222469 - DNA, 25 bp, Probe Sequence
gaaccacataattaaagaccagctg

SEQ ID NO: 222470 - DNA, 25 bp, Probe Sequence
gaacctctacattgtgaagttgcac

SEQ ID NO: 222471 - DNA, 25 bp, Probe Sequence
gaacctatgatctgaagagcgtcct

SEQ ID NO: 222472 - DNA, 25 bp, Probe Sequence
gaactcttgagctggaacctcagca

SEQ ID NO: 222473 - DNA, 25 bp, Probe Sequence
gaaccagctgaggtggagactcgca

SEQ ID NO: 222474 - DNA, 25 bp, Probe Sequence
gaaccctggaggcagacattgcagt

SEQ ID NO: 222475 - DNA, 25 bp, Probe Sequence
gaaccctggaagacgcacatagaaa

SEQ ID NO: 222476 - DNA, 25 bp, Probe Sequence
gaacctccaaatactgccatgagaa

SEQ ID NO: 222477 - DNA, 25 bp, Probe Sequence
gaaccccaactactgtgttatgcaa

SEQ ID NO: 222478 - DNA, 25 bp, Probe Sequence
gaactccccactgaatgtttcataa

SEQ ID NO: 222479 - DNA, 25 bp, Probe Sequence
gaactacgacttgaatgtgatcgat

SEQ ID NO: 222480 - DNA, 25 bp, Probe Sequence
gaactgaccgtagtcactgtatgga

SEQ ID NO: 222481 - DNA, 25 bp, Probe Sequence
gaagccaccatgcaatccagtgagg

SEQ ID NO: 222482 - DNA, 25 bp, Probe Sequence
gaacctctgggatctcagtgaagct

SEQ ID NO: 222483 - DNA, 25 bp, Probe Sequence
gaagcctgtgaattcctcaggaagt

SEQ ID NO: 222484 - DNA, 25 bp, Probe Sequence
gaagccgtataagtatgagccagac

SEQ ID NO: 222485 - DNA, 25 bp, Probe Sequence
gaagccttaaatgagagctaatcca

SEQ ID NO: 222486 - DNA, 25 bp, Probe Sequence
gacagcggtaaagaacatcggacat

SEQ ID NO: 222487 - DNA, 25 bp, Probe Sequence
gacagtgaaaaacaacagcggttgc

SEQ ID NO: 222488 - DNA, 25 bp, Probe Sequence
gaacgaagacactcagccggagttg

SEQ ID NO: 222489 - DNA, 25 bp, Probe Sequence
gaactgggcacctcccaggtgattt

SEQ ID NO: 222490 - DNA, 25 bp, Probe Sequence
gaactacacggctcccgaaagtatg

SEQ ID NO: 222491 - DNA, 25 bp, Probe Sequence
gaactagaaggctgtttgaactttt

SEQ ID NO: 222492 - DNA, 25 bp, Probe Sequence
gaacggagaggtggtgttacgcttt

SEQ ID NO: 222493 - DNA, 25 bp, Probe Sequence
gaacgaggaagggatgctgttggct

SEQ ID NO: 222494 - DNA, 25 bp, Probe Sequence
gaacgggaagctcactggcatggcc

SEQ ID NO: 222495 - DNA, 25 bp, Probe Sequence
gaacgggaatgtctgcctgatgtag

SEQ ID NO: 222496 - DNA, 25 bp, Probe Sequence
gaacctgtgattattctcgcatgat

SEQ ID NO: 222497 - DNA, 25 bp, Probe Sequence
gaagccttcatttaatctctgcagt

SEQ ID NO: 222498 - DNA, 25 bp, Probe Sequence
gaaccttcataatcatgtcgcagtc

SEQ ID NO: 222499 - DNA, 25 bp, Probe Sequence
gaacgcatcttggaactgtcaactc

SEQ ID NO: 222500 - DNA, 25 bp, Probe Sequence
gaaccatttaaagggcaacttatcg

SEQ ID NO: 222501 - DNA, 25 bp, Probe Sequence
gaaccttttataaccaacactagag

SEQ ID NO: 222502 - DNA, 25 bp, Probe Sequence
gaactttgtcattacctataaccgg

SEQ ID NO: 222503 - DNA, 25 bp, Probe Sequence
gaacctcttcacaacagtatcaaca

SEQ ID NO: 222504 - DNA, 25 bp, Probe Sequence
gaacctcttactgctttcaatacac

SEQ ID NO: 222505 - DNA, 25 bp, Probe Sequence
gaacctctaacattggttccaattc

SEQ ID NO: 222506 - DNA, 25 bp, Probe Sequence
gaaccttatcatttatgtttcagta

SEQ ID NO: 222507 - DNA, 25 bp, Probe Sequence
gaacctatctactcgttgttgaaat

SEQ ID NO: 222508 - DNA, 25 bp, Probe Sequence
gaacgtattttttgtgctttgaaga

SEQ ID NO: 222509 - DNA, 25 bp, Probe Sequence
gaaagtagttacagtcgtagtgaca

SEQ ID NO: 222510 - DNA, 25 bp, Probe Sequence
gacgttagggactttcctactggca

SEQ ID NO: 222511 - DNA, 25 bp, Probe Sequence
gaaacttgggaacttccatgaagga

SEQ ID NO: 222512 - DNA, 25 bp, Probe Sequence
gaacctttgcaataacactggggac

SEQ ID NO: 222513 - DNA, 25 bp, Probe Sequence
gaacctgttggctaaccattggggc

SEQ ID NO: 222514 - DNA, 25 bp, Probe Sequence
gaagccaggttgtcaaagatcattt

SEQ ID NO: 222515 - DNA, 25 bp, Probe Sequence
gaaccagggtgacatcaagctctgt

SEQ ID NO: 222516 - DNA, 25 bp, Probe Sequence
gaaccggatgaatataagcaatgaa

SEQ ID NO: 222517 - DNA, 25 bp, Probe Sequence
gaacctgggaaccatgaagctggaa

SEQ ID NO: 222518 - DNA, 25 bp, Probe Sequence
gaacctgggaaccatgaagctggaa

SEQ ID NO: 222519 - DNA, 25 bp, Probe Sequence
gaacgcggccaatgtgggctggaac

SEQ ID NO: 222520 - DNA, 25 bp, Probe Sequence
gaaccgctgccagaatggtgggact

SEQ ID NO: 222521 - DNA, 25 bp, Probe Sequence
gaaccagtccattcacattggaaaa

SEQ ID NO: 222522 - DNA, 25 bp, Probe Sequence
gaagccttcgcttcgaagcgaaaag

SEQ ID NO: 222523 - DNA, 25 bp, Probe Sequence
gaacctgggctaggataggagaaga

SEQ ID NO: 222524 - DNA, 25 bp, Probe Sequence
gaacctgggttcttctgggaagaag

SEQ ID NO: 222525 - DNA, 25 bp, Probe Sequence
gaaccatggtgtggtgttggtaaaa

SEQ ID NO: 222526 - DNA, 25 bp, Probe Sequence
gaaccatggatttatgtctggatca

SEQ ID NO: 222527 - DNA, 25 bp, Probe Sequence
gaactctggaactatccgtgtcaag

SEQ ID NO: 222528 - DNA, 25 bp, Probe Sequence
gacacggtgttctccgagtaagtga

SEQ ID NO: 222529 - DNA, 25 bp, Probe Sequence
gaacggtttcagacctttgaactgg

SEQ ID NO: 222530 - DNA, 25 bp, Probe Sequence
gaacgtcttacaactcagttgtttt

SEQ ID NO: 222531 - DNA, 25 bp, Probe Sequence
gaacgtccaatggggatttgtttct

SEQ ID NO: 222532 - DNA, 25 bp, Probe Sequence
gaaccaccagtccaagaatctgttt

SEQ ID NO: 222533 - DNA, 25 bp, Probe Sequence
gaaccacattgtgcaaaccttctct

SEQ ID NO: 222534 - DNA, 25 bp, Probe Sequence
gaactaaggtgtctaccatgattat

SEQ ID NO: 222535 - DNA, 25 bp, Probe Sequence
gaacgaacgttgtcttcacatgttt

SEQ ID NO: 222536 - DNA, 25 bp, Probe Sequence
gaacgaacgttgtcttcacatgttt

SEQ ID NO: 222537 - DNA, 25 bp, Probe Sequence
gaacgactagtttcatccaattgtt

SEQ ID NO: 222538 - DNA, 25 bp, Probe Sequence
gaacggctcaggattcgtggtggct

SEQ ID NO: 222539 - DNA, 25 bp, Probe Sequence
gaacggctcaggattcgtggtggct

SEQ ID NO: 222540 - DNA, 25 bp, Probe Sequence
gaacggtcagtttaggggctggtgc

SEQ ID NO: 222541 - DNA, 25 bp, Probe Sequence
gaacggttttgaaggaactgacatg

SEQ ID NO: 222542 - DNA, 25 bp, Probe Sequence
gaacggtcgaggacaggaagtgagt

SEQ ID NO: 222543 - DNA, 25 bp, Probe Sequence
gaacgtctcgaagcagtattctagt

SEQ ID NO: 222544 - DNA, 25 bp, Probe Sequence
gaacgtataaaggctgaatctgcag

SEQ ID NO: 222545 - DNA, 25 bp, Probe Sequence
tgaacttaaacagcaggacgagaat

SEQ ID NO: 222546 - DNA, 25 bp, Probe Sequence
gaaccaaaataacgtgaagaacatc

SEQ ID NO: 222547 - DNA, 25 bp, Probe Sequence
gaacccagacttatgtaactacatc

SEQ ID NO: 222548 - DNA, 25 bp, Probe Sequence
gaacccaggttgatgacagaccagt

SEQ ID NO: 222549 - DNA, 25 bp, Probe Sequence
gaactccaatgtttataaagcctgt

SEQ ID NO: 222550 - DNA, 25 bp, Probe Sequence
gaactcttttccaatggaatggtgt

SEQ ID NO: 222551 - DNA, 25 bp, Probe Sequence
gaactctccttattgctgtgaaggg

SEQ ID NO: 222552 - DNA, 25 bp, Probe Sequence
gaactcattttggtggtggcaagac

SEQ ID NO: 222553 - DNA, 25 bp, Probe Sequence
gaaccatctttcctagtgcatgaga

SEQ ID NO: 222554 - DNA, 25 bp, Probe Sequence
gaagccatcattgcatctatgcagg

SEQ ID NO: 222555 - DNA, 25 bp, Probe Sequence
gaagcctgcatatactgtgagctgt

SEQ ID NO: 222556 - DNA, 25 bp, Probe Sequence
gaagcctcataggtagggtgcatgc

SEQ ID NO: 222557 - DNA, 25 bp, Probe Sequence
gaagccaccatactggagaggctgc

SEQ ID NO: 222558 - DNA, 25 bp, Probe Sequence
gaagccacctgaatgtatagtgtga

SEQ ID NO: 222559 - DNA, 25 bp, Probe Sequence
gaagccacctgcatttgtgatttca

SEQ ID NO: 222560 - DNA, 25 bp, Probe Sequence
gaaccactcagcatggtttttgtca

SEQ ID NO: 222561 - DNA, 25 bp, Probe Sequence
gaaccagcacacagggctatttctc

SEQ ID NO: 222562 - DNA, 25 bp, Probe Sequence
gaaccatacatcaggataaggtgtc

SEQ ID NO: 222563 - DNA, 25 bp, Probe Sequence
gaacttgaaactctcatcaggcttc

SEQ ID NO: 222564 - DNA, 25 bp, Probe Sequence
gaactttatactgtccagctctgtt

SEQ ID NO: 222565 - DNA, 25 bp, Probe Sequence
gaaccatttcttatccttcttattc

SEQ ID NO: 222566 - DNA, 25 bp, Probe Sequence
gaacctacatttattttgctttagc

SEQ ID NO: 222567 - DNA, 25 bp, Probe Sequence
gaaccttcagctttttgggctttga

SEQ ID NO: 222568 - DNA, 25 bp, Probe Sequence
gaaccttcgaatggttggaattcca

SEQ ID NO: 222569 - DNA, 25 bp, Probe Sequence
gaaccagtcgaaacccagaaacaga

SEQ ID NO: 222570 - DNA, 25 bp, Probe Sequence
gaactggaagacaaccccaaccaga

SEQ ID NO: 222571 - DNA, 25 bp, Probe Sequence
gaactggtcgaaacattactatcaa

SEQ ID NO: 222572 - DNA, 25 bp, Probe Sequence
gaacgtctccatataatagtttagc

SEQ ID NO: 222573 - DNA, 25 bp, Probe Sequence
gaacctcttcacatagacctattag

SEQ ID NO: 222574 - DNA, 25 bp, Probe Sequence
gaacctctggaaataacctgtatac

SEQ ID NO: 222575 - DNA, 25 bp, Probe Sequence
gaacctctggaaataacctgtatac

SEQ ID NO: 222576 - DNA, 25 bp, Probe Sequence
gaaccttgtacccatgtggtgtaac

SEQ ID NO: 222577 - DNA, 25 bp, Probe Sequence
gaactcttttgtctgtagttaacct

SEQ ID NO: 222578 - DNA, 25 bp, Probe Sequence
gaactttgtggtattacgtcatgtc

SEQ ID NO: 222579 - DNA, 25 bp, Probe Sequence
gaactttggagtactgtttcttcct

SEQ ID NO: 222580 - DNA, 25 bp, Probe Sequence
gaactctactagatgtggtttttct

SEQ ID NO: 222581 - DNA, 25 bp, Probe Sequence
gaacctacatcatggtgttcatttc

SEQ ID NO: 222582 - DNA, 25 bp, Probe Sequence
gaacctaagaacgtgtatgctttgc

SEQ ID NO: 222583 - DNA, 25 bp, Probe Sequence
gaacctgaagatgcgcgggcacttc

SEQ ID NO: 222584 - DNA, 25 bp, Probe Sequence
gaacctgaagatgcgcgggcacttc

SEQ ID NO: 222585 - DNA, 25 bp, Probe Sequence
gaaccgatgagtgaggagaggcgtc

SEQ ID NO: 222586 - DNA, 25 bp, Probe Sequence
gaacctggccttggatggaggcgtc

SEQ ID NO: 222587 - DNA, 25 bp, Probe Sequence
gaacattgaccctgatgcaaaggtg

SEQ ID NO: 222588 - DNA, 25 bp, Probe Sequence
gaactgtacccatgatctcttggtg

SEQ ID NO: 222589 - DNA, 25 bp, Probe Sequence
gaacgaacacaccttctgtgtcggc

SEQ ID NO: 222590 - DNA, 25 bp, Probe Sequence
gaacgaacacaccttctgtgtcggc

SEQ ID NO: 222591 - DNA, 25 bp, Probe Sequence
gaactaataccaatgtttctcaagc

SEQ ID NO: 222592 - DNA, 25 bp, Probe Sequence
gaacctatgactgcagtggatctca

SEQ ID NO: 222593 - DNA, 25 bp, Probe Sequence
gaaccgatacttttggatctcattg

SEQ ID NO: 222594 - DNA, 25 bp, Probe Sequence
gaaccgatacttttggatctcattg

SEQ ID NO: 222595 - DNA, 25 bp, Probe Sequence
gaaccgtgaccgagtgactgcactc

SEQ ID NO: 222596 - DNA, 25 bp, Probe Sequence
gaaccggactccaagatgacgatct

SEQ ID NO: 222597 - DNA, 25 bp, Probe Sequence
gaaccggactccaagatgacgatct

SEQ ID NO: 222598 - DNA, 25 bp, Probe Sequence
gaaccggacctagcatgattgtaag

SEQ ID NO: 222599 - DNA, 25 bp, Probe Sequence
gaaccgagaccttggaatgttccat

SEQ ID NO: 222600 - DNA, 25 bp, Probe Sequence
gaaccagaatccttggaagctctag

SEQ ID NO: 222601 - DNA, 25 bp, Probe Sequence
gaaccagttccgatacagcacaatg

SEQ ID NO: 222602 - DNA, 25 bp, Probe Sequence
gaacacgttccgtcaaacaaagcca

SEQ ID NO: 222603 - DNA, 25 bp, Probe Sequence
gaacctggacatcgccaaagagacc

SEQ ID NO: 222604 - DNA, 25 bp, Probe Sequence
gaacctggacaagaaggcgagctcc

SEQ ID NO: 222605 - DNA, 25 bp, Probe Sequence
gacacccggaaatgaggaccatcac

SEQ ID NO: 222606 - DNA, 25 bp, Probe Sequence
gaacccagtgtaagagaccacccac

SEQ ID NO: 222607 - DNA, 25 bp, Probe Sequence
gaacccaggatcagatcagccagcc

SEQ ID NO: 222608 - DNA, 25 bp, Probe Sequence
gaacccagactcagacattggcacc

SEQ ID NO: 222609 - DNA, 25 bp, Probe Sequence
gaaccggacatcaaggatctggccg

SEQ ID NO: 222610 - DNA, 25 bp, Probe Sequence
gaacgggtgcgcaaggacatcgacg

SEQ ID NO: 222611 - DNA, 25 bp, Probe Sequence
gaactgtgggtcagagactctccag

SEQ ID NO: 222612 - DNA, 25 bp, Probe Sequence
gaaccatggagtctggcagtaccgc

SEQ ID NO: 222613 - DNA, 25 bp, Probe Sequence
gaaccaggcgggctgtgaaccagcc

SEQ ID NO: 222614 - DNA, 25 bp, Probe Sequence
gaaccggattgccattcatgaactc

SEQ ID NO: 222615 - DNA, 25 bp, Probe Sequence
gaaccggattgccatttatgaactc

SEQ ID NO: 222616 - DNA, 25 bp, Probe Sequence
gaaccggattgccatttatgaactc

SEQ ID NO: 222617 - DNA, 25 bp, Probe Sequence
gaagccaagtctgattaataaccat

SEQ ID NO: 222618 - DNA, 25 bp, Probe Sequence
gaactgcacagaccaatataaaacc

SEQ ID NO: 222619 - DNA, 25 bp, Probe Sequence
gaaccagatgacacatgaaagcagc

SEQ ID NO: 222620 - DNA, 25 bp, Probe Sequence
gaacccatgacagagatcgcagcag

SEQ ID NO: 222621 - DNA, 25 bp, Probe Sequence
gaaccaccacagtgatctcacattt

SEQ ID NO: 222622 - DNA, 25 bp, Probe Sequence
gaagccacccatgagatgtcttttc

SEQ ID NO: 222623 - DNA, 25 bp, Probe Sequence
gaaccaatctacaagtctctgtctt

SEQ ID NO: 222624 - DNA, 25 bp, Probe Sequence
gaaccaattgcgagtcatgtagtgt

SEQ ID NO: 222625 - DNA, 25 bp, Probe Sequence
gaaccaatctggatgcctcattatg

SEQ ID NO: 222626 - DNA, 25 bp, Probe Sequence
gaaccaatgctgaaagcatctcagt

SEQ ID NO: 222627 - DNA, 25 bp, Probe Sequence
gaaccagtctggtgatccgatgtac

SEQ ID NO: 222628 - DNA, 25 bp, Probe Sequence
gaacgcaggctgagaacgcagggaa

SEQ ID NO: 222629 - DNA, 25 bp, Probe Sequence
gaacgcagcctttgagagtgggcga

SEQ ID NO: 222630 - DNA, 25 bp, Probe Sequence
gaagccacaaataggatgcttggga

SEQ ID NO: 222631 - DNA, 25 bp, Probe Sequence
gaagccaagagaggcatcaggatgg

SEQ ID NO: 222632 - DNA, 25 bp, Probe Sequence
gaaccatgaagtggctgctgctgct

SEQ ID NO: 222633 - DNA, 25 bp, Probe Sequence
gaacctgatcatgcgccctgatcag

SEQ ID NO: 222634 - DNA, 25 bp, Probe Sequence
gaactcagagcagttggagctgatc

SEQ ID NO: 222635 - DNA, 25 bp, Probe Sequence
gaactgcattgcactgggcatgctc

SEQ ID NO: 222636 - DNA, 25 bp, Probe Sequence
gaacctcatgaactgggagtgcgcc

SEQ ID NO: 222637 - DNA, 25 bp, Probe Sequence
gaaccaaaagatgagagtgcccgga

SEQ ID NO: 222638 - DNA, 25 bp, Probe Sequence
gaagccaaaagtagatgatgagccc

SEQ ID NO: 222639 - DNA, 25 bp, Probe Sequence
gaaccacttaggatgtgatcacttt

SEQ ID NO: 222640 - DNA, 25 bp, Probe Sequence
gaaccacaacaggttggtcatcagg

SEQ ID NO: 222641 - DNA, 25 bp, Probe Sequence
gaacgccacagggtgtgaggccagg

SEQ ID NO: 222642 - DNA, 25 bp, Probe Sequence
gaactgcctcacgggagagggcgag

SEQ ID NO: 222643 - DNA, 25 bp, Probe Sequence
gaactggctacttggacattgaaga

SEQ ID NO: 222644 - DNA, 25 bp, Probe Sequence
gaacaggcaacccaaactgatagtt

SEQ ID NO: 222645 - DNA, 25 bp, Probe Sequence
gaaataaaccaaagtcacttgtttg

SEQ ID NO: 222646 - DNA, 25 bp, Probe Sequence
gaactatgaaaagaccctgtttgtg

SEQ ID NO: 222647 - DNA, 25 bp, Probe Sequence
gaacatgctgaaaaccacctggtct

SEQ ID NO: 222648 - DNA, 25 bp, Probe Sequence
gaactgagtgcaaaccacaacattc

SEQ ID NO: 222649 - DNA, 25 bp, Probe Sequence
gaactttgaaacttcactcatgcca

SEQ ID NO: 222650 - DNA, 25 bp, Probe Sequence
gaaccttataactttcacactcata

SEQ ID NO: 222651 - DNA, 25 bp, Probe Sequence
gaacccaacagcactataactcatg

SEQ ID NO: 222652 - DNA, 25 bp, Probe Sequence
gaactaaaatgctctctgtactcta

SEQ ID NO: 222653 - DNA, 25 bp, Probe Sequence
gaactaaaatgctctctgtactcta

SEQ ID NO: 222654 - DNA, 25 bp, Probe Sequence
gaaccatattactctcatgatactt

SEQ ID NO: 222655 - DNA, 25 bp, Probe Sequence
gaaccatattactctcatgatactt

SEQ ID NO: 222656 - DNA, 25 bp, Probe Sequence
gaaccattatactttatatctgtaa

SEQ ID NO: 222657 - DNA, 25 bp, Probe Sequence
gaactcactcagaccttcatgagct

SEQ ID NO: 222658 - DNA, 25 bp, Probe Sequence
gaactcaagcgggtctcagagcagt

SEQ ID NO: 222659 - DNA, 25 bp, Probe Sequence
gaacccatgggcttccatgacgtca

SEQ ID NO: 222660 - DNA, 25 bp, Probe Sequence
gaacccaggagttcgagaccatcct

SEQ ID NO: 222661 - DNA, 25 bp, Probe Sequence
gaactcacgccagtatctggaccag

SEQ ID NO: 222662 - DNA, 25 bp, Probe Sequence
gaactcacgccagtatctggaccag

SEQ ID NO: 222663 - DNA, 25 bp, Probe Sequence
gaaccagacacactgattggaactg

SEQ ID NO: 222664 - DNA, 25 bp, Probe Sequence
gaaccttcatgactgttggaattgc

SEQ ID NO: 222665 - DNA, 25 bp, Probe Sequence
gaactcacctacttaggaattcata

SEQ ID NO: 222666 - DNA, 25 bp, Probe Sequence
gaacatccctcctgggaatgaagca

SEQ ID NO: 222667 - DNA, 25 bp, Probe Sequence
gaaccccacacgggtagagagagtt

SEQ ID NO: 222668 - DNA, 25 bp, Probe Sequence
gaacccacgccctgatgaagaagat

SEQ ID NO: 222669 - DNA, 25 bp, Probe Sequence
gaaccatcacctgcaggaaacaagt

SEQ ID NO: 222670 - DNA, 25 bp, Probe Sequence
gaacccaccttcatgaatagcactg

SEQ ID NO: 222671 - DNA, 25 bp, Probe Sequence
gaacctaccttaaaatgccaatgag

SEQ ID NO: 222672 - DNA, 25 bp, Probe Sequence
gaacctcacctctagttgagaccaa

SEQ ID NO: 222673 - DNA, 25 bp, Probe Sequence
gaacctcacctctagttgagaccaa

SEQ ID NO: 222674 - DNA, 25 bp, Probe Sequence
gaacctcaagcttacaatgacgcca

SEQ ID NO: 222675 - DNA, 25 bp, Probe Sequence
gaacctgaactctgagtatcaggca

SEQ ID NO: 222676 - DNA, 25 bp, Probe Sequence
gaactggaattctgcagctaaccct

SEQ ID NO: 222677 - DNA, 25 bp, Probe Sequence
gaaagctttatctgactttccctta

SEQ ID NO: 222678 - DNA, 25 bp, Probe Sequence
gaaccctttagggcatttcctctgt

SEQ ID NO: 222679 - DNA, 25 bp, Probe Sequence
gatgtaccttttgcaataccgttgt

SEQ ID NO: 222680 - DNA, 25 bp, Probe Sequence
tcttacctagtaaccatacggtctg

SEQ ID NO: 222681 - DNA, 25 bp, Probe Sequence
gaaccatttgatcagaatacaacca

SEQ ID NO: 222682 - DNA, 25 bp, Probe Sequence
gaaccattagtttgtatccctcttt

SEQ ID NO: 222683 - DNA, 25 bp, Probe Sequence
gaacctgatagttttcacctcattt

SEQ ID NO: 222684 - DNA, 25 bp, Probe Sequence
gaacctaggacttgagcctccattt

SEQ ID NO: 222685 - DNA, 25 bp, Probe Sequence
gaacgcatcggagttgacctgatca

SEQ ID NO: 222686 - DNA, 25 bp, Probe Sequence
gaactgctccagatagagcttatcc

SEQ ID NO: 222687 - DNA, 25 bp, Probe Sequence
gaacatgttcaatggagcggcacac

SEQ ID NO: 222688 - DNA, 25 bp, Probe Sequence
gaacgtgtcagagggagctggtaca

SEQ ID NO: 222689 - DNA, 25 bp, Probe Sequence
gaacggctatgctgtgtctgggaaa

SEQ ID NO: 222690 - DNA, 25 bp, Probe Sequence
gaacgtggctctagtgtctggagac

SEQ ID NO: 222691 - DNA, 25 bp, Probe Sequence
gaacgtggccagcggggagatgaac

SEQ ID NO: 222692 - DNA, 25 bp, Probe Sequence
gaacgggtgcagcgggaaaaggcta

SEQ ID NO: 222693 - DNA, 25 bp, Probe Sequence
gaactgctcgtagaaggaagaaggt

SEQ ID NO: 222694 - DNA, 25 bp, Probe Sequence
gacgggagtatgacaaggacgggaa

SEQ ID NO: 222695 - DNA, 25 bp, Probe Sequence
gaaaaagatttgaagagacgggtca

SEQ ID NO: 222696 - DNA, 25 bp, Probe Sequence
gaacaacttgttgcggaagaggaat

SEQ ID NO: 222697 - DNA, 25 bp, Probe Sequence
gaacagcctttttaggccacagtga

SEQ ID NO: 222698 - DNA, 25 bp, Probe Sequence
gaaccagccttattcaagtacaaga

SEQ ID NO: 222699 - DNA, 25 bp, Probe Sequence
gaacgcaccttaataaatccagata

SEQ ID NO: 222700 - DNA, 25 bp, Probe Sequence
gaacgcaccttaataaatccagata

SEQ ID NO: 222701 - DNA, 25 bp, Probe Sequence
gaacgcaccttaataaatccagata

SEQ ID NO: 222702 - DNA, 25 bp, Probe Sequence
gaaccacctagaaataactcagcag

SEQ ID NO: 222703 - DNA, 25 bp, Probe Sequence
gaaccacctcagaatatgaaaccac

SEQ ID NO: 222704 - DNA, 25 bp, Probe Sequence
gaacgcatccactttcatggaaaca

SEQ ID NO: 222705 - DNA, 25 bp, Probe Sequence
gaacaggccatctccaggaaattgg

SEQ ID NO: 222706 - DNA, 25 bp, Probe Sequence
gaacaggttggggaggagagtttgg

SEQ ID NO: 222707 - DNA, 25 bp, Probe Sequence
gaactggttatggaaggtgactttg

SEQ ID NO: 222708 - DNA, 25 bp, Probe Sequence
gaacctgagtataaatttactttct

SEQ ID NO: 222709 - DNA, 25 bp, Probe Sequence
gaacctgagtcaaacacaacacatg

SEQ ID NO: 222710 - DNA, 25 bp, Probe Sequence
gaacctgatctcttatactagtatc

SEQ ID NO: 222711 - DNA, 25 bp, Probe Sequence
gaacctgagtatgatcagtggcttc

SEQ ID NO: 222712 - DNA, 25 bp, Probe Sequence
gaaccatcagttcttgatattgtct

SEQ ID NO: 222713 - DNA, 25 bp, Probe Sequence
gaacctgatgggtttggcattggct

SEQ ID NO: 222714 - DNA, 25 bp, Probe Sequence
gaaccgaggcagtgaggtgattgct

SEQ ID NO: 222715 - DNA, 25 bp, Probe Sequence
gaaccgaggcagtgaggtgattgct

SEQ ID NO: 222716 - DNA, 25 bp, Probe Sequence
gaactcgggagggaacatcctgctg

SEQ ID NO: 222717 - DNA, 25 bp, Probe Sequence
gaaccagaggaggtataatactcta

SEQ ID NO: 222718 - DNA, 25 bp, Probe Sequence
gaaccagagtgactgatatatatat

SEQ ID NO: 222719 - DNA, 25 bp, Probe Sequence
gaaccatggtagccttcagtgagat

SEQ ID NO: 222720 - DNA, 25 bp, Probe Sequence
gaacccttgatccgtcgatcagatg

SEQ ID NO: 222721 - DNA, 25 bp, Probe Sequence
gaacccattatcctgccagcatggg

SEQ ID NO: 222722 - DNA, 25 bp, Probe Sequence
gaacctggctaactgcaagctgaag

SEQ ID NO: 222723 - DNA, 25 bp, Probe Sequence
gaacctgtctaactggatgctcatt

SEQ ID NO: 222724 - DNA, 25 bp, Probe Sequence
gaacgtggctcaactagatatctta

SEQ ID NO: 222725 - DNA, 25 bp, Probe Sequence
gaactgctgcccattagaattagaa

SEQ ID NO: 222726 - DNA, 25 bp, Probe Sequence
gaactcacagcctttattcttagaa

SEQ ID NO: 222727 - DNA, 25 bp, Probe Sequence
gaactgggttttgtcattcaagccg

SEQ ID NO: 222728 - DNA, 25 bp, Probe Sequence
gaaccggatgtctcggcattaatcc

SEQ ID NO: 222729 - DNA, 25 bp, Probe Sequence
gaacctttgtcaccgagtaactcgc

SEQ ID NO: 222730 - DNA, 25 bp, Probe Sequence
gaacctcttgtaccaattatagggg

SEQ ID NO: 222731 - DNA, 25 bp, Probe Sequence
gaactcctggttccaactgtaagga

SEQ ID NO: 222732 - DNA, 25 bp, Probe Sequence
gacccagaggttccgtagtaagatg

SEQ ID NO: 222733 - DNA, 25 bp, Probe Sequence
gactccctggttcagtatttaatgc

SEQ ID NO: 222734 - DNA, 25 bp, Probe Sequence
gaactcctggtatgattatcttttc

SEQ ID NO: 222735 - DNA, 25 bp, Probe Sequence
gaactttgatttccattccattttc

SEQ ID NO: 222736 - DNA, 25 bp, Probe Sequence
gaactcttagttcttacatgattta

SEQ ID NO: 222737 - DNA, 25 bp, Probe Sequence
gaacctggagctttattatcaatag

SEQ ID NO: 222738 - DNA, 25 bp, Probe Sequence
gaacctggagctttattatcaatag

SEQ ID NO: 222739 - DNA, 25 bp, Probe Sequence
gaacctgtggattgtttcaattgca

SEQ ID NO: 222740 - DNA, 25 bp, Probe Sequence
gaactcaataaaccttcagattcgg

SEQ ID NO: 222741 - DNA, 25 bp, Probe Sequence
gaactcaggctcagcctcgaattcc

SEQ ID NO: 222742 - DNA, 25 bp, Probe Sequence
gaactagtctcaggcttcaacatcg

SEQ ID NO: 222743 - DNA, 25 bp, Probe Sequence
gaactgatactctgttgcaatgtaa

SEQ ID NO: 222744 - DNA, 25 bp, Probe Sequence
gaactgaactaggcctggtggaagg

SEQ ID NO: 222745 - DNA, 25 bp, Probe Sequence
gaactgaactaggcctggtggaagg

SEQ ID NO: 222746 - DNA, 25 bp, Probe Sequence
gaacgagactagccctggtgggaac

SEQ ID NO: 222747 - DNA, 25 bp, Probe Sequence
gaaccgacgagtcctgaggagagaa

SEQ ID NO: 222748 - DNA, 25 bp, Probe Sequence
gaaccggtgcgtcctgaggagagaa

SEQ ID NO: 222749 - DNA, 25 bp, Probe Sequence
gaacggatgggcctctagtgacaga

SEQ ID NO: 222750 - DNA, 25 bp, Probe Sequence
gaacggcaggtgatgaagccactat

SEQ ID NO: 222751 - DNA, 25 bp, Probe Sequence
gaactgattgggagaagccaccgct

SEQ ID NO: 222752 - DNA, 25 bp, Probe Sequence
gaactctttctgagagactgcagca

SEQ ID NO: 222753 - DNA, 25 bp, Probe Sequence
gaactcctggccaggactgcaaggc

SEQ ID NO: 222754 - DNA, 25 bp, Probe Sequence
gaactttcagccaagaaggtagtgt

SEQ ID NO: 222755 - DNA, 25 bp, Probe Sequence
gaaccataatgcttaggacagtagt

SEQ ID NO: 222756 - DNA, 25 bp, Probe Sequence
gaacgcagcttgtctaggaagggga

SEQ ID NO: 222757 - DNA, 25 bp, Probe Sequence
gaacccttgcctttgaatgtggaat

SEQ ID NO: 222758 - DNA, 25 bp, Probe Sequence
gaacccttcagctgctaagatccaa

SEQ ID NO: 222759 - DNA, 25 bp, Probe Sequence
gaacctctcttttctaagatgcaca

SEQ ID NO: 222760 - DNA, 25 bp, Probe Sequence
gaacttcttcatatgctcgagtctc

SEQ ID NO: 222761 - DNA, 25 bp, Probe Sequence
gaacttcttcatatgctcgagtctc

SEQ ID NO: 222762 - DNA, 25 bp, Probe Sequence
gaacgccttcatttcatgcaaatct

SEQ ID NO: 222763 - DNA, 25 bp, Probe Sequence
gaacggcgtgcattatcaacatcat

SEQ ID NO: 222764 - DNA, 25 bp, Probe Sequence
gaacggcgtgcattatcaacatcat

SEQ ID NO: 222765 - DNA, 25 bp, Probe Sequence
gaacgtgctgggtcacatgcagcag

SEQ ID NO: 222766 - DNA, 25 bp, Probe Sequence
gaacctctgagtccaaagcaggctg

SEQ ID NO: 222767 - DNA, 25 bp, Probe Sequence
gaaccctactgacaagcagcctggg

SEQ ID NO: 222768 - DNA, 25 bp, Probe Sequence
gaacgcccaggacaatgagttgagt

SEQ ID NO: 222769 - DNA, 25 bp, Probe Sequence
gaactctggaggcggaggttgcagt

SEQ ID NO: 222770 - DNA, 25 bp, Probe Sequence
gaacctgggaagcagaggttgcagt

SEQ ID NO: 222771 - DNA, 25 bp, Probe Sequence
gaacctgggaggcggagcttgcagt

SEQ ID NO: 222772 - DNA, 25 bp, Probe Sequence
gaacggggatggctgtggcatctgc

SEQ ID NO: 222773 - DNA, 25 bp, Probe Sequence
gaaccgtcagatcgcctggagacgc

SEQ ID NO: 222774 - DNA, 25 bp, Probe Sequence
gaaccgtcagatcgcctggagacgc

SEQ ID NO: 222775 - DNA, 25 bp, Probe Sequence
gaaccgtcagatcgcctggagacgc

SEQ ID NO: 222776 - DNA, 25 bp, Probe Sequence
gaaccgtcagatcgcctggagacgc

SEQ ID NO: 222777 - DNA, 25 bp, Probe Sequence
gaaccgtcagatcgcctggagacgc

SEQ ID NO: 222778 - DNA, 25 bp, Probe Sequence
gaaccgtcagatcgcctggagacgc

SEQ ID NO: 222779 - DNA, 25 bp, Probe Sequence
gaaccgtcagatcgcctggagacgc

SEQ ID NO: 222780 - DNA, 25 bp, Probe Sequence
gaaccgtcagatcgcctggagacgc

SEQ ID NO: 222781 - DNA, 25 bp, Probe Sequence
gaaccgtcagatcgcctggagacgc

SEQ ID NO: 222782 - DNA, 25 bp, Probe Sequence
gaaccgtcagatcgcctggagacgc

SEQ ID NO: 222783 - DNA, 25 bp, Probe Sequence
gaaccgtcagatcgcctggagacgc

SEQ ID NO: 222784 - DNA, 25 bp, Probe Sequence
gaaccgtcagatcgcctggagacgc

SEQ ID NO: 222785 - DNA, 25 bp, Probe Sequence
gaaccgtcagatcgcctggagacgc

SEQ ID NO: 222786 - DNA, 25 bp, Probe Sequence
gaaccgtcagatcgcctggagacgc

SEQ ID NO: 222787 - DNA, 25 bp, Probe Sequence
gaaccgtcagatcgcctggagacgc

SEQ ID NO: 222788 - DNA, 25 bp, Probe Sequence
gaaccgtcagatcgcctggagacgc

SEQ ID NO: 222789 - DNA, 25 bp, Probe Sequence
gaaccgtcagatcgcctggagacgc

SEQ ID NO: 222790 - DNA, 25 bp, Probe Sequence
gaaccgtcagatcgcctggagacgc

SEQ ID NO: 222791 - DNA, 25 bp, Probe Sequence
gaaccgtcagatcgcctggagacgc

SEQ ID NO: 222792 - DNA, 25 bp, Probe Sequence
gaaccgtcagatcgcctggagacgc

SEQ ID NO: 222793 - DNA, 25 bp, Probe Sequence
gaaccgtcagatcgcctggagacgc

SEQ ID NO: 222794 - DNA, 25 bp, Probe Sequence
gaaccgtcagatcgcctggagacgc

SEQ ID NO: 222795 - DNA, 25 bp, Probe Sequence
gaaccgtcagatcgcctggagacgc

SEQ ID NO: 222796 - DNA, 25 bp, Probe Sequence
gaaccgtcagatcgcctggagacgc

SEQ ID NO: 222797 - DNA, 25 bp, Probe Sequence
gaaccgtcagatcgcctggagacgc

SEQ ID NO: 222798 - DNA, 25 bp, Probe Sequence
gaaccgtcagatcgcctggagacgc

SEQ ID NO: 222799 - DNA, 25 bp, Probe Sequence
gaaccgtcagatcgcctggagacgc

SEQ ID NO: 222800 - DNA, 25 bp, Probe Sequence
gaaccgtcagatcgcctggagacgc

SEQ ID NO: 222801 - DNA, 25 bp, Probe Sequence
gaaccgtcagatcgcctggagacgc

SEQ ID NO: 222802 - DNA, 25 bp, Probe Sequence
gaaccgtcagatcgcctggagacgc

SEQ ID NO: 222803 - DNA, 25 bp, Probe Sequence
gaaccgtcagatcgcctggagacgc

SEQ ID NO: 222804 - DNA, 25 bp, Probe Sequence
gaaccgtcagatcgcctggagacgc

SEQ ID NO: 222805 - DNA, 25 bp, Probe Sequence
gaaccgtcagatcgcctggagacgc

SEQ ID NO: 222806 - DNA, 25 bp, Probe Sequence
gaaccgtcagatcgcctggagacgc

SEQ ID NO: 222807 - DNA, 25 bp, Probe Sequence
gaaccgtcagatcgcctggagacgc

SEQ ID NO: 222808 - DNA, 25 bp, Probe Sequence
gaaccgtcagatcgcctggagacgc

SEQ ID NO: 222809 - DNA, 25 bp, Probe Sequence
gaaccgtcagatcgcctggagacgc

SEQ ID NO: 222810 - DNA, 25 bp, Probe Sequence
gaaccgtcagatcgcctggagacgc

SEQ ID NO: 222811 - DNA, 25 bp, Probe Sequence
gaaccgtcagatcgcctggagacgc

SEQ ID NO: 222812 - DNA, 25 bp, Probe Sequence
gaaccgtcagatcgcctggagacgc

SEQ ID NO: 222813 - DNA, 25 bp, Probe Sequence
gaaccgtcagatcgcctggagacgc

SEQ ID NO: 222814 - DNA, 25 bp, Probe Sequence
gaaccgtcagatcgcctggagacgc

SEQ ID NO: 222815 - DNA, 25 bp, Probe Sequence
gaaccgtcagatcgcctggagacgc

SEQ ID NO: 222816 - DNA, 25 bp, Probe Sequence
gaaccgtcagatcgcctggagacgc

SEQ ID NO: 222817 - DNA, 25 bp, Probe Sequence
gaaccgtcagatcgcctggagacgc

SEQ ID NO: 222818 - DNA, 25 bp, Probe Sequence
gaaccgtcagatcgcctggagacgc

SEQ ID NO: 222819 - DNA, 25 bp, Probe Sequence
gaaccgtcagatcgcctggagacgc

SEQ ID NO: 222820 - DNA, 25 bp, Probe Sequence
gaaccgtcagatcgcctggagacgc

SEQ ID NO: 222821 - DNA, 25 bp, Probe Sequence
gaaccgtcagatcgcctggagacgc

SEQ ID NO: 222822 - DNA, 25 bp, Probe Sequence
gaaccgtcagatcgcctggagacgc

SEQ ID NO: 222823 - DNA, 25 bp, Probe Sequence
gaaccgtcagatcgcctggagacgc

SEQ ID NO: 222824 - DNA, 25 bp, Probe Sequence
gaaccgtcagatcgcctggagacgc

SEQ ID NO: 222825 - DNA, 25 bp, Probe Sequence
gaaccgtcagatcgcctggagacgc

SEQ ID NO: 222826 - DNA, 25 bp, Probe Sequence
gaaccgtcagatcgcctggagacgc

SEQ ID NO: 222827 - DNA, 25 bp, Probe Sequence
gaaccgtcagatcgcctggagacgc

SEQ ID NO: 222828 - DNA, 25 bp, Probe Sequence
gaaccgtcagatcgcctggagacgc

SEQ ID NO: 222829 - DNA, 25 bp, Probe Sequence
gaaccgtcagatcgcctggagacgc

SEQ ID NO: 222830 - DNA, 25 bp, Probe Sequence
gaaccgtcagatcgcctggagacgc

SEQ ID NO: 222831 - DNA, 25 bp, Probe Sequence
gaaccgtcagatcgcctggagacgc

SEQ ID NO: 222832 - DNA, 25 bp, Probe Sequence
gaaccgtcagatcgcctggagacgc

SEQ ID NO: 222833 - DNA, 25 bp, Probe Sequence
gaaccgtcagatcgcctggagacgc

SEQ ID NO: 222834 - DNA, 25 bp, Probe Sequence
gaaccgtcagatcgcctggagacgc

SEQ ID NO: 222835 - DNA, 25 bp, Probe Sequence
gaaccgtcagatcgcctggagacgc

SEQ ID NO: 222836 - DNA, 25 bp, Probe Sequence
gaaccgtcagatcgcctggagacgc

SEQ ID NO: 222837 - DNA, 25 bp, Probe Sequence
gaaccgtcagatcgcctggagacgc

SEQ ID NO: 222838 - DNA, 25 bp, Probe Sequence
gaaccgtcagatcgcctggagacgc

SEQ ID NO: 222839 - DNA, 25 bp, Probe Sequence
gaaccgtcagatcgcctggagacgc

SEQ ID NO: 222840 - DNA, 25 bp, Probe Sequence
gaaccgtcagatcgcctggagacgc

SEQ ID NO: 222841 - DNA, 25 bp, Probe Sequence
gaaccgtcagatcgcctggagacgc

SEQ ID NO: 222842 - DNA, 25 bp, Probe Sequence
gaaccgtcagatcgcctggagacgc

SEQ ID NO: 222843 - DNA, 25 bp, Probe Sequence
gaaccgtcagatcgcctggagacgc

SEQ ID NO: 222844 - DNA, 25 bp, Probe Sequence
gaaccgtcagatcgcctggagacgc

SEQ ID NO: 222845 - DNA, 25 bp, Probe Sequence
gaaccgtcagatcgcctggagacgc

SEQ ID NO: 222846 - DNA, 25 bp, Probe Sequence
gaaccgtcagatcgcctggagacgc

SEQ ID NO: 222847 - DNA, 25 bp, Probe Sequence
gaaccgtcagatcgcctggagacgc

SEQ ID NO: 222848 - DNA, 25 bp, Probe Sequence
gaaccgtcagatcgcctggagacgc

SEQ ID NO: 222849 - DNA, 25 bp, Probe Sequence
gaaccgtcagatcgcctggagacgc

SEQ ID NO: 222850 - DNA, 25 bp, Probe Sequence
gaaccgtcagatcgcctggagacgc

SEQ ID NO: 222851 - DNA, 25 bp, Probe Sequence
gaaccgtcagatcgcctggagacgc

SEQ ID NO: 222852 - DNA, 25 bp, Probe Sequence
gaaccgtcagatcgcctggagacgc

SEQ ID NO: 222853 - DNA, 25 bp, Probe Sequence
gaaccgtcagatcgcctggagacgc

SEQ ID NO: 222854 - DNA, 25 bp, Probe Sequence
gaaccgtcagatcgcctggagacgc

SEQ ID NO: 222855 - DNA, 25 bp, Probe Sequence
gaaccgtcagatcgcctggagacgc

SEQ ID NO: 222856 - DNA, 25 bp, Probe Sequence
gaaccgtcagatcgcctggagacgc

SEQ ID NO: 222857 - DNA, 25 bp, Probe Sequence
gaaccgtcagatcgcctggagacgc

SEQ ID NO: 222858 - DNA, 25 bp, Probe Sequence
gaaccgtcagatcgcctggagacgc

SEQ ID NO: 222859 - DNA, 25 bp, Probe Sequence
gaaccgtcagatcgcctggagacgc

SEQ ID NO: 222860 - DNA, 25 bp, Probe Sequence
gaaccgtcagatcgcctggagacgc

SEQ ID NO: 222861 - DNA, 25 bp, Probe Sequence
gaaccgtcagatcgcctggagacgc

SEQ ID NO: 222862 - DNA, 25 bp, Probe Sequence
gaaccgtcagatcgcctggagacgc

SEQ ID NO: 222863 - DNA, 25 bp, Probe Sequence
gaaccgtcagatcgcctggagacgc

SEQ ID NO: 222864 - DNA, 25 bp, Probe Sequence
gaaccgtcagatcgcctggagacgc

SEQ ID NO: 222865 - DNA, 25 bp, Probe Sequence
gaaccgtcagatcgcctggagacgc

SEQ ID NO: 222866 - DNA, 25 bp, Probe Sequence
gaaccgtcagatcgcctggagacgc

SEQ ID NO: 222867 - DNA, 25 bp, Probe Sequence
gaaccgtcagatcgcctggagacgc

SEQ ID NO: 222868 - DNA, 25 bp, Probe Sequence
gaaccgtcagatcgcctggagacgc

SEQ ID NO: 222869 - DNA, 25 bp, Probe Sequence
gaaccgtcagatcgcctggagacgc

SEQ ID NO: 222870 - DNA, 25 bp, Probe Sequence
gaaccgtcagatcgcctggagacgc

SEQ ID NO: 222871 - DNA, 25 bp, Probe Sequence
gaaccgtcagatcgcctggagacgc

SEQ ID NO: 222872 - DNA, 25 bp, Probe Sequence
gaaccgtcagatcgcctggagacgc

SEQ ID NO: 222873 - DNA, 25 bp, Probe Sequence
gaaccgtcagatcgcctggagacgc

SEQ ID NO: 222874 - DNA, 25 bp, Probe Sequence
gaaccgtcagatcgcctggagacgc

SEQ ID NO: 222875 - DNA, 25 bp, Probe Sequence
gaaccgtcagatcgcctggagacgc

SEQ ID NO: 222876 - DNA, 25 bp, Probe Sequence
gaaccgtcagatcgcctggagacgc

SEQ ID NO: 222877 - DNA, 25 bp, Probe Sequence
gaaccgtcagatcgcctggagacgc

SEQ ID NO: 222878 - DNA, 25 bp, Probe Sequence
gaaccgtcagatcgcctggagacgc

SEQ ID NO: 222879 - DNA, 25 bp, Probe Sequence
gaaccgtcagatcgcctggagacgc

SEQ ID NO: 222880 - DNA, 25 bp, Probe Sequence
gaaccgtcagatcgcctggagacgc

SEQ ID NO: 222881 - DNA, 25 bp, Probe Sequence
gaaccgtcagatcgcctggagacgc

SEQ ID NO: 222882 - DNA, 25 bp, Probe Sequence
gaaccgtcagatcgcctggagacgc

SEQ ID NO: 222883 - DNA, 25 bp, Probe Sequence
gaaccgtcagatcgcctggagacgc

SEQ ID NO: 222884 - DNA, 25 bp, Probe Sequence
gaaccgtcagatcgcctggagacgc

SEQ ID NO: 222885 - DNA, 25 bp, Probe Sequence
gaaccgtcagatcgcctggaggatc

SEQ ID NO: 222886 - DNA, 25 bp, Probe Sequence
gaaccgtgattaccgggatgcacag

SEQ ID NO: 222887 - DNA, 25 bp, Probe Sequence
gacatccagttatccagggacatga

SEQ ID NO: 222888 - DNA, 25 bp, Probe Sequence
gaacgctcttgaaacaagtaatgac

SEQ ID NO: 222889 - DNA, 25 bp, Probe Sequence
gaacgccataagcacaactgcaagc

SEQ ID NO: 222890 - DNA, 25 bp, Probe Sequence
gaacgctctagaggagatcaccaaa

SEQ ID NO: 222891 - DNA, 25 bp, Probe Sequence
gaacgtgcttgaagaatccactatg

SEQ ID NO: 222892 - DNA, 25 bp, Probe Sequence
gaacggcttgcaaaactttcagatg

SEQ ID NO: 222893 - DNA, 25 bp, Probe Sequence
gaacggcattcagacacggacagtg

SEQ ID NO: 222894 - DNA, 25 bp, Probe Sequence
gaacgtgaacagtcagaaggaagtg

SEQ ID NO: 222895 - DNA, 25 bp, Probe Sequence
gaactttgacagtgcacgagaagga

SEQ ID NO: 222896 - DNA, 25 bp, Probe Sequence
gaacagtagaaaaccatatggggac

SEQ ID NO: 222897 - DNA, 25 bp, Probe Sequence
gaaagtagttagggcaagaggaaag

SEQ ID NO: 222898 - DNA, 25 bp, Probe Sequence
gaacttaggtcatgcacagagggaa

SEQ ID NO: 222899 - DNA, 25 bp, Probe Sequence
gaacgtgatgtgatcctgcgggaga

SEQ ID NO: 222900 - DNA, 25 bp, Probe Sequence
gaacagtggtggccagcttggagga

SEQ ID NO: 222901 - DNA, 25 bp, Probe Sequence
gaacgatggcagcctgacactgagg

SEQ ID NO: 222902 - DNA, 25 bp, Probe Sequence
gaacgatgagcaccatgccaggact

SEQ ID NO: 222903 - DNA, 25 bp, Probe Sequence
gaactcattcaactccaggacatgg

SEQ ID NO: 222904 - DNA, 25 bp, Probe Sequence
gaactttgcacatgtcactactggg

SEQ ID NO: 222905 - DNA, 25 bp, Probe Sequence
gaacatttctcttgtgttcctgact

SEQ ID NO: 222906 - DNA, 25 bp, Probe Sequence
gaactgtcagctcagcgttgactga

SEQ ID NO: 222907 - DNA, 25 bp, Probe Sequence
gaactctcatcacatgtttgactca

SEQ ID NO: 222908 - DNA, 25 bp, Probe Sequence
gaaccctaagatttgtactacgatt

SEQ ID NO: 222909 - DNA, 25 bp, Probe Sequence
gagaccctaagttgaagaaggtgtt

SEQ ID NO: 222910 - DNA, 25 bp, Probe Sequence
gaaccgctgaatatgaagcatttgg

SEQ ID NO: 222911 - DNA, 25 bp, Probe Sequence
gaaacgtgtttatcagcaagtcgtg

SEQ ID NO: 222912 - DNA, 25 bp, Probe Sequence
gaaccgtgttttacagatcattcca

SEQ ID NO: 222913 - DNA, 25 bp, Probe Sequence
gaaccgcatggtgcttgcagtttta

SEQ ID NO: 222914 - DNA, 25 bp, Probe Sequence
gaaccgcatggtgcttgcagtttta

SEQ ID NO: 222915 - DNA, 25 bp, Probe Sequence
gaacgcctgtgtttacattgttttt

SEQ ID NO: 222916 - DNA, 25 bp, Probe Sequence
gaactgtttgtttcaattgccattt

SEQ ID NO: 222917 - DNA, 25 bp, Probe Sequence
gaactgtttgtttcaattggccatt

SEQ ID NO: 222918 - DNA, 25 bp, Probe Sequence
gaactgtttgtttcaattggccatt

SEQ ID NO: 222919 - DNA, 25 bp, Probe Sequence
gaactgtttgtttcaattggccatt

SEQ ID NO: 222920 - DNA, 25 bp, Probe Sequence
gaactgtttgtttcaattggccatt

SEQ ID NO: 222921 - DNA, 25 bp, Probe Sequence
gaactgtttgtttcaattggccatt

SEQ ID NO: 222922 - DNA, 25 bp, Probe Sequence
gaacgtcctttaatatgtccaacct

SEQ ID NO: 222923 - DNA, 25 bp, Probe Sequence
gaactttttagattattccaagcct

SEQ ID NO: 222924 - DNA, 25 bp, Probe Sequence
gaacttttcattctataaatacact

SEQ ID NO: 222925 - DNA, 25 bp, Probe Sequence
gaactgtgttttatgattttacctc

SEQ ID NO: 222926 - DNA, 25 bp, Probe Sequence
gaactgatgtttcaatttacccctc

SEQ ID NO: 222927 - DNA, 25 bp, Probe Sequence
gaactgagttgcgacaagtttcccc

SEQ ID NO: 222928 - DNA, 25 bp, Probe Sequence
gaacgccatcatcaacagtggtccc

SEQ ID NO: 222929 - DNA, 25 bp, Probe Sequence
gaacggtctctggatccatggtatc

SEQ ID NO: 222930 - DNA, 25 bp, Probe Sequence
gaacaggatccagcacgtagtatct

SEQ ID NO: 222931 - DNA, 25 bp, Probe Sequence
gaacggtctcagaactgtttgtttc

SEQ ID NO: 222932 - DNA, 25 bp, Probe Sequence
gaacggtctcagaactgtttgtttc

SEQ ID NO: 222933 - DNA, 25 bp, Probe Sequence
gaacggtctcagaactgtttgtttc

SEQ ID NO: 222934 - DNA, 25 bp, Probe Sequence
gaacggtctcagaactgtttgtttc

SEQ ID NO: 222935 - DNA, 25 bp, Probe Sequence
gaacggactgtgaatccgctctttg

SEQ ID NO: 222936 - DNA, 25 bp, Probe Sequence
gaacggactgtgaatccgctctttg

SEQ ID NO: 222937 - DNA, 25 bp, Probe Sequence
gaacggactgtgaatccgctctttg

SEQ ID NO: 222938 - DNA, 25 bp, Probe Sequence
gactctagacggcatccagccggag

SEQ ID NO: 222939 - DNA, 25 bp, Probe Sequence
gacactatgaagcaaccacataaac

SEQ ID NO: 222940 - DNA, 25 bp, Probe Sequence
gaactgagaacataccagaaacagc

SEQ ID NO: 222941 - DNA, 25 bp, Probe Sequence
gaactcatgcaagttaccaaaactg

SEQ ID NO: 222942 - DNA, 25 bp, Probe Sequence
gaactgcatatgtttcgctgatata

SEQ ID NO: 222943 - DNA, 25 bp, Probe Sequence
gaactgtatgttactagaaagtctt

SEQ ID NO: 222944 - DNA, 25 bp, Probe Sequence
gaacttctgcaaatgaaaaatgtat

SEQ ID NO: 222945 - DNA, 25 bp, Probe Sequence
gaacttatgctgactacgaatctgt

SEQ ID NO: 222946 - DNA, 25 bp, Probe Sequence
gaactggagattaacgtactgtggc

SEQ ID NO: 222947 - DNA, 25 bp, Probe Sequence
gaacggagttcaaaggctgctggcc

SEQ ID NO: 222948 - DNA, 25 bp, Probe Sequence
gaaccgacttcaaggaatgggtgct

SEQ ID NO: 222949 - DNA, 25 bp, Probe Sequence
gaaccgcctggaagacaagtgcctg

SEQ ID NO: 222950 - DNA, 25 bp, Probe Sequence
gaacccctgtcatgatcacagtgtc

SEQ ID NO: 222951 - DNA, 25 bp, Probe Sequence
gaactccccagataaagtctgctct

SEQ ID NO: 222952 - DNA, 25 bp, Probe Sequence
gaactcctacaactcaagcattcct

SEQ ID NO: 222953 - DNA, 25 bp, Probe Sequence
gaactcctgacctcagatgatccac

SEQ ID NO: 222954 - DNA, 25 bp, Probe Sequence
gaactgaagcctgcacagtgtccac

SEQ ID NO: 222955 - DNA, 25 bp, Probe Sequence
gaacgaagccgacatgctgttctct

SEQ ID NO: 222956 - DNA, 25 bp, Probe Sequence
gaacgtgggagttcagctgcttctc

SEQ ID NO: 222957 - DNA, 25 bp, Probe Sequence
gaacagtttgcagccatcattgtgc

SEQ ID NO: 222958 - DNA, 25 bp, Probe Sequence
gaacattctagatcacatgggtgct

SEQ ID NO: 222959 - DNA, 25 bp, Probe Sequence
gaactgccataaaatctcacgctgc

SEQ ID NO: 222960 - DNA, 25 bp, Probe Sequence
gaactgcctaaattcagtcagctga

SEQ ID NO: 222961 - DNA, 25 bp, Probe Sequence
gaactgcttaatttcactacatgtt

SEQ ID NO: 222962 - DNA, 25 bp, Probe Sequence
gaactgtagttctccatggcatgat

SEQ ID NO: 222963 - DNA, 25 bp, Probe Sequence
gaacgtggtttgcctgaggctgtaa

SEQ ID NO: 222964 - DNA, 25 bp, Probe Sequence
gaactttgctcccactggtttaata

SEQ ID NO: 222965 - DNA, 25 bp, Probe Sequence
gaacattttctccagttgtttagta

SEQ ID NO: 222966 - DNA, 25 bp, Probe Sequence
gaacagttgctctcagttttaatga

SEQ ID NO: 222967 - DNA, 25 bp, Probe Sequence
gaacccatttgaggttcttcagata

SEQ ID NO: 222968 - DNA, 25 bp, Probe Sequence
gaacgtcgtatgagatcctacaatg

SEQ ID NO: 222969 - DNA, 25 bp, Probe Sequence
gaacccaggatttgatgacttcaaa

SEQ ID NO: 222970 - DNA, 25 bp, Probe Sequence
gaacccaggagcaagaggtttagtg

SEQ ID NO: 222971 - DNA, 25 bp, Probe Sequence
gaactcttggccaaaggtttttgcg

SEQ ID NO: 222972 - DNA, 25 bp, Probe Sequence
gaacccatagccaatagagttttct

SEQ ID NO: 222973 - DNA, 25 bp, Probe Sequence
gaacccaatctgaaagtgctgtctt

SEQ ID NO: 222974 - DNA, 25 bp, Probe Sequence
gaactccgattactgagatgcacct

SEQ ID NO: 222975 - DNA, 25 bp, Probe Sequence
gaactgatcttcatgctgagcgaca

SEQ ID NO: 222976 - DNA, 25 bp, Probe Sequence
gaactgccttcttatactacagaac

SEQ ID NO: 222977 - DNA, 25 bp, Probe Sequence
gaacgtcatccaaaacaaagagagc

SEQ ID NO: 222978 - DNA, 25 bp, Probe Sequence
gaacgtaacatcaaaatagccaact

SEQ ID NO: 222979 - DNA, 25 bp, Probe Sequence
gaactgagaaccaaagtatccaaac

SEQ ID NO: 222980 - DNA, 25 bp, Probe Sequence
gaacgagaacattcagcaacatcca

SEQ ID NO: 222981 - DNA, 25 bp, Probe Sequence
gaacgagacagaaagcgaccatcct

SEQ ID NO: 222982 - DNA, 25 bp, Probe Sequence
gaacgaacagactcaggcgatgtgc

SEQ ID NO: 222983 - DNA, 25 bp, Probe Sequence
gaacgaaatctctatcggccagtca

SEQ ID NO: 222984 - DNA, 25 bp, Probe Sequence
gaacgctggacggatggtagcagtc

SEQ ID NO: 222985 - DNA, 25 bp, Probe Sequence
gaactcaggaggcagatgttgcagt

SEQ ID NO: 222986 - DNA, 25 bp, Probe Sequence
gaacgcaggaggctgaggctgcagt

SEQ ID NO: 222987 - DNA, 25 bp, Probe Sequence
gaactcagtagacgaaggcggcggc

SEQ ID NO: 222988 - DNA, 25 bp, Probe Sequence
gaacatgagtaaccatcaccggggc

SEQ ID NO: 222989 - DNA, 25 bp, Probe Sequence
gaacgggaaggagacgctgcagcgc

SEQ ID NO: 222990 - DNA, 25 bp, Probe Sequence
gaacagcggtatctgaagcccaggc

SEQ ID NO: 222991 - DNA, 25 bp, Probe Sequence
gaacagcggtatctgaagcccaggc

SEQ ID NO: 222992 - DNA, 25 bp, Probe Sequence
gaacatgcctggagtgtacaccgag

SEQ ID NO: 222993 - DNA, 25 bp, Probe Sequence
gaacatgttgcgctggctaactggc

SEQ ID NO: 222994 - DNA, 25 bp, Probe Sequence
gaactgcatcttttgcactaccttc

SEQ ID NO: 222995 - DNA, 25 bp, Probe Sequence
gaactacatctatgactagacattc

SEQ ID NO: 222996 - DNA, 25 bp, Probe Sequence
gaactcaagctgtagccaaacagta

SEQ ID NO: 222997 - DNA, 25 bp, Probe Sequence
gaacagagtcagaagcccaaaggaa

SEQ ID NO: 222998 - DNA, 25 bp, Probe Sequence
gaacatggtcattaccctgagaaga

SEQ ID NO: 222999 - DNA, 25 bp, Probe Sequence
gaactggtataggagctccaaggac

SEQ ID NO: 223000 - DNA, 25 bp, Probe Sequence
gaactggtggagcagtcaagagcca

SEQ ID NO: 223001 - DNA, 25 bp, Probe Sequence
gaactcagatgtggctagaccaacc

SEQ ID NO: 223002 - DNA, 25 bp, Probe Sequence
gaactgctcattgcaagagcgaaca

SEQ ID NO: 223003 - DNA, 25 bp, Probe Sequence
gaactatcttccaggaatacatcag

SEQ ID NO: 223004 - DNA, 25 bp, Probe Sequence
gaacgatttccgcctaatagtcagc

SEQ ID NO: 223005 - DNA, 25 bp, Probe Sequence
gaacagttacattcctaatagtgca

SEQ ID NO: 223006 - DNA, 25 bp, Probe Sequence
gaactgcataaaagatctggtaggc

SEQ ID NO: 223007 - DNA, 25 bp, Probe Sequence
gaactcaacagaagttgctcttgac

SEQ ID NO: 223008 - DNA, 25 bp, Probe Sequence
gaactgctgacacagtcctttacct

SEQ ID NO: 223009 - DNA, 25 bp, Probe Sequence
gaacgctggcatcagctatcttagc

SEQ ID NO: 223010 - DNA, 25 bp, Probe Sequence
gaacgtgagcagagattcatccagc

SEQ ID NO: 223011 - DNA, 25 bp, Probe Sequence
gaacgctgcagaaattctcatcctg

SEQ ID NO: 223012 - DNA, 25 bp, Probe Sequence
gaactgcacaaactcttgcagccat

SEQ ID NO: 223013 - DNA, 25 bp, Probe Sequence
gaactgtcaaatccttgcatacttc

SEQ ID NO: 223014 - DNA, 25 bp, Probe Sequence
gaacgcatcctttattgatggctac

SEQ ID NO: 223015 - DNA, 25 bp, Probe Sequence
gaacagcattgcatacatggatgag

SEQ ID NO: 223016 - DNA, 25 bp, Probe Sequence
gaactcattgccttcatcaatgtgt

SEQ ID NO: 223017 - DNA, 25 bp, Probe Sequence
gaactcaatggctacatgtatgatt

SEQ ID NO: 223018 - DNA, 25 bp, Probe Sequence
gaactacaagcatatgctgatgttc

SEQ ID NO: 223019 - DNA, 25 bp, Probe Sequence
gaacattcaagggatggtgatatgg

SEQ ID NO: 223020 - DNA, 25 bp, Probe Sequence
gaactctccagggttgaatgtgtcc

SEQ ID NO: 223021 - DNA, 25 bp, Probe Sequence
gaacttccagcagtttacacaggac

SEQ ID NO: 223022 - DNA, 25 bp, Probe Sequence
gaacttccagcagtttacacaggac

SEQ ID NO: 223023 - DNA, 25 bp, Probe Sequence
gaactacataggtcttaccattgac

SEQ ID NO: 223024 - DNA, 25 bp, Probe Sequence
gaactacttggacattctcatgcga

SEQ ID NO: 223025 - DNA, 25 bp, Probe Sequence
gaacttcctgaagatgtccttgatg

SEQ ID NO: 223026 - DNA, 25 bp, Probe Sequence
gaacttcaaaatgtgtcccgttctc

SEQ ID NO: 223027 - DNA, 25 bp, Probe Sequence
gaacatttggaaactgtcgggcttt

SEQ ID NO: 223028 - DNA, 25 bp, Probe Sequence
gaacacttcgagttcccagggttat

SEQ ID NO: 223029 - DNA, 25 bp, Probe Sequence
gaactatcgtggctccacgggcttt

SEQ ID NO: 223030 - DNA, 25 bp, Probe Sequence
gaactattttcattccacttgtgta

SEQ ID NO: 223031 - DNA, 25 bp, Probe Sequence
gaactctatttatcatgtctaatgc

SEQ ID NO: 223032 - DNA, 25 bp, Probe Sequence
gaactatgtttgtaagtctatagct

SEQ ID NO: 223033 - DNA, 25 bp, Probe Sequence
gaactcagctattaagaaaatcaca

SEQ ID NO: 223034 - DNA, 25 bp, Probe Sequence
gaactctgttctttaaagaccaaga

SEQ ID NO: 223035 - DNA, 25 bp, Probe Sequence
gatacccttagtgaccaacgaagag

SEQ ID NO: 223036 - DNA, 25 bp, Probe Sequence
gaaccctttatgtaccatctggaaa

SEQ ID NO: 223037 - DNA, 25 bp, Probe Sequence
gaactttaggagtcaccatttcaaa

SEQ ID NO: 223038 - DNA, 25 bp, Probe Sequence
gaactttaggcatcctctggaaaac

SEQ ID NO: 223039 - DNA, 25 bp, Probe Sequence
gaacattcatatctcctttggaaat

SEQ ID NO: 223040 - DNA, 25 bp, Probe Sequence
gaacatcttaggtcttttcaacaag

SEQ ID NO: 223041 - DNA, 25 bp, Probe Sequence
gaacttccggactcatgtaacacag

SEQ ID NO: 223042 - DNA, 25 bp, Probe Sequence
gacacccctaactcttaatgagcca

SEQ ID NO: 223043 - DNA, 25 bp, Probe Sequence
gaaccctataaatttaactgagcgt

SEQ ID NO: 223044 - DNA, 25 bp, Probe Sequence
gaaccctggaagtggaggttgcagt

SEQ ID NO: 223045 - DNA, 25 bp, Probe Sequence
gaaccctggcggcgaaggttgcagt

SEQ ID NO: 223046 - DNA, 25 bp, Probe Sequence
gaacccagggggcagaggttgcagt

SEQ ID NO: 223047 - DNA, 25 bp, Probe Sequence
gaacccagggggcagaggttgcagt

SEQ ID NO: 223048 - DNA, 25 bp, Probe Sequence
gaacccaggaggcggaggttgcagt

SEQ ID NO: 223049 - DNA, 25 bp, Probe Sequence
gaacccaggaggtggaggctgcggt

SEQ ID NO: 223050 - DNA, 25 bp, Probe Sequence
gaacccaggaggtggaggctgcagt

SEQ ID NO: 223051 - DNA, 25 bp, Probe Sequence
gaacccaggagacggtggttgcagt

SEQ ID NO: 223052 - DNA, 25 bp, Probe Sequence
gaacccaagaggcagggcttgcagt

SEQ ID NO: 223053 - DNA, 25 bp, Probe Sequence
gaacccaggaagcagaggttgcagt

SEQ ID NO: 223054 - DNA, 25 bp, Probe Sequence
gaacttgggacgccagaggggcagt

SEQ ID NO: 223055 - DNA, 25 bp, Probe Sequence
gaacttgggtcccagcagtgtgtct

SEQ ID NO: 223056 - DNA, 25 bp, Probe Sequence
gaactcggatgatcaggctgttgtg

SEQ ID NO: 223057 - DNA, 25 bp, Probe Sequence
gaactggtagatggctggctgttga

SEQ ID NO: 223058 - DNA, 25 bp, Probe Sequence
gaactggtacaaggcagagcttaat

SEQ ID NO: 223059 - DNA, 25 bp, Probe Sequence
gaactggctgaatgaccagataaat

SEQ ID NO: 223060 - DNA, 25 bp, Probe Sequence
gaactggctcaatgaccaggtgatg

SEQ ID NO: 223061 - DNA, 25 bp, Probe Sequence
gaactgttgaaccagtcagatggat

SEQ ID NO: 223062 - DNA, 25 bp, Probe Sequence
gaactctgagtatcaggcaagcgca

SEQ ID NO: 223063 - DNA, 25 bp, Probe Sequence
gaactctgagtatcacttcttcagg

SEQ ID NO: 223064 - DNA, 25 bp, Probe Sequence
gaacttggaatatttgccattagtg

SEQ ID NO: 223065 - DNA, 25 bp, Probe Sequence
gaacttgaactgattcacatctcat

SEQ ID NO: 223066 - DNA, 25 bp, Probe Sequence
gaacttgaagggttactgacgtgta

SEQ ID NO: 223067 - DNA, 25 bp, Probe Sequence
gaacattgatggcgaatactggctg

SEQ ID NO: 223068 - DNA, 25 bp, Probe Sequence
gaactctgctgtgaagtgactggaa

SEQ ID NO: 223069 - DNA, 25 bp, Probe Sequence
gaactctgctgtgaagtgactggaa

SEQ ID NO: 223070 - DNA, 25 bp, Probe Sequence
gaactctgagtgcatgttgaaggaa

SEQ ID NO: 223071 - DNA, 25 bp, Probe Sequence
gaactctgggtgccgagagatgtaa

SEQ ID NO: 223072 - DNA, 25 bp, Probe Sequence
gaacatctgggtggttagcattcaa

SEQ ID NO: 223073 - DNA, 25 bp, Probe Sequence
gaactgtggggagtattatgtaatc

SEQ ID NO: 223074 - DNA, 25 bp, Probe Sequence
gaacgaggagactttaatcatgaac

SEQ ID NO: 223075 - DNA, 25 bp, Probe Sequence
gaacatcggaactgcgactcagcat

SEQ ID NO: 223076 - DNA, 25 bp, Probe Sequence
gaactcgagcgacagagacaagctg

SEQ ID NO: 223077 - DNA, 25 bp, Probe Sequence
gaactgccggaagtggatgaactga

SEQ ID NO: 223078 - DNA, 25 bp, Probe Sequence
gaacttctggaaatgggagtgctca

SEQ ID NO: 223079 - DNA, 25 bp, Probe Sequence
gaacttcagagctcaggcaggctcc

SEQ ID NO: 223080 - DNA, 25 bp, Probe Sequence
gaactgtagagtgcagggacccctc

SEQ ID NO: 223081 - DNA, 25 bp, Probe Sequence
gaactaatattgtcgggaacaccta

SEQ ID NO: 223082 - DNA, 25 bp, Probe Sequence
gaactaaatttaagcttaagccata

SEQ ID NO: 223083 - DNA, 25 bp, Probe Sequence
gaacttcattctgaagggaatggga

SEQ ID NO: 223084 - DNA, 25 bp, Probe Sequence
gaacttatactaaatcaggggacca

SEQ ID NO: 223085 - DNA, 25 bp, Probe Sequence
gaaagtaactgaattctgggtatta

SEQ ID NO: 223086 - DNA, 25 bp, Probe Sequence
gaacagtacacaagactctggacta

SEQ ID NO: 223087 - DNA, 25 bp, Probe Sequence
gaacaggcaaactaattgtgaatat

SEQ ID NO: 223088 - DNA, 25 bp, Probe Sequence
gaactggcagaaggtactgaagtgc

SEQ ID NO: 223089 - DNA, 25 bp, Probe Sequence
gaacgggcaaacagctgaagatctc

SEQ ID NO: 223090 - DNA, 25 bp, Probe Sequence
gaactgggatccaatttgtagcttc

SEQ ID NO: 223091 - DNA, 25 bp, Probe Sequence
gaacagacgatccatgctaatattg

SEQ ID NO: 223092 - DNA, 25 bp, Probe Sequence
gaacgccatgattgctgctggactt

SEQ ID NO: 223093 - DNA, 25 bp, Probe Sequence
gaacgccatgaccctgtggatggga

SEQ ID NO: 223094 - DNA, 25 bp, Probe Sequence
gaacagcagctacttcgtggagtgg

SEQ ID NO: 223095 - DNA, 25 bp, Probe Sequence
gaacagtctaattggggcattgagg

SEQ ID NO: 223096 - DNA, 25 bp, Probe Sequence
gaacatcttaatttagccttaccta

SEQ ID NO: 223097 - DNA, 25 bp, Probe Sequence
gaacgcttttgaatatggggaccta

SEQ ID NO: 223098 - DNA, 25 bp, Probe Sequence
gataccttttatctcagaaaccaaa

SEQ ID NO: 223099 - DNA, 25 bp, Probe Sequence
gagaccatttaacatgcaacccgaa

SEQ ID NO: 223100 - DNA, 25 bp, Probe Sequence
gaacagctaaaagagcacacccgtc

SEQ ID NO: 223101 - DNA, 25 bp, Probe Sequence
gaacagataaagagaggatccctat

SEQ ID NO: 223102 - DNA, 25 bp, Probe Sequence
gaacaacgagaataaaccagtgacc

SEQ ID NO: 223103 - DNA, 25 bp, Probe Sequence
gaaactcgccaagaatatgccctgg

SEQ ID NO: 223104 - DNA, 25 bp, Probe Sequence
gaacatcggacatgaaatagcccgt

SEQ ID NO: 223105 - DNA, 25 bp, Probe Sequence
gaacatcgttcaccgaatacacttt

SEQ ID NO: 223106 - DNA, 25 bp, Probe Sequence
gaacggttgaccaagatacagcata

SEQ ID NO: 223107 - DNA, 25 bp, Probe Sequence
gaacgctgatgatcccaacaaagat

SEQ ID NO: 223108 - DNA, 25 bp, Probe Sequence
gaactcgattgttctgccacacaag

SEQ ID NO: 223109 - DNA, 25 bp, Probe Sequence
gaactcttaaatcctcagatgccag

SEQ ID NO: 223110 - DNA, 25 bp, Probe Sequence
gaactcttaaagattgctgcttttt

SEQ ID NO: 223111 - DNA, 25 bp, Probe Sequence
gaacagttaaacactgcctttcctc

SEQ ID NO: 223112 - DNA, 25 bp, Probe Sequence
gaaatccaaaacacttctggtccct

SEQ ID NO: 223113 - DNA, 25 bp, Probe Sequence
gaaatccaaaacacttctggtccct

SEQ ID NO: 223114 - DNA, 25 bp, Probe Sequence
gaaagccaagatacccttagtgacc

SEQ ID NO: 223115 - DNA, 25 bp, Probe Sequence
gaacgttattcagcctaactatcct

SEQ ID NO: 223116 - DNA, 25 bp, Probe Sequence
gaactttgaaatgccagaactaccc

SEQ ID NO: 223117 - DNA, 25 bp, Probe Sequence
gaacttcgagactcatgcacaagct

SEQ ID NO: 223118 - DNA, 25 bp, Probe Sequence
gaacttcagcagacaacaagcaatt

SEQ ID NO: 223119 - DNA, 25 bp, Probe Sequence
gaacttcatagtacagcgacacagc

SEQ ID NO: 223120 - DNA, 25 bp, Probe Sequence
gaacttcatagtacagcgacacagc

SEQ ID NO: 223121 - DNA, 25 bp, Probe Sequence
gaacgtgctagaacagctcaccgca

SEQ ID NO: 223122 - DNA, 25 bp, Probe Sequence
gaacaggaggcaaagccacgcgtgg

SEQ ID NO: 223123 - DNA, 25 bp, Probe Sequence
gaactgtgacaggaagcccaaggca

SEQ ID NO: 223124 - DNA, 25 bp, Probe Sequence
gaacgaacagcctgacacatacgca

SEQ ID NO: 223125 - DNA, 25 bp, Probe Sequence
gaacggaggcctggactctgaggca

SEQ ID NO: 223126 - DNA, 25 bp, Probe Sequence
gaacggaggcctggactctgaggca

SEQ ID NO: 223127 - DNA, 25 bp, Probe Sequence
gaacggaggcctggactctgaggca

SEQ ID NO: 223128 - DNA, 25 bp, Probe Sequence
gaacgagaacttgtccatgtgccaa

SEQ ID NO: 223129 - DNA, 25 bp, Probe Sequence
gaacaggaaagtttctcagcgccga

SEQ ID NO: 223130 - DNA, 25 bp, Probe Sequence
gaaaagtttgccttccaagccgaag

SEQ ID NO: 223131 - DNA, 25 bp, Probe Sequence
gaaaattttgaggctcctctgccca

SEQ ID NO: 223132 - DNA, 25 bp, Probe Sequence
gaacaattcctagcacctgtcggaa

SEQ ID NO: 223133 - DNA, 25 bp, Probe Sequence
gaacaattagcaggaccacttcgtc

SEQ ID NO: 223134 - DNA, 25 bp, Probe Sequence
gaacagaatgcatttcttcactccg

SEQ ID NO: 223135 - DNA, 25 bp, Probe Sequence
gaacaatcgtttatcatttccgggg

SEQ ID NO: 223136 - DNA, 25 bp, Probe Sequence
gaaactttgcttctaattcctggtt

SEQ ID NO: 223137 - DNA, 25 bp, Probe Sequence
gaaacttttttaatacctgtgccat

SEQ ID NO: 223138 - DNA, 25 bp, Probe Sequence
gaacgtttacttgtgtccatgtgcc

SEQ ID NO: 223139 - DNA, 25 bp, Probe Sequence
gaacgtatatcacataattccagtc

SEQ ID NO: 223140 - DNA, 25 bp, Probe Sequence
gaacagattctactacaattcagtc

SEQ ID NO: 223141 - DNA, 25 bp, Probe Sequence
gaacagagtccctaaagctagtcta

SEQ ID NO: 223142 - DNA, 25 bp, Probe Sequence
gaaaggaccctgtgagccgattgtc

SEQ ID NO: 223143 - DNA, 25 bp, Probe Sequence
gagggtaggcctttggttgaaggct

SEQ ID NO: 223144 - DNA, 25 bp, Probe Sequence
gacagttgggctgtttttaagtgtt

SEQ ID NO: 223145 - DNA, 25 bp, Probe Sequence
gtcaatgggtggagtatttacggta

SEQ ID NO: 223146 - DNA, 25 bp, Probe Sequence
gatcaattttggagaccttggccgc

SEQ ID NO: 223147 - DNA, 25 bp, Probe Sequence
gaacattgttggaaacccttccagg

SEQ ID NO: 223148 - DNA, 25 bp, Probe Sequence
gaactttgtggaaacattctttcga

SEQ ID NO: 223149 - DNA, 25 bp, Probe Sequence
gaacttctgtgattaatcgctttta

SEQ ID NO: 223150 - DNA, 25 bp, Probe Sequence
gaactttggaaagtggccactatac

SEQ ID NO: 223151 - DNA, 25 bp, Probe Sequence
gaacttattaacatggccattataa

SEQ ID NO: 223152 - DNA, 25 bp, Probe Sequence
gaacttgtcataaaatcgatcagtt

SEQ ID NO: 223153 - DNA, 25 bp, Probe Sequence
gaactgttccatcaatcgatttccc

SEQ ID NO: 223154 - DNA, 25 bp, Probe Sequence
gaactcattcataggaaggtgtttc

SEQ ID NO: 223155 - DNA, 25 bp, Probe Sequence
gaacattctcaataaggttgtgaca

SEQ ID NO: 223156 - DNA, 25 bp, Probe Sequence
gaacttccttactaattattacaat

SEQ ID NO: 223157 - DNA, 25 bp, Probe Sequence
gaacttgtttacaacatttttgcaa

SEQ ID NO: 223158 - DNA, 25 bp, Probe Sequence
gaacttgtttggaacttgtcataaa

SEQ ID NO: 223159 - DNA, 25 bp, Probe Sequence
gaactgatccttgacacttccaaaa

SEQ ID NO: 223160 - DNA, 25 bp, Probe Sequence
gaactacctatggacatctattaaa

SEQ ID NO: 223161 - DNA, 25 bp, Probe Sequence
gaactgtgactggtacttaataaac

SEQ ID NO: 223162 - DNA, 25 bp, Probe Sequence
gaacggtgtctttctttataaatgc

SEQ ID NO: 223163 - DNA, 25 bp, Probe Sequence
gaacggttgccccttatttaatgct

SEQ ID NO: 223164 - DNA, 25 bp, Probe Sequence
gaactgtattcctgttttgtatatt

SEQ ID NO: 223165 - DNA, 25 bp, Probe Sequence
gaacgtttccaggcattttgtctcc

SEQ ID NO: 223166 - DNA, 25 bp, Probe Sequence
gaacaccttacaccctgtgttcatc

SEQ ID NO: 223167 - DNA, 25 bp, Probe Sequence
gaactccttagagaagtttcacttc

SEQ ID NO: 223168 - DNA, 25 bp, Probe Sequence
gaacacgtctttgaagttgtggctg

SEQ ID NO: 223169 - DNA, 25 bp, Probe Sequence
gaacacgtcttgctaaacttcttag

SEQ ID NO: 223170 - DNA, 25 bp, Probe Sequence
gaacacgtttttacatacttttgca

SEQ ID NO: 223171 - DNA, 25 bp, Probe Sequence
gaacgggcttttggctactatggac

SEQ ID NO: 223172 - DNA, 25 bp, Probe Sequence
gaacgttgttattactacctgcctc

SEQ ID NO: 223173 - DNA, 25 bp, Probe Sequence
gaacgtgatggttaagctaccttca

SEQ ID NO: 223174 - DNA, 25 bp, Probe Sequence
gaacgatgatagtgacctactttct

SEQ ID NO: 223175 - DNA, 25 bp, Probe Sequence
gaacactccagataagtcaatttct

SEQ ID NO: 223176 - DNA, 25 bp, Probe Sequence
gaactgcctcagtaaattcttaggg

SEQ ID NO: 223177 - DNA, 25 bp, Probe Sequence
gaactgacatcctaacagtgttgag

SEQ ID NO: 223178 - DNA, 25 bp, Probe Sequence
gaactaatataatagcagatgtcag

SEQ ID NO: 223179 - DNA, 25 bp, Probe Sequence
gaacttattttcagagatgatagaa

SEQ ID NO: 223180 - DNA, 25 bp, Probe Sequence
gaacttaattaacgtgagattggca

SEQ ID NO: 223181 - DNA, 25 bp, Probe Sequence
gaacttcactggaggtcaattgcac

SEQ ID NO: 223182 - DNA, 25 bp, Probe Sequence
gaacttcggtaaagccatcattcac

SEQ ID NO: 223183 - DNA, 25 bp, Probe Sequence
gaacttcgagatacgggcacatacg

SEQ ID NO: 223184 - DNA, 25 bp, Probe Sequence
gaactcccagctagagcgtgagaac

SEQ ID NO: 223185 - DNA, 25 bp, Probe Sequence
gaactttcactcacagtagaagcta

SEQ ID NO: 223186 - DNA, 25 bp, Probe Sequence
gaactcattttcctcagtagagact

SEQ ID NO: 223187 - DNA, 25 bp, Probe Sequence
gaacttatctttgcagctgagtact

SEQ ID NO: 223188 - DNA, 25 bp, Probe Sequence
gaactttcctacttggcagtacatc

SEQ ID NO: 223189 - DNA, 25 bp, Probe Sequence
gaactttccattttggcgctattac

SEQ ID NO: 223190 - DNA, 25 bp, Probe Sequence
gaacttgtgacaggtttgcctatta

SEQ ID NO: 223191 - DNA, 25 bp, Probe Sequence
gaactcagtgaagtgttagcaaaaa

SEQ ID NO: 223192 - DNA, 25 bp, Probe Sequence
gaactcagctgggttggtgaattaa

SEQ ID NO: 223193 - DNA, 25 bp, Probe Sequence
gaactacttgggagctatgatccac

SEQ ID NO: 223194 - DNA, 25 bp, Probe Sequence
gaactacttgggagctatgatccac

SEQ ID NO: 223195 - DNA, 25 bp, Probe Sequence
gaacagattctggggagttttcatc

SEQ ID NO: 223196 - DNA, 25 bp, Probe Sequence
gaaactatctggagagggtcctcgt

SEQ ID NO: 223197 - DNA, 25 bp, Probe Sequence
gaaattttgagtcactggaccttgc

SEQ ID NO: 223198 - DNA, 25 bp, Probe Sequence
gaacttgttgctgattttgaccttg

SEQ ID NO: 223199 - DNA, 25 bp, Probe Sequence
gaactttctgcagtttttgacttca

SEQ ID NO: 223200 - DNA, 25 bp, Probe Sequence
gaacattctcacgtgtttggtgctt

SEQ ID NO: 223201 - DNA, 25 bp, Probe Sequence
gaaacttcagtctgtagggcttcct

SEQ ID NO: 223202 - DNA, 25 bp, Probe Sequence
gaaactaggctctgtgacggcatag

SEQ ID NO: 223203 - DNA, 25 bp, Probe Sequence
gaaatataagcctgcggccttaact

SEQ ID NO: 223204 - DNA, 25 bp, Probe Sequence
gaactgaataactgcagtgacttga

SEQ ID NO: 223205 - DNA, 25 bp, Probe Sequence
gaactgtaaatcttcaggaatatgt

SEQ ID NO: 223206 - DNA, 25 bp, Probe Sequence
gaactgcaaatactccaaggatatg

SEQ ID NO: 223207 - DNA, 25 bp, Probe Sequence
gaactgctcaatattcaatctgttg

SEQ ID NO: 223208 - DNA, 25 bp, Probe Sequence
gaacttcatggcatatcaactttgc

SEQ ID NO: 223209 - DNA, 25 bp, Probe Sequence
gaacttctgtgcacatgacatcttt

SEQ ID NO: 223210 - DNA, 25 bp, Probe Sequence
gaactttgtcattatgatttcatta

SEQ ID NO: 223211 - DNA, 25 bp, Probe Sequence
gaactttgtcattatgatttcatta

SEQ ID NO: 223212 - DNA, 25 bp, Probe Sequence
gaactttatcagtatgctttgttga

SEQ ID NO: 223213 - DNA, 25 bp, Probe Sequence
gaacttttagggttgtgactggctt

SEQ ID NO: 223214 - DNA, 25 bp, Probe Sequence
gaacattttgaagcttgctcctggt

SEQ ID NO: 223215 - DNA, 25 bp, Probe Sequence
gaactgaatgctgacctgttccgtg

SEQ ID NO: 223216 - DNA, 25 bp, Probe Sequence
gaacagggctggtgcgagatcacgg

SEQ ID NO: 223217 - DNA, 25 bp, Probe Sequence
gaactgtacatgcttcggtcagggt

SEQ ID NO: 223218 - DNA, 25 bp, Probe Sequence
gaactggaatgccttggggcgtgga

SEQ ID NO: 223219 - DNA, 25 bp, Probe Sequence
gaactgtggtgcctctgtgaggtgg

SEQ ID NO: 223220 - DNA, 25 bp, Probe Sequence
gaactcggcatgctcgatgaagtcg

SEQ ID NO: 223221 - DNA, 25 bp, Probe Sequence
gaacatgggcatcagaggccagtag

SEQ ID NO: 223222 - DNA, 25 bp, Probe Sequence
gaacagcaggtgacaggcctagcta

SEQ ID NO: 223223 - DNA, 25 bp, Probe Sequence
gaactgaaatgcattccttgctagc

SEQ ID NO: 223224 - DNA, 25 bp, Probe Sequence
gaactcacaagcaattccttctgga

SEQ ID NO: 223225 - DNA, 25 bp, Probe Sequence
gaactccaacatcaatttcattgca

SEQ ID NO: 223226 - DNA, 25 bp, Probe Sequence
gaactccaacatcaatttcattgca

SEQ ID NO: 223227 - DNA, 25 bp, Probe Sequence
gaactccaacatcaatttcattgca

SEQ ID NO: 223228 - DNA, 25 bp, Probe Sequence
gaactccaacatcaatttcattgca

SEQ ID NO: 223229 - DNA, 25 bp, Probe Sequence
gaacatgtgaaacaattgactgaga

SEQ ID NO: 223230 - DNA, 25 bp, Probe Sequence
gaacttgaaaccagtgacagtgagt

SEQ ID NO: 223231 - DNA, 25 bp, Probe Sequence
gacagttaccccagggagattatgt

SEQ ID NO: 223232 - DNA, 25 bp, Probe Sequence
gaacttaccaccctctggaatttat

SEQ ID NO: 223233 - DNA, 25 bp, Probe Sequence
gaactataccactgacttcattttc

SEQ ID NO: 223234 - DNA, 25 bp, Probe Sequence
gaactaaatcacagtactcaacttc

SEQ ID NO: 223235 - DNA, 25 bp, Probe Sequence
gaacttattcacgtaactgaacacc

SEQ ID NO: 223236 - DNA, 25 bp, Probe Sequence
gaactctcttagtcataaaaacatc

SEQ ID NO: 223237 - DNA, 25 bp, Probe Sequence
gaactatccgaacaagggacatctt

SEQ ID NO: 223238 - DNA, 25 bp, Probe Sequence
gaactacctggatatggagtacttc

SEQ ID NO: 223239 - DNA, 25 bp, Probe Sequence
gaactatcgcattgataatgccagc

SEQ ID NO: 223240 - DNA, 25 bp, Probe Sequence
gaacattcgtagtatctgcagcacc

SEQ ID NO: 223241 - DNA, 25 bp, Probe Sequence
gaacttaggagctattcatcactaa

SEQ ID NO: 223242 - DNA, 25 bp, Probe Sequence
gaactgaacacacatgttcacacca

SEQ ID NO: 223243 - DNA, 25 bp, Probe Sequence
gaactacagcgaccatgatgtcatc

SEQ ID NO: 223244 - DNA, 25 bp, Probe Sequence
gaacatacacgttagagtcaaacag

SEQ ID NO: 223245 - DNA, 25 bp, Probe Sequence
gaacaaaagtaagggcaaggcaaag

SEQ ID NO: 223246 - DNA, 25 bp, Probe Sequence
tgaacaaatccgggggcaaggccaa

SEQ ID NO: 223247 - DNA, 25 bp, Probe Sequence
gaacacagacctccgggaagaaata

SEQ ID NO: 223248 - DNA, 25 bp, Probe Sequence
gaacacatacgtgcggtcaacaaaa

SEQ ID NO: 223249 - DNA, 25 bp, Probe Sequence
gaactaatcgctgatcgtcagatca

SEQ ID NO: 223250 - DNA, 25 bp, Probe Sequence
gaactgaaggataatctggcaaatg

SEQ ID NO: 223251 - DNA, 25 bp, Probe Sequence
gaactggcaggaaatgcatcaaaag

SEQ ID NO: 223252 - DNA, 25 bp, Probe Sequence
gaactcgcatgatgaaccagagggc

SEQ ID NO: 223253 - DNA, 25 bp, Probe Sequence
gaactgcagcatcatgtaatctggg

SEQ ID NO: 223254 - DNA, 25 bp, Probe Sequence
gaactgacagcagtgcttacatcaa

SEQ ID NO: 223255 - DNA, 25 bp, Probe Sequence
gaacatgacagaatcttcagactat

SEQ ID NO: 223256 - DNA, 25 bp, Probe Sequence
gaactatactgctttgagatctcat

SEQ ID NO: 223257 - DNA, 25 bp, Probe Sequence
gaacattccacatttgatgatgata

SEQ ID NO: 223258 - DNA, 25 bp, Probe Sequence
gaacttcagctgattgcagagatat

SEQ ID NO: 223259 - DNA, 25 bp, Probe Sequence
gaactgacactgaatatgtgcttag

SEQ ID NO: 223260 - DNA, 25 bp, Probe Sequence
gaactatgtctggaaggctgtggtc

SEQ ID NO: 223261 - DNA, 25 bp, Probe Sequence
gaactatgtctggaaggctgtggtc

SEQ ID NO: 223262 - DNA, 25 bp, Probe Sequence
gaactgcttctgaaaggctttggac

SEQ ID NO: 223263 - DNA, 25 bp, Probe Sequence
gaactgctttattggatgctgctgg

SEQ ID NO: 223264 - DNA, 25 bp, Probe Sequence
gaactgccattgccatataggctgg

SEQ ID NO: 223265 - DNA, 25 bp, Probe Sequence
gaactcctatgagatgcgcctggtt

SEQ ID NO: 223266 - DNA, 25 bp, Probe Sequence
gacaccaatatagtgacctcatgtg

SEQ ID NO: 223267 - DNA, 25 bp, Probe Sequence
gaacattgatgatggcacctcagat

SEQ ID NO: 223268 - DNA, 25 bp, Probe Sequence
gaacatggagctgtcatcactcaac

SEQ ID NO: 223269 - DNA, 25 bp, Probe Sequence
gaacattggctggtcaggatataca

SEQ ID NO: 223270 - DNA, 25 bp, Probe Sequence
gaacagtggctggcatatgatatgt

SEQ ID NO: 223271 - DNA, 25 bp, Probe Sequence
gaaatgtagatactatatgatagtc

SEQ ID NO: 223272 - DNA, 25 bp, Probe Sequence
gaacatgtgtgaaagttgatcatac

SEQ ID NO: 223273 - DNA, 25 bp, Probe Sequence
gaacagtgtaatatgcttcacaaag

SEQ ID NO: 223274 - DNA, 25 bp, Probe Sequence
gaacaggtgcgacttctgagaagaa

SEQ ID NO: 223275 - DNA, 25 bp, Probe Sequence
gaactgttagcacgactgtgtccaa

SEQ ID NO: 223276 - DNA, 25 bp, Probe Sequence
gaacagctctaccgatatgttacca

SEQ ID NO: 223277 - DNA, 25 bp, Probe Sequence
gaacagtaactgccatcaagatgag

SEQ ID NO: 223278 - DNA, 25 bp, Probe Sequence
gaaattaacccatacgcaggggcct

SEQ ID NO: 223279 - DNA, 25 bp, Probe Sequence
gaaaggaagaaataggccgggcgcg

SEQ ID NO: 223280 - DNA, 25 bp, Probe Sequence
gaactgggaaacccaggccttcctg

SEQ ID NO: 223281 - DNA, 25 bp, Probe Sequence
gaaataggttaaccggcctgtggtg

SEQ ID NO: 223282 - DNA, 25 bp, Probe Sequence
gaaatttttgtcactcccagaggtg

SEQ ID NO: 223283 - DNA, 25 bp, Probe Sequence
gaacattgttaacacatccctaggt

SEQ ID NO: 223284 - DNA, 25 bp, Probe Sequence
gacttttctaaagatgaactgaggc

SEQ ID NO: 223285 - DNA, 25 bp, Probe Sequence
gaactatatcaacatcttaaagagg

SEQ ID NO: 223286 - DNA, 25 bp, Probe Sequence
gaacttagcacagattatataccag

SEQ ID NO: 223287 - DNA, 25 bp, Probe Sequence
gaactttgccagcattgatgaacgg

SEQ ID NO: 223288 - DNA, 25 bp, Probe Sequence
gaactttcttcgttgcatatactgg

SEQ ID NO: 223289 - DNA, 25 bp, Probe Sequence
gaactcttttatttctgtatgtgga

SEQ ID NO: 223290 - DNA, 25 bp, Probe Sequence
gaactcattgttcttcgaagtgaaa

SEQ ID NO: 223291 - DNA, 25 bp, Probe Sequence
gaactgcaatttccattcttttaaa

SEQ ID NO: 223292 - DNA, 25 bp, Probe Sequence
gaactaagcattcattgttttatta

SEQ ID NO: 223293 - DNA, 25 bp, Probe Sequence
gaactacagcttttaagattgtact

SEQ ID NO: 223294 - DNA, 25 bp, Probe Sequence
gaactcacagtttcaacaatgaccc

SEQ ID NO: 223295 - DNA, 25 bp, Probe Sequence
gaactcactgctagctaagagacct

SEQ ID NO: 223296 - DNA, 25 bp, Probe Sequence
gaactcattcatacaacgtacacat

SEQ ID NO: 223297 - DNA, 25 bp, Probe Sequence
gaactttatatttgctgtaatcatt

SEQ ID NO: 223298 - DNA, 25 bp, Probe Sequence
gaactctttctttggtattccatcc

SEQ ID NO: 223299 - DNA, 25 bp, Probe Sequence
gaactctatctgtggtttataatct

SEQ ID NO: 223300 - DNA, 25 bp, Probe Sequence
gaacacctagtgagatttcaaactt

SEQ ID NO: 223301 - DNA, 25 bp, Probe Sequence
gaacattccatgttagtatatcaaa

SEQ ID NO: 223302 - DNA, 25 bp, Probe Sequence
gaacagccactcttatgtaaaaaca

SEQ ID NO: 223303 - DNA, 25 bp, Probe Sequence
gaactggagtccttatataaataga

SEQ ID NO: 223304 - DNA, 25 bp, Probe Sequence
gaactggaccacttaactttgtgac

SEQ ID NO: 223305 - DNA, 25 bp, Probe Sequence
gaacttaccatagtatttttgtatt

SEQ ID NO: 223306 - DNA, 25 bp, Probe Sequence
gaacttgcacctatattttccttct

SEQ ID NO: 223307 - DNA, 25 bp, Probe Sequence
gaacttacacttcatctgttccacc

SEQ ID NO: 223308 - DNA, 25 bp, Probe Sequence
gaacttaagcatatactgtgtaaac

SEQ ID NO: 223309 - DNA, 25 bp, Probe Sequence
gaacttatagtgggagctgctgtca

SEQ ID NO: 223310 - DNA, 25 bp, Probe Sequence
gaaatatgaaggtggccgtgaatta

SEQ ID NO: 223311 - DNA, 25 bp, Probe Sequence
gaaaaaattcggcctcctgaaatga

SEQ ID NO: 223312 - DNA, 25 bp, Probe Sequence
gaaaaggttcttcttgggagtatgt

SEQ ID NO: 223313 - DNA, 25 bp, Probe Sequence
gaaactgtaattgccttcgggttgt

SEQ ID NO: 223314 - DNA, 25 bp, Probe Sequence
taataattttctgtgctaagggtcc

SEQ ID NO: 223315 - DNA, 25 bp, Probe Sequence
gagtaaatggttggctctacgggct

SEQ ID NO: 223316 - DNA, 25 bp, Probe Sequence
gacatcaaggaggtcttcgtccacc

SEQ ID NO: 223317 - DNA, 25 bp, Probe Sequence
gaactcttggtggaacagaccagcc

SEQ ID NO: 223318 - DNA, 25 bp, Probe Sequence
gaactctgttgataataccacacca

SEQ ID NO: 223319 - DNA, 25 bp, Probe Sequence
gaactagtctggtaatgcaccacct

SEQ ID NO: 223320 - DNA, 25 bp, Probe Sequence
gaacttactgtgtactacctgcatt

SEQ ID NO: 223321 - DNA, 25 bp, Probe Sequence
gaactctatttattcccacatcaat

SEQ ID NO: 223322 - DNA, 25 bp, Probe Sequence
gaactcaattaattccttcatccta

SEQ ID NO: 223323 - DNA, 25 bp, Probe Sequence
gaactaagcattttactcacaccca

SEQ ID NO: 223324 - DNA, 25 bp, Probe Sequence
gaaaatgactgatgtactaaaccca

SEQ ID NO: 223325 - DNA, 25 bp, Probe Sequence
gaaaatgactgatgtactaaaccca

SEQ ID NO: 223326 - DNA, 25 bp, Probe Sequence
gaaaatcacatgcagctcatctaag

SEQ ID NO: 223327 - DNA, 25 bp, Probe Sequence
gaaaatcacatgcagctcatctaag

SEQ ID NO: 223328 - DNA, 25 bp, Probe Sequence
gaacaggctcaggactatctcaaga

SEQ ID NO: 223329 - DNA, 25 bp, Probe Sequence
gaacaggccatggatctggtgaaga

SEQ ID NO: 223330 - DNA, 25 bp, Probe Sequence
gaacaggcttacttttgaaggaggt

SEQ ID NO: 223331 - DNA, 25 bp, Probe Sequence
gaaaccttaccactgtgactgggac

SEQ ID NO: 223332 - DNA, 25 bp, Probe Sequence
gaaagccgaggctggggctgggtca

SEQ ID NO: 223333 - DNA, 25 bp, Probe Sequence
gaaagccgaggctggggctgggtca

SEQ ID NO: 223334 - DNA, 25 bp, Probe Sequence
gaaagccgaggctggggctgggtca

SEQ ID NO: 223335 - DNA, 25 bp, Probe Sequence
gaacagagcggaaaggggctgggga

SEQ ID NO: 223336 - DNA, 25 bp, Probe Sequence
gaacagagtcaggcaaggggtgggg

SEQ ID NO: 223337 - DNA, 25 bp, Probe Sequence
gaaaaacaacagcggttgccaggag

SEQ ID NO: 223338 - DNA, 25 bp, Probe Sequence
gaacaacaagcttggaggtctgcca

SEQ ID NO: 223339 - DNA, 25 bp, Probe Sequence
gaacagccggggtatgtggctgaca

SEQ ID NO: 223340 - DNA, 25 bp, Probe Sequence
gaaagtgccttggcatagggctcga

SEQ ID NO: 223341 - DNA, 25 bp, Probe Sequence
gaaaatcacttaaatggagatccag

SEQ ID NO: 223342 - DNA, 25 bp, Probe Sequence
gaacaccctctaaatgggaaagtat

SEQ ID NO: 223343 - DNA, 25 bp, Probe Sequence
gaaaccctctcagaggaacatgtta

SEQ ID NO: 223344 - DNA, 25 bp, Probe Sequence
gaaagtggcttctaaggtactgtct

SEQ ID NO: 223345 - DNA, 25 bp, Probe Sequence
gaacttggcattttagatctaattc

SEQ ID NO: 223346 - DNA, 25 bp, Probe Sequence
gaacttgactatctagaggaagtaa

SEQ ID NO: 223347 - DNA, 25 bp, Probe Sequence
gaactgtgacaaagtagggtactgc

SEQ ID NO: 223348 - DNA, 25 bp, Probe Sequence
gaactgtgagaataaggactttgat

SEQ ID NO: 223349 - DNA, 25 bp, Probe Sequence
gaactcagagaagaggtcctctctt

SEQ ID NO: 223350 - DNA, 25 bp, Probe Sequence
gaactagaatggcctgttcctctgt

SEQ ID NO: 223351 - DNA, 25 bp, Probe Sequence
gaacaagtaggggtgccttgcttaa

SEQ ID NO: 223352 - DNA, 25 bp, Probe Sequence
gaaaatgatgaaaagtcgtgttctg

SEQ ID NO: 223353 - DNA, 25 bp, Probe Sequence
gaacacattgagggagtcttggtgc

SEQ ID NO: 223354 - DNA, 25 bp, Probe Sequence
gaactatattgcggacattgaggtg

SEQ ID NO: 223355 - DNA, 25 bp, Probe Sequence
gaactgatgagtgtgcaattgagag

SEQ ID NO: 223356 - DNA, 25 bp, Probe Sequence
gaactcatggtaacatattctgggg

SEQ ID NO: 223357 - DNA, 25 bp, Probe Sequence
gaactcagtgaatctactccagagc

SEQ ID NO: 223358 - DNA, 25 bp, Probe Sequence
gaacagcgataacgtggctgccggc

SEQ ID NO: 223359 - DNA, 25 bp, Probe Sequence
gaacactgaaacattcatctaggac

SEQ ID NO: 223360 - DNA, 25 bp, Probe Sequence
gaacactgaaagctattctcttgaa

SEQ ID NO: 223361 - DNA, 25 bp, Probe Sequence
gaacactgaaagctattctcttgaa

SEQ ID NO: 223362 - DNA, 25 bp, Probe Sequence
gaacactgaaagctattctcttgaa

SEQ ID NO: 223363 - DNA, 25 bp, Probe Sequence
gaacagcaaataccttgtttggaac

SEQ ID NO: 223364 - DNA, 25 bp, Probe Sequence
gaacagacaaactgttttccacagc

SEQ ID NO: 223365 - DNA, 25 bp, Probe Sequence
gaaagaaacttatcctctcctacac

SEQ ID NO: 223366 - DNA, 25 bp, Probe Sequence
gaaagaccagtagacgctcctctac

SEQ ID NO: 223367 - DNA, 25 bp, Probe Sequence
gaacaaccagtaaactgttacttga

SEQ ID NO: 223368 - DNA, 25 bp, Probe Sequence
gtaaatccagtcgcggtgtgaccga

SEQ ID NO: 223369 - DNA, 25 bp, Probe Sequence
gaacaccctttgggggtggcacagg

SEQ ID NO: 223370 - DNA, 25 bp, Probe Sequence
gaacagcctttacaggttgccaggt

SEQ ID NO: 223371 - DNA, 25 bp, Probe Sequence
gacaagcttgttggggagttcctgg

SEQ ID NO: 223372 - DNA, 25 bp, Probe Sequence
gacagacttgggtggcaattcctca

SEQ ID NO: 223373 - DNA, 25 bp, Probe Sequence
gactagcttagttgggaaccttaga

SEQ ID NO: 223374 - DNA, 25 bp, Probe Sequence
gaaaatggagtctaaacacctataa

SEQ ID NO: 223375 - DNA, 25 bp, Probe Sequence
gaaactgggtttatgcactaaacgt

SEQ ID NO: 223376 - DNA, 25 bp, Probe Sequence
gaacaagtggttcttccagaaactg

SEQ ID NO: 223377 - DNA, 25 bp, Probe Sequence
gaaataattgttgttctgttaactg

SEQ ID NO: 223378 - DNA, 25 bp, Probe Sequence
gaaacaatctcttggttccctaaag

SEQ ID NO: 223379 - DNA, 25 bp, Probe Sequence
gaacaaatcgattggtcctccttgg

SEQ ID NO: 223380 - DNA, 25 bp, Probe Sequence
gaacaaatcgattggtcctccttgg

SEQ ID NO: 223381 - DNA, 25 bp, Probe Sequence
gaacatttagtttgtcctccaagtt

SEQ ID NO: 223382 - DNA, 25 bp, Probe Sequence
gaactttcatttttttccaggctgg

SEQ ID NO: 223383 - DNA, 25 bp, Probe Sequence
gaaatttggtgtgtcttggggtggg

SEQ ID NO: 223384 - DNA, 25 bp, Probe Sequence
gaacattggcggaattattgggggg

SEQ ID NO: 223385 - DNA, 25 bp, Probe Sequence
gaacttgcgggtttgaggataggag

SEQ ID NO: 223386 - DNA, 25 bp, Probe Sequence
gaactcggggtgtcagagggcaaag

SEQ ID NO: 223387 - DNA, 25 bp, Probe Sequence
gaactcctgggttcaagcgatcctt

SEQ ID NO: 223388 - DNA, 25 bp, Probe Sequence
gaactcctgggctcaagtgattctc

SEQ ID NO: 223389 - DNA, 25 bp, Probe Sequence
gaactcctgggctcaagtgattctc

SEQ ID NO: 223390 - DNA, 25 bp, Probe Sequence
gaactcctgggctcaagtgattctc

SEQ ID NO: 223391 - DNA, 25 bp, Probe Sequence
gaactactggtcttgctcaggtttc

SEQ ID NO: 223392 - DNA, 25 bp, Probe Sequence
gaacagtcagcgattccaggtttta

SEQ ID NO: 223393 - DNA, 25 bp, Probe Sequence
gaacagtttcctgaagggttccagt

SEQ ID NO: 223394 - DNA, 25 bp, Probe Sequence
taaaacttcacagaacgaggttcag

SEQ ID NO: 223395 - DNA, 25 bp, Probe Sequence
gaaacagttccaggaacgcctgctt

SEQ ID NO: 223396 - DNA, 25 bp, Probe Sequence
gaaacatttgtaaaatgccaggttt

SEQ ID NO: 223397 - DNA, 25 bp, Probe Sequence
gaaacttttatgacctctatttact

SEQ ID NO: 223398 - DNA, 25 bp, Probe Sequence
gaacattttctaccctaatttcact

SEQ ID NO: 223399 - DNA, 25 bp, Probe Sequence
gtacgggatctacaccaaggtcacc

SEQ ID NO: 223400 - DNA, 25 bp, Probe Sequence
gatacggcgtcaagaacctagttta

SEQ ID NO: 223401 - DNA, 25 bp, Probe Sequence
gaaaatgagctgagaaccttcttta

SEQ ID NO: 223402 - DNA, 25 bp, Probe Sequence
gaaaatgatctgaaggccctacgaa

SEQ ID NO: 223403 - DNA, 25 bp, Probe Sequence
gaacatagtaaacctcctcatctga

SEQ ID NO: 223404 - DNA, 25 bp, Probe Sequence
gaacatagtaaaatagaccattata

SEQ ID NO: 223405 - DNA, 25 bp, Probe Sequence
gaacaggtcaagaataacacttcaa

SEQ ID NO: 223406 - DNA, 25 bp, Probe Sequence
gaacagcgttgaattaactttagat

SEQ ID NO: 223407 - DNA, 25 bp, Probe Sequence
gaacagggttttaacgtgctcaact

SEQ ID NO: 223408 - DNA, 25 bp, Probe Sequence
gaacagtgggtggtatcagcaggcc

SEQ ID NO: 223409 - DNA, 25 bp, Probe Sequence
gaacagtgggtggtgtcagcaggtc

SEQ ID NO: 223410 - DNA, 25 bp, Probe Sequence
gaacacggagtgcttgcatctggaa

SEQ ID NO: 223411 - DNA, 25 bp, Probe Sequence
gaacatctggcaatttgacctggaa

SEQ ID NO: 223412 - DNA, 25 bp, Probe Sequence
gaactcaagcatagaagaatcgtag

SEQ ID NO: 223413 - DNA, 25 bp, Probe Sequence
gaacttcagtagaaactgctctgag

SEQ ID NO: 223414 - DNA, 25 bp, Probe Sequence
gaactaagcatgataactgcattgt

SEQ ID NO: 223415 - DNA, 25 bp, Probe Sequence
gaacttatgcaaataaccattgtca

SEQ ID NO: 223416 - DNA, 25 bp, Probe Sequence
gaacttatgcaaataaccattgtca

SEQ ID NO: 223417 - DNA, 25 bp, Probe Sequence
gaactttaaatgtagccttctcatg

SEQ ID NO: 223418 - DNA, 25 bp, Probe Sequence
gaactttatcattgaaagctgtttg

SEQ ID NO: 223419 - DNA, 25 bp, Probe Sequence
gaactttgactctaagagtttctgg

SEQ ID NO: 223420 - DNA, 25 bp, Probe Sequence
gaactttattactcttgttctgtgt

SEQ ID NO: 223421 - DNA, 25 bp, Probe Sequence
gaactaatgtttctcgtgctttgtg

SEQ ID NO: 223422 - DNA, 25 bp, Probe Sequence
gaactaatgtttctcgtgctttgtg

SEQ ID NO: 223423 - DNA, 25 bp, Probe Sequence
gaactactggaaccttgtttctctg

SEQ ID NO: 223424 - DNA, 25 bp, Probe Sequence
gaacatcacttctcctagtttttct

SEQ ID NO: 223425 - DNA, 25 bp, Probe Sequence
gaacatacttttgctgattcctacc

SEQ ID NO: 223426 - DNA, 25 bp, Probe Sequence
gaactagctgatttcgttttctata

SEQ ID NO: 223427 - DNA, 25 bp, Probe Sequence
gaactagctggaatagtcttctgct

SEQ ID NO: 223428 - DNA, 25 bp, Probe Sequence
gaacttgctggaacgactgtgggtc

SEQ ID NO: 223429 - DNA, 25 bp, Probe Sequence
gaacttcatggatcagatctggggc

SEQ ID NO: 223430 - DNA, 25 bp, Probe Sequence
gaacattcagatcgccgacggggat

SEQ ID NO: 223431 - DNA, 25 bp, Probe Sequence
gaacagcctttgccaatcgtgggtg

SEQ ID NO: 223432 - DNA, 25 bp, Probe Sequence
gaacatcactttccaaacggagtcc

SEQ ID NO: 223433 - DNA, 25 bp, Probe Sequence
gaactactttgagagcaccgatggc

SEQ ID NO: 223434 - DNA, 25 bp, Probe Sequence
gaacaccgaggagaaccggcgcttc

SEQ ID NO: 223435 - DNA, 25 bp, Probe Sequence
gaacaccgaggagaaccggcgcttc

SEQ ID NO: 223436 - DNA, 25 bp, Probe Sequence
gaacaccgaggagaaccggcgcttc

SEQ ID NO: 223437 - DNA, 25 bp, Probe Sequence
gaaaatggaagagacgcccctgcta

SEQ ID NO: 223438 - DNA, 25 bp, Probe Sequence
gagaaaagaagagacccacccactc

SEQ ID NO: 223439 - DNA, 25 bp, Probe Sequence
gaaaaggattcggaagccactccct

SEQ ID NO: 223440 - DNA, 25 bp, Probe Sequence
gaaaagaattagtctacggcattgc

SEQ ID NO: 223441 - DNA, 25 bp, Probe Sequence
gaacacaaatctattgacggaagtc

SEQ ID NO: 223442 - DNA, 25 bp, Probe Sequence
gacactaaccattttgacggacgac

SEQ ID NO: 223443 - DNA, 25 bp, Probe Sequence
gaacttgaccttttggggatgcgag

SEQ ID NO: 223444 - DNA, 25 bp, Probe Sequence
gaacagctagaggtcctggggtaag

SEQ ID NO: 223445 - DNA, 25 bp, Probe Sequence
gaaacgatgggtctgaagtccaaag

SEQ ID NO: 223446 - DNA, 25 bp, Probe Sequence
gaaacctaggaccaaagcacccaag

SEQ ID NO: 223447 - DNA, 25 bp, Probe Sequence
gaaaacagcacgtgcaaaggccccg

SEQ ID NO: 223448 - DNA, 25 bp, Probe Sequence
gaacaacgaagcactaatggtcaaa

SEQ ID NO: 223449 - DNA, 25 bp, Probe Sequence
gaactacaaacccaacatggtggag

SEQ ID NO: 223450 - DNA, 25 bp, Probe Sequence
gacactcccaagaccattcagggaa

SEQ ID NO: 223451 - DNA, 25 bp, Probe Sequence
gaacttccatacactgctggtggaa

SEQ ID NO: 223452 - DNA, 25 bp, Probe Sequence
gaacttgccacatacccaggtataa

SEQ ID NO: 223453 - DNA, 25 bp, Probe Sequence
gaactactacaaactgcgcacagaa

SEQ ID NO: 223454 - DNA, 25 bp, Probe Sequence
gaacatacccacaaatgcctatgat

SEQ ID NO: 223455 - DNA, 25 bp, Probe Sequence
gaactcaccatagagacccatgtca

SEQ ID NO: 223456 - DNA, 25 bp, Probe Sequence
gaactcacaaccagatccagaggca

SEQ ID NO: 223457 - DNA, 25 bp, Probe Sequence
gactctcaaaccatacctggtgggg

SEQ ID NO: 223458 - DNA, 25 bp, Probe Sequence
gacggaaacctcgacttggaggtgc

SEQ ID NO: 223459 - DNA, 25 bp, Probe Sequence
gaaactacacctgggctttggagtc

SEQ ID NO: 223460 - DNA, 25 bp, Probe Sequence
gaaaccatccactggttctaggtac

SEQ ID NO: 223461 - DNA, 25 bp, Probe Sequence
gaaaaattaactctttagttcatct

SEQ ID NO: 223462 - DNA, 25 bp, Probe Sequence
gaacaaattgattcctttaagcctc

SEQ ID NO: 223463 - DNA, 25 bp, Probe Sequence
gaaacccttgggcttaagcctcact

SEQ ID NO: 223464 - DNA, 25 bp, Probe Sequence
gaaatcaccctaggtatttcacccg

SEQ ID NO: 223465 - DNA, 25 bp, Probe Sequence
gaaaacagtcttgtagttcctcaaa

SEQ ID NO: 223466 - DNA, 25 bp, Probe Sequence
gaaaacgttcgtcaacatcacgcca

SEQ ID NO: 223467 - DNA, 25 bp, Probe Sequence
gaaaagtatagcgtggcaacccagc

SEQ ID NO: 223468 - DNA, 25 bp, Probe Sequence
gaaacagctacgaggaacaccggca

SEQ ID NO: 223469 - DNA, 25 bp, Probe Sequence
gaaacagcgccgggctgagaacctg

SEQ ID NO: 223470 - DNA, 25 bp, Probe Sequence
gaaaatgtccgaagtggaatctcct

SEQ ID NO: 223471 - DNA, 25 bp, Probe Sequence
gaacactggccataggaaatgctgt

SEQ ID NO: 223472 - DNA, 25 bp, Probe Sequence
gaacactgacccttggacaacattt

SEQ ID NO: 223473 - DNA, 25 bp, Probe Sequence
gaactctgaccaaattgtcaaattc

SEQ ID NO: 223474 - DNA, 25 bp, Probe Sequence
gaactcatgaccatagtgtggtgtt

SEQ ID NO: 223475 - DNA, 25 bp, Probe Sequence
gaacatataccaaatagtgggattg

SEQ ID NO: 223476 - DNA, 25 bp, Probe Sequence
gaaaaactaagttgtgtgccagtgc

SEQ ID NO: 223477 - DNA, 25 bp, Probe Sequence
gaaaaactaacacttgggttctatg

SEQ ID NO: 223478 - DNA, 25 bp, Probe Sequence
gaaaaaccaacatcgtatgttctca

SEQ ID NO: 223479 - DNA, 25 bp, Probe Sequence
gaaagtttaaaagcatagttacagt

SEQ ID NO: 223480 - DNA, 25 bp, Probe Sequence
gaacaggctgttcagagccatgcag

SEQ ID NO: 223481 - DNA, 25 bp, Probe Sequence
gaacagtgctgttctggagctgctg

SEQ ID NO: 223482 - DNA, 25 bp, Probe Sequence
gaacaggtgtgttgaagccgggctc

SEQ ID NO: 223483 - DNA, 25 bp, Probe Sequence
gaacaattgtctctggacggcagct

SEQ ID NO: 223484 - DNA, 25 bp, Probe Sequence
gaacttctcttggtggaaggtgatg

SEQ ID NO: 223485 - DNA, 25 bp, Probe Sequence
gaactttgtggactgtaagatttgt

SEQ ID NO: 223486 - DNA, 25 bp, Probe Sequence
gaacatttgtggtctttatttactt

SEQ ID NO: 223487 - DNA, 25 bp, Probe Sequence
gaactattgtgggtttttttgaatg

SEQ ID NO: 223488 - DNA, 25 bp, Probe Sequence
gaactattgtgggtttttttgaatg

SEQ ID NO: 223489 - DNA, 25 bp, Probe Sequence
gacatttggggagttattttttctg

SEQ ID NO: 223490 - DNA, 25 bp, Probe Sequence
gaacacggggaggtttgtttgtgtg

SEQ ID NO: 223491 - DNA, 25 bp, Probe Sequence
gaacataggtgtctttgtggtttta

SEQ ID NO: 223492 - DNA, 25 bp, Probe Sequence
gaacatggggtgatcctggggtgcc

SEQ ID NO: 223493 - DNA, 25 bp, Probe Sequence
gacctaggccaattcttggtagttc

SEQ ID NO: 223494 - DNA, 25 bp, Probe Sequence
gaactagtctacttcttaaaattca

SEQ ID NO: 223495 - DNA, 25 bp, Probe Sequence
gaactactctaagttatgagtaatc

SEQ ID NO: 223496 - DNA, 25 bp, Probe Sequence
gaactacctatgaatttggcaaact

SEQ ID NO: 223497 - DNA, 25 bp, Probe Sequence
gacaccgcctgtgatttggccaggc

SEQ ID NO: 223498 - DNA, 25 bp, Probe Sequence
gaacacccttgctttagtgcaaatc

SEQ ID NO: 223499 - DNA, 25 bp, Probe Sequence
gaactagttctgtcttaatgaaata

SEQ ID NO: 223500 - DNA, 25 bp, Probe Sequence
gaacagatgttcaacattcaagata

SEQ ID NO: 223501 - DNA, 25 bp, Probe Sequence
gaaaagtctgcaatgatcgaaatca

SEQ ID NO: 223502 - DNA, 25 bp, Probe Sequence
gaaaagtgcccagagcatagatgca

SEQ ID NO: 223503 - DNA, 25 bp, Probe Sequence
gaaaagtgtccagactcttgtgccc

SEQ ID NO: 223504 - DNA, 25 bp, Probe Sequence
gaaaagtcaccgattcttggacgac

SEQ ID NO: 223505 - DNA, 25 bp, Probe Sequence
gaaagaaaccttggcctggtctcga

SEQ ID NO: 223506 - DNA, 25 bp, Probe Sequence
gaaagaaaacaagaagttccctgtg

SEQ ID NO: 223507 - DNA, 25 bp, Probe Sequence
gaaagaccaaaagaatgtgacctat

SEQ ID NO: 223508 - DNA, 25 bp, Probe Sequence
gaacagaccgaagtgctgaagccac

SEQ ID NO: 223509 - DNA, 25 bp, Probe Sequence
gaacaggccacatggcaacagccac

SEQ ID NO: 223510 - DNA, 25 bp, Probe Sequence
gaacatgaggccttgttccacacac

SEQ ID NO: 223511 - DNA, 25 bp, Probe Sequence
gaacttggcctcttatcgatgaatt

SEQ ID NO: 223512 - DNA, 25 bp, Probe Sequence
gaactagtcctcttagaatttcttg

SEQ ID NO: 223513 - DNA, 25 bp, Probe Sequence
gaactagtcctcttagaatttcttg

SEQ ID NO: 223514 - DNA, 25 bp, Probe Sequence
gaactagttttttaatcctcaggca

SEQ ID NO: 223515 - DNA, 25 bp, Probe Sequence
gaacttggtgtttcacactaccaaa

SEQ ID NO: 223516 - DNA, 25 bp, Probe Sequence
gaacttgtcatctccaacgacaaaa

SEQ ID NO: 223517 - DNA, 25 bp, Probe Sequence
gaactatgatccccagaaggacaag

SEQ ID NO: 223518 - DNA, 25 bp, Probe Sequence
gaactatagatccacatgaacgcac

SEQ ID NO: 223519 - DNA, 25 bp, Probe Sequence
gaacatgaagatgattgaactgcac

SEQ ID NO: 223520 - DNA, 25 bp, Probe Sequence
gaacagagcagcagcatcgagaccc

SEQ ID NO: 223521 - DNA, 25 bp, Probe Sequence
gaaaagagcttgtccatgaacccag

SEQ ID NO: 223522 - DNA, 25 bp, Probe Sequence
gaacaaactctgtcactgggcatac

SEQ ID NO: 223523 - DNA, 25 bp, Probe Sequence
gaacaaaacgcagcgcatggtacca

SEQ ID NO: 223524 - DNA, 25 bp, Probe Sequence
gagccaaaatgtccccggaatctaa

SEQ ID NO: 223525 - DNA, 25 bp, Probe Sequence
gagccaaaattttccggcgtgacca

SEQ ID NO: 223526 - DNA, 25 bp, Probe Sequence
gaactaaagttcacaggcagatcac

SEQ ID NO: 223527 - DNA, 25 bp, Probe Sequence
gaactaattgtcaaacttgcaaatc

SEQ ID NO: 223528 - DNA, 25 bp, Probe Sequence
gaacttaatgtcaacagctacaaca

SEQ ID NO: 223529 - DNA, 25 bp, Probe Sequence
gaacaccaaatcaacctaattaagg

SEQ ID NO: 223530 - DNA, 25 bp, Probe Sequence
gaacattcaaaaacccctggaagag

SEQ ID NO: 223531 - DNA, 25 bp, Probe Sequence
gaacagtagaaaaacccaacaagag

SEQ ID NO: 223532 - DNA, 25 bp, Probe Sequence
gaaagatttcaaaccccaaacagtg

SEQ ID NO: 223533 - DNA, 25 bp, Probe Sequence
tgaaaattccccccttggagaagct

SEQ ID NO: 223534 - DNA, 25 bp, Probe Sequence
gaaaacccccaacttggagagagag

SEQ ID NO: 223535 - DNA, 25 bp, Probe Sequence
gaacaatcaaggcaactagtggaga

SEQ ID NO: 223536 - DNA, 25 bp, Probe Sequence
gaacagctctttggacactaggaaa

SEQ ID NO: 223537 - DNA, 25 bp, Probe Sequence
gaacagctctttggtgctgctggtg

SEQ ID NO: 223538 - DNA, 25 bp, Probe Sequence
gaacagactttccagctgctgaagt

SEQ ID NO: 223539 - DNA, 25 bp, Probe Sequence
gaacatgagcatgctgcagacccaa

SEQ ID NO: 223540 - DNA, 25 bp, Probe Sequence
gaacatgatgtcgtggtccagttgc

SEQ ID NO: 223541 - DNA, 25 bp, Probe Sequence
gaacatctgtcttggtcacagagct

SEQ ID NO: 223542 - DNA, 25 bp, Probe Sequence
gaaattgtaagcatccggtcagtaa

SEQ ID NO: 223543 - DNA, 25 bp, Probe Sequence
gaaaatgcctaatgcctggatctgt

SEQ ID NO: 223544 - DNA, 25 bp, Probe Sequence
gaacagtgccttttacaaatgcagt

SEQ ID NO: 223545 - DNA, 25 bp, Probe Sequence
gaacagtcaacctttctagtagttt

SEQ ID NO: 223546 - DNA, 25 bp, Probe Sequence
gaaagttaccatatgataattttta

SEQ ID NO: 223547 - DNA, 25 bp, Probe Sequence
gaacaggtagactttcaactattgt

SEQ ID NO: 223548 - DNA, 25 bp, Probe Sequence
gaacaatgtagacttccaaaatggt

SEQ ID NO: 223549 - DNA, 25 bp, Probe Sequence
gaaaattgaatctctaggactgcgt

SEQ ID NO: 223550 - DNA, 25 bp, Probe Sequence
gaaaattcgtcatttggaagtagta

SEQ ID NO: 223551 - DNA, 25 bp, Probe Sequence
gaaaattagttctgctgtgcttaaa

SEQ ID NO: 223552 - DNA, 25 bp, Probe Sequence
gaaaattagctcaaagtggattaaa

SEQ ID NO: 223553 - DNA, 25 bp, Probe Sequence
gaaaatttgctgcagaaaattccaa

SEQ ID NO: 223554 - DNA, 25 bp, Probe Sequence
gaaaattgttggcatcaaagtcacc

SEQ ID NO: 223555 - DNA, 25 bp, Probe Sequence
gaacaatgtttgatactctagtatg

SEQ ID NO: 223556 - DNA, 25 bp, Probe Sequence
gaacagtttgtctccattcttatgg

SEQ ID NO: 223557 - DNA, 25 bp, Probe Sequence
gaacagtttccgtacattcttgaac

SEQ ID NO: 223558 - DNA, 25 bp, Probe Sequence
gaacagtattcttcaaatttccaga

SEQ ID NO: 223559 - DNA, 25 bp, Probe Sequence
gaacagtatgtttgtaactatggca

SEQ ID NO: 223560 - DNA, 25 bp, Probe Sequence
gaacatttgtttcacagtatgggat

SEQ ID NO: 223561 - DNA, 25 bp, Probe Sequence
gaacatgttgcttaccgcaccattc

SEQ ID NO: 223562 - DNA, 25 bp, Probe Sequence
gaacatgttgcttaccgcaccattc

SEQ ID NO: 223563 - DNA, 25 bp, Probe Sequence
gaacatgatgttcatcaagacctgt

SEQ ID NO: 223564 - DNA, 25 bp, Probe Sequence
gaacagatgccatcaaagacctccc

SEQ ID NO: 223565 - DNA, 25 bp, Probe Sequence
gaacatgcctcttgcaaagggtctc

SEQ ID NO: 223566 - DNA, 25 bp, Probe Sequence
gaacatgcctgccaaagacgtgtcc

SEQ ID NO: 223567 - DNA, 25 bp, Probe Sequence
gaacagggtgcaggagagggatctc

SEQ ID NO: 223568 - DNA, 25 bp, Probe Sequence
gaacagttgagcagacagccacatt

SEQ ID NO: 223569 - DNA, 25 bp, Probe Sequence
gaaaactgactaatcagctgccaat

SEQ ID NO: 223570 - DNA, 25 bp, Probe Sequence
gaaaatctgtccctgagtatcagga

SEQ ID NO: 223571 - DNA, 25 bp, Probe Sequence
gaacagtcttaaaatgtacagtgta

SEQ ID NO: 223572 - DNA, 25 bp, Probe Sequence
gaacagcatctataaagtgacagta

SEQ ID NO: 223573 - DNA, 25 bp, Probe Sequence
gaacagtgaattatcagtgacatgt

SEQ ID NO: 223574 - DNA, 25 bp, Probe Sequence
gaaaaaatcgttctgtctttgtggg

SEQ ID NO: 223575 - DNA, 25 bp, Probe Sequence
gaaaaagtgggcttcgtctatcggg

SEQ ID NO: 223576 - DNA, 25 bp, Probe Sequence
gaaaacgtctgacttcctcaaggtg

SEQ ID NO: 223577 - DNA, 25 bp, Probe Sequence
gaaaacttctacccagcaaatggtg

SEQ ID NO: 223578 - DNA, 25 bp, Probe Sequence
gaaaatgcatttccccatataattt

SEQ ID NO: 223579 - DNA, 25 bp, Probe Sequence
gaaaatattagcacatttgcaataa

SEQ ID NO: 223580 - DNA, 25 bp, Probe Sequence
gaaaaagtactatgaggaaccaagg

SEQ ID NO: 223581 - DNA, 25 bp, Probe Sequence
gaaacacagtaagcaaaggttcaag

SEQ ID NO: 223582 - DNA, 25 bp, Probe Sequence
gaaaaggctaatggcacaactgtcc

SEQ ID NO: 223583 - DNA, 25 bp, Probe Sequence
gaacataagtaatcactaatgctca

SEQ ID NO: 223584 - DNA, 25 bp, Probe Sequence
gaaaatagttaacctttgcagcatt

SEQ ID NO: 223585 - DNA, 25 bp, Probe Sequence
gaaatcatagtcaaagggcttccct

SEQ ID NO: 223586 - DNA, 25 bp, Probe Sequence
gaaacccataaaggcgcactgccct

SEQ ID NO: 223587 - DNA, 25 bp, Probe Sequence
gaacaccatctatagcaccctggtc

SEQ ID NO: 223588 - DNA, 25 bp, Probe Sequence
gaacaacctgaaggactgcggcctc

SEQ ID NO: 223589 - DNA, 25 bp, Probe Sequence
gaaaactctggtgcagcttgaatct

SEQ ID NO: 223590 - DNA, 25 bp, Probe Sequence
gaacaccagtgttccagttcactta

SEQ ID NO: 223591 - DNA, 25 bp, Probe Sequence
gaacatcaaggttatcatggctact

SEQ ID NO: 223592 - DNA, 25 bp, Probe Sequence
gaacacagaggctcctggtttctca

SEQ ID NO: 223593 - DNA, 25 bp, Probe Sequence
gaacagcagggtagtctggtttcta

SEQ ID NO: 223594 - DNA, 25 bp, Probe Sequence
gaacagcaggttcggcatgagtgtg

SEQ ID NO: 223595 - DNA, 25 bp, Probe Sequence
gaacacatgtgcagtcactggtgtc

SEQ ID NO: 223596 - DNA, 25 bp, Probe Sequence
gaacatctgactagccacaagtatg

SEQ ID NO: 223597 - DNA, 25 bp, Probe Sequence
gaacatgcagaaacatcaacagaag

SEQ ID NO: 223598 - DNA, 25 bp, Probe Sequence
gaacatgcgatatacacagcagacc

SEQ ID NO: 223599 - DNA, 25 bp, Probe Sequence
gaacagaatattcacacagtgccaa

SEQ ID NO: 223600 - DNA, 25 bp, Probe Sequence
gaacagagtgttcgattctgcccta

SEQ ID NO: 223601 - DNA, 25 bp, Probe Sequence
gaacagagtgttcgattctgcccta

SEQ ID NO: 223602 - DNA, 25 bp, Probe Sequence
gaacagagatacagtgttgaacaat

SEQ ID NO: 223603 - DNA, 25 bp, Probe Sequence
gaacagagatatcagcctaggaaat

SEQ ID NO: 223604 - DNA, 25 bp, Probe Sequence
gaacatcagattcaagtaagaccat

SEQ ID NO: 223605 - DNA, 25 bp, Probe Sequence
gaacaatatttgtgtcataagacat

SEQ ID NO: 223606 - DNA, 25 bp, Probe Sequence
gaacacttgtttttatagacaatat

SEQ ID NO: 223607 - DNA, 25 bp, Probe Sequence
gaacagcctgatgtttgggaccttt

SEQ ID NO: 223608 - DNA, 25 bp, Probe Sequence
gaacaacatgagctttgtggtcctt

SEQ ID NO: 223609 - DNA, 25 bp, Probe Sequence
gaacatccaagtctttcttcttttt

SEQ ID NO: 223610 - DNA, 25 bp, Probe Sequence
gaacatccaagtctttcttcttttt

SEQ ID NO: 223611 - DNA, 25 bp, Probe Sequence
gaacatctacgtatagtcatcgcta

SEQ ID NO: 223612 - DNA, 25 bp, Probe Sequence
gaacattgattgtttggtatccgaa

SEQ ID NO: 223613 - DNA, 25 bp, Probe Sequence
gaacatgatattttatagcttggga

SEQ ID NO: 223614 - DNA, 25 bp, Probe Sequence
gaacatgataccataacgtggcaga

SEQ ID NO: 223615 - DNA, 25 bp, Probe Sequence
gtagactaccctaacagtgccaaag

SEQ ID NO: 223616 - DNA, 25 bp, Probe Sequence
gtaggaaaccctaagtctcaactgc

SEQ ID NO: 223617 - DNA, 25 bp, Probe Sequence
gataggaaaccagttattccttcta

SEQ ID NO: 223618 - DNA, 25 bp, Probe Sequence
gaaaggtacccatatgtcctttccg

SEQ ID NO: 223619 - DNA, 25 bp, Probe Sequence
gaaaacaaccaagaactctttcctg

SEQ ID NO: 223620 - DNA, 25 bp, Probe Sequence
gaaaataacaaagcccttattctct

SEQ ID NO: 223621 - DNA, 25 bp, Probe Sequence
gaaaattaatttgcatccctcgttt

SEQ ID NO: 223622 - DNA, 25 bp, Probe Sequence
gaaaatggagatgtcctctccactt

SEQ ID NO: 223623 - DNA, 25 bp, Probe Sequence
gaacagcatgggtaatacctgcctc

SEQ ID NO: 223624 - DNA, 25 bp, Probe Sequence
gaacatgtgaagttatactgtggct

SEQ ID NO: 223625 - DNA, 25 bp, Probe Sequence
gaacatcagaagactcatctttgtg

SEQ ID NO: 223626 - DNA, 25 bp, Probe Sequence
gaacatctgaggaaactaagcatga

SEQ ID NO: 223627 - DNA, 25 bp, Probe Sequence
gaacagccagttgaccaatcataga

SEQ ID NO: 223628 - DNA, 25 bp, Probe Sequence
gaacagggtgatgggccctatggtt

SEQ ID NO: 223629 - DNA, 25 bp, Probe Sequence
gaaacgtgatatggggtaaggaggt

SEQ ID NO: 223630 - DNA, 25 bp, Probe Sequence
gaaaagtgtgtggtctgtggggcgg

SEQ ID NO: 223631 - DNA, 25 bp, Probe Sequence
gaaaagctgtgtcagcggttccgca

SEQ ID NO: 223632 - DNA, 25 bp, Probe Sequence
gaaaactgtgcaattgtgtgcatgt

SEQ ID NO: 223633 - DNA, 25 bp, Probe Sequence
gaaaacagtctacctgtcagattct

SEQ ID NO: 223634 - DNA, 25 bp, Probe Sequence
gaacagagcaagtcactctcgattg

SEQ ID NO: 223635 - DNA, 25 bp, Probe Sequence
gaacagcgtaactccagacatgatg

SEQ ID NO: 223636 - DNA, 25 bp, Probe Sequence
gaacagcgtaactccagacatgatg

SEQ ID NO: 223637 - DNA, 25 bp, Probe Sequence
gaacatctgtgatctttctacagca

SEQ ID NO: 223638 - DNA, 25 bp, Probe Sequence
gaacactgcagctagctttctggac

SEQ ID NO: 223639 - DNA, 25 bp, Probe Sequence
gaaaccacgagcaagtgagcagatc

SEQ ID NO: 223640 - DNA, 25 bp, Probe Sequence
gaacagcttcgggcagtacatgaac

SEQ ID NO: 223641 - DNA, 25 bp, Probe Sequence
gaacatcttccagcagctacagacc

SEQ ID NO: 223642 - DNA, 25 bp, Probe Sequence
gaacactttcaccattacaggccat

SEQ ID NO: 223643 - DNA, 25 bp, Probe Sequence
gaacactattatcttcatgggcaga

SEQ ID NO: 223644 - DNA, 25 bp, Probe Sequence
gaacaccattgtccaatctgttgaa

SEQ ID NO: 223645 - DNA, 25 bp, Probe Sequence
gaacaccatcatgcctttataaagg

SEQ ID NO: 223646 - DNA, 25 bp, Probe Sequence
gaacaccatggggcttggataccgg

SEQ ID NO: 223647 - DNA, 25 bp, Probe Sequence
gaacactgcaagcccttaatcagcc

SEQ ID NO: 223648 - DNA, 25 bp, Probe Sequence
gaacacatgcaatttattaccagta

SEQ ID NO: 223649 - DNA, 25 bp, Probe Sequence
gaacactggaatgcatatactactt

SEQ ID NO: 223650 - DNA, 25 bp, Probe Sequence
gaacagctgtaatctatgaattcta

SEQ ID NO: 223651 - DNA, 25 bp, Probe Sequence
gaacacgtcatgtaccatgactggc

SEQ ID NO: 223652 - DNA, 25 bp, Probe Sequence
gaacaagtcatacctaatgctgcag

SEQ ID NO: 223653 - DNA, 25 bp, Probe Sequence
gaaacagctcattcagccaatatgc

SEQ ID NO: 223654 - DNA, 25 bp, Probe Sequence
gaaacagctcatgaggctacggaaa

SEQ ID NO: 223655 - DNA, 25 bp, Probe Sequence
gaacagactcagcagtgtgacggta

SEQ ID NO: 223656 - DNA, 25 bp, Probe Sequence
gaacagactcaggcgatgtgcttta

SEQ ID NO: 223657 - DNA, 25 bp, Probe Sequence
gaacagactcaggcgatgtgcttta

SEQ ID NO: 223658 - DNA, 25 bp, Probe Sequence
gaaagaccagcagaggcataaggtt

SEQ ID NO: 223659 - DNA, 25 bp, Probe Sequence
gaacaggaagcggggccacgtgttc

SEQ ID NO: 223660 - DNA, 25 bp, Probe Sequence
gagacagtaactgtgaccgtgggtc

SEQ ID NO: 223661 - DNA, 25 bp, Probe Sequence
gaacaaacgtgaggtctggagggtc

SEQ ID NO: 223662 - DNA, 25 bp, Probe Sequence
gaaaaatcggaccttcctgagacca

SEQ ID NO: 223663 - DNA, 25 bp, Probe Sequence
gaaaagtaataggtgtcctggagcc

SEQ ID NO: 223664 - DNA, 25 bp, Probe Sequence
gaaaactagtagtgtggagcagtgt

SEQ ID NO: 223665 - DNA, 25 bp, Probe Sequence
gaaaacttgcagactcaggggggtc

SEQ ID NO: 223666 - DNA, 25 bp, Probe Sequence
gaaaacttgcagactcaggggggtc

SEQ ID NO: 223667 - DNA, 25 bp, Probe Sequence
gaaaactttaagacgctggggcatc

SEQ ID NO: 223668 - DNA, 25 bp, Probe Sequence
gaaaatttaaatgctggtgctggtc

SEQ ID NO: 223669 - DNA, 25 bp, Probe Sequence
gaacaattttaatgtcacttgtctc

SEQ ID NO: 223670 - DNA, 25 bp, Probe Sequence
gaaaattattcacactacttgcatg

SEQ ID NO: 223671 - DNA, 25 bp, Probe Sequence
gaacaaactctacactacattgcaa

SEQ ID NO: 223672 - DNA, 25 bp, Probe Sequence
gaacaagaccaacaagaaggcagcg

SEQ ID NO: 223673 - DNA, 25 bp, Probe Sequence
gaaaagttcaacaactgcacgaacg

SEQ ID NO: 223674 - DNA, 25 bp, Probe Sequence
gaacatacttagtttctcatgtgaa

SEQ ID NO: 223675 - DNA, 25 bp, Probe Sequence
gaacaccaaagattgtctctggcaa

SEQ ID NO: 223676 - DNA, 25 bp, Probe Sequence
gaacaacagaactcttcaagaacct

SEQ ID NO: 223677 - DNA, 25 bp, Probe Sequence
gaaaactgaacttactctaacctca

SEQ ID NO: 223678 - DNA, 25 bp, Probe Sequence
gaaaatgctgggcaaccccagccgg

SEQ ID NO: 223679 - DNA, 25 bp, Probe Sequence
gaacaatggggaaagcttacagact

SEQ ID NO: 223680 - DNA, 25 bp, Probe Sequence
gaacacctgaggaaactaagcatga

SEQ ID NO: 223681 - DNA, 25 bp, Probe Sequence
gaacacctgaagcagcactacattg

SEQ ID NO: 223682 - DNA, 25 bp, Probe Sequence
gaacagagtgaacagccatatacca

SEQ ID NO: 223683 - DNA, 25 bp, Probe Sequence
gaacaagctacagagacacaaccca

SEQ ID NO: 223684 - DNA, 25 bp, Probe Sequence
gaacaactacatcaggattacctca

SEQ ID NO: 223685 - DNA, 25 bp, Probe Sequence
gaacaacaacttgaataccttgatc

SEQ ID NO: 223686 - DNA, 25 bp, Probe Sequence
gaacaaatcctggaacacacctatg

SEQ ID NO: 223687 - DNA, 25 bp, Probe Sequence
gaacaaatccgtgtcatatcctaag

SEQ ID NO: 223688 - DNA, 25 bp, Probe Sequence
gaaaatgtccctgtagaggaagagg

SEQ ID NO: 223689 - DNA, 25 bp, Probe Sequence
gaacaagcccttgataattaaacag

SEQ ID NO: 223690 - DNA, 25 bp, Probe Sequence
gaacaacccaaatagcatctagaaa

SEQ ID NO: 223691 - DNA, 25 bp, Probe Sequence
gaacaatggggatttagctttgcac

SEQ ID NO: 223692 - DNA, 25 bp, Probe Sequence
gaacaagcttgttctcaggctttga

SEQ ID NO: 223693 - DNA, 25 bp, Probe Sequence
gaaaagcagctgagctcaagtttgc

SEQ ID NO: 223694 - DNA, 25 bp, Probe Sequence
gaaacaagcatgaacggcagtctag

SEQ ID NO: 223695 - DNA, 25 bp, Probe Sequence
gaacacaattcaagccgattctagt

SEQ ID NO: 223696 - DNA, 25 bp, Probe Sequence
gaacaacttaaacattcatcagctg

SEQ ID NO: 223697 - DNA, 25 bp, Probe Sequence
gaacaacactaagccattcatgaag

SEQ ID NO: 223698 - DNA, 25 bp, Probe Sequence
gaacagaacaaaatatcaggatgca

SEQ ID NO: 223699 - DNA, 25 bp, Probe Sequence
gaacagtaaaatcacagcggaaaat

SEQ ID NO: 223700 - DNA, 25 bp, Probe Sequence
gaaaggaaagatcaacttagtactg

SEQ ID NO: 223701 - DNA, 25 bp, Probe Sequence
gaaaagaaacacgcacttagtctct

SEQ ID NO: 223702 - DNA, 25 bp, Probe Sequence
gaaaatggtcattctgaatcttcag

SEQ ID NO: 223703 - DNA, 25 bp, Probe Sequence
gaaaatgggctagtcacagttgcag

SEQ ID NO: 223704 - DNA, 25 bp, Probe Sequence
gaacacaggtgtgtacagcgtgctg

SEQ ID NO: 223705 - DNA, 25 bp, Probe Sequence
gaacactggtcagcttcagacactg

SEQ ID NO: 223706 - DNA, 25 bp, Probe Sequence
gaacactggttcattagagcaagac

SEQ ID NO: 223707 - DNA, 25 bp, Probe Sequence
gaacatcagcggcactctgtacaag

SEQ ID NO: 223708 - DNA, 25 bp, Probe Sequence
gaacaagctgggtatgtgcttgaag

SEQ ID NO: 223709 - DNA, 25 bp, Probe Sequence
gaaaagggggagtcatctggcaaaa

SEQ ID NO: 223710 - DNA, 25 bp, Probe Sequence
gaaaaagggccgttctgccatcaac

SEQ ID NO: 223711 - DNA, 25 bp, Probe Sequence
gaaaagcggaagcttctaccacacc

SEQ ID NO: 223712 - DNA, 25 bp, Probe Sequence
gaaaaggaactctgatctaccaccc

SEQ ID NO: 223713 - DNA, 25 bp, Probe Sequence
gaaaagggcagcctagtaagccaga

SEQ ID NO: 223714 - DNA, 25 bp, Probe Sequence
gaaactgggcatatggtacctcaat

SEQ ID NO: 223715 - DNA, 25 bp, Probe Sequence
gaaacttggactgcaggacttaatc

SEQ ID NO: 223716 - DNA, 25 bp, Probe Sequence
gaaacaaggaatccagtgaccaaac

SEQ ID NO: 223717 - DNA, 25 bp, Probe Sequence
gaacaagcagccatactgatgacca

SEQ ID NO: 223718 - DNA, 25 bp, Probe Sequence
gaaaatgagcacatagctggacaat

SEQ ID NO: 223719 - DNA, 25 bp, Probe Sequence
gaaaaagcacttgtcttaagcctac

SEQ ID NO: 223720 - DNA, 25 bp, Probe Sequence
gaaacaacccgacgctggaagttgg

SEQ ID NO: 223721 - DNA, 25 bp, Probe Sequence
gaaaagatgcccccactgggcagac

SEQ ID NO: 223722 - DNA, 25 bp, Probe Sequence
gaaaatatcctctacctgatggtag

SEQ ID NO: 223723 - DNA, 25 bp, Probe Sequence
gaacattatctcaatattttgtata

SEQ ID NO: 223724 - DNA, 25 bp, Probe Sequence
gaacattatctcaatattttgtata

SEQ ID NO: 223725 - DNA, 25 bp, Probe Sequence
gaacttgacttcttatgtgtgctct

SEQ ID NO: 223726 - DNA, 25 bp, Probe Sequence
gacactggacacactagttcccatt

SEQ ID NO: 223727 - DNA, 25 bp, Probe Sequence
gaacatgagaatctttttcccttgg

SEQ ID NO: 223728 - DNA, 25 bp, Probe Sequence
gaacatgaaatgcttctttctcagt

SEQ ID NO: 223729 - DNA, 25 bp, Probe Sequence
gaacatggaatacctcttcattagt

SEQ ID NO: 223730 - DNA, 25 bp, Probe Sequence
gaacatctgagctacccggataatt

SEQ ID NO: 223731 - DNA, 25 bp, Probe Sequence
gaacagcaacaattccggaacattt

SEQ ID NO: 223732 - DNA, 25 bp, Probe Sequence
gaacaaatcaatccacggatggaga

SEQ ID NO: 223733 - DNA, 25 bp, Probe Sequence
gaaaagctcagaactcaggtgaaac

SEQ ID NO: 223734 - DNA, 25 bp, Probe Sequence
gaacaagcgcgtgtgcgaggagatc

SEQ ID NO: 223735 - DNA, 25 bp, Probe Sequence
gaacaacgcctgtcacagagtagaa

SEQ ID NO: 223736 - DNA, 25 bp, Probe Sequence
gaacaacccgtaatgaatggcacga

SEQ ID NO: 223737 - DNA, 25 bp, Probe Sequence
gaaaagccaaacctgtagtgagcga

SEQ ID NO: 223738 - DNA, 25 bp, Probe Sequence
gaaaaaaagattctaacagctgtta

SEQ ID NO: 223739 - DNA, 25 bp, Probe Sequence
gaaaagatgtagtaccataacagta

SEQ ID NO: 223740 - DNA, 25 bp, Probe Sequence
gaacaccatggagaccatagactgg

SEQ ID NO: 223741 - DNA, 25 bp, Probe Sequence
gacacaccagaagaccaagatttac

SEQ ID NO: 223742 - DNA, 25 bp, Probe Sequence
gaacacacatgttcacaccaaattt

SEQ ID NO: 223743 - DNA, 25 bp, Probe Sequence
gaacacctgtacctcaacaacaata

SEQ ID NO: 223744 - DNA, 25 bp, Probe Sequence
gaacagattgttcctaaaccagaag

SEQ ID NO: 223745 - DNA, 25 bp, Probe Sequence
gaacaagattgtcctgaagaagtgg

SEQ ID NO: 223746 - DNA, 25 bp, Probe Sequence
gacaccggtgtaggaatgaccagag

SEQ ID NO: 223747 - DNA, 25 bp, Probe Sequence
gacccagctaaagatgagaccaagg

SEQ ID NO: 223748 - DNA, 25 bp, Probe Sequence
gaaaaaacaagctatggaccaagag

SEQ ID NO: 223749 - DNA, 25 bp, Probe Sequence
gaaaagaatacgtggaacacactgt

SEQ ID NO: 223750 - DNA, 25 bp, Probe Sequence
gaaaaaatccagtacttgactcgtg

SEQ ID NO: 223751 - DNA, 25 bp, Probe Sequence
gaaaactaccatcacttggtgagct

SEQ ID NO: 223752 - DNA, 25 bp, Probe Sequence
gaaaaatacctccagcttggcgacc

SEQ ID NO: 223753 - DNA, 25 bp, Probe Sequence
gaaatttgaccccacaattctacct

SEQ ID NO: 223754 - DNA, 25 bp, Probe Sequence
gaacacttacctatcaattctcacc

SEQ ID NO: 223755 - DNA, 25 bp, Probe Sequence
gaacatctctcagcatttactgtac

SEQ ID NO: 223756 - DNA, 25 bp, Probe Sequence
gaaaatctcattagtgaacttatct

SEQ ID NO: 223757 - DNA, 25 bp, Probe Sequence
gaaaattattagccagcaccagatg

SEQ ID NO: 223758 - DNA, 25 bp, Probe Sequence
gaaacaataatcccagatccagctg

SEQ ID NO: 223759 - DNA, 25 bp, Probe Sequence
gaacacgtggctcaagatcctggtg

SEQ ID NO: 223760 - DNA, 25 bp, Probe Sequence
gaaacgaagtacagatccggtcgga

SEQ ID NO: 223761 - DNA, 25 bp, Probe Sequence
gaaaagaaggacagacgcaaggaag

SEQ ID NO: 223762 - DNA, 25 bp, Probe Sequence
gaaaatcagaacattgcccaaggga

SEQ ID NO: 223763 - DNA, 25 bp, Probe Sequence
gaaactaaactctgtggaagggaag

SEQ ID NO: 223764 - DNA, 25 bp, Probe Sequence
gaacactgaaaccattgttggcagg

SEQ ID NO: 223765 - DNA, 25 bp, Probe Sequence
gaacaagaaatgcatctgtcttaga

SEQ ID NO: 223766 - DNA, 25 bp, Probe Sequence
gaaaagactgagcttccatgacatg

SEQ ID NO: 223767 - DNA, 25 bp, Probe Sequence
gaaaaactggctacccaatatggca

SEQ ID NO: 223768 - DNA, 25 bp, Probe Sequence
gactaatacaccacacctataggga

SEQ ID NO: 223769 - DNA, 25 bp, Probe Sequence
gacagacataaagaccctgttggga

SEQ ID NO: 223770 - DNA, 25 bp, Probe Sequence
gaacaatatagagcccacatttggg

SEQ ID NO: 223771 - DNA, 25 bp, Probe Sequence
gaacaaatatcagctccacctctga

SEQ ID NO: 223772 - DNA, 25 bp, Probe Sequence
gaacatatgatttgggctcacactt

SEQ ID NO: 223773 - DNA, 25 bp, Probe Sequence
gaaaatgattagtgtactgtttgaa

SEQ ID NO: 223774 - DNA, 25 bp, Probe Sequence
gaaaattttgtatgagttcttgaat

SEQ ID NO: 223775 - DNA, 25 bp, Probe Sequence
gaaaattttgtatgagttcttgaat

SEQ ID NO: 223776 - DNA, 25 bp, Probe Sequence
gaaagtaacgaatgaattcttcaaa

SEQ ID NO: 223777 - DNA, 25 bp, Probe Sequence
gaaaaaatcaaacaatcccatcaaa

SEQ ID NO: 223778 - DNA, 25 bp, Probe Sequence
gaaaaaacccagcatatagaaaaag

SEQ ID NO: 223779 - DNA, 25 bp, Probe Sequence
gaaaataccccacatgccagaaaag

SEQ ID NO: 223780 - DNA, 25 bp, Probe Sequence
gaaaaatgcccctcagtctgggaga

SEQ ID NO: 223781 - DNA, 25 bp, Probe Sequence
gaaaaggcagccacacgttacagga

SEQ ID NO: 223782 - DNA, 25 bp, Probe Sequence
gaaacaggcactttggtgttcactg

SEQ ID NO: 223783 - DNA, 25 bp, Probe Sequence
gaacatcgactttgacagtttcatc

SEQ ID NO: 223784 - DNA, 25 bp, Probe Sequence
gaacagcagctctttaagtgtttgc

SEQ ID NO: 223785 - DNA, 25 bp, Probe Sequence
gaaaagtcctggtagttcttgaggt

SEQ ID NO: 223786 - DNA, 25 bp, Probe Sequence
gaacaagtttgccaagtgcctcatg

SEQ ID NO: 223787 - DNA, 25 bp, Probe Sequence
gaaaaattccagcaggccatcgatt

SEQ ID NO: 223788 - DNA, 25 bp, Probe Sequence
gaaaatattagacaggcagcatcct

SEQ ID NO: 223789 - DNA, 25 bp, Probe Sequence
gaaaattgaaatcagccagcacgcc

SEQ ID NO: 223790 - DNA, 25 bp, Probe Sequence
gaaaattgccaccaaggccaaccct

SEQ ID NO: 223791 - DNA, 25 bp, Probe Sequence
gaaaattccacgaggctcattctca

SEQ ID NO: 223792 - DNA, 25 bp, Probe Sequence
gaaaaatcaacgtggcctttgagtt

SEQ ID NO: 223793 - DNA, 25 bp, Probe Sequence
gaaaaacaaccacactgcttcgatc

SEQ ID NO: 223794 - DNA, 25 bp, Probe Sequence
gaaaaactaccttcctgctatcaat

SEQ ID NO: 223795 - DNA, 25 bp, Probe Sequence
gaaaaactaccttcctgctatcaat

SEQ ID NO: 223796 - DNA, 25 bp, Probe Sequence
gaaaaaataccatcttatgaatagg

SEQ ID NO: 223797 - DNA, 25 bp, Probe Sequence
gaaaacaaggtatcatttaaagtgg

SEQ ID NO: 223798 - DNA, 25 bp, Probe Sequence
gaaaacaaggttcttttgataactg

SEQ ID NO: 223799 - DNA, 25 bp, Probe Sequence
gaacaacaagttcgacgctttgaaa

SEQ ID NO: 223800 - DNA, 25 bp, Probe Sequence
gacaccaaattccaaacttctaaat

SEQ ID NO: 223801 - DNA, 25 bp, Probe Sequence
gaaaacagaccaaattcttctaaat

SEQ ID NO: 223802 - DNA, 25 bp, Probe Sequence
gaacaataactcatgctatttctca

SEQ ID NO: 223803 - DNA, 25 bp, Probe Sequence
gaacaaatggctgtccagtttatta

SEQ ID NO: 223804 - DNA, 25 bp, Probe Sequence
gactataactgtgcttggtttcaaa

SEQ ID NO: 223805 - DNA, 25 bp, Probe Sequence
gaaaatggtttcaagttattcaaat

SEQ ID NO: 223806 - DNA, 25 bp, Probe Sequence
gaaaaggttaataattcatgccaaa

SEQ ID NO: 223807 - DNA, 25 bp, Probe Sequence
gaaaagctgttgggtcatttggtaa

SEQ ID NO: 223808 - DNA, 25 bp, Probe Sequence
gaacaagcgtctagactccttggga

SEQ ID NO: 223809 - DNA, 25 bp, Probe Sequence
gaacacacgtgttggtgcttctggg

SEQ ID NO: 223810 - DNA, 25 bp, Probe Sequence
gaacagcggtgttttttcatgcttc

SEQ ID NO: 223811 - DNA, 25 bp, Probe Sequence
gaaaggtgtcccagtacatttccct

SEQ ID NO: 223812 - DNA, 25 bp, Probe Sequence
gaaacctaccacagtaaatgttcca

SEQ ID NO: 223813 - DNA, 25 bp, Probe Sequence
gaaacctaccacagtaaatgttcca

SEQ ID NO: 223814 - DNA, 25 bp, Probe Sequence
gaaaacataaccagccattggctat

SEQ ID NO: 223815 - DNA, 25 bp, Probe Sequence
gaacacacattaccgctacattggc

SEQ ID NO: 223816 - DNA, 25 bp, Probe Sequence
gaacacaatcaacctgtaagtattt

SEQ ID NO: 223817 - DNA, 25 bp, Probe Sequence
gaacaggtgaatcagttgaatttgt

SEQ ID NO: 223818 - DNA, 25 bp, Probe Sequence
gaacagtgaatactagtggaattgt

SEQ ID NO: 223819 - DNA, 25 bp, Probe Sequence
gaacaacttggtttcagaatatgta

SEQ ID NO: 223820 - DNA, 25 bp, Probe Sequence
gaacaaccggtttctcagaagctga

SEQ ID NO: 223821 - DNA, 25 bp, Probe Sequence
gaaaacaggtctagtccaatcctat

SEQ ID NO: 223822 - DNA, 25 bp, Probe Sequence
gaaaagctgcttgtttactccttaa

SEQ ID NO: 223823 - DNA, 25 bp, Probe Sequence
gaaaacctttgtttgagactcttat

SEQ ID NO: 223824 - DNA, 25 bp, Probe Sequence
gaacaaacttgtatcggttcttaat

SEQ ID NO: 223825 - DNA, 25 bp, Probe Sequence
gatacataatttggaaaggttcttt

SEQ ID NO: 223826 - DNA, 25 bp, Probe Sequence
gaaataataactaaaggcttttgag

SEQ ID NO: 223827 - DNA, 25 bp, Probe Sequence
gaacacctcaggaaataggcttttg

SEQ ID NO: 223828 - DNA, 25 bp, Probe Sequence
gaacacctgaactgtaccatttctc

SEQ ID NO: 223829 - DNA, 25 bp, Probe Sequence
gaacacactgagacttgaatcaagt

SEQ ID NO: 223830 - DNA, 25 bp, Probe Sequence
gaaaatcttgtcttagaagggccag

SEQ ID NO: 223831 - DNA, 25 bp, Probe Sequence
gagaacccgtactctagggccaaat

SEQ ID NO: 223832 - DNA, 25 bp, Probe Sequence
gtaacagtcgtcgaactaggcctca

SEQ ID NO: 223833 - DNA, 25 bp, Probe Sequence
gtaacagtcgtcgaactaggcctca

SEQ ID NO: 223834 - DNA, 25 bp, Probe Sequence
gaaacagaccctgttagtccttcta

SEQ ID NO: 223835 - DNA, 25 bp, Probe Sequence
gaaaccccatctctacagttttgta

SEQ ID NO: 223836 - DNA, 25 bp, Probe Sequence
gaaacaagccctttaagtttatgct

SEQ ID NO: 223837 - DNA, 25 bp, Probe Sequence
gaaaaggcccagctcaagtctgaag

SEQ ID NO: 223838 - DNA, 25 bp, Probe Sequence
gaaaatgcatcccagagaaagttaa

SEQ ID NO: 223839 - DNA, 25 bp, Probe Sequence
gaaactatccgagggaagaatatga

SEQ ID NO: 223840 - DNA, 25 bp, Probe Sequence
gaaagattcaccaaggataaaacat

SEQ ID NO: 223841 - DNA, 25 bp, Probe Sequence
gaaaaagacctcaagaaagcaacga

SEQ ID NO: 223842 - DNA, 25 bp, Probe Sequence
gaaaaaaatcctgaacagtatccag

SEQ ID NO: 223843 - DNA, 25 bp, Probe Sequence
gaaaaaattcccgatttgtagcact

SEQ ID NO: 223844 - DNA, 25 bp, Probe Sequence
gaaaagacagtatccttattacctt

SEQ ID NO: 223845 - DNA, 25 bp, Probe Sequence
gaaaagacgctagccttattaacgc

SEQ ID NO: 223846 - DNA, 25 bp, Probe Sequence
gaaaagatggattcagttatttaag

SEQ ID NO: 223847 - DNA, 25 bp, Probe Sequence
gaaaagcggtccacattgttcagag

SEQ ID NO: 223848 - DNA, 25 bp, Probe Sequence
gaaaagtggtcagtccttcttgggc

SEQ ID NO: 223849 - DNA, 25 bp, Probe Sequence
gaaaaggtcaaggccttcttggctg

SEQ ID NO: 223850 - DNA, 25 bp, Probe Sequence
gaaaaggatcggtggacttggctcg

SEQ ID NO: 223851 - DNA, 25 bp, Probe Sequence
gaaaattactggtgtgacttttaat

SEQ ID NO: 223852 - DNA, 25 bp, Probe Sequence
gaaaattcataacgtgtatctttaa

SEQ ID NO: 223853 - DNA, 25 bp, Probe Sequence
gaaaatgtatgaacaggtatcctat

SEQ ID NO: 223854 - DNA, 25 bp, Probe Sequence
gaaaatgttaaccttacctatctct

SEQ ID NO: 223855 - DNA, 25 bp, Probe Sequence
gaaaagttcatccgtgaaccttcct

SEQ ID NO: 223856 - DNA, 25 bp, Probe Sequence
gaaaatggatttcgttatatcccct

SEQ ID NO: 223857 - DNA, 25 bp, Probe Sequence
gaacaaggagttcattcatctcaat

SEQ ID NO: 223858 - DNA, 25 bp, Probe Sequence
gaaaaggcattccagtgcctctcaa

SEQ ID NO: 223859 - DNA, 25 bp, Probe Sequence
gaaaagcctgctgtgtacaccaagg

SEQ ID NO: 223860 - DNA, 25 bp, Probe Sequence
gaacaacctgaacgtcaccgaggag

SEQ ID NO: 223861 - DNA, 25 bp, Probe Sequence
gaacaacctgaaccctacatggaag

SEQ ID NO: 223862 - DNA, 25 bp, Probe Sequence
gaaaatcctgaagtttctgttgaag

SEQ ID NO: 223863 - DNA, 25 bp, Probe Sequence
gaacacagctcggaattatcttttg

SEQ ID NO: 223864 - DNA, 25 bp, Probe Sequence
gaaaagcctgctgaatttatgttgt

SEQ ID NO: 223865 - DNA, 25 bp, Probe Sequence
gaaacaccactcctttttgtgtgtg

SEQ ID NO: 223866 - DNA, 25 bp, Probe Sequence
gaaaattcacttctatgtcttactg

SEQ ID NO: 223867 - DNA, 25 bp, Probe Sequence
gaaaattaactgcattattaactaa

SEQ ID NO: 223868 - DNA, 25 bp, Probe Sequence
gaaaattaacttatgtggactgtaa

SEQ ID NO: 223869 - DNA, 25 bp, Probe Sequence
gaaaatgtttccacgtctactgtaa

SEQ ID NO: 223870 - DNA, 25 bp, Probe Sequence
gaaaagtattccaacgtgatattcc

SEQ ID NO: 223871 - DNA, 25 bp, Probe Sequence
gaaaagatcagtctacctctactcc

SEQ ID NO: 223872 - DNA, 25 bp, Probe Sequence
gaaaataaagctcactgttactcgc

SEQ ID NO: 223873 - DNA, 25 bp, Probe Sequence
gaaaatcaaatactatcctatactc

SEQ ID NO: 223874 - DNA, 25 bp, Probe Sequence
gaacaataagaacacatctttcact

SEQ ID NO: 223875 - DNA, 25 bp, Probe Sequence
gaacaaactgaacgacattctcctc

SEQ ID NO: 223876 - DNA, 25 bp, Probe Sequence
gaaaagactcaaaaccatcatcaac

SEQ ID NO: 223877 - DNA, 25 bp, Probe Sequence
gaacacagcactaaatacaactcag

SEQ ID NO: 223878 - DNA, 25 bp, Probe Sequence
gaacacgcctggcaacataataaga

SEQ ID NO: 223879 - DNA, 25 bp, Probe Sequence
gaacagccacagcagatgacaaaaa

SEQ ID NO: 223880 - DNA, 25 bp, Probe Sequence
gaacagacacgggtgaatgctgcta

SEQ ID NO: 223881 - DNA, 25 bp, Probe Sequence
gaacaacgagcacagaattgcgcag

SEQ ID NO: 223882 - DNA, 25 bp, Probe Sequence
gaacagacaggcccagattgaggtg

SEQ ID NO: 223883 - DNA, 25 bp, Probe Sequence
gaacaaagactcctatctgatcctg

SEQ ID NO: 223884 - DNA, 25 bp, Probe Sequence
gaaaaagatccacgaccatgctcag

SEQ ID NO: 223885 - DNA, 25 bp, Probe Sequence
gaaaatacatatgcagtctagtcag

SEQ ID NO: 223886 - DNA, 25 bp, Probe Sequence
gaacagaatttcgatgcctatgtga

SEQ ID NO: 223887 - DNA, 25 bp, Probe Sequence
gacacagagatgctgcaagccatga

SEQ ID NO: 223888 - DNA, 25 bp, Probe Sequence
gaaaagattgtggagcatgcagaaa

SEQ ID NO: 223889 - DNA, 25 bp, Probe Sequence
gaacacactgtgaaagagcgaaaaa

SEQ ID NO: 223890 - DNA, 25 bp, Probe Sequence
gaacaccattgagggagctgggaga

SEQ ID NO: 223891 - DNA, 25 bp, Probe Sequence
gaaaacattatcaggagggaattca

SEQ ID NO: 223892 - DNA, 25 bp, Probe Sequence
gaaaaacttgcttaggactgaatat

SEQ ID NO: 223893 - DNA, 25 bp, Probe Sequence
gagaaagttagttcggctcgatttt

SEQ ID NO: 223894 - DNA, 25 bp, Probe Sequence
gaaaattcaagttagtacgcttctt

SEQ ID NO: 223895 - DNA, 25 bp, Probe Sequence
gaaaatcctatttatgaatcctgtc

SEQ ID NO: 223896 - DNA, 25 bp, Probe Sequence
gacactatccttatattttattgag

SEQ ID NO: 223897 - DNA, 25 bp, Probe Sequence
gacaattcacttatttgtggttttt

SEQ ID NO: 223898 - DNA, 25 bp, Probe Sequence
gaaaatctctgaactgtgtgggttt

SEQ ID NO: 223899 - DNA, 25 bp, Probe Sequence
gaacacattctgaaacggggtgata

SEQ ID NO: 223900 - DNA, 25 bp, Probe Sequence
gaacacattttttagcagctgggca

SEQ ID NO: 223901 - DNA, 25 bp, Probe Sequence
gaacacattttttagcagctgggca

SEQ ID NO: 223902 - DNA, 25 bp, Probe Sequence
gaacacattttttagcagctgggca

SEQ ID NO: 223903 - DNA, 25 bp, Probe Sequence
gaacaattattgtaggggtagcatt

SEQ ID NO: 223904 - DNA, 25 bp, Probe Sequence
gaaacttttatactaggcttcttag

SEQ ID NO: 223905 - DNA, 25 bp, Probe Sequence
gaacaattttatgatcggtcacttg

SEQ ID NO: 223906 - DNA, 25 bp, Probe Sequence
gaacaatttccaaaactgtccaggg

SEQ ID NO: 223907 - DNA, 25 bp, Probe Sequence
gaaaattctctcaagacttctccag

SEQ ID NO: 223908 - DNA, 25 bp, Probe Sequence
gaaacaattctgtcaactccatcac

SEQ ID NO: 223909 - DNA, 25 bp, Probe Sequence
gaacacaatttgttgtctgcaagca

SEQ ID NO: 223910 - DNA, 25 bp, Probe Sequence
gaacacaatttgtatggtcaacaga

SEQ ID NO: 223911 - DNA, 25 bp, Probe Sequence
gaacaacgtggctggacaaacatct

SEQ ID NO: 223912 - DNA, 25 bp, Probe Sequence
gaacacatggtagagtctccaacct

SEQ ID NO: 223913 - DNA, 25 bp, Probe Sequence
gaacacatctgttcgatttcaaaac

SEQ ID NO: 223914 - DNA, 25 bp, Probe Sequence
gaaaatcttcatggaattcacaaag

SEQ ID NO: 223915 - DNA, 25 bp, Probe Sequence
gaaaaaaattactcacaccaggtgg

SEQ ID NO: 223916 - DNA, 25 bp, Probe Sequence
gaaaaagatctaaagtcacccggcg

SEQ ID NO: 223917 - DNA, 25 bp, Probe Sequence
gaaagtgagtatgcggctgcacccg

SEQ ID NO: 223918 - DNA, 25 bp, Probe Sequence
gaaaatggtttaccagctcccaggt

SEQ ID NO: 223919 - DNA, 25 bp, Probe Sequence
gaaaatattttagatccccagggct

SEQ ID NO: 223920 - DNA, 25 bp, Probe Sequence
gagaggatatttaaccccctcaggg

SEQ ID NO: 223921 - DNA, 25 bp, Probe Sequence
gttttcttgtaagcccctagaggca

SEQ ID NO: 223922 - DNA, 25 bp, Probe Sequence
gttggttgtaaattctcccaggagc

SEQ ID NO: 223923 - DNA, 25 bp, Probe Sequence
gttggttgtaaattctcccaggagc

SEQ ID NO: 223924 - DNA, 25 bp, Probe Sequence
gttggttgtaaattctcccaggagc

SEQ ID NO: 223925 - DNA, 25 bp, Probe Sequence
gtaggtggtgggatctcaccgtggg

SEQ ID NO: 223926 - DNA, 25 bp, Probe Sequence
gtaggcggtacgaaccctaatggag

SEQ ID NO: 223927 - DNA, 25 bp, Probe Sequence
gaaacggacccatcccatagtaagt

SEQ ID NO: 223928 - DNA, 25 bp, Probe Sequence
gaaaaaatcccagccctagtagcaa

SEQ ID NO: 223929 - DNA, 25 bp, Probe Sequence
gacaaaaaccacatactaatttgaa

SEQ ID NO: 223930 - DNA, 25 bp, Probe Sequence
gaaaaaattaaatgctctctcctaa

SEQ ID NO: 223931 - DNA, 25 bp, Probe Sequence
gaaaaaatctaaaaggccgcctatg

SEQ ID NO: 223932 - DNA, 25 bp, Probe Sequence
gaaaaagttgagaccagacccgttg

SEQ ID NO: 223933 - DNA, 25 bp, Probe Sequence
gaaaagatgatgtatgaccagcgac

SEQ ID NO: 223934 - DNA, 25 bp, Probe Sequence
gaacaagattttgccacagtatcgt

SEQ ID NO: 223935 - DNA, 25 bp, Probe Sequence
gaacaaatttctgccagaaccacca

SEQ ID NO: 223936 - DNA, 25 bp, Probe Sequence
gaaacacttttgggcccaacacttg

SEQ ID NO: 223937 - DNA, 25 bp, Probe Sequence
gaaactgttttggctgggcctactt

SEQ ID NO: 223938 - DNA, 25 bp, Probe Sequence
gaacacctttggagacatgaccact

SEQ ID NO: 223939 - DNA, 25 bp, Probe Sequence
gaacacactatttgtaacagccaac

SEQ ID NO: 223940 - DNA, 25 bp, Probe Sequence
gaaaagctgttactagaaccaatgt

SEQ ID NO: 223941 - DNA, 25 bp, Probe Sequence
gaaaagtgggactagacacggtgtc

SEQ ID NO: 223942 - DNA, 25 bp, Probe Sequence
gaaaagtcttcctggaggtgttcat

SEQ ID NO: 223943 - DNA, 25 bp, Probe Sequence
gaaaaattgtcctgaagatggattg

SEQ ID NO: 223944 - DNA, 25 bp, Probe Sequence
gaaaacaggccgggcacagtggctc

SEQ ID NO: 223945 - DNA, 25 bp, Probe Sequence
gaacaacacagcgaaaccgtatctc

SEQ ID NO: 223946 - DNA, 25 bp, Probe Sequence
gaacaaacacttcaaggtgcagctc

SEQ ID NO: 223947 - DNA, 25 bp, Probe Sequence
gaacacaaagatgtttgaggagctc

SEQ ID NO: 223948 - DNA, 25 bp, Probe Sequence
gaaacaaaatagatctccgagatga

SEQ ID NO: 223949 - DNA, 25 bp, Probe Sequence
gaaacaacatttctcttccggaata

SEQ ID NO: 223950 - DNA, 25 bp, Probe Sequence
gaaaattaattcacttcctgaaata

SEQ ID NO: 223951 - DNA, 25 bp, Probe Sequence
gaaaatctatatttgtcttccgatc

SEQ ID NO: 223952 - DNA, 25 bp, Probe Sequence
gaaaatgcttcattagtttccccta

SEQ ID NO: 223953 - DNA, 25 bp, Probe Sequence
gaaaatgtgctattgagattccagt

SEQ ID NO: 223954 - DNA, 25 bp, Probe Sequence
gaaaattgctttgatcgcgcatgac

SEQ ID NO: 223955 - DNA, 25 bp, Probe Sequence
gaaaattgctaagacagtagatgtt

SEQ ID NO: 223956 - DNA, 25 bp, Probe Sequence
gaaaattataaatcactactcatat

SEQ ID NO: 223957 - DNA, 25 bp, Probe Sequence
gaaagcatttctgaagcccctttct

SEQ ID NO: 223958 - DNA, 25 bp, Probe Sequence
gaaaacttatgaaatacccttcttg

SEQ ID NO: 223959 - DNA, 25 bp, Probe Sequence
gaaaaatctataagtctgccctttt

SEQ ID NO: 223960 - DNA, 25 bp, Probe Sequence
gaaacaatattaactggcactacta

SEQ ID NO: 223961 - DNA, 25 bp, Probe Sequence
gaaacatactaaacggacagactcc

SEQ ID NO: 223962 - DNA, 25 bp, Probe Sequence
gaacaatgttcacacaggaaacagc

SEQ ID NO: 223963 - DNA, 25 bp, Probe Sequence
gaacaatgagaacaccaggacacag

SEQ ID NO: 223964 - DNA, 25 bp, Probe Sequence
gaacaagatgcagaaccatggctat

SEQ ID NO: 223965 - DNA, 25 bp, Probe Sequence
gaacacattgcaggggccagtgtca

SEQ ID NO: 223966 - DNA, 25 bp, Probe Sequence
gaacacattcagctgctgggtgtcc

SEQ ID NO: 223967 - DNA, 25 bp, Probe Sequence
gaaaatctcatcgtcatggttctgc

SEQ ID NO: 223968 - DNA, 25 bp, Probe Sequence
gaacagccattccacatgtgttccc

SEQ ID NO: 223969 - DNA, 25 bp, Probe Sequence
gaacactcttcatcatgatggattt

SEQ ID NO: 223970 - DNA, 25 bp, Probe Sequence
gaacactcctctcagggatcatatc

SEQ ID NO: 223971 - DNA, 25 bp, Probe Sequence
gaacacccatgggaggtcatgcctg

SEQ ID NO: 223972 - DNA, 25 bp, Probe Sequence
gaacacccatgggaggtcatgcctg

SEQ ID NO: 223973 - DNA, 25 bp, Probe Sequence
gaaatgcaccatgaagcttcgagtg

SEQ ID NO: 223974 - DNA, 25 bp, Probe Sequence
gaacagccagcagaagatgggcagg

SEQ ID NO: 223975 - DNA, 25 bp, Probe Sequence
gaacaacatcaaaaggtggcaggcc

SEQ ID NO: 223976 - DNA, 25 bp, Probe Sequence
gaaaattcatgctgatggtggggca

SEQ ID NO: 223977 - DNA, 25 bp, Probe Sequence
gaaaatggacagggtgatggttgca

SEQ ID NO: 223978 - DNA, 25 bp, Probe Sequence
gaaaatggcacagaaatggtatcaa

SEQ ID NO: 223979 - DNA, 25 bp, Probe Sequence
gaaaaggcatcataggtttctgaaa

SEQ ID NO: 223980 - DNA, 25 bp, Probe Sequence
gaaaacccttaggacctctgaatca

SEQ ID NO: 223981 - DNA, 25 bp, Probe Sequence
gaaaaacactcaaggactttgttca

SEQ ID NO: 223982 - DNA, 25 bp, Probe Sequence
gaaaaacaccaaacagccgcttgtc

SEQ ID NO: 223983 - DNA, 25 bp, Probe Sequence
gaaaaccatgagatacagccgtatg

SEQ ID NO: 223984 - DNA, 25 bp, Probe Sequence
gaaaaacatcaggtaagccattagt

SEQ ID NO: 223985 - DNA, 25 bp, Probe Sequence
gaaaaactcatatttaggtaagctg

SEQ ID NO: 223986 - DNA, 25 bp, Probe Sequence
gaaagtagctaatccagtgtaatct

SEQ ID NO: 223987 - DNA, 25 bp, Probe Sequence
gaaaaagctgaagcggttcattgct

SEQ ID NO: 223988 - DNA, 25 bp, Probe Sequence
gaaaagactgggccgttactgattg

SEQ ID NO: 223989 - DNA, 25 bp, Probe Sequence
gaaaagatcatggggtttagctcaa

SEQ ID NO: 223990 - DNA, 25 bp, Probe Sequence
gaaaagtagcagcttctctatccag

SEQ ID NO: 223991 - DNA, 25 bp, Probe Sequence
gaaaatctagacattcctatcaatg

SEQ ID NO: 223992 - DNA, 25 bp, Probe Sequence
gaaaattagggttcaaatcaatcga

SEQ ID NO: 223993 - DNA, 25 bp, Probe Sequence
gaaaattgatgctgtacaaggcaaa

SEQ ID NO: 223994 - DNA, 25 bp, Probe Sequence
gaaaatgattcatctcaaatgtaca

SEQ ID NO: 223995 - DNA, 25 bp, Probe Sequence
gaacacgaggcaacaaacatgaaat

SEQ ID NO: 223996 - DNA, 25 bp, Probe Sequence
gaacacagagagcgagacgcggagt

SEQ ID NO: 223997 - DNA, 25 bp, Probe Sequence
gaacacagagacagcagcccagtgc

SEQ ID NO: 223998 - DNA, 25 bp, Probe Sequence
gaacacagatgcgtggagtccgcga

SEQ ID NO: 223999 - DNA, 25 bp, Probe Sequence
gaaacaggcttgcatgctgatccga

SEQ ID NO: 224000 - DNA, 25 bp, Probe Sequence
gaacacagagctaagactggtctca

SEQ ID NO: 224001 - DNA, 25 bp, Probe Sequence
gaacacaagcataatattcggccca

SEQ ID NO: 224002 - DNA, 25 bp, Probe Sequence
gaacacaaataattgcttttcccac

SEQ ID NO: 224003 - DNA, 25 bp, Probe Sequence
gaaacagaaagacgttttccaacat

SEQ ID NO: 224004 - DNA, 25 bp, Probe Sequence
gaaacagtcaagtggttccaatagt

SEQ ID NO: 224005 - DNA, 25 bp, Probe Sequence
gaaaactgcaatttggttccaccac

SEQ ID NO: 224006 - DNA, 25 bp, Probe Sequence
gaaaatggcaactttgttggaccaa

SEQ ID NO: 224007 - DNA, 25 bp, Probe Sequence
gaaagtgggacctggtgggctcaac

SEQ ID NO: 224008 - DNA, 25 bp, Probe Sequence
gacagcagggagacttgggtcggcc

SEQ ID NO: 224009 - DNA, 25 bp, Probe Sequence
gacacccagaatatgggaaggccaa

SEQ ID NO: 224010 - DNA, 25 bp, Probe Sequence
gaaacctgaagttagaaaggctcaa

SEQ ID NO: 224011 - DNA, 25 bp, Probe Sequence
gacaaccttcccagaaagtccaagc

SEQ ID NO: 224012 - DNA, 25 bp, Probe Sequence
gaaaatccgcccagaagacttcaag

SEQ ID NO: 224013 - DNA, 25 bp, Probe Sequence
gaaaacaaccctttagtcgctatag

SEQ ID NO: 224014 - DNA, 25 bp, Probe Sequence
gaaaaaccagtcaattacgcctaag

SEQ ID NO: 224015 - DNA, 25 bp, Probe Sequence
gaaaatcacctgttatctactccca

SEQ ID NO: 224016 - DNA, 25 bp, Probe Sequence
gaaaatcacagcctttgtacccaat

SEQ ID NO: 224017 - DNA, 25 bp, Probe Sequence
gaaagacacatgctaactacctatt

SEQ ID NO: 224018 - DNA, 25 bp, Probe Sequence
gaaaagaacacaaacgacctgatgg

SEQ ID NO: 224019 - DNA, 25 bp, Probe Sequence
gaaaagtaattatcccctgagagtc

SEQ ID NO: 224020 - DNA, 25 bp, Probe Sequence
gaacaaaaactattatcaccaggat

SEQ ID NO: 224021 - DNA, 25 bp, Probe Sequence
gaaaatcgaacatatacacacaggt

SEQ ID NO: 224022 - DNA, 25 bp, Probe Sequence
gaaaatggcaaatatggccaggcga

SEQ ID NO: 224023 - DNA, 25 bp, Probe Sequence
gaacacatgaacatagggaggggaa

SEQ ID NO: 224024 - DNA, 25 bp, Probe Sequence
gaaacagatatccgagtgggtgggg

SEQ ID NO: 224025 - DNA, 25 bp, Probe Sequence
gaaaagaaacaactgtggatggtgg

SEQ ID NO: 224026 - DNA, 25 bp, Probe Sequence
gaacaagacgcctgttgtctgttga

SEQ ID NO: 224027 - DNA, 25 bp, Probe Sequence
gaacaaacgttggttgtgtgtgtgt

SEQ ID NO: 224028 - DNA, 25 bp, Probe Sequence
gaaaagggttgtctgcgtgttctcg

SEQ ID NO: 224029 - DNA, 25 bp, Probe Sequence
gaaaaggtgtttcagagcttttact

SEQ ID NO: 224030 - DNA, 25 bp, Probe Sequence
gaaaatagtgttcccagagcacttt

SEQ ID NO: 224031 - DNA, 25 bp, Probe Sequence
gaacaattggctatccatggactct

SEQ ID NO: 224032 - DNA, 25 bp, Probe Sequence
gaacaactggtttattctgagtttc

SEQ ID NO: 224033 - DNA, 25 bp, Probe Sequence
gaaaactgcccttgggctgactttt

SEQ ID NO: 224034 - DNA, 25 bp, Probe Sequence
gaaaactcattatgggctactcttt

SEQ ID NO: 224035 - DNA, 25 bp, Probe Sequence
gaaaagctgattctggttatctctt

SEQ ID NO: 224036 - DNA, 25 bp, Probe Sequence
gaaatacctatcatcgtttctctcc

SEQ ID NO: 224037 - DNA, 25 bp, Probe Sequence
gaaatcaggtattggcagtttttcc

SEQ ID NO: 224038 - DNA, 25 bp, Probe Sequence
gaaaggatgtgctgacttttttcct

SEQ ID NO: 224039 - DNA, 25 bp, Probe Sequence
gaacaagatgctcaggctttatttc

SEQ ID NO: 224040 - DNA, 25 bp, Probe Sequence
gaacaaatgcatccagtcctttaac

SEQ ID NO: 224041 - DNA, 25 bp, Probe Sequence
gaaacaatgcaccgtctttagaatt

SEQ ID NO: 224042 - DNA, 25 bp, Probe Sequence
gaaaatgagcaccagttatctttaa

SEQ ID NO: 224043 - DNA, 25 bp, Probe Sequence
gaacaactgccggtgatactggtag

SEQ ID NO: 224044 - DNA, 25 bp, Probe Sequence
gaaaacttcgagttacaggtcagga

SEQ ID NO: 224045 - DNA, 25 bp, Probe Sequence
gaaaagtgtcgttttcagattagga

SEQ ID NO: 224046 - DNA, 25 bp, Probe Sequence
gaaaatggggctttccagggaatga

SEQ ID NO: 224047 - DNA, 25 bp, Probe Sequence
gaaaatggggctttccagggaatga

SEQ ID NO: 224048 - DNA, 25 bp, Probe Sequence
gaaaatggggctttccagggaatga

SEQ ID NO: 224049 - DNA, 25 bp, Probe Sequence
gaaaatagtggttctcctgaaactt

SEQ ID NO: 224050 - DNA, 25 bp, Probe Sequence
gaacaaactgtgaatcttctggata

SEQ ID NO: 224051 - DNA, 25 bp, Probe Sequence
gaacaacagtcttacttgcctgtac

SEQ ID NO: 224052 - DNA, 25 bp, Probe Sequence
gaaaaagtgctgtcaattccctacc

SEQ ID NO: 224053 - DNA, 25 bp, Probe Sequence
gacaggaagtggcatacacacccct

SEQ ID NO: 224054 - DNA, 25 bp, Probe Sequence
gaaaaagcatcgctaacgccacact

SEQ ID NO: 224055 - DNA, 25 bp, Probe Sequence
gaaatgtaagggaaactgccagcaa

SEQ ID NO: 224056 - DNA, 25 bp, Probe Sequence
gaaaataagcgaggcaccgccgcac

SEQ ID NO: 224057 - DNA, 25 bp, Probe Sequence
gaaaacgagtacctgagtgtgcgcc

SEQ ID NO: 224058 - DNA, 25 bp, Probe Sequence
gaaaacagtctacagagtgaaccag

SEQ ID NO: 224059 - DNA, 25 bp, Probe Sequence
gaaaagagctctttgagatgtggaa

SEQ ID NO: 224060 - DNA, 25 bp, Probe Sequence
gaaaaatgtctgttatgcaatgctg

SEQ ID NO: 224061 - DNA, 25 bp, Probe Sequence
gaaacacgaatgtctctgtagcttc

SEQ ID NO: 224062 - DNA, 25 bp, Probe Sequence
gaaacacgataccattctggccttc

SEQ ID NO: 224063 - DNA, 25 bp, Probe Sequence
gaaacacgataccattctggccttc

SEQ ID NO: 224064 - DNA, 25 bp, Probe Sequence
gaaacacgataccattctggccttc

SEQ ID NO: 224065 - DNA, 25 bp, Probe Sequence
gaaacacgataccattctggccttc

SEQ ID NO: 224066 - DNA, 25 bp, Probe Sequence
gaacaacctactatgtagcgtttat

SEQ ID NO: 224067 - DNA, 25 bp, Probe Sequence
gaacaagcattagttttggctgtca

SEQ ID NO: 224068 - DNA, 25 bp, Probe Sequence
gaaaacatagacttactggctgtag

SEQ ID NO: 224069 - DNA, 25 bp, Probe Sequence
gaacaatgctaaagtagctgtgcta

SEQ ID NO: 224070 - DNA, 25 bp, Probe Sequence
gaacaagcgaatggctgacagcctg

SEQ ID NO: 224071 - DNA, 25 bp, Probe Sequence
gaacaacatgcattccgagaagctg

SEQ ID NO: 224072 - DNA, 25 bp, Probe Sequence
gaacaactattttgagaacatgcac

SEQ ID NO: 224073 - DNA, 25 bp, Probe Sequence
gaaaacatatggtgctgacctggcc

SEQ ID NO: 224074 - DNA, 25 bp, Probe Sequence
gaaaagtatggatgctagccaaact

SEQ ID NO: 224075 - DNA, 25 bp, Probe Sequence
gaaaagagggagtccagtgcaaaca

SEQ ID NO: 224076 - DNA, 25 bp, Probe Sequence
gaaaagggtggggacgcacatccgc

SEQ ID NO: 224077 - DNA, 25 bp, Probe Sequence
gaaaaggccttgaaaatccgcctgc

SEQ ID NO: 224078 - DNA, 25 bp, Probe Sequence
gaaaagaccttgacatattcctgag

SEQ ID NO: 224079 - DNA, 25 bp, Probe Sequence
gaaaaggccattaatttgaaggaag

SEQ ID NO: 224080 - DNA, 25 bp, Probe Sequence
gagcccaaccccatttgataggaat

SEQ ID NO: 224081 - DNA, 25 bp, Probe Sequence
gactccttccctattggaatgaaag

SEQ ID NO: 224082 - DNA, 25 bp, Probe Sequence
taatactataccttcgggaattaag

SEQ ID NO: 224083 - DNA, 25 bp, Probe Sequence
gaaaatataccttctgggatcttca

SEQ ID NO: 224084 - DNA, 25 bp, Probe Sequence
gaaaatattcctgattccagctcca

SEQ ID NO: 224085 - DNA, 25 bp, Probe Sequence
gaaaataacccaaaggcatgctcca

SEQ ID NO: 224086 - DNA, 25 bp, Probe Sequence
gaaaattacaccaaaggtggctaat

SEQ ID NO: 224087 - DNA, 25 bp, Probe Sequence
gaaaactaacaaacagaaaggacat

SEQ ID NO: 224088 - DNA, 25 bp, Probe Sequence
gaaaactgctacaatactccaggga

SEQ ID NO: 224089 - DNA, 25 bp, Probe Sequence
gagaatttgcttgatcctgggaggc

SEQ ID NO: 224090 - DNA, 25 bp, Probe Sequence
gaaaatcactcgaatccgggagaca

SEQ ID NO: 224091 - DNA, 25 bp, Probe Sequence
gaacaatcaccgaaacccaagaggc

SEQ ID NO: 224092 - DNA, 25 bp, Probe Sequence
gaaaatcaacggaacccagatttgc

SEQ ID NO: 224093 - DNA, 25 bp, Probe Sequence
gaaaatcaacggaacccagatttgc

SEQ ID NO: 224094 - DNA, 25 bp, Probe Sequence
gaaaatggtcggatccagtgtttta

SEQ ID NO: 224095 - DNA, 25 bp, Probe Sequence
gaaaattgtgctgttcgtagtttgt

SEQ ID NO: 224096 - DNA, 25 bp, Probe Sequence
gaaaattggctttctcttaattggc

SEQ ID NO: 224097 - DNA, 25 bp, Probe Sequence
gaaaactggcaaactcttaaatctg

SEQ ID NO: 224098 - DNA, 25 bp, Probe Sequence
gaaaacttcgaaggctttactctga

SEQ ID NO: 224099 - DNA, 25 bp, Probe Sequence
gaaaacttcgaaggcttaatctctt

SEQ ID NO: 224100 - DNA, 25 bp, Probe Sequence
gaaaattttagctgctttatcatct

SEQ ID NO: 224101 - DNA, 25 bp, Probe Sequence
gaaactatttactctgtaatctcta

SEQ ID NO: 224102 - DNA, 25 bp, Probe Sequence
gaaactacctaccgtgtgtattctc

SEQ ID NO: 224103 - DNA, 25 bp, Probe Sequence
gaaaaacctgttctggtagctccac

SEQ ID NO: 224104 - DNA, 25 bp, Probe Sequence
gaaaaagttggtgtgctggagctac

SEQ ID NO: 224105 - DNA, 25 bp, Probe Sequence
gaaaatggcttgttctattggccta

SEQ ID NO: 224106 - DNA, 25 bp, Probe Sequence
gaaaatggttgggcgattcctcgac

SEQ ID NO: 224107 - DNA, 25 bp, Probe Sequence
gaaaaggggctgggatgtctccgtc

SEQ ID NO: 224108 - DNA, 25 bp, Probe Sequence
gaaaaagggatcggagccatcatcg

SEQ ID NO: 224109 - DNA, 25 bp, Probe Sequence
gaaaaacacgtctcaccactgtggt

SEQ ID NO: 224110 - DNA, 25 bp, Probe Sequence
gaaaagagaccctcgtgactggact

SEQ ID NO: 224111 - DNA, 25 bp, Probe Sequence
gaaaatgcaagcgccctgaactttt

SEQ ID NO: 224112 - DNA, 25 bp, Probe Sequence
gaacaatgaagcgcctctaacagca

SEQ ID NO: 224113 - DNA, 25 bp, Probe Sequence
gaaaatgggccccttgtacaagctg

SEQ ID NO: 224114 - DNA, 25 bp, Probe Sequence
gaaaaggaggacttctgtcaaacag

SEQ ID NO: 224115 - DNA, 25 bp, Probe Sequence
gaaaatagtgagccctgttaaacaa

SEQ ID NO: 224116 - DNA, 25 bp, Probe Sequence
gaaaagactgcacctaattaaaaca

SEQ ID NO: 224117 - DNA, 25 bp, Probe Sequence
gaaaagatgataaaccttagaaaca

SEQ ID NO: 224118 - DNA, 25 bp, Probe Sequence
gaaaattatgattacccgtaacaca

SEQ ID NO: 224119 - DNA, 25 bp, Probe Sequence
gaaaatgtattctccatcgtggcct

SEQ ID NO: 224120 - DNA, 25 bp, Probe Sequence
gaaaagaattcatggctctgggcac

SEQ ID NO: 224121 - DNA, 25 bp, Probe Sequence
gaaaagtttgctgggtctgctggct

SEQ ID NO: 224122 - DNA, 25 bp, Probe Sequence
gaaaagtttgctgggtctgctggct

SEQ ID NO: 224123 - DNA, 25 bp, Probe Sequence
gaaactttagtcggcctgatggctt

SEQ ID NO: 224124 - DNA, 25 bp, Probe Sequence
gaaactttagtcggcctgatggctt

SEQ ID NO: 224125 - DNA, 25 bp, Probe Sequence
gaaaatggggatctgccatatttgt

SEQ ID NO: 224126 - DNA, 25 bp, Probe Sequence
gaaaatgggagtaggcacttcctga

SEQ ID NO: 224127 - DNA, 25 bp, Probe Sequence
gaaaagggagtcatgcattttgctt

SEQ ID NO: 224128 - DNA, 25 bp, Probe Sequence
gaaaagcagtggacaacacgtttcc

SEQ ID NO: 224129 - DNA, 25 bp, Probe Sequence
gaaaaggtgtgggtccctgtgtcct

SEQ ID NO: 224130 - DNA, 25 bp, Probe Sequence
gaaaaggattgtgctctgactgtgg

SEQ ID NO: 224131 - DNA, 25 bp, Probe Sequence
gaaaaggtataggcttgccttgctg

SEQ ID NO: 224132 - DNA, 25 bp, Probe Sequence
gaaaaggtgcatttcttcaatagtt

SEQ ID NO: 224133 - DNA, 25 bp, Probe Sequence
gaaaatgcaacttatttaagacatt

SEQ ID NO: 224134 - DNA, 25 bp, Probe Sequence
gaaaaccatcttatctgaagactgg

SEQ ID NO: 224135 - DNA, 25 bp, Probe Sequence
gaaaagccatctattcttctgcagc

SEQ ID NO: 224136 - DNA, 25 bp, Probe Sequence
gaaaagccatctattcttctgcagc

SEQ ID NO: 224137 - DNA, 25 bp, Probe Sequence
gaaaagctcctattctgattgctac

SEQ ID NO: 224138 - DNA, 25 bp, Probe Sequence
gaaaagcttctttgtggcttacact

SEQ ID NO: 224139 - DNA, 25 bp, Probe Sequence
gaaaagctatttggtgtattacatc

SEQ ID NO: 224140 - DNA, 25 bp, Probe Sequence
gaaaatgtcatttatgttactaaca

SEQ ID NO: 224141 - DNA, 25 bp, Probe Sequence
gaaaacatttcaatttattatgaca

SEQ ID NO: 224142 - DNA, 25 bp, Probe Sequence
gaaaaattcctgttgcttaatgaca

SEQ ID NO: 224143 - DNA, 25 bp, Probe Sequence
gaaaagacaccttgcctataattaa

SEQ ID NO: 224144 - DNA, 25 bp, Probe Sequence
gaaaatgaactcacccacgatatca

SEQ ID NO: 224145 - DNA, 25 bp, Probe Sequence
gaaaatacaccacccacatatgtca

SEQ ID NO: 224146 - DNA, 25 bp, Probe Sequence
gaaaacatgcattaacccatattca

SEQ ID NO: 224147 - DNA, 25 bp, Probe Sequence
gaaaactgcacaggtcaccgttcag

SEQ ID NO: 224148 - DNA, 25 bp, Probe Sequence
gaaaaatccttgtcaccagattcat

SEQ ID NO: 224149 - DNA, 25 bp, Probe Sequence
gaaaattctcatcctatccatatta

SEQ ID NO: 224150 - DNA, 25 bp, Probe Sequence
gaaaattcaatgcctaacttcaagt

SEQ ID NO: 224151 - DNA, 25 bp, Probe Sequence
gaaaagctcactctaaatcagcaaa

SEQ ID NO: 224152 - DNA, 25 bp, Probe Sequence
gaaaatgcccttcaaacatgtagga

SEQ ID NO: 224153 - DNA, 25 bp, Probe Sequence
gaaaatagtttcaatatatcttatg

SEQ ID NO: 224154 - DNA, 25 bp, Probe Sequence
gaaaattttgtcactctctattaga

SEQ ID NO: 224155 - DNA, 25 bp, Probe Sequence
gaaaatttggccccttgatactgaa

SEQ ID NO: 224156 - DNA, 25 bp, Probe Sequence
gaaaatttcctcaactagcaacata

SEQ ID NO: 224157 - DNA, 25 bp, Probe Sequence
gaaaaatctcctcgacattggtcat

SEQ ID NO: 224158 - DNA, 25 bp, Probe Sequence
gaaaatatgtcactggagctttgtt

SEQ ID NO: 224159 - DNA, 25 bp, Probe Sequence
gaaaatagccagggaattatgataa

SEQ ID NO: 224160 - DNA, 25 bp, Probe Sequence
gaaaaacctgccaaatatgatgaca

SEQ ID NO: 224161 - DNA, 25 bp, Probe Sequence
gaaaaacaatccccattatgaccca

SEQ ID NO: 224162 - DNA, 25 bp, Probe Sequence
gaaaatgacaatccctttcgtctcc

SEQ ID NO: 224163 - DNA, 25 bp, Probe Sequence
gaaaaagttgcctgtgtcgctgtcc

SEQ ID NO: 224164 - DNA, 25 bp, Probe Sequence
gaaaaagcgtcttggtcgcaggccg

SEQ ID NO: 224165 - DNA, 25 bp, Probe Sequence
gaaaaggagttctgtctgcatgaga

SEQ ID NO: 224166 - DNA, 25 bp, Probe Sequence
gaaaatgtttcaacgtgcgcaagag

SEQ ID NO: 224167 - DNA, 25 bp, Probe Sequence
gaaaatcctgtcaacctagaagcat

SEQ ID NO: 224168 - DNA, 25 bp, Probe Sequence
gaaaatgccaacacactagaccact

SEQ ID NO: 224169 - DNA, 25 bp, Probe Sequence
gaaaatccaaaccagtacaactata

SEQ ID NO: 224170 - DNA, 25 bp, Probe Sequence
gaaacattaaacattgccaacgcaa

SEQ ID NO: 224171 - DNA, 25 bp, Probe Sequence
gaaaattaacacagcgcttagaaga

SEQ ID NO: 224172 - DNA, 25 bp, Probe Sequence
gaaacatttcccaacgtgtatgaag

SEQ ID NO: 224173 - DNA, 25 bp, Probe Sequence
gaaaacttcggatgcatgttgagaa

SEQ ID NO: 224174 - DNA, 25 bp, Probe Sequence
gaaaatttcggagggaatggaattg

SEQ ID NO: 224175 - DNA, 25 bp, Probe Sequence
gaaaccatgggcaggagtaggaatt

SEQ ID NO: 224176 - DNA, 25 bp, Probe Sequence
gaaaactggggtcgcgaagaaatca

SEQ ID NO: 224177 - DNA, 25 bp, Probe Sequence
gaaaacacggtgggccaaaggatga

SEQ ID NO: 224178 - DNA, 25 bp, Probe Sequence
gaaaaccaggtggcatccagcgagg

SEQ ID NO: 224179 - DNA, 25 bp, Probe Sequence
gaaaatgtaggtgctcagacaggta

SEQ ID NO: 224180 - DNA, 25 bp, Probe Sequence
gaaaatgaaactggcacatgagaag

SEQ ID NO: 224181 - DNA, 25 bp, Probe Sequence
gaaaatgtgacagtccacggaatgt

SEQ ID NO: 224182 - DNA, 25 bp, Probe Sequence
gaaaatggccatactgcccaaggta

SEQ ID NO: 224183 - DNA, 25 bp, Probe Sequence
gaaaacgacatcatcccttggtata

SEQ ID NO: 224184 - DNA, 25 bp, Probe Sequence
gaaaattgcaccactgtgcttggtt

SEQ ID NO: 224185 - DNA, 25 bp, Probe Sequence
gaaaattactttatcattggatgtt

SEQ ID NO: 224186 - DNA, 25 bp, Probe Sequence
gaaaatctggcttgttacaggcgag

SEQ ID NO: 224187 - DNA, 25 bp, Probe Sequence
gaaaatctggtacttatatacatga

SEQ ID NO: 224188 - DNA, 25 bp, Probe Sequence
gaaaatctcagtacatctataggaa

SEQ ID NO: 224189 - DNA, 25 bp, Probe Sequence
gaaaatgcactctaacttatgtgaa

SEQ ID NO: 224190 - DNA, 25 bp, Probe Sequence
gaaaatgcagttgacacttgtgtat

SEQ ID NO: 224191 - DNA, 25 bp, Probe Sequence
gaaaatggtttgccgctggagtatc

SEQ ID NO: 224192 - DNA, 25 bp, Probe Sequence
gaaaatggtttgccgctggagtatc

SEQ ID NO: 224193 - DNA, 25 bp, Probe Sequence
gaaaatggtttgccgctggagtatc

SEQ ID NO: 224194 - DNA, 25 bp, Probe Sequence
gaaacaggtttacttgacactatcc

SEQ ID NO: 224195 - DNA, 25 bp, Probe Sequence
gaaaatgttttaactcactctcatt

SEQ ID NO: 224196 - DNA, 25 bp, Probe Sequence
gaaaaggtttaaatacattgcatat

SEQ ID NO: 224197 - DNA, 25 bp, Probe Sequence
gaaaatggtttttacatctggatat

SEQ ID NO: 224198 - DNA, 25 bp, Probe Sequence
gaaaatcgtcttatagttgagaatt

SEQ ID NO: 224199 - DNA, 25 bp, Probe Sequence
gaaataccttatataaaaccatctt

SEQ ID NO: 224200 - DNA, 25 bp, Probe Sequence
gaaattggcttaattagtaaccatg

SEQ ID NO: 224201 - DNA, 25 bp, Probe Sequence
gaaattactgtaaagaacttcctgt

SEQ ID NO: 224202 - DNA, 25 bp, Probe Sequence
gaaattactgtaaagaacttcctgt

SEQ ID NO: 224203 - DNA, 25 bp, Probe Sequence
gaaacctgggataaccacttcctat

SEQ ID NO: 224204 - DNA, 25 bp, Probe Sequence
gaaacctggcaggaaccacttctag

SEQ ID NO: 224205 - DNA, 25 bp, Probe Sequence
gaaaacgtgaggtggccatgatgct

SEQ ID NO: 224206 - DNA, 25 bp, Probe Sequence
gaaaacagcgtgcagcggcacattg

SEQ ID NO: 224207 - DNA, 25 bp, Probe Sequence
gaaaatccagtaatgaggcagaata

SEQ ID NO: 224208 - DNA, 25 bp, Probe Sequence
gaaaacgcctaaagtcagatgagag

SEQ ID NO: 224209 - DNA, 25 bp, Probe Sequence
gaaaacgcctaaagtcagatgagag

SEQ ID NO: 224210 - DNA, 25 bp, Probe Sequence
gaaaacgattcatattgcagaagac

SEQ ID NO: 224211 - DNA, 25 bp, Probe Sequence
gaaaactgattctctatgacatgaa

SEQ ID NO: 224212 - DNA, 25 bp, Probe Sequence
gaaaactgattctctatgacatgaa

SEQ ID NO: 224213 - DNA, 25 bp, Probe Sequence
gaaaatcgatgcagccatttctgat

SEQ ID NO: 224214 - DNA, 25 bp, Probe Sequence
gaaaatcagctttgcctttaattaa

SEQ ID NO: 224215 - DNA, 25 bp, Probe Sequence
gaaaatgtgctcaacctttgaataa

SEQ ID NO: 224216 - DNA, 25 bp, Probe Sequence
gaaaatgatctcttcctctgtgaca

SEQ ID NO: 224217 - DNA, 25 bp, Probe Sequence
gaaaagactcctggctttgaatgga

SEQ ID NO: 224218 - DNA, 25 bp, Probe Sequence
gaaacaagtcacatcgttacatgga

SEQ ID NO: 224219 - DNA, 25 bp, Probe Sequence
gaaacaagaacagctgttactcaag

SEQ ID NO: 224220 - DNA, 25 bp, Probe Sequence
gaaacagggaaggctttattggcag

SEQ ID NO: 224221 - DNA, 25 bp, Probe Sequence
gaaacggtaagtctgctagggcatt

SEQ ID NO: 224222 - DNA, 25 bp, Probe Sequence
gacattccagtaatgggagggggct

SEQ ID NO: 224223 - DNA, 25 bp, Probe Sequence
gaaacacaatatagagggttggagt

SEQ ID NO: 224224 - DNA, 25 bp, Probe Sequence
gaaaacatattttgggccgggcatg

SEQ ID NO: 224225 - DNA, 25 bp, Probe Sequence
gaaaacacatttagcctactgggca

SEQ ID NO: 224226 - DNA, 25 bp, Probe Sequence
gaaaaccttatgcaatcctgtgtca

SEQ ID NO: 224227 - DNA, 25 bp, Probe Sequence
gaaaatggttgtcactgctcttcca

SEQ ID NO: 224228 - DNA, 25 bp, Probe Sequence
gaaaaagttgatcagagccttccag

SEQ ID NO: 224229 - DNA, 25 bp, Probe Sequence
gaaacaaggtgtacaggttctccag

SEQ ID NO: 224230 - DNA, 25 bp, Probe Sequence
gaaacttatatgttcaggtattaca

SEQ ID NO: 224231 - DNA, 25 bp, Probe Sequence
gaaaactaagctaaggactctcaca

SEQ ID NO: 224232 - DNA, 25 bp, Probe Sequence
gaaaagtattctaataggctctaca

SEQ ID NO: 224233 - DNA, 25 bp, Probe Sequence
gaaacagctatgaccattaggccta

SEQ ID NO: 224234 - DNA, 25 bp, Probe Sequence
gaaacagctatgaccattaggccta

SEQ ID NO: 224235 - DNA, 25 bp, Probe Sequence
gaaacagctatgaccattaggccta

SEQ ID NO: 224236 - DNA, 25 bp, Probe Sequence
gaaacagctatgaccattaggccta

SEQ ID NO: 224237 - DNA, 25 bp, Probe Sequence
gaaacagctatgaccattaggccta

SEQ ID NO: 224238 - DNA, 25 bp, Probe Sequence
gaaacagctatgaccattaggccta

SEQ ID NO: 224239 - DNA, 25 bp, Probe Sequence
gaaacagctatgaccattaggccta

SEQ ID NO: 224240 - DNA, 25 bp, Probe Sequence
gaaacagctatgaccattaggccta

SEQ ID NO: 224241 - DNA, 25 bp, Probe Sequence
gaaacagctatgaccattaggccta

SEQ ID NO: 224242 - DNA, 25 bp, Probe Sequence
gaaacagctatgaccattaggccta

SEQ ID NO: 224243 - DNA, 25 bp, Probe Sequence
gaaaacttctgctatatatacagta

SEQ ID NO: 224244 - DNA, 25 bp, Probe Sequence
gaaaagctttcaatagatagatgtt

SEQ ID NO: 224245 - DNA, 25 bp, Probe Sequence
gaaaagtttcatagtggactgttta

SEQ ID NO: 224246 - DNA, 25 bp, Probe Sequence
gaaaagtctggcttggagagtctct

SEQ ID NO: 224247 - DNA, 25 bp, Probe Sequence
gaaaatgttggccatgttgttctct

SEQ ID NO: 224248 - DNA, 25 bp, Probe Sequence
gaaatttattccttattccctcttg

SEQ ID NO: 224249 - DNA, 25 bp, Probe Sequence
gaaatatctttctcttacctgttat

SEQ ID NO: 224250 - DNA, 25 bp, Probe Sequence
gaaatatctttctcttacctgttat

SEQ ID NO: 224251 - DNA, 25 bp, Probe Sequence
gaaaacttctcttattgttcagttc

SEQ ID NO: 224252 - DNA, 25 bp, Probe Sequence
gaaaagcttcttcattgctcattgc

SEQ ID NO: 224253 - DNA, 25 bp, Probe Sequence
gaaaactcctctgatgtggttgggg

SEQ ID NO: 224254 - DNA, 25 bp, Probe Sequence
gaaaacgcccatgcggtttgcatcg

SEQ ID NO: 224255 - DNA, 25 bp, Probe Sequence
gaaaacctccatgtttctcatatct

SEQ ID NO: 224256 - DNA, 25 bp, Probe Sequence
gaaaacctggacagttcgcttctac

SEQ ID NO: 224257 - DNA, 25 bp, Probe Sequence
gaaaaccgaagcagctgatcagaat

SEQ ID NO: 224258 - DNA, 25 bp, Probe Sequence
gaaaccaacaagagatctcgaaccc

SEQ ID NO: 224259 - DNA, 25 bp, Probe Sequence
gaaactcacagagactatctccagc

SEQ ID NO: 224260 - DNA, 25 bp, Probe Sequence
gaaaacacacaggagcttttccctc

SEQ ID NO: 224261 - DNA, 25 bp, Probe Sequence
gaaaatggcagacaatttttcgctc

SEQ ID NO: 224262 - DNA, 25 bp, Probe Sequence
gaaaaggatgagcaacttgttccca

SEQ ID NO: 224263 - DNA, 25 bp, Probe Sequence
gaaacagggatgctggtgtggggcc

SEQ ID NO: 224264 - DNA, 25 bp, Probe Sequence
gaaacggggggatttgcagacaggc

SEQ ID NO: 224265 - DNA, 25 bp, Probe Sequence
gaaacggggccaccagacagatagt

SEQ ID NO: 224266 - DNA, 25 bp, Probe Sequence
gaaacgggtcactccatcgatgttc

SEQ ID NO: 224267 - DNA, 25 bp, Probe Sequence
gaaacgggccacagttctagagtct

SEQ ID NO: 224268 - DNA, 25 bp, Probe Sequence
gaaaaggtcccggagagctgagcag

SEQ ID NO: 224269 - DNA, 25 bp, Probe Sequence
gaaaaggtgtgcaaggagactgcag

SEQ ID NO: 224270 - DNA, 25 bp, Probe Sequence
gaaaaatgtgtatggtggcacagat

SEQ ID NO: 224271 - DNA, 25 bp, Probe Sequence
gaaaaagtgtatctatgtgctcaag

SEQ ID NO: 224272 - DNA, 25 bp, Probe Sequence
gaaacagctatgaccattaggccta

SEQ ID NO: 224273 - DNA, 25 bp, Probe Sequence
gaaacagctatgaccattaggccta

SEQ ID NO: 224274 - DNA, 25 bp, Probe Sequence
gaaacagctatgaccattaggccta

SEQ ID NO: 224275 - DNA, 25 bp, Probe Sequence
gaaacagctatgaccattaggccta

SEQ ID NO: 224276 - DNA, 25 bp, Probe Sequence
gaaacagctatgaccattaggccta

SEQ ID NO: 224277 - DNA, 25 bp, Probe Sequence
gaaacagctatgaccattaggccta

SEQ ID NO: 224278 - DNA, 25 bp, Probe Sequence
gaaacagctatgaccattaggccta

SEQ ID NO: 224279 - DNA, 25 bp, Probe Sequence
gaaacagctatgaccattaggccta

SEQ ID NO: 224280 - DNA, 25 bp, Probe Sequence
gaaacagctatgaccattaggccta

SEQ ID NO: 224281 - DNA, 25 bp, Probe Sequence
gaaacagctatgaccattaggccta

SEQ ID NO: 224282 - DNA, 25 bp, Probe Sequence
gaaacagctatgaccattaggccta

SEQ ID NO: 224283 - DNA, 25 bp, Probe Sequence
gaaacagctatgaccattaggccta

SEQ ID NO: 224284 - DNA, 25 bp, Probe Sequence
gaaacagctatgaccattaggccta

SEQ ID NO: 224285 - DNA, 25 bp, Probe Sequence
gaaacagctatgaccattaggccta

SEQ ID NO: 224286 - DNA, 25 bp, Probe Sequence
gaaacagctatgaccattaggccta

SEQ ID NO: 224287 - DNA, 25 bp, Probe Sequence
gaaacagctatgaccattaggccta

SEQ ID NO: 224288 - DNA, 25 bp, Probe Sequence
gaaacagctatgaccattaggccta

SEQ ID NO: 224289 - DNA, 25 bp, Probe Sequence
gaaacagctatgaccattaggccta

SEQ ID NO: 224290 - DNA, 25 bp, Probe Sequence
gaaacagctatgaccattaggccta

SEQ ID NO: 224291 - DNA, 25 bp, Probe Sequence
gaaacagctatgaccattaggccta

SEQ ID NO: 224292 - DNA, 25 bp, Probe Sequence
gaaacagctatgaccattaggccta

SEQ ID NO: 224293 - DNA, 25 bp, Probe Sequence
gaaacagctatgaccattaggccta

SEQ ID NO: 224294 - DNA, 25 bp, Probe Sequence
gaaacagctatgaccattaggccta

SEQ ID NO: 224295 - DNA, 25 bp, Probe Sequence
gaaacagctatgaccattaggccta

SEQ ID NO: 224296 - DNA, 25 bp, Probe Sequence
gaaacagctatgaccattaggccta

SEQ ID NO: 224297 - DNA, 25 bp, Probe Sequence
gaaaatgtatatctctccagctgta

SEQ ID NO: 224298 - DNA, 25 bp, Probe Sequence
gaaaatgtatatctgactagtggga

SEQ ID NO: 224299 - DNA, 25 bp, Probe Sequence
gaaaatgattgatgggctggggaac

SEQ ID NO: 224300 - DNA, 25 bp, Probe Sequence
gaaacatgttaaaggccggacaaag

SEQ ID NO: 224301 - DNA, 25 bp, Probe Sequence
gaaacatttatagggcgcctgtcac

SEQ ID NO: 224302 - DNA, 25 bp, Probe Sequence
gaaaaatcaaaagggccagtgtcgt

SEQ ID NO: 224303 - DNA, 25 bp, Probe Sequence
gaaaaacaagaatggtggtggcttt

SEQ ID NO: 224304 - DNA, 25 bp, Probe Sequence
gaaaaatcctgttaagctgggcgtt

SEQ ID NO: 224305 - DNA, 25 bp, Probe Sequence
gaaaaatccgtggaactgaagctga

SEQ ID NO: 224306 - DNA, 25 bp, Probe Sequence
gaaaacctgatggaccagtacagcg

SEQ ID NO: 224307 - DNA, 25 bp, Probe Sequence
gaaaaccatatggggactatagtgc

SEQ ID NO: 224308 - DNA, 25 bp, Probe Sequence
gaaaaccttggatcacgtattgctg

SEQ ID NO: 224309 - DNA, 25 bp, Probe Sequence
gaaaaaacattgaagacgtcattgc

SEQ ID NO: 224310 - DNA, 25 bp, Probe Sequence
gaaaaagcacaagaagcgtgagacg

SEQ ID NO: 224311 - DNA, 25 bp, Probe Sequence
gaaaaatcacaacacggatgagaaa

SEQ ID NO: 224312 - DNA, 25 bp, Probe Sequence
gaaagaatcacctcccagtaaagta

SEQ ID NO: 224313 - DNA, 25 bp, Probe Sequence
gaaagaacggaatccaggcaatctg

SEQ ID NO: 224314 - DNA, 25 bp, Probe Sequence
gaaaaccaagaacgccggaatgtgt

SEQ ID NO: 224315 - DNA, 25 bp, Probe Sequence
gaaaaccaagcatgccctaagaagc

SEQ ID NO: 224316 - DNA, 25 bp, Probe Sequence
gaaacacgctagtgaccattaggcc

SEQ ID NO: 224317 - DNA, 25 bp, Probe Sequence
gaaactggtgagtgactgcacagag

SEQ ID NO: 224318 - DNA, 25 bp, Probe Sequence
gaaacaaggacaatcactgcatgga

SEQ ID NO: 224319 - DNA, 25 bp, Probe Sequence
gaaactcagaacgtctgcagcctgg

SEQ ID NO: 224320 - DNA, 25 bp, Probe Sequence
gaaacagcagaacgagggccagagc

SEQ ID NO: 224321 - DNA, 25 bp, Probe Sequence
gaaacagctggaagatggacgcacc

SEQ ID NO: 224322 - DNA, 25 bp, Probe Sequence
gaaaaggtcagtaggatgtgcatcc

SEQ ID NO: 224323 - DNA, 25 bp, Probe Sequence
gaaacaaacgatatatctcatggct

SEQ ID NO: 224324 - DNA, 25 bp, Probe Sequence
gaaaacacaagaaatcagcctgaat

SEQ ID NO: 224325 - DNA, 25 bp, Probe Sequence
gaaaacaccagtatagaatagacag

SEQ ID NO: 224326 - DNA, 25 bp, Probe Sequence
gaaaacaccctctatgaaatcaaat

SEQ ID NO: 224327 - DNA, 25 bp, Probe Sequence
gaaaaccaactctagtaatatgaca

SEQ ID NO: 224328 - DNA, 25 bp, Probe Sequence
gaaaacccaaaattcaatcaacaat

SEQ ID NO: 224329 - DNA, 25 bp, Probe Sequence
gaaaaacacaacgttcttagaatga

SEQ ID NO: 224330 - DNA, 25 bp, Probe Sequence
gaaaaaagcaccgattcctcaagct

SEQ ID NO: 224331 - DNA, 25 bp, Probe Sequence
gaaaagacggcttcattcccaagaa

SEQ ID NO: 224332 - DNA, 25 bp, Probe Sequence
gaaaagactccttctcccaaagaag

SEQ ID NO: 224333 - DNA, 25 bp, Probe Sequence
gaaaagcattgaaactaccaaaata

SEQ ID NO: 224334 - DNA, 25 bp, Probe Sequence
gaaaagcctagtcttctcaagcaat

SEQ ID NO: 224335 - DNA, 25 bp, Probe Sequence
gaaaacctatattgtcttaagagaa

SEQ ID NO: 224336 - DNA, 25 bp, Probe Sequence
gaaaactctttatcgaacaatgaca

SEQ ID NO: 224337 - DNA, 25 bp, Probe Sequence
gaaaaccaactctaccaacaatcac

SEQ ID NO: 224338 - DNA, 25 bp, Probe Sequence
gaaactaatacttaccgagtcagac

SEQ ID NO: 224339 - DNA, 25 bp, Probe Sequence
gaaactaaacattcccttgatggtc

SEQ ID NO: 224340 - DNA, 25 bp, Probe Sequence
gaaaaattatcttccaatgcaaggt

SEQ ID NO: 224341 - DNA, 25 bp, Probe Sequence
gaaaagattatattcaagaggctgg

SEQ ID NO: 224342 - DNA, 25 bp, Probe Sequence
gaaagaggtagatttcggtctggaa

SEQ ID NO: 224343 - DNA, 25 bp, Probe Sequence
gaaatggggacaagtcccctcgaag

SEQ ID NO: 224344 - DNA, 25 bp, Probe Sequence
gaaaagggtccgagcacaagccaag

SEQ ID NO: 224345 - DNA, 25 bp, Probe Sequence
gaaaagcgggcattgggcaaaggaa

SEQ ID NO: 224346 - DNA, 25 bp, Probe Sequence
gaaaagcagcccttggccagaagtc

SEQ ID NO: 224347 - DNA, 25 bp, Probe Sequence
gaaacacaggagacggcaatgaagc

SEQ ID NO: 224348 - DNA, 25 bp, Probe Sequence
gaaactcaagatggcggtgggaccc

SEQ ID NO: 224349 - DNA, 25 bp, Probe Sequence
gaaaagcacaagcggtgtaggctcc

SEQ ID NO: 224350 - DNA, 25 bp, Probe Sequence
gaaaagcagcacatcacgttagcct

SEQ ID NO: 224351 - DNA, 25 bp, Probe Sequence
gaaagagtgccagtcagcagtcatg

SEQ ID NO: 224352 - DNA, 25 bp, Probe Sequence
gaaaaggacactggcaatatcccca

SEQ ID NO: 224353 - DNA, 25 bp, Probe Sequence
gaaacaaccattgcaatacagccaa

SEQ ID NO: 224354 - DNA, 25 bp, Probe Sequence
gaaaaatggcttccaggacagagca

SEQ ID NO: 224355 - DNA, 25 bp, Probe Sequence
gaaaagagcacttcacacagacaag

SEQ ID NO: 224356 - DNA, 25 bp, Probe Sequence
gaaaagacagcttcagcttgcaaat

SEQ ID NO: 224357 - DNA, 25 bp, Probe Sequence
gaaaaacactcacgattgctcaacc

SEQ ID NO: 224358 - DNA, 25 bp, Probe Sequence
gaaacaacctcaaggtgccaaaaag

SEQ ID NO: 224359 - DNA, 25 bp, Probe Sequence
gaaaacaccacagggatggcgagaa

SEQ ID NO: 224360 - DNA, 25 bp, Probe Sequence
gaaaccatcccggggtggaagcact

SEQ ID NO: 224361 - DNA, 25 bp, Probe Sequence
gaaaaactctcggatcaggtgaaga

SEQ ID NO: 224362 - DNA, 25 bp, Probe Sequence
gaaaacacttagtatgcagttgata

SEQ ID NO: 224363 - DNA, 25 bp, Probe Sequence
gaaaacacttagtatgcagttgata

SEQ ID NO: 224364 - DNA, 25 bp, Probe Sequence
gaaaagacattcaatatcactaatc

SEQ ID NO: 224365 - DNA, 25 bp, Probe Sequence
gaaaagacgtcaatatctgctcaca

SEQ ID NO: 224366 - DNA, 25 bp, Probe Sequence
gaaaaaagctcatttcatgctctgc

SEQ ID NO: 224367 - DNA, 25 bp, Probe Sequence
gaaaagcaagccactatcatctagg

SEQ ID NO: 224368 - DNA, 25 bp, Probe Sequence
gaaacagaagacacatgataccagc

SEQ ID NO: 224369 - DNA, 25 bp, Probe Sequence
gaaaagaagacacctgtgcatagca

SEQ ID NO: 224370 - DNA, 25 bp, Probe Sequence
gaaaacatacagacttctcaagcag

SEQ ID NO: 224371 - DNA, 25 bp, Probe Sequence
gaaaagtagcagacataatcagaaa

SEQ ID NO: 224372 - DNA, 25 bp, Probe Sequence
gaaaactgcaagacatgtactgaat

SEQ ID NO: 224373 - DNA, 25 bp, Probe Sequence
gaaaagccacgaagtatctgaaaga

SEQ ID NO: 224374 - DNA, 25 bp, Probe Sequence
gaaaacacaggtagtgatacaaaca

SEQ ID NO: 224375 - DNA, 25 bp, Probe Sequence
gaaaaccaactttgatccagcagaa

SEQ ID NO: 224376 - DNA, 25 bp, Probe Sequence
gaaaaccaagctttgatttagattg

SEQ ID NO: 224377 - DNA, 25 bp, Probe Sequence
gaaaacactaatttcagtttgcttg

SEQ ID NO: 224378 - DNA, 25 bp, Probe Sequence
gaaactatctacaattcttgtttta

SEQ ID NO: 224379 - DNA, 25 bp, Probe Sequence
gaaacaactaataagcctgctttga

SEQ ID NO: 224380 - DNA, 25 bp, Probe Sequence
gaaaaagctaccaatcatactcttg

SEQ ID NO: 224381 - DNA, 25 bp, Probe Sequence
gaaaacattgactgttaccattgaa

SEQ ID NO: 224382 - DNA, 25 bp, Probe Sequence
gaaaactggcacgtcttaccaaaga

SEQ ID NO: 224383 - DNA, 25 bp, Probe Sequence
gaaaaatggcagcctcttagtgcta

SEQ ID NO: 224384 - DNA, 25 bp, Probe Sequence
gaaacaatgtgatcactctgaacat

SEQ ID NO: 224385 - DNA, 25 bp, Probe Sequence
gaaaagcatgcatatcattaaacaa

SEQ ID NO: 224386 - DNA, 25 bp, Probe Sequence
gaaaagcagaggacactcagcaaaa

SEQ ID NO: 224387 - DNA, 25 bp, Probe Sequence
gaaaagcagaagatcggcagacaga

SEQ ID NO: 224388 - DNA, 25 bp, Probe Sequence
gaaaaccacagttgcagctcgacat

SEQ ID NO: 224389 - DNA, 25 bp, Probe Sequence
gaaaagcgaagtgcatctcccataa

SEQ ID NO: 224390 - DNA, 25 bp, Probe Sequence
gaaacatcagaagctactctccatt

SEQ ID NO: 224391 - DNA, 25 bp, Probe Sequence
gaaaagatattggcttcactcccta

SEQ ID NO: 224392 - DNA, 25 bp, Probe Sequence
gaaaagtagacattatcctgcccca

SEQ ID NO: 224393 - DNA, 25 bp, Probe Sequence
gaaaaatgagcctttgtgcgtctct

SEQ ID NO: 224394 - DNA, 25 bp, Probe Sequence
gaaaagacagactttagtattctct

SEQ ID NO: 224395 - DNA, 25 bp, Probe Sequence
gaaaaaagagctgcagagtatttat

SEQ ID NO: 224396 - DNA, 25 bp, Probe Sequence
gaaaaaagagctgcagagtatttat

SEQ ID NO: 224397 - DNA, 25 bp, Probe Sequence
gaaaagaagatgtccacgcctgttg

SEQ ID NO: 224398 - DNA, 25 bp, Probe Sequence
gaaacatggaatgccagacgctggg

SEQ ID NO: 224399 - DNA, 25 bp, Probe Sequence
gaaacatggaatgccagacgctggg

SEQ ID NO: 224400 - DNA, 25 bp, Probe Sequence
gaaagcataactactctaggccggg

SEQ ID NO: 224401 - DNA, 25 bp, Probe Sequence
gaaacaaaaacttatggcacgggag

SEQ ID NO: 224402 - DNA, 25 bp, Probe Sequence
gaaaagaaggaatctggcatcaggg

SEQ ID NO: 224403 - DNA, 25 bp, Probe Sequence
gaaaagaagagatgcttcctcagca

SEQ ID NO: 224404 - DNA, 25 bp, Probe Sequence
gaaacatgtaaagctgtcacaatca

SEQ ID NO: 224405 - DNA, 25 bp, Probe Sequence
gaaacgaagtattcagtcaattcag

SEQ ID NO: 224406 - DNA, 25 bp, Probe Sequence
gaaagccaaatctcgccaagtagga

SEQ ID NO: 224407 - DNA, 25 bp, Probe Sequence
gaaatgcggaaccacggccgctatg

SEQ ID NO: 224408 - DNA, 25 bp, Probe Sequence
gacaaagtgaccatcggcctgttgt

SEQ ID NO: 224409 - DNA, 25 bp, Probe Sequence
gaaaaagaccttctgcactgtccat

SEQ ID NO: 224410 - DNA, 25 bp, Probe Sequence
gaaagaaatcacgtttcctgaccag

SEQ ID NO: 224411 - DNA, 25 bp, Probe Sequence
gaaaagaatccgttttatatccagg

SEQ ID NO: 224412 - DNA, 25 bp, Probe Sequence
gaaaagaatccctgttcattgtaag

SEQ ID NO: 224413 - DNA, 25 bp, Probe Sequence
gaaaaattagtctgtggatttaaca

SEQ ID NO: 224414 - DNA, 25 bp, Probe Sequence
gaaaaattagcctctgattcattaa

SEQ ID NO: 224415 - DNA, 25 bp, Probe Sequence
gaaaaatagggctggatcttatcac

SEQ ID NO: 224416 - DNA, 25 bp, Probe Sequence
gaaaaaattgaggataactgttacg

SEQ ID NO: 224417 - DNA, 25 bp, Probe Sequence
gaaaagcactctcggattcctttac

SEQ ID NO: 224418 - DNA, 25 bp, Probe Sequence
gaaaacatccggcaagacttctgaa

SEQ ID NO: 224419 - DNA, 25 bp, Probe Sequence
gaaaaatctcgtgaaggctgtagga

SEQ ID NO: 224420 - DNA, 25 bp, Probe Sequence
gaaagaaatcagtggttgcgaagga

SEQ ID NO: 224421 - DNA, 25 bp, Probe Sequence
gaaaaaaacaaccattctgatagga

SEQ ID NO: 224422 - DNA, 25 bp, Probe Sequence
gaaaaatagttgaccatgttgactg

SEQ ID NO: 224423 - DNA, 25 bp, Probe Sequence
gaaaactcttggacaatattcctgg

SEQ ID NO: 224424 - DNA, 25 bp, Probe Sequence
gaaaaccgtgtgaagcaactactat

SEQ ID NO: 224425 - DNA, 25 bp, Probe Sequence
gacaaaacgtttaaactatatcaca

SEQ ID NO: 224426 - DNA, 25 bp, Probe Sequence
gaaaaactccttaaactgtatctag

SEQ ID NO: 224427 - DNA, 25 bp, Probe Sequence
gaaacccttttagacattgacttag

SEQ ID NO: 224428 - DNA, 25 bp, Probe Sequence
gaaacccaattgtgccagcctggtt

SEQ ID NO: 224429 - DNA, 25 bp, Probe Sequence
gaaacacaagaaattggccactggt

SEQ ID NO: 224430 - DNA, 25 bp, Probe Sequence
gaaaaatagacaagggctgccgggt

SEQ ID NO: 224431 - DNA, 25 bp, Probe Sequence
gaaactataccataacccaaggctg

SEQ ID NO: 224432 - DNA, 25 bp, Probe Sequence
gaaacttacctaatcttcaaatgtt

SEQ ID NO: 224433 - DNA, 25 bp, Probe Sequence
gaaacctttttcattcaacattgta

SEQ ID NO: 224434 - DNA, 25 bp, Probe Sequence
gaaacactttgcttcttaaaattga

SEQ ID NO: 224435 - DNA, 25 bp, Probe Sequence
gaaacaccattcatctctaacatat

SEQ ID NO: 224436 - DNA, 25 bp, Probe Sequence
gaaaacaactgtgcctagactcaaa

SEQ ID NO: 224437 - DNA, 25 bp, Probe Sequence
gaaaaatacttgttatgagcctgca

SEQ ID NO: 224438 - DNA, 25 bp, Probe Sequence
gaaaagaactgtttgagtgccatta

SEQ ID NO: 224439 - DNA, 25 bp, Probe Sequence
gaaaaagactgttcaacatgcctta

SEQ ID NO: 224440 - DNA, 25 bp, Probe Sequence
gaaaaagacttggcagcttcctgat

SEQ ID NO: 224441 - DNA, 25 bp, Probe Sequence
gaaaaatgacttggtctgatttatt

SEQ ID NO: 224442 - DNA, 25 bp, Probe Sequence
gaaaaacttcgtgagatttcattaa

SEQ ID NO: 224443 - DNA, 25 bp, Probe Sequence
gaaaaacttagtgactactagatta

SEQ ID NO: 224444 - DNA, 25 bp, Probe Sequence
gaaaaccttagatacatagccgact

SEQ ID NO: 224445 - DNA, 25 bp, Probe Sequence
gaaaactttcaggcaaaatccaatt

SEQ ID NO: 224446 - DNA, 25 bp, Probe Sequence
gaaacagcctttgcaaagttcactt

SEQ ID NO: 224447 - DNA, 25 bp, Probe Sequence
gaaacacctgtaggtttgcttcaaa

SEQ ID NO: 224448 - DNA, 25 bp, Probe Sequence
gaaaacgtgtcttttttctgcacaa

SEQ ID NO: 224449 - DNA, 25 bp, Probe Sequence
gataaagcggttcttggtaccagca

SEQ ID NO: 224450 - DNA, 25 bp, Probe Sequence
gaaaacaggtgactttggaaagcaa

SEQ ID NO: 224451 - DNA, 25 bp, Probe Sequence
gaaactcgagtacttgttgacatta

SEQ ID NO: 224452 - DNA, 25 bp, Probe Sequence
gaaacttgatgtttgacctgtgatc

SEQ ID NO: 224453 - DNA, 25 bp, Probe Sequence
gaaactgcctatttgaaatggctca

SEQ ID NO: 224454 - DNA, 25 bp, Probe Sequence
gaaacacctcaactggataattatg

SEQ ID NO: 224455 - DNA, 25 bp, Probe Sequence
gaaacaccatcagagaatggttttt

SEQ ID NO: 224456 - DNA, 25 bp, Probe Sequence
gaaagcaaacagtacttggtttcat

SEQ ID NO: 224457 - DNA, 25 bp, Probe Sequence
gaaacacaagcggctctatgagtct

SEQ ID NO: 224458 - DNA, 25 bp, Probe Sequence
gaaacacacagggttctagatttga

SEQ ID NO: 224459 - DNA, 25 bp, Probe Sequence
gaaacacacagggttctagatttga

SEQ ID NO: 224460 - DNA, 25 bp, Probe Sequence
gaaaagcattggcactttgatcttg

SEQ ID NO: 224461 - DNA, 25 bp, Probe Sequence
gaaaagcctgagtgtattgcatctc

SEQ ID NO: 224462 - DNA, 25 bp, Probe Sequence
gaaaaccagatgcgttatgcccaga

SEQ ID NO: 224463 - DNA, 25 bp, Probe Sequence
gaaaactcagtgcagtccagtgcct

SEQ ID NO: 224464 - DNA, 25 bp, Probe Sequence
gaaacctcaggtatcctgctttaag

SEQ ID NO: 224465 - DNA, 25 bp, Probe Sequence
gaaacctcaggtatcctgctttaag

SEQ ID NO: 224466 - DNA, 25 bp, Probe Sequence
gaaacctaattttcagcgttcatac

SEQ ID NO: 224467 - DNA, 25 bp, Probe Sequence
gaaactctaatattgaatctcttaa

SEQ ID NO: 224468 - DNA, 25 bp, Probe Sequence
gaaacttttagatgacattctacaa

SEQ ID NO: 224469 - DNA, 25 bp, Probe Sequence
gaaactaattagtcgtattctgcta

SEQ ID NO: 224470 - DNA, 25 bp, Probe Sequence
gaaactacttgattcctatgggtaa

SEQ ID NO: 224471 - DNA, 25 bp, Probe Sequence
gaaacagactgtaatcccatggagc

SEQ ID NO: 224472 - DNA, 25 bp, Probe Sequence
gaaaccacaggaacctattcacaac

SEQ ID NO: 224473 - DNA, 25 bp, Probe Sequence
gaaaccacaggtatgcaattatgct

SEQ ID NO: 224474 - DNA, 25 bp, Probe Sequence
gaaacccaggaattttgctacttgg

SEQ ID NO: 224475 - DNA, 25 bp, Probe Sequence
gaaaccacggaagtttgttctctgg

SEQ ID NO: 224476 - DNA, 25 bp, Probe Sequence
gaaaccctgtgggctacttgtactg

SEQ ID NO: 224477 - DNA, 25 bp, Probe Sequence
gaaactccttgtaaacttatagtgt

SEQ ID NO: 224478 - DNA, 25 bp, Probe Sequence
gaaacttcattctttgtgatttagt

SEQ ID NO: 224479 - DNA, 25 bp, Probe Sequence
gaaacttgcaactttgagaacaaaa

SEQ ID NO: 224480 - DNA, 25 bp, Probe Sequence
gaaaaccatggcacgagaacaacta

SEQ ID NO: 224481 - DNA, 25 bp, Probe Sequence
gaaaaccatggattctgaaagttaa

SEQ ID NO: 224482 - DNA, 25 bp, Probe Sequence
gaaaaccagaggctacttgtgtaag

SEQ ID NO: 224483 - DNA, 25 bp, Probe Sequence
gaaaaaccaagtcccttgtccaatg

SEQ ID NO: 224484 - DNA, 25 bp, Probe Sequence
gaaaaaccaggggccttcatctagg

SEQ ID NO: 224485 - DNA, 25 bp, Probe Sequence
gaaagaaagggacccacctgctagt

SEQ ID NO: 224486 - DNA, 25 bp, Probe Sequence
gaaaaagtgaggccaacacacaggg

SEQ ID NO: 224487 - DNA, 25 bp, Probe Sequence
gttaaagccgagccagccaaaatag

SEQ ID NO: 224488 - DNA, 25 bp, Probe Sequence
gtaagaacctggagcccaagtataa

SEQ ID NO: 224489 - DNA, 25 bp, Probe Sequence
gaaaaacagctggggccacaacttt

SEQ ID NO: 224490 - DNA, 25 bp, Probe Sequence
gaaaaacctagggaacaagtgctgg

SEQ ID NO: 224491 - DNA, 25 bp, Probe Sequence
gaaaaacctagggcaacagcaacaa

SEQ ID NO: 224492 - DNA, 25 bp, Probe Sequence
gaaaaactcatacgtgattgcagcc

SEQ ID NO: 224493 - DNA, 25 bp, Probe Sequence
gaaaaagccataggtcatagcctct

SEQ ID NO: 224494 - DNA, 25 bp, Probe Sequence
gaaacactgctcatggtacagctcc

SEQ ID NO: 224495 - DNA, 25 bp, Probe Sequence
gaaactctcctatgtacatgtagtt

SEQ ID NO: 224496 - DNA, 25 bp, Probe Sequence
gaaactctcctgcaggacttcagag

SEQ ID NO: 224497 - DNA, 25 bp, Probe Sequence
gaaacagcctccaagaacattcaag

SEQ ID NO: 224498 - DNA, 25 bp, Probe Sequence
gaaaacgctgcggcaagccgtcaag

SEQ ID NO: 224499 - DNA, 25 bp, Probe Sequence
gaaaacgctgaggaagtggcttaag

SEQ ID NO: 224500 - DNA, 25 bp, Probe Sequence
gaaacacacttaaagtagcttaagg

SEQ ID NO: 224501 - DNA, 25 bp, Probe Sequence
gaaaacacttaaaatgatcattagg

SEQ ID NO: 224502 - DNA, 25 bp, Probe Sequence
gaaaaatcttaatagcagtgttggc

SEQ ID NO: 224503 - DNA, 25 bp, Probe Sequence
gaaaaattctaggactggtgtggtg

SEQ ID NO: 224504 - DNA, 25 bp, Probe Sequence
gaaaaaattacccattgtggcttgt

SEQ ID NO: 224505 - DNA, 25 bp, Probe Sequence
gaaaaaatattctgttgtgtctcat

SEQ ID NO: 224506 - DNA, 25 bp, Probe Sequence
gaaaaatgtattgtgctttgatact

SEQ ID NO: 224507 - DNA, 25 bp, Probe Sequence
gaaaacgacattaccttgtgcattt

SEQ ID NO: 224508 - DNA, 25 bp, Probe Sequence
gaaaacagcaatcttcttatgcttc

SEQ ID NO: 224509 - DNA, 25 bp, Probe Sequence
gaaaacaccatgcttattctcctgt

SEQ ID NO: 224510 - DNA, 25 bp, Probe Sequence
gaaactaccagtaaatctacctctg

SEQ ID NO: 224511 - DNA, 25 bp, Probe Sequence
gaaactaccaatcacagataaaagt

SEQ ID NO: 224512 - DNA, 25 bp, Probe Sequence
gaaactgcccaagaatgagtatata

SEQ ID NO: 224513 - DNA, 25 bp, Probe Sequence
gaaatctaccaagacaattcttaat

SEQ ID NO: 224514 - DNA, 25 bp, Probe Sequence
gaaaaagctgaatacaagtctttat

SEQ ID NO: 224515 - DNA, 25 bp, Probe Sequence
gaaacaagcttacaaagatataatc

SEQ ID NO: 224516 - DNA, 25 bp, Probe Sequence
gaaataactaagacacaaataacct

SEQ ID NO: 224517 - DNA, 25 bp, Probe Sequence
gaaaaacatgcaacagacacacaaa

SEQ ID NO: 224518 - DNA, 25 bp, Probe Sequence
gaaaacacagaattgatcatcacat

SEQ ID NO: 224519 - DNA, 25 bp, Probe Sequence
gaaaactatggactgtgctgctgcc

SEQ ID NO: 224520 - DNA, 25 bp, Probe Sequence
gaaacacatctcgtgcagatctgct

SEQ ID NO: 224521 - DNA, 25 bp, Probe Sequence
gaaacacatctccattgactgtggt

SEQ ID NO: 224522 - DNA, 25 bp, Probe Sequence
gaaacataaccattacagggagctg

SEQ ID NO: 224523 - DNA, 25 bp, Probe Sequence
gaaacaaagtctcactaggcatgct

SEQ ID NO: 224524 - DNA, 25 bp, Probe Sequence
gaaacaaagtctcactaggcatgct

SEQ ID NO: 224525 - DNA, 25 bp, Probe Sequence
gaaacaatgactgaggctgagtgca

SEQ ID NO: 224526 - DNA, 25 bp, Probe Sequence
gaaactacagccgagagagagtgca

SEQ ID NO: 224527 - DNA, 25 bp, Probe Sequence
gaaacaccatcccaagatgaagagg

SEQ ID NO: 224528 - DNA, 25 bp, Probe Sequence
gaaacactttgccaagcaaggcgca

SEQ ID NO: 224529 - DNA, 25 bp, Probe Sequence
gaaacctctggctaatcgggccatc

SEQ ID NO: 224530 - DNA, 25 bp, Probe Sequence
gaaacaccaacaactgggaatcact

SEQ ID NO: 224531 - DNA, 25 bp, Probe Sequence
gaaattgtaacaacgtctcgaactt

SEQ ID NO: 224532 - DNA, 25 bp, Probe Sequence
gaaagtactatgaacgtctcgaagc

SEQ ID NO: 224533 - DNA, 25 bp, Probe Sequence
gaaagtgactgatacggcatccatg

SEQ ID NO: 224534 - DNA, 25 bp, Probe Sequence
gaaactgagctgggactggaaagga

SEQ ID NO: 224535 - DNA, 25 bp, Probe Sequence
gaaactggcgtttgtggggtgaatc

SEQ ID NO: 224536 - DNA, 25 bp, Probe Sequence
gaaacttcagtggtcgtggtggctt

SEQ ID NO: 224537 - DNA, 25 bp, Probe Sequence
gaaacttcagtggtcgtggtggctt

SEQ ID NO: 224538 - DNA, 25 bp, Probe Sequence
gaaagtccaagctcgtggtgggtgg

SEQ ID NO: 224539 - DNA, 25 bp, Probe Sequence
gaaatggttatctcgttggggagga

SEQ ID NO: 224540 - DNA, 25 bp, Probe Sequence
gaaagtcttcctgaagcagggggaa

SEQ ID NO: 224541 - DNA, 25 bp, Probe Sequence
gaaagttttccagagaggagggatg

SEQ ID NO: 224542 - DNA, 25 bp, Probe Sequence
gaaagttctttgcaaacaaccgtga

SEQ ID NO: 224543 - DNA, 25 bp, Probe Sequence
gacagaattcttctaagaccacgag

SEQ ID NO: 224544 - DNA, 25 bp, Probe Sequence
gaaaactctgttaaagatcacacca

SEQ ID NO: 224545 - DNA, 25 bp, Probe Sequence
gaaaactctggtaaatgatcactcc

SEQ ID NO: 224546 - DNA, 25 bp, Probe Sequence
gaaacactccaggaaatccagctct

SEQ ID NO: 224547 - DNA, 25 bp, Probe Sequence
gaaacactctgagcaagtcccagat

SEQ ID NO: 224548 - DNA, 25 bp, Probe Sequence
gaaaacatctagtcagagctcaccg

SEQ ID NO: 224549 - DNA, 25 bp, Probe Sequence
gagatggacccgagagtccaccagc

SEQ ID NO: 224550 - DNA, 25 bp, Probe Sequence
gaaatacctgggcaatgccaccgcc

SEQ ID NO: 224551 - DNA, 25 bp, Probe Sequence
gaaacaccgtggtactgttcgtgcc

SEQ ID NO: 224552 - DNA, 25 bp, Probe Sequence
gaaagcactgttagaatttgtcggg

SEQ ID NO: 224553 - DNA, 25 bp, Probe Sequence
gaaagcctttctattttttggtgcg

SEQ ID NO: 224554 - DNA, 25 bp, Probe Sequence
gaaaggatttttatcttctgtagag

SEQ ID NO: 224555 - DNA, 25 bp, Probe Sequence
gaaagcgaattcctagacacctgga

SEQ ID NO: 224556 - DNA, 25 bp, Probe Sequence
gaaactgaacttcgaagcagcctgg

SEQ ID NO: 224557 - DNA, 25 bp, Probe Sequence
gaaacataacttcacaccactggca

SEQ ID NO: 224558 - DNA, 25 bp, Probe Sequence
gaaaaaggctacaatacacactgga

SEQ ID NO: 224559 - DNA, 25 bp, Probe Sequence
gaaaacaggccaacgaacacaagaa

SEQ ID NO: 224560 - DNA, 25 bp, Probe Sequence
gagaaactgggaaacaaacgatata

SEQ ID NO: 224561 - DNA, 25 bp, Probe Sequence
gaaactgggaaacaaacgatatatc

SEQ ID NO: 224562 - DNA, 25 bp, Probe Sequence
gaaacggaataatgacaccagaatt

SEQ ID NO: 224563 - DNA, 25 bp, Probe Sequence
gagaagggcaattaaactcctaaga

SEQ ID NO: 224564 - DNA, 25 bp, Probe Sequence
gaaagggaatcctcctgtttgctga

SEQ ID NO: 224565 - DNA, 25 bp, Probe Sequence
gaaaaagcacctttcctttgtgaga

SEQ ID NO: 224566 - DNA, 25 bp, Probe Sequence
gaaaaaatccttccctagagctagt

SEQ ID NO: 224567 - DNA, 25 bp, Probe Sequence
gaaaaaactccttgattgaatgtag

SEQ ID NO: 224568 - DNA, 25 bp, Probe Sequence
gaaatataattcctagttaattggt

SEQ ID NO: 224569 - DNA, 25 bp, Probe Sequence
gaaaaacatcctatttactctggta

SEQ ID NO: 224570 - DNA, 25 bp, Probe Sequence
gaaaaacatccttttggaccatttg

SEQ ID NO: 224571 - DNA, 25 bp, Probe Sequence
gaaaaacagcctgtcggaccacagc

SEQ ID NO: 224572 - DNA, 25 bp, Probe Sequence
gaaagatactgactgcccaggaatc

SEQ ID NO: 224573 - DNA, 25 bp, Probe Sequence
gaaagggtttgccctgagacaccaa

SEQ ID NO: 224574 - DNA, 25 bp, Probe Sequence
gacaggggactccccaagaactcct

SEQ ID NO: 224575 - DNA, 25 bp, Probe Sequence
gagagggtattccctgcaagtttct

SEQ ID NO: 224576 - DNA, 25 bp, Probe Sequence
gacaggcgttttttgaagttattga

SEQ ID NO: 224577 - DNA, 25 bp, Probe Sequence
gaaactatttattgtaagcttatgt

SEQ ID NO: 224578 - DNA, 25 bp, Probe Sequence
gaaactgcggttttagatgctttgt

SEQ ID NO: 224579 - DNA, 25 bp, Probe Sequence
gaaactggagtatccaacttgtgca

SEQ ID NO: 224580 - DNA, 25 bp, Probe Sequence
gaaacgtggttcttcaagtagatct

SEQ ID NO: 224581 - DNA, 25 bp, Probe Sequence
gaaatcagggtcaaggtcgtagttc

SEQ ID NO: 224582 - DNA, 25 bp, Probe Sequence
gaaagatgaggcagaggtccaagta

SEQ ID NO: 224583 - DNA, 25 bp, Probe Sequence
gaaaaaggctctaggtcagcaagtg

SEQ ID NO: 224584 - DNA, 25 bp, Probe Sequence
gaaaaacgctcatcttcggacagct

SEQ ID NO: 224585 - DNA, 25 bp, Probe Sequence
gaaacagaattctatttgggcaaga

SEQ ID NO: 224586 - DNA, 25 bp, Probe Sequence
gaaacagaattctatttgggcaaga

SEQ ID NO: 224587 - DNA, 25 bp, Probe Sequence
gaaacgaatatattttgggtgccat

SEQ ID NO: 224588 - DNA, 25 bp, Probe Sequence
gaaactatgtaattttctggctaat

SEQ ID NO: 224589 - DNA, 25 bp, Probe Sequence
gaaactgtaagaagattctggctag

SEQ ID NO: 224590 - DNA, 25 bp, Probe Sequence
gaaatatgctgaagaagaccggcga

SEQ ID NO: 224591 - DNA, 25 bp, Probe Sequence
gaaacactgaagatgtcctgaggag

SEQ ID NO: 224592 - DNA, 25 bp, Probe Sequence
gaaacagatgcatatttcctcaaca

SEQ ID NO: 224593 - DNA, 25 bp, Probe Sequence
gaaacagagcgcaaatgtcctcaga

SEQ ID NO: 224594 - DNA, 25 bp, Probe Sequence
gacaaaggaagttgacctaaacatg

SEQ ID NO: 224595 - DNA, 25 bp, Probe Sequence
gaaacaagtagccacacctcaaaat

SEQ ID NO: 224596 - DNA, 25 bp, Probe Sequence
gaaaaagctagaagcattccccttg

SEQ ID NO: 224597 - DNA, 25 bp, Probe Sequence
gaaaaactatccgattcataatttg

SEQ ID NO: 224598 - DNA, 25 bp, Probe Sequence
gaaaaactattcctaatcaacatgg

SEQ ID NO: 224599 - DNA, 25 bp, Probe Sequence
gaaactcctagtttagacaactggt

SEQ ID NO: 224600 - DNA, 25 bp, Probe Sequence
gaaaccctgacccagaaaagtggct

SEQ ID NO: 224601 - DNA, 25 bp, Probe Sequence
gaaagccctaccacaagaagcggaa

SEQ ID NO: 224602 - DNA, 25 bp, Probe Sequence
gaaaccccgatcacaaagatacgaa

SEQ ID NO: 224603 - DNA, 25 bp, Probe Sequence
gaaaccccgacccagaagcaggtcg

SEQ ID NO: 224604 - DNA, 25 bp, Probe Sequence
gaaacctggcttgtgaggacgcgtc

SEQ ID NO: 224605 - DNA, 25 bp, Probe Sequence
gaaaccccctcaggagtgaagcgtc

SEQ ID NO: 224606 - DNA, 25 bp, Probe Sequence
gaaacctgccgtcgtgtgtgggcag

SEQ ID NO: 224607 - DNA, 25 bp, Probe Sequence
gaaagcccgggagtgtgtggggaag

SEQ ID NO: 224608 - DNA, 25 bp, Probe Sequence
gaaacccatgtgcagggtgggctgg

SEQ ID NO: 224609 - DNA, 25 bp, Probe Sequence
gaaaccactgggaggacctgggctt

SEQ ID NO: 224610 - DNA, 25 bp, Probe Sequence
gaaaccactgggaggacctgggctt

SEQ ID NO: 224611 - DNA, 25 bp, Probe Sequence
gataaggacggctggtccctgtggt

SEQ ID NO: 224612 - DNA, 25 bp, Probe Sequence
gataaggacggctggtccctgtggt

SEQ ID NO: 224613 - DNA, 25 bp, Probe Sequence
gaaagtagcagtgagagctcctctg

SEQ ID NO: 224614 - DNA, 25 bp, Probe Sequence
gaaactactgacggagtcctgtgtt

SEQ ID NO: 224615 - DNA, 25 bp, Probe Sequence
gagaggcaacgagaaagttggcagg

SEQ ID NO: 224616 - DNA, 25 bp, Probe Sequence
gaaacgagcgcagccaagttgaaga

SEQ ID NO: 224617 - DNA, 25 bp, Probe Sequence
gaaaccagacccagtgttcaagagg

SEQ ID NO: 224618 - DNA, 25 bp, Probe Sequence
gaaacactgacctcttgtctcaaaa

SEQ ID NO: 224619 - DNA, 25 bp, Probe Sequence
gaaacacagacttctcttcttcatt

SEQ ID NO: 224620 - DNA, 25 bp, Probe Sequence
gaaacacaaccattctcatttgtct

SEQ ID NO: 224621 - DNA, 25 bp, Probe Sequence
gaaacaatagcgacagccattcgta

SEQ ID NO: 224622 - DNA, 25 bp, Probe Sequence
gaaaaaggcggccatcatctctgct

SEQ ID NO: 224623 - DNA, 25 bp, Probe Sequence
gaaacacaccagcagtcattgtctc

SEQ ID NO: 224624 - DNA, 25 bp, Probe Sequence
gaaacataccactctcatggttcat

SEQ ID NO: 224625 - DNA, 25 bp, Probe Sequence
gaaaaaccagcacctgcgtctggat

SEQ ID NO: 224626 - DNA, 25 bp, Probe Sequence
gaaagagaccagccttggtccctaa

SEQ ID NO: 224627 - DNA, 25 bp, Probe Sequence
gacaagaacccagattttcctgcaa

SEQ ID NO: 224628 - DNA, 25 bp, Probe Sequence
gaaagggtcctgcattttctggaat

SEQ ID NO: 224629 - DNA, 25 bp, Probe Sequence
gaaagttgtcttcattgtacaaaca

SEQ ID NO: 224630 - DNA, 25 bp, Probe Sequence
gaaacttggttgcaacttcaagaca

SEQ ID NO: 224631 - DNA, 25 bp, Probe Sequence
gaaacttggttcccagaaaacacat

SEQ ID NO: 224632 - DNA, 25 bp, Probe Sequence
gaaacttatttccaagcaggaccac

SEQ ID NO: 224633 - DNA, 25 bp, Probe Sequence
gaaaccattgttcagaagacctccc

SEQ ID NO: 224634 - DNA, 25 bp, Probe Sequence
gacacaagttttcaggagatttcca

SEQ ID NO: 224635 - DNA, 25 bp, Probe Sequence
gaaacactgtctctcagtcaatttc

SEQ ID NO: 224636 - DNA, 25 bp, Probe Sequence
gaaatcttgcttcagaccatcagtt

SEQ ID NO: 224637 - DNA, 25 bp, Probe Sequence
gaaaccatgttgaagagctccagtt

SEQ ID NO: 224638 - DNA, 25 bp, Probe Sequence
gaaacatagtggaggccgcagcagt

SEQ ID NO: 224639 - DNA, 25 bp, Probe Sequence
gaaacacatgggttatcgccaagct

SEQ ID NO: 224640 - DNA, 25 bp, Probe Sequence
gaaaaatcagtgtattagtcataaa

SEQ ID NO: 224641 - DNA, 25 bp, Probe Sequence
gaaacaagattgtcctagccagtaa

SEQ ID NO: 224642 - DNA, 25 bp, Probe Sequence
gaaagcaaatcagttgccggcctaa

SEQ ID NO: 224643 - DNA, 25 bp, Probe Sequence
gaaaggaacttaggggctcagaaat

SEQ ID NO: 224644 - DNA, 25 bp, Probe Sequence
gaaagagcaactgaagtcctagaaa

SEQ ID NO: 224645 - DNA, 25 bp, Probe Sequence
gaaagataggcaggtttactgtaaa

SEQ ID NO: 224646 - DNA, 25 bp, Probe Sequence
gaaagactggacttattactcccaa

SEQ ID NO: 224647 - DNA, 25 bp, Probe Sequence
gaaagccggacaatcagcaaatacc

SEQ ID NO: 224648 - DNA, 25 bp, Probe Sequence
gaaatccaggagtggaggaatccaa

SEQ ID NO: 224649 - DNA, 25 bp, Probe Sequence
gaaagccaacgggatcagaggacca

SEQ ID NO: 224650 - DNA, 25 bp, Probe Sequence
gaaagtccaagccgtaggacccagt

SEQ ID NO: 224651 - DNA, 25 bp, Probe Sequence
gaaagtgagaacggggaacctcgtg

SEQ ID NO: 224652 - DNA, 25 bp, Probe Sequence
gaaaaagaacatgaggaccctctgg

SEQ ID NO: 224653 - DNA, 25 bp, Probe Sequence
gaaacaagggcgtggatccctcaac

SEQ ID NO: 224654 - DNA, 25 bp, Probe Sequence
gaaacgaagcggagttccctcattc

SEQ ID NO: 224655 - DNA, 25 bp, Probe Sequence
gaaaggggcgtgaagcttggcctcg

SEQ ID NO: 224656 - DNA, 25 bp, Probe Sequence
gaaaggggcgtgaagcttggcctcg

SEQ ID NO: 224657 - DNA, 25 bp, Probe Sequence
gaaagggccttgaatcctggcctgg

SEQ ID NO: 224658 - DNA, 25 bp, Probe Sequence
gaaaggggtgtttacgagcagctgt

SEQ ID NO: 224659 - DNA, 25 bp, Probe Sequence
gaaagagggtcttatgaacaaggta

SEQ ID NO: 224660 - DNA, 25 bp, Probe Sequence
gaaagtgggtaaagaccatacgttg

SEQ ID NO: 224661 - DNA, 25 bp, Probe Sequence
gaaagctgggaaaggggatgggtag

SEQ ID NO: 224662 - DNA, 25 bp, Probe Sequence
gaaagctgggaaaggggatgggtag

SEQ ID NO: 224663 - DNA, 25 bp, Probe Sequence
gacaatgctgggtaagggagggggt

SEQ ID NO: 224664 - DNA, 25 bp, Probe Sequence
gaaagggcaaagtagggcgtgtggt

SEQ ID NO: 224665 - DNA, 25 bp, Probe Sequence
gaaagggcaaagtagggcgtgtggt

SEQ ID NO: 224666 - DNA, 25 bp, Probe Sequence
gaaagagttaaggaaggcaggttgt

SEQ ID NO: 224667 - DNA, 25 bp, Probe Sequence
gaaacatgtgttaaagagtgggatt

SEQ ID NO: 224668 - DNA, 25 bp, Probe Sequence
gaaacatgctctgtaaagggtcttc

SEQ ID NO: 224669 - DNA, 25 bp, Probe Sequence
gaaactcttgtttcactggactctg

SEQ ID NO: 224670 - DNA, 25 bp, Probe Sequence
gaaagccataatgacggtgacttgt

SEQ ID NO: 224671 - DNA, 25 bp, Probe Sequence
gaaacctgtaccaggtgcttttatt

SEQ ID NO: 224672 - DNA, 25 bp, Probe Sequence
gaaaccgttctaagactgctttgta

SEQ ID NO: 224673 - DNA, 25 bp, Probe Sequence
gaaacagttttatactttctgatat

SEQ ID NO: 224674 - DNA, 25 bp, Probe Sequence
gaaacagctttcaagtgcctttctg

SEQ ID NO: 224675 - DNA, 25 bp, Probe Sequence
gaaagagctgtagagtgttatttta

SEQ ID NO: 224676 - DNA, 25 bp, Probe Sequence
gaaaggcttgagatcttttaagaac

SEQ ID NO: 224677 - DNA, 25 bp, Probe Sequence
gaaagtgctcggtgcctttagtgat

SEQ ID NO: 224678 - DNA, 25 bp, Probe Sequence
gaaagtgctcggtgcctttagtgat

SEQ ID NO: 224679 - DNA, 25 bp, Probe Sequence
gaaactggttggtcctttcagtgaa

SEQ ID NO: 224680 - DNA, 25 bp, Probe Sequence
gaaactgagttttgtcatcttccat

SEQ ID NO: 224681 - DNA, 25 bp, Probe Sequence
gaaactgctttctgtactcttgcaa

SEQ ID NO: 224682 - DNA, 25 bp, Probe Sequence
gaaagagtccactctgcacttggtc

SEQ ID NO: 224683 - DNA, 25 bp, Probe Sequence
gaaagagtccactctgcacttggtc

SEQ ID NO: 224684 - DNA, 25 bp, Probe Sequence
gaaagcggtgacttcacctcatgga

SEQ ID NO: 224685 - DNA, 25 bp, Probe Sequence
gaaagaggctggctacacaatcgaa

SEQ ID NO: 224686 - DNA, 25 bp, Probe Sequence
gaaacgagtggtcagcacatttagt

SEQ ID NO: 224687 - DNA, 25 bp, Probe Sequence
gaaaaagggtcaatgctatttttgt

SEQ ID NO: 224688 - DNA, 25 bp, Probe Sequence
gaaacaactgtgccttcttttcttt

SEQ ID NO: 224689 - DNA, 25 bp, Probe Sequence
gaaacagggctgattcttgattccc

SEQ ID NO: 224690 - DNA, 25 bp, Probe Sequence
gaaacttggcagaaactcgttagcc

SEQ ID NO: 224691 - DNA, 25 bp, Probe Sequence
gaaagttgggcaaaacaggctagca

SEQ ID NO: 224692 - DNA, 25 bp, Probe Sequence
gaaagttgcaggattagcggaatgt

SEQ ID NO: 224693 - DNA, 25 bp, Probe Sequence
gaaatgttcggtgatccgggactca

SEQ ID NO: 224694 - DNA, 25 bp, Probe Sequence
gaaattgaaggagaccgcggagcat

SEQ ID NO: 224695 - DNA, 25 bp, Probe Sequence
gaaattgctaggaccattgggggtt

SEQ ID NO: 224696 - DNA, 25 bp, Probe Sequence
gaaactgcatgtgggctatgggagg

SEQ ID NO: 224697 - DNA, 25 bp, Probe Sequence
gaaactcaggaggtagggctagaaa

SEQ ID NO: 224698 - DNA, 25 bp, Probe Sequence
gaaatggctggcggtaaggctggaa

SEQ ID NO: 224699 - DNA, 25 bp, Probe Sequence
gaaacctgagtgccagagtgactgg

SEQ ID NO: 224700 - DNA, 25 bp, Probe Sequence
gaaacctgagatcaagctgctgaga

SEQ ID NO: 224701 - DNA, 25 bp, Probe Sequence
gaaaccatcgacaagactgctaacc

SEQ ID NO: 224702 - DNA, 25 bp, Probe Sequence
gaaaccatcaaatccagaatacagg

SEQ ID NO: 224703 - DNA, 25 bp, Probe Sequence
gaaacctataacttcacactcatag

SEQ ID NO: 224704 - DNA, 25 bp, Probe Sequence
gaaactcctaaattgcatcagtgat

SEQ ID NO: 224705 - DNA, 25 bp, Probe Sequence
gaaacacagtgaatttgtagagtgg

SEQ ID NO: 224706 - DNA, 25 bp, Probe Sequence
gaaacacaggaagtatgccagatgg

SEQ ID NO: 224707 - DNA, 25 bp, Probe Sequence
gaaacacagcaatggatgcacagga

SEQ ID NO: 224708 - DNA, 25 bp, Probe Sequence
gaaacacagcattttgcaagacata

SEQ ID NO: 224709 - DNA, 25 bp, Probe Sequence
gaaacacatgtgtctgtggtatcta

SEQ ID NO: 224710 - DNA, 25 bp, Probe Sequence
gaaacactctttagtgctatatgca

SEQ ID NO: 224711 - DNA, 25 bp, Probe Sequence
gaaacacactggtgctttcatcatc

SEQ ID NO: 224712 - DNA, 25 bp, Probe Sequence
gaaacagtctggatgctggtgccac

SEQ ID NO: 224713 - DNA, 25 bp, Probe Sequence
gaaactttgtgaactctatgccaag

SEQ ID NO: 224714 - DNA, 25 bp, Probe Sequence
gaaactttgtgctacatgacgacaa

SEQ ID NO: 224715 - DNA, 25 bp, Probe Sequence
gaaacttttgcattactatactact

SEQ ID NO: 224716 - DNA, 25 bp, Probe Sequence
gaaactgtctctgtacagaacttcc

SEQ ID NO: 224717 - DNA, 25 bp, Probe Sequence
gaaactgtccttttgacaactctct

SEQ ID NO: 224718 - DNA, 25 bp, Probe Sequence
gaaactttctgtcttaagatgcttc

SEQ ID NO: 224719 - DNA, 25 bp, Probe Sequence
gaaagctactttgttgagagtctca

SEQ ID NO: 224720 - DNA, 25 bp, Probe Sequence
gaaacttttttcttgatgagactca

SEQ ID NO: 224721 - DNA, 25 bp, Probe Sequence
gaaacatattttaagggccattcat

SEQ ID NO: 224722 - DNA, 25 bp, Probe Sequence
gaaacatatgtaattgactaccatg

SEQ ID NO: 224723 - DNA, 25 bp, Probe Sequence
gaaacaaataattggctacattgac

SEQ ID NO: 224724 - DNA, 25 bp, Probe Sequence
gaaagcaaccaacagctaattccaa

SEQ ID NO: 224725 - DNA, 25 bp, Probe Sequence
gaaagcctactagacaaattctaaa

SEQ ID NO: 224726 - DNA, 25 bp, Probe Sequence
gaaacctcatctctactaaaaaata

SEQ ID NO: 224727 - DNA, 25 bp, Probe Sequence
gaaacaccattgctactgaaaacac

SEQ ID NO: 224728 - DNA, 25 bp, Probe Sequence
gaaacacacattggtactaaaacta

SEQ ID NO: 224729 - DNA, 25 bp, Probe Sequence
gaaacactcacaaaacttagaactg

SEQ ID NO: 224730 - DNA, 25 bp, Probe Sequence
gaaacttccaagccaaaagatgact

SEQ ID NO: 224731 - DNA, 25 bp, Probe Sequence
gaaagaactcagggcacaaaatatt

SEQ ID NO: 224732 - DNA, 25 bp, Probe Sequence
gaaacacctcgagaccaaatttttg

SEQ ID NO: 224733 - DNA, 25 bp, Probe Sequence
gaaacaggcccagattcaacttttc

SEQ ID NO: 224734 - DNA, 25 bp, Probe Sequence
gaaatcatcccctgaataacttttt

SEQ ID NO: 224735 - DNA, 25 bp, Probe Sequence
gaaaccaaccatgaatgaacccctg

SEQ ID NO: 224736 - DNA, 25 bp, Probe Sequence
gaaaccaatgccgtagatgaaccct

SEQ ID NO: 224737 - DNA, 25 bp, Probe Sequence
gaaaccattgctcctagagaaatac

SEQ ID NO: 224738 - DNA, 25 bp, Probe Sequence
gacacccattggaaatgaaccatga

SEQ ID NO: 224739 - DNA, 25 bp, Probe Sequence
gaaacaaatgtgtataaactgctgt

SEQ ID NO: 224740 - DNA, 25 bp, Probe Sequence
gaaacaaacttatagtgatgcgttg

SEQ ID NO: 224741 - DNA, 25 bp, Probe Sequence
gaaacaagactttattgagatcagt

SEQ ID NO: 224742 - DNA, 25 bp, Probe Sequence
gaaacaaagcgttctgcgcgtcttc

SEQ ID NO: 224743 - DNA, 25 bp, Probe Sequence
gaaagagaagttttcttgacttttg

SEQ ID NO: 224744 - DNA, 25 bp, Probe Sequence
gaaagagaagttttcttgacttttg

SEQ ID NO: 224745 - DNA, 25 bp, Probe Sequence
gaaagggagtttcgtgctccaactt

SEQ ID NO: 224746 - DNA, 25 bp, Probe Sequence
gaaagagagctgggtcgtcgtcaag

SEQ ID NO: 224747 - DNA, 25 bp, Probe Sequence
gaaaggtccgagattgcagattgag

SEQ ID NO: 224748 - DNA, 25 bp, Probe Sequence
gaaactgtgcacccatttcgaagag

SEQ ID NO: 224749 - DNA, 25 bp, Probe Sequence
gaaactgtatcacctttgccaagta

SEQ ID NO: 224750 - DNA, 25 bp, Probe Sequence
gaaacgaacctctttgaaactgaag

SEQ ID NO: 224751 - DNA, 25 bp, Probe Sequence
gaaacctactccattgataacgagg

SEQ ID NO: 224752 - DNA, 25 bp, Probe Sequence
gaaacctactaattcttaagtgacg

SEQ ID NO: 224753 - DNA, 25 bp, Probe Sequence
gagagaccagttcttttagaagcca

SEQ ID NO: 224754 - DNA, 25 bp, Probe Sequence
gaaaccagctttttgcactaaagcc

SEQ ID NO: 224755 - DNA, 25 bp, Probe Sequence
gaaacccacgaagcctacaagcaaa

SEQ ID NO: 224756 - DNA, 25 bp, Probe Sequence
gaaacacgcacttagtctctaaaga

SEQ ID NO: 224757 - DNA, 25 bp, Probe Sequence
gaaacacagagttgttctgctgata

SEQ ID NO: 224758 - DNA, 25 bp, Probe Sequence
gaaacagtagtaatacagctgacat

SEQ ID NO: 224759 - DNA, 25 bp, Probe Sequence
gaaacagcttgttgtaccgaatcaa

SEQ ID NO: 224760 - DNA, 25 bp, Probe Sequence
gaaacagtttcagatcctgccagga

SEQ ID NO: 224761 - DNA, 25 bp, Probe Sequence
gaaacagttctagacctttgtgata

SEQ ID NO: 224762 - DNA, 25 bp, Probe Sequence
gaaacatttcttgcaggtttgcttc

SEQ ID NO: 224763 - DNA, 25 bp, Probe Sequence
gaaacattagtcttaggaattcttc

SEQ ID NO: 224764 - DNA, 25 bp, Probe Sequence
gaaacattaattagggatcttgctg

SEQ ID NO: 224765 - DNA, 25 bp, Probe Sequence
gaaactgggaggggtgatttgtgat

SEQ ID NO: 224766 - DNA, 25 bp, Probe Sequence
gaaacgggaggcattggcttctgtc

SEQ ID NO: 224767 - DNA, 25 bp, Probe Sequence
gaaacggagtggcctgctccgttgt

SEQ ID NO: 224768 - DNA, 25 bp, Probe Sequence
gaaacggatattctctcctgtgttt

SEQ ID NO: 224769 - DNA, 25 bp, Probe Sequence
gaaacggttcacattccattatttg

SEQ ID NO: 224770 - DNA, 25 bp, Probe Sequence
gaaacctgttaacttacattttatg

SEQ ID NO: 224771 - DNA, 25 bp, Probe Sequence
gaaacctgtataatagtaagatctt

SEQ ID NO: 224772 - DNA, 25 bp, Probe Sequence
gaaacctattggaattcgagactta

SEQ ID NO: 224773 - DNA, 25 bp, Probe Sequence
gaaacccatgggaatacctgaccta

SEQ ID NO: 224774 - DNA, 25 bp, Probe Sequence
gaaacccatttatactctactctca

SEQ ID NO: 224775 - DNA, 25 bp, Probe Sequence
gaaacctcctataaagcttagctgc

SEQ ID NO: 224776 - DNA, 25 bp, Probe Sequence
gaaatacttcttcaagttatgatgc

SEQ ID NO: 224777 - DNA, 25 bp, Probe Sequence
gaaaccttcctatatgtctgacaat

SEQ ID NO: 224778 - DNA, 25 bp, Probe Sequence
gaaacatatctcttatcttacgaaa

SEQ ID NO: 224779 - DNA, 25 bp, Probe Sequence
gaaacttatcatcaattcattgtat

SEQ ID NO: 224780 - DNA, 25 bp, Probe Sequence
gaaacatttcagtaatttataataa

SEQ ID NO: 224781 - DNA, 25 bp, Probe Sequence
gaaacagttctctcaatacataaag

SEQ ID NO: 224782 - DNA, 25 bp, Probe Sequence
gaaacagttctctcaatacataaag

SEQ ID NO: 224783 - DNA, 25 bp, Probe Sequence
gaaactgctagtaagaaacaagaga

SEQ ID NO: 224784 - DNA, 25 bp, Probe Sequence
gaaacttgctgtagatgaagaagaa

SEQ ID NO: 224785 - DNA, 25 bp, Probe Sequence
gaaacatgatccattgaagcaaaaa

SEQ ID NO: 224786 - DNA, 25 bp, Probe Sequence
gaaacatacagcacaactgcaaatt

SEQ ID NO: 224787 - DNA, 25 bp, Probe Sequence
gaaactaccttcaactccatcatga

SEQ ID NO: 224788 - DNA, 25 bp, Probe Sequence
gaaacatcacacatctaagattcaa

SEQ ID NO: 224789 - DNA, 25 bp, Probe Sequence
gaaacatcacacatgtaagattcaa

SEQ ID NO: 224790 - DNA, 25 bp, Probe Sequence
gaaacatgccacaggaaactacatc

SEQ ID NO: 224791 - DNA, 25 bp, Probe Sequence
gacaagatgcggactggaaaccttc

SEQ ID NO: 224792 - DNA, 25 bp, Probe Sequence
gacaaggtggagggtctcactttcc

SEQ ID NO: 224793 - DNA, 25 bp, Probe Sequence
gaaaggggggtgataccttgcagta

SEQ ID NO: 224794 - DNA, 25 bp, Probe Sequence
gaaagcgtgtggttttacatttgag

SEQ ID NO: 224795 - DNA, 25 bp, Probe Sequence
gaaagcctggtgttacccatatatg

SEQ ID NO: 224796 - DNA, 25 bp, Probe Sequence
gaaagcctggtgttacccatatatg

SEQ ID NO: 224797 - DNA, 25 bp, Probe Sequence
gaaagacagcctgtacaccatgtct

SEQ ID NO: 224798 - DNA, 25 bp, Probe Sequence
gaaacaggactgctcaaatgatcct

SEQ ID NO: 224799 - DNA, 25 bp, Probe Sequence
gaaacagaagctcaccagaacaagc

SEQ ID NO: 224800 - DNA, 25 bp, Probe Sequence
gaaacataaatccgcaagtcaccac

SEQ ID NO: 224801 - DNA, 25 bp, Probe Sequence
gaaagaaaagctcaagccactgatc

SEQ ID NO: 224802 - DNA, 25 bp, Probe Sequence
gaaaggagattccaacctacttcag

SEQ ID NO: 224803 - DNA, 25 bp, Probe Sequence
gaaagtgagagtgaacctaaagggt

SEQ ID NO: 224804 - DNA, 25 bp, Probe Sequence
gaaacgcaggtcatacagcttaatg

SEQ ID NO: 224805 - DNA, 25 bp, Probe Sequence
gaaactactgtttaagattaatgaa

SEQ ID NO: 224806 - DNA, 25 bp, Probe Sequence
gaaactccatgttaaaatatccatc

SEQ ID NO: 224807 - DNA, 25 bp, Probe Sequence
gaaacattcggatcaaatattccaa

SEQ ID NO: 224808 - DNA, 25 bp, Probe Sequence
gaaacttgctaatagattatatgga

SEQ ID NO: 224809 - DNA, 25 bp, Probe Sequence
gaaactcactaacagagtaaggagc

SEQ ID NO: 224810 - DNA, 25 bp, Probe Sequence
gaaagttcggaccaggtgagggagc

SEQ ID NO: 224811 - DNA, 25 bp, Probe Sequence
gaaagtccgtgacagggaccgatgt

SEQ ID NO: 224812 - DNA, 25 bp, Probe Sequence
gaaattcttcggcagggacgattta

SEQ ID NO: 224813 - DNA, 25 bp, Probe Sequence
gaaactctttgcagagctggaaatt

SEQ ID NO: 224814 - DNA, 25 bp, Probe Sequence
gaaacctggtgtctggcatgaaatt

SEQ ID NO: 224815 - DNA, 25 bp, Probe Sequence
gaaacctggtgtctggcatgaaatt

SEQ ID NO: 224816 - DNA, 25 bp, Probe Sequence
gaaacctagaatctaatgcagaaga

SEQ ID NO: 224817 - DNA, 25 bp, Probe Sequence
gaaacctagaactcagaggattgct

SEQ ID NO: 224818 - DNA, 25 bp, Probe Sequence
gaaacctaactgcaatgtggatgtt

SEQ ID NO: 224819 - DNA, 25 bp, Probe Sequence
gaaacctaactgcaatgtggatgtt

SEQ ID NO: 224820 - DNA, 25 bp, Probe Sequence
gaaacagtgacactgcgccagtcgt

SEQ ID NO: 224821 - DNA, 25 bp, Probe Sequence
gaaacattgacattgcatccatcta

SEQ ID NO: 224822 - DNA, 25 bp, Probe Sequence
gaaacattgacattgcatccatcta

SEQ ID NO: 224823 - DNA, 25 bp, Probe Sequence
gaaactgttatgtatctctctacct

SEQ ID NO: 224824 - DNA, 25 bp, Probe Sequence
gaaagtgtcaccaatccctaacttc

SEQ ID NO: 224825 - DNA, 25 bp, Probe Sequence
gaaactgccccactggcagtacatc

SEQ ID NO: 224826 - DNA, 25 bp, Probe Sequence
gaaactccccattgtcactgagaac

SEQ ID NO: 224827 - DNA, 25 bp, Probe Sequence
gaaactttcacaatgtccggagccc

SEQ ID NO: 224828 - DNA, 25 bp, Probe Sequence
gaaagctagtatcatgccacggcac

SEQ ID NO: 224829 - DNA, 25 bp, Probe Sequence
gaaactcggctttgcaacaggcatt

SEQ ID NO: 224830 - DNA, 25 bp, Probe Sequence
gaaactgcgtttgcagagccacatt

SEQ ID NO: 224831 - DNA, 25 bp, Probe Sequence
gaaactgttttcagatccaagtgct

SEQ ID NO: 224832 - DNA, 25 bp, Probe Sequence
gaaactggcgcttaaaccaaatcgc

SEQ ID NO: 224833 - DNA, 25 bp, Probe Sequence
gaaagggccttacttcaatacaagc

SEQ ID NO: 224834 - DNA, 25 bp, Probe Sequence
gaaattgccggtatttatagcacgt

SEQ ID NO: 224835 - DNA, 25 bp, Probe Sequence
gaaattccttgtatttgtcaaatgt

SEQ ID NO: 224836 - DNA, 25 bp, Probe Sequence
gaaacctctttaaatcttcagaatg

SEQ ID NO: 224837 - DNA, 25 bp, Probe Sequence
gaaacctgtttaattctagatatag

SEQ ID NO: 224838 - DNA, 25 bp, Probe Sequence
gaaacctctgttttcttagatttgg

SEQ ID NO: 224839 - DNA, 25 bp, Probe Sequence
gaaacctctttggtgctgtttcttg

SEQ ID NO: 224840 - DNA, 25 bp, Probe Sequence
gaaagcctttatcagtcatttattg

SEQ ID NO: 224841 - DNA, 25 bp, Probe Sequence
gaaaccaactaaatgccttctatag

SEQ ID NO: 224842 - DNA, 25 bp, Probe Sequence
gaaacccagggaacctctctgaagt

SEQ ID NO: 224843 - DNA, 25 bp, Probe Sequence
gaaacccagggaacctctctgaagt

SEQ ID NO: 224844 - DNA, 25 bp, Probe Sequence
gaaactccagggcactgcatctggc

SEQ ID NO: 224845 - DNA, 25 bp, Probe Sequence
gaaaccctgagtcacgcagggcaaa

SEQ ID NO: 224846 - DNA, 25 bp, Probe Sequence
gatgaaccactagaaccagggcctt

SEQ ID NO: 224847 - DNA, 25 bp, Probe Sequence
gaaaccagctatgaccattaggcct

SEQ ID NO: 224848 - DNA, 25 bp, Probe Sequence
gaaacccttaatcaatcagtcaata

SEQ ID NO: 224849 - DNA, 25 bp, Probe Sequence
gaaacccttatcttgcaaagtgaat

SEQ ID NO: 224850 - DNA, 25 bp, Probe Sequence
gaaacatctttcatagccacattaa

SEQ ID NO: 224851 - DNA, 25 bp, Probe Sequence
gaaacattgattatgtgctcctcaa

SEQ ID NO: 224852 - DNA, 25 bp, Probe Sequence
gaaacttgcccagatgttctcagat

SEQ ID NO: 224853 - DNA, 25 bp, Probe Sequence
gaaaccattccaggtttgccaaaca

SEQ ID NO: 224854 - DNA, 25 bp, Probe Sequence
gaaacgcttcaaggtgctcatgacc

SEQ ID NO: 224855 - DNA, 25 bp, Probe Sequence
gaaacagtggcatggttcgtgccaa

SEQ ID NO: 224856 - DNA, 25 bp, Probe Sequence
gaaacagtgagagctgtgtggtgca

SEQ ID NO: 224857 - DNA, 25 bp, Probe Sequence
gaaaccatcatagctctgtgtagca

SEQ ID NO: 224858 - DNA, 25 bp, Probe Sequence
gaaacagtgctgaagcctttaaatg

SEQ ID NO: 224859 - DNA, 25 bp, Probe Sequence
gaaactctcatcaggcttctgcaaa

SEQ ID NO: 224860 - DNA, 25 bp, Probe Sequence
gaaagctcagctggtggtgattgca

SEQ ID NO: 224861 - DNA, 25 bp, Probe Sequence
gaaagctcagctggtggtgattgca

SEQ ID NO: 224862 - DNA, 25 bp, Probe Sequence
gaaacatcatctgtaggttcattaa

SEQ ID NO: 224863 - DNA, 25 bp, Probe Sequence
gaaacatactgcaataggctctctg

SEQ ID NO: 224864 - DNA, 25 bp, Probe Sequence
gaaacatcactggggtcacttggga

SEQ ID NO: 224865 - DNA, 25 bp, Probe Sequence
gaaacatcaagggactcctgtgtca

SEQ ID NO: 224866 - DNA, 25 bp, Probe Sequence
gaaacagacacgtacattctcttca

SEQ ID NO: 224867 - DNA, 25 bp, Probe Sequence
gaaagaacaatggccgtccttcaga

SEQ ID NO: 224868 - DNA, 25 bp, Probe Sequence
gaaagacctaacagagctcttaata

SEQ ID NO: 224869 - DNA, 25 bp, Probe Sequence
gaaaccctatgtatgcaccattaat

SEQ ID NO: 224870 - DNA, 25 bp, Probe Sequence
gaaacagtcttggtatgagactctt

SEQ ID NO: 224871 - DNA, 25 bp, Probe Sequence
gaaacagattattattgaacttatg

SEQ ID NO: 224872 - DNA, 25 bp, Probe Sequence
gaaacagattattattgaacttatg

SEQ ID NO: 224873 - DNA, 25 bp, Probe Sequence
gaaacagactgttgcttgattttag

SEQ ID NO: 224874 - DNA, 25 bp, Probe Sequence
gaaacatgcacctgtatgttcactg

SEQ ID NO: 224875 - DNA, 25 bp, Probe Sequence
gaaacatcatcagagtggctgtcct

SEQ ID NO: 224876 - DNA, 25 bp, Probe Sequence
gaaacatgctctggtgatggctgtg

SEQ ID NO: 224877 - DNA, 25 bp, Probe Sequence
gaaacatgctctggtgatggctgtg

SEQ ID NO: 224878 - DNA, 25 bp, Probe Sequence
gaaacatgctctggtgatggctgtg

SEQ ID NO: 224879 - DNA, 25 bp, Probe Sequence
gaaacatggcggtaggctgggacca

SEQ ID NO: 224880 - DNA, 25 bp, Probe Sequence
gaaacaggggcaatggtgcgcctgc

SEQ ID NO: 224881 - DNA, 25 bp, Probe Sequence
gaaactggggcttatgctgctgcct

SEQ ID NO: 224882 - DNA, 25 bp, Probe Sequence
gaaacagggtcttgatttcgcttag

SEQ ID NO: 224883 - DNA, 25 bp, Probe Sequence
gaaacgttgctttgtattcttctag

SEQ ID NO: 224884 - DNA, 25 bp, Probe Sequence
gaaacttagcttttgatgtctccaa

SEQ ID NO: 224885 - DNA, 25 bp, Probe Sequence
gaaaccttggccaggttccatgacc

SEQ ID NO: 224886 - DNA, 25 bp, Probe Sequence
gaaaccttggccgaattgtcacaat

SEQ ID NO: 224887 - DNA, 25 bp, Probe Sequence
gaaaccattctcttgaattgtcatg

SEQ ID NO: 224888 - DNA, 25 bp, Probe Sequence
gaaacatttatctcaattatcagtt

SEQ ID NO: 224889 - DNA, 25 bp, Probe Sequence
gaaacgtttcaatgatggatctgat

SEQ ID NO: 224890 - DNA, 25 bp, Probe Sequence
gaaacagtgctttccgatgagactc

SEQ ID NO: 224891 - DNA, 25 bp, Probe Sequence
gacaaagtcacttgccatgggtcac

SEQ ID NO: 224892 - DNA, 25 bp, Probe Sequence
gacaagagcgccgagaaggggcccc

SEQ ID NO: 224893 - DNA, 25 bp, Probe Sequence
gaaagcagtccccaaggaggatatc

SEQ ID NO: 224894 - DNA, 25 bp, Probe Sequence
gaaagaatcccacagggcactatta

SEQ ID NO: 224895 - DNA, 25 bp, Probe Sequence
gaaacagtcctacagagtaatatat

SEQ ID NO: 224896 - DNA, 25 bp, Probe Sequence
gaaacgcttcaatcagagtgcaacc

SEQ ID NO: 224897 - DNA, 25 bp, Probe Sequence
gaaacatggcaagaagcactgcaac

SEQ ID NO: 224898 - DNA, 25 bp, Probe Sequence
gaaactggacagcacagacttcacc

SEQ ID NO: 224899 - DNA, 25 bp, Probe Sequence
gaaactctgaggcagccacttatct

SEQ ID NO: 224900 - DNA, 25 bp, Probe Sequence
gaaacagggagccaacaatgtatgt

SEQ ID NO: 224901 - DNA, 25 bp, Probe Sequence
gaaagcagaggggattttggatgtc

SEQ ID NO: 224902 - DNA, 25 bp, Probe Sequence
gaaaggacagggttctaggagctcc

SEQ ID NO: 224903 - DNA, 25 bp, Probe Sequence
gaaaggagcgcctactaaggacgcc

SEQ ID NO: 224904 - DNA, 25 bp, Probe Sequence
gaaaggggcctcggaagtgatctca

SEQ ID NO: 224905 - DNA, 25 bp, Probe Sequence
gaaatgggtccctgggtgacatgtc

SEQ ID NO: 224906 - DNA, 25 bp, Probe Sequence
gaaagaggtcccttagaagaaatgc

SEQ ID NO: 224907 - DNA, 25 bp, Probe Sequence
gacagggtgttgcagtaacaaaatc

SEQ ID NO: 224908 - DNA, 25 bp, Probe Sequence
gactacagcggtcagtataaaatac

SEQ ID NO: 224909 - DNA, 25 bp, Probe Sequence
gactaagctggttccttgtgtcaaa

SEQ ID NO: 224910 - DNA, 25 bp, Probe Sequence
gataagaaggacttcctgggaaaat

SEQ ID NO: 224911 - DNA, 25 bp, Probe Sequence
gaaagggaaactggctgaggggata

SEQ ID NO: 224912 - DNA, 25 bp, Probe Sequence
gaaacaggaaagcccaaaggcgatg

SEQ ID NO: 224913 - DNA, 25 bp, Probe Sequence
gaaactgtagtaatcccaaggaagc

SEQ ID NO: 224914 - DNA, 25 bp, Probe Sequence
gaaactgcatatgatgctgccaaag

SEQ ID NO: 224915 - DNA, 25 bp, Probe Sequence
gaaacatgacatactgtgctctgag

SEQ ID NO: 224916 - DNA, 25 bp, Probe Sequence
gaaacatgcagcttctgtctctagc

SEQ ID NO: 224917 - DNA, 25 bp, Probe Sequence
gaaacatcctatcatctgtaggctc

SEQ ID NO: 224918 - DNA, 25 bp, Probe Sequence
gaaagccaccagattggaggtcacc

SEQ ID NO: 224919 - DNA, 25 bp, Probe Sequence
gaaaccgccagggcgaggtgcgacc

SEQ ID NO: 224920 - DNA, 25 bp, Probe Sequence
gaaagccgccaggaaaagcgctccc

SEQ ID NO: 224921 - DNA, 25 bp, Probe Sequence
gaaagccctggggatgaagctgcca

SEQ ID NO: 224922 - DNA, 25 bp, Probe Sequence
gaaagagcgggagctgcgactgctc

SEQ ID NO: 224923 - DNA, 25 bp, Probe Sequence
gaaagatggggctgttgagtctatc

SEQ ID NO: 224924 - DNA, 25 bp, Probe Sequence
gaaagtggtggctggtgtggctaat

SEQ ID NO: 224925 - DNA, 25 bp, Probe Sequence
gaaagtggtggctggtgtggctaat

SEQ ID NO: 224926 - DNA, 25 bp, Probe Sequence
gaaattgaggccctgcagttagttt

SEQ ID NO: 224927 - DNA, 25 bp, Probe Sequence
gacagagtgaccctcacgtaagatt

SEQ ID NO: 224928 - DNA, 25 bp, Probe Sequence
gataaggcccagcccttaggagtta

SEQ ID NO: 224929 - DNA, 25 bp, Probe Sequence
gaaagaccaagactgctctagtttg

SEQ ID NO: 224930 - DNA, 25 bp, Probe Sequence
gaaaccataagactcaggcagttct

SEQ ID NO: 224931 - DNA, 25 bp, Probe Sequence
gaaaccatgtaataaagcatctctg

SEQ ID NO: 224932 - DNA, 25 bp, Probe Sequence
gaaaccatctcaataaacacatttt

SEQ ID NO: 224933 - DNA, 25 bp, Probe Sequence
gaaacgcactgcttcaaagactgga

SEQ ID NO: 224934 - DNA, 25 bp, Probe Sequence
gaaacctgcagctttatcggagtga

SEQ ID NO: 224935 - DNA, 25 bp, Probe Sequence
gaaagctcatgctgctatacgagag

SEQ ID NO: 224936 - DNA, 25 bp, Probe Sequence
gaaagctcatgctgctatacgagag

SEQ ID NO: 224937 - DNA, 25 bp, Probe Sequence
gaaacttcatcacacactgagaggc

SEQ ID NO: 224938 - DNA, 25 bp, Probe Sequence
gaaactgtttgatgactggatggca

SEQ ID NO: 224939 - DNA, 25 bp, Probe Sequence
gaaagctgtttaagaaggccatgac

SEQ ID NO: 224940 - DNA, 25 bp, Probe Sequence
gaaagcgtttcaaagcgtcagctgt

SEQ ID NO: 224941 - DNA, 25 bp, Probe Sequence
gaaagggtatgagagagcacgtgtc

SEQ ID NO: 224942 - DNA, 25 bp, Probe Sequence
gaaaccatttggaaactcggcagca

SEQ ID NO: 224943 - DNA, 25 bp, Probe Sequence
gaaaccatcctggctaacacggtga

SEQ ID NO: 224944 - DNA, 25 bp, Probe Sequence
gaaaccttccaccataagcgatgtg

SEQ ID NO: 224945 - DNA, 25 bp, Probe Sequence
gaaatccttcctgcgaggtcagggc

SEQ ID NO: 224946 - DNA, 25 bp, Probe Sequence
gaaattccatttgtaggtagtgaga

SEQ ID NO: 224947 - DNA, 25 bp, Probe Sequence
gaaatccaacttgagctggctggtg

SEQ ID NO: 224948 - DNA, 25 bp, Probe Sequence
gaaagacacacacaactggggcaga

SEQ ID NO: 224949 - DNA, 25 bp, Probe Sequence
gaaagacaagtttggggagtcagaa

SEQ ID NO: 224950 - DNA, 25 bp, Probe Sequence
gaaagaaactatccgagggaagaat

SEQ ID NO: 224951 - DNA, 25 bp, Probe Sequence
gaaaccagactgtgcggggagaatg

SEQ ID NO: 224952 - DNA, 25 bp, Probe Sequence
gaaacgcgaatgaggcgcccagacg

SEQ ID NO: 224953 - DNA, 25 bp, Probe Sequence
gaaacgcgtcagaatcgcctggaga

SEQ ID NO: 224954 - DNA, 25 bp, Probe Sequence
gaaaccagaacttcgcctggagaac

SEQ ID NO: 224955 - DNA, 25 bp, Probe Sequence
gaaactctgaacacgccagaatgct

SEQ ID NO: 224956 - DNA, 25 bp, Probe Sequence
gaaactcatggaatatcctgcagaa

SEQ ID NO: 224957 - DNA, 25 bp, Probe Sequence
gaaactgcagagactcaccctgatt

SEQ ID NO: 224958 - DNA, 25 bp, Probe Sequence
gaaacgcagcacaagctgctggcgg

SEQ ID NO: 224959 - DNA, 25 bp, Probe Sequence
gaaactgctcaatgctgtagagctc

SEQ ID NO: 224960 - DNA, 25 bp, Probe Sequence
gaaactgattattctgaggatgata

SEQ ID NO: 224961 - DNA, 25 bp, Probe Sequence
gaaagccacctaatcagttatgagt

SEQ ID NO: 224962 - DNA, 25 bp, Probe Sequence
gaaagccacaaagagtagctgagtt

SEQ ID NO: 224963 - DNA, 25 bp, Probe Sequence
gaaacccaagagagccaatgatgga

SEQ ID NO: 224964 - DNA, 25 bp, Probe Sequence
gaaactcccacaaaccaatgagaaa

SEQ ID NO: 224965 - DNA, 25 bp, Probe Sequence
gaaaccccatcttactagatacaaa

SEQ ID NO: 224966 - DNA, 25 bp, Probe Sequence
gaaaccccatctccaaaaatataat

SEQ ID NO: 224967 - DNA, 25 bp, Probe Sequence
gaaaccccatctgtactaaacataa

SEQ ID NO: 224968 - DNA, 25 bp, Probe Sequence
gaaaccccatctgtactaaacataa

SEQ ID NO: 224969 - DNA, 25 bp, Probe Sequence
gaaaccccatctctactaagaatac

SEQ ID NO: 224970 - DNA, 25 bp, Probe Sequence
gaaaccccatctctactaaacatac

SEQ ID NO: 224971 - DNA, 25 bp, Probe Sequence
gaaacctgtattcatacctaaatat

SEQ ID NO: 224972 - DNA, 25 bp, Probe Sequence
gaaacgtggattgatggccccaaag

SEQ ID NO: 224973 - DNA, 25 bp, Probe Sequence
gaaacctcgatatcgagcgcccaac

SEQ ID NO: 224974 - DNA, 25 bp, Probe Sequence
gaaaccgctgataaccaggacaaaa

SEQ ID NO: 224975 - DNA, 25 bp, Probe Sequence
gaaaccagcattaaacaagacagaa

SEQ ID NO: 224976 - DNA, 25 bp, Probe Sequence
gaaaccactcatgtccacaggaata

SEQ ID NO: 224977 - DNA, 25 bp, Probe Sequence
gaaacttctcaggaccctggaagat

SEQ ID NO: 224978 - DNA, 25 bp, Probe Sequence
gaaatctttcagaactcaaagggca

SEQ ID NO: 224979 - DNA, 25 bp, Probe Sequence
gaaacctccacattcttaggcggag

SEQ ID NO: 224980 - DNA, 25 bp, Probe Sequence
gaaagggcaccatcttcatggggag

SEQ ID NO: 224981 - DNA, 25 bp, Probe Sequence
gaaattggaacatcgatcagttaaa

SEQ ID NO: 224982 - DNA, 25 bp, Probe Sequence
gaaatatggttcactgccaaaaaaa

SEQ ID NO: 224983 - DNA, 25 bp, Probe Sequence
gacaaagacttccaatgaaaatgaa

SEQ ID NO: 224984 - DNA, 25 bp, Probe Sequence
gaaatagcctccctttagaatgtca

SEQ ID NO: 224985 - DNA, 25 bp, Probe Sequence
gaaatcccacacctgtacagaactg

SEQ ID NO: 224986 - DNA, 25 bp, Probe Sequence
gaaactccaacattttggaatcttc

SEQ ID NO: 224987 - DNA, 25 bp, Probe Sequence
gaaatctacaacgaccggaggtata

SEQ ID NO: 224988 - DNA, 25 bp, Probe Sequence
gaaacgaccaagactctgtgacgtt

SEQ ID NO: 224989 - DNA, 25 bp, Probe Sequence
gaaagtgaccatatcaccatgattg

SEQ ID NO: 224990 - DNA, 25 bp, Probe Sequence
gaaactgtatctgccactcatttcc

SEQ ID NO: 224991 - DNA, 25 bp, Probe Sequence
gaaactgaagctgttctcaggatca

SEQ ID NO: 224992 - DNA, 25 bp, Probe Sequence
gaaactagcagtgtcgtgagtggca

SEQ ID NO: 224993 - DNA, 25 bp, Probe Sequence
gactattacactgcctggaggatag

SEQ ID NO: 224994 - DNA, 25 bp, Probe Sequence
gactattaacccctgcaaagtttct

SEQ ID NO: 224995 - DNA, 25 bp, Probe Sequence
gacttaagacccgttcaaattatct

SEQ ID NO: 224996 - DNA, 25 bp, Probe Sequence
gacaacaaggccctttaacttgtct

SEQ ID NO: 224997 - DNA, 25 bp, Probe Sequence
gaaatcaaggcccttcaaaggtaca

SEQ ID NO: 224998 - DNA, 25 bp, Probe Sequence
gaaagcaaggcccttcagggaagac

SEQ ID NO: 224999 - DNA, 25 bp, Probe Sequence
gaaagacacctctgtctgggaagag

SEQ ID NO: 225000 - DNA, 25 bp, Probe Sequence
gaaagaacttgcatgttggtgaagg

SEQ ID NO: 225001 - DNA, 25 bp, Probe Sequence
gaaagccatcttattcttgtaaaat

SEQ ID NO: 225002 - DNA, 25 bp, Probe Sequence
gactagaatcgtgtcctatttaact

SEQ ID NO: 225003 - DNA, 25 bp, Probe Sequence
gaaagatacgccatcctttcaaacc

SEQ ID NO: 225004 - DNA, 25 bp, Probe Sequence
gaaagatacgccatcctttcaaacc

SEQ ID NO: 225005 - DNA, 25 bp, Probe Sequence
gaaagatacgccatcctttcaaacc

SEQ ID NO: 225006 - DNA, 25 bp, Probe Sequence
gaaagtaagcctttttgtcacctca

SEQ ID NO: 225007 - DNA, 25 bp, Probe Sequence
gaaaggaacacggttctgagcccaa

SEQ ID NO: 225008 - DNA, 25 bp, Probe Sequence
gaaagagaccatggtgaccagcacc

SEQ ID NO: 225009 - DNA, 25 bp, Probe Sequence
gaaagcagaaaggtgacgattctca

SEQ ID NO: 225010 - DNA, 25 bp, Probe Sequence
gacaccaggaaggtgagatcttcga

SEQ ID NO: 225011 - DNA, 25 bp, Probe Sequence
gacctggagaagggacctacggacg

SEQ ID NO: 225012 - DNA, 25 bp, Probe Sequence
gatcttggacagcgtgggtatcgag

SEQ ID NO: 225013 - DNA, 25 bp, Probe Sequence
gatatcgaatccctgccgttagcga

SEQ ID NO: 225014 - DNA, 25 bp, Probe Sequence
gaaagcacttcactacgcttagcag

SEQ ID NO: 225015 - DNA, 25 bp, Probe Sequence
gaaagcacagtaatcactggtgtcg

SEQ ID NO: 225016 - DNA, 25 bp, Probe Sequence
gaaagcagcagctaacagctctgtg

SEQ ID NO: 225017 - DNA, 25 bp, Probe Sequence
gaaagcacagctaacacttttagga

SEQ ID NO: 225018 - DNA, 25 bp, Probe Sequence
gaaagaaggaatatctcattgcagg

SEQ ID NO: 225019 - DNA, 25 bp, Probe Sequence
gacaagactggaagggcacctcggg

SEQ ID NO: 225020 - DNA, 25 bp, Probe Sequence
gacaaactgtgatgtgggtacaaag

SEQ ID NO: 225021 - DNA, 25 bp, Probe Sequence
gaaagaatggtagtgtggttgctca

SEQ ID NO: 225022 - DNA, 25 bp, Probe Sequence
gaaagaatggaaatgtcgactatat

SEQ ID NO: 225023 - DNA, 25 bp, Probe Sequence
gaaagctatagccagattggcacta

SEQ ID NO: 225024 - DNA, 25 bp, Probe Sequence
gaaagattcgccaatctggagctaa

SEQ ID NO: 225025 - DNA, 25 bp, Probe Sequence
gaaagaacacaaactggatggcaaa

SEQ ID NO: 225026 - DNA, 25 bp, Probe Sequence
gacaaaataaagtgtgtgtgcaggg

SEQ ID NO: 225027 - DNA, 25 bp, Probe Sequence
gaaataaagaacagcttgacaggaa

SEQ ID NO: 225028 - DNA, 25 bp, Probe Sequence
gaaactgaagagacttctctgacag

SEQ ID NO: 225029 - DNA, 25 bp, Probe Sequence
gaaactgatgaacgctaccgacatt

SEQ ID NO: 225030 - DNA, 25 bp, Probe Sequence
gaaactggagaaaaccacaccatct

SEQ ID NO: 225031 - DNA, 25 bp, Probe Sequence
gaaactgtgggcctatctaaccatc

SEQ ID NO: 225032 - DNA, 25 bp, Probe Sequence
gaaactgtggattctttttctctcg

SEQ ID NO: 225033 - DNA, 25 bp, Probe Sequence
gaaactgtggattctttttctctcg

SEQ ID NO: 225034 - DNA, 25 bp, Probe Sequence
gaaactgtgcagatcactgaatttt

SEQ ID NO: 225035 - DNA, 25 bp, Probe Sequence
gaaagcaggcgaatactccctctat

SEQ ID NO: 225036 - DNA, 25 bp, Probe Sequence
gaaactggtggcaacatgacctgct

SEQ ID NO: 225037 - DNA, 25 bp, Probe Sequence
gaaactggatgccacagtgattcat

SEQ ID NO: 225038 - DNA, 25 bp, Probe Sequence
gaaactggagtaatgaagctgctga

SEQ ID NO: 225039 - DNA, 25 bp, Probe Sequence
gaaagcgaggagttgaatggtgcat

SEQ ID NO: 225040 - DNA, 25 bp, Probe Sequence
gaaactgacatggagagacggtgca

SEQ ID NO: 225041 - DNA, 25 bp, Probe Sequence
gaaactgcagatggaagctccccac

SEQ ID NO: 225042 - DNA, 25 bp, Probe Sequence
gaaagtgcagatgacaggccaggcc

SEQ ID NO: 225043 - DNA, 25 bp, Probe Sequence
gaaagagttaatccacacagagcca

SEQ ID NO: 225044 - DNA, 25 bp, Probe Sequence
gaaagccttaaaccaaagctcatcg

SEQ ID NO: 225045 - DNA, 25 bp, Probe Sequence
gaaactccaagggccaaagctcaaa

SEQ ID NO: 225046 - DNA, 25 bp, Probe Sequence
gaaagttcaggggaaaatgtgatga

SEQ ID NO: 225047 - DNA, 25 bp, Probe Sequence
gaaatttctaggggaatctctgtga

SEQ ID NO: 225048 - DNA, 25 bp, Probe Sequence
gaaagctgtctatgttccattttgg

SEQ ID NO: 225049 - DNA, 25 bp, Probe Sequence
gaaactgcgtaatttcattttagca

SEQ ID NO: 225050 - DNA, 25 bp, Probe Sequence
gaaactggtaccatctgtgctttca

SEQ ID NO: 225051 - DNA, 25 bp, Probe Sequence
gaaactgtaactgctatgtctttag

SEQ ID NO: 225052 - DNA, 25 bp, Probe Sequence
gaaacgatatacactatattatgta

SEQ ID NO: 225053 - DNA, 25 bp, Probe Sequence
gaaaggtacagcagaagatcttgta

SEQ ID NO: 225054 - DNA, 25 bp, Probe Sequence
gaaagtcaaccaataaagctgccta

SEQ ID NO: 225055 - DNA, 25 bp, Probe Sequence
gaaagccactctatcaaagccatcc

SEQ ID NO: 225056 - DNA, 25 bp, Probe Sequence
gaaagatttcgaacaatcacctcca

SEQ ID NO: 225057 - DNA, 25 bp, Probe Sequence
gaaagctagctcggaaaatcctaca

SEQ ID NO: 225058 - DNA, 25 bp, Probe Sequence
gaaaggaccagttcgaatgcctacc

SEQ ID NO: 225059 - DNA, 25 bp, Probe Sequence
gaaaggtagagaatcagttcctact

SEQ ID NO: 225060 - DNA, 25 bp, Probe Sequence
gaaagttaaggtcgatgaatcacac

SEQ ID NO: 225061 - DNA, 25 bp, Probe Sequence
gaaagccttaggtatcaattccaaa

SEQ ID NO: 225062 - DNA, 25 bp, Probe Sequence
gaaaccttttgtagcaatatcaaga

SEQ ID NO: 225063 - DNA, 25 bp, Probe Sequence
gaaagccacttccttgaatggagga

SEQ ID NO: 225064 - DNA, 25 bp, Probe Sequence
gaaagactctgcctgcttaattgtg

SEQ ID NO: 225065 - DNA, 25 bp, Probe Sequence
gaaagcagttggactagaagtgtat

SEQ ID NO: 225066 - DNA, 25 bp, Probe Sequence
gaaagcgtcatgatattgctcagtt

SEQ ID NO: 225067 - DNA, 25 bp, Probe Sequence
gaaactgtatgaatgtctgctgggc

SEQ ID NO: 225068 - DNA, 25 bp, Probe Sequence
gaaagtctgagaaggcctgagccgt

SEQ ID NO: 225069 - DNA, 25 bp, Probe Sequence
gaaatgcttagcaaacagcggcacg

SEQ ID NO: 225070 - DNA, 25 bp, Probe Sequence
gaaagatctgcaaatacctggctct

SEQ ID NO: 225071 - DNA, 25 bp, Probe Sequence
gaaagtccaacatcctggaacgcaa

SEQ ID NO: 225072 - DNA, 25 bp, Probe Sequence
gaaacccattcatcgtaaacaaaag

SEQ ID NO: 225073 - DNA, 25 bp, Probe Sequence
gaaacctatccaattgtaaaaacag

SEQ ID NO: 225074 - DNA, 25 bp, Probe Sequence
gaaaccataccaactgaaagacaaa

SEQ ID NO: 225075 - DNA, 25 bp, Probe Sequence
gaaagtcaaccatcattacaaaatc

SEQ ID NO: 225076 - DNA, 25 bp, Probe Sequence
gaaagacaaccagtgcacacccaaa

SEQ ID NO: 225077 - DNA, 25 bp, Probe Sequence
gaaagaacacagagtacccataata

SEQ ID NO: 225078 - DNA, 25 bp, Probe Sequence
gaaaccagatcgagctacctaagaa

SEQ ID NO: 225079 - DNA, 25 bp, Probe Sequence
gaaaccatgacattggcttccatta

SEQ ID NO: 225080 - DNA, 25 bp, Probe Sequence
gaaagctcagcatatgcagaagttt

SEQ ID NO: 225081 - DNA, 25 bp, Probe Sequence
gaaagttcagatagcgaatcttctt

SEQ ID NO: 225082 - DNA, 25 bp, Probe Sequence
gaaagtctgagaagcaaagtaactg

SEQ ID NO: 225083 - DNA, 25 bp, Probe Sequence
gaaagttataggttaggcatacatg

SEQ ID NO: 225084 - DNA, 25 bp, Probe Sequence
gaaagagacttttatagagctacat

SEQ ID NO: 225085 - DNA, 25 bp, Probe Sequence
gaaatagacttacacactgtacatt

SEQ ID NO: 225086 - DNA, 25 bp, Probe Sequence
gaaatacagttcggcccttacttat

SEQ ID NO: 225087 - DNA, 25 bp, Probe Sequence
gaaaccagttggctctagctacttg

SEQ ID NO: 225088 - DNA, 25 bp, Probe Sequence
gaaaccaggtgaggtgcggtatagt

SEQ ID NO: 225089 - DNA, 25 bp, Probe Sequence
gaaacgcaggttggatggtgcatca

SEQ ID NO: 225090 - DNA, 25 bp, Probe Sequence
gaaacgggtgctggcaagcatgtgc

SEQ ID NO: 225091 - DNA, 25 bp, Probe Sequence
gaaacggctggatgatagcttgcta

SEQ ID NO: 225092 - DNA, 25 bp, Probe Sequence
gacaccccggtggaagcatttagag

SEQ ID NO: 225093 - DNA, 25 bp, Probe Sequence
gaaacccgcagtgttgcatttagaa

SEQ ID NO: 225094 - DNA, 25 bp, Probe Sequence
gaaagcaccggaaaagtttagcaag

SEQ ID NO: 225095 - DNA, 25 bp, Probe Sequence
gaaagcccagctaacacttttagga

SEQ ID NO: 225096 - DNA, 25 bp, Probe Sequence
gaaagccacacttattcttttcagt

SEQ ID NO: 225097 - DNA, 25 bp, Probe Sequence
gaaaccacagaaggtcatattttgt

SEQ ID NO: 225098 - DNA, 25 bp, Probe Sequence
gaaaccatctgcaggtacaacttgc

SEQ ID NO: 225099 - DNA, 25 bp, Probe Sequence
gaaagcagtctcaggttcaacttgc

SEQ ID NO: 225100 - DNA, 25 bp, Probe Sequence
gaaatgcctgctgggccttaagctt

SEQ ID NO: 225101 - DNA, 25 bp, Probe Sequence
gaaacctgcagggactccatgctgc

SEQ ID NO: 225102 - DNA, 25 bp, Probe Sequence
gaaacctgggcaggctcccaggctc

SEQ ID NO: 225103 - DNA, 25 bp, Probe Sequence
gaaacctatgggctgcccaacacac

SEQ ID NO: 225104 - DNA, 25 bp, Probe Sequence
gaaacccagatgttggtccaaacac

SEQ ID NO: 225105 - DNA, 25 bp, Probe Sequence
gaaacccggaggagcagcaagagat

SEQ ID NO: 225106 - DNA, 25 bp, Probe Sequence
gaaagcccggaggaagcagtgggat

SEQ ID NO: 225107 - DNA, 25 bp, Probe Sequence
gaaacccatacacaaagttgagtgg

SEQ ID NO: 225108 - DNA, 25 bp, Probe Sequence
gaaagtgctttccggaagttagatg

SEQ ID NO: 225109 - DNA, 25 bp, Probe Sequence
gaaacgttttcatccatgcttagca

SEQ ID NO: 225110 - DNA, 25 bp, Probe Sequence
gaaatccattgcttataccttaacc

SEQ ID NO: 225111 - DNA, 25 bp, Probe Sequence
gaaaccattgctaatgtgcctatac

SEQ ID NO: 225112 - DNA, 25 bp, Probe Sequence
gaaaccattgctaatgtgcctatac

SEQ ID NO: 225113 - DNA, 25 bp, Probe Sequence
gaaaccactgcggttcattcataca

SEQ ID NO: 225114 - DNA, 25 bp, Probe Sequence
gaaaccaatggatttatccaccgtg

SEQ ID NO: 225115 - DNA, 25 bp, Probe Sequence
gaaaccaatggatttatccaccgtg

SEQ ID NO: 225116 - DNA, 25 bp, Probe Sequence
gaaagtcagtgtgtcttacccagtc

SEQ ID NO: 225117 - DNA, 25 bp, Probe Sequence
gaaagtgtggtcatcttgaccccca

SEQ ID NO: 225118 - DNA, 25 bp, Probe Sequence
gaaaggatggatcctcgggacctcc

SEQ ID NO: 225119 - DNA, 25 bp, Probe Sequence
gaaaggggtccaatgagaacctcga

SEQ ID NO: 225120 - DNA, 25 bp, Probe Sequence
gaaatagtggttgtggaacagtaga

SEQ ID NO: 225121 - DNA, 25 bp, Probe Sequence
gaaagttgaggggtgctgaaaccag

SEQ ID NO: 225122 - DNA, 25 bp, Probe Sequence
gaaagatcaaagtgttaaaccagga

SEQ ID NO: 225123 - DNA, 25 bp, Probe Sequence
gaaatcataaggcagtttaagcata

SEQ ID NO: 225124 - DNA, 25 bp, Probe Sequence
gaaatcagtaggtgaactcagccat

SEQ ID NO: 225125 - DNA, 25 bp, Probe Sequence
gaaagcgatgacgtgggacattaat

SEQ ID NO: 225126 - DNA, 25 bp, Probe Sequence
gaaagaatcgcgtggctcatcaaat

SEQ ID NO: 225127 - DNA, 25 bp, Probe Sequence
gaaagaatttgagcctctgctgaat

SEQ ID NO: 225128 - DNA, 25 bp, Probe Sequence
gaaataatttagtccccagatgtat

SEQ ID NO: 225129 - DNA, 25 bp, Probe Sequence
gaaagttttcgaccctcagaatgat

SEQ ID NO: 225130 - DNA, 25 bp, Probe Sequence
gaaagtgtcactggagccaatgcag

SEQ ID NO: 225131 - DNA, 25 bp, Probe Sequence
gaaagctaccatgtgtcagagatga

SEQ ID NO: 225132 - DNA, 25 bp, Probe Sequence
gaaagccactgttagatctgcagaa

SEQ ID NO: 225133 - DNA, 25 bp, Probe Sequence
gaaagcatattgaaagacctgtcaa

SEQ ID NO: 225134 - DNA, 25 bp, Probe Sequence
gaaagaatcttaagaattgtcaata

SEQ ID NO: 225135 - DNA, 25 bp, Probe Sequence
gaaacgactcgaaaattgtccaaga

SEQ ID NO: 225136 - DNA, 25 bp, Probe Sequence
gaaaccactccaaaatcgtcgcagg

SEQ ID NO: 225137 - DNA, 25 bp, Probe Sequence
gaaaccactccaaaatcgtcgcagg

SEQ ID NO: 225138 - DNA, 25 bp, Probe Sequence
gaaagcatactgttgaaacccgcag

SEQ ID NO: 225139 - DNA, 25 bp, Probe Sequence
gaaagatacgccaaaatcgtcgaga

SEQ ID NO: 225140 - DNA, 25 bp, Probe Sequence
gaaagtgtgcttggaaacgtgggaa

SEQ ID NO: 225141 - DNA, 25 bp, Probe Sequence
gaaagattctttgatttgggtaatg

SEQ ID NO: 225142 - DNA, 25 bp, Probe Sequence
gaaatttttatgcgtttggctaagg

SEQ ID NO: 225143 - DNA, 25 bp, Probe Sequence
gaaaggtgtattgagtttagctgaa

SEQ ID NO: 225144 - DNA, 25 bp, Probe Sequence
gaaagggtgtttttggtagagcttg

SEQ ID NO: 225145 - DNA, 25 bp, Probe Sequence
gaaagtcggtatcttggttgtgctc

SEQ ID NO: 225146 - DNA, 25 bp, Probe Sequence
gaaagtcgcgttgttatatttctaa

SEQ ID NO: 225147 - DNA, 25 bp, Probe Sequence
gaaaggactgttgttatctttaaag

SEQ ID NO: 225148 - DNA, 25 bp, Probe Sequence
gaaaggactattctttatctattca

SEQ ID NO: 225149 - DNA, 25 bp, Probe Sequence
gaaagctactttgtggtgtctaggt

SEQ ID NO: 225150 - DNA, 25 bp, Probe Sequence
tgcaaaccctttcagggtccacttc

SEQ ID NO: 225151 - DNA, 25 bp, Probe Sequence
gacaacctctttgagacgtcctttc

SEQ ID NO: 225152 - DNA, 25 bp, Probe Sequence
gacaacgtcggaggaaagactcttg

SEQ ID NO: 225153 - DNA, 25 bp, Probe Sequence
gacaaagacccagtgaacaaatccg

SEQ ID NO: 225154 - DNA, 25 bp, Probe Sequence
gaaaggaccaattataaaacacaga

SEQ ID NO: 225155 - DNA, 25 bp, Probe Sequence
gaaagctgcccaaaagaaactcaag

SEQ ID NO: 225156 - DNA, 25 bp, Probe Sequence
gaaacgccagaaatatgacatcacc

SEQ ID NO: 225157 - DNA, 25 bp, Probe Sequence
gaaaccttggatactgagtctccta

SEQ ID NO: 225158 - DNA, 25 bp, Probe Sequence
gaaagccagggatcatggtctcctc

SEQ ID NO: 225159 - DNA, 25 bp, Probe Sequence
gaaagccgggcatgacggctcatgc

SEQ ID NO: 225160 - DNA, 25 bp, Probe Sequence
gaaagccacttctaggggctgcatc

SEQ ID NO: 225161 - DNA, 25 bp, Probe Sequence
gaaacctctttgtgggccattgtgc

SEQ ID NO: 225162 - DNA, 25 bp, Probe Sequence
gaaattcaattttaggagccttgat

SEQ ID NO: 225163 - DNA, 25 bp, Probe Sequence
gacaattagattcttggaccaagtg

SEQ ID NO: 225164 - DNA, 25 bp, Probe Sequence
gacaactatggacctggacccagtt

SEQ ID NO: 225165 - DNA, 25 bp, Probe Sequence
gaaagccatggaccagctggccaag

SEQ ID NO: 225166 - DNA, 25 bp, Probe Sequence
gaaaccattgagaagatgcaggaat

SEQ ID NO: 225167 - DNA, 25 bp, Probe Sequence
gaaacctgtgggatcaggatgcact

SEQ ID NO: 225168 - DNA, 25 bp, Probe Sequence
gaaatcccgagattgccaggagact

SEQ ID NO: 225169 - DNA, 25 bp, Probe Sequence
gaaacctcgatattgagcgtccaac

SEQ ID NO: 225170 - DNA, 25 bp, Probe Sequence
gaaatgtgactttgatgagcttcca

SEQ ID NO: 225171 - DNA, 25 bp, Probe Sequence
gaaagtgcactgcagtgagggtcaa

SEQ ID NO: 225172 - DNA, 25 bp, Probe Sequence
gaaagagacgggagagaggagagag

SEQ ID NO: 225173 - DNA, 25 bp, Probe Sequence
gaaaggatcggtctgcagaagaaac

SEQ ID NO: 225174 - DNA, 25 bp, Probe Sequence
gaaatggaaggcaggtgaagatata

SEQ ID NO: 225175 - DNA, 25 bp, Probe Sequence
gaaatgtgaagtgctagctgaagga

SEQ ID NO: 225176 - DNA, 25 bp, Probe Sequence
gaaatgaggaccatcactgtatgga

SEQ ID NO: 225177 - DNA, 25 bp, Probe Sequence
gaaatttgattcacagtgttggagg

SEQ ID NO: 225178 - DNA, 25 bp, Probe Sequence
gaaagctttcacactggtatttgtg

SEQ ID NO: 225179 - DNA, 25 bp, Probe Sequence
gaaagtttattgatgggtggttgca

SEQ ID NO: 225180 - DNA, 25 bp, Probe Sequence
gaaagtttgtttgagggcagtagct

SEQ ID NO: 225181 - DNA, 25 bp, Probe Sequence
gaaagttttggacaggcgctgtaat

SEQ ID NO: 225182 - DNA, 25 bp, Probe Sequence
gaaagttttgtggatagtactgctg

SEQ ID NO: 225183 - DNA, 25 bp, Probe Sequence
gaaagtctagttcattgctactgcc

SEQ ID NO: 225184 - DNA, 25 bp, Probe Sequence
gaaagattaatacctttatctcctt

SEQ ID NO: 225185 - DNA, 25 bp, Probe Sequence
gaaagagtatgttgccttttccctg

SEQ ID NO: 225186 - DNA, 25 bp, Probe Sequence
gaaaggcacatgtcacctctattcg

SEQ ID NO: 225187 - DNA, 25 bp, Probe Sequence
gaaaggccagactttgcttaccatc

SEQ ID NO: 225188 - DNA, 25 bp, Probe Sequence
gaaatgcaccagtctggctttaaac

SEQ ID NO: 225189 - DNA, 25 bp, Probe Sequence
gaaatcaccgattgcccttgtcaac

SEQ ID NO: 225190 - DNA, 25 bp, Probe Sequence
gaaaccatctgttacctgtgttgat

SEQ ID NO: 225191 - DNA, 25 bp, Probe Sequence
gaaaccatcttcttctggtgatctt

SEQ ID NO: 225192 - DNA, 25 bp, Probe Sequence
gaaatggcattctaatgtttgcttt

SEQ ID NO: 225193 - DNA, 25 bp, Probe Sequence
gaaatggcattaattgcctctgtct

SEQ ID NO: 225194 - DNA, 25 bp, Probe Sequence
gaaatccattgcatttccatccatc

SEQ ID NO: 225195 - DNA, 25 bp, Probe Sequence
gaaagccatgtcaaattaatcactg

SEQ ID NO: 225196 - DNA, 25 bp, Probe Sequence
gaaagccatgaggtcttcaatactg

SEQ ID NO: 225197 - DNA, 25 bp, Probe Sequence
gaaaggctggccattattaagtccc

SEQ ID NO: 225198 - DNA, 25 bp, Probe Sequence
gaaagtctgaacattttatttcaaa

SEQ ID NO: 225199 - DNA, 25 bp, Probe Sequence
gaaagctggtacaattttcatattc

SEQ ID NO: 225200 - DNA, 25 bp, Probe Sequence
gacaactggtaagccagctcctcac

SEQ ID NO: 225201 - DNA, 25 bp, Probe Sequence
gaaagggaaattgcagctcctcagc

SEQ ID NO: 225202 - DNA, 25 bp, Probe Sequence
gacacgggaggtaccctttgctgac

SEQ ID NO: 225203 - DNA, 25 bp, Probe Sequence
gacacgaatgaagcctccttcagtg

SEQ ID NO: 225204 - DNA, 25 bp, Probe Sequence
gaaagcaaaagtggccacatacctg

SEQ ID NO: 225205 - DNA, 25 bp, Probe Sequence
gaaatcatggaggcccgaaagccgt

SEQ ID NO: 225206 - DNA, 25 bp, Probe Sequence
gaaatatgacactcccaaaacgaag

SEQ ID NO: 225207 - DNA, 25 bp, Probe Sequence
gaaataacagcatctaaagtgaaga

SEQ ID NO: 225208 - DNA, 25 bp, Probe Sequence
gaaaggatgagctcaaatcgaccaa

SEQ ID NO: 225209 - DNA, 25 bp, Probe Sequence
gaaagtggagccctgcaacgaccac

SEQ ID NO: 225210 - DNA, 25 bp, Probe Sequence
gaaagggctgctgtcatagtgaaca

SEQ ID NO: 225211 - DNA, 25 bp, Probe Sequence
gaaagcagttgctgttcgaaagcat

SEQ ID NO: 225212 - DNA, 25 bp, Probe Sequence
gaaagcagcgttacttctgaccgtg

SEQ ID NO: 225213 - DNA, 25 bp, Probe Sequence
gaaagggttgctgctgtcagccttg

SEQ ID NO: 225214 - DNA, 25 bp, Probe Sequence
gacaaggtttctcctatcagggtcg

SEQ ID NO: 225215 - DNA, 25 bp, Probe Sequence
gacaaggtttctcctatcagggtcg

SEQ ID NO: 225216 - DNA, 25 bp, Probe Sequence
gacaaggtttctcctatcagggtcg

SEQ ID NO: 225217 - DNA, 25 bp, Probe Sequence
gaaagcggagttcctaacaggatga

SEQ ID NO: 225218 - DNA, 25 bp, Probe Sequence
gaaagcccagttctgaagattcacg

SEQ ID NO: 225219 - DNA, 25 bp, Probe Sequence
gaaagagggttgcctacagattagt

SEQ ID NO: 225220 - DNA, 25 bp, Probe Sequence
gaaagagggtagcgacagaaggaag

SEQ ID NO: 225221 - DNA, 25 bp, Probe Sequence
gaaaggaactgctcgtagaaggaag

SEQ ID NO: 225222 - DNA, 25 bp, Probe Sequence
gaaagccaaggctgcgtcgaactgt

SEQ ID NO: 225223 - DNA, 25 bp, Probe Sequence
gacaaccacagatcctacaggactg

SEQ ID NO: 225224 - DNA, 25 bp, Probe Sequence
gaaagccaagatccactaccggaag

SEQ ID NO: 225225 - DNA, 25 bp, Probe Sequence
gaaagccaagcatcacttgcactta

SEQ ID NO: 225226 - DNA, 25 bp, Probe Sequence
gaaagcataaggacacttactcaac

SEQ ID NO: 225227 - DNA, 25 bp, Probe Sequence
gaaagcaaattgacctatacagaga

SEQ ID NO: 225228 - DNA, 25 bp, Probe Sequence
gaaagaagcctgatccaaagaaagt

SEQ ID NO: 225229 - DNA, 25 bp, Probe Sequence
gaaagacggcaggtccaaaggacag

SEQ ID NO: 225230 - DNA, 25 bp, Probe Sequence
gacaagaaggcgagctccgagggtg

SEQ ID NO: 225231 - DNA, 25 bp, Probe Sequence
gaaagcgcaggctaaagccgcaggt

SEQ ID NO: 225232 - DNA, 25 bp, Probe Sequence
gaaaggagacatcagcccagaattc

SEQ ID NO: 225233 - DNA, 25 bp, Probe Sequence
gaaaggagaagcgccactcaagttc

SEQ ID NO: 225234 - DNA, 25 bp, Probe Sequence
gaaaggaaggctatctccacgtctg

SEQ ID NO: 225235 - DNA, 25 bp, Probe Sequence
gaaagtggggctgatccaacaattg

SEQ ID NO: 225236 - DNA, 25 bp, Probe Sequence
gaaattggcccagttccattaatgt

SEQ ID NO: 225237 - DNA, 25 bp, Probe Sequence
gaaagtctgcctgtttagtaagtgg

SEQ ID NO: 225238 - DNA, 25 bp, Probe Sequence
gaaagccctcatttttataacctgg

SEQ ID NO: 225239 - DNA, 25 bp, Probe Sequence
gaaagccctcatttttataacctgg

SEQ ID NO: 225240 - DNA, 25 bp, Probe Sequence
gaaagccctcatgtttgtgataacc

SEQ ID NO: 225241 - DNA, 25 bp, Probe Sequence
gaaagcctccacctatattatgaga

SEQ ID NO: 225242 - DNA, 25 bp, Probe Sequence
gaaagcccaatcctatatgtttatg

SEQ ID NO: 225243 - DNA, 25 bp, Probe Sequence
gaaagaccttttagattttgcagat

SEQ ID NO: 225244 - DNA, 25 bp, Probe Sequence
gaaatgaaatttttggctcttgaga

SEQ ID NO: 225245 - DNA, 25 bp, Probe Sequence
gaaagacgtttttgtgctgtgggca

SEQ ID NO: 225246 - DNA, 25 bp, Probe Sequence
gaaagccgtcttaatttggtccagc

SEQ ID NO: 225247 - DNA, 25 bp, Probe Sequence
gaaagccttcttttggggtcaacag

SEQ ID NO: 225248 - DNA, 25 bp, Probe Sequence
gaaaccttttgcttggggatgtgct

SEQ ID NO: 225249 - DNA, 25 bp, Probe Sequence
gaaatccgaacagttggggctgtta

SEQ ID NO: 225250 - DNA, 25 bp, Probe Sequence
gaaatccaaggagtctgtgaccgat

SEQ ID NO: 225251 - DNA, 25 bp, Probe Sequence
gaaaccacagtgtctcttcactagt

SEQ ID NO: 225252 - DNA, 25 bp, Probe Sequence
gaaaccatctggtccagtccttgtc

SEQ ID NO: 225253 - DNA, 25 bp, Probe Sequence
gaaatccaggatgaagtctctagtc

SEQ ID NO: 225254 - DNA, 25 bp, Probe Sequence
gaaatcagaggtgaaaattgtacat

SEQ ID NO: 225255 - DNA, 25 bp, Probe Sequence
gaaatactggggcaagttctacatg

SEQ ID NO: 225256 - DNA, 25 bp, Probe Sequence
gaaagagatgctcggaaagttctaa

SEQ ID NO: 225257 - DNA, 25 bp, Probe Sequence
gaaagaatgcttcgcctcagtttga

SEQ ID NO: 225258 - DNA, 25 bp, Probe Sequence
gaaagacattgcccctactttaaca

SEQ ID NO: 225259 - DNA, 25 bp, Probe Sequence
gacaaaacgccctgattcctagtgc

SEQ ID NO: 225260 - DNA, 25 bp, Probe Sequence
gacaaaagccggtgcattcctgaaa

SEQ ID NO: 225261 - DNA, 25 bp, Probe Sequence
gaaagcaaccggtggatcctcaaac

SEQ ID NO: 225262 - DNA, 25 bp, Probe Sequence
gaaagaaccgtgttggtgctgctaa

SEQ ID NO: 225263 - DNA, 25 bp, Probe Sequence
gaaagcaggccgggcatggtggctc

SEQ ID NO: 225264 - DNA, 25 bp, Probe Sequence
gaaagtggcccaggtagattccttg

SEQ ID NO: 225265 - DNA, 25 bp, Probe Sequence
gaaagtacccagcaagatctcagct

SEQ ID NO: 225266 - DNA, 25 bp, Probe Sequence
gaaatgtcccctgaaactcattgca

SEQ ID NO: 225267 - DNA, 25 bp, Probe Sequence
gaaattccaatcagaaacacaatga

SEQ ID NO: 225268 - DNA, 25 bp, Probe Sequence
gaaattcaaacaaaaccattcacac

SEQ ID NO: 225269 - DNA, 25 bp, Probe Sequence
gaaagtttaacataccattcactca

SEQ ID NO: 225270 - DNA, 25 bp, Probe Sequence
gaaagtcttccataactttcccagg

SEQ ID NO: 225271 - DNA, 25 bp, Probe Sequence
gaaattgcatttgaagtccgtccca

SEQ ID NO: 225272 - DNA, 25 bp, Probe Sequence
gaaagtgtctgcagtaggggaccca

SEQ ID NO: 225273 - DNA, 25 bp, Probe Sequence
gaaagcatccgcagtcggaaggctc

SEQ ID NO: 225274 - DNA, 25 bp, Probe Sequence
gaaagctcggctggacaagcaaggc

SEQ ID NO: 225275 - DNA, 25 bp, Probe Sequence
gaaagccaggctggatcgtcacatg

SEQ ID NO: 225276 - DNA, 25 bp, Probe Sequence
gaaagcacaggtggcatatgcgagc

SEQ ID NO: 225277 - DNA, 25 bp, Probe Sequence
gaaagcacagtgcacacatggagaa

SEQ ID NO: 225278 - DNA, 25 bp, Probe Sequence
gaaagcgcgcagaacaaggacaaaa

SEQ ID NO: 225279 - DNA, 25 bp, Probe Sequence
gaaagccatcagttccaagcaaaaa

SEQ ID NO: 225280 - DNA, 25 bp, Probe Sequence
gaaagcccgacttatagccagtaat

SEQ ID NO: 225281 - DNA, 25 bp, Probe Sequence
gaaaggctcaacgagaacaagctat

SEQ ID NO: 225282 - DNA, 25 bp, Probe Sequence
gaaatggccaacaaagtccaggagt

SEQ ID NO: 225283 - DNA, 25 bp, Probe Sequence
gaaatggaaaagtagtcacagagaa

SEQ ID NO: 225284 - DNA, 25 bp, Probe Sequence
gaaagggcaccacttgtgccaaaag

SEQ ID NO: 225285 - DNA, 25 bp, Probe Sequence
gaaatgccgcccatttaagtacagt

SEQ ID NO: 225286 - DNA, 25 bp, Probe Sequence
gaaatcctgggcattctgaagtaaa

SEQ ID NO: 225287 - DNA, 25 bp, Probe Sequence
gaaatcccgggaactgtattgacac

SEQ ID NO: 225288 - DNA, 25 bp, Probe Sequence
gaaataccgcccacgaatggatcag

SEQ ID NO: 225289 - DNA, 25 bp, Probe Sequence
gaaatacccaggaggattcctgcag

SEQ ID NO: 225290 - DNA, 25 bp, Probe Sequence
gaaatcccaagcttaggagccctgg

SEQ ID NO: 225291 - DNA, 25 bp, Probe Sequence
gaaagccgaagttatggaccgctag

SEQ ID NO: 225292 - DNA, 25 bp, Probe Sequence
gaaagcgtacaatattgatctccta

SEQ ID NO: 225293 - DNA, 25 bp, Probe Sequence
gaaatcgaacaaaaagtccctgcgg

SEQ ID NO: 225294 - DNA, 25 bp, Probe Sequence
gacaagtaaaactataccctctgaa

SEQ ID NO: 225295 - DNA, 25 bp, Probe Sequence
gacaatgtcaaatttttgcccctat

SEQ ID NO: 225296 - DNA, 25 bp, Probe Sequence
gaaagaaaatgcatcttcaaacatt

SEQ ID NO: 225297 - DNA, 25 bp, Probe Sequence
gaaagacagagtcttcactaacctt

SEQ ID NO: 225298 - DNA, 25 bp, Probe Sequence
gacaaatgggatctaattaaactaa

SEQ ID NO: 225299 - DNA, 25 bp, Probe Sequence
gaaagatttgctcataatcttggat

SEQ ID NO: 225300 - DNA, 25 bp, Probe Sequence
gaaagattcttcacacatctaagtc

SEQ ID NO: 225301 - DNA, 25 bp, Probe Sequence
gaaagtttgagaagcatcatcatag

SEQ ID NO: 225302 - DNA, 25 bp, Probe Sequence
gaaatggtaaagcctgcaaagtata

SEQ ID NO: 225303 - DNA, 25 bp, Probe Sequence
gaaatgattaaccctggaggctgcc

SEQ ID NO: 225304 - DNA, 25 bp, Probe Sequence
gaaatgaaaagccttggagcgtctg

SEQ ID NO: 225305 - DNA, 25 bp, Probe Sequence
gaaatcgcgacacatttgtagtcat

SEQ ID NO: 225306 - DNA, 25 bp, Probe Sequence
gaaatgcagtaacagtaggagactt

SEQ ID NO: 225307 - DNA, 25 bp, Probe Sequence
gaaagctcattaccagtaggacata

SEQ ID NO: 225308 - DNA, 25 bp, Probe Sequence
gaaagcctttgcaatgaagtacagg

SEQ ID NO: 225309 - DNA, 25 bp, Probe Sequence
gaaagcactttccagggatactgag

SEQ ID NO: 225310 - DNA, 25 bp, Probe Sequence
gaaagactattgcaggtgtttaaaa

SEQ ID NO: 225311 - DNA, 25 bp, Probe Sequence
gaaagactattgaaagatgttttat

SEQ ID NO: 225312 - DNA, 25 bp, Probe Sequence
gaaaggctattgggcaggtttggat

SEQ ID NO: 225313 - DNA, 25 bp, Probe Sequence
gaaagatgtttggtgggtatttgaa

SEQ ID NO: 225314 - DNA, 25 bp, Probe Sequence
gaaagagatttcatgagtaatttga

SEQ ID NO: 225315 - DNA, 25 bp, Probe Sequence
gaaagaggatatatatggccacact

SEQ ID NO: 225316 - DNA, 25 bp, Probe Sequence
gaaagctgtggaataaggcccagtg

SEQ ID NO: 225317 - DNA, 25 bp, Probe Sequence
gaaaggggagtatgctgtccgggca

SEQ ID NO: 225318 - DNA, 25 bp, Probe Sequence
gaaaggggttaacttcagccaggat

SEQ ID NO: 225319 - DNA, 25 bp, Probe Sequence
gaaagccgtgtgagtttcaccaact

SEQ ID NO: 225320 - DNA, 25 bp, Probe Sequence
gaaagaagattgtgttttctccact

SEQ ID NO: 225321 - DNA, 25 bp, Probe Sequence
gacatagaaactcttttttcctaag

SEQ ID NO: 225322 - DNA, 25 bp, Probe Sequence
gaaagaaagctgcttgtgtttgctt

SEQ ID NO: 225323 - DNA, 25 bp, Probe Sequence
gaaagagactgtctggcagttgcct

SEQ ID NO: 225324 - DNA, 25 bp, Probe Sequence
gaaagaggtgtgcttcagttgggtg

SEQ ID NO: 225325 - DNA, 25 bp, Probe Sequence
gaaagagaatagctctctgttgcag

SEQ ID NO: 225326 - DNA, 25 bp, Probe Sequence
gaaagcaggaagccgctctttatct

SEQ ID NO: 225327 - DNA, 25 bp, Probe Sequence
gaaagcaggaggcacttttatccaa

SEQ ID NO: 225328 - DNA, 25 bp, Probe Sequence
gaaagtggagagcatcctcccatcc

SEQ ID NO: 225329 - DNA, 25 bp, Probe Sequence
gaaatgttagaggcacccacctaca

SEQ ID NO: 225330 - DNA, 25 bp, Probe Sequence
gaaagttcatgaccaaccgactact

SEQ ID NO: 225331 - DNA, 25 bp, Probe Sequence
gaaagttaggtattcctagcttcta

SEQ ID NO: 225332 - DNA, 25 bp, Probe Sequence
gaaagctctaggaaacaccagtctt

SEQ ID NO: 225333 - DNA, 25 bp, Probe Sequence
gaaatccttggaaagatgtcctttt

SEQ ID NO: 225334 - DNA, 25 bp, Probe Sequence
gaaatccatgtagcaactgtccttt

SEQ ID NO: 225335 - DNA, 25 bp, Probe Sequence
gaaatggggacaaactggctctctg

SEQ ID NO: 225336 - DNA, 25 bp, Probe Sequence
gaaaggtggcaaatacagtgttcag

SEQ ID NO: 225337 - DNA, 25 bp, Probe Sequence
gaaagatgtcagttaacagtttgca

SEQ ID NO: 225338 - DNA, 25 bp, Probe Sequence
gaaagaggcagcttgaaactgagat

SEQ ID NO: 225339 - DNA, 25 bp, Probe Sequence
gaaagacatgaggctcgaagctgaa

SEQ ID NO: 225340 - DNA, 25 bp, Probe Sequence
gaaagaaatctgaagagcagctcaa

SEQ ID NO: 225341 - DNA, 25 bp, Probe Sequence
gaaagcaacattaaatctcacagag

SEQ ID NO: 225342 - DNA, 25 bp, Probe Sequence
gaaagcccatgtaacacatcctgaa

SEQ ID NO: 225343 - DNA, 25 bp, Probe Sequence
gaaatccaagtaatactacctaatt

SEQ ID NO: 225344 - DNA, 25 bp, Probe Sequence
gaaatacatttcgtacttcatctac

SEQ ID NO: 225345 - DNA, 25 bp, Probe Sequence
gaaagacatctgtgtatcacttcaa

SEQ ID NO: 225346 - DNA, 25 bp, Probe Sequence
gacatacttcgggtatacatatcag

SEQ ID NO: 225347 - DNA, 25 bp, Probe Sequence
gaaagcttctggttcagatctgtgc

SEQ ID NO: 225348 - DNA, 25 bp, Probe Sequence
gaaagctctctattctagttgataa

SEQ ID NO: 225349 - DNA, 25 bp, Probe Sequence
gaaagctcttcagtggaccttgagc

SEQ ID NO: 225350 - DNA, 25 bp, Probe Sequence
gaaagcacttgctttcatcctctgg

SEQ ID NO: 225351 - DNA, 25 bp, Probe Sequence
gaaagctctgtggattcatcactgt

SEQ ID NO: 225352 - DNA, 25 bp, Probe Sequence
gaaagcgctgcaggaataccgcaaa

SEQ ID NO: 225353 - DNA, 25 bp, Probe Sequence
gaaaggtgccgattcaccaacacag

SEQ ID NO: 225354 - DNA, 25 bp, Probe Sequence
gagaaggttcgatcctactcagcaa

SEQ ID NO: 225355 - DNA, 25 bp, Probe Sequence
gaaagcatttctttcctaatctcac

SEQ ID NO: 225356 - DNA, 25 bp, Probe Sequence
gaaagctttctgttagctgtattca

SEQ ID NO: 225357 - DNA, 25 bp, Probe Sequence
gaaagcattgcaggactacttattt

SEQ ID NO: 225358 - DNA, 25 bp, Probe Sequence
gaaagcattgcatgagtaaagatac

SEQ ID NO: 225359 - DNA, 25 bp, Probe Sequence
gaaagcattgcaggtgtcagcaggc

SEQ ID NO: 225360 - DNA, 25 bp, Probe Sequence
gaaagcatgagagtgtctaggcctt

SEQ ID NO: 225361 - DNA, 25 bp, Probe Sequence
gaaagcagatgagcgtcccactttc

SEQ ID NO: 225362 - DNA, 25 bp, Probe Sequence
gaaagacataaactaccacttctaa

SEQ ID NO: 225363 - DNA, 25 bp, Probe Sequence
gaaatgacacacaaccacaacttcc

SEQ ID NO: 225364 - DNA, 25 bp, Probe Sequence
gaaagacaaagaggccaacttatgt

SEQ ID NO: 225365 - DNA, 25 bp, Probe Sequence
gaaagacaaacagctccctttctgc

SEQ ID NO: 225366 - DNA, 25 bp, Probe Sequence
gaaagagcagaatgctttccttttc

SEQ ID NO: 225367 - DNA, 25 bp, Probe Sequence
gaaagcaatcaagtttcttcttttc

SEQ ID NO: 225368 - DNA, 25 bp, Probe Sequence
gaaagctatcaaattcttatgggtt

SEQ ID NO: 225369 - DNA, 25 bp, Probe Sequence
gaaagctataaggacactatggact

SEQ ID NO: 225370 - DNA, 25 bp, Probe Sequence
gaaagttgctcgggcagctaggttt

SEQ ID NO: 225371 - DNA, 25 bp, Probe Sequence
gaaagcttccacgtttaatgttatc

SEQ ID NO: 225372 - DNA, 25 bp, Probe Sequence
gaaagatattacgcttaatgctggt

SEQ ID NO: 225373 - DNA, 25 bp, Probe Sequence
gaaagtactcattgtctatgcacac

SEQ ID NO: 225374 - DNA, 25 bp, Probe Sequence
gaaagtgactgcaggattcaccagg

SEQ ID NO: 225375 - DNA, 25 bp, Probe Sequence
gaaagtcttggaggattaatagcag

SEQ ID NO: 225376 - DNA, 25 bp, Probe Sequence
gaaagacttagaaatagactagacc

SEQ ID NO: 225377 - DNA, 25 bp, Probe Sequence
gaaagtcttagatagaacatggatc

SEQ ID NO: 225378 - DNA, 25 bp, Probe Sequence
gaaaggaaatgatgaccactggatc

SEQ ID NO: 225379 - DNA, 25 bp, Probe Sequence
gaaagtgaagattatggccaacagt

SEQ ID NO: 225380 - DNA, 25 bp, Probe Sequence
gaaagtaatgcttaggccgggtgcg

SEQ ID NO: 225381 - DNA, 25 bp, Probe Sequence
gaaagaagattaactcctgggtgga

SEQ ID NO: 225382 - DNA, 25 bp, Probe Sequence
gaaagggcagtaactcgtggtgttg

SEQ ID NO: 225383 - DNA, 25 bp, Probe Sequence
gaaaggcgagtctcctgtggattat

SEQ ID NO: 225384 - DNA, 25 bp, Probe Sequence
gaaagagcaagcctagccagatgta

SEQ ID NO: 225385 - DNA, 25 bp, Probe Sequence
gaaatggctctgcctatgctcatgc

SEQ ID NO: 225386 - DNA, 25 bp, Probe Sequence
gaaaggctcatgctttatccagacc

SEQ ID NO: 225387 - DNA, 25 bp, Probe Sequence
gaaagtcatttcttctacctgagac

SEQ ID NO: 225388 - DNA, 25 bp, Probe Sequence
gaaagctatttttgatacaccagat

SEQ ID NO: 225389 - DNA, 25 bp, Probe Sequence
gaaagctttcaatatgctcaacgca

SEQ ID NO: 225390 - DNA, 25 bp, Probe Sequence
gaaagcttaataatagctcctagct

SEQ ID NO: 225391 - DNA, 25 bp, Probe Sequence
gaaagtatttgaaagcctcatggta

SEQ ID NO: 225392 - DNA, 25 bp, Probe Sequence
gaaagagtttgtatgccgcaagaca

SEQ ID NO: 225393 - DNA, 25 bp, Probe Sequence
gaaaggtgttggaactcgccataag

SEQ ID NO: 225394 - DNA, 25 bp, Probe Sequence
gaaagttccgaggacctgctaaaat

SEQ ID NO: 225395 - DNA, 25 bp, Probe Sequence
gaaagtacccagctgcctgtgaaat

SEQ ID NO: 225396 - DNA, 25 bp, Probe Sequence
gaaagaaacctgcaacttgtaaaca

SEQ ID NO: 225397 - DNA, 25 bp, Probe Sequence
gaaagaaagacagacctagaaaaca

SEQ ID NO: 225398 - DNA, 25 bp, Probe Sequence
gaaagaaatacacacctacaagaaa

SEQ ID NO: 225399 - DNA, 25 bp, Probe Sequence
gaaagaaatacacacctacatggaa

SEQ ID NO: 225400 - DNA, 25 bp, Probe Sequence
gacaagaagaaacacctccttattg

SEQ ID NO: 225401 - DNA, 25 bp, Probe Sequence
gaaagagagaaccaagcttgtcttt

SEQ ID NO: 225402 - DNA, 25 bp, Probe Sequence
gaaatcagtaatttagccggctttg

SEQ ID NO: 225403 - DNA, 25 bp, Probe Sequence
gacaacgtgaagtttaaagttcgat

SEQ ID NO: 225404 - DNA, 25 bp, Probe Sequence
gaaagtctgtagtcttaaaactcta

SEQ ID NO: 225405 - DNA, 25 bp, Probe Sequence
gaaagttgaaagttagaatcttcta

SEQ ID NO: 225406 - DNA, 25 bp, Probe Sequence
gaaagttgaacgtattcttaagcat

SEQ ID NO: 225407 - DNA, 25 bp, Probe Sequence
gaaatctcagaacccttttcaacac

SEQ ID NO: 225408 - DNA, 25 bp, Probe Sequence
gaaattcagcaccaagttattcccc

SEQ ID NO: 225409 - DNA, 25 bp, Probe Sequence
gaaattagtggatactttgccgtca

SEQ ID NO: 225410 - DNA, 25 bp, Probe Sequence
gaaatcggatggtttccgtgtctgt

SEQ ID NO: 225411 - DNA, 25 bp, Probe Sequence
gaaatcgccgtgttactgttgcact

SEQ ID NO: 225412 - DNA, 25 bp, Probe Sequence
gaaatacctgtggttcagtccatcc

SEQ ID NO: 225413 - DNA, 25 bp, Probe Sequence
gaaatcattcttcatgtagttagac

SEQ ID NO: 225414 - DNA, 25 bp, Probe Sequence
gaaatatttaggaggttggatcaac

SEQ ID NO: 225415 - DNA, 25 bp, Probe Sequence
gaaatctttaaaacgttgaatagca

SEQ ID NO: 225416 - DNA, 25 bp, Probe Sequence
gacaactttaaacttactgaccatc

SEQ ID NO: 225417 - DNA, 25 bp, Probe Sequence
gacaactttaaacttactgaccatc

SEQ ID NO: 225418 - DNA, 25 bp, Probe Sequence
gacagactttaaaccttatcaccat

SEQ ID NO: 225419 - DNA, 25 bp, Probe Sequence
gacaacatgtggcaccgtttgcctc

SEQ ID NO: 225420 - DNA, 25 bp, Probe Sequence
gaaagcagtagccaccatgttcaac

SEQ ID NO: 225421 - DNA, 25 bp, Probe Sequence
gaaagcagtcttccatcaaatcacc

SEQ ID NO: 225422 - DNA, 25 bp, Probe Sequence
gaaaggagcttgccacgggcagacc

SEQ ID NO: 225423 - DNA, 25 bp, Probe Sequence
gaaagcagattctccaatggatgac

SEQ ID NO: 225424 - DNA, 25 bp, Probe Sequence
gaaatcatgatttccctgtagaaag

SEQ ID NO: 225425 - DNA, 25 bp, Probe Sequence
gacaactttattctccctatagttt

SEQ ID NO: 225426 - DNA, 25 bp, Probe Sequence
gacaaccctagtgtcacctcaaatc

SEQ ID NO: 225427 - DNA, 25 bp, Probe Sequence
gaaagtggatttgatccccagtctc

SEQ ID NO: 225428 - DNA, 25 bp, Probe Sequence
gaaagtggatttgatccccagtctc

SEQ ID NO: 225429 - DNA, 25 bp, Probe Sequence
gaaagtggatttgatccccagtctc

SEQ ID NO: 225430 - DNA, 25 bp, Probe Sequence
gaaagatgttttggatcccttctct

SEQ ID NO: 225431 - DNA, 25 bp, Probe Sequence
gaaaggatgttttgtcccatttcct

SEQ ID NO: 225432 - DNA, 25 bp, Probe Sequence
gaaaggagtccttagtcctttcagc

SEQ ID NO: 225433 - DNA, 25 bp, Probe Sequence
gaaattgaacctttgtgccctatca

SEQ ID NO: 225434 - DNA, 25 bp, Probe Sequence
gaaagttacttgtgtgcccttggtc

SEQ ID NO: 225435 - DNA, 25 bp, Probe Sequence
gaaagtaacttttcgcactttggtg

SEQ ID NO: 225436 - DNA, 25 bp, Probe Sequence
gaaagaaacgttttcatgcttctgg

SEQ ID NO: 225437 - DNA, 25 bp, Probe Sequence
gaaagcaaagccaatctctcattta

SEQ ID NO: 225438 - DNA, 25 bp, Probe Sequence
gaaagacaagtgaatggcaatccta

SEQ ID NO: 225439 - DNA, 25 bp, Probe Sequence
gaaagacaaggatatgactgagcaa

SEQ ID NO: 225440 - DNA, 25 bp, Probe Sequence
gaaagaacagtatctccatggcaac

SEQ ID NO: 225441 - DNA, 25 bp, Probe Sequence
gaaagtacagtctacaactgataaa

SEQ ID NO: 225442 - DNA, 25 bp, Probe Sequence
gaaatagatcgttatgccagtgaaa

SEQ ID NO: 225443 - DNA, 25 bp, Probe Sequence
gaaatattaggttcaggtgcataag

SEQ ID NO: 225444 - DNA, 25 bp, Probe Sequence
gaaatactggttttgcaatatagag

SEQ ID NO: 225445 - DNA, 25 bp, Probe Sequence
gaaagactggcttagctgaagttct

SEQ ID NO: 225446 - DNA, 25 bp, Probe Sequence
gaaatactgtaatgcgcacctttgc

SEQ ID NO: 225447 - DNA, 25 bp, Probe Sequence
gaaagacttcaattagggctattag

SEQ ID NO: 225448 - DNA, 25 bp, Probe Sequence
gaaagattctcattgaaatgtctga

SEQ ID NO: 225449 - DNA, 25 bp, Probe Sequence
gaaagatttgatagaagaggtccgc

SEQ ID NO: 225450 - DNA, 25 bp, Probe Sequence
ggaagcatttagaggggaccacggg

SEQ ID NO: 225451 - DNA, 25 bp, Probe Sequence
ggaagccttctggggcgaattacgg

SEQ ID NO: 225452 - DNA, 25 bp, Probe Sequence
gagaaccccatgcgggaacttcgca

SEQ ID NO: 225453 - DNA, 25 bp, Probe Sequence
gaaatacactcatggggaagcttcc

SEQ ID NO: 225454 - DNA, 25 bp, Probe Sequence
gaaagtattcctggggaagcccact

SEQ ID NO: 225455 - DNA, 25 bp, Probe Sequence
gaaattcttatcagttgaaactcct

SEQ ID NO: 225456 - DNA, 25 bp, Probe Sequence
gaaatcttgttctgggaaaattgct

SEQ ID NO: 225457 - DNA, 25 bp, Probe Sequence
gaaattctgtactgggctgaaataa

SEQ ID NO: 225458 - DNA, 25 bp, Probe Sequence
gacaattggtagggggtgaaagtgg

SEQ ID NO: 225459 - DNA, 25 bp, Probe Sequence
gaaagtggcaatggaggggaaagga

SEQ ID NO: 225460 - DNA, 25 bp, Probe Sequence
gaaagggcacatggcacagttaaag

SEQ ID NO: 225461 - DNA, 25 bp, Probe Sequence
gaaagaggacatgagcggctacaca

SEQ ID NO: 225462 - DNA, 25 bp, Probe Sequence
gaaagatgtatagctgcgacataag

SEQ ID NO: 225463 - DNA, 25 bp, Probe Sequence
gaaagagcgggagtccatcatgaag

SEQ ID NO: 225464 - DNA, 25 bp, Probe Sequence
gaaagatggtcgtctccagcagaga

SEQ ID NO: 225465 - DNA, 25 bp, Probe Sequence
gacagagaggatccacctccgaaac

SEQ ID NO: 225466 - DNA, 25 bp, Probe Sequence
gaaagaaatgcagcctacacaccca

SEQ ID NO: 225467 - DNA, 25 bp, Probe Sequence
gaaagaaatgcagcctacacaccca

SEQ ID NO: 225468 - DNA, 25 bp, Probe Sequence
gaaagaggtgcagtcactcacacct

SEQ ID NO: 225469 - DNA, 25 bp, Probe Sequence
gaaagagttcagacttatcaccatt

SEQ ID NO: 225470 - DNA, 25 bp, Probe Sequence
gaaatcagttaagttatcccaatcc

SEQ ID NO: 225471 - DNA, 25 bp, Probe Sequence
gaaagtgttcactctcacaaaaccc

SEQ ID NO: 225472 - DNA, 25 bp, Probe Sequence
gaaagtttcagctcactgtgaagcc

SEQ ID NO: 225473 - DNA, 25 bp, Probe Sequence
gaaagtgtctacggtctgtgaagct

SEQ ID NO: 225474 - DNA, 25 bp, Probe Sequence
gaaaggtgctatgcttctgttatta

SEQ ID NO: 225475 - DNA, 25 bp, Probe Sequence
gaaagtgtgcctcttgtttgcatgg

SEQ ID NO: 225476 - DNA, 25 bp, Probe Sequence
gaaagattctggggctgtcttatga

SEQ ID NO: 225477 - DNA, 25 bp, Probe Sequence
gaaagggcatttggagctcattaga

SEQ ID NO: 225478 - DNA, 25 bp, Probe Sequence
gaaagtcctttggattctctggcag

SEQ ID NO: 225479 - DNA, 25 bp, Probe Sequence
gaaagacctttgactccattgtgat

SEQ ID NO: 225480 - DNA, 25 bp, Probe Sequence
gaaagacctttgactccattgtgat

SEQ ID NO: 225481 - DNA, 25 bp, Probe Sequence
gaaagacactgtttctcctgttggc

SEQ ID NO: 225482 - DNA, 25 bp, Probe Sequence
gaaagagactgttctattcatttag

SEQ ID NO: 225483 - DNA, 25 bp, Probe Sequence
gaaataactttctatatctgctaaa

SEQ ID NO: 225484 - DNA, 25 bp, Probe Sequence
ggaaaactaccatactaaagttcag

SEQ ID NO: 225485 - DNA, 25 bp, Probe Sequence
gaaagacctatccaaattagacagt

SEQ ID NO: 225486 - DNA, 25 bp, Probe Sequence
gaaagacccctgacaaaagacaatc

SEQ ID NO: 225487 - DNA, 25 bp, Probe Sequence
gaaagggccctaaaagagatgaaca

SEQ ID NO: 225488 - DNA, 25 bp, Probe Sequence
gaaaggtgccctaagcaggagaaac

SEQ ID NO: 225489 - DNA, 25 bp, Probe Sequence
gaaagatgctgtccttggcggaaca

SEQ ID NO: 225490 - DNA, 25 bp, Probe Sequence
gaaatgtgctgggcaagtcaaaact

SEQ ID NO: 225491 - DNA, 25 bp, Probe Sequence
gaaatggttgccagtcaaacgttca

SEQ ID NO: 225492 - DNA, 25 bp, Probe Sequence
gaaatgaattgctggtcaaaatgct

SEQ ID NO: 225493 - DNA, 25 bp, Probe Sequence
gacaaggactcatggacgcaaagaa

SEQ ID NO: 225494 - DNA, 25 bp, Probe Sequence
gagaaggctgcttcggaggaaccca

SEQ ID NO: 225495 - DNA, 25 bp, Probe Sequence
gaaatggctcataagtagtatctgc

SEQ ID NO: 225496 - DNA, 25 bp, Probe Sequence
gaaatgagtcttagcaatgttgatc

SEQ ID NO: 225497 - DNA, 25 bp, Probe Sequence
gaaagattcttcctcattagatcat

SEQ ID NO: 225498 - DNA, 25 bp, Probe Sequence
gaaagtgtgctttatgctgaaacag

SEQ ID NO: 225499 - DNA, 25 bp, Probe Sequence
gaaaggtgtttgagaaatactgtta

SEQ ID NO: 225500 - DNA, 25 bp, Probe Sequence
gaaagtggtttgagatagtggtata

SEQ ID NO: 225501 - DNA, 25 bp, Probe Sequence
gaaagatgactgatgtggtagggta

SEQ ID NO: 225502 - DNA, 25 bp, Probe Sequence
gaaagtcaacatagtggttaggaaa

SEQ ID NO: 225503 - DNA, 25 bp, Probe Sequence
gaaagtcatagtagcaggttgaggc

SEQ ID NO: 225504 - DNA, 25 bp, Probe Sequence
gaaagttactgatgtttgtgtcagt

SEQ ID NO: 225505 - DNA, 25 bp, Probe Sequence
gaaagttactgctgctctattatta

SEQ ID NO: 225506 - DNA, 25 bp, Probe Sequence
gaaagtgtacaggtctaattatata

SEQ ID NO: 225507 - DNA, 25 bp, Probe Sequence
gaaagactagcagtttgacctgtta

SEQ ID NO: 225508 - DNA, 25 bp, Probe Sequence
gaaagactgaggcttctgcctactg

SEQ ID NO: 225509 - DNA, 25 bp, Probe Sequence
gaaatgacgttgccgattcaccagc

SEQ ID NO: 225510 - DNA, 25 bp, Probe Sequence
gaaatggaactgccatcttcaccac

SEQ ID NO: 225511 - DNA, 25 bp, Probe Sequence
gaaatggcatcgagcttttccaagg

SEQ ID NO: 225512 - DNA, 25 bp, Probe Sequence
gaaagttgagacgtgattaccgggt

SEQ ID NO: 225513 - DNA, 25 bp, Probe Sequence
gaaagtaagtcagtattcttggggt

SEQ ID NO: 225514 - DNA, 25 bp, Probe Sequence
gaaatgctttaagttcactctgggg

SEQ ID NO: 225515 - DNA, 25 bp, Probe Sequence
gaaatcattgtcaagatctttgtgg

SEQ ID NO: 225516 - DNA, 25 bp, Probe Sequence
gaaatgcttgctcaggctcagaggg

SEQ ID NO: 225517 - DNA, 25 bp, Probe Sequence
gaaatgctgccgcaatggctgtggg

SEQ ID NO: 225518 - DNA, 25 bp, Probe Sequence
gaaatagccctacggcaggctgatg

SEQ ID NO: 225519 - DNA, 25 bp, Probe Sequence
gaaatataccttaacaggctgattt

SEQ ID NO: 225520 - DNA, 25 bp, Probe Sequence
gaaataagtctgtaggccttgtttg

SEQ ID NO: 225521 - DNA, 25 bp, Probe Sequence
gaaagagcgatttatggctttgttc

SEQ ID NO: 225522 - DNA, 25 bp, Probe Sequence
gaaatactcagcttaggcattttta

SEQ ID NO: 225523 - DNA, 25 bp, Probe Sequence
gaaatttagtacactatgttctaga

SEQ ID NO: 225524 - DNA, 25 bp, Probe Sequence
gaaagtgtattgccaactttgttaa

SEQ ID NO: 225525 - DNA, 25 bp, Probe Sequence
gaaagtattcagccgaatttttggg

SEQ ID NO: 225526 - DNA, 25 bp, Probe Sequence
gaaagtataaaccaattgtcaagtg

SEQ ID NO: 225527 - DNA, 25 bp, Probe Sequence
gaaatggtttaacatatgtgcaatt

SEQ ID NO: 225528 - DNA, 25 bp, Probe Sequence
gaaaggtttgtacagatgcatgcca

SEQ ID NO: 225529 - DNA, 25 bp, Probe Sequence
gaaaggcatcggagcaagagtccaa

SEQ ID NO: 225530 - DNA, 25 bp, Probe Sequence
gaaagtgaggttgcacgagccagaa

SEQ ID NO: 225531 - DNA, 25 bp, Probe Sequence
gaaagtgtgtgtacgaggacaagaa

SEQ ID NO: 225532 - DNA, 25 bp, Probe Sequence
gaaaggtgtccacagccacaaaaag

SEQ ID NO: 225533 - DNA, 25 bp, Probe Sequence
gaaaggattccagacacaaaacata

SEQ ID NO: 225534 - DNA, 25 bp, Probe Sequence
gaaagtttccagtacactgaaacat

SEQ ID NO: 225535 - DNA, 25 bp, Probe Sequence
gaaagtttgaagaacactggtaatg

SEQ ID NO: 225536 - DNA, 25 bp, Probe Sequence
gaaatgtttactgacacttacatac

SEQ ID NO: 225537 - DNA, 25 bp, Probe Sequence
gaaatttagttaacatcttacaact

SEQ ID NO: 225538 - DNA, 25 bp, Probe Sequence
gacaatttggctaagtccttatgca

SEQ ID NO: 225539 - DNA, 25 bp, Probe Sequence
gaaatgtcatggctttactttggtc

SEQ ID NO: 225540 - DNA, 25 bp, Probe Sequence
gaaagtcaggtactaaattggtgaa

SEQ ID NO: 225541 - DNA, 25 bp, Probe Sequence
gaaagtcagggtcacagctggtctg

SEQ ID NO: 225542 - DNA, 25 bp, Probe Sequence
gaaagtcatggtggccaacagaggt

SEQ ID NO: 225543 - DNA, 25 bp, Probe Sequence
gaaagatcaaggtctgcaagggaat

SEQ ID NO: 225544 - DNA, 25 bp, Probe Sequence
gacaagatcccgttaaaggacaagt

SEQ ID NO: 225545 - DNA, 25 bp, Probe Sequence
gacagacttgggttcaaaggacagt

SEQ ID NO: 225546 - DNA, 25 bp, Probe Sequence
gaaatcaaggtgttcaatacagtag

SEQ ID NO: 225547 - DNA, 25 bp, Probe Sequence
gaaatcaagttgtctctgtgtacag

SEQ ID NO: 225548 - DNA, 25 bp, Probe Sequence
gacagagaggatccacctccgaaac

SEQ ID NO: 225549 - DNA, 25 bp, Probe Sequence
gacaatctggactaccccaagatgg

SEQ ID NO: 225550 - DNA, 25 bp, Probe Sequence
gaaatggatgaaactccacaagtgg

SEQ ID NO: 225551 - DNA, 25 bp, Probe Sequence
gaaatcgatggtctccagaagcttg

SEQ ID NO: 225552 - DNA, 25 bp, Probe Sequence
gaaaggagagtcttcgcagaatgca

SEQ ID NO: 225553 - DNA, 25 bp, Probe Sequence
gaaagaggagtattcagcactctgc

SEQ ID NO: 225554 - DNA, 25 bp, Probe Sequence
gaaagagggtctgcatcactgccat

SEQ ID NO: 225555 - DNA, 25 bp, Probe Sequence
gaaatgatgcggagccttcgccatg

SEQ ID NO: 225556 - DNA, 25 bp, Probe Sequence
gaaatggagatgagcctctgaggaa

SEQ ID NO: 225557 - DNA, 25 bp, Probe Sequence
gaaagtgtcagaacccagatgtgaa

SEQ ID NO: 225558 - DNA, 25 bp, Probe Sequence
gaaaggtgataagcctgcatgtgtc

SEQ ID NO: 225559 - DNA, 25 bp, Probe Sequence
gaaaggcagatatggcattggcttc

SEQ ID NO: 225560 - DNA, 25 bp, Probe Sequence
gaaatagagggaccattgtctacag

SEQ ID NO: 225561 - DNA, 25 bp, Probe Sequence
gaaatggggtgaacggtgctggcag

SEQ ID NO: 225562 - DNA, 25 bp, Probe Sequence
gaaaggaggtattcgaacttctgga

SEQ ID NO: 225563 - DNA, 25 bp, Probe Sequence
gaaagtggttgatccattttctaag

SEQ ID NO: 225564 - DNA, 25 bp, Probe Sequence
gaaagtgcgttttctgttttcattt

SEQ ID NO: 225565 - DNA, 25 bp, Probe Sequence
gaaagtgcctttcaggatctatttt

SEQ ID NO: 225566 - DNA, 25 bp, Probe Sequence
gaaaggcttgttctggtgtatttga

SEQ ID NO: 225567 - DNA, 25 bp, Probe Sequence
gaaagatgcattcaccatggagctt

SEQ ID NO: 225568 - DNA, 25 bp, Probe Sequence
gaaaggcttggcactgagcaattca

SEQ ID NO: 225569 - DNA, 25 bp, Probe Sequence
gaaaggcctgtgacgatccaagaca

SEQ ID NO: 225570 - DNA, 25 bp, Probe Sequence
gaaatcgcctgctacaaaaacaagg

SEQ ID NO: 225571 - DNA, 25 bp, Probe Sequence
gaaatccacatgcttcagaattcag

SEQ ID NO: 225572 - DNA, 25 bp, Probe Sequence
gaaatccacatgcttcagaattcag

SEQ ID NO: 225573 - DNA, 25 bp, Probe Sequence
gaaatgctcaagacttcattatttg

SEQ ID NO: 225574 - DNA, 25 bp, Probe Sequence
gaaatctatagactgtattgcaagg

SEQ ID NO: 225575 - DNA, 25 bp, Probe Sequence
gaaattaaaaatcctgcaatggaaa

SEQ ID NO: 225576 - DNA, 25 bp, Probe Sequence
gaaatgattcaatacctgcagctgg

SEQ ID NO: 225577 - DNA, 25 bp, Probe Sequence
gaaagatgtattatgccgaggagcg

SEQ ID NO: 225578 - DNA, 25 bp, Probe Sequence
gaaaggtatatgactgagcgtagca

SEQ ID NO: 225579 - DNA, 25 bp, Probe Sequence
gacacagggtagaagtgcagaagcc

SEQ ID NO: 225580 - DNA, 25 bp, Probe Sequence
gacaccctggagaagccgaaaccag

SEQ ID NO: 225581 - DNA, 25 bp, Probe Sequence
gacaccctatgttaccaaaggctag

SEQ ID NO: 225582 - DNA, 25 bp, Probe Sequence
gacagtgcctttaaccaagcgagga

SEQ ID NO: 225583 - DNA, 25 bp, Probe Sequence
gacaatgggttttccaagctgggca

SEQ ID NO: 225584 - DNA, 25 bp, Probe Sequence
gaaatagttttctcaagtgtgtcta

SEQ ID NO: 225585 - DNA, 25 bp, Probe Sequence
gaaataggttttgtctggttgcata

SEQ ID NO: 225586 - DNA, 25 bp, Probe Sequence
gacaaaccctttgtattgtagataa

SEQ ID NO: 225587 - DNA, 25 bp, Probe Sequence
gacaaacccagtaggctaactgaaa

SEQ ID NO: 225588 - DNA, 25 bp, Probe Sequence
gacaaatccacgggcgggtctggaa

SEQ ID NO: 225589 - DNA, 25 bp, Probe Sequence
gaaataccgtgccctgaggttggac

SEQ ID NO: 225590 - DNA, 25 bp, Probe Sequence
gaaatccacgatgggatgaacctgg

SEQ ID NO: 225591 - DNA, 25 bp, Probe Sequence
gaaatccctttggaccaggtggaca

SEQ ID NO: 225592 - DNA, 25 bp, Probe Sequence
gaaatccctggaggcccaggcggac

SEQ ID NO: 225593 - DNA, 25 bp, Probe Sequence
gaaatctttggctgccacaagtaga

SEQ ID NO: 225594 - DNA, 25 bp, Probe Sequence
gaaatatctggttgagcccaatgta

SEQ ID NO: 225595 - DNA, 25 bp, Probe Sequence
gaaattgacagattgacccagatta

SEQ ID NO: 225596 - DNA, 25 bp, Probe Sequence
gacaattgccaagtgcattgcggac

SEQ ID NO: 225597 - DNA, 25 bp, Probe Sequence
gacacatcgccaacctgggtgtcat

SEQ ID NO: 225598 - DNA, 25 bp, Probe Sequence
gaaatctgagtcacatgggatgaat

SEQ ID NO: 225599 - DNA, 25 bp, Probe Sequence
gaaatctcactgcttgggaaatgac

SEQ ID NO: 225600 - DNA, 25 bp, Probe Sequence
gaaagtacagaatggggcagagcaa

SEQ ID NO: 225601 - DNA, 25 bp, Probe Sequence
gaaagtacaaattgctgggaggaag

SEQ ID NO: 225602 - DNA, 25 bp, Probe Sequence
gaaagttatcacattaaaagatgga

SEQ ID NO: 225603 - DNA, 25 bp, Probe Sequence
gaaagttatcatatccacaagccga

SEQ ID NO: 225604 - DNA, 25 bp, Probe Sequence
gaaaggctgaatagttccaaatcca

SEQ ID NO: 225605 - DNA, 25 bp, Probe Sequence
gaaaggtgatattgtagacatcaag

SEQ ID NO: 225606 - DNA, 25 bp, Probe Sequence
gaaagtatcatagtgtaaacaaaca

SEQ ID NO: 225607 - DNA, 25 bp, Probe Sequence
gaaaggttactgatatgacactaca

SEQ ID NO: 225608 - DNA, 25 bp, Probe Sequence
gaaagtcgtactgttcacacacaca

SEQ ID NO: 225609 - DNA, 25 bp, Probe Sequence
gaaagtgctgtagtgcaattaccaa

SEQ ID NO: 225610 - DNA, 25 bp, Probe Sequence
gaaatggatgtaagcctggcccata

SEQ ID NO: 225611 - DNA, 25 bp, Probe Sequence
gaaatgggtaacaggcctcaagcaa

SEQ ID NO: 225612 - DNA, 25 bp, Probe Sequence
gaaatcaagtagcaagccctcaaat

SEQ ID NO: 225613 - DNA, 25 bp, Probe Sequence
gaaattcagctacaacccaaagaga

SEQ ID NO: 225614 - DNA, 25 bp, Probe Sequence
gaaattatgtcacaggcaccaaagt

SEQ ID NO: 225615 - DNA, 25 bp, Probe Sequence
gaaatcctccagctcgaatcaaagc

SEQ ID NO: 225616 - DNA, 25 bp, Probe Sequence
gaaatctctgcatgtttgcagcata

SEQ ID NO: 225617 - DNA, 25 bp, Probe Sequence
gaaatgctaaccttgtagcatgtga

SEQ ID NO: 225618 - DNA, 25 bp, Probe Sequence
gaaaggatattcaatgttcatggat

SEQ ID NO: 225619 - DNA, 25 bp, Probe Sequence
gaaattatatcccatttagttaaat

SEQ ID NO: 225620 - DNA, 25 bp, Probe Sequence
gaaatcaagtcctgcttcatttaca

SEQ ID NO: 225621 - DNA, 25 bp, Probe Sequence
gaaataagccctgctgctttctaga

SEQ ID NO: 225622 - DNA, 25 bp, Probe Sequence
gaaataacccagacttaatcttgaa

SEQ ID NO: 225623 - DNA, 25 bp, Probe Sequence
gaaataacccagacttaatcttgaa

SEQ ID NO: 225624 - DNA, 25 bp, Probe Sequence
gaaatattcatccaggttaaccttg

SEQ ID NO: 225625 - DNA, 25 bp, Probe Sequence
gaaatttcatgattggcttaaagtg

SEQ ID NO: 225626 - DNA, 25 bp, Probe Sequence
gaaatatactcaatgcgtctgatgt

SEQ ID NO: 225627 - DNA, 25 bp, Probe Sequence
gaaatgaacttaccatctgatgata

SEQ ID NO: 225628 - DNA, 25 bp, Probe Sequence
gaaattattctaccctagtcatctt

SEQ ID NO: 225629 - DNA, 25 bp, Probe Sequence
gaaattcttctagtgccagcgtttc

SEQ ID NO: 225630 - DNA, 25 bp, Probe Sequence
gaaatgttctcatttcctgtttgct

SEQ ID NO: 225631 - DNA, 25 bp, Probe Sequence
gaaatgtctccatgagggtttggtc

SEQ ID NO: 225632 - DNA, 25 bp, Probe Sequence
gaaatttcactttgcggagttggtc

SEQ ID NO: 225633 - DNA, 25 bp, Probe Sequence
gaaatttcctttcgtcctaatgatc

SEQ ID NO: 225634 - DNA, 25 bp, Probe Sequence
gaaagtatccttaatattttatgac

SEQ ID NO: 225635 - DNA, 25 bp, Probe Sequence
gaaagtatcagccatttagcattta

SEQ ID NO: 225636 - DNA, 25 bp, Probe Sequence
gatcaggttatactttaggttaggg

SEQ ID NO: 225637 - DNA, 25 bp, Probe Sequence
gaaatgttataggtttgtttggagt

SEQ ID NO: 225638 - DNA, 25 bp, Probe Sequence
gaaataagtagccttctgttgtggg

SEQ ID NO: 225639 - DNA, 25 bp, Probe Sequence
gaaattgagtagttcctatgtgatt

SEQ ID NO: 225640 - DNA, 25 bp, Probe Sequence
gaaatggtgtattacctgactgctt

SEQ ID NO: 225641 - DNA, 25 bp, Probe Sequence
gaaatggggcttacactatgatgtt

SEQ ID NO: 225642 - DNA, 25 bp, Probe Sequence
gacagggaacttgccctgcatctat

SEQ ID NO: 225643 - DNA, 25 bp, Probe Sequence
gaaagtaacatttctctctctctct

SEQ ID NO: 225644 - DNA, 25 bp, Probe Sequence
gaaagtgaaatgttatggtctcccc

SEQ ID NO: 225645 - DNA, 25 bp, Probe Sequence
gacaaggaaaggctgtggccacctg

SEQ ID NO: 225646 - DNA, 25 bp, Probe Sequence
gacagggaacgggatcgggaccgcg

SEQ ID NO: 225647 - DNA, 25 bp, Probe Sequence
gagaggggtacggaaggggccgctg

SEQ ID NO: 225648 - DNA, 25 bp, Probe Sequence
gagaggggtcctggagaaatgggtt

SEQ ID NO: 225649 - DNA, 25 bp, Probe Sequence
gaccttggtcactgtaaagggcttt

SEQ ID NO: 225650 - DNA, 25 bp, Probe Sequence
gactcttgggagtggaaatgggatg

SEQ ID NO: 225651 - DNA, 25 bp, Probe Sequence
gacacttgtgggggtgattctgggg

SEQ ID NO: 225652 - DNA, 25 bp, Probe Sequence
gaaatttgcagagcagctgattcga

SEQ ID NO: 225653 - DNA, 25 bp, Probe Sequence
gaaatcctcatttctgtgctacgga

SEQ ID NO: 225654 - DNA, 25 bp, Probe Sequence
gaaatactcagcaactgttagctgg

SEQ ID NO: 225655 - DNA, 25 bp, Probe Sequence
gacacatacccaactgttggcaggg

SEQ ID NO: 225656 - DNA, 25 bp, Probe Sequence
gacaagacctcaactttggccaagt

SEQ ID NO: 225657 - DNA, 25 bp, Probe Sequence
gacaaacgtaggttgatagccaggt

SEQ ID NO: 225658 - DNA, 25 bp, Probe Sequence
gacaaccctaagtggtccatggtgg

SEQ ID NO: 225659 - DNA, 25 bp, Probe Sequence
gacaaccactactgagtttccaatg

SEQ ID NO: 225660 - DNA, 25 bp, Probe Sequence
gaaatacctacatgatgggcccaaa

SEQ ID NO: 225661 - DNA, 25 bp, Probe Sequence
gaaataccacatttatggaccatga

SEQ ID NO: 225662 - DNA, 25 bp, Probe Sequence
gaaatgaaatctgctgtggactaca

SEQ ID NO: 225663 - DNA, 25 bp, Probe Sequence
gaaatggcaactgtgtggataaata

SEQ ID NO: 225664 - DNA, 25 bp, Probe Sequence
gacaaggcaaacaatggctgtaagt

SEQ ID NO: 225665 - DNA, 25 bp, Probe Sequence
gaaaggcagcaacaggtggaagctg

SEQ ID NO: 225666 - DNA, 25 bp, Probe Sequence
gaaagtgagaagtaactgctaatgg

SEQ ID NO: 225667 - DNA, 25 bp, Probe Sequence
gaaatgtagacagcactcgataatc

SEQ ID NO: 225668 - DNA, 25 bp, Probe Sequence
gaaatctgaagagcagctcaaagtc

SEQ ID NO: 225669 - DNA, 25 bp, Probe Sequence
gaaattagaacttccatacactgct

SEQ ID NO: 225670 - DNA, 25 bp, Probe Sequence
gaaaggaaagtatatagcagtctag

SEQ ID NO: 225671 - DNA, 25 bp, Probe Sequence
gaaaggggagttgatagtctcataa

SEQ ID NO: 225672 - DNA, 25 bp, Probe Sequence
gaaagggacttacttaactgcataa

SEQ ID NO: 225673 - DNA, 25 bp, Probe Sequence
gacaatgggtgattacaaaacgaaa

SEQ ID NO: 225674 - DNA, 25 bp, Probe Sequence
gacaatgtggtctaccgatacctgt

SEQ ID NO: 225675 - DNA, 25 bp, Probe Sequence
gaaatctggccaagtctgtaactgt

SEQ ID NO: 225676 - DNA, 25 bp, Probe Sequence
gaaatgctgggcaatgctcgggcct

SEQ ID NO: 225677 - DNA, 25 bp, Probe Sequence
gaaatggaggcttcgtggagctgct

SEQ ID NO: 225678 - DNA, 25 bp, Probe Sequence
gaaagggacgacgggagctgcatga

SEQ ID NO: 225679 - DNA, 25 bp, Probe Sequence
gaaagtgggcgaggctgtgcacaag

SEQ ID NO: 225680 - DNA, 25 bp, Probe Sequence
gaaagtgcagatcaccttgcacatg

SEQ ID NO: 225681 - DNA, 25 bp, Probe Sequence
gaaagtggcagttccttacagccct

SEQ ID NO: 225682 - DNA, 25 bp, Probe Sequence
gaaatgtctgtttacgtcaacccac

SEQ ID NO: 225683 - DNA, 25 bp, Probe Sequence
gaaatgtctgtactgatcctcaacc

SEQ ID NO: 225684 - DNA, 25 bp, Probe Sequence
gaaatgtctgtactgatcctcaacc

SEQ ID NO: 225685 - DNA, 25 bp, Probe Sequence
gaaatgtgttagcctcagacactac

SEQ ID NO: 225686 - DNA, 25 bp, Probe Sequence
gacaagttcaagctcaacaagtcag

SEQ ID NO: 225687 - DNA, 25 bp, Probe Sequence
gacaattatctgtgtcaaaagccag

SEQ ID NO: 225688 - DNA, 25 bp, Probe Sequence
gaaatgtactactaaagagcactag

SEQ ID NO: 225689 - DNA, 25 bp, Probe Sequence
gaaatgaacaccttgaatagcacta

SEQ ID NO: 225690 - DNA, 25 bp, Probe Sequence
gacacatgaagcccactaaactatg

SEQ ID NO: 225691 - DNA, 25 bp, Probe Sequence
gacacatcagttcccggaacttatg

SEQ ID NO: 225692 - DNA, 25 bp, Probe Sequence
gaaatctacatccaccaaaattgtg

SEQ ID NO: 225693 - DNA, 25 bp, Probe Sequence
gaaatggacatcgctaaacagttac

SEQ ID NO: 225694 - DNA, 25 bp, Probe Sequence
gaaatgtactcgggcgacaccttac

SEQ ID NO: 225695 - DNA, 25 bp, Probe Sequence
gaaaggacaccaggagtcacttcta

SEQ ID NO: 225696 - DNA, 25 bp, Probe Sequence
gaaagtggcacaccaagttcctcta

SEQ ID NO: 225697 - DNA, 25 bp, Probe Sequence
gaaattgtcaagcatgagttcccta

SEQ ID NO: 225698 - DNA, 25 bp, Probe Sequence
gaaatgtatacgctgggaatcacta

SEQ ID NO: 225699 - DNA, 25 bp, Probe Sequence
gaaattatacagatagagttccata

SEQ ID NO: 225700 - DNA, 25 bp, Probe Sequence
gaaatctcaatatttaggttacagg

SEQ ID NO: 225701 - DNA, 25 bp, Probe Sequence
gaaatcgcattattttgaatgtgaa

SEQ ID NO: 225702 - DNA, 25 bp, Probe Sequence
gaaatcagcattccaattagtgttg

SEQ ID NO: 225703 - DNA, 25 bp, Probe Sequence
gaaatcagctcatggcttaggatgg

SEQ ID NO: 225704 - DNA, 25 bp, Probe Sequence
gaaataccaagggtggagatgctcc

SEQ ID NO: 225705 - DNA, 25 bp, Probe Sequence
gaaatgcagcaatgggtggagaccc

SEQ ID NO: 225706 - DNA, 25 bp, Probe Sequence
gaaatgagagagcaggggcaccccc

SEQ ID NO: 225707 - DNA, 25 bp, Probe Sequence
gacaaattacgaaagtgctccccca

SEQ ID NO: 225708 - DNA, 25 bp, Probe Sequence
gacaaattacgaaagtgctccccca

SEQ ID NO: 225709 - DNA, 25 bp, Probe Sequence
gacagaacaaaacagggacctgcca

SEQ ID NO: 225710 - DNA, 25 bp, Probe Sequence
gacacaaccagaaaaggcgtaaaca

SEQ ID NO: 225711 - DNA, 25 bp, Probe Sequence
gacaaaccaacaaaagctttattca

SEQ ID NO: 225712 - DNA, 25 bp, Probe Sequence
gacaaacacaaagaaactataccat

SEQ ID NO: 225713 - DNA, 25 bp, Probe Sequence
gacaagaaaggatattcattatttt

SEQ ID NO: 225714 - DNA, 25 bp, Probe Sequence
gaaatgaaaggattgcccgatttta

SEQ ID NO: 225715 - DNA, 25 bp, Probe Sequence
gaaataaaatatagcccaacattta

SEQ ID NO: 225716 - DNA, 25 bp, Probe Sequence
gaaattcaaacaactcctccattta

SEQ ID NO: 225717 - DNA, 25 bp, Probe Sequence
gaaattataaatgtcccttgttaca

SEQ ID NO: 225718 - DNA, 25 bp, Probe Sequence
gaaatttggaacacctatacctaca

SEQ ID NO: 225719 - DNA, 25 bp, Probe Sequence
gaaatgtgggaagacgctgacctct

SEQ ID NO: 225720 - DNA, 25 bp, Probe Sequence
gaaagtgtggagacaggcctgaagc

SEQ ID NO: 225721 - DNA, 25 bp, Probe Sequence
gaaaggtctgctagggactggagct

SEQ ID NO: 225722 - DNA, 25 bp, Probe Sequence
gaaaggacactctggacttcagcca

SEQ ID NO: 225723 - DNA, 25 bp, Probe Sequence
gaaaggacactctggacttcagcca

SEQ ID NO: 225724 - DNA, 25 bp, Probe Sequence
gaaaggacactctggacttcagcca

SEQ ID NO: 225725 - DNA, 25 bp, Probe Sequence
gaaaggcacttggggtcttatctgt

SEQ ID NO: 225726 - DNA, 25 bp, Probe Sequence
gaaaggatattggccctcctacaat

SEQ ID NO: 225727 - DNA, 25 bp, Probe Sequence
gaaaggatatgttactcctgtcaaa

SEQ ID NO: 225728 - DNA, 25 bp, Probe Sequence
gaaagggatgtatgtcgctgtccaa

SEQ ID NO: 225729 - DNA, 25 bp, Probe Sequence
gaaagggatgtatgtcgctgtccaa

SEQ ID NO: 225730 - DNA, 25 bp, Probe Sequence
gaaaggcagaaagggccttccaagt

SEQ ID NO: 225731 - DNA, 25 bp, Probe Sequence
gaaagggagcaagagttgtccagag

SEQ ID NO: 225732 - DNA, 25 bp, Probe Sequence
gaaagggagcaagagttgtccagag

SEQ ID NO: 225733 - DNA, 25 bp, Probe Sequence
gaaatggtacactgactaatccaga

SEQ ID NO: 225734 - DNA, 25 bp, Probe Sequence
gaaatgtataccgtatctatctacc

SEQ ID NO: 225735 - DNA, 25 bp, Probe Sequence
gaaatgctgatacatctgatctatc

SEQ ID NO: 225736 - DNA, 25 bp, Probe Sequence
gaaatcttcaaggtgaccatgcccc

SEQ ID NO: 225737 - DNA, 25 bp, Probe Sequence
gaaatgcagatgtacgtgacaatga

SEQ ID NO: 225738 - DNA, 25 bp, Probe Sequence
gaaatgatgagctacgccttgatga

SEQ ID NO: 225739 - DNA, 25 bp, Probe Sequence
gaaatgatagcgtgcagtagagagc

SEQ ID NO: 225740 - DNA, 25 bp, Probe Sequence
gaaatctatcacccagtcatgtgca

SEQ ID NO: 225741 - DNA, 25 bp, Probe Sequence
gacaagctgagcaccgttgtaacca

SEQ ID NO: 225742 - DNA, 25 bp, Probe Sequence
gacaactgctgcatgcagctggtgc

SEQ ID NO: 225743 - DNA, 25 bp, Probe Sequence
gacaacctgcagtcgggtgaggtga

SEQ ID NO: 225744 - DNA, 25 bp, Probe Sequence
gacaccggcgtgggaatgtgggaac

SEQ ID NO: 225745 - DNA, 25 bp, Probe Sequence
gacacggatccgggacaggggaagg

SEQ ID NO: 225746 - DNA, 25 bp, Probe Sequence
gaaatggcacctcgaaaggggaagg

SEQ ID NO: 225747 - DNA, 25 bp, Probe Sequence
gaaatggccgtgaaaaatgcctgaa

SEQ ID NO: 225748 - DNA, 25 bp, Probe Sequence
gaaaggcgtggaatatcaagggaag

SEQ ID NO: 225749 - DNA, 25 bp, Probe Sequence
gaaaggcgatggctacgtggacaca

SEQ ID NO: 225750 - DNA, 25 bp, Probe Sequence
gaaaggcgatgaccagagccggcaa

SEQ ID NO: 225751 - DNA, 25 bp, Probe Sequence
gacaaggactggaggccagccatca

SEQ ID NO: 225752 - DNA, 25 bp, Probe Sequence
gaaaggcatcggtgccacgcatctt

SEQ ID NO: 225753 - DNA, 25 bp, Probe Sequence
gaaaggtgacgattctcactcacct

SEQ ID NO: 225754 - DNA, 25 bp, Probe Sequence
gaaaggtgctttactgttcacctgc

SEQ ID NO: 225755 - DNA, 25 bp, Probe Sequence
gaaatgtttgtcactcttactgcac

SEQ ID NO: 225756 - DNA, 25 bp, Probe Sequence
gaaatatctgtgaaccttctttctg

SEQ ID NO: 225757 - DNA, 25 bp, Probe Sequence
gaaatagctggtcctttttcgggag

SEQ ID NO: 225758 - DNA, 25 bp, Probe Sequence
gaaatacaggggcttaccaggctgg

SEQ ID NO: 225759 - DNA, 25 bp, Probe Sequence
gaaatacagtgggaaaaccagtcgg

SEQ ID NO: 225760 - DNA, 25 bp, Probe Sequence
gaaatatcaaggttctaaaattcgg

SEQ ID NO: 225761 - DNA, 25 bp, Probe Sequence
gaaatgcccaggatgctataaaatc

SEQ ID NO: 225762 - DNA, 25 bp, Probe Sequence
gaaatcagtgggcctgctattaaat

SEQ ID NO: 225763 - DNA, 25 bp, Probe Sequence
gaaatcgctggtactctgaataaat

SEQ ID NO: 225764 - DNA, 25 bp, Probe Sequence
gaaatatctggcatcttgttggaat

SEQ ID NO: 225765 - DNA, 25 bp, Probe Sequence
gaaatccgccactcaatgggatatg

SEQ ID NO: 225766 - DNA, 25 bp, Probe Sequence
gacaatcccctaacaacatggtagt

SEQ ID NO: 225767 - DNA, 25 bp, Probe Sequence
gaaattccctaagaacagagcagta

SEQ ID NO: 225768 - DNA, 25 bp, Probe Sequence
gaaattctcccaggagcaagaggag

SEQ ID NO: 225769 - DNA, 25 bp, Probe Sequence
gaaatggctcctgtatcacatacgg

SEQ ID NO: 225770 - DNA, 25 bp, Probe Sequence
gaaatggccagcgcatatacaacag

SEQ ID NO: 225771 - DNA, 25 bp, Probe Sequence
gaaaggcaggcctatttcatcacaa

SEQ ID NO: 225772 - DNA, 25 bp, Probe Sequence
gaaaggaacgatattctcatcatca

SEQ ID NO: 225773 - DNA, 25 bp, Probe Sequence
gaaaggactcagtgtcctctctgag

SEQ ID NO: 225774 - DNA, 25 bp, Probe Sequence
gacaacaacaagtgtgccttctgta

SEQ ID NO: 225775 - DNA, 25 bp, Probe Sequence
gaaataactcactgatacctgcgtt

SEQ ID NO: 225776 - DNA, 25 bp, Probe Sequence
gaaatgaatctgtcattataccaga

SEQ ID NO: 225777 - DNA, 25 bp, Probe Sequence
gaaatgaccgtatgtcaccaagaga

SEQ ID NO: 225778 - DNA, 25 bp, Probe Sequence
gacaagtggcgttcagccacccgag

SEQ ID NO: 225779 - DNA, 25 bp, Probe Sequence
gataaggactgagccaatcctgcca

SEQ ID NO: 225780 - DNA, 25 bp, Probe Sequence
gaaaggactgaataatttggctaag

SEQ ID NO: 225781 - DNA, 25 bp, Probe Sequence
gaaaggactgaataatttggctaag

SEQ ID NO: 225782 - DNA, 25 bp, Probe Sequence
gaaaggacagttcacaatctagtaa

SEQ ID NO: 225783 - DNA, 25 bp, Probe Sequence
gaaataggatttcatcaacatagtg

SEQ ID NO: 225784 - DNA, 25 bp, Probe Sequence
gacaacagtgcaatttatgtacaag

SEQ ID NO: 225785 - DNA, 25 bp, Probe Sequence
gacagaacaatactttgtctcaaaa

SEQ ID NO: 225786 - DNA, 25 bp, Probe Sequence
gacaaaaataggatgcttaaagcca

SEQ ID NO: 225787 - DNA, 25 bp, Probe Sequence
gacaaaaattacagtgtgaacaaga

SEQ ID NO: 225788 - DNA, 25 bp, Probe Sequence
gaaatcctatttcagtggaccaaca

SEQ ID NO: 225789 - DNA, 25 bp, Probe Sequence
gaaatcctttcctagagcatgactc

SEQ ID NO: 225790 - DNA, 25 bp, Probe Sequence
gaaatgcatctgttacataaatgag

SEQ ID NO: 225791 - DNA, 25 bp, Probe Sequence
gaaatgataggctcatgaacatgat

SEQ ID NO: 225792 - DNA, 25 bp, Probe Sequence
gaaatgtcagccatgcaagtgcaat

SEQ ID NO: 225793 - DNA, 25 bp, Probe Sequence
gaaatgctgccagttaagctaactt

SEQ ID NO: 225794 - DNA, 25 bp, Probe Sequence
gaaatggcatcattataagctatga

SEQ ID NO: 225795 - DNA, 25 bp, Probe Sequence
gaaattgacagaagacagcttagaa

SEQ ID NO: 225796 - DNA, 25 bp, Probe Sequence
gagaagtccacaacacgtgtaaact

SEQ ID NO: 225797 - DNA, 25 bp, Probe Sequence
gaaatgtcccagaggagtgaatcct

SEQ ID NO: 225798 - DNA, 25 bp, Probe Sequence
gaaatgccccaaaggagactgaccc

SEQ ID NO: 225799 - DNA, 25 bp, Probe Sequence
gaaatgctgccatagaggaacccat

SEQ ID NO: 225800 - DNA, 25 bp, Probe Sequence
gaaatggccaagctggacgccaact

SEQ ID NO: 225801 - DNA, 25 bp, Probe Sequence
gaaatgtgcgttttggaaccaagct

SEQ ID NO: 225802 - DNA, 25 bp, Probe Sequence
gaaatatagacctgtgaaaagacgt

SEQ ID NO: 225803 - DNA, 25 bp, Probe Sequence
gaaattctatcccgtgaccagagaa

SEQ ID NO: 225804 - DNA, 25 bp, Probe Sequence
gaaatgtcattgagcgactccagga

SEQ ID NO: 225805 - DNA, 25 bp, Probe Sequence
gaaatgtgcttggaggcctgatcag

SEQ ID NO: 225806 - DNA, 25 bp, Probe Sequence
gaaatatccaggctccatgacagtc

SEQ ID NO: 225807 - DNA, 25 bp, Probe Sequence
gaaattctcagtagtgacagtcaac

SEQ ID NO: 225808 - DNA, 25 bp, Probe Sequence
gaaatgtgtacaggtgtcaccatca

SEQ ID NO: 225809 - DNA, 25 bp, Probe Sequence
gacatcatgttattgcagctgagca

SEQ ID NO: 225810 - DNA, 25 bp, Probe Sequence
gacatcgtcacagtgggcgagtgcc

SEQ ID NO: 225811 - DNA, 25 bp, Probe Sequence
gacaaggacacagttcgaggccagg

SEQ ID NO: 225812 - DNA, 25 bp, Probe Sequence
gacaaggacacagttcgaggccagg

SEQ ID NO: 225813 - DNA, 25 bp, Probe Sequence
gaaaggcaactgggaggcgacggag

SEQ ID NO: 225814 - DNA, 25 bp, Probe Sequence
gacaaggcagaccgggaagagggca

SEQ ID NO: 225815 - DNA, 25 bp, Probe Sequence
gaaatggatgacttggagctggagg

SEQ ID NO: 225816 - DNA, 25 bp, Probe Sequence
gaaatgatgcttctgctcaggaatg

SEQ ID NO: 225817 - DNA, 25 bp, Probe Sequence
gaaatgtctctctgtcatggaagcc

SEQ ID NO: 225818 - DNA, 25 bp, Probe Sequence
gaaatgtttctttcgaaaggctaga

SEQ ID NO: 225819 - DNA, 25 bp, Probe Sequence
gaaattatattaacgaccctgctaa

SEQ ID NO: 225820 - DNA, 25 bp, Probe Sequence
gacaaaattctaatggggcctgaaa

SEQ ID NO: 225821 - DNA, 25 bp, Probe Sequence
gacaaagatgttttggttctctgaa

SEQ ID NO: 225822 - DNA, 25 bp, Probe Sequence
gacaccattaacaggtctttgaaat

SEQ ID NO: 225823 - DNA, 25 bp, Probe Sequence
gacaaagaaatcagcctttccaaga

SEQ ID NO: 225824 - DNA, 25 bp, Probe Sequence
gaaaggagccaaactctttcccaga

SEQ ID NO: 225825 - DNA, 25 bp, Probe Sequence
gaaatggacgaatgcttttctgccc

SEQ ID NO: 225826 - DNA, 25 bp, Probe Sequence
gaaatggaaacaccgttgtcagcac

SEQ ID NO: 225827 - DNA, 25 bp, Probe Sequence
gaaatgaaaaccctgttgctgcgtc

SEQ ID NO: 225828 - DNA, 25 bp, Probe Sequence
gaaatgaaaactcctctgatgtggt

SEQ ID NO: 225829 - DNA, 25 bp, Probe Sequence
gaaatcaaccacactcagctgagtt

SEQ ID NO: 225830 - DNA, 25 bp, Probe Sequence
gaaatgaatctaattgctactgacc

SEQ ID NO: 225831 - DNA, 25 bp, Probe Sequence
gaaatgtatcttatgctctcatgac

SEQ ID NO: 225832 - DNA, 25 bp, Probe Sequence
gaaatgattttcaatgccgagagag

SEQ ID NO: 225833 - DNA, 25 bp, Probe Sequence
gaaatgtattatcaccagcagacac

SEQ ID NO: 225834 - DNA, 25 bp, Probe Sequence
gaaatgtttttcaatcaggatcatc

SEQ ID NO: 225835 - DNA, 25 bp, Probe Sequence
gaaatgtggatcatcttgtggaagc

SEQ ID NO: 225836 - DNA, 25 bp, Probe Sequence
gaaatctggatgtttccttcataca

SEQ ID NO: 225837 - DNA, 25 bp, Probe Sequence
gaaattggagactattgttctaagt

SEQ ID NO: 225838 - DNA, 25 bp, Probe Sequence
gaaatgtggacctggattcttgaag

SEQ ID NO: 225839 - DNA, 25 bp, Probe Sequence
gaaatgggaatcatggcctcttgaa

SEQ ID NO: 225840 - DNA, 25 bp, Probe Sequence
gaaatggtaagtagccctctaagac

SEQ ID NO: 225841 - DNA, 25 bp, Probe Sequence
gacaaagtaattcctctcactaaac

SEQ ID NO: 225842 - DNA, 25 bp, Probe Sequence
gacaaaaatactctaattctaacca

SEQ ID NO: 225843 - DNA, 25 bp, Probe Sequence
gacaaaagcaaccctacctcaaagc

SEQ ID NO: 225844 - DNA, 25 bp, Probe Sequence
gacaaaaccatctctactaaaaata

SEQ ID NO: 225845 - DNA, 25 bp, Probe Sequence
gacaattcccatattaataaagaag

SEQ ID NO: 225846 - DNA, 25 bp, Probe Sequence
gaaatgttctgcactgattaaaaaa

SEQ ID NO: 225847 - DNA, 25 bp, Probe Sequence
gaaatgtgggccgagattaagttaa

SEQ ID NO: 225848 - DNA, 25 bp, Probe Sequence
gaaatgggagcagttatttattttt

SEQ ID NO: 225849 - DNA, 25 bp, Probe Sequence
gaaatgaggagcctgtcttttaata

SEQ ID NO: 225850 - DNA, 25 bp, Probe Sequence
gacaagactagcctgtcacgtttgt

SEQ ID NO: 225851 - DNA, 25 bp, Probe Sequence
gacagagtgtgggcttaggtttggg

SEQ ID NO: 225852 - DNA, 25 bp, Probe Sequence
gacacggtgggtaaaggatgtgggc

SEQ ID NO: 225853 - DNA, 25 bp, Probe Sequence
gacactggaggtcaaccggaggctg

SEQ ID NO: 225854 - DNA, 25 bp, Probe Sequence
gacacggaggactgttcgggattca

SEQ ID NO: 225855 - DNA, 25 bp, Probe Sequence
gacaagcatgggtgtgtccgggacc

SEQ ID NO: 225856 - DNA, 25 bp, Probe Sequence
gacaagcagcctgggcgtacggtac

SEQ ID NO: 225857 - DNA, 25 bp, Probe Sequence
gacagcaacgggaacttcctgtaca

SEQ ID NO: 225858 - DNA, 25 bp, Probe Sequence
gacaacagaggaaacttccaagcca

SEQ ID NO: 225859 - DNA, 25 bp, Probe Sequence
gacaacatctatcccctttaaggat

SEQ ID NO: 225860 - DNA, 25 bp, Probe Sequence
gacaggacagaggacccttaaggat

SEQ ID NO: 225861 - DNA, 25 bp, Probe Sequence
gacagcccagaaatcccaaaacaga

SEQ ID NO: 225862 - DNA, 25 bp, Probe Sequence
gacagcccaaatatcctcggaagag

SEQ ID NO: 225863 - DNA, 25 bp, Probe Sequence
gacaccaaaatcacgtgtgaggaga

SEQ ID NO: 225864 - DNA, 25 bp, Probe Sequence
gacacacaacaaattcttaaggagc

SEQ ID NO: 225865 - DNA, 25 bp, Probe Sequence
gacaaacagcaaatactcaacaggg

SEQ ID NO: 225866 - DNA, 25 bp, Probe Sequence
gataaaggcgagcaccgtcaggagc

SEQ ID NO: 225867 - DNA, 25 bp, Probe Sequence
gataaaggcgagcaccgtcaggagc

SEQ ID NO: 225868 - DNA, 25 bp, Probe Sequence
gatcataacggagcccggagggcga

SEQ ID NO: 225869 - DNA, 25 bp, Probe Sequence
gacaaagcggagaacgctggtgggc

SEQ ID NO: 225870 - DNA, 25 bp, Probe Sequence
gacaaacggatgcacccgtctttag

SEQ ID NO: 225871 - DNA, 25 bp, Probe Sequence
gacaaacgggccctcaaatttatca

SEQ ID NO: 225872 - DNA, 25 bp, Probe Sequence
gaaaggcctggccacgaaatctttc

SEQ ID NO: 225873 - DNA, 25 bp, Probe Sequence
gaaattcttctcccaaaattatttg

SEQ ID NO: 225874 - DNA, 25 bp, Probe Sequence
gaaattttctgacaagaagttgttc

SEQ ID NO: 225875 - DNA, 25 bp, Probe Sequence
gaaatgtgttagctaaacgttgttg

SEQ ID NO: 225876 - DNA, 25 bp, Probe Sequence
gaaatgcttccacagctaacgttgt

SEQ ID NO: 225877 - DNA, 25 bp, Probe Sequence
gaaatgtcctaatttaacatcttgt

SEQ ID NO: 225878 - DNA, 25 bp, Probe Sequence
gaaatccgtctagttaacatttcaa

SEQ ID NO: 225879 - DNA, 25 bp, Probe Sequence
gaaatccatgtttgctattggcttt

SEQ ID NO: 225880 - DNA, 25 bp, Probe Sequence
gaaatccatgtttgctattggcttt

SEQ ID NO: 225881 - DNA, 25 bp, Probe Sequence
gaaatggagtctcgctttgttgttc

SEQ ID NO: 225882 - DNA, 25 bp, Probe Sequence
gacagtgggtctattcttcattagc

SEQ ID NO: 225883 - DNA, 25 bp, Probe Sequence
gacacctggttgattgtcctgatcc

SEQ ID NO: 225884 - DNA, 25 bp, Probe Sequence
gacaacgcgcttttgctgaactgtc

SEQ ID NO: 225885 - DNA, 25 bp, Probe Sequence
gaaatgccttgtttgggagttgccc

SEQ ID NO: 225886 - DNA, 25 bp, Probe Sequence
gacaggccttgggcagtgggttggg

SEQ ID NO: 225887 - DNA, 25 bp, Probe Sequence
gacaaccattggggtggggctgcat

SEQ ID NO: 225888 - DNA, 25 bp, Probe Sequence
gaaattcatccgagtggcactggca

SEQ ID NO: 225889 - DNA, 25 bp, Probe Sequence
gaaatctattcgaagtatacctgcc

SEQ ID NO: 225890 - DNA, 25 bp, Probe Sequence
gacaatccatttctgtttcctgtcc

SEQ ID NO: 225891 - DNA, 25 bp, Probe Sequence
gaaatactgtttatatcccgtcctc

SEQ ID NO: 225892 - DNA, 25 bp, Probe Sequence
gaaatgagtttaattcacccttcac

SEQ ID NO: 225893 - DNA, 25 bp, Probe Sequence
gaaataatttagttccttattctca

SEQ ID NO: 225894 - DNA, 25 bp, Probe Sequence
gacaaagtttgacaccttgataccc

SEQ ID NO: 225895 - DNA, 25 bp, Probe Sequence
gacaaagtttgacaccttgataccc

SEQ ID NO: 225896 - DNA, 25 bp, Probe Sequence
gacaaagttgtgacccattttactc

SEQ ID NO: 225897 - DNA, 25 bp, Probe Sequence
gacaaaagtgttgtcttcactggct

SEQ ID NO: 225898 - DNA, 25 bp, Probe Sequence
gacaagaagtggtacccatagccag

SEQ ID NO: 225899 - DNA, 25 bp, Probe Sequence
gaaatgaaccatgatcccaatccaa

SEQ ID NO: 225900 - DNA, 25 bp, Probe Sequence
gaaatgaacaattgtctgccccaca

SEQ ID NO: 225901 - DNA, 25 bp, Probe Sequence
gaaatgcaaccatacatgggctcca

SEQ ID NO: 225902 - DNA, 25 bp, Probe Sequence
gaaatgcaacctcactgttatctac

SEQ ID NO: 225903 - DNA, 25 bp, Probe Sequence
gaaatgtaccatcaaatgttaacag

SEQ ID NO: 225904 - DNA, 25 bp, Probe Sequence
gaaatgttctctgcaaaataattca

SEQ ID NO: 225905 - DNA, 25 bp, Probe Sequence
gaaatgctctatttacaaatttaca

SEQ ID NO: 225906 - DNA, 25 bp, Probe Sequence
gacactctctggctaatattttaat

SEQ ID NO: 225907 - DNA, 25 bp, Probe Sequence
gaaatcttagcggaaattatatatt

SEQ ID NO: 225908 - DNA, 25 bp, Probe Sequence
gaaatttacgtataagtcatcgcta

SEQ ID NO: 225909 - DNA, 25 bp, Probe Sequence
gaaatttaccaaaacccatgccatg

SEQ ID NO: 225910 - DNA, 25 bp, Probe Sequence
gacacacttcccatagaccgtgtca

SEQ ID NO: 225911 - DNA, 25 bp, Probe Sequence
gaaatctttgctgttcaccagatgt

SEQ ID NO: 225912 - DNA, 25 bp, Probe Sequence
gacacctttgcttttctaatagttc

SEQ ID NO: 225913 - DNA, 25 bp, Probe Sequence
gacacctctggtttttcaataccaa

SEQ ID NO: 225914 - DNA, 25 bp, Probe Sequence
gacaccgtagtaagaggacttccac

SEQ ID NO: 225915 - DNA, 25 bp, Probe Sequence
gacaacgatgatatgaaggcctttt

SEQ ID NO: 225916 - DNA, 25 bp, Probe Sequence
gaaatccctgagtatcaggccttgt

SEQ ID NO: 225917 - DNA, 25 bp, Probe Sequence
gaaatccctgagtatcaggccttgt

SEQ ID NO: 225918 - DNA, 25 bp, Probe Sequence
gaaatccctgagtatcaggccttgt

SEQ ID NO: 225919 - DNA, 25 bp, Probe Sequence
gaaatactctgaacaagtccgtgat

SEQ ID NO: 225920 - DNA, 25 bp, Probe Sequence
gaaataccatgcacagagtccttaa

SEQ ID NO: 225921 - DNA, 25 bp, Probe Sequence
gaaatacctaagaagcaccttaaga

SEQ ID NO: 225922 - DNA, 25 bp, Probe Sequence
gaaatacactaagagcagccacaaa

SEQ ID NO: 225923 - DNA, 25 bp, Probe Sequence
gaaatacacttcaaaccaatcaaaa

SEQ ID NO: 225924 - DNA, 25 bp, Probe Sequence
gaaatcaaacctgccgcaacagaaa

SEQ ID NO: 225925 - DNA, 25 bp, Probe Sequence
gaaatcacaacgtaactcaatcagg

SEQ ID NO: 225926 - DNA, 25 bp, Probe Sequence
gaaattccacagtcaactaatgcga

SEQ ID NO: 225927 - DNA, 25 bp, Probe Sequence
gaaatgaaccagacacactgattgg

SEQ ID NO: 225928 - DNA, 25 bp, Probe Sequence
gaaatgagcccaagcacacatgcat

SEQ ID NO: 225929 - DNA, 25 bp, Probe Sequence
gaaatgcccagtaatcacctcaggc

SEQ ID NO: 225930 - DNA, 25 bp, Probe Sequence
gaaatgcccaaaaccttcagagatt

SEQ ID NO: 225931 - DNA, 25 bp, Probe Sequence
gacaatccaaaaaccttctactggg

SEQ ID NO: 225932 - DNA, 25 bp, Probe Sequence
gaaatctcaaaaggctttctgaagg

SEQ ID NO: 225933 - DNA, 25 bp, Probe Sequence
gaaattccagaaggctatgtcccag

SEQ ID NO: 225934 - DNA, 25 bp, Probe Sequence
gaaattgctagatcgtctcacacca

SEQ ID NO: 225935 - DNA, 25 bp, Probe Sequence
gaaatcagcaactcttcaatcccaa

SEQ ID NO: 225936 - DNA, 25 bp, Probe Sequence
gaaatcatggaatctcttaccaaaa

SEQ ID NO: 225937 - DNA, 25 bp, Probe Sequence
gaaatgagctcatgactcattaaaa

SEQ ID NO: 225938 - DNA, 25 bp, Probe Sequence
gaaatgcttcagtcctcacatgata

SEQ ID NO: 225939 - DNA, 25 bp, Probe Sequence
gaaatatattgttcatccatgcatt

SEQ ID NO: 225940 - DNA, 25 bp, Probe Sequence
gaaatagtatgtttgtagcattgga

SEQ ID NO: 225941 - DNA, 25 bp, Probe Sequence
gaaatagtcttgtggactgtgtcag

SEQ ID NO: 225942 - DNA, 25 bp, Probe Sequence
gaaatattattgctggaggcgtccc

SEQ ID NO: 225943 - DNA, 25 bp, Probe Sequence
gagaccctcactgctggggagtccc

SEQ ID NO: 225944 - DNA, 25 bp, Probe Sequence
gagctccctttgtggggaacttgcc

SEQ ID NO: 225945 - DNA, 25 bp, Probe Sequence
gacacccatttgcttggggaattcc

SEQ ID NO: 225946 - DNA, 25 bp, Probe Sequence
gacaatcgttagtttgaggaatttt

SEQ ID NO: 225947 - DNA, 25 bp, Probe Sequence
gaaatccttttgttaagagattctt

SEQ ID NO: 225948 - DNA, 25 bp, Probe Sequence
gaaatacttttgtaagcagctgttt

SEQ ID NO: 225949 - DNA, 25 bp, Probe Sequence
gaaatactggttttaccgcttgctg

SEQ ID NO: 225950 - DNA, 25 bp, Probe Sequence
gaaatcttggtttgatcaaatcttt

SEQ ID NO: 225951 - DNA, 25 bp, Probe Sequence
gaaatgttgatcctttccatattta

SEQ ID NO: 225952 - DNA, 25 bp, Probe Sequence
gaaattgattccttactctattata

SEQ ID NO: 225953 - DNA, 25 bp, Probe Sequence
gaaatatgcccacttggtggatgtt

SEQ ID NO: 225954 - DNA, 25 bp, Probe Sequence
gaaatattccactggggatgaggga

SEQ ID NO: 225955 - DNA, 25 bp, Probe Sequence
gaaatactgccctgaggctaggggc

SEQ ID NO: 225956 - DNA, 25 bp, Probe Sequence
gaaattcgagcatagaggccaggtg

SEQ ID NO: 225957 - DNA, 25 bp, Probe Sequence
gaaattatggttaacctcagctgtg

SEQ ID NO: 225958 - DNA, 25 bp, Probe Sequence
gaaattagagagaatcccttgtgga

SEQ ID NO: 225959 - DNA, 25 bp, Probe Sequence
gacaactagaaaatgcctttattga

SEQ ID NO: 225960 - DNA, 25 bp, Probe Sequence
gaaattagcctttgccttattctgt

SEQ ID NO: 225961 - DNA, 25 bp, Probe Sequence
gaaattagcctttgccttattctgt

SEQ ID NO: 225962 - DNA, 25 bp, Probe Sequence
gaaataacctttcattctttgctga

SEQ ID NO: 225963 - DNA, 25 bp, Probe Sequence
gaaatacagcccctaaattggtctc

SEQ ID NO: 225964 - DNA, 25 bp, Probe Sequence
gaaatgaccacgtgaaatttgcctc

SEQ ID NO: 225965 - DNA, 25 bp, Probe Sequence
gaaatagcccgtaaagagtatccct

SEQ ID NO: 225966 - DNA, 25 bp, Probe Sequence
gaaatgcactccagaagaaaatctc

SEQ ID NO: 225967 - DNA, 25 bp, Probe Sequence
gaaatcactccagaagcaaagacaa

SEQ ID NO: 225968 - DNA, 25 bp, Probe Sequence
gaaatctctagaacaacatcaaaaa

SEQ ID NO: 225969 - DNA, 25 bp, Probe Sequence
gaaatctctagaatcgacatatagt

SEQ ID NO: 225970 - DNA, 25 bp, Probe Sequence
gaaatttagcagaagaagacagtct

SEQ ID NO: 225971 - DNA, 25 bp, Probe Sequence
gaaatgcttatctgaaagtagtgct

SEQ ID NO: 225972 - DNA, 25 bp, Probe Sequence
gaaatacttatcccaatgaatgcgt

SEQ ID NO: 225973 - DNA, 25 bp, Probe Sequence
gaaattcttcatgaacataactctg

SEQ ID NO: 225974 - DNA, 25 bp, Probe Sequence
gaaatttccttccatagacagctgc

SEQ ID NO: 225975 - DNA, 25 bp, Probe Sequence
gacaatattcactttcaggtcggcc

SEQ ID NO: 225976 - DNA, 25 bp, Probe Sequence
gaaatgaatggctttgagtctggcg

SEQ ID NO: 225977 - DNA, 25 bp, Probe Sequence
gaaatcgatggtctgcagaagcttg

SEQ ID NO: 225978 - DNA, 25 bp, Probe Sequence
gaaataagcactctgcagcacacat

SEQ ID NO: 225979 - DNA, 25 bp, Probe Sequence
gaaataatgatcccagccagactga

SEQ ID NO: 225980 - DNA, 25 bp, Probe Sequence
gaaatcattatcttagccaccagaa

SEQ ID NO: 225981 - DNA, 25 bp, Probe Sequence
gaaataatactttgccagacaggaa

SEQ ID NO: 225982 - DNA, 25 bp, Probe Sequence
gaaattattctccgacagataggaa

SEQ ID NO: 225983 - DNA, 25 bp, Probe Sequence
gacaatttttcgctccatgatgcgt

SEQ ID NO: 225984 - DNA, 25 bp, Probe Sequence
gaaattgtgatttttcactgacagt

SEQ ID NO: 225985 - DNA, 25 bp, Probe Sequence
gaaattgtgtggttctcagtgatat

SEQ ID NO: 225986 - DNA, 25 bp, Probe Sequence
gaaatttctgagtcattgagtgtca

SEQ ID NO: 225987 - DNA, 25 bp, Probe Sequence
gaaatcttgctccacaaggatctca

SEQ ID NO: 225988 - DNA, 25 bp, Probe Sequence
gaaatcattcctacacaggccaagt

SEQ ID NO: 225989 - DNA, 25 bp, Probe Sequence
gaaatgcattgtcatcatcccgaac

SEQ ID NO: 225990 - DNA, 25 bp, Probe Sequence
gaaatgcattgtcatcatcccgaac

SEQ ID NO: 225991 - DNA, 25 bp, Probe Sequence
gacaagaagtcattaccggatacac

SEQ ID NO: 225992 - DNA, 25 bp, Probe Sequence
gacatagatcttgataccgaaacag

SEQ ID NO: 225993 - DNA, 25 bp, Probe Sequence
gaaatatgcttcaaaggtcaaacat

SEQ ID NO: 225994 - DNA, 25 bp, Probe Sequence
gaaatatcttcccgagctcagaatt

SEQ ID NO: 225995 - DNA, 25 bp, Probe Sequence
gaaatagcattcctcataccaatat

SEQ ID NO: 225996 - DNA, 25 bp, Probe Sequence
gaaatcagatgaaggccacccattc

SEQ ID NO: 225997 - DNA, 25 bp, Probe Sequence
gaaatcagatgaaggccacccattc

SEQ ID NO: 225998 - DNA, 25 bp, Probe Sequence
gaaatcagatgaaggccacccattc

SEQ ID NO: 225999 - DNA, 25 bp, Probe Sequence
gaaatcagatgaaggccacccattc

SEQ ID NO: 226000 - DNA, 25 bp, Probe Sequence
gaaatcagatgaaggccacccattc

SEQ ID NO: 226001 - DNA, 25 bp, Probe Sequence
gaaatcagatgaaggccacccattc

SEQ ID NO: 226002 - DNA, 25 bp, Probe Sequence
gaaatgccagaaacatgcccctata

SEQ ID NO: 226003 - DNA, 25 bp, Probe Sequence
gacaacaaaatttgcaatgcctcat

SEQ ID NO: 226004 - DNA, 25 bp, Probe Sequence
gaaataaagttattttctcattcca

SEQ ID NO: 226005 - DNA, 25 bp, Probe Sequence
gaaattccattttgttctctcttct

SEQ ID NO: 226006 - DNA, 25 bp, Probe Sequence
gacaactcgaataagtttgacttgt

SEQ ID NO: 226007 - DNA, 25 bp, Probe Sequence
gacaacctgaacaaaccatacctgt

SEQ ID NO: 226008 - DNA, 25 bp, Probe Sequence
gacaaaatgcccaaactggagccct

SEQ ID NO: 226009 - DNA, 25 bp, Probe Sequence
gacaaaaccctatctagtcaactgg

SEQ ID NO: 226010 - DNA, 25 bp, Probe Sequence
gaaatatttcccactaaagagcttg

SEQ ID NO: 226011 - DNA, 25 bp, Probe Sequence
gaaattatatcaggctttaccggtt

SEQ ID NO: 226012 - DNA, 25 bp, Probe Sequence
gaaattattcaaggcgtgatctctg

SEQ ID NO: 226013 - DNA, 25 bp, Probe Sequence
gaaattctgtgccatggcgtatatg

SEQ ID NO: 226014 - DNA, 25 bp, Probe Sequence
gacaaggcattgctgcgcagatttg

SEQ ID NO: 226015 - DNA, 25 bp, Probe Sequence
gacaagccttgaatccttttggcac

SEQ ID NO: 226016 - DNA, 25 bp, Probe Sequence
gacacatgccttgaagttttggaat

SEQ ID NO: 226017 - DNA, 25 bp, Probe Sequence
gaaatccttaagtacttatttattg

SEQ ID NO: 226018 - DNA, 25 bp, Probe Sequence
gaaatcccgtaaccactatttgttg

SEQ ID NO: 226019 - DNA, 25 bp, Probe Sequence
gaaatccacgtaacctttgctttct

SEQ ID NO: 226020 - DNA, 25 bp, Probe Sequence
gacttccaagttactattttttcag

SEQ ID NO: 226021 - DNA, 25 bp, Probe Sequence
gaaatgcctagtgtctattttatta

SEQ ID NO: 226022 - DNA, 25 bp, Probe Sequence
gacagacctagggacttcctacttg

SEQ ID NO: 226023 - DNA, 25 bp, Probe Sequence
gaaatccatagtggacttcatcaag

SEQ ID NO: 226024 - DNA, 25 bp, Probe Sequence
gaaatgcctatgacaagatatccaa

SEQ ID NO: 226025 - DNA, 25 bp, Probe Sequence
gaaatccatcataccattacctcat

SEQ ID NO: 226026 - DNA, 25 bp, Probe Sequence
gaaatctatttcaagctacaccatt

SEQ ID NO: 226027 - DNA, 25 bp, Probe Sequence
gaaattctttcaatgtgtcatccct

SEQ ID NO: 226028 - DNA, 25 bp, Probe Sequence
gacaattgtttgttggtctattctt

SEQ ID NO: 226029 - DNA, 25 bp, Probe Sequence
gacacagattttcatagtttccatt

SEQ ID NO: 226030 - DNA, 25 bp, Probe Sequence
gacaagattattgatggcgccccat

SEQ ID NO: 226031 - DNA, 25 bp, Probe Sequence
gacaaggtatatgagcagctggcca

SEQ ID NO: 226032 - DNA, 25 bp, Probe Sequence
gacaaggttccaggcagctggaatt

SEQ ID NO: 226033 - DNA, 25 bp, Probe Sequence
gacaagtacatcgccctggatgagt

SEQ ID NO: 226034 - DNA, 25 bp, Probe Sequence
gacaaggacagcagtcacaggagga

SEQ ID NO: 226035 - DNA, 25 bp, Probe Sequence
gacaagaaagggactgtggggtcca

SEQ ID NO: 226036 - DNA, 25 bp, Probe Sequence
gttaaaaaggctggcattgaggtcc

SEQ ID NO: 226037 - DNA, 25 bp, Probe Sequence
gtacaaaaaagcaggctggtaccgg

SEQ ID NO: 226038 - DNA, 25 bp, Probe Sequence
gtacaaggtaagcgtggcgttcttt

SEQ ID NO: 226039 - DNA, 25 bp, Probe Sequence
gtccaagtaaaccgctagcttgttg

SEQ ID NO: 226040 - DNA, 25 bp, Probe Sequence
gacatcaaaaaaatcgtagccttct

SEQ ID NO: 226041 - DNA, 25 bp, Probe Sequence
gacaaattaatttctgataactttt

SEQ ID NO: 226042 - DNA, 25 bp, Probe Sequence
gaaatattttattcagtaagattgt

SEQ ID NO: 226043 - DNA, 25 bp, Probe Sequence
gaaatcattgtaaagcagcgaagtc

SEQ ID NO: 226044 - DNA, 25 bp, Probe Sequence
gaaatcattgaacgtgcatgctttg

SEQ ID NO: 226045 - DNA, 25 bp, Probe Sequence
gaaatcagtgcaaacacatcttctg

SEQ ID NO: 226046 - DNA, 25 bp, Probe Sequence
gaaatcaagcataaatcacttcaac

SEQ ID NO: 226047 - DNA, 25 bp, Probe Sequence
gaaatttgcaaaatcacttagcagc

SEQ ID NO: 226048 - DNA, 25 bp, Probe Sequence
gaaatcaggaacatttttgcagctt

SEQ ID NO: 226049 - DNA, 25 bp, Probe Sequence
gacaattccaacattctttacttac

SEQ ID NO: 226050 - DNA, 25 bp, Probe Sequence
gaaatatccattcatttgctgtact

SEQ ID NO: 226051 - DNA, 25 bp, Probe Sequence
gacaaatcttcaggacttgtgaaat

SEQ ID NO: 226052 - DNA, 25 bp, Probe Sequence
gaaatatgctaaggaatctctgaag

SEQ ID NO: 226053 - DNA, 25 bp, Probe Sequence
gactcatgcattctggaatccgtga

SEQ ID NO: 226054 - DNA, 25 bp, Probe Sequence
gacaagcattagtgacaaaggcaga

SEQ ID NO: 226055 - DNA, 25 bp, Probe Sequence
gacaactattaataaatgcaatgtg

SEQ ID NO: 226056 - DNA, 25 bp, Probe Sequence
gacaacatgttaaaacttgccacgt

SEQ ID NO: 226057 - DNA, 25 bp, Probe Sequence
gaaatatggtatgaggtcgccactt

SEQ ID NO: 226058 - DNA, 25 bp, Probe Sequence
gaaatagtctggcagcctctacagc

SEQ ID NO: 226059 - DNA, 25 bp, Probe Sequence
gaaatcagcactgagaccatcaccc

SEQ ID NO: 226060 - DNA, 25 bp, Probe Sequence
gaaatcagagctgggacacagcgca

SEQ ID NO: 226061 - DNA, 25 bp, Probe Sequence
gaaatagactagaccaagcagaaga

SEQ ID NO: 226062 - DNA, 25 bp, Probe Sequence
gaaatcgttgaagcgagagaaaagc

SEQ ID NO: 226063 - DNA, 25 bp, Probe Sequence
gaaatccctgcaggaccaggaagag

SEQ ID NO: 226064 - DNA, 25 bp, Probe Sequence
gacaatccctcaggactagggacag

SEQ ID NO: 226065 - DNA, 25 bp, Probe Sequence
gaaattccttagtcatggtgttgcg

SEQ ID NO: 226066 - DNA, 25 bp, Probe Sequence
gacaatcctttctatcactgtttgg

SEQ ID NO: 226067 - DNA, 25 bp, Probe Sequence
gaaatatgtttcaatgactgccttt

SEQ ID NO: 226068 - DNA, 25 bp, Probe Sequence
gaaatttcttcatgatcacgttgat

SEQ ID NO: 226069 - DNA, 25 bp, Probe Sequence
gaaatactctttaatccttctgata

SEQ ID NO: 226070 - DNA, 25 bp, Probe Sequence
gacaaacgtgctttattcttctaac

SEQ ID NO: 226071 - DNA, 25 bp, Probe Sequence
gaaattcagtgtgtttctacagtat

SEQ ID NO: 226072 - DNA, 25 bp, Probe Sequence
gaaattcacactgttgatgtaatga

SEQ ID NO: 226073 - DNA, 25 bp, Probe Sequence
gaaatatcaactgttgtctttccgt

SEQ ID NO: 226074 - DNA, 25 bp, Probe Sequence
gacaaacaccgtattctctatctct

SEQ ID NO: 226075 - DNA, 25 bp, Probe Sequence
gaaatcagaccactcattgttctac

SEQ ID NO: 226076 - DNA, 25 bp, Probe Sequence
gacaatcagacctatgctagttcct

SEQ ID NO: 226077 - DNA, 25 bp, Probe Sequence
caacaaaccatggatttctcttccc

SEQ ID NO: 226078 - DNA, 25 bp, Probe Sequence
gaaataacacatagtctacagcctg

SEQ ID NO: 226079 - DNA, 25 bp, Probe Sequence
gaaataaagctcaatcaacacacta

SEQ ID NO: 226080 - DNA, 25 bp, Probe Sequence
gacaaaatcagccaatccaccagct

SEQ ID NO: 226081 - DNA, 25 bp, Probe Sequence
gaaatattatgcaaattcccagatt

SEQ ID NO: 226082 - DNA, 25 bp, Probe Sequence
gaaatactagctaattaagaatctg

SEQ ID NO: 226083 - DNA, 25 bp, Probe Sequence
gaaatatctcagttagtgacagatg

SEQ ID NO: 226084 - DNA, 25 bp, Probe Sequence
gaaatatcgtgaaaggatgagctca

SEQ ID NO: 226085 - DNA, 25 bp, Probe Sequence
gaaatacctgcaacatgacagtcta

SEQ ID NO: 226086 - DNA, 25 bp, Probe Sequence
gaaatcaggctctcgaagctcataa

SEQ ID NO: 226087 - DNA, 25 bp, Probe Sequence
gaaatcagcgattccaaagcacagc

SEQ ID NO: 226088 - DNA, 25 bp, Probe Sequence
gaaatatgagattacggagcagcgc

SEQ ID NO: 226089 - DNA, 25 bp, Probe Sequence
gaaattgtcatcaacgtgcctgagc

SEQ ID NO: 226090 - DNA, 25 bp, Probe Sequence
gaaatcttcagcaacgtcagttggt

SEQ ID NO: 226091 - DNA, 25 bp, Probe Sequence
gaaatctatcgaagtggcagagctg

SEQ ID NO: 226092 - DNA, 25 bp, Probe Sequence
gaaatcttgagaatgctgggtgaga

SEQ ID NO: 226093 - DNA, 25 bp, Probe Sequence
gacactttggaagatggcataacct

SEQ ID NO: 226094 - DNA, 25 bp, Probe Sequence
gacactggttttgtggacatccctt

SEQ ID NO: 226095 - DNA, 25 bp, Probe Sequence
gacaatgatgttcctggggacaggc

SEQ ID NO: 226096 - DNA, 25 bp, Probe Sequence
gaaatattgtgactctgggaatgac

SEQ ID NO: 226097 - DNA, 25 bp, Probe Sequence
gaaatttgtagcgtagacagatcac

SEQ ID NO: 226098 - DNA, 25 bp, Probe Sequence
gaaattctaaccaagaggatgacta

SEQ ID NO: 226099 - DNA, 25 bp, Probe Sequence
gaaattccacacactgagcagtact

SEQ ID NO: 226100 - DNA, 25 bp, Probe Sequence
gaaattccaacttcatgtcaataca

SEQ ID NO: 226101 - DNA, 25 bp, Probe Sequence
gaaattcctgacacactgcgtgaag

SEQ ID NO: 226102 - DNA, 25 bp, Probe Sequence
gaaattgccaatgctcaccgtaagc

SEQ ID NO: 226103 - DNA, 25 bp, Probe Sequence
gacaaagcggatgctcccgatgaag

SEQ ID NO: 226104 - DNA, 25 bp, Probe Sequence
gacaaggctaatgcttccaggggac

SEQ ID NO: 226105 - DNA, 25 bp, Probe Sequence
gaaatatgtaatgcttccaatcttg

SEQ ID NO: 226106 - DNA, 25 bp, Probe Sequence
gaaatatgtaaccttagactcagcc

SEQ ID NO: 226107 - DNA, 25 bp, Probe Sequence
gaaatatgatcagagcttgaacaca

SEQ ID NO: 226108 - DNA, 25 bp, Probe Sequence
gaaatcagctacccattatagcaca

SEQ ID NO: 226109 - DNA, 25 bp, Probe Sequence
gaaatcagttgcatattatccatta

SEQ ID NO: 226110 - DNA, 25 bp, Probe Sequence
gaaatcactgctccatatttgccag

SEQ ID NO: 226111 - DNA, 25 bp, Probe Sequence
gaaattacttgcaattatgccagat

SEQ ID NO: 226112 - DNA, 25 bp, Probe Sequence
gaaattggatagattctgacagatg

SEQ ID NO: 226113 - DNA, 25 bp, Probe Sequence
gaaattgtctagatctgatatccat

SEQ ID NO: 226114 - DNA, 25 bp, Probe Sequence
gacacactgattggaactgtattat

SEQ ID NO: 226115 - DNA, 25 bp, Probe Sequence
gacatgcagctgacaagaaatgtgc

SEQ ID NO: 226116 - DNA, 25 bp, Probe Sequence
gacagcgagcgctggaaggccatca

SEQ ID NO: 226117 - DNA, 25 bp, Probe Sequence
gacagcgagcgctggaaggccatca

SEQ ID NO: 226118 - DNA, 25 bp, Probe Sequence
gacacaggcctgggtaaccatggtg

SEQ ID NO: 226119 - DNA, 25 bp, Probe Sequence
gacagagacctttgtaaccaatgga

SEQ ID NO: 226120 - DNA, 25 bp, Probe Sequence
gacaacaacattactaacctgtgga

SEQ ID NO: 226121 - DNA, 25 bp, Probe Sequence
gaaataacattcgttactgttgtga

SEQ ID NO: 226122 - DNA, 25 bp, Probe Sequence
gaaataactaccaacagtgtctgag

SEQ ID NO: 226123 - DNA, 25 bp, Probe Sequence
gaaataggccagcagagacttaggg

SEQ ID NO: 226124 - DNA, 25 bp, Probe Sequence
gaaatagtccacttcaccttaatgg

SEQ ID NO: 226125 - DNA, 25 bp, Probe Sequence
gaaatactgaactcacttgataagg

SEQ ID NO: 226126 - DNA, 25 bp, Probe Sequence
gacaacttcgactcctctgagaagg

SEQ ID NO: 226127 - DNA, 25 bp, Probe Sequence
gacaactttggtatcgtggaaggac

SEQ ID NO: 226128 - DNA, 25 bp, Probe Sequence
gacaagttttgtaatcgtttccaag

SEQ ID NO: 226129 - DNA, 25 bp, Probe Sequence
gacaagttttgtcagcgaaagaaag

SEQ ID NO: 226130 - DNA, 25 bp, Probe Sequence
gaccagtttaggaccagaagttaag

SEQ ID NO: 226131 - DNA, 25 bp, Probe Sequence
gagaaggttaggagcctaaattcag

SEQ ID NO: 226132 - DNA, 25 bp, Probe Sequence
gtgaggcgcttaggttaaaactaca

SEQ ID NO: 226133 - DNA, 25 bp, Probe Sequence
gtaggccctaagctgaagaagtgag

SEQ ID NO: 226134 - DNA, 25 bp, Probe Sequence
gacacccctaagccatgaatgaact

SEQ ID NO: 226135 - DNA, 25 bp, Probe Sequence
gacaccccttcagataatgatagtg

SEQ ID NO: 226136 - DNA, 25 bp, Probe Sequence
gacacaccctccaaattcaactgga

SEQ ID NO: 226137 - DNA, 25 bp, Probe Sequence
gacaaccatctctttttatattatg

SEQ ID NO: 226138 - DNA, 25 bp, Probe Sequence
gacaaaattcttagtaatgagtatg

SEQ ID NO: 226139 - DNA, 25 bp, Probe Sequence
gacaagatatttgctgtgggtggtc

SEQ ID NO: 226140 - DNA, 25 bp, Probe Sequence
gacaagtagagtgaggcctatggct

SEQ ID NO: 226141 - DNA, 25 bp, Probe Sequence
gacaggtaaatgtagccctcagagc

SEQ ID NO: 226142 - DNA, 25 bp, Probe Sequence
gacaaggacctgtacatcctctgga

SEQ ID NO: 226143 - DNA, 25 bp, Probe Sequence
gacaaggacacaggactgccattga

SEQ ID NO: 226144 - DNA, 25 bp, Probe Sequence
gacactggaaatgttcaactgtagt

SEQ ID NO: 226145 - DNA, 25 bp, Probe Sequence
gaaataggacacgttgctactggaa

SEQ ID NO: 226146 - DNA, 25 bp, Probe Sequence
gaaatagcgaaagttcatattaagt

SEQ ID NO: 226147 - DNA, 25 bp, Probe Sequence
gaaatatgtgattatgctcttttaa

SEQ ID NO: 226148 - DNA, 25 bp, Probe Sequence
gacaataccacttgcatcattttac

SEQ ID NO: 226149 - DNA, 25 bp, Probe Sequence
gacaataacagtacatcttttcaag

SEQ ID NO: 226150 - DNA, 25 bp, Probe Sequence
gaaatagaggctaaattactcagga

SEQ ID NO: 226151 - DNA, 25 bp, Probe Sequence
gaaatacaggcgccatttcctacga

SEQ ID NO: 226152 - DNA, 25 bp, Probe Sequence
gaaatacaggcgccatttcctacga

SEQ ID NO: 226153 - DNA, 25 bp, Probe Sequence
gaaatatctgagctctttgcactac

SEQ ID NO: 226154 - DNA, 25 bp, Probe Sequence
gaaatactgtggatgctatgactgt

SEQ ID NO: 226155 - DNA, 25 bp, Probe Sequence
gacaaacttgtgaatgagcggctga

SEQ ID NO: 226156 - DNA, 25 bp, Probe Sequence
gaaattcttgtttatggatctgata

SEQ ID NO: 226157 - DNA, 25 bp, Probe Sequence
gaaattttgttttgcttgctgtttt

SEQ ID NO: 226158 - DNA, 25 bp, Probe Sequence
gaaattcttttatgcatttttttga

SEQ ID NO: 226159 - DNA, 25 bp, Probe Sequence
gaaattcttttatgcatttttttga

SEQ ID NO: 226160 - DNA, 25 bp, Probe Sequence
gaaatatcttgttactgcttttatt

SEQ ID NO: 226161 - DNA, 25 bp, Probe Sequence
gaaattattgtggcctttatttaat

SEQ ID NO: 226162 - DNA, 25 bp, Probe Sequence
gacaatttgtgggccatttaattca

SEQ ID NO: 226163 - DNA, 25 bp, Probe Sequence
gacaagtatatggggcaattaagtc

SEQ ID NO: 226164 - DNA, 25 bp, Probe Sequence
gacaagtatctgcggcagaggaata

SEQ ID NO: 226165 - DNA, 25 bp, Probe Sequence
gacaagatgtggaggtggtagtaga

SEQ ID NO: 226166 - DNA, 25 bp, Probe Sequence
gacatggttgggaagacgtcaccaa

SEQ ID NO: 226167 - DNA, 25 bp, Probe Sequence
gagcagtggtcaggggatcgaccca

SEQ ID NO: 226168 - DNA, 25 bp, Probe Sequence
gacaggggagagggatcgtcctcat

SEQ ID NO: 226169 - DNA, 25 bp, Probe Sequence
gacaatggggcgggaggatgcttga

SEQ ID NO: 226170 - DNA, 25 bp, Probe Sequence
gaaataggtgagcggtgtgttgaag

SEQ ID NO: 226171 - DNA, 25 bp, Probe Sequence
gaaattagatggcgagctgggcggg

SEQ ID NO: 226172 - DNA, 25 bp, Probe Sequence
gaaattcagtgacgaaggtgcgttg

SEQ ID NO: 226173 - DNA, 25 bp, Probe Sequence
gataatgtctcgagaaacggttaat

SEQ ID NO: 226174 - DNA, 25 bp, Probe Sequence
gaaattctagttcatacttgtaata

SEQ ID NO: 226175 - DNA, 25 bp, Probe Sequence
gaaatttactgtgagactgtatgtt

SEQ ID NO: 226176 - DNA, 25 bp, Probe Sequence
gaaatttacctgaaactatatcatt

SEQ ID NO: 226177 - DNA, 25 bp, Probe Sequence
gaaattaggttgaaacatatctctt

SEQ ID NO: 226178 - DNA, 25 bp, Probe Sequence
gaaattatgcttcctaaaatctcaa

SEQ ID NO: 226179 - DNA, 25 bp, Probe Sequence
gaaattcatgctggcttaaataatc

SEQ ID NO: 226180 - DNA, 25 bp, Probe Sequence
gaaatatcagtacttgaacaaattc

SEQ ID NO: 226181 - DNA, 25 bp, Probe Sequence
gaaattgcagacttcgaacaacaga

SEQ ID NO: 226182 - DNA, 25 bp, Probe Sequence
gaaatatgcgcctgtaatcccaaca

SEQ ID NO: 226183 - DNA, 25 bp, Probe Sequence
gaaattggctctggtttggcaaaat

SEQ ID NO: 226184 - DNA, 25 bp, Probe Sequence
gaaattagcgtaatattgagaaaaa

SEQ ID NO: 226185 - DNA, 25 bp, Probe Sequence
gaaattcagcgatcagcattggaac

SEQ ID NO: 226186 - DNA, 25 bp, Probe Sequence
gacaatacgatggaacgttctatga

SEQ ID NO: 226187 - DNA, 25 bp, Probe Sequence
gacaaaggaacgtatccctctgtgg

SEQ ID NO: 226188 - DNA, 25 bp, Probe Sequence
gacaatggggacattacttcattcc

SEQ ID NO: 226189 - DNA, 25 bp, Probe Sequence
gacaatggggacattacttcattcc

SEQ ID NO: 226190 - DNA, 25 bp, Probe Sequence
gacaatggcgctgcatgtttttctt

SEQ ID NO: 226191 - DNA, 25 bp, Probe Sequence
gacaatgggcttttcatgcctctct

SEQ ID NO: 226192 - DNA, 25 bp, Probe Sequence
gacaatgggcttttcatgcctctct

SEQ ID NO: 226193 - DNA, 25 bp, Probe Sequence
gacaataggtcgttctctctttttt

SEQ ID NO: 226194 - DNA, 25 bp, Probe Sequence
gacaatgagggggttctcttgatgt

SEQ ID NO: 226195 - DNA, 25 bp, Probe Sequence
gacaagtgggcggtgtccattaaag

SEQ ID NO: 226196 - DNA, 25 bp, Probe Sequence
gacacagggacacgttccctggaag

SEQ ID NO: 226197 - DNA, 25 bp, Probe Sequence
gacacagagcaagagtccccttggg

SEQ ID NO: 226198 - DNA, 25 bp, Probe Sequence
gacactacaggtatctgtccctggg

SEQ ID NO: 226199 - DNA, 25 bp, Probe Sequence
gacacttaggggacatgttctctgc

SEQ ID NO: 226200 - DNA, 25 bp, Probe Sequence
gacaatcctggaaatctgttctcca

SEQ ID NO: 226201 - DNA, 25 bp, Probe Sequence
gacaacctgaatatctatttcatca

SEQ ID NO: 226202 - DNA, 25 bp, Probe Sequence
gaaattctgagtattatcattcctt

SEQ ID NO: 226203 - DNA, 25 bp, Probe Sequence
gaaatttggactgttgttctgcttt

SEQ ID NO: 226204 - DNA, 25 bp, Probe Sequence
gacaattttggtgctcatgtgtttt

SEQ ID NO: 226205 - DNA, 25 bp, Probe Sequence
gacaatattgtcttcctgcgagaat

SEQ ID NO: 226206 - DNA, 25 bp, Probe Sequence
gacaggatttactttgcaggcaccg

SEQ ID NO: 226207 - DNA, 25 bp, Probe Sequence
gacacgaccaggttctcaagacacg

SEQ ID NO: 226208 - DNA, 25 bp, Probe Sequence
gacactggccgatgatgtaaacctg

SEQ ID NO: 226209 - DNA, 25 bp, Probe Sequence
gacactggccgatgaagtaaccctg

SEQ ID NO: 226210 - DNA, 25 bp, Probe Sequence
gacactcagccggagttgtaccacc

SEQ ID NO: 226211 - DNA, 25 bp, Probe Sequence
gacactgaccgggcttttcagagcc

SEQ ID NO: 226212 - DNA, 25 bp, Probe Sequence
gacactcctgagggctatttaggac

SEQ ID NO: 226213 - DNA, 25 bp, Probe Sequence
gacaaccggaagcttctatgtggca

SEQ ID NO: 226214 - DNA, 25 bp, Probe Sequence
gacaattccaaggcagtcctggtgg

SEQ ID NO: 226215 - DNA, 25 bp, Probe Sequence
gacaatttccattcatgacggtgat

SEQ ID NO: 226216 - DNA, 25 bp, Probe Sequence
gacacatgtaccacatactggctca

SEQ ID NO: 226217 - DNA, 25 bp, Probe Sequence
gacaatgtgggctccaagcagatgc

SEQ ID NO: 226218 - DNA, 25 bp, Probe Sequence
gacaatcgtgaattccttgctcatc

SEQ ID NO: 226219 - DNA, 25 bp, Probe Sequence
gacaatcagcaaatacctggcaatt

SEQ ID NO: 226220 - DNA, 25 bp, Probe Sequence
gacaacactgagtgtctggccagac

SEQ ID NO: 226221 - DNA, 25 bp, Probe Sequence
gacaactgtgagctttgccacagcg

SEQ ID NO: 226222 - DNA, 25 bp, Probe Sequence
gacagcctgggcatcatagccagac

SEQ ID NO: 226223 - DNA, 25 bp, Probe Sequence
gacagcatcgattctcattgaggag

SEQ ID NO: 226224 - DNA, 25 bp, Probe Sequence
gacagcatcgattctcattgaggag

SEQ ID NO: 226225 - DNA, 25 bp, Probe Sequence
gacacagcctactttactgagattg

SEQ ID NO: 226226 - DNA, 25 bp, Probe Sequence
gacaacctaaccattgactctggcc

SEQ ID NO: 226227 - DNA, 25 bp, Probe Sequence
gacaagcaaagactcaggggttacc

SEQ ID NO: 226228 - DNA, 25 bp, Probe Sequence
gacaacaaagaggctgatgaagatt

SEQ ID NO: 226229 - DNA, 25 bp, Probe Sequence
gacaacatgcagacagccgtggtga

SEQ ID NO: 226230 - DNA, 25 bp, Probe Sequence
gacaatccaatgccgagtggctgac

SEQ ID NO: 226231 - DNA, 25 bp, Probe Sequence
gacaacctgctgcatgagaagcggt

SEQ ID NO: 226232 - DNA, 25 bp, Probe Sequence
gagcagttcagtctgttaccagtgt

SEQ ID NO: 226233 - DNA, 25 bp, Probe Sequence
gacaatcaagaaagttacagcagga

SEQ ID NO: 226234 - DNA, 25 bp, Probe Sequence
gacaatgaaactctttgcagagctg

SEQ ID NO: 226235 - DNA, 25 bp, Probe Sequence
gacaaggttgctgttgtgcagtgtg

SEQ ID NO: 226236 - DNA, 25 bp, Probe Sequence
gacaaggtcccttggtgctgatggc

SEQ ID NO: 226237 - DNA, 25 bp, Probe Sequence
gacaactccaccatgggctatatga

SEQ ID NO: 226238 - DNA, 25 bp, Probe Sequence
gacaaccccaaggggctctgtgacc

SEQ ID NO: 226239 - DNA, 25 bp, Probe Sequence
gacaccaaccaaagcggagtggaac

SEQ ID NO: 226240 - DNA, 25 bp, Probe Sequence
gatccaagaccctgtgaagtagaaa

SEQ ID NO: 226241 - DNA, 25 bp, Probe Sequence
gacagaagacagcttagaagtccaa

SEQ ID NO: 226242 - DNA, 25 bp, Probe Sequence
gacagaagaggccttccaaaaacac

SEQ ID NO: 226243 - DNA, 25 bp, Probe Sequence
gacagacaggggactccccaagaac

SEQ ID NO: 226244 - DNA, 25 bp, Probe Sequence
gacagaacgagactcccgtctcaaa

SEQ ID NO: 226245 - DNA, 25 bp, Probe Sequence
gacagaaagcgaccatcctggttca

SEQ ID NO: 226246 - DNA, 25 bp, Probe Sequence
gacaagagaggcagccctgactcca

SEQ ID NO: 226247 - DNA, 25 bp, Probe Sequence
gacagaacagttccaagtactccaa

SEQ ID NO: 226248 - DNA, 25 bp, Probe Sequence
gacagactgggttaagctaccaaaa

SEQ ID NO: 226249 - DNA, 25 bp, Probe Sequence
gacaattcgagaagtatgtaccaaa

SEQ ID NO: 226250 - DNA, 25 bp, Probe Sequence
gacacagtcgtagaattcccaatca

SEQ ID NO: 226251 - DNA, 25 bp, Probe Sequence
gacaagactgctctagattggccca

SEQ ID NO: 226252 - DNA, 25 bp, Probe Sequence
gacaataatgtccttgagggccaag

SEQ ID NO: 226253 - DNA, 25 bp, Probe Sequence
gactaattcctgttagggccaagcc

SEQ ID NO: 226254 - DNA, 25 bp, Probe Sequence
gacaacttgccgtcttggacaaagc

SEQ ID NO: 226255 - DNA, 25 bp, Probe Sequence
gacacacctgcacagttggaaatgg

SEQ ID NO: 226256 - DNA, 25 bp, Probe Sequence
gacacacacagactatttttagatt

SEQ ID NO: 226257 - DNA, 25 bp, Probe Sequence
gacacaatcatactgtgattttatt

SEQ ID NO: 226258 - DNA, 25 bp, Probe Sequence
gacacactaggcctgtgtatttatt

SEQ ID NO: 226259 - DNA, 25 bp, Probe Sequence
gaaattacctgtggatatttgtata

SEQ ID NO: 226260 - DNA, 25 bp, Probe Sequence
gaaattacctgtggatatttgtata

SEQ ID NO: 226261 - DNA, 25 bp, Probe Sequence
gacaaacccttggtcacactgatta

SEQ ID NO: 226262 - DNA, 25 bp, Probe Sequence
gacaaactactttggcccagttgct

SEQ ID NO: 226263 - DNA, 25 bp, Probe Sequence
gacaaattacactgcctgaagttgc

SEQ ID NO: 226264 - DNA, 25 bp, Probe Sequence
gacagaaccaaatgagctaagttgc

SEQ ID NO: 226265 - DNA, 25 bp, Probe Sequence
gacagaaccgtatcactgatgactg

SEQ ID NO: 226266 - DNA, 25 bp, Probe Sequence
gacaaaatcagtagcccatgatgaa

SEQ ID NO: 226267 - DNA, 25 bp, Probe Sequence
gacaattcacagttcttgagcaaac

SEQ ID NO: 226268 - DNA, 25 bp, Probe Sequence
gacatctaccagtttctccaaatgc

SEQ ID NO: 226269 - DNA, 25 bp, Probe Sequence
gacactacacaattttctaatatgt

SEQ ID NO: 226270 - DNA, 25 bp, Probe Sequence
gacacattacctttttagctatttt

SEQ ID NO: 226271 - DNA, 25 bp, Probe Sequence
gacactttctcgtttgttctatttt

SEQ ID NO: 226272 - DNA, 25 bp, Probe Sequence
gacactttcttttgtgtttacatca

SEQ ID NO: 226273 - DNA, 25 bp, Probe Sequence
gacacattaatgatttggtttctcc

SEQ ID NO: 226274 - DNA, 25 bp, Probe Sequence
gacagctatggattatttgcggttg

SEQ ID NO: 226275 - DNA, 25 bp, Probe Sequence
gacgtagcaaattatggtgtattca

SEQ ID NO: 226276 - DNA, 25 bp, Probe Sequence
gacagtaagaattgatcgttttggg

SEQ ID NO: 226277 - DNA, 25 bp, Probe Sequence
gacactaaggcatcactgctttctt

SEQ ID NO: 226278 - DNA, 25 bp, Probe Sequence
gatacatgggaataactgttcgttt

SEQ ID NO: 226279 - DNA, 25 bp, Probe Sequence
gacacaggggaatcctgattagtca

SEQ ID NO: 226280 - DNA, 25 bp, Probe Sequence
gacacgggaaaatttatgacatgag

SEQ ID NO: 226281 - DNA, 25 bp, Probe Sequence
gacactgggactgatgtttacatct

SEQ ID NO: 226282 - DNA, 25 bp, Probe Sequence
gacactctgcagactgctagtgttc

SEQ ID NO: 226283 - DNA, 25 bp, Probe Sequence
gacaagtcagtcatagtctatcagc

SEQ ID NO: 226284 - DNA, 25 bp, Probe Sequence
gacaaggcccagtcagttatgcaat

SEQ ID NO: 226285 - DNA, 25 bp, Probe Sequence
gacaagggctaccggattgcagagg

SEQ ID NO: 226286 - DNA, 25 bp, Probe Sequence
gacaagggccaatggaaccaagttt

SEQ ID NO: 226287 - DNA, 25 bp, Probe Sequence
gacaagggccaatggaaccaagttt

SEQ ID NO: 226288 - DNA, 25 bp, Probe Sequence
gacaaggctgctgaaggattacaag

SEQ ID NO: 226289 - DNA, 25 bp, Probe Sequence
gacacagtgtgccaaagtgacttac

SEQ ID NO: 226290 - DNA, 25 bp, Probe Sequence
gacactgattgatccaggacatcca

SEQ ID NO: 226291 - DNA, 25 bp, Probe Sequence
gacacggctcaagtcacgaatcaga

SEQ ID NO: 226292 - DNA, 25 bp, Probe Sequence
gacaccgtgacagacgaagagggca

SEQ ID NO: 226293 - DNA, 25 bp, Probe Sequence
gacaggggaccccaatagcaaggct

SEQ ID NO: 226294 - DNA, 25 bp, Probe Sequence
gacaggggcaccctcgaaggagggc

SEQ ID NO: 226295 - DNA, 25 bp, Probe Sequence
gacggctaccgcaaaaacgagggct

SEQ ID NO: 226296 - DNA, 25 bp, Probe Sequence
gagaagcttcccttaaccagagggg

SEQ ID NO: 226297 - DNA, 25 bp, Probe Sequence
gacagacgaaccttgaattacggga

SEQ ID NO: 226298 - DNA, 25 bp, Probe Sequence
gacagaagtaaccaggaaagccgga

SEQ ID NO: 226299 - DNA, 25 bp, Probe Sequence
gacagaagtctataggaacaggcat

SEQ ID NO: 226300 - DNA, 25 bp, Probe Sequence
gacaagcacacctgggagacagtga

SEQ ID NO: 226301 - DNA, 25 bp, Probe Sequence
gacaagcacaccctgagcaagaagg

SEQ ID NO: 226302 - DNA, 25 bp, Probe Sequence
gacagaagcccggaaatacgttcgc

SEQ ID NO: 226303 - DNA, 25 bp, Probe Sequence
gacaagcagtccggcaagaagcgtg

SEQ ID NO: 226304 - DNA, 25 bp, Probe Sequence
gacaaggatcacgccacagaaatga

SEQ ID NO: 226305 - DNA, 25 bp, Probe Sequence
gacaagtgaatggcaatcctaaata

SEQ ID NO: 226306 - DNA, 25 bp, Probe Sequence
gacaaaaatacagtgctctaaatat

SEQ ID NO: 226307 - DNA, 25 bp, Probe Sequence
gacataaaaaggactcgatatattt

SEQ ID NO: 226308 - DNA, 25 bp, Probe Sequence
gacacggaaagtccaaaacattatt

SEQ ID NO: 226309 - DNA, 25 bp, Probe Sequence
gacacgacgaggtccacaaactgtt

SEQ ID NO: 226310 - DNA, 25 bp, Probe Sequence
gacacaggctagtcctataaaagta

SEQ ID NO: 226311 - DNA, 25 bp, Probe Sequence
gacaccctcagcagtaaacaagata

SEQ ID NO: 226312 - DNA, 25 bp, Probe Sequence
gacaccttcagcagtaaacaagata

SEQ ID NO: 226313 - DNA, 25 bp, Probe Sequence
gacaactgtcatgcgtagaaatcta

SEQ ID NO: 226314 - DNA, 25 bp, Probe Sequence
gacaactggagtggtacttactgaa

SEQ ID NO: 226315 - DNA, 25 bp, Probe Sequence
gacaatcggatacatatcttcctga

SEQ ID NO: 226316 - DNA, 25 bp, Probe Sequence
gacaaaaataattatgccccatgac

SEQ ID NO: 226317 - DNA, 25 bp, Probe Sequence
gacaagaagatcgagttccacctgc

SEQ ID NO: 226318 - DNA, 25 bp, Probe Sequence
gacaagaaatagtctttggcagcca

SEQ ID NO: 226319 - DNA, 25 bp, Probe Sequence
gacaatgccgcagacttctgccagc

SEQ ID NO: 226320 - DNA, 25 bp, Probe Sequence
gacaatgctcatgagagcccagaac

SEQ ID NO: 226321 - DNA, 25 bp, Probe Sequence
gacaatgatcatagacaactgctgc

SEQ ID NO: 226322 - DNA, 25 bp, Probe Sequence
gacaatggcatctacttctgtcagc

SEQ ID NO: 226323 - DNA, 25 bp, Probe Sequence
gacactagctcaagctgttgtcttc

SEQ ID NO: 226324 - DNA, 25 bp, Probe Sequence
gacactattcacatgattatttgcc

SEQ ID NO: 226325 - DNA, 25 bp, Probe Sequence
gacacacattcagagtttctaccaa

SEQ ID NO: 226326 - DNA, 25 bp, Probe Sequence
gacacacttctccatattctgtcac

SEQ ID NO: 226327 - DNA, 25 bp, Probe Sequence
gacacttacgacaatgacattgcgc

SEQ ID NO: 226328 - DNA, 25 bp, Probe Sequence
gacaccttggtctgcaaatgcatct

SEQ ID NO: 226329 - DNA, 25 bp, Probe Sequence
gacaccattttccaggatatgtctg

SEQ ID NO: 226330 - DNA, 25 bp, Probe Sequence
gacacaactcttaccagtagtgctg

SEQ ID NO: 226331 - DNA, 25 bp, Probe Sequence
gacacatgtggctttctcaggaatt

SEQ ID NO: 226332 - DNA, 25 bp, Probe Sequence
gaaattggctttacgatgaacatgt

SEQ ID NO: 226333 - DNA, 25 bp, Probe Sequence
gacaacggctttccagtacatcatt

SEQ ID NO: 226334 - DNA, 25 bp, Probe Sequence
gacaactggctttggcatgatttat

SEQ ID NO: 226335 - DNA, 25 bp, Probe Sequence
gacagcctggctagatggcaagcat

SEQ ID NO: 226336 - DNA, 25 bp, Probe Sequence
gacactcattcattgaagaagtgta

SEQ ID NO: 226337 - DNA, 25 bp, Probe Sequence
gacaacattcatagaaacagcgtgg

SEQ ID NO: 226338 - DNA, 25 bp, Probe Sequence
gacaaccctggaaacactgaagcat

SEQ ID NO: 226339 - DNA, 25 bp, Probe Sequence
gacaaccttggagagacatgaatgc

SEQ ID NO: 226340 - DNA, 25 bp, Probe Sequence
gacaacctggggctgcattgtattc

SEQ ID NO: 226341 - DNA, 25 bp, Probe Sequence
gacaacacagggttagcaggtggtc

SEQ ID NO: 226342 - DNA, 25 bp, Probe Sequence
gacaaccagcgtttctcaggaagct

SEQ ID NO: 226343 - DNA, 25 bp, Probe Sequence
gacagaaacggagtctcggaagtgt

SEQ ID NO: 226344 - DNA, 25 bp, Probe Sequence
gacagaaacgaagcccagaacaaag

SEQ ID NO: 226345 - DNA, 25 bp, Probe Sequence
gacagaagacgagacacccaagaaa

SEQ ID NO: 226346 - DNA, 25 bp, Probe Sequence
gacaacatgaaaggcaagctccaag

SEQ ID NO: 226347 - DNA, 25 bp, Probe Sequence
gacaagatgaagagcaggcgccatt

SEQ ID NO: 226348 - DNA, 25 bp, Probe Sequence
gacaacagaatccatcagggccatg

SEQ ID NO: 226349 - DNA, 25 bp, Probe Sequence
gacacaagatcccagtgatggcctt

SEQ ID NO: 226350 - DNA, 25 bp, Probe Sequence
gacaaagcccaacaatgatctcagg

SEQ ID NO: 226351 - DNA, 25 bp, Probe Sequence
gacaaaccaaagaagctatctgctg

SEQ ID NO: 226352 - DNA, 25 bp, Probe Sequence
gacaatcctcaataggatcatcagc

SEQ ID NO: 226353 - DNA, 25 bp, Probe Sequence
gacaagcccagtgactgacatacat

SEQ ID NO: 226354 - DNA, 25 bp, Probe Sequence
gacacagccaaagatctcacataag

SEQ ID NO: 226355 - DNA, 25 bp, Probe Sequence
gacaattcagaagcatcaccatgca

SEQ ID NO: 226356 - DNA, 25 bp, Probe Sequence
gaaattggcagaactacctgcaaga

SEQ ID NO: 226357 - DNA, 25 bp, Probe Sequence
gacaatgcatggctgatctactctg

SEQ ID NO: 226358 - DNA, 25 bp, Probe Sequence
gacaatcaggtgctccacttggatg

SEQ ID NO: 226359 - DNA, 25 bp, Probe Sequence
gacaatcaggtcatggtgtctgagg

SEQ ID NO: 226360 - DNA, 25 bp, Probe Sequence
gacattcagactgagcgtgcctacc

SEQ ID NO: 226361 - DNA, 25 bp, Probe Sequence
gacacatctgaagagggactgaacc

SEQ ID NO: 226362 - DNA, 25 bp, Probe Sequence
gacaattgacaatctggactacccc

SEQ ID NO: 226363 - DNA, 25 bp, Probe Sequence
gacaagtactaccgagtcaatcttc

SEQ ID NO: 226364 - DNA, 25 bp, Probe Sequence
gacaatgaatcttcccgtttttctt

SEQ ID NO: 226365 - DNA, 25 bp, Probe Sequence
gacaatacattcagaacttatttct

SEQ ID NO: 226366 - DNA, 25 bp, Probe Sequence
gacaatgacatctttgaatcgctgt

SEQ ID NO: 226367 - DNA, 25 bp, Probe Sequence
gacaagatgcactttgaatctggat

SEQ ID NO: 226368 - DNA, 25 bp, Probe Sequence
gacaagatcactatggaattgaatc

SEQ ID NO: 226369 - DNA, 25 bp, Probe Sequence
gacacagacgtaaggcgtggagaca

SEQ ID NO: 226370 - DNA, 25 bp, Probe Sequence
gacaagtggtcaaggagctgtggcc

SEQ ID NO: 226371 - DNA, 25 bp, Probe Sequence
gacaattgtcaaaggagcgggggag

SEQ ID NO: 226372 - DNA, 25 bp, Probe Sequence
gacaatgctgctacaaaatctgggg

SEQ ID NO: 226373 - DNA, 25 bp, Probe Sequence
gacacatgctaacaggatctacagg

SEQ ID NO: 226374 - DNA, 25 bp, Probe Sequence
gacaccttgaagggcctaatgcacg

SEQ ID NO: 226375 - DNA, 25 bp, Probe Sequence
gacacttggaatgtgacagggcagg

SEQ ID NO: 226376 - DNA, 25 bp, Probe Sequence
gacacagtggactgaaaggactggt

SEQ ID NO: 226377 - DNA, 25 bp, Probe Sequence
gacacactgggagcaaatggactat

SEQ ID NO: 226378 - DNA, 25 bp, Probe Sequence
gacaactgcttggacaagtgtgcac

SEQ ID NO: 226379 - DNA, 25 bp, Probe Sequence
gacaagtgactgtatctgtgtagac

SEQ ID NO: 226380 - DNA, 25 bp, Probe Sequence
gacaagccaggctttggtggcagca

SEQ ID NO: 226381 - DNA, 25 bp, Probe Sequence
gacaaccagtgacttgggaagcaca

SEQ ID NO: 226382 - DNA, 25 bp, Probe Sequence
gacaaccagggtgcaggagaacaag

SEQ ID NO: 226383 - DNA, 25 bp, Probe Sequence
gacaacagccctggaggggaacaga

SEQ ID NO: 226384 - DNA, 25 bp, Probe Sequence
gacagctacccccagaagggtcaat

SEQ ID NO: 226385 - DNA, 25 bp, Probe Sequence
gacatccaccgggacagggagttat

SEQ ID NO: 226386 - DNA, 25 bp, Probe Sequence
gacagcccctgaagtaggtgttact

SEQ ID NO: 226387 - DNA, 25 bp, Probe Sequence
gacatgagacgaaagtaggcggtac

SEQ ID NO: 226388 - DNA, 25 bp, Probe Sequence
gacatggtcgtggagtcgtgtggct

SEQ ID NO: 226389 - DNA, 25 bp, Probe Sequence
gacacgtgcgtggggtgttggcatt

SEQ ID NO: 226390 - DNA, 25 bp, Probe Sequence
gacacggatcgccaggctgattgag

SEQ ID NO: 226391 - DNA, 25 bp, Probe Sequence
gacacaggtactctcatattcaact

SEQ ID NO: 226392 - DNA, 25 bp, Probe Sequence
gacaaggtattttatttctgactga

SEQ ID NO: 226393 - DNA, 25 bp, Probe Sequence
gacaaggtttcgttttcattcctgt

SEQ ID NO: 226394 - DNA, 25 bp, Probe Sequence
gaaattgtcttccttttttcttcat

SEQ ID NO: 226395 - DNA, 25 bp, Probe Sequence
gacaatgtcttttcttttgtttcta

SEQ ID NO: 226396 - DNA, 25 bp, Probe Sequence
gaaattgttctttttgagttatcta

SEQ ID NO: 226397 - DNA, 25 bp, Probe Sequence
gaaattgtttctagctagagggact

SEQ ID NO: 226398 - DNA, 25 bp, Probe Sequence
gaaattgtgtggagtgacggaactg

SEQ ID NO: 226399 - DNA, 25 bp, Probe Sequence
gacagactggctgttggaacgaaag

SEQ ID NO: 226400 - DNA, 25 bp, Probe Sequence
gacaagggccgtttgagcaaggaag

SEQ ID NO: 226401 - DNA, 25 bp, Probe Sequence
gacacggtgtccatatggagaggaa

SEQ ID NO: 226402 - DNA, 25 bp, Probe Sequence
gacacagtgtgtctctctgattggg

SEQ ID NO: 226403 - DNA, 25 bp, Probe Sequence
gacaattcatctcattgtgagtgga

SEQ ID NO: 226404 - DNA, 25 bp, Probe Sequence
gacaatctcactctgtggacatcgg

SEQ ID NO: 226405 - DNA, 25 bp, Probe Sequence
gacaatctcactctgtggacatcgg

SEQ ID NO: 226406 - DNA, 25 bp, Probe Sequence
gacacataactcctgggccagaggc

SEQ ID NO: 226407 - DNA, 25 bp, Probe Sequence
gacaatgatagcttgctgtgtccca

SEQ ID NO: 226408 - DNA, 25 bp, Probe Sequence
gacaagagcgcaggcagtggccaca

SEQ ID NO: 226409 - DNA, 25 bp, Probe Sequence
gacaaagagtgcgactggctcaaca

SEQ ID NO: 226410 - DNA, 25 bp, Probe Sequence
gacaaaggtgaactgttccagatac

SEQ ID NO: 226411 - DNA, 25 bp, Probe Sequence
gacaaagatgtatgtactgcctgat

SEQ ID NO: 226412 - DNA, 25 bp, Probe Sequence
gacaacacagtatgaccccatctgt

SEQ ID NO: 226413 - DNA, 25 bp, Probe Sequence
gacaacatagtaataccctctctct

SEQ ID NO: 226414 - DNA, 25 bp, Probe Sequence
gacaggacacgaatgaagcctcctt

SEQ ID NO: 226415 - DNA, 25 bp, Probe Sequence
gacaggagggagaaacccagtttgg

SEQ ID NO: 226416 - DNA, 25 bp, Probe Sequence
gacagccgggataaacccctgaagg

SEQ ID NO: 226417 - DNA, 25 bp, Probe Sequence
gacagccagtataatcaatacccta

SEQ ID NO: 226418 - DNA, 25 bp, Probe Sequence
gacatccagctaacactaagtcagt

SEQ ID NO: 226419 - DNA, 25 bp, Probe Sequence
gacaacagttacataattcactctg

SEQ ID NO: 226420 - DNA, 25 bp, Probe Sequence
gacaagctgtcttttataggcactc

SEQ ID NO: 226421 - DNA, 25 bp, Probe Sequence
gacagacaggttgtacagagcctta

SEQ ID NO: 226422 - DNA, 25 bp, Probe Sequence
gacaccagggtacacatgagccttc

SEQ ID NO: 226423 - DNA, 25 bp, Probe Sequence
gacacacagtctcagtccagatgcc

SEQ ID NO: 226424 - DNA, 25 bp, Probe Sequence
gacaaaatcatgaggctcactcctc

SEQ ID NO: 226425 - DNA, 25 bp, Probe Sequence
gacaaaatcaaaccagcattcccca

SEQ ID NO: 226426 - DNA, 25 bp, Probe Sequence
gacaaacactaaacaatacaaccat

SEQ ID NO: 226427 - DNA, 25 bp, Probe Sequence
gacaaagcgtattaaacagaacact

SEQ ID NO: 226428 - DNA, 25 bp, Probe Sequence
gacaatactgtatccaagaagggct

SEQ ID NO: 226429 - DNA, 25 bp, Probe Sequence
gacacaatcattaaccagaaacgtt

SEQ ID NO: 226430 - DNA, 25 bp, Probe Sequence
gacacaatattattcaacatgcaga

SEQ ID NO: 226431 - DNA, 25 bp, Probe Sequence
gacacaatgtcatgatcagcactga

SEQ ID NO: 226432 - DNA, 25 bp, Probe Sequence
gacaagatcatctactcacacttca

SEQ ID NO: 226433 - DNA, 25 bp, Probe Sequence
gacaatacacattccaactatggag

SEQ ID NO: 226434 - DNA, 25 bp, Probe Sequence
gacataacctcagacacatctggag

SEQ ID NO: 226435 - DNA, 25 bp, Probe Sequence
gacaccatcccagaggactatgaga

SEQ ID NO: 226436 - DNA, 25 bp, Probe Sequence
gacaccccctgtaggaatatgccaa

SEQ ID NO: 226437 - DNA, 25 bp, Probe Sequence
gacacacccgtgaggaagttgcaag

SEQ ID NO: 226438 - DNA, 25 bp, Probe Sequence
gacacagtccttgtggaaggtccag

SEQ ID NO: 226439 - DNA, 25 bp, Probe Sequence
gacaaggccttgaaggaacgcagcc

SEQ ID NO: 226440 - DNA, 25 bp, Probe Sequence
gacaaactcaacaagtggaccagca

SEQ ID NO: 226441 - DNA, 25 bp, Probe Sequence
gacaaatccagtgatggatcaccaa

SEQ ID NO: 226442 - DNA, 25 bp, Probe Sequence
gacaaatccttgaaacataccaatt

SEQ ID NO: 226443 - DNA, 25 bp, Probe Sequence
gacaaattcttaactctgacacaat

SEQ ID NO: 226444 - DNA, 25 bp, Probe Sequence
gacactcttcctgacagcagaatga

SEQ ID NO: 226445 - DNA, 25 bp, Probe Sequence
gacactttctgctttacagaaaagg

SEQ ID NO: 226446 - DNA, 25 bp, Probe Sequence
gacaagtgtagctttatcacatata

SEQ ID NO: 226447 - DNA, 25 bp, Probe Sequence
gacaagtgtaatctcaccataatac

SEQ ID NO: 226448 - DNA, 25 bp, Probe Sequence
gacatggttgactgtgccctaattc

SEQ ID NO: 226449 - DNA, 25 bp, Probe Sequence
gacaggaatattctccctaactcta

SEQ ID NO: 226450 - DNA, 25 bp, Probe Sequence
gacaatgagtatatcccactgacac

SEQ ID NO: 226451 - DNA, 25 bp, Probe Sequence
gacaaggagaacgccatcgaccgcg

SEQ ID NO: 226452 - DNA, 25 bp, Probe Sequence
gacaaggagaacgccatcgaccgcg

SEQ ID NO: 226453 - DNA, 25 bp, Probe Sequence
gacagggagaactcgtcggcaggtt

SEQ ID NO: 226454 - DNA, 25 bp, Probe Sequence
gacacgggagagtgctggcgggagc

SEQ ID NO: 226455 - DNA, 25 bp, Probe Sequence
gacaagttcgagtttggggagaagc

SEQ ID NO: 226456 - DNA, 25 bp, Probe Sequence
gacactttcggattccacgggtagc

SEQ ID NO: 226457 - DNA, 25 bp, Probe Sequence
gacagtttcttatttggccaggtag

SEQ ID NO: 226458 - DNA, 25 bp, Probe Sequence
gacaatcttttgaattgatgccgta

SEQ ID NO: 226459 - DNA, 25 bp, Probe Sequence
gacaaatccttgaatgttctcttaa

SEQ ID NO: 226460 - DNA, 25 bp, Probe Sequence
gacaaattatgactccttccttaaa

SEQ ID NO: 226461 - DNA, 25 bp, Probe Sequence
gacaaatggcaactgacttctttag

SEQ ID NO: 226462 - DNA, 25 bp, Probe Sequence
gacaaaggcaagaacgtccgccaga

SEQ ID NO: 226463 - DNA, 25 bp, Probe Sequence
gacaagtacacaacagtttcgccag

SEQ ID NO: 226464 - DNA, 25 bp, Probe Sequence
gacacaacagccgcagtttggccag

SEQ ID NO: 226465 - DNA, 25 bp, Probe Sequence
gacacagacgccgctgtgggtgaca

SEQ ID NO: 226466 - DNA, 25 bp, Probe Sequence
gacatcgacgggcacatggttaacc

SEQ ID NO: 226467 - DNA, 25 bp, Probe Sequence
gacaggaagccgcactcagttatgg

SEQ ID NO: 226468 - DNA, 25 bp, Probe Sequence
gacaagaatgtgcccaaccttcatg

SEQ ID NO: 226469 - DNA, 25 bp, Probe Sequence
gacaaaatttgacatccagtcatgg

SEQ ID NO: 226470 - DNA, 25 bp, Probe Sequence
gacacgatattttttgctaagcagg

SEQ ID NO: 226471 - DNA, 25 bp, Probe Sequence
gacaagatatccaagttgaaagcaa

SEQ ID NO: 226472 - DNA, 25 bp, Probe Sequence
gacaatgtctgtaagtctaaatcag

SEQ ID NO: 226473 - DNA, 25 bp, Probe Sequence
gacaatgtcgatgctttcatgaaca

SEQ ID NO: 226474 - DNA, 25 bp, Probe Sequence
gacaagagcgagactctgtctgaaa

SEQ ID NO: 226475 - DNA, 25 bp, Probe Sequence
gacggtcgaacttgactatctagag

SEQ ID NO: 226476 - DNA, 25 bp, Probe Sequence
gacaggttgtacagagccttaggca

SEQ ID NO: 226477 - DNA, 25 bp, Probe Sequence
gacaggagttacaggttctaagcca

SEQ ID NO: 226478 - DNA, 25 bp, Probe Sequence
gacaggtgtggaggttttctaaggg

SEQ ID NO: 226479 - DNA, 25 bp, Probe Sequence
gacaggtgggcttggattttacagg

SEQ ID NO: 226480 - DNA, 25 bp, Probe Sequence
gacagaacgtgagtgacattttccg

SEQ ID NO: 226481 - DNA, 25 bp, Probe Sequence
gacaagggctcagactttatccaga

SEQ ID NO: 226482 - DNA, 25 bp, Probe Sequence
gacataaactaccacttctaatcag

SEQ ID NO: 226483 - DNA, 25 bp, Probe Sequence
gacaagtacataagactttaaagaa

SEQ ID NO: 226484 - DNA, 25 bp, Probe Sequence
gagaatgtagaatgcaagtaaaaaa

SEQ ID NO: 226485 - DNA, 25 bp, Probe Sequence
gacaagtgagacctaattaaaacaa

SEQ ID NO: 226486 - DNA, 25 bp, Probe Sequence
gacagagagggccaaatttactaaa

SEQ ID NO: 226487 - DNA, 25 bp, Probe Sequence
gacatagacgggcaaattggataaa

SEQ ID NO: 226488 - DNA, 25 bp, Probe Sequence
gacttcctgggccacaaagattaaa

SEQ ID NO: 226489 - DNA, 25 bp, Probe Sequence
gacggccggggcagaagttgagacc

SEQ ID NO: 226490 - DNA, 25 bp, Probe Sequence
gacaggccgggatccaaggtgaaca

SEQ ID NO: 226491 - DNA, 25 bp, Probe Sequence
gacagcccgggagacagggcgtgga

SEQ ID NO: 226492 - DNA, 25 bp, Probe Sequence
gacaccgcagaggaggacgcggaag

SEQ ID NO: 226493 - DNA, 25 bp, Probe Sequence
gacagcgtcatgcagcagaacctgg

SEQ ID NO: 226494 - DNA, 25 bp, Probe Sequence
gacaagctgcagcaggcagccctgc

SEQ ID NO: 226495 - DNA, 25 bp, Probe Sequence
gacaagcatgaggagaaccaccggc

SEQ ID NO: 226496 - DNA, 25 bp, Probe Sequence
gacaacgaggtgcagccatcagggc

SEQ ID NO: 226497 - DNA, 25 bp, Probe Sequence
gacaacgtagagcgcgtgctgaaga

SEQ ID NO: 226498 - DNA, 25 bp, Probe Sequence
gacagaccgagactccgtctcaaaa

SEQ ID NO: 226499 - DNA, 25 bp, Probe Sequence
gacaaagtgagactccgtcacaaca

SEQ ID NO: 226500 - DNA, 25 bp, Probe Sequence
gacaaagcgagactccatctcaaaa

SEQ ID NO: 226501 - DNA, 25 bp, Probe Sequence
gacacacaagaacccttcaaaaaat

SEQ ID NO: 226502 - DNA, 25 bp, Probe Sequence
gacactacgatatcctctacaaata

SEQ ID NO: 226503 - DNA, 25 bp, Probe Sequence
gacactacattttcaggaactgaaa

SEQ ID NO: 226504 - DNA, 25 bp, Probe Sequence
gacagctccaggatcgagatcactg

SEQ ID NO: 226505 - DNA, 25 bp, Probe Sequence
gacacccagatgtagaagctgactg

SEQ ID NO: 226506 - DNA, 25 bp, Probe Sequence
gacaaccgtgacatcagcagtgctg

SEQ ID NO: 226507 - DNA, 25 bp, Probe Sequence
gacacagctcgggctgtcagagggc

SEQ ID NO: 226508 - DNA, 25 bp, Probe Sequence
gacacagtgtggtgtaagcgccaaa

SEQ ID NO: 226509 - DNA, 25 bp, Probe Sequence
gacaaggtgaagtccaagacccaga

SEQ ID NO: 226510 - DNA, 25 bp, Probe Sequence
gacaaggctggagacaaacctcata

SEQ ID NO: 226511 - DNA, 25 bp, Probe Sequence
gacacacggacataaaactgtattt

SEQ ID NO: 226512 - DNA, 25 bp, Probe Sequence
gacacggtgaccgagataacgtcct

SEQ ID NO: 226513 - DNA, 25 bp, Probe Sequence
gacacgtggctccagatcaaagcgg

SEQ ID NO: 226514 - DNA, 25 bp, Probe Sequence
gacacaggggcggtgcaaaccagtg

SEQ ID NO: 226515 - DNA, 25 bp, Probe Sequence
gacaacgagctccgtgaagacctgg

SEQ ID NO: 226516 - DNA, 25 bp, Probe Sequence
gacaactggtccttatcacagccag

SEQ ID NO: 226517 - DNA, 25 bp, Probe Sequence
gacatacggtctttgcttagtcgtg

SEQ ID NO: 226518 - DNA, 25 bp, Probe Sequence
gacaaaagttatacttagtgctctt

SEQ ID NO: 226519 - DNA, 25 bp, Probe Sequence
gacaaaaaatgattgctattgtgtt

SEQ ID NO: 226520 - DNA, 25 bp, Probe Sequence
gacaaagaggtctatgatattgcat

SEQ ID NO: 226521 - DNA, 25 bp, Probe Sequence
gacacaagggatgaatatctcaacg

SEQ ID NO: 226522 - DNA, 25 bp, Probe Sequence
gacaccacggacgaatgcatccttc

SEQ ID NO: 226523 - DNA, 25 bp, Probe Sequence
gacacccggacaatgctggcgcttc

SEQ ID NO: 226524 - DNA, 25 bp, Probe Sequence
gacagccccaggggctggctttcac

SEQ ID NO: 226525 - DNA, 25 bp, Probe Sequence
gacagcaacacagctactggttcca

SEQ ID NO: 226526 - DNA, 25 bp, Probe Sequence
gacacaatatcacctagctggaggc

SEQ ID NO: 226527 - DNA, 25 bp, Probe Sequence
gacaagacatgccctcacttaagtc

SEQ ID NO: 226528 - DNA, 25 bp, Probe Sequence
gacacagacatggggctgttagcgt

SEQ ID NO: 226529 - DNA, 25 bp, Probe Sequence
gacaagagctgttatgctgtttcct

SEQ ID NO: 226530 - DNA, 25 bp, Probe Sequence
gacacacagtgactctcttgtctcc

SEQ ID NO: 226531 - DNA, 25 bp, Probe Sequence
gacactcaagacttttgactgccat

SEQ ID NO: 226532 - DNA, 25 bp, Probe Sequence
gacacctgagtcttattgatccctt

SEQ ID NO: 226533 - DNA, 25 bp, Probe Sequence
gacaacattggctacattacctttg

SEQ ID NO: 226534 - DNA, 25 bp, Probe Sequence
gacaaatgcttcttcaaaccttttt

SEQ ID NO: 226535 - DNA, 25 bp, Probe Sequence
gacagaagtatcttcctttactttc

SEQ ID NO: 226536 - DNA, 25 bp, Probe Sequence
gacagaaggtctgccagcttacatt

SEQ ID NO: 226537 - DNA, 25 bp, Probe Sequence
gacagagtagtctctacttacctgt

SEQ ID NO: 226538 - DNA, 25 bp, Probe Sequence
gacaggtaggcatcttagtggacga

SEQ ID NO: 226539 - DNA, 25 bp, Probe Sequence
gacagggtgctatcgtggctgtgac

SEQ ID NO: 226540 - DNA, 25 bp, Probe Sequence
gacaggaatcctacacgtgcagctg

SEQ ID NO: 226541 - DNA, 25 bp, Probe Sequence
gacagggacggtttgctggctgaac

SEQ ID NO: 226542 - DNA, 25 bp, Probe Sequence
gacagaggacccttaaggatcaatg

SEQ ID NO: 226543 - DNA, 25 bp, Probe Sequence
gacaagtgtaacttcaacttcatat

SEQ ID NO: 226544 - DNA, 25 bp, Probe Sequence
gacacatggtaaccacttgttatat

SEQ ID NO: 226545 - DNA, 25 bp, Probe Sequence
gacacttttatgcacttaattcact

SEQ ID NO: 226546 - DNA, 25 bp, Probe Sequence
gacactttagaccattagacaattg

SEQ ID NO: 226547 - DNA, 25 bp, Probe Sequence
gagtctttagggattgagcctctgg

SEQ ID NO: 226548 - DNA, 25 bp, Probe Sequence
gggccttcaagttattgggctcagt

SEQ ID NO: 226549 - DNA, 25 bp, Probe Sequence
gggccgtagccctatctagggctgt

SEQ ID NO: 226550 - DNA, 25 bp, Probe Sequence
tggcccttactcaggtacggttgac

SEQ ID NO: 226551 - DNA, 25 bp, Probe Sequence
gacccttactactgtccaagggatc

SEQ ID NO: 226552 - DNA, 25 bp, Probe Sequence
gacaccttagtgacagagctccaag

SEQ ID NO: 226553 - DNA, 25 bp, Probe Sequence
gacaagctgatccgcatcagtgccc

SEQ ID NO: 226554 - DNA, 25 bp, Probe Sequence
gacagagatttgccagcgtgcttgc

SEQ ID NO: 226555 - DNA, 25 bp, Probe Sequence
gacaacatgctgggatggtgttcgt

SEQ ID NO: 226556 - DNA, 25 bp, Probe Sequence
gacaagctgtgccgaggttgtctcc

SEQ ID NO: 226557 - DNA, 25 bp, Probe Sequence
gacacttctaggtgttggcttcctt

SEQ ID NO: 226558 - DNA, 25 bp, Probe Sequence
gacagttccgtgaggatgacttccg

SEQ ID NO: 226559 - DNA, 25 bp, Probe Sequence
gacagcatctccccgggaaatgagc

SEQ ID NO: 226560 - DNA, 25 bp, Probe Sequence
gacacccaggccatgaaggagatgc

SEQ ID NO: 226561 - DNA, 25 bp, Probe Sequence
gacaacacgtttccaagaagatcaa

SEQ ID NO: 226562 - DNA, 25 bp, Probe Sequence
gacaagccaatcatatcaaaactca

SEQ ID NO: 226563 - DNA, 25 bp, Probe Sequence
gacacactgcaatttacaaagatct

SEQ ID NO: 226564 - DNA, 25 bp, Probe Sequence
gacacaaaatcagtgcacacaaatc

SEQ ID NO: 226565 - DNA, 25 bp, Probe Sequence
gacagcacaatgattgacaccaatg

SEQ ID NO: 226566 - DNA, 25 bp, Probe Sequence
gacagcgagttcagcaatgccattg

SEQ ID NO: 226567 - DNA, 25 bp, Probe Sequence
gacagggttctaggagctcctgggt

SEQ ID NO: 226568 - DNA, 25 bp, Probe Sequence
gacaagttaccagcatatcctgagt

SEQ ID NO: 226569 - DNA, 25 bp, Probe Sequence
gacaggtaaccactgctgctactgt

SEQ ID NO: 226570 - DNA, 25 bp, Probe Sequence
gacagcaggaccagatctgctatct

SEQ ID NO: 226571 - DNA, 25 bp, Probe Sequence
gacacatcagcacgatttctgttta

SEQ ID NO: 226572 - DNA, 25 bp, Probe Sequence
gacagaagcggaactctcttctaac

SEQ ID NO: 226573 - DNA, 25 bp, Probe Sequence
gacaacagcgagagctccatctcaa

SEQ ID NO: 226574 - DNA, 25 bp, Probe Sequence
gacaagagcgaaactccatctcaaa

SEQ ID NO: 226575 - DNA, 25 bp, Probe Sequence
gacaagagcgaaactccatctcaaa

SEQ ID NO: 226576 - DNA, 25 bp, Probe Sequence
gacaagcatgcagatcccgatttca

SEQ ID NO: 226577 - DNA, 25 bp, Probe Sequence
gacagattgcagtatccgggatcca

SEQ ID NO: 226578 - DNA, 25 bp, Probe Sequence
gacagaatggaaacggaggccgccc

SEQ ID NO: 226579 - DNA, 25 bp, Probe Sequence
gacaggatggtaacgaagccgtcgg

SEQ ID NO: 226580 - DNA, 25 bp, Probe Sequence
gacagaatggttcatgtgcgccttc

SEQ ID NO: 226581 - DNA, 25 bp, Probe Sequence
gacacttgtagtccattggtcattc

SEQ ID NO: 226582 - DNA, 25 bp, Probe Sequence
gacctttagtggtggccatttagcc

SEQ ID NO: 226583 - DNA, 25 bp, Probe Sequence
gacttttgttggtcgccctaatagg

SEQ ID NO: 226584 - DNA, 25 bp, Probe Sequence
gagttttggggtcacccagaattgc

SEQ ID NO: 226585 - DNA, 25 bp, Probe Sequence
tgattttttaagctaccctgaattt

SEQ ID NO: 226586 - DNA, 25 bp, Probe Sequence
gacacttttaaggtacactgcattt

SEQ ID NO: 226587 - DNA, 25 bp, Probe Sequence
gacactttggaatctaaccacttaa

SEQ ID NO: 226588 - DNA, 25 bp, Probe Sequence
gacttttgggaagagattccttcaa

SEQ ID NO: 226589 - DNA, 25 bp, Probe Sequence
gactcttcatgcccctaagatttta

SEQ ID NO: 226590 - DNA, 25 bp, Probe Sequence
gacatactcattgcctactttaaca

SEQ ID NO: 226591 - DNA, 25 bp, Probe Sequence
gactatagctacgctagctcctacc

SEQ ID NO: 226592 - DNA, 25 bp, Probe Sequence
gacagatccaagacctagacctagg

SEQ ID NO: 226593 - DNA, 25 bp, Probe Sequence
gacaaacgagtccacatgacctggg

SEQ ID NO: 226594 - DNA, 25 bp, Probe Sequence
gacaaactagtaagcatgacctggg

SEQ ID NO: 226595 - DNA, 25 bp, Probe Sequence
gacaagaaagtattcaggctctggg

SEQ ID NO: 226596 - DNA, 25 bp, Probe Sequence
gacacacaagggagcaggctatggg

SEQ ID NO: 226597 - DNA, 25 bp, Probe Sequence
gacaacacaaggtaagtgctgtgag

SEQ ID NO: 226598 - DNA, 25 bp, Probe Sequence
gacaacaagagcgaaactctgtcta

SEQ ID NO: 226599 - DNA, 25 bp, Probe Sequence
gacagtctatgacagacccttcact

SEQ ID NO: 226600 - DNA, 25 bp, Probe Sequence
gacagttaaaagtccttttcagcta

SEQ ID NO: 226601 - DNA, 25 bp, Probe Sequence
gacagtatacccaaacttttatata

SEQ ID NO: 226602 - DNA, 25 bp, Probe Sequence
gacagtatctcggattccttttttt

SEQ ID NO: 226603 - DNA, 25 bp, Probe Sequence
gacagtatctcggattccttttttt

SEQ ID NO: 226604 - DNA, 25 bp, Probe Sequence
gacaaatctctgctttatttcttgt

SEQ ID NO: 226605 - DNA, 25 bp, Probe Sequence
gacaaccctattaatcatttggtct

SEQ ID NO: 226606 - DNA, 25 bp, Probe Sequence
gacaactcatgccttaattttgtat

SEQ ID NO: 226607 - DNA, 25 bp, Probe Sequence
gacaaatctggttcaatttttatgt

SEQ ID NO: 226608 - DNA, 25 bp, Probe Sequence
gacacagttggatcaatactgatta

SEQ ID NO: 226609 - DNA, 25 bp, Probe Sequence
gacacagttacatagtcactgagag

SEQ ID NO: 226610 - DNA, 25 bp, Probe Sequence
gacaacagcttcttgagttctaagg

SEQ ID NO: 226611 - DNA, 25 bp, Probe Sequence
gacaaagcttacaagttgctactgg

SEQ ID NO: 226612 - DNA, 25 bp, Probe Sequence
gacagaggcttcaggtacaactggc

SEQ ID NO: 226613 - DNA, 25 bp, Probe Sequence
gacacagtctacatgggcaaagtga

SEQ ID NO: 226614 - DNA, 25 bp, Probe Sequence
gacacagactggcttggtcgcagtg

SEQ ID NO: 226615 - DNA, 25 bp, Probe Sequence
gacaaactccgcaggggctgtgaat

SEQ ID NO: 226616 - DNA, 25 bp, Probe Sequence
gacacaatggacgtagcgcggcgtg

SEQ ID NO: 226617 - DNA, 25 bp, Probe Sequence
gacaacgagccttgagccagggaga

SEQ ID NO: 226618 - DNA, 25 bp, Probe Sequence
gacactctagtcaaagccttggtaa

SEQ ID NO: 226619 - DNA, 25 bp, Probe Sequence
gacactctagtcaaagccttggtaa

SEQ ID NO: 226620 - DNA, 25 bp, Probe Sequence
gacactttggtagcactaatatgga

SEQ ID NO: 226621 - DNA, 25 bp, Probe Sequence
gacacatttgttgcaccaattaagt

SEQ ID NO: 226622 - DNA, 25 bp, Probe Sequence
gacaactctgtctgcacaacaaaaa

SEQ ID NO: 226623 - DNA, 25 bp, Probe Sequence
gacagctcagctgcggaaattcaca

SEQ ID NO: 226624 - DNA, 25 bp, Probe Sequence
gacagctcagctgcggaaattcaca

SEQ ID NO: 226625 - DNA, 25 bp, Probe Sequence
gacagtgcaggcgtggaatattccc

SEQ ID NO: 226626 - DNA, 25 bp, Probe Sequence
gacagtgcagatcctgctgaagctg

SEQ ID NO: 226627 - DNA, 25 bp, Probe Sequence
gacattagatgatgctgaaagacca

SEQ ID NO: 226628 - DNA, 25 bp, Probe Sequence
gacactagatgtgctgaccattgca

SEQ ID NO: 226629 - DNA, 25 bp, Probe Sequence
gacagcatagcatactgccttctga

SEQ ID NO: 226630 - DNA, 25 bp, Probe Sequence
gacactgagaacttacggcagagga

SEQ ID NO: 226631 - DNA, 25 bp, Probe Sequence
gacagtgatgaagtccacctggagg

SEQ ID NO: 226632 - DNA, 25 bp, Probe Sequence
gacaggatgtacccagtctggaagg

SEQ ID NO: 226633 - DNA, 25 bp, Probe Sequence
gacagtcaagtcctaattcgaagca

SEQ ID NO: 226634 - DNA, 25 bp, Probe Sequence
gacactcaagtccaacaactcgatg

SEQ ID NO: 226635 - DNA, 25 bp, Probe Sequence
gacaccagcagtagatacaactatg

SEQ ID NO: 226636 - DNA, 25 bp, Probe Sequence
gacaacgcactcaatgacatcacct

SEQ ID NO: 226637 - DNA, 25 bp, Probe Sequence
gacacagtgcacattgaataccaac

SEQ ID NO: 226638 - DNA, 25 bp, Probe Sequence
gacacaagcacaatttataccaact

SEQ ID NO: 226639 - DNA, 25 bp, Probe Sequence
gacagcaacatggtgttaacctctc

SEQ ID NO: 226640 - DNA, 25 bp, Probe Sequence
gacacatttgtgaaatgcaacctca

SEQ ID NO: 226641 - DNA, 25 bp, Probe Sequence
gacacttatggatacattggtgcaa

SEQ ID NO: 226642 - DNA, 25 bp, Probe Sequence
gacagttttgtatcattttgctaaa

SEQ ID NO: 226643 - DNA, 25 bp, Probe Sequence
gacagttttggggagccttcatacc

SEQ ID NO: 226644 - DNA, 25 bp, Probe Sequence
gacagttttggggagccttcatacc

SEQ ID NO: 226645 - DNA, 25 bp, Probe Sequence
gacacttctttggtcacactttttc

SEQ ID NO: 226646 - DNA, 25 bp, Probe Sequence
gacactactttcaaagccttacgtc

SEQ ID NO: 226647 - DNA, 25 bp, Probe Sequence
gacacagaaaactgtcctctacctc

SEQ ID NO: 226648 - DNA, 25 bp, Probe Sequence
gacacaaataacctttgcaaacctt

SEQ ID NO: 226649 - DNA, 25 bp, Probe Sequence
gacacaaccaaccatattaacacct

SEQ ID NO: 226650 - DNA, 25 bp, Probe Sequence
gacaaacaacacctttagatcacat

SEQ ID NO: 226651 - DNA, 25 bp, Probe Sequence
gacaaacataactatttagcagaga

SEQ ID NO: 226652 - DNA, 25 bp, Probe Sequence
gacaacgttgcagtcattggagaaa

SEQ ID NO: 226653 - DNA, 25 bp, Probe Sequence
gacaacactgttgcattggcagtta

SEQ ID NO: 226654 - DNA, 25 bp, Probe Sequence
gacaacactcatcacacttcattgt

SEQ ID NO: 226655 - DNA, 25 bp, Probe Sequence
gacaaagctgctaaatctcctattt

SEQ ID NO: 226656 - DNA, 25 bp, Probe Sequence
gacaaagctgctaaatctcctattt

SEQ ID NO: 226657 - DNA, 25 bp, Probe Sequence
gacaaagctgctaaatctcctattt

SEQ ID NO: 226658 - DNA, 25 bp, Probe Sequence
gacactgggctgaaatgcctgtatg

SEQ ID NO: 226659 - DNA, 25 bp, Probe Sequence
gacactggctcagtagtgcctttgc

SEQ ID NO: 226660 - DNA, 25 bp, Probe Sequence
gacacagatccaataatctttgtct

SEQ ID NO: 226661 - DNA, 25 bp, Probe Sequence
gacacagacccatgacatgtcttat

SEQ ID NO: 226662 - DNA, 25 bp, Probe Sequence
gacaacactaatcagcacatcgtac

SEQ ID NO: 226663 - DNA, 25 bp, Probe Sequence
gacaacactaacagatcccatactc

SEQ ID NO: 226664 - DNA, 25 bp, Probe Sequence
gacacaagcttagggataacacatt

SEQ ID NO: 226665 - DNA, 25 bp, Probe Sequence
gacaaagctacctatgataaactct

SEQ ID NO: 226666 - DNA, 25 bp, Probe Sequence
gacacaagccatgaagacaaagact

SEQ ID NO: 226667 - DNA, 25 bp, Probe Sequence
gacaaacatctcccagcaaaagtgc

SEQ ID NO: 226668 - DNA, 25 bp, Probe Sequence
gacaacatcctcccagagaaggaaa

SEQ ID NO: 226669 - DNA, 25 bp, Probe Sequence
gacaaagccttctatgaagcaggca

SEQ ID NO: 226670 - DNA, 25 bp, Probe Sequence
gacaaatggccccatgacatgagga

SEQ ID NO: 226671 - DNA, 25 bp, Probe Sequence
gacaaatgagcaacgcatccggatg

SEQ ID NO: 226672 - DNA, 25 bp, Probe Sequence
gacaaatgcagcttagccacgtgag

SEQ ID NO: 226673 - DNA, 25 bp, Probe Sequence
gacaaatggcgttcagcagcgggtt

SEQ ID NO: 226674 - DNA, 25 bp, Probe Sequence
gacaaaggaggggcagcagggtgtg

SEQ ID NO: 226675 - DNA, 25 bp, Probe Sequence
gacacaagaagatccacgcggtggg

SEQ ID NO: 226676 - DNA, 25 bp, Probe Sequence
gacaaagtgtaaaccgcatggatgg

SEQ ID NO: 226677 - DNA, 25 bp, Probe Sequence
gacaaagtgaatacccactgggcta

SEQ ID NO: 226678 - DNA, 25 bp, Probe Sequence
gacaaacatggcaaccgactgggga

SEQ ID NO: 226679 - DNA, 25 bp, Probe Sequence
gacaacatctggaaccagggcctgg

SEQ ID NO: 226680 - DNA, 25 bp, Probe Sequence
gacagactttccgcagggtgtgcgc

SEQ ID NO: 226681 - DNA, 25 bp, Probe Sequence
gacagagttaccctgcagggagcca

SEQ ID NO: 226682 - DNA, 25 bp, Probe Sequence
gacagagttaccctaaggtggagcc

SEQ ID NO: 226683 - DNA, 25 bp, Probe Sequence
gacagagcctacccaaataagaagg

SEQ ID NO: 226684 - DNA, 25 bp, Probe Sequence
gacaaactcaatcaaattattaggc

SEQ ID NO: 226685 - DNA, 25 bp, Probe Sequence
gacaaactcacatttgatattctct

SEQ ID NO: 226686 - DNA, 25 bp, Probe Sequence
gacaccgctcagtattactttctgc

SEQ ID NO: 226687 - DNA, 25 bp, Probe Sequence
gacactcccatcagaacttggcagc

SEQ ID NO: 226688 - DNA, 25 bp, Probe Sequence
gacactacactctagaatttccact

SEQ ID NO: 226689 - DNA, 25 bp, Probe Sequence
gacactgacgatgtgaatttcccta

SEQ ID NO: 226690 - DNA, 25 bp, Probe Sequence
gacactgggaaaaattgcattcctg

SEQ ID NO: 226691 - DNA, 25 bp, Probe Sequence
gacactggtagtaaatcactctagt

SEQ ID NO: 226692 - DNA, 25 bp, Probe Sequence
gacagcaggtcgacagagaacctgg

SEQ ID NO: 226693 - DNA, 25 bp, Probe Sequence
gacaggttgcagatatgaacatgtg

SEQ ID NO: 226694 - DNA, 25 bp, Probe Sequence
gacagggagctagatgaaatggctt

SEQ ID NO: 226695 - DNA, 25 bp, Probe Sequence
gacagaggggaggaggtgggcattt

SEQ ID NO: 226696 - DNA, 25 bp, Probe Sequence
gacagaggggcactggtttacactt

SEQ ID NO: 226697 - DNA, 25 bp, Probe Sequence
gacacggagcacctggtctataacc

SEQ ID NO: 226698 - DNA, 25 bp, Probe Sequence
gacacggagcagagactagaagccc

SEQ ID NO: 226699 - DNA, 25 bp, Probe Sequence
gacacaggaagttccagggcaccca

SEQ ID NO: 226700 - DNA, 25 bp, Probe Sequence
gacatactggagatcggggcccaat

SEQ ID NO: 226701 - DNA, 25 bp, Probe Sequence
gacatacttaggacctcgggacctt

SEQ ID NO: 226702 - DNA, 25 bp, Probe Sequence
gactcctaccgaactcgggcaagtt

SEQ ID NO: 226703 - DNA, 25 bp, Probe Sequence
gacacctttcgaactgtggggagta

SEQ ID NO: 226704 - DNA, 25 bp, Probe Sequence
gacacctctttgtggctgttggagt

SEQ ID NO: 226705 - DNA, 25 bp, Probe Sequence
gacatccatcttttacctggggatt

SEQ ID NO: 226706 - DNA, 25 bp, Probe Sequence
gacactgaattaaaactgagggatc

SEQ ID NO: 226707 - DNA, 25 bp, Probe Sequence
gacagtactttgaaactcatgttga

SEQ ID NO: 226708 - DNA, 25 bp, Probe Sequence
gacaccacttcgagatgtctgcttt

SEQ ID NO: 226709 - DNA, 25 bp, Probe Sequence
gacactactgaggtggttctttcta

SEQ ID NO: 226710 - DNA, 25 bp, Probe Sequence
gacactattggcatggttgtaatcc

SEQ ID NO: 226711 - DNA, 25 bp, Probe Sequence
gacactatagaaccagtttgtacca

SEQ ID NO: 226712 - DNA, 25 bp, Probe Sequence
gacacttacaaattgctgcttgtcc

SEQ ID NO: 226713 - DNA, 25 bp, Probe Sequence
gacactgtaacctactcttgaatca

SEQ ID NO: 226714 - DNA, 25 bp, Probe Sequence
gacagtggaacttacattgaacata

SEQ ID NO: 226715 - DNA, 25 bp, Probe Sequence
gacatgcatggtttaacttcctcat

SEQ ID NO: 226716 - DNA, 25 bp, Probe Sequence
gacatgcatggtttaacttcctcat

SEQ ID NO: 226717 - DNA, 25 bp, Probe Sequence
gacatgagggatggccctgtctctc

SEQ ID NO: 226718 - DNA, 25 bp, Probe Sequence
gacaggagacatgagtctttgccgg

SEQ ID NO: 226719 - DNA, 25 bp, Probe Sequence
gacagacagccatgaggctcgggca

SEQ ID NO: 226720 - DNA, 25 bp, Probe Sequence
gacagcaactagcagtctgggaaca

SEQ ID NO: 226721 - DNA, 25 bp, Probe Sequence
gacacaattggatgctgtggagatg

SEQ ID NO: 226722 - DNA, 25 bp, Probe Sequence
gacaaactgatgatcgagatggatg

SEQ ID NO: 226723 - DNA, 25 bp, Probe Sequence
gacacaaccagcacagagctgtcag

SEQ ID NO: 226724 - DNA, 25 bp, Probe Sequence
gacacaaccagcacagagctgtcag

SEQ ID NO: 226725 - DNA, 25 bp, Probe Sequence
gacacaagccagcacaggcagcagg

SEQ ID NO: 226726 - DNA, 25 bp, Probe Sequence
gacaaaggatgcccagcagcactgc

SEQ ID NO: 226727 - DNA, 25 bp, Probe Sequence
gacacagagaatggaagccctggaa

SEQ ID NO: 226728 - DNA, 25 bp, Probe Sequence
gacagtgcagaaggactgccagtgt

SEQ ID NO: 226729 - DNA, 25 bp, Probe Sequence
gacagatgctcaagtgaggctgcag

SEQ ID NO: 226730 - DNA, 25 bp, Probe Sequence
gacagagcatgctcatttgctggcg

SEQ ID NO: 226731 - DNA, 25 bp, Probe Sequence
gacagacatctggcaatattgtcca

SEQ ID NO: 226732 - DNA, 25 bp, Probe Sequence
gacacataatgtaacattgtctcaa

SEQ ID NO: 226733 - DNA, 25 bp, Probe Sequence
gacacattagtgaaatattgacagg

SEQ ID NO: 226734 - DNA, 25 bp, Probe Sequence
gacactgttgataaaaactcaggca

SEQ ID NO: 226735 - DNA, 25 bp, Probe Sequence
gacacttctgccatgataaccagac

SEQ ID NO: 226736 - DNA, 25 bp, Probe Sequence
gacacatgctctcaatatataataa

SEQ ID NO: 226737 - DNA, 25 bp, Probe Sequence
gacacagctgcactggcaagaaaat

SEQ ID NO: 226738 - DNA, 25 bp, Probe Sequence
gacacaggcagcttccaaaatatat

SEQ ID NO: 226739 - DNA, 25 bp, Probe Sequence
gacacaggcagcttccaaaatatat

SEQ ID NO: 226740 - DNA, 25 bp, Probe Sequence
gacagagcacagctgcccaaataca

SEQ ID NO: 226741 - DNA, 25 bp, Probe Sequence
gacatggacatggacttagacaagg

SEQ ID NO: 226742 - DNA, 25 bp, Probe Sequence
gacagagatctggagcatttgagca

SEQ ID NO: 226743 - DNA, 25 bp, Probe Sequence
gacatggtctagaatctgtaccctt

SEQ ID NO: 226744 - DNA, 25 bp, Probe Sequence
gacagcgcctaggtcaggagatctt

SEQ ID NO: 226745 - DNA, 25 bp, Probe Sequence
gacagcaccttggtgccagtgatcc

SEQ ID NO: 226746 - DNA, 25 bp, Probe Sequence
gacagcaacgtggtcttggacacaa

SEQ ID NO: 226747 - DNA, 25 bp, Probe Sequence
gacacatttgtagtcattgtatcac

SEQ ID NO: 226748 - DNA, 25 bp, Probe Sequence
gacacagagcttttattgtcaccca

SEQ ID NO: 226749 - DNA, 25 bp, Probe Sequence
gacactaagcattttgttcacacca

SEQ ID NO: 226750 - DNA, 25 bp, Probe Sequence
gacactaagcattttgttcacacca

SEQ ID NO: 226751 - DNA, 25 bp, Probe Sequence
gacacttacatacttggaccaaaaa

SEQ ID NO: 226752 - DNA, 25 bp, Probe Sequence
gacagtctaatcagtagtctattaa

SEQ ID NO: 226753 - DNA, 25 bp, Probe Sequence
gactgtctttaacttggctttagaa

SEQ ID NO: 226754 - DNA, 25 bp, Probe Sequence
gacttgtaacaactttgcctggact

SEQ ID NO: 226755 - DNA, 25 bp, Probe Sequence
gacttgcaaacggattggcctaatg

SEQ ID NO: 226756 - DNA, 25 bp, Probe Sequence
gacaccaaacggtatgccactgggt

SEQ ID NO: 226757 - DNA, 25 bp, Probe Sequence
gacacacaatgatgagttcacctac

SEQ ID NO: 226758 - DNA, 25 bp, Probe Sequence
gacacaatgagcttagtacctccaa

SEQ ID NO: 226759 - DNA, 25 bp, Probe Sequence
gacaaatgggatttctactgccagt

SEQ ID NO: 226760 - DNA, 25 bp, Probe Sequence
gacacaaagtgactttcagggctgt

SEQ ID NO: 226761 - DNA, 25 bp, Probe Sequence
gacacaagtgccagattgcgggctg

SEQ ID NO: 226762 - DNA, 25 bp, Probe Sequence
gacaaaggctcaggacggctggctc

SEQ ID NO: 226763 - DNA, 25 bp, Probe Sequence
gacaaagtatcagactggtgggagg

SEQ ID NO: 226764 - DNA, 25 bp, Probe Sequence
gacaaagtatatgcctgctggatgg

SEQ ID NO: 226765 - DNA, 25 bp, Probe Sequence
gacacatcattgtggcctgtgaagg

SEQ ID NO: 226766 - DNA, 25 bp, Probe Sequence
gacactcattaccgtctgtgattgc

SEQ ID NO: 226767 - DNA, 25 bp, Probe Sequence
gacaccattacttttgtgaacgctt

SEQ ID NO: 226768 - DNA, 25 bp, Probe Sequence
gacactgttcaggaatcggaatcct

SEQ ID NO: 226769 - DNA, 25 bp, Probe Sequence
gagccaggtctggctatcgtggtcg

SEQ ID NO: 226770 - DNA, 25 bp, Probe Sequence
gacacagtgcccgtgtcggagccgc

SEQ ID NO: 226771 - DNA, 25 bp, Probe Sequence
gacacaggcctcagttaggacgctc

SEQ ID NO: 226772 - DNA, 25 bp, Probe Sequence
gacagaccctgtattaatgtctctc

SEQ ID NO: 226773 - DNA, 25 bp, Probe Sequence
gacagacccatctaaaaggccagct

SEQ ID NO: 226774 - DNA, 25 bp, Probe Sequence
gacacaccctagtaaaggagactga

SEQ ID NO: 226775 - DNA, 25 bp, Probe Sequence
gacacgccctcttagtagggactta

SEQ ID NO: 226776 - DNA, 25 bp, Probe Sequence
gacacagcagctcctttgtaagtac

SEQ ID NO: 226777 - DNA, 25 bp, Probe Sequence
gacaccacttttcaaaggacttctt

SEQ ID NO: 226778 - DNA, 25 bp, Probe Sequence
gacctcggttctcattaaagtattt

SEQ ID NO: 226779 - DNA, 25 bp, Probe Sequence
gactccgatcttgccttaaagtcct

SEQ ID NO: 226780 - DNA, 25 bp, Probe Sequence
gacaaagatcttgccttacagactt

SEQ ID NO: 226781 - DNA, 25 bp, Probe Sequence
gacacagagacagtacctgtaatga

SEQ ID NO: 226782 - DNA, 25 bp, Probe Sequence
gacacaggacttatctcacacatgt

SEQ ID NO: 226783 - DNA, 25 bp, Probe Sequence
gacactggatataatctgttcctgg

SEQ ID NO: 226784 - DNA, 25 bp, Probe Sequence
gacagcatggtgaaacctcatctct

SEQ ID NO: 226785 - DNA, 25 bp, Probe Sequence
gacagctgcttacatgttcatctct

SEQ ID NO: 226786 - DNA, 25 bp, Probe Sequence
gacagagccatgcgattgattgttc

SEQ ID NO: 226787 - DNA, 25 bp, Probe Sequence
gacagactagggacttctattgcag

SEQ ID NO: 226788 - DNA, 25 bp, Probe Sequence
gacagactatggactttctactggc

SEQ ID NO: 226789 - DNA, 25 bp, Probe Sequence
gacagaggatgcacttgtccaatcc

SEQ ID NO: 226790 - DNA, 25 bp, Probe Sequence
gacaaatcagcgatgtgtcaccccc

SEQ ID NO: 226791 - DNA, 25 bp, Probe Sequence
gacacgatcatggttttagatccca

SEQ ID NO: 226792 - DNA, 25 bp, Probe Sequence
gacactgtctggtttccaatgcttc

SEQ ID NO: 226793 - DNA, 25 bp, Probe Sequence
gacactgtgcattgcattatggaca

SEQ ID NO: 226794 - DNA, 25 bp, Probe Sequence
gacacttgattcagatcaggtcggc

SEQ ID NO: 226795 - DNA, 25 bp, Probe Sequence
gacactgtctatcagtacgtcggca

SEQ ID NO: 226796 - DNA, 25 bp, Probe Sequence
gacacattcattcagatacttctta

SEQ ID NO: 226797 - DNA, 25 bp, Probe Sequence
gacacattctcgaatataataccga

SEQ ID NO: 226798 - DNA, 25 bp, Probe Sequence
gacagcattccaataaagcatacgg

SEQ ID NO: 226799 - DNA, 25 bp, Probe Sequence
gacagagatcgcagcagaagcaagg

SEQ ID NO: 226800 - DNA, 25 bp, Probe Sequence
gacagcattcagaggagacggcaaa

SEQ ID NO: 226801 - DNA, 25 bp, Probe Sequence
gacagcctagagaggacggcaatga

SEQ ID NO: 226802 - DNA, 25 bp, Probe Sequence
gacagttactgaggagcacatgcca

SEQ ID NO: 226803 - DNA, 25 bp, Probe Sequence
gacagaggattgtgtcgtgccaatg

SEQ ID NO: 226804 - DNA, 25 bp, Probe Sequence
gacaggacatattgctgctggtaca

SEQ ID NO: 226805 - DNA, 25 bp, Probe Sequence
gacagtggaagtggtggaatctatc

SEQ ID NO: 226806 - DNA, 25 bp, Probe Sequence
gacaggtcaaatctgagggctcatc

SEQ ID NO: 226807 - DNA, 25 bp, Probe Sequence
gacatgagacaatctgggtggccac

SEQ ID NO: 226808 - DNA, 25 bp, Probe Sequence
gacatcaaactctatggcgtggcct

SEQ ID NO: 226809 - DNA, 25 bp, Probe Sequence
gacacgtgagctgcaggagctggcc

SEQ ID NO: 226810 - DNA, 25 bp, Probe Sequence
gacacgctcactgcgaaggcaggtt

SEQ ID NO: 226811 - DNA, 25 bp, Probe Sequence
gacacagcccactgaacaaggtctc

SEQ ID NO: 226812 - DNA, 25 bp, Probe Sequence
gacacatcctactaaattcctgact

SEQ ID NO: 226813 - DNA, 25 bp, Probe Sequence
gacacatcctcaataaaacctgttg

SEQ ID NO: 226814 - DNA, 25 bp, Probe Sequence
gacactactttataagctgtttgtg

SEQ ID NO: 226815 - DNA, 25 bp, Probe Sequence
gacactattagttgaaagcatttta

SEQ ID NO: 226816 - DNA, 25 bp, Probe Sequence
gacaaatttctttgaatgatttttc

SEQ ID NO: 226817 - DNA, 25 bp, Probe Sequence
gacagactatctttggggatgtttt

SEQ ID NO: 226818 - DNA, 25 bp, Probe Sequence
gacacacacaactggggcagatgtt

SEQ ID NO: 226819 - DNA, 25 bp, Probe Sequence
gacacacatacagtgcctggagaaa

SEQ ID NO: 226820 - DNA, 25 bp, Probe Sequence
gacaccatcacacggatggcgccta

SEQ ID NO: 226821 - DNA, 25 bp, Probe Sequence
gacacactactcagctgtagcctga

SEQ ID NO: 226822 - DNA, 25 bp, Probe Sequence
gacacactactcagcatgggcaaca

SEQ ID NO: 226823 - DNA, 25 bp, Probe Sequence
gacacctcagctgacagcgtgggca

SEQ ID NO: 226824 - DNA, 25 bp, Probe Sequence
gacagtgttgaggaccatcttgcct

SEQ ID NO: 226825 - DNA, 25 bp, Probe Sequence
gagatccttaaagactgtgccttgg

SEQ ID NO: 226826 - DNA, 25 bp, Probe Sequence
gacaccttaacatatttcatctact

SEQ ID NO: 226827 - DNA, 25 bp, Probe Sequence
gacaccttaacatatttcatctaat

SEQ ID NO: 226828 - DNA, 25 bp, Probe Sequence
gacaccggtgtatatgttatctgtt

SEQ ID NO: 226829 - DNA, 25 bp, Probe Sequence
gacacaccgtatgttgttagagtct

SEQ ID NO: 226830 - DNA, 25 bp, Probe Sequence
gacacacggcttagtgcgtctgaga

SEQ ID NO: 226831 - DNA, 25 bp, Probe Sequence
gacagtgcacgcaggtgcgcgtgga

SEQ ID NO: 226832 - DNA, 25 bp, Probe Sequence
gacagcatgtggaggcttggatgga

SEQ ID NO: 226833 - DNA, 25 bp, Probe Sequence
gacatagtggccgggtggtgggggc

SEQ ID NO: 226834 - DNA, 25 bp, Probe Sequence
gacacgtgaggggggggtgggtgag

SEQ ID NO: 226835 - DNA, 25 bp, Probe Sequence
gacacgagagagacgggcggtgtga

SEQ ID NO: 226836 - DNA, 25 bp, Probe Sequence
gacactgaagagcctgtgccggatc

SEQ ID NO: 226837 - DNA, 25 bp, Probe Sequence
gacactggcagaagctctcaagttc

SEQ ID NO: 226838 - DNA, 25 bp, Probe Sequence
gacactgtcaaaggccgtgttccat

SEQ ID NO: 226839 - DNA, 25 bp, Probe Sequence
gacactttaaccctgtgtgtggcag

SEQ ID NO: 226840 - DNA, 25 bp, Probe Sequence
gacactttacagactttgctggagt

SEQ ID NO: 226841 - DNA, 25 bp, Probe Sequence
gacaccctaaacgttctgtgtcttt

SEQ ID NO: 226842 - DNA, 25 bp, Probe Sequence
gacactcatttatctgtcctgtgtt

SEQ ID NO: 226843 - DNA, 25 bp, Probe Sequence
gacactatcttcaacctcggtgtgt

SEQ ID NO: 226844 - DNA, 25 bp, Probe Sequence
gacaggatgtccatcttgacgttgc

SEQ ID NO: 226845 - DNA, 25 bp, Probe Sequence
gacaggagttggtctacatagtagt

SEQ ID NO: 226846 - DNA, 25 bp, Probe Sequence
gacacgtgcttgatgctgagcaagt

SEQ ID NO: 226847 - DNA, 25 bp, Probe Sequence
gacacggccagaacggcaagagtgt

SEQ ID NO: 226848 - DNA, 25 bp, Probe Sequence
gacacagcgcaccagaagctaaagt

SEQ ID NO: 226849 - DNA, 25 bp, Probe Sequence
gacacccagcagtaagctaacagtg

SEQ ID NO: 226850 - DNA, 25 bp, Probe Sequence
gacacccaaggaggctattgagggc

SEQ ID NO: 226851 - DNA, 25 bp, Probe Sequence
gacacccaaggaggctattgagggc

SEQ ID NO: 226852 - DNA, 25 bp, Probe Sequence
gacagcccaaagccagcattatgtg

SEQ ID NO: 226853 - DNA, 25 bp, Probe Sequence
gacactgtcagttgccagatgtagg

SEQ ID NO: 226854 - DNA, 25 bp, Probe Sequence
gacacgtcatggaccatgactgggc

SEQ ID NO: 226855 - DNA, 25 bp, Probe Sequence
gacagctgacgtacctgagcatgga

SEQ ID NO: 226856 - DNA, 25 bp, Probe Sequence
gacagctgacgttagcgcagggatc

SEQ ID NO: 226857 - DNA, 25 bp, Probe Sequence
gacactgaccattacacaggctgtt

SEQ ID NO: 226858 - DNA, 25 bp, Probe Sequence
gacacctccagaacgcaggtgctgg

SEQ ID NO: 226859 - DNA, 25 bp, Probe Sequence
gacagcccgagcacaaggcgtgaga

SEQ ID NO: 226860 - DNA, 25 bp, Probe Sequence
gacagcctgtacaccatgtctagtg

SEQ ID NO: 226861 - DNA, 25 bp, Probe Sequence
gacactgatgtcatcctcatgtgct

SEQ ID NO: 226862 - DNA, 25 bp, Probe Sequence
gacactgatgattctcaccagtctg

SEQ ID NO: 226863 - DNA, 25 bp, Probe Sequence
gacacagactacgacacgtatgccg

SEQ ID NO: 226864 - DNA, 25 bp, Probe Sequence
gacatgcagactaccactgcctaca

SEQ ID NO: 226865 - DNA, 25 bp, Probe Sequence
gacatgaccataaatagcgtatacg

SEQ ID NO: 226866 - DNA, 25 bp, Probe Sequence
gacagcacagtgacaacggtagacg

SEQ ID NO: 226867 - DNA, 25 bp, Probe Sequence
gacactgcaggttaagggcagattg

SEQ ID NO: 226868 - DNA, 25 bp, Probe Sequence
gacatatcaaatgcaagggcgttta

SEQ ID NO: 226869 - DNA, 25 bp, Probe Sequence
gacacaccatgataaggacgctgct

SEQ ID NO: 226870 - DNA, 25 bp, Probe Sequence
gacagctacagtcaatgaacctgct

SEQ ID NO: 226871 - DNA, 25 bp, Probe Sequence
gacagaaacattggatgaagccatc

SEQ ID NO: 226872 - DNA, 25 bp, Probe Sequence
gacagaagcccatgatgacccaaac

SEQ ID NO: 226873 - DNA, 25 bp, Probe Sequence
gacagagagctcctttgacacaaaa

SEQ ID NO: 226874 - DNA, 25 bp, Probe Sequence
gacagaggacgcttgagccagaatc

SEQ ID NO: 226875 - DNA, 25 bp, Probe Sequence
gacagacatactgaatgccatggac

SEQ ID NO: 226876 - DNA, 25 bp, Probe Sequence
gacagactactcagcatgggcaaca

SEQ ID NO: 226877 - DNA, 25 bp, Probe Sequence
gacacgcagaccagctgaggaggac

SEQ ID NO: 226878 - DNA, 25 bp, Probe Sequence
gacatcggagccagcgagaactcag

SEQ ID NO: 226879 - DNA, 25 bp, Probe Sequence
gacacggagctcgtggagaccaggc

SEQ ID NO: 226880 - DNA, 25 bp, Probe Sequence
gacacagggtcttgggactggggtt

SEQ ID NO: 226881 - DNA, 25 bp, Probe Sequence
gacaggatcgtttgaggccgggagt

SEQ ID NO: 226882 - DNA, 25 bp, Probe Sequence
gacaggagctgaagggctcccaggg

SEQ ID NO: 226883 - DNA, 25 bp, Probe Sequence
gacagctgaggatgggcctagcaga

SEQ ID NO: 226884 - DNA, 25 bp, Probe Sequence
gacagcaagggcttgcagcctagta

SEQ ID NO: 226885 - DNA, 25 bp, Probe Sequence
gacagtcagggtaagcacttgttca

SEQ ID NO: 226886 - DNA, 25 bp, Probe Sequence
gacactgagggtaacactcctctac

SEQ ID NO: 226887 - DNA, 25 bp, Probe Sequence
gacactaggtgctgaatctcctgca

SEQ ID NO: 226888 - DNA, 25 bp, Probe Sequence
gacactggcaggtgaatccactgag

SEQ ID NO: 226889 - DNA, 25 bp, Probe Sequence
gacagggcaggatgtgatctttggc

SEQ ID NO: 226890 - DNA, 25 bp, Probe Sequence
gacacggaggaagatctggagagac

SEQ ID NO: 226891 - DNA, 25 bp, Probe Sequence
gacacgttggaagtagctgatgaag

SEQ ID NO: 226892 - DNA, 25 bp, Probe Sequence
gacacttggggaggagcaatagaga

SEQ ID NO: 226893 - DNA, 25 bp, Probe Sequence
gacacttggaggttgatccacagag

SEQ ID NO: 226894 - DNA, 25 bp, Probe Sequence
gacacttagcttctgatgccatcat

SEQ ID NO: 226895 - DNA, 25 bp, Probe Sequence
gacagctatgatctcaattccattt

SEQ ID NO: 226896 - DNA, 25 bp, Probe Sequence
gacactgtattttttcacattgatt

SEQ ID NO: 226897 - DNA, 25 bp, Probe Sequence
gacactttcacttttgcagattggg

SEQ ID NO: 226898 - DNA, 25 bp, Probe Sequence
gacacattccacaagcgtcatgaag

SEQ ID NO: 226899 - DNA, 25 bp, Probe Sequence
gacacattcctcaatggtaagactc

SEQ ID NO: 226900 - DNA, 25 bp, Probe Sequence
gacacattcgcctagagaacaacga

SEQ ID NO: 226901 - DNA, 25 bp, Probe Sequence
gacacattggactacgaatgctacg

SEQ ID NO: 226902 - DNA, 25 bp, Probe Sequence
gacactatggacttcagacatgcag

SEQ ID NO: 226903 - DNA, 25 bp, Probe Sequence
gacagtatggacttccagtgaagta

SEQ ID NO: 226904 - DNA, 25 bp, Probe Sequence
gacagaagtcaatgccttgaaggaa

SEQ ID NO: 226905 - DNA, 25 bp, Probe Sequence
gactatcagtcaaaccttgcttagg

SEQ ID NO: 226906 - DNA, 25 bp, Probe Sequence
gacatcacaggaacaactcctttga

SEQ ID NO: 226907 - DNA, 25 bp, Probe Sequence
gacacgtgcaacagactgccttata

SEQ ID NO: 226908 - DNA, 25 bp, Probe Sequence
gacacttaaatctaccctcttagca

SEQ ID NO: 226909 - DNA, 25 bp, Probe Sequence
gacacttttgatgacgattcttaac

SEQ ID NO: 226910 - DNA, 25 bp, Probe Sequence
gacacttttgatgacgattcttaac

SEQ ID NO: 226911 - DNA, 25 bp, Probe Sequence
gacactatagatactaagtttgtac

SEQ ID NO: 226912 - DNA, 25 bp, Probe Sequence
gacactatagaacacagtttgtacc

SEQ ID NO: 226913 - DNA, 25 bp, Probe Sequence
gacactatagaacaagtttgtacaa

SEQ ID NO: 226914 - DNA, 25 bp, Probe Sequence
gacactatagcacaaggtttgtaca

SEQ ID NO: 226915 - DNA, 25 bp, Probe Sequence
gacacatataggtgagggtctccac

SEQ ID NO: 226916 - DNA, 25 bp, Probe Sequence
gacacatatatttaggggattcaga

SEQ ID NO: 226917 - DNA, 25 bp, Probe Sequence
gacagaattctacatcggtctaatc

SEQ ID NO: 226918 - DNA, 25 bp, Probe Sequence
gacagagcttaagcaccttctaatt

SEQ ID NO: 226919 - DNA, 25 bp, Probe Sequence
gacacgttacagtcaaatttcactt

SEQ ID NO: 226920 - DNA, 25 bp, Probe Sequence
gactggttgtcgggacattccactg

SEQ ID NO: 226921 - DNA, 25 bp, Probe Sequence
gacatggttgtagactttcacctgg

SEQ ID NO: 226922 - DNA, 25 bp, Probe Sequence
gacaggggctatgggtttgctttgg

SEQ ID NO: 226923 - DNA, 25 bp, Probe Sequence
gacagagaactctgggttccgtcgt

SEQ ID NO: 226924 - DNA, 25 bp, Probe Sequence
gacatggacctatctgggtccttct

SEQ ID NO: 226925 - DNA, 25 bp, Probe Sequence
gacaggaccatcgaaggggacttcc

SEQ ID NO: 226926 - DNA, 25 bp, Probe Sequence
gacagggccatcgaagggcgtaccg

SEQ ID NO: 226927 - DNA, 25 bp, Probe Sequence
gacagaggagacaaaggcgcggcag

SEQ ID NO: 226928 - DNA, 25 bp, Probe Sequence
gacaccgtgacatcaggccagaggt

SEQ ID NO: 226929 - DNA, 25 bp, Probe Sequence
gacagccagatcgttcagaaagagg

SEQ ID NO: 226930 - DNA, 25 bp, Probe Sequence
gacaccgctgcagccaaaacaggct

SEQ ID NO: 226931 - DNA, 25 bp, Probe Sequence
gacacccgccctcaagaagcgggcc

SEQ ID NO: 226932 - DNA, 25 bp, Probe Sequence
gactagttcccctaataatcggtgc

SEQ ID NO: 226933 - DNA, 25 bp, Probe Sequence
gacccttcccactacataatagggc

SEQ ID NO: 226934 - DNA, 25 bp, Probe Sequence
gagaccatcccggctaaaacggtga

SEQ ID NO: 226935 - DNA, 25 bp, Probe Sequence
gagaccatcccggctaaaacggtga

SEQ ID NO: 226936 - DNA, 25 bp, Probe Sequence
gagtcacgtccgactaaaaccggat

SEQ ID NO: 226937 - DNA, 25 bp, Probe Sequence
gacaccgttcgtcaagaatcctgga

SEQ ID NO: 226938 - DNA, 25 bp, Probe Sequence
gacaccgaatcaccatcaagaaacg

SEQ ID NO: 226939 - DNA, 25 bp, Probe Sequence
gacagcccacatgctgcataagatg

SEQ ID NO: 226940 - DNA, 25 bp, Probe Sequence
gacagccccatcctcaaagactgtc

SEQ ID NO: 226941 - DNA, 25 bp, Probe Sequence
gacagccccatcctcaaagactgtc

SEQ ID NO: 226942 - DNA, 25 bp, Probe Sequence
gacagccccatcctcaaagactgtc

SEQ ID NO: 226943 - DNA, 25 bp, Probe Sequence
gacagtccgtcaaaacagattgttt

SEQ ID NO: 226944 - DNA, 25 bp, Probe Sequence
gacatctgggtctcaatcgataatt

SEQ ID NO: 226945 - DNA, 25 bp, Probe Sequence
gacatcggttcacagtcgtttctat

SEQ ID NO: 226946 - DNA, 25 bp, Probe Sequence
gacaggacttagggactttcctact

SEQ ID NO: 226947 - DNA, 25 bp, Probe Sequence
gacggagctgtaggtaaaacttgcc

SEQ ID NO: 226948 - DNA, 25 bp, Probe Sequence
gacggaccctgttgtcaaaattgcc

SEQ ID NO: 226949 - DNA, 25 bp, Probe Sequence
gacaccactcctgagataacaatcc

SEQ ID NO: 226950 - DNA, 25 bp, Probe Sequence
gacaccactacatatcaatgagatt

SEQ ID NO: 226951 - DNA, 25 bp, Probe Sequence
gacacccatcaagctcagcaaatta

SEQ ID NO: 226952 - DNA, 25 bp, Probe Sequence
gagccaatcaaaactactaactaca

SEQ ID NO: 226953 - DNA, 25 bp, Probe Sequence
gacactaaatcacacactatcctaa

SEQ ID NO: 226954 - DNA, 25 bp, Probe Sequence
gactcaaaaccatcatcaacaccaa

SEQ ID NO: 226955 - DNA, 25 bp, Probe Sequence
gactcaaaaccatcatcaacaccaa

SEQ ID NO: 226956 - DNA, 25 bp, Probe Sequence
gacagacagaacaactaccaaccaa

SEQ ID NO: 226957 - DNA, 25 bp, Probe Sequence
gacagctggcgaaacttccaagcca

SEQ ID NO: 226958 - DNA, 25 bp, Probe Sequence
gacacgtgctgtacacccagcacac

SEQ ID NO: 226959 - DNA, 25 bp, Probe Sequence
gacactgtgtgtgacctgatccaga

SEQ ID NO: 226960 - DNA, 25 bp, Probe Sequence
gacactggataggttctgattgcaa

SEQ ID NO: 226961 - DNA, 25 bp, Probe Sequence
gacactgtgacagttttggtaacta

SEQ ID NO: 226962 - DNA, 25 bp, Probe Sequence
gacactgctggcgatttatgcagct

SEQ ID NO: 226963 - DNA, 25 bp, Probe Sequence
gacacctgcggagtgtctgctctat

SEQ ID NO: 226964 - DNA, 25 bp, Probe Sequence
gacacctcctgagtgtgtctgctca

SEQ ID NO: 226965 - DNA, 25 bp, Probe Sequence
gacacctcctgagttggatgtcatc

SEQ ID NO: 226966 - DNA, 25 bp, Probe Sequence
gacactgtccaggttggaggcatct

SEQ ID NO: 226967 - DNA, 25 bp, Probe Sequence
gacaccctctttagagggctgctct

SEQ ID NO: 226968 - DNA, 25 bp, Probe Sequence
gacaccactgttactgatgttgggc

SEQ ID NO: 226969 - DNA, 25 bp, Probe Sequence
gacagctctgtggtttttgctgggc

SEQ ID NO: 226970 - DNA, 25 bp, Probe Sequence
gacagtggggtacattgtgggcttt

SEQ ID NO: 226971 - DNA, 25 bp, Probe Sequence
gacagtgggggaccattaatgtgct

SEQ ID NO: 226972 - DNA, 25 bp, Probe Sequence
gacagtggagggcctctggtttgct

SEQ ID NO: 226973 - DNA, 25 bp, Probe Sequence
gacagcggaggggcactggtgtttc

SEQ ID NO: 226974 - DNA, 25 bp, Probe Sequence
gacaggcgaggcggcagtgactgtc

SEQ ID NO: 226975 - DNA, 25 bp, Probe Sequence
gacagacagtccgggagtgcagtca

SEQ ID NO: 226976 - DNA, 25 bp, Probe Sequence
gacagaagttcagggaggcctggat

SEQ ID NO: 226977 - DNA, 25 bp, Probe Sequence
gacagacgttagggcaggcgcaggc

SEQ ID NO: 226978 - DNA, 25 bp, Probe Sequence
gacagcagcctgtgagggagtgcag

SEQ ID NO: 226979 - DNA, 25 bp, Probe Sequence
gacagctccatgggcatggggaagg

SEQ ID NO: 226980 - DNA, 25 bp, Probe Sequence
gacagacacagtggcatgtggagac

SEQ ID NO: 226981 - DNA, 25 bp, Probe Sequence
gacagtaggctgcatctggagagca

SEQ ID NO: 226982 - DNA, 25 bp, Probe Sequence
gacactaacgacttcagggcagggc

SEQ ID NO: 226983 - DNA, 25 bp, Probe Sequence
gagcttaactacttagggacggtgt

SEQ ID NO: 226984 - DNA, 25 bp, Probe Sequence
gacttcgactacagagggaccgtga

SEQ ID NO: 226985 - DNA, 25 bp, Probe Sequence
gactactgacggagaagacccaggt

SEQ ID NO: 226986 - DNA, 25 bp, Probe Sequence
gactattcaagcgatgagcaacctg

SEQ ID NO: 226987 - DNA, 25 bp, Probe Sequence
gactcatagcatcagtggataccat

SEQ ID NO: 226988 - DNA, 25 bp, Probe Sequence
gacagaagcttcctggatagcctac

SEQ ID NO: 226989 - DNA, 25 bp, Probe Sequence
gacagaactgaccgtatacctttac

SEQ ID NO: 226990 - DNA, 25 bp, Probe Sequence
gacagaagtaagcctggacattgtt

SEQ ID NO: 226991 - DNA, 25 bp, Probe Sequence
gacagaggtagaccctatcttgtta

SEQ ID NO: 226992 - DNA, 25 bp, Probe Sequence
gacacgagtatgtacccactatgac

SEQ ID NO: 226993 - DNA, 25 bp, Probe Sequence
gacaccacatggtacattcctagag

SEQ ID NO: 226994 - DNA, 25 bp, Probe Sequence
gacacccatcagttttctgtgacag

SEQ ID NO: 226995 - DNA, 25 bp, Probe Sequence
gacaccaatcagatcttcggcctga

SEQ ID NO: 226996 - DNA, 25 bp, Probe Sequence
gacaccaagcgccctatgttgcttg

SEQ ID NO: 226997 - DNA, 25 bp, Probe Sequence
gacaccaaccccgtgttagagcatt

SEQ ID NO: 226998 - DNA, 25 bp, Probe Sequence
gatcctaaccttgaagtatgccttg

SEQ ID NO: 226999 - DNA, 25 bp, Probe Sequence
gacataaaccttgggacttccctag

SEQ ID NO: 227000 - DNA, 25 bp, Probe Sequence
gacactgaacgcatcggagttgacc

SEQ ID NO: 227001 - DNA, 25 bp, Probe Sequence
gacagaccacgcacgtgatttgtcc

SEQ ID NO: 227002 - DNA, 25 bp, Probe Sequence
gacagacaaccatctctttttatat

SEQ ID NO: 227003 - DNA, 25 bp, Probe Sequence
gacatgggatttggcctttttgatt

SEQ ID NO: 227004 - DNA, 25 bp, Probe Sequence
gacagggatctgaatgcacttggtt

SEQ ID NO: 227005 - DNA, 25 bp, Probe Sequence
gacagtcgactgaatgtcagctgga

SEQ ID NO: 227006 - DNA, 25 bp, Probe Sequence
gacactgttcttagctcaatgagca

SEQ ID NO: 227007 - DNA, 25 bp, Probe Sequence
gacttggagttagcagatgacaatc

SEQ ID NO: 227008 - DNA, 25 bp, Probe Sequence
gacattggatactggggaaacacct

SEQ ID NO: 227009 - DNA, 25 bp, Probe Sequence
gacactggatccttggggaagatag

SEQ ID NO: 227010 - DNA, 25 bp, Probe Sequence
gacacctgcatatagtgtgggaaat

SEQ ID NO: 227011 - DNA, 25 bp, Probe Sequence
gacactctgcaagaggtgaagctga

SEQ ID NO: 227012 - DNA, 25 bp, Probe Sequence
gacacctggaacagagagacacact

SEQ ID NO: 227013 - DNA, 25 bp, Probe Sequence
gacacgtggagactggatgagggca

SEQ ID NO: 227014 - DNA, 25 bp, Probe Sequence
gacagcttgtaggggaggggctcct

SEQ ID NO: 227015 - DNA, 25 bp, Probe Sequence
gacactctctaccaagagggtcttc

SEQ ID NO: 227016 - DNA, 25 bp, Probe Sequence
gagaatccagggaaactgtgagccc

SEQ ID NO: 227017 - DNA, 25 bp, Probe Sequence
gagaaccattgaattttggcatccc

SEQ ID NO: 227018 - DNA, 25 bp, Probe Sequence
gatgatatccctgtttgggaccaag

SEQ ID NO: 227019 - DNA, 25 bp, Probe Sequence
gacatacacggctttggggtacaag

SEQ ID NO: 227020 - DNA, 25 bp, Probe Sequence
gactcaccaggggtagggagacaaa

SEQ ID NO: 227021 - DNA, 25 bp, Probe Sequence
gactacccgttccagggcaaagtca

SEQ ID NO: 227022 - DNA, 25 bp, Probe Sequence
gactgaaccgttgcaaggaacagac

SEQ ID NO: 227023 - DNA, 25 bp, Probe Sequence
gacttaccttgaacggataagaatc

SEQ ID NO: 227024 - DNA, 25 bp, Probe Sequence
gacttcctcttttcctaattgaata

SEQ ID NO: 227025 - DNA, 25 bp, Probe Sequence
gacttgccacgttgggtcagtttta

SEQ ID NO: 227026 - DNA, 25 bp, Probe Sequence
gacacctcgatgtggttcagttact

SEQ ID NO: 227027 - DNA, 25 bp, Probe Sequence
gacaccatctggcgaggtcatttac

SEQ ID NO: 227028 - DNA, 25 bp, Probe Sequence
gacagccatatggagcgggatcatg

SEQ ID NO: 227029 - DNA, 25 bp, Probe Sequence
gacagctgctgtgagggaccagtac

SEQ ID NO: 227030 - DNA, 25 bp, Probe Sequence
gacaggtgataatggatccttaaca

SEQ ID NO: 227031 - DNA, 25 bp, Probe Sequence
gacacctgagcctggattttcactc

SEQ ID NO: 227032 - DNA, 25 bp, Probe Sequence
gacatccagtcatggtttttaaaaa

SEQ ID NO: 227033 - DNA, 25 bp, Probe Sequence
gacttcgtaagcctgttgttaaacg

SEQ ID NO: 227034 - DNA, 25 bp, Probe Sequence
gacagtgcagtgtagctttagttta

SEQ ID NO: 227035 - DNA, 25 bp, Probe Sequence
gacatctggtacattgtaggtatag

SEQ ID NO: 227036 - DNA, 25 bp, Probe Sequence
gacttttctttttaaggaagtgctg

SEQ ID NO: 227037 - DNA, 25 bp, Probe Sequence
gacttttctttttaaggaagtgctg

SEQ ID NO: 227038 - DNA, 25 bp, Probe Sequence
gacatcctagcttcttctaaggggg

SEQ ID NO: 227039 - DNA, 25 bp, Probe Sequence
gacatccatggtacctataaggagc

SEQ ID NO: 227040 - DNA, 25 bp, Probe Sequence
gacacgatcgagaaactgaaggaga

SEQ ID NO: 227041 - DNA, 25 bp, Probe Sequence
gacagcactcgataatctaagggac

SEQ ID NO: 227042 - DNA, 25 bp, Probe Sequence
gacagcaccaagtgattcatgagga

SEQ ID NO: 227043 - DNA, 25 bp, Probe Sequence
gacacccaagtcatgtacagctgaa

SEQ ID NO: 227044 - DNA, 25 bp, Probe Sequence
gacagctcaacagattgccaaggac

SEQ ID NO: 227045 - DNA, 25 bp, Probe Sequence
gacattcagcactcttccaggaata

SEQ ID NO: 227046 - DNA, 25 bp, Probe Sequence
gacagagaccctgtctcgagaaatt

SEQ ID NO: 227047 - DNA, 25 bp, Probe Sequence
gacagtactcctactttgcaaagtt

SEQ ID NO: 227048 - DNA, 25 bp, Probe Sequence
gacagtaatgtcacttacacaaact

SEQ ID NO: 227049 - DNA, 25 bp, Probe Sequence
gacatgtttgtcattttaataataa

SEQ ID NO: 227050 - DNA, 25 bp, Probe Sequence
gacattgtagctatactgtttccat

SEQ ID NO: 227051 - DNA, 25 bp, Probe Sequence
gacaggaagctcagttcagtaccat

SEQ ID NO: 227052 - DNA, 25 bp, Probe Sequence
gacagaaagctcagattttggcaca

SEQ ID NO: 227053 - DNA, 25 bp, Probe Sequence
gacaggcatgaggcttgactttgga

SEQ ID NO: 227054 - DNA, 25 bp, Probe Sequence
gacacgatgagaattagacactgga

SEQ ID NO: 227055 - DNA, 25 bp, Probe Sequence
gacagcgagagtataggcatctatg

SEQ ID NO: 227056 - DNA, 25 bp, Probe Sequence
gacaccagagttcattgttatgtgc

SEQ ID NO: 227057 - DNA, 25 bp, Probe Sequence
gacatcctggttcttttgatgtggt

SEQ ID NO: 227058 - DNA, 25 bp, Probe Sequence
gacacctgtttgaactgattgatgg

SEQ ID NO: 227059 - DNA, 25 bp, Probe Sequence
gacagcctgttacgacatcgatgtg

SEQ ID NO: 227060 - DNA, 25 bp, Probe Sequence
gacaccagtgattcagactcaggct

SEQ ID NO: 227061 - DNA, 25 bp, Probe Sequence
gacagcttgtgattcgctctagact

SEQ ID NO: 227062 - DNA, 25 bp, Probe Sequence
gacagatgtggttgcatcctaactc

SEQ ID NO: 227063 - DNA, 25 bp, Probe Sequence
gacagagtgcacacatcctggtacc

SEQ ID NO: 227064 - DNA, 25 bp, Probe Sequence
gacagggtttcaccatgttagccgg

SEQ ID NO: 227065 - DNA, 25 bp, Probe Sequence
gacactggtttcgacatgtaaaatg

SEQ ID NO: 227066 - DNA, 25 bp, Probe Sequence
gacagcatccttgaatatgtaaaag

SEQ ID NO: 227067 - DNA, 25 bp, Probe Sequence
gacagcatccttgaatatgtaaaag

SEQ ID NO: 227068 - DNA, 25 bp, Probe Sequence
gacagcaattgtggtagatggaaga

SEQ ID NO: 227069 - DNA, 25 bp, Probe Sequence
gacagcactctgggtgcgatctgca

SEQ ID NO: 227070 - DNA, 25 bp, Probe Sequence
gacacctctgccaacagatgctgtt

SEQ ID NO: 227071 - DNA, 25 bp, Probe Sequence
gacacctgtgcatagcagatcatct

SEQ ID NO: 227072 - DNA, 25 bp, Probe Sequence
gacatccgcatcctcagagatatcg

SEQ ID NO: 227073 - DNA, 25 bp, Probe Sequence
gactcgcagcaactgggatacgcca

SEQ ID NO: 227074 - DNA, 25 bp, Probe Sequence
gacatctgcaccatggtaaccacag

SEQ ID NO: 227075 - DNA, 25 bp, Probe Sequence
gacacccgcatgtgtaacaacagcc

SEQ ID NO: 227076 - DNA, 25 bp, Probe Sequence
gatcacaaccttctagaaaactcca

SEQ ID NO: 227077 - DNA, 25 bp, Probe Sequence
gacaggtccttcaggaagtactcca

SEQ ID NO: 227078 - DNA, 25 bp, Probe Sequence
gacaggtcctactggaaggagttcc

SEQ ID NO: 227079 - DNA, 25 bp, Probe Sequence
gacaggttcttctggctgaaggttt

SEQ ID NO: 227080 - DNA, 25 bp, Probe Sequence
gacatggtttttgttacgcattctt

SEQ ID NO: 227081 - DNA, 25 bp, Probe Sequence
gacatggtttttgttacgcattctt

SEQ ID NO: 227082 - DNA, 25 bp, Probe Sequence
gacagcttcttttgaataaagacct

SEQ ID NO: 227083 - DNA, 25 bp, Probe Sequence
gacagttttggtaactaggatccta

SEQ ID NO: 227084 - DNA, 25 bp, Probe Sequence
gacagtgttctgctttttaatccta

SEQ ID NO: 227085 - DNA, 25 bp, Probe Sequence
gacagtgttctgctttttaatccta

SEQ ID NO: 227086 - DNA, 25 bp, Probe Sequence
gacagtgttctgctttttaatccta

SEQ ID NO: 227087 - DNA, 25 bp, Probe Sequence
gacaggttcatctctatttaaagga

SEQ ID NO: 227088 - DNA, 25 bp, Probe Sequence
gacattttccttccgttccatatga

SEQ ID NO: 227089 - DNA, 25 bp, Probe Sequence
gacagtttcctaccgcatttgaatt

SEQ ID NO: 227090 - DNA, 25 bp, Probe Sequence
gacagttactaaccctgaataacac

SEQ ID NO: 227091 - DNA, 25 bp, Probe Sequence
gacagtggaaaagccggtgcagata

SEQ ID NO: 227092 - DNA, 25 bp, Probe Sequence
gacaggtgaacatttccgcctggtc

SEQ ID NO: 227093 - DNA, 25 bp, Probe Sequence
gacatttaaatttcaaggcaggtac

SEQ ID NO: 227094 - DNA, 25 bp, Probe Sequence
gacaggtccccacaagctgagggaa

SEQ ID NO: 227095 - DNA, 25 bp, Probe Sequence
gacagttcccagtaaggtaatgaga

SEQ ID NO: 227096 - DNA, 25 bp, Probe Sequence
gacagtgtgctcagtaaagtcttcc

SEQ ID NO: 227097 - DNA, 25 bp, Probe Sequence
gacgtcctcaaggagtttcttggct

SEQ ID NO: 227098 - DNA, 25 bp, Probe Sequence
gacagctttcaagagtactccacgc

SEQ ID NO: 227099 - DNA, 25 bp, Probe Sequence
gacattttcgaaaaactggacagag

SEQ ID NO: 227100 - DNA, 25 bp, Probe Sequence
gagcatttggggtaatacttccaga

SEQ ID NO: 227101 - DNA, 25 bp, Probe Sequence
gacattcccaagtcagtacgtccaa

SEQ ID NO: 227102 - DNA, 25 bp, Probe Sequence
gacagacccattgattcaggttgca

SEQ ID NO: 227103 - DNA, 25 bp, Probe Sequence
gacagcaactttcatatggatttca

SEQ ID NO: 227104 - DNA, 25 bp, Probe Sequence
gacatcaagctctgtgagggtttca

SEQ ID NO: 227105 - DNA, 25 bp, Probe Sequence
gacagcgcaatctgtggagctttta

SEQ ID NO: 227106 - DNA, 25 bp, Probe Sequence
gacagcgcaactttgaatgctttct

SEQ ID NO: 227107 - DNA, 25 bp, Probe Sequence
gacagatgaactttgggcatccttg

SEQ ID NO: 227108 - DNA, 25 bp, Probe Sequence
gacagcagaatgatctgtgtgacct

SEQ ID NO: 227109 - DNA, 25 bp, Probe Sequence
gacagcttcatcagctgtttcctga

SEQ ID NO: 227110 - DNA, 25 bp, Probe Sequence
gacagtgactgtacagttatcatta

SEQ ID NO: 227111 - DNA, 25 bp, Probe Sequence
gacatgaactgatcatttttatggc

SEQ ID NO: 227112 - DNA, 25 bp, Probe Sequence
gacagcaaggcgtctcttattttgc

SEQ ID NO: 227113 - DNA, 25 bp, Probe Sequence
gacagaacagagtattttcatcttg

SEQ ID NO: 227114 - DNA, 25 bp, Probe Sequence
gacagtaacgtcagttgatgctgga

SEQ ID NO: 227115 - DNA, 25 bp, Probe Sequence
gagcggaatcccaggtaggaacctc

SEQ ID NO: 227116 - DNA, 25 bp, Probe Sequence
gacgcggttcctgcggaggaaggtc

SEQ ID NO: 227117 - DNA, 25 bp, Probe Sequence
gacagcctgtatcttgggggacagg

SEQ ID NO: 227118 - DNA, 25 bp, Probe Sequence
gacaccatgtatcttttggaccagc

SEQ ID NO: 227119 - DNA, 25 bp, Probe Sequence
gacattccttttattaactcacctc

SEQ ID NO: 227120 - DNA, 25 bp, Probe Sequence
gacattccttttattaactcacctc

SEQ ID NO: 227121 - DNA, 25 bp, Probe Sequence
gacttactttaagtttgcacccttg

SEQ ID NO: 227122 - DNA, 25 bp, Probe Sequence
gactctaaaaacgattatacccgag

SEQ ID NO: 227123 - DNA, 25 bp, Probe Sequence
gacttagaaatagactagaccaagc

SEQ ID NO: 227124 - DNA, 25 bp, Probe Sequence
gacgtgaaaagaacctagaatagcc

SEQ ID NO: 227125 - DNA, 25 bp, Probe Sequence
gacctgaaaggatccagaaatggga

SEQ ID NO: 227126 - DNA, 25 bp, Probe Sequence
gactcctacaggagccaaatttgta

SEQ ID NO: 227127 - DNA, 25 bp, Probe Sequence
gacttctatagtgaggcaatactgg

SEQ ID NO: 227128 - DNA, 25 bp, Probe Sequence
gactaccgagtattgcccaggatag

SEQ ID NO: 227129 - DNA, 25 bp, Probe Sequence
gacatacccgaagactaggcaactt

SEQ ID NO: 227130 - DNA, 25 bp, Probe Sequence
gacatcccggagtgaccgtgacatc

SEQ ID NO: 227131 - DNA, 25 bp, Probe Sequence
gacacctctgtctgggaagagactc

SEQ ID NO: 227132 - DNA, 25 bp, Probe Sequence
gacacctcattctgcaggacagggc

SEQ ID NO: 227133 - DNA, 25 bp, Probe Sequence
gacacctcattctgcaggacagggc

SEQ ID NO: 227134 - DNA, 25 bp, Probe Sequence
gacacctcattctgcaggacagggc

SEQ ID NO: 227135 - DNA, 25 bp, Probe Sequence
gacaccgtctgaacaagatcagggc

SEQ ID NO: 227136 - DNA, 25 bp, Probe Sequence
tccagtcttctgagggataggggac

SEQ ID NO: 227137 - DNA, 25 bp, Probe Sequence
gacagtcttgtgagggagatctggg

SEQ ID NO: 227138 - DNA, 25 bp, Probe Sequence
gacagctctttgaatcaatgaacta

SEQ ID NO: 227139 - DNA, 25 bp, Probe Sequence
gacagctctagatacagcatttcta

SEQ ID NO: 227140 - DNA, 25 bp, Probe Sequence
gacagcctggaaaacattcctgaga

SEQ ID NO: 227141 - DNA, 25 bp, Probe Sequence
gacaccatgagtcacactgtccaaa

SEQ ID NO: 227142 - DNA, 25 bp, Probe Sequence
gacaccaatgacaacacagtcactg

SEQ ID NO: 227143 - DNA, 25 bp, Probe Sequence
gacacctatatgaacacagtttgta

SEQ ID NO: 227144 - DNA, 25 bp, Probe Sequence
gacacctttgctttctgatggttca

SEQ ID NO: 227145 - DNA, 25 bp, Probe Sequence
gacacctttgctttctgatggttca

SEQ ID NO: 227146 - DNA, 25 bp, Probe Sequence
gacagcaatgctgtttcactggtta

SEQ ID NO: 227147 - DNA, 25 bp, Probe Sequence
gacagctgtgctgtaacacaagtag

SEQ ID NO: 227148 - DNA, 25 bp, Probe Sequence
gacagctggctggacaacattgact

SEQ ID NO: 227149 - DNA, 25 bp, Probe Sequence
gacagcatgccagacacaactgaat

SEQ ID NO: 227150 - DNA, 25 bp, Probe Sequence
gacagcagaagacacaacagaagac

SEQ ID NO: 227151 - DNA, 25 bp, Probe Sequence
gacaccattccccacagagatagtc

SEQ ID NO: 227152 - DNA, 25 bp, Probe Sequence
gacaccttgggccacaggatactgg

SEQ ID NO: 227153 - DNA, 25 bp, Probe Sequence
gacacctcagggacaaagagatctg

SEQ ID NO: 227154 - DNA, 25 bp, Probe Sequence
gacagaccaggaacacaatgagact

SEQ ID NO: 227155 - DNA, 25 bp, Probe Sequence
gacagagggctaaatccatgaagtt

SEQ ID NO: 227156 - DNA, 25 bp, Probe Sequence
gacagagggctctgatctgtgcgac

SEQ ID NO: 227157 - DNA, 25 bp, Probe Sequence
gacagagggcaatgatgtgtgcaag

SEQ ID NO: 227158 - DNA, 25 bp, Probe Sequence
gacagaggtaaaattgcagatagca

SEQ ID NO: 227159 - DNA, 25 bp, Probe Sequence
gacagaagataggaaagcgtacaat

SEQ ID NO: 227160 - DNA, 25 bp, Probe Sequence
gacagaaatcaggtattggcagttt

SEQ ID NO: 227161 - DNA, 25 bp, Probe Sequence
gacagtattcagcattgtgagcgta

SEQ ID NO: 227162 - DNA, 25 bp, Probe Sequence
gacagtattcagcattgtgagcgta

SEQ ID NO: 227163 - DNA, 25 bp, Probe Sequence
gacagtattcagcattgtgagcgta

SEQ ID NO: 227164 - DNA, 25 bp, Probe Sequence
gacagtattcagcattgtgagcgta

SEQ ID NO: 227165 - DNA, 25 bp, Probe Sequence
gacaggcttcagtcattggactaga

SEQ ID NO: 227166 - DNA, 25 bp, Probe Sequence
gacagtcttcgatcggcacaagatg

SEQ ID NO: 227167 - DNA, 25 bp, Probe Sequence
gacagaatctctcactgaaactcat

SEQ ID NO: 227168 - DNA, 25 bp, Probe Sequence
gacatgacattcttagctgtaactt

SEQ ID NO: 227169 - DNA, 25 bp, Probe Sequence
gacagaatacgcacattcacacctt

SEQ ID NO: 227170 - DNA, 25 bp, Probe Sequence
gacagagtgacgcactgactcacct

SEQ ID NO: 227171 - DNA, 25 bp, Probe Sequence
gacagagtgaagcatcaacctactt

SEQ ID NO: 227172 - DNA, 25 bp, Probe Sequence
gacagcagtgcttacatcaaatcca

SEQ ID NO: 227173 - DNA, 25 bp, Probe Sequence
gacagatacattcatgcacaatcca

SEQ ID NO: 227174 - DNA, 25 bp, Probe Sequence
gacagtgacagatatgcctgctccc

SEQ ID NO: 227175 - DNA, 25 bp, Probe Sequence
gacagtggcgattctgctcatctaa

SEQ ID NO: 227176 - DNA, 25 bp, Probe Sequence
gacagggcaattgctctaagacagc

SEQ ID NO: 227177 - DNA, 25 bp, Probe Sequence
gacaggggcttgattagatctcaga

SEQ ID NO: 227178 - DNA, 25 bp, Probe Sequence
gacagggacctgaaaggatccagaa

SEQ ID NO: 227179 - DNA, 25 bp, Probe Sequence
gacaggtgcactttactggggagaa

SEQ ID NO: 227180 - DNA, 25 bp, Probe Sequence
gacagtggcccttttgtgggcagca

SEQ ID NO: 227181 - DNA, 25 bp, Probe Sequence
gacagttcacaatctagtaatagca

SEQ ID NO: 227182 - DNA, 25 bp, Probe Sequence
gacagctttaattcacttgttcaga

SEQ ID NO: 227183 - DNA, 25 bp, Probe Sequence
gacagtcctttgtactctgactgcc

SEQ ID NO: 227184 - DNA, 25 bp, Probe Sequence
gacatgttcttgggagtctgaattc

SEQ ID NO: 227185 - DNA, 25 bp, Probe Sequence
gacagttcagaggaggattcagacg

SEQ ID NO: 227186 - DNA, 25 bp, Probe Sequence
gacagtgcctaaatggattaagagc

SEQ ID NO: 227187 - DNA, 25 bp, Probe Sequence
gacaggcctagctatagttaggaat

SEQ ID NO: 227188 - DNA, 25 bp, Probe Sequence
gactggttcacctgtgtactgagta

SEQ ID NO: 227189 - DNA, 25 bp, Probe Sequence
gacaggtttgcttgggacgctagta

SEQ ID NO: 227190 - DNA, 25 bp, Probe Sequence
gacaggtttgcttgggacgctagta

SEQ ID NO: 227191 - DNA, 25 bp, Probe Sequence
gacagagtttggcggctccatttac

SEQ ID NO: 227192 - DNA, 25 bp, Probe Sequence
gacaggtttggtggcactgctggtt

SEQ ID NO: 227193 - DNA, 25 bp, Probe Sequence
gacagagtctctcatggatgccggc

SEQ ID NO: 227194 - DNA, 25 bp, Probe Sequence
gacaggtctgcgctgcagtgggatc

SEQ ID NO: 227195 - DNA, 25 bp, Probe Sequence
gacgcgtaggcgagttggtctgaaa

SEQ ID NO: 227196 - DNA, 25 bp, Probe Sequence
gacagttagggaagggtttgccaag

SEQ ID NO: 227197 - DNA, 25 bp, Probe Sequence
gacagcttgtggcaagtgaatttgc

SEQ ID NO: 227198 - DNA, 25 bp, Probe Sequence
gacagctggggcccgagagatggtg

SEQ ID NO: 227199 - DNA, 25 bp, Probe Sequence
gacagagggtgctgtgggtctgctg

SEQ ID NO: 227200 - DNA, 25 bp, Probe Sequence
gacagagggtgctgtgggtctgctg

SEQ ID NO: 227201 - DNA, 25 bp, Probe Sequence
gacaggatgaggtaagaggatctct

SEQ ID NO: 227202 - DNA, 25 bp, Probe Sequence
gacagagcaggacaatgcaagattc

SEQ ID NO: 227203 - DNA, 25 bp, Probe Sequence
gacagtcaggaccgagaacctgggc

SEQ ID NO: 227204 - DNA, 25 bp, Probe Sequence
gacagaatgaacctgcagaccctgc

SEQ ID NO: 227205 - DNA, 25 bp, Probe Sequence
gacagaatgaacctgcagaccctgc

SEQ ID NO: 227206 - DNA, 25 bp, Probe Sequence
gacagcagtaacctctgcagactta

SEQ ID NO: 227207 - DNA, 25 bp, Probe Sequence
gacagagtcaacttctgcagcacct

SEQ ID NO: 227208 - DNA, 25 bp, Probe Sequence
gacagagcgagacttatagatagat

SEQ ID NO: 227209 - DNA, 25 bp, Probe Sequence
gacagccagagctttctatgtactg

SEQ ID NO: 227210 - DNA, 25 bp, Probe Sequence
gacagctcaggctcttggtgactgt

SEQ ID NO: 227211 - DNA, 25 bp, Probe Sequence
gacagttgtgcttctctaggaggtt

SEQ ID NO: 227212 - DNA, 25 bp, Probe Sequence
gacatttctgtgtttacaaagtacg

SEQ ID NO: 227213 - DNA, 25 bp, Probe Sequence
gactttcctgaaaccaacaatattt

SEQ ID NO: 227214 - DNA, 25 bp, Probe Sequence
gacttatactgatcccaagttaaaa

SEQ ID NO: 227215 - DNA, 25 bp, Probe Sequence
gacgaagtctaggcccaagtcagag

SEQ ID NO: 227216 - DNA, 25 bp, Probe Sequence
gacagaaatttcaccaagccgcagg

SEQ ID NO: 227217 - DNA, 25 bp, Probe Sequence
gacagtaagtcctcaaggcaccagc

SEQ ID NO: 227218 - DNA, 25 bp, Probe Sequence
gacaggaagtctttagactgcccac

SEQ ID NO: 227219 - DNA, 25 bp, Probe Sequence
gacaggaagcgtttcagagactcca

SEQ ID NO: 227220 - DNA, 25 bp, Probe Sequence
gacaggatactgagccaagccctgc

SEQ ID NO: 227221 - DNA, 25 bp, Probe Sequence
gacattgacctcaccaagagggcgg

SEQ ID NO: 227222 - DNA, 25 bp, Probe Sequence
gactttggtcccagacagcggggat

SEQ ID NO: 227223 - DNA, 25 bp, Probe Sequence
gagtttttacctgaactggcagaag

SEQ ID NO: 227224 - DNA, 25 bp, Probe Sequence
gagtttttccgtgaactttatactg

SEQ ID NO: 227225 - DNA, 25 bp, Probe Sequence
gacttttttcttgttcctattactg

SEQ ID NO: 227226 - DNA, 25 bp, Probe Sequence
gacatttgtttagtaaatcccttca

SEQ ID NO: 227227 - DNA, 25 bp, Probe Sequence
gacttggatcctataaacctgtcaa

SEQ ID NO: 227228 - DNA, 25 bp, Probe Sequence
gacttggctcctctaaacatttgct

SEQ ID NO: 227229 - DNA, 25 bp, Probe Sequence
gacttactcctgctaaagtctcctg

SEQ ID NO: 227230 - DNA, 25 bp, Probe Sequence
gacattccatttggctaatggtcag

SEQ ID NO: 227231 - DNA, 25 bp, Probe Sequence
gacttccatttggcaattgttgaat

SEQ ID NO: 227232 - DNA, 25 bp, Probe Sequence
gacttcttagtcaaatatgagggag

SEQ ID NO: 227233 - DNA, 25 bp, Probe Sequence
gactactaagtgactaacaggcagg

SEQ ID NO: 227234 - DNA, 25 bp, Probe Sequence
gacattaaggtgacgaacaatatag

SEQ ID NO: 227235 - DNA, 25 bp, Probe Sequence
gacatctagaggaataaatcgtaac

SEQ ID NO: 227236 - DNA, 25 bp, Probe Sequence
gacagcacaagagaaactcctagtt

SEQ ID NO: 227237 - DNA, 25 bp, Probe Sequence
gacagacaagcagatgacctcacag

SEQ ID NO: 227238 - DNA, 25 bp, Probe Sequence
gacagaaagcagatacctcaccctg

SEQ ID NO: 227239 - DNA, 25 bp, Probe Sequence
gacagaatgagacctcatctctacc

SEQ ID NO: 227240 - DNA, 25 bp, Probe Sequence
gacagtgagggcatcatcgtgatct

SEQ ID NO: 227241 - DNA, 25 bp, Probe Sequence
gacttgacggctttgggattttgtt

SEQ ID NO: 227242 - DNA, 25 bp, Probe Sequence
gactgacccttgtggtgtttttttg

SEQ ID NO: 227243 - DNA, 25 bp, Probe Sequence
gactacccctctgaaggttgttttg

SEQ ID NO: 227244 - DNA, 25 bp, Probe Sequence
gactcccgacttgacacgatatttt

SEQ ID NO: 227245 - DNA, 25 bp, Probe Sequence
gactgcctaagtgtacttgtatttt

SEQ ID NO: 227246 - DNA, 25 bp, Probe Sequence
gactactgaaggttaactatttaca

SEQ ID NO: 227247 - DNA, 25 bp, Probe Sequence
gacattgtgaaatcaaatcttgtgt

SEQ ID NO: 227248 - DNA, 25 bp, Probe Sequence
gacagatctatttcaaattctggtg

SEQ ID NO: 227249 - DNA, 25 bp, Probe Sequence
gacatgtcttataaagcctccaatg

SEQ ID NO: 227250 - DNA, 25 bp, Probe Sequence
gacatgggtattgcaggcaccaatg

SEQ ID NO: 227251 - DNA, 25 bp, Probe Sequence
gacagatgtctttgaaggcagcata

SEQ ID NO: 227252 - DNA, 25 bp, Probe Sequence
gacagattctggttggtgactgagg

SEQ ID NO: 227253 - DNA, 25 bp, Probe Sequence
gacagaagcttgtggggtgcatgga

SEQ ID NO: 227254 - DNA, 25 bp, Probe Sequence
gacattagctgtctaggcgtgtggg

SEQ ID NO: 227255 - DNA, 25 bp, Probe Sequence
gacagtgggctggtcagccgggtgt

SEQ ID NO: 227256 - DNA, 25 bp, Probe Sequence
gacatgttcagggatcgccaggcgt

SEQ ID NO: 227257 - DNA, 25 bp, Probe Sequence
gacattccaggccacagtcctggga

SEQ ID NO: 227258 - DNA, 25 bp, Probe Sequence
gacatcttctggaagccccaggagg

SEQ ID NO: 227259 - DNA, 25 bp, Probe Sequence
gacatcgtcttctccaaagtcaagg

SEQ ID NO: 227260 - DNA, 25 bp, Probe Sequence
gacatcgtttcaggccacaaaaaga

SEQ ID NO: 227261 - DNA, 25 bp, Probe Sequence
gacagagatttaagccacagacaca

SEQ ID NO: 227262 - DNA, 25 bp, Probe Sequence
gacagtggtgtattcatcagggcaa

SEQ ID NO: 227263 - DNA, 25 bp, Probe Sequence
gacatgtcgtaactattgttcaagt

SEQ ID NO: 227264 - DNA, 25 bp, Probe Sequence
gacagtctgtaacgtatgcatgtaa

SEQ ID NO: 227265 - DNA, 25 bp, Probe Sequence
gacatgttgtgaggagactatgata

SEQ ID NO: 227266 - DNA, 25 bp, Probe Sequence
gacagggatgatggagagttcatga

SEQ ID NO: 227267 - DNA, 25 bp, Probe Sequence
gacagtgacagaaagagttctagca

SEQ ID NO: 227268 - DNA, 25 bp, Probe Sequence
gacagagatagtaagaaccacagaa

SEQ ID NO: 227269 - DNA, 25 bp, Probe Sequence
gacaggctggtaacagtccacacaa

SEQ ID NO: 227270 - DNA, 25 bp, Probe Sequence
gacaggatggtcatagatctggaaa

SEQ ID NO: 227271 - DNA, 25 bp, Probe Sequence
gacattaactcattagactggaact

SEQ ID NO: 227272 - DNA, 25 bp, Probe Sequence
gacattgaactctcaaagtcaagat

SEQ ID NO: 227273 - DNA, 25 bp, Probe Sequence
gacagtcatacctgaaacaatcaat

SEQ ID NO: 227274 - DNA, 25 bp, Probe Sequence
gactaatcaccaaaaagcaaccaac

SEQ ID NO: 227275 - DNA, 25 bp, Probe Sequence
gacagaatcccaataatagtcccac

SEQ ID NO: 227276 - DNA, 25 bp, Probe Sequence
gacatgaaccataaccatactacca

SEQ ID NO: 227277 - DNA, 25 bp, Probe Sequence
gacagaaatcattatcttagccacc

SEQ ID NO: 227278 - DNA, 25 bp, Probe Sequence
gacatacagatattcatattcggcc

SEQ ID NO: 227279 - DNA, 25 bp, Probe Sequence
gacagcagaaaattttcgtgctctg

SEQ ID NO: 227280 - DNA, 25 bp, Probe Sequence
gacagcagttagtattattggctta

SEQ ID NO: 227281 - DNA, 25 bp, Probe Sequence
gacaggttctatttttgctctataa

SEQ ID NO: 227282 - DNA, 25 bp, Probe Sequence
gacaggtttgcctattatcttgcaa

SEQ ID NO: 227283 - DNA, 25 bp, Probe Sequence
gacagtatttctcagcatcactatg

SEQ ID NO: 227284 - DNA, 25 bp, Probe Sequence
gacagtcctttctagatactgtaac

SEQ ID NO: 227285 - DNA, 25 bp, Probe Sequence
gacgtccccacagaagctgttacat

SEQ ID NO: 227286 - DNA, 25 bp, Probe Sequence
gacagattccaacagaagtgtattt

SEQ ID NO: 227287 - DNA, 25 bp, Probe Sequence
gacagatttctaataaagtgcttgg

SEQ ID NO: 227288 - DNA, 25 bp, Probe Sequence
gacatgatcacttaaaaagagcttt

SEQ ID NO: 227289 - DNA, 25 bp, Probe Sequence
gacattcacgacaaaaacgcgaaat

SEQ ID NO: 227290 - DNA, 25 bp, Probe Sequence
gacttcaccagtcaaagcgaactac

SEQ ID NO: 227291 - DNA, 25 bp, Probe Sequence
gacatgtccgagtccaagagcggcc

SEQ ID NO: 227292 - DNA, 25 bp, Probe Sequence
gacaggccaggagatatggtggatc

SEQ ID NO: 227293 - DNA, 25 bp, Probe Sequence
gacagtgggtgagttatcgcagagt

SEQ ID NO: 227294 - DNA, 25 bp, Probe Sequence
gacagtgtggtgattcctcagggat

SEQ ID NO: 227295 - DNA, 25 bp, Probe Sequence
gacagggtgtgtctctgacagtggt

SEQ ID NO: 227296 - DNA, 25 bp, Probe Sequence
gacatccaggtgtaatctgacctgc

SEQ ID NO: 227297 - DNA, 25 bp, Probe Sequence
gacatcgagtctcactctgttgtcc

SEQ ID NO: 227298 - DNA, 25 bp, Probe Sequence
gacagtggtctttcctgttgatcat

SEQ ID NO: 227299 - DNA, 25 bp, Probe Sequence
gacagtgactctcagcagtgtttaa

SEQ ID NO: 227300 - DNA, 25 bp, Probe Sequence
gacaggtcacataacagctgcatca

SEQ ID NO: 227301 - DNA, 25 bp, Probe Sequence
gacaggcacaaacagcatgatcacg

SEQ ID NO: 227302 - DNA, 25 bp, Probe Sequence
gacagtggaagacatatctcacctc

SEQ ID NO: 227303 - DNA, 25 bp, Probe Sequence
gacagtgtgcagacagcaatgatag

SEQ ID NO: 227304 - DNA, 25 bp, Probe Sequence
gacattgctgcaaagaagtcaagct

SEQ ID NO: 227305 - DNA, 25 bp, Probe Sequence
gacatggtcacggaaggcaagtttg

SEQ ID NO: 227306 - DNA, 25 bp, Probe Sequence
gacttgatcccagcaggactgtgat

SEQ ID NO: 227307 - DNA, 25 bp, Probe Sequence
gacagtggcccagctggactgggac

SEQ ID NO: 227308 - DNA, 25 bp, Probe Sequence
gacagaccccaggttaatgagacat

SEQ ID NO: 227309 - DNA, 25 bp, Probe Sequence
gacatggcccagaacttgaaggact

SEQ ID NO: 227310 - DNA, 25 bp, Probe Sequence
gacatggtcgcagttctaggggaga

SEQ ID NO: 227311 - DNA, 25 bp, Probe Sequence
gacatgggccagggccaggagtggg

SEQ ID NO: 227312 - DNA, 25 bp, Probe Sequence
gacaggagtccaggggagagaggag

SEQ ID NO: 227313 - DNA, 25 bp, Probe Sequence
gacatggagaacgagatcgacgagc

SEQ ID NO: 227314 - DNA, 25 bp, Probe Sequence
gacatggagagggacaccctcatgc

SEQ ID NO: 227315 - DNA, 25 bp, Probe Sequence
gacagtggatatgacccacactgcc

SEQ ID NO: 227316 - DNA, 25 bp, Probe Sequence
gacagatctgcatgaacacccactg

SEQ ID NO: 227317 - DNA, 25 bp, Probe Sequence
gacagatctgcatgaacacccactg

SEQ ID NO: 227318 - DNA, 25 bp, Probe Sequence
gacagatctgcatgaacacccactg

SEQ ID NO: 227319 - DNA, 25 bp, Probe Sequence
gacagttgccagttacacgcactaa

SEQ ID NO: 227320 - DNA, 25 bp, Probe Sequence
gacagtgtaactctacagtctcaaa

SEQ ID NO: 227321 - DNA, 25 bp, Probe Sequence
gacatggctaactgcaagaattaaa

SEQ ID NO: 227322 - DNA, 25 bp, Probe Sequence
gacagtgctcagaaggaaatttaca

SEQ ID NO: 227323 - DNA, 25 bp, Probe Sequence
gacagttcatgaacaagagtctttc

SEQ ID NO: 227324 - DNA, 25 bp, Probe Sequence
gacagtccatgaaatcgacctgttt

SEQ ID NO: 227325 - DNA, 25 bp, Probe Sequence
gacagtcctgagaattattgatggt

SEQ ID NO: 227326 - DNA, 25 bp, Probe Sequence
gacagtcctgcggaaatgtgtcttg

SEQ ID NO: 227327 - DNA, 25 bp, Probe Sequence
gacatgtccctgctggagcagtctc

SEQ ID NO: 227328 - DNA, 25 bp, Probe Sequence
gacagacaggctcttagcagcttcc

SEQ ID NO: 227329 - DNA, 25 bp, Probe Sequence
gacagagagcttttggacacttcat

SEQ ID NO: 227330 - DNA, 25 bp, Probe Sequence
gacaggagtcaatggagattctcga

SEQ ID NO: 227331 - DNA, 25 bp, Probe Sequence
gacagtggtcaaaggaagctcttaa

SEQ ID NO: 227332 - DNA, 25 bp, Probe Sequence
gacagtgtgccattcgacaacacat

SEQ ID NO: 227333 - DNA, 25 bp, Probe Sequence
gacagatttcaactatcaatcacca

SEQ ID NO: 227334 - DNA, 25 bp, Probe Sequence
gacagtatttactcatatcctcagc

SEQ ID NO: 227335 - DNA, 25 bp, Probe Sequence
gacatggatatatctactattcata

SEQ ID NO: 227336 - DNA, 25 bp, Probe Sequence
gacatggtactgtgcatctattcat

SEQ ID NO: 227337 - DNA, 25 bp, Probe Sequence
gacttgtacgagacactgaccatta

SEQ ID NO: 227338 - DNA, 25 bp, Probe Sequence
gacatagtacgataagacctaaata

SEQ ID NO: 227339 - DNA, 25 bp, Probe Sequence
gacatatctacgttgaatgtactac

SEQ ID NO: 227340 - DNA, 25 bp, Probe Sequence
gactttagaagtataactacctgtg

SEQ ID NO: 227341 - DNA, 25 bp, Probe Sequence
gagctttaaaccttggtctttcttg

SEQ ID NO: 227342 - DNA, 25 bp, Probe Sequence
gattttaaagcctcttcatccaggt

SEQ ID NO: 227343 - DNA, 25 bp, Probe Sequence
gactttaatcccggtttcagaagct

SEQ ID NO: 227344 - DNA, 25 bp, Probe Sequence
gacttccaaacccagtttggatcag

SEQ ID NO: 227345 - DNA, 25 bp, Probe Sequence
gagttccaaaaccctattgtggctg

SEQ ID NO: 227346 - DNA, 25 bp, Probe Sequence
gagtaccaaaactgatctatttctc

SEQ ID NO: 227347 - DNA, 25 bp, Probe Sequence
gacatcccaaagaggcctttctctc

SEQ ID NO: 227348 - DNA, 25 bp, Probe Sequence
gacttcaaggaatgggtgcttccct

SEQ ID NO: 227349 - DNA, 25 bp, Probe Sequence
gactgccaggcagaaggggacatcc

SEQ ID NO: 227350 - DNA, 25 bp, Probe Sequence
gagctgctctaagaagggaaccccc

SEQ ID NO: 227351 - DNA, 25 bp, Probe Sequence
gagctgctctaagaagggaaccccc

SEQ ID NO: 227352 - DNA, 25 bp, Probe Sequence
gagcgattcaaacaaggaacctcaa

SEQ ID NO: 227353 - DNA, 25 bp, Probe Sequence
gacttgaaatgacacaggtactctc

SEQ ID NO: 227354 - DNA, 25 bp, Probe Sequence
gacattgagattgtccttttcccct

SEQ ID NO: 227355 - DNA, 25 bp, Probe Sequence
gacagtaattcagtccattcttctc

SEQ ID NO: 227356 - DNA, 25 bp, Probe Sequence
gacaggaagatcgaggtcctcctgc

SEQ ID NO: 227357 - DNA, 25 bp, Probe Sequence
gacagagatgaactgaggtccttgt

SEQ ID NO: 227358 - DNA, 25 bp, Probe Sequence
gacagatttagtcgttccacttcac

SEQ ID NO: 227359 - DNA, 25 bp, Probe Sequence
gacagagtctagaacttccttccac

SEQ ID NO: 227360 - DNA, 25 bp, Probe Sequence
gacagagtctgggtctgtcggtcca

SEQ ID NO: 227361 - DNA, 25 bp, Probe Sequence
gacagtgtcggctttgtggagtgga

SEQ ID NO: 227362 - DNA, 25 bp, Probe Sequence
gacagtgtaggcattgggtggggct

SEQ ID NO: 227363 - DNA, 25 bp, Probe Sequence
gacagtgtggagacattgggcaagg

SEQ ID NO: 227364 - DNA, 25 bp, Probe Sequence
gacaggatggatcatgcggagccgg

SEQ ID NO: 227365 - DNA, 25 bp, Probe Sequence
gacagagagagagagcgagacaggg

SEQ ID NO: 227366 - DNA, 25 bp, Probe Sequence
gacagagacagagcgtgcacacgta

SEQ ID NO: 227367 - DNA, 25 bp, Probe Sequence
gacagagctagaatcagtgccactt

SEQ ID NO: 227368 - DNA, 25 bp, Probe Sequence
gacagagatcagaatacattgactg

SEQ ID NO: 227369 - DNA, 25 bp, Probe Sequence
gacagagacgtgaagcactgaataa

SEQ ID NO: 227370 - DNA, 25 bp, Probe Sequence
gacaggacagtgtatgttataatat

SEQ ID NO: 227371 - DNA, 25 bp, Probe Sequence
gacagatgtagggctggtctcaaat

SEQ ID NO: 227372 - DNA, 25 bp, Probe Sequence
gacagtgtaggaacgatgctgccat

SEQ ID NO: 227373 - DNA, 25 bp, Probe Sequence
gacagtgtgagaaggcgatgatcca

SEQ ID NO: 227374 - DNA, 25 bp, Probe Sequence
gacatgatgcaaatagactgataca

SEQ ID NO: 227375 - DNA, 25 bp, Probe Sequence
gacagatcacaatcaatgaacaagc

SEQ ID NO: 227376 - DNA, 25 bp, Probe Sequence
gacagtcaatagcctatctacaatc

SEQ ID NO: 227377 - DNA, 25 bp, Probe Sequence
gacagagcaagactccatctcaaaa

SEQ ID NO: 227378 - DNA, 25 bp, Probe Sequence
gacagagcaagattccatctcaaaa

SEQ ID NO: 227379 - DNA, 25 bp, Probe Sequence
gacagagccagatcctatctcaata

SEQ ID NO: 227380 - DNA, 25 bp, Probe Sequence
gacataccaagactctgtctcaaaa

SEQ ID NO: 227381 - DNA, 25 bp, Probe Sequence
gacatgagtaggcatttctcaaaag

SEQ ID NO: 227382 - DNA, 25 bp, Probe Sequence
gacaggtatgtgcattgcccatcat

SEQ ID NO: 227383 - DNA, 25 bp, Probe Sequence
gacagactctgtcgttctatcatca

SEQ ID NO: 227384 - DNA, 25 bp, Probe Sequence
gacatgacacctgtgttatgcagcc

SEQ ID NO: 227385 - DNA, 25 bp, Probe Sequence
gacatatccttttgaatatcaccaa

SEQ ID NO: 227386 - DNA, 25 bp, Probe Sequence
gacattgccatttgtagaccacacc

SEQ ID NO: 227387 - DNA, 25 bp, Probe Sequence
gacatttcgaattcatactccacct

SEQ ID NO: 227388 - DNA, 25 bp, Probe Sequence
gacatttcgaattcatactccacct

SEQ ID NO: 227389 - DNA, 25 bp, Probe Sequence
gacattttatattctaccctacaaa

SEQ ID NO: 227390 - DNA, 25 bp, Probe Sequence
gactatccttcatctacctaaaaag

SEQ ID NO: 227391 - DNA, 25 bp, Probe Sequence
gacttttcttaaaccttcagttatg

SEQ ID NO: 227392 - DNA, 25 bp, Probe Sequence
gacatgtaacattagttccgtagtt

SEQ ID NO: 227393 - DNA, 25 bp, Probe Sequence
gacattcaaagccagattcccaagt

SEQ ID NO: 227394 - DNA, 25 bp, Probe Sequence
gacatttaagctagttccatctggg

SEQ ID NO: 227395 - DNA, 25 bp, Probe Sequence
gacatatttcctgttcccttggaat

SEQ ID NO: 227396 - DNA, 25 bp, Probe Sequence
gacataaatcctataccagcttttt

SEQ ID NO: 227397 - DNA, 25 bp, Probe Sequence
gacataaatgtcacgtccagctctg

SEQ ID NO: 227398 - DNA, 25 bp, Probe Sequence
gacataatagtattctgtacccata

SEQ ID NO: 227399 - DNA, 25 bp, Probe Sequence
gacataatcagttgttatctccctg

SEQ ID NO: 227400 - DNA, 25 bp, Probe Sequence
gactcaacagtttgtacagctttgc

SEQ ID NO: 227401 - DNA, 25 bp, Probe Sequence
gacataagcattgggccatagtttg

SEQ ID NO: 227402 - DNA, 25 bp, Probe Sequence
gactcaagcatatcctctattattg

SEQ ID NO: 227403 - DNA, 25 bp, Probe Sequence
gacatccgcaaagacctgtacgcca

SEQ ID NO: 227404 - DNA, 25 bp, Probe Sequence
gacatccgcaaagacctgtacgcca

SEQ ID NO: 227405 - DNA, 25 bp, Probe Sequence
gactacgacacgtatgccgtacagt

SEQ ID NO: 227406 - DNA, 25 bp, Probe Sequence
gagcattttacgacccgaacagatt

SEQ ID NO: 227407 - DNA, 25 bp, Probe Sequence
gagcttttattgtcacccaaagatg

SEQ ID NO: 227408 - DNA, 25 bp, Probe Sequence
gacattttatcttgtccgtgaagat

SEQ ID NO: 227409 - DNA, 25 bp, Probe Sequence
gacattttatcttgtccgtgaagat

SEQ ID NO: 227410 - DNA, 25 bp, Probe Sequence
gacaggtttttggtgcgttagcatc

SEQ ID NO: 227411 - DNA, 25 bp, Probe Sequence
gacaggactctgaggtgggtgagtt

SEQ ID NO: 227412 - DNA, 25 bp, Probe Sequence
gacaggattctgagagtgcaaggcc

SEQ ID NO: 227413 - DNA, 25 bp, Probe Sequence
gacaggttctgtaatatttgggcaa

SEQ ID NO: 227414 - DNA, 25 bp, Probe Sequence
gacatggctgttcttcttagggcca

SEQ ID NO: 227415 - DNA, 25 bp, Probe Sequence
gacattggctctttgtttaggccta

SEQ ID NO: 227416 - DNA, 25 bp, Probe Sequence
gacattacatattttttaagactat

SEQ ID NO: 227417 - DNA, 25 bp, Probe Sequence
gacatttcaactttttaagttgcta

SEQ ID NO: 227418 - DNA, 25 bp, Probe Sequence
gactttgaacttctttaacgagatc

SEQ ID NO: 227419 - DNA, 25 bp, Probe Sequence
gacttctgactccaatttaaaccag

SEQ ID NO: 227420 - DNA, 25 bp, Probe Sequence
gacattggactttctattaaataat

SEQ ID NO: 227421 - DNA, 25 bp, Probe Sequence
gacatcattgacagtctttctagta

SEQ ID NO: 227422 - DNA, 25 bp, Probe Sequence
gacagttgtcaaattgttgctagct

SEQ ID NO: 227423 - DNA, 25 bp, Probe Sequence
gacagtatgtcagtaggtatcacgt

SEQ ID NO: 227424 - DNA, 25 bp, Probe Sequence
gacagtcaactctaggttacctttt

SEQ ID NO: 227425 - DNA, 25 bp, Probe Sequence
gactgttgaccttggttttctcttc

SEQ ID NO: 227426 - DNA, 25 bp, Probe Sequence
gacagtcatgaagtagctttttatc

SEQ ID NO: 227427 - DNA, 25 bp, Probe Sequence
gacagtcatgactacactttttcct

SEQ ID NO: 227428 - DNA, 25 bp, Probe Sequence
gacagtatacagtcctgtggtctcc

SEQ ID NO: 227429 - DNA, 25 bp, Probe Sequence
gacagtaacagcgcttcagagcttt

SEQ ID NO: 227430 - DNA, 25 bp, Probe Sequence
gacttgatcacagttctccaagcat

SEQ ID NO: 227431 - DNA, 25 bp, Probe Sequence
gacatcatgattggctttgcgcgag

SEQ ID NO: 227432 - DNA, 25 bp, Probe Sequence
gacatggtaccagatgcgctgcagc

SEQ ID NO: 227433 - DNA, 25 bp, Probe Sequence
gacatgaacagggccacagcagcca

SEQ ID NO: 227434 - DNA, 25 bp, Probe Sequence
gactacatcgtggaccactccattg

SEQ ID NO: 227435 - DNA, 25 bp, Probe Sequence
gacatagtcgtggatcactacaagg

SEQ ID NO: 227436 - DNA, 25 bp, Probe Sequence
gacagatgttgttgatcacaaaagt

SEQ ID NO: 227437 - DNA, 25 bp, Probe Sequence
gacaggcctctctgataataaggag

SEQ ID NO: 227438 - DNA, 25 bp, Probe Sequence
gacaggccacactgcatgaatgggg

SEQ ID NO: 227439 - DNA, 25 bp, Probe Sequence
gacaggctcaactgtgaagacattg

SEQ ID NO: 227440 - DNA, 25 bp, Probe Sequence
gacagtgtacgctggagcaggttcc

SEQ ID NO: 227441 - DNA, 25 bp, Probe Sequence
gacagggcagggggcagcaggatac

SEQ ID NO: 227442 - DNA, 25 bp, Probe Sequence
gacaggaaggaggctgtggagaaca

SEQ ID NO: 227443 - DNA, 25 bp, Probe Sequence
gacagataaagctttggggagacgg

SEQ ID NO: 227444 - DNA, 25 bp, Probe Sequence
gagcgagaacgagatcgggaacgag

SEQ ID NO: 227445 - DNA, 25 bp, Probe Sequence
gacggaaccacctcaatgcaaagat

SEQ ID NO: 227446 - DNA, 25 bp, Probe Sequence
gacaggaactaagtacaggaacaaa

SEQ ID NO: 227447 - DNA, 25 bp, Probe Sequence
gacaggtacaaaatagcagagccaa

SEQ ID NO: 227448 - DNA, 25 bp, Probe Sequence
gacaggctacattccaacagagcaa

SEQ ID NO: 227449 - DNA, 25 bp, Probe Sequence
gacagtggccaagaacaaggaccag

SEQ ID NO: 227450 - DNA, 25 bp, Probe Sequence
gacagtggccaagaacaaggaccag

SEQ ID NO: 227451 - DNA, 25 bp, Probe Sequence
gacagtggccccaaagaaagcccgg

SEQ ID NO: 227452 - DNA, 25 bp, Probe Sequence
gacattgctgcctttaagaatacca

SEQ ID NO: 227453 - DNA, 25 bp, Probe Sequence
gacattgtcaataacgaaacctaat

SEQ ID NO: 227454 - DNA, 25 bp, Probe Sequence
gacataggcttaacagaaatacttt

SEQ ID NO: 227455 - DNA, 25 bp, Probe Sequence
gactactgttgtccagggtcaattt

SEQ ID NO: 227456 - DNA, 25 bp, Probe Sequence
gactatccagtcttcagggacattt

SEQ ID NO: 227457 - DNA, 25 bp, Probe Sequence
gactcaccagacgtcggggagagag

SEQ ID NO: 227458 - DNA, 25 bp, Probe Sequence
gactacctagcagtgggtgatggac

SEQ ID NO: 227459 - DNA, 25 bp, Probe Sequence
gactacaaatagggtgcagtgtaca

SEQ ID NO: 227460 - DNA, 25 bp, Probe Sequence
gacatcaccaagggtgtgcagtacc

SEQ ID NO: 227461 - DNA, 25 bp, Probe Sequence
gacatcaccagtcagcagccaaaga

SEQ ID NO: 227462 - DNA, 25 bp, Probe Sequence
gacttcatggataatcccttccggt

SEQ ID NO: 227463 - DNA, 25 bp, Probe Sequence
gacatctgttaaacgtctttttgtt

SEQ ID NO: 227464 - DNA, 25 bp, Probe Sequence
gactactatgaacagttttctttta

SEQ ID NO: 227465 - DNA, 25 bp, Probe Sequence
gactgcccggacaagttttgcttat

SEQ ID NO: 227466 - DNA, 25 bp, Probe Sequence
gacttgccttacacagtttcttgaa

SEQ ID NO: 227467 - DNA, 25 bp, Probe Sequence
gactaacttattttgattgtttgat

SEQ ID NO: 227468 - DNA, 25 bp, Probe Sequence
gaccactgagttctagtttttattc

SEQ ID NO: 227469 - DNA, 25 bp, Probe Sequence
gacggcatagttttcagtagcttta

SEQ ID NO: 227470 - DNA, 25 bp, Probe Sequence
gacatagattttttgcaggagcgat

SEQ ID NO: 227471 - DNA, 25 bp, Probe Sequence
gacatgatgttcgtcctgcaagggc

SEQ ID NO: 227472 - DNA, 25 bp, Probe Sequence
gatcattttttactgggggcggact

SEQ ID NO: 227473 - DNA, 25 bp, Probe Sequence
gactttttggacgatgtgcggcgga

SEQ ID NO: 227474 - DNA, 25 bp, Probe Sequence
gactttggggagatggcgatttgat

SEQ ID NO: 227475 - DNA, 25 bp, Probe Sequence
gacttccaggaattcatggcctttg

SEQ ID NO: 227476 - DNA, 25 bp, Probe Sequence
gacttaagtgagttaggtctttaag

SEQ ID NO: 227477 - DNA, 25 bp, Probe Sequence
gacatctagggaccagagcaggttt

SEQ ID NO: 227478 - DNA, 25 bp, Probe Sequence
gacttagggcaccttgagcctgagt

SEQ ID NO: 227479 - DNA, 25 bp, Probe Sequence
gacttagtgtaacctaggagatttt

SEQ ID NO: 227480 - DNA, 25 bp, Probe Sequence
gactcaagcataaaacttggcagtt

SEQ ID NO: 227481 - DNA, 25 bp, Probe Sequence
gactcattcatatagcacgtagttt

SEQ ID NO: 227482 - DNA, 25 bp, Probe Sequence
gacatgttctcagatcatcgggact

SEQ ID NO: 227483 - DNA, 25 bp, Probe Sequence
gacagtgcccagggctctggggtgt

SEQ ID NO: 227484 - DNA, 25 bp, Probe Sequence
gacagtgcccagggctctgatgtgt

SEQ ID NO: 227485 - DNA, 25 bp, Probe Sequence
gacaggcccaattccattgtgatgt

SEQ ID NO: 227486 - DNA, 25 bp, Probe Sequence
gacatctgctccaaagccttttgga

SEQ ID NO: 227487 - DNA, 25 bp, Probe Sequence
gacattgcaccagatgccattacat

SEQ ID NO: 227488 - DNA, 25 bp, Probe Sequence
gacatctcacataaacatctatatc

SEQ ID NO: 227489 - DNA, 25 bp, Probe Sequence
gacattccatgctgatttatatcac

SEQ ID NO: 227490 - DNA, 25 bp, Probe Sequence
gacatccccgcacatgatgtctggc

SEQ ID NO: 227491 - DNA, 25 bp, Probe Sequence
gacatgaacgcggccaatgtgggct

SEQ ID NO: 227492 - DNA, 25 bp, Probe Sequence
gacatgtgaagccacgaagggcctt

SEQ ID NO: 227493 - DNA, 25 bp, Probe Sequence
gacagtgtttgacgaagcgatccga

SEQ ID NO: 227494 - DNA, 25 bp, Probe Sequence
gacatgcttattagaaagctgaccc

SEQ ID NO: 227495 - DNA, 25 bp, Probe Sequence
gacagtttgatttacatggatcctc

SEQ ID NO: 227496 - DNA, 25 bp, Probe Sequence
gatcattccttttacaggcacgtgg

SEQ ID NO: 227497 - DNA, 25 bp, Probe Sequence
gacatccctgtctacaagagtcgga

SEQ ID NO: 227498 - DNA, 25 bp, Probe Sequence
gacatctggtaccacgaggatcgga

SEQ ID NO: 227499 - DNA, 25 bp, Probe Sequence
gacatgctgtattccacgaggcatt

SEQ ID NO: 227500 - DNA, 25 bp, Probe Sequence
gacatgctgttcccaaagttcttga

SEQ ID NO: 227501 - DNA, 25 bp, Probe Sequence
gacatcagttgcccagtcatgtgat

SEQ ID NO: 227502 - DNA, 25 bp, Probe Sequence
gacatgagtataccagtttatatat

SEQ ID NO: 227503 - DNA, 25 bp, Probe Sequence
gacatgatttcctacaattatgatt

SEQ ID NO: 227504 - DNA, 25 bp, Probe Sequence
gacatgattgtgcctatccttgaga

SEQ ID NO: 227505 - DNA, 25 bp, Probe Sequence
gacattatgcattctgtacttagtg

SEQ ID NO: 227506 - DNA, 25 bp, Probe Sequence
gacttgataactccagtgccagtat

SEQ ID NO: 227507 - DNA, 25 bp, Probe Sequence
gacatctgtcaaaccaggaatattc

SEQ ID NO: 227508 - DNA, 25 bp, Probe Sequence
gacagtccaagccctggataatgct

SEQ ID NO: 227509 - DNA, 25 bp, Probe Sequence
gacagtccaagccctggataatgct

SEQ ID NO: 227510 - DNA, 25 bp, Probe Sequence
gacgtcaagggcaatggcaaagggg

SEQ ID NO: 227511 - DNA, 25 bp, Probe Sequence
gacagtacctgtaatgagaaacagt

SEQ ID NO: 227512 - DNA, 25 bp, Probe Sequence
gacaggcaacaggtggaaagacatt

SEQ ID NO: 227513 - DNA, 25 bp, Probe Sequence
gacagtctgaccgtggaacgagact

SEQ ID NO: 227514 - DNA, 25 bp, Probe Sequence
gacatgccagactttgaggacgatg

SEQ ID NO: 227515 - DNA, 25 bp, Probe Sequence
gacatgatgcagctatggagtgaaa

SEQ ID NO: 227516 - DNA, 25 bp, Probe Sequence
gacatggagtgcatggatggcgccc

SEQ ID NO: 227517 - DNA, 25 bp, Probe Sequence
gacagggagctaggcagccgtgctc

SEQ ID NO: 227518 - DNA, 25 bp, Probe Sequence
gacatgggaggggctgcacagtggc

SEQ ID NO: 227519 - DNA, 25 bp, Probe Sequence
gacttgtgagtgtgatgatcgccgc

SEQ ID NO: 227520 - DNA, 25 bp, Probe Sequence
gacaggagagtgagctcaccacgcg

SEQ ID NO: 227521 - DNA, 25 bp, Probe Sequence
gacatggaggtgagctgcccagatg

SEQ ID NO: 227522 - DNA, 25 bp, Probe Sequence
gacatggaggtgagctgcccagatg

SEQ ID NO: 227523 - DNA, 25 bp, Probe Sequence
gacatgtgaggaatgggctggcttg

SEQ ID NO: 227524 - DNA, 25 bp, Probe Sequence
gactaatacaatcatgctgtgcttg

SEQ ID NO: 227525 - DNA, 25 bp, Probe Sequence
gacatctcatccatgctttgtgtct

SEQ ID NO: 227526 - DNA, 25 bp, Probe Sequence
gacatctgcatcatttcataggatt

SEQ ID NO: 227527 - DNA, 25 bp, Probe Sequence
gacatcccaggattctacgattccg

SEQ ID NO: 227528 - DNA, 25 bp, Probe Sequence
gacatgcctgaggattctgacacct

SEQ ID NO: 227529 - DNA, 25 bp, Probe Sequence
gacatggccagcaattctggcactt

SEQ ID NO: 227530 - DNA, 25 bp, Probe Sequence
gacatggaggcctatttgcctaaga

SEQ ID NO: 227531 - DNA, 25 bp, Probe Sequence
gacaggggctggatggctctgaagc

SEQ ID NO: 227532 - DNA, 25 bp, Probe Sequence
gacttgggtggcaattcctcaacca

SEQ ID NO: 227533 - DNA, 25 bp, Probe Sequence
gacttgtgttttatcttaaccacca

SEQ ID NO: 227534 - DNA, 25 bp, Probe Sequence
gactctgttaatccttcctagatcc

SEQ ID NO: 227535 - DNA, 25 bp, Probe Sequence
gacttcttaattactcaaatgactg

SEQ ID NO: 227536 - DNA, 25 bp, Probe Sequence
gacattgtttactccaaagcaatgc

SEQ ID NO: 227537 - DNA, 25 bp, Probe Sequence
gacttgtgttgaccccaagcaactc

SEQ ID NO: 227538 - DNA, 25 bp, Probe Sequence
gacatcattgtgaaccctgacgcac

SEQ ID NO: 227539 - DNA, 25 bp, Probe Sequence
gacatcatgtgttagcctgttccta

SEQ ID NO: 227540 - DNA, 25 bp, Probe Sequence
gacatcagtctccaacatgtttctg

SEQ ID NO: 227541 - DNA, 25 bp, Probe Sequence
gacatagtagcaaattggttctgaa

SEQ ID NO: 227542 - DNA, 25 bp, Probe Sequence
gacatagtatataacgtgtccagga

SEQ ID NO: 227543 - DNA, 25 bp, Probe Sequence
gactacattacaacgggccaggaag

SEQ ID NO: 227544 - DNA, 25 bp, Probe Sequence
gactaatgtgaaaacttccaggaag

SEQ ID NO: 227545 - DNA, 25 bp, Probe Sequence
gactcaagtgcctgaagccctagag

SEQ ID NO: 227546 - DNA, 25 bp, Probe Sequence
gaccagggactttgcaacctacaga

SEQ ID NO: 227547 - DNA, 25 bp, Probe Sequence
gacatgggggctcatcaaactataa

SEQ ID NO: 227548 - DNA, 25 bp, Probe Sequence
gacatggttgggacatcagatactt

SEQ ID NO: 227549 - DNA, 25 bp, Probe Sequence
gacatggaaggggatcgcaacatct

SEQ ID NO: 227550 - DNA, 25 bp, Probe Sequence
gacatggaaggcctgttgctttgct

SEQ ID NO: 227551 - DNA, 25 bp, Probe Sequence
gacagtgactgtggtgcttttgtgt

SEQ ID NO: 227552 - DNA, 25 bp, Probe Sequence
gacagtgactgaaatggttgtgatt

SEQ ID NO: 227553 - DNA, 25 bp, Probe Sequence
gacagtgcacgagaaggatgtgatt

SEQ ID NO: 227554 - DNA, 25 bp, Probe Sequence
gacattcctgatgaaggagatgtgc

SEQ ID NO: 227555 - DNA, 25 bp, Probe Sequence
gacatgtttcatagcaaggaggata

SEQ ID NO: 227556 - DNA, 25 bp, Probe Sequence
gacatgatgtactaggcaaaggaac

SEQ ID NO: 227557 - DNA, 25 bp, Probe Sequence
gacattgaaaagccatgcaagttat

SEQ ID NO: 227558 - DNA, 25 bp, Probe Sequence
gacattgaaaacggcctgctttcca

SEQ ID NO: 227559 - DNA, 25 bp, Probe Sequence
gacattgacttcaggcaatctttcc

SEQ ID NO: 227560 - DNA, 25 bp, Probe Sequence
gacatgggcattacggatatctttg

SEQ ID NO: 227561 - DNA, 25 bp, Probe Sequence
gacattggcttagggacttgggaga

SEQ ID NO: 227562 - DNA, 25 bp, Probe Sequence
gacatgtgtgctagagcttactctg

SEQ ID NO: 227563 - DNA, 25 bp, Probe Sequence
gactttgcttaccatcagcatctgc

SEQ ID NO: 227564 - DNA, 25 bp, Probe Sequence
gactgttgctcttctatcagactgc

SEQ ID NO: 227565 - DNA, 25 bp, Probe Sequence
gacatgttcatcatcaaggctgtgc

SEQ ID NO: 227566 - DNA, 25 bp, Probe Sequence
gacatgcctctcagaaggtcaggag

SEQ ID NO: 227567 - DNA, 25 bp, Probe Sequence
gacatcacctcacacatggaaagcg

SEQ ID NO: 227568 - DNA, 25 bp, Probe Sequence
gacatcacctattggcttaacagag

SEQ ID NO: 227569 - DNA, 25 bp, Probe Sequence
gacatcccgagaagtccagacggct

SEQ ID NO: 227570 - DNA, 25 bp, Probe Sequence
gacatacaactgaaccctgaaggct

SEQ ID NO: 227571 - DNA, 25 bp, Probe Sequence
gacatccaatcagaacattcaaggg

SEQ ID NO: 227572 - DNA, 25 bp, Probe Sequence
gacatcactacagggcagcataaga

SEQ ID NO: 227573 - DNA, 25 bp, Probe Sequence
gacatcacttacaatgtgaacgaca

SEQ ID NO: 227574 - DNA, 25 bp, Probe Sequence
gacatcacagtgaccagaaaccacc

SEQ ID NO: 227575 - DNA, 25 bp, Probe Sequence
gacatccaggtaggtgaacatgcca

SEQ ID NO: 227576 - DNA, 25 bp, Probe Sequence
gacatgtaggtaggaagcactgaaa

SEQ ID NO: 227577 - DNA, 25 bp, Probe Sequence
gacaggtggcttggccactctggac

SEQ ID NO: 227578 - DNA, 25 bp, Probe Sequence
gacatttggcttaccagcatttgag

SEQ ID NO: 227579 - DNA, 25 bp, Probe Sequence
gactttggccaaagatgtacggctt

SEQ ID NO: 227580 - DNA, 25 bp, Probe Sequence
gacgtccccagaagtttctgggtct

SEQ ID NO: 227581 - DNA, 25 bp, Probe Sequence
gacttccacccaagactgttgggtc

SEQ ID NO: 227582 - DNA, 25 bp, Probe Sequence
gactcccccaaaccaatgtggaata

SEQ ID NO: 227583 - DNA, 25 bp, Probe Sequence
gactcccccaaaccaatgtggaata

SEQ ID NO: 227584 - DNA, 25 bp, Probe Sequence
gactccccaagaactcctttaatat

SEQ ID NO: 227585 - DNA, 25 bp, Probe Sequence
gactcctcctacacaatttatttga

SEQ ID NO: 227586 - DNA, 25 bp, Probe Sequence
gacttgcacctataaaattaatgtg

SEQ ID NO: 227587 - DNA, 25 bp, Probe Sequence
gagcttccagctctaataaaacagc

SEQ ID NO: 227588 - DNA, 25 bp, Probe Sequence
gacttccgaccgaagcaagaatcgc

SEQ ID NO: 227589 - DNA, 25 bp, Probe Sequence
gacttcctactaatacagaaatcta

SEQ ID NO: 227590 - DNA, 25 bp, Probe Sequence
gagtaccaagtgctacagaaaccat

SEQ ID NO: 227591 - DNA, 25 bp, Probe Sequence
gatcctccaagtcaacatttacgtg

SEQ ID NO: 227592 - DNA, 25 bp, Probe Sequence
gatcctccaagtcaacatttacgtg

SEQ ID NO: 227593 - DNA, 25 bp, Probe Sequence
gagtttcaaggcaaacgaatgcacg

SEQ ID NO: 227594 - DNA, 25 bp, Probe Sequence
gacttaaaggtcaacgtggagcaca

SEQ ID NO: 227595 - DNA, 25 bp, Probe Sequence
gacttaaacctcactgagagcgcaa

SEQ ID NO: 227596 - DNA, 25 bp, Probe Sequence
gacttagtctcctggctgaacagag

SEQ ID NO: 227597 - DNA, 25 bp, Probe Sequence
gacttgatttccagtggaacaaatc

SEQ ID NO: 227598 - DNA, 25 bp, Probe Sequence
gacttactgaacatggggcaccaac

SEQ ID NO: 227599 - DNA, 25 bp, Probe Sequence
gacatccactatttggtgaaaccaa

SEQ ID NO: 227600 - DNA, 25 bp, Probe Sequence
gacatcctctccatgggatgatgac

SEQ ID NO: 227601 - DNA, 25 bp, Probe Sequence
gacatccacccagctggagaacata

SEQ ID NO: 227602 - DNA, 25 bp, Probe Sequence
gacaggatgacttgttggagaacat

SEQ ID NO: 227603 - DNA, 25 bp, Probe Sequence
gacattgacctgtttggcagtgaca

SEQ ID NO: 227604 - DNA, 25 bp, Probe Sequence
gacattgacctgtttggcagtgaca

SEQ ID NO: 227605 - DNA, 25 bp, Probe Sequence
gacattgttctgtggaaggctagct

SEQ ID NO: 227606 - DNA, 25 bp, Probe Sequence
gacttcctcattagggacagcgagt

SEQ ID NO: 227607 - DNA, 25 bp, Probe Sequence
gacattgatgtcatagggagcgggg

SEQ ID NO: 227608 - DNA, 25 bp, Probe Sequence
gggttttatgggcgctgtgggccct

SEQ ID NO: 227609 - DNA, 25 bp, Probe Sequence
ggtttttgtgggtggattgagcccg

SEQ ID NO: 227610 - DNA, 25 bp, Probe Sequence
ggctttttgggacagcaactacctt

SEQ ID NO: 227611 - DNA, 25 bp, Probe Sequence
ggctttagttaacaggttcttcttg

SEQ ID NO: 227612 - DNA, 25 bp, Probe Sequence
gacatttaggtatctcaggtccttt

SEQ ID NO: 227613 - DNA, 25 bp, Probe Sequence
gacatttataactcaaggatacctt

SEQ ID NO: 227614 - DNA, 25 bp, Probe Sequence
gacatgaatctgaacattaaggtaa

SEQ ID NO: 227615 - DNA, 25 bp, Probe Sequence
gacatgaatctatgcgtgaaggttc

SEQ ID NO: 227616 - DNA, 25 bp, Probe Sequence
gacatggagatcagcgtgaaggagt

SEQ ID NO: 227617 - DNA, 25 bp, Probe Sequence
gacatgggactggaggacgagcaaa

SEQ ID NO: 227618 - DNA, 25 bp, Probe Sequence
gacatggaaatggtggggagacaaa

SEQ ID NO: 227619 - DNA, 25 bp, Probe Sequence
gacatgaagattggggtgtaacacc

SEQ ID NO: 227620 - DNA, 25 bp, Probe Sequence
gacatgcagggtgacggtgaagagc

SEQ ID NO: 227621 - DNA, 25 bp, Probe Sequence
gacatcaggactctcgggacaactg

SEQ ID NO: 227622 - DNA, 25 bp, Probe Sequence
gaccagggtcactggagaccacgtc

SEQ ID NO: 227623 - DNA, 25 bp, Probe Sequence
gagctaagttcttgggagacccgtt

SEQ ID NO: 227624 - DNA, 25 bp, Probe Sequence
gactaggcatgtcagaggaccccag

SEQ ID NO: 227625 - DNA, 25 bp, Probe Sequence
gactagggtaatctgacttctcact

SEQ ID NO: 227626 - DNA, 25 bp, Probe Sequence
gactatttcaaagctactgttccta

SEQ ID NO: 227627 - DNA, 25 bp, Probe Sequence
gactagctatactccaactttacta

SEQ ID NO: 227628 - DNA, 25 bp, Probe Sequence
gactacctcgattacaacatttaca

SEQ ID NO: 227629 - DNA, 25 bp, Probe Sequence
gactccgtacattccaattattaga

SEQ ID NO: 227630 - DNA, 25 bp, Probe Sequence
gacatttgtaagtcctttgatacag

SEQ ID NO: 227631 - DNA, 25 bp, Probe Sequence
gacatagttatggcaccttcgaaag

SEQ ID NO: 227632 - DNA, 25 bp, Probe Sequence
gacataggtagcagcccacggagat

SEQ ID NO: 227633 - DNA, 25 bp, Probe Sequence
gacataagaggttgcacaccggaga

SEQ ID NO: 227634 - DNA, 25 bp, Probe Sequence
gactatcaaggttcagcaaaggcat

SEQ ID NO: 227635 - DNA, 25 bp, Probe Sequence
gacattcaataaacacagtagaaca

SEQ ID NO: 227636 - DNA, 25 bp, Probe Sequence
gacctcagctaagactgggtccttt

SEQ ID NO: 227637 - DNA, 25 bp, Probe Sequence
gacattgaggaagcagtgtttctct

SEQ ID NO: 227638 - DNA, 25 bp, Probe Sequence
gacattagtgagatatggtttgaat

SEQ ID NO: 227639 - DNA, 25 bp, Probe Sequence
gacatacgccagatttgtttgccag

SEQ ID NO: 227640 - DNA, 25 bp, Probe Sequence
gacatgcacaccacttagttaccaa

SEQ ID NO: 227641 - DNA, 25 bp, Probe Sequence
gacatgacctctatataattatcac

SEQ ID NO: 227642 - DNA, 25 bp, Probe Sequence
gacatgtcctgcatcttctataaac

SEQ ID NO: 227643 - DNA, 25 bp, Probe Sequence
gacatatccacaaggtcgtaaatgc

SEQ ID NO: 227644 - DNA, 25 bp, Probe Sequence
gacatcatacctaatggcgaaaagc

SEQ ID NO: 227645 - DNA, 25 bp, Probe Sequence
gacatgcatatggcttaggagaaca

SEQ ID NO: 227646 - DNA, 25 bp, Probe Sequence
gacatgctgtgtgccgggaacagcc

SEQ ID NO: 227647 - DNA, 25 bp, Probe Sequence
gacatttatccaggtgaaacagcat

SEQ ID NO: 227648 - DNA, 25 bp, Probe Sequence
gacattgctacttgagtgtgaacag

SEQ ID NO: 227649 - DNA, 25 bp, Probe Sequence
gacattgctacttgagtgtgaacag

SEQ ID NO: 227650 - DNA, 25 bp, Probe Sequence
gacatctgctaaaatgcttgctgaa

SEQ ID NO: 227651 - DNA, 25 bp, Probe Sequence
gacatctgtgaaaatgggcgacctc

SEQ ID NO: 227652 - DNA, 25 bp, Probe Sequence
gactctgctgaggagggggacctac

SEQ ID NO: 227653 - DNA, 25 bp, Probe Sequence
gactcttccaagtgggtgtcttcag

SEQ ID NO: 227654 - DNA, 25 bp, Probe Sequence
gactttgaaagtcgtgtgcattttc

SEQ ID NO: 227655 - DNA, 25 bp, Probe Sequence
gactttccaaggaatttaattgcca

SEQ ID NO: 227656 - DNA, 25 bp, Probe Sequence
gactttcctcatcaggttaaataca

SEQ ID NO: 227657 - DNA, 25 bp, Probe Sequence
gactttcctcaacatgtttaccaga

SEQ ID NO: 227658 - DNA, 25 bp, Probe Sequence
gactttttgcgtcacttaatccaaa

SEQ ID NO: 227659 - DNA, 25 bp, Probe Sequence
gactttattggtctattatttgtaa

SEQ ID NO: 227660 - DNA, 25 bp, Probe Sequence
gactattacgttcctctataaattc

SEQ ID NO: 227661 - DNA, 25 bp, Probe Sequence
gactttgccttcagcctgtataagc

SEQ ID NO: 227662 - DNA, 25 bp, Probe Sequence
gacatttgtctaatagcctaataca

SEQ ID NO: 227663 - DNA, 25 bp, Probe Sequence
gacttacctatatgactaatgccat

SEQ ID NO: 227664 - DNA, 25 bp, Probe Sequence
gacttacttatctgtatcggtcagg

SEQ ID NO: 227665 - DNA, 25 bp, Probe Sequence
gacttcttgttctgatgtcacgtcc

SEQ ID NO: 227666 - DNA, 25 bp, Probe Sequence
gacttgatcgtgactagagatgacc

SEQ ID NO: 227667 - DNA, 25 bp, Probe Sequence
gacttgctggaggaggagatcacca

SEQ ID NO: 227668 - DNA, 25 bp, Probe Sequence
gactatgtgttgaaggaccattccc

SEQ ID NO: 227669 - DNA, 25 bp, Probe Sequence
gactagtaggtagattcattcttcg

SEQ ID NO: 227670 - DNA, 25 bp, Probe Sequence
gactattaagtgtgatgttagctat

SEQ ID NO: 227671 - DNA, 25 bp, Probe Sequence
gactttacaggcttggctttgagat

SEQ ID NO: 227672 - DNA, 25 bp, Probe Sequence
gacttctatgcacgttattttcaac

SEQ ID NO: 227673 - DNA, 25 bp, Probe Sequence
gacatctttcactttaatattacat

SEQ ID NO: 227674 - DNA, 25 bp, Probe Sequence
gacattcttagctgtaacttaacta

SEQ ID NO: 227675 - DNA, 25 bp, Probe Sequence
gactttatagggtaacttccaggca

SEQ ID NO: 227676 - DNA, 25 bp, Probe Sequence
gactttaatccgtcaaattcttgta

SEQ ID NO: 227677 - DNA, 25 bp, Probe Sequence
gacatcttaattggtgaaagttgtt

SEQ ID NO: 227678 - DNA, 25 bp, Probe Sequence
gacatgaatgcagtgccttcaaagt

SEQ ID NO: 227679 - DNA, 25 bp, Probe Sequence
gacattctgaatgcttctaagtaaa

SEQ ID NO: 227680 - DNA, 25 bp, Probe Sequence
gacattctgaatgcttctaagtaaa

SEQ ID NO: 227681 - DNA, 25 bp, Probe Sequence
gacattctgaatgcttctaagtaaa

SEQ ID NO: 227682 - DNA, 25 bp, Probe Sequence
gacattccaatagttcacagagtaa

SEQ ID NO: 227683 - DNA, 25 bp, Probe Sequence
gacttctcaaaggacaatcggatac

SEQ ID NO: 227684 - DNA, 25 bp, Probe Sequence
gacttccagtgacgtcaatgggtgg

SEQ ID NO: 227685 - DNA, 25 bp, Probe Sequence
gacatgtacagtctttatggtggga

SEQ ID NO: 227686 - DNA, 25 bp, Probe Sequence
gacattcagagtcatattatggtca

SEQ ID NO: 227687 - DNA, 25 bp, Probe Sequence
gacattcagtgttacttgctgagtc

SEQ ID NO: 227688 - DNA, 25 bp, Probe Sequence
gacattgcgttttctgtgttgccaa

SEQ ID NO: 227689 - DNA, 25 bp, Probe Sequence
gacatatgccattatctcttttcca

SEQ ID NO: 227690 - DNA, 25 bp, Probe Sequence
gactagataaattgcatttcccctt

SEQ ID NO: 227691 - DNA, 25 bp, Probe Sequence
gacatattaacttgtgctgtcgcct

SEQ ID NO: 227692 - DNA, 25 bp, Probe Sequence
gacattacattattagtgcatcctc

SEQ ID NO: 227693 - DNA, 25 bp, Probe Sequence
gacattgtatttgatggcatcgctc

SEQ ID NO: 227694 - DNA, 25 bp, Probe Sequence
gacatcttgaccattgacatcagtc

SEQ ID NO: 227695 - DNA, 25 bp, Probe Sequence
gacatttgacctttgacatttgacc

SEQ ID NO: 227696 - DNA, 25 bp, Probe Sequence
gacattttctttaaattagactcta

SEQ ID NO: 227697 - DNA, 25 bp, Probe Sequence
gacatatttcttgctctaaaaccca

SEQ ID NO: 227698 - DNA, 25 bp, Probe Sequence
gacatattttaccctatgaccagcc

SEQ ID NO: 227699 - DNA, 25 bp, Probe Sequence
gacattgatgtcactcttcatacca

SEQ ID NO: 227700 - DNA, 25 bp, Probe Sequence
gacatctggctctcagcttattgcc

SEQ ID NO: 227701 - DNA, 25 bp, Probe Sequence
gacatcgtgcacatcagcatcttct

SEQ ID NO: 227702 - DNA, 25 bp, Probe Sequence
gactcagtgcataagatgactttgg

SEQ ID NO: 227703 - DNA, 25 bp, Probe Sequence
gacatctgtgtttcaagtggggctc

SEQ ID NO: 227704 - DNA, 25 bp, Probe Sequence
gacatatgtgtttaactggtttggc

SEQ ID NO: 227705 - DNA, 25 bp, Probe Sequence
gacttctttctcagctggaaatggc

SEQ ID NO: 227706 - DNA, 25 bp, Probe Sequence
gacttttcccaggatggaaagcttg

SEQ ID NO: 227707 - DNA, 25 bp, Probe Sequence
gacttttcccaggatggaaagcttg

SEQ ID NO: 227708 - DNA, 25 bp, Probe Sequence
gacttttcccattgacgtacaatgg

SEQ ID NO: 227709 - DNA, 25 bp, Probe Sequence
gacttgctgtcccctaaggaaatcc

SEQ ID NO: 227710 - DNA, 25 bp, Probe Sequence
gagctagttccccaacagaaagatc

SEQ ID NO: 227711 - DNA, 25 bp, Probe Sequence
gacttggtgcctcagacagaataat

SEQ ID NO: 227712 - DNA, 25 bp, Probe Sequence
gactaaggcccaaagatgcataatt

SEQ ID NO: 227713 - DNA, 25 bp, Probe Sequence
gactttgaacaaaagtcaactgttg

SEQ ID NO: 227714 - DNA, 25 bp, Probe Sequence
gacttgtattggcctaccaactgta

SEQ ID NO: 227715 - DNA, 25 bp, Probe Sequence
gacattgtttgatgaagcctaatta

SEQ ID NO: 227716 - DNA, 25 bp, Probe Sequence
gacattgtcatatacaacgatgaat

SEQ ID NO: 227717 - DNA, 25 bp, Probe Sequence
gacattattcatgcaccacgatacc

SEQ ID NO: 227718 - DNA, 25 bp, Probe Sequence
gacatttttctcataatgaatcctc

SEQ ID NO: 227719 - DNA, 25 bp, Probe Sequence
gacattctttttatatgcattctga

SEQ ID NO: 227720 - DNA, 25 bp, Probe Sequence
gacatgtgttctttgcttacaattg

SEQ ID NO: 227721 - DNA, 25 bp, Probe Sequence
gacttggtctgatttattcactgag

SEQ ID NO: 227722 - DNA, 25 bp, Probe Sequence
gacttggttatgtttatctaatgtt

SEQ ID NO: 227723 - DNA, 25 bp, Probe Sequence
gacttgttgtctattatctgtaggt

SEQ ID NO: 227724 - DNA, 25 bp, Probe Sequence
gatccctttcgtcagttgctgaggt

SEQ ID NO: 227725 - DNA, 25 bp, Probe Sequence
gacatcacttacccaatttaagagt

SEQ ID NO: 227726 - DNA, 25 bp, Probe Sequence
gacatcagcttccaccagtgtaaaa

SEQ ID NO: 227727 - DNA, 25 bp, Probe Sequence
gacttctggcagcaacgtaaaaatt

SEQ ID NO: 227728 - DNA, 25 bp, Probe Sequence
gacttgggatgggacgctgatataa

SEQ ID NO: 227729 - DNA, 25 bp, Probe Sequence
gacattagacagggacctgaaagga

SEQ ID NO: 227730 - DNA, 25 bp, Probe Sequence
gacttcatgaacagaccagcaccag

SEQ ID NO: 227731 - DNA, 25 bp, Probe Sequence
gactttgaagatgaccagcacaaga

SEQ ID NO: 227732 - DNA, 25 bp, Probe Sequence
gactgttacctacacatgcatcgga

SEQ ID NO: 227733 - DNA, 25 bp, Probe Sequence
gacgtttgccagcaactggaggaag

SEQ ID NO: 227734 - DNA, 25 bp, Probe Sequence
gacattttgctaggaagtgaccgag

SEQ ID NO: 227735 - DNA, 25 bp, Probe Sequence
gacattttctaggactgtacttgat

SEQ ID NO: 227736 - DNA, 25 bp, Probe Sequence
gacattttaatgtagctactcttat

SEQ ID NO: 227737 - DNA, 25 bp, Probe Sequence
gagttcttagaaagtacccacatac

SEQ ID NO: 227738 - DNA, 25 bp, Probe Sequence
gactttaaaaattaccgctgcacac

SEQ ID NO: 227739 - DNA, 25 bp, Probe Sequence
gactttagagaaattaggtccaaga

SEQ ID NO: 227740 - DNA, 25 bp, Probe Sequence
gactcttaaaagttcgaggctcagg

SEQ ID NO: 227741 - DNA, 25 bp, Probe Sequence
gactttaaaatgaaccagctctgaa

SEQ ID NO: 227742 - DNA, 25 bp, Probe Sequence
gacttccaagaggtcacccttgaga

SEQ ID NO: 227743 - DNA, 25 bp, Probe Sequence
gacattctgaaagatcctcctagtg

SEQ ID NO: 227744 - DNA, 25 bp, Probe Sequence
gacattcggcttgatccatgtccag

SEQ ID NO: 227745 - DNA, 25 bp, Probe Sequence
gacttggactatgattatctacaga

SEQ ID NO: 227746 - DNA, 25 bp, Probe Sequence
gacatcgttttctatatagatgaca

SEQ ID NO: 227747 - DNA, 25 bp, Probe Sequence
gacatccatcatctgcttaatttga

SEQ ID NO: 227748 - DNA, 25 bp, Probe Sequence
gacatcagtcagttgtttgatttca

SEQ ID NO: 227749 - DNA, 25 bp, Probe Sequence
gactctgtcagagctttgtttctgg

SEQ ID NO: 227750 - DNA, 25 bp, Probe Sequence
gacatctggaagcctttctattcat

SEQ ID NO: 227751 - DNA, 25 bp, Probe Sequence
gacattaacacactttgatatctat

SEQ ID NO: 227752 - DNA, 25 bp, Probe Sequence
gacattcaaggcatttctatcacat

SEQ ID NO: 227753 - DNA, 25 bp, Probe Sequence
gactatatatgtgtgggctaccatg

SEQ ID NO: 227754 - DNA, 25 bp, Probe Sequence
gacattatttgcctggcctgacaaa

SEQ ID NO: 227755 - DNA, 25 bp, Probe Sequence
gacattcatgtctctgagttacaaa

SEQ ID NO: 227756 - DNA, 25 bp, Probe Sequence
gacatgtcaggcagttttagagtag

SEQ ID NO: 227757 - DNA, 25 bp, Probe Sequence
gacgtcggcgttgctgggagaatgt

SEQ ID NO: 227758 - DNA, 25 bp, Probe Sequence
gacttctggagggactgggaggact

SEQ ID NO: 227759 - DNA, 25 bp, Probe Sequence
gacatttggggatctggtgggcagt

SEQ ID NO: 227760 - DNA, 25 bp, Probe Sequence
gacatgtttggggacggtgagctgc

SEQ ID NO: 227761 - DNA, 25 bp, Probe Sequence
gacttttgagtcctagggatgctgc

SEQ ID NO: 227762 - DNA, 25 bp, Probe Sequence
gacttgtatagtgagagaggaggcc

SEQ ID NO: 227763 - DNA, 25 bp, Probe Sequence
gacattgtaccattaggaggagctg

SEQ ID NO: 227764 - DNA, 25 bp, Probe Sequence
gactggttcttttgtaggatgtggc

SEQ ID NO: 227765 - DNA, 25 bp, Probe Sequence
gacatttttgtcagctcaggactgg

SEQ ID NO: 227766 - DNA, 25 bp, Probe Sequence
gacttttcagatatgccgaccatgg

SEQ ID NO: 227767 - DNA, 25 bp, Probe Sequence
gactaagtcaagctacttcctgagc

SEQ ID NO: 227768 - DNA, 25 bp, Probe Sequence
gactatgggtggctactgtggctac

SEQ ID NO: 227769 - DNA, 25 bp, Probe Sequence
gactttggggacagctgtcagtggc

SEQ ID NO: 227770 - DNA, 25 bp, Probe Sequence
gacttagaaggagggcccaggcact

SEQ ID NO: 227771 - DNA, 25 bp, Probe Sequence
gacttggttggcagcgctgccatgg

SEQ ID NO: 227772 - DNA, 25 bp, Probe Sequence
gacattggtattctgggcagcttcc

SEQ ID NO: 227773 - DNA, 25 bp, Probe Sequence
gacattaatattgcacagaacttcc

SEQ ID NO: 227774 - DNA, 25 bp, Probe Sequence
gactttattttatgtgactataata

SEQ ID NO: 227775 - DNA, 25 bp, Probe Sequence
gactttttcttcttgattctggaca

SEQ ID NO: 227776 - DNA, 25 bp, Probe Sequence
gactattctttatctattcaatggt

SEQ ID NO: 227777 - DNA, 25 bp, Probe Sequence
gactatttattccagctttcagctg

SEQ ID NO: 227778 - DNA, 25 bp, Probe Sequence
gactcttgtattacgattcgcacga

SEQ ID NO: 227779 - DNA, 25 bp, Probe Sequence
gacatctttgatgactcttcgcagt

SEQ ID NO: 227780 - DNA, 25 bp, Probe Sequence
gacatactatgttgacagcgtcttg

SEQ ID NO: 227781 - DNA, 25 bp, Probe Sequence
gacatcatccatgctaaagtctgag

SEQ ID NO: 227782 - DNA, 25 bp, Probe Sequence
gacatcgcatcatcaaaagttatct

SEQ ID NO: 227783 - DNA, 25 bp, Probe Sequence
gacttgcttacatctagattatcca

SEQ ID NO: 227784 - DNA, 25 bp, Probe Sequence
gacttgcatctagagctacgttgta

SEQ ID NO: 227785 - DNA, 25 bp, Probe Sequence
gactccattcaaatctacggttatg

SEQ ID NO: 227786 - DNA, 25 bp, Probe Sequence
gactccattcaaatctacggttatg

SEQ ID NO: 227787 - DNA, 25 bp, Probe Sequence
gactccaagaaaaacgcctgcaatg

SEQ ID NO: 227788 - DNA, 25 bp, Probe Sequence
gacatagcaagagaagaagcttcca

SEQ ID NO: 227789 - DNA, 25 bp, Probe Sequence
gacatcgaggacccataagcaggcc

SEQ ID NO: 227790 - DNA, 25 bp, Probe Sequence
gacattcggaggccagaaaggcgcc

SEQ ID NO: 227791 - DNA, 25 bp, Probe Sequence
gacatcgccaaggaaaaacgcactc

SEQ ID NO: 227792 - DNA, 25 bp, Probe Sequence
gactccccagtacaatgactcaagc

SEQ ID NO: 227793 - DNA, 25 bp, Probe Sequence
gacttccctgatctagatatccttc

SEQ ID NO: 227794 - DNA, 25 bp, Probe Sequence
gactgatccctgaggaattcttcca

SEQ ID NO: 227795 - DNA, 25 bp, Probe Sequence
gacttcccagaactggacattaccc

SEQ ID NO: 227796 - DNA, 25 bp, Probe Sequence
gactagtgccgtagggagttacccg

SEQ ID NO: 227797 - DNA, 25 bp, Probe Sequence
gactgagttgggacaaggcttcaca

SEQ ID NO: 227798 - DNA, 25 bp, Probe Sequence
gacataaatgtgcacaaggctccac

SEQ ID NO: 227799 - DNA, 25 bp, Probe Sequence
gactcaaattgaaaagctctggaca

SEQ ID NO: 227800 - DNA, 25 bp, Probe Sequence
gactactaagaggcatggccccaac

SEQ ID NO: 227801 - DNA, 25 bp, Probe Sequence
gactttgagaacccagtcccataca

SEQ ID NO: 227802 - DNA, 25 bp, Probe Sequence
gacttagatacaagccttaccaaca

SEQ ID NO: 227803 - DNA, 25 bp, Probe Sequence
gacttgtatgaaaccctgaccatca

SEQ ID NO: 227804 - DNA, 25 bp, Probe Sequence
gacttgctgtcaaaccctaggatag

SEQ ID NO: 227805 - DNA, 25 bp, Probe Sequence
gacatccgcaaatctccataggtag

SEQ ID NO: 227806 - DNA, 25 bp, Probe Sequence
gactctccaaaagcctactgttaac

SEQ ID NO: 227807 - DNA, 25 bp, Probe Sequence
gacttctgagaccaacactacactt

SEQ ID NO: 227808 - DNA, 25 bp, Probe Sequence
gacttctgagaccaacactacactt

SEQ ID NO: 227809 - DNA, 25 bp, Probe Sequence
gacttctgagaccaacactacactt

SEQ ID NO: 227810 - DNA, 25 bp, Probe Sequence
gacattcatgcagccaacagacaca

SEQ ID NO: 227811 - DNA, 25 bp, Probe Sequence
gacattgatgcagccaacaaacaca

SEQ ID NO: 227812 - DNA, 25 bp, Probe Sequence
gacatatctcgttctacaatgccac

SEQ ID NO: 227813 - DNA, 25 bp, Probe Sequence
gacatctacgcagcgaaatcgagcc

SEQ ID NO: 227814 - DNA, 25 bp, Probe Sequence
gacatctaccagtccaaggaggccg

SEQ ID NO: 227815 - DNA, 25 bp, Probe Sequence
gacatcatggccacaaatggcgtgg

SEQ ID NO: 227816 - DNA, 25 bp, Probe Sequence
gactcatggacgcaaagaagggtac

SEQ ID NO: 227817 - DNA, 25 bp, Probe Sequence
gacttgcgcactcagagcagaaggg

SEQ ID NO: 227818 - DNA, 25 bp, Probe Sequence
gacattgcagatcaaatatttggag

SEQ ID NO: 227819 - DNA, 25 bp, Probe Sequence
gacttaacaaactattgcgacagca

SEQ ID NO: 227820 - DNA, 25 bp, Probe Sequence
gacttctaataacattgatgtcaag

SEQ ID NO: 227821 - DNA, 25 bp, Probe Sequence
gacttctttgaacatttgcccaatt

SEQ ID NO: 227822 - DNA, 25 bp, Probe Sequence
gacttctctcatcagaatttaacaa

SEQ ID NO: 227823 - DNA, 25 bp, Probe Sequence
gacttggatctgccagttgttgaag

SEQ ID NO: 227824 - DNA, 25 bp, Probe Sequence
gacttggtcaggtactttcagggcc

SEQ ID NO: 227825 - DNA, 25 bp, Probe Sequence
gacttactaggtttgaatgcggtgt

SEQ ID NO: 227826 - DNA, 25 bp, Probe Sequence
gactcttcgagacattgagaccttc

SEQ ID NO: 227827 - DNA, 25 bp, Probe Sequence
gatagtgtcttacattgggccttga

SEQ ID NO: 227828 - DNA, 25 bp, Probe Sequence
gtcacgtttaggtggggcgtgccac

SEQ ID NO: 227829 - DNA, 25 bp, Probe Sequence
gtccgttatgggagggagtagaact

SEQ ID NO: 227830 - DNA, 25 bp, Probe Sequence
gaccttttgggtattgcagttggac

SEQ ID NO: 227831 - DNA, 25 bp, Probe Sequence
gaccttttggggatgcgagatctac

SEQ ID NO: 227832 - DNA, 25 bp, Probe Sequence
gacattttcggaagtgctgagagtt

SEQ ID NO: 227833 - DNA, 25 bp, Probe Sequence
gacataaacagactcgtgggacttc

SEQ ID NO: 227834 - DNA, 25 bp, Probe Sequence
gacatttatgaatcgtaggactgct

SEQ ID NO: 227835 - DNA, 25 bp, Probe Sequence
gacattagtgacttcgtaagcctgt

SEQ ID NO: 227836 - DNA, 25 bp, Probe Sequence
gacttggtgtcaactggaaagctga

SEQ ID NO: 227837 - DNA, 25 bp, Probe Sequence
gacattatttatgctgccaaactca

SEQ ID NO: 227838 - DNA, 25 bp, Probe Sequence
gacataatggtctcaggcaaactat

SEQ ID NO: 227839 - DNA, 25 bp, Probe Sequence
gacatagtaggctctgaaacatctt

SEQ ID NO: 227840 - DNA, 25 bp, Probe Sequence
gacataaagagcttctgcaagatcc

SEQ ID NO: 227841 - DNA, 25 bp, Probe Sequence
gactgatagcaactggcatcacgtt

SEQ ID NO: 227842 - DNA, 25 bp, Probe Sequence
gacattagccagtagctcactcttt

SEQ ID NO: 227843 - DNA, 25 bp, Probe Sequence
gacataaccagttgccatctgcgtg

SEQ ID NO: 227844 - DNA, 25 bp, Probe Sequence
gacatagacatcctcattgtccggg

SEQ ID NO: 227845 - DNA, 25 bp, Probe Sequence
gacatcagtcaccatcttagactct

SEQ ID NO: 227846 - DNA, 25 bp, Probe Sequence
gacatagacacgttacagattcacg

SEQ ID NO: 227847 - DNA, 25 bp, Probe Sequence
gacatagacacgttacagattcacg

SEQ ID NO: 227848 - DNA, 25 bp, Probe Sequence
gacatcaaccaagtgaggaggctca

SEQ ID NO: 227849 - DNA, 25 bp, Probe Sequence
gacatcaagggaatgggtactgttc

SEQ ID NO: 227850 - DNA, 25 bp, Probe Sequence
gacatcacgggaatgaaggagctgt

SEQ ID NO: 227851 - DNA, 25 bp, Probe Sequence
gacatacgtgaaacacacaaggatt

SEQ ID NO: 227852 - DNA, 25 bp, Probe Sequence
gactacttgccaagacacaagctta

SEQ ID NO: 227853 - DNA, 25 bp, Probe Sequence
gacatacttgagaccgcattattta

SEQ ID NO: 227854 - DNA, 25 bp, Probe Sequence
gagctaccatggaggcttattctag

SEQ ID NO: 227855 - DNA, 25 bp, Probe Sequence
gacatacacaggagcctttgatctc

SEQ ID NO: 227856 - DNA, 25 bp, Probe Sequence
gacatatgaagaaaccgctgtgatc

SEQ ID NO: 227857 - DNA, 25 bp, Probe Sequence
gacatagaagagtgccgggacacgg

SEQ ID NO: 227858 - DNA, 25 bp, Probe Sequence
gagcaaatgaagtaccgggaccgtg

SEQ ID NO: 227859 - DNA, 25 bp, Probe Sequence
gagcaggattactcctggaacctgg

SEQ ID NO: 227860 - DNA, 25 bp, Probe Sequence
gacggcaggacatcctggacgacag

SEQ ID NO: 227861 - DNA, 25 bp, Probe Sequence
gacttgaaagcatccatgtgtggac

SEQ ID NO: 227862 - DNA, 25 bp, Probe Sequence
gacttaactagcccatccatggaaa

SEQ ID NO: 227863 - DNA, 25 bp, Probe Sequence
gactattatttcccccattgaatgg

SEQ ID NO: 227864 - DNA, 25 bp, Probe Sequence
gactttttttcctcattgcaaactc

SEQ ID NO: 227865 - DNA, 25 bp, Probe Sequence
gacttcttgtttcaattacaaactc

SEQ ID NO: 227866 - DNA, 25 bp, Probe Sequence
gacttttttcttaatttcactgact

SEQ ID NO: 227867 - DNA, 25 bp, Probe Sequence
gactttttttgttagattctctcat

SEQ ID NO: 227868 - DNA, 25 bp, Probe Sequence
gacttatttatttaatgccctttct

SEQ ID NO: 227869 - DNA, 25 bp, Probe Sequence
gacttcatgctctgataactgcctt

SEQ ID NO: 227870 - DNA, 25 bp, Probe Sequence
gacttatctgcaatcataactggtt

SEQ ID NO: 227871 - DNA, 25 bp, Probe Sequence
gactccacaggcaaatactggacgg

SEQ ID NO: 227872 - DNA, 25 bp, Probe Sequence
gacttcaaggcttttgctggaaaca

SEQ ID NO: 227873 - DNA, 25 bp, Probe Sequence
gacttcaaggcttttgctggaaaca

SEQ ID NO: 227874 - DNA, 25 bp, Probe Sequence
gacattaacactattctcaccagac

SEQ ID NO: 227875 - DNA, 25 bp, Probe Sequence
gactagaatagtatttgctcaaccc

SEQ ID NO: 227876 - DNA, 25 bp, Probe Sequence
gacttgaaattttttccaattgctt

SEQ ID NO: 227877 - DNA, 25 bp, Probe Sequence
gacatttaacttttctaccatttct

SEQ ID NO: 227878 - DNA, 25 bp, Probe Sequence
gacattgggacttttctgtcttttt

SEQ ID NO: 227879 - DNA, 25 bp, Probe Sequence
gacattctggactatttctgtgttt

SEQ ID NO: 227880 - DNA, 25 bp, Probe Sequence
gacattggaatgtttactgttattc

SEQ ID NO: 227881 - DNA, 25 bp, Probe Sequence
gactcaccattatttactgtttcct

SEQ ID NO: 227882 - DNA, 25 bp, Probe Sequence
gactaccgtcatgaacttttggcgt

SEQ ID NO: 227883 - DNA, 25 bp, Probe Sequence
gactactggatcaggacttttgttc

SEQ ID NO: 227884 - DNA, 25 bp, Probe Sequence
gactacgcaatccggaaagctttcc

SEQ ID NO: 227885 - DNA, 25 bp, Probe Sequence
gacattcgttcacaatagcactatt

SEQ ID NO: 227886 - DNA, 25 bp, Probe Sequence
gacttctgattccaaaacattctga

SEQ ID NO: 227887 - DNA, 25 bp, Probe Sequence
gacttggttttagactctgatgagg

SEQ ID NO: 227888 - DNA, 25 bp, Probe Sequence
gacttggttttagactctgatgagg

SEQ ID NO: 227889 - DNA, 25 bp, Probe Sequence
gacttgtgcttaatactagcttgag

SEQ ID NO: 227890 - DNA, 25 bp, Probe Sequence
gactttctggacttctacttggaat

SEQ ID NO: 227891 - DNA, 25 bp, Probe Sequence
gactcggtggaccctttgggaatgg

SEQ ID NO: 227892 - DNA, 25 bp, Probe Sequence
gacttgaggggctaccctgggaagc

SEQ ID NO: 227893 - DNA, 25 bp, Probe Sequence
gacttggtggagttccctgttagga

SEQ ID NO: 227894 - DNA, 25 bp, Probe Sequence
gacattggatgtggagctcctgctg

SEQ ID NO: 227895 - DNA, 25 bp, Probe Sequence
gacattcagaggggcctggtgctgc

SEQ ID NO: 227896 - DNA, 25 bp, Probe Sequence
gactcattcagggagctctggttgc

SEQ ID NO: 227897 - DNA, 25 bp, Probe Sequence
gactcaggactgtgctcgaattgtg

SEQ ID NO: 227898 - DNA, 25 bp, Probe Sequence
gactcaggaatcggctctcgaaggt

SEQ ID NO: 227899 - DNA, 25 bp, Probe Sequence
gactcgttactgggcatcagtagaa

SEQ ID NO: 227900 - DNA, 25 bp, Probe Sequence
gacggcgttctgggcagagtcagaa

SEQ ID NO: 227901 - DNA, 25 bp, Probe Sequence
gacttgagttcgggacagtaagcca

SEQ ID NO: 227902 - DNA, 25 bp, Probe Sequence
gacattggtttgttgacaataacag

SEQ ID NO: 227903 - DNA, 25 bp, Probe Sequence
gacattggctgctggtgactcaatc

SEQ ID NO: 227904 - DNA, 25 bp, Probe Sequence
gacattggctgctggtgactcaatc

SEQ ID NO: 227905 - DNA, 25 bp, Probe Sequence
gactggatcgatggtgttctcaaca

SEQ ID NO: 227906 - DNA, 25 bp, Probe Sequence
gactttcaatcagtttccaagctaa

SEQ ID NO: 227907 - DNA, 25 bp, Probe Sequence
gactttagtccctccaagcaagact

SEQ ID NO: 227908 - DNA, 25 bp, Probe Sequence
gactgttggcccgggccgagaagaa

SEQ ID NO: 227909 - DNA, 25 bp, Probe Sequence
gactgttggcccgggccgagaagaa

SEQ ID NO: 227910 - DNA, 25 bp, Probe Sequence
gactgtcttaactggaggaaagtag

SEQ ID NO: 227911 - DNA, 25 bp, Probe Sequence
gactgtcttacctctactgaatatt

SEQ ID NO: 227912 - DNA, 25 bp, Probe Sequence
gactgtttgccataaatctgaaatt

SEQ ID NO: 227913 - DNA, 25 bp, Probe Sequence
gacttttacatttggcgtcagaatt

SEQ ID NO: 227914 - DNA, 25 bp, Probe Sequence
gacttgtcgcatgaacggtcaaatg

SEQ ID NO: 227915 - DNA, 25 bp, Probe Sequence
gactttcaattatctgtgtgacctg

SEQ ID NO: 227916 - DNA, 25 bp, Probe Sequence
gactattaattttctgactgagcca

SEQ ID NO: 227917 - DNA, 25 bp, Probe Sequence
gactattagataatcttgctccagc

SEQ ID NO: 227918 - DNA, 25 bp, Probe Sequence
gacttgtgaagaatttgctgccctc

SEQ ID NO: 227919 - DNA, 25 bp, Probe Sequence
gactaggatagaatttgatccccta

SEQ ID NO: 227920 - DNA, 25 bp, Probe Sequence
gacttggatcgaattctcactctca

SEQ ID NO: 227921 - DNA, 25 bp, Probe Sequence
gactacgtccacagacactgatgct

SEQ ID NO: 227922 - DNA, 25 bp, Probe Sequence
gacattagtaactgcacactatttc

SEQ ID NO: 227923 - DNA, 25 bp, Probe Sequence
gactctaaagtcaggccattatatc

SEQ ID NO: 227924 - DNA, 25 bp, Probe Sequence
gacttaaatgacaggcctataggtt

SEQ ID NO: 227925 - DNA, 25 bp, Probe Sequence
gacttgttgaactggcagtcggggt

SEQ ID NO: 227926 - DNA, 25 bp, Probe Sequence
gacatttctgaagcgagcgtcttcg

SEQ ID NO: 227927 - DNA, 25 bp, Probe Sequence
gacattcctggaggacactcccatc

SEQ ID NO: 227928 - DNA, 25 bp, Probe Sequence
gacattcctggaggacactcccatc

SEQ ID NO: 227929 - DNA, 25 bp, Probe Sequence
gacattcctggaggacactcccatc

SEQ ID NO: 227930 - DNA, 25 bp, Probe Sequence
gacttcctgtggcacaacatgaagc

SEQ ID NO: 227931 - DNA, 25 bp, Probe Sequence
gacttcactgtgcagtcggatagag

SEQ ID NO: 227932 - DNA, 25 bp, Probe Sequence
gacttcacgtcattattggctcaac

SEQ ID NO: 227933 - DNA, 25 bp, Probe Sequence
gacttacgccattattacgacagta

SEQ ID NO: 227934 - DNA, 25 bp, Probe Sequence
gacttggcggatcttacagagcagc

SEQ ID NO: 227935 - DNA, 25 bp, Probe Sequence
gacttggctggcaactctgaagtca

SEQ ID NO: 227936 - DNA, 25 bp, Probe Sequence
gacttagaggcaacaggattgatca

SEQ ID NO: 227937 - DNA, 25 bp, Probe Sequence
gacattccgcgcacagtgataatac

SEQ ID NO: 227938 - DNA, 25 bp, Probe Sequence
gacattccaagacagtatacagtcc

SEQ ID NO: 227939 - DNA, 25 bp, Probe Sequence
gacttgacaagaaatcttcatattc

SEQ ID NO: 227940 - DNA, 25 bp, Probe Sequence
gacttgaccaactacattaccatgc

SEQ ID NO: 227941 - DNA, 25 bp, Probe Sequence
gacttcaggatagatgttgggatgc

SEQ ID NO: 227942 - DNA, 25 bp, Probe Sequence
gacttcggtgcagattaagagcctg

SEQ ID NO: 227943 - DNA, 25 bp, Probe Sequence
gacatttcgcctgagatataagttg

SEQ ID NO: 227944 - DNA, 25 bp, Probe Sequence
gacatttccaccaagtttgagccct

SEQ ID NO: 227945 - DNA, 25 bp, Probe Sequence
gacattctcccaagtggtctgggcc

SEQ ID NO: 227946 - DNA, 25 bp, Probe Sequence
gacttctcctctatgaaatgggctc

SEQ ID NO: 227947 - DNA, 25 bp, Probe Sequence
gactatctccgtgtgtggagggttg

SEQ ID NO: 227948 - DNA, 25 bp, Probe Sequence
gacttcagccagtggaggtacagtt

SEQ ID NO: 227949 - DNA, 25 bp, Probe Sequence
gacttcaccagcttgctaggtcaga

SEQ ID NO: 227950 - DNA, 25 bp, Probe Sequence
gacattgcacccatggacataggag

SEQ ID NO: 227951 - DNA, 25 bp, Probe Sequence
gactctgcacccagatttagggact

SEQ ID NO: 227952 - DNA, 25 bp, Probe Sequence
gacttacgcctagtggtaggagaca

SEQ ID NO: 227953 - DNA, 25 bp, Probe Sequence
gttgttcctccatggctagaaccat

SEQ ID NO: 227954 - DNA, 25 bp, Probe Sequence
gactattccctcttgaaacaacact

SEQ ID NO: 227955 - DNA, 25 bp, Probe Sequence
gactatccctactctaagcagagac

SEQ ID NO: 227956 - DNA, 25 bp, Probe Sequence
gacattcctctgatcctaatgcagt

SEQ ID NO: 227957 - DNA, 25 bp, Probe Sequence
gacattccagtgatagcatccaatg

SEQ ID NO: 227958 - DNA, 25 bp, Probe Sequence
gacttccttgctacagcaagctctg

SEQ ID NO: 227959 - DNA, 25 bp, Probe Sequence
gactaccttgcttacagattcatgg

SEQ ID NO: 227960 - DNA, 25 bp, Probe Sequence
gactttgcattataaattctggaac

SEQ ID NO: 227961 - DNA, 25 bp, Probe Sequence
gacttgtattataaactttctgtag

SEQ ID NO: 227962 - DNA, 25 bp, Probe Sequence
gacttgctaatgaatctcctttatg

SEQ ID NO: 227963 - DNA, 25 bp, Probe Sequence
gacattccactggtttctgtctatg

SEQ ID NO: 227964 - DNA, 25 bp, Probe Sequence
gacattcacctgtatatttctttta

SEQ ID NO: 227965 - DNA, 25 bp, Probe Sequence
gacttaactgcatgatttctgtttt

SEQ ID NO: 227966 - DNA, 25 bp, Probe Sequence
gactacaactgcagaagtgttcctt

SEQ ID NO: 227967 - DNA, 25 bp, Probe Sequence
gactaccgtcatcatgagagttatc

SEQ ID NO: 227968 - DNA, 25 bp, Probe Sequence
gacttggaatatcctgggattcagc

SEQ ID NO: 227969 - DNA, 25 bp, Probe Sequence
gacttgcagattttgctggcagctt

SEQ ID NO: 227970 - DNA, 25 bp, Probe Sequence
gacattgcgacagtctgcataacat

SEQ ID NO: 227971 - DNA, 25 bp, Probe Sequence
gactcatgcacaagcttcaatagcc

SEQ ID NO: 227972 - DNA, 25 bp, Probe Sequence
gacttgagcttcaatcagatagcca

SEQ ID NO: 227973 - DNA, 25 bp, Probe Sequence
gacattgatgctaacatgacatgct

SEQ ID NO: 227974 - DNA, 25 bp, Probe Sequence
gacttgcttgcatcagacatctttg

SEQ ID NO: 227975 - DNA, 25 bp, Probe Sequence
gacattgcttcaacattgccttcat

SEQ ID NO: 227976 - DNA, 25 bp, Probe Sequence
gacattgctttggttcagctctcta

SEQ ID NO: 227977 - DNA, 25 bp, Probe Sequence
gacttcagtggatttcagcttctag

SEQ ID NO: 227978 - DNA, 25 bp, Probe Sequence
gacttcagtggatttcagcttctag

SEQ ID NO: 227979 - DNA, 25 bp, Probe Sequence
gacttcagaggctttttgctttggt

SEQ ID NO: 227980 - DNA, 25 bp, Probe Sequence
gacttcaaaatccatatcttttggt

SEQ ID NO: 227981 - DNA, 25 bp, Probe Sequence
gacttagatactgctttttgggagg

SEQ ID NO: 227982 - DNA, 25 bp, Probe Sequence
gactgtaaatgttttatttgtaaga

SEQ ID NO: 227983 - DNA, 25 bp, Probe Sequence
gacttctccattctatctttgtaaa

SEQ ID NO: 227984 - DNA, 25 bp, Probe Sequence
gactcacttcaatgtgtcatttccg

SEQ ID NO: 227985 - DNA, 25 bp, Probe Sequence
gactcacttagatgtcgtttccttc

SEQ ID NO: 227986 - DNA, 25 bp, Probe Sequence
gacttctttatatcttttgagctcc

SEQ ID NO: 227987 - DNA, 25 bp, Probe Sequence
gacttctttatatcttttgagctcc

SEQ ID NO: 227988 - DNA, 25 bp, Probe Sequence
gacttttccatctcttaagatgtcc

SEQ ID NO: 227989 - DNA, 25 bp, Probe Sequence
gacttaatcaccttctaaagatctc

SEQ ID NO: 227990 - DNA, 25 bp, Probe Sequence
gactttataccttcatttcagcgtg

SEQ ID NO: 227991 - DNA, 25 bp, Probe Sequence
gacttttacaccaacagaactgtgc

SEQ ID NO: 227992 - DNA, 25 bp, Probe Sequence
gactttaacaccatatatttccctc

SEQ ID NO: 227993 - DNA, 25 bp, Probe Sequence
gacttttccactcattagctttgtt

SEQ ID NO: 227994 - DNA, 25 bp, Probe Sequence
gactctggccccagattggtatctt

SEQ ID NO: 227995 - DNA, 25 bp, Probe Sequence
gactgcaggatcatcaggttcggat

SEQ ID NO: 227996 - DNA, 25 bp, Probe Sequence
gactatggtttcggttcggaggtgc

SEQ ID NO: 227997 - DNA, 25 bp, Probe Sequence
gactcatgggatttcgtttggcacc

SEQ ID NO: 227998 - DNA, 25 bp, Probe Sequence
gactagggtttagtatcagacatac

SEQ ID NO: 227999 - DNA, 25 bp, Probe Sequence
gactgagcggtgactcttacgtaag

SEQ ID NO: 228000 - DNA, 25 bp, Probe Sequence
gactctgcgggagcggcagggaggc

SEQ ID NO: 228001 - DNA, 25 bp, Probe Sequence
gacttccggatcctgtcagggtgtc

SEQ ID NO: 228002 - DNA, 25 bp, Probe Sequence
gacttccggatcctgtcagggtgtc

SEQ ID NO: 228003 - DNA, 25 bp, Probe Sequence
gacggccgagtacgacgtggcctac

SEQ ID NO: 228004 - DNA, 25 bp, Probe Sequence
gacggccgagtacgacgtggcctac

SEQ ID NO: 228005 - DNA, 25 bp, Probe Sequence
gacgaaatgttaagccgtggattca

SEQ ID NO: 228006 - DNA, 25 bp, Probe Sequence
gacggaattttgactcgtgtctgta

SEQ ID NO: 228007 - DNA, 25 bp, Probe Sequence
gactaggaggttaccaccattgtga

SEQ ID NO: 228008 - DNA, 25 bp, Probe Sequence
gactcgggattagtacacacttgtt

SEQ ID NO: 228009 - DNA, 25 bp, Probe Sequence
gactcagggacctaagccacgttaa

SEQ ID NO: 228010 - DNA, 25 bp, Probe Sequence
gactctgggctgggaagccctgttg

SEQ ID NO: 228011 - DNA, 25 bp, Probe Sequence
gacttggagggttggtcctcttgcc

SEQ ID NO: 228012 - DNA, 25 bp, Probe Sequence
gacttgtagggatgcctttctagtc

SEQ ID NO: 228013 - DNA, 25 bp, Probe Sequence
gacttccagggctgcaatttctcag

SEQ ID NO: 228014 - DNA, 25 bp, Probe Sequence
gactttgttgagggctatttccatc

SEQ ID NO: 228015 - DNA, 25 bp, Probe Sequence
gacttctgtgagattgtagttgtac

SEQ ID NO: 228016 - DNA, 25 bp, Probe Sequence
gacattgccggtatgcgagattgaa

SEQ ID NO: 228017 - DNA, 25 bp, Probe Sequence
gacttgcacagtccttctgagattg

SEQ ID NO: 228018 - DNA, 25 bp, Probe Sequence
gacttccaggccatgctatcaggaa

SEQ ID NO: 228019 - DNA, 25 bp, Probe Sequence
gactatccaggcattgtgaaccccc

SEQ ID NO: 228020 - DNA, 25 bp, Probe Sequence
gactatccaggcattgtgaaccccc

SEQ ID NO: 228021 - DNA, 25 bp, Probe Sequence
gactacacagaggcgtataatccca

SEQ ID NO: 228022 - DNA, 25 bp, Probe Sequence
gactacacagaggcgtataatccca

SEQ ID NO: 228023 - DNA, 25 bp, Probe Sequence
gactacacagaggcgtataatccca

SEQ ID NO: 228024 - DNA, 25 bp, Probe Sequence
gacttctatgtcggtataatggccc

SEQ ID NO: 228025 - DNA, 25 bp, Probe Sequence
gacttcttgcttgtacatataggag

SEQ ID NO: 228026 - DNA, 25 bp, Probe Sequence
gactttgtgttcccaatcaggtgac

SEQ ID NO: 228027 - DNA, 25 bp, Probe Sequence
gactttattgacccatcatctggtt

SEQ ID NO: 228028 - DNA, 25 bp, Probe Sequence
gacttcgttcacttcacggatgttc

SEQ ID NO: 228029 - DNA, 25 bp, Probe Sequence
gactaagttcagttactcgggattt

SEQ ID NO: 228030 - DNA, 25 bp, Probe Sequence
gactaaaccttttcctaagctatct

SEQ ID NO: 228031 - DNA, 25 bp, Probe Sequence
gactaaacctaaatgcctctaggac

SEQ ID NO: 228032 - DNA, 25 bp, Probe Sequence
gactacttagtaattcccatcagga

SEQ ID NO: 228033 - DNA, 25 bp, Probe Sequence
gactatttctgtatgtctccatcta

SEQ ID NO: 228034 - DNA, 25 bp, Probe Sequence
gactatttctgtatgtctccatcta

SEQ ID NO: 228035 - DNA, 25 bp, Probe Sequence
gacttttggctgtttcctaatgaaa

SEQ ID NO: 228036 - DNA, 25 bp, Probe Sequence
gacttatcccattttcaataacaaa

SEQ ID NO: 228037 - DNA, 25 bp, Probe Sequence
gacttatcaccattcttatgtcact

SEQ ID NO: 228038 - DNA, 25 bp, Probe Sequence
gactctacatcttcatctatgcagc

SEQ ID NO: 228039 - DNA, 25 bp, Probe Sequence
gactctacatcttcatctatgcagc

SEQ ID NO: 228040 - DNA, 25 bp, Probe Sequence
gactcacacacgactctaacgggat

SEQ ID NO: 228041 - DNA, 25 bp, Probe Sequence
gactagactggactgatgaaaggga

SEQ ID NO: 228042 - DNA, 25 bp, Probe Sequence
gactggaccaacagaaacgggaaga

SEQ ID NO: 228043 - DNA, 25 bp, Probe Sequence
gacgaaccacagagaagatccgcga

SEQ ID NO: 228044 - DNA, 25 bp, Probe Sequence
gacggattcttgcgggaagcgcgga

SEQ ID NO: 228045 - DNA, 25 bp, Probe Sequence
gactggattaggcaacaaactggga

SEQ ID NO: 228046 - DNA, 25 bp, Probe Sequence
gactaaatatgtcaaaattgtggag

SEQ ID NO: 228047 - DNA, 25 bp, Probe Sequence
gactaatatgtttacaagttagata

SEQ ID NO: 228048 - DNA, 25 bp, Probe Sequence
gactaatttttaagagtaactcagt

SEQ ID NO: 228049 - DNA, 25 bp, Probe Sequence
gagctcgtttttagtggaaacgcgt

SEQ ID NO: 228050 - DNA, 25 bp, Probe Sequence
gagtacttttgggggcacaactgtt

SEQ ID NO: 228051 - DNA, 25 bp, Probe Sequence
gactaatttgggtctggaatggcct

SEQ ID NO: 228052 - DNA, 25 bp, Probe Sequence
gactaatttgggagtaatgtgtgct

SEQ ID NO: 228053 - DNA, 25 bp, Probe Sequence
gactaatttggtcattaaatcttgt

SEQ ID NO: 228054 - DNA, 25 bp, Probe Sequence
gactaaagtgggctctaagatctaa

SEQ ID NO: 228055 - DNA, 25 bp, Probe Sequence
gactattgcaggtgtttaaaaagaa

SEQ ID NO: 228056 - DNA, 25 bp, Probe Sequence
gactattacaaacttatccaaaaga

SEQ ID NO: 228057 - DNA, 25 bp, Probe Sequence
gactaccctaacagtgccaaagcaa

SEQ ID NO: 228058 - DNA, 25 bp, Probe Sequence
gacttagccatggacttggccagta

SEQ ID NO: 228059 - DNA, 25 bp, Probe Sequence
gacttcaggcaatctttccactgat

SEQ ID NO: 228060 - DNA, 25 bp, Probe Sequence
gactttgtgctctactgtttcagta

SEQ ID NO: 228061 - DNA, 25 bp, Probe Sequence
gacttaggtggcgtgtttcagcttg

SEQ ID NO: 228062 - DNA, 25 bp, Probe Sequence
gactaatggtcggcgtatatactat

SEQ ID NO: 228063 - DNA, 25 bp, Probe Sequence
gactattgctgtgatcgtctttttc

SEQ ID NO: 228064 - DNA, 25 bp, Probe Sequence
gactcagatggtgcatatgctccct

SEQ ID NO: 228065 - DNA, 25 bp, Probe Sequence
gacttgtgctgatcgtgctaaattt

SEQ ID NO: 228066 - DNA, 25 bp, Probe Sequence
gacttctagcacggttgaacatctt

SEQ ID NO: 228067 - DNA, 25 bp, Probe Sequence
gacttttgcatcaagttgagatctc

SEQ ID NO: 228068 - DNA, 25 bp, Probe Sequence
gacttgttacattgtgcagaatgcc

SEQ ID NO: 228069 - DNA, 25 bp, Probe Sequence
gacttgactccaggtgcagagatgc

SEQ ID NO: 228070 - DNA, 25 bp, Probe Sequence
gacattgacatccaccatggtgacg

SEQ ID NO: 228071 - DNA, 25 bp, Probe Sequence
gacattgacatccaccatggtgacg

SEQ ID NO: 228072 - DNA, 25 bp, Probe Sequence
gacttagtgaagccatagtcacagt

SEQ ID NO: 228073 - DNA, 25 bp, Probe Sequence
gactaactggagccattgaaaatga

SEQ ID NO: 228074 - DNA, 25 bp, Probe Sequence
gactatttgtagtcatgtacagaac

SEQ ID NO: 228075 - DNA, 25 bp, Probe Sequence
gactccttcacagtattatcagaaa

SEQ ID NO: 228076 - DNA, 25 bp, Probe Sequence
gacttgctcccagttatgtgtaaca

SEQ ID NO: 228077 - DNA, 25 bp, Probe Sequence
gacttgctttcactgtactgtaaaa

SEQ ID NO: 228078 - DNA, 25 bp, Probe Sequence
gactttgtatcactgcaagcgcttc

SEQ ID NO: 228079 - DNA, 25 bp, Probe Sequence
gacttggtgctcacatgcacctcac

SEQ ID NO: 228080 - DNA, 25 bp, Probe Sequence
gacttgtgatcggcctgcatgagga

SEQ ID NO: 228081 - DNA, 25 bp, Probe Sequence
gacattggaagtcatcttggagcgt

SEQ ID NO: 228082 - DNA, 25 bp, Probe Sequence
gactcaggacttcagttggaggaag

SEQ ID NO: 228083 - DNA, 25 bp, Probe Sequence
gactctggactacaggaaagtgaag

SEQ ID NO: 228084 - DNA, 25 bp, Probe Sequence
gacctgtgttactaaaaaaaagatg

SEQ ID NO: 228085 - DNA, 25 bp, Probe Sequence
tgcacccgtctttagaaccaaaaat

SEQ ID NO: 228086 - DNA, 25 bp, Probe Sequence
gactccgtcacaacaacaacaacaa

SEQ ID NO: 228087 - DNA, 25 bp, Probe Sequence
gactagaggcaaggagactaaacaa

SEQ ID NO: 228088 - DNA, 25 bp, Probe Sequence
gactagaccaagcagaagaaagaaa

SEQ ID NO: 228089 - DNA, 25 bp, Probe Sequence
gacattgatcgccgtagaaaagaaa

SEQ ID NO: 228090 - DNA, 25 bp, Probe Sequence
gacattgtcgcaagtcacagaatta

SEQ ID NO: 228091 - DNA, 25 bp, Probe Sequence
gactcgactgctttctaaatctcag

SEQ ID NO: 228092 - DNA, 25 bp, Probe Sequence
gacttcattgctttcaaatcttcca

SEQ ID NO: 228093 - DNA, 25 bp, Probe Sequence
gactatttgtcatcagaccttctag

SEQ ID NO: 228094 - DNA, 25 bp, Probe Sequence
gactatatggattacagaggctacg

SEQ ID NO: 228095 - DNA, 25 bp, Probe Sequence
gacttgaagcacagagggctaggga

SEQ ID NO: 228096 - DNA, 25 bp, Probe Sequence
gacttgcaagacatggcctgtatga

SEQ ID NO: 228097 - DNA, 25 bp, Probe Sequence
gacttgcaagacatggcctgtatga

SEQ ID NO: 228098 - DNA, 25 bp, Probe Sequence
gacttcatagagctgtgtctgtata

SEQ ID NO: 228099 - DNA, 25 bp, Probe Sequence
gacttcacaatgttggcctgtcaga

SEQ ID NO: 228100 - DNA, 25 bp, Probe Sequence
gactaagcattttcttgatgaccct

SEQ ID NO: 228101 - DNA, 25 bp, Probe Sequence
gactcaggctgtagtgttgtaacct

SEQ ID NO: 228102 - DNA, 25 bp, Probe Sequence
gacttggctgcagttgtctgttact

SEQ ID NO: 228103 - DNA, 25 bp, Probe Sequence
gactagcagggatgttattacttct

SEQ ID NO: 228104 - DNA, 25 bp, Probe Sequence
gacttaggtaagtaatattttcagc

SEQ ID NO: 228105 - DNA, 25 bp, Probe Sequence
gacttagctctaagaaactctttgg

SEQ ID NO: 228106 - DNA, 25 bp, Probe Sequence
gacttacagctaagtatttcatttt

SEQ ID NO: 228107 - DNA, 25 bp, Probe Sequence
gacttcacattaagtatgttccatt

SEQ ID NO: 228108 - DNA, 25 bp, Probe Sequence
gactatacgataaagtttgcacagt

SEQ ID NO: 228109 - DNA, 25 bp, Probe Sequence
gactatagtgcaacctatttgggta

SEQ ID NO: 228110 - DNA, 25 bp, Probe Sequence
gactacaggttccgcgtatgtgcgt

SEQ ID NO: 228111 - DNA, 25 bp, Probe Sequence
gactaaattggccggttgccgtggc

SEQ ID NO: 228112 - DNA, 25 bp, Probe Sequence
gactttatgggacgttctacttggc

SEQ ID NO: 228113 - DNA, 25 bp, Probe Sequence
gacttaagaggaagggcagtcttgg

SEQ ID NO: 228114 - DNA, 25 bp, Probe Sequence
gacttacagggataaggcctgtggg

SEQ ID NO: 228115 - DNA, 25 bp, Probe Sequence
gacttagtgcggtgataggaagcta

SEQ ID NO: 228116 - DNA, 25 bp, Probe Sequence
gacttgagaggatggaaggatcgga

SEQ ID NO: 228117 - DNA, 25 bp, Probe Sequence
gactctgtggggactgcataggttt

SEQ ID NO: 228118 - DNA, 25 bp, Probe Sequence
gactcttgaaggaccagttgtgttc

SEQ ID NO: 228119 - DNA, 25 bp, Probe Sequence
gactcttaagcacatagtgggttta

SEQ ID NO: 228120 - DNA, 25 bp, Probe Sequence
gactctttacagaataagtttgttg

SEQ ID NO: 228121 - DNA, 25 bp, Probe Sequence
gacttgcctcattaataggttctgc

SEQ ID NO: 228122 - DNA, 25 bp, Probe Sequence
gactcttcctcataagagatgtgcc

SEQ ID NO: 228123 - DNA, 25 bp, Probe Sequence
gactccctcctagtagagctatcta

SEQ ID NO: 228124 - DNA, 25 bp, Probe Sequence
gactccttacaagtgggtctgcatc

SEQ ID NO: 228125 - DNA, 25 bp, Probe Sequence
gacttcttagctttggtactgacag

SEQ ID NO: 228126 - DNA, 25 bp, Probe Sequence
gacttctggaggactgtggactgag

SEQ ID NO: 228127 - DNA, 25 bp, Probe Sequence
gacttctatgcacatttatgacaga

SEQ ID NO: 228128 - DNA, 25 bp, Probe Sequence
gacttcctcacatgtttcagcaggg

SEQ ID NO: 228129 - DNA, 25 bp, Probe Sequence
gacttcactaatcctctctatggga

SEQ ID NO: 228130 - DNA, 25 bp, Probe Sequence
gacttacagagtccatatgcctggg

SEQ ID NO: 228131 - DNA, 25 bp, Probe Sequence
gacttaggatgaaatagcaagctgg

SEQ ID NO: 228132 - DNA, 25 bp, Probe Sequence
gactctaggacatgcaacacagccg

SEQ ID NO: 228133 - DNA, 25 bp, Probe Sequence
gactctgggaatgacaacacctggt

SEQ ID NO: 228134 - DNA, 25 bp, Probe Sequence
gactagttgcttgcctatacctggc

SEQ ID NO: 228135 - DNA, 25 bp, Probe Sequence
gactcagtttaccttaatgccttag

SEQ ID NO: 228136 - DNA, 25 bp, Probe Sequence
gactcgtttaaggcctattttcatg

SEQ ID NO: 228137 - DNA, 25 bp, Probe Sequence
gactcgattttacatgatattttga

SEQ ID NO: 228138 - DNA, 25 bp, Probe Sequence
gacttgttttcattcattaataata

SEQ ID NO: 228139 - DNA, 25 bp, Probe Sequence
gacttcattgttcccattaaagaaa

SEQ ID NO: 228140 - DNA, 25 bp, Probe Sequence
gactacttttggcttcataaacaca

SEQ ID NO: 228141 - DNA, 25 bp, Probe Sequence
gactgaaagtctaccttcgaaacca

SEQ ID NO: 228142 - DNA, 25 bp, Probe Sequence
gactcaaagtctgctctcatataag

SEQ ID NO: 228143 - DNA, 25 bp, Probe Sequence
gactctacatgttgcgactctacat

SEQ ID NO: 228144 - DNA, 25 bp, Probe Sequence
gactgtaatttgccagattccattt

SEQ ID NO: 228145 - DNA, 25 bp, Probe Sequence
gacttatcactatcaattttgttca

SEQ ID NO: 228146 - DNA, 25 bp, Probe Sequence
gactatcaactcccacttgtagttc

SEQ ID NO: 228147 - DNA, 25 bp, Probe Sequence
gacttcaactgcaacatctgggatg

SEQ ID NO: 228148 - DNA, 25 bp, Probe Sequence
gacttcatagggtcactggaatgct

SEQ ID NO: 228149 - DNA, 25 bp, Probe Sequence
gacttccgctggtcagatggacacc

SEQ ID NO: 228150 - DNA, 25 bp, Probe Sequence
gacttccagctggaggaattcagcc

SEQ ID NO: 228151 - DNA, 25 bp, Probe Sequence
gacttctcacactatgagaaacgcc

SEQ ID NO: 228152 - DNA, 25 bp, Probe Sequence
gactacatcacctatgggaatgaat

SEQ ID NO: 228153 - DNA, 25 bp, Probe Sequence
gactacagcatgtggaggaagaacc

SEQ ID NO: 228154 - DNA, 25 bp, Probe Sequence
gactatgcagatgggagtgaagaca

SEQ ID NO: 228155 - DNA, 25 bp, Probe Sequence
gacttcatgatctactgcgacaaca

SEQ ID NO: 228156 - DNA, 25 bp, Probe Sequence
gacttcatgatcacacatgacaaga

SEQ ID NO: 228157 - DNA, 25 bp, Probe Sequence
gacttcatgtgcaacagagctcgga

SEQ ID NO: 228158 - DNA, 25 bp, Probe Sequence
gactatgtgccgagcgatcaggacc

SEQ ID NO: 228159 - DNA, 25 bp, Probe Sequence
gactattcgtgggcatgatcctgat

SEQ ID NO: 228160 - DNA, 25 bp, Probe Sequence
gactttgggggcaacatcatcatgt

SEQ ID NO: 228161 - DNA, 25 bp, Probe Sequence
gactgattggagggccctatcttgt

SEQ ID NO: 228162 - DNA, 25 bp, Probe Sequence
gactatgtgaacgcatcctttattg

SEQ ID NO: 228163 - DNA, 25 bp, Probe Sequence
gactagatgatcaccactttctctt

SEQ ID NO: 228164 - DNA, 25 bp, Probe Sequence
gacttatgacttctctgtgttctgt

SEQ ID NO: 228165 - DNA, 25 bp, Probe Sequence
gacttctgccttcatctgcagtaac

SEQ ID NO: 228166 - DNA, 25 bp, Probe Sequence
gacttccatgttccatctgagtact

SEQ ID NO: 228167 - DNA, 25 bp, Probe Sequence
gacttgcctgatgccaggctgctac

SEQ ID NO: 228168 - DNA, 25 bp, Probe Sequence
gactctgcctgggctggagtctagg

SEQ ID NO: 228169 - DNA, 25 bp, Probe Sequence
gacttgccaggagttgtctgcgaga

SEQ ID NO: 228170 - DNA, 25 bp, Probe Sequence
gacttctctgtagatcgctgagcga

SEQ ID NO: 228171 - DNA, 25 bp, Probe Sequence
gactttgctgaaatttgctgatgaa

SEQ ID NO: 228172 - DNA, 25 bp, Probe Sequence
gacttctccactactgtgcaataga

SEQ ID NO: 228173 - DNA, 25 bp, Probe Sequence
gactttccacagaatgccataagac

SEQ ID NO: 228174 - DNA, 25 bp, Probe Sequence
gactgttgccaatatgatcaagggg

SEQ ID NO: 228175 - DNA, 25 bp, Probe Sequence
gactcttgccgtagattaagccagt

SEQ ID NO: 228176 - DNA, 25 bp, Probe Sequence
gactttgctctgaatcaaacccact

SEQ ID NO: 228177 - DNA, 25 bp, Probe Sequence
gactagctcttgatcagagtaccct

SEQ ID NO: 228178 - DNA, 25 bp, Probe Sequence
gactactctgctattatggactcag

SEQ ID NO: 228179 - DNA, 25 bp, Probe Sequence
gactccatctcatgttaaactaaag

SEQ ID NO: 228180 - DNA, 25 bp, Probe Sequence
gacgacactaccaataaaccaaact

SEQ ID NO: 228181 - DNA, 25 bp, Probe Sequence
gacgcagactacctaatttcctaag

SEQ ID NO: 228182 - DNA, 25 bp, Probe Sequence
gacgagagtaagaactcccactaaa

SEQ ID NO: 228183 - DNA, 25 bp, Probe Sequence
gactacgggagctactccgggaaca

SEQ ID NO: 228184 - DNA, 25 bp, Probe Sequence
gactacgagtcatacacatggcgga

SEQ ID NO: 228185 - DNA, 25 bp, Probe Sequence
gactaagaggaaacaaagcgttctg

SEQ ID NO: 228186 - DNA, 25 bp, Probe Sequence
gactagaggccttaaaacatgcttt

SEQ ID NO: 228187 - DNA, 25 bp, Probe Sequence
gactcagagttccaaaaccctattg

SEQ ID NO: 228188 - DNA, 25 bp, Probe Sequence
gactaatgttcagtgaaatcctttt

SEQ ID NO: 228189 - DNA, 25 bp, Probe Sequence
gactagtttacttatgcatctcttt

SEQ ID NO: 228190 - DNA, 25 bp, Probe Sequence
gactcaggaattcaggcatctctct

SEQ ID NO: 228191 - DNA, 25 bp, Probe Sequence
gactcagcctctgggatggattact

SEQ ID NO: 228192 - DNA, 25 bp, Probe Sequence
gactcatccatttgtgaggaggact

SEQ ID NO: 228193 - DNA, 25 bp, Probe Sequence
gacttcctccaggagtatggcactc

SEQ ID NO: 228194 - DNA, 25 bp, Probe Sequence
gactttctcttggtataagcatcaa

SEQ ID NO: 228195 - DNA, 25 bp, Probe Sequence
gactttctcttgtgtcaagctctac

SEQ ID NO: 228196 - DNA, 25 bp, Probe Sequence
gactgtttattgtgaagcatttacc

SEQ ID NO: 228197 - DNA, 25 bp, Probe Sequence
gacgttagcgcagggatccttgtac

SEQ ID NO: 228198 - DNA, 25 bp, Probe Sequence
gactggaatgaggtggatccttatc

SEQ ID NO: 228199 - DNA, 25 bp, Probe Sequence
gacttagctattagtgacctatgac

SEQ ID NO: 228200 - DNA, 25 bp, Probe Sequence
gacttcatgctttattatgccttat

SEQ ID NO: 228201 - DNA, 25 bp, Probe Sequence
gacttcatgctttattatgccttat

SEQ ID NO: 228202 - DNA, 25 bp, Probe Sequence
gacttcagtctacttacagtccctg

SEQ ID NO: 228203 - DNA, 25 bp, Probe Sequence
gacttcagtctgagtagcagtgctc

SEQ ID NO: 228204 - DNA, 25 bp, Probe Sequence
gactcatcagtgtggtggttgctga

SEQ ID NO: 228205 - DNA, 25 bp, Probe Sequence
gactcactgtggaagtggactgcaa

SEQ ID NO: 228206 - DNA, 25 bp, Probe Sequence
gactagtcaatgaagtgcgacagca

SEQ ID NO: 228207 - DNA, 25 bp, Probe Sequence
gactttcaatagatcgcagcgaggg

SEQ ID NO: 228208 - DNA, 25 bp, Probe Sequence
gacttctactttactggctgagtgt

SEQ ID NO: 228209 - DNA, 25 bp, Probe Sequence
gacttctgtcatcaaagtgatagtt

SEQ ID NO: 228210 - DNA, 25 bp, Probe Sequence
gactactgctatcaggattgtgttg

SEQ ID NO: 228211 - DNA, 25 bp, Probe Sequence
gactatctccagcaggaatgatact

SEQ ID NO: 228212 - DNA, 25 bp, Probe Sequence
gactatcagccacacaaatataaag

SEQ ID NO: 228213 - DNA, 25 bp, Probe Sequence
gacttcatggctgaaacaccaaagg

SEQ ID NO: 228214 - DNA, 25 bp, Probe Sequence
gactttatgactagtacaccaaagc

SEQ ID NO: 228215 - DNA, 25 bp, Probe Sequence
gacttttgagttaatcagcgtaagg

SEQ ID NO: 228216 - DNA, 25 bp, Probe Sequence
gactttgacagtttcatctgctgct

SEQ ID NO: 228217 - DNA, 25 bp, Probe Sequence
gactttgaagcaatcctgctgcagc

SEQ ID NO: 228218 - DNA, 25 bp, Probe Sequence
gactttgaccacaatcttcagctgt

SEQ ID NO: 228219 - DNA, 25 bp, Probe Sequence
gactttcaactattgttagatgttg

SEQ ID NO: 228220 - DNA, 25 bp, Probe Sequence
gactagacacggtgtccatatggag

SEQ ID NO: 228221 - DNA, 25 bp, Probe Sequence
gactagacccagatcttcttgagag

SEQ ID NO: 228222 - DNA, 25 bp, Probe Sequence
gactcagcccaaaagcttcttaagc

SEQ ID NO: 228223 - DNA, 25 bp, Probe Sequence
gactacagtagaaacatctctatca

SEQ ID NO: 228224 - DNA, 25 bp, Probe Sequence
gactcacagatctacacaaactaca

SEQ ID NO: 228225 - DNA, 25 bp, Probe Sequence
gactcatgctgattagacaaattca

SEQ ID NO: 228226 - DNA, 25 bp, Probe Sequence
gactataactaggccagatatcaaa

SEQ ID NO: 228227 - DNA, 25 bp, Probe Sequence
gactataatgtaactgcaaactcca

SEQ ID NO: 228228 - DNA, 25 bp, Probe Sequence
gacgatgggtctgtgcacaaatcca

SEQ ID NO: 228229 - DNA, 25 bp, Probe Sequence
gacggggtggcagaccaaacagatg

SEQ ID NO: 228230 - DNA, 25 bp, Probe Sequence
gtcgtctaagtccaaccaataagtg

SEQ ID NO: 228231 - DNA, 25 bp, Probe Sequence
gacttctacaggcaacacttcaatg

SEQ ID NO: 228232 - DNA, 25 bp, Probe Sequence
gacttctactcgcagtacattacgt

SEQ ID NO: 228233 - DNA, 25 bp, Probe Sequence
gactttcctactttgccagtacaat

SEQ ID NO: 228234 - DNA, 25 bp, Probe Sequence
gactttcctactttggcagtacatc

SEQ ID NO: 228235 - DNA, 25 bp, Probe Sequence
gactttcctactgtcagtaaatcta

SEQ ID NO: 228236 - DNA, 25 bp, Probe Sequence
gactttccaacttggcagtaaatct

SEQ ID NO: 228237 - DNA, 25 bp, Probe Sequence
gactttcgtacttggcagtaccatc

SEQ ID NO: 228238 - DNA, 25 bp, Probe Sequence
gactttcctacttggcagtacatct

SEQ ID NO: 228239 - DNA, 25 bp, Probe Sequence
gactttcctacttggcagtacatct

SEQ ID NO: 228240 - DNA, 25 bp, Probe Sequence
gactttcctacttggcagtacatct

SEQ ID NO: 228241 - DNA, 25 bp, Probe Sequence
gactttcctacttggcagtacatct

SEQ ID NO: 228242 - DNA, 25 bp, Probe Sequence
gactttcctacttggcagtacatct

SEQ ID NO: 228243 - DNA, 25 bp, Probe Sequence
gactcttcttactacacaggtacta

SEQ ID NO: 228244 - DNA, 25 bp, Probe Sequence
gactctttcaactacccagtattag

SEQ ID NO: 228245 - DNA, 25 bp, Probe Sequence
gactctttcaattacagactgtgtt

SEQ ID NO: 228246 - DNA, 25 bp, Probe Sequence
gactccattatatagtcacggtagt

SEQ ID NO: 228247 - DNA, 25 bp, Probe Sequence
gactccattgactcgaacgactctg

SEQ ID NO: 228248 - DNA, 25 bp, Probe Sequence
gactcacattggggcgaatgaacca

SEQ ID NO: 228249 - DNA, 25 bp, Probe Sequence
gactcctgggctctgaagaatcaca

SEQ ID NO: 228250 - DNA, 25 bp, Probe Sequence
gactctctacttcataaggaccatg

SEQ ID NO: 228251 - DNA, 25 bp, Probe Sequence
gacttctatcctcattcaaaaatct

SEQ ID NO: 228252 - DNA, 25 bp, Probe Sequence
gactgtcttacgctgacaaagatta

SEQ ID NO: 228253 - DNA, 25 bp, Probe Sequence
gactgatgttcatgggtaaaataat

SEQ ID NO: 228254 - DNA, 25 bp, Probe Sequence
gactgtccatcgacgggagaataaa

SEQ ID NO: 228255 - DNA, 25 bp, Probe Sequence
gactggctccgcacggagaacgagc

SEQ ID NO: 228256 - DNA, 25 bp, Probe Sequence
gactggatcaacgaccggatacggc

SEQ ID NO: 228257 - DNA, 25 bp, Probe Sequence
gactgtgaatccgctctttgtcgga

SEQ ID NO: 228258 - DNA, 25 bp, Probe Sequence
gactgtgaatccgctctttgtcgga

SEQ ID NO: 228259 - DNA, 25 bp, Probe Sequence
gacgtgtatccagtctagttaagga

SEQ ID NO: 228260 - DNA, 25 bp, Probe Sequence
gactttacccttcgactagaggatg

SEQ ID NO: 228261 - DNA, 25 bp, Probe Sequence
gactgtaatcccatggagctaagca

SEQ ID NO: 228262 - DNA, 25 bp, Probe Sequence
gacttcagagacgattgcagacttg

SEQ ID NO: 228263 - DNA, 25 bp, Probe Sequence
gactgaagagcagattgcagaattc

SEQ ID NO: 228264 - DNA, 25 bp, Probe Sequence
gactccaagctgcatggcaagttct

SEQ ID NO: 228265 - DNA, 25 bp, Probe Sequence
gactcgtgatgcaaagctgaagttg

SEQ ID NO: 228266 - DNA, 25 bp, Probe Sequence
gactctcgacaatgtaactctgcaa

SEQ ID NO: 228267 - DNA, 25 bp, Probe Sequence
gactctctaaagcaaattcgaagca

SEQ ID NO: 228268 - DNA, 25 bp, Probe Sequence
gactcattaaagcatcatttgtaaa

SEQ ID NO: 228269 - DNA, 25 bp, Probe Sequence
gactgagctaaacattatgcgtcat

SEQ ID NO: 228270 - DNA, 25 bp, Probe Sequence
gactagcactaaggattctggtacc

SEQ ID NO: 228271 - DNA, 25 bp, Probe Sequence
gactcacaatagtgcatcttggtcc

SEQ ID NO: 228272 - DNA, 25 bp, Probe Sequence
gactctcaagatttatgaaggtgcc

SEQ ID NO: 228273 - DNA, 25 bp, Probe Sequence
gacttcaatatttcagcagggtaca

SEQ ID NO: 228274 - DNA, 25 bp, Probe Sequence
gacttcagtatattcctgggaatgc

SEQ ID NO: 228275 - DNA, 25 bp, Probe Sequence
gactatgacgatgatcctgtggact

SEQ ID NO: 228276 - DNA, 25 bp, Probe Sequence
gactatgacgactcatctgaggagc

SEQ ID NO: 228277 - DNA, 25 bp, Probe Sequence
gactactgggcattcatgatgggac

SEQ ID NO: 228278 - DNA, 25 bp, Probe Sequence
gactactgcagtcctcactgagaaa

SEQ ID NO: 228279 - DNA, 25 bp, Probe Sequence
gactaggcatgatttcacgaaggca

SEQ ID NO: 228280 - DNA, 25 bp, Probe Sequence
gactgagcgtgcctaccaaaagcag

SEQ ID NO: 228281 - DNA, 25 bp, Probe Sequence
gactagtgcacctcagcaaacaagt

SEQ ID NO: 228282 - DNA, 25 bp, Probe Sequence
gactagacatcctgtgcaatagttt

SEQ ID NO: 228283 - DNA, 25 bp, Probe Sequence
gagctaaacccagcaattttctatg

SEQ ID NO: 228284 - DNA, 25 bp, Probe Sequence
gagctaaacccagcaattttctatg

SEQ ID NO: 228285 - DNA, 25 bp, Probe Sequence
gacttagaacctgctatattatcaa

SEQ ID NO: 228286 - DNA, 25 bp, Probe Sequence
gacttattagccattgtatttaaac

SEQ ID NO: 228287 - DNA, 25 bp, Probe Sequence
gacttttggatatttgtacttttga

SEQ ID NO: 228288 - DNA, 25 bp, Probe Sequence
gactttcgagatgtcgtacactccg

SEQ ID NO: 228289 - DNA, 25 bp, Probe Sequence
gactttgggtgcatctgtacaatgt

SEQ ID NO: 228290 - DNA, 25 bp, Probe Sequence
gacgcattggggatgttgtccgcat

SEQ ID NO: 228291 - DNA, 25 bp, Probe Sequence
gacgcacttggggttttacgcaatg

SEQ ID NO: 228292 - DNA, 25 bp, Probe Sequence
gactatctttggggatgttttcaag

SEQ ID NO: 228293 - DNA, 25 bp, Probe Sequence
gacttttattgcagatgtctttaga

SEQ ID NO: 228294 - DNA, 25 bp, Probe Sequence
gactttttgctgtgatggttttgaa

SEQ ID NO: 228295 - DNA, 25 bp, Probe Sequence
gactttcttctgaatattttatctt

SEQ ID NO: 228296 - DNA, 25 bp, Probe Sequence
gactttcttctgaatattttatctt

SEQ ID NO: 228297 - DNA, 25 bp, Probe Sequence
gactttattctcaataagttgattt

SEQ ID NO: 228298 - DNA, 25 bp, Probe Sequence
gactttatagttatgtcttgtattt

SEQ ID NO: 228299 - DNA, 25 bp, Probe Sequence
gactcttcactgttagctttttaaa

SEQ ID NO: 228300 - DNA, 25 bp, Probe Sequence
gacttttcattttgttctgtactaa

SEQ ID NO: 228301 - DNA, 25 bp, Probe Sequence
gactgaaccattattccagctggct

SEQ ID NO: 228302 - DNA, 25 bp, Probe Sequence
gactagacctgtatcattcatggta

SEQ ID NO: 228303 - DNA, 25 bp, Probe Sequence
gactacctctccatcattgaggttc

SEQ ID NO: 228304 - DNA, 25 bp, Probe Sequence
gactcatcatctgtcagtaatgaga

SEQ ID NO: 228305 - DNA, 25 bp, Probe Sequence
gactcaatgcggcagataagagcag

SEQ ID NO: 228306 - DNA, 25 bp, Probe Sequence
gactcagtggcagagtaggcacggg

SEQ ID NO: 228307 - DNA, 25 bp, Probe Sequence
gactgagggactctgaagcctctgg

SEQ ID NO: 228308 - DNA, 25 bp, Probe Sequence
gactaatggactgtccccatctgca

SEQ ID NO: 228309 - DNA, 25 bp, Probe Sequence
gacttatggactttctacttggcag

SEQ ID NO: 228310 - DNA, 25 bp, Probe Sequence
gactttgagagtcattcacttccat

SEQ ID NO: 228311 - DNA, 25 bp, Probe Sequence
gactttgtactgcatgatcaacttc

SEQ ID NO: 228312 - DNA, 25 bp, Probe Sequence
gactttctactggcagaacatctac

SEQ ID NO: 228313 - DNA, 25 bp, Probe Sequence
gacttttcagcagggaaatggggct

SEQ ID NO: 228314 - DNA, 25 bp, Probe Sequence
gactgctttgtgctggacaacgggc

SEQ ID NO: 228315 - DNA, 25 bp, Probe Sequence
gactctgttattcggaaaggggcac

SEQ ID NO: 228316 - DNA, 25 bp, Probe Sequence
gaccgtctggggaagaaggtccgcg

SEQ ID NO: 228317 - DNA, 25 bp, Probe Sequence
gaccgtctggggaagaaggtccgcg

SEQ ID NO: 228318 - DNA, 25 bp, Probe Sequence
gaccgttggtgtgcagaggtaccct

SEQ ID NO: 228319 - DNA, 25 bp, Probe Sequence
gactttggtgtgttcatgggaaact

SEQ ID NO: 228320 - DNA, 25 bp, Probe Sequence
gactttggtgagtagccttgaataa

SEQ ID NO: 228321 - DNA, 25 bp, Probe Sequence
gactttgtgggctctttcagagaac

SEQ ID NO: 228322 - DNA, 25 bp, Probe Sequence
gactttgaggacttcatcttcagcc

SEQ ID NO: 228323 - DNA, 25 bp, Probe Sequence
gactttgaggacttcatcttcagcc

SEQ ID NO: 228324 - DNA, 25 bp, Probe Sequence
gacttttgtatctagatttcatcct

SEQ ID NO: 228325 - DNA, 25 bp, Probe Sequence
gactttagtcactgtcttcttgctt

SEQ ID NO: 228326 - DNA, 25 bp, Probe Sequence
gactatgaagtcaggctcatctgct

SEQ ID NO: 228327 - DNA, 25 bp, Probe Sequence
gactatgctatagcacgtgcttgct

SEQ ID NO: 228328 - DNA, 25 bp, Probe Sequence
gactgatgtaaaacggttttcttgt

SEQ ID NO: 228329 - DNA, 25 bp, Probe Sequence
gactattagaatatgcctctctttt

SEQ ID NO: 228330 - DNA, 25 bp, Probe Sequence
gactctaaaatcaccagtgctgttt

SEQ ID NO: 228331 - DNA, 25 bp, Probe Sequence
gacttatacccaggatgatgtgtgt

SEQ ID NO: 228332 - DNA, 25 bp, Probe Sequence
gactcgaacgactctgatgatgtag

SEQ ID NO: 228333 - DNA, 25 bp, Probe Sequence
gatacgacactgtccaggttggagg

SEQ ID NO: 228334 - DNA, 25 bp, Probe Sequence
gatcctatcctgtggaatttagtta

SEQ ID NO: 228335 - DNA, 25 bp, Probe Sequence
gacttttatgaactctttaagttga

SEQ ID NO: 228336 - DNA, 25 bp, Probe Sequence
gacttttatcctgcttcataacttg

SEQ ID NO: 228337 - DNA, 25 bp, Probe Sequence
gactatttgcatgcttctgtctaaa

SEQ ID NO: 228338 - DNA, 25 bp, Probe Sequence
gactcatgtttccctgtttcaaagg

SEQ ID NO: 228339 - DNA, 25 bp, Probe Sequence
gactcctcctccatattttaatgag

SEQ ID NO: 228340 - DNA, 25 bp, Probe Sequence
gactcagttctaattatttatgaag

SEQ ID NO: 228341 - DNA, 25 bp, Probe Sequence
gactagtatctgttttgttatgtgt

SEQ ID NO: 228342 - DNA, 25 bp, Probe Sequence
gactagtatctgttttgttatgtgt

SEQ ID NO: 228343 - DNA, 25 bp, Probe Sequence
gactatttctgtgtttatttgtggc

SEQ ID NO: 228344 - DNA, 25 bp, Probe Sequence
gactttctgcctgttacatttttgc

SEQ ID NO: 228345 - DNA, 25 bp, Probe Sequence
gactgtttccctcaaattttgtgaa

SEQ ID NO: 228346 - DNA, 25 bp, Probe Sequence
gactgacgtccccagaagtttctgg

SEQ ID NO: 228347 - DNA, 25 bp, Probe Sequence
gactgagcatgttaccaaggctttt

SEQ ID NO: 228348 - DNA, 25 bp, Probe Sequence
gactacagattacacactcttttca

SEQ ID NO: 228349 - DNA, 25 bp, Probe Sequence
gacgaagtgctataactactttatg

SEQ ID NO: 228350 - DNA, 25 bp, Probe Sequence
gactcagaagttcaagctaaatatt

SEQ ID NO: 228351 - DNA, 25 bp, Probe Sequence
gaccaggaccaggaagtaactttag

SEQ ID NO: 228352 - DNA, 25 bp, Probe Sequence
gactcataaccaggtcagaaatttt

SEQ ID NO: 228353 - DNA, 25 bp, Probe Sequence
gactcatgtatctggtcacctagtt

SEQ ID NO: 228354 - DNA, 25 bp, Probe Sequence
gactctgttcaaaggcgcagctacg

SEQ ID NO: 228355 - DNA, 25 bp, Probe Sequence
gactctgttgagacatggccagcaa

SEQ ID NO: 228356 - DNA, 25 bp, Probe Sequence
gacttttgtagcaggcagagattct

SEQ ID NO: 228357 - DNA, 25 bp, Probe Sequence
gactctttgtacagacctgcttgac

SEQ ID NO: 228358 - DNA, 25 bp, Probe Sequence
gactttttcactaaccagttgacga

SEQ ID NO: 228359 - DNA, 25 bp, Probe Sequence
gaccgttattctaactcagggatgg

SEQ ID NO: 228360 - DNA, 25 bp, Probe Sequence
gactcagttgagatctttcatgggg

SEQ ID NO: 228361 - DNA, 25 bp, Probe Sequence
gactgacttaaatattcggggtgag

SEQ ID NO: 228362 - DNA, 25 bp, Probe Sequence
gactgccttaaatagactgtaggta

SEQ ID NO: 228363 - DNA, 25 bp, Probe Sequence
gactgcacctaattaaaacatattg

SEQ ID NO: 228364 - DNA, 25 bp, Probe Sequence
gactgacctaaacgtggaatgcatg

SEQ ID NO: 228365 - DNA, 25 bp, Probe Sequence
gactgcatgggaagcacggaatata

SEQ ID NO: 228366 - DNA, 25 bp, Probe Sequence
gactatgaggggcaggagcatgatg

SEQ ID NO: 228367 - DNA, 25 bp, Probe Sequence
gactatgaggctgcgaaggcagatg

SEQ ID NO: 228368 - DNA, 25 bp, Probe Sequence
gactttagcatgcagagcagcaaag

SEQ ID NO: 228369 - DNA, 25 bp, Probe Sequence
gactttgaggggacagcagattaat

SEQ ID NO: 228370 - DNA, 25 bp, Probe Sequence
gactttgagccaggtacagtaagaa

SEQ ID NO: 228371 - DNA, 25 bp, Probe Sequence
gactttgtcctgctacagtgataaa

SEQ ID NO: 228372 - DNA, 25 bp, Probe Sequence
gactttgtcacaaaactgtctatat

SEQ ID NO: 228373 - DNA, 25 bp, Probe Sequence
gacttttcagaatggcttcttttac

SEQ ID NO: 228374 - DNA, 25 bp, Probe Sequence
gactgtttggagttgttgccttact

SEQ ID NO: 228375 - DNA, 25 bp, Probe Sequence
gactttgctggagtttcaagctgat

SEQ ID NO: 228376 - DNA, 25 bp, Probe Sequence
gactttggtatggattaagcgctgt

SEQ ID NO: 228377 - DNA, 25 bp, Probe Sequence
gactttatgctagaagatgaggctt

SEQ ID NO: 228378 - DNA, 25 bp, Probe Sequence
gactatataatatgaagctgaatct

SEQ ID NO: 228379 - DNA, 25 bp, Probe Sequence
gactatcattcaaagacatgcaatt

SEQ ID NO: 228380 - DNA, 25 bp, Probe Sequence
gactcacatacagtagatcactttt

SEQ ID NO: 228381 - DNA, 25 bp, Probe Sequence
gactcatcatcaataaacactgtta

SEQ ID NO: 228382 - DNA, 25 bp, Probe Sequence
gactccatccatacaatcacagata

SEQ ID NO: 228383 - DNA, 25 bp, Probe Sequence
gactgctgaatcatcatatctacta

SEQ ID NO: 228384 - DNA, 25 bp, Probe Sequence
gactctgttgagtacatatactgac

SEQ ID NO: 228385 - DNA, 25 bp, Probe Sequence
gactctgtgctgtcatactgaactc

SEQ ID NO: 228386 - DNA, 25 bp, Probe Sequence
gactctttagcatcgatacctcaac

SEQ ID NO: 228387 - DNA, 25 bp, Probe Sequence
gactctttagcatcgatacctcaac

SEQ ID NO: 228388 - DNA, 25 bp, Probe Sequence
gactcttacgtaagtcatcccacca

SEQ ID NO: 228389 - DNA, 25 bp, Probe Sequence
gactctaataaacgtagcctacctt

SEQ ID NO: 228390 - DNA, 25 bp, Probe Sequence
gactctcatcatgcaaattagccaa

SEQ ID NO: 228391 - DNA, 25 bp, Probe Sequence
gactatatctccagattatgcctat

SEQ ID NO: 228392 - DNA, 25 bp, Probe Sequence
gactatattcagcctatttgcctac

SEQ ID NO: 228393 - DNA, 25 bp, Probe Sequence
gactcaattcaggctatgtatgact

SEQ ID NO: 228394 - DNA, 25 bp, Probe Sequence
gactcagagatatctatgtatgcga

SEQ ID NO: 228395 - DNA, 25 bp, Probe Sequence
gactcatgtgtgtttcaatatggaa

SEQ ID NO: 228396 - DNA, 25 bp, Probe Sequence
gactctgtgatgtatcatgatagtc

SEQ ID NO: 228397 - DNA, 25 bp, Probe Sequence
gactcaatcatggcttgtggtctgg

SEQ ID NO: 228398 - DNA, 25 bp, Probe Sequence
gactgcctgatggggtgacttggcc

SEQ ID NO: 228399 - DNA, 25 bp, Probe Sequence
gactcctgcaagggcgactctggag

SEQ ID NO: 228400 - DNA, 25 bp, Probe Sequence
gactcgctgaagagagactacgcag

SEQ ID NO: 228401 - DNA, 25 bp, Probe Sequence
gactcatccaaaaagatcccagatc

SEQ ID NO: 228402 - DNA, 25 bp, Probe Sequence
gactacgccgtgaagatccgagtga

SEQ ID NO: 228403 - DNA, 25 bp, Probe Sequence
gactctcccgtggatgacggatgag

SEQ ID NO: 228404 - DNA, 25 bp, Probe Sequence
gactttccagctgctgaagttatgg

SEQ ID NO: 228405 - DNA, 25 bp, Probe Sequence
gacgtgtgccaggacgactttgatg

SEQ ID NO: 228406 - DNA, 25 bp, Probe Sequence
gactgtggtgcgggtacccatgatg

SEQ ID NO: 228407 - DNA, 25 bp, Probe Sequence
gactgaagtaggatgagcccaagag

SEQ ID NO: 228408 - DNA, 25 bp, Probe Sequence
gagtgaagaagggcggcacgcgggc

SEQ ID NO: 228409 - DNA, 25 bp, Probe Sequence
gactgaaaatgtcggccagcctggt

SEQ ID NO: 228410 - DNA, 25 bp, Probe Sequence
gactaaaatcttggccagagctcct

SEQ ID NO: 228411 - DNA, 25 bp, Probe Sequence
gactcaaaatccaaaagactcacct

SEQ ID NO: 228412 - DNA, 25 bp, Probe Sequence
gactcactttctaaaattccacacc

SEQ ID NO: 228413 - DNA, 25 bp, Probe Sequence
gactggcttagctgaagttctaacc

SEQ ID NO: 228414 - DNA, 25 bp, Probe Sequence
gactttctacttgcagtacatctac

SEQ ID NO: 228415 - DNA, 25 bp, Probe Sequence
gactttctacttggcagtacatcta

SEQ ID NO: 228416 - DNA, 25 bp, Probe Sequence
gactttctacttggcagtacatcta

SEQ ID NO: 228417 - DNA, 25 bp, Probe Sequence
gactttgtgatcactcatgtcccat

SEQ ID NO: 228418 - DNA, 25 bp, Probe Sequence
gactgactggaatcaagctgccgac

SEQ ID NO: 228419 - DNA, 25 bp, Probe Sequence
gactaagcgaaagcagctctcctcg

SEQ ID NO: 228420 - DNA, 25 bp, Probe Sequence
gactacagaacataggcttcactca

SEQ ID NO: 228421 - DNA, 25 bp, Probe Sequence
gactagagaagctacagaactccca

SEQ ID NO: 228422 - DNA, 25 bp, Probe Sequence
gactcagcagaaggtgcagacccgc

SEQ ID NO: 228423 - DNA, 25 bp, Probe Sequence
gactcaggccagctggaacatgtgc

SEQ ID NO: 228424 - DNA, 25 bp, Probe Sequence
gactagcatccacatagagcacttg

SEQ ID NO: 228425 - DNA, 25 bp, Probe Sequence
gactgagcaataaataatcacctga

SEQ ID NO: 228426 - DNA, 25 bp, Probe Sequence
gactgaggcagcaagaaatattctg

SEQ ID NO: 228427 - DNA, 25 bp, Probe Sequence
gactcgtgccaacgaatttcccatt

SEQ ID NO: 228428 - DNA, 25 bp, Probe Sequence
gactgtcgcagaaggaatttcccac

SEQ ID NO: 228429 - DNA, 25 bp, Probe Sequence
gactcttcacagtgcaaattcccca

SEQ ID NO: 228430 - DNA, 25 bp, Probe Sequence
gactgcttccagtgaacaaacctgc

SEQ ID NO: 228431 - DNA, 25 bp, Probe Sequence
gactcttctcttcaaaatcatctgg

SEQ ID NO: 228432 - DNA, 25 bp, Probe Sequence
gactattgttggtcaaagtattggt

SEQ ID NO: 228433 - DNA, 25 bp, Probe Sequence
gactatattctgcactagagtgatt

SEQ ID NO: 228434 - DNA, 25 bp, Probe Sequence
gactcagtgtcctctctgagtatat

SEQ ID NO: 228435 - DNA, 25 bp, Probe Sequence
gactcagtgtgtgatccggtttctt

SEQ ID NO: 228436 - DNA, 25 bp, Probe Sequence
gactaggttgaaaacctcctgcttc

SEQ ID NO: 228437 - DNA, 25 bp, Probe Sequence
gatctgggttaaaacctggcactat

SEQ ID NO: 228438 - DNA, 25 bp, Probe Sequence
tgacgacgaaaacacagcccagttt

SEQ ID NO: 228439 - DNA, 25 bp, Probe Sequence
gacgtagaaaacgcatccttgaatt

SEQ ID NO: 228440 - DNA, 25 bp, Probe Sequence
gactgatagaaagccctctttactc

SEQ ID NO: 228441 - DNA, 25 bp, Probe Sequence
gactgatggaaaacccagccaccac

SEQ ID NO: 228442 - DNA, 25 bp, Probe Sequence
gactgacaaaaactccatggggcca

SEQ ID NO: 228443 - DNA, 25 bp, Probe Sequence
gactgacaaaaactccatggggcca

SEQ ID NO: 228444 - DNA, 25 bp, Probe Sequence
gactgacaaaaactccatggggcca

SEQ ID NO: 228445 - DNA, 25 bp, Probe Sequence
gactaaatgcaaaatccttgggctt

SEQ ID NO: 228446 - DNA, 25 bp, Probe Sequence
gactgcaaaataaaatctcggtgtt

SEQ ID NO: 228447 - DNA, 25 bp, Probe Sequence
gactcaatagaaagactcccagtgt

SEQ ID NO: 228448 - DNA, 25 bp, Probe Sequence
gactagatgaaaggtgtccatggtt

SEQ ID NO: 228449 - DNA, 25 bp, Probe Sequence
gactagaacaacccaaatagcatct

SEQ ID NO: 228450 - DNA, 25 bp, Probe Sequence
gactatccaaaattcaagtatgctc

SEQ ID NO: 228451 - DNA, 25 bp, Probe Sequence
gactacactaactatcatgagatat

SEQ ID NO: 228452 - DNA, 25 bp, Probe Sequence
gactacccagacgagctgaagtgcc

SEQ ID NO: 228453 - DNA, 25 bp, Probe Sequence
gactacccagacgagctgaagtgcc

SEQ ID NO: 228454 - DNA, 25 bp, Probe Sequence
gactaccctggaagtagcaggccgc

SEQ ID NO: 228455 - DNA, 25 bp, Probe Sequence
gactcagccaggcaagctgaccgag

SEQ ID NO: 228456 - DNA, 25 bp, Probe Sequence
gactcacagaggcagattaatagga

SEQ ID NO: 228457 - DNA, 25 bp, Probe Sequence
gactctcaggaggacttacaggaaa

SEQ ID NO: 228458 - DNA, 25 bp, Probe Sequence
gactagagtaagattgacaggcaat

SEQ ID NO: 228459 - DNA, 25 bp, Probe Sequence
gactagagtgataggtctacaagcc

SEQ ID NO: 228460 - DNA, 25 bp, Probe Sequence
gactctgcgcttgagatcttcaaac

SEQ ID NO: 228461 - DNA, 25 bp, Probe Sequence
gactgagcggctgcagtctacaaac

SEQ ID NO: 228462 - DNA, 25 bp, Probe Sequence
gactacagccagtcagacttcaagg

SEQ ID NO: 228463 - DNA, 25 bp, Probe Sequence
gactgacacaaagtgactttcaggg

SEQ ID NO: 228464 - DNA, 25 bp, Probe Sequence
gactgaacacaaggccttgaccagt

SEQ ID NO: 228465 - DNA, 25 bp, Probe Sequence
gacgtacataacccgttccattgac

SEQ ID NO: 228466 - DNA, 25 bp, Probe Sequence
gactctaccataccctggggaagac

SEQ ID NO: 228467 - DNA, 25 bp, Probe Sequence
gactcagacttacgcctagtggtag

SEQ ID NO: 228468 - DNA, 25 bp, Probe Sequence
gactcacctggggcccagggctgag

SEQ ID NO: 228469 - DNA, 25 bp, Probe Sequence
gacgccgtggaggtcacgggtctgc

SEQ ID NO: 228470 - DNA, 25 bp, Probe Sequence
gactcacggggatttccacagtctc

SEQ ID NO: 228471 - DNA, 25 bp, Probe Sequence
gactcacggggatttccaagtctcc

SEQ ID NO: 228472 - DNA, 25 bp, Probe Sequence
gactcacggggatgtccaagtctcc

SEQ ID NO: 228473 - DNA, 25 bp, Probe Sequence
gactccggaagtctcaaggtgcctc

SEQ ID NO: 228474 - DNA, 25 bp, Probe Sequence
gactccggaaaagtgaaggctgcca

SEQ ID NO: 228475 - DNA, 25 bp, Probe Sequence
gactcacgggatttccaagtctcca

SEQ ID NO: 228476 - DNA, 25 bp, Probe Sequence
gactcacgggatttccaagtctcca

SEQ ID NO: 228477 - DNA, 25 bp, Probe Sequence
gactcacgggatttccaagtctcca

SEQ ID NO: 228478 - DNA, 25 bp, Probe Sequence
gactaagggcacttcctgaggttca

SEQ ID NO: 228479 - DNA, 25 bp, Probe Sequence
gactaagggcacttcctgaggttca

SEQ ID NO: 228480 - DNA, 25 bp, Probe Sequence
gactatgaggccaccctgaggtgct

SEQ ID NO: 228481 - DNA, 25 bp, Probe Sequence
gactatgagaactatgccctcgtgt

SEQ ID NO: 228482 - DNA, 25 bp, Probe Sequence
gactatgtgaaggcactgcccgggc

SEQ ID NO: 228483 - DNA, 25 bp, Probe Sequence
gactcatctgatagaatcccctgaa

SEQ ID NO: 228484 - DNA, 25 bp, Probe Sequence
gactatgtgcttatccacttaagac

SEQ ID NO: 228485 - DNA, 25 bp, Probe Sequence
gactaggctctattacatctatcca

SEQ ID NO: 228486 - DNA, 25 bp, Probe Sequence
gactcaccctgattgagggatcaca

SEQ ID NO: 228487 - DNA, 25 bp, Probe Sequence
gactcacagccgcattggtgactca

SEQ ID NO: 228488 - DNA, 25 bp, Probe Sequence
gactcactctccagtgggagcagca

SEQ ID NO: 228489 - DNA, 25 bp, Probe Sequence
gactaacctctggtatctgagcaca

SEQ ID NO: 228490 - DNA, 25 bp, Probe Sequence
gactaacctctggtatctgagcaca

SEQ ID NO: 228491 - DNA, 25 bp, Probe Sequence
gactgtacgcggccttcgactgcac

SEQ ID NO: 228492 - DNA, 25 bp, Probe Sequence
gactatcacagggttccagacgcat

SEQ ID NO: 228493 - DNA, 25 bp, Probe Sequence
gactatctattggttccataactct

SEQ ID NO: 228494 - DNA, 25 bp, Probe Sequence
gactcattgcttaattctaagactt

SEQ ID NO: 228495 - DNA, 25 bp, Probe Sequence
gactcattcttcacacgattgacct

SEQ ID NO: 228496 - DNA, 25 bp, Probe Sequence
gactatcagttcacctttagtctat

SEQ ID NO: 228497 - DNA, 25 bp, Probe Sequence
gactgtcagttctctgggaagtggt

SEQ ID NO: 228498 - DNA, 25 bp, Probe Sequence
gacgatgactccgacgaggacaagg

SEQ ID NO: 228499 - DNA, 25 bp, Probe Sequence
gacgatgacatagatgagctggaat

SEQ ID NO: 228500 - DNA, 25 bp, Probe Sequence
gactgctgacaaagatggtgtggcc

SEQ ID NO: 228501 - DNA, 25 bp, Probe Sequence
gactcgatcttggagggtgcagccc

SEQ ID NO: 228502 - DNA, 25 bp, Probe Sequence
gactgagtctctgaggggctaccag

SEQ ID NO: 228503 - DNA, 25 bp, Probe Sequence
gactgcagtttagaggacttccagg

SEQ ID NO: 228504 - DNA, 25 bp, Probe Sequence
gactggtttagtctgcagtctccga

SEQ ID NO: 228505 - DNA, 25 bp, Probe Sequence
gagctgttattagtttgggtcccgg

SEQ ID NO: 228506 - DNA, 25 bp, Probe Sequence
gactgtacttactgaaggagccccg

SEQ ID NO: 228507 - DNA, 25 bp, Probe Sequence
gactctgactttgagacggtgtacc

SEQ ID NO: 228508 - DNA, 25 bp, Probe Sequence
gactctgactttgagacggtgtacc

SEQ ID NO: 228509 - DNA, 25 bp, Probe Sequence
gactagacttgtgatatgcgtgtgt

SEQ ID NO: 228510 - DNA, 25 bp, Probe Sequence
gactatgagctcttcgtggaggctg

SEQ ID NO: 228511 - DNA, 25 bp, Probe Sequence
gactacaacctcatggatggggacc

SEQ ID NO: 228512 - DNA, 25 bp, Probe Sequence
gactaaaccacttgggagggcaatt

SEQ ID NO: 228513 - DNA, 25 bp, Probe Sequence
gactgggacggctgtggatggaaat

SEQ ID NO: 228514 - DNA, 25 bp, Probe Sequence
gacggtgacttgtgtcgtgggggaa

SEQ ID NO: 228515 - DNA, 25 bp, Probe Sequence
gactggtgacttcacttttgagtgc

SEQ ID NO: 228516 - DNA, 25 bp, Probe Sequence
tgtcgttggtgtgatactttggctc

SEQ ID NO: 228517 - DNA, 25 bp, Probe Sequence
gttgtactgcatcttagtttactgg

SEQ ID NO: 228518 - DNA, 25 bp, Probe Sequence
gtggatcgtcatgtatacttacggc

SEQ ID NO: 228519 - DNA, 25 bp, Probe Sequence
gactgtcgctatgtcatgatcttca

SEQ ID NO: 228520 - DNA, 25 bp, Probe Sequence
gactctcacttcctgagatttgata

SEQ ID NO: 228521 - DNA, 25 bp, Probe Sequence
gactcttgtgcccatgagatggagt

SEQ ID NO: 228522 - DNA, 25 bp, Probe Sequence
gactcagctgcgaggagatgggctt

SEQ ID NO: 228523 - DNA, 25 bp, Probe Sequence
gactgcatgcccaagagactggaga

SEQ ID NO: 228524 - DNA, 25 bp, Probe Sequence
gactgcacacctcgggatgtatgtt

SEQ ID NO: 228525 - DNA, 25 bp, Probe Sequence
gactcagcacaccaggtatgtcaca

SEQ ID NO: 228526 - DNA, 25 bp, Probe Sequence
gactctgcaacttagctcatgttcc

SEQ ID NO: 228527 - DNA, 25 bp, Probe Sequence
gactctgaagctgagctccagcggc

SEQ ID NO: 228528 - DNA, 25 bp, Probe Sequence
gactgctactccaagctcaaggagc

SEQ ID NO: 228529 - DNA, 25 bp, Probe Sequence
gactcgagtcacactcaagggaact

SEQ ID NO: 228530 - DNA, 25 bp, Probe Sequence
gactgggagcaaactagggaataaa

SEQ ID NO: 228531 - DNA, 25 bp, Probe Sequence
gacgggcagaattattgggtagggc

SEQ ID NO: 228532 - DNA, 25 bp, Probe Sequence
gacgggagtaagccctggtggtggt

SEQ ID NO: 228533 - DNA, 25 bp, Probe Sequence
gacgggcggatcacctgaggtgagg

SEQ ID NO: 228534 - DNA, 25 bp, Probe Sequence
gactgggggaactggagtgtccttg

SEQ ID NO: 228535 - DNA, 25 bp, Probe Sequence
gactgaggaagacccggaaacttag

SEQ ID NO: 228536 - DNA, 25 bp, Probe Sequence
gactcaggggatcggctgggaactg

SEQ ID NO: 228537 - DNA, 25 bp, Probe Sequence
gactgagggtgatcggggtgactgt

SEQ ID NO: 228538 - DNA, 25 bp, Probe Sequence
gacgaggtggtacgaggggtcgtgg

SEQ ID NO: 228539 - DNA, 25 bp, Probe Sequence
gacgttctggtgaggtggaagcgtg

SEQ ID NO: 228540 - DNA, 25 bp, Probe Sequence
gacgtaagtgtcagaggatgcaagg

SEQ ID NO: 228541 - DNA, 25 bp, Probe Sequence
gacgttagtgtcatgttagatttgt

SEQ ID NO: 228542 - DNA, 25 bp, Probe Sequence
gactgggacagtctttagatattat

SEQ ID NO: 228543 - DNA, 25 bp, Probe Sequence
gactggtacagtgatagttgataag

SEQ ID NO: 228544 - DNA, 25 bp, Probe Sequence
gacgggcaaccaatcaatgaaacag

SEQ ID NO: 228545 - DNA, 25 bp, Probe Sequence
gactgggaggcatgacaagtaaaga

SEQ ID NO: 228546 - DNA, 25 bp, Probe Sequence
gactggtgggatgaaggtaaaggca

SEQ ID NO: 228547 - DNA, 25 bp, Probe Sequence
gactggtggtacatgggagaaaggt

SEQ ID NO: 228548 - DNA, 25 bp, Probe Sequence
gactggggaagcaaggggtaatgtt

SEQ ID NO: 228549 - DNA, 25 bp, Probe Sequence
gacgaaggaacttgcagggatttca

SEQ ID NO: 228550 - DNA, 25 bp, Probe Sequence
gacggagtgacagaaaggtttctca

SEQ ID NO: 228551 - DNA, 25 bp, Probe Sequence
gactggttacatggaggggattgat

SEQ ID NO: 228552 - DNA, 25 bp, Probe Sequence
gactgttccctcaggggatctgata

SEQ ID NO: 228553 - DNA, 25 bp, Probe Sequence
gacgttccagttggtgaggagctgt

SEQ ID NO: 228554 - DNA, 25 bp, Probe Sequence
gacgttccagccggcatggctggga

SEQ ID NO: 228555 - DNA, 25 bp, Probe Sequence
gacggataaggcctgaactgggaaa

SEQ ID NO: 228556 - DNA, 25 bp, Probe Sequence
gactggatggggctatactggaata

SEQ ID NO: 228557 - DNA, 25 bp, Probe Sequence
gactagagggaccttcctgaagctc

SEQ ID NO: 228558 - DNA, 25 bp, Probe Sequence
gactaaagcagactcttcctctgca

SEQ ID NO: 228559 - DNA, 25 bp, Probe Sequence
tgaaacggaatgccttccttgcggt

SEQ ID NO: 228560 - DNA, 25 bp, Probe Sequence
gagagacaggaaactcccttggttt

SEQ ID NO: 228561 - DNA, 25 bp, Probe Sequence
gaggccaaaacagattttagactta

SEQ ID NO: 228562 - DNA, 25 bp, Probe Sequence
gagaaaagtaatcattttaggtctt

SEQ ID NO: 228563 - DNA, 25 bp, Probe Sequence
gagaaatagtagggtcagttaggtt

SEQ ID NO: 228564 - DNA, 25 bp, Probe Sequence
gacgacctgtccagatggttaccat

SEQ ID NO: 228565 - DNA, 25 bp, Probe Sequence
gacggccgtgcacaaggccaacatc

SEQ ID NO: 228566 - DNA, 25 bp, Probe Sequence
gacggccgtgcacaaggccaacatc

SEQ ID NO: 228567 - DNA, 25 bp, Probe Sequence
gactaccagtgcataacaccacact

SEQ ID NO: 228568 - DNA, 25 bp, Probe Sequence
gactccttggaatagctccacagct

SEQ ID NO: 228569 - DNA, 25 bp, Probe Sequence
gactcctttatattcgtactgcact

SEQ ID NO: 228570 - DNA, 25 bp, Probe Sequence
gactccggtcattactgtgtctaca

SEQ ID NO: 228571 - DNA, 25 bp, Probe Sequence
gactgcccgaattagcatggctgat

SEQ ID NO: 228572 - DNA, 25 bp, Probe Sequence
gactccacgacagacgagcagctat

SEQ ID NO: 228573 - DNA, 25 bp, Probe Sequence
gaccaaccatcatctcgaatgtcaa

SEQ ID NO: 228574 - DNA, 25 bp, Probe Sequence
gactcaaacatctacctgaagatct

SEQ ID NO: 228575 - DNA, 25 bp, Probe Sequence
gactccaagccaagagtgccacatc

SEQ ID NO: 228576 - DNA, 25 bp, Probe Sequence
gactaccgccagaatgtctacatcc

SEQ ID NO: 228577 - DNA, 25 bp, Probe Sequence
gactagccacaagtatgttacccag

SEQ ID NO: 228578 - DNA, 25 bp, Probe Sequence
gactacactcaaggatgtgaacctg

SEQ ID NO: 228579 - DNA, 25 bp, Probe Sequence
gactaagtataggcattgtacctga

SEQ ID NO: 228580 - DNA, 25 bp, Probe Sequence
gactaagttaacatacattgcatgt

SEQ ID NO: 228581 - DNA, 25 bp, Probe Sequence
gactagcttcttacagtacatttct

SEQ ID NO: 228582 - DNA, 25 bp, Probe Sequence
gactccttctcagagtaattctgtc

SEQ ID NO: 228583 - DNA, 25 bp, Probe Sequence
gactcactttgctcatgttattgtt

SEQ ID NO: 228584 - DNA, 25 bp, Probe Sequence
gactcatcttttactggtttgaatt

SEQ ID NO: 228585 - DNA, 25 bp, Probe Sequence
gactcttagtgtctgtttctgactt

SEQ ID NO: 228586 - DNA, 25 bp, Probe Sequence
gactctttgtgtgtgactgtttctc

SEQ ID NO: 228587 - DNA, 25 bp, Probe Sequence
gactctttgagcatgctacttaatc

SEQ ID NO: 228588 - DNA, 25 bp, Probe Sequence
gactgcaaataggcatgcttttgaa

SEQ ID NO: 228589 - DNA, 25 bp, Probe Sequence
gactgaacacatccctggttgtaat

SEQ ID NO: 228590 - DNA, 25 bp, Probe Sequence
gactgctacattcactggtaaattc

SEQ ID NO: 228591 - DNA, 25 bp, Probe Sequence
gactgtcctcatcaagcgtaatacc

SEQ ID NO: 228592 - DNA, 25 bp, Probe Sequence
gactgtcctcatcaagcgtaatacc

SEQ ID NO: 228593 - DNA, 25 bp, Probe Sequence
gactcgcccattttggaatgtgacc

SEQ ID NO: 228594 - DNA, 25 bp, Probe Sequence
gagcccattttgtggattgtgtcct

SEQ ID NO: 228595 - DNA, 25 bp, Probe Sequence
gacccagattgttgggcatctagtt

SEQ ID NO: 228596 - DNA, 25 bp, Probe Sequence
gactcacgattgctgaagcctgagc

SEQ ID NO: 228597 - DNA, 25 bp, Probe Sequence
gactacaaatgcctgcaagtgtgga

SEQ ID NO: 228598 - DNA, 25 bp, Probe Sequence
gactgactacattggaagctttgag

SEQ ID NO: 228599 - DNA, 25 bp, Probe Sequence
gactgttactcttaagctttgagaa

SEQ ID NO: 228600 - DNA, 25 bp, Probe Sequence
gactcttcacatgatggaggtatga

SEQ ID NO: 228601 - DNA, 25 bp, Probe Sequence
gactgtgtccatgtgatgatgccct

SEQ ID NO: 228602 - DNA, 25 bp, Probe Sequence
gacgtctgctcactggagatgacac

SEQ ID NO: 228603 - DNA, 25 bp, Probe Sequence
gactgtcgtactggatgtaactagt

SEQ ID NO: 228604 - DNA, 25 bp, Probe Sequence
gactacagaagctgactagagacag

SEQ ID NO: 228605 - DNA, 25 bp, Probe Sequence
gactcacggagctcagagagagaag

SEQ ID NO: 228606 - DNA, 25 bp, Probe Sequence
gactctgggaggtgatgggaatgtt

SEQ ID NO: 228607 - DNA, 25 bp, Probe Sequence
gactctgggagttggtgcaggattt

SEQ ID NO: 228608 - DNA, 25 bp, Probe Sequence
gactctgggcacaatgattgcaggt

SEQ ID NO: 228609 - DNA, 25 bp, Probe Sequence
gactggggactctatgatgggcagc

SEQ ID NO: 228610 - DNA, 25 bp, Probe Sequence
gactgggtggcttagaaacagcgga

SEQ ID NO: 228611 - DNA, 25 bp, Probe Sequence
gactgtggtgtcatctaaaaggcag

SEQ ID NO: 228612 - DNA, 25 bp, Probe Sequence
gactggtgctgtaactcaagcatca

SEQ ID NO: 228613 - DNA, 25 bp, Probe Sequence
gactaatgccatcaggaactcagag

SEQ ID NO: 228614 - DNA, 25 bp, Probe Sequence
gactaatctcagccaaacctgctgc

SEQ ID NO: 228615 - DNA, 25 bp, Probe Sequence
gactgcaactcatgactatcctgat

SEQ ID NO: 228616 - DNA, 25 bp, Probe Sequence
gactcatcgatggtgcctacactga

SEQ ID NO: 228617 - DNA, 25 bp, Probe Sequence
gactctcaagtgacctgcagcaagt

SEQ ID NO: 228618 - DNA, 25 bp, Probe Sequence
gactccactgagacgtggctgagtg

SEQ ID NO: 228619 - DNA, 25 bp, Probe Sequence
gactccacgagttcttttctggtgg

SEQ ID NO: 228620 - DNA, 25 bp, Probe Sequence
gactgcctcgaaatctttttgaacg

SEQ ID NO: 228621 - DNA, 25 bp, Probe Sequence
gactcctccaaggttttgtggaaag

SEQ ID NO: 228622 - DNA, 25 bp, Probe Sequence
gacccaaaccagggtgtgggcaaag

SEQ ID NO: 228623 - DNA, 25 bp, Probe Sequence
gactaaaagcacaggttgtggatta

SEQ ID NO: 228624 - DNA, 25 bp, Probe Sequence
gactcacaaaccattttgtgtattt

SEQ ID NO: 228625 - DNA, 25 bp, Probe Sequence
gactctgtacctattttgtatgtgt

SEQ ID NO: 228626 - DNA, 25 bp, Probe Sequence
gactctgaatgcagacttttgtagc

SEQ ID NO: 228627 - DNA, 25 bp, Probe Sequence
gactctgagatcagtttagtatact

SEQ ID NO: 228628 - DNA, 25 bp, Probe Sequence
gaccggtcaagtttttacgtgaatg

SEQ ID NO: 228629 - DNA, 25 bp, Probe Sequence
gacgtttacaacttttgatctgggt

SEQ ID NO: 228630 - DNA, 25 bp, Probe Sequence
gacgtttacaacttttgatctgggt

SEQ ID NO: 228631 - DNA, 25 bp, Probe Sequence
gacctttgaactggtatggtttggc

SEQ ID NO: 228632 - DNA, 25 bp, Probe Sequence
gacccttcccaaatgggattatggc

SEQ ID NO: 228633 - DNA, 25 bp, Probe Sequence
gactctttcctcacagggaaggcgc

SEQ ID NO: 228634 - DNA, 25 bp, Probe Sequence
gactctggccacccaagggaggtgg

SEQ ID NO: 228635 - DNA, 25 bp, Probe Sequence
gacctggaacctctgggagggctgc

SEQ ID NO: 228636 - DNA, 25 bp, Probe Sequence
gactgggtttctctgtatagtactg

SEQ ID NO: 228637 - DNA, 25 bp, Probe Sequence
gacgggtttctaatcataagaagta

SEQ ID NO: 228638 - DNA, 25 bp, Probe Sequence
gactctgagtttgagctattaaagt

SEQ ID NO: 228639 - DNA, 25 bp, Probe Sequence
gactcatcaattttgtctattaaag

SEQ ID NO: 228640 - DNA, 25 bp, Probe Sequence
gactgctagtgttctgtctaaaaac

SEQ ID NO: 228641 - DNA, 25 bp, Probe Sequence
gactgctacttctttaccaatgaca

SEQ ID NO: 228642 - DNA, 25 bp, Probe Sequence
gactgcagcactatttacgatagca

SEQ ID NO: 228643 - DNA, 25 bp, Probe Sequence
gactgacctttctcaggaatatttg

SEQ ID NO: 228644 - DNA, 25 bp, Probe Sequence
gactgaggttactctggtatttatc

SEQ ID NO: 228645 - DNA, 25 bp, Probe Sequence
gactggagaaactccacgatcttcc

SEQ ID NO: 228646 - DNA, 25 bp, Probe Sequence
gactgggaaaacctcaattgctatt

SEQ ID NO: 228647 - DNA, 25 bp, Probe Sequence
gactgtaaagcaagtccataagctt

SEQ ID NO: 228648 - DNA, 25 bp, Probe Sequence
gactctgtccaaatatacaaagttt

SEQ ID NO: 228649 - DNA, 25 bp, Probe Sequence
gactgtgtccaaatagcactggtgc

SEQ ID NO: 228650 - DNA, 25 bp, Probe Sequence
gactgtcccaaatgccttatgtcaa

SEQ ID NO: 228651 - DNA, 25 bp, Probe Sequence
gactgtcccaaatgccttatgtcaa

SEQ ID NO: 228652 - DNA, 25 bp, Probe Sequence
gactgttgggacagccattttccaa

SEQ ID NO: 228653 - DNA, 25 bp, Probe Sequence
gactgttggggatttcattatatgc

SEQ ID NO: 228654 - DNA, 25 bp, Probe Sequence
gactgggaggtggattccttgtgcc

SEQ ID NO: 228655 - DNA, 25 bp, Probe Sequence
gactggagacgtcgtgtccttgatt

SEQ ID NO: 228656 - DNA, 25 bp, Probe Sequence
gactgtggggtgggcccaggatttc

SEQ ID NO: 228657 - DNA, 25 bp, Probe Sequence
gactgtggggtgggcccaggatttc

SEQ ID NO: 228658 - DNA, 25 bp, Probe Sequence
gactgtgggatgtttgcctgcaaat

SEQ ID NO: 228659 - DNA, 25 bp, Probe Sequence
gactggacggaatgctcgccgattt

SEQ ID NO: 228660 - DNA, 25 bp, Probe Sequence
gacggactgtaattgatagattgat

SEQ ID NO: 228661 - DNA, 25 bp, Probe Sequence
gactaagagtaactgtgtgatctgt

SEQ ID NO: 228662 - DNA, 25 bp, Probe Sequence
gactaaagatgacctctttggtgct

SEQ ID NO: 228663 - DNA, 25 bp, Probe Sequence
gactaaatgatcactttggaggcag

SEQ ID NO: 228664 - DNA, 25 bp, Probe Sequence
gactgtattcaaacttatgagagta

SEQ ID NO: 228665 - DNA, 25 bp, Probe Sequence
gactgctttctaaatctcagtggtt

SEQ ID NO: 228666 - DNA, 25 bp, Probe Sequence
gactggttttgcaacaataggtcta

SEQ ID NO: 228667 - DNA, 25 bp, Probe Sequence
gactgccttttaaattagcggtact

SEQ ID NO: 228668 - DNA, 25 bp, Probe Sequence
gactgctctattttgttgtacggta

SEQ ID NO: 228669 - DNA, 25 bp, Probe Sequence
gacgttcctctgatcttaaggtcac

SEQ ID NO: 228670 - DNA, 25 bp, Probe Sequence
gagcgttcctactttaaagcatgga

SEQ ID NO: 228671 - DNA, 25 bp, Probe Sequence
gacgattttctgccttagagcaagg

SEQ ID NO: 228672 - DNA, 25 bp, Probe Sequence
gacgatctttggcatgatattcagc

SEQ ID NO: 228673 - DNA, 25 bp, Probe Sequence
gactgatttgtacatatttttcata

SEQ ID NO: 228674 - DNA, 25 bp, Probe Sequence
gactgttttccatatgttatactca

SEQ ID NO: 228675 - DNA, 25 bp, Probe Sequence
gacgttactcctctttagacatatt

SEQ ID NO: 228676 - DNA, 25 bp, Probe Sequence
gacggtgattttcgtgtaagaatga

SEQ ID NO: 228677 - DNA, 25 bp, Probe Sequence
gacgtactttgtctgactacaatat

SEQ ID NO: 228678 - DNA, 25 bp, Probe Sequence
gactggccttttctgaaagaatttt

SEQ ID NO: 228679 - DNA, 25 bp, Probe Sequence
gactgggcttagcgtgagcaggcac

SEQ ID NO: 228680 - DNA, 25 bp, Probe Sequence
gactcaggctaaggggtcaggccag

SEQ ID NO: 228681 - DNA, 25 bp, Probe Sequence
gactccccaagcggaatgaggccaa

SEQ ID NO: 228682 - DNA, 25 bp, Probe Sequence
gactccccaagcggaatgaggccaa

SEQ ID NO: 228683 - DNA, 25 bp, Probe Sequence
gactccccaactgaaacaccagaag

SEQ ID NO: 228684 - DNA, 25 bp, Probe Sequence
gactccgaagactgacaatactaaa

SEQ ID NO: 228685 - DNA, 25 bp, Probe Sequence
gactcctacgatccaaccatagaaa

SEQ ID NO: 228686 - DNA, 25 bp, Probe Sequence
gactaatccaactaacctcaaacaa

SEQ ID NO: 228687 - DNA, 25 bp, Probe Sequence
gaccattacaaattaaccaaccaat

SEQ ID NO: 228688 - DNA, 25 bp, Probe Sequence
gagaatttaagtcatcatcaaacta

SEQ ID NO: 228689 - DNA, 25 bp, Probe Sequence
gagaattgtagagttcacccaatcc

SEQ ID NO: 228690 - DNA, 25 bp, Probe Sequence
gagaaatgggttaccccagttgtct

SEQ ID NO: 228691 - DNA, 25 bp, Probe Sequence
gagaaagaggactccccatttgctt

SEQ ID NO: 228692 - DNA, 25 bp, Probe Sequence
gacgaaagagactgtctggcagttg

SEQ ID NO: 228693 - DNA, 25 bp, Probe Sequence
gactgaagacagtggtcaagagact

SEQ ID NO: 228694 - DNA, 25 bp, Probe Sequence
gactgagaactgtagaaagccacac

SEQ ID NO: 228695 - DNA, 25 bp, Probe Sequence
gactcagccacataatgggcccaag

SEQ ID NO: 228696 - DNA, 25 bp, Probe Sequence
gactggcagccatctatggtaccac

SEQ ID NO: 228697 - DNA, 25 bp, Probe Sequence
gactggaggctgaaaggttccctga

SEQ ID NO: 228698 - DNA, 25 bp, Probe Sequence
gactggggtgacaatggcttcttta

SEQ ID NO: 228699 - DNA, 25 bp, Probe Sequence
gactgtgggtcaaatgtttccattt

SEQ ID NO: 228700 - DNA, 25 bp, Probe Sequence
gactgatgtggtagggtaatcttgt

SEQ ID NO: 228701 - DNA, 25 bp, Probe Sequence
gactgcatttgtagctctgtaatcc

SEQ ID NO: 228702 - DNA, 25 bp, Probe Sequence
gactgcaaggctctgcagccaatgc

SEQ ID NO: 228703 - DNA, 25 bp, Probe Sequence
gactcggagatcatgcagcagaagc

SEQ ID NO: 228704 - DNA, 25 bp, Probe Sequence
gactcttgatgatgctctcgaagct

SEQ ID NO: 228705 - DNA, 25 bp, Probe Sequence
gactcactcatgaagcctgctgaag

SEQ ID NO: 228706 - DNA, 25 bp, Probe Sequence
gactcctgagaactgtgctggtgga

SEQ ID NO: 228707 - DNA, 25 bp, Probe Sequence
gactgtgctcgaattgtgggtggtt

SEQ ID NO: 228708 - DNA, 25 bp, Probe Sequence
gactcacactacatgctgggttgtg

SEQ ID NO: 228709 - DNA, 25 bp, Probe Sequence
gactcacctagaggctgggacgtgg

SEQ ID NO: 228710 - DNA, 25 bp, Probe Sequence
gactctccagcatccttggaagtgg

SEQ ID NO: 228711 - DNA, 25 bp, Probe Sequence
gactgtcacacaaggcttgagaagc

SEQ ID NO: 228712 - DNA, 25 bp, Probe Sequence
gactgtgccatggagagtagcagaa

SEQ ID NO: 228713 - DNA, 25 bp, Probe Sequence
gactgctgctatcaggatacctgaa

SEQ ID NO: 228714 - DNA, 25 bp, Probe Sequence
gactctgttccagatactgtacacc

SEQ ID NO: 228715 - DNA, 25 bp, Probe Sequence
gactcattcctcttatactgtaatt

SEQ ID NO: 228716 - DNA, 25 bp, Probe Sequence
gactcatttgctagtaactccctta

SEQ ID NO: 228717 - DNA, 25 bp, Probe Sequence
gactcttgtgctttcatacgcacct

SEQ ID NO: 228718 - DNA, 25 bp, Probe Sequence
gactcgctgttgtctcatgtggagc

SEQ ID NO: 228719 - DNA, 25 bp, Probe Sequence
gactgctgatgtgggcttcattgac

SEQ ID NO: 228720 - DNA, 25 bp, Probe Sequence
gaccagaggggtactatagggttgg

SEQ ID NO: 228721 - DNA, 25 bp, Probe Sequence
gacgggaagcgtacgaagcgggtgg

SEQ ID NO: 228722 - DNA, 25 bp, Probe Sequence
gacgggaaagtgaagcccagccgga

SEQ ID NO: 228723 - DNA, 25 bp, Probe Sequence
gacgggcctgaaggagaccaggggc

SEQ ID NO: 228724 - DNA, 25 bp, Probe Sequence
gactgggacctaagagccagaggct

SEQ ID NO: 228725 - DNA, 25 bp, Probe Sequence
gactgagaagcatcgaggctatagg

SEQ ID NO: 228726 - DNA, 25 bp, Probe Sequence
gacgagaccagaagtggcatgataa

SEQ ID NO: 228727 - DNA, 25 bp, Probe Sequence
gactcatgggcgaggagcatagaca

SEQ ID NO: 228728 - DNA, 25 bp, Probe Sequence
gactcgtcggcaggcaagcgaggca

SEQ ID NO: 228729 - DNA, 25 bp, Probe Sequence
gactgcccaggaatcaagaagtgct

SEQ ID NO: 228730 - DNA, 25 bp, Probe Sequence
gactcctggcagactcacagaattc

SEQ ID NO: 228731 - DNA, 25 bp, Probe Sequence
gactgttctcaaaccaacttcaatc

SEQ ID NO: 228732 - DNA, 25 bp, Probe Sequence
gactgtttattaccagattcacttc

SEQ ID NO: 228733 - DNA, 25 bp, Probe Sequence
gactgcaagaatactggcagttcac

SEQ ID NO: 228734 - DNA, 25 bp, Probe Sequence
gactctagatgatctggcagacttc

SEQ ID NO: 228735 - DNA, 25 bp, Probe Sequence
gactctcaagagcctgtgttcatct

SEQ ID NO: 228736 - DNA, 25 bp, Probe Sequence
gactctcaagagcctgtgttcatct

SEQ ID NO: 228737 - DNA, 25 bp, Probe Sequence
gactgtcaagagcctgcggctacag

SEQ ID NO: 228738 - DNA, 25 bp, Probe Sequence
gactcccgcgtgaagatgtcacaag

SEQ ID NO: 228739 - DNA, 25 bp, Probe Sequence
gactctgcctgcttaattgtgctag

SEQ ID NO: 228740 - DNA, 25 bp, Probe Sequence
gactctcttgcttttttgtgagctc

SEQ ID NO: 228741 - DNA, 25 bp, Probe Sequence
gactcagctggtctattttaccctg

SEQ ID NO: 228742 - DNA, 25 bp, Probe Sequence
gactgaaggtcctaattgctcaccc

SEQ ID NO: 228743 - DNA, 25 bp, Probe Sequence
gactgaactttgtatcatttctggc

SEQ ID NO: 228744 - DNA, 25 bp, Probe Sequence
gactgaactgatagatcgttttaag

SEQ ID NO: 228745 - DNA, 25 bp, Probe Sequence
gactggacatatctcgttctacaat

SEQ ID NO: 228746 - DNA, 25 bp, Probe Sequence
gactgcagaggaaaagtttagagta

SEQ ID NO: 228747 - DNA, 25 bp, Probe Sequence
gacgccaatgttcagtttgggtacg

SEQ ID NO: 228748 - DNA, 25 bp, Probe Sequence
gacctaaggtctgtaattgcaatac

SEQ ID NO: 228749 - DNA, 25 bp, Probe Sequence
gacgtcaaggccggtaatggcccgc

SEQ ID NO: 228750 - DNA, 25 bp, Probe Sequence
gacgtcaaggtggagtatttacggt

SEQ ID NO: 228751 - DNA, 25 bp, Probe Sequence
gacgtcaatggtggagtatttacgg

SEQ ID NO: 228752 - DNA, 25 bp, Probe Sequence
gacgtcacatgggagatttgttttg

SEQ ID NO: 228753 - DNA, 25 bp, Probe Sequence
gacggccatggcaggaagcttttag

SEQ ID NO: 228754 - DNA, 25 bp, Probe Sequence
gacggaaatagagaagcttcagatg

SEQ ID NO: 228755 - DNA, 25 bp, Probe Sequence
gagggacttatagaaggggatttgt

SEQ ID NO: 228756 - DNA, 25 bp, Probe Sequence
gagaaatttgaatggatggggtttt

SEQ ID NO: 228757 - DNA, 25 bp, Probe Sequence
gacctttctgaacaggggcagtttc

SEQ ID NO: 228758 - DNA, 25 bp, Probe Sequence
gacctttataccagaggggctgagt

SEQ ID NO: 228759 - DNA, 25 bp, Probe Sequence
gaccgtttcaacagagaggcttatt

SEQ ID NO: 228760 - DNA, 25 bp, Probe Sequence
gaccgtttcaacagagaggcttatt

SEQ ID NO: 228761 - DNA, 25 bp, Probe Sequence
gatccagttctctcaggacggtaag

SEQ ID NO: 228762 - DNA, 25 bp, Probe Sequence
gactcatgtcttgccaggatggtta

SEQ ID NO: 228763 - DNA, 25 bp, Probe Sequence
gactcgcctatcttaggtagtcatg

SEQ ID NO: 228764 - DNA, 25 bp, Probe Sequence
gactcctcgatcttcagttgagctt

SEQ ID NO: 228765 - DNA, 25 bp, Probe Sequence
gactctctgaggctcattttgcagt

SEQ ID NO: 228766 - DNA, 25 bp, Probe Sequence
gactctggaccagcaattctgagct

SEQ ID NO: 228767 - DNA, 25 bp, Probe Sequence
gactctgctaaaacagtgctctggc

SEQ ID NO: 228768 - DNA, 25 bp, Probe Sequence
gactctgctaaaacagtgctctggc

SEQ ID NO: 228769 - DNA, 25 bp, Probe Sequence
gactgctatatggttcggtaggctg

SEQ ID NO: 228770 - DNA, 25 bp, Probe Sequence
gactctttgcgttggagacgcctgt

SEQ ID NO: 228771 - DNA, 25 bp, Probe Sequence
gactgcttcagggagacacacccgt

SEQ ID NO: 228772 - DNA, 25 bp, Probe Sequence
gactggctcagcgtgtgcctaccct

SEQ ID NO: 228773 - DNA, 25 bp, Probe Sequence
gactggtctgagtgctctagcacct

SEQ ID NO: 228774 - DNA, 25 bp, Probe Sequence
gactggtcttaagctgttcttgcat

SEQ ID NO: 228775 - DNA, 25 bp, Probe Sequence
gactggtcttaagctgttcttgcat

SEQ ID NO: 228776 - DNA, 25 bp, Probe Sequence
gactggtgttaaatgttgtctacag

SEQ ID NO: 228777 - DNA, 25 bp, Probe Sequence
gactgggctttgttgctggttaaaa

SEQ ID NO: 228778 - DNA, 25 bp, Probe Sequence
gactgaagcctgcaggagttaaaaa

SEQ ID NO: 228779 - DNA, 25 bp, Probe Sequence
gactgccaagctccaggatttcaaa

SEQ ID NO: 228780 - DNA, 25 bp, Probe Sequence
gactccaaggaggtgcactataaga

SEQ ID NO: 228781 - DNA, 25 bp, Probe Sequence
gactccagacggacatgcggataag

SEQ ID NO: 228782 - DNA, 25 bp, Probe Sequence
gactctagatgggacacttgacagt

SEQ ID NO: 228783 - DNA, 25 bp, Probe Sequence
gactgcatcggtggacactggtatt

SEQ ID NO: 228784 - DNA, 25 bp, Probe Sequence
gactgctgcctccgaaggagtattt

SEQ ID NO: 228785 - DNA, 25 bp, Probe Sequence
gactctcttcattgccgaggaattt

SEQ ID NO: 228786 - DNA, 25 bp, Probe Sequence
gactctctgtattgcttggtaagct

SEQ ID NO: 228787 - DNA, 25 bp, Probe Sequence
gactctctgctttgtcctgaaagag

SEQ ID NO: 228788 - DNA, 25 bp, Probe Sequence
gactctgctgctcatgggaagacag

SEQ ID NO: 228789 - DNA, 25 bp, Probe Sequence
gactctgctgctcatgggaagaaca

SEQ ID NO: 228790 - DNA, 25 bp, Probe Sequence
gactgcagcatttacggagaagaca

SEQ ID NO: 228791 - DNA, 25 bp, Probe Sequence
gactgcaggatgccggctggaagac

SEQ ID NO: 228792 - DNA, 25 bp, Probe Sequence
gacgaggatggctacaggatgaagt

SEQ ID NO: 228793 - DNA, 25 bp, Probe Sequence
gacgaggatggctacaggatgaagt

SEQ ID NO: 228794 - DNA, 25 bp, Probe Sequence
gactgactgatgcactagtatagca

SEQ ID NO: 228795 - DNA, 25 bp, Probe Sequence
gactggctgtcaaatgagctttcaa

SEQ ID NO: 228796 - DNA, 25 bp, Probe Sequence
gactgatgtcatcttgagctcttca

SEQ ID NO: 228797 - DNA, 25 bp, Probe Sequence
gactgatgtcatcttgagctcttca

SEQ ID NO: 228798 - DNA, 25 bp, Probe Sequence
gactgtgtctgaatcatgtctgtat

SEQ ID NO: 228799 - DNA, 25 bp, Probe Sequence
gactctgtggataagcttgtcattc

SEQ ID NO: 228800 - DNA, 25 bp, Probe Sequence
gactcttgatgtcaccttcagtatc

SEQ ID NO: 228801 - DNA, 25 bp, Probe Sequence
gactccttgttacactgcaaatttt

SEQ ID NO: 228802 - DNA, 25 bp, Probe Sequence
gagctaatgtttgtcctaaattttc

SEQ ID NO: 228803 - DNA, 25 bp, Probe Sequence
gaccaagttgtctcagcagaaagtt

SEQ ID NO: 228804 - DNA, 25 bp, Probe Sequence
gacccagtttccagagagcaggcgg

SEQ ID NO: 228805 - DNA, 25 bp, Probe Sequence
gacgtccttacaactggacaggcgg

SEQ ID NO: 228806 - DNA, 25 bp, Probe Sequence
gacggcctccactagatggtaggga

SEQ ID NO: 228807 - DNA, 25 bp, Probe Sequence
gactgagcctgaactagtgagtgag

SEQ ID NO: 228808 - DNA, 25 bp, Probe Sequence
gactgagctgtgtccaatgattgaa

SEQ ID NO: 228809 - DNA, 25 bp, Probe Sequence
gactgtgtgctgatcagagactgga

SEQ ID NO: 228810 - DNA, 25 bp, Probe Sequence
gaccgacgaggatgactagacagca

SEQ ID NO: 228811 - DNA, 25 bp, Probe Sequence
gaccgacgaggatgactagacagca

SEQ ID NO: 228812 - DNA, 25 bp, Probe Sequence
gactgaacgcagcaagactagaggc

SEQ ID NO: 228813 - DNA, 25 bp, Probe Sequence
gactggatccagcaggacgatgggt

SEQ ID NO: 228814 - DNA, 25 bp, Probe Sequence
gacggtcagcattgaggtaggggtg

SEQ ID NO: 228815 - DNA, 25 bp, Probe Sequence
gactgagctgcatggtagttgggga

SEQ ID NO: 228816 - DNA, 25 bp, Probe Sequence
gactgtctatatagttatggccgga

SEQ ID NO: 228817 - DNA, 25 bp, Probe Sequence
gactgatgttagactttggataaat

SEQ ID NO: 228818 - DNA, 25 bp, Probe Sequence
gactgtgttgtgattcatagtacat

SEQ ID NO: 228819 - DNA, 25 bp, Probe Sequence
gactgagtttcaggttagatgcctc

SEQ ID NO: 228820 - DNA, 25 bp, Probe Sequence
gactgagtcttagggctccagtctc

SEQ ID NO: 228821 - DNA, 25 bp, Probe Sequence
gacggccttagatctctcgccgcca

SEQ ID NO: 228822 - DNA, 25 bp, Probe Sequence
gactggctcaagaatatcctcatgc

SEQ ID NO: 228823 - DNA, 25 bp, Probe Sequence
gactgtcaaggagttctgccagcag

SEQ ID NO: 228824 - DNA, 25 bp, Probe Sequence
gactgaaaaggcacattacagatct

SEQ ID NO: 228825 - DNA, 25 bp, Probe Sequence
gacgaaattacaacactacgacaag

SEQ ID NO: 228826 - DNA, 25 bp, Probe Sequence
gacgaatattacaacgcggcagcat

SEQ ID NO: 228827 - DNA, 25 bp, Probe Sequence
gactggtaaacaactgctgtcagaa

SEQ ID NO: 228828 - DNA, 25 bp, Probe Sequence
gagccttaataaacgtccacagagt

SEQ ID NO: 228829 - DNA, 25 bp, Probe Sequence
gactcctataaaacgaactcaagca

SEQ ID NO: 228830 - DNA, 25 bp, Probe Sequence
gactgccataaagaataaccccagg

SEQ ID NO: 228831 - DNA, 25 bp, Probe Sequence
gactggacaacacagtatgacccca

SEQ ID NO: 228832 - DNA, 25 bp, Probe Sequence
gactgggcaagactcttacgcccca

SEQ ID NO: 228833 - DNA, 25 bp, Probe Sequence
gactggttcgaggtgtacaacgcca

SEQ ID NO: 228834 - DNA, 25 bp, Probe Sequence
gactggttaatgataacaatgcatc

SEQ ID NO: 228835 - DNA, 25 bp, Probe Sequence
gagagtgttacaattaacctagaaa

SEQ ID NO: 228836 - DNA, 25 bp, Probe Sequence
gagcaggaaagtttacccatgaaga

SEQ ID NO: 228837 - DNA, 25 bp, Probe Sequence
gacgggcacatggttaacctggaca

SEQ ID NO: 228838 - DNA, 25 bp, Probe Sequence
gactggtgcagagttacttcctaaa

SEQ ID NO: 228839 - DNA, 25 bp, Probe Sequence
gactgactgcaatatttgtagtaaa

SEQ ID NO: 228840 - DNA, 25 bp, Probe Sequence
gactgagatgaatgtctttactaaa

SEQ ID NO: 228841 - DNA, 25 bp, Probe Sequence
gactgaagatagttttgctgatgat

SEQ ID NO: 228842 - DNA, 25 bp, Probe Sequence
gactgggaagatcttgctagtgcca

SEQ ID NO: 228843 - DNA, 25 bp, Probe Sequence
gactgcaggaactaatggtagacta

SEQ ID NO: 228844 - DNA, 25 bp, Probe Sequence
gactgactgaggtgatggtaggatg

SEQ ID NO: 228845 - DNA, 25 bp, Probe Sequence
gactcctcatggataggtcgggtgt

SEQ ID NO: 228846 - DNA, 25 bp, Probe Sequence
gactccttcgtgatctggggatgtg

SEQ ID NO: 228847 - DNA, 25 bp, Probe Sequence
gactctccatgggagggggagcagt

SEQ ID NO: 228848 - DNA, 25 bp, Probe Sequence
gactcctctgagaaggacgggcagg

SEQ ID NO: 228849 - DNA, 25 bp, Probe Sequence
gactccttggaactgaacatggaga

SEQ ID NO: 228850 - DNA, 25 bp, Probe Sequence
gactccgtggggccaatgaggatga

SEQ ID NO: 228851 - DNA, 25 bp, Probe Sequence
gactctgggctgctggaataggaca

SEQ ID NO: 228852 - DNA, 25 bp, Probe Sequence
gacgtgaggcaactgtggcagggaa

SEQ ID NO: 228853 - DNA, 25 bp, Probe Sequence
gacgcggatgcggcatgtgatcagc

SEQ ID NO: 228854 - DNA, 25 bp, Probe Sequence
gactgctgtgactttgtactgcatg

SEQ ID NO: 228855 - DNA, 25 bp, Probe Sequence
gactgttaccattgaatgagatgga

SEQ ID NO: 228856 - DNA, 25 bp, Probe Sequence
gactgcttcccaatatttatgatga

SEQ ID NO: 228857 - DNA, 25 bp, Probe Sequence
gactgcttgcctcatatttaagctg

SEQ ID NO: 228858 - DNA, 25 bp, Probe Sequence
gactctgaacatttatttccattgc

SEQ ID NO: 228859 - DNA, 25 bp, Probe Sequence
gactctgaacatttatttccattgc

SEQ ID NO: 228860 - DNA, 25 bp, Probe Sequence
gactctgaaaataatgattctccaa

SEQ ID NO: 228861 - DNA, 25 bp, Probe Sequence
gactctgatgataattctgtttctc

SEQ ID NO: 228862 - DNA, 25 bp, Probe Sequence
gactctgatgataattctgtttctc

SEQ ID NO: 228863 - DNA, 25 bp, Probe Sequence
gactggatgtaagctggatctaccc

SEQ ID NO: 228864 - DNA, 25 bp, Probe Sequence
gacgtatgttcgccatagtaaccgc

SEQ ID NO: 228865 - DNA, 25 bp, Probe Sequence
gacgtatgttcccatagtaacgcca

SEQ ID NO: 228866 - DNA, 25 bp, Probe Sequence
gacgtatggtccatagtacccatta

SEQ ID NO: 228867 - DNA, 25 bp, Probe Sequence
gacggcaggtccaaaggacagtaaa

SEQ ID NO: 228868 - DNA, 25 bp, Probe Sequence
gactggcagagacctagggagaaag

SEQ ID NO: 228869 - DNA, 25 bp, Probe Sequence
gacggacgacaaaggacagactagt

SEQ ID NO: 228870 - DNA, 25 bp, Probe Sequence
gacggaggacggagtcttgctctgt

SEQ ID NO: 228871 - DNA, 25 bp, Probe Sequence
gacgcaatggccgtagcgtttacgt

SEQ ID NO: 228872 - DNA, 25 bp, Probe Sequence
gactccattccagtaatggtatcac

SEQ ID NO: 228873 - DNA, 25 bp, Probe Sequence
gactgtcatctctctagggttaaag

SEQ ID NO: 228874 - DNA, 25 bp, Probe Sequence
gatgctgtacccctcaaggatttaa

SEQ ID NO: 228875 - DNA, 25 bp, Probe Sequence
gactgtaaacattccaggtcctgaa

SEQ ID NO: 228876 - DNA, 25 bp, Probe Sequence
gactgtagactttcagcagcaatct

SEQ ID NO: 228877 - DNA, 25 bp, Probe Sequence
gacgttgccgattcaccagcacttg

SEQ ID NO: 228878 - DNA, 25 bp, Probe Sequence
gactgatgcgtgcttcattcgagtt

SEQ ID NO: 228879 - DNA, 25 bp, Probe Sequence
gagctgggtcgactcaagctagttc

SEQ ID NO: 228880 - DNA, 25 bp, Probe Sequence
gactgggtcaagtaagcttatctcc

SEQ ID NO: 228881 - DNA, 25 bp, Probe Sequence
gactgcctgctcaattgaactattc

SEQ ID NO: 228882 - DNA, 25 bp, Probe Sequence
gactggtgccattagacatcttgat

SEQ ID NO: 228883 - DNA, 25 bp, Probe Sequence
gactctggacaatgacatcctgctg

SEQ ID NO: 228884 - DNA, 25 bp, Probe Sequence
gactcgccagctaaaagcctgggcc

SEQ ID NO: 228885 - DNA, 25 bp, Probe Sequence
gactctgaagtaggcaaggctgggc

SEQ ID NO: 228886 - DNA, 25 bp, Probe Sequence
gactcggtgcgggcagggagaatgc

SEQ ID NO: 228887 - DNA, 25 bp, Probe Sequence
gactgcggcgcgaccagaaagaggc

SEQ ID NO: 228888 - DNA, 25 bp, Probe Sequence
gactgtctgggtgagaagccatggc

SEQ ID NO: 228889 - DNA, 25 bp, Probe Sequence
gactgtgtttgtgaaaactgagcat

SEQ ID NO: 228890 - DNA, 25 bp, Probe Sequence
gactgagtgggtgaaacctgagatc

SEQ ID NO: 228891 - DNA, 25 bp, Probe Sequence
gacgaggaggagacgtaccggctct

SEQ ID NO: 228892 - DNA, 25 bp, Probe Sequence
gacgtatgtgggacctagccaggta

SEQ ID NO: 228893 - DNA, 25 bp, Probe Sequence
gactgtgtgatatacctgagccagc

SEQ ID NO: 228894 - DNA, 25 bp, Probe Sequence
gagcggtgatcaaagccgagtactt

SEQ ID NO: 228895 - DNA, 25 bp, Probe Sequence
gacgtggacatccgcaaagacctgt

SEQ ID NO: 228896 - DNA, 25 bp, Probe Sequence
gacgtggacatccgcaaagacctgt

SEQ ID NO: 228897 - DNA, 25 bp, Probe Sequence
gacgtggacatccgcaaagacctgt

SEQ ID NO: 228898 - DNA, 25 bp, Probe Sequence
gacgtgaaccagcaggagttcgtca

SEQ ID NO: 228899 - DNA, 25 bp, Probe Sequence
gacgtgaaccagcaggagttcgtca

SEQ ID NO: 228900 - DNA, 25 bp, Probe Sequence
gacgtgaaccagcaggagttcgtca

SEQ ID NO: 228901 - DNA, 25 bp, Probe Sequence
gactgccaacgaggtggaggccgtc

SEQ ID NO: 228902 - DNA, 25 bp, Probe Sequence
gactgccaacgaggtggaggccgtc

SEQ ID NO: 228903 - DNA, 25 bp, Probe Sequence
gactcctctgcgtggagagggtggg

SEQ ID NO: 228904 - DNA, 25 bp, Probe Sequence
gactccactcaaagagggtgagggc

SEQ ID NO: 228905 - DNA, 25 bp, Probe Sequence
gacccactaataagtttcagcctga

SEQ ID NO: 228906 - DNA, 25 bp, Probe Sequence
gacccaaatgaaatattaacctaag

SEQ ID NO: 228907 - DNA, 25 bp, Probe Sequence
gaccccaaatgactttatacccaat

SEQ ID NO: 228908 - DNA, 25 bp, Probe Sequence
gacccaaaacagctttgtctccaaa

SEQ ID NO: 228909 - DNA, 25 bp, Probe Sequence
gacccaaaaagccatgattgtcctg

SEQ ID NO: 228910 - DNA, 25 bp, Probe Sequence
gactccaaaaatagtgatgttcacc

SEQ ID NO: 228911 - DNA, 25 bp, Probe Sequence
gacccaagacttagttcttgcccta

SEQ ID NO: 228912 - DNA, 25 bp, Probe Sequence
gacccagaggttctttgagtccttt

SEQ ID NO: 228913 - DNA, 25 bp, Probe Sequence
gacccagaggttctttgagtccttt

SEQ ID NO: 228914 - DNA, 25 bp, Probe Sequence
gacgaaggtgtcctcgttggatcct

SEQ ID NO: 228915 - DNA, 25 bp, Probe Sequence
gactgacagctggtccttggaggtc

SEQ ID NO: 228916 - DNA, 25 bp, Probe Sequence
gactgacagctggtccttggaggtc

SEQ ID NO: 228917 - DNA, 25 bp, Probe Sequence
gagctgaagctggattattaaagtg

SEQ ID NO: 228918 - DNA, 25 bp, Probe Sequence
gactgggtctatgaataagaggtgg

SEQ ID NO: 228919 - DNA, 25 bp, Probe Sequence
gacggtgacttcaagatcaaatgtg

SEQ ID NO: 228920 - DNA, 25 bp, Probe Sequence
gactgcgctgcaggttatgaaactt

SEQ ID NO: 228921 - DNA, 25 bp, Probe Sequence
gactgcttgctgcctttaattgtct

SEQ ID NO: 228922 - DNA, 25 bp, Probe Sequence
gactgatcatggctcttgcattttt

SEQ ID NO: 228923 - DNA, 25 bp, Probe Sequence
gactgatcatggctcttgcattttt

SEQ ID NO: 228924 - DNA, 25 bp, Probe Sequence
gactgcacattggtttctgttctct

SEQ ID NO: 228925 - DNA, 25 bp, Probe Sequence
gactgccatgtgttcatcatcttaa

SEQ ID NO: 228926 - DNA, 25 bp, Probe Sequence
gactgccatgtgttcatcatcttaa

SEQ ID NO: 228927 - DNA, 25 bp, Probe Sequence
gactgccatgtgttcatcatcttaa

SEQ ID NO: 228928 - DNA, 25 bp, Probe Sequence
gactgccatgtgttcatcatcttaa

SEQ ID NO: 228929 - DNA, 25 bp, Probe Sequence
gactgccatgtgttcatcatcttaa

SEQ ID NO: 228930 - DNA, 25 bp, Probe Sequence
gactccatggctactgatattagtt

SEQ ID NO: 228931 - DNA, 25 bp, Probe Sequence
gactccattgtgccttactatatat

SEQ ID NO: 228932 - DNA, 25 bp, Probe Sequence
gactgtatttgctataactttattg

SEQ ID NO: 228933 - DNA, 25 bp, Probe Sequence
gacgttttataagcatcattattta

SEQ ID NO: 228934 - DNA, 25 bp, Probe Sequence
gacgttttgtcctcaataattacac

SEQ ID NO: 228935 - DNA, 25 bp, Probe Sequence
gaccacttttcctggattattatcc

SEQ ID NO: 228936 - DNA, 25 bp, Probe Sequence
gactcctgtttattttgctttttat

SEQ ID NO: 228937 - DNA, 25 bp, Probe Sequence
gactccatctcgtttttgtgtttaa

SEQ ID NO: 228938 - DNA, 25 bp, Probe Sequence
gactgcttcatctttttatttttaa

SEQ ID NO: 228939 - DNA, 25 bp, Probe Sequence
gactgcaagcatttttccatctgtg

SEQ ID NO: 228940 - DNA, 25 bp, Probe Sequence
gacggagctgattttcctatggatt

SEQ ID NO: 228941 - DNA, 25 bp, Probe Sequence
gaccaggttcgttcactcatggaaa

SEQ ID NO: 228942 - DNA, 25 bp, Probe Sequence
gactggtgtttgatcacgatgggaa

SEQ ID NO: 228943 - DNA, 25 bp, Probe Sequence
gactggtgtttgatcactatgggaa

SEQ ID NO: 228944 - DNA, 25 bp, Probe Sequence
gactgcagtgggtttttatggggaa

SEQ ID NO: 228945 - DNA, 25 bp, Probe Sequence
gaccgggaagctgatgtatgtgatg

SEQ ID NO: 228946 - DNA, 25 bp, Probe Sequence
gactgcagtggtgcccatgtagttt

SEQ ID NO: 228947 - DNA, 25 bp, Probe Sequence
gactgctgtggactccactgatgag

SEQ ID NO: 228948 - DNA, 25 bp, Probe Sequence
gactgaggagagtccagcctctgat

SEQ ID NO: 228949 - DNA, 25 bp, Probe Sequence
gactgtgaatactgagctgctcggc

SEQ ID NO: 228950 - DNA, 25 bp, Probe Sequence
gactgtttacagaagactcactcac

SEQ ID NO: 228951 - DNA, 25 bp, Probe Sequence
gactgtttcatcttaaccaggcatg

SEQ ID NO: 228952 - DNA, 25 bp, Probe Sequence
gactgggttcagaagaccatagctg

SEQ ID NO: 228953 - DNA, 25 bp, Probe Sequence
gactgggctttggacaatctagagg

SEQ ID NO: 228954 - DNA, 25 bp, Probe Sequence
gactgaggcaggaggatcacttgag

SEQ ID NO: 228955 - DNA, 25 bp, Probe Sequence
gacggttggcatggcgaagctggac

SEQ ID NO: 228956 - DNA, 25 bp, Probe Sequence
gacggttggcatggcgaagctggac

SEQ ID NO: 228957 - DNA, 25 bp, Probe Sequence
gactggtatctgttctgtggggaca

SEQ ID NO: 228958 - DNA, 25 bp, Probe Sequence
gactggagactggttttcggagcaa

SEQ ID NO: 228959 - DNA, 25 bp, Probe Sequence
gactggaggtgctaacctaggaaga

SEQ ID NO: 228960 - DNA, 25 bp, Probe Sequence
gactgtgggctgaacctgaagatgc

SEQ ID NO: 228961 - DNA, 25 bp, Probe Sequence
gactgtgggctgaacctgaagatgc

SEQ ID NO: 228962 - DNA, 25 bp, Probe Sequence
gactgtgggtgaccactctcaactc

SEQ ID NO: 228963 - DNA, 25 bp, Probe Sequence
gactgtaggatatgttcccttgcat

SEQ ID NO: 228964 - DNA, 25 bp, Probe Sequence
gactgatgaaaatgctctttctgga

SEQ ID NO: 228965 - DNA, 25 bp, Probe Sequence
gactgctgaaatccaacttgagctg

SEQ ID NO: 228966 - DNA, 25 bp, Probe Sequence
gactgtaaatgttcactgggtgggt

SEQ ID NO: 228967 - DNA, 25 bp, Probe Sequence
gactgtgaaactttcgggatggtgg

SEQ ID NO: 228968 - DNA, 25 bp, Probe Sequence
gacgtgaaagtctacaaggagttct

SEQ ID NO: 228969 - DNA, 25 bp, Probe Sequence
gactgtacggtcaaaactgagttgc

SEQ ID NO: 228970 - DNA, 25 bp, Probe Sequence
gatttgaccttacctactatttggt

SEQ ID NO: 228971 - DNA, 25 bp, Probe Sequence
gataaacttggcctttctaagtggt

SEQ ID NO: 228972 - DNA, 25 bp, Probe Sequence
gacgatactctgaccgttttagtag

SEQ ID NO: 228973 - DNA, 25 bp, Probe Sequence
gacgatttctgcaggctgtgtaagc

SEQ ID NO: 228974 - DNA, 25 bp, Probe Sequence
gactggttgcgcgtagttgctaaca

SEQ ID NO: 228975 - DNA, 25 bp, Probe Sequence
gactggttgcgcgtagttgctaaca

SEQ ID NO: 228976 - DNA, 25 bp, Probe Sequence
gactggttgcgcgtagttgctaaca

SEQ ID NO: 228977 - DNA, 25 bp, Probe Sequence
gactggcccatggcttttctaatca

SEQ ID NO: 228978 - DNA, 25 bp, Probe Sequence
gactggagcctggtttgcactaaaa

SEQ ID NO: 228979 - DNA, 25 bp, Probe Sequence
gactgaccactagttagactaataa

SEQ ID NO: 228980 - DNA, 25 bp, Probe Sequence
gactgattcattttggagacataca

SEQ ID NO: 228981 - DNA, 25 bp, Probe Sequence
gactgactcagtttgtgtagaatat

SEQ ID NO: 228982 - DNA, 25 bp, Probe Sequence
gactgactcacctgatggcagcagt

SEQ ID NO: 228983 - DNA, 25 bp, Probe Sequence
gactgattacactgaggtgaggcta

SEQ ID NO: 228984 - DNA, 25 bp, Probe Sequence
gactgaagaccaggcggtggagctg

SEQ ID NO: 228985 - DNA, 25 bp, Probe Sequence
gacgaatgtaacctgcgtggtgatg

SEQ ID NO: 228986 - DNA, 25 bp, Probe Sequence
gacgaggctaaggccgtggatatcc

SEQ ID NO: 228987 - DNA, 25 bp, Probe Sequence
gacgtggtctagaccagggctgctc

SEQ ID NO: 228988 - DNA, 25 bp, Probe Sequence
gacgctggttcgagagtacttttcc

SEQ ID NO: 228989 - DNA, 25 bp, Probe Sequence
gacgctggttcgagagtacttttcc

SEQ ID NO: 228990 - DNA, 25 bp, Probe Sequence
gacctcgtgtcccaaaagactttgc

SEQ ID NO: 228991 - DNA, 25 bp, Probe Sequence
gaccacttaccgtcagtaactttgc

SEQ ID NO: 228992 - DNA, 25 bp, Probe Sequence
gaccacttgactctctgtaaaatgg

SEQ ID NO: 228993 - DNA, 25 bp, Probe Sequence
gacccttggtctgtgacaaggatgg

SEQ ID NO: 228994 - DNA, 25 bp, Probe Sequence
gaccctggaggcagaaatagttacc

SEQ ID NO: 228995 - DNA, 25 bp, Probe Sequence
gacgctcgtgggggaaacatactaa

SEQ ID NO: 228996 - DNA, 25 bp, Probe Sequence
gacccgttgcactgaacaagaccaa

SEQ ID NO: 228997 - DNA, 25 bp, Probe Sequence
gacggctcttctttgaaatgaggtc

SEQ ID NO: 228998 - DNA, 25 bp, Probe Sequence
gactggttgactcttcacatgatgg

SEQ ID NO: 228999 - DNA, 25 bp, Probe Sequence
gactgtgtgtgtttgctaactgtgg

SEQ ID NO: 229000 - DNA, 25 bp, Probe Sequence
gactgctgtgattcagtgaaccttg

SEQ ID NO: 229001 - DNA, 25 bp, Probe Sequence
gactgcggtgaagaatgctcagatg

SEQ ID NO: 229002 - DNA, 25 bp, Probe Sequence
gactgggctaagggatgctcagatg

SEQ ID NO: 229003 - DNA, 25 bp, Probe Sequence
gactgtgagctcaagagcaggccgt

SEQ ID NO: 229004 - DNA, 25 bp, Probe Sequence
gactgagacctgctgcagggcgtgg

SEQ ID NO: 229005 - DNA, 25 bp, Probe Sequence
gacgaacctacgaagcagagatctg

SEQ ID NO: 229006 - DNA, 25 bp, Probe Sequence
gactgcccacattcatgaagaagat

SEQ ID NO: 229007 - DNA, 25 bp, Probe Sequence
gactgctgtagttcagaagaggttt

SEQ ID NO: 229008 - DNA, 25 bp, Probe Sequence
gactgctgtacatcaaggacagatt

SEQ ID NO: 229009 - DNA, 25 bp, Probe Sequence
gactgcttgtcccagaagcaattta

SEQ ID NO: 229010 - DNA, 25 bp, Probe Sequence
gactgctgaacaggaaacctctttg

SEQ ID NO: 229011 - DNA, 25 bp, Probe Sequence
gactgttacaggaaacaccctttag

SEQ ID NO: 229012 - DNA, 25 bp, Probe Sequence
gacgttgctaggaaactgcctttta

SEQ ID NO: 229013 - DNA, 25 bp, Probe Sequence
gacgacttatccaaacaggctgttg

SEQ ID NO: 229014 - DNA, 25 bp, Probe Sequence
gacgattgttctccataaggcattt

SEQ ID NO: 229015 - DNA, 25 bp, Probe Sequence
gactgtttctcatgtttgaatgtgt

SEQ ID NO: 229016 - DNA, 25 bp, Probe Sequence
gactgattactatgtcttgcccttc

SEQ ID NO: 229017 - DNA, 25 bp, Probe Sequence
gactgaatcacatagattctcctcc

SEQ ID NO: 229018 - DNA, 25 bp, Probe Sequence
gactgcaacaactacatctatattt

SEQ ID NO: 229019 - DNA, 25 bp, Probe Sequence
gactgcctcagtgacacaatttatc

SEQ ID NO: 229020 - DNA, 25 bp, Probe Sequence
gactgacaagctgacacctattcac

SEQ ID NO: 229021 - DNA, 25 bp, Probe Sequence
gactggcagacacacactttgtaca

SEQ ID NO: 229022 - DNA, 25 bp, Probe Sequence
gacgtggtcagccacctcaataaaa

SEQ ID NO: 229023 - DNA, 25 bp, Probe Sequence
gacgtggcacgcactgccactataa

SEQ ID NO: 229024 - DNA, 25 bp, Probe Sequence
gactggagcgtaactgccacttaag

SEQ ID NO: 229025 - DNA, 25 bp, Probe Sequence
gactggtatataagcgcctacataa

SEQ ID NO: 229026 - DNA, 25 bp, Probe Sequence
gaccgctacttagcctcaagacaac

SEQ ID NO: 229027 - DNA, 25 bp, Probe Sequence
gacctttactacccaggagaccatc

SEQ ID NO: 229028 - DNA, 25 bp, Probe Sequence
gagccaaacccaggcaagggtcctc

SEQ ID NO: 229029 - DNA, 25 bp, Probe Sequence
gactgcagcaaaccaggcaagggat

SEQ ID NO: 229030 - DNA, 25 bp, Probe Sequence
gactgagaccacggagaatcgcttg

SEQ ID NO: 229031 - DNA, 25 bp, Probe Sequence
gactgacaccacagatgacagcccc

SEQ ID NO: 229032 - DNA, 25 bp, Probe Sequence
gactgacctcagagagatcagggac

SEQ ID NO: 229033 - DNA, 25 bp, Probe Sequence
gactgactctaattgaatctgcgtg

SEQ ID NO: 229034 - DNA, 25 bp, Probe Sequence
gactgatctcaaatctgaactgcag

SEQ ID NO: 229035 - DNA, 25 bp, Probe Sequence
gactgatccaagatgacactgcagg

SEQ ID NO: 229036 - DNA, 25 bp, Probe Sequence
gacgctcacatcgtctgacttgagt

SEQ ID NO: 229037 - DNA, 25 bp, Probe Sequence
gactgctcactgttcatattatagg

SEQ ID NO: 229038 - DNA, 25 bp, Probe Sequence
gactgcacagagttcactgaaacgg

SEQ ID NO: 229039 - DNA, 25 bp, Probe Sequence
gactgacaagacgctagtcctgctg

SEQ ID NO: 229040 - DNA, 25 bp, Probe Sequence
gactgacaagaagctcccagatgct

SEQ ID NO: 229041 - DNA, 25 bp, Probe Sequence
gactggcacaagttctgcctcaagt

SEQ ID NO: 229042 - DNA, 25 bp, Probe Sequence
gactgagccaatcctgccagaaatt

SEQ ID NO: 229043 - DNA, 25 bp, Probe Sequence
gacggtctcatgtaccagaaattcc

SEQ ID NO: 229044 - DNA, 25 bp, Probe Sequence
gacgcagtacgtccgagacacagtc

SEQ ID NO: 229045 - DNA, 25 bp, Probe Sequence
gacgcagtacgtccgagacacagtc

SEQ ID NO: 229046 - DNA, 25 bp, Probe Sequence
gactggtacgacagcgaccagatca

SEQ ID NO: 229047 - DNA, 25 bp, Probe Sequence
gactgggacgtagcgacggtccatc

SEQ ID NO: 229048 - DNA, 25 bp, Probe Sequence
gactgggacttaaccaaggtcttgg

SEQ ID NO: 229049 - DNA, 25 bp, Probe Sequence
gacgaccactttgccaaagctctgg

SEQ ID NO: 229050 - DNA, 25 bp, Probe Sequence
gacgactcatttgctagtaactccc

SEQ ID NO: 229051 - DNA, 25 bp, Probe Sequence
gacgccttactggcaatgcttccac

SEQ ID NO: 229052 - DNA, 25 bp, Probe Sequence
gactgaattttgtcaagtatcacat

SEQ ID NO: 229053 - DNA, 25 bp, Probe Sequence
gactgatttccttagatgtctcaag

SEQ ID NO: 229054 - DNA, 25 bp, Probe Sequence
gactgctttactttgatgtatcata

SEQ ID NO: 229055 - DNA, 25 bp, Probe Sequence
gactgtcctacttggcagtacatct

SEQ ID NO: 229056 - DNA, 25 bp, Probe Sequence
gactgattcggatggatgccagcac

SEQ ID NO: 229057 - DNA, 25 bp, Probe Sequence
gactgaagccagaacagtgccacac

SEQ ID NO: 229058 - DNA, 25 bp, Probe Sequence
gactgatggcaaaaagatggcagac

SEQ ID NO: 229059 - DNA, 25 bp, Probe Sequence
gacgattgactcagcagaggcgccc

SEQ ID NO: 229060 - DNA, 25 bp, Probe Sequence
gacgtcatgacggtaatgcccgcct

SEQ ID NO: 229061 - DNA, 25 bp, Probe Sequence
gttgtaagtgtttaccaagccgttg

SEQ ID NO: 229062 - DNA, 25 bp, Probe Sequence
gttgatacggttgactccgggattt

SEQ ID NO: 229063 - DNA, 25 bp, Probe Sequence
gtagagcaccgaaaaccacgaggaa

SEQ ID NO: 229064 - DNA, 25 bp, Probe Sequence
gatcgaccgcgacaacaacaagtgt

SEQ ID NO: 229065 - DNA, 25 bp, Probe Sequence
gacgtcaccaagaaaacatgcaact

SEQ ID NO: 229066 - DNA, 25 bp, Probe Sequence
gacgtatctgctatgaaaatccaca

SEQ ID NO: 229067 - DNA, 25 bp, Probe Sequence
gactgtatatgtttaataactcacc

SEQ ID NO: 229068 - DNA, 25 bp, Probe Sequence
gactgatttggttgacagaactccc

SEQ ID NO: 229069 - DNA, 25 bp, Probe Sequence
gacgtacttggctacagatttctgc

SEQ ID NO: 229070 - DNA, 25 bp, Probe Sequence
gactgtgtttggttacattttccaa

SEQ ID NO: 229071 - DNA, 25 bp, Probe Sequence
gacctgttttgattttggtcccaca

SEQ ID NO: 229072 - DNA, 25 bp, Probe Sequence
gagccatgtgttcagttgtggacct

SEQ ID NO: 229073 - DNA, 25 bp, Probe Sequence
gacctggtgtcaggggtggtcctat

SEQ ID NO: 229074 - DNA, 25 bp, Probe Sequence
gagccggattcaccgtttggctcga

SEQ ID NO: 229075 - DNA, 25 bp, Probe Sequence
gacgggatctagagtcttgtctcca

SEQ ID NO: 229076 - DNA, 25 bp, Probe Sequence
gacgagcgcaaaagcgccttctcgc

SEQ ID NO: 229077 - DNA, 25 bp, Probe Sequence
gacgggagatgaaggccaaggcagc

SEQ ID NO: 229078 - DNA, 25 bp, Probe Sequence
gacgaggagaacatccaggtcctga

SEQ ID NO: 229079 - DNA, 25 bp, Probe Sequence
gacgaggaggacgcgagtgtcaccg

SEQ ID NO: 229080 - DNA, 25 bp, Probe Sequence
gactgtgatgaggagccccagttcc

SEQ ID NO: 229081 - DNA, 25 bp, Probe Sequence
gactgtgtgacagaaccgtatcact

SEQ ID NO: 229082 - DNA, 25 bp, Probe Sequence
gactgatctcaataaactgtttgct

SEQ ID NO: 229083 - DNA, 25 bp, Probe Sequence
gaccctaactgttcactgtttgtgt

SEQ ID NO: 229084 - DNA, 25 bp, Probe Sequence
gacccatgaacattcctttggtatc

SEQ ID NO: 229085 - DNA, 25 bp, Probe Sequence
gacgccataagcatgtttctgggtg

SEQ ID NO: 229086 - DNA, 25 bp, Probe Sequence
gactggcaaagtcttttggatgggt

SEQ ID NO: 229087 - DNA, 25 bp, Probe Sequence
gactgagtacgttgtgcatttggtg

SEQ ID NO: 229088 - DNA, 25 bp, Probe Sequence
gactgaatacgactgtgaatttgca

SEQ ID NO: 229089 - DNA, 25 bp, Probe Sequence
gactgaaatcgacgtatattctagg

SEQ ID NO: 229090 - DNA, 25 bp, Probe Sequence
gaccaacctgacctaacctaggagg

SEQ ID NO: 229091 - DNA, 25 bp, Probe Sequence
gaccaacctggcattacagttggcc

SEQ ID NO: 229092 - DNA, 25 bp, Probe Sequence
gacccacctgccagtacagggcagc

SEQ ID NO: 229093 - DNA, 25 bp, Probe Sequence
gacggaaagtccgtgacagggaccg

SEQ ID NO: 229094 - DNA, 25 bp, Probe Sequence
gactggaatgggacccacgtggagt

SEQ ID NO: 229095 - DNA, 25 bp, Probe Sequence
gactggcaagggaggaggctgagca

SEQ ID NO: 229096 - DNA, 25 bp, Probe Sequence
gactggcaagggaggaggctgagca

SEQ ID NO: 229097 - DNA, 25 bp, Probe Sequence
gactggaaggtggtggacgatgtga

SEQ ID NO: 229098 - DNA, 25 bp, Probe Sequence
gacggattgctgctgggtcatgatt

SEQ ID NO: 229099 - DNA, 25 bp, Probe Sequence
gactgagagcgccaagggtctttgc

SEQ ID NO: 229100 - DNA, 25 bp, Probe Sequence
gactgagatccaccagggtttccag

SEQ ID NO: 229101 - DNA, 25 bp, Probe Sequence
gactgataccagactaactttccac

SEQ ID NO: 229102 - DNA, 25 bp, Probe Sequence
gacgaagaaggcgaaagttactcca

SEQ ID NO: 229103 - DNA, 25 bp, Probe Sequence
gacgaactaacagaagtagccttca

SEQ ID NO: 229104 - DNA, 25 bp, Probe Sequence
gacgacctacccgatagatgagacc

SEQ ID NO: 229105 - DNA, 25 bp, Probe Sequence
gacggccgaggtgcggatgcgcacc

SEQ ID NO: 229106 - DNA, 25 bp, Probe Sequence
gaccgccggcgagcggagtgaacaa

SEQ ID NO: 229107 - DNA, 25 bp, Probe Sequence
gacgaccggctcaacaaggttatca

SEQ ID NO: 229108 - DNA, 25 bp, Probe Sequence
gacgaccggctcaacaaggttatca

SEQ ID NO: 229109 - DNA, 25 bp, Probe Sequence
gacgaccggctcaacaaggttatca

SEQ ID NO: 229110 - DNA, 25 bp, Probe Sequence
gactgacgcgagcagccaaggtgtt

SEQ ID NO: 229111 - DNA, 25 bp, Probe Sequence
gacgcagggcggcacatgagtgttt

SEQ ID NO: 229112 - DNA, 25 bp, Probe Sequence
gacgagctgcaggtggggaatgttc

SEQ ID NO: 229113 - DNA, 25 bp, Probe Sequence
gacgtgctgtaggccggaatgttac

SEQ ID NO: 229114 - DNA, 25 bp, Probe Sequence
gactgtggatacgttgaaatgtttt

SEQ ID NO: 229115 - DNA, 25 bp, Probe Sequence
gactgggcacactcatgccaagttt

SEQ ID NO: 229116 - DNA, 25 bp, Probe Sequence
gactgggaattcctgctaagtgtgg

SEQ ID NO: 229117 - DNA, 25 bp, Probe Sequence
gacgtgatgggtcattaaggtggga

SEQ ID NO: 229118 - DNA, 25 bp, Probe Sequence
gacggatggagcccttcagggctgg

SEQ ID NO: 229119 - DNA, 25 bp, Probe Sequence
gactgtatagcagaaccctggctgg

SEQ ID NO: 229120 - DNA, 25 bp, Probe Sequence
gactgtatagcagaaccctggctgg

SEQ ID NO: 229121 - DNA, 25 bp, Probe Sequence
gactggatctctgaaacctgggtga

SEQ ID NO: 229122 - DNA, 25 bp, Probe Sequence
gactggagtttcacagcctggagaa

SEQ ID NO: 229123 - DNA, 25 bp, Probe Sequence
gactgtgagcatctgaccacttgga

SEQ ID NO: 229124 - DNA, 25 bp, Probe Sequence
gactgaggcatcacatgccttctgc

SEQ ID NO: 229125 - DNA, 25 bp, Probe Sequence
gagctgggcatccgcaccgtagcca

SEQ ID NO: 229126 - DNA, 25 bp, Probe Sequence
gactgtggatctcactggaagctat

SEQ ID NO: 229127 - DNA, 25 bp, Probe Sequence
gactgtcagtcttattggtgcttat

SEQ ID NO: 229128 - DNA, 25 bp, Probe Sequence
gactgtcattcttagtttgctgcca

SEQ ID NO: 229129 - DNA, 25 bp, Probe Sequence
gactgtcatgtctcagtgtctatct

SEQ ID NO: 229130 - DNA, 25 bp, Probe Sequence
gactgtcagtgcctagtcactattt

SEQ ID NO: 229131 - DNA, 25 bp, Probe Sequence
gacgtcaatgtgttgtagtatttcc

SEQ ID NO: 229132 - DNA, 25 bp, Probe Sequence
gacctagagtttgttcagttccacc

SEQ ID NO: 229133 - DNA, 25 bp, Probe Sequence
gaccaactctttgtataacctacct

SEQ ID NO: 229134 - DNA, 25 bp, Probe Sequence
gaccacctgtttgattacagttgac

SEQ ID NO: 229135 - DNA, 25 bp, Probe Sequence
gacccacgtctacatgtacgtgttc

SEQ ID NO: 229136 - DNA, 25 bp, Probe Sequence
gaccgagcattttccaggtcggacc

SEQ ID NO: 229137 - DNA, 25 bp, Probe Sequence
gactggaatctgaaacatggccggg

SEQ ID NO: 229138 - DNA, 25 bp, Probe Sequence
gactgggttctatagatgccatggg

SEQ ID NO: 229139 - DNA, 25 bp, Probe Sequence
gactggactcattcagggagctctg

SEQ ID NO: 229140 - DNA, 25 bp, Probe Sequence
gactggacatcattggatggaccgc

SEQ ID NO: 229141 - DNA, 25 bp, Probe Sequence
gacggacatagtcgtggatcactac

SEQ ID NO: 229142 - DNA, 25 bp, Probe Sequence
gactggatcaatgtgggtcagctac

SEQ ID NO: 229143 - DNA, 25 bp, Probe Sequence
gacgatcataatactggtgtcggac

SEQ ID NO: 229144 - DNA, 25 bp, Probe Sequence
gacgatgtcgataccaagaagcaga

SEQ ID NO: 229145 - DNA, 25 bp, Probe Sequence
gacggtgcaacccaaggactgaggg

SEQ ID NO: 229146 - DNA, 25 bp, Probe Sequence
gactggcatcattacacaaggagct

SEQ ID NO: 229147 - DNA, 25 bp, Probe Sequence
gactggtatatcttcatcagtgacg

SEQ ID NO: 229148 - DNA, 25 bp, Probe Sequence
gactgagatgttgcctgatggatgg

SEQ ID NO: 229149 - DNA, 25 bp, Probe Sequence
gactgggatgccgctagtgaggctg

SEQ ID NO: 229150 - DNA, 25 bp, Probe Sequence
gactgatggagcccctgggggtgtg

SEQ ID NO: 229151 - DNA, 25 bp, Probe Sequence
gatctgtgaacccctggggggctat

SEQ ID NO: 229152 - DNA, 25 bp, Probe Sequence
gactgtgatgactgggagagcgggc

SEQ ID NO: 229153 - DNA, 25 bp, Probe Sequence
gaccgtgagttcctagagcttggct

SEQ ID NO: 229154 - DNA, 25 bp, Probe Sequence
gacgtctggttcaaagagttggata

SEQ ID NO: 229155 - DNA, 25 bp, Probe Sequence
gacgtcctgctcattggagttggct

SEQ ID NO: 229156 - DNA, 25 bp, Probe Sequence
gactgggtcctttggagttactgca

SEQ ID NO: 229157 - DNA, 25 bp, Probe Sequence
gactgtgctgtcgttaagagctttc

SEQ ID NO: 229158 - DNA, 25 bp, Probe Sequence
gacgtcttcctgtatagagcgtacc

SEQ ID NO: 229159 - DNA, 25 bp, Probe Sequence
gacgtttgccatgagggctgttccg

SEQ ID NO: 229160 - DNA, 25 bp, Probe Sequence
gactgttggccacagcgtggtgtct

SEQ ID NO: 229161 - DNA, 25 bp, Probe Sequence
gactgtgggccacgagcaggaggaa

SEQ ID NO: 229162 - DNA, 25 bp, Probe Sequence
gacgcgtggtagcgagtaggcacag

SEQ ID NO: 229163 - DNA, 25 bp, Probe Sequence
gacgttcatggacgggtaaatggcc

SEQ ID NO: 229164 - DNA, 25 bp, Probe Sequence
gacgtggcatctgaggtgtacaagg

SEQ ID NO: 229165 - DNA, 25 bp, Probe Sequence
gactggatgacttcacctgaacaag

SEQ ID NO: 229166 - DNA, 25 bp, Probe Sequence
gactggccactggcaccataacatg

SEQ ID NO: 229167 - DNA, 25 bp, Probe Sequence
gactgatgatgtcccatctaaacag

SEQ ID NO: 229168 - DNA, 25 bp, Probe Sequence
gacgatgccatgctcttaaaaggaa

SEQ ID NO: 229169 - DNA, 25 bp, Probe Sequence
gacggccaggtcatcaccattggca

SEQ ID NO: 229170 - DNA, 25 bp, Probe Sequence
gacgggccgtatacctgattggtgt

SEQ ID NO: 229171 - DNA, 25 bp, Probe Sequence
gacgggccgtatacctgattggtgt

SEQ ID NO: 229172 - DNA, 25 bp, Probe Sequence
gacgtgaggggaagcctggatctgt

SEQ ID NO: 229173 - DNA, 25 bp, Probe Sequence
gacggagacgggatgctggacctca

SEQ ID NO: 229174 - DNA, 25 bp, Probe Sequence
gactggagacagggatgatggagag

SEQ ID NO: 229175 - DNA, 25 bp, Probe Sequence
gactgatagaaggtttgatgaagat

SEQ ID NO: 229176 - DNA, 25 bp, Probe Sequence
gacgatagtgcagctttgggtgatc

SEQ ID NO: 229177 - DNA, 25 bp, Probe Sequence
gactgtggtgtctttgctgagggtc

SEQ ID NO: 229178 - DNA, 25 bp, Probe Sequence
gacgtgaatgtctcagcgaggtgta

SEQ ID NO: 229179 - DNA, 25 bp, Probe Sequence
gacggaagtcattagaatggcttgt

SEQ ID NO: 229180 - DNA, 25 bp, Probe Sequence
gacggaacatgtccagtatggccta

SEQ ID NO: 229181 - DNA, 25 bp, Probe Sequence
gacggaacatgtccagtatggccta

SEQ ID NO: 229182 - DNA, 25 bp, Probe Sequence
gacggaagcctgatcatagacatta

SEQ ID NO: 229183 - DNA, 25 bp, Probe Sequence
gacgagaacctggccttgaacgagt

SEQ ID NO: 229184 - DNA, 25 bp, Probe Sequence
gactggagaaactcactaacagagt

SEQ ID NO: 229185 - DNA, 25 bp, Probe Sequence
gacgcggagaacaaactgaacgaca

SEQ ID NO: 229186 - DNA, 25 bp, Probe Sequence
gacgcggaagactataagccccagc

SEQ ID NO: 229187 - DNA, 25 bp, Probe Sequence
gacggagaagcacaggtccttcacc

SEQ ID NO: 229188 - DNA, 25 bp, Probe Sequence
gacggggagagatgaacccttcagc

SEQ ID NO: 229189 - DNA, 25 bp, Probe Sequence
gacggggtggtggtgaccatcaaca

SEQ ID NO: 229190 - DNA, 25 bp, Probe Sequence
gacgggactgggagacgacaggaat

SEQ ID NO: 229191 - DNA, 25 bp, Probe Sequence
gacgggactgcggaggaaggaggac

SEQ ID NO: 229192 - DNA, 25 bp, Probe Sequence
gacggagcacctgagatgtgggagg

SEQ ID NO: 229193 - DNA, 25 bp, Probe Sequence
gaccctgagcctgaaggggaggcgg

SEQ ID NO: 229194 - DNA, 25 bp, Probe Sequence
gacggtggcgcgattgggacagtcg

SEQ ID NO: 229195 - DNA, 25 bp, Probe Sequence
gacgggggcaagatgcccaagtgga

SEQ ID NO: 229196 - DNA, 25 bp, Probe Sequence
gactggggtgaggcagggtcaagtg

SEQ ID NO: 229197 - DNA, 25 bp, Probe Sequence
gacggggctatcctggacaaaggtc

SEQ ID NO: 229198 - DNA, 25 bp, Probe Sequence
gagagtggcgttgcttactatgtgg

SEQ ID NO: 229199 - DNA, 25 bp, Probe Sequence
gagacataacctgcttaccaatgcc

SEQ ID NO: 229200 - DNA, 25 bp, Probe Sequence
gagacataacctgcttaccaatgcc

SEQ ID NO: 229201 - DNA, 25 bp, Probe Sequence
gagactaagggcacttcctgaggtt

SEQ ID NO: 229202 - DNA, 25 bp, Probe Sequence
gacccaagggcagctggttctggtc

SEQ ID NO: 229203 - DNA, 25 bp, Probe Sequence
gacgcccgaagcacagtggacggtc

SEQ ID NO: 229204 - DNA, 25 bp, Probe Sequence
gacggccgctacacgtgtacggccg

SEQ ID NO: 229205 - DNA, 25 bp, Probe Sequence
gacgagccgggaaaatacacggccg

SEQ ID NO: 229206 - DNA, 25 bp, Probe Sequence
gacggccgtggaactattccaagcc

SEQ ID NO: 229207 - DNA, 25 bp, Probe Sequence
gacctgccgtgatatcgttaaagaa

SEQ ID NO: 229208 - DNA, 25 bp, Probe Sequence
gacggcggaatcccgctgtaagctg

SEQ ID NO: 229209 - DNA, 25 bp, Probe Sequence
gactggcaacaagagccctgaagtg

SEQ ID NO: 229210 - DNA, 25 bp, Probe Sequence
gactggcacaaagaaccaacttctg

SEQ ID NO: 229211 - DNA, 25 bp, Probe Sequence
gacgtaagcataaaaccatgtcttt

SEQ ID NO: 229212 - DNA, 25 bp, Probe Sequence
gacgcaaaacgaaaatcatgtcttt

SEQ ID NO: 229213 - DNA, 25 bp, Probe Sequence
gacgaagaaggatccctgtttgtgg

SEQ ID NO: 229214 - DNA, 25 bp, Probe Sequence
gacgaagggaacgtcatcgtttgga

SEQ ID NO: 229215 - DNA, 25 bp, Probe Sequence
gaccgaggtgaatgtgtccctgggg

SEQ ID NO: 229216 - DNA, 25 bp, Probe Sequence
gacctaattgactgcttgtcccaga

SEQ ID NO: 229217 - DNA, 25 bp, Probe Sequence
gacgggattgaagctgtacccaatt

SEQ ID NO: 229218 - DNA, 25 bp, Probe Sequence
gacgtgagtctgagtctgatccctc

SEQ ID NO: 229219 - DNA, 25 bp, Probe Sequence
gacgtagtcgttgtcattccttttt

SEQ ID NO: 229220 - DNA, 25 bp, Probe Sequence
gactgtattctgtgtattattcttt

SEQ ID NO: 229221 - DNA, 25 bp, Probe Sequence
gagcagtttcaacctaattttctta

SEQ ID NO: 229222 - DNA, 25 bp, Probe Sequence
gacgtcttcaatgttttttccattc

SEQ ID NO: 229223 - DNA, 25 bp, Probe Sequence
gacgttcagctagatttgttcccat

SEQ ID NO: 229224 - DNA, 25 bp, Probe Sequence
gacgttgcctttaatatctgttggg

SEQ ID NO: 229225 - DNA, 25 bp, Probe Sequence
gactgtctggcagttgcctatgttt

SEQ ID NO: 229226 - DNA, 25 bp, Probe Sequence
gactgtcagcagattcctttacttt

SEQ ID NO: 229227 - DNA, 25 bp, Probe Sequence
gacgattgcagacttgcagtttaag

SEQ ID NO: 229228 - DNA, 25 bp, Probe Sequence
gactgtatcatgttcggtttaataa

SEQ ID NO: 229229 - DNA, 25 bp, Probe Sequence
gacgtatcatggcgtgtttgtcaac

SEQ ID NO: 229230 - DNA, 25 bp, Probe Sequence
gacgttcattgatctggttatccag

SEQ ID NO: 229231 - DNA, 25 bp, Probe Sequence
gacgtttctgcatttggactgaaag

SEQ ID NO: 229232 - DNA, 25 bp, Probe Sequence
gaccttttggatgggactgcaactc

SEQ ID NO: 229233 - DNA, 25 bp, Probe Sequence
gacctgtggctccaaggaatcttcc

SEQ ID NO: 229234 - DNA, 25 bp, Probe Sequence
gacctaggtcgcggcgacatggcca

SEQ ID NO: 229235 - DNA, 25 bp, Probe Sequence
gacgtaaggcgtggagacagctcca

SEQ ID NO: 229236 - DNA, 25 bp, Probe Sequence
gacgttaaagtgctgactgcctgcg

SEQ ID NO: 229237 - DNA, 25 bp, Probe Sequence
gacgttaatttgggtctttgtcctg

SEQ ID NO: 229238 - DNA, 25 bp, Probe Sequence
gacggtcaatggggagtttgttttg

SEQ ID NO: 229239 - DNA, 25 bp, Probe Sequence
gacggtgaatggaagacacttacct

SEQ ID NO: 229240 - DNA, 25 bp, Probe Sequence
gactggtgatatcgtgatgtaccta

SEQ ID NO: 229241 - DNA, 25 bp, Probe Sequence
gactgggatactaataatcagctag

SEQ ID NO: 229242 - DNA, 25 bp, Probe Sequence
gactgtggtcctgaaagcagcaaga

SEQ ID NO: 229243 - DNA, 25 bp, Probe Sequence
gactgtcctctacagaaggaagcac

SEQ ID NO: 229244 - DNA, 25 bp, Probe Sequence
gaccctcctactgttggcagtgatc

SEQ ID NO: 229245 - DNA, 25 bp, Probe Sequence
gatcctcaccccagtttggtgtaac

SEQ ID NO: 229246 - DNA, 25 bp, Probe Sequence
gacctgacccctagtcattggttac

SEQ ID NO: 229247 - DNA, 25 bp, Probe Sequence
gacggttccaatggtcttgcagttt

SEQ ID NO: 229248 - DNA, 25 bp, Probe Sequence
gactgtgttgctgtaccttagctgt

SEQ ID NO: 229249 - DNA, 25 bp, Probe Sequence
gactgtgtttttgcacataatccat

SEQ ID NO: 229250 - DNA, 25 bp, Probe Sequence
gacggtttatgagcacacaattata

SEQ ID NO: 229251 - DNA, 25 bp, Probe Sequence
gactggcttaagagaccacaggcaa

SEQ ID NO: 229252 - DNA, 25 bp, Probe Sequence
gacggtctcaagaggtcaaaatcaa

SEQ ID NO: 229253 - DNA, 25 bp, Probe Sequence
gacgaacgctagagagccaaatatg

SEQ ID NO: 229254 - DNA, 25 bp, Probe Sequence
gacctaggcttgggagtcaaactgc

SEQ ID NO: 229255 - DNA, 25 bp, Probe Sequence
gacccagcgtcgggagcaaagggac

SEQ ID NO: 229256 - DNA, 25 bp, Probe Sequence
gaccgagcccgaggtgagaatggtg

SEQ ID NO: 229257 - DNA, 25 bp, Probe Sequence
gacccccaggggattcatgggaaat

SEQ ID NO: 229258 - DNA, 25 bp, Probe Sequence
gaccccgtgaggctcattaggggag

SEQ ID NO: 229259 - DNA, 25 bp, Probe Sequence
gaccccattcggattcttgtcaaga

SEQ ID NO: 229260 - DNA, 25 bp, Probe Sequence
gaccccattcggattcttgtcaaga

SEQ ID NO: 229261 - DNA, 25 bp, Probe Sequence
gaccccttattgattcattgtaata

SEQ ID NO: 229262 - DNA, 25 bp, Probe Sequence
gacccagatttaattttctgtggtt

SEQ ID NO: 229263 - DNA, 25 bp, Probe Sequence
gaccctgagcctctttatttggatt

SEQ ID NO: 229264 - DNA, 25 bp, Probe Sequence
gaccttggcctcagtgttatttact

SEQ ID NO: 229265 - DNA, 25 bp, Probe Sequence
gaccttggtcgtttttatactagca

SEQ ID NO: 229266 - DNA, 25 bp, Probe Sequence
gacctggggtttattatcactcaga

SEQ ID NO: 229267 - DNA, 25 bp, Probe Sequence
gacgtggagctggtcgtattacctc

SEQ ID NO: 229268 - DNA, 25 bp, Probe Sequence
gagcgtagcatacaggttaacctgc

SEQ ID NO: 229269 - DNA, 25 bp, Probe Sequence
gagcctagaatgatggttagacttg

SEQ ID NO: 229270 - DNA, 25 bp, Probe Sequence
gacctgcaacatgaggggaatctgc

SEQ ID NO: 229271 - DNA, 25 bp, Probe Sequence
gacctaacctaggagggctctgagc

SEQ ID NO: 229272 - DNA, 25 bp, Probe Sequence
gacccaggcccggagggaatgagga

SEQ ID NO: 229273 - DNA, 25 bp, Probe Sequence
gacccagacccagtggggaggcgga

SEQ ID NO: 229274 - DNA, 25 bp, Probe Sequence
gacgtcacccgctttgtgaaatgcc

SEQ ID NO: 229275 - DNA, 25 bp, Probe Sequence
gacgaaatgctccacctgtaagaac

SEQ ID NO: 229276 - DNA, 25 bp, Probe Sequence
gatctgaacctccaattaaaaaagc

SEQ ID NO: 229277 - DNA, 25 bp, Probe Sequence
gagcgagattctgtttcaaaaaacc

SEQ ID NO: 229278 - DNA, 25 bp, Probe Sequence
gacgagactctggatgttaaggaaa

SEQ ID NO: 229279 - DNA, 25 bp, Probe Sequence
gacggcacactctgtcagaagtgac

SEQ ID NO: 229280 - DNA, 25 bp, Probe Sequence
gagctggaatcctgtaaggagctgc

SEQ ID NO: 229281 - DNA, 25 bp, Probe Sequence
gactgtggctcctagtgatgtggac

SEQ ID NO: 229282 - DNA, 25 bp, Probe Sequence
gactgggctccttggtggatgagtt

SEQ ID NO: 229283 - DNA, 25 bp, Probe Sequence
gactgggccgttactgattgagcta

SEQ ID NO: 229284 - DNA, 25 bp, Probe Sequence
gactggggtttcggattgagttgca

SEQ ID NO: 229285 - DNA, 25 bp, Probe Sequence
gactggaagtttctgcattccttca

SEQ ID NO: 229286 - DNA, 25 bp, Probe Sequence
gactggatttttcatatttcttatt

SEQ ID NO: 229287 - DNA, 25 bp, Probe Sequence
gactggctgttttctctgaatgtct

SEQ ID NO: 229288 - DNA, 25 bp, Probe Sequence
gactggcattgttagctggggacat

SEQ ID NO: 229289 - DNA, 25 bp, Probe Sequence
gactggttgaaagtggccaatctct

SEQ ID NO: 229290 - DNA, 25 bp, Probe Sequence
gacggaacagatccggggactctct

SEQ ID NO: 229291 - DNA, 25 bp, Probe Sequence
gacggtcacagaccaggtgaactgc

SEQ ID NO: 229292 - DNA, 25 bp, Probe Sequence
gactgggacacaccacgagaatctc

SEQ ID NO: 229293 - DNA, 25 bp, Probe Sequence
gactggagtccagagcatcagacct

SEQ ID NO: 229294 - DNA, 25 bp, Probe Sequence
gactggaggccagccatcacaatca

SEQ ID NO: 229295 - DNA, 25 bp, Probe Sequence
gactggagggagagattcctgcact

SEQ ID NO: 229296 - DNA, 25 bp, Probe Sequence
gactggggagcaatatgttctgtga

SEQ ID NO: 229297 - DNA, 25 bp, Probe Sequence
gactggtggatgaatacaatgtgga

SEQ ID NO: 229298 - DNA, 25 bp, Probe Sequence
gactggcgataaatacaatgtggaa

SEQ ID NO: 229299 - DNA, 25 bp, Probe Sequence
gactggctgaattatggttggtata

SEQ ID NO: 229300 - DNA, 25 bp, Probe Sequence
gactgtggcacttatttctgggacc

SEQ ID NO: 229301 - DNA, 25 bp, Probe Sequence
gactgggtatggattgctgggccct

SEQ ID NO: 229302 - DNA, 25 bp, Probe Sequence
gactgggtatggattgctgggccct

SEQ ID NO: 229303 - DNA, 25 bp, Probe Sequence
gacgtggatgtttttcagtggcctt

SEQ ID NO: 229304 - DNA, 25 bp, Probe Sequence
gacgtgtggggatgatgcaggggtt

SEQ ID NO: 229305 - DNA, 25 bp, Probe Sequence
gactgtggaaggtgtgaggaggatc

SEQ ID NO: 229306 - DNA, 25 bp, Probe Sequence
gacgtggttggtgattggcaggatc

SEQ ID NO: 229307 - DNA, 25 bp, Probe Sequence
gacgttgtttgagatgtgtggtact

SEQ ID NO: 229308 - DNA, 25 bp, Probe Sequence
gacgttttatcaaattggagattca

SEQ ID NO: 229309 - DNA, 25 bp, Probe Sequence
gacgtttttgcttctgatgaaatgt

SEQ ID NO: 229310 - DNA, 25 bp, Probe Sequence
gacgttctgtgggcagtagccctgt

SEQ ID NO: 229311 - DNA, 25 bp, Probe Sequence
gacgttctgtgggcagtagccctgt

SEQ ID NO: 229312 - DNA, 25 bp, Probe Sequence
gacggtctcagacaatgagctccag

SEQ ID NO: 229313 - DNA, 25 bp, Probe Sequence
gacggttctagatctgagtaaatac

SEQ ID NO: 229314 - DNA, 25 bp, Probe Sequence
gaccagtccttgtggaataagattc

SEQ ID NO: 229315 - DNA, 25 bp, Probe Sequence
gaccgtcttcggtgaaaagctgctc

SEQ ID NO: 229316 - DNA, 25 bp, Probe Sequence
gaccccgtctggcaagaaatgcatt

SEQ ID NO: 229317 - DNA, 25 bp, Probe Sequence
gacggacgtcagggatagaagagat

SEQ ID NO: 229318 - DNA, 25 bp, Probe Sequence
gacggccagaacttggagaagagac

SEQ ID NO: 229319 - DNA, 25 bp, Probe Sequence
gagcggctgcaatgccttaacgaga

SEQ ID NO: 229320 - DNA, 25 bp, Probe Sequence
gacggccttgagtctcagtacgagt

SEQ ID NO: 229321 - DNA, 25 bp, Probe Sequence
gacccccaaatttgtcacagaattt

SEQ ID NO: 229322 - DNA, 25 bp, Probe Sequence
gaccccaaacttgtctaccatattg

SEQ ID NO: 229323 - DNA, 25 bp, Probe Sequence
gaccccaaaccttactggaatcaag

SEQ ID NO: 229324 - DNA, 25 bp, Probe Sequence
gacccccaaccttctgataaaagag

SEQ ID NO: 229325 - DNA, 25 bp, Probe Sequence
gaccctgaaacgtaatgtcaacaag

SEQ ID NO: 229326 - DNA, 25 bp, Probe Sequence
gaccgtggaacgagactcatacaca

SEQ ID NO: 229327 - DNA, 25 bp, Probe Sequence
gacctggacaaaaagaaatacctgg

SEQ ID NO: 229328 - DNA, 25 bp, Probe Sequence
gtacggtataagaccataacccagg

SEQ ID NO: 229329 - DNA, 25 bp, Probe Sequence
gagaagggataaccctacacccaga

SEQ ID NO: 229330 - DNA, 25 bp, Probe Sequence
gacgagggagagtccctgacagccc

SEQ ID NO: 229331 - DNA, 25 bp, Probe Sequence
gacgaagaagaggcgctgccgcact

SEQ ID NO: 229332 - DNA, 25 bp, Probe Sequence
gacggaaagggcatgatcagcatca

SEQ ID NO: 229333 - DNA, 25 bp, Probe Sequence
gacggcaaagtccagtgcacgccgc

SEQ ID NO: 229334 - DNA, 25 bp, Probe Sequence
gacgacgtgcagaaatggcacctcg

SEQ ID NO: 229335 - DNA, 25 bp, Probe Sequence
gacgtggacaataatgtgcacctgc

SEQ ID NO: 229336 - DNA, 25 bp, Probe Sequence
gacgtgaggctgagatgtctccatc

SEQ ID NO: 229337 - DNA, 25 bp, Probe Sequence
gacggcatatttatatctgcctgca

SEQ ID NO: 229338 - DNA, 25 bp, Probe Sequence
gacggcgatgttaattactctccag

SEQ ID NO: 229339 - DNA, 25 bp, Probe Sequence
gacccaggtcatgttaataccactc

SEQ ID NO: 229340 - DNA, 25 bp, Probe Sequence
gacgagagggctgtttccaaactgc

SEQ ID NO: 229341 - DNA, 25 bp, Probe Sequence
gacggagaggtactgaggacaaatc

SEQ ID NO: 229342 - DNA, 25 bp, Probe Sequence
gacggagcgagtgtggaacctgatc

SEQ ID NO: 229343 - DNA, 25 bp, Probe Sequence
gacggacagtgtggtggcaacattg

SEQ ID NO: 229344 - DNA, 25 bp, Probe Sequence
gactggatgcagcgtaggagatctc

SEQ ID NO: 229345 - DNA, 25 bp, Probe Sequence
gactggggctagggctaatctttga

SEQ ID NO: 229346 - DNA, 25 bp, Probe Sequence
gacgatagctgctagcttgctaatt

SEQ ID NO: 229347 - DNA, 25 bp, Probe Sequence
gacgtcgatgaactgatcttcatgc
